(19) United States
(12) Patent Application Publication
(10) Pub. No.: US 2022/0273711 A1
(43) Pub. Date: Sep. 1, 2022

(54) Ultraspecific Cell Targeting Using De Novo Designed Co-Localization Dependent Protein Switches

(71) Applicant: University of Washington, Seattle, WA (US)

(72) Inventors: Scott BOYKEN, Seattle, WA (US); Marc Joseph LAJOIE, Seattle, WA (US); Robert A. LANGAN, Seattle, WA (US); David BAKER, Seattle, WA (US); Jilliane Ruth BRUFFEY, Seattle, WA (US)

(21) Appl. No.: 17/609,972

(22) PCT Filed: May 18, 2020
(86) PCT No.: PCT/US2020/033429

§ 371 Date: Nov. 9, 2021

Related U.S. Application Data
(60) Provisional application No. 62/964,016, filed on Jan. 21, 2020.
(60) Provisional application No. 62/848,802, filed on May 16, 2019.

(51) Int. Cl. A61K 35/17; C12N 15/62; C07K 16/18

(52) U.S. Cl. CPC A61K 35/17; C07K 2319/00; C07K 16/18; C12N 15/62

(57) ABSTRACT

Disclosed am protein switches that can sequester bioactive peptides and/or binding domains, holding them in an inactive (“off”) state, until combined with a second designed polypeptide called die key, which induces a conformational change that activates (“on”) the bioactive peptide or binding domain only when the protein switch components are co-localized when bound to their targets, components of such protein switches, and their use.

### CROSS REFERENCE

[0001] This application claims priority to U.S. Provisional Patent Application Ser. No. 62/848,802 filed May 16, 2019 and 62/964,016 filed Jan. 21, 2020, each incorporated by reference herein in its entirety.

### FEDERAL FUNDING STATEMENT

[0002] This invention was made with government support under Grant No. CHE-1629214 awarded by the National Science Foundation, Grant No. HDTRA1-18-1-0001 awarded by the Defense Threat Reduction Agency, and Grant No. R01 CA114536 awarded by the National Institutes of Health. The government has certain rights in the invention.

### REFERENCE TO THE SEQUENCE LISTING SUBMITTED ELECTRONICALLY VIA EFS-WEB

[0003] This application contains a Sequence Listing submitted as an electronic text file named “19-851_PCT_Sequcnce-Listing_ST25.txt”, having a size in bytes of 32 MB, and created on May 14, 2020. The information contained in this electronic file is hereby incorporated by reference in its entirety pursuant to 37 CFR § 1.52(e)(5).

### BACKGROUND

[0004] Biology is adept at integrating multiple signals to control function; however, natural systems are highly evolved for specific functions that make them difficult to repurpose. Engineering systems that can integrate combinations of binding events and predictively respond remains an outstanding challenge. Such a system would be particularly useful for targeting cells based on recognition of a combination of surface makers: most mammalian cell types differ from other tissues only in the combinations of markers present on their surfaces.

### SUMMARY

[0005] In one aspect, the disclosure provides methods of increasing selectivity of a cell in vitro, ex vivo, or in vivo comprising

[0006] (a) contacting cells with a first cage polypeptide fused to a first binding domain, wherein the first cage polypeptide comprises (i) a structural region and (ii) a latch region further comprising one or more bioactive peptides, wherein the structural region interacts with the latch region to prevent activity of the one or more bioactive peptides in the absence colocalization with a key polypeptide and wherein the first binding domain is capable of binding to a first cell moiety present on or within a cell; and

[0007] (b) contacting the cell with a first key polypeptide fused to a second binding domain, wherein upon colocalization with the first cage polypeptide, the first key polypeptide is capable of binding to the cage structural region to activate the one or more bioactive peptides, wherein the second binding domain is capable of binding to a second cell moiety present on or within the cell,

[0008] wherein the first cell moiety and the second cell moiety are different or the same.

[0009] In another aspect, the disclosure provides methods of increasing selectivity of cells that are interacting with each other in vitro, ex vivo, or in vivo comprising:

[0010] (a) contacting two or more cells with a first cage polypeptide fused to a first binding domain, wherein the first cage polypeptide comprises (i) a structural region and (ii) a latch region further comprising one or more bioactive peptides, wherein the structural region interacts with the latch region to prevent activity of the one or more bioactive peptides in the absence of colocalization with a key polypeptide and wherein the first binding domain is capable of binding to a first cell moiety present on a synapse between the two or more cells; and

[0011] (b) contacting the to or more cells with a first key polypeptide fused to a second binding domain, wherein upon colocalization with the first cage polypeptide, the first key polypeptide is capable of binding to the cage structural region to activate the one or more bioactive peptides, wherein the second binding domain is capable of binding to a second cell moiety present on the synapse between the two or more cells,

[0012] wherein the first cell surface moiety and the second cell surface moiety are the same or different.

[0013] In a further aspect, the disclosure provides methods of targeting heterogeneous cells (more than two different cell types) in vitro, ex vivo, or in vivo, wherein a first cell moiety and a second cell moeity are present on the first cell and a first cell moiety and a third cell moiety are present on the second cell, comprising

[0014] (a) contacting two or more cells with a first cage polypeptide fused to a first binding domain, wherein the first cage polypeptide comprises (i) a structural region and (ii) a latch region further comprising one or more bioactive peptides, and wherein the structural region interacts with the latch region to prevent activity of the one or more bioactive peptides in the absence of colocalization with a key polypeptide and wherein the first binding domain is capable of binding to a first cell moiety present on or within the two or more cells;

[0015] (b) contacting the two or more cells with a first key polypeptide fused to a second binding domain, wherein upon colocalization, the first key polypeptide is capable of binding to the cage structural region to activate the one or more bioactive peptides and wherein the second binding domain is capable of binding to a second cell moiety present on a cell that also comprises the first cell moiety, and

[0016] (c) contacting the two or more cells with a second key polypeptide fused to a third binding domain, wherein upon colocalization, the second key polypeptide is capable of binding to the cage structural region to activate the one or more bioactive peptides and wherein the third binding domain is capable of binding to a third cell moiety present on a cell that comprises the first cell moiety,

[0017] wherein the first cell moiety, the second cell moiety, and the third cell moiety are different and the cell that comprises the second cell moiety and the cell that comprises the third cell moiety are different.

[0018] In one aspect, the disclosure provides methods of reducing off-target activity in vitro, ex vivo, or in vivo comprising

[0019] (a) contacting two or more cells with a first cage polypeptide fused to a first binding domain, wherein the first cage polypeptide comprises (i) a structural region and (ii) a latch region further comprising one or more bioactive peptides, and wherein the structural region interacts with the latch region to prevent activity of the one or more bioactive peptides in the absence of colocalization with a key polypeptide and wherein the first binding domain is capable of binding to a first cell moiety present on a cell;

[0020] (b) contacting the two or more cells with a first key polypeptide fused to a second binding domain, wherein upon colocalization, the first key polypeptide is capable of binding to the cage structural region to activate the one or more bioactive peptides and wherein the second binding domain is capable of binding to a second cell moiety present on a cell that also comprises the first cell moiety, and

[0021] (c) contacting the two or more cells with a decoy cage polypeptide fused to a third binding domain, wherein the decoy cage polypeptide comprises a decoy structural region, which upon colocalization with the key polypeptide and the first cage polypeptide, is capable of preferentially binding to the first key polypeptide and wherein the third binding domain is capable of binding to a third cell moiety present on a cell that comprises the first cell moiety and the second cell moiety.

[0022] In another aspect, the disclosure provides protein complexes comprising (i) a first cage polypeptide fused to a first binding domain and (ii) a first key polypeptide fused to a second binding domain, wherein the first cage polypeptide comprises (i) a structural region and (ii) a latch region further comprising one or more bioactive peptides, wherein the first key polypeptide binds to the cage structural region, wherein the one or more bioactive peptides are activated, and wherein the first binding domain binds to a first cell moiety present on or within a cell or on a synapse of two interacting cells and the second binding domain binds to a second cell moiety present on or within the cell or on a synapse of the two interacting cells, wherein the first cell moiety and the second cell moiety are different or the same.

[0023] In a further aspect, the disclosure provides protein complexes comprising (i) a first key polypeptide fused to a first binding domain and (ii) a decoy cage polypeptide fused to a second binding domain, wherein the first key polypeptide binds to the decoy cage polypeptide, and wherein the first binding domain binds to a first cell moiety present on or within a cell or on a synapse of two interacting cells and the second binding domain binds to a second cell moiety present on or within the cell or on a synapse of the two interacting cells, wherein the first cell moiety and the second cell moiety are different or the same.

[0024] In one aspect, the disclosure provides compositions comprising

[0025] (a) a first cage polypeptide fused to a first binding domain or a polynucleotide encoding the same, wherein the first cage polypeptide comprises (i) a structural region and (ii) a latch region further comprising one or more bioactive peptides, wherein the structural region interacts with the latch region to prevent activity of the one or more bioactive peptides in the absence of colocalization with a key polypeptide and wherein the first binding domain is capable of binding to a first cell moiety present on or within a cell; and

[0026] (b) a first key polypeptide fused to a second binding domain or a polynucleotide encoding the same, wherein upon colocalization with the first cage polypeptide, the first key polypeptide is capable of binding to the cage structural region to activate the one or more bioactive peptides, wherein the second binding domain is capable of binding to a second cell moiety present on or within the cell,

[0027] wherein the first cell moiety and the second cell moiety are different or the same.

[0028] In another aspect, the disclosure provides compositions comprising

[0029] (a) a first cage polypeptide comprising (i) a structural region, (ii) a latch region further comprising one or more bioactive peptides, and (iii) a first binding domain wherein the structural region interacts with the latch region to prevent activity of the one or more bioactive peptides;

[0030] (b) a first key polypeptide capable of binding to the cage structural region to activate the one or more bioactive peptides, wherein the key polypeptide comprises a second binding domain,

[0031] wherein the first binding domain and the second binding domain bind to (i) different moieties on the surface of the same cell, (ii) the same moiety on the surface of the same cell, (iii) different moieties at the synapse between two cells that are in contact, or (iv) the same moiety at the synapse between two cells that are in contact; and

[0032] (c) optionally, one or more effector(s) that bind to the one or more bioactive peptides when the one or more bioactive peptides are activated.

[0033] In a further aspect, the disclosure provides compositions comprising

[0034] (a) one or more expression vectors encoding and/or cells expressing:
[0035] (i) a first cage polypeptide comprising (i) a structural region, (ii) a latch region further comprising one or more bioactive peptides, and (iii) a first binding domain wherein the structural region interacts with the latch region to prevent activity of the one or more bioactive peptides; and
[0036] (ii) a first key polypeptide capable of binding to the cage structural region to activate the one or wore bioactive peptides, wherein the key polypeptide comprises a second binding domain,

[0037] wherein the first binding domain and the second binding domain bind to (i) different moieties on the surface of the same cell, (ii) the same moiety on the surface of the same cell, (iii) different moieties at the synapse between two cells that are in contact, or (iv) the same moiety at the synapse between two cells that are in contact; and

[0038] (b) optionally, one or more effector(s) that bind to the one or more bioactive peptides when the one or more bioactive peptides are activated, and/or one or more nucleic acids encoding the one or more effectors.

[0039] In one aspect, the disclosure provides methods for cell targeting, comprising

[0040] (a) contacting a biological sample containing cells with
[0041] (i) a cage polypeptide comprising (i) a structural region, (ii) a latch region further comprising one or more bioactive peptides, and (iii) a first binding domain that targets a cell of interest, wherein the structural region interacts with the latch region to prevent activity of the one or more bioactive peptides; and
[0042] (ii) a key polypeptide comprising a second binding domain that targets the cell of interest, wherein the first binding domain and the second binding domain bind to (i) different moieties on the surface of the same cell, (ii) the same moiety on the surface of the same cell, (iii) different moieties at the synapse between two cells that are in contact, or (iv) the same moiety at the synapse between two cells that are in contact;

[0043] wherein the contacting occurs for a time and under conditions to promote binding of the cage polypeptide and the key polypeptide to the cell of interest, and to promote binding of the key polypeptide to the cage structural region to displace the latch region and activate the one or more bioactive peptides only when the cage polypeptide and the key polypeptide are co-localized to the cell of interest;

[0044] (b) contacting the biological sample with one or more effector(s) under conditions to promote binding of the one or more effectors to the one or more activated bioactive peptides to produce an effector-bioactive peptide complex; and

[0045] (c) optionally detecting the effector-bioactive peptide complex, wherein the effector-bioactive peptide complex provides a measure of the cell of interest in the biological sample.

[0046] In another aspect, the disclosure provides non-naturally occurring polypeptide comprising:

[0047] (a) a helical bundle, comprising between 2 and 7 alpha-helices; and

[0048] (b) one or more binding domain;

[0049] wherein the helical bundle and the one or more binding domain are not both present in a naturally occurring polypeptide.

[0050] In a further aspect, the disclosure provides non-naturally occurring polypeptide comprising

[0051] (a) a polypeptide comprising an amino acid sequence at least 40%, 45%, 50%, 55%, 60%, 65%, 70%, 75%, 80%, 85%, 90%, 91%, 92%, 93%, 94%, 95%, 96%, 97%, 98%, 99%, or 100% identical to the amino acid sequence of a cage polypeptide disclosed herein, or selected from the group consisting of SEQ ID NOS: 27359-27392, 1-49, 31-52, 54-59, 61, 65, 67-14317, 27094-27117, 27120-27125, 27278 to 27321 not including optional amino acid residues; or cage polypeptides listed in Table 7, Table 8, or Table 9, wherein the N-terminal and/or C-terminal 60 amino acids of the polypeptides are optional, and

[0052] (b) one or more binding domains.

[0053] In one aspect, the disclosure provides non-naturally occurring polypeptides comprising

[0054] (a) a polypeptide comprising an amino acid sequence at least 40%, 4%, 50%, 55%, 60%, 65%, 70%, 75%, 80%, 85%, 90%, 91%, 92%, 93%, 94%, 95%, 96%, 97%, 98%, 99%, or 100% identical to the amino acid sequence of a cage polypeptide disclosed herein, or selected from the group consisting of SEQ ID NOS: 27359-27392, SEQ ID NOS: 1-49, 51-52, 54-59, 61, 65, 67-14317, 27094-27117, 27120-27125, 27,278 to 27,321, not including amino acid residues in the latch region; and

[0055] (b) one or more binding domains.

[0056] In one aspect, the disclosure provides non-naturally occurring polypeptides, comprising an amino acid sequence at least 70%, 75%, 80%, 85%, 90%, 91%, 92%, 93%, 94%, 93%, 96%, 97%, 98%, 99%, or 100% identical to the amino acid sequence selected from the group consisting of SEQ ID NOS: 27359-27392, including optional amino acid residues; or 70%, 75%, 80%, 85%, 90%, 91%, 92%, 93%, 94%, 95%, 96%, 97%, 98%, 99%, or 100% identical to the amino acid sequence selected from the group consisting of SEQ ID NOS: 27393-27398, including optional amino acid residues.

### DESCRIPTION OF THE FIGURES

[0057] FIG. 1a-g. A de novo designed protein switch performs AND logic on the cell surface. a. The ability to compute logic operations on the surface of cells could increase targeting selectivity, provide flexibility for heterogeneous tissue, and avoid healthy tissue. b. Structure of new Cage design used to create Co-LOCKR; the x-ray crystal structure (white) matches the computational design model (green) with 1.1 Å RMSD across all backbone atoms. Cross-sections illustrate asymmetric packing of hydrophobic residues (red square) and an asymmetric hydrogen bond network (blue square). c. Schematic of colocalization-dependent protein switches tuned such that Cage and Key do not interact in solution but strongly interact when colocalized on a surface. Co-LOCKR subunits bind to a surface via a targeting domain, d. Flow cytometry discriminates Her2⁺/EGFR⁺ cells in a mixed population of K562 cells expressing Her2-eGFP, EGFR-iRFP, both, or neither. e. Schematic depicting ‘AND’ logic in which recruitment of an Effector protein occurs when Cage and Key are colocalized on the surface of the same cell. f. The mixed population of K562 cells from FIG. 1c was incubated with 111 nM Her2-targeted Cage, 111 nM EGFR-targeted Key, and 50 nM Bcl2-AF594. Bcl2 binding was only observed for the K562/Her2/EGFR cells. g. The mixed population of K562 cells from FIG. 1c was incubated with a dilution series of Her2-targeted Cage and EGFR-targeted Key. In addition, 50 nM Bcl2-AF594 was either co-incubated with Co-LOCKR (solid lines) or added after washing the cells (dashed lines). The gray shaded region of the plot represents colocalization-independent activation in which excess amounts of Cage and Key outcompete Cage-Key-Bcl2 complexes (formed in solution) from binding to the target cells. Bcl2 binding is reported relative to K562 cells incubated with 3000 nM Her2-targeted Cage, 3000 nM EGFR-targeted Key, and 50 nM Bcl2-AF394.

[0058] FIG. 2a-d. Tuning Co-LOCKR sensitivity. a. Design model of Co-LOCKR with the Bim functional peptide in yellow. Three buried hydrophobic amino acids were mutated to either Ala or Ser to weaken the Cage-Latch affinity, thereby favoring Cage-Key binding. b. Tuned Co-LOCKR variants exhibit greater colocalization-dependent activation than the unmutated parental variant. CL_C_{H}K_{E} variants recruiting Bcl2-AF594 were evaluated by flow cytometry using the mixed population of K562 cells from FIG. 1c. The data shown represent 123 nM CL_C_{H}K_{E}, and FIG. 8c shows the complete dilution series for each variant. c. Confocal microscopy of HEK293T cell lines shows that Co-LOCKR switches recruit Bcl2-AF680 Effector proteins only where Her2 and EGFR are colocalized. Each cell line was incubated with CL_C_{H}K_{E} (I269S Cage) and Bcl2-AF680 before imaging. NucBlue™ is a nuclear stain, eGFP indicates Her2 localization, mCherry™ indicates EGFR localization, AF680 indicates Bcl2 binding in response to Co-LOCKR activation, and white indicates the intersection of Her2-eGFP and EGFR-mCherry™ signal. Scale bars are 10 μm. Uncropped versions of these images am included in FIG. 15a-c. d. Heat map showing the intensity of AF680 signal (Co-LOCKR activation) versus eGFP (Her2) and mCherry™ (EGFR) pixel intensity. Calculations were based on the uncropped 293T/Her2/EGFR image in FIG. 15a.

[0059] FIG. 3a-d. Co-LOCKR performs 2- and 3-input logic operations in mixed cell populations. a. Co-LOCKR was used to recruit Bcl2-AF594 for two populations of K562 cells expressing different combinations of Her2, EGFR, and EpCAM. Marker expression for each cell line and identity of the Cage and Key targeting domains are indicated below each bar plot. Red highlighting indicates the expected magnitude of Bcl2-AF594 signal based on relative antigen expression. b. Schematic of [Her2 AND either EGFR OR EpCAM] logic mechanism, e. [Ag₁ AND either Ag₂ OR Ag₃] logic combinations were used to recruit Bcl2-AF594. d. Schematic of [Her2 AND EpCAM NOT EGFR] logic mechanism. The Decoy acts as a sponge to sequester the Key, thereby preventing Cage activation. e. CL_C_{H}K_{Ep}D_{E} was used to recruit Bcl2-AF594. The parental Cage (left) was compared to the I287A Cage (right). The magnitude of signal for CL_C_{H}K_{Ep}D_{E} is reduced compared to the CL_C_{H}K_{Ep} likely because the Decoy competes for Key binding in solution; however, adequate signal remains to compute [Her2 AND EpCAM NOT EGFR] logic. For all panels, population 1 was [K562/EpCAM^{lo}, K562/EGFR/EpCAM^{lo}, K562/EpCAM^{lo}/Her2, and K562/EGFR/EpCAM^{lo}/Her2], and population 2 was [K562/EpCAM^{lo}, K562/EGFR/EpCAM^{lo}, K562/EpCAM^{hi}, Her2, and K562/EGFR/EpCAM^{hi}/Her2]. Error bars represent SEM of 6 independent replicates for K562 and K562/EGFR and 3 independent replicates for all others.

[0060] FIG. 4a-c. Computational design of Co-LOCKR. a. Overview of how LOCKRa was designed in Langan et al. (9). An existing homotrimer (10) was connected into a single polypeptide chain, and the Cage/Latch interface was tuned so that Key binding would induce activation. b. Computational design of Co-LOCKR. All side chains were removed from the LOCKRa backbone except for the residues involved in the existing hydrogen bond networks and the Cage-Latch interface. A new Rosetta design run searched for asymmetric hydrogen bond networks and then asymmetrically designed the core and surface residues. The resulting helical bundle was shortened so as to reduce aggregation, and the Cage-Latch and Cage-Key interfaces were tuned to achieve colocalization dependence. Decoys were created by redesigning the Co-LOCKR Cage to remove the Bim functional peptide and tuning their affinity for the Key. c. Cross-sections of LOCKRa and Co-LOCKR showing core redesign to replace C3 symmetric hydrophobic packing with a new hydrogen bond network (left) or asymmetric hydrophobic packing (right). d. LOCKRa and Co-LOCKR share 60.8% sequence identity (pairwise sequence identity performed using Geneious software, global alignment with free end gaps).

[0061] FIG. 5. Redesign of LOCKR Cage reduces aggregation. The Langan et al. (9) LOCKRa Cage and asymLOCKR (top) and three new variants of the Co-LOCKR Cage (bottom) with 0, 7, or 10 residues deleted from the C-terminus of their latch were evaluated by Size Exclusion Chromatography using a Superdex™ 75 Increase 10/300 GL column (GE).

[0062] FIG. 6a-c. The Co-LOCKR system is controlled by a thermodynamic mechanism based on reversible protein-protein interactions. Co-localizing Cage and Key on the same surface results in a large increase in local concentration, shifting the binding equilibrium. According to the thermodynamic mechanism, a complex can form in solution (a) or on a surface (b). Our flow cytometry data shows that any pre-complexed Co-LOCKR that occurs in solution does not lead to appreciable staining of single-antigen target cells. c. Colocalization shifts the response curve to the left so that activation can occur at lower concentrations of Co-LOCKR proteins.

[0063] FIG. 7a-b The strengths of Cages and Decoys can be tuned by modulating the Cage-Latch, Cage-Key, Decoy-Latch, and Decoy-Key interfaces. Residues involved in the Cage-Latch and Cage-Key interface are colored orange. Bim is shown in magenta. We rationally reduced the affinity of these interfaces by replacing large hydrophobic amino acids with small hydrobophic amino acids or serine. a. Side view of the Cage in an ‘off’ conformation. b. Side view of the Key. c. Cross-section of the Cage in an ‘off’ conformation.

[0064] FIG. 8a-e. Mutations in the Cage-Latch interface can predictably tune the sensitivity of Co-LOCKR switches. a. Design model of Co-LOCKR with the Bim functional peptide in yellow. Three buried hydrophobic amino acids were mutated to either Ala or Ser to weaken the Cage-Latch affinity, thereby favoring Cage-Key binding. This panel is reproduced from FIG. 2a. b. Colocalization-independent activation was evaluated using biolayer interferometry (Octet). A dilution series of CL_C_{H}K_{E} was evaluated for binding to biotinylated Bcl2 immobilized on a streptavidin Octet tip. More disruptive mutations increased the sensitivity of the switch. c. Tuned Co-LOCKR variants exhibit greater colocalization-dependent activation sensitivity and responsiveness than the parental Co-LOCKR variant. Dilution series of CL_C_{H}K_{E} variants were evaluated by flow cytometry using the mixed population of K562 cells from FIG. 1c. Bcl2-AF594 was recruited to K562/Her2/EGFR cells (solid lines), with minimal binding to K562, K562/Her2, and K562/EGFR cells (dotted lines represent maximum off-target binding signal). More disruptive mutations increased the sensitivity of the switch, and the I269S variant exhibited the greatest switch activation. On-target binding peaked at ˜37 nM for the parental variant and ˜12 nM for the mutated variants. d. Switch activation of the I269S variant was enhanced for low CL_C_{H}K_{E} concentrations by incubating cells in larger volumes prior to flow cytometry. e. On-target but not off-target switch activation increased when 2 nM of the CL_C_{H}K_{E} I269S variant was incubated with target cells in larger incubation volumes.

[0065] FIG. 9a-c. Co-LOCKR variants were evaluated for colocalization-dependent activation in a mixed population of K562 cells expressing Her2-eGFP, EGFR-iRFP, both, or neither. Co-LOCKR Cage variants and Keys were mixed, serially diluted, and evaluated for on-target activation (a), off-target activation (b), and specificity (on-target/max off-target, c) as measured by Bcl2-AF594 binding. Variant I269S had the highest on-target activation, the parental Cage had the lowest off-target activation, and variant I287A had the best fold targeting specificity. On-target binding peaked at ˜37 nM Cage and Key for the parental variant and ˜12 nM Cage and Key for the tuned variants. Each bar represents a single data point.

[0066] FIG. 10a-b. Expression levels of EGFR, EpCAM, and Her2 on K562 and Raji tuner cells. Flow cytometric analysis of EGFR (red), EpCAM (blue), and Her2 (green) expression on the indicated K562 (a) or Raji (b) cell lines. All antibodies were used in the PE channel to permit quantitation of the number of surface molecules using Quantibrite beads.

[0067] FIG. 11la-c. Co-LOCKR ‘AND’ logic distinguishes cancer cell lines based on their combinations of surface antigens. a. Targeting domains directly fused to Bim were used to measure relative expression of Her2, EGFR, and EpCAM based on Bcl2-AF594. b. Co-LOCKR distinguished A431 (Her2^{low}/GFR^{high}/EpCAMP^{low}) and SKBR3 (Her2^{high}/EGFR^{low}/EpCAM^{low}) based on their endogenous levels of antigen expression. K562/Her2/EGFR/EpCAM^{KO} cells were used as a specificity control. Co-LOCKR activation was measured by Bcl2-AF594 recruitment. c. Consistent with a stoichiometric mechanism of activation, Co-LOCKR signal is limited by amount of lesser-expressed surface antigen. Furthermore, activation signal is higher when one of the antigens is expressed at high levels compared to when both antigens are expressed at low levels. This suggests that Co-LOCKR can act as a thresholding gate to avoid cells with low antigen expression. Indeed, this may account for the preferential targeting of K562 cells expressing high levels of EpCAM in FIG. 3a. The vertical axis is Bcl2-AF594 recruitment by Co-LOCKR, and the horizontal axis is Bcl2-AF594 recruitment by Bim-DARPin targeted to the lesser-expressed antigen in the logical operation.

[0068] FIG. 12. Using sFvs for Co-LOCKR targeting in a mixed population of K562 cells expressing Her2-eGFP, EGFR-iRFP, both, or neither. Cage_I269S targeted against Her2 via a Anti-Her2 scFv was combined with Key targeted against EGFR via an anti-EGFR scFv. This mixture was serially diluted and evaluated for the ability to specifically target K562 cells co-expressing Her2 and EGFR as measured by Bcl2-AF594 binding. The solid line was unwashed, and the dashed line was washed within 30 minutes of analysis.

[0069] FIG. 13a-b. Tuning Cage and Decoy variants to perform [Her2 AND EpCAM NOT EGFR] logic. a. Cages with strong Cage-Latch interfaces exhibit weak ‘AND’ activation and tight ‘NOT’ deactivation, whereas cages with weak Cage-Latch interfaces exhibit strong ‘AND’ activation and leaky ‘NOT’ deactivation. These results show that Cage activity can be tuned for a desired biological function. For example, variants I287A, I287S, and I269S exhibit greater sensitivity for (Her2 AND EpCAM^{low} while minimally compromising leakiness in the presence of EGFR, whereas the parental Cage exhibits better deactivation for [Her2 AND EpCAM^{low} NOT EGFR]. b. Decoys can be tuned to reduce the leakiness of ‘NOT’ deactivation. Decoy variants with destabilizing mutations or truncations to weaken the latch were evaluated for the ability to perform [Her2 AND EpCAM NOT EGFR] logic on a mixed population of cells: K562/EpCAM^{low} (gray). K562/EGFR/EpCAM**(yellow), K562/Her2/EpCAM^{high} (purple), and K562/Her2/EpCAM^{low}/EGFR (brown). The strongest Decoys (e.g., G24) exhibit minimal leakiness, but reduce targeting of K562/Her2/EpCAM^{high}, likely due co-localization-independent Key binding; the weakest Decoys (e.g., Box1C1) exhibit the highest targeting of K562/Her2/EpCAM^{high} along with substantial leakiness on K562/Her2/EpCAM^{high}/EGFR. Each bar represents n=1 sample.

[0070] FIG. 14a-d. Tuning Cage and Decoy variants to perform [Her2 AND EpCAM NOT EGFR] logic. Different Key and Cage concentrations were tested against 0 nM, 5 nM, or 20 nM of either EGFR_Decoy1 or EGFR_Decoy_G31. The purple “On-target” line corresponds to the desired AND signal for K562/EpCAM^{hi}/Her2 in the absence of Decoy, and the brown “Off-target” line corresponds to the undesired AND signal for K562/EGFR/EpCAM^{hi}/Her2 that the Decoy most abrogate. Using 5 nM EGFR_Decoy_G31 as the NOT gate enhances on-target binding signal, while minimally increasing undesired targeting of K562/EGFR/EpCAM^{hi}/Her2. These results are consistent with the hypothesis that Decoy-Key binding in solution should be minimized to preserve Co-LOCKR signal. a. 5 nM Key_EpCAM, 5 nM Her2_Cage. b. 5 nM Key_EpCAM, 5 nM Her2_Cage_I287A. c. 20 nM Key_EpCAM, 20 nM Her2_Cage. The original condition described in FIG. 3e is annotated. d. 20 nM Key_EpCAM 20 nM Her2_Cage_I287A.

[0071] FIG. 15a-r. Uncropped confocal microscopy images of Co-LOCKR targeting HEK293T cells expressing Her2 and EGFR. a. The uncropped 293T/Her2/EGFR image used to generate FIG. 2c-d (green is Her2-eGPP, red is EGFR-mCherry, blue is Bcl2-AF680). b. The uncropped 293T/Her2/EGFR image pseudocolored as in FIG. 2c (white is the intersection of Her2-eGFP and EGFR-mCherry™, blue is NucBlue™, and magenta is Bcl2-AF680). The scale bar for the top panel is 20 μm and for the bottom panel is 10 μm. c. The uncropped images of all cell lines and staining conditions evaluated by confocal microscopy. The scale bars are 20 μm.

[0072] FIG. 16. DARPin binder affinity measured by flow cytometry. Anti-Her2 or anti-EGFR DARPins with N-terminal fusions to Bim were pre-complexed with Bcl2-AF594 and serially diluted 3-fold from 300 nM down to 0.4 nM. This dilution series was used to label a mixed population of K562 cells expressing Her2-eGFP, EGFR-iRFP, both, or neither for one hour at room temperature in a 50 μl incubation volume. The cells were then washed in PBS supplemented with 0.1% bovine serum albumin and analyzed on an LSRII flow cytometer. The apparent Kd of the DARPins was roughly 10 nM, consistent with the hypothesis Co-LOCKR activation is limited by DARPin binding affinity.

### DETAILED DESCRIPTION

[0073] As described herein, the polypeptides and compositions described herein can be used to create “protein switches”, wherein the cage polypeptide and the key polypeptide comprise binding domains that bind to different targets, and the key polypeptide binds to the cage polypeptide and triggers activation of the bioactive peptide only when the different targets are closely associated so that the cage and key polypeptides are co-localized while bound to their targets.

[0074] Targeting specificity has been a long-standing problem in biomedicine. Despite the long-standing goal to target therapeutic agents against specific cell types, general solutions for targeting precise combinations of antigens that unambiguously identify the desired cell type are lacking. Natural systems capable of multiple-input integration are hard-coded to specific biological outputs that are difficult to modularly reassign. The methods, compositions, and polypeptides disclosed herein are modular because they comprised of de novo designed polypeptides that integrate the co-localization of two target antigens so as to conditionally expose a bioactive peptide that can recruit arbitrary effector functions. Before this work, it was not possible to produce a system that can integrate the co-localization of two or more antigens on the surface of a target cell so as to conditionally expose a bioactive peptide that can modularly recruit arbitrary effector functions. Furthermore, it was not previously possible to design such de now proteins that can sequester a bioactive peptide in an inactive confirmation until they are co-localized. Finally, it was not previously possible to tune the sensitivity of a protein actuator to recruit the appropriate amount of effector(s). The methods may comprise use of the polypeptides, nucleic acids, vectors, cells, and/or compositions of any embodiment or combination of embodiments disclosed herein. In various embodiments, the method comprises the use of AND, OR, and/or NOT logic gates, using any embodiment or combination of embodiments as described in detail above and in the examples.

### I. Definitions

[0075] All references cited are herein incorporated by reference in their entirety. As used herein, the singular forms “a”, “an” and “the” include plural referents unless the context clearly dictates otherwise.

[0076] As used herein, the amino acid residues are abbreviated as follows: alanine (Ala; A), asparagine (Asn; N), aspartic acid (Asp; D), arginine (Arg; R), cysteine (Cys; C) glutamic acid (Glu; E), glutamine (Gin; Q), glycine (Gly; G), histidine (His; H), isoleucine (Ile; I), leucine (Len; L), lysine (Lys; K), methionine (Met; M), phenylalanine (Phe; F), proline (Pro; P), serine (Ser; S), threonine (Thr; T), tryptophan (Trp; W), tyrosine (Tyr; Y), and valine (Val; V).

[0077] All embodiments of any aspect of the disclosure can be used in combination, unless the context clearly dictates otherwise.

[0078] The description of embodiments of the disclosure is not intended to be exhaustive or to limit the disclosure to the precise form disclosed. While the specific embodiments of, and examples for, the disclosure are described herein for illustrative purposes, various equivalent modifications are possible within the scope of the disclosure, as those skilled in the relevant art will recognize.

[0079] The polypeptides are “non-naturally occurring” in that the entire polypeptide is not found in any naturally occurring polypeptide. It will be understood that components of the polypeptide may be naturally occurring, including but not limited to bioactive peptides that may be included in some embodiments.

[0080] The cage polypeptides comprise a helical bundle comprising between 2 and 7 alpha-helices. In various embodiments, the helical bundle comprises 3-7, 4-7, 5-7, 6-7, 2-6, 3-6, 4-6, 5-6, 2-5, 3-5, 4-5, 2-4, 3-4, 2-3, 2, 3, 4, 5, 6, or 7 alpha helices.

[0081] Design of the helical bundle cage polypeptides of the disclosure may be carried out by any suitable means. In one non-limiting embodiment, a BundleGridSampler™ in the Rosetta™ program may be used to generate backbone geometry based on the Crick expression for a coiled-coil and allows efficient, parallel sampling of a regular grid of coiled-coil expression parameter values, which correspond to a continuum of peptide backbone conformations. This may be supplemented by design for hydrogen bond networks using any suitable means, followed by Rosetta™ sidechain design. In a further non-limiting embodiment, best scoring designs, based on total score, number of unsatisfied hydrogen bonds, and lack of voids in the core of the protein may be selected for helical bundle cage polypeptide design.

[0082] Each alpha helix may be of any suitable length and amino acid composition as appropriate for an intended use. In one embodiment, each helix is independently 18 to 60 amino acids in length. In various embodiments, each helix is independently between 18-60, 18-55, 18-50, 18-45, 22-60, 22-55, 22-50, 22-45, 25-60, 25-55, 25-50, 25-45, 28-60, 28-55, 28-50, 28-45, 32-60, 32-55, 32-50, 32-45, 35-61, 35-55, 35-50, 35-45, 35-60, 38-55, 38-50, 38-45, 40-60, 40-58, 40-55, 40-50, or 40-45 amino acids in length.

[0083] In some aspects, a polypeptide disclosed herein comprises a linker. In some aspects, the linker comprises one or more amino acids, e.g., an amino acid linker or a peptide linker. In some aspects, the linker connects a first alpha helix to a second alpha helix. The amino acid linkers connecting each alpha helix can be of any suitable length or amino acid composition as appropriate for an intended use. In one non-limiting embodiment, each amino acid linker is independently between 2 and 10 amino acids in length, not including any further functional sequences that may be fused to the linker. In various non-limiting embodiments each amino acid linker is independently 3-10, 4-10, 5-10, 6-10, 7-10, 8-10, 9-10, 2-9, 3-9, 4-9, 5-9, 6-9, 7-9, 8-9, 2-8, 3-8, 5-8, 6-8, 7-8, 2-7, 3-7, 4-7, 5-7, 6-7, 2-6, 3-6, 4-6, 5-6, 2-5, 3-5, 4-5, 2-4, 3-4, 2-3, 2, 3, 4, 5, 6, 7, 8, 9, or 10 amino acids in length. In all embodiments, the linkers may be structured or flexible (e.g. poly-GS). These linkers may encode further functional sequences, including but not limited to protease cleavage sites or one half of a split intein system (see sequences below).

[0084] The one or more binding domains may be any polypeptide binding domain suitable for an intended use. In one embodiment, the one or more of the binding domains comprise cell surface protein binding polypeptides. In another embodiment, the helical bundle is linked to the one or more binding domains by any suitable linker polypeptide linker or non-polypeptide linker. In one embodiment, the helical bundle is linked to the one or more binding domains by any suitable polypeptide linker, including but not limited to linkers between helical domains described above.

[0085] In some aspects, one or more of the cage polypeptides and the key polypeptides further comprises a linker connecting the cage or key polypeptide and the one or more binding domains. In some aspects, the cage polypeptide comprises a linker connecting the cage polypeptide to the binding domain. In some aspects, the key polypeptide comprises a linker connecting the key polypeptide to the binding domain. Any linker known in the art may be used. In some aspects, the linker comprises one or more amino acids. In some aspects, the linker is cleavable. In some aspect, the linker is any linker disclosed herein. Additional embodiments of the one or more binding domains are described in more detail below.

[0086] The polypeptides of this first aspect include a region, termed the “latch region”, which may be used for insertion of a bioactive peptide. The cage polypeptide thus comprises a latch region and a structural region (i.e.: the remainder of the cage polypeptide that is not the latch region). When the latch region is modified to include one or more bioactive peptides, the structural region of the cage polypeptide interacts with the latch region to prevent activity of the bioactive peptide. Upon activation by key polypeptide after the cage and key polypeptides are co-localized while the binding domains are bound to their targets (as described below), the latch region dissociates from its interaction with the structural region to expose the bioactive peptide, allowing the peptide to function. As used herein, a “bioactive peptide” is any peptide of any length or amino acid composition that is capable of selectively binding to a defined target (i.e.: capable of binding to an “effector” polypeptide). Such bioactive peptides may comprise peptides of all three types of secondary structure in an inactive conformation; alpha helix beta strand, and loop. The polypeptides of this aspect can be used to control the activity of a wide range of functional peptides. The ability to harness these biological functions with tight, inducible control is useful, for example, in engineering cells (inducible activation of function, engineering complex logic behavior and circuits, etc.), developing sensors, developing inducible protein-based therapeutics, and creating new biomaterials. Additional details of the bioactive peptides are described below.

[0087] The latch region may be present near either terminus of the cage polypeptide. In one embodiment, the latch region is placed at the C-terminal helix so as to position the bioactive peptide for maximum burial of the functional residues that need to be sequestered to maintain the bioactive peptide in an inactive state while simultaneously burying hydrophobic residues and promoting solvent exposure/compensatory hydrogen bonds of polar residues. In various embodiments, the latch region may comprise a pan or all of a single alpha helix in the cage polypeptide at the N-terminal or C-terminal portions. In various other embodiments, the latch region may comprise a pan or all of a first, second, third, fourth, fifth, sixth, or seventh alpha helix in the cage polypeptide. In other embodiments, the latch region may comprise all or part of two or more different alpha helices in the cage polypeptide; for example, a C-terminal part of one alpha helix and an N-terminal portion of the next alpha helix, all of two consecutive alpha helices, etc.

[0088] As used herein, a “synapse” is a junction between two interacting cells, typically involving protein-protein contacts across the junction. An immunological synapse is the interface between an antigen-presenting cell or target cell and a lymphocyte such as a T/B cell or Natural Killer cell. A neuronal synapse is a junction between two nerve cells, consisting of a minute gap across which impulses pass by diffusion of a neurotransmitter. This embodiment is particularly useful, for example, when detecting cells that are in contact with each other, but not cells that are not. For example, one could identify only T cells that are interacting with a specified target cell but avoid all non-interacting T cells.

[0089] As used throughout the present application, the term “polypeptide” is used in its broadest sense to refer to a sequence of subunit amino acids. The polypeptides of the invention may comprise L-amino acids+glycine, D-amino acids+glycine (which are resistant to L-amino acid-specific proteases in vivo), or a combination of D- and L-amino acids+glycine. The polypeptides described herein may be chemically synthesized or recombinantly expressed. The polypeptides may be linked to other compounds to promote an increased half-life in vivo, such as by PEGylation, HESylation, PASylation, glycosylation, or may be produced as an Fc-fusion or in deimmunized variants. Such linkage can be covalent or non-covalent as is understood by those of skill in the art.

[0090] An “effector” is any molecule, nucleic acid, protein, nucleoprotein complex, or cell that carries out a biological activity upon interaction with the bioactive peptide. Exemplary biological activities can include binding, recruitment of fluorophores, recruitment of toxins, recruitment of immunomodulators, proteolysis, enzymatic activity, release of signaling proteins (e.g., cytokines, chemokine), induction of cell death, induction of cell differentiation, nuclear import/export, ubiquitination, and fluorophore/chromophore maturation.

### II. Compositions of the Disclosure

[0091] The present disclosure is directed to a switch system that can improve a target cell specificity in vitro, in vivo, or ex vivo. In particular, the system can be within a tissue, between cells, in a synapse of cells, or within a cell in which an increased target specificity is needed. In some aspects, the present composition is capable of increasing selectivity of a cell for a therapy. In some aspects, the composition of the present disclosure is capable of increasing selectivity of cells that are interacting with each other for a therapy. In some aspects, the present composition is capable of targeting heterogeneous cells (more than two different cell types) for a therapy, wherein a first cell moiety and a second cell moeity are present on the first cell and a first cell moiety and a third cell moiety are present on the second cell. In some aspects, the composition is also capable of reducing off-target activity for a therapy. Therefore, in some aspects, the present composition can prepare a subject in need of a therapy so that the subject can respond better to the therapy, the efficacy of the therapy is increased, and/or a toxicity due to non-specific binding (or leakiness) is reduced.

[0092] Ag1 AND Ag2

[0093] In some aspects, the present disclosure is capable of increasing selectivity of a cell that comprises at least two different cell markers (moieties Ag1 AND Ag2). By targeting cells that express two different moieties, cells that comprises only one of the moieties (Ag1 OR Ag2) can be de-selected. In some aspects, the composition comprises:

[0094] (a) a first cage polypeptide fused to a first binding domain, wherein the first cage polypeptide comprises (i) a structural region and (ii) a latch region further comprising one or more bioactive peptides, wherein the structural region interacts with the latch region to prevent activity of the one or more bioactive peptides in the absence of colocalization with a key polypeptide and wherein the first binding domain is capable of binding to a first cell moiety present on or within a cell; and

[0095] (b) a first key polypeptide fused to a second binding domain, wherein upon colocalization with the first cage polypeptide, the first key polypeptide is capable of binding to the cage structural region to activate the one or more bioactive peptides, wherein the second binding domain is capable of binding to a second cell moiety present on or within the cell,

[0096] wherein the first cell moiety and the second cell moiety are different or the same.

[0097] In some aspects, the present disclosure comprises:

[0098] (a) a polynucleotide encoding a first cage polypeptide fused to a first binding domain, wherein the first cage polypeptide comprises (i) a structural region and (ii) a latch region further comprising one or more bioactive peptides, wherein the structural region interacts with the latch region to prevent activity of the one or more bioactive peptides in the absence of colocalization with a key polypeptide and wherein the first binding domain is capable of binding to a first cell moiety present on or within a cell; and

[0099] (b) a polynucleotide encoding a first key polypeptide fused to a second binding domain, wherein upon colocalization with the first cage polypeptide, the first key polypeptide is capable of binding to the cage structural region to activate the one or more bioactive peptides, wherein the second binding domain is capable of binding to a second cell moiety present on or within the cell,

[0100] wherein the first cell moiety and the second cell moiety are different or the same. In some aspects, the polynucleotide encoding the first cage polypeptide and the polynucleotide encoding the second polypeptide are on the same vector. In some aspects, the polynucleotide encoding the first cage polypeptide and the polynucleotide encoding the second polypeptide are on different vectors.

[0101] In some aspects, the first cell moiety and the second cell moiety are different. In some aspects, the first cell moiety and the second cell moiety are the same.

[0102] For the one or more bioactive peptides are to be activated (e.g., exposed to an effector or capable of transducing its signal downstream), a functional cage polypeptide and a key polypeptide need to be colocalized. The mere expression of the functional cage polypeptide and a key polypeptide is not sufficient. For example, in some aspects, binding of a functional cage polypeptide, e.g., a first cage polypeptide, to a key polypeptide in solution is less efficient to activate the one or more bioactive peptides than binding of the cage and key polypeptides after colocalization. In some aspects, therefore, the colocalization of the first cage polypeptide and the key polypeptide increases selectivity of a cell that highly expresses the cell moiety.

[0103] In some aspects, the colocalization of the first cage polypeptide and the first key polypeptide increases the local concentration of the first cage polypeptide and the first key polypeptide and shifts the binding equilibrium in favor of complex formation between the first cage polypeptide and the first key polypeptide.

[0104] In order for two cell moieties to be close enough (e.g., in close proximity) to allow colocalization of a cage polypeptide binding the first cell moiety and a key polypeptide binding to the second cell moiety, the two cell moieties may be colocalized as a result of directly or indirectly forming a complex (e.g., two proteins in the same complex such as a Her2-EGFR heterodimer or CD3ξ in complex with LAT or Zap70; two DNA sequences located in close proximity on a chromosome; two RNA sequences located in close proximity on an mRNA). In this case at least one molecule of the first moiety must be colocalized with at least one molecule of the second moiety to result in colocalization. Alternatively, the two cell moieties may be colocalized by virtue of being expressed in sufficient numbers in the same subcellular compartment (e.g., two transmembrane proteins expressed in the cell membrane such as Her2 and EGFR, Her2 and EpCAM, etc.) In some aspects, the cell expresses a first cell moiety and/or the second cell moiety at least about 100 copies per cell, at least about 200 copies per cell, at least about 500 copies per cell, at least about 1000 copies per cell, at least about 1500 copies per cell, at least about 2000 copies per cell, at least about copies per cell, at least about 3000 copies per cell, at least about 3500 copies per cell, at least about 4000 copies per cell, at least about 4500 copies per cell, at least about 5000 copies per cell, at least about 5500 copies per cell, at least about 6000 copies per cell, at least about copies per cell, or at least about 7000 copies per cell. In some aspects, the first cell moiety and/or the second cell moiety express about 500 to about 10,000 copies per cell, about to about 10,000 copies per cell, about 2000 to about 10,0000 copies per cell, about 3000 to about 10,000 copies per cell, about 4000 to about 10,000 copies per cell, about 5000 to about 10,000 copies per cell, about 1000 to about 9.000 copies per cell, about 2000 to about 90,000 copies per cell, about 3000 to about 9,000 copies per cell, about 4000 to about 9,000 copies per cell, about 5000 to about 9,000 copies per cell, about 1000 to about 8,000 copies per cell, about 2000 to about 8,0000 copies per cell, about 3000 to about 8,000 copies per cell, about 4000 to about 8,000 copies per cell, about 5000 to about 8,000 copies per cell, about 1000 to about 7,000 copies per cell, about 2000 to about 7,0000 copies per cell, about to about 7,000 copies per cell, about 4000 to about 7,000 copies per cell, about 5000 to about 7,000 copies per cell, about 1000 to about 6,000 copies per cell, about 2000 to about 6,0000 copies per cell, about 3000 to about 6,000 copies per cell, about 4000 to about 6,000 copies per cell, about 5000 to about 6,000 copies per cell. In some aspects, the cell expresses a first cell moiety and/or the second cell moiety at least about 5000 copies up to about 6000 copies, up to about 7000 copies or up to about 4000 copies. In some aspects, the first cage polypeptide and the first key polypeptide are colocalized, thereby forming a complex and activating the one or more bioactive peptides.

[0105] In some aspects, the first cell moiety and the second cell moiety are present on the surface of the cell. In some aspects, the first cell moiety and the second cell moiety are present within the cytoplasm of the cell. In some aspects, the first cell moiety and the second cell moiety are present within the nucleus of the cell. In some aspects, the first cell moiety and the second cell moiety are present within the secretory pathway of the cell, including the endoplasmic reticulum (ER) and Golgi apparatus.

[0106] Ag1 AND (Ag2 OR Ag3)

[0107] The present disclosure can also target more than two cells at the same time by utilizing various cell markers. For instance, the disclosure can allow a therapy to target heterogeneous cell types, more than two (Ag1 AND (Ag2 OR Ag3)), more than three (Ag1 AND (Ag2 OR Ag3 OR Ag4)), more than four (Ag1 AND (Ag2 OR Ag3 OR Ag 4 OR Ag5)), more than five (Ag) AND (Ag2 OR Ag3 OR Ag 4 OR Ag5 OR Ag6)), etc. In some embodiments, (Ag1 OR Ag2) AND Ag3 can be accomplished by targeting multiple cage polypeptides to multiple cells at the same time with different binding domains and targeting one key polypeptide with a single binding domain to those same cells. In other embodiments, (Ag1 OR Ag2) AND (Ag3 OR Ag4) can be accomplished by targeting multiple cage polypeptides with multiple binding domains and multiple key polypeptides with multiple binding domains.

[0108] In some aspects, the composition comprises:

(a) a first cage polypeptide fused to a first binding domain or a polynucleotide encoding de same, wherein the first cage polypeptide comprises (i) a structural region and (ii) a latch region further comprising one or more bioactive peptides, wherein the structural region interacts with the latch region to prevent activity of the one or more bioactive peptides in the absence of colocalization with a key polypeptide and wherein the first binding domain is capable of binding to a first cell moiety present on or within a first cell (Cell Type t, e.g., cell expressing Ag1 AND Ag2);
(b) a first key polypeptide fused to a second binding domain or a polynucleotide encoding the same, wherein upon colocalization with the first cage polypeptide, the first key polypeptide is capable of binding to the cage structural region to activate the one or more bioactive peptides, wherein the second binding domain is capable of binding to a second cell moiety present on or within the first cell; and
(c) a second key polypeptide fused to a third binding domain or a polynucleotide encoding the same, wherein upon colocalization with the first cage polypeptide, the second key polypeptide is capable of binding to the cage structural region to activate the one or more bioactive peptides, wherein the third binding domain is capable of binding to a third cell moiety present on or within a second cell that also comprises the first cell moiety (Cell type II, e.g., cell expressing Ag1 AND Ag3), wherein the first cell moiety, the second cell moiety, and the third cell moiety are different.

[0109] In some aspects, the first key polypeptide comprises a third binding domain, wherein the second binding domain and/or the third binding domain bind to (i) different moieties than the first binding domain on the surface of the same cell, or (ii) different moieties than the first binding domain at the synapse between two cells that are in contact, wherein upon colocalization with the first cage polypeptide, the first key polypeptide is capable of binding to the cage structural region to activate the one or more bioactive peptides, wherein the third binding domain is capable of binding to a third cell moiety present on or within the cell that also comprises the first cell moiety, wherein the third cell moiety is different from the first cell moiety or the second cell moiety.

[0110] In some aspects, the compositions further comprise:

[0111] (d) at least a second cage polypeptide comprising (i) a second structural region. (ii) a second latch region further comprising one or more bioactive peptides, and (iii) a sixth binding domain, wherein the second structural region interacts with the second latch region to prevent activity of the one or more bioactive peptides,

[0112] wherein the first key and/or the second key polypeptide are capable of binding to the second structural region to activate the one or more bioactive peptides, and

[0113] wherein the sixth binding domain and/or the first binding domain bind to (1) different moieties than the second binding domain, third binding domain and/or fourth binding domain on the surface of the same cell, or (ii) different moieties than the second binding domain, third binding domain and/or fourth binding domain at the synapse between two cells that are in contact. Such compositions can be used, for example, to accomplish (Ag1 OR Ag2) AND Ag3 by targeting the 2 cage polypeptides with different binding domains to multiple cells at the same time and targeting one key polypeptide with a single binding domain to those same cells.

[0114] In some aspects, the composition can further comprise multiple key polypeptides, a fourth key polypeptide, a fifth key polypeptide, a sixth key polypeptide, or a seventh key polypeptide, to increase selectivity for the first cell and/or the second cell. For example the composition for the first cell can further comprise additional key polypeptides, a fourth key polypeptide, a fifth key polypeptide, a sixth key polypeptide, or a seventh key polypeptide, that can further increase the selectivity of the first cell. In some aspects, the composition for the second cell further comprises additional key polypeptides, a fourth key polypeptide, a fifth key polypeptide, a sixth key polypeptide, or a seventh key polypeptide, that can further increase the selectivity of the second cell. Each of the additional key polypeptides for the present disclosure can be fused to a binding domain, wherein upon colocalization with the first cage polypeptide, the third key polypeptide is capable of binding to the cage structural region to activate the one or more bioactive peptides, wherein the third binding domain is capable of binding to a cell moiety present on or within the cell that also comprises the first cell moiety. In some aspects, a single key polypeptide can be fused to two or more binding domains such that the same key polypeptide can be targeted to both Cell type I and Cell type II.

[0115] (Ag1 AND Ag2) NOT Ag3

[0116] The present disclosure can also direct a therapy to avoid normal (healthy) cells, but only target diseased cells, e.g., tumor cells by utilizing various cell markers, thereby reducing off target cell specificity or toxicity. Therefore, the disclosure can allow a therapy to avoid targeting normal cell types that express unique cell markers. For example, if normal cells express Ag3 while the diseased cells don't, the composition for the present disclosure can be constructed to avoid the cells expressing Ag3.

[0117] In some aspects, the composition comprises:

[0118] (a) a first cage polypeptide fused to a first binding domain or a polynucleotide encoding the same, wherein the first cage polypeptide comprises (i) a structural region and (ii) a latch region further comprising one or more bioactive peptides, wherein the structural region interacts with the latch region to prevent activity of the one or more bioactive peptides in the absence of colocalization with a key polypeptide and wherein the first binding domain is capable of binding to a first cell moiety present on or within a cell;

[0119] (b) a first key polypeptide fused to a second binding domain or a polynucleotide encoding the same, wherein upon colocalization with the first cage polypeptide, the first key polypeptide is capable of binding to the cage structural region to activate the one or more bioactive peptides, wherein the second binding domain is capable of binding to a second cell moiety present on or within the cell; and

[0120] (c) one or more decoy cage polypeptide fused to one or more binding domain (“decoy binding domain”) or a polynucleotide encoding the same, wherein each decoy cage polypeptide comprises a decoy structural region, which upon colocalization with the first key polypeptide and the first cage polypeptide, is capable of preferentially binding to the first key polypeptide and wherein each decoy binding domain is capable of binding to a cell moiety (“decoy cell moiety”) in the cell that comprises the second cell moiety. In some aspects, the decoy binding domain is capable of binding to a cell moiety (“decoy cell moiety”) in the cell that comprises the first cell moiety and the second cell moiety. In some aspects, each decoy cell moiety is present only on a healthy cell. In some aspects, each decoy cage polypeptide, upon colocalization with the first key polypeptide, binds to the first key polypeptide such that the first key polypeptide does not bind to the first cage polypeptide and wherein the one or more bioactive peptides in the first cage polypeptide are not activated.

[0121] Any first cage polypeptide can serve as a decoy polypeptide for any second cage polypeptide, provided that the first cage polypeptide has a higher affinity for the key polypeptide than does the second cage polypeptide.

[0122] The compositions and methods of all aspects described herein may comprise use of a single decoy cage polypeptide comprising multiple binding domains, or multiple decoy cage polypeptides each with one (or more) binding domains to avoid cells with different decoy cell moieties (e.g., 1 AND 2 NOT (3 OR 4) logic).

[0123] In some aspects, the binding affinity of the decoy cage polypeptide to a key polypeptide (e.g., K_{D}) is stronger (e.g., lower) than the binding affinity of the first cage polypeptide to a key polypeptide (e.g., K_{D}), e.g., by at least about 1.1 fold, at least about 1.5 fold, at least about 2 fold, at least about 3 fold, at least about 4 fold, at least about 5 fold, at least about 6 fold, at least about 7 fold, at least about 8 fold, at least about 9 fold, at least about 10 fold, at least about 20 fold, at least about 30 fold, at least about 40 fold, at least about 50 fold, at least about 60 fold, at least about 70 fold, at least about 80 fold, at least about 90 fold, at least about 100 fold, at least about 150 fold, at least about 200 fold, at least about 300 fold, at least about 400 fold, at least about 500 fold, at least about 600 fold, at least about 700 fold, at least about 800 fold, at least about 900 fold, or at least about 1000 fold. In some aspects, the decoy cage polypeptide comprises at least one alpha helix, at least two alpha helices at least three alpha helices, at least four alpha helices, or at least five alpha helices. In some aspects, the decoy cage polypeptide further comprises a decoy latch region. In some aspects, the decoy latch region is not functional. In some aspects, the decoy latch region does not comprise any bioactive peptide. In some aspects, the decoy latch region is not present. In some aspects, the decoy latch region comprises a non-functional bioactive peptide. In some aspects, the decoy latch region comprises a functional bioactive peptide with a distinct biological function. By way of non-limiting example, the cage polypeptide may comprise a bioactive peptide with immunostimulatory function and the decoy cage polypeptide comprises a bioactive peptide with immunoinhibitory function.

### Exemplary Co-LOCKR Systems

[0124] In a fourth aspect, the disclosure provides compositions comprising

[0125] (a) a first cage polypeptide comprising (i) a structural region, (ii) a latch region further comprising one or more bioactive peptides, and (iii) a first binding domain wherein the structural region interacts with the latch region to prevent activity of the one or more bioactive peptides;

[0126] (b) a first key polypeptide capable of binding to the cage structural region to activate the one or more bioactive peptides, wherein the key polypeptide comprises a second binding domain,

[0127] wherein the first binding domain and the second binding domain bind to (i) different moieties on the surface of the same cell, (ii) the same moiety on the surface of the same cell, (iii) different moieties at the synapse between two cells that are in contact, or (iv) the same moiety at the synapse between two cells that are in contact; and

[0128] optionally, one or more effector(s) that bind to the one or more bioactive peptides when the one or more bioactive peptides are activated.

[0129] The compositions disclosed herein, also referred to as “Co-LOCKR system” in the examples that follow, comprise of at least one cage polypeptide and at least one key polypeptide that may be used, for example, as proximity-activated de novo protein switches that perform ‘AND’. ‘OR’, and ‘NOT’ Boolean logic operations and combinations thereof in response to precise combinations of protein-binding events. The switches activate via a conformational change only when all logic conditions are met. The system is demonstrated in the examples to provide for ultraspecific targeting of mammalian cells that are distinguished in a complex cell population only by their precise combination of surface markers. An ‘AND’ gate may be achieved by targeting the cage polypeptide to one antigen and the key polypeptide to a different antigen. A ‘thresholding’ gate may be achieved by targeting the cage polypeptide and key polypeptide to the same antigen (this could be either with binding domains that bind to the same epitope or a different epitope on the same antigen). An ‘OR’ gate may be achieved by targeting the cage polypeptide or the key polypeptide to two different antigens. A ‘NOT’ gate may be achieved by supplementing a decoy cage polypeptide that sequesters the key polypeptide and prevents it from interacting with the cage polypeptide. Additional cage polypeptides, key polypeptides, and decoy cage polypeptides can be included to establish the desired logical operation (e.g., antigen 1 AND antigen 2 NOT antigen 3, antigen 1 AND either antigen 2 OR antigen 3).

[0130] Thus, in one embodiment the first binding domain and the second binding domain bind to (i) different moieties on the surface of the same cell, or (iii) different moieties at the synapse between two cells that are in contact. In this embodiment, the composition can be used to establish an AND gate.

[0131] In another embodiment, the first binding domain and the second binding domain bind to (ii) the same moiety on the surface of the same cell, or (iv) the same moiety at the synapse between two cells that are in contact. In this embodiment, the composition can be used to establish a thresholding gate.

[0132] In one embodiment (c) the first key polypeptide comprises a third binding domain, wherein the second binding domain and/or the third binding domain bind to (i) different moieties than the first binding domain on the surface of the same cell, or (ii) different moieties than the first binding domain at the synapse between two cells that are in contact. In a further embodiment, the second binding domain and the third binding domain bind to different moieties on the surface of different cells. In these embodiments, the composition can be used to establish a 1 AND cither 2 OR 3 logic gate, provided the moiety bound by the first binding domain is present on one of those cells.

[0133] In another embodiment, the composition further comprises (d) at least a second key polypeptide capable of binding to the first cage structural region, wherein the key polypeptide comprises a fourth binding domain, wherein the second binding domain and/or the fourth binding domain bind to (i) different moieties than the first binding domain on the surface of the same cell, or (ii) different moieties than the first binding domain at the synapse between two cells that are in contact. In one embodiment, the second binding domain and the fourth binding domain bind to (i) different moieties on the surface of the same cell, or (ii) different moieties at the synapse between two cells that are in contact. In a further embodiment, the second binding domain and the fourth binding domain bind to different moieties on the surface of different cells. In these embodiments, the composition can be used to establish a 1 AND either 2 OR 3 logic gate, provided the moiety bound by the first binding domain is present on one of those cells.

[0134] In a further embodiment, the first cage polypeptide further comprises a fifth binding domain, wherein the fifth binding domain and/or the first binding domain bind to (i) different moieties than the second binding domain, third binding domain and/or fourth binding domain on the surface of the same cell, or (ii) different moieties than the second binding domain, third binding domain and/or fourth binding domain at the synapse between two cells that are in contact. In one embodiment, the fifth binding domain and the first binding domain bind to (i) different moieties on the surface of the same cell, or (ii) different moieties at the synapse between two cells that are in contact. In this embodiment, the composition can be used to establish an OR logic gate, specifically the ((1 OR 5) AND (2 OR 3) logic gate, based on the additional binding domain present on a single cage polypeptide.

[0135] In one embodiment, the composition further comprises (e) at least a second cage polypeptide comprising (i) a second structural region, (ii) a second latch region further comprising one or more bioactive peptides, and (iii) a sixth binding domain, wherein the second structural region interacts with the second latch region to prevent activity of the one or more bioactive peptides, wherein the first key and/or the second key polypeptide are capable of binding to the second structural region to activate the one or more bioactive peptides, and wherein the sixth binding domain and/or the first binding domain bind to (i) different moieties than the second binding domain, third binding domain and/or fourth binding domain on the surface of the same cell, or (ii) different moieties than the second binding domain, third binding domain and/or fourth binding domain at the synapse between two cells that are in contact in one embodiment, the sixth binding domain and the first binding domain bind to (i) different moieties on the surface of different cells, or (ii) different moieties at the synapse between two cells that are in contact. In these embodiments, the composition can be used to establish an OR logic gate based on the additional binding domain present on a second cage polypeptide. In one such embodiment, there may be two separate but identical cage polypeptides be each attached to one different binding domain. In another such embodiment, the two cage polypeptides may be different cage polypeptides that both are activated by the same key polypeptide and are each attached to one different binding domain.

[0136] In another embodiment, the composition further comprises (f) a decoy cage polypeptide comprising (i) a decoy structural region, (ii) a decoy latch region optionally further comprising one or more bioactive peptides, and (iii) a seventh binding domain, wherein the decoy structural region interacts with the first key polypeptide and/or the second key polypeptide to prevent them from binding to the first and/or the second cage polypeptides, and wherein the seventh binding domain binds to a moiety on the surface of the same cell as the second binding domain, third binding domain, and/or fourth binding domain. In one embodiment, the seventh binding domain binds to a moiety that is present on the cell at an equal or higher level than the moieties to which the second binding domain, the third binding domain, and/or the fourth binding domain bind to. In this embodiment, the composition can be used to establish a NOT logic gate based on the decay cage polypeptide binding to a different target on the same cell as the target of the key polypeptide. In this embodiment, the composition can be used, for example, to establish a 1 AND 2 NOT 7 logic, provided the moieties bound by the first and second binding domains are present the same cell. In one embodiment, the decoy cage polypeptide does not comprise a bioactive peptide. This embodiment can be used, for example, to establish a 1 AND 4 NOT 7 logic (provided that the moieties bound by the first and fourth binding domains are present on the same cell), or a 5 AND 4 NOT 7 logic (provided that the moieties bound by the fifth and fourth binding domains are present on the same cell. Such AND/NOT embodiments require at least one cage polypeptide, at least one key polypeptide, and at least one decoy cage polypeptide. In one embodiment of all these embodiments of the composition, the first binding domain, the second binding domain, the third binding domain (when present), the fourth binding domain (when present), the fifth binding domain (when present), the sixth binding domain (when present), and/or the seventh binding domain (when present) comprise polypeptides capable of binding moieties present on the cell surface, including proteins, saccharides, and lipids. In one embodiment, the one or more binding proteins comprise cell surface protein binding polypeptides.

[0137] All of the compositions above are described as polypeptide compositions. The disclosure also provides compositions comprising expression vectors and/or cells that express the cage polypeptides and key polypeptides as described in the compositions above, and thus can be used for the same purposes (for example, in establishing the same logic gates as for the corresponding polypeptide compositions described above). Thus, in a fifth aspect, the disclosure provides compositions comprising:
[0138] (a) one or more expression vectors encoding and/or cells expressing:
   [0139] (i) a first cage polypeptide comprising (i) a structural region, (ii) a latch region further comprising one or more bioactive peptides, and (iii) a first binding domain wherein the structural region interacts with the latch region to prevent activity of the one or more bioactive peptides; and
   [0140] (ii) a first key polypeptide capable of binding to the cage structural region to activate the one or more bioactive peptides, wherein the key polypeptide comprises a second binding domain,
[0141] wherein the first binding domain and the second binding domain bind to (i) different moieties on the surface of the same cell, (ii) the same moiety on the surface of the same cell, (iii) different moieties at the synapse between two cells that are in contact, or (iv) the same moiety at the synapse between two cells that are in contact; and (b) optionally, one or more effector(s) that bind to the one or more bioactive peptides when the one or more bioactive peptides are activated, and/or one or more nucleic acids encoding the one or more effectors.

[0142] The one or more expression vectors may comprise a separate expression vector encoding each separate polypeptide, may comprise an expression vector encoding two or more of the separate polypeptides, or any combination thereof as suitable for an intended use. The expression vector may comprise any suitable expression vector that operatively links a nucleic acid coding region for the cited polypeptide(s) to any control sequences capable of effecting expression of the gene product. Similarly, the cells may be any prokaryotic or eukaryotic cell capable of expressing the recited polypeptide(s); the cells may comprise a single cell capable of expressing all of the recited polypeptides, separate cells capable of expressing each individual polypeptide, or any combination thereof.

[0143] In one embodiment the first key polypeptide comprises a third binding domain, wherein the second binding domain and/or the third binding domain bind to (i) different moieties than the first binding domain on the surface of the same cell, or (ii) different moieties than the first binding domain at the synapse between two cells that are in contact. In another embodiment, the second binding domain and the third binding domain bind to different moieties on the surface of different target cells.

[0144] In one embodiment, the composition further comprises (c) an expression vector encoding and/or a cell expressing at least a second key polypeptide capable of binding to the first cage structural region, wherein the key polypeptide comprises a fourth binding domain, wherein the second binding domain and/or the fourth binding domain bind to (i) different moieties than the first binding domain on the surface of the same cell, or (ii) different moieties than the first binding domain at the synapse between two cells that are in contact. In another embodiment wherein the second binding domain and the fourth binding domain bind to (i) different moieties on the surface of the same cell, or (ii) different moieties at the synapse between two cells that are in contact.

[0145] In another embodiment, the first cage polypeptide further comprises a fifth binding domain, wherein the fifth binding domain and/or the first binding domain bind to (i) different moieties than the second binding domain, third binding domain, and/or fourth binding domain on the surface of the same cell, or (ii) different moieties than the second binding domain, third binding domain, and/or fourth binding domain at the synapse between two cells that are in contact. In one embodiment, the fifth binding domain and the first binding domain bind to (i) different moieties on the surface of the same cell, or (ii) different moieties at the synapse between two cells that are in contact.

[0146] In a further embodiment, the composition further comprises (d) an expression vector encoding and/or a cell expressing at least a second cage polypeptide comprising (i) a second structural region, (ii) a second lath region further comprising one or more bioactive peptides, and (iii) a sixth binding domain, wherein the second structural region interacts with the second latch region to prevent activity of the one or more bioactive peptides, wherein the first key and/or the second key polypeptide are capable of binding to the second structural region to activate the one or more bioactive peptides, and wherein the sixth binding domain and/or the first binding domain bind to (i) different moieties than the second binding domain, third binding domain, and/or fourth binding domain on the surface of the same cell, or (ii) different moieties than the second binding domain, third binding domain, and/or fourth binding domain at the synapse between two cells that are in contact. In one embodiment, the sixth binding domain and the first binding domain bind to (i) different moieties on the surface of different cells, or (ii) different moieties at the synapse between two cells that are in contact.

[0147] In another embodiment, the composition further comprises (e) an expression vector encoding and/or a cell expressing a decoy cage polypeptide comprising (i) a decoy structural region, (ii) a decoy latch region optionally further comprising one or more bioactive peptides, and (iii) a seventh binding domain, wherein the decoy structural region interacts with the first key polypeptide and/or the second key polypeptide to prevent them from binding to the first and/or the second cage polypeptides, and wherein the seventh binding domain binds to a moiety on the surface of the same cell as the second binding domain, third binding domain, and/or fourth binding domain. In one embodiment, the seventh binding domain and the first binding domain and/or second binding domain bind to (i) different moieties on the surface of the same cell, or (ii) different moieties at the synapse between two cells that are in contact. In another embodiment, the seventh binding domain binds to a moiety that is present on the cell at an equal or higher level than the moieties to which the second binding domain, the third binding domain, and/or the fourth binding domain bind to.

[0148] In one embodiment, the first binding domain, the second binding domain, the third binding domain (when present), de fourth binding domain (when present), the fifth binding domain (when present), the sixth binding domain (when present), and/or the seventh binding domain (when present) comprise polypeptides capable of binding moieties present on the cell surface, including proteins, saccharides, and lipids. In one embodiment, the one or more binding proteins comprise cell surface protein binding polypeptides.

[0149] Cage and Key Polypeptides

[0150] The polypeptides disclosed herein can be used as cage polypeptides that sequester a bioactive peptide in an inactive state (until activated by a key polypeptide binding to the cage polypeptide, as described herein), and wherein the binding domain can serve to target the polypeptide to the entity to which the binding domain binds. In one embodiment, the polypeptides are pan of a “protein switch” (together with appropriate key polypeptide(s)), wherein the cage polypeptide and the key polypeptide comprise binding domains that bind to different targets, and the key polypeptide binds to the cage polypeptide and triggers activation of the bioactive peptide only when the different targets are closely associated so that the cage and key polypeptides are co-localized while bound to their targets.

[0151] In some aspects, the cage polypeptide comprises a helical bundle, comprising between 2 and 7 alpha-helices; wherein the helical bundle is fused to one or more binding domain; wherein the one or more binding domain and the helical bundle are not both present in the same naturally occurring polypeptide.

[0152] In each embodiment, the N-terminal and/or C-terminal 60 amino acids of each cage polypeptides may be optional, as the terminal 60 amino acid residues may comprise a latch region that can be modified, such as by replacing all or a portion of a latch with a bioactive peptide. In one embodiment, the N-terminal 60 amino acid residues are optional; in another embodiment, the C-terminal 60 amino acid residues are optional; in a further embodiment, each of the N-terminal 60 amino acid residues and the C-terminal 60 amino acid residues are optional. In one embodiment, these optional N-terminal and/or C-terminal 60 residues are not included in determining the percent sequence identity. In another embodiment, the optional residues may be included in determining percent sequence identity.

[0153] In some aspects, the first cage polypeptide comprises no more than 5 alpha helices, no mom than 4 alpha helices, no more than 3 alpha helices, or no more than 2 alpha helices, wherein the structural region comprises at least one alpha helices and the latch region comprises at least one alpha helices. In some aspects, the structural region of the first cage polypeptide comprises one alpha helix. In some aspects, the structural region of the first cage polypeptide comprises two alpha helices. In some aspects, the structural region of the first cage polypeptide comprises three alpha helices.

[0154] In some aspects, the first cage polypeptide, the first key polypeptide, the second key polypeptide, and/or the decoy polypeptide are further modified to change (i) hydrophobicity, (ii) a hydrogen bond network, (iii) a binding affinity to each, and/or (iv) any combination thereof. In some aspects, the cage polypeptide and/or the key polypeptide are modified to reduce hydrophobicity. In some aspects, the latch region is mutated to reduce the hydrophobicity. For example, hydrophobic amino acids are known: glycine (Gly), alanine (Ala), valine (Val), leucine (Leu), isoleucine (Ile), proline (Pro), phenylalanine (Phe), methionine (Met), and tryptophan (Trp). In some aspects, one or more hydrophobic amino acids are replaced with a polar amino acid, e.g., serine (Ser), threonine (Thr), cysteine (Cys), asparagine (Asn), glutamine (Gin), and tyrosine (Tyr). In some aspects, an interface between the latch region and the structural region of the first cage polypeptide includes a hydrophobic amino acid to polar amino acid residue ratio of between 1:1 and 10:1, e.g., 1:1, 2:1, 3:1, 4:1, 5:1, 6:1, 7:1, 8:1, 9:1, or 10:1. In some aspects, an interface between the latch region and the structural region includes a hydrophobic amino acid to polar amino acid residue ratio of 1:1. In some aspects, an interface between the latch region and the structural region includes a hydrophobic amino acid to polar amino acid residue ratio of 2:1. In some aspects, an interface between the latch region and the structural region includes a hydrophobic amino acid to polar amino acid residue ratio of 3:1. In some aspects, an interface between the latch region and the structural region includes a hydrophobic amino acid to polar amino acid residue ratio of 4:1. In some aspects, an interface between the latch region and the structural region includes a hydrophobic amino acid to polar amino acid residue ratio of 5:1. In some aspects, an interface between the latch region and the structural region includes a hydrophobic amino acid to polar amino acid residue ratio of 6:1. In some aspects, an interface between the latch region and the structural region includes a hydrophobic amino acid to polar amino acid residue ratio of 7:1. In some aspects, an interface between de latch region and the structural region includes a hydrophobic amino acid to polar amino acid residue ratio of 8:1. In some aspects, an interface between the latch region and the structural region includes a hydrophobic amino acid to polar amino acid residue ratio of 9:1. In some aspects, an interface between the latch region and the structural region includes a hydrophobic amino acid to polar amino acid residue ratio of 10:1.

[0155] In some aspects, 1, 2, 3, or more large hydrophobic residues in the latch region, e.g., isoleucine, valine, or leucine, are mutated to serine, threonine, or a smaller hydrophobic amino acid residue, e.g., valine (if the starting amino acid is isoleucine or leucine) or alanine. In some aspects, the first cage polypeptide comprises buried amino acid residues at the interface between the latch region and the structural region of the first cage polypeptide, wherein the buried amino acid residues at the interface have side chains comprising nitrogen or oxygen atoms involved in hydrogen bonding.

[0156] In some aspects, the disclosure provides non-naturally occurring polypeptides comprising

[0157] (a) a polypeptide comprising an amino acid sequence at least 40%, 45%, 50%, 55%, 60%, 65%, 70%, 75%, 80%, 85%, 90%, 91%, 92%, 93%, 94% 95%, 96%, 97%, 98%, 99%, or 100% identical to the amino acid sequence of a cage polypeptide disclosed herein, or selected from the group consisting of SEQ ID NOS: 27359-27392, 1-49, 51-52, 54-59, 61, 65, 67-14317, 27094-27117, 27120-27125, and 27278-27321 not including optional amino acid residues; or cage polypeptides listed in Table 7, Table 8, or Table 9 wherein the N-terminal and/or C-terminal 60 amino acids of the polypeptides are optional; and

[0158] (b) one or more polypeptide binding domains.

[0159] In one embodiment, the non-naturally occurring polypeptides comprise

[0160] (a) a polypeptide comprising an amino acid sequence at least 40%, 45%, 50%, 55%, 60%, 65%, 70%, 75%, 80%, 85%, 90%, 91%, 92%, 93%, 94%, 95%, 96%, 97%, 98%, 99%, or 100% identical to the amino acid sequence of a cage polypeptide disclosed herein, or selected from the group consisting of SEQ ID NOS: 27359-27392, 1-49, 51-52, 54-59, 61, 65, 67-14317, 27094-27117, 27120-27125, 27,278 to 27,321, not including amino acid residues in the latch region; and

[0161] (b) one or more polypeptide binding domains.

[0162] In another embodiment, the non-naturally occurring polypeptides comprise (a) a polypeptide comprising an amino acid sequence at least 40%, 45%, 50%*, 55%, 60%, 65%, 70% 75%, 80%, 85%, 90%, 91%, 92%, 93%, 94%, 95%, 96%, 97%, 98%, 99%, or 100% identical to the amino acid sequence of a cage polypeptide disclosed herein, or selected from the group consisting of SEQ ID NOS: 27359-27392 or cage polypeptides listed in Table 7, Table 8, or Table 9, wherein the N-terminal and/or C-terminal 60 amino acids of the polypeptides are optional; and

[0163] (b) one or more polypeptide binding domains.

[0164] In a further embodiment, the polypeptide has an amino acid sequence at least 40%, 45%, 50%, 55%, 60%, 65%, 70%, 75%, 80%, 85%, 90%, 91%, 92%, 93%, 94%, 95%, 96%, 97%, 98%, 99%, or 100% sequence identical to the amino acid sequence of a cage polypeptide disclosed herein, or selected from the group consisting of, SEQ ID NOS: 27359-27392, 1-49, 51-52, 54-59, 61, 65, 67-14317, 27094-27117, 27120-27125, 27,278 to 27,321, or cage polypeptides listed in Table 7, Table 8, or Table 9, including any optional amino acid residues.

[0165] In one embodiment, the non-naturally occurring polypeptide comprises

[0166] (a) a polypeptide comprising an amino acid sequence at least 40% 45%, 50%, 55%, 60%, 65%, 70%, 75%, 80%, 85%, 90%, 91%, 92%, 93%, 94%, 95%, 96%, 97%, 98%, 99%, or 100% identical to the amino acid sequence of a cage polypeptide disclosed selected from the group consisting of SEQ ID NOS: 27359-27392, not including optional amino acid residues, and

[0167] (b) one or more polypeptide binding domains.

[0168] In another embodiment, the polypeptide comprises an amino acid sequence at least 40%, 45%, 50%, 55%, 60%, 65%, 70%, 75%, 80%, 85%, 90%, 91%, 92%, 93%, 94%, 95%, 96%, 97%, 98%, 99%, or 100% identical to the amino acid sequence of a cage polypeptide disclosed selected from the group consisting of SEQ ID NOS: 2735927392, including optional residues.

TABLE 1
Modular co-LOCKR Cage domains amd Decoy domains

[symbol]

[symbol]

indicates data missing or illegible when filed

TABLE 2
Other exemplary cage polypeptides (see also
SEQ ID NOS: 92-14317, 27094-27117, 27120-27125,
37*728-27321, and cage polypeptides listed in
Table 7, Table 8, and Table 9).

Exemplary reference cage polypeptides;
latch regions denoted by brackets []
6His-MBP-TEV, 6His-TEV, and flexible
linker sequences are underlined text
fused functional domains (DARPins,
components of the split, lutein, and
fluorescent proteins) are bolded text
Functional peptide is italicized
underlined text
Exemplary positions that have been
mutated to any amrno ar id to tune
responsiveness are underlined bolded
text These positions are exmnpiary,
end not an exhaustive list of residues
able to tune responsiveness.
C-terminal sequences that can be removed
to tune responsiveness are contained
within brackets, A range from one (1)
to all residues encompassed within the
brackets may be removed, starting from
the Cdetminus and removing successive
residues therein,
All sequences in parentheses are optional

[symbol]

[symbol]

indicates data missing or illegible when filed

[0169] In another embodiment, the disclosure provides non-naturally occurring polypeptide, comprising an amino acid sequence at least 70%, 75%, 80%, 85%, 90%, 91%, 92%, 93%, 94%, 95%, 96%, 97%, 98%, 99%, or 100% identical to the amino acid sequence selected from the group consisting of SEQ ID NOS: 27359-27392, including optional amino acid residues. In one embodiment, the polypeptide further comprises one or more binding domains. In a further embodiment, the polypeptide comprises an amino acid linker connecting the polypeptide and the one or more binding domains, such as those disclosed herein.

[0170] As disclosed herein, exemplary polypeptides of the disclosure have been identified and subjected to mutational analysis. Furthermore, different designs starting from the same exemplary polypeptides yield different amino acid sequences while maintaining the same intended function. In various embodiments, a given amino acid can be replaced by a residue having similar physiochemical characteristics, e.g., substituting one aliphatic residue for another (such as lie, Val, Leu, or Ala for one another), or substitution of one polar residue for another (such as between Lys and Arg; Glu and Asp, or Gln and Asn). Other such conservative substitutions, e.g., substitutions of entire regions having similar hydrophobicity characteristics, are known. Polypeptides comprising conservative amino acid substitutions can be tested in any one of the assays described herein to confirm that the desired activity is retained. Amino acids can be grouped according to similarities in the properties of their side chains (in A. L. Lehninger, in Biochemistry, second ed., pp. 73-75, Worth Publishers, New York (1975)): (1) non-polar: Ala (A), Val (V), Leu (L), Leu (I), Pro (P), Phe (F), Trp (W), Met (M); (2) uncharged polar: Gly (G), Ser (S), Thr (T), Cys (C), Tyr (Y), Asn (N), Gln (Q); (3) acidic: Asp (D), Glu (E); (4) basic: Lys (K), Arg (R), His (H). Alternatively, naturally occurring residues can be divided into groups based on common side-chain properties: (1) hydrophobic: Norleucine, Met, Ala, Val, Leu, Ile; (2) neutral hydrophilic: Cys, Ser, Thr, Asn, Gin; (3) acidic: Asp, Glu; (4) basic: His, Lys, Arg; (5) residues that influence chain orientation: Gly, Pro. (6) aromatic: Trp, Tyr, Phe. Non-conservative substitutions will entail exchanging a member of one of these classes for another class. Particular conservative substitutions include, for example; Ala into Gly or into Ser; Arg into Lys; Asn into Gln or into H is; Asp into Glu; Cys into Ser; Gln into Asn; Glu into Asp; Gly into Ala or into Pro; His into Asn or into Gin; lie into Leu or into Val; Leu into Ile or into Val; Lys into Arg, into Gln or into Glu; Met into Leu, into Tyr or into Ile; Phe into Met, into Leu or into Tyr; Ser into Thr; Thr into Ser; Trp into Tyr; Tyr into Trp; and/or Phe into Val, into Ile or into Leu. In some aspects, the cage polypeptide comprises an interface between the latch region and the structural region of one or more cage polypeptide of any composition or method disclosed herein. In one embodiment of polypeptides of the first and second aspect of the disclosure, interface residues between the latch and structural regions are primarily (i.e.: 50%, 60%, 70%, 75%, 80%, 85%, 90%, or greater)hydrophobic residues. In one embodiment, interface residues are primarily valine, leucine, isoleucine, and alanine residues. In a further embodiment an interface between a latch region and a structural region of the polypeptide includes a hydrophobic amino acid to polar amino acid residue ratio of between 1:1 and 10:1. The cage polypeptides may be “tuned” to modify strength of the interaction between the latch region and structural region as deemed appropriate for an intended use. In one embodiment 1, 2, 3, or more large hydrophobic residues in the latch region, including but not limited to isoleucine, valine, or leucine, are mutated to serine, threonine, or a smaller hydrophobic amino acid residue including but not limited to valine (if the starting amino acid residue is isoleucine or leucine) or alanine. In this embodiment, the tuning weakens structural region-latch affinity. In some aspects, the cage polypeptide, e.g., the first cage polypeptide, comprises buried amino acid residues at the interface between the latch region and the structural region of the cage polypeptide. In another embodiment, buried amino acid residues at the interface comprise amino acid residues with side chains comprising nitrogen or oxygen atoms involved in hydrogen bonding. Tuning can include increasing or decreasing the number of hydrogen bonds present at the interface. Tuning can include making amino acid changes to increase or decrease the hydrophobicity of the interface. Tuning can include making amino acid changes to decrease the hydrophobic packing of the interface (e.g., by replacing a leucine with an alanine). Tuning can include introducing amino acid changes that create buried unsatisfied hydrogen bonds in the interface (e.g., by replacing a leucine with a serine). Based on the teachings herein, those of skill in the art will understand that such tuning may take any number of forms depending on the desired structural region-latch region affinity.

[0171] In certain embodiments, the polypeptides of the first and second aspects of the disclosure comprise one or more bioactive peptides in at least one of the alpha helices, such as in the latch domain, wherein the one or more bioactive peptides are capable of selectively binding to a defined target. As described herein, the non-naturally occurring polypeptides of the first and second aspects disclosed herein can be used as cage polypeptides that sequester a bioactive peptide in an inactive state (until activated by a key polypeptide binding to the cage polypeptide, as described herein), and wherein the binding domain can serve to target the polypeptide to the entity to which the binding domain binds. In one embodiment, the polypeptides are part of a “protein switch” (together with appropriate key polypeptide(s)), wherein the cage polypeptide and the key polypeptide comprise binding domains that bind to different targets, and the key polypeptide binds to the cage polypeptide and triggers activation of the bioactive peptide only when the different targets are closely associated so that the cage and key polypeptides are co-localized while bound to their targets.

[0172] Any binding domain may be used as is suitable for an intended use. In non-limiting embodiments, the one or more bioactive peptides may comprise one or more bioactive peptide selected from the group consisting of SEQ ID NOS: 60, 62-64, 66, 27052, 27053, 27059-27093.

TABLE 3
GFP11 fluorescence peptide and binding peptide
to GFP-10: RDHMVLHEYVNAAGIT (SEQ ID NO: 27052)
BIM binding peptide and apoptosis peptide to
BCL-2: lxxxLRxIGDxFxxxY (SEQ ID NO: 50), where x
is any amino acid; in one embodiment, the peptide
is EIWIAQELRRIGDEFNAYYA (SEQ ID NO: 60)
Designed peptide for binding to BCL-2:
KMAQELIDKVKAASLQINGDAFYAILRAL (SEQ ID NO: 62)
Streptagil binding peptide to streptactin or an
antibody: (N) WSNPQFEK (SEQ ID NO: 63)
TEV protease cleavage site: ENLYFQ(G)-X
(SEQ ID NO: 64), wherein (G) can also be S, last
position, -X can be anything except Proline
Thrombin protease cleavage site: LVPRGS
(SEQ ID NO: 66)
Cathepsin cleavage site: KLVGFE (SEQ ID NO: 27053)
EZH2 binding peptide to recruit DNA-methylasaes:
TMFSSNRQKILERTETLNQEWKQRNIQ (SEQ ID NO: 27059)
MDM2 binding peptide to recruit p53:
ETFSDLWKLL (SEQ ID NO: 27060)
CP5 binding peptide:
GELDELVYLLDGPGYDPINSDVVTRGGSHLFNF (SEQ ID NO:
27061)
9aaTAD1 for transcriptional activation:
TMDDVYNYLFDD (SEQ ID NO: 27062)
9aaTAD2 for transcriptional activation:
LLTGLFVQYLFDD (SEQ ID NO: 27063)
9aaTAD3 for transcriptional activation:
DDAVVESFFSS (SEQ ID NO: 27064)
9aaTAD4 for transcriptional activation:
GDFLSDLFD (SEQ ID NO: 27065)
9aaTAD5 for transcriptional activation:
GDVLSDLVD (SEQ ID NO: 27066)
Mad1 - SID - epigenetic modification:
NIQMLLEAADYLE (SEQ ID NO: 27067)
Mad1 - SID - (3A mutant) - epigenetic modifica-
tion: NIAMLLAAAAYLE (SEQ ID NO: 27068)
RHIM Domain 1 from ZBP1: IQIG (SEQ ID NO: 27069)
RHIM Domain 2 from ZBP1: VQLG (SEQ ID NO: 27070)
nanoBit Split luciferase: VSGWRLFKKIS (SEQ ID
NO: 27071)
CC-A: GLEQEIAALEKENAALEWEIAALEQGG (SEQ ID NO:
27072)
CC-B: GLKQKIAALKYKNAALKKKIAALKQGG (SEQ ID NO:
27073)
GCN4: KMKQLEDKVEKLLSKNYHLENEVARLKKLVGER
(SEQ ID NO: 27074)
CC-Di: GEIAALKQEIALKKENAALKWEIAALKGQ
(SEQ ID NO: 27075)
Membrane-disrupting/cell-penetrating peptides:
GALA for membrane disruption:
WEAALAEALAEALAKHLAKALAEALKALAA
(SEQ ID NO: 27076)
Aursin 1.2: GLPDIIKKIAESF (SEQ ID NO: 27077)
Magainin-1: GIGKFLHSAGKFGKAFVGKIMKS
(SEQ ID NO: 27078)
Magainin-2: GIGKFLHGAKKFGKAFVGEIMNS
(SEQ ID NO: 27079)
Malittin: GIGAVLKVLTTGLPALISWIKRKEQG
(SEQ ID NO: 27080)
Mastoparan K: INWKGIAAMAKKLL (SEQ ID NO: 27081)
Cecropin A:
KWKLFKKIEKVGQNIRDGFIKAGPAVAVVGQATQIAK
(SEQ ID NO: 27082)
Cecropin P1:
SWLSKTAKKLENSAKKRIGEGIAIAIQGGPR
(SEQ ID NO: 27083)
Citropin 1.1: GLFDVIKKVASVIGGL (SEQ ID NO: 27084)
Temporin-1Lb: NFLGTLINLAKKIL (SEQ ID NO: 27085)
HPV33 L2 peptide: SYFILPRPKKKFPYFFTDVEVAA
(SEQ ID NO: 27086)
Adenovirus pV1 membrane fusion domain:
AFSWGSLWSKYKNFGSTVKNY (SEQ ID NO: 27087)
Gamma-1 peptide from flock house virus:
ASNWERVKSIIKSSLAAASNI (SEQ ID NO: 27088)
Poliovirus 2B pore-forming peptide:
VTSTITEKLLKNLIKIISELVIITRNYEDTTTVLATLALLGCDASPWQWL
(SEQ ID NO: 27089)
Rhinovirus pore-forming peptide:
IAQNPVENYIDEVLNEVLVVPNIN (SEQ ID NO: 27090)
Influenza HA2 pore-forming peptide:
FLGIAEAIDIGNGWEGMEFG (SEQ ID NO: 27091)
Influenza HA2 derivative:
GLFGAIAGFIENGWENGMIDG (SEQ ID NO: 27092)
HA-derived INF6: GLFGAIAGFIENGWEGMIDGWYG.
(SEQ ID NO: 27093)

[0173] In a third aspect, the disclosure provides key polypeptides, comprising a key domain linked to one or more binding domains, wherein the key polypeptide is capable of specifically binding to the cage polypeptide of any embodiment of the first and/or second aspect of the disclosure. As described herein, the non-naturally occurring polypeptides of the first and second aspects disclosed herein can be used as cage polypeptides that sequester a bioactive peptide in an inactive state (until activated by a key polypeptide binding to the cage polypeptide, as described herein), and wherein the binding domain can serve to target the polypeptide to the entity to which the binding domain binds. In one embodiment, the polypeptides are part of a “protein switch” (together with appropriate key polypeptide(s)), wherein the cage polypeptide and the key polypeptide comprise binding domains that bind to different targets, and the key polypeptide binds to the cage polypeptide and triggers activation of the bioactive peptide only when the different targets are closely associated so that the cage and key polypeptides are co-localized while bound to their targets. Thus, in one embodiment, the key polypeptide specifically binds to the cage polypeptide and activates one or more bioactive peptides. In various non-limiting embodiments, the key polypeptide comprises (a) a polypeptide comprising an amino acid sequence at east 40%, 45%, 50%, 55%, 60%, 65%, 70%, 75%, 80%, 85%, 90%, 91%, 92% 93%, 94%, 95%, 96% 0.97%, 98%, 99%, or 100% identical to the amino acid sequence of a key polypeptide disclosed herein, (not including optional amino acid residues), a key polypeptide selected from SEQ ID NOS: 27393-27398, 14318-26601, 26602-27015, 27016-27050, and 27322-27358; and key polypeptides listed in Table 7, Table 8, and/or Table 9; and

[0174] (b) one or more binding domains.

TABLE 4
Modular Co-LOCKR Key domains
(parentheses are optional sequences of which a
portion can be deleted to tune Key affinity)
(underlined amino acids car be chaned to any
other amino acid to tune latch affinity)

>Key SEQ ID NO: 27393
(DEARKAIAR)VKRESKEIVEDAERLIREAAAASEKISR(EAERLIR)
>Key_B SEQ ID NO: 27394
DEAIARVKRESKRIVEDAKRLIREAAAASEKISEEAERLIR
>Key_C SEQ ID NO: 27395
DEVKPESKRIVEDAERLIREAAAASEKISREAERLIR
>Key_D SEQ ID NO: 27396
DEARKAIARVKRESKRIVEDAERLIREAAAADEKISRKAER
>Key_E SEQ ID NO: 27397
DEARKAIARVKRESKRIVEDAERLIREAAAASEKISR
>Key_F SEQ ID NO: 27398
DEARKAIARVKRESKRIVEDAERLIREAAAASEKSSREAERLAR

[0175] In another embodiment, non-naturally occurring polypeptides comprising a polypeptide comprising an amino acid sequence least 40%, 45%, 50%, 55%, 60%, 65%, 70%, 75%, 80%, 85%, 90%, 91%, 92%, 93%, 94%, 95%, 96%, 97% 98%, 99%, or 100% identical to the amino acid sequence of a key polypeptide selected from the group consisting of SEQ ID NOS: 26602-27050, and 27.322 to 27,358, as detailed below.
[0176] Key sequences are normal text
[0177] 6His-MBP-TEV, 6His-TEV, and flexible linker sequences are underlined text
[0178] sequence in bold, italics, are optional residues necessary for biotinylation of MBF-key
[0179] all sequences in parentheses are optional
[0180] Any number of consecutive amino acids from the N or C terminus in the non-optional key sequence may be removed to tune responsiveness

TABLE 5
>SB76_C-helix (SEQ ID NO: 27016) [symbol]
>SB76_C-hilix-biotin (SEQ ID NO: (SEQ ID NO: 27017) [symbol]
>p5_MBP (SEQ ID NO: 27018)

[symbol]

>p9_MBP (SEQ ID NO: 27019)

[symbol]

>p18_MBP (SEQ ID NO: 27020)

[symbol]

>MBP_p18 (aka, p76) (SEQ ID NO: 27021)

[symbol]

>key_b (SEQ ID NO: 27022)

[symbol]

>key_c (SEQ ID NO: 27023)

[symbol]

>key_d (SEQ ID NO: 27024)

[symbol]

>key_e (SEQ ID NO: 27025)

[symbol]

>key_f (SEQ ID NO: 27026)

[symbol]

Additional Keys:
Key sequences are normal text
6His-MBP-TEV, 6His-TEV, and flexible linker sequences are underlined text)
(Co-localization domain is bolded text)
(Positions that can be mutated to any amino acid to tune responsivenses
are underlined bolded text. These are exemplary but not exhaustive.)
(Any number of consecutive amino acids from the N or C terminus in the non-
optional key sequence my be removed to tune responsivenese)
(all sequences in parentheses are optional)
>p76-long (SEQ ID NO: 27027)

[symbol]

>p76-short (SEQ ID NO: 27028)

[symbol]

>k76-long (SEQ ID NO: 27029)

[symbol]

>k76-short (SEQ ID NO: 27030)

[symbol]

>p76_GLISE (SEQ ID NO: 27031)

[symbol]

>p76_GSSEKIS (SEQ ID NO: 27032)

[symbol]

>p76_K26G (SEQ ID NO: 27033)

[symbol]

>p76-short_E19G (SEQ ID NO: 27034)

[symbol]

>p76-short_GLISE_E01_EGFR (SEQ ID NO: 27035)

[symbol]

>p76-short_AE_EGFR (SEQ ID NO: 27036)

[symbol]

>p76-short_AAE_EGFR (SEQ ID NO: 27037)

[symbol]

>p76-short_EE_EGFR (SEQ ID NO: 27038)

[symbol]

>p76-spytag (SEQ ID NO: 27039) [symbol]
AHIVMVDAYKPTK
>p76-short-spytag (SEQ ID NO: 27040) [symbol]
AHIVMVDAYKPTK
>sfGFP_VMAs_p18 (SEQ ID NO: 27041)

[symbol]

>P18_VMAc_mCherry (SEQ ID NO: 27042)

[symbol]

Cognate Keys for 2plus1 and 3plus1 STREPL1-LOCKR functional Cage designs):
>2plus1_KEY_100009.fasta alt_STREP_2plus1_1 (SEQ ID NO: 27043)

[symbol]

>2plus1_KEY_2 (SEQ ID NO: 27044)

[symbol]

>2plus1_KEY_3 (SEQ ID NO: 27045)

[symbol]

>2plus1_KEY_4 (SEQ ID NO: 27046)

[symbol]

>3plus1_KEY_1 (SEQ ID NO: 27047)

[symbol]

>3plus1_KEY_2 (SEQ ID NO: 27048)

[symbol]

>3plus1_KEY_3 (SEQ ID NO: 27049)

[symbol]

>3plus1_KEY_4 (SEQ ID NO: 27050)

[symbol]

-
SEQ ID NOs: 26,602-27,015:
>3plus1_GFP11_Key_Cterm_1 (SEQ ID NO: 26602)

[symbol]

>3plus1_GFP11_Key_Cterm_2 (SEQ ID NO: 26603)

[symbol]

>3plus1_GFP11_Key_Cterm_3 (SEQ ID NO: 26604)

[symbol]

>3plus1_GFP11_Key_Cterm_4 (SEQ ID NO: 26605)

[symbol]

>3plus1_GFP11_Key_Cterm_5 (SEQ ID NO: 26606)

[symbol]

>3plus1_GFP11_Key_Cterm_6 (SEQ ID NO: 26607)

[symbol]

>3plus1_GFP11_Key_Cterm_7 (SEQ ID NO: 26608)

[symbol]

>3plus1_GFP11_Key_Cterm_8 (SEQ ID NO: 26609)

[symbol]

>3plus1_GFP11_Key_Cterm_9 (SEQ ID NO: 26610)

[symbol]

>3plus1_GFP11_Key_Cterm_10 (SEQ ID NO: 26611)

[symbol]

>3plus1_GFP11_Key_Cterm_11 (SEQ ID NO: 26612)

[symbol]

>3plus1_GFP11_Key_Cterm_12 (SEQ ID NO: 26613)

[symbol]

>3plus1_GFP11_Key_Cterm_13 (SEQ ID NO: 26614)

[symbol]

>3plus1_GFP11_Key_Cterm_14 (SEQ ID NO: 26615)

[symbol]

>3plus1_GFP11_Key_Cterm_15 (SEQ ID NO: 26616)

[symbol]

>3plus1_GFP11_Key_Cterm_16 (SEQ ID NO: 26617)

[symbol]

>3plus1_GFP11_Key_Cterm_17 (SEQ ID NO: 26618)

[symbol]

>3plus1_GFP11_Key_Cterm_18 (SEQ ID NO: 26619)

[symbol]

>3plus1_GFP11_Key_Cterm_19 (SEQ ID NO: 26620)

[symbol]

>3plus1_GFP11_Key_Cterm_20 (SEQ ID NO: 26621)

[symbol]

>3plus1_GFP11_Key_Cterm_21 (SEQ ID NO: 26622)

[symbol]

>3plus1_GFP11_Key_Cterm_22 (SEQ ID NO: 26623)

[symbol]

>3plus1_GFP11_Key_Cterm_23 (SEQ ID NO: 26624)

[symbol]

>3plus1_GFP11_Key_Cterm_24 (SEQ ID NO: 26625)

[symbol]

>3plus1_GFP11_Key_Cterm_25 (SEQ ID NO: 26626)

[symbol]

>3plus1_GFP11_Key_Cterm_26 (SEQ ID NO: 26627)

[symbol]

>3plus1_GFP11_Key_Cterm_27 (SEQ ID NO: 26628)

[symbol]

>3plus1_GFP11_Key_Cterm_28 (SEQ ID NO: 26629)

[symbol]

>3plus1_GFP11_Key_Cterm_29 (SEQ ID NO: 26630)

[symbol]

>3plus1_GFP11_Key_Cterm_30 (SEQ ID NO: 26631)

[symbol]

>3plus1_GFP11_Key_Cterm_31 (SEQ ID NO: 26632)

[symbol]

>3plus1_GFP11_Key_Cterm_32 (SEQ ID NO: 26633)

[symbol]

>3plus1_GFP11_Key_Cterm_33 (SEQ ID NO: 26634)

[symbol]

>3plus1_GFP11_Key_Cterm_34 (SEQ ID NO: 26635)

[symbol]

>3plus1_GFP11_Key_Cterm_35 (SEQ ID NO: 26636)

[symbol]

>3plus1_GFP11_Key_Cterm_36 (SEQ ID NO: 26637)

[symbol]

>3plus1_GFP11_Key_Cterm_37 (SEQ ID NO: 26638)

[symbol]

>3plus1_GFP11_Key_Cterm_38 (SEQ ID NO: 26639)

[symbol]

>3plus1_GFP11_Key_Cterm_39 (SEQ ID NO: 26640)

[symbol]

>3plus1_GFP11_Key_Cterm_40 (SEQ ID NO: 26641)

[symbol]

>3plus1_GFP11_Key_Cterm_41 (SEQ ID NO: 26642)

[symbol]

>3plus1_GFP11_Key_Cterm_42 (SEQ ID NO: 26643)

[symbol]

>3plus1_GFP11_Key_Cterm_43 (SEQ ID NO: 26644)

[symbol]

>3plus1_GFP11_Key_Cterm_44 (SEQ ID NO: 26645)

[symbol]

>3plus1_GFP11_Key_Cterm_45 (SEQ ID NO: 26646)

[symbol]

>3plus1_GFP11_Key_Cterm_46 (SEQ ID NO: 26647)

[symbol]

>3plus1_GFP11_Key_Cterm_47 (SEQ ID NO: 26648)

[symbol]

>3plus1_GFP11_Key_Cterm_48 (SEQ ID NO: 26649)

[symbol]

>3plus1_GFP11_Key_Cterm_49 (SEQ ID NO: 26650)

[symbol]

>3plus1_GFP11_Key_Cterm_50 (SEQ ID NO: 26651)

[symbol]

>3plus1_GFP11_Key_Cterm_51 (SEQ ID NO: 26652)

[symbol]

>3plus1_GFP11_Key_Cterm_52 (SEQ ID NO: 26653)

[symbol]

>3plus1_GFP11_Key_Cterm_53 (SEQ ID NO: 26654)

[symbol]

>3plus1_GFP11_Key_Cterm_54 (SEQ ID NO: 26655)

[symbol]

>3plus1_GFP11_Key_Cterm_55 (SEQ ID NO: 26656)

[symbol]

>3plus1_GFP11_Key_Cterm_56 (SEQ ID NO: 26657)

[symbol]

>3plus1_GFP11_Key_Cterm_57 (SEQ ID NO: 26658)

[symbol]

>3plus1_GFP11_Key_Cterm_58 (SEQ ID NO: 26659)

[symbol]

>3plus1_GFP11_Key_Cterm_59 (SEQ ID NO: 26660)

[symbol]

>3plus1_GFP11_Key_Cterm_60 (SEQ ID NO: 26661)

[symbol]

>3plus1_GFP11_Key_Cterm_61 (SEQ ID NO: 26662)

[symbol]

>3plus1_GFP11_Key_Cterm_62 (SEQ ID NO: 26663)

[symbol]

>3plus1_GFP11_Key_Cterm_63 (SEQ ID NO: 26664)

[symbol]

>3plus1_GFP11_Key_Cterm_64 (SEQ ID NO: 26665)

[symbol]

>3plus1_GFP11_Key_Cterm_65 (SEQ ID NO: 26666)

[symbol]

>3plus1_GFP11_Key_Cterm_66 (SEQ ID NO: 26667)

[symbol]

>3plus1_GFP11_Key_Cterm_67 (SEQ ID NO: 26668)

[symbol]

>3plus1_GFP11_Key_Nterm_68 (SEQ ID NO: 26669)

[symbol]

>3plus1_GFP11_Key_Nterm_69 (SEQ ID NO: 26670)

[symbol]

>3plus1_GFP11_Key_Nterm_70 (SEQ ID NO: 26671)

[symbol]

>3plus1_GFP11_Key_Nterm_71 (SEQ ID NO: 26672)

[symbol]

>3plus1_GFP11_Key_Nterm_72 (SEQ ID NO: 26673)

[symbol]

>3plus1_GFP11_Key_Nterm_73 (SEQ ID NO: 26674)

[symbol]

>3plus1_GFP11_Key_Nterm_74 (SEQ ID NO: 26675)

[symbol]

>3plus1_GFP11_Key_Nterm_75 (SEQ ID NO: 26676)

[symbol]

>3plus1_GFP11_Key_Nterm_76 (SEQ ID NO: 26677)

[symbol]

>3plus1_GFP11_Key_Nterm_77 (SEQ ID NO: 26678)

[symbol]

>3plus1_GFP11_Key_Nterm_78 (SEQ ID NO: 26679)

[symbol]

>3plus1_GFP11_Key_Nterm_79 (SEQ ID NO: 26680)

[symbol]

>3plus1_GFP11_Key_Nterm_80 (SEQ ID NO: 26681)

[symbol]

>3plus1_GFP11_Key_Nterm_81 (SEQ ID NO: 26682)

[symbol]

>3plus1_GFP11_Key_Nterm_82 (SEQ ID NO: 26683)

[symbol]

>3plus1_GFP11_Key_Nterm_83 (SEQ ID NO: 26684)

[symbol]

>3plus1_GFP11_Key_Nterm_84 (SEQ ID NO: 26685)

[symbol]

>3plus1_GFP11_Key_Nterm_85 (SEQ ID NO: 26686)

[symbol]

>3plus1_GFP11_Key_Nterm_86 (SEQ ID NO: 26687)

[symbol]

>3plus1_GFP11_Key_Nterm_87 (SEQ ID NO: 26688)

[symbol]

>3plus1_GFP11_Key_Nterm_88 (SEQ ID NO: 26689)

[symbol]

>3plus1_GFP11_Key_Nterm_89 (SEQ ID NO: 26690)

[symbol]

>3plus1_GFP11_Key_Nterm_90 (SEQ ID NO: 26691)

[symbol]

>3plus1_GFP11_Key_Nterm_91 (SEQ ID NO: 26692)

[symbol]

>3plus1_GFP11_Key_Nterm_92 (SEQ ID NO: 26693)

[symbol]

>3plus1_GFP11_Key_Nterm_93 (SEQ ID NO: 26694)

[symbol]

>3plus1_GFP11_Key_Nterm_94 (SEQ ID NO: 26695)

[symbol]

>3plus1_GFP11_Key_Nterm_95 (SEQ ID NO: 26696)

[symbol]

>3plus1_GFP11_Key_Nterm_96 (SEQ ID NO: 26697)

[symbol]

>3plus1_GFP11_Key_Cterm_97 (SEQ ID NO: 26698)

[symbol]

>3plus1_GFP11_Key_Cterm_98 (SEQ ID NO: 26699)

[symbol]

>3plus1_GFP11_Key_Cterm_99 (SEQ ID NO: 26700)

[symbol]

>3plus1_GFP11_Key_Cterm_100 (SEQ ID NO: 26701)

[symbol]

>3plus1_GFP11_Key_Cterm_101 (SEQ ID NO: 26702)

[symbol]

>3plus1_GFP11_Key_Cterm_102 (SEQ ID NO: 26703)

[symbol]

>3plus1_GFP11_Key_Cterm_103 (SEQ ID NO: 26704)

[symbol]

>3plus1_GFP11_Key_Cterm_104 (SEQ ID NO: 26705)

[symbol]

>3plus1_GFP11_Key_Cterm_105 (SEQ ID NO: 26706)

[symbol]

>3plus1_GFP11_Key_Cterm_106 (SEQ ID NO: 26707)

[symbol]

>3plus1_GFP11_Key_Cterm_107 (SEQ ID NO: 26708)

[symbol]

>3plus1_GFP11_Key_Cterm_108 (SEQ ID NO: 26709)

[symbol]

>3plus1_GFP11_Key_Cterm_109 (SEQ ID NO: 26710)

[symbol]

>3plus1_GFP11_Key_Cterm_110 (SEQ ID NO: 26711)

[symbol]

>3plus1_GFP11_Key_Cterm_111 (SEQ ID NO: 26712)

[symbol]

>3plus1_GFP11_Key_Cterm_112 (SEQ ID NO: 26713)

[symbol]

>3plus1_GFP11_Key_Cterm_113 (SEQ ID NO: 26714)

[symbol]

>3plus1_GFP11_Key_Cterm_114 (SEQ ID NO: 26715)

[symbol]

>3plus1_GFP11_Key_Cterm_115 (SEQ ID NO: 26716)

[symbol]

>3plus1_GFP11_Key_Cterm_116 (SEQ ID NO: 26717)

[symbol]

>3plus1_GFP11_Key_Cterm_117 (SEQ ID NO: 26718)

[symbol]

>3plus1_GFP11_Key_Nterm_118 (SEQ ID NO: 26719)

[symbol]

>3plus1_GFP11_Key_Nterm_119 (SEQ ID NO: 26720)

[symbol]

>3plus1_GFP11_Key_Nterm_120 (SEQ ID NO: 26721)

[symbol]

>3plus1_GFP11_Key_Nterm_121 (SEQ ID NO: 26722)

[symbol]

>3plus1_GFP11_Key_Nterm_122 (SEQ ID NO: 26723)

[symbol]

>3plus1_GFP11_Key_Nterm_123 (SEQ ID NO: 26724)

[symbol]

>3plus1_GFP11_Key_Nterm_124 (SEQ ID NO: 26725)

[symbol]

>3plus1_GFP11_Key_Nterm_125 (SEQ ID NO: 26726)

[symbol]

>3plus1_GFP11_Key_Nterm_126 (SEQ ID NO: 26727)

[symbol]

>3plus1_GFP11_Key_Nterm_127 (SEQ ID NO: 26728)

[symbol]

>3plus1_GFP11_Key_Nterm_128 (SEQ ID NO: 26729)

[symbol]

>3plus1_GFP11_Key_Nterm_129 (SEQ ID NO: 26730)

[symbol]

>3plus1_GFP11_Key_Nterm_130 (SEQ ID NO: 26731)

[symbol]

>3plus1_GFP11_Key_Nterm_131 (SEQ ID NO: 26732)

[symbol]

>3plus1_GFP11_Key_Nterm_132 (SEQ ID NO: 26733)

[symbol]

>3plus1_GFP11_Key_Nterm_133 (SEQ ID NO: 26734)

[symbol]

>3plus1_GFP11_Key_Nterm_134 (SEQ ID NO: 26735)

[symbol]

>3plus1_GFP11_Key_Nterm_135 (SEQ ID NO: 26736)

[symbol]

>3plus1_GFP11_Key_Nterm_136 (SEQ ID NO: 26737)

[symbol]

>3plus1_GFP11_Key_Nterm_137 (SEQ ID NO: 26738)

[symbol]

>3plus1_GFP11_Key_Nterm_138 (SEQ ID NO: 26739)

[symbol]

>3plus1_GFP11_Key_Nterm_139 (SEQ ID NO: 26740)

[symbol]

>3plus1_GFP11_Key_Nterm_140 (SEQ ID NO: 26741)

[symbol]

>2plus1_GFP11_Key_Cterm_1 (SEQ ID NO: 26742)

[symbol]

>2plus1_GFP11_Key_Cterm_2 (SEQ ID NO: 26743)

[symbol]

>2plus1_GFP11_Key_Cterm_3 (SEQ ID NO: 26744)

[symbol]

>2plus1_GFP11_Key_Cterm_4 (SEQ ID NO: 26745)

[symbol]

>2plus1_GFP11_Key_Cterm_5 (SEQ ID NO: 26746)

[symbol]

>2plus1_GFP11_Key_Cterm_6 (SEQ ID NO: 26747)

[symbol]

>2plus1_GFP11_Key_Cterm_7 (SEQ ID NO: 26748)

[symbol]

>2plus1_GFP11_Key_Cterm_8 (SEQ ID NO: 26749)

[symbol]

>2plus1_GFP11_Key_Cterm_9 (SEQ ID NO: 26750)

[symbol]

>2plus1_GFP11_Key_Cterm_10 (SEQ ID NO: 26751)

[symbol]

>2plus1_GFP11_Key_Cterm_11 (SEQ ID NO: 26752)

[symbol]

>2plus1_GFP11_Key_Cterm_12 (SEQ ID NO: 26753)

[symbol]

>2plus1_GFP11_Key_Cterm_13 (SEQ ID NO: 26754)

[symbol]

>2plus1_GFP11_Key_Cterm_14 (SEQ ID NO: 26755)

[symbol]

>2plus1_GFP11_Key_Cterm_15 (SEQ ID NO: 26756)

[symbol]

>2plus1_GFP11_Key_Cterm_16 (SEQ ID NO: 26757)

[symbol]

>2plus1_GFP11_Key_Cterm_17 (SEQ ID NO: 26758)

[symbol]

>2plus1_GFP11_Key_Cterm_18 (SEQ ID NO: 26759)

[symbol]

>2plus1_GFP11_Key_Cterm_19 (SEQ ID NO: 26760)

[symbol]

>2plus1_GFP11_Key_Cterm_20 (SEQ ID NO: 26761)

[symbol]

>2plus1_GFP11_Key_Cterm_21 (SEQ ID NO: 26762)

[symbol]

>2plus1_GFP11_Key_Cterm_22 (SEQ ID NO: 26763)

[symbol]

>2plus1_GFP11_Key_Cterm_23 (SEQ ID NO: 26764)

[symbol]

>2plus1_GFP11_Key_Cterm_24 (SEQ ID NO: 26765)

[symbol]

>2plus1_GFP11_Key_Cterm_25 (SEQ ID NO: 26766)

[symbol]

>2plus1_GFP11_Key_Cterm_26 (SEQ ID NO: 26767)

[symbol]

>2plus1_GFP11_Key_Cterm_27 (SEQ ID NO: 26768)

[symbol]

>2plus1_GFP11_Key_Cterm_28 (SEQ ID NO: 26769)

[symbol]

>2plus1_GFP11_Key_Cterm_29 (SEQ ID NO: 26770)

[symbol]

>2plus1_GFP11_Key_Cterm_30 (SEQ ID NO: 26771)

[symbol]

>2plus1_GFP11_Key_Cterm_31 (SEQ ID NO: 26772)

[symbol]

>2plus1_GFP11_Key_Cterm_32 (SEQ ID NO: 26773)

[symbol]

>2plus1_GFP11_Key_Cterm_33 (SEQ ID NO: 26774)

[symbol]

>2plus1_GFP11_Key_Cterm_34 (SEQ ID NO: 26775)

[symbol]

>2plus1_GFP11_Key_Cterm_35 (SEQ ID NO: 26776)

[symbol]

>2plus1_GFP11_Key_Cterm_36 (SEQ ID NO: 26777)

[symbol]

>2plus1_GFP11_Key_Cterm_37 (SEQ ID NO: 26778)

[symbol]

>2plus1_GFP11_Key_Cterm_38 (SEQ ID NO: 26779)

[symbol]

>2plus1_GFP11_Key_Cterm_39 (SEQ ID NO: 26780)

[symbol]

>2plus1_GFP11_Key_Cterm_40 (SEQ ID NO: 26781)

[symbol]

>2plus1_GFP11_Key_Cterm_41 (SEQ ID NO: 26782)

[symbol]

>2plus1_GFP11_Key_Cterm_42 (SEQ ID NO: 26783)

[symbol]

>2plus1_GFP11_Key_Cterm_43 (SEQ ID NO: 26784)

[symbol]

>2plus1_GFP11_Key_Cterm_44 (SEQ ID NO: 26785)

[symbol]

>2plus1_GFP11_Key_Cterm_45 (SEQ ID NO: 26786)

[symbol]

>2plus1_GFP11_Key_Cterm_46 (SEQ ID NO: 26787)

[symbol]

>2plus1_GFP11_Key_Cterm_47 (SEQ ID NO: 26788)

[symbol]

>2plus1_GFP11_Key_Cterm_48 (SEQ ID NO: 26789)

[symbol]

>2plus1_GFP11_Key_Cterm_49 (SEQ ID NO: 26790)

[symbol]

>2plus1_GFP11_Key_Cterm_50 (SEQ ID NO: 26791)

[symbol]

>2plus1_GFP11_Key_Cterm_51 (SEQ ID NO: 26792)

[symbol]

>2plus1_GFP11_Key_Cterm_52 (SEQ ID NO: 26793)

[symbol]

>2plus1_GFP11_Key_Cterm_53 (SEQ ID NO: 26794)

[symbol]

>2plus1_GFP11_Key_Cterm_54 (SEQ ID NO: 26795)

[symbol]

>2plus1_GFP11_Key_Cterm_55 (SEQ ID NO: 26796)

[symbol]

>2plus1_GFP11_Key_Cterm_56 (SEQ ID NO: 26797)

[symbol]

>2plus1_GFP11_Key_Cterm_57 (SEQ ID NO: 26798)

[symbol]

>2plus1_GFP11_Key_Cterm_58 (SEQ ID NO: 26799)

[symbol]

>2plus1_GFP11_Key_Cterm_59 (SEQ ID NO: 26800)

[symbol]

>2plus1_GFP11_Key_Cterm_60 (SEQ ID NO: 26801)

[symbol]

>2plus1_GFP11_Key_Cterm_61 (SEQ ID NO: 26802)

[symbol]

>2plus1_GFP11_Key_Cterm_62 (SEQ ID NO: 26803)

[symbol]

>2plus1_GFP11_Key_Cterm_63 (SEQ ID NO: 26804)

[symbol]

>2plus1_GFP11_Key_Cterm_64 (SEQ ID NO: 26805)

[symbol]

>2plus1_GFP11_Key_Cterm_65 (SEQ ID NO: 26806)

[symbol]

>2plus1_GFP11_Key_Cterm_66 (SEQ ID NO: 26807)

[symbol]

>2plus1_GFP11_Key_Cterm_67 (SEQ ID NO: 26808)

[symbol]

>2plus1_GFP11_Key_Cterm_68 (SEQ ID NO: 26809)

[symbol]

>2plus1_GFP11_Key_Cterm_69 (SEQ ID NO: 26810)

[symbol]

>2plus1_GFP11_Key_Cterm_70 (SEQ ID NO: 26811)

[symbol]

>2plus1_GFP11_Key_Cterm_71 (SEQ ID NO: 26812)

[symbol]

>2plus1_GFP11_Key_Cterm_72 (SEQ ID NO: 26813)

[symbol]

>2plus1_GFP11_Key_Cterm_73 (SEQ ID NO: 26814)

[symbol]

>2plus1_GFP11_Key_Cterm_74 (SEQ ID NO: 26815)

[symbol]

>2plus1_GFP11_Key_Cterm_75 (SEQ ID NO: 26816)

[symbol]

>2plus1_GFP11_Key_Cterm_76 (SEQ ID NO: 26817)

[symbol]

>2plus1_GFP11_Key_Cterm_77 (SEQ ID NO: 26818)

[symbol]

>2plus1_GFP11_Key_Cterm_78 (SEQ ID NO: 26819)

[symbol]

>2plus1_GFP11_Key_Cterm_79 (SEQ ID NO: 26820)

[symbol]

>2plus1_GFP11_Key_Cterm_80 (SEQ ID NO: 26821)

[symbol]

>2plus1_GFP11_Key_Cterm_81 (SEQ ID NO: 26822)

[symbol]

>2plus1_GFP11_Key_Cterm_82 (SEQ ID NO: 26823)

[symbol]

>2plus1_GFP11_Key_Cterm_83 (SEQ ID NO: 26824)

[symbol]

>2plus1_GFP11_Key_Cterm_84 (SEQ ID NO: 26825)

[symbol]

>2plus1_GFP11_Key_Cterm_85 (SEQ ID NO: 26826)

[symbol]

>2plus1_GFP11_Key_Cterm_86 (SEQ ID NO: 26827)

[symbol]

>2plus1_GFP11_Key_Cterm_87 (SEQ ID NO: 26828)

[symbol]

>2plus1_GFP11_Key_Cterm_88 (SEQ ID NO: 26829)

[symbol]

>2plus1_GFP11_Key_Cterm_89 (SEQ ID NO: 26830)

[symbol]

>2plus1_GFP11_Key_Cterm_90 (SEQ ID NO: 26831)

[symbol]

>2plus1_GFP11_Key_Cterm_91 (SEQ ID NO: 26832)

[symbol]

>2plus1_GFP11_Key_Cterm_92 (SEQ ID NO: 26833)

[symbol]

>2plus1_GFP11_Key_Cterm_93 (SEQ ID NO: 26834)

[symbol]

>2plus1_GFP11_Key_Cterm_94 (SEQ ID NO: 26835)

[symbol]

>2plus1_GFP11_Key_Cterm_95 (SEQ ID NO: 26836)

[symbol]

>2plus1_GFP11_Key_Cterm_96 (SEQ ID NO: 26837)

[symbol]

>2plus1_GFP11_Key_Cterm_97 (SEQ ID NO: 26838)

[symbol]

>2plus1_GFP11_Key_Cterm_98 (SEQ ID NO: 26839)

[symbol]

>2plus1_GFP11_Key_Cterm_99 (SEQ ID NO: 26840)

[symbol]

>2plus1_GFP11_Key_Cterm_100 (SEQ ID NO: 26841)

[symbol]

>2plus1_GFP11_Key_Cterm_101 (SEQ ID NO: 26842)

[symbol]

>2plus1_GFP11_Key_Cterm_102 (SEQ ID NO: 26843)

[symbol]

>2plus1_GFP11_Key_Cterm_103 (SEQ ID NO: 26844)

[symbol]

>2plus1_GFP11_Key_Cterm_104 (SEQ ID NO: 26845)

[symbol]

>2plus1_GFP11_Key_Cterm_105 (SEQ ID NO: 26846)

[symbol]

>2plus1_GFP11_Key_Cterm_106 (SEQ ID NO: 26847)

[symbol]

>2plus1_GFP11_Key_Cterm_107 (SEQ ID NO: 26848)

[symbol]

>2plus1_GFP11_Key_Cterm_108 (SEQ ID NO: 26849)

[symbol]

>2plus1_GFP11_Key_Cterm_109 (SEQ ID NO: 26850)

[symbol]

>2plus1_GFP11_Key_Cterm_110 (SEQ ID NO: 26851)

[symbol]

>2plus1_GFP11_Key_Cterm_111 (SEQ ID NO: 26852)

[symbol]

>2plus1_GFP11_Key_Cterm_112 (SEQ ID NO: 26853)

[symbol]

>2plus1_GFP11_Key_Cterm_113 (SEQ ID NO: 26854)

[symbol]

>2plus1_GFP11_Key_Cterm_114 (SEQ ID NO: 26855)

[symbol]

>2plus1_GFP11_Key_Cterm_115 (SEQ ID NO: 26856)

[symbol]

>2plus1_GFP11_Key_Cterm_116 (SEQ ID NO: 26857)

[symbol]

>2plus1_GFP11_Key_Cterm_117 (SEQ ID NO: 26858)

[symbol]

>2plus1_GFP11_Key_Cterm_118 (SEQ ID NO: 26859)

[symbol]

>2plus1_GFP11_Key_Cterm_119 (SEQ ID NO: 26860)

[symbol]

>2plus1_GFP11_Key_Cterm_120 (SEQ ID NO: 26861)

[symbol]

>2plus1_GFP11_Key_Cterm_121 (SEQ ID NO: 26862)

[symbol]

>2plus1_GFP11_Key_Cterm_122 (SEQ ID NO: 26863)

[symbol]

>2plus1_GFP11_Key_Cterm_123 (SEQ ID NO: 26864)

[symbol]

>2plus1_GFP11_Key_Cterm_124 (SEQ ID NO: 26865)

[symbol]

>2plus1_GFP11_Key_Cterm_125 (SEQ ID NO: 26866)

[symbol]

>2plus1_GFP11_Key_Cterm_126 (SEQ ID NO: 26867)

[symbol]

>2plus1_GFP11_Key_Cterm_127 (SEQ ID NO: 26868)

[symbol]

>2plus1_GFP11_Key_Cterm_128 (SEQ ID NO: 26869)

[symbol]

>2plus1_GFP11_Key_Cterm_129 (SEQ ID NO: 26870)

[symbol]

>2plus1_GFP11_Key_Cterm_130 (SEQ ID NO: 26871)

[symbol]

>2plus1_GFP11_Key_Cterm_131 (SEQ ID NO: 26872)

[symbol]

>2plus1_GFP11_Key_Cterm_132 (SEQ ID NO: 26873)

[symbol]

>2plus1_GFP11_Key_Cterm_133 (SEQ ID NO: 26874)

[symbol]

>2plus1_GFP11_Key_Cterm_134 (SEQ ID NO: 26875)

[symbol]

>2plus1_GFP11_Key_Cterm_135 (SEQ ID NO: 26876)

[symbol]

>2plus1_GFP11_Key_Cterm_136 (SEQ ID NO: 26877)

[symbol]

>2plus1_GFP11_Key_Cterm_137 (SEQ ID NO: 26878)

[symbol]

>2plus1_GFP11_Key_Cterm_138 (SEQ ID NO: 26879)

[symbol]

>2plus1_GFP11_Key_Cterm_139 (SEQ ID NO: 26880)

[symbol]

>2plus1_GFP11_Key_Cterm_140 (SEQ ID NO: 26881)

[symbol]

>2plus1_GFP11_Key_Cterm_141 (SEQ ID NO: 26882)

[symbol]

>2plus1_GFP11_Key_Cterm_142 (SEQ ID NO: 26883)

[symbol]

>2plus1_GFP11_Key_Cterm_143 (SEQ ID NO: 26884)

[symbol]

>2plus1_GFP11_Key_Cterm_144 (SEQ ID NO: 26885)

[symbol]

>2plus1_GFP11_Key_Cterm_145 (SEQ ID NO: 26886)

[symbol]

>2plus1_GFP11_Key_Cterm_146 (SEQ ID NO: 26887)

[symbol]

>2plus1_GFP11_Key_Cterm_147 (SEQ ID NO: 26888)

[symbol]

>2plus1_GFP11_Key_Cterm_148 (SEQ ID NO: 26889)

[symbol]

>2plus1_GFP11_Key_Cterm_149 (SEQ ID NO: 26890)

[symbol]

>2plus1_GFP11_Key_Cterm_150 (SEQ ID NO: 26891)

[symbol]

>2plus1_GFP11_Key_Cterm_151 (SEQ ID NO: 26892)

[symbol]

>2plus1_GFP11_Key_Cterm_152 (SEQ ID NO: 26893)

[symbol]

>2plus1_GFP11_Key_Cterm_153 (SEQ ID NO: 26894)

[symbol]

>2plus1_GFP11_Key_Cterm_154 (SEQ ID NO: 26895)

[symbol]

>2plus1_GFP11_Key_Cterm_155 (SEQ ID NO: 26896)

[symbol]

>2plus1_GFP11_Key_Cterm_156 (SEQ ID NO: 26897)

[symbol]

>2plus1_GFP11_Key_Cterm_157 (SEQ ID NO: 26898)

[symbol]

>2plus1_GFP11_Key_Cterm_158 (SEQ ID NO: 26899)

[symbol]

>2plus1_GFP11_Key_Cterm_159 (SEQ ID NO: 26900)

[symbol]

>2plus1_GFP11_Key_Cterm_160 (SEQ ID NO: 26901)

[symbol]

>2plus1_GFP11_Key_Cterm_161 (SEQ ID NO: 26902)

[symbol]

>2plus1_GFP11_Key_Cterm_162 (SEQ ID NO: 26903)

[symbol]

>2plus1_GFP11_Key_Cterm_163 (SEQ ID NO: 26904)

[symbol]

>2plus1_GFP11_Key_Cterm_164 (SEQ ID NO: 26905)

[symbol]

>2plus1_GFP11_Key_Cterm_165 (SEQ ID NO: 26906)

[symbol]

>2plus1_GFP11_Key_Cterm_166 (SEQ ID NO: 26907)

[symbol]

>2plus1_GFP11_Key_Cterm_167 (SEQ ID NO: 26908)

[symbol]

>2plus1_GFP11_Key_Cterm_168 (SEQ ID NO: 26909)

[symbol]

>2plus1_GFP11_Key_Cterm_169 (SEQ ID NO: 26910)

[symbol]

>2plus1_GFP11_Key_Cterm_170 (SEQ ID NO: 26911)

[symbol]

>2plus1_GFP11_Key_Cterm_171 (SEQ ID NO: 26912)

[symbol]

>2plus1_GFP11_Key_Cterm_172 (SEQ ID NO: 26913)

[symbol]

>2plus1_GFP11_Key_Cterm_173 (SEQ ID NO: 26914)

[symbol]

>2plus1_GFP11_Key_Nterm_174 (SEQ ID NO: 26915)

[symbol]

>2plus1_GFP11_Key_Nterm_175 (SEQ ID NO: 26916)

[symbol]

>2plus1_GFP11_Key_Nterm_176 (SEQ ID NO: 26917)

[symbol]

>2plus1_GFP11_Key_Nterm_177 (SEQ ID NO: 26918)

[symbol]

>2plus1_GFP11_Key_Nterm_178 (SEQ ID NO: 26919)

[symbol]

>2plus1_GFP11_Key_Nterm_179 (SEQ ID NO: 26920)

[symbol]

>2plus1_GFP11_Key_Nterm_180 (SEQ ID NO: 26921)

[symbol]

>2plus1_GFP11_Key_Nterm_181 (SEQ ID NO: 26922)

[symbol]

>2plus1_GFP11_Key_Nterm_182 (SEQ ID NO: 26923)

[symbol]

>2plus1_GFP11_Key_Nterm_183 (SEQ ID NO: 26924)

[symbol]

>2plus1_GFP11_Key_Nterm_184 (SEQ ID NO: 26925)

[symbol]

>2plus1_GFP11_Key_Nterm_185 (SEQ ID NO: 26926)

[symbol]

>2plus1_GFP11_Key_Nterm_186 (SEQ ID NO: 26927)

[symbol]

>2plus1_GFP11_Key_Nterm_187 (SEQ ID NO: 26928)

[symbol]

>2plus1_GFP11_Key_Nterm_188 (SEQ ID NO: 26929)

[symbol]

>2plus1_GFP11_Key_Nterm_189 (SEQ ID NO: 26930)

[symbol]

>2plus1_GFP11_Key_Nterm_190 (SEQ ID NO: 26931)

[symbol]

>2plus1_GFP11_Key_Nterm_191 (SEQ ID NO: 26932)

[symbol]

>2plus1_GFP11_Key_Nterm_192 (SEQ ID NO: 26933)

[symbol]

>2plus1_GFP11_Key_Nterm_193 (SEQ ID NO: 26934)

[symbol]

>2plus1_GFP11_Key_Nterm_194 (SEQ ID NO: 26935)

[symbol]

>2plus1_GFP11_Key_Nterm_195 (SEQ ID NO: 26936)

[symbol]

>2plus1_GFP11_Key_Nterm_196 (SEQ ID NO: 26937)

[symbol]

>2plus1_GFP11_Key_Nterm_197 (SEQ ID NO: 26938)

[symbol]

>2plus1_GFP11_Key_Nterm_198 (SEQ ID NO: 26939)

[symbol]

>2plus1_GFP11_Key_Nterm_199 (SEQ ID NO: 26940)

[symbol]

>2plus1_GFP11_Key_Nterm_200 (SEQ ID NO: 26941)

[symbol]

>2plus1_GFP11_Key_Nterm_201 (SEQ ID NO: 26942)

[symbol]

>2plus1_GFP11_Key_Nterm_202 (SEQ ID NO: 26943)

[symbol]

>2plus1_GFP11_Key_Nterm_203 (SEQ ID NO: 26944)

[symbol]

>2plus1_GFP11_Key_Nterm_204 (SEQ ID NO: 26945)

[symbol]

>2plus1_GFP11_Key_Nterm_205 (SEQ ID NO: 26946)

[symbol]

>2plus1_GFP11_Key_Nterm_206 (SEQ ID NO: 26947)

[symbol]

>2plus1_GFP11_Key_Nterm_207 (SEQ ID NO: 26948)

[symbol]

>2plus1_GFP11_Key_Nterm_208 (SEQ ID NO: 26949)

[symbol]

>2plus1_GFP11_Key_Nterm_209 (SEQ ID NO: 26950)

[symbol]

>2plus1_GFP11_Key_Nterm_210 (SEQ ID NO: 26951)

[symbol]

>2plus1_GFP11_Key_Nterm_211 (SEQ ID NO: 26952)

[symbol]

>2plus1_GFP11_Key_Nterm_212 (SEQ ID NO: 26953)

[symbol]

>2plus1_GFP11_Key_Nterm_213 (SEQ ID NO: 26954)

[symbol]

>2plus1_GFP11_Key_Nterm_214 (SEQ ID NO: 26955)

[symbol]

>2plus1_GFP11_Key_Nterm_215 (SEQ ID NO: 26956)

[symbol]

>2plus1_GFP11_Key_Nterm_216 (SEQ ID NO: 26957)

[symbol]

>2plus1_GFP11_Key_Nterm_217 (SEQ ID NO: 26958)

[symbol]

>2plus1_GFP11_Key_Nterm_218 (SEQ ID NO: 26959)

[symbol]

>2plus1_GFP11_Key_Nterm_219 (SEQ ID NO: 26960)

[symbol]

>2plus1_GFP11_Key_Nterm_220 (SEQ ID NO: 26961)

[symbol]

>2plus1_GFP11_Key_Nterm_221 (SEQ ID NO: 26962)

[symbol]

>2plus1_GFP11_Key_Nterm_222 (SEQ ID NO: 26963)

[symbol]

>2plus1_GFP11_Key_Nterm_223 (SEQ ID NO: 26964)

[symbol]

>2plus1_GFP11_Key_Nterm_224 (SEQ ID NO: 26965)

[symbol]

>2plus1_GFP11_Key_Nterm_225 (SEQ ID NO: 26966)

[symbol]

>2plus1_GFP11_Key_Nterm_226 (SEQ ID NO: 26967)

[symbol]

>2plus1_GFP11_Key_Nterm_227 (SEQ ID NO: 26968)

[symbol]

>2plus1_GFP11_Key_Nterm_228 (SEQ ID NO: 26969)

[symbol]

>2plus1_GFP11_Key_Nterm_229 (SEQ ID NO: 26970)

[symbol]

>2plus1_GFP11_Key_Nterm_230 (SEQ ID NO: 26971)

[symbol]

>2plus1_GFP11_Key_Nterm_231 (SEQ ID NO: 26972)

[symbol]

>2plus1_GFP11_Key_Nterm_232 (SEQ ID NO: 26973)

[symbol]

>2plus1_GFP11_Key_Nterm_233 (SEQ ID NO: 26974)

[symbol]

>2plus1_GFP11_Key_Nterm_234 (SEQ ID NO: 26975)

[symbol]

>2plus1_GFP11_Key_Nterm_235 (SEQ ID NO: 26976)

[symbol]

>2plus1_GFP11_Key_Nterm_236 (SEQ ID NO: 26977)

[symbol]

>2plus1_GFP11_Key_Nterm_237 (SEQ ID NO: 26978)

[symbol]

>2plus1_GFP11_Key_Nterm_238 (SEQ ID NO: 26979)

[symbol]

>2plus1_GFP11_Key_Nterm_239 (SEQ ID NO: 26980)

[symbol]

>2plus1_GFP11_Key_Nterm_240 (SEQ ID NO: 26981)

[symbol]

>2plus1_GFP11_Key_Nterm_241 (SEQ ID NO: 26982)

[symbol]

>2plus1_GFP11_Key_Nterm_242 (SEQ ID NO: 26983)

[symbol]

>2plus1_GFP11_Key_Nterm_243 (SEQ ID NO: 26984)

[symbol]

>2plus1_GFP11_Key_Nterm_244 (SEQ ID NO: 26985)

[symbol]

>2plus1_GFP11_Key_Nterm_245 (SEQ ID NO: 26986)

[symbol]

>2plus1_GFP11_Key_Nterm_246 (SEQ ID NO: 26987)

[symbol]

>2plus1_GFP11_Key_Nterm_247 (SEQ ID NO: 26988)

[symbol]

>2plus1_GFP11_Key_Nterm_248 (SEQ ID NO: 26989)

[symbol]

>2plus1_GFP11_Key_Nterm_249 (SEQ ID NO: 26990)

[symbol]

>2plus1_GFP11_Key_Nterm_250 (SEQ ID NO: 26991)

[symbol]

>2plus1_GFP11_Key_Nterm_251 (SEQ ID NO: 26992)

[symbol]

>2plus1_GFP11_Key_Nterm_252 (SEQ ID NO: 26993)

[symbol]

>2plus1_GFP11_Key_Nterm_253 (SEQ ID NO: 26994)

[symbol]

>2plus1_GFP11_Key_Nterm_254 (SEQ ID NO: 26995)

[symbol]

>2plus1_GFP11_Key_Nterm_255 (SEQ ID NO: 26996)

[symbol]

>2plus1_GFP11_Key_Nterm_256 (SEQ ID NO: 26997)

[symbol]

>2plus1_GFP11_Key_Nterm_257 (SEQ ID NO: 26998)

[symbol]

>2plus1_GFP11_Key_Nterm_258 (SEQ ID NO: 26999)

[symbol]

>2plus1_GFP11_Key_Nterm_259 (SEQ ID NO: 27000)

[symbol]

>2plus1_GFP11_Key_Nterm_260 (SEQ ID NO: 27001)

[symbol]

>2plus1_GFP11_Key_Nterm_261 (SEQ ID NO: 27002)

[symbol]

>2plus1_GFP11_Key_Nterm_262 (SEQ ID NO: 27003)

[symbol]

>2plus1_GFP11_Key_Nterm_263 (SEQ ID NO: 27004)

[symbol]

>2plus1_GFP11_Key_Nterm_264 (SEQ ID NO: 27005)

[symbol]

>2plus1_GFP11_Key_Nterm_265 (SEQ ID NO: 27006)

[symbol]

>2plus1_GFP11_Key_Nterm_266 (SEQ ID NO: 27007)

[symbol]

>2plus1_GFP11_Key_Nterm_267 (SEQ ID NO: 27008)

[symbol]

>2plus1_GFP11_Key_Nterm_258 (SEQ ID NO: 27009)

[symbol]

>2plus1_GFP11_Key_Nterm_258 (SEQ ID NO: 27010)

[symbol]

>2plus1_GFP11_Key_Nterm_258 (SEQ ID NO: 27011)

[symbol]

>2plus1_GFP11_Key_Nterm_258 (SEQ ID NO: 27012)

[symbol]

>2plus1_GFP11_Key_Nterm_258 (SEQ ID NO: 27013)

[symbol]

>2plus1_GFP11_Key_Nterm_258 (SEQ ID NO: 27014)

[symbol]

>2plus1_GFP11_Key_Nterm_258 (SEQ ID NO: 27015)

[symbol]

>3plus1_Key_668_Nterm (SEQ ID NO: 27,322)

[symbol]

>3plus1_Key_668_Cterm (SEQ ID NO: 27,323)

[symbol]

>3plus1_Key_668_Cterm (SEQ ID NO: 27,324)

[symbol]

>3plus1_Key_668_Cterm (SEQ ID NO: 27,325)

[symbol]

>3plus1_Key_668_Cterm (SEQ ID NO: 27,326)

[symbol]

>3plus1_Key_669_Nterm (SEQ ID NO: 27,327)

[symbol]

>3plus1_Key_670_Nterm (SEQ ID NO: 27,328)

[symbol]

>3plus1_Key_670_Cterm (SEQ ID NO: 27,329)

[symbol]

>3plus1_Key_670_Cterm (SEQ ID NO: 27,330)

[symbol]

>3plus1_Key_670_Cterm (SEQ ID NO: 27,331)

[symbol]

>3plus1_Key_670_Nterm (SEQ ID NO: 27,332)

[symbol]

>3plus1_Key_670_Cterm (SEQ ID NO: 27,333)

[symbol]

>3plus1_Key_670_Nterm (SEQ ID NO: 27,334)

[symbol]

>3plus1_Key_670_Nterm (SEQ ID NO: 27,335)

[symbol]

>3plus1_Key_670_Nterm (SEQ ID NO: 27,336)

[symbol]

>3plus1_Key_670_Nterm (SEQ ID NO: 27,337)

[symbol]

>3plus1_Key_671_Cterm (SEQ ID NO: 27,338)

[symbol]

>3plus1_Key_671_Cterm (SEQ ID NO: 27,339)

[symbol]

>3plus1_Key_671_Cterm (SEQ ID NO: 27,340)

[symbol]

>3plus1_Key_671_Cterm (SEQ ID NO: 27,341)

[symbol]

>3plus1_Key_672_cterm (SEQ ID NO: 27,342)

[symbol]

>3plus1_Key_67 > 3_Nterm (SEQ ID NO: 27,343)

[symbol]

>3plus1_Key_67 > 3_Cterm (SEQ ID NO: 27,344)

[symbol]

>3plus1_Key_67 > 3_Nterm (SEQ ID NO: 27,345)

[symbol]

>3plus1_Key_674_Nterm (SEQ ID NO: 27,346)

[symbol]

>3plus1_Key_674_Cterm (SEQ ID NO: 27,347)

[symbol]

>3plus1_Key_675_Nterm (SEQ ID NO: 27,348)

[symbol]

>3plus1_Key_676_Nterm (SEQ ID NO: 27,349)

[symbol]

>3plus1_Key_677_Nterm (SEQ ID NO: 27,350)

[symbol]

>3plus1_Key_677_Cterm (SEQ ID NO: 27,351)

[symbol]

>3plus1_Key_678_Nterm (SEQ ID NO: 27,352)

[symbol]

>3plus1_Key_678_Cterm (SEQ ID NO: 27,353)

[symbol]

>3plus1_Key_678_Cterm (SEQ ID NO: 27,354)

[symbol]

>3plus1_Key_678_Nterm (SEQ ID NO: 27,355)

[symbol]

>3plus1_Key_678_Nterm (SEQ ID NO: 27,356)

[symbol]

>3plus1_Key_679_Cterm (SEQ ID NO: 27,357)

[symbol]

>3plus1_Key_679_Nterm (SEQ ID NO: 27,358)

[symbol]

[symbol]

indicates data missing or illegible when filed

[0181] In a specific embodiment, the key polypeptides comprises an amino acid sequence at least 40%, 50%, 60%, 70%, 75%, 80%, 90%, 91%, 92%, 93%, 94%, 95%, 96%, 97%, 98%, 99%, or 100% identical to the amino acid sequence of a key polypeptide in Table 6, 7 (polypeptides with an odd-numbered SEQ ID NO between SEQ ID NOS: 27127 and 27277), Table 8 and/or Table 9. In another specific embodiment, the key polypeptides comprise an amino acid sequence at least 40%, 45%, 50%, 55%, 60%, 65%, 70%, 75%, 80%, 85%, 90%, 91%, 92%, 93%, 94%, 95%, 96%, 97%, 98%, 99%, or 100% identical to the amino acid sequence of a key polypeptide in Table 8. In another specific embodiment, the key polypeptides comprise an amino acid sequence at least 40%, 45%, 50%, 55%, 60%, 65%, 70%, 75%, 80%, 85%, 90%, 91%, 92%, 93%, 94%, 95%, 96%, 97%, 98%, 99% or 100% identical to the amino acid sequence of a key polypeptide in Table 9. In one embodiment of each of the above, the percent identity may be determined without the optional N- and C-terminal 60 amino acids; in another embodiment, the percent identify may be determined with the optional N- and C-terminal 60 amino acids.

TABLE 6

| Row | Cage | Key |
|---|---|---|
| Number | (Colum 1) | (Colum 2) |
| 1 | [symbol] | [symbol] |
| 2 | [symbol] | [symbol] |
| 3 | [symbol] | [symbol] |
| 4 | [symbol] | [symbol] |
| 5 | [symbol] | [symbol] |
| 6 | [symbol] | [symbol] |
| 7 | [symbol] | [symbol] |
| 8 | [symbol] | [symbol] |
| 9 | [symbol] | [symbol] |
| 10 | [symbol] | [symbol] |
| 11 | [symbol] | [symbol] |
| 12 | [symbol] | [symbol] |
| 13 | [symbol] | [symbol] |
| 14 | [symbol] | [symbol] |
| 15 | [symbol] | [symbol] |
| 16 | [symbol] | [symbol] |

[symbol]

indicates data missing or illegible when filed

TABLE 7

| Cage Name | Cage Sequence | Key Name | Key Sequence |
|---|---|---|---|
| 2plus1_Cage_ | [symbol] | 2plus1_Key_C | [symbol] |
| Cterm_2406 | (SEQ ID NO: 27126) | term_2406 | (SEQ ID NO: 27127) |
| 2plus1_Cage_ | [symbol] | 2plus1_Key_C | [symbol] |
| Cterm_5398 | (SEQ ID NO: 27128) | term_5398 | (SEQ ID NO: 27129) |
| 2plus1_Cage_ | [symbol] | 2plus1_Key_C | [symbol] |
| Cterm_5405 | (SEQ ID NO: 27130) | term_5405 | (SEQ ID NO: 27131) |
| 2plus1_Cage_ | [symbol] | 2plus1_Key_C | [symbol] |
| Cterm_5406 | (SEQ ID NO: 27132) | term_5406 | (SEQ ID NO: 27133) |
| 2plus1_Cage_ | [symbol] | 2plus1_Key_C | [symbol] |
| Cterm_5409 | (SEQ ID NO: 27134) | term_5409 | (SEQ ID NO: 27135) |
| 2plus1_Cage_ | [symbol] | 2plus1_Key_C | [symbol] |
| Cterm_5410 | (SEQ ID NO: 27136) | term_5410 | (SEQ ID NO: 27137) |
| 2plus1_Cage_ | [symbol] | 2plus1_Key_C | [symbol] |
| Cterm_5413 | (SEQ ID NO: 27138) | term_5413 | (SEQ ID NO: 27139) |
| 2plus1_Cage_ | [symbol] | 2plus1_Key_C | [symbol] |
| 5414_GFP11_C | (SEQ ID NO: 27140) | term_5414 | (SEQ ID NO: 27141) |
| term | | | |
| 2plus1_Cage_ | [symbol] | 2plus1_Key_C | [symbol] |
| 5414_GFP11_C | (SEQ ID NO: 27142) | term_5414 | (SEQ ID NO: 27143) |
| term | | | |
| 2plus1_Cage_ | [symbol] | 2plus1_Key_C | [symbol] |
| 5414_GFP11_C | (SEQ ID NO: 27144) | term_5414 | (SEQ ID NO: 27145) |
| term | | | |
| 2plus1_Cage_ | [symbol] | 2plus1_Key_C | [symbol] |
| Cterm_5421 | (SEQ ID NO: 27146) | term_5421 | (SEQ ID NO: 27147) |
| 2plus1_Cage_ | [symbol] | 2plus1_Key_C | [symbol] |
| Cterm_5432 | (SEQ ID NO: 27148) | term_5432 | (SEQ ID NO: 27149) |
| 2plus1_Cage_ | [symbol] | 2plus1_Key_C | [symbol] |
| Cterm_5435 | (SEQ ID NO: 27150) | term_5435 | (SEQ ID NO: 27151) |
| 2plus1_Cage_ | [symbol] | 2plus1_Key_C | [symbol] |
| Cterm_5437 | (SEQ ID NO: 27152) | term_5437 | (SEQ ID NO: 27153) |
| 2plus1_Cage_ | [symbol] | 2plus1_Key_C | [symbol] |
| Cterm_5439 | (SEQ ID NO: 27154) | term_5439 | (SEQ ID NO: 27155) |
| 2plus1_Cage_ | [symbol] | 2plus1_Key_C | [symbol] |
| Cterm_5447 | (SEQ ID NO: 27156) | term_5447 | (SEQ ID NO: 27157) |
| 2plus1_Cage_ | [symbol] | 2plus1_Key_C | [symbol] |
| Cterm_5456 | (SEQ ID NO: 27158) | term_5465 | (SEQ ID NO: 27159) |
| 2plus1_Cage_ | [symbol] | 2plus1_Key_C | [symbol] |
| Cterm_5470 | (SEQ ID NO: 27160) | term_5470 | (SEQ ID NO: 27161) |
| 2plus1_Cage_ | [symbol] | 2plus1_Key_N | [symbol] |
| Nterm_2406 | (SEQ ID NO: 27162) | term_2406 | (SEQ ID NO: 27163) |
| 2plus1_Cage_ | [symbol] | 2plus1_Key_N | [symbol] |
| Nterm_5406 | (SEQ ID NO: 27164) | term_5406 | (SEQ ID NO: 27165) |
| 2plus1_Cage_ | [symbol] | 2plus1_Key_N | [symbol] |
| Nterm_5409 | (SEQ ID NO: 27166) | term_5409 | (SEQ ID NO: 27167) |
| 2plus1_Cage_ | [symbol] | 2plus1_Key_N | [symbol] |
| Nterm_5410 | (SEQ ID NO: 27168) | term_5410 | (SEQ ID NO: 27169) |
| 2plus1_Cage_ | [symbol] | 2plus1_Key_N | [symbol] |
| Nterm_5413 | (SEQ ID NO: 27170) | term_5413 | (SEQ ID NO: 27171) |
| 2plus1_Cage_ | [symbol] | 2plus1_Key_N | [symbol] |
| 5414_GFP11_N | (SEQ ID NO: 27172) | term_5414 | (SEQ ID NO: 27173) |
| 2plus1_Cage_ | [symbol] | 2plus1_Key_N | [symbol] |
| 5414_GFP11_N | (SEQ ID NO: 27174) | term_5414 | (SEQ ID NO: 27175) |
| term | | | |
| 2plus1_Cage_ | [symbol] | 2plus1_Key_N | [symbol] |
| Nterm_5439 | (SEQ ID NO: 27176) | term_5439 | (SEQ ID NO: 27177) |
| 3plus_Cage_ | [symbol] | 3plus_Key_C | [symbol] |
| 529_GFP11_C | (SEQ ID NO: 27178) | term_529 | (SEQ ID NO: 27179) |
| term | | | |
| 3plus1_Cage_ | [symbol] | 3plus1_Key_C | [symbol] |
| Cterm_263 | (SEQ ID NO: 27180) | term_263 | (SEQ ID NO: 27181) |
| 3plus1_Cage_ | [symbol] | 3plus1_Key_C | [symbol] |
| Cterm_494 | (SEQ ID NO: 27182) | term_494 | (SEQ ID NO; 27183) |
| 3plus1_Cage_ | [symbol] | 3plus1_Key_C | [symbol] |
| Cterm_500 | (SEQ ID NO: 27184) | term_500 | (SEQ ID NO: 27185) |
| 3plus1_Cage_ | [symbol] | 3plus1_Key_C | [symbol] |
| 506_GFP11_C | (SEQ ID NO: 27186) | term_506 | (SEQ ID NO: 27187) |
| term | | | |
| 3plus1_Cage_ | [symbol] | 3plus1_Key_C | [symbol] |
| 508_GFP11_C | (SEQ ID NO: 27188) | term_508 | (SEQ ID NO: 27189) |
| term | | | |
| 3plus1_Cage_ | [symbol] | 3plus1_Key_C | [symbol] |
| Cterm_510 | (SEQ ID NO: 27190) | term_510 | (SEQ ID NO: 27191) |
| 3plus1_Cage_ | [symbol] | 3plus1_Key_C | [symbol] |
| 528_GFP11_C | (SEQ ID NO: 27192) | term_528 | (SEQ ID NO: 27193) |
| term | | | |
| 3plus1_Cage_ | [symbol] | 3plus1_Key_C | [symbol] |
| 528_GFP11_C | (SEQ ID NO: 27194) | term_528 | (SEQ ID NO: 27195) |
| term | | | |
| 3plus1_Cage_ | [symbol] | 3plus1_Key_C | [symbol] |
| 528_GFP11_C | (SEQ ID NO: 27196) | term_528 | (SEQ ID NO: 27197) |
| term | | | |
| 3plus1_Cage_ | [symbol] | 3plus1_Key_C | [symbol] |
| 529_GFP11_C | (SEQ ID NO: 27198) | term_529 | (SEQ ID NO: 27199) |
| term | | | |
| 3plus1_Cage_ | [symbol] | 3plus1_Key_C | [symbol] |
| 529_GFP11_C | (SEQ ID NO: 27200) | term_529 | (SEQ ID NO: 27201) |
| term | | | |
| 3plus1_Cage_ | [symbol] | 3plus1_Key_C | [symbol] |
| 529_GFP11_C | (SEQ ID NO: 27202) | term_529 | (SEQ ID NO: 27203) |
| term | | | |
| 3plus1_Cage_ | [symbol] | 3plus1_Key_C | [symbol] |
| Cterm_530 | (SEQ ID NO: 27204) | term_530 | (SEQ ID NO: 27205) |
| 3plus1_Cage_ | [symbol] | 3plus1_Key_C | [symbol] |
| 534_GFP11_C | (SEQ ID NO: 27206) | term_534 | (SEQ ID NO: 27207) |
| term | | | |
| 3plus1_Cage_ | [symbol] | 3plus1_Key_C | [symbol] |
| 534_GFP11_C | (SEQ ID NO: 27208) | term_534 | (SEQ ID NO: 27209) |
| term | | | |
| 3plus1_Cage_ | [symbol] | 3plus1_Key_C | [symbol] |
| 534_GFP11_C | (SEQ ID NO: 27210) | term_534 | (SEQ ID NO: 27211) |
| term | | | |
| 3plus1_Cage_ | [symbol] | 3plus1_Key_C | [symbol] |
| Cterm_539 | (SEQ ID NO: 27212) | term_539 | (SEQ ID NO: 27213) |
| 3plus1_Cage_ | [symbol] | 3plus1_Key_C | [symbol] |
| Cterm_548 | (SEQ ID NO: 27214) | term_548 | (SEQ ID NO: 27215) |
| 3plus1_Cage_ | [symbol] | 3plus1_Key_C | [symbol] |
| Cterm_556 | (SEQ ID NO: 27216) | term_556 | (SEQ ID NO: 27217) |
| 3plus1_Cage_ | [symbol] | 3plus1_Key_C | [symbol] |
| Cterm_560 | (SEQ ID NO: 27218) | term_560 | (SEQ ID NO: 27219) |
| 3plus1_Cage_ | [symbol] | 3plus1_Key_C | [symbol] |
| 568_GFP11_C | (SEQ ID NO: 27220) | term_568 | (SEQ ID NO: 27221) |
| term | | | |
| 3plus1_Cage_ | [symbol] | 3plus1_Key_C | [symbol] |
| 568_GFP11_C | (SEQ ID NO: 27222) | term_568 | (SEQ ID NO: 27223) |
| term | | | |
| 3plus1_Cage_ | [symbol] | 3plus1_Key_C | [symbol] |
| Cterm_572 | (SEQ ID NO: 27224) | term_572 | (SEQ ID NO: 27225) |
| 3plus1_Cage_ | [symbol] | 3plus1_Key_C | [symbol] |
| Cterm_581 | (SEQ ID NO: 27226) | term_581 | (SEQ ID NO: 27227) |
| 3plus1_Cage_ | [symbol] | 3plus1_Key_C | [symbol] |
| Cterm_585 | (SEQ ID NO: 27228) | term_585 | (SEQ ID NO: 27229) |
| 3plus1_Cage_ | [symbol] | 3plus1_Key_C | [symbol] |
| Cterm_587 | (SEQ ID NO: 27230) | term_587 | (SEQ ID NO: 27231) |
| 3plus1_Cage_ | [symbol] | 3plus1_Key_C | [symbol] |
| Cterm_605 | (SEQ ID NO: 27232) | term_605 | (SEQ ID NO: 27233) |
| 3plus1_Cage_ | [symbol] | 3plus1_Key_C | [symbol] |
| Cterm_607 | (SEQ ID NO: 27234) | term_607 | (SEQ ID NO: 27235) |
| 3plus1_Cage_ | [symbol] | 3plus1_Key_C | [symbol] |
| Cterm_610 | (SEQ ID NO: 27236) | term_610 | (SEQ ID NO: 27237) |
| 3plus1_Cage_ | [symbol] | 3plus1_Key_C | [symbol] |
| 611_GFP11_C | (SEQ ID NO: 27238) | term_611 | (SEQ ID NO: 27239) |
| term | | | |
| 3plus1_Cage_ | [symbol] | 3plus1_Key_C | [symbol] |
| Cterm_632 | (SEQ ID NO: 27240) | term_632 | (SEQ ID NO: 27241) |
| 3plus1_Cage_ | [symbol] | 3plus1_Key_C | [symbol] |
| Cterm_641 | (SEQ ID NO: 27242) | term_641 | (SEQ ID NO: 27243) |
| 3plus1_Cage_ | [symbol] | 3plus1_Key_C | [symbol] |
| 646_GFP11_C | (SEQ ID NO: 27244) | term_646 | (SEQ ID NO: 27245) |
| term | | | |
| 3plus1_Cage_ | [symbol] | 3plus1_Key_C | [symbol] |
| 646_GFP11_C | (SEQ ID NO: 27246) | term_646 | (SEQ ID NO: 27247) |
| term | | | |
| 3plus1_Cage_ | [symbol] | 3plus1_Key_C | [symbol] |
| 646_GFP11_C | (SEQ ID NO: 27248) | term_646 | (SEQ ID NO: 27249) |
| term | | | |
| 3plus1_Cage_ | [symbol] | 3plus1_Key_C | [symbol] |
| 647_GFP11_C | (SEQ ID NO: 27250) | term_647 | (SEQ ID NO: 27251) |
| term | | | |
| 3plus1_Cage_ | [symbol] | 3plus1_Key_C | [symbol] |
| 647_GFP11_C | (SEQ ID NO: 27252) | term_647 | (SEQ ID NO: 27253) |
| term | | | |
| 3plus1_Cage_ | [symbol] | 3plus1_Key_C | [symbol] |
| Cterm_647 | (SEQ ID NO: 27254) | term_647 | (SEQ ID NO: 27255) |
| 3plus1_Cage_ | [symbol] | 3plus1_Key_C | [symbol] |
| Cterm_653 | (SEQ ID NO: 27256) | term_653 | (SEQ ID NO: 27257) |
| 3plus1_Cage_ | [symbol] | 3plus1_Key_C | [symbol] |
| Cterm_658 | (SEQ ID NO: 27258) | term_658 | (SEQ ID NO: 27259) |
| 3plus1_Cage_ | [symbol] | 3plus1_Key_C | [symbol] |
| Cterm_660 | (SEQ ID NO: 27260) | term_660 | (SEQ ID NO: 27261) |
| 3plus1_Cage_ | [symbol] | 3plus1_Key_C | [symbol] |
| Nterm_263 | (SEQ ID NO: 27262) | term_263 | (SEQ ID NO: 27263) |
| 3plus1_Cage_ | [symbol] | 3plus1_Key_N | [symbol] |
| Nterm_500 | (SEQ ID NO: 27264) | term_500 | (SEQ ID NO: 27265) |
| 3plus1_Cage_ | [symbol] | 3plus1_Key_N | [symbol] |
| Nterm_510 | (SEQ ID NO: 27266) | term_510 | (SEQ ID NO: 27267) |
| 3plus1_Cage_ | [symbol] | 3plus1_Key_N | [symbol] |
| 529_GFP11_N | (SEQ ID NO: 27268) | term_647 | (SEQ ID NO: 27269) |
| term | | | |
| 3plus1_Cage_ | [symbol] | 3plus1_Key_N | [symbol] |
| 568_GFP11_N | (SEQ ID NO: 27270) | term_568 | (SEQ ID NO: 27271) |
| term | | | |
| 3plus1_Cage_ | [symbol] | 3plus1_Key_N | [symbol] |
| Nterm_581 | (SEQ ID NO: 27272) | term_581 | (SEQ ID NO: 27273) |
| 3plus1_Cage_ | [symbol] | 3plus1_Key_N | [symbol] |
| 610_GFP11_N | (SEQ ID NO: 27274) | term_610 | (SEQ ID NO: 27275) |
| term | | | |
| 3plus1_Cage_ | [symbol] | 3plus1_Key_N | [symbol] |
| 647_GFP11_N | (SEQ ID NO: 27276) | term_647 | (SEQ ID NO: 27277) |
| term | | | |

[symbol]

indicates data missing or illegible when filed

| Row number | Cage (column 1) | Key (Column 2) |
|---|---|---|
| 1 | LOCKER_ [symbol] (SEQ ID NO:6) | [symbol] |
| | [symbol] | [symbol] |
| | [symbol] | [symbol] |
| | [symbol] | [symbol] |
| | [symbol] | [symbol] |
| | [symbol] | [symbol] |
| 2 | LOCKERb (SEQ ID NO:7) | key_b (SEQ ID NO: [symbol] ) |
| 3 | LOCKERc (SEQ ID NO:8) | key_c (SEQ ID NO: [symbol] ) |
| 4 | [symbol] | [symbol] |

[symbol]

indicates data missing or illegible when filed

TABLE 9

| Cage Name | Cage Sequence | Key Name | Key Sequence |
|---|---|---|---|
| 2plus1- | SEVDEVVKEVEDLVRRNEELVEEVVRRVEKVVTDDRRLVEEVVREIRKI | 2plus1_Key_ | EKVLRKLEKVIREVRERSTRALRKV |
| Cage_ | VKDVEDLARKLDKEELKRVLDEMRERIERLLEKLXRHSKKLDDELXRLL | Cterm_2406 | EEVIRRVREESERALRDLERVVKEY |
| Cterm_2406 | SELREHSRRYEKRLEDLLKELRERGVDEKVLRKLEKVIREVRERSTRAL | | EKRMREAAR (SEQ ID NO: |
| | RKVEEVIRRVREESERALRDLERVVKEVEKRMREAAR (SEQ ID NO: | | 27127) |
| | 27126) | | |
| 2plus1_ | SVEELLRKLEEVLRKIREENERSLKELRDRAREIVKRNRETNRELEEVI | 2plus1_Key_ | EDIVRKIERIVETIEREVRESVKKV |
| Cage_ | KELEKRLSGADKEKVEELVRRIRRIVERVVEEDRRTVEEIEKIAREVVK | Cterm_5398 | EEIARDIRRKVDESVKNVEKLLRDV |
| Cterm_5398 | RDRDSADRVRRTVEDVLRKATGSEDIVRKIERIVETIEREVRESVKKVE | | DKKARDRKK (SEQ ID NO: |
| | EIARDIRRKVDESVKNVEKLLRDVDKKARDRKK (SEQ ID NO: | | 27129) |
| | 27128) | | |
| 2plus1_ | SESDDVIRKLRELLEELRTHVEKSIRDLRKILEDSTRHAKRSIEELERL | 2plus_Key_ | EEKLRDLIRKLRDILRRAAEAHKKL |
| Cage_ | LEEVRKKPGDEEVRKTVEEISRRVAENVKRLEDLYRRMEEEVKKNLDRL | Cterm_5405 | IDDARESLERAKREHEKLIDRLKKI |
| Cterm_5405 | RKRVEDIIREVEEARKKGVDEEKLKDLIRKLRDILRRAAEAHKKLIDDA | | LEELER (SED ID NO: 27131) |
| | RESLERAKREKEKLIDRLKKILEELER (SEQ ID NO: 27130) | | |
| 2plus1_ | DREREVKKRLDEVRERIERLLRRVEEESRRVAEEIRRLIEEVRRRNKKV | 2plus1_Key_ | EELREELKKLERKIEKVAKEIHDHD |
| Cage_ | TEEIRELLKGLKDKEEVRRVLERLRKLNAESDELLERILERLRRLVEAT | Cterm_5406 | KEVTERLEDLLRRITEHARKSDREI |
| Cterm_5406 | NRLVKAIIEELRRLVEKIVREVPDSEELEESLKKLERXIEKVAKEIDHK | | ESTAR (SEQ ID NO: 27133) |
| | DKEVTERLEDLLARITEHARKSDRIEETAR (SEQ IQ NO: 27132) | | |
| 2plus1_ | SEAEELLKRLEDRAEEILRRLEEILRTSRKLAEDVLRELEKLLRESERR | 2plus1_Key_ | KEVVDEIRIVDEVRERLKRIVEDEN |
| Cage_ | IREVLEELEGIKDKKELEDVIREVEKELDESLERSRELLKDVLKKLDDN | Cterm_5409 | AKIVEDARRALEKIVKENEEILRRL |
| Cterm_5409 | LKESERLVEDIDRELAKILEDLKKAGVPKEVVDEIKRIVDEVRERLKRI | | KKELRELRK (SEQ ID NO: |
| | VDENAKIYEDARRALEKIVKENEEILRRLKKELRELRK (SEQ ID | | 27135) |
| | NO: 27134) | | |
| 2plus1_ | SEIEKILKEIEDLARRDEEVSKKIVEDIRRLAKEVEDTSRDIVRKIEEL | 2plus1_Key_ | EDSERLVREVEDLVRRLVRRSEKSN |
| Cage_5414_ | AKRVLDRLKKDGSKEELEKEVREVVKTLEELVKDNERLIRRAVEEMKRL | Cterm_5414 | EEVKRTVEELVRRMEESNDRVRDLV |
| GFP11_ | VEENHRKSREVVKELEDLVRELRKGSGSEDSERDHWVLKEYYNAAGITS | | RRLVEELKRAVD (SEQ ID NO: |
| Cterm | EKSNEEVKRTVEELVRRMKESNDRVRDLVRRLVEELKRAVD (SEQ ID | | 27141) |
| | NO: 27140) | | |
| 2plus1_ | SVDEVLKEIEDALRRLKEEVERVLKENEDELRRLEEEVRRVLKEDEELL | 2plus1_Key_ | EKAIRDVAKETRDRLKELEEEIEEV |
| Cage_ | ESLKRGVGESDEVDRVVDEIAKLSAEILEKVKKVVKEIRDSLETVKRRV | Cterm_5421 | TRRNLKLLADVEEEIRRVREKTRRL |
| Cterm_5421 | DDVVRRLKELLDEIKRGSDEKAIRDVAKEIRDRLKELEEEIEEVTRRNL | | LETVLRKAT (SEQ ID NO: |
| | KLLADVEEEIRRVREKTRRLLETVLRRAT (SEQ ID NO: 27146) | | 27147) |
| 2plus1_ | DETRKVVKEITDLLKASNDKNRKVVEEIRDLLRKSKKLADELVERLRAL | 2plus1_Key_ | SEDLKRVEERAREVSRRNEESMRRV |
| Cage_ | VEDLRRRIDKSGDKSTAEDIVRRIIEELKRILKEIEDLARRINREIERL | Cterm_5432 | KEDADRVSEANKXVLDRVREEVKRL |
| Cterm_5432 | VEEVERDNRDVNRAIEELLKDIARRGGSEDLKRVEERAREVSRRNEESM | | IEEVRETLR (SEQ ID NO: |
| | RRVKEDADRVSEANKEVLDRVREEVKRLIEEVRETLR (SEQ ID NO: | | 27149) |
| | 27148) | | |
| 2plus1_ | STAETVAEEVERVLKNSDDLIKEVEDVNRRVEEEIKRVIRELEEENERL | 2plus1_Key_ | EEAAREIIKRLREVNKRTKEKLDEL |
| Cage_ | VAEVRKGVKGEILAEIEKRLADNSEKVREVAERAKKLLEENTARVKDIL | Cterm_5435 | IKHSEEVLERVKRLIDELRKKSEEV |
| Cterm_5435 | RESRKLVKDLLDEVRGTGSEEAAREIIKRLREVNKRTKEKLDELIKHSE | | LEDLRRRAK (SEQ ID NO: |
| | EVLERVKRLIDELRKNSEEVLEDLRRRAK (SEQ ID NO: 27150) | | 27151) |
| 2plus1_ | SRVEEIIEDLRRLLEETRKENEDSTRRSKELLDRVKEINDTIIAELERL | 2plus1_Key_ | EDKARKVAEVARKVLRDIDKLDRES |
| Cage_ | LKDIEKEVREKGSESEEVKKALRAVLEELEKLLRRVAEINEEVLRRNSK | Cterm_5439 | KEAPRATNEEIAKLDEDTARYAERV |
| Cterm_5439 | LVEEDERRNREVLKELARLVEELIREIGDEDKARKVAEVAEKVLRDIDK | | KKATEDLAK (SEQ ID NO: |
| | LDRESKEAFRATNEEIAKLDSDTARVAERVKKAIEDLAK (SEQ ID | | 27155) |
| | NO: 27154) | | |
| 2plus1_ | SEADDVLKKLAETVKRIIERLKKLTDDERRLVEEVHRRNDKLSKESAEA | 2plus1_Key_ | EELSAEVKKLLDEVRKALARRKDEN |
| Cage_ | VRKAEERGIDEKDVRKLLEDLKKKSEEVAERNKRILDTLREISKRAEDE | Cterm_5447 | DKLLKEIEDSLRRHKEENDRLLEKL |
| Cterm_5447 | VRKVLKELEKTLKELEDRRPDSEELSAEVKKLLDEVRKALARHKDENDK | | KESTR (SEQ ID NO: 27157) |
| | LLKEIEDSLRRHKEENDRLLEKLKESTR (SEQ ID NO: 27156) | | |
| 2plus1_ | SAEELLREVAELVKRYDEDLRRLLEEVRASNSEVIRRLEEILKRIEEEN | 2plus1_Key_ | ESTVKRLLDELRELLERLKRTIEEL |
| Cage_ | RKVVEELRRGGVSEDLVRESKRLVDESRRVIEKLVKESADSVERTRETV | Cterm_5465 | LKRNRDLLADAEEKARRLLEENRKL |
| Cterm_5456 | DDRLEELKRLVEEIAKKVKGGSSEETVKRLLDELRELLERLKRTIEELL | | LKAARDTAT (SEQ ID NO: |
| | KRNRDLLADAEEKARRLLEENRKLLKAARDTAT (SEQ ID NO: | | 27159) |
| | 27158) | | |
| 2plus1_ | SEVDEVVKEVEDLVRRNEELVEEVVRRVEKVVTDDRRLVEEVVREIRKI | 2plus1_Key_ | SEVDEVVKEVEDLVRRNEELVEEVV |
| Cage_ | VKDVEDLARLKLDKEELKRVLDEKRERIERLLELRRESKKLDDELKRLL | Nterm_2406 | RRVEKVVTDDRRLVEEVVERIRKIV |
| Nterm_2406 | EELREHSRRVEKRLEDLLKELRERGVDEKVLRKLEKVIREVRERSTRAL | | KDVEDLARK (SEQ ID NO: |
| | RKVEEVIRRVREESERALRDLERVVKEYVEKRMREAAR (SEQ ID | | 27163) |
| | NO: 27162) | | |
| 2plus1_ | DREREVKKRLDEVRERIERLLRRVEEESRRVAEEIRRLIEEVRRRNKKV | 2plus1_Key_ | DREREVKKRLDEVRERIERLLRRVV |
| Cage_ | TEEIRELLKGLKDKEEVRRVLERLRKLNAESDELLERILERLRRLVEAT | Nterm_5406 | EESRRVAEEIRRLIEEVRRRNKKVT |
| Nterm_5406 | NRLVKAITEELRRLVEKIVREVPDSEELREELKKLERLIEKVAKEIHDH | | EEIRELLKGL (SEQ ID NO: |
| | DKEVTERLEDLLRRITEHARKSDREIEETAR (SEQ ID NO: | | 27165) |
| | 27164) | | |
| 2plus1_ | SEAEELLKRLEDRAEEILRRLEEILRTSRKLARDVLRELEKLLRESERR | 2plus1_Key_ | SEAEELLKRLEDRAESILRRLEEIL |
| Cage_ | IREVLEELRGIKDKKELEDVIREVEKELDESLERSRELLKDVLKKLDDN | Nterm_5409 | RTSRKLAEDVLRELEKLLRESERRI |
| Nterm_5409 | LKESERLVEDIDRELAKILEDLKKAGVPKEVVDEIKRIVDEVRERLKRI | | REVLEELRGT (SEQ ID NO: |
| | VDENAKIVEDARRALEKIVKENEEILRRLKKELRELRK (SEQ ID | | 27167) |
| | NO: 27166) | | |
| 3plus_ | SEAEDLEELIKELAELLKDVIRKLEKINRRLVKILEDIIRRLKEISKEA | 3plus_Key_ | KDEAERRRRELKDKLDRLREEHEEV |
| Cage_ | EEELEKGTVEDKDILRDLERKLREILEESDKLLEELKRRLEEILRKSKE | Cterm_529 | KRRLEEELTRLRETHKKIEKELREA |
| 529_GFP11_ | LLRRLEEVLREILKRAEEVKRSNLPKEELIKEIVKLLEELLRVIEKILE | | LKRVRDRST (SEQ ID NO: |
| Cterm | DNTRLLEELVEVIKEILEKHLRLLEELVRVIERILREVGKDKDEAERRD | | 27179) |
| | HMVLKEYVKAAGITEEVKRRLEEELTRLRETHKKIEKELREALKRVRDR | | |
| | ST (SEQ ID NO: 27178) | | |
| 3plus1_ | SEKEELKRLLDKLLKELKRLSDELKATIDKILKILKEVSEEVKRTADEL | 3plus_Key_ | EDELRKVEEDLKRLEDKLKKLLEDY |
| Cage_ | LDAIRRGGVDEEVLREIKREIEEIEKKLRKVNKEIEDEIREIKKKLDEV | cterm_500 | EKKVRELEETLDDLLRKYEETLRRL |
| Cterm_500 | DDKITKEVEKIKEALDKGGVDAKEVIKALKEILKEHADVFEDVLRRLKE | | EKELEEAER (SEQ ID NO: |
| | KIIKRERDVVEVLEELRKILEKVAEVLKRQGRSEDELREVEEDLKRLED | | 27185) |
| | KLKKLLEDYEKKVRELEETLDDLLRKYEETLRRLEKELERAER (SEQ | | |
| | ID NO: 27184) | | |
| 3plus1_ | SEKEELLKLIKRVIELLKRVLEERLRLVEDVIRRLKELLDSNEKIVREV | 3plus1_Key_ | EDLLRKAKKVITEVREKLKRNLEDV |
| Cage_ | IEDLKRLLDEVRGDKEELDRIKEKLEEVLERYKRRLEEIKRDLERMLED | Cterm_510 | RRVIEDVKRKSARILEEARRLTEEV |
| Cterm_510 | YKRELKRIEEDLRRVLEEVERIATRGEGPAEALIDKLRKTLERALRELD | | ERELEKIRK (SEQ ID NO: |
| | KLSKKLDELLKKVLEELEKSNREIDKLLKDVLRRVEEGGAEEDLLRKAK | | 27191) |
| | KVITEVREKLKRNLEDVRKVIEDVKRKSARILEEARRLIEEVERELEKI | | |
| | RK (SEQ ID NO: 27190) | | |
| 3plus1_ | SEAEDLEELTKELAELLKDVIRKLEKINRRLVKILSDIIRRLKEISKEA | 3plus1_Key_ | KDEAERRRRELKDKLDRLREEHEEV |
| Cage_ | EEELRKGTVEDKDILRDLERRLREILEESDRLLEELKRRLEEILRKSKE | Cterm_528 | KRRLEEELTRLRETHKKIEKELREA |
| 528_GFP11_ | LLRRLEEVLREILKRAESVKRSNLPKEELIKEIVKLLEELLRVIEKILE | | LKRVRDRST (SEQ ID NO: |
| Cterm | DNIRLLEELVEVIKEILEKNLRLLSELVRVIERILREVGRDEMVLKEYV | | 27193) |
| | NAAGITLDRLREEREEEVRXLEEELTRLRETHKXIEKELREALXRVRDR | | |
| | ST (SEQ ID NO: 27192) | | |
| 3plus1_ | SEAEDLEELTKELAELLKDVIRKLEKINRRLVKILSDIIRRLKEISKEA | 3plus1_Key_ | KDEAERRRELKDKLDRLREEHEEVK |
| Cage_ | EEELRKGTVEDKDILRDLERRLREILEESDRLLEELKRRLEEILRKSKE | Cterm_528 | RRALEEELTRLRETHKKIEKELREA |
| 528_GFP11_ | LLRRLEEVLREILKRAESVKRSNLPKEELIKEIVKLLEELLRVIEKILE | | LKRVADRST (SEQ ID NO: |
| Cterm | DNIRLLEELVEVIKEILEKNLRLLSELVRVIERILREVGRDEMVLKEYV | | 27195) |
| | NAAGITLDRLREEREEEVRXLEEELTRLRETHKXIEKELREALXRVRDR | | |
| | ST (SEQ ID NO: 27194) | | |
| 3plus1_ | SEAEDLEELIKELAELLKDVIRKLEKINRRLVKILEDIIRRLKEISKEA | 3plus1_Key_ | KDEAERRRRELKDKLDRLREEHEEV |
| Cage_ | EEELRKGTVEDKDILRDLERRLREILEESDRLLEELKRRLEEILRKSKE | Cterm_528 | RRRLEEELTRLKETHKKIEKELREA |
| 528_GFP11_ | LLRRLEEVLREILKRAEEVKRSNLPKEELIKEIVKLLEELLRVIEKILE | | LKRVRDRST (SEQ ID NO: |
| Cterm | DNIRLLEELVEVIKEILEKHLRLLEELVRVIREILREVGKDKDEAERDH | | 27197) |
| | MVLHEYVNAAGIYHEEVKRRLEEELTRLRETHKKIEKELREALKRVRDR | | |
| | ST (SEQ ID NO: 27196) | | |
| 3plus1_ | SEAEDLEELIKELAELLKDVIRKLEKINRRLVKILEDITRRLKEISKEA | 3plus1_Key_ | KDEAERRRRELKDKLDRLREEHEEV |
| Cage_ | EEELRKGTVEDKDILRDLERRLREILEESDRLLEELKRRLEEILRKSKE | Cterm_529 | KRRLEEELTRLRETHKKISKELREA |
| 529_GFP11_ | LLRRLEEVLREILKRAEEVKRSNLPKEELIKEIVKLLEELLRVIERILE | | LKRVRDRST (SEQ ID NO: |
| Cterm | DNIRLLEELVEVIKEILEKHLRLLSELVRVIERILREVGKRDHMVLHEY | | 27199) |
| | VNAAGITDRLREEREEVKRRLEEELTRLRETHKKIEKELREALKRVRDR | | |
| | ST (SEQ ID NO: 27198) | | |
| 3plus1_ | SEAEDLEELIKELAELLKDVIRKLEKINRRLVKILEDIIRRLKEISKEA | 3plus1_Key_ | KDEAERRRRELKDKLDRLREEHEEV |
| Cage_ | EEELRKGTVEDKDILRDLERRLREILEESDRLLEELKRRLEEILRKSKE | Cterm_529 | KRRLEEELTRLRETHKKIEKELREA |
| 529_GFP11_ | LLRRLEEVLREILKRAEEVKRSNLPKEELIKEIVKLLEELLRVIEKILE | | LKRVRDRST (SEQ ID NO: |
| Cterm | DNIRLLEELVEVIKEILEKHLRLLEELVRVIERILREVGKDRDHMVLRE | | 27201) |
| | YVNAAGITRLEERHEEVKVRLEEELTRLRETHKKIEKELREALKRVRDR | | |
| | ST (SEQ ID NO: 27200) | | |
| 3plus1_ | SEAEDLEELIKELAELLKDVIRKLEKINRRLVKILEDIIRRLKEISKRA | 3plus1_Key_ | KDEAERRRRELKDKLDRLREEHEEV |
| Cage_ | EEELRKGTVEDKDILRDLERRLREILEESDRLLEELKRRLEEILRKSKE | Cterm_529 | KRRLEEELTRLRETHKKIEKELREA |
| 529_GFP11_ | LLRRLEEVLREILKRAEEVKRSNLPKEELIKEIVKLLEELLRVIEKILE | | LKRVRDRST (SEQ ID NO: |
| Cterm | DNIRLLEELVEVIKEILEKHLRLLEELVRVIERILREVGKDKDRDHMVL | | 27203) |
| | HEYVNAAGITREEREEVKRRLEEELTRLRETHKXIERELREALKRVRDR | | |
| | ST (SEQ ID NO: 27202) | | |
| 3plus1_ | DEDRIIEEIARLLEELLRELLELIKKLIETNRRLNEEHERAVRELARLL | 3plus1_Key_ | EKIAEEIERELEELRRMIKRLHEDL |
| Cage_ | EELLDRLVKKGISDEKLKRIRERLKRALDDLERLHREINKRLEDLVREL | Cterm_534 | ERKLKESEDELREIEARLEEKIRRL |
| 534_GFP11_ | EKLVRETLKELKDALEELRRASARAGGEEVLRRLEEIVKKLLDLVRRIL | | EEKLERKRR (SEQ ID NO: |
| Cterm | ERLKEISKDNVRLLRELNERLTRIVEDLVRLIREILREADVDERDHMYL | | 27207) |
| | HEYVNAAGITIKRLREDLERKLKESEDELREIEARLEEKIRRLEEKLER | | |
| | KRR (SEQ ID NO: 27206) | | |
| 3plus1_ | DKDRIIEEIARLLEELLRELLELTKKLIETNRRLNEEHERAVRELARLL | 3plus1_Key_ | EKIAEEIERELSELRRMIKRLEEDL |
| Cage_ | EELLDRLVKKGISDEKLKRIRERLKRALDDLERLHREINKRLEDLVREL | Cterm_534 | ERKLKESEDELREIEARLRRKIRRL |
| 534_GFP11_ | EKLVREILKELKDALEELRRASARAGGEEVLRRLEEIVKKLLDLVRRIL | | EEKLERKRR (SEQ ID NO: |
| Cterm | ERLKEIHKDNVRLLRELNERLTRIVEDLVRLIREILREAGVDEKIRDXM | | 27209) |
| | VLHEYVNAAGITRLHEDLERKLKESEDELREIEARLEEKIRRLEEKLER | | |
| | KRR (SEQ ID NO: 27208) | | |
| 3plus1_ | DEDRIIEEIARLLEELLRELLELIKKLIETNRRLNEEHERAVRELARLL | 3plus1_Key_ | EKIAEEIERELEELRRMIKRLREDL |
| Cage_ | EELLDRLVKKGISDEKLKRIRERLKRALDDLERLSREINKRLEDLVREL | Cterm_534 | ERKLKESEDELREIEARLEEKIRRL |
| 534_GFP11_ | EKLVREILKELKDALEELRRASARAGGSEVLRRLEETVKKLLDLVRRIL | | SEKLERKRR (SEQ ID NO: |
| Cterm | ERLKEIRKDNVRLLRELNERLTRIVEDLVRLIREILREAGVDEKIAEEI | | 27211) |
| | ERDHMVLHEYVNAAGITLERKLKESEDELRSIEARLEEKIRRLEEKLER | | |
| | KRR (SEQ ID NO: 27210) | | |
| 3plus1_ | SEKEKLLKESSEEEVRRLRRTLEELLRKYREVLRELRKELREIEERVRD | 3plus1_Key_ | ERLVKTLIEDVEAVIKRILELITRV |
| Cage_ | VRRLKEVLDRKGLDIDTIIKEVEDLLKTVLDRLRELLDKIRRLTKEAIE | Cterm_539 | AEDNKRVLERTIRELTDNLERHLKI |
| Cterm_539 | VVREIIERIVRXAERVKDELRKEGGDKEKLDRVDRLIKENTRHLKEILD | | VREIVK (SEQ ID NO: 27213) |
| | RIEDLVRRSEKKLRDIIREVRRLIEELRKKAEEIKKGFDERLVKTLIED | | |
| | VEAVIKRILELITRVAEDNERVLERIIRELTDNLERELKIVREIVK | | |
| | (SEQ ID NO: 27212) | | |
| 3plus1_ | DKAEVLREALKLLKDLLEELIKIREESLKRILDLIDTLVKVHEDALRAL | 3plus1_Key_ | EEIDRELKRVVEELRRLHEEIKERL |
| Cage_ | KELLERSGLDERELRKVERMATESLRTIAKLKEELRDLARRSLEKLRED | Cterm_548 | DDVARASKEELRRIIKKLKEVVKEI |
| Cterm_548 | LKRVDDTLRKVEEKVRRTGFSEELIEELIRTIEKLLKEIVRINEEVLKA | | RKKLK (SEQ ID NO: 27215) |
| | VRELLKTLLKLSEDVVRRIEEILRKGGVPEEIDRELKRVVEELRRLHEE | | |
| | IKERLDDVARRSEEELRRIIKKLKEVVKEIRKKLK (SEQ ID NO: | | |
| | 27214) | | |
| 3plus1_ | SERELIERWLELHKEILRLIRELVERLLKLHREILDTIKKLIRELLELL | 3plus1_Key_ | DDERRTLTELLKRMEDILEKVERTL |
| Cage_ | EDIARKLGLDKEAKDELRRIAKRVEDKLEKLERESRKVEEDLKRKLKEL | Cterm_556 | EKLLDDSARMAEEVKKTLKELLERS |
| Cterm_556 | TDSSDIVEKRVRDVVRRGTQSREEIAEELLRLDRKLLKAVEELLKEILD | | EKVAEDVRK (SEQ ID NO: |
| | LNKKLLDDVRAILEETRRVLEKILDRVRRGERTDDERRTLTELLKRMED | | 27217) |
| | ILEKVERTLKKLLDDSARMAEEVKKTLKELLERSEKVAEDVRK (SEQ | | |
| | ID NO: 27216) | | |
| 3plus1_ | SKKELLEEVVRRAIELLKRHLEKLKRILEEIVRLLEEHLEKVERVLEAI | 3plus1_Key_ | EDKLKEIEDELRRLLEELRRLDKAI |
| Cage_ | LELLDDLLRRGGDERAIRTLEDVKRRLREILERLADENAKAIKRLADLL | Cterm_560 | KDRLRELKKDLDRANRRIKETLKKL |
| Cterm_560 | DKLEKRNKEAIERLEEILEELKRVRRDEELLRVLETLLKIIEDILRENT | | LREVEK (SEQ ID NO: 27219) |
| | KVLEDLLRLVEEILEANLRVVEELLRLAREILTEIVGDEDKLKEIEDEL | | |
| | RRLLEELRRLDKAIKDRLRELKKDLDEANRRIKETLKKLLREVEK | | |
| | (SEQ ID NO: 27218) | | |
| 3plus1_ | KEIEETLKELEDLKREMVETNRRVLEETRRLNKETVDRVKATLDELAKM | 3plus1_Key_ | KAVEELEKALERIKRRLKEVIDRYE |
| Cage_ | LKKLVDDVRKGPTSEELKRLLAELEELLARVVRRVEELLKKSTDLLERA | Cterm_568 | DELRKLRKEYKEKIDKYERKLEEIE |
| 568_GFP11_ | VKDSADALRRSHEVLKEVASRVKRAKDEGLPREEVLRLLRELLERHAKV | | RRERT (SEQ ID NO: 27221) |
| Cterm | LKDIVRVSEKLLREHLKVLREIVEVLEELLERILKVILDTTRDHMVLHE | | |
| | YVNAAGITKRRLKEVIDRYEDELRKLRKEYKEKIDKYERKLEEIERRER | | |
| | T (SEQ ID NO: 27220) | | |
| 3plus1_ | KEIEETLKELEDLNRENVETNRRVLEETRRLNKETVDRVKATLDELAKM | 3plus1_Key_ | KAVEELEKALERIKRRLKEVIDRYE |
| Cage_ | LKKLVDDVKKGPTSEELKRLLAELEELLARVVRRVEELLKKSTDLLERA | Cterm_568 | DELRKLRKEYKEKIDKYERKLEEIE |
| 568_GFP11_ | VKDSADALRRSHEVLKEVASRVKRAKDEGLPREEVLRLLRELLERHAKV | | RRERT (SEQ ID NO: 27223) |
| Cterm | LKDIVRVSEKLLREHLKVLREIVEVLEELLERILKVILDTTRDHMVLHE | | |
| | YVNAAGITKRRLKEVIDRYEDELRKLRKEYKEKIDKYERKLEEIERRER | | |
| | T (SEQ ID NO: 27222) | | |
| 3plus1_ | SALETVKKLLEDSSEKIERIVEEDERVAKESSDRIRRLVEEDKRVADEI | 3plus1_Key_ | AEAVIKVIEKLIRANKRVWDALIKI |
| Cage_ | LDLIEKIGDTDTLLKLVEEWSRTSKKLLDDVLKLKKDWSDDSRRLLEEI | Cterm_581 | NEDLVRVNKTWKELLRVNEKLARLE |
| Cterm_581 | LRVREELIRRVKEILDREGKPEEVVRELEKVLKESLDTLEEIIRRLDEA | | RVVK (SEQ ID NO: 27127) |
| | NAATVKRVADVIRELEDINRKVLEEIKRGSDDAEAVIKVIEKLIRANKH | | |
| | VWDALLKINEDLVRVNKTVWKELLRVNEKLARDLERVVK (SEQ ID | | |
| | NO: 27226) | | |
| 3plus1_ | SKEEKLKDDVRAVLEDLDRRVLKELEKLSEDNLRELKRVLDRITDLRRI | 3plus1_Key_ | SKAAEDILRVLEKLVKVSREAIKLI |
| Cage_ | LDELRKGIGSEELLRRVEKVKDNLDLLRKLVEEHKESSERDLKRVEDLL | Cterm_585 | LELSEHKVRVSTRIARLLLDVARKL |
| Cterm_585 | VREIKEVLRKLLELEDRGTDIRKIEEEIERLLRKIRJAVEESKDLNRRN | | AEVIKEAER (SEQ ID NO: |
| | SERIEEVARRSEELARRLLKEIRERGDSKAAEDILRVLEKLVKVSREAI | | 27229) |
| | KLILELSEHKVRVSTRIARLLLDVARKLAEVIKEAER (SEQ ID | | |
| | NO: 27228) | | |
| 3plus1_ | SEIEDVRRLRKILSDLERVSEKLLREIKKILDDEARRLNEEVIKEIKRV | 3plus1_Key_ | IEDLVREVERLIKRIEDGLRELEKT |
| Cage_ | LEDAVRVFRDGSGSKEELAKLVEELIRELAKLAKEVDEIHKRIVERLKA | Cterm_587 | VRELLKRIKEASDKVREDVDRLIKE |
| Cterm_587 | LVEDAERIHRKIVETLEEIVRGVPSEELKRVVEAIVEVIKEHLKVLADV | | LKEADD (SEQ ID NO: 27231) |
| | IRRIIKAIEENAETIKRVLEDIVRVLELVLRGEGSIEDLVREVERLIKR | | |
| | IEDSLRELEKTVRELLKRIKEASDKVREDVDRLIKELKEAAD (SEQ | | |
| | ID NO: 27230) | | |
| 3plus1_ | SREELLDRILEAIAKILEDLKRLIDENLARLEEVVRELERIIDRNLKLI | 3plus1_Key_ | DEIIRKLDELLKEVEKVHKEVKDRI |
| Cage_ | REILDELKKGSGSEEILEKIKKVDKELEDLIRRLLKKLEDLIRETERRL | Cterm_605 | RKLLEDHKRSLDEVKKKLERLLERA |
| Cterm_605 | REILKRIRDLLKEVKDRDKDLERLLEVLEEVLRVIAELAKELLDSLRKV | | KEVVEREKK (SEQ ID NO: |
| | LKVVEEVLRLLNEVNKEVLDVIRELAKDGGSDEIIRKLDELLKEVEKVH | | 27233) |
| | KEVKDRIRKLLEDEKRSLDEVKKKLERLLERAKEVVEREKK (SEQ | | |
| | ID NO: 27232) | | |
| 3plus1_ | SEREELLERIKEILKRVKDKLDEDLKRLKEILEKLKEKADRDLKELRRR | 3plus1_Key_ | SETAVRAIIRVLEKHLEAVRRVLEE |
| Cage_ | IERVREKLERTGRTDELVKEVLDTVRRNLENLKRLVEDILRKLEENVKN | Cterm_607 | LLKVLAEHLETVRELIERLKRVLEE |
| Cterm_607 | LTDLVREILKLITELIKRLEDGGLRKEVLDALRRVLEKLEELLREILER | | AIEVVERVAR (SEQ ID NO: |
| | LKRSLEAVKRKIEELLKELERSLDELRRALERIRKEIGDSETAVRAIIR | | 27235) |
| | VLEKHLEAVRRVLEELLKVLAEHLETVRELIERLKRVLEEAIEVVERVA | | |
| | R (SEQ ID NO: 27234) | | |
| 3plus1_ | SLEEITKRLLELVEENLARHEEILRELLELAKRLAKEDRDILEEVLKLI | 3plus1_Key_ | ERTLREVVRKVLEEAKRLLDELEEV |
| Cage_ | EELLKLLEDNGSSEEDLKRLLKEVIEELRAVVRRVKDKWDEVVKRIEDL | Cterm_611 | RKRVKKELEDIIEENRKVVKRVRDE |
| 611_GFP11_ | VKRLKELRDDTLRKLRELVRKIVTDISESGGEAEKVKRVVEKILELVER | | LREIKKELDE (SEQ ID NO: |
| Cterm | LAKVVKESVEKLLEILRELAEVSKRVAEALLRLLEELVRVIRIKDERDH | | 27239) |
| | MVLHEYVNAAGITLLDELEEVHKRVKKELEDIIEENRRVVKRVRDELRE | | |
| | IKRELDE (SEQ ID NO: 27238) | | |
| 3plus_ | SEKELVDDIRRILEEILRLLRSLLEEVIRLLEENEKLVRRHLKTVIDIL | 3plus1_Key_ | DSLVREVEELIKRLEKHIDDLLKTS |
| Cage_ | RRVAKLLDENGIRTDEADRVLERLEKAERELLEDYKRALEKIKETLERV | Cterm_632 | RDLVKRVLDLVDEVVKRVEDLVERV |
| Cterm_632 | LREAEEVVKKIDDALRKLGGSKEVLKRLLEELLRLVEKIAEEIKRLLSE | | KEKIDT (SEQ ID NO: 27241) |
| | LVRVTEELVRTNKELLEEAVRVIRKEVGDDSLVREVEELIKRLEKHIDD | | |
| | LLKTSRDLVKRVLDLVDEVVKRVEDLVERVKEKIDT (SEQ ID NO: | | |
| | 27240) | | |
| 3plus1_ | DAEEVVKRLADVLRKNDETIRKVVEDLVRIAEENDRLNKKLVEDIAEIL | 3plus1_Key_ | EDVKRALEELVSRLRKLLEDVKKAS |
| Cage_ | RRIVELLRRGGVPEELLDRLAKVVKSIVEKAEKILERLNRVSKAIAEKL | Cterm_646 | EDIVKEVERIVRELAKRSDEILKKL |
| 646_GFP11_ | KTIVDELNEVSKEIVKRAEDILRKGKDKETVLRALRTLVKEYADLSKEV | | EDIVEKLRE (SEQ ID NO: |
| Cterm | LERVERIVREYVKLSDEVVKSLAEIVEELIRIIEDLLRKGNRDHMVLHE | | 27245) |
| | YVKAAGITRKLLEDVKKASEDIVREVERIVRELAKRSDEILKKLEDIVE | | |
| | KLRE (SEQ ID NO: 27244) | | |
| 3plus1_ | DAEEVVKRLADVLRENDETIRKVVEDLVRIAEENDRLWKKLVEDIAEIL | 3plus1_Key_ | EDVKRALEELVSRLRKLLEDVKKAS |
| Cage_ | RRIVELLRRGGVPEELLDRLAKVVKSIVEKAEKILERLNRVSKAIAEKL | Cterm_646 | EDIVREVERIVRELAKRSDEILKKL |
| 646_GFP11_ | KTIVDSLNEVSKEIVKRAESILRKGKDKETVLRALRTLVKEYADLSKEV | | EDIVEKLRE (SEQ ID NO: |
| Cterm | LERVERIVREYVKLSDEVVKSLAEIVEELIRIIEDLLRKGNLDEDRDHW | | 27247) |
| | VLHEYVNAAGITEDVKKASEDIVREVERIVRELAKRSDEILKKLEDIVE | | |
| | KLRE (SEQ ID NO: 27246) | | |
| 3plus1_ | DAEEVVKRLADVLRENDETIRKVVEDLVRIAEENDRLWKKLVEDIAEIL | 3plus1_Key_ | EDVKRALEELVSRLRKLLEDVKKAS |
| Cage_ | RRIVELLRRGGVPSELLDRLAKVVKSIVEKAEKILERLNRVSKAIAEKL | Cterm_646 | EDIVREVERIVRELAKRSDEILKKL |
| 646_GFP11_ | KTIVDELNEVSKEIVKRAEDILRKGKDKETVLRALRTLVKEYADLSKEV | | EDIVEKLRE (SEQ ID NO: |
| Cterm | LERVERIVREYVKLSDEVVKSLAEIVEELIRIIEDLLRKGNLDEDVRDX | | 27249) |
| | MVLHEYVNAAGTTDVKKASEDIVREVERIVRELAKRSREILKKLEDIVE | | |
| | KLRE (SEQ ID NO: 27248) | | |
| 3plus1_ | DAEEVVKRLADVLRENDETIRKVVEDLVRIAEENDRLNKKLVEDIAEIL | 3plus1_Key_ | EDVKRALEELVSRLRKLLEDVKKAS |
| Cage_ | RRIVELLRRGGVPEELLDRLAKVVKSIVEKAERILERLNRVSKAIAEKL | Cterm_647 | EDIVREVERIVRELAKRSDEILKKL |
| 647_GFP11_ | KTIVDELNEVSKEIVKRAEDILRKGKDKETVLRALRTLVKEYADLSKEV | | EDIVEKLRE (SEQ ID NO: |
| Cterm | LERVERIVREVVKLSDEVVKSLAEIVEELIRIIEDLLRKGNLRDHMVLH | | 27251) |
| | EYVNAAGITKLLEDVKKASEDIVREVERIVRELAKRSDEILKKLEDIVE | | |
| | KLRE (SEQ ID NO: 27250) | | |
| 3plus1_ | DAEEVVKRLADVLRENDETIRKVVEDLVRIAEENDRLWKKLVEDIAEIL | 3plus1_Key_ | EDVKRALEELVSRLRKLLEDVKKAS |
| Cage_ | RRIVELLRRGGVPEELLDRLAKVVKSIVEKAEKILERLNRVSKAIAEKL | Cterm_647 | EDIVREVERIVRELAKRSDEILKKL |
| 646_GFP11_ | KTIVDELNEVSKEIVKRAEDILRKGKDKETVLRALRTLVKEYADLSKEV | | EDIVEKLRE (SEQ ID NO: |
| Cterm | LERVERIVREVVKLSDEVVKSLAEIVEELIRIIEDLLRKGNLDEDVKRA | | 27253) |
| | LERDHMVLHEYVNAAGITSEDIVREVERIVRELAKRSDEILKKLEDIVE | | |
| | KLRE (SEQ ID NO: 27252) | | |
| 3plus1_ | DAEEVVKRLADVLRENDETIRKVVEDLVRIAEENDRLWKYLVEDIAEIL | 3plus1_Key_ | EDVKRALEELVSRLRKLLEDVKKAS |
| Cage_ | RRIVELLRRGGVPEELLDRLAKVVKSIVEKAEKILERLNRVSKAIAFKL | Cterm_647 | EDIVREVERIVRELAKRSDEILKKL |
| Cterm_647 | KTIVDELNEVSKEIVKRAEDILRKGKDKETVLRALRTLVKEYADLSKEV | | EDIVEKLRE (SEQ ID NO: |
| | LERVERIVREYVKLSDEVVKSLAEIVEELIRIIEDLLRKGNLDEDVKRA | | 27255) |
| | LEELVSRLRKLLEDVKKASEDIVREVERIVRELAKRSDEILKKLEDIVE | | |
| | KLRE (SEQ ID NO: 27254) | | |
| 3plus1_ | DEEETLRKLLERKVELAKEYLDVSKEVIDRTTKLLDEYLKTSKRIVDAT | 3plus1_Key_ | SREALEEARRRLEELLRELNEITKD |
| Cage_ | VELLERGDLGPDELIKRLAEELERSLRELEEEIKRLKRELEESLKKLKE | Cterm_653 | LEAKLEKLLRDLNELTKALEEELKR |
| Cterm_653 | IIDRLAEEAEKLLAVLKRGEGSEEEALRALASLVRELIEVLRENDERLR | | LLDEIKKRTD (SEQ ID NO: |
| | DVLRRLIEALRKNNEILERVLRKLVRAAEERGRDESSREALEEARRRLE | | 27257) |
| | ELLRELNEITKDLEAKLEKLLRDLNELTKALEEELKRLLDELKKRTD | | |
| | (SEQ ID NO: 27256) | | |
| 3plus1_ | DEERIIKTLEDINAKLVEDIKRILDKVAELNERLADAIRKIIEETKRIL | 3plus1_Key_ | KDTLRTVEKLVEDVKRRLDKLLEDY |
| Cage_ | EATTRKVRKDGEISEELLRRLEEKLRKLLEDLERVLAEHEDESRRILEE | Cterm_658 | KRLIEEVKKELDKLLKEYEDALREI |
| Cterm_658 | VERLLKRHADASKELLDRARSVARGVKSDKELVDRLKKLIDDSLESVRE | | KKRIDE (SEQ ID NO: 27259) |
| | LIERLKELLDRLVKSVEDLIRTIKELLDRLVEVLREGVSDKDTLRTVEK | | |
| | LVEDVKRRLDKLLEDIKRLIEEVKKELDKLLKEYEDALREIKKRIDE | | |
| | (SEQ ID NO: 27158) | | |
| 3plus1_ | SLVDELRKSLERNVRVSEEVARRLKEALKRWVDVVRKVVEDLIRLNEDV | 3plus1_Key_ | SLVDELRKSLERNVRVSEEVARRLK |
| Cage_ | VRVVEKVTVDESAIERVRRIIEELNRRLDAVLKKNEDLVRRLTELLDKL | Nterm_263 | EALKRWVDVVRKVVEDLIRLNEDVV |
| Nterm_263 | LEENRRLVEELDEDLKRRGGTEEVIDTILELIERSIERLKRLLDELLRI | | RVVEKV (SEQ ID NO: 27263) |
| | VREALKDNKRVADENLKKLKEIIDELRKDGVEDEELKRVLEKAADLHRR | | |
| | LKDRERRLLEDLERIIRELKKKLDEVVEENKRSVDELKR (SEQ ID | | |
| | NO: 27262) | | |
| 3plus1_ | DAEEVVKRLADVLRENDETIRKVVEDLVRIAEENDRLNRDHMVLHEYVN | 3plus1_Key_ | DAEEVVKRLADVLRENDETIRKVVE |
| Cage_ | AAGITLLRRGGVPEELLDRLAKVVKSIVEKAEKILERLNKVSEAIAEKL | Nterm_647 | DLVRIAEENDRLKKKLVEDIAEILR |
| 647_GFP11_ | KTIVDELNEVSKEIVKRAEDILRKGKDKETVLRALRTLVKEYADLSKEV | | RIVELLRRG (SEQ ID NO: |
| Nterm | LERVERIVEEVVKLSDEVVRSLAEIVEELIRIIEDLLRKGNLDEDVKRA | | 27277) |
| | LEELVSRLRKLLEDVKKASEDIVREVERIVRELAKRSDEILKKLEDIVE | | |
| | KLRE (SEQ ID NO: 27276) | | |

[0182] A. Binding Domains

[0183] In various embodiments of the polypeptides of the disclosure, the polypeptide includes one or more (i.e., 1, 2, 3, or more) binding domains. Any suitable binding domain may be used as appropriate for an intended use. In one embodiment, the one or more of the binding domains comprise cell surface protein binding polypeptides. In one such embodiment, the cell surface protein binding polypeptides are on a tumor cell. In another embodiment, the cell surface protein binding polypeptides are oncoproteins. In a further embodiment, the one or more binding domains are selected from the non-limiting group comprising an antigen-binding polypeptide directed against a cell surface moiety to be bound, including but not limited to Fab′, F(ab′)₂, Fab, Fv, rIgG, recombinant single chain Fv fragments (scFv). V_{H} single domains, bivalent or bispecific molecules, diabodies, triabodies, and tetrabodies, DARPins; nanobody; affibody; monobody; adnectin; alphabody; Albumin-binding domain; Adhiron; Affilin; Affimer; Affitin/Nanofitin; Anticalin; Armadillo repeat proteins; Atrimer/Tetranectin; Avimer/Maxibody; Centyrin; Fynomer; Kunitz domain; Obody/OB-fold; Pronectin; Repebody; and computationally designed proteins. In another embodiment, the cell surface protein binding domain binds to a cell surface protein on a cell selected from the non-limiting group comprising tumor cells, cancer cells, immune cells, leukocytes, lymphocytes, T cells, regulatory T cells, effector T cells, CD4+ effector T cells, CD8+ effector T cells, memory T cells, autoreactive T cells, exhausted T cells, natural killer T cells (NKT cells), B cells, dendritic cells, macrophages. NK cells, cardiac cells, lung cells, muscle cells, epithelial cells, pancreatic cells, skin cells, CNS cells, neurons, myocytes, skeletal muscle cells, smooth muscle cells, liver cells, kidney cells, bacterial cells, and yeast cells. In yet another embodiment, the cell surface protein binding domain binds to a cell surface protein selected from the non-limiting group comprising Her2, EGFR, EpCAM, B7-H3, ROR1, GD2, GPC2, αvβ6, Her3, L1CAM, BCMA, GPCR5d, EGFRvIII, CD20, CD22, CD3, CD4, CD5, CD8, CD19, CD27, CD28, CD30, CD33, CD48, IL3RA, platelet tissue factor, CLEC12A, CD82, TNFRSF1B, ADGRE2, ITGB5, CD96, CCR1, PTPRJ, CD70, LILRB2, LTB4R, TLR2, LILRA2, ITGAX, CR1, EMC10, EMB, DAGLB, P2RY13, LILRB3, LILRB4, SLC30A1, LILRA6, SLC6A6, SEMA4A, TAG72, FRα, PMSA, Mesothelin, LIV-1, CEA, MUC1, PD1, BLIMP1, CTLA4, LAG3, TIM3, TIGIT, CD39, Nectin-4, a cancer marker, a healthy tissue marker, and a cardiac marker.

[0184] In non-limiting embodiments, the one or more binding domains comprise an amino acid sequence at least 40%, 45%, 50%, 55%, 60%, 65%, 70%, 75%, 80%, 85%, 90%, 91%, 92%, 93%, 94%, 95%, 96%, 97%, 98%, 99, or 100% identical, to the amino acid sequence selected from the group consisting of SEQ ID NOS: 27,399-27,403.

TABLE 10
>Her2_DARPin (SEQ ID NO: 27399)
DEGKKLLEAAKAGQDDEVRILMANGADVNAKDRYGLTPLYLATAHGHLEIVEVLLKNGADVNAVDAIGFTPLHLAAFIGHLEI
AEVLLKHGADVNAQDKEGKTAFDISIGNGNEDLAEILQKLE
>EGFR_DARPin (SEQ ID NO: 27400)
DLGKKLLEAARAGQDDEVRILMANGADVNADDTWSWTPLHLAAYQGHLEIVEVLLKNGADVNAYDYIGWTPLHLAADGHLEIV
EVLLKNGADVNASDYIGDTPLHLAANNGHLEIVEVLLKHGADVNAQDKFGKTAFDISIDNGNEDLAEILQKLN
>EpCAM_DARPin DARPin (SEQ ID NO: 27401)
DLGKKLLEAARAGQDDEVRILVANGADVNAYFGTTPLHLAAAHGRLEIVEVLLKNGADVNAQDVWGITPLHLAAYNGHLEIVE
VLLEYGADVNAHDTRGWTPLHLAAINGELEIVEVLLKNVADVNAQDRSGKTFFDLAIDNGNEDIAEVLQKAAKLN
>Anti-Her2 scFv (SEQ ID NO: 27402)
DIQMTQEPSSLSAEVGDRVTITCRASQDVNTAVAWYQQKPGKAPKLLIYSASFLYEGVPSRFSGGRSGTDFTLTISELQPEDF
ATYYCQQRKTTPPTFGQGTKVEIKGSTGGSGKPSSGEGSGESDLVRSSGGLVQPSGSLRLSCAASGFNIKDTYIHWVRQAPGK
SLEWVARIYPTNGYTRYADSVKGRFTISADTSKNTAYLQMNELPAEDTAVYYCERWGGDGFYAMDYWGQGTLVTVSS
>Anti-EGFR scFv (SEQ ID NO: 27403)
QVQLKQSGPGLVQPSQSLSITCTVSGFSLTNYGVEWVRQSFGKGLEWLGVIWSGGNTDYNTPFTSRLSINKDNSKSQVEFKMN
SLQSNDTAIYYCAPALTYYDYEFAYWGQGTLVTVSAGGSGSGGGGSGGGGSDILLTQSPVILSVSPGERVSFSCRASQSIGTN
IKWYQQRTNGSPELLIKYASESIGIPSRFSSGSGSGTDFTLSINSVESEDIADYYCQQNNNWPTTFGAGTKLELKRT

[0185] In further non-limiting embodiments, the cage polypeptides with binding domains comprise an amino acid sequence at least 40%, 45%, 50%, 55%, 60%, 65%, 70%, 75%, 80%, 85%, 90%, 91%, 92%, 93%, 94, 95%, 96%, 97%, 98%, 99%, or 100% identical to the amino acid sequence selected from the non-limiting group of SEQ ID NOS: 27404-27446.

TABLE 11
Co-LOCKR Cage proteins (These proteins may alternatively be used as Decoys for
effector proteins that do set interact with Bim)
(parentheses are optional sequences)

>Her2_Cage Original Cage targeted to Her2 by DARPin SEQ ID NO: 27404
(MGSHHHHHHGSGSENLYPQGEGGS)DLGKKLLEAARAGQDDEVRILMANGADVNAKDEYGLTFLYLATAHGHLEIVEVLLEN
GADVNAVDAIGFTPLHLAAFIGHLEIAEVLLKHGADVNAQDKFGKTAFDISIGNGNEDLAEILQKLN(SGSGSGKPGQASGS)
ELARKLLEASTKLQRLNIRLAEALLEAIARLQELNLELVYLAVELTDPKPIRDEIKEVKDKSKEIIKRAEKEIDDAAKESEKI
LEEAREAISGSGSELAKLLLKAIAETQDLNLRAAKAFLEAAAKLQELNIRAVELLVKLTDPATIREALEHAKRRSKEIIDEAE
RAIPAAKRESERIIEEARRLIEKGSGSGSELARELLRAHAQLQRLNLELLRELLRALAQLQRLNLDLLRLASELTDEIWIADE
LRRIGDEENAYYADAKRLIREAAAASEKISRKAERLIR
>EGFR_Cage Original Cage targeted to EGFR by DARPin SEQ ID NO: 27405
(MGSHHHHHHGSGSENLYFQGSGGS)DLGKKLLEAARAGQDDEVRILMANGADVNADDTWGWTPLHLAAYQGHLEIVEVLLEN
GADVNAYDYIGWTPLHLAADGHLEIVEVLLKNGADVNASDYLGDTRLRLAAHNGKLEIVEVLLKHGADVNAQGKFGKTAFDIS
IDNGNEDLAEILQKLN(SGSGSGKPGQASGS)ELARKLLEASTKLQRLNIRLAEALLEAIARLQKLNLELVYLAVELTDPKEI
RDEIKKVKDKSKEIIRPAEKEIDDAAKKSKKILEKAREAISGSGSELAKLLLKATAETQGLNLRAAKAFLEAAAKLQELNIRA
VELLVKLTDPATIREALEHAKPRSKEIIDEAERAIRAAKRESERIIKEARRLIEKGSGSGSELARELLRAHAQLQRLNLELLR
ELLRALAQLQELNLDLLPLASELTDEIWIAQELRRIGDHFNAYYADAERLIREAAAASEKISREAERLIR
>EpCAM_Cage Original Cage targeted to EpCAm by DARPin SEQ ID NO: 27406
(MGSHHHHHHGSGSENLYFQGSGGS)DLGKKLLEAARAGQDDEVRILVANGADVNAYPGTTPLHLAAAHGRLEIVEVLLKNGA
DVNAQDVWGITPLHLAAYNGELEIVEVLLKYGADVNANDTRGWTFLRLAAINGHLEIVEVLLKNVADVNAQDRSGKTPPDLAI
DNGNEDIAEVLQKAAKLN(SGSGSGKFGQASGE)ELAKKLLEASTKLQELNIRLAEALLEAIARLQELNLELVVYAVELTDPK
RIRGEIKEVKDKSEKEIIRREKEIDDAAKESEKILEEAREAISGSGSELAKLLLKAIAETQSLNLRAAKAFLEAAAKLQELNI
RAVELLVKLTDRATIREALEHAKPRSKEIIDEAERAIPAAKRESERIIEEAPRLTEKGSGSGSELARELLPAHAQLQPLNLEL
LRELLRALAQLQELNLDLLRLASELTDEIWIAQELRRIGDEFNAYYADAERLIREAAAASEKISREAERLIR
>Her2_Cage_I287A Tuned Cage targeted to Her2 by DARPin (I287A) SEQ ID NO: 27407
(MGSHHHHHHGSGSENLYFQGSGGS)DLGKLLEAARAGQDEVERILMNANGADVNAKDEVGLTPLYLATAHGHLEIVEVLLKN
GADVNAVDAIGFTPLHLAAFIGHLEIAEVLLKHGADVNAQDKFGKTAFDISIGNGNDEDLAEILQKLN(SGSGSGPGQASGE)
ELARKLLEASTKLQRLNIRLAEALLEAIAPLQELNLEIVYLAVELTDPKRIRDEIKEVKDKSKEIIRKAEKEIDDAAKESEKI
LEEAREAISGSGSELAKLLLKAIAETQDLNLRAAKAFLEAARKLQELNIRAVELLVKLTDPATIREALEHAKRRSKEIIDEAE
RAIRAAKRESERIIEEARRLIEKGSGSGSKLARELLRAHAQLQRLNLKELLRELLRALAQLQKINDLLRLASELTDEIWIAQE
LRRIGDEYNAYYADARELIREAAAASEKISREAKRIAR
>Her2_Cage I287S (Tuned Cage targeted to Her2 by DARPin (I287S) SEQ ID NO: 27408
(MGSHHHHHHGSGSENLYFQSGSGS)DLGKKLLEAARACQDDEVRILMANGADVNAKDEYGLTPLYLATARGHLEIVEVLLKN
GADVNAVDAIGFTFLHLAAFIGHLHIAEVLLKNGADVMAQDKFDKGKTAFDISIGNGEDLAEILQKLN(SGSGSGKPGQASGE)
ELAPKLLEASTKLQRLNIRLAEALLEAIAPLQELNLELVYLAVELTDPKRIRDEIKEVKDKSKEIIRKAEKEIDDAAKESEKI
LEEAREAISGSGSELAKLLLKAIAETQDLNLRAAKAFLEAAAKLQELNIRAVELLVKLTDPATIREALEHAKRPSKEIIDRAE
RAIRAAKRESERIIEEARRLIEKGSGSGSELARELLPAHAQLQRLNLELLRELLRALAQLQELNLDLLRLASELTDEIWIAQE
LPRIGDEFNAYYADAERLIREAAAASEKISREAEFLSR
>Her2_Cage_I269S Tuned Cage targeted to Her2 by DARPin (I269S) SEQ ID NO: 27409
(MGSHHHHHHGSGSENLYFQGSGGS)DLGKKLLEAARAGQDDEVRILMANGADVNAKDEYGLTFLYLATARGHLEIVEVLLEN
GADVNAVDAIGFTPLHLAAFIGHLEIAEVLLKHGADVNAQDKFGKTAFDISIGNGMEDLAEILQKLN(SGSGSGKPGQASGS)
ELARKLLEASTKLQRLNIRLAEALLEAIARLQKLNLELVYLAVELTDPKRIRDEIKEVKDKSKEIIRRAEKEIDDAAKESEKI
LEEAREAISGSGSELAKLLLKAIAETQDLNLRAAKAPLEAAAKLQELNIRAVELLVKLTDFATIREALEHAKRPSKEIIDEAE
RAIRAAKRESERIIEEARELIEKGSGSGSELARELLRAHAQLQHLNLELLRELLRALAQLQELNLDLLRLASELTDEIWIAQE
LRRIGDEFNAYYADAERLSREAAAASEKISREAERLIR
>Her2_Cage_I269S_I287A Tuned Cage targeted to Her2 by DARPin (I269S, I287A) SEQ
ID NO: 27410
(MGSHHHHHHGSGSENLYFQGSGGS)DLGKKLLEAARAGQDDEVRILMANGADVNAKDEYGLTFLYLATARGHLEIVEVLLEN
GADVNAVDAIGFTPLHLAAFIGHLEIAEVLLKHGADVNAQDKFGKTAFDISIGNGMEDLAEILQKLN(SGSGSGKPGQASGS)
ELARKLLEASTKLQRLNIRLAEALLEAIARLQKLNLELVYLAVELTDPKRIRDEIKEVKDKSKEIIRRAEKEIDDAAKESEKI
LEEAREAISGSGSELAKLLLKAIAETQDLNLRAAKAPLEAAAKLQELNIRAVELLVKLTDFATIREALEHAKRPSKEIIDEAE
RAIRAAKRESERIIEEARELIEKGSGSGSELARELLRAHAQLQHLNLELLRELLRALAQLQELNLDLLRLASELTDEIWIAQE
LRRIGDEFNAYYADAERLSREAAAASEKISREAERLAR
>Her2_Cage_I269S_I287S Tuned Cage targeted to Her2 by DARPin (I269S, I287A) SEQ
ID NO: 27411
(MGSHHHHHHGSGSENLYFQGSGGS)DLGKKLLEAARAGQDDEVRILMANGADVNAKDEYGLTFLYLATARGHLEIVEVLLKN
GADVNAVDAIGFTPLHLAAFIGHLEIAEVLLKHGADVNAQDKFGKTAFDISIGNGMEDLAEILQKLN(SGSGSGKPGQASGS)
ELARKLLEASTKLQRLNIRLAEALLEAIARLQKLNLELVYLAVELTDPKRIRDEIKEVKDKSKEIIRRAEKEIDDAAKESEKI
LEEAREAISGSGSELAKLLLKAIAETQDLNLRAAKAPLEAAAKLQELNIRAVELLVKLTDFATIREALEHAKRPSKEIIDEAE
RAIRAAKRESERIIEEARELIEKGSGSGSELARELLRAHAQLQHLNLELLRELLRALAQLQELNLDLLRLASELTDEIWIAQE
LRRIGDEFNAYYADAERLSREAAAASEKISREAERLAR
>Her2_Cage_L209A Tuned Cage targeted to Her2 by DARPin (L209A) SEQ ID NO: 27412
(MGSHHHHHHGSGSENLYFQGSGGS)DLGKKLLEAARAGQDDEVRILMANGADVNAKDEYGLTFLYLATARGHLEIVEVLLKN
GADVNAVDAIGFTPLHLAAFIGHLEIAEVLLKHGADVNAQDKFGKTAFDISIGNGMEDLAEILQKLN(SGSGSGKPGQASGS)
ELARKLLEASTKLQRLNIRLAEALLEAIARLQKLNLELVYLAVELTDPKRIRDEIKEVKDKSKEIIRRAEKEIDDAAKESEKI
LEEAREAISGSGSELAKLLLKAIAETQDLNLRAAKAPLEAAAKLQELNIRAVELLVKLTDFATIREALEHAKRPSKEIIDEAE
RAIRAAKRESERIIEEARELIEKGSGSGSELARELLRAHAQLQHLNLELLRELLRALAQLQELNLDLLRLASELTDEIWIAQE
LRRIGDEFNAYYADAERLSREAAAASEKISREAERLIR
>anti_her2_scFv_Cage_I269S Tuned Cage targeted to Her2 by anti-ber2 scFv SEQ ID
No: 27413
(METDTLLLWVLLLWVPGSTGDYKDEHHHHHHGGSENLYFQGSG)DIQMTQSPSSLSASVGDRVTITCRASQDVNTAVAWYQQ
KPGKAPKLLIYSASFLYSGVPSRFSGSRSGTDFTLTISSLQPKDFATTYCQQHYTTPRTFGQGFKVRIKGSTSGSSKPSGSEG
SGEVQLVESGGGLVQPGGSLRLSCAASGPNIKDTKIHWVRQAPGKGLEWVARIYPTNGYTRYADSVKGRFTISADTSKNTAVL
QMNSLRAEDTAVYYCSRWGGDGFYAMDYWGQGTLVTVS(SGSGSGKPGQASGS)ELARKLLEASTKLQRLNIRLAEALLEATA
RLQELNLELVYLAVELTRDPKRIRDEIKEVKDKSKEIIPRAEKEIDDAKESEKILREAREAISGSGSELAKLLLKAIAETQDL
NLRAAKAFLEAAAKLQELNIRAVELLVKLTDPATIREALREAKRPSKEIIDEAERAIRAAKRESEPIIEEARPLIEKGSGSGS
ELARELLRAHAQLQRLNLELLPELLRALAQLQELNLSLLRLASELTDEIWIAQELRRIGDEFNAYYADAERLSREAAAASEKI
SREAERLIR
>Her2_Cage_L209A_L216A Tuned Cage targeted to Her2 by DARPin (L209A) SEQ ID
NO: 27414
(MGSHHHHHHGSGSENLYFQGSGGS)DLGKKLLEAARAGQDDEVRILMANGADVNAKDEYGLTFLYLATARGHLEIVEVLLKN
GADVNAVDAIGFTPLHLAAFIGHLEIAEVLLKHGADVNAQDKFGKTAFDISIGNGMEDLAEILQKLN(SGSGSGKPGQASGS)
ELARKLLEASTKLQRLNIRLAEALLEAIARLQKLNLELVYLAVELTDPKRIRDEIKEVKDKSKEIIRRAEKEIDDAAKESEKI
LEEAREAISGSGSELAKLLLKAIAETQDLNLRAAKAPLEAAAKLQELNIRAVELLVKLTDFATIREALEHAKRPSKEIIDEAE
RAIRAAKRESERIIEEARELIEKGSGSGSELARELLRAHAQLQHLNLELLRELLRALAQLQELNLDLLRLASELTDEIWIAQE
LRRIGDEFNAYYADAERLSREAAAASEKISREAERLIR
>EGFR_Cage_I269S Tuned Cage targeted to EGFR by DARPin (I269S) SEQ ID NO: 27415
(MGSHHHHHHGSGSENLYFQGSGGS)DLGKKLLEAARAGQDDEVRILMANGADVNADDTWGWTPLHLAAYQGHLEIVEVLLKN
GADVNAYDYIGWTPLHLAADGHLEIVEVLLKNGADVNASGYIGDTPLRLAAHNGKLEIVEVLLKHGADVNAQDKFGKTAFDIS
IDNGNEDLAEILQKLN(SGSGSGKPGQASGS)ELAPKLLEATKLAQRLNIRLAEALLEAIARLQELNLELVYLAVELTDPKRI
RDEIKEVKDKSKEIIRRAEKEIDDAAKESEKILEEAREAISGSGSELAKLLLKAIAETQDLNLRAAKAFLEAAAKLQELNIRA
VELLVKLTDPATIREALEHAKRRSKEIIDEAERAIRAAKKESERIIEEARRLIEKGSGSGSELARELLRAHAQLQRLNLELLR
ELLRALAQLQELNLDLLRLASELTDEIWIAQRLRRIGDEFNAYYADAERLSREAAAASEKISREAERLIR
>EGFR_Cage_I287A Tuned Cage targeted to EGFR by DARPin (I287A) SEQ ID NO: 27416
(MGSHHHHHHGSGSENLYFQGSGGS)DLGKKLLEAARAGQDDEVRILMANGADVNADDTWGWTPLHLAAYQGHLEIVEVLLKN
GADVNAYDYIGWTPLHLAADGHLEIVEVLLKNGADVNASGYIGDTPLRLAAHNGKLEIVEVLLKHGADVNAQDKFGKTAFDIS
IDNGNEDLAEILQKLN(SGSGSGKPGQASGS)ELAPKLLEATKLAQRLNIRLAEALLEAIARLQELNLELVYLAVELTDPKRI
RDEIKEVKDKSKEIIRRAEKEIDDAAKESEKILEEAREAISGSGSELAKLLLKAIAETQDLNLRAAKAFLEAAAKLQELNIRA
VELLVKLTDPATIREALEHAKRRSKEIIDEAERAIRAAKKESERIIEEARRLIEKGSGSGSELARELLRAHAQLQRLNLELLR
ELLRALAQLQELNLDLLRLASELTDEIWIAQRLRRIGDEFNAYYADAERLSREAAAASEKISREAERLAR
>EGFR_Cage_I209A Tuned Cage targeted to EGFR by DARPin (I209A) SEQ ID NO: 27417
(MGSHHHHHHGSGSENLYFQGSGGS)DLGKKLLEAARAGQDDEVRILMANGADVNADDTWGWTPLHLAAYQGHLEIVEVLLKN
GADVNAYDYIGWTPLHLAADGHLEIVEVLLKNGADVNASGYIGDTPLRLAAHNGKLEIVEVLLKHGADVNAQDKFGKTAFDIS
IDNGNEDLAEILQKLN(SGSGSGKPGQASGS)ELAPKLLEATKLAQRLNIRLAEALLEAIARLQELNLELVYLAVELTDPKRI
RDEIKEVKDKSKEIIRRAEKEIDDAAKESEKILEEAREAISGSGSELAKLLLKAIAETQDLNLRAAKAFLEAAAKLQELNIRA
VELLVKLTDPATIREALEHAKRRSKEIIDEAERAIRAAKKESERIIEEARRLIEKGSGSGSELARELLRAHAQLQRLNLELLR
ELLRALAQLQELNLDLLRLASELTDEIWIAQRLRRIGDEFNAYYADAERLSREAAAASEKISREAERLAR
>EGFR Cage I269S long linker Tuned Cage targeted to EGFR by DARPin via long
linker (I269S) SEQ ID NO: 27418
(MGSHHHHHHGSGSENLYFQGSGGS)DLGKKLLEAARAGQDDEVRILVANGADVNAYPGTTPLHLAAAHGRLEIVEVLLKNGA
DVNAQDVWGITPLHLAAYNGHLEIVEVLLKYGADVNARDTRGWTFLHLAAINGHLEIVEVLLKNVADVNAQDRSGKTPFDLAI
DNGNEDIAEVLQKAAKLN(SGSGSGSGSGSGSGSGSGSGSGSGSGSGSGSGSGSGSGSGSGSGSGSGSGSGSGSGSGKPGQAS
GS)ELAEKLLEASTKLQRLNLRLAEALLEAIARLQELNLELYYLAVELTDPKRIRDEIKEVKDKSKEIIRRAEKEIDDAAKES
EKILEEAREAISGSGSELAKLLLKAIAETQDLNLRAAKAFLEAAAKLQELNIRAVELLVKLTDFATIREALEHAKRRSKEIID
EAERAIRAAKRESERIIKEARELIEKGSGSGSELAPELLRAHAQLQRLNLELLRELLRALAQLQELNLDLLRLASELTDEIWI
AQELRRIGDEFNAYYADAERLSREAAAASEKLSREAERLIR
>EpCAM_Cage_I269S Tuned Cage targeted to EpCAM by DARPin (I269S) SEQ ID NO: 27419
(MGSHHHHHHGSGSENLYFQGSGGS)DLGKKLLEAARAGQDDEVRILVANGADVNAYFGTTPLHLAAAHGRLEIVEVLLKNGA
DVNAQDVWGITPLELAAVNGELEIVEVLLKYGADVNAHDTRGWTPLHLAATNGRLEIVKVLLKNVADVNAQERSGKTPFDLAI
DNGNEDIAEVLQKAAKLA(SGSGSGKPGQASGS)ELARKLLEASTKLQELNIRLAEALLEAIARLQELNLELVYLAVELTDPK
RIRDEIKEVKDKSKEIIARAEKEIGDAAKESEKILERAREAISGSGSELAKLLLKAIAETQDLNLRAAKAFLEAAAKLQELNI
RAVELLVKLTDPATIREALERAKRRSKEIIDEAERAIRAAKEESERIIEEARRILRKGSGSGSELARELLRAHAQLQRLNLEL
LRELLRALAQLQELNLDLLRLASELTDEIWIAQELRRIGDEFNAYYADAERLSREAAAASEKISREAERLIR
>EpCAM_Cage_I287A Tuned Cage targeted to EpCAM by DARPin (I287A) SEQ ID NO: 27420
(MGSHHHHHHGSGSENLYFQGSGGS)DLGKKLLEAARAGQDDEVRILVANGADVNAYFGTTPLHLAAAHGRLEIVEVLLKNGA
DVNAQDVWGITPLRLAAYNGRLEIVEVLLKYGADVNAHDTPEWTPLHLAAINGHLEIVEVLLKNVADVNAQDRSGKTPFDLAI
DNGNEDIAEVLQKAAKLN(SGSGSGKPGQASGS)EALRELLEASTKLQRLNIRLAEALLRAIARLQELNLELVYLAVELTDFK
RIRDEIKEVKDKSKEIIRRAEKEIDDAAKESEKILEEAREAISGSGSELAKLLLKAIAETQDLNLRAAKAFLEAAAKLQELNI
RAVELLVKLTDPATIREALEEAKRRSKEIIDEAERAIRAAKFESERIIEEARRLIEKGSGSGSELARELLRAHAQLQRLNLEL
LPELLRALAQLQELNLDLLRLASELTDEIWISQELREIGDEFNAYYADAERLIREAAAASEKISPEAERLAR
>EpCAM_Cage_L209A Tuned Cage targeted to EpCAM by DARPin (L209A) SEQ ID NO: 27421
(MGSHHHHHHGSGSEMLYFQGSGGS)DLGKKLLEAARAGQDDEVRILVANGADVNAYFGTTPLHLAAAHGRLEIVEVLLKNGA
DVNAQDVWGITPLELAAYNGHLEIVEVLLKYGADVNAHDTRGWTPLHLAAINGHLEIVEVLLKNVADVNAQDRSGKTPEDLAI
DNGNEDIAEVLQKAAKLN(SGSGSGKPGQASGS)RLARKLLEASTKLQRLNTRLAEALLEAIARLQELNLELVYLAVELTDPK
RIRDEIKEVKDKSKEIIKRAEKEIDDAAKESEKILEEAREA(SGSGSELAKLLLKAIAETQDLNLRAAKAFLEAAAKLQELNI
RAVELLVKLTDEATIREALEEAKRESKEIIDEAERAIRAAKRESERIIKEARRLIEKGSGSGSELARELLRAHAGAQRLNLEL
LRELLRALAQLQELNLDLLRLASELTDEIWIAQELRRIGDEFNAYYADAERLIREAAAASEKISREAERLIR
Co-LOCKR Decoy proteins (for ‘NOT’ gates) (proteins containing RDHMVLHEYVNAAGITF
(SEQ IS No: 27447) may alternatively be used as Cage proteins in cases when the
effector protein interacts with GFP11)
>EGFR_Decoyl Original decoy targeted to EGFR by DARPin (for NOT logic) SEQ ID
No: 27422
(MGSHHHHHHGSGSENLYFQGSGGS)DLGKKLLEAARAGQDDEVRILMANGADVNADDTWGWTPLHLAAYQGHLEIVEVLLKN
GADVNAYDYIGWTPLHLAADGHLEIVEVLLKNGADVNASDYIGDTPLHLAAHNGELEIVEVLLKHGADVNAQDKFGKTAFDIS
IDNGNEDLAEILQKLN(SGSGSGKPGQASGS)ELARKLLEASTKLQRLNIRLAEALLEAIARLQELNLELVVLAVELTDPKRI
PDEIKEVKDKSKEIIRRAEKEIDDAAKESEKILEEAREAISGSGSELAKLLLKAIAETQDLNLRAAKAFLEAAAKLQELNIRA
VELLVELTDPATIREALEHAKRRSEEIIDEAERAIRAAERESERIIEEARRLIELGSGSGSELARELLPAHAQLQRLNLELLR
ELLRALAQLQELNLDLLRLASELRDHMVLHEYVNAAGITENAYYADAERLIREAAAASEKISREAG
>EGFR_Decoy_624 Tuned Decoy targeted to EGFR by DARPin SEQ ID NO: 27423
(MGSHHHHHHGSGSENYLFQGSGGS)DLGKKLLEAARAGQDDEVRILMANGADVNADDTWGWTPLHLAAYQGHLEIVEVLLKN
GADVNAYDYIGWTPLHLAADGHLEIVEVLLKNGADVNASDYIGDTPLNLAAHNGHLEIVEVLLKHGADVNAQDKFGKTAFDIS
IDNGNEDLAEILQKLN(SGSGSGKPGQASGS)ELARKLLEASTKLQRLNIRLAEALLEAIARLQELNLELVYLAVELTDPKEI
RDEIKEVKDKSKEIIRPAEKEIDDAAKESEKILEEAREAISGSGSELAKLLLKAIAETQGLNLRAAKAFLEAAAKLQELNIRA
VELLVKLTDPATIREALEHAKPRSKEIIDEAERAIPAAKRESERITEEAPRLIEKGSGSGSELARELLPAHAQLQPLNLELLE
ELLPALAQLQELNLDLLRLASELGRDHMVLHEYVNAAGITFKAYYADAERLIREAAAASEKISREAG
>EGFR_Decoy_G25 Tuned Decoy targeted to EGFR by DARPin SEQ ID NO: 27424
(MGSHHHHHHGSGSENLYFQGSGGS)DLGKKLLEAARAGQDDEVRILMANGADVNADDTWGWTPLHLAAYQGHLEIVEVLLKN
GADVNAYDYIGWTPLHLAADGHLEIVEVLLKNGADVNASDYIGDTPLHLAAHNGELEIVEVLLKHGADVNAQDKFGKTAFDIS
IDNGNEDLAEILQKLN(SGSGSGKPGQASGS)ELARKLLEASTKLQRLNIRLAEALLEAIARLQELNLELVYLAVRLTDPKRI
RDEIKEVKDKSKEIIRRAEKEIDDAAKESEKILEEAREAISGSGSELAKLLLKAIAETQDLNLRAAKAFLEAAAKLQELNIRA
VELLVKLTDPATIREALEHAKRRSKEIIDEAERAIRAAKRESERIIEEARRLIEKGSGSGSELARELLRAHAQLQRLNLELLR
ELLRALAQLQELNLDLLRLASELRDHMVLHEYVNAAGITFNAYYAGAKRLSPEAAAASEKISREAG
>EGFR_Decoy_G26 Tuned Decoy targeted to EGFR by DARPin SEQ ID NO: 27425
(MGSHHHHHHGSGSENLYFQGSGGS)DLGKKLLEAARAGQDDEVRILMANGADVNADDTWGWTPLHLAAYQGHLEIVEVLLKN
GADVNAYDYIGWTPLHLAADGHLEIVEVLLKNGADVNASDYIGDTPLHLAAHNGELEIVEVLLKHGADVNAQDKFGKTAFDIS
IDNGNEDLAEILQKLN(SGSGSGKPGQASGS)ELARKLLEASTKLQRLNIRLAEALLEAIARLQELNLELVYLAVELTDPKRI
RDEIKEVKDKSKEIIRRAEKEIDDAAKESEKILEEAREAISGSGSELAKLLLKAIAETQDLNLRAAKAFLEAAAKLQELNIRA
VELLVKLTDPATIREALEHAKRRSKEIIDEAERAIRAAKRESERIIEEARRLIEKGSGSGSELARELLRAHAQLQRLNLELLR
ELLRALAQLQELNLDLLRLASELRDHMVLHEYVNAAGITFNAYYADAERLIREAAAASEKISPEAER
>EGFR_Decoy_G29 Tuned Decoy targeted to EGFR by DARPin SEQ ID NO: 27426
(MGSHHHHHHGSGSENLYFQGSGGS)DLGKKLLEAARAGQDDEVRILMANGADVNADDTWGWTPLHLAAYQGHLEIVEVLLKN
GADVNAYDYIGWTPLHLAADGHLEIVEVLLKNGADVNASDYIGDTPLHLAAHNGELEIVEVLLKHGADVNAQDKFGKTAFDIS
IDNGNEDLAEILQKLN(SGSGSGKPGQASGS)ELARKLLEASTKLQRLNIRLAEALLEAIARLQELNLELVYLAVELTDPKRI
RDEIKEVKDKSKEIIRRAEKEIDDAAKESEKILEEAREAISGSGSELAKLLLKAIAETQDLNLRAAKAFLEAAAKLQELNIRA
VELLVKLTDPATIREALEHAKRRSKEIIDEAERAIRAAKRESERIIEEARRLIEKGSGSGSELARELLRAHAQLQRLNLELLR
ELLRALAQLQELNLDLLRLASELTDPDEARKAIAEVKREGNAYYADAERLSREAAAASEKISPEAERLIR
>EGFR_Decoy_G31 Tuned Decoy targeted to EGFR by DARPin SEQ ID NO: 27427
(MGSHHHHHHGSGSENLYFQGSGGS)DLGKKLLEAARAGQDDEVRILMANGADVNADDTWGWTPLHLAAYQGHLEIVEVLLKN
GADVNAYDYIGWTPLHLAADGHLEIVEVLLKNGADVNASDYIGDTPLHLAAHNGELEIVEVLLKHGADVNAQDKFGKTAFDIS
IDNGNEDLAEILQKLN(SGSGSGKPGQASGS)ELARKLLEASTKLQRLNIRLAEALLEAIARLQELNLELVYLAVELTDPKRI
RDEIKEVKDKSKEIIRRAEKEIDDAAKESEKILEEAREAISGSGSELAKLLLKAIAETQDLNLRAAKAFLEAAAKLQELNIRA
VELLVKLTDPATIREALEHAKRRSKEIIDEAERAIRAAKRESERIIEEARRLIEKGSGSGSELARELLRAHAQLQRLNLELLR
ELLRALAQLQELNLDLLRLASELGTDPDEARKAIARVKREGNAYYADAERLSREAAAASEKISREAERLIR
>EGFR_Decoy_G33 Tuned Decoy targeted to EGFR by DARPin SEQ ID NO: 27428
(MGSHHHHHHGSGSENLYFQGSGGS)DLGKKLLEAARAGQDDEVRILMANGADVNADDTWGWTPLHLAAYQGHLEIVEVLLKN
GADVNAYDYIGWTPLHLAADGHLEIVEVLLKNGADVNASDYIGDTPLHLAAHNGELEIVEVLLKHGADVNAQDKFGKTAFDIS
IDNGNEDLAEILQKLN(SGSGSGKPGQASGS)ELARKLLEASTKLQRLNIRLAEALLEAIARLQELNLELVYLAVELTDPKRI
RDEIKEVKDKSKEIIRRAEKEIDDAAKESEKILEEAREAISGSGSELAKLLLKAIAETQDLNLRAAKAFLEAAAKLQELNIRA
VELLVKLTDPATIREALEHAKRRSKEIIDEAERAIRAAKRESERIIEEARRLIEKGSGSGSELARELLRAHAQLQRLNLELLR
ELLRALAQLQELNLDLLRLASELGTDPDEARKAIARVKREGNAYYADAERLSREAAAASEKISREAG
>EGFR_Decoy_G34 Tuned Decoy targeted to EGFR by DARPin SEQ ID NO: 27429
(MGSHHHHHHGSGSENLYFQGSGGS)DLGKKLLEAARAGQDDEVRILMANGADVNADDTWGWTPLHLAAYQGHLEIVEVLLKN
GADVNAYDYIGWTPLHLAADGHLEIVEVLLKNGADVNASDYIGDTPLHLAAHNGELEIVEVLLKHGADVNAQDKFGKTAFDIS
IDNGNEDLAEILQKLN(SGSGSGKPGQASGS)ELARKLLEASTKLQRLNIRLAEALLEAIARLQELNLELVYLAVELTDPKRI
RDEIKEVKDKSKEIIRRAEKEIDDAAKESEKILEEAREAISGSGSELAKLLLKAIAETQDLNLRAAKAFLEAAAKLQELNIRA
VELLVKLTDPATIREALEHAKRRSKEIIDEAERAIRAAKRESERIIEEARRLIEKGSGSGSELARELLRAHAQLQRLNLELLR
ELLRALAQLQELNLDLLRLASELGTDPDEARKAIARVKREGNAYYADAERLSREAAAASEKISREAER
>EGFR_Decoy_G35 Tuned Decoy targeted to EGFR by DARPin SEQ ID NO: 27430
(MGSHHHHHHGSGSENLYFQGSGGS)DLGKKLLEAARAGQDDEVRILMANGADVNADDTWGWTPLHLAAYQGHLEIVEVLLKN
GADVNAYDYIGWTPLHLAADGHLEIVEVLLKNGADVNASDYIGDTPLHLAAHNGELEIVEVLLKHGADVNAQDKFGKTAFDIS
IDNGNEDLAEILQKLN(SGSGSGKPGQASGS)ELARKLLEASTKLQRLNIRLAEALLEAIARLQELNLELVYLAVELTDPKRI
RDEIKEVKDKSKEIIRRAEKEIDDAAKESEKILEEAREAISGSGSELAKLLLKAIAETQDLNLRAAKAFLEAAAKLQELNIRA
VELLVKLTDPATIREALEHAKRRSKEIIDEAERAIRAAKRESERIIEEARRLIEKGSGSGSELARELLRAHAQLQRLNLELLR
ELLRALAQLQELNLDLLRLASELGTDPDEARKAIARVKREGNAYYADAERLSREAAAASEKISREAERLI
>EGFR_Decoy_G7(IA7) Tuned Decoy targeted to EGFR by DARPin SEQ ID NO: 27431
(MGSHHHHHHGSGSENLYFQGSGGS)DLGKKLLEAARAGQDDEVRILMANGADVNADDTWGWTPLHLAAYQGHLEIVEVLLKN
GADVNAYDYIGWTPLHLAADGHLEIVEVLLKNGADVNASDYIGDTPLHLAAHNGELEIVEVLLKHGADVNAQDKFGKTAFDIS
IDNGNEDLAEILQKLN(SGSGSGKPGQASGS)ELARKLLEASTKLQRLNIRLAEALLEAIARLQELNLELVYLAVELTDPKRI
RDEIKEVKDKSKEIIRRAEKEIDDAAKESEKILEEAREAISGSGSELAKLLLKAIAETQDLNLRAAKAFLEAAAKLQELNIRA
VELLVKLTDPATIREALEHAKRRSKEIIDEAERAIRAAKRESERIIEEARRLIEKGSGSGSELARELLRAHAQLQRLNLELLR
ELLRALAQLQELNLDLLRLASELGTDPDEARKAIARVKREGNAYYADAERLSREAAAASEKISREAERLIR
>EGFR_Decoy_Box1C1 Tuned Decoy targeted to EGFR by DARPin SEQ ID NO: 27432
(MGSHHHHHHGSGSENLYFQGSGGS)DLGKKLLEAARAGQDDEVRILMANGADVNADDTWGWTPLHLAAYQGHLEIVEVLLKN
GADVNAYDYIGWTPLHLAADGHLEIVEVLLKNGADVNASDYIGDTPLHLAAHNGELEIVEVLLKHGADVNAQDKFGKTAFDIS
IDNGNEDLAEILQKLN(SGSGSGKPGQASGS)ELARKLLEASTKLQRLNIRLAEALLEAIARLQELNLELVYLAVELTDPKRI
RDEIKEVKDKSKEIIRRAEKEIDDAAKESEKILEEAREAISGSGSELAKLLLKAIAETQDLNLRAAKAFLEAAAKLQELNIRA
VELLVKLTDPATIREALEHAKRRSKEIIDEAERAIRAAKRESERIIEEARRLIEKGSGSGSELARELLRAHAQLQRLNLELLR
ELLRALAQLQELNLDLLRLASELGTDPDEARKAIARVKREGNAYYADAERLSREAAAASEKISREAERLIR
>EGFR_Decoy3 Tuned Decoy targeted to EGFR by DARPin SEQ ID NO: 27433
(MGSHHHHHHGSGSENLYFQGSGGS)DLGKKLLEAARAGQDDEVRILMANGADVNADDTWGWTPLHLAAYQGHLEIVEVLLKN
GADVNAYDYIGWTPLHLAADGHLEIVEVLLKNGADVNASDYIGDTPLHLAAHNGELEIVEVLLKHGADVNAQDKFGKTAFDIS
IDNGNEDLAEILQKLN(SGSGSGKPGQASGS)ELARKLLEASTKLQRLNIRLAEALLEAIARLQELNLELVYLAVELTDPKRI
RDEIKEVKDKSKEIIRRAEKEIDDAAKESEKILEEAREAISGSGSELAKLLLKAIAETQDLNLRAAKAFLEAAAKLQELNIRA
VELLVKLTDPATIREALEHAKRRSKEIIDEAERAIRAAKRESERIIEEARRLIEKGSGSGSELARELLRAHAQLQRLNLELLR
ELLRALAQLQELNLDLLRLASELGTDPDEARKAIARVKREGNAYYADAERLSREAAAASEKISREAERLAR
>EGFR_Decoy5 Tuned Decoy targeted to EGFR by DARPin SEQ ID NO: 27434
(MGSHHHHHHGSGSENLYFQGSGGS)DLGKKLLEAARAGQDDEVRILMANGADVNADDTWGWTPLHLAAYQGHLEIVEVLLKN
GADVNAYDYIGWTPLHLAADGHLEIVEVLLKNGADVNASDYIGDTPLHLAAHNGELEIVEVLLKHGADVNAQDKFGKTAFDIS
IDNGNEDLAEILQKLN(SGSGSGKPGQASGS)ELARKLLEASTKLQRLNIRLAEALLEAIARLQELNLELVYLAVELTDPKRI
RDEIKEVKDKSKEIIRRAEKEIDDAAKESEKILEEAREAISGSGSELAKLLLKAIAETQDLNLRAAKAFLEAAAKLQELNIRA
VELLVKLTDPATIREALEHAKRRSKEIIDEAERAIRAAKRESERIIEEARRLIEKGSGSGSELARELLRAHAQLQRLNLELLR
ELLRALAQLQELNLDLLRLASELGTDPDEARKAIARVKREGNAYYADAERLSREAAAASEKISREAERLAR
>EGFR_Decoy7 Tuned Decoy targeted to EGFR by DARPin SEQ ID NO: 27435
(MGSHHHHHHGSGSENLYFQGSGGS)DLGKKLLEAARAGQDDEVRILMANGADVNADDTWGWTPLHLAAYQGHLEIVEVLLKN
GADVNAYDYIGWTPLHLAADGHLEIVEVLLKNGADVNASDYIGDTPLHLAAHNGELEIVEVLLKHGADVNAQDKFGKTAFDIS
IDNGNEDLAEILQKLN(SGSGSGKPGQASGS)ELARKLLEASTKLQRLNIRLAEALLEAIARLQELNLELVYLAVELTDPKRI
RDEIKEVKDKSKEIIRRAEKEIDDAAKESEKILEEAREAISGSGSELAKLLLKAIAETQDLNLRAAKAFLEAAAKLQELNIRA
VELLVKLTDPATIREALEHAKRRSKEIIDEAERAIRAAKRESERIIEEARRLIEKGSGSGSELARELLRAHAQLQRLNLELLR
ELLRALAQLQELNLDLLRLASELTDPDEARKAIARVKREGNAYYADAERLSREAAAASEKISREAERLAR
>EGFR_Decoy8 Tuned Decoy targeted to EGFR by DARPin SEQ ID NO: 27436
(MGSHHHHHHGSGSENLYFQGSGGS)DLGKKLLEAARAGQDDEVRILMANGADVNADDTWGWTPLHLAAYQGHLEIVEVLLKN
GADVNAYDYIGWTPLHLAADGHLEIVEVLLKNGADVNASDYIGDTPLHLAAHNGELEIVEVLLKHGADVNAQDKFGKTAFDIS
IDNGNEDLAEILQKLN(SGSGSGKPGQASGS)ELARKLLEASTKLQRLNIRLAEALLEAIARLQELNLELVYLAVELTDPKRI
RDEIKEVKDKSKEIIRRAEKEIDDAAKESEKILEEAREAISGSGSELAKLLLKAIAETQDLNLRAAKAFLEAAAKLQELNIRA
VELLVKLTDPATIREALEHAKRRSKEIIDEAERAIRAAKRESERIIEEARRLIEKGSGSGSELARELLRAHAQLQRLNLELLR
ELLRALAQLQELNLDLLRLASELTDPDEARKAIARVKREGNAYYADAERLSREAAAASEKISREAERLIR
>EGFR_Decoy9 Tuned Decoy targeted to EGFR by DARPin SEQ ID NO: 27437
(MGSHHHHHHGSGSENLYFQGSGGS)DLGKKLLEAARAGQDDEVRILMANGADVNADDTWGWTPLHLAAYQGHLEIVEVLLKN
GADVNAYDYIGWTPLHLAADGHLEIVEVLLKNGADVNASDYIGDTPLHLAAHNGELEIVEVLLKHGADVNAQDKFGKTAFDIS
IDNGNEDLAEILQKLN(SGSGSGKPGQASGS)ELARKLLEASTKLQRLNIRLAEALLEAIARLQELNLELVYLAVELTDPKRI
RDEIKEVKDKSKEIIRRAEKEIDDAAKESEKILEEAREAISGSGSELAKLLLKAIAETQDLNLRAAKAFLEAAAKLQELNIRA
VELLVKLTDPATIREALEHAKRRSKEIIDEAERAIRAAKRESERIIEEARRLIEKGSGSGSELARELLRAHAQLQRLNLELLR
ELLRALAQLQELNLDLLRLASELTDPDEARKAIARVKREGNAYYADAERLSREAAAASEKISREAERLIR
>EGFR_Decoy10 Tuned Decoy targeted to EGFR by DARPin SEQ ID NO: 27438
(MGSHHHHHHGSGSENLYFQGSGGS)DLGKKLLEAARAGQDDEVRILMANGADVNADDTWGWTPLHLAAYQGHLEIVEVLLKN
GADVNAYDYIGWTPLHLAADGHLEIVEVLLKNGADVNASDYIGDTPLHLAAHNGELEIVEVLLKHGADVNAQDKFGKTAFDIS
IDNGNEDLAEILQKLN(SGSGSGKPGQASGS)ELARKLLEASTKLQRLNIRLAEALLEAIARLQELNLELVYLAVELTDPKRI
RDEIKEVKDKSKEIIRRAEKEIDDAAKESEKILEEAREAISGSGSELAKLLLKAIAETQDLNLRAAKAFLEAAAKLQELNIRA
VELLVKLTDPATIREALEHAKRRSKEIIDEAERAIRAAKRESERIIEEARRLIEKGSGSGSELARELLRAHAQLQRLNLELLR
ELLRALAQLQELNLDLLRLASELGSEDLYPQGSTDPDEARKAIARVKRESNAYYADAERLSREAAAASEKISREAERLAR
>EGFR_Decoy11 Tuned Decoy targeted to EGFR by DARPin SEQ ID NO: 27439
(MGSHHHHHHGSGSENLYFQGSGGS)DLGKKLLEAARAGQDDEVRILMANGADVNADDTWGWTPLHLAAYQGHLEIVEVLLKN
GADVNAYDYIGWTPLHLAADGHLEIVEVLLKNGADVNASDYIGDTPLHLAAHNGELEIVEVLLKHGADVNAQDKFGKTAFDIS
IDNGNEDLAEILQKLN(SGSGSGKPGQASGS)ELARKLLEASTKLQRLNIRLAEALLEAIARLQELNLELVYLAVELTDPKRI
RDEIKEVKDKSKEIIRRAEKEIDDAAKESEKILEEAREAISGSGSELAKLLLKAIAETQDLNLRAAKAFLEAAAKLQELNIRA
VELLVKLTDPATIREALEHAKRRSKEIIDEAERAIRAAKRESERIIEEARRLIEKGSGSGSELARELLRAHAQLQRLNLELLR
ELLRALAQLQELNLDLLRLASELGSEDLYPQGSTDPDEARKAIARVKRESNAYYADAERLSREAAAASEKISREAERLIR
>EGFR_Decoy12 Tuned Decoy targeted to EGFR by DARPin SEQ ID NO: 27440
(MGSHHHHHHGSGSENLYFQGSGGS)DLGKKLLEAARAGQDDEVRILMANGADVNADDTWGWTPLHLAAYQGHLEIVEVLLKN
GADVNAYDYIGWTPLHLAADGHLEIVEVLLKNGADVNASDYIGDTPLHLAAHNGELEIVEVLLKHGADVNAQDKFGKTAFDIS
IDNGNEDLAEILQKLN(SGSGSGKPGQASGS)ELARKLLEASTKLQRLNIRLAEALLEAIARLQELNLELVYLAVELTDPKRI
RDEIKEVKDKSKEIIRRAEKEIDDAAKESEKILEEAREAISGSGSELAKLLLKAIAETQDLNLRAAKAFLEAAAKLQELNIRA
VELLVKLTDPATIREALEHAKRRSKEIIDEAERAIRAAKRESERIIEEARRLIEKGSGSGSELARELLRAHAQLQRLNLELLR
ELLRALAQLQELNLDLLRLASELGSEDLYPQGSTDPDEARKAIARVKRESNAYYADAERLSREAAAASEKISREAERLAR
>EGFR_Decoy13 Tuned Decoy targeted to EGFR by DARPin SEQ ID NO: 27441
(MGSHHHHHHGSGSENLYFQGSGGS)DLGKKLLEAARAGQDDEVRILMANGADVNADDTWGWTPLHLAAYQGHLEIVEVLLKN
GADVNAYDYIGWTPLHLAADGHLEIVEVLLKNGADVNASDYIGDTPLHLAAHNGELEIVEVLLKHGADVNAQDKFGKTAFDIS
IDNGNEDLAEILQKLN(SGSGSGKPGQASGS)ELARKLLEASTKLQRLNIRLAEALLEAIARLQELNLELVYLAVELTDPKRI
RDEIKEVKDKSKEIIRRAEKEIDDAAKESEKILEEAREAISGSGSELAKLLLKAIAETQDLNLRAAKAFLEAAAKLQELNIRA
VELLVKLTDPATIREALEHAKRRSKEIIDEAERAIRAAKRESERIIEEARRLIEKGSGSGSELARELLRAHAQLQRLNLELLR
ELLRALAQLQELNLDLLRLASELGSEDLYPQGSTDPDEARKAIARVKRESNAYYADAERLSREAAAASEKISREAERLIR
>EGFR_Decoy14 Tuned Decoy targeted to EGFR by DARPin SEQ ID NO: 27442
(MGSHHHHHHGSGSENLYFQGSGGS)DLGKKLLEAARAGQDDEVRILMANGADVNADDTWGWTPLHLAAYQGHLEIVEVLLKN
GADVNAYDYIGWTPLHLAADGHLEIVEVLLKNGADVNASDYIGDTPLHLAAHNGELEIVEVLLKHGADVNAQDKFGKTAFDIS
IDNGNEDLAEILQKLN(SGSGSGKPGQASGS)ELARKLLEASTKLQRLNIRLAEALLEAIARLQELNLELVYLAVELTDPKRI
RDEIKEVKDKSKEIIRRAEKEIDDAAKESEKILEEAREAISGSGSELAKLLLKAIAETQDLNLRAAKAFLEAAAKLQELNIRA
VELLVKLTDPATIREALEHAKRRSKEIIDEAERAIRAAKRESERIIEEARRLIEKGSGSGSELARELLRAHAQLQRLNLELLR
ELLRALAQLQELNLDLLRLASELTDPDEARKAIARVKRESNAYYADAERLIREAAAASEKISREAERLIR
>EGFR_Decoy_G27 Tuned Decoy targeted to EGFR by DARPin SEQ ID NO: 27443
(MGSHHHHHHGSGSENLYFQGSGGS)DLGKKLLEAARAGQDDEVRILMANGADVNADDTWGWTPLHLAAYQGHLEIVEVLLKN
GADVNAYDYIGWTPLHLAADGHLEIVEVLLKNGADVNASDYIGDTPLHLAAHNGELEIVEVLLKHGADVNAQDKFGKTAFDIS
IDNGNEDLAEILQKLN(SGSGSGKPGQASGS)ELARKLLEASTKLQRLNIRLAEALLEAIARLQELNLELVYLAVELTDPKRI
RDEIKEVKDKSKEIIRRAEKEIDDAAKESEKILEEAREAISGSGSELAKLLLKAIAETQDLNLRAAKAFLEAAAKLQELNIRA
VELLVKLTDPATIREALEHAKRRSKEIIDEAERAIRAAKRESERIIEEARRLIEKGSGSGSELARELLRAHAQLQRLNLELLR
ELLRALAQLQELNLDLLRLASELRDHMVLHEYVNAAGITFNAYYADAERLIREAAAASEKISREAERLI
>EGFR_Decoy_G28 Tuned Decoy targeted to EGFR by DARPin SEQ ID NO: 27444
(MGSHHHHHHGSGSENLYFQGSGGS)DLGKKLLEAARAGQDDEVRILMANGADVNADDTWGWTPLHLAAYQGHLEIVEVLLKN
GADVNAYDYIGWTPLHLAADGHLEIVEVLLKNGADVNASDYIGDTPLHLAAHNGELEIVEVLLKHGADVNAQDKFGKTAFDIS
IDNGNEDLAEILQKLN(SGSGSGKPGQASGS)ELARKLLEASTKLQRLNIRLAEALLEAIARLQELNLELVYLAVELTDPKRI
RDEIKEVKDKSKEIIRRAEKEIDDAAKESEKILEEAREAISGSGSELAKLLLKAIAETQDLNLRAAKAFLEAAAKLQELNIRA
VELLVKLTDPATIREALEHAKRRSKEIIDEAERAIRAAKRESERIIEEARRLIEKGSGSGSELARELLRAHAQLQRLNLELLR
ELLRALAQLQELNLDLLRLASELRDHMVLHEYVNAAGITFNAYYADAERLIREAAAASEKISREAERLIR
>EGFR_Decoy_G30 Tuned Decoy targeted to EGFR by DARPin SEQ ID NO: 27445
(MGSHHHHHHGSGSENLYFQGSGGS)DLGKKLLEAARAGQDDEVRILMANGADVNADDTWGWTPLHLAAYQGHLEIVEVLLKN
GADVNAYDYIGWTPLHLAADGHLEIVEVLLKNGADVNASDYIGDTPLHLAAHNGELEIVEVLLKHGADVNAQDKFGKTAFDIS
IDNGNEDLAEILQKLN(SGSGSGKPGQASGS)ELARKLLEASTKLQRLNIRLAEALLEAIARLQELNLELVYLAVELTDPKRI
RDEIKEVKDKSKEIIRRAEKEIDDAAKESEKILEEAREAISGSGSELAKLLLKAIAETQDLNLRAAKAFLEAAAKLQELNIRA
VELLVKLTDPATIREALEHAKRRSKEIIDEAERAIRAAKRESERIIEEARRLIEKGSGSGSELARELLRAHAQLQRLNLELLR
ELLRALAQLQELNLDLLRLASELGTDPDEARKAIARVKRESNAYYADAERLSREAAAASEKISPEAERLSR
>EGFR_Decoy_G32 Tuned Decoy targeted to EGFR by DARPin SEQ ID NO: 27446
(MGSHHHHHHGSGSENLYFQGSGGS)DLGKKLLEAARAGQDDEVRILMANGADVNADDTWGWTPLHLAAYQGHLEIVEVLLKN
GADVNAYDYIGWTPLHLAADGHLEIVEVLLKNGADVNASDYIGDTPLHLAAHNGELEIVEVLLKHGADVNAQDKFGKTAFDIS
IDNGNEDLAEILQKLN(SGSGSGKPGQASGS)ELARKLLEASTKLQRLNIRLAEALLEAIARLQELNLELVYLAVELTDPKRI
RDEIKEVKDKSKEIIRRAEKEIDDAAKESEKILEEAREAISGSGSELAKLLLKAIAETQDLNLRAAKAFLEAAAKLQELNIRA
VELLVKLTDPATIREALEHAKRRSKEIIDEAERAIRAAKRESERIIEEARRLIEKGSGSGSELARELLRAHAQLQRLNLELLR
ELLRALAQLQELNLDLLRLASELGTDPDEARKAIARVKRESNAYYADAERLSREAAAASEKISPEAERLIR

[0186] In one embodiment, the polypeptide comprises an amino acid sequence at least 40%, 45%, 50%, 55%, 60%, 65%, 70%, 75%, 80%, 85%, 90%, 91%, 92%, 93%, 94%, 95%, 96%, 97%, 98%, 99%, or 100% identical to the amino acid sequence selected from the non-limiting group of SEQ ID NOS: 27404-27446, including optional residues. In another embodiment, the polypeptide comprises an amino acid sequence at least 40%, 45%, 50%, 55%, 60%, 65%, 70%, 75%, 80%, 85%, 90%, 91%, 92%, 93%, 94%, 95%, 96%, 97%, 98%, 99%, or 100% identical to the amino acid sequence selected from the non-limiting group of SEQ ID NOS: 27404-27446, excluding optional residues.

[0187] As disclosed herein, bioactive peptides to be sequestered by the polypeptides of the disclosure are located within the latch region. The latch region is denoted by brackets in the sequence of each cage polypeptide. The bioactive peptide may be added to the latch region without removing any residues of the latch region, or may replace one or more (1, 2, 3, 4, 5, 6, 7, 8, 9, 10, or more) amino acid residue in the cage scaffold latch region to produce the final polypeptide. Thus, the latch region may be significantly modified upon inclusion of the bioactive peptide. In one embodiment, the optional residues are not included in determining percent sequence identity. In another embodiment, the latch region residues may be included in determining percent sequence identity. In a further embodiment, each of the optional residues and the latch residues may are not included in determining percent sequence identity.

[0188] In one embodiment of this second aspect, the polypeptides are polypeptides according to any embodiment or combination of embodiments of the first aspect and also comprising an amino acid sequence having the required 40%, 45%, 50%, 55%, 60%, 65%, 70%, 75%, 80%, 85%, 90%, 91%, 92%, 93%, 94%, 95%, 96%, 97%, 98%, 99%, or 100% sequence identity to the amino acid sequence of the listed reference cage polypeptides disclosed herein. In another embodiment, polypeptides further comprise a bioactive peptide within (or replacing) the latch region of the cage polypeptide.

[0189] The cage polypeptide may be a cage decoy polypeptide (i.e.: without a bioactive peptide). For example, see SEQ ID NOS: 1-17, 2034-14317, and certain cage polypeptides listed in Table 7, Table 8, and/or Table 9, or may further include a sequestered bioactive peptide (present as a fusion with the cage scaffold polypeptide) in the latch region of the cage scaffold polypeptide, as described in more detail herein (for example, see SEQ ID NOS: 18-49, 51-52, 54-59, 61, 65, 67-2033, 27094-27117, 27120-27125, and certain cage polypeptides listed in Table 7, 8, and/or 9). Ina specific embodiment, the cage polypeptides comprise an amino acid sequence at least 40%, 45%, 50%, 55%, 60%, 65%, 70%, 73%, 80%, 85%, 90%, 91%, 92%, 93%, 94%, 95%, 96%, 97%, 98%, 99%, or 100% sequence identical to the amino acid sequence of a cage polypeptide in Table 7, Table 8, and/or Table 9.

[0190] In another specific embodiment, the cage polypeptides comprise an amino acid sequence at least 40%, 45%, 50%, 55%, 60%, 65%, 70%, 75%, 80%, 85%, 90%, 91%, 92%, 93%, 94%, 95%, 96%, 97%, 98%, 99%, or 100% sequence identical to the amino acid sequence of a cage polypeptide in Table 8. In another specific embodiment, the cage polypeptides comprise an amino acid sequence at least 40%, 45%, 50%, 55%, 60%, 65%, 70%, 75%, 80%, 85%, 90%, 91%, 92%, 93%, 94%, 95%, 96%, 97%, 98%, 99%, or 100% identical to the amino acid sequence of a cage polypeptide in Table 9. In one embodiment of each of these embodiments, the optional N-terminal and/or C-terminal 60 residues are not included in determining the percent sequence identity. In another embodiment, the optional residues may be included in determining percent sequence identity.

[0191] In one embodiment of the key polypeptides disclosed herein, the polypeptide comprises an amino acid sequence at least 40%, 45%, 50% 55%, 60%, 65%, 70%, 75%, 80%, 85%, 90%, 91%, 92%, 93%, 94%, 95%, 96%, 97%, 98%, 99%, or 100% sequence identical to the amino acid sequence selected from the non-limiting group of SEQ ID NOS: 27448-27459, wherein residues in parentheses are optional. In one embodiment, sequence identity determination includes optional residues; in another embodiment, sequence identity determination does not include optional amino acid residues.

TABLE 12
Co-LOCKR Key proteins

>HA_Key_Her2 HA-tagged original Key targeted to Her2 by DARPin SEQ ID NO: 27448
(MGSHHHHHHGSGSENLYFQGSYPYDVFDYAGGS)DEARKAIARVKRESKRIVEDAERLIREAAAASEKISREAEPLIR(GGG
SGSGSGSGKPGQASGS)DLGKKLLEAARAGQDDEVRILMANGADVNAKDEYGLTPLYLATAHGHLEIVEVLLKNGADVNAVDA
IGFTPLHLAAFIGHLEIAEVLLKNGADVNAQDKFGKTAFDISIGNGNEDLAEILQKLN
>Key_EGFR Original Key targeted to EGFR by DARPin SEQ ID NO: 27449
(MGSHHHHHHGSGSENLYFQSGSGGS)DEARKAIAEVKRESKRIVEDAEELIREAAASEKISPEAKRLIR(GGGSGSGSGSGK
PGQASGS)DLGKKLLEAARAGQDDEVRILMANGADVNADDTKGWTPLRLAAYQGHLEIVEVLLKNGADVNAYGYIGWTPLHLA
ADGHLEIVEVLLKNGADVNASDYIGDTPLNLAAHNGHLEIVEVLLKHGADVNAQDKFGKTAFDISIDNGNEDLAEILQKLN
>Key_EpCAM Original Key targeted to EpCAM by DARPin SEQ ID NO: 27450
(MGSHHHHHHGSGSENLYFQGSGGS)DEARKAIARVKRESKRIVEDAERLIREAAAASEKISREAERLIR(GGGSGSGSGSGK
PGQASGS)DLGKKLLEAARAGQDDEVRILVANGADVNAYFGTTPLHLAAANGRLEIVEVLLKNGADVNAQDVWGITPLHLAAY
MGHLEIVEVLLKYGADVNAHDTRGWTPLHLAAINGHLEIVEVLLKNVADVNAQDESGKTPFDLAIDNGNEDIAEVLQKAAKLN
>Key_N3_EpCAM Tuned Key targeted to EpCAM by DARPin (3aa deletion near N-term of
Key) SEQ ID NO: 27451
(MGSHHHHHHGSGSENLYFQGSGGS)DEAIARVKRESKRIVEDAEPLIREAAAASEKISREAERLIR(GGGSGSGSGSGKPGQ
ASGS)DLGKKLLEAARAGQDDEVRILVANGADVNAYFGTTPLHLAAAHGRLEIVEVLLKNGADVNAQDVWGITPLHLAAYNGH
LEIVEVLLKVGADVNAHDTRGWTFLHLAAINGHLEIVEVLLENVADVNAQDRSGKTPFDLAIDNGNEDIAEVLQKAAKLN
>Key_N7-EpCAM Tuned Key targeted to EpCAM by DARPin (7aa deletion near N-term of
Key) SEQ ID NO: 27452
(MGSHHHHHHGSGSENLYFQGSGGS)DEVKRESKRIVEDAERLIREAAAASEKISPEAKRLIR(GGGSGSGSGSGKPGQASGS)
DLGKKLLEAARASQDDEVRILVANGADVNAYFGTTPLNLAAARGRLEIVEVLLKNGADVNAQDVWGITPLHLAAYNGRLEIV
EVLLKYGADVNAHDTRGWTPLHLAAINGHLEIVEVLLKNVADVNAQDRSGKTPFDLAIDNGMEDIAEVLQKAAKLN
>Key_T7_EpCAM Tuned Key targeted to EpCAM by DARPin (7aa deletion near C-term of
Key) SEQ ID NO: 27453
(MGSHHHHHHGSGSENLYFQGSGGS)DEARKAIARVKRESKRIVEDAERLIREAAAASEKIER(GGGSGSGSGSGKPGQASGS)
DLGLKLLEAARAGQDDEVRILVANGADVNAYFGTTPLHLAPAHGRLEIVEVLLKNGADVNAQDVWGITPLHLAAYNGHLEIV
EVLLKYGADVNARDTRGWTPLHLAALNGHLEIVEVLLKNVADVNAQDRGGKTRFDLAIDNGNEDIAEVLQKAAKLN
>Key_N3_Her2 Tuned Key trageted to Her2 by DARPin (3aa deletion near N-term of Key)
SEQ ID NO: 27454
(MGSHHHHHHGSGSENLYFQGSGGS)DEAIARVKRESKRIVEDAERLIREAAAASEKISREAERLIR(GSGSGSGSGSGKPGQ
ASGS)DLGKKLLEAARAGQDDEVRILMANGADVNADDTWGWTPLHLAAYQGHLEIVEVLLKNGADVNAYDYIGWTPLHLAADG
RLEIVEVLLKNGADVNASDYLGDTPLRLAAHNGRLEIVEVLLKHGADVNAQDKFGKTAFDISIDNGNEDLAEILQKLN
>Key_N3_EGFR Tuned Key targeted to EGFR by DARPin (3aa deletion near N-term of Key)
SEQ ID NO: 27455
(MGSHHHHHHGSGSENLYFQGSGGS)DEAIARVKRESKRIVEDAERLIREAAAASEKISREARLIR(GGGSGSGSGSGKKPGQ
ASGS)DLGKKLLEAARAGQDDEVRILMANGADVNADDTWGWTPLHLAAYQGHLEIVEVLLKNGADVNAYDYIGWTPLHLAADG
RLEIVEVLLKNGADVNASDYIGDTPLRLAAHNGRLEIVEVLLKHGADVNAQDKFGKTAFDISIDNGNEDLAEILQKLN
>Key-anti-BGFR-seFv Original Key targeted to BGFR by an anti-BGFR scFv SEQ ID
NO: 27456
(METDTLLLWVLLLWVPGSTGDYKGEHREHNHGGSENLYFQGSGS)DEARKAIARVKRESKRIVEDAERLIREAAAASEKISR
EAERLIR(GSGSGSGSGSGKPGQASGS)QVQLKQSGPGLVQRSQSLSITCTVSGFSLTNYGVKWVRQSPGKGLEWLGVIWSGG
NTDYNTPETSRLSINKDNSKSQVFFKMNSLQSNDTAIYYCARALTYYDYEFAYWGQGTLVTVSAGGGGSGSGSGSGSGSDILL
TQSPVILSVSPGERVSFSCRASQSIGTNIHWYQQRTNGSPRLLIKYASESISGIPSRFSGSGSGTDPTLSINSVESEDIADYY
CQQNNNWPTTFGAGYKLELKRY
>Key_T3_EpCAM Tuned Key targeted to EpCAM by DARPin (3aa deletion near C-term of
Key) SEQ ID NO: 27457
(MGSHHHHHHGSGSENLYFQGSGGS)DEARKAIARVKRESKFIVEDAERLIREAAAASEKISPEAER(GGGSGSGSGSGKPGQ
ASGS)DLGKELLEAARAGQDDEVRILVANGAADVNAYFGTTPLELAAAHSRLEIVEVLLKNGADVNAQDVWGITPLHAAYNGH
LEIVEVLLKYGADVNAHDTRGWTPLHLAAINGHLEIVEVLLKNVADVNAQDRSGKIPFDLAIDNGNEDIAEVLQKAAKLN
>Key_EpCAM_I35S_I43A Tuned Key targeted to EpCAM by DARPin (I35S, I43A)
SEQ ID NO: 27458
(MGSHHHHHHHGSGSENLYFQGSGGS)DEARKAIARVKRESKRIVEDAERLIPEAAAASEKSSGEAERLAR(GGGSGSGSGGK
PGQASGS)DLGKKLLEAARAGQDDEVRILVANGADVNATFGTTPLHLAAAHGRLEIVEVLLKNGADVNAQDVWGITPLHLAAY
NGHLEIVEVLLKYGADVNARDTRGWTPLHLAAINGHLEIVEVLLKNVADVNAQDRSGETPFDLAIDNGNEDIAEVLQKAAKLN
>Key_EGFR_EpCAM Key targets both EGFR and EpCAM SEQ ID NO: 27459
(MGSHHHHHHGSGSENLYFQGSGGS)DEARKAIARVKRESKRIVEDAERLIREEAAASEEISREAERLIR(GSGSGSGSGSGK
PGQASGS)DLGKKLLEAARAGQDDEVRILMANGADVNADGTWGWTPLHLAAYQGHLEIVEVLLKNGADVNAYDYIGWTPLHLA
ADGHLEIVEVLLKNGADVNASDYIGDTPLHLAAHNGHLEIVEVLLKHGADVNAQDKFGKTAFDISIDNGNEDLAEILQKLN(G
GGSGSGS)DLGKKLLEAARAGQQDEVRILVANGADVNAYFGITFLHLAAHGRLEIVEVLLKNGADVNAQDVWGITTPLHLAAY
NGHLEIVEVLLKYGADVNAHDTRGWTPLHLAAINSHLEIVEVLLKNVADVNAQDRSGKTPFDLAIDNGNEDIAEVLQKAAKLN

[0192] In some aspects, the first cage polypeptide, the second cage polypeptide, and/or the decoy cage polypeptide comprise:

[0193] (a) a polypeptide comprising an amino acid sequence at least 40%, 45%, 50%, 55%, 60%, 65%, 70%, 75%, 80%, 95%, 90%, 91%, 92%, 93%, 94%, 95%, 96% 97%, 98%, 99%, or 100% identical to the amino acid sequence of a cage polypeptide disclosed herein, or selected from the group consisting SEQ IDS NOS: 27359-27392, 1-49, 51-52, 54-59, 61, 65, 67-14317, 27094-27117, 27120-27125, and 27278-27321 not including optional amino acid residues; or cage polypeptides listed in Table 7, Table 8, or Table 9, wherein the N-terminal and/or C-terminal 60 amino acids of the polypeptides are optional; and (b) one or more first, fifth, sixth, or seventh binding domains.

[0194] In some aspects, the first cage polypeptide, the second cage polypeptide, and/or the decoy cage polypeptide comprise:

[0195] (a) a polypeptide comprising an amino acid sequence at least 40%, 45%, 50%, 55%, 60%, 65%, 70%, 75%, 80%, 85%, 90%, 91%, 92%, 93%, 94%, 95%, 96%, 97%, 98% 99%, or 100% identical to the amino acid sequence of a cage polypeptide disclosed herein, or selected from the group consisting SEQ IDS NOS: 27359-27392, not including optional amino acid residues; and

[0196] (b) one or more first, fifth, sixth, or seventh binding domains.

[0197] In some aspects, the first cage polypeptide, the second cage polypeptide, and/or the decoy cage polypeptide comprise an amino acid sequence at least 40%, 45%, 50%, 55%, 60%, 65%, 70%, 75%, 80%, 85%, 90%, 91%, 92%, 93%, 94%, 95%, 96%, 97%, 98%, 99%, or 100% identical along its length to the amino acid sequence of a cage polypeptide disclosed herein, or selected from the group consisting SEQ IDS NOS: 27359-27392, including optional amino acid residues in some aspects, the first key polypeptide and/or the second key polypeptide comprise:

[0198] (a) a polypeptide comprising an amino acid sequence at least 40%, 45%, 50%, 55%, 60%, 65%, 70%, 75%, 80%, 85%, 90%, 91%, 92%, 93%, 94%, 95%, 96%, 97%, 98%, 99%, or 100% identical to the amino acid sequence selected from SEQ ID NOS: 27393-27398, 14318-26601, 26602-27015, 27016-27050, 27, 322-27,358, and key polypeptides listed in Table 7, Table 8, and/or Table 9; and

[0199] (b) one or more second, third, or fourth binding domains.

[0200] In some aspects, the first key polypeptide and/or the second key polypeptide comprise:

[0201] (a) a polypeptide comprising an amino acid sequence at least 40%, 45%, 50%, 55%, 60%, 65%, 70%, 75%, 80%, 85%, 90%, 91%, 92%, 93%, 94%, 95%, 96%, 97%, 98%, 99%, or 00% identical to the amino acid sequence selected from the group consisting of SEQ ID NOS: 27393-27398, or SEQ ID NOS: 27394-27395, not including optional residues, or including optional residues; and

[0202] (b) one or more second, third, or fourth binding domains.

[0203] In one embodiment of the compositions of any embodiment or combination of embodiments of the disclosure, the one or more bioactive peptides may comprise one or more bioactive peptide selected from the group consisting of SEQ ID NO:60, 62-64, 66, 27052, 27053, 27059-27093.

[0204] Nucleic Acids

[0205] In one aspect the disclosure provides nucleic acids encoding the polypeptide of any embodiment or combination of embodiments of each aspect disclosed herein. The nucleic acid sequence may comprise single stranded or double stranded RNA or DNA in genomic or cDNA form, or DNA-RNA hybrids, each of which may include chemically or biochemically modified, non-natural, or derivatized nucleotide bases. Such nucleic acid sequences may comprise additional sequences useful for promoting expression and/or purification of the encoded polypeptide, including but not limited to polyA sequences, modified Kozak sequences, and sequences encoding epitope tags, export signals, and secretory signals, nuclear localization signals, and plasma membrane localization signals. It will be apparent to those of skill in the art, based on the teachings herein, what nucleic acid sequences will encode the polypeptides of the disclosure.

[0206] In another aspect, the disclosure provides expression vectors comprising the nucleic acid of any aspect of the disclosure operatively linked to a suitable “control sequence.” “Expression vector” includes vectors that operatively link a nucleic acid coding region or gene to any control sequences capable of effecting expression of the gene product. “Control sequences” operably linked to the nucleic acid sequences of the disclosure are nucleic acid sequences capable of effecting the expression of the nucleic acid molecules. The control sequences need not be contiguous with the nucleic acid sequences, so long as they function to direct the expression thereof. Thus, for example, intervening untranslated yet transcribed sequences can be present between a promoter sequence and the nucleic acid sequences and the promoter sequence can still be considered “operably linked” to the coding sequence. Other such control sequences include, but are not limited to, enhancers, introns, polyadenylation signals, termination signals, and ribosome binding sites. Such expression vectors can be of any type, including but not limited plasmid and viral-based expression vectors. The control sequence used to drive expression of the disclosed nucleic acid sequences in a mammalian system may be constitutive (driven by any of a variety of promoters, including but not limited to, CMV, SV40, RSV, actin, EF, EF1 alpha, MND, MSCV) or inducible (driven by any of a number of inducible promoters including, but not limited to, tetracycline, ecdysone, steroid-responsive). The expression vector must be replicable in the host organisms either as an episome or by integration into host chromosomal DNA. In various embodiments, the expression vector may comprise a plasmid, viral-based vector, or any other suitable expression vector.

[0207] Cells

[0208] In a further aspect, the disclosure provides cells, e.g., host cells, therapeutic cells, or target cells, that comprise the nucleic acids, expression vectors (i.e.: episomal or chromosomally integrated), or polypeptides disclosed herein, wherein the cells can be either prokaryotic or eukaryotic. The cells can be transiently or stably engineered to incorporate the expression vector of the disclosure, using techniques including but not limited to bacterial transformations, calcium phosphate co-precipitation, electroporation, or liposome mediated-, DEAE dextran mediated-, polycationic mediated-, or viral mediated transfection. In one embodiment, the viral vector comprises an adenoviral vector, a vaccinia viral vector, an AAV vector, a retroviral vector, a lentiviral vector, an alphaviral vector, or any combination thereof. In another embodiment, the cells comprise:

[0209] (a) a first nucleic acid encoding the polypeptide of any embodiment or combination of embodiments of the cage polypeptides of the disclosure, operatively linked to a first promoter; and

[0210] (b) a second nucleic acid encoding the polypeptide of any embodiment or combination of embodiments of a key polypeptide of the disclosure, wherein the key polypeptide is capable of binding to a structural region of the cage polypeptide to induce a conformational change in the cage polypeptide when the cage and key are co-localized by binding of their respective binding domains to a target, wherein the second nucleic acid is operatively linked to a second promoter.

[0211] In some aspects, the cells can be in vitro cells. In some aspects, the cells are in vivo cells. In some aspects, the cells are ex vivo cells.

[0212] The cells may comprise a single cage polypeptide encoding nucleic acid and a single key polypeptide encoding nucleic acid, or may comprise a plurality (i.e.: 2, 3, 4, 5, 6, 7, 8, 9, 10, or more) first and second nucleic acids—in one such embodiment, each second nucleic acid may encode a key polypeptide capable of binding to a structural region and inducing a conformational change of a different cage polypeptide encoded by the plurality of first nucleic acids. In another embodiment, each second nucleic acid may encode a key polypeptide capable of binding to a structural region and inducing a conformational change of more than one of the cage polypeptides encoded by the plurality of first nucleic acids.

[0213] The cells referred to herein can be target cells for a therapy or therapeutic cells. In some aspects, target cells can be tumor cells. In some aspects, target cells can be healthy cells. In some aspects, the first cell moiety, the second cell moiety, or both, are present on or within a healthy cell. In some aspects, the first cell moiety, the second cell moiety, or both, are present on or within a disease cell, in some aspects, the first cell moiety, the second cell moiety, or both, are present on or within a tumor cell or a cancer cell. In some aspects, the first cell moiety, the second cell moiety, or both, are present on or within an immune cell. In some aspects, the first cell moiety, the second cell moiety, or both, are present on or within a cell selected from leukocytes, lymphocytes, T cells, regulatory T cells, effector T cells, CD4+ effector T cells. CD+ effector T cells, memory T cells, autoreactive T cells, exhausted T cells, natural killer T cells (NKT cells), B cells, dendritic cells, macrophages, NK cells, and any combination thereof. In some aspects, the first cell moiety, the second cell moiety, or both, are present on or within a cell selected from cardiac cells, lung cells, muscle cells, epithelial cells, pancreatic cells, skin cells, CNS cells, neurons, myocytes, skeletal muscle cells, smooth muscle cells, liver cells, kidney cells, bacterial cells, yeast cells, and any combination thereof.

### Binding Domains/Cell Moieties

[0214] Any suitable binding domains may be used in the compositions of the disclosure, as appropriate for an intended use. In some aspects, the first, second, third, fourth, fifth, sixth, and/or seventh binding domains are selected from the non-limiting group comprising an antigen-binding polypeptide directed against a cell surface moiety to be bound, including but not limited to Fab′, F(ab′)₂, Fab, Fv, rIgG, recombinant single chain Fv fragments (sFv), V_{H} single domains, bivalent or bispecific molecules, diabodies, triabodies, and tetrabodies; DARPins; nanobody; affibody; monobody; adnectin; alphabody; Albumin-binding domain; Adhiron; Affilin; Affimer; Affitin/Nanofitin; Anticalin; Armadillo repeat proteins; Atrimer/Tetranectin; Avimer/Maxibody; Centyrin; Fynomer; Kunitz domain; Obody/OB-fold; Pronectin; Repebody; and computationally designed proteins, and any combination thereof.

[0215] In another embodiment, the first, second, third, fourth, fifth, sixth, and/or seventh binding domains bind to a cell surface protein on a cell selected from the non-limiting group comprising tumor cells, cancer cells, immune cells, leukocytes, lymphocytes, T cells, regulatory T cells, effector T cells, CD4+ effector T cells, CD8+ effector T cells, memory T cells, autoreactive T cells, exhausted T cells, natural killer T cells (NKT cells), B cells, dendritic cells, macrophages. NK cells, cardiac cells, lung cells, muscle cells, epithelial cells, pancreatic cells, skin cells, CNS cells, neurons, myocytes, skeletal muscle cells, smooth muscle cells, liver cells, kidney cells, bacterial cells, and yeast cells.

[0216] In a further embodiment, the first, second, third, fourth, fifth, sixth, and/or seventh binding domains bind to a cell surface protein selected from the non-limiting group comprising Her2, EGFR, EpCAM, B7-H3, ROR1, GD2, GPC2, αvβ6, Her3, LICAM, BCMA, GPCR5d, EGFRvIII, CD20, CD22, CD3, CD4, CD5, CD8, CD19, CD27, CD28, CD30, CD33, CD48, IL3RA, platelet tissue factor, CLEC12A, CD82, TNFRSF1B, ADGRE2, ITGB5, CD96, CCR1, PTPRJ, CD70, LILRB2, LTB4R, TLR2, LILRA2, ITGAX, CR1, EMC10, EMB, DAGLB, P2RY13, L1LRB3, L1LRB4, SLC30A1, LILRA6, SLC6A6. SEMA4A, TAG72, FRα, PMSA, Mesothelin, LIV-1, CEA, MUC1, PD1, BLIMP1, CTLA4, LAG3, TIM3, TIGIT, CD39, Nectin-4, a cancer marker, a healthy tissue marker, and a cardiac marker. In a further embodiment, the first, second, third, fourth, fifth, sixth, and/or seventh binding domains comprise a polypeptide having at least 40%, 45%, 50%, 55%, 60%, 65%, 70%, 75%, 80%, 85%, 90%, 91%, 92%, 93%, 94%, 95%, 96%, 97%, 98%, 99%, or 100% identity to the amino acid sequence selected from the group consisting of SEQ ID NOS: 27,399-27,403.

[0217] In one embodiment of the compositions of any embodiment or combination of embodiments of the disclosure, (i) the first cage polypeptide, the second cage polypeptide, and/or the decoy cage polypeptide; and (ii) the first and/or second key polypeptide, comprise at least one cage polypeptide and at least one key polypeptide comprising an amino acid sequence at least 40%, 45%, 50%, 55%, 60%, 65%, 70%, 75%, 80%, 85%, 90%, 91%, 92%, 93%, 94%, 95%, 96%, 97%, 98%, 99%, or 100% identical to the amino acid sequence of a cage polypeptide and a key polypeptide, respectively, in the same row or one of 7, 8, or 9 (i.e.: each cage polypeptide in row 2 column 1 of the table can be used with each key polypeptide in row 2 column 1 of the table, and so on), with the proviso that each cage polypeptide and each key polypeptide further comprise one or more binding domain.

[0218] In one embodiment, the first cage polypeptide, the second cage polypeptide, and/or the decoy cage polypeptide comprise:
[0219] (a) an amino acid sequence at least 40%, 45%, 50%, 55%, 60%, 65%, 70%, 75%, 80%, 85%, 90%, 91%, 92%, 93%, 94%, 95%, 96%, 97%, 98%, 99%, or 100% identical to the amino acid sequence selected from the non-limiting group consisting of SEQ ID NOS: 27359-27392, either including optional amino acid residues or not including optional amino acid residues; and
[0220] (b) a binding domain comprising an amino acid sequence at least 40%, 45%, 50%, 55%, 60%, 65%, 70%, 75%, 80%, 85%, 90%, 91%, 92%, 93%, 94%, 95%, 6%, 97%, 98%, 99%, or 100% identical to the amino acid sequence selected from the group consisting of SEQ ID NOS: 27,399-27,403.

[0221] In another embodiment, the first key polypeptide and/or the second key polypeptide comprise:
[0222] (a) an amino acid sequence at least 40%, 45%, 50%, 55%, 60%, 65%, 70%, 75%, 80%, 85%, 90%, 91%, 92%, 93%, 94%, 95%, 96%, 97%, 98%, 99%, or 100% identical to the amino acid sequence selected from the group consisting of SEQ ID NOS: 27393-27398 or 27394-27395, either including optional amino acid residues or not including optional amino acid residues; and
[0223] (b) a binding domain comprising an amino acid sequence at least 40%, 45%, 50%, 55%, 60%, 65%, 70%, 75%, 80%, 85%, 90%, 91%, 92%, 93%, 94%, 95%, 96%, 97%, 98%, 99%, or 100% identical the amino acid sequence selected from the group consisting of SEQ ID NOS: 27,399-27,403.

[0224] In another embodiment, the first cage polypeptide, the second cage polypeptide, and/or the decoy cage polypeptide comprise an amino acid sequence at least 40%, 45%, 50%, 55%, 60%, 65%, 70%, 75%, 80%, 85%, 90%, 91%, 92%, 93%, 94%, 95%, 96%, 97%, 98%, 99%, or 100% identical to the amino acid sequence selected from the group consisting of SEQ ID NOS: 27404-27446. In another embodiment, the first key polypeptide and/or the second key polypeptide comprise an amino acid sequence at least 40%, 45%, 50%, 55%, 60%, 65%, 70%, 75%, 80%, 85%, 90%, 91%, 92%, 93%, 94%, 95%, 96%, 97%, 98%, 99%, or 100% identical to the amino acid sequence selected from the group consisting of SEQ ID NOS: 27448-27459. In a further embodiment, (i) the first cage polypeptide, the second cage polypeptide, and/or the decoy cage polypeptide comprise an amino acid sequence at least 40%, 45%, 50%, 55%, 60%, 65%, 70%, 75%, 80%, 85%, 90%, 91%, 92%, 93%, 94%, 93%, 96%, 97%, 98%, 99%, or 100% identical to the amino acid sequence selected from the group consisting of SEQ ID NOS: 27404-27446; and (ii) the first key polypeptide and/or the second key polypeptide comprise an amino acid sequence at least 40%, 45%, 50%, 55%, 60%, 65%, 70%, 75%, 80%, 85%, 90%, 91%, 92%, 93%, 94%, 95%, 96%, 97%, 98%, 99%, or 100% identical to the amino acid sequence selected from the group consisting of SEQ ID NOS: 27448-27439.

[0225] Effectors

[0226] In some aspects, an effector useful for the present disclosure comprises one or more binding moieties. In some aspects, an effector comprises an antibody or antigen binding fragment thereof, T cell receptor, DARPin, bispecific or bivalent molecule, nanobody, affibody, monobody, adnectin, alphabody, albumin binding domain, adhiron, affilin, affimer, affitin/nanofitin; anticalin; armadillo repeat protein; atrimer/tetranectin; avimer/maxibody; centyrin; fynomer; Kunitz domain; obody/OB-fold; pronectin; repebody; a computationally designed protein; a protease, a ubiquitin ligase, a kinase, a phosphatase, and/or an effector that induces proteolysis; or any combination thereof. In some aspects, the antigen binding portion thereof comprises a Fab′, F(ab′)₂, Fab, Fv, rIgG, recombinant single chain Fv fragment (scFv), and/or V_{H} single domain.

[0227] In some aspects, the effector is a therapeutic cell. In some aspects, the therapeutic cell comprises an immune cell. In certain aspects, the cell is selected from a T cell, a stem cell, an NK cell, a B cell, or any combination thereof. In some aspects, the stem cell is an induced pluripotent stem cell.

[0228] In some aspects, administration of the effector kills the cell that comprises the first binding moiety and the second binding moiety, results in receptor signaling (e.g., cytokine) in the cell that comprises the first binding moiety and the second binding moiety; results in production of signaling molecules (e.g., cytokine, chemokine) nearby the cell that comprises the first binding moiety and the second binding moiety; or results in differentiation of the cell that comprises the first binding moiety and the second binding moiety.

[0229] In some aspects, administration of the effector induces receptor signaling (e.g., cytokine) in the cell that comprises the first binding moiety and the second binding moiety. In some aspects, administration of the effector results in production of signaling molecules (e.g., cytokine, chemokine) nearby the cell that comprises the first binding moiety and the second binding moiety, including but not limited to a CD4+ T cell releasing cytokines in the tumor to support CD8+ T cell effector function. In some aspects, administration of the effector induces differentiation in the cell that comprises the first binding moiety and the second binding moiety.

[0230] Other aspects of the present disclosure are directed to one or more cells comprising a composition disclosed herein. In some aspects, the cell further comprises an effector disclosed herein. In some aspects, the cell is a tumor cell or a cancer cell. In some aspects, the cell is an immune cell. In some aspects, the cell is selected from leukocytes, lymphocytes, T cells, regulatory T cells, effector T cells, CD4+ effector T cells, CD5+ effector T cells, memory T cells, autoreactive T cells, exhausted T cells, natural killer T cells (NKT cells), B cells, dendritic cells, macrophages, NK cells, and any combination thereof. In some aspects, the cell is selected from cardiac cells, lung cells, muscle cells, epithelial cells, pancreatic cells, skin cells, CNS cells, neurons, myocytes, skeletal muscle cells, smooth muscle cells, liver cells, kidney cells, bacterial cells, yeast cells, and any combination thereof.

[0231] In some embodiments, the compositions of the fourth and fifth aspects of the disclosure do not include an effector, as the proximity-dependent binding even may be detectable without an effector protein. In one embodiment of the compositions of any embodiment of the fourth and fifth aspects of the disclosure, the effector(s) is/are present. Any effector suitable for an intended use may be used. In certain aspects, the effector binds to the one or more bioactive peptides. In one embodiment, the effector(s) are selected from the non-limiting group comprising Bcl2, GFP1-10, small molecules, antibodies, antibody drug conjugates, immunogenic peptides, proteases, T cell receptors, cytotoxic agents, fluorophores, fluorescent proteins, cell adhesion molecules, endocytic receptors, phagocytic receptors, magnetic beads, and gel filtration resin, and polypeptides having at least 40%, 45%, 50%, 55%, 60%, 65%, 70%, 75%, 80%, 85%, 90%, 91%, 92%, 93%, 94%, 95%, 96%, 97%, 98%, 99%, or 100% sequence to the amino acid sequence selected from the group consisting of SEQ ID NOS: 27,460-27,469.

TABLE 13
Effector proteins

>Bc12-cys (SEQ ID NO: 27460)
(MGSHHHHHHGSGSENLYFQGSGGS)AHAGRTGYDNREIVMKYIHYKLSQRGYEWDAGDVGAAPPGAAPAPGIFS
SQPGHTPHPAASRDPVARTSPLQTPAAPGAAAGPALSPVPPVVHLTLRQAGDDFSRRYRRDFAEMSSQLHLTPFT
ARGRFATVVEELFRDGVNWGRIVAFFEFGGVMCVESVNREMSPLVDNIALWMTEYLNRHLHTWIQDNGGWDAFVE
LYGPSMRGC
>GFP1-10 (SEQ ID NO: 27461)
(M)SKGEELFTGVVPILVELDGDVNGHKFSVRGEGEGDATIGKLTLKFICTTGKLPVPWPTLVTTLTYGVQCFSR
YPDHMKRHDFFKSAMPEGYVQERTISFKDDGKYKTRAVVKFEGDTLVNRIELKGTDFKEDGNILGHKLEYNFNSH
NVYITADKQKNGIKANFTVRHNVEDGSVQLADHYQQNTPIGDGFVLLPDNHYLSTQTVLSKDPNEK
>Bc12_opt1 (SEQ ID NO: 27462)
AHAGRTGYDNREIVMKYIHYKLSQRGYEWDAGDDAEEGRTEAPEGTESEVVHLTLRQAGDDFSRRYRRDFAEMSS
QLHLTPFTARGRFATVVEELFRDGVNWGRIVAFFEFGGVMCVESVNREMSPLVDNIALWMTEYLNRHLHTWIQDN
GGWDAFVELYGPSMR
>Bc12_opt2 (SEQ ID NO: 27463)
AHAGRTGYDNREIVMKYIHYKLSQRGYEWDAGDDAEEGSGSGSGTESEVVHLTLRQAGDDFSRRYRRDFAEMSSQ
LHLTPFTARGRFATVVEELFRDGVNWGRIVAFFEFGGVMCVESVNREMSPLVDNIALWMTEYLNRHLHTWIQDNG
GWDAEVELYGPSMR
>Bc12_opt3 (SEQ ID NO: 27464)
AHAGRTGYDNREIVMKYINYKLSQRGYEWDAGDDEAEGRTEAPEGTESEVVHQTLRQAGDDFERRYRRDFSDMSS
QLHLTPDTARGRFATVVEELFRDGVNWGRIVAFFEFGGVMCVESVNREMSPLVDRIADWMTEYLNRHLHPWIQDN
GGWDAFVELYGPSMR
>Bc12_opt4 (SEQ ID NO: 27465)
AHAGRTGYDNREIVMKYIHYKLSQRGYEWDAGDDAEEGSGSGSGTESEVVHQTLRQAGDDFERRYRRDFSDMSSQ
LHLTPDTARQRFATVVEELFRDGVNWGRIVAFFEFGGVMCVESVNREMSPLVDRIADWMTEYLNRHLHPWIQDNG
GWDAFVELYGPSMR
>Bc12_opt5 (SEQ ID NO: 27466)
AHAGRTGYDNREIVMKYIHYKLSQRGYEWDAGDDAEEGRTEAPEGTESEVVHQTLRQAGDDFERRYRRDFSDMSS
QLHLTPDTARQRFATVVEELFRDGVNWGRIVAFFEFGGVMAVEMVNRGGSPLVDRIADWMTEYLNRHLHPWIQDN
GGWDAFVELTGPSMR
>Bc12_opt6 (SEQ ID NO: 27467)
AHAGRTGYDNREIVMKYIHYKLSQRGYEWDAGDDAEEGSGSGSGTESEVVHQTLRQAGDDPERRYRRDFSDMSSQ
LHLTPDTARQRFATVVEELFRDGVNWGRIVAFFEFGGVMAVEMVNRGGSPLVDRIADWMTEYLNRHLHPWIQDNG
GWDAFVELYGPSMR
>Bc12_opt7 (SEQ ID NO: 27468)
AHAGRTGYDNREIVMKYIHYKLSQRGYEWDAGDDAEENRTTEAPEGTESEVVHRALRDAGDDFERYRRDFAEMSS
QLHLTPDTARQRFETVVEELFRDGVNWGRIVAFFEFGGVMCVESVNREMSPLVDNIAEWMTEYLNRRLHTWIQDN
GGWDAFVELYGPSMR
>Bc12_opt8 (SEQ ID NO: 27469)
AHAGRTGYDNREIVRKYIHYKLSQRGYEWDAGDDAEEGSGSGSGTESEVVHRALRDAGDDFERRYRRDFAEMSSQ
LHLTFDTARQRFETVVEELFRDGVNWGRIVAFFEFGGVMCVECVNREMSPLVDNIAEWMTEYLNRHLHTWIQDWG
GWDAFVELYGPSMR

### III. Methods of Disclosure

[0232] Some aspects of the present disclosure are directed to methods of increasing selectivity of a cell in vitro, ex vivo, or in vivo. Other aspects of the present disclosure are directed to methods of increasing selectivity of cells that are interacting with each other in vitro, ex vivo, or in vivo. Other aspects of the present disclosure are directed to methods of targeting heterogeneous cells (more than two different cell types) in vitro, ex vivo, or in vivo. Other aspects of the present disclosure are directed to methods of reducing off-target activity in vitro, ex vivo, or in vivo.

[0233] In some aspects, the present disclosure is directed to a method of increasing selectivity of a cell comprising expressing a first cage polypeptide disclosed herein and a first key polypeptide disclosed herein in vitro, in vivo, or ex vivo, in some aspects, the present disclosure is directed to a method of increasing selectivity of a cell comprising adding a first cage polypeptide disclosed herein and a first key polypeptide disclosed herein in vitro, in vivo, or ex vivo. The first cage polypeptide and one or more key polypeptides can be added to the cells in vitro, in vivo, or ex vivo together (concurrently) or separately. Some aspects of the present disclosure are directed to a method of increasing selectivity of a cell in vitro, ex vivo, or in vivo comprising (a) contacting cells with (e.g., expressing or adding) a first cage polypeptide fused to a first binding domain, and (b) contacting ((e.g., expressing or adding) the cell with a first key polypeptide fused to a second binding domain. In some aspects, the first cage polypeptide comprises (i) a structural region and (ii) a latch region further comprising one or more bioactive peptides.

[0234] Some aspects of the present disclosure are directed to a method of increasing selectivity of cells that are interacting with each other in vitro, ex vivo, or in vivo comprising: (a) contacting two or more cells with a first cage polypeptide fused to a first binding domain, wherein the first cage polypeptide comprises (i) a structural region and (ii) a latch region further comprising one or more bioactive peptides, wherein the structural region interacts with the latch region to prevent activity of the one or more bioactive peptides in the absence of colocalization with a key polypeptide and wherein the first binding domain is capable of binding to a first cell moiety present on a synapse between the two or more cells; and (b) contacting the two or more cells with a first key polypeptide fused to a second binding domain, wherein upon colocalization with the first cage polypeptide, the first key polypeptide is capable of binding to the cage structural region to activate the one or more bioactive peptides, wherein the second binding domain is capable of binding to a second cell moiety present on the synapse between the two or more cells.

[0235] In some aspects, the method further comprises contacting a second key polypeptide fused to a third binding domain with a synapse of two or more cells that also express a first cell moiety, wherein upon colocalization with the first cage polypeptide, the second key polypeptide is capable of binding to the cage structural region to activate the one or more bioactive peptides, wherein the third binding domain is capable of binding to a third cell moiety present on the synapse of the two or more cells.

[0236] In some aspects, the method further comprises contacting the two or more cells with one or more decoy cage polypeptide fused to one or more decoy binding domain with the two or more cells wherein each decoy cage polypeptide comprises a decoy structural region, which upon colocalization with the first key polypeptide and the first cage polypeptide, is capable of preferentially binding to the first key polypeptide and wherein each decoy binding domain is capable of binding to a decoy cell moiety in the synapse of the two or more cells.

[0237] Some aspects of the disclosure are directed to a method of targeting heterogeneous cells (i.e., more than two different cell types) in vitro, ex vivo, or in vivo, wherein a first cell moiety and a second cell moeity are present on the first cell and a first cell moiety and a third cell moiety are present on the second cell, comprising, comprising: (a) contacting two or more cells with a first cage polypeptide fused to a first binding domain, wherein the first cage polypeptide comprises (i) a structural region and (ii) a latch region further comprising one or more bioactive peptides, and wherein the structural region interacts with the latch region to prevent activity of the one or more bioactive peptides in the absence of colocalization with a key polypeptide and wherein the first binding domain is capable of binding to a first cell moiety present on or within the two or more cells; (b) contacting the two or more cells with a first key polypeptide fused to a second binding domain, wherein upon colocalization, the first key polypeptide is capable of binding to the cage structural region to activate the one or more bioactive peptides and wherein the second binding domain is capable of binding to a second cell moiety present on a cell that also comprises the first cell moiety, and (c) contacting the two or more cells with a second key polypeptide fused to a third binding domain, wherein upon colocalization, the second key polypeptide is capable of binding to the cage structural region to activate the one or more bioactive peptides and wherein the third binding domain is capable of binding to a third cell moiety present on a cell that comprises the first cell moiety.

[0238] In some aspects, the method further comprises contacting the two or more cells with a one or more decoy cage polypeptide fused to one or more decoy binding domain, wherein each decoy cage polypeptide comprises a decoy structural region, which upon colocalization with the first key polypeptide, the second key polypeptide, and/or the first cage polypeptide, is capable of preferentially binding to the first key polypeptide or the second key polypeptide, and wherein each decoy binding domain is capable of binding to a decoy cell moiety in a cell that comprises the first cell moiety and the second cell moiety.

[0239] Some aspects of the present disclosure are directed to a method of reducing off-target activity in vitro, ex vivo, or in vivo comprising (a) contacting two or more cells with a first cage polypeptide fused to a first binding domain, wherein the first cage polypeptide comprises (i) a structural region and (ii) a latch region further comprising one or more bioactive peptides, and wherein the structural region interacts with the latch region to prevent activity of the one or more bioactive peptides in the absence of colocalization with a key polypeptide and wherein the first binding domain is capable of binding to a first cell moiety present on a cell; (b) contacting the two or more cells with a first key polypeptide fused to a second binding domain, wherein upon colocalization, the first key polypeptide is capable of binding to the cage structural region to activate the one or more bioactive peptides and wherein the second binding domain is capable of binding to a second cell moiety present on a cell that also comprises the first cell moiety, and (c) contacting the two or more cells with a decoy cage polypeptide fused to a third binding domain, wherein the decoy cage polypeptide comprises a decoy structural region, which upon colocalization with the key polypeptide and the first cage polypeptide, is capable of preferentially binding to the first key polypeptide and wherein the third binding domain is capable of binding to a third cell moiety in a cell that comprises the first cell moiety and the second cell moiety. In some aspects, the third cell moiety is only present on a healthy cell.

[0240] As used herein, “contacting” refers to any means of bring a first element into contact with a second element. In some aspects, contacting includes directly adding a first element, e.g., a polypeptide, to second element, e.g., a cell, such as, for example, by adding a protein into a cell culture. In some aspects, contacting includes expressing the first element, e.g., a protein, by a nucleotide encoding the protein in the target cell or in a cell that is in the same culture as the target cell. In some aspects, the contacting of (a) the cell with a first cage polypeptide fused to a first binding domain, and (b) the contacting of the cell with a first key polypeptide fused to a second binding domain are performed concurrently. In some aspects, the contacting (a) is performed prior to the contacting (b). In some aspects, the contacting (b) is performed prior to the contacting (a). In some aspects, the contacting includes introducing a polynucleotide encoding a polypeptide (e.g., the first cage polypeptide, the first key polypeptide, the second key polypeptide, and the decoy cage polypeptide).

[0241] The method disclosed herein increases the selectivity of a cell for a target cell, in some aspects, the colocalization of the first cage polypeptide and the key polypeptide increases the selectivity of a cell that highly expresses the first cell moiety and the second cell moiety. In some aspects, the colocalization of the first cage polypeptide and the key polypeptide increases the selectivity of a cell that highly expresses the first and second cell moiety. In some aspects, the colocalization of the first cage polypeptide and the key polypeptide increases the selectivity of a cell that highly expresses the first and second cell moieties and a call that highly expresses the first and third cell moieties.

[0242] In a further aspect, the disclosure provides methods of targeting an effector to a cell comprising contacting a biological sample containing cells with the polypeptides, nucleic acids, vectors, cells, and/or compositions of any embodiment or combination of embodiments of the disclosure.

[0243] In another embodiment, the disclosure provides methods for cell targeting, comprising

[0244] (a) contacting a biological sample containing cells with
[0245] (i) a cage polypeptide comprising (i) a structural region, (ii) a latch region further comprising one or more bioactive peptides, and (iii) a first binding domain that targets a cell of interest, wherein the structural region interacts with the latch region to prevent activity of the one or more bioactive peptides; and
[0246] (ii) a key polypeptide comprising a second binding domain that targets the cell of interest, wherein the first binding domain and the second binding domain bind to (i) different moieties on the surface of the same cell, (ii) the same moiety on the surface of the same cell, (iii) different moieties at the synapse between two cells that are in contact, or (iv) the same moiety at the synapse between two cells that are in contact;

[0247] wherein the contacting occurs for a time and under conditions to promote binding of the cage polypeptide and the key polypeptide to the cell of interest, and to promote binding of the key polypeptide to the cage structural region to displace the latch region and activate the one or more bioactive peptides only when the cage polypeptide and the key polypeptide are co-localized to the cell of interest;

[0248] (b) contacting the biological sample with one or more effector(s) under conditions to promote binding of the one or more effectors to the one or more activated bioactive peptides to produce an effector-bioactive peptide complex; and

[0249] (c) optionally detecting the effector-bioactive peptide complex, wherein the effector-bioactive peptide complex provides a measure of the cell of interest in the biological sample.

[0250] Other aspects of the disclosure are directed to methods of preparing a subject in need of a therapy comprising administering a composition disclosed herein. Some aspects of the disclosure are directed to methods of preparing a subject in need of a therapy comprising administering a cell disclosed herein.

[0251] Some aspects are directed to a method of treating a disease or condition in a subject in need thereof comprising administering an effector to the subject, wherein the subject is also administered a composition disclosed herein. In some aspects, the administering of the effector molecule kills the cell that comprises the first binding moiety and the second binding moiety, results in receptor signaling (e.g., cytokine) in the cell that comprises the first binding moiety and the second binding moiety; results in production of signaling molecules (e.g., cytokine, chemokine) nearby the cell that comprises the first binding moiety and the second binding moiety; or results in differentiation of the cell that comprises the first binding moiety and the second binding moiety. Any effector disclosed herein can be used in the method. In some aspects, the effector binds to the one or mote bioactive peptides. In some aspects, the effector comprises an antibody or antigen binding fragment thereof, T cell receptor, DARPin, bispecific or bivalent molecule, nanobody, affibody, monobody, adnectin, alphabody, albumin binding domain, adhiron, affilin, affimer, affitin nanofitin; anticalin; armadillo repeat protein; atrimer/tetranectin; avimer/maxibody; centyrin; fynomer; Kunitz domain; obody/OB-fold; pronectin; repebody; a computationally designed protein; or any combination thereof. In certain aspects, the effector comprises an antibody or antigen binding fragment thereof. In some aspects, the antigen binding portion thereof comprises a Fab′, F(ab′)₂, Fab, Fv, rIgG, recombinant single chain Fv fragment (scFv), and/or V_{H} single domain.

[0252] In some aspects, the effector is a therapeutic cell. In some aspects, the therapeutic cell comprises a T cell, a stem cell, an NK cell, a B cell, or any combination thereof. In some aspects, the therapeutic cell comprises an immune cell. In some aspects, therapeutic cell comprises a T cell. In some aspects, therapeutic cell comprises a stem cell. In some aspects, the stem cell is an induced pluripotent stem cell. In some aspects, therapeutic cell comprises an NK cell.

### Examples

### Summary

[0253] Natural biological systems integrate multiple protein binding inputs through post-translational signaling cascades that are hardcoded to specialized functions; a synthetic system capable of integrating multiple binding inputs through conformational switching could be a general solution for predictively controlling diverse biological functions. We describe the computational design of proximity-activated de novo protein switches that perform ‘AND’, ‘OR’, and ‘NOT’ Boolean logic operations and combinations thereof in response to precise combinations of protein-binding events. The switches activate via a conformational change only when all logic conditions are met, and a high-resolution x-ray crystal structure confirms the design model. We demonstrate the utility of this system for ultraspecific targeting of mammalian cells that are distinguished in a complex cell population only by their precise combination of surface markers. Our work shows that de novo designed proteins can perform computations on the surface of cells, integrating multiple distinct binding interactions into a single biological output.

[0254] We set out to design a generalizable protein system from scratch that is capable of performing complex logic in response to combinatorial binding events. We aimed for a modular system capable of computing combinations of Boolean logic operations (‘AND’, ‘OR’, and ‘NOT’) when the components are brought into close proximity and actuating a single binding interaction as output (FIG. 1a). Such a system would be broadly useful for modulating a wide range of cellular transactions in the nucleus, cytoplasm, and cell surface. Herein, we develop such a system and apply it to cellular targeting applications: we sought to distinguish cell subpopulations using Boolean logic to integrate multiple protein binding inputs into a single output biological function, taking advantage of the property that antigen binding at the cell surface increases the local concentration of the bound protein. For this system to be generally useful, the actuation must be modular and independent of target antigen identity.

[0255] We set out to design de novo protein switches for which the actuation domain is activated by the proximity of additional designed components. We designed protein switches that activate in solution: Latching Orthogonal Cage-Key pRotein (LOCKR) switches are composed of a structural “Cage” protein that uses a “Latch” domain to sequester a functional peptide in an inactive conformation until binding of a separate “Key” protein induces a conformational change that permits binding to an “Effector” protein. Cage, Key, and Effector bind in a three-way equilibrium, and the sensitivity of the switch can be tuned by adjusting the relative Cage-Latch and Cage-Key affinities. We designed new LOCKR proteins to be inert in solution and strongly activated only when the Cage and Key are colocalized. We designed new LOCKR switches with shorter helices, improved hydrophobic packing, and an additional hydrogen bond network to promote interaction specificity among the helices (FIG. 4a-c and the Computational Protein Design portion of the Methods section provide a detailed description of the design process). The new design was nearly 100% monomeric and showed substantially reduced aggregation compared to other exemplary LOCKR switches (FIG. Sa). The improved solution behavior of the new design enabled us to solve a 2.1 Å x-ray crystal structure, which closely matched the design model (FIG. 1b, Table 16) with 1.1 Å toot mean squared deviation (RMSD) across all backbone atoms and 0.5 Å RMSD across all sidechain heavy atoms in the newly designed hydrogen bond network (FIG. 1b).

[0256] We used the new design as the starting point to develop colocalization-dependent LOCKR (Co-LOCKR) switches (FIG. 1). To install an output function into Co-LOCKR, we chose the Bim-Bcl2 pair as a well-studied model system for peptide-protein binding (12). Bim was encoded into the Latch as a sequestered peptide; Bcl2 was used as the Effector. We then added targeting domains that recruit the Co-LOCKR Cage and Key to cells expressing target antigens. While the targeting domains should bind to any ccli expressing their target antigens, only cells with both antigens should recruit both Cage and Key proteins, achieving colocalization-dependent activation (FIG. 1d-e). Co-LOCKR actuates via a thermodynamic mechanism based on reversible protein-protein interactions; therefore, complex formation can occur in solution (FIG. 6a) or on a surface (FIG. 6b), where Cage-Key colocalization increases local concentration and shifts the binding equilibrium in favor of complex formation (FIG. 6c). We demonstrate below the use of Co-LOCKR switches to regulate the recruitment of Effector proteins comprising a fluorophore.

[0257] To evaluate the ability of Co-LOCKR to target cells co-expressing a precise combination of surface antigens, we developed a mixed population flow cytometry assay by combining four K562 cell lines expressing Her2-eGFP, EGFR-iRFP, both, or neither (FIG. 1d). We used Designed Ankyrin Repeat Protein (DARPin) domains (13,14) to target the Cage and Key to Her2 and EGFR, respectively. If the system functions as designed, only cells co-expressing both Her2 and EGFR should activate Co-LOCKR and bind Bcl2: the Cage contains the sequestered Bim peptide and the Key is required for its exposure. We refer to this Co-LOCKR configuration as CL_C_{H}K_{E}; in this nomenclature “CL” refers to Co-LOCKR. C_{H} indicates that the Cage is targeted to Her2, and K_{E} indicates that the Key is targeted to EGFR (Table 17). When the mixed population of cells was co-incubated with an equimolar dilution series of Cage and Key (3 μM to 1.4 nM) and washed before adding AlexaFluor™594-labeled Bcl2 (Bcl2-AF594), the expected sigmoidal binding curve was observed for the Her2/EGFR cells but not for cells expressing either protein alone (FIG. 1f). When the cells were co-incubated with Cage, Key, and Bcl2-AF594 together without washing, binding was likewise observed only for the Her2/EGFR cells, but Bcl2-AF594 signal peaked at 111 nM CL_C_{H}K_{E} and decreased at higher concentrations; free Cage and Key likely compete for binding to the limited number of surface Her2 and EGFR proteins with Cage-Key-Bcl2 formed in solution.

[0258] We next sought to tune the dynamic range of Co-LOCKR activation to increase colocalization-dependent activation sensitivity and responsiveness. Our initial design was intended to maximize Cage-Latch affinity so as to ensure colocalization-dependence, leading us to ask whether weakening the Cage-Latch affinity could enhance signal intensity without compromising the ability to compute logic. The sensitivity of previous LOCKR switches was timed by shortening the Latch to produce a ‘toehold’, but this also promoted aggregation (FIG. 5b). We therefore focused on rationally designed mutations to tune the relative interaction affinities of the Co-LOCKR system to be colocalization-dependent (FIG. 7a-c). We mutated large, hydrophobic residues in the Latch region of the polypeptide of SEQ ID NO: 27359 (I287A, I287S, I269S) or Cage (L209A) to weaken Cage-Latch affinity (FIG. 2a). Biolayer interferometry indicated that increasingly disruptive mutations improved responsiveness (FIG. 8b), and flow cytometry showed that tuning the Cage-Latch interface enhanced colocalization-dependent activation: the tuned variants of CL_C_{H}K_{E} exhibited greater Bcl2-AF594 fluorescence on the same K562/Her2/EGFR cells (FIG. 2b, FIG. 8c). Colocalization-dependent activation occurred even at low nanomolar concentrations of CL_C_{H}K_{E}, likely limited by the number of LOCKR proteins available in small incubation volumes (FIG. 8d-e). Very little Effector binding was observed for cells expressing Her2 or EGFR alone, suggesting that Co-LOCKR avoids targeting nearby cells in trans. Of the switches tested, I269S exhibited the greatest activation (FIG. 9a, the parental Co-LOCKR design exhibited the lowest off-target activation (FIG. 9b), and I287A exhibited the highest fold specificity (FIG. 9c).

[0259] Co-localization dependent activation was also observed at the sub-cellular level by confocal microscopy. CL_C_{H}K_{E} recruited Bcl2-AF680 to the plasma membrane of HEK293T/Her2/EGFR cells but not HEK293T/Her2 or HEK293T/EGFR (FIG. 2c). There was a close correspondence between regions of the plasma membrane exhibiting colocalized Her2-eGFP and EGFR-iRFP signal with Co-LOCKR activation (FIG. 2c, column 6, quantified in FIG. 2d).

[0260] To assess the flexibility of Co-LOCKR, we attempted to specifically target alternative pairwise combinations of three cancer-associated antigens (Her2, EGFR, and EpCAM). Each of these antigens is expressed at differing levels by engineered K562 cell lines or human cancer cell lines (FIG. 10a, FIG. 11a). Using the I269S variant to maximize detection of low levels of antigen, we found that (1) Co-LOCKR could distinguish the correct pair of antigens in every case, and (2) the magnitude of Bcl2 binding corresponded with the expression level of the lower-expressed of the two target antigens (FIG. 3a, FIG. 11b-c), consistent with a stoichiometric binding mechanism for colocalization-dependent activation. Taken together, these results demonstrate the modularity of Co-LOCKR to target several antigens produced at a wide range of differing expression levels. While we chose DARPins as targeting domains so as to enable facile expression of Co-LOCKR variants, any binding domain can be substituted, including single chain variable fragments (FIG. 12).

[0261] A truly general technology for targeting any cell type in situ requires more complex logic comprising combinations of ‘AND’, ‘OR’, and ‘NOT’ operations. In principle, the colocalization-dependent activation mechanism of Co-LOCKR should be particularly well suited to accomplish this. ‘OR’ logic can potentially be achieved by adding a second Key fused to a binding domain targeting an alternative surface marker (FIG. 3b). ‘NOT’ logic can potentially be achieved by adding a Decoy protein fused to a binding domain targeting a surface marker to be avoided; the Decoy acts as a sponge to sequester the Key, thereby preventing Cage activation (FIG. 3d).

[0262] Using Her2. EGFR, and EpCAM as model antigens (Ag), we first explored [Ag₁ AND either Ag₂ OR Ag₃] logic on the surface of cells (FIG. 3b). To assess the composability of Co-LOCKR targeting, we tested all three combinations: [Her2 AND either EGFR OR EpCAM], [EGFR AND either Her2 OR EpCAM], and [EpCAM AND either Her2 OR EGFR]. In all cases, the correct cell sub-population was targeted at levels consistent with the limiting target antigen (FIG. 3c). For example, CL_C_{E}K_{H}K_{Ep} targeted cells expressing EGFR/EpCAM^{lo} 10-fold over background, Her2/EGFR/EpCAM^{lo} 59-fold over background, and Her2/EGFR/EpCAM^{hi} 56-fold above background, but exhibited minimal off-target activation on cells missing at least one antigen (middle panel of FIG. 3c).

[0263] We next explored [Ag₃ AND Ag₂ NOT Ag₃] logic using CL_C_{H}K_{Ep}D_{E} (D for Decoy) and the same set of model antigens (FIG. 3d). Consistent with the expected stoichiometric mechanism of activation, Ag₃ needed to be expressed at higher levels than Ag₂ so that an excess of the Decoy could sequester all molecules of the Key: targeting the Decoy to highly expressed EGFR completely abrogated activation by a Key targeted to low levels but not high levels of EpCAM. The Cage-Latch affinity (FIG. 3d, FIG. 13a) and Decoy-Key affinity (FIG. 13b, FIG. 14a-d) can be readily tuned to either minimize leakiness or maximize activation.

[0264] The ability to perform complex logic operations using Co-LOCKR affords a level of control and flexibility not reported by previous targeting technologies. Furthermore, the ability to tune responsiveness with rationally designed point mutations enables the rapid optimization of Co-LOCKR for a wide range of applications.

[0265] In contrast to current methods. Co-LOCKR computes logic on a single cell expressing precise combinations of antigens in cis, specifically directing cytotoxicity against target cells without harming neighboring off-target cells that only provide a subset of the target antigens. The ability to implement complex logic (e.g., [Ag₁ AND either Ag₂ OR Ag₃] (FIG. 3c) and [Ag₁ AND Ag₂ NOT Ag3] (FIG. 3d) is unique to Co-LOCKR and cannot be achieved with existing technologies.

[0266] Generally, the power of the Co-LOCKR system results from the integration of multiple coherent or competing inputs that determine the magnitude of a single response. The output signal—exposure of the functional peptide on the Latch—is increased by Key binding and countered by Decoy competition. In principle, there are no limits on the numbers of each molecule, allowing for arbitrarily complex logic operations. Although our present work has focused on describing the system and demonstrating its ability to improve T cell-based cancer immunotherapies in vitro, the Co-LOCKR system is powerful for engineering biology in any setting that requires proximity-based activation or specific targeting through calculations on the surface of cells.

### REFERENCES

[0267] 1. N. M. Daringer, R. M, Dudek, K. A. Schwarz, J. N. Leonard, Modular Extracellular Sensor Architecture for Engineering Mammalian Cell-based Devices. ACS Synth. Biol. 3, 892-902(2014).
[0268] 2. L. Morsut et al., Engineering Customized Cell Sensing and Response Behaviors Using Synthetic Notch Receptors. Cell. 164, 780-791 (2016).
[0269] 3. N. H. Kipniss et al., Engineering cell sensing and responses using a GPCR-coupled CRISPR-Cas system. Nat. Commun. 8, 2212(2017).
[0270] 4. Z. Eshhar, T. Waks, G. Gross, D. G. Schindler. Specific activation and targeting of cytotoxic lymphocytes through chimeric single chains consisting of antibody-binding domains and the gamma or zeta subunits of the immunoglobulin and T-cell receptors. Proc. Natl. Acad. Sci. U.S.A. 90, 720-4 (1993).
[0271] 5. S. Wilkie et al., Selective expansion of chimeric antigen receptor-targeted T-cells with potent effector function using interleukin-4. J. Biol. Chem. 285, 25538-44 (2010).
[0272] 6. M. E. Prosser, C. E. Brown, A, F. Shami, S. J. Forman, M. C. Jensen, Tumor PD-L1 co-stimulates primary human CD8+ cytotoxic T cells modified to express a PD1:CD28 chimeric receptor. Mol. Immunol. 51, 263-272(2012).
[0273] 7. C. Sellmann et al., Balancing Selectivity and Efficacy of Bispecific Epidermal Growth Factor Receptor (EGFR)×c-MET Antibodies and Antibody-Drug Conjugates. J. Biol. Chem. 291, 25106-25119 (2016).
[0274] 8. Y, Mazor et al., Enhanced tumor-targeting selectivity by modulating bispecific antibody binding affinity and format valence. Sci. Rep. 7, 40098 (2017).
[0275] 9. R. A. Langan et al., De novo design of bioactíve proteín switches. Nature. 572, 205-210 (2019).
[0276] 10. S. E. Boyken et al., Do novo design of protein homo-oligomers with modular hydrogen-bond network-mediated specificity. Science. 352, 680-7 (2016).
[0277] 11. A. Leaver-Fay et al., ROSETTA3: an object-oriented software suite for the simulation and design of macromolecules, Methods Enzymol. 487, 545-74 (2011).
[0278] 12. L. Delgado-Soler, M. Pinto, K. Tanaka-Gil, J. Rubio-Marinez, Molecular Determinants of Bim (BH3) Peptide Binding to Pro-Survival Proteins. J. Chem. Inf Model. 52, 2107-2118 (2012).
[0279] 13. C. Zahnd et al., A Designed Ankyrin Repeat Protein Evolved to Picomolar Affinity to Her2. J. Mol. Biol. 369, 1015-1028 (2007).
[0280] 14. D. Steiner, P. Forrer, A. Plückthun, Efficient Selection of DARPins with Sub-nanomolar Affinities using SRP Phage Display. J. Mol. Biol. 382, 1211-1227 (2008),
[0281] 15. M. Sadelain, I. Riviére, S. Riddell, Therapeutic T cell engineering, Nature. 545, 423-(2017).
[0282] 16. A. I. Salter, M. J. Pont, S. R. Riddell, Chimeric antigen receptor-modified T cells: CD19 and the road beyond. Blood, 131, 2621-2629 (2018).
[0283] 17. M. Hudecek et al., The Nonsignaling Extracellular Spacer Domain of Chimeríc Antigen Receptors Is Decisive for In Vivo Antitumor Activity. Cancer Immunol. Res. 3, 125-(2015).
[0284] 18. X. Wang et al., A transgene-encoded cell surface polypeptide for selection, in vivo tracking, and ablation of engineered cells. Blood, 118, 1255 (2011).
[0285] 19. C. C. Kloss, M. Condomines, M. Cartellieri, M. Bachmann, M. Sadelain, Combinatorial antigen recognition with balanced signaling promotes selective tumor eradication by engineered T cells. Nat. Biotechnol. 31, 71-75 (2013).
[0286] 20. K. T. Roybal et al., Precision Tumor Recognition by T Cells With Combinatorial Antigen-Sensing Circuits. Cell. 164, 770-779 (2016).
[0287] 21. S. Srivastava et al., Logic-Gated ROR1 Chimeric Antigen Receptor Expression Rescues T Cell-Mediated Toxicity to Normal Tissues and Enables Selective Tumor Targeting. Cancer Cell. 35, 489-503.e8 (2019).
[0288] 22. J. H. Cho, J, J. Collins, W. W., Wong, Universal Chimeric Antigen Receptors for Multiplexed and Logical Control of T Cell Responses. Cell. 173, 1426-1438.e11 (2018).
[0289] 23. E. Zah, M. Y. Lin, A. Silva-Benedict, M. C. Jensen, Y. Y. Chen, T Cells Expressing CD19/CD20 Bispecific Chimeric Antigen Receptors Prevent Antigen Escape by Malignant B Cells. Cancer Immunol Res. 4, 498-508 (2016).
[0290] 24. V. D. Fedorov, M. Themeli, M. Sadelain, Sci. Transl. Med., in press, doi:10.1126/scitranslmed.3006597.
[0291] 25. S. Tammana et al., 4-1BB and CD28 Signaling Plays a Synergistic Role in Redirecting Umbilical Cord Blood T Cells Against B-Cell Malignancies. Hum. Gene Ther. 21, 75-86 (2010).
[0292] 26. Y. Kagoya et al., A novel chimeric antigen receptor containing a JAK-STAT signaling domain mediates superior antitumor effects. Nat. Med. 24, 352-359(2018).
[0293] 27. C. Sun et al., THEMIS-SHP1 Recruitment by 4-1BB Tunes LCK-Mediated Priming of Chimeric Antigen Receptor-Redirected T Cells. Cancer Cell. 37, 216-225.e6 (2020).
[0294] 28. B. Kuhlman, D. Baker, Native protein sequences are close to optimal for their structures. Proc. Natl. Acad. Sci. U.S.A. 97, 10383-8 (2000).
[0295] 29. S. J. Fleishman et al., RosettaScripts: A Scripting Language Interface to the Rosetta Macromolecular Modeling Suite. PLoS One. 6, e20161 (2011).
[0296] 30. J. W. Checco et al., α/β-Peptide Foldamers Targeting Intracellular Protein—Protein Interactions with Activity in Living Cells. J. Am. Chem. Soc. 137, 11365-11375 (2015).
[0297] 31. A. Goldenzweig et al., Automated Structure- and Sequence-Based Design of Proteins for High Bacterial Expression and Stability. Mol. Cell. 63, 337-346 (2016).
[0298] 32. D. G. Gibson, H. O. Smith, C. A. Hutchison, J. C. Venter. C. Merryman, Chemical synthesis of the mouse mitochondrial genome. Nat. Methods. 7, 901-3 (2010).
[0299] 33. N. Stefan et al., DARPins Recognizing the Tumor-Associated Antigen EpCAM Selected by Phage and Ribosome Display and Engineered for Multivalency, J. Mol. Biol. 413, 826-843 (2011).
[0300] 34. W. Kabsch, IUCr, XDS. Acta Crystallogr. Sect. D Biol. Crystallogr. 66, 125-132 (2010).
[0301] 35. A. J. McCoy et al., Phaser crystallographic software. J. Appl. Crystallogr. 40, 658-674 (2007).
[0302] 36. P. D. Adams et al., PHENIX: a comprehensive Python-based system for macromolecular structure solution. Acta Crystallogr. Sect. D Biol. Crystallogr. 66, 213-221 (2010).
[0303] 37. T. C. Terwilliger et al., Iterative model building, structure refinement and density modification with the PHENIX AutoBuild wizard. Acta Crystallogr. Sect. D Biol. Crystallogr. 64, 61-69 (2098).
[0304] 38. P. Emsley, K. Cowtan, IUCr, Coot: model-building tools for molecular graphics. Acta Crystallogr. Sect. D Biol. Crystallogr. 60, 2126-2132 (2004).
[0305] 39. I. W. Davis et al., MoIProbity: all-atom contacts and structure validation for proteins and nucleic acids. Nucleic Acids Res. 35, W375-W383 (2007).
[0306] 40. A. D. Bandaranayake et al., Daedalus: a robust, turnkey platform for rapid production of decigram quantities of active recombinant proteins in human cell lines using novel lentiviral vectors. Nucleic Acids Res. 39, e143-e043 (2011).

### Methods

### Computational Protein Design

### Design of New LOCKR Switches

[0307] As a starting point, the backbone of LOCKRa (SEQ ID NO:6) was used as input coordinates to Rosetta protein design software. Latch residues, residues on the Cage making contacts to the Latch (defined by the Interface By Vector Residue Selector in Rosetta™), and existing hydrogen bond networks were held fixed to coordinates of their input rotamers while the remaining residue positions were redesigned as follows: first, additional hydrogen bond networks were designed using HBNet™; second. RosettaDesign™ calculations were performed to optimize hydrophobic packing while the new hydrogen bond networks were maintained using AtomPair restraints on the heavy atoms of each sidechain hydrogen bond. This design procedure produced a new asymmetric Cage scaffold dubbed asymLOCKR. We then created a shorter version of this design by truncating the helical bundle by 12 residues based on visual inspection, reconnecting the helices with SGSGS linkers, and mutating several surface-exposed Arg and Lys residues to Glu to reduce the pI (FIG. 1b). Finally, we encoded the Bim sequence into the Latch to convert these scaffolds into LOCKRs. The shorter version (SEQ ID NO: 27359) was used as the parental Co-LOCKRs. The RosettaScripts™ XML file used to perform these design calculations is provided below.

### Design to Rune Relative Cage-Latch-Key Affinities to Achieve Colocalization Dependent Activation

[0308] We rationally mutated large, hydrophobic residues in the Latch of SEQ ID NO: 27359 (I287A, I287S, I269S) or Cage (L209A) to Alanine or Serine to weaken the Cage-Latch interface and increase Co-LOCKR sensitivity. We deleted several amino acids at the N- or C-terminus of the Key so as to weaken the Cage-Key interface and decrease Co-LOCKR sensitivity/leakiness.

### Design to Optimize Bcl2

[0309] Native Bcl2 was redesigned to improve its solution behavior and stability. As a starting point, the C-terminal 32 residues of the transmembrane domain were deleted, and the long loop between residues 35-91 of Bcl2 was replaced with residues 35-50 of the homolog Bcl-xL, as described previously (30) Additional mutations were made using Rosetta™ and PROSS™ (31) to improve hydrophobic packing and stability. Additional surface mutations were made rationally to improve solubility and remove glycosylation sites.

### Experimental Methods

### Bacterial Protein Expression and Purification

[0310] E. coli Lemo21™ (DE3) cells harboring a pET21 plasmid encoding the gene of interest were grown overnight (10-16 hours) in 3 ml Luria-Bertani (LB) medium supplemented with 50 μg ml⁻¹ carbenicillin with shaking at 225 rpm at 37° C. Starter culture were added to 500 ml Studier TBM-5052 auto induction media supplemented with carbenicillin, grown at 37° C. for 4-7 hours, and then grown at 18° C. for an additional 18-24 hours. Cells were harvested by centrifugation at 5000 g and 4° C. for 15 minutes and resuspended in 20 ml lysis buffer (25 mM Tris pH 8.0 at room temperature, 300 mM NaCl, 20 mM Imidazole, 1 mg ml⁻¹ lysozyme (Sigma L6876, from chicken egg), 0.1 mg ml⁻¹ DNase I (Sigma, DN25, from bovine pancreas). Cells were lysed by microfluidization in the presence of 1 mM phenylmethanesulfonyl fluoride (PMSF). Lysates were clarified by centrifugation at 24,000 g at 4° C. for 30 minutes and passed through 2 ml of nickel-nitrilotriacetic acid agarose (Ni-NTA, Qiagen, 30250) pre-equilibrated in lysis buffer. Immobilized protein was washed twice with 15 column volumes (CV) of wash buffer (25 mM Tris pH 8.0 at room temperature, 300 mM NaCl, 40 mM imidazole), washed once with 5 CV of high-salt wash buffer (25 mM Tris pH 8.0 at room temperature, 1 M NaCl, 40 mM Imidazole), washed once more with 15 CV of wash buffer, and then eluted with 10 ml of elution buffer (25 mM Tris pH 8.0 at room temperature, 300 mM NaCl, 250 mM Imidazole). The eluted proteins were then concentrated (Amicon® Ultra-15 Centrifugal Filter Units. 10 kDa NMWL) and further purified by FPLC gel filtration using a Superdex™ 75 Increase 10/300 GL (GE) size exclusion column in Tris Buffered Saline (TBS; 25 mM Tris pH 8.0 at room temperature, 150 mM NaCl). Fractions containing non-aggregated protein were pooled, concentrated, and supplemented with glycerol to a final concentration of 10% v/v before being quantitated by absorbance at 280 nm (Nanodrop™), aliquoted, and snap frozen in liquid nitrogen. Protein aliquots were stable at −80° C.

### X-Ray Crystallography

[0311] For crystallography screening, the hexahistidine tag was removed via TEV cleavage followed by Ni-NTA affinity chromatography prior to SEC/FPLC. Purified protein samples were concentrated to approximately 12 mg ml⁻¹ and screened using JCSG+ and JCSG Core I-IV screens (Qiagen) on a 5-position deck Mosquito crystallization robot (ttplabtech) with an active humidity chamber. Crystals were obtained after 2 to 14 days by sitting drop vapor diffusion with drop ratios of 1:1, 2:1 and 1:2 protein solution to reservoir solution. The condition that resulted in the crystals that were used for structure determination was 0.2 M di-Sodium tartrate, 20% (w/v) PEG 3350 and no cryoprotectant added.

### X-Ray Data Collection and Structure Determination

[0312] Protein crystals were looped and flash-frozen in liquid nitrogen. Datasets were collected at the Advanced Light Source at Lawrence Berkeley National Laboratory with beamlines 8.2.1 and 8.2.2. Data sets were indexed and scaled using XDS (34) and phase information was obtained by molecular replacement (MR) using PHASER™ (35) from the Phenix™ software package (36); design models were used for the initial MR searches. Following MR, models were improved using Phenix.autobuild (37); efforts were made to reduce model bias by setting rebuild-in-place to false, and using simulated annealing and prime-and-switch phasing. Iterative rounds of manual building in COOT™ (38) and refinement in Phenix™ were used to produce the final models. Translational non-crystallographic symmetry was present in the data as report by Phenix.Xtriage, which complicated structure refinement and may explain the higher than expected R-values reported, RMSDs of bond lengths, angles and dihedrals from ideal geometries were calculated using Phenix™ (36). The overall quality of the final models was assessed using MOLPROBITY™ (39). Table 16 summarizes diffraction data and refinement statistics.

### Bcl2 Labeling

[0313] For BLI experiments, wild-type non-optimized Bcl2 with C-terminal Avi and 6×His-tags was enzymatically biotinylated using BirA according to manufacturer protocols (Avidity), purified by Ni-NTA, eluted into TBS, concentrated, snap frozen in liquid nitrogen, and stored at −80° C. For flow cytometry experiments, Bcl2 with a C-terminal cysteine was purified by Ni-NTA and gel filtration as described above with the addition of 0.5 mM TCEP to the buffers. All fractions containing monomeric Bcl2 were combined, concentrated to 100 μM in TBS supplemented with 2% glycerol and 1 mM TCEP, and labeled overnight at 4° C. with a 5-fold molar excess of Alexa Fluor™ 594 C₅ Maleimide (Invitrogen A10256) or Alexa Fluor™ 680 C₂ Maleimide (Invitrogen A20344). The labeling reaction was then dialyzed overnight into TBS supplemented with 10% glycerol and purified by get filtration as described above. Fractions containing monomeric protein were pooled, concentrated, and supplemented with glycerol to a final concentration of 10% v/v before being quantitated by absorbance at 280 nm, aliquoted, and snap frozen in liquid nitrogen. Protein aliquots were stable at −80° C. After thawing, protein aliquots were stored at 4° C. for up to one week.

### Bio-Layer Interferometry (BLI)

[0314] BLI measurements were made on an Octet® RED96 System (ForteBio) with streptavidin (SA) coated biosensors and analyzed using ForteBio Data Analysis Software version 9.0.0.10. Assay buffer was HBS-EP+ Buffer (10 mM HEPES, 150 mM NaCl, 3 mM EDTA, 0.05% v/v Surfactant P20, 0.5% non-fat dry milk, pH 7.4 at room temperature). Biotinylated Bcl2 protein was loaded onto the SA tips using a programmed threshold of 0.5 nm. Baseline was obtained by dipping the loaded biosensors into HBS-EP+ buffer; association kinetics were observed by dipping loaded biosensors into wells containing a range of LOCKR Cage and Key concentrations. Dissociation kinetics were observed by dipping tips into the HBS-EP+ Buffer wells that were used to obtain baseline. For FIG. 2 and FIG. 8b-c, Cage and Key were diluted simultaneously to maintain a 1:1 stoichiometric ratio.

### Mammalian Protein Expression and Purification

[0315] The scFv-targeted Co-LOCKR proteins (anti-Her2_Cage_I269S and Key_anti-EGFR-scFv) were produced using the Daedalus system as previously described (40). Proteins were purified on a HisTrap™ FF Crude protein purification column (GE cat #17528601) followed by size exclusion chromatography (GE Superdex 200 10/300 GL) and eluted in Dulbecco's phosphate-buffered saline supplemented with 5% glycerol.

### Cell Culture

[0316] K562 (CCL-243), Raji (CCL-86), A431 (CRL-1555), and HEK293T (CRL-3216) cells were obtained from American Type Culture Collection (ATCC). 293T LentiX cells were purchased from Clontech. SKBR3 cells were a gift from David Hockenbery (Fred Hutchinson Cancer Research Center). K562 and Raji cells were cultured in RPMI-1640 (Gibco) supplemented with 5% fetal bovine serum (FES), 1 mM L-glutamine, 25 mM HEPES, and 100 U ml⁻¹ penicillin/streptomycin. A431, SKBR3, HEK293T, and LentiX cells were cultured in DMEM high glucose (Gibco) supplemented with 10% FBS, 1 mM L-glutamine, 25 mM HEPES, 100 U ml⁻¹ penicillin/streptomycin, and 1 mM pyruvate. Primary human T cells were cultured in CTL medium consisting of RPMI-1640 supplemented with 10% human serum, 2 mM L-glutamine, 25 mM HEPES. 100 U ml⁻¹ penicillin/streptomycin and 50 μM β-mercaptoethanol. All cells were cultured at 37° C., and 5% CO₂, and tested bi-monthly for the absence of Mycoplasma using MycoAlert™ Mycoplasma Detection Kit (Lonza).

### Generation of K562 and HEK293T Cell Lines

[0317] HEK293T or LentiX cells were transiently transfected with psPAX2 (Addgene Plasmid #12260), pMD2.G (Addgene Plasmid #12259) packaging plasmids as well as a lentiviral vector encoding either Her2-eGFP, EGFR-iRFP (for K562 cells), or EGFR-mCherry™ (for HEK293T cells) using linear 25-kDa polyethyleneimine (PEI; Polysciences). Two days later, viral supernatant was concentrated by centrifugation at 8000 g for 18 hours and added to K562 cells or REK293T with 4 μg ml⁻¹ Polybrene (Sigma). Flow cytometry indicated that the Her2-eGFP and EGFR-iRFP cell lines were transduced to 98%, and the Her2-eGFP/EGFR-iRFP cell line was transduced to 88%.

[0318] Because K562 cells endogenously expressed low levels of EpCAM, EpCAM knockout (KO) cell lines were generated by nucleofection with the Alt-R® CRISPR-Cas9 system (IDT). Pre-designed crRNAs specific for the human EpCAM gene (Hs.Cas9.EPCAM.1.AA and Hs.Cas9.EPCAM.1.AB, IDT) were reconstituted in Nuclease-Free Duplex Buffer, mixed with tracrRNA at equimolar concentrations, annealed by heating to 95° C. for 5 minutes, followed by slow cooling to room temperature, crRNA-tacrRNA duplexes were combined and complexed with S.p. Cas9 Nuclease V3 and Cas9 Electroporation Enhancer for 15 minutes at room temperature. RNP complexes were added to K562 cell lines and nucleofection was performed using a 4D Nucleofector mCherry™ (Lonza) using SF Cell Line Buffer and FF-120 program according to manufacturer's instructions. Four days later, cells that stained negative for EpCAM were FACS-sorted to greater than 99% purity.

[0319] EpCAM high K562 cell lines were generated by transducing Her2-eGFP, Her2-eGFP/EGFR-iRFP, and parental K562 cells with an EpCAM-expressing lentivirus that had been prepared by transiently transfecting LentiX cells with psPAX2, pMD2.G and a lentiviral vector encoding human EpCAM (UniProt P16422, aa1-314) using CalPhos™ Mammalian Transfection Kit (Clontech). Two days after transfection, viral supernatant was filtered using a 0.45 μm PES syringe filter (Millipore) and added to the cell lines with 4 μg ml⁻¹ Polybrene. Five days later, transduced cells that stained high for EpCAM, EGFR, or Her2 were FACS-sorted to greater than 95% purity. Bim-eGFP-expressing K562 cells were generated in an identical manner using a lentivirus encoding a membrane-tethered Bim-eGFP fusion protein (mlgK signal peptide, GS linker, Bim peptide, SGSG linker, eGFP, PDGFR transmembrane domain), and FACS-sorted for eGFP expression five days after transduction.

### Flow Cytometry and Cell Phenotyping

[0320] Cells were stained with a 1:100 dilution of fluorophore-conjugated monoclonal antibodies specific for human EGFR (AY13), EpCAM (9C4), HA 1.1 (16B12), or Her2 (24D2) purchased from ThermoFisher or Biolegend. Cells were also stained with isotype control fluorophore-conjugated antibodies when appropriate. For Bcl2-AF594 binding measurements. K562 cell lines were combined into mixed populations with equal numbers of each cell type. Because EpCAM was not tagged with a fluorescent protein, two distinct populations were evaluated for each logic operation in FIG. 3: a “Low EpCAM” population contained K562/EpCAM^{lo}, K562/Her2-eGFP/EpCAM^{lo}, K562/EGFR-iRFP/EpCAM^{hi}, and K562/EGFR-iRFP/EpCAM^{lo} and the “High EpCAM” population contained K562/EpCAM^{lo}, K562/Her2-eGFP/EpCAM^{hi}, K562/EGFR-iRFP/EpCAM^{lo}, and K562/EGFR-iRFP/EpCAM^{hi}. The cell mixtures were washed with flow buffer (20 mM Tris pH 8.0, 150 mM NaCl, 1 mM MgCl₂, 1 mM CaCl₂ and 1% BSA) and aliquoted into V-bottom plates with 200,000 cells/well. Samples were incubated for one hour at room temperature with Bcl2-AF594 at 50 nM and Cage, Key and/or Decoy at a final concentration of 20 nM unless stated otherwise. Samples were washed once in 150 μl flow buffer, and then resuspended in 150 μl flow buffer 15-30 minutes before analysis.

[0321] Data were acquired on a LSRII or FACSCelesta™ (BD Biosciences). K562 cells were FACS-purified using a FACSAria II™ (BD Biosciences). The absolute number of EGFR, EpCAM, and Her2 molecules on the surface of K562 cells was determined using Quantibrite™ beads (BD Biosciences) according to manufacturer's protocols. All flow cytometry data were analyzed using FlowJo™ (Treestar).

### Confocal Microscopy

[0322] HEK293T cells were grown in ibidi μ-slide 8 well coverslips for 1 day at 37° C. and 5% CO2 (ibidi 80826). Cell staining and incubation were performed in DMEM, high glucose, HEPES, no phenol red (Gibco 21063029). Cell nuclei were stained with Invitrogen Molecular Probes NucBlue™ Live ReadyProbes™ Reagent according to manufacturer's instructions (Invitrogen R37605). Cells were incubated in culture medium containing 1% BSA, 20 nM Her2_Cage-I269S, 20 nM Key_EGFR, and 50 nM Bcl2-AF680 for 1-2 hours at 37° C., and 5% CO₂. Images were acquired on a Leica SP8X confocal microscope and analyzed in Fiji. Confocal microscopy heat map analysis

[0323] Red, green, and blue (RGB) pseudocolors were assigned to the mCherry™, eGFP, and AF680 channels, respectively, in Fiji. Using a custom python script (see supplement), the ImageIO Python library was used to read the RGB PNG files, the SciPy Python library was used to generate a bidimensional binned statistic from the pseudocolored pixel intensities, and the Matplotlib™ library was used to visualize the results as a heat map.

### Statistical Analysis

[0324] Statistical analyses were performed using Prism™ (GraphPad). An ordinary one-way ANOVA test followed by Dunnett's post-hoc test was used to compare Co-LOCKR-induced targeting (FIG. 3a, c, e) and CAR T cell cytokine production (FIG. 4). For ‘AND’ targeting, the control group was set as the double-negative cell line; for ‘OR’ and ‘NOT’ targeting the control group was set as the triple-negative cell line. Only p-values meeting a statistically significant cutoff of alpha=0.05 are indicated on graphs. * denotes p<0.05, ** denotes p<0.01, *** denotes p<0.001, **** denotes p<0.0001.

TABLE 16
X-ray Crystallography data collection and refinement statistics.Statistics for
the highest-resolution shell are shown in parentheses.

| | |
|---|---|
| Wavelength | 0.9999 |
| Resolution range | 42.38-2.10(2.18~2.10) |
| Space group | p1211 |
| Unit cell | 61.841 52.914 75.591 |
| | 90102.63890 |
| Total reflections | 123167(10501) |
| Unique reflecions | 27650(2448) |
| Multiphicity | 4.5(4.3) |
| Completeness (%) | 85.21(69.05 |
| Mean I/sigma (1) | 4.93 (0.92) |
| Wilson B-factor | 19.07 |
| R-merge | 0.1749(1.117) |
| R-means | 0.1993 (1.276) |
| R-pim | 0.09414(0.6093) |
| CC1/2 | 0.996(0.671) |
| CC* | 0.999(0.896) |
| Reflections used in refinement | 23829 (1892) |
| Reflections used for R-free | 1736 (137) |
| R-work | 0.2574 (0.3125) |
| R-free | 0.2881 (0.2983) |
| CC(work) | 0.938 (0.792) |
| CC(free) | 0.922 (0.842) |
| Number of non-hydrogen atoms | 4467 |
| macromolecules | 4277 |
| solvent | 190 |
| protein residues | 564 |
| RMS(bonds) | 0.005 |
| RMS(angles) | 0.89 |
| [symbol] favored (%) | 99.10 |
| [symbol] allowed (%) | 0.90 |
| [symbol] outliers (%) | 0.0 |
| Rotamer outliers (%) | 1.29 |
| Clashscore | 10.5 |
| Average B-factor | 32.95 |
| Macromolecules | 32.96 |
| solvent | 32.58 |

[symbol]

indicates data missing or illegible when filed

TABLE 17
Co-LOCKER logic.

| Co-LOCKER | logic operation |
|---|---|
| CL_CHKB | H |
| CL_ [symbol] | E |
| CL_ [symbol] | Ep |
| CL_ [symbol] | H AND E |
| CL_ [symbol] | H AND E |
| CL_ [symbol] | H AND Ep |
| CL_ [symbol] | H AND Ep |
| CL_ [symbol] | H AND Ep |
| CL_ [symbol] | H AND Ep |
| CL_ [symbol] | H AND either E OR Ep |
| CL_ [symbol] | E AND either H OR Ep |
| CL_ [symbol] | Ep AND either H OR E |
| CL_ [symbol] | H AND Ep NOT E |
| CL_ [symbol] | H AND Ep NOT E |

[symbol]

indicates data missing or illegible when filed

```
#Custom python script for [symbol]     heat map analysis [symbol]
# [symbol]   python [symbol]
# [symbol]   coding

[symbol]

[symbol]

Created on Thu Jun 6 13 [symbol]   47 [symbol]   8 2019
@author [symbol]    audrey [symbol]   sky
Heat map for co-LOCKR [symbol]     RGB image pixel intensities [symbol]
Red is on the x-axis [symbol]    green is on the y-axis [symbol]    and blue is the heat

[symbol]

[symbol]

import imageio
from [symbol]     import stats
import [symbol]    plot as ply
def heatmap(image) [symbol]
  im = imageio.im [symbol]   (image)
  # copy of image data is quicker to access
  imcopy = im
  #print(imcopy.shape) #RGB shape is (1024, 1024, 3)
  pixel_list = [symbol]
  counter = 0
  for y in range(imcopy [symbol]
    for x in range(imcopy [symbol]
      counter += [symbol]
      #printer(counter)
      color = [symbol]    (imcopy[y][x])
      #r, g, b = color
      pixel_list.append(color)
  r = [x[0] for x in pixel_list]
  g = [x[1] for x in pixel_list]
  b = [x[2] for x in pixel_list]
  binn [symbol]   _data = stats_binn [symbol]   _statistic_2d(r [symbol]   g [symbol]   b)
  im = plt.imshow( [symbol]   _data[0] [symbol]   T [symbol]   p=′plasma′ [symbol]    orgin=′lower′ [symbol]    extent=[0, 255, 0, 255])
  cb = plt [symbol]   colorbar( )
  cb [symbol]   set_label [symbol]   AF680 mean pixel intensity [symbol]
  plt [symbol]   xlabel [symbol]   CherryTM pixel intensity (EGFR [symbol]
  plt [symbol]   ylabel [symbol]   FP pixel intensity (HER2 [symbol]
  plt [symbol]   fig(image [symbol]   heatmap [symbol]
#RosettaScripts XML used to design Co-LOCKR
# Rosetta XML script to redesign LOCKR to be asymmetric
# Original scaffold was built from symmetric [symbol]     ( [symbol]    2016)
# Scott [symbol]    and Mar [symbol]
<ROSETTASCRIPTS>
  <SCOREFXNS>
    <Score [symbol]   unction name=″hard″ weights=″″beta″/>
  </SCOREFXNS>
  <RESIDUE_SELECTORS>
    <Index name=″latch″ resnums=″302- [symbol]   0″/>
    <Index name=″cage″ resnums=″1- [symbol]   01″/>
        # preserve original hydrogen bond networks
    <Index name=″HBNet″
resnums=″9,12,24,27,30,45,48,75,93,111,130,133,148,151,166,169,196,214,232,251,254,269,272,287,290,335,
339″/>
    <InterfaceByVector name=″swtich_interface″ grp1_selector=″latch″ grp2_selector=″cage″/>
    <And name=″main_scaffold″>
      <Not selector=″switch_interface″/>
      <Not selector=″HBNet″/>
      <SecondaryStructure [symbol]   =″H″/>
    </And>
    <Not name=″no_design″ selector=″main_scaffold [symbol]   >
  </RESIDUE_SELECTORS>
  <TASKOPERATIONS>
    <OperateOnResidueSubset name=″repack_new″ selector=″no_design″>
      <PreventRepackingRLT/>
    </OperationsOnResidueSubset>
  </TASKOPERATIONS>
  <MOVERS>
    <SwitchChainOrder name=″rechain″ chain_order=″12″/>
        # search for new hydrogen bond networks while preserving the original networks
    <HBNetStapleInterface score [symbol]   =″hard″ name=″hbnet″ design_residues=″HYNQST″
task_operations=″repack_new″ hb_threshold=″ [symbol]   ″ minimize=″true″ show_task=″true″ [symbol]    =″true″
all_helical_interfaces=″true″ min_connectivity=″ [symbol]   ″ min_ [symbol]   _contacted_by_network=″2″
min_networks_per_pose=″1″ max_networks_per_pose=″3″ min_network_size=″3″ min_core_ [symbol]   =″2″
max_ [symbol]   =″3″ max_replicates_before_branch=″3″ use_aa_dependent_weights=″true″
write_network_p [symbol]   =″true″ write_ [symbol]   _files=″false″/>
    <MultiplePoseMover name=″switch_peptide_design_MPM″ max_input_poses=″100″>
      <ROSETTASCRIPTS>
          <SCOREFXNS>
            <ScoreFunction name=″hard″ weights=″beta″/>
            <ScoreFunction name=″hard_cart″ weights=″beta_cart″/>
            <ScoreFunction name=″soft_ [symbol]   ″ weights=″/home/ [symbol]   /weights/beta_soft_rep_ [symbol]   ″/>
            <ScoreFunction name=″hard_ [symbol]   ″ weights=″beta_ [symbol]   ″/>
            <ScoreFunction name=″op_ [symbol]   ″ weights=″beta″ >
              <Reweight scoretype=″f [symbol]   ″ weight=″1.4″ />
              <Reweight scoretype=″ [symbol]   ″ weight=″2.0″ />
            </ScoreFunction>
          </SCOREFXNS>
          <RESIDUE_SELECTORS>
            <Layer name=″hbnet_core″ select_core=″true″ core_cutoff=″3.6″ />
            <And name=″terminal_loop″>
              <SecondaryStructure [symbol]    =″L″ include_terminal_loops=″true″ use_d [symbol]   p=″true″/>
              <Index resnums=″1-1 [symbol]   ″/>
              <Chain chains=″A″/>
            </And>
            <SecondaryStructure name=″loops″ use_d [symbol]   p=″true″ [symbol]    =″L″/>
            <Not name=″not_redesign″ selector=″loops″/>
            <Layer name=″pick_core_and_boundary″ select_core=″true″ select_boundary=″true″
core_cutoff=″ [symbol]   2″/>
            <Layer name=″pick_core_and_surface″ select_core=″true″ select_surface=″true″
core_cutoff=″ [symbol]   2″/>
            <Layer name=″pick_surface_and_boundary″ select_surface=″true″ select_boundary=″true″
core_cutoff=″ [symbol]   2″/>
            <Chain name=″chain_a″ chains=″A″/>
            <Layer name=″core″ select_core=″true″ core_cutoff=″ [symbol]   2″ />
            <ResidueName name=″ala_and_met″ residue_name [symbol]   =″ALA [symbol]   MET″ />
            <Not name=″not_ala_or_met″ selector=″ala_and_met″ />
            <! [symbol]    <ResiduePD [symbol]   Label name=″hbnet_residues″ property=″HBNet″ /> [symbol]    >
            <Index name=″latch″ resnums=″302- [symbol]   0″/>
            <Index name=″cage″ resnums=″1- [symbol]   />
            <Index name=″HBNet″
resnums=″9,12,24,27,30,45,48,75,93,111,130,133,148,151,166,169,196,214,232,251,254,269,272,287,290,335,
339″/>
            <InterfaceByVector name =″switch_interface″ grp1_selector=″latch″ grp2_selector=″cage″/>
            # select all residues to not touch during design
            <And name=″main_scaffold″>
              <Not selector=″switch_interface″/>
                # to repack HBNet [symbol]     with AtomPair [symbol]     during design [symbol]    comment this line out [symbol]    use
″hbnet_task″
                # leave it in to make HBNet rotamers fixed
              <Not selector=″HBNet″/>
              <SecondaryStructure [symbol]   =″H″/>
            </And>
            <Not name=″no_design″ selector=″main_scaffold″/>
          </RESIDUE_SELECTORS>
          <TASKOPERATIONS>
            <ConsensusLoopDesign name=″disallow_non_abego_aas″/>
            <LayerDesign name=″layer_all″ layer=″core_boundary_surface_Nterm_Cterm″
make_pymol_script=″0″ use_sidechain_neighbors=″True″ core=″ [symbol]   >
              <core>
                Helix append=″M″ />
                <Helix exclude=″WY″ />
              </core>
              <boundary>
                <Helix exclude=″WMY″ />
              </boundary>
              <surface>
                <Helix append=″A″>
              </surface>
            </LayerDesign>
            <OperateOnResidueSubset name=″loop_design″ selector=″not_redesign″>
              <PreventRepackingRLT/>
            </OperateOnResidueSubset>
            <OperateOnResidueSubset name=″repack_new″ selector=″no_design″>
              <PreventRepackingRLT/>
            </OperateOnResidueSubset>
            <OperateOnResidueSubset name=″design_core″ selector=″pick_surface_and_boundary″>
              <PreventRepackingRLT/>
            </OperateOnResidueSubset>
            <OperateOnResidueSubset name=″design_boundary″ selector=″pick_core_and_surface″>
              <PreventRepackingRLT/>
            </OperateOnResidueSubset>
            <OperateOnResidueSubset name=″design_surface″ selector=″pick_core_and_boundary″>
              <PreventRepackingRLT/>
            </OperateOnResidueSubset>
            <OperateOnResidueSubset name=″repack_not_ala_or_met″ selector=″not_ala_or_met″ >
              <RestrictToRepackingRLT/>
            </OperateOnResidueSubset>
            <OperateOnResidueSubset name=″redesign_ala_met″ selector=″ala_and_met″ >
              <RestrictAbsentCanonicalAASRLT [symbol]   =″AMILV [symbol]   ″ />
            </OperateOnResidueSubset>
            <InitializeFromCommandline name=″init″/>
            <Constraint [symbol]   BondNetwork name=″ [symbol]   net_task″ />
            <IncludeCurrent name=″current″/>
            <LimitAromaCh2 name=″ [symbol]   ″ />
            <ExtraRotamersGeneric name=″ex1_ex2″ ex1=″1″ ex2=″1″/>
            <ExtraRotamersGeneric name=″ex1″ ex1=″1″/>
            <RestrictAbsentCanonicalAAS name=″ala_only″ [symbol]    =″0″ keep_ [symbol]   =″A″ />
            <RestrictToRepacking name=″repack_only″/>
            BundleReporter name=bundle_filter score [symbol]   =hard/>
          </TASKOPERATIONS>
          <MOVERS>
            <PackRotamersMover name=″softpack_core″ score [symbol]   =″soft_ [symbol]   ″
task_operations=″layer_all,design_core,current [symbol]   disallow_non_abego_ [symbol]   repack_new [symbol]   hbnet_task″/>
            <PackRotamersMover name=″softpack_boundary″ score [symbol]   =″soft_ [symbol]   ″
task_operations=″layer_all,design_boundary,current [symbol]   disallow_non_abego_ [symbol]   repack_new [symbol]   hbnet_task″/>
            <PackRotamersMover name=″softpack_surface″ score [symbol]   =″soft_ [symbol]   ″
task_operations=″layer_all,design_surface,current [symbol]   disallow_non_abego_ [symbol]   repack_new [symbol]   hbnet_task″/>
            <PackRotamersMover name=″hardpack_core″ score [symbol]   =″hard_ [symbol]   ″
task_operations=″layer_all,design_core,current [symbol]   ex1_ex2,disallow_non_abego_ [symbol]   repack_new [symbol]   hbnet_tas
k″/>
            <PackRotamersMover name=″hardpack_boundary″ score [symbol]   =″hard_cst″
task_operations=″layer_all,design_boundary,current, [symbol]   ex1_ex2,disallow_non_abego_ [symbol]   repack_new [symbol]
t_task″/>
            <PackRotamersMover name=″hardpack_surface″ score [symbol]   =″up_ [symbol]   ″
task_operations=″layer_all,design_surface,current, [symbol]   ex1,disallow_non_abego_ [symbol]   repack_new [symbol]   net_task″
/>
            <PackRotamersMover name=″design_loops″ score [symbol]   =″hard_ [symbol]   ″
task_operations=″current [symbol]   ex1_ex2,loop_design,layer_all [symbol]   disallow_non_abego_ [symbol]   hbnet_task″/>
            <DumpPdb name=″dump [symbol]   ″ [symbol]    =″dump [symbol]   pdb″ score [symbol]   =″hard″/>
            ConnectChainsMover name=closer chain_connections=″[A+B] [symbol]   [B+A]″/>
            InterfaceAnalyzerMover name=interface_analyzer score [symbol]   =hard packstat=1 pack_separated=0 />
            <MinMover name=″hardmin_ [symbol]   ″ score [symbol]   =″hard_ [symbol]   ″ chi=″1″ bb=″0″ bondangle=″0″
bondlength=″0″ />
          </MOVERS>
          <PROTOCOLS>
            <Add mover=″softpack_core″/>
            <Add mover=″softpack_boundary″/>
            <Add mover=″softpack_surface″/>
            <Add mover=″hardmin_ [symbol]   ″/>
            <Add mover=″hardpack_core″/>
            <Add mover=″hardpack_boundary″/>
            <Add mover=″hardpack_surface″/>
          </PROTOCOLS>
      </ROSETTASCRIPTS>
    </MultiplePoseMover>
    <MultiplePoseMover name=″MPM_filters″>
      <ROSETTASCRIPTS>
          <SCOREFXNS>
            <ScoreFunction name=″hard_ [symbol]   ″ weights=″beta_ [symbol]   ″/>
          </SCOREFXNS>
          <RESIDUE_SELECTORS>
            <Chain name=″peptide″ chains=″B″/>
            <Chain name=″SB76_ [symbol]   ″ chains=″A″/>
            <InterfaceByVector name=″scaffold_interface″>
              <Chain chains=″A″/>
              <Not selector=″ [symbol]   ″/>
            </InterfaceByVector>
          </RESIDUE_SELECTORS>
          <TASKOPERATIONS>
            <LayerDesign name=″layer_all″ layer=″core_boundary_surface_Nterm_Cterm″
make_pymol_script=″0″ use_sidechain_neighbors=″True″ core=″ [symbol]   ″ >
              <core>
                Helix append=″M″ />
                <Helix exclude=″WY″ />
              </core>
              <boundary>
                <Helix exclude=″DWMY″ />
              </boundary>
              <surface>
                <Helix append=″A″>
              </surface>
            </LayerDesign>
          </TASKOPERATIONS>
          <FILTERS>
            <PreProline name=″prepro″ use_statistical_potential=″0″ />
            <ScoreType [symbol]    =″scorefilter″ [symbol]     score_type=″total_score″ threshold=″ [symbol]   ″ [symbol]
″0″ />
            <EnzScore name=″cst_score″ score_type=″ [symbol]   ″ score [symbol]   =″ [symbol]   ″ whole_pose=″ [symbol]   ″
energy_cutoff=″5″ [symbol]    =″0″/>
            <Buried [symbol]   Hbonds name=″ [symbol]   ″ score [symbol]   =″beta″ cutoff=″10″ print_out_info_to_pdb=″true″
use_hbnet_behavior=″true″ [symbol]    =″0″/>
            <ResidueCount name=″ala_count″ max_residue_count=″1 [symbol]   ″ residue_types=″ALA″
residue_selector=″scaffold_interface″ [symbol]    =″0″/>
          </FILTERS>
          <PROTOCOLS>
            <Add filter=″scorefilter″/>
            <Add filter=″ [symbol]   _score″/>
            <Add filter=″al [symbol]   _count″/>
            <Add filter=″ [symbol]   ″/>
          </PROTOCOLS>
      </ROSETTASCRIPTS>
    </MultiplePoseMover>
  </MOVERS>
  <PROTOCOLS>
    <Add mover=″hbnet″/>
    <Add mover=″switch_peptide_design_MPM″/>
    <Add mover=″MPM_filters″/>
  </PROTOCOLS>
</ROSETTASCRIPTS> [symbol]
indicates data missing or illegible when filed
```

### All Amine Acid Sequences

### Modular Sequences:

[0325] 1. Co-LOCKR is comprised of one or more Cage polypeptides, one or more Key polypeptides, and optionally one or more Decoy polypeptides, wherein
   [0326] a. The Cage polypeptide is comprised of one or more modular targeting moieties, one or more modular Co-LOCKR Cage domains, and optionally one or more modular Co-LOCKR linkers
   [0327] b. The Key polypeptide is comprised of one or more modular targeting moieties, one or more modular Co-LOCKR Key domains, and optionally one or more modular Co-LOCKR linkers
   [0328] c. The Decoy polypeptide is comprised of one or more modular targeting moieties, one or more modular Co-LOCKR Decoy domains, and optionally one or more modular Co-LOCKR linkers
      Modular targeting moieties: See Table 10

TABLE 14
Modular Co-LOCKR Linkers

>Linker1 YKDEHHHHHHSGGSENLYFQGSG (SEQ ID NO: 27479)
>Linker2 GGGSGSGSGSGKPGQASGS (SEQ ID NO: 27480)
>Linker3 GSGSGKPGQASG (SEQ ID NO: 27481)
>Linker4 GGS (SEQ ID NO: 27482)
>Linker5 SGSGSGKPGQASGS (SEQ ID NO: 27483)
>Linker6 YPYDVPDYA (SEQ ID NO: 27484)
>Linker7 SGSG (SEQ ID NO: 27485)
>Linker8 NWSEPQFRK (SEQ ID NO: 27486)
>Linker9 SGSGSGSGSGSGSGSGSGSGSGS
GSGSGSGSGSGSGSGSGSGSGSGSGSGSGSGS
GSGSGKPGQAASGS (SEQ ID NO: 27487)
>Linker10 GGGGS (SEQ ID NO: 27488)

Modular Co-LOCKR Cage domains: See Table 1.
Co-LOCKR Cage and Decoy proteins: See Table 11.
Modular Co-LOCKR Key domains: See Table 4.
Co-LOCKR Key proteins: See Table 12.
Effector proteins: See Table 13.

TABLE 15
DARPin postive controls with N-terminal fusions to Bim
Residues in parenthese are optional

>Bim_Her2 Her2 DARPin tagged with N-terminal Bim peptide (SEQ ID NO: 27476)
(MGSHHHHHHGSGSENLYFQGS)TDEIWIAQELRRIGDEFNAYYASGSGDLGKKLLEAARAGQDDEVRILMANGADVNAKDEY
GLTFLYLATAHGELEIVEVLLKNGADVNAVDAIGFTPLHLAAFIGHLEIAEVLLKHGADVNAQDKFGKTAPGISIGNGNEDLA
EILQKLN
>Bim_EGFR EGFR DARPin tagged with N-terminal Bim peptide (SEQ ID NO: 27477)
(MGSHHHHHHGSGSENLYFQGS)TDEIWIAQELERIGDEFNAYYASGSGDLGKKLLEAARAGQDDEVRILMANGADVNADDTW
GWTFLHLAAYGQHLEIVEVLLKNGADVNAYDKIGWTPLHLAADGHLEIVEVLLKNGADVNASDYIGDTPLHLAAHNGHLEIVE
VLLKHGADVNAQDKFGKTAFDISIDNGNEDLAEILQKLM
>Bim_EpCAM EpCAM DARPin tagged with N-terminal Bim peptide (SEQ ID NO″ 27478)
(MGSHHHHHHGSGSENLYFQGS)TDEIWIAQELRRIGDEFNAYYASGSGDLGKKLLEAARAGQDDEVRILVAMGADVNAYFGT
TPLHLAAAHGRLEIVEVLLKNGADVNAQDVWGITFLHLAAYKGHLEIVEVLLKYGADVNAHDTRGWTPLHLAAINGELEIVEV
LLKNVADVNAQGRGGKTPFDLAIINGNEDIAEVLQKAAKLN

TABLE 16
Target proteins

>Her2-eGFP; hsHER2_ecd_tm-eGFP; Lentiviral transduction for making Her2+ K562 cells
(enhancedGFP+) (SEQ ID NO: 27470)
MELAALCRWCLLLALLPPGAASTQVCTGTDMKLRLPASPETELDMLRELYQGCQVVQGNLELTVLPTNASLSFLQDIQEVQGY
VLIARNQVRQVPLQRLRIVRGTQLFEDNYALAVLDNGDPLNNTYPVTGASPQGLRELQLRSLTEILKGGVLIQRNFQLCTQDT
ILWKDIFHKNNQLALTLIDTNRSRACHPCSPMCKGSRCWGESSEDCQGLTRTVCAGGCARCKGPLPTDCCHEQCAAGCTGPKE
SDCLACLHFNHSGICELHCPALVTYNTDTPESMPNPEGPYTFGASCVTACPYNYLSYDVDSETLVCPLHNQEVTAEDGTQPCE
KCSKPCARVCYGLGMEHLREVRAVTSANIQEFAGCKKIFGSLAFLPESFDGDPASNTAPLQPEDLQVFETLEEITGYLYISAW
PDSLPDLSVPQNLQVIRGRILHNGAYSLTLQGLGLSWLGLRSLRELGSGLALIHENTHLCFVHTVPWDQLFRNFDQALLHTAN
RPEDECVGEGLACHQLCARGHCWGPGPTQCVNCSQFLRGQECVEECRVLQGLPREYVNARHCLPCHEECQPQNGSVTCFGPPA
DQCVACARYKDPPFCVARCPSGVKFDLSYMPIWKFPDEEGACQPCPINCTHSCVDLDDKGCPAEQRASFLTSIISAVYGILLV
VVLGVVFGILIKPRQQKGGTMVSKGEELFTGVVPILVELDGDVNGHKFSVSGEDESDATYGKLTLKFICTTGKLPVPWPTLVT
TLTYGVQCFSRYPDHMKQHDFFKSAMPEGYVQERTIFFKDDGNYKTRAEVKFEGDTLYMRIELKGIDFKEDGMILGHKLEYNY
NSKNVYIMADEQKNGIKVNFKIRHNIEDSGVQLADKYQQNTFIGDGPVLLPDNNYLSTQSALSKDPNEKRDHMVLLEFVTAAG
ITLGMDELTK
>EGFR-iRFP; hsEGFR_ecd_tm-iRFP; Lentiviral tranduction for making EGFR+ K562 cells
(infraredREP+) (SEQ ID NO: 27471)
MRPSGTAGAALLALLAALCPASRALEEKKVCQGTSNKLTQLGTFEDHFLSLQRMFNNGEVVLGNLEITYVQRNYDLSFLKTIQ
EVAGYVLIALNTVERIPLENLQIIRGNMYYENSYALAVLSNYDANKTGLKELPMRNLQEILHGAVRFSNMPALCNVESIQWRD
IVSSDFLSNMSMDFQNHLGGCQKCDPSCPNGSCWGAGEENCQKLTKIICAQQCSGRCRGKSPSDCCHNQCAAGCTGFRESDCL
VCRKFRDEATCKDTCPPLMLYNPTTYQMDVNPEGKKSEGATCVKECPENVVTDHGSCVRRCGADSYREMEEDGVRKCKKCEGP
CRKVCNGIGIGEFKDSLSINATNIKHFKNCTSISGDLMILPVAFRGDGETHTPPLDPQELDILKTVKEITGFLLIQAWPENRT
DLHAFENLEIIRGRTKQSGQFSLAVVSLNITSLGLRSLKEISDGDVIISGNKNLCYANTINWKKLFGTSGQKTKIISNRGENS
CKATGQVCHALCSPEGCWGPEPPDRDCVSCRNVSKGRECVDKCKLLEGEPREFVENSECIQCHPECLPQAMNITCTGRGNCIQ
CAHYIDGPHCVKTCPAGVMGENNTLVWKYADAGKVCHLCHPNCTYGCTGPGLEGCPTNGPKIPSIATGMVGALLLLLVVALGI
GLFMRRREIVRKKGGTMAEGSVARQPDLLTCDDEPIHIPGAIQPHGLLLALAADMTIVAGSDNLPELTGLATGALIGRSAADV
FDSETHNRLTIALAEPGAAVGAPITVGFTMRKDASFIGSWERHDQLIFLELEPRQRDVAEPQAFFRRTNSAIRKLQAAETLES
ACAAAAQEVRKITGFDRVMIVRFASDFSGEVIAEDRCAEVESKLGLNYPASTVPAQARRLYTINPVRIIPDINYRPVPVTPDL
NPVTGRPIDLSFAILRSVSPVHLEFMRNIGMHGTMSISILRGERLWGLIVCHRTPPYVVDLDGRQACELVAQVLAWQIGVMEE
>Bim-eGFPligand Lentiviral tranduction for making K562 positive control target
cells with membrane-tethered Bim-eGFP (SEQ ID NO: 27472)
METDTLLLWVLLLWVPGSTGDGSEIWIAQELRRIGDEENAYYASGSGMVSEGEELFTGVVPILVELDGDVNGHEFSVSGEGES
DATYGKLTLKFICTTGKLPVPWPTLVTTLTVGVQCFSRYPDEMKQHDEFKSAMPEGYVQERTIFFKDDGNYKTRAEVKFEGDT
LVNRIELKGIDFKEDGNILGHKLEYNVNSHNVVIMADKQKNGIKVNFKIRHNIEDGSVQLADHYQQNTPIGDGPVLLPDNHYL
STQSALSKDPNEKRDKMVLLEFVTAAGITLGMDELYKNAVCQDTQEVIVVPRSLFFKVVVISAILALVVLTIISLIILIMLWQ
KKPR
>hsHer2 Lentiviral transduction for making Her2+ Raji cells (no fluorescent
protein) (SEQ ID NO: 27473)
MELAALCRWGLLLALLFPGAASTQVCTGFDMKLRLPASPETELDMLRHLYQGCQVVQGNLELTYLPTNASLSFLQDIQEVQGY
VLIAHNQVRQVFLQRLRIVRGTQLFEDNYALAVLDNGDPLNNFTPVTGASPGGLRELQLRSLTEILKGGVLIQPNPQLCYQDT
ILWKDIFHKNNQLALTLIDTNRSRACHPCSPMCKGSRCWGKESEDCQSLTRTVCAGGCARCKGPLPTDCCREQCAAGCTGPKH
SDCLAGLHFNRSGICELHCPALVTYNTDTFESMPNPEGRYTFGASCVTACEYNYLSTDVGSCTLVCPLHNQEVTAEDGTQRCE
KCSKPCARVCYGLGMEHLREVRAVTSANTQEFAGCKKIFGSLAFLFESFDGDPASNTAPLQPEQLQVFETLEEITGYLYISAW
PDSLPDLSVFQNLQVIRGRILHNGAYSLTLQGLGISWLGLESLRELGSGLALTHENTHLCFVRTVPWDQLFRNPHQALLHTAN
PPEDECVGEGLACKQLCARGHCWGPGPTQCVNCSQFLRGQECVEECRVLQCLPREYVNARHCLPCHPECQPQNGSVTCFGPEA
DQCVACAHYKDPPFCVARCPSGVKPDLSEYMPIWKFPDEEGACQCPINCTHSCVDLDDKGCPAEQRASPLTSIISAVVGILLV
VVLGVVFGILIKRRQQKIRKYTMRPLLQETELVEPLTPSGAMPNQAQMRIIKETELRKVEVLGSGAFGTVYKGIWIPDGENYK
IPVAIKVLRENTSPKANKEILDEAYVMAGVGSPYVSRLLGIGLTSTVQLVTQLMPYGCLLDHVRENRGRLGSQDLLNWCMQIA
KGMSYLEDVRLVRRDLAARNVLVKSPNEVKITDFGLARLLDIDETHYRADGGKVPIKWMALESILRRRFTHQSDVWSYGVTVW
ELMTFGAKPYDGIPAREIPDLLEKGERLPQPPICTIDVYMIMVKCWMIDSECRPRFRELVSEFSPMARLPQRFVVIQNEDLGP
ASPLDSTFYRSLLEDDDMGDLVDAKEYLVPQQGFFCPDPAPSAGGMVHHRHRSSSTRSGGSDLTLGLEPSEEEAPRSPLAFSE
GAGSDVFDGDLGMGAAKGLQSLPTHDPSPLQRYSEDPTVPLPSETDGYVAPLTCSPQPEYVNQDPVRPQPPSPREGPLPAARP
AGATLERPKTLSPGKNGVVKDVFAPGGAVENPEYLTPQGGAAPQPHPPPAFSPAFDNLYYWDQDFRERGAPPSTEKGTPTASN
PEYLGLDVPV
>hsEGPR Lentiviral transduction for making EFGR+ Raji cells (no fluorescent
protein) (SEQ ID NO: 27474)
MRPSGTAGAALLALLAALCPASRALEEKKVCQGTSNKLTQLGTFEDHFLSLQRMFNNCEVVLGNLEITYVQRNYDLSFLKTIQ
EVAGYVLIALNTVERIFLENLQIIRGNMYYENEYALAVLSNYDANKTGLKELPMRNLQEILRGAVRFSNNPALCNVESIQWED
IVSSDFLSNMSMDFQNHLGSCQKCDPSCPMGSCWGAGEENCQKLTKIICAQQCSGRCRGKSFSDCCHNQCAAGCTGPRESDCL
VCRKFRDEATCEDTCPPLMLYNPTTYQMDVNPEGKYSPGATEVKKCPRNYVVTDHGSCVRACGADSYEMEEDGVRKCKKCEGP
CRKVCNGIGIGEPKDSLSINATNIKHFKNCTSISGDLHILPVAFRGDGETHTPPLDPQELDILKTVKEITGFLLIQAWPENRT
DLHAFENLEIIRGRTKQHGQFSLAVVSLNITSLGLRSLKEIEDGDVILSGNKNLCYANTINWKKLFGTSGQKTKIISNRGENS
CKATGQVCHALCSPEGCWGPEPRDCVSCRNVSRGRECVDKCNLLEGEPREFVENSECIQCEPECLPQAMNITCTGRGPDNCIQ
CAHYIDGPHCVKTCPAGVMGENNTLVWKYADAGHVCHLCHFKGTYGCTGPGLEGCPTNGPKIPSIATGMVGALLLLLVVALGI
GLFMRRRHIVRKRTLRRLLQERELVEPLTPSGEAPNQALLRILKETEFKKIKVLGSGAFGTVYKGLWIPEGEKVKIPVAIKEL
REATSPKANKEILDEAYVMASVDNFHVCELLGICLTSTVQLITQLMPPSCLLDYVREHKGNIGSQYLLNWCVQIAEGMNYLED
RRLVHRDLAARNVLVKTPQHVKITDFGLAKLLGAEEKEYRAEGGKVPIKWMALESILHRIYTHQSDVWSYGVTVWELMTFGSK
PYDGIPASEIGSILEKGERLPQPPICTIDVYMIMVKCWMIDADSPPKFRELIIEFSKMARDPQRYLVIQGDERMHLPSPTGSN
FYRALMDEEDMDDVVDADEYLIPQQGFFSSRSTSRTPLLSSLGATSNNSTVACIDRNGLQSCPIKEDSFLQRYSSDPTGALTE
DSIDDTFPLVPEYINQSVRKRPAGSVQNPVYHNQPLNFAPSFDFHIQDPKSTAVGNPEYLNTVQFTCVNSTFDSPASWAQKGS
RQISLDNPDYQQDFFPKEAKPNGIFKGSTAENAEYLPVAFQGSEFIGA
>hsEpCAM Lentiviral transduction for making EpCAM+ K562 abd Raji cells (no
fluorescent protein) (SEQ ID NO: 27475
MAPPQVLAFGLLLAAATATFAAAQEECVCENYKLAVNCEVNKNRQCQCTSVGAQNTVICSKLAAKCLVMKAEMNGSKLGRRAK
PEGALQNNDGLYDPDCDESGLPKAKQCNGTSTCWCVNTAGVRRTDKDTEITCSERVRTYWITIKLKHKAREKPYDSKSLRTAL
QKEITTRYQLDPKFITSILYENNVITLDLVQNSGQKTQNDVDIADVAYYFEKDVKGESLFNSKKMDLTVNGEQLDLDPGQTLI
YYVDEKAPEFSMQGLKAGVIAVIVVVVIAVVAGIVVLVISRKKRMAKYEKAEIKEMGEMHRELNA

The application's sequence listing, which the Patent Office published only in electronic form, follows.

SEQUENCE LISTING (27488 sequences)

SEQ ID NO: 1 - protein, 272 aa, Artificial Sequence
  Synthetic
  MISC_FEATURE (1)..(21): optional
  MISC_FEATURE (244)..(244): X can be any residue
  MISC_FEATURE (259)..(259): X can be any residue
MGSSHHHHHHSSGLVPRGSHMSKEAVTKLQALNIKLAEKLLEALARLQELNIALVYLAVELTDPKRIADEIKKVKDKSKEIVERAEEEIARAAAESKKILDEGSGSGSDAVAELQALNLKLAELLLEAIAKLQELNIKLVELLTKLTDPATIREAIRKVKEDSERIVAEAERLIAAAKAESERIIREGSGSGDPDVARLQELNIELARELLRAAAELQELNIKLVELASELTDPDEARKAIARXKRESKRIVEDAERLXREAAAASEKISRE

SEQ ID NO: 2 - protein, 273 aa, Artificial Sequence
  Synthetic
  MISC_FEATURE (1)..(21): optional
MGSSHHHHHHSSGLVPRGSHMGSKEAVTKLMALNLKLAEKLLEAIARLQELNIALVYLATELTDPERIREEIRKVKEESARIVEEAEEEIRRAAARSEDILREGSGSGSDAVAELQRLNLELAELLLRAAAKLQELNIDLVRLLTELTDPKTIRDAIERVKAESERIVREAERLIREAKADSERILREGSGSGDPDVARLQELFIELARELLEALARLQELNIDLVRLASELTDPDTIRDAIRRVKEESARIVEDARRLIKEAAEEAEKISRE

SEQ ID NO: 3 - protein, 273 aa, Artificial Sequence
  Synthetic
  MISC_FEATURE (1)..(21): optional
MGSSHHHHHHSSGLVPRGSHMGSKRAVTELQKLNIELARKLLRALAELMELNIALVYLAVELTDPRRIREEIRKVKEKSDEIVKRAEDEIRKAAAESEKILREGSGSGSDAVAELQRLNLELAKLLLEAIAKLQALNIDLVRLLTELTDPETIRRAIKRVKDESARIVEEAEKLIRAAKDKAREIIDKGSGSGDPDVARLQELNIELARELLEAAARLQELFIDLVRLASELTDPDEARKAIERVKREAERIVREAERLIREAKRASKEISDE

SEQ ID NO: 4 - protein, 295 aa, Artificial Sequence
  Synthetic
  MISC_FEATURE (1)..(21): optional
MGSSHHHHHHSSGLVPRGSHMKLLEAVTKLQALNIKLAEKLLEALARLQELNIALVYLAVELTDPKRIADEIKKVKDKSKEIVERAEEEIARAAAESKKILDEAEEEGSGSGSELLLEAVAELQALNLKLAELLLEAIAKLQELNIKLVELLTKLTDPATIREAIRKVKEDSERIVAEAERLIAAAKAESERIIREAERLAGSGSGSRELLRDVARLQELNIELARELLRAAAELQELNIKLVELASELTDPDEARKAIARVKRESKRIVEDAERLIREAAAASEKISREAERLI

SEQ ID NO: 5 - protein, 319 aa, Artificial Sequence
  Synthetic
  MISC_FEATURE (1)..(21): optional
MGSSHHHHHHSSGLVPRGSHMKLAEKLLEAVTKLQALNIKLAEKLLEALARLQELNIALVYLAVELTDPKRIADEIKKVKDKSKEIVERAEEEIARAAAESKKILDEAEEEIARAGSGSGSLKLAELLLEAVAELQALNLKLAELLLEAIAKLQELNIKLVELLTKLTDPATIREAIRKVKEDSERIVAEAERLIAAAKAESERIIREAERLIAAAAGSGSGSIELARELLRDVARLQELNIELARELLRAAAELQELNIKLVELASELTDPDEARKAIARVKRESKRIVEDAERLIREAAAASEKISREAERLIREAA

SEQ ID NO: 6 - protein, 380 aa, Artificial Sequence
  Synthetic
  MISC_FEATURE (1)..(21): optional
MGSSHHHHHHSSGLVPRGSHMSKEAVTKLQALNIKLAEKLLEAVTKLQALNIKLAEKLLEALARLQELNIALVYLAVELTDPKRIADEIKKVKDKSKEIVERAEEEIARAAAESKKILDEAEEEIARAAAESKKILDEGSGSGSDAVAELQALNLKLAELLLEAVAELQALNLKLAELLLEAIAKLQELNIKLVELLTKLTDPATIREAIRKVKEDSERIVAEAERLIAAAKAESERIIREAERLIAAAKAESERIIREGSGSGDPDVARLQELNIELARELLRDVARLQELNIELARELLRAAAELQELNIKLVELASELTDPDEARKAIARVKRESKRIVEDAERLIREAAAASEKISREAERLIREAAAASEKISRE

SEQ ID NO: 7 - protein, 382 aa, Artificial Sequence
  Synthetic
  MISC_FEATURE (1)..(21): optional
MGSSHHHHHHSSGLVPRGSHMSHAAVIKLSDLNIRLLDKLLQAVIKLTELNAELNRKLIEALQRLFDLNVALVHLAAELTDPKRIADEIKKVKDKSKEIVERAEEEIARAAAESKKILDEAEEEIARAAAESKKILDEGSGSGSDAVAELQALNLKLAELLLEAVAELQALNLKLAELLLEAIAKLQELNIKLVELLTKLTDPATIREAIRKVKEDSERIVAEAERLIAAAKAESERIIREAERLIAAAKAESERIIREGSGSNDPQVAQNQETFIELARDALRLVAENQEAFIEVARLTLRAAALAQEVAIKAVEAASEGGSGSGNKEEIEKLAKEAREKLKKAEKEHKEIHDKLRKKNKKAREDLKKKADELRETNKRVN

SEQ ID NO: 8 - protein, 382 aa, Artificial Sequence
  Synthetic
  MISC_FEATURE (1)..(21): optional
MGSSHHHHHHSSGLVPRGSHMSLEAVLKLAELNLKLSDKLAEAVQKLAALLNKLLEKLSEALQRLFELNVALVTLAIELTDPKRIADEIKKVKDKSKEIVERAEEEIARAAAESKKILDEAEEEIARAAAESKKILDEGSGSGSDAVAELQALNLKLAELLLEAVAELQALNLKLAELLLEAIAKLQELNIKLVELLTKLTDPATIREAIRKVKEDSERIVAEAERLIAAAKAESERIIREAERLIAAAKAESERIIREGSGSNDPLVARLQELLIEHARELLRLVATSQEIFIELARAFLANAAQLQEAAIKAVEAASENGSGSGSSEKVRRELKESLKENHKQNQKLLKDHKRAQEKLNRELEELKKKHKKTLDDIRRES

SEQ ID NO: 9 - protein, 382 aa, Artificial Sequence
  Synthetic
  MISC_FEATURE (1)..(21): optional
MGSSHHHHHHSSGLVPRGSHMSLEAVLKLFELNHKLSEKLLEAVLKLHALNQKLSQKLLEALARLLELNVALVELAIELTDPKRIADEIKKVKDKSKEIVERAEEEIARAAAESKKILDEAEEEIARAAAESKKILDEGSGSGSDAVAELQALNLKLAELLLEAVAELQALNLKLAELLLEAIAKLQELNIKLVELLTKLTDPATIREAIRKVKEDSERIVAEAERLIAAAKAESERIIREAERLIAAAKAESERIIREGSGSGDPEVARLQEAFIEQAREILRNVAAAQEALIEQARRLLALAALAQEAAIKAVELASEHGSGSGDTVKRILEELRRRFEKLAKDLDDIARKLLEDHKKHNKELKDKQRKIKKEADDAARS

SEQ ID NO: 10 - protein, 382 aa, Artificial Sequence
  Synthetic
  MISC_FEATURE (1)..(21): optional
MGSSHHHHHHSSGLVPRGSHMSLEAVLKLQDLNSKLSEKLSEAQLKLQALNNKLLRKLLEALLRLQDLNQALVNLALQLTDPKRIADEIKKVKDKSKEIVERAEEEIARAAAESKKILDEAEEEIARAAAESKKILDEGSGSGSDAVAELQALNLKLAELLLEAVAELQALNLKLAELLLEAIAKLQELNIKLVELLTKLTDPATIREAIRKVKEDSERIVAEAERLIAAAKAESERIIREAERLIAAAKAESERIIREGSGSGDPDVAKSQEHLIEHARELLRQVAKSQELFIELARQLLRLAAKSQELAIKAVELASEAGSGSGDDVERRLRKANKESKKEAEELTEEAKKANEKTKEDSKELTKENRKTNKTIKDEARS

SEQ ID NO: 11 - protein, 382 aa, Artificial Sequence
  Synthetic
  MISC_FEATURE (1)..(21): optional
MGSSHHHHHHSSGLVPRGSHMSREAVEKLAELNHKLSHKLQQAQQKLQALNLKLLQKLLEALDRLQDLNNALVKLAQRLTDPKRIADEIKKVKDKSKEIVERAEEEIARAAAESKKILDEAEEEIARAAAESKKILDEGSGSGSDAVAELQALNLKLAELLLEAVAELQALNLKLAELLLEAIAKLQELNIKLVELLTKLTDPATIREAIRKVKEDSERIVAEAERLIAAAKAESERIIREAERLIAAAKAESERIIREGSGSGDPDVARQQETLIEQARRLLRNVAESQELFIEAARTVLRLAAKLQEINIKQVELASEAGSGSGDDEERRSEKTVQDAKREIKKVEDDLQRLNEEQKKKVKKQEDENQKTLKKHKDDARS

SEQ ID NO: 12 - protein, 258 aa, Artificial Sequence
  Synthetic
  MISC_FEATURE (1)..(21): optional
MGSSHHHHHHSSGLVPRGSHMNKEDATEAQKKAIRAAEELLKDVTRIQERAIREAEKALERLARVQEEAIRRVYEAVESKNKEELKKVKEEIEELLRRLKRELDELEREIRELLKEIKEKADRLEKEIRDLIERIRRDRNASDEVVTRLARLNEELIRELREDVRRLAELNKELLRELERAARELARLNEKLLELADRVETEEEARKAIARVKRESKRIVEDAERLIREAAAASEKISREAERLIREAAAASEKISRE

SEQ ID NO: 13 - protein, 262 aa, Artificial Sequence
  Synthetic
  MISC_FEATURE (1)..(21): optional
MGSSHHHHHHSSGLVPRGSHMDERLKRLNERLADELDKDLERLLRLNEELARELTRAAEELRELNEKLVELAKKLQGGRSREVAERAEKEREKIRRKLEEIKKEIKEDADRIKKRADELRRRLEKTLEDAARELEKLKREPRTEELKRKATELQKEAIRRAEELLKEVTDVQRRAIERAEELLEKLARLQEEAIRTVYLLVELNKVDRARKAIARVKRESKRIVEDAERLIREAAAASEKISREAERLIREAAAASEKISRE

SEQ ID NO: 14 - protein, 259 aa, Artificial Sequence
  Synthetic
  MISC_FEATURE (1)..(21): optional
MGSSHHHHHHSSGLVPRGSHMLIERLTRLEKEHVRELKRLLDTSLEILRRLVEAFETNLRQLKEALKRALEAANLHNEEVEEVLRKLEEDLRRLEEELRKTLDDVRKEVKRLKEELDKRIKEVEDELRKIKEKLKKGDKNEKRVLEEILRLAEDVLKKSDKLAKDVQERARELNEILEELSRKLQELFERVVEEVTRNVPTTERIEKVRRELKESLKENHKQNQKLLKDHKRAQEKLNRELEELKKKHKKTLDDIRRES

SEQ ID NO: 15 - protein, 263 aa, Artificial Sequence
  Synthetic
  MISC_FEATURE (1)..(21): optional
MGSSHHHHHHSSGLVPRGSHMSEERVLELAEEALRLSDEAAKEIQELARRLNEELEKLSKELQDLFERIVETVTRLIDADEETLKRAAEEIKKRLEDARKKAKEAADKAREELDRARKKLKELVDEIRKKAKDALEKAGADEELVARLLRLLEEHARELERLLRTSARIIERLLDAFRRNLEQLKEAADKAVEAAEEAVRRVEDVRVWSEKVRRELKESLKENHKQNQKLLKDHKRAQEKLNRELEELKKKHKKTLDDIRRES

SEQ ID NO: 16 - protein, 311 aa, Artificial Sequence
  Synthetic
  MISC_FEATURE (1)..(23): optional
MGSHHHHHHGSGSENLYFQGSGGSELARKLLEASTKLQRLNIRLAEALLEAIARLQELNLELVYLAVELTDPKRIRDEIKEVKDKSKEIIRRAEKEIDDAAKESEKILEEAREAISGSGSELAKLLLKAIAETQDLNLRAAKAFLEAAAKLQELNIRAVELLVKLTDPATIREALEHAKRRSKEIIDEAERAIRAAKRESERIIEEARRLIEKGSGSGSELARELLRAHAQLQRLNLELLRELLRALAQLQELNLDLLRLASELTDPDEARKAIARVKRESKRIVEDAERLIREAAAASEKISREAERLIR

SEQ ID NO: 17 - protein, 311 aa, Artificial Sequence
  Synthetic
  MISC_FEATURE (1)..(23): optional
MGSHHHHHHGSGSENLYFQGSGGSELARKLLEASTKLQRLNIRLAEALLEAIARLQELNLELVYLAVELTDPKRIRDEIKEVKDKSKEIIRRAEKEIDDAAKESEKILEEAREAISGSGSELAKLLLKAIAETQDLNLRAAKAFLEAAAKLQELNIRAVELLVKLTDPATIREALEHAKRRSKEIIDEAERAIRAAKRESERIIEEARRLIEKGSGSGSELARELLRAHAQLQRLNLELLRELLRALAQLQELNLDLLRLASELTDPDEARKAIARVKRESNAYYADAERLIREAAAASEKISREAERLIR

SEQ ID NO: 18 - protein, 280 aa, Artificial Sequence
  Synthetic
  MISC_FEATURE (1)..(21): optional
  MISC_FEATURE (234)..(240): optional
  MISC_FEATURE (249)..(249): X is any residue
  MISC_FEATURE (252)..(252): X is any residue
  MISC_FEATURE (260)..(260): X is any residue
MGSSHHHHHHSSGLVPRGSHMGSKEAVTKLQALNIKLAEKLLEALARLQELNIALVYLAVELTDPKRIADEIKKVKDKSKEIVERAEEEIARAAAESKKILDEGSGSGSDAVAELQALNLKLAELLLEAIAKLQELNIKLVELLTKLTDPATIREAIRKVKEDSERIVAEAERLIAAAKAESERIIREGSGSGDPDVARLQELNIELARELLRAAAELQELNIKLVELASELTGSGSGSGDPKMAQELXDKXRAASLQIXGDAFYAILRALAASEKLSKE

SEQ ID NO: 19 - protein, 275 aa, Artificial Sequence
  Synthetic
  MISC_FEATURE (1)..(21): optional
  MISC_FEATURE (247)..(247): X is any residue
  MISC_FEATURE (262)..(262): X is any residue
MGSSHHHHHHSSGLVPRGSHMKEAVTKLQALNIKLAEKLLEALARLQELNIALVYLAVELTDPKRIADEIKKVKDKSKEIVERAEEEIARAAAESKKILDEGSGSGSDAVAELQALNLKLAELLLEAIAKLQELNIKLVELLTKLTDPATIREAIRKVKEDSERIVAEAERLIAAAKAESERIIREGSGSGDPDVARLQELNIELARELLRAAAELQELNIKLVELASEGSGSGSEIAEALRAIGDXFNESYRIVEDAERLXREAAAASEKISRE

SEQ ID NO: 20 - protein, 295 aa, Artificial Sequence
  Synthetic
  MISC_FEATURE (1)..(21): optional
MGSSHHHHHHSSGLVPRGSHMKLLEAVTKLQALNIKLAEKLLEALARLQELNIALVYLAVELTDPKRIADEIKKVKDKSKEIVERAEEEIARAAAESKKILDEAEEEGSGSGSELLLEAVAELQALNLKLAELLLEAIAKLQELNIKLVELLTKLTDPATIREAIRKVKEDSERIVAEAERLIAAAKAESERIIREAERLAGSGSGSRELLRDVARLQELNIELARELLRAAAELQELNIKLVELASELTDEIWIAQELRRIGDEFNAYYADAERLIREAAAASEKISREAERLI

SEQ ID NO: 21 - protein, 319 aa, Artificial Sequence
  Synthetic
  MISC_FEATURE (1)..(21): optional
MGSSHHHHHHSSGLVPRGSHMKLAEKLLEAVTKLQALNIKLAEKLLEALARLQELNIALVYLAVELTDPKRIADEIKKVKDKSKEIVERAEEEIARAAAESKKILDEAEEEIARAGSGSGSLKLAELLLEAVAELQALNLKLAELLLEAIAKLQELNIKLVELLTKLTDPATIREAIRKVKEDSERIVAEAERLIAAAKAESERIIREAERLIAAAAGSGSGSIELARELLRDVARLQELNIELARELLRAAAELQELNIKLVELASELTDEIWIAQELRRIGDEFNAYYADAERLIREAAAASEKISREAERLIREAA

SEQ ID NO: 22 - protein, 380 aa, Artificial Sequence
  Synthetic
  MISC_FEATURE (1)..(21): optional
MGSSHHHHHHSSGLVPRGSHMSKEAVTKLQALNIKLAEKLLEAVTKLQALNIKLAEKLLEALARLQELNIALVYLAVELTDPKRIADEIKKVKDKSKEIVERAEEEIARAAAESKKILDEAEEEIARAAAESKKILDEGSGSGSDAVAELQALNLKLAELLLEAVAELQALNLKLAELLLEAIAKLQELNIKLVELLTKLTDPATIREAIRKVKEDSERIVAEAERLIAAAKAESERIIREAERLIAAAKAESERIIREGSGSGDPDVARLQELNIELARELLRDVARLQELNIELARELLRAAAELQELNIKLVELASELTDEIWIAQELRRIGDEFNAYYADAERLIREAAAASEKISREAERLIREAAAASEKISRE

SEQ ID NO: 23 - protein, 382 aa, Artificial Sequence
  Synthetic
  MISC_FEATURE (1)..(21): optional
MGSSHHHHHHSSGLVPRGSHMSHAAVIKLSDLNIRLLDKLLQAVIKLTELNAELNRKLIEALQRLFDLNVALVHLAAELTDPKRIADEIKKVKDKSKEIVERAEEEIARAAAESKKILDEAEEEIARAAAESKKILDEGSGSGSDAVAELQALNLKLAELLLEAVAELQALNLKLAELLLEAIAKLQELNIKLVELLTKLTDPATIREAIRKVKEDSERIVAEAERLIAAAKAESERIIREAERLIAAAKAESERIIREGSGSNDPQVAQNQETFIELARDALRLVAENQEAFIEVARLTLRAAALAQEVAIKAVEAASEGGSGSGNEIWIAQELRRIGDEFNAYYAEHKEIHDKLRKKNKKAREDLKKKADELRETNKRVN

SEQ ID NO: 24 - protein, 382 aa, Artificial Sequence
  Synthetic
  MISC_FEATURE (1)..(21): optional
MGSSHHHHHHSSGLVPRGSHMSLEAVLKLAELNLKLSDKLAEAVQKLAALLNKLLEKLSEALQRLFELNVALVTLAIELTDPKRIADEIKKVKDKSKEIVERAEEEIARAAAESKKILDEAEEEIARAAAESKKILDEGSGSGSDAVAELQALNLKLAELLLEAVAELQALNLKLAELLLEAIAKLQELNIKLVELLTKLTDPATIREAIRKVKEDSERIVAEAERLIAAAKAESERIIREAERLIAAAKAESERIIREGSGSNDPLVARLQELLIEHARELLRLVATSQEIFIELARAFLANAAQLQEAAIKAVEAASENGSGEIWIAQELRRIGDEFNAYYAQNQKLLKDHKRAQEKLNRELEELKKKHKKTLDDIRRES

SEQ ID NO: 25 - protein, 381 aa, Artificial Sequence
  Synthetic
  MISC_FEATURE (1)..(21): optional
MGSSHHHHHHSSGLVPRGSHMSLEAVLKLFELNHKLSEKLLEAVLKLHALNQKLSQKLLEALARLLELNVALVELAIELTDPKRIADEIKKVKDKSKEIVERAEEEIARAAAESKKILDEAEEEIARAAAESKKILDEGSGSGSDAVAELQALNLKLAELLLEAVAELQALNLKLAELLLEAIAKLQELNIKLVELLTKLTDPATIREAIRKVKEDSERIVAEAERLIAAAKAESERIIREAERLIAAAKAESERIIREGSGSGDPEVARLQEAFIEQAREILRNVAAAQEALIEQARRLLALAALAQEAAIKAVELASEHGSGSEIWIAQELRRIGDEFNAYYADLDDIARKLLEDHKKHNKELKDKQRKIKTIKDEARS

SEQ ID NO: 26 - protein, 382 aa, Artificial Sequence
  Synthetic
  MISC_FEATURE (1)..(21): optional
  MISC_FEATURE (320)..(321): optional
MGSSHHHHHHSSGLVPRGSHMSKEAVTKLQALNIKLAEKLLEAVTKLQALNIKLAEKLLEALARLQELNIALVYLAVELTDPKRIADEIKKVKDKSKEIVERAEEEIARAAAESKKILDEAEEEIARAAAESKKILDEGSGSGSDAVAELQALNLKLAELLLEAVAELQALNLKLAELLLEAIAKLQELNIKLVELLTKLTDPATIREAIRKVKEDSERIVAEAERLIAAAKAESERIIREAERLIAAAKAESERIIREGSGSGDPDVARLQELNIELARELLRDVARLQELNIELARELLRAAAELQELNIKLVELASGGNWSHPQFEKKAIARVKRESKRIVEDAERLIREAAAASEKISREAERLIREAAAASEKISRE

SEQ ID NO: 27 - protein, 380 aa, Artificial Sequence
  Synthetic
  MISC_FEATURE (1)..(21): optional
MGSSHHHHHHSSGLVPRGSHMSKEAVTKLQALNIKLAEKLLEAVTKLQALNIKLAEKLLEALARLQELNIALVYLAVELTDPKRIADEIKKVKDKSKEIVERAEEEIARAAAESKKILDEAEEEIARAAAESKKILDEGSGSGSDAVAELQALNLKLAELLLEAVAELQALNLKLAELLLEAIAKLQELNIKLVELLTKLTDPATIREAIRKVKEDSERIVAEAERLIAAAKAESERIIREAERLIAAAKAESERIIREGSGSGDPDVARLQELNIELARELLRDVARLQELNIELARELLRAAAELQELNIKLVELASELTDPDENWSHPQFEKRESKRIVEDAERLIREAAAASEKISREAERLIREAAAASEKISRE

SEQ ID NO: 28 - protein, 380 aa, Artificial Sequence
  Synthetic
  MISC_FEATURE (1)..(21): optional
MGSSHHHHHHSSGLVPRGSHMSKEAVTKLQALNIKLAEKLLEAVTKLQALNIKLAEKLLEALARLQELNIALVYLAVELTDPKRIADEIKKVKDKSKEIVERAEEEIARAAAESKKILDEAEEEIARAAAESKKILDEGSGSGSDAVAELQALNLKLAELLLEAVAELQALNLKLAELLLEAIAKLQELNIKLVELLTKLTDPATIREAIRKVKEDSERIVAEAERLIAAAKAESERIIREAERLIAAAKAESERIIREGSGSGDPDVARLQELNIELARELLRDVARLQELNIELARELLRAAAELQELNIKLVELASELTDPDEARKNWSHPQFEKKRIVEDAERLIREAAAASEKISREAERLIREAAAASEKISRE

SEQ ID NO: 29 - protein, 380 aa, Artificial Sequence
  Synthetic
  MISC_FEATURE (1)..(21): optional
MGSSHHHHHHSSGLVPRGSHMSKEAVTKLQALNIKLAEKLLEAVTKLQALNIKLAEKLLEALARLQELNIALVYLAVELTDPKRIADEIKKVKDKSKEIVERAEEEIARAAAESKKILDEAEEEIARAAAESKKILDEGSGSGSDAVAELQALNLKLAELLLEAVAELQALNLKLAELLLEAIAKLQELNIKLVELLTKLTDPATIREAIRKVKEDSERIVAEAERLIAAAKAESERIIREAERLIAAAKAESERIIREGSGSGDPDVARLQELNIELARELLRDVARLQELNIELARELLRAAAELQELNIKLVELASELTDPDEARKAIANWSHPQFEKVEDAERLIREAAAASEKISREAERLIREAAAASEKISRE

SEQ ID NO: 30 - protein, 380 aa, Artificial Sequence
  Synthetic
  MISC_FEATURE (1)..(21): optional
MGSSHHHHHHSSGLVPRGSHMSKEAVTKLQALNIKLAEKLLEAVTKLQALNIKLAEKLLEALARLQELNIALVYLAVELTDPKRIADEIKKVKDKSKEIVERAEEEIARAAAESKKILDEAEEEIARAAAESKKILDEGSGSGSDAVAELQALNLKLAELLLEAVAELQALNLKLAELLLEAIAKLQELNIKLVELLTKLTDPATIREAIRKVKEDSERIVAEAERLIAAAKAESERIIREAERLIAAAKAESERIIREGSGSGDPDVARLQELNIELARELLRDVARLQELNIELARELLRAAAELQELNIKLVELASELTDPDEARKAIARNWSHPQFEKEDAERLIREAAAASEKISREAERLIREAAAASEKISRE

SEQ ID NO: 31 - protein, 380 aa, Artificial Sequence
  Synthetic
  MISC_FEATURE (1)..(21): optional
MGSSHHHHHHSSGLVPRGSHMSKEAVTKLQALNIKLAEKLLEAVTKLQALNIKLAEKLLEALARLQELNIALVYLAVELTDPKRIADEIKKVKDKSKEIVERAEEEIARAAAESKKILDEAEEEIARAAAESKKILDEGSGSGSDAVAELQALNLKLAELLLEAVAELQALNLKLAELLLEAIAKLQELNIKLVELLTKLTDPATIREAIRKVKEDSERIVAEAERLIAAAKAESERIIREAERLIAAAKAESERIIREGSGSGDPDVARLQELNIELARELLRDVARLQELNIELARELLRAAAELQELNIKLVELASELTDPDEARKAIARVKRENWSHPQFEKRLIREAAAASEKISREAERLIREAAAASEKISRE

SEQ ID NO: 32 - protein, 380 aa, Artificial Sequence
  Synthetic
  MISC_FEATURE (1)..(21): optional
MGSSHHHHHHSSGLVPRGSHMSKEAVTKLQALNIKLAEKLLEAVTKLQALNIKLAEKLLEALARLQELNIALVYLAVELTDPKRIADEIKKVKDKSKEIVERAEEEIARAAAESKKILDEAEEEIARAAAESKKILDEGSGSGSDAVAELQALNLKLAELLLEAVAELQALNLKLAELLLEAIAKLQELNIKLVELLTKLTDPATIREAIRKVKEDSERIVAEAERLIAAAKAESERIIREAERLIAAAKAESERIIREGSGSGDPDVARLQELNIELARELLRDVARLQELNIELARELLRAAAELQELNIKLVELASELTDPDEARKAIARVKRESKRNWSHPQFEKREAAAASEKISREAERLIREAAAASEKISRE

SEQ ID NO: 33 - protein, 380 aa, Artificial Sequence
  Synthetic
  MISC_FEATURE (1)..(21): optional
MGSSHHHHHHSSGLVPRGSHMSKEAVTKLQALNIKLAEKLLEAVTKLQALNIKLAEKLLEALARLQELNIALVYLAVELTDPKRIADEIKKVKDKSKEIVERAEEEIARAAAESKKILDEAEEEIARAAAESKKILDEGSGSGSDAVAELQALNLKLAELLLEAVAELQALNLKLAELLLEAIAKLQELNIKLVELLTKLTDPATIREAIRKVKEDSERIVAEAERLIAAAKAESERIIREAERLIAAAKAESERIIREGSGSGDPDVARLQELNIELARELLRDVARLQELNIELARELLRAAAELQELNIKLVELASELTDPDEARKAIARVKRESKRIVENWSHPQFEKAAASEKISREAERLIREAAAASEKISRE

SEQ ID NO: 34 - protein, 380 aa, Artificial Sequence
  Synthetic
  MISC_FEATURE (1)..(21): optional
MGSSHHHHHHSSGLVPRGSHMSKEAVTKLQALNIKLAEKLLEAVTKLQALNIKLAEKLLEALARLQELNIALVYLAVELTDPKRIADEIKKVKDKSKEIVERAEEEIARAAAESKKILDEAEEEIARAAAESKKILDEGSGSGSDAVAELQALNLKLAELLLEAVAELQALNLKLAELLLEAIAKLQELNIKLVELLTKLTDPATIREAIRKVKEDSERIVAEAERLIAAAKAESERIIREAERLIAAAKAESERIIREGSGSGDPDVARLQELNIELARELLRDVARLQELNIELARELLRAAAELQELNIKLVELASELTDPDEARKAIARVKRESKRIVEDAERLINWSHPQFEKISREAERLIREAAAASEKISRE

SEQ ID NO: 35 - protein, 309 aa, Artificial Sequence
  Synthetic
  MISC_FEATURE (1)..(21): optional
  MISC_FEATURE (217)..(217): X is any residue
MGSSHHHHHHSSGLVPRGSHMGSKEAVTKLQALNIKLAEKLLEALARLQELNIALVYLAVELTDPKRIADEIKKVKDKSKEIVERAEEEIARAAAESKKILDEGSGSGSDAVAELQALNLKLAELLLEAIAKLQELNIKLVELLTKLTDPATIREAIRKVKEDSERIVAEAERLIAAAKAESERIIREGSGSGDPDVARLQELNIELARELLRAAAXLQELNIKLVELASEGSGSGSGYELRRALEELEKALRELKKSLDELERSLEELEKNPSEDALVENNRLNVENNKIIVEVLRIIAEVLKINAKS

SEQ ID NO: 36 - protein, 319 aa, Artificial Sequence
  Synthetic
  MISC_FEATURE (1)..(21): optional
MGSSHHHHHHSSGLVPRGSHMGSKEAVTKLQALNIKLAEKLLEALARLQELNIALVYLAVELTDPKRIADEIKKVKDKSKEIVERAEEEIARAAAESKKILDEGSGSGSDAVAELQALNLKLAELLLEAIAKLQELNIKLVELLTKLTDPATIREAIRKVKEDSERIVAEAERLIAAAKAESERIIREGSGSGDPDVARLQELNIELARELLRAAAELQELNIKLVELASEGSGSGSGKKLVEEVERALRELLKTSEDLVRKVEKALRELLELIRRGGTKDKIEEKIRRVLEEIKRELERQKRKIEDVLRQIKEELYRS

SEQ ID NO: 37 - protein, 398 aa, Artificial Sequence
  Synthetic
  MISC_FEATURE (1)..(21): optional
MGSSHHHHHHSSGLVPRGSHMSKEAVTKLQALNIKLAEKLLEAVTKLQALNIKLAEKLLEALARLQELNIALVYLAVELTDPKRIADEIKKVKDKSKEIVERAEEEIARAAAESKKILDEAEEEIARAAAESKKILDEGSGSGSDAVAELQALNLKLAELLLEAVAELQALNLKLAELLLEAIAKLQELNIKLVELLTKLTDPATIREAIRKVKEDSERIVAEAERLIAAAKAESERIIREAERLIAAAKAESERIIREGSGSGDPDVARLQELNIELARELLRDVARLQELNIELARELLRAAAELQELNIKLVELASEGSGSGSGYELRRALEELEKALRELKKSLDELERSLEELEKNPSEDALVENNRLNVENNKIIVEVLRIIAEVLKINAKS

SEQ ID NO: 38 - protein, 408 aa, Artificial Sequence
  Synthetic
  MISC_FEATURE (1)..(21): optional
MGSSHHHHHHSSGLVPRGSHMSKEAVTKLQALNIKLAEKLLEAVTKLQALNIKLAEKLLEALARLQELNIALVYLAVELTDPKRIADEIKKVKDKSKEIVERAEEEIARAAAESKKILDEAEEEIARAAAESKKILDEGSGSGSDAVAELQALNLKLAELLLEAVAELQALNLKLAELLLEAIAKLQELNIKLVELLTKLTDPATIREAIRKVKEDSERIVAEAERLIAAAKAESERIIREAERLIAAAKAESERIIREGSGSGDPDVARLQELNIELARELLRDVARLQELNIELARELLRAAAELQELNIKLVELASEGSGSGSGKKLVEEVERALRELLKTSEDLVRKVEKALRELLELIRRGGTKDKIEEKIRRVLEEIKRELERQKRKIEDVLRQIKEELYRS

SEQ ID NO: 39 - protein, 856 aa, Artificial Sequence
  Synthetic
  MISC_FEATURE (1)..(259): optional
  MISC_FEATURE (619)..(856): optional
GHHHHHHHHHHGVSKGEELFTGVVPILVELDGDVNGHKFSVSGEGEGDATYGKLTLKFICTTGKLPVPWPTLVTTLSWGVQCFARYPDHMKQHDFFKSAMPEGYVQERTIFFKDDGNYKTRAEVKFEGDTLVNRIELKGIDFKEDGNILGHKLEYNYFSDNVYITADKQKNGIKANFKIRHNIEDGGVQLADHYQQNTPIGDGPVLLPDNHYLSTQSKLSKDPNEKRDHMVLLEFVTAAGITLGMDELYKGSGCSLQGMSKEAVTKLQALNIKLAEKLLEAVTKLQALNIKLAEKLLEALARLQELNIALVYLAVELTDPKRIADEIKKVKDKSKEIVERAEEEIARAAAESKKILDEAEEEIARAAAESKKILDEGSGSGSDAVAELQALNLKLAELLLEAVAELQALNLKLAELLLEAIAKLQELNIKLVELLTKLTDPATIREAIRKVKEDSERIVAEAERLIAAAKAESERIIREAERLIAAAKAESERIIREGSGSGDPDVARLQELNIELARELLRDVARLQELNIELARELLRAAAELQELNIKLVELASELTDPDEARKAIARVKRESKRIVEDAERLIREAAAASEKISREAERLIREAAAASEKISREVSKGEELFTGVVPILVELDGDVNGHKFSVSGEGEGDATYGKLTLKLICTTGKLPVPWPTLVTTLGYGVQCFARYPDHMKQHDFFKSAMPEGYVQERTIFFKDDGNYKTRAEVKFEGDTLVNRIELKGIDFKEDGNILGHKLEYNYNSHNVYITADKQKNGIKANFKIRHNIEDGGVQLADHYQQNTPIGDGPVLLPDNHYLSYQSKLSKDPNEKRDHMVLLEFVTAAGITLGMDELYK

SEQ ID NO: 40 - protein, 859 aa, Artificial Sequence
  Synthetic
  MISC_FEATURE (1)..(260): optional
  MISC_FEATURE (622)..(859): optional
MGHHHHHHHHHHGVSKGEELFTGVVPILVELDGDVNGHKFSVSGEGEGDATYGKLTLKFICTTGKLPVPWPTLVTTLSWGVQCFARYPDHMKQHDFFKSAMPEGYVQERTIFFKDDGNYKTRAEVKFEGDTLVNRIELKGIDFKEDGNILGHKLEYNYFSDNVYITADKQKNGIKANFKIRHNIEDGGVQLADHYQQNTPIGDGPVLLPDNHYLSTQSKLSKDPNEKRDHMVLLEFVTAAGITLGMDELYKGSGCSLQGMSHAAVIKLSDLNIRLLDKLLQAVIKLTELNAELNRKLIEALQRLFDLNVALVHLAAELTDPKRIADEIKKVKDKSKEIVERAEEEIARAAAESKKILDEAEEEIARAAAESKKILDEGSGSGSDAVAELQALNLKLAELLLEAVAELQALNLKLAELLLEAIAKLQELNIKLVELLTKLTDPATIREAIRKVKEDSERIVAEAERLIAAAKAESERIIREAERLIAAAKAESERIIREGSGSNDPQVAQNQETFIELARDALRLVAENQEAFIEVARLTLRAAALAQEVAIKAVEAASEGGSGSGNKEEIEKLAKEAREKLKKAEKEHKEIHDKLRKKNKKAREDLKKKADELRETNKRVNVSKGEELFTGVVPILVELDGDVNGHKFSVSGEGEGDATYGKLTLKLICTTGKLPVPWPTLVTTLGYGVQCFARYPDHMKQHDFFKSAMPEGYVQERTIFFKDDGNYKTRAEVKFEGDTLVNRIELKGIDFKEDGNILGHKLEYNYNSHNVYITADKQKNGIKANFKIRHNIEDGGVQLADHYQQNTPIGDGPVLLPDNHYLSYQSKLSKDPNEKRDHMVLLEFVTAAGITLGMDELYK

SEQ ID NO: 41 - protein, 858 aa, Artificial Sequence
  Synthetic
  MISC_FEATURE (1)..(259): optional
  MISC_FEATURE (621)..(858): optional
GHHHHHHHHHHGVSKGEELFTGVVPILVELDGDVNGHKFSVSGEGEGDATYGKLTLKFICTTGKLPVPWPTLVTTLSWGVQCFARYPDHMKQHDFFKSAMPEGYVQERTIFFKDDGNYKTRAEVKFEGDTLVNRIELKGIDFKEDGNILGHKLEYNYFSDNVYITADKQKNGIKANFKIRHNIEDGGVQLADHYQQNTPIGDGPVLLPDNHYLSTQSKLSKDPNEKRDHMVLLEFVTAAGITLGMDELYKGSGCSLQGMSLEAVLKLAELNLKLSDKLAEAVQKLAALLNKLLEKLSEALQRLFELNVALVTLAIELTDPKRIADEIKKVKDKSKEIVERAEEEIARAAAESKKILDEAEEEIARAAAESKKILDEGSGSGSDAVAELQALNLKLAELLLEAVAELQALNLKLAELLLEAIAKLQELNIKLVELLTKLTDPATIREAIRKVKEDSERIVAEAERLIAAAKAESERIIREAERLIAAAKAESERIIREGSGSNDPLVARLQELLIEHARELLRLVATSQEIFIELARAFLANAAQLQEAAIKAVEAASENGSGSGSSEKVRRELKESLKENHKQNQKLLKDHKRAQEKLNRELEELKKKHKKTLDDIRRESVSKGEELFTGVVPILVELDGDVNGHKFSVSGEGEGDATYGKLTLKLICTTGKLPVPWPTLVTTLGYGVQCFARYPDHMKQHDFFKSAMPEGYVQERTIFFKDDGNYKTRAEVKFEGDTLVNRIELKGIDFKEDGNILGHKLEYNYNSHNVYITADKQKNGIKANFKIRHNIEDGGVQLADHYQQNTPIGDGPVLLPDNHYLSYQSKLSKDPNEKRDHMVLLEFVTAAGITLGMDELYK

SEQ ID NO: 42 - protein, 858 aa, Artificial Sequence
  Synthetic
  MISC_FEATURE (1)..(259): optional
  MISC_FEATURE (621)..(858): optional
GHHHHHHHHHHGVSKGEELFTGVVPILVELDGDVNGHKFSVSGEGEGDATYGKLTLKFICTTGKLPVPWPTLVTTLSWGVQCFARYPDHMKQHDFFKSAMPEGYVQERTIFFKDDGNYKTRAEVKFEGDTLVNRIELKGIDFKEDGNILGHKLEYNYFSDNVYITADKQKNGIKANFKIRHNIEDGGVQLADHYQQNTPIGDGPVLLPDNHYLSTQSKLSKDPNEKRDHMVLLEFVTAAGITLGMDELYKGSGCSLQGMSLEAVLKLFELNHKLSEKLLEAVLKLHALNQKLSQKLLEALARLLELNVALVELAIELTDPKRIADEIKKVKDKSKEIVERAEEEIARAAAESKKILDEAEEEIARAAAESKKILDEGSGSGSDAVAELQALNLKLAELLLEAVAELQALNLKLAELLLEAIAKLQELNIKLVELLTKLTDPATIREAIRKVKEDSERIVAEAERLIAAAKAESERIIREAERLIAAAKAESERIIREGSGSGDPEVARLQEAFIEQAREILRNVAAAQEALIEQARRLLALAALAQEAAIKAVELASEHGSGSGDTVKRILEELRRRFEKLAKDLDDIARKLLEDHKKHNKELKDKQRKIKKEADDAARSVSKGEELFTGVVPILVELDGDVNGHKFSVSGEGEGDATYGKLTLKLICTTGKLPVPWPTLVTTLGYGVQCFARYPDHMKQHDFFKSAMPEGYVQERTIFFKDDGNYKTRAEVKFEGDTLVNRIELKGIDFKEDGNILGHKLEYNYNSHNVYITADKQKNGIKANFKIRHNIEDGGVQLADHYQQNTPIGDGPVLLPDNHYLSYQSKLSKDPNEKRDHMVLLEFVTAAGITLGMDELYK

SEQ ID NO: 43 - protein, 380 aa, Artificial Sequence
  Synthetic
  MISC_FEATURE (1)..(21): optional
MGSSHHHHHHSSGLVPRGSHMSKEAVTKLQALNIKLAEKLLEAVTKLQALNIKLAEKLLEALARLQELNIALVYLAVELTDPKRIADEIKKVKDKSKEIVERAEEEIARAAAESKKILDEAEEEIARAAAESKKILDEGSGSGSDAVAELQALNLKLAELLLEAVAELQALNLKLAELLLEAIAKLQELNIKLVELLTKLTDPATIREAIRKVKEDSERIVAEAERLIAAAKAESERIIREAERLIAAAKAESERIIREGSGSGDPDVARLQELNIELARELLRDVARLQELNIELARELLRAAAELQELNIKLVELASELTDPDEARKAIARVKRESKRIVEDAEENLYFQGAASEKISREAERLIREAAAASEKISRE

SEQ ID NO: 44 - protein, 380 aa, Artificial Sequence
  Synthetic
  MISC_FEATURE (1)..(21): optional
MGSSHHHHHHSSGLVPRGSHMSKEAVTKLQALNIKLAEKLLEAVTKLQALNIKLAEKLLEALARLQELNIALVYLAVELTDPKRIADEIKKVKDKSKEIVERAEEEIARAAAESKKILDEAEEEIARAAAESKKILDEGSGSGSDAVAELQALNLKLAELLLEAVAELQALNLKLAELLLEAIAKLQELNIKLVELLTKLTDPATIREAIRKVKEDSERIVAEAERLIAAAKAESERIIREAERLIAAAKAESERIIREGSGSGDPDVARLQELNIELARELLRDVARLQELNIELARELLRAAAELQELNIKLVELASELTDPDEARAHIVMVDAYKKRIVEDAERLIREAAAASEKISREAERLIREAAAASEKISRE

SEQ ID NO: 45 - protein, 359 aa, Artificial Sequence
  Synthetic
SKEAVTKLQALNIKLAEKLLEAVTKLQALNIKLAEKLLEALARLQELNIALVYLAVELTDPKRIADEIKKVKDKSKEIVERAEEEIARAAAESKKILDEAEEEIARAAAESKKILDEGSGSGSDAVAELQALNLKLAELLLEAVAELQALNLKLAELLLEAIAKLQELNIKLVELLTKLTDPATIREAIRKVKEDSERIVAEAERLIAAAKAESERIIREAERLIAAAKAESERIIREGSGSGDPDVARLQELNIELARELLRDVARLQELNIELARELLRAAAELQELNIKLVELASELTDPDEARKAIARVKRESKRIVEDLALKLAGLDINSEKISREAERLIREAAAASEKISRE

SEQ ID NO: 46 - protein, 359 aa, Artificial Sequence
  Synthetic
SKEAVTKLQALNIKLAEKLLEAVTKLQALNIKLAEKLLEALARLQELNIALVYLAVELTDPKRIADEIKKVKDKSKEIVERAEEEIARAAAESKKILDEAEEEIARAAAESKKILDEGSGSGSDAVAELQALNLKLAELLLEAVAELQALNLKLAELLLEAIAKLQELNIKLVELLTKLTDPATIREAIRKVKEDSERIVAEAERLIAAAKAESERIIREAERLIAAAKAESERIIREGSGSGDPDVARLQELNIELARELLRDVARLQELNIELARELLRAAAELQELNIKLVELASELTDPDEARKAIARVKRESKRIVEDAERLIRELAEKLAGLDINAERLIREAAAASEKISRE

SEQ ID NO: 47 - protein, 359 aa, Artificial Sequence
  Synthetic
SKEAVTKLQALNIKLAEKLLEAVTKLQALNIKLAEKLLEALARLQELNIALVYLAVELTDPKRIADEIKKVKDKSKEIVERAEEEIARAAAESKKILDEAEEEIARAAAESKKILDEGSGSGSDAVAELQALNLKLAELLLEAVAELQALNLKLAELLLEAIAKLQELNIKLVELLTKLTDPATIREAIRKVKEDSERIVAEAERLIAAAKAESERIIREAERLIAAAKAESERIIREGSGSGDPDVARLQELNIELARELLRDVARLQELNIELARELLRAAAELQELNIKLVELASELTDPDEARKAIARVKRESKELAEKLRAGLDLNAAASEKISREAERLIREAAAASEKISRE

SEQ ID NO: 48 - protein, 359 aa, Artificial Sequence
  Synthetic
SKEAVTKLQALNIKLAEKLLEAVTKLQALNIKLAEKLLEALARLQELNIALVYLAVELTDPKRIADEIKKVKDKSKEIVERAEEEIARAAAESKKILDEAEEEIARAAAESKKILDEGSGSGSDAVAELQALNLKLAELLLEAVAELQALNLKLAELLLEAIAKLQELNIKLVELLTKLTDPATIREAIRKVKEDSERIVAEAERLIAAAKAESERIIREAERLIAAAKAESERIIREGSGSGDPDVARLQELNIELARELLRDVARLQELNIELARELLRAAAELQELNIKLVELASELTDPDEARKAIARVKRESKAAAKRARTSIREAAAASEKISREAERLIREAAAASEKISRE

SEQ ID NO: 49 - protein, 380 aa, Artificial Sequence
  Synthetic
  MISC_FEATURE (1)..(21): optional
MGSSHHHHHHSSGLVPRGSHMSKEAVTKLQALNIKLAEKLLEAVTKLQALNIKLAEKLLEALARLQELNIALVYLAVELTDPKRIADEIKKVKDKSKEIVERAEEEIARAAAESKKILDEAEEEIARAAAESKKILDEGSGSGSDAVAELQALNLKLAELLLEAVAELQALNLKLAELLLEAIAKLQELNIKLVELLTKLTDPATIREAIRKVKEDSERIVAEAERLIAAAKAESERIIREAERLIAAAKAESERIIREGSGSGDPDVARLQELNIELARELLRDVARLQELNIELARELLRAAAELQELNIKLVELASELTDPDEARKAIARVKTMFSSNRQKILERTETLNQEWKQRRIQAERLIREAAAASEKISRE

SEQ ID NO: 50 - protein, 16 aa, Artificial Sequence
  Synthetic
  MISC_FEATURE (2)..(4): X is any amino acid
  MISC_FEATURE (7)..(7): X is any amino acid
  MISC_FEATURE (11)..(11): X is any amino acid
  MISC_FEATURE (13)..(15): X is any amino acid
IXXXLRXIGDXFXXXY

SEQ ID NO: 51 - protein, 451 aa, Artificial Sequence
  Synthetic
  MISC_FEATURE (1)..(20): optional
  MISC_FEATURE (331)..(396): optional
MGSHHHHHHGSGSENLYFQGSKEAAKKLQDLNIELARKLLEASTKLQRLNIRLAEALLEAIARLQELNLELVYLAVELTDPKRIRDEIKEVKDKSKEIIRRAEKEIDDAAKESKKILEEARKAIRDAAEESRKILEEGSGSGSDALDELQKLNLELAKLLLKAIAETQDLNLRAAKAFLEAAAKLQELNIRAVELLVKLTDPATIRRALEHAKRRSKEIIDEAERAIRAAKRESERIIEEARRLIEKAKEESERIIREGSGSGDPDIKKLQDLNIELARELLRAHAQLQRLNLELLRELLRALAQLQELNLDLLRLASELTGGSGGSGGSVLLNVLSKCAGSKKFRPAPAAAFARECRGFYFELQELKEDDYYGITLSDDSDHQFLLANQVVVHNCGGSGGSDEIWIAQELRRIGDEFNAYYADAERLIREAAAASEKISREAERLIREAA

SEQ ID NO: 52 - protein, 823 aa, Artificial Sequence
  Synthetic
  MISC_FEATURE (1)..(20): optional
MGSHHHHHHGSGSENLYFQGHMSKGEELFTGVVPILVELDGDVNGHKFSVRGEGEGDATNGKLTLKFICTTGKLPVPWPTLVTTLTYGVQCFARYPDHMKQHDFFKSAMPEGYVQERTISFKDDGTYKTRAEVKFEGDTLVNRIELKGIDFKEDGNILGHKLEYNFNSHNVYITADKQKNGIKANFKIRHNVEDGSVQLADHYQQNTPIGDGPVLLPDNHYLSTQSVLSKDPNEKRDHMVLLEFVTAAGITHGMDELYKSGSGSGCFAKGTNVLMADGSIECIENIEVGNKVMGKDGRPREVIKLPRGRETMYSVVQKSQHRAHKSDSSREVPELLKFTCNATHELVVRTPRSVRRLSRTIKGVEYFEVITFEMGQKKAPDGRIVELVKEVSKSYPISEGPERANELVESYRKASNKAYFEWTIEARDLSLLGSHVRKATYQTYAPILYGGSGGSGGGGSGGSGSKEAAKKLQDLNIELARKLLEASTKLQRLNIRLAEALLEAIARLQELNLELVYLAVELTDPKRIRDEIKEVKDKSKEIIRRAEKEIDDAAKESKKILEEARKAIRDAAEESRKILEEGSGSGSDALDELQKLNLELAKLLLKAIAETQDLNLRAAKAFLEAAAKLQELNIRAVELLVKLTDPATIRRALEHAKRRSKEIIDEAERAIRAAKRESERIIEEARRLIEKAKEESERIIREGSGSGDPDIKKLQDLNIELARELLRAHAQLQRLNLELLRELLRALAQLQELNLDLLRLASELTDEIWIAQELRRIGDEFNAYYADAERLSREAAAASEKISREAERSIREAAAASEKISRE

SEQ ID NO: 53 - protein, 822 aa, Artificial Sequence
  Synthetic
  MISC_FEATURE (1)..(463): optional
MGSSHHHHHHSSGLVPRGSHMSKGEELFTGVVPILVELDGDVNGHKFSVRGEGEGDATNGKLTLKFICTTGKLPVPWPTLVTTLTYGVQCFARYPDHMKQHDFFKSAMPEGYVQERTISFKDDGTYKTRAEVKFEGDTLVNRIELKGIDFKEDGNILGHKLEYNFNSHNVYITADKQKNGIKANFKIRHNVEDGSVQLADHYQQNTPIGDGPVLLPDNHYLSTQSVLSKDPNEKRDHMVLLEFVTAAGITHGMDELYKSGSGSGCFAKGTNVLMADGSIECIENIEVGNKVMGKDGRPREVIKLPRGRETMYSVVQKSQHRAHKSDSSREVPELLKFTCNATHELVVRTPRSVRRLSRTIKGVEYFEVITFEMGQKKAPDGRIVELVKEVSKSYPISEGPERANELVESYRKASNKAYFEWTIEARDLSLLGSHVRKATYQTYAPILYGGSGGSGGGGSGGSGSKEAAKKLQDLNIELARKLLEASTKLQRLNIRLAEALLEAIARLQELNLELVYLAVELTDPKRIRDEIKEVKDKSKEIIRRAEKEIDDAAKESKKILEEARKAIRDAAEESRKILEEGSGSGSDALDELQKLNLELAKLLLKAIAETQDLNLRAAKAFLEAAAKLQELNIRAVELLVKLTDPATIRRALEHAKRRSKEIIDEAERAIRAAKRESERIIEEARRLIEKAKEESERIIREGSGSGDPDIKKLQDLNIELARELLRAHAQLQRLNLELLRELLRALAQLQELNLDLLRLASELTDEIWIAQELRRIGDEFNAYYADAERLSREAAAASEKISREAERSIREAAAASEKISRE

SEQ ID NO: 54 - protein, 379 aa, Artificial Sequence
  Synthetic
  MISC_FEATURE (1)..(20): optional
  MISC_FEATURE (321)..(342): optional
  misc_feature (348)..(348): Xaa can be any naturally occurring amino acid
  misc_feature (365)..(365): Xaa can be any naturally occurring amino acid
MGSHHHHHHGSGSENLYFQGSKEAAKKLQDLNIELARKLLEASTKLQRLNIRLAEALLEAIARLQELNLELVYLAVELTDPKRIRDEIKEVKDKSKEIIRRAEKEIDDAAKESKKILEEARKAIRDAAEESRKILEEGSGSGSDALDELQKLNLELAKLLLKAIAETQDLNLRAAKAFLEAAAKLQELNIRAVELLVKLTDPATIRRALEHAKRRSKEIIDEAERAIRAAKRESERIIEEARRLIEKAKEESERIIREGSGSGDPDIKKLQDLNIELARELLRAHAQLQRLNLELLRELLRALAQLQELNLDLLRLASELTDEIWIAQELRRIGDEFNAYYADAERLXREAAAASEKISREAERXIREAAAASEKISRE

SEQ ID NO: 55 - protein, 379 aa, Artificial Sequence
  Synthetic
  MISC_FEATURE (1)..(20): optional
  MISC_FEATURE (321)..(342): optional
  misc_feature (348)..(348): Xaa can be any naturally occurring amino acid
  misc_feature (365)..(365): Xaa can be any naturally occurring amino acid
MGSHHHHHHGSGSENLYFQGSKEAAKKLQDLNIELARKLLEASTKLQRLNIRLAEALLEAIARLQELNLELVYLAVELTDPKRIRDEIKEVKDKSKEIIRRAEKEIDDAAKESKKILEEARKAIRDAAEESRKILEEGSGSGSDALDELQKLNLELAKLLLKAIAETQDLNLRAAKAFLEAAAKLQELNIRAVELLVKLTDPATIRRALEHAKRRSKEIIDEAERAIRAAKRESERIIEEARRLIEKAKEESERIIREGSGSGDPDIKKLQDLNIELARELLRAHAQLQRLNLELLRELLRALAQLQELNLDLLRLASELRDHMVLHEYVNAAGITFNAYYADAERLXREAAAASEKISREAERXIREAAAASEKISRE

SEQ ID NO: 56 - protein, 311 aa, Artificial Sequence
  Synthetic
  MISC_FEATURE (1)..(22): optional
  MISC_FEATURE (265)..(286): optional
  misc_feature (295)..(295): Xaa can be any naturally occurring amino acid
  misc_feature (298)..(298): Xaa can be any naturally occurring amino acid
MGSHHHHHHGSGSENLYFQGSGGSELARKLLEASTKLQRLNIRLAEALLEAIARLQELNLELVYLAVELTDPKRIRDEIKEVKDKSKEIIRRAEKEIDDAAKESEKILEEAREAISGSGSELAKLLLKAIAETQDLNLRAAKAFLEAAAKLQELNIRAVELLVKLTDPATIREALEHAKRRSKEIIDEAERAIRAAKRESERIIEEARRLIEKGSGSGSELARELLRAHAQLQRLNLELLRELLRALAQLQELNLDLLRLASELTDEIWIAQELRRIGDEFNAYYADAERLIREXAAXSEKISREAERLIR

SEQ ID NO: 57 - protein, 311 aa, Artificial Sequence
  Synthetic
  MISC_FEATURE (1)..(22): optional
  MISC_FEATURE (265)..(286): optional
  misc_feature (295)..(295): Xaa can be any naturally occurring amino acid
  misc_feature (298)..(298): Xaa can be any naturally occurring amino acid
MGSHHHHHHGSGSENLYFQGSGGSELARKLLEASTKLQRLNIRLAEALLEAIARLQELNLELVYLAVELTDPKRIRDEIKEVKDKSKEIIRRAEKEIDDAAKESEKILEEAREAISGSGSELAKLLLKAIAETQDLNLRAAKAFLEAAAKLQELNIRAVELLVKLTDPATIREALEHAKRRSKEIIDEAERAIRAAKRESERIIEEARRLIEKGSGSGSELARELLRAHAQLQRLNLELLRELLRALAQLQELNLDLLRLASELRDHMVLHEYVNAAGITFNAYYADAERLIREXAAXSEKISREAERLIR

SEQ ID NO: 58 - protein, 494 aa, Artificial Sequence
  Synthetic
  MISC_FEATURE (1)..(21): optional
  MISC_FEATURE (436)..(457): optional
  misc_feature (463)..(463): Xaa can be any naturally occurring amino acid
  misc_feature (480)..(480): Xaa can be any naturally occurring amino acid
MGSHHHHHHGSGSENLYFQGSAMVDTLSGLSSEQGQSGDMTIEEDSATHIKFSKRDEDGKELAGATMELRDSSGKTISTWISDGQVKDFYLYPGKYTFVETAAPDGYEVATAITFTVNEQGQVTVNGKATKGSGGSKEAAKKLQDLNIELARKLLEASTKLQRLNIRLAEALLEAIARLQELNLELVYLAVELTDPKRIRDEIKEVKDKSKEIIRRAEKEIDDAAKESKKILEEARKAIRDAAEESRKILEEGSGSGSDALDELQKLNLELAKLLLKAIAETQDLNLRAAKAFLEAAAKLQELNIRAVELLVKLTDPATIRRALEHAKRRSKEIIDEAERAIRAAKRESERIIEEARRLIEKAKEESERIIREGSGSGDPDIKKLQDLNIELARELLRAHAQLQRLNLELLRELLRALAQLQELNLDLLRLASELRDHMVLHEYVNAAGITFNAYYADAERLXREAAAASEKISREAERXIREAAAASEKISRE

SEQ ID NO: 59 - protein, 423 aa, Artificial Sequence
  Synthetic
  MISC_FEATURE (1)..(21): optional
  MISC_FEATURE (377)..(398): optional
  misc_feature (407)..(407): Xaa can be any naturally occurring amino acid
  misc_feature (410)..(410): Xaa can be any naturally occurring amino acid
MGSHHHHHHGSGSENLYFQGSAMVDTLSGLSSEQGQSGDMTIEEDSATHIKFSKRDEDGKELAGATMELRDSSGKTISTWISDGQVKDFYLYPGKYTFVETAAPDGYEVATAITFTVNEQGQVTVNGKATKGSGGSELARKLLEASTKLQRLNIRLAEALLEAIARLQELNLELVYLAVELTDPKRIRDEIKEVKDKSKEIIRRAEKEIDDAAKESEKILEEAREAISGSGSELAKLLLKAIAETQDLNLRAAKAFLEAAAKLQELNIRAVELLVKLTDPATIREALEHAKRRSKEIIDEAERAIRAAKRESERIIEEARRLIEKGSGSGSELARELLRAHAQLQRLNLELLRELLRALAQLQELNLDLLRLASELRDHMVLHEYVNAAGITFNAYYADAERLIREXAAXSEKISREAERLIR

SEQ ID NO: 60 - protein, 20 aa, Artificial Sequence
  Synthetic
EIWIAQELRRIGDEFNAYYA

SEQ ID NO: 61 - protein, 379 aa, Artificial Sequence
  Synthetic
  MISC_FEATURE (1)..(20): optional
  MISC_FEATURE (322)..(334): optional
MGSHHHHHHGSGSENLYFQGSKEAAKKLQDLNIELARKLLEASTKLQRLNIRLAEALLEAIARLQELNLELVYLAVELTDPKRIRDEIKEVKDKSKEIIRRAEKEIDDAAKESKKILEEARKAIRDAAEESRKILEEGSGSGSDALDELQKLNLELAKLLLKAIAETQDLNLRAAKAFLEAAAKLQELNIRAVELLVKLTDPATIRRALEHAKRRSKEIIDEAERAIRAAKRESERIIEEARRLIEKAKEESERIIREGSGSGDPDIKKLQDLNIELARELLRAHAQLQRLNLELLRELLRALAQLQELNLDLLRLASELTNIQMLLEAADYLERESKRIVEDAERLIREAAAASEKISREAERSIREAAAASEKISRE

SEQ ID NO: 62 - protein, 29 aa, Artificial Sequence
  Synthetic
KMAQELIDKVRAASLQINGDAFYAILRAL

SEQ ID NO: 63 - protein, 9 aa, Artificial Sequence
  Synthetic
  MISC_FEATURE (1)..(1): optional
NWSHPQFEK

SEQ ID NO: 64 - protein, 8 aa, Artificial Sequence
  Synthetic
  MISC_FEATURE (7)..(7): X is G or S
  MISC_FEATURE (8)..(8): X is any amino acid, except P
ENLYFQXX

SEQ ID NO: 65 - protein, 377 aa, Artificial Sequence
  Synthetic
  MISC_FEATURE (1)..(20): optional
  MISC_FEATURE (329)..(341): optional
MGSHHHHHHGSGSENLYFQGSKEAAKKLQDLNIELARKLLEASTKLQRLNIRLAEALLEAIARLQELNLELVYLAVELTDPKRIRDEIKEVKDKSKEIIRRAEKEIDDAAKESKKILEEARKAIRDAAEESRKILEEGSGSGSDALDELQKLNLELAKLLLKAIAETQDLNLRAAKAFLEAAAKLQELNIRAVELLVKLTDPATIRRALEHAKRRSKEIIDEAERAIRAAKRESERIIEEARRLIEKAKEESERIIREGSGSGDPDIKKLQDLNIELARELLRAHAQLQRLNLELLRELLRALAQLQELNLDLLRLASELTDPDEARKNIQMLLEAADYLEEDAERLIREAAAASEKISREAERLIREAASEKISRE

SEQ ID NO: 66 - protein, 6 aa, Artificial Sequence
  Synthetic
LVPRGS

SEQ ID NO: 67 - protein, 285 aa, Artificial Sequence
  Synthetic
  MISC_FEATURE (19)..(38): optional
MDEARKAIARVKRESKRIEIWIAQELRRIGDEFNAYYAEAEKLATDELWHRLLEASTKLQRLNIRLAEALLEAIARLQELNLELVYLAVELTDPKRIRDEIKEVKDKSKEIIRRAEKEIDDAAKESEKILEEAREAISGSGSELAKLLLKAIAETQDLNLRAAKAFLEAAAKLQELNIRAVELLVKLTDPATIREALEHAKRRSKEIIDEAERAIRAAKRESERIIEEARRLIEKGSGSGSELARELLRAHAQLQRLNLELLRELLRALAQLQELNLDLLRLASE

SEQ ID NO: 68 - protein, 309 aa, Artificial Sequence
  Synthetic
  MISC_FEATURE (1)..(21): optional
  MISC_FEATURE (270)..(279): optional
MGSSHHHHHHSSGLVPRGSHMSELARKLLEASTKLQRLNIRLAEALLEAIARLQELNLELVYLAVELTDPKRIRDEIKEVKDKSKEIIRRAEKEIDDAAKESEKILEEAREAISGSGSELAKLLLKAIAETQDLNLRAAKAFLEAAAKLQELNIRAVELLVKLTDPATIREALEHAKRRSKEIIDEAERAIRAAKRESERIIEEARRLIEKGSGSGSELARELLRAHAQLQRLNLELLRELLRALAQLQELNLDLLRLASELTDPDEARAHIVMVDAYKKRIVEDAERLIREAAAASEKISREAERLIR

SEQ ID NO: 69 - protein, 309 aa, Artificial Sequence
  Synthetic
  MISC_FEATURE (1)..(21): optional
  MISC_FEATURE (281)..(290): optional
MGSSHHHHHHSSGLVPRGSHMSELARKLLEASTKLQRLNIRLAEALLEAIARLQELNLELVYLAVELTDPKRIRDEIKEVKDKSKEIIRRAEKEIDDAAKESEKILEEAREAISGSGSELAKLLLKAIAETQDLNLRAAKAFLEAAAKLQELNIRAVELLVKLTDPATIREALEHAKRRSKEIIDEAERAIRAAKRESERIIEEARRLIEKGSGSGSELARELLRAHAQLQRLNLELLRELLRALAQLQELNLDLLRLASELTDPDEARKAIARVKRESKAHIVMVDAYKREAAAASEKISREAERLIR

SEQ ID NO: 70 - protein, 309 aa, Artificial Sequence
  Synthetic
  MISC_FEATURE (1)..(21): optional
  MISC_FEATURE (270)..(277): optional
MGSSHHHHHHSSGLVPRGSHMSELARKLLEASTKLQRLNIRLAEALLEAIARLQELNLELVYLAVELTDPKRIRDEIKEVKDKSKEIIRRAEKEIDDAAKESEKILEEAREAISGSGSELAKLLLKAIAETQDLNLRAAKAFLEAAAKLQELNIRAVELLVKLTDPATIREALEHAKRRSKEIIDEAERAIRAAKRESERIIEEARRLIEKGSGSGSELARELLRAHAQLQRLNLELLRELLRALAQLQELNLDLLRLASELTDPDEARENLYFQGSESKRIVEDAERLIREAAAASEKISREAERLIR

SEQ ID NO: 71 - protein, 309 aa, Artificial Sequence
  Synthetic
  MISC_FEATURE (1)..(21): optional
  MISC_FEATURE (284)..(291): optional
MGSSHHHHHHSSGLVPRGSHMSELARKLLEASTKLQRLNIRLAEALLEAIARLQELNLELVYLAVELTDPKRIRDEIKEVKDKSKEIIRRAEKEIDDAAKESEKILEEAREAISGSGSELAKLLLKAIAETQDLNLRAAKAFLEAAAKLQELNIRAVELLVKLTDPATIREALEHAKRRSKEIIDEAERAIRAAKRESERIIEEARRLIEKGSGSGSELARELLRAHAQLQRLNLELLRELLRALAQLQELNLDLLRLASELTDPDEARKAIARVKRESKRIVENLYFQGSEAAAASEKISREAERLIR

SEQ ID NO: 72 - protein, 309 aa, Artificial Sequence
  Synthetic
  MISC_FEATURE (1)..(21): optional
  MISC_FEATURE (270)..(280): optional
MGSSHHHHHHSSGLVPRGSHMSELARKLLEASTKLQRLNIRLAEALLEAIARLQELNLELVYLAVELTDPKRIRDEIKEVKDKSKEIIRRAEKEIDDAAKESEKILEEAREAISGSGSELAKLLLKAIAETQDLNLRAAKAFLEAAAKLQELNIRAVELLVKLTDPATIREALEHAKRRSKEIIDEAERAIRAAKRESERIIEEARRLIEKGSGSGSELARELLRAHAQLQRLNLELLRELLRALAQLQELNLDLLRLASELTDPDEARVSGWRLFKKISRIVEDAERLIREAAAASEKISREAERLIR

SEQ ID NO: 73 - protein, 309 aa, Artificial Sequence
  Synthetic
  MISC_FEATURE (1)..(21): optional
  MISC_FEATURE (281)..(291): optional
MGSSHHHHHHSSGLVPRGSHMSELARKLLEASTKLQRLNIRLAEALLEAIARLQELNLELVYLAVELTDPKRIRDEIKEVKDKSKEIIRRAEKEIDDAAKESEKILEEAREAISGSGSELAKLLLKAIAETQDLNLRAAKAFLEAAAKLQELNIRAVELLVKLTDPATIREALEHAKRRSKEIIDEAERAIRAAKRESERIIEEARRLIEKGSGSGSELARELLRAHAQLQRLNLELLRELLRALAQLQELNLDLLRLASELTDPDEARKAIARVKRESKVSGWRLFKKISEAAAASEKISREAERLIR

SEQ ID NO: 74 - protein, 309 aa, Artificial Sequence
  Synthetic
  MISC_FEATURE (1)..(21): optional
  MISC_FEATURE (273)..(276): optional
  MISC_FEATURE (302)..(305): optional
MGSSHHHHHHSSGLVPRGSHMSELARKLLEASTKLQRLNIRLAEALLEAIARLQELNLELVYLAVELTDPKRIRDEIKEVKDKSKEIIRRAEKEIDDAAKESEKILEEAREAISGSGSELAKLLLKAIAETQDLNLRAAKAFLEAAAKLQELNIRAVELLVKLTDPATIREALEHAKRRSKEIIDEAERAIRAAKRESERIIEEARRLIEKGSGSGSELARELLRAHAQLQRLNLELLRELLRALAQLQELNLDLLRLASELTDPDEARKAIIQIGRESKRIVEDAERLIREAAAASEKISVQLGRLIR

SEQ ID NO: 75 - protein, 309 aa, Artificial Sequence
  Synthetic
  MISC_FEATURE (1)..(21): optional
  MISC_FEATURE (284)..(287): optional
  MISC_FEATURE (291)..(294): optional
MGSSHHHHHHSSGLVPRGSHMSELARKLLEASTKLQRLNIRLAEALLEAIARLQELNLELVYLAVELTDPKRIRDEIKEVKDKSKEIIRRAEKEIDDAAKESEKILEEAREAISGSGSELAKLLLKAIAETQDLNLRAAKAFLEAAAKLQELNIRAVELLVKLTDPATIREALEHAKRRSKEIIDEAERAIRAAKRESERIIEEARRLIEKGSGSGSELARELLRAHAQLQRLNLELLRELLRALAQLQELNLDLLRLASELTDPDEARKAIARVKRESKRIVIQIGRLIVQLGAASEKISREAERLIR

SEQ ID NO: 76 - protein, 309 aa, Artificial Sequence
  Synthetic
  MISC_FEATURE (1)..(21): optional
  MISC_FEATURE (284)..(287): optional
  MISC_FEATURE (302)..(305): optional
MGSSHHHHHHSSGLVPRGSHMSELARKLLEASTKLQRLNIRLAEALLEAIARLQELNLELVYLAVELTDPKRIRDEIKEVKDKSKEIIRRAEKEIDDAAKESEKILEEAREAISGSGSELAKLLLKAIAETQDLNLRAAKAFLEAAAKLQELNIRAVELLVKLTDPATIREALEHAKRRSKEIIDEAERAIRAAKRESERIIEEARRLIEKGSGSGSELARELLRAHAQLQRLNLELLRELLRALAQLQELNLDLLRLASELTDPDEARKAIARVKRESKRIVIQIGRLIREAAAASEKISVQLGRLIR

SEQ ID NO: 77 - protein, 309 aa, Artificial Sequence
  Synthetic
  MISC_FEATURE (1)..(21): optional
  MISC_FEATURE (272)..(300): optional
MGSSHHHHHHSSGLVPRGSHMSELARKLLEASTKLQRLNIRLAEALLEAIARLQELNLELVYLAVELTDPKRIRDEIKEVKDKSKEIIRRAEKEIDDAAKESEKILEEAREAISGSGSELAKLLLKAIAETQDLNLRAAKAFLEAAAKLQELNIRAVELLVKLTDPATIREALEHAKRRSKEIIDEAERAIRAAKRESERIIEEARRLIEKGSGSGSELARELLRAHAQLQRLNLELLRELLRALAQLQELNLDLLRLASELTDPDESVKELEDKVEELLSKNYHLENEVARLKKLVGERSREAERLIR

SEQ ID NO: 78 - protein, 309 aa, Artificial Sequence
  Synthetic
  MISC_FEATURE (1)..(21): optional
  MISC_FEATURE (274)..(303): optional
MGSSHHHHHHSSGLVPRGSHMSELARKLLEASTKLQRLNIRLAEALLEAIARLQELNLELVYLAVELTDPKRIRDEIKEVKDKSKEIIRRAEKEIDDAAKESEKILEEAREAISGSGSELAKLLLKAIAETQDLNLRAAKAFLEAAAKLQELNIRAVELLVKLTDPATIREALEHAKRRSKEIIDEAERAIRAAKRESERIIEEARRLIEKGSGSGSELARELLRAHAQLQRLNLELLRELLRALAQLQELNLDLLRLASELTDPDEARKAIAGEIAALKQEIAALKKENAALKWEIAALKQGAERLIR

SEQ ID NO: 79 - protein, 309 aa, Artificial Sequence
  Synthetic
  MISC_FEATURE (1)..(21): optional
  MISC_FEATURE (278)..(304): optional
MGSSHHHHHHSSGLVPRGSHMSELARKLLEASTKLQRLNIRLAEALLEAIARLQELNLELVYLAVELTDPKRIRDEIKEVKDKSKEIIRRAEKEIDDAAKESEKILEEAREAISGSGSELAKLLLKAIAETQDLNLRAAKAFLEAAAKLQELNIRAVELLVKLTDPATIREALEHAKRRSKEIIDEAERAIRAAKRESERIIEEARRLIEKGSGSGSELARELLRAHAQLQRLNLELLRELLRALAQLQELNLDLLRLASELTDPDEARKAIARVKRGLEQEIAALEKENAALEWEIAALEQGGERLIR

SEQ ID NO: 80 - protein, 309 aa, Artificial Sequence
  Synthetic
  MISC_FEATURE (1)..(21): optional
  MISC_FEATURE (278)..(304): optional
MGSSHHHHHHSSGLVPRGSHMSELARKLLEASTKLQRLNIRLAEALLEAIARLQELNLELVYLAVELTDPKRIRDEIKEVKDKSKEIIRRAEKEIDDAAKESEKILEEAREAISGSGSELAKLLLKAIAETQDLNLRAAKAFLEAAAKLQELNIRAVELLVKLTDPATIREALEHAKRRSKEIIDEAERAIRAAKRESERIIEEARRLIEKGSGSGSELARELLRAHAQLQRLNLELLRELLRALAQLQELNLDLLRLASELTDPDEARKAIARVKRGLKQKIAALKYKNAALKKKIAALKQGGERLIR

SEQ ID NO: 81 - protein, 186 aa, Artificial Sequence
  Synthetic
  MISC_FEATURE (151)..(158): optional
SRVEEIIEDLRRLLEEIRKENADSIRASKELLDRVKEINDTIIAELERLLKDIEKEVREKGSESEEVKKALRRVLEELEKLLRRVAEINEEVLRRNSKLVEEDARRNAEVLKELKRLVEELMREIGDEDKVRKVAEVAEKVLRDIDKLDRWSHPQFEKTNGEISKLDEDTRRVAERVKKAIEDLAK

SEQ ID NO: 82 - protein, 179 aa, Artificial Sequence
  Synthetic
  MISC_FEATURE (35)..(42): optional
SEVDEIIADNERALDEVRREVEEIDKENAERLGEWSHPQFEKGDRLAKALEEIRKGVRSRLVDELERAIREVEEVIRRVLERVRRLIEEVSKIITDVLREVERLHEEVTKELRKVEDGNSREALDALRRLIEKVVEDSARLIKKVDEALKAVNKEIEDLSREVADLVRAVAEELDARVK

SEQ ID NO: 83 - protein, 177 aa, Artificial Sequence
  Synthetic
  MISC_FEATURE (143)..(150): optional
SSDEVLKEIEEIIRRLEAEVRRVNAEVNASTEDLAREVEEVLRATNELIEELERRVTGTEELKRVIDELRDRDRKVRRRVERVIEESAKRDDESRKRLTRAVEKLRADLKKLADDGVPEEALSKAIKDVRDIVKKVKDELKEWSHPQFEKVDRLSEELKEWLKDVERVLKELTDKDR

SEQ ID NO: 84 - protein, 178 aa, Artificial Sequence
  Synthetic
  MISC_FEATURE (140)..(147): optional
SDAEELLKRVADLLKASLESLEKILRDSKELMDRWRKKLEDLLRESEELVDRAEKILRRGGSDKEVLDKIAEEVRRTNDDSRRLDEELHRLSRDTLRKLEENLRRTEKEVREMDKRAAERGVDERVREELKKLLTRVEWSHPQFEKGDKKILKEAHKESKEVNDRDRELLERLEESVR

SEQ ID NO: 85 - protein, 178 aa, Artificial Sequence
  Synthetic
  MISC_FEATURE (35)..(42): optional
SDAEELLKRVADLLKASLESLEKILRDSKELMDRWSHPQFEKLGESEELVDRAEKILRRGGSDKEVLDKIAEEVRRTNDDSRRLDEELHRLSRDTLRKLEENLRRTEKEVREMDKRAAERGVDERVREELKKLLTRVEEEHRKVLETDKKILKEAHKESKEVNDRDRELLERLEESVR

SEQ ID NO: 86 - protein, 242 aa, Artificial Sequence
  Synthetic
  MISC_FEATURE (212)..(219): optional
SEAEDLLERVKRVLDELIEIVDRNHELNARVVETSARLVERLLEEVERALETLEREIPGRELLDKAIKDLRDVLRRVAEKVKRSIEELKEVLEESRRVLEEVVRALAEVIDRVRRLVEKGVDLRDLIRELKRVLEEAVSLIERLVRLNTRAAEKDNESLRELVRAIKEALKRAVDMVRADGLDSRLVKKLDEIVKEVAKKLEDVVRANEELWSHPQFEKGSSVARLREAVERVARDLEETAR

SEQ ID NO: 87 - protein, 235 aa, Artificial Sequence
  Synthetic
  MISC_FEATURE (24)..(31): optional
SDEERLEKVVKDVIEKVRRILEKWSHPQFEKGSELRRILEEWEKIIREVLDKVRRGSGSADALVEVLEEILRLAEELSKRVEEVLREILKLAKALSDELVKVLAEIVEAAKRISRDDELRKAVEDVARELEDLAAKDRKILDDVREALERIAKEDKDILREAEETLRRLADEMRRSGVDERLLKRVVDILARLLELNATTIERLLRILEELLKLNKELAERVIRVLEKLLEEIKR

SEQ ID NO: 88 - protein, 235 aa, Artificial Sequence
  Synthetic
  MISC_FEATURE (198)..(205): optional
SVLETVKKALEDSSEKIERIVEEDERVAKESSDRIRRLVEEDKRVADEILDLIEKGGDTDTLAKLVEEWSRTSKKLLDDVLKLHKDWSDDSRRLLEEILRVHEELIRAVKEILDRGGKPEEVVRELEKVLKESLDTLEEIIRRLDEANARTVKRVADVIRELEDANAKVLEEIERKGDDKDAVIKVIEELIRANAAVWSHPQFEKGDLVRVNKTVWKELLRVNEKLARDLERVVK

SEQ ID NO: 89 - protein, 235 aa, Artificial Sequence
  Synthetic
  MISC_FEATURE (31)..(38): optional
SLVDELRKSLERNVRVSEEVARRLKEALGRWSHPQFEKGGDLIRLNEDVVRVVEKVGVDESAIERVRRIIEELNRALDAVLKKNEDLVRRLTELLDKLLEENRRLVEELDEDLKRRGGTEEVIDTILELIERSIERLKRLLDELLRIVREALKDNARVADENLKALKEILDELRKDGVSDEELKRVLEKAADLHARLKDAHRKLLEDLERIIRELKKKLDEVVEENKRSVDELKR

SEQ ID NO: 90 - protein, 237 aa, Artificial Sequence
  Synthetic
  MISC_FEATURE (20)..(27): optional
MKDAVIKVIEELIRANAAVWSHPQFEKGDLVRVNKTVWKELLRVNEKLARDLERALDERDVSAWETVKKALEDSSEKIERIVEEDERVAKESSDRIRRLVEEDKRVADEILDLIEKGGDTDTLAKLVEEWSRTSKKLLDDVLKLHKDWSDDSRRLLEEILRVHEELIRAVKEILDRGGAPEEVVRELEKVLKESLDTLEEIIRRLDEANARTVKRVADVIRELEDANAKVLEEIERK

SEQ ID NO: 91 - protein, 175 aa, Artificial Sequence
  Synthetic
  MISC_FEATURE (26)..(33): optional
MEEAASKAIKDVRDIVKKVKDELKEWSHPQFEKVDRLSEELKEWLKDVERVLKELTDREEASEEELKRVIDELRDRDRKVRRRVERVIEESAKRDDESRKRLTRAVEKLRADLKKLSVEGASDEVLKEIEEIIRRLEAEVRRVNAEVNASTEDLAREVEEVLRATNELIEELERR

SEQ ID NO: 92 - protein, 170 aa, Artificial Sequence
  Synthetic
SEVEDVVRKVEKLVRDLIKHVEENVRRVEEVVRKLIEEIKRIAEEITRIAEELAKEPGSEDLLRKLEKVLKEIDDKLKELEDRLRDMVRRSRESSEENERRLKRVEDEVRRDHMVLHEYVNAAGITKEVEKVNRESREVTRRVLEEAKEMLERVKKIVKEVIEKVRRVVK

SEQ ID NO: 93 - protein, 171 aa, Artificial Sequence
  Synthetic
SEKEKVIKEARELLERLRKRLKDVNDDVTRLLDELRKENEKSREDVEREVKRLEEEVPVEDVIRELKRRLEEVDKKNRDILETLKRELDEVSRRTREELEKLRKELEEVERDHMVLHEYVNAAGITRRRLERLVEENERVVKKILDEIRRSVEENKRIVDKVRKDLDERRK

SEQ ID NO: 94 - protein, 172 aa, Artificial Sequence
  Synthetic
SRAETVLKEVTDKIKKLADSSDELLRRNKENIDELKKSSEELLRRLTKAIEEIEKGSVDEETLEELIRRVEAELEAHHRELEKNSREDEKRNRDHHAKLEEEMRRVEERLERDHMVLHEYVNAAGITDTVRRRNEKVNEDVKRMNDKLRRDNEDVIRRVEKLLRELEEKRRT

SEQ ID NO: 95 - protein, 172 aa, Artificial Sequence
  Synthetic
SKEEELEKLLREHHEKIKRLKEESKRINDRIRRTVEELIKESEKINRDINDTVRKGDRDEEVIRRLLEDVRRKHEELRERLKRELDKVRERHKELLDRARRATEAVKERLDRDHMVLHEYVNAAGITERNLDDLARVLKESEDDLAEILRRLKEVLEESERDLERVEREVRK

SEQ ID NO: 96 - protein, 171 aa, Artificial Sequence
  Synthetic
SEKEKVIKEARELLERLRKRLKDVNDDVTRLLDELRKENEKSREDVEREVKRLEEEVPVEDVIRELKRRLEEVDKKNRDILETLKRELDEVSRRTREELEKLRKELEEVEKARDHMVLHEYVNAAGITRLERLVEENERVVKKILDEIRRSVEENKRIVDKVRKDLDERRK

SEQ ID NO: 97 - protein, 173 aa, Artificial Sequence
  Synthetic
STEDVLRKIKEDVKRVIDDNRRILDEVRRTSKRVLDDLRANLKHIAEEVERVLRGSDSEEVVRELAKILDEIREEHRRLIRTNEKVLEDIERDHRRISEELKRILDEVDELLRDHMVLHEYVNAAGITVDEIKRLAEESLKRLEDLSRDHKRRAKELNDEIAKVVDELAKRAT

SEQ ID NO: 98 - protein, 174 aa, Artificial Sequence
  Synthetic
SRDEKIRDILRRVLKEVRDSTKKVEEDLEDVHRRTEEELRKVKKRLDEVLKRVRDEGASEELKRRMEEVVRRIEELLKKLLKEDRDVVKEIRDKLDETRKEMEEVAERIKDKIRDHMVLHEYVNAAGITADRLIDLNRRIAEEVDKIVRDSIKKVEEIVTEVEKIVEKLIRDVR

SEQ ID NO: 99 - protein, 174 aa, Artificial Sequence
  Synthetic
SELEKVVKEVADLLRRNLEKSKRVLEEVRRRLEENLRESEKVHDDNRKTARRILELVREGKDKRDLTRLLEEDDKRVKEALDKSRENNERILKEVRRALRESEEDNRRILKEVRDHMVLHEYVNAAGITRESIERSRRFIEELEKIVEETLTESEKLARASSEITKTVLDEIRK

SEQ ID NO: 100 - protein, 171 aa, Artificial Sequence
  Synthetic
SEKEKVIKEARELLERLRKRLKDVNDDVTRLLDELRKENEKSREDVEREVKRLEEEVPVEDVIRELKRRLEEVDKKNRDILETLKRELDEVSRRTREELEKLRKELEEVEKAGRDHMVLHEYVNAAGITLERLVEENERVVKKILDEIRRSVEENKRIVDKVRKDLDERRK

SEQ ID NO: 101 - protein, 174 aa, Artificial Sequence
  Synthetic
SEIEELEKRIDELLKELRDLSRRIAEEVKRLLEELKKLSKDSEDKLRELLERLKRKGVPEEELRRVEEEVERVVRESRKLNKETEDELRRLLEEIKESNDRVEKRARELKKLLRDHMVLHEYVNAAGITVREDKERLKKVLKDARDLIKKDKDLNEKLSRELEKLVRELEERAR

SEQ ID NO: 102 - protein, 174 aa, Artificial Sequence
  Synthetic
DELRDVKRELDRLLRENEEIVERIAETVRRLLEELKKLTKELAEELRKLLEELRKRGVPEKELKEVADTLRKLLKDIERSNKEVEDRLRKLLEEIKESTDRLREELEEVEKLLRDHMVLHEYVNAAGITSRDNKRRMRRVLEEAKRLAKEDKERIDKIRKEIEELIKRLKDKAT

SEQ ID NO: 103 - protein, 174 aa, Artificial Sequence
  Synthetic
DEEEDLERRIKKLLDENRELLKRIAEELRRLLEELRRLTEESADRLRRLLKELKDRGVPEKDLRDVAEKVKKVLKESEDSNRDVKRKLEKLLRDLERSTERLEREARKVRKLLRDHMVLHEYVNAAGITSRDNKELLKKIEKEIRDLIKEDKERNRELSERLRKLVEELKKKAT

SEQ ID NO: 104 - protein, 174 aa, Artificial Sequence
  Synthetic
REIEEAAKDLDRLLEENKKLVKEVEEELRRLLKENRDLVKESEDRIRKLLEELRRRGVPEEELKEVEERARRVIEESRRSSKELEKRLRELLEELRRSTKELEDRLREIKKLLRDHMVLHEYVNAAGITSRENKEKIRKILEDVKKLSEDNKRRNEELSRRVKTLVDEIKKRAT

SEQ ID NO: 105 - protein, 174 aa, Artificial Sequence
  Synthetic
EELERILDKVRKVIEEVRKRLRDDLRTVEKVLKETEEVLRRAAERAKRALERVEEAARRGRDRREIKEELKKVLDDLRELLRALEEKNRRVNKENEDSLRKIEEDLRDVLRKLRDHMVLHEYVNAAGITLRTIREEVERVLRKSNELSTRIKKRIDDVLETLERLLKELDDKLR

SEQ ID NO: 106 - protein, 174 aa, Artificial Sequence
  Synthetic
SEEEVLREAAKTVEKLLDEIRRSLEKVSKRVEDSNRELKESLDRVRERVRELLEELRKNNVDRTLLEDVRRKLERIEERNEEMNDRSRRKLEELRERNRKILEDIRRTLEDLKRDHMVLHEYVNAAGITAKLVDEVDKENKRALRENEERVKTLNRENEEMLKRIEEEVRRATK

SEQ ID NO: 107 - protein, 174 aa, Artificial Sequence
  Synthetic
SESDEVIRDLARLLDELARHVDDSVRRMDEVVKRSTREADELAKRLDELVKEVEKKPGDERVERMVAEIERLVAEVLEELKKKYEKLKREVEENLRRLEETVRDIVEKARKVTRDHMVLHEYVNAAGITERILEEAKKKHEDVLRRLEDSLRRVAELLKAALDRLREIVDRLRR

SEQ ID NO: 108 - protein, 172 aa, Artificial Sequence
  Synthetic
SRAETVLKEVTDKIKKLADSSDELLRRNKENIDELKKSSEELLRRLTKAIEEIEKGSVDEETLEELIRRVEAELEAHHRELEKNSREDEKRNRDHHAKLEEEMRRVEERLERERDHMVLHEYVNAAGITVRRRNEKVNEDVKRMNDKLRRDNEDVIRRVEKLLRELEEKRRT

SEQ ID NO: 109 - protein, 174 aa, Artificial Sequence
  Synthetic
KEVEDAVKELEDLLRANEDKTRSIVEDMRASNKDLEDHSRASEEEVRKLLDDLRRAGVPRDSLKRLAEDVERVTRESRELLERVHRADRELIERLKESNERLRRAIEEIRKAIRDHMVLHEYVNAAGITAEEDAERLDRLRRESEELNERVRRVDKKLLEEIRRKAKKVEDDTR

SEQ ID NO: 110 - protein, 174 aa, Artificial Sequence
  Synthetic
DEEEDLERAIKKLLDENRELLKRIAEELRRLLEELRRLTEESADRLRRLLKELKDRGVPEEDLADVAEKVKKVLKESEDSNADVARKLEKLLRDLERSTERLEREARKVRKLLRDHMVLHEYVNAAGITSRDNKELLKKIEKEIRDLIKEDKERNIELSERLRKLVEELKKKAT

SEQ ID NO: 111 - protein, 174 aa, Artificial Sequence
  Synthetic
SEDETIRRIVRTVHEESRKSTEDVRREVERVLRESEEVVKKVKKKVDDVLKRVEETGISEELEERMRRIIREIREHLKDNLRRVREVIERIERKLEETERRDEKVLREIEKKIRRDHMVLHEYVNAAGITRDTIRENEEIAKEVREIVERSIKNLEEVAEEVERVVRELIEARR

SEQ ID NO: 112 - protein, 174 aa, Artificial Sequence
  Synthetic
SRDEKIRDILRRVLKEVRDSTKKVEEDLEDVHRRTEEELRKVKKRLDEVLKRVRDEGASEELKRRMEEVVRRIEELLKKLLKEDRDVVKEIRDKLDETRKEMEEVAERIKDKIRRDHMVLHEYVNAAGITDRLIDLNRRIAEEVDKIVRDSIKKVEEIVTEVEKIVEKLIRDVR

SEQ ID NO: 113 - protein, 173 aa, Artificial Sequence
  Synthetic
SLEELLEEARKTVERLIRESERVLRESEERVRRLIEELERVVRETRKRVKEVIERVEDEEALKELEKLLREDSKRVKEVLDDLRRDLERNKRRNEKVLRELEELLKRLEELVRERDHMVLHEYVNAAGITRVKEMLKRDEDTLREIERKVKEAVRDSERTLEEIEKRVTEEKT

SEQ ID NO: 114 - protein, 175 aa, Artificial Sequence
  Synthetic
SEKEDLERELEEVRRRVEESLRKNEEDVKRVRDELKKLLDENRKELERIRREVERANVDKRVLDEADRLLKELEDDHKKLEEDAKKALDELREEHKRLEETLRRMLKRIKEVLDRDHMVLHEYVNAAGITLRDIERVSRELNKKLEEIVRRLKKVSDELNRRIEEIAERVRRRRK

SEQ ID NO: 115 - protein, 175 aa, Artificial Sequence
  Synthetic
SEEDELRRLLKEVNERVERLLDEIRKELEKIAEELRDLLKKNEDKLREIKRRVEENRVDEEIKKDAERALTELKEEHERLDREAKKDLDRIRKELERLEEEHRRVSERIEEVLDRDHMVLHEYVNAAGITMERTRRVIEEIKKELRDILEKLRRVSEELNKKLDEILKRIEDRTR

SEQ ID NO: 116 - protein, 174 aa, Artificial Sequence
  Synthetic
DELRDVKRELDRLLRENEEIVERIAETVRRLLEELKKLTKELAEELRKLLEELRKRGVPEKELKEVADTLRKLLKDIERSNKEVEDRLRKLLEEIKESTDRLREELEEVEKLLRRDHMVLHEYVNAAGITRDNKRRMRRVLEEAKRLAKEDKERIDKIRKEIEELIKRLKDKAT

SEQ ID NO: 117 - protein, 174 aa, Artificial Sequence
  Synthetic
REIEEAAKDLDRLLEENKKLVKEVEEELRRLLKENRDLVKESEDRIRKLLEELRRRGVPEEELKEVEERARRVIEESRRSSKELEKRLRELLEELRRSTKELEDRLREIKKLLRRDHMVLHEYVNAAGITRENKEKIRKILEDVKKLSEDNKRRNEELSRRVKTLVDEIKKRAT

SEQ ID NO: 118 - protein, 175 aa, Artificial Sequence
  Synthetic
SEVDEVLREAKRIVDEVHKDNERATEESRRLVKKVHEENEEMVKDIERIVKEVKDANIDEKLVTEILKEIEEALKEAARRNKEVKDRLRELSRRVSERNREILEELKERLDRVRRDHMVLHEYVNAAGITLKRIEESLRRHRKENKRLLEELDRSLRELAKIVKEVLDEIRERTR

SEQ ID NO: 119 - skipped

SEQ ID NO: 120 - protein, 175 aa, Artificial Sequence
  Synthetic
SEMDDVLKKLAETVKRIIERLKKLTDDSRRLVEEVHRRNDKLSKESREAVRKAEERNIDEKDVRKLLEDLKKKSEEVAERNKRILDTLREISKRAEDEVRKVLKELEKTLKELERDHMVLHEYVNAAGITLDEVRKALKRHKDENDKLLKEIEDSLRRHKEENDRLLEKLKESTR

SEQ ID NO: 121 - protein, 172 aa, Artificial Sequence
  Synthetic
SRAETVLKEVTDKIKKLADSSDELLRRNKENIDELKKSSEELLRRLTKAIEEIEKGSVDEETLEELIRRVEAELEAHHRELEKNSREDEKRNRDHHAKLEEEMRRVEERLEREGRDHMVLHEYVNAAGITRRRNEKVNEDVKRMNDKLRRDNEDVIRRVEKLLRELEEKRRT

SEQ ID NO: 122 - protein, 174 aa, Artificial Sequence
  Synthetic
KEVEDAVKELEDLLRANEDKTRSIVEDMRASNKDLEDHSRASEEEVRKLLDDLRRAGVPRDSLKRLAEDVERVTRESRELLERVHRADRELIERLKESNERLRRAIEEIRKAIKRDHMVLHEYVNAAGITEEDAERLDRLRRESEELNERVRRVDKKLLEEIRRKAKKVEDDTR

SEQ ID NO: 123 - protein, 175 aa, Artificial Sequence
  Synthetic
SEADDVLKKLAETVKRIIERLKKLTDDSRRLVEEVHRRNDKLSKESAEAVRKAEERGIDEKDVRKLLEDLKKKSEEVAERNKRILDTLREISKRAEDEVRKVLKELEKTLKELERDHMVLHEYVNAAGITLDEVRKALARHKDENDKLLKEIEDSLRRHKEENDRLLEKLKESTR

SEQ ID NO: 124 - protein, 175 aa, Artificial Sequence
  Synthetic
SEIERVKKRLEELLAEVEESTRRLEERLKRLLEEAKRSSEEVEKELRRLLEAVRRGLSRDEKLVSELEARVKELLEDSRASLEELKKRVRKLAEDSARLLEEVKREVEKLKAKLRDHMVLHEYVNAAGITAKRAHDENERLIREVEELVRAHNKRNKELVDEVKRLVEKVIEEER

SEQ ID NO: 125 - protein, 174 aa, Artificial Sequence
  Synthetic
SRDEKIRDILRRVLKEVRDSTKKVEEDLEDVHRRTEEELRKVKKRLDEVLKRVRDEGASEELKRRMEEVVRRIEELLKKLLKEDRDVVKEIRDKLDETRKEMEEVAERIKDKIRRRDHMVLHEYVNAAGITRLIDLNRRIAEEVDKIVRDSIKKVEEIVTEVEKIVEKLIRDVR

SEQ ID NO: 126 - protein, 175 aa, Artificial Sequence
  Synthetic
SEKEDLERELEEVRRRVEESLRKNEEDVKRVRDELKKLLDENRKELERIRREVERANVDKRVLDEADRLLKELEDDHKKLEEDAKKALDELREEHKRLEETLRRMLKRIKEVLDRRDHMVLHEYVNAAGITRDIERVSRELNKKLEEIVRRLKKVSDELNRRIEEIAERVRRRRK

SEQ ID NO: 127 - protein, 174 aa, Artificial Sequence
  Synthetic
DEEEDLERRIKKLLDENRELLKRIAEELRRLLEELRRLTEESADRLRRLLKELKDRGVPEKDLRDVAEKVKKVLKESEDSNRDVKRKLEKLLRDLERSTERLEREARKVRKLLRDRDHMVLHEYVNAAGITDNKELLKKIEKEIRDLIKEDKERNRELSERLRKLVEELKKKAT

SEQ ID NO: 128 - protein, 175 aa, Artificial Sequence
  Synthetic
SEMDDVLKKLAETVKRIIERLKKLTDDSRRLVEEVHRRNDKLSKESREAVRKAEERNIDEKDVRKLLEDLKKKSEEVAERNKRILDTLREISKRAEDEVRKVLKELEKTLKELEDRDHMVLHEYVNAAGITDEVRKALKRHKDENDKLLKEIEDSLRRHKEENDRLLEKLKESTR

SEQ ID NO: 129 - protein, 174 aa, Artificial Sequence
  Synthetic
SEEEVLREAAKTVEKLLDEIRRSLEKVSKRVEDSNRELKESLDRVRERVRELLEELRKNNVDRTLLEDVRRKLERIEERNEEMNDRSRRKLEELRERNRKILEDIRRTLEDLKRRRDHMVLHEYVNAAGITLVDEVDKENKRALRENEERVKTLNRENEEMLKRIEEEVRRATK

SEQ ID NO: 130 - protein, 174 aa, Artificial Sequence
  Synthetic
SESDEVIRDLARLLDELARHVDDSVRRMDEVVKRSTREADELAKRLDELVKEVEKKPGDERVERMVAEIERLVAEVLEELKKKYEKLKREVEENLRRLEETVRDIVEKARKVTEKRDHMVLHEYVNAAGITILEEAKKKHEDVLRRLEDSLRRVAELLKAALDRLREIVDRLRR

SEQ ID NO: 131 - protein, 172 aa, Artificial Sequence
  Synthetic
SRAETVLKEVTDKIKKLADSSDELLRRNKENIDELKKSSEELLRRLTKAIEEIEKGSVDEETLEELIRRVEAELEAHHRELEKNSREDEKRNRDHHAKLEEEMRRVEERLEREGIRDHMVLHEYVNAAGITRRNEKVNEDVKRMNDKLRRDNEDVIRRVEKLLRELEEKRRT

SEQ ID NO: 132 - protein, 175 aa, Artificial Sequence
  Synthetic
SEADDVLKKLAETVKRIIERLKKLTDDSRRLVEEVHRRNDKLSKESAEAVRKAEERGIDEKDVRKLLEDLKKKSEEVAERNKRILDTLREISKRAEDEVRKVLKELEKTLKELEDRDHMVLHEYVNAAGITDEVRKALARHKDENDKLLKEIEDSLRRHKEENDRLLEKLKESTR

SEQ ID NO: 133 - protein, 174 aa, Artificial Sequence
  Synthetic
KELEDVIEEVKKLLKTVNEESRRVAEEVRKLIREVSEELTEVIRRVERLVEEVAKGVDSEEALDAVRKRIEELVRRVEEVNAASKRRIEELEDELRKVDEESRETIERLIDLLRRRDHMVLHEYVNAAGITKNRKLAEEVLRRVKKIVEENRKIASEVLDDVRKLVEDVLARAS

SEQ ID NO: 134 - protein, 175 aa, Artificial Sequence
  Synthetic
SEIERVKKRLEELLAEVEESTRRLEERLKRLLEEAKRSSEEVEKELRRLLEAVRRGLSRDEKLVSELEARVKELLEDSRASLEELKKRVRKLAEDSARLLEEVKREVEKLKAKLDRDHMVLHEYVNAAGITKRAHDENERLIREVEELVRAHNKRNKELVDEVKRLVEKVIEEER

SEQ ID NO: 135 - protein, 174 aa, Artificial Sequence
  Synthetic
SEDETIRRIVRTVHEESRKSTEDVRREVERVLRESEEVVKKVKKKVDDVLKRVEETGISEELEERMRRIIREIREHLKDNLRRVREVIERIERKLEETERRDEKVLREIEKKIRDGRDHMVLHEYVNAAGITTIRENEEIAKEVREIVERSIKNLEEVAEEVERVVRELIEARR

SEQ ID NO: 136 - protein, 174 aa, Artificial Sequence
  Synthetic
SRDEKIRDILRRVLKEVRDSTKKVEEDLEDVHRRTEEELRKVKKRLDEVLKRVRDEGASEELKRRMEEVVRRIEELLKKLLKEDRDVVKEIRDKLDETRKEMEEVAERIKDKIRRGRDHMVLHEYVNAAGITLIDLNRRIAEEVDKIVRDSIKKVEEIVTEVEKIVEKLIRDVR

SEQ ID NO: 137 - protein, 173 aa, Artificial Sequence
  Synthetic
SLEELLEEARKTVERLIRESERVLRESEERVRRLIEELERVVRETRKRVKEVIERVEDEEALKELEKLLREDSKRVKEVLDDLRRDLERNKRRNEKVLRELEELLKRLEELVREGVRDHMVLHEYVNAAGITKEMLKRDEDTLREIERKVKEAVRDSERTLEEIEKRVTEEKT

SEQ ID NO: 138 - protein, 175 aa, Artificial Sequence
  Synthetic
SEKEDLERELEEVRRRVEESLRKNEEDVKRVRDELKKLLDENRKELERIRREVERANVDKRVLDEADRLLKELEDDHKKLEEDAKKALDELREEHKRLEETLRRMLKRIKEVLDRERDHMVLHEYVNAAGITDIERVSRELNKKLEEIVRRLKKVSDELNRRIEEIAERVRRRRK

SEQ ID NO: 139 - protein, 177 aa, Artificial Sequence
  Synthetic
SAIEKVKEVVERVLETVRDSVRRSHEESKRLIDKVRKRLEEVREEVKELIERVRRKGIPERMVEKLERDLEELLKEIKDTIDRIEEELRTSNRRLKETNDEIAKRLEELLRELSRDRDHMVLHEYVNAAGITIRDLNKKNDDNVRRVKEVIDRAEKLVRDLLREIRKLIEKLIRDTE

SEQ ID NO: 140 - protein, 177 aa, Artificial Sequence
  Synthetic
SVLEEVRRRVEELLKTVKESVDRSHERSERLIEEVRESLKEVKRRVKELVERVREKGIPEDRVKRIEDKLREELERLERENRKIEEDLKRSNDELRRENERIAERLEELLRELSRDRDHMVLHEYVNAAGITIREANERNKRNLEDVERVIRELNKENERVLREVEKKIEKLIRETE

SEQ ID NO: 141 - protein, 174 aa, Artificial Sequence
  Synthetic
DELRDVKRELDRLLRENEEIVERIAETVRRLLEELKKLTKELAEELRKLLEELRKRGVPEKELKEVADTLRKLLKDIERSNKEVEDRLRKLLEEIKESTDRLREELEEVEKLLRGGRDHMVLHEYVNAAGITNKRRMRRVLEEAKRLAKEDKERIDKIRKEIEELIKRLKDKAT

SEQ ID NO: 142 - protein, 174 aa, Artificial Sequence
  Synthetic
REIEEAAKDLDRLLEENKKLVKEVEEELRRLLKENRDLVKESEDRIRKLLEELRRRGVPEEELKEVEERARRVIEESRRSSKELEKRLRELLEELRRSTKELEDRLREIKKLLRNGRDHMVLHEYVNAAGITNKEKIRKILEDVKKLSEDNKRRNEELSRRVKTLVDEIKKRAT

SEQ ID NO: 143 - protein, 177 aa, Artificial Sequence
  Synthetic
SEAEKVVEELKKLLREVEKKIRDHTEDVKRILEELERRLRKHSEEVRRTAKELKDKNSDDDTVRKVKEELDRSHEKLREELRKVAKELKESNEELERDLKRLVEEAEDRLRRLKDRRDHMVLHEYVNAAGITKRTLDKLLRENRETLKRIEDRLRELLEENRKLLEKIERELRERSR

SEQ ID NO: 144 - protein, 177 aa, Artificial Sequence
  Synthetic
DEVEDILRKVEEIVKKSITDARRLLKEAREIVEESIKTAEELLRRNEDIVRKLSEDVKRTTDEEKKKKLEEESRRVLEKTKRDLDRTKDDNRKALEKIRKRVKETEEENREVVDRVRDHMVLHEYVNAAGITVDDSVRVNREVLKRVEEVLEESKRVNEKVEEDVRRVHEEVRKEIK

SEQ ID NO: 145 - protein, 174 aa, Artificial Sequence
  Synthetic
SESDEVIRDLARLLDELARHVDDSVRRMDEVVKRSTREADELAKRLDELVKEVEKKPGDERVERMVAEIERLVAEVLEELKKKYEKLKREVEENLRRLEETVRDIVEKARKVTEKGRDHMVLHEYVNAAGITLEEAKKKHEDVLRRLEDSLRRVAELLKAALDRLREIVDRLRR

SEQ ID NO: 146 - protein, 174 aa, Artificial Sequence
  Synthetic
SESDDVIRKLRELLEELRTHVEKSIRDLRKILEDSTRHAKRSIEELERLLEEVRKKPGDEEVRKTVEEISRRVAENVKRLEDLYRRMEEEVKKNLDRLRKRVEDIIREVEEARKKGRDHMVLHEYVNAAGITLRRAAEAHKKLIDDARESLERAKREHEKLIDRLKKILEELER

SEQ ID NO: 147 - protein, 174 aa, Artificial Sequence
  Synthetic
KEVEDAVKELEDLLRANEDKTRSIVEDMRASNKDLEDHSRASEEEVRKLLDDLRRAGVPRDSLKRLAEDVERVTRESRELLERVHRADRELIERLKESNERLRRAIEEIRKAIKGGRDHMVLHEYVNAAGITDAERLDRLRRESEELNERVRRVDKKLLEEIRRKAKKVEDDTR

SEQ ID NO: 148 - protein, 176 aa, Artificial Sequence
  Synthetic
STAETVEKKVEEVIRENEKSMRESEEKVDRSTKRIEDVLRRLEETIRKTSDDIAKGVKGERVKEVLEENRRLLEEAKKLVDEVLETNKKLLEDDKRLNEEVSKTLKKLLEEIKSVDRDHMVLHEYVNAAGITDEARKLNEETIRRSEELVRRIERVIEEIIKRSEKLLEDVARESK

SEQ ID NO: 149 - protein, 175 aa, Artificial Sequence
  Synthetic
SEADDVLKKLAETVKRIIERLKKLTDDSRRLVEEVHRRNDKLSKESAEAVRKAEERGIDEKDVRKLLEDLKKKSEEVAERNKRILDTLREISKRAEDEVRKVLKELEKTLKELEDRRDHMVLHEYVNAAGITEVRKALARHKDENDKLLKEIEDSLRRHKEENDRLLEKLKESTR

SEQ ID NO: 150 - protein, 174 aa, Artificial Sequence
  Synthetic
KELEDVIEEVKKLLKTVNEESRRVAEEVRKLIREVSEELTEVIRRVERLVEEVAKGVDSEEALDAVRKRIEELVRRVEEVNAASKRRIEELEDELRKVDEESRETIERLIDLLRRGRDHMVLHEYVNAAGITNRKLAEEVLRRVKKIVEENRKIASEVLDDVRKLVEDVLARAS

SEQ ID NO: 151 - protein, 175 aa, Artificial Sequence
  Synthetic
SEIERVKKRLEELLAEVEESTRRLEERLKRLLEEAKRSSEEVEKELRRLLEAVRRGLSRDEKLVSELEARVKELLEDSRASLEELKKRVRKLAEDSARLLEEVKREVEKLKAKLDRRDHMVLHEYVNAAGITRAHDENERLIREVEELVRAHNKRNKELVDEVKRLVEKVIEEER

SEQ ID NO: 152 - protein, 173 aa, Artificial Sequence
  Synthetic
STEDVLRKIKEDVKRVIDDNRRILDEVRRTSKRVLDDLRANLKHIAEEVERVLRGSDSEEVVRELAKILDEIREEHRRLIRTNEKVLEDIERDHRRISEELKRILDEVDELLRGGKRDHMVLHEYVNAAGITKRLAEESLKRLEDLSRDHKRRAKELNDEIAKVVDELAKRAT

SEQ ID NO: 153 - protein, 177 aa, Artificial Sequence
  Synthetic
SEDEDLDRVAEKLAREHKKSVEEIKRVLKSADEESKKLVRDTERVIEEIKREVEEARRGNIDEELVERLKKKIEDILRTLEERHKKLIKELREILKRLSDESRRLAEETEKVLEDLRDHMVLHEYVNAAGITVRRVKEENRKVNEEVEKRLRELEEENKKVIEDLKSTVEELVERLR

SEQ ID NO: 154 - protein, 177 aa, Artificial Sequence; identical to SEQ ID NO: 153
  Synthetic

SEQ ID NO: 155 - protein, 177 aa, Artificial Sequence
  Synthetic
SKEDRLREELKKLLARLAEEIERLKRALEESNKDLKRTIDASEKHLRDVNEDVKRGGVSEELLRELERSTAENKERAKELLKRHEDLVRKVEKELADLLRRLEEIVARVDEALKRGRDHMVLHEYVNAAGITIREIEKRLEELLKRVEKLTEDAKRDLERSNREHKELADRIKETAR

SEQ ID NO: 156 - protein, 178 aa, Artificial Sequence
  Synthetic
DEVEKLLRDLEELDRDIERKVRELLKRNKEVLDDIEREVRRLEKELRRIIKEVADVIRKTTDKRTVDKLLKELEKILKEVLDRVRRLLEEAKESLDRSREEIERLLEESKTLVDEVRRDHMVLHEYVNAAGITRDLIERAKRETDRLLEEAERLMREVVDRVRKILEEAKRLIDEARR

SEQ ID NO: 157 - protein, 174 aa, Artificial Sequence
  Synthetic
SEDETIRRIVRTVHEESRKSTEDVRREVERVLRESEEVVKKVKKKVDDVLKRVEETGISEELEERMRRIIREIREHLKDNLRRVREVIERIERKLEETERRDEKVLREIEKKIRDGDRDHMVLHEYVNAAGITIRENEEIAKEVREIVERSIKNLEEVAEEVERVVRELIEARR

SEQ ID NO: 158 - protein, 174 aa, Artificial Sequence
  Synthetic
SRDEKIRDILRRVLKEVRDSTKKVEEDLEDVHRRTEEELRKVKKRLDEVLKRVRDEGASEELKRRMEEVVRRIEELLKKLLKEDRDVVKEIRDKLDETRKEMEEVAERIKDKIRRGDRDHMVLHEYVNAAGITIDLNRRIAEEVDKIVRDSIKKVEEIVTEVEKIVEKLIRDVR

SEQ ID NO: 159 - protein, 170 aa, Artificial Sequence
  Synthetic
SEVEDVVRKVEKLVRDLIKHVEENVRRVEEVVRKLIEEIKRIAEEITRIAEELAKEPGSEDLLRKLEKVLKEIDDKLKELEDRLRDMVRRSRESSEENERRLKRVEDEVRRNGISEERDHMVLHEYVNAAGITRESREVTRRVLEEAKEMLERVKKIVKEVIEKVRRVVK

SEQ ID NO: 160 - protein, 178 aa, Artificial Sequence
  Synthetic
DDLERVLKEIKKAADKIREDNKRTADKIRKRVKELDDETRDMLRRIRKLVKEIKERVRGREEARKVIEELKKLVDEVRKRNEKSIEELKKLLKEDRDLMRRVIEELEDLVRRLREEVRDHMVLHEYVNAAGITIRDLRRVLKETSDRVRELIDKHRRLSEEVEKDVKRLIDELKKKTD

SEQ ID NO: 161 - protein, 175 aa, Artificial Sequence
  Synthetic
SEKEDLERELEEVRRRVEESLRKNEEDVKRVRDELKKLLDENRKELERIRREVERANVDKRVLDEADRLLKELEDDHKKLEEDAKKALDELREEHKRLEETLRRMLKRIKEVLDRESRDHMVLHEYVNAAGITIERVSRELNKKLEEIVRRLKKVSDELNRRIEEIAERVRRRRK

SEQ ID NO: 162 - protein, 175 aa, Artificial Sequence
  Synthetic
SEEDELRRLLKEVNERVERLLDEIRKELEKIAEELRDLLKKNEDKLREIKRRVEENRVDEEIKKDAERALTELKEEHERLDREAKKDLDRIRKELERLEEEHRRVSERIEEVLDKESRDHMVLHEYVNAAGITTRRVIEEIKKELRDILEKLRRVSEELNKKLDEILKRIEDRTR

SEQ ID NO: 163 - protein, 178 aa, Artificial Sequence
  Synthetic
SSIERVEKEVRRLLRESDESLKRVMEEAKELIKSVRESTKRVEEDARDLLRKVVERTGDEREDLRRVLEELRKLIEDNRREDKRSEDELRKLIRDNKEENDRARREAEKLLEDLSRGRDHMVLHEYVNAAGITIEKLKEDDKRSLERIERIVRRNNELNKESVDRIRKIIKEMEERAD

SEQ ID NO: 164 - protein, 177 aa, Artificial Sequence
  Synthetic
SVIERVEEEMEKVIRDSERVTKEVEDRAREVHERSEKRIREVEETSRRVLEELRRAGVDKRILDELRKRIKDSREDLERINEELRRALRKLLEDSKRINEELRKTLEELRKRLERVDRDHMVLHEYVNAAGITEDSIRKLEELARRVDELVRESIERVDRNVEENKRLVREAIERRR

SEQ ID NO: 165 - protein, 177 aa, Artificial Sequence
  Synthetic
SEAEKVVEELKKLLREVEKKIRDHTEDVKRILEELERRLRKHSEEVRRTAKELKDKNSDDDTVRKVKEELDRSHEKLREELRKVAKELKESNEELERDLKRLVEEAEDRLRRLKDRVRDHMVLHEYVNAAGITRTLDKLLRENRETLKRIEDRLRELLEENRKLLEKIERELRERSR

SEQ ID NO: 166 - protein, 174 aa, Artificial Sequence
  Synthetic
EELERILDKVRKVIEEVRKRLRDDLRTVEKVLKETEEVLRRAAERAKRALERVEEAARRGRDRREIKEELKKVLDDLRELLRALEEKNRRVNKENEDSLRKIEEDLRDVLRKLEEEIRDHMVLHEYVNAAGITREEVERVLRKSNELSTRIKKRIDDVLETLERLLKELDDKLR

SEQ ID NO: 167 - protein, 178 aa, Artificial Sequence
  Synthetic
SKVEKLEEEIARLVERSRRLVEELKKEVTKVKEKVDEIVERSRRHVKKVVEKLRDIKRRGGSEEVLRRVTEELKKVLEDNRRVIEEVLRDLERILEELKRKAEEVTKRNRDDLKRLRRDHMVLHEYVNAAGITDRSEKELRTVLRDVTEDIKRIAEELKKALEDSTEIIRRAEDELRT

SEQ ID NO: 168 - protein, 177 aa, Artificial Sequence
  Synthetic
DEVEDILRKVEEIVKKSITDARRLLKEAREIVEESIKTAEELLRRNEDIVRKLSEDVKRTTDEEKKKKLEEESRRVLEKTKRDLDRTKDDNRKALEKIRKRVKETEEENREVVDRVRRDHMVLHEYVNAAGITDDSVRVNREVLKRVEEVLEESKRVNEKVEEDVRRVHEEVRKEIK

SEQ ID NO: 169 - protein, 175 aa, Artificial Sequence
  Synthetic
SEVDEVLREAKRIVDEVHKDNERATEESRRLVKKVHEENEEMVKDIERIVKEVKDANIDEKLVTEILKEIEEALKEAARRNKEVKDRLRELSRRVSERNREILEELKERLDRVRERRRDHMVLHEYVNAAGITIEESLRRHRKENKRLLEELDRSLRELAKIVKEVLDEIRERTR

SEQ ID NO: 170 - protein, 175 aa, Artificial Sequence
  Synthetic
SEMDDVLKKLAETVKRIIERLKKLTDDSRRLVEEVHRRNDKLSKESREAVRKAEERNIDEKDVRKLLEDLKKKSEEVAERNKRILDTLREISKRAEDEVRKVLKELEKTLKELEDRRRDHMVLHEYVNAAGITVRKALKRHKDENDKLLKEIEDSLRRHKEENDRLLEKLKESTR

SEQ ID NO: 171 - protein, 178 aa, Artificial Sequence
  Synthetic
SEEEKLKEVKDRIREVLRKLEEHTDKVKKEVEKVLRDIRRTTDELKKEVRAMLERLRRKKKDAEDLLRELEKIIEEIERELDRVLEENDKMAEEWKKLLDKVLDDNRKSIRDIEKELRDHMVLHEYVNAAGITLRDDEETNRDVVKKVREAVKKDADTNRKVIEEVKKVLEDAARRLD

SEQ ID NO: 172 - protein, 176 aa, Artificial Sequence
  Synthetic
REAEEAKEEVEELNRRNKKELDDARRRVDELDKRNKDRLKESSDRVKRLVEELERVKEEGRSDDRLREKIERMLKTSADELERLKEENKRALRDLAERLRELIERNRRKLEEITRRTRDHMVLHEYVNAAGITSIRELERVLEELAEKIDRSLKELDDVLRKNETDLKRVIEDLKR

SEQ ID NO: 173 - protein, 174 aa, Artificial Sequence
  Synthetic
SEEEVLREAAKTVEKLLDEIRRSLEKVSKRVEDSNRELKESLDRVRERVRELLEELRKNNVDRTLLEDVRRKLERIEERNEEMNDRSRRKLEELRERNRKILEDIRRTLEDLKRRQLRDHMVLHEYVNAAGITDEVDKENKRALRENEERVKTLNRENEEMLKRIEEEVRRATK

SEQ ID NO: 174 - protein, 178 aa, Artificial Sequence
  Synthetic
DAEELVRELEERIKRSHERLEELLREVKRLIERSHEELKRLNEEVLRELDRVLDEVAKRGSDSEELLRELEERVARIKERSKESYARSKESLDRAKEVLEELYRASKRSLEEFERELRDHMVLHEYVNAAGITVKENAELAERVFREVEKIVRENTKLAEDSVRELKRLVEELKKRAK

SEQ ID NO: 175 - protein, 174 aa, Artificial Sequence
  Synthetic
SESDEVIRDLARLLDELARHVDDSVRRMDEVVKRSTREADELAKRLDELVKEVEKKPGDERVERMVAEIERLVAEVLEELKKKYEKLKREVEENLRRLEETVRDIVEKARKVTEKGVRDHMVLHEYVNAAGITEEAKKKHEDVLRRLEDSLRRVAELLKAALDRLREIVDRLRR

SEQ ID NO: 176 - protein, 174 aa, Artificial Sequence
  Synthetic
SESDDVIRKLRELLEELRTHVEKSIRDLRKILEDSTRHAKRSIEELERLLEEVRKKPGDEEVRKTVEEISRRVAENVKRLEDLYRRMEEEVKKNLDRLRKRVEDIIREVEEARKKGVRDHMVLHEYVNAAGITRRAAEAHKKLIDDARESLERAKREHEKLIDRLKKILEELER

SEQ ID NO: 177 - protein, 172 aa, Artificial Sequence
  Synthetic
SRAETVLKEVTDKIKKLADSSDELLRRNKENIDELKKSSEELLRRLTKAIEEIEKGSVDEETLEELIRRVEAELEAHHRELEKNSREDEKRNRDHHAKLEEEMRRVEERLEREGIDDRDHMVLHEYVNAAGITNEKVNEDVKRMNDKLRRDNEDVIRRVEKLLRELEEKRRT

SEQ ID NO: 178 - protein, 178 aa, Artificial Sequence
  Synthetic
SEAEKAKETIDRLADRVRKLLEEIKRSLDDSRRKSKETVEENEKTLDRMRKEVDAAKRGSVSEEELERLIRKLKKTLDELRRRHEKLVEDLRRNLERIKRRLEELTREMRETLERLARDHMVLHEYVNAAGITRRLTKELEDVLREYERELRRLEEENKRVIDKTEEEIRRLADRLRR

SEQ ID NO: 179 - protein, 178 aa, Artificial Sequence
  Synthetic
DEARELVKELEDLIREITKTVRRLLEESEELIKRIDDAVDDLRRADEDLNREIKEEIEKGKSKESLEALIERLKESLERVKRTIEKLIRDLERLNEKLRRDVESLVAELEKILSKIKRDHMVLHEYVNAAGITKELEKEAREILKRSEDETDKLREKAERILEDLERANRRTMDEARR

SEQ ID NO: 180 - protein, 175 aa, Artificial Sequence
  Synthetic
SEADDVLKKLAETVKRIIERLKKLTDDSRRLVEEVHRRNDKLSKESAEAVRKAEERGIDEKDVRKLLEDLKKKSEEVAERNKRILDTLREISKRAEDEVRKVLKELEKTLKELEDRRRDHMVLHEYVNAAGITVRKALARHKDENDKLLKEIEDSLRRHKEENDRLLEKLKESTR

SEQ ID NO: 181 - protein, 175 aa, Artificial Sequence
  Synthetic
SEAEEIRRRLEEISRRSVEHLRKVLEEIKRISERSKRHLDRVLEENARRLEELAELLKRGGDKEELLADLKAVHDESRKVIEKNAEENDRALKAAKEVIDENRERNKRVLDEVRKGGRDHMVLHEYVNAAGITEERIKRIEEEIKKIIDKSREDIKRVLEEIERLNAKAADDLRK

SEQ ID NO: 182 - protein, 175 aa, Artificial Sequence
  Synthetic
SEIERVKKRLEELLAEVEESTRRLEERLKRLLEEAKRSSEEVEKELRRLLEAVRRGLSRDEKLVSELEARVKELLEDSRASLEELKKRVRKLAEDSARLLEEVKREVEKLKAKLDRGRDHMVLHEYVNAAGITAHDENERLIREVEELVRAHNKRNKELVDEVKRLVEKVIEEER

SEQ ID NO: 183 - protein, 177 aa, Artificial Sequence
  Synthetic
SEDEDLDRVAEKLAREHKKSVEEIKRVLKSADEESKKLVRDTERVIEEIKREVEEARRGNIDEELVERLKKKIEDILRTLEERHKKLIKELREILKRLSDESRRLAEETEKVLEDLERDHMVLHEYVNAAGITRRVKEENRKVNEEVEKRLRELEEENKKVIEDLKSTVEELVERLR

SEQ ID NO: 184 - protein, 177 aa, Artificial Sequence
  Synthetic
SKEDRLREELKKLLARLAEEIERLKRALEESNKDLKRTIDASEKHLRDVNEDVKRGGVSEELLRELERSTAENKERAKELLKRHEDLVRKVEKELADLLRRLEEIVARVDEALKRGIRDHMVLHEYVNAAGITREIEKRLEELLKRVEKLTEDAKRDLERSNREHKELADRIKETAR

SEQ ID NO: 185 - protein, 174 aa, Artificial Sequence
  Synthetic
SEDETIRRIVRTVHEESRKSTEDVRREVERVLRESEEVVKKVKKKVDDVLKRVEETGISEELEERMRRIIREIREHLKDNLRRVREVIERIERKLEETERRDEKVLREIEKKIRDGDGRDHMVLHEYVNAAGITRENEEIAKEVREIVERSIKNLEEVAEEVERVVRELIEARR

SEQ ID NO: 186 - skipped

SEQ ID NO: 187 - protein, 178 aa, Artificial Sequence
  Synthetic
DDLERVLKEIKKAADKIREDNKRTADKIRKRVKELDDETRDMLRRIRKLVKEIKERVRGREEARKVIEELKKLVDEVRKRNEKSIEELKKLLKEDRDLMRRVIEELEDLVRRLREEVRRDHMVLHEYVNAAGITRDLRRVLKETSDRVRELIDKHRRLSEEVEKDVKRLIDELKKKTD

SEQ ID NO: 188 - protein, 175 aa, Artificial Sequence
  Synthetic
SEKEDLERELEEVRRRVEESLRKNEEDVKRVRDELKKLLDENRKELERIRREVERANVDKRVLDEADRLLKELEDDHKKLEEDAKKALDELREEHKRLEETLRRMLKRIKEVLDRESDRDHMVLHEYVNAAGITERVSRELNKKLEEIVRRLKKVSDELNRRIEEIAERVRRRRK

SEQ ID NO: 189 - protein, 175 aa, Artificial Sequence
  Synthetic
SEEDELRRLLKEVNERVERLLDEIRKELEKIAEELRDLLKKNEDKLREIKRRVEENRVDEEIKKDAERALTELKEEHERLDREAKKDLDRIRKELERLEEEHRRVSERIEEVLDKESDRDHMVLHEYVNAAGITRRVIEEIKKELRDILEKLRRVSEELNKKLDEILKRIEDRTR

SEQ ID NO: 190 - protein, 174 aa, Artificial Sequence
  Synthetic
DELRDVKRELDRLLRENEEIVERIAETVRRLLEELKKLTKELAEELRKLLEELRKRGVPEKELKEVADTLRKLLKDIERSNKEVEDRLRKLLEEIKESTDRLREELEEVEKLLRGGKDRDHMVLHEYVNAAGITRRMRRVLEEAKRLAKEDKERIDKIRKEIEELIKRLKDKAT

SEQ ID NO: 191 - skipped

SEQ ID NO: 192 - protein, 178 aa, Artificial Sequence
  Synthetic
SSKDEIRRRVEEVVERSDEIVKRSREHVKTVVDELDRVVKELERKVREVVKKLDKIRKDGGSEETLKRVLDELREILKELKEEVKKVKRKLEKVVKENRDTIREVEERNRKILDELRKRDHMVLHEYVNAAGITKSEEKLRRVLKESEDIAKEAEDRLKTVLERVERIADEVLKRLTK

SEQ ID NO: 193 - protein, 178 aa, Artificial Sequence
  Synthetic
SKVEKLEEEIARLVERSRRLVEELKKEVTKVKEKVDEIVERSRRHVKKVVEKLRDIKRRGGSEEVLRRVTEELKKVLEDNRRVIEEVLRDLERILEELKRKAEEVTKRNRDDLKRLRDRDHMVLHEYVNAAGITRSEKELRTVLRDVTEDIKRIAEELKKALEDSTEIIRRAEDELRT

SEQ ID NO: 194 - protein, 175 aa, Artificial Sequence
  Synthetic
SEVDEVLREAKRIVDEVHKDNERATEESRRLVKKVHEENEEMVKDIERIVKEVKDANIDEKLVTEILKEIEEALKEAARRNKEVKDRLRELSRRVSERNREILEELKERLDRVRERRKRDHMVLHEYVNAAGITEESLRRHRKENKRLLEELDRSLRELAKIVKEVLDEIRERTR

SEQ ID NO: 195 - protein, 175 aa, Artificial Sequence
  Synthetic
SEMDDVLKKLAETVKRIIERLKKLTDDSRRLVEEVHRRNDKLSKESREAVRKAEERNIDEKDVRKLLEDLKKKSEEVAERNKRILDTLREISKRAEDEVRKVLKELEKTLKELEDRRPRDHMVLHEYVNAAGITRKALKRHKDENDKLLKEIEDSLRRHKEENDRLLEKLKESTR

SEQ ID NO: 196 - protein, 178 aa, Artificial Sequence
  Synthetic
SEEEKLKEVKDRIREVLRKLEEHTDKVKKEVEKVLRDIRRTTDELKKEVRAMLERLRRKKKDAEDLLRELEKIIEEIERELDRVLEENDKMAEEWKKLLDKVLDDNRKSIRDIEKELDRDHMVLHEYVNAAGITRDDEETNRDVVKKVREAVKKDADTNRKVIEEVKKVLEDAARRLD

SEQ ID NO: 197 - protein, 178 aa, Artificial Sequence
  Synthetic
KAAEEIRKKVEDYKRESEKILEEVEDHSRRSKETLKRLLDDLRRAVEELKRRLEELKRRPRTEEIAKRAEEAVRRAAERIKKVIDDVERHIRENAKELKRLLEEDREASRRLEDEIDKRDHMVLHEYVNAAGITRANEESERVLRELAERNKTALEEAERVLRRLKEEIEKVLRKLKK

SEQ ID NO: 198 - protein, 176 aa, Artificial Sequence
  Synthetic
REAEEAKEEVEELNRRNKKELDDARRRVDELDKRNKDRLKESSDRVKRLVEELERVKEEGRSDDRLREKIERMLKTSADELERLKEENKRALRDLAERLRELIERNRRKLEEITRRTVRDHMVLHEYVNAAGITIRELERVLEELAEKIDRSLKELDDVLRKNETDLKRVIEDLKR

SEQ ID NO: 199 - protein, 174 aa, Artificial Sequence
  Synthetic
SEEEVLREAAKTVEKLLDEIRRSLEKVSKRVEDSNRELKESLDRVRERVRELLEELRKNNVDRTLLEDVRRKLERIEERNEEMNDRSRRKLEELRERNRKILEDIRRTLEDLKRRQLPRDHMVLHEYVNAAGITEVDKENKRALRENEERVKTLNRENEEMLKRIEEEVRRATK

SEQ ID NO: 200 - skipped

SEQ ID NO: 201 - protein, 179 aa, Artificial Sequence
  Synthetic
RLEDEVRKMEKEVREEVKRLEDESRKVLEESRRNLDKLREESKRVLDTVRERIKDLRRRGLDERVLRELLKRVREVHERNRKLLDEVRRASEKVHEDNRRILEEVRKTVKDVVDKLRRRDHMVLHEYVNAAGITLEDVEREVKKSIEEVKEINRRLNEEVKKTIEEVKEIVKEVTERAK

SEQ ID NO: 202 - protein, 178 aa, Artificial Sequence
  Synthetic
SEAEKAKETIDRLADRVRKLLEEIKRSLDDSRRKSKETVEENEKTLDRMRKEVDAAKRGSVSEEELERLIRKLKKTLDELRRRHEKLVEDLRRNLERIKRRLEELTREMRETLERLARRDHMVLHEYVNAAGITRLTKELEDVLREYERELRRLEEENKRVIDKTEEEIRRLADRLRR

SEQ ID NO: 203 - protein, 179 aa, Artificial Sequence
  Synthetic
SEVEELIKRLAKVLKELVDKVRKVIEDTKELLERLKRRSEDHIRKLREVLKEAKDQPIDDEELKEILDRLRKTLEELEEELKKALEDDREEAKRLVDDARRVLKELEEEVREIRERRGRDHMVLHEYVNAAGITEEKIREVIKEWERVHREVEELLKRLIDENRKVLDEIRKLLEEKSK

SEQ ID NO: 204 - protein, 178 aa, Artificial Sequence
  Synthetic
DEARELVKELEDLIREITKTVRRLLEESEELIKRIDDAVDDLRRADEDLNREIKEEIEKGKSKESLEALIERLKESLERVKRTIEKLIRDLERLNEKLRRDVESLVAELEKILSKIKRRDHMVLHEYVNAAGITELEKEAREILKRSEDETDKLREKAERILEDLERANRRTMDEARR

SEQ ID NO: 205 - protein, 175 aa, Artificial Sequence
  Synthetic
SEADDVLKKLAETVKRIIERLKKLTDDSRRLVEEVHRRNDKLSKESAEAVRKAEERGIDEKDVRKLLEDLKKKSEEVAERNKRILDTLREISKRAEDEVRKVLKELEKTLKELEDRRPRDHMVLHEYVNAAGITRKALARHKDENDKLLKEIEDSLRRHKEENDRLLEKLKESTR

SEQ ID NO: 206 - protein, 177 aa, Artificial Sequence
  Synthetic
SEDEDLDRVAEKLAREHKKSVEEIKRVLKSADEESKKLVRDTERVIEEIKREVEEARRGNIDEELVERLKKKIEDILRTLEERHKKLIKELREILKRLSDESRRLAEETEKVLEDLERRDHMVLHEYVNAAGITRVKEENRKVNEEVEKRLRELEEENKKVIEDLKSTVEELVERLR

SEQ ID NO: 207 - protein, 177 aa, Artificial Sequence
  Synthetic
ELREDVERVVDEIRRLVEENVRRIDEVAKDIKRLADDNVRRVKELVRKIEEDIRRLKEEGVTEVVDELREEVRKLSEDNRRHSRELIERVKKLLKELEEHSRDLKRRVKELLEDLKRKGRDHMVLHEYVNAAGITERKSRDALRRLEEAIRRVRRESERVNRELDEVIKRVTEELKK

SEQ ID NO: 208 - protein, 174 aa, Artificial Sequence
  Synthetic
SELEKVVKEVADLLRRNLEKSKRVLEEVRRRLEENLRESEKVHDDNRKTARRILELVREGKDKRDLTRLLEEDDKRVKEALDKSRENNERILKEVRRALRESEEDNRRILKEVREKVDSRDHMVLHEYVNAAGITSRRFIEELEKIVEETLTESEKLARASSEITKTVLDEIRK

SEQ ID NO: 209 - protein, 175 aa, Artificial Sequence
  Synthetic
SEKEDLERELEEVRRRVEESLRKNEEDVKRVRDELKKLLDENRKELERIRREVERANVDKRVLDEADRLLKELEDDHKKLEEDAKKALDELREEHKRLEETLRRMLKRIKEVLDRESDKRDHMVLHEYVNAAGITRVSRELNKKLEEIVRRLKKVSDELNRRIEEIAERVRRRRK

SEQ ID NO: 210 - protein, 175 aa, Artificial Sequence
  Synthetic
SEEDELRRLLKEVNERVERLLDEIRKELEKIAEELRDLLKKNEDKLREIKRRVEENRVDEEIKKDAERALTELKEEHERLDREAKKDLDRIRKELERLEEEHRRVSERIEEVLDKESDKRDHMVLHEYVNAAGITRVIEEIKKELRDILEKLRRVSEELNKKLDEILKRIEDRTR

SEQ ID NO: 211 - protein, 177 aa, Artificial Sequence
  Synthetic
SAIEKVKEVVERVLETVRDSVRRSHEESKRLIDKVRKRLEEVREEVKELIERVRRKGIPERMVEKLERDLEELLKEIKDTIDRIEEELRTSNRRLKETNDEIAKRLEELLRELSRDRDKRDHMVLHEYVNAAGITLNKKNDDNVRRVKEVIDRAEKLVRDLLREIRKLIEKLIRDTE

SEQ ID NO: 212 - protein, 179 aa, Artificial Sequence
  Synthetic
SSKEVADELRKKAEKVLDELRKIIRELERKNEDSLRRTEEIVRRLEEEAERVLRDLVRTRGEDDRLVREVERLLRELKRRLEELIRRSEELIKRSREEVDRVIRTVEKLLEELDRLLRARDHMVLHEYVNAAGITEEIKDLARKLAKSSDDTVREDEKLVEELRKDVKRIVRKIKKDLE

SEQ ID NO: 213 - protein, 174 aa, Artificial Sequence
  Synthetic
DELRDVKRELDRLLRENEEIVERIAETVRRLLEELKKLTKELAEELRKLLEELRKRGVPEKELKEVADTLRKLLKDIERSNKEVEDRLRKLLEEIKESTDRLREELEEVEKLLRGGKDVRDHMVLHEYVNAAGITRMRRVLEEAKRLAKEDKERIDKIRKEIEELIKRLKDKAT

SEQ ID NO: 214 - protein, 174 aa, Artificial Sequence
  Synthetic
DEEEDLERRIKKLLDENRELLKRIAEELRRLLEELRRLTEESADRLRRLLKELKDRGVPEKDLRDVAEKVKKVLKESEDSNRDVKRKLEKLLRDLERSTERLEREARKVRKLLRDGKDIRDHMVLHEYVNAAGITLLKKIEKEIRDLIKEDKERNRELSERLRKLVEELKKKAT

SEQ ID NO: 215 - protein, 178 aa, Artificial Sequence
  Synthetic
SSKDEIRRRVEEVVERSDEIVKRSREHVKTVVDELDRVVKELERKVREVVKKLDKIRKDGGSEETLKRVLDELREILKELKEEVKKVKRKLEKVVKENRDTIREVEERNRKILDELRKRRDHMVLHEYVNAAGITSEEKLRRVLKESEDIAKEAEDRLKTVLERVERIADEVLKRLTK

SEQ ID NO: 216 - protein, 178 aa, Artificial Sequence
  Synthetic
SKVEKLEEEIARLVERSRRLVEELKKEVTKVKEKVDEIVERSRRHVKKVVEKLRDIKRRGGSEEVLRRVTEELKKVLEDNRRVIEEVLRDLERILEELKRKAEEVTKRNRDDLKRLRDSRDHMVLHEYVNAAGITSEKELRTVLRDVTEDIKRIAEELKKALEDSTEIIRRAEDELRT

SEQ ID NO: 217 - protein, 175 aa, Artificial Sequence
  Synthetic
SEVDEVLREAKRIVDEVHKDNERATEESRRLVKKVHEENEEMVKDIERIVKEVKDANIDEKLVTEILKEIEEALKEAARRNKEVKDRLRELSRRVSERNREILEELKERLDRVRERRKDRDHMVLHEYVNAAGITESLRRHRKENKRLLEELDRSLRELAKIVKEVLDEIRERTR

SEQ ID NO: 218 - protein, 175 aa, Artificial Sequence
  Synthetic
SEMDDVLKKLAETVKRIIERLKKLTDDSRRLVEEVHRRNDKLSKESREAVRKAEERNIDEKDVRKLLEDLKKKSEEVAERNKRILDTLREISKRAEDEVRKVLKELEKTLKELEDRRPDRDHMVLHEYVNAAGITKALKRHKDENDKLLKEIEDSLRRHKEENDRLLEKLKESTR

SEQ ID NO: 219 - protein, 178 aa, Artificial Sequence
  Synthetic
SEEEKLKEVKDRIREVLRKLEEHTDKVKKEVEKVLRDIRRTTDELKKEVRAMLERLRRKKKDAEDLLRELEKIIEEIERELDRVLEENDKMAEEWKKLLDKVLDDNRKSIRDIEKELDDRDHMVLHEYVNAAGITDDEETNRDVVKKVREAVKKDADTNRKVIEEVKKVLEDAARRLD

SEQ ID NO: 220 - protein, 179 aa, Artificial Sequence
  Synthetic
RLEDEVRKMEKEVREEVKRLEDESRKVLEESRRNLDKLREESKRVLDTVRERIKDLRRRGLDERVLRELLKRVREVHERNRKLLDEVRRASEKVHEDNRRILEEVRKTVKDVVDKLRRVRDHMVLHEYVNAAGITEDVEREVKKSIEEVKEINRRLNEEVKKTIEEVKEIVKEVTERAK

SEQ ID NO: 221 - protein, 174 aa, Artificial Sequence
  Synthetic
SESDEVIRDLARLLDELARHVDDSVRRMDEVVKRSTREADELAKRLDELVKEVEKKPGDERVERMVAEIERLVAEVLEELKKKYEKLKREVEENLRRLEETVRDIVEKARKVTEKGVSKRDHMVLHEYVNAAGITAKKKHEDVLRRLEDSLRRVAELLKAALDRLREIVDRLRR

SEQ ID NO: 222 - protein, 179 aa, Artificial Sequence
  Synthetic
SEVEELIKRLAKVLKELVDKVRKVIEDTKELLERLKRRSEDHIRKLREVLKEAKDQPIDDEELKEILDRLRKTLEELEEELKKALEDDREEAKRLVDDARRVLKELEEEVREIRERRGERDHMVLHEYVNAAGITEKIREVIKEWERVHREVEELLKRLIDENRKVLDEIRKLLEEKSK

SEQ ID NO: 223 - protein, 178 aa, Artificial Sequence
  Synthetic
DDAERILREMERLLEENKEISDEIAKELKRLLDENRKLSEDVVKALEDLLRDLERRSGVSEEVLKRVREVLERIKRELDRSDDELRKVAERILRDAERSNDELRKVIEEIEEELRGSRDRDHMVLHEYVNAAGITENKERLKELLRELKKLSDENKERIKKLLSDAEKIIEDVARRAK

SEQ ID NO: 224 - protein, 178 aa, Artificial Sequence
  Synthetic
DEARELVKELEDLIREITKTVRRLLEESEELIKRIDDAVDDLRRADEDLNREIKEEIEKGKSKESLEALIERLKESLERVKRTIEKLIRDLERLNEKLRRDVESLVAELEKILSKIKRGRDHMVLHEYVNAAGITLEKEAREILKRSEDETDKLREKAERILEDLERANRRTMDEARR

SEQ ID NO: 225 - protein, 180 aa, Artificial Sequence
  Synthetic
REVEEMIKELEELLKDLKEKNERASKRNRELVRRLEEENKRVIEELKKLVKELEDLVRSGEDEEVLREVLKRLEEVLERVRALNERVLEAIEKSLEEVKASNEAVKRRLKELLEEAERGRDHMVLHEYVNAAGITAKRIDELDEYTRESIRRAKKEIERLNRETKKVIEEVVKRIEEERK

SEQ ID NO: 226 - protein, 178 aa, Artificial Sequence
  Synthetic
SDAEELLKRVADLLKASLESLEKILRDSKELMDRWRKKLEDLLRESEELVDRAEKILRRGGSDKEVLDKIAEEVRRTNDDSRRLDEELHRLSRDTLRKLEENLRRTEKEVREMDKRAAERDHMVLHEYVNAAGITRVEEEHRKVLETDKKILKEAHKESKEVNDRDRELLERLEESVR

SEQ ID NO: 227 - protein, 175 aa, Artificial Sequence
  Synthetic
SEIERVKKRLEELLAEVEESTRRLEERLKRLLEEAKRSSEEVEKELRRLLEAVRRGLSRDEKLVSELEARVKELLEDSRASLEELKKRVRKLAEDSARLLEEVKREVEKLKAKLDRGGDRDHMVLHEYVNAAGITDENERLIREVEELVRAHNKRNKELVDEVKRLVEKVIEEER

SEQ ID NO: 228 - protein, 180 aa, Artificial Sequence
  Synthetic
SAEELLREVAELVKRVDEDLRRLLEEVRASNEEVIRRLEEILKRIEEENRKVVEELRRGGVSEDLVRESKRLVDESRRVIEKLVKESADSVERTRETVDRLREELKRLVEEIAKMVKGGRDHMVLHEYVNAAGITLERLKRTIEELLKRNRDLLADAEEKARRLLEENRKLLKAARDTAT

SEQ ID NO: 229 - protein, 177 aa, Artificial Sequence
  Synthetic
SEDEDLDRVAEKLAREHKKSVEEIKRVLKSADEESKKLVRDTERVIEEIKREVEEARRGNIDEELVERLKKKIEDILRTLEERHKKLIKELREILKRLSDESRRLAEETEKVLEDLERKRDHMVLHEYVNAAGITVKEENRKVNEEVEKRLRELEEENKKVIEDLKSTVEELVERLR

SEQ ID NO: 230 - protein, 181 aa, Artificial Sequence
  Synthetic
SEVERVLEDLRRLVRDVEEKLRRIIERDRRLVEEVERENRKTIRKIEELLRKVLEELKDISDKKTIERIVREIIKEARDLVRRNHERNREIVDESRRLVEELRRIVEEIIRRLRELLERVRDHMVLHEYVNAAGITEKRLRELLKELEKTSRDLKKRLEELDRELKALVEKVERDLEELRK

SEQ ID NO: 231 - protein, 177 aa, Artificial Sequence
  Synthetic
KEEEDLEREVKRLEDKVREDAKKLEEVVKTVEKLVRDDARRNEEVVKEVADRVRRLTERKLDEETLRKVKEDLKRTLERLKRENEKSLEELRDILRRLKKENDDTLKELRDELKRLTDSGRDHMVLHEYVNAAGITEEVSREVEKRLRRIIRELERVSKEVLDRLREIIEKLDRDAT

SEQ ID NO: 232 - protein, 174 aa, Artificial Sequence
  Synthetic
SEDETIRRIVRTVHEESRKSTEDVRREVERVLRESEEVVKKVKKKVDDVLKRVEETGISEELEERMRRIIREIREHLKDNLRRVREVIERIERKLEETERRDEKVLREIEKKIRDGDGRERDHMVLHEYVNAAGITNEEIAKEVREIVERSIKNLEEVAEEVERVVRELIEARR

SEQ ID NO: 233 - protein, 174 aa, Artificial Sequence
  Synthetic
SRDEKIRDILRRVLKEVRDSTKKVEEDLEDVHRRTEEELRKVKKRLDEVLKRVRDEGASEELKRRMEEVVRRIEELLKKLLKEDRDVVKEIRDKLDETRKEMEEVAERIKDKIRRGDGRERDHMVLHEYVNAAGITNRRIAEEVDKIVRDSIKKVEEIVTEVEKIVEKLIRDVR

SEQ ID NO: 234 - protein, 181 aa, Artificial Sequence
  Synthetic
DEERKLEKSLKDVEDTHRRLLEKNDEDLKELRKRVEDMLRRLEDALRRILEDIEEKLKRIEDDETLKRLRKRVKELLDEIRRRLERLEREVDKRLEEIKERNDRHHEEAKKELKRIRDKIRDHMVLHEYVNAAGITLRKVAEDLKRSNDEVKELAERLEETIRDLLRRIEEILKEIEERVR

SEQ ID NO: 235 - protein, 181 aa, Artificial Sequence
  Synthetic
DEEETLEDVLRELEERVEKLLRDLTRDLERVEKEHKELLKRNKEAIDEIEKRIEELLKRIEDDEKLRRLKEEVRKLVEESRERNKRHHKEVREVLERIRELLERLEKELRRALEEIRDKIRDHMVLHEYVNAAGITLRRAEEVIRDLERKVRKLERDIRENIKKNHREVREILRKIEEDVR

SEQ ID NO: 236 - protein, 175 aa, Artificial Sequence
  Synthetic
SEKEDLERELEEVRRRVEESLRKNEEDVKRVRDELKKLLDENRKELERIRREVERANVDKRVLDEADRLLKELEDDHKKLEEDAKKALDELREEHKRLEETLRRMLKRIKEVLDRESDKMRDHMVLHEYVNAAGITVSRELNKKLEEIVRRLKKVSDELNRRIEEIAERVRRRRK

SEQ ID NO: 237 - protein, 177 aa, Artificial Sequence
  Synthetic
SAIEKVKEVVERVLETVRDSVRRSHEESKRLIDKVRKRLEEVREEVKELIERVRRKGIPERMVEKLERDLEELLKEIKDTIDRIEEELRTSNRRLKETNDEIAKRLEELLRELSRDRDKDRDHMVLHEYVNAAGITNKKNDDNVRRVKEVIDRAEKLVRDLLREIRKLIEKLIRDTE

SEQ ID NO: 238 - protein, 178 aa, Artificial Sequence
  Synthetic
SSIERVEKEVRRLLRESDESLKRVMEEAKELIKSVRESTKRVEEDARDLLRKVVERTGDEREDLRRVLEELRKLIEDNRREDKRSEDELRKLIRDNKEENDRARREAEKLLEDLSRGRSERDHMVLHEYVNAAGITLKEDDKRSLERIERIVRRNNELNKESVDRIRKIIKEMEERAD

SEQ ID NO: 239 - protein, 174 aa, Artificial Sequence
  Synthetic
DELRDVKRELDRLLRENEEIVERIAETVRRLLEELKKLTKELAEELRKLLEELRKRGVPEKELKEVADTLRKLLKDIERSNKEVEDRLRKLLEEIKESTDRLREELEEVEKLLRGGKDVERDHMVLHEYVNAAGITMRRVLEEAKRLAKEDKERIDKIRKEIEELIKRLKDKAT

SEQ ID NO: 240 - protein, 174 aa, Artificial Sequence
  Synthetic
DEEEDLERRIKKLLDENRELLKRIAEELRRLLEELRRLTEESADRLRRLLKELKDRGVPEKDLRDVAEKVKKVLKESEDSNRDVKRKLEKLLRDLERSTERLEREARKVRKLLRDGKDIERDHMVLHEYVNAAGITLKKIEKEIRDLIKEDKERNRELSERLRKLVEELKKKAT

SEQ ID NO: 241 - protein, 178 aa, Artificial Sequence
  Synthetic
SKVEKLEEEIARLVERSRRLVEELKKEVTKVKEKVDEIVERSRRHVKKVVEKLRDIKRRGGSEEVLRRVTEELKKVLEDNRRVIEEVLRDLERILEELKRKAEEVTKRNRDDLKRLRDSGRDHMVLHEYVNAAGITEKELRTVLRDVTEDIKRIAEELKKALEDSTEIIRRAEDELRT

SEQ ID NO: 242 - protein, 177 aa, Artificial Sequence
  Synthetic
DEVEDILRKVEEIVKKSITDARRLLKEAREIVEESIKTAEELLRRNEDIVRKLSEDVKRTTDEEKKKKLEEESRRVLEKTKRDLDRTKDDNRKALEKIRKRVKETEEENREVVDRVRKAGRDHMVLHEYVNAAGITVRVNREVLKRVEEVLEESKRVNEKVEEDVRRVHEEVRKEIK

SEQ ID NO: 243 - protein, 178 aa, Artificial Sequence
  Synthetic
SEEEKLKEVKDRIREVLRKLEEHTDKVKKEVEKVLRDIRRTTDELKKEVRAMLERLRRKKKDAEDLLRELEKIIEEIERELDRVLEENDKMAEEWKKLLDKVLDDNRKSIRDIEKELDDRRDHMVLHEYVNAAGITDEETNRDVVKKVREAVKKDADTNRKVIEEVKKVLEDAARRLD

SEQ ID NO: 244 - protein, 176 aa, Artificial Sequence
  Synthetic
REAEEAKEEVEELNRRNKKELDDARRRVDELDKRNKDRLKESSDRVKRLVEELERVKEEGRSDDRLREKIERMLKTSADELERLKEENKRALRDLAERLRELIERNRRKLEEITRRTVPDRDHMVLHEYVNAAGITELERVLEELAEKIDRSLKELDDVLRKNETDLKRVIEDLKR

SEQ ID NO: 245 - protein, 179 aa, Artificial Sequence
  Synthetic
RLEDEVRKMEKEVREEVKRLEDESRKVLEESRRNLDKLREESKRVLDTVRERIKDLRRRGLDERVLRELLKRVREVHERNRKLLDEVRRASEKVHEDNRRILEEVRKTVKDVVDKLRRVDRDHMVLHEYVNAAGITDVEREVKKSIEEVKEINRRLNEEVKKTIEEVKEIVKEVTERAK

SEQ ID NO: 246 - protein, 174 aa, Artificial Sequence
  Synthetic
SESDEVIRDLARLLDELARHVDDSVRRMDEVVKRSTREADELAKRLDELVKEVEKKPGDERVERMVAEIERLVAEVLEELKKKYEKLKREVEENLRRLEETVRDIVEKARKVTEKGVSKERDHMVLHEYVNAAGITKKKHEDVLRRLEDSLRRVAELLKAALDRLREIVDRLRR

SEQ ID NO: 247 - protein, 178 aa, Artificial Sequence
  Synthetic
DEARELVKELEDLIREITKTVRRLLEESEELIKRIDDAVDDLRRADEDLNREIKEEIEKGKSKESLEALIERLKESLERVKRTIEKLIRDLERLNEKLRRDVESLVAELEKILSKIKRGGRDHMVLHEYVNAAGITEKEAREILKRSEDETDKLREKAERILEDLERANRRTMDEARR

SEQ ID NO: 248 - protein, 176 aa, Artificial Sequence
  Synthetic
STAETVEKKVEEVIRENEKSMRESEEKVDRSTKRIEDVLRRLEETIRKTSDDIAKGVKGERVKEVLEENRRLLEEAKKLVDEVLETNKKLLEDDKRLNEEVSKTLKKLLEEIKSVDTREDRDHMVLHEYVNAAGITKLNEETIRRSEELVRRIERVIEEIIKRSEKLLEDVARESK

SEQ ID NO: 249 - protein, 176 aa, Artificial Sequence
  Synthetic
STAETVAEEVERVLKHSDDLIKEVEDVNRRVEEEIKRVIRELEEENERLVAEVRKGVKGEILAEIEKRLADNSEKVREVAERAKKLLEENTARVKDILRESRKLVKDLLDEVRGTGSEEARDHMVLHEYVNAAGITEKLDELIKHSEEVLERVKRLIDELRKHSEEVLEDLRRRAK

SEQ ID NO: 250 - protein, 180 aa, Artificial Sequence
  Synthetic
REVEEMIKELEELLKDLKEKNERASKRNRELVRRLEEENKRVIEELKKLVKELEDLVRSGEDEEVLREVLKRLEEVLERVRALNERVLEAIEKSLEEVKASNEAVKRRLKELLEEAERGVRDHMVLHEYVNAAGITKRIDELDEYTRESIRRAKKEIERLNRETKKVIEEVVKRIEEERK

SEQ ID NO: 251 - protein, 181 aa, Artificial Sequence
  Synthetic
DAVEEAEKLIRKVIADSEKLLRDLADLNAKSIRRSEKLVEDDRRANEDVIRKLEELRRNGGSEEELRALLKEVEDTNRASHETNKRLLDEDRALNKEVHDRNEKLLRDIKRLVEEVAKGIRDHMVLHEYVNAAGITKKAIEDSSREIKRLLEESERVMKRSSEDIKRTLDDTRRVVEEVRR

SEQ ID NO: 252 - protein, 177 aa, Artificial Sequence
  Synthetic
SSDEVLKEIEEIIRRLEAEVRRVNAEVNASTEDLAREVEEVLRATNELIEELERRVTGTEELKRVIDELRDRDRKVRRRVERVIEESAKRDDESRKRLTRAVEKLRADLKKLADDGVPEERDHMVLHEYVNAAGITKDELKEWRDRNKELVDRLSEELKEWLKDVERVLKELTDKDR

SEQ ID NO: 253 - protein, 178 aa, Artificial Sequence
  Synthetic
SDAEELLKRVADLLKASLESLEKILRDSKELMDRWRKKLEDLLRESEELVDRAEKILRRGGSDKEVLDKIAEEVRRTNDDSRRLDEELHRLSRDTLRKLEENLRRTEKEVREMDKRAAERRDHMVLHEYVNAAGITVEEEHRKVLETDKKILKEAHKESKEVNDRDRELLERLEESVR

SEQ ID NO: 254 - protein, 181 aa, Artificial Sequence
  Synthetic
SEIETVRREIEKILDDLRRTVKRIEDEVRKIHEDLRRSLEDSKRNIEEILKDLERAARRDGLDKKVEDDMRKLVEDLKRKHDKLRADNEAVTKELKDRLKKLEDDLARAIEELRRRLDKGRDHMVLHEYVNAAGITVEKIKKDLKELLERYEEIVRRIKELLKDLNREAEEVVRRLKEELR

SEQ ID NO: 255 - protein, 175 aa, Artificial Sequence
  Synthetic
SEIERVKKRLEELLAEVEESTRRLEERLKRLLEEAKRSSEEVEKELRRLLEAVRRGLSRDEKLVSELEARVKELLEDSRASLEELKKRVRKLAEDSARLLEEVKREVEKLKAKLDRGGDARDHMVLHEYVNAAGITENERLIREVEELVRAHNKRNKELVDEVKRLVEKVIEEER

SEQ ID NO: 256 - protein, 177 aa, Artificial Sequence
  Synthetic
SEDEDLDRVAEKLAREHKKSVEEIKRVLKSADEESKKLVRDTERVIEEIKREVEEARRGNIDEELVERLKKKIEDILRTLEERHKKLIKELREILKRLSDESRRLAEETEKVLEDLERKGRDHMVLHEYVNAAGITKEENRKVNEEVEKRLRELEEENKKVIEDLKSTVEELVERLR

SEQ ID NO: 257 - protein, 180 aa, Artificial Sequence
  Synthetic
DEVEDVLRKIEKILDDHRKRIEKNSRDMARIIDEHRRKVEENSREMKKLVDDLKKAVDRGEGDEETAEDVKAKLEKSNRELEKHSEEVKRALDESNEDLRRHSEEVKERIERLVKKLREDRDHMVLHEYVNAAGITEKLDRLNRENEKSSEELKRELDKINDENRETSERLKREIDETTR

SEQ ID NO: 258 - protein, 182 aa, Artificial Sequence
  Synthetic
RVEDALRKLLDDVRRLVEEAERRLRTSNDKSRRLVEEAKRRLEESNERSEKLVRDVRRRIRDEDVKRVLEELLKRDHDVVRRVLERIDEMLERNSRLVKRVLEDIRRLLKRVREVVERIKRRDHMVLHEYVNAAGITIKTAKKIIEDVLRASEDTIRRLEEIIRKVEEDSKRIIEEIERAAR

SEQ ID NO: 259 - protein, 179 aa, Artificial Sequence
  Synthetic
STREDARRLVERVRKEVKRLLKKNSDLLREVTERVKTLNERNRRLLEEVEREAKRLKDSDERDVERLLDRARKLVKESEDLIRKLLKDLRELVRRSEKDIDELRKELKRLLDELRARATDKRDHMVLHEYVNAAGITIRELEENVKTSEKLIEDLIRELEKSVDESRKRVEELVKELRT

SEQ ID NO: 260 - protein, 174 aa, Artificial Sequence
  Synthetic
SELEKVVKEVADLLRRNLEKSKRVLEEVRRRLEENLRESEKVHDDNRKTARRILELVREGKDKRDLTRLLEEDDKRVKEALDKSRENNERILKEVRRALRESEEDNRRILKEVREKVDSRLRDHMVLHEYVNAAGITRFIEELEKIVEETLTESEKLARASSEITKTVLDEIRK

SEQ ID NO: 261 - protein, 181 aa, Artificial Sequence
  Synthetic
DEERKLEKSLKDVEDTHRRLLEKNDEDLKELRKRVEDMLRRLEDALRRILEDIEEKLKRIEDDETLKRLRKRVKELLDEIRRRLERLEREVDKRLEEIKERNDRHHEEAKKELKRIRDKIRRDHMVLHEYVNAAGITRKVAEDLKRSNDEVKELAERLEETIRDLLRRIEEILKEIEERVR

SEQ ID NO: 262 - protein, 175 aa, Artificial Sequence
  Synthetic
SEKEDLERELEEVRRRVEESLRKNEEDVKRVRDELKKLLDENRKELERIRREVERANVDKRVLDEADRLLKELEDDHKKLEEDAKKALDELREEHKRLEETLRRMLKRIKEVLDRESDKMERDHMVLHEYVNAAGITSRELNKKLEEIVRRLKKVSDELNRRIEEIAERVRRRRK

SEQ ID NO: 263 - protein, 177 aa, Artificial Sequence
  Synthetic
SVIERVEEEMEKVIRDSERVTKEVEDRAREVHERSEKRIREVEETSRRVLEELRRAGVDKRILDELRKRIKDSREDLERINEELRRALRKLLEDSKRINEELRKTLEELRKRLERVDDEEERDHMVLHEYVNAAGITRKLEELARRVDELVRESIERVDRNVEENKRLVREAIERRR

SEQ ID NO: 264 - protein, 179 aa, Artificial Sequence
  Synthetic
SSKEVADELRKKAEKVLDELRKIIRELERKNEDSLRRTEEIVRRLEEEAERVLRDLVRTRGEDDRLVREVERLLRELKRRLEELIRRSEELIKRSREEVDRVIRTVEKLLEELDRLLRANKRDHMVLHEYVNAAGITIKDLARKLAKSSDDTVREDEKLVEELRKDVKRIVRKIKKDLE

SEQ ID NO: 265 - protein, 174 aa, Artificial Sequence
  Synthetic
DELRDVKRELDRLLRENEEIVERIAETVRRLLEELKKLTKELAEELRKLLEELRKRGVPEKELKEVADTLRKLLKDIERSNKEVEDRLRKLLEEIKESTDRLREELEEVEKLLRGGKDVETRDHMVLHEYVNAAGITRRVLEEAKRLAKEDKERIDKIRKEIEELIKRLKDKAT

SEQ ID NO: 266 - protein, 182 aa, Artificial Sequence
  Synthetic
DEIETVLDEVRRLHEDAKRRLEEMIDEVRKLNEESVRELARVVEEVERLLRTVKEEVERAGLDKGKLEELEERLERVREDVERILREIKRRNEKTLEDSERILEENKERNRTVLKKLKELRRDHMVLHEYVNAAGITVEESRESVRRVLEKNRRVVEESKRLAEELLRRVKKVVDEIRKRVE

SEQ ID NO: 267 - protein, 178 aa, Artificial Sequence
  Synthetic
SKVEKLEEEIARLVERSRRLVEELKKEVTKVKEKVDEIVERSRRHVKKVVEKLRDIKRRGGSEEVLRRVTEELKKVLEDNRRVIEEVLRDLERILEELKRKAEEVTKRNRDDLKRLRDSGVRDHMVLHEYVNAAGITKELRTVLRDVTEDIKRIAEELKKALEDSTEIIRRAEDELRT

SEQ ID NO: 268 - protein, 182 aa, Artificial Sequence
  Synthetic
SDADRVAEELKKLVEDSRRENERVIEESKRLVKENEDRNRELIERLKKLVDKLRDILEKEKDKKTLDDIVREILERLKRLLEKVEDENRKSHEENKRLLEDVKRKNKRISDELKRLLEEIERDHMVLHEYVNAAGITLEENKRVMEKTEEVAKKSSEDIKRVADETRRRAEELLKEVDELRK

SEQ ID NO: 269 - protein, 179 aa, Artificial Sequence
  Synthetic
KDEETLKRLLEKAKEVVDRLKDENEKVTRDNHESVKKAKDANKRSNEKSERVARDAIRRVREAKEVVDTAEKLLRDNHEHSRDTVKKARELNETSRRHSERIVEKIEEILEEVERTLRENRRDHMVLHEYVNAAGITLEELSRENREAVKRISDEIKRLSDENAKDSERIIKEIDDRVR

SEQ ID NO: 270 - protein, 179 aa, Artificial Sequence
  Synthetic
REDERLEEIARKIKKVVDELVERNKKLTEDNHESVRRAEKRNRELSRELEEVAKRAIERIRSDKKVVDEVKKLLEDAKKHSKEVIDELRRLNEESKRSSEDTIRRMRKLLRELEETVKAKKRDHMVLHEYVNAAGITLEDLSRRNEEKVRRISEEIKKLSKDNERTIKEIIKEIEERVK

SEQ ID NO: 271 - protein, 178 aa, Artificial Sequence
  Synthetic
KAAEEIRKKVEDYKRESEKILEEVEDHSRRSKETLKRLLDDLRRAVEELKRRLEELKRRPRTEEIAKRAEEAVRRAAERIKKVIDDVERHIRENAKELKRLLEEDREASRRLEDEIDKEVKRDHMVLHEYVNAAGITEESERVLRELAERNKTALEEAERVLRRLKEEIEKVLRKLKK

SEQ ID NO: 272 - protein, 176 aa, Artificial Sequence
  Synthetic
REAEEAKEEVEELNRRNKKELDDARRRVDELDKRNKDRLKESSDRVKRLVEELERVKEEGRSDDRLREKIERMLKTSADELERLKEENKRALRDLAERLRELIERNRRKLEEITRRTVPDKRDHMVLHEYVNAAGITLERVLEELAEKIDRSLKELDDVLRKNETDLKRVIEDLKR

SEQ ID NO: 273 - protein, 182 aa, Artificial Sequence
  Synthetic
DLERRLDELLKRIEDRVRELVRTLEESLRELERRVREIIRRLEEHLRRIEKMVRDLKRANKPDKAVKDDVRRLRENADRLNKRVREELKKLREDVKRVNEDVKRELDKLAEEAKDMLRKLRRDHMVLHEYVNAAGITRRLLREIEEVSERHKREVDRLEREIEEVSREHKERVEKLLREIER

SEQ ID NO: 274 - protein, 179 aa, Artificial Sequence
  Synthetic
RLEDEVRKMEKEVREEVKRLEDESRKVLEESRRNLDKLREESKRVLDTVRERIKDLRRRGLDERVLRELLKRVREVHERNRKLLDEVRRASEKVHEDNRRILEEVRKTVKDVVDKLRRVDARDHMVLHEYVNAAGITVEREVKKSIEEVKEINRRLNEEVKKTIEEVKEIVKEVTERAK

SEQ ID NO: 275 - protein, 174 aa, Artificial Sequence
  Synthetic
SESDEVIRDLARLLDELARHVDDSVRRMDEVVKRSTREADELAKRLDELVKEVEKKPGDERVERMVAEIERLVAEVLEELKKKYEKLKREVEENLRRLEETVRDIVEKARKVTEKGVSKEKRDHMVLHEYVNAAGITKKHEDVLRRLEDSLRRVAELLKAALDRLREIVDRLRR

SEQ ID NO: 276 - protein, 174 aa, Artificial Sequence; identical to SEQ ID NO: 275
  Synthetic

SEQ ID NO: 277 - protein, 181 aa, Artificial Sequence
  Synthetic
SEVDEAVKNNEEDAKESRRVVEEAVKRDEDIARDIERAAREVVERDKEIVDEVRRGVKDEKKLREVVTLSKKIVDETKEIADRVLELSKRIVKETRDIAKRVLKLNDDSVKDVRRIAREGRRDHMVLHEYVNAAGITEISREVKKDLERTVRENKKIVDEVAKALEDTVDKNRRIVEEVTT

SEQ ID NO: 278 - protein, 172 aa, Artificial Sequence
  Synthetic
SRAETVLKEVTDKIKKLADSSDELLRRNKENIDELKKSSEELLRRLTKAIEEIEKGSVDEETLEELIRRVEAELEAHHRELEKNSREDEKRNRDHHAKLEEEMRRVEERLEREGIDDEVVKRDHMVLHEYVNAAGITNEDVKRMNDKLRRDNEDVIRRVEKLLRELEEKRRT

SEQ ID NO: 279 - protein, 179 aa, Artificial Sequence
  Synthetic
SEVEELIKRLAKVLKELVDKVRKVIEDTKELLERLKRRSEDHIRKLREVLKEAKDQPIDDEELKEILDRLRKTLEELEEELKKALEDDREEAKRLVDDARRVLKELEEEVREIRERRGESERDHMVLHEYVNAAGITIREVIKEWERVHREVEELLKRLIDENRKVLDEIRKLLEEKSK

SEQ ID NO: 280 - protein, 181 aa, Artificial Sequence
  Synthetic
DAVEEAEKLIRKVIADSEKLLRDLADLNAKSIRRSEKLVEDDRRANEDVIRKLEELRRNGGSEEELRALLKEVEDTNRASHETNKRLLDEDRALNKEVHDRNEKLLRDIKRLVEEVAKGIDRDHMVLHEYVNAAGITKAIEDSSREIKRLLEESERVMKRSSEDIKRTLDDTRRVVEEVRR

SEQ ID NO: 281 - protein, 175 aa, Artificial Sequence
  Synthetic
SEADDVLKKLAETVKRIIERLKKLTDDSRRLVEEVHRRNDKLSKESAEAVRKAEERGIDEKDVRKLLEDLKKKSEEVAERNKRILDTLREISKRAEDEVRKVLKELEKTLKELEDRRPDSERDHMVLHEYVNAAGITLARHKDENDKLLKEIEDSLRRHKEENDRLLEKLKESTR

SEQ ID NO: 282 - protein, 181 aa, Artificial Sequence
  Synthetic
SEIETVRREIEKILDDLRRTVKRIEDEVRKIHEDLRRSLEDSKRNIEEILKDLERAARRDGLDKKVEDDMRKLVEDLKRKHDKLRADNEAVTKELKDRLKKLEDDLARAIEELRRRLDKGLRDHMVLHEYVNAAGITEKIKKDLKELLERYEEIVRRIKELLKDLNREAEEVVRRLKEELR

SEQ ID NO: 283 - protein, 175 aa, Artificial Sequence
  Synthetic
SEIERVKKRLEELLAEVEESTRRLEERLKRLLEEAKRSSEEVEKELRRLLEAVRRGLSRDEKLVSELEARVKELLEDSRASLEELKKRVRKLAEDSARLLEEVKREVEKLKAKLDRGGDADRDHMVLHEYVNAAGITNERLIREVEELVRAHNKRNKELVDEVKRLVEKVIEEER

SEQ ID NO: 284 - protein, 177 aa, Artificial Sequence
  Synthetic
SEDEDLDRVAEKLAREHKKSVEEIKRVLKSADEESKKLVRDTERVIEEIKREVEEARRGNIDEELVERLKKKIEDILRTLEERHKKLIKELREILKRLSDESRRLAEETEKVLEDLERKGVRDHMVLHEYVNAAGITEENRKVNEEVEKRLRELEEENKKVIEDLKSTVEELVERLR

SEQ ID NO: 285 - protein, 177 aa, Artificial Sequence; identical to SEQ ID NO: 284
  Synthetic

SEQ ID NO: 286 - protein, 182 aa, Artificial Sequence
  Synthetic
RVEDALRKLLDDVRRLVEEAERRLRTSNDKSRRLVEEAKRRLEESNERSEKLVRDVRRRIRDEDVKRVLEELLKRDHDVVRRVLERIDEMLERNSRLVKRVLEDIRRLLKRVREVVERIKRVRDHMVLHEYVNAAGITKTAKKIIEDVLRASEDTIRRLEEIIRKVEEDSKRIIEEIERAAR

SEQ ID NO: 287 - protein, 183 aa, Artificial Sequence
  Synthetic
KVEKRLTDLLKTVADEVKRVEDELRETVRESKEVVDKSRRDLERTVEESEKTVKDAERRVSEDLVRRIRKVLDENREVNDRVVKEDERILEENERVNRKVVEKIRDILRKIEEVVRRAAEEIRDHMVLHEYVNAAGITLERLKEEADRVRERSKKILTDLKKSSEDVKRESERMLKKLEDEIR

SEQ ID NO: 288 - protein, 174 aa, Artificial Sequence
  Synthetic
SEDETIRRIVRTVHEESRKSTEDVRREVERVLRESEEVVKKVKKKVDDVLKRVEETGISEELEERMRRIIREIREHLKDNLRRVREVIERIERKLEETERRDEKVLREIEKKIRDGDGREEVRDHMVLHEYVNAAGITEIAKEVREIVERSIKNLEEVAEEVERVVRELIEARR

SEQ ID NO: 289 - protein, 178 aa, Artificial Sequence
  Synthetic
DDLERVLKEIKKAADKIREDNKRTADKIRKRVKELDDETRDMLRRIRKLVKEIKERVRGREEARKVIEELKKLVDEVRKRNEKSIEELKKLLKEDRDLMRRVIEELEDLVRRLREEVRDDEARDHMVLHEYVNAAGITRVLKETSDRVRELIDKHRRLSEEVEKDVKRLIDELKKKTD

SEQ ID NO: 290 - protein, 175 aa, Artificial Sequence
  Synthetic
SEKEDLERELEEVRRRVEESLRKNEEDVKRVRDELKKLLDENRKELERIRREVERANVDKRVLDEADRLLKELEDDHKKLEEDAKKALDELREEHKRLEETLRRMLKRIKEVLDRESDKMEERDHMVLHEYVNAAGITRELNKKLEEIVRRLKKVSDELNRRIEEIAERVRRRRK

SEQ ID NO: 291 - protein, 178 aa, Artificial Sequence
  Synthetic
SSIERVEKEVRRLLRESDESLKRVMEEAKELIKSVRESTKRVEEDARDLLRKVVERTGDEREDLRRVLEELRKLIEDNRREDKRSEDELRKLIRDNKEENDRARREAEKLLEDLSRGRSEEERDHMVLHEYVNAAGITEDDKRSLERIERIVRRNNELNKESVDRIRKIIKEMEERAD

SEQ ID NO: 292 - protein, 179 aa, Artificial Sequence
  Synthetic
SSKEVADELRKKAEKVLDELRKIIRELERKNEDSLRRTEEIVRRLEEEAERVLRDLVRTRGEDDRLVREVERLLRELKRRLEELIRRSEELIKRSREEVDRVIRTVEKLLEELDRLLRANKGRDHMVLHEYVNAAGITKDLARKLAKSSDDTVREDEKLVEELRKDVKRIVRKIKKDLE

SEQ ID NO: 293 - protein, 183 aa, Artificial Sequence
  Synthetic
KDAEDLERRVRELVEENNRVSKRLAEEVTRLVKENEDKVRELEKEVRDRAKELLDMKRRGEVREEEVKRVLREIEELLREITEHSKEVLKTIEKLLRDSLEHSRRVLEEIERLLETILRKSKRDHMVLHEYVNAAGITERSLRENEKVADELRKRAEKSLEDVKRVVDELRKIVDDVLKRVED

SEQ ID NO: 294 - protein, 183 aa, Artificial Sequence
  Synthetic
SEIEKLVEDVRKLVEDNLRHSEEVHRRNRRLIEENERKIDELEKRVRKLVEELRELAERGEIREEEARKVLEEIKRLLDEIRRHSEEVLKEIERTLKENLKHSEEVLRRIEERLEDIKRKDKRDHMVLHEYVNAAGITKRSLDESEKLNRESRKRVTRSLEKVDDLVRELEKLARKVLEEVKT

SEQ ID NO: 295 - protein, 174 aa, Artificial Sequence
  Synthetic
SEIEELEKRIDELLKELRDLSRRIAEEVKRLLEELKKLSKDSEDKLRELLERLKRKGVPEEELRRVEEEVERVVRESRKLNKETEDELRRLLEEIKESNDRVEKRARELKKLLRDGKDVEEVRDHMVLHEYVNAAGITKVLKDARDLIKKDKDLNEKLSRELEKLVRELEERAR

SEQ ID NO: 296 - protein, 174 aa, Artificial Sequence
  Synthetic
DELRDVKRELDRLLRENEEIVERIAETVRRLLEELKKLTKELAEELRKLLEELRKRGVPEKELKEVADTLRKLLKDIERSNKEVEDRLRKLLEEIKESTDRLREELEEVEKLLRGGKDVETVRDHMVLHEYVNAAGITRVLEEAKRLAKEDKERIDKIRKEIEELIKRLKDKAT

SEQ ID NO: 297 - protein, 174 aa, Artificial Sequence
  Synthetic
DEEEDLERRIKKLLDENRELLKRIAEELRRLLEELRRLTEESADRLRRLLKELKDRGVPEKDLRDVAEKVKKVLKESEDSNRDVKRKLEKLLRDLERSTERLEREARKVRKLLRDGKDIETLRDHMVLHEYVNAAGITKIEKEIRDLIKEDKERNRELSERLRKLVEELKKKAT

SEQ ID NO: 298 - protein, 177 aa, Artificial Sequence
  Synthetic
DEVEDILRKVEEIVKKSITDARRLLKEAREIVEESIKTAEELLRRNEDIVRKLSEDVKRTTDEEKKKKLEEESRRVLEKTKRDLDRTKDDNRKALEKIRKRVKETEEENREVVDRVRKAGVDRDHMVLHEYVNAAGITVNREVLKRVEEVLEESKRVNEKVEEDVRRVHEEVRKEIK

SEQ ID NO: 299 - protein, 182 aa, Artificial Sequence
  Synthetic
SDADRVAEELKKLVEDSRRENERVIEESKRLVKENEDRNRELIERLKKLVDKLRDILEKEKDKKTLDDIVREILERLKRLLEKVEDENRKSHEENKRLLEDVKRKNKRISDELKRLLEEIERRDHMVLHEYVNAAGITEENKRVMEKTEEVAKKSSEDIKRVADETRRRAEELLKEVDELRK

SEQ ID NO: 300 - protein, 175 aa, Artificial Sequence
  Synthetic
SEMDDVLKKLAETVKRIIERLKKLTDDSRRLVEEVHRRNDKLSKESREAVRKAEERNIDEKDVRKLLEDLKKKSEEVAERNKRILDTLREISKRAEDEVRKVLKELEKTLKELEDRRPDVRERDHMVLHEYVNAAGITKRHKDENDKLLKEIEDSLRRHKEENDRLLEKLKESTR

SEQ ID NO: 301 - protein, 183 aa, Artificial Sequence
  Synthetic
SEVDEVLERIKRLLERLAEHSDKVVRDIEKLLDDNRKENERLLDKLRRELKRLEEMRRRGDLREELLERVVREVEKEIRDIKRKNKRSVETVEKLVRDDRKELKRALEDVERLIRELETRLKRDHMVLHEYVNAAGITEKVIDELLKKTDEVLKRARETIEDLNRKLDKVLKEVRDKLDRLRD

SEQ ID NO: 302 - protein, 179 aa, Artificial Sequence
  Synthetic
KDEETLKRLLEKAKEVVDRLKDENEKVTRDNHESVKKAKDANKRSNEKSERVARDAIRRVREAKEVVDTAEKLLRDNHEHSRDTVKKARELNETSRRHSERIVEKIEEILEEVERTLRENRGRDHMVLHEYVNAAGITEELSRENREAVKRISDEIKRLSDENAKDSERIIKEIDDRVR

SEQ ID NO: 303 - protein, 179 aa, Artificial Sequence
  Synthetic
SDDETVTKLLKEAEKVVRELTKRNKELLRKNHESVREAKKRNEDLSRKLEEVVRRLIEEIREREDVVRELEKLLEDAKRHSERIVREMEDLNRKSKKHSKETVDRLKDLLRKVEETARARKGRDHMVLHEYVNAAGITEELTRRNEKRIEEISDEIRRLSDTNRREIERIREELRRRAK

SEQ ID NO: 304 - protein, 176 aa, Artificial Sequence
  Synthetic
REAEEAKEEVEELNRRNKKELDDARRRVDELDKRNKDRLKESSDRVKRLVEELERVKEEGRSDDRLREKIERMLKTSADELERLKEENKRALRDLAERLRELIERNRRKLEEITRRTVPDKDRDHMVLHEYVNAAGITERVLEELAEKIDRSLKELDDVLRKNETDLKRVIEDLKR

SEQ ID NO: 305 - protein, 182 aa, Artificial Sequence
  Synthetic
SELEKTLEDLKRHSEENKKKLEEDLRDMERNLKENKDRLKKILEEAEKTLKDLERRFREGDIDERELERVRRKMEEIKKRLDENVERNRRKAEDIKRKLDENVKRSEDRVKEIKEDIRRRVRRDHMVLHEYVNAAGITKENREIHERVKKALDDIVKELEELHERLKRRLEEILRRIAETVR

SEQ ID NO: 306 - protein, 179 aa, Artificial Sequence
  Synthetic
RLEDEVRKMEKEVREEVKRLEDESRKVLEESRRNLDKLREESKRVLDTVRERIKDLRRRGLDERVLRELLKRVREVHERNRKLLDEVRRASEKVHEDNRRILEEVRKTVKDVVDKLRRVDAKRDHMVLHEYVNAAGITEREVKKSIEEVKEINRRLNEEVKKTIEEVKEIVKEVTERAK

SEQ ID NO: 307 - protein, 183 aa, Artificial Sequence
  Synthetic
RVDERLDTVLKRVEETVRENKKKNDELLERSKENIDRLKKRLDDLLDKVRREAEKLKREVTKEEVKKIIDEVLKEIEDLLRTVKEELDRALERNREVVEETKRRIDRVLKEIEKLIRDVKRDRDHMVLHEYVNAAGITLKEVNDTSKDAERRLRETNERLNEIVKEVEKRIRELSEEVRKRVK

SEQ ID NO: 308 - protein, 183 aa, Artificial Sequence
  Synthetic
SVDERLDEVLERVKEDMDRNRRKNDESLREDEENVRRNKKETDESVKRVEERVRELKKRVKDERVKEFLDRVLEEIRKSAEEVKTIIDEVHKESEETVRRTKKIIEEVLRRIEELIRRVKKDRDHMVLHEYVNAAGITLKEVNKVSDEAHKRNKELNERVNRVNKEAHKRNEDLLREAERKVR

SEQ ID NO: 309 - protein, 183 aa, Artificial Sequence
  Synthetic
SIEDEIRKLKEDIKRVLDKVRRDNERLKERLDKVLEDIRRSSEDNNRKLEEVLKRIRDKPVDERLVRKVEEAVKRLKEHNEDSTRRVEEVIRRLKEESEESVRKTEKVARDLERELDEVLTRRDHMVLHEYVNAAGITLERLKREDKEVADRAEKLLREAEEHNKRSLDESRRVLEELDEEIR

SEQ ID NO: 310 - protein, 183 aa, Artificial Sequence
  Synthetic
SIREKIRELEERLEEVLRRIEENSERVLREAERVLKEIKDNSKRNNEKLERALEEIRKLPVEDELVRRVKELVERLKRHNKKSSEDVERVVRELKEELKRSSEEVKKAVDRLKEELEKVLRDRDHMVLHEYVNAAGITLRKLEEHNRRVVERLKRLLEELKKHNEDSLRKSEEVLRKLEEDAR

SEQ ID NO: 311 - protein, 182 aa, Artificial Sequence
  Synthetic
SIEDLVRELKKKVDEVAEDLRRKVREALERSRENIDRLKKHSEENLRRSEEVVDKLRKETREEEVKDILRRVLELSKRIVEESKEILDRVLELSKKVVDDIEEIIRRVEETVKEVLTRLSRVRDHMVLHEYVNAAGITREVTKLVEKLIRELEDINRKVNERNRRLAEESRKILDEVEKRVR

SEQ ID NO: 312 - protein, 174 aa, Artificial Sequence
  Synthetic
SESDEVIRDLARLLDELARHVDDSVRRMDEVVKRSTREADELAKRLDELVKEVEKKPGDERVERMVAEIERLVAEVLEELKKKYEKLKREVEENLRRLEETVRDIVEKARKVTEKGVSKEKIRDHMVLHEYVNAAGITKHEDVLRRLEDSLRRVAELLKAALDRLREIVDRLRR

SEQ ID NO: 313 - protein, 178 aa, Artificial Sequence
  Synthetic
DREREVKKRLDEVRERIERLLRRVEEESRRVAEEIRRLIEEVRRRNKKVTEEIRELLKGLKDKEEVRRVLERLRKLNAESDELLERILERLRRLVEATNRLVKAIIEELRRLVEKIVREVPDRDHMVLHEYVNAAGITKVAKEIHDHDKEVTERLEDLLRRITEHARKSDREIEETAR

SEQ ID NO: 314 - protein, 179 aa, Artificial Sequence
  Synthetic
SEVEELIKRLAKVLKELVDKVRKVIEDTKELLERLKRRSEDHIRKLREVLKEAKDQPIDDEELKEILDRLRKTLEELEEELKKALEDDREEAKRLVDDARRVLKELEEEVREIRERRGESEERDHMVLHEYVNAAGITREVIKEWERVHREVEELLKRLIDENRKVLDEIRKLLEEKSK

SEQ ID NO: 315 - protein, 176 aa, Artificial Sequence
  Synthetic
STAETVEKKVEEVIRENEKSMRESEEKVDRSTKRIEDVLRRLEETIRKTSDDIAKGVKGERVKEVLEENRRLLEEAKKLVDEVLETNKKLLEDDKRLNEEVSKTLKKLLEEIKSVDTREDATRDHMVLHEYVNAAGITNEETIRRSEELVRRIERVIEEIIKRSEKLLEDVARESK

SEQ ID NO: 316 - protein, 180 aa, Artificial Sequence
  Synthetic
REVEEMIKELEELLKDLKEKNERASKRNRELVRRLEEENKRVIEELKKLVKELEDLVRSGEDEEVLREVLKRLEEVLERVRALNERVLEAIEKSLEEVKASNEAVKRRLKELLEEAERGVDSRDHMVLHEYVNAAGITIDELDEYTRESIRRAKKEIERLNRETKKVIEEVVKRIEEERK

SEQ ID NO: 317 - protein, 181 aa, Artificial Sequence
  Synthetic
DAVEEAEKLIRKVIADSEKLLRDLADLNAKSIRRSEKLVEDDRRANEDVIRKLEELRRNGGSEEELRALLKEVEDTNRASHETNKRLLDEDRALNKEVHDRNEKLLRDIKRLVEEVAKGIDSRDHMVLHEYVNAAGITAIEDSSREIKRLLEESERVMKRSSEDIKRTLDDTRRVVEEVRR

SEQ ID NO: 318 - protein, 181 aa, Artificial Sequence
  Synthetic
SEIETVRREIEKILDDLRRTVKRIEDEVRKIHEDLRRSLEDSKRNIEEILKDLERAARRDGLDKKVEDDMRKLVEDLKRKHDKLRADNEAVTKELKDRLKKLEDDLARAIEELRRRLDKGLDRDHMVLHEYVNAAGITKIKKDLKELLERYEEIVRRIKELLKDLNREAEEVVRRLKEELR

SEQ ID NO: 319 - protein, 183 aa, Artificial Sequence
  Synthetic
SDVDRVLEEIRKLLEDLKRHSEKVSEENEDLLRANTELNKRVSEDNERLLEELKRLRERGGISEEDLKRALDRVRKTVETVKEENKRSLEDVRRTVETNKRKLERVVEEIKKLIEDAKRRGSRDHMVLHEYVNAAGITKRTIDRLLETSDRSLEKVEADLRRLNEELDRSLERAERTIRELAK

SEQ ID NO: 320 - protein, 177 aa, Artificial Sequence
  Synthetic
SEDEDLDRVAEKLAREHKKSVEEIKRVLKSADEESKKLVRDTERVIEEIKREVEEARRGNIDEELVERLKKKIEDILRTLEERHKKLIKELREILKRLSDESRRLAEETEKVLEDLERKGVDRDHMVLHEYVNAAGITENRKVNEEVEKRLRELEEENKKVIEDLKSTVEELVERLR

SEQ ID NO: 321 - protein, 177 aa, Artificial Sequence; identical to SEQ ID NO: 320
  Synthetic

SEQ ID NO: 322 - protein, 183 aa, Artificial Sequence
  Synthetic
KVEKRLTDLLKTVADEVKRVEDELRETVRESKEVVDKSRRDLERTVEESEKTVKDAERRVSEDLVRRIRKVLDENREVNDRVVKEDERILEENERVNRKVVEKIRDILRKIEEVVRRAAEEIRRDHMVLHEYVNAAGITERLKEEADRVRERSKKILTDLKKSSEDVKRESERMLKKLEDEIR

SEQ ID NO: 323 - protein, 184 aa, Artificial Sequence
  Synthetic
SLEEVIKTVRKLLEEVERRLREVVERAERMLEEVRRRTREVSEEAREMLKDVEKALRDKNVSEEIEEKLRKIKEELERDNEKVNRDNERSVETLRRLLDRVRKEVKDIAKELEERLKEVERKSRDHMVLHEYVNAAGITVKRLRELIEKLREEVEKIVDENRKTVEELRRRNEEIVRRLRREIE

SEQ ID NO: 324 - protein, 184 aa, Artificial Sequence
  Synthetic
KLDEVIEEIRKLLRRMEEELRRSVEEIDKLLREVRELLRESSEKVKELLRRVTEELKKRGVPEEVKERLDRLVETLRRLSEETLKELDKLVREVKELSKESLKRLRELVERLRRELEEIKKRGRDHMVLHEYVNAAGITIRELREIVKRNTEIAREVVERAKRIVEKNEKLLKDVVEEAKKIVK

SEQ ID NO: 325 - protein, 181 aa, Artificial Sequence
  Synthetic
SEVERVLEDLRRLVRDVEEKLRRIIERDRRLVEEVERENRKTIRKIEELLRKVLEELKDISDKKTIERIVREIIKEARDLVRRNHERNREIVDESRRLVEELRRIVEEIIRRLRELLERVKSGRDHMVLHEYVNAAGITLRELLKELEKTSRDLKKRLEELDRELKALVEKVERDLEELRK

SEQ ID NO: 326 - protein, 177 aa, Artificial Sequence
  Synthetic
KEEEDLEREVKRLEDKVREDAKKLEEVVKTVEKLVRDDARRNEEVVKEVADRVRRLTERKLDEETLRKVKEDLKRTLERLKRENEKSLEELRDILRRLKKENDDTLKELRDELKRLTDSGASERDHMVLHEYVNAAGITSREVEKRLRRIIRELERVSKEVLDRLREIIEKLDRDAT

SEQ ID NO: 327 - protein, 177 aa, Artificial Sequence
  Synthetic
ELREDVERVVDEIRRLVEENVRRIDEVAKDIKRLADDNVRRVKELVRKIEEDIRRLKEEGVTEVVDELREEVRKLSEDNRRHSRELIERVKKLLKELEEHSRDLKRRVKELLEDLKRKGVDERRDHMVLHEYVNAAGITRDALRRLEEAIRRVRRESERVNRELDEVIKRVTEELKK

SEQ ID NO: 328 - protein, 181 aa, Artificial Sequence
  Synthetic
DEERKLEKSLKDVEDTHRRLLEKNDEDLKELRKRVEDMLRRLEDALRRILEDIEEKLKRIEDDETLKRLRKRVKELLDEIRRRLERLEREVDKRLEEIKERNDRHHEEAKKELKRIRDKIRRDRDHMVLHEYVNAAGITVAEDLKRSNDEVKELAERLEETIRDLLRRIEEILKEIEERVR

SEQ ID NO: 329 - protein, 181 aa, Artificial Sequence
  Synthetic
DEEETLEDVLRELEERVEKLLRDLTRDLERVEKEHKELLKRNKEAIDEIEKRIEELLKRIEDDEKLRRLKEEVRKLVEESRERNKRHHKEVREVLERIRELLERLEKELRRALEEIRDKIRKDRDHMVLHEYVNAAGITAEEVIRDLERKVRKLERDIRENIKKNHREVREILRKIEEDVR

SEQ ID NO: 330 - protein, 175 aa, Artificial Sequence
  Synthetic
SEEDELRRLLKEVNERVERLLDEIRKELEKIAEELRDLLKKNEDKLREIKRRVEENRVDEEIKKDAERALTELKEEHERLDREAKKDLDRIRKELERLEEEHRRVSERIEEVLDKESDKTEDIRDHMVLHEYVNAAGITEIKKELRDILEKLRRVSEELNKKLDEILKRIEDRTR

SEQ ID NO: 331 - protein, 177 aa, Artificial Sequence
  Synthetic
SAIEKVKEVVERVLETVRDSVRRSHEESKRLIDKVRKRLEEVREEVKELIERVRRKGIPERMVEKLERDLEELLKEIKDTIDRIEEELRTSNRRLKETNDEIAKRLEELLRELSRDRDKDAVERDHMVLHEYVNAAGITNDDNVRRVKEVIDRAEKLVRDLLREIRKLIEKLIRDTE

SEQ ID NO: 332 - protein, 177 aa, Artificial Sequence
  Synthetic
SVLEEVRRRVEELLKTVKESVDRSHERSERLIEEVRESLKEVKRRVKELVERVREKGIPEDRVKRIEDKLREELERLERENRKIEEDLKRSNDELRRENERIAERLEELLRELSRDTNDKVARRDHMVLHEYVNAAGITNKRNLEDVERVIRELNKENERVLREVEKKIEKLIRETE

SEQ ID NO: 333 - protein, 179 aa, Artificial Sequence
  Synthetic
SSKEVADELRKKAEKVLDELRKIIRELERKNEDSLRRTEEIVRRLEEEAERVLRDLVRTRGEDDRLVREVERLLRELKRRLEELIRRSEELIKRSREEVDRVIRTVEKLLEELDRLLRANKGDRDHMVLHEYVNAAGITDLARKLAKSSDDTVREDEKLVEELRKDVKRIVRKIKKDLE

SEQ ID NO: 334 - protein, 183 aa, Artificial Sequence
  Synthetic
KDAEDLERRVRELVEENNRVSKRLAEEVTRLVKENEDKVRELEKEVRDRAKELLDMKRRGEVREEEVKRVLREIEELLREITEHSKEVLKTIEKLLRDSLEHSRRVLEEIERLLETILRKSKDRDHMVLHEYVNAAGITRSLRENEKVADELRKRAEKSLEDVKRVVDELRKIVDDVLKRVED

SEQ ID NO: 335 - protein, 183 aa, Artificial Sequence
  Synthetic
SEIEKLVEDVRKLVEDNLRHSEEVHRRNRRLIEENERKIDELEKRVRKLVEELRELAERGEIREEEARKVLEEIKRLLDEIRRHSEEVLKEIERTLKENLKHSEEVLRRIEERLEDIKRKDKDRDHMVLHEYVNAAGITRSLDESEKLNRESRKRVTRSLEKVDDLVRELEKLARKVLEEVKT

SEQ ID NO: 336 - protein, 181 aa, Artificial Sequence
  Synthetic
EEIERALREMRELSRTHKELVEKILRDIAELAKTHERINEDILRKIKKLIDEIADEIRKEDKKEELKRKIDELRRRAEELLKESKEHLKRLEDTVRELIERLKETLKKVEEDLKRILEKLEKSRDHMVLHEYVNAAGITNRELLKRVEDEVRRLIRKLEELNRRTEEEVKKLIKKLEDDLK

SEQ ID NO: 337 - protein, 174 aa, Artificial Sequence
  Synthetic
DEEEDLERRIKKLLDENRELLKRIAEELRRLLEELRRLTEESADRLRRLLKELKDRGVPEKDLRDVAEKVKKVLKESEDSNRDVKRKLEKLLRDLERSTERLEREARKVRKLLRDGKDIETLLRDHMVLHEYVNAAGITIEKEIRDLIKEDKERNRELSERLRKLVEELKKKAT

SEQ ID NO: 338 - protein, 178 aa, Artificial Sequence
  Synthetic
SSKDEIRRRVEEVVERSDEIVKRSREHVKTVVDELDRVVKELERKVREVVKKLDKIRKDGGSEETLKRVLDELREILKELKEEVKKVKRKLEKVVKENRDTIREVEERNRKILDELRKRGVEERDHMVLHEYVNAAGITLRRVLKESEDIAKEAEDRLKTVLERVERIADEVLKRLTK

SEQ ID NO: 339 - protein, 178 aa, Artificial Sequence
  Synthetic
SKVEKLEEEIARLVERSRRLVEELKKEVTKVKEKVDEIVERSRRHVKKVVEKLRDIKRRGGSEEVLRRVTEELKKVLEDNRRVIEEVLRDLERILEELKRKAEEVTKRNRDDLKRLRDSGVDERDHMVLHEYVNAAGITLRTVLRDVTEDIKRIAEELKKALEDSTEIIRRAEDELRT

SEQ ID NO: 340 - protein, 179 aa, Artificial Sequence
  Synthetic
REDERLEEIARKIKKVVDELVERNKKLTEDNHESVRRAEKRNRELSRELEEVAKRAIERIRSDKKVVDEVKKLLEDAKKHSKEVIDELRRLNEESKRSSEDTIRRMRKLLRELEETVKAKKGDRDHMVLHEYVNAAGITDLSRRNEEKVRRISEEIKKLSKDNERTIKEIIKEIEERVK

SEQ ID NO: 341 - protein, 184 aa, Artificial Sequence
  Synthetic
ELIKKARKDVEEVRERSERLVDELRKRNKKLADESRRLIDKLRKDVEKVLREIEDLLRKRRTKDVLKEIEDLVRELERELRRVVKESSDKVRKLIRENEKVVEESSRLFRDLVEKLRRVVEERRDHMVLHEYVNAAGITEDVNEKSERDVREINKESERVNEETEREVEDAIRKLREVLRRAKK

SEQ ID NO: 342 - protein, 176 aa, Artificial Sequence
  Synthetic
REAEEAKEEVEELNRRNKKELDDARRRVDELDKRNKDRLKESSDRVKRLVEELERVKEEGRSDDRLREKIERMLKTSADELERLKEENKRALRDLAERLRELIERNRRKLEEITRRTVPDKDVRDHMVLHEYVNAAGITRVLEELAEKIDRSLKELDDVLRKNETDLKRVIEDLKR

SEQ ID NO: 343 - protein, 174 aa, Artificial Sequence
  Synthetic
SEEEVLREAAKTVEKLLDEIRRSLEKVSKRVEDSNRELKESLDRVRERVRELLEELRKNNVDRTLLEDVRRKLERIEERNEEMNDRSRRKLEELRERNRKILEDIRRTLEDLKRRQLPKDDVERDHMVLHEYVNAAGITNKRALRENEERVKTLNRENEEMLKRIEEEVRRATK

SEQ ID NO: 344 - protein, 182 aa, Artificial Sequence
  Synthetic
SELEKTLEDLKRHSEENKKKLEEDLRDMERNLKENKDRLKKILEEAEKTLKDLERRFREGDIDERELERVRRKMEEIKKRLDENVERNRRKAEDIKRKLDENVKRSEDRVKEIKEDIRRRVRDRDHMVLHEYVNAAGITENREIHERVKKALDDIVKELEELHERLKRRLEEILRRIAETVR

SEQ ID NO: 345 - protein, 179 aa, Artificial Sequence
  Synthetic
RLEDEVRKMEKEVREEVKRLEDESRKVLEESRRNLDKLREESKRVLDTVRERIKDLRRRGLDERVLRELLKRVREVHERNRKLLDEVRRASEKVHEDNRRILEEVRKTVKDVVDKLRRVDAKVRDHMVLHEYVNAAGITREVKKSIEEVKEINRRLNEEVKKTIEEVKEIVKEVTERAK

SEQ ID NO: 346 - protein, 183 aa, Artificial Sequence
  Synthetic
RVDERLDTVLKRVEETVRENKKKNDELLERSKENIDRLKKRLDDLLDKVRREAEKLKREVTKEEVKKIIDEVLKEIEDLLRTVKEELDRALERNREVVEETKRRIDRVLKEIEKLIRDVKRDRRDHMVLHEYVNAAGITKEVNDTSKDAERRLRETNERLNEIVKEVEKRIRELSEEVRKRVK

SEQ ID NO: 347 - protein, 183 aa, Artificial Sequence
  Synthetic
SVDERLDEVLERVKEDMDRNRRKNDESLREDEENVRRNKKETDESVKRVEERVRELKKRVKDERVKEFLDRVLEEIRKSAEEVKTIIDEVHKESEETVRRTKKIIEEVLRRIEELIRRVKKDRRDHMVLHEYVNAAGITKEVNKVSDEAHKRNKELNERVNRVNKEAHKRNEDLLREAERKVR

SEQ ID NO: 348 - protein, 183 aa, Artificial Sequence
  Synthetic
SIEDEIRKLKEDIKRVLDKVRRDNERLKERLDKVLEDIRRSSEDNNRKLEEVLKRIRDKPVDERLVRKVEEAVKRLKEHNEDSTRRVEEVIRRLKEESEESVRKTEKVARDLERELDEVLTRGRDHMVLHEYVNAAGITERLKREDKEVADRAEKLLREAEEHNKRSLDESRRVLEELDEEIR

SEQ ID NO: 349 - protein, 183 aa, Artificial Sequence
  Synthetic
SIREKIRELEERLEEVLRRIEENSERVLREAERVLKEIKDNSKRNNEKLERALEEIRKLPVEDELVRRVKELVERLKRHNKKSSEDVERVVRELKEELKRSSEEVKKAVDRLKEELEKVLRDGRDHMVLHEYVNAAGITRKLEEHNRRVVERLKRLLEELKKHNEDSLRKSEEVLRKLEEDAR

SEQ ID NO: 350 - protein, 179 aa, Artificial Sequence
  Synthetic
SEVEELIKRLAKVLKELVDKVRKVIEDTKELLERLKRRSEDHIRKLREVLKEAKDQPIDDEELKEILDRLRKTLEELEEELKKALEDDREEAKRLVDDARRVLKELEEEVREIRERRGESEELRDHMVLHEYVNAAGITEVIKEWERVHREVEELLKRLIDENRKVLDEIRKLLEEKSK

SEQ ID NO: 351 - protein, 178 aa, Artificial Sequence
  Synthetic
DEARELVKELEDLIREITKTVRRLLEESEELIKRIDDAVDDLRRADEDLNREIKEEIEKGKSKESLEALIERLKESLERVKRTIEKLIRDLERLNEKLRRDVESLVAELEKILSKIKRGGLDERDHMVLHEYVNAAGITAREILKRSEDETDKLREKAERILEDLERANRRTMDEARR

SEQ ID NO: 352 - protein, 184 aa, Artificial Sequence
  Synthetic
DEIRKVVKEITDLLKASNDKNRKVVEEIRDLLRKSKKLADELVERLRALVEDLRRRIDKSGDKETAEDIVRRIIEELKRILKEIEDLARRINREIERLVEEVERDNRDVNRAIEELLKDIARRRDHMVLHEYVNAAGITSRRNEESMRRVKEDADRVSEANKEVLDRVREEVKRLIEEVRETLR

SEQ ID NO: 353 - protein, 180 aa, Artificial Sequence
  Synthetic
REVEEMIKELEELLKDLKEKNERASKRNRELVRRLEEENKRVIEELKKLVKELEDLVRSGEDEEVLREVLKRLEEVLERVRALNERVLEAIEKSLEEVKASNEAVKRRLKELLEEAERGVDSERDHMVLHEYVNAAGITDELDEYTRESIRRAKKEIERLNRETKKVIEEVVKRIEEERK

SEQ ID NO: 354 - protein, 181 aa, Artificial Sequence
  Synthetic
DAVEEAEKLIRKVIADSEKLLRDLADLNAKSIRRSEKLVEDDRRANEDVIRKLEELRRNGGSEEELRALLKEVEDTNRASHETNKRLLDEDRALNKEVHDRNEKLLRDIKRLVEEVAKGIDSERDHMVLHEYVNAAGITIEDSSREIKRLLEESERVMKRSSEDIKRTLDDTRRVVEEVRR

SEQ ID NO: 355 - protein, 181 aa, Artificial Sequence; identical to SEQ ID NO: 354
  Synthetic

SEQ ID NO: 356 - protein, 175 aa, Artificial Sequence
  Synthetic
SEAEEIRRRLEEISRRSVEHLRKVLEEIKRISERSKRHLDRVLEENARRLEELAELLKRGGDKEELLADLKAVHDESRKVIEKNAEENDRALKAAKEVIDENRERNKRVLDEVRKGGLPEEVLRDHMVLHEYVNAAGITIEEEIKKIIDKSREDIKRVLEEIERLNAKAADDLRK

SEQ ID NO: 357 - protein, 183 aa, Artificial Sequence
  Synthetic
SDVDRVLEEIRKLLEDLKRHSEKVSEENEDLLRANTELNKRVSEDNERLLEELKRLRERGGISEEDLKRALDRVRKTVETVKEENKRSLEDVRRTVETNKRKLERVVEEIKKLIEDAKRRGSGRDHMVLHEYVNAAGITRTIDRLLETSDRSLEKVEADLRRLNEELDRSLERAERTIRELAK

SEQ ID NO: 358 - protein, 177 aa, Artificial Sequence
  Synthetic
SEDEDLDRVAEKLAREHKKSVEEIKRVLKSADEESKKLVRDTERVIEEIKREVEEARRGNIDEELVERLKKKIEDILRTLEERHKKLIKELREILKRLSDESRRLAEETEKVLEDLERKGVDERDHMVLHEYVNAAGITNRKVNEEVEKRLRELEEENKKVIEDLKSTVEELVERLR

SEQ ID NO: 359 - protein, 177 aa, Artificial Sequence
  Synthetic
SKEDRLREELKKLLARLAEEIERLKRALEESNKDLKRTIDASEKHLRDVNEDVKRGGVSEELLRELERSTAENKERAKELLKRHEDLVRKVEKELADLLRRLEEIVARVDEALKRGISEEELDRDHMVLHEYVNAAGITLEELLKRVEKLTEDAKRDLERSNREHKELADRIKETAR

SEQ ID NO: 360 - protein, 177 aa, Artificial Sequence; identical to SEQ ID NO: 359
  Synthetic

SEQ ID NO: 361 - protein, 183 aa, Artificial Sequence
  Synthetic
KVEKRLTDLLKTVADEVKRVEDELRETVRESKEVVDKSRRDLERTVEESEKTVKDAERRVSEDLVRRIRKVLDENREVNDRVVKEDERILEENERVNRKVVEKIRDILRKIEEVVRRAAEEIRDRDHMVLHEYVNAAGITRLKEEADRVRERSKKILTDLKKSSEDVKRESERMLKKLEDEIR

SEQ ID NO: 362 - protein, 184 aa, Artificial Sequence
  Synthetic
KLDEVIEEIRKLLRRMEEELRRSVEEIDKLLREVRELLRESSEKVKELLRRVTEELKKRGVPEEVKERLDRLVETLRRLSEETLKELDKLVREVKELSKESLKRLRELVERLRRELEEIKKRGERDHMVLHEYVNAAGITRELREIVKRNTEIAREVVERAKRIVEKNEKLLKDVVEEAKKIVK

SEQ ID NO: 363 - protein, 181 aa, Artificial Sequence
  Synthetic
SEVERVLEDLRRLVRDVEEKLRRIIERDRRLVEEVERENRKTIRKIEELLRKVLEELKDISDKKTIERIVREIIKEARDLVRRNHERNREIVDESRRLVEELRRIVEEIIRRLRELLERVKSGERDHMVLHEYVNAAGITRELLKELEKTSRDLKKRLEELDRELKALVEKVERDLEELRK

SEQ ID NO: 364 - protein, 178 aa, Artificial Sequence
  Synthetic
DDLERVLKEIKKAADKIREDNKRTADKIRKRVKELDDETRDMLRRIRKLVKEIKERVRGREEARKVIEELKKLVDEVRKRNEKSIEELKKLLKEDRDLMRRVIEELEDLVRRLREEVRDDEALRRDHMVLHEYVNAAGITLKETSDRVRELIDKHRRLSEEVEKDVKRLIDELKKKTD

SEQ ID NO: 365 - protein, 181 aa, Artificial Sequence
  Synthetic
DEERKLEKSLKDVEDTHRRLLEKNDEDLKELRKRVEDMLRRLEDALRRILEDIEEKLKRIEDDETLKRLRKRVKELLDEIRRRLERLEREVDKRLEEIKERNDRHHEEAKKELKRIRDKIRRDGRDHMVLHEYVNAAGITAEDLKRSNDEVKELAERLEETIRDLLRRIEEILKEIEERVR

SEQ ID NO: 366 - protein, 175 aa, Artificial Sequence
  Synthetic
SEKEDLERELEEVRRRVEESLRKNEEDVKRVRDELKKLLDENRKELERIRREVERANVDKRVLDEADRLLKELEDDHKKLEEDAKKALDELREEHKRLEETLRRMLKRIKEVLDRESDKMEEIKRDHMVLHEYVNAAGITLNKKLEEIVRRLKKVSDELNRRIEEIAERVRRRRK

SEQ ID NO: 367 - protein, 177 aa, Artificial Sequence
  Synthetic
SAIEKVKEVVERVLETVRDSVRRSHEESKRLIDKVRKRLEEVREEVKELIERVRRKGIPERMVEKLERDLEELLKEIKDTIDRIEEELRTSNRRLKETNDEIAKRLEELLRELSRDRDKDAVEDRDHMVLHEYVNAAGITDDNVRRVKEVIDRAEKLVRDLLREIRKLIEKLIRDTE

SEQ ID NO: 368 - protein, 177 aa, Artificial Sequence
  Synthetic
SVLEEVRRRVEELLKTVKESVDRSHERSERLIEEVRESLKEVKRRVKELVERVREKGIPEDRVKRIEDKLREELERLERENRKIEEDLKRSNDELRRENERIAERLEELLRELSRDTNDKVARDRDHMVLHEYVNAAGITKRNLEDVERVIRELNKENERVLREVEKKIEKLIRETE

SEQ ID NO: 369 - protein, 177 aa, Artificial Sequence
  Synthetic
SVIERVEEEMEKVIRDSERVTKEVEDRAREVHERSEKRIREVEETSRRVLEELRRAGVDKRILDELRKRIKDSREDLERINEELRRALRKLLEDSKRINEELRKTLEELRKRLERVDDEEEVKKRDHMVLHEYVNAAGITEELARRVDELVRESIERVDRNVEENKRLVREAIERRR

SEQ ID NO: 370 - protein, 183 aa, Artificial Sequence
  Synthetic
SEIEKLVEDVRKLVEDNLRHSEEVHRRNRRLIEENERKIDELEKRVRKLVEELRELAERGEIREEEARKVLEEIKRLLDEIRRHSEEVLKEIERTLKENLKHSEEVLRRIEERLEDIKRKDKDSRDHMVLHEYVNAAGITSLDESEKLNRESRKRVTRSLEKVDDLVRELEKLARKVLEEVKT

SEQ ID NO: 371 - protein, 181 aa, Artificial Sequence
  Synthetic
EEIERALREMRELSRTHKELVEKILRDIAELAKTHERINEDILRKIKKLIDEIADEIRKEDKKEELKRKIDELRRRAEELLKESKEHLKRLEDTVRELIERLKETLKKVEEDLKRILEKLEKSRRDHMVLHEYVNAAGITRELLKRVEDEVRRLIRKLEELNRRTEEEVKKLIKKLEDDLK

SEQ ID NO: 372 - protein, 182 aa, Artificial Sequence
  Synthetic
DEIETVLDEVRRLHEDAKRRLEEMIDEVRKLNEESVRELARVVEEVERLLRTVKEEVERAGLDKGKLEELEERLERVREDVERILREIKRRNEKTLEDSERILEENKERNRTVLKKLKELRDRGRDHMVLHEYVNAAGITSRESVRRVLEKNRRVVEESKRLAEELLRRVKKVVDEIRKRVE

SEQ ID NO: 373 - protein, 182 aa, Artificial Sequence
  Synthetic
DELEEVVRRVRELSRTVKEELREVIERVRELSERVKKKLRKVLREVAELHREVMKRVRDSGLDKSKLEKLEDESRRVLDKSREILRKNEEDNRRLNKELEEILKKNEDDNEDVRRKVDEVTRKGRDHMVLHEYVNAAGITSRRSAKDALKRVEDRVRESDKSVRELLEENRKVVEDIKRRVD

SEQ ID NO: 374 - protein, 178 aa, Artificial Sequence
  Synthetic
SSKDEIRRRVEEVVERSDEIVKRSREHVKTVVDELDRVVKELERKVREVVKKLDKIRKDGGSEETLKRVLDELREILKELKEEVKKVKRKLEKVVKENRDTIREVEERNRKILDELRKRGVEERRDHMVLHEYVNAAGITRRVLKESEDIAKEAEDRLKTVLERVERIADEVLKRLTK

SEQ ID NO: 375 - protein, 182 aa, Artificial Sequence
  Synthetic
SDADRVAEELKKLVEDSRRENERVIEESKRLVKENEDRNRELIERLKKLVDKLRDILEKEKDKKTLDDIVREILERLKRLLEKVEDENRKSHEENKRLLEDVKRKNKRISDELKRLLEEIERRNRDHMVLHEYVNAAGITNKRVMEKTEEVAKKSSEDIKRVADETRRRAEELLKEVDELRK

SEQ ID NO: 376 - protein, 182 aa, Artificial Sequence
  Synthetic
DEVREVAERLRRLVDESRKRNEEVIKESEALVDRVRKTNEEVMKRLRELIDKLEKDIRRLKDKKTVEKIIREVLKKIDELLKRVERTNREISKENKRLLDEVRKTNEEISRRLKKLLEDIRRRNRDHMVLHEYVNAAGITNKEVLRKTEEMVKRSTETNKRLLERSKEVADRLRERIKEAAK

SEQ ID NO: 377 - protein, 175 aa, Artificial Sequence
  Synthetic
SEVDEVLREAKRIVDEVHKDNERATEESRRLVKKVHEENEEMVKDIERIVKEVKDANIDEKLVTEILKEIEEALKEAARRNKEVKDRLRELSRRVSERNREILEELKERLDRVRERRKDVKELERDHMVLHEYVNAAGITHRKENKRLLEELDRSLRELAKIVKEVLDEIRERTR

SEQ ID NO: 378 - protein, 185 aa, Artificial Sequence
  Synthetic
DDIERLKREIERLLKEAEKISRDNEERSKELLDRLRKLSEDNKRKIDKLVEELKRLADKIKDKEELTRRLKEVVDRVEKSVRDSERMLREVVREDEESVRRSKTKLEDLLRKVEELVRRLEKKVRDHMVLHEYVNAAGITKKKVDELKRKNDEVHRRSREEVKRLLEENRKLLEDLRRMVREITQ

SEQ ID NO: 379 - protein, 185 aa, Artificial Sequence
  Synthetic
SAEELLRTIEKRIEDNHRRLEEILEEIARLIEDMLRTDERIVREIKELLKEVLDRVRRAGVPEEVLERVRRELERLKKELEELRRRSEEKVKELKRRLEEIRRKLEEEHRDLRRKLEELRRDLGRDHMVLHEYVNAAGITLERSLREAEDLLRRVEEVIRTSKKESKDVLEKIERLLRDLERRTR

SEQ ID NO: 380 - protein, 182 aa, Artificial Sequence
  Synthetic
SELEKTLEDLKRHSEENKKKLEEDLRDMERNLKENKDRLKKILEEAEKTLKDLERRFREGDIDERELERVRRKMEEIKKRLDENVERNRRKAEDIKRKLDENVKRSEDRVKEIKEDIRRRVRDKRDHMVLHEYVNAAGITNREIHERVKKALDDIVKELEELHERLKRRLEEILRRIAETVR

SEQ ID NO: 381 - protein, 179 aa, Artificial Sequence
  Synthetic
RLEDEVRKMEKEVREEVKRLEDESRKVLEESRRNLDKLREESKRVLDTVRERIKDLRRRGLDERVLRELLKRVREVHERNRKLLDEVRRASEKVHEDNRRILEEVRKTVKDVVDKLRRVDAKVVRDHMVLHEYVNAAGITEVKKSIEEVKEINRRLNEEVKKTIEEVKEIVKEVTERAK

SEQ ID NO: 382 - protein, 183 aa, Artificial Sequence
  Synthetic
SIEDEIRKLKEDIKRVLDKVRRDNERLKERLDKVLEDIRRSSEDNNRKLEEVLKRIRDKPVDERLVRKVEEAVKRLKEHNEDSTRRVEEVIRRLKEESEESVRKTEKVARDLERELDEVLTRGGRDHMVLHEYVNAAGITRLKREDKEVADRAEKLLREAEEHNKRSLDESRRVLEELDEEIR

SEQ ID NO: 383 - protein, 183 aa, Artificial Sequence
  Synthetic
SIEERVRELMRDLERVLKEIREHSKRVIEEAKRVLEEIERNSERNNKELEEVLDEIRKRPVDETLVREVEEAVKKLKEHNKRSSDTVRDAVRKLVERLKESSDRATELVKDLKRKLEEVLRRGGRDHMVLHEYVNAAGITDLRRNNKEVVDRLKEVLERLKEHNRRSLDESRKVLRELKERIR

SEQ ID NO: 384 - protein, 180 aa, Artificial Sequence
  Synthetic
SVEELLRKLEEVLRKIREENERSLKELRDRAREIVKRNRETNRELEEVIKELEKRLSGADKEKVEELVRRIRRIVERVVEEDRRTVEEIEKIAREVVKRDRDSADRVRRTVEDVLRKATGSEDIRDHMVLHEYVNAAGITESVKKVEEIARDIRRKVDESVKNVEKLLRDVDKKARDRKK

SEQ ID NO: 385 - protein, 185 aa, Artificial Sequence
  Synthetic
SEAEELLKRLEDRAEEILRRLEEILRTSRKLAEDVLRELEKLLRESERRIREVLEELRGIKDKKELEDVIREVEKELDESLERSRELLKDVLKKLDDNLKESERLVEDIDRELAKILEDLKKAGRDHMVLHEYVNAAGITRERLKRIVDENAKIVEDARRALEKIVKENEEILRRLKKELRELRK

SEQ ID NO: 386 - protein, 179 aa, Artificial Sequence
  Synthetic
SEVEELIKRLAKVLKELVDKVRKVIEDTKELLERLKRRSEDHIRKLREVLKEAKDQPIDDEELKEILDRLRKTLEELEEELKKALEDDREEAKRLVDDARRVLKELEEEVREIRERRGESEELDRDHMVLHEYVNAAGITVIKEWERVHREVEELLKRLIDENRKVLDEIRKLLEEKSK

SEQ ID NO: 387 - protein, 184 aa, Artificial Sequence
  Synthetic
DEIRKVVKEITDLLKASNDKNRKVVEEIRDLLRKSKKLADELVERLRALVEDLRRRIDKSGDKETAEDIVRRIIEELKRILKEIEDLARRINREIERLVEEVERDNRDVNRAIEELLKDIARRGRDHMVLHEYVNAAGITRRNEESMRRVKEDADRVSEANKEVLDRVREEVKRLIEEVRETLR

SEQ ID NO: 388 - protein, 176 aa, Artificial Sequence
  Synthetic
STAETVEKKVEEVIRENEKSMRESEEKVDRSTKRIEDVLRRLEETIRKTSDDIAKGVKGERVKEVLEENRRLLEEAKKLVDEVLETNKKLLEDDKRLNEEVSKTLKKLLEEIKSVDTREDATRVRDHMVLHEYVNAAGITETIRRSEELVRRIERVIEEIIKRSEKLLEDVARESK

SEQ ID NO: 389 - protein, 182 aa, Artificial Sequence
  Synthetic
DEVREVAERLRRLVDESRKRNEEVIKESEALVDRVRKTNEEVMKRLRELIDKLEKDIRRSGDKETVEKIIREVLSAIDELLKRVERTNAEISKENARLLDEVRKTNEEISRRLAKLLEDIRRGSRDHMVLHEYVNAAGITNKEVLRKTEEAVKRSTETNKRLLEASKEVADRLRERIKEAAK

SEQ ID NO: 390 - protein, 180 aa, Artificial Sequence
  Synthetic
REVEEMIKELEELLKDLKEKNERASKRNRELVRRLEEENKRVIEELKKLVKELEDLVRSGEDEEVLREVLKRLEEVLERVRALNERVLEAIEKSLEEVKASNEAVKRRLKELLEEAERGVDSEKRDHMVLHEYVNAAGITELDEYTRESIRRAKKEIERLNRETKKVIEEVVKRIEEERK

SEQ ID NO: 391 - protein, 181 aa, Artificial Sequence
  Synthetic
DAVEEAEKLIRKVIADSEKLLRDLADLNAKSIRRSEKLVEDDRRANEDVIRKLEELRRNGGSEEELRALLKEVEDTNRASHETNKRLLDEDRALNKEVHDRNEKLLRDIKRLVEEVAKGIDSEERDHMVLHEYVNAAGITEDSSREIKRLLEESERVMKRSSEDIKRTLDDTRRVVEEVRR

SEQ ID NO: 392 - protein, 183 aa, Artificial Sequence
  Synthetic
SKLEEVEKAVRKVIEDSRRVNEEVNRRSEEVVRELEKVHREVNDASRRVVEKARRVLKGSGDERLAAEVERIIEEIRELNERDRKRVEEIRKEIEDLNRDLNRRSKESEDRLRKLLEDATRGGVRDHMVLHEYVNAAGITENKRRVEDVARKSKELVEDVRRHSEEVVRRVEELVKEVEERVR

SEQ ID NO: 393 - protein, 183 aa, Artificial Sequence
  Synthetic
SDVDRVLEEIRKLLEDLKRHSEKVSEENEDLLRANTELNKRVSEDNERLLEELKRLRERGGISEEDLKRALDRVRKTVETVKEENKRSLEDVRRTVETNKRKLERVVEEIKKLIEDAKRRGSGDRDHMVLHEYVNAAGITTIDRLLETSDRSLEKVEADLRRLNEELDRSLERAERTIRELAK

SEQ ID NO: 394 - protein, 185 aa, Artificial Sequence
  Synthetic
SSVEELLERLRRISEENKRRIEKLLREVEKVLRELKDRHRKLLKRVEEIIRKVKEEIKSGLPEEAVKRVLERVRERVKEVLEEADRLNDEMRRIVTEVEKELDKSDKEVEDAVRDILKKIEEGVRDHMVLHEYVNAAGITLDENRDRSKKVKEEIRRILEDLTRTTERVKREIAKLLKELEDTAR

SEQ ID NO: 395 - protein, 180 aa, Artificial Sequence
  Synthetic
SELEEVLRRIEALVRKAHKENEDVLREIERLVRTAHRLNKKVDDDSAKIAEDLKRGGREDKDKVEEALRRLRELYRRLEEENRRILREIEELVKELEKRNREILKELEDLVADAERKGSDGSEARDHMVLHEYVNAAGITRSLEELRKEVERLKKEVEDSLRELKKSLEEWVKSLEEATR

SEQ ID NO: 396 - protein, 186 aa, Artificial Sequence
  Synthetic
SAEDSIRELLERDERLLEEARKEAKRLNEENERLLERIEETVRRLLEEIKRLLDDIRKKIKGEKLREIEELVRRVKRTIEKLLEEVKKSVEDSSKRIEELLEAVERSVERTKEEIRRLLDEVRKDRDHMVLHEYVNAAGITHDENRRLVKEVIEEVEKLIRDNEKLAEDIEREIRRLLKELDEAAK

SEQ ID NO: 397 - protein, 182 aa, Artificial Sequence
  Synthetic
DEAEKLLKELRDLLEESRKDLERLLKELEDLLEESKRDLERLLEEITELLKRIKETVERRNEREKLEKLLRELKKVVERLKDNLKDNERRNKEAIERVRKKLKDNERENKKVIEDLRAKLKDLEERDHMVLHEYVNAAGITEEARKRLEEVEEKSKKIIDDARRALDRIDKELRRVVEETRK

SEQ ID NO: 398 - protein, 183 aa, Artificial Sequence
  Synthetic
KVEKRLTDLLKTVADEVKRVEDELRETVRESKEVVDKSRRDLERTVEESEKTVKDAERRVSEDLVRRIRKVLDENREVNDRVVKEDERILEENERVNRKVVEKIRDILRKIEEVVRRAAEEIRDERDHMVLHEYVNAAGITLKEEADRVRERSKKILTDLKKSSEDVKRESERMLKKLEDEIR

SEQ ID NO: 399 - protein, 181 aa, Artificial Sequence
  Synthetic
SEVERVLEDLRRLVRDVEEKLRRIIERDRRLVEEVERENRKTIRKIEELLRKVLEELKDISDKKTIERIVREIIKEARDLVRRNHERNREIVDESRRLVEELRRIVEEIIRRLRELLERVKSGELRDHMVLHEYVNAAGITELLKELEKTSRDLKKRLEELDRELKALVEKVERDLEELRK

SEQ ID NO: 400 - protein, 177 aa, Artificial Sequence
  Synthetic
KEEEDLEREVKRLEDKVREDAKKLEEVVKTVEKLVRDDARRNEEVVKEVADRVRRLTERKLDEETLRKVKEDLKRTLERLKRENEKSLEELRDILRRLKKENDDTLKELRDELKRLTDSGASEDVRDHMVLHEYVNAAGITEVEKRLRRIIRELERVSKEVLDRLREIIEKLDRDAT

SEQ ID NO: 401 - protein, 181 aa, Artificial Sequence
  Synthetic
DEERKLEKSLKDVEDTHRRLLEKNDEDLKELRKRVEDMLRRLEDALRRILEDIEEKLKRIEDDETLKRLRKRVKELLDEIRRRLERLEREVDKRLEEIKERNDRHHEEAKKELKRIRDKIRRDGARDHMVLHEYVNAAGITEDLKRSNDEVKELAERLEETIRDLLRRIEEILKEIEERVR

SEQ ID NO: 402 - protein, 177 aa, Artificial Sequence
  Synthetic
SVLEEVRRRVEELLKTVKESVDRSHERSERLIEEVRESLKEVKRRVKELVERVREKGIPEDRVKRIEDKLREELERLERENRKIEEDLKRSNDELRRENERIAERLEELLRELSRDTNDKVARDVRDHMVLHEYVNAAGITRNLEDVERVIRELNKENERVLREVEKKIEKLIRETE

SEQ ID NO: 403 - protein, 183 aa, Artificial Sequence
  Synthetic
KDAEDLERRVRELVEENNRVSKRLAEEVTRLVKENEDKVRELEKEVRDRAKELLDMKRRGEVREEEVKRVLREIEELLREITEHSKEVLKTIEKLLRDSLEHSRRVLEEIERLLETILRKSKDSERDHMVLHEYVNAAGITLRENEKVADELRKRAEKSLEDVKRVVDELRKIVDDVLKRVED

SEQ ID NO: 404 - protein, 183 aa, Artificial Sequence
  Synthetic
SEIEKLVEDVRKLVEDNLRHSEEVHRRNRRLIEENERKIDELEKRVRKLVEELRELAERGEIREEEARKVLEEIKRLLDEIRRHSEEVLKEIERTLKENLKHSEEVLRRIEERLEDIKRKDKDSERDHMVLHEYVNAAGITLDESEKLNRESRKRVTRSLEKVDDLVRELEKLARKVLEEVKT

SEQ ID NO: 405 - protein, 177 aa, Artificial Sequence
  Synthetic
REIEELRKEIETLIRENEELNRRSKETSEELIRRLKKLNRDVEEEVRRLVKDLRDRGAPEEDVRRAEERVKKLIEDNKRHSDEVAKTDKKLNEDSERHTRRVEERLRELLDRLSRSDKDEVVRRVRDHMVLHEYVNAAGITEVNETSRRLATRDAKHTRDVLREIKRLADEIRERTR

SEQ ID NO: 406 - protein, 181 aa, Artificial Sequence
  Synthetic
EEIERALREMRELSRTHKELVEKILRDIAELAKTHERINEDILRKIKKLIDEIADEIRKEDKKEELKRKIDELRRRAEELLKESKEHLKRLEDTVRELIERLKETLKKVEEDLKRILEKLEKSRERDHMVLHEYVNAAGITELLKRVEDEVRRLIRKLEELNRRTEEEVKKLIKKLEDDLK

SEQ ID NO: 407 - protein, 178 aa, Artificial Sequence
  Synthetic
SEIERIERENDRLNEENKKITEDIERELKRLLEENRELSRTIEEELERLLRELRKRNGGREEVLKEVEDRLRRIVEEIRRSDKRLEDIAREVKKRIRESDEELRRVSEEITRRLRKVRDEKTLRERDHMVLHEYVNAAGITKKLLDDLREVSKKNKEDLKRLLREVREVARKVKERAN

SEQ ID NO: 408 - protein, 182 aa, Artificial Sequence
  Synthetic
DEIETVLDEVRRLHEDAKRRLEEMIDEVRKLNEESVRELARVVEEVERLLRTVKEEVERAGLDKGKLEELEERLERVREDVERILREIKRRNEKTLEDSERILEENKERNRTVLKKLKELRDRGSRDHMVLHEYVNAAGITRESVRRVLEKNRRVVEESKRLAEELLRRVKKVVDEIRKRVE

SEQ ID NO: 409 - protein, 178 aa, Artificial Sequence
  Synthetic
SSKDEIRRRVEEVVERSDEIVKRSREHVKTVVDELDRVVKELERKVREVVKKLDKIRKDGGSEETLKRVLDELREILKELKEEVKKVKRKLEKVVKENRDTIREVEERNRKILDELRKRGVEERARDHMVLHEYVNAAGITRVLKESEDIAKEAEDRLKTVLERVERIADEVLKRLTK

SEQ ID NO: 410 - protein, 178 aa, Artificial Sequence
  Synthetic
SKVEKLEEEIARLVERSRRLVEELKKEVTKVKEKVDEIVERSRRHVKKVVEKLRDIKRRGGSEEVLRRVTEELKKVLEDNRRVIEEVLRDLERILEELKRKAEEVTKRNRDDLKRLRDSGVDEEVRDHMVLHEYVNAAGITTVLRDVTEDIKRIAEELKKALEDSTEIIRRAEDELRT

SEQ ID NO: 411 - protein, 177 aa, Artificial Sequence
  Synthetic
DEVEDILRKVEEIVKKSITDARRLLKEAREIVEESIKTAEELLRRNEDIVRKLSEDVKRTTDEEKKKKLEEESRRVLEKTKRDLDRTKDDNRKALEKIRKRVKETEEENREVVDRVRKAGVDKRVRDHMVLHEYVNAAGITEVLKRVEEVLEESKRVNEKVEEDVRRVHEEVRKEIK

SEQ ID NO: 412 - protein, 182 aa, Artificial Sequence
  Synthetic
SDADRVAEELKKLVEDSRRENERVIEESKRLVKENEDRNRELIERLKKLVDKLRDILEKEKDKKTLDDIVREILERLKRLLEKVEDENRKSHEENKRLLEDVKRKNKRISDELKRLLEEIERRNVRDHMVLHEYVNAAGITKRVMEKTEEVAKKSSEDIKRVADETRRRAEELLKEVDELRK

SEQ ID NO: 413 - protein, 186 aa, Artificial Sequence
  Synthetic
SEVDEVRKTLEDLLRRLDEENKDIIRRNKELLDDLDRKVREAIERLKRLLDELRKILEKLKDRETLTRIIEEIEKRARELIKRLRDEIRKIEEESKKSIEDSRKRNDEIRKRLEELIKDLRDKIKRDHMVLHEYVNAAGITREVIERLKEKNKRLEDDSRRVITELRKKLKDLEDRVREEIEELRK

SEQ ID NO: 414 - protein, 183 aa, Artificial Sequence
  Synthetic
SEVDEVLERIKRLLERLAEHSDKVVRDIEKLLDDNRKENERLLDKLRRELKRLEEMRRRGDLREELLERVVREVEKEIRDIKRKNKRSVETVEKLVRDDRKELKRALEDVERLIRELETRLKDKERDHMVLHEYVNAAGITIDELLKKTDEVLKRARETIEDLNRKLDKVLKEVRDKLDRLRD

SEQ ID NO: 415 - protein, 186 aa, Artificial Sequence
  Synthetic
KEVEDLERRVKEILDRMKRLIDENRKKIEKSIRELERLIDENRKEVERVKKELKDLKREGGDDARTLRERVRKIIEDVEEHSRRSTEEVRRIHKENKEHSERSSDEIRELLRRVEELIEEVKRRLRDHMVLHEYVNAAGITREVVRRAHETNERLVDRSRKAVEKAERTNRRLVEEIRKVAEEVRK

SEQ ID NO: 416 - protein, 178 aa, Artificial Sequence
  Synthetic
KAAEEIRKKVEDYKRESEKILEEVEDHSRRSKETLKRLLDDLRRAVEELKRRLEELKRRPRTEEIAKRAEEAVRRAAERIKKVIDDVERHIRENAKELKRLLEEDREASRRLEDEIDKEVKAREVRDHMVLHEYVNAAGITRVLRELAERNKTALEEAERVLRRLKEEIEKVLRKLKK

SEQ ID NO: 417 - protein, 185 aa, Artificial Sequence
  Synthetic
SAEELLRTIEKRIEDNHRRLEEILEEIARLIEDMLRTDERIVREIKELLKEVLDRVRRAGVPEEVLERVRRELERLKKELEELRRRSEEKVKELKRRLEEIRRKLEEEHRDLRRKLEELRRDLGDRDHMVLHEYVNAAGITERSLREAEDLLRRVEEVIRTSKKESKDVLEKIERLLRDLERRTR

SEQ ID NO: 418 - protein, 182 aa, Artificial Sequence
  Synthetic
SELEKTLEDLKRHSEENKKKLEEDLRDMERNLKENKDRLKKILEEAEKTLKDLERRFREGDIDERELERVRRKMEEIKKRLDENVERNRRKAEDIKRKLDENVKRSEDRVKEIKEDIRRRVRDKDRDHMVLHEYVNAAGITREIHERVKKALDDIVKELEELHERLKRRLEEILRRIAETVR

SEQ ID NO: 419 - protein, 186 aa, Artificial Sequence
  Synthetic
SEIEKLIEELRRELEKVKDELERSIEEMDRELDDVRRDSKRLVDEIKRELREVTERTKRGDRPEEVLRKELEDIKRKLRRILEEHHEKIRRIKEKLRRENKRVRDELKRIKDEIDEKVKDVRRKGRDHMVLHEYVNAAGITKRALEELLKKHTRVVERVEKALDELDKELERIVREAEKELDRREK

SEQ ID NO: 420 - protein, 179 aa, Artificial Sequence
  Synthetic
RLEDEVRKMEKEVREEVKRLEDESRKVLEESRRNLDKLREESKRVLDTVRERIKDLRRRGLDERVLRELLKRVREVHERNRKLLDEVRRASEKVHEDNRRILEEVRKTVKDVVDKLRRVDAKVVKRDHMVLHEYVNAAGITVKKSIEEVKEINRRLNEEVKKTIEEVKEIVKEVTERAK

SEQ ID NO: 421 - protein, 183 aa, Artificial Sequence
  Synthetic
SIEDEIRKLKEDIKRVLDKVRRDNERLKERLDKVLEDIRRSSEDNNRKLEEVLKRIRDKPVDERLVRKVEEAVKRLKEHNEDSTRRVEEVIRRLKEESEESVRKTEKVARDLERELDEVLTRGGERDHMVLHEYVNAAGITLKREDKEVADRAEKLLREAEEHNKRSLDESRRVLEELDEEIR

SEQ ID NO: 422 - protein, 183 aa, Artificial Sequence
  Synthetic
SIREKIRELEERLEEVLRRIEENSERVLREAERVLKEIKDNSKRNNEKLERALEEIRKLPVEDELVRRVKELVERLKRHNKKSSEDVERVVRELKEELKRSSEEVKKAVDRLKEELEKVLRDGGERDHMVLHEYVNAAGITLEEHNRRVVERLKRLLEELKKHNEDSLRKSEEVLRKLEEDAR

SEQ ID NO: 423 - protein, 183 aa, Artificial Sequence
  Synthetic
SIEDRIRELEKRLEKVLREIEEHSKKVVREAEKVLREIEENSRRNNKRLEEVLDEIRKRPVDETLVREVEEAVRRLKKHNKDSSDTARKLVEELKKELKESSDRVRKVVEELKDRLRKVLEKGGERDHMVLHEYVNAAGITLKEDNEDVVRRLKEVLKELRKHNKRSLDESEKVLRELRERIR

SEQ ID NO: 424 - protein, 178 aa, Artificial Sequence
  Synthetic
DEARELVKELEDLIREITKTVRRLLEESEELIKRIDDAVDDLRRADEDLNREIKEEIEKGKSKESLEALIERLKESLERVKRTIEKLIRDLERLNEKLRRDVESLVAELEKILSKIKRGGLDERIRDHMVLHEYVNAAGITEILKRSEDETDKLREKAERILEDLERANRRTMDEARR

SEQ ID NO: 425 - protein, 176 aa, Artificial Sequence
  Synthetic
STAETVEKKVEEVIRENEKSMRESEEKVDRSTKRIEDVLRRLEETIRKTSDDIAKGVKGERVKEVLEENRRLLEEAKKLVDEVLETNKKLLEDDKRLNEEVSKTLKKLLEEIKSVDTREDATRVIRDHMVLHEYVNAAGITTIRRSEELVRRIERVIEEIIKRSEKLLEDVARESK

SEQ ID NO: 426 - protein, 186 aa, Artificial Sequence
  Synthetic
SRVEEIIEDLRRLLEEIRKENEDSIRRSKELLDRVKEINDTIIAELERLLKDIEKEVREKGSESEEVKKALRAVLEELEKLLRRVAEINEEVLRRNSKLVEEDERRNREVLKELARLVEELIREIRDHMVLHEYVNAAGITLRDIDKLDRESKEAFRATNEEIAKLDEDTARVAERVKKAIEDLAK

SEQ ID NO: 427 - protein, 180 aa, Artificial Sequence
  Synthetic
REVEEMIKELEELLKDLKEKNERASKRNRELVRRLEEENKRVIEELKKLVKELEDLVRSGEDEEVLREVLKRLEEVLERVRALNERVLEAIEKSLEEVKASNEAVKRRLKELLEEAERGVDSEKLRDHMVLHEYVNAAGITLDEYTRESIRRAKKEIERLNRETKKVIEEVVKRIEEERK

SEQ ID NO: 428 - protein, 181 aa, Artificial Sequence
  Synthetic
DAVEEAEKLIRKVIADSEKLLRDLADLNAKSIRRSEKLVEDDRRANEDVIRKLEELRRNGGSEEELRALLKEVEDTNRASHETNKRLLDEDRALNKEVHDRNEKLLRDIKRLVEEVAKGIDSEELRDHMVLHEYVNAAGITDSSREIKRLLEESERVMKRSSEDIKRTLDDTRRVVEEVRR

SEQ ID NO: 429 - protein, 185 aa, Artificial Sequence
  Synthetic
SEIDEVLTRLRKISKDLNETSDRVNERARKIIDDIKKESKRVNDEAREIVERLKREIDKTRDRDVLRRILKEIEDVARRVKEINEELLARVEKVVREVEEINRELVKRSREAVEAVKRLLDRGVSRDHMVLHEYVNAAGITEEDRKRLEESTRSVRKLLEELKRELEKSTRSVKALVDELRERVR

SEQ ID NO: 430 - protein, 183 aa, Artificial Sequence
  Synthetic
SKLEEVEKAVRKVIEDSRRVNEEVNRRSEEVVRELEKVHREVNDASRRVVEKARRVLKGSGDERLAAEVERIIEEIRELNERDRKRVEEIRKEIEDLNRDLNRRSKESEDRLRKLLEDATRGGVTRDHMVLHEYVNAAGITNKRRVEDVARKSKELVEDVRRHSEEVVRRVEELVKEVEERVR

SEQ ID NO: 431 - protein, 183 aa, Artificial Sequence
  Synthetic
SDVDRVLEEIRKLLEDLKRHSEKVSEENEDLLRANTELNKRVSEDNERLLEELKRLRERGGISEEDLKRALDRVRKTVETVKEENKRSLEDVRRTVETNKRKLERVVEEIKKLIEDAKRRGSGDERDHMVLHEYVNAAGITIDRLLETSDRSLEKVEADLRRLNEELDRSLERAERTIRELAK

SEQ ID NO: 432 - protein, 185 aa, Artificial Sequence
  Synthetic
SSVEELLERLRRISEENKRRIEKLLREVEKVLRELKDRHRKLLKRVEEIIRKVKEEIKSGLPEEAVKRVLERVRERVKEVLEEADRLNDEMRRIVTEVEKELDKSDKEVEDAVRDILKKIEEGVRRDHMVLHEYVNAAGITDENRDRSKKVKEEIRRILEDLTRTTERVKREIAKLLKELEDTAR

SEQ ID NO: 433 - protein, 186 aa, Artificial Sequence
  Synthetic
SAEDSIRELLERDERLLEEARKEAKRLNEENERLLERIEETVRRLLEEIKRLLDDIRKKIKGEKLREIEELVRRVKRTIEKLLEEVKKSVEDSSKRIEELLEAVERSVERTKEEIRRLLDEVRKDRRDHMVLHEYVNAAGITDENRRLVKEVIEEVEKLIRDNEKLAEDIEREIRRLLKELDEAAK

SEQ ID NO: 434 - protein, 182 aa, Artificial Sequence
  Synthetic
DEAEKLLKELRDLLEESRKDLERLLKELEDLLEESKRDLERLLEEITELLKRIKETVERRNEREKLEKLLRELKKVVERLKDNLKDNERRNKEAIERVRKKLKDNERENKKVIEDLRAKLKDLEEVRDHMVLHEYVNAAGITEARKRLEEVEEKSKKIIDDARRALDRIDKELRRVVEETRK

SEQ ID NO: 435 - protein, 184 aa, Artificial Sequence
  Synthetic
SLEEVIKTVRKLLEEVERRLREVVERAERMLEEVRRRTREVSEEAREMLKDVEKALRDKNVSEEIEEKLRKIKEELERDNEKVNRDNERSVETLRRLLDRVRKEVKDIAKELEERLKEVERKSRDDRDHMVLHEYVNAAGITLRELIEKLREEVEKIVDENRKTVEELRRRNEEIVRRLRREIE

SEQ ID NO: 436 - protein, 184 aa, Artificial Sequence
  Synthetic
KLDEVIEEIRKLLRRMEEELRRSVEEIDKLLREVRELLRESSEKVKELLRRVTEELKKRGVPEEVKERLDRLVETLRRLSEETLKELDKLVREVKELSKESLKRLRELVERLRRELEEIKKRGEDERDHMVLHEYVNAAGITLREIVKRNTEIAREVVERAKRIVEKNEKLLKDVVEEAKKIVK

SEQ ID NO: 437 - protein, 187 aa, Artificial Sequence
  Synthetic
SEKERLKEELEKLSKEIEDILRDDKRSDDELRRRLRELLEKDRREDERLNEELKRMLEEARKRVSEDELRAIKKEIEDLNRRNEESLRAIEEKIKRLNDENRKSLEEIRRRLKRLVEEVDELRKRDRDHMVLHEYVNAAGITAEKLKRDIEDNNRKLRKVATELAKEIEDNSEKLREDAKRLSEKIK

SEQ ID NO: 438 - protein, 187 aa, Artificial Sequence
  Synthetic
DEEEELRKRLEKLSKEVRELLRRDEEEDRRLNRELEELLKDHERTVRDLSREVEDLLRKARRKVSEEELTRLRKKLRDLEEESKEALRELRRRVEELNKENKKSLDDLERRLKELEDRAREVEKRDRDHMVLHEYVNAAGITIRKLAEDLKRNTEDLRRVIKELAERLEELNKRLKREIRRLKEELR

SEQ ID NO: 439 - protein, 181 aa, Artificial Sequence
  Synthetic
DEERKLEKSLKDVEDTHRRLLEKNDEDLKELRKRVEDMLRRLEDALRRILEDIEEKLKRIEDDETLKRLRKRVKELLDEIRRRLERLEREVDKRLEEIKERNDRHHEEAKKELKRIRDKIRRDGADRDHMVLHEYVNAAGITDLKRSNDEVKELAERLEETIRDLLRRIEEILKEIEERVR

SEQ ID NO: 440 - protein, 179 aa, Artificial Sequence
  Synthetic
SSKEVADELRKKAEKVLDELRKIIRELERKNEDSLRRTEEIVRRLEEEAERVLRDLVRTRGEDDRLVREVERLLRELKRRLEELIRRSEELIKRSREEVDRVIRTVEKLLEELDRLLRANKGDIEDRDHMVLHEYVNAAGITRKLAKSSDDTVREDEKLVEELRKDVKRIVRKIKKDLE

SEQ ID NO: 441 - protein, 183 aa, Artificial Sequence
  Synthetic
SEIEKLVEDVRKLVEDNLRHSEEVHRRNRRLIEENERKIDELEKRVRKLVEELRELAERGEIREEEARKVLEEIKRLLDEIRRHSEEVLKEIERTLKENLKHSEEVLRRIEERLEDIKRKDKDSERRDHMVLHEYVNAAGITDESEKLNRESRKRVTRSLEKVDDLVRELEKLARKVLEEVKT

SEQ ID NO: 442 - protein, 182 aa, Artificial Sequence
  Synthetic
DEIETVLDEVRRLHEDAKRRLEEMIDEVRKLNEESVRELARVVEEVERLLRTVKEEVERAGLDKGKLEELEERLERVREDVERILREIKRRNEKTLEDSERILEENKERNRTVLKKLKELRDRGSDRDHMVLHEYVNAAGITESVRRVLEKNRRVVEESKRLAEELLRRVKKVVDEIRKRVE

SEQ ID NO: 443 - protein, 182 aa, Artificial Sequence
  Synthetic
SDADRVAEELKKLVEDSRRENERVIEESKRLVKENEDRNRELIERLKKLVDKLRDILEKEKDKKTLDDIVREILERLKRLLEKVEDENRKSHEENKRLLEDVKRKNKRISDELKRLLEEIERRNVDRDHMVLHEYVNAAGITRVMEKTEEVAKKSSEDIKRVADETRRRAEELLKEVDELRK

SEQ ID NO: 444 - protein, 186 aa, Artificial Sequence
  Synthetic
SEVDEVRKTLEDLLRRLDEENKDIIRRNKELLDDLDRKVREAIERLKRLLDELRKILEKLKDRETLTRIIEEIEKRARELIKRLRDEIRKIEEESKKSIEDSRKRNDEIRKRLEELIKDLRDKIKDRDHMVLHEYVNAAGITEVIERLKEKNKRLEDDSRRVITELRKKLKDLEDRVREEIEELRK

SEQ ID NO: 445 - protein, 183 aa, Artificial Sequence
  Synthetic
SEVDEVLERIKRLLERLAEHSDKVVRDIEKLLDDNRKENERLLDKLRRELKRLEEMRRRGDLREELLERVVREVEKEIRDIKRKNKRSVETVEKLVRDDRKELKRALEDVERLIRELETRLKDKEERDHMVLHEYVNAAGITDELLKKTDEVLKRARETIEDLNRKLDKVLKEVRDKLDRLRD

SEQ ID NO: 446 - protein, 184 aa, Artificial Sequence
  Synthetic
ELIKKARKDVEEVRERSERLVDELRKRNKKLADESRRLIDKLRKDVEKVLREIEDLLRKRRTKDVLKEIEDLVRELERELRRVVKESSDKVRKLIRENEKVVEESSRLFRDLVEKLRRVVEERNDKRDHMVLHEYVNAAGITNEKSERDVREINKESERVNEETEREVEDAIRKLREVLRRAKK

SEQ ID NO: 447 - protein, 179 aa, Artificial Sequence
  Synthetic
DEAEKAKRDSEKVVEDNRKMLEDSTRRAERLNEENKKELKKSTEEAEKILREIDETKRRGTDDEVVKDLIRRVEELLERSRKKLEDLTRDNERVLDESRRRLEKLIRDNERIVKDLTDRVVRVDEVRDHMVLHEYVNAAGITEVLRRNEEIIRRSIEDLERVLDRNRRELEDVIRRLKE

SEQ ID NO: 448 - protein, 179 aa, Artificial Sequence
  Synthetic
RLEDEVRKMEKEVREEVKRLEDESRKVLEESRRNLDKLREESKRVLDTVRERIKDLRRRGLDERVLRELLKRVREVHERNRKLLDEVRRASEKVHEDNRRILEEVRKTVKDVVDKLRRVDAKVVKERDHMVLHEYVNAAGITKKSIEEVKEINRRLNEEVKKTIEEVKEIVKEVTERAK

SEQ ID NO: 449 - protein, 183 aa, Artificial Sequence
  Synthetic
SIEDEIRKLKEDIKRVLDKVRRDNERLKERLDKVLEDIRRSSEDNNRKLEEVLKRIRDKPVDERLVRKVEEAVKRLKEHNEDSTRRVEEVIRRLKEESEESVRKTEKVARDLERELDEVLTRGGEERDHMVLHEYVNAAGITKREDKEVADRAEKLLREAEEHNKRSLDESRRVLEELDEEIR

SEQ ID NO: 450 - protein, 183 aa, Artificial Sequence
  Synthetic
SIREKIRELEERLEEVLRRIEENSERVLREAERVLKEIKDNSKRNNEKLERALEEIRKLPVEDELVRRVKELVERLKRHNKKSSEDVERVVRELKEELKRSSEEVKKAVDRLKEELEKVLRDGGERRDHMVLHEYVNAAGITEEHNRRVVERLKRLLEELKKHNEDSLRKSEEVLRKLEEDAR

SEQ ID NO: 451 - protein, 183 aa, Artificial Sequence
  Synthetic
SIEERVRELMRDLERVLKEIREHSKRVIEEAKRVLEEIERNSERNNKELEEVLDEIRKRPVDETLVREVEEAVKKLKEHNKRSSDTVRDAVRKLVERLKESSDRATELVKDLKRKLEEVLRRGGEKRDHMVLHEYVNAAGITRRNNKEVVDRLKEVLERLKEHNRRSLDESRKVLRELKERIR

SEQ ID NO: 452 - protein, 178 aa, Artificial Sequence
  Synthetic
DEARELVKELEDLIREITKTVRRLLEESEELIKRIDDAVDDLRRADEDLNREIKEEIEKGKSKESLEALIERLKESLERVKRTIEKLIRDLERLNEKLRRDVESLVAELEKILSKIKRGGLDERILRDHMVLHEYVNAAGITILKRSEDETDKLREKAERILEDLERANRRTMDEARR

SEQ ID NO: 453 - protein, 178 aa, Artificial Sequence; identical to SEQ ID NO: 452
  Synthetic

SEQ ID NO: 454 - protein, 184 aa, Artificial Sequence
  Synthetic
DEIRKVVKEITDLLKASNDKNRKVVEEIRDLLRKSKKLADELVERLRALVEDLRRRIDKSGDKETAEDIVRRIIEELKRILKEIEDLARRINREIERLVEEVERDNRDVNRAIEELLKDIARRGGSRDHMVLHEYVNAAGITNEESMRRVKEDADRVSEANKEVLDRVREEVKRLIEEVRETLR

SEQ ID NO: 455 - protein, 186 aa, Artificial Sequence
  Synthetic
SRVEEIIEDLRRLLEEIRKENEDSIRRSKELLDRVKEINDTIIAELERLLKDIEKEVREKGSESEEVKKALRAVLEELEKLLRRVAEINEEVLRRNSKLVEEDERRNREVLKELARLVEELIREIGRDHMVLHEYVNAAGITRDIDKLDRESKEAFRATNEEIAKLDEDTARVAERVKKAIEDLAK

SEQ ID NO: 456 - protein, 181 aa, Artificial Sequence
  Synthetic
DAVEEAEKLIRKVIADSEKLLRDLADLNAKSIRRSEKLVEDDRRANEDVIRKLEELRRNGGSEEELRALLKEVEDTNRASHETNKRLLDEDRALNKEVHDRNEKLLRDIKRLVEEVAKGIDSEELLRDHMVLHEYVNAAGITSSREIKRLLEESERVMKRSSEDIKRTLDDTRRVVEEVRR

SEQ ID NO: 457 - protein, 177 aa, Artificial Sequence
  Synthetic
SSDEVLKEIEEIIRRLEAEVRRVNAEVNASTEDLAREVEEVLRATNELIEELERRVTGTEELKRVIDELRDRDRKVRRRVERVIEESAKRDDESRKRLTRAVEKLRADLKKLADDGVPEEALSKAIRDHMVLHEYVNAAGITWRDRNKELVDRLSEELKEWLKDVERVLKELTDKDR

SEQ ID NO: 458 - protein, 185 aa, Artificial Sequence
  Synthetic
SEIDEVLTRLRKISKDLNETSDRVNERARKIIDDIKKESKRVNDEAREIVERLKREIDKTRDRDVLRRILKEIEDVARRVKEINEELLARVEKVVREVEEINRELVKRSREAVEAVKRLLDRGVSDRDHMVLHEYVNAAGITEDRKRLEESTRSVRKLLEELKRELEKSTRSVKALVDELRERVR

SEQ ID NO: 459 - protein, 181 aa, Artificial Sequence
  Synthetic
SEIETVRREIEKILDDLRRTVKRIEDEVRKIHEDLRRSLEDSKRNIEEILKDLERAARRDGLDKKVEDDMRKLVEDLKRKHDKLRADNEAVTKELKDRLKKLEDDLARAIEELRRRLDKGLDKEDIRDHMVLHEYVNAAGITDLKELLERYEEIVRRIKELLKDLNREAEEVVRRLKEELR

SEQ ID NO: 460 - protein, 183 aa, Artificial Sequence
  Synthetic
SDVDRVLEEIRKLLEDLKRHSEKVSEENEDLLRANTELNKRVSEDNERLLEELKRLRERGGISEEDLKRALDRVRKTVETVKEENKRSLEDVRRTVETNKRKLERVVEEIKKLIEDAKRRGSGDEERDHMVLHEYVNAAGITDRLLETSDRSLEKVEADLRRLNEELDRSLERAERTIRELAK

SEQ ID NO: 461 - protein, 177 aa, Artificial Sequence
  Synthetic
SKEDRLREELKKLLARLAEEIERLKRALEESNKDLKRTIDASEKHLRDVNEDVKRGGVSEELLRELERSTAENKERAKELLKRHEDLVRKVEKELADLLRRLEEIVARVDEALKRGISEEELDKLLRDHMVLHEYVNAAGITLLKRVEKLTEDAKRDLERSNREHKELADRIKETAR

SEQ ID NO: 462 - protein, 185 aa, Artificial Sequence
  Synthetic
SSVEELLERLRRISEENKRRIEKLLREVEKVLRELKDRHRKLLKRVEEIIRKVKEEIKSGLPEEAVKRVLERVRERVKEVLEEADRLNDEMRRIVTEVEKELDKSDKEVEDAVRDILKKIEEGVRDRDHMVLHEYVNAAGITENRDRSKKVKEEIRRILEDLTRTTERVKREIAKLLKELEDTAR

SEQ ID NO: 463 - protein, 186 aa, Artificial Sequence
  Synthetic
SAEDSIRELLERDERLLEEARKEAKRLNEENERLLERIEETVRRLLEEIKRLLDDIRKKIKGEKLREIEELVRRVKRTIEKLLEEVKKSVEDSSKRIEELLEAVERSVERTKEEIRRLLDEVRKDRKRDHMVLHEYVNAAGITENRRLVKEVIEEVEKLIRDNEKLAEDIEREIRRLLKELDEAAK

SEQ ID NO: 464 - protein, 182 aa, Artificial Sequence
  Synthetic
DEAEKLLKELRDLLEESRKDLERLLKELEDLLEESKRDLERLLEEITELLKRIKETVERRNEREKLEKLLRELKKVVERLKDNLKDNERRNKEAIERVRKKLKDNERENKKVIEDLRAKLKDLEEVKRDHMVLHEYVNAAGITARKRLEEVEEKSKKIIDDARRALDRIDKELRRVVEETRK

SEQ ID NO: 465 - protein, 182 aa, Artificial Sequence
  Synthetic
RVEDALRKLLDDVRRLVEEAERRLRTSNDKSRRLVEEAKRRLEESNERSEKLVRDVRRRIRDEDVKRVLEELLKRDHDVVRRVLERIDEMLERNSRLVKRVLEDIRRLLKRVREVVERIKRVRSKVVRDHMVLHEYVNAAGITIIEDVLRASEDTIRRLEEIIRKVEEDSKRIIEEIERAAR

SEQ ID NO: 466 - protein, 183 aa, Artificial Sequence
  Synthetic
KVEKRLTDLLKTVADEVKRVEDELRETVRESKEVVDKSRRDLERTVEESEKTVKDAERRVSEDLVRRIRKVLDENREVNDRVVKEDERILEENERVNRKVVEKIRDILRKIEEVVRRAAEEIRDEEVRDHMVLHEYVNAAGITEEADRVRERSKKILTDLKKSSEDVKRESERMLKKLEDEIR

SEQ ID NO: 467 - protein, 187 aa, Artificial Sequence
  Synthetic
SEKERLKEELEKLSKEIEDILRDDKRSDDELRRRLRELLEKDRREDERLNEELKRMLEEARKRVSEDELRAIKKEIEDLNRRNEESLRAIEEKIKRLNDENRKSLEEIRRRLKRLVEEVDELRKRDNRDHMVLHEYVNAAGITEKLKRDIEDNNRKLRKVATELAKEIEDNSEKLREDAKRLSEKIK

SEQ ID NO: 468 - protein, 187 aa, Artificial Sequence
  Synthetic
DEEEELRKRLEKLSKEVRELLRRDEEEDRRLNRELEELLKDHERTVRDLSREVEDLLRKARRKVSEEELTRLRKKLRDLEEESKEALRELRRRVEELNKENKKSLDDLERRLKELEDRAREVEKRDRRDHMVLHEYVNAAGITRKLAEDLKRNTEDLRRVIKELAERLEELNKRLKREIRRLKEELR

SEQ ID NO: 469 - protein, 181 aa, Artificial Sequence
  Synthetic
DEEETLEDVLRELEERVEKLLRDLTRDLERVEKEHKELLKRNKEAIDEIEKRIEELLKRIEDDEKLRRLKEEVRKLVEESRERNKRHHKEVREVLERIRELLERLEKELRRALEEIRDKIRKDGATDRDHMVLHEYVNAAGITIRDLERKVRKLERDIRENIKKNHREVREILRKIEEDVR

SEQ ID NO: 470 - protein, 183 aa, Artificial Sequence
  Synthetic
SEIEKLVEDVRKLVEDNLRHSEEVHRRNRRLIEENERKIDELEKRVRKLVEELRELAERGEIREEEARKVLEEIKRLLDEIRRHSEEVLKEIERTLKENLKHSEEVLRRIEERLEDIKRKDKDSERVRDHMVLHEYVNAAGITESEKLNRESRKRVTRSLEKVDDLVRELEKLARKVLEEVKT

SEQ ID NO: 471 - protein, 181 aa, Artificial Sequence
  Synthetic
EEIERALREMRELSRTHKELVEKILRDIAELAKTHERINEDILRKIKKLIDEIADEIRKEDKKEELKRKIDELRRRAEELLKESKEHLKRLEDTVRELIERLKETLKKVEEDLKRILEKLEKSRELDRDHMVLHEYVNAAGITLKRVEDEVRRLIRKLEELNRRTEEEVKKLIKKLEDDLK

SEQ ID NO: 472 - protein, 183 aa, Artificial Sequence
  Synthetic
SEVDEVLERIKRLLERLAEHSDKVVRDIEKLLDDNRKENERLLDKLRRELKRLEEMRRRGDLREELLERVVREVEKEIRDIKRKNKRSVETVEKLVRDDRKELKRALEDVERLIRELETRLKDKEELRDHMVLHEYVNAAGITELLKKTDEVLKRARETIEDLNRKLDKVLKEVRDKLDRLRD

SEQ ID NO: 473 - protein, 185 aa, Artificial Sequence
  Synthetic
DDIERLKREIERLLKEAEKISRDNEERSKELLDRLRKLSEDNKRKIDKLVEELKRLADKIKDKEELTRRLKEVVDRVEKSVRDSERMLREVVREDEESVRRSKTKLEDLLRKVEELVRRLEKKVTDERDHMVLHEYVNAAGITVDELKRKNDEVHRRSREEVKRLLEENRKLLEDLRRMVREITQ

SEQ ID NO: 474 - protein, 184 aa, Artificial Sequence
  Synthetic
ELIKKARKDVEEVRERSERLVDELRKRNKKLADESRRLIDKLRKDVEKVLREIEDLLRKRRTKDVLKEIEDLVRELERELRRVVKESSDKVRKLIRENEKVVEESSRLFRDLVEKLRRVVEERNDKKRDHMVLHEYVNAAGITEKSERDVREINKESERVNEETEREVEDAIRKLREVLRRAKK

SEQ ID NO: 475 - protein, 186 aa, Artificial Sequence
  Synthetic
KEVEDLERTVRTILKRMRELITRNEEEIRRSIEELKKLLKENKDTVRRILEEMKELKKEGGDDKKRLVEEIKRLLDELRENSKRSSDRAKEIHERNKRHSEESSRTIEKLLKELRDLVRDVERKLRDRDHMVLHEYVNAAGITVVREADERNKRLTKRSKEVLDEVHRANEEALKEVEEVVRRVTK

SEQ ID NO: 476 - protein, 178 aa, Artificial Sequence
  Synthetic
KAAEEIRKKVEDYKRESEKILEEVEDHSRRSKETLKRLLDDLRRAVEELKRRLEELKRRPRTEEIAKRAEEAVRRAAERIKKVIDDVERHIRENAKELKRLLEEDREASRRLEDEIDKEVKAREVADRDHMVLHEYVNAAGITLRELAERNKTALEEAERVLRRLKEEIEKVLRKLKK

SEQ ID NO: 477 - protein, 185 aa, Artificial Sequence
  Synthetic
SAEELLRTIEKRIEDNHRRLEEILEEIARLIEDMLRTDERIVREIKELLKEVLDRVRRAGVPEEVLERVRRELERLKKELEELRRRSEEKVKELKRRLEEIRRKLEEEHRDLRRKLEELRRDLGDKERDHMVLHEYVNAAGITSLREAEDLLRRVEEVIRTSKKESKDVLEKIERLLRDLERRTR

SEQ ID NO: 478 - protein, 182 aa, Artificial Sequence
  Synthetic
DLERRLDELLKRIEDRVRELVRTLEESLRELERRVREIIRRLEEHLRRIEKMVRDLKRANKPDKAVKDDVRRLRENADRLNKRVREELKKLREDVKRVNEDVKRELDKLAEEAKDMLRKLREAGIDERDHMVLHEYVNAAGITIEEVSERHKREVDRLEREIEEVSREHKERVEKLLREIER

SEQ ID NO: 479 - protein, 179 aa, Artificial Sequence
  Synthetic
RLEDEVRKMEKEVREEVKRLEDESRKVLEESRRNLDKLREESKRVLDTVRERIKDLRRRGLDERVLRELLKRVREVHERNRKLLDEVRRASEKVHEDNRRILEEVRKTVKDVVDKLRRVDAKVVKELRDHMVLHEYVNAAGITKSIEEVKEINRRLNEEVKKTIEEVKEIVKEVTERAK

SEQ ID NO: 480 - protein, 185 aa, Artificial Sequence
  Synthetic
SEAEELLKRLEDRAEEILRRLEEILRTSRKLAEDVLRELEKLLRESERRIREVLEELRGIKDKKELEDVIREVEKELDESLERSRELLKDVLKKLDDNLKESERLVEDIDRELAKILEDLKKAGVPKRDHMVLHEYVNAAGITLKRIVDENAKIVEDARRALEKIVKENEEILRRLKKELRELRK

SEQ ID NO: 481 - protein, 184 aa, Artificial Sequence
  Synthetic
DDLERAREEVADLIRKHEEKTRRILEESRRLNERHRELSARILDEIRKLAERIEELIKRERGKDELRRKVEDLEARVEDLIRRLEEHLRRVHDKDRRLIEDLRRHLKRVVEELKRLIDELRRGVPKERDHMVLHEYVNAAGITREKNREVEKRARDSNRDLKRTNDEIAKEVRELIKKLREDLK

SEQ ID NO: 482 - protein, 178 aa, Artificial Sequence
  Synthetic
DEARELVKELEDLIREITKTVRRLLEESEELIKRIDDAVDDLRRADEDLNREIKEEIEKGKSKESLEALIERLKESLERVKRTIEKLIRDLERLNEKLRRDVESLVAELEKILSKIKRGGLDERILRRDHMVLHEYVNAAGITLKRSEDETDKLREKAERILEDLERANRRTMDEARR

SEQ ID NO: 483 - protein, 182 aa, Artificial Sequence
  Synthetic
DEVREVAERLRRLVDESRKRNEEVIKESEALVDRVRKTNEEVMKRLRELIDKLEKDIRRSGDKETVEKIIREVLSAIDELLKRVERTNAEISKENARLLDEVRKTNEEISRRLAKLLEDIRRGSGDARDHMVLHEYVNAAGITVLRKTEEAVKRSTETNKRLLEASKEVADRLRERIKEAAK

SEQ ID NO: 484 - protein, 186 aa, Artificial Sequence
  Synthetic
SRVEEIIEDLRRLLEEIRKENEDSIRRSKELLDRVKEINDTIIAELERLLKDIEKEVREKGSESEEVKKALRAVLEELEKLLRRVAEINEEVLRRNSKLVEEDERRNREVLKELARLVEELIREIGDRDHMVLHEYVNAAGITDIDKLDRESKEAFRATNEEIAKLDEDTARVAERVKKAIEDLAK

SEQ ID NO: 485 - protein, 185 aa, Artificial Sequence
  Synthetic
SEIDEVLTRLRKISKDLNETSDRVNERARKIIDDIKKESKRVNDEAREIVERLKREIDKTRDRDVLRRILKEIEDVARRVKEINEELLARVEKVVREVEEINRELVKRSREAVEAVKRLLDRGVSDERDHMVLHEYVNAAGITDRKRLEESTRSVRKLLEELKRELEKSTRSVKALVDELRERVR

SEQ ID NO: 486 - protein, 178 aa, Artificial Sequence
  Synthetic
DAAERAKEKLDKILEDLRDVVRASKENLDRLHAENAETLERSKANLDRLLEKVKKDGVPEELLKELERIIRDLKRKHAKLLEDHRKIIEELKREHDRLLKEAEEIVRRIKDELEKGSDDERDIERILRDHMVLHEYVNAAGITLNREVERVSRDTKKKSKELNEELKAVLDEVKRKAD

SEQ ID NO: 487 - protein, 183 aa, Artificial Sequence
  Synthetic
SKLEEVEKAVRKVIEDSRRVNEEVNRRSEEVVRELEKVHREVNDASRRVVEKARRVLKGSGDERLAAEVERIIEEIRELNERDRKRVEEIRKEIEDLNRDLNRRSKESEDRLRKLLEDATRGGVTKERDHMVLHEYVNAAGITRRVEDVARKSKELVEDVRRHSEEVVRRVEELVKEVEERVR

SEQ ID NO: 488 - protein, 183 aa, Artificial Sequence
  Synthetic
SDVDRVLEEIRKLLEDLKRHSEKVSEENEDLLRANTELNKRVSEDNERLLEELKRLRERGGISEEDLKRALDRVRKTVETVKEENKRSLEDVRRTVETNKRKLERVVEEIKKLIEDAKRRGSGDEEARDHMVLHEYVNAAGITRLLETSDRSLEKVEADLRRLNEELDRSLERAERTIRELAK

SEQ ID NO: 489 - protein, 185 aa, Artificial Sequence
  Synthetic
SSVEELLERLRRISEENKRRIEKLLREVEKVLRELKDRHRKLLKRVEEIIRKVKEEIKSGLPEEAVKRVLERVRERVKEVLEEADRLNDEMRRIVTEVEKELDKSDKEVEDAVRDILKKIEEGVRDRRDHMVLHEYVNAAGITNRDRSKKVKEEIRRILEDLTRTTERVKREIAKLLKELEDTAR

SEQ ID NO: 490 - protein, 186 aa, Artificial Sequence
  Synthetic
SAEDSIRELLERDERLLEEARKEAKRLNEENERLLERIEETVRRLLEEIKRLLDDIRKKIKGEKLREIEELVRRVKRTIEKLLEEVKKSVEDSSKRIEELLEAVERSVERTKEEIRRLLDEVRKDRKERDHMVLHEYVNAAGITNRRLVKEVIEEVEKLIRDNEKLAEDIEREIRRLLKELDEAAK

SEQ ID NO: 491 - protein, 182 aa, Artificial Sequence
  Synthetic
RVEDALRKLLDDVRRLVEEAERRLRTSNDKSRRLVEEAKRRLEESNERSEKLVRDVRRRIRDEDVKRVLEELLKRDHDVVRRVLERIDEMLERNSRLVKRVLEDIRRLLKRVREVVERIKRVRSKVVERDHMVLHEYVNAAGITIEDVLRASEDTIRRLEEIIRKVEEDSKRIIEEIERAAR

SEQ ID NO: 492 - protein, 184 aa, Artificial Sequence
  Synthetic
SLEEVIKTVRKLLEEVERRLREVVERAERMLEEVRRRTREVSEEAREMLKDVEKALRDKNVSEEIEEKLRKIKEELERDNEKVNRDNERSVETLRRLLDRVRKEVKDIAKELEERLKEVERKSRDDRIRDHMVLHEYVNAAGITELIEKLREEVEKIVDENRKTVEELRRRNEEIVRRLRREIE

SEQ ID NO: 493 - protein, 179 aa, Artificial Sequence
  Synthetic
SSKEVADELRKKAEKVLDELRKIIRELERKNEDSLRRTEEIVRRLEEEAERVLRDLVRTRGEDDRLVREVERLLRELKRRLEELIRRSEELIKRSREEVDRVIRTVEKLLEELDRLLRANKGDIEDLRRDHMVLHEYVNAAGITLAKSSDDTVREDEKLVEELRKDVKRIVRKIKKDLE

SEQ ID NO: 494 - protein, 183 aa, Artificial Sequence
  Synthetic
SEIEKLVEDVRKLVEDNLRHSEEVHRRNRRLIEENERKIDELEKRVRKLVEELRELAERGEIREEEARKVLEEIKRLLDEIRRHSEEVLKEIERTLKENLKHSEEVLRRIEERLEDIKRKDKDSERVRRDHMVLHEYVNAAGITSEKLNRESRKRVTRSLEKVDDLVRELEKLARKVLEEVKT

SEQ ID NO: 495 - protein, 181 aa, Artificial Sequence
  Synthetic
EEIERALREMRELSRTHKELVEKILRDIAELAKTHERINEDILRKIKKLIDEIADEIRKEDKKEELKRKIDELRRRAEELLKESKEHLKRLEDTVRELIERLKETLKKVEEDLKRILEKLEKSRELDERDHMVLHEYVNAAGITKRVEDEVRRLIRKLEELNRRTEEEVKKLIKKLEDDLK

SEQ ID NO: 496 - protein, 186 aa, Artificial Sequence
  Synthetic
SEVDEVRKTLEDLLRRLDEENKDIIRRNKELLDDLDRKVREAIERLKRLLDELRKILEKLKDRETLTRIIEEIEKRARELIKRLRDEIRKIEEESKKSIEDSRKRNDEIRKRLEELIKDLRDKIKDSERDHMVLHEYVNAAGITIERLKEKNKRLEDDSRRVITELRKKLKDLEDRVREEIEELRK

SEQ ID NO: 497 - protein, 183 aa, Artificial Sequence
  Synthetic
SEVDEVLERIKRLLERLAEHSDKVVRDIEKLLDDNRKENERLLDKLRRELKRLEEMRRRGDLREELLERVVREVEKEIRDIKRKNKRSVETVEKLVRDDRKELKRALEDVERLIRELETRLKDKEELRRDHMVLHEYVNAAGITLLKKTDEVLKRARETIEDLNRKLDKVLKEVRDKLDRLRD

SEQ ID NO: 498 - protein, 185 aa, Artificial Sequence
  Synthetic
DDIERLKREIERLLKEAEKISRDNEERSKELLDRLRKLSEDNKRKIDKLVEELKRLADKIKDKEELTRRLKEVVDRVEKSVRDSERMLREVVREDEESVRRSKTKLEDLLRKVEELVRRLEKKVTDEKRDHMVLHEYVNAAGITDELKRKNDEVHRRSREEVKRLLEENRKLLEDLRRMVREITQ

SEQ ID NO: 499 - protein, 186 aa, Artificial Sequence
  Synthetic
KEVEDLERRVKEILDRMKRLIDENRKKIEKSIRELERLIDENRKEVERVKKELKDLKREGGDDARTLRERVRKIIEDVEEHSRRSTEEVRRIHKENKEHSERSSDEIRELLRRVEELIEEVKRRLRDKRDHMVLHEYVNAAGITVRRAHETNERLVDRSRKAVEKAERTNRRLVEEIRKVAEEVRK

SEQ ID NO: 500 - protein, 186 aa, Artificial Sequence
  Synthetic
DEIRELEERVRRILDELRRLVERNREVIERSIRELEKLLDRNRRKVEEILRRIDDLTRRGGDDKKTMLDDVRRLLREAEDHSRRSSETAKRIHRENEEHSKDSSRKVRKLIEELRELAKKVEKEITDERDHMVLHEYVNAAGITMREVDRANRELTKTSKKVLEDVDRTNRRLVKEVRDVVERARK

SEQ ID NO: 501 - protein, 186 aa, Artificial Sequence
  Synthetic
KEVEDLERTVRTILKRMRELITRNEEEIRRSIEELKKLLKENKDTVRRILEEMKELKKEGGDDKKRLVEEIKRLLDELRENSKRSSDRAKEIHERNKRHSEESSRTIEKLLKELRDLVRDVERKLRDERDHMVLHEYVNAAGITVREADERNKRLTKRSKEVLDEVHRANEEALKEVEEVVRRVTK

SEQ ID NO: 502 - protein, 179 aa, Artificial Sequence
  Synthetic
REAEEVERKVEELNRRNRKVLDDARKESEEVVRRNREFLRRLEERVRTILRELDKRKRDGTSEEVIKRLIDRVRKILEDIRRLVDELIKRNERIVEKLTRIVEELIRRNKKLLEDIRRELVKVDEVLRRDHMVLHEYVNAAGITLRELERIHRELIKELKEVLKRLEKDAKEVIERLRT

SEQ ID NO: 503 - protein, 186 aa, Artificial Sequence
  Synthetic
SEIEKLIEELRRELEKVKDELERSIEEMDRELDDVRRDSKRLVDEIKRELREVTERTKRGDRPEEVLRKELEDIKRKLRRILEEHHEKIRRIKEKLRRENKRVRDELKRIKDEIDEKVKDVRRKGADERDHMVLHEYVNAAGITLEELLKKHTRVVERVEKALDELDKELERIVREAEKELDRREK

SEQ ID NO: 504 - protein, 179 aa, Artificial Sequence
  Synthetic
RLEDEVRKMEKEVREEVKRLEDESRKVLEESRRNLDKLREESKRVLDTVRERIKDLRRRGLDERVLRELLKRVREVHERNRKLLDEVRRASEKVHEDNRRILEEVRKTVKDVVDKLRRVDAKVVKELIRDHMVLHEYVNAAGITSIEEVKEINRRLNEEVKKTIEEVKEIVKEVTERAK

SEQ ID NO: 505 - protein, 183 aa, Artificial Sequence
  Synthetic
SIEDEIRKLKEDIKRVLDKVRRDNERLKERLDKVLEDIRRSSEDNNRKLEEVLKRIRDKPVDERLVRKVEEAVKRLKEHNEDSTRRVEEVIRRLKEESEESVRKTEKVARDLERELDEVLTRGGEERVRDHMVLHEYVNAAGITEDKEVADRAEKLLREAEEHNKRSLDESRRVLEELDEEIR

SEQ ID NO: 506 - protein, 183 aa, Artificial Sequence
  Synthetic
SIREKIRELEERLEEVLRRIEENSERVLREAERVLKEIKDNSKRNNEKLERALEEIRKLPVEDELVRRVKELVERLKRHNKKSSEDVERVVRELKEELKRSSEEVKKAVDRLKEELEKVLRDGGEREVRDHMVLHEYVNAAGITHNRRVVERLKRLLEELKKHNEDSLRKSEEVLRKLEEDAR

SEQ ID NO: 507 - protein, 182 aa, Artificial Sequence
  Synthetic
SIEDLVRELKKKVDEVAEDLRRKVREALERSRENIDRLKKHSEENLRRSEEVVDKLRKETREEEVKDILRRVLELSKRIVEESKEILDRVLELSKKVVDDIEEIIRRVEETVKEVLTRLSRVDDKVVKRDHMVLHEYVNAAGITVEKLIRELEDINRKVNERNRRLAEESRKILDEVEKRVR

SEQ ID NO: 508 - protein, 185 aa, Artificial Sequence
  Synthetic
SEAEELLKRLEDRAEEILRRLEEILRTSRKLAEDVLRELEKLLRESERRIREVLEELRGIKDKKELEDVIREVEKELDESLERSRELLKDVLKKLDDNLKESERLVEDIDRELAKILEDLKKAGVPKERDHMVLHEYVNAAGITKRIVDENAKIVEDARRALEKIVKENEEILRRLKKELRELRK

SEQ ID NO: 509 - protein, 179 aa, Artificial Sequence
  Synthetic
SEVEELIKRLAKVLKELVDKVRKVIEDTKELLERLKRRSEDHIRKLREVLKEAKDQPIDDEELKEILDRLRKTLEELEEELKKALEDDREEAKRLVDDARRVLKELEEEVREIRERRGESEELDRRIERDHMVLHEYVNAAGITWERVHREVEELLKRLIDENRKVLDEIRKLLEEKSK

SEQ ID NO: 510 - protein, 184 aa, Artificial Sequence
  Synthetic
DEIRKVVKEITDLLKASNDKNRKVVEEIRDLLRKSKKLADELVERLRALVEDLRRRIDKSGDKETAEDIVRRIIEELKRILKEIEDLARRINREIERLVEEVERDNRDVNRAIEELLKDIARRGGSEDRDHMVLHEYVNAAGITESMRRVKEDADRVSEANKEVLDRVREEVKRLIEEVRETLR

SEQ ID NO: 511 - protein, 182 aa, Artificial Sequence
  Synthetic
DEVREVAERLRRLVDESRKRNEEVIKESEALVDRVRKTNEEVMKRLRELIDKLEKDIRRSGDKETVEKIIREVLSAIDELLKRVERTNAEISKENARLLDEVRKTNEEISRRLAKLLEDIRRGSGDAERDHMVLHEYVNAAGITLRKTEEAVKRSTETNKRLLEASKEVADRLRERIKEAAK

SEQ ID NO: 512 - protein, 186 aa, Artificial Sequence
  Synthetic
SRVEEIIEDLRRLLEEIRKENEDSIRRSKELLDRVKEINDTIIAELERLLKDIEKEVREKGSESEEVKKALRAVLEELEKLLRRVAEINEEVLRRNSKLVEEDERRNREVLKELARLVEELIREIGDERDHMVLHEYVNAAGITIDKLDRESKEAFRATNEEIAKLDEDTARVAERVKKAIEDLAK

SEQ ID NO: 513 - protein, 181 aa, Artificial Sequence
  Synthetic
DAVEEAEKLIRKVIADSEKLLRDLADLNAKSIRRSEKLVEDDRRANEDVIRKLEELRRNGGSEEELRALLKEVEDTNRASHETNKRLLDEDRALNKEVHDRNEKLLRDIKRLVEEVAKGIDSEELLRRRDHMVLHEYVNAAGITREIKRLLEESERVMKRSSEDIKRTLDDTRRVVEEVRR

SEQ ID NO: 514 - protein, 185 aa, Artificial Sequence
  Synthetic
SEIDEVLTRLRKISKDLNETSDRVNERARKIIDDIKKESKRVNDEAREIVERLKREIDKTRDRDVLRRILKEIEDVARRVKEINEELLARVEKVVREVEEINRELVKRSREAVEAVKRLLDRGVSDEDRDHMVLHEYVNAAGITRKRLEESTRSVRKLLEELKRELEKSTRSVKALVDELRERVR

SEQ ID NO: 515 - protein, 183 aa, Artificial Sequence
  Synthetic
SDVDRVLEEIRKLLEDLKRHSEKVSEENEDLLRANTELNKRVSEDNERLLEELKRLRERGGISEEDLKRALDRVRKTVETVKEENKRSLEDVRRTVETNKRKLERVVEEIKKLIEDAKRRGSGDEEAKRDHMVLHEYVNAAGITLLETSDRSLEKVEADLRRLNEELDRSLERAERTIRELAK

SEQ ID NO: 516 - protein, 185 aa, Artificial Sequence
  Synthetic
SSVEELLERLRRISEENKRRIEKLLREVEKVLRELKDRHRKLLKRVEEIIRKVKEEIKSGLPEEAVKRVLERVRERVKEVLEEADRLNDEMRRIVTEVEKELDKSDKEVEDAVRDILKKIEEGVRDRERDHMVLHEYVNAAGITRDRSKKVKEEIRRILEDLTRTTERVKREIAKLLKELEDTAR

SEQ ID NO: 517 - protein, 186 aa, Artificial Sequence
  Synthetic
SAEDSIRELLERDERLLEEARKEAKRLNEENERLLERIEETVRRLLEEIKRLLDDIRKKIKGEKLREIEELVRRVKRTIEKLLEEVKKSVEDSSKRIEELLEAVERSVERTKEEIRRLLDEVRKDRKEERDHMVLHEYVNAAGITRRLVKEVIEEVEKLIRDNEKLAEDIEREIRRLLKELDEAAK

SEQ ID NO: 518 - protein, 182 aa, Artificial Sequence
  Synthetic
DEAEKLLKELRDLLEESRKDLERLLKELEDLLEESKRDLERLLEEITELLKRIKETVERRNEREKLEKLLRELKKVVERLKDNLKDNERRNKEAIERVRKKLKDNERENKKVIEDLRAKLKDLEEVKRKRDHMVLHEYVNAAGITKRLEEVEEKSKKIIDDARRALDRIDKELRRVVEETRK

SEQ ID NO: 519 - protein, 182 aa, Artificial Sequence
  Synthetic
RVEDALRKLLDDVRRLVEEAERRLRTSNDKSRRLVEEAKRRLEESNERSEKLVRDVRRRIRDEDVKRVLEELLKRDHDVVRRVLERIDEMLERNSRLVKRVLEDIRRLLKRVREVVERIKRVRSKVVEERDHMVLHEYVNAAGITEDVLRASEDTIRRLEEIIRKVEEDSKRIIEEIERAAR

SEQ ID NO: 520 - protein, 183 aa, Artificial Sequence
  Synthetic
KVEKRLTDLLKTVADEVKRVEDELRETVRESKEVVDKSRRDLERTVEESEKTVKDAERRVSEDLVRRIRKVLDENREVNDRVVKEDERILEENERVNRKVVEKIRDILRKIEEVVRRAAEEIRDEEVVKRDHMVLHEYVNAAGITADRVRERSKKILTDLKKSSEDVKRESERMLKKLEDEIR

SEQ ID NO: 521 - protein, 181 aa, Artificial Sequence
  Synthetic
SEVERVLEDLRRLVRDVEEKLRRIIERDRRLVEEVERENRKTIRKIEELLRKVLEELKDISDKKTIERIVREIIKEARDLVRRNHERNREIVDESRRLVEELRRIVEEIIRRLRELLERVKSGELAERIRDHMVLHEYVNAAGITELEKTSRDLKKRLEELDRELKALVEKVERDLEELRK

SEQ ID NO: 522 - protein, 180 aa, Artificial Sequence
  Synthetic
STEEVLDEIRKLHKTLTEDIKRVLREIEELHRRTIEENKEVLDKIREDYKRVIDDVRTKDTPNVEKLLKDLEKSAKENEEHNERTLREDDRVLKEIRRRATELLKANEEMLRRIEEVMRAGKVDAEELLRDHMVLHEYVNAAGITLRKESKRVVDETRKLSEENLEHSERVLRKVEEDLR

SEQ ID NO: 523 - protein, 183 aa, Artificial Sequence
  Synthetic
SEIEKLVEDVRKLVEDNLRHSEEVHRRNRRLIEENERKIDELEKRVRKLVEELRELAERGEIREEEARKVLEEIKRLLDEIRRHSEEVLKEIERTLKENLKHSEEVLRRIEERLEDIKRKDKDSERVRTRDHMVLHEYVNAAGITEKLNRESRKRVTRSLEKVDDLVRELEKLARKVLEEVKT

SEQ ID NO: 524 - protein, 182 aa, Artificial Sequence
  Synthetic
DELEEVVRRVRELSRTVKEELREVIERVRELSERVKKKLRKVLREVAELHREVMKRVRDSGLDKSKLEKLEDESRRVLDKSREILRKNEEDNRRLNKELEEILKKNEDDNEDVRRKVDEVTRKGKDAEERDHMVLHEYVNAAGITKDALKRVEDRVRESDKSVRELLEENRKVVEDIKRRVD

SEQ ID NO: 525 - protein, 182 aa, Artificial Sequence
  Synthetic
SDADRVAEELKKLVEDSRRENERVIEESKRLVKENEDRNRELIERLKKLVDKLRDILEKEKDKKTLDDIVREILERLKRLLEKVEDENRKSHEENKRLLEDVKRKNKRISDELKRLLEEIERRNVDVDKRDHMVLHEYVNAAGITEKTEEVAKKSSEDIKRVADETRRRAEELLKEVDELRK

SEQ ID NO: 526 - protein, 184 aa, Artificial Sequence
  Synthetic
ELIKKARKDVEEVRERSERLVDELRKRNKKLADESRRLIDKLRKDVEKVLREIEDLLRKRRTKDVLKEIEDLVRELERELRRVVKESSDKVRKLIRENEKVVEESSRLFRDLVEKLRRVVEERNDKKLMRDHMVLHEYVNAAGITSERDVREINKESERVNEETEREVEDAIRKLREVLRRAKK

SEQ ID NO: 527 - protein, 186 aa, Artificial Sequence
  Synthetic
KEVEDLERRVKEILDRMKRLIDENRKKIEKSIRELERLIDENRKEVERVKKELKDLKREGGDDARTLRERVRKIIEDVEEHSRRSTEEVRRIHKENKEHSERSSDEIRELLRRVEELIEEVKRRLRDKERDHMVLHEYVNAAGITRRAHETNERLVDRSRKAVEKAERTNRRLVEEIRKVAEEVRK

SEQ ID NO: 528 - protein, 186 aa, Artificial Sequence
  Synthetic
DEIRELEERVRRILDELRRLVERNREVIERSIRELEKLLDRNRRKVEEILRRIDDLTRRGGDDKKTMLDDVRRLLREAEDHSRRSSETAKRIHRENEEHSKDSSRKVRKLIEELRELAKKVEKEITDERRDHMVLHEYVNAAGITREVDRANRELTKTSKKVLEDVDRTNRRLVKEVRDVVERARK

SEQ ID NO: 529 - protein, 186 aa, Artificial Sequence
  Synthetic
KEVEDLERTVRTILKRMRELITRNEEEIRRSIEELKKLLKENKDTVRRILEEMKELKKEGGDDKKRLVEEIKRLLDELRENSKRSSDRAKEIHERNKRHSEESSRTIEKLLKELRDLVRDVERKLRDEDRDHMVLHEYVNAAGITREADERNKRLTKRSKEVLDEVHRANEEALKEVEEVVRRVTK

SEQ ID NO: 530 - protein, 182 aa, Artificial Sequence
  Synthetic
DLERRLDELLKRIEDRVRELVRTLEESLRELERRVREIIRRLEEHLRRIEKMVRDLKRANKPDKAVKDDVRRLRENADRLNKRVREELKKLREDVKRVNEDVKRELDKLAEEAKDMLRKLREAGIDERVRDHMVLHEYVNAAGITEVSERHKREVDRLEREIEEVSREHKERVEKLLREIER

SEQ ID NO: 531 - protein, 182 aa, Artificial Sequence
  Synthetic
SELEKTLEDLKRHSEENKKKLEEDLRDMERNLKENKDRLKKILEEAEKTLKDLERRFREGDIDERELERVRRKMEEIKKRLDENVERNRRKAEDIKRKLDENVKRSEDRVKEIKEDIRRRVRDKDKAEERDHMVLHEYVNAAGITERVKKALDDIVKELEELHERLKRRLEEILRRIAETVR

SEQ ID NO: 532 - protein, 186 aa, Artificial Sequence
  Synthetic
SEIEKLIEELRRELEKVKDELERSIEEMDRELDDVRRDSKRLVDEIKRELREVTERTKRGDRPEEVLRKELEDIKRKLRRILEEHHEKIRRIKEKLRRENKRVRDELKRIKDEIDEKVKDVRRKGADEERDHMVLHEYVNAAGITEELLKKHTRVVERVEKALDELDKELERIVREAEKELDRREK

SEQ ID NO: 533 - protein, 183 aa, Artificial Sequence
  Synthetic
SIEDEIRKLKEDIKRVLDKVRRDNERLKERLDKVLEDIRRSSEDNNRKLEEVLKRIRDKPVDERLVRKVEEAVKRLKEHNEDSTRRVEEVIRRLKEESEESVRKTEKVARDLERELDEVLTRGGEERVRRDHMVLHEYVNAAGITDKEVADRAEKLLREAEEHNKRSLDESRRVLEELDEEIR

SEQ ID NO: 534 - protein, 183 aa, Artificial Sequence
  Synthetic
SIREKIRELEERLEEVLRRIEENSERVLREAERVLKEIKDNSKRNNEKLERALEEIRKLPVEDELVRRVKELVERLKRHNKKSSEDVERVVRELKEELKRSSEEVKKAVDRLKEELEKVLRDGGEREVDRDHMVLHEYVNAAGITNRRVVERLKRLLEELKKHNEDSLRKSEEVLRKLEEDAR

SEQ ID NO: 535 - protein, 185 aa, Artificial Sequence
  Synthetic
SEAEELLKRLEDRAEEILRRLEEILRTSRKLAEDVLRELEKLLRESERRIREVLEELRGIKDKKELEDVIREVEKELDESLERSRELLKDVLKKLDDNLKESERLVEDIDRELAKILEDLKKAGVPKEVRDHMVLHEYVNAAGITRIVDENAKIVEDARRALEKIVKENEEILRRLKKELRELRK

SEQ ID NO: 536 - protein, 186 aa, Artificial Sequence
  Synthetic
SRVEEIIEDLRRLLEEIRKENEDSIRRSKELLDRVKEINDTIIAELERLLKDIEKEVREKGSESEEVKKALRAVLEELEKLLRRVAEINEEVLRRNSKLVEEDERRNREVLKELARLVEELIREIGDEDRDHMVLHEYVNAAGITDKLDRESKEAFRATNEEIAKLDEDTARVAERVKKAIEDLAK

SEQ ID NO: 537 - protein, 186 aa, Artificial Sequence
  Synthetic
SEVDEIIKELERLLAEIARENERIIRESRKLADEVRKRNEDAIRKLEELVARLADAVRRKGSESEEVKKLIEDVLREIERLLKRIEEENREVVKRNSELVERVRAINEEILRRVAELVEKIARDIGDKDRDHMVLHEYVNAAGITKKLDDETRRVIEDTNKKIADLDKATRDVVRKVLEEVKKLEK

SEQ ID NO: 538 - protein, 181 aa, Artificial Sequence
  Synthetic
SEIETVRREIEKILDDLRRTVKRIEDEVRKIHEDLRRSLEDSKRNIEEILKDLERAARRDGLDKKVEDDMRKLVEDLKRKHDKLRADNEAVTKELKDRLKKLEDDLARAIEELRRRLDKGLDKEDIDKLRDHMVLHEYVNAAGITELLERYEEIVRRIKELLKDLNREAEEVVRRLKEELR

SEQ ID NO: 539 - protein, 185 aa, Artificial Sequence
  Synthetic
SSVEELLERLRRISEENKRRIEKLLREVEKVLRELKDRHRKLLKRVEEIIRKVKEEIKSGLPEEAVKRVLERVRERVKEVLEEADRLNDEMRRIVTEVEKELDKSDKEVEDAVRDILKKIEEGVRDRETRDHMVLHEYVNAAGITDRSKKVKEEIRRILEDLTRTTERVKREIAKLLKELEDTAR

SEQ ID NO: 540 - protein, 181 aa, Artificial Sequence
  Synthetic
SEVERVLEDLRRLVRDVEEKLRRIIERDRRLVEEVERENRKTIRKIEELLRKVLEELKDISDKKTIERIVREIIKEARDLVRRNHERNREIVDESRRLVEELRRIVEEIIRRLRELLERVKSGELAERIERDHMVLHEYVNAAGITLEKTSRDLKKRLEELDRELKALVEKVERDLEELRK

SEQ ID NO: 541 - protein, 187 aa, Artificial Sequence
  Synthetic
DEEEELRKRLEKLSKEVRELLRRDEEEDRRLNRELEELLKDHERTVRDLSREVEDLLRKARRKVSEEELTRLRKKLRDLEEESKEALRELRRRVEELNKENKKSLDDLERRLKELEDRAREVEKRDRREDRDHMVLHEYVNAAGITAEDLKRNTEDLRRVIKELAERLEELNKRLKREIRRLKEELR

SEQ ID NO: 542 - protein, 181 aa, Artificial Sequence
  Synthetic
DEERKLEKSLKDVEDTHRRLLEKNDEDLKELRKRVEDMLRRLEDALRRILEDIEEKLKRIEDDETLKRLRKRVKELLDEIRRRLERLEREVDKRLEEIKERNDRHHEEAKKELKRIRDKIRRDGADEKILRDHMVLHEYVNAAGITSNDEVKELAERLEETIRDLLRRIEEILKEIEERVR

SEQ ID NO: 543 - protein, 181 aa, Artificial Sequence
  Synthetic
EEIERALREMRELSRTHKELVEKILRDIAELAKTHERINEDILRKIKKLIDEIADEIRKEDKKEELKRKIDELRRRAEELLKESKEHLKRLEDTVRELIERLKETLKKVEEDLKRILEKLEKSRELDEIARDHMVLHEYVNAAGITVEDEVRRLIRKLEELNRRTEEEVKKLIKKLEDDLK

SEQ ID NO: 544 - protein, 182 aa, Artificial Sequence
  Synthetic
DELEEVVRRVRELSRTVKEELREVIERVRELSERVKKKLRKVLREVAELHREVMKRVRDSGLDKSKLEKLEDESRRVLDKSREILRKNEEDNRRLNKELEEILKKNEDDNEDVRRKVDEVTRKGKDAEEVRDHMVLHEYVNAAGITDALKRVEDRVRESDKSVRELLEENRKVVEDIKRRVD

SEQ ID NO: 545 - protein, 182 aa, Artificial Sequence
  Synthetic
SDADRVAEELKKLVEDSRRENERVIEESKRLVKENEDRNRELIERLKKLVDKLRDILEKEKDKKTLDDIVREILERLKRLLEKVEDENRKSHEENKRLLEDVKRKNKRISDELKRLLEEIERRNVDVDKVRDHMVLHEYVNAAGITKTEEVAKKSSEDIKRVADETRRRAEELLKEVDELRK

SEQ ID NO: 546 - protein, 183 aa, Artificial Sequence
  Synthetic
SEVDEVLERIKRLLERLAEHSDKVVRDIEKLLDDNRKENERLLDKLRRELKRLEEMRRRGDLREELLERVVREVEKEIRDIKRKNKRSVETVEKLVRDDRKELKRALEDVERLIRELETRLKDKEELRRKRDHMVLHEYVNAAGITKKTDEVLKRARETIEDLNRKLDKVLKEVRDKLDRLRD

SEQ ID NO: 547 - protein, 184 aa, Artificial Sequence
  Synthetic
ELIKKARKDVEEVRERSERLVDELRKRNKKLADESRRLIDKLRKDVEKVLREIEDLLRKRRTKDVLKEIEDLVRELERELRRVVKESSDKVRKLIRENEKVVEESSRLFRDLVEKLRRVVEERNDKKLMERDHMVLHEYVNAAGITERDVREINKESERVNEETEREVEDAIRKLREVLRRAKK

SEQ ID NO: 548 - protein, 186 aa, Artificial Sequence
  Synthetic
KEVEDLERTVRTILKRMRELITRNEEEIRRSIEELKKLLKENKDTVRRILEEMKELKKEGGDDKKRLVEEIKRLLDELRENSKRSSDRAKEIHERNKRHSEESSRTIEKLLKELRDLVRDVERKLRDEDARDHMVLHEYVNAAGITEADERNKRLTKRSKEVLDEVHRANEEALKEVEEVVRRVTK

SEQ ID NO: 549 - protein, 182 aa, Artificial Sequence
  Synthetic
SELEKTLEDLKRHSEENKKKLEEDLRDMERNLKENKDRLKKILEEAEKTLKDLERRFREGDIDERELERVRRKMEEIKKRLDENVERNRRKAEDIKRKLDENVKRSEDRVKEIKEDIRRRVRDKDKAEELRDHMVLHEYVNAAGITRVKKALDDIVKELEELHERLKRRLEEILRRIAETVR

SEQ ID NO: 550 - protein, 183 aa, Artificial Sequence
  Synthetic
RVDERLDTVLKRVEETVRENKKKNDELLERSKENIDRLKKRLDDLLDKVRREAEKLKREVTKEEVKKIIDEVLKEIEDLLRTVKEELDRALERNREVVEETKRRIDRVLKEIEKLIRDVKRDRKEEVVKERDHMVLHEYVNAAGITKDAERRLRETNERLNEIVKEVEKRIRELSEEVRKRVK

SEQ ID NO: 551 - protein, 183 aa, Artificial Sequence
  Synthetic
SVDERLDEVLERVKEDMDRNRRKNDESLREDEENVRRNKKETDESVKRVEERVRELKKRVKDERVKEFLDRVLEEIRKSAEEVKTIIDEVHKESEETVRRTKKIIEEVLRRIEELIRRVKKDRKEEVVKTRDHMVLHEYVNAAGITDEAHKRNKELNERVNRVNKEAHKRNEDLLREAERKVR

SEQ ID NO: 552 - protein, 183 aa, Artificial Sequence
  Synthetic
SIEERVRELMRDLERVLKEIREHSKRVIEEAKRVLEEIERNSERNNKELEEVLDEIRKRPVDETLVREVEEAVKKLKEHNKRSSDTVRDAVRKLVERLKESSDRATELVKDLKRKLEEVLRRGGEKELEERDHMVLHEYVNAAGITKEVVDRLKEVLERLKEHNRRSLDESRKVLRELKERIR

SEQ ID NO: 553 - protein, 185 aa, Artificial Sequence
  Synthetic
SEAEELLKRLEDRAEEILRRLEEILRTSRKLAEDVLRELEKLLRESERRIREVLEELRGIKDKKELEDVIREVEKELDESLERSRELLKDVLKKLDDNLKESERLVEDIDRELAKILEDLKKAGVPKEVVRDHMVLHEYVNAAGITIVDENAKIVEDARRALEKIVKENEEILRRLKKELRELRK

SEQ ID NO: 554 - protein, 188 aa, Artificial Sequence
  Synthetic
SEIEKILKEIEDLARRDEEVSKKIVEDIRRLAKEVEDTSRDIVRKIEELAKRVLDRLRKDGSKEELEKEVREVVKTLEELVKDNHRLIRRAVEEMKRLVEENHRHSREVVKELEDLVRELRKGSGSEDSERDHMVLHEYVNAAGITSEKSNEEVKRTVEELVRRMEESNDRVRDLVRRLVEELKRAVD

SEQ ID NO: 555 - protein, 186 aa, Artificial Sequence
  Synthetic
SRVEEIIEDLRRLLEEIRKENEDSIRRSKELLDRVKEINDTIIAELERLLKDIEKEVREKGSESEEVKKALRAVLEELEKLLRRVAEINEEVLRRNSKLVEEDERRNREVLKELARLVEELIREIGDEDKRDHMVLHEYVNAAGITKLDRESKEAFRATNEEIAKLDEDTARVAERVKKAIEDLAK

SEQ ID NO: 556 - protein, 183 aa, Artificial Sequence
  Synthetic
SDVDRVLEEIRKLLEDLKRHSEKVSEENEDLLRANTELNKRVSEDNERLLEELKRLRERGGISEEDLKRALDRVRKTVETVKEENKRSLEDVRRTVETNKRKLERVVEEIKKLIEDAKRRGSGDEEAKKKRDHMVLHEYVNAAGITETSDRSLEKVEADLRRLNEELDRSLERAERTIRELAK

SEQ ID NO: 557 - protein, 182 aa, Artificial Sequence
  Synthetic
RVEDALRKLLDDVRRLVEEAERRLRTSNDKSRRLVEEAKRRLEESNERSEKLVRDVRRRIRDEDVKRVLEELLKRDHDVVRRVLERIDEMLERNSRLVKRVLEDIRRLLKRVREVVERIKRVRSKVVEEVLRDHMVLHEYVNAAGITVLRASEDTIRRLEEIIRKVEEDSKRIIEEIERAAR

SEQ ID NO: 558 - protein, 183 aa, Artificial Sequence
  Synthetic
KVEKRLTDLLKTVADEVKRVEDELRETVRESKEVVDKSRRDLERTVEESEKTVKDAERRVSEDLVRRIRKVLDENREVNDRVVKEDERILEENERVNRKVVEKIRDILRKIEEVVRRAAEEIRDEEVVKKVRDHMVLHEYVNAAGITRVRERSKKILTDLKKSSEDVKRESERMLKKLEDEIR

SEQ ID NO: 559 - protein, 182 aa, Artificial Sequence
  Synthetic
SDADRVAEELKKLVEDSRRENERVIEESKRLVKENEDRNRELIERLKKLVDKLRDILEKEKDKKTLDDIVREILERLKRLLEKVEDENRKSHEENKRLLEDVKRKNKRISDELKRLLEEIERRNVDVDKVRRDHMVLHEYVNAAGITTEEVAKKSSEDIKRVADETRRRAEELLKEVDELRK

SEQ ID NO: 560 - protein, 186 aa, Artificial Sequence
  Synthetic
SEVDEVRKTLEDLLRRLDEENKDIIRRNKELLDDLDRKVREAIERLKRLLDELRKILEKLKDRETLTRIIEEIEKRARELIKRLRDEIRKIEEESKKSIEDSRKRNDEIRKRLEELIKDLRDKIKDSEELARDHMVLHEYVNAAGITLKEKNKRLEDDSRRVITELRKKLKDLEDRVREEIEELRK

SEQ ID NO: 561 - protein, 185 aa, Artificial Sequence
  Synthetic
SAEELLRTIEKRIEDNHRRLEEILEEIARLIEDMLRTDERIVREIKELLKEVLDRVRRAGVPEEVLERVRRELERLKKELEELRRRSEEKVKELKRRLEEIRRKLEEEHRDLRRKLEELRRDLGDKEEVVKRDHMVLHEYVNAAGITAEDLLRRVEEVIRTSKKESKDVLEKIERLLRDLERRTR

SEQ ID NO: 562 - protein, 183 aa, Artificial Sequence
  Synthetic
SIEDRIRELEKRLEKVLREIEEHSKKVVREAEKVLREIEENSRRNNKRLEEVLDEIRKRPVDETLVREVEEAVRRLKKHNKDSSDTARKLVEELKKELKESSDRVRKVVEELKDRLRKVLEKGGEEDVRKVRDHMVLHEYVNAAGITDVVRRLKEVLKELRKHNKRSLDESEKVLRELRERIR

SEQ ID NO: 563 - protein, 188 aa, Artificial Sequence
  Synthetic
SEIEKILKEIEDLARRDEEVSKKIVEDIRRLAKEVEDTSRDIVRKIEELAKRVLDRLRKDGSKEELEKEVREVVKTLEELVKDNHRLIRRAVEEMKRLVEENHRHSREVVKELEDLVRELRKGSGSEDSERRDHMVLHEYVNAAGITEKSNEEVKRTVEELVRRMEESNDRVRDLVRRLVEELKRAVD

SEQ ID NO: 564 - protein, 186 aa, Artificial Sequence
  Synthetic
SRVEEIIEDLRRLLEEIRKENEDSIRRSKELLDRVKEINDTIIAELERLLKDIEKEVREKGSESEEVKKALRAVLEELEKLLRRVAEINEEVLRRNSKLVEEDERRNREVLKELARLVEELIREIGDEDKARDHMVLHEYVNAAGITLDRESKEAFRATNEEIAKLDEDTARVAERVKKAIEDLAK

SEQ ID NO: 565 - protein, 186 aa, Artificial Sequence
  Synthetic
SEVDEIIKELERLLAEIARENERIIRESRKLADEVRKRNEDAIRKLEELVARLADAVRRKGSESEEVKKLIEDVLREIERLLKRIEEENREVVKRNSELVERVRAINEEILRRVAELVEKIARDIGDKDEVRDHMVLHEYVNAAGITLDDETRRVIEDTNKKIADLDKATRDVVRKVLEEVKKLEK

SEQ ID NO: 566 - protein, 185 aa, Artificial Sequence
  Synthetic
SSVEELLERLRRISEENKRRIEKLLREVEKVLRELKDRHRKLLKRVEEIIRKVKEEIKSGLPEEAVKRVLERVRERVKEVLEEADRLNDEMRRIVTEVEKELDKSDKEVEDAVRDILKKIEEGVRDRETAERDHMVLHEYVNAAGITSKKVKEEIRRILEDLTRTTERVKREIAKLLKELEDTAR

SEQ ID NO: 567 - protein, 186 aa, Artificial Sequence
  Synthetic
SAEDSIRELLERDERLLEEARKEAKRLNEENERLLERIEETVRRLLEEIKRLLDDIRKKIKGEKLREIEELVRRVKRTIEKLLEEVKKSVEDSSKRIEELLEAVERSVERTKEEIRRLLDEVRKDRKEELVKRDHMVLHEYVNAAGITVKEVIEEVEKLIRDNEKLAEDIEREIRRLLKELDEAAK

SEQ ID NO: 568 - protein, 183 aa, Artificial Sequence
  Synthetic
KVEKRLTDLLKTVADEVKRVEDELRETVRESKEVVDKSRRDLERTVEESEKTVKDAERRVSEDLVRRIRKVLDENREVNDRVVKEDERILEENERVNRKVVEKIRDILRKIEEVVRRAAEEIRDEEVVKKVERDHMVLHEYVNAAGITVRERSKKILTDLKKSSEDVKRESERMLKKLEDEIR

SEQ ID NO: 569 - protein, 186 aa, Artificial Sequence
  Synthetic
SEVDEVRKTLEDLLRRLDEENKDIIRRNKELLDDLDRKVREAIERLKRLLDELRKILEKLKDRETLTRIIEEIEKRARELIKRLRDEIRKIEEESKKSIEDSRKRNDEIRKRLEELIKDLRDKIKDSEELARRDHMVLHEYVNAAGITKEKNKRLEDDSRRVITELRKKLKDLEDRVREEIEELRK

SEQ ID NO: 570 - protein, 183 aa, Artificial Sequence
  Synthetic
SEVDEVLERIKRLLERLAEHSDKVVRDIEKLLDDNRKENERLLDKLRRELKRLEEMRRRGDLREELLERVVREVEKEIRDIKRKNKRSVETVEKLVRDDRKELKRALEDVERLIRELETRLKDKEELRRKLERDHMVLHEYVNAAGITTDEVLKRARETIEDLNRKLDKVLKEVRDKLDRLRD

SEQ ID NO: 571 - protein, 185 aa, Artificial Sequence
  Synthetic
DDIERLKREIERLLKEAEKISRDNEERSKELLDRLRKLSEDNKRKIDKLVEELKRLADKIKDKEELTRRLKEVVDRVEKSVRDSERMLREVVREDEESVRRSKTKLEDLLRKVEELVRRLEKKVTDEKVKRDRDHMVLHEYVNAAGITRKNDEVHRRSREEVKRLLEENRKLLEDLRRMVREITQ

SEQ ID NO: 572 - protein, 184 aa, Artificial Sequence
  Synthetic
ELIKKARKDVEEVRERSERLVDELRKRNKKLADESRRLIDKLRKDVEKVLREIEDLLRKRRTKDVLKEIEDLVRELERELRRVVKESSDKVRKLIRENEKVVEESSRLFRDLVEKLRRVVEERNDKKLMEEVRDHMVLHEYVNAAGITDVREINKESERVNEETEREVEDAIRKLREVLRRAKK

SEQ ID NO: 573 - protein, 184 aa, Artificial Sequence
  Synthetic
DEIRKVVKEITDLLKASNDKNRKVVEEIRDLLRKSKKLADELVERLRALVEDLRRRIDKSGDKETAEDIVRRIIEELKRILKEIEDLARRINREIERLVEEVERDNRDVNRAIEELLKDIARRGGSEDLKRVRDHMVLHEYVNAAGITRVKEDADRVSEANKEVLDRVREEVKRLIEEVRETLR

SEQ ID NO: 574 - protein, 186 aa, Artificial Sequence
  Synthetic
SRVEEIIEDLRRLLEEIRKENEDSIRRSKELLDRVKEINDTIIAELERLLKDIEKEVREKGSESEEVKKALRAVLEELEKLLRRVAEINEEVLRRNSKLVEEDERRNREVLKELARLVEELIREIGDEDKARRDHMVLHEYVNAAGITDRESKEAFRATNEEIAKLDEDTARVAERVKKAIEDLAK

SEQ ID NO: 575 - protein, 186 aa, Artificial Sequence
  Synthetic
SEVDEIIKELERLLAEIARENERIIRESRKLADEVRKRNEDAIRKLEELVARLADAVRRKGSESEEVKKLIEDVLREIERLLKRIEEENREVVKRNSELVERVRAINEEILRRVAELVEKIARDIGDKDEVTRDHMVLHEYVNAAGITDDETRRVIEDTNKKIADLDKATRDVVRKVLEEVKKLEK

SEQ ID NO: 576 - protein, 185 aa, Artificial Sequence
  Synthetic
SEIDEVLTRLRKISKDLNETSDRVNERARKIIDDIKKESKRVNDEAREIVERLKREIDKTRDRDVLRRILKEIEDVARRVKEINEELLARVEKVVREVEEINRELVKRSREAVEAVKRLLDRGVSDEDKVERRDHMVLHEYVNAAGITEESTRSVRKLLEELKRELEKSTRSVKALVDELRERVR

SEQ ID NO: 577 - protein, 183 aa, Artificial Sequence
  Synthetic
SDVDRVLEEIRKLLEDLKRHSEKVSEENEDLLRANTELNKRVSEDNERLLEELKRLRERGGISEEDLKRALDRVRKTVETVKEENKRSLEDVRRTVETNKRKLERVVEEIKKLIEDAKRRGSGDEEAKKKLDRDHMVLHEYVNAAGITSDRSLEKVEADLRRLNEELDRSLERAERTIRELAK

SEQ ID NO: 578 - protein, 187 aa, Artificial Sequence
  Synthetic
DEEEELRKRLEKLSKEVRELLRRDEEEDRRLNRELEELLKDHERTVRDLSREVEDLLRKARRKVSEEELTRLRKKLRDLEEESKEALRELRRRVEELNKENKKSLDDLERRLKELEDRAREVEKRDRREDELRRDHMVLHEYVNAAGITLKRNTEDLRRVIKELAERLEELNKRLKREIRRLKEELR

SEQ ID NO: 579 - protein, 184 aa, Artificial Sequence
  Synthetic
ELIKKARKDVEEVRERSERLVDELRKRNKKLADESRRLIDKLRKDVEKVLREIEDLLRKRRTKDVLKEIEDLVRELERELRRVVKESSDKVRKLIRENEKVVEESSRLFRDLVEKLRRVVEERNDKKLMEEVERDHMVLHEYVNAAGITVREINKESERVNEETEREVEDAIRKLREVLRRAKK

SEQ ID NO: 580 - protein, 186 aa, Artificial Sequence
  Synthetic
KEVEDLERTVRTILKRMRELITRNEEEIRRSIEELKKLLKENKDTVRRILEEMKELKKEGGDDKKRLVEEIKRLLDELRENSKRSSDRAKEIHERNKRHSEESSRTIEKLLKELRDLVRDVERKLRDEDAKRKRDHMVLHEYVNAAGITERNKRLTKRSKEVLDEVHRANEEALKEVEEVVRRVTK

SEQ ID NO: 581 - protein, 185 aa, Artificial Sequence
  Synthetic
SAEELLRTIEKRIEDNHRRLEEILEEIARLIEDMLRTDERIVREIKELLKEVLDRVRRAGVPEEVLERVRRELERLKKELEELRRRSEEKVKELKRRLEEIRRKLEEEHRDLRRKLEELRRDLGDKEEVVKKLRDHMVLHEYVNAAGITDLLRRVEEVIRTSKKESKDVLEKIERLLRDLERRTR

SEQ ID NO: 582 - protein, 185 aa, Artificial Sequence
  Synthetic
SSVEELLERLRRISEENKRRIEKLLREVEKVLRELKDRHRKLLKRVEEIIRKVKEEIKSGLPEEAVKRVLERVRERVKEVLEEADRLNDEMRRIVTEVEKELDKSDKEVEDAVRDILKKIEEGVRDRETAERARDHMVLHEYVNAAGITKVKEEIRRILEDLTRTTERVKREIAKLLKELEDTAR

SEQ ID NO: 583 - protein, 185 aa, Artificial Sequence; identical to SEQ ID NO: 582
  Synthetic

SEQ ID NO: 584 - protein, 186 aa, Artificial Sequence
  Synthetic
SAEDSIRELLERDERLLEEARKEAKRLNEENERLLERIEETVRRLLEEIKRLLDDIRKKIKGEKLREIEELVRRVKRTIEKLLEEVKKSVEDSSKRIEELLEAVERSVERTKEEIRRLLDEVRKDRKEELVKRVRDHMVLHEYVNAAGITEVIEEVEKLIRDNEKLAEDIEREIRRLLKELDEAAK

SEQ ID NO: 585 - protein, 185 aa, Artificial Sequence
  Synthetic
DDIERLKREIERLLKEAEKISRDNEERSKELLDRLRKLSEDNKRKIDKLVEELKRLADKIKDKEELTRRLKEVVDRVEKSVRDSERMLREVVREDEESVRRSKTKLEDLLRKVEELVRRLEKKVTDEKVKRDARRDHMVLHEYVNAAGITNDEVHRRSREEVKRLLEENRKLLEDLRRMVREITQ

SEQ ID NO: 586 - protein, 186 aa, Artificial Sequence
  Synthetic
SRVEEIIEDLRRLLEEIRKENEDSIRRSKELLDRVKEINDTIIAELERLLKDIEKEVREKGSESEEVKKALRAVLEELEKLLRRVAEINEEVLRRNSKLVEEDERRNREVLKELARLVEELIREIGDEDKARKVRDHMVLHEYVNAAGITESKEAFRATNEEIAKLDEDTARVAERVKKAIEDLAK

SEQ ID NO: 587 - protein, 186 aa, Artificial Sequence
  Synthetic
SEVDEIIKELERLLAEIARENERIIRESRKLADEVRKRNEDAIRKLEELVARLADAVRRKGSESEEVKKLIEDVLREIERLLKRIEEENREVVKRNSELVERVRAINEEILRRVAELVEKIARDIGDKDEVTKVRDHMVLHEYVNAAGITETRRVIEDTNKKIADLDKATRDVVRKVLEEVKKLEK

SEQ ID NO: 588 - protein, 185 aa, Artificial Sequence
  Synthetic
SEIDEVLTRLRKISKDLNETSDRVNERARKIIDDIKKESKRVNDEAREIVERLKREIDKTRDRDVLRRILKEIEDVARRVKEINEELLARVEKVVREVEEINRELVKRSREAVEAVKRLLDRGVSDEDKVERVVRDHMVLHEYVNAAGITSTRSVRKLLEELKRELEKSTRSVKALVDELRERVR

SEQ ID NO: 589 - protein, 185 aa, Artificial Sequence
  Synthetic
SSVEELLERLRRISEENKRRIEKLLREVEKVLRELKDRHRKLLKRVEEIIRKVKEEIKSGLPEEAVKRVLERVRERVKEVLEEADRLNDEMRRIVTEVEKELDKSDKEVEDAVRDILKKIEEGVRDRETAERARRDHMVLHEYVNAAGITVKEEIRRILEDLTRTTERVKREIAKLLKELEDTAR

SEQ ID NO: 590 - protein, 187 aa, Artificial Sequence
  Synthetic
SEKETVRDELRKLVETIRKLLEEDKESDKRLADRIRELNEENKEDTERLIRELEKVLEELRKKVSEDELRKLRKRIEDLRRRDEELNKRSREKLEDLNERNKDSLRRIEDELRKLVEEAREVEKRDNDEERLRKLRDHMVLHEYVNAAGITENNKRLRKAIKELLDELRKINKELREVIKKLLDDAR

SEQ ID NO: 591 - protein, 186 aa, Artificial Sequence
  Synthetic
DEIRELEERVRRILDELRRLVERNREVIERSIRELEKLLDRNRRKVEEILRRIDDLTRRGGDDKKTMLDDVRRLLREAEDHSRRSSETAKRIHRENEEHSKDSSRKVRKLIEELRELAKKVEKEITDERVKEAIKRDHMVLHEYVNAAGITNRELTKTSKKVLEDVDRTNRRLVKEVRDVVERARK

SEQ ID NO: 592 - protein, 186 aa, Artificial Sequence
  Synthetic
KEVEDLERTVRTILKRMRELITRNEEEIRRSIEELKKLLKENKDTVRRILEEMKELKKEGGDDKKRLVEEIKRLLDELRENSKRSSDRAKEIHERNKRHSEESSRTIEKLLKELRDLVRDVERKLRDEDAKRKLDRDHMVLHEYVNAAGITNKRLTKRSKEVLDEVHRANEEALKEVEEVVRRVTK

SEQ ID NO: 593 - protein, 186 aa, Artificial Sequence
  Synthetic
SRVEEIIEDLRRLLEEIRKENEDSIRRSKELLDRVKEINDTIIAELERLLKDIEKEVREKGSESEEVKKALRAVLEELEKLLRRVAEINEEVLRRNSKLVEEDERRNREVLKELARLVEELIREIGDEDKARKVARDHMVLHEYVNAAGITSKEAFRATNEEIAKLDEDTARVAERVKKAIEDLAK

SEQ ID NO: 594 - protein, 187 aa, Artificial Sequence
  Synthetic
DEEEELRKRLEKLSKEVRELLRRDEEEDRRLNRELEELLKDHERTVRDLSREVEDLLRKARRKVSEEELTRLRKKLRDLEEESKEALRELRRRVEELNKENKKSLDDLERRLKELEDRAREVEKRDRREDELRELLRDHMVLHEYVNAAGITNTEDLRRVIKELAERLEELNKRLKREIRRLKEELR

SEQ ID NO: 595 - protein, 188 aa, Artificial Sequence
  Synthetic
SEIEKILKEIEDLARRDEEVSKKIVEDIRRLAKEVEDTSRDIVRKIEELAKRVLDRLRKDGSKEELEKEVREVVKTLEELVKDNHRLIRRAVEEMKRLVEENHRHSREVVKELEDLVRELRKGSGSEDSERLVREVRDHMVLHEYVNAAGITEVKRTVEELVRRMEESNDRVRDLVRRLVEELKRAVD

SEQ ID NO: 596 - protein, 229 aa, Artificial Sequence
  Synthetic
SKEERLREVAEKHKKDLEDIVKRVDEAAKETARRLEEILKRLEEVLKKILDDLEKGPDDEKLKKVKKILKDIMDRLAELIKKILKLLKENLEKIKELLRRNLEISEELLKLAKGLSDRDVLETVRRVLEKLDEEWDRVLEDSRRIIETILRELDTLLREVEKLIKEIKRDHMVLHEYVNAAGITVEVVRRVIKALKEVLERHVDATREVIERVKRVNKRLLEAVREVVT

SEQ ID NO: 597 - protein, 229 aa, Artificial Sequence
  Synthetic
SKEERLREVAEKHKKDLEDIVKRVDEAAKETARRLEEILKRLEEVLKKILDDLEKGPDDEKLKKVKKILKDIMDRLAELIKKILKLLKENLEKIKELLRRNLEISEELLKLAKGLSDRDVLETVRRVLEKLDEEWDRVLEDSRRIIETILRELDTLLREVEKLIKEIKDRDHMVLHEYVNAAGITEVVRRVIKALKEVLERHVDATREVIERVKRVNKRLLEAVREVVT

SEQ ID NO: 598 - protein, 231 aa, Artificial Sequence
  Synthetic
DKAEVLREALKLLKDLLEELIKIHEESLKRILDLIDTLVKVHEDALRALKELLERSGLDERELRKVERMATESLRTIAKLKEELRDLARRSLEKLREDLKRVDDTLRKVEEKVRRTGPSEELIEELIRTIEKLLKEIVRINEEVLKAVRELLKTLLKLSEDVVRRIEEILRDHMVLHEYVNAAGITVEELRRLHEEIKERLDDVARRSEEELRRIIKKLKEVVKEIRKKLK

SEQ ID NO: 599 - protein, 231 aa, Artificial Sequence
  Synthetic
SKEEEVEKVLRKWEEILRRLIEENKRANDKIRREYEELVKEIRRVLEEIKEVAERLGVSEEVKRILEKLIKLLEDILEYEKENVERLIELNERILRELKKSVEELKALVTRVRRDGLPESEVRKLVEDVLRKNEELLKEAKKAWRDSIENLKRVLEEVAKLVKTVLREIERDHMVLHEYVNAAGITERLLRVAEEVIRRILKVNTELMRVDERSIRESLKAISEVLKVLDT

SEQ ID NO: 600 - protein, 231 aa, Artificial Sequence; identical to SEQ ID NO: 599
  Synthetic

SEQ ID NO: 601 - protein, 231 aa, Artificial Sequence
  Synthetic
SKDEELARLLEELVERWRKIVEDLERDHRRLVKEIRELVERIRKKLEELVDRIRKNGIDERIVRLIEEIAKIIEEVLKEIVKLVERAVRENVRVLRESVRLVAELVETLARLLRGSDERVTEAIKKVLDTSEDLIRRVIKVNEDILREIAKLVEEVLREAERILTEIKKERDHMVLHEYVNAAGITVDDVLRIIARILKLLRDLTRRLAEVAKAVHKLLEELLRKLKEDTR

SEQ ID NO: 602 - protein, 229 aa, Artificial Sequence
  Synthetic
SKEERLREVAEKHKKDLEDIVKRVDEAAKETARRLEEILKRLEEVLKKILDDLEKGPDDEKLKKVKKILKDIMDRLAELIKKILKLLKENLEKIKELLRRNLEISEELLKLAKGLSDRDVLETVRRVLEKLDEEWDRVLEDSRRIIETILRELDTLLREVEKLIKEIKDERDHMVLHEYVNAAGITVVRRVIKALKEVLERHVDATREVIERVKRVNKRLLEAVREVVT

SEQ ID NO: 603 - protein, 231 aa, Artificial Sequence
  Synthetic
DKAEVLREALKLLKDLLEELIKIHEESLKRILDLIDTLVKVHEDALRALKELLERSGLDERELRKVERMATESLRTIAKLKEELRDLARRSLEKLREDLKRVDDTLRKVEEKVRRTGPSEELIEELIRTIEKLLKEIVRINEEVLKAVRELLKTLLKLSEDVVRRIEEILRRDHMVLHEYVNAAGITEELRRLHEEIKERLDDVARRSEEELRRIIKKLKEVVKEIRKKLK

SEQ ID NO: 604 - protein, 231 aa, Artificial Sequence
  Synthetic
SKEEEVEKVLRKWEEILRRLIEENKRANDKIRREYEELVKEIRRVLEEIKEVAERLGVSEEVKRILEKLIKLLEDILEYEKENVERLIELNERILRELKKSVEELKALVTRVRRDGLPESEVRKLVEDVLRKNEELLKEAKKAWRDSIENLKRVLEEVAKLVKTVLREIEERDHMVLHEYVNAAGITRLLRVAEEVIRRILKVNTELMRVDERSIRESLKAISEVLKVLDT

SEQ ID NO: 605 - protein, 231 aa, Artificial Sequence; identical to SEQ ID NO: 604
  Synthetic

SEQ ID NO: 606 - protein, 229 aa, Artificial Sequence
  Synthetic
SKEERLREVAEKHKKDLEDIVKRVDEAAKETARRLEEILKRLEEVLKKILDDLEKGPDDEKLKKVKKILKDIMDRLAELIKKILKLLKENLEKIKELLRRNLEISEELLKLAKGLSDRDVLETVRRVLEKLDEEWDRVLEDSRRIIETILRELDTLLREVEKLIKEIKDEIRDHMVLHEYVNAAGITVRRVIKALKEVLERHVDATREVIERVKRVNKRLLEAVREVVT

SEQ ID NO: 607 - protein, 229 aa, Artificial Sequence; identical to SEQ ID NO: 606
  Synthetic

SEQ ID NO: 608 - protein, 231 aa, Artificial Sequence
  Synthetic
DKAEVLREALKLLKDLLEELIKIHEESLKRILDLIDTLVKVHEDALRALKELLERSGLDERELRKVERMATESLRTIAKLKEELRDLARRSLEKLREDLKRVDDTLRKVEEKVRRTGPSEELIEELIRTIEKLLKEIVRINEEVLKAVRELLKTLLKLSEDVVRRIEEILRKRDHMVLHEYVNAAGITELRRLHEEIKERLDDVARRSEEELRRIIKKLKEVVKEIRKKLK

SEQ ID NO: 609 - protein, 231 aa, Artificial Sequence; identical to SEQ ID NO: 608
  Synthetic

SEQ ID NO: 610 - protein, 231 aa, Artificial Sequence
  Synthetic
SKEEEVEKVLRKWEEILRRLIEENKRANDKIRREYEELVKEIRRVLEEIKEVAERLGVSEEVKRILEKLIKLLEDILEYEKENVERLIELNERILRELKKSVEELKALVTRVRRDGLPESEVRKLVEDVLRKNEELLKEAKKAWRDSIENLKRVLEEVAKLVKTVLREIEEKRDHMVLHEYVNAAGITLLRVAEEVIRRILKVNTELMRVDERSIRESLKAISEVLKVLDT

SEQ ID NO: 611 - protein, 231 aa, Artificial Sequence; identical to SEQ ID NO: 610
  Synthetic

SEQ ID NO: 612 - protein, 231 aa, Artificial Sequence
  Synthetic
SKDEELARLLEELVERWRKIVEDLERDHRRLVKEIRELVERIRKKLEELVDRIRKNGIDERIVRLIEEIAKIIEEVLKEIVKLVERAVRENVRVLRESVRLVAELVETLARLLRGSDERVTEAIKKVLDTSEDLIRRVIKVNEDILREIAKLVEEVLREAERILTEIKKEGDRDHMVLHEYVNAAGITDVLRIIARILKLLRDLTRRLAEVAKAVHKLLEELLRKLKEDTR

SEQ ID NO: 613 - protein, 229 aa, Artificial Sequence
  Synthetic
SKEERLREVAEKHKKDLEDIVKRVDEAAKETARRLEEILKRLEEVLKKILDDLEKGPDDEKLKKVKKILKDIMDRLAELIKKILKLLKENLEKIKELLRRNLEISEELLKLAKGLSDRDVLETVRRVLEKLDEEWDRVLEDSRRIIETILRELDTLLREVEKLIKEIKDEISRDHMVLHEYVNAAGITRRVIKALKEVLERHVDATREVIERVKRVNKRLLEAVREVVT

SEQ ID NO: 614 - protein, 229 aa, Artificial Sequence; identical to SEQ ID NO: 613
  Synthetic

SEQ ID NO: 615 - protein, 234 aa, Artificial Sequence
  Synthetic
SAKETIRKLIEENKDIIRKLAEKLKRLLEESERIAEEALRLIKELLERIERALRRVGSGIDEELLKELEKELARLEEELKEILDRVRDLHRRLAEEIRKILEESKKLNEELEDRLRKDGDVEELLELLERVHATDVRLLRELLKLLKKVHEDVVSLLERLLELLKRVLDRIVERDHMVLHEYVNAAGITEREIRRLAKRLKELSDRLEEKIRKIKRELDDLSARLREKIERTRK

SEQ ID NO: 616 - protein, 231 aa, Artificial Sequence
  Synthetic
DKAEVLREALKLLKDLLEELIKIHEESLKRILDLIDTLVKVHEDALRALKELLERSGLDERELRKVERMATESLRTIAKLKEELRDLARRSLEKLREDLKRVDDTLRKVEEKVRRTGPSEELIEELIRTIEKLLKEIVRINEEVLKAVRELLKTLLKLSEDVVRRIEEILRKGRDHMVLHEYVNAAGITLRRLHEEIKERLDDVARRSEEELRRIIKKLKEVVKEIRKKLK

SEQ ID NO: 617 - protein, 231 aa, Artificial Sequence; identical to SEQ ID NO: 616
  Synthetic

SEQ ID NO: 618 - protein, 231 aa, Artificial Sequence
  Synthetic
SKEEEVEKVLRKWEEILRRLIEENKRANDKIRREYEELVKEIRRVLEEIKEVAERLGVSEEVKRILEKLIKLLEDILEYEKENVERLIELNERILRELKKSVEELKALVTRVRRDGLPESEVRKLVEDVLRKNEELLKEAKKAWRDSIENLKRVLEEVAKLVKTVLREIEEKIRDHMVLHEYVNAAGITLRVAEEVIRRILKVNTELMRVDERSIRESLKAISEVLKVLDT

SEQ ID NO: 619 - protein, 231 aa, Artificial Sequence; identical to SEQ ID NO: 618
  Synthetic

SEQ ID NO: 620 - protein, 231 aa, Artificial Sequence
  Synthetic
SKDEELARLLEELVERWRKIVEDLERDHRRLVKEIRELVERIRKKLEELVDRIRKNGIDERIVRLIEEIAKIIEEVLKEIVKLVERAVRENVRVLRESVRLVAELVETLARLLRGSDERVTEAIKKVLDTSEDLIRRVIKVNEDILREIAKLVEEVLREAERILTEIKKEGDRRDHMVLHEYVNAAGITVLRIIARILKLLRDLTRRLAEVAKAVHKLLEELLRKLKEDTR

SEQ ID NO: 621 - protein, 229 aa, Artificial Sequence
  Synthetic
SKEERLREVAEKHKKDLEDIVKRVDEAAKETARRLEEILKRLEEVLKKILDDLEKGPDDEKLKKVKKILKDIMDRLAELIKKILKLLKENLEKIKELLRRNLEISEELLKLAKGLSDRDVLETVRRVLEKLDEEWDRVLEDSRRIIETILRELDTLLREVEKLIKEIKDEISGRDHMVLHEYVNAAGITRVIKALKEVLERHVDATREVIERVKRVNKRLLEAVREVVT

SEQ ID NO: 622 - protein, 234 aa, Artificial Sequence
  Synthetic
SAKETIRKLIEENKDIIRKLAEKLKRLLEESERIAEEALRLIKELLERIERALRRVGSGIDEELLKELEKELARLEEELKEILDRVRDLHRRLAEEIRKILEESKKLNEELEDRLRKDGDVEELLELLERVHATDVRLLRELLKLLKKVHEDVVSLLERLLELLKRVLDRIVEERDHMVLHEYVNAAGITREIRRLAKRLKELSDRLEEKIRKIKRELDDLSARLREKIERTRK

SEQ ID NO: 623 - protein, 234 aa, Artificial Sequence; identical to SEQ ID NO: 622
  Synthetic

SEQ ID NO: 624 - protein, 231 aa, Artificial Sequence
  Synthetic
DKAEVLREALKLLKDLLEELIKIHEESLKRILDLIDTLVKVHEDALRALKELLERSGLDERELRKVERMATESLRTIAKLKEELRDLARRSLEKLREDLKRVDDTLRKVEEKVRRTGPSEELIEELIRTIEKLLKEIVRINEEVLKAVRELLKTLLKLSEDVVRRIEEILRKGGRDHMVLHEYVNAAGITRRLHEEIKERLDDVARRSEEELRRIIKKLKEVVKEIRKKLK

SEQ ID NO: 625 - protein, 231 aa, Artificial Sequence; identical to SEQ ID NO: 624
  Synthetic

SEQ ID NO: 626 - protein, 231 aa, Artificial Sequence
  Synthetic
SKEEEVEKVLRKWEEILRRLIEENKRANDKIRREYEELVKEIRRVLEEIKEVAERLGVSEEVKRILEKLIKLLEDILEYEKENVERLIELNERILRELKKSVEELKALVTRVRRDGLPESEVRKLVEDVLRKNEELLKEAKKAWRDSIENLKRVLEEVAKLVKTVLREIEEKIDRDHMVLHEYVNAAGITRVAEEVIRRILKVNTELMRVDERSIRESLKAISEVLKVLDT

SEQ ID NO: 627 - protein, 231 aa, Artificial Sequence
  Synthetic
SKDEELARLLEELVERWRKIVEDLERDHRRLVKEIRELVERIRKKLEELVDRIRKNGIDERIVRLIEEIAKIIEEVLKEIVKLVERAVRENVRVLRESVRLVAELVETLARLLRGSDERVTEAIKKVLDTSEDLIRRVIKVNEDILREIAKLVEEVLREAERILTEIKKEGDRERDHMVLHEYVNAAGITLRIIARILKLLRDLTRRLAEVAKAVHKLLEELLRKLKEDTR

SEQ ID NO: 628 - protein, 229 aa, Artificial Sequence
  Synthetic
SKEERLREVAEKHKKDLEDIVKRVDEAAKETARRLEEILKRLEEVLKKILDDLEKGPDDEKLKKVKKILKDIMDRLAELIKKILKLLKENLEKIKELLRRNLEISEELLKLAKGLSDRDVLETVRRVLEKLDEEWDRVLEDSRRIIETILRELDTLLREVEKLIKEIKDEISGSRDHMVLHEYVNAAGITVIKALKEVLERHVDATREVIERVKRVNKRLLEAVREVVT

SEQ ID NO: 629 - protein, 234 aa, Artificial Sequence
  Synthetic
SAKETIRKLIEENKDIIRKLAEKLKRLLEESERIAEEALRLIKELLERIERALRRVGSGIDEELLKELEKELARLEEELKEILDRVRDLHRRLAEEIRKILEESKKLNEELEDRLRKDGDVEELLELLERVHATDVRLLRELLKLLKKVHEDVVSLLERLLELLKRVLDRIVEELRDHMVLHEYVNAAGITEIRRLAKRLKELSDRLEEKIRKIKRELDDLSARLREKIERTRK

SEQ ID NO: 630 - protein, 234 aa, Artificial Sequence; identical to SEQ ID NO: 629
  Synthetic

SEQ ID NO: 631 - protein, 231 aa, Artificial Sequence
  Synthetic
DKAEVLREALKLLKDLLEELIKIHEESLKRILDLIDTLVKVHEDALRALKELLERSGLDERELRKVERMATESLRTIAKLKEELRDLARRSLEKLREDLKRVDDTLRKVEEKVRRTGPSEELIEELIRTIEKLLKEIVRINEEVLKAVRELLKTLLKLSEDVVRRIEEILRKGGVRDHMVLHEYVNAAGITRLHEEIKERLDDVARRSEEELRRIIKKLKEVVKEIRKKLK

SEQ ID NO: 632 - protein, 231 aa, Artificial Sequence; identical to SEQ ID NO: 631
  Synthetic

SEQ ID NO: 633 - protein, 236 aa, Artificial Sequence
  Synthetic
STREKAKKVLDTLRADNEDMKRVVEKILRALKRTNERAEKLAREITEEIKRILKEVGVSEEALKEIEDTLKRVLEEIKRLLDESKKLLEDVEREIREILKTSEELLERIEREIETVGSDEKTLAEILKRLLELNEEMNRRLLKILRDLLRLNEEVIRRLLAVLERLLDALKEALDRDHMVLHEYVNAAGITRRIKEKLRKALEELEREHRELEKELDKLHDESRKEHERIEEELRR

SEQ ID NO: 634 - protein, 236 aa, Artificial Sequence; identical to SEQ ID NO: 633
  Synthetic

SEQ ID NO: 635 - protein, 231 aa, Artificial Sequence
  Synthetic
SKEEEVEKVLRKWEEILRRLIEENKRANDKIRREYEELVKEIRRVLEEIKEVAERLGVSEEVKRILEKLIKLLEDILEYEKENVERLIELNERILRELKKSVEELKALVTRVRRDGLPESEVRKLVEDVLRKNEELLKEAKKAWRDSIENLKRVLEEVAKLVKTVLREIEEKIDDRDHMVLHEYVNAAGITVAEEVIRRILKVNTELMRVDERSIRESLKAISEVLKVLDT

SEQ ID NO: 636 - protein, 231 aa, Artificial Sequence
  Synthetic
SKDEELARLLEELVERWRKIVEDLERDHRRLVKEIRELVERIRKKLEELVDRIRKNGIDERIVRLIEEIAKIIEEVLKEIVKLVERAVRENVRVLRESVRLVAELVETLARLLRGSDERVTEAIKKVLDTSEDLIRRVIKVNEDILREIAKLVEEVLREAERILTEIKKEGDREERDHMVLHEYVNAAGITRIIARILKLLRDLTRRLAEVAKAVHKLLEELLRKLKEDTR

SEQ ID NO: 637 - protein, 229 aa, Artificial Sequence
  Synthetic
SKEERLREVAEKHKKDLEDIVKRVDEAAKETARRLEEILKRLEEVLKKILDDLEKGPDDEKLKKVKKILKDIMDRLAELIKKILKLLKENLEKIKELLRRNLEISEELLKLAKGLSDRDVLETVRRVLEKLDEEWDRVLEDSRRIIETILRELDTLLREVEKLIKEIKDEISGSKRDHMVLHEYVNAAGITIKALKEVLERHVDATREVIERVKRVNKRLLEAVREVVT

SEQ ID NO: 638 - protein, 234 aa, Artificial Sequence
  Synthetic
SAKETIRKLIEENKDIIRKLAEKLKRLLEESERIAEEALRLIKELLERIERALRRVGSGIDEELLKELEKELARLEEELKEILDRVRDLHRRLAEEIRKILEESKKLNEELEDRLRKDGDVEELLELLERVHATDVRLLRELLKLLKKVHEDVVSLLERLLELLKRVLDRIVEELGRDHMVLHEYVNAAGITIRRLAKRLKELSDRLEEKIRKIKRELDDLSARLREKIERTRK

SEQ ID NO: 639 - protein, 234 aa, Artificial Sequence; identical to SEQ ID NO: 638
  Synthetic

SEQ ID NO: 640 - protein, 231 aa, Artificial Sequence
  Synthetic
DKAEVLREALKLLKDLLEELIKIHEESLKRILDLIDTLVKVHEDALRALKELLERSGLDERELRKVERMATESLRTIAKLKEELRDLARRSLEKLREDLKRVDDTLRKVEEKVRRTGPSEELIEELIRTIEKLLKEIVRINEEVLKAVRELLKTLLKLSEDVVRRIEEILRKGGVPRDHMVLHEYVNAAGITLHEEIKERLDDVARRSEEELRRIIKKLKEVVKEIRKKLK

SEQ ID NO: 641 - protein, 231 aa, Artificial Sequence; identical to SEQ ID NO: 640
  Synthetic

SEQ ID NO: 642 - protein, 236 aa, Artificial Sequence
  Synthetic
STREKAKKVLDTLRADNEDMKRVVEKILRALKRTNERAEKLAREITEEIKRILKEVGVSEEALKEIEDTLKRVLEEIKRLLDESKKLLEDVEREIREILKTSEELLERIEREIETVGSDEKTLAEILKRLLELNEEMNRRLLKILRDLLRLNEEVIRRLLAVLERLLDALKEALDRRDHMVLHEYVNAAGITRIKEKLRKALEELEREHRELEKELDKLHDESRKEHERIEEELRR

SEQ ID NO: 643 - protein, 236 aa, Artificial Sequence; identical to SEQ ID NO: 642
  Synthetic

SEQ ID NO: 644 - protein, 231 aa, Artificial Sequence
  Synthetic
SKEEEVEKVLRKWEEILRRLIEENKRANDKIRREYEELVKEIRRVLEEIKEVAERLGVSEEVKRILEKLIKLLEDILEYEKENVERLIELNERILRELKKSVEELKALVTRVRRDGLPESEVRKLVEDVLRKNEELLKEAKKAWRDSIENLKRVLEEVAKLVKTVLREIEEKIDDERDHMVLHEYVNAAGITAEEVIRRILKVNTELMRVDERSIRESLKAISEVLKVLDT

SEQ ID NO: 645 - protein, 231 aa, Artificial Sequence; identical to SEQ ID NO: 644
  Synthetic

SEQ ID NO: 646 - protein, 231 aa, Artificial Sequence
  Synthetic
SKDEELARLLEELVERWRKIVEDLERDHRRLVKEIRELVERIRKKLEELVDRIRKNGIDERIVRLIEEIAKIIEEVLKEIVKLVERAVRENVRVLRESVRLVAELVETLARLLRGSDERVTEAIKKVLDTSEDLIRRVIKVNEDILREIAKLVEEVLREAERILTEIKKEGDREEIRDHMVLHEYVNAAGITIIARILKLLRDLTRRLAEVAKAVHKLLEELLRKLKEDTR

SEQ ID NO: 647 - protein, 237 aa, Artificial Sequence
  Synthetic
REDEVLRDIERLLREIEEKIRRILEESTAELRKVEEEVKRIIERTKRELKAIKEDVERKGIDEELRKLLDEVLDKLTKLIERNKRSLERILELIKRIIDENLEVLRDIIRLLEELLKATKDNGVPKDEVIKLVEDVVRRIEELVTRVVARNEKLVKDLDDLAKKNVRENEELLREIRDHMVLHEYVNAAGITREHIKALEKLARDLKEILRRHIEALKELARDLAEVIRKLLEDVKR

SEQ ID NO: 648 - protein, 237 aa, Artificial Sequence; identical to SEQ ID NO: 647
  Synthetic

SEQ ID NO: 649 - protein, 234 aa, Artificial Sequence
  Synthetic
SAKETIRKLIEENKDIIRKLAEKLKRLLEESERIAEEALRLIKELLERIERALRRVGSGIDEELLKELEKELARLEEELKEILDRVRDLHRRLAEEIRKILEESKKLNEELEDRLRKDGDVEELLELLERVHATDVRLLRELLKLLKKVHEDVVSLLERLLELLKRVLDRIVEELGLRDHMVLHEYVNAAGITRRLAKRLKELSDRLEEKIRKIKRELDDLSARLREKIERTRK

SEQ ID NO: 650 - protein, 234 aa, Artificial Sequence; identical to SEQ ID NO: 649
  Synthetic

SEQ ID NO: 651 - protein, 238 aa, Artificial Sequence
  Synthetic
SEAEKIREALETNLRLLEELIKRLKEILDTHNELLRRVIETLERLLKELLELLEEGGLDEEVLREVKRLVDELRKEARRVLDEHEKLVRKIKKEAEDVARESEEIIKEVEDKLKGLDREELLERVRRVLKKSDDLIAELVRRALKILEELTRLLAELLKKVVEILRRIVELVERVLTRDHMVLHEYVNAAGITEELEDRLRRLLEKLARDSAELMRELERILDRYARESEELDRRLAE

SEQ ID NO: 652 - protein, 238 aa, Artificial Sequence; identical to SEQ ID NO: 651
  Synthetic

SEQ ID NO: 653 - protein, 238 aa, Artificial Sequence
  Synthetic
DADELLRRLAEEVERVIREAEDLLRRWKETIKKVLDDLKRLLDELKKRNEDVIRELTKTKGDEELAKLIKDLLDTNEKVNRDLLRLIKKLLKDAERVNRRLLELIEELLEELKRVAKDLGLREEADKKLRDIADRARKELEDYERRLKELLKTVEDALRKAEEDSRKLKRDVEELLERDHMVLHEYVNAAGITLDRLRKLLERLREILRENLEALKKTLKRLEDVVREILEDLKRERK

SEQ ID NO: 654 - protein, 238 aa, Artificial Sequence; identical to SEQ ID NO: 653
  Synthetic

SEQ ID NO: 655 - protein, 231 aa, Artificial Sequence
  Synthetic
DKAEVLREALKLLKDLLEELIKIHEESLKRILDLIDTLVKVHEDALRALKELLERSGLDERELRKVERMATESLRTIAKLKEELRDLARRSLEKLREDLKRVDDTLRKVEEKVRRTGPSEELIEELIRTIEKLLKEIVRINEEVLKAVRELLKTLLKLSEDVVRRIEEILRKGGVPERDHMVLHEYVNAAGITHEEIKERLDDVARRSEEELRRIIKKLKEVVKEIRKKLK

SEQ ID NO: 656 - protein, 236 aa, Artificial Sequence
  Synthetic
STREKAKKVLDTLRADNEDMKRVVEKILRALKRTNERAEKLAREITEEIKRILKEVGVSEEALKEIEDTLKRVLEEIKRLLDESKKLLEDVEREIREILKTSEELLERIEREIETVGSDEKTLAEILKRLLELNEEMNRRLLKILRDLLRLNEEVIRRLLAVLERLLDALKEALDRGRDHMVLHEYVNAAGITIKEKLRKALEELEREHRELEKELDKLHDESRKEHERIEEELRR

SEQ ID NO: 657 - protein, 236 aa, Artificial Sequence; identical to SEQ ID NO: 656
  Synthetic

SEQ ID NO: 658 - protein, 231 aa, Artificial Sequence
  Synthetic
SKEEEVEKVLRKWEEILRRLIEENKRANDKIRREYEELVKEIRRVLEEIKEVAERLGVSEEVKRILEKLIKLLEDILEYEKENVERLIELNERILRELKKSVEELKALVTRVRRDGLPESEVRKLVEDVLRKNEELLKEAKKAWRDSIENLKRVLEEVAKLVKTVLREIEEKIDDEDRDHMVLHEYVNAAGITEEVIRRILKVNTELMRVDERSIRESLKAISEVLKVLDT

SEQ ID NO: 659 - protein, 231 aa, Artificial Sequence
  Synthetic
SKDEELARLLEELVERWRKIVEDLERDHRRLVKEIRELVERIRKKLEELVDRIRKNGIDERIVRLIEEIAKIIEEVLKEIVKLVERAVRENVRVLRESVRLVAELVETLARLLRGSDERVTEAIKKVLDTSEDLIRRVIKVNEDILREIAKLVEEVLREAERILTEIKKEGDREEIRRDHMVLHEYVNAAGITIARILKLLRDLTRRLAEVAKAVHKLLEELLRKLKEDTR

SEQ ID NO: 660 - protein, 238 aa, Artificial Sequence
  Synthetic
SEIEDVIRRLRKILEDLERVSEKLLREIKKILDEARRLNEEVIKEIKRVLEDAVRVFRDGSGSKEELAKLVEELIRELAKLAKEVDEIHKRIVERLKALVEDAERIHRKIVETLEEIVRGVPSEELKRVVEAIVEVIKEHLKVLADVIRRIIKAIEENAETIKRVLEDIVRVLELVLRDHMVLHEYVNAAGITIKRIEDSLRELEKTVRELLKRIKEASDKVREDVDRLIKELKEAAD

SEQ ID NO: 661 - protein, 229 aa, Artificial Sequence
  Synthetic
SKEERLREVAEKHKKDLEDIVKRVDEAAKETARRLEEILKRLEEVLKKILDDLEKGPDDEKLKKVKKILKDIMDRLAELIKKILKLLKENLEKIKELLRRNLEISEELLKLAKGLSDRDVLETVRRVLEKLDEEWDRVLEDSRRIIETILRELDTLLREVEKLIKEIKDEISGSKEVRDHMVLHEYVNAAGITALKEVLERHVDATREVIERVKRVNKRLLEAVREVVT

SEQ ID NO: 662 - protein, 237 aa, Artificial Sequence
  Synthetic
REDEVLRDIERLLREIEEKIRRILEESTAELRKVEEEVKRIIERTKRELKAIKEDVERKGIDEELRKLLDEVLDKLTKLIERNKRSLERILELIKRIIDENLEVLRDIIRLLEELLKATKDNGVPKDEVIKLVEDVVRRIEELVTRVVARNEKLVKDLDDLAKKNVRENEELLREIDRDHMVLHEYVNAAGITEHIKALEKLARDLKEILRRHIEALKELARDLAEVIRKLLEDVKR

SEQ ID NO: 663 - protein, 237 aa, Artificial Sequence; identical to SEQ ID NO: 662
  Synthetic

SEQ ID NO: 664 - protein, 232 aa, Artificial Sequence
  Synthetic
SEKELVDDIRRILEEILRLLRSLLEEVIRLLEENEKLVRRHLKTVIDILRRVAKLLDENGIRTDEADRVLERLEKAHRELLEDYKRALEKIKETLERVLREAEEVVKKIDDALRKLGGSKEVLKRLLEELLRLVEKIAEEIKRLLSELVRVTEELVRTNKELLEEAVRVIRKEVGDDRDHMVLHEYVNAAGITIDDLLKTSRDLVKRVLDLVDEVVKRVEDLVERVKEKIDT

SEQ ID NO: 665 - protein, 239 aa, Artificial Sequence
  Synthetic
SDEELLERVERLLRELLDTNRRMLEEVEKELRRLLETNKKTLDDVRRLLKELLDVLETRGVKDEKRLRDIRRRLEEVVRRLDKLHRDIAEDLKRVKERLDRLHERIKRRLEEVVKELRDLKDRGVDERKVLERAAEVLRELLELLRESLEEIERIIRRLLELHKRSTEEAARALEELLRDHMVLHEYVNAAGITEDLLKEDKERLEKIARDIERDLERYARDLKRLEDELREDIERARR

SEQ ID NO: 666 - protein, 239 aa, Artificial Sequence; identical to SEQ ID NO: 665
  Synthetic

SEQ ID NO: 667 - protein, 234 aa, Artificial Sequence
  Synthetic
SAKETIRKLIEENKDIIRKLAEKLKRLLEESERIAEEALRLIKELLERIERALRRVGSGIDEELLKELEKELARLEEELKEILDRVRDLHRRLAEEIRKILEESKKLNEELEDRLRKDGDVEELLELLERVHATDVRLLRELLKLLKKVHEDVVSLLERLLELLKRVLDRIVEELGLSRDHMVLHEYVNAAGITRLAKRLKELSDRLEEKIRKIKRELDDLSARLREKIERTRK

SEQ ID NO: 668 - protein, 234 aa, Artificial Sequence; identical to SEQ ID NO: 667
  Synthetic

SEQ ID NO: 669 - protein, 238 aa, Artificial Sequence
  Synthetic
SKEDKARELEKRLRDNLKKLEEVVRELAEVLKRNLEKLRRLAEELLRALKRLLDKLRAGGLPKDELEDLRREVEDVLRRLEDLLRKLKKANDESLTRLEELLRRAEEENRRVLTTLRELLRGNGDDRDLARLVARLVEANNRALEELLRLVAKNVEDNNRVLEELLRLVKELAKRLLGRDHMVLHEYVNAAGITELEERARKILRDDERDLRALEKRIRDIIREDREELERLKERARK

SEQ ID NO: 670 - protein, 238 aa, Artificial Sequence
  Synthetic
SEAEKIREALETNLRLLEELIKRLKEILDTHNELLRRVIETLERLLKELLELLEEGGLDEEVLREVKRLVDELRKEARRVLDEHEKLVRKIKKEAEDVARESEEIIKEVEDKLKGLDREELLERVRRVLKKSDDLIAELVRRALKILEELTRLLAELLKKVVEILRRIVELVERVLTKRDHMVLHEYVNAAGITELEDRLRRLLEKLARDSAELMRELERILDRYARESEELDRRLAE

SEQ ID NO: 671 - protein, 238 aa, Artificial Sequence; identical to SEQ ID NO: 670
  Synthetic

SEQ ID NO: 672 - protein, 238 aa, Artificial Sequence
  Synthetic
DADELLRRLAEEVERVIREAEDLLRRWKETIKKVLDDLKRLLDELKKRNEDVIRELTKTKGDEELAKLIKDLLDTNEKVNRDLLRLIKKLLKDAERVNRRLLELIEELLEELKRVAKDLGLREEADKKLRDIADRARKELEDYERRLKELLKTVEDALRKAEEDSRKLKRDVEELLERRDHMVLHEYVNAAGITDRLRKLLERLREILRENLEALKKTLKRLEDVVREILEDLKRERK

SEQ ID NO: 673 - protein, 231 aa, Artificial Sequence
  Synthetic
DKAEVLREALKLLKDLLEELIKIHEESLKRILDLIDTLVKVHEDALRALKELLERSGLDERELRKVERMATESLRTIAKLKEELRDLARRSLEKLREDLKRVDDTLRKVEEKVRRTGPSEELIEELIRTIEKLLKEIVRINEEVLKAVRELLKTLLKLSEDVVRRIEEILRKGGVPEERDHMVLHEYVNAAGITEEIKERLDDVARRSEEELRRIIKKLKEVVKEIRKKLK

SEQ ID NO: 674 - protein, 231 aa, Artificial Sequence; identical to SEQ ID NO: 673
  Synthetic

SEQ ID NO: 675 - protein, 236 aa, Artificial Sequence
  Synthetic
STREKAKKVLDTLRADNEDMKRVVEKILRALKRTNERAEKLAREITEEIKRILKEVGVSEEALKEIEDTLKRVLEEIKRLLDESKKLLEDVEREIREILKTSEELLERIEREIETVGSDEKTLAEILKRLLELNEEMNRRLLKILRDLLRLNEEVIRRLLAVLERLLDALKEALDRGDRDHMVLHEYVNAAGITKEKLRKALEELEREHRELEKELDKLHDESRKEHERIEEELRR

SEQ ID NO: 676 - protein, 239 aa, Artificial Sequence
  Synthetic
SERELIERWLELHKEILRLIRELVERLLKLHREILDTIKKLIRELLELLEDIARKLGLDKEAKDELREIAKRVEDKLEKLERESRKVEEDLKRKLKELTDESDTVEKRVRDVVRRGTQSREEIAEELLRLDRKLLKAVEELLKEILDLNKKLLDDVRAILEETRRVLEKLLDRVRRGERDHMVLHEYVNAAGITEDILEKVERTLKKLLDDSARMAEEVKKTLKELLERSEKVAEDVRK

SEQ ID NO: 677 - protein, 231 aa, Artificial Sequence
  Synthetic
SKDEELARLLEELVERWRKIVEDLERDHRRLVKEIRELVERIRKKLEELVDRIRKNGIDERIVRLIEEIAKIIEEVLKEIVKLVERAVRENVRVLRESVRLVAELVETLARLLRGSDERVTEAIKKVLDTSEDLIRRVIKVNEDILREIAKLVEEVLREAERILTEIKKEGDREEIRRRDHMVLHEYVNAAGITARILKLLRDLTRRLAEVAKAVHKLLEELLRKLKEDTR

SEQ ID NO: 678 - protein, 238 aa, Artificial Sequence
  Synthetic
SEIEDVIRRLRKILEDLERVSEKLLREIKKILDEARRLNEEVIKEIKRVLEDAVRVFRDGSGSKEELAKLVEELIRELAKLAKEVDEIHKRIVERLKALVEDAERIHRKIVETLEEIVRGVPSEELKRVVEAIVEVIKEHLKVLADVIRRIIKAIEENAETIKRVLEDIVRVLELVLRRDHMVLHEYVNAAGITKRIEDSLRELEKTVRELLKRIKEASDKVREDVDRLIKELKEAAD

SEQ ID NO: 679 - protein, 238 aa, Artificial Sequence; identical to SEQ ID NO: 678
  Synthetic

SEQ ID NO: 680 - protein, 237 aa, Artificial Sequence
  Synthetic
KEKEDALKKLEDLARKSREDLERVLRKHKKILDKIEELLKRVLDEHKKIVDDILRKTGTESEILKELARLLREHHEALRRLIEELRRLLEEHHKILEDLAREHKRLLDELIKVVADGVDKDELERIIKELRERDKKLVDDLRKVSEDLLDAVRKLVEDLERISRELLRRVEELAKGIDRDHMVLHEYVNAAGITKSKEILERIERAIDELLKVSEEILKLSEDASEELLKILREFAK

SEQ ID NO: 681 - protein, 229 aa, Artificial Sequence
  Synthetic
SKEERLREVAEKHKKDLEDIVKRVDEAAKETARRLEEILKRLEEVLKKILDDLEKGPDDEKLKKVKKILKDIMDRLAELIKKILKLLKENLEKIKELLRRNLEISEELLKLAKGLSDRDVLETVRRVLEKLDEEWDRVLEDSRRIIETILRELDTLLREVEKLIKEIKDEISGSKEVLRDHMVLHEYVNAAGITLKEVLERHVDATREVIERVKRVNKRLLEAVREVVT

SEQ ID NO: 682 - protein, 237 aa, Artificial Sequence
  Synthetic
REDEVLRDIERLLREIEEKIRRILEESTAELRKVEEEVKRIIERTKRELKAIKEDVERKGIDEELRKLLDEVLDKLTKLIERNKRSLERILELIKRIIDENLEVLRDIIRLLEELLKATKDNGVPKDEVIKLVEDVVRRIEELVTRVVARNEKLVKDLDDLAKKNVRENEELLREIDRRDHMVLHEYVNAAGITHIKALEKLARDLKEILRRHIEALKELARDLAEVIRKLLEDVKR

SEQ ID NO: 683 - protein, 234 aa, Artificial Sequence
  Synthetic
SAKETIRKLIEENKDIIRKLAEKLKRLLEESERIAEEALRLIKELLERIERALRRVGSGIDEELLKELEKELARLEEELKEILDRVRDLHRRLAEEIRKILEESKKLNEELEDRLRKDGDVEELLELLERVHATDVRLLRELLKLLKKVHEDVVSLLERLLELLKRVLDRIVEELGLSDRDHMVLHEYVNAAGITLAKRLKELSDRLEEKIRKIKRELDDLSARLREKIERTRK

SEQ ID NO: 684 - protein, 238 aa, Artificial Sequence
  Synthetic
SEAEKIREALETNLRLLEELIKRLKEILDTHNELLRRVIETLERLLKELLELLEEGGLDEEVLREVKRLVDELRKEARRVLDEHEKLVRKIKKEAEDVARESEEIIKEVEDKLKGLDREELLERVRRVLKKSDDLIAELVRRALKILEELTRLLAELLKKVVEILRRIVELVERVLTKKRDHMVLHEYVNAAGITLEDRLRRLLEKLARDSAELMRELERILDRYARESEELDRRLAE

SEQ ID NO: 685 - protein, 238 aa, Artificial Sequence; identical to SEQ ID NO: 684
  Synthetic

SEQ ID NO: 686 - protein, 240 aa, Artificial Sequence
  Synthetic
SDKEEIKRRVEKTARDLETEHDKIKKRLEDTVRDIKRELDELLEKYERVLRKIEKTLREGDGDATDLVDKLLETVKRLNEEVLRTVKKIADELRRLVEEVLRVLRESNETLARLLEEGNVGDEVRERLEEVLRRTEEIIKTLEEIVKRLLDELRRLVEELRRISKKLKDELDKIKEKGKRDHMVLHEYVNAAGITLDVVRRILEALAKLIKELLEALEEVLRRNKELIRELLRVLDEALK

SEQ ID NO: 687 - protein, 240 aa, Artificial Sequence; identical to SEQ ID NO: 686
  Synthetic

SEQ ID NO: 688 - protein, 231 aa, Artificial Sequence
  Synthetic
DKAEVLREALKLLKDLLEELIKIHEESLKRILDLIDTLVKVHEDALRALKELLERSGLDERELRKVERMATESLRTIAKLKEELRDLARRSLEKLREDLKRVDDTLRKVEEKVRRTGPSEELIEELIRTIEKLLKEIVRINEEVLKAVRELLKTLLKLSEDVVRRIEEILRKGGVPEEIRDHMVLHEYVNAAGITEIKERLDDVARRSEEELRRIIKKLKEVVKEIRKKLK

SEQ ID NO: 689 - protein, 231 aa, Artificial Sequence; identical to SEQ ID NO: 688
  Synthetic

SEQ ID NO: 690 - protein, 236 aa, Artificial Sequence
  Synthetic
STREKAKKVLDTLRADNEDMKRVVEKILRALKRTNERAEKLAREITEEIKRILKEVGVSEEALKEIEDTLKRVLEEIKRLLDESKKLLEDVEREIREILKTSEELLERIEREIETVGSDEKTLAEILKRLLELNEEMNRRLLKILRDLLRLNEEVIRRLLAVLERLLDALKEALDRGDVRDHMVLHEYVNAAGITEKLRKALEELEREHRELEKELDKLHDESRKEHERIEEELRR

SEQ ID NO: 691 - protein, 236 aa, Artificial Sequence; identical to SEQ ID NO: 690
  Synthetic

SEQ ID NO: 692 - protein, 239 aa, Artificial Sequence
  Synthetic
SERELIERWLELHKEILRLIRELVERLLKLHREILDTIKKLIRELLELLEDIARKLGLDKEAKDELREIAKRVEDKLEKLERESRKVEEDLKRKLKELTDESDTVEKRVRDVVRRGTQSREEIAEELLRLDRKLLKAVEELLKEILDLNKKLLDDVRAILEETRRVLEKLLDRVRRGERRDHMVLHEYVNAAGITDILEKVERTLKKLLDDSARMAEEVKKTLKELLERSEKVAEDVRK

SEQ ID NO: 693 - protein, 237 aa, Artificial Sequence
  Synthetic
KEKEDALKKLEDLARKSREDLERVLRKHKKILDKIEELLKRVLDEHKKIVDDILRKTGTESEILKELARLLREHHEALRRLIEELRRLLEEHHKILEDLAREHKRLLDELIKVVADGVDKDELERIIKELRERDKKLVDDLRKVSEDLLDAVRKLVEDLERISRELLRRVEELAKGIDERDHMVLHEYVNAAGITSKEILERIERAIDELLKVSEEILKLSEDASEELLKILREFAK

SEQ ID NO: 694 - protein, 237 aa, Artificial Sequence; identical to SEQ ID NO: 693
  Synthetic

SEQ ID NO: 695 - protein, 240 aa, Artificial Sequence
  Synthetic
DREKSVRDIEEDLKRVLDKLRRRVETSKEELKKVLKADKENADELEKTLRDVVRELDRGIDSEVLRAVREIVKRLVEVVRRYNELSEKIIRDLVRVNDRVLELLKRIVKRLIDVVRELEKIGDKEKALRRLEEVVKEVKRRIEELLKELEDVHRELVKILEEVNEDLKRVATEVKEIIKRDHMVLHEYVNAAGITKRLLDNLKENTDRLKEVIDRNLADLRDLAEELRAVIERLLEDARR

SEQ ID NO: 696 - protein, 237 aa, Artificial Sequence
  Synthetic
REDEVLRDIERLLREIEEKIRRILEESTAELRKVEEEVKRIIERTKRELKAIKEDVERKGIDEELRKLLDEVLDKLTKLIERNKRSLERILELIKRIIDENLEVLRDIIRLLEELLKATKDNGVPKDEVIKLVEDVVRRIEELVTRVVARNEKLVKDLDDLAKKNVRENEELLREIDRGRDHMVLHEYVNAAGITIKALEKLARDLKEILRRHIEALKELARDLAEVIRKLLEDVKR

SEQ ID NO: 697 - protein, 237 aa, Artificial Sequence; identical to SEQ ID NO: 696
  Synthetic

SEQ ID NO: 698 - protein, 237 aa, Artificial Sequence
  Synthetic
SREDLLRSLAELIETILRKSSELLDRLLKLVREHSETSERLIRELKKILEDILKLIKGGISEDDVRRIVKEAKDELRRSVEEVKKSVDDLKEELKRSLREVRELVKSIADALEEIVRRSSGLGEVIKKLLELLRRLLEVHERTIRLLAELLERHLEVHEESIRLLLRLLEELLELVERKRDHMVLHEYVNAAGITLRDHKAKNDKILRDVEEVLRRHLEELARILKDVKKVLDEARK

SEQ ID NO: 699 - protein, 239 aa, Artificial Sequence
  Synthetic
SAEDLVRRVKDLVDKLEDKLRKVVRTNERLWEEIRKRLEELVRRNKELWDALVEKLKAGDKDKDELIEEAKSLEDESNALVEKLVRDIERVLAESNKLLDTLAKEIEEVLEEIVELVERGSGSDKEAREKLEDIKARLKEVLKKLREESKRIIDELRRLLEEYKRLVKEIRDRIEEVRKRDHMVLHEYVNAAGITKVLKELVEELEKLVRDHNRVVEEVVRELVELLSRAVEVIKEVVK

SEQ ID NO: 700 - protein, 240 aa, Artificial Sequence
  Synthetic
DKDKRLEELLKRLKELNDKTFEELERILEELKRANEASLREAERILEELRARIEGGNLDKRLAELLKKLLDDLKRLLEEYTRTNEELLKRLRELLERYRETNKKLLDLLRKLLDEARRTGTDEDLLRRLEDILRKYEDEVRRLLKELEDILREYEDTSRRLLEELERIAKEAAERVSRGRDHMVLHEYVNAAGITRDLLRLLEEDSRTNSEVVKRLLDLLREDSKANSEVVKRLLDVLRE

SEQ ID NO: 701 - protein, 240 aa, Artificial Sequence
  Synthetic
SKEETLKRLLDELEKRNRETVERLERLLKELEDRNRASLEELEAVLEELERKIEESGLSKELKDTLARILEELRKLLEEYFRKNEELLRLLRKLLDEYARTNEELLRLLEELLDTARRTGGDSELLKRLEDIAREYEKRVRRLLEKLKDILDKYRKTVEELVRKMEEILKEAKKTISRIRDHMVLHEYVNAAGITRRLIEILRRDVELNLDVAKKLLELLKEDSKLNLDVARELLELLDR

SEQ ID NO: 702 - protein, 240 aa, Artificial Sequence; identical to SEQ ID NO: 701
  Synthetic

SEQ ID NO: 703 - protein, 238 aa, Artificial Sequence
  Synthetic
EEDERLTKRVEEIKRENRELLRRLEEEVKELERKSEKIVRDLKEKVDRAKEKLDSGKGSTELLVEELEKLIREILKLSEDHNRTLEEVVRKIEDVLRANLERLKELVDEILKALKERGKGDSEELKRKVEKVARDYERLLRKLREVVKRILDESKRLDEELEERLKEVLKKLEELIKRGGRDHMVLHEYVNAAGITLKLVEKLIRRNLRLLEELLRLVREILRTSNEILEEILKDARR

SEQ ID NO: 704 - protein, 234 aa, Artificial Sequence
  Synthetic
SAKETIRKLIEENKDIIRKLAEKLKRLLEESERIAEEALRLIKELLERIERALRRVGSGIDEELLKELEKELARLEEELKEILDRVRDLHRRLAEEIRKILEESKKLNEELEDRLRKDGDVEELLELLERVHATDVRLLRELLKLLKKVHEDVVSLLERLLELLKRVLDRIVEELGLSDKRDHMVLHEYVNAAGITAKRLKELSDRLEEKIRKIKRELDDLSARLREKIERTRK

SEQ ID NO: 705 - protein, 234 aa, Artificial Sequence; identical to SEQ ID NO: 704
  Synthetic

SEQ ID NO: 706 - protein, 238 aa, Artificial Sequence
  Synthetic
SEAEKIREALETNLRLLEELIKRLKEILDTHNELLRRVIETLERLLKELLELLEEGGLDEEVLREVKRLVDELRKEARRVLDEHEKLVRKIKKEAEDVARESEEIIKEVEDKLKGLDREELLERVRRVLKKSDDLIAELVRRALKILEELTRLLAELLKKVVEILRRIVELVERVLTKKGRDHMVLHEYVNAAGITEDRLRRLLEKLARDSAELMRELERILDRYARESEELDRRLAE

SEQ ID NO: 707 - protein, 238 aa, Artificial Sequence; identical to SEQ ID NO: 706
  Synthetic

SEQ ID NO: 708 - protein, 240 aa, Artificial Sequence
  Synthetic
SDKEEIKRRVEKTARDLETEHDKIKKRLEDTVRDIKRELDELLEKYERVLRKIEKTLREGDGDATDLVDKLLETVKRLNEEVLRTVKKIADELRRLVEEVLRVLRESNETLARLLEEGNVGDEVRERLEEVLRRTEEIIKTLEEIVKRLLDELRRLVEELRRISKKLKDELDKIKEKGKDRDHMVLHEYVNAAGITDVVRRILEALAKLIKELLEALEEVLRRNKELIRELLRVLDEALK

SEQ ID NO: 709 - protein, 240 aa, Artificial Sequence; identical to SEQ ID NO: 708
  Synthetic

SEQ ID NO: 710 - protein, 238 aa, Artificial Sequence
  Synthetic
DADELLRRLAEEVERVIREAEDLLRRWKETIKKVLDDLKRLLDELKKRNEDVIRELTKTKGDEELAKLIKDLLDTNEKVNRDLLRLIKKLLKDAERVNRRLLELIEELLEELKRVAKDLGLREEADKKLRDIADRARKELEDYERRLKELLKTVEDALRKAEEDSRKLKRDVEELLERGRRDHMVLHEYVNAAGITLRKLLERLREILRENLEALKKTLKRLEDVVREILEDLKRERK

SEQ ID NO: 711 - protein, 238 aa, Artificial Sequence; identical to SEQ ID NO: 710
  Synthetic

SEQ ID NO: 712 - protein, 231 aa, Artificial Sequence
  Synthetic
DKAEVLREALKLLKDLLEELIKIHEESLKRILDLIDTLVKVHEDALRALKELLERSGLDERELRKVERMATESLRTIAKLKEELRDLARRSLEKLREDLKRVDDTLRKVEEKVRRTGPSEELIEELIRTIEKLLKEIVRINEEVLKAVRELLKTLLKLSEDVVRRIEEILRKGGVPEEIDRDHMVLHEYVNAAGITIKERLDDVARRSEEELRRIIKKLKEVVKEIRKKLK

SEQ ID NO: 713 - protein, 236 aa, Artificial Sequence
  Synthetic
STREKAKKVLDTLRADNEDMKRVVEKILRALKRTNERAEKLAREITEEIKRILKEVGVSEEALKEIEDTLKRVLEEIKRLLDESKKLLEDVEREIREILKTSEELLERIEREIETVGSDEKTLAEILKRLLELNEEMNRRLLKILRDLLRLNEEVIRRLLAVLERLLDALKEALDRGDVPRDHMVLHEYVNAAGITKLRKALEELEREHRELEKELDKLHDESRKEHERIEEELRR

SEQ ID NO: 714 - protein, 236 aa, Artificial Sequence; identical to SEQ ID NO: 713
  Synthetic

SEQ ID NO: 715 - protein, 239 aa, Artificial Sequence
  Synthetic
SERELIERWLELHKEILRLIRELVERLLKLHREILDTIKKLIRELLELLEDIARKLGLDKEAKDELREIAKRVEDKLEKLERESRKVEEDLKRKLKELTDESDTVEKRVRDVVRRGTQSREEIAEELLRLDRKLLKAVEELLKEILDLNKKLLDDVRAILEETRRVLEKLLDRVRRGERTRDHMVLHEYVNAAGITILEKVERTLKKLLDDSARMAEEVKKTLKELLERSEKVAEDVRK

SEQ ID NO: 716 - protein, 231 aa, Artificial Sequence
  Synthetic
SKEEEVEKVLRKWEEILRRLIEENKRANDKIRREYEELVKEIRRVLEEIKEVAERLGVSEEVKRILEKLIKLLEDILEYEKENVERLIELNERILRELKKSVEELKALVTRVRRDGLPESEVRKLVEDVLRKNEELLKEAKKAWRDSIENLKRVLEEVAKLVKTVLREIEEKIDDEDVVRRDHMVLHEYVNAAGITIRRILKVNTELMRVDERSIRESLKAISEVLKVLDT

SEQ ID NO: 717 - protein, 231 aa, Artificial Sequence; identical to SEQ ID NO: 716
  Synthetic

SEQ ID NO: 718 - protein, 231 aa, Artificial Sequence
  Synthetic
SKDEELARLLEELVERWRKIVEDLERDHRRLVKEIRELVERIRKKLEELVDRIRKNGIDERIVRLIEEIAKIIEEVLKEIVKLVERAVRENVRVLRESVRLVAELVETLARLLRGSDERVTEAIKKVLDTSEDLIRRVIKVNEDILREIAKLVEEVLREAERILTEIKKEGDREEIRRILRDHMVLHEYVNAAGITILKLLRDLTRRLAEVAKAVHKLLEELLRKLKEDTR

SEQ ID NO: 719 - protein, 238 aa, Artificial Sequence
  Synthetic
SEIEDVIRRLRKILEDLERVSEKLLREIKKILDEARRLNEEVIKEIKRVLEDAVRVFRDGSGSKEELAKLVEELIRELAKLAKEVDEIHKRIVERLKALVEDAERIHRKIVETLEEIVRGVPSEELKRVVEAIVEVIKEHLKVLADVIRRIIKAIEENAETIKRVLEDIVRVLELVLRGERDHMVLHEYVNAAGITIEDSLRELEKTVRELLKRIKEASDKVREDVDRLIKELKEAAD

SEQ ID NO: 720 - protein, 238 aa, Artificial Sequence; identical to SEQ ID NO: 719
  Synthetic

SEQ ID NO: 721 - protein, 237 aa, Artificial Sequence
  Synthetic
KEKEDALKKLEDLARKSREDLERVLRKHKKILDKIEELLKRVLDEHKKIVDDILRKTGTESEILKELARLLREHHEALRRLIEELRRLLEEHHKILEDLAREHKRLLDELIKVVADGVDKDELERIIKELRERDKKLVDDLRKVSEDLLDAVRKLVEDLERISRELLRRVEELAKGIDEERDHMVLHEYVNAAGITKEILERIERAIDELLKVSEEILKLSEDASEELLKILREFAK

SEQ ID NO: 722 - protein, 241 aa, Artificial Sequence
  Synthetic
SEKELLKEILDRIRELLEDDNRLLKRIVDEIRKLLEEWLRVHKEILERIKELLDRIGAPEDVIRELTRALKETEEDVDRVIRTLEKLLKEVLDAHEEVVRKLDRLLKEVERLVEGGDAEEVVRDLLRVVKEILDESKAVIDELARVVDEILKLLEEVDRKLAKVVKEILEDVLRGSGDDERDHMVLHEYVNAAGITLEDLARDTRRVIEEAKRLLKEWRDRNKEVADTLKKLLEDLIRKIR

SEQ ID NO: 723 - protein, 241 aa, Artificial Sequence; identical to SEQ ID NO: 722
  Synthetic

SEQ ID NO: 724 - protein, 240 aa, Artificial Sequence
  Synthetic
DREKSVRDIEEDLKRVLDKLRRRVETSKEELKKVLKADKENADELEKTLRDVVRELDRGIDSEVLRAVREIVKRLVEVVRRYNELSEKIIRDLVRVNDRVLELLKRIVKRLIDVVRELEKIGDKEKALRRLEEVVKEVKRRIEELLKELEDVHRELVKILEEVNEDLKRVATEVKEIIKTRDHMVLHEYVNAAGITRLLDNLKENTDRLKEVIDRNLADLRDLAEELRAVIERLLEDARR

SEQ ID NO: 725 - protein, 241 aa, Artificial Sequence
  Synthetic
SAEEAVEKLVRIARAIVKINEDLSREVVRILREIVRLNEETTRLLVEIAREVVKVVEDGGLSEDVVRKLRKLVKELEDLLKKSNDDIRKLVEDVARRLKESNDEIRRLVERLEELLKRGPGDEELLRLVEELTEELLRTHEEVVKALEKLTADLLELHRELLERVRRLTKRIEEELKRVGRDHMVLHEYVNAAGITEKVLDDSAKELEKLKRELERLLEESRRKLEKLKRDLERVLEETRR

SEQ ID NO: 726 - protein, 241 aa, Artificial Sequence; identical to SEQ ID NO: 725
  Synthetic

SEQ ID NO: 727 - protein, 237 aa, Artificial Sequence
  Synthetic
REDEVLRDIERLLREIEEKIRRILEESTAELRKVEEEVKRIIERTKRELKAIKEDVERKGIDEELRKLLDEVLDKLTKLIERNKRSLERILELIKRIIDENLEVLRDIIRLLEELLKATKDNGVPKDEVIKLVEDVVRRIEELVTRVVARNEKLVKDLDDLAKKNVRENEELLREIDRGLRDHMVLHEYVNAAGITKALEKLARDLKEILRRHIEALKELARDLAEVIRKLLEDVKR

SEQ ID NO: 728 - protein, 239 aa, Artificial Sequence
  Synthetic
SAEDLVRRVKDLVDKLEDKLRKVVRTNERLWEEIRKRLEELVRRNKELWDALVEKLKAGDKDKDELIEEAKSLEDESNALVEKLVRDIERVLAESNKLLDTLAKEIEEVLEEIVELVERGSGSDKEAREKLEDIKARLKEVLKKLREESKRIIDELRRLLEEYKRLVKEIRDRIEEVRKRRDHMVLHEYVNAAGITVLKELVEELEKLVRDHNRVVEEVVRELVELLSRAVEVIKEVVK

SEQ ID NO: 729 - protein, 240 aa, Artificial Sequence
  Synthetic
DKDKRLEELLKRLKELNDKTFEELERILEELKRANEASLREAERILEELRARIEGGNLDKRLAELLKKLLDDLKRLLEEYTRTNEELLKRLRELLERYRETNKKLLDLLRKLLDEARRTGTDEDLLRRLEDILRKYEDEVRRLLKELEDILREYEDTSRRLLEELERIAKEAAERVSRGSRDHMVLHEYVNAAGITDLLRLLEEDSRTNSEVVKRLLDLLREDSKANSEVVKRLLDVLRE

SEQ ID NO: 730 - protein, 240 aa, Artificial Sequence
  Synthetic
SKEETLKRLLDELEKRNRETVERLERLLKELEDRNRASLEELEAVLEELERKIEESGLSKELKDTLARILEELRKLLEEYFRKNEELLRLLRKLLDEYARTNEELLRLLEELLDTARRTGGDSELLKRLEDIAREYEKRVRRLLEKLKDILDKYRKTVEELVRKMEEILKEAKKTISRIGRDHMVLHEYVNAAGITRLIEILRRDVELNLDVAKKLLELLKEDSKLNLDVARELLELLDR

SEQ ID NO: 731 - protein, 241 aa, Artificial Sequence
  Synthetic
SADEALEELVRRLLEVLKTVLERTKELSRDDLRVVKEVLRIIEELVKRLLKVIRDGLDDADRVLEEVERVIREAKREVKRWEEVVRKVVEDSRRLIERVLAEVEEVIKEAKRLLDERKSGGSREVIEELLSLLREIVRHHKEVSDEHLKLSAELVKRILDVVEETLRLATEIVRRIKEGGRDHMVLHEYVNAAGITKRRVERLLEDIERLLAELEKLNEDVLRENKALLEDLERRVRERKK

SEQ ID NO: 732 - protein, 239 aa, Artificial Sequence
  Synthetic
SDEELLERVERLLRELLDTNRRMLEEVEKELRRLLETNKKTLDDVRRLLKELLDVLETRGVKDEKRLRDIRRRLEEVVRRLDKLHRDIAEDLKRVKERLDRLHERIKRRLEEVVKELRDLKDRGVDERKVLERAAEVLRELLELLRESLEEIERIIRRLLELHKRSTEEAARALEELLRGLRDHMVLHEYVNAAGITLKEDKERLEKIARDIERDLERYARDLKRLEDELREDIERARR

SEQ ID NO: 733 - protein, 239 aa, Artificial Sequence; identical to SEQ ID NO: 732
  Synthetic

SEQ ID NO: 734 - protein, 238 aa, Artificial Sequence
  Synthetic
SEAEKIREALETNLRLLEELIKRLKEILDTHNELLRRVIETLERLLKELLELLEEGGLDEEVLREVKRLVDELRKEARRVLDEHEKLVRKIKKEAEDVARESEEIIKEVEDKLKGLDREELLERVRRVLKKSDDLIAELVRRALKILEELTRLLAELLKKVVEILRRIVELVERVLTKKGARDHMVLHEYVNAAGITDRLRRLLEKLARDSAELMRELERILDRYARESEELDRRLAE

SEQ ID NO: 735 - protein, 238 aa, Artificial Sequence; identical to SEQ ID NO: 734
  Synthetic

SEQ ID NO: 736 - protein, 242 aa, Artificial Sequence
  Synthetic
SEKERLMRLLDKLKDLNRRLVERIKELLDKALELHKKLVKELRELLERLKELVERGGVPEELLTRIDELIKKLEDEARKISKEVKRLIDELKKRLEDIHREVDRLIRELKETLKGVTDKDELLRRVAEVLERIARLSEELIREVKEVLEKIVELSRELLKRVLDVLRRIAELLEDALRKGNRDHMVLHEYVNAAGITEDDLRKIERDAEREYKKLKDELEELTERYRREIRKLKEELKADRK

SEQ ID NO: 737 - protein, 242 aa, Artificial Sequence; identical to SEQ ID NO: 736
  Synthetic

SEQ ID NO: 738 - protein, 238 aa, Artificial Sequence
  Synthetic
DADELLRRLAEEVERVIREAEDLLRRWKETIKKVLDDLKRLLDELKKRNEDVIRELTKTKGDEELAKLIKDLLDTNEKVNRDLLRLIKKLLKDAERVNRRLLELIEELLEELKRVAKDLGLREEADKKLRDIADRARKELEDYERRLKELLKTVEDALRKAEEDSRKLKRDVEELLERGRLRDHMVLHEYVNAAGITRKLLERLREILRENLEALKKTLKRLEDVVREILEDLKRERK

SEQ ID NO: 739 - protein, 238 aa, Artificial Sequence; identical to SEQ ID NO: 738
  Synthetic

SEQ ID NO: 740 - protein, 236 aa, Artificial Sequence
  Synthetic
STREKAKKVLDTLRADNEDMKRVVEKILRALKRTNERAEKLAREITEEIKRILKEVGVSEEALKEIEDTLKRVLEEIKRLLDESKKLLEDVEREIREILKTSEELLERIEREIETVGSDEKTLAEILKRLLELNEEMNRRLLKILRDLLRLNEEVIRRLLAVLERLLDALKEALDRGDVPERDHMVLHEYVNAAGITLRKALEELEREHRELEKELDKLHDESRKEHERIEEELRR

SEQ ID NO: 741 - protein, 239 aa, Artificial Sequence
  Synthetic
SERELIERWLELHKEILRLIRELVERLLKLHREILDTIKKLIRELLELLEDIARKLGLDKEAKDELREIAKRVEDKLEKLERESRKVEEDLKRKLKELTDESDTVEKRVRDVVRRGTQSREEIAEELLRLDRKLLKAVEELLKEILDLNKKLLDDVRAILEETRRVLEKLLDRVRRGERTDRDHMVLHEYVNAAGITLEKVERTLKKLLDDSARMAEEVKKTLKELLERSEKVAEDVRK

SEQ ID NO: 742 - protein, 237 aa, Artificial Sequence
  Synthetic
KEKEDALKKLEDLARKSREDLERVLRKHKKILDKIEELLKRVLDEHKKIVDDILRKTGTESEILKELARLLREHHEALRRLIEELRRLLEEHHKILEDLAREHKRLLDELIKVVADGVDKDELERIIKELRERDKKLVDDLRKVSEDLLDAVRKLVEDLERISRELLRRVEELAKGIDEELRDHMVLHEYVNAAGITEILERIERAIDELLKVSEEILKLSEDASEELLKILREFAK

SEQ ID NO: 743 - protein, 237 aa, Artificial Sequence; identical to SEQ ID NO: 742
  Synthetic

SEQ ID NO: 744 - protein, 241 aa, Artificial Sequence
  Synthetic
SEKELLKEILDRIRELLEDDNRLLKRIVDEIRKLLEEWLRVHKEILERIKELLDRIGAPEDVIRELTRALKETEEDVDRVIRTLEKLLKEVLDAHEEVVRKLDRLLKEVERLVEGGDAEEVVRDLLRVVKEILDESKAVIDELARVVDEILKLLEEVDRKLAKVVKEILEDVLRGSGDDEDRDHMVLHEYVNAAGITEDLARDTRRVIEEAKRLLKEWRDRNKEVADTLKKLLEDLIRKIR

SEQ ID NO: 745 - protein, 240 aa, Artificial Sequence
  Synthetic
DREKSVRDIEEDLKRVLDKLRRRVETSKEELKKVLKADKENADELEKTLRDVVRELDRGIDSEVLRAVREIVKRLVEVVRRYNELSEKIIRDLVRVNDRVLELLKRIVKRLIDVVRELEKIGDKEKALRRLEEVVKEVKRRIEELLKELEDVHRELVKILEEVNEDLKRVATEVKEIIKTGRDHMVLHEYVNAAGITLLDNLKENTDRLKEVIDRNLADLRDLAEELRAVIERLLEDARR

SEQ ID NO: 746 - protein, 241 aa, Artificial Sequence
  Synthetic
SAEEAVEKLVRIARAIVKINEDLSREVVRILREIVRLNEETTRLLVEIAREVVKVVEDGGLSEDVVRKLRKLVKELEDLLKKSNDDIRKLVEDVARRLKESNDEIRRLVERLEELLKRGPGDEELLRLVEELTEELLRTHEEVVKALEKLTADLLELHRELLERVRRLTKRIEEELKRVGVRDHMVLHEYVNAAGITKVLDDSAKELEKLKRELERLLEESRRKLEKLKRDLERVLEETRR

SEQ ID NO: 747 - protein, 241 aa, Artificial Sequence; identical to SEQ ID NO: 746
  Synthetic

SEQ ID NO: 748 - protein, 239 aa, Artificial Sequence
  Synthetic
SAEDLVRRVKDLVDKLEDKLRKVVRTNERLWEEIRKRLEELVRRNKELWDALVEKLKAGDKDKDELIEEAKSLEDESNALVEKLVRDIERVLAESNKLLDTLAKEIEEVLEEIVELVERGSGSDKEAREKLEDIKARLKEVLKKLREESKRIIDELRRLLEEYKRLVKEIRDRIEEVRKRNRDHMVLHEYVNAAGITLKELVEELEKLVRDHNRVVEEVVRELVELLSRAVEVIKEVVK

SEQ ID NO: 749 - protein, 239 aa, Artificial Sequence; identical to SEQ ID NO: 748
  Synthetic

SEQ ID NO: 750 - protein, 240 aa, Artificial Sequence
  Synthetic
DKDKRLEELLKRLKELNDKTFEELERILEELKRANEASLREAERILEELRARIEGGNLDKRLAELLKKLLDDLKRLLEEYTRTNEELLKRLRELLERYRETNKKLLDLLRKLLDEARRTGTDEDLLRRLEDILRKYEDEVRRLLKELEDILREYEDTSRRLLEELERIAKEAAERVSRGSDRDHMVLHEYVNAAGITLLRLLEEDSRTNSEVVKRLLDLLREDSKANSEVVKRLLDVLRE

SEQ ID NO: 751 - protein, 240 aa, Artificial Sequence
  Synthetic
SKEETLKRLLDELEKRNRETVERLERLLKELEDRNRASLEELEAVLEELERKIEESGLSKELKDTLARILEELRKLLEEYFRKNEELLRLLRKLLDEYARTNEELLRLLEELLDTARRTGGDSELLKRLEDIAREYEKRVRRLLEKLKDILDKYRKTVEELVRKMEEILKEAKKTISRIGSRDHMVLHEYVNAAGITLIEILRRDVELNLDVAKKLLELLKEDSKLNLDVARELLELLDR

SEQ ID NO: 752 - protein, 240 aa, Artificial Sequence; identical to SEQ ID NO: 751
  Synthetic

SEQ ID NO: 753 - protein, 239 aa, Artificial Sequence
  Synthetic
SDEELLERVERLLRELLDTNRRMLEEVEKELRRLLETNKKTLDDVRRLLKELLDVLETRGVKDEKRLRDIRRRLEEVVRRLDKLHRDIAEDLKRVKERLDRLHERIKRRLEEVVKELRDLKDRGVDERKVLERAAEVLRELLELLRESLEEIERIIRRLLELHKRSTEEAARALEELLRGLERDHMVLHEYVNAAGITKEDKERLEKIARDIERDLERYARDLKRLEDELREDIERARR

SEQ ID NO: 754 - protein, 239 aa, Artificial Sequence; identical to SEQ ID NO: 753
  Synthetic

SEQ ID NO: 755 - protein, 238 aa, Artificial Sequence
  Synthetic
EEDERLTKRVEEIKRENRELLRRLEEEVKELERKSEKIVRDLKEKVDRAKEKLDSGKGSTELLVEELEKLIREILKLSEDHNRTLEEVVRKIEDVLRANLERLKELVDEILKALKERGKGDSEELKRKVEKVARDYERLLRKLREVVKRILDESKRLDEELEERLKEVLKKLEELIKRGGPDRDHMVLHEYVNAAGITLVEKLIRRNLRLLEELLRLVREILRTSNEILEEILKDARR

SEQ ID NO: 756 - protein, 238 aa, Artificial Sequence
  Synthetic
SEAEKIREALETNLRLLEELIKRLKEILDTHNELLRRVIETLERLLKELLELLEEGGLDEEVLREVKRLVDELRKEARRVLDEHEKLVRKIKKEAEDVARESEEIIKEVEDKLKGLDREELLERVRRVLKKSDDLIAELVRRALKILEELTRLLAELLKKVVEILRRIVELVERVLTKKGAPRDHMVLHEYVNAAGITRLRRLLEKLARDSAELMRELERILDRYARESEELDRRLAE

SEQ ID NO: 757 - protein, 238 aa, Artificial Sequence; identical to SEQ ID NO: 756
  Synthetic

SEQ ID NO: 758 - protein, 242 aa, Artificial Sequence
  Synthetic
SEKERLMRLLDKLKDLNRRLVERIKELLDKALELHKKLVKELRELLERLKELVERGGVPEELLTRIDELIKKLEDEARKISKEVKRLIDELKKRLEDIHREVDRLIRELKETLKGVTDKDELLRRVAEVLERIARLSEELIREVKEVLEKIVELSRELLKRVLDVLRRIAELLEDALRKGNVRDHMVLHEYVNAAGITDDLRKIERDAEREYKKLKDELEELTERYRREIRKLKEELKADRK

SEQ ID NO: 759 - protein, 242 aa, Artificial Sequence; identical to SEQ ID NO: 758
  Synthetic

SEQ ID NO: 760 - protein, 240 aa, Artificial Sequence
  Synthetic
SDKEEIKRRVEKTARDLETEHDKIKKRLEDTVRDIKRELDELLEKYERVLRKIEKTLREGDGDATDLVDKLLETVKRLNEEVLRTVKKIADELRRLVEEVLRVLRESNETLARLLEEGNVGDEVRERLEEVLRRTEEIIKTLEEIVKRLLDELRRLVEELRRISKKLKDELDKIKEKGKDEKRDHMVLHEYVNAAGITVRRILEALAKLIKELLEALEEVLRRNKELIRELLRVLDEALK

SEQ ID NO: 761 - protein, 240 aa, Artificial Sequence; identical to SEQ ID NO: 760
  Synthetic

SEQ ID NO: 762 - protein, 238 aa, Artificial Sequence
  Synthetic
DADELLRRLAEEVERVIREAEDLLRRWKETIKKVLDDLKRLLDELKKRNEDVIRELTKTKGDEELAKLIKDLLDTNEKVNRDLLRLIKKLLKDAERVNRRLLELIEELLEELKRVAKDLGLREEADKKLRDIADRARKELEDYERRLKELLKTVEDALRKAEEDSRKLKRDVEELLERGRLRRDHMVLHEYVNAAGITKLLERLREILRENLEALKKTLKRLEDVVREILEDLKRERK

SEQ ID NO: 763 - protein, 236 aa, Artificial Sequence
  Synthetic
STREKAKKVLDTLRADNEDMKRVVEKILRALKRTNERAEKLAREITEEIKRILKEVGVSEEALKEIEDTLKRVLEEIKRLLDESKKLLEDVEREIREILKTSEELLERIEREIETVGSDEKTLAEILKRLLELNEEMNRRLLKILRDLLRLNEEVIRRLLAVLERLLDALKEALDRGDVPEDRDHMVLHEYVNAAGITRKALEELEREHRELEKELDKLHDESRKEHERIEEELRR

SEQ ID NO: 764 - protein, 236 aa, Artificial Sequence; identical to SEQ ID NO: 763
  Synthetic

SEQ ID NO: 765 - protein, 243 aa, Artificial Sequence
  Synthetic
DLERVVEDIVDKAKRLLDKNLEVLKRIVDEVLRLLERLLRESRKVVKRVKEIIEELVRDEKELRRVKRALEEVLRRHEEIAKELKERLRKVAKEAEEKHKKLVEDLKRVVDEVRKKLSGPLDREKVLEVLDELVTIIAKLLDENIKVLEEVIRVIAELLERLLDSHRRLIDIIAKLLEGLRPRDHMVLHEYVNAAGITKRDSEKVVDDLKKELERIKREVKRLIEENARTLADIKRAVDEARK

SEQ ID NO: 766 - protein, 239 aa, Artificial Sequence
  Synthetic
SERELIERWLELHKEILRLIRELVERLLKLHREILDTIKKLIRELLELLEDIARKLGLDKEAKDELREIAKRVEDKLEKLERESRKVEEDLKRKLKELTDESDTVEKRVRDVVRRGTQSREEIAEELLRLDRKLLKAVEELLKEILDLNKKLLDDVRAILEETRRVLEKLLDRVRRGERTDDRDHMVLHEYVNAAGITEKVERTLKKLLDDSARMAEEVKKTLKELLERSEKVAEDVRK

SEQ ID NO: 767 - protein, 238 aa, Artificial Sequence
  Synthetic
SEIEDVIRRLRKILEDLERVSEKLLREIKKILDEARRLNEEVIKEIKRVLEDAVRVFRDGSGSKEELAKLVEELIRELAKLAKEVDEIHKRIVERLKALVEDAERIHRKIVETLEEIVRGVPSEELKRVVEAIVEVIKEHLKVLADVIRRIIKAIEENAETIKRVLEDIVRVLELVLRGEGSRDHMVLHEYVNAAGITDSLRELEKTVRELLKRIKEASDKVREDVDRLIKELKEAAD

SEQ ID NO: 768 - protein, 237 aa, Artificial Sequence
  Synthetic
KEKEDALKKLEDLARKSREDLERVLRKHKKILDKIEELLKRVLDEHKKIVDDILRKTGTESEILKELARLLREHHEALRRLIEELRRLLEEHHKILEDLAREHKRLLDELIKVVADGVDKDELERIIKELRERDKKLVDDLRKVSEDLLDAVRKLVEDLERISRELLRRVEELAKGIDEELARDHMVLHEYVNAAGITILERIERAIDELLKVSEEILKLSEDASEELLKILREFAK

SEQ ID NO: 769 - protein, 241 aa, Artificial Sequence
  Synthetic
SEKELLKEILDRIRELLEDDNRLLKRIVDEIRKLLEEWLRVHKEILERIKELLDRIGAPEDVIRELTRALKETEEDVDRVIRTLEKLLKEVLDAHEEVVRKLDRLLKEVERLVEGGDAEEVVRDLLRVVKEILDESKAVIDELARVVDEILKLLEEVDRKLAKVVKEILEDVLRGSGDDEDARDHMVLHEYVNAAGITDLARDTRRVIEEAKRLLKEWRDRNKEVADTLKKLLEDLIRKIR

SEQ ID NO: 770 - protein, 240 aa, Artificial Sequence
  Synthetic
DREKSVRDIEEDLKRVLDKLRRRVETSKEELKKVLKADKENADELEKTLRDVVRELDRGIDSEVLRAVREIVKRLVEVVRRYNELSEKIIRDLVRVNDRVLELLKRIVKRLIDVVRELEKIGDKEKALRRLEEVVKEVKRRIEELLKELEDVHRELVKILEEVNEDLKRVATEVKEIIKTGIRDHMVLHEYVNAAGITLDNLKENTDRLKEVIDRNLADLRDLAEELRAVIERLLEDARR

SEQ ID NO: 771 - protein, 240 aa, Artificial Sequence; identical to SEQ ID NO: 770
  Synthetic

SEQ ID NO: 772 - protein, 241 aa, Artificial Sequence
  Synthetic
SAEEAVEKLVRIARAIVKINEDLSREVVRILREIVRLNEETTRLLVEIAREVVKVVEDGGLSEDVVRKLRKLVKELEDLLKKSNDDIRKLVEDVARRLKESNDEIRRLVERLEELLKRGPGDEELLRLVEELTEELLRTHEEVVKALEKLTADLLELHRELLERVRRLTKRIEEELKRVGVSRDHMVLHEYVNAAGITVLDDSAKELEKLKRELERLLEESRRKLEKLKRDLERVLEETRR

SEQ ID NO: 773 - protein, 241 aa, Artificial Sequence; identical to SEQ ID NO: 772
  Synthetic

SEQ ID NO: 774 - protein, 237 aa, Artificial Sequence
  Synthetic
REDEVLRDIERLLREIEEKIRRILEESTAELRKVEEEVKRIIERTKRELKAIKEDVERKGIDEELRKLLDEVLDKLTKLIERNKRSLERILELIKRIIDENLEVLRDIIRLLEELLKATKDNGVPKDEVIKLVEDVVRRIEELVTRVVARNEKLVKDLDDLAKKNVRENEELLREIDRGLDERDHMVLHEYVNAAGITLEKLARDLKEILRRHIEALKELARDLAEVIRKLLEDVKR

SEQ ID NO: 775 - protein, 237 aa, Artificial Sequence; identical to SEQ ID NO: 774
  Synthetic

SEQ ID NO: 776 - protein, 243 aa, Artificial Sequence
  Synthetic
SEAERLADEVRKAVKKSEEDNETLVREVEKAVRELKKNNKTWVDEVRKLMKRLVDLLRDGQVSDRDLLKELEEVLRRVLEALAENHERTEEILKRWLDRYAEDIERLRKVLKEVIEALKRGGSDDKRIVDELEEILRRNEDVLDKIAKRLRRLLEEDRRLLERIVRELKRLLDDLDRITKEGRDHMVLHEYVNAAGITLEIIEELVRLNNEILERLLKIVRELHKDNIKILEDLLRIIEEVLR

SEQ ID NO: 777 - protein, 243 aa, Artificial Sequence; identical to SEQ ID NO: 776
  Synthetic

SEQ ID NO: 778 - protein, 239 aa, Artificial Sequence
  Synthetic
SAEDLVRRVKDLVDKLEDKLRKVVRTNERLWEEIRKRLEELVRRNKELWDALVEKLKAGDKDKDELIEEAKSLEDESNALVEKLVRDIERVLAESNKLLDTLAKEIEEVLEEIVELVERGSGSDKEAREKLEDIKARLKEVLKKLREESKRIIDELRRLLEEYKRLVKEIRDRIEEVRKRNSRDHMVLHEYVNAAGITKELVEELEKLVRDHNRVVEEVVRELVELLSRAVEVIKEVVK

SEQ ID NO: 779 - protein, 243 aa, Artificial Sequence
  Synthetic
SRVEELKKLIEDILRISREVVERIARVAEDIHRINRRVLDDLRKLIEDILRTVEEILARKVSGTEAAEALRDTIRRVVDEIRKLLEEHEKRSAELLEEIRKLLEDILRRSERAVEEIRELLKKGVSTKDVLRIIEEILREHLELLERVVRRIEEILRELLKTIEEIVKRIKEILEELKEVLKRDHMVLHEYVNAAGITKEDLDRILEEYRRLLEEIKRKLEEILRRVEELHRRLRRKLEEIDR

SEQ ID NO: 780 - protein, 243 aa, Artificial Sequence; identical to SEQ ID NO: 779
  Synthetic

SEQ ID NO: 781 - protein, 240 aa, Artificial Sequence
  Synthetic
DKDKRLEELLKRLKELNDKTFEELERILEELKRANEASLREAERILEELRARIEGGNLDKRLAELLKKLLDDLKRLLEEYTRTNEELLKRLRELLERYRETNKKLLDLLRKLLDEARRTGTDEDLLRRLEDILRKYEDEVRRLLKELEDILREYEDTSRRLLEELERIAKEAAERVSRGSDKRDHMVLHEYVNAAGITLRLLEEDSRTNSEVVKRLLDLLREDSKANSEVVKRLLDVLRE

SEQ ID NO: 782 - protein, 240 aa, Artificial Sequence
  Synthetic
SKEETLKRLLDELEKRNRETVERLERLLKELEDRNRASLEELEAVLEELERKIEESGLSKELKDTLARILEELRKLLEEYFRKNEELLRLLRKLLDEYARTNEELLRLLEELLDTARRTGGDSELLKRLEDIAREYEKRVRRLLEKLKDILDKYRKTVEELVRKMEEILKEAKKTISRIGSERDHMVLHEYVNAAGITIEILRRDVELNLDVAKKLLELLKEDSKLNLDVARELLELLDR

SEQ ID NO: 783 - protein, 240 aa, Artificial Sequence; identical to SEQ ID NO: 782
  Synthetic

SEQ ID NO: 784 - protein, 243 aa, Artificial Sequence
  Synthetic
DEEETLRRLLERKVELAKEYLDVSKEVIDRTTKLLDEYLKTSKRIVDATVELLERGDLGPDELIKRLAEELERSLRELEEEIKRLKRELEESLKKLKEIIDRLAEEAEKLLAVLKRGEGSEEEALRALASLVRELIEVLRENDERLRDVLRRLIEALRKNNEILERVLRKLVRAAEERGRDERDHMVLHEYVNAAGITLRELNEITKDLEAKLEKLLRDLNELTKALEEELKRLLDELKKRTD

SEQ ID NO: 785 - protein, 243 aa, Artificial Sequence; identical to SEQ ID NO: 784
  Synthetic

SEQ ID NO: 786 - protein, 243 aa, Artificial Sequence
  Synthetic
SEAERTKESLKKVLKALVDLNRELLRKLEENMRELTKLNEEVKRALKEVLDKVREGGIVDKDAEREAERLMRELDKSSEDTARETRKLIEESKKSTRRTEEEARKLTETLDRLAKGGLPREDLLRALVRLLEELARLIEEDVRRNAELVKRHIELVERDVAELLRLIKELVDLLADLAEKGSRDHMVLHEYVNAAGITKELADRYREEVRKSKDKLRSILEDYKRKVDELKERLRELIEEVET

SEQ ID NO: 787 - protein, 243 aa, Artificial Sequence; identical to SEQ ID NO: 786
  Synthetic

SEQ ID NO: 788 - protein, 238 aa, Artificial Sequence
  Synthetic
EEDERLTKRVEEIKRENRELLRRLEEEVKELERKSEKIVRDLKEKVDRAKEKLDSGKGSTELLVEELEKLIREILKLSEDHNRTLEEVVRKIEDVLRANLERLKELVDEILKALKERGKGDSEELKRKVEKVARDYERLLRKLREVVKRILDESKRLDEELEERLKEVLKKLEELIKRGGPDKRDHMVLHEYVNAAGITVEKLIRRNLRLLEELLRLVREILRTSNEILEEILKDARR

SEQ ID NO: 789 - protein, 234 aa, Artificial Sequence
  Synthetic
SAKETIRKLIEENKDIIRKLAEKLKRLLEESERIAEEALRLIKELLERIERALRRVGSGIDEELLKELEKELARLEEELKEILDRVRDLHRRLAEEIRKILEESKKLNEELEDRLRKDGDVEELLELLERVHATDVRLLRELLKLLKKVHEDVVSLLERLLELLKRVLDRIVEELGLSDKELERDHMVLHEYVNAAGITLKELSDRLEEKIRKIKRELDDLSARLREKIERTRK

SEQ ID NO: 790 - protein, 234 aa, Artificial Sequence; identical to SEQ ID NO: 789
  Synthetic

SEQ ID NO: 791 - protein, 238 aa, Artificial Sequence
  Synthetic
SKEDKARELEKRLRDNLKKLEEVVRELAEVLKRNLEKLRRLAEELLRALKRLLDKLRAGGLPKDELEDLRREVEDVLRRLEDLLRKLKKANDESLTRLEELLRRAEEENRRVLTTLRELLRGNGDDRDLARLVARLVEANNRALEELLRLVAKNVEDNNRVLEELLRLVKELAKRLLGRIRDERDHMVLHEYVNAAGITARKILRDDERDLRALEKRIRDIIREDREELERLKERARK

SEQ ID NO: 792 - protein, 243 aa, Artificial Sequence
  Synthetic
KREDILKKLEDIIRDIIDKLRRILEKVKRLNEDIIREIKRLLDESLKTLEDLLKRIADKSRDRELEDILRRVLEKLRRSLDKLRDTLRKLKEETDTVLERAERTLKELKDRLEKLLRDGEKVSEEDLVEALKALIDELRKVLEDVIRVSKELVERLLRALREHLETNKRLVKELLDALRKTTGRDHMVLHEYVNAAGITRRLEEEVERVARELEKAHRDLERDIRRVAEELKKLLKKLRDDRR

SEQ ID NO: 793 - protein, 244 aa, Artificial Sequence
  Synthetic
SAEETLRRITEESKRVLEEITKKYEDLERESREVLRKLREDLDRIKRELEDVLTKGGDDKDEVLTVLEKVLDELLKLHRENLRVIKELLRKVLEVDRENLEVLKRLLEKARDLLRRSGRDEKDLKKLEDELRKVKEELEKKHEASKRDIEDLERELDKVTEEVERLLRKLKEELRRAAEGSDERDHMVLHEYVNAAGITIRVLEEILKINEELNRKIIKFARENLERNRRVNKKVIEVLREAAR

SEQ ID NO: 794 - protein, 238 aa, Artificial Sequence
  Synthetic
SEAEKIREALETNLRLLEELIKRLKEILDTHNELLRRVIETLERLLKELLELLEEGGLDEEVLREVKRLVDELRKEARRVLDEHEKLVRKIKKEAEDVARESEEIIKEVEDKLKGLDREELLERVRRVLKKSDDLIAELVRRALKILEELTRLLAELLKKVVEILRRIVELVERVLTKKGAPKRDHMVLHEYVNAAGITLRRLLEKLARDSAELMRELERILDRYARESEELDRRLAE

SEQ ID NO: 795 - protein, 238 aa, Artificial Sequence; identical to SEQ ID NO: 794
  Synthetic

SEQ ID NO: 796 - protein, 242 aa, Artificial Sequence
  Synthetic
SEKERLMRLLDKLKDLNRRLVERIKELLDKALELHKKLVKELRELLERLKELVERGGVPEELLTRIDELIKKLEDEARKISKEVKRLIDELKKRLEDIHREVDRLIRELKETLKGVTDKDELLRRVAEVLERIARLSEELIREVKEVLEKIVELSRELLKRVLDVLRRIAELLEDALRKGNVSRDHMVLHEYVNAAGITDLRKIERDAEREYKKLKDELEELTERYRREIRKLKEELKADRK

SEQ ID NO: 797 - protein, 242 aa, Artificial Sequence; identical to SEQ ID NO: 796
  Synthetic

SEQ ID NO: 798 - protein, 240 aa, Artificial Sequence
  Synthetic
SDKEEIKRRVEKTARDLETEHDKIKKRLEDTVRDIKRELDELLEKYERVLRKIEKTLREGDGDATDLVDKLLETVKRLNEEVLRTVKKIADELRRLVEEVLRVLRESNETLARLLEEGNVGDEVRERLEEVLRRTEEIIKTLEEIVKRLLDELRRLVEELRRISKKLKDELDKIKEKGKDEKRRDHMVLHEYVNAAGITRRILEALAKLIKELLEALEEVLRRNKELIRELLRVLDEALK

SEQ ID NO: 799 - protein, 238 aa, Artificial Sequence
  Synthetic
DADELLRRLAEEVERVIREAEDLLRRWKETIKKVLDDLKRLLDELKKRNEDVIRELTKTKGDEELAKLIKDLLDTNEKVNRDLLRLIKKLLKDAERVNRRLLELIEELLEELKRVAKDLGLREEADKKLRDIADRARKELEDYERRLKELLKTVEDALRKAEEDSRKLKRDVEELLERGRLRKRDHMVLHEYVNAAGITLLERLREILRENLEALKKTLKRLEDVVREILEDLKRERK

SEQ ID NO: 800 - protein, 236 aa, Artificial Sequence
  Synthetic
STREKAKKVLDTLRADNEDMKRVVEKILRALKRTNERAEKLAREITEEIKRILKEVGVSEEALKEIEDTLKRVLEEIKRLLDESKKLLEDVEREIREILKTSEELLERIEREIETVGSDEKTLAEILKRLLELNEEMNRRLLKILRDLLRLNEEVIRRLLAVLERLLDALKEALDRGDVPEDLRDHMVLHEYVNAAGITKALEELEREHRELEKELDKLHDESRKEHERIEEELRR

SEQ ID NO: 801 - protein, 236 aa, Artificial Sequence; identical to SEQ ID NO: 800
  Synthetic

SEQ ID NO: 802 - protein, 243 aa, Artificial Sequence
  Synthetic
DLERVVEDIVDKAKRLLDKNLEVLKRIVDEVLRLLERLLRESRKVVKRVKEIIEELVRDEKELRRVKRALEEVLRRHEEIAKELKERLRKVAKEAEEKHKKLVEDLKRVVDEVRKKLSGPLDREKVLEVLDELVTIIAKLLDENIKVLEEVIRVIAELLERLLDSHRRLIDIIAKLLEGLRPGRDHMVLHEYVNAAGITRDSEKVVDDLKKELERIKREVKRLIEENARTLADIKRAVDEARK

SEQ ID NO: 803 - protein, 243 aa, Artificial Sequence; identical to SEQ ID NO: 802
  Synthetic

SEQ ID NO: 804 - protein, 239 aa, Artificial Sequence
  Synthetic
SERELIERWLELHKEILRLIRELVERLLKLHREILDTIKKLIRELLELLEDIARKLGLDKEAKDELREIAKRVEDKLEKLERESRKVEEDLKRKLKELTDESDTVEKRVRDVVRRGTQSREEIAEELLRLDRKLLKAVEELLKEILDLNKKLLDDVRAILEETRRVLEKLLDRVRRGERTDDERDHMVLHEYVNAAGITKVERTLKKLLDDSARMAEEVKKTLKELLERSEKVAEDVRK

SEQ ID NO: 805 - protein, 237 aa, Artificial Sequence
  Synthetic
KEKEDALKKLEDLARKSREDLERVLRKHKKILDKIEELLKRVLDEHKKIVDDILRKTGTESEILKELARLLREHHEALRRLIEELRRLLEEHHKILEDLAREHKRLLDELIKVVADGVDKDELERIIKELRERDKKLVDDLRKVSEDLLDAVRKLVEDLERISRELLRRVEELAKGIDEELARRDHMVLHEYVNAAGITLERIERAIDELLKVSEEILKLSEDASEELLKILREFAK

SEQ ID NO: 806 - protein, 241 aa, Artificial Sequence
  Synthetic
SEKELLKEILDRIRELLEDDNRLLKRIVDEIRKLLEEWLRVHKEILERIKELLDRIGAPEDVIRELTRALKETEEDVDRVIRTLEKLLKEVLDAHEEVVRKLDRLLKEVERLVEGGDAEEVVRDLLRVVKEILDESKAVIDELARVVDEILKLLEEVDRKLAKVVKEILEDVLRGSGDDEDAVRDHMVLHEYVNAAGITLARDTRRVIEEAKRLLKEWRDRNKEVADTLKKLLEDLIRKIR

SEQ ID NO: 807 - protein, 241 aa, Artificial Sequence; identical to SEQ ID NO: 806
  Synthetic

SEQ ID NO: 808 - protein, 240 aa, Artificial Sequence
  Synthetic
DREKSVRDIEEDLKRVLDKLRRRVETSKEELKKVLKADKENADELEKTLRDVVRELDRGIDSEVLRAVREIVKRLVEVVRRYNELSEKIIRDLVRVNDRVLELLKRIVKRLIDVVRELEKIGDKEKALRRLEEVVKEVKRRIEELLKELEDVHRELVKILEEVNEDLKRVATEVKEIIKTGIKRDHMVLHEYVNAAGITDNLKENTDRLKEVIDRNLADLRDLAEELRAVIERLLEDARR

SEQ ID NO: 809 - protein, 241 aa, Artificial Sequence
  Synthetic
SAEEAVEKLVRIARAIVKINEDLSREVVRILREIVRLNEETTRLLVEIAREVVKVVEDGGLSEDVVRKLRKLVKELEDLLKKSNDDIRKLVEDVARRLKESNDEIRRLVERLEELLKRGPGDEELLRLVEELTEELLRTHEEVVKALEKLTADLLELHRELLERVRRLTKRIEEELKRVGVSERDHMVLHEYVNAAGITLDDSAKELEKLKRELERLLEESRRKLEKLKRDLERVLEETRR

SEQ ID NO: 810 - protein, 241 aa, Artificial Sequence; identical to SEQ ID NO: 809
  Synthetic

SEQ ID NO: 811 - protein, 237 aa, Artificial Sequence
  Synthetic
REDEVLRDIERLLREIEEKIRRILEESTAELRKVEEEVKRIIERTKRELKAIKEDVERKGIDEELRKLLDEVLDKLTKLIERNKRSLERILELIKRIIDENLEVLRDIIRLLEELLKATKDNGVPKDEVIKLVEDVVRRIEELVTRVVARNEKLVKDLDDLAKKNVRENEELLREIDRGLDEDRDHMVLHEYVNAAGITEKLARDLKEILRRHIEALKELARDLAEVIRKLLEDVKR

SEQ ID NO: 812 - protein, 237 aa, Artificial Sequence; identical to SEQ ID NO: 811
  Synthetic

SEQ ID NO: 813 - protein, 243 aa, Artificial Sequence
  Synthetic
SEAERLADEVRKAVKKSEEDNETLVREVEKAVRELKKNNKTWVDEVRKLMKRLVDLLRDGQVSDRDLLKELEEVLRRVLEALAENHERTEEILKRWLDRYAEDIERLRKVLKEVIEALKRGGSDDKRIVDELEEILRRNEDVLDKIAKRLRRLLEEDRRLLERIVRELKRLLDDLDRITKEGKRDHMVLHEYVNAAGITEIIEELVRLNNEILERLLKIVRELHKDNIKILEDLLRIIEEVLR

SEQ ID NO: 814 - protein, 243 aa, Artificial Sequence; identical to SEQ ID NO: 813
  Synthetic

SEQ ID NO: 815 - protein, 243 aa, Artificial Sequence
  Synthetic
SRVEELKKLIEDILRISREVVERIARVAEDIHRINRRVLDDLRKLIEDILRTVEEILARKVSGTEAAEALRDTIRRVVDEIRKLLEEHEKRSAELLEEIRKLLEDILRRSERAVEEIRELLKKGVSTKDVLRIIEEILREHLELLERVVRRIEEILRELLKTIEEIVKRIKEILEELKEVLKRRDHMVLHEYVNAAGITEDLDRILEEYRRLLEEIKRKLEEILRRVEELHRRLRRKLEEIDR

SEQ ID NO: 816 - protein, 243 aa, Artificial Sequence; identical to SEQ ID NO: 815
  Synthetic

SEQ ID NO: 817 - protein, 240 aa, Artificial Sequence
  Synthetic
SKEETLKRLLDELEKRNRETVERLERLLKELEDRNRASLEELEAVLEELERKIEESGLSKELKDTLARILEELRKLLEEYFRKNEELLRLLRKLLDEYARTNEELLRLLEELLDTARRTGGDSELLKRLEDIAREYEKRVRRLLEKLKDILDKYRKTVEELVRKMEEILKEAKKTISRIGSEERDHMVLHEYVNAAGITEILRRDVELNLDVAKKLLELLKEDSKLNLDVARELLELLDR

SEQ ID NO: 818 - protein, 240 aa, Artificial Sequence; identical to SEQ ID NO: 817
  Synthetic

SEQ ID NO: 819 - protein, 243 aa, Artificial Sequence
  Synthetic
DEEETLRRLLERKVELAKEYLDVSKEVIDRTTKLLDEYLKTSKRIVDATVELLERGDLGPDELIKRLAEELERSLRELEEEIKRLKRELEESLKKLKEIIDRLAEEAEKLLAVLKRGEGSEEEALRALASLVRELIEVLRENDERLRDVLRRLIEALRKNNEILERVLRKLVRAAEERGRDESRDHMVLHEYVNAAGITRELNEITKDLEAKLEKLLRDLNELTKALEEELKRLLDELKKRTD

SEQ ID NO: 820 - protein, 243 aa, Artificial Sequence; identical to SEQ ID NO: 819
  Synthetic

SEQ ID NO: 821 - protein, 243 aa, Artificial Sequence
  Synthetic
SEAERTKESLKKVLKALVDLNRELLRKLEENMRELTKLNEEVKRALKEVLDKVREGGIVDKDAEREAERLMRELDKSSEDTARETRKLIEESKKSTRRTEEEARKLTETLDRLAKGGLPREDLLRALVRLLEELARLIEEDVRRNAELVKRHIELVERDVAELLRLIKELVDLLADLAEKGSRRDHMVLHEYVNAAGITELADRYREEVRKSKDKLRSILEDYKRKVDELKERLRELIEEVET

SEQ ID NO: 822 - protein, 243 aa, Artificial Sequence; identical to SEQ ID NO: 821
  Synthetic

SEQ ID NO: 823 - protein, 241 aa, Artificial Sequence
  Synthetic
SADEALEELVRRLLEVLKTVLERTKELSRDDLRVVKEVLRIIEELVKRLLKVIRDGLDDADRVLEEVERVIREAKREVKRWEEVVRKVVEDSRRLIERVLAEVEEVIKEAKRLLDERKSGGSREVIEELLSLLREIVRHHKEVSDEHLKLSAELVKRILDVVEETLRLATEIVRRIKEGGNSERDHMVLHEYVNAAGITVERLLEDIERLLAELEKLNEDVLRENKALLEDLERRVRERKK

SEQ ID NO: 824 - protein, 241 aa, Artificial Sequence; identical to SEQ ID NO: 823
  Synthetic

SEQ ID NO: 825 - protein, 239 aa, Artificial Sequence
  Synthetic
SDEELLERVERLLRELLDTNRRMLEEVEKELRRLLETNKKTLDDVRRLLKELLDVLETRGVKDEKRLRDIRRRLEEVVRRLDKLHRDIAEDLKRVKERLDRLHERIKRRLEEVVKELRDLKDRGVDERKVLERAAEVLRELLELLRESLEEIERIIRRLLELHKRSTEEAARALEELLRGLEGSRDHMVLHEYVNAAGITDKERLEKIARDIERDLERYARDLKRLEDELREDIERARR

SEQ ID NO: 826 - protein, 245 aa, Artificial Sequence
  Synthetic
TEEEVLRKVEKLIKDLLDVLRDLLRASEEVVREALRVLEELIEENKRVIEELSRALSGGSRESVESALAKNEERLKKILEDADRVLDKWRRLLEELSKKAKAVLDEVRKRLEEIKREVPETEKLRTLLTILEEILRALEKIIRDILRINERLLEKLKRILERLRETNREIDERIRKLVEEARGGRDHMVLHEYVNAAGITEKRHEDLRRELEKLLRDYKRELEEIERALEEIEKTLKRRADETRR

SEQ ID NO: 827 - protein, 238 aa, Artificial Sequence
  Synthetic
SKEDKARELEKRLRDNLKKLEEVVRELAEVLKRNLEKLRRLAEELLRALKRLLDKLRAGGLPKDELEDLRREVEDVLRRLEDLLRKLKKANDESLTRLEELLRRAEEENRRVLTTLRELLRGNGDDRDLARLVARLVEANNRALEELLRLVAKNVEDNNRVLEELLRLVKELAKRLLGRIRDEDRDHMVLHEYVNAAGITRKILRDDERDLRALEKRIRDIIREDREELERLKERARK

SEQ ID NO: 828 - protein, 243 aa, Artificial Sequence
  Synthetic
KREDILKKLEDIIRDIIDKLRRILEKVKRLNEDIIREIKRLLDESLKTLEDLLKRIADKSRDRELEDILRRVLEKLRRSLDKLRDTLRKLKEETDTVLERAERTLKELKDRLEKLLRDGEKVSEEDLVEALKALIDELRKVLEDVIRVSKELVERLLRALREHLETNKRLVKELLDALRKTTGDRDHMVLHEYVNAAGITRLEEEVERVARELEKAHRDLERDIRRVAEELKKLLKKLRDDRR

SEQ ID NO: 829 - protein, 243 aa, Artificial Sequence; identical to SEQ ID NO: 828
  Synthetic

SEQ ID NO: 830 - protein, 244 aa, Artificial Sequence
  Synthetic
SAEETLRRITEESKRVLEEITKKYEDLERESREVLRKLREDLDRIKRELEDVLTKGGDDKDEVLTVLEKVLDELLKLHRENLRVIKELLRKVLEVDRENLEVLKRLLEKARDLLRRSGRDEKDLKKLEDELRKVKEELEKKHEASKRDIEDLERELDKVTEEVERLLRKLKEELRRAAEGSDEDRDHMVLHEYVNAAGITRVLEEILKINEELNRKIIKFARENLERNRRVNKKVIEVLREAAR

SEQ ID NO: 831 - protein, 238 aa, Artificial Sequence
  Synthetic
SEAEKIREALETNLRLLEELIKRLKEILDTHNELLRRVIETLERLLKELLELLEEGGLDEEVLREVKRLVDELRKEARRVLDEHEKLVRKIKKEAEDVARESEEIIKEVEDKLKGLDREELLERVRRVLKKSDDLIAELVRRALKILEELTRLLAELLKKVVEILRRIVELVERVLTKKGAPKERDHMVLHEYVNAAGITRRLLEKLARDSAELMRELERILDRYARESEELDRRLAE

SEQ ID NO: 832 - protein, 238 aa, Artificial Sequence; identical to SEQ ID NO: 831
  Synthetic

SEQ ID NO: 833 - protein, 242 aa, Artificial Sequence
  Synthetic
SEKERLMRLLDKLKDLNRRLVERIKELLDKALELHKKLVKELRELLERLKELVERGGVPEELLTRIDELIKKLEDEARKISKEVKRLIDELKKRLEDIHREVDRLIRELKETLKGVTDKDELLRRVAEVLERIARLSEELIREVKEVLEKIVELSRELLKRVLDVLRRIAELLEDALRKGNVSERDHMVLHEYVNAAGITLRKIERDAEREYKKLKDELEELTERYRREIRKLKEELKADRK

SEQ ID NO: 834 - protein, 242 aa, Artificial Sequence; identical to SEQ ID NO: 833
  Synthetic

SEQ ID NO: 835 - protein, 240 aa, Artificial Sequence
  Synthetic
SDKEEIKRRVEKTARDLETEHDKIKKRLEDTVRDIKRELDELLEKYERVLRKIEKTLREGDGDATDLVDKLLETVKRLNEEVLRTVKKIADELRRLVEEVLRVLRESNETLARLLEEGNVGDEVRERLEEVLRRTEEIIKTLEEIVKRLLDELRRLVEELRRISKKLKDELDKIKEKGKDEKRLRDHMVLHEYVNAAGITRILEALAKLIKELLEALEEVLRRNKELIRELLRVLDEALK

SEQ ID NO: 836 - protein, 238 aa, Artificial Sequence
  Synthetic
DADELLRRLAEEVERVIREAEDLLRRWKETIKKVLDDLKRLLDELKKRNEDVIRELTKTKGDEELAKLIKDLLDTNEKVNRDLLRLIKKLLKDAERVNRRLLELIEELLEELKRVAKDLGLREEADKKLRDIADRARKELEDYERRLKELLKTVEDALRKAEEDSRKLKRDVEELLERGRLRKDRDHMVLHEYVNAAGITLERLREILRENLEALKKTLKRLEDVVREILEDLKRERK

SEQ ID NO: 837 - protein, 236 aa, Artificial Sequence
  Synthetic
STREKAKKVLDTLRADNEDMKRVVEKILRALKRTNERAEKLAREITEEIKRILKEVGVSEEALKEIEDTLKRVLEEIKRLLDESKKLLEDVEREIREILKTSEELLERIEREIETVGSDEKTLAEILKRLLELNEEMNRRLLKILRDLLRLNEEVIRRLLAVLERLLDALKEALDRGDVPEDLLRDHMVLHEYVNAAGITALEELEREHRELEKELDKLHDESRKEHERIEEELRR

SEQ ID NO: 838 - protein, 239 aa, Artificial Sequence
  Synthetic
SERELIERWLELHKEILRLIRELVERLLKLHREILDTIKKLIRELLELLEDIARKLGLDKEAKDELREIAKRVEDKLEKLERESRKVEEDLKRKLKELTDESDTVEKRVRDVVRRGTQSREEIAEELLRLDRKLLKAVEELLKEILDLNKKLLDDVRAILEETRRVLEKLLDRVRRGERTDDERRDHMVLHEYVNAAGITVERTLKKLLDDSARMAEEVKKTLKELLERSEKVAEDVRK

SEQ ID NO: 839 - protein, 241 aa, Artificial Sequence
  Synthetic
SEKELLKEILDRIRELLEDDNRLLKRIVDEIRKLLEEWLRVHKEILERIKELLDRIGAPEDVIRELTRALKETEEDVDRVIRTLEKLLKEVLDAHEEVVRKLDRLLKEVERLVEGGDAEEVVRDLLRVVKEILDESKAVIDELARVVDEILKLLEEVDRKLAKVVKEILEDVLRGSGDDEDAVRRDHMVLHEYVNAAGITARDTRRVIEEAKRLLKEWRDRNKEVADTLKKLLEDLIRKIR

SEQ ID NO: 840 - protein, 241 aa, Artificial Sequence; identical to SEQ ID NO: 839
  Synthetic

SEQ ID NO: 841 - protein, 237 aa, Artificial Sequence
  Synthetic
REDEVLRDIERLLREIEEKIRRILEESTAELRKVEEEVKRIIERTKRELKAIKEDVERKGIDEELRKLLDEVLDKLTKLIERNKRSLERILELIKRIIDENLEVLRDIIRLLEELLKATKDNGVPKDEVIKLVEDVVRRIEELVTRVVARNEKLVKDLDDLAKKNVRENEELLREIDRGLDEDLRDHMVLHEYVNAAGITKLARDLKEILRRHIEALKELARDLAEVIRKLLEDVKR

SEQ ID NO: 842 - protein, 237 aa, Artificial Sequence; identical to SEQ ID NO: 841
  Synthetic

SEQ ID NO: 843 - protein, 245 aa, Artificial Sequence
  Synthetic
SEKDEVTRRIRELLKEAEETNREAIERIKRLLDRVREAVEEVAKRSEELLRRLKKVLDRGLQDDEALLKLLIDALREHNRLSTELIKILIDVLRTILKIIKDVLATNIEIARRILDLVRRLAERGGLDDRLVKEVEKLVRTAERLHRDALRKVKRLVEELEKRLRELVKTDHDLVRRLETLLRRRDHMVLHEYVNAAGITAESLRLIRELLKEIEKIVKEIIELLERLNDELRKIIEAILETTKK

SEQ ID NO: 844 - protein, 243 aa, Artificial Sequence
  Synthetic
SRVEELKKLIEDILRISREVVERIARVAEDIHRINRRVLDDLRKLIEDILRTVEEILARKVSGTEAAEALRDTIRRVVDEIRKLLEEHEKRSAELLEEIRKLLEDILRRSERAVEEIRELLKKGVSTKDVLRIIEEILREHLELLERVVRRIEEILRELLKTIEEIVKRIKEILEELKEVLKRGRDHMVLHEYVNAAGITDLDRILEEYRRLLEEIKRKLEEILRRVEELHRRLRRKLEEIDR

SEQ ID NO: 845 - protein, 243 aa, Artificial Sequence; identical to SEQ ID NO: 844
  Synthetic

SEQ ID NO: 846 - protein, 243 aa, Artificial Sequence
  Synthetic
DEEETLRRLLERKVELAKEYLDVSKEVIDRTTKLLDEYLKTSKRIVDATVELLERGDLGPDELIKRLAEELERSLRELEEEIKRLKRELEESLKKLKEIIDRLAEEAEKLLAVLKRGEGSEEEALRALASLVRELIEVLRENDERLRDVLRRLIEALRKNNEILERVLRKLVRAAEERGRDESSRDHMVLHEYVNAAGITELNEITKDLEAKLEKLLRDLNELTKALEEELKRLLDELKKRTD

SEQ ID NO: 847 - protein, 243 aa, Artificial Sequence; identical to SEQ ID NO: 846
  Synthetic

SEQ ID NO: 848 - protein, 243 aa, Artificial Sequence
  Synthetic
SEAERTKESLKKVLKALVDLNRELLRKLEENMRELTKLNEEVKRALKEVLDKVREGGIVDKDAEREAERLMRELDKSSEDTARETRKLIEESKKSTRRTEEEARKLTETLDRLAKGGLPREDLLRALVRLLEELARLIEEDVRRNAELVKRHIELVERDVAELLRLIKELVDLLADLAEKGSRTRDHMVLHEYVNAAGITLADRYREEVRKSKDKLRSILEDYKRKVDELKERLRELIEEVET

SEQ ID NO: 849 - protein, 243 aa, Artificial Sequence; identical to SEQ ID NO: 848
  Synthetic

SEQ ID NO: 850 - protein, 238 aa, Artificial Sequence
  Synthetic
EEDERLTKRVEEIKRENRELLRRLEEEVKELERKSEKIVRDLKEKVDRAKEKLDSGKGSTELLVEELEKLIREILKLSEDHNRTLEEVVRKIEDVLRANLERLKELVDEILKALKERGKGDSEELKRKVEKVARDYERLLRKLREVVKRILDESKRLDEELEERLKEVLKKLEELIKRGGPDKDVRDHMVLHEYVNAAGITKLIRRNLRLLEELLRLVREILRTSNEILEEILKDARR

SEQ ID NO: 851 - protein, 245 aa, Artificial Sequence
  Synthetic
TEEEVLRKVEKLIKDLLDVLRDLLRASEEVVREALRVLEELIEENKRVIEELSRALSGGSRESVESALAKNEERLKKILEDADRVLDKWRRLLEELSKKAKAVLDEVRKRLEEIKREVPETEKLRTLLTILEEILRALEKIIRDILRINERLLEKLKRILERLRETNREIDERIRKLVEEARGGSRDHMVLHEYVNAAGITKRHEDLRRELEKLLRDYKRELEEIERALEEIEKTLKRRADETRR

SEQ ID NO: 852 - protein, 245 aa, Artificial Sequence; identical to SEQ ID NO: 851
  Synthetic

SEQ ID NO: 853 - protein, 244 aa, Artificial Sequence
  Synthetic
SAEETLRRITEESKRVLEEITKKYEDLERESREVLRKLREDLDRIKRELEDVLTKGGDDKDEVLTVLEKVLDELLKLHRENLRVIKELLRKVLEVDRENLEVLKRLLEKARDLLRRSGRDEKDLKKLEDELRKVKEELEKKHEASKRDIEDLERELDKVTEEVERLLRKLKEELRRAAEGSDEDRRDHMVLHEYVNAAGITVLEEILKINEELNRKIIKFARENLERNRRVNKKVIEVLREAAR

SEQ ID NO: 854 - protein, 238 aa, Artificial Sequence
  Synthetic
SEAEKIREALETNLRLLEELIKRLKEILDTHNELLRRVIETLERLLKELLELLEEGGLDEEVLREVKRLVDELRKEARRVLDEHEKLVRKIKKEAEDVARESEEIIKEVEDKLKGLDREELLERVRRVLKKSDDLIAELVRRALKILEELTRLLAELLKKVVEILRRIVELVERVLTKKGAPKEDRDHMVLHEYVNAAGITRLLEKLARDSAELMRELERILDRYARESEELDRRLAE

SEQ ID NO: 855 - protein, 238 aa, Artificial Sequence; identical to SEQ ID NO: 854
  Synthetic

SEQ ID NO: 856 - protein, 242 aa, Artificial Sequence
  Synthetic
SEKERLMRLLDKLKDLNRRLVERIKELLDKALELHKKLVKELRELLERLKELVERGGVPEELLTRIDELIKKLEDEARKISKEVKRLIDELKKRLEDIHREVDRLIRELKETLKGVTDKDELLRRVAEVLERIARLSEELIREVKEVLEKIVELSRELLKRVLDVLRRIAELLEDALRKGNVSEERDHMVLHEYVNAAGITRKIERDAEREYKKLKDELEELTERYRREIRKLKEELKADRK

SEQ ID NO: 857 - protein, 238 aa, Artificial Sequence
  Synthetic
DADELLRRLAEEVERVIREAEDLLRRWKETIKKVLDDLKRLLDELKKRNEDVIRELTKTKGDEELAKLIKDLLDTNEKVNRDLLRLIKKLLKDAERVNRRLLELIEELLEELKRVAKDLGLREEADKKLRDIADRARKELEDYERRLKELLKTVEDALRKAEEDSRKLKRDVEELLERGRLRKDDRDHMVLHEYVNAAGITERLREILRENLEALKKTLKRLEDVVREILEDLKRERK

SEQ ID NO: 858 - protein, 236 aa, Artificial Sequence
  Synthetic
STREKAKKVLDTLRADNEDMKRVVEKILRALKRTNERAEKLAREITEEIKRILKEVGVSEEALKEIEDTLKRVLEEIKRLLDESKKLLEDVEREIREILKTSEELLERIEREIETVGSDEKTLAEILKRLLELNEEMNRRLLKILRDLLRLNEEVIRRLLAVLERLLDALKEALDRGDVPEDLLRRDHMVLHEYVNAAGITLEELEREHRELEKELDKLHDESRKEHERIEEELRR

SEQ ID NO: 859 - protein, 236 aa, Artificial Sequence; identical to SEQ ID NO: 858
  Synthetic

SEQ ID NO: 860 - protein, 243 aa, Artificial Sequence
  Synthetic
DLERVVEDIVDKAKRLLDKNLEVLKRIVDEVLRLLERLLRESRKVVKRVKEIIEELVRDEKELRRVKRALEEVLRRHEEIAKELKERLRKVAKEAEEKHKKLVEDLKRVVDEVRKKLSGPLDREKVLEVLDELVTIIAKLLDENIKVLEEVIRVIAELLERLLDSHRRLIDIIAKLLEGLRPGDERDHMVLHEYVNAAGITSEKVVDDLKKELERIKREVKRLIEENARTLADIKRAVDEARK

SEQ ID NO: 861 - protein, 239 aa, Artificial Sequence
  Synthetic
SERELIERWLELHKEILRLIRELVERLLKLHREILDTIKKLIRELLELLEDIARKLGLDKEAKDELREIAKRVEDKLEKLERESRKVEEDLKRKLKELTDESDTVEKRVRDVVRRGTQSREEIAEELLRLDRKLLKAVEELLKEILDLNKKLLDDVRAILEETRRVLEKLLDRVRRGERTDDERRRDHMVLHEYVNAAGITERTLKKLLDDSARMAEEVKKTLKELLERSEKVAEDVRK

SEQ ID NO: 862 - protein, 246 aa, Artificial Sequence
  Synthetic
KEIEETLKELEDLNREMVETNRRVLEETRRLNKETVDRVKATLDELAKMLKKLVDDVRKGPTSEELKRLLAELEELLARVVRRVEELLKKSTDLLERAVKDSADALRRSHEVLKEVASRVKRAKDEGLPREEVLRLLRELLERHAKVLKDIVRVSEKLLREHLKVLREIVEVLEELLERILKVILRDHMVLHEYVNAAGITEEIKRRLKEVIDRYEDELRKLRKEYKEKIDKYERKLEEIERRERT

SEQ ID NO: 863 - protein, 246 aa, Artificial Sequence
  Synthetic
SREEIVATLEDLARKILEVVKKLAKEIEDAWREIERAVREILKRLEELWREIEDVVRKKVDSRVAEILETVVKRVVDITRRLIEEAERVVRELVDITRKLITILEEVVRRLVEIVREASKIDDRRELEDMLRKIREVVREVIERLKKLDEDVRRVVEEVIRRLEELNKRLEDVIREVKKRLKELGRDHMVLHEYVNAAGITLERNTRVIKEIIDLLRTVIRIHEKIVEDLIKLLEELLRRLEEATR

SEQ ID NO: 864 - protein, 237 aa, Artificial Sequence
  Synthetic
KEKEDALKKLEDLARKSREDLERVLRKHKKILDKIEELLKRVLDEHKKIVDDILRKTGTESEILKELARLLREHHEALRRLIEELRRLLEEHHKILEDLAREHKRLLDELIKVVADGVDKDELERIIKELRERDKKLVDDLRKVSEDLLDAVRKLVEDLERISRELLRRVEELAKGIDEELAREVRDHMVLHEYVNAAGITRIERAIDELLKVSEEILKLSEDASEELLKILREFAK

SEQ ID NO: 865 - protein, 241 aa, Artificial Sequence
  Synthetic
SEKELLKEILDRIRELLEDDNRLLKRIVDEIRKLLEEWLRVHKEILERIKELLDRIGAPEDVIRELTRALKETEEDVDRVIRTLEKLLKEVLDAHEEVVRKLDRLLKEVERLVEGGDAEEVVRDLLRVVKEILDESKAVIDELARVVDEILKLLEEVDRKLAKVVKEILEDVLRGSGDDEDAVRKRDHMVLHEYVNAAGITRDTRRVIEEAKRLLKEWRDRNKEVADTLKKLLEDLIRKIR

SEQ ID NO: 866 - protein, 241 aa, Artificial Sequence; identical to SEQ ID NO: 865
  Synthetic

SEQ ID NO: 867 - protein, 246 aa, Artificial Sequence
  Synthetic
SEREELLERIKEILKRVKDKLDEDLKRLKEILEKLKEKADRDLEELRRRIEEVREKLERTGRTDELVKEVLDTVRRNLENLKRLVEDILRKLEENVKNLTDLVREILKLITELIKRLEDGGLPKEVLDALRRVLEKLEELLREILERLKRSLEAVKRKIEELLKELERSLDELRRALERIRKEIGRDHMVLHEYVNAAGITLEAVRRVLEELLKVLAEHLETVRELIERLKRVLEEAIEVVERVAR

SEQ ID NO: 868 - protein, 246 aa, Artificial Sequence; identical to SEQ ID NO: 867
  Synthetic

SEQ ID NO: 869 - protein, 240 aa, Artificial Sequence
  Synthetic
DREKSVRDIEEDLKRVLDKLRRRVETSKEELKKVLKADKENADELEKTLRDVVRELDRGIDSEVLRAVREIVKRLVEVVRRYNELSEKIIRDLVRVNDRVLELLKRIVKRLIDVVRELEKIGDKEKALRRLEEVVKEVKRRIEELLKELEDVHRELVKILEEVNEDLKRVATEVKEIIKTGIKSSRDHMVLHEYVNAAGITLKENTDRLKEVIDRNLADLRDLAEELRAVIERLLEDARR

SEQ ID NO: 870 - protein, 240 aa, Artificial Sequence; identical to SEQ ID NO: 869
  Synthetic

SEQ ID NO: 871 - protein, 241 aa, Artificial Sequence
  Synthetic
SAEEAVEKLVRIARAIVKINEDLSREVVRILREIVRLNEETTRLLVEIAREVVKVVEDGGLSEDVVRKLRKLVKELEDLLKKSNDDIRKLVEDVARRLKESNDEIRRLVERLEELLKRGPGDEELLRLVEELTEELLRTHEEVVKALEKLTADLLELHRELLERVRRLTKRIEEELKRVGVSEELRDHMVLHEYVNAAGITDSAKELEKLKRELERLLEESRRKLEKLKRDLERVLEETRR

SEQ ID NO: 872 - protein, 237 aa, Artificial Sequence
  Synthetic
REDEVLRDIERLLREIEEKIRRILEESTAELRKVEEEVKRIIERTKRELKAIKEDVERKGIDEELRKLLDEVLDKLTKLIERNKRSLERILELIKRIIDENLEVLRDIIRLLEELLKATKDNGVPKDEVIKLVEDVVRRIEELVTRVVARNEKLVKDLDDLAKKNVRENEELLREIDRGLDEDLLRDHMVLHEYVNAAGITLARDLKEILRRHIEALKELARDLAEVIRKLLEDVKR

SEQ ID NO: 873 - protein, 243 aa, Artificial Sequence
  Synthetic
SEAERLADEVRKAVKKSEEDNETLVREVEKAVRELKKNNKTWVDEVRKLMKRLVDLLRDGQVSDRDLLKELEEVLRRVLEALAENHERTEEILKRWLDRYAEDIERLRKVLKEVIEALKRGGSDDKRIVDELEEILRRNEDVLDKIAKRLRRLLEEDRRLLERIVRELKRLLDDLDRITKEGKSERDHMVLHEYVNAAGITIEELVRLNNEILERLLKIVRELHKDNIKILEDLLRIIEEVLR

SEQ ID NO: 874 - protein, 243 aa, Artificial Sequence; identical to SEQ ID NO: 873
  Synthetic

SEQ ID NO: 875 - protein, 245 aa, Artificial Sequence
  Synthetic
SEKDEVTRRIRELLKEAEETNREAIERIKRLLDRVREAVEEVAKRSEELLRRLKKVLDRGLQDDEALLKLLIDALREHNRLSTELIKILIDVLRTILKIIKDVLATNIEIARRILDLVRRLAERGGLDDRLVKEVEKLVRTAERLHRDALRKVKRLVEELEKRLRELVKTDHDLVRRLETLLRRGRDHMVLHEYVNAAGITESLRLIRELLKEIEKIVKEIIELLERLNDELRKIIEAILETTKK

SEQ ID NO: 876 - protein, 239 aa, Artificial Sequence
  Synthetic
SAEDLVRRVKDLVDKLEDKLRKVVRTNERLWEEIRKRLEELVRRNKELWDALVEKLKAGDKDKDELIEEAKSLEDESNALVEKLVRDIERVLAESNKLLDTLAKEIEEVLEEIVELVERGSGSDKEAREKLEDIKARLKEVLKKLREESKRIIDELRRLLEEYKRLVKEIRDRIEEVRKRNSEIRRDHMVLHEYVNAAGITVEELEKLVRDHNRVVEEVVRELVELLSRAVEVIKEVVK

SEQ ID NO: 877 - protein, 243 aa, Artificial Sequence
  Synthetic
SRVEELKKLIEDILRISREVVERIARVAEDIHRINRRVLDDLRKLIEDILRTVEEILARKVSGTEAAEALRDTIRRVVDEIRKLLEEHEKRSAELLEEIRKLLEDILRRSERAVEEIRELLKKGVSTKDVLRIIEEILREHLELLERVVRRIEEILRELLKTIEEIVKRIKEILEELKEVLKRGSRDHMVLHEYVNAAGITLDRILEEYRRLLEEIKRKLEEILRRVEELHRRLRRKLEEIDR

SEQ ID NO: 878 - protein, 243 aa, Artificial Sequence; identical to SEQ ID NO: 877
  Synthetic

SEQ ID NO: 879 - protein, 240 aa, Artificial Sequence
  Synthetic
DKDKRLEELLKRLKELNDKTFEELERILEELKRANEASLREAERILEELRARIEGGNLDKRLAELLKKLLDDLKRLLEEYTRTNEELLKRLRELLERYRETNKKLLDLLRKLLDEARRTGTDEDLLRRLEDILRKYEDEVRRLLKELEDILREYEDTSRRLLEELERIAKEAAERVSRGSDKDVKRDHMVLHEYVNAAGITLEEDSRTNSEVVKRLLDLLREDSKANSEVVKRLLDVLRE

SEQ ID NO: 880 - protein, 240 aa, Artificial Sequence; identical to SEQ ID NO: 879
  Synthetic

SEQ ID NO: 881 - protein, 240 aa, Artificial Sequence
  Synthetic
SKEETLKRLLDELEKRNRETVERLERLLKELEDRNRASLEELEAVLEELERKIEESGLSKELKDTLARILEELRKLLEEYFRKNEELLRLLRKLLDEYARTNEELLRLLEELLDTARRTGGDSELLKRLEDIAREYEKRVRRLLEKLKDILDKYRKTVEELVRKMEEILKEAKKTISRIGSEEVKRDHMVLHEYVNAAGITLRRDVELNLDVAKKLLELLKEDSKLNLDVARELLELLDR

SEQ ID NO: 882 - protein, 240 aa, Artificial Sequence; identical to SEQ ID NO: 881
  Synthetic

SEQ ID NO: 883 - protein, 243 aa, Artificial Sequence
  Synthetic
DEEETLRRLLERKVELAKEYLDVSKEVIDRTTKLLDEYLKTSKRIVDATVELLERGDLGPDELIKRLAEELERSLRELEEEIKRLKRELEESLKKLKEIIDRLAEEAEKLLAVLKRGEGSEEEALRALASLVRELIEVLRENDERLRDVLRRLIEALRKNNEILERVLRKLVRAAEERGRDESSRRDHMVLHEYVNAAGITLNEITKDLEAKLEKLLRDLNELTKALEEELKRLLDELKKRTD

SEQ ID NO: 884 - protein, 243 aa, Artificial Sequence; identical to SEQ ID NO: 883
  Synthetic

SEQ ID NO: 885 - protein, 243 aa, Artificial Sequence
  Synthetic
SEAERTKESLKKVLKALVDLNRELLRKLEENMRELTKLNEEVKRALKEVLDKVREGGIVDKDAEREAERLMRELDKSSEDTARETRKLIEESKKSTRRTEEEARKLTETLDRLAKGGLPREDLLRALVRLLEELARLIEEDVRRNAELVKRHIELVERDVAELLRLIKELVDLLADLAEKGSRTERDHMVLHEYVNAAGITADRYREEVRKSKDKLRSILEDYKRKVDELKERLRELIEEVET

SEQ ID NO: 886 - protein, 243 aa, Artificial Sequence; identical to SEQ ID NO: 885
  Synthetic

SEQ ID NO: 887 - protein, 238 aa, Artificial Sequence
  Synthetic
EEDERLTKRVEEIKRENRELLRRLEEEVKELERKSEKIVRDLKEKVDRAKEKLDSGKGSTELLVEELEKLIREILKLSEDHNRTLEEVVRKIEDVLRANLERLKELVDEILKALKERGKGDSEELKRKVEKVARDYERLLRKLREVVKRILDESKRLDEELEERLKEVLKKLEELIKRGGPDKDVLRDHMVLHEYVNAAGITLIRRNLRLLEELLRLVREILRTSNEILEEILKDARR

SEQ ID NO: 888 - protein, 245 aa, Artificial Sequence
  Synthetic
TEEEVLRKVEKLIKDLLDVLRDLLRASEEVVREALRVLEELIEENKRVIEELSRALSGGSRESVESALAKNEERLKKILEDADRVLDKWRRLLEELSKKAKAVLDEVRKRLEEIKREVPETEKLRTLLTILEEILRALEKIIRDILRINERLLEKLKRILERLRETNREIDERIRKLVEEARGGSERDHMVLHEYVNAAGITRHEDLRRELEKLLRDYKRELEEIERALEEIEKTLKRRADETRR

SEQ ID NO: 889 - protein, 243 aa, Artificial Sequence
  Synthetic
KREDILKKLEDIIRDIIDKLRRILEKVKRLNEDIIREIKRLLDESLKTLEDLLKRIADKSRDRELEDILRRVLEKLRRSLDKLRDTLRKLKEETDTVLERAERTLKELKDRLEKLLRDGEKVSEEDLVEALKALIDELRKVLEDVIRVSKELVERLLRALREHLETNKRLVKELLDALRKTTGDDERDHMVLHEYVNAAGITEEEVERVARELEKAHRDLERDIRRVAEELKKLLKKLRDDRR

SEQ ID NO: 890 - protein, 243 aa, Artificial Sequence; identical to SEQ ID NO: 889
  Synthetic

SEQ ID NO: 891 - protein, 244 aa, Artificial Sequence
  Synthetic
SAEETLRRITEESKRVLEEITKKYEDLERESREVLRKLREDLDRIKRELEDVLTKGGDDKDEVLTVLEKVLDELLKLHRENLRVIKELLRKVLEVDRENLEVLKRLLEKARDLLRRSGRDEKDLKKLEDELRKVKEELEKKHEASKRDIEDLERELDKVTEEVERLLRKLKEELRRAAEGSDEDRERDHMVLHEYVNAAGITLEEILKINEELNRKIIKFARENLERNRRVNKKVIEVLREAAR

SEQ ID NO: 892 - protein, 247 aa, Artificial Sequence
  Synthetic
SEKEELLKLIKRVIELLKRVLEEHLRLVEDVIRRLKELLDSNEKIVREVIEDLKRLLDEVRGDKEELDRIKEKLEEVLERYKRRLEEIKRDLERMLEDYKRELKRIEEDLRRVLEEVERIATRGEGPAEALIDKLRKILERALRELDKLSKKLDELLKKVLEELEKSNREIDKLLKDVLRRVEEGGRDHMVLHEYVNAAGITREKLKRNLEDVRRVIEDVKRKSARILEEARRLIEEVERELEKIRK

SEQ ID NO: 893 - protein, 238 aa, Artificial Sequence
  Synthetic
SEAEKIREALETNLRLLEELIKRLKEILDTHNELLRRVIETLERLLKELLELLEEGGLDEEVLREVKRLVDELRKEARRVLDEHEKLVRKIKKEAEDVARESEEIIKEVEDKLKGLDREELLERVRRVLKKSDDLIAELVRRALKILEELTRLLAELLKKVVEILRRIVELVERVLTKKGAPKEDLRDHMVLHEYVNAAGITLLEKLARDSAELMRELERILDRYARESEELDRRLAE

SEQ ID NO: 894 - protein, 242 aa, Artificial Sequence
  Synthetic
SEKERLMRLLDKLKDLNRRLVERIKELLDKALELHKKLVKELRELLERLKELVERGGVPEELLTRIDELIKKLEDEARKISKEVKRLIDELKKRLEDIHREVDRLIRELKETLKGVTDKDELLRRVAEVLERIARLSEELIREVKEVLEKIVELSRELLKRVLDVLRRIAELLEDALRKGNVSEETRDHMVLHEYVNAAGITKIERDAEREYKKLKDELEELTERYRREIRKLKEELKADRK

SEQ ID NO: 895 - protein, 242 aa, Artificial Sequence; identical to SEQ ID NO: 894
  Synthetic

SEQ ID NO: 896 - protein, 247 aa, Artificial Sequence
  Synthetic
SEAEDLEELIKELAELLKDVIRKLEKINRRLVKILEDIIRRLKEISKEAEEELRKGTVEDKDILRDLERRLREILEESDRLLEELKRRLEEILRKSKELLRRLEEVLREILKRAEEVKRSNLPKEELIKEIVKLLEELLRVIEKILEDNIRLLEELVEVIKEILEKHLRLLEELVRVIERILREVGRDHMVLHEYVNAAGITLDRLREEHEEVKRRLEEELTRLRETHKKIEKELREALKRVRDRST

SEQ ID NO: 897 - protein, 247 aa, Artificial Sequence; identical to SEQ ID NO: 896
  Synthetic

SEQ ID NO: 898 - protein, 238 aa, Artificial Sequence
  Synthetic
DADELLRRLAEEVERVIREAEDLLRRWKETIKKVLDDLKRLLDELKKRNEDVIRELTKTKGDEELAKLIKDLLDTNEKVNRDLLRLIKKLLKDAERVNRRLLELIEELLEELKRVAKDLGLREEADKKLRDIADRARKELEDYERRLKELLKTVEDALRKAEEDSRKLKRDVEELLERGRLRKDDLRDHMVLHEYVNAAGITRLREILRENLEALKKTLKRLEDVVREILEDLKRERK

SEQ ID NO: 899 - protein, 238 aa, Artificial Sequence; identical to SEQ ID NO: 898
  Synthetic

SEQ ID NO: 900 - protein, 247 aa, Artificial Sequence
  Synthetic
SKAEKLLKDLREALEKVKRRYEELERRLDEVLKEHEEIVKRLLEELEKVLKRIEEGGLPEEELEKLKKLAEKVKELLRELLRLSKELVDRVRELLKRDLDLVRRLVEIALKVLREAREQPNDEKRVEKIKRDLEKKARRVREENERIKRDLKRTADESRKRLEKLLEDLKRELDRLREDLDRGRKDRDHMVLHEYVNAAGITERLLREVIKSHEKLVRTIERLIEESIRVNEELLEVIERLLDRARK

SEQ ID NO: 901 - protein, 247 aa, Artificial Sequence; identical to SEQ ID NO: 900
  Synthetic

SEQ ID NO: 902 - protein, 243 aa, Artificial Sequence
  Synthetic
DLERVVEDIVDKAKRLLDKNLEVLKRIVDEVLRLLERLLRESRKVVKRVKEIIEELVRDEKELRRVKRALEEVLRRHEEIAKELKERLRKVAKEAEEKHKKLVEDLKRVVDEVRKKLSGPLDREKVLEVLDELVTIIAKLLDENIKVLEEVIRVIAELLERLLDSHRRLIDIIAKLLEGLRPGDEDRDHMVLHEYVNAAGITEKVVDDLKKELERIKREVKRLIEENARTLADIKRAVDEARK

SEQ ID NO: 903 - protein, 246 aa, Artificial Sequence
  Synthetic
KEIEETLKELEDLNREMVETNRRVLEETRRLNKETVDRVKATLDELAKMLKKLVDDVRKGPTSEELKRLLAELEELLARVVRRVEELLKKSTDLLERAVKDSADALRRSHEVLKEVASRVKRAKDEGLPREEVLRLLRELLERHAKVLKDIVRVSEKLLREHLKVLREIVEVLEELLERILKVILDRDHMVLHEYVNAAGITEIKRRLKEVIDRYEDELRKLRKEYKEKIDKYERKLEEIERRERT

SEQ ID NO: 904 - protein, 247 aa, Artificial Sequence
  Synthetic
RDRDVLRKVKAEIEELVARIEKVSRDALSEVKRLLDENRKIAEDVLRLIESLLRKIRDTRGDDEVVKETEEVLRDNHRLLEELIRRLIKVLEEWLRRHKKLLDEIRELLKEILRLVKESGVSEDLLRRLKRVIEELDKKLKESEEKLRRVVEKAKEDLKAVLEEHRKVLEDLKRALEEVREKLRERRDHMVLHEYVNAAGITAEEMKRVHDDLSRAVEKVVRDVVRVDKELLDELARILRRLEEVIT

SEQ ID NO: 905 - protein, 237 aa, Artificial Sequence
  Synthetic
KEKEDALKKLEDLARKSREDLERVLRKHKKILDKIEELLKRVLDEHKKIVDDILRKTGTESEILKELARLLREHHEALRRLIEELRRLLEEHHKILEDLAREHKRLLDELIKVVADGVDKDELERIIKELRERDKKLVDDLRKVSEDLLDAVRKLVEDLERISRELLRRVEELAKGIDEELAREVERDHMVLHEYVNAAGITIERAIDELLKVSEEILKLSEDASEELLKILREFAK

SEQ ID NO: 906 - protein, 237 aa, Artificial Sequence; identical to SEQ ID NO: 905
  Synthetic

SEQ ID NO: 907 - protein, 241 aa, Artificial Sequence
  Synthetic
SEKELLKEILDRIRELLEDDNRLLKRIVDEIRKLLEEWLRVHKEILERIKELLDRIGAPEDVIRELTRALKETEEDVDRVIRTLEKLLKEVLDAHEEVVRKLDRLLKEVERLVEGGDAEEVVRDLLRVVKEILDESKAVIDELARVVDEILKLLEEVDRKLAKVVKEILEDVLRGSGDDEDAVRKIRDHMVLHEYVNAAGITDTRRVIEEAKRLLKEWRDRNKEVADTLKKLLEDLIRKIR

SEQ ID NO: 908 - protein, 246 aa, Artificial Sequence
  Synthetic
SEREELLERIKEILKRVKDKLDEDLKRLKEILEKLKEKADRDLEELRRRIEEVREKLERTGRTDELVKEVLDTVRRNLENLKRLVEDILRKLEENVKNLTDLVREILKLITELIKRLEDGGLPKEVLDALRRVLEKLEELLREILERLKRSLEAVKRKIEELLKELERSLDELRRALERIRKEIGDRDHMVLHEYVNAAGITEAVRRVLEELLKVLAEHLETVRELIERLKRVLEEAIEVVERVAR

SEQ ID NO: 909 - protein, 246 aa, Artificial Sequence; identical to SEQ ID NO: 908
  Synthetic

SEQ ID NO: 910 - protein, 240 aa, Artificial Sequence
  Synthetic
DREKSVRDIEEDLKRVLDKLRRRVETSKEELKKVLKADKENADELEKTLRDVVRELDRGIDSEVLRAVREIVKRLVEVVRRYNELSEKIIRDLVRVNDRVLELLKRIVKRLIDVVRELEKIGDKEKALRRLEEVVKEVKRRIEELLKELEDVHRELVKILEEVNEDLKRVATEVKEIIKTGIKSSERDHMVLHEYVNAAGITKENTDRLKEVIDRNLADLRDLAEELRAVIERLLEDARR

SEQ ID NO: 911 - protein, 240 aa, Artificial Sequence; identical to SEQ ID NO: 910
  Synthetic

SEQ ID NO: 912 - protein, 241 aa, Artificial Sequence
  Synthetic
SAEEAVEKLVRIARAIVKINEDLSREVVRILREIVRLNEETTRLLVEIAREVVKVVEDGGLSEDVVRKLRKLVKELEDLLKKSNDDIRKLVEDVARRLKESNDEIRRLVERLEELLKRGPGDEELLRLVEELTEELLRTHEEVVKALEKLTADLLELHRELLERVRRLTKRIEEELKRVGVSEELLRDHMVLHEYVNAAGITSAKELEKLKRELERLLEESRRKLEKLKRDLERVLEETRR

SEQ ID NO: 913 - protein, 237 aa, Artificial Sequence
  Synthetic
REDEVLRDIERLLREIEEKIRRILEESTAELRKVEEEVKRIIERTKRELKAIKEDVERKGIDEELRKLLDEVLDKLTKLIERNKRSLERILELIKRIIDENLEVLRDIIRLLEELLKATKDNGVPKDEVIKLVEDVVRRIEELVTRVVARNEKLVKDLDDLAKKNVRENEELLREIDRGLDEDLLERDHMVLHEYVNAAGITARDLKEILRRHIEALKELARDLAEVIRKLLEDVKR

SEQ ID NO: 914 - protein, 237 aa, Artificial Sequence; identical to SEQ ID NO: 913
  Synthetic

SEQ ID NO: 915 - protein, 243 aa, Artificial Sequence
  Synthetic
SEAERLADEVRKAVKKSEEDNETLVREVEKAVRELKKNNKTWVDEVRKLMKRLVDLLRDGQVSDRDLLKELEEVLRRVLEALAENHERTEEILKRWLDRYAEDIERLRKVLKEVIEALKRGGSDDKRIVDELEEILRRNEDVLDKIAKRLRRLLEEDRRLLERIVRELKRLLDDLDRITKEGKSEERDHMVLHEYVNAAGITEELVRLNNEILERLLKIVRELHKDNIKILEDLLRIIEEVLR

SEQ ID NO: 916 - protein, 243 aa, Artificial Sequence; identical to SEQ ID NO: 915
  Synthetic

SEQ ID NO: 917 - protein, 245 aa, Artificial Sequence
  Synthetic
SEKDEVTRRIRELLKEAEETNREAIERIKRLLDRVREAVEEVAKRSEELLRRLKKVLDRGLQDDEALLKLLIDALREHNRLSTELIKILIDVLRTILKIIKDVLATNIEIARRILDLVRRLAERGGLDDRLVKEVEKLVRTAERLHRDALRKVKRLVEELEKRLRELVKTDHDLVRRLETLLRRGSRDHMVLHEYVNAAGITSLRLIRELLKEIEKIVKEIIELLERLNDELRKIIEAILETTKK

SEQ ID NO: 918 - protein, 247 aa, Artificial Sequence
  Synthetic
DEERLAEELERVLDRNRKLLEEALRELRRVIEENRKSVKRLLDELKRVLDELLKVLRELSRGDSDEELRKVIEDLIRKLTKVLDKVRSLVEENIERLARVLEKLERLARENLEDLKKVLDDVDKKLKDRRLVERLAELVRELIEVNKEILEMLKEIVRELLEINRTLLERLKDLVATALEIIKLLARDHMVLHEYVNAAGITRDRLRKLLEDYERAVRRLEDKLRRVRERYEAVLKRIKDKLEETKR

SEQ ID NO: 919 - protein, 243 aa, Artificial Sequence
  Synthetic
SRVEELKKLIEDILRISREVVERIARVAEDIHRINRRVLDDLRKLIEDILRTVEEILARKVSGTEAAEALRDTIRRVVDEIRKLLEEHEKRSAELLEEIRKLLEDILRRSERAVEEIRELLKKGVSTKDVLRIIEEILREHLELLERVVRRIEEILRELLKTIEEIVKRIKEILEELKEVLKRGSVRDHMVLHEYVNAAGITDRILEEYRRLLEEIKRKLEEILRRVEELHRRLRRKLEEIDR

SEQ ID NO: 920 - protein, 243 aa, Artificial Sequence; identical to SEQ ID NO: 919
  Synthetic

SEQ ID NO: 921 - protein, 240 aa, Artificial Sequence
  Synthetic
DKDKRLEELLKRLKELNDKTFEELERILEELKRANEASLREAERILEELRARIEGGNLDKRLAELLKKLLDDLKRLLEEYTRTNEELLKRLRELLERYRETNKKLLDLLRKLLDEARRTGTDEDLLRRLEDILRKYEDEVRRLLKELEDILREYEDTSRRLLEELERIAKEAAERVSRGSDKDVKDRDHMVLHEYVNAAGITEEDSRTNSEVVKRLLDLLREDSKANSEVVKRLLDVLRE

SEQ ID NO: 922 - protein, 240 aa, Artificial Sequence
  Synthetic
SKEETLKRLLDELEKRNRETVERLERLLKELEDRNRASLEELEAVLEELERKIEESGLSKELKDTLARILEELRKLLEEYFRKNEELLRLLRKLLDEYARTNEELLRLLEELLDTARRTGGDSELLKRLEDIAREYEKRVRRLLEKLKDILDKYRKTVEELVRKMEEILKEAKKTISRIGSEEVKDRDHMVLHEYVNAAGITRRDVELNLDVAKKLLELLKEDSKLNLDVARELLELLDR

SEQ ID NO: 923 - protein, 243 aa, Artificial Sequence
  Synthetic
DEEETLRRLLERKVELAKEYLDVSKEVIDRTTKLLDEYLKTSKRIVDATVELLERGDLGPDELIKRLAEELERSLRELEEEIKRLKRELEESLKKLKEIIDRLAEEAEKLLAVLKRGEGSEEEALRALASLVRELIEVLRENDERLRDVLRRLIEALRKNNEILERVLRKLVRAAEERGRDESSRERDHMVLHEYVNAAGITNEITKDLEAKLEKLLRDLNELTKALEEELKRLLDELKKRTD

SEQ ID NO: 924 - protein, 243 aa, Artificial Sequence; identical to SEQ ID NO: 923
  Synthetic

SEQ ID NO: 925 - protein, 243 aa, Artificial Sequence
  Synthetic
SEAERTKESLKKVLKALVDLNRELLRKLEENMRELTKLNEEVKRALKEVLDKVREGGIVDKDAEREAERLMRELDKSSEDTARETRKLIEESKKSTRRTEEEARKLTETLDRLAKGGLPREDLLRALVRLLEELARLIEEDVRRNAELVKRHIELVERDVAELLRLIKELVDLLADLAEKGSRTEERDHMVLHEYVNAAGITDRYREEVRKSKDKLRSILEDYKRKVDELKERLRELIEEVET

SEQ ID NO: 926 - protein, 243 aa, Artificial Sequence; identical to SEQ ID NO: 925
  Synthetic

SEQ ID NO: 927 - protein, 238 aa, Artificial Sequence
  Synthetic
EEDERLTKRVEEIKRENRELLRRLEEEVKELERKSEKIVRDLKEKVDRAKEKLDSGKGSTELLVEELEKLIREILKLSEDHNRTLEEVVRKIEDVLRANLERLKELVDEILKALKERGKGDSEELKRKVEKVARDYERLLRKLREVVKRILDESKRLDEELEERLKEVLKKLEELIKRGGPDKDVLTRDHMVLHEYVNAAGITIRRNLRLLEELLRLVREILRTSNEILEEILKDARR

SEQ ID NO: 928 - protein, 238 aa, Artificial Sequence; identical to SEQ ID NO: 927
  Synthetic

SEQ ID NO: 929 - protein, 245 aa, Artificial Sequence
  Synthetic
TEEEVLRKVEKLIKDLLDVLRDLLRASEEVVREALRVLEELIEENKRVIEELSRALSGGSRESVESALAKNEERLKKILEDADRVLDKWRRLLEELSKKAKAVLDEVRKRLEEIKREVPETEKLRTLLTILEEILRALEKIIRDILRINERLLEKLKRILERLRETNREIDERIRKLVEEARGGSEERDHMVLHEYVNAAGITHEDLRRELEKLLRDYKRELEEIERALEEIEKTLKRRADETRR

SEQ ID NO: 930 - protein, 245 aa, Artificial Sequence; identical to SEQ ID NO: 929
  Synthetic

SEQ ID NO: 931 - protein, 238 aa, Artificial Sequence
  Synthetic
SKEDKARELEKRLRDNLKKLEEVVRELAEVLKRNLEKLRRLAEELLRALKRLLDKLRAGGLPKDELEDLRREVEDVLRRLEDLLRKLKKANDESLTRLEELLRRAEEENRRVLTTLRELLRGNGDDRDLARLVARLVEANNRALEELLRLVAKNVEDNNRVLEELLRLVKELAKRLLGRIRDEDLVRRDHMVLHEYVNAAGITLRDDERDLRALEKRIRDIIREDREELERLKERARK

SEQ ID NO: 932 - protein, 243 aa, Artificial Sequence
  Synthetic
KREDILKKLEDIIRDIIDKLRRILEKVKRLNEDIIREIKRLLDESLKTLEDLLKRIADKSRDRELEDILRRVLEKLRRSLDKLRDTLRKLKEETDTVLERAERTLKELKDRLEKLLRDGEKVSEEDLVEALKALIDELRKVLEDVIRVSKELVERLLRALREHLETNKRLVKELLDALRKTTGDDEERDHMVLHEYVNAAGITEEVERVARELEKAHRDLERDIRRVAEELKKLLKKLRDDRR

SEQ ID NO: 933 - protein, 244 aa, Artificial Sequence
  Synthetic
SAEETLRRITEESKRVLEEITKKYEDLERESREVLRKLREDLDRIKRELEDVLTKGGDDKDEVLTVLEKVLDELLKLHRENLRVIKELLRKVLEVDRENLEVLKRLLEKARDLLRRSGRDEKDLKKLEDELRKVKEELEKKHEASKRDIEDLERELDKVTEEVERLLRKLKEELRRAAEGSDEDRERRDHMVLHEYVNAAGITEEILKINEELNRKIIKFARENLERNRRVNKKVIEVLREAAR

SEQ ID NO: 934 - protein, 247 aa, Artificial Sequence
  Synthetic
SEKEELLKLIKRVIELLKRVLEEHLRLVEDVIRRLKELLDSNEKIVREVIEDLKRLLDEVRGDKEELDRIKEKLEEVLERYKRRLEEIKRDLERMLEDYKRELKRIEEDLRRVLEEVERIATRGEGPAEALIDKLRKILERALRELDKLSKKLDELLKKVLEELEKSNREIDKLLKDVLRRVEEGGARDHMVLHEYVNAAGITEKLKRNLEDVRRVIEDVKRKSARILEEARRLIEEVERELEKIRK

SEQ ID NO: 935 - protein, 247 aa, Artificial Sequence; identical to SEQ ID NO: 934
  Synthetic

SEQ ID NO: 936 - protein, 238 aa, Artificial Sequence
  Synthetic
SEAEKIREALETNLRLLEELIKRLKEILDTHNELLRRVIETLERLLKELLELLEEGGLDEEVLREVKRLVDELRKEARRVLDEHEKLVRKIKKEAEDVARESEEIIKEVEDKLKGLDREELLERVRRVLKKSDDLIAELVRRALKILEELTRLLAELLKKVVEILRRIVELVERVLTKKGAPKEDLERDHMVLHEYVNAAGITLEKLARDSAELMRELERILDRYARESEELDRRLAE

SEQ ID NO: 937 - protein, 238 aa, Artificial Sequence; identical to SEQ ID NO: 936
  Synthetic

SEQ ID NO: 938 - protein, 242 aa, Artificial Sequence
  Synthetic
SEKERLMRLLDKLKDLNRRLVERIKELLDKALELHKKLVKELRELLERLKELVERGGVPEELLTRIDELIKKLEDEARKISKEVKRLIDELKKRLEDIHREVDRLIRELKETLKGVTDKDELLRRVAEVLERIARLSEELIREVKEVLEKIVELSRELLKRVLDVLRRIAELLEDALRKGNVSEETVRDHMVLHEYVNAAGITIERDAEREYKKLKDELEELTERYRREIRKLKEELKADRK

SEQ ID NO: 939 - protein, 242 aa, Artificial Sequence; identical to SEQ ID NO: 938
  Synthetic

SEQ ID NO: 940 - protein, 247 aa, Artificial Sequence
  Synthetic
SEAEDLEELIKELAELLKDVIRKLEKINRRLVKILEDIIRRLKEISKEAEEELRKGTVEDKDILRDLERRLREILEESDRLLEELKRRLEEILRKSKELLRRLEEVLREILKRAEEVKRSNLPKEELIKEIVKLLEELLRVIEKILEDNIRLLEELVEVIKEILEKHLRLLEELVRVIERILREVGKRDHMVLHEYVNAAGITDRLREEHEEVKRRLEEELTRLRETHKKIEKELREALKRVRDRST

SEQ ID NO: 941 - protein, 247 aa, Artificial Sequence; identical to SEQ ID NO: 940
  Synthetic

SEQ ID NO: 942 - protein, 240 aa, Artificial Sequence
  Synthetic
SDKEEIKRRVEKTARDLETEHDKIKKRLEDTVRDIKRELDELLEKYERVLRKIEKTLREGDGDATDLVDKLLETVKRLNEEVLRTVKKIADELRRLVEEVLRVLRESNETLARLLEEGNVGDEVRERLEEVLRRTEEIIKTLEEIVKRLLDELRRLVEELRRISKKLKDELDKIKEKGKDEKRLIEERDHMVLHEYVNAAGITEALAKLIKELLEALEEVLRRNKELIRELLRVLDEALK

SEQ ID NO: 943 - protein, 248 aa, Artificial Sequence
  Synthetic
DEDRIIEEIARLLEELLRELLELIKKLIETNRRLNEEHERAVRELARLLEELLDRLVKKGISDEKLKRIRERLKRALDDLERLHREINKRLEDLVRELEKLVREILKELKDALEELRRASARAGGEEVLRRLEEIVKKLLDLVRRILERLKEIHKDNVRLLRELNERLTRIVEDLVRLIREILREAGRDHMVLHEYVNAAGITRRMIKRLHEDLERKLKESEDELREIEARLEEKIRRLEEKLERKRR

SEQ ID NO: 944 - protein, 248 aa, Artificial Sequence; identical to SEQ ID NO: 943
  Synthetic

SEQ ID NO: 945 - protein, 238 aa, Artificial Sequence
  Synthetic
DADELLRRLAEEVERVIREAEDLLRRWKETIKKVLDDLKRLLDELKKRNEDVIRELTKTKGDEELAKLIKDLLDTNEKVNRDLLRLIKKLLKDAERVNRRLLELIEELLEELKRVAKDLGLREEADKKLRDIADRARKELEDYERRLKELLKTVEDALRKAEEDSRKLKRDVEELLERGRLRKDDLERDHMVLHEYVNAAGITLREILRENLEALKKTLKRLEDVVREILEDLKRERK

SEQ ID NO: 946 - protein, 238 aa, Artificial Sequence; identical to SEQ ID NO: 945
  Synthetic

SEQ ID NO: 947 - protein, 243 aa, Artificial Sequence
  Synthetic
DLERVVEDIVDKAKRLLDKNLEVLKRIVDEVLRLLERLLRESRKVVKRVKEIIEELVRDEKELRRVKRALEEVLRRHEEIAKELKERLRKVAKEAEEKHKKLVEDLKRVVDEVRKKLSGPLDREKVLEVLDELVTIIAKLLDENIKVLEEVIRVIAELLERLLDSHRRLIDIIAKLLEGLRPGDEDLRDHMVLHEYVNAAGITKVVDDLKKELERIKREVKRLIEENARTLADIKRAVDEARK

SEQ ID NO: 948 - protein, 246 aa, Artificial Sequence
  Synthetic
KEIEETLKELEDLNREMVETNRRVLEETRRLNKETVDRVKATLDELAKMLKKLVDDVRKGPTSEELKRLLAELEELLARVVRRVEELLKKSTDLLERAVKDSADALRRSHEVLKEVASRVKRAKDEGLPREEVLRLLRELLERHAKVLKDIVRVSEKLLREHLKVLREIVEVLEELLERILKVILDTRDHMVLHEYVNAAGITIKRRLKEVIDRYEDELRKLRKEYKEKIDKYERKLEEIERRERT

SEQ ID NO: 949 - protein, 247 aa, Artificial Sequence
  Synthetic
RDRDVLRKVKAEIEELVARIEKVSRDALSEVKRLLDENRKIAEDVLRLIESLLRKIRDTRGDDEVVKETEEVLRDNHRLLEELIRRLIKVLEEWLRRHKKLLDEIRELLKEILRLVKESGVSEDLLRRLKRVIEELDKKLKESEEKLRRVVEKAKEDLKAVLEEHRKVLEDLKRALEEVREKLRERGRDHMVLHEYVNAAGITEEMKRVHDDLSRAVEKVVRDVVRVDKELLDELARILRRLEEVIT

SEQ ID NO: 950 - protein, 247 aa, Artificial Sequence; identical to SEQ ID NO: 949
  Synthetic

SEQ ID NO: 951 - protein, 246 aa, Artificial Sequence
  Synthetic
SREEIVATLEDLARKILEVVKKLAKEIEDAWREIERAVREILKRLEELWREIEDVVRKKVDSRVAEILETVVKRVVDITRRLIEEAERVVRELVDITRKLITILEEVVRRLVEIVREASKIDDRRELEDMLRKIREVVREVIERLKKLDEDVRRVVEEVIRRLEELNKRLEDVIREVKKRLKELGLSRDHMVLHEYVNAAGITRNTRVIKEIIDLLRTVIRIHEKIVEDLIKLLEELLRRLEEATR

SEQ ID NO: 952 - protein, 241 aa, Artificial Sequence
  Synthetic
SEKELLKEILDRIRELLEDDNRLLKRIVDEIRKLLEEWLRVHKEILERIKELLDRIGAPEDVIRELTRALKETEEDVDRVIRTLEKLLKEVLDAHEEVVRKLDRLLKEVERLVEGGDAEEVVRDLLRVVKEILDESKAVIDELARVVDEILKLLEEVDRKLAKVVKEILEDVLRGSGDDEDAVRKIARDHMVLHEYVNAAGITTRRVIEEAKRLLKEWRDRNKEVADTLKKLLEDLIRKIR

SEQ ID NO: 953 - protein, 241 aa, Artificial Sequence; identical to SEQ ID NO: 952
  Synthetic

SEQ ID NO: 954 - protein, 246 aa, Artificial Sequence
  Synthetic
SEREELLERIKEILKRVKDKLDEDLKRLKEILEKLKEKADRDLEELRRRIEEVREKLERTGRTDELVKEVLDTVRRNLENLKRLVEDILRKLEENVKNLTDLVREILKLITELIKRLEDGGLPKEVLDALRRVLEKLEELLREILERLKRSLEAVKRKIEELLKELERSLDELRRALERIRKEIGDSRDHMVLHEYVNAAGITAVRRVLEELLKVLAEHLETVRELIERLKRVLEEAIEVVERVAR

SEQ ID NO: 955 - protein, 240 aa, Artificial Sequence
  Synthetic
DREKSVRDIEEDLKRVLDKLRRRVETSKEELKKVLKADKENADELEKTLRDVVRELDRGIDSEVLRAVREIVKRLVEVVRRYNELSEKIIRDLVRVNDRVLELLKRIVKRLIDVVRELEKIGDKEKALRRLEEVVKEVKRRIEELLKELEDVHRELVKILEEVNEDLKRVATEVKEIIKTGIKSSEVRDHMVLHEYVNAAGITENTDRLKEVIDRNLADLRDLAEELRAVIERLLEDARR

SEQ ID NO: 956 - protein, 240 aa, Artificial Sequence; identical to SEQ ID NO: 955
  Synthetic

SEQ ID NO: 957 - protein, 245 aa, Artificial Sequence
  Synthetic
SEKDEVTRRIRELLKEAEETNREAIERIKRLLDRVREAVEEVAKRSEELLRRLKKVLDRGLQDDEALLKLLIDALREHNRLSTELIKILIDVLRTILKIIKDVLATNIEIARRILDLVRRLAERGGLDDRLVKEVEKLVRTAERLHRDALRKVKRLVEELEKRLRELVKTDHDLVRRLETLLRRGSGRDHMVLHEYVNAAGITLRLIRELLKEIEKIVKEIIELLERLNDELRKIIEAILETTKK

SEQ ID NO: 958 - protein, 245 aa, Artificial Sequence; identical to SEQ ID NO: 957
  Synthetic

SEQ ID NO: 959 - protein, 239 aa, Artificial Sequence
  Synthetic
SAEDLVRRVKDLVDKLEDKLRKVVRTNERLWEEIRKRLEELVRRNKELWDALVEKLKAGDKDKDELIEEAKSLEDESNALVEKLVRDIERVLAESNKLLDTLAKEIEEVLEEIVELVERGSGSDKEAREKLEDIKARLKEVLKKLREESKRIIDELRRLLEEYKRLVKEIRDRIEEVRKRNSEIRVLRDHMVLHEYVNAAGITELEKLVRDHNRVVEEVVRELVELLSRAVEVIKEVVK

SEQ ID NO: 960 - protein, 247 aa, Artificial Sequence
  Synthetic
DEERLAEELERVLDRNRKLLEEALRELRRVIEENRKSVKRLLDELKRVLDELLKVLRELSRGDSDEELRKVIEDLIRKLTKVLDKVRSLVEENIERLARVLEKLERLARENLEDLKKVLDDVDKKLKDRRLVERLAELVRELIEVNKEILEMLKEIVRELLEINRTLLERLKDLVATALEIIKLLARRDHMVLHEYVNAAGITDRLRKLLEDYERAVRRLEDKLRRVRERYEAVLKRIKDKLEETKR

SEQ ID NO: 961 - protein, 243 aa, Artificial Sequence
  Synthetic
SRVEELKKLIEDILRISREVVERIARVAEDIHRINRRVLDDLRKLIEDILRTVEEILARKVSGTEAAEALRDTIRRVVDEIRKLLEEHEKRSAELLEEIRKLLEDILRRSERAVEEIRELLKKGVSTKDVLRIIEEILREHLELLERVVRRIEEILRELLKTIEEIVKRIKEILEELKEVLKRGSVGRDHMVLHEYVNAAGITRILEEYRRLLEEIKRKLEEILRRVEELHRRLRRKLEEIDR

SEQ ID NO: 962 - protein, 243 aa, Artificial Sequence; identical to SEQ ID NO: 961
  Synthetic

SEQ ID NO: 963 - protein, 243 aa, Artificial Sequence
  Synthetic
DEEETLRRLLERKVELAKEYLDVSKEVIDRTTKLLDEYLKTSKRIVDATVELLERGDLGPDELIKRLAEELERSLRELEEEIKRLKRELEESLKKLKEIIDRLAEEAEKLLAVLKRGEGSEEEALRALASLVRELIEVLRENDERLRDVLRRLIEALRKNNEILERVLRKLVRAAEERGRDESSREARDHMVLHEYVNAAGITEITKDLEAKLEKLLRDLNELTKALEEELKRLLDELKKRTD

SEQ ID NO: 964 - protein, 243 aa, Artificial Sequence; identical to SEQ ID NO: 963
  Synthetic

SEQ ID NO: 965 - protein, 243 aa, Artificial Sequence
  Synthetic
SEAERTKESLKKVLKALVDLNRELLRKLEENMRELTKLNEEVKRALKEVLDKVREGGIVDKDAEREAERLMRELDKSSEDTARETRKLIEESKKSTRRTEEEARKLTETLDRLAKGGLPREDLLRALVRLLEELARLIEEDVRRNAELVKRHIELVERDVAELLRLIKELVDLLADLAEKGSRTEEIRDHMVLHEYVNAAGITRYREEVRKSKDKLRSILEDYKRKVDELKERLRELIEEVET

SEQ ID NO: 966 - protein, 243 aa, Artificial Sequence; identical to SEQ ID NO: 965
  Synthetic

SEQ ID NO: 967 - protein, 245 aa, Artificial Sequence
  Synthetic
TEEEVLRKVEKLIKDLLDVLRDLLRASEEVVREALRVLEELIEENKRVIEELSRALSGGSRESVESALAKNEERLKKILEDADRVLDKWRRLLEELSKKAKAVLDEVRKRLEEIKREVPETEKLRTLLTILEEILRALEKIIRDILRINERLLEKLKRILERLRETNREIDERIRKLVEEARGGSEEKRDHMVLHEYVNAAGITEDLRRELEKLLRDYKRELEEIERALEEIEKTLKRRADETRR

SEQ ID NO: 968 - protein, 245 aa, Artificial Sequence; identical to SEQ ID NO: 967
  Synthetic

SEQ ID NO: 969 - protein, 243 aa, Artificial Sequence
  Synthetic
KREDILKKLEDIIRDIIDKLRRILEKVKRLNEDIIREIKRLLDESLKTLEDLLKRIADKSRDRELEDILRRVLEKLRRSLDKLRDTLRKLKEETDTVLERAERTLKELKDRLEKLLRDGEKVSEEDLVEALKALIDELRKVLEDVIRVSKELVERLLRALREHLETNKRLVKELLDALRKTTGDDEEIRDHMVLHEYVNAAGITEVERVARELEKAHRDLERDIRRVAEELKKLLKKLRDDRR

SEQ ID NO: 970 - protein, 244 aa, Artificial Sequence
  Synthetic
SAEETLRRITEESKRVLEEITKKYEDLERESREVLRKLREDLDRIKRELEDVLTKGGDDKDEVLTVLEKVLDELLKLHRENLRVIKELLRKVLEVDRENLEVLKRLLEKARDLLRRSGRDEKDLKKLEDELRKVKEELEKKHEASKRDIEDLERELDKVTEEVERLLRKLKEELRRAAEGSDEDRERLRDHMVLHEYVNAAGITEILKINEELNRKIIKFARENLERNRRVNKKVIEVLREAAR

SEQ ID NO: 971 - protein, 247 aa, Artificial Sequence
  Synthetic
SEKEELLKLIKRVIELLKRVLEEHLRLVEDVIRRLKELLDSNEKIVREVIEDLKRLLDEVRGDKEELDRIKEKLEEVLERYKRRLEEIKRDLERMLEDYKRELKRIEEDLRRVLEEVERIATRGEGPAEALIDKLRKILERALRELDKLSKKLDELLKKVLEELEKSNREIDKLLKDVLRRVEEGGASRDHMVLHEYVNAAGITKLKRNLEDVRRVIEDVKRKSARILEEARRLIEEVERELEKIRK

SEQ ID NO: 972 - protein, 242 aa, Artificial Sequence
  Synthetic
SEKERLMRLLDKLKDLNRRLVERIKELLDKALELHKKLVKELRELLERLKELVERGGVPEELLTRIDELIKKLEDEARKISKEVKRLIDELKKRLEDIHREVDRLIRELKETLKGVTDKDELLRRVAEVLERIARLSEELIREVKEVLEKIVELSRELLKRVLDVLRRIAELLEDALRKGNVSEETVRRDHMVLHEYVNAAGITERDAEREYKKLKDELEELTERYRREIRKLKEELKADRK

SEQ ID NO: 973 - protein, 242 aa, Artificial Sequence; identical to SEQ ID NO: 972
  Synthetic

SEQ ID NO: 974 - protein, 247 aa, Artificial Sequence
  Synthetic
SEAEDLEELIKELAELLKDVIRKLEKINRRLVKILEDIIRRLKEISKEAEEELRKGTVEDKDILRDLERRLREILEESDRLLEELKRRLEEILRKSKELLRRLEEVLREILKRAEEVKRSNLPKEELIKEIVKLLEELLRVIEKILEDNIRLLEELVEVIKEILEKHLRLLEELVRVIERILREVGKDRDHMVLHEYVNAAGITRLREEHEEVKRRLEEELTRLRETHKKIEKELREALKRVRDRST

SEQ ID NO: 975 - protein, 247 aa, Artificial Sequence; identical to SEQ ID NO: 974
  Synthetic

SEQ ID NO: 976 - protein, 248 aa, Artificial Sequence
  Synthetic
DEDRIIEEIARLLEELLRELLELIKKLIETNRRLNEEHERAVRELARLLEELLDRLVKKGISDEKLKRIRERLKRALDDLERLHREINKRLEDLVRELEKLVREILKELKDALEELRRASARAGGEEVLRRLEEIVKKLLDLVRRILERLKEIHKDNVRLLRELNERLTRIVEDLVRLIREILREAGVRDHMVLHEYVNAAGITRMIKRLHEDLERKLKESEDELREIEARLEEKIRRLEEKLERKRR

SEQ ID NO: 977 - protein, 248 aa, Artificial Sequence; identical to SEQ ID NO: 976
  Synthetic

SEQ ID NO: 978 - protein, 247 aa, Artificial Sequence
  Synthetic
SKAEKLLKDLREALEKVKRRYEELERRLDEVLKEHEEIVKRLLEELEKVLKRIEEGGLPEEELEKLKKLAEKVKELLRELLRLSKELVDRVRELLKRDLDLVRRLVEIALKVLREAREQPNDEKRVEKIKRDLEKKARRVREENERIKRDLKRTADESRKRLEKLLEDLKRELDRLREDLDRGRKDIDRDHMVLHEYVNAAGITLLREVIKSHEKLVRTIERLIEESIRVNEELLEVIERLLDRARK

SEQ ID NO: 979 - protein, 239 aa, Artificial Sequence
  Synthetic
SERELIERWLELHKEILRLIRELVERLLKLHREILDTIKKLIRELLELLEDIARKLGLDKEAKDELREIAKRVEDKLEKLERESRKVEEDLKRKLKELTDESDTVEKRVRDVVRRGTQSREEIAEELLRLDRKLLKAVEELLKEILDLNKKLLDDVRAILEETRRVLEKLLDRVRRGERTDDERRTLTRDHMVLHEYVNAAGITLKKLLDDSARMAEEVKKTLKELLERSEKVAEDVRK

SEQ ID NO: 980 - protein, 246 aa, Artificial Sequence
  Synthetic
KEIEETLKELEDLNREMVETNRRVLEETRRLNKETVDRVKATLDELAKMLKKLVDDVRKGPTSEELKRLLAELEELLARVVRRVEELLKKSTDLLERAVKDSADALRRSHEVLKEVASRVKRAKDEGLPREEVLRLLRELLERHAKVLKDIVRVSEKLLREHLKVLREIVEVLEELLERILKVILDTTRDHMVLHEYVNAAGITKRRLKEVIDRYEDELRKLRKEYKEKIDKYERKLEEIERRERT

SEQ ID NO: 981 - protein, 246 aa, Artificial Sequence
  Synthetic
SREEIVATLEDLARKILEVVKKLAKEIEDAWREIERAVREILKRLEELWREIEDVVRKKVDSRVAEILETVVKRVVDITRRLIEEAERVVRELVDITRKLITILEEVVRRLVEIVREASKIDDRRELEDMLRKIREVVREVIERLKKLDEDVRRVVEEVIRRLEELNKRLEDVIREVKKRLKELGLSERDHMVLHEYVNAAGITNTRVIKEIIDLLRTVIRIHEKIVEDLIKLLEELLRRLEEATR

SEQ ID NO: 982 - protein, 241 aa, Artificial Sequence
  Synthetic
SEKELLKEILDRIRELLEDDNRLLKRIVDEIRKLLEEWLRVHKEILERIKELLDRIGAPEDVIRELTRALKETEEDVDRVIRTLEKLLKEVLDAHEEVVRKLDRLLKEVERLVEGGDAEEVVRDLLRVVKEILDESKAVIDELARVVDEILKLLEEVDRKLAKVVKEILEDVLRGSGDDEDAVRKIAKRDHMVLHEYVNAAGITRRVIEEAKRLLKEWRDRNKEVADTLKKLLEDLIRKIR

SEQ ID NO: 983 - protein, 241 aa, Artificial Sequence; identical to SEQ ID NO: 982
  Synthetic

SEQ ID NO: 984 - protein, 248 aa, Artificial Sequence
  Synthetic
SEDELLEKIVRKLAEAVKRIEEELRKSKREIERLVKEIKEKLEDSLARVKETLDRIRETRKGPSDEEVLERLVRTLEELLARHLKLIEDIARELKKLLKEHLDRIETIVRDLKRLLKEILDELERTGLPREALEAVRELVKTVARLLDEVLKNNKKLLDDLKKELDDVLANNKRIVDELARLLERVRRRDHMVLHEYVNAAGITERSIESLERLLELILRVLEYSVASLEELLRRLLEVIKRIVDTTK

SEQ ID NO: 985 - protein, 246 aa, Artificial Sequence
  Synthetic
SEREELLERIKEILKRVKDKLDEDLKRLKEILEKLKEKADRDLEELRRRIEEVREKLERTGRTDELVKEVLDTVRRNLENLKRLVEDILRKLEENVKNLTDLVREILKLITELIKRLEDGGLPKEVLDALRRVLEKLEELLREILERLKRSLEAVKRKIEELLKELERSLDELRRALERIRKEIGDSERDHMVLHEYVNAAGITVRRVLEELLKVLAEHLETVRELIERLKRVLEEAIEVVERVAR

SEQ ID NO: 986 - protein, 246 aa, Artificial Sequence; identical to SEQ ID NO: 985
  Synthetic

SEQ ID NO: 987 - protein, 240 aa, Artificial Sequence
  Synthetic
DREKSVRDIEEDLKRVLDKLRRRVETSKEELKKVLKADKENADELEKTLRDVVRELDRGIDSEVLRAVREIVKRLVEVVRRYNELSEKIIRDLVRVNDRVLELLKRIVKRLIDVVRELEKIGDKEKALRRLEEVVKEVKRRIEELLKELEDVHRELVKILEEVNEDLKRVATEVKEIIKTGIKSSEVARDHMVLHEYVNAAGITNTDRLKEVIDRNLADLRDLAEELRAVIERLLEDARR

SEQ ID NO: 988 - protein, 241 aa, Artificial Sequence
  Synthetic
SAEEAVEKLVRIARAIVKINEDLSREVVRILREIVRLNEETTRLLVEIAREVVKVVEDGGLSEDVVRKLRKLVKELEDLLKKSNDDIRKLVEDVARRLKESNDEIRRLVERLEELLKRGPGDEELLRLVEELTEELLRTHEEVVKALEKLTADLLELHRELLERVRRLTKRIEEELKRVGVSEELLRRRDHMVLHEYVNAAGITKELEKLKRELERLLEESRRKLEKLKRDLERVLEETRR

SEQ ID NO: 989 - protein, 243 aa, Artificial Sequence
  Synthetic
SEAERLADEVRKAVKKSEEDNETLVREVEKAVRELKKNNKTWVDEVRKLMKRLVDLLRDGQVSDRDLLKELEEVLRRVLEALAENHERTEEILKRWLDRYAEDIERLRKVLKEVIEALKRGGSDDKRIVDELEEILRRNEDVLDKIAKRLRRLLEEDRRLLERIVRELKRLLDDLDRITKEGKSEELVRDHMVLHEYVNAAGITLVRLNNEILERLLKIVRELHKDNIKILEDLLRIIEEVLR

SEQ ID NO: 990 - protein, 243 aa, Artificial Sequence; identical to SEQ ID NO: 989
  Synthetic

SEQ ID NO: 991 - protein, 243 aa, Artificial Sequence
  Synthetic
SRVEELKKLIEDILRISREVVERIARVAEDIHRINRRVLDDLRKLIEDILRTVEEILARKVSGTEAAEALRDTIRRVVDEIRKLLEEHEKRSAELLEEIRKLLEDILRRSERAVEEIRELLKKGVSTKDVLRIIEEILREHLELLERVVRRIEEILRELLKTIEEIVKRIKEILEELKEVLKRGSVGDRDHMVLHEYVNAAGITILEEYRRLLEEIKRKLEEILRRVEELHRRLRRKLEEIDR

SEQ ID NO: 992 - protein, 249 aa, Artificial Sequence
  Synthetic
DAEEVVKRLADVLRENDETIRKVVEDLVRIAEENDRLWKKLVEDIAEILRRIVELLRRGGVPEELLDRLAKVVKSIVEKAEKILERLNRVSKAIAEKLKTIVDELNEVSKEIVKRAEDILRKGKDKETVLRALRTLVKEYADLSKEVLERVERIVREYVKLSDEVVKSLAEIVEELIRIIEDLLRKGNRDHMVLHEYVNAAGITRKLLEDVKKASEDIVREVERIVRELAKRSDEILKKLEDIVEKLRE

SEQ ID NO: 993 - protein, 249 aa, Artificial Sequence; identical to SEQ ID NO: 992
  Synthetic

SEQ ID NO: 994 - protein, 240 aa, Artificial Sequence
  Synthetic
DKDKRLEELLKRLKELNDKTFEELERILEELKRANEASLREAERILEELRARIEGGNLDKRLAELLKKLLDDLKRLLEEYTRTNEELLKRLRELLERYRETNKKLLDLLRKLLDEARRTGTDEDLLRRLEDILRKYEDEVRRLLKELEDILREYEDTSRRLLEELERIAKEAAERVSRGSDKDVKDIIRDHMVLHEYVNAAGITDSRTNSEVVKRLLDLLREDSKANSEVVKRLLDVLRE

SEQ ID NO: 995 - protein, 240 aa, Artificial Sequence
  Synthetic
SKEETLKRLLDELEKRNRETVERLERLLKELEDRNRASLEELEAVLEELERKIEESGLSKELKDTLARILEELRKLLEEYFRKNEELLRLLRKLLDEYARTNEELLRLLEELLDTARRTGGDSELLKRLEDIAREYEKRVRRLLEKLKDILDKYRKTVEELVRKMEEILKEAKKTISRIGSEEVKDIVRDHMVLHEYVNAAGITDVELNLDVAKKLLELLKEDSKLNLDVARELLELLDR

SEQ ID NO: 996 - protein, 243 aa, Artificial Sequence
  Synthetic
DEEETLRRLLERKVELAKEYLDVSKEVIDRTTKLLDEYLKTSKRIVDATVELLERGDLGPDELIKRLAEELERSLRELEEEIKRLKRELEESLKKLKEIIDRLAEEAEKLLAVLKRGEGSEEEALRALASLVRELIEVLRENDERLRDVLRRLIEALRKNNEILERVLRKLVRAAEERGRDESSREALRDHMVLHEYVNAAGITITKDLEAKLEKLLRDLNELTKALEEELKRLLDELKKRTD

SEQ ID NO: 997 - protein, 243 aa, Artificial Sequence
  Synthetic
SEAERTKESLKKVLKALVDLNRELLRKLEENMRELTKLNEEVKRALKEVLDKVREGGIVDKDAEREAERLMRELDKSSEDTARETRKLIEESKKSTRRTEEEARKLTETLDRLAKGGLPREDLLRALVRLLEELARLIEEDVRRNAELVKRHIELVERDVAELLRLIKELVDLLADLAEKGSRTEEIRRDHMVLHEYVNAAGITYREEVRKSKDKLRSILEDYKRKVDELKERLRELIEEVET

SEQ ID NO: 998 - protein, 243 aa, Artificial Sequence; identical to SEQ ID NO: 997
  Synthetic

SEQ ID NO: 999 - protein, 245 aa, Artificial Sequence
  Synthetic
TEEEVLRKVEKLIKDLLDVLRDLLRASEEVVREALRVLEELIEENKRVIEELSRALSGGSRESVESALAKNEERLKKILEDADRVLDKWRRLLEELSKKAKAVLDEVRKRLEEIKREVPETEKLRTLLTILEEILRALEKIIRDILRINERLLEKLKRILERLRETNREIDERIRKLVEEARGGSEEKLRDHMVLHEYVNAAGITDLRRELEKLLRDYKRELEEIERALEEIEKTLKRRADETRR

SEQ ID NO: 1000 - protein, 243 aa, Artificial Sequence
  Synthetic
KREDILKKLEDIIRDIIDKLRRILEKVKRLNEDIIREIKRLLDESLKTLEDLLKRIADKSRDRELEDILRRVLEKLRRSLDKLRDTLRKLKEETDTVLERAERTLKELKDRLEKLLRDGEKVSEEDLVEALKALIDELRKVLEDVIRVSKELVERLLRALREHLETNKRLVKELLDALRKTTGDDEEIKRDHMVLHEYVNAAGITVERVARELEKAHRDLERDIRRVAEELKKLLKKLRDDRR

SEQ ID NO: 1001 - protein, 244 aa, Artificial Sequence
  Synthetic
SAEETLRRITEESKRVLEEITKKYEDLERESREVLRKLREDLDRIKRELEDVLTKGGDDKDEVLTVLEKVLDELLKLHRENLRVIKELLRKVLEVDRENLEVLKRLLEKARDLLRRSGRDEKDLKKLEDELRKVKEELEKKHEASKRDIEDLERELDKVTEEVERLLRKLKEELRRAAEGSDEDRERLARDHMVLHEYVNAAGITILKINEELNRKIIKFARENLERNRRVNKKVIEVLREAAR

SEQ ID NO: 1002 - protein, 250 aa, Artificial Sequence
  Synthetic
STEEILKRVKEILDELAKELRDIIRESLRTIEELLDELRRILEESERTLEELVKTIKDGVKDSEELLRRLKRLLEDLRRAHEELLKRLKEAVDEHRDRLRKILEELERVLKELRKRIEELRRSGDRISEKDVLRKLEEVLRKALEILERLLKKIRESARELLKIIEEVLDANIKVMEEALKTIKELLKDRDHMVLHEYVNAAGITRTRYEELRRRLRKRVKDYEDKLREIEKKVRRDAERIEEELERAKK

SEQ ID NO: 1003 - protein, 247 aa, Artificial Sequence
  Synthetic
SEKEELLKLIKRVIELLKRVLEEHLRLVEDVIRRLKELLDSNEKIVREVIEDLKRLLDEVRGDKEELDRIKEKLEEVLERYKRRLEEIKRDLERMLEDYKRELKRIEEDLRRVLEEVERIATRGEGPAEALIDKLRKILERALRELDKLSKKLDELLKKVLEELEKSNREIDKLLKDVLRRVEEGGASERDHMVLHEYVNAAGITLKRNLEDVRRVIEDVKRKSARILEEARRLIEEVERELEKIRK

SEQ ID NO: 1004 - protein, 247 aa, Artificial Sequence; identical to SEQ ID NO: 1003
  Synthetic

SEQ ID NO: 1005 - protein, 242 aa, Artificial Sequence
  Synthetic
SEKERLMRLLDKLKDLNRRLVERIKELLDKALELHKKLVKELRELLERLKELVERGGVPEELLTRIDELIKKLEDEARKISKEVKRLIDELKKRLEDIHREVDRLIRELKETLKGVTDKDELLRRVAEVLERIARLSEELIREVKEVLEKIVELSRELLKRVLDVLRRIAELLEDALRKGNVSEETVRRRDHMVLHEYVNAAGITRDAEREYKKLKDELEELTERYRREIRKLKEELKADRK

SEQ ID NO: 1006 - protein, 247 aa, Artificial Sequence
  Synthetic
SEAEDLEELIKELAELLKDVIRKLEKINRRLVKILEDIIRRLKEISKEAEEELRKGTVEDKDILRDLERRLREILEESDRLLEELKRRLEEILRKSKELLRRLEEVLREILKRAEEVKRSNLPKEELIKEIVKLLEELLRVIEKILEDNIRLLEELVEVIKEILEKHLRLLEELVRVIERILREVGKDKRDHMVLHEYVNAAGITLREEHEEVKRRLEEELTRLRETHKKIEKELREALKRVRDRST

SEQ ID NO: 1007 - protein, 247 aa, Artificial Sequence; identical to SEQ ID NO: 1006
  Synthetic

SEQ ID NO: 1008 - protein, 248 aa, Artificial Sequence
  Synthetic
DEDRIIEEIARLLEELLRELLELIKKLIETNRRLNEEHERAVRELARLLEELLDRLVKKGISDEKLKRIRERLKRALDDLERLHREINKRLEDLVRELEKLVREILKELKDALEELRRASARAGGEEVLRRLEEIVKKLLDLVRRILERLKEIHKDNVRLLRELNERLTRIVEDLVRLIREILREAGVDRDHMVLHEYVNAAGITMIKRLHEDLERKLKESEDELREIEARLEEKIRRLEEKLERKRR

SEQ ID NO: 1009 - protein, 248 aa, Artificial Sequence; identical to SEQ ID NO: 1008
  Synthetic

SEQ ID NO: 1010 - protein, 247 aa, Artificial Sequence
  Synthetic
SKAEKLLKDLREALEKVKRRYEELERRLDEVLKEHEEIVKRLLEELEKVLKRIEEGGLPEEELEKLKKLAEKVKELLRELLRLSKELVDRVRELLKRDLDLVRRLVEIALKVLREAREQPNDEKRVEKIKRDLEKKARRVREENERIKRDLKRTADESRKRLEKLLEDLKRELDRLREDLDRGRKDIDERDHMVLHEYVNAAGITLREVIKSHEKLVRTIERLIEESIRVNEELLEVIERLLDRARK

SEQ ID NO: 1011 - protein, 246 aa, Artificial Sequence
  Synthetic
KEIEETLKELEDLNREMVETNRRVLEETRRLNKETVDRVKATLDELAKMLKKLVDDVRKGPTSEELKRLLAELEELLARVVRRVEELLKKSTDLLERAVKDSADALRRSHEVLKEVASRVKRAKDEGLPREEVLRLLRELLERHAKVLKDIVRVSEKLLREHLKVLREIVEVLEELLERILKVILDTTGRDHMVLHEYVNAAGITRRLKEVIDRYEDELRKLRKEYKEKIDKYERKLEEIERRERT

SEQ ID NO: 1012 - protein, 246 aa, Artificial Sequence; identical to SEQ ID NO: 1011
  Synthetic

SEQ ID NO: 1013 - protein, 247 aa, Artificial Sequence
  Synthetic
RDRDVLRKVKAEIEELVARIEKVSRDALSEVKRLLDENRKIAEDVLRLIESLLRKIRDTRGDDEVVKETEEVLRDNHRLLEELIRRLIKVLEEWLRRHKKLLDEIRELLKEILRLVKESGVSEDLLRRLKRVIEELDKKLKESEEKLRRVVEKAKEDLKAVLEEHRKVLEDLKRALEEVREKLRERGSERDHMVLHEYVNAAGITMKRVHDDLSRAVEKVVRDVVRVDKELLDELARILRRLEEVIT

SEQ ID NO: 1014 - protein, 241 aa, Artificial Sequence
  Synthetic
SEKELLKEILDRIRELLEDDNRLLKRIVDEIRKLLEEWLRVHKEILERIKELLDRIGAPEDVIRELTRALKETEEDVDRVIRTLEKLLKEVLDAHEEVVRKLDRLLKEVERLVEGGDAEEVVRDLLRVVKEILDESKAVIDELARVVDEILKLLEEVDRKLAKVVKEILEDVLRGSGDDEDAVRKIAKIRDHMVLHEYVNAAGITRVIEEAKRLLKEWRDRNKEVADTLKKLLEDLIRKIR

SEQ ID NO: 1015 - protein, 241 aa, Artificial Sequence; identical to SEQ ID NO: 1014
  Synthetic

SEQ ID NO: 1016 - protein, 246 aa, Artificial Sequence
  Synthetic
SEREELLERIKEILKRVKDKLDEDLKRLKEILEKLKEKADRDLEELRRRIEEVREKLERTGRTDELVKEVLDTVRRNLENLKRLVEDILRKLEENVKNLTDLVREILKLITELIKRLEDGGLPKEVLDALRRVLEKLEELLREILERLKRSLEAVKRKIEELLKELERSLDELRRALERIRKEIGDSETRDHMVLHEYVNAAGITRRVLEELLKVLAEHLETVRELIERLKRVLEEAIEVVERVAR

SEQ ID NO: 1017 - protein, 240 aa, Artificial Sequence
  Synthetic
DREKSVRDIEEDLKRVLDKLRRRVETSKEELKKVLKADKENADELEKTLRDVVRELDRGIDSEVLRAVREIVKRLVEVVRRYNELSEKIIRDLVRVNDRVLELLKRIVKRLIDVVRELEKIGDKEKALRRLEEVVKEVKRRIEELLKELEDVHRELVKILEEVNEDLKRVATEVKEIIKTGIKSSEVAKRDHMVLHEYVNAAGITTDRLKEVIDRNLADLRDLAEELRAVIERLLEDARR

SEQ ID NO: 1018 - protein, 240 aa, Artificial Sequence; identical to SEQ ID NO: 1017
  Synthetic

SEQ ID NO: 1019 - protein, 241 aa, Artificial Sequence
  Synthetic
SAEEAVEKLVRIARAIVKINEDLSREVVRILREIVRLNEETTRLLVEIAREVVKVVEDGGLSEDVVRKLRKLVKELEDLLKKSNDDIRKLVEDVARRLKESNDEIRRLVERLEELLKRGPGDEELLRLVEELTEELLRTHEEVVKALEKLTADLLELHRELLERVRRLTKRIEEELKRVGVSEELLRRLRDHMVLHEYVNAAGITELEKLKRELERLLEESRRKLEKLKRDLERVLEETRR

SEQ ID NO: 1020 - protein, 243 aa, Artificial Sequence
  Synthetic
SEAERLADEVRKAVKKSEEDNETLVREVEKAVRELKKNNKTWVDEVRKLMKRLVDLLRDGQVSDRDLLKELEEVLRRVLEALAENHERTEEILKRWLDRYAEDIERLRKVLKEVIEALKRGGSDDKRIVDELEEILRRNEDVLDKIAKRLRRLLEEDRRLLERIVRELKRLLDDLDRITKEGKSEELVRRDHMVLHEYVNAAGITVRLNNEILERLLKIVRELHKDNIKILEDLLRIIEEVLR

SEQ ID NO: 1021 - protein, 243 aa, Artificial Sequence; identical to SEQ ID NO: 1020
  Synthetic

SEQ ID NO: 1022 - protein, 247 aa, Artificial Sequence
  Synthetic
DEERLAEELERVLDRNRKLLEEALRELRRVIEENRKSVKRLLDELKRVLDELLKVLRELSRGDSDEELRKVIEDLIRKLTKVLDKVRSLVEENIERLARVLEKLERLARENLEDLKKVLDDVDKKLKDRRLVERLAELVRELIEVNKEILEMLKEIVRELLEINRTLLERLKDLVATALEIIKLLARGDRDHMVLHEYVNAAGITLRKLLEDYERAVRRLEDKLRRVRERYEAVLKRIKDKLEETKR

SEQ ID NO: 1023 - protein, 247 aa, Artificial Sequence; identical to SEQ ID NO: 1022
  Synthetic

SEQ ID NO: 1024 - protein, 243 aa, Artificial Sequence
  Synthetic
SRVEELKKLIEDILRISREVVERIARVAEDIHRINRRVLDDLRKLIEDILRTVEEILARKVSGTEAAEALRDTIRRVVDEIRKLLEEHEKRSAELLEEIRKLLEDILRRSERAVEEIRELLKKGVSTKDVLRIIEEILREHLELLERVVRRIEEILRELLKTIEEIVKRIKEILEELKEVLKRGSVGDDRDHMVLHEYVNAAGITLEEYRRLLEEIKRKLEEILRRVEELHRRLRRKLEEIDR

SEQ ID NO: 1025 - protein, 243 aa, Artificial Sequence; identical to SEQ ID NO: 1024
  Synthetic

SEQ ID NO: 1026 - protein, 249 aa, Artificial Sequence
  Synthetic
DAEEVVKRLADVLRENDETIRKVVEDLVRIAEENDRLWKKLVEDIAEILRRIVELLRRGGVPEELLDRLAKVVKSIVEKAEKILERLNRVSKAIAEKLKTIVDELNEVSKEIVKRAEDILRKGKDKETVLRALRTLVKEYADLSKEVLERVERIVREYVKLSDEVVKSLAEIVEELIRIIEDLLRKGNLRDHMVLHEYVNAAGITKLLEDVKKASEDIVREVERIVRELAKRSDEILKKLEDIVEKLRE

SEQ ID NO: 1027 - protein, 249 aa, Artificial Sequence; identical to SEQ ID NO: 1026
  Synthetic

SEQ ID NO: 1028 - protein, 240 aa, Artificial Sequence
  Synthetic
SKEETLKRLLDELEKRNRETVERLERLLKELEDRNRASLEELEAVLEELERKIEESGLSKELKDTLARILEELRKLLEEYFRKNEELLRLLRKLLDEYARTNEELLRLLEELLDTARRTGGDSELLKRLEDIAREYEKRVRRLLEKLKDILDKYRKTVEELVRKMEEILKEAKKTISRIGSEEVKDIVRRDHMVLHEYVNAAGITVELNLDVAKKLLELLKEDSKLNLDVARELLELLDR

SEQ ID NO: 1029 - protein, 240 aa, Artificial Sequence; identical to SEQ ID NO: 1028
  Synthetic

SEQ ID NO: 1030 - protein, 243 aa, Artificial Sequence
  Synthetic
DEEETLRRLLERKVELAKEYLDVSKEVIDRTTKLLDEYLKTSKRIVDATVELLERGDLGPDELIKRLAEELERSLRELEEEIKRLKRELEESLKKLKEIIDRLAEEAEKLLAVLKRGEGSEEEALRALASLVRELIEVLRENDERLRDVLRRLIEALRKNNEILERVLRKLVRAAEERGRDESSREALERDHMVLHEYVNAAGITTKDLEAKLEKLLRDLNELTKALEEELKRLLDELKKRTD

SEQ ID NO: 1031 - protein, 243 aa, Artificial Sequence; identical to SEQ ID NO: 1030
  Synthetic

SEQ ID NO: 1032 - protein, 243 aa, Artificial Sequence
  Synthetic
SEAERTKESLKKVLKALVDLNRELLRKLEENMRELTKLNEEVKRALKEVLDKVREGGIVDKDAEREAERLMRELDKSSEDTARETRKLIEESKKSTRRTEEEARKLTETLDRLAKGGLPREDLLRALVRLLEELARLIEEDVRRNAELVKRHIELVERDVAELLRLIKELVDLLADLAEKGSRTEEIRKRDHMVLHEYVNAAGITREEVRKSKDKLRSILEDYKRKVDELKERLRELIEEVET

SEQ ID NO: 1033 - protein, 241 aa, Artificial Sequence
  Synthetic
SADEALEELVRRLLEVLKTVLERTKELSRDDLRVVKEVLRIIEELVKRLLKVIRDGLDDADRVLEEVERVIREAKREVKRWEEVVRKVVEDSRRLIERVLAEVEEVIKEAKRLLDERKSGGSREVIEELLSLLREIVRHHKEVSDEHLKLSAELVKRILDVVEETLRLATEIVRRIKEGGNSEDVRRDIRDHMVLHEYVNAAGITDIERLLAELEKLNEDVLRENKALLEDLERRVRERKK

SEQ ID NO: 1034 - protein, 245 aa, Artificial Sequence
  Synthetic
TEEEVLRKVEKLIKDLLDVLRDLLRASEEVVREALRVLEELIEENKRVIEELSRALSGGSRESVESALAKNEERLKKILEDADRVLDKWRRLLEELSKKAKAVLDEVRKRLEEIKREVPETEKLRTLLTILEEILRALEKIIRDILRINERLLEKLKRILERLRETNREIDERIRKLVEEARGGSEEKLRRDHMVLHEYVNAAGITLRRELEKLLRDYKRELEEIERALEEIEKTLKRRADETRR

SEQ ID NO: 1035 - protein, 245 aa, Artificial Sequence; identical to SEQ ID NO: 1034
  Synthetic

SEQ ID NO: 1036 - protein, 243 aa, Artificial Sequence
  Synthetic
KREDILKKLEDIIRDIIDKLRRILEKVKRLNEDIIREIKRLLDESLKTLEDLLKRIADKSRDRELEDILRRVLEKLRRSLDKLRDTLRKLKEETDTVLERAERTLKELKDRLEKLLRDGEKVSEEDLVEALKALIDELRKVLEDVIRVSKELVERLLRALREHLETNKRLVKELLDALRKTTGDDEEIKRRDHMVLHEYVNAAGITERVARELEKAHRDLERDIRRVAEELKKLLKKLRDDRR

SEQ ID NO: 1037 - protein, 244 aa, Artificial Sequence
  Synthetic
SAEETLRRITEESKRVLEEITKKYEDLERESREVLRKLREDLDRIKRELEDVLTKGGDDKDEVLTVLEKVLDELLKLHRENLRVIKELLRKVLEVDRENLEVLKRLLEKARDLLRRSGRDEKDLKKLEDELRKVKEELEKKHEASKRDIEDLERELDKVTEEVERLLRKLKEELRRAAEGSDEDRERLARRDHMVLHEYVNAAGITLKINEELNRKIIKFARENLERNRRVNKKVIEVLREAAR

SEQ ID NO: 1038 - protein, 250 aa, Artificial Sequence
  Synthetic
STEEILKRVKEILDELAKELRDIIRESLRTIEELLDELRRILEESERTLEELVKTIKDGVKDSEELLRRLKRLLEDLRRAHEELLKRLKEAVDEHRDRLRKILEELERVLKELRKRIEELRRSGDRISEKDVLRKLEEVLRKALEILERLLKKIRESARELLKIIEEVLDANIKVMEEALKTIKELLKDGRDHMVLHEYVNAAGITTRYEELRRRLRKRVKDYEDKLREIEKKVRRDAERIEEELERAKK

SEQ ID NO: 1039 - protein, 247 aa, Artificial Sequence
  Synthetic
SEKEELLKLIKRVIELLKRVLEEHLRLVEDVIRRLKELLDSNEKIVREVIEDLKRLLDEVRGDKEELDRIKEKLEEVLERYKRRLEEIKRDLERMLEDYKRELKRIEEDLRRVLEEVERIATRGEGPAEALIDKLRKILERALRELDKLSKKLDELLKKVLEELEKSNREIDKLLKDVLRRVEEGGASEDRDHMVLHEYVNAAGITKRNLEDVRRVIEDVKRKSARILEEARRLIEEVERELEKIRK

SEQ ID NO: 1040 - protein, 247 aa, Artificial Sequence; identical to SEQ ID NO: 1039
  Synthetic

SEQ ID NO: 1041 - protein, 242 aa, Artificial Sequence
  Synthetic
SEKERLMRLLDKLKDLNRRLVERIKELLDKALELHKKLVKELRELLERLKELVERGGVPEELLTRIDELIKKLEDEARKISKEVKRLIDELKKRLEDIHREVDRLIRELKETLKGVTDKDELLRRVAEVLERIARLSEELIREVKEVLEKIVELSRELLKRVLDVLRRIAELLEDALRKGNVSEETVRRLRDHMVLHEYVNAAGITDAEREYKKLKDELEELTERYRREIRKLKEELKADRK

SEQ ID NO: 1042 - protein, 247 aa, Artificial Sequence
  Synthetic
SEAEDLEELIKELAELLKDVIRKLEKINRRLVKILEDIIRRLKEISKEAEEELRKGTVEDKDILRDLERRLREILEESDRLLEELKRRLEEILRKSKELLRRLEEVLREILKRAEEVKRSNLPKEELIKEIVKLLEELLRVIEKILEDNIRLLEELVEVIKEILEKHLRLLEELVRVIERILREVGKDKDRDHMVLHEYVNAAGITREEHEEVKRRLEEELTRLRETHKKIEKELREALKRVRDRST

SEQ ID NO: 1043 - protein, 247 aa, Artificial Sequence; identical to SEQ ID NO: 1042
  Synthetic

SEQ ID NO: 1044 - protein, 248 aa, Artificial Sequence
  Synthetic
DEEERVKKLLTDLRRLLRKLHEESKKLLDELRKKLRELRRRSEEKLREVERRLREAEKKLPGTRVLKLVADVVKKVLDAIRDLNRKLEEIIDEALKLLEELDDILRRVVEEALRLLKEIKDTKGDREEVKKRVEDILKRLEELVKEYEDRVREIKKRLRRALEELRDEYRKIREDIERVLDELRKGGVPERDHMVLHEYVNAAGITLDENLKMVERLIRELEKVLDDHERKVRRLIEELLEVLDRDAK

SEQ ID NO: 1045 - protein, 248 aa, Artificial Sequence
  Synthetic
DEDRIIEEIARLLEELLRELLELIKKLIETNRRLNEEHERAVRELARLLEELLDRLVKKGISDEKLKRIRERLKRALDDLERLHREINKRLEDLVRELEKLVREILKELKDALEELRRASARAGGEEVLRRLEEIVKKLLDLVRRILERLKEIHKDNVRLLRELNERLTRIVEDLVRLIREILREAGVDERDHMVLHEYVNAAGITIKRLHEDLERKLKESEDELREIEARLEEKIRRLEEKLERKRR

SEQ ID NO: 1046 - protein, 248 aa, Artificial Sequence; identical to SEQ ID NO: 1045
  Synthetic

SEQ ID NO: 1047 - protein, 251 aa, Artificial Sequence
  Synthetic
DEEEKIRTTLDLLRKLLKVLREILEELIRSNKELNERLLRLVEDSDRLLEELLKKLADDGGVDEEALRRIKKRLEDLIRTNREIEERIDRESERLAEELRRILRELEKELRRLIEDLKEVLKRGLPREELLRRLKKVVEDVLRILEEVLRVVDELDKENVRLLREWLERNKEIVEEVIRILEDLIRKGGSRDHMVLHEYVNAAGITREKHAEIAKELERLLRENRRRLEELAREAKKVLDELRKRLEDERR

SEQ ID NO: 1048 - protein, 246 aa, Artificial Sequence
  Synthetic
SREEIVATLEDLARKILEVVKKLAKEIEDAWREIERAVREILKRLEELWREIEDVVRKKVDSRVAEILETVVKRVVDITRRLIEEAERVVRELVDITRKLITILEEVVRRLVEIVREASKIDDRRELEDMLRKIREVVREVIERLKKLDEDVRRVVEEVIRRLEELNKRLEDVIREVKKRLKELGLSEEARDHMVLHEYVNAAGITRVIKEIIDLLRTVIRIHEKIVEDLIKLLEELLRRLEEATR

SEQ ID NO: 1049 - protein, 241 aa, Artificial Sequence
  Synthetic
SEKELLKEILDRIRELLEDDNRLLKRIVDEIRKLLEEWLRVHKEILERIKELLDRIGAPEDVIRELTRALKETEEDVDRVIRTLEKLLKEVLDAHEEVVRKLDRLLKEVERLVEGGDAEEVVRDLLRVVKEILDESKAVIDELARVVDEILKLLEEVDRKLAKVVKEILEDVLRGSGDDEDAVRKIAKIIRDHMVLHEYVNAAGITVIEEAKRLLKEWRDRNKEVADTLKKLLEDLIRKIR

SEQ ID NO: 1050 - protein, 246 aa, Artificial Sequence
  Synthetic
SEREELLERIKEILKRVKDKLDEDLKRLKEILEKLKEKADRDLEELRRRIEEVREKLERTGRTDELVKEVLDTVRRNLENLKRLVEDILRKLEENVKNLTDLVREILKLITELIKRLEDGGLPKEVLDALRRVLEKLEELLREILERLKRSLEAVKRKIEELLKELERSLDELRRALERIRKEIGDSETARDHMVLHEYVNAAGITRVLEELLKVLAEHLETVRELIERLKRVLEEAIEVVERVAR

SEQ ID NO: 1051 - protein, 246 aa, Artificial Sequence; identical to SEQ ID NO: 1050
  Synthetic

SEQ ID NO: 1052 - protein, 245 aa, Artificial Sequence
  Synthetic
SEKDEVTRRIRELLKEAEETNREAIERIKRLLDRVREAVEEVAKRSEELLRRLKKVLDRGLQDDEALLKLLIDALREHNRLSTELIKILIDVLRTILKIIKDVLATNIEIARRILDLVRRLAERGGLDDRLVKEVEKLVRTAERLHRDALRKVKRLVEELEKRLRELVKTDHDLVRRLETLLRRGSGSKERDHMVLHEYVNAAGITIRELLKEIEKIVKEIIELLERLNDELRKIIEAILETTKK

SEQ ID NO: 1053 - protein, 247 aa, Artificial Sequence
  Synthetic
DEERLAEELERVLDRNRKLLEEALRELRRVIEENRKSVKRLLDELKRVLDELLKVLRELSRGDSDEELRKVIEDLIRKLTKVLDKVRSLVEENIERLARVLEKLERLARENLEDLKKVLDDVDKKLKDRRLVERLAELVRELIEVNKEILEMLKEIVRELLEINRTLLERLKDLVATALEIIKLLARGDGRDHMVLHEYVNAAGITRKLLEDYERAVRRLEDKLRRVRERYEAVLKRIKDKLEETKR

SEQ ID NO: 1054 - protein, 243 aa, Artificial Sequence
  Synthetic
SRVEELKKLIEDILRISREVVERIARVAEDIHRINRRVLDDLRKLIEDILRTVEEILARKVSGTEAAEALRDTIRRVVDEIRKLLEEHEKRSAELLEEIRKLLEDILRRSERAVEEIRELLKKGVSTKDVLRIIEEILREHLELLERVVRRIEEILRELLKTIEEIVKRIKEILEELKEVLKRGSVGDDERDHMVLHEYVNAAGITEEYRRLLEEIKRKLEEILRRVEELHRRLRRKLEEIDR

SEQ ID NO: 1055 - protein, 249 aa, Artificial Sequence
  Synthetic
DAEEVVKRLADVLRENDETIRKVVEDLVRIAEENDRLWKKLVEDIAEILRRIVELLRRGGVPEELLDRLAKVVKSIVEKAEKILERLNRVSKAIAEKLKTIVDELNEVSKEIVKRAEDILRKGKDKETVLRALRTLVKEYADLSKEVLERVERIVREYVKLSDEVVKSLAEIVEELIRIIEDLLRKGNLDRDHMVLHEYVNAAGITLLEDVKKASEDIVREVERIVRELAKRSDEILKKLEDIVEKLRE

SEQ ID NO: 1056 - protein, 249 aa, Artificial Sequence; identical to SEQ ID NO: 1055
  Synthetic

SEQ ID NO: 1057 - protein, 243 aa, Artificial Sequence
  Synthetic
DEEETLRRLLERKVELAKEYLDVSKEVIDRTTKLLDEYLKTSKRIVDATVELLERGDLGPDELIKRLAEELERSLRELEEEIKRLKRELEESLKKLKEIIDRLAEEAEKLLAVLKRGEGSEEEALRALASLVRELIEVLRENDERLRDVLRRLIEALRKNNEILERVLRKLVRAAEERGRDESSREALEERDHMVLHEYVNAAGITKDLEAKLEKLLRDLNELTKALEEELKRLLDELKKRTD

SEQ ID NO: 1058 - protein, 243 aa, Artificial Sequence; identical to SEQ ID NO: 1057
  Synthetic

SEQ ID NO: 1059 - protein, 243 aa, Artificial Sequence
  Synthetic
SEAERTKESLKKVLKALVDLNRELLRKLEENMRELTKLNEEVKRALKEVLDKVREGGIVDKDAEREAERLMRELDKSSEDTARETRKLIEESKKSTRRTEEEARKLTETLDRLAKGGLPREDLLRALVRLLEELARLIEEDVRRNAELVKRHIELVERDVAELLRLIKELVDLLADLAEKGSRTEEIRKIRDHMVLHEYVNAAGITEEVRKSKDKLRSILEDYKRKVDELKERLRELIEEVET

SEQ ID NO: 1060 - protein, 243 aa, Artificial Sequence; identical to SEQ ID NO: 1059
  Synthetic

SEQ ID NO: 1061 - protein, 241 aa, Artificial Sequence
  Synthetic
SADEALEELVRRLLEVLKTVLERTKELSRDDLRVVKEVLRIIEELVKRLLKVIRDGLDDADRVLEEVERVIREAKREVKRWEEVVRKVVEDSRRLIERVLAEVEEVIKEAKRLLDERKSGGSREVIEELLSLLREIVRHHKEVSDEHLKLSAELVKRILDVVEETLRLATEIVRRIKEGGNSEDVRRDIERDHMVLHEYVNAAGITIERLLAELEKLNEDVLRENKALLEDLERRVRERKK

SEQ ID NO: 1062 - protein, 245 aa, Artificial Sequence
  Synthetic
TEEEVLRKVEKLIKDLLDVLRDLLRASEEVVREALRVLEELIEENKRVIEELSRALSGGSRESVESALAKNEERLKKILEDADRVLDKWRRLLEELSKKAKAVLDEVRKRLEEIKREVPETEKLRTLLTILEEILRALEKIIRDILRINERLLEKLKRILERLRETNREIDERIRKLVEEARGGSEEKLRRRDHMVLHEYVNAAGITRRELEKLLRDYKRELEEIERALEEIEKTLKRRADETRR

SEQ ID NO: 1063 - protein, 245 aa, Artificial Sequence; identical to SEQ ID NO: 1062
  Synthetic

SEQ ID NO: 1064 - protein, 244 aa, Artificial Sequence
  Synthetic
SAEETLRRITEESKRVLEEITKKYEDLERESREVLRKLREDLDRIKRELEDVLTKGGDDKDEVLTVLEKVLDELLKLHRENLRVIKELLRKVLEVDRENLEVLKRLLEKARDLLRRSGRDEKDLKKLEDELRKVKEELEKKHEASKRDIEDLERELDKVTEEVERLLRKLKEELRRAAEGSDEDRERLARLRDHMVLHEYVNAAGITKINEELNRKIIKFARENLERNRRVNKKVIEVLREAAR

SEQ ID NO: 1065 - protein, 250 aa, Artificial Sequence
  Synthetic
STEEILKRVKEILDELAKELRDIIRESLRTIEELLDELRRILEESERTLEELVKTIKDGVKDSEELLRRLKRLLEDLRRAHEELLKRLKEAVDEHRDRLRKILEELERVLKELRKRIEELRRSGDRISEKDVLRKLEEVLRKALEILERLLKKIRESARELLKIIEEVLDANIKVMEEALKTIKELLKDGPRDHMVLHEYVNAAGITRYEELRRRLRKRVKDYEDKLREIEKKVRRDAERIEEELERAKK

SEQ ID NO: 1066 - protein, 247 aa, Artificial Sequence
  Synthetic
SEKEELLKLIKRVIELLKRVLEEHLRLVEDVIRRLKELLDSNEKIVREVIEDLKRLLDEVRGDKEELDRIKEKLEEVLERYKRRLEEIKRDLERMLEDYKRELKRIEEDLRRVLEEVERIATRGEGPAEALIDKLRKILERALRELDKLSKKLDELLKKVLEELEKSNREIDKLLKDVLRRVEEGGASEDLRDHMVLHEYVNAAGITRNLEDVRRVIEDVKRKSARILEEARRLIEEVERELEKIRK

SEQ ID NO: 1067 - protein, 247 aa, Artificial Sequence; identical to SEQ ID NO: 1066
  Synthetic

SEQ ID NO: 1068 - protein, 242 aa, Artificial Sequence
  Synthetic
SEKERLMRLLDKLKDLNRRLVERIKELLDKALELHKKLVKELRELLERLKELVERGGVPEELLTRIDELIKKLEDEARKISKEVKRLIDELKKRLEDIHREVDRLIRELKETLKGVTDKDELLRRVAEVLERIARLSEELIREVKEVLEKIVELSRELLKRVLDVLRRIAELLEDALRKGNVSEETVRRLRRDHMVLHEYVNAAGITAEREYKKLKDELEELTERYRREIRKLKEELKADRK

SEQ ID NO: 1069 - protein, 242 aa, Artificial Sequence; identical to SEQ ID NO: 1068
  Synthetic

SEQ ID NO: 1070 - protein, 247 aa, Artificial Sequence
  Synthetic
SEAEDLEELIKELAELLKDVIRKLEKINRRLVKILEDIIRRLKEISKEAEEELRKGTVEDKDILRDLERRLREILEESDRLLEELKRRLEEILRKSKELLRRLEEVLREILKRAEEVKRSNLPKEELIKEIVKLLEELLRVIEKILEDNIRLLEELVEVIKEILEKHLRLLEELVRVIERILREVGKDKDERDHMVLHEYVNAAGITEEHEEVKRRLEEELTRLRETHKKIEKELREALKRVRDRST

SEQ ID NO: 1071 - protein, 247 aa, Artificial Sequence; identical to SEQ ID NO: 1070
  Synthetic

SEQ ID NO: 1072 - protein, 248 aa, Artificial Sequence
  Synthetic
DEDRIIEEIARLLEELLRELLELIKKLIETNRRLNEEHERAVRELARLLEELLDRLVKKGISDEKLKRIRERLKRALDDLERLHREINKRLEDLVRELEKLVREILKELKDALEELRRASARAGGEEVLRRLEEIVKKLLDLVRRILERLKEIHKDNVRLLRELNERLTRIVEDLVRLIREILREAGVDEKRDHMVLHEYVNAAGITKRLHEDLERKLKESEDELREIEARLEEKIRRLEEKLERKRR

SEQ ID NO: 1073 - protein, 248 aa, Artificial Sequence; identical to SEQ ID NO: 1072
  Synthetic

SEQ ID NO: 1074 - protein, 251 aa, Artificial Sequence
  Synthetic
DEEEKIRTTLDLLRKLLKVLREILEELIRSNKELNERLLRLVEDSDRLLEELLKKLADDGGVDEEALRRIKKRLEDLIRTNREIEERIDRESERLAEELRRILRELEKELRRLIEDLKEVLKRGLPREELLRRLKKVVEDVLRILEEVLRVVDELDKENVRLLREWLERNKEIVEEVIRILEDLIRKGGSERDHMVLHEYVNAAGITEKHAEIAKELERLLRENRRRLEELAREAKKVLDELRKRLEDERR

SEQ ID NO: 1075 - protein, 246 aa, Artificial Sequence
  Synthetic
KEIEETLKELEDLNREMVETNRRVLEETRRLNKETVDRVKATLDELAKMLKKLVDDVRKGPTSEELKRLLAELEELLARVVRRVEELLKKSTDLLERAVKDSADALRRSHEVLKEVASRVKRAKDEGLPREEVLRLLRELLERHAKVLKDIVRVSEKLLREHLKVLREIVEVLEELLERILKVILDTTGGDRDHMVLHEYVNAAGITLKEVIDRYEDELRKLRKEYKEKIDKYERKLEEIERRERT

SEQ ID NO: 1076 - protein, 245 aa, Artificial Sequence
  Synthetic
DEDELIRKLLEDLKDIVRKILELIERDLRDIERVVRRIVKVIRDDLKKIKEVVDDIARGVPRTEELERVIKRIEELLRTSEEELDRILKEIEELLRESRRRLEEVVSAVEELLRRVEEIVDKGRESKEDVIKLLREVVDDILRLVEEVVRTNLEIIKRILELIERVIRLNLSIIRDILRLLEGTVDSELADRDHMVLHEYVNAAGITLEDVKRAITELRKNSKDILEEVRKLIDELRKRIKEVED

SEQ ID NO: 1077 - protein, 247 aa, Artificial Sequence
  Synthetic
RDRDVLRKVKAEIEELVARIEKVSRDALSEVKRLLDENRKIAEDVLRLIESLLRKIRDTRGDDEVVKETEEVLRDNHRLLEELIRRLIKVLEEWLRRHKKLLDEIRELLKEILRLVKESGVSEDLLRRLKRVIEELDKKLKESEEKLRRVVEKAKEDLKAVLEEHRKVLEDLKRALEEVREKLRERGSEEVRDHMVLHEYVNAAGITRVHDDLSRAVEKVVRDVVRVDKELLDELARILRRLEEVIT

SEQ ID NO: 1078 - protein, 243 aa, Artificial Sequence
  Synthetic
SEAERLADEVRKAVKKSEEDNETLVREVEKAVRELKKNNKTWVDEVRKLMKRLVDLLRDGQVSDRDLLKELEEVLRRVLEALAENHERTEEILKRWLDRYAEDIERLRKVLKEVIEALKRGGSDDKRIVDELEEILRRNEDVLDKIAKRLRRLLEEDRRLLERIVRELKRLLDDLDRITKEGKSEELVRIARDHMVLHEYVNAAGITLNNEILERLLKIVRELHKDNIKILEDLLRIIEEVLR

SEQ ID NO: 1079 - protein, 243 aa, Artificial Sequence; identical to SEQ ID NO: 1078
  Synthetic

SEQ ID NO: 1080 - protein, 245 aa, Artificial Sequence
  Synthetic
SEKDEVTRRIRELLKEAEETNREAIERIKRLLDRVREAVEEVAKRSEELLRRLKKVLDRGLQDDEALLKLLIDALREHNRLSTELIKILIDVLRTILKIIKDVLATNIEIARRILDLVRRLAERGGLDDRLVKEVEKLVRTAERLHRDALRKVKRLVEELEKRLRELVKTDHDLVRRLETLLRRGSGSKEDRDHMVLHEYVNAAGITRELLKEIEKIVKEIIELLERLNDELRKIIEAILETTKK

SEQ ID NO: 1081 - protein, 247 aa, Artificial Sequence
  Synthetic
DEERLAEELERVLDRNRKLLEEALRELRRVIEENRKSVKRLLDELKRVLDELLKVLRELSRGDSDEELRKVIEDLIRKLTKVLDKVRSLVEENIERLARVLEKLERLARENLEDLKKVLDDVDKKLKDRRLVERLAELVRELIEVNKEILEMLKEIVRELLEINRTLLERLKDLVATALEIIKLLARGDGTRDHMVLHEYVNAAGITKLLEDYERAVRRLEDKLRRVRERYEAVLKRIKDKLEETKR

SEQ ID NO: 1082 - protein, 247 aa, Artificial Sequence; identical to SEQ ID NO: 1081
  Synthetic

SEQ ID NO: 1083 - protein, 243 aa, Artificial Sequence
  Synthetic
SRVEELKKLIEDILRISREVVERIARVAEDIHRINRRVLDDLRKLIEDILRTVEEILARKVSGTEAAEALRDTIRRVVDEIRKLLEEHEKRSAELLEEIRKLLEDILRRSERAVEEIRELLKKGVSTKDVLRIIEEILREHLELLERVVRRIEEILRELLKTIEEIVKRIKEILEELKEVLKRGSVGDDEVRDHMVLHEYVNAAGITEYRRLLEEIKRKLEEILRRVEELHRRLRRKLEEIDR

SEQ ID NO: 1084 - protein, 249 aa, Artificial Sequence
  Synthetic
DAEEVVKRLADVLRENDETIRKVVEDLVRIAEENDRLWKKLVEDIAEILRRIVELLRRGGVPEELLDRLAKVVKSIVEKAEKILERLNRVSKAIAEKLKTIVDELNEVSKEIVKRAEDILRKGKDKETVLRALRTLVKEYADLSKEVLERVERIVREYVKLSDEVVKSLAEIVEELIRIIEDLLRKGNLDERDHMVLHEYVNAAGITLEDVKKASEDIVREVERIVRELAKRSDEILKKLEDIVEKLRE

SEQ ID NO: 1085 - protein, 249 aa, Artificial Sequence; identical to SEQ ID NO: 1084
  Synthetic

SEQ ID NO: 1086 - protein, 243 aa, Artificial Sequence
  Synthetic
DEEETLRRLLERKVELAKEYLDVSKEVIDRTTKLLDEYLKTSKRIVDATVELLERGDLGPDELIKRLAEELERSLRELEEEIKRLKRELEESLKKLKEIIDRLAEEAEKLLAVLKRGEGSEEEALRALASLVRELIEVLRENDERLRDVLRRLIEALRKNNEILERVLRKLVRAAEERGRDESSREALEEARDHMVLHEYVNAAGITDLEAKLEKLLRDLNELTKALEEELKRLLDELKKRTD

SEQ ID NO: 1087 - protein, 243 aa, Artificial Sequence; identical to SEQ ID NO: 1086
  Synthetic

SEQ ID NO: 1088 - protein, 245 aa, Artificial Sequence
  Synthetic
TEEEVLRKVEKLIKDLLDVLRDLLRASEEVVREALRVLEELIEENKRVIEELSRALSGGSRESVESALAKNEERLKKILEDADRVLDKWRRLLEELSKKAKAVLDEVRKRLEEIKREVPETEKLRTLLTILEEILRALEKIIRDILRINERLLEKLKRILERLRETNREIDERIRKLVEEARGGSEEKLRRDRDHMVLHEYVNAAGITRELEKLLRDYKRELEEIERALEEIEKTLKRRADETRR

SEQ ID NO: 1089 - protein, 245 aa, Artificial Sequence; identical to SEQ ID NO: 1088
  Synthetic

SEQ ID NO: 1090 - protein, 244 aa, Artificial Sequence
  Synthetic
SAEETLRRITEESKRVLEEITKKYEDLERESREVLRKLREDLDRIKRELEDVLTKGGDDKDEVLTVLEKVLDELLKLHRENLRVIKELLRKVLEVDRENLEVLKRLLEKARDLLRRSGRDEKDLKKLEDELRKVKEELEKKHEASKRDIEDLERELDKVTEEVERLLRKLKEELRRAAEGSDEDRERLARLLRDHMVLHEYVNAAGITINEELNRKIIKFARENLERNRRVNKKVIEVLREAAR

SEQ ID NO: 1091 - protein, 250 aa, Artificial Sequence
  Synthetic
STEEILKRVKEILDELAKELRDIIRESLRTIEELLDELRRILEESERTLEELVKTIKDGVKDSEELLRRLKRLLEDLRRAHEELLKRLKEAVDEHRDRLRKILEELERVLKELRKRIEELRRSGDRISEKDVLRKLEEVLRKALEILERLLKKIRESARELLKIIEEVLDANIKVMEEALKTIKELLKDGPDRDHMVLHEYVNAAGITYEELRRRLRKRVKDYEDKLREIEKKVRRDAERIEEELERAKK

SEQ ID NO: 1092 - protein, 250 aa, Artificial Sequence; identical to SEQ ID NO: 1091
  Synthetic

SEQ ID NO: 1093 - protein, 247 aa, Artificial Sequence
  Synthetic
SEKEELLKLIKRVIELLKRVLEEHLRLVEDVIRRLKELLDSNEKIVREVIEDLKRLLDEVRGDKEELDRIKEKLEEVLERYKRRLEEIKRDLERMLEDYKRELKRIEEDLRRVLEEVERIATRGEGPAEALIDKLRKILERALRELDKLSKKLDELLKKVLEELEKSNREIDKLLKDVLRRVEEGGASEDLLRDHMVLHEYVNAAGITNLEDVRRVIEDVKRKSARILEEARRLIEEVERELEKIRK

SEQ ID NO: 1094 - protein, 247 aa, Artificial Sequence; identical to SEQ ID NO: 1093
  Synthetic

SEQ ID NO: 1095 - protein, 247 aa, Artificial Sequence
  Synthetic
SEAEDLEELIKELAELLKDVIRKLEKINRRLVKILEDIIRRLKEISKEAEEELRKGTVEDKDILRDLERRLREILEESDRLLEELKRRLEEILRKSKELLRRLEEVLREILKRAEEVKRSNLPKEELIKEIVKLLEELLRVIEKILEDNIRLLEELVEVIKEILEKHLRLLEELVRVIERILREVGKDKDEARDHMVLHEYVNAAGITEHEEVKRRLEEELTRLRETHKKIEKELREALKRVRDRST

SEQ ID NO: 1096 - protein, 247 aa, Artificial Sequence; identical to SEQ ID NO: 1095
  Synthetic

SEQ ID NO: 1097 - protein, 248 aa, Artificial Sequence
  Synthetic
DEDRIIEEIARLLEELLRELLELIKKLIETNRRLNEEHERAVRELARLLEELLDRLVKKGISDEKLKRIRERLKRALDDLERLHREINKRLEDLVRELEKLVREILKELKDALEELRRASARAGGEEVLRRLEEIVKKLLDLVRRILERLKEIHKDNVRLLRELNERLTRIVEDLVRLIREILREAGVDEKIRDHMVLHEYVNAAGITRLHEDLERKLKESEDELREIEARLEEKIRRLEEKLERKRR

SEQ ID NO: 1098 - protein, 251 aa, Artificial Sequence
  Synthetic
DEEEKIRTTLDLLRKLLKVLREILEELIRSNKELNERLLRLVEDSDRLLEELLKKLADDGGVDEEALRRIKKRLEDLIRTNREIEERIDRESERLAEELRRILRELEKELRRLIEDLKEVLKRGLPREELLRRLKKVVEDVLRILEEVLRVVDELDKENVRLLREWLERNKEIVEEVIRILEDLIRKGGSESRDHMVLHEYVNAAGITKHAEIAKELERLLRENRRRLEELAREAKKVLDELRKRLEDERR

SEQ ID NO: 1099 - protein, 247 aa, Artificial Sequence
  Synthetic
SKAEKLLKDLREALEKVKRRYEELERRLDEVLKEHEEIVKRLLEELEKVLKRIEEGGLPEEELEKLKKLAEKVKELLRELLRLSKELVDRVRELLKRDLDLVRRLVEIALKVLREAREQPNDEKRVEKIKRDLEKKARRVREENERIKRDLKRTADESRKRLEKLLEDLKRELDRLREDLDRGRKDIDERVERDHMVLHEYVNAAGITVIKSHEKLVRTIERLIEESIRVNEELLEVIERLLDRARK

SEQ ID NO: 1100 - protein, 243 aa, Artificial Sequence
  Synthetic
DLERVVEDIVDKAKRLLDKNLEVLKRIVDEVLRLLERLLRESRKVVKRVKEIIEELVRDEKELRRVKRALEEVLRRHEEIAKELKERLRKVAKEAEEKHKKLVEDLKRVVDEVRKKLSGPLDREKVLEVLDELVTIIAKLLDENIKVLEEVIRVIAELLERLLDSHRRLIDIIAKLLEGLRPGDEDLLTELERDHMVLHEYVNAAGITLKKELERIKREVKRLIEENARTLADIKRAVDEARK

SEQ ID NO: 1101 - protein, 246 aa, Artificial Sequence
  Synthetic
KEIEETLKELEDLNREMVETNRRVLEETRRLNKETVDRVKATLDELAKMLKKLVDDVRKGPTSEELKRLLAELEELLARVVRRVEELLKKSTDLLERAVKDSADALRRSHEVLKEVASRVKRAKDEGLPREEVLRLLRELLERHAKVLKDIVRVSEKLLREHLKVLREIVEVLEELLERILKVILDTTGGDKRDHMVLHEYVNAAGITKEVIDRYEDELRKLRKEYKEKIDKYERKLEEIERRERT

SEQ ID NO: 1102 - protein, 246 aa, Artificial Sequence
  Synthetic
SEREELLERIKEILKRVKDKLDEDLKRLKEILEKLKEKADRDLEELRRRIEEVREKLERTGRTDELVKEVLDTVRRNLENLKRLVEDILRKLEENVKNLTDLVREILKLITELIKRLEDGGLPKEVLDALRRVLEKLEELLREILERLKRSLEAVKRKIEELLKELERSLDELRRALERIRKEIGDSETAVRRDHMVLHEYVNAAGITLEELLKVLAEHLETVRELIERLKRVLEEAIEVVERVAR

SEQ ID NO: 1103 - protein, 252 aa, Artificial Sequence
  Synthetic
SLEEITKRLLELVEENLARHEEILRELLELAKRLAKEDRDILEEVLKLIEELLKLLEDNGSSEEDLKRLLKEVIEELRAVVKRVKDKWDEVVKRIEDLVKKLKELHDDTLRKLRELVRKIVTDISESGGEAEKVKRVVEKILELVERLAKVVKESVEKLLEILRELAEVSKRVAEALLRLLEELVRVIRIKDRDHMVLHEYVNAAGITRLLDELEEVHKRVKKELEDIIEENRRVVKRVRDELREIKRELDE

SEQ ID NO: 1104 - protein, 243 aa, Artificial Sequence
  Synthetic
SEAERLADEVRKAVKKSEEDNETLVREVEKAVRELKKNNKTWVDEVRKLMKRLVDLLRDGQVSDRDLLKELEEVLRRVLEALAENHERTEEILKRWLDRYAEDIERLRKVLKEVIEALKRGGSDDKRIVDELEEILRRNEDVLDKIAKRLRRLLEEDRRLLERIVRELKRLLDDLDRITKEGKSEELVRIAIRDHMVLHEYVNAAGITNNEILERLLKIVRELHKDNIKILEDLLRIIEEVLR

SEQ ID NO: 1105 - protein, 243 aa, Artificial Sequence; identical to SEQ ID NO: 1104
  Synthetic

SEQ ID NO: 1106 - protein, 243 aa, Artificial Sequence
  Synthetic
SRVEELKKLIEDILRISREVVERIARVAEDIHRINRRVLDDLRKLIEDILRTVEEILARKVSGTEAAEALRDTIRRVVDEIRKLLEEHEKRSAELLEEIRKLLEDILRRSERAVEEIRELLKKGVSTKDVLRIIEEILREHLELLERVVRRIEEILRELLKTIEEIVKRIKEILEELKEVLKRGSVGDDEVERDHMVLHEYVNAAGITYRRLLEEIKRKLEEILRRVEELHRRLRRKLEEIDR

SEQ ID NO: 1107 - protein, 249 aa, Artificial Sequence
  Synthetic
DAEEVVKRLADVLRENDETIRKVVEDLVRIAEENDRLWKKLVEDIAEILRRIVELLRRGGVPEELLDRLAKVVKSIVEKAEKILERLNRVSKAIAEKLKTIVDELNEVSKEIVKRAEDILRKGKDKETVLRALRTLVKEYADLSKEVLERVERIVREYVKLSDEVVKSLAEIVEELIRIIEDLLRKGNLDEDRDHMVLHEYVNAAGITEDVKKASEDIVREVERIVRELAKRSDEILKKLEDIVEKLRE

SEQ ID NO: 1108 - protein, 249 aa, Artificial Sequence; identical to SEQ ID NO: 1107
  Synthetic

SEQ ID NO: 1109 - protein, 243 aa, Artificial Sequence
  Synthetic
DEEETLRRLLERKVELAKEYLDVSKEVIDRTTKLLDEYLKTSKRIVDATVELLERGDLGPDELIKRLAEELERSLRELEEEIKRLKRELEESLKKLKEIIDRLAEEAEKLLAVLKRGEGSEEEALRALASLVRELIEVLRENDERLRDVLRRLIEALRKNNEILERVLRKLVRAAEERGRDESSREALEEARRDHMVLHEYVNAAGITLEAKLEKLLRDLNELTKALEEELKRLLDELKKRTD

SEQ ID NO: 1110 - protein, 243 aa, Artificial Sequence; identical to SEQ ID NO: 1109
  Synthetic

SEQ ID NO: 1111 - protein, 245 aa, Artificial Sequence
  Synthetic
TEEEVLRKVEKLIKDLLDVLRDLLRASEEVVREALRVLEELIEENKRVIEELSRALSGGSRESVESALAKNEERLKKILEDADRVLDKWRRLLEELSKKAKAVLDEVRKRLEEIKREVPETEKLRTLLTILEEILRALEKIIRDILRINERLLEKLKRILERLRETNREIDERIRKLVEEARGGSEEKLRRDLRDHMVLHEYVNAAGITELEKLLRDYKRELEEIERALEEIEKTLKRRADETRR

SEQ ID NO: 1112 - protein, 244 aa, Artificial Sequence
  Synthetic
SAEETLRRITEESKRVLEEITKKYEDLERESREVLRKLREDLDRIKRELEDVLTKGGDDKDEVLTVLEKVLDELLKLHRENLRVIKELLRKVLEVDRENLEVLKRLLEKARDLLRRSGRDEKDLKKLEDELRKVKEELEKKHEASKRDIEDLERELDKVTEEVERLLRKLKEELRRAAEGSDEDRERLARLLKRDHMVLHEYVNAAGITNEELNRKIIKFARENLERNRRVNKKVIEVLREAAR

SEQ ID NO: 1113 - protein, 250 aa, Artificial Sequence
  Synthetic
STEEILKRVKEILDELAKELRDIIRESLRTIEELLDELRRILEESERTLEELVKTIKDGVKDSEELLRRLKRLLEDLRRAHEELLKRLKEAVDEHRDRLRKILEELERVLKELRKRIEELRRSGDRISEKDVLRKLEEVLRKALEILERLLKKIRESARELLKIIEEVLDANIKVMEEALKTIKELLKDGPDERDHMVLHEYVNAAGITEELRRRLRKRVKDYEDKLREIEKKVRRDAERIEEELERAKK

SEQ ID NO: 1114 - protein, 247 aa, Artificial Sequence
  Synthetic
SEAEDLEELIKELAELLKDVIRKLEKINRRLVKILEDIIRRLKEISKEAEEELRKGTVEDKDILRDLERRLREILEESDRLLEELKRRLEEILRKSKELLRRLEEVLREILKRAEEVKRSNLPKEELIKEIVKLLEELLRVIEKILEDNIRLLEELVEVIKEILEKHLRLLEELVRVIERILREVGKDKDEAERDHMVLHEYVNAAGITHEEVKRRLEEELTRLRETHKKIEKELREALKRVRDRST

SEQ ID NO: 1115 - protein, 247 aa, Artificial Sequence; identical to SEQ ID NO: 1114
  Synthetic

SEQ ID NO: 1116 - protein, 248 aa, Artificial Sequence
  Synthetic
DEDRIIEEIARLLEELLRELLELIKKLIETNRRLNEEHERAVRELARLLEELLDRLVKKGISDEKLKRIRERLKRALDDLERLHREINKRLEDLVRELEKLVREILKELKDALEELRRASARAGGEEVLRRLEEIVKKLLDLVRRILERLKEIHKDNVRLLRELNERLTRIVEDLVRLIREILREAGVDEKIARDHMVLHEYVNAAGITLHEDLERKLKESEDELREIEARLEEKIRRLEEKLERKRR

SEQ ID NO: 1117 - protein, 251 aa, Artificial Sequence
  Synthetic
DEEEKIRTTLDLLRKLLKVLREILEELIRSNKELNERLLRLVEDSDRLLEELLKKLADDGGVDEEALRRIKKRLEDLIRTNREIEERIDRESERLAEELRRILRELEKELRRLIEDLKEVLKRGLPREELLRRLKKVVEDVLRILEEVLRVVDELDKENVRLLREWLERNKEIVEEVIRILEDLIRKGGSESERDHMVLHEYVNAAGITHAEIAKELERLLRENRRRLEELAREAKKVLDELRKRLEDERR

SEQ ID NO: 1118 - protein, 246 aa, Artificial Sequence
  Synthetic
KEIEETLKELEDLNREMVETNRRVLEETRRLNKETVDRVKATLDELAKMLKKLVDDVRKGPTSEELKRLLAELEELLARVVRRVEELLKKSTDLLERAVKDSADALRRSHEVLKEVASRVKRAKDEGLPREEVLRLLRELLERHAKVLKDIVRVSEKLLREHLKVLREIVEVLEELLERILKVILDTTGGDKARDHMVLHEYVNAAGITEVIDRYEDELRKLRKEYKEKIDKYERKLEEIERRERT

SEQ ID NO: 1119 - protein, 247 aa, Artificial Sequence
  Synthetic
RDRDVLRKVKAEIEELVARIEKVSRDALSEVKRLLDENRKIAEDVLRLIESLLRKIRDTRGDDEVVKETEEVLRDNHRLLEELIRRLIKVLEEWLRRHKKLLDEIRELLKEILRLVKESGVSEDLLRRLKRVIEELDKKLKESEEKLRRVVEKAKEDLKAVLEEHRKVLEDLKRALEEVREKLRERGSEEVVERDHMVLHEYVNAAGITHDDLSRAVEKVVRDVVRVDKELLDELARILRRLEEVIT

SEQ ID NO: 1120 - protein, 246 aa, Artificial Sequence
  Synthetic
SEREELLERIKEILKRVKDKLDEDLKRLKEILEKLKEKADRDLEELRRRIEEVREKLERTGRTDELVKEVLDTVRRNLENLKRLVEDILRKLEENVKNLTDLVREILKLITELIKRLEDGGLPKEVLDALRRVLEKLEELLREILERLKRSLEAVKRKIEELLKELERSLDELRRALERIRKEIGDSETAVRARDHMVLHEYVNAAGITEELLKVLAEHLETVRELIERLKRVLEEAIEVVERVAR

SEQ ID NO: 1121 - protein, 252 aa, Artificial Sequence
  Synthetic
SLEEITKRLLELVEENLARHEEILRELLELAKRLAKEDRDILEEVLKLIEELLKLLEDNGSSEEDLKRLLKEVIEELRAVVKRVKDKWDEVVKRIEDLVKKLKELHDDTLRKLRELVRKIVTDISESGGEAEKVKRVVEKILELVERLAKVVKESVEKLLEILRELAEVSKRVAEALLRLLEELVRVIRIKDERDHMVLHEYVNAAGITLLDELEEVHKRVKKELEDIIEENRRVVKRVRDELREIKRELDE

SEQ ID NO: 1122 - protein, 249 aa, Artificial Sequence
  Synthetic
DAEEVVKRLADVLRENDETIRKVVEDLVRIAEENDRLWKKLVEDIAEILRRIVELLRRGGVPEELLDRLAKVVKSIVEKAEKILERLNRVSKAIAEKLKTIVDELNEVSKEIVKRAEDILRKGKDKETVLRALRTLVKEYADLSKEVLERVERIVREYVKLSDEVVKSLAEIVEELIRIIEDLLRKGNLDEDVRDHMVLHEYVNAAGITDVKKASEDIVREVERIVRELAKRSDEILKKLEDIVEKLRE

SEQ ID NO: 1123 - protein, 249 aa, Artificial Sequence; identical to SEQ ID NO: 1122
  Synthetic

SEQ ID NO: 1124 - protein, 245 aa, Artificial Sequence
  Synthetic
TEEEVLRKVEKLIKDLLDVLRDLLRASEEVVREALRVLEELIEENKRVIEELSRALSGGSRESVESALAKNEERLKKILEDADRVLDKWRRLLEELSKKAKAVLDEVRKRLEEIKREVPETEKLRTLLTILEEILRALEKIIRDILRINERLLEKLKRILERLRETNREIDERIRKLVEEARGGSEEKLRRDLTRDHMVLHEYVNAAGITLEKLLRDYKRELEEIERALEEIEKTLKRRADETRR

SEQ ID NO: 1125 - protein, 245 aa, Artificial Sequence; identical to SEQ ID NO: 1124
  Synthetic

SEQ ID NO: 1126 - protein, 250 aa, Artificial Sequence
  Synthetic
STEEILKRVKEILDELAKELRDIIRESLRTIEELLDELRRILEESERTLEELVKTIKDGVKDSEELLRRLKRLLEDLRRAHEELLKRLKEAVDEHRDRLRKILEELERVLKELRKRIEELRRSGDRISEKDVLRKLEEVLRKALEILERLLKKIRESARELLKIIEEVLDANIKVMEEALKTIKELLKDGPDEVRDHMVLHEYVNAAGITELRRRLRKRVKDYEDKLREIEKKVRRDAERIEEELERAKK

SEQ ID NO: 1127 - protein, 250 aa, Artificial Sequence; identical to SEQ ID NO: 1126
  Synthetic

SEQ ID NO: 1128 - protein, 247 aa, Artificial Sequence
  Synthetic
SEKEELLKLIKRVIELLKRVLEEHLRLVEDVIRRLKELLDSNEKIVREVIEDLKRLLDEVRGDKEELDRIKEKLEEVLERYKRRLEEIKRDLERMLEDYKRELKRIEEDLRRVLEEVERIATRGEGPAEALIDKLRKILERALRELDKLSKKLDELLKKVLEELEKSNREIDKLLKDVLRRVEEGGASEDLLRKRDHMVLHEYVNAAGITEDVRRVIEDVKRKSARILEEARRLIEEVERELEKIRK

SEQ ID NO: 1129 - protein, 247 aa, Artificial Sequence
  Synthetic
SEAEDLEELIKELAELLKDVIRKLEKINRRLVKILEDIIRRLKEISKEAEEELRKGTVEDKDILRDLERRLREILEESDRLLEELKRRLEEILRKSKELLRRLEEVLREILKRAEEVKRSNLPKEELIKEIVKLLEELLRVIEKILEDNIRLLEELVEVIKEILEKHLRLLEELVRVIERILREVGKDKDEAERRDHMVLHEYVNAAGITEEVKRRLEEELTRLRETHKKIEKELREALKRVRDRST

SEQ ID NO: 1130 - protein, 247 aa, Artificial Sequence; identical to SEQ ID NO: 1129
  Synthetic

SEQ ID NO: 1131 - protein, 248 aa, Artificial Sequence
  Synthetic
DEDRIIEEIARLLEELLRELLELIKKLIETNRRLNEEHERAVRELARLLEELLDRLVKKGISDEKLKRIRERLKRALDDLERLHREINKRLEDLVRELEKLVREILKELKDALEELRRASARAGGEEVLRRLEEIVKKLLDLVRRILERLKEIHKDNVRLLRELNERLTRIVEDLVRLIREILREAGVDEKIAERDHMVLHEYVNAAGITHEDLERKLKESEDELREIEARLEEKIRRLEEKLERKRR

SEQ ID NO: 1132 - protein, 251 aa, Artificial Sequence
  Synthetic
DEEEKIRTTLDLLRKLLKVLREILEELIRSNKELNERLLRLVEDSDRLLEELLKKLADDGGVDEEALRRIKKRLEDLIRTNREIEERIDRESERLAEELRRILRELEKELRRLIEDLKEVLKRGLPREELLRRLKKVVEDVLRILEEVLRVVDELDKENVRLLREWLERNKEIVEEVIRILEDLIRKGGSESEERDHMVLHEYVNAAGITAEIAKELERLLRENRRRLEELAREAKKVLDELRKRLEDERR

SEQ ID NO: 1133 - protein, 246 aa, Artificial Sequence
  Synthetic
KEIEETLKELEDLNREMVETNRRVLEETRRLNKETVDRVKATLDELAKMLKKLVDDVRKGPTSEELKRLLAELEELLARVVRRVEELLKKSTDLLERAVKDSADALRRSHEVLKEVASRVKRAKDEGLPREEVLRLLRELLERHAKVLKDIVRVSEKLLREHLKVLREIVEVLEELLERILKVILDTTGGDKAVRDHMVLHEYVNAAGITVIDRYEDELRKLRKEYKEKIDKYERKLEEIERRERT

SEQ ID NO: 1134 - protein, 246 aa, Artificial Sequence
  Synthetic
SREEIVATLEDLARKILEVVKKLAKEIEDAWREIERAVREILKRLEELWREIEDVVRKKVDSRVAEILETVVKRVVDITRRLIEEAERVVRELVDITRKLITILEEVVRRLVEIVREASKIDDRRELEDMLRKIREVVREVIERLKKLDEDVRRVVEEVIRRLEELNKRLEDVIREVKKRLKELGLSEEAVKELRDHMVLHEYVNAAGITEIIDLLRTVIRIHEKIVEDLIKLLEELLRRLEEATR

SEQ ID NO: 1135 - protein, 246 aa, Artificial Sequence
  Synthetic
SEREELLERIKEILKRVKDKLDEDLKRLKEILEKLKEKADRDLEELRRRIEEVREKLERTGRTDELVKEVLDTVRRNLENLKRLVEDILRKLEENVKNLTDLVREILKLITELIKRLEDGGLPKEVLDALRRVLEKLEELLREILERLKRSLEAVKRKIEELLKELERSLDELRRALERIRKEIGDSETAVRAIRDHMVLHEYVNAAGITELLKVLAEHLETVRELIERLKRVLEEAIEVVERVAR

SEQ ID NO: 1136 - protein, 246 aa, Artificial Sequence; identical to SEQ ID NO: 1135
  Synthetic

SEQ ID NO: 1137 - protein, 252 aa, Artificial Sequence
  Synthetic
SLEEITKRLLELVEENLARHEEILRELLELAKRLAKEDRDILEEVLKLIEELLKLLEDNGSSEEDLKRLLKEVIEELRAVVKRVKDKWDEVVKRIEDLVKKLKELHDDTLRKLRELVRKIVTDISESGGEAEKVKRVVEKILELVERLAKVVKESVEKLLEILRELAEVSKRVAEALLRLLEELVRVIRIKDERRDHMVLHEYVNAAGITLDELEEVHKRVKKELEDIIEENRRVVKRVRDELREIKRELDE

SEQ ID NO: 1138 - protein, 247 aa, Artificial Sequence
  Synthetic
DEERLAEELERVLDRNRKLLEEALRELRRVIEENRKSVKRLLDELKRVLDELLKVLRELSRGDSDEELRKVIEDLIRKLTKVLDKVRSLVEENIERLARVLEKLERLARENLEDLKKVLDDVDKKLKDRRLVERLAELVRELIEVNKEILEMLKEIVRELLEINRTLLERLKDLVATALEIIKLLARGDGTEEDRDHMVLHEYVNAAGITEDYERAVRRLEDKLRRVRERYEAVLKRIKDKLEETKR

SEQ ID NO: 1139 - protein, 249 aa, Artificial Sequence
  Synthetic
DAEEVVKRLADVLRENDETIRKVVEDLVRIAEENDRLWKKLVEDIAEILRRIVELLRRGGVPEELLDRLAKVVKSIVEKAEKILERLNRVSKAIAEKLKTIVDELNEVSKEIVKRAEDILRKGKDKETVLRALRTLVKEYADLSKEVLERVERIVREYVKLSDEVVKSLAEIVEELIRIIEDLLRKGNLDEDVKRDHMVLHEYVNAAGITVKKASEDIVREVERIVRELAKRSDEILKKLEDIVEKLRE

SEQ ID NO: 1140 - protein, 249 aa, Artificial Sequence; identical to SEQ ID NO: 1139
  Synthetic

SEQ ID NO: 1141 - protein, 250 aa, Artificial Sequence
  Synthetic
STEEILKRVKEILDELAKELRDIIRESLRTIEELLDELRRILEESERTLEELVKTIKDGVKDSEELLRRLKRLLEDLRRAHEELLKRLKEAVDEHRDRLRKILEELERVLKELRKRIEELRRSGDRISEKDVLRKLEEVLRKALEILERLLKKIRESARELLKIIEEVLDANIKVMEEALKTIKELLKDGPDEVKRDHMVLHEYVNAAGITLRRRLRKRVKDYEDKLREIEKKVRRDAERIEEELERAKK

SEQ ID NO: 1142 - protein, 247 aa, Artificial Sequence
  Synthetic
SEKEELLKLIKRVIELLKRVLEEHLRLVEDVIRRLKELLDSNEKIVREVIEDLKRLLDEVRGDKEELDRIKEKLEEVLERYKRRLEEIKRDLERMLEDYKRELKRIEEDLRRVLEEVERIATRGEGPAEALIDKLRKILERALRELDKLSKKLDELLKKVLEELEKSNREIDKLLKDVLRRVEEGGASEDLLRKARDHMVLHEYVNAAGITDVRRVIEDVKRKSARILEEARRLIEEVERELEKIRK

SEQ ID NO: 1143 - protein, 247 aa, Artificial Sequence; identical to SEQ ID NO: 1142
  Synthetic

SEQ ID NO: 1144 - protein, 247 aa, Artificial Sequence
  Synthetic
SEAEDLEELIKELAELLKDVIRKLEKINRRLVKILEDIIRRLKEISKEAEEELRKGTVEDKDILRDLERRLREILEESDRLLEELKRRLEEILRKSKELLRRLEEVLREILKRAEEVKRSNLPKEELIKEIVKLLEELLRVIEKILEDNIRLLEELVEVIKEILEKHLRLLEELVRVIERILREVGKDKDEAERRRDHMVLHEYVNAAGITEVKRRLEEELTRLRETHKKIEKELREALKRVRDRST

SEQ ID NO: 1145 - protein, 247 aa, Artificial Sequence; identical to SEQ ID NO: 1144
  Synthetic

SEQ ID NO: 1146 - protein, 246 aa, Artificial Sequence
  Synthetic
KEIEETLKELEDLNREMVETNRRVLEETRRLNKETVDRVKATLDELAKMLKKLVDDVRKGPTSEELKRLLAELEELLARVVRRVEELLKKSTDLLERAVKDSADALRRSHEVLKEVASRVKRAKDEGLPREEVLRLLRELLERHAKVLKDIVRVSEKLLREHLKVLREIVEVLEELLERILKVILDTTGGDKAVERDHMVLHEYVNAAGITIDRYEDELRKLRKEYKEKIDKYERKLEEIERRERT

SEQ ID NO: 1147 - protein, 252 aa, Artificial Sequence
  Synthetic
SLEEITKRLLELVEENLARHEEILRELLELAKRLAKEDRDILEEVLKLIEELLKLLEDNGSSEEDLKRLLKEVIEELRAVVKRVKDKWDEVVKRIEDLVKKLKELHDDTLRKLRELVRKIVTDISESGGEAEKVKRVVEKILELVERLAKVVKESVEKLLEILRELAEVSKRVAEALLRLLEELVRVIRIKDERTRDHMVLHEYVNAAGITDELEEVHKRVKKELEDIIEENRRVVKRVRDELREIKRELDE

SEQ ID NO: 1148 - protein, 249 aa, Artificial Sequence
  Synthetic
DAEEVVKRLADVLRENDETIRKVVEDLVRIAEENDRLWKKLVEDIAEILRRIVELLRRGGVPEELLDRLAKVVKSIVEKAEKILERLNRVSKAIAEKLKTIVDELNEVSKEIVKRAEDILRKGKDKETVLRALRTLVKEYADLSKEVLERVERIVREYVKLSDEVVKSLAEIVEELIRIIEDLLRKGNLDEDVKRRDHMVLHEYVNAAGITKKASEDIVREVERIVRELAKRSDEILKKLEDIVEKLRE

SEQ ID NO: 1149 - protein, 249 aa, Artificial Sequence; identical to SEQ ID NO: 1148
  Synthetic

SEQ ID NO: 1150 - protein, 250 aa, Artificial Sequence
  Synthetic
STEEILKRVKEILDELAKELRDIIRESLRTIEELLDELRRILEESERTLEELVKTIKDGVKDSEELLRRLKRLLEDLRRAHEELLKRLKEAVDEHRDRLRKILEELERVLKELRKRIEELRRSGDRISEKDVLRKLEEVLRKALEILERLLKKIRESARELLKIIEEVLDANIKVMEEALKTIKELLKDGPDEVKRRDHMVLHEYVNAAGITRRRLRKRVKDYEDKLREIEKKVRRDAERIEEELERAKK

SEQ ID NO: 1151 - protein, 250 aa, Artificial Sequence; identical to SEQ ID NO: 1150
  Synthetic

SEQ ID NO: 1152 - protein, 247 aa, Artificial Sequence
  Synthetic
SEKEELLKLIKRVIELLKRVLEEHLRLVEDVIRRLKELLDSNEKIVREVIEDLKRLLDEVRGDKEELDRIKEKLEEVLERYKRRLEEIKRDLERMLEDYKRELKRIEEDLRRVLEEVERIATRGEGPAEALIDKLRKILERALRELDKLSKKLDELLKKVLEELEKSNREIDKLLKDVLRRVEEGGASEDLLRKAKRDHMVLHEYVNAAGITVRRVIEDVKRKSARILEEARRLIEEVERELEKIRK

SEQ ID NO: 1153 - protein, 247 aa, Artificial Sequence
  Synthetic
SEAEDLEELIKELAELLKDVIRKLEKINRRLVKILEDIIRRLKEISKEAEEELRKGTVEDKDILRDLERRLREILEESDRLLEELKRRLEEILRKSKELLRRLEEVLREILKRAEEVKRSNLPKEELIKEIVKLLEELLRVIEKILEDNIRLLEELVEVIKEILEKHLRLLEELVRVIERILREVGKDKDEAERRRRDHMVLHEYVNAAGITVKRRLEEELTRLRETHKKIEKELREALKRVRDRST

SEQ ID NO: 1154 - protein, 247 aa, Artificial Sequence; identical to SEQ ID NO: 1153
  Synthetic

SEQ ID NO: 1155 - protein, 248 aa, Artificial Sequence
  Synthetic
DEDRIIEEIARLLEELLRELLELIKKLIETNRRLNEEHERAVRELARLLEELLDRLVKKGISDEKLKRIRERLKRALDDLERLHREINKRLEDLVRELEKLVREILKELKDALEELRRASARAGGEEVLRRLEEIVKKLLDLVRRILERLKEIHKDNVRLLRELNERLTRIVEDLVRLIREILREAGVDEKIAEEIRDHMVLHEYVNAAGITDLERKLKESEDELREIEARLEEKIRRLEEKLERKRR

SEQ ID NO: 1156 - protein, 251 aa, Artificial Sequence
  Synthetic
DEEEKIRTTLDLLRKLLKVLREILEELIRSNKELNERLLRLVEDSDRLLEELLKKLADDGGVDEEALRRIKKRLEDLIRTNREIEERIDRESERLAEELRRILRELEKELRRLIEDLKEVLKRGLPREELLRRLKKVVEDVLRILEEVLRVVDELDKENVRLLREWLERNKEIVEEVIRILEDLIRKGGSESEEKVRDHMVLHEYVNAAGITIAKELERLLRENRRRLEELAREAKKVLDELRKRLEDERR

SEQ ID NO: 1157 - protein, 247 aa, Artificial Sequence
  Synthetic
RDRDVLRKVKAEIEELVARIEKVSRDALSEVKRLLDENRKIAEDVLRLIESLLRKIRDTRGDDEVVKETEEVLRDNHRLLEELIRRLIKVLEEWLRRHKKLLDEIRELLKEILRLVKESGVSEDLLRRLKRVIEELDKKLKESEEKLRRVVEKAKEDLKAVLEEHRKVLEDLKRALEEVREKLRERGSEEVVEELLRDHMVLHEYVNAAGITLSRAVEKVVRDVVRVDKELLDELARILRRLEEVIT

SEQ ID NO: 1158 - protein, 249 aa, Artificial Sequence
  Synthetic
DAEEVVKRLADVLRENDETIRKVVEDLVRIAEENDRLWKKLVEDIAEILRRIVELLRRGGVPEELLDRLAKVVKSIVEKAEKILERLNRVSKAIAEKLKTIVDELNEVSKEIVKRAEDILRKGKDKETVLRALRTLVKEYADLSKEVLERVERIVREYVKLSDEVVKSLAEIVEELIRIIEDLLRKGNLDEDVKRARDHMVLHEYVNAAGITKASEDIVREVERIVRELAKRSDEILKKLEDIVEKLRE

SEQ ID NO: 1159 - protein, 250 aa, Artificial Sequence
  Synthetic
STEEILKRVKEILDELAKELRDIIRESLRTIEELLDELRRILEESERTLEELVKTIKDGVKDSEELLRRLKRLLEDLRRAHEELLKRLKEAVDEHRDRLRKILEELERVLKELRKRIEELRRSGDRISEKDVLRKLEEVLRKALEILERLLKKIRESARELLKIIEEVLDANIKVMEEALKTIKELLKDGPDEVKRRRDHMVLHEYVNAAGITRRLRKRVKDYEDKLREIEKKVRRDAERIEEELERAKK

SEQ ID NO: 1160 - protein, 248 aa, Artificial Sequence
  Synthetic
DEDRIIEEIARLLEELLRELLELIKKLIETNRRLNEEHERAVRELARLLEELLDRLVKKGISDEKLKRIRERLKRALDDLERLHREINKRLEDLVRELEKLVREILKELKDALEELRRASARAGGEEVLRRLEEIVKKLLDLVRRILERLKEIHKDNVRLLRELNERLTRIVEDLVRLIREILREAGVDEKIAEEIERDHMVLHEYVNAAGITLERKLKESEDELREIEARLEEKIRRLEEKLERKRR

SEQ ID NO: 1161 - protein, 248 aa, Artificial Sequence; identical to SEQ ID NO: 1160
  Synthetic

SEQ ID NO: 1162 - protein, 252 aa, Artificial Sequence
  Synthetic
SLEEITKRLLELVEENLARHEEILRELLELAKRLAKEDRDILEEVLKLIEELLKLLEDNGSSEEDLKRLLKEVIEELRAVVKRVKDKWDEVVKRIEDLVKKLKELHDDTLRKLRELVRKIVTDISESGGEAEKVKRVVEKILELVERLAKVVKESVEKLLEILRELAEVSKRVAEALLRLLEELVRVIRIKDERTLRRDHMVLHEYVNAAGITLEEVHKRVKKELEDIIEENRRVVKRVRDELREIKRELDE

SEQ ID NO: 1163 - protein, 249 aa, Artificial Sequence
  Synthetic
DAEEVVKRLADVLRENDETIRKVVEDLVRIAEENDRLWKKLVEDIAEILRRIVELLRRGGVPEELLDRLAKVVKSIVEKAEKILERLNRVSKAIAEKLKTIVDELNEVSKEIVKRAEDILRKGKDKETVLRALRTLVKEYADLSKEVLERVERIVREYVKLSDEVVKSLAEIVEELIRIIEDLLRKGNLDEDVKRALRDHMVLHEYVNAAGITASEDIVREVERIVRELAKRSDEILKKLEDIVEKLRE

SEQ ID NO: 1164 - protein, 249 aa, Artificial Sequence; identical to SEQ ID NO: 1163
  Synthetic

SEQ ID NO: 1165 - protein, 250 aa, Artificial Sequence
  Synthetic
STEEILKRVKEILDELAKELRDIIRESLRTIEELLDELRRILEESERTLEELVKTIKDGVKDSEELLRRLKRLLEDLRRAHEELLKRLKEAVDEHRDRLRKILEELERVLKELRKRIEELRRSGDRISEKDVLRKLEEVLRKALEILERLLKKIRESARELLKIIEEVLDANIKVMEEALKTIKELLKDGPDEVKRRLRDHMVLHEYVNAAGITRLRKRVKDYEDKLREIEKKVRRDAERIEEELERAKK

SEQ ID NO: 1166 - protein, 250 aa, Artificial Sequence; identical to SEQ ID NO: 1165
  Synthetic

SEQ ID NO: 1167 - protein, 251 aa, Artificial Sequence
  Synthetic
DEEEKIRTTLDLLRKLLKVLREILEELIRSNKELNERLLRLVEDSDRLLEELLKKLADDGGVDEEALRRIKKRLEDLIRTNREIEERIDRESERLAEELRRILRELEKELRRLIEDLKEVLKRGLPREELLRRLKKVVEDVLRILEEVLRVVDELDKENVRLLREWLERNKEIVEEVIRILEDLIRKGGSESEEKVRDRDHMVLHEYVNAAGITKELERLLRENRRRLEELAREAKKVLDELRKRLEDERR

SEQ ID NO: 1168 - protein, 249 aa, Artificial Sequence
  Synthetic
DAEEVVKRLADVLRENDETIRKVVEDLVRIAEENDRLWKKLVEDIAEILRRIVELLRRGGVPEELLDRLAKVVKSIVEKAEKILERLNRVSKAIAEKLKTIVDELNEVSKEIVKRAEDILRKGKDKETVLRALRTLVKEYADLSKEVLERVERIVREYVKLSDEVVKSLAEIVEELIRIIEDLLRKGNLDEDVKRALERDHMVLHEYVNAAGITSEDIVREVERIVRELAKRSDEILKKLEDIVEKLRE

SEQ ID NO: 1169 - protein, 249 aa, Artificial Sequence; identical to SEQ ID NO: 1168
  Synthetic

SEQ ID NO: 1170 - protein, 250 aa, Artificial Sequence
  Synthetic
STEEILKRVKEILDELAKELRDIIRESLRTIEELLDELRRILEESERTLEELVKTIKDGVKDSEELLRRLKRLLEDLRRAHEELLKRLKEAVDEHRDRLRKILEELERVLKELRKRIEELRRSGDRISEKDVLRKLEEVLRKALEILERLLKKIRESARELLKIIEEVLDANIKVMEEALKTIKELLKDGPDEVKRRLERDHMVLHEYVNAAGITLRKRVKDYEDKLREIEKKVRRDAERIEEELERAKK

SEQ ID NO: 1171 - protein, 250 aa, Artificial Sequence; identical to SEQ ID NO: 1170
  Synthetic

SEQ ID NO: 1172 - protein, 251 aa, Artificial Sequence
  Synthetic
DEEEKIRTTLDLLRKLLKVLREILEELIRSNKELNERLLRLVEDSDRLLEELLKKLADDGGVDEEALRRIKKRLEDLIRTNREIEERIDRESERLAEELRRILRELEKELRRLIEDLKEVLKRGLPREELLRRLKKVVEDVLRILEEVLRVVDELDKENVRLLREWLERNKEIVEEVIRILEDLIRKGGSESEEKVRDTRDHMVLHEYVNAAGITELERLLRENRRRLEELAREAKKVLDELRKRLEDERR

SEQ ID NO: 1173 - protein, 252 aa, Artificial Sequence
  Synthetic
SLEEITKRLLELVEENLARHEEILRELLELAKRLAKEDRDILEEVLKLIEELLKLLEDNGSSEEDLKRLLKEVIEELRAVVKRVKDKWDEVVKRIEDLVKKLKELHDDTLRKLRELVRKIVTDISESGGEAEKVKRVVEKILELVERLAKVVKESVEKLLEILRELAEVSKRVAEALLRLLEELVRVIRIKDERTLREVRDHMVLHEYVNAAGITEVHKRVKKELEDIIEENRRVVKRVRDELREIKRELDE

SEQ ID NO: 1174 - protein, 251 aa, Artificial Sequence
  Synthetic
DEEEKIRTTLDLLRKLLKVLREILEELIRSNKELNERLLRLVEDSDRLLEELLKKLADDGGVDEEALRRIKKRLEDLIRTNREIEERIDRESERLAEELRRILRELEKELRRLIEDLKEVLKRGLPREELLRRLKKVVEDVLRILEEVLRVVDELDKENVRLLREWLERNKEIVEEVIRILEDLIRKGGSESEEKVRDTERDHMVLHEYVNAAGITLERLLRENRRRLEELAREAKKVLDELRKRLEDERR

SEQ ID NO: 1175 - protein, 186 aa, Artificial Sequence
  Synthetic
SAEDSIRELLERDERLLEEARKEAKRLNEENERRDHMVLHEYVNAAGITKRLLDDIRKKIKGEKLREIEELVRRVKRTIEKLLEEVKKSVEDSSKRIEELLEAVERSVERTKEEIRRLLDEVRKDRKEELVKRVEERIKRLHDENRRLVKEVIEEVEKLIRDNEKLAEDIEREIRRLLKELDEAAK

SEQ ID NO: 1176 - protein, 181 aa, Artificial Sequence
  Synthetic
SRVERLSAEIKKLIDENRRVAEELLRELEKLLKRDHMVLHEYVNAAGITSRKLEELARAGAPEEDIRRLVEESKELIKRLLRDIERTTREINEVIKRVVETIRRTTDEINRRIEELVRKIDRGEAREDMDRLVRENERLLKKVEDDLRKLSEENKRLVDRARERLARLLEENERLVDERRK

SEQ ID NO: 1177 - protein, 182 aa, Artificial Sequence
  Synthetic
RVEDALRKLLDDVRRLVEEAERRLRTSNDKSRRRDHMVLHEYVNAAGITEKLVRDVRRRIRDEDVKRVLEELLKRDHDVVRRVLERIDEMLERNSRLVKRVLEDIRRLLKRVREVVERIKRVRSKVVEEVLKELEELIKTAKKIIEDVLRASEDTIRRLEEIIRKVEEDSKRIIEEIERAAR

SEQ ID NO: 1178 - protein, 183 aa, Artificial Sequence
  Synthetic
KVEKRLTDLLKTVADEVKRVEDELRETVRESKERDHMVLHEYVNAAGITEKTVKDAERRVSEDLVRRIRKVLDENREVNDRVVKEDERILEENERVNRKVVEKIRDILRKIEEVVRRAAEEIRDEEVVKKVEKEIRELLERLKEEADRVRERSKKILTDLKKSSEDVKRESERMLKKLEDEIR

SEQ ID NO: 1179 - protein, 184 aa, Artificial Sequence
  Synthetic
SLEEVIKTVRKLLEEVERRLREVVERAERMLEERDHMVLHEYVNAAGITKDVEKALRDKNVSEEIEEKLRKIKEELERDNEKVNRDNERSVETLRRLLDRVRKEVKDIAKELEERLKEVERKSRDDRIVEKLLRDAERIVKRLRELIEKLREEVEKIVDENRKTVEELRRRNEEIVRRLRREIE

SEQ ID NO: 1180 - protein, 177 aa, Artificial Sequence
  Synthetic
KEEEDLEREVKRLEDKVREDAKKLEEVVKTVEKRDHMVLHEYVNAAGITADRVRRLTERKLDEETLRKVKEDLKRTLERLKRENEKSLEELRDILRRLKKENDDTLKELRDELKRLTDSGASEDVIRKMEEIIKRLEEVSREVEKRLRRIIRELERVSKEVLDRLREIIEKLDRDAT

SEQ ID NO: 1181 - protein, 175 aa, Artificial Sequence
  Synthetic
SELEKVVDDVRRRLDRLLETSEKLLEDATKRLKRDHMVLHEYVNAAGITLERLKTVLERRETDKRELLKENKEILERTRELSERNLKEVEDILREVEEEVRKNLRRIEKVLEEVRRKLRSELLKRVEERIKRVLDESKKILKEIADEVRRVLERDKELLKRLEDKNREVSERIRK

SEQ ID NO: 1182 - protein, 180 aa, Artificial Sequence
  Synthetic
SKEEVLREIERLHKETIRRIEEVLREATELHKRRDHMVLHEYVNAAGITREVIEDVRRADTPNVEELLRELKDALDKVRDHNRKTLKKNEDVVREIEKEVRELLKEDEDVLRRIEKVMRDGRVDARELLEESRREVERSEKEVERLLRKSRKVVEEVRKLSEENDREVKKILEEVKRRLD

SEQ ID NO: 1183 - protein, 187 aa, Artificial Sequence
  Synthetic
SEKERLKEELEKLSKEIEDILRDDKRSDDELRRRDHMVLHEYVNAAGITNEELKRMLEEARKRVSEDELRAIKKEIEDLNRRNEESLRAIEEKIKRLNDENRKSLEEIRRRLKRLVEEVDELRKRDNREELLRRLLEKLKRMAEKLKRDIEDNNRKLRKVATELAKEIEDNSEKLREDAKRLSEKIK

SEQ ID NO: 1184 - protein, 177 aa, Artificial Sequence
  Synthetic
SAIEKVKEVVERVLETVRDSVRRSHEESKRLIDRDHMVLHEYVNAAGITIERVRRKGIPERMVEKLERDLEELLKEIKDTIDRIEEELRTSNRRLKETNDEIAKRLEELLRELSRDRDKDAVEDVLRRIEELIRDLNKKNDDNVRRVKEVIDRAEKLVRDLLREIRKLIEKLIRDTE

SEQ ID NO: 1185 - protein, 177 aa, Artificial Sequence
  Synthetic
SVLEEVRRRVEELLKTVKESVDRSHERSERLIERDHMVLHEYVNAAGITVERVREKGIPEDRVKRIEDKLREELERLERENRKIEEDLKRSNDELRRENERIAERLEELLRELSRDTNDKVARDVLEEIERLIREANERNKRNLEDVERVIRELNKENERVLREVEKKIEKLIRETE

SEQ ID NO: 1186 - protein, 183 aa, Artificial Sequence
  Synthetic
KDAEDLERRVRELVEENNRVSKRLAEEVTRLVKRDHMVLHEYVNAAGITAKELLDMKRRGEVREEEVKRVLREIEELLREITEHSKEVLKTIEKLLRDSLEHSRRVLEEIERLLETILRKSKDSERLKKLVDELRETLERSLRENEKVADELRKRAEKSLEDVKRVVDELRKIVDDVLKRVED

SEQ ID NO: 1187 - protein, 183 aa, Artificial Sequence
  Synthetic
SEIEKLVEDVRKLVEDNLRHSEEVHRRNRRLIERDHMVLHEYVNAAGITVEELRELAERGEIREEEARKVLEEIKRLLDEIRRHSEEVLKEIERTLKENLKHSEEVLRRIEERLEDIKRKDKDSERVRTLVDRLREELKRSLDESEKLNRESRKRVTRSLEKVDDLVRELEKLARKVLEEVKT

SEQ ID NO: 1188 - protein, 181 aa, Artificial Sequence
  Synthetic
EEIERALREMRELSRTHKELVEKILRDIAELAKRDHMVLHEYVNAAGITIDEIADEIRKEDKKEELKRKIDELRRRAEELLKESKEHLKRLEDTVRELIERLKETLKKVEEDLKRILEKLEKSRELDEIAKDVKRLIDENRELLKRVEDEVRRLIRKLEELNRRTEEEVKKLIKKLEDDLK

SEQ ID NO: 1189 - protein, 174 aa, Artificial Sequence
  Synthetic
SEIEELEKRIDELLKELRDLSRRIAEEVKRLLERDHMVLHEYVNAAGITLERLKRKGVPEEELRRVEEEVERVVRESRKLNKETEDELRRLLEEIKESNDRVEKRARELKKLLRDGKDVEEVLRRLEKLVREDKERLKKVLKDARDLIKKDKDLNEKLSRELEKLVRELEERAR

SEQ ID NO: 1190 - protein, 174 aa, Artificial Sequence
  Synthetic
REIEEAAKDLDRLLEENKKLVKEVEEELRRLLKRDHMVLHEYVNAAGITLEELRRRGVPEEELKEVEERARRVIEESRRSSKELEKRLRELLEELRRSTKELEDRLREIKKLLRNGKDVEEVLRRVRKLSRENKEKIRKILEDVKKLSEDNKRRNEELSRRVKTLVDEIKKRAT

SEQ ID NO: 1191 - protein, 178 aa, Artificial Sequence
  Synthetic
SEIERIERENDRLNEENKKITEDIERELKRLLERDHMVLHEYVNAAGITLRELRKRNGGREEVLKEVEDRLRRIVEEIRRSDKRLEDIAREVKKRIRESDEELRRVSEEITRRLRKVRDEKTLRELLKRSEELSKENKDRLKKLLDDLREVSKKNKEDLKRLLREVREVARKVKERAN

SEQ ID NO: 1192 - protein, 182 aa, Artificial Sequence
  Synthetic
DEIETVLDEVRRLHEDAKRRLEEMIDEVRKLNERDHMVLHEYVNAAGITLRTVKEEVERAGLDKGKLEELEERLERVREDVERILREIKRRNEKTLEDSERILEENKERNRTVLKKLKELRDRGSDAREALKESRKVVEESRESVRRVLEKNRRVVEESKRLAEELLRRVKKVVDEIRKRVE

SEQ ID NO: 1193 - protein, 174 aa, Artificial Sequence
  Synthetic
EELERILDKVRKVIEEVRKRLRDDLRTVEKVLKRDHMVLHEYVNAAGITLERVEEAARRGRDRREIKEELKKVLDDLRELLRALEEKNRRVNKENEDSLRKIEEDLRDVLRKLEEEIKGREVLRKVRELLRTIREEVERVLRKSNELSTRIKKRIDDVLETLERLLKELDDKLR

SEQ ID NO: 1194 - protein, 178 aa, Artificial Sequence
  Synthetic
SSKDEIRRRVEEVVERSDEIVKRSREHVKTVVDRDHMVLHEYVNAAGITVKKLDKIRKDGGSEETLKRVLDELREILKELKEEVKKVKRKLEKVVKENRDTIREVEERNRKILDELRKRGVEERALREVEEISRKSEEKLRRVLKESEDIAKEAEDRLKTVLERVERIADEVLKRLTK

SEQ ID NO: 1195 - protein, 182 aa, Artificial Sequence
  Synthetic
SDADRVAEELKKLVEDSRRENERVIEESKRLVKRDHMVLHEYVNAAGITVDKLRDILEKEKDKKTLDDIVREILERLKRLLEKVEDENRKSHEENKRLLEDVKRKNKRISDELKRLLEEIERRNVDVDKVRETVKRLLEENKRVMEKTEEVAKKSSEDIKRVADETRRRAEELLKEVDELRK

SEQ ID NO: 1196 - protein, 182 aa, Artificial Sequence
  Synthetic
DEVDELLKRLRKLVDEVRKENDKMVKESKRLVERDHMVLHEYVNAAGITLEELEKILKDTEDKDTLRKIVEEIKRRLRRLLEELKRIIEKALRDNKKLLDEVRKRNKEISDELRRLLEEIRRRNVRVEDIEREAERLLRENEELLRRSEEVIRRSTEKIKKVLRDAEERAREILKRVEDAAK

SEQ ID NO: 1197 - protein, 175 aa, Artificial Sequence
  Synthetic
SEVDEVLREAKRIVDEVHKDNERATEESRRLVKRDHMVLHEYVNAAGITVKEVKDANIDEKLVTEILKEIEEALKEAARRNKEVKDRLRELSRRVSERNREILEELKERLDRVRERRKDVKELEREVEKLLKRIEESLRRHRKENKRLLEELDRSLRELAKIVKEVLDEIRERTR

SEQ ID NO: 1198 - protein, 175 aa, Artificial Sequence
  Synthetic
SEMDDVLKKLAETVKRIIERLKKLTDDSRRLVERDHMVLHEYVNAAGITVRKAEERNIDEKDVRKLLEDLKKKSEEVAERNKRILDTLREISKRAEDEVRKVLKELEKTLKELEDRRPDVRELSEEVKKLLDEVRKALKRHKDENDKLLKEIEDSLRRHKEENDRLLEKLKESTR

SEQ ID NO: 1199 - protein, 186 aa, Artificial Sequence
  Synthetic
SEVDEVRKTLEDLLRRLDEENKDIIRRNKELLDRDHMVLHEYVNAAGITLDELRKILEKLKDRETLTRIIEEIEKRARELIKRLRDEIRKIEEESKKSIEDSRKRNDEIRKRLEELIKDLRDKIKDSEELARRITELEKRVREVIERLKEKNKRLEDDSRRVITELRKKLKDLEDRVREEIEELRK

SEQ ID NO: 1200 - protein, 186 aa, Artificial Sequence
  Synthetic
SRVDEVIERLERLLRELDKINRDMIEDDKRLNTRDHMVLHEYVNAAGITLEELEEIRKKLSDEKTLEEIIERVERRLEELIERSKRRNREILERSKELIERSKKTNEEILRRAEELIKRLREEVKDIKEALDKIRRLEERARRVIEELDEKNRRALERSKENVKRLDERNERLRKELEEKVRRLRK

SEQ ID NO: 1201 - protein, 176 aa, Artificial Sequence
  Synthetic
REAEEAKEEVEELNRRNKKELDDARRRVDELDKRDHMVLHEYVNAAGITVEELERVKEEGRSDDRLREKIERMLKTSADELERLKEENKRALRDLAERLRELIERNRRKLEEITRRTVPDKDVLKRLAELIKESIRELERVLEELAEKIDRSLKELDDVLRKNETDLKRVIEDLKR

SEQ ID NO: 1202 - protein, 179 aa, Artificial Sequence
  Synthetic
REAEEVERKVEELNRRNRKVLDDARKESEEVVRRDHMVLHEYVNAAGITLRELDKRKRDGTSEEVIKRLIDRVRKILEDIRRLVDELIKRNERIVEKLTRIVEELIRRNKKLLEDIRRELVKVDEVLRRLAEDIERSIRELEKVLRELERIHRELIKELKEVLKRLEKDAKEVIERLRT

SEQ ID NO: 1203 - protein, 174 aa, Artificial Sequence
  Synthetic
SEEEVLREAAKTVEKLLDEIRRSLEKVSKRVEDRDHMVLHEYVNAAGITRELLEELRKNNVDRTLLEDVRRKLERIEERNEEMNDRSRRKLEELRERNRKILEDIRRTLEDLKRRQLPKDDVERTLREIAKLVDEVDKENKRALRENEERVKTLNRENEEMLKRIEEEVRRATK

SEQ ID NO: 1204 - protein, 183 aa, Artificial Sequence
  Synthetic
RVDERLDTVLKRVEETVRENKKKNDELLERSKERDHMVLHEYVNAAGITRREAEKLKREVTKEEVKKIIDEVLKEIEDLLRTVKEELDRALERNREVVEETKRRIDRVLKEIEKLIRDVKRDRKEEVVKEVEERIKKLLKEVNDTSKDAERRLRETNERLNEIVKEVEKRIRELSEEVRKRVK

SEQ ID NO: 1205 - protein, 183 aa, Artificial Sequence
  Synthetic
SVDERLDEVLERVKEDMDRNRRKNDESLREDEERDHMVLHEYVNAAGITEERVRELKKRVKDERVKEFLDRVLEEIRKSAEEVKTIIDEVHKESEETVRRTKKIIEEVLRRIEELIRRVKKDRKEEVVKTVEEDIKRLLKEVNKVSDEAHKRNKELNERVNRVNKEAHKRNEDLLREAERKVR

SEQ ID NO: 1206 - protein, 174 aa, Artificial Sequence
  Synthetic
SESDEVIRDLARLLDELARHVDDSVRRMDEVVKRDHMVLHEYVNAAGITVKEVEKKPGDERVERMVAEIERLVAEVLEELKKKYEKLKREVEENLRRLEETVRDIVEKARKVTEKGVSKEKIDRIIRELERILEEAKKKHEDVLRRLEDSLRRVAELLKAALDRLREIVDRLRR

SEQ ID NO: 1207 - protein, 172 aa, Artificial Sequence
  Synthetic
SRAETVLKEVTDKIKKLADSSDELLRRNKENIDRDHMVLHEYVNAAGITIEEIEKGSVDEETLEELIRRVEAELEAHHRELEKNSREDEKRNRDHHAKLEEEMRRVEERLEREGIDDEVVKRVRDLLDTVRRRNEKVNEDVKRMNDKLRRDNEDVIRRVEKLLRELEEKRRT

SEQ ID NO: 1208 - protein, 176 aa, Artificial Sequence
  Synthetic
SVDEVLKEIEDALRRLKEEVERVLKENEDELRRRDHMVLHEYVNAAGITESLKRGVGESDEVDRVVDEIAKLSAEILEKVKKVVKEIRDSLETVKRRVDDVVRRLKELLDEIKRGSDEKAIRDVAKEIRDRLKELEEEIEEVTRRNLKLLADVEEEIRRVHEKTRRLLETVLRRAT

SEQ ID NO: 1209 - protein, 186 aa, Artificial Sequence
  Synthetic
SEVDEIIKELERLLAEIARENERIIRESRKLADRDHMVLHEYVNAAGITVARLADAVRRKGSESEEVKKLIEDVLREIERLLKRIEEENREVVKRNSELVERVRAINEEILRRVAELVEKIARDIGDKDEVTKVKKVADDVLAEIKKLDDETRRVIEDTNKKIADLDKATRDVVRKVLEEVKKLEK

SEQ ID NO: 1210 - protein, 181 aa, Artificial Sequence
  Synthetic
SEVDDVLRRLEELIKTLEDINAKSLEDIKKLIDRDHMVLHEYVNAAGITIRELREAKKGIDSREAEEIAKRVLEELKRTSDDLRKKVERVDEDLRRLLRENHERNKKILRDLERLLRDAARRGVPKEALDRMREEIRRLEEESRKSDETIERLIRELRRRVEEVLKTSTDLIRELEEEVKK

SEQ ID NO: 1211 - protein, 181 aa, Artificial Sequence; identical to SEQ ID NO: 1210
  Synthetic

SEQ ID NO: 1212 - protein, 234 aa, Artificial Sequence
  Synthetic
SAKETIRKLIEENKDIIRKLAEKLKRLLEESERRDHMVLHEYVNAAGITERALRRVGSGIDEELLKELEKELARLEEELKEILDRVRDLHRRLAEEIRKILEESKKLNEELEDRLRKDGDVEELLELLERVHATDVRLLRELLKLLKKVHEDVVSLLERLLELLKRVLDRIVEELGLSDKELEKLLEDLEREIRRLAKRLKELSDRLEEKIRKIKRELDDLSARLREKIERTRK

SEQ ID NO: 1213 - protein, 244 aa, Artificial Sequence
  Synthetic
SAEETLRRITEESKRVLEEITKKYEDLERESRERDHMVLHEYVNAAGITEDVLTKGGDDKDEVLTVLEKVLDELLKLHRENLRVIKELLRKVLEVDRENLEVLKRLLEKARDLLRRSGRDEKDLKKLEDELRKVKEELEKKHEASKRDIEDLERELDKVTEEVERLLRKLKEELRRAAEGSDEDRERLARLLKALADKLIRVLEEILKINEELNRKIIKFARENLERNRRVNKKVIEVLREAAR

SEQ ID NO: 1214 - protein, 238 aa, Artificial Sequence
  Synthetic
SEAEKIREALETNLRLLEELIKRLKEILDTHNERDHMVLHEYVNAAGITLELLEEGGLDEEVLREVKRLVDELRKEARRVLDEHEKLVRKIKKEAEDVARESEEIIKEVEDKLKGLDREELLERVRRVLKKSDDLIAELVRRALKILEELTRLLAELLKKVVEILRRIVELVERVLTKKGAPKEDLERLRRKVEELEDRLRRLLEKLARDSAELMRELERILDRYARESEELDRRLAE

SEQ ID NO: 1215 - protein, 238 aa, Artificial Sequence; identical to SEQ ID NO: 1214
  Synthetic

SEQ ID NO: 1216 - protein, 242 aa, Artificial Sequence
  Synthetic
SEKERLMRLLDKLKDLNRRLVERIKELLDKALERDHMVLHEYVNAAGITKELVERGGVPEELLTRIDELIKKLEDEARKISKEVKRLIDELKKRLEDIHREVDRLIRELKETLKGVTDKDELLRRVAEVLERIARLSEELIREVKEVLEKIVELSRELLKRVLDVLRRIAELLEDALRKGNVSEETVRRLREALKKLEDDLRKIERDAEREYKKLKDELEELTERYRREIRKLKEELKADRK

SEQ ID NO: 1217 - protein, 242 aa, Artificial Sequence; identical to SEQ ID NO: 1216
  Synthetic

SEQ ID NO: 1218 - protein, 247 aa, Artificial Sequence
  Synthetic
SEAEDLEELIKELAELLKDVIRKLEKINRRLVKRDHMVLHEYVNAAGITEEELRKGTVEDKDILRDLERRLREILEESDRLLEELKRRLEEILRKSKELLRRLEEVLREILKRAEEVKRSNLPKEELIKEIVKLLEELLRVIEKILEDNIRLLEELVEVIKEILEKHLRLLEELVRVIERILREVGKDKDEAERRRRELKDKLDRLREEHEEVKRRLEEELTRLRETHKKIEKELREALKRVRDRST

SEQ ID NO: 1219 - protein, 240 aa, Artificial Sequence
  Synthetic
SDKEEIKRRVEKTARDLETEHDKIKKRLEDTVRRDHMVLHEYVNAAGITLRKIEKTLREGDGDATDLVDKLLETVKRLNEEVLRTVKKIADELRRLVEEVLRVLRESNETLARLLEEGNVGDEVRERLEEVLRRTEEIIKTLEEIVKRLLDELRRLVEELRRISKKLKDELDKIKEKGKDEKRLIEEVVRLLRENLDVVRRILEALAKLIKELLEALEEVLRRNKELIRELLRVLDEALK

SEQ ID NO: 1220 - protein, 240 aa, Artificial Sequence; identical to SEQ ID NO: 1219
  Synthetic

SEQ ID NO: 1221 - protein, 248 aa, Artificial Sequence
  Synthetic
DEEERVKKLLTDLRRLLRKLHEESKKLLDELRKRDHMVLHEYVNAAGITERRLREAEKKLPGTRVLKLVADVVKKVLDAIRDLNRKLEEIIDEALKLLEELDDILRRVVEEALRLLKEIKDTKGDREEVKKRVEDILKRLEELVKEYEDRVREIKKRLRRALEELRDEYRKIREDIERVLDELRKGGVPEELLRVLEELVRTLKKLLDENLKMVERLIRELEKVLDDHERKVRRLIEELLEVLDRDAK

SEQ ID NO: 1222 - protein, 238 aa, Artificial Sequence
  Synthetic
DADELLRRLAEEVERVIREAEDLLRRWKETIKKRDHMVLHEYVNAAGITEDVIRELTKTKGDEELAKLIKDLLDTNEKVNRDLLRLIKKLLKDAERVNRRLLELIEELLEELKRVAKDLGLREEADKKLRDIADRARKELEDYERRLKELLKTVEDALRKAEEDSRKLKRDVEELLERGRLRKDDLEDILRKNLDRLRKLLERLREILRENLEALKKTLKRLEDVVREILEDLKRERK

SEQ ID NO: 1223 - protein, 238 aa, Artificial Sequence; identical to SEQ ID NO: 1222
  Synthetic

SEQ ID NO: 1224 - protein, 231 aa, Artificial Sequence
  Synthetic
DKAEVLREALKLLKDLLEELIKIHEESLKRILDRDHMVLHEYVNAAGITKELLERSGLDERELRKVERMATESLRTIAKLKEELRDLARRSLEKLREDLKRVDDTLRKVEEKVRRTGPSEELIEELIRTIEKLLKEIVRINEEVLKAVRELLKTLLKLSEDVVRRIEEILRKGGVPEEIDRELKRVVEELRRLHEEIKERLDDVARRSEEELRRIIKKLKEVVKEIRKKLK

SEQ ID NO: 1225 - protein, 236 aa, Artificial Sequence
  Synthetic
STREKAKKVLDTLRADNEDMKRVVEKILRALKRRDHMVLHEYVNAAGITKRILKEVGVSEEALKEIEDTLKRVLEEIKRLLDESKKLLEDVEREIREILKTSEELLERIEREIETVGSDEKTLAEILKRLLELNEEMNRRLLKILRDLLRLNEEVIRRLLAVLERLLDALKEALDRGDVPEDLLRKLEEELRRIKEKLRKALEELEREHRELEKELDKLHDESRKEHERIEEELRR

SEQ ID NO: 1226 - protein, 236 aa, Artificial Sequence; identical to SEQ ID NO: 1225
  Synthetic

SEQ ID NO: 1227 - protein, 247 aa, Artificial Sequence
  Synthetic
SKAEKLLKDLREALEKVKRRYEELERRLDEVLKRDHMVLHEYVNAAGITLKRIEEGGLPEEELEKLKKLAEKVKELLRELLRLSKELVDRVRELLKRDLDLVRRLVEIALKVLREAREQPNDEKRVEKIKRDLEKKARRVREENERIKRDLKRTADESRKRLEKLLEDLKRELDRLREDLDRGRKDIDERVEELIERLIRIIERLLREVIKSHEKLVRTIERLIEESIRVNEELLEVIERLLDRARK

SEQ ID NO: 1228 - protein, 246 aa, Artificial Sequence
  Synthetic
KEIEETLKELEDLNREMVETNRRVLEETRRLNKRDHMVLHEYVNAAGITLKKLVDDVRKGPTSEELKRLLAELEELLARVVRRVEELLKKSTDLLERAVKDSADALRRSHEVLKEVASRVKRAKDEGLPREEVLRLLRELLERHAKVLKDIVRVSEKLLREHLKVLREIVEVLEELLERILKVILDTTGGDKAVEELEKALEEIKRRLKEVIDRYEDELRKLRKEYKEKIDKYERKLEEIERRERT

SEQ ID NO: 1229 - protein, 231 aa, Artificial Sequence
  Synthetic
SKEEEVEKVLRKWEEILRRLIEENKRANDKIRRRDHMVLHEYVNAAGITKEVAERLGVSEEVKRILEKLIKLLEDILEYEKENVERLIELNERILRELKKSVEELKALVTRVRRDGLPESEVRKLVEDVLRKNEELLKEAKKAWRDSIENLKRVLEEVAKLVKTVLREIEEKIDDEDVVRALIEVIERLLRVAEEVIRRILKVNTELMRVDERSIRESLKAISEVLKVLDT

SEQ ID NO: 1230 - protein, 245 aa, Artificial Sequence
  Synthetic
DEDELIRKLLEDLKDIVRKILELIERDLRDIERRDHMVLHEYVNAAGITKEVVDDIARGVPRTEELERVIKRIEELLRTSEEELDRILKEIEELLRESRRRLEEVVSAVEELLRRVEEIVDKGRESKEDVIKLLREVVDDILRLVEEVVRTNLEIIKRILELIERVIRLNLSIIRDILRLLEGTVDSELADRIRKLIEDLERHTAKVLEDVKRAITELRKNSKDILEEVRKLIDELRKRIKEVED

SEQ ID NO: 1231 - protein, 231 aa, Artificial Sequence
  Synthetic
SKDEELARLLEELVERWRKIVEDLERDHRRLVKRDHMVLHEYVNAAGITVDRIRKNGIDERIVRLIEEIAKIIEEVLKEIVKLVERAVRENVRVLRESVRLVAELVETLARLLRGSDERVTEAIKKVLDTSEDLIRRVIKVNEDILREIAKLVEEVLREAERILTEIKKEGDREEIRRILEELKRIVDDVLRIIARILKLLRDLTRRLAEVAKAVHKLLEELLRKLKEDTR

SEQ ID NO: 1232 - protein, 238 aa, Artificial Sequence
  Synthetic
SEIEDVIRRLRKILEDLERVSEKLLREIKKILDRDHMVLHEYVNAAGITLEDAVRVFRDGSGSKEELAKLVEELIRELAKLAKEVDEIHKRIVERLKALVEDAERIHRKIVETLEEIVRGVPSEELKRVVEAIVEVIKEHLKVLADVIRRIIKAIEENAETIKRVLEDIVRVLELVLRGEGSIEDLVREVERLIKRIEDSLRELEKTVRELLKRIKEASDKVREDVDRLIKELKEAAD

SEQ ID NO: 1233 - protein, 238 aa, Artificial Sequence; identical to SEQ ID NO: 1232
  Synthetic

SEQ ID NO: 1234 - protein, 246 aa, Artificial Sequence
  Synthetic
SREEIVATLEDLARKILEVVKKLAKEIEDAWRERDHMVLHEYVNAAGITREIEDVVRKKVDSRVAEILETVVKRVVDITRRLIEEAERVVRELVDITRKLITILEEVVRRLVEIVREASKIDDRRELEDMLRKIREVVREVIERLKKLDEDVRRVVEEVIRRLEELNKRLEDVIREVKKRLKELGLSEEAVKELVELLEEILERNTRVIKEIIDLLRTVIRIHEKIVEDLIKLLEELLRRLEEATR

SEQ ID NO: 1235 - protein, 237 aa, Artificial Sequence
  Synthetic
KEKEDALKKLEDLARKSREDLERVLRKHKKILDRDHMVLHEYVNAAGITVDDILRKTGTESEILKELARLLREHHEALRRLIEELRRLLEEHHKILEDLAREHKRLLDELIKVVADGVDKDELERIIKELRERDKKLVDDLRKVSEDLLDAVRKLVEDLERISRELLRRVEELAKGIDEELAREVERVIKELLDKSKEILERIERAIDELLKVSEEILKLSEDASEELLKILREFAK

SEQ ID NO: 1236 - protein, 229 aa, Artificial Sequence
  Synthetic
SKEERLREVAEKHKKDLEDIVKRVDEAAKETARRDHMVLHEYVNAAGITLDDLEKGPDDEKLKKVKKILKDIMDRLAELIKKILKLLKENLEKIKELLRRNLEISEELLKLAKGLSDRDVLETVRRVLEKLDEEWDRVLEDSRRIIETILRELDTLLREVEKLIKEIKDEISGSKEVLDILERAVEVVRRVIKALKEVLERHVDATREVIERVKRVNKRLLEAVREVVT

SEQ ID NO: 1237 - protein, 241 aa, Artificial Sequence
  Synthetic
SEKELLKEILDRIRELLEDDNRLLKRIVDEIRKRDHMVLHEYVNAAGITKELLDRIGAPEDVIRELTRALKETEEDVDRVIRTLEKLLKEVLDAHEEVVRKLDRLLKEVERLVEGGDAEEVVRDLLRVVKEILDESKAVIDELARVVDEILKLLEEVDRKLAKVVKEILEDVLRGSGDDEDAVRKIAKIIEELKRLLEDLARDTRRVIEEAKRLLKEWRDRNKEVADTLKKLLEDLIRKIR

SEQ ID NO: 1238 - protein, 240 aa, Artificial Sequence
  Synthetic
DREKSVRDIEEDLKRVLDKLRRRVETSKEELKKRDHMVLHEYVNAAGITRDVVRELDRGIDSEVLRAVREIVKRLVEVVRRYNELSEKIIRDLVRVNDRVLELLKRIVKRLIDVVRELEKIGDKEKALRRLEEVVKEVKRRIEELLKELEDVHRELVKILEEVNEDLKRVATEVKEIIKTGIKSSEVAKELDEVIKRLLDNLKENTDRLKEVIDRNLADLRDLAEELRAVIERLLEDARR

SEQ ID NO: 1239 - protein, 252 aa, Artificial Sequence
  Synthetic
SLEEITKRLLELVEENLARHEEILRELLELAKRRDHMVLHEYVNAAGITEELLKLLEDNGSSEEDLKRLLKEVIEELRAVVKRVKDKWDEVVKRIEDLVKKLKELHDDTLRKLRELVRKIVTDISESGGEAEKVKRVVEKILELVERLAKVVKESVEKLLEILRELAEVSKRVAEALLRLLEELVRVIRIKDERTLREVVRKVLEEAKRLLDELEEVHKRVKKELEDIIEENRRVVKRVRDELREIKRELDE

SEQ ID NO: 1240 - protein, 237 aa, Artificial Sequence
  Synthetic
REDEVLRDIERLLREIEEKIRRILEESTAELRKRDHMVLHEYVNAAGITKAIKEDVERKGIDEELRKLLDEVLDKLTKLIERNKRSLERILELIKRIIDENLEVLRDIIRLLEELLKATKDNGVPKDEVIKLVEDVVRRIEELVTRVVARNEKLVKDLDDLAKKNVRENEELLREIDRGLDEDLLEKIKRVIREHIKALEKLARDLKEILRRHIEALKELARDLAEVIRKLLEDVKR

SEQ ID NO: 1241 - protein, 237 aa, Artificial Sequence; identical to SEQ ID NO: 1240
  Synthetic

SEQ ID NO: 1242 - protein, 243 aa, Artificial Sequence
  Synthetic
SEAERLADEVRKAVKKSEEDNETLVREVEKAVRRDHMVLHEYVNAAGITMKRLVDLLRDGQVSDRDLLKELEEVLRRVLEALAENHERTEEILKRWLDRYAEDIERLRKVLKEVIEALKRGGSDDKRIVDELEEILRRNEDVLDKIAKRLRRLLEEDRRLLERIVRELKRLLDDLDRITKEGKSEELVRIAIEVLKRLLEIIEELVRLNNEILERLLKIVRELHKDNIKILEDLLRIIEEVLR

SEQ ID NO: 1243 - protein, 243 aa, Artificial Sequence; identical to SEQ ID NO: 1242
  Synthetic

SEQ ID NO: 1244 - protein, 245 aa, Artificial Sequence
  Synthetic
SEKDEVTRRIRELLKEAEETNREAIERIKRLLDRDHMVLHEYVNAAGITLRRLKKVLDRGLQDDEALLKLLIDALREHNRLSTELIKILIDVLRTILKIIKDVLATNIEIARRILDLVRRLAERGGLDDRLVKEVEKLVRTAERLHRDALRKVKRLVEELEKRLRELVKTDHDLVRRLETLLRRGSGSKEDLLREIARILAESLRLIRELLKEIEKIVKEIIELLERLNDELRKIIEAILETTKK

SEQ ID NO: 1245 - protein, 239 aa, Artificial Sequence
  Synthetic
SAEDLVRRVKDLVDKLEDKLRKVVRTNERLWEERDHMVLHEYVNAAGITDALVEKLKAGDKDKDELIEEAKSLEDESNALVEKLVRDIERVLAESNKLLDTLAKEIEEVLEEIVELVERGSGSDKEAREKLEDIKARLKEVLKKLREESKRIIDELRRLLEEYKRLVKEIRDRIEEVRKRNSEIRVLVELVRRHNKVLKELVEELEKLVRDHNRVVEEVVRELVELLSRAVEVIKEVVK

SEQ ID NO: 1246 - protein, 232 aa, Artificial Sequence
  Synthetic
SEKELVDDIRRILEEILRLLRSLLEEVIRLLEERDHMVLHEYVNAAGITRRVAKLLDENGIRTDEADRVLERLEKAHRELLEDYKRALEKIKETLERVLREAEEVVKKIDDALRKLGGSKEVLKRLLEELLRLVEKIAEEIKRLLSELVRVTEELVRTNKELLEEAVRVIRKEVGDDSLVREVEELIKRLEKHIDDLLKTSRDLVKRVLDLVDEVVKRVEDLVERVKEKIDT

SEQ ID NO: 1247 - protein, 243 aa, Artificial Sequence
  Synthetic
SRVEELKKLIEDILRISREVVERIARVAEDIHRRDHMVLHEYVNAAGITLRTVEEILARKVSGTEAAEALRDTIRRVVDEIRKLLEEHEKRSAELLEEIRKLLEDILRRSERAVEEIRELLKKGVSTKDVLRIIEEILREHLELLERVVRRIEEILRELLKTIEEIVKRIKEILEELKEVLKRGSVGDDEVEREIRRVKEDLDRILEEYRRLLEEIKRKLEEILRRVEELHRRLRRKLEEIDR

SEQ ID NO: 1248 - protein, 243 aa, Artificial Sequence; identical to SEQ ID NO: 1247
  Synthetic

SEQ ID NO: 1249 - protein, 244 aa, Artificial Sequence
  Synthetic
DEDRRLEDAVAKLRKEHADIMKKLDDIMRELDERDHMVLHEYVNAAGITKALLTRVLRETREDELLRKVLELLTRLLKLLADVLEENKRLLEDILRLLKELIETNLRLLEEILALLRKVARGPVSEEEAKRLVEEITRLLEASTEEARKLVETIKRLLEESLDKLRSLVEEIERRLRTVLEEIRRRGAPEEIERIIRRVIEVIREILDLVRKVNKKALRVIEEILEDLARVNKKAVDAIDELAK

SEQ ID NO: 1250 - protein, 240 aa, Artificial Sequence
  Synthetic
DKDKRLEELLKRLKELNDKTFEELERILEELKRRDHMVLHEYVNAAGITRARIEGGNLDKRLAELLKKLLDDLKRLLEEYTRTNEELLKRLRELLERYRETNKKLLDLLRKLLDEARRTGTDEDLLRRLEDILRKYEDEVRRLLKELEDILREYEDTSRRLLEELERIAKEAAERVSRGSDKDVKDIIRTILEVARDLLRLLEEDSRTNSEVVKRLLDLLREDSKANSEVVKRLLDVLRE

SEQ ID NO: 1251 - protein, 240 aa, Artificial Sequence
  Synthetic
SKEETLKRLLDELEKRNRETVERLERLLKELEDRDHMVLHEYVNAAGITERKIEESGLSKELKDTLARILEELRKLLEEYFRKNEELLRLLRKLLDEYARTNEELLRLLEELLDTARRTGGDSELLKRLEDIAREYEKRVRRLLEKLKDILDKYRKTVEELVRKMEEILKEAKKTISRIGSEEVKDIVRAMEEVIRRLIEILRRDVELNLDVAKKLLELLKEDSKLNLDVARELLELLDR

SEQ ID NO: 1252 - protein, 240 aa, Artificial Sequence; identical to SEQ ID NO: 1251
  Synthetic

SEQ ID NO: 1253 - protein, 243 aa, Artificial Sequence
  Synthetic
DEEETLRRLLERKVELAKEYLDVSKEVIDRTTKRDHMVLHEYVNAAGITVELLERGDLGPDELIKRLAEELERSLRELEEEIKRLKRELEESLKKLKEIIDRLAEEAEKLLAVLKRGEGSEEEALRALASLVRELIEVLRENDERLRDVLRRLIEALRKNNEILERVLRKLVRAAEERGRDESSREALEEARRRLEELLRELNEITKDLEAKLEKLLRDLNELTKALEEELKRLLDELKKRTD

SEQ ID NO: 1254 - protein, 243 aa, Artificial Sequence
  Synthetic
SEAERTKESLKKVLKALVDLNRELLRKLEENMRRDHMVLHEYVNAAGITLDKVREGGIVDKDAEREAERLMRELDKSSEDTARETRKLIEESKKSTRRTEEEARKLTETLDRLAKGGLPREDLLRALVRLLEELARLIEEDVRRNAELVKRHIELVERDVAELLRLIKELVDLLADLAEKGSRTEEIRKIVEEILKEIKELADRYREEVRKSKDKLRSILEDYKRKVDELKERLRELIEEVET

SEQ ID NO: 1255 - protein, 243 aa, Artificial Sequence; identical to SEQ ID NO: 1254
  Synthetic

SEQ ID NO: 1256 - protein, 239 aa, Artificial Sequence
  Synthetic
SEVEDILRRLAELNKRLIDKLRELIDRIARLNERDHMVLHEYVNAAGITADELIRVVRERGDIPEELLRKLEEELKKIVDELRRLVEEYEKALRDLIKELRKAVEEYRRTLAELVERLRRLEGPEELLKDLAEDVSRNIKAVEEVIRRFEKNVEDNIEVVRRLVDALEKLVRRLESVLRGKGSDEDLKRLLEKLKEDVERVLKEVRDRTAESLKHLEDVIRELEKKTEDSLRHMEERRK

SEQ ID NO: 1257 - protein, 239 aa, Artificial Sequence; identical to SEQ ID NO: 1256
  Synthetic

SEQ ID NO: 1258 - protein, 186 aa, Artificial Sequence
  Synthetic
SAEDSIRELLERDERLLEEARKEAKRLNEENERLRDHMVLHEYVNAAGITRLLDDIRKKIKGEKLREIEELVRRVKRTIEKLLEEVKKSVEDSSKRIEELLEAVERSVERTKEEIRRLLDEVRKDRKEELVKRVEERIKRLHDENRRLVKEVIEEVEKLIRDNEKLAEDIEREIRRLLKELDEAAK

SEQ ID NO: 1259 - protein, 182 aa, Artificial Sequence
  Synthetic
DEAEKLLKELRDLLEESRKDLERLLKELEDLLEERDHMVLHEYVNAAGITKRIKETVERRNEREKLEKLLRELKKVVERLKDNLKDNERRNKEAIERVRKKLKDNERENKKVIEDLRAKLKDLEEVKRKIDRLEEESRRVIEEARKRLEEVEEKSKKIIDDARRALDRIDKELRRVVEETRK

SEQ ID NO: 1260 - protein, 173 aa, Artificial Sequence
  Synthetic
SLEELLEEARKTVERLIRESERVLRESEERVRRLRDHMVLHEYVNAAGITEVIERVEDEEALKELEKLLREDSKRVKEVLDDLRRDLERNKRRNEKVLRELEELLKRLEELVREGVREEELEKLLREIEERVKEMLKRDEDTLREIERKVKEAVRDSERTLEEIEKRVTEEKT

SEQ ID NO: 1261 - protein, 175 aa, Artificial Sequence
  Synthetic
SELEKVVDDVRRRLDRLLETSEKLLEDATKRLKDRDHMVLHEYVNAAGITERLKTVLERRETDKRELLKENKEILERTRELSERNLKEVEDILREVEEEVRKNLRRIEKVLEEVRRKLRSELLKRVEERIKRVLDESKKILKEIADEVRRVLERDKELLKRLEDKNREVSERIRK

SEQ ID NO: 1262 - protein, 180 aa, Artificial Sequence
  Synthetic
SKEEVLREIERLHKETIRRIEEVLREATELHKRLRDHMVLHEYVNAAGITEVIEDVRRADTPNVEELLRELKDALDKVRDHNRKTLKKNEDVVREIEKEVRELLKEDEDVLRRIEKVMRDGRVDARELLEESRREVERSEKEVERLLRKSRKVVEEVRKLSEENDREVKKILEEVKRRLD

SEQ ID NO: 1263 - protein, 180 aa, Artificial Sequence
  Synthetic
SKEEVLDEMRRLHETTKRDIRRVLKEIEELHERTRDHMVLHEYVNAAGITRVIEDIKRKKTPDVEKLVRRVEEMLKELEKHNKKTTDDDKRVLDEIRRRADELVKEDERVLREIEEVVRAGKVDLKELLDESRRVVKESKEDLDRLLKESRDVVDDTRRKSEKNLRDAERVIREAEEAVR

SEQ ID NO: 1264 - protein, 178 aa, Artificial Sequence
  Synthetic
DDLERVLKEIKKAADKIREDNKRTADKIRKRVKERDHMVLHEYVNAAGITKEIKERVRGREEARKVIEELKKLVDEVRKRNEKSIEELKKLLKEDRDLMRRVIEELEDLVRRLREEVRDDEALRRVEEEVERLIRDLRRVLKETSDRVRELIDKHRRLSEEVEKDVKRLIDELKKKTD

SEQ ID NO: 1265 - protein, 181 aa, Artificial Sequence
  Synthetic
DEEETLEDVLRELEERVEKLLRDLTRDLERVEKERDHMVLHEYVNAAGITKRIEELLKRIEDDEKLRRLKEEVRKLVEESRERNKRHHKEVREVLERIRELLERLEKELRRALEEIRDKIRKDGATDEILRKIEELLRRAEEVIRDLERKVRKLERDIRENIKKNHREVREILRKIEEDVR

SEQ ID NO: 1266 - protein, 179 aa, Artificial Sequence
  Synthetic
SSKEVADELRKKAEKVLDELRKIIRELERKNEDSRDHMVLHEYVNAAGITRVLRDLVRTRGEDDRLVREVERLLRELKRRLEELIRRSEELIKRSREEVDRVIRTVEKLLEELDRLLRANKGDIEDLRRTVDKLVEEIKDLARKLAKSSDDTVREDEKLVEELRKDVKRIVRKIKKDLE

SEQ ID NO: 1267 - protein, 183 aa, Artificial Sequence
  Synthetic
SEIEKLVEDVRKLVEDNLRHSEEVHRRNRRLIEERDHMVLHEYVNAAGITEELRELAERGEIREEEARKVLEEIKRLLDEIRRHSEEVLKEIERTLKENLKHSEEVLRRIEERLEDIKRKDKDSERVRTLVDRLREELKRSLDESEKLNRESRKRVTRSLEKVDDLVRELEKLARKVLEEVKT

SEQ ID NO: 1268 - protein, 177 aa, Artificial Sequence
  Synthetic
SEAEKVVEELKKLLREVEKKIRDHTEDVKRILEERDHMVLHEYVNAAGITKELKDKNSDDDTVRKVKEELDRSHEKLREELRKVAKELKESNEELERDLKRLVEEAEDRLRRLKDRVSEKVLRELEKILEDIKRTLDKLLRENRETLKRIEDRLRELLEENRKLLEKIERELRERSR

SEQ ID NO: 1269 - protein, 182 aa, Artificial Sequence
  Synthetic
DEIETVLDEVRRLHEDAKRRLEEMIDEVRKLNEERDHMVLHEYVNAAGITRTVKEEVERAGLDKGKLEELEERLERVREDVERILREIKRRNEKTLEDSERILEENKERNRTVLKKLKELRDRGSDAREALKESRKVVEESRESVRRVLEKNRRVVEESKRLAEELLRRVKKVVDEIRKRVE

SEQ ID NO: 1270 - protein, 178 aa, Artificial Sequence
  Synthetic
SSKDEIRRRVEEVVERSDEIVKRSREHVKTVVDERDHMVLHEYVNAAGITKKLDKIRKDGGSEETLKRVLDELREILKELKEEVKKVKRKLEKVVKENRDTIREVEERNRKILDELRKRGVEERALREVEEISRKSEEKLRRVLKESEDIAKEAEDRLKTVLERVERIADEVLKRLTK

SEQ ID NO: 1271 - protein, 182 aa, Artificial Sequence
  Synthetic
SDADRVAEELKKLVEDSRRENERVIEESKRLVKERDHMVLHEYVNAAGITDKLRDILEKEKDKKTLDDIVREILERLKRLLEKVEDENRKSHEENKRLLEDVKRKNKRISDELKRLLEEIERRNVDVDKVRETVKRLLEENKRVMEKTEEVAKKSSEDIKRVADETRRRAEELLKEVDELRK

SEQ ID NO: 1272 - protein, 182 aa, Artificial Sequence
  Synthetic
DEVDELLKRLRKLVDEVRKENDKMVKESKRLVEDRDHMVLHEYVNAAGITEELEKILKDTEDKDTLRKIVEEIKRRLRRLLEELKRIIEKALRDNKKLLDEVRKRNKEISDELRRLLEEIRRRNVRVEDIEREAERLLRENEELLRRSEEVIRRSTEKIKKVLRDAEERAREILKRVEDAAK

SEQ ID NO: 1273 - protein, 175 aa, Artificial Sequence
  Synthetic
SEVDEVLREAKRIVDEVHKDNERATEESRRLVKKRDHMVLHEYVNAAGITKEVKDANIDEKLVTEILKEIEEALKEAARRNKEVKDRLRELSRRVSERNREILEELKERLDRVRERRKDVKELEREVEKLLKRIEESLRRHRKENKRLLEELDRSLRELAKIVKEVLDEIRERTR

SEQ ID NO: 1274 - protein, 178 aa, Artificial Sequence
  Synthetic
SEEEKLKEVKDRIREVLRKLEEHTDKVKKEVEKVRDHMVLHEYVNAAGITAMLERLRRKKKDAEDLLRELEKIIEEIERELDRVLEENDKMAEEWKKLLDKVLDDNRKSIRDIEKELDDREPTDELVTEVEKLLRDDEETNRDVVKKVREAVKKDADTNRKVIEEVKKVLEDAARRLD

SEQ ID NO: 1275 - protein, 186 aa, Artificial Sequence
  Synthetic
SEVDEVRKTLEDLLRRLDEENKDIIRRNKELLDDRDHMVLHEYVNAAGITDELRKILEKLKDRETLTRIIEEIEKRARELIKRLRDEIRKIEEESKKSIEDSRKRNDEIRKRLEELIKDLRDKIKDSEELARRITELEKRVREVIERLKEKNKRLEDDSRRVITELRKKLKDLEDRVREEIEELRK

SEQ ID NO: 1276 - protein, 179 aa, Artificial Sequence
  Synthetic
REDERLEEIARKIKKVVDELVERNKKLTEDNHESRDHMVLHEYVNAAGITEVAKRAIERIRSDKKVVDEVKKLLEDAKKHSKEVIDELRRLNEESKRSSEDTIRRMRKLLRELEETVKAKKGDVEDIERKVEDIIRRLEDLSRRNEEKVRRISEEIKKLSKDNERTIKEIIKEIEERVK

SEQ ID NO: 1277 - protein, 185 aa, Artificial Sequence
  Synthetic
DDIERLKREIERLLKEAEKISRDNEERSKELLDRRDHMVLHEYVNAAGITEELKRLADKIKDKEELTRRLKEVVDRVEKSVRDSERMLREVVREDEESVRRSKTKLEDLLRKVEELVRRLEKKVTDEKVKRDAREALRKAKKKVDELKRKNDEVHRRSREEVKRLLEENRKLLEDLRRMVREITQ

SEQ ID NO: 1278 - protein, 176 aa, Artificial Sequence
  Synthetic
REAEEAKEEVEELNRRNKKELDDARRRVDELDKRRDHMVLHEYVNAAGITEELERVKEEGRSDDRLREKIERMLKTSADELERLKEENKRALRDLAERLRELIERNRRKLEEITRRTVPDKDVLKRLAELIKESIRELERVLEELAEKIDRSLKELDDVLRKNETDLKRVIEDLKR

SEQ ID NO: 1279 - protein, 179 aa, Artificial Sequence
  Synthetic
DEAEKAKRDSEKVVEDNRKMLEDSTRRAERLNEERDHMVLHEYVNAAGITREIDETKRRGTDDEVVKDLIRRVEELLERSRKKLEDLTRDNERVLDESRRRLEKLIRDNERIVKDLTDRVVRVDEVLKRLKEEHRRLIEELEEVLRRNEEIIRRSIEDLERVLDRNRRELEDVIRRLKE

SEQ ID NO: 1280 - protein, 174 aa, Artificial Sequence
  Synthetic
SEEEVLREAAKTVEKLLDEIRRSLEKVSKRVEDSRDHMVLHEYVNAAGITELLEELRKNNVDRTLLEDVRRKLERIEERNEEMNDRSRRKLEELRERNRKILEDIRRTLEDLKRRQLPKDDVERTLREIAKLVDEVDKENKRALRENEERVKTLNRENEEMLKRIEEEVRRATK

SEQ ID NO: 1281 - protein, 182 aa, Artificial Sequence
  Synthetic
SELEKTLEDLKRHSEENKKKLEEDLRDMERNLKERDHMVLHEYVNAAGITKDLERRFREGDIDERELERVRRKMEEIKKRLDENVERNRRKAEDIKRKLDENVKRSEDRVKEIKEDIRRRVRDKDKAEELERRLDELVKENREIHERVKKALDDIVKELEELHERLKRRLEEILRRIAETVR

SEQ ID NO: 1282 - protein, 186 aa, Artificial Sequence
  Synthetic
SEIEKLIEELRRELEKVKDELERSIEEMDRELDDRDHMVLHEYVNAAGITREVTERTKRGDRPEEVLRKELEDIKRKLRRILEEHHEKIRRIKEKLRRENKRVRDELKRIKDEIDEKVKDVRRKGADEELLKRLEEVAEDVKRALEELLKKHTRVVERVEKALDELDKELERIVREAEKELDRREK

SEQ ID NO: 1283 - protein, 179 aa, Artificial Sequence
  Synthetic
RLEDEVRKMEKEVREEVKRLEDESRKVLEESRRNRDHMVLHEYVNAAGITERIKDLRRRGLDERVLRELLKRVREVHERNRKLLDEVRRASEKVHEDNRRILEEVRKTVKDVVDKLRRVDAKVVKELIDRVRKILEDVEREVKKSIEEVKEINRRLNEEVKKTIEEVKEIVKEVTERAK

SEQ ID NO: 1284 - protein, 183 aa, Artificial Sequence
  Synthetic
RVDERLDTVLKRVEETVRENKKKNDELLERSKENRDHMVLHEYVNAAGITREAEKLKREVTKEEVKKIIDEVLKEIEDLLRTVKEELDRALERNREVVEETKRRIDRVLKEIEKLIRDVKRDRKEEVVKEVEERIKKLLKEVNDTSKDAERRLRETNERLNEIVKEVEKRIRELSEEVRKRVK

SEQ ID NO: 1285 - protein, 172 aa, Artificial Sequence
  Synthetic
SRAETVLKEVTDKIKKLADSSDELLRRNKENIDERDHMVLHEYVNAAGITEEIEKGSVDEETLEELIRRVEAELEAHHRELEKNSREDEKRNRDHHAKLEEEMRRVEERLEREGIDDEVVKRVRDLLDTVRRRNEKVNEDVKRMNDKLRRDNEDVIRRVEKLLRELEEKRRT

SEQ ID NO: 1286 - protein, 174 aa, Artificial Sequence
  Synthetic
KEVEDAVKELEDLLRANEDKTRSIVEDMRASNKDRDHMVLHEYVNAAGITDDLRRAGVPRDSLKRLAEDVERVTRESRELLERVHRADRELIERLKESNERLRRAIEEIRKAIKGGSDIKTLLDRVRKLAEEDAERLDRLRRESEELNERVRRVDKKLLEEIRRKAKKVEDDTR

SEQ ID NO: 1287 - protein, 181 aa, Artificial Sequence
  Synthetic
SEVDDVLRRLEELIKTLEDINAKSLEDIKKLIDDRDHMVLHEYVNAAGITRELREAKKGIDSREAEEIAKRVLEELKRTSDDLRKKVERVDEDLRRLLRENHERNKKILRDLERLLRDAARRGVPKEALDRMREEIRRLEEESRKSDETIERLIRELRRRVEEVLKTSTDLIRELEEEVKK

SEQ ID NO: 1288 - protein, 245 aa, Artificial Sequence
  Synthetic
TEEEVLRKVEKLIKDLLDVLRDLLRASEEVVREARDHMVLHEYVNAAGITELSRALSGGSRESVESALAKNEERLKKILEDADRVLDKWRRLLEELSKKAKAVLDEVRKRLEEIKREVPETEKLRTLLTILEEILRALEKIIRDILRINERLLEKLKRILERLRETNREIDERIRKLVEEARGGSEEKLRRDLTETKKELEKRHEDLRRELEKLLRDYKRELEEIERALEEIEKTLKRRADETRR

SEQ ID NO: 1289 - protein, 238 aa, Artificial Sequence
  Synthetic
SKEDKARELEKRLRDNLKKLEEVVRELAEVLKRNRDHMVLHEYVNAAGITRLLDKLRAGGLPKDELEDLRREVEDVLRRLEDLLRKLKKANDESLTRLEELLRRAEEENRRVLTTLRELLRGNGDDRDLARLVARLVEANNRALEELLRLVAKNVEDNNRVLEELLRLVKELAKRLLGRIRDEDLVRDIRRELKELEERARKILRDDERDLRALEKRIRDIIREDREELERLKERARK

SEQ ID NO: 1290 - protein, 243 aa, Artificial Sequence
  Synthetic
KREDILKKLEDIIRDIIDKLRRILEKVKRLNEDIRDHMVLHEYVNAAGITDLLKRIADKSRDRELEDILRRVLEKLRRSLDKLRDTLRKLKEETDTVLERAERTLKELKDRLEKLLRDGEKVSEEDLVEALKALIDELRKVLEDVIRVSKELVERLLRALREHLETNKRLVKELLDALRKTTGDDEEIKRLKEELERRHRRLEEEVERVARELEKAHRDLERDIRRVAEELKKLLKKLRDDRR

SEQ ID NO: 1291 - protein, 244 aa, Artificial Sequence
  Synthetic
SAEETLRRITEESKRVLEEITKKYEDLERESREVRDHMVLHEYVNAAGITDVLTKGGDDKDEVLTVLEKVLDELLKLHRENLRVIKELLRKVLEVDRENLEVLKRLLEKARDLLRRSGRDEKDLKKLEDELRKVKEELEKKHEASKRDIEDLERELDKVTEEVERLLRKLKEELRRAAEGSDEDRERLARLLKALADKLIRVLEEILKINEELNRKIIKFARENLERNRRVNKKVIEVLREAAR

SEQ ID NO: 1292 - protein, 250 aa, Artificial Sequence
  Synthetic
STEEILKRVKEILDELAKELRDIIRESLRTIEELRDHMVLHEYVNAAGITELVKTIKDGVKDSEELLRRLKRLLEDLRRAHEELLKRLKEAVDEHRDRLRKILEELERVLKELRKRIEELRRSGDRISEKDVLRKLEEVLRKALEILERLLKKIRESARELLKIIEEVLDANIKVMEEALKTIKELLKDGPDEVKRRLEEKERRIRTRYEELRRRLRKRVKDYEDKLREIEKKVRRDAERIEEELERAKK

SEQ ID NO: 1293 - protein, 242 aa, Artificial Sequence
  Synthetic
SEKERLMRLLDKLKDLNRRLVERIKELLDKALELRDHMVLHEYVNAAGITELVERGGVPEELLTRIDELIKKLEDEARKISKEVKRLIDELKKRLEDIHREVDRLIRELKETLKGVTDKDELLRRVAEVLERIARLSEELIREVKEVLEKIVELSRELLKRVLDVLRRIAELLEDALRKGNVSEETVRRLREALKKLEDDLRKIERDAEREYKKLKDELEELTERYRREIRKLKEELKADRK

SEQ ID NO: 1294 - protein, 240 aa, Artificial Sequence
  Synthetic
SDKEEIKRRVEKTARDLETEHDKIKKRLEDTVRDRDHMVLHEYVNAAGITRKIEKTLREGDGDATDLVDKLLETVKRLNEEVLRTVKKIADELRRLVEEVLRVLRESNETLARLLEEGNVGDEVRERLEEVLRRTEEIIKTLEEIVKRLLDELRRLVEELRRISKKLKDELDKIKEKGKDEKRLIEEVVRLLRENLDVVRRILEALAKLIKELLEALEEVLRRNKELIRELLRVLDEALK

SEQ ID NO: 1295 - protein, 240 aa, Artificial Sequence; identical to SEQ ID NO: 1294
  Synthetic

SEQ ID NO: 1296 - protein, 248 aa, Artificial Sequence
  Synthetic
DEDRIIEEIARLLEELLRELLELIKKLIETNRRLRDHMVLHEYVNAAGITELLDRLVKKGISDEKLKRIRERLKRALDDLERLHREINKRLEDLVRELEKLVREILKELKDALEELRRASARAGGEEVLRRLEEIVKKLLDLVRRILERLKEIHKDNVRLLRELNERLTRIVEDLVRLIREILREAGVDEKIAEEIERELEELRRMIKRLHEDLERKLKESEDELREIEARLEEKIRRLEEKLERKRR

SEQ ID NO: 1297 - protein, 236 aa, Artificial Sequence
  Synthetic
STREKAKKVLDTLRADNEDMKRVVEKILRALKRTRDHMVLHEYVNAAGITRILKEVGVSEEALKEIEDTLKRVLEEIKRLLDESKKLLEDVEREIREILKTSEELLERIEREIETVGSDEKTLAEILKRLLELNEEMNRRLLKILRDLLRLNEEVIRRLLAVLERLLDALKEALDRGDVPEDLLRKLEEELRRIKEKLRKALEELEREHRELEKELDKLHDESRKEHERIEEELRR

SEQ ID NO: 1298 - protein, 231 aa, Artificial Sequence
  Synthetic
SKEEEVEKVLRKWEEILRRLIEENKRANDKIRRERDHMVLHEYVNAAGITEVAERLGVSEEVKRILEKLIKLLEDILEYEKENVERLIELNERILRELKKSVEELKALVTRVRRDGLPESEVRKLVEDVLRKNEELLKEAKKAWRDSIENLKRVLEEVAKLVKTVLREIEEKIDDEDVVRALIEVIERLLRVAEEVIRRILKVNTELMRVDERSIRESLKAISEVLKVLDT

SEQ ID NO: 1299 - protein, 247 aa, Artificial Sequence
  Synthetic
RDRDVLRKVKAEIEELVARIEKVSRDALSEVKRLRDHMVLHEYVNAAGITSLLRKIRDTRGDDEVVKETEEVLRDNHRLLEELIRRLIKVLEEWLRRHKKLLDEIRELLKEILRLVKESGVSEDLLRRLKRVIEELDKKLKESEEKLRRVVEKAKEDLKAVLEEHRKVLEDLKRALEEVREKLRERGSEEVVEELLRMLKRVAEEMKRVHDDLSRAVEKVVRDVVRVDKELLDELARILRRLEEVIT

SEQ ID NO: 1300 - protein, 237 aa, Artificial Sequence
  Synthetic
KEKEDALKKLEDLARKSREDLERVLRKHKKILDKRDHMVLHEYVNAAGITDDILRKTGTESEILKELARLLREHHEALRRLIEELRRLLEEHHKILEDLAREHKRLLDELIKVVADGVDKDELERIIKELRERDKKLVDDLRKVSEDLLDAVRKLVEDLERISRELLRRVEELAKGIDEELAREVERVIKELLDKSKEILERIERAIDELLKVSEEILKLSEDASEELLKILREFAK

SEQ ID NO: 1301 - protein, 240 aa, Artificial Sequence
  Synthetic
DREKSVRDIEEDLKRVLDKLRRRVETSKEELKKVRDHMVLHEYVNAAGITDVVRELDRGIDSEVLRAVREIVKRLVEVVRRYNELSEKIIRDLVRVNDRVLELLKRIVKRLIDVVRELEKIGDKEKALRRLEEVVKEVKRRIEELLKELEDVHRELVKILEEVNEDLKRVATEVKEIIKTGIKSSEVAKELDEVIKRLLDNLKENTDRLKEVIDRNLADLRDLAEELRAVIERLLEDARR

SEQ ID NO: 1302 - protein, 240 aa, Artificial Sequence; identical to SEQ ID NO: 1301
  Synthetic

SEQ ID NO: 1303 - protein, 241 aa, Artificial Sequence
  Synthetic
SAEEAVEKLVRIARAIVKINEDLSREVVRILREIRDHMVLHEYVNAAGITEVVKVVEDGGLSEDVVRKLRKLVKELEDLLKKSNDDIRKLVEDVARRLKESNDEIRRLVERLEELLKRGPGDEELLRLVEELTEELLRTHEEVVKALEKLTADLLELHRELLERVRRLTKRIEEELKRVGVSEELLRRLEELRKRLEKVLDDSAKELEKLKRELERLLEESRRKLEKLKRDLERVLEETRR

SEQ ID NO: 1304 - protein, 237 aa, Artificial Sequence
  Synthetic
REDEVLRDIERLLREIEEKIRRILEESTAELRKVRDHMVLHEYVNAAGITAIKEDVERKGIDEELRKLLDEVLDKLTKLIERNKRSLERILELIKRIIDENLEVLRDIIRLLEELLKATKDNGVPKDEVIKLVEDVVRRIEELVTRVVARNEKLVKDLDDLAKKNVRENEELLREIDRGLDEDLLEKIKRVIREHIKALEKLARDLKEILRRHIEALKELARDLAEVIRKLLEDVKR

SEQ ID NO: 1305 - protein, 237 aa, Artificial Sequence; identical to SEQ ID NO: 1304
  Synthetic

SEQ ID NO: 1306 - protein, 243 aa, Artificial Sequence
  Synthetic
SEAERLADEVRKAVKKSEEDNETLVREVEKAVRERDHMVLHEYVNAAGITKRLVDLLRDGQVSDRDLLKELEEVLRRVLEALAENHERTEEILKRWLDRYAEDIERLRKVLKEVIEALKRGGSDDKRIVDELEEILRRNEDVLDKIAKRLRRLLEEDRRLLERIVRELKRLLDDLDRITKEGKSEELVRIAIEVLKRLLEIIEELVRLNNEILERLLKIVRELHKDNIKILEDLLRIIEEVLR

SEQ ID NO: 1307 - protein, 243 aa, Artificial Sequence; identical to SEQ ID NO: 1306
  Synthetic

SEQ ID NO: 1308 - protein, 239 aa, Artificial Sequence
  Synthetic
SAEDLVRRVKDLVDKLEDKLRKVVRTNERLWEEIRDHMVLHEYVNAAGITALVEKLKAGDKDKDELIEEAKSLEDESNALVEKLVRDIERVLAESNKLLDTLAKEIEEVLEEIVELVERGSGSDKEAREKLEDIKARLKEVLKKLREESKRIIDELRRLLEEYKRLVKEIRDRIEEVRKRNSEIRVLVELVRRHNKVLKELVEELEKLVRDHNRVVEEVVRELVELLSRAVEVIKEVVK

SEQ ID NO: 1309 - protein, 249 aa, Artificial Sequence
  Synthetic
DAEEVVKRLADVLRENDETIRKVVEDLVRIAEENRDHMVLHEYVNAAGITRIVELLRRGGVPEELLDRLAKVVKSIVEKAEKILERLNRVSKAIAEKLKTIVDELNEVSKEIVKRAEDILRKGKDKETVLRALRTLVKEYADLSKEVLERVERIVREYVKLSDEVVKSLAEIVEELIRIIEDLLRKGNLDEDVKRALEELVSRLRKLLEDVKKASEDIVREVERIVRELAKRSDEILKKLEDIVEKLRE

SEQ ID NO: 1310 - protein, 249 aa, Artificial Sequence; identical to SEQ ID NO: 1309
  Synthetic

SEQ ID NO: 1311 - protein, 240 aa, Artificial Sequence
  Synthetic
DKDKRLEELLKRLKELNDKTFEELERILEELKRARDHMVLHEYVNAAGITARIEGGNLDKRLAELLKKLLDDLKRLLEEYTRTNEELLKRLRELLERYRETNKKLLDLLRKLLDEARRTGTDEDLLRRLEDILRKYEDEVRRLLKELEDILREYEDTSRRLLEELERIAKEAAERVSRGSDKDVKDIIRTILEVARDLLRLLEEDSRTNSEVVKRLLDLLREDSKANSEVVKRLLDVLRE

SEQ ID NO: 1312 - protein, 240 aa, Artificial Sequence; identical to SEQ ID NO: 1311
  Synthetic

SEQ ID NO: 1313 - protein, 240 aa, Artificial Sequence
  Synthetic
SKEETLKRLLDELEKRNRETVERLERLLKELEDRRDHMVLHEYVNAAGITRKIEESGLSKELKDTLARILEELRKLLEEYFRKNEELLRLLRKLLDEYARTNEELLRLLEELLDTARRTGGDSELLKRLEDIAREYEKRVRRLLEKLKDILDKYRKTVEELVRKMEEILKEAKKTISRIGSEEVKDIVRAMEEVIRRLIEILRRDVELNLDVAKKLLELLKEDSKLNLDVARELLELLDR

SEQ ID NO: 1314 - protein, 243 aa, Artificial Sequence
  Synthetic
DEEETLRRLLERKVELAKEYLDVSKEVIDRTTKLRDHMVLHEYVNAAGITELLERGDLGPDELIKRLAEELERSLRELEEEIKRLKRELEESLKKLKEIIDRLAEEAEKLLAVLKRGEGSEEEALRALASLVRELIEVLRENDERLRDVLRRLIEALRKNNEILERVLRKLVRAAEERGRDESSREALEEARRRLEELLRELNEITKDLEAKLEKLLRDLNELTKALEEELKRLLDELKKRTD

SEQ ID NO: 1315 - protein, 243 aa, Artificial Sequence; identical to SEQ ID NO: 1314
  Synthetic

SEQ ID NO: 1316 - protein, 243 aa, Artificial Sequence
  Synthetic
SEAERTKESLKKVLKALVDLNRELLRKLEENMRERDHMVLHEYVNAAGITDKVREGGIVDKDAEREAERLMRELDKSSEDTARETRKLIEESKKSTRRTEEEARKLTETLDRLAKGGLPREDLLRALVRLLEELARLIEEDVRRNAELVKRHIELVERDVAELLRLIKELVDLLADLAEKGSRTEEIRKIVEEILKEIKELADRYREEVRKSKDKLRSILEDYKRKVDELKERLRELIEEVET

SEQ ID NO: 1317 - protein, 243 aa, Artificial Sequence; identical to SEQ ID NO: 1316
  Synthetic

SEQ ID NO: 1318 - protein, 186 aa, Artificial Sequence
  Synthetic
SAEDSIRELLERDERLLEEARKEAKRLNEENERLLRDHMVLHEYVNAAGITLLDDIRKKIKGEKLREIEELVRRVKRTIEKLLEEVKKSVEDSSKRIEELLEAVERSVERTKEEIRRLLDEVRKDRKEELVKRVEERIKRLHDENRRLVKEVIEEVEKLIRDNEKLAEDIEREIRRLLKELDEAAK

SEQ ID NO: 1319 - protein, 178 aa, Artificial Sequence
  Synthetic
DEVEKLLRDLEELDRDIERKVRELLKRNKEVLDDIRDHMVLHEYVNAAGITEVADVIRKTTDKRTVDKLLKELEKILKEVLDRVRRLLEEAKESLDRSREEIERLLEESKTLVDEVRRAGIDKKEVDKIEKHSRDLIERAKRETDRLLEEAERLMREVVDRVRKILEEAKRLIDEARR

SEQ ID NO: 1320 - protein, 182 aa, Artificial Sequence
  Synthetic
DEAEKLLKELRDLLEESRKDLERLLKELEDLLEESRDHMVLHEYVNAAGITRIKETVERRNEREKLEKLLRELKKVVERLKDNLKDNERRNKEAIERVRKKLKDNERENKKVIEDLRAKLKDLEEVKRKIDRLEEESRRVIEEARKRLEEVEEKSKKIIDDARRALDRIDKELRRVVEETRK

SEQ ID NO: 1321 - protein, 174 aa, Artificial Sequence
  Synthetic
SRDEKIRDILRRVLKEVRDSTKKVEEDLEDVHRRTRDHMVLHEYVNAAGITRVRDEGASEELKRRMEEVVRRIEELLKKLLKEDRDVVKEIRDKLDETRKEMEEVAERIKDKIRRGDGREKVAEEVKRIADRLIDLNRRIAEEVDKIVRDSIKKVEEIVTEVEKIVEKLIRDVR

SEQ ID NO: 1322 - protein, 173 aa, Artificial Sequence
  Synthetic
SLEELLEEARKTVERLIRESERVLRESEERVRRLIRDHMVLHEYVNAAGITVIERVEDEEALKELEKLLREDSKRVKEVLDDLRRDLERNKRRNEKVLRELEELLKRLEELVREGVREEELEKLLREIEERVKEMLKRDEDTLREIERKVKEAVRDSERTLEEIEKRVTEEKT

SEQ ID NO: 1323 - protein, 179 aa, Artificial Sequence
  Synthetic
STREDARRLVERVRKEVKRLLKKNSDLLREVTERVRDHMVLHEYVNAAGITEAKRLKDSDERDVERLLDRARKLVKESEDLIRKLLKDLRELVRRSEKDIDELRKELKRLLDELRARATDKDLERVVREIEKEIRDLIRELEENVKTSEKLIEDLIRELEKSVDESRKRVEELVKELRT

SEQ ID NO: 1324 - protein, 175 aa, Artificial Sequence
  Synthetic
SELEKVVDDVRRRLDRLLETSEKLLEDATKRLKDSRDHMVLHEYVNAAGITRLKTVLERRETDKRELLKENKEILERTRELSERNLKEVEDILREVEEEVRKNLRRIEKVLEEVRRKLRSELLKRVEERIKRVLDESKKILKEIADEVRRVLERDKELLKRLEDKNREVSERIRK

SEQ ID NO: 1325 - protein, 174 aa, Artificial Sequence
  Synthetic
SELEKVVKEVADLLRRNLEKSKRVLEEVRRRLEENRDHMVLHEYVNAAGITRILELVREGKDKRDLTRLLEEDDKRVKEALDKSRENNERILKEVRRALRESEEDNRRILKEVREKVDSRLLEELEERVRESIERSRRFIEELEKIVEETLTESEKLARASSEITKTVLDEIRK

SEQ ID NO: 1326 - protein, 180 aa, Artificial Sequence
  Synthetic
SKEEVLDEMRRLHETTKRDIRRVLKEIEELHERTLRDHMVLHEYVNAAGITVIEDIKRKKTPDVEKLVRRVEEMLKELEKHNKKTTDDDKRVLDEIRRRADELVKEDERVLREIEEVVRAGKVDLKELLDESRRVVKESKEDLDRLLKESRDVVDDTRRKSEKNLRDAERVIREAEEAVR

SEQ ID NO: 1327 - protein, 187 aa, Artificial Sequence
  Synthetic
DEEEELRKRLEKLSKEVRELLRRDEEEDRRLNRELRDHMVLHEYVNAAGITEVEDLLRKARRKVSEEELTRLRKKLRDLEEESKEALRELRRRVEELNKENKKSLDDLERRLKELEDRAREVEKRDRREDELRELLRRLEDVIRKLAEDLKRNTEDLRRVIKELAERLEELNKRLKREIRRLKEELR

SEQ ID NO: 1328 - protein, 171 aa, Artificial Sequence
  Synthetic
SEKEKVIKEARELLERLRKRLKDVNDDVTRLLDELRDHMVLHEYVNAAGITRLEEEVPVEDVIRELKRRLEEVDKKNRDILETLKRELDEVSRRTREELEKLRKELEEVEKAGLPAEELKRVADRLRRRLERLVEENERVVKKILDEIRRSVEENKRIVDKVRKDLDERRK

SEQ ID NO: 1329 - protein, 177 aa, Artificial Sequence
  Synthetic
SVIERVEEEMEKVIRDSERVTKEVEDRAREVHERSRDHMVLHEYVNAAGITELRRAGVDKRILDELRKRIKDSREDLERINEELRRALRKLLEDSKRINEELRKTLEELRKRLERVDDEEEVKKLAEEVRRLVEDSIRKLEELARRVDELVRESIERVDRNVEENKRLVREAIERRR

SEQ ID NO: 1330 - protein, 183 aa, Artificial Sequence
  Synthetic
SEIEKLVEDVRKLVEDNLRHSEEVHRRNRRLIEENRDHMVLHEYVNAAGITELRELAERGEIREEEARKVLEEIKRLLDEIRRHSEEVLKEIERTLKENLKHSEEVLRRIEERLEDIKRKDKDSERVRTLVDRLREELKRSLDESEKLNRESRKRVTRSLEKVDDLVRELEKLARKVLEEVKT

SEQ ID NO: 1331 - protein, 181 aa, Artificial Sequence
  Synthetic
EEIERALREMRELSRTHKELVEKILRDIAELAKTHRDHMVLHEYVNAAGITEIADEIRKEDKKEELKRKIDELRRRAEELLKESKEHLKRLEDTVRELIERLKETLKKVEEDLKRILEKLEKSRELDEIAKDVKRLIDENRELLKRVEDEVRRLIRKLEELNRRTEEEVKKLIKKLEDDLK

SEQ ID NO: 1332 - protein, 174 aa, Artificial Sequence
  Synthetic
REIEEAAKDLDRLLEENKKLVKEVEEELRRLLKENRDHMVLHEYVNAAGITELRRRGVPEEELKEVEERARRVIEESRRSSKELEKRLRELLEELRRSTKELEDRLREIKKLLRNGKDVEEVLRRVRKLSRENKEKIRKILEDVKKLSEDNKRRNEELSRRVKTLVDEIKKRAT

SEQ ID NO: 1333 - protein, 177 aa, Artificial Sequence
  Synthetic
SEAEKVVEELKKLLREVEKKIRDHTEDVKRILEELRDHMVLHEYVNAAGITELKDKNSDDDTVRKVKEELDRSHEKLREELRKVAKELKESNEELERDLKRLVEEAEDRLRRLKDRVSEKVLRELEKILEDIKRTLDKLLRENRETLKRIEDRLRELLEENRKLLEKIERELRERSR

SEQ ID NO: 1334 - protein, 178 aa, Artificial Sequence
  Synthetic
SKVEKLEEEIARLVERSRRLVEELKKEVTKVKEKVRDHMVLHEYVNAAGITKLRDIKRRGGSEEVLRRVTEELKKVLEDNRRVIEEVLRDLERILEELKRKAEEVTKRNRDDLKRLRDSGVDEEVLRRVEETSDRSEKELRTVLRDVTEDIKRIAEELKKALEDSTEIIRRAEDELRT

SEQ ID NO: 1335 - protein, 182 aa, Artificial Sequence
  Synthetic
DEVDELLKRLRKLVDEVRKENDKMVKESKRLVEDLRDHMVLHEYVNAAGITELEKILKDTEDKDTLRKIVEEIKRRLRRLLEELKRIIEKALRDNKKLLDEVRKRNKEISDELRRLLEEIRRRNVRVEDIEREAERLLRENEELLRRSEEVIRRSTEKIKKVLRDAEERAREILKRVEDAAK

SEQ ID NO: 1336 - protein, 186 aa, Artificial Sequence
  Synthetic
SEVDEVRKTLEDLLRRLDEENKDIIRRNKELLDDLRDHMVLHEYVNAAGITELRKILEKLKDRETLTRIIEEIEKRARELIKRLRDEIRKIEEESKKSIEDSRKRNDEIRKRLEELIKDLRDKIKDSEELARRITELEKRVREVIERLKEKNKRLEDDSRRVITELRKKLKDLEDRVREEIEELRK

SEQ ID NO: 1337 - protein, 183 aa, Artificial Sequence
  Synthetic
SEVDEVLERIKRLLERLAEHSDKVVRDIEKLLDDNRDHMVLHEYVNAAGITRLEEMRRRGDLREELLERVVREVEKEIRDIKRKNKRSVETVEKLVRDDRKELKRALEDVERLIRELETRLKDKEELRRKLEKVLREAEKVIDELLKKTDEVLKRARETIEDLNRKLDKVLKEVRDKLDRLRD

SEQ ID NO: 1338 - protein, 179 aa, Artificial Sequence
  Synthetic
KDEETLKRLLEKAKEVVDRLKDENEKVTRDNHESVRDHMVLHEYVNAAGITVARDAIRRVREAKEVVDTAEKLLRDNHEHSRDTVKKARELNETSRRHSERIVEKIEEILEEVERTLRENRGDVRELAKKVEKAIRELEELSRENREAVKRISDEIKRLSDENAKDSERIIKEIDDRVR

SEQ ID NO: 1339 - protein, 185 aa, Artificial Sequence
  Synthetic
DDIERLKREIERLLKEAEKISRDNEERSKELLDRLRDHMVLHEYVNAAGITELKRLADKIKDKEELTRRLKEVVDRVEKSVRDSERMLREVVREDEESVRRSKTKLEDLLRKVEELVRRLEKKVTDEKVKRDAREALRKAKKKVDELKRKNDEVHRRSREEVKRLLEENRKLLEDLRRMVREITQ

SEQ ID NO: 1340 - protein, 184 aa, Artificial Sequence
  Synthetic
ELIKKARKDVEEVRERSERLVDELRKRNKKLADESRDHMVLHEYVNAAGITEIEDLLRKRRTKDVLKEIEDLVRELERELRRVVKESSDKVRKLIRENEKVVEESSRLFRDLVEKLRRVVEERNDKKLMEEVERLIKRLEDVNEKSERDVREINKESERVNEETEREVEDAIRKLREVLRRAKK

SEQ ID NO: 1341 - protein, 186 aa, Artificial Sequence
  Synthetic
KEVEDLERRVKEILDRMKRLIDENRKKIEKSIRELRDHMVLHEYVNAAGITELKDLKREGGDDARTLRERVRKIIEDVEEHSRRSTEEVRRIHKENKEHSERSSDEIRELLRRVEELIEEVKRRLRDKEMEKKLEDIVRRVREVVRRAHETNERLVDRSRKAVEKAERTNRRLVEEIRKVAEEVRK

SEQ ID NO: 1342 - protein, 186 aa, Artificial Sequence
  Synthetic
KEVEDLERTVRTILKRMRELITRNEEEIRRSIEELRDHMVLHEYVNAAGITEMKELKKEGGDDKKRLVEEIKRLLDELRENSKRSSDRAKEIHERNKRHSEESSRTIEKLLKELRDLVRDVERKLRDEDAKRKLDELTKRVEKVVREADERNKRLTKRSKEVLDEVHRANEEALKEVEEVVRRVTK

SEQ ID NO: 1343 - protein, 185 aa, Artificial Sequence
  Synthetic
SAEELLRTIEKRIEDNHRRLEEILEEIARLIEDMLRDHMVLHEYVNAAGITVLDRVRRAGVPEEVLERVRRELERLKKELEELRRRSEEKVKELKRRLEEIRRKLEEEHRDLRRKLEELRRDLGDKEEVVKKLVEDVERELERSLREAEDLLRRVEEVIRTSKKESKDVLEKIERLLRDLERRTR

SEQ ID NO: 1344 - protein, 182 aa, Artificial Sequence
  Synthetic
SELEKTLEDLKRHSEENKKKLEEDLRDMERNLKENRDHMVLHEYVNAAGITDLERRFREGDIDERELERVRRKMEEIKKRLDENVERNRRKAEDIKRKLDENVKRSEDRVKEIKEDIRRRVRDKDKAEELERRLDELVKENREIHERVKKALDDIVKELEELHERLKRRLEEILRRIAETVR

SEQ ID NO: 1345 - protein, 179 aa, Artificial Sequence
  Synthetic
RLEDEVRKMEKEVREEVKRLEDESRKVLEESRRNLRDHMVLHEYVNAAGITRIKDLRRRGLDERVLRELLKRVREVHERNRKLLDEVRRASEKVHEDNRRILEEVRKTVKDVVDKLRRVDAKVVKELIDRVRKILEDVEREVKKSIEEVKEINRRLNEEVKKTIEEVKEIVKEVTERAK

SEQ ID NO: 1346 - protein, 183 aa, Artificial Sequence
  Synthetic
SIREKIRELEERLEEVLRRIEENSERVLREAERVLRDHMVLHEYVNAAGITALEEIRKLPVEDELVRRVKELVERLKRHNKKSSEDVERVVRELKEELKRSSEEVKKAVDRLKEELEKVLRDGGEREVDRVIRKLEDVLRKLEEHNRRVVERLKRLLEELKKHNEDSLRKSEEVLRKLEEDAR

SEQ ID NO: 1347 - protein, 174 aa, Artificial Sequence
  Synthetic
SESDEVIRDLARLLDELARHVDDSVRRMDEVVKRSRDHMVLHEYVNAAGITEVEKKPGDERVERMVAEIERLVAEVLEELKKKYEKLKREVEENLRRLEETVRDIVEKARKVTEKGVSKEKIDRIIRELERILEEAKKKHEDVLRRLEDSLRRVAELLKAALDRLREIVDRLRR

SEQ ID NO: 1348 - protein, 174 aa, Artificial Sequence
  Synthetic
SESDDVIRKLRELLEELRTHVEKSIRDLRKILEDSRDHMVLHEYVNAAGITEVRKKPGDEEVRKTVEEISRRVAENVKRLEDLYRRMEEEVKKNLDRLRKRVEDIIREVEEARKKGVDEEKLKDLIRKLRDILRRAAEAHKKLIDDARESLERAKREHEKLIDRLKKILEELER

SEQ ID NO: 1349 - protein, 172 aa, Artificial Sequence
  Synthetic
SRAETVLKEVTDKIKKLADSSDELLRRNKENIDELRDHMVLHEYVNAAGITEIEKGSVDEETLEELIRRVEAELEAHHRELEKNSREDEKRNRDHHAKLEEEMRRVEERLEREGIDDEVVKRVRDLLDTVRRRNEKVNEDVKRMNDKLRRDNEDVIRRVEKLLRELEEKRRT

SEQ ID NO: 1350 - protein, 178 aa, Artificial Sequence
  Synthetic
SEAEKAKETIDRLADRVRKLLEEIKRSLDDSRRKSRDHMVLHEYVNAAGITEVDAAKRGSVSEEELERLIRKLKKTLDELRRRHEKLVEDLRRNLERIKRRLEELTREMRETLERLAREGLDEEVLRTLEEIIRRLTKELEDVLREYERELRRLEEENKRVIDKTEEEIRRLADRLRR

SEQ ID NO: 1351 - protein, 178 aa, Artificial Sequence; identical to SEQ ID NO: 1350
  Synthetic

SEQ ID NO: 1352 - protein, 179 aa, Artificial Sequence
  Synthetic
SEVEELIKRLAKVLKELVDKVRKVIEDTKELLERLRDHMVLHEYVNAAGITEAKDQPIDDEELKEILDRLRKTLEELEEELKKALEDDREEAKRLVDDARRVLKELEEEVREIRERRGESEELDRRIEKVLKEIEEKIREVIKEWERVHREVEELLKRLIDENRKVLDEIRKLLEEKSK

SEQ ID NO: 1353 - protein, 182 aa, Artificial Sequence
  Synthetic
SELEEIEKKVRELTKRHRELVERVRKTVKELIETNRDHMVLHEYVNAAGITEVRDLERRGEPKEDLKARLEDIIRRLAEDIERVKRETDKLLEELARIIEEVEKEMRETNKELDKEIKDGGLDDKALEEAKRVLAENNEVIKDIKRALDELLKELEKSVRESEERLRRLLEEVKRVIEEVAT

SEQ ID NO: 1354 - protein, 177 aa, Artificial Sequence
  Synthetic
SSEERLRAVIEDLKRLAEESRKRHKELIDELAKAVRDHMVLHEYVNAAGITVVDDIRRGVSEELLKRIEEVLDEIRKELEENIKRIRKVLDELRRTSEENIARIEKVLRELEDLVRKGGSDADTIIEEVKRVLEELARSTEEVEKRVRDAIEELERSSEELARRIKEVLKRLEEETR

SEQ ID NO: 1355 - protein, 184 aa, Artificial Sequence
  Synthetic
DEIRKVVKEITDLLKASNDKNRKVVEEIRDLLRKSRDHMVLHEYVNAAGITDLRRRIDKSGDKETAEDIVRRIIEELKRILKEIEDLARRINREIERLVEEVERDNRDVNRAIEELLKDIARRGGSEDLKRVEERAREVSRRNEESMRRVKEDADRVSEANKEVLDRVREEVKRLIEEVRETLR

SEQ ID NO: 1356 - protein, 176 aa, Artificial Sequence
  Synthetic
STAETVAEEVERVLKHSDDLIKEVEDVNRRVEEEIRDHMVLHEYVNAAGITEVRKGVKGEILAEIEKRLADNSEKVREVAERAKKLLEENTARVKDILRESRKLVKDLLDEVRGTGSEEAAREIIKRLREVNKRTKEKLDELIKHSEEVLERVKRLIDELRKHSEEVLEDLRRRAK

SEQ ID NO: 1357 - protein, 186 aa, Artificial Sequence
  Synthetic
SEVDEIIKELERLLAEIARENERIIRESRKLADEVRDHMVLHEYVNAAGITRLADAVRRKGSESEEVKKLIEDVLREIERLLKRIEEENREVVKRNSELVERVRAINEEILRRVAELVEKIARDIGDKDEVTKVKKVADDVLAEIKKLDDETRRVIEDTNKKIADLDKATRDVVRKVLEEVKKLEK

SEQ ID NO: 1358 - protein, 185 aa, Artificial Sequence
  Synthetic
SEIDEVLTRLRKISKDLNETSDRVNERARKIIDDIRDHMVLHEYVNAAGITRLKREIDKTRDRDVLRRILKEIEDVARRVKEINEELLARVEKVVREVEEINRELVKRSREAVEAVKRLLDRGVSDEDKVERVVREVEKLHEEDRKRLEESTRSVRKLLEELKRELEKSTRSVKALVDELRERVR

SEQ ID NO: 1359 - protein, 177 aa, Artificial Sequence
  Synthetic
SEDEDLDRVAEKLAREHKKSVEEIKRVLKSADEESRDHMVLHEYVNAAGITEVEEARRGNIDEELVERLKKKIEDILRTLEERHKKLIKELREILKRLSDESRRLAEETEKVLEDLERKGVDEEVLKKLAEIVRRVKEENRKVNEEVEKRLRELEEENKKVIEDLKSTVEELVERLR

SEQ ID NO: 1360 - protein, 185 aa, Artificial Sequence
  Synthetic
SSVEELLERLRRISEENKRRIEKLLREVEKVLRELRDHMVLHEYVNAAGITKVKEEIKSGLPEEAVKRVLERVRERVKEVLEEADRLNDEMRRIVTEVEKELDKSDKEVEDAVRDILKKIEEGVRDRETAERARETLKRLLDENRDRSKKVKEEIRRILEDLTRTTERVKREIAKLLKELEDTAR

SEQ ID NO: 1361 - protein, 238 aa, Artificial Sequence
  Synthetic
EEDERLTKRVEEIKRENRELLRRLEEEVKELERKSRDHMVLHEYVNAAGITKLDSGKGSTELLVEELEKLIREILKLSEDHNRTLEEVVRKIEDVLRANLERLKELVDEILKALKERGKGDSEELKRKVEKVARDYERLLRKLREVVKRILDESKRLDEELEERLKEVLKKLEELIKRGGPDKDVLTELKRILDELLKLVEKLIRRNLRLLEELLRLVREILRTSNEILEEILKDARR

SEQ ID NO: 1362 - protein, 238 aa, Artificial Sequence
  Synthetic
SKEDKARELEKRLRDNLKKLEEVVRELAEVLKRNLRDHMVLHEYVNAAGITLLDKLRAGGLPKDELEDLRREVEDVLRRLEDLLRKLKKANDESLTRLEELLRRAEEENRRVLTTLRELLRGNGDDRDLARLVARLVEANNRALEELLRLVAKNVEDNNRVLEELLRLVKELAKRLLGRIRDEDLVRDIRRELKELEERARKILRDDERDLRALEKRIRDIIREDREELERLKERARK

SEQ ID NO: 1363 - protein, 243 aa, Artificial Sequence
  Synthetic
KREDILKKLEDIIRDIIDKLRRILEKVKRLNEDIIRDHMVLHEYVNAAGITLLKRIADKSRDRELEDILRRVLEKLRRSLDKLRDTLRKLKEETDTVLERAERTLKELKDRLEKLLRDGEKVSEEDLVEALKALIDELRKVLEDVIRVSKELVERLLRALREHLETNKRLVKELLDALRKTTGDDEEIKRLKEELERRHRRLEEEVERVARELEKAHRDLERDIRRVAEELKKLLKKLRDDRR

SEQ ID NO: 1364 - protein, 247 aa, Artificial Sequence
  Synthetic
SEKEELLKLIKRVIELLKRVLEEHLRLVEDVIRRLRDHMVLHEYVNAAGITDLKRLLDEVRGDKEELDRIKEKLEEVLERYKRRLEEIKRDLERMLEDYKRELKRIEEDLRRVLEEVERIATRGEGPAEALIDKLRKILERALRELDKLSKKLDELLKKVLEELEKSNREIDKLLKDVLRRVEEGGASEDLLRKAKKVITEVREKLKRNLEDVRRVIEDVKRKSARILEEARRLIEEVERELEKIRK

SEQ ID NO: 1365 - protein, 238 aa, Artificial Sequence
  Synthetic
SEAEKIREALETNLRLLEELIKRLKEILDTHNELLRDHMVLHEYVNAAGITLLEEGGLDEEVLREVKRLVDELRKEARRVLDEHEKLVRKIKKEAEDVARESEEIIKEVEDKLKGLDREELLERVRRVLKKSDDLIAELVRRALKILEELTRLLAELLKKVVEILRRIVELVERVLTKKGAPKEDLERLRRKVEELEDRLRRLLEKLARDSAELMRELERILDRYARESEELDRRLAE

SEQ ID NO: 1366 - protein, 247 aa, Artificial Sequence
  Synthetic
SEAEDLEELIKELAELLKDVIRKLEKINRRLVKILRDHMVLHEYVNAAGITELRKGTVEDKDILRDLERRLREILEESDRLLEELKRRLEEILRKSKELLRRLEEVLREILKRAEEVKRSNLPKEELIKEIVKLLEELLRVIEKILEDNIRLLEELVEVIKEILEKHLRLLEELVRVIERILREVGKDKDEAERRRRELKDKLDRLREEHEEVKRRLEEELTRLRETHKKIEKELREALKRVRDRST

SEQ ID NO: 1367 - protein, 240 aa, Artificial Sequence
  Synthetic
SDKEEIKRRVEKTARDLETEHDKIKKRLEDTVRDIRDHMVLHEYVNAAGITKIEKTLREGDGDATDLVDKLLETVKRLNEEVLRTVKKIADELRRLVEEVLRVLRESNETLARLLEEGNVGDEVRERLEEVLRRTEEIIKTLEEIVKRLLDELRRLVEELRRISKKLKDELDKIKEKGKDEKRLIEEVVRLLRENLDVVRRILEALAKLIKELLEALEEVLRRNKELIRELLRVLDEALK

SEQ ID NO: 1368 - protein, 240 aa, Artificial Sequence; identical to SEQ ID NO: 1367
  Synthetic

SEQ ID NO: 1369 - protein, 248 aa, Artificial Sequence
  Synthetic
DEDRIIEEIARLLEELLRELLELIKKLIETNRRLNRDHMVLHEYVNAAGITLLDRLVKKGISDEKLKRIRERLKRALDDLERLHREINKRLEDLVRELEKLVREILKELKDALEELRRASARAGGEEVLRRLEEIVKKLLDLVRRILERLKEIHKDNVRLLRELNERLTRIVEDLVRLIREILREAGVDEKIAEEIERELEELRRMIKRLHEDLERKLKESEDELREIEARLEEKIRRLEEKLERKRR

SEQ ID NO: 1370 - protein, 251 aa, Artificial Sequence
  Synthetic
DEEEKIRTTLDLLRKLLKVLREILEELIRSNKELNRDHMVLHEYVNAAGITLLKKLADDGGVDEEALRRIKKRLEDLIRTNREIEERIDRESERLAEELRRILRELEKELRRLIEDLKEVLKRGLPREELLRRLKKVVEDVLRILEEVLRVVDELDKENVRLLREWLERNKEIVEEVIRILEDLIRKGGSESEEKVRDTEKKLRDLREKHAEIAKELERLLRENRRRLEELAREAKKVLDELRKRLEDERR

SEQ ID NO: 1371 - protein, 238 aa, Artificial Sequence
  Synthetic
DADELLRRLAEEVERVIREAEDLLRRWKETIKKVLRDHMVLHEYVNAAGITVIRELTKTKGDEELAKLIKDLLDTNEKVNRDLLRLIKKLLKDAERVNRRLLELIEELLEELKRVAKDLGLREEADKKLRDIADRARKELEDYERRLKELLKTVEDALRKAEEDSRKLKRDVEELLERGRLRKDDLEDILRKNLDRLRKLLERLREILRENLEALKKTLKRLEDVVREILEDLKRERK

SEQ ID NO: 1372 - protein, 231 aa, Artificial Sequence
  Synthetic
DKAEVLREALKLLKDLLEELIKIHEESLKRILDLIRDHMVLHEYVNAAGITLLERSGLDERELRKVERMATESLRTIAKLKEELRDLARRSLEKLREDLKRVDDTLRKVEEKVRRTGPSEELIEELIRTIEKLLKEIVRINEEVLKAVRELLKTLLKLSEDVVRRIEEILRKGGVPEEIDRELKRVVEELRRLHEEIKERLDDVARRSEEELRRIIKKLKEVVKEIRKKLK

SEQ ID NO: 1373 - protein, 236 aa, Artificial Sequence
  Synthetic
STREKAKKVLDTLRADNEDMKRVVEKILRALKRTNRDHMVLHEYVNAAGITILKEVGVSEEALKEIEDTLKRVLEEIKRLLDESKKLLEDVEREIREILKTSEELLERIEREIETVGSDEKTLAEILKRLLELNEEMNRRLLKILRDLLRLNEEVIRRLLAVLERLLDALKEALDRGDVPEDLLRKLEEELRRIKEKLRKALEELEREHRELEKELDKLHDESRKEHERIEEELRR

SEQ ID NO: 1374 - protein, 247 aa, Artificial Sequence
  Synthetic
SKAEKLLKDLREALEKVKRRYEELERRLDEVLKEHRDHMVLHEYVNAAGITRIEEGGLPEEELEKLKKLAEKVKELLRELLRLSKELVDRVRELLKRDLDLVRRLVEIALKVLREAREQPNDEKRVEKIKRDLEKKARRVREENERIKRDLKRTADESRKRLEKLLEDLKRELDRLREDLDRGRKDIDERVEELIERLIRIIERLLREVIKSHEKLVRTIERLIEESIRVNEELLEVIERLLDRARK

SEQ ID NO: 1375 - protein, 247 aa, Artificial Sequence; identical to SEQ ID NO: 1374
  Synthetic

SEQ ID NO: 1376 - protein, 231 aa, Artificial Sequence
  Synthetic
SKEEEVEKVLRKWEEILRRLIEENKRANDKIRREYRDHMVLHEYVNAAGITVAERLGVSEEVKRILEKLIKLLEDILEYEKENVERLIELNERILRELKKSVEELKALVTRVRRDGLPESEVRKLVEDVLRKNEELLKEAKKAWRDSIENLKRVLEEVAKLVKTVLREIEEKIDDEDVVRALIEVIERLLRVAEEVIRRILKVNTELMRVDERSIRESLKAISEVLKVLDT

SEQ ID NO: 1377 - protein, 231 aa, Artificial Sequence; identical to SEQ ID NO: 1376
  Synthetic

SEQ ID NO: 1378 - protein, 231 aa, Artificial Sequence
  Synthetic
SKDEELARLLEELVERWRKIVEDLERDHRRLVKEIRDHMVLHEYVNAAGITRIRKNGIDERIVRLIEEIAKIIEEVLKEIVKLVERAVRENVRVLRESVRLVAELVETLARLLRGSDERVTEAIKKVLDTSEDLIRRVIKVNEDILREIAKLVEEVLREAERILTEIKKEGDREEIRRILEELKRIVDDVLRIIARILKLLRDLTRRLAEVAKAVHKLLEELLRKLKEDTR

SEQ ID NO: 1379 - protein, 231 aa, Artificial Sequence; identical to SEQ ID NO: 1378
  Synthetic

SEQ ID NO: 1380 - protein, 237 aa, Artificial Sequence
  Synthetic
KEKEDALKKLEDLARKSREDLERVLRKHKKILDKIRDHMVLHEYVNAAGITDILRKTGTESEILKELARLLREHHEALRRLIEELRRLLEEHHKILEDLAREHKRLLDELIKVVADGVDKDELERIIKELRERDKKLVDDLRKVSEDLLDAVRKLVEDLERISRELLRRVEELAKGIDEELAREVERVIKELLDKSKEILERIERAIDELLKVSEEILKLSEDASEELLKILREFAK

SEQ ID NO: 1381 - protein, 237 aa, Artificial Sequence; identical to SEQ ID NO: 1380
  Synthetic

SEQ ID NO: 1382 - protein, 229 aa, Artificial Sequence
  Synthetic
SKEERLREVAEKHKKDLEDIVKRVDEAAKETARRLRDHMVLHEYVNAAGITDLEKGPDDEKLKKVKKILKDIMDRLAELIKKILKLLKENLEKIKELLRRNLEISEELLKLAKGLSDRDVLETVRRVLEKLDEEWDRVLEDSRRIIETILRELDTLLREVEKLIKEIKDEISGSKEVLDILERAVEVVRRVIKALKEVLERHVDATREVIERVKRVNKRLLEAVREVVT

SEQ ID NO: 1383 - protein, 229 aa, Artificial Sequence; identical to SEQ ID NO: 1382
  Synthetic

SEQ ID NO: 1384 - protein, 241 aa, Artificial Sequence
  Synthetic
SEKELLKEILDRIRELLEDDNRLLKRIVDEIRKLLRDHMVLHEYVNAAGITLLDRIGAPEDVIRELTRALKETEEDVDRVIRTLEKLLKEVLDAHEEVVRKLDRLLKEVERLVEGGDAEEVVRDLLRVVKEILDESKAVIDELARVVDEILKLLEEVDRKLAKVVKEILEDVLRGSGDDEDAVRKIAKIIEELKRLLEDLARDTRRVIEEAKRLLKEWRDRNKEVADTLKKLLEDLIRKIR

SEQ ID NO: 1385 - protein, 241 aa, Artificial Sequence; identical to SEQ ID NO: 1384
  Synthetic

SEQ ID NO: 1386 - protein, 246 aa, Artificial Sequence
  Synthetic
SEREELLERIKEILKRVKDKLDEDLKRLKEILEKLRDHMVLHEYVNAAGITEVREKLERTGRTDELVKEVLDTVRRNLENLKRLVEDILRKLEENVKNLTDLVREILKLITELIKRLEDGGLPKEVLDALRRVLEKLEELLREILERLKRSLEAVKRKIEELLKELERSLDELRRALERIRKEIGDSETAVRAIIRVLEKHLEAVRRVLEELLKVLAEHLETVRELIERLKRVLEEAIEVVERVAR

SEQ ID NO: 1387 - protein, 240 aa, Artificial Sequence
  Synthetic
DREKSVRDIEEDLKRVLDKLRRRVETSKEELKKVLRDHMVLHEYVNAAGITVVRELDRGIDSEVLRAVREIVKRLVEVVRRYNELSEKIIRDLVRVNDRVLELLKRIVKRLIDVVRELEKIGDKEKALRRLEEVVKEVKRRIEELLKELEDVHRELVKILEEVNEDLKRVATEVKEIIKTGIKSSEVAKELDEVIKRLLDNLKENTDRLKEVIDRNLADLRDLAEELRAVIERLLEDARR

SEQ ID NO: 1388 - protein, 243 aa, Artificial Sequence
  Synthetic
SEAERLADEVRKAVKKSEEDNETLVREVEKAVRELRDHMVLHEYVNAAGITRLVDLLRDGQVSDRDLLKELEEVLRRVLEALAENHERTEEILKRWLDRYAEDIERLRKVLKEVIEALKRGGSDDKRIVDELEEILRRNEDVLDKIAKRLRRLLEEDRRLLERIVRELKRLLDDLDRITKEGKSEELVRIAIEVLKRLLEIIEELVRLNNEILERLLKIVRELHKDNIKILEDLLRIIEEVLR

SEQ ID NO: 1389 - protein, 245 aa, Artificial Sequence
  Synthetic
SEKDEVTRRIRELLKEAEETNREAIERIKRLLDRVRDHMVLHEYVNAAGITRLKKVLDRGLQDDEALLKLLIDALREHNRLSTELIKILIDVLRTILKIIKDVLATNIEIARRILDLVRRLAERGGLDDRLVKEVEKLVRTAERLHRDALRKVKRLVEELEKRLRELVKTDHDLVRRLETLLRRGSGSKEDLLREIARILAESLRLIRELLKEIEKIVKEIIELLERLNDELRKIIEAILETTKK

SEQ ID NO: 1390 - protein, 245 aa, Artificial Sequence; identical to SEQ ID NO: 1389
  Synthetic

SEQ ID NO: 1391 - protein, 249 aa, Artificial Sequence
  Synthetic
DAEEVVKRLADVLRENDETIRKVVEDLVRIAEENDRDHMVLHEYVNAAGITIVELLRRGGVPEELLDRLAKVVKSIVEKAEKILERLNRVSKAIAEKLKTIVDELNEVSKEIVKRAEDILRKGKDKETVLRALRTLVKEYADLSKEVLERVERIVREYVKLSDEVVKSLAEIVEELIRIIEDLLRKGNLDEDVKRALEELVSRLRKLLEDVKKASEDIVREVERIVRELAKRSDEILKKLEDIVEKLRE

SEQ ID NO: 1392 - protein, 240 aa, Artificial Sequence
  Synthetic
SKEETLKRLLDELEKRNRETVERLERLLKELEDRNRDHMVLHEYVNAAGITKIEESGLSKELKDTLARILEELRKLLEEYFRKNEELLRLLRKLLDEYARTNEELLRLLEELLDTARRTGGDSELLKRLEDIAREYEKRVRRLLEKLKDILDKYRKTVEELVRKMEEILKEAKKTISRIGSEEVKDIVRAMEEVIRRLIEILRRDVELNLDVAKKLLELLKEDSKLNLDVARELLELLDR

SEQ ID NO: 1393 - protein, 240 aa, Artificial Sequence; identical to SEQ ID NO: 1392
  Synthetic

SEQ ID NO: 1394 - protein, 243 aa, Artificial Sequence
  Synthetic
SEAERTKESLKKVLKALVDLNRELLRKLEENMRELRDHMVLHEYVNAAGITKVREGGIVDKDAEREAERLMRELDKSSEDTARETRKLIEESKKSTRRTEEEARKLTETLDRLAKGGLPREDLLRALVRLLEELARLIEEDVRRNAELVKRHIELVERDVAELLRLIKELVDLLADLAEKGSRTEEIRKIVEEILKEIKELADRYREEVRKSKDKLRSILEDYKRKVDELKERLRELIEEVET

SEQ ID NO: 1395 - protein, 186 aa, Artificial Sequence
  Synthetic
SAEDSIRELLERDERLLEEARKEAKRLNEENERLLERDHMVLHEYVNAAGITLDDIRKKIKGEKLREIEELVRRVKRTIEKLLEEVKKSVEDSSKRIEELLEAVERSVERTKEEIRRLLDEVRKDRKEELVKRVEERIKRLHDENRRLVKEVIEEVEKLIRDNEKLAEDIEREIRRLLKELDEAAK

SEQ ID NO: 1396 - protein, 178 aa, Artificial Sequence
  Synthetic
DEVEKLLRDLEELDRDIERKVRELLKRNKEVLDDIERDHMVLHEYVNAAGITVADVIRKTTDKRTVDKLLKELEKILKEVLDRVRRLLEEAKESLDRSREEIERLLEESKTLVDEVRRAGIDKKEVDKIEKHSRDLIERAKRETDRLLEEAERLMREVVDRVRKILEEAKRLIDEARR

SEQ ID NO: 1397 - protein, 182 aa, Artificial Sequence
  Synthetic
DEAEKLLKELRDLLEESRKDLERLLKELEDLLEESKRDHMVLHEYVNAAGITIKETVERRNEREKLEKLLRELKKVVERLKDNLKDNERRNKEAIERVRKKLKDNERENKKVIEDLRAKLKDLEEVKRKIDRLEEESRRVIEEARKRLEEVEEKSKKIIDDARRALDRIDKELRRVVEETRK

SEQ ID NO: 1398 - protein, 182 aa, Artificial Sequence
  Synthetic
RVEDALRKLLDDVRRLVEEAERRLRTSNDKSRRLVERDHMVLHEYVNAAGITVRDVRRRIRDEDVKRVLEELLKRDHDVVRRVLERIDEMLERNSRLVKRVLEDIRRLLKRVREVVERIKRVRSKVVEEVLKELEELIKTAKKIIEDVLRASEDTIRRLEEIIRKVEEDSKRIIEEIERAAR

SEQ ID NO: 1399 - protein, 184 aa, Artificial Sequence
  Synthetic
SLEEVIKTVRKLLEEVERRLREVVERAERMLEEVRRRDHMVLHEYVNAAGITEKALRDKNVSEEIEEKLRKIKEELERDNEKVNRDNERSVETLRRLLDRVRKEVKDIAKELEERLKEVERKSRDDRIVEKLLRDAERIVKRLRELIEKLREEVEKIVDENRKTVEELRRRNEEIVRRLRREIE

SEQ ID NO: 1400 - protein, 177 aa, Artificial Sequence
  Synthetic
ELREDVERVVDEIRRLVEENVRRIDEVAKDIKRLADRDHMVLHEYVNAAGITIRRLKEEGVTEVVDELREEVRKLSEDNRRHSRELIERVKKLLKELEEHSRDLKRRVKELLEDLKRKGVDERVLKKLKEVIEDVERKSRDALRRLEEAIRRVRRESERVNRELDEVIKRVTEELKK

SEQ ID NO: 1401 - protein, 174 aa, Artificial Sequence
  Synthetic
SEDETIRRIVRTVHEESRKSTEDVRREVERVLRESERDHMVLHEYVNAAGITVEETGISEELEERMRRIIREIREHLKDNLRRVREVIERIERKLEETERRDEKVLREIEKKIRDGDGREEVAREVTKIARDTIRENEEIAKEVREIVERSIKNLEEVAEEVERVVRELIEARR

SEQ ID NO: 1402 - protein, 174 aa, Artificial Sequence
  Synthetic
SRDEKIRDILRRVLKEVRDSTKKVEEDLEDVHRRTERDHMVLHEYVNAAGITVRDEGASEELKRRMEEVVRRIEELLKKLLKEDRDVVKEIRDKLDETRKEMEEVAERIKDKIRRGDGREKVAEEVKRIADRLIDLNRRIAEEVDKIVRDSIKKVEEIVTEVEKIVEKLIRDVR

SEQ ID NO: 1403 - protein, 170 aa, Artificial Sequence
  Synthetic
SEVEDVVRKVEKLVRDLIKHVEENVRRVEEVVRKLIRDHMVLHEYVNAAGITLAKEPGSEDLLRKLEKVLKEIDDKLKELEDRLRDMVRRSRESSEENERRLKRVEDEVRRNGISEEVEKVLREVVKEVEKVNRESREVTRRVLEEAKEMLERVKKIVKEVIEKVRRVVK

SEQ ID NO: 1404 - protein, 173 aa, Artificial Sequence
  Synthetic
SLEELLEEARKTVERLIRESERVLRESEERVRRLIERDHMVLHEYVNAAGITIERVEDEEALKELEKLLREDSKRVKEVLDDLRRDLERNKRRNEKVLRELEELLKRLEELVREGVREEELEKLLREIEERVKEMLKRDEDTLREIERKVKEAVRDSERTLEEIEKRVTEEKT

SEQ ID NO: 1405 - protein, 174 aa, Artificial Sequence
  Synthetic
SELEKVVKEVADLLRRNLEKSKRVLEEVRRRLEENLRDHMVLHEYVNAAGITILELVREGKDKRDLTRLLEEDDKRVKEALDKSRENNERILKEVRRALRESEEDNRRILKEVREKVDSRLLEELEERVRESIERSRRFIEELEKIVEETLTESEKLARASSEITKTVLDEIRK

SEQ ID NO: 1406 - protein, 180 aa, Artificial Sequence
  Synthetic
STEEVLDEIRKLHKTLTEDIKRVLREIEELHRRTIERDHMVLHEYVNAAGITIDDVRTKDTPNVEKLLKDLEKSAKENEEHNERTLREDDRVLKEIRRRATELLKANEEMLRRIEEVMRAGKVDAEELLRESKEAIKEVKRVLEELRKESKRVVDETRKLSEENLEHSERVLRKVEEDLR

SEQ ID NO: 1407 - protein, 180 aa, Artificial Sequence
  Synthetic
SKEEVLREIERLHKETIRRIEEVLREATELHKRLTERDHMVLHEYVNAAGITIEDVRRADTPNVEELLRELKDALDKVRDHNRKTLKKNEDVVREIEKEVRELLKEDEDVLRRIEKVMRDGRVDARELLEESRREVERSEKEVERLLRKSRKVVEEVRKLSEENDREVKKILEEVKRRLD

SEQ ID NO: 1408 - protein, 178 aa, Artificial Sequence
  Synthetic
DDLERVLKEIKKAADKIREDNKRTADKIRKRVKELDRDHMVLHEYVNAAGITIKERVRGREEARKVIEELKKLVDEVRKRNEKSIEELKKLLKEDRDLMRRVIEELEDLVRRLREEVRDDEALRRVEEEVERLIRDLRRVLKETSDRVRELIDKHRRLSEEVEKDVKRLIDELKKKTD

SEQ ID NO: 1409 - protein, 187 aa, Artificial Sequence
  Synthetic
SEKETVRDELRKLVETIRKLLEEDKESDKRLADRIRRDHMVLHEYVNAAGITLEKVLEELRKKVSEDELRKLRKRIEDLRRRDEELNKRSREKLEDLNERNKDSLRRIEDELRKLVEEAREVEKRDNDEERLRKLLERLERVIRDLLRKIEENNKRLRKAIKELLDELRKINKELREVIKKLLDDAR

SEQ ID NO: 1410 - protein, 175 aa, Artificial Sequence
  Synthetic
SEEDELRRLLKEVNERVERLLDEIRKELEKIAEELRRDHMVLHEYVNAAGITVEENRVDEEIKKDAERALTELKEEHERLDREAKKDLDRIRKELERLEEEHRRVSERIEEVLDKESDKTEDIAREIRELMERTRRVIEEIKKELRDILEKLRRVSEELNKKLDEILKRIEDRTR

SEQ ID NO: 1411 - protein, 171 aa, Artificial Sequence
  Synthetic
SEKEKVIKEARELLERLRKRLKDVNDDVTRLLDELRRDHMVLHEYVNAAGITLEEEVPVEDVIRELKRRLEEVDKKNRDILETLKRELDEVSRRTREELEKLRKELEEVEKAGLPAEELKRVADRLRRRLERLVEENERVVKKILDEIRRSVEENKRIVDKVRKDLDERRK

SEQ ID NO: 1412 - protein, 177 aa, Artificial Sequence
  Synthetic
SAIEKVKEVVERVLETVRDSVRRSHEESKRLIDKVRRDHMVLHEYVNAAGITVRRKGIPERMVEKLERDLEELLKEIKDTIDRIEEELRTSNRRLKETNDEIAKRLEELLRELSRDRDKDAVEDVLRRIEELIRDLNKKNDDNVRRVKEVIDRAEKLVRDLLREIRKLIEKLIRDTE

SEQ ID NO: 1413 - protein, 177 aa, Artificial Sequence
  Synthetic
SVLEEVRRRVEELLKTVKESVDRSHERSERLIEEVRRDHMVLHEYVNAAGITVREKGIPEDRVKRIEDKLREELERLERENRKIEEDLKRSNDELRRENERIAERLEELLRELSRDTNDKVARDVLEEIERLIREANERNKRNLEDVERVIRELNKENERVLREVEKKIEKLIRETE

SEQ ID NO: 1414 - protein, 183 aa, Artificial Sequence
  Synthetic
KDAEDLERRVRELVEENNRVSKRLAEEVTRLVKENERDHMVLHEYVNAAGITLLDMKRRGEVREEEVKRVLREIEELLREITEHSKEVLKTIEKLLRDSLEHSRRVLEEIERLLETILRKSKDSERLKKLVDELRETLERSLRENEKVADELRKRAEKSLEDVKRVVDELRKIVDDVLKRVED

SEQ ID NO: 1415 - protein, 183 aa, Artificial Sequence
  Synthetic
SEIEKLVEDVRKLVEDNLRHSEEVHRRNRRLIEENERDHMVLHEYVNAAGITLRELAERGEIREEEARKVLEEIKRLLDEIRRHSEEVLKEIERTLKENLKHSEEVLRRIEERLEDIKRKDKDSERVRTLVDRLREELKRSLDESEKLNRESRKRVTRSLEKVDDLVRELEKLARKVLEEVKT

SEQ ID NO: 1416 - protein, 181 aa, Artificial Sequence
  Synthetic
EEIERALREMRELSRTHKELVEKILRDIAELAKTHERDHMVLHEYVNAAGITIADEIRKEDKKEELKRKIDELRRRAEELLKESKEHLKRLEDTVRELIERLKETLKKVEEDLKRILEKLEKSRELDEIAKDVKRLIDENRELLKRVEDEVRRLIRKLEELNRRTEEEVKKLIKKLEDDLK

SEQ ID NO: 1417 - protein, 174 aa, Artificial Sequence
  Synthetic
SEIEELEKRIDELLKELRDLSRRIAEEVKRLLEELKRDHMVLHEYVNAAGITLKRKGVPEEELRRVEEEVERVVRESRKLNKETEDELRRLLEEIKESNDRVEKRARELKKLLRDGKDVEEVLRRLEKLVREDKERLKKVLKDARDLIKKDKDLNEKLSRELEKLVRELEERAR

SEQ ID NO: 1418 - protein, 174 aa, Artificial Sequence
  Synthetic
DELRDVKRELDRLLRENEEIVERIAETVRRLLEELKRDHMVLHEYVNAAGITLRKRGVPEKELKEVADTLRKLLKDIERSNKEVEDRLRKLLEEIKESTDRLREELEEVEKLLRGGKDVETVLRRVRELSRDNKRRMRRVLEEAKRLAKEDKERIDKIRKEIEELIKRLKDKAT

SEQ ID NO: 1419 - protein, 174 aa, Artificial Sequence
  Synthetic
DEEEDLERRIKKLLDENRELLKRIAEELRRLLEELRRDHMVLHEYVNAAGITLKDRGVPEKDLRDVAEKVKKVLKESEDSNRDVKRKLEKLLRDLERSTERLEREARKVRKLLRDGKDIETLLRELEKLSRDNKELLKKIEKEIRDLIKEDKERNRELSERLRKLVEELKKKAT

SEQ ID NO: 1420 - protein, 174 aa, Artificial Sequence
  Synthetic
REIEEAAKDLDRLLEENKKLVKEVEEELRRLLKENRRDHMVLHEYVNAAGITLRRRGVPEEELKEVEERARRVIEESRRSSKELEKRLRELLEELRRSTKELEDRLREIKKLLRNGKDVEEVLRRVRKLSRENKEKIRKILEDVKKLSEDNKRRNEELSRRVKTLVDEIKKRAT

SEQ ID NO: 1421 - protein, 177 aa, Artificial Sequence
  Synthetic
SEAEKVVEELKKLLREVEKKIRDHTEDVKRILEELERDHMVLHEYVNAAGITLKDKNSDDDTVRKVKEELDRSHEKLREELRKVAKELKESNEELERDLKRLVEEAEDRLRRLKDRVSEKVLRELEKILEDIKRTLDKLLRENRETLKRIEDRLRELLEENRKLLEKIERELRERSR

SEQ ID NO: 1422 - protein, 182 aa, Artificial Sequence
  Synthetic
DELEEVVRRVRELSRTVKEELREVIERVRELSERVKRDHMVLHEYVNAAGITVMKRVRDSGLDKSKLEKLEDESRRVLDKSREILRKNEEDNRRLNKELEEILKKNEDDNEDVRRKVDEVTRKGKDAEEVLREVEKVVEDSRRSAKDALKRVEDRVRESDKSVRELLEENRKVVEDIKRRVD

SEQ ID NO: 1423 - protein, 174 aa, Artificial Sequence
  Synthetic
EELERILDKVRKVIEEVRKRLRDDLRTVEKVLKETERDHMVLHEYVNAAGITVEEAARRGRDRREIKEELKKVLDDLRELLRALEEKNRRVNKENEDSLRKIEEDLRDVLRKLEEEIKGREVLRKVRELLRTIREEVERVLRKSNELSTRIKKRIDDVLETLERLLKELDDKLR

SEQ ID NO: 1424 - protein, 178 aa, Artificial Sequence
  Synthetic
SSKDEIRRRVEEVVERSDEIVKRSREHVKTVVDELDRDHMVLHEYVNAAGITLDKIRKDGGSEETLKRVLDELREILKELKEEVKKVKRKLEKVVKENRDTIREVEERNRKILDELRKRGVEERALREVEEISRKSEEKLRRVLKESEDIAKEAEDRLKTVLERVERIADEVLKRLTK

SEQ ID NO: 1425 - protein, 178 aa, Artificial Sequence
  Synthetic
SKVEKLEEEIARLVERSRRLVEELKKEVTKVKEKVDRDHMVLHEYVNAAGITLRDIKRRGGSEEVLRRVTEELKKVLEDNRRVIEEVLRDLERILEELKRKAEEVTKRNRDDLKRLRDSGVDEEVLRRVEETSDRSEKELRTVLRDVTEDIKRIAEELKKALEDSTEIIRRAEDELRT

SEQ ID NO: 1426 - protein, 182 aa, Artificial Sequence
  Synthetic
SDADRVAEELKKLVEDSRRENERVIEESKRLVKENERDHMVLHEYVNAAGITLRDILEKEKDKKTLDDIVREILERLKRLLEKVEDENRKSHEENKRLLEDVKRKNKRISDELKRLLEEIERRNVDVDKVRETVKRLLEENKRVMEKTEEVAKKSSEDIKRVADETRRRAEELLKEVDELRK

SEQ ID NO: 1427 - protein, 182 aa, Artificial Sequence
  Synthetic
DEVREVAERLRRLVDESRKRNEEVIKESEALVDRVRRDHMVLHEYVNAAGITLEKDIRRLKDKKTVEKIIREVLKKIDELLKRVERTNREISKENKRLLDEVRKTNEEISRRLKKLLEDIRRRNVDVETIERVVRELLEENKEVLRKTEEMVKRSTETNKRLLERSKEVADRLRERIKEAAK

SEQ ID NO: 1428 - protein, 175 aa, Artificial Sequence
  Synthetic
SEVDEVLREAKRIVDEVHKDNERATEESRRLVKKVHRDHMVLHEYVNAAGITVKDANIDEKLVTEILKEIEEALKEAARRNKEVKDRLRELSRRVSERNREILEELKERLDRVRERRKDVKELEREVEKLLKRIEESLRRHRKENKRLLEELDRSLRELAKIVKEVLDEIRERTR

SEQ ID NO: 1429 - protein, 175 aa, Artificial Sequence
  Synthetic
SEMDDVLKKLAETVKRIIERLKKLTDDSRRLVEEVHRDHMVLHEYVNAAGITAEERNIDEKDVRKLLEDLKKKSEEVAERNKRILDTLREISKRAEDEVRKVLKELEKTLKELEDRRPDVRELSEEVKKLLDEVRKALKRHKDENDKLLKEIEDSLRRHKEENDRLLEKLKESTR

SEQ ID NO: 1430 - protein, 178 aa, Artificial Sequence
  Synthetic
SEEEKLKEVKDRIREVLRKLEEHTDKVKKEVEKVLRRDHMVLHEYVNAAGITLERLRRKKKDAEDLLRELEKIIEEIERELDRVLEENDKMAEEWKKLLDKVLDDNRKSIRDIEKELDDREPTDELVTEVEKLLRDDEETNRDVVKKVREAVKKDADTNRKVIEEVKKVLEDAARRLD

SEQ ID NO: 1431 - protein, 186 aa, Artificial Sequence
  Synthetic
SRVDEVIERLERLLRELDKINRDMIEDDKRLNTELNRDHMVLHEYVNAAGITLEEIRKKLSDEKTLEEIIERVERRLEELIERSKRRNREILERSKELIERSKKTNEEILRRAEELIKRLREEVKDIKEALDKIRRLEERARRVIEELDEKNRRALERSKENVKRLDERNERLRKELEEKVRRLRK

SEQ ID NO: 1432 - protein, 183 aa, Artificial Sequence
  Synthetic
SEVDEVLERIKRLLERLAEHSDKVVRDIEKLLDDNRRDHMVLHEYVNAAGITLEEMRRRGDLREELLERVVREVEKEIRDIKRKNKRSVETVEKLVRDDRKELKRALEDVERLIRELETRLKDKEELRRKLEKVLREAEKVIDELLKKTDEVLKRARETIEDLNRKLDKVLKEVRDKLDRLRD

SEQ ID NO: 1433 - protein, 184 aa, Artificial Sequence
  Synthetic
ELIKKARKDVEEVRERSERLVDELRKRNKKLADESRRDHMVLHEYVNAAGITIEDLLRKRRTKDVLKEIEDLVRELERELRRVVKESSDKVRKLIRENEKVVEESSRLFRDLVEKLRRVVEERNDKKLMEEVERLIKRLEDVNEKSERDVREINKESERVNEETEREVEDAIRKLREVLRRAKK

SEQ ID NO: 1434 - protein, 186 aa, Artificial Sequence
  Synthetic
KEVEDLERTVRTILKRMRELITRNEEEIRRSIEELKRDHMVLHEYVNAAGITMKELKKEGGDDKKRLVEEIKRLLDELRENSKRSSDRAKEIHERNKRHSEESSRTIEKLLKELRDLVRDVERKLRDEDAKRKLDELTKRVEKVVREADERNKRLTKRSKEVLDEVHRANEEALKEVEEVVRRVTK

SEQ ID NO: 1435 - protein, 176 aa, Artificial Sequence
  Synthetic
REAEEAKEEVEELNRRNKKELDDARRRVDELDKRNKRDHMVLHEYVNAAGITLERVKEEGRSDDRLREKIERMLKTSADELERLKEENKRALRDLAERLRELIERNRRKLEEITRRTVPDKDVLKRLAELIKESIRELERVLEELAEKIDRSLKELDDVLRKNETDLKRVIEDLKR

SEQ ID NO: 1436 - protein, 186 aa, Artificial Sequence
  Synthetic
SEIEKLIEELRRELEKVKDELERSIEEMDRELDDVRRDHMVLHEYVNAAGITVTERTKRGDRPEEVLRKELEDIKRKLRRILEEHHEKIRRIKEKLRRENKRVRDELKRIKDEIDEKVKDVRRKGADEELLKRLEEVAEDVKRALEELLKKHTRVVERVEKALDELDKELERIVREAEKELDRREK

SEQ ID NO: 1437 - protein, 179 aa, Artificial Sequence
  Synthetic
RLEDEVRKMEKEVREEVKRLEDESRKVLEESRRNLDRDHMVLHEYVNAAGITIKDLRRRGLDERVLRELLKRVREVHERNRKLLDEVRRASEKVHEDNRRILEEVRKTVKDVVDKLRRVDAKVVKELIDRVRKILEDVEREVKKSIEEVKEINRRLNEEVKKTIEEVKEIVKEVTERAK

SEQ ID NO: 1438 - protein, 183 aa, Artificial Sequence
  Synthetic
SIREKIRELEERLEEVLRRIEENSERVLREAERVLKRDHMVLHEYVNAAGITLEEIRKLPVEDELVRRVKELVERLKRHNKKSSEDVERVVRELKEELKRSSEEVKKAVDRLKEELEKVLRDGGEREVDRVIRKLEDVLRKLEEHNRRVVERLKRLLEELKKHNEDSLRKSEEVLRKLEEDAR

SEQ ID NO: 1439 - protein, 182 aa, Artificial Sequence
  Synthetic
SIEDLVRELKKKVDEVAEDLRRKVREALERSRENIDRDHMVLHEYVNAAGITVDKLRKETREEEVKDILRRVLELSKRIVEESKEILDRVLELSKKVVDDIEEIIRRVEETVKEVLTRLSRVDDKVVKKLIKEVDDILREVTKLVEKLIRELEDINRKVNERNRRLAEESRKILDEVEKRVR

SEQ ID NO: 1440 - protein, 179 aa, Artificial Sequence
  Synthetic
SKAEEVEELVKKLLAEVKKSLDDVRRTVEKLLREVRRDHMVLHEYVNAAGITLKDLKDDGQDERAVRRVVEEIKELLDRNNEDSKRVVKEIRKLLDENDKTSKRVVEEIKRLLDEVRKEGKISEEKVEKLERDVRRALERDTRENKKLEDRVETALREDKKRNDDLREDVKRVLEEIRT

SEQ ID NO: 1441 - protein, 177 aa, Artificial Sequence
  Synthetic
SAADEVVERMKELVATVKRENDEVVKELKKLVKELERDHMVLHEYVNAAGITLARRVGKDKREVVEEVRRTSKELVERNEETAKRVDDLVRRLVEENRRSVTEVEELVKELVKELRRGSGSEDLVREVEKRVRDIVEESRKLAEETRKAVEDIIEKSKRIAEDTLEKNKEMVERLER

SEQ ID NO: 1442 - protein, 174 aa, Artificial Sequence
  Synthetic
SESDEVIRDLARLLDELARHVDDSVRRMDEVVKRSTRDHMVLHEYVNAAGITVEKKPGDERVERMVAEIERLVAEVLEELKKKYEKLKREVEENLRRLEETVRDIVEKARKVTEKGVSKEKIDRIIRELERILEEAKKKHEDVLRRLEDSLRRVAELLKAALDRLREIVDRLRR

SEQ ID NO: 1443 - protein, 174 aa, Artificial Sequence
  Synthetic
KEVEDAVKELEDLLRANEDKTRSIVEDMRASNKDLERDHMVLHEYVNAAGITLRRAGVPRDSLKRLAEDVERVTRESRELLERVHRADRELIERLKESNERLRRAIEEIRKAIKGGSDIKTLLDRVRKLAEEDAERLDRLRRESEELNERVRRVDKKLLEEIRRKAKKVEDDTR

SEQ ID NO: 1444 - protein, 184 aa, Artificial Sequence
  Synthetic
DEIRKVVKEITDLLKASNDKNRKVVEEIRDLLRKSKRDHMVLHEYVNAAGITLRRRIDKSGDKETAEDIVRRIIEELKRILKEIEDLARRINREIERLVEEVERDNRDVNRAIEELLKDIARRGGSEDLKRVEERAREVSRRNEESMRRVKEDADRVSEANKEVLDRVREEVKRLIEEVRETLR

SEQ ID NO: 1445 - protein, 186 aa, Artificial Sequence
  Synthetic
SRVEEIIEDLRRLLEEIRKENEDSIRRSKELLDRVKRDHMVLHEYVNAAGITIEKEVREKGSESEEVKKALRAVLEELEKLLRRVAEINEEVLRRNSKLVEEDERRNREVLKELARLVEELIREIGDEDKARKVAEVAEKVLRDIDKLDRESKEAFRATNEEIAKLDEDTARVAERVKKAIEDLAK

SEQ ID NO: 1446 - protein, 186 aa, Artificial Sequence; identical to SEQ ID NO: 1445
  Synthetic

SEQ ID NO: 1447 - protein, 181 aa, Artificial Sequence
  Synthetic
SEVDDVLRRLEELIKTLEDINAKSLEDIKKLIDDLARDHMVLHEYVNAAGITLREAKKGIDSREAEEIAKRVLEELKRTSDDLRKKVERVDEDLRRLLRENHERNKKILRDLERLLRDAARRGVPKEALDRMREEIRRLEEESRKSDETIERLIRELRRRVEEVLKTSTDLIRELEEEVKK

SEQ ID NO: 1448 - protein, 183 aa, Artificial Sequence
  Synthetic
SKLEEVEKAVRKVIEDSRRVNEEVNRRSEEVVRELERDHMVLHEYVNAAGITARRVLKGSGDERLAAEVERIIEEIRELNERDRKRVEEIRKEIEDLNRDLNRRSKESEDRLRKLLEDATRGGVTKEADEVVERAERISEENKRRVEDVARKSKELVEDVRRHSEEVVRRVEELVKEVEERVR

SEQ ID NO: 1449 - protein, 238 aa, Artificial Sequence
  Synthetic
EEDERLTKRVEEIKRENRELLRRLEEEVKELERKSERDHMVLHEYVNAAGITLDSGKGSTELLVEELEKLIREILKLSEDHNRTLEEVVRKIEDVLRANLERLKELVDEILKALKERGKGDSEELKRKVEKVARDYERLLRKLREVVKRILDESKRLDEELEERLKEVLKKLEELIKRGGPDKDVLTELKRILDELLKLVEKLIRRNLRLLEELLRLVREILRTSNEILEEILKDARR

SEQ ID NO: 1450 - protein, 245 aa, Artificial Sequence
  Synthetic
TEEEVLRKVEKLIKDLLDVLRDLLRASEEVVREALRRDHMVLHEYVNAAGITSRALSGGSRESVESALAKNEERLKKILEDADRVLDKWRRLLEELSKKAKAVLDEVRKRLEEIKREVPETEKLRTLLTILEEILRALEKIIRDILRINERLLEKLKRILERLRETNREIDERIRKLVEEARGGSEEKLRRDLTETKKELEKRHEDLRRELEKLLRDYKRELEEIERALEEIEKTLKRRADETRR

SEQ ID NO: 1451 - protein, 234 aa, Artificial Sequence
  Synthetic
SAKETIRKLIEENKDIIRKLAEKLKRLLEESERIAERDHMVLHEYVNAAGITLRRVGSGIDEELLKELEKELARLEEELKEILDRVRDLHRRLAEEIRKILEESKKLNEELEDRLRKDGDVEELLELLERVHATDVRLLRELLKLLKKVHEDVVSLLERLLELLKRVLDRIVEELGLSDKELEKLLEDLEREIRRLAKRLKELSDRLEEKIRKIKRELDDLSARLREKIERTRK

SEQ ID NO: 1452 - protein, 238 aa, Artificial Sequence
  Synthetic
SKEDKARELEKRLRDNLKKLEEVVRELAEVLKRNLERDHMVLHEYVNAAGITLDKLRAGGLPKDELEDLRREVEDVLRRLEDLLRKLKKANDESLTRLEELLRRAEEENRRVLTTLRELLRGNGDDRDLARLVARLVEANNRALEELLRLVAKNVEDNNRVLEELLRLVKELAKRLLGRIRDEDLVRDIRRELKELEERARKILRDDERDLRALEKRIRDIIREDREELERLKERARK

SEQ ID NO: 1453 - protein, 244 aa, Artificial Sequence
  Synthetic
SAEETLRRITEESKRVLEEITKKYEDLERESREVLRRDHMVLHEYVNAAGITLTKGGDDKDEVLTVLEKVLDELLKLHRENLRVIKELLRKVLEVDRENLEVLKRLLEKARDLLRRSGRDEKDLKKLEDELRKVKEELEKKHEASKRDIEDLERELDKVTEEVERLLRKLKEELRRAAEGSDEDRERLARLLKALADKLIRVLEEILKINEELNRKIIKFARENLERNRRVNKKVIEVLREAAR

SEQ ID NO: 1454 - protein, 250 aa, Artificial Sequence
  Synthetic
STEEILKRVKEILDELAKELRDIIRESLRTIEELLDRDHMVLHEYVNAAGITVKTIKDGVKDSEELLRRLKRLLEDLRRAHEELLKRLKEAVDEHRDRLRKILEELERVLKELRKRIEELRRSGDRISEKDVLRKLEEVLRKALEILERLLKKIRESARELLKIIEEVLDANIKVMEEALKTIKELLKDGPDEVKRRLEEKERRIRTRYEELRRRLRKRVKDYEDKLREIEKKVRRDAERIEEELERAKK

SEQ ID NO: 1455 - protein, 238 aa, Artificial Sequence
  Synthetic
SEAEKIREALETNLRLLEELIKRLKEILDTHNELLRRDHMVLHEYVNAAGITLEEGGLDEEVLREVKRLVDELRKEARRVLDEHEKLVRKIKKEAEDVARESEEIIKEVEDKLKGLDREELLERVRRVLKKSDDLIAELVRRALKILEELTRLLAELLKKVVEILRRIVELVERVLTKKGAPKEDLERLRRKVEELEDRLRRLLEKLARDSAELMRELERILDRYARESEELDRRLAE

SEQ ID NO: 1456 - protein, 238 aa, Artificial Sequence; identical to SEQ ID NO: 1455
  Synthetic

SEQ ID NO: 1457 - protein, 242 aa, Artificial Sequence
  Synthetic
SEKERLMRLLDKLKDLNRRLVERIKELLDKALELHKRDHMVLHEYVNAAGITVERGGVPEELLTRIDELIKKLEDEARKISKEVKRLIDELKKRLEDIHREVDRLIRELKETLKGVTDKDELLRRVAEVLERIARLSEELIREVKEVLEKIVELSRELLKRVLDVLRRIAELLEDALRKGNVSEETVRRLREALKKLEDDLRKIERDAEREYKKLKDELEELTERYRREIRKLKEELKADRK

SEQ ID NO: 1458 - protein, 242 aa, Artificial Sequence; identical to SEQ ID NO: 1457
  Synthetic

SEQ ID NO: 1459 - protein, 247 aa, Artificial Sequence
  Synthetic
SEAEDLEELIKELAELLKDVIRKLEKINRRLVKILERDHMVLHEYVNAAGITLRKGTVEDKDILRDLERRLREILEESDRLLEELKRRLEEILRKSKELLRRLEEVLREILKRAEEVKRSNLPKEELIKEIVKLLEELLRVIEKILEDNIRLLEELVEVIKEILEKHLRLLEELVRVIERILREVGKDKDEAERRRRELKDKLDRLREEHEEVKRRLEEELTRLRETHKKIEKELREALKRVRDRST

SEQ ID NO: 1460 - protein, 247 aa, Artificial Sequence; identical to SEQ ID NO: 1459
  Synthetic

SEQ ID NO: 1461 - protein, 240 aa, Artificial Sequence
  Synthetic
SDKEEIKRRVEKTARDLETEHDKIKKRLEDTVRDIKRDHMVLHEYVNAAGITIEKTLREGDGDATDLVDKLLETVKRLNEEVLRTVKKIADELRRLVEEVLRVLRESNETLARLLEEGNVGDEVRERLEEVLRRTEEIIKTLEEIVKRLLDELRRLVEELRRISKKLKDELDKIKEKGKDEKRLIEEVVRLLRENLDVVRRILEALAKLIKELLEALEEVLRRNKELIRELLRVLDEALK

SEQ ID NO: 1462 - protein, 240 aa, Artificial Sequence; identical to SEQ ID NO: 1461
  Synthetic

SEQ ID NO: 1463 - protein, 248 aa, Artificial Sequence
  Synthetic
DEDRIIEEIARLLEELLRELLELIKKLIETNRRLNERDHMVLHEYVNAAGITLDRLVKKGISDEKLKRIRERLKRALDDLERLHREINKRLEDLVRELEKLVREILKELKDALEELRRASARAGGEEVLRRLEEIVKKLLDLVRRILERLKEIHKDNVRLLRELNERLTRIVEDLVRLIREILREAGVDEKIAEEIERELEELRRMIKRLHEDLERKLKESEDELREIEARLEEKIRRLEEKLERKRR

SEQ ID NO: 1464 - protein, 238 aa, Artificial Sequence
  Synthetic
DADELLRRLAEEVERVIREAEDLLRRWKETIKKVLDRDHMVLHEYVNAAGITIRELTKTKGDEELAKLIKDLLDTNEKVNRDLLRLIKKLLKDAERVNRRLLELIEELLEELKRVAKDLGLREEADKKLRDIADRARKELEDYERRLKELLKTVEDALRKAEEDSRKLKRDVEELLERGRLRKDDLEDILRKNLDRLRKLLERLREILRENLEALKKTLKRLEDVVREILEDLKRERK

SEQ ID NO: 1465 - protein, 231 aa, Artificial Sequence
  Synthetic
DKAEVLREALKLLKDLLEELIKIHEESLKRILDLIDRDHMVLHEYVNAAGITLERSGLDERELRKVERMATESLRTIAKLKEELRDLARRSLEKLREDLKRVDDTLRKVEEKVRRTGPSEELIEELIRTIEKLLKEIVRINEEVLKAVRELLKTLLKLSEDVVRRIEEILRKGGVPEEIDRELKRVVEELRRLHEEIKERLDDVARRSEEELRRIIKKLKEVVKEIRKKLK

SEQ ID NO: 1466 - protein, 247 aa, Artificial Sequence
  Synthetic
SKAEKLLKDLREALEKVKRRYEELERRLDEVLKEHERDHMVLHEYVNAAGITIEEGGLPEEELEKLKKLAEKVKELLRELLRLSKELVDRVRELLKRDLDLVRRLVEIALKVLREAREQPNDEKRVEKIKRDLEKKARRVREENERIKRDLKRTADESRKRLEKLLEDLKRELDRLREDLDRGRKDIDERVEELIERLIRIIERLLREVIKSHEKLVRTIERLIEESIRVNEELLEVIERLLDRARK

SEQ ID NO: 1467 - protein, 239 aa, Artificial Sequence
  Synthetic
SERELIERWLELHKEILRLIRELVERLLKLHREILDRDHMVLHEYVNAAGITARKLGLDKEAKDELREIAKRVEDKLEKLERESRKVEEDLKRKLKELTDESDTVEKRVRDVVRRGTQSREEIAEELLRLDRKLLKAVEELLKEILDLNKKLLDDVRAILEETRRVLEKLLDRVRRGERTDDERRTLTELLKRMEDILEKVERTLKKLLDDSARMAEEVKKTLKELLERSEKVAEDVRK

SEQ ID NO: 1468 - protein, 246 aa, Artificial Sequence
  Synthetic
KEIEETLKELEDLNREMVETNRRVLEETRRLNKETVRDHMVLHEYVNAAGITLVDDVRKGPTSEELKRLLAELEELLARVVRRVEELLKKSTDLLERAVKDSADALRRSHEVLKEVASRVKRAKDEGLPREEVLRLLRELLERHAKVLKDIVRVSEKLLREHLKVLREIVEVLEELLERILKVILDTTGGDKAVEELEKALEEIKRRLKEVIDRYEDELRKLRKEYKEKIDKYERKLEEIERRERT

SEQ ID NO: 1469 - protein, 231 aa, Artificial Sequence
  Synthetic
SKEEEVEKVLRKWEEILRRLIEENKRANDKIRREYERDHMVLHEYVNAAGITAERLGVSEEVKRILEKLIKLLEDILEYEKENVERLIELNERILRELKKSVEELKALVTRVRRDGLPESEVRKLVEDVLRKNEELLKEAKKAWRDSIENLKRVLEEVAKLVKTVLREIEEKIDDEDVVRALIEVIERLLRVAEEVIRRILKVNTELMRVDERSIRESLKAISEVLKVLDT

SEQ ID NO: 1470 - protein, 231 aa, Artificial Sequence; identical to SEQ ID NO: 1469
  Synthetic

SEQ ID NO: 1471 - protein, 247 aa, Artificial Sequence
  Synthetic
RDRDVLRKVKAEIEELVARIEKVSRDALSEVKRLLDRDHMVLHEYVNAAGITLRKIRDTRGDDEVVKETEEVLRDNHRLLEELIRRLIKVLEEWLRRHKKLLDEIRELLKEILRLVKESGVSEDLLRRLKRVIEELDKKLKESEEKLRRVVEKAKEDLKAVLEEHRKVLEDLKRALEEVREKLRERGSEEVVEELLRMLKRVAEEMKRVHDDLSRAVEKVVRDVVRVDKELLDELARILRRLEEVIT

SEQ ID NO: 1472 - protein, 231 aa, Artificial Sequence
  Synthetic
SKDEELARLLEELVERWRKIVEDLERDHRRLVKEIRRDHMVLHEYVNAAGITIRKNGIDERIVRLIEEIAKIIEEVLKEIVKLVERAVRENVRVLRESVRLVAELVETLARLLRGSDERVTEAIKKVLDTSEDLIRRVIKVNEDILREIAKLVEEVLREAERILTEIKKEGDREEIRRILEELKRIVDDVLRIIARILKLLRDLTRRLAEVAKAVHKLLEELLRKLKEDTR

SEQ ID NO: 1473 - protein, 231 aa, Artificial Sequence; identical to SEQ ID NO: 1472
  Synthetic

SEQ ID NO: 1474 - protein, 238 aa, Artificial Sequence
  Synthetic
SEIEDVIRRLRKILEDLERVSEKLLREIKKILDEARRDHMVLHEYVNAAGITAVRVFRDGSGSKEELAKLVEELIRELAKLAKEVDEIHKRIVERLKALVEDAERIHRKIVETLEEIVRGVPSEELKRVVEAIVEVIKEHLKVLADVIRRIIKAIEENAETIKRVLEDIVRVLELVLRGEGSIEDLVREVERLIKRIEDSLRELEKTVRELLKRIKEASDKVREDVDRLIKELKEAAD

SEQ ID NO: 1475 - protein, 229 aa, Artificial Sequence
  Synthetic
SKEERLREVAEKHKKDLEDIVKRVDEAAKETARRLERDHMVLHEYVNAAGITLEKGPDDEKLKKVKKILKDIMDRLAELIKKILKLLKENLEKIKELLRRNLEISEELLKLAKGLSDRDVLETVRRVLEKLDEEWDRVLEDSRRIIETILRELDTLLREVEKLIKEIKDEISGSKEVLDILERAVEVVRRVIKALKEVLERHVDATREVIERVKRVNKRLLEAVREVVT

SEQ ID NO: 1476 - protein, 229 aa, Artificial Sequence; identical to SEQ ID NO: 1475
  Synthetic

SEQ ID NO: 1477 - protein, 241 aa, Artificial Sequence
  Synthetic
SEKELLKEILDRIRELLEDDNRLLKRIVDEIRKLLERDHMVLHEYVNAAGITLDRIGAPEDVIRELTRALKETEEDVDRVIRTLEKLLKEVLDAHEEVVRKLDRLLKEVERLVEGGDAEEVVRDLLRVVKEILDESKAVIDELARVVDEILKLLEEVDRKLAKVVKEILEDVLRGSGDDEDAVRKIAKIIEELKRLLEDLARDTRRVIEEAKRLLKEWRDRNKEVADTLKKLLEDLIRKIR

SEQ ID NO: 1478 - protein, 241 aa, Artificial Sequence; identical to SEQ ID NO: 1477
  Synthetic

SEQ ID NO: 1479 - protein, 240 aa, Artificial Sequence
  Synthetic
DREKSVRDIEEDLKRVLDKLRRRVETSKEELKKVLKRDHMVLHEYVNAAGITVRELDRGIDSEVLRAVREIVKRLVEVVRRYNELSEKIIRDLVRVNDRVLELLKRIVKRLIDVVRELEKIGDKEKALRRLEEVVKEVKRRIEELLKELEDVHRELVKILEEVNEDLKRVATEVKEIIKTGIKSSEVAKELDEVIKRLLDNLKENTDRLKEVIDRNLADLRDLAEELRAVIERLLEDARR

SEQ ID NO: 1480 - protein, 240 aa, Artificial Sequence; identical to SEQ ID NO: 1479
  Synthetic

SEQ ID NO: 1481 - protein, 252 aa, Artificial Sequence
  Synthetic
SLEEITKRLLELVEENLARHEEILRELLELAKRLAKRDHMVLHEYVNAAGITLKLLEDNGSSEEDLKRLLKEVIEELRAVVKRVKDKWDEVVKRIEDLVKKLKELHDDTLRKLRELVRKIVTDISESGGEAEKVKRVVEKILELVERLAKVVKESVEKLLEILRELAEVSKRVAEALLRLLEELVRVIRIKDERTLREVVRKVLEEAKRLLDELEEVHKRVKKELEDIIEENRRVVKRVRDELREIKRELDE

SEQ ID NO: 1482 - protein, 252 aa, Artificial Sequence; identical to SEQ ID NO: 1481
  Synthetic

SEQ ID NO: 1483 - protein, 241 aa, Artificial Sequence
  Synthetic
SAEEAVEKLVRIARAIVKINEDLSREVVRILREIVRRDHMVLHEYVNAAGITVKVVEDGGLSEDVVRKLRKLVKELEDLLKKSNDDIRKLVEDVARRLKESNDEIRRLVERLEELLKRGPGDEELLRLVEELTEELLRTHEEVVKALEKLTADLLELHRELLERVRRLTKRIEEELKRVGVSEELLRRLEELRKRLEKVLDDSAKELEKLKRELERLLEESRRKLEKLKRDLERVLEETRR

SEQ ID NO: 1484 - protein, 237 aa, Artificial Sequence
  Synthetic
REDEVLRDIERLLREIEEKIRRILEESTAELRKVEERDHMVLHEYVNAAGITKEDVERKGIDEELRKLLDEVLDKLTKLIERNKRSLERILELIKRIIDENLEVLRDIIRLLEELLKATKDNGVPKDEVIKLVEDVVRRIEELVTRVVARNEKLVKDLDDLAKKNVRENEELLREIDRGLDEDLLEKIKRVIREHIKALEKLARDLKEILRRHIEALKELARDLAEVIRKLLEDVKR

SEQ ID NO: 1485 - protein, 237 aa, Artificial Sequence; identical to SEQ ID NO: 1484
  Synthetic

SEQ ID NO: 1486 - protein, 237 aa, Artificial Sequence
  Synthetic
SREDLLRSLAELIETILRKSSELLDRLLKLVREHSERDHMVLHEYVNAAGITLKLIKGGISEDDVRRIVKEAKDELRRSVEEVKKSVDDLKEELKRSLREVRELVKSIADALEEIVRRSSGLGEVIKKLLELLRRLLEVHERTIRLLAELLERHLEVHEESIRLLLRLLEELLELVERKGDEKELRRIAEAVERVLRDHKAKNDKILRDVEEVLRRHLEELARILKDVKKVLDEARK

SEQ ID NO: 1487 - protein, 243 aa, Artificial Sequence
  Synthetic
SEAERLADEVRKAVKKSEEDNETLVREVEKAVRELKRDHMVLHEYVNAAGITLVDLLRDGQVSDRDLLKELEEVLRRVLEALAENHERTEEILKRWLDRYAEDIERLRKVLKEVIEALKRGGSDDKRIVDELEEILRRNEDVLDKIAKRLRRLLEEDRRLLERIVRELKRLLDDLDRITKEGKSEELVRIAIEVLKRLLEIIEELVRLNNEILERLLKIVRELHKDNIKILEDLLRIIEEVLR

SEQ ID NO: 1488 - protein, 243 aa, Artificial Sequence; identical to SEQ ID NO: 1487
  Synthetic

SEQ ID NO: 1489 - protein, 245 aa, Artificial Sequence
  Synthetic
SEKDEVTRRIRELLKEAEETNREAIERIKRLLDRVRRDHMVLHEYVNAAGITLKKVLDRGLQDDEALLKLLIDALREHNRLSTELIKILIDVLRTILKIIKDVLATNIEIARRILDLVRRLAERGGLDDRLVKEVEKLVRTAERLHRDALRKVKRLVEELEKRLRELVKTDHDLVRRLETLLRRGSGSKEDLLREIARILAESLRLIRELLKEIEKIVKEIIELLERLNDELRKIIEAILETTKK

SEQ ID NO: 1490 - protein, 247 aa, Artificial Sequence
  Synthetic
DEERLAEELERVLDRNRKLLEEALRELRRVIEENRKRDHMVLHEYVNAAGITLKVLRELSRGDSDEELRKVIEDLIRKLTKVLDKVRSLVEENIERLARVLEKLERLARENLEDLKKVLDDVDKKLKDRRLVERLAELVRELIEVNKEILEMLKEIVRELLEINRTLLERLKDLVATALEIIKLLARGDGTEEDVERAVKEIRDRLRKLLEDYERAVRRLEDKLRRVRERYEAVLKRIKDKLEETKR

SEQ ID NO: 1491 - protein, 243 aa, Artificial Sequence
  Synthetic
SRVEELKKLIEDILRISREVVERIARVAEDIHRINRRDHMVLHEYVNAAGITVEEILARKVSGTEAAEALRDTIRRVVDEIRKLLEEHEKRSAELLEEIRKLLEDILRRSERAVEEIRELLKKGVSTKDVLRIIEEILREHLELLERVVRRIEEILRELLKTIEEIVKRIKEILEELKEVLKRGSVGDDEVEREIRRVKEDLDRILEEYRRLLEEIKRKLEEILRRVEELHRRLRRKLEEIDR

SEQ ID NO: 1492 - protein, 243 aa, Artificial Sequence; identical to SEQ ID NO: 1491
  Synthetic

SEQ ID NO: 1493 - protein, 249 aa, Artificial Sequence
  Synthetic
DAEEVVKRLADVLRENDETIRKVVEDLVRIAEENDRRDHMVLHEYVNAAGITVELLRRGGVPEELLDRLAKVVKSIVEKAEKILERLNRVSKAIAEKLKTIVDELNEVSKEIVKRAEDILRKGKDKETVLRALRTLVKEYADLSKEVLERVERIVREYVKLSDEVVKSLAEIVEELIRIIEDLLRKGNLDEDVKRALEELVSRLRKLLEDVKKASEDIVREVERIVRELAKRSDEILKKLEDIVEKLRE

SEQ ID NO: 1494 - protein, 249 aa, Artificial Sequence; identical to SEQ ID NO: 1493
  Synthetic

SEQ ID NO: 1495 - protein, 240 aa, Artificial Sequence
  Synthetic
DKDKRLEELLKRLKELNDKTFEELERILEELKRANERDHMVLHEYVNAAGITIEGGNLDKRLAELLKKLLDDLKRLLEEYTRTNEELLKRLRELLERYRETNKKLLDLLRKLLDEARRTGTDEDLLRRLEDILRKYEDEVRRLLKELEDILREYEDTSRRLLEELERIAKEAAERVSRGSDKDVKDIIRTILEVARDLLRLLEEDSRTNSEVVKRLLDLLREDSKANSEVVKRLLDVLRE

SEQ ID NO: 1496 - protein, 240 aa, Artificial Sequence
  Synthetic
SKEETLKRLLDELEKRNRETVERLERLLKELEDRNRRDHMVLHEYVNAAGITIEESGLSKELKDTLARILEELRKLLEEYFRKNEELLRLLRKLLDEYARTNEELLRLLEELLDTARRTGGDSELLKRLEDIAREYEKRVRRLLEKLKDILDKYRKTVEELVRKMEEILKEAKKTISRIGSEEVKDIVRAMEEVIRRLIEILRRDVELNLDVAKKLLELLKEDSKLNLDVARELLELLDR

SEQ ID NO: 1497 - protein, 240 aa, Artificial Sequence; identical to SEQ ID NO: 1496
  Synthetic

SEQ ID NO: 1498 - protein, 243 aa, Artificial Sequence
  Synthetic
DEEETLRRLLERKVELAKEYLDVSKEVIDRTTKLLDRDHMVLHEYVNAAGITLERGDLGPDELIKRLAEELERSLRELEEEIKRLKRELEESLKKLKEIIDRLAEEAEKLLAVLKRGEGSEEEALRALASLVRELIEVLRENDERLRDVLRRLIEALRKNNEILERVLRKLVRAAEERGRDESSREALEEARRRLEELLRELNEITKDLEAKLEKLLRDLNELTKALEEELKRLLDELKKRTD

SEQ ID NO: 1499 - protein, 243 aa, Artificial Sequence; identical to SEQ ID NO: 1498
  Synthetic

SEQ ID NO: 1500 - protein, 243 aa, Artificial Sequence
  Synthetic
SEAERTKESLKKVLKALVDLNRELLRKLEENMRELTRDHMVLHEYVNAAGITVREGGIVDKDAEREAERLMRELDKSSEDTARETRKLIEESKKSTRRTEEEARKLTETLDRLAKGGLPREDLLRALVRLLEELARLIEEDVRRNAELVKRHIELVERDVAELLRLIKELVDLLADLAEKGSRTEEIRKIVEEILKEIKELADRYREEVRKSKDKLRSILEDYKRKVDELKERLRELIEEVET

SEQ ID NO: 1501 - protein, 178 aa, Artificial Sequence
  Synthetic
DEVEKLLRDLEELDRDIERKVRELLKRNKEVLDDIERRDHMVLHEYVNAAGITADVIRKTTDKRTVDKLLKELEKILKEVLDRVRRLLEEAKESLDRSREEIERLLEESKTLVDEVRRAGIDKKEVDKIEKHSRDLIERAKRETDRLLEEAERLMREVVDRVRKILEEAKRLIDEARR

SEQ ID NO: 1502 - protein, 182 aa, Artificial Sequence
  Synthetic
DEAEKLLKELRDLLEESRKDLERLLKELEDLLEESKRRDHMVLHEYVNAAGITKETVERRNEREKLEKLLRELKKVVERLKDNLKDNERRNKEAIERVRKKLKDNERENKKVIEDLRAKLKDLEEVKRKIDRLEEESRRVIEEARKRLEEVEEKSKKIIDDARRALDRIDKELRRVVEETRK

SEQ ID NO: 1503 - protein, 181 aa, Artificial Sequence
  Synthetic
SEVERVLEDLRRLVRDVEEKLRRIIERDRRLVEEVERRDHMVLHEYVNAAGITLEELKDISDKKTIERIVREIIKEARDLVRRNHERNREIVDESRRLVEELRRIVEEIIRRLRELLERVKSGELAERIEDVVREAEKRLRELLKELEKTSRDLKKRLEELDRELKALVEKVERDLEELRK

SEQ ID NO: 1504 - protein, 174 aa, Artificial Sequence
  Synthetic
SEDETIRRIVRTVHEESRKSTEDVRREVERVLRESEERDHMVLHEYVNAAGITEETGISEELEERMRRIIREIREHLKDNLRRVREVIERIERKLEETERRDEKVLREIEKKIRDGDGREEVAREVTKIARDTIRENEEIAKEVREIVERSIKNLEEVAEEVERVVRELIEARR

SEQ ID NO: 1505 - protein, 174 aa, Artificial Sequence
  Synthetic
SELEKVVKEVADLLRRNLEKSKRVLEEVRRRLEENLRRDHMVLHEYVNAAGITLELVREGKDKRDLTRLLEEDDKRVKEALDKSRENNERILKEVRRALRESEEDNRRILKEVREKVDSRLLEELEERVRESIERSRRFIEELEKIVEETLTESEKLARASSEITKTVLDEIRK

SEQ ID NO: 1506 - protein, 178 aa, Artificial Sequence
  Synthetic
DDLERVLKEIKKAADKIREDNKRTADKIRKRVKELDDRDHMVLHEYVNAAGITKERVRGREEARKVIEELKKLVDEVRKRNEKSIEELKKLLKEDRDLMRRVIEELEDLVRRLREEVRDDEALRRVEEEVERLIRDLRRVLKETSDRVRELIDKHRRLSEEVEKDVKRLIDELKKKTD

SEQ ID NO: 1507 - protein, 181 aa, Artificial Sequence
  Synthetic
DEEETLEDVLRELEERVEKLLRDLTRDLERVEKEHKERDHMVLHEYVNAAGITEELLKRIEDDEKLRRLKEEVRKLVEESRERNKRHHKEVREVLERIRELLERLEKELRRALEEIRDKIRKDGATDEILRKIEELLRRAEEVIRDLERKVRKLERDIRENIKKNHREVREILRKIEEDVR

SEQ ID NO: 1508 - protein, 175 aa, Artificial Sequence
  Synthetic
SEEDELRRLLKEVNERVERLLDEIRKELEKIAEELRDRDHMVLHEYVNAAGITEENRVDEEIKKDAERALTELKEEHERLDREAKKDLDRIRKELERLEEEHRRVSERIEEVLDKESDKTEDIAREIRELMERTRRVIEEIKKELRDILEKLRRVSEELNKKLDEILKRIEDRTR

SEQ ID NO: 1509 - protein, 177 aa, Artificial Sequence
  Synthetic
SAIEKVKEVVERVLETVRDSVRRSHEESKRLIDKVRKRDHMVLHEYVNAAGITRRKGIPERMVEKLERDLEELLKEIKDTIDRIEEELRTSNRRLKETNDEIAKRLEELLRELSRDRDKDAVEDVLRRIEELIRDLNKKNDDNVRRVKEVIDRAEKLVRDLLREIRKLIEKLIRDTE

SEQ ID NO: 1510 - protein, 183 aa, Artificial Sequence
  Synthetic
KDAEDLERRVRELVEENNRVSKRLAEEVTRLVKENEDRDHMVLHEYVNAAGITLDMKRRGEVREEEVKRVLREIEELLREITEHSKEVLKTIEKLLRDSLEHSRRVLEEIERLLETILRKSKDSERLKKLVDELRETLERSLRENEKVADELRKRAEKSLEDVKRVVDELRKIVDDVLKRVED

SEQ ID NO: 1511 - protein, 183 aa, Artificial Sequence
  Synthetic
SEIEKLVEDVRKLVEDNLRHSEEVHRRNRRLIEENERRDHMVLHEYVNAAGITRELAERGEIREEEARKVLEEIKRLLDEIRRHSEEVLKEIERTLKENLKHSEEVLRRIEERLEDIKRKDKDSERVRTLVDRLREELKRSLDESEKLNRESRKRVTRSLEKVDDLVRELEKLARKVLEEVKT

SEQ ID NO: 1512 - protein, 177 aa, Artificial Sequence
  Synthetic
REIEELRKEIETLIRENEELNRRSKETSEELIRRLKKRDHMVLHEYVNAAGITRDRGAPEEDVRRAEERVKKLIEDNKRHSDEVAKTDKKLNEDSERHTRRVEERLRELLDRLSRSDKDEVVRRVAEEARRLSKRNKDAIREVNETSRRLATRDAKHTRDVLREIKRLADEIRERTR

SEQ ID NO: 1513 - protein, 174 aa, Artificial Sequence
  Synthetic
REIEEAAKDLDRLLEENKKLVKEVEEELRRLLKENRDRDHMVLHEYVNAAGITRRRGVPEEELKEVEERARRVIEESRRSSKELEKRLRELLEELRRSTKELEDRLREIKKLLRNGKDVEEVLRRVRKLSRENKEKIRKILEDVKKLSEDNKRRNEELSRRVKTLVDEIKKRAT

SEQ ID NO: 1514 - protein, 182 aa, Artificial Sequence
  Synthetic
DEIETVLDEVRRLHEDAKRRLEEMIDEVRKLNEESVRRDHMVLHEYVNAAGITKEEVERAGLDKGKLEELEERLERVREDVERILREIKRRNEKTLEDSERILEENKERNRTVLKKLKELRDRGSDAREALKESRKVVEESRESVRRVLEKNRRVVEESKRLAEELLRRVKKVVDEIRKRVE

SEQ ID NO: 1515 - protein, 182 aa, Artificial Sequence
  Synthetic
DELEEVVRRVRELSRTVKEELREVIERVRELSERVKKRDHMVLHEYVNAAGITMKRVRDSGLDKSKLEKLEDESRRVLDKSREILRKNEEDNRRLNKELEEILKKNEDDNEDVRRKVDEVTRKGKDAEEVLREVEKVVEDSRRSAKDALKRVEDRVRESDKSVRELLEENRKVVEDIKRRVD

SEQ ID NO: 1516 - protein, 182 aa, Artificial Sequence
  Synthetic
SDADRVAEELKKLVEDSRRENERVIEESKRLVKENEDRDHMVLHEYVNAAGITRDILEKEKDKKTLDDIVREILERLKRLLEKVEDENRKSHEENKRLLEDVKRKNKRISDELKRLLEEIERRNVDVDKVRETVKRLLEENKRVMEKTEEVAKKSSEDIKRVADETRRRAEELLKEVDELRK

SEQ ID NO: 1517 - protein, 175 aa, Artificial Sequence
  Synthetic
SEVDEVLREAKRIVDEVHKDNERATEESRRLVKKVHERDHMVLHEYVNAAGITKDANIDEKLVTEILKEIEEALKEAARRNKEVKDRLRELSRRVSERNREILEELKERLDRVRERRKDVKELEREVEKLLKRIEESLRRHRKENKRLLEELDRSLRELAKIVKEVLDEIRERTR

SEQ ID NO: 1518 - protein, 186 aa, Artificial Sequence
  Synthetic
SRVDEVIERLERLLRELDKINRDMIEDDKRLNTELNKRDHMVLHEYVNAAGITEEIRKKLSDEKTLEEIIERVERRLEELIERSKRRNREILERSKELIERSKKTNEEILRRAEELIKRLREEVKDIKEALDKIRRLEERARRVIEELDEKNRRALERSKENVKRLDERNERLRKELEEKVRRLRK

SEQ ID NO: 1519 - protein, 185 aa, Artificial Sequence
  Synthetic
DDIERLKREIERLLKEAEKISRDNEERSKELLDRLRKRDHMVLHEYVNAAGITKRLADKIKDKEELTRRLKEVVDRVEKSVRDSERMLREVVREDEESVRRSKTKLEDLLRKVEELVRRLEKKVTDEKVKRDAREALRKAKKKVDELKRKNDEVHRRSREEVKRLLEENRKLLEDLRRMVREITQ

SEQ ID NO: 1520 - protein, 184 aa, Artificial Sequence
  Synthetic
ELIKKARKDVEEVRERSERLVDELRKRNKKLADESRRRDHMVLHEYVNAAGITEDLLRKRRTKDVLKEIEDLVRELERELRRVVKESSDKVRKLIRENEKVVEESSRLFRDLVEKLRRVVEERNDKKLMEEVERLIKRLEDVNEKSERDVREINKESERVNEETEREVEDAIRKLREVLRRAKK

SEQ ID NO: 1521 - protein, 186 aa, Artificial Sequence
  Synthetic
KEVEDLERTVRTILKRMRELITRNEEEIRRSIEELKKRDHMVLHEYVNAAGITKELKKEGGDDKKRLVEEIKRLLDELRENSKRSSDRAKEIHERNKRHSEESSRTIEKLLKELRDLVRDVERKLRDEDAKRKLDELTKRVEKVVREADERNKRLTKRSKEVLDEVHRANEEALKEVEEVVRRVTK

SEQ ID NO: 1522 - protein, 179 aa, Artificial Sequence
  Synthetic
RLEDEVRKMEKEVREEVKRLEDESRKVLEESRRNLDKRDHMVLHEYVNAAGITKDLRRRGLDERVLRELLKRVREVHERNRKLLDEVRRASEKVHEDNRRILEEVRKTVKDVVDKLRRVDAKVVKELIDRVRKILEDVEREVKKSIEEVKEINRRLNEEVKKTIEEVKEIVKEVTERAK

SEQ ID NO: 1523 - protein, 183 aa, Artificial Sequence
  Synthetic
SVDERLDEVLERVKEDMDRNRRKNDESLREDEENVRRRDHMVLHEYVNAAGITRELKKRVKDERVKEFLDRVLEEIRKSAEEVKTIIDEVHKESEETVRRTKKIIEEVLRRIEELIRRVKKDRKEEVVKTVEEDIKRLLKEVNKVSDEAHKRNKELNERVNRVNKEAHKRNEDLLREAERKVR

SEQ ID NO: 1524 - protein, 183 aa, Artificial Sequence
  Synthetic
SIREKIRELEERLEEVLRRIEENSERVLREAERVLKERDHMVLHEYVNAAGITEEIRKLPVEDELVRRVKELVERLKRHNKKSSEDVERVVRELKEELKRSSEEVKKAVDRLKEELEKVLRDGGEREVDRVIRKLEDVLRKLEEHNRRVVERLKRLLEELKKHNEDSLRKSEEVLRKLEEDAR

SEQ ID NO: 1525 - protein, 182 aa, Artificial Sequence
  Synthetic
SIEDLVRELKKKVDEVAEDLRRKVREALERSRENIDRRDHMVLHEYVNAAGITDKLRKETREEEVKDILRRVLELSKRIVEESKEILDRVLELSKKVVDDIEEIIRRVEETVKEVLTRLSRVDDKVVKKLIKEVDDILREVTKLVEKLIRELEDINRKVNERNRRLAEESRKILDEVEKRVR

SEQ ID NO: 1526 - protein, 179 aa, Artificial Sequence
  Synthetic
SKAEEVEELVKKLLAEVKKSLDDVRRTVEKLLREVRKRDHMVLHEYVNAAGITKDLKDDGQDERAVRRVVEEIKELLDRNNEDSKRVVKEIRKLLDENDKTSKRVVEEIKRLLDEVRKEGKISEEKVEKLERDVRRALERDTRENKKLEDRVETALREDKKRNDDLREDVKRVLEEIRT

SEQ ID NO: 1527 - protein, 174 aa, Artificial Sequence
  Synthetic
SESDEVIRDLARLLDELARHVDDSVRRMDEVVKRSTRRDHMVLHEYVNAAGITEKKPGDERVERMVAEIERLVAEVLEELKKKYEKLKREVEENLRRLEETVRDIVEKARKVTEKGVSKEKIDRIIRELERILEEAKKKHEDVLRRLEDSLRRVAELLKAALDRLREIVDRLRR

SEQ ID NO: 1528 - protein, 174 aa, Artificial Sequence; identical to SEQ ID NO: 1527
  Synthetic

SEQ ID NO: 1529 - protein, 174 aa, Artificial Sequence
  Synthetic
SESDDVIRKLRELLEELRTHVEKSIRDLRKILEDSTRRDHMVLHEYVNAAGITRKKPGDEEVRKTVEEISRRVAENVKRLEDLYRRMEEEVKKNLDRLRKRVEDIIREVEEARKKGVDEEKLKDLIRKLRDILRRAAEAHKKLIDDARESLERAKREHEKLIDRLKKILEELER

SEQ ID NO: 1530 - protein, 177 aa, Artificial Sequence
  Synthetic
DEVRELLERNRRLLEEIKKTVKDLIRANEELLKRIEDRDHMVLHEYVNAAGITEKGLSDDETIREAKERLKASLEDVKRRVEEVKRLLEKSLEEVETIIREAEKRNRDSLREMERRGSSEELEELRRVVEESDETIKRLLEEAKESVDRSLDRIRKLLEDVRRSVERSAKRIDEKRK

SEQ ID NO: 1531 - protein, 184 aa, Artificial Sequence
  Synthetic
DEIRKVVKEITDLLKASNDKNRKVVEEIRDLLRKSKKRDHMVLHEYVNAAGITRRRIDKSGDKETAEDIVRRIIEELKRILKEIEDLARRINREIERLVEEVERDNRDVNRAIEELLKDIARRGGSEDLKRVEERAREVSRRNEESMRRVKEDADRVSEANKEVLDRVREEVKRLIEEVRETLR

SEQ ID NO: 1532 - protein, 238 aa, Artificial Sequence
  Synthetic
EEDERLTKRVEEIKRENRELLRRLEEEVKELERKSEKRDHMVLHEYVNAAGITDSGKGSTELLVEELEKLIREILKLSEDHNRTLEEVVRKIEDVLRANLERLKELVDEILKALKERGKGDSEELKRKVEKVARDYERLLRKLREVVKRILDESKRLDEELEERLKEVLKKLEELIKRGGPDKDVLTELKRILDELLKLVEKLIRRNLRLLEELLRLVREILRTSNEILEEILKDARR

SEQ ID NO: 1533 - protein, 247 aa, Artificial Sequence
  Synthetic
SEKEELLKLIKRVIELLKRVLEEHLRLVEDVIRRLKERDHMVLHEYVNAAGITKRLLDEVRGDKEELDRIKEKLEEVLERYKRRLEEIKRDLERMLEDYKRELKRIEEDLRRVLEEVERIATRGEGPAEALIDKLRKILERALRELDKLSKKLDELLKKVLEELEKSNREIDKLLKDVLRRVEEGGASEDLLRKAKKVITEVREKLKRNLEDVRRVIEDVKRKSARILEEARRLIEEVERELEKIRK

SEQ ID NO: 1534 - protein, 238 aa, Artificial Sequence
  Synthetic
SEAEKIREALETNLRLLEELIKRLKEILDTHNELLRRRDHMVLHEYVNAAGITEEGGLDEEVLREVKRLVDELRKEARRVLDEHEKLVRKIKKEAEDVARESEEIIKEVEDKLKGLDREELLERVRRVLKKSDDLIAELVRRALKILEELTRLLAELLKKVVEILRRIVELVERVLTKKGAPKEDLERLRRKVEELEDRLRRLLEKLARDSAELMRELERILDRYARESEELDRRLAE

SEQ ID NO: 1535 - protein, 248 aa, Artificial Sequence
  Synthetic
SAEEELEKLVRKVEEDLKRLEEESERIKKEIKDTLRARDHMVLHEYVNAAGITRRLEEEGRRVSLEEAIKIIKEILDELAKVNEDIIRIIKELLKRLVDTNRRVIETIDRILKKLVDDLRRGNLPEDKLREVERELRELKKELEEIVRESEKMLKELEDKLREIVRESRELLEKLRRDLKRIKDGNLSADEALEMLKRLLDKALKVHEDVLRKLVELVDEVLKVHEESLRKLLTLAAKVLEVLRKITK

SEQ ID NO: 1536 - protein, 240 aa, Artificial Sequence
  Synthetic
SDKEEIKRRVEKTARDLETEHDKIKKRLEDTVRDIKRRDHMVLHEYVNAAGITEKTLREGDGDATDLVDKLLETVKRLNEEVLRTVKKIADELRRLVEEVLRVLRESNETLARLLEEGNVGDEVRERLEEVLRRTEEIIKTLEEIVKRLLDELRRLVEELRRISKKLKDELDKIKEKGKDEKRLIEEVVRLLRENLDVVRRILEALAKLIKELLEALEEVLRRNKELIRELLRVLDEALK

SEQ ID NO: 1537 - protein, 248 aa, Artificial Sequence
  Synthetic
DEEERVKKLLTDLRRLLRKLHEESKKLLDELRKKLRERDHMVLHEYVNAAGITREAEKKLPGTRVLKLVADVVKKVLDAIRDLNRKLEEIIDEALKLLEELDDILRRVVEEALRLLKEIKDTKGDREEVKKRVEDILKRLEELVKEYEDRVREIKKRLRRALEELRDEYRKIREDIERVLDELRKGGVPEELLRVLEELVRTLKKLLDENLKMVERLIRELEKVLDDHERKVRRLIEELLEVLDRDAK

SEQ ID NO: 1538 - protein, 236 aa, Artificial Sequence
  Synthetic
STREKAKKVLDTLRADNEDMKRVVEKILRALKRTNERRDHMVLHEYVNAAGITKEVGVSEEALKEIEDTLKRVLEEIKRLLDESKKLLEDVEREIREILKTSEELLERIEREIETVGSDEKTLAEILKRLLELNEEMNRRLLKILRDLLRLNEEVIRRLLAVLERLLDALKEALDRGDVPEDLLRKLEEELRRIKEKLRKALEELEREHRELEKELDKLHDESRKEHERIEEELRR

SEQ ID NO: 1539 - protein, 247 aa, Artificial Sequence
  Synthetic
SKAEKLLKDLREALEKVKRRYEELERRLDEVLKEHEERDHMVLHEYVNAAGITEEGGLPEEELEKLKKLAEKVKELLRELLRLSKELVDRVRELLKRDLDLVRRLVEIALKVLREAREQPNDEKRVEKIKRDLEKKARRVREENERIKRDLKRTADESRKRLEKLLEDLKRELDRLREDLDRGRKDIDERVEELIERLIRIIERLLREVIKSHEKLVRTIERLIEESIRVNEELLEVIERLLDRARK

SEQ ID NO: 1540 - protein, 231 aa, Artificial Sequence
  Synthetic
SKEEEVEKVLRKWEEILRRLIEENKRANDKIRREYEERDHMVLHEYVNAAGITERLGVSEEVKRILEKLIKLLEDILEYEKENVERLIELNERILRELKKSVEELKALVTRVRRDGLPESEVRKLVEDVLRKNEELLKEAKKAWRDSIENLKRVLEEVAKLVKTVLREIEEKIDDEDVVRALIEVIERLLRVAEEVIRRILKVNTELMRVDERSIRESLKAISEVLKVLDT

SEQ ID NO: 1541 - protein, 231 aa, Artificial Sequence; identical to SEQ ID NO: 1540
  Synthetic

SEQ ID NO: 1542 - protein, 247 aa, Artificial Sequence
  Synthetic
RDRDVLRKVKAEIEELVARIEKVSRDALSEVKRLLDERDHMVLHEYVNAAGITRKIRDTRGDDEVVKETEEVLRDNHRLLEELIRRLIKVLEEWLRRHKKLLDEIRELLKEILRLVKESGVSEDLLRRLKRVIEELDKKLKESEEKLRRVVEKAKEDLKAVLEEHRKVLEDLKRALEEVREKLRERGSEEVVEELLRMLKRVAEEMKRVHDDLSRAVEKVVRDVVRVDKELLDELARILRRLEEVIT

SEQ ID NO: 1543 - protein, 231 aa, Artificial Sequence
  Synthetic
SKDEELARLLEELVERWRKIVEDLERDHRRLVKEIRERDHMVLHEYVNAAGITRKNGIDERIVRLIEEIAKIIEEVLKEIVKLVERAVRENVRVLRESVRLVAELVETLARLLRGSDERVTEAIKKVLDTSEDLIRRVIKVNEDILREIAKLVEEVLREAERILTEIKKEGDREEIRRILEELKRIVDDVLRIIARILKLLRDLTRRLAEVAKAVHKLLEELLRKLKEDTR

SEQ ID NO: 1544 - protein, 238 aa, Artificial Sequence
  Synthetic
SEIEDVIRRLRKILEDLERVSEKLLREIKKILDEARRRDHMVLHEYVNAAGITVRVFRDGSGSKEELAKLVEELIRELAKLAKEVDEIHKRIVERLKALVEDAERIHRKIVETLEEIVRGVPSEELKRVVEAIVEVIKEHLKVLADVIRRIIKAIEENAETIKRVLEDIVRVLELVLRGEGSIEDLVREVERLIKRIEDSLRELEKTVRELLKRIKEASDKVREDVDRLIKELKEAAD

SEQ ID NO: 1545 - protein, 246 aa, Artificial Sequence
  Synthetic
SREEIVATLEDLARKILEVVKKLAKEIEDAWREIERARDHMVLHEYVNAAGITDVVRKKVDSRVAEILETVVKRVVDITRRLIEEAERVVRELVDITRKLITILEEVVRRLVEIVREASKIDDRRELEDMLRKIREVVREVIERLKKLDEDVRRVVEEVIRRLEELNKRLEDVIREVKKRLKELGLSEEAVKELVELLEEILERNTRVIKEIIDLLRTVIRIHEKIVEDLIKLLEELLRRLEEATR

SEQ ID NO: 1546 - protein, 237 aa, Artificial Sequence
  Synthetic
KEKEDALKKLEDLARKSREDLERVLRKHKKILDKIEERDHMVLHEYVNAAGITLRKTGTESEILKELARLLREHHEALRRLIEELRRLLEEHHKILEDLAREHKRLLDELIKVVADGVDKDELERIIKELRERDKKLVDDLRKVSEDLLDAVRKLVEDLERISRELLRRVEELAKGIDEELAREVERVIKELLDKSKEILERIERAIDELLKVSEEILKLSEDASEELLKILREFAK

SEQ ID NO: 1547 - protein, 237 aa, Artificial Sequence; identical to SEQ ID NO: 1546
  Synthetic

SEQ ID NO: 1548 - protein, 229 aa, Artificial Sequence
  Synthetic
SKEERLREVAEKHKKDLEDIVKRVDEAAKETARRLEERDHMVLHEYVNAAGITEKGPDDEKLKKVKKILKDIMDRLAELIKKILKLLKENLEKIKELLRRNLEISEELLKLAKGLSDRDVLETVRRVLEKLDEEWDRVLEDSRRIIETILRELDTLLREVEKLIKEIKDEISGSKEVLDILERAVEVVRRVIKALKEVLERHVDATREVIERVKRVNKRLLEAVREVVT

SEQ ID NO: 1549 - protein, 241 aa, Artificial Sequence
  Synthetic
SEKELLKEILDRIRELLEDDNRLLKRIVDEIRKLLEERDHMVLHEYVNAAGITDRIGAPEDVIRELTRALKETEEDVDRVIRTLEKLLKEVLDAHEEVVRKLDRLLKEVERLVEGGDAEEVVRDLLRVVKEILDESKAVIDELARVVDEILKLLEEVDRKLAKVVKEILEDVLRGSGDDEDAVRKIAKIIEELKRLLEDLARDTRRVIEEAKRLLKEWRDRNKEVADTLKKLLEDLIRKIR

SEQ ID NO: 1550 - protein, 246 aa, Artificial Sequence
  Synthetic
SEREELLERIKEILKRVKDKLDEDLKRLKEILEKLKERDHMVLHEYVNAAGITREKLERTGRTDELVKEVLDTVRRNLENLKRLVEDILRKLEENVKNLTDLVREILKLITELIKRLEDGGLPKEVLDALRRVLEKLEELLREILERLKRSLEAVKRKIEELLKELERSLDELRRALERIRKEIGDSETAVRAIIRVLEKHLEAVRRVLEELLKVLAEHLETVRELIERLKRVLEEAIEVVERVAR

SEQ ID NO: 1551 - protein, 240 aa, Artificial Sequence
  Synthetic
DREKSVRDIEEDLKRVLDKLRRRVETSKEELKKVLKARDHMVLHEYVNAAGITRELDRGIDSEVLRAVREIVKRLVEVVRRYNELSEKIIRDLVRVNDRVLELLKRIVKRLIDVVRELEKIGDKEKALRRLEEVVKEVKRRIEELLKELEDVHRELVKILEEVNEDLKRVATEVKEIIKTGIKSSEVAKELDEVIKRLLDNLKENTDRLKEVIDRNLADLRDLAEELRAVIERLLEDARR

SEQ ID NO: 1552 - protein, 240 aa, Artificial Sequence; identical to SEQ ID NO: 1551
  Synthetic

SEQ ID NO: 1553 - protein, 237 aa, Artificial Sequence
  Synthetic
REDEVLRDIERLLREIEEKIRRILEESTAELRKVEEERDHMVLHEYVNAAGITEDVERKGIDEELRKLLDEVLDKLTKLIERNKRSLERILELIKRIIDENLEVLRDIIRLLEELLKATKDNGVPKDEVIKLVEDVVRRIEELVTRVVARNEKLVKDLDDLAKKNVRENEELLREIDRGLDEDLLEKIKRVIREHIKALEKLARDLKEILRRHIEALKELARDLAEVIRKLLEDVKR

SEQ ID NO: 1554 - protein, 237 aa, Artificial Sequence; identical to SEQ ID NO: 1553
  Synthetic

SEQ ID NO: 1555 - protein, 243 aa, Artificial Sequence
  Synthetic
SEAERLADEVRKAVKKSEEDNETLVREVEKAVRELKKRDHMVLHEYVNAAGITVDLLRDGQVSDRDLLKELEEVLRRVLEALAENHERTEEILKRWLDRYAEDIERLRKVLKEVIEALKRGGSDDKRIVDELEEILRRNEDVLDKIAKRLRRLLEEDRRLLERIVRELKRLLDDLDRITKEGKSEELVRIAIEVLKRLLEIIEELVRLNNEILERLLKIVRELHKDNIKILEDLLRIIEEVLR

SEQ ID NO: 1556 - protein, 243 aa, Artificial Sequence; identical to SEQ ID NO: 1555
  Synthetic

SEQ ID NO: 1557 - protein, 245 aa, Artificial Sequence
  Synthetic
SEKDEVTRRIRELLKEAEETNREAIERIKRLLDRVRERDHMVLHEYVNAAGITKKVLDRGLQDDEALLKLLIDALREHNRLSTELIKILIDVLRTILKIIKDVLATNIEIARRILDLVRRLAERGGLDDRLVKEVEKLVRTAERLHRDALRKVKRLVEELEKRLRELVKTDHDLVRRLETLLRRGSGSKEDLLREIARILAESLRLIRELLKEIEKIVKEIIELLERLNDELRKIIEAILETTKK

SEQ ID NO: 1558 - protein, 245 aa, Artificial Sequence; identical to SEQ ID NO: 1557
  Synthetic

SEQ ID NO: 1559 - protein, 243 aa, Artificial Sequence
  Synthetic
SRVEELKKLIEDILRISREVVERIARVAEDIHRINRRRDHMVLHEYVNAAGITEEILARKVSGTEAAEALRDTIRRVVDEIRKLLEEHEKRSAELLEEIRKLLEDILRRSERAVEEIRELLKKGVSTKDVLRIIEEILREHLELLERVVRRIEEILRELLKTIEEIVKRIKEILEELKEVLKRGSVGDDEVEREIRRVKEDLDRILEEYRRLLEEIKRKLEEILRRVEELHRRLRRKLEEIDR

SEQ ID NO: 1560 - protein, 249 aa, Artificial Sequence
  Synthetic
DAEEVVKRLADVLRENDETIRKVVEDLVRIAEENDRLRDHMVLHEYVNAAGITELLRRGGVPEELLDRLAKVVKSIVEKAEKILERLNRVSKAIAEKLKTIVDELNEVSKEIVKRAEDILRKGKDKETVLRALRTLVKEYADLSKEVLERVERIVREYVKLSDEVVKSLAEIVEELIRIIEDLLRKGNLDEDVKRALEELVSRLRKLLEDVKKASEDIVREVERIVRELAKRSDEILKKLEDIVEKLRE

SEQ ID NO: 1561 - protein, 249 aa, Artificial Sequence; identical to SEQ ID NO: 1560
  Synthetic

SEQ ID NO: 1562 - protein, 240 aa, Artificial Sequence
  Synthetic
DKDKRLEELLKRLKELNDKTFEELERILEELKRANEARDHMVLHEYVNAAGITEGGNLDKRLAELLKKLLDDLKRLLEEYTRTNEELLKRLRELLERYRETNKKLLDLLRKLLDEARRTGTDEDLLRRLEDILRKYEDEVRRLLKELEDILREYEDTSRRLLEELERIAKEAAERVSRGSDKDVKDIIRTILEVARDLLRLLEEDSRTNSEVVKRLLDLLREDSKANSEVVKRLLDVLRE

SEQ ID NO: 1563 - protein, 240 aa, Artificial Sequence; identical to SEQ ID NO: 1562
  Synthetic

SEQ ID NO: 1564 - protein, 240 aa, Artificial Sequence
  Synthetic
SKEETLKRLLDELEKRNRETVERLERLLKELEDRNRARDHMVLHEYVNAAGITEESGLSKELKDTLARILEELRKLLEEYFRKNEELLRLLRKLLDEYARTNEELLRLLEELLDTARRTGGDSELLKRLEDIAREYEKRVRRLLEKLKDILDKYRKTVEELVRKMEEILKEAKKTISRIGSEEVKDIVRAMEEVIRRLIEILRRDVELNLDVAKKLLELLKEDSKLNLDVARELLELLDR

SEQ ID NO: 1565 - protein, 240 aa, Artificial Sequence; identical to SEQ ID NO: 1564
  Synthetic

SEQ ID NO: 1566 - protein, 243 aa, Artificial Sequence
  Synthetic
SEAERTKESLKKVLKALVDLNRELLRKLEENMRELTKRDHMVLHEYVNAAGITREGGIVDKDAEREAERLMRELDKSSEDTARETRKLIEESKKSTRRTEEEARKLTETLDRLAKGGLPREDLLRALVRLLEELARLIEEDVRRNAELVKRHIELVERDVAELLRLIKELVDLLADLAEKGSRTEEIRKIVEEILKEIKELADRYREEVRKSKDKLRSILEDYKRKVDELKERLRELIEEVET

SEQ ID NO: 1567 - protein, 241 aa, Artificial Sequence
  Synthetic
SADEALEELVRRLLEVLKTVLERTKELSRDDLRVVKERDHMVLHEYVNAAGITRDGLDDADRVLEEVERVIREAKREVKRWEEVVRKVVEDSRRLIERVLAEVEEVIKEAKRLLDERKSGGSREVIEELLSLLREIVRHHKEVSDEHLKLSAELVKRILDVVEETLRLATEIVRRIKEGGNSEDVRRDIERLLEELKRRVERLLEDIERLLAELEKLNEDVLRENKALLEDLERRVRERKK

SEQ ID NO: 1568 - protein, 186 aa, Artificial Sequence
  Synthetic
SAEDSIRELLERDERLLEEARKEAKRLNEENERLLERIRDHMVLHEYVNAAGITDIRKKIKGEKLREIEELVRRVKRTIEKLLEEVKKSVEDSSKRIEELLEAVERSVERTKEEIRRLLDEVRKDRKEELVKRVEERIKRLHDENRRLVKEVIEEVEKLIRDNEKLAEDIEREIRRLLKELDEAAK

SEQ ID NO: 1569 - protein, 177 aa, Artificial Sequence
  Synthetic
ELREDVERVVDEIRRLVEENVRRIDEVAKDIKRLADDNRDHMVLHEYVNAAGITRLKEEGVTEVVDELREEVRKLSEDNRRHSRELIERVKKLLKELEEHSRDLKRRVKELLEDLKRKGVDERVLKKLKEVIEDVERKSRDALRRLEEAIRRVRRESERVNRELDEVIKRVTEELKK

SEQ ID NO: 1570 - protein, 174 aa, Artificial Sequence
  Synthetic
SEDETIRRIVRTVHEESRKSTEDVRREVERVLRESEEVRDHMVLHEYVNAAGITETGISEELEERMRRIIREIREHLKDNLRRVREVIERIERKLEETERRDEKVLREIEKKIRDGDGREEVAREVTKIARDTIRENEEIAKEVREIVERSIKNLEEVAEEVERVVRELIEARR

SEQ ID NO: 1571 - protein, 180 aa, Artificial Sequence
  Synthetic
SKEEVLREIERLHKETIRRIEEVLREATELHKRLTETNRDHMVLHEYVNAAGITDVRRADTPNVEELLRELKDALDKVRDHNRKTLKKNEDVVREIEKEVRELLKEDEDVLRRIEKVMRDGRVDARELLEESRREVERSEKEVERLLRKSRKVVEEVRKLSEENDREVKKILEEVKRRLD

SEQ ID NO: 1572 - protein, 187 aa, Artificial Sequence
  Synthetic
DEEEELRKRLEKLSKEVRELLRRDEEEDRRLNRELEELRDHMVLHEYVNAAGITDLLRKARRKVSEEELTRLRKKLRDLEEESKEALRELRRRVEELNKENKKSLDDLERRLKELEDRAREVEKRDRREDELRELLRRLEDVIRKLAEDLKRNTEDLRRVIKELAERLEELNKRLKREIRRLKEELR

SEQ ID NO: 1573 - protein, 181 aa, Artificial Sequence
  Synthetic
DEERKLEKSLKDVEDTHRRLLEKNDEDLKELRKRVEDMRDHMVLHEYVNAAGITEKLKRIEDDETLKRLRKRVKELLDEIRRRLERLEREVDKRLEEIKERNDRHHEEAKKELKRIRDKIRRDGADEKILREVEDLLRKVAEDLKRSNDEVKELAERLEETIRDLLRRIEEILKEIEERVR

SEQ ID NO: 1574 - protein, 175 aa, Artificial Sequence
  Synthetic
SEKEDLERELEEVRRRVEESLRKNEEDVKRVRDELKKLRDHMVLHEYVNAAGITRANVDKRVLDEADRLLKELEDDHKKLEEDAKKALDELREEHKRLEETLRRMLKRIKEVLDRESDKMEEIKKEIEKILRDIERVSRELNKKLEEIVRRLKKVSDELNRRIEEIAERVRRRRK

SEQ ID NO: 1575 - protein, 177 aa, Artificial Sequence
  Synthetic
SAIEKVKEVVERVLETVRDSVRRSHEESKRLIDKVRKRRDHMVLHEYVNAAGITRKGIPERMVEKLERDLEELLKEIKDTIDRIEEELRTSNRRLKETNDEIAKRLEELLRELSRDRDKDAVEDVLRRIEELIRDLNKKNDDNVRRVKEVIDRAEKLVRDLLREIRKLIEKLIRDTE

SEQ ID NO: 1576 - protein, 177 aa, Artificial Sequence
  Synthetic
SVLEEVRRRVEELLKTVKESVDRSHERSERLIEEVRESRDHMVLHEYVNAAGITEKGIPEDRVKRIEDKLREELERLERENRKIEEDLKRSNDELRRENERIAERLEELLRELSRDTNDKVARDVLEEIERLIREANERNKRNLEDVERVIRELNKENERVLREVEKKIEKLIRETE

SEQ ID NO: 1577 - protein, 178 aa, Artificial Sequence
  Synthetic
SSIERVEKEVRRLLRESDESLKRVMEEAKELIKSVRESRDHMVLHEYVNAAGITERTGDEREDLRRVLEELRKLIEDNRREDKRSEDELRKLIRDNKEENDRARREAEKLLEDLSRGRSEEEVERVLEEVRRIIEKLKEDDKRSLERIERIVRRNNELNKESVDRIRKIIKEMEERAD

SEQ ID NO: 1578 - protein, 177 aa, Artificial Sequence
  Synthetic
SVIERVEEEMEKVIRDSERVTKEVEDRAREVHERSEKRRDHMVLHEYVNAAGITRAGVDKRILDELRKRIKDSREDLERINEELRRALRKLLEDSKRINEELRKTLEELRKRLERVDDEEEVKKLAEEVRRLVEDSIRKLEELARRVDELVRESIERVDRNVEENKRLVREAIERRR

SEQ ID NO: 1579 - protein, 179 aa, Artificial Sequence
  Synthetic
SSKEVADELRKKAEKVLDELRKIIRELERKNEDSLRRTRDHMVLHEYVNAAGITDLVRTRGEDDRLVREVERLLRELKRRLEELIRRSEELIKRSREEVDRVIRTVEKLLEELDRLLRANKGDIEDLRRTVDKLVEEIKDLARKLAKSSDDTVREDEKLVEELRKDVKRIVRKIKKDLE

SEQ ID NO: 1580 - protein, 183 aa, Artificial Sequence
  Synthetic
KDAEDLERRVRELVEENNRVSKRLAEEVTRLVKENEDKRDHMVLHEYVNAAGITDMKRRGEVREEEVKRVLREIEELLREITEHSKEVLKTIEKLLRDSLEHSRRVLEEIERLLETILRKSKDSERLKKLVDELRETLERSLRENEKVADELRKRAEKSLEDVKRVVDELRKIVDDVLKRVED

SEQ ID NO: 1581 - protein, 174 aa, Artificial Sequence
  Synthetic
SEIEELEKRIDELLKELRDLSRRIAEEVKRLLEELKKLRDHMVLHEYVNAAGITRKGVPEEELRRVEEEVERVVRESRKLNKETEDELRRLLEEIKESNDRVEKRARELKKLLRDGKDVEEVLRRLEKLVREDKERLKKVLKDARDLIKKDKDLNEKLSRELEKLVRELEERAR

SEQ ID NO: 1582 - protein, 174 aa, Artificial Sequence
  Synthetic
DELRDVKRELDRLLRENEEIVERIAETVRRLLEELKKLRDHMVLHEYVNAAGITKRGVPEKELKEVADTLRKLLKDIERSNKEVEDRLRKLLEEIKESTDRLREELEEVEKLLRGGKDVETVLRRVRELSRDNKRRMRRVLEEAKRLAKEDKERIDKIRKEIEELIKRLKDKAT

SEQ ID NO: 1583 - protein, 174 aa, Artificial Sequence
  Synthetic
DEEEDLERRIKKLLDENRELLKRIAEELRRLLEELRRLRDHMVLHEYVNAAGITDRGVPEKDLRDVAEKVKKVLKESEDSNRDVKRKLEKLLRDLERSTERLEREARKVRKLLRDGKDIETLLRELEKLSRDNKELLKKIEKEIRDLIKEDKERNRELSERLRKLVEELKKKAT

SEQ ID NO: 1584 - protein, 174 aa, Artificial Sequence
  Synthetic
REIEEAAKDLDRLLEENKKLVKEVEEELRRLLKENRDLRDHMVLHEYVNAAGITRRGVPEEELKEVEERARRVIEESRRSSKELEKRLRELLEELRRSTKELEDRLREIKKLLRNGKDVEEVLRRVRKLSRENKEKIRKILEDVKKLSEDNKRRNEELSRRVKTLVDEIKKRAT

SEQ ID NO: 1585 - protein, 177 aa, Artificial Sequence
  Synthetic
SEAEKVVEELKKLLREVEKKIRDHTEDVKRILEELERRRDHMVLHEYVNAAGITDKNSDDDTVRKVKEELDRSHEKLREELRKVAKELKESNEELERDLKRLVEEAEDRLRRLKDRVSEKVLRELEKILEDIKRTLDKLLRENRETLKRIEDRLRELLEENRKLLEKIERELRERSR

SEQ ID NO: 1586 - protein, 182 aa, Artificial Sequence
  Synthetic
DEIETVLDEVRRLHEDAKRRLEEMIDEVRKLNEESVRERDHMVLHEYVNAAGITEEVERAGLDKGKLEELEERLERVREDVERILREIKRRNEKTLEDSERILEENKERNRTVLKKLKELRDRGSDAREALKESRKVVEESRESVRRVLEKNRRVVEESKRLAEELLRRVKKVVDEIRKRVE

SEQ ID NO: 1587 - protein, 178 aa, Artificial Sequence
  Synthetic
SKVEKLEEEIARLVERSRRLVEELKKEVTKVKEKVDEIRDHMVLHEYVNAAGITDIKRRGGSEEVLRRVTEELKKVLEDNRRVIEEVLRDLERILEELKRKAEEVTKRNRDDLKRLRDSGVDEEVLRRVEETSDRSEKELRTVLRDVTEDIKRIAEELKKALEDSTEIIRRAEDELRT

SEQ ID NO: 1588 - protein, 186 aa, Artificial Sequence
  Synthetic
SEVDEVRKTLEDLLRRLDEENKDIIRRNKELLDDLDRKRDHMVLHEYVNAAGITKILEKLKDRETLTRIIEEIEKRARELIKRLRDEIRKIEEESKKSIEDSRKRNDEIRKRLEELIKDLRDKIKDSEELARRITELEKRVREVIERLKEKNKRLEDDSRRVITELRKKLKDLEDRVREEIEELRK

SEQ ID NO: 1589 - protein, 184 aa, Artificial Sequence
  Synthetic
ELIKKARKDVEEVRERSERLVDELRKRNKKLADESRRLRDHMVLHEYVNAAGITDLLRKRRTKDVLKEIEDLVRELERELRRVVKESSDKVRKLIRENEKVVEESSRLFRDLVEKLRRVVEERNDKKLMEEVERLIKRLEDVNEKSERDVREINKESERVNEETEREVEDAIRKLREVLRRAKK

SEQ ID NO: 1590 - protein, 186 aa, Artificial Sequence
  Synthetic
KEVEDLERRVKEILDRMKRLIDENRKKIEKSIRELERLRDHMVLHEYVNAAGITDLKREGGDDARTLRERVRKIIEDVEEHSRRSTEEVRRIHKENKEHSERSSDEIRELLRRVEELIEEVKRRLRDKEMEKKLEDIVRRVREVVRRAHETNERLVDRSRKAVEKAERTNRRLVEEIRKVAEEVRK

SEQ ID NO: 1591 - protein, 176 aa, Artificial Sequence
  Synthetic
REAEEAKEEVEELNRRNKKELDDARRRVDELDKRNKDRRDHMVLHEYVNAAGITRVKEEGRSDDRLREKIERMLKTSADELERLKEENKRALRDLAERLRELIERNRRKLEEITRRTVPDKDVLKRLAELIKESIRELERVLEELAEKIDRSLKELDDVLRKNETDLKRVIEDLKR

SEQ ID NO: 1592 - protein, 182 aa, Artificial Sequence
  Synthetic
SELEKTLEDLKRHSEENKKKLEEDLRDMERNLKENKDRRDHMVLHEYVNAAGITRRFREGDIDERELERVRRKMEEIKKRLDENVERNRRKAEDIKRKLDENVKRSEDRVKEIKEDIRRRVRDKDKAEELERRLDELVKENREIHERVKKALDDIVKELEELHERLKRRLEEILRRIAETVR

SEQ ID NO: 1593 - protein, 179 aa, Artificial Sequence
  Synthetic
RLEDEVRKMEKEVREEVKRLEDESRKVLEESRRNLDKLRDHMVLHEYVNAAGITDLRRRGLDERVLRELLKRVREVHERNRKLLDEVRRASEKVHEDNRRILEEVRKTVKDVVDKLRRVDAKVVKELIDRVRKILEDVEREVKKSIEEVKEINRRLNEEVKKTIEEVKEIVKEVTERAK

SEQ ID NO: 1594 - protein, 183 aa, Artificial Sequence
  Synthetic
RVDERLDTVLKRVEETVRENKKKNDELLERSKENIDRLRDHMVLHEYVNAAGITKLKREVTKEEVKKIIDEVLKEIEDLLRTVKEELDRALERNREVVEETKRRIDRVLKEIEKLIRDVKRDRKEEVVKEVEERIKKLLKEVNDTSKDAERRLRETNERLNEIVKEVEKRIRELSEEVRKRVK

SEQ ID NO: 1595 - protein, 183 aa, Artificial Sequence
  Synthetic
SVDERLDEVLERVKEDMDRNRRKNDESLREDEENVRRNRDHMVLHEYVNAAGITELKKRVKDERVKEFLDRVLEEIRKSAEEVKTIIDEVHKESEETVRRTKKIIEEVLRRIEELIRRVKKDRKEEVVKTVEEDIKRLLKEVNKVSDEAHKRNKELNERVNRVNKEAHKRNEDLLREAERKVR

SEQ ID NO: 1596 - protein, 183 aa, Artificial Sequence
  Synthetic
SIREKIRELEERLEEVLRRIEENSERVLREAERVLKEIRDHMVLHEYVNAAGITEIRKLPVEDELVRRVKELVERLKRHNKKSSEDVERVVRELKEELKRSSEEVKKAVDRLKEELEKVLRDGGEREVDRVIRKLEDVLRKLEEHNRRVVERLKRLLEELKKHNEDSLRKSEEVLRKLEEDAR

SEQ ID NO: 1597 - protein, 182 aa, Artificial Sequence
  Synthetic
SIEDLVRELKKKVDEVAEDLRRKVREALERSRENIDRLRDHMVLHEYVNAAGITKLRKETREEEVKDILRRVLELSKRIVEESKEILDRVLELSKKVVDDIEEIIRRVEETVKEVLTRLSRVDDKVVKKLIKEVDDILREVTKLVEKLIRELEDINRKVNERNRRLAEESRKILDEVEKRVR

SEQ ID NO: 1598 - protein, 172 aa, Artificial Sequence
  Synthetic
SRAETVLKEVTDKIKKLADSSDELLRRNKENIDELKKSRDHMVLHEYVNAAGITKGSVDEETLEELIRRVEAELEAHHRELEKNSREDEKRNRDHHAKLEEEMRRVEERLEREGIDDEVVKRVRDLLDTVRRRNEKVNEDVKRMNDKLRRDNEDVIRRVEKLLRELEEKRRT

SEQ ID NO: 1599 - protein, 174 aa, Artificial Sequence
  Synthetic
DEEEDLERAIKKLLDENRELLKRIAEELRRLLEELRRLRDHMVLHEYVNAAGITDRGVPEEDLADVAEKVKKVLKESEDSNADVARKLEKLLRDLERSTERLEREARKVRKLLRGGKDAETLLRELEKLSRDNKELLKKIEKEIRDLIKEDKERNIELSERLRKLVEELKKKAT

SEQ ID NO: 1600 - protein, 184 aa, Artificial Sequence
  Synthetic
DEIRKVVKEITDLLKASNDKNRKVVEEIRDLLRKSKKLRDHMVLHEYVNAAGITRRIDKSGDKETAEDIVRRIIEELKRILKEIEDLARRINREIERLVEEVERDNRDVNRAIEELLKDIARRGGSEDLKRVEERAREVSRRNEESMRRVKEDADRVSEANKEVLDRVREEVKRLIEEVRETLR

SEQ ID NO: 1601 - protein, 177 aa, Artificial Sequence
  Synthetic
SKEDRLREELKKLLARLAEEIERLKRALEESNKDLKRTRDHMVLHEYVNAAGITRGGVSEELLRELERSTAENKERAKELLKRHEDLVRKVEKELADLLRRLEEIVARVDEALKRGISEEELDKLLKEARDLIREIEKRLEELLKRVEKLTEDAKRDLERSNREHKELADRIKETAR

SEQ ID NO: 1602 - protein, 243 aa, Artificial Sequence
  Synthetic
KREDILKKLEDIIRDIIDKLRRILEKVKRLNEDIIREIRDHMVLHEYVNAAGITRIADKSRDRELEDILRRVLEKLRRSLDKLRDTLRKLKEETDTVLERAERTLKELKDRLEKLLRDGEKVSEEDLVEALKALIDELRKVLEDVIRVSKELVERLLRALREHLETNKRLVKELLDALRKTTGDDEEIKRLKEELERRHRRLEEEVERVARELEKAHRDLERDIRRVAEELKKLLKKLRDDRR

SEQ ID NO: 1603 - protein, 244 aa, Artificial Sequence
  Synthetic
SAEETLRRITEESKRVLEEITKKYEDLERESREVLRKLRDHMVLHEYVNAAGITKGGDDKDEVLTVLEKVLDELLKLHRENLRVIKELLRKVLEVDRENLEVLKRLLEKARDLLRRSGRDEKDLKKLEDELRKVKEELEKKHEASKRDIEDLERELDKVTEEVERLLRKLKEELRRAAEGSDEDRERLARLLKALADKLIRVLEEILKINEELNRKIIKFARENLERNRRVNKKVIEVLREAAR

SEQ ID NO: 1604 - protein, 242 aa, Artificial Sequence
  Synthetic
SEKERLMRLLDKLKDLNRRLVERIKELLDKALELHKKLRDHMVLHEYVNAAGITRGGVPEELLTRIDELIKKLEDEARKISKEVKRLIDELKKRLEDIHREVDRLIRELKETLKGVTDKDELLRRVAEVLERIARLSEELIREVKEVLEKIVELSRELLKRVLDVLRRIAELLEDALRKGNVSEETVRRLREALKKLEDDLRKIERDAEREYKKLKDELEELTERYRREIRKLKEELKADRK

SEQ ID NO: 1605 - protein, 242 aa, Artificial Sequence; identical to SEQ ID NO: 1604
  Synthetic

SEQ ID NO: 1606 - protein, 240 aa, Artificial Sequence
  Synthetic
SDKEEIKRRVEKTARDLETEHDKIKKRLEDTVRDIKRERDHMVLHEYVNAAGITKTLREGDGDATDLVDKLLETVKRLNEEVLRTVKKIADELRRLVEEVLRVLRESNETLARLLEEGNVGDEVRERLEEVLRRTEEIIKTLEEIVKRLLDELRRLVEELRRISKKLKDELDKIKEKGKDEKRLIEEVVRLLRENLDVVRRILEALAKLIKELLEALEEVLRRNKELIRELLRVLDEALK

SEQ ID NO: 1607 - protein, 248 aa, Artificial Sequence
  Synthetic
DEDRIIEEIARLLEELLRELLELIKKLIETNRRLNEEHRDHMVLHEYVNAAGITRLVKKGISDEKLKRIRERLKRALDDLERLHREINKRLEDLVRELEKLVREILKELKDALEELRRASARAGGEEVLRRLEEIVKKLLDLVRRILERLKEIHKDNVRLLRELNERLTRIVEDLVRLIREILREAGVDEKIAEEIERELEELRRMIKRLHEDLERKLKESEDELREIEARLEEKIRRLEEKLERKRR

SEQ ID NO: 1608 - protein, 248 aa, Artificial Sequence; identical to SEQ ID NO: 1607
  Synthetic

SEQ ID NO: 1609 - protein, 238 aa, Artificial Sequence
  Synthetic
DADELLRRLAEEVERVIREAEDLLRRWKETIKKVLDDLRDHMVLHEYVNAAGITELTKTKGDEELAKLIKDLLDTNEKVNRDLLRLIKKLLKDAERVNRRLLELIEELLEELKRVAKDLGLREEADKKLRDIADRARKELEDYERRLKELLKTVEDALRKAEEDSRKLKRDVEELLERGRLRKDDLEDILRKNLDRLRKLLERLREILRENLEALKKTLKRLEDVVREILEDLKRERK

SEQ ID NO: 1610 - protein, 231 aa, Artificial Sequence
  Synthetic
DKAEVLREALKLLKDLLEELIKIHEESLKRILDLIDTLRDHMVLHEYVNAAGITRSGLDERELRKVERMATESLRTIAKLKEELRDLARRSLEKLREDLKRVDDTLRKVEEKVRRTGPSEELIEELIRTIEKLLKEIVRINEEVLKAVRELLKTLLKLSEDVVRRIEEILRKGGVPEEIDRELKRVVEELRRLHEEIKERLDDVARRSEEELRRIIKKLKEVVKEIRKKLK

SEQ ID NO: 1611 - protein, 236 aa, Artificial Sequence
  Synthetic
STREKAKKVLDTLRADNEDMKRVVEKILRALKRTNERARDHMVLHEYVNAAGITEVGVSEEALKEIEDTLKRVLEEIKRLLDESKKLLEDVEREIREILKTSEELLERIEREIETVGSDEKTLAEILKRLLELNEEMNRRLLKILRDLLRLNEEVIRRLLAVLERLLDALKEALDRGDVPEDLLRKLEEELRRIKEKLRKALEELEREHRELEKELDKLHDESRKEHERIEEELRR

SEQ ID NO: 1612 - protein, 247 aa, Artificial Sequence
  Synthetic
RDRDVLRKVKAEIEELVARIEKVSRDALSEVKRLLDENRDHMVLHEYVNAAGITKIRDTRGDDEVVKETEEVLRDNHRLLEELIRRLIKVLEEWLRRHKKLLDEIRELLKEILRLVKESGVSEDLLRRLKRVIEELDKKLKESEEKLRRVVEKAKEDLKAVLEEHRKVLEDLKRALEEVREKLRERGSEEVVEELLRMLKRVAEEMKRVHDDLSRAVEKVVRDVVRVDKELLDELARILRRLEEVIT

SEQ ID NO: 1613 - protein, 231 aa, Artificial Sequence
  Synthetic
SKDEELARLLEELVERWRKIVEDLERDHRRLVKEIRELRDHMVLHEYVNAAGITKNGIDERIVRLIEEIAKIIEEVLKEIVKLVERAVRENVRVLRESVRLVAELVETLARLLRGSDERVTEAIKKVLDTSEDLIRRVIKVNEDILREIAKLVEEVLREAERILTEIKKEGDREEIRRILEELKRIVDDVLRIIARILKLLRDLTRRLAEVAKAVHKLLEELLRKLKEDTR

SEQ ID NO: 1614 - protein, 229 aa, Artificial Sequence
  Synthetic
SKEERLREVAEKHKKDLEDIVKRVDEAAKETARRLEEIRDHMVLHEYVNAAGITKGPDDEKLKKVKKILKDIMDRLAELIKKILKLLKENLEKIKELLRRNLEISEELLKLAKGLSDRDVLETVRRVLEKLDEEWDRVLEDSRRIIETILRELDTLLREVEKLIKEIKDEISGSKEVLDILERAVEVVRRVIKALKEVLERHVDATREVIERVKRVNKRLLEAVREVVT

SEQ ID NO: 1615 - protein, 229 aa, Artificial Sequence; identical to SEQ ID NO: 1614
  Synthetic

SEQ ID NO: 1616 - protein, 246 aa, Artificial Sequence
  Synthetic
SEREELLERIKEILKRVKDKLDEDLKRLKEILEKLKEKRDHMVLHEYVNAAGITEKLERTGRTDELVKEVLDTVRRNLENLKRLVEDILRKLEENVKNLTDLVREILKLITELIKRLEDGGLPKEVLDALRRVLEKLEELLREILERLKRSLEAVKRKIEELLKELERSLDELRRALERIRKEIGDSETAVRAIIRVLEKHLEAVRRVLEELLKVLAEHLETVRELIERLKRVLEEAIEVVERVAR

SEQ ID NO: 1617 - protein, 240 aa, Artificial Sequence
  Synthetic
DREKSVRDIEEDLKRVLDKLRRRVETSKEELKKVLKADRDHMVLHEYVNAAGITELDRGIDSEVLRAVREIVKRLVEVVRRYNELSEKIIRDLVRVNDRVLELLKRIVKRLIDVVRELEKIGDKEKALRRLEEVVKEVKRRIEELLKELEDVHRELVKILEEVNEDLKRVATEVKEIIKTGIKSSEVAKELDEVIKRLLDNLKENTDRLKEVIDRNLADLRDLAEELRAVIERLLEDARR

SEQ ID NO: 1618 - protein, 240 aa, Artificial Sequence; identical to SEQ ID NO: 1617
  Synthetic

SEQ ID NO: 1619 - protein, 241 aa, Artificial Sequence
  Synthetic
SAEEAVEKLVRIARAIVKINEDLSREVVRILREIVRLNRDHMVLHEYVNAAGITVVEDGGLSEDVVRKLRKLVKELEDLLKKSNDDIRKLVEDVARRLKESNDEIRRLVERLEELLKRGPGDEELLRLVEELTEELLRTHEEVVKALEKLTADLLELHRELLERVRRLTKRIEEELKRVGVSEELLRRLEELRKRLEKVLDDSAKELEKLKRELERLLEESRRKLEKLKRDLERVLEETRR

SEQ ID NO: 1620 - protein, 237 aa, Artificial Sequence
  Synthetic
REDEVLRDIERLLREIEEKIRRILEESTAELRKVEEEVRDHMVLHEYVNAAGITDVERKGIDEELRKLLDEVLDKLTKLIERNKRSLERILELIKRIIDENLEVLRDIIRLLEELLKATKDNGVPKDEVIKLVEDVVRRIEELVTRVVARNEKLVKDLDDLAKKNVRENEELLREIDRGLDEDLLEKIKRVIREHIKALEKLARDLKEILRRHIEALKELARDLAEVIRKLLEDVKR

SEQ ID NO: 1621 - protein, 243 aa, Artificial Sequence
  Synthetic
SEAERLADEVRKAVKKSEEDNETLVREVEKAVRELKKNRDHMVLHEYVNAAGITDLLRDGQVSDRDLLKELEEVLRRVLEALAENHERTEEILKRWLDRYAEDIERLRKVLKEVIEALKRGGSDDKRIVDELEEILRRNEDVLDKIAKRLRRLLEEDRRLLERIVRELKRLLDDLDRITKEGKSEELVRIAIEVLKRLLEIIEELVRLNNEILERLLKIVRELHKDNIKILEDLLRIIEEVLR

SEQ ID NO: 1622 - protein, 245 aa, Artificial Sequence
  Synthetic
SEKDEVTRRIRELLKEAEETNREAIERIKRLLDRVREARDHMVLHEYVNAAGITKVLDRGLQDDEALLKLLIDALREHNRLSTELIKILIDVLRTILKIIKDVLATNIEIARRILDLVRRLAERGGLDDRLVKEVEKLVRTAERLHRDALRKVKRLVEELEKRLRELVKTDHDLVRRLETLLRRGSGSKEDLLREIARILAESLRLIRELLKEIEKIVKEIIELLERLNDELRKIIEAILETTKK

SEQ ID NO: 1623 - protein, 243 aa, Artificial Sequence
  Synthetic
SRVEELKKLIEDILRISREVVERIARVAEDIHRINRRVRDHMVLHEYVNAAGITEILARKVSGTEAAEALRDTIRRVVDEIRKLLEEHEKRSAELLEEIRKLLEDILRRSERAVEEIRELLKKGVSTKDVLRIIEEILREHLELLERVVRRIEEILRELLKTIEEIVKRIKEILEELKEVLKRGSVGDDEVEREIRRVKEDLDRILEEYRRLLEEIKRKLEEILRRVEELHRRLRRKLEEIDR

SEQ ID NO: 1624 - protein, 249 aa, Artificial Sequence
  Synthetic
DAEEVVKRLADVLRENDETIRKVVEDLVRIAEENDRLWRDHMVLHEYVNAAGITLLRRGGVPEELLDRLAKVVKSIVEKAEKILERLNRVSKAIAEKLKTIVDELNEVSKEIVKRAEDILRKGKDKETVLRALRTLVKEYADLSKEVLERVERIVREYVKLSDEVVKSLAEIVEELIRIIEDLLRKGNLDEDVKRALEELVSRLRKLLEDVKKASEDIVREVERIVRELAKRSDEILKKLEDIVEKLRE

SEQ ID NO: 1625 - protein, 240 aa, Artificial Sequence
  Synthetic
DKDKRLEELLKRLKELNDKTFEELERILEELKRANEASRDHMVLHEYVNAAGITGGNLDKRLAELLKKLLDDLKRLLEEYTRTNEELLKRLRELLERYRETNKKLLDLLRKLLDEARRTGTDEDLLRRLEDILRKYEDEVRRLLKELEDILREYEDTSRRLLEELERIAKEAAERVSRGSDKDVKDIIRTILEVARDLLRLLEEDSRTNSEVVKRLLDLLREDSKANSEVVKRLLDVLRE

SEQ ID NO: 1626 - protein, 240 aa, Artificial Sequence
  Synthetic
SKEETLKRLLDELEKRNRETVERLERLLKELEDRNRASRDHMVLHEYVNAAGITESGLSKELKDTLARILEELRKLLEEYFRKNEELLRLLRKLLDEYARTNEELLRLLEELLDTARRTGGDSELLKRLEDIAREYEKRVRRLLEKLKDILDKYRKTVEELVRKMEEILKEAKKTISRIGSEEVKDIVRAMEEVIRRLIEILRRDVELNLDVAKKLLELLKEDSKLNLDVARELLELLDR

SEQ ID NO: 1627 - protein, 240 aa, Artificial Sequence; identical to SEQ ID NO: 1626
  Synthetic

SEQ ID NO: 1628 - protein, 243 aa, Artificial Sequence
  Synthetic
DEEETLRRLLERKVELAKEYLDVSKEVIDRTTKLLDEYRDHMVLHEYVNAAGITRGDLGPDELIKRLAEELERSLRELEEEIKRLKRELEESLKKLKEIIDRLAEEAEKLLAVLKRGEGSEEEALRALASLVRELIEVLRENDERLRDVLRRLIEALRKNNEILERVLRKLVRAAEERGRDESSREALEEARRRLEELLRELNEITKDLEAKLEKLLRDLNELTKALEEELKRLLDELKKRTD

SEQ ID NO: 1629 - protein, 243 aa, Artificial Sequence
  Synthetic
SEAERTKESLKKVLKALVDLNRELLRKLEENMRELTKLRDHMVLHEYVNAAGITEGGIVDKDAEREAERLMRELDKSSEDTARETRKLIEESKKSTRRTEEEARKLTETLDRLAKGGLPREDLLRALVRLLEELARLIEEDVRRNAELVKRHIELVERDVAELLRLIKELVDLLADLAEKGSRTEEIRKIVEEILKEIKELADRYREEVRKSKDKLRSILEDYKRKVDELKERLRELIEEVET

SEQ ID NO: 1630 - protein, 186 aa, Artificial Sequence
  Synthetic
SAEDSIRELLERDERLLEEARKEAKRLNEENERLLERIERDHMVLHEYVNAAGITIRKKIKGEKLREIEELVRRVKRTIEKLLEEVKKSVEDSSKRIEELLEAVERSVERTKEEIRRLLDEVRKDRKEELVKRVEERIKRLHDENRRLVKEVIEEVEKLIRDNEKLAEDIEREIRRLLKELDEAAK

SEQ ID NO: 1631 - protein, 182 aa, Artificial Sequence
  Synthetic
DEAEKLLKELRDLLEESRKDLERLLKELEDLLEESKRDLRDHMVLHEYVNAAGITTVERRNEREKLEKLLRELKKVVERLKDNLKDNERRNKEAIERVRKKLKDNERENKKVIEDLRAKLKDLEEVKRKIDRLEEESRRVIEEARKRLEEVEEKSKKIIDDARRALDRIDKELRRVVEETRK

SEQ ID NO: 1632 - protein, 182 aa, Artificial Sequence
  Synthetic
RVEDALRKLLDDVRRLVEEAERRLRTSNDKSRRLVEEAKRDHMVLHEYVNAAGITVRRRIRDEDVKRVLEELLKRDHDVVRRVLERIDEMLERNSRLVKRVLEDIRRLLKRVREVVERIKRVRSKVVEEVLKELEELIKTAKKIIEDVLRASEDTIRRLEEIIRKVEEDSKRIIEEIERAAR

SEQ ID NO: 1633 - protein, 183 aa, Artificial Sequence
  Synthetic
KVEKRLTDLLKTVADEVKRVEDELRETVRESKEVVDKSRRDHMVLHEYVNAAGITAERRVSEDLVRRIRKVLDENREVNDRVVKEDERILEENERVNRKVVEKIRDILRKIEEVVRRAAEEIRDEEVVKKVEKEIRELLERLKEEADRVRERSKKILTDLKKSSEDVKRESERMLKKLEDEIR

SEQ ID NO: 1634 - protein, 184 aa, Artificial Sequence
  Synthetic
SLEEVIKTVRKLLEEVERRLREVVERAERMLEEVRRRTRRDHMVLHEYVNAAGITLRDKNVSEEIEEKLRKIKEELERDNEKVNRDNERSVETLRRLLDRVRKEVKDIAKELEERLKEVERKSRDDRIVEKLLRDAERIVKRLRELIEKLREEVEKIVDENRKTVEELRRRNEEIVRRLRREIE

SEQ ID NO: 1635 - protein, 184 aa, Artificial Sequence
  Synthetic
KLDEVIEEIRKLLRRMEEELRRSVEEIDKLLREVRELLRRDHMVLHEYVNAAGITLKKRGVPEEVKERLDRLVETLRRLSEETLKELDKLVREVKELSKESLKRLRELVERLRRELEEIKKRGEDEKLVEDLKRRAEEVIRELREIVKRNTEIAREVVERAKRIVEKNEKLLKDVVEEAKKIVK

SEQ ID NO: 1636 - protein, 181 aa, Artificial Sequence
  Synthetic
SEVERVLEDLRRLVRDVEEKLRRIIERDRRLVEEVERENRDHMVLHEYVNAAGITELKDISDKKTIERIVREIIKEARDLVRRNHERNREIVDESRRLVEELRRIVEEIIRRLRELLERVKSGELAERIEDVVREAEKRLRELLKELEKTSRDLKKRLEELDRELKALVEKVERDLEELRK

SEQ ID NO: 1637 - protein, 177 aa, Artificial Sequence
  Synthetic
KEEEDLEREVKRLEDKVREDAKKLEEVVKTVEKLVRDDARDHMVLHEYVNAAGITLTERKLDEETLRKVKEDLKRTLERLKRENEKSLEELRDILRRLKKENDDTLKELRDELKRLTDSGASEDVIRKMEEIIKRLEEVSREVEKRLRRIIRELERVSKEVLDRLREIIEKLDRDAT

SEQ ID NO: 1638 - protein, 180 aa, Artificial Sequence
  Synthetic
STEEVLDEIRKLHKTLTEDIKRVLREIEELHRRTIEENKRDHMVLHEYVNAAGITVRTKDTPNVEKLLKDLEKSAKENEEHNERTLREDDRVLKEIRRRATELLKANEEMLRRIEEVMRAGKVDAEELLRESKEAIKEVKRVLEELRKESKRVVDETRKLSEENLEHSERVLRKVEEDLR

SEQ ID NO: 1639 - protein, 180 aa, Artificial Sequence
  Synthetic
SKEEVLDEMRRLHETTKRDIRRVLKEIEELHERTLRENKRDHMVLHEYVNAAGITIKRKKTPDVEKLVRRVEEMLKELEKHNKKTTDDDKRVLDEIRRRADELVKEDERVLREIEEVVRAGKVDLKELLDESRRVVKESKEDLDRLLKESRDVVDDTRRKSEKNLRDAERVIREAEEAVR

SEQ ID NO: 1640 - protein, 187 aa, Artificial Sequence
  Synthetic
SEKERLKEELEKLSKEIEDILRDDKRSDDELRRRLRELLRDHMVLHEYVNAAGITMLEEARKRVSEDELRAIKKEIEDLNRRNEESLRAIEEKIKRLNDENRKSLEEIRRRLKRLVEEVDELRKRDNREELLRRLLEKLKRMAEKLKRDIEDNNRKLRKVATELAKEIEDNSEKLREDAKRLSEKIK

SEQ ID NO: 1641 - protein, 187 aa, Artificial Sequence
  Synthetic
DEEEELRKRLEKLSKEVRELLRRDEEEDRRLNRELEELLRDHMVLHEYVNAAGITLLRKARRKVSEEELTRLRKKLRDLEEESKEALRELRRRVEELNKENKKSLDDLERRLKELEDRAREVEKRDRREDELRELLRRLEDVIRKLAEDLKRNTEDLRRVIKELAERLEELNKRLKREIRRLKEELR

SEQ ID NO: 1642 - protein, 171 aa, Artificial Sequence
  Synthetic
SEKEKVIKEARELLERLRKRLKDVNDDVTRLLDELRKENRDHMVLHEYVNAAGITEVPVEDVIRELKRRLEEVDKKNRDILETLKRELDEVSRRTREELEKLRKELEEVEKAGLPAEELKRVADRLRRRLERLVEENERVVKKILDEIRRSVEENKRIVDKVRKDLDERRK

SEQ ID NO: 1643 - protein, 177 aa, Artificial Sequence
  Synthetic
SAIEKVKEVVERVLETVRDSVRRSHEESKRLIDKVRKRLRDHMVLHEYVNAAGITKGIPERMVEKLERDLEELLKEIKDTIDRIEEELRTSNRRLKETNDEIAKRLEELLRELSRDRDKDAVEDVLRRIEELIRDLNKKNDDNVRRVKEVIDRAEKLVRDLLREIRKLIEKLIRDTE

SEQ ID NO: 1644 - protein, 179 aa, Artificial Sequence
  Synthetic
SSKEVADELRKKAEKVLDELRKIIRELERKNEDSLRRTERDHMVLHEYVNAAGITLVRTRGEDDRLVREVERLLRELKRRLEELIRRSEELIKRSREEVDRVIRTVEKLLEELDRLLRANKGDIEDLRRTVDKLVEEIKDLARKLAKSSDDTVREDEKLVEELRKDVKRIVRKIKKDLE

SEQ ID NO: 1645 - protein, 174 aa, Artificial Sequence
  Synthetic
SEIEELEKRIDELLKELRDLSRRIAEEVKRLLEELKKLSRDHMVLHEYVNAAGITKGVPEEELRRVEEEVERVVRESRKLNKETEDELRRLLEEIKESNDRVEKRARELKKLLRDGKDVEEVLRRLEKLVREDKERLKKVLKDARDLIKKDKDLNEKLSRELEKLVRELEERAR

SEQ ID NO: 1646 - protein, 182 aa, Artificial Sequence
  Synthetic
SDADRVAEELKKLVEDSRRENERVIEESKRLVKENEDRNRDHMVLHEYVNAAGITILEKEKDKKTLDDIVREILERLKRLLEKVEDENRKSHEENKRLLEDVKRKNKRISDELKRLLEEIERRNVDVDKVRETVKRLLEENKRVMEKTEEVAKKSSEDIKRVADETRRRAEELLKEVDELRK

SEQ ID NO: 1647 - protein, 178 aa, Artificial Sequence
  Synthetic
SEEEKLKEVKDRIREVLRKLEEHTDKVKKEVEKVLRDIRRDHMVLHEYVNAAGITLRRKKKDAEDLLRELEKIIEEIERELDRVLEENDKMAEEWKKLLDKVLDDNRKSIRDIEKELDDREPTDELVTEVEKLLRDDEETNRDVVKKVREAVKKDADTNRKVIEEVKKVLEDAARRLD

SEQ ID NO: 1648 - protein, 183 aa, Artificial Sequence
  Synthetic
SEVDEVLERIKRLLERLAEHSDKVVRDIEKLLDDNRKENRDHMVLHEYVNAAGITMRRRGDLREELLERVVREVEKEIRDIKRKNKRSVETVEKLVRDDRKELKRALEDVERLIRELETRLKDKEELRRKLEKVLREAEKVIDELLKKTDEVLKRARETIEDLNRKLDKVLKEVRDKLDRLRD

SEQ ID NO: 1649 - protein, 179 aa, Artificial Sequence
  Synthetic
KDEETLKRLLEKAKEVVDRLKDENEKVTRDNHESVKKAKRDHMVLHEYVNAAGITAIRRVREAKEVVDTAEKLLRDNHEHSRDTVKKARELNETSRRHSERIVEKIEEILEEVERTLRENRGDVRELAKKVEKAIRELEELSRENREAVKRISDEIKRLSDENAKDSERIIKEIDDRVR

SEQ ID NO: 1650 - protein, 179 aa, Artificial Sequence
  Synthetic
REDERLEEIARKIKKVVDELVERNKKLTEDNHESVRRAERDHMVLHEYVNAAGITAIERIRSDKKVVDEVKKLLEDAKKHSKEVIDELRRLNEESKRSSEDTIRRMRKLLRELEETVKAKKGDVEDIERKVEDIIRRLEDLSRRNEEKVRRISEEIKKLSKDNERTIKEIIKEIEERVK

SEQ ID NO: 1651 - protein, 184 aa, Artificial Sequence
  Synthetic
ELIKKARKDVEEVRERSERLVDELRKRNKKLADESRRLIRDHMVLHEYVNAAGITLLRKRRTKDVLKEIEDLVRELERELRRVVKESSDKVRKLIRENEKVVEESSRLFRDLVEKLRRVVEERNDKKLMEEVERLIKRLEDVNEKSERDVREINKESERVNEETEREVEDAIRKLREVLRRAKK

SEQ ID NO: 1652 - protein, 179 aa, Artificial Sequence
  Synthetic
RLEDEVRKMEKEVREEVKRLEDESRKVLEESRRNLDKLRRDHMVLHEYVNAAGITLRRRGLDERVLRELLKRVREVHERNRKLLDEVRRASEKVHEDNRRILEEVRKTVKDVVDKLRRVDAKVVKELIDRVRKILEDVEREVKKSIEEVKEINRRLNEEVKKTIEEVKEIVKEVTERAK

SEQ ID NO: 1653 - protein, 179 aa, Artificial Sequence
  Synthetic
SKAEEVEELVKKLLAEVKKSLDDVRRTVEKLLREVRKSLRDHMVLHEYVNAAGITLKDDGQDERAVRRVVEEIKELLDRNNEDSKRVVKEIRKLLDENDKTSKRVVEEIKRLLDEVRKEGKISEEKVEKLERDVRRALERDTRENKKLEDRVETALREDKKRNDDLREDVKRVLEEIRT

SEQ ID NO: 1654 - protein, 174 aa, Artificial Sequence
  Synthetic
SESDEVIRDLARLLDELARHVDDSVRRMDEVVKRSTREARDHMVLHEYVNAAGITKPGDERVERMVAEIERLVAEVLEELKKKYEKLKREVEENLRRLEETVRDIVEKARKVTEKGVSKEKIDRIIRELERILEEAKKKHEDVLRRLEDSLRRVAELLKAALDRLREIVDRLRR

SEQ ID NO: 1655 - protein, 174 aa, Artificial Sequence; identical to SEQ ID NO: 1654
  Synthetic

SEQ ID NO: 1656 - protein, 174 aa, Artificial Sequence
  Synthetic
SESDDVIRKLRELLEELRTHVEKSIRDLRKILEDSTRHARDHMVLHEYVNAAGITKPGDEEVRKTVEEISRRVAENVKRLEDLYRRMEEEVKKNLDRLRKRVEDIIREVEEARKKGVDEEKLKDLIRKLRDILRRAAEAHKKLIDDARESLERAKREHEKLIDRLKKILEELER

SEQ ID NO: 1657 - protein, 186 aa, Artificial Sequence
  Synthetic
SRVEEIIEDLRRLLEEIRKENEDSIRRSKELLDRVKEINRDHMVLHEYVNAAGITEVREKGSESEEVKKALRAVLEELEKLLRRVAEINEEVLRRNSKLVEEDERRNREVLKELARLVEELIREIGDEDKARKVAEVAEKVLRDIDKLDRESKEAFRATNEEIAKLDEDTARVAERVKKAIEDLAK

SEQ ID NO: 1658 - protein, 186 aa, Artificial Sequence
  Synthetic
SEVDEIIKELERLLAEIARENERIIRESRKLADEVRKRNRDHMVLHEYVNAAGITAVRRKGSESEEVKKLIEDVLREIERLLKRIEEENREVVKRNSELVERVRAINEEILRRVAELVEKIARDIGDKDEVTKVKKVADDVLAEIKKLDDETRRVIEDTNKKIADLDKATRDVVRKVLEEVKKLEK

SEQ ID NO: 1659 - protein, 185 aa, Artificial Sequence
  Synthetic
SSVEELLERLRRISEENKRRIEKLLREVEKVLRELKDRHRDHMVLHEYVNAAGITEIKSGLPEEAVKRVLERVRERVKEVLEEADRLNDEMRRIVTEVEKELDKSDKEVEDAVRDILKKIEEGVRDRETAERARETLKRLLDENRDRSKKVKEEIRRILEDLTRTTERVKREIAKLLKELEDTAR

SEQ ID NO: 1660 - protein, 180 aa, Artificial Sequence
  Synthetic
SELEEVLRRIEALVRKAHKENEDVLREIERLVRTAHRLNRDHMVLHEYVNAAGITGGREDKDKVEEALRRLRELYRRLEEENRRILREIEELVKELEKRNREILKELEDLVADAERKGSDGSEAVRRLKEILERLKEEVRRSLEELRKEVERLKKEVEDSLRELKKSLEEWVKSLEEATR

SEQ ID NO: 1661 - protein, 238 aa, Artificial Sequence
  Synthetic
EEDERLTKRVEEIKRENRELLRRLEEEVKELERKSEKIVRDHMVLHEYVNAAGITGKGSTELLVEELEKLIREILKLSEDHNRTLEEVVRKIEDVLRANLERLKELVDEILKALKERGKGDSEELKRKVEKVARDYERLLRKLREVVKRILDESKRLDEELEERLKEVLKKLEELIKRGGPDKDVLTELKRILDELLKLVEKLIRRNLRLLEELLRLVREILRTSNEILEEILKDARR

SEQ ID NO: 1662 - protein, 244 aa, Artificial Sequence
  Synthetic
SAEETLRRITEESKRVLEEITKKYEDLERESREVLRKLRRDHMVLHEYVNAAGITGGDDKDEVLTVLEKVLDELLKLHRENLRVIKELLRKVLEVDRENLEVLKRLLEKARDLLRRSGRDEKDLKKLEDELRKVKEELEKKHEASKRDIEDLERELDKVTEEVERLLRKLKEELRRAAEGSDEDRERLARLLKALADKLIRVLEEILKINEELNRKIIKFARENLERNRRVNKKVIEVLREAAR

SEQ ID NO: 1663 - protein, 244 aa, Artificial Sequence; identical to SEQ ID NO: 1662
  Synthetic

SEQ ID NO: 1664 - protein, 250 aa, Artificial Sequence
  Synthetic
STEEILKRVKEILDELAKELRDIIRESLRTIEELLDELRRDHMVLHEYVNAAGITIKDGVKDSEELLRRLKRLLEDLRRAHEELLKRLKEAVDEHRDRLRKILEELERVLKELRKRIEELRRSGDRISEKDVLRKLEEVLRKALEILERLLKKIRESARELLKIIEEVLDANIKVMEEALKTIKELLKDGPDEVKRRLEEKERRIRTRYEELRRRLRKRVKDYEDKLREIEKKVRRDAERIEEELERAKK

SEQ ID NO: 1665 - protein, 238 aa, Artificial Sequence
  Synthetic
SEAEKIREALETNLRLLEELIKRLKEILDTHNELLRRVIRDHMVLHEYVNAAGITGGLDEEVLREVKRLVDELRKEARRVLDEHEKLVRKIKKEAEDVARESEEIIKEVEDKLKGLDREELLERVRRVLKKSDDLIAELVRRALKILEELTRLLAELLKKVVEILRRIVELVERVLTKKGAPKEDLERLRRKVEELEDRLRRLLEKLARDSAELMRELERILDRYARESEELDRRLAE

SEQ ID NO: 1666 - protein, 248 aa, Artificial Sequence
  Synthetic
SAEEELEKLVRKVEEDLKRLEEESERIKKEIKDTLRAIRRDHMVLHEYVNAAGITLEEEGRRVSLEEAIKIIKEILDELAKVNEDIIRIIKELLKRLVDTNRRVIETIDRILKKLVDDLRRGNLPEDKLREVERELRELKKELEEIVRESEKMLKELEDKLREIVRESRELLEKLRRDLKRIKDGNLSADEALEMLKRLLDKALKVHEDVLRKLVELVDEVLKVHEESLRKLLTLAAKVLEVLRKITK

SEQ ID NO: 1667 - protein, 240 aa, Artificial Sequence
  Synthetic
SDKEEIKRRVEKTARDLETEHDKIKKRLEDTVRDIKRELRDHMVLHEYVNAAGITTLREGDGDATDLVDKLLETVKRLNEEVLRTVKKIADELRRLVEEVLRVLRESNETLARLLEEGNVGDEVRERLEEVLRRTEEIIKTLEEIVKRLLDELRRLVEELRRISKKLKDELDKIKEKGKDEKRLIEEVVRLLRENLDVVRRILEALAKLIKELLEALEEVLRRNKELIRELLRVLDEALK

SEQ ID NO: 1668 - protein, 248 aa, Artificial Sequence
  Synthetic
DEEERVKKLLTDLRRLLRKLHEESKKLLDELRKKLRELRRDHMVLHEYVNAAGITAEKKLPGTRVLKLVADVVKKVLDAIRDLNRKLEEIIDEALKLLEELDDILRRVVEEALRLLKEIKDTKGDREEVKKRVEDILKRLEELVKEYEDRVREIKKRLRRALEELRDEYRKIREDIERVLDELRKGGVPEELLRVLEELVRTLKKLLDENLKMVERLIRELEKVLDDHERKVRRLIEELLEVLDRDAK

SEQ ID NO: 1669 - protein, 248 aa, Artificial Sequence
  Synthetic
DEDRIIEEIARLLEELLRELLELIKKLIETNRRLNEEHERDHMVLHEYVNAAGITLVKKGISDEKLKRIRERLKRALDDLERLHREINKRLEDLVRELEKLVREILKELKDALEELRRASARAGGEEVLRRLEEIVKKLLDLVRRILERLKEIHKDNVRLLRELNERLTRIVEDLVRLIREILREAGVDEKIAEEIERELEELRRMIKRLHEDLERKLKESEDELREIEARLEEKIRRLEEKLERKRR

SEQ ID NO: 1670 - protein, 238 aa, Artificial Sequence
  Synthetic
DADELLRRLAEEVERVIREAEDLLRRWKETIKKVLDDLKRDHMVLHEYVNAAGITLTKTKGDEELAKLIKDLLDTNEKVNRDLLRLIKKLLKDAERVNRRLLELIEELLEELKRVAKDLGLREEADKKLRDIADRARKELEDYERRLKELLKTVEDALRKAEEDSRKLKRDVEELLERGRLRKDDLEDILRKNLDRLRKLLERLREILRENLEALKKTLKRLEDVVREILEDLKRERK

SEQ ID NO: 1671 - protein, 238 aa, Artificial Sequence; identical to SEQ ID NO: 1670
  Synthetic

SEQ ID NO: 1672 - protein, 236 aa, Artificial Sequence
  Synthetic
STREKAKKVLDTLRADNEDMKRVVEKILRALKRTNERAERDHMVLHEYVNAAGITVGVSEEALKEIEDTLKRVLEEIKRLLDESKKLLEDVEREIREILKTSEELLERIEREIETVGSDEKTLAEILKRLLELNEEMNRRLLKILRDLLRLNEEVIRRLLAVLERLLDALKEALDRGDVPEDLLRKLEEELRRIKEKLRKALEELEREHRELEKELDKLHDESRKEHERIEEELRR

SEQ ID NO: 1673 - protein, 236 aa, Artificial Sequence; identical to SEQ ID NO: 1672
  Synthetic

SEQ ID NO: 1674 - protein, 247 aa, Artificial Sequence
  Synthetic
SKAEKLLKDLREALEKVKRRYEELERRLDEVLKEHEEIVRDHMVLHEYVNAAGITGGLPEEELEKLKKLAEKVKELLRELLRLSKELVDRVRELLKRDLDLVRRLVEIALKVLREAREQPNDEKRVEKIKRDLEKKARRVREENERIKRDLKRTADESRKRLEKLLEDLKRELDRLREDLDRGRKDIDERVEELIERLIRIIERLLREVIKSHEKLVRTIERLIEESIRVNEELLEVIERLLDRARK

SEQ ID NO: 1675 - protein, 247 aa, Artificial Sequence; identical to SEQ ID NO: 1674
  Synthetic

SEQ ID NO: 1676 - protein, 231 aa, Artificial Sequence
  Synthetic
SKEEEVEKVLRKWEEILRRLIEENKRANDKIRREYEELVRDHMVLHEYVNAAGITLGVSEEVKRILEKLIKLLEDILEYEKENVERLIELNERILRELKKSVEELKALVTRVRRDGLPESEVRKLVEDVLRKNEELLKEAKKAWRDSIENLKRVLEEVAKLVKTVLREIEEKIDDEDVVRALIEVIERLLRVAEEVIRRILKVNTELMRVDERSIRESLKAISEVLKVLDT

SEQ ID NO: 1677 - protein, 247 aa, Artificial Sequence
  Synthetic
RDRDVLRKVKAEIEELVARIEKVSRDALSEVKRLLDENRRDHMVLHEYVNAAGITIRDTRGDDEVVKETEEVLRDNHRLLEELIRRLIKVLEEWLRRHKKLLDEIRELLKEILRLVKESGVSEDLLRRLKRVIEELDKKLKESEEKLRRVVEKAKEDLKAVLEEHRKVLEDLKRALEEVREKLRERGSEEVVEELLRMLKRVAEEMKRVHDDLSRAVEKVVRDVVRVDKELLDELARILRRLEEVIT

SEQ ID NO: 1678 - protein, 237 aa, Artificial Sequence
  Synthetic
KEKEDALKKLEDLARKSREDLERVLRKHKKILDKIEELLRDHMVLHEYVNAAGITKTGTESEILKELARLLREHHEALRRLIEELRRLLEEHHKILEDLAREHKRLLDELIKVVADGVDKDELERIIKELRERDKKLVDDLRKVSEDLLDAVRKLVEDLERISRELLRRVEELAKGIDEELAREVERVIKELLDKSKEILERIERAIDELLKVSEEILKLSEDASEELLKILREFAK

SEQ ID NO: 1679 - protein, 229 aa, Artificial Sequence
  Synthetic
SKEERLREVAEKHKKDLEDIVKRVDEAAKETARRLEEILRDHMVLHEYVNAAGITGPDDEKLKKVKKILKDIMDRLAELIKKILKLLKENLEKIKELLRRNLEISEELLKLAKGLSDRDVLETVRRVLEKLDEEWDRVLEDSRRIIETILRELDTLLREVEKLIKEIKDEISGSKEVLDILERAVEVVRRVIKALKEVLERHVDATREVIERVKRVNKRLLEAVREVVT

SEQ ID NO: 1680 - protein, 241 aa, Artificial Sequence
  Synthetic
SEKELLKEILDRIRELLEDDNRLLKRIVDEIRKLLEEWLRDHMVLHEYVNAAGITIGAPEDVIRELTRALKETEEDVDRVIRTLEKLLKEVLDAHEEVVRKLDRLLKEVERLVEGGDAEEVVRDLLRVVKEILDESKAVIDELARVVDEILKLLEEVDRKLAKVVKEILEDVLRGSGDDEDAVRKIAKIIEELKRLLEDLARDTRRVIEEAKRLLKEWRDRNKEVADTLKKLLEDLIRKIR

SEQ ID NO: 1681 - protein, 241 aa, Artificial Sequence; identical to SEQ ID NO: 1680
  Synthetic

SEQ ID NO: 1682 - protein, 240 aa, Artificial Sequence
  Synthetic
DREKSVRDIEEDLKRVLDKLRRRVETSKEELKKVLKADKRDHMVLHEYVNAAGITLDRGIDSEVLRAVREIVKRLVEVVRRYNELSEKIIRDLVRVNDRVLELLKRIVKRLIDVVRELEKIGDKEKALRRLEEVVKEVKRRIEELLKELEDVHRELVKILEEVNEDLKRVATEVKEIIKTGIKSSEVAKELDEVIKRLLDNLKENTDRLKEVIDRNLADLRDLAEELRAVIERLLEDARR

SEQ ID NO: 1683 - protein, 240 aa, Artificial Sequence; identical to SEQ ID NO: 1682
  Synthetic

SEQ ID NO: 1684 - protein, 237 aa, Artificial Sequence
  Synthetic
REDEVLRDIERLLREIEEKIRRILEESTAELRKVEEEVKRDHMVLHEYVNAAGITVERKGIDEELRKLLDEVLDKLTKLIERNKRSLERILELIKRIIDENLEVLRDIIRLLEELLKATKDNGVPKDEVIKLVEDVVRRIEELVTRVVARNEKLVKDLDDLAKKNVRENEELLREIDRGLDEDLLEKIKRVIREHIKALEKLARDLKEILRRHIEALKELARDLAEVIRKLLEDVKR

SEQ ID NO: 1685 - protein, 237 aa, Artificial Sequence; identical to SEQ ID NO: 1684
  Synthetic

SEQ ID NO: 1686 - protein, 243 aa, Artificial Sequence
  Synthetic
SEAERLADEVRKAVKKSEEDNETLVREVEKAVRELKKNNRDHMVLHEYVNAAGITLLRDGQVSDRDLLKELEEVLRRVLEALAENHERTEEILKRWLDRYAEDIERLRKVLKEVIEALKRGGSDDKRIVDELEEILRRNEDVLDKIAKRLRRLLEEDRRLLERIVRELKRLLDDLDRITKEGKSEELVRIAIEVLKRLLEIIEELVRLNNEILERLLKIVRELHKDNIKILEDLLRIIEEVLR

SEQ ID NO: 1687 - protein, 243 aa, Artificial Sequence; identical to SEQ ID NO: 1686
  Synthetic

SEQ ID NO: 1688 - protein, 245 aa, Artificial Sequence
  Synthetic
SEKDEVTRRIRELLKEAEETNREAIERIKRLLDRVREAVRDHMVLHEYVNAAGITVLDRGLQDDEALLKLLIDALREHNRLSTELIKILIDVLRTILKIIKDVLATNIEIARRILDLVRRLAERGGLDDRLVKEVEKLVRTAERLHRDALRKVKRLVEELEKRLRELVKTDHDLVRRLETLLRRGSGSKEDLLREIARILAESLRLIRELLKEIEKIVKEIIELLERLNDELRKIIEAILETTKK

SEQ ID NO: 1689 - protein, 243 aa, Artificial Sequence
  Synthetic
SRVEELKKLIEDILRISREVVERIARVAEDIHRINRRVLRDHMVLHEYVNAAGITILARKVSGTEAAEALRDTIRRVVDEIRKLLEEHEKRSAELLEEIRKLLEDILRRSERAVEEIRELLKKGVSTKDVLRIIEEILREHLELLERVVRRIEEILRELLKTIEEIVKRIKEILEELKEVLKRGSVGDDEVEREIRRVKEDLDRILEEYRRLLEEIKRKLEEILRRVEELHRRLRRKLEEIDR

SEQ ID NO: 1690 - protein, 249 aa, Artificial Sequence
  Synthetic
DAEEVVKRLADVLRENDETIRKVVEDLVRIAEENDRLWKRDHMVLHEYVNAAGITLRRGGVPEELLDRLAKVVKSIVEKAEKILERLNRVSKAIAEKLKTIVDELNEVSKEIVKRAEDILRKGKDKETVLRALRTLVKEYADLSKEVLERVERIVREYVKLSDEVVKSLAEIVEELIRIIEDLLRKGNLDEDVKRALEELVSRLRKLLEDVKKASEDIVREVERIVRELAKRSDEILKKLEDIVEKLRE

SEQ ID NO: 1691 - protein, 240 aa, Artificial Sequence
  Synthetic
DKDKRLEELLKRLKELNDKTFEELERILEELKRANEASLRDHMVLHEYVNAAGITGNLDKRLAELLKKLLDDLKRLLEEYTRTNEELLKRLRELLERYRETNKKLLDLLRKLLDEARRTGTDEDLLRRLEDILRKYEDEVRRLLKELEDILREYEDTSRRLLEELERIAKEAAERVSRGSDKDVKDIIRTILEVARDLLRLLEEDSRTNSEVVKRLLDLLREDSKANSEVVKRLLDVLRE

SEQ ID NO: 1692 - protein, 240 aa, Artificial Sequence
  Synthetic
SKEETLKRLLDELEKRNRETVERLERLLKELEDRNRASLRDHMVLHEYVNAAGITSGLSKELKDTLARILEELRKLLEEYFRKNEELLRLLRKLLDEYARTNEELLRLLEELLDTARRTGGDSELLKRLEDIAREYEKRVRRLLEKLKDILDKYRKTVEELVRKMEEILKEAKKTISRIGSEEVKDIVRAMEEVIRRLIEILRRDVELNLDVAKKLLELLKEDSKLNLDVARELLELLDR

SEQ ID NO: 1693 - protein, 240 aa, Artificial Sequence; identical to SEQ ID NO: 1692
  Synthetic

SEQ ID NO: 1694 - protein, 243 aa, Artificial Sequence
  Synthetic
DEEETLRRLLERKVELAKEYLDVSKEVIDRTTKLLDEYLRDHMVLHEYVNAAGITGDLGPDELIKRLAEELERSLRELEEEIKRLKRELEESLKKLKEIIDRLAEEAEKLLAVLKRGEGSEEEALRALASLVRELIEVLRENDERLRDVLRRLIEALRKNNEILERVLRKLVRAAEERGRDESSREALEEARRRLEELLRELNEITKDLEAKLEKLLRDLNELTKALEEELKRLLDELKKRTD

SEQ ID NO: 1695 - protein, 243 aa, Artificial Sequence
  Synthetic
SEAERTKESLKKVLKALVDLNRELLRKLEENMRELTKLNRDHMVLHEYVNAAGITGGIVDKDAEREAERLMRELDKSSEDTARETRKLIEESKKSTRRTEEEARKLTETLDRLAKGGLPREDLLRALVRLLEELARLIEEDVRRNAELVKRHIELVERDVAELLRLIKELVDLLADLAEKGSRTEEIRKIVEEILKEIKELADRYREEVRKSKDKLRSILEDYKRKVDELKERLRELIEEVET

SEQ ID NO: 1696 - protein, 243 aa, Artificial Sequence; identical to SEQ ID NO: 1695
  Synthetic

SEQ ID NO: 1697 - protein, 178 aa, Artificial Sequence
  Synthetic
DEVEKLLRDLEELDRDIERKVRELLKRNKEVLDDIEREVRRDHMVLHEYVNAAGITIRKTTDKRTVDKLLKELEKILKEVLDRVRRLLEEAKESLDRSREEIERLLEESKTLVDEVRRAGIDKKEVDKIEKHSRDLIERAKRETDRLLEEAERLMREVVDRVRKILEEAKRLIDEARR

SEQ ID NO: 1698 - protein, 181 aa, Artificial Sequence
  Synthetic
SEVERVLEDLRRLVRDVEEKLRRIIERDRRLVEEVERENRRDHMVLHEYVNAAGITLKDISDKKTIERIVREIIKEARDLVRRNHERNREIVDESRRLVEELRRIVEEIIRRLRELLERVKSGELAERIEDVVREAEKRLRELLKELEKTSRDLKKRLEELDRELKALVEKVERDLEELRK

SEQ ID NO: 1699 - protein, 174 aa, Artificial Sequence
  Synthetic
SEDETIRRIVRTVHEESRKSTEDVRREVERVLRESEEVVKRDHMVLHEYVNAAGITGISEELEERMRRIIREIREHLKDNLRRVREVIERIERKLEETERRDEKVLREIEKKIRDGDGREEVAREVTKIARDTIRENEEIAKEVREIVERSIKNLEEVAEEVERVVRELIEARR

SEQ ID NO: 1700 - protein, 174 aa, Artificial Sequence
  Synthetic
SRDEKIRDILRRVLKEVRDSTKKVEEDLEDVHRRTEEELRRDHMVLHEYVNAAGITGASEELKRRMEEVVRRIEELLKKLLKEDRDVVKEIRDKLDETRKEMEEVAERIKDKIRRGDGREKVAEEVKRIADRLIDLNRRIAEEVDKIVRDSIKKVEEIVTEVEKIVEKLIRDVR

SEQ ID NO: 1701 - protein, 174 aa, Artificial Sequence
  Synthetic
SELEKVVKEVADLLRRNLEKSKRVLEEVRRRLEENLRESERDHMVLHEYVNAAGITVREGKDKRDLTRLLEEDDKRVKEALDKSRENNERILKEVRRALRESEEDNRRILKEVREKVDSRLLEELEERVRESIERSRRFIEELEKIVEETLTESEKLARASSEITKTVLDEIRK

SEQ ID NO: 1702 - protein, 180 aa, Artificial Sequence
  Synthetic
STEEVLDEIRKLHKTLTEDIKRVLREIEELHRRTIEENKERDHMVLHEYVNAAGITRTKDTPNVEKLLKDLEKSAKENEEHNERTLREDDRVLKEIRRRATELLKANEEMLRRIEEVMRAGKVDAEELLRESKEAIKEVKRVLEELRKESKRVVDETRKLSEENLEHSERVLRKVEEDLR

SEQ ID NO: 1703 - protein, 180 aa, Artificial Sequence
  Synthetic
SKEEVLREIERLHKETIRRIEEVLREATELHKRLTETNKRRDHMVLHEYVNAAGITRRADTPNVEELLRELKDALDKVRDHNRKTLKKNEDVVREIEKEVRELLKEDEDVLRRIEKVMRDGRVDARELLEESRREVERSEKEVERLLRKSRKVVEEVRKLSEENDREVKKILEEVKRRLD

SEQ ID NO: 1704 - protein, 180 aa, Artificial Sequence
  Synthetic
SKEEVLDEMRRLHETTKRDIRRVLKEIEELHERTLRENKRRDHMVLHEYVNAAGITKRKKTPDVEKLVRRVEEMLKELEKHNKKTTDDDKRVLDEIRRRADELVKEDERVLREIEEVVRAGKVDLKELLDESRRVVKESKEDLDRLLKESRDVVDDTRRKSEKNLRDAERVIREAEEAVR

SEQ ID NO: 1705 - protein, 187 aa, Artificial Sequence
  Synthetic
SEKETVRDELRKLVETIRKLLEEDKESDKRLADRIRELNERDHMVLHEYVNAAGITLEELRKKVSEDELRKLRKRIEDLRRRDEELNKRSREKLEDLNERNKDSLRRIEDELRKLVEEAREVEKRDNDEERLRKLLERLERVIRDLLRKIEENNKRLRKAIKELLDELRKINKELREVIKKLLDDAR

SEQ ID NO: 1706 - protein, 187 aa, Artificial Sequence
  Synthetic
SEKERLKEELEKLSKEIEDILRDDKRSDDELRRRLRELLERDHMVLHEYVNAAGITLEEARKRVSEDELRAIKKEIEDLNRRNEESLRAIEEKIKRLNDENRKSLEEIRRRLKRLVEEVDELRKRDNREELLRRLLEKLKRMAEKLKRDIEDNNRKLRKVATELAKEIEDNSEKLREDAKRLSEKIK

SEQ ID NO: 1707 - protein, 187 aa, Artificial Sequence
  Synthetic
DEEEELRKRLEKLSKEVRELLRRDEEEDRRLNRELEELLKRDHMVLHEYVNAAGITLRKARRKVSEEELTRLRKKLRDLEEESKEALRELRRRVEELNKENKKSLDDLERRLKELEDRAREVEKRDRREDELRELLRRLEDVIRKLAEDLKRNTEDLRRVIKELAERLEELNKRLKREIRRLKEELR

SEQ ID NO: 1708 - protein, 175 aa, Artificial Sequence
  Synthetic
SEKEDLERELEEVRRRVEESLRKNEEDVKRVRDELKKLLDRDHMVLHEYVNAAGITNVDKRVLDEADRLLKELEDDHKKLEEDAKKALDELREEHKRLEETLRRMLKRIKEVLDRESDKMEEIKKEIEKILRDIERVSRELNKKLEEIVRRLKKVSDELNRRIEEIAERVRRRRK

SEQ ID NO: 1709 - protein, 177 aa, Artificial Sequence
  Synthetic
SVIERVEEEMEKVIRDSERVTKEVEDRAREVHERSEKRIRRDHMVLHEYVNAAGITGVDKRILDELRKRIKDSREDLERINEELRRALRKLLEDSKRINEELRKTLEELRKRLERVDDEEEVKKLAEEVRRLVEDSIRKLEELARRVDELVRESIERVDRNVEENKRLVREAIERRR

SEQ ID NO: 1710 - protein, 179 aa, Artificial Sequence
  Synthetic
SSKEVADELRKKAEKVLDELRKIIRELERKNEDSLRRTEERDHMVLHEYVNAAGITVRTRGEDDRLVREVERLLRELKRRLEELIRRSEELIKRSREEVDRVIRTVEKLLEELDRLLRANKGDIEDLRRTVDKLVEEIKDLARKLAKSSDDTVREDEKLVEELRKDVKRIVRKIKKDLE

SEQ ID NO: 1711 - protein, 183 aa, Artificial Sequence
  Synthetic
SEIEKLVEDVRKLVEDNLRHSEEVHRRNRRLIEENERKIDRDHMVLHEYVNAAGITAERGEIREEEARKVLEEIKRLLDEIRRHSEEVLKEIERTLKENLKHSEEVLRRIEERLEDIKRKDKDSERVRTLVDRLREELKRSLDESEKLNRESRKRVTRSLEKVDDLVRELEKLARKVLEEVKT

SEQ ID NO: 1712 - protein, 174 aa, Artificial Sequence
  Synthetic
SEIEELEKRIDELLKELRDLSRRIAEEVKRLLEELKKLSKRDHMVLHEYVNAAGITGVPEEELRRVEEEVERVVRESRKLNKETEDELRRLLEEIKESNDRVEKRARELKKLLRDGKDVEEVLRRLEKLVREDKERLKKVLKDARDLIKKDKDLNEKLSRELEKLVRELEERAR

SEQ ID NO: 1713 - protein, 174 aa, Artificial Sequence
  Synthetic
DELRDVKRELDRLLRENEEIVERIAETVRRLLEELKKLTKRDHMVLHEYVNAAGITGVPEKELKEVADTLRKLLKDIERSNKEVEDRLRKLLEEIKESTDRLREELEEVEKLLRGGKDVETVLRRVRELSRDNKRRMRRVLEEAKRLAKEDKERIDKIRKEIEELIKRLKDKAT

SEQ ID NO: 1714 - protein, 174 aa, Artificial Sequence
  Synthetic
DEEEDLERRIKKLLDENRELLKRIAEELRRLLEELRRLTERDHMVLHEYVNAAGITGVPEKDLRDVAEKVKKVLKESEDSNRDVKRKLEKLLRDLERSTERLEREARKVRKLLRDGKDIETLLRELEKLSRDNKELLKKIEKEIRDLIKEDKERNRELSERLRKLVEELKKKAT

SEQ ID NO: 1715 - protein, 174 aa, Artificial Sequence
  Synthetic
REIEEAAKDLDRLLEENKKLVKEVEEELRRLLKENRDLVKRDHMVLHEYVNAAGITGVPEEELKEVEERARRVIEESRRSSKELEKRLRELLEELRRSTKELEDRLREIKKLLRNGKDVEEVLRRVRKLSRENKEKIRKILEDVKKLSEDNKRRNEELSRRVKTLVDEIKKRAT

SEQ ID NO: 1716 - protein, 177 aa, Artificial Sequence
  Synthetic
SEAEKVVEELKKLLREVEKKIRDHTEDVKRILEELERRLRRDHMVLHEYVNAAGITNSDDDTVRKVKEELDRSHEKLREELRKVAKELKESNEELERDLKRLVEEAEDRLRRLKDRVSEKVLRELEKILEDIKRTLDKLLRENRETLKRIEDRLRELLEENRKLLEKIERELRERSR

SEQ ID NO: 1717 - protein, 174 aa, Artificial Sequence
  Synthetic
EELERILDKVRKVIEEVRKRLRDDLRTVEKVLKETEEVLRRDHMVLHEYVNAAGITARRGRDRREIKEELKKVLDDLRELLRALEEKNRRVNKENEDSLRKIEEDLRDVLRKLEEEIKGREVLRKVRELLRTIREEVERVLRKSNELSTRIKKRIDDVLETLERLLKELDDKLR

SEQ ID NO: 1718 - protein, 178 aa, Artificial Sequence
  Synthetic
SSKDEIRRRVEEVVERSDEIVKRSREHVKTVVDELDRVVKRDHMVLHEYVNAAGITRKDGGSEETLKRVLDELREILKELKEEVKKVKRKLEKVVKENRDTIREVEERNRKILDELRKRGVEERALREVEEISRKSEEKLRRVLKESEDIAKEAEDRLKTVLERVERIADEVLKRLTK

SEQ ID NO: 1719 - protein, 178 aa, Artificial Sequence
  Synthetic
SKVEKLEEEIARLVERSRRLVEELKKEVTKVKEKVDEIVERDHMVLHEYVNAAGITKRRGGSEEVLRRVTEELKKVLEDNRRVIEEVLRDLERILEELKRKAEEVTKRNRDDLKRLRDSGVDEEVLRRVEETSDRSEKELRTVLRDVTEDIKRIAEELKKALEDSTEIIRRAEDELRT

SEQ ID NO: 1720 - protein, 182 aa, Artificial Sequence
  Synthetic
SDADRVAEELKKLVEDSRRENERVIEESKRLVKENEDRNRRDHMVLHEYVNAAGITLEKEKDKKTLDDIVREILERLKRLLEKVEDENRKSHEENKRLLEDVKRKNKRISDELKRLLEEIERRNVDVDKVRETVKRLLEENKRVMEKTEEVAKKSSEDIKRVADETRRRAEELLKEVDELRK

SEQ ID NO: 1721 - protein, 175 aa, Artificial Sequence
  Synthetic
SEVDEVLREAKRIVDEVHKDNERATEESRRLVKKVHEENERDHMVLHEYVNAAGITNIDEKLVTEILKEIEEALKEAARRNKEVKDRLRELSRRVSERNREILEELKERLDRVRERRKDVKELEREVEKLLKRIEESLRRHRKENKRLLEELDRSLRELAKIVKEVLDEIRERTR

SEQ ID NO: 1722 - protein, 175 aa, Artificial Sequence
  Synthetic
SEMDDVLKKLAETVKRIIERLKKLTDDSRRLVEEVHRRNDRDHMVLHEYVNAAGITNIDEKDVRKLLEDLKKKSEEVAERNKRILDTLREISKRAEDEVRKVLKELEKTLKELEDRRPDVRELSEEVKKLLDEVRKALKRHKDENDKLLKEIEDSLRRHKEENDRLLEKLKESTR

SEQ ID NO: 1723 - protein, 178 aa, Artificial Sequence
  Synthetic
SEEEKLKEVKDRIREVLRKLEEHTDKVKKEVEKVLRDIRRRDHMVLHEYVNAAGITRRKKKDAEDLLRELEKIIEEIERELDRVLEENDKMAEEWKKLLDKVLDDNRKSIRDIEKELDDREPTDELVTEVEKLLRDDEETNRDVVKKVREAVKKDADTNRKVIEEVKKVLEDAARRLD

SEQ ID NO: 1724 - protein, 186 aa, Artificial Sequence
  Synthetic
SEVDEVRKTLEDLLRRLDEENKDIIRRNKELLDDLDRKVRRDHMVLHEYVNAAGITLEKLKDRETLTRIIEEIEKRARELIKRLRDEIRKIEEESKKSIEDSRKRNDEIRKRLEELIKDLRDKIKDSEELARRITELEKRVREVIERLKEKNKRLEDDSRRVITELRKKLKDLEDRVREEIEELRK

SEQ ID NO: 1725 - protein, 186 aa, Artificial Sequence
  Synthetic
SRVDEVIERLERLLRELDKINRDMIEDDKRLNTELNKENKRDHMVLHEYVNAAGITRKKLSDEKTLEEIIERVERRLEELIERSKRRNREILERSKELIERSKKTNEEILRRAEELIKRLREEVKDIKEALDKIRRLEERARRVIEELDEKNRRALERSKENVKRLDERNERLRKELEEKVRRLRK

SEQ ID NO: 1726 - protein, 186 aa, Artificial Sequence
  Synthetic
DEIRELEERVRRILDELRRLVERNREVIERSIRELEKLLDRDHMVLHEYVNAAGITTRRGGDDKKTMLDDVRRLLREAEDHSRRSSETAKRIHRENEEHSKDSSRKVRKLIEELRELAKKVEKEITDERVKEAIKELVKDVDRVMREVDRANRELTKTSKKVLEDVDRTNRRLVKEVRDVVERARK

SEQ ID NO: 1727 - protein, 186 aa, Artificial Sequence
  Synthetic
KEVEDLERTVRTILKRMRELITRNEEEIRRSIEELKKLLKRDHMVLHEYVNAAGITKKEGGDDKKRLVEEIKRLLDELRENSKRSSDRAKEIHERNKRHSEESSRTIEKLLKELRDLVRDVERKLRDEDAKRKLDELTKRVEKVVREADERNKRLTKRSKEVLDEVHRANEEALKEVEEVVRRVTK

SEQ ID NO: 1728 - protein, 178 aa, Artificial Sequence
  Synthetic
KAAEEIRKKVEDYKRESEKILEEVEDHSRRSKETLKRLLDRDHMVLHEYVNAAGITKRRPRTEEIAKRAEEAVRRAAERIKKVIDDVERHIRENAKELKRLLEEDREASRRLEDEIDKEVKAREVADELKKRLKRANEESERVLRELAERNKTALEEAERVLRRLKEEIEKVLRKLKK

SEQ ID NO: 1729 - protein, 176 aa, Artificial Sequence
  Synthetic
REAEEAKEEVEELNRRNKKELDDARRRVDELDKRNKDRLKRDHMVLHEYVNAAGITKEEGRSDDRLREKIERMLKTSADELERLKEENKRALRDLAERLRELIERNRRKLEEITRRTVPDKDVLKRLAELIKESIRELERVLEELAEKIDRSLKELDDVLRKNETDLKRVIEDLKR

SEQ ID NO: 1730 - protein, 179 aa, Artificial Sequence
  Synthetic
DEAEKAKRDSEKVVEDNRKMLEDSTRRAERLNEENKKELKRDHMVLHEYVNAAGITKRRGTDDEVVKDLIRRVEELLERSRKKLEDLTRDNERVLDESRRRLEKLIRDNERIVKDLTDRVVRVDEVLKRLKEEHRRLIEELEEVLRRNEEIIRRSIEDLERVLDRNRRELEDVIRRLKE

SEQ ID NO: 1731 - protein, 174 aa, Artificial Sequence
  Synthetic
SEEEVLREAAKTVEKLLDEIRRSLEKVSKRVEDSNRELKERDHMVLHEYVNAAGITRKNNVDRTLLEDVRRKLERIEERNEEMNDRSRRKLEELRERNRKILEDIRRTLEDLKRRQLPKDDVERTLREIAKLVDEVDKENKRALRENEERVKTLNRENEEMLKRIEEEVRRATK

SEQ ID NO: 1732 - protein, 182 aa, Artificial Sequence
  Synthetic
SELEKTLEDLKRHSEENKKKLEEDLRDMERNLKENKDRLKRDHMVLHEYVNAAGITFREGDIDERELERVRRKMEEIKKRLDENVERNRRKAEDIKRKLDENVKRSEDRVKEIKEDIRRRVRDKDKAEELERRLDELVKENREIHERVKKALDDIVKELEELHERLKRRLEEILRRIAETVR

SEQ ID NO: 1733 - protein, 186 aa, Artificial Sequence
  Synthetic
SEIEKLIEELRRELEKVKDELERSIEEMDRELDDVRRDSKRDHMVLHEYVNAAGITTKRGDRPEEVLRKELEDIKRKLRRILEEHHEKIRRIKEKLRRENKRVRDELKRIKDEIDEKVKDVRRKGADEELLKRLEEVAEDVKRALEELLKKHTRVVERVEKALDELDKELERIVREAEKELDRREK

SEQ ID NO: 1734 - protein, 179 aa, Artificial Sequence
  Synthetic
RLEDEVRKMEKEVREEVKRLEDESRKVLEESRRNLDKLRERDHMVLHEYVNAAGITRRRGLDERVLRELLKRVREVHERNRKLLDEVRRASEKVHEDNRRILEEVRKTVKDVVDKLRRVDAKVVKELIDRVRKILEDVEREVKKSIEEVKEINRRLNEEVKKTIEEVKEIVKEVTERAK

SEQ ID NO: 1735 - protein, 174 aa, Artificial Sequence
  Synthetic
SESDEVIRDLARLLDELARHVDDSVRRMDEVVKRSTREADRDHMVLHEYVNAAGITPGDERVERMVAEIERLVAEVLEELKKKYEKLKREVEENLRRLEETVRDIVEKARKVTEKGVSKEKIDRIIRELERILEEAKKKHEDVLRRLEDSLRRVAELLKAALDRLREIVDRLRR

SEQ ID NO: 1736 - protein, 174 aa, Artificial Sequence
  Synthetic
SESDDVIRKLRELLEELRTHVEKSIRDLRKILEDSTRHAKRDHMVLHEYVNAAGITPGDEEVRKTVEEISRRVAENVKRLEDLYRRMEEEVKKNLDRLRKRVEDIIREVEEARKKGVDEEKLKDLIRKLRDILRRAAEAHKKLIDDARESLERAKREHEKLIDRLKKILEELER

SEQ ID NO: 1737 - protein, 172 aa, Artificial Sequence
  Synthetic
SRAETVLKEVTDKIKKLADSSDELLRRNKENIDELKKSSERDHMVLHEYVNAAGITSVDEETLEELIRRVEAELEAHHRELEKNSREDEKRNRDHHAKLEEEMRRVEERLEREGIDDEVVKRVRDLLDTVRRRNEKVNEDVKRMNDKLRRDNEDVIRRVEKLLRELEEKRRT

SEQ ID NO: 1738 - protein, 177 aa, Artificial Sequence
  Synthetic
DEVRELLERNRRLLEEIKKTVKDLIRANEELLKRIEDDAKRDHMVLHEYVNAAGITLSDDETIREAKERLKASLEDVKRRVEEVKRLLEKSLEEVETIIREAEKRNRDSLREMERRGSSEELEELRRVVEESDETIKRLLEEAKESVDRSLDRIRKLLEDVRRSVERSAKRIDEKRK

SEQ ID NO: 1739 - protein, 180 aa, Artificial Sequence
  Synthetic
STEEVLDEIRKLHKTLTEDIKRVLREIEELHRRTIEENKERDHMVLHEYVNAAGITRTKDTPNVEKLLKDLEKSAKENIEHNERTLREDDRVLKEIRRRATELLKANEEMLRRIEEVARKGGVDAEELLRESKEAIKEVKRVLEELRKESKRVVDETRKLSEENLEHSERVLRKVEEDLR

SEQ ID NO: 1740 - protein, 188 aa, Artificial Sequence
  Synthetic
SEIEKILKEIEDLARRDEEVSKKIVEDIRRLAKEVEDTSRRDHMVLHEYVNAAGITLRKDGSKEELEKEVREVVKTLEELVKDNHRLIRRAVEEMKRLVEENHRHSREVVKELEDLVRELRKGSGSEDSERLVREVEDLVRRLVRRSEKSNEEVKRTVEELVRRMEESNDRVRDLVRRLVEELKRAVD

SEQ ID NO: 1741 - protein, 186 aa, Artificial Sequence
  Synthetic
SEAERLEARARELLRANEELMDDLRAKAEELLKRNDRLVKRDHMVLHEYVNAAGITKRRGEPKEEVARKIEEILRRLEETLRRIKEESDRLDEELKRELERVKRESEELDRELRKLIEDVERRGSGSKRLEELLRRLNEEHKRISDELRKLLDEALEAHRELSRRLEEELERLLREIERLVEEVTR

SEQ ID NO: 1742 - protein, 184 aa, Artificial Sequence
  Synthetic
DDLERAREEVADLIRKHEEKTRRILEESRRLNERHRELSARDHMVLHEYVNAAGITIKRERGKDELRRKVEDLEARVEDLIRRLEEHLRRVHDKDRRLIEDLRRHLKRVVEELKRLIDELRRGVPKEELDRIEEELKRLIDTLREKNREVEKRARDSNRDLKRTNDEIAKEVRELIKKLREDLK

SEQ ID NO: 1743 - protein, 174 aa, Artificial Sequence
  Synthetic
DEEEDLERAIKKLLDENRELLKRIAEELRRLLEELRRLTERDHMVLHEYVNAAGITGVPEEDLADVAEKVKKVLKESEDSNADVARKLEKLLRDLERSTERLEREARKVRKLLRGGKDAETLLRELEKLSRDNKELLKKIEKEIRDLIKEDKERNIELSERLRKLVEELKKKAT

SEQ ID NO: 1744 - protein, 184 aa, Artificial Sequence
  Synthetic
DEIRKVVKEITDLLKASNDKNRKVVEEIRDLLRKSKKLADRDHMVLHEYVNAAGITIDKSGDKETAEDIVRRIIEELKRILKEIEDLARRINREIERLVEEVERDNRDVNRAIEELLKDIARRGGSEDLKRVEERAREVSRRNEESMRRVKEDADRVSEANKEVLDRVREEVKRLIEEVRETLR

SEQ ID NO: 1745 - protein, 184 aa, Artificial Sequence; identical to SEQ ID NO: 1744
  Synthetic

SEQ ID NO: 1746 - protein, 176 aa, Artificial Sequence
  Synthetic
STAETVEKKVEEVIRENEKSMRESEEKVDRSTKRIEDVLRRDHMVLHEYVNAAGITVKGERVKEVLEENRRLLEEAKKLVDEVLETNKKLLEDDKRLNEEVSKTLKKLLEEIKSVDTREDATRVIEEAKRILDEARKLNEETIRRSEELVRRIERVIEEIIKRSEKLLEDVARESK

SEQ ID NO: 1747 - protein, 186 aa, Artificial Sequence
  Synthetic
SRVEEIIEDLRRLLEEIRKENEDSIRRSKELLDRVKEINDRDHMVLHEYVNAAGITVREKGSESEEVKKALRAVLEELEKLLRRVAEINEEVLRRNSKLVEEDERRNREVLKELARLVEELIREIGDEDKARKVAEVAEKVLRDIDKLDRESKEAFRATNEEIAKLDEDTARVAERVKKAIEDLAK

SEQ ID NO: 1748 - protein, 186 aa, Artificial Sequence; identical to SEQ ID NO: 1747
  Synthetic

SEQ ID NO: 1749 - protein, 180 aa, Artificial Sequence
  Synthetic
REVEEMIKELEELLKDLKEKNERASKRNRELVRRLEEENKRDHMVLHEYVNAAGITVRSGEDEEVLREVLKRLEEVLERVRALNERVLEAIEKSLEEVKASNEAVKRRLKELLEEAERGVDSEKLKELRDVIAEVAKRIDELDEYTRESIRRAKKEIERLNRETKKVIEEVVKRIEEERK

SEQ ID NO: 1750 - protein, 181 aa, Artificial Sequence
  Synthetic
SEVDDVLRRLEELIKTLEDINAKSLEDIKKLIDDLAKILERDHMVLHEYVNAAGITKKGIDSREAEEIAKRVLEELKRTSDDLRKKVERVDEDLRRLLRENHERNKKILRDLERLLRDAARRGVPKEALDRMREEIRRLEEESRKSDETIERLIRELRRRVEEVLKTSTDLIRELEEEVKK

SEQ ID NO: 1751 - protein, 183 aa, Artificial Sequence
  Synthetic
SKLEEVEKAVRKVIEDSRRVNEEVNRRSEEVVRELEKVHRRDHMVLHEYVNAAGITLKGSGDERLAAEVERIIEEIRELNERDRKRVEEIRKEIEDLNRDLNRRSKESEDRLRKLLEDATRGGVTKEADEVVERAERISEENKRRVEDVARKSKELVEDVRRHSEEVVRRVEELVKEVEERVR

SEQ ID NO: 1752 - protein, 180 aa, Artificial Sequence
  Synthetic
DEVEDVLRKIEKILDDHRKRIEKNSRDMARIIDEHRRKVERDHMVLHEYVNAAGITVDRGEGDEETAEDVKAKLEKSNRELEKHSEEVKRALDESNEDLRRHSEEVKERIERLVKKLREDGVEREEELKEVADRVKEKLDRLNRENEKSSEELKRELDKINDENRETSERLKREIDETTR

SEQ ID NO: 1753 - protein, 185 aa, Artificial Sequence
  Synthetic
SSVEELLERLRRISEENKRRIEKLLREVEKVLRELKDRHRRDHMVLHEYVNAAGITIKSGLPEEAVKRVLERVRERVKEVLEEADRLNDEMRRIVTEVEKELDKSDKEVEDAVRDILKKIEEGVRDRETAERARETLKRLLDENRDRSKKVKEEIRRILEDLTRTTERVKREIAKLLKELEDTAR

SEQ ID NO: 1754 - protein, 238 aa, Artificial Sequence
  Synthetic
EEDERLTKRVEEIKRENRELLRRLEEEVKELERKSEKIVRRDHMVLHEYVNAAGITKGSTELLVEELEKLIREILKLSEDHNRTLEEVVRKIEDVLRANLERLKELVDEILKALKERGKGDSEELKRKVEKVARDYERLLRKLREVVKRILDESKRLDEELEERLKEVLKKLEELIKRGGPDKDVLTELKRILDELLKLVEKLIRRNLRLLEELLRLVREILRTSNEILEEILKDARR

SEQ ID NO: 1755 - protein, 238 aa, Artificial Sequence
  Synthetic
SKEDKARELEKRLRDNLKKLEEVVRELAEVLKRNLEKLRRRDHMVLHEYVNAAGITRAGGLPKDELEDLRREVEDVLRRLEDLLRKLKKANDESLTRLEELLRRAEEENRRVLTTLRELLRGNGDDRDLARLVARLVEANNRALEELLRLVAKNVEDNNRVLEELLRLVKELAKRLLGRIRDEDLVRDIRRELKELEERARKILRDDERDLRALEKRIRDIIREDREELERLKERARK

SEQ ID NO: 1756 - protein, 244 aa, Artificial Sequence
  Synthetic
SAEETLRRITEESKRVLEEITKKYEDLERESREVLRKLRERDHMVLHEYVNAAGITGDDKDEVLTVLEKVLDELLKLHRENLRVIKELLRKVLEVDRENLEVLKRLLEKARDLLRRSGRDEKDLKKLEDELRKVKEELEKKHEASKRDIEDLERELDKVTEEVERLLRKLKEELRRAAEGSDEDRERLARLLKALADKLIRVLEEILKINEELNRKIIKFARENLERNRRVNKKVIEVLREAAR

SEQ ID NO: 1757 - protein, 244 aa, Artificial Sequence; identical to SEQ ID NO: 1756
  Synthetic

SEQ ID NO: 1758 - protein, 247 aa, Artificial Sequence
  Synthetic
SEKEELLKLIKRVIELLKRVLEEHLRLVEDVIRRLKELLDRDHMVLHEYVNAAGITLDEVRGDKEELDRIKEKLEEVLERYKRRLEEIKRDLERMLEDYKRELKRIEEDLRRVLEEVERIATRGEGPAEALIDKLRKILERALRELDKLSKKLDELLKKVLEELEKSNREIDKLLKDVLRRVEEGGASEDLLRKAKKVITEVREKLKRNLEDVRRVIEDVKRKSARILEEARRLIEEVERELEKIRK

SEQ ID NO: 1759 - protein, 247 aa, Artificial Sequence; identical to SEQ ID NO: 1758
  Synthetic

SEQ ID NO: 1760 - protein, 238 aa, Artificial Sequence
  Synthetic
SEAEKIREALETNLRLLEELIKRLKEILDTHNELLRRVIERDHMVLHEYVNAAGITGLDEEVLREVKRLVDELRKEARRVLDEHEKLVRKIKKEAEDVARESEEIIKEVEDKLKGLDREELLERVRRVLKKSDDLIAELVRRALKILEELTRLLAELLKKVVEILRRIVELVERVLTKKGAPKEDLERLRRKVEELEDRLRRLLEKLARDSAELMRELERILDRYARESEELDRRLAE

SEQ ID NO: 1761 - protein, 238 aa, Artificial Sequence; identical to SEQ ID NO: 1760
  Synthetic

SEQ ID NO: 1762 - protein, 242 aa, Artificial Sequence
  Synthetic
SEKERLMRLLDKLKDLNRRLVERIKELLDKALELHKKLVKRDHMVLHEYVNAAGITGVPEELLTRIDELIKKLEDEARKISKEVKRLIDELKKRLEDIHREVDRLIRELKETLKGVTDKDELLRRVAEVLERIARLSEELIREVKEVLEKIVELSRELLKRVLDVLRRIAELLEDALRKGNVSEETVRRLREALKKLEDDLRKIERDAEREYKKLKDELEELTERYRREIRKLKEELKADRK

SEQ ID NO: 1763 - protein, 242 aa, Artificial Sequence; identical to SEQ ID NO: 1762
  Synthetic

SEQ ID NO: 1764 - protein, 247 aa, Artificial Sequence
  Synthetic
SEAEDLEELIKELAELLKDVIRKLEKINRRLVKILEDIIRRDHMVLHEYVNAAGITTVEDKDILRDLERRLREILEESDRLLEELKRRLEEILRKSKELLRRLEEVLREILKRAEEVKRSNLPKEELIKEIVKLLEELLRVIEKILEDNIRLLEELVEVIKEILEKHLRLLEELVRVIERILREVGKDKDEAERRRRELKDKLDRLREEHEEVKRRLEEELTRLRETHKKIEKELREALKRVRDRST

SEQ ID NO: 1765 - protein, 240 aa, Artificial Sequence
  Synthetic
SDKEEIKRRVEKTARDLETEHDKIKKRLEDTVRDIKRELDRDHMVLHEYVNAAGITLREGDGDATDLVDKLLETVKRLNEEVLRTVKKIADELRRLVEEVLRVLRESNETLARLLEEGNVGDEVRERLEEVLRRTEEIIKTLEEIVKRLLDELRRLVEELRRISKKLKDELDKIKEKGKDEKRLIEEVVRLLRENLDVVRRILEALAKLIKELLEALEEVLRRNKELIRELLRVLDEALK

SEQ ID NO: 1766 - protein, 240 aa, Artificial Sequence; identical to SEQ ID NO: 1765
  Synthetic

SEQ ID NO: 1767 - protein, 248 aa, Artificial Sequence
  Synthetic
DEEERVKKLLTDLRRLLRKLHEESKKLLDELRKKLRELRRRDHMVLHEYVNAAGITEKKLPGTRVLKLVADVVKKVLDAIRDLNRKLEEIIDEALKLLEELDDILRRVVEEALRLLKEIKDTKGDREEVKKRVEDILKRLEELVKEYEDRVREIKKRLRRALEELRDEYRKIREDIERVLDELRKGGVPEELLRVLEELVRTLKKLLDENLKMVERLIRELEKVLDDHERKVRRLIEELLEVLDRDAK

SEQ ID NO: 1768 - protein, 248 aa, Artificial Sequence
  Synthetic
DEDRIIEEIARLLEELLRELLELIKKLIETNRRLNEEHERRDHMVLHEYVNAAGITVKKGISDEKLKRIRERLKRALDDLERLHREINKRLEDLVRELEKLVREILKELKDALEELRRASARAGGEEVLRRLEEIVKKLLDLVRRILERLKEIHKDNVRLLRELNERLTRIVEDLVRLIREILREAGVDEKIAEEIERELEELRRMIKRLHEDLERKLKESEDELREIEARLEEKIRRLEEKLERKRR

SEQ ID NO: 1769 - protein, 238 aa, Artificial Sequence
  Synthetic
DADELLRRLAEEVERVIREAEDLLRRWKETIKKVLDDLKRRDHMVLHEYVNAAGITTKTKGDEELAKLIKDLLDTNEKVNRDLLRLIKKLLKDAERVNRRLLELIEELLEELKRVAKDLGLREEADKKLRDIADRARKELEDYERRLKELLKTVEDALRKAEEDSRKLKRDVEELLERGRLRKDDLEDILRKNLDRLRKLLERLREILRENLEALKKTLKRLEDVVREILEDLKRERK

SEQ ID NO: 1770 - protein, 236 aa, Artificial Sequence
  Synthetic
STREKAKKVLDTLRADNEDMKRVVEKILRALKRTNERAEKRDHMVLHEYVNAAGITGVSEEALKEIEDTLKRVLEEIKRLLDESKKLLEDVEREIREILKTSEELLERIEREIETVGSDEKTLAEILKRLLELNEEMNRRLLKILRDLLRLNEEVIRRLLAVLERLLDALKEALDRGDVPEDLLRKLEEELRRIKEKLRKALEELEREHRELEKELDKLHDESRKEHERIEEELRR

SEQ ID NO: 1771 - protein, 236 aa, Artificial Sequence; identical to SEQ ID NO: 1770
  Synthetic

SEQ ID NO: 1772 - protein, 247 aa, Artificial Sequence
  Synthetic
SKAEKLLKDLREALEKVKRRYEELERRLDEVLKEHEEIVKRDHMVLHEYVNAAGITGLPEEELEKLKKLAEKVKELLRELLRLSKELVDRVRELLKRDLDLVRRLVEIALKVLREAREQPNDEKRVEKIKRDLEKKARRVREENERIKRDLKRTADESRKRLEKLLEDLKRELDRLREDLDRGRKDIDERVEELIERLIRIIERLLREVIKSHEKLVRTIERLIEESIRVNEELLEVIERLLDRARK

SEQ ID NO: 1773 - protein, 247 aa, Artificial Sequence; identical to SEQ ID NO: 1772
  Synthetic

SEQ ID NO: 1774 - protein, 243 aa, Artificial Sequence
  Synthetic
DLERVVEDIVDKAKRLLDKNLEVLKRIVDEVLRLLERLLRRDHMVLHEYVNAAGITVRDEKELRRVKRALEEVLRRHEEIAKELKERLRKVAKEAEEKHKKLVEDLKRVVDEVRKKLSGPLDREKVLEVLDELVTIIAKLLDENIKVLEEVIRVIAELLERLLDSHRRLIDIIAKLLEGLRPGDEDLLTELEKKLRKLKRDSEKVVDDLKKELERIKREVKRLIEENARTLADIKRAVDEARK

SEQ ID NO: 1775 - protein, 239 aa, Artificial Sequence
  Synthetic
SERELIERWLELHKEILRLIRELVERLLKLHREILDTIKKRDHMVLHEYVNAAGITGLDKEAKDELREIAKRVEDKLEKLERESRKVEEDLKRKLKELTDESDTVEKRVRDVVRRGTQSREEIAEELLRLDRKLLKAVEELLKEILDLNKKLLDDVRAILEETRRVLEKLLDRVRRGERTDDERRTLTELLKRMEDILEKVERTLKKLLDDSARMAEEVKKTLKELLERSEKVAEDVRK

SEQ ID NO: 1776 - protein, 246 aa, Artificial Sequence
  Synthetic
KEIEETLKELEDLNREMVETNRRVLEETRRLNKETVDRVKRDHMVLHEYVNAAGITVRKGPTSEELKRLLAELEELLARVVRRVEELLKKSTDLLERAVKDSADALRRSHEVLKEVASRVKRAKDEGLPREEVLRLLRELLERHAKVLKDIVRVSEKLLREHLKVLREIVEVLEELLERILKVILDTTGGDKAVEELEKALEEIKRRLKEVIDRYEDELRKLRKEYKEKIDKYERKLEEIERRERT

SEQ ID NO: 1777 - protein, 231 aa, Artificial Sequence
  Synthetic
SKEEEVEKVLRKWEEILRRLIEENKRANDKIRREYEELVKRDHMVLHEYVNAAGITGVSEEVKRILEKLIKLLEDILEYEKENVERLIELNERILRELKKSVEELKALVTRVRRDGLPESEVRKLVEDVLRKNEELLKEAKKAWRDSIENLKRVLEEVAKLVKTVLREIEEKIDDEDVVRALIEVIERLLRVAEEVIRRILKVNTELMRVDERSIRESLKAISEVLKVLDT

SEQ ID NO: 1778 - protein, 247 aa, Artificial Sequence
  Synthetic
RDRDVLRKVKAEIEELVARIEKVSRDALSEVKRLLDENRKRDHMVLHEYVNAAGITRDTRGDDEVVKETEEVLRDNHRLLEELIRRLIKVLEEWLRRHKKLLDEIRELLKEILRLVKESGVSEDLLRRLKRVIEELDKKLKESEEKLRRVVEKAKEDLKAVLEEHRKVLEDLKRALEEVREKLRERGSEEVVEELLRMLKRVAEEMKRVHDDLSRAVEKVVRDVVRVDKELLDELARILRRLEEVIT

SEQ ID NO: 1779 - protein, 231 aa, Artificial Sequence
  Synthetic
SKDEELARLLEELVERWRKIVEDLERDHRRLVKEIRELVERDHMVLHEYVNAAGITGIDERIVRLIEEIAKIIEEVLKEIVKLVERAVRENVRVLRESVRLVAELVETLARLLRGSDERVTEAIKKVLDTSEDLIRRVIKVNEDILREIAKLVEEVLREAERILTEIKKEGDREEIRRILEELKRIVDDVLRIIARILKLLRDLTRRLAEVAKAVHKLLEELLRKLKEDTR

SEQ ID NO: 1780 - protein, 231 aa, Artificial Sequence; identical to SEQ ID NO: 1779
  Synthetic

SEQ ID NO: 1781 - protein, 238 aa, Artificial Sequence
  Synthetic
SEIEDVIRRLRKILEDLERVSEKLLREIKKILDEARRLNERDHMVLHEYVNAAGITFRDGSGSKEELAKLVEELIRELAKLAKEVDEIHKRIVERLKALVEDAERIHRKIVETLEEIVRGVPSEELKRVVEAIVEVIKEHLKVLADVIRRIIKAIEENAETIKRVLEDIVRVLELVLRGEGSIEDLVREVERLIKRIEDSLRELEKTVRELLKRIKEASDKVREDVDRLIKELKEAAD

SEQ ID NO: 1782 - protein, 237 aa, Artificial Sequence
  Synthetic
KEKEDALKKLEDLARKSREDLERVLRKHKKILDKIEELLKRDHMVLHEYVNAAGITTGTESEILKELARLLREHHEALRRLIEELRRLLEEHHKILEDLAREHKRLLDELIKVVADGVDKDELERIIKELRERDKKLVDDLRKVSEDLLDAVRKLVEDLERISRELLRRVEELAKGIDEELAREVERVIKELLDKSKEILERIERAIDELLKVSEEILKLSEDASEELLKILREFAK

SEQ ID NO: 1783 - protein, 237 aa, Artificial Sequence; identical to SEQ ID NO: 1782
  Synthetic

SEQ ID NO: 1784 - protein, 229 aa, Artificial Sequence
  Synthetic
SKEERLREVAEKHKKDLEDIVKRVDEAAKETARRLEEILKRDHMVLHEYVNAAGITPDDEKLKKVKKILKDIMDRLAELIKKILKLLKENLEKIKELLRRNLEISEELLKLAKGLSDRDVLETVRRVLEKLDEEWDRVLEDSRRIIETILRELDTLLREVEKLIKEIKDEISGSKEVLDILERAVEVVRRVIKALKEVLERHVDATREVIERVKRVNKRLLEAVREVVT

SEQ ID NO: 1785 - protein, 246 aa, Artificial Sequence
  Synthetic
SEREELLERIKEILKRVKDKLDEDLKRLKEILEKLKEKADRDHMVLHEYVNAAGITLERTGRTDELVKEVLDTVRRNLENLKRLVEDILRKLEENVKNLTDLVREILKLITELIKRLEDGGLPKEVLDALRRVLEKLEELLREILERLKRSLEAVKRKIEELLKELERSLDELRRALERIRKEIGDSETAVRAIIRVLEKHLEAVRRVLEELLKVLAEHLETVRELIERLKRVLEEAIEVVERVAR

SEQ ID NO: 1786 - protein, 246 aa, Artificial Sequence; identical to SEQ ID NO: 1785
  Synthetic

SEQ ID NO: 1787 - protein, 240 aa, Artificial Sequence
  Synthetic
DREKSVRDIEEDLKRVLDKLRRRVETSKEELKKVLKADKERDHMVLHEYVNAAGITDRGIDSEVLRAVREIVKRLVEVVRRYNELSEKIIRDLVRVNDRVLELLKRIVKRLIDVVRELEKIGDKEKALRRLEEVVKEVKRRIEELLKELEDVHRELVKILEEVNEDLKRVATEVKEIIKTGIKSSEVAKELDEVIKRLLDNLKENTDRLKEVIDRNLADLRDLAEELRAVIERLLEDARR

SEQ ID NO: 1788 - protein, 240 aa, Artificial Sequence; identical to SEQ ID NO: 1787
  Synthetic

SEQ ID NO: 1789 - protein, 237 aa, Artificial Sequence
  Synthetic
REDEVLRDIERLLREIEEKIRRILEESTAELRKVEEEVKRRDHMVLHEYVNAAGITERKGIDEELRKLLDEVLDKLTKLIERNKRSLERILELIKRIIDENLEVLRDIIRLLEELLKATKDNGVPKDEVIKLVEDVVRRIEELVTRVVARNEKLVKDLDDLAKKNVRENEELLREIDRGLDEDLLEKIKRVIREHIKALEKLARDLKEILRRHIEALKELARDLAEVIRKLLEDVKR

SEQ ID NO: 1790 - protein, 243 aa, Artificial Sequence
  Synthetic
SEAERLADEVRKAVKKSEEDNETLVREVEKAVRELKKNNKRDHMVLHEYVNAAGITLRDGQVSDRDLLKELEEVLRRVLEALAENHERTEEILKRWLDRYAEDIERLRKVLKEVIEALKRGGSDDKRIVDELEEILRRNEDVLDKIAKRLRRLLEEDRRLLERIVRELKRLLDDLDRITKEGKSEELVRIAIEVLKRLLEIIEELVRLNNEILERLLKIVRELHKDNIKILEDLLRIIEEVLR

SEQ ID NO: 1791 - protein, 243 aa, Artificial Sequence; identical to SEQ ID NO: 1790
  Synthetic

SEQ ID NO: 1792 - protein, 245 aa, Artificial Sequence
  Synthetic
SEKDEVTRRIRELLKEAEETNREAIERIKRLLDRVREAVERDHMVLHEYVNAAGITLDRGLQDDEALLKLLIDALREHNRLSTELIKILIDVLRTILKIIKDVLATNIEIARRILDLVRRLAERGGLDDRLVKEVEKLVRTAERLHRDALRKVKRLVEELEKRLRELVKTDHDLVRRLETLLRRGSGSKEDLLREIARILAESLRLIRELLKEIEKIVKEIIELLERLNDELRKIIEAILETTKK

SEQ ID NO: 1793 - protein, 245 aa, Artificial Sequence; identical to SEQ ID NO: 1792
  Synthetic

SEQ ID NO: 1794 - protein, 232 aa, Artificial Sequence
  Synthetic
SEKELVDDIRRILEEILRLLRSLLEEVIRLLEENEKLVRRRDHMVLHEYVNAAGITDENGIRTDEADRVLERLEKAHRELLEDYKRALEKIKETLERVLREAEEVVKKIDDALRKLGGSKEVLKRLLEELLRLVEKIAEEIKRLLSELVRVTEELVRTNKELLEEAVRVIRKEVGDDSLVREVEELIKRLEKHIDDLLKTSRDLVKRVLDLVDEVVKRVEDLVERVKEKIDT

SEQ ID NO: 1795 - protein, 247 aa, Artificial Sequence
  Synthetic
DEERLAEELERVLDRNRKLLEEALRELRRVIEENRKSVKRRDHMVLHEYVNAAGITRELSRGDSDEELRKVIEDLIRKLTKVLDKVRSLVEENIERLARVLEKLERLARENLEDLKKVLDDVDKKLKDRRLVERLAELVRELIEVNKEILEMLKEIVRELLEINRTLLERLKDLVATALEIIKLLARGDGTEEDVERAVKEIRDRLRKLLEDYERAVRRLEDKLRRVRERYEAVLKRIKDKLEETKR

SEQ ID NO: 1796 - protein, 240 aa, Artificial Sequence
  Synthetic
DKDKRLEELLKRLKELNDKTFEELERILEELKRANEASLRRDHMVLHEYVNAAGITNLDKRLAELLKKLLDDLKRLLEEYTRTNEELLKRLRELLERYRETNKKLLDLLRKLLDEARRTGTDEDLLRRLEDILRKYEDEVRRLLKELEDILREYEDTSRRLLEELERIAKEAAERVSRGSDKDVKDIIRTILEVARDLLRLLEEDSRTNSEVVKRLLDLLREDSKANSEVVKRLLDVLRE

SEQ ID NO: 1797 - protein, 240 aa, Artificial Sequence
  Synthetic
SKEETLKRLLDELEKRNRETVERLERLLKELEDRNRASLERDHMVLHEYVNAAGITGLSKELKDTLARILEELRKLLEEYFRKNEELLRLLRKLLDEYARTNEELLRLLEELLDTARRTGGDSELLKRLEDIAREYEKRVRRLLEKLKDILDKYRKTVEELVRKMEEILKEAKKTISRIGSEEVKDIVRAMEEVIRRLIEILRRDVELNLDVAKKLLELLKEDSKLNLDVARELLELLDR

SEQ ID NO: 1798 - protein, 240 aa, Artificial Sequence; identical to SEQ ID NO: 1797
  Synthetic

SEQ ID NO: 1799 - protein, 243 aa, Artificial Sequence
  Synthetic
DEEETLRRLLERKVELAKEYLDVSKEVIDRTTKLLDEYLKRDHMVLHEYVNAAGITDLGPDELIKRLAEELERSLRELEEEIKRLKRELEESLKKLKEIIDRLAEEAEKLLAVLKRGEGSEEEALRALASLVRELIEVLRENDERLRDVLRRLIEALRKNNEILERVLRKLVRAAEERGRDESSREALEEARRRLEELLRELNEITKDLEAKLEKLLRDLNELTKALEEELKRLLDELKKRTD

SEQ ID NO: 1800 - protein, 243 aa, Artificial Sequence
  Synthetic
SEAERTKESLKKVLKALVDLNRELLRKLEENMRELTKLNERDHMVLHEYVNAAGITGIVDKDAEREAERLMRELDKSSEDTARETRKLIEESKKSTRRTEEEARKLTETLDRLAKGGLPREDLLRALVRLLEELARLIEEDVRRNAELVKRHIELVERDVAELLRLIKELVDLLADLAEKGSRTEEIRKIVEEILKEIKELADRYREEVRKSKDKLRSILEDYKRKVDELKERLRELIEEVET

SEQ ID NO: 1801 - protein, 182 aa, Artificial Sequence
  Synthetic
DEAEKLLKELRDLLEESRKDLERLLKELEDLLEESKRDLERRDHMVLHEYVNAAGITERRNEREKLEKLLRELKKVVERLKDNLKDNERRNKEAIERVRKKLKDNERENKKVIEDLRAKLKDLEEVKRKIDRLEEESRRVIEEARKRLEEVEEKSKKIIDDARRALDRIDKELRRVVEETRK

SEQ ID NO: 1802 - protein, 184 aa, Artificial Sequence
  Synthetic
SLEEVIKTVRKLLEEVERRLREVVERAERMLEEVRRRTREVRDHMVLHEYVNAAGITDKNVSEEIEEKLRKIKEELERDNEKVNRDNERSVETLRRLLDRVRKEVKDIAKELEERLKEVERKSRDDRIVEKLLRDAERIVKRLRELIEKLREEVEKIVDENRKTVEELRRRNEEIVRRLRREIE

SEQ ID NO: 1803 - protein, 181 aa, Artificial Sequence
  Synthetic
SLDEVVKRLEDLLREVEEKSKESSKRMEDLNREVNERLRRSRDHMVLHEYVNAAGITDAGRDDKIRRTLERLSEDTKRKSDKTNEDLKRLSDETRERSKRLNEELRRLVEEVRRRLEDLRRKGSPVEEIKKLADKVVTELEKLVEDDRRLAEESFERARKIVEEDERLARESVDRARRLVD

SEQ ID NO: 1804 - protein, 181 aa, Artificial Sequence
  Synthetic
SEVERVLEDLRRLVRDVEEKLRRIIERDRRLVEEVERENRKRDHMVLHEYVNAAGITKDISDKKTIERIVREIIKEARDLVRRNHERNREIVDESRRLVEELRRIVEEIIRRLRELLERVKSGELAERIEDVVREAEKRLRELLKELEKTSRDLKKRLEELDRELKALVEKVERDLEELRK

SEQ ID NO: 1805 - protein, 177 aa, Artificial Sequence
  Synthetic
KEEEDLEREVKRLEDKVREDAKKLEEVVKTVEKLVRDDARRRDHMVLHEYVNAAGITERKLDEETLRKVKEDLKRTLERLKRENEKSLEELRDILRRLKKENDDTLKELRDELKRLTDSGASEDVIRKMEEIIKRLEEVSREVEKRLRRIIRELERVSKEVLDRLREIIEKLDRDAT

SEQ ID NO: 1806 - protein, 174 aa, Artificial Sequence
  Synthetic
SEDETIRRIVRTVHEESRKSTEDVRREVERVLRESEEVVKKRDHMVLHEYVNAAGITISEELEERMRRIIREIREHLKDNLRRVREVIERIERKLEETERRDEKVLREIEKKIRDGDGREEVAREVTKIARDTIRENEEIAKEVREIVERSIKNLEEVAEEVERVVRELIEARR

SEQ ID NO: 1807 - protein, 174 aa, Artificial Sequence
  Synthetic
SRDEKIRDILRRVLKEVRDSTKKVEEDLEDVHRRTEEELRKRDHMVLHEYVNAAGITASEELKRRMEEVVRRIEELLKKLLKEDRDVVKEIRDKLDETRKEMEEVAERIKDKIRRGDGREKVAEEVKRIADRLIDLNRRIAEEVDKIVRDSIKKVEEIVTEVEKIVEKLIRDVR

SEQ ID NO: 1808 - protein, 179 aa, Artificial Sequence
  Synthetic
STREDARRLVERVRKEVKRLLKKNSDLLREVTERVKTLNERRDHMVLHEYVNAAGITDSDERDVERLLDRARKLVKESEDLIRKLLKDLRELVRRSEKDIDELRKELKRLLDELRARATDKDLERVVREIEKEIRDLIRELEENVKTSEKLIEDLIRELEKSVDESRKRVEELVKELRT

SEQ ID NO: 1809 - protein, 174 aa, Artificial Sequence
  Synthetic
SELEKVVKEVADLLRRNLEKSKRVLEEVRRRLEENLRESEKRDHMVLHEYVNAAGITREGKDKRDLTRLLEEDDKRVKEALDKSRENNERILKEVRRALRESEEDNRRILKEVREKVDSRLLEELEERVRESIERSRRFIEELEKIVEETLTESEKLARASSEITKTVLDEIRK

SEQ ID NO: 1810 - protein, 178 aa, Artificial Sequence
  Synthetic
DDLERVLKEIKKAADKIREDNKRTADKIRKRVKELDDETRDRDHMVLHEYVNAAGITRGREEARKVIEELKKLVDEVRKRNEKSIEELKKLLKEDRDLMRRVIEELEDLVRRLREEVRDDEALRRVEEEVERLIRDLRRVLKETSDRVRELIDKHRRLSEEVEKDVKRLIDELKKKTD

SEQ ID NO: 1811 - protein, 187 aa, Artificial Sequence
  Synthetic
DEEEELRKRLEKLSKEVRELLRRDEEEDRRLNRELEELLKDRDHMVLHEYVNAAGITRKARRKVSEEELTRLRKKLRDLEEESKEALRELRRRVEELNKENKKSLDDLERRLKELEDRAREVEKRDRREDELRELLRRLEDVIRKLAEDLKRNTEDLRRVIKELAERLEELNKRLKREIRRLKEELR

SEQ ID NO: 1812 - protein, 177 aa, Artificial Sequence
  Synthetic
SVLEEVRRRVEELLKTVKESVDRSHERSERLIEEVRESLKERDHMVLHEYVNAAGITIPEDRVKRIEDKLREELERLERENRKIEEDLKRSNDELRRENERIAERLEELLRELSRDTNDKVARDVLEEIERLIREANERNKRNLEDVERVIRELNKENERVLREVEKKIEKLIRETE

SEQ ID NO: 1813 - protein, 178 aa, Artificial Sequence
  Synthetic
SSIERVEKEVRRLLRESDESLKRVMEEAKELIKSVRESTKRRDHMVLHEYVNAAGITGDEREDLRRVLEELRKLIEDNRREDKRSEDELRKLIRDNKEENDRARREAEKLLEDLSRGRSEEEVERVLEEVRRIIEKLKEDDKRSLERIERIVRRNNELNKESVDRIRKIIKEMEERAD

SEQ ID NO: 1814 - protein, 183 aa, Artificial Sequence
  Synthetic
KDAEDLERRVRELVEENNRVSKRLAEEVTRLVKENEDKVRERDHMVLHEYVNAAGITRRGEVREEEVKRVLREIEELLREITEHSKEVLKTIEKLLRDSLEHSRRVLEEIERLLETILRKSKDSERLKKLVDELRETLERSLRENEKVADELRKRAEKSLEDVKRVVDELRKIVDDVLKRVED

SEQ ID NO: 1815 - protein, 183 aa, Artificial Sequence
  Synthetic
SEIEKLVEDVRKLVEDNLRHSEEVHRRNRRLIEENERKIDERDHMVLHEYVNAAGITERGEIREEEARKVLEEIKRLLDEIRRHSEEVLKEIERTLKENLKHSEEVLRRIEERLEDIKRKDKDSERVRTLVDRLREELKRSLDESEKLNRESRKRVTRSLEKVDDLVRELEKLARKVLEEVKT

SEQ ID NO: 1816 - protein, 177 aa, Artificial Sequence
  Synthetic
REIEELRKEIETLIRENEELNRRSKETSEELIRRLKKLNRDRDHMVLHEYVNAAGITAPEEDVRRAEERVKKLIEDNKRHSDEVAKTDKKLNEDSERHTRRVEERLRELLDRLSRSDKDEVVRRVAEEARRLSKRNKDAIREVNETSRRLATRDAKHTRDVLREIKRLADEIRERTR

SEQ ID NO: 1817 - protein, 181 aa, Artificial Sequence
  Synthetic
EEIERALREMRELSRTHKELVEKILRDIAELAKTHERINEDRDHMVLHEYVNAAGITRKEDKKEELKRKIDELRRRAEELLKESKEHLKRLEDTVRELIERLKETLKKVEEDLKRILEKLEKSRELDEIAKDVKRLIDENRELLKRVEDEVRRLIRKLEELNRRTEEEVKKLIKKLEDDLK

SEQ ID NO: 1818 - protein, 174 aa, Artificial Sequence
  Synthetic
SEIEELEKRIDELLKELRDLSRRIAEEVKRLLEELKKLSKDRDHMVLHEYVNAAGITVPEEELRRVEEEVERVVRESRKLNKETEDELRRLLEEIKESNDRVEKRARELKKLLRDGKDVEEVLRRLEKLVREDKERLKKVLKDARDLIKKDKDLNEKLSRELEKLVRELEERAR

SEQ ID NO: 1819 - protein, 174 aa, Artificial Sequence
  Synthetic
DELRDVKRELDRLLRENEEIVERIAETVRRLLEELKKLTKERDHMVLHEYVNAAGITVPEKELKEVADTLRKLLKDIERSNKEVEDRLRKLLEEIKESTDRLREELEEVEKLLRGGKDVETVLRRVRELSRDNKRRMRRVLEEAKRLAKEDKERIDKIRKEIEELIKRLKDKAT

SEQ ID NO: 1820 - protein, 174 aa, Artificial Sequence
  Synthetic
DEEEDLERRIKKLLDENRELLKRIAEELRRLLEELRRLTEERDHMVLHEYVNAAGITVPEKDLRDVAEKVKKVLKESEDSNRDVKRKLEKLLRDLERSTERLEREARKVRKLLRDGKDIETLLRELEKLSRDNKELLKKIEKEIRDLIKEDKERNRELSERLRKLVEELKKKAT

SEQ ID NO: 1821 - protein, 174 aa, Artificial Sequence
  Synthetic
REIEEAAKDLDRLLEENKKLVKEVEEELRRLLKENRDLVKERDHMVLHEYVNAAGITVPEEELKEVEERARRVIEESRRSSKELEKRLRELLEELRRSTKELEDRLREIKKLLRNGKDVEEVLRRVRKLSRENKEKIRKILEDVKKLSEDNKRRNEELSRRVKTLVDEIKKRAT

SEQ ID NO: 1822 - protein, 177 aa, Artificial Sequence
  Synthetic
SEAEKVVEELKKLLREVEKKIRDHTEDVKRILEELERRLRKRDHMVLHEYVNAAGITSDDDTVRKVKEELDRSHEKLREELRKVAKELKESNEELERDLKRLVEEAEDRLRRLKDRVSEKVLRELEKILEDIKRTLDKLLRENRETLKRIEDRLRELLEENRKLLEKIERELRERSR

SEQ ID NO: 1823 - protein, 182 aa, Artificial Sequence
  Synthetic
DEIETVLDEVRRLHEDAKRRLEEMIDEVRKLNEESVRELARRDHMVLHEYVNAAGITERAGLDKGKLEELEERLERVREDVERILREIKRRNEKTLEDSERILEENKERNRTVLKKLKELRDRGSDAREALKESRKVVEESRESVRRVLEKNRRVVEESKRLAEELLRRVKKVVDEIRKRVE

SEQ ID NO: 1824 - protein, 177 aa, Artificial Sequence
  Synthetic
DEVEDILRKVEEIVKKSITDARRLLKEAREIVEESIKTAEERDHMVLHEYVNAAGITKRTTDEEKKKKLEEESRRVLEKTKRDLDRTKDDNRKALEKIRKRVKETEEENREVVDRVRKAGVDKRVLEKIKKVVDDSVRVNREVLKRVEEVLEESKRVNEKVEEDVRRVHEEVRKEIK

SEQ ID NO: 1825 - protein, 175 aa, Artificial Sequence
  Synthetic
SEVDEVLREAKRIVDEVHKDNERATEESRRLVKKVHEENEERDHMVLHEYVNAAGITIDEKLVTEILKEIEEALKEAARRNKEVKDRLRELSRRVSERNREILEELKERLDRVRERRKDVKELEREVEKLLKRIEESLRRHRKENKRLLEELDRSLRELAKIVKEVLDEIRERTR

SEQ ID NO: 1826 - protein, 175 aa, Artificial Sequence
  Synthetic
SEMDDVLKKLAETVKRIIERLKKLTDDSRRLVEEVHRRNDKRDHMVLHEYVNAAGITIDEKDVRKLLEDLKKKSEEVAERNKRILDTLREISKRAEDEVRKVLKELEKTLKELEDRRPDVRELSEEVKKLLDEVRKALKRHKDENDKLLKEIEDSLRRHKEENDRLLEKLKESTR

SEQ ID NO: 1827 - protein, 186 aa, Artificial Sequence
  Synthetic
SEVDEVRKTLEDLLRRLDEENKDIIRRNKELLDDLDRKVRERDHMVLHEYVNAAGITEKLKDRETLTRIIEEIEKRARELIKRLRDEIRKIEEESKKSIEDSRKRNDEIRKRLEELIKDLRDKIKDSEELARRITELEKRVREVIERLKEKNKRLEDDSRRVITELRKKLKDLEDRVREEIEELRK

SEQ ID NO: 1828 - protein, 183 aa, Artificial Sequence
  Synthetic
SEVDEVLERIKRLLERLAEHSDKVVRDIEKLLDDNRKENERRDHMVLHEYVNAAGITRRGDLREELLERVVREVEKEIRDIKRKNKRSVETVEKLVRDDRKELKRALEDVERLIRELETRLKDKEELRRKLEKVLREAEKVIDELLKKTDEVLKRARETIEDLNRKLDKVLKEVRDKLDRLRD

SEQ ID NO: 1829 - protein, 185 aa, Artificial Sequence
  Synthetic
DDIERLKREIERLLKEAEKISRDNEERSKELLDRLRKLSEDRDHMVLHEYVNAAGITDKIKDKEELTRRLKEVVDRVEKSVRDSERMLREVVREDEESVRRSKTKLEDLLRKVEELVRRLEKKVTDEKVKRDAREALRKAKKKVDELKRKNDEVHRRSREEVKRLLEENRKLLEDLRRMVREITQ

SEQ ID NO: 1830 - protein, 184 aa, Artificial Sequence
  Synthetic
ELIKKARKDVEEVRERSERLVDELRKRNKKLADESRRLIDKRDHMVLHEYVNAAGITRKRRTKDVLKEIEDLVRELERELRRVVKESSDKVRKLIRENEKVVEESSRLFRDLVEKLRRVVEERNDKKLMEEVERLIKRLEDVNEKSERDVREINKESERVNEETEREVEDAIRKLREVLRRAKK

SEQ ID NO: 1831 - protein, 186 aa, Artificial Sequence
  Synthetic
KEVEDLERRVKEILDRMKRLIDENRKKIEKSIRELERLIDERDHMVLHEYVNAAGITREGGDDARTLRERVRKIIEDVEEHSRRSTEEVRRIHKENKEHSERSSDEIRELLRRVEELIEEVKRRLRDKEMEKKLEDIVRRVREVVRRAHETNERLVDRSRKAVEKAERTNRRLVEEIRKVAEEVRK

SEQ ID NO: 1832 - protein, 186 aa, Artificial Sequence
  Synthetic
KEVEDLERTVRTILKRMRELITRNEEEIRRSIEELKKLLKERDHMVLHEYVNAAGITKEGGDDKKRLVEEIKRLLDELRENSKRSSDRAKEIHERNKRHSEESSRTIEKLLKELRDLVRDVERKLRDEDAKRKLDELTKRVEKVVREADERNKRLTKRSKEVLDEVHRANEEALKEVEEVVRRVTK

SEQ ID NO: 1833 - protein, 176 aa, Artificial Sequence
  Synthetic
REAEEAKEEVEELNRRNKKELDDARRRVDELDKRNKDRLKERDHMVLHEYVNAAGITEEGRSDDRLREKIERMLKTSADELERLKEENKRALRDLAERLRELIERNRRKLEEITRRTVPDKDVLKRLAELIKESIRELERVLEELAEKIDRSLKELDDVLRKNETDLKRVIEDLKR

SEQ ID NO: 1834 - protein, 174 aa, Artificial Sequence
  Synthetic
SEEEVLREAAKTVEKLLDEIRRSLEKVSKRVEDSNRELKESRDHMVLHEYVNAAGITKNNVDRTLLEDVRRKLERIEERNEEMNDRSRRKLEELRERNRKILEDIRRTLEDLKRRQLPKDDVERTLREIAKLVDEVDKENKRALRENEERVKTLNRENEEMLKRIEEEVRRATK

SEQ ID NO: 1835 - protein, 182 aa, Artificial Sequence
  Synthetic
SELEKTLEDLKRHSEENKKKLEEDLRDMERNLKENKDRLKKRDHMVLHEYVNAAGITREGDIDERELERVRRKMEEIKKRLDENVERNRRKAEDIKRKLDENVKRSEDRVKEIKEDIRRRVRDKDKAEELERRLDELVKENREIHERVKKALDDIVKELEELHERLKRRLEEILRRIAETVR

SEQ ID NO: 1836 - protein, 186 aa, Artificial Sequence
  Synthetic
SEIEKLIEELRRELEKVKDELERSIEEMDRELDDVRRDSKRRDHMVLHEYVNAAGITKRGDRPEEVLRKELEDIKRKLRRILEEHHEKIRRIKEKLRRENKRVRDELKRIKDEIDEKVKDVRRKGADEELLKRLEEVAEDVKRALEELLKKHTRVVERVEKALDELDKELERIVREAEKELDRREK

SEQ ID NO: 1837 - protein, 179 aa, Artificial Sequence
  Synthetic
RLEDEVRKMEKEVREEVKRLEDESRKVLEESRRNLDKLREERDHMVLHEYVNAAGITRRGLDERVLRELLKRVREVHERNRKLLDEVRRASEKVHEDNRRILEEVRKTVKDVVDKLRRVDAKVVKELIDRVRKILEDVEREVKKSIEEVKEINRRLNEEVKKTIEEVKEIVKEVTERAK

SEQ ID NO: 1838 - protein, 183 aa, Artificial Sequence
  Synthetic
RVDERLDTVLKRVEETVRENKKKNDELLERSKENIDRLKKRRDHMVLHEYVNAAGITREVTKEEVKKIIDEVLKEIEDLLRTVKEELDRALERNREVVEETKRRIDRVLKEIEKLIRDVKRDRKEEVVKEVEERIKKLLKEVNDTSKDAERRLRETNERLNEIVKEVEKRIRELSEEVRKRVK

SEQ ID NO: 1839 - protein, 183 aa, Artificial Sequence
  Synthetic
SIEDEIRKLKEDIKRVLDKVRRDNERLKERLDKVLEDIRRSRDHMVLHEYVNAAGITDKPVDERLVRKVEEAVKRLKEHNEDSTRRVEEVIRRLKEESEESVRKTEKVARDLERELDEVLTRGGEERVREVIEKLKETLERLKREDKEVADRAEKLLREAEEHNKRSLDESRRVLEELDEEIR

SEQ ID NO: 1840 - protein, 172 aa, Artificial Sequence
  Synthetic
DEVEKVLEEIKRALDDLRKKVEESKREIKEALKAVEKHTRDRDHMVLHEYVNAAGITKSKDTERVRKLVEELSEENERSLREVRRVAEELLEINERVLEEVERVVEALLDLVRRGGSERVVEEVRRVLEELRRRLEKVTEDSRRAIERLAREDARVSKKSIDVNKKLDDDVR

SEQ ID NO: 1841 - protein, 174 aa, Artificial Sequence
  Synthetic
SESDEVIRDLARLLDELARHVDDSVRRMDEVVKRSTREADERDHMVLHEYVNAAGITGDERVERMVAEIERLVAEVLEELKKKYEKLKREVEENLRRLEETVRDIVEKARKVTEKGVSKEKIDRIIRELERILEEAKKKHEDVLRRLEDSLRRVAELLKAALDRLREIVDRLRR

SEQ ID NO: 1842 - protein, 174 aa, Artificial Sequence
  Synthetic
KEVEDAVKELEDLLRANEDKTRSIVEDMRASNKDLEDHSRARDHMVLHEYVNAAGITVPRDSLKRLAEDVERVTRESRELLERVHRADRELIERLKESNERLRRAIEEIRKAIKGGSDIKTLLDRVRKLAEEDAERLDRLRRESEELNERVRRVDKKLLEEIRRKAKKVEDDTR

SEQ ID NO: 1843 - protein, 184 aa, Artificial Sequence
  Synthetic
DEIRKVVKEITDLLKASNDKNRKVVEEIRDLLRKSKKLADERDHMVLHEYVNAAGITDKSGDKETAEDIVRRIIEELKRILKEIEDLARRINREIERLVEEVERDNRDVNRAIEELLKDIARRGGSEDLKRVEERAREVSRRNEESMRRVKEDADRVSEANKEVLDRVREEVKRLIEEVRETLR

SEQ ID NO: 1844 - protein, 176 aa, Artificial Sequence
  Synthetic
STAETVAEEVERVLKHSDDLIKEVEDVNRRVEEEIKRVIRERDHMVLHEYVNAAGITKGEILAEIEKRLADNSEKVREVAERAKKLLEENTARVKDILRESRKLVKDLLDEVRGTGSEEAAREIIKRLREVNKRTKEKLDELIKHSEEVLERVKRLIDELRKHSEEVLEDLRRRAK

SEQ ID NO: 1845 - protein, 186 aa, Artificial Sequence
  Synthetic
SRVEEIIEDLRRLLEEIRKENEDSIRRSKELLDRVKEINDTRDHMVLHEYVNAAGITREKGSESEEVKKALRAVLEELEKLLRRVAEINEEVLRRNSKLVEEDERRNREVLKELARLVEELIREIGDEDKARKVAEVAEKVLRDIDKLDRESKEAFRATNEEIAKLDEDTARVAERVKKAIEDLAK

SEQ ID NO: 1846 - protein, 186 aa, Artificial Sequence
  Synthetic
SEVDEIIKELERLLAEIARENERIIRESRKLADEVRKRNEDRDHMVLHEYVNAAGITRRKGSESEEVKKLIEDVLREIERLLKRIEEENREVVKRNSELVERVRAINEEILRRVAELVEKIARDIGDKDEVTKVKKVADDVLAEIKKLDDETRRVIEDTNKKIADLDKATRDVVRKVLEEVKKLEK

SEQ ID NO: 1847 - protein, 181 aa, Artificial Sequence
  Synthetic
SEVDDVLRRLEELIKTLEDINAKSLEDIKKLIDDLAKILEDRDHMVLHEYVNAAGITKGIDSREAEEIAKRVLEELKRTSDDLRKKVERVDEDLRRLLRENHERNKKILRDLERLLRDAARRGVPKEALDRMREEIRRLEEESRKSDETIERLIRELRRRVEEVLKTSTDLIRELEEEVKK

SEQ ID NO: 1848 - protein, 183 aa, Artificial Sequence
  Synthetic
SKLEEVEKAVRKVIEDSRRVNEEVNRRSEEVVRELEKVHRERDHMVLHEYVNAAGITKGSGDERLAAEVERIIEEIRELNERDRKRVEEIRKEIEDLNRDLNRRSKESEDRLRKLLEDATRGGVTKEADEVVERAERISEENKRRVEDVARKSKELVEDVRRHSEEVVRRVEELVKEVEERVR

SEQ ID NO: 1849 - protein, 173 aa, Artificial Sequence
  Synthetic
SAEEVKEELKRIATKLKEEIKENIRRLEESVEKIAKELAENRDHMVLHEYVNAAGITDERIVKTVEDIARRVVEDNERIMEEDKDVVRRLVERNEEIVRRVDETVKKIVELIDRGEPGEELVERLRRVVEEVRERLKDSSRELRKINEDSRKAVEDSSAEVAKVVEELERRDT

SEQ ID NO: 1850 - protein, 183 aa, Artificial Sequence
  Synthetic
SDVDRVLEEIRKLLEDLKRHSEKVSEENEDLLRANTELNKRRDHMVLHEYVNAAGITERGGISEEDLKRALDRVRKTVETVKEENKRSLEDVRRTVETNKRKLERVVEEIKKLIEDAKRRGSGDEEAKKKLDEVLERAKRTIDRLLETSDRSLEKVEADLRRLNEELDRSLERAERTIRELAK

SEQ ID NO: 1851 - protein, 180 aa, Artificial Sequence
  Synthetic
DEVEDVLRKIEKILDDHRKRIEKNSRDMARIIDEHRRKVEERDHMVLHEYVNAAGITDRGEGDEETAEDVKAKLEKSNRELEKHSEEVKRALDESNEDLRRHSEEVKERIERLVKKLREDGVEREEELKEVADRVKEKLDRLNRENEKSSEELKRELDKINDENRETSERLKREIDETTR

SEQ ID NO: 1852 - protein, 185 aa, Artificial Sequence
  Synthetic
SSVEELLERLRRISEENKRRIEKLLREVEKVLRELKDRHRKRDHMVLHEYVNAAGITKSGLPEEAVKRVLERVRERVKEVLEEADRLNDEMRRIVTEVEKELDKSDKEVEDAVRDILKKIEEGVRDRETAERARETLKRLLDENRDRSKKVKEEIRRILEDLTRTTERVKREIAKLLKELEDTAR

SEQ ID NO: 1853 - protein, 238 aa, Artificial Sequence
  Synthetic
EEDERLTKRVEEIKRENRELLRRLEEEVKELERKSEKIVRDRDHMVLHEYVNAAGITGSTELLVEELEKLIREILKLSEDHNRTLEEVVRKIEDVLRANLERLKELVDEILKALKERGKGDSEELKRKVEKVARDYERLLRKLREVVKRILDESKRLDEELEERLKEVLKKLEELIKRGGPDKDVLTELKRILDELLKLVEKLIRRNLRLLEELLRLVREILRTSNEILEEILKDARR

SEQ ID NO: 1854 - protein, 244 aa, Artificial Sequence
  Synthetic
SAEETLRRITEESKRVLEEITKKYEDLERESREVLRKLREDRDHMVLHEYVNAAGITDDKDEVLTVLEKVLDELLKLHRENLRVIKELLRKVLEVDRENLEVLKRLLEKARDLLRRSGRDEKDLKKLEDELRKVKEELEKKHEASKRDIEDLERELDKVTEEVERLLRKLKEELRRAAEGSDEDRERLARLLKALADKLIRVLEEILKINEELNRKIIKFARENLERNRRVNKKVIEVLREAAR

SEQ ID NO: 1855 - protein, 250 aa, Artificial Sequence
  Synthetic
STEEILKRVKEILDELAKELRDIIRESLRTIEELLDELRRIRDHMVLHEYVNAAGITDGVKDSEELLRRLKRLLEDLRRAHEELLKRLKEAVDEHRDRLRKILEELERVLKELRKRIEELRRSGDRISEKDVLRKLEEVLRKALEILERLLKKIRESARELLKIIEEVLDANIKVMEEALKTIKELLKDGPDEVKRRLEEKERRIRTRYEELRRRLRKRVKDYEDKLREIEKKVRRDAERIEEELERAKK

SEQ ID NO: 1856 - protein, 238 aa, Artificial Sequence
  Synthetic
SEAEKIREALETNLRLLEELIKRLKEILDTHNELLRRVIETRDHMVLHEYVNAAGITLDEEVLREVKRLVDELRKEARRVLDEHEKLVRKIKKEAEDVARESEEIIKEVEDKLKGLDREELLERVRRVLKKSDDLIAELVRRALKILEELTRLLAELLKKVVEILRRIVELVERVLTKKGAPKEDLERLRRKVEELEDRLRRLLEKLARDSAELMRELERILDRYARESEELDRRLAE

SEQ ID NO: 1857 - protein, 247 aa, Artificial Sequence
  Synthetic
SEAEDLEELIKELAELLKDVIRKLEKINRRLVKILEDIIRRRDHMVLHEYVNAAGITVEDKDILRDLERRLREILEESDRLLEELKRRLEEILRKSKELLRRLEEVLREILKRAEEVKRSNLPKEELIKEIVKLLEELLRVIEKILEDNIRLLEELVEVIKEILEKHLRLLEELVRVIERILREVGKDKDEAERRRRELKDKLDRLREEHEEVKRRLEEELTRLRETHKKIEKELREALKRVRDRST

SEQ ID NO: 1858 - protein, 240 aa, Artificial Sequence
  Synthetic
SDKEEIKRRVEKTARDLETEHDKIKKRLEDTVRDIKRELDERDHMVLHEYVNAAGITREGDGDATDLVDKLLETVKRLNEEVLRTVKKIADELRRLVEEVLRVLRESNETLARLLEEGNVGDEVRERLEEVLRRTEEIIKTLEEIVKRLLDELRRLVEELRRISKKLKDELDKIKEKGKDEKRLIEEVVRLLRENLDVVRRILEALAKLIKELLEALEEVLRRNKELIRELLRVLDEALK

SEQ ID NO: 1859 - protein, 238 aa, Artificial Sequence
  Synthetic
DADELLRRLAEEVERVIREAEDLLRRWKETIKKVLDDLKRLRDHMVLHEYVNAAGITKTKGDEELAKLIKDLLDTNEKVNRDLLRLIKKLLKDAERVNRRLLELIEELLEELKRVAKDLGLREEADKKLRDIADRARKELEDYERRLKELLKTVEDALRKAEEDSRKLKRDVEELLERGRLRKDDLEDILRKNLDRLRKLLERLREILRENLEALKKTLKRLEDVVREILEDLKRERK

SEQ ID NO: 1860 - protein, 236 aa, Artificial Sequence
  Synthetic
STREKAKKVLDTLRADNEDMKRVVEKILRALKRTNERAEKLRDHMVLHEYVNAAGITVSEEALKEIEDTLKRVLEEIKRLLDESKKLLEDVEREIREILKTSEELLERIEREIETVGSDEKTLAEILKRLLELNEEMNRRLLKILRDLLRLNEEVIRRLLAVLERLLDALKEALDRGDVPEDLLRKLEEELRRIKEKLRKALEELEREHRELEKELDKLHDESRKEHERIEEELRR

SEQ ID NO: 1861 - protein, 236 aa, Artificial Sequence; identical to SEQ ID NO: 1860
  Synthetic

SEQ ID NO: 1862 - protein, 239 aa, Artificial Sequence
  Synthetic
SERELIERWLELHKEILRLIRELVERLLKLHREILDTIKKLRDHMVLHEYVNAAGITLDKEAKDELREIAKRVEDKLEKLERESRKVEEDLKRKLKELTDESDTVEKRVRDVVRRGTQSREEIAEELLRLDRKLLKAVEELLKEILDLNKKLLDDVRAILEETRRVLEKLLDRVRRGERTDDERRTLTELLKRMEDILEKVERTLKKLLDDSARMAEEVKKTLKELLERSEKVAEDVRK

SEQ ID NO: 1863 - protein, 246 aa, Artificial Sequence
  Synthetic
KEIEETLKELEDLNREMVETNRRVLEETRRLNKETVDRVKARDHMVLHEYVNAAGITRKGPTSEELKRLLAELEELLARVVRRVEELLKKSTDLLERAVKDSADALRRSHEVLKEVASRVKRAKDEGLPREEVLRLLRELLERHAKVLKDIVRVSEKLLREHLKVLREIVEVLEELLERILKVILDTTGGDKAVEELEKALEEIKRRLKEVIDRYEDELRKLRKEYKEKIDKYERKLEEIERRERT

SEQ ID NO: 1864 - protein, 231 aa, Artificial Sequence
  Synthetic
SKEEEVEKVLRKWEEILRRLIEENKRANDKIRREYEELVKERDHMVLHEYVNAAGITVSEEVKRILEKLIKLLEDILEYEKENVERLIELNERILRELKKSVEELKALVTRVRRDGLPESEVRKLVEDVLRKNEELLKEAKKAWRDSIENLKRVLEEVAKLVKTVLREIEEKIDDEDVVRALIEVIERLLRVAEEVIRRILKVNTELMRVDERSIRESLKAISEVLKVLDT

SEQ ID NO: 1865 - protein, 231 aa, Artificial Sequence
  Synthetic
SKDEELARLLEELVERWRKIVEDLERDHRRLVKEIRELVERRDHMVLHEYVNAAGITIDERIVRLIEEIAKIIEEVLKEIVKLVERAVRENVRVLRESVRLVAELVETLARLLRGSDERVTEAIKKVLDTSEDLIRRVIKVNEDILREIAKLVEEVLREAERILTEIKKEGDREEIRRILEELKRIVDDVLRIIARILKLLRDLTRRLAEVAKAVHKLLEELLRKLKEDTR

SEQ ID NO: 1866 - protein, 237 aa, Artificial Sequence
  Synthetic
KEKEDALKKLEDLARKSREDLERVLRKHKKILDKIEELLKRRDHMVLHEYVNAAGITGTESEILKELARLLREHHEALRRLIEELRRLLEEHHKILEDLAREHKRLLDELIKVVADGVDKDELERIIKELRERDKKLVDDLRKVSEDLLDAVRKLVEDLERISRELLRRVEELAKGIDEELAREVERVIKELLDKSKEILERIERAIDELLKVSEEILKLSEDASEELLKILREFAK

SEQ ID NO: 1867 - protein, 237 aa, Artificial Sequence; identical to SEQ ID NO: 1866
  Synthetic

SEQ ID NO: 1868 - protein, 229 aa, Artificial Sequence
  Synthetic
SKEERLREVAEKHKKDLEDIVKRVDEAAKETARRLEEILKRRDHMVLHEYVNAAGITDDEKLKKVKKILKDIMDRLAELIKKILKLLKENLEKIKELLRRNLEISEELLKLAKGLSDRDVLETVRRVLEKLDEEWDRVLEDSRRIIETILRELDTLLREVEKLIKEIKDEISGSKEVLDILERAVEVVRRVIKALKEVLERHVDATREVIERVKRVNKRLLEAVREVVT

SEQ ID NO: 1869 - protein, 241 aa, Artificial Sequence
  Synthetic
SEKELLKEILDRIRELLEDDNRLLKRIVDEIRKLLEEWLRVRDHMVLHEYVNAAGITAPEDVIRELTRALKETEEDVDRVIRTLEKLLKEVLDAHEEVVRKLDRLLKEVERLVEGGDAEEVVRDLLRVVKEILDESKAVIDELARVVDEILKLLEEVDRKLAKVVKEILEDVLRGSGDDEDAVRKIAKIIEELKRLLEDLARDTRRVIEEAKRLLKEWRDRNKEVADTLKKLLEDLIRKIR

SEQ ID NO: 1870 - protein, 246 aa, Artificial Sequence
  Synthetic
SEREELLERIKEILKRVKDKLDEDLKRLKEILEKLKEKADRRDHMVLHEYVNAAGITERTGRTDELVKEVLDTVRRNLENLKRLVEDILRKLEENVKNLTDLVREILKLITELIKRLEDGGLPKEVLDALRRVLEKLEELLREILERLKRSLEAVKRKIEELLKELERSLDELRRALERIRKEIGDSETAVRAIIRVLEKHLEAVRRVLEELLKVLAEHLETVRELIERLKRVLEEAIEVVERVAR

SEQ ID NO: 1871 - protein, 240 aa, Artificial Sequence
  Synthetic
DREKSVRDIEEDLKRVLDKLRRRVETSKEELKKVLKADKENRDHMVLHEYVNAAGITRGIDSEVLRAVREIVKRLVEVVRRYNELSEKIIRDLVRVNDRVLELLKRIVKRLIDVVRELEKIGDKEKALRRLEEVVKEVKRRIEELLKELEDVHRELVKILEEVNEDLKRVATEVKEIIKTGIKSSEVAKELDEVIKRLLDNLKENTDRLKEVIDRNLADLRDLAEELRAVIERLLEDARR

SEQ ID NO: 1872 - protein, 241 aa, Artificial Sequence
  Synthetic
SAEEAVEKLVRIARAIVKINEDLSREVVRILREIVRLNEETRDHMVLHEYVNAAGITDGGLSEDVVRKLRKLVKELEDLLKKSNDDIRKLVEDVARRLKESNDEIRRLVERLEELLKRGPGDEELLRLVEELTEELLRTHEEVVKALEKLTADLLELHRELLERVRRLTKRIEEELKRVGVSEELLRRLEELRKRLEKVLDDSAKELEKLKRELERLLEESRRKLEKLKRDLERVLEETRR

SEQ ID NO: 1873 - protein, 237 aa, Artificial Sequence
  Synthetic
REDEVLRDIERLLREIEEKIRRILEESTAELRKVEEEVKRIRDHMVLHEYVNAAGITRKGIDEELRKLLDEVLDKLTKLIERNKRSLERILELIKRIIDENLEVLRDIIRLLEELLKATKDNGVPKDEVIKLVEDVVRRIEELVTRVVARNEKLVKDLDDLAKKNVRENEELLREIDRGLDEDLLEKIKRVIREHIKALEKLARDLKEILRRHIEALKELARDLAEVIRKLLEDVKR

SEQ ID NO: 1874 - protein, 237 aa, Artificial Sequence; identical to SEQ ID NO: 1873
  Synthetic

SEQ ID NO: 1875 - protein, 243 aa, Artificial Sequence
  Synthetic
SEAERLADEVRKAVKKSEEDNETLVREVEKAVRELKKNNKTRDHMVLHEYVNAAGITRDGQVSDRDLLKELEEVLRRVLEALAENHERTEEILKRWLDRYAEDIERLRKVLKEVIEALKRGGSDDKRIVDELEEILRRNEDVLDKIAKRLRRLLEEDRRLLERIVRELKRLLDDLDRITKEGKSEELVRIAIEVLKRLLEIIEELVRLNNEILERLLKIVRELHKDNIKILEDLLRIIEEVLR

SEQ ID NO: 1876 - protein, 243 aa, Artificial Sequence; identical to SEQ ID NO: 1875
  Synthetic

SEQ ID NO: 1877 - protein, 245 aa, Artificial Sequence
  Synthetic
SEKDEVTRRIRELLKEAEETNREAIERIKRLLDRVREAVEERDHMVLHEYVNAAGITDRGLQDDEALLKLLIDALREHNRLSTELIKILIDVLRTILKIIKDVLATNIEIARRILDLVRRLAERGGLDDRLVKEVEKLVRTAERLHRDALRKVKRLVEELEKRLRELVKTDHDLVRRLETLLRRGSGSKEDLLREIARILAESLRLIRELLKEIEKIVKEIIELLERLNDELRKIIEAILETTKK

SEQ ID NO: 1878 - protein, 245 aa, Artificial Sequence; identical to SEQ ID NO: 1877
  Synthetic

SEQ ID NO: 1879 - protein, 249 aa, Artificial Sequence
  Synthetic
DAEEVVKRLADVLRENDETIRKVVEDLVRIAEENDRLWKKLRDHMVLHEYVNAAGITRGGVPEELLDRLAKVVKSIVEKAEKILERLNRVSKAIAEKLKTIVDELNEVSKEIVKRAEDILRKGKDKETVLRALRTLVKEYADLSKEVLERVERIVREYVKLSDEVVKSLAEIVEELIRIIEDLLRKGNLDEDVKRALEELVSRLRKLLEDVKKASEDIVREVERIVRELAKRSDEILKKLEDIVEKLRE

SEQ ID NO: 1880 - protein, 240 aa, Artificial Sequence
  Synthetic
DKDKRLEELLKRLKELNDKTFEELERILEELKRANEASLRERDHMVLHEYVNAAGITLDKRLAELLKKLLDDLKRLLEEYTRTNEELLKRLRELLERYRETNKKLLDLLRKLLDEARRTGTDEDLLRRLEDILRKYEDEVRRLLKELEDILREYEDTSRRLLEELERIAKEAAERVSRGSDKDVKDIIRTILEVARDLLRLLEEDSRTNSEVVKRLLDLLREDSKANSEVVKRLLDVLRE

SEQ ID NO: 1881 - protein, 240 aa, Artificial Sequence
  Synthetic
SKEETLKRLLDELEKRNRETVERLERLLKELEDRNRASLEERDHMVLHEYVNAAGITLSKELKDTLARILEELRKLLEEYFRKNEELLRLLRKLLDEYARTNEELLRLLEELLDTARRTGGDSELLKRLEDIAREYEKRVRRLLEKLKDILDKYRKTVEELVRKMEEILKEAKKTISRIGSEEVKDIVRAMEEVIRRLIEILRRDVELNLDVAKKLLELLKEDSKLNLDVARELLELLDR

SEQ ID NO: 1882 - protein, 243 aa, Artificial Sequence
  Synthetic
SEAERTKESLKKVLKALVDLNRELLRKLEENMRELTKLNEERDHMVLHEYVNAAGITIVDKDAEREAERLMRELDKSSEDTARETRKLIEESKKSTRRTEEEARKLTETLDRLAKGGLPREDLLRALVRLLEELARLIEEDVRRNAELVKRHIELVERDVAELLRLIKELVDLLADLAEKGSRTEEIRKIVEEILKEIKELADRYREEVRKSKDKLRSILEDYKRKVDELKERLRELIEEVET

SEQ ID NO: 1883 - protein, 243 aa, Artificial Sequence; identical to SEQ ID NO: 1882
  Synthetic

SEQ ID NO: 1884 - protein, 182 aa, Artificial Sequence
  Synthetic
DEAEKLLKELRDLLEESRKDLERLLKELEDLLEESKRDLERLRDHMVLHEYVNAAGITRRNEREKLEKLLRELKKVVERLKDNLKDNERRNKEAIERVRKKLKDNERENKKVIEDLRAKLKDLEEVKRKIDRLEEESRRVIEEARKRLEEVEEKSKKIIDDARRALDRIDKELRRVVEETRK

SEQ ID NO: 1885 - protein, 182 aa, Artificial Sequence
  Synthetic
RVEDALRKLLDDVRRLVEEAERRLRTSNDKSRRLVEEAKRRLRDHMVLHEYVNAAGITRIRDEDVKRVLEELLKRDHDVVRRVLERIDEMLERNSRLVKRVLEDIRRLLKRVREVVERIKRVRSKVVEEVLKELEELIKTAKKIIEDVLRASEDTIRRLEEIIRKVEEDSKRIIEEIERAAR

SEQ ID NO: 1886 - protein, 181 aa, Artificial Sequence
  Synthetic
SEVERVLEDLRRLVRDVEEKLRRIIERDRRLVEEVERENRKTRDHMVLHEYVNAAGITDISDKKTIERIVREIIKEARDLVRRNHERNREIVDESRRLVEELRRIVEEIIRRLRELLERVKSGELAERIEDVVREAEKRLRELLKELEKTSRDLKKRLEELDRELKALVEKVERDLEELRK

SEQ ID NO: 1887 - protein, 174 aa, Artificial Sequence
  Synthetic
SRDEKIRDILRRVLKEVRDSTKKVEEDLEDVHRRTEEELRKVRDHMVLHEYVNAAGITSEELKRRMEEVVRRIEELLKKLLKEDRDVVKEIRDKLDETRKEMEEVAERIKDKIRRGDGREKVAEEVKRIADRLIDLNRRIAEEVDKIVRDSIKKVEEIVTEVEKIVEKLIRDVR

SEQ ID NO: 1888 - protein, 174 aa, Artificial Sequence
  Synthetic
SELEKVVKEVADLLRRNLEKSKRVLEEVRRRLEENLRESEKVRDHMVLHEYVNAAGITEGKDKRDLTRLLEEDDKRVKEALDKSRENNERILKEVRRALRESEEDNRRILKEVREKVDSRLLEELEERVRESIERSRRFIEELEKIVEETLTESEKLARASSEITKTVLDEIRK

SEQ ID NO: 1889 - protein, 178 aa, Artificial Sequence
  Synthetic
DDLERVLKEIKKAADKIREDNKRTADKIRKRVKELDDETRDMRDHMVLHEYVNAAGITGREEARKVIEELKKLVDEVRKRNEKSIEELKKLLKEDRDLMRRVIEELEDLVRRLREEVRDDEALRRVEEEVERLIRDLRRVLKETSDRVRELIDKHRRLSEEVEKDVKRLIDELKKKTD

SEQ ID NO: 1890 - protein, 187 aa, Artificial Sequence
  Synthetic
DEEEELRKRLEKLSKEVRELLRRDEEEDRRLNRELEELLKDHRDHMVLHEYVNAAGITKARRKVSEEELTRLRKKLRDLEEESKEALRELRRRVEELNKENKKSLDDLERRLKELEDRAREVEKRDRREDELRELLRRLEDVIRKLAEDLKRNTEDLRRVIKELAERLEELNKRLKREIRRLKEELR

SEQ ID NO: 1891 - protein, 175 aa, Artificial Sequence
  Synthetic
SEEDELRRLLKEVNERVERLLDEIRKELEKIAEELRDLLKKNRDHMVLHEYVNAAGITDEEIKKDAERALTELKEEHERLDREAKKDLDRIRKELERLEEEHRRVSERIEEVLDKESDKTEDIAREIRELMERTRRVIEEIKKELRDILEKLRRVSEELNKKLDEILKRIEDRTR

SEQ ID NO: 1892 - protein, 171 aa, Artificial Sequence
  Synthetic
SEKEKVIKEARELLERLRKRLKDVNDDVTRLLDELRKENEKSRDHMVLHEYVNAAGITVEDVIRELKRRLEEVDKKNRDILETLKRELDEVSRRTREELEKLRKELEEVEKAGLPAEELKRVADRLRRRLERLVEENERVVKKILDEIRRSVEENKRIVDKVRKDLDERRK

SEQ ID NO: 1893 - protein, 177 aa, Artificial Sequence
  Synthetic
SAIEKVKEVVERVLETVRDSVRRSHEESKRLIDKVRKRLEEVRDHMVLHEYVNAAGITPERMVEKLERDLEELLKEIKDTIDRIEEELRTSNRRLKETNDEIAKRLEELLRELSRDRDKDAVEDVLRRIEELIRDLNKKNDDNVRRVKEVIDRAEKLVRDLLREIRKLIEKLIRDTE

SEQ ID NO: 1894 - protein, 183 aa, Artificial Sequence
  Synthetic
SEIEKLVEDVRKLVEDNLRHSEEVHRRNRRLIEENERKIDELRDHMVLHEYVNAAGITRGEIREEEARKVLEEIKRLLDEIRRHSEEVLKEIERTLKENLKHSEEVLRRIEERLEDIKRKDKDSERVRTLVDRLREELKRSLDESEKLNRESRKRVTRSLEKVDDLVRELEKLARKVLEEVKT

SEQ ID NO: 1895 - protein, 174 aa, Artificial Sequence
  Synthetic
DELRDVKRELDRLLRENEEIVERIAETVRRLLEELKKLTKELRDHMVLHEYVNAAGITPEKELKEVADTLRKLLKDIERSNKEVEDRLRKLLEEIKESTDRLREELEEVEKLLRGGKDVETVLRRVRELSRDNKRRMRRVLEEAKRLAKEDKERIDKIRKEIEELIKRLKDKAT

SEQ ID NO: 1896 - protein, 174 aa, Artificial Sequence
  Synthetic
DEEEDLERRIKKLLDENRELLKRIAEELRRLLEELRRLTEESRDHMVLHEYVNAAGITPEKDLRDVAEKVKKVLKESEDSNRDVKRKLEKLLRDLERSTERLEREARKVRKLLRDGKDIETLLRELEKLSRDNKELLKKIEKEIRDLIKEDKERNRELSERLRKLVEELKKKAT

SEQ ID NO: 1897 - protein, 177 aa, Artificial Sequence
  Synthetic
SEAEKVVEELKKLLREVEKKIRDHTEDVKRILEELERRLRKHRDHMVLHEYVNAAGITDDDTVRKVKEELDRSHEKLREELRKVAKELKESNEELERDLKRLVEEAEDRLRRLKDRVSEKVLRELEKILEDIKRTLDKLLRENRETLKRIEDRLRELLEENRKLLEKIERELRERSR

SEQ ID NO: 1898 - protein, 182 aa, Artificial Sequence
  Synthetic
DEIETVLDEVRRLHEDAKRRLEEMIDEVRKLNEESVRELARVRDHMVLHEYVNAAGITRAGLDKGKLEELEERLERVREDVERILREIKRRNEKTLEDSERILEENKERNRTVLKKLKELRDRGSDAREALKESRKVVEESRESVRRVLEKNRRVVEESKRLAEELLRRVKKVVDEIRKRVE

SEQ ID NO: 1899 - protein, 174 aa, Artificial Sequence
  Synthetic
EELERILDKVRKVIEEVRKRLRDDLRTVEKVLKETEEVLRRARDHMVLHEYVNAAGITRGRDRREIKEELKKVLDDLRELLRALEEKNRRVNKENEDSLRKIEEDLRDVLRKLEEEIKGREVLRKVRELLRTIREEVERVLRKSNELSTRIKKRIDDVLETLERLLKELDDKLR

SEQ ID NO: 1900 - protein, 178 aa, Artificial Sequence
  Synthetic
SSKDEIRRRVEEVVERSDEIVKRSREHVKTVVDELDRVVKELRDHMVLHEYVNAAGITDGGSEETLKRVLDELREILKELKEEVKKVKRKLEKVVKENRDTIREVEERNRKILDELRKRGVEERALREVEEISRKSEEKLRRVLKESEDIAKEAEDRLKTVLERVERIADEVLKRLTK

SEQ ID NO: 1901 - protein, 182 aa, Artificial Sequence
  Synthetic
SDADRVAEELKKLVEDSRRENERVIEESKRLVKENEDRNRELRDHMVLHEYVNAAGITKEKDKKTLDDIVREILERLKRLLEKVEDENRKSHEENKRLLEDVKRKNKRISDELKRLLEEIERRNVDVDKVRETVKRLLEENKRVMEKTEEVAKKSSEDIKRVADETRRRAEELLKEVDELRK

SEQ ID NO: 1902 - protein, 175 aa, Artificial Sequence
  Synthetic
SEVDEVLREAKRIVDEVHKDNERATEESRRLVKKVHEENEEMRDHMVLHEYVNAAGITDEKLVTEILKEIEEALKEAARRNKEVKDRLRELSRRVSERNREILEELKERLDRVRERRKDVKELEREVEKLLKRIEESLRRHRKENKRLLEELDRSLRELAKIVKEVLDEIRERTR

SEQ ID NO: 1903 - protein, 175 aa, Artificial Sequence
  Synthetic
SEMDDVLKKLAETVKRIIERLKKLTDDSRRLVEEVHRRNDKLRDHMVLHEYVNAAGITDEKDVRKLLEDLKKKSEEVAERNKRILDTLREISKRAEDEVRKVLKELEKTLKELEDRRPDVRELSEEVKKLLDEVRKALKRHKDENDKLLKEIEDSLRRHKEENDRLLEKLKESTR

SEQ ID NO: 1904 - protein, 186 aa, Artificial Sequence
  Synthetic
SEVDEVRKTLEDLLRRLDEENKDIIRRNKELLDDLDRKVREARDHMVLHEYVNAAGITKLKDRETLTRIIEEIEKRARELIKRLRDEIRKIEEESKKSIEDSRKRNDEIRKRLEELIKDLRDKIKDSEELARRITELEKRVREVIERLKEKNKRLEDDSRRVITELRKKLKDLEDRVREEIEELRK

SEQ ID NO: 1905 - protein, 183 aa, Artificial Sequence
  Synthetic
SEVDEVLERIKRLLERLAEHSDKVVRDIEKLLDDNRKENERLRDHMVLHEYVNAAGITRGDLREELLERVVREVEKEIRDIKRKNKRSVETVEKLVRDDRKELKRALEDVERLIRELETRLKDKEELRRKLEKVLREAEKVIDELLKKTDEVLKRARETIEDLNRKLDKVLKEVRDKLDRLRD

SEQ ID NO: 1906 - protein, 184 aa, Artificial Sequence
  Synthetic
ELIKKARKDVEEVRERSERLVDELRKRNKKLADESRRLIDKLRDHMVLHEYVNAAGITKRRTKDVLKEIEDLVRELERELRRVVKESSDKVRKLIRENEKVVEESSRLFRDLVEKLRRVVEERNDKKLMEEVERLIKRLEDVNEKSERDVREINKESERVNEETEREVEDAIRKLREVLRRAKK

SEQ ID NO: 1907 - protein, 182 aa, Artificial Sequence
  Synthetic
SELEKTLEDLKRHSEENKKKLEEDLRDMERNLKENKDRLKKIRDHMVLHEYVNAAGITEGDIDERELERVRRKMEEIKKRLDENVERNRRKAEDIKRKLDENVKRSEDRVKEIKEDIRRRVRDKDKAEELERRLDELVKENREIHERVKKALDDIVKELEELHERLKRRLEEILRRIAETVR

SEQ ID NO: 1908 - protein, 186 aa, Artificial Sequence
  Synthetic
SEIEKLIEELRRELEKVKDELERSIEEMDRELDDVRRDSKRLRDHMVLHEYVNAAGITRGDRPEEVLRKELEDIKRKLRRILEEHHEKIRRIKEKLRRENKRVRDELKRIKDEIDEKVKDVRRKGADEELLKRLEEVAEDVKRALEELLKKHTRVVERVEKALDELDKELERIVREAEKELDRREK

SEQ ID NO: 1909 - protein, 178 aa, Artificial Sequence
  Synthetic
DREREVKKRLDEVRERIERLLRRVEEESRRVAEEIRRLIEEVRDHMVLHEYVNAAGITGLKDKEEVRRVLERLRKLNAESDELLERILERLRRLVEATNRLVKAIIEELRRLVEKIVREVPDSEELREELKKLERKIEKVAKEIHDHDKEVTERLEDLLRRITEHARKSDREIEETAR

SEQ ID NO: 1910 - protein, 172 aa, Artificial Sequence
  Synthetic
SRAETVLKEVTDKIKKLADSSDELLRRNKENIDELKKSSEELRDHMVLHEYVNAAGITDEETLEELIRRVEAELEAHHRELEKNSREDEKRNRDHHAKLEEEMRRVEERLEREGIDDEVVKRVRDLLDTVRRRNEKVNEDVKRMNDKLRRDNEDVIRRVEKLLRELEEKRRT

SEQ ID NO: 1911 - protein, 188 aa, Artificial Sequence
  Synthetic
SEIEKILKEIEDLARRDEEVSKKIVEDIRRLAKEVEDTSRDIRDHMVLHEYVNAAGITKDGSKEELEKEVREVVKTLEELVKDNHRLIRRAVEEMKRLVEENHRHSREVVKELEDLVRELRKGSGSEDSERLVREVEDLVRRLVRRSEKSNEEVKRTVEELVRRMEESNDRVRDLVRRLVEELKRAVD

SEQ ID NO: 1912 - protein, 178 aa, Artificial Sequence
  Synthetic
SEAEKAKETIDRLADRVRKLLEEIKRSLDDSRRKSKETVEENRDHMVLHEYVNAAGITGSVSEEELERLIRKLKKTLDELRRRHEKLVEDLRRNLERIKRRLEELTREMRETLERLAREGLDEEVLRTLEEIIRRLTKELEDVLREYERELRRLEEENKRVIDKTEEEIRRLADRLRR

SEQ ID NO: 1913 - protein, 179 aa, Artificial Sequence
  Synthetic
SEVEELIKRLAKVLKELVDKVRKVIEDTKELLERLKRRSEDHRDHMVLHEYVNAAGITDDEELKEILDRLRKTLEELEEELKKALEDDREEAKRLVDDARRVLKELEEEVREIRERRGESEELDRRIEKVLKEIEEKIREVIKEWERVHREVEELLKRLIDENRKVLDEIRKLLEEKSK

SEQ ID NO: 1914 - protein, 184 aa, Artificial Sequence
  Synthetic
DEIRKVVKEITDLLKASNDKNRKVVEEIRDLLRKSKKLADELRDHMVLHEYVNAAGITKSGDKETAEDIVRRIIEELKRILKEIEDLARRINREIERLVEEVERDNRDVNRAIEELLKDIARRGGSEDLKRVEERAREVSRRNEESMRRVKEDADRVSEANKEVLDRVREEVKRLIEEVRETLR

SEQ ID NO: 1915 - protein, 184 aa, Artificial Sequence; identical to SEQ ID NO: 1914
  Synthetic

SEQ ID NO: 1916 - protein, 176 aa, Artificial Sequence
  Synthetic
STAETVEKKVEEVIRENEKSMRESEEKVDRSTKRIEDVLRRLRDHMVLHEYVNAAGITGERVKEVLEENRRLLEEAKKLVDEVLETNKKLLEDDKRLNEEVSKTLKKLLEEIKSVDTREDATRVIEEAKRILDEARKLNEETIRRSEELVRRIERVIEEIIKRSEKLLEDVARESK

SEQ ID NO: 1917 - protein, 186 aa, Artificial Sequence
  Synthetic
SRVEEIIEDLRRLLEEIRKENEDSIRRSKELLDRVKEINDTIRDHMVLHEYVNAAGITEKGSESEEVKKALRAVLEELEKLLRRVAEINEEVLRRNSKLVEEDERRNREVLKELARLVEELIREIGDEDKARKVAEVAEKVLRDIDKLDRESKEAFRATNEEIAKLDEDTARVAERVKKAIEDLAK

SEQ ID NO: 1918 - protein, 180 aa, Artificial Sequence
  Synthetic
REVEEMIKELEELLKDLKEKNERASKRNRELVRRLEEENKRVRDHMVLHEYVNAAGITSGEDEEVLREVLKRLEEVLERVRALNERVLEAIEKSLEEVKASNEAVKRRLKELLEEAERGVDSEKLKELRDVIAEVAKRIDELDEYTRESIRRAKKEIERLNRETKKVIEEVVKRIEEERK

SEQ ID NO: 1919 - protein, 181 aa, Artificial Sequence
  Synthetic
DAVEEAEKLIRKVIADSEKLLRDLADLNAKSIRRSEKLVEDDRDHMVLHEYVNAAGITNGGSEEELRALLKEVEDTNRASHETNKRLLDEDRALNKEVHDRNEKLLRDIKRLVEEVAKGIDSEELLRRIKKLLDEIKKAIEDSSREIKRLLEESERVMKRSSEDIKRTLDDTRRVVEEVRR

SEQ ID NO: 1920 - protein, 181 aa, Artificial Sequence
  Synthetic
SEVDDVLRRLEELIKTLEDINAKSLEDIKKLIDDLAKILEDARDHMVLHEYVNAAGITGIDSREAEEIAKRVLEELKRTSDDLRKKVERVDEDLRRLLRENHERNKKILRDLERLLRDAARRGVPKEALDRMREEIRRLEEESRKSDETIERLIRELRRRVEEVLKTSTDLIRELEEEVKK

SEQ ID NO: 1921 - protein, 175 aa, Artificial Sequence
  Synthetic
SEIERVKKRLEELLAEVEESTRRLEERLKRLLEEAKRSSEEVRDHMVLHEYVNAAGITRDEKLVSELEARVKELLEDSRASLEELKKRVRKLAEDSARLLEEVKREVEKLKAKLDRGGDADDVLARVEELAKRAHDENERLIREVEELVRAHNKRNKELVDEVKRLVEKVIEEER

SEQ ID NO: 1922 - protein, 183 aa, Artificial Sequence
  Synthetic
SDVDRVLEEIRKLLEDLKRHSEKVSEENEDLLRANTELNKRVRDHMVLHEYVNAAGITRGGISEEDLKRALDRVRKTVETVKEENKRSLEDVRRTVETNKRKLERVVEEIKKLIEDAKRRGSGDEEAKKKLDEVLERAKRTIDRLLETSDRSLEKVEADLRRLNEELDRSLERAERTIRELAK

SEQ ID NO: 1923 - protein, 180 aa, Artificial Sequence
  Synthetic
DEVEDVLRKIEKILDDHRKRIEKNSRDMARIIDEHRRKVEENRDHMVLHEYVNAAGITRGEGDEETAEDVKAKLEKSNRELEKHSEEVKRALDESNEDLRRHSEEVKERIERLVKKLREDGVEREEELKEVADRVKEKLDRLNRENEKSSEELKRELDKINDENRETSERLKREIDETTR

SEQ ID NO: 1924 - protein, 238 aa, Artificial Sequence
  Synthetic
EEDERLTKRVEEIKRENRELLRRLEEEVKELERKSEKIVRDLRDHMVLHEYVNAAGITSTELLVEELEKLIREILKLSEDHNRTLEEVVRKIEDVLRANLERLKELVDEILKALKERGKGDSEELKRKVEKVARDYERLLRKLREVVKRILDESKRLDEELEERLKEVLKKLEELIKRGGPDKDVLTELKRILDELLKLVEKLIRRNLRLLEELLRLVREILRTSNEILEEILKDARR

SEQ ID NO: 1925 - protein, 238 aa, Artificial Sequence; identical to SEQ ID NO: 1924
  Synthetic

SEQ ID NO: 1926 - protein, 240 aa, Artificial Sequence
  Synthetic
SDKEEIKRRVEKTARDLETEHDKIKKRLEDTVRDIKRELDELRDHMVLHEYVNAAGITEGDGDATDLVDKLLETVKRLNEEVLRTVKKIADELRRLVEEVLRVLRESNETLARLLEEGNVGDEVRERLEEVLRRTEEIIKTLEEIVKRLLDELRRLVEELRRISKKLKDELDKIKEKGKDEKRLIEEVVRLLRENLDVVRRILEALAKLIKELLEALEEVLRRNKELIRELLRVLDEALK

SEQ ID NO: 1927 - protein, 240 aa, Artificial Sequence; identical to SEQ ID NO: 1926
  Synthetic

SEQ ID NO: 1928 - protein, 248 aa, Artificial Sequence
  Synthetic
DEDRIIEEIARLLEELLRELLELIKKLIETNRRLNEEHERAVRDHMVLHEYVNAAGITKGISDEKLKRIRERLKRALDDLERLHREINKRLEDLVRELEKLVREILKELKDALEELRRASARAGGEEVLRRLEEIVKKLLDLVRRILERLKEIHKDNVRLLRELNERLTRIVEDLVRLIREILREAGVDEKIAEEIERELEELRRMIKRLHEDLERKLKESEDELREIEARLEEKIRRLEEKLERKRR

SEQ ID NO: 1929 - protein, 248 aa, Artificial Sequence; identical to SEQ ID NO: 1928
  Synthetic

SEQ ID NO: 1930 - protein, 246 aa, Artificial Sequence
  Synthetic
KEIEETLKELEDLNREMVETNRRVLEETRRLNKETVDRVKATRDHMVLHEYVNAAGITKGPTSEELKRLLAELEELLARVVRRVEELLKKSTDLLERAVKDSADALRRSHEVLKEVASRVKRAKDEGLPREEVLRLLRELLERHAKVLKDIVRVSEKLLREHLKVLREIVEVLEELLERILKVILDTTGGDKAVEELEKALEEIKRRLKEVIDRYEDELRKLRKEYKEKIDKYERKLEEIERRERT

SEQ ID NO: 1931 - protein, 231 aa, Artificial Sequence
  Synthetic
SKEEEVEKVLRKWEEILRRLIEENKRANDKIRREYEELVKEIRDHMVLHEYVNAAGITSEEVKRILEKLIKLLEDILEYEKENVERLIELNERILRELKKSVEELKALVTRVRRDGLPESEVRKLVEDVLRKNEELLKEAKKAWRDSIENLKRVLEEVAKLVKTVLREIEEKIDDEDVVRALIEVIERLLRVAEEVIRRILKVNTELMRVDERSIRESLKAISEVLKVLDT

SEQ ID NO: 1932 - protein, 247 aa, Artificial Sequence
  Synthetic
RDRDVLRKVKAEIEELVARIEKVSRDALSEVKRLLDENRKIARDHMVLHEYVNAAGITTRGDDEVVKETEEVLRDNHRLLEELIRRLIKVLEEWLRRHKKLLDEIRELLKEILRLVKESGVSEDLLRRLKRVIEELDKKLKESEEKLRRVVEKAKEDLKAVLEEHRKVLEDLKRALEEVREKLRERGSEEVVEELLRMLKRVAEEMKRVHDDLSRAVEKVVRDVVRVDKELLDELARILRRLEEVIT

SEQ ID NO: 1933 - protein, 231 aa, Artificial Sequence
  Synthetic
SKDEELARLLEELVERWRKIVEDLERDHRRLVKEIRELVERIRDHMVLHEYVNAAGITDERIVRLIEEIAKIIEEVLKEIVKLVERAVRENVRVLRESVRLVAELVETLARLLRGSDERVTEAIKKVLDTSEDLIRRVIKVNEDILREIAKLVEEVLREAERILTEIKKEGDREEIRRILEELKRIVDDVLRIIARILKLLRDLTRRLAEVAKAVHKLLEELLRKLKEDTR

SEQ ID NO: 1934 - protein, 237 aa, Artificial Sequence
  Synthetic
KEKEDALKKLEDLARKSREDLERVLRKHKKILDKIEELLKRVRDHMVLHEYVNAAGITTESEILKELARLLREHHEALRRLIEELRRLLEEHHKILEDLAREHKRLLDELIKVVADGVDKDELERIIKELRERDKKLVDDLRKVSEDLLDAVRKLVEDLERISRELLRRVEELAKGIDEELAREVERVIKELLDKSKEILERIERAIDELLKVSEEILKLSEDASEELLKILREFAK

SEQ ID NO: 1935 - protein, 229 aa, Artificial Sequence
  Synthetic
SKEERLREVAEKHKKDLEDIVKRVDEAAKETARRLEEILKRLRDHMVLHEYVNAAGITDEKLKKVKKILKDIMDRLAELIKKILKLLKENLEKIKELLRRNLEISEELLKLAKGLSDRDVLETVRRVLEKLDEEWDRVLEDSRRIIETILRELDTLLREVEKLIKEIKDEISGSKEVLDILERAVEVVRRVIKALKEVLERHVDATREVIERVKRVNKRLLEAVREVVT

SEQ ID NO: 1936 - protein, 246 aa, Artificial Sequence
  Synthetic
SEREELLERIKEILKRVKDKLDEDLKRLKEILEKLKEKADRDRDHMVLHEYVNAAGITRTGRTDELVKEVLDTVRRNLENLKRLVEDILRKLEENVKNLTDLVREILKLITELIKRLEDGGLPKEVLDALRRVLEKLEELLREILERLKRSLEAVKRKIEELLKELERSLDELRRALERIRKEIGDSETAVRAIIRVLEKHLEAVRRVLEELLKVLAEHLETVRELIERLKRVLEEAIEVVERVAR

SEQ ID NO: 1937 - protein, 252 aa, Artificial Sequence
  Synthetic
SLEEITKRLLELVEENLARHEEILRELLELAKRLAKEDRDILRDHMVLHEYVNAAGITNGSSEEDLKRLLKEVIEELRAVVKRVKDKWDEVVKRIEDLVKKLKELHDDTLRKLRELVRKIVTDISESGGEAEKVKRVVEKILELVERLAKVVKESVEKLLEILRELAEVSKRVAEALLRLLEELVRVIRIKDERTLREVVRKVLEEAKRLLDELEEVHKRVKKELEDIIEENRRVVKRVRDELREIKRELDE

SEQ ID NO: 1938 - protein, 237 aa, Artificial Sequence
  Synthetic
REDEVLRDIERLLREIEEKIRRILEESTAELRKVEEEVKRIIRDHMVLHEYVNAAGITKGIDEELRKLLDEVLDKLTKLIERNKRSLERILELIKRIIDENLEVLRDIIRLLEELLKATKDNGVPKDEVIKLVEDVVRRIEELVTRVVARNEKLVKDLDDLAKKNVRENEELLREIDRGLDEDLLEKIKRVIREHIKALEKLARDLKEILRRHIEALKELARDLAEVIRKLLEDVKR

SEQ ID NO: 1939 - protein, 237 aa, Artificial Sequence; identical to SEQ ID NO: 1938
  Synthetic

SEQ ID NO: 1940 - protein, 243 aa, Artificial Sequence
  Synthetic
SEAERLADEVRKAVKKSEEDNETLVREVEKAVRELKKNNKTWRDHMVLHEYVNAAGITDGQVSDRDLLKELEEVLRRVLEALAENHERTEEILKRWLDRYAEDIERLRKVLKEVIEALKRGGSDDKRIVDELEEILRRNEDVLDKIAKRLRRLLEEDRRLLERIVRELKRLLDDLDRITKEGKSEELVRIAIEVLKRLLEIIEELVRLNNEILERLLKIVRELHKDNIKILEDLLRIIEEVLR

SEQ ID NO: 1941 - protein, 243 aa, Artificial Sequence; identical to SEQ ID NO: 1940
  Synthetic

SEQ ID NO: 1942 - protein, 245 aa, Artificial Sequence
  Synthetic
SEKDEVTRRIRELLKEAEETNREAIERIKRLLDRVREAVEEVRDHMVLHEYVNAAGITRGLQDDEALLKLLIDALREHNRLSTELIKILIDVLRTILKIIKDVLATNIEIARRILDLVRRLAERGGLDDRLVKEVEKLVRTAERLHRDALRKVKRLVEELEKRLRELVKTDHDLVRRLETLLRRGSGSKEDLLREIARILAESLRLIRELLKEIEKIVKEIIELLERLNDELRKIIEAILETTKK

SEQ ID NO: 1943 - protein, 245 aa, Artificial Sequence; identical to SEQ ID NO: 1942
  Synthetic

SEQ ID NO: 1944 - protein, 243 aa, Artificial Sequence
  Synthetic
SRVEELKKLIEDILRISREVVERIARVAEDIHRINRRVLDDLRDHMVLHEYVNAAGITRKVSGTEAAEALRDTIRRVVDEIRKLLEEHEKRSAELLEEIRKLLEDILRRSERAVEEIRELLKKGVSTKDVLRIIEEILREHLELLERVVRRIEEILRELLKTIEEIVKRIKEILEELKEVLKRGSVGDDEVEREIRRVKEDLDRILEEYRRLLEEIKRKLEEILRRVEELHRRLRRKLEEIDR

SEQ ID NO: 1945 - protein, 249 aa, Artificial Sequence
  Synthetic
DAEEVVKRLADVLRENDETIRKVVEDLVRIAEENDRLWKKLVRDHMVLHEYVNAAGITGGVPEELLDRLAKVVKSIVEKAEKILERLNRVSKAIAEKLKTIVDELNEVSKEIVKRAEDILRKGKDKETVLRALRTLVKEYADLSKEVLERVERIVREYVKLSDEVVKSLAEIVEELIRIIEDLLRKGNLDEDVKRALEELVSRLRKLLEDVKKASEDIVREVERIVRELAKRSDEILKKLEDIVEKLRE

SEQ ID NO: 1946 - protein, 240 aa, Artificial Sequence
  Synthetic
DKDKRLEELLKRLKELNDKTFEELERILEELKRANEASLREARDHMVLHEYVNAAGITDKRLAELLKKLLDDLKRLLEEYTRTNEELLKRLRELLERYRETNKKLLDLLRKLLDEARRTGTDEDLLRRLEDILRKYEDEVRRLLKELEDILREYEDTSRRLLEELERIAKEAAERVSRGSDKDVKDIIRTILEVARDLLRLLEEDSRTNSEVVKRLLDLLREDSKANSEVVKRLLDVLRE

SEQ ID NO: 1947 - protein, 240 aa, Artificial Sequence
  Synthetic
SKEETLKRLLDELEKRNRETVERLERLLKELEDRNRASLEELRDHMVLHEYVNAAGITSKELKDTLARILEELRKLLEEYFRKNEELLRLLRKLLDEYARTNEELLRLLEELLDTARRTGGDSELLKRLEDIAREYEKRVRRLLEKLKDILDKYRKTVEELVRKMEEILKEAKKTISRIGSEEVKDIVRAMEEVIRRLIEILRRDVELNLDVAKKLLELLKEDSKLNLDVARELLELLDR

SEQ ID NO: 1948 - protein, 240 aa, Artificial Sequence; identical to SEQ ID NO: 1947
  Synthetic

SEQ ID NO: 1949 - protein, 243 aa, Artificial Sequence
  Synthetic
DEEETLRRLLERKVELAKEYLDVSKEVIDRTTKLLDEYLKTSRDHMVLHEYVNAAGITGPDELIKRLAEELERSLRELEEEIKRLKRELEESLKKLKEIIDRLAEEAEKLLAVLKRGEGSEEEALRALASLVRELIEVLRENDERLRDVLRRLIEALRKNNEILERVLRKLVRAAEERGRDESSREALEEARRRLEELLRELNEITKDLEAKLEKLLRDLNELTKALEEELKRLLDELKKRTD

SEQ ID NO: 1950 - protein, 243 aa, Artificial Sequence
  Synthetic
SEAERTKESLKKVLKALVDLNRELLRKLEENMRELTKLNEEVRDHMVLHEYVNAAGITVDKDAEREAERLMRELDKSSEDTARETRKLIEESKKSTRRTEEEARKLTETLDRLAKGGLPREDLLRALVRLLEELARLIEEDVRRNAELVKRHIELVERDVAELLRLIKELVDLLADLAEKGSRTEEIRKIVEEILKEIKELADRYREEVRKSKDKLRSILEDYKRKVDELKERLRELIEEVET

SEQ ID NO: 1951 - protein, 243 aa, Artificial Sequence; identical to SEQ ID NO: 1950
  Synthetic

SEQ ID NO: 1952 - protein, 186 aa, Artificial Sequence
  Synthetic
SAEDSIRELLERDERLLEEARKEAKRLNEENERLLERIEETVRRDHMVLHEYVNAAGITIKGEKLREIEELVRRVKRTIEKLLEEVKKSVEDSSKRIEELLEAVERSVERTKEEIRRLLDEVRKDRKEELVKRVEERIKRLHDENRRLVKEVIEEVEKLIRDNEKLAEDIEREIRRLLKELDEAAK

SEQ ID NO: 1953 - protein, 182 aa, Artificial Sequence
  Synthetic
RVEDALRKLLDDVRRLVEEAERRLRTSNDKSRRLVEEAKRRLERDHMVLHEYVNAAGITIRDEDVKRVLEELLKRDHDVVRRVLERIDEMLERNSRLVKRVLEDIRRLLKRVREVVERIKRVRSKVVEEVLKELEELIKTAKKIIEDVLRASEDTIRRLEEIIRKVEEDSKRIIEEIERAAR

SEQ ID NO: 1954 - protein, 184 aa, Artificial Sequence
  Synthetic
KLDEVIEEIRKLLRRMEEELRRSVEEIDKLLREVRELLRESSERDHMVLHEYVNAAGITGVPEEVKERLDRLVETLRRLSEETLKELDKLVREVKELSKESLKRLRELVERLRRELEEIKKRGEDEKLVEDLKRRAEEVIRELREIVKRNTEIAREVVERAKRIVEKNEKLLKDVVEEAKKIVK

SEQ ID NO: 1955 - protein, 181 aa, Artificial Sequence
  Synthetic
SEVERVLEDLRRLVRDVEEKLRRIIERDRRLVEEVERENRKTIRDHMVLHEYVNAAGITISDKKTIERIVREIIKEARDLVRRNHERNREIVDESRRLVEELRRIVEEIIRRLRELLERVKSGELAERIEDVVREAEKRLRELLKELEKTSRDLKKRLEELDRELKALVEKVERDLEELRK

SEQ ID NO: 1956 - protein, 177 aa, Artificial Sequence
  Synthetic
ELREDVERVVDEIRRLVEENVRRIDEVAKDIKRLADDNVRRVKRDHMVLHEYVNAAGITGVTEVVDELREEVRKLSEDNRRHSRELIERVKKLLKELEEHSRDLKRRVKELLEDLKRKGVDERVLKKLKEVIEDVERKSRDALRRLEEAIRRVRRESERVNRELDEVIKRVTEELKK

SEQ ID NO: 1957 - protein, 173 aa, Artificial Sequence
  Synthetic
SLEELLEEARKTVERLIRESERVLRESEERVRRLIEELERVVRRDHMVLHEYVNAAGITEALKELEKLLREDSKRVKEVLDDLRRDLERNKRRNEKVLRELEELLKRLEELVREGVREEELEKLLREIEERVKEMLKRDEDTLREIERKVKEAVRDSERTLEEIEKRVTEEKT

SEQ ID NO: 1958 - protein, 179 aa, Artificial Sequence
  Synthetic
STREDARRLVERVRKEVKRLLKKNSDLLREVTERVKTLNERNRRDHMVLHEYVNAAGITDERDVERLLDRARKLVKESEDLIRKLLKDLRELVRRSEKDIDELRKELKRLLDELRARATDKDLERVVREIEKEIRDLIRELEENVKTSEKLIEDLIRELEKSVDESRKRVEELVKELRT

SEQ ID NO: 1959 - protein, 180 aa, Artificial Sequence
  Synthetic
STEEVLDEIRKLHKTLTEDIKRVLREIEELHRRTIEENKEVLDRDHMVLHEYVNAAGITDTPNVEKLLKDLEKSAKENEEHNERTLREDDRVLKEIRRRATELLKANEEMLRRIEEVMRAGKVDAEELLRESKEAIKEVKRVLEELRKESKRVVDETRKLSEENLEHSERVLRKVEEDLR

SEQ ID NO: 1960 - protein, 180 aa, Artificial Sequence
  Synthetic
SKEEVLREIERLHKETIRRIEEVLREATELHKRLTETNKRVLERDHMVLHEYVNAAGITDTPNVEELLRELKDALDKVRDHNRKTLKKNEDVVREIEKEVRELLKEDEDVLRRIEKVMRDGRVDARELLEESRREVERSEKEVERLLRKSRKVVEEVRKLSEENDREVKKILEEVKRRLD

SEQ ID NO: 1961 - protein, 178 aa, Artificial Sequence
  Synthetic
DDLERVLKEIKKAADKIREDNKRTADKIRKRVKELDDETRDMLRDHMVLHEYVNAAGITREEARKVIEELKKLVDEVRKRNEKSIEELKKLLKEDRDLMRRVIEELEDLVRRLREEVRDDEALRRVEEEVERLIRDLRRVLKETSDRVRELIDKHRRLSEEVEKDVKRLIDELKKKTD

SEQ ID NO: 1962 - protein, 187 aa, Artificial Sequence
  Synthetic
SEKERLKEELEKLSKEIEDILRDDKRSDDELRRRLRELLEKDRRDHMVLHEYVNAAGITARKRVSEDELRAIKKEIEDLNRRNEESLRAIEEKIKRLNDENRKSLEEIRRRLKRLVEEVDELRKRDNREELLRRLLEKLKRMAEKLKRDIEDNNRKLRKVATELAKEIEDNSEKLREDAKRLSEKIK

SEQ ID NO: 1963 - protein, 175 aa, Artificial Sequence
  Synthetic
SEKEDLERELEEVRRRVEESLRKNEEDVKRVRDELKKLLDENRRDHMVLHEYVNAAGITKRVLDEADRLLKELEDDHKKLEEDAKKALDELREEHKRLEETLRRMLKRIKEVLDRESDKMEEIKKEIEKILRDIERVSRELNKKLEEIVRRLKKVSDELNRRIEEIAERVRRRRK

SEQ ID NO: 1964 - protein, 175 aa, Artificial Sequence
  Synthetic
SEEDELRRLLKEVNERVERLLDEIRKELEKIAEELRDLLKKNERDHMVLHEYVNAAGITEEIKKDAERALTELKEEHERLDREAKKDLDRIRKELERLEEEHRRVSERIEEVLDKESDKTEDIAREIRELMERTRRVIEEIKKELRDILEKLRRVSEELNKKLDEILKRIEDRTR

SEQ ID NO: 1965 - protein, 177 aa, Artificial Sequence
  Synthetic
SAIEKVKEVVERVLETVRDSVRRSHEESKRLIDKVRKRLEEVRRDHMVLHEYVNAAGITERMVEKLERDLEELLKEIKDTIDRIEEELRTSNRRLKETNDEIAKRLEELLRELSRDRDKDAVEDVLRRIEELIRDLNKKNDDNVRRVKEVIDRAEKLVRDLLREIRKLIEKLIRDTE

SEQ ID NO: 1966 - protein, 174 aa, Artificial Sequence
  Synthetic
SEIEELEKRIDELLKELRDLSRRIAEEVKRLLEELKKLSKDSERDHMVLHEYVNAAGITEEELRRVEEEVERVVRESRKLNKETEDELRRLLEEIKESNDRVEKRARELKKLLRDGKDVEEVLRRLEKLVREDKERLKKVLKDARDLIKKDKDLNEKLSRELEKLVRELEERAR

SEQ ID NO: 1967 - protein, 174 aa, Artificial Sequence
  Synthetic
DEEEDLERRIKKLLDENRELLKRIAEELRRLLEELRRLTEESARDHMVLHEYVNAAGITEKDLRDVAEKVKKVLKESEDSNRDVKRKLEKLLRDLERSTERLEREARKVRKLLRDGKDIETLLRELEKLSRDNKELLKKIEKEIRDLIKEDKERNRELSERLRKLVEELKKKAT

SEQ ID NO: 1968 - protein, 177 aa, Artificial Sequence
  Synthetic
SEAEKVVEELKKLLREVEKKIRDHTEDVKRILEELERRLRKHSRDHMVLHEYVNAAGITDDTVRKVKEELDRSHEKLREELRKVAKELKESNEELERDLKRLVEEAEDRLRRLKDRVSEKVLRELEKILEDIKRTLDKLLRENRETLKRIEDRLRELLEENRKLLEKIERELRERSR

SEQ ID NO: 1969 - protein, 174 aa, Artificial Sequence
  Synthetic
EELERILDKVRKVIEEVRKRLRDDLRTVEKVLKETEEVLRRAARDHMVLHEYVNAAGITGRDRREIKEELKKVLDDLRELLRALEEKNRRVNKENEDSLRKIEEDLRDVLRKLEEEIKGREVLRKVRELLRTIREEVERVLRKSNELSTRIKKRIDDVLETLERLLKELDDKLR

SEQ ID NO: 1970 - protein, 178 aa, Artificial Sequence
  Synthetic
SSKDEIRRRVEEVVERSDEIVKRSREHVKTVVDELDRVVKELERDHMVLHEYVNAAGITGGSEETLKRVLDELREILKELKEEVKKVKRKLEKVVKENRDTIREVEERNRKILDELRKRGVEERALREVEEISRKSEEKLRRVLKESEDIAKEAEDRLKTVLERVERIADEVLKRLTK

SEQ ID NO: 1971 - protein, 175 aa, Artificial Sequence
  Synthetic
SEVDEVLREAKRIVDEVHKDNERATEESRRLVKKVHEENEEMVRDHMVLHEYVNAAGITEKLVTEILKEIEEALKEAARRNKEVKDRLRELSRRVSERNREILEELKERLDRVRERRKDVKELEREVEKLLKRIEESLRRHRKENKRLLEELDRSLRELAKIVKEVLDEIRERTR

SEQ ID NO: 1972 - protein, 186 aa, Artificial Sequence
  Synthetic
SEVDEVRKTLEDLLRRLDEENKDIIRRNKELLDDLDRKVREAIRDHMVLHEYVNAAGITLKDRETLTRIIEEIEKRARELIKRLRDEIRKIEEESKKSIEDSRKRNDEIRKRLEELIKDLRDKIKDSEELARRITELEKRVREVIERLKEKNKRLEDDSRRVITELRKKLKDLEDRVREEIEELRK

SEQ ID NO: 1973 - protein, 184 aa, Artificial Sequence
  Synthetic
ELIKKARKDVEEVRERSERLVDELRKRNKKLADESRRLIDKLRRDHMVLHEYVNAAGITRRTKDVLKEIEDLVRELERELRRVVKESSDKVRKLIRENEKVVEESSRLFRDLVEKLRRVVEERNDKKLMEEVERLIKRLEDVNEKSERDVREINKESERVNEETEREVEDAIRKLREVLRRAKK

SEQ ID NO: 1974 - protein, 186 aa, Artificial Sequence
  Synthetic
KEVEDLERRVKEILDRMKRLIDENRKKIEKSIRELERLIDENRRDHMVLHEYVNAAGITGGDDARTLRERVRKIIEDVEEHSRRSTEEVRRIHKENKEHSERSSDEIRELLRRVEELIEEVKRRLRDKEMEKKLEDIVRRVREVVRRAHETNERLVDRSRKAVEKAERTNRRLVEEIRKVAEEVRK

SEQ ID NO: 1975 - protein, 186 aa, Artificial Sequence
  Synthetic
DEIRELEERVRRILDELRRLVERNREVIERSIRELEKLLDRNRRDHMVLHEYVNAAGITGGDDKKTMLDDVRRLLREAEDHSRRSSETAKRIHRENEEHSKDSSRKVRKLIEELRELAKKVEKEITDERVKEAIKELVKDVDRVMREVDRANRELTKTSKKVLEDVDRTNRRLVKEVRDVVERARK

SEQ ID NO: 1976 - protein, 186 aa, Artificial Sequence
  Synthetic
KEVEDLERTVRTILKRMRELITRNEEEIRRSIEELKKLLKENKRDHMVLHEYVNAAGITGGDDKKRLVEEIKRLLDELRENSKRSSDRAKEIHERNKRHSEESSRTIEKLLKELRDLVRDVERKLRDEDAKRKLDELTKRVEKVVREADERNKRLTKRSKEVLDEVHRANEEALKEVEEVVRRVTK

SEQ ID NO: 1977 - protein, 185 aa, Artificial Sequence
  Synthetic
SAEELLRTIEKRIEDNHRRLEEILEEIARLIEDMLRTDERIVRRDHMVLHEYVNAAGITGVPEEVLERVRRELERLKKELEELRRRSEEKVKELKRRLEEIRRKLEEEHRDLRRKLEELRRDLGDKEEVVKKLVEDVERELERSLREAEDLLRRVEEVIRTSKKESKDVLEKIERLLRDLERRTR

SEQ ID NO: 1978 - protein, 176 aa, Artificial Sequence
  Synthetic
REAEEAKEEVEELNRRNKKELDDARRRVDELDKRNKDRLKESSRDHMVLHEYVNAAGITGRSDDRLREKIERMLKTSADELERLKEENKRALRDLAERLRELIERNRRKLEEITRRTVPDKDVLKRLAELIKESIRELERVLEELAEKIDRSLKELDDVLRKNETDLKRVIEDLKR

SEQ ID NO: 1979 - protein, 182 aa, Artificial Sequence
  Synthetic
DLERRLDELLKRIEDRVRELVRTLEESLRELERRVREIIRRLERDHMVLHEYVNAAGITNKPDKAVKDDVRRLRENADRLNKRVREELKKLREDVKRVNEDVKRELDKLAEEAKDMLRKLREAGIDERVIKKAEEDVRRLLREIEEVSERHKREVDRLEREIEEVSREHKERVEKLLREIER

SEQ ID NO: 1980 - protein, 179 aa, Artificial Sequence
  Synthetic
RLEDEVRKMEKEVREEVKRLEDESRKVLEESRRNLDKLREESKRDHMVLHEYVNAAGITGLDERVLRELLKRVREVHERNRKLLDEVRRASEKVHEDNRRILEEVRKTVKDVVDKLRRVDAKVVKELIDRVRKILEDVEREVKKSIEEVKEINRRLNEEVKKTIEEVKEIVKEVTERAK

SEQ ID NO: 1981 - protein, 183 aa, Artificial Sequence
  Synthetic
SVDERLDEVLERVKEDMDRNRRKNDESLREDEENVRRNKKETDRDHMVLHEYVNAAGITVKDERVKEFLDRVLEEIRKSAEEVKTIIDEVHKESEETVRRTKKIIEEVLRRIEELIRRVKKDRKEEVVKTVEEDIKRLLKEVNKVSDEAHKRNKELNERVNRVNKEAHKRNEDLLREAERKVR

SEQ ID NO: 1982 - protein, 183 aa, Artificial Sequence
  Synthetic
SIEDEIRKLKEDIKRVLDKVRRDNERLKERLDKVLEDIRRSSERDHMVLHEYVNAAGITPVDERLVRKVEEAVKRLKEHNEDSTRRVEEVIRRLKEESEESVRKTEKVARDLERELDEVLTRGGEERVREVIEKLKETLERLKREDKEVADRAEKLLREAEEHNKRSLDESRRVLEELDEEIR

SEQ ID NO: 1983 - protein, 183 aa, Artificial Sequence
  Synthetic
SIEERVRELMRDLERVLKEIREHSKRVIEEAKRVLEEIERNSERDHMVLHEYVNAAGITPVDETLVREVEEAVKKLKEHNKRSSDTVRDAVRKLVERLKESSDRATELVKDLKRKLEEVLRRGGEKELEEVERRLRKVLEDLRRNNKEVVDRLKEVLERLKEHNRRSLDESRKVLRELKERIR

SEQ ID NO: 1984 - protein, 174 aa, Artificial Sequence
  Synthetic
SESDEVIRDLARLLDELARHVDDSVRRMDEVVKRSTREADELARDHMVLHEYVNAAGITERVERMVAEIERLVAEVLEELKKKYEKLKREVEENLRRLEETVRDIVEKARKVTEKGVSKEKIDRIIRELERILEEAKKKHEDVLRRLEDSLRRVAELLKAALDRLREIVDRLRR

SEQ ID NO: 1985 - protein, 172 aa, Artificial Sequence
  Synthetic
SRAETVLKEVTDKIKKLADSSDELLRRNKENIDELKKSSEELLRDHMVLHEYVNAAGITEETLEELIRRVEAELEAHHRELEKNSREDEKRNRDHHAKLEEEMRRVEERLEREGIDDEVVKRVRDLLDTVRRRNEKVNEDVKRMNDKLRRDNEDVIRRVEKLLRELEEKRRT

SEQ ID NO: 1986 - protein, 174 aa, Artificial Sequence
  Synthetic
DEEEDLERAIKKLLDENRELLKRIAEELRRLLEELRRLTEESARDHMVLHEYVNAAGITEEDLADVAEKVKKVLKESEDSNADVARKLEKLLRDLERSTERLEREARKVRKLLRGGKDAETLLRELEKLSRDNKELLKKIEKEIRDLIKEDKERNIELSERLRKLVEELKKKAT

SEQ ID NO: 1987 - protein, 184 aa, Artificial Sequence
  Synthetic
DEIRKVVKEITDLLKASNDKNRKVVEEIRDLLRKSKKLADELVRDHMVLHEYVNAAGITSGDKETAEDIVRRIIEELKRILKEIEDLARRINREIERLVEEVERDNRDVNRAIEELLKDIARRGGSEDLKRVEERAREVSRRNEESMRRVKEDADRVSEANKEVLDRVREEVKRLIEEVRETLR

SEQ ID NO: 1988 - protein, 181 aa, Artificial Sequence
  Synthetic
DAVEEAEKLIRKVIADSEKLLRDLADLNAKSIRRSEKLVEDDRRDHMVLHEYVNAAGITGGSEEELRALLKEVEDTNRASHETNKRLLDEDRALNKEVHDRNEKLLRDIKRLVEEVAKGIDSEELLRRIKKLLDEIKKAIEDSSREIKRLLEESERVMKRSSEDIKRTLDDTRRVVEEVRR

SEQ ID NO: 1989 - protein, 177 aa, Artificial Sequence
  Synthetic
SEDEDLDRVAEKLAREHKKSVEEIKRVLKSADEESKKLVRDTERDHMVLHEYVNAAGITNIDEELVERLKKKIEDILRTLEERHKKLIKELREILKRLSDESRRLAEETEKVLEDLERKGVDEEVLKKLAEIVRRVKEENRKVNEEVEKRLRELEEENKKVIEDLKSTVEELVERLR

SEQ ID NO: 1990 - protein, 177 aa, Artificial Sequence
  Synthetic
SKEDRLREELKKLLARLAEEIERLKRALEESNKDLKRTIDASERDHMVLHEYVNAAGITEELLRELERSTAENKERAKELLKRHEDLVRKVEKELADLLRRLEEIVARVDEALKRGISEEELDKLLKEARDLIREIEKRLEELLKRVEKLTEDAKRDLERSNREHKELADRIKETAR

SEQ ID NO: 1991 - protein, 238 aa, Artificial Sequence
  Synthetic
EEDERLTKRVEEIKRENRELLRRLEEEVKELERKSEKIVRDLKRDHMVLHEYVNAAGITTELLVEELEKLIREILKLSEDHNRTLEEVVRKIEDVLRANLERLKELVDEILKALKERGKGDSEELKRKVEKVARDYERLLRKLREVVKRILDESKRLDEELEERLKEVLKKLEELIKRGGPDKDVLTELKRILDELLKLVEKLIRRNLRLLEELLRLVREILRTSNEILEEILKDARR

SEQ ID NO: 1992 - protein, 245 aa, Artificial Sequence
  Synthetic
TEEEVLRKVEKLIKDLLDVLRDLLRASEEVVREALRVLEELIERDHMVLHEYVNAAGITSRESVESALAKNEERLKKILEDADRVLDKWRRLLEELSKKAKAVLDEVRKRLEEIKREVPETEKLRTLLTILEEILRALEKIIRDILRINERLLEKLKRILERLRETNREIDERIRKLVEEARGGSEEKLRRDLTETKKELEKRHEDLRRELEKLLRDYKRELEEIERALEEIEKTLKRRADETRR

SEQ ID NO: 1993 - protein, 250 aa, Artificial Sequence
  Synthetic
STEEILKRVKEILDELAKELRDIIRESLRTIEELLDELRRILERDHMVLHEYVNAAGITVKDSEELLRRLKRLLEDLRRAHEELLKRLKEAVDEHRDRLRKILEELERVLKELRKRIEELRRSGDRISEKDVLRKLEEVLRKALEILERLLKKIRESARELLKIIEEVLDANIKVMEEALKTIKELLKDGPDEVKRRLEEKERRIRTRYEELRRRLRKRVKDYEDKLREIEKKVRRDAERIEEELERAKK

SEQ ID NO: 1994 - protein, 247 aa, Artificial Sequence
  Synthetic
SEKEELLKLIKRVIELLKRVLEEHLRLVEDVIRRLKELLDSNERDHMVLHEYVNAAGITVRGDKEELDRIKEKLEEVLERYKRRLEEIKRDLERMLEDYKRELKRIEEDLRRVLEEVERIATRGEGPAEALIDKLRKILERALRELDKLSKKLDELLKKVLEELEKSNREIDKLLKDVLRRVEEGGASEDLLRKAKKVITEVREKLKRNLEDVRRVIEDVKRKSARILEEARRLIEEVERELEKIRK

SEQ ID NO: 1995 - protein, 238 aa, Artificial Sequence
  Synthetic
SEAEKIREALETNLRLLEELIKRLKEILDTHNELLRRVIETLERDHMVLHEYVNAAGITEEVLREVKRLVDELRKEARRVLDEHEKLVRKIKKEAEDVARESEEIIKEVEDKLKGLDREELLERVRRVLKKSDDLIAELVRRALKILEELTRLLAELLKKVVEILRRIVELVERVLTKKGAPKEDLERLRRKVEELEDRLRRLLEKLARDSAELMRELERILDRYARESEELDRRLAE

SEQ ID NO: 1996 - protein, 247 aa, Artificial Sequence
  Synthetic
SEAEDLEELIKELAELLKDVIRKLEKINRRLVKILEDIIRRLKRDHMVLHEYVNAAGITDKDILRDLERRLREILEESDRLLEELKRRLEEILRKSKELLRRLEEVLREILKRAEEVKRSNLPKEELIKEIVKLLEELLRVIEKILEDNIRLLEELVEVIKEILEKHLRLLEELVRVIERILREVGKDKDEAERRRRELKDKLDRLREEHEEVKRRLEEELTRLRETHKKIEKELREALKRVRDRST

SEQ ID NO: 1997 - protein, 240 aa, Artificial Sequence
  Synthetic
SDKEEIKRRVEKTARDLETEHDKIKKRLEDTVRDIKRELDELLRDHMVLHEYVNAAGITGDGDATDLVDKLLETVKRLNEEVLRTVKKIADELRRLVEEVLRVLRESNETLARLLEEGNVGDEVRERLEEVLRRTEEIIKTLEEIVKRLLDELRRLVEELRRISKKLKDELDKIKEKGKDEKRLIEEVVRLLRENLDVVRRILEALAKLIKELLEALEEVLRRNKELIRELLRVLDEALK

SEQ ID NO: 1998 - protein, 240 aa, Artificial Sequence; identical to SEQ ID NO: 1997
  Synthetic

SEQ ID NO: 1999 - protein, 248 aa, Artificial Sequence
  Synthetic
DEDRIIEEIARLLEELLRELLELIKKLIETNRRLNEEHERAVRRDHMVLHEYVNAAGITGISDEKLKRIRERLKRALDDLERLHREINKRLEDLVRELEKLVREILKELKDALEELRRASARAGGEEVLRRLEEIVKKLLDLVRRILERLKEIHKDNVRLLRELNERLTRIVEDLVRLIREILREAGVDEKIAEEIERELEELRRMIKRLHEDLERKLKESEDELREIEARLEEKIRRLEEKLERKRR

SEQ ID NO: 2000 - protein, 248 aa, Artificial Sequence; identical to SEQ ID NO: 1999
  Synthetic

SEQ ID NO: 2001 - protein, 238 aa, Artificial Sequence
  Synthetic
DADELLRRLAEEVERVIREAEDLLRRWKETIKKVLDDLKRLLDRDHMVLHEYVNAAGITKGDEELAKLIKDLLDTNEKVNRDLLRLIKKLLKDAERVNRRLLELIEELLEELKRVAKDLGLREEADKKLRDIADRARKELEDYERRLKELLKTVEDALRKAEEDSRKLKRDVEELLERGRLRKDDLEDILRKNLDRLRKLLERLREILRENLEALKKTLKRLEDVVREILEDLKRERK

SEQ ID NO: 2002 - protein, 231 aa, Artificial Sequence
  Synthetic
DKAEVLREALKLLKDLLEELIKIHEESLKRILDLIDTLVKVHERDHMVLHEYVNAAGITERELRKVERMATESLRTIAKLKEELRDLARRSLEKLREDLKRVDDTLRKVEEKVRRTGPSEELIEELIRTIEKLLKEIVRINEEVLKAVRELLKTLLKLSEDVVRRIEEILRKGGVPEEIDRELKRVVEELRRLHEEIKERLDDVARRSEEELRRIIKKLKEVVKEIRKKLK

SEQ ID NO: 2003 - protein, 231 aa, Artificial Sequence; identical to SEQ ID NO: 2002
  Synthetic

SEQ ID NO: 2004 - protein, 236 aa, Artificial Sequence
  Synthetic
STREKAKKVLDTLRADNEDMKRVVEKILRALKRTNERAEKLARRDHMVLHEYVNAAGITEEALKEIEDTLKRVLEEIKRLLDESKKLLEDVEREIREILKTSEELLERIEREIETVGSDEKTLAEILKRLLELNEEMNRRLLKILRDLLRLNEEVIRRLLAVLERLLDALKEALDRGDVPEDLLRKLEEELRRIKEKLRKALEELEREHRELEKELDKLHDESRKEHERIEEELRR

SEQ ID NO: 2005 - protein, 236 aa, Artificial Sequence; identical to SEQ ID NO: 2004
  Synthetic

SEQ ID NO: 2006 - protein, 239 aa, Artificial Sequence
  Synthetic
SERELIERWLELHKEILRLIRELVERLLKLHREILDTIKKLIRRDHMVLHEYVNAAGITKEAKDELREIAKRVEDKLEKLERESRKVEEDLKRKLKELTDESDTVEKRVRDVVRRGTQSREEIAEELLRLDRKLLKAVEELLKEILDLNKKLLDDVRAILEETRRVLEKLLDRVRRGERTDDERRTLTELLKRMEDILEKVERTLKKLLDDSARMAEEVKKTLKELLERSEKVAEDVRK

SEQ ID NO: 2007 - protein, 239 aa, Artificial Sequence; identical to SEQ ID NO: 2006
  Synthetic

SEQ ID NO: 2008 - protein, 231 aa, Artificial Sequence
  Synthetic
SKEEEVEKVLRKWEEILRRLIEENKRANDKIRREYEELVKEIRRDHMVLHEYVNAAGITEEVKRILEKLIKLLEDILEYEKENVERLIELNERILRELKKSVEELKALVTRVRRDGLPESEVRKLVEDVLRKNEELLKEAKKAWRDSIENLKRVLEEVAKLVKTVLREIEEKIDDEDVVRALIEVIERLLRVAEEVIRRILKVNTELMRVDERSIRESLKAISEVLKVLDT

SEQ ID NO: 2009 - protein, 231 aa, Artificial Sequence; identical to SEQ ID NO: 2008
  Synthetic

SEQ ID NO: 2010 - protein, 245 aa, Artificial Sequence
  Synthetic
DEDELIRKLLEDLKDIVRKILELIERDLRDIERVVRRIVKVIRRDHMVLHEYVNAAGITVPRTEELERVIKRIEELLRTSEEELDRILKEIEELLRESRRRLEEVVSAVEELLRRVEEIVDKGRESKEDVIKLLREVVDDILRLVEEVVRTNLEIIKRILELIERVIRLNLSIIRDILRLLEGTVDSELADRIRKLIEDLERHTAKVLEDVKRAITELRKNSKDILEEVRKLIDELRKRIKEVED

SEQ ID NO: 2011 - protein, 247 aa, Artificial Sequence
  Synthetic
RDRDVLRKVKAEIEELVARIEKVSRDALSEVKRLLDENRKIAERDHMVLHEYVNAAGITRGDDEVVKETEEVLRDNHRLLEELIRRLIKVLEEWLRRHKKLLDEIRELLKEILRLVKESGVSEDLLRRLKRVIEELDKKLKESEEKLRRVVEKAKEDLKAVLEEHRKVLEDLKRALEEVREKLRERGSEEVVEELLRMLKRVAEEMKRVHDDLSRAVEKVVRDVVRVDKELLDELARILRRLEEVIT

SEQ ID NO: 2012 - protein, 247 aa, Artificial Sequence; identical to SEQ ID NO: 2011
  Synthetic

SEQ ID NO: 2013 - protein, 231 aa, Artificial Sequence
  Synthetic
SKDEELARLLEELVERWRKIVEDLERDHRRLVKEIRELVERIRRDHMVLHEYVNAAGITERIVRLIEEIAKIIEEVLKEIVKLVERAVRENVRVLRESVRLVAELVETLARLLRGSDERVTEAIKKVLDTSEDLIRRVIKVNEDILREIAKLVEEVLREAERILTEIKKEGDREEIRRILEELKRIVDDVLRIIARILKLLRDLTRRLAEVAKAVHKLLEELLRKLKEDTR

SEQ ID NO: 2014 - protein, 238 aa, Artificial Sequence
  Synthetic
SEIEDVIRRLRKILEDLERVSEKLLREIKKILDEARRLNEEVIRDHMVLHEYVNAAGITGSGSKEELAKLVEELIRELAKLAKEVDEIHKRIVERLKALVEDAERIHRKIVETLEEIVRGVPSEELKRVVEAIVEVIKEHLKVLADVIRRIIKAIEENAETIKRVLEDIVRVLELVLRGEGSIEDLVREVERLIKRIEDSLRELEKTVRELLKRIKEASDKVREDVDRLIKELKEAAD

SEQ ID NO: 2015 - protein, 237 aa, Artificial Sequence
  Synthetic
KEKEDALKKLEDLARKSREDLERVLRKHKKILDKIEELLKRVLRDHMVLHEYVNAAGITESEILKELARLLREHHEALRRLIEELRRLLEEHHKILEDLAREHKRLLDELIKVVADGVDKDELERIIKELRERDKKLVDDLRKVSEDLLDAVRKLVEDLERISRELLRRVEELAKGIDEELAREVERVIKELLDKSKEILERIERAIDELLKVSEEILKLSEDASEELLKILREFAK

SEQ ID NO: 2016 - protein, 237 aa, Artificial Sequence; identical to SEQ ID NO: 2015
  Synthetic

SEQ ID NO: 2017 - protein, 241 aa, Artificial Sequence
  Synthetic
SEKELLKEILDRIRELLEDDNRLLKRIVDEIRKLLEEWLRVHKRDHMVLHEYVNAAGITEDVIRELTRALKETEEDVDRVIRTLEKLLKEVLDAHEEVVRKLDRLLKEVERLVEGGDAEEVVRDLLRVVKEILDESKAVIDELARVVDEILKLLEEVDRKLAKVVKEILEDVLRGSGDDEDAVRKIAKIIEELKRLLEDLARDTRRVIEEAKRLLKEWRDRNKEVADTLKKLLEDLIRKIR

SEQ ID NO: 2018 - protein, 241 aa, Artificial Sequence; identical to SEQ ID NO: 2017
  Synthetic

SEQ ID NO: 2019 - protein, 240 aa, Artificial Sequence
  Synthetic
DREKSVRDIEEDLKRVLDKLRRRVETSKEELKKVLKADKENADRDHMVLHEYVNAAGITIDSEVLRAVREIVKRLVEVVRRYNELSEKIIRDLVRVNDRVLELLKRIVKRLIDVVRELEKIGDKEKALRRLEEVVKEVKRRIEELLKELEDVHRELVKILEEVNEDLKRVATEVKEIIKTGIKSSEVAKELDEVIKRLLDNLKENTDRLKEVIDRNLADLRDLAEELRAVIERLLEDARR

SEQ ID NO: 2020 - protein, 240 aa, Artificial Sequence; identical to SEQ ID NO: 2019
  Synthetic

SEQ ID NO: 2021 - protein, 237 aa, Artificial Sequence
  Synthetic
REDEVLRDIERLLREIEEKIRRILEESTAELRKVEEEVKRIIERDHMVLHEYVNAAGITGIDEELRKLLDEVLDKLTKLIERNKRSLERILELIKRIIDENLEVLRDIIRLLEELLKATKDNGVPKDEVIKLVEDVVRRIEELVTRVVARNEKLVKDLDDLAKKNVRENEELLREIDRGLDEDLLEKIKRVIREHIKALEKLARDLKEILRRHIEALKELARDLAEVIRKLLEDVKR

SEQ ID NO: 2022 - protein, 237 aa, Artificial Sequence; identical to SEQ ID NO: 2021
  Synthetic

SEQ ID NO: 2023 - protein, 243 aa, Artificial Sequence
  Synthetic
SEAERLADEVRKAVKKSEEDNETLVREVEKAVRELKKNNKTWVRDHMVLHEYVNAAGITGQVSDRDLLKELEEVLRRVLEALAENHERTEEILKRWLDRYAEDIERLRKVLKEVIEALKRGGSDDKRIVDELEEILRRNEDVLDKIAKRLRRLLEEDRRLLERIVRELKRLLDDLDRITKEGKSEELVRIAIEVLKRLLEIIEELVRLNNEILERLLKIVRELHKDNIKILEDLLRIIEEVLR

SEQ ID NO: 2024 - protein, 245 aa, Artificial Sequence
  Synthetic
SEKDEVTRRIRELLKEAEETNREAIERIKRLLDRVREAVEEVARDHMVLHEYVNAAGITGLQDDEALLKLLIDALREHNRLSTELIKILIDVLRTILKIIKDVLATNIEIARRILDLVRRLAERGGLDDRLVKEVEKLVRTAERLHRDALRKVKRLVEELEKRLRELVKTDHDLVRRLETLLRRGSGSKEDLLREIARILAESLRLIRELLKEIEKIVKEIIELLERLNDELRKIIEAILETTKK

SEQ ID NO: 2025 - protein, 239 aa, Artificial Sequence
  Synthetic
SAEDLVRRVKDLVDKLEDKLRKVVRTNERLWEEIRKRLEELVRRDHMVLHEYVNAAGITDKDKDELIEEAKSLEDESNALVEKLVRDIERVLAESNKLLDTLAKEIEEVLEEIVELVERGSGSDKEAREKLEDIKARLKEVLKKLREESKRIIDELRRLLEEYKRLVKEIRDRIEEVRKRNSEIRVLVELVRRHNKVLKELVEELEKLVRDHNRVVEEVVRELVELLSRAVEVIKEVVK

SEQ ID NO: 2026 - protein, 247 aa, Artificial Sequence
  Synthetic
DEERLAEELERVLDRNRKLLEEALRELRRVIEENRKSVKRLLDRDHMVLHEYVNAAGITSRGDSDEELRKVIEDLIRKLTKVLDKVRSLVEENIERLARVLEKLERLARENLEDLKKVLDDVDKKLKDRRLVERLAELVRELIEVNKEILEMLKEIVRELLEINRTLLERLKDLVATALEIIKLLARGDGTEEDVERAVKEIRDRLRKLLEDYERAVRRLEDKLRRVRERYEAVLKRIKDKLEETKR

SEQ ID NO: 2027 - protein, 243 aa, Artificial Sequence
  Synthetic
SRVEELKKLIEDILRISREVVERIARVAEDIHRINRRVLDDLRRDHMVLHEYVNAAGITKVSGTEAAEALRDTIRRVVDEIRKLLEEHEKRSAELLEEIRKLLEDILRRSERAVEEIRELLKKGVSTKDVLRIIEEILREHLELLERVVRRIEEILRELLKTIEEIVKRIKEILEELKEVLKRGSVGDDEVEREIRRVKEDLDRILEEYRRLLEEIKRKLEEILRRVEELHRRLRRKLEEIDR

SEQ ID NO: 2028 - protein, 249 aa, Artificial Sequence
  Synthetic
DAEEVVKRLADVLRENDETIRKVVEDLVRIAEENDRLWKKLVERDHMVLHEYVNAAGITGVPEELLDRLAKVVKSIVEKAEKILERLNRVSKAIAEKLKTIVDELNEVSKEIVKRAEDILRKGKDKETVLRALRTLVKEYADLSKEVLERVERIVREYVKLSDEVVKSLAEIVEELIRIIEDLLRKGNLDEDVKRALEELVSRLRKLLEDVKKASEDIVREVERIVRELAKRSDEILKKLEDIVEKLRE

SEQ ID NO: 2029 - protein, 240 aa, Artificial Sequence
  Synthetic
DKDKRLEELLKRLKELNDKTFEELERILEELKRANEASLREAERDHMVLHEYVNAAGITKRLAELLKKLLDDLKRLLEEYTRTNEELLKRLRELLERYRETNKKLLDLLRKLLDEARRTGTDEDLLRRLEDILRKYEDEVRRLLKELEDILREYEDTSRRLLEELERIAKEAAERVSRGSDKDVKDIIRTILEVARDLLRLLEEDSRTNSEVVKRLLDLLREDSKANSEVVKRLLDVLRE

SEQ ID NO: 2030 - protein, 240 aa, Artificial Sequence; identical to SEQ ID NO: 2029
  Synthetic

SEQ ID NO: 2031 - protein, 240 aa, Artificial Sequence
  Synthetic
SKEETLKRLLDELEKRNRETVERLERLLKELEDRNRASLEELERDHMVLHEYVNAAGITKELKDTLARILEELRKLLEEYFRKNEELLRLLRKLLDEYARTNEELLRLLEELLDTARRTGGDSELLKRLEDIAREYEKRVRRLLEKLKDILDKYRKTVEELVRKMEEILKEAKKTISRIGSEEVKDIVRAMEEVIRRLIEILRRDVELNLDVAKKLLELLKEDSKLNLDVARELLELLDR

SEQ ID NO: 2032 - protein, 240 aa, Artificial Sequence; identical to SEQ ID NO: 2031
  Synthetic

SEQ ID NO: 2033 - protein, 243 aa, Artificial Sequence
  Synthetic
SEAERTKESLKKVLKALVDLNRELLRKLEENMRELTKLNEEVKRDHMVLHEYVNAAGITDKDAEREAERLMRELDKSSEDTARETRKLIEESKKSTRRTEEEARKLTETLDRLAKGGLPREDLLRALVRLLEELARLIEEDVRRNAELVKRHIELVERDVAELLRLIKELVDLLADLAEKGSRTEEIRKIVEEILKEIKELADRYREEVRKSKDKLRSILEDYKRKVDELKERLRELIEEVET

SEQ ID NO: 2034 - protein, 178 aa, Artificial Sequence
  Synthetic
REVEEIERRLRELVRRSDELVRTVAEELEKLVRRNKKLVEDVMKRLRDLVERLRELVDAGLDKKEAEEDVRRLEEEIRRLLETLKEHSDRTRKKIRELVERLRDVNRKVNEEVKKLIRDRDEVRKVLKDVTELSKTSEDKLEKVVREVKRKLDEVNRDLERVVREAKKLLREVRERLE

SEQ ID NO: 2035 - protein, 178 aa, Artificial Sequence; identical to SEQ ID NO: 2034
  Synthetic

SEQ ID NO: 2036 - protein, 178 aa, Artificial Sequence
  Synthetic
DEVDEIRRRLKKLLDDSRKTSKDIERRLRELLDRNRRLVERVEEELRKLIKELEELVRSGLDREDVKRMVKKIEDEIRKLLEDLREHSKRTLEEVKRLLEEDRRTNEDLNREIERLDRRREEVEKVLKEARDVSEDSKRETTEVLKEAKKALEDINKRLREIVETVREALERVERALT

SEQ ID NO: 2037 - protein, 178 aa, Artificial Sequence; identical to SEQ ID NO: 2036
  Synthetic

SEQ ID NO: 2038 - protein, 178 aa, Artificial Sequence
  Synthetic
DEKETVKDVVRRLVEKLEEVVKESKKLVDDLVKRAKEIVRESEELVRRNVRRAEEVARERNDEETAKRLIEDIRRTTKEIIDTSRRLIEELRRLLEELKRRSEELIREIEKELKDVADRLVRDEKVLKELEDAVREVKERIKKTNKELEEMVRRVEEEIRESDERLKKASEEVEEKIR

SEQ ID NO: 2039 - protein, 178 aa, Artificial Sequence; identical to SEQ ID NO: 2038
  Synthetic

SEQ ID NO: 2040 - protein, 178 aa, Artificial Sequence
  Synthetic
SEMETVLDDVRRVVEESEELVKRARDRVKKLVDDLKRLVEKNEEDVKRVVDELDKLVEKVRTEELLERVRKTIERLADEIRRSTETIEREITKIEEEIERIVKTIEDRDRRLLEEIERRGAGEEVLEEARRLSERSREELRRVLEEARRLIRRVREELKRVHDKARRLVERVEEKLRT

SEQ ID NO: 2041 - protein, 178 aa, Artificial Sequence; identical to SEQ ID NO: 2040
  Synthetic

SEQ ID NO: 2042 - protein, 178 aa, Artificial Sequence
  Synthetic
DEVEEVLERVKKVVADSEELVKRNRERVKKVVDDIRDLIRRNAETVKEVVKTIRELVKKVRTRELLEDVKRRIKKLLDEIRESTKRIKDTIRRLREEIERTSRKIEDDDRKLVEEIRKSGLGEEALKDAERRSDESRKKLKKVHDDADRMVREVTRRLDEVHKEAEKRVREVLAELDT

SEQ ID NO: 2043 - protein, 178 aa, Artificial Sequence; identical to SEQ ID NO: 2042
  Synthetic

SEQ ID NO: 2044 - protein, 177 aa, Artificial Sequence
  Synthetic
SIEEVLKEAHELNKEANKRLRDVEEDAKRLIEEVLRRLEDVLRESERLAREVLEELKRKGVDEKILREIKKLLDENRKHSEEVKRRIEELLRRLKDLVRRILKKDTDSNRELKRLVEEGLDAKELRRRVERSVEESKRLVDELRKDVKRVVDEIRKVVEEDLRHAKRVVDEIREKVR

SEQ ID NO: 2045 - protein, 177 aa, Artificial Sequence; identical to SEQ ID NO: 2044
  Synthetic

SEQ ID NO: 2046 - protein, 175 aa, Artificial Sequence
  Synthetic
DEAEEVKRVVEESVRRNEELVRRNEELVRDVLRRLKEVVDENERLVKEVVDRLRDLVRRGADKEEVRREIEKILRDLHEHSKRTEEEIRRLLEELHKHSEETLKDSKRSHEELRRRGAEERVLKEVEELDRRVLEELKRVNDEARKRVRTLLEELRRVNEKVEELVRRILEELKK

SEQ ID NO: 2047 - protein, 175 aa, Artificial Sequence; identical to SEQ ID NO: 2046
  Synthetic

SEQ ID NO: 2048 - protein, 172 aa, Artificial Sequence
  Synthetic
DEAEDVVRKVMDEIRKLIEVSKEILKELRRLVEELKKHSDRTVEELRRVVTELLKKEASEEEAKEVVDRIRELVTRLVEENKKLVEEIRRRVEELIRRSEEELKRIEREVDTKLKDITDAVRRVRELLETVRRTSEEVLKTLEEFLRRVEKSTRRAEEELEEFLKRVEDRVK

SEQ ID NO: 2049 - protein, 172 aa, Artificial Sequence; identical to SEQ ID NO: 2048
  Synthetic

SEQ ID NO: 2050 - protein, 183 aa, Artificial Sequence
  Synthetic
KEADKLAKELEETIERLKRDSERLVTDLERLLERLERRSRELVKRLRRHVEELLKTVRRDGGESEELKKRLKELKDSNKRLNEDSERVTRKLVTDVERLLEKAEERTKELSERVKRRIDEVRKDVPELREVIKKVEDLLREVEETSKRILDRVRELLKKVEDSSRRINEESKKLLKRVEEEAR

SEQ ID NO: 2051 - protein, 183 aa, Artificial Sequence; identical to SEQ ID NO: 2050
  Synthetic

SEQ ID NO: 2052 - protein, 175 aa, Artificial Sequence
  Synthetic
SELEKILEDLKRVAERVAKALDRSLRELEKVLRRVEEELTRSNERLREVVKEVEDAADKLREVIKKLRELLRDLEEKTKRLVDELRKLAKRLAEDTKRLVEDIKRLLDELRKRIRDVDRDEEVRKLVEDLARRLDDIVRRSEELSRKLAEDVEEIVERSKRLSEELAREARELVR

SEQ ID NO: 2053 - protein, 175 aa, Artificial Sequence; identical to SEQ ID NO: 2052
  Synthetic

SEQ ID NO: 2054 - protein, 180 aa, Artificial Sequence
  Synthetic
SEIEDVVRKVETLARESDERVKTLMEENKDLAEKLKKLVRDVVEKVKREVTRLLDEVRRRPEREVLDRIRETIKRIEDELRELLKTIDRLSRDLERKNRELRETSKKIIDDIRRELDKLPEDEELKKVKERLDEAERRSKELIDEADRLNREMLKRVKEAIKKVKETLDKALEDVERAVR

SEQ ID NO: 2055 - protein, 180 aa, Artificial Sequence; identical to SEQ ID NO: 2054
  Synthetic

SEQ ID NO: 2056 - protein, 173 aa, Artificial Sequence
  Synthetic
SDLERVEERLERAVREVEKLHEDSRRELRRVVKEVHDSTRKVEERNRKLVKRVEEADIREEMLEELRRRSEESIRRTRKVNEDLHRAIEEIERKDKELLDRAKKEVEELLKEVRERGDKKVIKKLEDMLREWAKLVEKSIKELKELLEELRKVSKKLVDDNDRLAEELKRRVD

SEQ ID NO: 2057 - protein, 173 aa, Artificial Sequence; identical to SEQ ID NO: 2056
  Synthetic

SEQ ID NO: 2058 - protein, 183 aa, Artificial Sequence
  Synthetic
DEVKALVDKVRELVRKLKEESDDLVRRNEELAKEVEKRSREVVEKVRDTVRKLLEELERADKSDKERLDRLITRIREKIDEVRRRIEELNREIEEVSKKSLKENKDTNREIRERIERLRKELDDKGVDKKVRDDLRKALEDVNRSSKRVEERDKEVLDEAHRSSTRVLETLKRMLERLDEKIR

SEQ ID NO: 2059 - protein, 183 aa, Artificial Sequence; identical to SEQ ID NO: 2058
  Synthetic

SEQ ID NO: 2060 - protein, 183 aa, Artificial Sequence
  Synthetic
DEVEKLVKKVEDLVKRLIEVSEDVVREVEKRLRELEKVHREALRKNRKLLEDLLRRLREADKTSDEEVKRLKEEIDEVSERSRRENDRLNEEVNRVTKEVTDKIRKVNEDIRRKIKELKKELDEKGVDDKVREKLKRALDRVNKSSREVEETLRRADKRLNDLVKEIKDEDKRMLERLERETQ

SEQ ID NO: 2061 - protein, 183 aa, Artificial Sequence; identical to SEQ ID NO: 2060
  Synthetic

SEQ ID NO: 2062 - protein, 183 aa, Artificial Sequence
  Synthetic
KEVEELVKEVRKLATKVIETSKRVVEELEKLAERLLRTSKEVVKRNKELVDDLLRRVREVSDGDEEKVRRLEEDIRRRSKKSEEDNDRLNEDINRKSKKVADELKKLNDDIRRELDELERELDREGVEEEVRKELRELLRRVNESSKDVKRRLEDLDREINRLSKRVKEEDRRALKEVEEEIK

SEQ ID NO: 2063 - protein, 183 aa, Artificial Sequence; identical to SEQ ID NO: 2062
  Synthetic

SEQ ID NO: 2064 - protein, 177 aa, Artificial Sequence
  Synthetic
SKEEEVKRVLREALERVEELNKRLNEEDKRMLDEVRKVNRDAERVLREALKRVEELLSRVSDKDRVKKLREDVKRIAEEVERLSRKSEEDVKKVHRESKRLSDENRKEVKRVEDRVRDKPKTDELVTDVERVVRELLDHVRRLVRESKELARELIRRSEEIVRTVEEVVRKLEKDVR

SEQ ID NO: 2065 - protein, 177 aa, Artificial Sequence; identical to SEQ ID NO: 2064
  Synthetic

SEQ ID NO: 2066 - protein, 177 aa, Artificial Sequence
  Synthetic
DKAKKVEELLRKAIEEVEKLNDEVNRTDEKMLRRVKELNDDVHRTLEEAIKRVRELLSRVSDEDRVRDLRKKVEDARREIEKLSEENEERVRRVHERSRKLSDDNRRRVKEVEDRIRKKEKTDEVVTEVEKLMRELLEHVKRLIDESRKLAADLEKHSRDIVEEVRRLVEELLRTVK

SEQ ID NO: 2067 - protein, 177 aa, Artificial Sequence; identical to SEQ ID NO: 2066
  Synthetic

SEQ ID NO: 2068 - protein, 177 aa, Artificial Sequence
  Synthetic
SKERDVERKVREVIKRVEDLNKRVHKTLEDVIREVEKLNEEVKTRVEKLIREVEELLKRVSDKDKVRRLRELVERVRRRIEELSRENKKRVEEVRKTIEDLSRENRELVERVRREIEKKEKTDRVVEEVERLLRELEKHSKEIEEAVDRLVRKLEEHVKKVVEEVARLVAELKERVK

SEQ ID NO: 2069 - protein, 177 aa, Artificial Sequence; identical to SEQ ID NO: 2068
  Synthetic

SEQ ID NO: 2070 - protein, 177 aa, Artificial Sequence
  Synthetic
SVAEEVKKVKDKLKKDVERLNEEDRRVLEKAKRESKKLLDEIKRVLEELERKLEELLRRDDDKDRVRDLRRKLDEVRKRVKKLIDDSRKRTKDVEKRTEDLNRETEELVRRVEKRVEDLPKAKEVVTEIRRVVKELLDKVRESIKETERVVRELLERNRKILKEIREVVRKLLEDVR

SEQ ID NO: 2071 - protein, 177 aa, Artificial Sequence; identical to SEQ ID NO: 2070
  Synthetic

SEQ ID NO: 2072 - protein, 186 aa, Artificial Sequence
  Synthetic
DEARKLLEELKRLAERVLKTDTDLLDESRRILEEVLKTNKKSIEDSKRLAEDVLRKVAREGGESERAKDLIRKLLEDLKELLKRSHETNKRLLEELRRLDEEIHRTNEKLLRELKALLDRIREAGLEEEVLDRVREIMERVLTESKELNDRIHTISRKAEEDSKRLNEEDRAIMEDVRRELKRVVD

SEQ ID NO: 2073 - protein, 186 aa, Artificial Sequence; identical to SEQ ID NO: 2072
  Synthetic

SEQ ID NO: 2074 - protein, 186 aa, Artificial Sequence
  Synthetic
SEAEKLLEELRTIAKEVLDRVRKMLRESEKLAEDVLRENKKSIEDSRRIAKKVLDELRRDGGEDESLRERIKRLLEELRRLLEESHKKNEELKRELEELNRRIEETIRRLEKRLKELLDRIEEAGLEEEVLERIRRIFEDVLRKLRKLLDEIHRISEKVKKESEELNEEDKRIVDDAERRLEDLER

SEQ ID NO: 2075 - protein, 186 aa, Artificial Sequence; identical to SEQ ID NO: 2074
  Synthetic

SEQ ID NO: 2076 - protein, 177 aa, Artificial Sequence
  Synthetic
SVKDAVEKILREAEETVKRLNEETKRRLDEAREESKRLIDEVRRILEKLKEVLDEVLRRVSDEEKVKRLEDVLRRIEKRVRDLLKEVEDNTRRSVERVRKLNEDDKRRLDEIKEEVRREPGAEELLERVKRLMDELEETSRRILEEVERVIRRNKELADRILKEVAELLKRLEEELR

SEQ ID NO: 2077 - protein, 177 aa, Artificial Sequence; identical to SEQ ID NO: 2076
  Synthetic

SEQ ID NO: 2078 - protein, 180 aa, Artificial Sequence
  Synthetic
DEAEELRKTVEDIMKELREELKRLEEESRRIMEELKKRLEKLIEDSRKAAEDLKREADRLTDKEKVKRLKEELERLNRTINKISKELLEKLRRLNTEINKTVDRLRERLERLAEDIRRRVDKRLLEEIKERVDRVKKELDEADKRINDSSREVEKTLEDLDRKINKSSEEVRRVLEEAER

SEQ ID NO: 2079 - protein, 180 aa, Artificial Sequence; identical to SEQ ID NO: 2078
  Synthetic

SEQ ID NO: 2080 - protein, 181 aa, Artificial Sequence
  Synthetic
DVEETLTRLLKEILDVVRKALRDTREIVRDVRRVSEEVLKELEDLLREVDREVKRVLAELKGKELLEELKKLLEEIRKVVKEIEDRLKRVTEESEENIEESLRELKRLLKEIKDDVDRVRKSGVEDTEVVKRIRELVEKLRELVKRSNDNLKEHVKRNKELAKRLLDELRKLVEDLKRARK

SEQ ID NO: 2081 - protein, 181 aa, Artificial Sequence; identical to SEQ ID NO: 2080
  Synthetic

SEQ ID NO: 2082 - protein, 176 aa, Artificial Sequence
  Synthetic
DMEEEVKKLIDEVRRVLEEVLKRVEDIIDASRRTLKKVVDDVRRIDEDVERELKEAEKRGVPKEVVEEVRDRLRRNHETVKKRIRDLEKENRDLIREIRKLIDKLRREIEELERRLDELGKEEVLREVDRLVKKVEKTARELLRLLEESIEKSKREAEKLLRSNEDVVRRVRERVR

SEQ ID NO: 2083 - protein, 176 aa, Artificial Sequence; identical to SEQ ID NO: 2082
  Synthetic

SEQ ID NO: 2084 - protein, 174 aa, Artificial Sequence
  Synthetic
DAEEDAKRLLKEVKDLLDEVRERHRELNERSRKVLEDARKTHEDLNEESRKTLEDRNIPEDILRKIEKHTRDTHRRAERLVRELREHSKKVHDTARRLVEELDKRIKELEERVRRERVGREARELLKRILKDIERILETVVRLSERDVEEVRKIMEELKKLSDDDLKRVEEEAR

SEQ ID NO: 2085 - protein, 174 aa, Artificial Sequence; identical to SEQ ID NO: 2084
  Synthetic

SEQ ID NO: 2086 - protein, 174 aa, Artificial Sequence
  Synthetic
SAREEIEELIKRVKDTSKKILEDVRRMIERVKRKSKKIKEDAKRLIERVEKLLRDSNLREDLLKRLEEEIRRIKEDIDRLIEKDERDIRRIEKEIEDLVRRNEDEIRKIEERIDKIDDKDELRELIKRLEDHSRRVVEEVARLVKELDEHSERVLKTLEDLIRRLDELVKRVTT

SEQ ID NO: 2087 - protein, 174 aa, Artificial Sequence; identical to SEQ ID NO: 2086
  Synthetic

SEQ ID NO: 2088 - protein, 174 aa, Artificial Sequence
  Synthetic
KAEETVKELLDRVERISERARKEVRELLERSKESTKRILDEAREMIKRSRDELRRVGTDDKELKKVEDHSEEVRREVDELIKKSEKHTEDIRREVEELVRRDREELRKVEDKARREGDLEDLERLARELARHSEDVMRRLRDLARKDKELSEDLVRRLRELVKRDLDLVKTVKE

SEQ ID NO: 2089 - protein, 174 aa, Artificial Sequence; identical to SEQ ID NO: 2088
  Synthetic

SEQ ID NO: 2090 - protein, 181 aa, Artificial Sequence
  Synthetic
SMEDRLREVNEKNNRLIEDATRKSERVLDKIRELLKEVKRRSEDVLRRIKELVEKLPVEERVKKEIKEDIDRLRKHSEELVRDVERIIRDLKRHSEEVVERVRRKDEETRREVEELARRGSDEKTLKELVEKIEKVAEDSLREAEEDVKRIEDLVREIKKRADDDVRRLEDRVRRLRERLE

SEQ ID NO: 2091 - protein, 181 aa, Artificial Sequence; identical to SEQ ID NO: 2090
  Synthetic

SEQ ID NO: 2092 - protein, 182 aa, Artificial Sequence
  Synthetic
SSVEEVVEEIERLVDELRKRAEELVRESEKLVAELERRIRKLVEDSEKLVKDLKDRAAKGVSEEELERLLEKLKRVAEKTNRTSEELLRELHDFNRRSEKEIDDLLRELEKRVKEVRDRINSDDKVLRKIEDVDRRLKELVRRVKKKDRDSNERVKELVKRLNDENEKVLKRVEELVRRDKT

SEQ ID NO: 2093 - protein, 182 aa, Artificial Sequence; identical to SEQ ID NO: 2092
  Synthetic

SEQ ID NO: 2094 - protein, 174 aa, Artificial Sequence
  Synthetic
DEIKKVVKDLEDLVKRLKDEVDRHVRENERIVEELKRNVDRHVEENRRLVKTLEDEVRKGVSEDELRKLLEEVERVTRRSKEDIDRMSKRVDDVTRESDEHIKELLKRVRDMAEKLPDSEDLKRVLKAVEDVVREAKERLERVNRTIREVVKRAREKLKRVHDTIRKVVDDARR

SEQ ID NO: 2095 - protein, 174 aa, Artificial Sequence; identical to SEQ ID NO: 2094
  Synthetic

SEQ ID NO: 2096 - protein, 178 aa, Artificial Sequence
  Synthetic
DEVEEVLKELKRSVDETRKLLKKIEDEAKRNVRRNEELAERVKRTVDRLVEELRDLIRRGVDKEKLDRLLRKIEKDLRELKRELEESLKESEKTIRRLKEELEDMLRRSREKIEELRRRGVDNEKLKRAEKEDEEVVRRIRELIERLREENEDVIRRAEELLREVVKRIEEVITEARR

SEQ ID NO: 2097 - protein, 178 aa, Artificial Sequence; identical to SEQ ID NO: 2096
  Synthetic

SEQ ID NO: 2098 - protein, 181 aa, Artificial Sequence
  Synthetic
SVEDEIRRVIEELDRLLRKDKETIKRVIKELRDLLREVKKRTEEMIRRLDELLETVTRRIKDEETMDRIDKEIKRLKEELRELLERSDREIRKLEERLERLVRESEKKIRDLKRRLDKARRDGSDVDDVRRLAKEVLDEVKKSVDETKRLADEVKTRVRKNVKDNTDLAREVLRRVAERAR

SEQ ID NO: 2099 - protein, 181 aa, Artificial Sequence; identical to SEQ ID NO: 2098
  Synthetic

SEQ ID NO: 2100 - protein, 174 aa, Artificial Sequence
  Synthetic
SRLEKLVKEIRDVVRELAERVKESVDRARKVVKEDLEHAEESVRRVKKVVKELEELVRKLDREEELRKTVEEIRRRNERSNRENRKHSKKVLDDDERSNRELERTMREIKDRIDKLDDDKDIKEVEKRLKDVLDEAHKLNKRTNDELKRVNKESNDLNRKTEEDLKRVLERAED

SEQ ID NO: 2101 - protein, 174 aa, Artificial Sequence; identical to SEQ ID NO: 2100
  Synthetic

SEQ ID NO: 2102 - protein, 174 aa, Artificial Sequence
  Synthetic
KRKEDLVEEIRKIVKAVEDEVRRSVKESEDSVRENLKEAERIVRELEEIVKELEKLVRDGLDRRDLRRVAREVKERLRELVERLRESIRDSNRRNKELHDRLRELVRRVAEELKKLDQDELLEDVRKKLEDVLREVEKLNKTVEDKNREVLRRIDELIRRVEEAIEDVRRKVEK

SEQ ID NO: 2103 - protein, 174 aa, Artificial Sequence; identical to SEQ ID NO: 2102
  Synthetic

SEQ ID NO: 2104 - protein, 174 aa, Artificial Sequence
  Synthetic
DEKEELVKRVEDKVKDLRDKVEKSVRESTESVRDNERRVRESVERSRDLVRRLDELVRAGLDEEEVKKVVKRIEEDNKRLHDELRRSVEASNEKNKKLHEDLKRLADEIRKEIDKLDQDEELERVRKELEEVLRRAKRLNEDVLEKNREVVRRAAELNKEVKKLLKEVLDRAKT

SEQ ID NO: 2105 - protein, 174 aa, Artificial Sequence; identical to SEQ ID NO: 2104
  Synthetic

SEQ ID NO: 2106 - protein, 175 aa, Artificial Sequence
  Synthetic
DEKEDIDRRLRDMVRRDRELARRSVEEARKLVDKNRKLVERVFRELKKLVDELDELVRRRDGPEDDIRRAVKKIKDDLRKLLKELDDHSKDTRRRDEESNRELERHTRELEERIRRLEDDKLLKDLEEELRKTREEVHRLNEETNRRLDKVNKDARDLVRELEELIEDVLRKVET

SEQ ID NO: 2107 - protein, 175 aa, Artificial Sequence; identical to SEQ ID NO: 2106
  Synthetic

SEQ ID NO: 2108 - protein, 174 aa, Artificial Sequence
  Synthetic
DEKETVEERLDRLVRHHEKLVRESVKELEELVRHNRELIKKSVEDARRLVEDLKRLIDEGVPEDDVRRTVREIEERNRESHKELEDHNRELRRRNKESHEELKKHIDEIRKELDKLPKDKLLDELRERIDKVNEDARKLNEEVERRITESEKEVTDLNRKVDEDIKRVLEKVER

SEQ ID NO: 2109 - protein, 174 aa, Artificial Sequence; identical to SEQ ID NO: 2108
  Synthetic

SEQ ID NO: 2110 - protein, 178 aa, Artificial Sequence
  Synthetic
SVEKVVKDVTDTIKKVVDDARRLSEEVVERNERVNKKLERLSREVVERIKDVLKRLRDKKSEKEEVERRIEKLVREHEEKTKKISEENKRSIREHERTSKEVEERIRRLVETLKELVRRGVPVEDLKRDADRIVEDIKRVVKELVKHAEKSVEDLERVVKEIVKDAERIVREIEKRVK

SEQ ID NO: 2111 - protein, 178 aa, Artificial Sequence; identical to SEQ ID NO: 2110
  Synthetic

SEQ ID NO: 2112 - protein, 182 aa, Artificial Sequence
  Synthetic
DVEEVVRRAREENKRSHDEVRELVKEVNERNKTVLERIKELAERALREIREVLREVDERKKDAREDLERLRKRVEDLLRRLEELLKTLEKRVRDLNDESRKLLKRLEEVNRELKKEIDDLEENRVETEKLKEDLDRIVRTSEELVRRLLERARRMVRETEELMRELLTEVKRIVEEVARRVK

SEQ ID NO: 2113 - protein, 182 aa, Artificial Sequence; identical to SEQ ID NO: 2112
  Synthetic

SEQ ID NO: 2114 - protein, 178 aa, Artificial Sequence
  Synthetic
DKEELLKRVTEKLEKVSDKSRRLIEEVEREVEKVHREVEERVRKVREDVRDVLRKIRAQGSSEEELEEVRDLARRIEETLKRILDEIKRVTEETREELKRLLEENRRLSEEIKDRLRRLRDDTELVLREVERLVAENERSVEELKKELEKLVRRNRTLVRKIEEDVRRLVEKITKRRE

SEQ ID NO: 2115 - protein, 178 aa, Artificial Sequence; identical to SEQ ID NO: 2114
  Synthetic

SEQ ID NO: 2116 - protein, 175 aa, Artificial Sequence
  Synthetic
SDSERVKKEAEDVLREIKRLIERNKRLAEETSERIRRLLEELKDLADKIVETLKDLIDRGEDKDTVREKIKDDLRDLERLAREVEDRIKKLTDELREHTRESEKEIKKIVEELRRKMKGREVVDEVEKRIRELLERLKDVSKKVEESNKKLLDEIRETVERVKKRIKELLEELRR

SEQ ID NO: 2117 - protein, 175 aa, Artificial Sequence; identical to SEQ ID NO: 2116
  Synthetic

SEQ ID NO: 2118 - protein, 176 aa, Artificial Sequence
  Synthetic
SLEEVVEEVKRRLTKLLKEIEDVIRRAEEESRRLLEEIERVIREAEKESRRLLEEIRTAGVREEELDKLRKHSEDVKRRLRKILEDNRKRSEEVAKELKELLEELKERIRKVEEDARDLDEDLVRKLAKELLDTLREVLKRIEEIAKEVLDLNDESLKEIRRIVEEDLRKLEEKMR

SEQ ID NO: 2119 - protein, 176 aa, Artificial Sequence; identical to SEQ ID NO: 2118
  Synthetic

SEQ ID NO: 2120 - protein, 173 aa, Artificial Sequence
  Synthetic
SEEEEVKRLLDDVREKVKRVAEENRRTVEEVKRVVDEVRRRNKETVERDRRELEKVARDEDKDRVVKEVRKSSADVVREDRESVRRAEEEIRKVMEDDKRSAEEVERIVRRAEEEVKVEEVVREIRRIVEDVRRKVKESVDRVKKILEKVRKDVEDSVREVERTMKKVSDDVT

SEQ ID NO: 2121 - protein, 173 aa, Artificial Sequence; identical to SEQ ID NO: 2120
  Synthetic

SEQ ID NO: 2122 - protein, 183 aa, Artificial Sequence
  Synthetic
SKEETAKRLIEEVRKVIEEVKKRAEDSNDHNRRSIEEVEKTLKRLIDEVRRVVEEVKEKISRTTDKDDIKRVLEEIKRIAEEVVRKIRRLLEEITRNSERIVRENEKLLREIEEIVRRVLEELKRLDLKEAVEEIERLMRKIKKVVEDSVRNVERTMREVEEKVRKVEEDVRRLAEDVTRAVK

SEQ ID NO: 2123 - protein, 183 aa, Artificial Sequence; identical to SEQ ID NO: 2122
  Synthetic

SEQ ID NO: 2124 - protein, 172 aa, Artificial Sequence
  Synthetic
DEVEEVLRRVRKIVKEDRDEAKDVREENRRLVEDDKRKVERVKEENRRLVEELRKRDEERVEEVVRRIEESARRVAKLSEETARDAERSVEKVVKDSERTVREIDKLVRDVVTDGDRRLLEEVERRVEKLVKESREIAKRSNDRTKDLVRRSEEILRESNERTRRLLEETER

SEQ ID NO: 2125 - protein, 172 aa, Artificial Sequence; identical to SEQ ID NO: 2124
  Synthetic

SEQ ID NO: 2126 - protein, 172 aa, Artificial Sequence
  Synthetic
SEAEKVLKDIEKIVKDLERNAKEVLDRNKRNVEDDKRAAEEVLEKLERIVREIDRGDKESVKEVVKEIRRLAEEVARASDETVRRNEKLAREVVEANKDVVRKIRKLVEDVVRDGDRELLKKVIRTVEKLLEDVHKLNEDSERAAKKLTDESREIAREVEERVERLLREEER

SEQ ID NO: 2127 - protein, 172 aa, Artificial Sequence; identical to SEQ ID NO: 2126
  Synthetic

SEQ ID NO: 2128 - protein, 174 aa, Artificial Sequence
  Synthetic
REVEEAEKRLREIVKEVTERNKEVVERLRDIVRKSEDDSRKSVETNKEIVDRVRRDVSDERVVREVKKVADEVVRRNERSAEDSRRVVEELVERSRESMERVREMVKRLVEEARKVTDRDVLRELIRTLEEVLKRSEDTNRELEKRIKEVVEDNRRKLEESIKESEKVVDEIRK

SEQ ID NO: 2129 - protein, 174 aa, Artificial Sequence; identical to SEQ ID NO: 2128
  Synthetic

SEQ ID NO: 2130 - protein, 174 aa, Artificial Sequence
  Synthetic
SEVEEAERRLKEIAEESKEISKRSVETNAKILDEVRRENTRVLETLKKILEEVERRVSDERVVREVEERVKELVRRSEESLRRVEEVIRRVLEENKESMRRSEERVRRLLEEARKVTDKDELERLIEDIREVVERNKKIADESIKRSRDVVKRSKETNDELEKTIREVVKRIED

SEQ ID NO: 2131 - protein, 174 aa, Artificial Sequence; identical to SEQ ID NO: 2130
  Synthetic

SEQ ID NO: 2132 - protein, 174 aa, Artificial Sequence
  Synthetic
DEVEEVLKRLRDILREAKELVERSVKRNEEIAEESRKESEESVRRNEEIVDAVRKRVDDKDKVARVEEVIRRVVEENRKSAKESLDMIRDVVRKNKKVLREAEEVVKRLVEEVRKVTDRRVLERLIRELERVLEELREKLKRSIEESEDVVRKNREILRRSIEKSEDVVRKIET

SEQ ID NO: 2133 - protein, 174 aa, Artificial Sequence; identical to SEQ ID NO: 2132
  Synthetic

SEQ ID NO: 2134 - protein, 182 aa, Artificial Sequence
  Synthetic
DVDEVLDTVRRLVEELLKKVERTSRESVRLAEKLLDEVRESSKRSKDESRRLLEEVREIDDSRKVARVVEESRRLMKEDLETVTEVVKRNEDSAREDEERVKRVAEEIRKIVADVFRRVKDKKREKVDKVRRDVERLVEEVEKTVKRSVEENRRIAEEIKRTVEESVKTNEEVVKRIEETAR

SEQ ID NO: 2135 - protein, 182 aa, Artificial Sequence; identical to SEQ ID NO: 2134
  Synthetic

SEQ ID NO: 2136 - protein, 172 aa, Artificial Sequence
  Synthetic
RERELVEEVERRLRESNERVKESVDRSRKLLETSHRRVKELVDRLKRVLERVEREVRNTTDKDRVRELVEEVKDAVRRVKEEVKKSVDEVREVVDKDVRDVRRSVKEVEEVARRVKVDELVKRVKEVVDHNERLAEESKKEVDDVVRRNEDLVRKVVEEVKDVVRRIKETVR

SEQ ID NO: 2137 - protein, 172 aa, Artificial Sequence; identical to SEQ ID NO: 2136
  Synthetic

SEQ ID NO: 2138 - protein, 172 aa, Artificial Sequence
  Synthetic
RERELVEEVERELKRSTREVEESIEESRKRLEESHRLVAELVKRLEEVLERVRDDVRRTRDKRRADKLVKDVEKAVRDVKREVDKSVKEVEDVVKEDKKRVDDSVTRVDEVLKRVDVDELRKRVEEVVRTNEELARESVRKVKEVVRRNKELVARVADKVREVVKRIRETLK

SEQ ID NO: 2139 - protein, 172 aa, Artificial Sequence; identical to SEQ ID NO: 2138
  Synthetic

SEQ ID NO: 2140 - protein, 179 aa, Artificial Sequence
  Synthetic
SVKEIVKKVVEENKKSDDELREFARRVAERNKRVVEELKKRLEDLVRKNEEVVDRLRKRSREEVVEKVKEDSKASVDTAKKVVDEVEERSRRSVKEVERVARESERKSRESVDRVRKAVRSEIVKEVVDRVRKSEESSRKLLEEIVRLVEKSLEEVKRILDEIRRRVEKSERDVRRLRK

SEQ ID NO: 2141 - protein, 179 aa, Artificial Sequence; identical to SEQ ID NO: 2140
  Synthetic

SEQ ID NO: 2142 - protein, 181 aa, Artificial Sequence
  Synthetic
DIVEELKENVKRVEETIRKIVKEARENVDDVLKKNKDNVEHDKRTAEEVLKEVKKSIKSDELRRKVEEVVERSRKTAKENEELARRVRDENEKVVKEVERLVRTVAEANKRIVEEIRRIEDKDTVRRLLEEASKLNKDVIRRVRELLKRLHERNEESLRRARELNERSRREAERVLEEVRK

SEQ ID NO: 2143 - protein, 181 aa, Artificial Sequence; identical to SEQ ID NO: 2142
  Synthetic

SEQ ID NO: 2144 - protein, 185 aa, Artificial Sequence
  Synthetic
SIVDRIREIMKEVREKVKRVVEENRRNAERIKRRVDEVVKTNRKTVDDVRRKVEDVVRKIKEKGREIERLLRRVEETVEESVERVERIAEKVVREHDKSVKDVERIVKRVTEVAEEVVKRLRRVDREVVEELLRRLRKIVKDVERELKRSTEELNRRSREVLKELEKSTRDVEKVVRELEERLRK

SEQ ID NO: 2145 - protein, 185 aa, Artificial Sequence; identical to SEQ ID NO: 2144
  Synthetic

SEQ ID NO: 2146 - protein, 185 aa, Artificial Sequence
  Synthetic
SVVDKIREIVRKSREDVRRVVEEIKDNARDLKRKAEEVVKEVKRIVDEVRETVRDVVEKIKELGREIEKLMERVRKAVEEVIRDIERIMREVLRLHEEVVERIERIVTEDEKKVRDVVAKVRRVREEEARKLLEDVKKSSDDVRRELKRLLEEVNRVSREAEKKLRELLERVKRIIDTLKDELRK

SEQ ID NO: 2147 - protein, 185 aa, Artificial Sequence; identical to SEQ ID NO: 2146
  Synthetic

SEQ ID NO: 2148 - protein, 185 aa, Artificial Sequence
  Synthetic
SVKDEIRRIVKESEEANRDVVEKIRRNVERIRRKVERVVEEIKRIVKEVKEKVEDVVRKNKEKGERIKKLVTDVEREVERVVEEIRRIAEKVTDVHRRVAEESKRSADEDKKTVDRVVERVDKAEEEVVRKLLEEVKKSSDESKDRSRRLLEEVNRISRDVERKLEELLRKVEKVVRDLEEELRR

SEQ ID NO: 2149 - protein, 185 aa, Artificial Sequence; identical to SEQ ID NO: 2148
  Synthetic

SEQ ID NO: 2150 - protein, 185 aa, Artificial Sequence
  Synthetic
SAEDVVRELKKRVDRSREDNTRVLEELKKAVEESRRLNEESNRRLEKIVRDIKEDLKRITTRKKELEDTVRRLLEKAEKVVRDSIKTSEETVTRVTDVVRRVIERSRETVTDLARVVEEVIRNVTREEVLRELAKIREDIERENKRVLEELEDVLRKVKRVNEEALKNSEDILRDIKEKVDRRRK

SEQ ID NO: 2151 - protein, 185 aa, Artificial Sequence; identical to SEQ ID NO: 2150
  Synthetic

SEQ ID NO: 2152 - protein, 180 aa, Artificial Sequence
  Synthetic
SVEELLRKLEEVLRKIREENERSLKELRDRAREIVKRNRETNRELEEVIKELEKRLSRRDKEKVEELVRRIRRIVERVVEEDRRTVEEIEKIAREVVKRDRDSMDRVRRTVEDVLRKATGSEDIVRKIERIVETIEREVRESVKKVEEIARDIRRKVDESVKNVEKLLRDVDKKARDRKK

SEQ ID NO: 2153 - protein, 180 aa, Artificial Sequence; identical to SEQ ID NO: 2152
  Synthetic

SEQ ID NO: 2154 - protein, 174 aa, Artificial Sequence
  Synthetic
SEEEKVKEEIRKLIEDSRRHVDELKKRLEKLLRDSEKNVEDAHRTNEKLARELKEKVKKTGTDKKLEEDLRRLLKKTEEYVKEHHRTNRELLEKVREEVKDHERRNRKLLEDLKKRGVNEDVLREAEEMLRDSNRELREILEKIERDLRKSDEELKKSVDDLRRLIKEVEDRLK

SEQ ID NO: 2155 - protein, 174 aa, Artificial Sequence; identical to SEQ ID NO: 2154
  Synthetic

SEQ ID NO: 2156 - protein, 174 aa, Artificial Sequence
  Synthetic
SREEELKKELKKRIEDSDRHVKEEKDELDRLIRESEEHVKRLKEEARKKLERLKDLVRKDGPTDELRKRLKDLLDEVKKMVEEHERDNRRKLKELEKRARDHHKRNRELLDEVRKAGVDEKVLREAEELLKEVDRKLERILEEIKRRLEKSDRDLRRVLKELEELIDEVRRRLE

SEQ ID NO: 2157 - protein, 174 aa, Artificial Sequence; identical to SEQ ID NO: 2156
  Synthetic

SEQ ID NO: 2158 - protein, 175 aa, Artificial Sequence
  Synthetic
SEKEDIKERIKELLKRSEENVRKLREENRELVRRSEENVKEIHKENEDLIRKLEKLRTRDVDKKKEAEDELRRLLRRTEKLLEDHKKLLEDILRRSRELLKEHEELLREIERELRERIKDEDVLREAKEALEESLRRLRKIHEDSERRLRESLEELRRSVEEAKRLLERLKRELD

SEQ ID NO: 2159 - protein, 175 aa, Artificial Sequence; identical to SEQ ID NO: 2158
  Synthetic

SEQ ID NO: 2160 - protein, 182 aa, Artificial Sequence
  Synthetic
DELDRVIEEAEELIRRIEEKLRRINETAKRLLDENLRHSERVHEEINRALERVRKKVEDAGLPKEVVETIKRLLEEVKKESEDLLRENKKLLDDVTKESKDLHDTVKELLKRVADELERLRRSGSDVKDVKDRLRRIIEELERRVRELKKRHEDILRELNRRSKELKDRHKKILEDLDRRVR

SEQ ID NO: 2161 - protein, 182 aa, Artificial Sequence; identical to SEQ ID NO: 2160
  Synthetic

SEQ ID NO: 2162 - protein, 182 aa, Artificial Sequence
  Synthetic
EEVERVIDEARRLLRENERHSEEVIEEITKLIRDVEEKVKRINDRAREALEDIREEVKRKGLPEEELKRIEELLDTVRRESEKMHETIKEKLKRVEDEVRKALKENRDLLKKLEDELRELRKTGKDVDELRKELERLIRDLNRLSKRIKEELKRRIEELEEEVKRLKEEHERIIEELRRRVK

SEQ ID NO: 2163 - protein, 182 aa, Artificial Sequence; identical to SEQ ID NO: 2162
  Synthetic

SEQ ID NO: 2164 - protein, 177 aa, Artificial Sequence
  Synthetic
EEVERAKKELEDRIREWEEDSKRLKDELKRIIKEWEDESRRVKEELRKIIDDLRKAVEKGISEETLRKIEREIEEILRKIEKKDRDILKRVEEIIEEIERRDRKILRELEKVLDELKKAGIDERILEEARRLVRRVHESSKRVLDDARRKLKELHERSKRVLDDVRRKLKKVADDTR

SEQ ID NO: 2165 - protein, 177 aa, Artificial Sequence; identical to SEQ ID NO: 2164
  Synthetic

SEQ ID NO: 2166 - protein, 177 aa, Artificial Sequence
  Synthetic
SEVERIKEELKRIIEDWDRRSRRLKEELKKEIKDWEEDSRRLKRELEEELKKLKEKVERGISEDELRELLRTVEKKIEEIERRDRRIKEEVEKKIEEAERRDEKIKREVEERLKELERRGVDKKIIDEARRLLEELHRKSREVAKEIRKEVKRLHDTSKKVLEDIRRAVKKVADDVK

SEQ ID NO: 2167 - protein, 177 aa, Artificial Sequence; identical to SEQ ID NO: 2166
  Synthetic

SEQ ID NO: 2168 - protein, 177 aa, Artificial Sequence
  Synthetic
SEVEKIKRDLEEIIRRWEEDIKRVKKRLDEEIRRWEEESKKVKKKLEDLIRRLEKEVADGRSEEDLKRLLKKLREELEKIERDDRRIAERVKRRLDEIRRRDEDIKKKLEDRLRELRERGVDEKILEDARREAERLHKTSKDVLKKVEDLLRRVNEHSRRVLEEAERRIRDVAEKTR

SEQ ID NO: 2169 - protein, 177 aa, Artificial Sequence; identical to SEQ ID NO: 2168
  Synthetic

SEQ ID NO: 2170 - protein, 177 aa, Artificial Sequence
  Synthetic
SEVEDIKRRLEKIIEDWRRKSKELEKRLEDIIDEWDKRSRKLKEDLKRIIEEARKAVDDGIDREEVKELKKRLEDEIEKIRETDREIEKRVDEAIREAEERDKEIAERVKDTLEKLRKAGVDEKVIKEAEDLLRELNESSRRVAKKAKDDLRELNERSRRALKEIRELLREVRERVE

SEQ ID NO: 2171 - protein, 177 aa, Artificial Sequence; identical to SEQ ID NO: 2170
  Synthetic

SEQ ID NO: 2172 - protein, 177 aa, Artificial Sequence
  Synthetic
REVEKIITDLEEVIRRVEEYLKRSDEELEKELRRVKRYLDKSDKDLRDEIRRVKEELDKRGGSEDVTRRLKELLRESEEHSERLKRRLDKLLKDSRDHSEELRERLRRLLEEARRRLKEVDKDELRARVEDVVRRAEDELRRHSELNKRLVDEARKLLEDHSRRNEELMRELRKLVE

SEQ ID NO: 2173 - protein, 177 aa, Artificial Sequence; identical to SEQ ID NO: 2172
  Synthetic

SEQ ID NO: 2174 - protein, 177 aa, Artificial Sequence
  Synthetic
SELEDILRKLEKRMTDVERYLDESNKDLERAVRRVVETLKRIDDEIRRLLEEVERDLDRKGGNEDLKRKLRELLKRLEEHSERLKRRADELLERSREHSERLKEKLRRLLEEVRRRLDEVDKDELETRLREITKTAEDELRKHSRTNEDIVRELKELVDEHEKELRKVVREAEDESR

SEQ ID NO: 2175 - protein, 177 aa, Artificial Sequence; identical to SEQ ID NO: 2174
  Synthetic

SEQ ID NO: 2176 - protein, 177 aa, Artificial Sequence
  Synthetic
SELEEILKDLERMIREVEDYLRKSNERLEDVLRKVKKKLDEINDELRRVVEEVKKKLEDKGGKRELTEKIDRLLDDARRHSEELKKELDDLLRESRKHSEDLKRELRRLLDEVRRLLSQVDAEELKRRLEEIVKRARDLLKEHSDDNERLVERAERLVEEHRDKVRKIVEELEEEVR

SEQ ID NO: 2177 - protein, 177 aa, Artificial Sequence; identical to SEQ ID NO: 2176
  Synthetic

SEQ ID NO: 2178 - protein, 178 aa, Artificial Sequence
  Synthetic
SEIERILEEVERAVRESDERLKDIVRKDREVVKRVKELLDKILRKDEEAIKRVIEDLERRGSDETLIRKLKKHLDENRRKVEELKRRLDEHLRRNDETVKDLIRKNNKELEEVRRRLKDITDKDELKKEVDKWVKRARDIVKELEEHSRRSTDELRRTVEDLERHSEESVRRAEKTSE

SEQ ID NO: 2179 - protein, 178 aa, Artificial Sequence; identical to SEQ ID NO: 2178
  Synthetic

SEQ ID NO: 2180 - protein, 183 aa, Artificial Sequence
  Synthetic
SELEKILKKIEDALKKVEEDLDRILEEDRKTLEEVKERLERDNEDLKRVVERVEEELKRRGRRRSELDKIRKELRDRLRDASKTHEDIKDELEKIHREVEDTIRRLKEELRDLVRRLEEMVRRDIDKTDELRKDVDRLVKRLKKLVDDLRRKSKETADRLRELVKRSRELSRTLAEELRKKTE

SEQ ID NO: 2181 - protein, 183 aa, Artificial Sequence; identical to SEQ ID NO: 2180
  Synthetic

SEQ ID NO: 2182 - protein, 178 aa, Artificial Sequence
  Synthetic
SEDEEAKKRVEDLVRELKKSNDELRRKSEESLRRLKELNDELRKRVRDLEDRLRKLVEDNVDKKDLKKTLDDIRKRLEELERRLKEEHKDLEDRTRELKKRHEDLLKRIKEELKRLADEGKISERIIEELDKELKKSSEETDEIVKRDEDVLRRSDEESRRIIKKLEDVLRRADERVK

SEQ ID NO: 2183 - protein, 178 aa, Artificial Sequence; identical to SEQ ID NO: 2182
  Synthetic

SEQ ID NO: 2184 - protein, 177 aa, Artificial Sequence
  Synthetic
SKDEEAKKRVEELTRKLEETVREDKKRIEDLAEKLKKVVDKLRRDSERTRKKLEEVERKGVDDEVVRRLKEEVERINKESREELKKLTKEVEDIIRDSERKLRRLEEEVRKLIEDLRRRGVDERILRELEKVLREVKKKHKETLRTLEELLREVAKRAEDINEEDRKVLEDVVRKLT

SEQ ID NO: 2185 - protein, 177 aa, Artificial Sequence; identical to SEQ ID NO: 2184
  Synthetic

SEQ ID NO: 2186 - protein, 179 aa, Artificial Sequence
  Synthetic
SEVEEILEDIRRRMTRVEERLRKSNKELEDAIREVTKRLKKSLDDLKKIIEEVKDVADKKGIDDKVKEKLKRDLDKHRRESEELVKKLDKKLKDHKRDSKRVIDELKRKVEDLERIVRKGELDAEELRKMVEDLTKELEDLVEEDKERVKRWRDELEEIVKRDRDKVERWREEAEKIKK

SEQ ID NO: 2187 - protein, 179 aa, Artificial Sequence; identical to SEQ ID NO: 2186
  Synthetic

SEQ ID NO: 2188 - protein, 179 aa, Artificial Sequence
  Synthetic
SELEEILRDVERLVRKVKTDLDDSLRRLKEVIDDVERLLRESNEKLRRVIKDVEDLADKKGIDDKEKKKLREELKEHDDRSRELVKELRKELKEHADDTERLKKEIEELLERLERIVRRGDLSEEALKKLVEDLRKRLREVVEEDKEKVRRWTEKAKRIVEDDKRRVEEWERKLEETVR

SEQ ID NO: 2189 - protein, 179 aa, Artificial Sequence; identical to SEQ ID NO: 2188
  Synthetic

SEQ ID NO: 2190 - protein, 179 aa, Artificial Sequence
  Synthetic
DEVERVLDDVRRKLEKVRRDLRRIDEDLRRVVETVKRLLDESNKDLERAVRKVKDELDKKVRDKKELEKVKKELDEMLEEHKKRAEDLKRRLEELLRRHHEELKKMERKLREELKRLEDAQLPEEELRRVVKELKEDLERLVRELEETVREVKEELEKVVRDDEKLVEEWKKRLEERSR

SEQ ID NO: 2191 - protein, 179 aa, Artificial Sequence; identical to SEQ ID NO: 2190
  Synthetic

SEQ ID NO: 2192 - protein, 179 aa, Artificial Sequence
  Synthetic
EEVERVLDDIRRVVEEVKRRLDEIDKKLTEENERVKEELDRIDDRLRKLVEEVKRRLDEKVGDKEELERVKRELDERLKKHHEEIERLKRELDEINKEHHRRIEELKKDLERLLKELEDAQLPREELEKVVEDIKRKLEKAVRDLEKTVKENKDRNDDIVRRVKKTVDDAEERLRRAVK

SEQ ID NO: 2193 - protein, 179 aa, Artificial Sequence; identical to SEQ ID NO: 2192
  Synthetic

SEQ ID NO: 2194 - protein, 175 aa, Artificial Sequence
  Synthetic
KEVEDILRELRRAVEEHRRRSEELLRRMRKLVKDLEDRIREILERARRSVKEIKDRIEKDGPDKRMEDLLRKDNEDLKRLAEEIRKVLEKLRRDIERVKRKNETDLRKWEEDLRRLNIDEEVLKEVKKLLDEVRKRSKDIVDEVRKLLEEVLKEAERVLREWKKLNDEVEDRLRQ

SEQ ID NO: 2195 - protein, 175 aa, Artificial Sequence; identical to SEQ ID NO: 2194
  Synthetic

SEQ ID NO: 2196 - protein, 180 aa, Artificial Sequence
  Synthetic
SEVEEVLKEVRKLIEDWRANSERILRRIERAIRELRRKIREWLERSKKKIKRLEEVIDKEVDKKEELREKIKRVREDNERRLKRLEEEIEEVRKELEDALRDDTRKLKELEKRLEDVRRDGVIDEDVLREARKRVDELEKRSREVAKRARDLLKEVRDKIKEVADRSRDLLRKVEEAIEK

SEQ ID NO: 2197 - protein, 180 aa, Artificial Sequence; identical to SEQ ID NO: 2196
  Synthetic

SEQ ID NO: 2198 - protein, 184 aa, Artificial Sequence
  Synthetic
SAEEVDRRVEELLKELERRSEEVLETWKELNKKLNKDAKDVTDEVRELLKELAELIKRDGLPEEDVRRLLERVKRTIEELKKELEKLSEDDKRRLERVREENKRIAERLRETIERIREDIKRGRSEEVVRRLLEDLRRLIDEWRKRSKEVEEEVRKSIEDIKRRIEEILRRIRKLIEEIRRRIK

SEQ ID NO: 2199 - protein, 184 aa, Artificial Sequence; identical to SEQ ID NO: 2198
  Synthetic

SEQ ID NO: 2200 - protein, 174 aa, Artificial Sequence
  Synthetic
DEDERVKDLLRRVKKTVDELLEELKREVKKSREEAKRLLKELEDRLRRSRKEAEKLRSSTDEDRLREESDRDRRELEDVREKLKRVLREDNERLKEVEKKLRDILRRMEDTLRRANIPREVLEEAKKILDDARRAIEEIIREWEEVNKEVDDRIDRIVEEWRKVNDKVNKDLTT

SEQ ID NO: 2201 - protein, 174 aa, Artificial Sequence; identical to SEQ ID NO: 2200
  Synthetic

SEQ ID NO: 2202 - protein, 174 aa, Artificial Sequence
  Synthetic
SEEEKIVEDLRREVKRLAERVKELIETSKKLVEDSKRHVKDLARRLRDIIRKLKKDLRDKGPTEDLKRKVDKVLEEAAREIKKHLDKNKELLERDERVVRDVERRLRELLKKVEDRGVERRALEELEKVVREIRRELERVHEETRRVIEESNRELEEILREAKELLEEVKKEAE

SEQ ID NO: 2203 - protein, 174 aa, Artificial Sequence; identical to SEQ ID NO: 2202
  Synthetic

SEQ ID NO: 2204 - protein, 187 aa, Artificial Sequence
  Synthetic
RELEKALEEAKRLLDKVRKELKKIHEESRRLLKETRDETRRVLEEAERLLREIKKLIDRLREDRDETEVKRLEDALKRLKEKVEEDVRRNEEHNKKLEEDDEKLLRDLERTIDTLERRIKEKAKRDIREEDVRRLVEELRDLIRELERKVKEVVETSRRLAEKDKEDNKRILEELRRLIRELEEDVR

SEQ ID NO: 2205 - protein, 187 aa, Artificial Sequence; identical to SEQ ID NO: 2204
  Synthetic

SEQ ID NO: 2206 - protein, 182 aa, Artificial Sequence
  Synthetic
EEIERVEKLVEEVVRRAEDELRRSAEHVDRVVERAERLVERSREHSKDLMRRLEEVLRRGEPRREVLTEVKEELDRHREENKRLVEELRKIVEDHERDNRRLVKKMREDIKRVEDRVRRELKDEDKAREIIERLRDVLRKIEEALERISRKLKEVLRRVEKKLEEDSRTLTRVVEEAKKKLD

SEQ ID NO: 2207 - protein, 182 aa, Artificial Sequence; identical to SEQ ID NO: 2206
  Synthetic

SEQ ID NO: 2208 - protein, 182 aa, Artificial Sequence
  Synthetic
KEIEELDEEVRRLVEELKRLSDESRKHSKRLVEELKKLLEDSKRHSEELARRARKVLREGRERDKVLKELEELVKRHEEDNKRIVDELRKLIEDHRRKVEELTERVRRLLETLTRKVKDKLKRREDAERIIKKLEDVMKRAEETNRRDIKKLEDVLKDVEDKLREDSKRLREVLEEVKKRLE

SEQ ID NO: 2209 - protein, 182 aa, Artificial Sequence; identical to SEQ ID NO: 2208
  Synthetic

SEQ ID NO: 2210 - protein, 182 aa, Artificial Sequence
  Synthetic
SEVEEILRDIERASEESKKTLDRILKKIEDASRRSKELSDKSLKEIRDAMEEIKKELDKGPDDEKVKRIKERLEELLRRLEEHNRRLKEEDDRLLKELRDKVRELKERDKKLLKDLERMVRRDVRKSEELDRRVKELVRKSEEELKDLDREVKELVRRSEELLEDDKRLVKEVVDEARERRR

SEQ ID NO: 2211 - protein, 182 aa, Artificial Sequence; identical to SEQ ID NO: 2210
  Synthetic

SEQ ID NO: 2212 - protein, 178 aa, Artificial Sequence
  Synthetic
DELEDVKRRVDEIVRELERLNEKLRRDVEEIVKRLKELNKRLLEEVRRTAEELKTKNVDRDRAKEELDEVRRKLKEVFDRAKRVHDEVRKRLEELKRRSKEVLDRVREDLKRLEREIPETEELREILKELKRVLDESRKLSKEIEEELERVLRDSERATEEILRELEKIIEEVERKVR

SEQ ID NO: 2213 - protein, 178 aa, Artificial Sequence; identical to SEQ ID NO: 2212
  Synthetic

SEQ ID NO: 2214 - protein, 178 aa, Artificial Sequence
  Synthetic
DELEEVRKRVERIMEELKRHLEKIAKDSKKSVDELKKHLEDADRKSEESVRKLERDNVDRDEARKLLEDNEREVRKVERNVEERNKRNEDEMKKVEDDVRRLNDEVRRDLERLAREIPRTRELEDILRRLEEVSERHRRSIEEILRRNEEASRRHRESIRRILEKNRRVLERVERKVE

SEQ ID NO: 2215 - protein, 178 aa, Artificial Sequence; identical to SEQ ID NO: 2214
  Synthetic

SEQ ID NO: 2216 - protein, 177 aa, Artificial Sequence
  Synthetic
EEDERAKERVKRVVEENDKVNEDVEREVRKVVKENEDVLEEIKRTVDKIVEDLERLVREGVSEEIVKKVKKDVKDVLKELEKKLRALSRKNKELLDRMEEVTRDLSRRNKELLDELKARNVDERILKELEDANEKSKKRSREILERLREANERIEETARRILKKLEEVLEEVERRTT

SEQ ID NO: 2217 - protein, 177 aa, Artificial Sequence; identical to SEQ ID NO: 2216
  Synthetic

SEQ ID NO: 2218 - protein, 174 aa, Artificial Sequence
  Synthetic
KEREDVKREVEKSVEDLRRHVRDVEEKVRKIKKELEDHVRELKKRVEEIRRRLKDLADRNVDREVVRKELEKLERELREEEKDVKRKNDDIRRRLKEIEDDVDRKNKESEERLRRSDIDESVLEELKRANERHKREIERIRKELEDVSKEHEDRIRRVLEELERVLEEVKRRVD

SEQ ID NO: 2219 - protein, 174 aa, Artificial Sequence; identical to SEQ ID NO: 2218
  Synthetic

SEQ ID NO: 2220 - protein, 175 aa, Artificial Sequence
  Synthetic
SEEERAKEEVEKHKRRLEKLVRDAERSSTEHERKLREIVERVKRELDKHEEKLRDIERKGDLTEELKRELDESTKRFKEKIERLKREIRRSSDEHRKRIKEIEDELKESTKRIKERLKRLEEVIREVEKISREVTKLLRDNLKRVEEVTERVERTLDELLERVKEVTKEVKERLR

SEQ ID NO: 2221 - protein, 175 aa, Artificial Sequence; identical to SEQ ID NO: 2220
  Synthetic

SEQ ID NO: 2222 - protein, 175 aa, Artificial Sequence
  Synthetic
SERERAEELVRRHEDRLEKLVRELEESSDRHKKRLKRLVEEVRRLIEEHRRRLDEIKKEGEQTEELTKELEDSDRAVEETIRRIEEELKRSSDRHRRKVTEIKRELDKSTRDIEEELKTLEEVLRKVRTVSTEVKKRLDRNLEEVKKLTEDVTRKLRRLLEEVNKITRDVKREIK

SEQ ID NO: 2223 - protein, 175 aa, Artificial Sequence; identical to SEQ ID NO: 2222
  Synthetic

SEQ ID NO: 2224 - protein, 175 aa, Artificial Sequence
  Synthetic
SELDEVRERLKRIVDDLRRRSEEVNKRLEEILREITERLREVNERLADIIRKIREDRKDAEESLRRLTKILEDAHRRSREVIEDLKRTLEELERRSRELIRRLEEILEKIRKDLEEGRREEVLKKLVEELRKRVEDMARTHDRLVEELKRKADEIVRRHEELVKDLKRKLEEVKT

SEQ ID NO: 2225 - protein, 175 aa, Artificial Sequence; identical to SEQ ID NO: 2224
  Synthetic

SEQ ID NO: 2226 - protein, 173 aa, Artificial Sequence
  Synthetic
SEEEKAKELVKELRKEAKKIVDEMRKLVEDHAKLVEELVRDHKRLVDEHRRLIEELKDREEKERILEELRRSDEKLKEDSERAKRELDRSTKELRETAERAKRRLTKLLDEIRREGVSEDVLRELEEIVRDIRKKIDDVIRKLEDISRKARKDSDDVNKRLNELTDDVRRKLT

SEQ ID NO: 2227 - protein, 173 aa, Artificial Sequence; identical to SEQ ID NO: 2226
  Synthetic

SEQ ID NO: 2228 - protein, 173 aa, Artificial Sequence
  Synthetic
EEEERARDLVRRLEEIVRRLVKEHEDLVRRHKELVDKLVREHEKLLEDHRKLVEELKDRERKEEILEELRRSTEEIERRSEEAKKRLRESDERLKEMSKRAKEEIKRLLEEIKRRGVSEEILERARKIVERLKTESDRVNKRLNEITRELEKRSDEVNTEVRRITKKVTEELK

SEQ ID NO: 2229 - protein, 173 aa, Artificial Sequence; identical to SEQ ID NO: 2228
  Synthetic

SEQ ID NO: 2230 - protein, 173 aa, Artificial Sequence
  Synthetic
SEEERADKLVKELKKMAEDIKREMDKLVEELKRTIDELRKKHKELVDRHRRLVEELARREDSERIERELKESDDRIKEESDRAKRKLEKLLKDLTDRAREAKKRLRRLLEEIERDGVSEEVLKTLKEIVRKIEEEIDRVEKRLRELVKELKDDSDEVNKEVNKITRKVKEELR

SEQ ID NO: 2231 - protein, 173 aa, Artificial Sequence; identical to SEQ ID NO: 2230
  Synthetic

SEQ ID NO: 2232 - protein, 175 aa, Artificial Sequence
  Synthetic
RTEEEAERTVEDVARKVKEWREELEEVVKEVRERVKRWKEEMRKLDEDTKKKLDDASDIDEELLKRLITEIKKINEDSKKKDKELEKEIRRLLEELKRKDEKLAEEIKRIIEDLRRRGVPEEVIERIERILKDLHRDSERVLRELKRILDELHRESKESNERNKKLVEDAERRTK

SEQ ID NO: 2233 - protein, 175 aa, Artificial Sequence; identical to SEQ ID NO: 2232
  Synthetic

SEQ ID NO: 2234 - protein, 175 aa, Artificial Sequence
  Synthetic
DTEKDAKRTVDDVRRKIREWEERLKKIVEEVKELVRELVERAKRLDEETEREAREAKDIDDDTLRKLKEKVERENRKSRKELEEIERRIEKLLEDMTEEDKKLEKEIRDILRDLRRRGVPEEVIKELEDLLRRLHEESKRVLDTLRRILEELRDRVRRSNKRNEEIVKELEDRSR

SEQ ID NO: 2235 - protein, 175 aa, Artificial Sequence; identical to SEQ ID NO: 2234
  Synthetic

SEQ ID NO: 2236 - protein, 175 aa, Artificial Sequence
  Synthetic
SEEDKAREVLKRVRDEVEKWRKELERLDEESKKKVDDLVRELEELDKKTDEELRRMQDATSEVLKDLERKIKERNEESKRKLKRIAEDAERTNRESKKKDEKLAEDIERILERLKEEGVPEEILKKIRRILEKLHEDSRRSNETNRRILEELEKRVRESNKRNEDILREVKRKAK

SEQ ID NO: 2237 - protein, 175 aa, Artificial Sequence; identical to SEQ ID NO: 2236
  Synthetic

SEQ ID NO: 2238 - protein, 175 aa, Artificial Sequence
  Synthetic
KTEEKVERDVERVKRDVDELIRRAEEVVKRVEDEVRKWIKELKELDDETERLVREASTVSSEDVKRLEEEAREINRESKKKDDELAKEVRRLLEDLRRLLRELAEKIRKIIEDLRREGVPEEVIKRIKKILDDVRRAVKEVLDRIRRILEKVHEDSRRSNKRNKEILDKVREDTR

SEQ ID NO: 2239 - protein, 175 aa, Artificial Sequence; identical to SEQ ID NO: 2238
  Synthetic

SEQ ID NO: 2240 - protein, 175 aa, Artificial Sequence
  Synthetic
SDEERVKEELKRILDEARRLLEESDEKLKRILDELRERLKESDERLKRILDKVRKDGLPEEVLRRLEKLVREHHKRNRELLKRVEDYVKEHHDRNRRLLEDVEKKVRELEELIDRGDLSSEELEKEVRELKKRLKKLIDESDKNVKEAEKELRELLRRSEEHVKELKKDADRESK

SEQ ID NO: 2241 - protein, 175 aa, Artificial Sequence; identical to SEQ ID NO: 2240
  Synthetic

SEQ ID NO: 2242 - protein, 175 aa, Artificial Sequence
  Synthetic
DDERRVKEKLKRILDESRDMLRRSDERVERSVRTLEDALRRSDEKLERILKKAEDDGVPREELERVRRYVKRHHEENRRLLKETREYAERHHRENRRLLKEDEEKIRRWEEILDRGELDSKELDDAVKKNKKESKETVDRSEKNVKELHDRNEELLRRSEKNVDDAKRRLDDTSR

SEQ ID NO: 2243 - protein, 175 aa, Artificial Sequence; identical to SEQ ID NO: 2242
  Synthetic

SEQ ID NO: 2244 - protein, 175 aa, Artificial Sequence
  Synthetic
DDEERVKKALDEILDRSRRRLEESDEKLDRSLKTLKKLLEESDRDLERILEKAERDGVPREVLEELKKLVEKHKKDNRELLRATEERVKRHKDTNRRLLEEDRRKIETWKEIIDRGELSREELEEAVRRNDEESKKTVDDSRRHVDELHRRNEKLIEESKDHVRRLEEELRKKSK

SEQ ID NO: 2245 - protein, 175 aa, Artificial Sequence; identical to SEQ ID NO: 2244
  Synthetic

SEQ ID NO: 2246 - protein, 175 aa, Artificial Sequence
  Synthetic
DEKEELSERVERVIRTAEKLLDEIKRKLEEIHKKANEDLERSLRKLEKVVKEVRDAGVSEDVERRLKRLVDEHRKKLEDIVRRSREELRELEKTLRDIKDEVKKELDRLEEVLRRGELREDELREDVERVKRRLEELIERLRKKVDEVKERHERMLKRSEEHVKELKDEVTEEAK

SEQ ID NO: 2247 - protein, 175 aa, Artificial Sequence; identical to SEQ ID NO: 2246
  Synthetic

SEQ ID NO: 2248 - protein, 174 aa, Artificial Sequence
  Synthetic
SEKEELEKEVEDLERRHREELEKLNRKSKKIDEDLKRIIEELNKVSKKIKEDLEREIRKGQRKDDLRRRLEEMLRRNKKDLDEVRKELEELLRENKRLLDKVEEDSKRRHEELERRNIDDEVRKRVEDINREVKEMLERNLRHTEEVIKKADREIEKNERHTREVIREAEERLR

SEQ ID NO: 2249 - protein, 174 aa, Artificial Sequence; identical to SEQ ID NO: 2248
  Synthetic

SEQ ID NO: 2250 - protein, 175 aa, Artificial Sequence
  Synthetic
SEVEEVDKKLETSHRDIEKRIREVLRELEESSRKLKRDVDEVLKKLEESHRRIAESLKTADEKLRRLEETTRTLIERLKRLVERVKELSDELARRLEEVEKELRERSRRLKEELKRVTDSKRLEELVKEHKRTLEEVKRRLEELVKKHRKDLEDLVREAEELVERHKRKLDETEK

SEQ ID NO: 2251 - protein, 175 aa, Artificial Sequence; identical to SEQ ID NO: 2250
  Synthetic

SEQ ID NO: 2252 - protein, 175 aa, Artificial Sequence
  Synthetic
SEVEEVDKEVERILDEARKALKRVEERVRKSHEDIRREIKRVEEDLERSSREIREKLKDQDRKLEELEKESKTLKDDLDRIRKEVEKLTRDVEKRLRELMERIKDEIRRVKEKLKRVTDAEKLKKLVEELEKEIRRLVDELDKLVRKHEEELDRLRKRMDELVKEHKKRLDDTAK

SEQ ID NO: 2253 - protein, 175 aa, Artificial Sequence; identical to SEQ ID NO: 2252
  Synthetic

SEQ ID NO: 2254 - protein, 184 aa, Artificial Sequence
  Synthetic
DDEERAKKRVKEAEKEIKDLAKESRDIVEKHRKEVEDVVREMERIVRELAEEAKDVVRKVKDDRDDDKIRELLERLKRKVEEILREIRKLLDDLRRKSEEVVRTNKELTDRLRKKIKDILDELEKEDVRTEVKDRLRDVLKKAEEMSKEVEDRLRKSSEDLREEVERVEEELKRVLRKIEEDIR

SEQ ID NO: 2255 - protein, 184 aa, Artificial Sequence; identical to SEQ ID NO: 2254
  Synthetic

SEQ ID NO: 2256 - protein, 184 aa, Artificial Sequence
  Synthetic
DDRERAKKTVDKVKEDLTRLVRRSEDLVRRHTEKLERVVEELERIVKELEERLKKVVDDVKDRRDREEIERLLRTLDREVKEIKKRIRELLKKLHDDSRRVVKENKELTDRAADEARRIEKRLEDEDVREDVKRTLREILRELEEASREVEERLKESDDRIRERVREVDEKLDRVLEELRKKMT

SEQ ID NO: 2257 - protein, 184 aa, Artificial Sequence; identical to SEQ ID NO: 2256
  Synthetic

SEQ ID NO: 2258 - protein, 174 aa, Artificial Sequence
  Synthetic
DELEKVRKELKEILDKLKDVLEESRERTDRLLRKAEEDLRRSDEETERLVKELKDAGVSEEALRRLEELVKRHKEELKKLLEELRRLIEEARDVHRRLLERIDRLIKELEEMLRRGTDKDELKKLVEDLDREVRKIVEELKELNKRIEDELRRIVDEARRSNEKVKELIDRLRK

SEQ ID NO: 2259 - protein, 174 aa, Artificial Sequence; identical to SEQ ID NO: 2258
  Synthetic

SEQ ID NO: 2260 - protein, 174 aa, Artificial Sequence
  Synthetic
DEVETVEREADRILKEDEDVLRRSKKITEDILDTLREMLERSERRTEEILKRLEEDGVSEEVKREIRERIKELKDRHRRIEEDVKRLADEHRERLKELLKDTKRIIEDIRRKLREGTDKDELKKLVDELKERSKETERELKESNDRLRKKVEDIRRELKRLNDEAEEAVRRLRT

SEQ ID NO: 2261 - protein, 174 aa, Artificial Sequence; identical to SEQ ID NO: 2260
  Synthetic

SEQ ID NO: 2262 - protein, 181 aa, Artificial Sequence
  Synthetic
SLIERIEEEIRRVIERVRRLVREIEDSDRKAKEDLERVVREDEETLRRVEKKLKDLNVPEEVLKRLREELEKVLRDSKELLKRMTEESERHNKEVRDEVRRLEKKLEKLVEDVKRTASRPTSEEEVKKLLEKVKRTARELEKVAEDMLRSNRELVKELLRTLEKSLRDSERTAEKLERAEK

SEQ ID NO: 2263 - protein, 181 aa, Artificial Sequence; identical to SEQ ID NO: 2262
  Synthetic

SEQ ID NO: 2264 - protein, 175 aa, Artificial Sequence
  Synthetic
DKEKEISDRLKDVLRKVRDVIEKDKRTNEEARKRVEDLVRKDEETLKRVLEEVRKGGLDEDKLRKLETEVRRILEESEKLLRDIRDRLRRSLEEIERLLEELERELRKIDEEVKRKEIPLEDLLRKVEKLAREITERLKESNERSRDLVEKLKREVKKSLRKSERLMEKARETLR

SEQ ID NO: 2265 - protein, 175 aa, Artificial Sequence; identical to SEQ ID NO: 2264
  Synthetic

SEQ ID NO: 2266 - protein, 174 aa, Artificial Sequence
  Synthetic
SEREEVKRTLTKAEEEARRLIKRDRDTNTEILKEATERSERDKDKLRKILEEVKKAGLPKELLDEVRERVRRHEEENKKVLEEVKKLIEDSKRETEELERRVKTKVDKLRDEIDKEPPDKDILDRVRRLVEELRRMIEELNDKSRKLVERLRKLLEDLNRHLEELVKRLRDKAK

SEQ ID NO: 2267 - protein, 174 aa, Artificial Sequence; identical to SEQ ID NO: 2266
  Synthetic

SEQ ID NO: 2268 - protein, 174 aa, Artificial Sequence
  Synthetic
SAKEELEDRIRDIVRRVRELITEVKKKNREILKRVEKVIKEVKETNERIEEEVRRGGLPEKLLRDITRKLRDHNRKVEEVMKRLRDLSRKHEKEVEDVLRELEKKAKELRDRLRKIEDIDKARKEVEDLVRDAKRVIEELERSLDELVRTLDELVRRLKKSSEDLMRELRKTTE

SEQ ID NO: 2269 - protein, 174 aa, Artificial Sequence; identical to SEQ ID NO: 2268
  Synthetic

SEQ ID NO: 2270 - protein, 174 aa, Artificial Sequence
  Synthetic
DEKKEVEKRLKEIEDEVRKMIKEVKETNRRILKKARDLIKKVEDTNKRILEEVRRGGRPEELLRRIEEELRKHNRDVDKVRKDVEDEVRKHDREVEEVLDRARRKVEEVARRVKRIEDIKKLEDEVRKLKDELRRELERLKRSSTDLARRLEEIIRRLERSSEDLERRLRERER

SEQ ID NO: 2271 - protein, 174 aa, Artificial Sequence; identical to SEQ ID NO: 2270
  Synthetic

SEQ ID NO: 2272 - protein, 174 aa, Artificial Sequence
  Synthetic
DEKEEVRKRLTDILRELEDLSRENERSNRRILDRVRELIERVKKTNKDILEEVERGGLPKDLLREIRERLRKHDKRVEEVLEEAERKVRDHDRENRRVTKEARELLEEARRRVERIEDIDKLRREVEELVRDLRRLIEELSRSSEELVKELEKLLRELEESSKKLAEELRKAVE

SEQ ID NO: 2273 - protein, 174 aa, Artificial Sequence; identical to SEQ ID NO: 2272
  Synthetic

SEQ ID NO: 2274 - protein, 181 aa, Artificial Sequence
  Synthetic
SSKERIKEKVDRIEERIREVVKEVEEELRRSTEEARRMVREVKRRLEDSNRKIKKFIDEKPEDEDLRRKEREIEELTRDIERKLRRIEEEIEKLSERLKRELDKISKTVEDLARKLEEKIKRITDSEELKRLLEDLRRKIEELAKELKKLLEEHKRRVDDVVRRMEELLKRHEELVRRIAK

SEQ ID NO: 2275 - protein, 181 aa, Artificial Sequence; identical to SEQ ID NO: 2274
  Synthetic

SEQ ID NO: 2276 - protein, 177 aa, Artificial Sequence
  Synthetic
SEAEEAKKTVEEISERLREALRRSEEETERILRENEKASERHKTEIEKITKELEDKLGDDKRVREEIERLRRNVEKLNKENREAAEELKRRAKEVHDRVRKKLRELEDKVDKLRRKGKDRDKDELKKVLKEIEDTVRRIVKELEDLNTEAEKASRKSVKELEEHLKRVEERVREEAK

SEQ ID NO: 2277 - protein, 177 aa, Artificial Sequence; identical to SEQ ID NO: 2276
  Synthetic

SEQ ID NO: 2278 - protein, 180 aa, Artificial Sequence
  Synthetic
ELKERLEKLLKDWADDSKRMRDELARLLKEWEDRSRKAKRDLEKILEENDDKVKKLDKVDKREAVEKELKELDERNKEVLKKLEDDDRKILEDAEELIERIERRDRKILEEVERDLSRISDEKVLREVKESAKKISRHSEKVLDEARKELERISEHSRRVLDRVRRESKKIVEDLRERKR

SEQ ID NO: 2279 - protein, 180 aa, Artificial Sequence; identical to SEQ ID NO: 2278
  Synthetic

SEQ ID NO: 2280 - protein, 178 aa, Artificial Sequence
  Synthetic
DIERELEEIVRRIKELIRRHKKRLEELVRELEELLRRHREELKKLVKRAAELVEELRRRNSRDETTLRRMREKLDRIRREIEKSTKEVEDELDKLLKEVDTSHKELEDRVRELAKELERKNVDDTVKDMLRKLLEEVKEASDRAREKLTDILRKIKKISEEVKREIDDIRKKIEDTAK

SEQ ID NO: 2281 - protein, 178 aa, Artificial Sequence; identical to SEQ ID NO: 2280
  Synthetic

SEQ ID NO: 2282 - protein, 178 aa, Artificial Sequence
  Synthetic
SIEEEAARIVEELRREVEEWERTLREIVERLRRLVEEHKRRLDELVAELKRLVDELRKENSKDETSLREIKERLERLEKEIDESDERMERELRKLTEEVKERNERLRRKVEEVKKELDDKNVREDIRRKLKEILDELDTITEKLKKELERIKREMKEASRRVREKIDRIRKEIEEVAR

SEQ ID NO: 2283 - protein, 178 aa, Artificial Sequence; identical to SEQ ID NO: 2282
  Synthetic

SEQ ID NO: 2284 - protein, 179 aa, Artificial Sequence
  Synthetic
DEIRELLKRIRDVAKRIKDKADRLNEKSRRKVEKLVRDVEKINEDTKRLLDRLRDSDQDRKDLERDVRRVKEDIKRLNEELDDRVRRILRELEKENEDSKREVDEIAKRIKDLLREIKLPEDVLRELERLLKEIEDLVRELNKTNKKIVDKARKDVKDVHRTNERLLREIERVVREKLK

SEQ ID NO: 2285 - protein, 179 aa, Artificial Sequence; identical to SEQ ID NO: 2284
  Synthetic

SEQ ID NO: 2286 - protein, 179 aa, Artificial Sequence
  Synthetic
SEAEELLRRLEKIIEDLERNARALLEKLKEEIRRLDKNLRDLLRRIEKIMRDLTRSDVDRDELRKEVDRLRKEIKKYLDDHREEVRKIVEEIKKELDDHRRRSKEIVDRIKRLLDEINLDEEVLKEIKRVLEEAEKVSEDLLREIKEVLDRAEELSRRLLKTLEDLLRDIERSVKERED

SEQ ID NO: 2287 - protein, 179 aa, Artificial Sequence; identical to SEQ ID NO: 2286
  Synthetic

SEQ ID NO: 2288 - protein, 174 aa, Artificial Sequence
  Synthetic
SSKEKVEELVKEIEEEDRRVLEDTRRLLEEIMRRDEDVLRKTDERIKEIEKELRDRVRDEELLRELLRELKEVLRRHREESKRSLEKLKKVMEDHDDESRRTLEELKEALRELKRDKDSKEAEDRLRDLVRRSREIAKRSRDHLRDLLRESEERVRASLEHVERLVKKLRKDAN

SEQ ID NO: 2289 - protein, 174 aa, Artificial Sequence; identical to SEQ ID NO: 2288
  Synthetic

SEQ ID NO: 2290 - protein, 178 aa, Artificial Sequence
  Synthetic
SEAEDLLRRLEEEIRRIKKRHKEVLDELRKLIKEVEDRHKELLDRLREEIRELEERDVSREDLKRLVEELRERVKRMNRESEKLVRDLEERAKELHRESEELVTRLERVIEDLERRIKGDRVKEELRRIVKEVRDEIRKANEKIKRLLDEVRERSKDMNRRLKEIVDRVTESLRRKAE

SEQ ID NO: 2291 - protein, 178 aa, Artificial Sequence; identical to SEQ ID NO: 2290
  Synthetic

SEQ ID NO: 2292 - protein, 180 aa, Artificial Sequence
  Synthetic
SEVDEALERIKRLIEDLERHVREWLKELREIIEDLRERVRKLLEDLERRIKELEEKARRTGPDRELEELLERLRRKIEEDIKKLEEDLREIEKRVEETNRRHEKKSRDVKREIDELLKRLRSKAVEDLERLVEELRKLSEEASRRSRKILEELRETVERVIKRLKELLKKLKEVVDELRR

SEQ ID NO: 2293 - protein, 180 aa, Artificial Sequence; identical to SEQ ID NO: 2292
  Synthetic

SEQ ID NO: 2294 - protein, 180 aa, Artificial Sequence
  Synthetic
DRAEKVLEDIRKLIEEMRKHAEEWERRAREAVKELRKEVTDWRRRLRKLLEDLEEKVRREGNDERLERLAEELLKEVKKVNEETKRRVKELLDRLRKENEEHDRLSKKLLDEIREKLKSLRSEVVRRLEKLVEDLRKINEDVNRRSRELVETLRDDVRKVNEESKRILEEVKKILDDSKR

SEQ ID NO: 2295 - protein, 180 aa, Artificial Sequence; identical to SEQ ID NO: 2294
  Synthetic

SEQ ID NO: 2296 - protein, 181 aa, Artificial Sequence
  Synthetic
DLRRELRRVLEESKKHVKELVRELDEDLTRWERRVEELVKRLRDVLRKLEKEVDELEKKPTREEELREAVERLRRVIRELEERNKRTLDEADKRVKDLKRKLRKVVEDHRRRIKELEDRVEGDRVKEELRELVRESDKIAEEIIEKLDRDVKKVKKDHERIDEELKRKLKEVEERVERIRT

SEQ ID NO: 2297 - protein, 181 aa, Artificial Sequence; identical to SEQ ID NO: 2296
  Synthetic

SEQ ID NO: 2298 - protein, 184 aa, Artificial Sequence
  Synthetic
SEVEETLREIKEDIKRSKKEWDDLLKTIKELIEDSKRKWDKLLRDVEELIRELLERLRRDGPTEEIDRTVKKIIDDVEELLRKLEKDDRDADERIDRLVKELVERDKRSLDKLKERLDKLKDRVPDRAERDVERIIREAKKLTDKVREDVERLREEWERLVREVKERIKRLLEDLRRLVEETRR

SEQ ID NO: 2299 - protein, 184 aa, Artificial Sequence; identical to SEQ ID NO: 2298
  Synthetic

SEQ ID NO: 2300 - protein, 184 aa, Artificial Sequence
  Synthetic
DEAERLLEEAERIIEKSREEWERLLERIKRLIETLRKRYEDDLRESEKRIEELLRKARRDGPTEELRREVEKINRDNKESLERWNREVEEILRELKELVERLEERDRRLIEELKRRLERLRERVSDRVAREVERILRELKKLTDDMKKRAKELIDELKRLSEEMHRRIEKSNEDLKRLVDDVDR

SEQ ID NO: 2301 - protein, 184 aa, Artificial Sequence; identical to SEQ ID NO: 2300
  Synthetic

SEQ ID NO: 2302 - protein, 185 aa, Artificial Sequence
  Synthetic
DEAEDILRRIRELIERSKRKWDELLREIKKLIEESRREWEELLRRIREIIERLKRLAERDVDDKDRLKEEVKRIKEELKREVDRLEERNRELLERLKKEVEKLKREDDEIVKELEELLTRAKDRVDERVKEEMKRLIEDLKRVSEEVKRELDKLIEELKEVSERASKRLKELIDDLDRLVKEVEK

SEQ ID NO: 2303 - protein, 185 aa, Artificial Sequence; identical to SEQ ID NO: 2302
  Synthetic

SEQ ID NO: 2304 - protein, 178 aa, Artificial Sequence
  Synthetic
SEDEKAIEELKKEIERLRRLLEELRKHVRRLIEEIKRLVEESKRHVEELIREIDDLRRRDQREEEVKRSVEKIKEDLERHERDVKRRLDEIREALKRHEEDTKRVDDELRERIERLDRRLKGRKEVTDIIRELKEVLDEIKRTSEELLRTIEEIVRDAERKNRELLKELKKVLDEVEK

SEQ ID NO: 2305 - protein, 178 aa, Artificial Sequence; identical to SEQ ID NO: 2304
  Synthetic

SEQ ID NO: 2306 - protein, 178 aa, Artificial Sequence
  Synthetic
DEDEELIKRLRDRIREIRKLVEDSARNVKRLIDEDERLARRSLRHLEETLKEIERKAREDQSEDTVREAVERIKRDLERHRRESKRLLETSDKLLRDHEEEVKKLLERIKRVIEDLDRKLRGRDEVREVLKEIRELVKELKERNDELLTRWKESIKRVEEEDERILREIERRVEEVER

SEQ ID NO: 2307 - protein, 178 aa, Artificial Sequence; identical to SEQ ID NO: 2306
  Synthetic

SEQ ID NO: 2308 - protein, 177 aa, Artificial Sequence
  Synthetic
RAEEEVKRLLKEDNETLKRIEDDVRRLLRKNNESIREAEKTNRELVKRVEDIIRRARERGVDESVLADLRRVLKELKEESDKVLDELRKLNEKLREEVRELKRELDEENKELDREIKEGQPLEELLERIKELNERTKKKVADLRRVAKRLDEETERKVRETERRWRDVLDKVRKKVK

SEQ ID NO: 2309 - protein, 177 aa, Artificial Sequence; identical to SEQ ID NO: 2308
  Synthetic

SEQ ID NO: 2310 - protein, 178 aa, Artificial Sequence
  Synthetic
REVEEVLERLKELLREHEKHAKEVEDRLRELIRENKEHAREMLERLEKILDELKKIRDSEEVLRETLKRIDEEVRRLIRHHEELSKEVLKEIEDIIRHHRKESRRSEEEVREIEKRITDEEALRELRRLLDEIRRVNRKVEERIKEVLKKIDEDNKEVVRRLEEALEKIREVIERTAT

SEQ ID NO: 2311 - protein, 178 aa, Artificial Sequence; identical to SEQ ID NO: 2310
  Synthetic

SEQ ID NO: 2312 - protein, 176 aa, Artificial Sequence
  Synthetic
KAKEDVKRALDEWKEVNDRVNEELKKAIDTWREVNRKVKEDVDRLVKEIEELIRRVRENGADERLLEKLKRELEKLTEDVKRRLKEDNDRLEKLLTDLKRESDKDREELKELARRLDELRREDVKRELKRVIEETRERAKRLLEDLRRLIEETKKLAEELLARAKEIIDRIREAAR

SEQ ID NO: 2313 - protein, 176 aa, Artificial Sequence; identical to SEQ ID NO: 2312
  Synthetic

SEQ ID NO: 2314 - protein, 182 aa, Artificial Sequence
  Synthetic
RAEEELDRLSREVEKVSKKAREDLEEMRKALEDVSRRVKEKLRRILEEIKEAIKDVKRRTNGSSKKLKEIEDLLRKLEEDLRDLERRVEESHERLEREVRRLLKEVDESSKRLREEVKRLRDEPPSRELIREVEKLIEDHRRRLEEIVETVRRLVDEHRRRLERIVREAAKLVKDIKRELEK

SEQ ID NO: 2315 - protein, 182 aa, Artificial Sequence; identical to SEQ ID NO: 2314
  Synthetic

SEQ ID NO: 2316 - protein, 182 aa, Artificial Sequence
  Synthetic
SVKEKLRRISKELEKASRDDERENRRILKEARDVIREAADKIRRIEEELRKIIDRVRKETNGSEDELRRIEELMRRADTELRKLEKTIEDLLREVEERVKESLERSRRSSERLRELVRDLDEKPPSEEIIEEVKRLVDEHKKRLDENVKRLKELVDRLRETLERLVDRLRKLVETLKRESDR

SEQ ID NO: 2317 - protein, 182 aa, Artificial Sequence; identical to SEQ ID NO: 2316
  Synthetic

SEQ ID NO: 2318 - protein, 182 aa, Artificial Sequence
  Synthetic
KVEEDLKRIKKEIKDAADEDREKNREIMKRLNDVTREVEERLRKILEDLERLVRRVKEEVNGRKEELDRIEELLRRAREELEKLEEDVRRDNKELRERVRESLERSDELVRRLEDELRRLEEKPPSEELIKRVKELVREAKERLKDNVRRLEELVKEWKRKLKEIVDRVRELVKDLERRLKE

SEQ ID NO: 2319 - protein, 182 aa, Artificial Sequence; identical to SEQ ID NO: 2318
  Synthetic

SEQ ID NO: 2320 - protein, 175 aa, Artificial Sequence
  Synthetic
SEKEKIVKDVEELIREAEELVRRLLKRLKELNDESEKTARDLVRKNEETLKELKDVVDRRVKDKDTLRKRVKELHDESRDDLRKLDELNRRVERELEKLVEELKRTIEELKKRLEEAPRARELDELIKKLDEVLRRAEKEAEELIRDHRRISREVKERIKDLNRRIERILREAEK

SEQ ID NO: 2321 - protein, 175 aa, Artificial Sequence; identical to SEQ ID NO: 2320
  Synthetic

SEQ ID NO: 2322 - protein, 181 aa, Artificial Sequence
  Synthetic
SLEEIVKRVEEDIRRIIEELRRRIEEADRKIAEIIDRLRKTVEKVNKEIEDLIRELKKKEGDDRDVERKLRELEELLRRHTERVRDVERRLKKLLEDHHREVREILKRAEKLLRDLSEELRTITDDKRVRELVEEVKKKLRDLVEEVRESVKRLEDTLRRVEEEIRTTARELLRRLREELE

SEQ ID NO: 2323 - protein, 181 aa, Artificial Sequence; identical to SEQ ID NO: 2322
  Synthetic

SEQ ID NO: 2324 - protein, 181 aa, Artificial Sequence
  Synthetic
SLEEEVRETVKRLRKEVEDWLREVEKVLEDLLRELKKSIEETKKVAKELEDKLRDVKRRNVDEDEVRRLKEEAKRTIEELEKKNKELERKIEKIVRELREKDKELDKRVEDVLDELRKRLTDERIRRTLEKAREEVKRLSAETKRLIEEVKRRLDELLKRDNDIIDDARRRVKKVLDEIET

SEQ ID NO: 2325 - protein, 181 aa, Artificial Sequence; identical to SEQ ID NO: 2324
  Synthetic

SEQ ID NO: 2326 - protein, 181 aa, Artificial Sequence
  Synthetic
DLEEELRKVVEDLERKLRESIRETEEVMRRLEESVEESIRKTEEVVKRLREKLEDVKRRNVDEEVVKKLEREVKEVIDRLREENRRHHETVKEIIKELEEKNRRLKKEAEDVIRELEKRLKSDEIRDTVRKAKEDVERLLEEDNRRIKEVLDRVAKLNKRDNETIERAEEEARKVLREIEK

SEQ ID NO: 2327 - protein, 181 aa, Artificial Sequence; identical to SEQ ID NO: 2326
  Synthetic

SEQ ID NO: 2328 - protein, 181 aa, Artificial Sequence
  Synthetic
DIEEEIREEVERLRRTLKELADRIKKLVDELREKLRRWLEEVEEVLRRLIEDLRRVKEENVDEKVVDDLEKKVRKLVEELKEKDKRLNEEAKEVIRKVEEEIKRHHDEVKKRLDELRKRVKTEELEKRVREAEEEVRRVNKKLKDDLDKAREDLKEFSDRTRRMIKAVERDVKRVLDEIRR

SEQ ID NO: 2329 - protein, 181 aa, Artificial Sequence; identical to SEQ ID NO: 2328
  Synthetic

SEQ ID NO: 2330 - protein, 177 aa, Artificial Sequence
  Synthetic
SVEETIKRILEEVEELIREVKERNERIERRAERLIEEVKRSNDEIKKEVRTAIEKVIRKREDDRVRKVLRELEKAVEDHDREVEKVVEEVRRLSKKHLDEVERALEELRRRLKEIKDRPVDKEKVDKLVKDLRRVIEELRKSLEDLERRLDDILRRLKESSDELVRELRRLLKEMEK

SEQ ID NO: 2331 - protein, 177 aa, Artificial Sequence; identical to SEQ ID NO: 2330
  Synthetic

SEQ ID NO: 2332 - protein, 177 aa, Artificial Sequence
  Synthetic
SVEEALDEIEKKVEEMIREVKETNDRVRRKVKELSEKSKTENERVVREARELIREVEREREEEEVRRILEEVERLSKKHLDENRRLVEEIDKEVEDHNREVERVLEEARRRLDDIKKKPVDKKDVDDLDRDLEKKLRDLKDSSRKLVKRVEDLVRESEDTVRKLIERLERLIRETKR

SEQ ID NO: 2333 - protein, 177 aa, Artificial Sequence; identical to SEQ ID NO: 2332
  Synthetic

SEQ ID NO: 2334 - protein, 177 aa, Artificial Sequence
  Synthetic
KVEEELDKILKEVEDLVRRDEEEIKRILEEVKELIRKVKETNDKVEREMRKLVEEVKKREEREEVKKVEREAEKKVRDHKREVKRVLEELARELKELLDETRRLLKDIRREVEDIKRKPVDEDSVRELVKRLRERAEESKKRTKDLEDKIRTKIEELERSSKELTDELRTLIREAER

SEQ ID NO: 2335 - protein, 177 aa, Artificial Sequence; identical to SEQ ID NO: 2334
  Synthetic

SEQ ID NO: 2336 - protein, 184 aa, Artificial Sequence
  Synthetic
SVEEAIKEILRELEKVNEDSKRLSDRNLKELEKALRDAKKSVEEILRELEKALDEVRKNGLSEELERRVREVLERIKEKLDRLRKTIKEALDRSRKKTEELSRENERLLRDIRRRVEEVRKDDSREDVERILKEIKDEVDRVRKENERVNRESEDESRKLVEELKKVLRRLKEEVRRIVEELRT

SEQ ID NO: 2337 - protein, 184 aa, Artificial Sequence; identical to SEQ ID NO: 2336
  Synthetic

SEQ ID NO: 2338 - protein, 182 aa, Artificial Sequence
  Synthetic
EVEERLEEILRRLERAVEDWKRKNEKILKELRDVVRESKKRTREIEKKIEDAARDVLREVNTDKKKLEEIKRLLEEVRKEIEDLLRTNEKLLEDLERLSKDDERRVRELLKEVRERVDKLKKDKVSKEVVKELEKDVRRIVEELKDSLRRLKEKVEEVARTVKKLNEELDDSVREIVERLRK

SEQ ID NO: 2339 - protein, 182 aa, Artificial Sequence; identical to SEQ ID NO: 2338
  Synthetic

SEQ ID NO: 2340 - protein, 182 aa, Artificial Sequence
  Synthetic
NVEEELDRIRREAEKVVKESRELTREILERAREAVEKSEEDTRRILERLERVVKRVKKDVNDREEKLKRIEDIVRRVRESVKKLEEDNKKILRELEESIRRWLEAIEKILEDLRREIKKLKDDRVSEEVLDELRKKVKKLVDELRTEDRRLEEEVKKIVRDAEKRNKELEDEIRRLAEELEK

SEQ ID NO: 2341 - protein, 182 aa, Artificial Sequence; identical to SEQ ID NO: 2340
  Synthetic

SEQ ID NO: 2342 - protein, 176 aa, Artificial Sequence
  Synthetic
SETETAVKKLKKLVDDLKREVERLVERLRELVRENSEKSRELVKRSDDLVRELLEKVKRRDLREDELRKEAEDLRETDDDLLRDDERHVKELEERMREELKRLREEARKLEEDIRKGEVDSELVKTVEEELKKVLEEVDRLVRKILEDLRRSLEESKRLSEESKKKLEDVLDRARR

SEQ ID NO: 2343 - protein, 176 aa, Artificial Sequence; identical to SEQ ID NO: 2342
  Synthetic

SEQ ID NO: 2344 - protein, 176 aa, Artificial Sequence
  Synthetic
RELEEAVKKLKKKVEDNTRTSRKLVTDLEREVEELKKEVEEVVRKSKELVRELKKKVDRRDLDKRELRKEVKELEERDERLLEKLERAVEELERKIRELLERDRRHVDKLRKDIEDGEVDSELVERVKEELKRSLEESDKLVEDVRRKLKEVLDDIRRLSEESKRELRDVLREADK

SEQ ID NO: 2345 - protein, 176 aa, Artificial Sequence; identical to SEQ ID NO: 2344
  Synthetic

SEQ ID NO: 2346 - protein, 182 aa, Artificial Sequence
  Synthetic
ELEEIVKDARRRIKELIDEARRTSEEVVERIKELLKRAEEISREARKRLTELLEELKKTVKDEDTLRRLLTELERLIREHDRLSREVLERLKKLIEDHKRKSDELLERLKRLLEELEDMVRRRIDKKEELRKIVEDILRTIKKLLEELRDDARRLLEEIKRLLEELERHVRKLLKEIDERIK

SEQ ID NO: 2347 - protein, 182 aa, Artificial Sequence; identical to SEQ ID NO: 2346
  Synthetic

SEQ ID NO: 2348 - protein, 182 aa, Artificial Sequence
  Synthetic
ELEEIARKAKEDIERLVEEARRISEEVKRELTELVERLRRISEEVRKRIEDLADELRKKVEDKDTLKRLEEEIRELAERHERKSRELEKRLKELVDTHRKKSEDLLRELKRLVEELERVLRRDIKDKKTLKEKVEDILRRIRELLRELRENARELVKEIERLIRELEKDAKRILKKIEDAIR

SEQ ID NO: 2349 - protein, 182 aa, Artificial Sequence; identical to SEQ ID NO: 2348
  Synthetic

SEQ ID NO: 2350 - protein, 181 aa, Artificial Sequence
  Synthetic
SVEELVKEIEKRLDELVREIEKTNKKVEDDIRKMLEDIKRVHDKSNEDLEKLVKELREKLKDEKRLEEITRRVEKMKRDNNEVLKELEERVRRILEHHRRLSDRVREEAEDIRRRLRELLERGLDLKDIEKVARDILRRVKKILEENRKHAEKARRELEKLLRESKRLVDELLRRAEEEKR

SEQ ID NO: 2351 - protein, 181 aa, Artificial Sequence; identical to SEQ ID NO: 2350
  Synthetic

SEQ ID NO: 2352 - protein, 175 aa, Artificial Sequence
  Synthetic
SREDRARELVKRILDEHKKILEDVEELAKELLRRHEELLKTLRELMRRIEEDLKRLEDEDVDREKAKRRVDELRKTLKKVLDELHKESRRLLKTLEEVLRRIDKRSREIKEELEKGEIDSEILKTVTRLSEELNRRIREVVRKVEEDLEDLNRRLKKIADEIEERIKEILRRIEK

SEQ ID NO: 2353 - protein, 175 aa, Artificial Sequence; identical to SEQ ID NO: 2352
  Synthetic

SEQ ID NO: 2354 - protein, 177 aa, Artificial Sequence
  Synthetic
SIEDVVRRIREEDRRLHEEIRKVVDEIRKRLEDALRSHEERVREVLERIKKLLEELKRRGTDKRVEKEVEDIERRLKEVLEESRDIVRRLEEELKRTLDKIRRENEKSEDELKKLTDERLDEKDLRKKLREIEEKNERLLRELERLLEEIRRTLEDLNRKLDEEIKKLERRLKERDR

SEQ ID NO: 2355 - protein, 177 aa, Artificial Sequence; identical to SEQ ID NO: 2354
  Synthetic

SEQ ID NO: 2356 - protein, 184 aa, Artificial Sequence
  Synthetic
SLKELIDEVERRLREVNRRARELVEEVKERLRRVNEESRELLREIEERLEDVLRELEEGDLREEELRRLAEDIKRVKDEVKKLFDDHRDTNRRIEDDLRKKVEEHHERNRRIIEELKRLLDRGNGEEEIKELVKRARELVKRSKEHVDELMETAKRLVDESRKHAEELFRELKKLIEELREKIR

SEQ ID NO: 2357 - protein, 184 aa, Artificial Sequence; identical to SEQ ID NO: 2356
  Synthetic

SEQ ID NO: 2358 - protein, 176 aa, Artificial Sequence
  Synthetic
SEVEKLVEDLRREVKRHSEKVERLVKELRDDLERWKERLEEIMRRLEKLVRDLEELLRRGDLSEESIKRLIDDAERRLRELLKRIREEIEEHRKKSEDLRREAKETVDELRERIERMNLDEELVREVKERLERSRERVDKLLRDNHKRLKEVLDEAKKLIDRVRKLLRRVLEEAKK

SEQ ID NO: 2359 - protein, 176 aa, Artificial Sequence; identical to SEQ ID NO: 2358
  Synthetic

SEQ ID NO: 2360 - protein, 176 aa, Artificial Sequence
  Synthetic
SDVERLITELADSVRDHSRDVRRVVEELEKLLRDWERDIEDIVEKLDRLVRTLEELLRRGELSEDLIREVVKDIDRKLKKVAREIEKKIRDHERKSRKLLEDVEKTSRENREEIKKANAREDLVRTVEKLNTESLDEVRKLVKKNHEDLKRVLDKAKKLIEEVRKKLEEVLDEARK

SEQ ID NO: 2361 - protein, 176 aa, Artificial Sequence; identical to SEQ ID NO: 2360
  Synthetic

SEQ ID NO: 2362 - protein, 178 aa, Artificial Sequence
  Synthetic
TLEEILKEVAERVKKANEDSRRILEKVKRDVETVNRENEKILKKAAEDVKRVLDEARKRNVDEKLLRELERLLEELKKEVEKLNRRNEKLLRDLARRVRELDERNKELLDRLADLVRRGDLSEKELREMIEKLKRDNERMLRELERRIEELKRDNDRVNEESKRLVDELKRDAEEKLK

SEQ ID NO: 2363 - protein, 178 aa, Artificial Sequence; identical to SEQ ID NO: 2362
  Synthetic

SEQ ID NO: 2364 - protein, 178 aa, Artificial Sequence
  Synthetic
TLEEILREVEKRVKEANERNRKISEELADLVRRVNEENKKILEDVAEEVRRALERARRRNVDERVLKKIRDLLRKLAEEVKKLNERNKEELKRLEKRDKELNDRNKELLKRLKETVERGDLSEEELRRMIEELEKRNRDVDRESKKLAEELEKTNRDVNRKSRELVRRLRRKLEEELR

SEQ ID NO: 2365 - protein, 178 aa, Artificial Sequence; identical to SEQ ID NO: 2364
  Synthetic

SEQ ID NO: 2366 - protein, 178 aa, Artificial Sequence
  Synthetic
ELEDILREVRKRVEDVNRRNKEILERVAEEVRRLNEENKRILEEARKRVEKVLEDLKRRNVDERLLRELEELLERLARRVEELNRENKRDLDRLRETVKRLNDENRELLRRLAETVKRGDLSEEELRRAIKELKDRNEDVDRRTKELIKRLEDKNRELNRESRERVEELKKRAEELAR

SEQ ID NO: 2367 - protein, 178 aa, Artificial Sequence; identical to SEQ ID NO: 2366
  Synthetic

SEQ ID NO: 2368 - protein, 178 aa, Artificial Sequence
  Synthetic
DLEEILKDVKRRVEEANRRNEKILEEAKEKVDRVNRSNEKILEEVKETVKEVLRRAREENVDDRVLEDLKRLLRELEERVKELNRRNRELLKELADRVKKLNDDNRKLLEELADTVRRGDLSEEELKEMIRRLEETNRRVDKETRKLIEELERRNREVDRESERLIRELKKKAKDDLD

SEQ ID NO: 2369 - protein, 178 aa, Artificial Sequence; identical to SEQ ID NO: 2368
  Synthetic

SEQ ID NO: 2370 - protein, 178 aa, Artificial Sequence
  Synthetic
TLEDILREIAKVVKEANKRNKRILEKVARDVEEVNKENKKILDEVKRDVERVLREAEKRNVPEDVLRKLAELLKRLEDRVRELNEETKRLLEELADRVRELNERSKDLLRRLADIVRRGDLSEDELRRMLEELERTLREVDRESDELVKKLKRDAERVNEETRRLIKELKEIADRLLD

SEQ ID NO: 2371 - protein, 178 aa, Artificial Sequence; identical to SEQ ID NO: 2370
  Synthetic

SEQ ID NO: 2372 - protein, 184 aa, Artificial Sequence
  Synthetic
SIEELVREIEKTNEDMRREIERLSDENRRRLDKALEDIERRAREIKEKLERVMKRLREKGVSEEVEERLRRLEKELKEVLDRLREIIKELKDDNERLTKRIRDRSRETRERLKRFLDEARRDKDEKRVLDELRKLLEDSKDELRRLLEELRRHIKETDDTVRELLDRIRKIREELDDEVRRLEK

SEQ ID NO: 2373 - protein, 184 aa, Artificial Sequence; identical to SEQ ID NO: 2372
  Synthetic

SEQ ID NO: 2374 - protein, 174 aa, Artificial Sequence
  Synthetic
KEEEDARRALKRVEEEVRRNKEEMRKLLEDNEKRIRENKKRAEDSSRKVKKRIDELRRDGKRGEEVKRDLDRLRDEHRRETKKSEDELKRNNERLEEETKRSKEDIKRIKEDLDRRGLPEEVLREIEKILRDLERDHRRVLEEIRKRNDELRETHERVLRENEKILEKVERELR

SEQ ID NO: 2375 - protein, 174 aa, Artificial Sequence; identical to SEQ ID NO: 2374
  Synthetic

SEQ ID NO: 2376 - protein, 181 aa, Artificial Sequence
  Synthetic
SVDDKVRRRIREIKEELERVLTRSERESDDIKRELEEVLKRSEERTKKIKDDAERGGVSDELREKLERETKRAEDKHRKIREDLKRDEDRNRKRHKEIRDEARKDTERMKKKLKDLKDDKDDERVMRDLERELEKLERKVREIKRELEEHNARLREKVRRIDEDLKRDNKELEDTIREDTR

SEQ ID NO: 2377 - protein, 181 aa, Artificial Sequence; identical to SEQ ID NO: 2376
  Synthetic

SEQ ID NO: 2378 - protein, 182 aa, Artificial Sequence
  Synthetic
KEEEELEERIRRLEKLVEDYKRELDRSIKELEDEVDRARRELEKSIEEMKKKVKKAEDDGPVDEELKRRLEEDNERHKRDLDRRKEELEKKLRELRKRNEELRRRLEEELKRVEEELKEANLPDRVIRKIKKLLDEVRERLERINRTHRELLKEVEERLKKILKDITDANRRIEERLEEITR

SEQ ID NO: 2379 - protein, 182 aa, Artificial Sequence; identical to SEQ ID NO: 2378
  Synthetic

SEQ ID NO: 2380 - protein, 182 aa, Artificial Sequence
  Synthetic
SLKEELKRINDENKEELDRLREELKKLLKEVEEELRRAAEELERINRRIKEELDKVADRVDDEKIKRIEKRLKEEHDRHREELKRIKRELDELKKELEKVLKDIEKKNREREKELRDREETTTEEVAERLLEELREDVKRTKEKMKEMLDRVKKKIDDIKRKLEKLLRDNERRIEELKRDAD

SEQ ID NO: 2381 - protein, 182 aa, Artificial Sequence; identical to SEQ ID NO: 2380
  Synthetic

SEQ ID NO: 2382 - protein, 176 aa, Artificial Sequence
  Synthetic
SVEEKLKKALEESKRKSKRIKDDDERANREVKKRIEDIVRRLEEVLRKVLKDVTKDIKDKRELLKEIEDRIREIEERIRRLTEEMKRTHEENEKRTREDEKRNDEEHKRIEKKLAETGASEDEVTRDVKRLEDHNTRLEKKVKESVERLKEKLEELRKRVEKIERDLEKLLEDVRT

SEQ ID NO: 2383 - protein, 176 aa, Artificial Sequence; identical to SEQ ID NO: 2382
  Synthetic

SEQ ID NO: 2384 - protein, 179 aa, Artificial Sequence
  Synthetic
KAEDVLRRVKEEHERIRREIKRVIDDVRRKHKEILDRLREEIKRVEELLRKILEDVERDGKRDDRLRRLAEELKKRLDDVKRDVEEKEKENRRRLEKEEKRLEENFKRNEERLRRIEEEGPVREEVVKELEDNVKRNEEDAKRTVEKLRKNLEDNRREVEKIVRDLRRLVEKAREDVKR

SEQ ID NO: 2385 - protein, 179 aa, Artificial Sequence; identical to SEQ ID NO: 2384
  Synthetic

SEQ ID NO: 2386 - protein, 173 aa, Artificial Sequence
  Synthetic
DLKEILDEARKLIEDLRKKAEEILEESKRLLDDLKRKADEILTRYDELTKRLSTKVPRTRELEELERRSKEELDKLKRELEEEVERWKEENEKIRKRMEDLVRDLRRKLEEARRDQRLEELKKRLEELIREVEKDLRRIKKESEDRVEEIERRLRRIAEELDKDVRRVEEEAK

SEQ ID NO: 2387 - protein, 173 aa, Artificial Sequence; identical to SEQ ID NO: 2386
  Synthetic

SEQ ID NO: 2388 - protein, 181 aa, Artificial Sequence
  Synthetic
SKEETVARRVDEIARELEEKNKKWEDDSRKAVDELRRKLEEWEKRSRDLREKVKDLLRKLKDQDDKERLKEEVRRVLEEWRRELKKLREEVKRTAEKWRRELKKLEDDSRRKLEEVKRELEELDVSEELKKKVEKLLEDHRKKSEELLRKDEKLIRDMEREVERLLREDEKVIEDVERATK

SEQ ID NO: 2389 - protein, 181 aa, Artificial Sequence; identical to SEQ ID NO: 2388
  Synthetic

SEQ ID NO: 2390 - protein, 181 aa, Artificial Sequence
  Synthetic
SKEETVERDVERIVRRLRELNKEWKKRSEEVKREVDESDKRTAEAVKKLVRDLEETLKDLKDRDDRETAKEEVDRRIKKIEDDLRRLLDEHRKLLEEWRERLKKLLDDSRRELEKVKEELERLDVSEEIKKKLEKLLKEHEDLSRKLLKEDEEEIDRHRRKVREWAEDLRKKLEEAERAST

SEQ ID NO: 2391 - protein, 181 aa, Artificial Sequence; identical to SEQ ID NO: 2390
  Synthetic

SEQ ID NO: 2392 - protein, 177 aa, Artificial Sequence
  Synthetic
SEKERAEEELKRIEDELREAIKRSEDRLRRIEKELRDREKRSEEELRRLEEELRRLAEERISEETVEKVARDIDEENKKHEDEVRKTEEKVKTENERHKKEVEDIARKVKRSIEELKRRNGDRKIIEDLKRLLREFERAVEESNERLRRLLEEFKEKVKESNKRSRELLRRMEEEVR

SEQ ID NO: 2393 - protein, 177 aa, Artificial Sequence; identical to SEQ ID NO: 2392
  Synthetic

SEQ ID NO: 2394 - protein, 175 aa, Artificial Sequence
  Synthetic
DDLERLEKEAREILERHKRALDELEKRLRRVLEKHEEDLRRLEETLRELLKKVRKDGLPEEVLRDVKRKLDKLKEDLKRSLDRLREELDRLRKELERSLRELKRDVERVKEELERNEKRREELEKEVRKLEKKSRDDIRRLEKELRELEKRSRDNIRELEKRVRRVARELDKTAK

SEQ ID NO: 2395 - protein, 175 aa, Artificial Sequence; identical to SEQ ID NO: 2394
  Synthetic

SEQ ID NO: 2396 - protein, 177 aa, Artificial Sequence
  Synthetic
DEKEEAEKALREIKKRIEDNVREVRRLNRELREKLRKLIEDYDRLLKELEKRVEDIVRKGRVDEKVKEDADRELEKNREELDRRRKEVDDRLRKHNRELEESMKEARRRLEEVDRRLDELGERDLRREEKKLRDELRDLHREHRKSIEDLDREIKKMEDELRRSIEENRKRVEELEK

SEQ ID NO: 2397 - protein, 177 aa, Artificial Sequence; identical to SEQ ID NO: 2396
  Synthetic

SEQ ID NO: 2398 - protein, 175 aa, Artificial Sequence
  Synthetic
REKERVKRVVRRVEEELKRNLEEVEEESRRDLRRLEENLERVEEAVRRILKRLDDSRIDSEELKRLKEEVREKLRRAKKDHDEYLKRNEEDLRRVRRKHEEIRERIKKKLRDVERENKPREELEKLIEKIERELKKTHDDSRREIERLRRETKKLHEKSEELIRELEKRLRDAER

SEQ ID NO: 2399 - protein, 175 aa, Artificial Sequence; identical to SEQ ID NO: 2398
  Synthetic

SEQ ID NO: 2400 - protein, 180 aa, Artificial Sequence
  Synthetic
SEVEEILDRIRRELERLAREARKTVERNKKELDRIREEVDRSLRRNKEELDRLRREKKDVDEEFLRRIEKELEDNKRELEREDRRLEEELKRNHEELEKEDRKIRKEIKDLEDEVEKKVRGEDARRAARELLKRLEDLLREHHDRLRKSDEEIRKLIEDHHRALEESNREIKELIDRMAK

SEQ ID NO: 2401 - protein, 180 aa, Artificial Sequence; identical to SEQ ID NO: 2400
  Synthetic

SEQ ID NO: 2402 - protein, 185 aa, Artificial Sequence
  Synthetic
DEAEKLIKDIEDKDEELKEKARELKEKLEERDERTKKLIEELKREADRTLEELKKKVEKAKTSDEKVLEELVREVEELLKRVKDLLDELVETVKRLNEESEEELRRLEERSRKVIEDLERRLSKLRSEVVKRVRDLLKRHEDLTREIKKEVKKMNEKNRELVRRVEETLKKLLEDLKRLLDESRK

SEQ ID NO: 2403 - protein, 185 aa, Artificial Sequence; identical to SEQ ID NO: 2402
  Synthetic

SEQ ID NO: 2404 - protein, 175 aa, Artificial Sequence
  Synthetic
SEEEEKVKDIERKLRKHNKEVKDTERENEKRLRELRRTVEEDRKDAERELERIKRVVERGEVDEETLKKILKDLRRKLEELRKRIEELKRRLERHHEEVERRLEESLRRLEDTLRKLEKSEELDRLEKELRESIRRAEELLKDSKRRADELIERIKDVLRKVKEKIEKLIEDTRR

SEQ ID NO: 2405 - protein, 175 aa, Artificial Sequence; identical to SEQ ID NO: 2404
  Synthetic

SEQ ID NO: 2406 - protein, 173 aa, Artificial Sequence
  Synthetic
SEKEVVEELKKTVDDLKRKSEEAIKKAKEAVDKIRRDSERAIRKNEDTLRKIEEEIKRNRSEEALKKIEDTLRELSKEHKEIIERIKKALDDLKRESEEIVKRLEDALRELAKSETDEDILREIAKRIKDLIEDHKRASKEIERDIRKILEDHKRAAEKIRRDLRRLLEDVER

SEQ ID NO: 2407 - protein, 173 aa, Artificial Sequence; identical to SEQ ID NO: 2406
  Synthetic

SEQ ID NO: 2408 - protein, 179 aa, Artificial Sequence
  Synthetic
SLEKMVTDIIRKLEEIARRHKTRSDEIVRRLEEIIKTHEKRSKELMDDLKRLVDEVRKKKDKAEEVKEKLRESLKRLAEESRKVVEDLKRTIERIKKESTETLKRIKDVVRRIREEARDKEPKEEDIRRLDEEVKDLERRSREEEERLEREVRELEKRSEETIRRVEKKVRDLADELRK

SEQ ID NO: 2409 - protein, 179 aa, Artificial Sequence; identical to SEQ ID NO: 2408
  Synthetic

SEQ ID NO: 2410 - protein, 174 aa, Artificial Sequence
  Synthetic
SEEDVVKKVRKKLEDVHRDTRREIRRLEEETKKLHDETRKTIETIERRLRDLRDRLTKEPKDKRVEEKVKKIAEDIERILRKLRRDHEDYLRRNEEVLKRLEDKHRKITEELDRGELDSEEVRDVKEKLKRNLEEARKASREDLERLKRNLEKADEDVRRLLEELKRLLDEVRR

SEQ ID NO: 2411 - protein, 174 aa, Artificial Sequence; identical to SEQ ID NO: 2410
  Synthetic

SEQ ID NO: 2412 - protein, 183 aa, Artificial Sequence
  Synthetic
SLEEAIEDLRRKLEKLLKDYADLSKEIEDKLRKIHEDSRRLVEKLEEEARRILKEVRERGKDEERVKKEERDIREELKKLEKTIEDSEREVEKEKRDSDEKLKRVEDDARKLLEDLRRSGEGREEEVRKEIEDADKRVKDLKRELERDIDELRKRVEELRRRHEEKIKKVAEDVKRREDEARK

SEQ ID NO: 2413 - protein, 183 aa, Artificial Sequence; identical to SEQ ID NO: 2412
  Synthetic

SEQ ID NO: 2414 - protein, 175 aa, Artificial Sequence
  Synthetic
SRLEKIKRELDKKLKDHEDDSRDKVRKLRESLKRHEDKSRKEEEEVKKTLKELEDKLRRDGPDKRVEEESRRHLEEVEKLLKELEDHSRRHREELKKRLDELRDHLRKLLEDLDRTDLEKRLVDDAKRKIKELEEENERLVKEVEDRNRELDERNKRIIDRIRRLNERVKEEAEK

SEQ ID NO: 2415 - protein, 175 aa, Artificial Sequence; identical to SEQ ID NO: 2414
  Synthetic

SEQ ID NO: 2416 - protein, 179 aa, Artificial Sequence
  Synthetic
DEVETVIERDKKLLEDWVDRARKVVKRDEDSLRRDEEENRRVVEENSRTVKELKERIRDERLVREVDTLARKLNRDIERTVEESRRLSEESKRLIEEVVKKVEKLSRDSVRILEAVKDGKEEVVKRVEEEVKRLNERADELLKRVEKRAEELNEESRRLSEEVERKVRELNREADERVK

SEQ ID NO: 2417 - protein, 179 aa, Artificial Sequence; identical to SEQ ID NO: 2416
  Synthetic

SEQ ID NO: 2418 - protein, 179 aa, Artificial Sequence
  Synthetic
SEVEEVVKRNSDTAKEDMDRNEKVVEDNSKRLREWEKAIEEVEKEVDKAMKDLKRRIRDEELVRRVEKLAKELKEIIKKVLDDIRKLIEELNRKIKDTVRRSKKEIDELNKILEEVRDGREKLVEDVRREVEKLNRESEERSKRVKEEVDDLNRKLEKLLRDVKEEVKKLLEEAERETK

SEQ ID NO: 2419 - protein, 179 aa, Artificial Sequence; identical to SEQ ID NO: 2418
  Synthetic

SEQ ID NO: 2420 - protein, 178 aa, Artificial Sequence
  Synthetic
DEVRKVVEDNERSVREIKEELKRVVEEDKELVDRWRERLEKVVKDNERSAKKIKDDVTKEEVKKLVEEVLRTSRKLAEELKKLIEEVHRTSRELIKRVDEEVDKVLEDSRRLAKELKDVDEMLRRIEETIRRLDEELRRLVEEVKRRIDELNREVEKRIREVEERIKEMDKRLREAVK

SEQ ID NO: 2421 - protein, 178 aa, Artificial Sequence; identical to SEQ ID NO: 2420
  Synthetic

SEQ ID NO: 2422 - protein, 178 aa, Artificial Sequence
  Synthetic
DEAEKVVEKDRRLIEKWKEDLKELVRRVREKVKEIKKRVADVVKENEDSVRRIEKEVTKEEVKRLVREVLERSRRLIEEVRRLVDEVLKTVEKLAKELVDKAEEVHRESRELIKDLKDVDEMLRRIDRRAERLNEDVARVIDEVAKRVTRLLERLEEKLKKIRDDIKKLDEELEEAAR

SEQ ID NO: 2423 - protein, 178 aa, Artificial Sequence; identical to SEQ ID NO: 2422
  Synthetic

SEQ ID NO: 2424 - protein, 178 aa, Artificial Sequence
  Synthetic
DEVRELVKENRRSVKENEEELKRILDEDERLIRDWKKKLEEVVRKVAELVREIEERVTKEEVKKLVREVLKTVKKLIDELRKLADEVHKRSNKLIEDNKRLTDEVLRRSEDLARKVKDSDELLRRVAETVKRMDEDLNRTTEEIADTIRRLNEEVAKRIREVERTVERLIEELEEAVR

SEQ ID NO: 2425 - protein, 178 aa, Artificial Sequence; identical to SEQ ID NO: 2424
  Synthetic

SEQ ID NO: 2426 - protein, 170 aa, Artificial Sequence
  Synthetic
DEEEELEKDARRVLEELRRELERVVREAKDINRRVEELIREVRERAKRVDDELRKRPRDDEVMKDVKREVERTIRDIERVLEDIERLSERSERLIKRVLDEVKRVVDDVLRKITNERVLREVERVLRELEREADEVLKEDRELLERWKKTVKDVVKENRDSLDELAKEMK

SEQ ID NO: 2427 - protein, 170 aa, Artificial Sequence; identical to SEQ ID NO: 2426
  Synthetic

SEQ ID NO: 2428 - protein, 170 aa, Artificial Sequence
  Synthetic
SEEERLREEAKEVLKRLREDLKRVEEDVERVDKRLRELNEDVARKLEEVLKRLREQPRDKDVADRVRREVEKILRESREVLKKSARDVDETIKKIETVLREIEKKVEEVVRKITNEKVLREVKRALDDLRRRVEEVLRKNEKSLRELEEENRRVLKKVEDLLEDIIRRLK

SEQ ID NO: 2429 - protein, 170 aa, Artificial Sequence; identical to SEQ ID NO: 2428
  Synthetic

SEQ ID NO: 2430 - protein, 175 aa, Artificial Sequence
  Synthetic
REEDEVRKELERVERRIEDLLREVERTNREVIETSERLTKTVEDDVRRVNTEIDRLLKEKKDDKERVVREVRELIRELNEKIKKTVEDSKRLADELAERNERVAREVRRLIEELKRRVGVEELLRELEEVLRRIEEKLKKIDDESKKLAKEDTDRNKRIVDENTRLVEEWDKRAK

SEQ ID NO: 2431 - protein, 175 aa, Artificial Sequence; identical to SEQ ID NO: 2430
  Synthetic

SEQ ID NO: 2432 - protein, 187 aa, Artificial Sequence
  Synthetic
SVLEEVRKKVERVIRESRELSERVREHIKRTIDEVKKLTEEVRKIVETLIRRLKELLDRVRRKELVEEVVRRARKVLKELEELAEKSIRDTRRLLDENRDILRKTIERSKRLLEEIEDVARKILKDVPDEEVRKILTDLRKAVDEDRRRNEKLLKDSEDAVRRDEKENRDILRELRKAIEEIERRLR

SEQ ID NO: 2433 - protein, 187 aa, Artificial Sequence; identical to SEQ ID NO: 2432
  Synthetic

SEQ ID NO: 2434 - protein, 187 aa, Artificial Sequence
  Synthetic
SMVDKVREEARKLIEEARRLSEEVKKIIDELTKRVKDLTRTSHELSKRLEDTIRELLKRVRRRELVEEVVRRLREMLKELEKTDRDSIRTTRDLLRRLEKIVRDTIRESRRVVKEAEDEIRRITKDVDDEKLREILKRLREELKRDEDRNRELLKRVRDRVKKDEEENRENTKRVREAVEKIERELE

SEQ ID NO: 2435 - protein, 187 aa, Artificial Sequence; identical to SEQ ID NO: 2434
  Synthetic

SEQ ID NO: 2436 - protein, 187 aa, Artificial Sequence
  Synthetic
DVLEEVRRRAEEVIREARELSKRSHDRSRELIERVKKLTEESHRLSRKLIRELEERLEKVRREEELEKVVRDAEKVLRDLKETDERSIRDTERVLRELEKTDRETIKRSRDLLEELERLARKILKDVPDEEVRRILKELRDEVKRDEERNRKNTKDVKDEVDKDRRTNEKNTEDAEREIRRIKEDAR

SEQ ID NO: 2437 - protein, 187 aa, Artificial Sequence; identical to SEQ ID NO: 2436
  Synthetic

SEQ ID NO: 2438 - protein, 187 aa, Artificial Sequence
  Synthetic
SVLEDVRRDVERLRREIEELSKRSHERSRRIIERLEELLKRSHDLSKRLRERLEELLKRVRREELVRRVVEEARRLLKELEKTDRDVVEEARRLVTELEDTDRRTIEESRRALKELEEEARKIRKDVPDEEVRRILKKLRDDVKKDEDDNRRNTEEVRKLAKDIERKLKKNTDDVRKDIKAIEDRLR

SEQ ID NO: 2439 - protein, 187 aa, Artificial Sequence; identical to SEQ ID NO: 2438
  Synthetic

SEQ ID NO: 2440 - protein, 187 aa, Artificial Sequence
  Synthetic
SVLEKVKELLDRLIRELEELVKTVEEIARRLITEVRELTERSHELSRRLIKELKRLLDDVRREEVLKDVVRRAEEVLERLRKTDEDSIRSTEDAVRRVAELAKRVLDKAEEVIRKVREDARKISKDVPDEEVRRILEEITRVLEEIATRLKRILDELRKAVDKDRKDNERNTEEVRKLIEEIKRRLK

SEQ ID NO: 2441 - protein, 187 aa, Artificial Sequence; identical to SEQ ID NO: 2440
  Synthetic

SEQ ID NO: 2442 - protein, 187 aa, Artificial Sequence
  Synthetic
SLLDEVRRKVKEVEDRLRKLVKDSHELSRRLIEEVERLTKTSHELSRRLIEELRELLKRTRTEELVKKVEEIVKELLRRLEETDKRSIERTEELLEELRETDRRVVEEAKRLVKEVEDEARRIKERVPDKDLRDILRKLREVLEEIERRLRKNTEDVKKVVDDDRKRNKDNTDEVRKAIREIEERLR

SEQ ID NO: 2443 - protein, 187 aa, Artificial Sequence; identical to SEQ ID NO: 2442
  Synthetic

SEQ ID NO: 2444 - protein, 181 aa, Artificial Sequence
  Synthetic
SEIERLLEEDTKRLRDWEEAIRKNLEDSEREAKKLKDRVKKLLDDARRDIDRLKKERKDDKDVIKLLDEVLDTVRRLAEDIKRVIEEVLKESRRLVEEVKKVIEEVNRRSKKLVEEIRREEREEILDEVRRRLKTLNDDVERLLREVHERSKKLRETVRKIVEEVEKRITELRDRVRRAAK

SEQ ID NO: 2445 - protein, 181 aa, Artificial Sequence; identical to SEQ ID NO: 2444
  Synthetic

SEQ ID NO: 2446 - protein, 181 aa, Artificial Sequence
  Synthetic
SDIDRLLEEDKKKLDDWRRAIEKNLEDSERRAREIKERLKKLLDEVRREAERLKEERKDDKDVLELIDRVVDTVRKLIEEVERVIDEVLRTSEKLVRDVKRAIDEVNERSKKLVEDARRDEKEDILREIAKRIEDLNKEVEDLLRTVHKESRRLDREVEEIVRRVKEEIDRLIREVREAAK

SEQ ID NO: 2447 - protein, 181 aa, Artificial Sequence; identical to SEQ ID NO: 2446
  Synthetic

SEQ ID NO: 2448 - protein, 181 aa, Artificial Sequence
  Synthetic
SEVDKLLEDDRKALEEWERRITKNLEDSKREIDDIRRRLRKNLEDSRRAIKEMKDRRREDEEVLRLLEEVLERSKRLVEEVEKLLEKVLRDSEKLVREVRRAIREVNKTSAELAKELKREEREEILKRIADEIKRLNDEVKKLLEEVHERSRRLIEELRRLLEEVHRRSRKLIREVEEAAR

SEQ ID NO: 2449 - protein, 181 aa, Artificial Sequence; identical to SEQ ID NO: 2448
  Synthetic

SEQ ID NO: 2450 - protein, 180 aa, Artificial Sequence
  Synthetic
SAEEEIEERLKRAIDRDEESVKRSAEEIKRLIEELKKSVDDSARELKELIERLKKLKKDGVDKSVIDKVVRELTRRVEELHERNRELLERVKETVERLHEENRRTSDEIEERVRELVREVDTKEIKDLLDRVKKEVERSKRKSAKLLKELEDAIKEIEDRSRELLERAREELKRVKDDKR

SEQ ID NO: 2451 - protein, 180 aa, Artificial Sequence; identical to SEQ ID NO: 2450
  Synthetic

SEQ ID NO: 2452 - protein, 180 aa, Artificial Sequence
  Synthetic
DETKRVRDLIRELIKRDEESVRRSARTLEELIRRLEESVKRSKKLVEDVIRKLKKLVKDGVDSDDIRKLVRDVERVVRKVVEENRRLVETVAREVERVHKENEDTSEEVRRTVKELVDEVRTEEAKKLLEDVEEAVERSKRKSRKLLEDARRALEKVKRDSDKLLEDVREEVERVLRTVK

SEQ ID NO: 2453 - protein, 180 aa, Artificial Sequence; identical to SEQ ID NO: 2452
  Synthetic

SEQ ID NO: 2454 - protein, 180 aa, Artificial Sequence
  Synthetic
DELEKIAEELDKLIRDDKKSVDESKRLLEDLIRRDRESVEESERELTELRRRLDELRRRGVDRDEIRKALEEVKRVVEKLVEENERSTEEVKRTVDRLHRENERTSEEVRRRVEELVREVDTREIKELLKRVRELVRESKERSRAVKERLKEEVKESERRSRELLERVRRDLEKIERDTR

SEQ ID NO: 2455 - protein, 180 aa, Artificial Sequence; identical to SEQ ID NO: 2454
  Synthetic

SEQ ID NO: 2456 - protein, 180 aa, Artificial Sequence
  Synthetic
SELERIKKELEELIERDKKSVKDTARRLEEMERRLRESVRKSEEDLRRMIEKLEKLVTDGVEEESIRRLIKEIIRTAKKLHDDNERLLKEVEEVVRKLVKDNEDTSKEIEDRVRELIREVKTDEARKLLEDVKRLVEESKRESKRLLDEVKKVIDRLRERSEKLLRDVERALREAEERTR

SEQ ID NO: 2457 - protein, 180 aa, Artificial Sequence; identical to SEQ ID NO: 2456
  Synthetic

SEQ ID NO: 2458 - protein, 180 aa, Artificial Sequence
  Synthetic
EEDERIRRDLEEAIRRDRKSVEDTREELRKMIEDDERSVRDSEEKLKELIKRLEELVREGRDSKDIEKALRDVEDTVRRLVRENEKSTEDIEKRVKELVEENKRTSEEIERRVEKLVDDVRTDEIRELLRRVRELVKKSKDDSRKLLEDVKRELERSKEESKRLLDEVKRAIDEIRERDK

SEQ ID NO: 2459 - protein, 180 aa, Artificial Sequence; identical to SEQ ID NO: 2458
  Synthetic

SEQ ID NO: 2460 - protein, 180 aa, Artificial Sequence
  Synthetic
SELERIEEELKKLIEDDKKSVDDTRKELDRAIEEDKRSVERSERDLRRMIKKLEDLVRRGRRDEDIRKLLEDVKREVKRLVDENEASTRTIKRRVEELDKRNRETSERIRKRVEELVREVKTDEIRKLLEEVKKLVEESKRTSEELLKEVDRRLRRSEDESRKLLEEAKKAVKRIEEETR

SEQ ID NO: 2461 - protein, 180 aa, Artificial Sequence; identical to SEQ ID NO: 2460
  Synthetic

SEQ ID NO: 2462 - protein, 180 aa, Artificial Sequence
  Synthetic
DELEEIKRRLKELIDRDRESVKRTEDELRELIKRLRKSVDDSRKEAERLIRELERLVKEGVDRRDIERLIREIKKRVKELNDENRRLAEEILRRVEKLDKENKETSEEIRKRVKRLVDEVRTDEIRELLERVERALRESKERSRKLLEDVRRAIEKVERDSEKLLKDVEEALERVKRERD

SEQ ID NO: 2463 - protein, 180 aa, Artificial Sequence; identical to SEQ ID NO: 2462
  Synthetic

SEQ ID NO: 2464 - protein, 180 aa, Artificial Sequence
  Synthetic
REEDEIRRELKELIERDERSVEETRKELEELIRELEELVKRVEDDLRRLIEKLEDLRRKGRDRREIERLLEEIEKRVTELVKEIEKLIEDIRRRVDELDKENRRTSEEIRKRVKELIDEVRSDEARKLLKEVEELLRRSKRKSEELLKRVEELLRKAREDIRRLLEEVKRVIDKVKKDTD

SEQ ID NO: 2465 - protein, 180 aa, Artificial Sequence; identical to SEQ ID NO: 2464
  Synthetic

SEQ ID NO: 2466 - protein, 179 aa, Artificial Sequence
  Synthetic
SDVERIIRENERKAKEIKDKVRKVIEDNERSVEEIKEKAERIVREVRKTLEEIRKRIRSELMRRLAELIREIEKRIEDVLRRIEKLHKDVSEAIRRVLKEIEDLHREVTEEVKRVRDANSKEMVERVERLIEEVARRSEELLRRIAKLVEDVNRESERLIREIKELAREVEKELKERAD

SEQ ID NO: 2467 - protein, 179 aa, Artificial Sequence; identical to SEQ ID NO: 2466
  Synthetic

SEQ ID NO: 2468 - protein, 179 aa, Artificial Sequence
  Synthetic
SEVDDIIRKNEELLKKIEDDARKILKENEERVEEIKERIKKLIEDDRRKLEEIKRRIRGELAERLRELSRTTVELLKEVLRRIETLHKKVTDDLKKVLEDIRRLHEEVTKELRRVKDANSEEALDRIRKLIEKVKRESEKLLEDIKRLIDKVDKDSERLLRTVKKLSEDVEKELKDTTK

SEQ ID NO: 2469 - protein, 179 aa, Artificial Sequence; identical to SEQ ID NO: 2468
  Synthetic

SEQ ID NO: 2470 - protein, 179 aa, Artificial Sequence
  Synthetic
SEVDEIIKDNERELDEVRREVEEIDKENKERLKEWVEEAREILDRLRKDLEEIRKRVRSRLVDELERLIREVEEVIRRVLERVRRLIEEVSKIITDVLREVERLHEEVTKELRKVEDANVREALDRLRRLIEKVVEDSRRLIKKVDELLKKVNKEIEDLVREVKDLVRRVKEELDRRVK

SEQ ID NO: 2471 - protein, 179 aa, Artificial Sequence; identical to SEQ ID NO: 2470
  Synthetic

SEQ ID NO: 2472 - protein, 179 aa, Artificial Sequence
  Synthetic
EEAERILKKDDDSVRKIKKEADRIVRENERLAEEIKKEVRKIIEDDKRTLEEIEKRIRSKLVEDLKRLSRETLEELRRVLEEAEKLHEEVTRLIRDVLRKIEELHRRTKKKLRDVRDANSEEMLRRVEEDLRRVNEESERLIRRIAKEVKRVTDESKKLLEEVKRISETVIEKMKEDAR

SEQ ID NO: 2473 - protein, 179 aa, Artificial Sequence; identical to SEQ ID NO: 2472
  Synthetic

SEQ ID NO: 2474 - protein, 179 aa, Artificial Sequence
  Synthetic
DEVEEILKRDEEALRDIEKKVREVDERNRREVEKIKEKVKEIIKRDKDELDEIRKRIRSEKARELEELSDRTLKTLKKVLDDIEREHREVSRDIKKVLEDIKRLHDETLKELTRVRDANSEEVLKRLEEEARRVNKTSKDLLKEVEDKIRKVNRKSEELLKKVEELSRRVIEEMRRRVK

SEQ ID NO: 2475 - protein, 179 aa, Artificial Sequence; identical to SEQ ID NO: 2474
  Synthetic

SEQ ID NO: 2476 - protein, 181 aa, Artificial Sequence
  Synthetic
RELEELIEDLRRALERSREEVTRLLKDLEDANRRSHRHNEELIKRLRKILKEARDRVKRDNVDERVVRRVERLVKESEKDNRRVLKESSDLVKKIVDELREVLKRSTELVERVVDLIRKLREEEALKDLRRVVEEVKKRSTDLNREVAKVIEEVKKRSEDLNRELEKLNRDIEERIDRETR

SEQ ID NO: 2477 - protein, 181 aa, Artificial Sequence; identical to SEQ ID NO: 2476
  Synthetic

SEQ ID NO: 2478 - protein, 175 aa, Artificial Sequence
  Synthetic
REEEEARKILERLEEELKRSLDEVRDLIEKATKESKDVNEKIRKLLEELKEELRKVVEDTGGNVEEIDKILKKVKKDLDDLLKESEDVARKVKKLLDELHEKNREMLERVRRELERVVKVEELVKDVERKLKRVAEESRKLVEDLRRRIKESREEIKRLVEDLERVLKEIKEEAK

SEQ ID NO: 2479 - protein, 175 aa, Artificial Sequence; identical to SEQ ID NO: 2478
  Synthetic

SEQ ID NO: 2480 - protein, 175 aa, Artificial Sequence
  Synthetic
REEEEALKRIRETSERIKRVVDDLHRRNKKSTDDIKRRVDELHKRNEKIVREVLDVIRRRGGEAEEVKELVERLRRSVEDSLREVTRLVEEDKRSVDESLDELRRLLKENRDLVERLVDSEVLRELDRRTKELKRRADELVTENRKLSKELEDEIRRLAERNRDAIRKIDKAVKE

SEQ ID NO: 2481 - protein, 175 aa, Artificial Sequence; identical to SEQ ID NO: 2480
  Synthetic

SEQ ID NO: 2482 - protein, 175 aa, Artificial Sequence
  Synthetic
DEEERALETIRDTSRRIEERIDDLRRRVEKIVRDIEETIRRLHEENRKIAERVKEVIERRGGKAEEVKKLVDELRRSVKKSLDDARKLVEDLKRVIDKVLEELRRLLEEDKRLVDELVDSEVLKELEDETRRVKERVDKIIKELEERVEDVERKVRELVKRNEELLKKIKDDADK

SEQ ID NO: 2483 - protein, 175 aa, Artificial Sequence; identical to SEQ ID NO: 2482
  Synthetic

SEQ ID NO: 2484 - protein, 175 aa, Artificial Sequence
  Synthetic
SREEDAVRKIRKLVEDVTRETKKMLEDVRRLVETVEKLTDDLLEEVRRLVEEVEDEIRRAGDVEERARELVEEIKRIIDEVRETSERLDREIEDLLRKVEKRARDLDRRIKEIIDREVDSELLREVEDLLRRHHETVRRILDEIRRLIERHHRRVREILKELDKLVKDAADEVRR

SEQ ID NO: 2485 - protein, 175 aa, Artificial Sequence; identical to SEQ ID NO: 2484
  Synthetic

SEQ ID NO: 2486 - protein, 188 aa, Artificial Sequence
  Synthetic
SEVERVEEEVKRLATEVEKSNRDSLREIEDLNRRDRDISRRVKEEIERLIREVKKLIDDRREEEAVREVEKVIREVLRRVTELIRRLRETVKEIRKRVEELIRRDEELVDRVLKEVRRLIEELRKRNDEKKVKELLERAKKIADELRKHIKRTLKKVEEEVEKNKRDNDKLLEEARELIKRLDDEVRR

SEQ ID NO: 2487 - protein, 188 aa, Artificial Sequence; identical to SEQ ID NO: 2486
  Synthetic

SEQ ID NO: 2488 - protein, 188 aa, Artificial Sequence
  Synthetic
DDLERVRKEIEDLNREDKRRSEEVRREVKKLIEDLEDSNRRSLEEVDRLVETVRELIDRERREEAVDKVRKVIEEVLRRVRELVERDERLVDEVLRRVKELIRELRETVKEILKRVEELIRRLEDRNDKEKVKRLLRTVRELMKKNKRDNDRLLKEAEDEARRVKRHIKESLKRIEEEIRRLKERLER

SEQ ID NO: 2489 - protein, 188 aa, Artificial Sequence; identical to SEQ ID NO: 2488
  Synthetic

SEQ ID NO: 2490 - protein, 188 aa, Artificial Sequence
  Synthetic
DELEKVAEDIKKLNKEDRDRSDEVRRAVKELVKEVEKKDKDIKRRAEELIREIKEDIERRREEEVVDRVREKIKKVLKEAEDLIRDSKRVIDEVLERVERLIRELEKTLEEILRRVRKLIRDLEEKNDREKVRKLLEDVEREARKNEEDNRKLLKDIREEIRRLADRSRKTLEDAKRLIEKIERDLEK

SEQ ID NO: 2491 - protein, 188 aa, Artificial Sequence; identical to SEQ ID NO: 2490
  Synthetic

SEQ ID NO: 2492 - protein, 172 aa, Artificial Sequence
  Synthetic
SEVEEVLKEIEEMLRDLERRVKESDEENRDSLRKIREDVERVDEENRDTLRRIKEKVKGELLKEVEELIRELSRELEKVLKEAEDAVRELSKDNRRVLEEIRKAVKRLLDLVREDGSEKVMKEVRDVIARLRDELEKVTEDSRRVNKELKKRLEDVVREIRRANEELDERVR

SEQ ID NO: 2493 - protein, 172 aa, Artificial Sequence; identical to SEQ ID NO: 2492
  Synthetic

SEQ ID NO: 2494 - protein, 172 aa, Artificial Sequence
  Synthetic
DEVEKVLEEIKRALDDLRKKVEESKREIKEALKRVEKHTRDSDTDNKRTLREIEERVKSKDLERVRKLVEELSEENERSLREVRRVAEELLEINERVLEEVERVVKRLLDLVRRRGEERVVEEVRRVLEELRRRLEKVTEDSRRAIERLEREDRRVSKKSKDVNKKLDDDVR

SEQ ID NO: 2495 - protein, 172 aa, Artificial Sequence; identical to SEQ ID NO: 2494
  Synthetic

SEQ ID NO: 2496 - protein, 178 aa, Artificial Sequence
  Synthetic
DSARKVEREVEEAARRVERTLEDVTRKVRELHDEVRRRLEEVKRRIEDLHRRVDEEPRGKELKEKLDEVHKRSEDMLREVEKIVRKVNTESKKLLDDVRRELEDVLRRVKELLRDVLSDKDTVKRVLDDVARIVKRIEEDIKRVLEESKKLVRDIEKEIRDVKKESRDLVREIREKIR

SEQ ID NO: 2497 - protein, 178 aa, Artificial Sequence; identical to SEQ ID NO: 2496
  Synthetic

SEQ ID NO: 2498 - protein, 178 aa, Artificial Sequence
  Synthetic
SSAEEVKRELEERHRDLRRTDEELRKDLDRVHDRARKILEEIEKKIRDMHRKVKERERGEDLERELDEVNKRSEELVTRAKEEVTRVNERSKRLVERSKEKVAEVNKRSETVLRDVLSDERKVKKVRDESNKVVEEIMRHSDKVLERSRRLVEEIRRRLEEVLRTSREVVRRIRDEVR

SEQ ID NO: 2499 - protein, 178 aa, Artificial Sequence; identical to SEQ ID NO: 2498
  Synthetic

SEQ ID NO: 2500 - protein, 172 aa, Artificial Sequence
  Synthetic
REVEEVLKEIEEMLKRIEDDVRRVLEEIKDVARRNEDEVRKLLRENEESVEEIKRRVSEELLRKVVTLSEDVVRKLAEVVKDTLRKIETVVKKVEKVVEKIRRDIKRVAKKVRKDSDRKVVEEVRKLLTDLKRLLEEVVKEVRKRLKELHDRTRTVAEEIRDINKKLKEEVN

SEQ ID NO: 2501 - protein, 172 aa, Artificial Sequence; identical to SEQ ID NO: 2500
  Synthetic

SEQ ID NO: 2502 - protein, 185 aa, Artificial Sequence
  Synthetic
SSVDEVRRTIEELIRRVEELVKRSKDHVDETERRVKELVRRSHELTKEVIERVEELLRRLKQRDVLEDILRRVKKLVDDVHESNRRVLEEVKRLVDENRESNKKVLEDVTRAVEELERLLRDKVSDEDKVRKLVEDLRRALEKIRREIEKSTEESDRVLRRIEEEIRRDSEELKRALREAEEEVR

SEQ ID NO: 2503 - protein, 185 aa, Artificial Sequence; identical to SEQ ID NO: 2502
  Synthetic

SEQ ID NO: 2504 - protein, 184 aa, Artificial Sequence
  Synthetic
SEVEELLKEVERLVREVEERVRRLHETDRKLLEDVKRKVEELHREDKKLADEVREAVKRRRDEEAVERIERLLREVEKHSDETVKEVKKLLDEVTKHVEDSNREAERLLREVRELVKEVLRRAGDNEDVERLRRELEKVAEKIRRLVEANRKTVEDARREIEKLLEENRRELDKVRRDVEREAK

SEQ ID NO: 2505 - protein, 184 aa, Artificial Sequence; identical to SEQ ID NO: 2504
  Synthetic

SEQ ID NO: 2506 - protein, 188 aa, Artificial Sequence
  Synthetic
KEVDDLLKEVRRLVREVEKELKRLHDENRKSSEEIARRLEELHKESKELVERVKETLRDLRKDSGDERVRREIRRLVKEVEDVVRRSIREAEELVERDERSVKRSIEEIRRLVKEVEDFVRDVIRKIRDEKVVRDLEREVREALRRLEEILRRDEDDVRRSREELKRIIDENREEVKRVLRELEETLR

SEQ ID NO: 2507 - protein, 188 aa, Artificial Sequence; identical to SEQ ID NO: 2506
  Synthetic

SEQ ID NO: 2508 - protein, 182 aa, Artificial Sequence
  Synthetic
SEVDELVERNERLVDEVRRRVEDVARKLEKVSRDSDDLVRRSNEELEDRLRKVEKRVREERDAKELVEKLIREVRKVLEESEKLVRDLIKKNEDVLREIEKEIRRLSKENEDVLREIERRIEDKKKLDEIRERSKRANDTLRKLLEDIRKRVEDSIRRLDELLKRSETRVRDIIKKLEDELR

SEQ ID NO: 2509 - protein, 182 aa, Artificial Sequence; identical to SEQ ID NO: 2508
  Synthetic

SEQ ID NO: 2510 - protein, 182 aa, Artificial Sequence
  Synthetic
DEVDELERRNERLAEDVRRKVREVEERLKELSKRSMDIVKDVLRRLKELVDRVEKKVREKRDDEELVRRLIKEVRRVLEEAKKVVKRLIEENRRVLEEIKEVVERLSRKNEEVLKRIRERISDEKKVEEIREKSERVNRDLEDKLRKIEEKVKESEKRLRDLLREIEERIKRAIEKLERDLK

SEQ ID NO: 2511 - protein, 182 aa, Artificial Sequence; identical to SEQ ID NO: 2510
  Synthetic

SEQ ID NO: 2512 - protein, 182 aa, Artificial Sequence
  Synthetic
SKVEELTERLRRLSKRSEEEVEKSNKDNDELVRRVLKRVKEVMRELEKLVEKVKEDVRRERDSRELVKKLIDEVRRVLEDARRVVKELSKENERVLRESEKLVRELIKENERVLKELEKRIDDKETLDRIRKEVEDSIERLKKLLDDSRRRSKEANDALRKLLKEIEDTIRRAIEELERARR

SEQ ID NO: 2513 - protein, 182 aa, Artificial Sequence; identical to SEQ ID NO: 2512
  Synthetic

SEQ ID NO: 2514 - protein, 182 aa, Artificial Sequence
  Synthetic
SRVEELTEENRRLAKRLKEVVKKVLDELRRRVEEVKERVERSNKKLRDLVREVDERVATKRDVKELVEKLLREIEKVLRESEKLVRDLIRDVRRVLEEVKKLVKEVSDRNREVLEDIKRRIDDEEIVRRIEEESKKVNRELEELLRKIEDDIRKAEEELRELVERSKREVDKALDDIDRRTR

SEQ ID NO: 2515 - protein, 182 aa, Artificial Sequence; identical to SEQ ID NO: 2514
  Synthetic

SEQ ID NO: 2516 - protein, 182 aa, Artificial Sequence
  Synthetic
KEVDDVKKELDDVDREVKELIKRAHDKNRKVVKEVEDELRRLTEDDKRVADKVRELLKKVRDKEEVVRRLLEEIERSLRKIEEDVKKLLEKIKRSLEESRELAKELLEKVARVLDKIKKTITDKDKMKEVEDEVRKVLDTIRKLLKRDEEAVKEALDKVKKMLDDARRHSEKVLREVEDTLR

SEQ ID NO: 2517 - protein, 182 aa, Artificial Sequence; identical to SEQ ID NO: 2516
  Synthetic

SEQ ID NO: 2518 - protein, 178 aa, Artificial Sequence
  Synthetic
SEVEELLKEVRELARRIEEEIKKLHRRNEELARRIKETIKRLIDENRKLAEDVRRDSGPDDRLRDLVRRVAEHVKESSDRIKELVDRVRRHVKKTSKEVDELLKKVERVVEEVLRRVGDGEDAKRIRDELERVRKSIEKLIRDNERFLEKVERDIRKLIEENEDLLRKIKEDVERKEK

SEQ ID NO: 2519 - protein, 178 aa, Artificial Sequence; identical to SEQ ID NO: 2518
  Synthetic

SEQ ID NO: 2520 - protein, 178 aa, Artificial Sequence
  Synthetic
DEVRELLETVRKLAEDVERRIRELIKENERLAREVERRIKELHDRNRELAREVEEKTGPDEELRRLLKEVEDHVRRTIREVEDLLRRVKKHVEDTTREIAKLLREVEEVVKDVLRKTGEGKEAREIERELEKVKDTIRRLLERNEELLEEIARRITKLLEEDKELLERIERRIAEKLK

SEQ ID NO: 2521 - protein, 178 aa, Artificial Sequence; identical to SEQ ID NO: 2520
  Synthetic

SEQ ID NO: 2522 - protein, 185 aa, Artificial Sequence
  Synthetic
SEVETLLRELKRLAEEVKKRIEELDRELKKLSDDVRREIERLIRENERLAREVLKEIRDLKGDKKRIEELLREVEKSVRETSKTIRDLLRRVEKVYEDVLRTIRELLERVRRVAEDVRRKIKERGKEEALREIEKLLRKVEEDVRRLIEKLKKSLEDSARDVDRLVKENERILEEVAREVEKLLR

SEQ ID NO: 2523 - protein, 185 aa, Artificial Sequence; identical to SEQ ID NO: 2522
  Synthetic

SEQ ID NO: 2524 - protein, 185 aa, Artificial Sequence
  Synthetic
KEVEDLLRDLKRIVDEVEKRIRKLIEDNKRLADEVRERIERLHKRNKDLAEEVLKRVRELKGDDKRIRELLKEVEDSSKESVERIEELLREVEESVKRSSREIERLLEEVARLAEDVIRKAEERGKKEVVKRIKEELDRVREEVKKLIKRNEELLKKVAEDVRRLLEKDKKALEEIKRRVEDELR

SEQ ID NO: 2525 - protein, 185 aa, Artificial Sequence; identical to SEQ ID NO: 2524
  Synthetic

SEQ ID NO: 2526 - protein, 181 aa, Artificial Sequence
  Synthetic
DELEELRKRVKENEDEVEKVLRELHKLNEENKEEVDRALEELRKRVRDIEEEIKKEPVDEELLRELERLVDELRRIVEKVIEDAKKLTEESNELNRRIIEESRRLSKELRKIVEDVSRVENRKDVVDKVRKVIEEVHKRSRDLAKEAREVNRRVHETTKKLVEDVRRVIEKVEEDVRRKVK

SEQ ID NO: 2527 - protein, 181 aa, Artificial Sequence; identical to SEQ ID NO: 2526
  Synthetic

SEQ ID NO: 2528 - protein, 181 aa, Artificial Sequence
  Synthetic
SSLEEADKKVDKNRRDVDRALEELHRRNKRNEEEIRKALKENRETNKRLLEEIRKNPVERELLEELEKLVRDSLRVSEEVIRDLERLTRESNRLNKEVIDESRKLSERLKDIVRTMSRVENREDAVRRVDKVIKEVHDESKRLVDELRDRNRRVHDETRRLDEESKKINRTVEELIRRKET

SEQ ID NO: 2529 - protein, 181 aa, Artificial Sequence; identical to SEQ ID NO: 2528
  Synthetic

SEQ ID NO: 2530 - protein, 181 aa, Artificial Sequence
  Synthetic
DKVEELLKRLEESTRRILKRVEELLRENERLAREVRKTVERLLEENRRLIEEVERRVRRDKKREAIEKLVRDVSRSADESSKRIKKLLDEVEESVRRSSKEIKRLLDEDRKLVEDVERRITDEKLRRELRRLLRESEKKIKEMLDRNKELLDEIERTIRELLKRNEDLLREVRERAKEADK

SEQ ID NO: 2531 - protein, 181 aa, Artificial Sequence; identical to SEQ ID NO: 2530
  Synthetic

SEQ ID NO: 2532 - protein, 181 aa, Artificial Sequence
  Synthetic
DEAEDLLRKLKRSTDEIKKTVEKLLRENEKTSRDIEREVRELLRRNKELAERVEEVARRENDKKKIEELLKEVERSARESSERIKKLLRDDEKSVKDSSDEIKRLLKEDKELVERVIRRITDEKVRRELERLLRESEKEIRKLLKRNKELLDESRDTIREMLERNKRLLEEVRKKIEKMKE

SEQ ID NO: 2533 - protein, 181 aa, Artificial Sequence; identical to SEQ ID NO: 2532
  Synthetic

SEQ ID NO: 2534 - protein, 181 aa, Artificial Sequence
  Synthetic
SEAERLLEELKRSTDEIKKRVEKLLEDNKRTSEEIEEEVRRLLETNRKLIEDVKRKVERDRDKDEIKRLLDEVKKSAEDSSRRIEELLKEDKKSADDSSEEIKRLLDEDRKLVEDVIRRITDERVRRELEKLLRDSERKIKEMLERNEKLARDSEERIRRMDDKNKDLLRRVKETIERKLK

SEQ ID NO: 2535 - protein, 181 aa, Artificial Sequence; identical to SEQ ID NO: 2534
  Synthetic

SEQ ID NO: 2536 - protein, 181 aa, Artificial Sequence
  Synthetic
DEVEDLLRKLEESTRRILERVKKLLEDNKRLIDRVRKEVERLLRDLKRLAKEIDEEVRRDNDKDRIRDLLREVERLVREVIKRIRKLLEEVKKSIEDSSREIKRLAEDDERLVREVIARVTDERVIRELEELLKESKKRIDDALRENEKLLREVKRRIEEAERTIKELLEEIKRKIAEEEK

SEQ ID NO: 2537 - protein, 181 aa, Artificial Sequence; identical to SEQ ID NO: 2536
  Synthetic

SEQ ID NO: 2538 - protein, 182 aa, Artificial Sequence
  Synthetic
KEAEELKRRLEDLVRRVEEDNRRLLEEHKKLVKDVRKRAKELLETHKKLVEDVTREVRKSTDSDVIRRLLEEIHRLVEEILREIEELLKRLHDLARRILERVRDTLRELEKLVRKILKDIKDLREVLEDLKRDLERARKINEESEKRIKDSDKRVHEEIRRVLEEVKKSDEEVRRRADRERE

SEQ ID NO: 2539 - protein, 182 aa, Artificial Sequence; identical to SEQ ID NO: 2538
  Synthetic

SEQ ID NO: 2540 - protein, 181 aa, Artificial Sequence
  Synthetic
REVDELRKELERIVKEVEDVIRDLNKKLKDILKDVKDKSDELNERLKKIVEDVRRLIRDVKGNRKDIRTVLERVKELVEETIRRDEELLDRVRKLVEETIRRIKRMLERVEELVKRVISRVRDKMVEELERLLDEARRRVEEAIRSNEELLKRIEEESERTVRSNEKLLKEAEEEVRRAEE

SEQ ID NO: 2541 - protein, 181 aa, Artificial Sequence; identical to SEQ ID NO: 2540
  Synthetic

SEQ ID NO: 2542 - protein, 181 aa, Artificial Sequence
  Synthetic
DEVEDVERDLKRILKEVKDRSDELIERNRKSTEDMKRRSKELNEELRRIIEDIRRLIRDTKGDKKKIEEALERVERLARRTIEEDKRVLEEDKRLVDRLLDTDRKLLKEVKDLVKEIIKRVRSKMVERLERLLEEAERTSRETLKRLEDTLRESEKRSRETVRSNEELVKEVTKEVEDAKK

SEQ ID NO: 2543 - protein, 181 aa, Artificial Sequence; identical to SEQ ID NO: 2542
  Synthetic

SEQ ID NO: 2544 - protein, 181 aa, Artificial Sequence
  Synthetic
DEVETVLRDNERTTKEAEDDVRRLNEELKEIIKRVREVSKRLIDELRRILEDVERRAREVKGDKDDIDRLLKEVEELVRRVIRTDEELLKRVEKLVRETIKKSKDVVKEDEKVVRRLISRIRSDFVERLRRTLEESKDKARRNVESNRELLERARKDSKRTLEELERLLETVRKSVDEMKK

SEQ ID NO: 2545 - protein, 181 aa, Artificial Sequence; identical to SEQ ID NO: 2544
  Synthetic

SEQ ID NO: 2546 - protein, 178 aa, Artificial Sequence
  Synthetic
EREERLEEKLKKSVDDSRELIERVLRKHEKVSDKVRRELERILEDHKRVLEEIKRVLKDRRKDKEVIRDLLRKIHEVATRLRERIKRLLEEVRRSVEEIKELVDRLNKHNERVIREVRRDSDVERLKDLLDKAHEEDRRAKEEVKRLLEDTTKKIKEFLDRVERSNEEVERELEKAER

SEQ ID NO: 2547 - protein, 178 aa, Artificial Sequence; identical to SEQ ID NO: 2546
  Synthetic

SEQ ID NO: 2548 - protein, 180 aa, Artificial Sequence
  Synthetic
DKDRKIKRIIEEVKKTIRKLLDDVRRINEEVLKELRKLLREVEEINKEILRRLKELVKTSKSDDVIRKARELIKRSREINKEVIDRLRKLVEDTRRINKTVIDEIKKLIDDVAEIIKDVTDEKVKKELDDEIRDAERELREAKKDMDRSNEELREEIKRAEERLRRLDEKLREEVEKDRK

SEQ ID NO: 2549 - protein, 180 aa, Artificial Sequence; identical to SEQ ID NO: 2548
  Synthetic

SEQ ID NO: 2550 - protein, 187 aa, Artificial Sequence
  Synthetic
SVKEEIKEMLKKIKRHSDEALKKNKETLDRDRKRVEDVIRELKKLLDEIRKRVEDVRRRVKDEDKLREIEDVLRRIEKRVTDLIREVRDSLRESEELSKRLLDKIKRSLDEAKRLVEELLEEVDRDDREEIARKVRELLERVLRDDRRVVREVEELNRRMHKKNEEVAKKVRDLLREVRKELEDVDR

SEQ ID NO: 2551 - protein, 187 aa, Artificial Sequence; identical to SEQ ID NO: 2550
  Synthetic

SEQ ID NO: 2552 - protein, 188 aa, Artificial Sequence
  Synthetic
REAEELLKELDEIIRRVEEEVKRLLDKVRETTKRIEEEIRKLDEDLKEIIREVEERIRKLKSDSGDERVRDKVRKLLRRLERVATESIRRIRELMKRDEDVIRRVLERVDELLKEIEKLIKEVRDRTDDEEVERRIKRLREKVKKKIDELKERVRRLLEESRRKAERVEESNRDLLRELKERLEERRR

SEQ ID NO: 2553 - protein, 188 aa, Artificial Sequence; identical to SEQ ID NO: 2552
  Synthetic

SEQ ID NO: 2554 - protein, 175 aa, Artificial Sequence
  Synthetic
SFEEEIKKIADEVEKRIRDAEKRSKDILEKSREVVERAKRRSEKLLRDAEREIKRVMEEKDDERIRRLLKELRDVVKRSKDLIDDLLRENKRVVDDSLRLIRELLRRLREVVRRLEEDGKDEMLRRLKKVTDDVRKRLEDSHRRLEKVTEESRKRADESHEELRKLIEEVREKLK

SEQ ID NO: 2555 - protein, 175 aa, Artificial Sequence; identical to SEQ ID NO: 2554
  Synthetic

SEQ ID NO: 2556 - protein, 175 aa, Artificial Sequence
  Synthetic
SSKERIEKILREVKREIEEAEKRSRDILKDSERIMRDVKRTTDDLLRKAEEIIREVAKRKDDDRVRDLLRRLRDVVRRSRELIKKLLKDNRKAVEDSKRLIKKLLDELRDMAEKLKKDGDEEVLKRLRELIDTVRRVLEESHKRLRELTKRSEEEARRVNEELRELIDRVRREAE

SEQ ID NO: 2557 - protein, 175 aa, Artificial Sequence; identical to SEQ ID NO: 2556
  Synthetic

SEQ ID NO: 2558 - protein, 175 aa, Artificial Sequence
  Synthetic
DVEKRIEELRERSDRIIDEARKRSEKLLRESEKMMRDVDKTTEDILREAEEEIKRVLDEKDDDRIRKLLEEIRKVIKESKDVIRKLLKENKEAVDTSRRLIEELLKRNREAIEKIRDKGEERVLKDLERLSKESEDELRRSHEELKRLTEESRETIEDVNRKIKEKIEDVKRKLK

SEQ ID NO: 2559 - protein, 175 aa, Artificial Sequence; identical to SEQ ID NO: 2558
  Synthetic

SEQ ID NO: 2560 - protein, 186 aa, Artificial Sequence
  Synthetic
SAEDSIRELLERDERLLEEARKEAKRLNEENERLLERIEETVRRLLEEIKRLLDDIRKKIKGEKLREIEELVRRVKRTIEKLLEEVKKSVEDSSKRIEELLEAVERSVERTKEEIRRLLDEVRKDRKEELVKRVEERIKRLHDENRRLVKEVIEEVEKLIRDNEKLAEDIEREIRRLLKELDEAAK

SEQ ID NO: 2561 - protein, 186 aa, Artificial Sequence; identical to SEQ ID NO: 2560
  Synthetic

SEQ ID NO: 2562 - protein, 181 aa, Artificial Sequence
  Synthetic
SEVEEIVKEIEKLIKENEEVVREVEKEIRELIKRNREVVERIRKELEKMLRELERLAREGADRSLIRTLVREIEKEIERLAEEIRKTTEDINRRIEELLKRIKETTKEINDRIRELLKRIDRGEARERIKELVRRNERLLREVEKRLKTLSEENKKLLEDAKRELDRILKEVRDLLRETER

SEQ ID NO: 2563 - protein, 181 aa, Artificial Sequence; identical to SEQ ID NO: 2562
  Synthetic

SEQ ID NO: 2564 - protein, 181 aa, Artificial Sequence
  Synthetic
SRVERLSAEIKKLIDENRRVAEELLRELEKLLKDNEDVVREVERRIRDSSRKLEELARAGAPEEDIRRLVEESKELIKRLLRDIERTTREINEVIKRVVETIRRTTDEINRRIEELVRKIDRGEAREDMDRLVRENERLLKKVEDDLRKLSEENKRLVDRARERLARLLEENERLVDERRK

SEQ ID NO: 2565 - protein, 181 aa, Artificial Sequence; identical to SEQ ID NO: 2564
  Synthetic

SEQ ID NO: 2566 - protein, 172 aa, Artificial Sequence
  Synthetic
REAEEALKRVKEILKRIAEEVERVLTEVKKLSEDVKRRVEEVLTRLKRSTEEIERKKGPKEDLERLVKDDERTIKELLKEVEELIRRVDRLSEELLRKVEKLIRDLSKTLRDVGVDKKLVEDVDREIKKLLEEVTKKAKRLNDENKRLLDDVRDKARRVIEESREVLERARK

SEQ ID NO: 2567 - protein, 172 aa, Artificial Sequence; identical to SEQ ID NO: 2566
  Synthetic

SEQ ID NO: 2568 - protein, 176 aa, Artificial Sequence
  Synthetic
SSEEEVEKLERKVRAVIRKAEEDLEDSLRKSEKMAKEVTDEIEKSRRKAKAVIDDARRRNVDTDLVRELLRKLEETTRRVKKLVDELLEENRRTTERLKELVKRLLDELDEVVKEIARRGEEEVLKKVEELIRKVEKVIRTVLEEDRKVSEDSLRKMRKVLKEDEDVIKEVRDRAQ

SEQ ID NO: 2569 - protein, 176 aa, Artificial Sequence; identical to SEQ ID NO: 2568
  Synthetic

SEQ ID NO: 2570 - protein, 176 aa, Artificial Sequence
  Synthetic
SMKEEVDRLLKEVKDVIREVRERIKKSEEDVRRVIDDARRKLEELSKRAREVVEEVRRRNVDDEAVERLLRKVDRTSKELKKTVDELLKELERTTRRVKELVDRLLEKLRDVAEKLKKRGEEEVLKRVKELIDEVRERIEKVLTDDRRLIERVKREIERVIRENEKVIRDARERLR

SEQ ID NO: 2571 - protein, 176 aa, Artificial Sequence; identical to SEQ ID NO: 2570
  Synthetic

SEQ ID NO: 2572 - protein, 178 aa, Artificial Sequence
  Synthetic
DEVEKLLRDLEELDRDIERKVRELLKRNKEVLDDIEREVRRLEKELRRIIKEVADVIRKTTDKRTVDKLLKELEKILKEVLDRVRRLLEEAKESLDRSREEIERLLEESKTLVDEVRRAGIDKKEVDKIEKHSRDLIERAKRETDRLLEEAERLMREVVDRVRKILEEAKRLIDEARR

SEQ ID NO: 2573 - protein, 178 aa, Artificial Sequence; identical to SEQ ID NO: 2572
  Synthetic

SEQ ID NO: 2574 - protein, 187 aa, Artificial Sequence
  Synthetic
DVEDEARRLEKELRDILREIADDIRKLLEENKELLKESEKDIRRAEKAIEDILDDVRKRITDEKKLREIEKLAEDVKRRVRELLEEDRKSVEDTTRRIKELLREVKELVERVIKRVRELVDEVRKDKKEKLLTEVSEEVKRLADELRELARRVKEEVKKLLDDNRETTDRIRRTVTELLEELKRKTK

SEQ ID NO: 2575 - protein, 187 aa, Artificial Sequence; identical to SEQ ID NO: 2574
  Synthetic

SEQ ID NO: 2576 - protein, 187 aa, Artificial Sequence
  Synthetic
SVDETITEVIKRIEDTLRKVKEDADRLDERNKALLEDSKKKIKEVEEELRRILEEVRRKVKDEKKLREIEELVRRVIEEVRRLLDEDRKSVERSSRRIEELARRVEDLVRKVIETIRRLMAEVRREERRELVEEVKERAERLLKELEDLIKKVKEEVERLLEENRKTTEDILKRAKDLARELRKRTK

SEQ ID NO: 2577 - protein, 187 aa, Artificial Sequence; identical to SEQ ID NO: 2576
  Synthetic

SEQ ID NO: 2578 - protein, 187 aa, Artificial Sequence
  Synthetic
DAKESIEEVKKRLEKSLEDSERESRKTLEENKDLLRRSREEIKKALDRLKDLLRRAEERIDDKDKLEKVKRLVERVEEEVRRLMREDEKSLEDSLETDKKLLREDEEVVKRIIDTVEELLRRVEEEEREKLVEEVEREVERLLRENEKTSDEIKKTSEELLKRNEETTRRILEEVERLLKRVKEATD

SEQ ID NO: 2579 - protein, 187 aa, Artificial Sequence; identical to SEQ ID NO: 2578
  Synthetic

SEQ ID NO: 2580 - protein, 186 aa, Artificial Sequence
  Synthetic
KVEETATRLREEVKRSDTEVHRENRESEDRNKKSDEEVHKTIRDALKRVKDKLDDVRRRRKSRKLEEIERIVRDILRRIEELLRRLHKLAKESRDLVRKTLEELHKLAEDILRRIKELLDEVKDERRDEIVRRVKEEVERLLEEHRRLAKRVRDENRRSTEEHRDLVRKVKREIERLEEELDRAEK

SEQ ID NO: 2581 - protein, 186 aa, Artificial Sequence; identical to SEQ ID NO: 2580
  Synthetic

SEQ ID NO: 2582 - protein, 186 aa, Artificial Sequence
  Synthetic
KVEESADRARREVKRSDEEVRKRNTDSREEIKKSDKEVHERIRELLERIRRILDEVRKKRKSRDLDRIRRIVEEIERRIERLLEELHKLAEEILKRVEETLKRLHELARRILEEIKRLLKEVERENRDEIVRRVEDEIEKLLREHRELVKDVERENRRLLEEHKKLVEEVEREVRRMMKKLRDATK

SEQ ID NO: 2583 - protein, 186 aa, Artificial Sequence; identical to SEQ ID NO: 2582
  Synthetic

SEQ ID NO: 2584 - protein, 186 aa, Artificial Sequence
  Synthetic
KVEEEIEKLLRHNDELLKEVEKRAREVEERIKRSDEAVHDSIRKLLEDVKRILDEARRRRKGEELEKLEKIARDVLEEIKRLLRELHELAKRILEEVRRLLEEIEKSSRESKERIKRLLEELKRENRDEIVERVEREVRKLDDDDRRLAERVLRRAEELLKRHKELVERVEREVERLLKELEDAVK

SEQ ID NO: 2585 - protein, 186 aa, Artificial Sequence; identical to SEQ ID NO: 2584
  Synthetic

SEQ ID NO: 2586 - protein, 186 aa, Artificial Sequence
  Synthetic
KAEDEARRLERHNKELLKEVRKDNTRSEREIEESDKRAHDEIKRLEEEVEEILKDIERRRKSDKLRKIREIVERIRREIRRLLKELHELAKTIKDRVRDTLRKLDESSRRSLELIKRLLREVERENRDEIVERVRRTVKKLDEDDDKLVKDVRKENKDLLRRHEELVREVTERVKKLLRDLREASR

SEQ ID NO: 2587 - protein, 186 aa, Artificial Sequence; identical to SEQ ID NO: 2586
  Synthetic

SEQ ID NO: 2588 - protein, 183 aa, Artificial Sequence
  Synthetic
DVEDEVRRAEESNRDSDRKVHEEVRRVLKSNRDSDTKAHRDVEEAKRRLKTELKDIERKRKGRKLDDIRRVVEEIERRVDTLLERIHRVVEETLERIKRALEEVHDVVRKSLEDIRRLLEEVREKRLVDKVRTEIKRLNDEHRKVLKKVRDLVRKLNEDHERVVRDVRREIKRLRDELRETAR

SEQ ID NO: 2589 - protein, 183 aa, Artificial Sequence; identical to SEQ ID NO: 2588
  Synthetic

SEQ ID NO: 2590 - protein, 183 aa, Artificial Sequence
  Synthetic
DVEDEVRKMKKELDELLKRAEEEVKRVLESNEKSDDEVHKRAREAEEELRRLLDDVRRRRKSEKLRRIEEVAKRVLDLVRELLERVHKVVEDTKETIRRLLEEIREVVREIEERVRRLLEEIRDKKVVKDVEKKIRDLLTKLREVLRRVRREVKKLNERHEDILREVERLIEELRKRLEDTTK

SEQ ID NO: 2591 - protein, 183 aa, Artificial Sequence; identical to SEQ ID NO: 2590
  Synthetic

SEQ ID NO: 2592 - protein, 187 aa, Artificial Sequence
  Synthetic
DIEDEVREAIERLKKLLEDSEREVRESIKRLRDLLREIARESEEANERIKRLLEEIERKVKDEEKLERIREEVERLSETNRRVLEEAADLVRKLIRENEEALEDSKRLVDELIREIEDVLRKIRKDDKEDVRRRLRELVEKVMREIEDSNRKLRKLSKDSEKAVRDAERRNRKLVREIEDRIRKSLK

SEQ ID NO: 2593 - protein, 187 aa, Artificial Sequence; identical to SEQ ID NO: 2592
  Synthetic

SEQ ID NO: 2594 - protein, 187 aa, Artificial Sequence
  Synthetic
EVDKEVRKVLKDIERLLEEIERRVRKSIEDLKTELKKIEDESEKANRELERLLREIKDRVDDEKKLREIEELVRRLSDENRRVLDDARRLVKKLIEENAEALKKARDDVRKLLEEIKRVLERIREDDKEDVRRELRELVDKVRKDVERVMKALEDLSRESRREVRRVKEKNRRLVEEVKKRVEDKAK

SEQ ID NO: 2595 - protein, 187 aa, Artificial Sequence; identical to SEQ ID NO: 2594
  Synthetic

SEQ ID NO: 2596 - protein, 174 aa, Artificial Sequence
  Synthetic
SEDEDMVRDVKRLIDEVRKLIERVKREVEDLIRRLNELDERVVRTSEELARDVKRLVDAGLSREEVEKVVRESIERTRRLAKELDERNRDVLREVKRLVAEVEKVIRDVLKAVEEKLDSEDVERLKEEIKELLDRARRTIEELERRIRENVKRSRKKIEDLVRRHKKILDEARK

SEQ ID NO: 2597 - protein, 174 aa, Artificial Sequence; identical to SEQ ID NO: 2596
  Synthetic

SEQ ID NO: 2598 - protein, 174 aa, Artificial Sequence
  Synthetic
REKEEAVKTVKELIKEVREMVERLHRKNEEMIRTVREVVKELNERNKELIKTVRDLRRRGTDKEDLRRIIEEVLDHIRRSLEELERLAEEVLEHIKRTLEEIERLVREVLDVIKKLVDSEDARRLEREVRELLRDVREKVERNKEKVERLKREVRKRVRDDLERVKRLKEEVDT

SEQ ID NO: 2599 - protein, 174 aa, Artificial Sequence; identical to SEQ ID NO: 2598
  Synthetic

SEQ ID NO: 2600 - protein, 174 aa, Artificial Sequence
  Synthetic
SEDERAVREVEKLIKRVEEVVRRLNERNRRLIEEVRRIVEELHRRNEDLIRKVRELAERGVDKRDVERIVREVLKHIRDSLERLERLAREVLKHIRKTLEELTKLAREVLEAIRRLVDSREMERLEREVERLLREVERRVKEDEERVRKLLEEVERLVRRNARKVEELLKEVEK

SEQ ID NO: 2601 - protein, 174 aa, Artificial Sequence; identical to SEQ ID NO: 2600
  Synthetic

SEQ ID NO: 2602 - protein, 184 aa, Artificial Sequence
  Synthetic
SEKEKLTEDIERIIDKVRREVERLNEENERLIREVRKRVEKLNRENKEAIKRVEEEVRRLRDRDKSDVRKKVEEAIRKLERSVRESLKEVRRLIEELKRSVEETLREIERLAKELKDILDKVRTDGIDEELVKRLEEKIRELLKRARDLVKEDEDRIRKLLEEIERVNRDDKRKIDKLLEEVRR

SEQ ID NO: 2603 - protein, 184 aa, Artificial Sequence; identical to SEQ ID NO: 2602
  Synthetic

SEQ ID NO: 2604 - protein, 182 aa, Artificial Sequence
  Synthetic
KSDEEVRERVERLLREVRRLTREVRRHAKETLDTVAELVDRVRREAERLLREVEELLRRLTDKDVLEEIKKRLDEVLKKLEDIVREVLKEIKRLLDENRRISEETLRRLDDVLRKLEELARRLGVDETEVRDVKRKADEIKEEDKRILEEAEKRHKELLEDLKRLLDRIKEEVKRVREDIKT

SEQ ID NO: 2605 - protein, 182 aa, Artificial Sequence; identical to SEQ ID NO: 2604
  Synthetic

SEQ ID NO: 2606 - protein, 174 aa, Artificial Sequence
  Synthetic
REEDEARKRLKELLDRITKLSKEVRDLIREMLRELEESIERTKREIDDLLRRLEEIRRAGVDKKELKKVADDVLKRIEELLKEDKDVADRVLAVIEKLLRDLERLNRDILREVEEIIDSDEVERVKREIEEHLRRSEEDIRRVAEEIKKLVEESRRVIEEAKDRVRRLVERVKK

SEQ ID NO: 2607 - protein, 174 aa, Artificial Sequence; identical to SEQ ID NO: 2606
  Synthetic

SEQ ID NO: 2608 - protein, 174 aa, Artificial Sequence
  Synthetic
SEEDDARRKVEELLRRDKKVVDEVRDELRKLLEELRRLSEEVEKLIRKLEKELREVRKRGEDKDVLRKVVEDIKREVTRLLKELEEANREVEKRVKELLDRLRRTTEEILKEIRKIIKGETVKKVEDEVRDSLRRAKKIIEDAARAIRKHLEESKRRIEEARKRLEELLKEAED

SEQ ID NO: 2609 - protein, 174 aa, Artificial Sequence; identical to SEQ ID NO: 2608
  Synthetic

SEQ ID NO: 2610 - protein, 175 aa, Artificial Sequence
  Synthetic
SREEEAKKEVKRLLDELKKLSDDSRKRIRESHERLKRVIEEVRREAERSHEELERVIRRGEPREVIREVVRRSRELIKKLLKRLEDVARESKRLIEELLKRNKEMVDEIKKVIKDVVESEKDVRKVDRDVDEILKRSEDIIRKVKEDSERLLKEVRERIEEMKKRTDDLLKEAEK

SEQ ID NO: 2611 - protein, 175 aa, Artificial Sequence; identical to SEQ ID NO: 2610
  Synthetic

SEQ ID NO: 2612 - protein, 177 aa, Artificial Sequence
  Synthetic
RKEETLKRAEEKSKETLERNKRLLERIEEESRKTLEKNKDMLRRVKKRVEDLLREIKRDKPEAEEVRKRVEDLLREVKRSSERSLREDERLLREVKESSERSLKRDKDLLDRVKELIKEVPEEELRRVIEDVLRESEKLHREDEELARRVLEESERLHREDEELARRVEKEIRELKK

SEQ ID NO: 2613 - protein, 177 aa, Artificial Sequence; identical to SEQ ID NO: 2612
  Synthetic

SEQ ID NO: 2614 - protein, 172 aa, Artificial Sequence
  Synthetic
SLDELAKKAKEDSERSVRTDEKRLEEIARRIKELIKENEDLLREVKKEIDRLIEEIKDDRVLKEIERLLREVEKHVTRSSEEIKRLLKEVEDHSRESLREDEKLLEDVADMVKRVDEEEARKLLEDIKRRSEELHKRNDELAREVEKRIRKLIKENRELAEEVRRRIEELRR

SEQ ID NO: 2615 - protein, 172 aa, Artificial Sequence; identical to SEQ ID NO: 2614
  Synthetic

SEQ ID NO: 2616 - protein, 172 aa, Artificial Sequence
  Synthetic
RTDETVKKIEEDSRRSLEEDRKELEEVERRSRESIKENERLLREVAERIKRLIEEIDKREVLDEIRKLLREVEKHVRDSSREDEELLKRVKEHSERSLDEDRRLLEEVADLAKRVDEKTLKELADRIKERSEELHRRNEKLAREVLERSKELIKRNEELARRVIEEIKKLKK

SEQ ID NO: 2617 - protein, 172 aa, Artificial Sequence; identical to SEQ ID NO: 2616
  Synthetic

SEQ ID NO: 2618 - protein, 181 aa, Artificial Sequence
  Synthetic
DVEETLKTVEDESRKTIETLRRSLRKSEEESKRSIDRLRESLERSREEVERLLREIERDKPEAKDVVEKVRKLLEDVRREYERVLEDDRRLADDVRRVYEEVLERDKRLLDEVRKEAKRDTREEAVEKLKKLAEDVRRESEELRRELEELSKDVRRVSEELERRLRKLSEEVKKRIKDLKR

SEQ ID NO: 2619 - protein, 181 aa, Artificial Sequence; identical to SEQ ID NO: 2618
  Synthetic

SEQ ID NO: 2620 - protein, 181 aa, Artificial Sequence
  Synthetic
SVEKILRDVEDTSRRTIEELKRSLEESKKTVTKLLEENKDLLRRIKEDVRRRLEEIKRDKPEMKEVVERVERLLKEVEDSADRTTKEIKRLLEELEKVYREVLETDKKLLDEVRKVAEESTSEEAVERLKELAEEVKRVSKELLEELRKISEEIERRIRRLIEENKELADRVREEIERLKK

SEQ ID NO: 2621 - protein, 181 aa, Artificial Sequence; identical to SEQ ID NO: 2620
  Synthetic

SEQ ID NO: 2622 - protein, 179 aa, Artificial Sequence
  Synthetic
DKVDRVIEEARRILERLRKRVTDVVRELEEINRRLKREVDESVKEVDEILKKLEERVRKRKESERLLEDIKETLERVLRKNDDVVRKVEELVKRSDEKLNKVVEEIKRELDEVLKEIDRLEVRKELVEKLDREVKRLLKEARELSEENRRRSKKLLDELRKSSERIREKVEDLVRRIRK

SEQ ID NO: 2623 - protein, 179 aa, Artificial Sequence; identical to SEQ ID NO: 2622
  Synthetic

SEQ ID NO: 2624 - protein, 177 aa, Artificial Sequence
  Synthetic
SEEEAAKRRIDELLKRLKEVSDKVKEDIDELLKDLERRSREVVEEIKKLLEEVKDRVRKRREEEMLKRLEEELARVLREAERLIDEVDKLSEEVLRRVEELVREVSKLIKEVLERVRRDIDSERLKRVTEEAKRLHEENKKLLDDVRREARRLNEDNRRLLDEVRKRVEEVLRRIRK

SEQ ID NO: 2625 - protein, 177 aa, Artificial Sequence; identical to SEQ ID NO: 2624
  Synthetic

SEQ ID NO: 2626 - protein, 176 aa, Artificial Sequence
  Synthetic
DEDRRALEEVRRVLEEDKRVSKRSRDLIEKVLREVEELIKEVTKRAEDVLRRVREIIKTSGGRVEEVDKVIRELERTVDKLLRDMEEVIKEVEKLVRKVLRENRETTDRVREVVERIVKVRELVKKVEDEIKESEDESEDLIRRADEAVKRLRKRVRDVIEKARRDLEKIVTDAKK

SEQ ID NO: 2627 - protein, 176 aa, Artificial Sequence; identical to SEQ ID NO: 2626
  Synthetic

SEQ ID NO: 2628 - protein, 184 aa, Artificial Sequence
  Synthetic
SIEKLIEDVRREVERIEEESKKLVKKAREDVKRSHDHSKRLMEEATRRVRDILRRAEEMPKSEDELEELRRLVEEVEDRIRRLLKESADVDRDVKRLIDEALERNRKLVEDVRRRLDELKDRLRRKELVDDARRRVEELLRRLEDSLRKSERLVRELLKRSKEVDDRIREEVKRLLEELDDRRR

SEQ ID NO: 2629 - protein, 184 aa, Artificial Sequence; identical to SEQ ID NO: 2628
  Synthetic

SEQ ID NO: 2630 - protein, 178 aa, Artificial Sequence
  Synthetic
DTEEILKRIEEEIRRLLEENEKLLRDAEDTVRKSLEEHERILDEVTKRIRKMLEEIARTDRPGVEDVLREVRDLLRRVREVAKRVIDDNRRLLKEVRDSVKETSEEIKRLLDEVRDLMRKVDDETLKRLAEEVLREVERLLRENERLIREVERRADKTVKDLEKLIEEVERRIDELKK

SEQ ID NO: 2631 - protein, 178 aa, Artificial Sequence; identical to SEQ ID NO: 2630
  Synthetic

SEQ ID NO: 2632 - protein, 178 aa, Artificial Sequence
  Synthetic
DSKEIIDKVREDIKRADEENKRLLEEVRDRIRKLLEENETLLKDSERKARELLEELRRKDSPGVEEVLKRIRKLVEDDKESVDRSTKTIKKLLKEVEDSVRESSKEIERLLREVEDIVRKVPEEDLKRLAKEVKDRIRELLERNRELIKEVEKRVRRLLDENRKSSEEIRKEVEDRKR

SEQ ID NO: 2633 - protein, 178 aa, Artificial Sequence; identical to SEQ ID NO: 2632
  Synthetic

SEQ ID NO: 2634 - protein, 174 aa, Artificial Sequence
  Synthetic
SDEERALKLVEDVIRDVKRLNKRDRELIEKVERDIEKLLEDHRRLVDEVRRRVKELEDKVEDKEEVLKRIKDLLDEIHKLVEEILRRIKKLLEDIEESSRRSLEEIRRLLEELRRRIDSELLKEVEERIKKLLKSNKDLLREVEERVRRALERVKRSDEEVHKMARDALRRVRK

SEQ ID NO: 2635 - protein, 174 aa, Artificial Sequence; identical to SEQ ID NO: 2634
  Synthetic

SEQ ID NO: 2636 - protein, 174 aa, Artificial Sequence
  Synthetic
SEDEDAERLVEEVIRRVKELLDTHKRLVEEVERKIRELDKKDAELVKEVEKRAEDLRRKVDDKDDVLRKVEKLLRELEESSKRSLEEIKRLLEDIHRLVKEIEKRIKELLDELRRRIDSELLERAEREIRRLLREVKESDKEVHRRVRRMLEHNKDLLRRARDSIKKVLDEIRR

SEQ ID NO: 2637 - protein, 174 aa, Artificial Sequence; identical to SEQ ID NO: 2636
  Synthetic

SEQ ID NO: 2638 - protein, 174 aa, Artificial Sequence
  Synthetic
SEREDAERVIERVEREIRELNRRDEELIRRVEKEIRRMLEEHKTLVKEVTRELDRLRREVSDKEEVLRRIEELLRRIHELAKEILKRIKKLLKDLEESSKRSLEEIKRLLDEVRKRIDSEDLKRVDKKVRDVLRSNKELLDEARKRITKVLEEVRRSDEEVKRRAEKVLDEVRK

SEQ ID NO: 2639 - protein, 174 aa, Artificial Sequence; identical to SEQ ID NO: 2638
  Synthetic

SEQ ID NO: 2640 - protein, 174 aa, Artificial Sequence
  Synthetic
SEEEDAERAVREAAELAKKANKEDEELARRAAELAKKALREHEELVERAARLADEAEKKAEDKDTALKLIKEAADRAHKAARDALRVIEDAARKADKSSKESLDLIREAADDARKRADSERAKKAEDDARKAAEDNRRLAKRAKEEARRAAEEVKKSDKEAEERARRAAERVRR

SEQ ID NO: 2641 - protein, 174 aa, Artificial Sequence; identical to SEQ ID NO: 2640
  Synthetic

SEQ ID NO: 2642 - protein, 173 aa, Artificial Sequence
  Synthetic
SLERLLEEVTRRSEETVRTNEEILRRAADEVRKAIESNKDLLRKIKKEVDDVKRRLKDEKALRDIERALDEVRRLVEETIERIRRMLERVRKLAEETIEVDRRLLKKVEDLVRRGLPEESVRTIIEEVERTSREMNERLKKIIDEVRRTIEELNKDLKRILEEIRELVKRLET

SEQ ID NO: 2643 - protein, 173 aa, Artificial Sequence; identical to SEQ ID NO: 2642
  Synthetic

SEQ ID NO: 2644 - protein, 173 aa, Artificial Sequence
  Synthetic
SLEETLEEVDRKSKETVKRLKELLDRIRERVEEAIKSNEDILRRIKAEAEEAERRLKDEEMLKEIRRLAEEVEKLVRKTIEEIKKLLEDVKELVERVIRRDKEVLEEVRRLVEKGLDESEVERIIRELERVSRELMELLKKILEEVRKRIKELNDRLEEILRRVRKRIRELEQ

SEQ ID NO: 2645 - protein, 173 aa, Artificial Sequence; identical to SEQ ID NO: 2644
  Synthetic

SEQ ID NO: 2646 - protein, 173 aa, Artificial Sequence
  Synthetic
SLEELLERIKRDSDRTVRELEELLERAEEISRRTEKSNEDSLRRSTKEVKEAEDRLKDEDALKKIRDLLERDRKLVEDTIRDDRRVLDEVRRLAEEVIKRDKDVLETVSRLVERGLPEEVVKKMLDELRDRSEKLLRTLRDIIRRAKERSDDLNRKNKESTEKVREDIRRLEQ

SEQ ID NO: 2647 - protein, 173 aa, Artificial Sequence; identical to SEQ ID NO: 2646
  Synthetic

SEQ ID NO: 2648 - protein, 173 aa, Artificial Sequence
  Synthetic
KLEELLKRIAEESKKTVEELEKLLEEVERISKKTVEELEDSLRRSEEDAKEAEERLRDEDMLRKIREMVKRDAELVKKVIEEDKKVLDDVRRLAEEVIRADEDALRKVEKLVRDGLPEDDVRRILEEVRRLSEELKTRLRKILEDLRRLSEKLKRENEESTKTVRKVIEDLER

SEQ ID NO: 2649 - protein, 173 aa, Artificial Sequence; identical to SEQ ID NO: 2648
  Synthetic

SEQ ID NO: 2650 - protein, 173 aa, Artificial Sequence
  Synthetic
SLEELLKRIKERSEETVKRLEDLLKRVREDIDRAIKELKKSLDDSRKTVEDIEREIKDEDVLRRIRKLLEDDERLVREIIKEVKKLLKDVEELVKEVIERDKKLLEEVERLVRKGLPEEKVKEIAEEVRRRSEKMLEELKKLVDEVRKRLEDLRKRNEDSTEEMKKRVEEEKR

SEQ ID NO: 2651 - protein, 173 aa, Artificial Sequence; identical to SEQ ID NO: 2650
  Synthetic

SEQ ID NO: 2652 - protein, 181 aa, Artificial Sequence
  Synthetic
SEVEKVIKDNKRSVDEIRKTLKRVLERNEKTLRENEKKIRDIIAEVDKRLKDLEREIDDRDEAREIKKEVKKLVDDLRRDAEEIVKESARLSKELKEKLERIVREVEELSRRLSEEAKKGRDDKAIKEIEEEVRRVDDRVRKLVEKLDRDIKEVDDRSRKLTDDLRRKVEEVLRRIKETVT

SEQ ID NO: 2653 - protein, 181 aa, Artificial Sequence; identical to SEQ ID NO: 2652
  Synthetic

SEQ ID NO: 2654 - protein, 174 aa, Artificial Sequence
  Synthetic
REVEEIEKELRKIIRDLKELLRELRERLEKLDRDLKDLLRRLREENREILDRLRKEPKDKDVEKKIEDLLRELKKKNKEVLERIKEIMERSRREVEKVITTIDELIKRVKEKVRRNNLDEKVIRDADRMAKELKKDLRKVLEDNRRTVEKLKRDLEEVDKESDEEARKLREEIR

SEQ ID NO: 2655 - protein, 174 aa, Artificial Sequence; identical to SEQ ID NO: 2654
  Synthetic

SEQ ID NO: 2656 - protein, 180 aa, Artificial Sequence
  Synthetic
SESEKIEREIRKLIDDSRKNSERIRREIEKLIRDSEETSKEIKKEIEDLLRELKEMLDEIKKRDDDRLKEELKKRADDVERRIRELIKKNKDRLDEILERVERLVRENKERLDKIEEDIRRKGVPEEVLRRAKKALEEDKKRNDEVLDEVRKALEEDKKRNDKVLEDARRVIKKIKDELK

SEQ ID NO: 2657 - protein, 180 aa, Artificial Sequence; identical to SEQ ID NO: 2656
  Synthetic

SEQ ID NO: 2658 - protein, 180 aa, Artificial Sequence
  Synthetic
KDEETIRRRIEELLKRSEDNSERIRRTIRELLERSKKLSEEVRKRIEELLKRLDEKVKEIRKREDERLVRDAKRELERILDEVRRLVEKTKRDLEDMLRRIKELVRRNKEEIDRMLEEIRRSGVPEEVLKEAEKRLREDKKRNDEVLKRVTEAVEEDKKRNDDVLEKVERAIREIARKLD

SEQ ID NO: 2659 - protein, 180 aa, Artificial Sequence; identical to SEQ ID NO: 2658
  Synthetic

SEQ ID NO: 2660 - protein, 174 aa, Artificial Sequence
  Synthetic
SEEEKVIRDLERLLEENEEHSRDVERKLRESDKRLREMVKKVSDEIRKLDEEVEELLRRGTDSDRLRKVLEDILKRSKELADKLKKDIDKSLDEVKKLIDRDDEHVKDIEKKVRELRVSEDALRRVKEALERSKKRLDKVLKDHEDSVRELKKEIDDVLKRNEETVREIEKRAR

SEQ ID NO: 2661 - protein, 174 aa, Artificial Sequence; identical to SEQ ID NO: 2660
  Synthetic

SEQ ID NO: 2662 - protein, 174 aa, Artificial Sequence
  Synthetic
EEVERVKRELERLLEENDEHSKEVEKRIRDLDRKAEELLREIEERLRRSDERLKRLLERGTDEDELRKRIKKSEDEVRELIKKLTRVLEEILKRTKELADRDKKHVRDVEKRVRELDVEERVLKKVEDDLRESEKRVEEVLRKNEETVRRLKEELRKVLEDHKRTVEELRRRLT

SEQ ID NO: 2663 - protein, 174 aa, Artificial Sequence; identical to SEQ ID NO: 2662
  Synthetic

SEQ ID NO: 2664 - protein, 174 aa, Artificial Sequence
  Synthetic
SREEEVEKRIREVLKRLEELLADVERRARELNRRLEKVVRDVKKEIEDLDRKLRKLLKDGVDSEELKKVLKEVKKRSTELAKELEELIREVNRRVEKLVRDLREAIKRVEEEVRRLDVREKVLKDVTDMARELERRLEEVLRKHRKSSEDLKRRIDEVLKRNEETLREIDRRLN

SEQ ID NO: 2665 - protein, 174 aa, Artificial Sequence; identical to SEQ ID NO: 2664
  Synthetic

SEQ ID NO: 2666 - protein, 177 aa, Artificial Sequence
  Synthetic
SEREKAKRELERLLEEDRKHLKDVERELKELDEEDERHLREVEKELKELDDRAKEALDRRPDQKDKLRELLKRIKDRSEELVRRHEETNKRIEERTKELLDRHEESNRRIKKRLEELKDVVEEEVLKEVKRLSEKSKTDLEKIVRDNKRSSDDSRRELERVIRENEETLRRLAERIK

SEQ ID NO: 2667 - protein, 177 aa, Artificial Sequence; identical to SEQ ID NO: 2666
  Synthetic

SEQ ID NO: 2668 - protein, 177 aa, Artificial Sequence
  Synthetic
KEEEEAKKELDDLLRRLKDLYRRIREELERLDRRLEEAYRRIKEDLKRLDEELRRLLEKDRDDRERIETLLEEILRRSEDLVRKLKKLNDEINTRTEELLKRLKKLNDDINKRLEDLRDVIDEKVIRDVRKASRDTEREIRKVAEDNRKSSEDSRRKLEDVLRKNKETLDRLRDELR

SEQ ID NO: 2669 - protein, 177 aa, Artificial Sequence; identical to SEQ ID NO: 2668
  Synthetic

SEQ ID NO: 2670 - protein, 177 aa, Artificial Sequence
  Synthetic
DEKETVEEELRRLLEELKKHIEDTERKLRKLDTDLEDVYRRIEEELRRLLEELKKMLDDRKEDREELRRLLEEIERRIRRLAEELKKLNKDINDTTKDLVRKNERLLREILKRLRELRDLVDEKVLRDVEEALRRAKKRSDDVVRENEKSSRRSEERLERVLRDAKRVLKELKERID

SEQ ID NO: 2671 - protein, 177 aa, Artificial Sequence; identical to SEQ ID NO: 2670
  Synthetic

SEQ ID NO: 2672 - protein, 185 aa, Artificial Sequence
  Synthetic
SELEEVLKRVAEVVERVSREDEKVNRKNDAAVKKVTKDDRKVLEDLERKLRELEKDAKDRGVDKELVDRIREKIETIKEEIRDLNKKLKELIEDTLRDNRRLNEEVRRKVERILEKLEEIRRRGSDEDVIRRLEKEVRDVLKDWEEKSKEAEEKNKTVNKRWEDESRRLKKKVDRLIEKIKEDLR

SEQ ID NO: 2673 - protein, 185 aa, Artificial Sequence; identical to SEQ ID NO: 2672
  Synthetic

SEQ ID NO: 2674 - protein, 177 aa, Artificial Sequence
  Synthetic
RSEELLREIEERIKRLKEKNEELVKEIRRRARELEREDDRAKKEIDDLARKVEEKIRRTIRDKDRARELEKRLRDILREIEDLSRKSEKAIRDVERKVEELSEENKRLIEEIADRVRRKRMDDDVVREVRKLIEELDRHLERLVEEVRRVVKELLEISKEILDRVREVITRLREEVK

SEQ ID NO: 2675 - protein, 177 aa, Artificial Sequence; identical to SEQ ID NO: 2674
  Synthetic

SEQ ID NO: 2676 - protein, 179 aa, Artificial Sequence
  Synthetic
SEVEDAVRKIRELAKEIARAIDELLKEHEELIRTVADALEKLVRTSDKLAEDIARVIDGGVSEEALKEALKRWREATEEVRKRLEDVLRRTKEHLREVAETIREALERLERAIRRVEEEGTIGRELLEELKRILEDLERRAKEIVDRARELNKRAEDEIRRLIEDSKRKLEEIRKRIEE

SEQ ID NO: 2677 - protein, 179 aa, Artificial Sequence; identical to SEQ ID NO: 2676
  Synthetic

SEQ ID NO: 2678 - protein, 179 aa, Artificial Sequence
  Synthetic
KEAEEAVKRLRDLVRRVEEETKRLLRESRESLKTLEEITDRLLKRSEESVKEIEKVITRGRPEKDVKDALDKHRDTNREVLKRLTDLNREHKELNEKVARDLERIDEELKKALDEVTRRGTIGRELLTEVTKLIKDHHDKVREILRESDKELDRHHKDVERILERSKRELERLEDEVRR

SEQ ID NO: 2679 - protein, 179 aa, Artificial Sequence; identical to SEQ ID NO: 2678
  Synthetic

SEQ ID NO: 2680 - protein, 171 aa, Artificial Sequence
  Synthetic
SREELLKEIKKKIDDIKRENEKLLRDIERLIRELEKRDKELLDEARKTSEELVRRAGTEDEKVKKLLEESERLIEEVERVSREMVERARRLLERVKRASERLTRKLEDILRRKGADRDVVRDVDRILTEWKKESEDLVEEVKELIKRWKDTSEELVRRVRELNERIDRETR

SEQ ID NO: 2681 - protein, 171 aa, Artificial Sequence; identical to SEQ ID NO: 2680
  Synthetic

SEQ ID NO: 2682 - protein, 178 aa, Artificial Sequence
  Synthetic
SEVETVEEKVKKVIEDLRRLLKEVRDRNRRIIEEIKRLLERVAEKNKRIVDEIRDLLRRRSTEEVLKDIERLLREAHETNKEVLERVKRLADEAHRRNEKVLEEIKRLADTIDKELKDINVDEDIIRRIDELFREILKEVKRLNEESKRRLEKLEEDIKRLDDRSREEAEKLRDAVRR

SEQ ID NO: 2683 - protein, 178 aa, Artificial Sequence; identical to SEQ ID NO: 2682
  Synthetic

SEQ ID NO: 2684 - protein, 178 aa, Artificial Sequence
  Synthetic
SEVEKVARDVEEVIRTSEDKTRKLEKRNKDIIREIKKLLDDLARENKRIADEIKRKLDERREERVLEEIERLMRKLHEDNKRVLKRVDELLRKLHDENRRLNEENKELAERVEDTLRRKNVDKRLIDEIRREMERSHRRDEEVNEKSKREADKLRRDVEKLDEDSARELKKLEDEVRT

SEQ ID NO: 2685 - protein, 178 aa, Artificial Sequence; identical to SEQ ID NO: 2684
  Synthetic

SEQ ID NO: 2686 - protein, 178 aa, Artificial Sequence
  Synthetic
SEVERVERELDKVITDLRRLLDDLKRKNEELVRRIRELLKKVKERNKKIVTEIDDLLRRRKTEEVLKEIKKLLEDAHRDNTEVLKEVRRIVKEAHDLNKKVLDEIKKLLRELLEDLKRLNVDERIIRRIKELADRIEERVKELNERVREEVRKLEEDIKKLDDESREEARKLEDKVRQ

SEQ ID NO: 2687 - protein, 178 aa, Artificial Sequence; identical to SEQ ID NO: 2686
  Synthetic

SEQ ID NO: 2688 - protein, 177 aa, Artificial Sequence
  Synthetic
SSEEIRREIERESEDTRRRLDRVLEDIERLSRETKEHIKESLERVRREHDRLRRELERKAKDKDTVTELAKHIKRSLEEVERIHEELLRDDERVLKEIKEIADELRRRDDEVVKRIRDREMTEEVRREVRKLIEESRRAIDEVKRRVEELIKESRDRNRRIEERVKELVKENAERIR

SEQ ID NO: 2689 - protein, 177 aa, Artificial Sequence; identical to SEQ ID NO: 2688
  Synthetic

SEQ ID NO: 2690 - protein, 177 aa, Artificial Sequence
  Synthetic
KSEEIRRKIEEDSRRTKKELDDILDEIRKLAEKVKKEIEELLRKVRRRHEDMKRRLREKVKDKDTVTELEKHIRRSLDEVRKLAEELKKKIEEVKRELKKLADELRRRDDEVVKRIRDKPVTEEVAKEVKKLIEESRKLLEELKDTVRRLIKRLKELLEELERRVEELIKENEERIR

SEQ ID NO: 2691 - protein, 177 aa, Artificial Sequence; identical to SEQ ID NO: 2690
  Synthetic

SEQ ID NO: 2692 - protein, 177 aa, Artificial Sequence
  Synthetic
RSEDILREIEDLSRETKEKIDEILERIRKLAEEVKRHIDESLKEVRRRHEEADRELDEKMRDKDTVKRLKEHIRRSLTEVEDLHRKLREEVERVLRKVERDIDKLRETDDRVAKRIRSKRADEEVAKEVRDLIRRSEDLLRRILETVDKLIKELRKLNEDILERVRKLIKKNKDDIK

SEQ ID NO: 2693 - protein, 177 aa, Artificial Sequence; identical to SEQ ID NO: 2692
  Synthetic

SEQ ID NO: 2694 - protein, 177 aa, Artificial Sequence
  Synthetic
KSEEIERRIRERSRETRRELEEVDKKVKKRHTELREHLKRSLKKVKEDHDDLKRKLEEKIKDKDTVRRLDEHIKRSLEEVKRLHEELERHLTTSLRKVEEEAKRLKKRDDDIERRIESKPMTEEVEEEVKRLIEESKELIKRLEEEVDKLIRDNKKLNDDILRRVKRLAEENDERIR

SEQ ID NO: 2695 - protein, 177 aa, Artificial Sequence; identical to SEQ ID NO: 2694
  Synthetic

SEQ ID NO: 2696 - protein, 177 aa, Artificial Sequence
  Synthetic
SSEDILRDIERIARKLREDLKRVLKRVKELSDDTRREIERLVEEVERIHERLRRELERKVSDKDTARRLKKHIDDSLREVRKLAEDLERTDKKVLDEIRKLAEDLKRKIDKIVEDVRRKRMDERVADEVRKLIAELEKLIRDLKRRVDELIRRSRELLERIRDRVRKLIEENKRAID

SEQ ID NO: 2697 - protein, 177 aa, Artificial Sequence; identical to SEQ ID NO: 2696
  Synthetic

SEQ ID NO: 2698 - protein, 179 aa, Artificial Sequence
  Synthetic
SKVEEAKREVDRVIKELREDIKRVEEEVDKLIKDHEKLNKELEDESRKLAERVEKLRRDGVPREDVRRALDDWRRRSEEALRRSEESLKRIKERVRELLERIRKLLKEIDDRVEKLREAGVIDEKIVRDIKELLRDLRREVEKVIERIDRLIKRLEEESRRLFEESEKAIRELKRRVDK

SEQ ID NO: 2699 - protein, 179 aa, Artificial Sequence; identical to SEQ ID NO: 2698
  Synthetic

SEQ ID NO: 2700 - protein, 179 aa, Artificial Sequence
  Synthetic
KKVEEAKKEVKEMIRRHRERNKEVEKEVKDLARKHEKENRDVAETSKRLAEKVKKLRDDGVDRKDVRRVLEDWRRRSKELLDRSRKSLEEIRKRVEDLVRESKESLKRIEDRVRELEERGVIDEEIVKDIKREIEELEDESRRILEEIREDIDRLRRRSEKLFEDSRELIERMKREVDR

SEQ ID NO: 2701 - protein, 179 aa, Artificial Sequence; identical to SEQ ID NO: 2700
  Synthetic

SEQ ID NO: 2702 - protein, 176 aa, Artificial Sequence
  Synthetic
DEIEKVRKRAEDLNREDKRLSERAFEESKEVVEEHRRLSDRARRESDRVVEEVEKTLKDKREKKEDLEKLLRDWKRISEKLKEESDKSLKDWEDRTRELMERSKKSLDELEEVLRRIPVDRKILEEIRKAIDRNRDENRRLVEESKKELDELRKEDEELVERSKRKLEELDRRAKK

SEQ ID NO: 2703 - protein, 176 aa, Artificial Sequence; identical to SEQ ID NO: 2702
  Synthetic

SEQ ID NO: 2704 - protein, 176 aa, Artificial Sequence
  Synthetic
SRIETVKDELRRIAEDVRRALEEIEERLKDLNRRDEELTKRIEDTSRDILRRVEEVLRRNREKKEEAETLLRDWDRVSKELKKESDRSLEELRREIERLREEIERLLRELDKLIKDIDIDEKILKEVADRLRELKRRAERLIEEVTRLLKENEKRNKEVVDTSREALREIRDRVRK

SEQ ID NO: 2705 - protein, 176 aa, Artificial Sequence; identical to SEQ ID NO: 2704
  Synthetic

SEQ ID NO: 2706 - protein, 177 aa, Artificial Sequence
  Synthetic
SKEDILREIEKRIRKIEKEAEELLRESRKILEELEERDRRLLERVKREIDRLLEETGEDDDLRRLLRELEKALEDMERVSRTVLREIERLIKESEDNIRELIERLEELLREVERRVRDEELLRRVERELKKLIDEVRKVLKDNFDRNRELAKEWEDLSRELFKRAKELIEKVEEASR

SEQ ID NO: 2707 - protein, 177 aa, Artificial Sequence; identical to SEQ ID NO: 2706
  Synthetic

SEQ ID NO: 2708 - protein, 177 aa, Artificial Sequence
  Synthetic
SKEDILREIKKRIEEIERDARRLLEESKRILDELRKTDEKLLRESEERVEELERKSGRDEKVEDLLRRLKRLIDESKKDSDRMLKEAKKLIEDSKRNIEELLKELRRLLERVRREVRDEELLKRVMEELRELIERVERELRRNARENRELARKWKKLSEENKKKNDDLIREVDEASR

SEQ ID NO: 2709 - protein, 177 aa, Artificial Sequence; identical to SEQ ID NO: 2708
  Synthetic

SEQ ID NO: 2710 - protein, 174 aa, Artificial Sequence
  Synthetic
DEKERIEEEIRRILEELERKVDEAREEIKRMDEELKRRIEEIARRSRELDDELRERVDKDKDKDKLEKIVEDILRTSRKLIEDLKKLIDDILRRSKELVDRLRELVDRVRERVERLPVDEEVRKEAERVLRKIEEDIDRVLRENEDSVRKLRTEIDRVEEENRRSAKRIRERLK

SEQ ID NO: 2711 - protein, 174 aa, Artificial Sequence; identical to SEQ ID NO: 2710
  Synthetic

SEQ ID NO: 2712 - protein, 176 aa, Artificial Sequence
  Synthetic
DEVRDVVTRIRDLLRRIKERLEELTERIRRLLEKIHKTTEDLARRNRKLIDEIRKEIDKGVEKEEVDKMIEELKKHTDETLRRIEELNDRSDKLVKRVLEEIERLIREAEKEVKKAERVIPEDVKREVKELLDKIREDLERVREEAKRSNEENRKRLEEVVEESERLLEELKRRST

SEQ ID NO: 2713 - protein, 176 aa, Artificial Sequence; identical to SEQ ID NO: 2712
  Synthetic

SEQ ID NO: 2714 - protein, 180 aa, Artificial Sequence
  Synthetic
DEVREVLKELKKVLREIEKAVRDVLEEDREMHERIARKVKKVLDENKKSLDDLRRKVDSEKLKEIEKVVEDTLRELKELLDRARELNERTKRRLEKLLDEIRKVIKRLLEELDELRRRGASEKKLKEIADKIRELLERLKDRLEKIAREIRDVNRKLDEDLEDIVRRIRDVDKKLDDKTK

SEQ ID NO: 2715 - protein, 180 aa, Artificial Sequence; identical to SEQ ID NO: 2714
  Synthetic

SEQ ID NO: 2716 - protein, 188 aa, Artificial Sequence
  Synthetic
SVLEEIEREVEEIRRRIEKVLKELNDDDRRVIEDSKRLNEKLEKEVRDIERKARDLLRKLKDTDDDREMKKILREVEKMVEELKRRSDEVVKRTRRVVDRLREKNKDVLRRIEKKIRELKDKIEKISAPREELEKLKRRLDEELDRVREKVEENIRRTDKAVEDSERENERLKRELDEKVKRIRDELR

SEQ ID NO: 2717 - protein, 188 aa, Artificial Sequence; identical to SEQ ID NO: 2716
  Synthetic

SEQ ID NO: 2718 - protein, 171 aa, Artificial Sequence
  Synthetic
SDEEDVERLVKELIDRVRKTDAELERKVDEVIRELKEVIKRIEDHSRDSIRKLRNEPMTEDVLRKAEEVHERNRDLLRKISERIKKLLEDLNKESRKNEDRVRRLVEELERRAKTLRELIKRLRDAVRESEKENKRINERLRRVIEKAKRDLEKILEEDRRVLEEMAERAK

SEQ ID NO: 2719 - protein, 171 aa, Artificial Sequence; identical to SEQ ID NO: 2718
  Synthetic

SEQ ID NO: 2720 - protein, 181 aa, Artificial Sequence
  Synthetic
SEVETIKREIDKLMKELTEKIKRIKEEDDKVHEELKRAVDRSRERLEEVLKELRDRGVPDKKLRELEKLIEELKRRNDDLLRKLKEVNEKTREDLERLLRDLRRLLKELRERLKELKDRNSDEKEIRDLMREIREVAERAKKRVDELLERIRRINTKLKEELKELHKRTEDLIKKAKEEVN

SEQ ID NO: 2721 - protein, 181 aa, Artificial Sequence; identical to SEQ ID NO: 2720
  Synthetic

SEQ ID NO: 2722 - protein, 181 aa, Artificial Sequence
  Synthetic
KEVEEIDERLKRVLEELRRMLEESRKEDERVHDELRKEAEKIKRELDKAVEELRARGVPKDVLRELKRLIDELRKEIKDLLDDLRRVNEETLRENERLLRELEKLVRELEEELKKVKDERRDKKVIDDLLRKIEKLIREMKKRLKDLHEETKRINEELERRLRDLERRVRDLLRRAREEAN

SEQ ID NO: 2723 - protein, 181 aa, Artificial Sequence; identical to SEQ ID NO: 2722
  Synthetic

SEQ ID NO: 2724 - protein, 181 aa, Artificial Sequence
  Synthetic
SEIERIKEEDEEVHKRLKEINDRINKEDKDVHDKLRDEARKIEERLRRVMEELRANGVPKSLLDEARRVIDELRRKLEKVLDELEKLNRKTEEDNRRLHEETRKVNEDTKRKLKEVKDNRSDEKVIRKLLEEIRRINEELERRNRKLMKDIREINERAEEKLRRLAEEIEELIKKLKEEVK

SEQ ID NO: 2725 - protein, 181 aa, Artificial Sequence; identical to SEQ ID NO: 2724
  Synthetic

SEQ ID NO: 2726 - protein, 181 aa, Artificial Sequence
  Synthetic
SEVEEIKREDDKVHEDLKKAADDIRKRDEDVNRKLTEAIEEIRREVDKALEDLERRGVPKDLLDRARRLAEELRRRLKELLERMHKVNEDTKRLLEELLRRLEEVNRRTRKELEDVKRRREPEEVIRRLMEKIRRINAELRKALKRLLEEIEDINRKLEEEVKKILEEIRRVLEELRRRAN

SEQ ID NO: 2727 - protein, 181 aa, Artificial Sequence; identical to SEQ ID NO: 2726
  Synthetic

SEQ ID NO: 2728 - protein, 182 aa, Artificial Sequence
  Synthetic
SEVEELVKELRRLIEEWDRRSKRLMEELKELAERIDKTTKELLKELEDLVEKIKRELDKKGGEDERLKEDVERLLRELREALKRVEDTVDRLNRESEEVLKEVKKTNEELVRRLEELLKRAKENGVEERVAEEVKRAIERAKRESDKIERDVRELNRRNREILKKIKKRVEDVLRKLRKDLE

SEQ ID NO: 2729 - protein, 182 aa, Artificial Sequence; identical to SEQ ID NO: 2728
  Synthetic

SEQ ID NO: 2730 - protein, 174 aa, Artificial Sequence
  Synthetic
DEVEELKERLRRLAETIARRIRELVERLRDSARKIEKRVRELAKKLRDSVREITKVIKDGVDERTIDEMIERHKRTSEEIAREIRDLLRRHKEVSERILEEVRRLIEELDRVVKEVTRTEEIREEVEKAVRDLEELLKELKRESEETIRRIEKLVRDLERESEEAVRRLKEEKD

SEQ ID NO: 2731 - protein, 174 aa, Artificial Sequence; identical to SEQ ID NO: 2730
  Synthetic

SEQ ID NO: 2732 - protein, 174 aa, Artificial Sequence
  Synthetic
SEEEKLKKELEDLARRIEKRLRELVEELERSVREIERRIEKLHKELEESVDRIKKVVDKGVDEDAVRKLLTDHDRISRETVRRIEELIKKHEEDSRRVVKEIEDLIRRLEEVVRRVTRTDEIRRRVEEVVRRLEKIVKELEERSREVLKRLREEIEKHKKRSEETKERIRTRAT

SEQ ID NO: 2733 - protein, 174 aa, Artificial Sequence; identical to SEQ ID NO: 2732
  Synthetic

SEQ ID NO: 2734 - protein, 174 aa, Artificial Sequence
  Synthetic
SEVEELLKRLEDLIRKIEERLKELVKRLKESAKEIEERLEELHRRLKESVDRIREEIEKGRDKEDVKRLVKRHKELSEETVRRIKKLLEDHKRLVDKILREIEKLLKELKDVAERVSRTEEIKKEVKKALERLKKIVEDAKKVSEETMERIRKLVEEHKDTSRKTVEDLERATK

SEQ ID NO: 2735 - protein, 174 aa, Artificial Sequence; identical to SEQ ID NO: 2734
  Synthetic

SEQ ID NO: 2736 - protein, 174 aa, Artificial Sequence
  Synthetic
DEVERLMEELRRLLEEVRKRIEDLIRENRKLVKEIKDRLEKLLRDNERLAREIEEVIRSGTEEEKVRELLERLERSSRKTLKEIRELLEKLRKKNEDSTREIERVLRELEDVVRKVVREERIREEVKRAIEKLKELVEDSNREVTEALKEIEDLLRKLKERSEELLRRIKARTD

SEQ ID NO: 2737 - protein, 174 aa, Artificial Sequence; identical to SEQ ID NO: 2736
  Synthetic

SEQ ID NO: 2738 - protein, 182 aa, Artificial Sequence
  Synthetic
KEVDELDEELKKHAERIDRELERLDRENEKHVEDVRRELERLREENERHARRIEDEVKKRTDEEEVIKRLIDDHRRLSKRTEDEIKKLLDDHRRLSEETKERIKELLKDHRRLLKDVADKIEDRKTLEDIRRKVEKSLRELEKKLEEIDKKNRDTLEEARRELERIRRENEEVIRRLDKRRR

SEQ ID NO: 2739 - protein, 182 aa, Artificial Sequence; identical to SEQ ID NO: 2738
  Synthetic

SEQ ID NO: 2740 - protein, 182 aa, Artificial Sequence
  Synthetic
KEVEELVRKLREHVRDIKRKLEELLKENEDHARRAEDRLRELTKENRDHVKEMEDVLRRDTDSRETIRKLLEDHKRLSKETAERIEELIRDHERLSRETSKRIKELIDDHRRLLEEAAKDIRDKDTLERLEREVRKSIKELEDKLREIRKRNKEVIDKLRDILEKIKKENREALKRLRDTEE

SEQ ID NO: 2741 - protein, 182 aa, Artificial Sequence; identical to SEQ ID NO: 2740
  Synthetic

SEQ ID NO: 2742 - protein, 182 aa, Artificial Sequence
  Synthetic
SEVEKLTEELRRHVEEIERDLDRLRKENERHAKKIKDELKRLLEELEEVARRIEAELERDTDDEDKIRKLLEDLEELLERIADTIRRLIEDHRRLSEETMERIRRLIEDHKKLLDDIARRIRDKDMLRRIEEEVERSIRRLEELLERIRERNEKVIEDLKELLKRIRDRAEEVKDRLRRTRK

SEQ ID NO: 2743 - protein, 182 aa, Artificial Sequence; identical to SEQ ID NO: 2742
  Synthetic

SEQ ID NO: 2744 - protein, 182 aa, Artificial Sequence
  Synthetic
SEVEKLKKELEDHVRDIEKKLRDLMRENEEHAKRARERLKKLLEDNEENVKDIEDKVRKKRDKEEVIKKLIDHHRKLSEDSVRDIEELIKDHKRLSEETSERIKRLIEDHRRLLKEISDKIRDEDTLRKIREDAKRSEKKLEEILRTIRKRNEKVIRDLRRLLEELRKRNREAIERLRKELE

SEQ ID NO: 2745 - protein, 182 aa, Artificial Sequence; identical to SEQ ID NO: 2744
  Synthetic

SEQ ID NO: 2746 - protein, 182 aa, Artificial Sequence
  Synthetic
SEVERLAEELRKHVEEIKKELRKLKEKLEKLARDIERELKRLRDENKKHADDIRDKVEKRKTDEKTIEDLIRDHERLSEETKKRIEDLIRRLEELLREVAKRIKELIEDHRRLLKDVADKIEDKDTLRRIEEEVKKSERELREELKRLEERVRRVIEKLEDLLRRIEKENEEVKRDLERRRK

SEQ ID NO: 2747 - protein, 182 aa, Artificial Sequence; identical to SEQ ID NO: 2746
  Synthetic

SEQ ID NO: 2748 - protein, 182 aa, Artificial Sequence
  Synthetic
SEVDELKRRLDEHAKDIRDKLRKLVKELREHAKRAEDELRRLLKENEDNAREIRELVKTLRDDKDKIEELIKHHKKLSEDSEREIKRLIEDHKRLLEEVEERIRRLIEDHKRLLEDVARKIRDEKTLRDIKRAVEKSIRDLERILEELRKEVEDTIKRLEDILREIRKRNKDVIDDLRRRMK

SEQ ID NO: 2749 - protein, 182 aa, Artificial Sequence; identical to SEQ ID NO: 2748
  Synthetic

SEQ ID NO: 2750 - protein, 182 aa, Artificial Sequence
  Synthetic
SEVDRLVRELDKHVEDIERTLKKLREENEKNVEEIKRTLKKLVDELRKLAREIIDTVDKNRDIREEIEKLIEDLRRMVEEIAKRAKDLLDHHAELSRRTREEIKRLLEDHDRLLKEIARKIKDEKTLRDIKRRVDKSLEDLKRTLEEIKRENERTLEEIKKILEDMEREVRDIERKLREKEK

SEQ ID NO: 2751 - protein, 182 aa, Artificial Sequence; identical to SEQ ID NO: 2750
  Synthetic

SEQ ID NO: 2752 - protein, 182 aa, Artificial Sequence
  Synthetic
KEVEDLVRELEKLIEEIKRRLEELDKELKKHVEDAERRIKKLLDENRENAERILEKLRRDKDDDDKARRLVKHHRELSEESSRRIEELIRDHRRLLEEISRTIEELLDRLRRMLKKIADEIKDEELLRRAKERVREALEDLRRILEEIRRKVEETIRRLEKLLKELRDRNRRVLEELERTLK

SEQ ID NO: 2753 - protein, 182 aa, Artificial Sequence; identical to SEQ ID NO: 2752
  Synthetic

SEQ ID NO: 2754 - protein, 180 aa, Artificial Sequence
  Synthetic
REKEEIKREVEEAKKRLEDLLREIAEEVKRALERLRELNERNNDRARRVLKRLTDELRRVDNEDLKRDARRLLEELKRINRESNETHKKLLEELRRLLREVEKTVERLLRRLDEMLERVERTEPDDRLSERLRRLVREIEETLKELLKALRRLLERIREVSEELHRRSEELVERILRKLK

SEQ ID NO: 2755 - protein, 180 aa, Artificial Sequence; identical to SEQ ID NO: 2754
  Synthetic

SEQ ID NO: 2756 - protein, 180 aa, Artificial Sequence
  Synthetic
REKEDIEEKVKRVLERLERLNRENNKESERLLRRLEELNKRNNEAVKELLDRLREILKRVRDEKKKREVEELLERLRRINEESNRVHRRLLEELRKLNEESNRVHKRLLELLKTLLDEIRKREPDDRLMEELKRLAREAERVSEELHDRTRRLAEEIEKVSKELHKKSEKLAREIKKRLD

SEQ ID NO: 2757 - protein, 180 aa, Artificial Sequence; identical to SEQ ID NO: 2756
  Synthetic

SEQ ID NO: 2758 - protein, 175 aa, Artificial Sequence
  Synthetic
KEAEELIKELKDLAERIRRENRRLLEELKKLVEEIRRRIRELIERSEDSVRKIEETVKRKKEKREELEKLLREHEKLNEEILEEIKKLLDDLRKTVKEAIDRSRKLNKELKDMVEKVSRDEKAERELKKISEDDERSIKELEDLLRKVEEDIRRLLDELRDIMKKTKEKVDELRR

SEQ ID NO: 2759 - protein, 175 aa, Artificial Sequence; identical to SEQ ID NO: 2758
  Synthetic

SEQ ID NO: 2760 - protein, 182 aa, Artificial Sequence
  Synthetic
DEAERVKRELERLVKEIKEENRRLLRELRELSKRSREVLERLLRKLEDLVRKIREVLERLKRVKEVVKRLKEELKKLLDEAEKVIEDLKRENDKLLEEVHRVNEKLDRDLEALLEEVRRINLPKKVLDEIEKEAEEIKRENKDFNRRIEREVRESKREIEEVVKRIREIAERVDRDIDRTRR

SEQ ID NO: 2761 - protein, 182 aa, Artificial Sequence; identical to SEQ ID NO: 2760
  Synthetic

SEQ ID NO: 2762 - protein, 182 aa, Artificial Sequence
  Synthetic
DEEREVKERLRDLTRRIRETIKRLLDKNKDLARRIREVNKETSEELERLARDIERVLEELKDVDEVVKRLKERLRELLRRSEEVNRRLDEENKKSNKETEDVARRLLKELRDLLEEVRRINLPKKVLDEIREAAERVKREIEELLKEVHRINTELNKDNTELNKRNREIVERVKRRIDERAR

SEQ ID NO: 2763 - protein, 182 aa, Artificial Sequence; identical to SEQ ID NO: 2762
  Synthetic

SEQ ID NO: 2764 - protein, 182 aa, Artificial Sequence
  Synthetic
DEVEEVKKALEDLAEKIRDLNRKILEKNKKLADDIRRLNEKLLRELRKLVEEIERVLRKLKDVKKVVKELKDRLKRLLEELERVNRELDERNKKLHKETEDLNRELDERLKKLEDDVRRVNIPKELLDEIRRRVEEVKKDNERVNKEIEELNRKLDEDNERANREIRDTVEKVRRRIDEEEK

SEQ ID NO: 2765 - protein, 182 aa, Artificial Sequence; identical to SEQ ID NO: 2764
  Synthetic

SEQ ID NO: 2766 - protein, 181 aa, Artificial Sequence
  Synthetic
SEIEEIEKEIRRVLEEIERLLRTLKKINDDVKRESEKLVRDDKKKIDDALRELRKLAAERGKDEKVIRDIEKLIRDVKRHSEEVLERLKRLNEETRKTNEEVIRRARRLIDELEKDIRRIRGDEVVRRAEKLLKEIRDTVETALKELEDKNERSERENKRVAEESERKLRKIKEEVDKAAE

SEQ ID NO: 2767 - protein, 181 aa, Artificial Sequence; identical to SEQ ID NO: 2766
  Synthetic

SEQ ID NO: 2768 - protein, 182 aa, Artificial Sequence
  Synthetic
RKVEEIKKRLKELKERLEESVKRIKDRLRKLEEDNRRLAEEVKKRLEELLKRLEDLVKRREGDKTDLRRSVEKVVREIRELIEELKRHTEESADEIRKLLEEHKRLSDEVVREIRELIRDLDDEKAVKELEDELRRIEKTSRDVLKELEDILRRLREESKRVADELRELLRRVKEKVERETK

SEQ ID NO: 2769 - protein, 182 aa, Artificial Sequence; identical to SEQ ID NO: 2768
  Synthetic

SEQ ID NO: 2770 - protein, 182 aa, Artificial Sequence
  Synthetic
SEDDRIRERLKELVDRNDELVKRIKRALDELLRELRKSVEDIKRTLDDLARKLEELARRREGDKTDLRRVVEKIRRDIEKLLKDHEDKSREVVRTIRELLDKLRRHTERTAREIRELIRRQDSREVVEDLKRILRELEKRSEDVLRELKKKLDDVEKESRDVLRELTEKLKKIEEDVRRAEK

SEQ ID NO: 2771 - protein, 182 aa, Artificial Sequence; identical to SEQ ID NO: 2770
  Synthetic

SEQ ID NO: 2772 - protein, 182 aa, Artificial Sequence
  Synthetic
REVEEIERRIRELLETNREIAERTTEEIKRLKKELEDSLEEIKKRLKELVDELRKLATDRRGDKTDLRRSVRRVEEEIRRLLDEHRKLSEEVMRTIEKLNEDSRRHTRETVEEIKELIKRLTIEEAVRRLEELVREIEDRSERLNKENEDELKKIEETSRKALKELEDRLREVKKEVREAER

SEQ ID NO: 2773 - protein, 182 aa, Artificial Sequence; identical to SEQ ID NO: 2772
  Synthetic

SEQ ID NO: 2774 - protein, 181 aa, Artificial Sequence
  Synthetic
DSDRELEKKIRDSLKRLEEALRELEERLKRSLEDDERVHEELRRRAERIRETIKKRLSDKDTLDKLKKEVDKLLTDLERVNRDTKRLNKELLDKAREVVKKLKEDNRRLLEDLKEIIKKPTRSELVKRMKERVDELHKRTEELLERLKEELKKLHDETRDINRELKKRLEDLERKIEEAAK

SEQ ID NO: 2775 - protein, 181 aa, Artificial Sequence; identical to SEQ ID NO: 2774
  Synthetic

SEQ ID NO: 2776 - protein, 181 aa, Artificial Sequence
  Synthetic
KEAEELRRLIEESKRTDKKVHEDLKEEVRKIEEEDDKAHEELRKEVERIKKKIDDDMSDEDTARRLRKEVEDLLRRLKKLNEETKRELERLDEKLRKVNEKTKEDNERLARELEEIIKKPTGSELIKRLKDEVKKLHDETERINRELKKELDDLLRRVRKINKELKEELKKLERKIEEAAR

SEQ ID NO: 2777 - protein, 181 aa, Artificial Sequence; identical to SEQ ID NO: 2776
  Synthetic

SEQ ID NO: 2778 - protein, 181 aa, Artificial Sequence
  Synthetic
SSREELEKRIRESEKRDREMHERLRRTAEKIEKEDKEMHDRLREKAERIEERIDKEVSDEDTARRLKEELKRLLEDLERVNRRTKEELERLLKEAEELNKRTEERNRKLEKEIKDIISRDTKSELIERIAERIERLNRDTERINRELEEKLRRLLKRIREINTELDKRLKELLDRIEEASR

SEQ ID NO: 2779 - protein, 181 aa, Artificial Sequence; identical to SEQ ID NO: 2778
  Synthetic

SEQ ID NO: 2780 - protein, 178 aa, Artificial Sequence
  Synthetic
SSEEKIEKASEDNERKVKEVLREIEELSKKDKTDVERVLRELEKRLEEIKREVDRRDRRREEMERLREEIKRLLDRLRERIEEVDKRITELNKDANDTVRRVVKEIKELNDRLRRRVREVDSEEDLKRELDEIDKRTEELARELRELMREIHERTKRLADDLRRAIDEIRKKIEEDAR

SEQ ID NO: 2781 - protein, 178 aa, Artificial Sequence; identical to SEQ ID NO: 2780
  Synthetic

SEQ ID NO: 2782 - protein, 181 aa, Artificial Sequence
  Synthetic
DELEDLLRRHRELVKRSLERLKDLLERNRELIEDSERRAEELLRELRRLIEEIKKVLDEGIDEKDIKKMLDELRRTAEEILKELEEVNERLNRASRKTLEEIKDSNRKLNDSVKKIEDRIKDKKVLEELKRSNDEANERHKTVLRRLEEENKRANDSHRKIKEELKDLLRRVDETVKEKRR

SEQ ID NO: 2783 - protein, 181 aa, Artificial Sequence; identical to SEQ ID NO: 2782
  Synthetic

SEQ ID NO: 2784 - protein, 181 aa, Artificial Sequence
  Synthetic
SRLEELLKTHKKLVEDSVDEVRRLLERNRKLIEDSKERLKELLRTNEELIRTLKEVLDRGTSEEDIKRLLDELEKHVRETNERSKRSNERLNRHVEETNKRTKELNDELNRSVKEIEDEIKDEEVLRRLKESNKKANEDHRRLNEENKDLNRRANEEHKKVNDRNKELLDRARRTADEKRR

SEQ ID NO: 2785 - protein, 181 aa, Artificial Sequence; identical to SEQ ID NO: 2784
  Synthetic

SEQ ID NO: 2786 - protein, 181 aa, Artificial Sequence
  Synthetic
DEVDELVKTHERLVEESERRIEELLERNRRLIERITERAKELLKENKRLIEEITEVLKRGSDEKDIERLLRELEKHVRETNEESKRMLDELRKHVEDTNRETKKLNDDLNDSVKKIEDRIKDKDVLERLKDSNRKANERHKRMNEENKRLLEDVERRIKELNKRNEDLLREAEKRVRDERR

SEQ ID NO: 2787 - protein, 181 aa, Artificial Sequence; identical to SEQ ID NO: 2786
  Synthetic

SEQ ID NO: 2788 - protein, 181 aa, Artificial Sequence
  Synthetic
SELEELLKTHKKLVEDSVERVRDLLRENKRLIEESEKEIRKLLDELRELIERIIELVERGESEETIKEVVDRLRRTVERIEKRLRDSNRELNDHVRRTNEETKRLNEELNRAVKEIEDRIKDKEVLERLKKSNKEANDEHRRLNDENRELNERANRKHKEVEDRLKDLLRRAEEKLTEDAK

SEQ ID NO: 2789 - protein, 181 aa, Artificial Sequence; identical to SEQ ID NO: 2788
  Synthetic

SEQ ID NO: 2790 - protein, 181 aa, Artificial Sequence
  Synthetic
DEVERLITKHRKLVEDSRRRVEELLRRNAELIKTSKRRVEELLERNRRLAEELRRLLKEGQSEETIKELLERLRKHVKETDDELRESNKRLNDHVKRTNEETEKLNRELNKVAKEIKDRIKGDEVLRRVEDSNRRANETHKDLNRKNKELNEEANRTHEELLRRNEKLLREIEDTVDRETK

SEQ ID NO: 2791 - protein, 181 aa, Artificial Sequence; identical to SEQ ID NO: 2790
  Synthetic

SEQ ID NO: 2792 - protein, 181 aa, Artificial Sequence
  Synthetic
SEVEKLLKELEDESRKSEDDNRRLLEELRRLSEESLRDLRRLLEDLKRLAEEIEREVRKRPEKELLEDLLRKLEKILRDIRRAIRRNIEENRRVLEEWKKRTDKNRRDNEDIVRRIRERIRGDELKKRVDEVLETSRELLRESKRKIEEIARRSEEELKRVKDEVDDTARRIKRKIEEAEK

SEQ ID NO: 2793 - protein, 181 aa, Artificial Sequence; identical to SEQ ID NO: 2792
  Synthetic

SEQ ID NO: 2794 - protein, 174 aa, Artificial Sequence
  Synthetic
DSERRLDEILERAREVNEESSRRLDKLLRETEEKNRKSTEELRKIVEDLKRTVKDESRTDEIEDLVRKIEEEIKKLIKESNDLVEEILRRSKDALRESNERVREILERIRDMKERGEDAETVIRRIEKLLEDLKRVDDKILEEHKDLSKKLDDVDREIKERIKKLIKDLKDTAR

SEQ ID NO: 2795 - protein, 174 aa, Artificial Sequence; identical to SEQ ID NO: 2794
  Synthetic

SEQ ID NO: 2796 - protein, 174 aa, Artificial Sequence
  Synthetic
DSEEELKDILRKAKEDNDRSSDKLRRLLEETEKRNRDSTKRLEELLEETEREVRRRSRREDIERLVREILTRSRKLIEDSNRLVKRILDESEKLLRDSNRLLEEVERRIKDLKDRGEDAETVKERIKKLLKDLREVDREILERHKKMSDDLKRVDEEISKTHKELSRRLKETAR

SEQ ID NO: 2797 - protein, 174 aa, Artificial Sequence; identical to SEQ ID NO: 2796
  Synthetic

SEQ ID NO: 2798 - protein, 174 aa, Artificial Sequence
  Synthetic
SKEEDLKRILEEAEKTNKESSDRLRELMDRTRRENEESSRTLKEIVKDADRRVAEIIRTDELRKLVRDIKETIKELDERSNRLAEEILKTSKKLDEDSNRLVEDVVRRIKDMVDRGEDVERVKEDIERLLDELRKVDREILETHKKLSEELRRVDEEIIKRVKDLIRTLEKAAE

SEQ ID NO: 2799 - protein, 174 aa, Artificial Sequence; identical to SEQ ID NO: 2798
  Synthetic

SEQ ID NO: 2800 - protein, 174 aa, Artificial Sequence
  Synthetic
SSEERLRTILREIEKTNRDSSKRLRDLLRETKRENKESSDELRKLLEETRDEVEKRRRDKEIERLVREILKTSEDLDRRSNREVERILRTSERLDRESNKLATKISEDIKRMTDKGEDSDTVAERIRRLLEELKRVDEEILKTHKDLSDRLRELDEEIKKTHEKLSEELRRAAN

SEQ ID NO: 2801 - protein, 174 aa, Artificial Sequence; identical to SEQ ID NO: 2800
  Synthetic

SEQ ID NO: 2802 - protein, 181 aa, Artificial Sequence
  Synthetic
KEVEEILETHKEIARELREVAEEIIRDHERILRDLEKKIRELRRTHERMVEELDRVAKEGVSEEELKRLLDELHERVKEILETLKRLLDKLHKTVEELKRTLEELLRDLHRLVKELEDRIKDKDALDKLRDSDRRVHEDVRRMLKRLDDSDKRVHDRVRKVLEDLKRSNDELRRTVEERER

SEQ ID NO: 2803 - protein, 181 aa, Artificial Sequence; identical to SEQ ID NO: 2802
  Synthetic

SEQ ID NO: 2804 - protein, 181 aa, Artificial Sequence
  Synthetic
SEVEKILEDHKRIVDELEKEAKKIEETHTELVKRLREEVEKLKEELRRLLEELKDMARRGVREEELRELLDRLREMVERILRRLRKLNEELNKVIEELKRRLEKLLEDLHRRVEELLREIKDEEALRRLKKSDEEVHRRVREILKRLEKSNRDLNDDSRKVEEELKRILRRIEEEAKRTED

SEQ ID NO: 2805 - protein, 181 aa, Artificial Sequence; identical to SEQ ID NO: 2804
  Synthetic

SEQ ID NO: 2806 - protein, 187 aa, Artificial Sequence
  Synthetic
SEAERLLDELRRLLEEIKRRIEELLEESKRSLEEVEKRSKELLDRLEDLLRKIKEEIRKDGTSDEVAKKIKELLERLEDSIRKVKEEDEKMLREHEETNRRIEKEIKDMLRKLEDDIKKVKDRLKDSPEEVKERLERLRERIKREIDRVIRELRELDKRAKEVSKRTKEELEKILEKVRRVIEEVKR

SEQ ID NO: 2807 - protein, 187 aa, Artificial Sequence; identical to SEQ ID NO: 2806
  Synthetic

SEQ ID NO: 2808 - protein, 187 aa, Artificial Sequence
  Synthetic
DDVDRLLDELRELIDRIRKDLERLLKESRDSLEELRRRSEELLKKLEEEIREVVERIRREGTGDEVREKIDRVAKEVERSVRKVKEEDKDLLRRHNELNKDIKRKIDELLKRLEEVVRRIKKRIEKDPDELKRRAEKLLEDLRRVIEEIKRRLDKVNDEVREVSKETTDRLDDLVRKARELIRRVEK

SEQ ID NO: 2809 - protein, 187 aa, Artificial Sequence; identical to SEQ ID NO: 2808
  Synthetic

SEQ ID NO: 2810 - protein, 179 aa, Artificial Sequence
  Synthetic
SEREKLLTDLRDLLKKVVDTLRRLNEELKKSIEESKETLERLNRTLKKLLDEVKKKLEDDGGEDKRVLDKIRDLLRKLRRAVEETKKTNKRLAEENEKLAKKSKEDLKKLLDDLEKVVKEVEETDELRKIVEEIRTELDRVRETNERILKEVRDEHRRVDKTNTDIERDIERVIKEVET

SEQ ID NO: 2811 - protein, 179 aa, Artificial Sequence; identical to SEQ ID NO: 2810
  Synthetic

SEQ ID NO: 2812 - protein, 182 aa, Artificial Sequence
  Synthetic
KKDEDLKKLLKDNEDVMKKAADEVKRLNDENRDLMRRVAEKIEDLLRRLEKLLRDILRRRGEEDERAKRLEELVREILERIERLLRESEKVHRESNERSKRLLEESKKLHKRIAEEIDELRRRGSDSKTVKDRIKRLTDELERVNRELSEEHKRVLDELRKRNKEILDRLKELLKRLKEEAD

SEQ ID NO: 2813 - protein, 182 aa, Artificial Sequence; identical to SEQ ID NO: 2812
  Synthetic

SEQ ID NO: 2814 - protein, 181 aa, Artificial Sequence
  Synthetic
SSEEELERLLEELRRITEEAKERMERSSKELEDVSREAEKRLEKSSRDLDKTVRDIKRRIKDKDTLREIDRLAKELKERNERLLEELRRSSEELKRRNERLIEESRKSSEEIKKRIKDLRRDSDDAEDVKRRVRELIEEHKRLNKELLDESRELLKTHAELVKRILDESRRLLEELEKAAR

SEQ ID NO: 2815 - protein, 181 aa, Artificial Sequence; identical to SEQ ID NO: 2814
  Synthetic

SEQ ID NO: 2816 - protein, 175 aa, Artificial Sequence
  Synthetic
SEREDATRRLRDIIRRLRDLIRRLTEESEESIKEIRERIERIIRTSEESLKELEERIRRNRDKRELLEELLRRHHELNKRLKEELKRILKEHAELNKRIKEELKRILKEAKERIDRLERTEDLERLREEIEDVVRKAEKRLDELHDEIRRTIEDAERRLDESNERAEKVVRDAEK

SEQ ID NO: 2817 - protein, 175 aa, Artificial Sequence; identical to SEQ ID NO: 2816
  Synthetic

SEQ ID NO: 2818 - protein, 175 aa, Artificial Sequence
  Synthetic
SDEERALEKIRRLIEDLRRMVREMLERSKKSLEEHKELAREILRRSRESLERLKDVARRNKEKEEDLKRLLKEHADLNRELKKRLRDSNREHNELNKDLKRKLRELLKELKKRVDELPRSRELDKLREELEEVVRRVEEKLDDSDRRANEVTREIEKTLDDLHREAEEVVKEIRR

SEQ ID NO: 2819 - protein, 175 aa, Artificial Sequence; identical to SEQ ID NO: 2818
  Synthetic

SEQ ID NO: 2820 - protein, 181 aa, Artificial Sequence
  Synthetic
SVEETLRRLLEESERVNRRVKEDLDRIRRESEEVNKRAEEMAKELLDEIRKDIDRVRKRNVDEDTLRKLLEEIKRLVDEWRRLVEENHKRNEDLIRKWEKLVRENHERNKTILKEVEERIRTEELAKEVIKTLRKLIEESKRNHEDLRRELRELIEESKRDHERLLRRLRELIKRIRDTTK

SEQ ID NO: 2821 - protein, 181 aa, Artificial Sequence; identical to SEQ ID NO: 2820
  Synthetic

SEQ ID NO: 2822 - protein, 181 aa, Artificial Sequence
  Synthetic
DEIEDLLRRAEKLIRDLKRKNDKLLKESEELLERLRERAKEVLDESKKLLEELRELVRRRGKTEEIEELVKEINKRNRELLKELSDLVKEINERDKEVLDRLRRDHERTLKTIDDLLKEIRDERAARDVERLKRRNKKVVEDSEDLARKTNKKSEELLREIRKRVEDSNRETKEILDRVRK

SEQ ID NO: 2823 - protein, 181 aa, Artificial Sequence; identical to SEQ ID NO: 2822
  Synthetic

SEQ ID NO: 2824 - protein, 174 aa, Artificial Sequence
  Synthetic
DEDEELLKRLRDLIREVRDRVRRLLEEDKDSLRRIRERVEELLRRSEESLKDLEKKIREGSPEEEIERLLREHEELNKRVLDEIRKLAEDNRDLTRRIKEKVEELIERVRDALRKLTPSEELKKIADKVEEVLREVEKELDKSRRTSDEILKKVEKAVRDLDRRVKEVIDRARR

SEQ ID NO: 2825 - protein, 174 aa, Artificial Sequence; identical to SEQ ID NO: 2824
  Synthetic

SEQ ID NO: 2826 - protein, 182 aa, Artificial Sequence
  Synthetic
SEAEELLKRLERLLRESKKDLERLRKELKDLLEESRKDVTRLLDEIRRLLEEIKRRLDKRNEDEKLDKLRKELKELVDRARRVLERNVRENEELIRDIERNLKKNREDNERAIKEILDELKDLEEVKRMIEKLKKESEEVIRKAKEDLDRVTKESRRVIEEVERRLDELRERLREVVERVKT

SEQ ID NO: 2827 - protein, 182 aa, Artificial Sequence; identical to SEQ ID NO: 2826
  Synthetic

SEQ ID NO: 2828 - protein, 182 aa, Artificial Sequence
  Synthetic
DEAEKLLKELRDLLEESRKDLERLLKELEDLLEESKRDLERLLEEITELLKRIKETVERRNEREKLEKLLRELKKVVERLKDNLKDNERRNKEAIERVRKKLKDNERENKKVIEDLRAKLKDLEEVKRKIDRLEEESRRVIEEARKRLEEVEEKSKKIIDDARRALDRIDKELRRVVEETRK

SEQ ID NO: 2829 - protein, 182 aa, Artificial Sequence; identical to SEQ ID NO: 2828
  Synthetic

SEQ ID NO: 2830 - protein, 180 aa, Artificial Sequence
  Synthetic
SVEETARRLLDENRKLLEEAERIHTEINERNKELLKRADDLHRRVLEDLRKLLDKVAKEIDSRRLERIEELVKRILEKLEKSNRDSNKEHKDTNERSKRSNDESRKVHEKTLKEIEDVTKEGQDADTVVKRIKKVIDELEELNRKSKKELKEVIEDLERRNRDSIRRAEDLLRRLEEEVR

SEQ ID NO: 2831 - protein, 180 aa, Artificial Sequence; identical to SEQ ID NO: 2830
  Synthetic

SEQ ID NO: 2832 - protein, 180 aa, Artificial Sequence
  Synthetic
KDEETVEKLLRELEELLKEAEERAKDLNRRNKELLDEADRRHEELLRRLEDLLRDVRRRIDSERLERLERLAKEIRERIKKSNEESNRLHEETNKRIEKLLRDLRKTVKEVLERIKDMKDRGEDSDTVSERIRKVIREIERLIKEIVKEIEKLIRDLEKRNRESLKEIKDLLKKLKDEVD

SEQ ID NO: 2833 - protein, 180 aa, Artificial Sequence; identical to SEQ ID NO: 2832
  Synthetic

SEQ ID NO: 2834 - protein, 173 aa, Artificial Sequence
  Synthetic
SRKEKLLTELKEILKRLKEEVEKIVKESEKSIEEHHRRSERLKRESKKSLDDLAKILERSDKKVIDEIAKEHHDLNREILREDKKLLDDHHRLNKDLLKTIKELIDEARRRMEELDQDEELEKIRREVEELLRRAEEELRRLNREIEENHKRVKRELEKIDKEMKDLLREAKR

SEQ ID NO: 2835 - protein, 173 aa, Artificial Sequence; identical to SEQ ID NO: 2834
  Synthetic

SEQ ID NO: 2836 - protein, 173 aa, Artificial Sequence
  Synthetic
DRKERLKERLERLLKEHHDRSRELLRTSEESIRRHHEESRRLLRRSKESLDRLRDELRRLREEDIDKLMREHHKLNRDLLKEDEDLLDTHHKLNRKILREDEELLRKIREEIEKLDKDEELRKLERRARENHKRVREALERLNRRIEENHKRVRRRLEDLDRAAEELLREAKR

SEQ ID NO: 2837 - protein, 173 aa, Artificial Sequence; identical to SEQ ID NO: 2836
  Synthetic

SEQ ID NO: 2838 - protein, 173 aa, Artificial Sequence
  Synthetic
SRKEDLKRRLEEIIKRLEEVVRRILRTSEESLKDHHEASKRLLEESEKSLKRLEEELKRKDERVIEELVRRHHDLNRRILEDDKRLLEEHHDLNKKLLEAVDKLLKEAEDVLRKLDKDEELRKIEERIRELAKRAREELDKLDKEVRKNHERVKRRLEELDRRAKELVREERR

SEQ ID NO: 2839 - protein, 173 aa, Artificial Sequence; identical to SEQ ID NO: 2838
  Synthetic

SEQ ID NO: 2840 - protein, 173 aa, Artificial Sequence
  Synthetic
SEKEKLLKEIERLIEELRRVVKKAVEDSKESIDRHHERSRELLRRSRESLKDLERRLKDSDESVIEKLVKEHHDLNRRILKEDRDLLREHHELNKKLIDKIRRLVEDVRRKLEELRKDRELEELEKRVRELERRIRETLTRLNEEIEKNHRRVEERLRDLNREAEKLAEEAKR

SEQ ID NO: 2841 - protein, 173 aa, Artificial Sequence; identical to SEQ ID NO: 2840
  Synthetic

SEQ ID NO: 2842 - protein, 173 aa, Artificial Sequence
  Synthetic
SEKEDLSRRLAELLKEHHDRSKKLLDESRDSLRKHHKASRDMLRRSDESLKRLDRVRKERDDEVIKELVKRHHELNRELLERDKKLLKEHHDLNEEIARRDETLLREIRKKLEEADKDEELDRIRKEVKKNHDRARRALEKIDKEAKENHERVREALRKLNEDLEKLEREKRK

SEQ ID NO: 2843 - protein, 173 aa, Artificial Sequence; identical to SEQ ID NO: 2842
  Synthetic

SEQ ID NO: 2844 - protein, 173 aa, Artificial Sequence
  Synthetic
REKEELIKRLKRLIDELRRVVKTLLADLERLLKEHHDRSRRILEESKRSLEELEKTLRRSDERVIEELLKRHHDLNRRLLEEDRELLRRLTEMIDRILEELERLLKELDDEVKKLDKDDELRKLKEELEDLARKARKEIEDIKEKLRRNHERVKKALEDLNRTAEELLDRARQ

SEQ ID NO: 2845 - protein, 173 aa, Artificial Sequence; identical to SEQ ID NO: 2844
  Synthetic

SEQ ID NO: 2846 - protein, 173 aa, Artificial Sequence
  Synthetic
SREEKLLKELKDIIDTLRRRVEEILTESEKSLRDHHRESRKIVEELRKLLEDLRRLLERKDERVIEEILKRLAERIRDLTRKDEKLVEEHHRLNRRLIDEIRKLFEELKEVLDRLDKNRELDKIEEEARELVKRAEEKLREIDKRARDNHKRVRDELKRILDELKKLIDERRK

SEQ ID NO: 2847 - protein, 173 aa, Artificial Sequence; identical to SEQ ID NO: 2846
  Synthetic

SEQ ID NO: 2848 - protein, 188 aa, Artificial Sequence
  Synthetic
SVEDSIDKIDKELEKNSERTKRTIDRIREESRRLIEEIKDRVRRLLREAERTIEDVKRKLKDDERARERIKELEEKVRRLIEKVRRRIKENLDRNDKLLREVEKVDKELNERLKELIKEVEDVLRKTRERRVVEELRERLKRLLEKHHDLMRRLTEDLKRLLEESERDARRLVKELEDALREIREDTR

SEQ ID NO: 2849 - protein, 188 aa, Artificial Sequence; identical to SEQ ID NO: 2848
  Synthetic

SEQ ID NO: 2850 - protein, 180 aa, Artificial Sequence
  Synthetic
SREDKVRELEERLKRLNERLNREVKKVNEDNRRLLKRAEDTARRLAERIRRLLERVDREIDSERLERVRRTVERIERELKRLLDELRKHVRETDEESRKVNEELNEMSERTLRELRKLKDNNVPDEELERRVEELLKRNEKLIREVKKRLEELLRRNEELIRRILEEVEKLLKDLEDKVR

SEQ ID NO: 2851 - protein, 180 aa, Artificial Sequence; identical to SEQ ID NO: 2850
  Synthetic

SEQ ID NO: 2852 - protein, 180 aa, Artificial Sequence
  Synthetic
RREERVKEALERIRRLNKRINERVEEVNRENKRLLDEAKRTHEELEKEADRLLDDVRRKIDSERLERIERKVKEIKERIRESNKRLKEHVEDTDRRSKELNERLNRSSEKTLEDIKRMKDSNVPEEELEKEIRKVLETNRKLAEDVRRDLERLLRRNRRLIEESKKEVEKLLKELEEDVR

SEQ ID NO: 2853 - protein, 180 aa, Artificial Sequence; identical to SEQ ID NO: 2852
  Synthetic

SEQ ID NO: 2854 - protein, 180 aa, Artificial Sequence
  Synthetic
RRDDKVRKLEKELRDSNRKANDESKKLRDELRRLNEEANRRVRELERRIERLLEKVKDDIDSEELERIERKAREVKKTLEDLNRKLNDTSRRSEEELKELNRELNRVVRELEEELRAMLENNVPEEELKKRVEEALEEHRRLVEEVRRRVERILERNDELIKRIEETVEDLLRRLEEEVR

SEQ ID NO: 2855 - protein, 180 aa, Artificial Sequence; identical to SEQ ID NO: 2854
  Synthetic

SEQ ID NO: 2856 - protein, 175 aa, Artificial Sequence
  Synthetic
SEIDEIVKEVERLLEKLKEDSRRTVEEVKKLLDELRKHSEDSVREIEELIERLRREIERDGDTEEVEKKIRDIKRRIEELLRRNEKLVKEIKDRLKKLLDENRERLKKIEKELRDKARAEEKLRRLEEELREILKRSEDLARKLDEDLKRILERTRREIKRLEEDLDRLDEEVRR

SEQ ID NO: 2857 - protein, 175 aa, Artificial Sequence; identical to SEQ ID NO: 2856
  Synthetic

SEQ ID NO: 2858 - protein, 175 aa, Artificial Sequence
  Synthetic
SESDEIIKEVDELIKRLRKHSKETVKEIEEILTRLEERSRKSVKEIEDEIRKLEDIVRKRGNTEEVRELIKKILEDIERMLEENERLAKEVKDRIEKLLRDNERLVRDIKRKLREKLSVEEKARTLERKLDKILEETKREAEELKKRLDELVEKTRRLIEELKRRLKELLDRAET

SEQ ID NO: 2859 - protein, 175 aa, Artificial Sequence; identical to SEQ ID NO: 2858
  Synthetic

SEQ ID NO: 2860 - protein, 175 aa, Artificial Sequence
  Synthetic
DESRKIVRDVEELIKRLEEHSRETVKRADRVLREDHKKSRDSVREIEKLIRDVKDKIDKRGRTEEVEKLLRDIIRKVEKLLEENRRHNRRVKEELKRALEENRRLLEEIKKEIEKKASVEEEVRRLKKELDDLLEETKDLIRRLEEKLDKNVKETEDEIRRLIEELKKILEDATR

SEQ ID NO: 2861 - protein, 175 aa, Artificial Sequence; identical to SEQ ID NO: 2860
  Synthetic

SEQ ID NO: 2862 - protein, 175 aa, Artificial Sequence
  Synthetic
REIDEIVKEIEKILRELKKRSDETVREIERLIEEDHRKSRKSVRDIEKLIDDLRKDVERRGDTEEVKKLIEDIDRRIKELLDRNRKHNTRVLKRIEDLLRENERLAREVEKRLKDDMRAEEKLRKLEEELRRLLEESKREADRLKKELRDNLKTTDELIKELKERLDKLKEDIER

SEQ ID NO: 2863 - protein, 175 aa, Artificial Sequence; identical to SEQ ID NO: 2862
  Synthetic

SEQ ID NO: 2864 - protein, 175 aa, Artificial Sequence
  Synthetic
DESDRIVEEVRRLIKTDHDNSRRSVRKIEELIARDHKKVKEIVDEIRRLIRELEELIRRDGDTREIEKLIRDIEETIRRALEELERHNERVKREVEKMLRDNEEHNKEVKERIRRKLRVKEKLDRLEEEIDKNVKRTREEIERLKRELDKNLEDVRRLAKELEDELRKLDEDAKR

SEQ ID NO: 2865 - protein, 175 aa, Artificial Sequence; identical to SEQ ID NO: 2864
  Synthetic

SEQ ID NO: 2866 - protein, 175 aa, Artificial Sequence
  Synthetic
SEIDRIIEDAERLLRELERNSDRSVEEIEKLIRDDHDNSRRTLEKIEKVIRELRKDVKDRGDTEEVERKIREILREIEELLRRNEKHNREVKERIKEVLRRNKELLDEIKKRLEDRVSSREKVKRLEEELRKILKKTREKAEELKRRIDRNVEETRRRARELKEELDRLLKEART

SEQ ID NO: 2867 - protein, 175 aa, Artificial Sequence; identical to SEQ ID NO: 2866
  Synthetic

SEQ ID NO: 2868 - protein, 175 aa, Artificial Sequence
  Synthetic
DESRKVIKEIEDLLEEWKRRSERMIRESEKLIEELRERVDKILEDIDRLIRTLDELRKAGVPREEIRKLAEEVRKRIEDLKREIKKLAEDIKRTDEKLLKESRDIVRKIEEIIRRKLSVEEEAKRLKDELEEILKESEDLSRRTKKELEDLLREVEKEIKKLEDKLKKLLDETDK

SEQ ID NO: 2869 - protein, 175 aa, Artificial Sequence; identical to SEQ ID NO: 2868
  Synthetic

SEQ ID NO: 2870 - protein, 175 aa, Artificial Sequence
  Synthetic
SETEKVIREIEKLIDDIRKESERSIEESRKLLKELEEIVEKAIRDSRRLLEDLRRLVEDGVDRDEIRKLAEEVERSDRELVKRIEDIARELKKRDEELLRENEKIVRTLEETIKRELSSEEKADTLRRKLEKLLEDTKRMSEKTKKEIEDLLKRVRELSEETKRRLDRILEDVER

SEQ ID NO: 2871 - protein, 175 aa, Artificial Sequence; identical to SEQ ID NO: 2870
  Synthetic

SEQ ID NO: 2872 - protein, 175 aa, Artificial Sequence
  Synthetic
SESDKVVKEIEELLRELRKRVEEIIRESEALIETLKKRVDDAVRESRKLIKDLRELIERGVPEKDIRKIAKDLEEKNKKLTDEIRRLAEELRDRDRRLLEEIEKLLRDIERTVDRKLSVREKAKKLREELRKLMEEVRRLSKETKDKLDELLKTVEELSKELRERLKRLLDEAET

SEQ ID NO: 2873 - protein, 175 aa, Artificial Sequence; identical to SEQ ID NO: 2872
  Synthetic

SEQ ID NO: 2874 - protein, 175 aa, Artificial Sequence
  Synthetic
SESDEVAKRIKELIDRLEERSRRSIRESDRLIKELEKEIEKAVRESEKLIRDLEELIRRGVDTREIEKLARELKKRNDDLTRKIEDIARKLKKRDEELLKENEDLVKEIDDSIKAALSVEEKMRTLEEDLKRLLEETRDMSRKTKEKLEELLKRVRDLSKKLAEDLRRLLEEVRR

SEQ ID NO: 2875 - protein, 175 aa, Artificial Sequence; identical to SEQ ID NO: 2874
  Synthetic

SEQ ID NO: 2876 - protein, 175 aa, Artificial Sequence
  Synthetic
SETDEVIKTLEELLERIKRRVEELVKRNKDLIKALEEEVRRIIKESKKLIDDLAELAKEGVPKKDIEKIARDLEKRDEELLDRIRKLAEELRRRSKKSLDEVRKIVRELEEEIDRRLSDKDKADRIREEIRKLEEEVKRLHDELKKELDDLLRRVEEDSKRTKERLRKLLTDVKK

SEQ ID NO: 2877 - protein, 175 aa, Artificial Sequence; identical to SEQ ID NO: 2876
  Synthetic

SEQ ID NO: 2878 - protein, 179 aa, Artificial Sequence
  Synthetic
SEVDDLIRRLEKLLEDIKRRVEELVRRDEKITKDWERESERLIRELEELLKTIADLVRRRKESKEEVEKVIRDAERKIREILETSKELLRRSKKHTKEVLEEVERLIDEARKMIEEVRKRNVDKKKLDEIRKRLEEILKRVRELLERLDRENEDLARKSKELADRIRKELKRILDEVRR

SEQ ID NO: 2879 - protein, 179 aa, Artificial Sequence; identical to SEQ ID NO: 2878
  Synthetic

SEQ ID NO: 2880 - protein, 179 aa, Artificial Sequence
  Synthetic
DEVDELVKELEESLRRSREEIERLVREDEELTKTIREEVKKLVKTDEDLSKKIEDTVRRRREADEKIKEMIDRSKKHTDEVLERVEELIKRSKDHTKEVVDRVEESIKRNDERLDEIRKRNVDKDKIKELKERNDKLLEEARRLAKELKERNDTLLKEVREELRRLRERNDRILKEAKK

SEQ ID NO: 2881 - protein, 179 aa, Artificial Sequence; identical to SEQ ID NO: 2880
  Synthetic

SEQ ID NO: 2882 - protein, 179 aa, Artificial Sequence
  Synthetic
DEVDKLIRDLEELIRRIRKRLKELVDRDRELTREIRRRIRELIEESKEALERIDKRVKERKEVREEVEDLARELKRLNDEVLKEIEDLLRESKKHTDDVRREVERLIKEIREKLEEIRKRNVDKDKIKKLKDDLDRLLKEAEDRLRELEERNKRLLDEARKEIEKSDRRLEEILERVRR

SEQ ID NO: 2883 - protein, 179 aa, Artificial Sequence; identical to SEQ ID NO: 2882
  Synthetic

SEQ ID NO: 2884 - protein, 179 aa, Artificial Sequence
  Synthetic
DEVDELIKTLKKLLEDIRERVERLVTDSKRSLDEIRETVRDLVRRDKELLKRIEDTVRERKEVREEVEELIKRSEEHTEDVERRVRKAIEEHKRLNDEILREVEELIKRIEEAIREVAKRNVDKDKLEKIKRDLEKILTEVREALRELDERLKKLAEEAKRLLEELRKRNRDILEKVRK

SEQ ID NO: 2885 - protein, 179 aa, Artificial Sequence; identical to SEQ ID NO: 2884
  Synthetic

SEQ ID NO: 2886 - protein, 179 aa, Artificial Sequence
  Synthetic
DEVDKLIKEIEESLRRSEKEVRDLVRESERSLKEIEKRVRELVKRDEDLLKEIEEVVRKKKEAREEIEEMAKRSEEHTEEVRKEVEELARRHKERNKEILKRIRESMKRNDELIDEIAKRNVDEEKLKRLRKENKDLRDRVEEELRRLDKELDELLETVRRLLDELRKRNKKLLDEARK

SEQ ID NO: 2887 - protein, 179 aa, Artificial Sequence; identical to SEQ ID NO: 2886
  Synthetic

SEQ ID NO: 2888 - protein, 179 aa, Artificial Sequence
  Synthetic
RLEEEIERLRREVEELIERSKDLIRRSHTKSRKLIEDVKRELDRLRREVEELIKRAEDRTRREEVDKKLKDLLRELEKILEEIDRNIRRNMKENEDLNRRWKEVTEELLKELEEILKRIRDRVEDRVVREAEKLIRKIAEDNRKALEESDELIRRSEKDVRDMVRRAEELIEEIKRRVD

SEQ ID NO: 2889 - protein, 179 aa, Artificial Sequence; identical to SEQ ID NO: 2888
  Synthetic

SEQ ID NO: 2890 - protein, 181 aa, Artificial Sequence
  Synthetic
SKDEEVERLKEELDRLLEEVRRLSEESKKRNDELLKRAEEIIEELKKELDEIREEVERRGLPEEKLERIERLVKRIKERIEDLLKKSREEHEKSKRRDEELLRRLEEVAKEVKRRLDEMARKGEDKDTVVRRAKKVIDELRKDVERVKRESDEVLKELEKLNREIEREVRKLLKELRDTVR

SEQ ID NO: 2891 - protein, 181 aa, Artificial Sequence; identical to SEQ ID NO: 2890
  Synthetic

SEQ ID NO: 2892 - protein, 181 aa, Artificial Sequence
  Synthetic
RSEEEARKLERENKKLVDDARKLSEESRRRNDKLVEEARRIAEELKRELDRLLEEVDRRGLPEERLRDIRRLIEEIKRRVEELLRRSKKMHEDSKKRDDDLLRRSEELHEEIRKAIEKMRKDGEDTKTVVDRVKKLLDDLREVNREILRESDKVLRDLKRLNDEIKREVEELLERLEREVR

SEQ ID NO: 2893 - protein, 181 aa, Artificial Sequence; identical to SEQ ID NO: 2892
  Synthetic

SEQ ID NO: 2894 - protein, 181 aa, Artificial Sequence
  Synthetic
SAEEDAERMKDRNRRLLEKVRRLSEESKRRNDKLVEDAKKLSEDTRRKLEDIARKVRKRGLPEDKLRRIEELVKEIEKRNRELTKRSEDAHRESKKRDEKLLRDSEKRHREVLKRIEDLLRRGEDKDRVSEEIDRLLRDLERRNREILKESKEVLDRLKKLNEEILKESEDLLRRLEEEVR

SEQ ID NO: 2895 - protein, 181 aa, Artificial Sequence; identical to SEQ ID NO: 2894
  Synthetic

SEQ ID NO: 2896 - protein, 176 aa, Artificial Sequence
  Synthetic
SEIEKVVKDVDKLLKELEDHTRKSLEDSKRLLDELRKHTEDTSREVKELLERLEEVIRRNKEMKEELRRIAKKIDEDIKRLVERNKKIADDIRREDKKLLDRNRELVDRIREEIDRRIRSKEDADRLRERLDRILEESERLSRETKEELDRLLEDSKRKIRELEERLKKLLDDAER

SEQ ID NO: 2897 - protein, 176 aa, Artificial Sequence; identical to SEQ ID NO: 2896
  Synthetic

SEQ ID NO: 2898 - protein, 176 aa, Artificial Sequence
  Synthetic
DDSDKVLKELEKLLEDLERHTRESLRESDELLKELKEHTKTTLRRSERLLRELKRLVDENKEAVERIEEAARRIEEEDRKLLKRNEELVREIEKRDRELLERNRKLAEEIKEAIRRKVRVEKDVEEVRRKVEELLKDSERLSKETKERLRDILRDSRRLSRETKEELKRILKEVRD

SEQ ID NO: 2899 - protein, 176 aa, Artificial Sequence; identical to SEQ ID NO: 2898
  Synthetic

SEQ ID NO: 2900 - protein, 176 aa, Artificial Sequence
  Synthetic
RESEEVIKEVEKLLEELKENTKRTLKESRDLLKTLEDHTRETKKTVEKMLKELEDKVRKRKESEEEIRKVVEDIKREIERLARENERIAREIEERDRELLDRNRKLAEDIEEKIRRKIRVEEEADRLRRELKKILDRSRELSRKTKEDLKKLLKESEDIIRELDRRLEEILKEVER

SEQ ID NO: 2901 - protein, 176 aa, Artificial Sequence; identical to SEQ ID NO: 2900
  Synthetic

SEQ ID NO: 2902 - protein, 176 aa, Artificial Sequence
  Synthetic
EEIERVIKEVKDLIEELRRNTERTLRESEELLKTLKKISDDSKEEVERMLRELRELVKSNKEAKEEIRKVADRIRKVIKRLMDENKKVADEIRKRDEDLLDENRKLIDRIRREIDKKIRSKEDADRLRREVDKLLEESKRLSEETKRELDRILEETKRTLERLKEELDKILEEVER

SEQ ID NO: 2903 - protein, 176 aa, Artificial Sequence; identical to SEQ ID NO: 2902
  Synthetic

SEQ ID NO: 2904 - protein, 174 aa, Artificial Sequence
  Synthetic
SEKEKLVEEVRRIIERHKRVTEELLKELRRILKEWEDVSRDIERRVREILERLERAARDGEDKRLVRELVKDIERLLKKLLDDSKKIVKEIDEVLKELLKTDEELVRRIREKLERADKDKDLEELKKELEDSARRSKKLADDVREELKTLLRESERIIKELRKELEKLLREVEK

SEQ ID NO: 2905 - protein, 174 aa, Artificial Sequence; identical to SEQ ID NO: 2904
  Synthetic

SEQ ID NO: 2906 - protein, 178 aa, Artificial Sequence
  Synthetic
TLEEVLKEVKRRVERVNEEDKRVLDESRKRAKEINDEDRRLLEESKRKAEELLERLRRKDKDAKEVEEKIKRVLEELAREHEKINERIKEEVKRLEEEHKKINERTKRLLEDLKRLVESGLDEDRLRREAERILREIRELSRELKRKNEELLRTIRRVSEELRKKNEEILERVDREIK

SEQ ID NO: 2907 - protein, 178 aa, Artificial Sequence; identical to SEQ ID NO: 2906
  Synthetic

SEQ ID NO: 2908 - protein, 173 aa, Artificial Sequence
  Synthetic
SAKELLDDLRKKIEDNVRETEKLLRRLREKVEKIEREIKELVRKLREDLERLLEKVKRRGVEEEVERLIREIIKKIEELVKRLEELLKEILERIEKLAEDNRRHNEEVKKDIDDKRIEKEVVDTVRELIERDHKKSRDSVRRVDELIDRARKDVRRVVEEVRKDLEKLDEDVK

SEQ ID NO: 2909 - protein, 173 aa, Artificial Sequence; identical to SEQ ID NO: 2908
  Synthetic

SEQ ID NO: 2910 - protein, 175 aa, Artificial Sequence
  Synthetic
REVEEVLKDLKRLIDEAKKRVEDAIREIDRLIREWERLNREMLREIKKSNDEVRELVKAGVPKEDIERLLREDNKLIEELLRRSEEIARDIERKIRKILEDLKRIIEELKKRVKDALRVEEAVRDVERRLEKLLKEIKDLIDRLKEKVDRVKREVERSIEELKRHNEEVLKEVRK

SEQ ID NO: 2911 - protein, 175 aa, Artificial Sequence; identical to SEQ ID NO: 2910
  Synthetic

SEQ ID NO: 2912 - protein, 175 aa, Artificial Sequence
  Synthetic
KEVEDVLEELDRLIETWARLNRELVERIRRLLEEWREENRKVVEEVRRSNETLRELVERGVPKEDIRRLAKEDNERIEELLKRSRKIADDIRRAIEEIVRRSREILRELEKRVDDKLRVEEVVRRVKDKLREVKREVEETARELRERVDDLLRKVEESVTRLKRHNEDLLREVER

SEQ ID NO: 2913 - protein, 175 aa, Artificial Sequence; identical to SEQ ID NO: 2912
  Synthetic

SEQ ID NO: 2914 - protein, 175 aa, Artificial Sequence
  Synthetic
SEVEEVLRDLKRLLEEWKKRNEDLVRDVERLLREWKEANDRALKKSRDSNKELERLARDGVPEKDVEELAKRDNEENKRLSEESARIVERIREKIEEALKRSTDIVREIEKRVEKALRKKEMVERVRREIKRLEEEVKKTITDLKERLKKLKEDADRSSRESEEHNKKVVEDVRR

SEQ ID NO: 2915 - protein, 175 aa, Artificial Sequence; identical to SEQ ID NO: 2914
  Synthetic

SEQ ID NO: 2916 - protein, 175 aa, Artificial Sequence
  Synthetic
REVEEVLKELDRLIDELRKEVEKIVREVERSNDEWRRRNKELVDEVRRELDRLRKLVDDGVDKKDIRRLLDEIRKLIERVLKESRDILRKDNERIKELADRIRRLVEDLERKIEEKLRVKEVVDDVKRKLEDLKRRVDELVRRLEEHNKDLRRKVEESAKDLRRKLEELRERVER

SEQ ID NO: 2917 - protein, 175 aa, Artificial Sequence; identical to SEQ ID NO: 2916
  Synthetic

SEQ ID NO: 2918 - protein, 176 aa, Artificial Sequence
  Synthetic
SEKDEVRKTIERLLKEVEKMIRRVLKEVEDLLRELKKRTEKLKRELDESHRRVKEVIERRKEDRDLLRRLIEENERLIEEAKRELDEVDERVRRRIEELLKELEKIVRDVEDMLRRLNLPRELLEEVERALKKLKEDVDKVIEELREKLKRHHEDVKRAIDRVREESKRLKDEAEK

SEQ ID NO: 2919 - protein, 176 aa, Artificial Sequence; identical to SEQ ID NO: 2918
  Synthetic

SEQ ID NO: 2920 - protein, 176 aa, Artificial Sequence
  Synthetic
REDEEVVKTLRELLREAKERTDRLLRELREIIKTMRKRLRDIEEDLRRSHREIEKLIRDRKEKREELRDIVRRNDELIRRLTEDLERLIEEARKVLKDIERDLERVDEELEDTLDKANLKRELLEEVRKELERHHREARRAVEEVKKLIDDLMREVRKLIDEVRKDSERLRREVER

SEQ ID NO: 2921 - protein, 176 aa, Artificial Sequence; identical to SEQ ID NO: 2920
  Synthetic

SEQ ID NO: 2922 - protein, 176 aa, Artificial Sequence
  Synthetic
DEDEEVKRRLEKLLEDADRVTEKIRKDLKETHDRVKRAIDELKKELEKSHRTIKEVIERRKEKRKDLTKIVRDNERLIEEVKKRLEELIRKNEEIIKELEKELKKIDDDLDKKIKDANLKRELVEEVRDRLRKHHKKVRDIVDDVDKRSKDLERTARRVIEDVKEKSDRLKEEVDR

SEQ ID NO: 2923 - protein, 176 aa, Artificial Sequence; identical to SEQ ID NO: 2922
  Synthetic

SEQ ID NO: 2924 - protein, 174 aa, Artificial Sequence
  Synthetic
EDEERVKEKLKRLLEKAEEALRRSKRRNEENKKEHERVLKEIDERLKRLEEKVRRGNLERRTVEEIRRILEDIKRKLDKLTKESEDLHRRNDERVKEVFRRIEKLIRDIEEDIKAGRSREDIERLLKELDDRIRRIIEELKRSDEELHKENRRKIKELEDLVREADKRIEDKRK

SEQ ID NO: 2925 - protein, 174 aa, Artificial Sequence; identical to SEQ ID NO: 2924
  Synthetic

SEQ ID NO: 2926 - protein, 174 aa, Artificial Sequence
  Synthetic
DDEKEIKDRLDDNKRKDDEMTKRAEDELRKNLETTKEALRDIKRKLDRLREKVERNNLDEKTLKEIEDVLRTIEEEARRLLEDSKRVHREIEERMKRLNDDSKRVHEDIKRALDGGVRREELEKIVRDLHKRNKEVIDDIRRLIDELHKRDRETIKRLEEIVRRADEKIKEKAR

SEQ ID NO: 2927 - protein, 174 aa, Artificial Sequence; identical to SEQ ID NO: 2926
  Synthetic

SEQ ID NO: 2928 - protein, 174 aa, Artificial Sequence
  Synthetic
SDEERIEERLKRNEETDKRATDENEKRNDDLLRRAKEALDRNRERNDELRDKVRKENLDDETVKRIEKLLRDNDRRLKELLRELEKRLRDNREKLKELNKESKKRHEEVRERLRAGVRREELSKLVKELHDDNREKIKDSDRSDDDIRREIERMIRETNKSDEDIARAIDESAR

SEQ ID NO: 2929 - protein, 174 aa, Artificial Sequence; identical to SEQ ID NO: 2928
  Synthetic

SEQ ID NO: 2930 - protein, 174 aa, Artificial Sequence
  Synthetic
SERERVEERLKELAKRVEDAIRRLKKDLERTKEEHKEADRRVKEKLKRLKEEVDRANVDEDLRRKIEELLKRAKDENKKLNEEVERILRELEKRYEELKRRIDRLLDTLRKKLEEGTRDTEVEELLKDVKRKIEEMIKELKRLNDELNKRSEEMIRRNDDLIKRLEEEIRKDSK

SEQ ID NO: 2931 - protein, 174 aa, Artificial Sequence; identical to SEQ ID NO: 2930
  Synthetic

SEQ ID NO: 2932 - protein, 176 aa, Artificial Sequence
  Synthetic
SSEDEVRKTVDELRERSERTIRDLERVDRELKKEHEELIKELREIVKELREKVKRASKEPTSEREIERLKEELERTMRELHKKNKRVREKHEELLEELRRRNRKLNEEVKKTVREMRDKVDKRIEEELRKLHKENKEAVERSERTNRDILRRNDEADKEIEKELRELIEKLERDRK

SEQ ID NO: 2933 - protein, 176 aa, Artificial Sequence; identical to SEQ ID NO: 2932
  Synthetic

SEQ ID NO: 2934 - protein, 175 aa, Artificial Sequence
  Synthetic
SEKEDLKEKLKRNEEEHRRAVEEIRKRLDENRRRHEKVIKEIEDALKKDEDDVDKENLDEELRKELKRLHDEIRRRLEELNRRSKKRHKEVEDKLRRLDEESEKMHRRVEDLIRRGELDKDELTREIEKLHRTNREMVRDLRETLKRLHEENKRLVDELRRLLEELHRRTREASR

SEQ ID NO: 2935 - protein, 175 aa, Artificial Sequence; identical to SEQ ID NO: 2934
  Synthetic

SEQ ID NO: 2936 - protein, 174 aa, Artificial Sequence
  Synthetic
SEEEEVRKALERLRRELKRVLERSEELLKEWEDRLRRVLEESRRLLERWREELEKDGIDEDVLRELEKDIKKVKEDHDRDAEKLRRIIEEIRKRHEEVFRRLEDLLRKVRERLERGRRREELKEILKRLEDTLREIEKEAKRLNDELARVLEEIRRKSERENRRLKELIDRLRK

SEQ ID NO: 2937 - protein, 174 aa, Artificial Sequence; identical to SEQ ID NO: 2936
  Synthetic

SEQ ID NO: 2938 - protein, 171 aa, Artificial Sequence
  Synthetic
SDRERLEEMLKRLKEELEKVRRDNERSLEEIKRSVDRVLEEHKRTLEELKREVDRANVDEDLKRELKELLEDSKRRVEELKEKHERLLRKNKKELDELKKRLDDLLKKIRDDDVRGEEADEVVKRLADVLEKAREDLKRSDKRLRDSNRESRKELEKINRDLRRKLEEAKR

SEQ ID NO: 2939 - protein, 171 aa, Artificial Sequence; identical to SEQ ID NO: 2938
  Synthetic

SEQ ID NO: 2940 - protein, 171 aa, Artificial Sequence
  Synthetic
KDEERLETVLREIETRAEKVARDHRDSLRRIREELERVLKENKDTLKRIREELEKTNVDEKLKTEADRLEEENERRLRELEKELDELLKRSEDTLRKLLKELRELLKRVRDRQVRGEEVKRVLKELRDLLEEIRKRLEDINRDLKRKLDEIEEELRRSDEKLKRDLEEARK

SEQ ID NO: 2941 - protein, 171 aa, Artificial Sequence; identical to SEQ ID NO: 2940
  Synthetic

SEQ ID NO: 2942 - protein, 171 aa, Artificial Sequence
  Synthetic
SDEDKLREDLRRLEEELKKVLDDHRKSLKEIEDSLRRVLEENKRTLEKLKRDAEKANVDEELLERLKKLLDDNRKRVEELEERHRRLLKESEERLRRLVEEFKRLLEKIERDQVRGEEAKKVVKALEDVLREIRERLKRINDELRERNKKSSDELRKSDERLKRELDKMRK

SEQ ID NO: 2943 - protein, 171 aa, Artificial Sequence; identical to SEQ ID NO: 2942
  Synthetic

SEQ ID NO: 2944 - protein, 183 aa, Artificial Sequence
  Synthetic
DADKELEKLLREWEKRSEELRKRLEDINRRWEEESKRLKKELKDINADLRRKVEELRRDEDKDRVREVVKRLSERNDEVDRKVKKTSEDIADRNRREDKKIREDSKKIKEDLERALEELREKVSSDVIRRAKEELDRIEKKDRDVLDDNRRLIETWRREDKKVNDDNRRSNEELKRELDKTRE

SEQ ID NO: 2945 - protein, 183 aa, Artificial Sequence; identical to SEQ ID NO: 2944
  Synthetic

SEQ ID NO: 2946 - protein, 183 aa, Artificial Sequence
  Synthetic
SAEEELKELLERWDRDSKRAEEELRRLLEESRERSEKVLRDLKRLLDEMEDAVRKLKRDSDKDRVRRTVEELTKTVRKKLEEIERRTREIKKELERTLKRIEERSREIKKDLERSLERLRKDVSSEVIERFKDVLRRIEKRNKEVIDRAKEVIDEDEKRNREVIERVERKVERLRKEVEDREK

SEQ ID NO: 2947 - protein, 183 aa, Artificial Sequence; identical to SEQ ID NO: 2946
  Synthetic

SEQ ID NO: 2948 - protein, 184 aa, Artificial Sequence
  Synthetic
EEKERMREVLKRLEEEAKKVLDDNRRAVEEIEKKDREVHKRNRDLLERWREEMEEILRKARERVDKEDLDRLEETLRRLIEDNRRKDEEIRKVSEDVKRDNRKKNEDIKRRLEELKKTVADVERKNSREEELKKIIERAREELEKVRRELEEHLKRWDEISKKLSKDLERHNEEVARTLKRSRD

SEQ ID NO: 2949 - protein, 184 aa, Artificial Sequence; identical to SEQ ID NO: 2948
  Synthetic

SEQ ID NO: 2950 - protein, 181 aa, Artificial Sequence
  Synthetic
SVLEEFKKRIEELHRRDRKVLEDHRRRLKEWEEELKRVLDEHRESLKRIKERVDRVKKDLDDEELKRVDKKLKDLEKKSRDLVREVEKILRELRKRSKDAEDKVKKVNEDVRRRAEKLARDLREDSDALRELLREWDKLSKELEKELRDLNREVERSIREAKKKLEKANEEMRRTLEKDRK

SEQ ID NO: 2951 - protein, 181 aa, Artificial Sequence; identical to SEQ ID NO: 2950
  Synthetic

SEQ ID NO: 2952 - protein, 181 aa, Artificial Sequence
  Synthetic
STEEDAERALEELKEELRRVEKENRDSLKRIREKLKEVEDEHRKTLEELKKELDDVMRKIKDERKKRKVEKLRRELEKAKRDSEKLLRDLERKIDEVEKTSKKMLEELERDLRKILDDVRKAKLDKDSLKRLLDEARKKLEELKRRLEKLDRDLDESLKRLKEDLDRLDRELRRLLDELDK

SEQ ID NO: 2953 - protein, 181 aa, Artificial Sequence; identical to SEQ ID NO: 2952
  Synthetic

SEQ ID NO: 2954 - protein, 181 aa, Artificial Sequence
  Synthetic
SVEEEARKALDDLRRRLEEVTRRHRESLKELREELDEVRKENEKSLKKIKDDLEAVRRRITDERKKRKVDEARERIKEVEERSRRKLRRLEEEIDKAEEESERLLETLKEELKRLMDEVEKAKRDEEELRRLLKKLEDDLRRLKKRLDELDRRLRELVKRLLEDLKRLDDELKKLLEETER

SEQ ID NO: 2955 - protein, 181 aa, Artificial Sequence; identical to SEQ ID NO: 2954
  Synthetic

SEQ ID NO: 2956 - protein, 175 aa, Artificial Sequence
  Synthetic
SAEEELKRLLEEHKKESEDVKRRLRDLLRELEDIHRRMTERLRELLKRLDDILRRRNSDDETLKRLVDELRKEIKKVEDDDHRNLERLREELRRLEEDLKRRNEETKEEVDRVRKKGSLTEEILKKLEEISRRVREKVKKELDELKELIRRHARKLEKILEEIRRLIEDLERRAR

SEQ ID NO: 2957 - protein, 175 aa, Artificial Sequence; identical to SEQ ID NO: 2956
  Synthetic

SEQ ID NO: 2958 - protein, 184 aa, Artificial Sequence
  Synthetic
SEAEEVLKRIRDILETLRREHERILKEIRELNEEFKKEVEKALRKIKRELEELEKDAEREGTTEELRKKVEKLLRDIKETLRRLEEKSRELEERIRELLKRLHETVRTLEERIKDLREELRERVDERVEKKIEELLREIRKVNDEVHKRIRKLLEDHRRTVDEARRRIEELLRRLKKTLDDIDK

SEQ ID NO: 2959 - protein, 184 aa, Artificial Sequence; identical to SEQ ID NO: 2958
  Synthetic

SEQ ID NO: 2960 - protein, 181 aa, Artificial Sequence
  Synthetic
SDKDELKRLLDDHERTSTRARESLEKLSREHRKTSREVEERLKRLVDAIRDTARRVDSRRREVEETLKEIEKRLRELKRELEELDKEFEDSVRKLKRELERLNEEVRKRVEDLKRRMAEGTDEEVVRRILRELRELNERAKEMLERILRKLEELNREYKKKVREILERIKELLRDLRRKAN

SEQ ID NO: 2961 - protein, 181 aa, Artificial Sequence; identical to SEQ ID NO: 2960
  Synthetic

SEQ ID NO: 2962 - protein, 181 aa, Artificial Sequence
  Synthetic
SADDEIRKLKKEAEDILRKAREDRERLKEKNRKIDEDMRRTLKKLHEETRELEKKVRREKGEDERVKELLDDLRRKDDDMRKRVTELHEENKKIDDEVRREVERLEEEIRDTIRKLDEDVKRDGVTEELVKEIRELLRRLEEKIEELRRRYEKKLEELKRKVDELIRRYKRKLERVAEEVK

SEQ ID NO: 2963 - protein, 181 aa, Artificial Sequence; identical to SEQ ID NO: 2962
  Synthetic

SEQ ID NO: 2964 - protein, 175 aa, Artificial Sequence
  Synthetic
SEEEELVRRVEEKIKASEKHARELVEETRKKLDESRKKWKDLARRSRRLLEELKDKVDKGTDKKRLAEEIKRVLDEHEDENRKLADEDRELRKRHKEKNKEHEERNRRLREELERRLDETEELRRLEKELRDLNKRVKEESRKLEEDLKDIHERAKEDSKRLKRELEKIKEEVER

SEQ ID NO: 2965 - protein, 175 aa, Artificial Sequence; identical to SEQ ID NO: 2964
  Synthetic

SEQ ID NO: 2966 - protein, 181 aa, Artificial Sequence
  Synthetic
DAERILRELEERLKRLLDEHREISKELRKRNKDLLKEHKERSKRVKEELKELVKEVEDGGKPREDVDRLRKSAEKVEEELDRMDEEFERDNRELDRRLDELDKEIEELVETVRERLERAEERGEPIEELVKEVEKLIKELREKSREVEREVDKMIRDNARKSEKIVRDAKRLLEKLEREVR

SEQ ID NO: 2967 - protein, 181 aa, Artificial Sequence; identical to SEQ ID NO: 2966
  Synthetic

SEQ ID NO: 2968 - protein, 181 aa, Artificial Sequence
  Synthetic
RSEDILRELRERVKRSEERHEKISRDLERKNRELLKEHRERSEKLKRELEELVKRVEDRGLPEERLKELRKIAEEVDRELEEMDRRVEEMNERLDRRLEELDDENRKKVKEIKRKLDEDAKRGEEAEDLARRVDETIKDHERHSEEVKRDVTEKIKENEKLSRDIVRRVEKLLRDLEREVR

SEQ ID NO: 2969 - protein, 181 aa, Artificial Sequence; identical to SEQ ID NO: 2968
  Synthetic

SEQ ID NO: 2970 - protein, 181 aa, Artificial Sequence
  Synthetic
SREDILRDLRRRLEELLRRHKRISDELRKRNKKLLDDAEKRAKELREELEKLVREAERRGLPEEELKRLKEIADEVKKRLDELVKELRRDNERLDKTLDDLNREVEELVRRVEDELRRAAERGEEIEELVKRVDKLIKELKRKSEEVMKRVDELIRRNERLIREIVKEVEKLLEDLEREVR

SEQ ID NO: 2971 - protein, 181 aa, Artificial Sequence; identical to SEQ ID NO: 2970
  Synthetic

SEQ ID NO: 2972 - protein, 181 aa, Artificial Sequence
  Synthetic
SAEETIERLKEEIEKLLREAEEILRRLRERNRRLLEEHKDISRKLEEELRKLMEKVRRGGLPEDRLRELERRLKEVEDRLKDLNRKVEEKNKELDRRLDKLAEELKKEIRDVERELDDLRRKGTEVEELVRRVRELIKRLRDMAKEIEERVDETIRRNRRLSEKVARDVERLLRELEERVR

SEQ ID NO: 2973 - protein, 181 aa, Artificial Sequence; identical to SEQ ID NO: 2972
  Synthetic

SEQ ID NO: 2974 - protein, 181 aa, Artificial Sequence
  Synthetic
DAERILKELEERLDRLSEEAKKILDELRRENEELLREHDERVKKLKEDLKRLEKKVEDGGLPEERLDRLRKLVEKVRKRLEDLNKRTRELNKELDERLERLLEELKRTIEKVKDELRKEAEKGTEVEELVKRVTKLIEDLRRLAKKISDEVRKLIEENRRASKRVEDEARELLKRLEDAVR

SEQ ID NO: 2975 - protein, 181 aa, Artificial Sequence; identical to SEQ ID NO: 2974
  Synthetic

SEQ ID NO: 2976 - protein, 172 aa, Artificial Sequence
  Synthetic
SEIEKMVKDVRDLLKRLKDEVKKISERWEDSLRKLKKRSEDTVKRVKEILEELRRRNLPRDEVREEVKKIKEELDRLNEEFKKRNEEDRRDLERAAEEIKKLLKDIEDELRRRLRKRDALRELERELDKLRKEIKKELDRLRKENREVNERHKELSKRLEEELERVKRELDT

SEQ ID NO: 2977 - protein, 172 aa, Artificial Sequence; identical to SEQ ID NO: 2976
  Synthetic

SEQ ID NO: 2978 - protein, 176 aa, Artificial Sequence
  Synthetic
DEVRELVKTVKKVLDDIRREVEETLRRYEKLVEDLKRRSDKSVKDVDDEIKRAEEEGDKDKELIDRIREEMEDLKRKHEDEHRRIEEELKRLNDEVKKILDELRERLKRLDEDLRRKRLDEELIKRLREEAEKLIRRAKEEHERLEEESKRLLEENEELLDRLDKKVRTLLDKLEK

SEQ ID NO: 2979 - protein, 176 aa, Artificial Sequence; identical to SEQ ID NO: 2978
  Synthetic

SEQ ID NO: 2980 - protein, 179 aa, Artificial Sequence
  Synthetic
SEEDRVRETVKKLLEDHRRKTEKVTEDVRRLLKENREKVEDAVDKARKLLKRLEELRREGELSEDDLRRVIEEIKRRIDEVERRLRKHHDDIRRTLEELDRDNDETLRRIEKELKRLVDEKVDDEKLKRIEEELRKSRERTKRLLEEIRKELEDSKKEVEDLLRRLREELKRLKDEIER

SEQ ID NO: 2981 - protein, 179 aa, Artificial Sequence; identical to SEQ ID NO: 2980
  Synthetic

SEQ ID NO: 2982 - protein, 182 aa, Artificial Sequence
  Synthetic
SEVEELVKRAEELIRELKKLSEDSVRELEKLLDEYRKTTEKLKRELEELLKEVEDVVRKLRDQDDDEKIRKTAEELVKRLEDILRKLEEVNREKKERAKRLLEKHEELLRRLDRRLEDLRRKIKVDEKLLRKIEEDVRRLKETNERLLKRVDEELKRLDEESRRVLKEAKERLKELKDRERK

SEQ ID NO: 2983 - protein, 182 aa, Artificial Sequence; identical to SEQ ID NO: 2982
  Synthetic

SEQ ID NO: 2984 - protein, 178 aa, Artificial Sequence
  Synthetic
DEVEKVLDELEKVIREVEERIKTTNKRLREVVERVERRIDKSDRELEEMIERVERKLEDDERARRLIERLRDLLRRLRKRSKELIDELRKLLKDLEDRSRDLLRELRELLERIKRKVEAGTPSEEVRKEVRRLDKRVKEIVEESRKLVKELAERVEEIVEESKRLVEKLAREVDETRR

SEQ ID NO: 2985 - protein, 178 aa, Artificial Sequence; identical to SEQ ID NO: 2984
  Synthetic

SEQ ID NO: 2986 - protein, 178 aa, Artificial Sequence
  Synthetic
SEIEKALKEAREAIEDAKKKIDDTDRENEKASRDAERRIDKSDKEAEEAVRRAEEEAEDDERARKLIEDLRKLLKELKETSEKLKEEIRRSTEEHRRRSEELKKELEKLADEIEKAARAGRDKDEVTKAARKAADDAREAAERSRKLAEENARRAKKAADDSRKLARELAKEAKKAAD

SEQ ID NO: 2987 - protein, 178 aa, Artificial Sequence; identical to SEQ ID NO: 2986
  Synthetic

SEQ ID NO: 2988 - protein, 175 aa, Artificial Sequence
  Synthetic
KELEDVLDTVRRAIERVKRESKKINDELEKELKKVKDELDKSHEEVRRAVEDVARKLKDVEEVKRDLERLLKEDRELIKRIVDRLRKLLKESKDHSREVVKDLRRVLEELRKLVEEGLDVKDIEKLVRDVVRRAEKVVDDDRKLVRDIVRDAKRVVRDSERTVRDIVKKADENTK

SEQ ID NO: 2989 - protein, 175 aa, Artificial Sequence; identical to SEQ ID NO: 2988
  Synthetic

SEQ ID NO: 2990 - protein, 175 aa, Artificial Sequence
  Synthetic
SKLEKILKDLERAVREVARELERTHRELEEAVKKVKKRLEDTNRRLTEALKRVKDKLDKVEDVKRKLDKLNEDDRRLIREIVEELRRLLEENKRKLDKIEEDLRKLLEDLDKLVKDGLDVSEIKKLVDDIVRRLRKVVKDSEREVREIMKRADDVVRTSEKTVEDIVKEAEDDAR

SEQ ID NO: 2991 - protein, 175 aa, Artificial Sequence; identical to SEQ ID NO: 2990
  Synthetic

SEQ ID NO: 2992 - protein, 175 aa, Artificial Sequence
  Synthetic
SELEEAAKRAREAAKKAKEALKRSLKEAEDAAREAEEDLKRSNDKNRKATREAEERAKTARELLKRLRESTKKHEEDTKKLAEDIRRLLEELRKRSEELAREIDKLLEDLERLIRAGLDAEEAKKAADDLARKAKEAADESKRLSEELAKKAKEAAKTSDKLAKENAEEAKKAAK

SEQ ID NO: 2993 - protein, 175 aa, Artificial Sequence; identical to SEQ ID NO: 2992
  Synthetic

SEQ ID NO: 2994 - protein, 175 aa, Artificial Sequence
  Synthetic
DELERVLEDLKRVMEEVERKLRESNKELEKAVRRVEELLKRSNEKNRKVTREVREKAKTDRELLEELDDSTRKHEEETKKLVKEIRDLLEELRKTSERLVEDIRRLLKELKELIEAGLDAKDVEDLVRRLMEKLERIVEESERLSDELRRRAEEVVKTSEDLVRENAKRVDDAAK

SEQ ID NO: 2995 - protein, 175 aa, Artificial Sequence; identical to SEQ ID NO: 2994
  Synthetic

SEQ ID NO: 2996 - protein, 175 aa, Artificial Sequence
  Synthetic
DELEEIEKKLRDVVREVEEKLRETNRRLREVVKRVEERLKKSNEDLRRAVRKVEESVKTLEEDLRRLKELLRRLEEESRKLVEEIRKLLKDLERRSKELVDRIRKLLEELKRLIEAGLDAKDVEKLVKELMEEAEKIVEESRERVDRLMKRLDDIVRESERLSKELADRADEVEK

SEQ ID NO: 2997 - protein, 175 aa, Artificial Sequence; identical to SEQ ID NO: 2996
  Synthetic

SEQ ID NO: 2998 - protein, 179 aa, Artificial Sequence
  Synthetic
RELEEILRTLEEMIERVKEKHERSKRELEKVITEVKEELRRSNEELRRVIEEVERKLGKESEEAKDVVDEARRLLREHEELVREVEKTARDLLRENEKLVEDSERRVEKLRRELKRLVEEGVPVDEVRKVVEDIVREAEKSVRENEELVKAIMRELKRVVKEAEELSEEIVRRLEERTR

SEQ ID NO: 2999 - protein, 179 aa, Artificial Sequence; identical to SEQ ID NO: 2998
  Synthetic

SEQ ID NO: 3000 - protein, 182 aa, Artificial Sequence
  Synthetic
KELEDVKRRLEKVHRDVNEASKEIVTRLREVHKRANDESKKIIERLDTVLREVARRLADRRRDKKVEKLLRDIAREAEEIKKRVKRLNDENRKRVEEVEKRVTKLNDENRKKVEDLLRVIDRGDLDAEEVERRVRELEKDVRRLVEDIRRLVEELMRNAKEIVDTAEKLVRELERKLEEVVR

SEQ ID NO: 3001 - protein, 182 aa, Artificial Sequence; identical to SEQ ID NO: 3000
  Synthetic

SEQ ID NO: 3002 - protein, 182 aa, Artificial Sequence
  Synthetic
DEVEDIIRRLEKFHREVNEESKRIIEELERVHREVNRKSEEIVRKLEKVLDEVREKAKRRSRSEEVRKRLEEIADEVRRVKEEVERLNRENKREVDRLKKEVEDLNRDNRKKVEEVIKVVEDGKLRAEEVEEVVRRLVRHAEAVVERIERLVEELVRNAEKLVEEVKRKADRLVEEADRTVR

SEQ ID NO: 3003 - protein, 182 aa, Artificial Sequence; identical to SEQ ID NO: 3002
  Synthetic

SEQ ID NO: 3004 - protein, 175 aa, Artificial Sequence
  Synthetic
DELEEVKRRLDEVNKRVEDEHRRVEEELRKVLEDVAREHEEVIKELERVLEKVRRAKGGDEEVLRRLTKKVEDISRDSKRLLDELREDIKRIIEDSKRLLEDNRRHSKEIKDTIDRDKKSDEARKLVKENERRVEETVRRSEKLVRDAMKKAKDTVRRSAELVKELMDRVERVVR

SEQ ID NO: 3005 - protein, 175 aa, Artificial Sequence; identical to SEQ ID NO: 3004
  Synthetic

SEQ ID NO: 3006 - protein, 171 aa, Artificial Sequence
  Synthetic
SEVEKVKKEAREMLKRVTDLLKEVNDRLKEVNKRVREEIRRVIERVREVLKRVAREVDKREMLERLEERVRRAEERVEELLRENERHSKKVSDDSKRLLDELRKIIKEIEDANLPLEDLRRVVEELEKRARDVVEESRRLVDEDRKHVEDVVRRVRDVVRELEERAERITR

SEQ ID NO: 3007 - protein, 171 aa, Artificial Sequence; identical to SEQ ID NO: 3006
  Synthetic

SEQ ID NO: 3008 - protein, 181 aa, Artificial Sequence
  Synthetic
SEVEKVVEENKKSVKTVRERVTELVKRNRDSVEEVKRRAEEMVRRNRKSVEEVRELLARGVSEEVLRKAKEDNDELNKRVRETLKELVKRNDDLLKRVTDDLDKLRRDNERLVEDIDRKNLPEEAKRRVDRVSEELEEVLRRVEEELRRVSKDLRRVLDEVKKEVDRVSEDLERVLRKDTT

SEQ ID NO: 3009 - protein, 181 aa, Artificial Sequence; identical to SEQ ID NO: 3008
  Synthetic

SEQ ID NO: 3010 - protein, 184 aa, Artificial Sequence
  Synthetic
DEVDEIVRRIEEIVRESEEMAERIVRDIKRVVEKSRKDVEDNVDELRKIVEKVEETAKRTRDEELLERLAREVEEVIKKSEESLKRINDTSKRVKDELEKKNTDLNDRTRRVAEELKKEVSRLRDRDAERKVRDLLRDLERVNTEADEKSKKLIKELEKVNKEAEDKSRKLIKELEDVLREARR

SEQ ID NO: 3011 - protein, 184 aa, Artificial Sequence; identical to SEQ ID NO: 3010
  Synthetic

SEQ ID NO: 3012 - protein, 184 aa, Artificial Sequence
  Synthetic
SSVDEIVKEAEKVVEDSREEAREIVERAEEIVRDSARKVDENVRRLEEIVRKVKEVADRTRSDELLEALAREVEEVEKESKESLRRIDEKTRKVIEDLKKLLEELDRKSEKVVRDLERKVDRLRDRDAERKVREVIERLKKVNDEVRKKLDELTRRLEDVNRKANERSTDLVRKLRRVLEEARR

SEQ ID NO: 3013 - protein, 184 aa, Artificial Sequence; identical to SEQ ID NO: 3012
  Synthetic

SEQ ID NO: 3014 - protein, 178 aa, Artificial Sequence
  Synthetic
SADRKIEEMRKEIKRSTDEARRLVEELIRKIERSNEKVKRDVEKLIEDIRRVIRRVREDNTLDEKDVKRVEDEVEKIIRKLEEDLKRISEETRKLLEELKKRLKEIEEKSKKLIEDLEREPNSEELKKKLEDIVREDEKLVEELTRLAEDIVRRDTKLVRELLERAKRVVDRVREEVK

SEQ ID NO: 3015 - protein, 178 aa, Artificial Sequence; identical to SEQ ID NO: 3014
  Synthetic

SEQ ID NO: 3016 - protein, 178 aa, Artificial Sequence
  Synthetic
DAEELVRELEERIKRSHERLEELLREVKRLIERSHEELKRLNEEVLRELDRVLDEVRKRKKDVEELLRELEERVRRIKERSKESYRRSKESLDRAKEVLEELYRRSKRSLEEFERELREKGVDKDVVRELERIVKENSELAERVFREVEKIVRENTKLAEDSVRELKRLVEELKKRVK

SEQ ID NO: 3017 - protein, 178 aa, Artificial Sequence; identical to SEQ ID NO: 3016
  Synthetic

SEQ ID NO: 3018 - protein, 176 aa, Artificial Sequence
  Synthetic
SDVEDVVRKLRELVKTNLKKVEDRVRKLKEEVEENVRRAEKIVRELEEEVERLLKLVADGRVDKDELRRLVERIKRELKRVLDEDKKTVDEIDKEVKRLVEEDRETVDRIREEIKKRVRGREVAEEVERRLERSHRESRKLADEVRRALEKSNRKTRELLRRVDERVEEVREELDR

SEQ ID NO: 3019 - protein, 176 aa, Artificial Sequence; identical to SEQ ID NO: 3018
  Synthetic

SEQ ID NO: 3020 - protein, 177 aa, Artificial Sequence
  Synthetic
SMEELVDKVEKELEESSRRSKELLDEVRRLLEESNKKTEDLLREVEELLKDVEREAEEKGSSEEKKDRLRKLADRIRDELKKVRREDEKSLEEIEDRLRKAEKEDRDSNREIRDKLRKDGVDEDVVRDVERLVEENRERVKRIADEMRKLVKENEDRARDVVRRLRELVKRLRERVE

SEQ ID NO: 3021 - protein, 177 aa, Artificial Sequence; identical to SEQ ID NO: 3020
  Synthetic

SEQ ID NO: 3022 - protein, 175 aa, Artificial Sequence
  Synthetic
KELEDIARDLERLLRENKKLIKEIVDRLRRLLEDNTRKVKKIVDEVKKLLDDLDKLRKDGVDEKEIEDVVREIAERLKRVLEEIEESIRRIEKVIEEVARESEKLSEDIEREIRKKITGKEVADKVREDLERSNDEMRRVIEKIREDLRRSLKEAKERLDEIKERIDRLLDAARK

SEQ ID NO: 3023 - protein, 175 aa, Artificial Sequence; identical to SEQ ID NO: 3022
  Synthetic

SEQ ID NO: 3024 - protein, 181 aa, Artificial Sequence
  Synthetic
KLEELLTEVRRRIEEVSRDLERVLREVEEDIKRTSDELDRVNRKVETEIKEVTERAEEKGVDRRDLKRLKDEVDKMSKESRDRNEKTIREVRELLKRIRDENRKSNEEVRRVEEDIKRKVRDEELVREVIERLKELVKKDKKLVEDVLRELKRLVDEDRKLVEDSLRRAKEIVDRARERVK

SEQ ID NO: 3025 - protein, 181 aa, Artificial Sequence; identical to SEQ ID NO: 3024
  Synthetic

SEQ ID NO: 3026 - protein, 179 aa, Artificial Sequence
  Synthetic
SIEDVLREVERLLREVIERNRKVHEEVNERSREVERELKRVHDEANRESEEVIREAKRKGIKDIERVEEKVKELNRENAERIKRVVEEVRELNERNRESSERVEEEIKKLLKTLADLVRAGVPVEELERRAREIVKRVRELVDTHRENLERIVERAKELIKELEENLRDIVREIRERVR

SEQ ID NO: 3027 - protein, 179 aa, Artificial Sequence; identical to SEQ ID NO: 3026
  Synthetic

SEQ ID NO: 3028 - protein, 176 aa, Artificial Sequence
  Synthetic
KEVEEVADRSRRVVEESKRRLDDVVRRVKEDSDRLRRDIERMVKRIKEIVKRVREEIGKDKRELVERVREEADKVVETARKLLDEVEKHARDIVRRIEELARRDKRSVERSEEEVKRVDDRKILKELLDRDRKSVKESEDEVKRLLDSNHELSRRIREELKRLLEKVKELVDRVRT

SEQ ID NO: 3029 - protein, 176 aa, Artificial Sequence; identical to SEQ ID NO: 3028
  Synthetic

SEQ ID NO: 3030 - protein, 176 aa, Artificial Sequence
  Synthetic
KEVEDVKRKLEKIARDSEEALRRVVDELRKIVTESKKKLDKAVKEVKDDSKRVEETIGKDKREVVDEVRRHAEEIVKRIEDLAKKDKDLVDEVVKTIEKLMTDDKRLVDEVVRRLEKTRDRDIMRKLLEEVKRSIDESKKRVKELVDEVRDSVRRSEEEVERLLRSNHRLSDEVRK

SEQ ID NO: 3031 - protein, 176 aa, Artificial Sequence; identical to SEQ ID NO: 3030
  Synthetic

SEQ ID NO: 3032 - protein, 176 aa, Artificial Sequence
  Synthetic
DDVERVIEEVKRVVDDSKRRAEEVVEESRKIVTDSERKVREMVRDVRRIVKEVEERIGKDKKDVVEEVKRVAKEVVETAERLVREDKRSSEDSVRKIRRLVTEDERLAREVAERLKRTRDRRIVKKLLEDVRKSVKESKDTVDKLVEENKRSVDRSLRELEKLLKEVEDLIREVTR

SEQ ID NO: 3033 - protein, 176 aa, Artificial Sequence; identical to SEQ ID NO: 3032
  Synthetic

SEQ ID NO: 3034 - protein, 176 aa, Artificial Sequence
  Synthetic
DEVDEVVKRSRDVVTESEKRLRDVVRRSKEIAEDSRRRVREVVERLKEIVREVEERIGKDKKDVVREVRERVKKVVEELERLVKEDEDSSKRSVEEIRRLAERDKRSADESVKELRKTTDRRVVEELLRRDEKSVEDSLRRVEKLVEDNRKTSEDIEREVRRLEEEVRKLVEDVTK

SEQ ID NO: 3035 - protein, 176 aa, Artificial Sequence; identical to SEQ ID NO: 3034
  Synthetic

SEQ ID NO: 3036 - protein, 177 aa, Artificial Sequence
  Synthetic
REVDEVVERMKELVATVKRENDEVVKELKKLVKELEDDNRRVVEESKKSVEDLARRVGKDKREVVEEVRRTSKELVERNEETAKRVDDLVRRLVEENRRSVTEVEELVKELVKELRRESTSRDLVREVEKRVRDIVEESRKLAEETRKKVEDIIEKSKRIAEDTLEKNKEMVERLER

SEQ ID NO: 3037 - protein, 177 aa, Artificial Sequence; identical to SEQ ID NO: 3036
  Synthetic

SEQ ID NO: 3038 - protein, 175 aa, Artificial Sequence
  Synthetic
REDELVERLVDKVRRSSKEVRDRAEEMVRRNEKLVRDVEEDLDRLVEENKKLVDSVSRLRGEKAEEAVRRSKKVVDDIRERVKRALDRSRKVVEESREELERLLKRDKELVDEIKERVRIKEVVDRLRELVERSEKDVRKVVEEDKRITDKLEKRVREVVKRNEEITDELRERVR

SEQ ID NO: 3039 - protein, 175 aa, Artificial Sequence; identical to SEQ ID NO: 3038
  Synthetic

SEQ ID NO: 3040 - protein, 188 aa, Artificial Sequence
  Synthetic
SSIERVAKLVEEVERHVRKSIKDVEKLVRDVERHIEESVKTVSKLVEDVKRAVEELRRKVKEKEELDELVREVKRRIEDVVRRSRDLVRKNEELLRRVAEEVRRLVDENRELAERVVEEVRRIGTSEDVERLVREVVKRLEEIVERSERLVREVEERLKEIVERSRRLSKENEDELRKIEKEVRDRVK

SEQ ID NO: 3041 - protein, 188 aa, Artificial Sequence; identical to SEQ ID NO: 3040
  Synthetic

SEQ ID NO: 3042 - protein, 173 aa, Artificial Sequence
  Synthetic
KDVEDAERRLKELLDRLKRFVEESVKTSKKIVDDSKRVVEESAKRSRDIVREVKDRVPEDLVREVEKLARDTERRSEKLVTDNAEIVKRTVEESKDLLKKVEEVVREVVKRARDENVREKIEELVKEVDKLIKDVVRRMEKLNREVKKSADDSAREVEELNRRVREVVERVRT

SEQ ID NO: 3043 - protein, 173 aa, Artificial Sequence; identical to SEQ ID NO: 3042
  Synthetic

SEQ ID NO: 3044 - protein, 173 aa, Artificial Sequence
  Synthetic
DEVEEVEKELRELVKRSEEVAREVKDRLRKLVEESERVVRESRRKSREIVEEIRKKVREDLVREVEELVKRTIERSTELMEDNKRLVEEVEDRARKLVKENEDLAREIVKEVRDRNVKDEARRLVEEVKRSVEKSVKELEDLVEEVKRSVEESVKEAKELNDRVDETVKRRAT

SEQ ID NO: 3045 - protein, 173 aa, Artificial Sequence; identical to SEQ ID NO: 3044
  Synthetic

SEQ ID NO: 3046 - protein, 173 aa, Artificial Sequence
  Synthetic
RSVDEVEKELRELVERITRFVEKSVRDSRKIVEDSKREVEKVKDDLRKIVEEIRRKVPEKDVERVKRVVEEVERRVETLAEENRKIVERTERRSKELVDTVREVVREVVEKVRKDNSEEDAKRLVKEVAELIKRVVEEMKKLNDEVEESARRSVEEARRLVEEVKRLVDEVAT

SEQ ID NO: 3047 - protein, 173 aa, Artificial Sequence; identical to SEQ ID NO: 3046
  Synthetic

SEQ ID NO: 3048 - protein, 184 aa, Artificial Sequence
  Synthetic
EVEELVERVLRELERLVRENKESSDRIKEELRKLVEDNEKSVRDTKRTAEKLVDDLRRKKDEERVEELARRIAKTVEKLVEEDRKSVEDTIKRVEDLVREDEKSVRDSVRKVRELVKRVEENVKDERVVRKVREDVKRVERLSKEIVDDSKREVEKVVETSRRIAEKSTDVVRRVKRELEEITR

SEQ ID NO: 3049 - protein, 184 aa, Artificial Sequence; identical to SEQ ID NO: 3048
  Synthetic

SEQ ID NO: 3050 - protein, 180 aa, Artificial Sequence
  Synthetic
SMKELIKRVKDLVDEVRKKVERLIEEVSKLVDDVKRHIRELIETVKRLVKEVADLLRAGREKEEVVKLLEEVVRRVKKLSKENEERLRTVVERSKKLVDDLRRDAERVAEEVRKLVEDVNDEEARRLVEKVERDLKDIVRRVEELSRRNVERLKEIVKESRELVKEVVERLKRIAEEVTT

SEQ ID NO: 3051 - protein, 180 aa, Artificial Sequence; identical to SEQ ID NO: 3050
  Synthetic

SEQ ID NO: 3052 - protein, 175 aa, Artificial Sequence
  Synthetic
KEKEDVKRRLEELIRRLEEHSKKVKRDLERVIKELDDEVRRVKERHEDVIRRLKDRDTSEKVLRDEAERIRRESEEINKRLEEKAERIKKEADDLLRENEERVKKIERELERLRTEGKLDDDVVRRVKELLRRVLEHTRKVVEDVRRLLKRIREKLEEISRKLDELLRRIEEKRR

SEQ ID NO: 3053 - protein, 175 aa, Artificial Sequence; identical to SEQ ID NO: 3052
  Synthetic

SEQ ID NO: 3054 - protein, 177 aa, Artificial Sequence
  Synthetic
DREDEVRKDIERIERELRRVVDELRKEVEDSMRKLDEEVKRLEEHIRESVERLEERVSEDRDDRVVKTIVKEADRDHKELERELDRLRKEVKKTNDDLERKIRKLEKEAEDVLRELAKRGIDEKVLRDLKRVVDEVRKELKDVLDRHNKVVREVERKLEEVIDKHRKAVEKVKRDAK

SEQ ID NO: 3055 - protein, 177 aa, Artificial Sequence; identical to SEQ ID NO: 3054
  Synthetic

SEQ ID NO: 3056 - protein, 177 aa, Artificial Sequence
  Synthetic
SREEELKKEVERLVREAEKHVEDNRKHVEDSVRELEKLVKELADKARESADRLDKKVKEDRDKRVVEKILREAEKINKDLKDTVKKILDEIREDHKRLEDNIRRLEEELRKVLKELKDRGIEERVLEELKRVVDDIRKKHKDILKRHRDVVRKVEKELRDILREHNEVIREVKDKLE

SEQ ID NO: 3057 - protein, 177 aa, Artificial Sequence; identical to SEQ ID NO: 3056
  Synthetic

SEQ ID NO: 3058 - protein, 183 aa, Artificial Sequence
  Synthetic
SEVERILKEAKRRLDEVVERLRKSAETLRRMLERVSRELKKSHDELDRVLRRVEDALRKRNLDEKSVRRIKKEIDEARKKSKKVLDEIEERAERVKRESREVLERIKKRIEDVIRRLAEIVREQRRDAEELRKEVEDMVRDLERLVREHSDRVRKIVTDLDRLVKEHNEEVRKIVERLDEEVK

SEQ ID NO: 3059 - protein, 183 aa, Artificial Sequence; identical to SEQ ID NO: 3058
  Synthetic

SEQ ID NO: 3060 - protein, 179 aa, Artificial Sequence
  Synthetic
SELDEILERLKEVLERVKRKLEESNRRLEEVLDRVLKKLTESVKRLEDELRRVLKELRENNRPDDRLKEKVERVREESEEMRDRLRRLIERVREESKRILEELERRAREVKKRAEDVRRRGKPIEEIKKDVERIVRELEDLVRRHEKRVEDIVRELEKIVRDHNERLKEIVRRAEEDVR

SEQ ID NO: 3061 - protein, 179 aa, Artificial Sequence; identical to SEQ ID NO: 3060
  Synthetic

SEQ ID NO: 3062 - protein, 179 aa, Artificial Sequence
  Synthetic
RELEEILKRLEEVLERVLRELRKSVERLRKELERVLKELRDSNRKLDKVLREVLEELRKKNKDATDLKRRLDEARKESKDVIKTLDERVKRVKEESDEMLERLKELLDRVREEAERVARRGEPAEDLERRVKEIERRLKRLVDEHNRRLREIVRELEEIVKRHKERVEEIVRELKRRVD

SEQ ID NO: 3063 - protein, 179 aa, Artificial Sequence; identical to SEQ ID NO: 3062
  Synthetic

SEQ ID NO: 3064 - protein, 179 aa, Artificial Sequence
  Synthetic
SELDDIVRRLDEMLKRVEDELRKSDERLDELLKRVKKELEKSNRDLERALREVLKELEDRNRPNDELKRRIDEVREESRRVIEELDRTVKEIKRRSEEMSKELKRTADEVRKRADEVRKRGKDARELEEEVERIVRELEKLVEEHKEELERLARKLEEIVRRHEERVRRIVKELEDRVK

SEQ ID NO: 3065 - protein, 179 aa, Artificial Sequence; identical to SEQ ID NO: 3064
  Synthetic

SEQ ID NO: 3066 - protein, 179 aa, Artificial Sequence
  Synthetic
RELDEILRRLREELKRVREELEKSLKRLEDELRKVEEDLRESNERLERMLERVLRELRKRNRPDDELKKKLDKVRKESEDMSRRLKETADRVREKLKDSKRKLDEKVKRVEKRLEEVRRRGKDVDELRKELEKIAREAREYVKRNKDDLRRIVEELRKIVKKHKDKVEEDVRRLKKDVD

SEQ ID NO: 3067 - protein, 179 aa, Artificial Sequence; identical to SEQ ID NO: 3066
  Synthetic

SEQ ID NO: 3068 - protein, 173 aa, Artificial Sequence
  Synthetic
RELEEILKKLEEVVRTVEELHKRTNEKLEKAVDEVRELHRKTNEDLKRAVDEVEKAGLPKELVDRLRELLKDNKRRSDEIIRKIEKVLEDNKRKSEEIVKRLREELKRLADVIKDLEKDRLDEEVKRLVEEARRSVEDDDRNIRRLVEEAKDSVRRDEETIKKLVDELREATR

SEQ ID NO: 3069 - protein, 173 aa, Artificial Sequence; identical to SEQ ID NO: 3068
  Synthetic

SEQ ID NO: 3070 - protein, 173 aa, Artificial Sequence
  Synthetic
SDLERILKRLREVIKRAEELHRKTNEEDERVVREVIELHRKTNEDLREVIERVARGGLDEKMIERLERLLKENTERSKEISERLKRETEENIERSKRIVEDIERLLEELRRVVKDLDKEELRKAVEELEEKLERSVREDKKTSDDSARRAKKSVEDDRRTIEKLVEEAERSRK

SEQ ID NO: 3071 - protein, 173 aa, Artificial Sequence; identical to SEQ ID NO: 3070
  Synthetic

SEQ ID NO: 3072 - protein, 183 aa, Artificial Sequence
  Synthetic
KDLEKLLDDIRKVLEEVTRRLKRISDELRRVLEEIKKRLDKDNEDLKRVIDEVKKLLDKKVRDEKRVKDLVDRAREIHRRHAEEVKRLVDKLREIIRRDEKSVEDWKRRLEKILEDLKRVVDRNERSREEIEKEIRDVEEELRRAVEENAELVKRVKEDAERVVRDSEKKSKEVAEELKDAVR

SEQ ID NO: 3073 - protein, 183 aa, Artificial Sequence; identical to SEQ ID NO: 3072
  Synthetic

SEQ ID NO: 3074 - protein, 182 aa, Artificial Sequence
  Synthetic
SELEKILKELKDASREVEKRLRDILREDKKMLKKVVEELEEILRRLDEEVKKVKERLKNKEVLERLEEEVRRLKERIKKLIEDLKRESERLEDTIRKLIRELRENTKRLEEKIRRLKKKGEPREEVVDRAKKEVDDHVKKAEDVVREVEKRSRESVKRLRDIVEELERLVKRLVDEAEREVK

SEQ ID NO: 3075 - protein, 182 aa, Artificial Sequence; identical to SEQ ID NO: 3074
  Synthetic

SEQ ID NO: 3076 - protein, 175 aa, Artificial Sequence
  Synthetic
SETEKLLEEVRRIIEEIKKRIDRSLEEVRRSVEEAKRRIEKSLEDVEKSVRRVKKILDEGDSSERLKRENDEHLKTHHEVVKKILKDNREHLRRHHETLKDIKRRIDKVVEDLRRAGLDDRVLKEVEDLAREVKKRIDEVDKRVAELHKEVEDRLREVDKTVEELHRRVKKRADD

SEQ ID NO: 3077 - protein, 175 aa, Artificial Sequence; identical to SEQ ID NO: 3076
  Synthetic

SEQ ID NO: 3078 - protein, 180 aa, Artificial Sequence
  Synthetic
SIEDVEREVKRLIERTKRHNDRVLETIRRLLEETKKHNEKVLREIRELIKRVEDTMRRRGVDERLRDELRKILEDLERESRKLKEDNKRALEELARMSKKLKDDNDRALERLKDTVKEERSEETIKRLLDEVREYVRKSEEDSERLLRDVERYVKESKERSERILKEARRLVKEVEDKIR

SEQ ID NO: 3079 - protein, 180 aa, Artificial Sequence; identical to SEQ ID NO: 3078
  Synthetic

SEQ ID NO: 3080 - protein, 180 aa, Artificial Sequence
  Synthetic
SIEEVLEEVRDLLRKTKEDTKRILDEIRRLLEETKKRLEEVLREATKLLREVEDLVRKSGVDERLLEEIKRIEDELRKKIETIRRRNDEALKRLTDLVEENKKRNDDILRKLKEERDEDRDEEEVKRLLEKARKLVEESKRESKEILDRARKYVKESLEEIERLLDELRKLIEELRRRIE

SEQ ID NO: 3081 - protein, 180 aa, Artificial Sequence; identical to SEQ ID NO: 3080
  Synthetic

SEQ ID NO: 3082 - protein, 176 aa, Artificial Sequence
  Synthetic
SSEEILKEVKELIEESNRASEEVLKEVKKLLDESKKRSDEVLEEVERELKRLEESASRIDDEKRLREVRDVLRRIRERLDRVRKENEKILKEVKDTLKKVKEDNEDISRRLEEEIKKKGADEDVVREMRRLVEEDKRRIKEALDRLRKLVEDDKRRIEEVLREMRELIRELEERIR

SEQ ID NO: 3083 - protein, 176 aa, Artificial Sequence; identical to SEQ ID NO: 3082
  Synthetic

SEQ ID NO: 3084 - protein, 175 aa, Artificial Sequence
  Synthetic
KEIEDILERLKETIKEIEDHIRRDLEELKKVIEELKRSLEEWKKRAERLIEELERLIRETGPTKELEKEARDRLRELEEAMKRNVEKIDKIKRENEKNSEDLKRRLERVLRELRKSGLEERVLREAEERIRRLEEKLKEVNKRSEEMLRRLKEEHERVLREVKELIREIDDKARK

SEQ ID NO: 3085 - protein, 175 aa, Artificial Sequence; identical to SEQ ID NO: 3084
  Synthetic

SEQ ID NO: 3086 - protein, 182 aa, Artificial Sequence
  Synthetic
GEDEVLRKVEKLLREVKERAEKSVERVERLLKDVEDKLKESHDRAKRLLEEVKKAADRGDLREEELDRLRKKIEDAYKRSEDILREIKKEIKRVLDRSRETLKRVEEELKKVLDTLADLVRRNEEDLKDLDRRIEEVVKRLEDEVRRHTKEVEEMVKRLRELVREHTERVKKIVEDLKREVD

SEQ ID NO: 3087 - protein, 182 aa, Artificial Sequence; identical to SEQ ID NO: 3086
  Synthetic

SEQ ID NO: 3088 - protein, 175 aa, Artificial Sequence
  Synthetic
SEVEDVERRIREIIERLRRIVERHKEEVKKIIEKLEKLVRDHTERAKRIIERLKEVVDRKMPRELIKEELDRVREDSKRVLDELRRKLEEVRERSRKALEDIKRRLDEIRDELRRRISNEEVLKEVERLLEEVKELVERSHKEAEDLLKRVLDAMKRSVDEVEKLLEELKRRADK

SEQ ID NO: 3089 - protein, 175 aa, Artificial Sequence; identical to SEQ ID NO: 3088
  Synthetic

SEQ ID NO: 3090 - protein, 175 aa, Artificial Sequence
  Synthetic
SKVEKVEEDIDKIIRRLEELVEEHRTEAEKTVKKLDDDVRRHNEKVEKIIRDLEEVVRRRKPEKDIEDKLRRVKEESERVLEEMDRRLRRVEEESRRLHERAREELERVEDELRKKIENRKVLEDAKRLLERVMDEVRRSNEELKKLLEEVKRKLKKSVEDAERLLDEVRKRVEK

SEQ ID NO: 3091 - protein, 175 aa, Artificial Sequence; identical to SEQ ID NO: 3090
  Synthetic

SEQ ID NO: 3092 - protein, 175 aa, Artificial Sequence
  Synthetic
SEVEEVDKRIREIVTTLKRLVEEHNDRARKIIEKLRRLVKKHEDEVEEIVRRLDEAVERRLPREEIERKLREVEERSKEVHKRLEDELEKVKRESEKMKREADERLKKVEKDLRDTISNEEVLKKVKELLKEVKRRLERSLEELERLLEEVLKLMKESNDKAKELLERVREKVER

SEQ ID NO: 3093 - protein, 175 aa, Artificial Sequence; identical to SEQ ID NO: 3092
  Synthetic

SEQ ID NO: 3094 - protein, 177 aa, Artificial Sequence
  Synthetic
DFVERVKEEIKRIVERLKRLVKEHEDEVKRILDELRKLVETHKELSKDSLRKLEEVGDGSEDDIRRLLEENKKMDKEVNDKVRKLAKDVRDIDRRMNERVERLLREIEKTLEDLRRENKVDERVLEELRRLVKEVKERADRSSEKLNELLRKAEEDAKRSSEENNRRLEEVERRVRK

SEQ ID NO: 3095 - protein, 177 aa, Artificial Sequence; identical to SEQ ID NO: 3094
  Synthetic

SEQ ID NO: 3096 - protein, 181 aa, Artificial Sequence
  Synthetic
DEERKIEEIIDKSRRDWERLLREAREIIKRSEDEWRELLERIKRLIEETRKRAKDLKKADGRERVVEEIEERVRRINEETKKLVRELLEKDRKLIEDLRKKLRELREKDKRLIERIKEERDTEEIRRLLEEMDKLSREASKRVEDILRELEERSRRMADEVRKLNEENKKLLEEAKKELKD

SEQ ID NO: 3097 - protein, 181 aa, Artificial Sequence; identical to SEQ ID NO: 3096
  Synthetic

SEQ ID NO: 3098 - protein, 181 aa, Artificial Sequence
  Synthetic
DKEEIKEKLEELVERVVRELEKLLKELEDLSREVARRIKKIARDLEKLTKEVEEKLRRRPKTEELTELVKRLKEHSERLRRRIEELLRRLEEDSRRLVERIKKLVKDLRDDVRRLKELIDRGELSEEELERLIKELVDRARKLLEEVKKLIEDHREKLKRVLDEIKDLLRKHKETLDRTDT

SEQ ID NO: 3099 - protein, 181 aa, Artificial Sequence; identical to SEQ ID NO: 3098
  Synthetic

SEQ ID NO: 3100 - protein, 181 aa, Artificial Sequence
  Synthetic
SKEDILRELRDRVERIKREIEKIFRDAKRLSEEVKRRIEDLLRKLKKVSDDVRERLARKPDTEELRKLVEELERDSERLKKEIKDLVRELDEHSKELLTRIRKLLKELEERVRELEELIKRGDLSEEELKELIKRLVEDAKRILEELKKLLDDHERKARRILERIEKLIKEHEDKARERER

SEQ ID NO: 3101 - protein, 181 aa, Artificial Sequence; identical to SEQ ID NO: 3100
  Synthetic

SEQ ID NO: 3102 - protein, 181 aa, Artificial Sequence
  Synthetic
SEVEKLEEEVERSVRDLERELRDSEEKSKELMRRLDELVRRAKDHVRRSVEELRKTLSKGLDEDEVRDLERRVREDHEKLKEDLKRIVREAREALKKHRRRVEEIVKRVKERLEELRRRIGDDEEVRRILRDAERVIEEIKRRLEEDHKRLEEVIRRVEEKLRRILDEHDKVVKEIKEALR

SEQ ID NO: 3103 - protein, 181 aa, Artificial Sequence; identical to SEQ ID NO: 3102
  Synthetic

SEQ ID NO: 3104 - protein, 181 aa, Artificial Sequence
  Synthetic
SEVEEAEKEVEDIMRRLKRKVEENKRHVDESVKEAEKLLRDSETRTRDIARRLKEELDKGLDEEEVKRLAREVDRLLREHREEVKKIIERIDRDNDRNREHVEKVVREVEELLRDLERKIGRDKELTRILTRLREVIERVKRALEKSHDDHRRAVEEVRKELKRDHDDLRRVIEKVRRDLK

SEQ ID NO: 3105 - protein, 181 aa, Artificial Sequence; identical to SEQ ID NO: 3104
  Synthetic

SEQ ID NO: 3106 - protein, 181 aa, Artificial Sequence
  Synthetic
SEVEEAKRRVDDIVRKLEELLKDSRRESERIMRELKRLLEELKRHVEDSVRKLREVLSRGLDEEKVERLIREARKDNERLKRELERILREVEKALKRHRERVEKIDREVRERLKDLERRIGDDRELREILRRAKEVIDKIREDLERDHDRLREVIEEIKKTLDRIHEEHRRVVKEVEDTLK

SEQ ID NO: 3107 - protein, 181 aa, Artificial Sequence; identical to SEQ ID NO: 3106
  Synthetic

SEQ ID NO: 3108 - protein, 181 aa, Artificial Sequence
  Synthetic
SEVEEAEKEVREIMKELDKLLEDSKRESDDIRRDLDRVLEENKRHVDKSVTDLERVLSRGLDEEAVRELLRRAREDNRRNKEHVDRLVKKAKDKLDEHKKKVDDIIEKARRELKRLEDEIGDDKELRRILRELEEVIKRVERTLREDHKELKRVIDRMKEDLERSHEEHERLVEEVERKLR

SEQ ID NO: 3109 - protein, 181 aa, Artificial Sequence; identical to SEQ ID NO: 3108
  Synthetic

SEQ ID NO: 3110 - protein, 181 aa, Artificial Sequence
  Synthetic
SEVEEAKKDVERIMRELEKLVRDNKKHVDDSVRKLKKLLDDLRKHVEDSREELERVLRRGLDEELVKELRKRAEDDNRRLKEELDKIKEEADRDNEENAKHVKKVVDRARKMLEDLRRKIGDDRDLRKILEDLERIIRRVEEELRRSHERHKEVVDRIKKVLDEIHRRHREVVKEVEKELR

SEQ ID NO: 3111 - protein, 181 aa, Artificial Sequence; identical to SEQ ID NO: 3110
  Synthetic

SEQ ID NO: 3112 - protein, 181 aa, Artificial Sequence
  Synthetic
KEVEEAEDKVRRIVEDLKRKLEDLERHVEESVRRLEDLLRRSKKKSDDIMEKLTRTLSKGLDEEEVKRLTEEVERLLREHRRELRRIVEEARKDNERLETRLRKIKREVEELLKELEREIGDDKELRRILKRMKDAIERVERELRRIHTRHKEAVDRVREELKRNHDELAKVIRKVREDLK

SEQ ID NO: 3113 - protein, 181 aa, Artificial Sequence; identical to SEQ ID NO: 3112
  Synthetic

SEQ ID NO: 3114 - protein, 181 aa, Artificial Sequence
  Synthetic
DEVERADEDVERIVRELRRVLEENRRHVKESVERLERLVRKSKKDSKKIMEDLKRVLDRGLDEESVKKLRDDARKELEKHREELRRIEEEAEKDNRRNEEHVRRLEKRVEEELRRLETEIGDDTELRKILKKMKDAIREIKRTLDESHREHRRVVEEVKEELERNHKELKEVIDKVAKDLE

SEQ ID NO: 3115 - protein, 181 aa, Artificial Sequence; identical to SEQ ID NO: 3114
  Synthetic

SEQ ID NO: 3116 - protein, 176 aa, Artificial Sequence
  Synthetic
DEVEDILRRVREAVERARESLERIHREHKKVVDEVRKALEKVLEDHARVVDEFRRKSGSESEEAKKILDELRRDHEELKKRLEKIEREVREDNERLERELRELEERVRRKLEELERRNVRKDELKKEVEKLEEELKKELKRLKDHVKKSKEDLRRKLEDLKRHVERSVKRAEEEAR

SEQ ID NO: 3117 - protein, 176 aa, Artificial Sequence; identical to SEQ ID NO: 3116
  Synthetic

SEQ ID NO: 3118 - protein, 176 aa, Artificial Sequence
  Synthetic
SEVEKVLRDLERAVKEVSERHRRNHEELRKVIKRVKEEHDRIHDEHRKVVEDLKRKIGTESEDAKRILDKLEEDNRRLKKHIDDSKERVDRVVKRHKEHLDRSLKRVKEMLDELRKANVPREEIKKEVDRLKKELDENLKRLERDSERLKKELEDNLKRLEEHVRRSKEEAERDAK

SEQ ID NO: 3119 - protein, 176 aa, Artificial Sequence; identical to SEQ ID NO: 3118
  Synthetic

SEQ ID NO: 3120 - protein, 176 aa, Artificial Sequence
  Synthetic
SDLEEVLKRLEDVVRRLEEELRRIHKEHRDVVRRVTEEHKRILEELKRVVERAREKDGEESREVKEILRELEEVLRDLKRHIERSRKELEDDNRRLKKRLDEILKKIREVLERLRRKNVDRDRVTKEVRDLEEELRELLERLRAHVKRSEKKIEENLRRLEKRVEDLKKKIDDRTR

SEQ ID NO: 3121 - protein, 176 aa, Artificial Sequence; identical to SEQ ID NO: 3120
  Synthetic

SEQ ID NO: 3122 - protein, 179 aa, Artificial Sequence
  Synthetic
RELEDIKRKHKKVVDDVREKLKESHRRLKEVIEEARRRLDEVRKKLEKVIREILTSAGTEDERLKRVEETVRRVLEELEELIKRLDDKAKRMLDEHRKILEEIVKRADKSHKELDEMIKRRLPIEDLKRYVEEVKRDLDDLIRRSEELVRRIKEDLDRALKELEELVRRIKKKLEEDRK

SEQ ID NO: 3123 - protein, 179 aa, Artificial Sequence; identical to SEQ ID NO: 3122
  Synthetic

SEQ ID NO: 3124 - protein, 182 aa, Artificial Sequence
  Synthetic
SELDELRERVERHSRELRRTLEEAKKLVDDHKRTLREVLERIKKRVEDVKRELEKLVRDGVDERFLERLKKKLEDIVRDIERRNKELNEHSKKLAEELRRILKKLEDHSRELEKRMREEGGELREELKKIIDELRRVNEEAAKTLDEIIKRLEDVNREVNRTSKEVIDRLRKVLEEAERRTK

SEQ ID NO: 3125 - protein, 182 aa, Artificial Sequence; identical to SEQ ID NO: 3124
  Synthetic

SEQ ID NO: 3126 - protein, 182 aa, Artificial Sequence
  Synthetic
EELDRIRKEVEDHERKLREVVKDIERKVEEHAKRLKKVIEDDERRVKEWKDTLEELIRRGVSEEVLKRLAEELEKHKERSKKLNRELNKHSKELVDELRRRLKRLKEHSDELEEKIRRRGGELKDEVRRVIKELRDVNRKVADALRKVEEKLKRVNDEMNKESKRTLDELDKALEEAERRAR

SEQ ID NO: 3127 - protein, 182 aa, Artificial Sequence; identical to SEQ ID NO: 3126
  Synthetic

SEQ ID NO: 3128 - protein, 182 aa, Artificial Sequence
  Synthetic
DLLRELEARVRKHKRDLEEVLKKIEEEVRRHKKKLEDVLEELRRLVEDLMRELKELLEKGVPEKVLKELADKLRRLVEDARRLLRELKEHSRKLEEDIRRRNTELNKHSEKLEEDMRRKGGELREELKRIIDELREVNERVNDESRKVIKELRDANKEADKKVRDIIRRLEDILRKAAEDTR

SEQ ID NO: 3129 - protein, 182 aa, Artificial Sequence; identical to SEQ ID NO: 3128
  Synthetic

SEQ ID NO: 3130 - protein, 182 aa, Artificial Sequence
  Synthetic
KDLERLEKEVKEHKEDLERIVREAEKLVEDHERELEKVLRELEKTVRDVKRELEDLLRRGASEDVLRELAKKLKKIVEDMEKKNEDLNRHSEELLRRLDKILKELNKHSEDLMRKAREEGGKLKEEVDRVLDELRKVNKKAADDLERVIRELEDVNRRVNERSREIIETLKRVLDEVREKTR

SEQ ID NO: 3131 - protein, 182 aa, Artificial Sequence; identical to SEQ ID NO: 3130
  Synthetic

SEQ ID NO: 3132 - protein, 182 aa, Artificial Sequence
  Synthetic
DELRELKRKVDEHTRELERILKEIEDRVRRHKEKLDETVKRDKDRVDEWLRRAEELVRRGVSEEVVKRLAEELEKHKRTSEELNRKLNEHSKKLEDDIKTKLDELNKHSKELTEEMRRRGGELREEVEKIERRLREANKRAADALKKVIDELRRANEEVNRKSEETLKTLDKILEDVERKTR

SEQ ID NO: 3133 - protein, 182 aa, Artificial Sequence; identical to SEQ ID NO: 3132
  Synthetic

SEQ ID NO: 3134 - protein, 182 aa, Artificial Sequence
  Synthetic
DDLERLAEEVKRHSEDLDRIVEEIRDRVRRYKEKLDEVVKEDEKRVREWRDRLEKLVRAGVSEEVLRKLAEDLEKHKEDSDRTNEKLREEVKRLEEEIRKTLEDLNRHSKELVERARRRGGKLKDELDKIITRLEEANRKAAEDLRRVVEELRKAHEEMNRKSEKTKKDLDEVLEEAERRTR

SEQ ID NO: 3135 - protein, 182 aa, Artificial Sequence; identical to SEQ ID NO: 3134
  Synthetic

SEQ ID NO: 3136 - protein, 182 aa, Artificial Sequence
  Synthetic
DDLERLKRRVEEYRRKLEEVLKTIEEEVRRYKKEAEKVLDEDRRRVEDWKRKLDEMVRRGVSEEFLERLARALEDHKRKSDRDNDRLREKVRRLEEKIKELNDRLRKEVEEIVKRARDRGGSLEEDVRRIIDELRRVHKRANEDSKRVVDELRDVHRKVNETSEETKKRLDKVLKEAEDRTR

SEQ ID NO: 3137 - protein, 182 aa, Artificial Sequence; identical to SEQ ID NO: 3136
  Synthetic

SEQ ID NO: 3138 - protein, 182 aa, Artificial Sequence
  Synthetic
KKLDDIRREVERLTDKLEKIVKRIKELVDRYRRKLERVLEEDDRRVKEWKRRMEELLRRGASEDVMREIAERLERHKEESKRLNDELREELKKLEREIEKTLRDLAEELEKLKEDIKRKGGELKEEVDKVLKDLDRALKKAADDLKRVIDELREVHERINRTSERTLTKLDRALEELEKRLR

SEQ ID NO: 3139 - protein, 182 aa, Artificial Sequence; identical to SEQ ID NO: 3138
  Synthetic

SEQ ID NO: 3140 - protein, 182 aa, Artificial Sequence
  Synthetic
KELDEIRELVKRHKDKLKKIVDEVKERVDALKRKLKEILDEDRERVKKWVRDMEELVRRGVSEEVLKRVAEELEKHKKKSEEDLRRLAEDLRRLEEEIRKRVEDLNRHSKELVEDIERKGGKLKEDVDRVIRDLERVNEEANRRAKKVIDELRRVLEEAERTLRKTLEDLDRALEELARATK

SEQ ID NO: 3141 - protein, 182 aa, Artificial Sequence; identical to SEQ ID NO: 3140
  Synthetic

SEQ ID NO: 3142 - protein, 183 aa, Artificial Sequence
  Synthetic
DEAEKILEELRKVVRELEEELRRNHEELKRVIEDVERKLRESNRRVEKVIKEVTDEKGSEDDEARKVLKELKEKLDEHKKRVDEVKKKLEEELEKHKRKLDKVVKEVEKFLREAEDRLRKEGTDEDVVRELEKLVEELKRRVTEVVETVARDSERLREELRRIVEESKRLVEELKRRAEEASR

SEQ ID NO: 3143 - protein, 183 aa, Artificial Sequence; identical to SEQ ID NO: 3142
  Synthetic

SEQ ID NO: 3144 - protein, 179 aa, Artificial Sequence
  Synthetic
SELERVVEDLRRAAKKLADDLKRVIEEHRKYARDNKERLKKVLERLKRLAEELKKELERDGKSDEVRKRLEELLDRLRRLVEEAIRENKKSVDDSRKNSKRVEDELRDRLRKLDEKLKRDVKDSREVLEDVRRLIEDLERLITELRKENERVIRESEKLSRDIEREVERVIRELEETIR

SEQ ID NO: 3145 - protein, 179 aa, Artificial Sequence; identical to SEQ ID NO: 3144
  Synthetic

SEQ ID NO: 3146 - protein, 171 aa, Artificial Sequence
  Synthetic
KEVEDVKREIDKVLEDARRLLKESDDTLKKILDKARRDLEESDRRLKEILDKVRKDGLDEELLRRIEEYAKRHHDRNREILERLRELVKRHHDRNRDIVRRLEELVDKLKKDNIPFEELKDTVDKLRREIERRITESRRHVEELRRRVEEMLERSERNVREAEKKLEEDKK

SEQ ID NO: 3147 - protein, 171 aa, Artificial Sequence; identical to SEQ ID NO: 3146
  Synthetic

SEQ ID NO: 3148 - protein, 182 aa, Artificial Sequence
  Synthetic
DEVERVEEELKKSDDELRRRMEEVKRALDKDNEDAKRMLDEVKKELEKILRKVEKEVKDKESVDRLRKKLEDIKRELERILEELSKIHEDIKKRLDDLLRESEEHSRRLIEEIRDLERRGSDKKEVVERLDKLVKEHHERNKRIVEEAKRLVEDSREKTRRIAERAKELVRRLKELVDRLSK

SEQ ID NO: 3149 - protein, 182 aa, Artificial Sequence; identical to SEQ ID NO: 3148
  Synthetic

SEQ ID NO: 3150 - protein, 182 aa, Artificial Sequence
  Synthetic
DRIEDVKRKVKEIKEKVDRLLEESSKKVDDLNKKVRDLLTESNKRIEDIVRELRELAKRDLKEEELRKVLEDLRRRIEKIIKDNEEINREHEKVVRDIVKENKEINDELRKEIERIREELGTESEEAKEVLERLKRILEESRRASEENKKKLEKSHEELKRASDENKRKLERILDELREALR

SEQ ID NO: 3151 - protein, 182 aa, Artificial Sequence; identical to SEQ ID NO: 3150
  Synthetic

SEQ ID NO: 3152 - protein, 171 aa, Artificial Sequence
  Synthetic
SAKEKIDKTLKDIYRKHEEVVRRVEKKHRDIHREHEEVVRRVEEEHRRILDELRKAPVDEDVIRKIEKNVEEVKREIDKSDDDIRRNIKEVKDEMDKSNEELKRKIDELRKANLPEEEAKKFLDKLDKEVRDSMKRLEDHVRETKKRVEESVRRLEEHVKRTEEEVRETAT

SEQ ID NO: 3153 - protein, 171 aa, Artificial Sequence; identical to SEQ ID NO: 3152
  Synthetic

SEQ ID NO: 3154 - protein, 171 aa, Artificial Sequence
  Synthetic
SVEDEVRRDLKRIYEKHEEAVRRVEERHERSNERLEDVIRKVEDKHREILKKLEDEPVEEEFIKELEKNVRTVKKKAEDKLRESEKNSRDLKRKIDESNKRLRDKIEELERANLPEEDVKRVLDKLDEEVKDSVRELEEHVEKNERDVEEIAKDLERHVEETRKEVDKTAK

SEQ ID NO: 3155 - protein, 171 aa, Artificial Sequence; identical to SEQ ID NO: 3154
  Synthetic

SEQ ID NO: 3156 - protein, 171 aa, Artificial Sequence
  Synthetic
KVEEKVRETLRRIYERHRKIVKEVEEKHRESNERLRREIERVKRKLDEILKKLEEAPVDEDVIRRLRKELRDLEEKMERKLRESERNSEEVKRRAEESNKRLRDKIKTLEEANLREDRVAEVLKKLKDDVDKSAEELERHVKRNRDEVRKIVEDLDRVLEELRTKVDEEAR

SEQ ID NO: 3157 - protein, 171 aa, Artificial Sequence; identical to SEQ ID NO: 3156
  Synthetic

SEQ ID NO: 3158 - protein, 171 aa, Artificial Sequence
  Synthetic
SVEDKVRESLERIYKKHEKVLRDVERTLKEIHEEHREAVERVRRELERIKRKLEELPVDKDMIRRLEELIKELERRADESDDDLRRKIDELRRRAEESNKKLKRDIDRLREAKLPDKDVERVLKKLDDDVRKSVKELTDVLKRLREEVKRSVEELEDVLRKLDKEVDDTAK

SEQ ID NO: 3159 - protein, 171 aa, Artificial Sequence; identical to SEQ ID NO: 3158
  Synthetic

SEQ ID NO: 3160 - protein, 171 aa, Artificial Sequence
  Synthetic
DVEDRIRKSLEEIYRRHETEVRKIKRKHDESHRRHEKVVREVTEDLERIKRRLEELPVDEEAIKKLEEDIKRLRERIKESDKRNEDNIREVEKEARKSNDELRKDIEKLDRDRLPEEDAKRVLDELEEKVRRSVKKLREHVEENEKRVEDSVEELKRILEELRKAVDETTR

SEQ ID NO: 3161 - protein, 171 aa, Artificial Sequence; identical to SEQ ID NO: 3160
  Synthetic

SEQ ID NO: 3162 - protein, 182 aa, Artificial Sequence
  Synthetic
SKKDEVEKLLKESERHSKKLVEDAKRLSDESKKHVEELVRRAEEELEKSDRDVKKVKDDNRPKDELKKVVEDLERENERLNRKIKEELKRHKDENERLTKELRELVKRHTDEVKEITDRLNVPEEVMDRVRRRLERDIRELRKALKRVEDTNEEITRELEKAMKEVKDTSDRILEKLRRARK

SEQ ID NO: 3163 - protein, 182 aa, Artificial Sequence; identical to SEQ ID NO: 3162
  Synthetic

SEQ ID NO: 3164 - protein, 182 aa, Artificial Sequence
  Synthetic
SVKDKLKELLKDSKRNSDRLVERAKELLDRSRKHSKELEDRARKLLEDSRRKVEELERANLREDELTRVVRKLEEENKRLNTELEKLVRDHERDNKRLVDELTKLSKEHEDRVREIAKKLDVEREVLEKARRDLERDLRENKKALDEVRRTLEEDSRRLREVLEEVKRISTKIIERLREIRR

SEQ ID NO: 3165 - protein, 182 aa, Artificial Sequence; identical to SEQ ID NO: 3164
  Synthetic

SEQ ID NO: 3166 - protein, 173 aa, Artificial Sequence
  Synthetic
SEKEDAEKKLRDILTDLARIVREVEEALKKILDDIRKVSEESKRASDESLKRARDAGIDEKLLEELERHNRKLKRDDDRLLKELEEDIRRLKEDIDRLLEEVAREVDRLREELDRLRGEELEELLRRLEEAVRRIAERLRKLLKELEEKARRLAEESKKLLEKDKEDVKRAAE

SEQ ID NO: 3167 - protein, 173 aa, Artificial Sequence; identical to SEQ ID NO: 3166
  Synthetic

SEQ ID NO: 3168 - protein, 173 aa, Artificial Sequence
  Synthetic
SEKERIKEESKKSLDDLRRASERSKEELDRILKRIDEASKRSKEESDRSLKEVKDRGIDEELLRELKRHNEELKERDDRLLEELKRKVEELKRTDDDLLRRSKEKHEKVERELKDLDGEELKDVLRELRETNRKLVEDSRKLLEELDRDVERLADESRKLLEDDKRKVREVAR

SEQ ID NO: 3169 - protein, 173 aa, Artificial Sequence; identical to SEQ ID NO: 3168
  Synthetic

SEQ ID NO: 3170 - protein, 173 aa, Artificial Sequence
  Synthetic
SDEERIDELSKKSLEDLKRVSDDSKRKLDDILKKIEDASRESEDKLRRILEKARRDGIEERLLTELERKVRELKKDDRRLLEELRKKVERLKERDDELLDRSRRKHEEVKRRLKDLDGRELERILEELRTDNDRLAKESDKLVKELEEEVRELIKRSETLLEELRKDVEELAK

SEQ ID NO: 3171 - protein, 173 aa, Artificial Sequence; identical to SEQ ID NO: 3170
  Synthetic

SEQ ID NO: 3172 - protein, 171 aa, Artificial Sequence
  Synthetic
DAKERVDDALKKILDDHRRVLKKVEDDHRDSHREHRRVVEEVKRELEKVLKKLRDAGVPEEIIREAKELVEELVRRAEESDKRNEDNIREVKERAEESHRRLRRLVEEIRKANLPKEDLDRMLEKLREIVERSRDKLRRHLEKNKREVDDSKRRLEKMLRDLEKKVRDAER

SEQ ID NO: 3173 - protein, 171 aa, Artificial Sequence; identical to SEQ ID NO: 3172
  Synthetic

SEQ ID NO: 3174 - protein, 171 aa, Artificial Sequence
  Synthetic
DDEERVKRKLEEVLRKHKEVVDEVIERHRRSHKRHRDMLREVDKKHRRILTELEKAGVDEKIIREAKEHVDRSREKLKESDERNEENIKKVTKELRESHKRLRDKVKELAEANLPVEDLKRVLEDLDREVRESKERARKHVEDNERKVEESKKRADDNLRRLERKIREAAR

SEQ ID NO: 3175 - protein, 171 aa, Artificial Sequence; identical to SEQ ID NO: 3174
  Synthetic

SEQ ID NO: 3176 - protein, 171 aa, Artificial Sequence
  Synthetic
SVEETVDEELKKIHETHKRVVDKVRREHEKSHKKHRDILKRVEEVHRRILTDLERAGVDESIIKEARDHVERSREELRKSDEDNKRNIETVDDKARRSDEELKKDIDELRKAKLDKKDLDEMLRRLKRKVDESERDLKKHLDDNKRAVEKSREDAERNLKELRDKIREVKR

SEQ ID NO: 3177 - protein, 171 aa, Artificial Sequence; identical to SEQ ID NO: 3176
  Synthetic

SEQ ID NO: 3178 - protein, 180 aa, Artificial Sequence
  Synthetic
REEEEARKVLEELKRDVERNERESKEILDKDKRDVEEWVKELEKMLEESKKLVDDVRKAKKDLREEELEREVRRIEDTNRKLNTDVEEIVRRHVDKSEKLVERDKRLVEEWERKAEEIKKRLSTIEELKKAVEDIIRTLREVLEKSRKTLKDSNDRLRRALEKAREDSKRSIRRLREELR

SEQ ID NO: 3179 - protein, 180 aa, Artificial Sequence; identical to SEQ ID NO: 3178
  Synthetic

SEQ ID NO: 3180 - protein, 185 aa, Artificial Sequence
  Synthetic
SVREDAKRLLEELERAVRELVERLKKLIERHRRASEDTRRELEKLLRELEKAVEELKRGNKEEEKVRDVLRKLKERAEEIKKRLREIHEELRKHSEDLKRRLTEALDTLRKDIERIKRELTRDVRGTKALEDVKEALDRILERVKRAIEEARKKLDDVDEHNREVIERVEKEIDRILKDVEDAAR

SEQ ID NO: 3181 - protein, 185 aa, Artificial Sequence; identical to SEQ ID NO: 3180
  Synthetic

SEQ ID NO: 3182 - protein, 185 aa, Artificial Sequence
  Synthetic
SVEEEARELIERLRKLSEDTMRRLTELLKEHERLSRETKKEAERLLDELRKKVDDLTRDNRDDEEVRRVDEKLKRDVEKIKRDLRKIHEEVKKHSEELRRELEKIHKDVDDTVKEIKDRLDKKVKDDEVLERVKRELDRILDHNKKVVDEAERALRRVDKHNEDVLREVEKTLERILDKVKESAR

SEQ ID NO: 3183 - protein, 185 aa, Artificial Sequence; identical to SEQ ID NO: 3182
  Synthetic

SEQ ID NO: 3184 - protein, 178 aa, Artificial Sequence
  Synthetic
SVEEKLEKIVRDLERRVRKSEEDLRRMVEEVERTVEKHREELKRVVDTLRKIVRDKGADEDLIRELEKLKDDLRKRNDEARRRAEELKRRLEDLIRRSREESERLRKELDDVIRDDVKDEKVARDIKDKVREIIRRNEEVLEEVDRRARELIERLERTIEKSERDVERIIRELRERAK

SEQ ID NO: 3185 - protein, 178 aa, Artificial Sequence; identical to SEQ ID NO: 3184
  Synthetic

SEQ ID NO: 3186 - protein, 176 aa, Artificial Sequence
  Synthetic
SKEEEAEKLVRDLEDSSRKHKDRLRKLVRDLEELVKEHERDLKRIVEELKKLVDDASRSKREDVLKTVEDRLRELEEKLERSTRTIREVVKRVEEDLDRSTEEHEKLVEDIRRELEKRGGIKELEEELRRNLKEVREVTEDAKRKLRDILRKVEDASRRVKEMLDKILKRVEEEIR

SEQ ID NO: 3187 - protein, 176 aa, Artificial Sequence; identical to SEQ ID NO: 3186
  Synthetic

SEQ ID NO: 3188 - protein, 177 aa, Artificial Sequence
  Synthetic
KLDEDIRKLLKEALDRNKEMLERLKKTLDEALEKVKKLLEDLRRVNKEVEDELRRAGLPEDSLRKVKKESDRSLREIEREVREAERRLKEILDELKRVLDRSKEILDELKKDLDRVRGEDVLREVIRRIRKVIEDTDRTWKRLIDEIRKEVKDVLDKARRLIRESEKLMEDIKRRTK

SEQ ID NO: 3189 - protein, 177 aa, Artificial Sequence; identical to SEQ ID NO: 3188
  Synthetic

SEQ ID NO: 3190 - protein, 177 aa, Artificial Sequence
  Synthetic
DMEKRIEKLLKDMLDRVRELHKRVREVNKEVNKRVKELHDEVRKVNEKVNKAVKDRGLPEELVERVRRKSETTRKTNEEKLERINEESRETERTNEKLLDDIRRRLEELRRDLERVRGEEVLARVIERIRKDVEKVLREAEKHIEESRRLARKVLEELRRHIEENRRLLEEVDRRRR

SEQ ID NO: 3191 - protein, 177 aa, Artificial Sequence; identical to SEQ ID NO: 3190
  Synthetic

SEQ ID NO: 3192 - protein, 171 aa, Artificial Sequence
  Synthetic
EVEKKVEELLKRIEDDNKRVADRSRKLLRELKKRLEDVVRESRELLRRILKKLKEAGGRDEVEREVRRVVEENERRLEEILRRVEEVVKRNEDELRKSHDRLRKAVEKMRRAKIREDEVADRLRKLRKESEEVVERSDRHLKDLERRIEEMAERSRRHLKRLEDKIREDAR

SEQ ID NO: 3193 - protein, 171 aa, Artificial Sequence; identical to SEQ ID NO: 3192
  Synthetic

SEQ ID NO: 3194 - protein, 178 aa, Artificial Sequence
  Synthetic
SMEDRVREMLRTIKRVIEEAHERSKKILDEDRKVLKAVEDAVRDVLTKIKKLLDDARRRGQVSDDLVREITEKIKRILDEVRRIIEKNERELERWRREDEEILKDLERLLRELEKDVRTTKVDEEVVKRAKKLLEEIEKLARESLERLRDNLRKTEKLLKDLLDEAKRLLEEIKETVD

SEQ ID NO: 3195 - protein, 178 aa, Artificial Sequence; identical to SEQ ID NO: 3194
  Synthetic

SEQ ID NO: 3196 - protein, 178 aa, Artificial Sequence
  Synthetic
DIEEEVKKILDEIRERIKKMKRDLERLSKEDEDVLRKVKKDVDEVLKRAEESLRDVKRRGRVDDEVVERLKRRLDRLREDVRRIVEDNKRRLKEWNERTEEVIRRLKKRLDDVRREVRTTKVFEEVLRKLEEILRDIKRKADELRKRYRENIEETERLLEELLRRAEELLRRLDETAR

SEQ ID NO: 3197 - protein, 178 aa, Artificial Sequence; identical to SEQ ID NO: 3196
  Synthetic

SEQ ID NO: 3198 - protein, 181 aa, Artificial Sequence
  Synthetic
SEAEKLLEDIRRIIKEVKENVERSLEKIKRLIEELEKNARDLVRRIRKLIEDLERKVRRDGNTEELRREVEKLEEELREHVKRHEEKTEKLAEELKEHNERHKTESEKVERKLREDLKRIEDEKVIRDIEKLIEDLKRISEKANEDNKRLIDDMRRISKEVARTIKELIERLRKIVEEARK

SEQ ID NO: 3199 - protein, 181 aa, Artificial Sequence; identical to SEQ ID NO: 3198
  Synthetic

SEQ ID NO: 3200 - protein, 181 aa, Artificial Sequence
  Synthetic
SEAEELLERIKKLIEDLKRDAERLLREIEEMIKDIRRHVEEDLRRLREVIKEIKRLVDERGNTDDLERRVEEISRRNEKNIKDLEDKVREIVRRLEEVLKKHKEDTDRLVEKLKEDLKRIKDEEVEREIRRLIEEMKRISEEVRKEIKRLIDELEEIVRRAKEALKKLNEELKRIVDEAKR

SEQ ID NO: 3201 - protein, 181 aa, Artificial Sequence; identical to SEQ ID NO: 3200
  Synthetic

SEQ ID NO: 3202 - protein, 178 aa, Artificial Sequence
  Synthetic
SKVEEVLKRLERLIRELKRLMDEVREDNREVLERLERYAERNERENRELLKKLEDVARRRSPREELRRELKEIHDRNRKSIEELEDRLRKVHERNRDIIRRLRETLRKIEEDLKELTKDGVSKEELDKMLKTAERVLREIEKDIEKLDRDLKRVVERIRDRSRRLDEAAEEIVRRIED

SEQ ID NO: 3203 - protein, 178 aa, Artificial Sequence; identical to SEQ ID NO: 3202
  Synthetic

SEQ ID NO: 3204 - protein, 178 aa, Artificial Sequence
  Synthetic
SKMEEVLKRLEKLLRELEEYVERNERENRKLLEELEDYVRRNEKRNKEILEELRDVVRRRSPREDLRRKLEEAHKENRKSIEDLRRKLERIHERNKRSVEELRKRLDEIKKEVDELRRDGVSDEELRKALERLRRVVEKVEDISRELDDRLRRVVEKAEEISRRLDEEIKEVVDRAEK

SEQ ID NO: 3205 - protein, 178 aa, Artificial Sequence; identical to SEQ ID NO: 3204
  Synthetic

SEQ ID NO: 3206 - protein, 178 aa, Artificial Sequence
  Synthetic
SKVEKVLDDMRRIIEEAERLLEEVKRRHDEIIERVKRYAEENRRRNEELIEDLKRVAEKRGPREDLRDKLRRIHKENEDSTRELRDRVRRVNEESRELVERLERKLRDVARRVDELRKDGISKDDVRRLLEELRKVVEDVKRLSKKMNDRIEKIAKEIEEESERLDRTIAEIVKEIEK

SEQ ID NO: 3207 - protein, 178 aa, Artificial Sequence; identical to SEQ ID NO: 3206
  Synthetic

SEQ ID NO: 3208 - protein, 181 aa, Artificial Sequence
  Synthetic
DEVEKVLEELRRLLKEDEDIVRELLKRLKELLEDIDRIAKETEKEWRKILREIEELRRKPIPEEDVKRLRERVERVLRESEKRVKELRERLKELLKKIEEDLRRSEKRLKELRDDIRRKGLPEDAEREVDRVVRTIEESTKDAREKVKRMADEIERIIKEVEDLNRKLVEEIERVIREVER

SEQ ID NO: 3209 - protein, 181 aa, Artificial Sequence; identical to SEQ ID NO: 3208
  Synthetic

SEQ ID NO: 3210 - protein, 173 aa, Artificial Sequence
  Synthetic
DSEETLRELVKTIEDSSRKVKKRNEELARELRRRIEEAREANDRLVETIRKEIRELPVPEETVRRLEELIKTLKERSEELVRKLEDKIRRILEKSEKLLRETKKELKELTDKLKDLRREELEKTARKLIEDDEKKARDTEREWEELIRDIERLVRESLEAWKRLREEIRETVR

SEQ ID NO: 3211 - protein, 173 aa, Artificial Sequence; identical to SEQ ID NO: 3210
  Synthetic

SEQ ID NO: 3212 - protein, 173 aa, Artificial Sequence
  Synthetic
KSEEELRKLVRELEELIERMERTNEKLLRELKEVLDRARERNEELVRRLEDLIRRLPVDKDTVEELKRLIEELKRKSEEILRRLEKKLRDHRREVKKLADDLRRKIKELEDKLKDLREEELRKEAEDLIREIEEKVRRSKRNLEELIREIRELVERSEDEWRKLIKRIADAVK

SEQ ID NO: 3213 - protein, 173 aa, Artificial Sequence; identical to SEQ ID NO: 3212
  Synthetic

SEQ ID NO: 3214 - protein, 173 aa, Artificial Sequence
  Synthetic
SSEETLERLLREIERVLEEARKRNEDLVRKIREVIKEALERNKRMLEEIKKEIDRLPVEEELVKDLRDKLDKHRREVEKIITELKRLIDELKKESDDLLDEIRKKLKDLKDLLKDLRSEELLRTAKRLLEDIERIVRETLKKWRDLEREIRKLVRESTENLKRIIEEIRERAR

SEQ ID NO: 3215 - protein, 173 aa, Artificial Sequence; identical to SEQ ID NO: 3214
  Synthetic

SEQ ID NO: 3216 - protein, 174 aa, Artificial Sequence
  Synthetic
SKVDEVIRDLARLLDELRRHVDDSVRRMDEVVKRSTREADELAKRLDELVKEVEKKPGDKRVERMVREIERLVREVLEELKKKYEKLKREVEENLRRLEETVRDIVEKARKVTEDGVSKEKIDRIIRELERILEEAKKKHEDVLRRLEDSLRRVAELLKAALDRLREIVDRLRR

SEQ ID NO: 3217 - protein, 174 aa, Artificial Sequence; identical to SEQ ID NO: 3216
  Synthetic

SEQ ID NO: 3218 - protein, 174 aa, Artificial Sequence
  Synthetic
SKADDVIRKLRELLEELRTHVEKSIRDLRKMLEDSTRHAKRSIEELERLLEEVRKKPGDEEVRKTVEEISRRVKENVKRLEDEYRRLEEEVKKNLDRLRKRVEDIIREVEEMRKDGVDEEKLKDLIRKLRDILRRAAEAHKKLIDDARESLERAKREHEKLIDRLKKILEELER

SEQ ID NO: 3219 - protein, 174 aa, Artificial Sequence; identical to SEQ ID NO: 3218
  Synthetic

SEQ ID NO: 3220 - protein, 174 aa, Artificial Sequence
  Synthetic
SKVEEVVRTLDELLKRLEEHVKESIRRIKKVIDDSNREADELIRDIDRLLKELEKKPGSKELTDEARKIAEKIRDVLRRLKEKYERLEKDIRDNVRRITEEVKRIEEDVERLKEDGVDKDRVERIIRELRRILEEIRDLHRKLEEELRRSLKEVEDRLRELLKKLEDILRELRR

SEQ ID NO: 3221 - protein, 174 aa, Artificial Sequence; identical to SEQ ID NO: 3220
  Synthetic

SEQ ID NO: 3222 - protein, 180 aa, Artificial Sequence
  Synthetic
DEVEDLLRKLKDTIRRLKAHADRDLKKLEEILEKLRRHVEKNLRDLERILKELKDLSRTIDDEELRRRVEEVIKKDRDNNRRLNDESRRASEENRRNLETLAREVERVVKELEDELSRVRVEEVAERVRRVIKELRKLLEEIARALEDVNKKAKEINDKADEDSKRVNDELKRIIKEIRD

SEQ ID NO: 3223 - protein, 180 aa, Artificial Sequence; identical to SEQ ID NO: 3222
  Synthetic

SEQ ID NO: 3224 - protein, 180 aa, Artificial Sequence
  Synthetic
SEVDELRRRAEESSKKIRKIAEELTKRLKDLLETIRRLMRKIEEDMKRTSEEIKDLIRRGNTEEVLKRLEEKSRDLLEKVRKILEELKRELERLEKEVEERLEKLKRESEDLERRVSNATDDRLRDVVKKLHKKNKDILDEIRDIVRRLKEEVDTILKEIKERLEELHKNNERLLREAKR

SEQ ID NO: 3225 - protein, 180 aa, Artificial Sequence; identical to SEQ ID NO: 3224
  Synthetic

SEQ ID NO: 3226 - protein, 181 aa, Artificial Sequence
  Synthetic
SAKEKLEDLLRKLKRILDELEKTSREMKERVERIIRELEKTVREVHERIKRLIDEALKRNRGDDRVREIVEEIRKKSEDVNRETEEIAERLRRELKKLDDEDKDILRRLKERIEELRRKAEETSISEELKKELEDLLRKIEKLIKESEEKWRRLLEEIKREIERLRETYAEILRDVKRRDK

SEQ ID NO: 3227 - protein, 181 aa, Artificial Sequence; identical to SEQ ID NO: 3226
  Synthetic

SEQ ID NO: 3228 - protein, 181 aa, Artificial Sequence
  Synthetic
SAEETVRKLLEEIKEIIKRMEDRVREVLEENRKSIEDLEERVRRLHEEVERIIREALEDLRGDKRVDEIVKELRERSDRLNKRVEEILRELKKESEDLDREVKKIVEELRKRLEDAAEEVKRTKIDDEVKRELKRILEEIEKLIEELLRRMKESNKKIRKLAEDLTREYKRLLDEIRKRRK

SEQ ID NO: 3229 - protein, 181 aa, Artificial Sequence; identical to SEQ ID NO: 3228
  Synthetic

SEQ ID NO: 3230 - protein, 174 aa, Artificial Sequence
  Synthetic
REVEEVVKRAEEVIRRLEKEVEDIVRRVAKHLKDNEDHARRSVERLRRDIEELKKEDGDDEVRERIRRLKEDVDRDNKELRDNVERVKREIDRMVDELRKKLEDLKRRIDDVRRRGLLDELVKEVKKKIDDVLKKAEDLARKLKKEHDEVVARITEAHDEVKKRVEKVLKELED

SEQ ID NO: 3231 - protein, 174 aa, Artificial Sequence; identical to SEQ ID NO: 3230
  Synthetic

SEQ ID NO: 3232 - protein, 174 aa, Artificial Sequence
  Synthetic
SKVEDVIREIRELIKRLEKHVKDSVREVRKHIEDNKRKVEKLVKEVEDVIRELRKEDGDERVEEKVERLKRRIDEMLKDLEENLRRVKREVREDNRRLKKLIEDVKKKITDVERDGLMRELAEELRRRLDEVLEKATRLHRELEKRHDDVLREAEKRLRDLKREIDKVLDDLRR

SEQ ID NO: 3233 - protein, 174 aa, Artificial Sequence; identical to SEQ ID NO: 3232
  Synthetic

SEQ ID NO: 3234 - protein, 175 aa, Artificial Sequence
  Synthetic
EEVERVVKELRDHLAETKKKIDEIIKRLDDHIEENRERVERMVEELRRILKEIRDSNVREDEVRKLVEELLRRAREVLRESEKNIRDVKKEAEDVLRDLERNIRDSERKLEEVLRRGLAREVVDEVRKEHRDVLREAEELIKRVEKDHEKSHREVKKLIEDVERRLREVLKELRD

SEQ ID NO: 3235 - protein, 175 aa, Artificial Sequence; identical to SEQ ID NO: 3234
  Synthetic

SEQ ID NO: 3236 - protein, 175 aa, Artificial Sequence
  Synthetic
KEAEDTIRKVSKHIEDNKRKVEEMIKKLKEHLKETEEKIRRIVKKVRDEVRKLEENNVPEDEIKELVDRLRKELKDVLDDLKRNIEEVEKEAEDILRESEKNIRDVEKELEEMRRNGLDEKLVRDLKRRHKESHDEARKLIEEVRREHEEVLKRAEDLIRELDKRLKEVLDKLRK

SEQ ID NO: 3237 - protein, 175 aa, Artificial Sequence; identical to SEQ ID NO: 3236
  Synthetic

SEQ ID NO: 3238 - protein, 175 aa, Artificial Sequence
  Synthetic
SEAEEVVRRVEKHIRDTEKKIRDIVRRVKEEVDRNSERVREMVERVRKEIEELERAQVPEDRIEEEAKRLEEELKRILEEDKRNIDRLKEELDRELEDLRRNIREVERRLDELTRRGLKKEVVDELKKRHREVLEEARRLIEELKERAERSHRESKKLIDELREEIRRVLEERRR

SEQ ID NO: 3239 - protein, 175 aa, Artificial Sequence; identical to SEQ ID NO: 3238
  Synthetic

SEQ ID NO: 3240 - protein, 178 aa, Artificial Sequence
  Synthetic
SEVEDIVTKLRDKVERHREEVKRIIDTLKKLVEEHKRRVDDEVKKLDDTVKRLREANVDEETLREVEERIDERLRRVLDRSREVKKRLDKALDEVRKRSKEVHEELRRALEEVRKRSRDKRVDDLLREVEERLERSNREARKLLEEVKREMEESHRRLKKLLDEVREKVRRVVEELRK

SEQ ID NO: 3241 - protein, 178 aa, Artificial Sequence; identical to SEQ ID NO: 3240
  Synthetic

SEQ ID NO: 3242 - protein, 177 aa, Artificial Sequence
  Synthetic
KVEELVKEVDERIKKVLDDLRRALEDVRKKAEDSVRRMEELSEKVKRDLDRVIAKAEEKGLDEKDLDELRRILERLRRENKKLNEESRRDLEEVRKELEEVLKRAEEMVKRLKDTLRRDGVDEEVVKRLEEILRRLKETIDRVLERLKRRVEDHDRKVEKRVRENEKAVEDLKRRID

SEQ ID NO: 3243 - protein, 177 aa, Artificial Sequence; identical to SEQ ID NO: 3242
  Synthetic

SEQ ID NO: 3244 - protein, 179 aa, Artificial Sequence
  Synthetic
SVEEVLEEARKDIDRLIRRMEEISERAKEKIERLIDELRKISEEANKKNEEVLRELREKGGDNKERVDEIEERLKRHNEEHRRRTEDLERKLRKHVEEHKERTREIKEELKRLLKELEEANIPREDIKREVDRLLEEIRRLIERLRENVKKLLDEIRKLIEELDENVKRSLKKLRDDIR

SEQ ID NO: 3245 - protein, 179 aa, Artificial Sequence; identical to SEQ ID NO: 3244
  Synthetic

SEQ ID NO: 3246 - protein, 188 aa, Artificial Sequence
  Synthetic
SLDDILREVRRTSRELNEESRRIVDRAKRESEELLKELETILRDATRRLDDLLRKLDEKRQDEEVKKILRDLREEIKKLREDVKRELDRLRKHTEDLVRKVEELNRRSEEHLKKLEEEVDKAKKEGQDRETVVKELEDKVREHLRTNRELIERLEKEMRDHLREIKRKIEELERRIRKLVEEVKRRID

SEQ ID NO: 3247 - protein, 188 aa, Artificial Sequence; identical to SEQ ID NO: 3246
  Synthetic

SEQ ID NO: 3248 - protein, 175 aa, Artificial Sequence
  Synthetic
DELEDLVRKAEKLVRESEKKIKEIVDDARRLIEDSEREIREIVKKLRELSKRVEEELRRDGPTEELEKKLRRITEELDKLLEDLRDKNRRINEKLRKDIKELERENRDINRELTKRVRMKDLLKELRDKSKRVLEKLRRLLEEINKRSRDVLEKLKRLADEVRESNREVLDRARK

SEQ ID NO: 3249 - protein, 175 aa, Artificial Sequence; identical to SEQ ID NO: 3248
  Synthetic

SEQ ID NO: 3250 - protein, 172 aa, Artificial Sequence
  Synthetic
RELEEIVKDAERLVKKDTEDIRDKVRRAEEVVKKDTEDLEESVKRVKDKVKELEDANIRRDEARKVAEEMKKELKEVLDDNERKSRDLKTKLRKVLEENKKKVDEIREDLERRMKSEELLREIEERIKRSLDESRKLVREIEKKVDESNERSRKLVEDVEREIEEVLKRLAD

SEQ ID NO: 3251 - protein, 172 aa, Artificial Sequence; identical to SEQ ID NO: 3250
  Synthetic

SEQ ID NO: 3252 - protein, 177 aa, Artificial Sequence
  Synthetic
SSEDILREVKKLLDDSLDKLRRLIEKIKEDLDRSVDRHRKLSEEIRRRHERVREAVERRGSSEEKKERIERNIREVEEEIKKVDEESKRIVDKLEKELREVLRKSEETIKKIRKDIKDEGVDEDVARKLRELVREHSKEVEDKVRRAARLVEEHTERSDRVADKLRKHIEETKKRID

SEQ ID NO: 3253 - protein, 177 aa, Artificial Sequence; identical to SEQ ID NO: 3252
  Synthetic

SEQ ID NO: 3254 - protein, 177 aa, Artificial Sequence
  Synthetic
SKEEILKEITDRVRESRKRTKKLLDDVREELERSHRRLEKLIREVEKRLREVKRKVDESGQSEEMVKRVEDVVRTLTEELKKVLKENRDEIRRIEKRIKEIDEENDRTIRRIEDRIRREGADEDVVRDLRRLVKEDTDRARKVVRELEREVERDKEEVERIVDKAEKKVRELEERIR

SEQ ID NO: 3255 - protein, 177 aa, Artificial Sequence; identical to SEQ ID NO: 3254
  Synthetic

SEQ ID NO: 3256 - protein, 178 aa, Artificial Sequence
  Synthetic
DEVEKAVADLRRLNEEHTRDIDKAARDLERLVKKHTDEVRKLVRDLEKLVKDLKDANLREDEVEEVVRRIDETLKRILKRSEDVVREIERELDKIRRKSEEAVKRSEDMLREIARRSRDEKLEELLKEVEETTRRSLRRLEELLRKVERAVRESHKELKKLLDEVREKVKKVLEELRR

SEQ ID NO: 3257 - protein, 178 aa, Artificial Sequence; identical to SEQ ID NO: 3256
  Synthetic

SEQ ID NO: 3258 - protein, 178 aa, Artificial Sequence
  Synthetic
DEVEKAVRDLEKLNEEHTRRVEKVVTDLRDLVRRHTEEVRKLVDELRELVERLRRAKLDDKTVKKVADDLRKKLRDIEERSKEMVKKAEETLRRILEDSKRAVDESRDRLREIARRRRDKKLEKLLDDVRKTTETSHERLKRLLEEVEERVRRSHEELKDLLRKVKELVEKVLRELKE

SEQ ID NO: 3259 - protein, 178 aa, Artificial Sequence; identical to SEQ ID NO: 3258
  Synthetic

SEQ ID NO: 3260 - protein, 178 aa, Artificial Sequence
  Synthetic
SEVEKLAKELRDLVREHTKRVRELIDELKKRVEDHTRKVEEIVKRLKKLVDDLRDANLDKDEVRKALEEAKRRLDDVRRRSKEVTDRLDKTLKDIERESERAVREMDRRLREIERRSRDKKLEKLLKEVRELVKRSHDELKKLLDRVREAVEKSKRRLEKLLDTVRRLLEKVVRDLER

SEQ ID NO: 3261 - protein, 178 aa, Artificial Sequence; identical to SEQ ID NO: 3260
  Synthetic

SEQ ID NO: 3262 - protein, 178 aa, Artificial Sequence
  Synthetic
SEAEKLVEELRRLNERHTRRVEEVVRRLDEEVKKHRKDVRELVRELRKLVDELRKANLDEDTVRKVAEEAKKRLDEIRRKSERVVERMRRELKKIKDESEEMVKESRKRLTEIARRSRDEKLEELLREVEETTEKSHRDLKRLLDRVREKVEDSHKELEELLKEAKDRVDRVLEELRR

SEQ ID NO: 3263 - protein, 178 aa, Artificial Sequence; identical to SEQ ID NO: 3262
  Synthetic

SEQ ID NO: 3264 - protein, 178 aa, Artificial Sequence
  Synthetic
SLEDKVRDDVRKLLAEAKKVADDLRKVVEDHRKTVEDVIREIRRRVEEHLKKLKELIDAGVDERVLEELKRHSEKLVEDIERLLRELNKHSERLLREAEKILRELEKKVRDTKKELRDRGVDDRVLKRIEEEIRRLLKELREIVKDLERLDRELTDELRKLVEEVRRLSETVLDEARK

SEQ ID NO: 3265 - protein, 178 aa, Artificial Sequence; identical to SEQ ID NO: 3264
  Synthetic

SEQ ID NO: 3266 - protein, 182 aa, Artificial Sequence
  Synthetic
SLDEDVAEKMKELEKENKDLLDTIRRLIEELEKHARELLKRIEDLIRELTEDAKRLEDSNLREDELKRELDRLRDKVRKVRKEIEELLKEHEDRSRKVVRDIEEKLKESNRKVKELLEELKTRGVDRRILEEIRRTNEELTERVRDLVEEMRKTSEELLKEVRKIADEVRRTVEEALKRLEK

SEQ ID NO: 3267 - protein, 182 aa, Artificial Sequence; identical to SEQ ID NO: 3266
  Synthetic

SEQ ID NO: 3268 - protein, 179 aa, Artificial Sequence
  Synthetic
DEAEKILRDAKRLVEELSKKLEDNLREIKEVIDRLSEELDRNLKEHRDLIRKLEEDMDRKGVDDKEKKKLREDHDRYRKEVEERKKKLRDELKKYKERVEEMIEKLKRRLEEIEKRIRDEGKITEERAREVEEDIKRAEEEVERSIRESKKRTRDAEREVRESKKKSEDHIREVEKRIR

SEQ ID NO: 3269 - protein, 179 aa, Artificial Sequence; identical to SEQ ID NO: 3268
  Synthetic

SEQ ID NO: 3270 - protein, 183 aa, Artificial Sequence
  Synthetic
SELEELLKELKEIVERSADHLRRSNDDLRKIIEEVTKTLEKILEDLKRIVEEVVDRARKKVSDKDRVRELKKRLEEDLRRVEKKVRDIKKEAEDSLRKSEEDVREYKRKLKEDLDRLKEIIERNEDREEELKKKLKELKDRAKETNERHRRDVERLMEKLRRDLERLDREVKDLEKKLREEEK

SEQ ID NO: 3271 - protein, 183 aa, Artificial Sequence; identical to SEQ ID NO: 3270
  Synthetic

SEQ ID NO: 3272 - protein, 172 aa, Artificial Sequence
  Synthetic
SDREEIKRRVEEEAKKSRENLKETLREVDERVRDSERNLKRHHEEVKKAIDDLRRSDVPREEITKRLRELLRRSEKKIEEAMRDHDRILKEIKERADKAERDHDDRLRKLEERGLEKRILDDVRRLLEELKERYRRIVDEIKKLLERLKEAYKRNLDRVRELIERIEKEIRD

SEQ ID NO: 3273 - protein, 172 aa, Artificial Sequence; identical to SEQ ID NO: 3272
  Synthetic

SEQ ID NO: 3274 - protein, 180 aa, Artificial Sequence
  Synthetic
SELEEVKERIERLVRRHKEELEKVRREIEREVKKHEKDLEDLERRSREHIETAERLLAENRVREDEVRRILKENRDEAREVEKKSREHLDRLKKRLDKLREDSKRHLEDVERDLKRLKDRGDVDDRILEEARRLLDRLREENEKVLKEAEDMLKRLEDENRKMLEENEKLLKELKKEVDK

SEQ ID NO: 3275 - protein, 180 aa, Artificial Sequence; identical to SEQ ID NO: 3274
  Synthetic

SEQ ID NO: 3276 - protein, 180 aa, Artificial Sequence
  Synthetic
SEVEEVLKTIEKKDEEHKRELERVKEEVDEDAKRHRERLKKVDRDVKEEIKRLRKLLEDRTVDEEEVREELRKLTERLDKLRKDSEKHLRDVEDKLRRLRERSERHLDTVRKELEDMRRRGDIEEKILEEIKRRLDELRKRNEDLLRRVKELLDELREENRRLLEDAKRLLEEVLKRARD

SEQ ID NO: 3277 - protein, 180 aa, Artificial Sequence; identical to SEQ ID NO: 3276
  Synthetic

SEQ ID NO: 3278 - protein, 180 aa, Artificial Sequence
  Synthetic
SELEEVEKKVREDARRHKEELRRVEEEVKRNAEKHRDELRRVREDIERKIRTLRELLKERRQSEEDVKRRLDKLRDELKKLKERSKKHLDDVERRLEELRKESERHLREVEKELEELRTRGDVSEEILRRVKKLLDELRDENRRLLERVRELLERLREENERVLREVKKLLDEVKREAEK

SEQ ID NO: 3279 - protein, 180 aa, Artificial Sequence; identical to SEQ ID NO: 3278
  Synthetic

SEQ ID NO: 3280 - protein, 182 aa, Artificial Sequence
  Synthetic
SEREKLLKELKDNLDESRRRVEELLKRIKENLEEVKDRAKKTLDDLKRDIEELRKLVERRETREEEIKKKLKEHDEKTEKIKRDLRDHLRRHKEDTKRLVEELKKHLEDHKRKIEDIERKLKDEDVKRRLRDLSRRLAREHEKVIEKLRRLSDELEKIHREIEERLERLSDELRKEADKARK

SEQ ID NO: 3281 - protein, 182 aa, Artificial Sequence; identical to SEQ ID NO: 3280
  Synthetic

SEQ ID NO: 3282 - protein, 182 aa, Artificial Sequence
  Synthetic
DEARELLKRLREINEKLKKDVEEIERRLEKYNRDVKRKLDDSIRELKEKLDRLRERIRDEGTGREDLERVKKDVEDYLEENRRRAEESKRELERLLREVREKLKRSVERLDEALEKVDRDGLPEDVRRAVEELVRRHKDTVKKIEESVRRLVEEHKRTVKEALDRSRRIAEEIKRVLDEAAR

SEQ ID NO: 3283 - protein, 182 aa, Artificial Sequence; identical to SEQ ID NO: 3282
  Synthetic

SEQ ID NO: 3284 - protein, 182 aa, Artificial Sequence
  Synthetic
SEEEKLLTELKKLNDDLERRVRKSLDEIRRYNEKMREDVRRSDREVREEKKRLDEKLKKDGTDDDELRRVKKKLEDYLRRNEEEVRKSREEVRRYLTKNREDVRRSKEELRKLLEKVKKDGLPEEALKKVRELVERHKRTVDEALEKSERLLREHERTVDEVLDRSRRAVEEVKKTLDDARK

SEQ ID NO: 3285 - protein, 182 aa, Artificial Sequence; identical to SEQ ID NO: 3284
  Synthetic

SEQ ID NO: 3286 - protein, 181 aa, Artificial Sequence
  Synthetic
REAEEVRRRIEESHEEVRRRARKDERDLEESHKRLEEKAKELKDELRKILKDIDDLAKSNVSEESVKKLKEDLDRKLEEVERRMREDKKRHEDHLRESEKDMRRLKKEHRDRLEELRRAGLPEDVLRDIEKLVRDNEEALDRILKRTKELVDRNLEAIDRILKEVEELVRRIKELLDRAKK

SEQ ID NO: 3287 - protein, 181 aa, Artificial Sequence; identical to SEQ ID NO: 3286
  Synthetic

SEQ ID NO: 3288 - protein, 179 aa, Artificial Sequence
  Synthetic
SEVEEVLERLKRKLDEIERESRESAKKIRREIERIEKEARDSLRRLKKLIKEIEDRVRRDGRRRDELDELLKRLEDYVRRSVERLERLLEDLTKKVRDHERTLRRRLKRVRDDIERLKEAGIDREELEKLLKRLEEVVRESEKEIEDLLRRVRELIERIKREHEKILKEAEEVIRRVKK

SEQ ID NO: 3289 - protein, 179 aa, Artificial Sequence; identical to SEQ ID NO: 3288
  Synthetic

SEQ ID NO: 3290 - protein, 179 aa, Artificial Sequence
  Synthetic
REVEEVLRELEEHIERSKRKSEESLKEIRRRIEEIEERSRRSLTELKKRIDDIKRRVEKDGPREKELDDLLKDLKRKADEHAKRLRDLLKELEDRVREHERDLERNLKEIKEKIEELERAGIDKEDLKRLLDKVTEVHKESAKEIRKLLDEARKVIEDSLRAIRDILRKIKETIDRDKT

SEQ ID NO: 3291 - protein, 179 aa, Artificial Sequence; identical to SEQ ID NO: 3290
  Synthetic

SEQ ID NO: 3292 - protein, 179 aa, Artificial Sequence
  Synthetic
EEVERVLEKLKRHIDDSRRKSKRSVDEIRKHIERSKRRSEESVERVKRELERIEEKVRREGNRRDELKTDLDRLRRYVRKHVEDLRENLKRIDERIKEHEDRLDKNLEDLKREIEELRKAGVDEEELKKLLEEAEKVHRDSKRELRKLVKEARDVHRESMETVKRLLDELEREIRRAET

SEQ ID NO: 3293 - protein, 179 aa, Artificial Sequence; identical to SEQ ID NO: 3292
  Synthetic

SEQ ID NO: 3294 - protein, 179 aa, Artificial Sequence
  Synthetic
SEDEEALKKLKEHIDRSREESKRSLDRVKREIERIREEIERDLRRLREELKKIEDRLRRDGPRRDDLERLLRRVEEEVERLKKKLDKLLEELRKYVEDHKRRLDENLERIRDEIRRLREAGIDEDELRKLLEDAKRVHKRSKDELKRLLEEAEKVIRDAKRKIKKLLDELRKVLEDARR

SEQ ID NO: 3295 - protein, 179 aa, Artificial Sequence; identical to SEQ ID NO: 3294
  Synthetic

SEQ ID NO: 3296 - protein, 179 aa, Artificial Sequence
  Synthetic
DEVRRVLEELKEHIKRSEKRVRENEEEIRRHIEKSKRDSDESLKELARLIKKIEDDVRREGTREKDLDKLLKDLERYVEEHKKRLDDNLRRLEEHIKRSKEELEKNLRRLREEIEELKKAGIDEEELKKILDEAEERHRRIEERHKDLLRKAEEVHRDSLRRLREILRRAEEVIRREKT

SEQ ID NO: 3297 - protein, 179 aa, Artificial Sequence; identical to SEQ ID NO: 3296
  Synthetic

SEQ ID NO: 3298 - protein, 179 aa, Artificial Sequence
  Synthetic
KEVEEDLERLKKHTEDTRKRARDNLERIKEELEEIRKESEDSARKVRRDIEEIKRRVDETGPDRDELDRLLRRLEEYVKRHKDRLRELLRRVEEHIKKSIRELREDLRRLREEIEELKKAGVDERELEKLLKEHEKTIRDIEEEHRRLLKELKDVVRESSRELEELLKEAEDVIRRVKK

SEQ ID NO: 3299 - protein, 179 aa, Artificial Sequence; identical to SEQ ID NO: 3298
  Synthetic

SEQ ID NO: 3300 - protein, 182 aa, Artificial Sequence
  Synthetic
DEVREALKRLEDETRKNKKESDKSLERLKEESKKNKDESDKSVKNIEDKIKKLKEDLDRDGPDEDRLREVLKRLRDYLREHKERLDRSKRKLDEELKKHREDLKRSKDRLDEELKRLDKEGLPEEVKRALDELVKDHRRVLEESARRIDEIVERHRRLLDDSLRRIAELVRRVEETLREERR

SEQ ID NO: 3301 - protein, 182 aa, Artificial Sequence; identical to SEQ ID NO: 3300
  Synthetic

SEQ ID NO: 3302 - protein, 182 aa, Artificial Sequence
  Synthetic
DEVEKALKELEDDLRELKKRSEESLKNVEEEIKRAKKELDESLDNLRKKIEELKRRLEKDGTNEDDLRRVLEELRKYLEDVRRKLEEVLRKLRDYLRKHEEDLRRVERELEKKLEDLERAGLPEEVLRKLETIVRKIREELDRSKKKLEKLIEEAKRELERVLKEHEDLVKRVRDVLEDARR

SEQ ID NO: 3303 - protein, 182 aa, Artificial Sequence; identical to SEQ ID NO: 3302
  Synthetic

SEQ ID NO: 3304 - protein, 182 aa, Artificial Sequence
  Synthetic
DDVRETLTRLRKETERNKRESDKSLENLKRKSEDNKRKIEESLKNMKRRIDEVKRRAEKDGPNEDELRKLKEELKRYLDRLREELERSVKEATEYVRRHERRLRESLKDLKRKLEDLDRRGLPEEVKKELDEILRRHKEVLRESERRLEKLLRDHRRRLEEALEEHKKLIDEAEETLKRIRD

SEQ ID NO: 3305 - protein, 182 aa, Artificial Sequence; identical to SEQ ID NO: 3304
  Synthetic

SEQ ID NO: 3306 - protein, 182 aa, Artificial Sequence
  Synthetic
SEVEKALKELEDKTRKNKEDSERSLDKLRKDIEELRKKAERSIRNMRDKLRKLRDDVRKEGPDKDRLEEVLREVERYLEELRKDLERVLEELKKYLEEHKRRLEESRRRLKEDLDKLEKDGLPEEARRKLKELVDRHEEVLRRSLERLKRLVEEVRRTLEKILRDHERLLDELRRDLEKDRK

SEQ ID NO: 3307 - protein, 182 aa, Artificial Sequence; identical to SEQ ID NO: 3306
  Synthetic

SEQ ID NO: 3308 - protein, 182 aa, Artificial Sequence
  Synthetic
DEVEERLRELEETTKENKRRAERSLENVRKKSRDNDKRIKESLDNIRREIKRLRDKVRKDGPNREELKEVLDRLRTYLKEVEKDLRRSLKELEDYLRKLEKELRESLEDLKKKLEDLRREGLPREVLEKLKEIVERHEEVLRRIKKKHEDLVREHRKRLEEARKRHEKLVREAEKTLDDVRR

SEQ ID NO: 3309 - protein, 182 aa, Artificial Sequence; identical to SEQ ID NO: 3308
  Synthetic

SEQ ID NO: 3310 - protein, 182 aa, Artificial Sequence
  Synthetic
EEVERILDELRRRNEDMRRRSEENERELRKRNTELRKKVEDSLRRLREDLKRIKKLVEEGRVDEETLRKLLEDVERYLKEHRDRLRKSLEDAKKRFKEHEDRLKKSLEDVERKLEELRREGLPEEVTKALEELVRRHRKTLEESLRKAEKVLRDHKESLERSEKKLKELMEEVKKLLDDARR

SEQ ID NO: 3311 - protein, 182 aa, Artificial Sequence; identical to SEQ ID NO: 3310
  Synthetic

SEQ ID NO: 3312 - protein, 178 aa, Artificial Sequence
  Synthetic
SREDEIRKRLEESLERVKKIIEDIKRRIDESLERIKELLKEIDERSKRSLEKIRRKIEREPRSEKVEKEAREHMKRLDELLREVEEYIERSIKELRELLDELRRYVEESEERLKELRRRGGSEELLRRARKAHEDLLREVKRRIERAEEEHKRLLDELRKVVERSKTEIKKLLDELRK

SEQ ID NO: 3313 - protein, 178 aa, Artificial Sequence; identical to SEQ ID NO: 3312
  Synthetic

SEQ ID NO: 3314 - protein, 185 aa, Artificial Sequence
  Synthetic
SRVEDVERKLRRKLEELKEDIERLREESRRSLEELERDSDRNRRESEDSLRRVEERIRRIKDDEDKERVTRTVEEELERHERRLRESKKRLDDEERKHKKRLEEVRREVTEKVRTIREELEELERDGVDRETLRRVEREIERLLRELEETLKRSEEELKRIVDEHRKLLERSKRELEKLVDEVRK

SEQ ID NO: 3315 - protein, 185 aa, Artificial Sequence; identical to SEQ ID NO: 3314
  Synthetic

SEQ ID NO: 3316 - protein, 186 aa, Artificial Sequence
  Synthetic
REIEEVLKRVEKVVRDDSRRNKEVLTRNRRKVERWKETLEDVLRRVEKAVRELRKDAEDRLREKKEKIAKVEDLLDKIRKTVKKVLDEVKKLLDDSIRLSEEMLRESERTLRDIEREVDEVSKKTRTEDILREVEKKLKELLDRSRELSDEVRKRSDESNKEIKKELDRARDELRRLLERIEEELN

SEQ ID NO: 3317 - protein, 186 aa, Artificial Sequence; identical to SEQ ID NO: 3316
  Synthetic

SEQ ID NO: 3318 - protein, 186 aa, Artificial Sequence
  Synthetic
DEIEKVLEEVERVVEEDERRNRKVLEENKRLVDEWDRRVREVLKDVKRRVDELDTRARRDLRENEEKIRKVRKLLDEIREVVERALKKVRELLERSIELSKRVAEDSKRTLDDIRRVVEEVARKTKDKEILDRVKERLERLLEESRELSERVKREIEETNERIARELERVMETLKKLLKDIEDELK

SEQ ID NO: 3319 - protein, 186 aa, Artificial Sequence; identical to SEQ ID NO: 3318
  Synthetic

SEQ ID NO: 3320 - protein, 186 aa, Artificial Sequence
  Synthetic
KEAEDVLKKVDTDVTRDDEDNRKLLEDNRRSVEEDERRNRRVLEEVEKRVRDLAERVKRDLREDSKRLEEVERLLRRIEERVTRALEDTKRTLEESLKLSEDVLRDSHRTNRDIKRVVEEVTRKVRTREILKRVTEELERLLAESERLSEEAEERVRRSDDTSRRLSEEVRKELEELLRRIEERLR

SEQ ID NO: 3321 - protein, 186 aa, Artificial Sequence; identical to SEQ ID NO: 3320
  Synthetic

SEQ ID NO: 3322 - protein, 186 aa, Artificial Sequence
  Synthetic
REVEEVLKRVKETVEKDREDNTRVLERNRESVKEDDDRNRKVLKRVRDEVRKLLEEAKRDLKDDEKKLREVTDALRRIIEEVERVLKESHDTNRESIKLSEKLIRDSERTLERIERRVDELVKKVRTEEILKRIEEELKRLLEESRELSKEVEDRVRKSDKKSRDLSEKVKKDLKELTDEIRKRLK

SEQ ID NO: 3323 - protein, 186 aa, Artificial Sequence; identical to SEQ ID NO: 3322
  Synthetic

SEQ ID NO: 3324 - protein, 186 aa, Artificial Sequence
  Synthetic
SEIEDILERVREEVDKDRRKNDEVLRENERLVKKDDDDNAKADEDVRRKVTELEKRARRELKDNREKLKKVKELLERIKERVKEVLRRSHKTNRDSERLSEKVVRDSRKTLREIEEVVEEVSRRIRSEEILKRVAKRLKELLEESKRLSDEVTKRSRDTDEESERLSRKVDKEVKDLLKEIERELE

SEQ ID NO: 3325 - protein, 186 aa, Artificial Sequence; identical to SEQ ID NO: 3324
  Synthetic

SEQ ID NO: 3326 - protein, 185 aa, Artificial Sequence
  Synthetic
SEVEEMEERLRKLDEDSRRLSEDVKRRLDKINKEIKDLLDDVRRKLKEMLDKLTKDLRDLKGKEEDVERVVREIEEDVKRVLKEVKRLVEESRRLSEKVLRDSERSVRESRELAKEALKRVKEKRAEDKVRDVLRDNERTLKKDEDDNKRVLDEDEKRLREWEERARRVLEEVRRRLKELVEEVR

SEQ ID NO: 3327 - protein, 185 aa, Artificial Sequence; identical to SEQ ID NO: 3326
  Synthetic

SEQ ID NO: 3328 - protein, 185 aa, Artificial Sequence
  Synthetic
REVDKAREDLRRVDDELRKILERVRRELEKLDKESEERSRRLARDLDRLLEELERDLKDNKGKRERVDRVVREIKEKVRRVLETSKKLVEKSRKLAEDVLREVEELVRRSKTLAEDVLRKVKEREVERKVREVLKDNERTLRELRDTIRKVLEDNDKTLREDVRRNEEVLRRVDETLRELKKRVE

SEQ ID NO: 3329 - protein, 185 aa, Artificial Sequence; identical to SEQ ID NO: 3328
  Synthetic

SEQ ID NO: 3330 - protein, 185 aa, Artificial Sequence
  Synthetic
SEVDKVKEDLDEVDKDSRRISREMEERLKELDKRSREISDRVVRELEKILKEIEDLLRDLKGRSEDVREMVRRLRELVKRVLKESKELVDRSRKLSDDALKESKRVADESRKLVEDALRKIDRKEARDKIRRVLEDNERTLREDIEDNRKVLEDNDKRLKDDERKNREVLKRVDETLKELDERVK

SEQ ID NO: 3331 - protein, 185 aa, Artificial Sequence; identical to SEQ ID NO: 3330
  Synthetic

SEQ ID NO: 3332 - protein, 186 aa, Artificial Sequence
  Synthetic
DELRELEERLRRSVEEIKRDLKRIHDENREAVERSERKSKKILEELKREVEDVKRELREKLKDDKEKVERVTRLLETVIKELRELVERNREELEESDREVDKLIKEVEKVLEDAERDLEDLVRRSRDEKLVREIERRVRKMEEDVRELVKTIEKRSRDVIKKSEDILKRIKERVEELEKRVRDAVR

SEQ ID NO: 3333 - protein, 186 aa, Artificial Sequence; identical to SEQ ID NO: 3332
  Synthetic

SEQ ID NO: 3334 - protein, 186 aa, Artificial Sequence
  Synthetic
DELRELLETLRDEVRKDDKRNEDIHRENRKRVEESRRRSEKILRDLREVVKRLEDELRKKLKDDKDKVRKVKRLLDEVIKTVEEIIRRNEKVLRDSDKTVREAIRRTHELNRRIIEDLEELVRKTRSEELLKRIEKRVRDMIRRSRTLSARLEDLSRELDERSKRVVEDLKRRIDEAIKELEKEVE

SEQ ID NO: 3335 - protein, 186 aa, Artificial Sequence; identical to SEQ ID NO: 3334
  Synthetic

SEQ ID NO: 3336 - protein, 180 aa, Artificial Sequence
  Synthetic
DETEEVAKKIKELIERSRELVKKVKEKIDRLNEEIEKLVREVEKTIKELTDRIEELRKRGVDAKDIERLLKEIEERVRKMLEDVKRILERSIRESEKALERNEEVLKRIKEEVEEALKRVDREEMKKLLDDLRKAVDESRRRSEEILKENRKRVEKWREDLRRLLEKVKEDLDRIRERLR

SEQ ID NO: 3337 - protein, 180 aa, Artificial Sequence; identical to SEQ ID NO: 3336
  Synthetic

SEQ ID NO: 3338 - protein, 180 aa, Artificial Sequence
  Synthetic
SEVEEAKKTLDELNRDIAKKVEDVEREIKRMIEESERLTREVEERIRRLTKKIEDLRRGGVDRKDIKELLERILKDVDKALKDSHKSNREIIRRVEEALKTIEELLKRSDELVKRVLDRVDEERVKKILEENKRDAERWKRRLKKLLDDVRRLVKEDDDRNEELLREVTERVRRIEEKLD

SEQ ID NO: 3339 - protein, 180 aa, Artificial Sequence; identical to SEQ ID NO: 3338
  Synthetic

SEQ ID NO: 3340 - protein, 180 aa, Artificial Sequence
  Synthetic
SEVEKVKEELKKLNKEIADSSDEVDKDIERLIRESRKLTEDVRREIKRLIERIDELRRAGVDEKELDRLLKEIIKRVEDALRKSHESNRRIIKRVEEALKRDKELLERSDERVAEALKRVDDEEAKRILDENKKLVREWEEKSRAVLEKVKKLVKRDDDENKKLLDDVKKLVDEMRERAR

SEQ ID NO: 3341 - protein, 180 aa, Artificial Sequence; identical to SEQ ID NO: 3340
  Synthetic

SEQ ID NO: 3342 - protein, 180 aa, Artificial Sequence
  Synthetic
DLEREIRKIIEEAKKELERVNDEIRRIIEEMRRRSEESNKRIREIIERARRRLEELIRRGVPKEDVERVLEEAIRRVEELLKESRRILEEVIKRVDKLLKDSERILKRVEDLVRELLRRVDTEEVKKLLTDLKRLVDEIRKHNKRLLDELRKEVEKSERENRRLLEEVRRTVDEMRERAR

SEQ ID NO: 3343 - protein, 180 aa, Artificial Sequence; identical to SEQ ID NO: 3342
  Synthetic

SEQ ID NO: 3344 - protein, 180 aa, Artificial Sequence
  Synthetic
SAEDKARKIAEDAKKEAEDSNRDAHRIAEEAKRRARKINEEARELIERAKKELTRLRREGADKRAVKKAAEEAIEIAERALRESDKAARDAIRLAEEALRRSKRIAEEARKLARDALEKVKAEEAKKLLDELRKAAEDIRRNNEEALKDLRRAAEEIRRHNEELLRRAREAAKKARDDAE

SEQ ID NO: 3345 - protein, 180 aa, Artificial Sequence; identical to SEQ ID NO: 3344
  Synthetic

SEQ ID NO: 3346 - protein, 185 aa, Artificial Sequence
  Synthetic
SAEEAVKRVEELVRRVKERNKRLVEDVEREVRRVKKRSEETNRRVKKLVERVKEDLDKRVSDEEKVKRIEDLLREILDTVRRLDEDSKRLLDEILERARRLIKKSDELLDRILKRARDMVKDLKDDKDKLEEVLREVRDRLADVERKSERVVEEVERLLREVVRKNEDVLRRIEELLRDVEEKAR

SEQ ID NO: 3347 - protein, 185 aa, Artificial Sequence; identical to SEQ ID NO: 3346
  Synthetic

SEQ ID NO: 3348 - protein, 185 aa, Artificial Sequence
  Synthetic
SVEELVREVEKRARKVKRDSDKTNKDSTKLVKEVKDRSRRTNEEVKKEVERVKEDLEKRVSDKEKVDRLKKELEDILRRVTKLDEESTRELKKINEEVTRMDEKSKKELDRILEELRRMAEKLKDDEDKLKEVVDRIRKLLEDVKRENEDVKRRSRELAERVREENDKVSKEIRELLEEVERRAK

SEQ ID NO: 3349 - protein, 185 aa, Artificial Sequence; identical to SEQ ID NO: 3348
  Synthetic

SEQ ID NO: 3350 - protein, 185 aa, Artificial Sequence
  Synthetic
SAEEMREEVKRLVDKNRKDNREVEKKSTRLAEDVKRKSEETNRKIREEVERVKKDLEERVSDEEKVRKLKDDLRKILETVDRMDETSVRELEKINRDLRKLVAENDELTDRVLKEAEKLVKDLREKEEKLKEVLDEVRRLIKEINDHSREVSKTSEKLLRDVLKKNEDVLREIERLLEEVRRRIK

SEQ ID NO: 3351 - protein, 185 aa, Artificial Sequence; identical to SEQ ID NO: 3350
  Synthetic

SEQ ID NO: 3352 - protein, 178 aa, Artificial Sequence
  Synthetic
REVEEITKEIREMNEESKRLLEEVREKIERLSRESNRLLEDSKREIDEAIRRVEELLDKEDKKDVVEKLKEVVKRAHERNEKIVKDDRDVVREVKRLLEEIVRRDRELAERVIRRLKRDGDDKDIITEIERTNDETEERVRDIERRIKESSDRNDKRAKEISERIKRLLEEVDKKVKE

SEQ ID NO: 3353 - protein, 178 aa, Artificial Sequence; identical to SEQ ID NO: 3352
  Synthetic

SEQ ID NO: 3354 - protein, 184 aa, Artificial Sequence
  Synthetic
DLEELVKEVERRVRRNKTETDRLVEEVERSVRENRRRIEELVRRVEKEVRRIKEDLKRKLSDEDKVRRILEELDRVLREARERLKRVEDKNREVLERVRELAKESVRRTEDALRRAKELIDNIRDKDVLEKVAREIKRLIEESNRLDKEVEDEVREMSKDVNRELERIAEEIEKVLRDVERKLR

SEQ ID NO: 3355 - protein, 184 aa, Artificial Sequence; identical to SEQ ID NO: 3354
  Synthetic

SEQ ID NO: 3356 - protein, 173 aa, Artificial Sequence
  Synthetic
SLEELLKEVKKLVEDVHRKNKKNVEDVRRLVERLRKENEENVEEVRREVKKVKEEIGDKDVLDKLEKALKEVERLNEESTRRLEKVLREIEELNRKSSEDLKRVVDEVRKLINNNAPLEEVRRRVEELVTDVDRSSKENHRRIRKVVREVERTTEENHRRIRDIVRRVREEAK

SEQ ID NO: 3357 - protein, 173 aa, Artificial Sequence; identical to SEQ ID NO: 3356
  Synthetic

SEQ ID NO: 3358 - protein, 176 aa, Artificial Sequence
  Synthetic
SEIEKAVRELEELVKDNERKSKKSVEDSERIVKEIRDRVRRVVERVRKVVEDIARAGVPEEVIKEIKRIVEEAEKLLRDVIRRIETVVDENRRLLERSNRKIRKVVREAKELLDRLRDDELRKVVERARDLIRKIREESKRSHDRITKLAEDIKRELEKIERRLEKLAEELERKAR

SEQ ID NO: 3359 - protein, 176 aa, Artificial Sequence; identical to SEQ ID NO: 3358
  Synthetic

SEQ ID NO: 3360 - protein, 176 aa, Artificial Sequence
  Synthetic
SEVDELRKEVEEMVKRNKDETDKSVKESKEIVDEIRKRIKEVVDEVRRFVEDIRREGVDEKVIREIDKVVEEAKKKLDDVLEDIKRVVDENRKRLDDSNKEIRDVVKKADDLLKKLRSRALEDVARRLRELLKRINDKTRESHKEIKRLADEIRKKLEDIVRELEKLLREIKERAR

SEQ ID NO: 3361 - protein, 176 aa, Artificial Sequence; identical to SEQ ID NO: 3360
  Synthetic

SEQ ID NO: 3362 - protein, 176 aa, Artificial Sequence
  Synthetic
SEVDEVRERLERVVRRIEREVEKSERDSERIVEKNKRDTDRVDREIEKVVKKIRDRGVDERVVREVERVVEELRELLERSNEELRRVVKENKDLLREVIERVRKVVREIDDLLRKLRSRALEEIEKRARELLKRITELLRESHERIKRLAEEINKKTEKVVRDIRKLLKEIEDKVT

SEQ ID NO: 3363 - protein, 176 aa, Artificial Sequence; identical to SEQ ID NO: 3362
  Synthetic

SEQ ID NO: 3364 - protein, 176 aa, Artificial Sequence
  Synthetic
SEIERLREELERVVRAIERTVTESVRESKEMVDRNKRATEKSVRDSEDMVREIEERGVPKEVIEKIRRVVKENKELLEESNRKLEDVVRKNEELLREVERAVRDVVRRIEKLLRDLRSRELERVAKEARDLLREIKKLLDESTETIRRLVKEINDETERSHRKITELAKRLKEEAK

SEQ ID NO: 3365 - protein, 176 aa, Artificial Sequence; identical to SEQ ID NO: 3364
  Synthetic

SEQ ID NO: 3366 - protein, 176 aa, Artificial Sequence
  Synthetic
DEVRELVEEVERVVKRNKDESKKSEEESREIVREIEKRVEDLVRTVEEVVKEIERKGVPEEVIKKIREIVKRVKKLLDDVRRKIEKVVRENKELLERSNREIERVVDRARELLKKLRSRELEKVADTLRKLLKEINEKLERSVRRIRELAKEIKDELRRIEEELRKLAKELDDEAK

SEQ ID NO: 3367 - protein, 176 aa, Artificial Sequence; identical to SEQ ID NO: 3366
  Synthetic

SEQ ID NO: 3368 - protein, 174 aa, Artificial Sequence
  Synthetic
DRTREVMERIERLLEDSRRKTDKVRREIRKLLEDVHDKTRRVAKEIRDLLDEIRRLLESGVDSKEVERRVREVFDRLRRLVEESERLLEEILRRLEDMARRSKETSERIVRELEREGIEEEVVKKARKKVRENAEEAEEVRRRIRRSVEENRKELRRLEKELKDVLDEIRERVR

SEQ ID NO: 3369 - protein, 174 aa, Artificial Sequence; identical to SEQ ID NO: 3368
  Synthetic

SEQ ID NO: 3370 - protein, 174 aa, Artificial Sequence
  Synthetic
RELEEVRKDIERLLKEVEDTNRRAKERVKRLLEEVHDDTRRAVERIRKLLDEIRKLLEGGVDDRDVRKLLEDVLRELERLVRRSVEELERVLKELEDLNRTSIRLLEKIVDDLRRAGIDEEVVKEIEKMLEKIARHARKSDKEAKESVEDNRRRLEKVRKEVEDMLDEIRERAR

SEQ ID NO: 3371 - protein, 174 aa, Artificial Sequence; identical to SEQ ID NO: 3370
  Synthetic

SEQ ID NO: 3372 - protein, 174 aa, Artificial Sequence
  Synthetic
DREKEVADRIRKLLEEIREESERVAKEIRELIKEVHKRTKEVAEEIRRLLKEVEELLRNGVDSEEVRRLLKEIVDRLRELVKESEKELDRILDRLKKLVEKSKRESEKVVKELRDAGIDEEVVKEIERRLRENERKLRELEKEIKKLVEDNRTRLRELEDEIRRVLKKITDEVT

SEQ ID NO: 3373 - protein, 174 aa, Artificial Sequence; identical to SEQ ID NO: 3372
  Synthetic

SEQ ID NO: 3374 - protein, 180 aa, Artificial Sequence
  Synthetic
SELEKAVEDSRRLDRRVEETLRDVTRRVRETNKEVEDMLEEVRERAERLLREIEEKLTDEAVERVLKKIIDDIERLLREIKKLLEDSNRELRRVVKEIRKLLEESLKRSRDAVEEVRRKGLEDELRKVIDENRKSVETIEEELRRVEKEDEDTLREIEEKLRKAIEELEKKLKEILDRLR

SEQ ID NO: 3375 - protein, 180 aa, Artificial Sequence; identical to SEQ ID NO: 3374
  Synthetic

SEQ ID NO: 3376 - protein, 173 aa, Artificial Sequence
  Synthetic
REREELVERVRELLKEVEDRDREMVERSERLNERIRERDKEVEDRSRKLDEDIERLLRAGARDDEVRRLLEESLRTTEKAVEDTERLLRESLERSKEVVKETKRLLDEIAEEIKRIGGEEVLKEVKDAVDTLKKHSEDVIRKDEESVRDLRRHSEDVLRKNKEMVDDIKAKAE

SEQ ID NO: 3377 - protein, 173 aa, Artificial Sequence; identical to SEQ ID NO: 3376
  Synthetic

SEQ ID NO: 3378 - protein, 181 aa, Artificial Sequence
  Synthetic
DEEDKLREVLKDVERRVREMLRENNELIREVAETSERLLRENNELIERVRKEVTRLLKELEKVSDKRLVKEVVDRVRKLVDELKKHADKLVEESTRLVEELKKHADDLVRRVRELVERVERKIKDIREIVETIRKILREIEEHAERNKTRLEEENKKVREHVERNKKDLEETLKEVEDRAR

SEQ ID NO: 3379 - protein, 181 aa, Artificial Sequence; identical to SEQ ID NO: 3378
  Synthetic

SEQ ID NO: 3380 - protein, 181 aa, Artificial Sequence
  Synthetic
SKEDKLREELKEVEKTVRELLKRNNELIERVREEVERRLEENNRLIKEVKDRIDDLLRKLKDDSDERSVRRVRETVTRLVEELKRHADRLVEEVRRLVEELKKHADEVLERVKRLVDDVTRKAKDIREIVKTIKEILDEIRRHLERNKDRLEKELTRVRETAEKNKRDLEKVLEDVDRKAK

SEQ ID NO: 3381 - protein, 181 aa, Artificial Sequence; identical to SEQ ID NO: 3380
  Synthetic

SEQ ID NO: 3382 - protein, 182 aa, Artificial Sequence
  Synthetic
DEAEKLEREVRKELEENREELERSTEESERLLKHNEDELRKSEEESKKLLREVEKELRRVPKEKLDKVERDARDILRKNKEMVDRVRKTVEDILRDNRRVVDESRRLSKEIERRVREVSESSDKRVLDEVVKEIRRLIEEVKRTTKEMNKKIRKLFEESNRKLEEAHRDIRRKAERVKRELK

SEQ ID NO: 3383 - protein, 182 aa, Artificial Sequence; identical to SEQ ID NO: 3382
  Synthetic

SEQ ID NO: 3384 - protein, 182 aa, Artificial Sequence
  Synthetic
KELDEIREEVDRVLRENERRLRTVKKEARDVLEHNRKRLEELRRKIEEVLKEIEEELKRVPEKKADEVRKRIRDILEDLRRVLREVAETAKRILDELDKVVRESEKLSRKIKDDVTKILKSKDEEVLRRVLERIRRLIERVKERTKRMTDDMRRLIEESNDKLRRAEERIRKLLEEVKRTLK

SEQ ID NO: 3385 - protein, 182 aa, Artificial Sequence; identical to SEQ ID NO: 3384
  Synthetic

SEQ ID NO: 3386 - protein, 182 aa, Artificial Sequence
  Synthetic
KKVEDIKREAEKVIKESEESIRRNERELDEVIKESERSIRRNERELERVLKELRDSVARLRGEELERAKRVVDELEEFVKESKELLKRSLDELDKAVKDSKRLLEESLKRLEKVVREIEEKLRERPDDRIREELKKVADEIRETNKRIHEESKRVVDEVRRTNEEIHKRSAKVVKDIKDKIK

SEQ ID NO: 3387 - protein, 182 aa, Artificial Sequence; identical to SEQ ID NO: 3386
  Synthetic

SEQ ID NO: 3388 - protein, 182 aa, Artificial Sequence
  Synthetic
EEVERITEDAKRVIDESRKTIKRNEDDLRRVIEESRETVERNRKRLEEVLRELEERVRRLRGEELERARRVVEELRKMVETSVRLLRRSLEELKKLVKESVELLKRSLDELRKLVEEVRERLRERPDKRIEEELKRVAEEVKKINEDIHRRSKEEVDRVREINEKIHRDSERVAEEVRRRIK

SEQ ID NO: 3389 - protein, 182 aa, Artificial Sequence; identical to SEQ ID NO: 3388
  Synthetic

SEQ ID NO: 3390 - protein, 177 aa, Artificial Sequence
  Synthetic
EELERLKEEVEEIVRRLKRELERIEEEIAKMVRDSEKSLEEDEREVRKVVEELRRRGNGGEIEKLVEELRRLSREAVRRSEKLLEEIRRLVEKVVREVERVVDELRRRVEEVVRKIETEEILRRVKEEVEKVARDIKAIIEKVAREVKEVLDRIREVNKRAHEETRKVADEIEKRAK

SEQ ID NO: 3391 - protein, 177 aa, Artificial Sequence; identical to SEQ ID NO: 3390
  Synthetic

SEQ ID NO: 3392 - protein, 179 aa, Artificial Sequence
  Synthetic
DEVERIAKELTDVLDRIRKAVETDKEEIKRVLKEIEEAVRTNEEKLKDALRKIREGPVDEKIVRTAERLAEELVRNSRKILTDISDLARKLAENSERILRKIEKLIRDLVKELEDLRKESERALERVEEKARELVRRVDELLRRSHERTKELAERVRRLLKKSDEETERLARDVERKIK

SEQ ID NO: 3393 - protein, 179 aa, Artificial Sequence; identical to SEQ ID NO: 3392
  Synthetic

SEQ ID NO: 3394 - protein, 179 aa, Artificial Sequence
  Synthetic
SEVERITERLKEVLKEIKELVETNSEKLKRVLEEIKKAVEDNTRTIKKVLEEITRAPVDKDIVKDIREELERLVEESRRILEEVERLIRELMKNTERILEEAERLAERLVRKLEALRDGSEEMLKRVEDEARRLTERVRKLIEDSDRETEKLVRRVRELVKRSHEKVKELVDRVRKRIE

SEQ ID NO: 3395 - protein, 179 aa, Artificial Sequence; identical to SEQ ID NO: 3394
  Synthetic

SEQ ID NO: 3396 - protein, 179 aa, Artificial Sequence
  Synthetic
SEVERIAEEVKRVLEKIRRDVEENRKRIEEALKRIEKELRDNERRLREVLDEIRKRPVDEEIVKEVKKRAEDLVRNSERIVREVERLARELLKKTEDILRKIKRLAERVLKKLEELRDSSEDALRAVEEEIRKLEDEVRRLIETSHKEVEDLAKEVTDLLRESNERTEDLRREVDAKRR

SEQ ID NO: 3397 - protein, 179 aa, Artificial Sequence; identical to SEQ ID NO: 3396
  Synthetic

SEQ ID NO: 3398 - protein, 184 aa, Artificial Sequence
  Synthetic
SDEERLLRTITRVLEENKKSVDDDLKKNEDVLDENRRRVERWEEALRELLKRVEDKVKDLKKDGRDEELKRVIELVRRALDRVRDELKKSLDESKELVDESRRTLDESRRLVEEVLREVKELLREGVDTDEIRRVLEKVKEELDRTDEKSRDLSRKVRDRIRESNREIEKLLEEVRERLERETK

SEQ ID NO: 3399 - protein, 184 aa, Artificial Sequence; identical to SEQ ID NO: 3398
  Synthetic

SEQ ID NO: 3400 - protein, 184 aa, Artificial Sequence
  Synthetic
READELRTRAEKALRDNRESVERLKRELDRVLKENERTVRELKERVKEVLKDVDKKVKDLKKEGRDEDLRRLKDRVRRVLRRVEELLERSRRESERMVREVRRLLEESKRLVEEVLREVEELLRRGKPREEIRKVLEDVRREVEETDDRIRKVLERARRESEKVDRELKKELERVRKELEEETK

SEQ ID NO: 3401 - protein, 184 aa, Artificial Sequence; identical to SEQ ID NO: 3400
  Synthetic

SEQ ID NO: 3402 - protein, 175 aa, Artificial Sequence
  Synthetic
DRERRVLEELRKLSEDSKRLLERIRERMRRLAEETKRRARDILREVEELSRRVKELLDGGKDAREVLEDNKRVVDEVREKLKRLLEENKRIVDEVEKLLREVIRDNERVVEKVARDVREIEEVKDDVRRSSEEVKEEVERLIREAKKSTDEVRELLKELEKRLRESIEESKRKAE

SEQ ID NO: 3403 - protein, 175 aa, Artificial Sequence; identical to SEQ ID NO: 3402
  Synthetic

SEQ ID NO: 3404 - protein, 178 aa, Artificial Sequence
  Synthetic
EEVKRMEDRLEEVAKRADEESKKVMDELEKIVRDVLRESKRLTEELRRIADRVRKELRTDEVVRRVVKELDDVSKRNEEVVTKVLEELDRIVEKVEEINRRVLDELRRIVDEIRRRVTDKKELDRIEKRVREIKKRSEDSVRTIRERVRDAKRKLERSVEEDKREVKEIKERLEREAR

SEQ ID NO: 3405 - protein, 178 aa, Artificial Sequence; identical to SEQ ID NO: 3404
  Synthetic

SEQ ID NO: 3406 - protein, 178 aa, Artificial Sequence
  Synthetic
SEVDDLKRKLDEVVRRAKEESKEISERLEEIVRDAERLLKELHEEDERIVDRARKEIRTREMVEEFVRRSEDVARKTTEIVKKVVEELRRVSETNERVVERVLRELDEIVRKIEEDVTDRDKLEKIRDAVRKVKEELERSLEKDRKRVTEIEEKLKKLVEENRRTSKRVKEELEEKVR

SEQ ID NO: 3407 - protein, 178 aa, Artificial Sequence; identical to SEQ ID NO: 3406
  Synthetic

SEQ ID NO: 3408 - protein, 179 aa, Artificial Sequence
  Synthetic
RELEEIKKRVEDIMRRIEDLLRENEKKIDKVRKDIRKSLEENKRKVEEVRKDLKRLLDEREDDRLRELIKDAERLLKEVLDHSRKSVRDVEDLLEKLLRHSKELVERAKKALTDVLRKVEERPEEEVKKEIERLAKKLEEELERSNRESDRLVREARKHNEESDRRSEELARRVRERLR

SEQ ID NO: 3409 - protein, 179 aa, Artificial Sequence; identical to SEQ ID NO: 3408
  Synthetic

SEQ ID NO: 3410 - protein, 179 aa, Artificial Sequence
  Synthetic
KREEDVKRDLKRVADESRKSDEDIKRRLDRLVKEIRELHKKTTDELKKVADEVRDRLRKVKDDKDVLRKILDDLRKMLEEVKRTDDRIVERLEKLVREVERLAEESLKRSKDKLREVIKRVKDIDELREDVKRVEDENRTSLREIKRAIEKVLDESRKLVEENRRRAEKIIKEVEDTLR

SEQ ID NO: 3411 - protein, 179 aa, Artificial Sequence; identical to SEQ ID NO: 3410
  Synthetic

SEQ ID NO: 3412 - protein, 179 aa, Artificial Sequence
  Synthetic
REEEEVTEELKRLADKSRKSDEDIERTDRRVTEEIERLHEETTRELEKVRRDVDRELKKVKDDKRVLEDILRKLDELLKRIKKKDEDILKELRELLEKSIRDLERSLEESRRALEDVVRKVKDIDELKKEVRKILEENKRSLERIRRHSTRVEEKSRKLIKENDDRLKKVIEDVRRKLK

SEQ ID NO: 3413 - protein, 179 aa, Artificial Sequence; identical to SEQ ID NO: 3412
  Synthetic

SEQ ID NO: 3414 - protein, 179 aa, Artificial Sequence
  Synthetic
SEKDKVTKELEDVARESRESDKEIKRELDEVVEESERLLREIRRRLEKVAEEVRRALEKVKDDKRVLKEILDRLREVVEEVKRLAEEVVKRNREVTRRIKELVRKSLEDSERVAREVIKKVREIEELKRRVEEIIRENEESVRRIAKRADDSNREIERLVDEIRRRAEEAIRRVTEKVR

SEQ ID NO: 3415 - protein, 179 aa, Artificial Sequence; identical to SEQ ID NO: 3414
  Synthetic

SEQ ID NO: 3416 - protein, 179 aa, Artificial Sequence
  Synthetic
KEEDDVRRKLEKVVREIDKLHKESTERDRKVREDSEETDRRIKEELKKVVKEVRDRLREVKDDKEKLRKILDDLRKMITDAKRLAEDSLRRSRELLKRSVETDERITDRLRKLLKEVIDEVDKIEELKDEVRKATEKSEDLVRRNEEHSRRVIEENERTLKDIADEAERVIKEVEDRLR

SEQ ID NO: 3417 - protein, 179 aa, Artificial Sequence; identical to SEQ ID NO: 3416
  Synthetic

SEQ ID NO: 3418 - protein, 179 aa, Artificial Sequence
  Synthetic
REDEEVTKELEEVIREIEELHERSTRKLKEVVDRSRELLDRVRRRLKEVVDRIRELLERVKDDKDVLREILEELRRVVKEVKDLLREILERNTRVTEDVVRTDEEITKRLRDMAREVIKKVREIEELRKRVEEAIRKSEELVKENTERAKKSNEELERRVRELEERAKRAIEEVKEKIR

SEQ ID NO: 3419 - protein, 179 aa, Artificial Sequence; identical to SEQ ID NO: 3418
  Synthetic

SEQ ID NO: 3420 - protein, 179 aa, Artificial Sequence
  Synthetic
SREEDVDRKLDEVIERSRRIDEEILRRDKEVVDEIRKLHKESTDRLKEVVDRVDKELKEVKDDKEKLREILKELREMVRRVEKTDDDISKELEDLLRESVRLAEESLKESEELIRKVIEEVKDIEELKKKVTEAIEENRESVEEIRRHSEEVKKESEKRVKENRDRARRAEERVEEMLR

SEQ ID NO: 3421 - protein, 179 aa, Artificial Sequence; identical to SEQ ID NO: 3420
  Synthetic

SEQ ID NO: 3422 - protein, 178 aa, Artificial Sequence
  Synthetic
DREREVKKRLDEVRERIERLLRRVEEESRRVAEEIRRLIEEVRRRNKKVTEEIRELLKRLKDKEEVRRVLERLRKLNKESDELLERILERLRRLVEKTNRLVKKIIEELRRLVEKIVREVPDVKELREELKKLERKIEKVAKEIHDHDKEVTERLEDLLRRITEHARKSDREIEETAR

SEQ ID NO: 3423 - protein, 178 aa, Artificial Sequence; identical to SEQ ID NO: 3422
  Synthetic

SEQ ID NO: 3424 - protein, 178 aa, Artificial Sequence
  Synthetic
DEEEKITRDLEKVEDEIRRLLEEVRRLSKKVKEEITKLLEDVNRESEKAVRKVRETLKRLETKEEVERVLRELEKLMRESDKLLKDIVERLRRLLEETNRLLKEIVDRLRKLLKELVERLDKVERLRKRVTDVIRKLEEVLKDIHRHDKEAIEEAERRLEDNHRRNRRVLEELKRRAD

SEQ ID NO: 3425 - protein, 178 aa, Artificial Sequence; identical to SEQ ID NO: 3424
  Synthetic

SEQ ID NO: 3426 - protein, 179 aa, Artificial Sequence
  Synthetic
SEEETVEELVRRAEEKSRRILEDSKKKVRDIERENDEILKRSRDRVKKAEDDLRRVVEKRDEEEVRKILEDLKRLLEKVIKTDEDIVKTSRDLLREVIKKDEEIVEKLKRLLRDMLEKAKDRGDERILRELERVVEEIDREHERTKEELKKVADESRKAHRESERDLERVIREVRERLR

SEQ ID NO: 3427 - protein, 179 aa, Artificial Sequence; identical to SEQ ID NO: 3426
  Synthetic

SEQ ID NO: 3428 - protein, 179 aa, Artificial Sequence
  Synthetic
SEVERVRKTVEEIKEKNERILKTSKDEVRRILEESERMLEESKKRVDEVREEAADVVRKRDEERVRRILRELEDLLRRVIEEDKRIVERLRRLLKRVIDTDRRILEESRKVLEDVIREAEERPDDRILEKLEEAAKRSDELHKRSRDDLRRVAEEIKKLHEETRRKLKKVVDEIRKKLK

SEQ ID NO: 3429 - protein, 179 aa, Artificial Sequence; identical to SEQ ID NO: 3428
  Synthetic

SEQ ID NO: 3430 - protein, 188 aa, Artificial Sequence
  Synthetic
STLEEVRERVDRVKKKLKKLLEEVTEINERSKKEIDEILKESEDRVRKVKEDLKRVVKEDKDGDRVRKIIEEAKKKLDEVLENSERIAREVKKDNDDSNREVKRVIEDIERKLDEIVKKIEDLERKGMDEEVLERVLRELEELTRRVEKEIRDLLKRIEDSSRRVRELATESRKKLEDLVREIKERLT

SEQ ID NO: 3431 - protein, 188 aa, Artificial Sequence; identical to SEQ ID NO: 3430
  Synthetic

SEQ ID NO: 3432 - protein, 183 aa, Artificial Sequence
  Synthetic
SSEEKVREEVERVREEITRLLRENEDTVRRVDEKAEKALRENKERVDRLREEVRKLLEKDKDKRLEEVLKRVEELLKRSIDKSREVLDRLRKMLEKSLKLSKDILKELEKLLRDIERRVRALTEDDFVRKVTEELKKVTDRIRKLLEESRKHTERVRREAEKLLKEIKDETKKVEEEVRRRAK

SEQ ID NO: 3433 - protein, 183 aa, Artificial Sequence; identical to SEQ ID NO: 3432
  Synthetic

SEQ ID NO: 3434 - protein, 181 aa, Artificial Sequence
  Synthetic
SSREKIKDDLRKAVEENRRLLREVRELLREMLERDERILREIERRLDEARKRLEEVARNNVPEKVVKRLVERVVEEVKRLLETSKKTVKEVVEEIKRLLEEIEKSSRDVVEEIRRLLEETGEGRAVEELKKELRRLEEESRRAVEDLKRLLDELKERTDRVVKKLDETLRKLKEDVDRKAK

SEQ ID NO: 3435 - protein, 181 aa, Artificial Sequence; identical to SEQ ID NO: 3434
  Synthetic

SEQ ID NO: 3436 - protein, 182 aa, Artificial Sequence
  Synthetic
REIDELRKELDEIRKRIEKVIEELKRHLDEVDKRAEDLAKELDDLTKTIERDAERRIREDKKSKEVVERVKRLLDKSNTDSDRVVKTVKRLLDENNKTSDKVVKDVKKLLDEVLKKVRDGPVDDKVIREVEERVKRIKEDVDRVLEDNSREVERVKRKVDKMLKRNKDEADRIRKKMDDDLR

SEQ ID NO: 3437 - protein, 182 aa, Artificial Sequence; identical to SEQ ID NO: 3436
  Synthetic

SEQ ID NO: 3438 - protein, 182 aa, Artificial Sequence
  Synthetic
SVIERLKEELKKIEEDARDMAKKLNKETEDILRRARKLARELEKHLEDVKRKIDELIKEDKKSEEVVKEVKKELDRNNEESKRVVEEVRRRLDESNKKSREVAEDVKRLLDEILEKVRRGPVDKKMIEEVERDVRRIKKEVDRLLEENTERIEEIKKEVDELLKRNTDEVEKVKKKVDEDRK

SEQ ID NO: 3439 - protein, 182 aa, Artificial Sequence; identical to SEQ ID NO: 3438
  Synthetic

SEQ ID NO: 3440 - protein, 179 aa, Artificial Sequence
  Synthetic
KIEEDLERSLKKSEDELKELRDRLRKSNKEVTDDAERIKKEVEDSNREVEKRVRDLERRGVDKDELRRVLEELSKIVEEIKELIERLLEELTKIVEDLERELKELLKESRRIVEELRRLRSEEARKVLEENEEVVRRIVKKVEDILDDHRRVVKEVRDRIERLLKEHKKIVEDADKDLT

SEQ ID NO: 3441 - protein, 179 aa, Artificial Sequence; identical to SEQ ID NO: 3440
  Synthetic

SEQ ID NO: 3442 - protein, 173 aa, Artificial Sequence
  Synthetic
REEEEVAKKLERAAEESRRLHEESKRDHERATDEIRRKAEATLRELKRVIDEIERLADERDKEDVRRRAEELLRRVKKASEDIVKELRDLVERSLRRDKEIVDRSKKVLDEVIREVDVEEIRRRVETLERENRKAEEESRDKVRKSERRLEELNKRHEDLVRELEERLERKRK

SEQ ID NO: 3443 - protein, 173 aa, Artificial Sequence; identical to SEQ ID NO: 3442
  Synthetic

SEQ ID NO: 3444 - protein, 173 aa, Artificial Sequence
  Synthetic
DEEEKVLRELEEVIRTSRRLHKRSLEELDRVLEESKALHRESKRALEDVTREITKLADDRDKKDVVRRLKELLERILRTDEKIVRDSEEALKRIEEEDKKIVRRSEEVLKRVIDKVDVERIRKLVDDLRKENEKALRESKKRVEEIRRRNEEAIKDSKKDVEDLERDLERKRK

SEQ ID NO: 3445 - protein, 173 aa, Artificial Sequence; identical to SEQ ID NO: 3444
  Synthetic

SEQ ID NO: 3446 - protein, 173 aa, Artificial Sequence
  Synthetic
SDEERVLEELKKVIKESRDLHKESLDDLRRVIEKSRRLHEESLERLRRAIEEIERLMDERDKKDVVREAEKILREVRKEDEDIVRDSERVLERVKRTDREIVKRSKEVLKRAIDKVDVEEIRDLVRTLEEDNKRMEERSRRTVRKLEKENDDARKESERLVEELERRLEEKRR

SEQ ID NO: 3447 - protein, 173 aa, Artificial Sequence; identical to SEQ ID NO: 3446
  Synthetic

SEQ ID NO: 3448 - protein, 183 aa, Artificial Sequence
  Synthetic
RDVEEVKKRSDTTLKRIEELIRRVNERSKKSIKEIRDRAKEVEDEVRELARKIEEDARRRKESKELLEELLRRIKKLVDEIVDEIRRLLEKNKRIVEDSKRILEELVEENSRRVEEIKKRNKELDEVVRELEKINDKSRKRVEDAVRSNEKLLEDSERDIRRVIERLKKLLEDLKRKLEEIER

SEQ ID NO: 3449 - protein, 183 aa, Artificial Sequence; identical to SEQ ID NO: 3448
  Synthetic

SEQ ID NO: 3450 - protein, 183 aa, Artificial Sequence
  Synthetic
SDAERVMEESRRTIEKIKKDAKEMNERSRKTVDEIRERLERLLRELERIAEEIRRELEKRREVKDEVRRLLEEVEKLAREIEETVRRLVEKNTDLVRRSLERLDELVKTNHDLVEKIKDRNKELEEFVRELKKLNDKSRKDVEDLKRSNEEINEDSKRKVEEIIRRLEELLKEIRRELEDVER

SEQ ID NO: 3451 - protein, 183 aa, Artificial Sequence; identical to SEQ ID NO: 3450
  Synthetic

SEQ ID NO: 3452 - protein, 184 aa, Artificial Sequence
  Synthetic
SVEEDLKRLVDEIRRRVEKVKRDLERIVDENRKRVEESKEESKKSVEEIERRVREAAKRISDERLIKTLRRIVEEVERVNREVLRKDDELLRESEKVVTEVVKRLDEIVERARKVVEEVAKRIRDEKVADEVRKRLRKMIRDLEEVAREVKRELERLHEETERSSRDAKRRSDKMARDLERTEK

SEQ ID NO: 3453 - protein, 184 aa, Artificial Sequence; identical to SEQ ID NO: 3452
  Synthetic

SEQ ID NO: 3454 - protein, 184 aa, Artificial Sequence
  Synthetic
SSEEKLRELVKRIKRRVEEIIRRLEESVERDRDEVRRSKERLEALVEEIRRRVDDIEKRIDDERLIRTLREIVRRAEEVVRRAVEEDRKISDENEDVVRKVVKRLEKILREIEKVVKEVADRLRSEKAVREVEEELRDMERKLEKVAEEVTRRSKEVTEKLRESSDRVEKELRRIIEELERVAK

SEQ ID NO: 3455 - protein, 184 aa, Artificial Sequence; identical to SEQ ID NO: 3454
  Synthetic

SEQ ID NO: 3456 - protein, 184 aa, Artificial Sequence
  Synthetic
SVREDLKRLVKEIEDEVRKSKKDLDDSVREDKREVRESKEDSKRSVKRSEEEVRKIKKRTDDDELVKRLEDILRENKRVNDEAMKRDDKVSKENEDVVRKVVREDEDVLRTARRVVKEVSERIRDEEVAKRVRELLEEIMRRLRKTSEEARRRSKKITDDLRESSKKVREDSERLRKRLEEEAK

SEQ ID NO: 3457 - protein, 184 aa, Artificial Sequence; identical to SEQ ID NO: 3456
  Synthetic

SEQ ID NO: 3458 - protein, 187 aa, Artificial Sequence
  Synthetic
DAERKITRLLEEIRRESKRSSEEIKKSLKENEDEVRRVVEEIRKRLREIEKEVKEVLDRLRDQREVVDLLRRVLERVREIVRRIEDELRRVLEKSERSVEEIHRRNEEVVKKVEDVVREVRKLAKENSEKLVEEVLREVKRIIEENRTLSERVKEHNEKSHRESEELAKRVKELLKEIERDIRRLEK

SEQ ID NO: 3459 - protein, 187 aa, Artificial Sequence; identical to SEQ ID NO: 3458
  Synthetic

SEQ ID NO: 3460 - protein, 181 aa, Artificial Sequence
  Synthetic
SDAERVLKESKESLEELERRVTEALKRSRDSLRRLKEVADEARRRLEEVLERIARKKDSREELRELLERLRELVEKVVRDVREMLKRDEDLNRRVVEEVREILDRDRKLVKRVMDELDKDKNSEVKERLKRSLEETEKRVREVEERLKKTVEDTRKVVEDIERELERLLREVEEVVRRIEK

SEQ ID NO: 3461 - protein, 181 aa, Artificial Sequence; identical to SEQ ID NO: 3460
  Synthetic

SEQ ID NO: 3462 - protein, 181 aa, Artificial Sequence
  Synthetic
EEAERMLRESEASLRRIEKIVREALEASRRTVEELKKVVERVLREVRKLIEEIEKKKDVREELEKLLREVEERVRRVEEEVKEVLDRDRELVDRVLRRVRELLERDEKLNRDVVRRVDKDNMDEVRERLKKTVEDSKRVVEKAEEDLRRSLEDTERLVREASRRLRDLLRELRRIVEEIKR

SEQ ID NO: 3463 - protein, 181 aa, Artificial Sequence; identical to SEQ ID NO: 3462
  Synthetic

SEQ ID NO: 3464 - protein, 181 aa, Artificial Sequence
  Synthetic
SEDEKALRESKKTTDEIRKRVTEMEKRSREVVKEIRDIIERVLREVRRVLEEIRKKKDSREELDKLLRELEKLVKDVVKEVTELVDRDRELNKEVVKELRRLLEEDERLVEEVVRRIEKDKNSEAKKRLKDSLDRTRKTVEEMTRRLEKTVKETEDLLREARERLEELLRELERVADEKRR

SEQ ID NO: 3465 - protein, 181 aa, Artificial Sequence; identical to SEQ ID NO: 3464
  Synthetic

SEQ ID NO: 3466 - protein, 181 aa, Artificial Sequence
  Synthetic
SEDEKVLRDSRKVLREIEEVVKEVLKRSKKLVEELEDIARRVLKESEDSNKEARDKKDLREELRRLLEEDERLVERVTREVREVLDRDRRLNKEAVERVERLLEEDEKLNRDALRKLSKDNNDEVERRLRKTVRDTKEVVDRAREKLERTVRTTEETVKEIEKRLEESLRRSREDVKEREK

SEQ ID NO: 3467 - protein, 181 aa, Artificial Sequence; identical to SEQ ID NO: 3466
  Synthetic

SEQ ID NO: 3468 - protein, 182 aa, Artificial Sequence
  Synthetic
RVEDALRKLLDDVRRLVEEAERRLRTSNDKSRRLVEEAKRRLEESNERSEKLVRDVRRRIRDEDVKRVLEELLKRDHDVVRRVLERIDEMLERNSRLVKRVLEDIRRLLKRVREVVERIKRVRSKVVEEVLKELEELIKTAKKIIEDVLRASEDTIRRLEEIIRKVEEDSKRIIEEIERAAR

SEQ ID NO: 3469 - protein, 182 aa, Artificial Sequence; identical to SEQ ID NO: 3468
  Synthetic

SEQ ID NO: 3470 - protein, 182 aa, Artificial Sequence
  Synthetic
SAEDKLRKLLDDARRTVKEVEERLKKLNKKLEEDVKRVKRELRESNKKSRELVEKVKREVTDEDVKKKVEDLLKRDHDVVRRVEKELDDMLRRNHKLVRDVLRELRKLLEDVERVVERARRVRSEVVEEVLEELKKLIETVKRRAKEVLDRSEETIREIRKRAEDVLRESERIIEDIERMTR

SEQ ID NO: 3471 - protein, 182 aa, Artificial Sequence; identical to SEQ ID NO: 3470
  Synthetic

SEQ ID NO: 3472 - protein, 183 aa, Artificial Sequence
  Synthetic
KVEKRLTDLLKTVADEVKRVEDELRETVRESKEVVDKSRRDLERTVEESEKTVKDAERRVSEDLVRRIRKVLDENREVNDRVVKEDERILEENERVNRKVVEKIRDILRKIEEVVRRAAEEIRDEEVVKKVEKEIRELLERLKEEADRVRERSKKILTDLKKSSEDVKRESERMLKKLEDEIR

SEQ ID NO: 3473 - protein, 183 aa, Artificial Sequence; identical to SEQ ID NO: 3472
  Synthetic

SEQ ID NO: 3474 - protein, 183 aa, Artificial Sequence
  Synthetic
SVEERLEDLLREVTETLDTSRRRLEKLDREVDKKVKEVEKRLRETLKESEDTVRDVERRVSEELVKLVRDILERNEEVNREAVKRIRDILDEIKKLVEEVVRRDAEIVKEAERVVERVARDIRSEEVARRVEKELEDILRKLRKSSEEAERRIEEMLRRLDKVVKEMLKRSRDLLRTLEETTK

SEQ ID NO: 3475 - protein, 183 aa, Artificial Sequence; identical to SEQ ID NO: 3474
  Synthetic

SEQ ID NO: 3476 - protein, 181 aa, Artificial Sequence
  Synthetic
SIREDVERLAEELDRKSREIATRAKRELDEILRKDKEISDRARKELEEILKKLKEIADRDKDERKIRRVLEEAEDLVRRVVELNKKSLEEARKLVEDVLRLLEESLKESKDLVERAKERITGKEVEKRLDDALKRNAEEVEDVKRKLKDVLREVERTVRESEKDLRRVLEEVERAVREIRR

SEQ ID NO: 3477 - protein, 181 aa, Artificial Sequence; identical to SEQ ID NO: 3476
  Synthetic

SEQ ID NO: 3478 - protein, 182 aa, Artificial Sequence
  Synthetic
SEVDEVLKRSRDVLKRIDEIVKKVLTDSKRVLEDLRRIVKEVLDESKKVLEEIRKIKDSREDVTELVKRLHKRNKDVLDRVRKVVERNHRLNKRALEEVARLVKELHDLNKRALDEVRSDERAEEVERAMRKSSDDLRRKLEEVERRLRKSSEESKKVLKDAEREIRRSSDELRKVLEDIRR

SEQ ID NO: 3479 - protein, 182 aa, Artificial Sequence; identical to SEQ ID NO: 3478
  Synthetic

SEQ ID NO: 3480 - protein, 182 aa, Artificial Sequence
  Synthetic
SEVEDVLTKSRKVLKEIEEIARKVLEESKRVLEEIRRVVEEMERRSEDVLRELRRIKDKREEVREVVKDLHKKNEDVLRRVKKMIEENHRLNETVLREVRRLVKELHELNKDALRRVKDLERADEVRDEVRKSSEELRRVLEEAEERIRRSSKESKELLKRVKERIEELSRRLEKVLREIEK

SEQ ID NO: 3481 - protein, 182 aa, Artificial Sequence; identical to SEQ ID NO: 3480
  Synthetic

SEQ ID NO: 3482 - protein, 184 aa, Artificial Sequence
  Synthetic
DAEDELKKAEDRLRKSDEEAKKSIEDVKRELRRLLEESKKEIEKLIEELRRLLERAKEKPKDETILRRLEEIVRRIEERLRRAVEENAEIVKRIEERADRVVEESEESVRRIVEEIKKAKDRLRTEEVVERVLRKVERLLEENERLVKEVEDELRKLLEDLKRSSKKVRDEVKELAKRLRDEVR

SEQ ID NO: 3483 - protein, 184 aa, Artificial Sequence; identical to SEQ ID NO: 3482
  Synthetic

SEQ ID NO: 3484 - protein, 184 aa, Artificial Sequence
  Synthetic
SAEERIEEVKERLRRSDEEAKRKIDRLVEELRRLLEESKKEAEKVKKELRKLLEEVKRKPKDEKILKKIEEIVREIERTVEDMLRRNAEIVKRIEDRARRVVEESNDSVRRIEKRVDEALREVRTEEVVKRVEDELRRLLEENKKLVDDILDEVRRLLEELEKSSRKVKEDLDRLLEELRREDK

SEQ ID NO: 3485 - protein, 184 aa, Artificial Sequence; identical to SEQ ID NO: 3484
  Synthetic

SEQ ID NO: 3486 - protein, 179 aa, Artificial Sequence
  Synthetic
SAAEEVKKRITDLLRKDEEVVKRASEAVERLLEDDKRVVEDVRREIEEILRTLEKVTREGKDKKAIRTIVRDLERVIRRVLEASARTVKRIEDLIEKLLRESRETVDELRRVLEEAAREGSIDKDDVKRAEDEVRKSHKKVEDDLRRLKEEVERSLKDTEDKARRAKEEVERLLRESER

SEQ ID NO: 3487 - protein, 179 aa, Artificial Sequence; identical to SEQ ID NO: 3486
  Synthetic

SEQ ID NO: 3488 - protein, 179 aa, Artificial Sequence
  Synthetic
DEDDRVRKEVEKMLRDDDRIVKEIEKRLKDLLDRDRKVVREVRELVEELLRRLEKVIKDGAPEEVIREIVERIRKRLKELLEKSAKTVDEIRKLIEELLKKSKKSVDDLVKRLEDVRREGSISEEDVDRLRREVDKSNKDTKKILDEVRKEVEDSLRKTKKIIDDALRRVDELLKEAER

SEQ ID NO: 3489 - protein, 179 aa, Artificial Sequence; identical to SEQ ID NO: 3488
  Synthetic

SEQ ID NO: 3490 - protein, 182 aa, Artificial Sequence
  Synthetic
SVEERVEDIKRSNEESNKRLREEVEKIKEELKEINKRVEDTVREIEKRLEELLRRVRSDKEEKFKDVKKLVEDIVRRLREIVKENHEIVKEVLKELDELVEKSTRTVEESKKRLDEMLRKIRDERVVEEIDKIAKEVNTRNKKVVDEIRKRAEEVKEESKESLKRLRKIAEEVLEELKKRAT

SEQ ID NO: 3491 - protein, 182 aa, Artificial Sequence; identical to SEQ ID NO: 3490
  Synthetic

SEQ ID NO: 3492 - protein, 175 aa, Artificial Sequence
  Synthetic
DLAEEVRKDVEDLERTNEKVVRDIRKLLEDLNREHKRVSDEIRKRIEELKEKLKRIKDEDEVRKVVEELERTLERVRKRVKDTVDKSKELLKRLLERSRETVERVKKKLDDVRRDGAIDDDDVRRIKKRAEDSHDRVKKELDRIAKSNEELLRKTEEEVRRLLEELEEILRRTRK

SEQ ID NO: 3493 - protein, 175 aa, Artificial Sequence; identical to SEQ ID NO: 3492
  Synthetic

SEQ ID NO: 3494 - protein, 179 aa, Artificial Sequence
  Synthetic
DEVEEALRRVEESNRRVKEEVERAVERVKRSDDDVRRLVEEMEREVRKLIDDIRRLAEAGKSADVVRKLIKEVEDKLKEVLERVRKLVETSKKLLDEILKRVEELVRRSKEELDKVLKDGSADKDEITELKKHSERLLEEAERLVRDLKRHSDELLEEVEERLRRLREDLKRLLDEVET

SEQ ID NO: 3495 - protein, 179 aa, Artificial Sequence; identical to SEQ ID NO: 3494
  Synthetic

SEQ ID NO: 3496 - protein, 179 aa, Artificial Sequence
  Synthetic
SAVEKAVRDVERTNEEIRRVVEEVRKEAEKTHRDIRRVVEEARETAERLLREIEELAKKNAPKEAIEELVRRVLDLLRRALEEVREAVERSDRRLEEALERVRELLERSNKLVDDVRREGSISEEAVKRLKDENKKTLDEVREIVKRLAEENKRLLEEVEKTVRDLKRELEKLLREVAK

SEQ ID NO: 3497 - protein, 179 aa, Artificial Sequence; identical to SEQ ID NO: 3496
  Synthetic

SEQ ID NO: 3498 - protein, 182 aa, Artificial Sequence
  Synthetic
KEVEDVVKEIEEVLDRLRKEVKKIKEDSDRLNEEIEKVVTDLVKELDRLLREIDDLIRKLKGDSEAVRRAVEELKREVDRVLREVEEMVKETKRLNDESNEKVRRVVEDLRRLIERVLRDATDDRARKTLEDLKRRIEELLRRVDETNERLKRHSDDLLRDVKRRLDEVRERIDRLLDKAER

SEQ ID NO: 3499 - protein, 182 aa, Artificial Sequence; identical to SEQ ID NO: 3498
  Synthetic

SEQ ID NO: 3500 - protein, 182 aa, Artificial Sequence
  Synthetic
DEVDEAVKRLREILRRIREIVEKVRKESEDVNDEIRRIVEEVTKRSEDALRELRELIRRNKGREEDVKRVADRIRELDDRSNDTVRRLVEKTRRLNDESNKTVRKLVEELKREVKKVEARVTDERVREELRKVEEDIDRLLKEVTELNERLKRHSEKLLRDVTRENRRSKEAVTRILEEARR

SEQ ID NO: 3501 - protein, 182 aa, Artificial Sequence; identical to SEQ ID NO: 3500
  Synthetic

SEQ ID NO: 3502 - protein, 182 aa, Artificial Sequence
  Synthetic
SEVEELLDRLREVNKRIREEVRKVTEESKKAIEEIKRIVDDMVDKVRKILEKLKELIRDNRGDRESVRKVVEELRELIRRVLEEVRKLIERVKKRNDESNDTVRRLVEETERIVDEAEKRVKDDKAREDLRRVKEHSERLLREVTKLNKDVEKELKELLDEVRERLKDLKRRIDKILEEAER

SEQ ID NO: 3503 - protein, 182 aa, Artificial Sequence; identical to SEQ ID NO: 3502
  Synthetic

SEQ ID NO: 3504 - protein, 181 aa, Artificial Sequence
  Synthetic
SVRERVKDEMEKVLRDDKEVSKRVTDEARKVLEEHRKITDEVRRRSKELIRELKKVRDEGRPEEKIKEIADRIREVDDRSNRRVRESVKKLEDLLRRVVKESEETVRTLRKLLEDVLREVDREEVRRTVDEVRRRIDKSLEESKKLVEDISREITELLRRTTERNKESKREVDKILEDARK

SEQ ID NO: 3505 - protein, 181 aa, Artificial Sequence; identical to SEQ ID NO: 3504
  Synthetic

SEQ ID NO: 3506 - protein, 181 aa, Artificial Sequence
  Synthetic
SIVERAEKELRRLLKEDEEVSDRVRKEVKRLLKEDKEILDDVRRRIEKILREIEEVARRGEDKRAIRKLVEELKRVIDKAVEESRDSVRRIKDLLDKALRESEETVRRIKTLADDLLRKVDREDVRRIIKEIKERVKKSLDESREIIERAKREVDKSLEESKKVAEDAKRRIERLLREVER

SEQ ID NO: 3507 - protein, 181 aa, Artificial Sequence; identical to SEQ ID NO: 3506
  Synthetic

SEQ ID NO: 3508 - protein, 179 aa, Artificial Sequence
  Synthetic
SEVEKVVREVEKLIREIERHSKEVNKRSKEDIDRIREKIERAIRRVEELIRKVKEVTERGDRRKEEVLEELDRIVEEVETMAKRVREELKEIVDKSRELMRRSEELLDEILKRAAELARRVGVKEDLDRIRERLERLKKRTKELLERDEREVERVERELEELIRDIRRKIEKLKRDIEK

SEQ ID NO: 3509 - protein, 179 aa, Artificial Sequence; identical to SEQ ID NO: 3508
  Synthetic

SEQ ID NO: 3510 - protein, 175 aa, Artificial Sequence
  Synthetic
SDLEDVIKKIEELLRRVEERLRDAVRKIEELLRASDERLREINEESRELLRRVKELKDAGIDKRDVERILRDIVRRSKKLLDEVHRTNEEILRTIERVVEEVKKELDKILKEVEDKVRDRKLVDDIRKEVERIVEEARKLLERIKREVKESSERAERLHEEDRKRVEDALREVKK

SEQ ID NO: 3511 - protein, 175 aa, Artificial Sequence; identical to SEQ ID NO: 3510
  Synthetic

SEQ ID NO: 3512 - protein, 175 aa, Artificial Sequence
  Synthetic
KEAEDVLEKAKRLLKRSDEVVEEANDESRRLLDKIRKLVDTVNEESKRLLDRVRELREAGTDKKDVKKILEDIVRRSEEMVERVERLLREVVERSRELVERVHELNKEILERIRREVEDKDAVRDVEREVRRSSKRLKELHEEDKRRVRKILERLKRLHEKDRRDLEKVMKEVED

SEQ ID NO: 3513 - protein, 175 aa, Artificial Sequence; identical to SEQ ID NO: 3512
  Synthetic

SEQ ID NO: 3514 - protein, 175 aa, Artificial Sequence
  Synthetic
DDLDEVIKDIERLLKESDDDVERVIREIKKLLDEVRKRVRDANEDSKRLLREVERLAEAGLDRERVEEELRKIVEKSRKAVEEVKRLLDEILKRVTDAVREVHELNKDILRRVRERVRDERLVREIERRVRKSSEDLRRRLEEIRERVEDIERELRKLHEEDKKRVEDILTEVRR

SEQ ID NO: 3515 - protein, 175 aa, Artificial Sequence; identical to SEQ ID NO: 3514
  Synthetic

SEQ ID NO: 3516 - protein, 174 aa, Artificial Sequence
  Synthetic
SEKERVVEEVRKKLEEIRRRTEEMIERVERLLDEIRRRNKELVERNKELNKRIAEIVRDRNNKDEVKELIDRSKKSTDDVNEESRDLARKVKELVDRANKESRRLVEEVRKEVEDLIDSELARDIKRKLEKILEDSERLVDEIRKRIEKIKRESDETVRESRESSRRLLEEVKR

SEQ ID NO: 3517 - protein, 174 aa, Artificial Sequence; identical to SEQ ID NO: 3516
  Synthetic

SEQ ID NO: 3518 - protein, 179 aa, Artificial Sequence
  Synthetic
SEVERLLEDNRRTIREDEERNKRVVDTWRELTRRLEERIEKVLTDNKKTVEDLVRKRGRDRDVLRIIKELEDLSKKIEDDLREIIKRDRELARELKERSDELLKRLRELSKRIEKVLRDRRRDDDELRKDLERLDEESKRASEKLEEEVRREIKRSKELIEEVERKVEEIDKRADERLN

SEQ ID NO: 3519 - protein, 179 aa, Artificial Sequence; identical to SEQ ID NO: 3518
  Synthetic

SEQ ID NO: 3520 - protein, 179 aa, Artificial Sequence
  Synthetic
SEVERVLEKLKRDVEKNERDNRRVLKKLREDVKKDADDNRKVLEDLRRAVEELRREVGRDRDVERILRELEEALRRIEEESKKLIRRLEDLLREIERKSRELLKRLRDLLRRIAEVLRANTNDTKDLVDEARKVLETSKRLSDELKKEVEKMLRESREMSKRLKEEVDRILKEVRDKAR

SEQ ID NO: 3521 - protein, 179 aa, Artificial Sequence; identical to SEQ ID NO: 3520
  Synthetic

SEQ ID NO: 3522 - protein, 174 aa, Artificial Sequence
  Synthetic
DELEEVIDRNRKSLKEIEERNKKVIEDLRRAIKEIEDRLKEVLDRVKKRIEDIERRVPGKEILDKVREMVKELEDRVRELVKELRKLVKELEDKVREHSKKVRKLSKELEDELRKEGPVEELRKKIEDVDRKVRKESEDLKRELKKLLDEIRRKVRELEERAKRVEEEVDREAK

SEQ ID NO: 3523 - protein, 174 aa, Artificial Sequence; identical to SEQ ID NO: 3522
  Synthetic

SEQ ID NO: 3524 - protein, 174 aa, Artificial Sequence
  Synthetic
SELEEVIRDNERSLKEIEDKNREVTKTVREEIKRIAKKLKEVLDRNRETVRDIERRVKGEEILREVRELSDRLEEDARRILEEVKELLERLEREVEKHSREVRDLSRKLADRLRKEGPVDELRRRIKEVDKEVEEKSEKLKREVKAVLDRVEKLAEEIRKKVEDVDRTVEEKAR

SEQ ID NO: 3525 - protein, 174 aa, Artificial Sequence; identical to SEQ ID NO: 3524
  Synthetic

SEQ ID NO: 3526 - protein, 174 aa, Artificial Sequence
  Synthetic
KEMEDLEREVERVLKRLEELVRELLETVRRTLTRLKRKLDEKKKELDKVNEDLDRVTREGRDRREIIKEAEKSLEDLKRDLERIKREIDKINDELRKRVKEIVDRARKILEDLRRNNLEERVVKKLEDAIEEIKRKLEKVHDEHRRTVEKIEEDIRRVEEEHRRTIKEIKEKLK

SEQ ID NO: 3527 - protein, 174 aa, Artificial Sequence; identical to SEQ ID NO: 3526
  Synthetic

SEQ ID NO: 3528 - protein, 174 aa, Artificial Sequence
  Synthetic
SESERLAKEVEKKLKDAERLVKELHEEVDRMNRDLERKLREISERAKKTTEDVERVAERGEDRREIDKDLRRVNKEVKDLIDKLEDEARKSHEEHARVLKEIEDRLREVLKEVEANNLPEEVIKKVRKDIEEITRKLERSNREHERTLREIKKRAEKVHEDHRREIDRIREELK

SEQ ID NO: 3529 - protein, 174 aa, Artificial Sequence; identical to SEQ ID NO: 3528
  Synthetic

SEQ ID NO: 3530 - protein, 174 aa, Artificial Sequence
  Synthetic
RESEELEREVERVLRELEELVKRLHDDVRRVDEELDRKVRDLHKKVRDVLRRVEKLVRDGRDAREIRKELEDAHERHRRMLEKIEDEARKSHEDHKKVLEDIKRRAEEILKKLRDENLEDRVVDRLRRKIEEIARRLRKSNEDHRRSLKEIKDKLEESNERLRRALEEIAERLR

SEQ ID NO: 3531 - protein, 174 aa, Artificial Sequence; identical to SEQ ID NO: 3530
  Synthetic

SEQ ID NO: 3532 - protein, 175 aa, Artificial Sequence
  Synthetic
SEKDEVITRVETELRRVKTEDRDVARRVKEELEDLKRRLERVIEDNERTLRELKKELKERNKPDDEAERLLEKSREVAERVLRKLEEIIKRIEEEIKKMLDESEKIVEEIRDVVRRKGVDEDVVRELEKLLRDWEKRSREVEEKLRRLLDELRETLKEIEKELRRLDKEIKERLR

SEQ ID NO: 3533 - protein, 175 aa, Artificial Sequence; identical to SEQ ID NO: 3532
  Synthetic

SEQ ID NO: 3534 - protein, 175 aa, Artificial Sequence
  Synthetic
DREEKVKRRVEEELDRVRRTDDRVLKRVEERLREDEKRNEEVIRRNEKTLRELEKRLRDNRKPDDRMRELLERSRRKAEEALRKTKKIVRDVREKMREAKEESRKIEERIKETIREKGVDEDVVRELEELLKRWKETSERVKRELTDLLRKSEETSKEVTKTLRELDKRIEDELR

SEQ ID NO: 3535 - protein, 175 aa, Artificial Sequence; identical to SEQ ID NO: 3534
  Synthetic

SEQ ID NO: 3536 - protein, 174 aa, Artificial Sequence
  Synthetic
SREEDLKRKIDEVDKEWKKLTKKLEEEIREVEKEWRKLSKELERKIREVEKRLKEAKDRNVDKDDVDRRARELVERIKREAEKINEDVERLLKEIEDRIREINKDVDRLLKELEAAGVPEEVIKTLRERVKDIHREDKEIIDRLREKAERIKEHDRKLLEDLKRTLDKLRREME

SEQ ID NO: 3537 - protein, 174 aa, Artificial Sequence; identical to SEQ ID NO: 3536
  Synthetic

SEQ ID NO: 3538 - protein, 174 aa, Artificial Sequence
  Synthetic
DEREEIKKELDRIIRESEELVKKIKDVIRKLIEESKRLVEKIREDIKRSNDKLDEVTRRGVSKEDVERVLEKSREDSKRLLEKNRKLIEEVKREIRRLIEENRKLIEEVREEIERRNVEEEVKRRAEDLLRRSDEKSKRIAEEAERRLDRSDEESEKILRDNEDMVRKWREKEK

SEQ ID NO: 3539 - protein, 174 aa, Artificial Sequence; identical to SEQ ID NO: 3538
  Synthetic

SEQ ID NO: 3540 - protein, 174 aa, Artificial Sequence
  Synthetic
DETEKITKDLEDLIREDEKLVKDARDTLAKSNEDSRRLVEDLRRLIKESNEELERVVREDVDERELKKLADESRERSKDALRRNKELIDRSREESKKIITRSDELNREIRKRVEDINVEEDVVRRLERLSEESRERLERILRDNKRRLDKSLEDSKRLVEKNDRDLKKWKEDRR

SEQ ID NO: 3541 - protein, 174 aa, Artificial Sequence; identical to SEQ ID NO: 3540
  Synthetic

SEQ ID NO: 3542 - protein, 177 aa, Artificial Sequence
  Synthetic
DERETVREELKELIERLRDLNRKIEELLRRSNEEIRRLVEEIRRRLKEMNDEIRRVLKKVDREIIRKLVRESEKLTEEVRRELKTIVDESRKLVDKVRRENERLVREVKKRLEDAKRKGSIDDKVLKEAKELLDASEKHLRDLIETNERVLKRWEEELDKIAEENERVLRKWEEEAK

SEQ ID NO: 3543 - protein, 177 aa, Artificial Sequence; identical to SEQ ID NO: 3542
  Synthetic

SEQ ID NO: 3544 - protein, 175 aa, Artificial Sequence
  Synthetic
SEREEVLKKIREMSKRDNEKNKRILDDVRRLSKEDNKDNDRLVEEHRRKITELEDRVRKEGPREEIRKESRRVLEKTAEDFKRSIDRNRKANKEVRDKVKKSIDENKKVLDDAKTEVGEDEVLREVEELSRRDEKRSKEILEEVSKLSKDDEDRSRDLLRKAEEENRRLEEKLRK

SEQ ID NO: 3545 - protein, 175 aa, Artificial Sequence; identical to SEQ ID NO: 3544
  Synthetic

SEQ ID NO: 3546 - protein, 175 aa, Artificial Sequence
  Synthetic
SEKETVLEDIRRMSKEDNEKNERIVERARRILEKIEEKNRRVKEEAKKMLERIKKLVKDRGPDKDLKRELEEVVKTLEELHKRLIDELRRVVEEVERLVRESIKENRKVLKDAADRVGEDRVVDEVRKRSEEDERRSRELLEEVRRAVKRVEDKSRTTVREIRERVKEVKKRLDD

SEQ ID NO: 3547 - protein, 175 aa, Artificial Sequence; identical to SEQ ID NO: 3546
  Synthetic

SEQ ID NO: 3548 - protein, 178 aa, Artificial Sequence
  Synthetic
SEVEDVVRKVRKLVEKSTRDNKRVLEKVRKLVKESSDKNKKVLDEVEELIERLREKLERIRNDKEKEELKKEIDDVLERVERLHKELKKENDDVLREVEEVSRELKKRNDEVLKRVKEAGVDRDALEEIRKRVEDNKRRSDESLEEIRRLVEENKRRSEKTLKEIREKAKRLKDEIDR

SEQ ID NO: 3549 - protein, 178 aa, Artificial Sequence; identical to SEQ ID NO: 3548
  Synthetic

SEQ ID NO: 3550 - protein, 178 aa, Artificial Sequence
  Synthetic
SEVEKVEREVDEMVRDSTKENEDILREVRERLKKIKEDLDRTVTEVRRLLKELEEKAREVRDERLKRRLEEELDRILKEVEELAKKLKDDVEEVLKEVKKLSKRLKDKNDKVLKEVEEAGVTKDMLDRVREKVKRNKEESDKSLDEIRRIAEEVKRRIDELLKEIKKRAEELKRKLRK

SEQ ID NO: 3551 - protein, 178 aa, Artificial Sequence; identical to SEQ ID NO: 3550
  Synthetic

SEQ ID NO: 3552 - protein, 178 aa, Artificial Sequence
  Synthetic
SEVEEVLKRARELVERSTRENRKILERARKMLEDARKTNEDVLRDVERLLDELRRELEKIKEDRLKEELKKKIDDILRKVEKLHREIKKRIDEVLEELAKLSKELKEDNDRVLKEVEEAGVDKEVLDEIRELVKENKKRSDDSLREAEKRLRELKEESDKTLDEIRRKLEKLKEEIDR

SEQ ID NO: 3553 - protein, 178 aa, Artificial Sequence; identical to SEQ ID NO: 3552
  Synthetic

SEQ ID NO: 3554 - protein, 178 aa, Artificial Sequence
  Synthetic
DEVETVRKDVERLVRTSNDENRRILETARKLIKEVREKNKEVTDRVRDLLRRIEEEVKKVKDKELKDRLKKKIDEVRERVERLHKEIKDELKEILDELERLSTELKEKNKKVLKEVEDAGVDERILEEIRRRVEENKKRSDESLKEARELLRDVERESDETLKEIEEEARRLKEEIDR

SEQ ID NO: 3555 - protein, 178 aa, Artificial Sequence; identical to SEQ ID NO: 3554
  Synthetic

SEQ ID NO: 3556 - protein, 175 aa, Artificial Sequence
  Synthetic
DEVKKVVDEARKLVEDDKRTNEEVLRRTRELLERDERKNEEAVKRIRDLLKEIKKLVEAGVDKRELKKRIDELLERLERLVRDSERLNEEILKEDRKVVEESEERNERIKDRLRKLPVDEELLKRIDELIKESKRRTKEAHRESEELARKTKKSTRDLLREVEKRLREIKEEIKR

SEQ ID NO: 3557 - protein, 175 aa, Artificial Sequence; identical to SEQ ID NO: 3556
  Synthetic

SEQ ID NO: 3558 - protein, 175 aa, Artificial Sequence
  Synthetic
SDVEKVVDEVREKVKRDKEDNRRVAKEARELVKESSEKLERLVTEVKKLIKTIEKLVRDGVDKRDLERKLREVEEEVKKMADRLREENEKILRDLEEMVKESRERNERIKDEVRKLNVDDELLKEIDKLIKESKKETDDLLKEIKDLIDENKRRIDKLLREIEKLARKVKRDIEK

SEQ ID NO: 3559 - protein, 175 aa, Artificial Sequence; identical to SEQ ID NO: 3558
  Synthetic

SEQ ID NO: 3560 - protein, 175 aa, Artificial Sequence
  Synthetic
SDVEKVVEELRRLVRKDEEDNRRAVEETRRLVEDSSRKLEEMVRRVRDLIRKVEELVKSGKDKRELTKRLDDILERVKEAAKRLRDINERILERDREMVKRSRDTNEEILDRARKLRVEERLLREIEKLIRESKKKTDDLHRESKKLIEDNKKRIDDLLKEIKDRVERVKEEIRR

SEQ ID NO: 3561 - protein, 175 aa, Artificial Sequence; identical to SEQ ID NO: 3560
  Synthetic

SEQ ID NO: 3562 - protein, 175 aa, Artificial Sequence
  Synthetic
DEVKKVVDEVRKKVEEDKDDNRRAVKETRELVEESSRDLKRLVETSRRLIEEVERLVEKGVDKRRLKELLEEILREDRRAVEELDKKNREILRRDRKAVEDSEKKNEDIRKEVEELDVEERLLREIRKLITESKKTTRDLHRDSKRLIDENRKRIRDLHEETRKLVKEVLDKIRK

SEQ ID NO: 3563 - protein, 175 aa, Artificial Sequence; identical to SEQ ID NO: 3562
  Synthetic

SEQ ID NO: 3564 - protein, 175 aa, Artificial Sequence
  Synthetic
SDVEKAVDEVRKLVKDSNEKVERVLREVRKLIEEDERKNREVFERVRKLIEDILRLVKGGTDKRELEKRLRDVLRRVKEAVEDSRETNERILTDVKRIVEELRKENEDIEDRVRKLRVDEKLLRDIREEIERNRRELEKALREIKKEIEKTKRKTDRLLETIKELIDRVVEEIKR

SEQ ID NO: 3565 - protein, 175 aa, Artificial Sequence; identical to SEQ ID NO: 3564
  Synthetic

SEQ ID NO: 3566 - protein, 175 aa, Artificial Sequence
  Synthetic
DEVETVKRRVEELVKRSNEELKRIVEETRRRVEDDERDNERIIREIKKKLKDIEELVKSGTDKRDLKRKIEEILRELKEAVDRSRELNKEILRKDREKVEELRKRNKDIEDEVRKLPVEEEILKTIRRLIEKNREDIDRLHEESKREIDRTKERTDRLLDDVRRIAERIKEEIDK

SEQ ID NO: 3567 - protein, 175 aa, Artificial Sequence; identical to SEQ ID NO: 3566
  Synthetic

SEQ ID NO: 3568 - protein, 175 aa, Artificial Sequence
  Synthetic
REVEEVLKEVDELVRKSNEDLKDIVRRTRDLLRKDKERNDEVVRRSEELIRRVEELVRRGRDKRELTKRLKEILDEDREAVKESKKLNEEILTEDREAVRELEKKNRKILRDVERLPVDEEALERIKRKIDENEKEIRELHKESEKRIRDTLRATDKLHKDTRRRVEEVKEEIKK

SEQ ID NO: 3569 - protein, 175 aa, Artificial Sequence; identical to SEQ ID NO: 3568
  Synthetic

SEQ ID NO: 3570 - protein, 175 aa, Artificial Sequence
  Synthetic
SDVERVVERARDLVRKSDDDLRKMVAETKRLVEESSKKLDKIVRESRELIRDVKRLVEEGKDKRDLRRELKKILDRDRRAVEELRKDNERILERDRRLAERDDELNRKIEDELRKLNVDEELLKEIKKRIDESREKTKRLHEESRKLIEDNKRRIDELHKETKEEVERAKKEIED

SEQ ID NO: 3571 - protein, 175 aa, Artificial Sequence; identical to SEQ ID NO: 3570
  Synthetic

SEQ ID NO: 3572 - protein, 179 aa, Artificial Sequence
  Synthetic
EEVKRALEELDELVKRIEEDSRRMVKEAEDLVEKIRKEIEDLLRRSRKLNEDIRRLIDRDNEDKTVERLLRRDEELNEEIKRRVDEVLKRIKELLDRMNKRSEDLLRRLKERLEELAKDGKISEDILRRADELLKRLRRKDEELTKKIERLLEKVAKEVEDINRESKRSADEVRKRVRK

SEQ ID NO: 3573 - protein, 179 aa, Artificial Sequence; identical to SEQ ID NO: 3572
  Synthetic

SEQ ID NO: 3574 - protein, 179 aa, Artificial Sequence
  Synthetic
SSVKEVRDELKRLVDEIRKESEDMVERLRRLVEEIRKRNEELVRRSEELNERARRLIERDNNDKEVERLLDEDRKLNERIKRESDDLLRKLEELVKEINRRSKELLDRLEELLRRAKKEGKVDDKILKEAEDLLRDLERRDRELTREVEKLLEELRRTSEETNKRSKESADRVEDEVRR

SEQ ID NO: 3575 - protein, 179 aa, Artificial Sequence; identical to SEQ ID NO: 3574
  Synthetic

SEQ ID NO: 3576 - protein, 179 aa, Artificial Sequence
  Synthetic
KEVEEALKRVRELVKRAEDMNEELLRRSRKLNDEIRRRIEEMLRRLEEVVRRIKELVDRDNDDKTVRELLKKIEELIERVIRTVRKLLKRDKELNDRLRRESERVLREIRKLLEEARKDGKVDEKILTEIEKRLKDLEKKSRDSNRESEESLERIRRKVEEIARRVRELLDRLRREVER

SEQ ID NO: 3577 - protein, 179 aa, Artificial Sequence; identical to SEQ ID NO: 3576
  Synthetic

SEQ ID NO: 3578 - protein, 178 aa, Artificial Sequence
  Synthetic
SRLEEVTRRARKLVEDITRELRKAVEDSRRVVDKIRRLNEELTRRSRELVKEVKDKVRDKDKLKEVEERIRRLNEESRRLSKEVADELRRINEESKKLLDEVAERIRKLLEDLRAESDTEKVREILEEIRRLLEELEREVKELNEESKRRLDELEKRSEETNKESEDLLEKVRRDVEK

SEQ ID NO: 3579 - protein, 178 aa, Artificial Sequence; identical to SEQ ID NO: 3578
  Synthetic

SEQ ID NO: 3580 - protein, 178 aa, Artificial Sequence
  Synthetic
SELEDVVRRLDELVKRIKEENRETLERSRRLVEEAKRTNEETEDRMRRLVEEIEKKVRGDEELERVREEIERANEDDRRRVDEMAKTIRKVNEEDKRRLDKVRREIEELLEDLRRKSDTEEVRRLLEEIRRKLEDAKRHVEELSEESKKLLKELEEHVREVNKKSEKLLRELKDKVKT

SEQ ID NO: 3581 - protein, 178 aa, Artificial Sequence; identical to SEQ ID NO: 3580
  Synthetic

SEQ ID NO: 3582 - protein, 178 aa, Artificial Sequence
  Synthetic
SELEKLVEDVRRLVEKIKRDNRKTLKELEELVREIVERNRDTLRRSRELVDRIKKRVRGEKLLDDVVKDIERVNRDDERRLREVMREIERANDEDRKRVEEAAKRIEELLEDIRRKSDTEDVRRVLKEIKELLERVREHVERLNRDSERLLKDLEEHARRLSKESKELLRELEERVRT

SEQ ID NO: 3583 - protein, 178 aa, Artificial Sequence; identical to SEQ ID NO: 3582
  Synthetic

SEQ ID NO: 3584 - protein, 178 aa, Artificial Sequence
  Synthetic
SEVEKIREDVKKLIEESKKLNRDILEEVRKMIERWRDTTRRIRERIRKLIEEAEEEIKRSTDEELIERIKKKIDDVLKEIEDLLRKTKEEARKVLEDVERLLREDKRRNDKALEDVERAGASSEVLEEVKRLVEESKRESDEILKRVKKLVDDLARTDDKVLEDIKREVDRLKKELED

SEQ ID NO: 3585 - protein, 178 aa, Artificial Sequence; identical to SEQ ID NO: 3584
  Synthetic

SEQ ID NO: 3586 - protein, 178 aa, Artificial Sequence
  Synthetic
SEVEKIKKDVDRMITEWEKRSRDIAKTVDELIEDSRRLNETIRRDVDRVARELKERIKRTTDEELIERIERRIDEILDEIRELLKRDEEKNERVLREAERLLRETKERVKEVRKRVRDKGVSDDVLKKIEEALKRLADRDDDILRRIETLVRKTRRESEELLKEVEDKMRKLKEELRR

SEQ ID NO: 3587 - protein, 178 aa, Artificial Sequence; identical to SEQ ID NO: 3586
  Synthetic

SEQ ID NO: 3588 - protein, 178 aa, Artificial Sequence
  Synthetic
SEVEKLTEDVKRLIEKSKRNNRDILRKVKEDIDEWRKRTKKIADEVRKTERDLEEKIKRTKDEEIIKRIKKEIDEILKRVEDLVRDTKERVKEVDTEVKKLAEDNKRENDDVLKKVREAGVSDEVLRRIEEDLKRSKKETDDILKEVKDLLTDLLRRDDEVLEEIKRRAERIKEEIDR

SEQ ID NO: 3589 - protein, 178 aa, Artificial Sequence; identical to SEQ ID NO: 3588
  Synthetic

SEQ ID NO: 3590 - protein, 175 aa, Artificial Sequence
  Synthetic
REVEKILTDVRRLIEEWRKKTEDIKREVDKLIEEWRKRSDEIADRSRKLAEEIERLLREGVPREDLRRMIKRILDEDRRLLKESRDKAKEIRDRVEKLVRETDKKVKEIEDRVRKAGVEERVLRKIRRDLERLKKTDDDVLKTIEKKLRELEERDRRLHKESREIAEKLKEDIDR

SEQ ID NO: 3591 - protein, 175 aa, Artificial Sequence; identical to SEQ ID NO: 3590
  Synthetic

SEQ ID NO: 3592 - protein, 175 aa, Artificial Sequence
  Synthetic
DEVETIMEKVERDVKRWEELTREIKRRSDKLIEDWKKRSEEVLRESTELIKTIEKLLREGAPREDLDRLLKEILKRDRDLLKESRDRVREAEKEDEDLLRETKKRVKEIKDEVREAGVDESVLRTIDELVRRLEEEDRKVHEESKELARRLEKEDKRLHEESKKLIDELEKKIRD

SEQ ID NO: 3593 - protein, 175 aa, Artificial Sequence; identical to SEQ ID NO: 3592
  Synthetic

SEQ ID NO: 3594 - protein, 175 aa, Artificial Sequence
  Synthetic
SEVEKILDEVRKLVKKWDDETRKILEEIDKLIEDSERLLEKIERRSKKLADEIRDLLRKGAPREELKKRLEEILKEDEDLVREDEKLNEEILRRLEELVKRTDDEVRKIDKRVKEAGIDKSVLDEIRERVTRAKEKDKRVLERVKREVERTKEESKRVHEKSREIIERLKKEIDK

SEQ ID NO: 3595 - protein, 175 aa, Artificial Sequence; identical to SEQ ID NO: 3594
  Synthetic

SEQ ID NO: 3596 - protein, 174 aa, Artificial Sequence
  Synthetic
DEVRKVRKELDDAVRKLRRDHERVIRESEKVSKEIEDRARDVERRLDKVVDELRKKDVKEEIEREVERIREEVRKKLEEILDRVRKINEKAREHSERNKRDVERVKKEVADRLRDGDSREEVMKRLRDMIRRLKEDAEKLKRELKRRHERVKELLDKVRRELEKLEKEVDDKVK

SEQ ID NO: 3597 - protein, 174 aa, Artificial Sequence; identical to SEQ ID NO: 3596
  Synthetic

SEQ ID NO: 3598 - protein, 174 aa, Artificial Sequence
  Synthetic
DEVREVERESEELSEELRRRHEEVVKESEEVSKEIEERIREVIRDLRRVLRKLEEDGVRKEILEEIEKVVRDVEREAERILREVERVNERVRELSKRNIKETEEVNKKVRDELRDGDSREEVVKELRELHDRSRKKVEDIAREARDMHRKAADKLRRLMEDLKRVLEEIRKKVE

SEQ ID NO: 3599 - protein, 174 aa, Artificial Sequence; identical to SEQ ID NO: 3598
  Synthetic

SEQ ID NO: 3600 - protein, 171 aa, Artificial Sequence
  Synthetic
SRVDKIRRELRELLERDREDLERAMRELRKIDKDIDERLKEVVERLRRIDERIDREDRDREELEELLRRSEDTVKKISDEIEDLLRRSEERLRRVLERSKKTNDEIRERLRRVDVSKEVEKEVEDAIRETEKRAREVEEENRKSVEDVRRKMKKVEEENRKSVEDVRRKAT

SEQ ID NO: 3601 - protein, 171 aa, Artificial Sequence; identical to SEQ ID NO: 3600
  Synthetic

SEQ ID NO: 3602 - protein, 171 aa, Artificial Sequence
  Synthetic
SRVDKIRKELEDLLREDEKRIRDMVKRLREIDEKIDRELEKVARELRELLKRVEDSPDDREEVERMLDEIRRRLDEILERIERLLRESERAVKEVEKESRRTNDEIKKRLEKVDVPEEVEKKVRELVERTEETVRDVERENKESVKRVREKAETVKREVEKRAKEVRDKAK

SEQ ID NO: 3603 - protein, 171 aa, Artificial Sequence; identical to SEQ ID NO: 3602
  Synthetic

SEQ ID NO: 3604 - protein, 179 aa, Artificial Sequence
  Synthetic
SEMEEVEERLKELDDKDKRDVDEARKRLEKLDRDIDRRIKEVTKRLRDLNRRIEEELRRNKEKKEELDKLLRESEETTRRILDEVRKLLERSRREVRKIVEENKETIERSRKEVEKIRREGVLTEEVEKKNRKSADDSRETAKRVEEENERTIKRLEEELREVEEEDRKTVEDLRRTLK

SEQ ID NO: 3605 - protein, 179 aa, Artificial Sequence; identical to SEQ ID NO: 3604
  Synthetic

SEQ ID NO: 3606 - protein, 179 aa, Artificial Sequence
  Synthetic
DEVREVTKELRDLDREDKKRVEEATKRLRDLNEEDKRLVKKVADDLREDLKRIRERLERNKEKKEDLERLIKEIEEKLEKIKRDNDKTIRESRRTTEELRRENRKTIEDSRRRVKEIRDRGVLTEEVEKENERSVKKSEEDLKRVKDEDEESVKESRKAVREVEEELRKRLKELREELK

SEQ ID NO: 3607 - protein, 179 aa, Artificial Sequence; identical to SEQ ID NO: 3606
  Synthetic

SEQ ID NO: 3608 - protein, 170 aa, Artificial Sequence
  Synthetic
SEDETVRREVRELIRRLRKHSEDVKRESDKLLDEIRRRVKEVEDRVKEAVERLDRKKRDERLRDVVEKIDRLLEEVKDRIRKVERDSKEMNKKDEERVERVVRKLEEILDREGVDEDVVRKIRTVVKKIEEDNKKTADELRKLHKDIKKEVDDMEKRIRKVLDEIDKEIK

SEQ ID NO: 3609 - protein, 170 aa, Artificial Sequence; identical to SEQ ID NO: 3608
  Synthetic

SEQ ID NO: 3610 - protein, 170 aa, Artificial Sequence
  Synthetic
DEEERARRELEDLLRRLREHSERVAKEVEEVVERNRRKSEEVEKRVREMLKRLDEKKRDEELKRVVEEVKEMLKRLRELNEKVVEEVRRILEKDRRLVDKVRRDLERLLREKGVDKDVVKEIRDRVREAERRNREVVEEIRKLLKEIDKTTRDVEEEIRKLLKRIDEEIN

SEQ ID NO: 3611 - protein, 170 aa, Artificial Sequence; identical to SEQ ID NO: 3610
  Synthetic

SEQ ID NO: 3612 - protein, 170 aa, Artificial Sequence
  Synthetic
DEERKARTEVKKEVDDLKKHVKDVADEVREAVKKNRRKSEEVSREVRDLIRRLKETKDDEELKKAIKKLEELLERMRRLNEKVVKEIKKLLDDDDRLVEEVVEDVKRILREKGVDEDVVREIRELLKRIREENRRTVEEIRKLLKRIDEATEELVREIRRVVKEIEDKIR

SEQ ID NO: 3613 - protein, 170 aa, Artificial Sequence; identical to SEQ ID NO: 3612
  Synthetic

SEQ ID NO: 3614 - protein, 170 aa, Artificial Sequence
  Synthetic
DREEKLRKELKKLIDDDRKKSEDVEREVRKLIKENEDKSRKVEEEVRKLAEELDTKKRDKELEKVIRDLERLLEELKELNDRVRRTLEELLKKLKELNERARKELEDILRDKGVDEEVIKEIRTVVKRVNEESEEMTKRIRDVVREADKTTEDVRRKIEDMVRRIDERTN

SEQ ID NO: 3615 - protein, 170 aa, Artificial Sequence; identical to SEQ ID NO: 3614
  Synthetic

SEQ ID NO: 3616 - protein, 185 aa, Artificial Sequence
  Synthetic
DELRRIEEEVRRRFEEMARRHRKVKRDIEELVKEVTKRNKDTEREIEELVKRMKDEIDRIKEDEKLERLLREAAERLKELLKRDKKLVEDIAREIERVIKELRKINEEVSEEIERLLRELEKLRAEEEKVRRVVKKAREAVERSSREVEKVEREVKKLLDDLKKHSEEVEKKVRELLKRLEDRAR

SEQ ID NO: 3617 - protein, 185 aa, Artificial Sequence; identical to SEQ ID NO: 3616
  Synthetic

SEQ ID NO: 3618 - protein, 185 aa, Artificial Sequence
  Synthetic
SELEEIVKTAREIMDRVRREHDRVATEIRELVKRLEEANRRVREEIKRLVKEVEERIRKIKEDKRLREVLEEIARELEKLLKEDKDLLRKAAEDLKRLIEDLRRINEEVEDIARKVIEELRKSRAPREEVEKVVKEIEDVVRESSERVRRVVEEVKKLLRELAKHSEDVEREVRELLKKLAREVD

SEQ ID NO: 3619 - protein, 185 aa, Artificial Sequence; identical to SEQ ID NO: 3618
  Synthetic

SEQ ID NO: 3620 - protein, 185 aa, Artificial Sequence
  Synthetic
DELKEIRDRIKKRVEELRRENEEVREEIERIVRKAREDHRRVERELEDLVRRARDKVEKIKDRETLKRLLDKVEKDIRKILDELRRLNEEVARTLEKLLRDDKRLVDKAAEDLRRLIEELKKSRADEEEVRRVVKEVEELLEDLKRHSEKVKEEVKRLLEESSREVERVEEKAREMLERLRERAR

SEQ ID NO: 3621 - protein, 185 aa, Artificial Sequence; identical to SEQ ID NO: 3620
  Synthetic

SEQ ID NO: 3622 - protein, 185 aa, Artificial Sequence
  Synthetic
SEAEKLRDEIRRIVEKAERDHEDVKKKIEDLVKRVEERNREVTKRIRDLVRDARRRLDEIKEDEKLERVLRKVERDLRELIKEDEDLLRRIAEALEDMLRKLEKLNRDVAEILKELLRKLRETRIEKDKLKKVEEEVEELLKKSNRKVREVKRELKELLDRLAKHSDEVRREVEELLRDLARRAT

SEQ ID NO: 3623 - protein, 185 aa, Artificial Sequence; identical to SEQ ID NO: 3622
  Synthetic

SEQ ID NO: 3624 - protein, 185 aa, Artificial Sequence
  Synthetic
SELEKIREDMRELVERLKEANDRMREKIRKILEDVDREHEEVRKRIEELVKRARETIERIRDKRTLDEVLKKVEEELRRALKRLDEINERVKRDIRRLLEEDKRLVEEAARRLKKLLEDLDKSRAEKDKVKKVKEDVKRLLDELRKHSEKVIREVEKLLRESNEKVKRVKEKLEELLRRLRERSR

SEQ ID NO: 3625 - protein, 185 aa, Artificial Sequence; identical to SEQ ID NO: 3624
  Synthetic

SEQ ID NO: 3626 - protein, 179 aa, Artificial Sequence
  Synthetic
DEIETIKKEIDDMLREIKREVERSKEEIDRALKRIREEVKKSEEEIDKALEELRRNGVPEEILRKIEELLRRLKDEHRKLLERIEEVLRRLKRRHDKLLEDAERLLRELKEELDRNKDKSEEIIKRLLEKIRREARKVKELIRTSNEEVRKRLKDLEELIRKSHEDVRRTLETLERETR

SEQ ID NO: 3627 - protein, 179 aa, Artificial Sequence; identical to SEQ ID NO: 3626
  Synthetic

SEQ ID NO: 3628 - protein, 175 aa, Artificial Sequence
  Synthetic
DKERELDKEVRDMIDTLRDSNRRINERSERVLRELDESVKKNEEDIRRAIEELKAEVRRDDLPRGLVREAVERLKKLLERDRRLVTEVKERSKKSNEDDKRLSEEVVKELRRLVREKGVDEKVLKEIRDLARKIKEDNDRSLEDNDRLAKEIKERNKRVHDETRKMLEDIKRELT

SEQ ID NO: 3629 - protein, 175 aa, Artificial Sequence; identical to SEQ ID NO: 3628
  Synthetic

SEQ ID NO: 3630 - protein, 178 aa, Artificial Sequence
  Synthetic
DEDKEIDERVKTVKEEIRRRSKKDKEEVDRVLKESDETLKRILEEVKKVLKEIEERVPDLDEVRKKVEDVERKVATELEKNLRRVDKAVKEVRELNKELERELDEIRKEVRDLLKRIRREEELRRIVERVRERVTELREKLKEIHKRTREVADELRKNNRRWEEDVRRLVKELREREE

SEQ ID NO: 3631 - protein, 178 aa, Artificial Sequence; identical to SEQ ID NO: 3630
  Synthetic

SEQ ID NO: 3632 - protein, 178 aa, Artificial Sequence
  Synthetic
DEEERIRTKVEKVKRELEEKSERDKRALEKVEDESRRTSEEDERELERVIEEIIREVDKLDEVREKLERVLRKVRKLNRDSEERLKRIKEEVEEANREIRRRLEEVERRVKDLLDRVRREEELRRIEREVDRAVKELDRLLRELHRRTREVVKELRDLDRRIHEDTRRVVREAREEVR

SEQ ID NO: 3633 - protein, 178 aa, Artificial Sequence; identical to SEQ ID NO: 3632
  Synthetic

SEQ ID NO: 3634 - protein, 178 aa, Artificial Sequence
  Synthetic
SEREEIEERVERVERESEDTSRRDEEALERVLRESEDTSRKDREALRKALEDIERELPNLEEVKRKVERVVEEVEKLNRDSERKVKEIAEEVRRLNEESRRELKEMVRRVRELLKRVRREDVLRRIMEDVKRVADKLRELDKKIHEETRRAVDDLRRLDKEIHDRTRKLVKELREEAK

SEQ ID NO: 3635 - protein, 178 aa, Artificial Sequence; identical to SEQ ID NO: 3634
  Synthetic

SEQ ID NO: 3636 - protein, 174 aa, Artificial Sequence
  Synthetic
SEIEEITKDLRRLVEEIERLNKRVEDENERTAKELRDRVREAEKKNRKTVDDIRKLIEDGVRREEIREVIERDREEVEKVVRDLRDLLRKDRKRVREAVETSERLLEDIKRRLEEVDVSDEVRREVDELIKKSRETLKRIERRSEEVAEELERRLRDIKRRSEDMVRELEERAK

SEQ ID NO: 3637 - protein, 174 aa, Artificial Sequence; identical to SEQ ID NO: 3636
  Synthetic

SEQ ID NO: 3638 - protein, 174 aa, Artificial Sequence
  Synthetic
DEKEKVTKKIEELLKAIEDKIREVEKRSRDSAKEIEDRNREVEKRNKDTVRRIRELIERGVREEEIKKLIEEDKERVRKMVEETKKLVKRSTDEVRRVVDEARKLIERIKEEVERMPVDEEVRKRLEDAVERIKKELKRIKDENDEVVKKSRDSLRRIKEDSERVVRELEERAK

SEQ ID NO: 3639 - protein, 174 aa, Artificial Sequence; identical to SEQ ID NO: 3638
  Synthetic

SEQ ID NO: 3640 - protein, 174 aa, Artificial Sequence
  Synthetic
KRKEDIERRIEKLVRDDRRLVREAEKRSKESVDRLRDLVDKARKESDESARTIDKLIKDGVERRDIERMIRESSKRVKDVIERLKKLLEESTRTVEELVRRSKRTLDEIREEVERLDVEERVRKRLEDVVRESKKRLDEIKKRNEDVVRELEERLRRIEERNRRVAEELKRKAK

SEQ ID NO: 3641 - protein, 174 aa, Artificial Sequence; identical to SEQ ID NO: 3640
  Synthetic

SEQ ID NO: 3642 - protein, 175 aa, Artificial Sequence
  Synthetic
SEIEDIERELRESNKRHEDTLRKIKRDLEDSNRRHRETIRDIEARLEEVIKKLREDGVSEEVLKEIKRMLEEIVRDIRRSHEEHKKLLDEIKREAEKSHEEHRKLLEEIRREAEKNKVREEELRELVKRVHERAERVNRDLKRKVKEVHDRVREVNKELRRKVEELKRRAEERRR

SEQ ID NO: 3643 - protein, 175 aa, Artificial Sequence; identical to SEQ ID NO: 3642
  Synthetic

SEQ ID NO: 3644 - protein, 175 aa, Artificial Sequence
  Synthetic
SEIEDIKRKLDDVIREHARTLKEIKDELKKSNERARERIEDIDRKLRDVERRLRESGVDDDVLRDLEDKARKIKRKLEKIHEEHRRMLEEIEKEARKSLKELKEIVEDIKRKADDNRVRVEELEDLVRRLKKRVEEVNKRLREKVKRLHDEVDRVLRELEEEVKKLKEDVERAAK

SEQ ID NO: 3645 - protein, 175 aa, Artificial Sequence; identical to SEQ ID NO: 3644
  Synthetic

SEQ ID NO: 3646 - protein, 175 aa, Artificial Sequence
  Synthetic
SEREKIEEDIKKALKEAREVVERIKKKLDDSNREHKRTLDEIKKKLDEVIDEVRKSGVSEKMLREIEEVVKKIEEDARRSHEEHKRVLDKIVEDAKRILDRLRELVTRLLEELKKNKRREEEIREDLERIVTEVKKVLDELDKLVKDLHDEVRKVNEELDRKVKKLRKEAEEKTR

SEQ ID NO: 3647 - protein, 175 aa, Artificial Sequence; identical to SEQ ID NO: 3646
  Synthetic

SEQ ID NO: 3648 - protein, 175 aa, Artificial Sequence
  Synthetic
SEIEEIKRRLEDSNRRAREVIKRIEDELRRSNEEHRRTLKEIKEELDRVLEELKRKGVDESVLDRIRELIERIAREAEKSHEEHRKLLEEIRKRAEDIHRRHKEILDDILRKAEDNRTREDELREVVKRVHDEVRRELKKLEELVKKVHEDAKRVNEELRRKVKEVKERAERDVR

SEQ ID NO: 3649 - protein, 175 aa, Artificial Sequence; identical to SEQ ID NO: 3648
  Synthetic

SEQ ID NO: 3650 - protein, 174 aa, Artificial Sequence
  Synthetic
RREEEVEKRLDDARRRLEKSNRDDERLTRTVEEELKRSNDEIRKRLETAMRELKKLVKDGVDKDDVERVLDRVRRELEELVKENKEIVREIRKRNEKSKRDNERLLRKVEEDIRRLDRSEEVERRLEKVEEDSRRELKRSEKRSDEVARDSERLLDEWRRRLEEVIRRVKEETR

SEQ ID NO: 3651 - protein, 174 aa, Artificial Sequence; identical to SEQ ID NO: 3650
  Synthetic

SEQ ID NO: 3652 - protein, 174 aa, Artificial Sequence
  Synthetic
SREETVRERLREVAERLKKSNREIEELLKKAAEELKESNTRDKKLSEDVSRRLEKLSRDGVDKDDVRREIERIKRKNDDTERRNKELLDKIREDMERMARRNKELLRRIEEEIRKMDASEEVEERLKRVIEESERRLDKWRRDLDRVIKESEDLLKKSREDSERVVREVEKKEK

SEQ ID NO: 3653 - protein, 174 aa, Artificial Sequence; identical to SEQ ID NO: 3652
  Synthetic

SEQ ID NO: 3654 - protein, 185 aa, Artificial Sequence
  Synthetic
SEIEEVERMLEDLERRVREADKRVREESKKLEDEIRREDKRVEEMIDEVRKKVDELDRDVRGRERLKEVVERLEEEAEEIVKRVRELSKRLEKKVRDHTREVRRLSEELERRARDIKRRVRERLRDKDEVRRIEEEVDRVIEENRETVKEIEERNRRVLEANRESLRELEERLKRILEEVRRRSK

SEQ ID NO: 3655 - protein, 185 aa, Artificial Sequence; identical to SEQ ID NO: 3654
  Synthetic

SEQ ID NO: 3656 - protein, 185 aa, Artificial Sequence
  Synthetic
SEIDEVRREVEELERRAEEVDREVERRSKELKERVDDVDRRSRELSKRLKDTADEVRKRVRGREDLERVVRDLEKKVEEVVETSKRLSDELRKEAEKHTEDVERLSRKLVEELREIVDRVRKRLRDKDKLETIRRRLEEVLKRNKETVDEIRRRNEDVIRRNEESLEKNERDLRRVLDEVRRSAT

SEQ ID NO: 3657 - protein, 185 aa, Artificial Sequence; identical to SEQ ID NO: 3656
  Synthetic

SEQ ID NO: 3658 - protein, 185 aa, Artificial Sequence
  Synthetic
SELEKVDELVKRLMKEVRDVDRRSEKLTEELERKVREMDRKSKKLSEDLERDARRVEKEVRGKERLEKVVRDLERKVREVVKESERLSRELERDAKRVVEESRRLSEELRRKAEELVRRAREELRDKDALRAIEKKLEDILRRNEETLRRNEDKIRRIIETNKRSLEENRRRLEEVLRRVKESAR

SEQ ID NO: 3659 - protein, 185 aa, Artificial Sequence; identical to SEQ ID NO: 3658
  Synthetic

SEQ ID NO: 3660 - protein, 185 aa, Artificial Sequence
  Synthetic
SITEKVERLIRELERKVKEIDDDLRRTSEEIMKRARKADEDSERLSERLRELVDRLDREVRGKEKVKKVVDDIKREAKRIIEKTDELHEETRRLVEENKRRIDELHKEIRETVKEIEKRIDDDGVPRESAERLKEELRRVLEENRETLERLREENERVLEENKRRVDENREKIKEVLRRVEERTR

SEQ ID NO: 3661 - protein, 185 aa, Artificial Sequence; identical to SEQ ID NO: 3660
  Synthetic

SEQ ID NO: 3662 - protein, 185 aa, Artificial Sequence
  Synthetic
SITERVEEDIKRLMEEAKRVDDKVRKLVEELMRDVKRVDKELAELVEELERRVKDLTRRVRGKERVKEVVKDIERKAREIIRRIRKLLDESRKKAEEIIKELRKLHEDIDRKVKEILRDIDRAGVSREEAERLKEELRRVLEENRRTVEEIERRIKRVLEENEETVRRLEKRIEEVLRDVREKTK

SEQ ID NO: 3663 - protein, 185 aa, Artificial Sequence; identical to SEQ ID NO: 3662
  Synthetic

SEQ ID NO: 3664 - protein, 174 aa, Artificial Sequence
  Synthetic
SKVEELKRRLKKVRDDDRRSVEKLRETLRRVLARDRDEIREAERELREALKRLEDAGADEKLLRDMKKVIDEMKEHLKRNNEELKRVVERVERDLERSHDELRRVIEEVEKRLADGDTREDVLRDVERVVREVLEKNKKILKEVKEVVEESLRNVRDLIRRAREIVKEIVDRVK

SEQ ID NO: 3665 - protein, 174 aa, Artificial Sequence; identical to SEQ ID NO: 3664
  Synthetic

SEQ ID NO: 3666 - protein, 174 aa, Artificial Sequence
  Synthetic
KEVEDLRRELEEAKKRDKDLIDKLKRRAEEVKEEDERSIRENKKALRKAEEDLRRKGADEKLKEDLKRIIEESERNNEDSHRRLEEMIEKVRRHLDRNNEDLERFIKDVDELLRRGDTRERVLEEVRKTLKRSMENVEELEKELEELVTRVRDHNRRDHEETRRLLEEIKRRVD

SEQ ID NO: 3667 - protein, 174 aa, Artificial Sequence; identical to SEQ ID NO: 3666
  Synthetic

SEQ ID NO: 3668 - protein, 174 aa, Artificial Sequence
  Synthetic
DEVERLKEKLEEVRRRDEEIIRKLEEDLERVKRDDDRLVRENEEELKRVEEKLERDGADESLLRELKDVIRRSRDHLTRNNEDLERVIRRVEEHLKRNNDTLKDVLRKVDELLRRGDTREEVLRRVEEAAKRSLDNVDKLEKDVADLVRRSMENVRDLHRRTRRLLEELKEKVK

SEQ ID NO: 3669 - protein, 174 aa, Artificial Sequence; identical to SEQ ID NO: 3668
  Synthetic

SEQ ID NO: 3670 - protein, 176 aa, Artificial Sequence
  Synthetic
SEKEKVLEDAERVLREIKKKNEKALREAEEVARRIAEEVKRIHDRSKEVVDDIKRLADAGEVDEKELEERLKRVIDTVRKLNEDLRKKLEDAIRRLEKLLKESKEELKRVAEELRKDLKDDKDVERRVREAKKENDKSVDEIREEVKRVKDELDRLSERNEEELEKVERDLRRRAK

SEQ ID NO: 3671 - protein, 176 aa, Artificial Sequence; identical to SEQ ID NO: 3670
  Synthetic

SEQ ID NO: 3672 - protein, 171 aa, Artificial Sequence
  Synthetic
DEEKKVLDKLRELATRLSRRVEEAHRESEKIAEEIRRRAEKVLRESRKTVEEIKRSPDDRKDVRRVVKEDEDRSREVVKDLERLLKELEDRSRKLEEELRRIMKKIEEEVRRAGVDERIKDDVRRMKKELEDLIEENRRRVEKVKEDIRRLIRELEARNEDVDRELRRKED

SEQ ID NO: 3673 - protein, 171 aa, Artificial Sequence; identical to SEQ ID NO: 3672
  Synthetic

SEQ ID NO: 3674 - protein, 171 aa, Artificial Sequence
  Synthetic
SRLEKVEKELEELAREDKERIKRVIDDIRRLVREDEERIKEMHKKTEDIVRAIEEEDRDREELKRLLERLEEESRRMADESRRTNEEIRRKVEKVVEESKKTNEEIRKRVEDAGADERIKKRVEKLKRDSKRLIDELRKELEEVVKRSEDLIKENRDTVKEVSDRIREKAR

SEQ ID NO: 3675 - protein, 171 aa, Artificial Sequence; identical to SEQ ID NO: 3674
  Synthetic

SEQ ID NO: 3676 - protein, 171 aa, Artificial Sequence
  Synthetic
DDEERVLKELKKLVEDDRKKIEDVIETIERLAREDVERIKRVIEELRRLVKELEDGDLDKEVVRRLLEEIKRAVKEAVRESEKTNDKIRRDVDRVVKDSKRTVKDIKRKVDEAGADEEIKEDVKRAADESEKLIRELRKAVKRVEEESRRLIEELEREVKEAEERLKRRTK

SEQ ID NO: 3677 - protein, 171 aa, Artificial Sequence; identical to SEQ ID NO: 3676
  Synthetic

SEQ ID NO: 3678 - protein, 181 aa, Artificial Sequence
  Synthetic
EEVERLLEELKELVRRIEERLKRAHDEMEDLVRRIKEEIKKLHEDTKRVVEEIRKLIERDNIDKLLERLIEELKRIHEKINRDIKRAIEELKRLSDRIEEEIRKLIKELEDVLRRITETAGRDERVKEAEDRVRDAVRRLKRLLEEHKKASEKVVRELERLLEENRKTVKEVVDRLREESR

SEQ ID NO: 3679 - protein, 181 aa, Artificial Sequence; identical to SEQ ID NO: 3678
  Synthetic

SEQ ID NO: 3680 - protein, 181 aa, Artificial Sequence
  Synthetic
REVEELIKELRRLAEEIRDRIRKLHKEMEDLARDIERRIEELDRELERVATEIAKLIERDNIDRLLDELLERLDRLSKKIEEDVKRLIDESRRLSEEIAKRIKDLIEELKRLLEEVAKRKGRDEDIKRLEEEVRKVEEELKKLLKEHRDANKEVVDRLKRRIEEHKRKTKDLKEELERRMR

SEQ ID NO: 3681 - protein, 181 aa, Artificial Sequence; identical to SEQ ID NO: 3680
  Synthetic

SEQ ID NO: 3682 - protein, 181 aa, Artificial Sequence
  Synthetic
DEVEEVIERLRRLAERIEERLREMDRRLEELVERAKRTIERLHEELEKLVREAEELIRRDNNDKLVEELIRRSEDLSRKIEETIRRIIERLRKLSREIEEEIRRVIEELKRLLDKIRADRGDDKDVTRLEEELRRVVKKLEDLLREHKEKSDRAVEDLERLLTEHKKRNEDVIRRLKEASD

SEQ ID NO: 3683 - protein, 181 aa, Artificial Sequence; identical to SEQ ID NO: 3682
  Synthetic

SEQ ID NO: 3684 - protein, 174 aa, Artificial Sequence
  Synthetic
SEVEEIRKKAEDVMRRLEELDKRLDEVLKKVSRELEKSDKDLEDRIREVIRELEERGGKKRETLKKVIEDLRKLVEEHKELIERVKRELKRIVDEHHRLIEEAKKRLRDILDKITKDTKDEMERRLEEVVKEAERRSEEVLRRLEKVVKDIKKKSKEILDRLEELVREIRERVR

SEQ ID NO: 3685 - protein, 174 aa, Artificial Sequence; identical to SEQ ID NO: 3684
  Synthetic

SEQ ID NO: 3686 - protein, 177 aa, Artificial Sequence
  Synthetic
SESEEIDREAKKVEREVREMSRRNDEELRRVAKESEDSVRRVEDRVREVSEEVEARGVDDKVREELERISRRIKKLLDESRERLKKMVKESKELNEEIRRKLEEILREVRELLKRVRREKELTEILKRLKDLADELRKLLEDVHRRSKKAADEDRKLNEDILKELEDLARELRKKTK

SEQ ID NO: 3687 - protein, 177 aa, Artificial Sequence; identical to SEQ ID NO: 3686
  Synthetic

SEQ ID NO: 3688 - protein, 177 aa, Artificial Sequence
  Synthetic
DEEKKVRDEIRRAEEESRRSSKRNEDELRKVKEEIERRLEEVRRKAKEVEEKVRREGVPEEVEKRLKEILDEVRRLLEELRERLDRVLRRSEELNKRSEDKLRKVAKEVEELLRNVRREEELRRILERLKEMVERDKETNEEIHRRSKDVVDKLRRRIEDIKRRLDELAEKLKEDTR

SEQ ID NO: 3689 - protein, 177 aa, Artificial Sequence; identical to SEQ ID NO: 3688
  Synthetic

SEQ ID NO: 3690 - protein, 177 aa, Artificial Sequence
  Synthetic
DDERRIRETLKRADEEVEKALREVREHTKDVERENEKLSKENKERLEEVKKRVDDSGVDETVKDELRRIVETSKRLNDESRRKSEEIKKDTEKLLREIKEKVERVLERIERLLDKIRRKDVLRKIEKEIEEMVKDLRRLLKEVEDKDRTLAEELRRINEDIHRRSEEMKKELDDRTR

SEQ ID NO: 3691 - protein, 177 aa, Artificial Sequence; identical to SEQ ID NO: 3690
  Synthetic

SEQ ID NO: 3692 - protein, 182 aa, Artificial Sequence
  Synthetic
KEVEDVEEKIREIVERIRDEARKAEERNRDTVRRIEDVARKLHKRTKEIVDEIRDVLTKRREVEEELRKLLTKLREMNERARRRIEELLRRDKKVTKEVKDKLEKLLRELEEELKKIAKEVDSKEMLETIKRKVEKVKEDLRKKIEDIEKHTRDVEDKVRKELERNEKKSRDVKEEVERRLT

SEQ ID NO: 3693 - protein, 182 aa, Artificial Sequence; identical to SEQ ID NO: 3692
  Synthetic

SEQ ID NO: 3694 - protein, 182 aa, Artificial Sequence
  Synthetic
SELEKAEKENKDSADEIREVLKRLEEENRETAKRIEKHTRDAHRKTEDIVRRIEEVLRRRKEVREEIRELLKRLREVNEEVHRRNEKLVREDEERTKRAEEELRKLLEDDKRRVDEVEREVDAKEALKRIRDHVEEVRREVEELLRKIREHTKEVAEKVRRENEKNKKRSEDVRKKVEDDER

SEQ ID NO: 3695 - protein, 182 aa, Artificial Sequence; identical to SEQ ID NO: 3694
  Synthetic

SEQ ID NO: 3696 - protein, 182 aa, Artificial Sequence
  Synthetic
SEVERVLEENRKSAKEIEDELRKVLRENEKSAEDIEREIDKAEKENRETVKDLRRVLTERKEVREEIERLVREDEKKTKDLIEKLRKLLEDDRRRTEEVKRRIRKLVDEDRERVKEAKRRVDSKEKLETIERHVRKVEEDVERMLKEIERRTRDVMRKVDKLIKEIEKHTREVAKEVKEAED

SEQ ID NO: 3697 - protein, 182 aa, Artificial Sequence; identical to SEQ ID NO: 3696
  Synthetic

SEQ ID NO: 3698 - protein, 178 aa, Artificial Sequence
  Synthetic
SLVEDLERKLEESTRRDEESMKRVREILKELEDRDRKSVKEIEDELRKARKEVKDSRVSEEIRKELEKAVEEVERLLRESHEELKRVIDELEELLKESHKRNKKVVDDVKDVLDKLREIEEMAREVIKTLEKVSRELEETNRRVIDRIRKLAEEILRKNKEVLERLRKIVKEIKEKAK

SEQ ID NO: 3699 - protein, 178 aa, Artificial Sequence; identical to SEQ ID NO: 3698
  Synthetic

SEQ ID NO: 3700 - protein, 178 aa, Artificial Sequence
  Synthetic
SLVETLKKILDDSTRRNEELIRRLEEELKRIKETNERTVRELERELKRAEEEIERQNVSEEIRKEVKDVVDEVRKLLEESKERTKRTIDKVRKLLEESHRDNRRVVKEVEDLLRKLREDEEAAKRVIERLRRLSERNVRTLEEIIKTLRDLARRSKERDDEVLEELKEMIRRIEEKSK

SEQ ID NO: 3701 - protein, 178 aa, Artificial Sequence; identical to SEQ ID NO: 3700
  Synthetic

SEQ ID NO: 3702 - protein, 176 aa, Artificial Sequence
  Synthetic
DELEKVVRELEELAKEILKKLDEIIRDTERLVREAVKRLRELIERTRRLMDEVRKKVRDKDLLKEVKERLDRSHEEAERLVRKLKKDLEDSNRRAEELVRRVEEELKDLVRRLRGTDEKVMRELEDTVRRVREELRKLLEEHNRRVKKVLEDLDRLLDEHRKIVEDIKRDLDRREK

SEQ ID NO: 3703 - protein, 176 aa, Artificial Sequence; identical to SEQ ID NO: 3702
  Synthetic

SEQ ID NO: 3704 - protein, 176 aa, Artificial Sequence
  Synthetic
SEIEKVLEELRELVKKAVTDLRRIIEESKRLADEAAKALKDIIRRSEELADRLRKEIRGREVLEEAKKKLDTSNRDAERLVRELKERLDDSHRRLEELVKRLKDDLDRILEELKGTDEKLARELEDVVRKVKETLDRLLEEHKEIIERIKRTLDKLLKEHNEIVERIKRDLDRRRK

SEQ ID NO: 3705 - protein, 176 aa, Artificial Sequence; identical to SEQ ID NO: 3704
  Synthetic

SEQ ID NO: 3706 - protein, 176 aa, Artificial Sequence
  Synthetic
DEMEKVIRDDEKLLEDVLRRLAEIIRRTEKRAEEMVRELEKLIEDSKRKADDVRKRVRTDEVVKRVKEELDESNEKAEKLVRDLKRELEDSNRKAEELVRRIKKENKRTVEEVKGTDEEVVKRLDDIARDVNRTLDKLLKDHNEIVERIERTLDELLKEHNEIVKRIKEDLDRKRK

SEQ ID NO: 3707 - protein, 176 aa, Artificial Sequence; identical to SEQ ID NO: 3706
  Synthetic

SEQ ID NO: 3708 - protein, 176 aa, Artificial Sequence
  Synthetic
DDAETVIERDRKLADEVAKELKRLIEETRDLARRIREELRRLIEELKTLAKRAKDEVRGDEVVEKVKKELDEILKTIEDLVREVKRELDESNERAKELVRRIKKRNDDTVKEVQGTDRDVVRELREIARKINEDLDDLLRKHNEIVEKIKRDLDRLLEEARKILEEIKRELDETKK

SEQ ID NO: 3709 - protein, 176 aa, Artificial Sequence; identical to SEQ ID NO: 3708
  Synthetic

SEQ ID NO: 3710 - protein, 178 aa, Artificial Sequence
  Synthetic
DEEERLRDSVRRSRELIKEIRKRLEESIRRSERINERVREELRRSVRESERSAEEARRRGDLREELLKELEEVNKALEDMLRKNEKKSEDVNEDLRRRIKELEEELERVNDTVRKLIERNRDTETVLEEHKERVKRILDRARDLLRKHRELVEDSRRHLEKLLRDHRKVVKEIEDKIR

SEQ ID NO: 3711 - protein, 178 aa, Artificial Sequence; identical to SEQ ID NO: 3710
  Synthetic

SEQ ID NO: 3712 - protein, 178 aa, Artificial Sequence
  Synthetic
SEEERLRESLERSRKRLEEVKRELERKLEEWEEIVEESRRRAEKSLRESKERIDDLKRRGELREKLEEDLKEVNKEIREMIKRSKDEVERKIREVERRAKRLAEKLEELNKKMKDLADNNRDTEEVLRRHEKVVRRIDEELEELLEELERVIREDTERNKKLLDEHREVVKEIEERVR

SEQ ID NO: 3713 - protein, 178 aa, Artificial Sequence; identical to SEQ ID NO: 3712
  Synthetic

SEQ ID NO: 3714 - protein, 178 aa, Artificial Sequence
  Synthetic
SSEKRLRDSVRESRDRARKIEEDHRRLVEEWERLVKRSEEEVRKSVEESREEVEKAKKEGRLREELRKELEDVNEKLKKDIKRSKEEVKKVIDRSRESVKTLLDRLEKMNRDLEELLRNNSDTDKVLEDHKRLVEKILKEAEDNLRRSRKMIREDEERNRDLLRRHREVVKEVKRKVD

SEQ ID NO: 3715 - protein, 178 aa, Artificial Sequence; identical to SEQ ID NO: 3714
  Synthetic

SEQ ID NO: 3716 - protein, 178 aa, Artificial Sequence
  Synthetic
DKEERLRESLEKSDRDIRRIKEELERLLREWEKRVRDSEKELRDVLRKVTEEAKELKKQGKLREKLLKELDDVRKRVEKVMRKSKEDVKRVIEEVKRRADELKRRLEKVNRDVEEALKRNVDTDDLLRRHKEVVEKILREIEELLRELREAIRRDKKRNDELLKRLAEVAEKIREDVR

SEQ ID NO: 3717 - protein, 178 aa, Artificial Sequence; identical to SEQ ID NO: 3716
  Synthetic

SEQ ID NO: 3718 - protein, 178 aa, Artificial Sequence
  Synthetic
SEKETLERSIRESERILEEVLRELKKVLDEWRRRVEESEKRHRDLIEEVRRRAKKLREDGKLREDLLRELERILRESRESVDKSKKEVEEVIKRVEDKAREIAERLKRMNDEVREAADKNVDTDDLLRRHKELVEEIKELLERLLRELEEVIKRDKDKNDENLTRSKRLIEEIEERVR

SEQ ID NO: 3719 - protein, 178 aa, Artificial Sequence; identical to SEQ ID NO: 3718
  Synthetic

SEQ ID NO: 3720 - protein, 178 aa, Artificial Sequence
  Synthetic
DSEERLKESVKRSEDDLKRLRDEHRKLVEEWRRRIDESERRHRKLIEDVRRRLTEFRKRGDLREELEKRITEAERRSKESVEESRREAEEVIRRSERSVDKLAEELREVNKRLEEAARRNVDTDRLVEEHKKMVKEIRDRVKANLERSRRMIKRDKEKNDDNLRRSKELIDKLEEDVR

SEQ ID NO: 3721 - protein, 178 aa, Artificial Sequence; identical to SEQ ID NO: 3720
  Synthetic

SEQ ID NO: 3722 - protein, 178 aa, Artificial Sequence
  Synthetic
SKEERLRESSRRSEKAVREVEKRHKESVERSKEEIRRLAEELRKSIEDSERRIKEIRERGKARDELLEELRRVNDEVRDRLRRLKERLEEVNKESKDSVDDLKRKLREVNERAKELITRNVDTDRLLEEHRKLVERILEELEKNLERHRRVVKEILDRVKELLDEHRRRVEEIERKIE

SEQ ID NO: 3723 - protein, 178 aa, Artificial Sequence; identical to SEQ ID NO: 3722
  Synthetic

SEQ ID NO: 3724 - protein, 178 aa, Artificial Sequence
  Synthetic
SKEETLKRSSEESKKELKRVDEELEKIIREWEEDVKRSEKELEEVIERAKREAEKLRTRGELREELKRELERVLRDVRRRVEDSKRDVKRELDKLKKDLDAIRRELEKLNKEVEEAMKRNVDTDTLLERHKRLVEEVREKLERLLRRLRKVIKEDRERNKRLIKRLKEVIDEIRERVR

SEQ ID NO: 3725 - protein, 178 aa, Artificial Sequence; identical to SEQ ID NO: 3724
  Synthetic

SEQ ID NO: 3726 - protein, 178 aa, Artificial Sequence
  Synthetic
SERERLEDSSRKSKERLERIARTLEKLLRDWRREVEKSEKRHRELVEKVRRDLDDLRRRGKVREELERKLEELIKESEKSVKRSKDEVEKVIREMEEELKRLVEELERVNTEVREAAERNVDTEKLLRDHKRLVDDLDRRAKELLEELKRVIDEDKKRNEKNLTDSRRLVEELKEEVR

SEQ ID NO: 3727 - protein, 178 aa, Artificial Sequence; identical to SEQ ID NO: 3726
  Synthetic

SEQ ID NO: 3728 - protein, 178 aa, Artificial Sequence
  Synthetic
SSKERLEESSERSERSIERIDREHERSSEESERRLKKMVDDLRRSSEKSKDDLEKLKREGKVREDLERELREVNKELERLARELAEKLRKVNKDSKESVRELEERLRDANRRLEELLRRNVDTDELVERHKRVVEEIEERAERNLRRHKKVVEDILREARKVLEDHKELVERLKERVE

SEQ ID NO: 3729 - protein, 178 aa, Artificial Sequence; identical to SEQ ID NO: 3728
  Synthetic

SEQ ID NO: 3730 - protein, 178 aa, Artificial Sequence
  Synthetic
DAERRLKKSSEDSKRAIDELRKEHEDSSRESKERLDKIKRDHEELVRRARERAEELRRRGKLREELVKELEKAIEESERNVEKLARDLERANEESRRSVEELVKELEEANRRLEELLARNVDAEKLVTDHKRVVETILDKARKNLDRHRRAVEDLLRKARENLKKTEELVRKLDEDVR

SEQ ID NO: 3731 - protein, 178 aa, Artificial Sequence; identical to SEQ ID NO: 3730
  Synthetic

SEQ ID NO: 3732 - protein, 178 aa, Artificial Sequence
  Synthetic
DAERRLREILRRVTERLKEVKERHKRSSEKSKKSADDVRREHEKLAEELRRKVEELKRRGELREELEKEVEDLLRESEESVRRLEEELKEINERSKRSVDKLERELEEVRRTVEDLIKRNVDTDTVIEELKRRIRELEKRLEENLRRHEELVRRIEEELKRNLKRSRDLLKEIEDKVR

SEQ ID NO: 3733 - protein, 178 aa, Artificial Sequence; identical to SEQ ID NO: 3732
  Synthetic

SEQ ID NO: 3734 - protein, 182 aa, Artificial Sequence
  Synthetic
SEAEEVLRRLEELAKRDREENKKVLDDLEKLVREDEERNKEVLKDLEKFIDELDKELRSEGREVVEELEKKLREVVRRVRKKAEDSHRRLEEIVERVKRLLDESSKKVREIVERVKKEVKDLDKDVVRELERLLREWERDNERSREEIDRVIEEARKRNEDSERELDRLIKEVKDRLDEKAR

SEQ ID NO: 3735 - protein, 182 aa, Artificial Sequence; identical to SEQ ID NO: 3734
  Synthetic

SEQ ID NO: 3736 - protein, 182 aa, Artificial Sequence
  Synthetic
SDAEDVLRKLKELIDRDTKENDEVLRKHKRLTDEDRRKNEEVVRELRKIITRLDEKLRAEGKELVDEVAKEVDKVVKDVERLLDESHEENKEVNRDLKRLLDESSKKVEKIIREVEEEARRLDKEVLDRIRDLLRRWRERNEESRRRAEKSIRDSDETNKRSREEIKRIIRKLREILKERKR

SEQ ID NO: 3737 - protein, 182 aa, Artificial Sequence; identical to SEQ ID NO: 3736
  Synthetic

SEQ ID NO: 3738 - protein, 182 aa, Artificial Sequence
  Synthetic
SDVEKVLRELEELIDRDRRDVEKVIEELRKLIKEDEEENREVLKRAEKMLREIREKLRNSGKEFLDELKRELEKVVEEVERLVKRSHDKLRKIERDVEEVAKRSTEDVKRVVDDVERKAKDIDEKFLRDIRETLKRWKERNEELTRRLREIIREVEERNEESKRRLDELIREAEEDMRRRRT

SEQ ID NO: 3739 - protein, 182 aa, Artificial Sequence; identical to SEQ ID NO: 3738
  Synthetic

SEQ ID NO: 3740 - protein, 182 aa, Artificial Sequence
  Synthetic
SEAERVLEDLKRLIDEDRKKLREILEDHKRLTDEDRERNRRVLEELDKIIKELDERLRSEGRELLKKVREELDRVVRRVEDMVRRSHETNKEVNERLKRLLRESTEDVKRIVREVRERARKLDKDVLDKIEKSLRDWERDNERMVKEADRSVKRSDETNEKSREDLERLIEEARRRLKERER

SEQ ID NO: 3741 - protein, 182 aa, Artificial Sequence; identical to SEQ ID NO: 3740
  Synthetic

SEQ ID NO: 3742 - protein, 182 aa, Artificial Sequence
  Synthetic
SEVERVLEELEELARRDEEKNKRVEDRLRKLIEDDRRDLRRILERLREIAERLKEEAESEGKEVLDEVRKKVEDVIREVEKLLRESTKRLEDVKREVEELLKRSREEVEEIRERVERKVKDIDEEFVRRIRDLLRRWKEEVDRSEDRIRRELEKWERENEEAEKRIRKIIEDLRREIKKKAD

SEQ ID NO: 3743 - protein, 182 aa, Artificial Sequence; identical to SEQ ID NO: 3742
  Synthetic

SEQ ID NO: 3744 - protein, 182 aa, Artificial Sequence
  Synthetic
SKLERVLEELERLIREDEDENKKILDRLKKLIDEDKKENDEIMETLKEIARKLTEELRSEGEELLEEVKKRADKAVEDVKRLLEESRRKVEKIVREVRKLLEDSNRKLEEIIKRVEEELKEADEEVLRRIRELIKEVRRRNDESRERIERLLKEWRERVDASERTIREIIKEIKERVRRARK

SEQ ID NO: 3745 - protein, 182 aa, Artificial Sequence; identical to SEQ ID NO: 3744
  Synthetic

SEQ ID NO: 3746 - protein, 182 aa, Artificial Sequence
  Synthetic
SKAEDVLRKLKELIDRDRDENRKVLDELRRLIERDREKNRRIMEKLKKIVRELEEALKVDGKELVKKVEEELRRVVEEVKKLLKESTDELDKIVRDVEELLKRSEEKVEDIERKVREEARELREDVLKRIEDELERWKEEVERSKREIEKLIKEARDENDKSRKTIEKIIREAEKILRDRDR

SEQ ID NO: 3747 - protein, 182 aa, Artificial Sequence; identical to SEQ ID NO: 3746
  Synthetic

SEQ ID NO: 3748 - protein, 182 aa, Artificial Sequence
  Synthetic
SEAERVLEELKELIERDEEENRRILEEHKRLTEEDLRENREVMKRLEDIIRELEEKLRTEGKEELDEVKKEAEEVAKEVKRLLEESTEKNKEVNERLKRLLDESNKKLREIVKKVREDARRLSEKVLTDIERLIREAEKRNRDSKREAEKSVKKSDELNERSRRRIEKIIEELRRLVDTRRT

SEQ ID NO: 3749 - protein, 182 aa, Artificial Sequence; identical to SEQ ID NO: 3748
  Synthetic

SEQ ID NO: 3750 - protein, 182 aa, Artificial Sequence
  Synthetic
SDVEKFLDELRELIRRSKERVDRMLRKLEELIRRSSEDVERLLKELKELIDDIRRLLDENREKREDIRRLVEELRKRVEDIIRKMEESNKRLRDEVEKIIRELEKLNEEVARVIKKAEDDIRGDELRERIKRLLEEHHKRLREAVEELRKLVEDATEEHERLSERAKRLVEEVKKRVDERER

SEQ ID NO: 3751 - protein, 182 aa, Artificial Sequence; identical to SEQ ID NO: 3750
  Synthetic

SEQ ID NO: 3752 - protein, 182 aa, Artificial Sequence
  Synthetic
DEVEKVLRDLEELIRRSETDIRRLLEELKKLIDDTRREVKKVLDDLRRRIKEVLDRIRRNPEKREEIERLVRELKRKVEEIEKRLERLNEEVERKIREIIRRIRETNKTLRKKVRELEKRLRGDEARERLKDTVTKASRRHEKVERDLEKLLEEHHRAIEKLRKELRDLVRKAKEDIDRARK

SEQ ID NO: 3753 - protein, 182 aa, Artificial Sequence; identical to SEQ ID NO: 3752
  Synthetic

SEQ ID NO: 3754 - protein, 182 aa, Artificial Sequence
  Synthetic
DEAEKVRREHRELVEDSLRKAEEALKRLDELIKRTEKRVKDVEEELKRLIKRVLDEVRKNREKREDIRRLVKELRDKVREIEDEMRKMNEEVRREVKKVEDDLRRTNRELHEKVKDVERKLKGDEVKRRLRTSDKKVSEKHKELLDRLRELLRRHHESLKRLEERIRKLVTDATRRIEEEEK

SEQ ID NO: 3755 - protein, 182 aa, Artificial Sequence; identical to SEQ ID NO: 3754
  Synthetic

SEQ ID NO: 3756 - protein, 182 aa, Artificial Sequence
  Synthetic
DEVEELLKEHRELVKESKKTVEKMLRELEELIKRTRDEVEKVERTHEELVRRVDEVLKRRREVAEDIERLLREIHKFVEDVKEKIKKLNEDVAKVLREITEDIKRTNKELHDVVERVTRRIEGDELKERLKESDKEASDLHEKAREDLERLLKKHHDDLRKIMERLERSDKEAKKRLEEEKT

SEQ ID NO: 3757 - protein, 182 aa, Artificial Sequence; identical to SEQ ID NO: 3756
  Synthetic

SEQ ID NO: 3758 - protein, 182 aa, Artificial Sequence
  Synthetic
DEVEKLLKELEDLRRKTREDLERVKKELEELVKRSKDRLREAEDELRRLVEDIERVIREDREAREDIRRLVEELKKKVDDIRRTLEESNEELRRKVERIIRELERANRDVREKVKEVERRIKGDELKKRIRELVKEHTDELRKVKRELEALVEKATEDHERVLRRLEELVERIKREVDKAEK

SEQ ID NO: 3759 - protein, 182 aa, Artificial Sequence; identical to SEQ ID NO: 3758
  Synthetic

SEQ ID NO: 3760 - protein, 182 aa, Artificial Sequence
  Synthetic
SDAEDLLREHRELVERSKREVERVLDELRRLIEKSLREVEKVLKELEKLIREILDRVRKNSEKEEEIERLERELEKIVEEIERRIETSNRELKRIVKEIIDEIRRTNKELHDKVRDVERKLRGDRVREELRRSDEKVSRDHEELVKEAERLVDEATKEHRKLKRRIRELVRRAKEEIEKLRK

SEQ ID NO: 3761 - protein, 182 aa, Artificial Sequence; identical to SEQ ID NO: 3760
  Synthetic

SEQ ID NO: 3762 - protein, 182 aa, Artificial Sequence
  Synthetic
SKVEDILRRHRELVKKSLDEIRDLLRKLKRLIEESLRRVEEVLRDHERLVREIEDRVRKNREKREELRKLLEDLHRKLEEVEREIRESNKKLAEEVRKIEETIRKTNKELHDTLRDAERKIEGDELKRRLRESDKRVSERHKRATEEIKKLLDRATEEHKKLVKRLRDSDKRVADELDKAEK

SEQ ID NO: 3763 - protein, 182 aa, Artificial Sequence; identical to SEQ ID NO: 3762
  Synthetic

SEQ ID NO: 3764 - protein, 182 aa, Artificial Sequence
  Synthetic
DDVDRVRKEHEKLVRDSLDTARKLLEELEDLIRRDKEDVERVLEELKRLIEEIDDRVRRNREKREELRELLKELEKRVRDIVKKNEESVDELRKKVEDIIRRLAETNKRLHDRLRDVERKLRGDELIERLRRSDKRASEEHKRLMDEAKRLVEKAEKDVTELNKDIKRLVKEVEDRLREAER

SEQ ID NO: 3765 - protein, 182 aa, Artificial Sequence; identical to SEQ ID NO: 3764
  Synthetic

SEQ ID NO: 3766 - protein, 178 aa, Artificial Sequence
  Synthetic
DEVKKVLDESRELVDRIRRKAKEVDDRDRKLIRDVLEELKKLLEENRKLVEDIRRLLEAGVSEDELRRLLEESRELIKRVKERLDDALRRLEESSKTWKEELDRLLEENEELIRRAEEAGVDKETLRRLHEETERILRDLKRHNDELNDEARKRLKEVKERLDESHDRVRRELEAKER

SEQ ID NO: 3767 - protein, 178 aa, Artificial Sequence; identical to SEQ ID NO: 3766
  Synthetic

SEQ ID NO: 3768 - protein, 178 aa, Artificial Sequence
  Synthetic
KDVEEILRKLKELIDEARRRLEKTLRDHEDIVRRAKRRLEELLKRHRDIMDEVRRKVRTKELLDTVREDSKRVVKEAREILEELKRISEKVVEEHKRLSEELKRRLDKILEELERRGVPEEARRRLEEEVRKVRKEIEDVNRRLEKSHKEAEETLRRVEEELKKSHDELERILREIER

SEQ ID NO: 3769 - protein, 178 aa, Artificial Sequence; identical to SEQ ID NO: 3768
  Synthetic

SEQ ID NO: 3770 - protein, 178 aa, Artificial Sequence
  Synthetic
DDVEEILRTLRELIKKIKKDLKKVLDDHERIARRAKEELERILRRHREIVERVDRKVRTEEVATRVAETSKRVVDDARRILKRIAEISREVVEDLKRILKEAAEALRELLRRLEEAGIPDEARKKIEDIVREVEDDLRRVAKAAEDSNRKLEKDLREVAERLRKSHEEAEKALRDREK

SEQ ID NO: 3771 - protein, 178 aa, Artificial Sequence; identical to SEQ ID NO: 3770
  Synthetic

SEQ ID NO: 3772 - protein, 178 aa, Artificial Sequence
  Synthetic
DDVRRLEEELRRLMEEAERRLRKTLEDHKRIVEEAKRRLEEILREHKRILEEIDKRVRTEEVLDEVLRESKRVVDDARRILKELKETSERVEERHRRLSKELKKLLDEILERLARRGAPEELKKRVEDLVREIRRRLDKVNEDLERSNRELEKVLRDVLRELKKSHDDLERSLRETRR

SEQ ID NO: 3773 - protein, 178 aa, Artificial Sequence; identical to SEQ ID NO: 3772
  Synthetic

SEQ ID NO: 3774 - protein, 178 aa, Artificial Sequence
  Synthetic
DEAEKILDELRRLIDEIRRRLRKTLEEHKRILERIRRELEKMLEEHRRIVDEMRRKLRTEELIKEAEDRSREILRRVKEIVDRVREESRDVVRRHEELSRELKKLLDEILERLKKTGLPEEVTRRLEKLVRDVDRDIKRVNKELEKSNRELEKDLRAVEKRLEDSNRDARKKLEDTRR

SEQ ID NO: 3775 - protein, 178 aa, Artificial Sequence; identical to SEQ ID NO: 3774
  Synthetic

SEQ ID NO: 3776 - protein, 178 aa, Artificial Sequence
  Synthetic
DDAERILEELKRLMEEVEKRLKDTLDTHREIARRILERARESLKRHEDIAREIERDVRTEELLKRVLEDSERVVRDHERLSREVAKDSKRVLKEHEELSRRVARRLEDILRKLEERGVPEDVKRKIRELVERAKKRLKEINDELKKSDEDLDRKLEDLNRRLEESNEELKRRLDETRR

SEQ ID NO: 3777 - protein, 178 aa, Artificial Sequence; identical to SEQ ID NO: 3776
  Synthetic

SEQ ID NO: 3778 - protein, 178 aa, Artificial Sequence
  Synthetic
SDAEKLLEDIRKLTEDVERDLRRSLEELKDLIRRLKKEIEDLLERHKRIVDKVVREVRTEEVLREVKKESDKVLKELEELVDRIKKRLDELLKRHRELSEEIKRRLRELLKRLRDRGVPEEVKERVERLVREVEKRLDEVDKELEEEVDKARKELEKLLEDIDRSDKEARKRLEDKRR

SEQ ID NO: 3779 - protein, 178 aa, Artificial Sequence; identical to SEQ ID NO: 3778
  Synthetic

SEQ ID NO: 3780 - protein, 174 aa, Artificial Sequence
  Synthetic
SKEDEIRRLIEDLERRNKEVEETLRELVRETRERIERIKRRLEELIKKSKDEVDDARRKGKVKEELEKKVREIVDESRRLLERLEERVREAVEESERLVERDKEDSRRIKKEIEDIPGSEELLERLERLIDKSRKNVEDIVKRHEDLSRELTERAKAILERHKELTDELREDVR

SEQ ID NO: 3781 - protein, 174 aa, Artificial Sequence; identical to SEQ ID NO: 3780
  Synthetic

SEQ ID NO: 3782 - protein, 174 aa, Artificial Sequence
  Synthetic
SEEERIERLIDELRRDNDEVRKRLDKLVKDTERENEEAERRLRRLIEESRREVEKLKAEGKVKEELERDVERIVKESEDLLRESHKEVEEMVRKSRELVEDDKRRSDEVVERVERIKADEELARELEKLIEDSRRNVKRIKEEHEELSRRNRKLLEDILERHRRLTEELRKKVK

SEQ ID NO: 3783 - protein, 174 aa, Artificial Sequence; identical to SEQ ID NO: 3782
  Synthetic

SEQ ID NO: 3784 - protein, 174 aa, Artificial Sequence
  Synthetic
SKEREIEELIKELEEEVERLKEELRRIIKKLRDDNKRAEEELERLIRESKEDLDRARKEGKVKEEIEKKLRRIIEESERLVEEDKKKSEEIVKRIEELVKKLEKKVRDVAERVRRIPAAEELRKELEDVRRKLKEEIDRILEEAKRVVDDSRRNAEEITRRHKEATKRLREEVE

SEQ ID NO: 3785 - protein, 174 aa, Artificial Sequence; identical to SEQ ID NO: 3784
  Synthetic

SEQ ID NO: 3786 - protein, 186 aa, Artificial Sequence
  Synthetic
SIAERLKELIDRMREDNERAAKELRELIRKAKEESKEVEERLRRRLKELRDRVEELVRRNSEGDKKVREIRKKLEEIIEEIERLLRENEKLVREIEKRIKELIDRDRKRSKEIEDRIRDLIRKLKDLKEMLDRILEELKKLIKESRENLRRILEDLKRLLDESRRHAERITRRLEELIKELKEKAD

SEQ ID NO: 3787 - protein, 186 aa, Artificial Sequence; identical to SEQ ID NO: 3786
  Synthetic

SEQ ID NO: 3788 - protein, 186 aa, Artificial Sequence
  Synthetic
KARERLKRLIEEAKRRNEEMEKELDRRLDELRRESKTLEEDLRRSLEELEERIRRLVKRNSEGSEKIERLKRLVEEIKRRVERAIEENKELVRRIIERIKRLIKENRKLSEDIERRIDDLIRKLKDLREMVEEILRELRKLVEDSLEVLERILDDLRRLIEESRKHLEEVKRRLEELKKRLEDEAR

SEQ ID NO: 3789 - protein, 186 aa, Artificial Sequence; identical to SEQ ID NO: 3788
  Synthetic

SEQ ID NO: 3790 - protein, 178 aa, Artificial Sequence
  Synthetic
KEVEKILEEIERLIREIDREVKRVKTENEKTVRDIRKRVEEIKEEHKDLTRKLEKLARDGVPEERLREVLKRIEDRTREVIEELRELLRRDEKKVRDMIRKLKDLVKKIEDRVRKVELSDEARKRAEDLLRDAKRRVDEVVEELKKTVEELKEEVRKVEEELKELVKRSEDKVRETER

SEQ ID NO: 3791 - protein, 178 aa, Artificial Sequence; identical to SEQ ID NO: 3790
  Synthetic

SEQ ID NO: 3792 - protein, 182 aa, Artificial Sequence
  Synthetic
SEVDKVLKEHEDLVREDKKRLEEILRELKDRLRRDEEELRRIMEELEELLRRLKDVVDKRREDRETLRRLLEELRKKVEEVKRRNDRSVRELEKVVRKVVKENEDSLREVHKRLRDVEKDLRKKEMIDRLRRSDEELKKEADRANEEAKRIVEKIRDTLKKANDKLDEIVERIEDELRRAET

SEQ ID NO: 3793 - protein, 182 aa, Artificial Sequence; identical to SEQ ID NO: 3792
  Synthetic

SEQ ID NO: 3794 - protein, 182 aa, Artificial Sequence
  Synthetic
KEAEDVEEEHKRLVEDDRRKLEEIKKTLERLVEEDRRRLEEVVRELKRLLDEITDVLTKRREVEKDLEKLLEELERLVKKVVDENKKSVETLTRTVEKVSRDNKRTLKEVHDRLRDVERKIKDDEVRKRLRKSDKELRDEAREVNKELEAIVKRARDEVKKVNDDLRKIVDEVRETVKEARR

SEQ ID NO: 3795 - protein, 182 aa, Artificial Sequence; identical to SEQ ID NO: 3794
  Synthetic

SEQ ID NO: 3796 - protein, 182 aa, Artificial Sequence
  Synthetic
DEVREVKKRLRDLIRDDERELRRVLEELKELVKDDVDKLRRLIEKLRKLLEELRRVATKRREVREELRKLLKELRDEVRKASEENRESVERLERRVREISERNKKSLKELRDVVEDVTRKLRDEKAREELKRIVEEVEEKSRRANKKLKDIVDEMRERVKRANEELDDIVKKITEDLERMRK

SEQ ID NO: 3797 - protein, 182 aa, Artificial Sequence; identical to SEQ ID NO: 3796
  Synthetic

SEQ ID NO: 3798 - protein, 182 aa, Artificial Sequence
  Synthetic
REVDEVRKEHERLVKEDEDKLRKIIEDLKKLLREDEKRLREALKRHRELVEEARDVVRKRKEDRERLRKILEDLHRMVRKVSKDNKKSVEDLEREVRRVSTENKKSLEDIHRMLKDVAEKLRSDKVKKELEESDRRVEEKSRRANETLKRIVEEIRKKAEEINRRLKESDDRAAEDIKRVEK

SEQ ID NO: 3799 - protein, 182 aa, Artificial Sequence; identical to SEQ ID NO: 3798
  Synthetic

SEQ ID NO: 3800 - protein, 182 aa, Artificial Sequence
  Synthetic
DEARRVKEELDKLRREDEELLRRLMEKLKDLIRRDTEELKRIIDELRELVERLEDELRRRREDRERLRELLRRLEDRVRRVSDKNRKSLEDLERVVEEVSRENEKTVRRLEKKVKEVEKDLKDEKVREELRRIVDRVKKEVDRANRELEDIRREVEEISKRANEELERIVTEAADRLRKVAE

SEQ ID NO: 3801 - protein, 182 aa, Artificial Sequence; identical to SEQ ID NO: 3800
  Synthetic

SEQ ID NO: 3802 - protein, 182 aa, Artificial Sequence
  Synthetic
SEAEKVIREHERLLEEDRRRLEEALRTLERLAERDEERLKEAEERHRDLLRKLEETVKKRREVREKLRKILEEIHRTVKKVSEDNEKSLRELKEKVDRISRDNEETLERAHRRLRRVEERLEKDEVKRRLRKSDEDVKRRAEEINKEAKEIVDDVKKKSDEANKRLKDSDKRVAERLKEAED

SEQ ID NO: 3803 - protein, 182 aa, Artificial Sequence; identical to SEQ ID NO: 3802
  Synthetic

SEQ ID NO: 3804 - protein, 182 aa, Artificial Sequence
  Synthetic
SEVEKVIEDHDRLLKRDEELLRKIAEDLKDLVRRDEERLRRATEKLKRLLETLEDVLRKRREVREDLRRLLKELKEAVKRISTENKKSLDKLREDVERVSRANEKSLRDAHRKLKDVEDKIKDKEVKDKLRRSDERVEKRSRDANRELEEIVRRARKKSEEANRRLEEIVERAEKRLKEAED

SEQ ID NO: 3805 - protein, 182 aa, Artificial Sequence; identical to SEQ ID NO: 3804
  Synthetic

SEQ ID NO: 3806 - protein, 181 aa, Artificial Sequence
  Synthetic
SEVDKVVEESKTSMRRLERRHREATKESKKSIEEIEETVERVKRESEKSVKKLDDLVKNGSDKSALERALEENRRLIEEIKRTLDRLLETNKRLIEEISRESKELLEENKELIERIEKDVKDEEVRRRLRKIHKELEERLRRMNKRLRELHRELEEKVKEVKKELEDIHRKARERVEKAKE

SEQ ID NO: 3807 - protein, 181 aa, Artificial Sequence; identical to SEQ ID NO: 3806
  Synthetic

SEQ ID NO: 3808 - protein, 181 aa, Artificial Sequence
  Synthetic
EELKEVRERSKESIKRIKEEHERVEEELKDIKRDIDRRHKEVVDESRESVKRVEDLSRADVDEEELRKLLERNKELIDRASEESKRMLEDLERVVREASEKSKRLLEENKKLIDDIERRVKDEEVRRELREIHDELRKRVEEANKRLEDILREIDKRLKELNEELKRIHDRARERLEEERR

SEQ ID NO: 3809 - protein, 181 aa, Artificial Sequence; identical to SEQ ID NO: 3808
  Synthetic

SEQ ID NO: 3810 - protein, 181 aa, Artificial Sequence
  Synthetic
DEIREVIKESKKSVEDVKRRHEEAKRESERSLKEIRELAEEVKERLRDLLRRIRKLVKDGVDEKTLEELLRRIEELLKRIKDRLDEMLERNRELIKKISDDSERLLRDNERLIRDIERKVKDEEVRRRLRKIHKEAEERLRRANDELRKLHEEIKKTVEKIKRELDKIVEEIERDVRRDRK

SEQ ID NO: 3811 - protein, 181 aa, Artificial Sequence; identical to SEQ ID NO: 3810
  Synthetic

SEQ ID NO: 3812 - protein, 181 aa, Artificial Sequence
  Synthetic
SRVEEILRDSKRSMDEARKEHERVLRELRDRLRRLDERHRRLLEELKRLLREVRELTRAKVSERELREALKTIRELLRKISEESKRLLEEIEEVLKRISDTSKRLLEENKKLIDDARREVKNEEVLRRLDDIHRRIKRELKEVNDRLEEIVREIRKRLKEVNERLKEIVDAVEEVVRRAEK

SEQ ID NO: 3813 - protein, 181 aa, Artificial Sequence; identical to SEQ ID NO: 3812
  Synthetic

SEQ ID NO: 3814 - protein, 181 aa, Artificial Sequence
  Synthetic
KRLEDVARESKKSIDEIRKRHKEATDESNKSIEEARRIHEEVLRTLKELLDRVRKLIESGVSERALDEALRTIKELLERISRTSEELLRRNRELIERISKESKELLDTNRKLIEDIEREVDEEEVRRDLRRIHERLREEAEEVNERLERNHEELEREARKVNEELRKIVEDARREVERAKD

SEQ ID NO: 3815 - protein, 181 aa, Artificial Sequence; identical to SEQ ID NO: 3814
  Synthetic

SEQ ID NO: 3816 - protein, 181 aa, Artificial Sequence
  Synthetic
DDVEEIKRRLEELLERLKEDHKRMLEESRKSVEDAEKIVEEVKKESEDSIREIKKLLKDGVDEDTLRELLDRNRRLIERIKEDLDRLLKENRELIKKISERSEKLLREIRKVVKEAKDRVKDEKVKRELDEIVKRIEDEARKVNEELKRIHDDAERKVRKVKEDLERIHRELKKRVEDDRT

SEQ ID NO: 3817 - protein, 181 aa, Artificial Sequence; identical to SEQ ID NO: 3816
  Synthetic

SEQ ID NO: 3818 - protein, 181 aa, Artificial Sequence
  Synthetic
KEDERVEEELRKLLKELEDRHKKASEDSRDSIRRIRERARTVLEELKRVLEDIDRLIKADVREEELKRALEELEKLVREIKKELDDLLDKNRKLIEKISKESRELLEKIERVLEDIRRRVKDEEVKRRLDKIVDDVRERLKEMNDRLRRLHEELKRELERIKEELDKILEEVKRRLEEARR

SEQ ID NO: 3819 - protein, 181 aa, Artificial Sequence; identical to SEQ ID NO: 3818
  Synthetic

SEQ ID NO: 3820 - protein, 178 aa, Artificial Sequence
  Synthetic
ELEERLTRSNDELRKELKRMNEELRRKLEEIRKELERLNEKLREIIERIKEDLDRRARDKDKVKRVTDELRELLKRAHDISRELLKTLEKLIREIHKLSKELLEESDRLLDEARKKVKGRELAEEFLRRHKELVERIREIHERLRERLEELLRRIEELHKRLEDELREVLKRIEDEIR

SEQ ID NO: 3821 - protein, 178 aa, Artificial Sequence; identical to SEQ ID NO: 3820
  Synthetic

SEQ ID NO: 3822 - protein, 178 aa, Artificial Sequence
  Synthetic
KKEEDLDESNKRARDELKEMNDRLRKIVKEIEDELRRLNEEARRSNEELRRRVEERLKDKETADRVLKESEDLLRTIHKLSRDLLKELEDLLREINKRSRELLEESDRLIDRIRKEVKGDELAKKVIKEHEDLVREVLKRHEDLLRRARELLKKIKEIHDRLLDEHRKLVEDIEREAT

SEQ ID NO: 3823 - protein, 178 aa, Artificial Sequence; identical to SEQ ID NO: 3822
  Synthetic

SEQ ID NO: 3824 - protein, 178 aa, Artificial Sequence
  Synthetic
DRERELEKSNRELERELREALKRVKEIIDRIRKTLEDMNRRLKRSNEEAERRLREKARDKDKVDKIVTESKKLVEDIHRTSRELVRELEKLLREMERILRELKRRSEKLIKEIRDKVRGDELAERVIREHRRLAEEIRRLIEKLKREIEELLERARRTHEDLLRKHKELVKKVDEEIR

SEQ ID NO: 3825 - protein, 178 aa, Artificial Sequence; identical to SEQ ID NO: 3824
  Synthetic

SEQ ID NO: 3826 - protein, 178 aa, Artificial Sequence
  Synthetic
DDEEEVKRSNDELRKEIKEAEERLEKSNRELEEDLRRMNRELEESNKRLRELLEREARDEEKVRRVIRESERLVEEIHKRSKELEERSRELIKRIRDELRKLIERSDRLLKDVKDKVRGKELAEDMLRRHRDLVREIRELIDKLTRDHDRLVKEAREIHKRLTERHRKLVEDIKRETD

SEQ ID NO: 3827 - protein, 178 aa, Artificial Sequence; identical to SEQ ID NO: 3826
  Synthetic

SEQ ID NO: 3828 - protein, 178 aa, Artificial Sequence
  Synthetic
SKEEELEKSNRKLKEDLERMNEDLKRILREVEDVLRRIEEELEKLVRELEEILKRRVKDEDKVREMVKRAKDLLDEVREVLKRLRDRLEELIRRIHERSKDLLRESKRLIDEIRRKVRGDELAEEVIDRHRDLVRRIKDEHRKLTDELRKLLEDIERLAEEAKRKLEKLIEDVEREAN

SEQ ID NO: 3829 - protein, 178 aa, Artificial Sequence; identical to SEQ ID NO: 3828
  Synthetic

SEQ ID NO: 3830 - protein, 175 aa, Artificial Sequence
  Synthetic
SSEERVKKVVEELEDLIRKIREEHKDSIRENRKVVEDIRERVKELITELKKELEDKLKDDKDIVREVEKILKEVKEALDRVAEENEEVDRRSEESLRRIEEKVRRAIRTVEELVRRNVDTEDLLRRLRKLIEDVFREARENLKRHKKMSKEAKEKLEELLKRLRDLIKEAREKIK

SEQ ID NO: 3831 - protein, 175 aa, Artificial Sequence; identical to SEQ ID NO: 3830
  Synthetic

SEQ ID NO: 3832 - protein, 182 aa, Artificial Sequence
  Synthetic
SEADEVLRTHEELVRELEERAKEILRRHRKLSEESERKAREVLKTLRDLIRELKKLADEGSRRREDLSRRAERIKEEITRVVEELERENRRIDEELKKLVKELEDRMKEINDRLRELLKRDKDEEIARRIEESEDKSRRIIDEVRERVRKSIEENKRVVEEVRERVERLIKELDKIVEDIRR

SEQ ID NO: 3833 - protein, 182 aa, Artificial Sequence; identical to SEQ ID NO: 3832
  Synthetic

SEQ ID NO: 3834 - protein, 181 aa, Artificial Sequence
  Synthetic
DELEKVIEELKRRIEEVKKELTELNKELKDVSKEIEDVIRDLNRELKKLSDRIKELADRDNNDDLLRKLHKRLEDLHRETKERITEMLERLERLHRDTKRRIEEVLREIEKRVDEIKKKTTDEEIRRRLDEVLRKAEEDLRRAEESNDEHLRKSKEDVERARKSNDKHLDDNRKTLEEATR

SEQ ID NO: 3835 - protein, 181 aa, Artificial Sequence; identical to SEQ ID NO: 3834
  Synthetic

SEQ ID NO: 3836 - protein, 186 aa, Artificial Sequence
  Synthetic
SDVEDLLRRLRKLTKDIEERVKELNKKLEDVSRDIKRRVEEVLKKLEDVLRKARDEVRKLGDDGGAEELLKDILRRIAELLRELDETLKRVDKKIEDIVEESKELLRKVNEEVKKVVDEIRERNKDLDRAEKELRKILEDHKEISDRVRRSNEKLLRDHRRTSETVKRRLEKVLEDIRKELEDAKR

SEQ ID NO: 3837 - protein, 186 aa, Artificial Sequence; identical to SEQ ID NO: 3836
  Synthetic

SEQ ID NO: 3838 - protein, 180 aa, Artificial Sequence
  Synthetic
DVEERVKTIVDDIERTLDEVRRRLEESHKRLEDALKEVDDRLKKLLKETEEVLKRIEDERGKREELDDVRRRAEKSARDLKRLLDEIRKESRRILEELRKLLDDIRKEVREVLERLARVKEKEKVEELLRRLREILERVTRRLEEVLKRHRDLVEEVKKELERVLEDHKRLSEDAERRAR

SEQ ID NO: 3839 - protein, 180 aa, Artificial Sequence; identical to SEQ ID NO: 3838
  Synthetic

SEQ ID NO: 3840 - protein, 180 aa, Artificial Sequence
  Synthetic
SVEEALEKSVKESEEVLKKAEKELRESHEDAKRVLKEVRDELERLMEETKKELRDVERKRGRRDELERIKKRVEDSLRKLEKLLKEVKERSEDLLRKLKTLLREAKKRNDEVREELARVRDKEKVDRILKKDKDLIDRVRRELKKMLDRHRKLVEDVKRELEEALKEHKDDSKRVRDKLK

SEQ ID NO: 3841 - protein, 180 aa, Artificial Sequence; identical to SEQ ID NO: 3840
  Synthetic

SEQ ID NO: 3842 - protein, 180 aa, Artificial Sequence
  Synthetic
DIEDRLERVVRDAKRVLADVEDKLRKLLEETERMLRRVKRELERSHEEAEEELRRVEEERGRTEDLERVKRESEEVVKRVKKILDEIREKAKDSMRKLKELLKRVEERVREVLEELARVDDKKLLEDILRKLRKIIEEVKRTLEEALKRHRDLTRKVVEELEDLLRKHRRIVEEVKKRLK

SEQ ID NO: 3843 - protein, 180 aa, Artificial Sequence; identical to SEQ ID NO: 3842
  Synthetic

SEQ ID NO: 3844 - protein, 180 aa, Artificial Sequence
  Synthetic
DIEDELRKSVKRSEEVLREVEERLKRLLEETKEVLTRARETNEKSHRELEDKLRKIEEERGEDRTLDEVRRESEELLKESEKTLRELLERAKKSVKELKELLDEVRKRNKEMEERLRRVTDESKLRELLKRDKKEIDDVKRELERLLEDHKRLTEEIRRRLKRLNEKHREIVKRVEKELK

SEQ ID NO: 3845 - protein, 180 aa, Artificial Sequence; identical to SEQ ID NO: 3844
  Synthetic

SEQ ID NO: 3846 - protein, 180 aa, Artificial Sequence
  Synthetic
DVEDRLRESEKRSEKTLKDVEERLRRSHEDLEKKLREVEKRLRDSHREAEKTLKRVKEEKGERETLREAEKTSRKVLEDLKRLLDEIREESKRIVKKLKDILDEARKRNEEVREELARVDDKEVVRKILEDDKRLIEEVKKELERVLEEHRRLVEKVKRELEEVLKRHKEIVDDVRRRLE

SEQ ID NO: 3847 - protein, 180 aa, Artificial Sequence; identical to SEQ ID NO: 3846
  Synthetic

SEQ ID NO: 3848 - protein, 180 aa, Artificial Sequence
  Synthetic
SIEDELRKIADEARKVLDKVRKDVERSHREAEKKLREIDKRLKDSARDSKRVLDEVREERGEREELEKARKENEEMLEKLRDLVRKVKKESEEMVRRIRKILEEVKREVEKVLEELARVKEEEKLERILRKLKKIIKDVEDELRKLLEEHRELVKKVEKDLRDLLERDRELIEEVERRLR

SEQ ID NO: 3849 - protein, 180 aa, Artificial Sequence; identical to SEQ ID NO: 3848
  Synthetic

SEQ ID NO: 3850 - protein, 180 aa, Artificial Sequence
  Synthetic
DIEDRLRTSVKKSRDVLEEVERKLRDSHRRAKEVLDKAREDLRKSKEDSKRVLDDVRRKRGDREKLDKARRDNERVEERAREILDRVRRDSERLLKRLKDLLDEVRKRNEKVREELARVKEKEKLEDVLRRDEELIDRVRRRLERILEEHEELVKRVEEELRRVLEEDRKLIKRVKEELE

SEQ ID NO: 3851 - protein, 180 aa, Artificial Sequence; identical to SEQ ID NO: 3850
  Synthetic

SEQ ID NO: 3852 - protein, 180 aa, Artificial Sequence
  Synthetic
DIEDALRDSERESEEVLKRAREELEKSHKEVKKRLDEVEKTNKDSVDESKKVLDDVRRKRGELEKLKEATERNKRVLDTSRTILKRLLEESEEMVKRARRILDEARRRNEEVAEKLKRVTDKELLKKILKEDKELIKRVEEILRRILEEHRELVRRMKKELDELNKRDKELIDRVREELT

SEQ ID NO: 3853 - protein, 180 aa, Artificial Sequence; identical to SEQ ID NO: 3852
  Synthetic

SEQ ID NO: 3854 - protein, 180 aa, Artificial Sequence
  Synthetic
DLEEEAKKSVRESERALDEVRKRLDRVRKEVERELRKVEEDLRRSHRKLEDILRRVAEKRGPAEALERIEEDSRRVLEELKKLLDDLRRRLTELAKRLEELLRRLEEDNRRVLEEAKRVKDEEAARRILERDKALIEKAREDLKRILDEAREILKEAAKRLEDILRKHKKIVEDVARELE

SEQ ID NO: 3855 - protein, 180 aa, Artificial Sequence; identical to SEQ ID NO: 3854
  Synthetic

SEQ ID NO: 3856 - protein, 188 aa, Artificial Sequence
  Synthetic
KIEEEVEKLIRDARRIIEEMRESTERLIERNEEVLETVRREVEKLLRDLERILEKIKRELEGDERVKELLRRVEKLLREVKKRVEELERENREELRKLEERSRKLLEDVKRLADELRRRVEKMSKDNVPEEVLRRILEEIRKIVEDVRRELDTLNRELEELTKESRRRAEELLRRLKEIVKKVERDAE

SEQ ID NO: 3857 - protein, 188 aa, Artificial Sequence; identical to SEQ ID NO: 3856
  Synthetic

SEQ ID NO: 3858 - protein, 181 aa, Artificial Sequence
  Synthetic
REVEEILKEVETLIRENKKKLEEWLRTHEKLNEDLERKAREILTRHRRENEDLKRVADDGKDKRDIKRKIEKLERETRKLIDELKKEVEEVIRRSKEAVKRNNDEDREMVEKLKEDLKRVDKDEVKRRIEELIKKSKRVNDEANRRVDKLVKDTRDKIREIEERIRKLIEESKKLLEDKRR

SEQ ID NO: 3859 - protein, 181 aa, Artificial Sequence; identical to SEQ ID NO: 3858
  Synthetic

SEQ ID NO: 3860 - protein, 181 aa, Artificial Sequence
  Synthetic
REVEEILRRVRELIERNRKEVEDWMRRHRRVNEELKRKAREILERIKEMLKTLKEVLERGRDKREIAERVKKVEKEVEELLRRLKEEVERLAKESEDVVRKNNKKDDEVVKELRELLKRVKDDEAAKRIEKLIKESRERNEEVNRKIKKLIEDTRRVVEDVRRKVEELVKRLRTELDRARK

SEQ ID NO: 3861 - protein, 181 aa, Artificial Sequence; identical to SEQ ID NO: 3860
  Synthetic

SEQ ID NO: 3862 - protein, 181 aa, Artificial Sequence
  Synthetic
SEAEEIAKRAKEAIERNRKLAEEWAKRARDAAERLKELYKRIAERHRKANEELRRAAERGEDLDKIREDAERAIEETERLIEKANRETRKAIEELKKAAKENNDEDRKAAEEAKKLAEKVKDDEARKRIRELIERSKKANKEANDRARKLAEDAKRLNEEANERAKRLAEESREAIKEAER

SEQ ID NO: 3863 - protein, 181 aa, Artificial Sequence; identical to SEQ ID NO: 3862
  Synthetic

SEQ ID NO: 3864 - protein, 182 aa, Artificial Sequence
  Synthetic
REVEEVAKELRELIKRTEDLIRRALERNRKLVKETRDLIEKVLRDLRDLLRRLEEEARRRGKDEDVLRTLRRLLEELKKKVDEVLKELRRSHEELKKHSDKVLKELKESHDRLKEKVDEVRRRGVDDKTLRDLLREHKELVEEAKRRLEESNDEHRREVEDAERRIEEIVRDAKRVVDEIER

SEQ ID NO: 3865 - protein, 182 aa, Artificial Sequence; identical to SEQ ID NO: 3864
  Synthetic

SEQ ID NO: 3866 - protein, 182 aa, Artificial Sequence
  Synthetic
SEVEKVVTELRRLIERLEEVIRRALDTNRKLLEDTEKEAERMMRKLEELIKDLERDLREKGRNEEVEERLDRLLETIKRVVEEVKERLERSHERLKRHSEEVLRTLERILEEIERRVREVERRGVDKETLRKLLKELREVLDKAREDLERSNRDHRRAVEEIKERLERLLKKLEDVVRKAKE

SEQ ID NO: 3867 - protein, 182 aa, Artificial Sequence; identical to SEQ ID NO: 3866
  Synthetic

SEQ ID NO: 3868 - protein, 182 aa, Artificial Sequence
  Synthetic
KEAEEAAKKLKDLIKEDRERARRALEENKRLIDELRKAAKEALDRNRELLERLRDEARKRGNDEEAAETLDRLLKELRDHSKKAAEELEKLLEDINRHSEKAARENEESLKRIREEAKKAKDGNADKDTAEDLLRRATRDSEEAKKKLKKSNEEAAKAVEEAKERLKRSVDEATKAVEEAKR

SEQ ID NO: 3869 - protein, 182 aa, Artificial Sequence; identical to SEQ ID NO: 3868
  Synthetic

SEQ ID NO: 3870 - protein, 178 aa, Artificial Sequence
  Synthetic
SEVEKALEESKESLKTIKKIAKDVLTESEESLRRTKKLIEEVLEASKRSIEELKRLSEADTREKDLDKLLDDNRRLVEKIKKELDDSHRDNRRLVKEIKETLERLLRENKKLVEEIRKAGVDEDELRRLHEDVKRLVEEIAKRLDELHDRHRETVKRAKEELDKLHDRARKEVEDDKR

SEQ ID NO: 3871 - protein, 178 aa, Artificial Sequence; identical to SEQ ID NO: 3870
  Synthetic

SEQ ID NO: 3872 - protein, 178 aa, Artificial Sequence
  Synthetic
SEVEKVLKDSEKSIEDAERIARDVLRKSEESIDRIRRIAEEVLKESEKSIRDAKKLAEDGVSEEALKRVLDTNKELVDRIKKALEDALRRNEELVRRIKATLDDLLRKNKELVDEAKKAGVDERELDRLHEKLRRVVEEIEKELRESNRKLEEVLRDIKRKLDDLHRKAREILERIRK

SEQ ID NO: 3873 - protein, 178 aa, Artificial Sequence; identical to SEQ ID NO: 3872
  Synthetic

SEQ ID NO: 3874 - protein, 178 aa, Artificial Sequence
  Synthetic
SEVEEVLKRIRDVIKTMEDRAREVLKESEKSIKEIRDTIREVLKRSEDSIRRIDEELKKGVDEKDLDKLLRDNRELVRKIKEELDELLKENEKLVRDIERELEELLRRIEELVKEIKKRGVDKDRLDELLKRAEEVLRKIKEDLRRSNEKLREEVKEAKKRLDDLHRELEDVLREAKR

SEQ ID NO: 3875 - protein, 178 aa, Artificial Sequence; identical to SEQ ID NO: 3874
  Synthetic

SEQ ID NO: 3876 - protein, 178 aa, Artificial Sequence
  Synthetic
KETEEAEKLAREAARRSEKLAEEAEKRAKEAIDESKELADRARDTARRADEDLERLAREGADEEALERARERARRLVEKAKEDLKRSHEKAKKLVEEAKKRLDESNKDAERLVREAKKAGAEREKLDDLLRRHNEKVKRAKERLDRLLEEHEKRIRDAERDLERLERELKKKAEDKRR

SEQ ID NO: 3877 - protein, 178 aa, Artificial Sequence; identical to SEQ ID NO: 3876
  Synthetic

SEQ ID NO: 3878 - protein, 178 aa, Artificial Sequence
  Synthetic
SETEEALERLRKMIEDSRRLAKKIREDLREMIERSRRLAEKVRRDDEKSSEDLRRVTEEGRDSEVLRKLLEENERLVREIKADLDRSNEEAERLVRRVKRELDKSNEELKRLVERIKERGVDKDRLDRLLEEHNRIVKEIKEDLDRLLREHNEIVKRIKDDLDRLHEENRRLLEESER

SEQ ID NO: 3879 - protein, 178 aa, Artificial Sequence; identical to SEQ ID NO: 3878
  Synthetic

SEQ ID NO: 3880 - protein, 177 aa, Artificial Sequence
  Synthetic
SKEDLVRELKKKLEEVVKRSREESERSLRKLEKVIRDFRRESERLKKESRDVVKKAREDGLPEDVLRDLERLLREDEERNREANREIEKLLREIEKRNREVNRENEDTLRRIEDKLRKDGADEEVLKEIDDLIRRDEERLRRVLRESEELIKEIKKRAEEMLTRSKKLTRDIEEKTR

SEQ ID NO: 3881 - protein, 177 aa, Artificial Sequence; identical to SEQ ID NO: 3880
  Synthetic

SEQ ID NO: 3882 - protein, 177 aa, Artificial Sequence
  Synthetic
RDREELRRLEEELRRVFEESRRRSERSKKELDKIVKEAEKASKRSLDKLKRVFDELRRRGLPEEVLDELKKLLDEIERVNRDVLKKIRELLREIEELNREVIDRNKKTLDKITEDLRRRGADEDVLRDARELIERDREELERVLRDSDRLVREIKKRIEEMLKRSEDLIEEIERRAR

SEQ ID NO: 3883 - protein, 177 aa, Artificial Sequence; identical to SEQ ID NO: 3882
  Synthetic

SEQ ID NO: 3884 - protein, 182 aa, Artificial Sequence
  Synthetic
SEVERVLKEIEDLIEEIERRAKTVLEEIDKLTKEIEEVVKRMLDRDRELIKTAEDLLRKNKESREELKKMLEDSRELNTRLKKRIRELHRESKELVDKIRKELDDLLKRIEKRVKEIKDRLRDDRVRKALEDLLRKVEEVVRRVREELKKLERKDREVVRKVEEDSERSLRELEKVADEARK

SEQ ID NO: 3885 - protein, 182 aa, Artificial Sequence; identical to SEQ ID NO: 3884
  Synthetic

SEQ ID NO: 3886 - protein, 182 aa, Artificial Sequence
  Synthetic
SEVEKVLRELKELTRRIREEAERLLREDERLLREAERIARELLETNKRLIEEIERRLRERKESKEELDKLLKESEDLNREIKKTIDDMVRKSEKLNREITETLDRLHKESKKVVDDIKKRSRDERVKKDLEEVRKRDREVVEEVRRRSEKSKEDVRRLVEKIRKDSEDSLKELKEVVEEARR

SEQ ID NO: 3887 - protein, 182 aa, Artificial Sequence; identical to SEQ ID NO: 3886
  Synthetic

SEQ ID NO: 3888 - protein, 182 aa, Artificial Sequence
  Synthetic
DEVEKMLEELKRLTDKIREDAERLLKRSEELTEEIKRLIDELLKEIEELIKEARDIVRRNPESREELDRVLEEIKRLVEKILRDIEDMLRKNEELVRRIKETIKRLHDESKKRVKEVEDRLRDERVRRELEKVEREDRKVVRDAEEELKKSRKKSEDVVKEAKERLEELLRRVKRVVDEVRR

SEQ ID NO: 3889 - protein, 182 aa, Artificial Sequence; identical to SEQ ID NO: 3888
  Synthetic

SEQ ID NO: 3890 - protein, 182 aa, Artificial Sequence
  Synthetic
SEVERVLKEIEELTRRLREEAEELLERSERLTEKIRRRAEELLKRNEDLIEKIERDLRRNREKREELEKMLKTSEDLNREIRDELKKLLEENEKLLRDIKRRIREMHKRSEDLVREIERRLTDDRVKKALDELRRRDREVVKRLEEELEKSKKKSEDVVREVEEKSERSKRKLERVADEARR

SEQ ID NO: 3891 - protein, 182 aa, Artificial Sequence; identical to SEQ ID NO: 3890
  Synthetic

SEQ ID NO: 3892 - protein, 179 aa, Artificial Sequence
  Synthetic
SEAEKLLKEDEDLIRKARDEIRKVLEDDERLIEEVERKSREMLKRIKEIIDDMRKRIRGDELLEEARERIERLIKTLEDLNRKSEKENRDSLRRLERLLEELDRLNAKSLDELRKRIGELKEVVEEVRKSRKKSEDVLREVERELKKSFEKSKRVNDDSKKKLDELKREADEVIKRLKD

SEQ ID NO: 3893 - protein, 179 aa, Artificial Sequence; identical to SEQ ID NO: 3892
  Synthetic

SEQ ID NO: 3894 - protein, 179 aa, Artificial Sequence
  Synthetic
SRAEELLKRDEELIDTVRRRIEKMLREIKEIIDRVKRKSEKMLEDDERLIREVEKRVRDEDLLREVAERNKKTIKEIRDLNDRSRKEIKDLIRRLKKLLDEAREENEKSIRELRKEAGQLEEVLRELEKSRKKSEEVLERVKRELEKLERRAEEVNKESEDRLRESEKESKKVIDELRR

SEQ ID NO: 3895 - protein, 179 aa, Artificial Sequence; identical to SEQ ID NO: 3894
  Synthetic

SEQ ID NO: 3896 - protein, 179 aa, Artificial Sequence
  Synthetic
RRAEELLRTIKEIIKRIDDELKRVLDDDDRLIDELRKESERLLEEIERIIRRIEREVRGEELLKRVTDIIRELERRLEELNKRSRDLNKRSIEKLRELLERVKREIEDLIRKLEKEIGEREEVLRELRKLEEEAKAVIDKARRELERSERKSEELNRESKRRLEELSRRAKRVIDELRK

SEQ ID NO: 3897 - protein, 179 aa, Artificial Sequence; identical to SEQ ID NO: 3896
  Synthetic

SEQ ID NO: 3898 - protein, 179 aa, Artificial Sequence
  Synthetic
DEVRRLLKEIEDIIRRIEEDIRRMLEKDRKLIEEVERKSKEMLDRDKRLIEELEKRLRGEEFLEEAERRNRKTIEDIRRLNRESEKENEKSIRDLEELLKRVEEEIRRLVKKLTDRIGELEEAVRELDRLRREAEEVLDRVRKKLDKSRKDSERVNEESERRLERSAEESKRVLDELRR

SEQ ID NO: 3899 - protein, 179 aa, Artificial Sequence; identical to SEQ ID NO: 3898
  Synthetic

SEQ ID NO: 3900 - protein, 187 aa, Artificial Sequence
  Synthetic
DVREELKKVVDKAEKVSRKSRDDLDKVRKRVEEVNRDNERRLREIAKKVKEVLRDIDRKRRDESLKRLIDTIEKLLRDLERTNEKLDDESRKLLEDLARKVEELNDRARKELERLRERVKKVEEDNKPKEVVKRLLEDVDRLIREVEKESKRLLDEIEEMIEELKRRAEENLKTIEDIIKDVTEKAT

SEQ ID NO: 3901 - protein, 187 aa, Artificial Sequence; identical to SEQ ID NO: 3900
  Synthetic

SEQ ID NO: 3902 - protein, 179 aa, Artificial Sequence
  Synthetic
REVEEVLKTVRKLIEELERSSRKSLKEVKELLEKLEEDARRSLKRVKELLKELEDRSRTVDSKDIKRVVEEIEEDIRRSNKELEDLLREIRRKIEESNKENRKRAEDIIRELAKALKDVDEEAKKRIEDLIRELEELLRESSDRHRKLDEELKKLLKDVTDAHRRLMEELRKLLEDIET

SEQ ID NO: 3903 - protein, 179 aa, Artificial Sequence; identical to SEQ ID NO: 3902
  Synthetic

SEQ ID NO: 3904 - protein, 179 aa, Artificial Sequence
  Synthetic
DEVETILRDIKRLLREIEELARKSSKKFKELLERLEETARRSLTRIERLLEEVEDISRTVDRKEIEDKVREIKKEVDEMNKRLEDELKKIKDDLERSNEELRRLIEEIKDRVAKRLKDVDEDAAREIEKLKRELERLLEEASRTHEELTRRLEKLLEDATREHERLKRELEKLLEDIKK

SEQ ID NO: 3905 - protein, 179 aa, Artificial Sequence; identical to SEQ ID NO: 3904
  Synthetic

SEQ ID NO: 3906 - protein, 179 aa, Artificial Sequence
  Synthetic
REVEEILRKIRELLEELRKRVEESRRRIEELLKKLEEEVRESEKDVRRLLRELEEISRTRRREEIARRMEEIKEKARKSNEELKKLMEEIKERVKRVNDELRKLAEDIKEKVRKDLKDVDEEAAKEIEKLVKELEELLKRASDKHRKLSKDLEDLLREVTERHRRLEKELEDLLREIER

SEQ ID NO: 3907 - protein, 179 aa, Artificial Sequence; identical to SEQ ID NO: 3906
  Synthetic

SEQ ID NO: 3908 - protein, 179 aa, Artificial Sequence
  Synthetic
SEVEKLLEEARRLLKELEDSSRRSVEEAKRLLEELKRRVEESVRRIRELLKDLERLSSRVDREEIEKEVRRIEEDVRRSNDELRKLVEDILRKLRKVNEENADLVRRIITRLRDALKDVDERAKEALRELEKRLRDLLRDSSRLHEDLARDLKRLLDEVTEEHDKLRRELRKLLEDIKT

SEQ ID NO: 3909 - protein, 179 aa, Artificial Sequence; identical to SEQ ID NO: 3908
  Synthetic

SEQ ID NO: 3910 - protein, 179 aa, Artificial Sequence
  Synthetic
SEVEKVEEDVKRLLKEIEDSSRRSLEKAKRLLEELRRSSEESLKRIRDLLEELRELSRTVDSKDIADRARKIAKEVDDSNKRNRELVKRIIEELERVNRENEEKLKKIKEDLRRSLKDVDEEAKKRIEELKRELEELLKKSSEEHKKLVKELKELLKKSTEDHEKLKRDLRKLLEEIRT

SEQ ID NO: 3911 - protein, 179 aa, Artificial Sequence; identical to SEQ ID NO: 3910
  Synthetic

SEQ ID NO: 3912 - protein, 178 aa, Artificial Sequence
  Synthetic
DSEDLMRRVKEELDKLVKDSRKRSEDLKRENEELLRRSEEALEKSVRDADRLFEEIKRTKDKKEELLRELKKLLDELREHSKRVLERNREILERNKKRNKEANDRNKEILDRIREEIKRKGADRDVLKTLKDLIRELKRHSEEVEREDKETTDRLRRHSEKALRTNEEIIRRIEERAR

SEQ ID NO: 3913 - protein, 178 aa, Artificial Sequence; identical to SEQ ID NO: 3912
  Synthetic

SEQ ID NO: 3914 - protein, 182 aa, Artificial Sequence
  Synthetic
SVDEALRDIERKVEELMRESDERLRRVKKEVEDNVRRSEEELKRIADEMKELLDRARERGVDEEILRRVEEELRRLAEEIKKINRDAEERLRRLIKEVREINEDVRRKLEELREELRRDGGKVEDLVREVLKKLKELIDRWRDLSRRLKERLDTLIKEHHELSKRLLERLKRLIDEARKKLN

SEQ ID NO: 3915 - protein, 182 aa, Artificial Sequence; identical to SEQ ID NO: 3914
  Synthetic

SEQ ID NO: 3916 - protein, 182 aa, Artificial Sequence
  Synthetic
SEVEELKREADDVNRRAEELARETLKKIEKVNREVKRRLEEALREIEELLRRAEEIVRRNEDKDRAIEEVRRRLDELRRKVEKVNEDNRKLLEELTEEVKRVNDENKKLLDDLADKVEKKLTTEEARKRLEEVVRHNKKLDDEHRKALDELRKHNEDLDRRSKEELDKLRKRLEDLLRKVKE

SEQ ID NO: 3917 - protein, 182 aa, Artificial Sequence; identical to SEQ ID NO: 3916
  Synthetic

SEQ ID NO: 3918 - protein, 182 aa, Artificial Sequence
  Synthetic
REVEELLKEIEEVLKKSERLSRESLKKIREVLERIERLARENVKRMKEVIDRVRELAERNEDRERLIEDVKRLIKEVSDSNRELDERSKKLLKELRDENERLSEESKKELERIRKKVEDKLTTEDARRALEELRKRVEEVNKKSRDDLERLTREAEELNRKNEEDLRRLEKEVKDLLDEIRR

SEQ ID NO: 3919 - protein, 182 aa, Artificial Sequence; identical to SEQ ID NO: 3918
  Synthetic

SEQ ID NO: 3920 - protein, 181 aa, Artificial Sequence
  Synthetic
SSRETVKRLTEEARKLLEDWKDRNRDVERKVEEIIERIRRTNEKSERDARRKLEEVDKRRRDEEVEKVREELERLLEESHRKVEEVVKEVEELVRESTEKVRRIVEKVKRLLEELTRLMEAGERDTEELKREIERILEELRRLMKEDKEELERILERLRRLAEEDKKENEEILDRVDKKAK

SEQ ID NO: 3921 - protein, 181 aa, Artificial Sequence; identical to SEQ ID NO: 3920
  Synthetic

SEQ ID NO: 3922 - protein, 181 aa, Artificial Sequence
  Synthetic
STEETITDLKREAEEILRRWREENKRVSDEAAESVKESDKTNKKSKDDLKRVLDEVDTKERSERVKTVIRKAEDLARRSHEKNREVNERLKKLLEESTRTVDTIIRELRRILDDIKRKVDAGERDAKELEDEVREALKRIRKLIEEDRRKLKRILDEHRRLTEEDRERNERVLRELREDTR

SEQ ID NO: 3923 - protein, 181 aa, Artificial Sequence; identical to SEQ ID NO: 3922
  Synthetic

SEQ ID NO: 3924 - protein, 181 aa, Artificial Sequence
  Synthetic
SVDESLEEIRKEVERLLRKWKEDNKEMRKRIRELLEDWRKKVEDSKKRAKDLIDEVKKRRDDERVEKVRKELEDLLKESEEKVREVERRVKKLLDESTKKVKEIEKEIRDIIRELDKRLKAGKRDTRELEKEAEDALRRLKKLIEEDRRELEKILKELEDLMREDTKENEKILREAEERSR

SEQ ID NO: 3925 - protein, 181 aa, Artificial Sequence; identical to SEQ ID NO: 3924
  Synthetic

SEQ ID NO: 3926 - protein, 181 aa, Artificial Sequence
  Synthetic
SVEDEIRRLTEEIERTLRRWREEVKRSEDRAEESIKRSDEKNKESKERLDKVLDEARRRRDDEEVKKVIKEVEELAEESNRRNKEVNDRLKKLLEDSKRKVEEIVRRVKKAMEDLKRLLDAGERDLRELLKEVEDVLEELKELIKRDTEENKRILDEHKRLTEEDEKRNREVLERLKRKTD

SEQ ID NO: 3927 - protein, 181 aa, Artificial Sequence; identical to SEQ ID NO: 3926
  Synthetic

SEQ ID NO: 3928 - protein, 181 aa, Artificial Sequence
  Synthetic
ESEETLKEVKKEIEKLIKRAEEINRESAERLKRILEEWKKEVDRSEKRLREVLDEVRRRRNTEEVEKVIREVEELVKRSRDKVRKIEKEVRDLLKESTDELKRIVEEIEEAVRDIERKLRAGKRDRRELLEELKRVLDRLKKLIDDDRRKNEKVLRDLEKLMREDADENREVLKRLEDKAR

SEQ ID NO: 3929 - protein, 181 aa, Artificial Sequence; identical to SEQ ID NO: 3928
  Synthetic

SEQ ID NO: 3930 - protein, 179 aa, Artificial Sequence
  Synthetic
SDEERVIKEVEDLIRRIREDNKRLLDEAEKIIRRVAEDNKKLVEDHRRMLRKIDEEAKRGRDEKFLKDLVERSERVVEESRRHVERNEREIREMLERLREHVERNERELREILERVVRKVGKETEDVKRLEEKVRKLLEESKRKLKRLAEEVRKLIKDSRDKIRELERENKEIIKKVKD

SEQ ID NO: 3931 - protein, 179 aa, Artificial Sequence; identical to SEQ ID NO: 3930
  Synthetic

SEQ ID NO: 3932 - protein, 179 aa, Artificial Sequence
  Synthetic
DREKEVVDTLRRLIEDARRDNKDLVETHRRLLEDLERDNRELVRTHEERLEEIERRARRGDDDTFLKKLEDESRDVVRDSERHLEENKRKSTKIVKDTKDHVDRNRKKIKKILDEAVREVGKEAEDVRRLEKEVEELLRESDRRVEDLERKNREILKRSEDLIRRLKEENRRIIEKVRK

SEQ ID NO: 3933 - protein, 179 aa, Artificial Sequence; identical to SEQ ID NO: 3932
  Synthetic

SEQ ID NO: 3934 - protein, 179 aa, Artificial Sequence
  Synthetic
DDERRVVEELERMIRELEKKIREIVKRHEEALKRLKEDNDELSKRHKKMVEEIKRRADEGRDDTFLKKLVEDSERVVEESKRHVDRNKEKSERIVRTTAELIKRLKEEIKKVLEDAVRKVGKDTEEVRRLKREVEELLKRAEELLKRLEDRNRKILRESEEDIKRLERENREIITRVRT

SEQ ID NO: 3935 - protein, 179 aa, Artificial Sequence; identical to SEQ ID NO: 3934
  Synthetic

SEQ ID NO: 3936 - protein, 175 aa, Artificial Sequence
  Synthetic
KELDEIIRRVEELIKDDERRNREVLKRSDESTKESHDKARRILEESEKTTEDIKRKVEKDGNTEKVERDIRRNNEELRKVLRELEKEHRENNKRLDEMLDRSRKNNDDIRKEIREKVKDEDKIRRLERESRELLRDSEDKVRKSKRKDEENLKRIEEEARRSEKRDEELLREAAK

SEQ ID NO: 3937 - protein, 175 aa, Artificial Sequence; identical to SEQ ID NO: 3936
  Synthetic

SEQ ID NO: 3938 - protein, 175 aa, Artificial Sequence
  Synthetic
RELDEIIKTLEKLIEDSHREAREIVKEVKKRLDDDKRRNEEVLKESRETTERIRKEIEERGRTEEIEEKIRRNNRRLEKLLDESEKNNRRIIDTIERLLRKLEELHKKIIDEIRKKVKSEEKIRRLEERARRNVEEMRKLAEELEKESRRILKESAEAVKRSKDEDRKLLEEAKK

SEQ ID NO: 3939 - protein, 175 aa, Artificial Sequence; identical to SEQ ID NO: 3938
  Synthetic

SEQ ID NO: 3940 - protein, 175 aa, Artificial Sequence
  Synthetic
SETDKVIEESEKTNRDIKRHSEEVVKDSKRTNTEIERTVEKMIRELEEILERIKRLADNGVPKEDLKRLVDELKERIDRILKELEELLRTDKKRISDALRRDEELAKKDKDEIDKKLDDKDKAKKLKDETDRILETSERLLKALRDETDAIKRKVEELVRRVKEELDRILKKTED

SEQ ID NO: 3941 - protein, 175 aa, Artificial Sequence; identical to SEQ ID NO: 3940
  Synthetic

SEQ ID NO: 3942 - protein, 175 aa, Artificial Sequence
  Synthetic
SETDRVVEESERTNKEIERHSEEMVRDSERTNKEIEEHSREVIERLREILERIERLVRKGVPKDELKKLVEDLRRRAKEALDRDRELLRRDKEKIDEVLKRDTELAERDKREIDKKVRDEEKMRRLKEETDRILDKSRRELKRLKDETDKLLEDSERLLREVEKTLRRILEEARK

SEQ ID NO: 3943 - protein, 175 aa, Artificial Sequence; identical to SEQ ID NO: 3942
  Synthetic

SEQ ID NO: 3944 - protein, 175 aa, Artificial Sequence
  Synthetic
SETEEVVKTLKRLLEEIKKHSDDAVRKSEETNKRIREEVERVIKRLKELIEEISELVKSGVEKERLKELVDRVKTALDRALDELRKLLEDDERKIKTVLDEDKKLVEEVKKRADEKASDEEKLKRLKDALDRILEESKRLADELKKRTKDILDEAKDALRKIKEELDKLVEDAER

SEQ ID NO: 3945 - protein, 175 aa, Artificial Sequence; identical to SEQ ID NO: 3944
  Synthetic

SEQ ID NO: 3946 - protein, 175 aa, Artificial Sequence
  Synthetic
SETDKVVREVEELIRRLEEHSRRVVEKSERTNEEIERHSRDVIRRSKEINDRIEELARNGVPEDDLRRLVKKNKEDNDRALEEDKRLLDTDKEEIDRALKRDEEIVRRIKEEIDKKVTDKDKMKRLKEELDKLLDDSRRLMKRLKDETDKILDKSRDLLAKTKRESDRILEEAER

SEQ ID NO: 3947 - protein, 175 aa, Artificial Sequence; identical to SEQ ID NO: 3946
  Synthetic

SEQ ID NO: 3948 - protein, 175 aa, Artificial Sequence
  Synthetic
SETDKVVDDSRKTNEDIKRHSEEVIRRLEELIREVEEHSRRVEDEVRRILDEIRKLAEDGVDERDLRRLVKKLEEEIDRVLEEDERLIREIKKEADRVLETDKRLAEEDKKRIDDKATDKDKATELKKDTDRILKESEDALRRIKKELDDLLRTSKRLAEELKKELREILERAKR

SEQ ID NO: 3949 - protein, 175 aa, Artificial Sequence; identical to SEQ ID NO: 3948
  Synthetic

SEQ ID NO: 3950 - protein, 175 aa, Artificial Sequence
  Synthetic
SETDEVVERLEKILKDIREHSERAIKKLEDILREIERHSRKVIRDSERINTEIKKLAEAGVPEKDLTKLVEDNKKRNDDVLDEDRKLVEELRERAERILRTDKRLVDDLKRKADEKLTDKDKLTTLKKKLDDLLDTSRRLVEKVEEDLRRILEASKRMLEETKKRSKEILDRIRK

SEQ ID NO: 3951 - protein, 175 aa, Artificial Sequence; identical to SEQ ID NO: 3950
  Synthetic

SEQ ID NO: 3952 - protein, 175 aa, Artificial Sequence
  Synthetic
SESEEVVREVDKILKEIRKHSKDVIEKLKKLIDDIRRRVRKVIRDSEEINKRIEDLAREGVPEEDLERLVEENKRRNDEVLKRLKELAERVKEEADRALERDKRLVEELKKRIDDKVTSEEDMRRLKERLDKILDDSREMLKRLKDELDEVLEEVERLLRETKKRSDEILKRIKD

SEQ ID NO: 3953 - protein, 175 aa, Artificial Sequence; identical to SEQ ID NO: 3952
  Synthetic

SEQ ID NO: 3954 - protein, 176 aa, Artificial Sequence
  Synthetic
SEIEDVIRRAEELIKEDKKRVEDVVREIEKLIRDDARKVRRAIEELKRLLREIEERVREEKEKRDVLERLVRTIKEEIDRLLKDNEDSIRRITKRLRDILRENRESLERIRRELDRRLTVKEEAERLRRELEDLHRDVKRLIDELEKDLRRLLEESKRRADRVKEELRRLREEVRK

SEQ ID NO: 3955 - protein, 176 aa, Artificial Sequence; identical to SEQ ID NO: 3954
  Synthetic

SEQ ID NO: 3956 - protein, 176 aa, Artificial Sequence
  Synthetic
SEADKAAEDAKRLIDKDREDVERAVKRAEDLIEKDREDVDRAIKESEELNKRAEDEARRRKDAREKVKRLADEDKKRNEEALRRNRKSIEDIRRDLEKALRDNEKTIEDIRREIEKLASDEEKARRLKEEADKVAKESKELADRLKERADRLHKRARELAERTKEDTDRLVEEAKR

SEQ ID NO: 3957 - protein, 176 aa, Artificial Sequence; identical to SEQ ID NO: 3956
  Synthetic

SEQ ID NO: 3958 - protein, 176 aa, Artificial Sequence
  Synthetic
SEIDEVVKEIEKILEDDKRRVDEAIEELEKLIREIREEVRRVIKESEDLNKEIRDRVRKNKEKREDLDRLVEEDRKKNREILETLKELIERIRREIERLLRENEETLRDIERKIREKMTDKDKAERLRRELKKIMEDSRRLADEIKKRLDRLLEEVKEEIERTKRETDRLLEEVRR

SEQ ID NO: 3959 - protein, 176 aa, Artificial Sequence; identical to SEQ ID NO: 3958
  Synthetic

SEQ ID NO: 3960 - protein, 176 aa, Artificial Sequence
  Synthetic
SELDRVVEEIDRLIREDEKEVRDMIRESEKLNRENEETNRKLLEDWDKLSKDIRDRVDKNKEKEEEAEKLLRDSERLAEDVLRRDKETVERDREKNKKVKERNERTIKEIRDRIEKKMEDDKKARELKEKLDELKKRSEKLLEDTKRETDKLHERSRRELEKLRRKDEELVKRVKD

SEQ ID NO: 3961 - protein, 176 aa, Artificial Sequence; identical to SEQ ID NO: 3960
  Synthetic

SEQ ID NO: 3962 - protein, 176 aa, Artificial Sequence
  Synthetic
SEIEEVVERIERLIKRIKEEVERALKESEDLIRDIERRVRELLEEWDRLSERIREVVERNPEKREDLKRLVEESRREAKRVLDELRRLVEEDRRRNEELLRRLEELIREIEDRIEKLAEDKDELRRLKEELRKLLEDVKKLLEESKKKTDDLLKRAEDELRKLKEKDDDLLRKVKD

SEQ ID NO: 3963 - protein, 176 aa, Artificial Sequence; identical to SEQ ID NO: 3962
  Synthetic

SEQ ID NO: 3964 - protein, 176 aa, Artificial Sequence
  Synthetic
EELDRVVEELDRLIRDNKRRNDEALKESDRLIRENERRNRKAARDWEELSKEIEDRVRKNKEKEEEVERLVRRSEKELEKIERADEETVRRDRELNKKVRDDDRRTIEDIEKKARELLEDKDKLTTLRKKLDDLHKESRRELERSKKKTDDLHRKSREEVRKLREDDERKLREIKK

SEQ ID NO: 3965 - protein, 176 aa, Artificial Sequence; identical to SEQ ID NO: 3964
  Synthetic

SEQ ID NO: 3966 - protein, 176 aa, Artificial Sequence
  Synthetic
SEADEAAKKIEKLIEDNERKNRKALKEWDELTRENEKRNRDAIKESEDLIKEAADEVRRRKDAREKAKKLAEDDKRRNEKALEDDERTLRESKKRAEEALREDRETLRRIEEEIKKLASDEEKARRLREEAEELHRRSEEAARRAEKKDREAHKRSREAIKRTKDDTEELLKEAER

SEQ ID NO: 3967 - protein, 176 aa, Artificial Sequence; identical to SEQ ID NO: 3966
  Synthetic

SEQ ID NO: 3968 - protein, 176 aa, Artificial Sequence
  Synthetic
DEIDKVVRKIEKLIDDNRRENEEMLRESEKLLKENEKKNEKAIRESEELIRRIEKRVRENKEKEEELKELVDRDRERNKEVEKEDRETVKRDRDLNEDALRRDRETLERIKREIEKRAEDKDKARRLEEELKELHKRSKEELEKSKEKTDRLHDKSRRLIEETERRTEELLERVRR

SEQ ID NO: 3969 - protein, 176 aa, Artificial Sequence; identical to SEQ ID NO: 3968
  Synthetic

SEQ ID NO: 3970 - protein, 183 aa, Artificial Sequence
  Synthetic
SVEDEVERLERDAEEISRRSETELRRLKKEVEDLNRESKKLLDELREEMEKILKKVREDSDEEELERLIREARKLLKDLADKIRRVDEESKRILDELARRIKKVNDDLKELVERLSRRAREIKDKDEVKRLVEEIERLLKRAEELSRELVRRIEKLIRELAEESRRLVDEIREVLKRLKDRAD

SEQ ID NO: 3971 - protein, 183 aa, Artificial Sequence; identical to SEQ ID NO: 3970
  Synthetic

SEQ ID NO: 3972 - protein, 176 aa, Artificial Sequence
  Synthetic
SEIETVLEKLKRLLEEDRELVKRVEDKIRRIIEEDEKTVRDIKKRLDDILREIRDVLEKRKEVREELKELLERVEEVIKDVLRKNEETLERLERELKRALKRNDDTLKRLREEAARLLEVEEELKKVEDELDRVRKETERIIKELREELEELHKRARDLLKEVRDELRKLLEEAKK

SEQ ID NO: 3973 - protein, 176 aa, Artificial Sequence; identical to SEQ ID NO: 3972
  Synthetic

SEQ ID NO: 3974 - protein, 176 aa, Artificial Sequence
  Synthetic
SEIEDVVRRIDELLREDKRRVDEVLERNRKLIEDDERLSREIARELDEIIKRLREVVKSNKEDRDTIRRLAEEAREVIERVDRENEKTKRELEKHSREALRENEDTIRRITEELKTRIKVREEVRKLKERLDKILEDTRRLLEESKRRLDRLHERHRETSEDMKRRIDKLLEEVRK

SEQ ID NO: 3975 - protein, 176 aa, Artificial Sequence; identical to SEQ ID NO: 3974
  Synthetic

SEQ ID NO: 3976 - protein, 176 aa, Artificial Sequence
  Synthetic
KEAEDVVREVEELIDRDRKLVERVLRENERLLKEDRDTVKKVLEELEEILKDIERVVRERKEVKEEVDRLIKELRDLIEKVLRDNKESIDRIREHSKRALETNERTNKELEETLRRLLDIEELLRRLKEEIERLLERSRRLVKESEERLDRIREETKRELDRVEEKLRRLLEEVKR

SEQ ID NO: 3977 - protein, 176 aa, Artificial Sequence; identical to SEQ ID NO: 3976
  Synthetic

SEQ ID NO: 3978 - protein, 176 aa, Artificial Sequence
  Synthetic
SEIEKVVEEIKKLLKELKETSERILRRNEKIIKEIEETSREVLKELERILEEIEDVVRKRKEVREEVEELIKELEERIRRADKRLEELIKELRDHSEKANKKIEDIVRRIEERLRRLLRDKDRLKRLRDELERILRDHERLSRESKDKLDKLLERHKELSDEVRKKLKELRDRADT

SEQ ID NO: 3979 - protein, 176 aa, Artificial Sequence; identical to SEQ ID NO: 3978
  Synthetic

SEQ ID NO: 3980 - protein, 176 aa, Artificial Sequence
  Synthetic
REIEEVEKEIERIIERIERTSRRVKEENDRLLEEIKRRSEEVKKRNDDIIREIRRVVEEDKKNREEVKRLIEELRKHSRDADEELRELIKKLKRHSDEANKTLEELIKELRKRLEERARDERRLKELKRKLDKLREDHERLSRRSDEELRRLEEEHKRLSEDSKRELDKLLDEVRK

SEQ ID NO: 3981 - protein, 176 aa, Artificial Sequence; identical to SEQ ID NO: 3980
  Synthetic

SEQ ID NO: 3982 - protein, 176 aa, Artificial Sequence
  Synthetic
DEIERVLEEAKKLIRDLEEHSRRVEEENKRLLKEIRETSERVKRELDRILEEIRKTVERRKEVREELDELIKTIRKRIKEADDELRRLIEELEEHSRRALETDKKILDEIEKRLRDLFKDDEKLRRLEEELKRLLDESKRLLEESEDELRKLEEEHRKLSEEVKRRLDELKKEVET

SEQ ID NO: 3983 - protein, 176 aa, Artificial Sequence; identical to SEQ ID NO: 3982
  Synthetic

SEQ ID NO: 3984 - protein, 176 aa, Artificial Sequence
  Synthetic
REIEEIVERVKEIIDRIRRHSKEVEKENEKIIERIRRRSEEVLRTNEKALRDIERRVRERKEVREELRKLIEDLRRHSDRADEELERLIETLKRHSKEALDRDRELIKRLEDDLRRAAKDKDELKRLKEELERLLRESKKLVDESKRRLEELLREHRELSKRSRDKLDELLRRVEK

SEQ ID NO: 3985 - protein, 176 aa, Artificial Sequence; identical to SEQ ID NO: 3984
  Synthetic

SEQ ID NO: 3986 - protein, 176 aa, Artificial Sequence
  Synthetic
SEIEEVVRRIREIIEEIRRLSEAALERNKRIIDEIRRTSKRVKEEIERIIRDIRRVVEERKEVREEVERLIRELKKTIEDANEELKRLIKELRDHSEKVNEEVRRALEELKERLDRLLRVREDVRKLKEDLKELLKEHKRLSEESKKRLERLLEEHERISEELKRRLEKLLKEAED

SEQ ID NO: 3987 - protein, 176 aa, Artificial Sequence; identical to SEQ ID NO: 3986
  Synthetic

SEQ ID NO: 3988 - protein, 176 aa, Artificial Sequence
  Synthetic
SEIEEVVKKVKKIIDEIRERSREALERNEKILEELKRHSEEVTRRAEKIIEEIKRVLEKRKEVRKRLRELARKLEELLKRALRRDEEIVAKLRRHSEKVNRELEEDIKRLKEELKTRMKDKDELTKLEKELEDLREEHRKLSKDSKDRLKKLLDESRELIERLKEKLKRLLEEAER

SEQ ID NO: 3989 - protein, 176 aa, Artificial Sequence; identical to SEQ ID NO: 3988
  Synthetic

SEQ ID NO: 3990 - protein, 181 aa, Artificial Sequence
  Synthetic
SEVEEMLKRLDDILKKHRELVKEMKEELDRVIETHRRLVEEVRRRLEKSNDEIDKLVKADVREDELRKLLTDNERLNREINRTSKDVVRKLEDLLRRAEEESRRVVKEVRKVIDDIRRRTRDERVEKALKEVRERLERSHKKAKEDLDRVREEARKSHEDVKRLSEEDRKKSEDLADEVRR

SEQ ID NO: 3991 - protein, 181 aa, Artificial Sequence; identical to SEQ ID NO: 3990
  Synthetic

SEQ ID NO: 3992 - protein, 181 aa, Artificial Sequence
  Synthetic
REVEEALERLRKLIEDDRELVKRAKEKLDKLLKDDRKLVEDVLRELKRSNDEVKKLVDSGVSEEELKRLLDENRRLNEKINRENEESIKRVEELLEEIERRNRETLERIKRLLDDVRKKTTDKRAEEELRRVKEEVDRVLEESKRRLDEVRRRLERIEEESRTKSEEDRKRSEDLVREAER

SEQ ID NO: 3993 - protein, 181 aa, Artificial Sequence; identical to SEQ ID NO: 3992
  Synthetic

SEQ ID NO: 3994 - protein, 181 aa, Artificial Sequence
  Synthetic
SEVERLVEDAERVIDEHRKLVTEMERRLERVNREDEKLVRKVLEELKKSNEEIKKLREDSVSEEELEKMLRKNEELNKEANERNKDSTRKNKELNKRINEDSKRVVKKLRDLLKEVEDRTTDERAKKLLDEIRKKLDDSNREVEKRSRDDERHTERVVRESKRLSEEDKKRSDELADETRK

SEQ ID NO: 3995 - protein, 181 aa, Artificial Sequence; identical to SEQ ID NO: 3994
  Synthetic

SEQ ID NO: 3996 - protein, 181 aa, Artificial Sequence
  Synthetic
SRVEEVKKELDDLIRRHKELVEKVRKELKDLLDKHERLVEEAKKEIEKLIETLKRLAENGVSEKDAEEILKEIEKLLKRIEEDSKRVLDEIKKLLDDIRKESKKVLDDIRRVIDRARKETTDRRAEDELRKVRKEVERSNKEVEEILDDVRRKVEESDKRVKEILKKLREDVKKLLDEVRK

SEQ ID NO: 3997 - protein, 181 aa, Artificial Sequence; identical to SEQ ID NO: 3996
  Synthetic

SEQ ID NO: 3998 - protein, 181 aa, Artificial Sequence
  Synthetic
SEVEKLVADADKLIKDHRKLVEEAKKRLDEVNERHRRLVEEVERRLDKSNKELEDLVRSGVDEDDARRVLEDNERLNKEANDRSKEMLDRNRDLNRRINETSERILKKIEDLLEDVRRRTDDRRADEELRRISERVKRSNEDVRKKSEDDKRHTDESDRDVKRLSKEDRERSETLMDRVRE

SEQ ID NO: 3999 - protein, 181 aa, Artificial Sequence; identical to SEQ ID NO: 3998
  Synthetic

SEQ ID NO: 4000 - protein, 181 aa, Artificial Sequence
  Synthetic
SRVEDVERELEEEIDKHRKEVEDAKRRLDELIRRHKEEVKKLKKKLDDLIEELERLARNGVDEKTIEEVVKRIREELEAIEERSRRVLKKIEDVIDELRKRSEEVVRRLEKLLKDVEREVDDERAKRSLDRVREKIEKSDRTAKDLLKKVEEEVRKSNERVKELLKRVKDAVDDLLRRRRK

SEQ ID NO: 4001 - protein, 181 aa, Artificial Sequence; identical to SEQ ID NO: 4000
  Synthetic

SEQ ID NO: 4002 - protein, 181 aa, Artificial Sequence
  Synthetic
DEVEEVVKRAEDVIRTHKELVKKAKEDLDKIIEDIERELKKMLEDLERSNRRVEELVRGGVDERELDKLLEENRRLNEEINDRLEKLVKEVRKVLEKIKKDSDDVVRKLEKLLKDVERRSTDERVKKILDDIRRELEESNKKVEEDLRKAEEDLEELLRRARELSKEDEKKSRKLVEDARR

SEQ ID NO: 4003 - protein, 181 aa, Artificial Sequence; identical to SEQ ID NO: 4002
  Synthetic

SEQ ID NO: 4004 - protein, 181 aa, Artificial Sequence
  Synthetic
DEVDEVVKRLEDIIRKHETLVKKAKEDLDRVNEEDTKLIRDVLRRLKESNEEMERLVRSGVSEDDARRLLDENRKLNEEANRRNKKSLEDNSRLNEKLNRDSKRVLDEIRELLKDIERRSTDERVKEELRRVEEDVKKSDEDARRLSKEDRDHTRENFKRSEELSRRDEETSRRLMEEVKR

SEQ ID NO: 4005 - protein, 181 aa, Artificial Sequence; identical to SEQ ID NO: 4004
  Synthetic

SEQ ID NO: 4006 - protein, 187 aa, Artificial Sequence
  Synthetic
KDVEDLVRKAEELLKRHREDVTRLLERLKKVNKDHERLVKELKRRLEELLREVRELVERDGGESERAKEILRRLVEKAKKLLKEVEERSRKVNRDSEKLLKEIRERSKEVEDRVRKLLKEIEERVRGKDEVERRLRRLEEELKKSHEEVERRLDEVRRHSKRSHDELRKVLRKLEEDLRRLAEEVKT

SEQ ID NO: 4007 - protein, 187 aa, Artificial Sequence; identical to SEQ ID NO: 4006
  Synthetic

SEQ ID NO: 4008 - protein, 187 aa, Artificial Sequence
  Synthetic
SDLEELVKRAEKLLEEHKELVKRLEDRLRELDKRHKEIVERLRKELERLLREIRRIVEEKGGESEEAKELLKKLREEVRKILEEIERTSEKMERDSERLNEEIRKRSKEMLDRAAELLKEIESRIRGVDEAKRKLDELEERLRRSNKELEEKSEENERRTRESNEELERRLEDVRRKLERLREEVER

SEQ ID NO: 4009 - protein, 187 aa, Artificial Sequence; identical to SEQ ID NO: 4008
  Synthetic

SEQ ID NO: 4010 - protein, 187 aa, Artificial Sequence
  Synthetic
KDVEDLLRRLEEIIKDHRREVEELLRELTKLDEEHKEEVRRLTEELERLLDEARRLVEEKGGESEEARKIVKDMEERVKKVLDDIRRESERVVRESERLNKEIEKRNDEVRRRAEKVLKDITDRIRGVDEAERELERVEREVRKSSDKLRRDSKRNKERTRKSNEELERRLEEVERELRRLVAEVEK

SEQ ID NO: 4011 - protein, 187 aa, Artificial Sequence; identical to SEQ ID NO: 4010
  Synthetic

SEQ ID NO: 4012 - protein, 177 aa, Artificial Sequence
  Synthetic
KKVEDLEERLERLLRDAERRVRELLDEARRLLETHRELSKRLLERLEKVNRDIREKAKEKKEEVLTELLKESERLLEEVKKINKEAEDRIRELLKRVDDILKDLKKRIEDLLDEVRKRGLDERLLRRVEKEVEDLLRTVKDLLRRIEEEVRKSLEESKKLLKEVEDHSRKLLEEIRK

SEQ ID NO: 4013 - protein, 177 aa, Artificial Sequence; identical to SEQ ID NO: 4012
  Synthetic

SEQ ID NO: 4014 - protein, 177 aa, Artificial Sequence
  Synthetic
DEDEEVLRRLKELLKTHRKLSEDLLREAEAINEDHRRLSEELLRRLEKLNEEIRRKAKEKDRRVMEKVRKESRDLLEEVKRINEEAKRRSEEVAKKVRKINKEAKDRIDTLLEDLKRRGVDEELLRRVEEEVKKSNEESKKKIKELEEHSRRSNEESERRLREVEEHSRRLLEEIRK

SEQ ID NO: 4015 - protein, 177 aa, Artificial Sequence; identical to SEQ ID NO: 4014
  Synthetic

SEQ ID NO: 4016 - protein, 176 aa, Artificial Sequence
  Synthetic
SEVEDIVRKVDEIIRRLERHNEELRKRVEEVLDRLRRHNEKLDRDVKEIIKEIERVIRGNTDDARELTKRLKEALDRHRKASEDNIRDIRDALRKVEEVSRKNVDDLRDALREVREKLGKKDLLREIEEKVRRLVRKSEELLRRIAEDVKKVIEDSKDSHKKIEDELRELEERLRK

SEQ ID NO: 4017 - protein, 176 aa, Artificial Sequence; identical to SEQ ID NO: 4016
  Synthetic

SEQ ID NO: 4018 - protein, 176 aa, Artificial Sequence
  Synthetic
SEVEDIVRKVDEFLERLKEHNRKLDKEAKELLDRLKRHNEKLDEEAKRLIEEIKRVADENSMDKDRLLAELRKVLEEHRRVSEDNVRRIRKLLDDHRRRSEENMRRIDAVLDKVRKELEDKDLLREIAEKAERVKEESKRSHDEIADEIRKVEEESERSHREIAEELERLSRRLKK

SEQ ID NO: 4019 - protein, 176 aa, Artificial Sequence; identical to SEQ ID NO: 4018
  Synthetic

SEQ ID NO: 4020 - protein, 176 aa, Artificial Sequence
  Synthetic
KDVEDIVREVERLIKELREHNKELVDRAREVLKELKDHNEKLVEDVKRLIEDITRKIRANTDDKEKLLRDLERVLREVKRVSEENIRRIRKVLEKVAEDAKRNVEELRKVLKEVREKLKKKDLLRDIERKVEKLERDSRRLLREIEEEIRKVIERSKELLERIEKELRDLMRELRK

SEQ ID NO: 4021 - protein, 176 aa, Artificial Sequence; identical to SEQ ID NO: 4020
  Synthetic

SEQ ID NO: 4022 - protein, 176 aa, Artificial Sequence
  Synthetic
KEVEDIVEDVKRVLDELRRHNEKLVREVDRLIRELDKHNKELDDRATEIIKRIEEVVRRKSRDKRELVRELEEVLERHREMSERNVRRLERILKEVAREADKNVKDIRRALERVKRELEKKELLERIDEEVKRVEETSRRLLREIAEKVKTLKEKSKRSHEEIRRRLEELADEIRK

SEQ ID NO: 4023 - protein, 176 aa, Artificial Sequence; identical to SEQ ID NO: 4022
  Synthetic

SEQ ID NO: 4024 - protein, 176 aa, Artificial Sequence
  Synthetic
SEVEEIVRRVEKLIEDLKRHNEKLVDEVKKVIDTLRKHNEDLVRRVEEVIKRIEEVIRENRVDKRELLKRLEELLKRVAEEAKRNVKRLREALKEVAERSKENVKRLEDVLEKVKRELEDKDLLRDIAEKVKTLKEDSRRLLEEIADRVRRLEEDSRRLLEEIRKEVERLKEELKK

SEQ ID NO: 4025 - protein, 176 aa, Artificial Sequence; identical to SEQ ID NO: 4024
  Synthetic

SEQ ID NO: 4026 - protein, 176 aa, Artificial Sequence
  Synthetic
SEAEEAAREAKEAIDRLEEHNKKLDEDAKRAIEEARKHNKELDERAKRALEEIEKAARDNREDKEELKKKADRALEEHRKAAKRNIDEARRALDEHRKASEDNAREAREALKRVRRDLRDTDAARRIAEEVKKLEKKSEDSHRKIAEDVKKAEEDSERSHRDIARRAEEVKKKADD

SEQ ID NO: 4027 - protein, 176 aa, Artificial Sequence; identical to SEQ ID NO: 4026
  Synthetic

SEQ ID NO: 4028 - protein, 176 aa, Artificial Sequence
  Synthetic
SEVEKIVREVEKLLEELREDNRDLVRRADKDLERMERHNRKLVKDVEDVLRRIEEVRRANTEDKRELEKEVRRVLKEVADMAKRNEEEIKKVLDKVTRHSEDNVRKIREILEDVRRKLEDKDLLREIERKIREVEEKSRELLREIKKKLEDVARESRRLLEEIARKIEKLSDELRK

SEQ ID NO: 4029 - protein, 176 aa, Artificial Sequence; identical to SEQ ID NO: 4028
  Synthetic

SEQ ID NO: 4030 - protein, 176 aa, Artificial Sequence
  Synthetic
SRAERIVEEVEKVITDLERDNRELVRDVRRLLERLERHNKELDDRITEIIKEILRLAERNERDKRELEKELEKVLDEHRRVLEENIKEIRDVLREVAEHSERNMRKLRDALRKVERDLEKEELLREIKRKVEELEKRSKELLEEIARRVKEVEEKSRDSHRKIRERLKELVRKVRE

SEQ ID NO: 4031 - protein, 176 aa, Artificial Sequence; identical to SEQ ID NO: 4030
  Synthetic

SEQ ID NO: 4032 - protein, 178 aa, Artificial Sequence
  Synthetic
REMEEVLKEAKELLKESNKKAREIDRKIKELLDDSHRKVKETVDRVKRRIEELDRKVKEVKEERLKEELKEEAERVRRDVERLVEELRRENDEILEEHRRLIKELEDENEEVLDRLRKKLRVEEVLREVEKELEDNKRELRESHKEIARELERNKEDIDRLVEEIKRRIEELKKRIDK

SEQ ID NO: 4033 - protein, 178 aa, Artificial Sequence; identical to SEQ ID NO: 4032
  Synthetic

SEQ ID NO: 4034 - protein, 178 aa, Artificial Sequence
  Synthetic
DEMEKVLKEAEDELRRVEKEVREVDKEAEELLERSHRKVRDIVRRVTEELKRLKDKVEKIREERVKKRLKEEIDEVLTRAKKLIDELRKENDDVLRRHRELVKRIKEKLERIREDLERKLRVREMLEKLRREVERVKKEVDDSHREIAKKVERNKKEIDKLVREVEREVEELKKRIDK

SEQ ID NO: 4035 - protein, 178 aa, Artificial Sequence; identical to SEQ ID NO: 4034
  Synthetic

SEQ ID NO: 4036 - protein, 178 aa, Artificial Sequence
  Synthetic
SEVEEVLEDAKRLLKEVEKRVREIDRRAEDLLRRSHEKVRRIDKDVKRLLREVEKKVEEVKEDELKKRLEEELEEILRKHKELAEELKKENEDALKEHEDLIRRLREELEDVLRRLRERLRKEEVLKKVEDDVRRLDEEVRRSHEDIRKKVEDNKKRIDESHEEIRRLAERVKKEIRK

SEQ ID NO: 4037 - protein, 178 aa, Artificial Sequence; identical to SEQ ID NO: 4036
  Synthetic

SEQ ID NO: 4038 - protein, 178 aa, Artificial Sequence
  Synthetic
SEDEKVVKEAKRLLDENRRENKEIDERAEKALEDSHRKVRKIDKEAKELLEKLRRDVEEVKEEELKKELRKELERVLRRHKKLVDDLKRENDEVLKRHRDLVEESKRKLEEILKELEERLRSRELLDKVRREVERLKEESKKSHDRIREELRRNKEEIEKSHDEIRRRVEKLDDEIRR

SEQ ID NO: 4039 - protein, 178 aa, Artificial Sequence; identical to SEQ ID NO: 4038
  Synthetic

SEQ ID NO: 4040 - protein, 178 aa, Artificial Sequence
  Synthetic
SEVEEVEREVRKLLKESNDKVREIDKEAKKRLKDVEDKAREIDERITKLLKDIEDEVRKVKERELKEDLKRKIEDVLRDHERLVRELERELEKILEDHKRLIEELKRENDRVLEELRKKLRKEEVLRKVEKEVEDNKKELDESHKEVKREVEEVRERIDESHKRIRERADRVKKKIEK

SEQ ID NO: 4041 - protein, 178 aa, Artificial Sequence; identical to SEQ ID NO: 4040
  Synthetic

SEQ ID NO: 4042 - protein, 178 aa, Artificial Sequence
  Synthetic
KELEDVLEDVKRLLKESNDEVKEIDDRARRLLEESHRKSEEVDRRAEKRLREIEDKVRKSDKEEVKEELKKEIKKVRDEHEELSRRNTEENKRVLDEHRKLVEELKKKNDDVLRELRKRLRKEEMLREVEERARKNKEDIEKSHDEIRKEVEDNIRRDRESHKRIEEEARRVMAEIEK

SEQ ID NO: 4043 - protein, 178 aa, Artificial Sequence; identical to SEQ ID NO: 4042
  Synthetic

SEQ ID NO: 4044 - protein, 178 aa, Artificial Sequence
  Synthetic
SEVERVLKEADKLLKDNDEKNERVDREVEKLIRDSHEKSKKVDERAKRALDKLDDEVRKVKDEELKRELKERIKKVLEEHKRLSDENRDENRKVLERHKELVDRSKKELEEVLKELRKKLRKEEMLREVEKKVETLKKKSDDSHKEIEEKIRRNIEEDDKSHERIREEAEKLKKKIDD

SEQ ID NO: 4045 - protein, 178 aa, Artificial Sequence; identical to SEQ ID NO: 4044
  Synthetic

SEQ ID NO: 4046 - protein, 184 aa, Artificial Sequence
  Synthetic
ELEELMKKIEDDSKKNDEDTERLVKEIRDRSKRNREESKKLHDEDRREAKRVLDEARRDVRDEEKLKRLEDKLEKILRENAEVHKTSEEKNRRINKRLDDLVREDKKKNEDILRKLRELARRVKREEDVRRAIEEVRRLLEKSHRDSRRVIEEVRRLLEKSHRDNRKVNEDSRRLLKKVREDAE

SEQ ID NO: 4047 - protein, 184 aa, Artificial Sequence; identical to SEQ ID NO: 4046
  Synthetic

SEQ ID NO: 4048 - protein, 184 aa, Artificial Sequence
  Synthetic
SLEDLVREIREESERNKKETRKLLRRIEEESKRNLDESERLHREDKKRLEDIAERLERRVRDEDKLRRLKEELERILKRNKDLVDEDREENERIITKLRKLVKEDEDKNRKIITDLEDVLRKVKDEDLVRKVITEVKRLLEESHKESREVIREIKELLEESHEKSKKVNEESKKLAEDVLRKAD

SEQ ID NO: 4049 - protein, 184 aa, Artificial Sequence; identical to SEQ ID NO: 4048
  Synthetic

SEQ ID NO: 4050 - protein, 184 aa, Artificial Sequence
  Synthetic
SLEELLKKIREESKRNLDETRKLHREDKEESRKNLEESRKLHEEDRREAERVKRRADREVRDEEKLRKLRELLKRILDKNKKVLDDDKRLNEKILKENEERVRDDKETNDRIIEEADEALERVKDEKLVREVVERLRELLRESHERSREVNKRSRDLLRRSHEKSRRLNEESRRLLEEVERRVK

SEQ ID NO: 4051 - protein, 184 aa, Artificial Sequence; identical to SEQ ID NO: 4050
  Synthetic

SEQ ID NO: 4052 - protein, 184 aa, Artificial Sequence
  Synthetic
SADELLKKLRDESEKNKDDTRKLLEELRRRAEKNKKDIEDLLREIEKKLREVLEDIKRKVRDEEKLRRLKEMLERILKRARELVEELKKENDKILKELEDMVEDDKRDNKRIIERVEELRKKVRDEEEVKRAVDEVRRLLEESHKKSREVIKRIKKLLEDSHKKVREIVTELDKLIKEVEKKVE

SEQ ID NO: 4053 - protein, 184 aa, Artificial Sequence; identical to SEQ ID NO: 4052
  Synthetic

SEQ ID NO: 4054 - protein, 184 aa, Artificial Sequence
  Synthetic
DLKELVDELRKKSDDNLKETERLVREIEKRLTDNKRESERLVREIEKELRDLRERIERTVRDERKLRDLERKLKKVDEELKEMHERSKRENEEIRRELKKLVEDDERRNREIKKRVEDLLRKVKDKDEVRKAIKEAEELLKRSHEESRRVIERVRKLIEESHRKNREAIKRIRRLIEEIRKEVD

SEQ ID NO: 4055 - protein, 184 aa, Artificial Sequence; identical to SEQ ID NO: 4054
  Synthetic

SEQ ID NO: 4056 - protein, 175 aa, Artificial Sequence
  Synthetic
SEIEKVREELKELLERDEREVKRVIDDLRRLIKDLRERVKEVNKRDDETVKEIKKVIEERGDTEDVKRLLTENKKRNDRMLERLEKILEDIRERVRRALETSEKTNREIDERVKRKIKVEEVAREVEERSRRVKRKLEELIREIKTELDRVREEIERLSKRDREKNERLREEARR

SEQ ID NO: 4057 - protein, 175 aa, Artificial Sequence; identical to SEQ ID NO: 4056
  Synthetic

SEQ ID NO: 4058 - protein, 175 aa, Artificial Sequence
  Synthetic
SEIEDVLRELKKLLTDDKREVERANRDDERTLRDIRRKVEEAIKKLEDLLRDVKRRVDEEGNTEEVEELLRRILKDVERVLRELEKLIRDNKRRNKEMLDRSRRTNEKIKEDADRKLKVKDVAEEVERESRKVEKELEDLSERDKERNDRILRTIEELIKRVEEEIRKVKEDVER

SEQ ID NO: 4059 - protein, 175 aa, Artificial Sequence; identical to SEQ ID NO: 4058
  Synthetic

SEQ ID NO: 4060 - protein, 175 aa, Artificial Sequence
  Synthetic
SEIEDVLRKLRKLLREDEKRVEDANRRDRDTVRKIEKRSEEAFKESKETNKRIEDKVRKTGPTDEVRKELEDDKKRVDDAHRKSEEDIRRNDKENEEFLEESRKTNEDIKEEVDRKIKVKEVVEEVRDDSRRVEEKLRRLSKEDKEENDKIRRRDRKLVEDLRRDSDRILRKVET

SEQ ID NO: 4061 - protein, 175 aa, Artificial Sequence; identical to SEQ ID NO: 4060
  Synthetic

SEQ ID NO: 4062 - protein, 175 aa, Artificial Sequence
  Synthetic
DEIERVVEEVRELLERDKRRSDEVIERLKRLLEKDEEDVDDVIRRSKETNERIRDKIEKEGPTEEVEKLLRDDKRRVDKLLEDSKRTNDDIVRRLDEAHEESEKTNRDIDEEIERKAKVKEVVDDLKRLSKKVYDDNKELIDRVRERSREVLRRLKELADELRKLSEKIKRDADK

SEQ ID NO: 4063 - protein, 175 aa, Artificial Sequence; identical to SEQ ID NO: 4062
  Synthetic

SEQ ID NO: 4064 - protein, 175 aa, Artificial Sequence
  Synthetic
DDIEEVVKEVEDLLRRDAEDVERAIKELRKLLEDDRDRVRKVNEESRRIIEEIRKAIERRGDQEDVKRAVKEVKDRNRKANDESRRTNTDIKRALDEALKRSRETNKDIEDKIREKAKVKEVVDKLREDSERVKKKAEDLVEEIRRASEEVKKEVDDLSREDEERLEKLKEDARR

SEQ ID NO: 4065 - protein, 175 aa, Artificial Sequence; identical to SEQ ID NO: 4064
  Synthetic

SEQ ID NO: 4066 - protein, 182 aa, Artificial Sequence
  Synthetic
SEAEELEDRIRKLLREVEETSRRILKRARELNKRIEEESRRIIKRIKELIDEIKELVRTRGDDRGVEELLKKVLKEIEEVNDEHRKRIEDVTRKSEKVNEDHRKTIEEMEERLRRLLEDLRRRGIDERLLRKLEREVRRLSEEVTRLDEETRRHSDDLRRRVERLDETTRRELEKLADEVRK

SEQ ID NO: 4067 - protein, 182 aa, Artificial Sequence; identical to SEQ ID NO: 4066
  Synthetic

SEQ ID NO: 4068 - protein, 182 aa, Artificial Sequence
  Synthetic
SEAEELIKRAEDLIREIKKRSDDLVREMERLNEEIKRVSDEIIKRIEEVLEEIKKLVKKVRDDRGVEERVREVKREIERLNDEHRKIIEKVLRESRDVNRRHEEEIRRVLKEIEDLLREAEERGIDRRLLEKLKRELKDLERRVREENERSKRHSEELVRRARKLNEKTDKDLKRLEEETRR

SEQ ID NO: 4069 - protein, 182 aa, Artificial Sequence; identical to SEQ ID NO: 4068
  Synthetic

SEQ ID NO: 4070 - protein, 175 aa, Artificial Sequence
  Synthetic
REIEEVRKEVERVRKRYKDEVRKIVEDARRVLEEHKRRVEKLLEELERILREAKRLTDEGDRREEVIERLKELLKRIKERIERLNKRLREVVERIARDLKRLVEESKRELDRIREEVRDEDMLREIEKAVRELNEESKELLERIEREVRKSEERSKEVIKEIAERARKVVEDTKT

SEQ ID NO: 4071 - protein, 175 aa, Artificial Sequence; identical to SEQ ID NO: 4070
  Synthetic

SEQ ID NO: 4072 - protein, 174 aa, Artificial Sequence
  Synthetic
SEAEKVLTDNRDTLRRLKEELKKVLDENRKTLEELDKRLEEVHKRHNEELDRIRKDGLSEEVLREVEKINEELRKELEDLSREVKKLHEDLEREIRELAKEAEDRHKDLERKVRDTKADERVKEELKRIDEDLKRVVDRIKEKAEDIDRKLKKRVKEIMDKARESLKTLEERVK

SEQ ID NO: 4073 - protein, 174 aa, Artificial Sequence; identical to SEQ ID NO: 4072
  Synthetic

SEQ ID NO: 4074 - protein, 174 aa, Artificial Sequence
  Synthetic
DEMREVLKRLRELVEELRRELEEVLRRNRETLKRLEEELRRVHKEHNDVLKEIRDKGLDEDRLREVTEINKRLKKLLDELRERAKKLHEDLKRLIDELDRRLRELLKRLKERLRDTRVDERMKDELKKILDEARRVVERIDREAKRIDDELREVVERISRDAKRSLDELDERTR

SEQ ID NO: 4075 - protein, 174 aa, Artificial Sequence; identical to SEQ ID NO: 4074
  Synthetic

SEQ ID NO: 4076 - protein, 174 aa, Artificial Sequence
  Synthetic
DEMREVLRELEDELRKIKERLKRVLDRSRELLEEWREELERVHRRNEETLRRIEKNGLSEEVLREADELNKELKREADELLDTYRRLLEESEKEAREIIKTVEELVKRLREELRDTKTDEEIKRRAEDILRELRRLVEELERRNEEINRRLAKRIKELMEKIRREDERLKKEVE

SEQ ID NO: 4077 - protein, 174 aa, Artificial Sequence; identical to SEQ ID NO: 4076
  Synthetic

SEQ ID NO: 4078 - protein, 178 aa, Artificial Sequence
  Synthetic
DKAKRVRTELERRLEKLKRDARKVIEEHEKSLRDLEEEVRRVREEHERSLKELKEELDRKPKREEEKKRLKDEMEESRRRLDKLTEDLKRELDKSRDRLRKIDKELDDSAKKLRDELEKKGVDEDVTRELERVLDELRREVDRVRRELEKIDRELRELVKRIEDELRKINKELKEKSD

SEQ ID NO: 4079 - protein, 178 aa, Artificial Sequence; identical to SEQ ID NO: 4078
  Synthetic

SEQ ID NO: 4080 - protein, 179 aa, Artificial Sequence
  Synthetic
DEVEELVKTVRKLVEDHNRKLEEVVRRLREIVKELEDRTRRALEEARRTVKRIEEEVRKRGKSDKLAEDIRRKLKELEKRLKRVKKELDDLHRDSKKKLDDVKRESEEDLRRIDEALKRVDIDERLLRELKDLLEKSKRRVDELVKEIEKRNRDHKEKVRKIVDEIRRLLRELEERVKK

SEQ ID NO: 4081 - protein, 179 aa, Artificial Sequence; identical to SEQ ID NO: 4080
  Synthetic

SEQ ID NO: 4082 - protein, 183 aa, Artificial Sequence
  Synthetic
KLEEILRRIRELLKRHHEKNKKILDDIREKSKKLKKKVDDILTRITEIIKDLEREVDGRPRDRRLEELKRELRDLLDKLRKRVERIAEEHRRLDEELETKVRKLNEELRKLTKDLEERVREGNDERVLEDLRRKADDIIRRADEESRKIKEEADDIFRRSDELLKRLEDEAKRIADEVRKKTK

SEQ ID NO: 4083 - protein, 183 aa, Artificial Sequence; identical to SEQ ID NO: 4082
  Synthetic

SEQ ID NO: 4084 - protein, 183 aa, Artificial Sequence
  Synthetic
DSDRIEETIKKLLKELSDKSKEVLDEIRKRLKDHHDRNRKVLEEIRRILKRLEEEVRRKPNDERLEELKKRLRELAERLRTEVEEINKRLDELRKELEEKVRRLNEKLKKLADDLRKELRKGNDKRALKEMLDRVRKIIKEYEDSLRRLKEEVDEIIERADRLSEELRRKAEKIIRDITDAVR

SEQ ID NO: 4085 - protein, 183 aa, Artificial Sequence; identical to SEQ ID NO: 4084
  Synthetic

SEQ ID NO: 4086 - protein, 183 aa, Artificial Sequence
  Synthetic
DSEELLREIRKRLEDLSRKSEEIKRRIDEISRDLERKVEEIKKRIEELVRRVRTEADKRPKTRELDRLKEELDRLRRELEKEAEKLMEDHRRLNEELREEVKKINEELKRKTDTLTERLRRGNDRKVLERIREEADEIDKDYDRLLKEIRKKIEDIARDTERRLRELKDRVDKIIKKVEEDER

SEQ ID NO: 4087 - protein, 183 aa, Artificial Sequence; identical to SEQ ID NO: 4086
  Synthetic

SEQ ID NO: 4088 - protein, 179 aa, Artificial Sequence
  Synthetic
REIETVTKKSRDLNREIDKKLKELTERVDKLIEEWKRKTDRVREEAKRAVKEIEDKNVREDEFEKLTRELEKRLEDVKEESRKDKERIEKRLKEAEDDLRRLDKEHREELKEVRERLPETEELRRVIEESKRSNDELKKKADELSKRVKEALDRLEEEDKRVLEEIKDILRELRERRRK

SEQ ID NO: 4089 - protein, 179 aa, Artificial Sequence; identical to SEQ ID NO: 4088
  Synthetic

SEQ ID NO: 4090 - protein, 179 aa, Artificial Sequence
  Synthetic
SEIEEVEKKSRELNRRVKERLDEVEEESRRLNEKWERDTRRVRERVEEEIKKIEERNVREDEARRMLEAIKEDLERAERESERTDEEHRRRLEEVRKEVEDMDRRHREELKRVAERLPRTEKLDEVLKRSEDSNRELKRRAEELLRDSERTNEELRRRDEEVKREVEEKLKELEKEIRR

SEQ ID NO: 4091 - protein, 179 aa, Artificial Sequence; identical to SEQ ID NO: 4090
  Synthetic

SEQ ID NO: 4092 - protein, 187 aa, Artificial Sequence
  Synthetic
SSKEILKEIDERVEELKRRNEKVDREIKEKVKRLEEENEKVDREIKEILKELEKEAEKRPRTEDLERKIREVRDTLRRLHEENKEVNDRMRETVRRLHEKNKRMDERAKEEIEKIKEDIKRLEDKGTTEEVLERLRREVRKRIEDYKRKLDKIARDVDETIERYKRKLEEIKRRVEDEARKIKEEIR

SEQ ID NO: 4093 - protein, 187 aa, Artificial Sequence; identical to SEQ ID NO: 4092
  Synthetic

SEQ ID NO: 4094 - protein, 179 aa, Artificial Sequence
  Synthetic
SRKEELKRRLDEALKKYEADLDELRRRHEEDVRRSKEENERLLKELEDAVRRAKEEVKKAGKDKKDLDRLEEELRKLVEDIKRESEKLERDIDRHHKEIKKHMDKSRDELKKVREEIDRRDDEDRRVEKEIREAIERLKRNLERIKRNIEKVREDSKRVNKELRDKIREIIERIDRRLK

SEQ ID NO: 4095 - protein, 179 aa, Artificial Sequence; identical to SEQ ID NO: 4094
  Synthetic

SEQ ID NO: 4096 - protein, 183 aa, Artificial Sequence
  Synthetic
SRKEKLLDDARKILKRAEEELKRLYDKHRRIIEEVKRDLERLKKEHEDVVRRVEDVLRKRVTEEERVRELKRKIEENHKELKERIDKLKEELDRINEELKKRLDKIKKEADELLRRLKEVADRNEKDDKELEEDIRRIEDRLRRLLEELEKLIEDSMRELKRVLDELEKHIREVDEELEEDLK

SEQ ID NO: 4097 - protein, 183 aa, Artificial Sequence; identical to SEQ ID NO: 4096
  Synthetic

SEQ ID NO: 4098 - protein, 184 aa, Artificial Sequence
  Synthetic
SEAERVKRELDEALKKAKKALEDNKRKLEEALRKHREDAKRWKEELEKALKEAEKAAKDLRRDADKEELDRLREDLERKAKKLKDEIEKINRELEELAKRHEDTNRKLEEDLRRLAKKLREEIEKDGADKEAERKLRELEKRAKEALERSKEHSDELEERARKANKEIEDKLKRLAEEAEKEAR

SEQ ID NO: 4099 - protein, 184 aa, Artificial Sequence; identical to SEQ ID NO: 4098
  Synthetic

SEQ ID NO: 4100 - protein, 179 aa, Artificial Sequence
  Synthetic
SEAEKIKKDLDKIREDLKRLDREAEERVRRLSEELDRKDRELRKRIDEILKRMRDEERSDDELRKEEKKVRDELEEMAEDLRRKNEEIREILKRIAERLKKRNDDVRKRLEDIARKKSVPDEDLKRLEDELRKVEEDNRRTLEELRRRVEEVSRRNKESLEDIRRKLEEAIRRLREKTR

SEQ ID NO: 4101 - protein, 179 aa, Artificial Sequence; identical to SEQ ID NO: 4100
  Synthetic

SEQ ID NO: 4102 - protein, 179 aa, Artificial Sequence
  Synthetic
DGAEEVDDRLKKADEELRRKDKESDEKTKRIAEELRKLLEESKKKTEDLVRRLDEEDQRDELVRRTLREIEEDHERIDRRLKEKEEEVKREHEKIARELEKKNKEIRDELKEIADRNSVPEKRLRELEKKVEDVSRTNKKTLEDNRKKIAEVVKRLDEEIKRNKDTVRRVVERVKKDTD

SEQ ID NO: 4103 - protein, 179 aa, Artificial Sequence; identical to SEQ ID NO: 4102
  Synthetic

SEQ ID NO: 4104 - protein, 180 aa, Artificial Sequence
  Synthetic
ERKERLKERLDEVKKEHERLVERWHRENREVLRENRETVERLERELERVLRELRDALREQNRDEKAEKILRDLERKVRELKERAKRLHDKLEEENREVNKKIKKDSDDLREELEDETRKIKERRDEELEKRIEEVERKLRDTNRKIEELLKRLKKRHEEVDRELERLLEKLEREAEETRR

SEQ ID NO: 4105 - protein, 180 aa, Artificial Sequence; identical to SEQ ID NO: 4104
  Synthetic

SEQ ID NO: 4106 - protein, 180 aa, Artificial Sequence
  Synthetic
SEEEELEKELEKVLRENEESVRRLHKRNRDVLKKNRETLEKLEEDLKRVLERLKRALDRKNTPDEARKIIKRLKEKLERLVEEARELHRRLEEKNRDLNRRLKEKHDRLRKEVEDLRRELKARREKEARDEVRRLKKKMDDVDKDVERLVRELEKEHEEVDKDLRRKLDEVRKELEDARR

SEQ ID NO: 4107 - protein, 180 aa, Artificial Sequence; identical to SEQ ID NO: 4106
  Synthetic

SEQ ID NO: 4108 - protein, 182 aa, Artificial Sequence
  Synthetic
SEEERLEKELDEVLEDHKRRVEEWKKKMDEVNKKHKESIDRLREELDRVLDEVRKAGLDEKKLRELEKKARDLKEKIKKRTEEIKESNKRIKDEIKKLSDDLEKEARDLKREIRDLKRRGEPREEALKRLEELVRKLKEKLERINRRIARIVDKNTKEIKDTNDTLRKEVRDLMKELKDRTR

SEQ ID NO: 4109 - protein, 182 aa, Artificial Sequence; identical to SEQ ID NO: 4108
  Synthetic

SEQ ID NO: 4110 - protein, 175 aa, Artificial Sequence
  Synthetic
REDEEVKKELRKILEDHKRRVEDWKRRLKKNLEEHRRRVEEWKRRLDELLEKVRRAGLPEEVLRELEKVVREIKERIDRLDEEYEDLLRKIEEEAEEMNRRLEELVRELERLIERKDLSEEEIKRVIERLARDARRINERLRELLERLSEISERINREIEKIIDEARERLEREER

SEQ ID NO: 4111 - protein, 175 aa, Artificial Sequence; identical to SEQ ID NO: 4110
  Synthetic

SEQ ID NO: 4112 - protein, 175 aa, Artificial Sequence
  Synthetic
SEKEEVKKRLKDNMRRAEELIRRDDREVEENRKRHDELVKEWDKRLREILKKAEDSGLPEEVKKELKEIVDRIREEMKRLNEEYKRLVEEHKKRNEKVLRDYRDLLRRIEELIERNDLSEKEIKEVLEELSRTSKRLIEDSKRSSERLSERSKRTNEEIERIVRAAKRTIEERER

SEQ ID NO: 4113 - protein, 175 aa, Artificial Sequence; identical to SEQ ID NO: 4112
  Synthetic

SEQ ID NO: 4114 - protein, 183 aa, Artificial Sequence
  Synthetic
SVAEELEERLKEIKRESEKSIRDLRRLLEEIERRLRDINRKLDEIVKRVAEKIKDAETKGAPKEELDKELDKDRRDLERRADESRRELRRLEEEMKKKEKESRDRLDELRRRMEDRLRKNKEVDKKVVDDVERKLREIIRRHEEELKKIKEDLDKIREDHERLLREWKKELDELITRVAESAR

SEQ ID NO: 4115 - protein, 183 aa, Artificial Sequence; identical to SEQ ID NO: 4114
  Synthetic

SEQ ID NO: 4116 - protein, 183 aa, Artificial Sequence
  Synthetic
SVSKKLDDELRKMEREIEKSNETIKKLIEDIRRRSKESRDRLKELLEEIKKRLKEAEERGEPKEELDKKLEKMVRDAKRELDESRKELDKLKKEIEKVLRDSRKKLKKIEDELRRELEENKEIDEKVVEDIERRVEKVLTDHERELERVERELDDIIRRHEEELEKIERELEKIKEDVDRSAK

SEQ ID NO: 4117 - protein, 183 aa, Artificial Sequence; identical to SEQ ID NO: 4116
  Synthetic

SEQ ID NO: 4118 - protein, 181 aa, Artificial Sequence
  Synthetic
DELDRLRELLEELKRRSETVIKEAEELLRKLERELRELIREWKEITERLARRMEDLSRKGVDERTVEKLAREVKEANKRLEDRLREVKKKITRDRERLEKRSEELERRAKEELDKLRKGGLQREDLKRIEEELREILKRHRDANKRIKDEVEELLKRVEEMLRRLHEEDRKLLEDLKRETD

SEQ ID NO: 4119 - protein, 181 aa, Artificial Sequence; identical to SEQ ID NO: 4118
  Synthetic

SEQ ID NO: 4120 - protein, 181 aa, Artificial Sequence
  Synthetic
RETEEVKKDVDRIRKASEDVARKMEKITRDVAKELRDLIEEWRRRSEELKKELEDLSRRGVSKEDLKRVAEKIEKINEDIKRRLEETSRKNEELNRRLKEESDKLAKEVEDRLRRLREGGLPEDELKRIEEELRKILKEHEDKNREIKKENDRLNKEVEEEAEKATREDKRLLEKADRDRQ

SEQ ID NO: 4121 - protein, 181 aa, Artificial Sequence; identical to SEQ ID NO: 4120
  Synthetic

SEQ ID NO: 4122 - protein, 174 aa, Artificial Sequence
  Synthetic
SEKEEIEKRLDKLLKEHEEENDKIRRTLKEINDRSKEEVERIEERLKDLLRRLRERIEPREELKKIEDEVREVIREAREELEKLNRKDREIEKTLKKLSDELRKKVDDLKKELRTDEDTKRARDRLEELRRESEELIKTARDLVRRSEKEHRDLIERLRRILEELREKLERKTT

SEQ ID NO: 4123 - protein, 174 aa, Artificial Sequence; identical to SEQ ID NO: 4122
  Synthetic

SEQ ID NO: 4124 - protein, 185 aa, Artificial Sequence
  Synthetic
SVKEEVRTLLRRLERVSRELIRRLKEMLKTLHEENKKLIDDSRKLIRKIKRDLERVAERRARDEELKDLLRKLEELVRRLKEENDRLTDESRKKLDELRKEIKKLSDELRRDIKELEDRLDEKLRDKDTVKKVKEDLKDILRRHEEANERIRDELRRNLRKHEDDSKKSKEELDRILKKARDDAR

SEQ ID NO: 4125 - protein, 185 aa, Artificial Sequence; identical to SEQ ID NO: 4124
  Synthetic

SEQ ID NO: 4126 - protein, 185 aa, Artificial Sequence
  Synthetic
DIEDELRKELEKHHTKSREVKRRLTELLKRHEDRVEEVERRLRKDLKELRDRIEELSKIREEEMVERARRELKKIKEDVKKETEDVERESEEIEKELRERLKRVEEESRRVEEELRKKIEKNKDLDEKVAREVEERLKRDHDDLRRVIEEIRKRLEDSHRELKKTIEDVKRRVEELIEEAERRMK

SEQ ID NO: 4127 - protein, 185 aa, Artificial Sequence; identical to SEQ ID NO: 4126
  Synthetic

SEQ ID NO: 4128 - protein, 185 aa, Artificial Sequence
  Synthetic
SIREKLREVLERHHRTSRKVEEDLRRKLEDHHRKTREVAERLKEKVDRLREEIKRASRIREEEVVREIEERLKRMKEEIKTLADKVRDTSRRVKEELDRLLEEVERRSEKVERELEKRLRENKDLDERVVRKIEKDLRDDHRRLKEIAKRIDDEARRDIKRLEEIIKKIEEEVDRLIEEVRRRDK

SEQ ID NO: 4129 - protein, 185 aa, Artificial Sequence; identical to SEQ ID NO: 4128
  Synthetic

SEQ ID NO: 4130 - protein, 178 aa, Artificial Sequence
  Synthetic
DKDREIERLAKEAKDRHDKTLEDDRRRLEEVRRKIEETIRRIKKKLDEAKKRLKELVRDKPVEEELEKDVERRLKELEDELRELLRELEERVRESEKRFKELTDELKALIDRLREDIKREGVTEEILKELEEIVRRVEEKNKRLHDENEKDTRRVEAVLEDIKRRIDEIVRRLEERIK

SEQ ID NO: 4131 - protein, 178 aa, Artificial Sequence; identical to SEQ ID NO: 4130
  Synthetic

SEQ ID NO: 4132 - protein, 178 aa, Artificial Sequence
  Synthetic
DEKDRIDKRMKEVLKKIEELIRRDERRLEKVRKDHEELVRRIEDELRRVLEELKKLVEEKEVDKKLEEDVRRVVEEIKRKIEKHHEELERLVRESEKRLKKLLEDAKKELDEIREEIKRDGVTEDIERKIRELEEKVERELKKIHDENEKLAEKARRDLERIEREIDKLVKDVEDAIR

SEQ ID NO: 4133 - protein, 178 aa, Artificial Sequence; identical to SEQ ID NO: 4132
  Synthetic

SEQ ID NO: 4134 - protein, 178 aa, Artificial Sequence
  Synthetic
SEKDKITKTLEDAKRDHRKLVEEDEKALEEVERRHEEIVRRIEEKLKEAKEELDRLVRDKPVPDDLKREVRKLLEDLKRRLKKHHDELRKLVKESRDRLKEHHDRLEEELRRIKDRIRKTGVDEKILREIEERIKEVKENLRRVHEENRELAKKVLKDLERILEEIKKIIKELRERVK

SEQ ID NO: 4135 - protein, 178 aa, Artificial Sequence; identical to SEQ ID NO: 4134
  Synthetic

SEQ ID NO: 4136 - protein, 178 aa, Artificial Sequence
  Synthetic
SKKDEIEETIRRARERIKTIVDRIREELKRIRDKHKKLVDEDKKTLEEVLRTLRELVRDKPVDDRLLREVEKLLEDSKEEIKKHHEELARRLREIEEKIKRLLEEAEKKVEDVRDEIRKTGVTDEILEKVKELVREVEEVLRRIEKEIEDLVRKVEEDLRRIHERNRELAKKADDDIK

SEQ ID NO: 4137 - protein, 178 aa, Artificial Sequence; identical to SEQ ID NO: 4136
  Synthetic

SEQ ID NO: 4138 - protein, 178 aa, Artificial Sequence
  Synthetic
SKEEEIEKTLKKIEEDHRELVRRIERALDDARRRHKELVDRDDKELRDAERELDRLVREKPVPEELKERVKRLVKESKEEIDRHHKELEKRLKEIKEEIDKHHRELKERLDRIRERIRKDGATEEILKEIRDLADEARRNLERILRDIERVVEKVERDLKRIHDKNKRDVERVRREVK

SEQ ID NO: 4139 - protein, 178 aa, Artificial Sequence; identical to SEQ ID NO: 4138
  Synthetic

SEQ ID NO: 4140 - protein, 178 aa, Artificial Sequence
  Synthetic
KEKDDIDRDLKRAEEEHKRLVDEIRETLKEIEREHRERVKRIKEKLDEAKRRLEKLKRDRPVEDKLEKDLERRLREIEKKLRKHHKEVKDILRAIEEEIRRHHRTVRERLRAIRERIKKDGVTEKILEDIKREVDRVRKNLKEIKEKIDKEREDVKRDLDRIRKEIEELVEKVDRDVK

SEQ ID NO: 4141 - protein, 178 aa, Artificial Sequence; identical to SEQ ID NO: 4140
  Synthetic

SEQ ID NO: 4142 - protein, 178 aa, Artificial Sequence
  Synthetic
DKARKIEEDIRRAEEEHKELVKRNEERIKEVAERHEETVRDIERKAEDIRRELKKLVDEKPVPEELKRDFEELIKELREELRRHHEKMKRLLDEMRKRHKEHHDRVRELSKRVKDDIDREGVTKEILDEVKKLVDEVRANLEKSHEDIERLVEKVREDLKRIEERLRKIAEDLRRRVK

SEQ ID NO: 4143 - protein, 178 aa, Artificial Sequence; identical to SEQ ID NO: 4142
  Synthetic

SEQ ID NO: 4144 - protein, 178 aa, Artificial Sequence
  Synthetic
EEEREIEDTIRRAEEEHRKRVEDNKRRLEEAEKEHRKRVEDNKRRAEEIRRKLKELVDRKEVDERLDKRADEVLRRLEKRHRDHHEDLKKKLDDLRREHEEHHRRVKELERRVKEEIRREGVTEEILKKVKELVDRVRRNLERSHEKIKRIEDKVRRDLERSHKELEDLMRRMEEEIR

SEQ ID NO: 4145 - protein, 178 aa, Artificial Sequence; identical to SEQ ID NO: 4144
  Synthetic

SEQ ID NO: 4146 - protein, 175 aa, Artificial Sequence
  Synthetic
EKKERIEERAKEVEREHREIVKRDEEELERVREEHEESVRRDRKALEDVERDVRRDGIEKEVLDEIKKRLERSREKLDKLSRDVEKELEESKRKLEKLSRESKKKLEDLRRELTRGEVPMEDMLRKVKEVADENRERLKELHEENERTARRLRKLNRELHEENKRLVEEIKKEAK

SEQ ID NO: 4147 - protein, 175 aa, Artificial Sequence; identical to SEQ ID NO: 4146
  Synthetic

SEQ ID NO: 4148 - protein, 175 aa, Artificial Sequence
  Synthetic
SKAEEIRKELDRVRREIEKRAEEDKRTLEEVRREHEKLVRENEETIKRVEEDVERAGIDEKKKREIKEALDDLRRKHEKLSRESEDAIRRSEKELRDLKEEIDRLLDRLRRILDEGRVPMEDALREIKEVADEVRKKLRELHEKNKKLMDDNRRKLDKSHKDVREVEREIRERIK

SEQ ID NO: 4149 - protein, 175 aa, Artificial Sequence; identical to SEQ ID NO: 4148
  Synthetic

SEQ ID NO: 4150 - protein, 175 aa, Artificial Sequence
  Synthetic
DKERRIEEELEKARRDHKEDVDRDRERLKEVREEHERLVRENKKRLEEIRKELEDRGIERELLEEARKLLEDLKRKHEELSRRSEELIKRSEEKLKRLSDESERLLRELREKLKRGEVPMEDLLREVKRVVEKNKEDLKRLHDENEKLAEENRRRLKKSHDEVEKVAEDLKRKAK

SEQ ID NO: 4151 - protein, 175 aa, Artificial Sequence; identical to SEQ ID NO: 4150
  Synthetic

SEQ ID NO: 4152 - protein, 175 aa, Artificial Sequence
  Synthetic
EKKERIEDDLRRVKEEIDDLLRKNEKRLREAEDEHRKRVEDDRRRLDEVRKEVDDEGIDERVKREIERLLRESEEELKKLSDESRRTMKKLRDKHREDEEDIKRLLEELKRELDRGEVPMEDALRKLKRVADEIRKRLDESHKEIKKVVDDNRKKLEELHRKNRELERKIREDAR

SEQ ID NO: 4153 - protein, 175 aa, Artificial Sequence; identical to SEQ ID NO: 4152
  Synthetic

SEQ ID NO: 4154 - protein, 171 aa, Artificial Sequence
  Synthetic
KDEERIKKKLKKLVDENRDLNRRIEETNRRVAEDLDRRLKEIEKRNRDMAEELRKSDRSRETVKEMLKRLEDEDRKLSKEIRDRLRDLEREDERLHEEDKRHLERVDEELKRSNIDDEIRKRAEDAERETRETNRRIRDHTRRVAERVEKVLDEIRRHTEEVKKEVDEKER

SEQ ID NO: 4155 - protein, 171 aa, Artificial Sequence; identical to SEQ ID NO: 4154
  Synthetic

SEQ ID NO: 4156 - protein, 171 aa, Artificial Sequence
  Synthetic
SDEERIKDKLEKLVKENEDKNRRILEENKRVADENRRLNEEIEKRLEEMVEELERRDDSEESVKKALDDLEKELRDLNREDREHLRKLSEDLRKMKEEDKKHAEDVRRDLERANIDEEIRKRVKEAEDKTEETNRRIEKHHREVKKESEESNKRITDRLEEVKERVTRKRK

SEQ ID NO: 4157 - protein, 171 aa, Artificial Sequence; identical to SEQ ID NO: 4156
  Synthetic

SEQ ID NO: 4158 - protein, 171 aa, Artificial Sequence
  Synthetic
KREEDIKRRLEKLAKENRERNEEIKRRLDELVDRNREENEKILRELEKMVRELERSDRDRSVVEKELRDLEERIRRMHERDKEDLRRIEETLRELKERDKRHLDEVEKRVEDDNLDEEARKRLEELKKETEDTNRRIDEAVERAKEETRRTNERIKEELKRVKKKVTDKRR

SEQ ID NO: 4159 - protein, 171 aa, Artificial Sequence; identical to SEQ ID NO: 4158
  Synthetic

SEQ ID NO: 4160 - protein, 178 aa, Artificial Sequence
  Synthetic
SEVETAKEDLKKKVEENEKRIKDVEDKLRKTVEDNRKRLEDVLEELRRSVETLRDLLRKGTREEELETMLRDHRRKDKEVEDENRKSIKEHREENRRVEEENKKSKEELRRRLEDLRRKGVVDEELEKRLREAEEKSDRLLRRLKEESRKAEEDSKRLLKELKEESRRAEEEVRRARD

SEQ ID NO: 4161 - protein, 178 aa, Artificial Sequence; identical to SEQ ID NO: 4160
  Synthetic

SEQ ID NO: 4162 - protein, 178 aa, Artificial Sequence
  Synthetic
DEKEEAKERLKELRRRLEETDKRVDEELEKLMREMEDTDRRVKEKVDRSRREADEVLRRGTDDETLKRLKEKHERDDKDIEDKNEELERRLERRLREIEKRNRELNERAKRELEDLERKGVVDEELKRRLRKVSEENKESNERLRRKVKRVVDENRRTNKELKETSKKVKEDIERKRK

SEQ ID NO: 4163 - protein, 178 aa, Artificial Sequence; identical to SEQ ID NO: 4162
  Synthetic

SEQ ID NO: 4164 - protein, 181 aa, Artificial Sequence
  Synthetic
SELEEVTDRLRKLAEKARRLDKEYEEKSRKLKEEVERIDEDLDRLLKELTDEVREIAERGTDEEVVKDLKRKLKKLKRDIEELHKRLHDRNRELERELEEIHRRLREELDKLRDDIRKAGLPEEALRRIEKEIREVEKENRDTLERLRRHDEEVNRTNKETLDRLDEKLKRVEREIDERRK

SEQ ID NO: 4165 - protein, 181 aa, Artificial Sequence; identical to SEQ ID NO: 4164
  Synthetic

SEQ ID NO: 4166 - protein, 182 aa, Artificial Sequence
  Synthetic
DEEEDLKEKVKKVETEHEETLKEIRRKLEDVKREHEKTVEEIRDHNRKVEERIRDVERRKDDKSRELEERSERLKRKLEKHNRELDELSKELEELIERLKRDIDRVTEEVRRKLRKLERDVDREGATERIRERLEELMRDARRLNRELDEKVRKLVEKARRDNTRVKKKSRELMKEIDDELR

SEQ ID NO: 4167 - protein, 182 aa, Artificial Sequence; identical to SEQ ID NO: 4166
  Synthetic

SEQ ID NO: 4168 - protein, 182 aa, Artificial Sequence
  Synthetic
DEEEELKERIERVKDENRRSVERLRRELKRVEDDHRETVKDLERRLREVKKEIEELVRRKDDRDERLKKILKELEEELRKLKEDIDRVSKELKERIEELKKRVDRIHKELKKKAEDLEREVRRDGATEELKKKLEELMKEVRDLDRELKREVEELEREIRRLNKEIRERIEDLVRKAREAIR

SEQ ID NO: 4169 - protein, 182 aa, Artificial Sequence; identical to SEQ ID NO: 4168
  Synthetic

SEQ ID NO: 4170 - protein, 182 aa, Artificial Sequence
  Synthetic
REEEELKKKLDDVRRENEESVKKIKEDIDRVRREHEKTVEEIRRHNKKVEEEIRAEVRRKDDRDSRLERILRELKRLLEEHNKELDELSERLERELRAVEEKIERIHDDLARKLEKLAEEIKKDGADDRIREEIEKLAEEIRRLDERLEEELREIVRKMRELNRRVAEKSKELTEDARRRLK

SEQ ID NO: 4171 - protein, 182 aa, Artificial Sequence; identical to SEQ ID NO: 4170
  Synthetic

SEQ ID NO: 4172 - protein, 178 aa, Artificial Sequence
  Synthetic
SEREEIRERLRRNLEELRKSIKKIEDDLRRLEKRHRDAVKEIEDRLRRLEEKLDEMAKRDSDEETVRKIKEEVRRKVEKIKEEIRKHHEEIEERLRRIRKELKEVEDEHRRRVEKLERDDLPREDVKRAVDEIHKHTKEKEDRLRKLLKDLEKNIEDAIRRLEKLLRDLEEEIKEAAK

SEQ ID NO: 4173 - protein, 178 aa, Artificial Sequence; identical to SEQ ID NO: 4172
  Synthetic

SEQ ID NO: 4174 - protein, 181 aa, Artificial Sequence
  Synthetic
EESERILEKIRRAAEEDKERIRKAIEELRKLAEEDERKLRKANKEARDSARELRRLLKEGLDREEVKEVRERHRRRSDEVHRENEEERRRVDEKLKRVHEENRKIEETLKRELEDVLRKTGEAEVVEEARRLIKKWREEVERLNEEIKKLVEDWDRRVKELNERHRDDDRKIEKEVEDEEK

SEQ ID NO: 4175 - protein, 181 aa, Artificial Sequence; identical to SEQ ID NO: 4174
  Synthetic

SEQ ID NO: 4176 - protein, 181 aa, Artificial Sequence
  Synthetic
SELEKALEEIKRLAEDDMRRIKKVIKELEKLARDDEKRLREVIERLETEVRKLEELLKRGLSDEEVRRILERIKRELKRVHEENERITRKVETDLRKVHEDNKRSLEELKKKLDDLVRKTGDTEVVDELRKRLKEVKERAEDLNRKLEELIRRWKERVERLNRELEKRMRDVEEKVRREEK

SEQ ID NO: 4177 - protein, 181 aa, Artificial Sequence; identical to SEQ ID NO: 4176
  Synthetic

SEQ ID NO: 4178 - protein, 181 aa, Artificial Sequence
  Synthetic
SDLEKILEELKRLAEEDKRKLEEVIKKLEEAARKDAEDLKKVNEEAKKSARELEELLKRGLDRKEVREAEERHERRSRDVHRRNREKKDRVTKELRKVHEDNKRSLEELKRKVDDAVRRTGDAEVVREIEELLKKIEEEVRRLNEELKRLADEWRREVRRLNEEHKDTDRRIKERVKRAEE

SEQ ID NO: 4179 - protein, 181 aa, Artificial Sequence; identical to SEQ ID NO: 4178
  Synthetic

SEQ ID NO: 4180 - protein, 181 aa, Artificial Sequence
  Synthetic
KDMERMLKEIEDLARKLREELKRVLDELRKTAKRDEEELKKVNKEAKESARELEEKLRRGLSREEVEKDVRDHRKKSEEVNRRNRERRKKTREDVERVKRETRRKEEALERRLKEVVDRKGDTEVVKELRKLLKKIKDDVRRLDKELDELLRRWEESVERLNREHKKTDEKVEEDVKRTTT

SEQ ID NO: 4181 - protein, 181 aa, Artificial Sequence; identical to SEQ ID NO: 4180
  Synthetic

SEQ ID NO: 4182 - protein, 182 aa, Artificial Sequence
  Synthetic
SEEEKVEKELRDLVREDDRRLREVEERVRKVVKEAEDDHRRVKEDIRRMVEEIRKKLDKDGKSDRIARELDELLKRLEERLREVEKRSKELNEKLKREIEKVHEENKKLLDEIRKRLEDATRRGTSSERLEDEVRKVEDRSRRMNERIDERLKRVEEESKKAIEELRRELERVKREVEERKR

SEQ ID NO: 4183 - protein, 182 aa, Artificial Sequence; identical to SEQ ID NO: 4182
  Synthetic

SEQ ID NO: 4184 - protein, 182 aa, Artificial Sequence
  Synthetic
SEVEEVKKELEKLAREDEKRLEDVKEEVKESARRDKRRLEEVEEDLDRLVKELEDKLRDDGKDDKLKKEVEDLLRKLEERLRRVHEENKKILEEHKRRSDKVHEENKETLKDIRRRLKEAEDRGTSTDELKRKLKRVEERSREVNRELRERDKKIEEDSRRINKRLKKKVDEVKEKVREDTR

SEQ ID NO: 4185 - protein, 182 aa, Artificial Sequence; identical to SEQ ID NO: 4184
  Synthetic

SEQ ID NO: 4186 - protein, 182 aa, Artificial Sequence
  Synthetic
DEEEDVRRKLEELARRLKRRLEEIEKRLRDSVKEDRRKLEEVKEKLRELIKKLEDEIRKKGTDRRLRDEVKKILDEIKEEITRVHEDNKRRLKEHKETSEKVKREIEDALRKIEDELRKAEERGTSTEKLKEDVERVKRDVRRVIRELEKTDERIERESRKVNEELKELVERVERSVKKADE

SEQ ID NO: 4187 - protein, 182 aa, Artificial Sequence; identical to SEQ ID NO: 4186
  Synthetic

SEQ ID NO: 4188 - protein, 182 aa, Artificial Sequence
  Synthetic
DEDREARKKVEALLKEVEDRVRESKKRTKDLLREIEKRLRDTTREIDELRRRIEDLSRRGEPKEDVLRELKKKLEELLRKDEKINRDLRRKLERLRREHEKILKRLEELLKELEDELREAGLPEEVLRELKELLDKIRETIERASKENEELLREIEKRIEDANRENTERLRRIEKRIDDDAR

SEQ ID NO: 4189 - protein, 182 aa, Artificial Sequence; identical to SEQ ID NO: 4188
  Synthetic

SEQ ID NO: 4190 - protein, 171 aa, Artificial Sequence
  Synthetic
SEKDELRKRVEDIKETAKKVVEELREASRKIHEDNKRVNDRLRKESKRIKDKADKLDIPEESLKRLKKEHEDTDRRIRETDKKLNDDHEDKNRKIEEELDRLIKEIKERDERKPVDERAREEVRRIEKTIRDTARRVRERVRDSERRFRKLVREWEKLVEDSERKIDELSK

SEQ ID NO: 4191 - protein, 171 aa, Artificial Sequence; identical to SEQ ID NO: 4190
  Synthetic

SEQ ID NO: 4192 - protein, 171 aa, Artificial Sequence
  Synthetic
SAKEEIKERVKRIEERLRRLLKELEEKVKRIHDENRKVNKELTDRSKEIKDRLKDLDIPEEALRDLDRRHDETNKRIREEDEKLNREIKERLERLKRKAEKLREEVEERDKRKPVSEEVREELKRIEERLDRTLREVRKTLEDIERRIRKAVEDWRRLVKESEERVKRLTD

SEQ ID NO: 4193 - protein, 171 aa, Artificial Sequence; identical to SEQ ID NO: 4192
  Synthetic

SEQ ID NO: 4194 - protein, 178 aa, Artificial Sequence
  Synthetic
SEEERVRKDLKELHEHLKREVDKARKDLEDMHRHSEELAREVRERHERSKRELDELERRGTDEKTIRDVERKNRDTNRRIREEMERHKKKLDEILERIRKSLEDHTKRVREVLKELAKENVKSEEIEERVRRNEDTLRRVLKELRERAKRNKDDIRRVLKELEDRSREIEKKLREAER

SEQ ID NO: 4195 - protein, 178 aa, Artificial Sequence; identical to SEQ ID NO: 4194
  Synthetic

SEQ ID NO: 4196 - protein, 178 aa, Artificial Sequence
  Synthetic
TEEERARETLDRLNKHSKELVDRVREKLKRLVEHSRELLRRVDRKHKESEKRVREVSRRGADSKTMREIEKDNDRTNKEIKERLDRHKKKLDEILEEIRDELRRHKEKLDRILERLAENNVKTDEIERRVERNKREIDKVLKELEERVRTNKDEIDKALEKLKRLSEEIKRKMREDET

SEQ ID NO: 4197 - protein, 178 aa, Artificial Sequence; identical to SEQ ID NO: 4196
  Synthetic

SEQ ID NO: 4198 - protein, 178 aa, Artificial Sequence
  Synthetic
KEKEELDETIRRLEEHSKKKVDKVRKELKEMDEHSRDEARRVRREHEKSEEKVRRASEEGRSKEVMKRLKEENRDINRRIRERVKEHKRRLDEIEERIRRTVEDHKRKVEEVARRVRERGVESEEARERLRKNEEEIKKVLEELERRVRENKERIDDVERELEDLSRKIEEKLDRDDT

SEQ ID NO: 4199 - protein, 178 aa, Artificial Sequence; identical to SEQ ID NO: 4198
  Synthetic

SEQ ID NO: 4200 - protein, 178 aa, Artificial Sequence
  Synthetic
KEEEEARRTLERIERRIRKALKEIDETLKRLNDHSAKRVKEVREKHEESRRKVDDVSRRGTDDDVARRLKRENDEINKRIEDTVRDHKRRLDKILKDIKKRLDDIKRDLDRVAKELRERNVQTEEIRERVKRIKEEMDRALKRLKDKVKENKERIDEVLKDLRRTSKEIKERLDRSTK

SEQ ID NO: 4201 - protein, 178 aa, Artificial Sequence; identical to SEQ ID NO: 4200
  Synthetic

SEQ ID NO: 4202 - protein, 174 aa, Artificial Sequence
  Synthetic
SKKEELERLLEEAKKKHEESERRLRESSKKLEEEIRRMKEHSKKSSEDAEDKLRRNRASEELLKEVKKMNEELKKKHEDLEREIEESNRRIEEKLKRNKDKSRKEEEDVRKILEDGDTGDELLERIKDLVRRSEEENKKLLDEHRKIVKTLKERLEKLNEEHERIVREVERRTR

SEQ ID NO: 4203 - protein, 174 aa, Artificial Sequence; identical to SEQ ID NO: 4202
  Synthetic

SEQ ID NO: 4204 - protein, 174 aa, Artificial Sequence
  Synthetic
SSEDELRRLLKEARDTHRESEKRLRDSSKRAEDMHEKSKEDVERSSRELEKELRRRRADEELKRKVKEKNDEIKKKLEDNEDKSRKENEKLRDKLRKNKEESDRLVKRLEDIARRGDTGERLLDEVRKEMKRSEEENRRLLREHEEVVKKSIKENKELLDKHKEIEDRLREEIR

SEQ ID NO: 4205 - protein, 174 aa, Artificial Sequence; identical to SEQ ID NO: 4204
  Synthetic

SEQ ID NO: 4206 - protein, 174 aa, Artificial Sequence
  Synthetic
SEKETLKRLLDEIKKRHKESEDRVRKLVEDAREELDRVADELRKSSEDLRRDLKRANADEELKKKVEKLNRELEKKLRDLRRRMKEEEEELRRKLEENKKESDERVKRLEKIAKDGDTGSKLLREVEKLMEESRKRNEDLLKELRDIIEDLREKLRELLREHREAAKRLRDEIR

SEQ ID NO: 4207 - protein, 174 aa, Artificial Sequence; identical to SEQ ID NO: 4206
  Synthetic

SEQ ID NO: 4208 - protein, 174 aa, Artificial Sequence
  Synthetic
DERETLEKLLKEVRDMHEESKKRLTDSSRKLREDLRRVKEELDKTLRDIEERAKEENISEELKRKLDDLKRRLKEKVKKIEDEVEEKNERIRKKVEENETKSAEIEKRLRDIVRRGDTGSRLLEEAKKLIEESKRENEELLKEHDKIVKELIKKLRDLLKEVEDRARDVTEEAK

SEQ ID NO: 4209 - protein, 174 aa, Artificial Sequence; identical to SEQ ID NO: 4208
  Synthetic

SEQ ID NO: 4210 - protein, 174 aa, Artificial Sequence
  Synthetic
SSRETLDELLRRAEEIHRRSEEELRRSSEEVRRKHEKSERDLEKLLRDAEELLRRENVSDELRDEMRRKVEEVKKKADRNREESEDSNRKVDEDVKRNKEKSRELVKELRKIADAGDTGDKLLDTVRKLVETSRDENRKLLEDHKKMVKESEDRNRELLRDLERVIEELSRRIR

SEQ ID NO: 4211 - protein, 174 aa, Artificial Sequence; identical to SEQ ID NO: 4210
  Synthetic

SEQ ID NO: 4212 - protein, 179 aa, Artificial Sequence
  Synthetic
SEVEEILDRLRREVERSKKKVEDILRELKKLAEDTKEKVERVLDRNRKTIEELKKARLPDEELERALRKDRDELRRIKEDLERRHEEIARRVKEVEDRLRKEHERLEKELREVERDLKISEDLVTKLRDLLRRHHETLRRLAKELRDLLKKHHEELRRLIERLEKSLEDLERELDKTRR

SEQ ID NO: 4213 - protein, 179 aa, Artificial Sequence; identical to SEQ ID NO: 4212
  Synthetic

SEQ ID NO: 4214 - protein, 179 aa, Artificial Sequence
  Synthetic
SEVEKILEDLKKLIKESKDEADRILTDHRRLVKETEEEARRALERNRKTVDDLRKANLREDELRDALRRDEKELEDIVRRLRKLHEDLHRKLKKVTDKLRELHEELKRRVEEVERDLKISEEALRELRRLLKEHHEILRKVEEELRRSDEEHHRRLEEVERRLRKSLRELEETVRETTR

SEQ ID NO: 4215 - protein, 179 aa, Artificial Sequence; identical to SEQ ID NO: 4214
  Synthetic

SEQ ID NO: 4216 - protein, 179 aa, Artificial Sequence
  Synthetic
SEAERILEKLDRLVKETDRRVKEVLEDNRRTVRRLEEEVKRILKENRETARELEEANLPKEDLERRLRRDEEELRKMVEELRERLKRDAEKLEKIKRELRELHERLKRDVEDVTRRVKLDEEVLRRLKKLLDEHNERLRRLERDLDRSLKEAKETLDELERRLEKSLRELKESVDRTRK

SEQ ID NO: 4217 - protein, 179 aa, Artificial Sequence; identical to SEQ ID NO: 4216
  Synthetic

SEQ ID NO: 4218 - protein, 177 aa, Artificial Sequence
  Synthetic
SSEERLKEEFKRAAEKVRKVEEELRELHERVEKSSRDSKRRIRELLKRAEEEVKRVEDRGTDRRKKEEIKRVVDELRKDVRRVEKENDEELKKHNEDLKRVTDEIRKILKEMKEELDKRGASDEVLRDLKRLIEELEDKARRVLDKSRRIIERLRRKDEEVLRKLEKEIRELKKKAN

SEQ ID NO: 4219 - protein, 177 aa, Artificial Sequence; identical to SEQ ID NO: 4218
  Synthetic

SEQ ID NO: 4220 - protein, 177 aa, Artificial Sequence
  Synthetic
DEERELRRLLEDVKRRVREVEEELRRLHEEIKRTSKRSKEELRKLHKELEDAVREMAKRGTSKEKLDELRKELKKHNDRLRKVEEENDRKLERHNRRLRKVERELRELVKKLEEDVRRRGASDKVLRDLEELVKELKRRLDEVLETSRREAEKLKRDDEKVLRESKKIMEDLRRRAE

SEQ ID NO: 4221 - protein, 177 aa, Artificial Sequence; identical to SEQ ID NO: 4220
  Synthetic

SEQ ID NO: 4222 - protein, 177 aa, Artificial Sequence
  Synthetic
SEEDELRKLLEELRRRSKEVNDRLRKLHDELRRRVEDLKRKLRELHKEAAKIVEEMKARGTPEEKLRELEKSLEDHNRDLKRVEDEIDDKLRRHNEILKEVHKRDRDSLRRIEEEVRRRGASDKVLEDLRRLVEENTRRLEEMLKRSEKIARDLLEDVKRFLDESKKKIDTLRRRAE

SEQ ID NO: 4223 - protein, 177 aa, Artificial Sequence; identical to SEQ ID NO: 4222
  Synthetic

SEQ ID NO: 4224 - protein, 177 aa, Artificial Sequence
  Synthetic
SLEDELRRLLTEAEKRSKDVNERLRDLHREVRELSEDVNRKLEELHRELEERVKELKREGRDEEELRKIEETLKRHNEELKRVHERDRDTLREHNEKVKKVHDDDRRSLEELRERLKREGASDEVLKKLKELVRRNEEELEKALKESKDIVEKNKRDLDEVEKKSREIVRELIERTK

SEQ ID NO: 4225 - protein, 177 aa, Artificial Sequence; identical to SEQ ID NO: 4224
  Synthetic

SEQ ID NO: 4226 - protein, 177 aa, Artificial Sequence
  Synthetic
SLEETLEKLLREAEDISRKANKRLEEAHERIKRTLEDLERKLEKLNKEVRDRVERVKERGTPEEKLKDIERRLREHEKRSKEVRERLREDLEDHNRDLKRVHDEDKKSLDRLREELERKGVSDKVLEKLKRLIEENKKRLERVLEKSDKILDDLRRKVEEVLKRLEKTVKDLEDEAR

SEQ ID NO: 4227 - protein, 177 aa, Artificial Sequence; identical to SEQ ID NO: 4226
  Synthetic

SEQ ID NO: 4228 - protein, 179 aa, Artificial Sequence
  Synthetic
SEDEELLRRLEETIRRATERVKRLLDTLRKLAEDVRKELERLLDTHRELAKRIEDELREGRSKEVSDKVREENKEHHKEVERRLREIEERIRRHHKKVDEILKEIEKRLKEIIEEILRTRGRTPEEVERVLREVTKRLRDLKREHRKLLEKVKRELEKVEEDHRDSSRKLEEIIKEAEK

SEQ ID NO: 4229 - protein, 179 aa, Artificial Sequence; identical to SEQ ID NO: 4228
  Synthetic

SEQ ID NO: 4230 - protein, 182 aa, Artificial Sequence
  Synthetic
SEAEKLAKDIREAAKRLREHAERDKEELKKAADKLRDEARRDAEKLKRAAEKLKDLARRTGNTEELEKEAREIHERNKRNLERLEKEAREIHEENKKNLERLDREAERIEKEVRDAVRREQLDEEAAKRIKELLDKARKDLEDAKREAEELNRRAREELEKAKKDAEDLNRRAKEELDKARK

SEQ ID NO: 4231 - protein, 182 aa, Artificial Sequence; identical to SEQ ID NO: 4230
  Synthetic

SEQ ID NO: 4232 - protein, 182 aa, Artificial Sequence
  Synthetic
DDKDKLLEELRKVIEELEKKLEDNNRELEKVLEKLKREAERDLERLREMIRRLEELLRRDGPTEELRKDVERIHRENRENLKRIKKEVDEIKEKSKRSLEELKKEVDKIEEDLERLAREKNLSEEVLDRLRRIIEELRERLKRAEKSNRDILERIDRELEKLKRRAEELNEELRRRLKERRD

SEQ ID NO: 4233 - protein, 182 aa, Artificial Sequence; identical to SEQ ID NO: 4232
  Synthetic

SEQ ID NO: 4234 - protein, 182 aa, Artificial Sequence
  Synthetic
SRTEEVLKELRTLMRELRRRLEEVIKELEKSAEELERIAREVAKRSRKVIEELKRKADKDGTSDRLLEEVDKLLEEHNEELERVKKKLTDDLREHRRRSKEVKERLEKKLREIEKRLKEVVDRDGPREELEDLLRRIRETLEDMKRRLDELDTELEKRLREVARTLDELHKELEETLRRLKK

SEQ ID NO: 4235 - protein, 182 aa, Artificial Sequence; identical to SEQ ID NO: 4234
  Synthetic

SEQ ID NO: 4236 - protein, 175 aa, Artificial Sequence
  Synthetic
DAEDELRELSKRNKDEVREVKERLKKLSEENRRDLERVKRKLEKDSEENREALERENKENKEVVDRVEKVHRDIEERVKKIKREVDKLHREVEEEVERIERDLERVHRELEEDVKREGVTEELKKRIEELIRRSRKLAEDLKKKLEDIHRETERLVRELAELVRDLHRRTKEKAR

SEQ ID NO: 4237 - protein, 175 aa, Artificial Sequence; identical to SEQ ID NO: 4236
  Synthetic

SEQ ID NO: 4238 - protein, 175 aa, Artificial Sequence
  Synthetic
SAEDRLRELSKRNREEVEEVEKRLRELMERIRRRLREVKEDLRRLSEENRKTLERKNKDQRELVKRVEEEHRKIEEEVERTERRVEKVLEDIEREMDRIKKKLEDDHRKLEDEVRRRGVTEEIEERIKRLIKESRDLARELEEKLRKLLEELEKLAKRLREKVKELHDDTERAAK

SEQ ID NO: 4239 - protein, 175 aa, Artificial Sequence; identical to SEQ ID NO: 4238
  Synthetic

SEQ ID NO: 4240 - protein, 175 aa, Artificial Sequence
  Synthetic
SEEDELRELSRRNEEEVKKAKRDLEKLSRENEEDLKRVKRKLEKKSEDNRRILERDNREAEEVVRRVEERHKELRKRMEEIEREIRKVHEELRREVEEIEKDLRRVHDEIKKEIEDKGVTEEVKKKIEDLIRRSRELVERLKRKVEELHKTTKRLVEELEKTIDRIIEETRERAR

SEQ ID NO: 4241 - protein, 175 aa, Artificial Sequence; identical to SEQ ID NO: 4240
  Synthetic

SEQ ID NO: 4242 - protein, 183 aa, Artificial Sequence
  Synthetic
SAEDELRRLLRENRERNKKADKDIKKLLDDNRRDLERLRRELERILREIEKRLKDVEKDVEGRRLEEIRKRLERLRREARRELERLERHNRELLEEHKRKNEENEKHNRELEKEAEELSRRGTTEDVVRELMKKVDDDHKESEKLVRESEEKLERDNERTRRIADKLRKELDDTREEIERDAK

SEQ ID NO: 4243 - protein, 183 aa, Artificial Sequence; identical to SEQ ID NO: 4242
  Synthetic

SEQ ID NO: 4244 - protein, 181 aa, Artificial Sequence
  Synthetic
DSEERAEDVARENKEILERVDEKARKLLDDNRKVVEELKKTNEESSRELKRVLDELNIDEDLLREIEKLNRTLKKKTEDLAKDNKKIDDDLRRELEELKRENKEKDKRLREELEDLKRKGSSEETVEELLKKMRAISRDSERKVKELLDKIRELSDRSRRRAEELNKEHKKIVDDIAERRR

SEQ ID NO: 4245 - protein, 181 aa, Artificial Sequence; identical to SEQ ID NO: 4244
  Synthetic

SEQ ID NO: 4246 - protein, 181 aa, Artificial Sequence
  Synthetic
SVEERLRELVKENRDVVRRAEEEFRRLVEENKRILEEIDRRARESSRKLKDVLDKLNIDEDALRRIEERNKDVERKLEELKKRNKDKDEKLAREIEKLKAENEKEDRDLEREVRDLKKKGSSEETMERLLRKAKEISRRSKERLKRLLDKVKKLSEDSERELKKLLDEHEKIVEDIEREAR

SEQ ID NO: 4247 - protein, 181 aa, Artificial Sequence; identical to SEQ ID NO: 4246
  Synthetic

SEQ ID NO: 4248 - protein, 181 aa, Artificial Sequence
  Synthetic
DDERRLREVSDRNRRILDRIKKEVERLLDEVRKILKEAEDRLRRSSERLEELLRKDNIDEDKVREIRRLNEEIRKKVEELRKEIRDLLEELRKRADKLTEENKDTDDKLRRRAEDLKRKGSDEREVKKTLDEMRRRSRESEEELKKLLKEIKEIVEELKRKLDTLLKEHKEIVEEIKRRTT

SEQ ID NO: 4249 - protein, 181 aa, Artificial Sequence; identical to SEQ ID NO: 4248
  Synthetic

SEQ ID NO: 4250 - protein, 181 aa, Artificial Sequence
  Synthetic
SDEERVRRLEEEVDKTLEKVERELRKVSEENKRTLDRLRAEMEKSSKELERVLEELNIDEELRKEIKRRNDELRKELEELLTRNRKKDEDLKRRAEKLKREIERLKEELKRELEDLKRKGSDERDVERTLRKIEETVKKLAEDLKRLLDEIKKISEESKRRAEELLRKHKKIVDDIDKRTR

SEQ ID NO: 4251 - protein, 181 aa, Artificial Sequence; identical to SEQ ID NO: 4250
  Synthetic

SEQ ID NO: 4252 - protein, 182 aa, Artificial Sequence
  Synthetic
SMKEELDRLLKELRERNKEIEDRAEELLRRSTDSLRKVKEKLDKLLEESTRILRKVEKENRVSEDTLRELREIHERLRKELEDAKRDLDRDHKELAEKLEEIIRRNRENLRRLEREVEEMKKRNDLSEKVLKDIKRVIDEDEERLKRVLDDYERRVRELEDKVKKILDRYKTEVDKLRERAR

SEQ ID NO: 4253 - protein, 182 aa, Artificial Sequence; identical to SEQ ID NO: 4252
  Synthetic

SEQ ID NO: 4254 - protein, 182 aa, Artificial Sequence
  Synthetic
SVEEEIRDLLRKLREIVDRVRRRLKEILEESTRRLEEVTRRIDESNEDLKRAVDDVKRRNTRDEEVKRELDRKLKKIHDEDKREKDKLEKIHRDLTDKLEKAKRKLEELVKRIEKEVEDVRRENKLDKEVLRKLEEEIEKLRKEAKKILDEYRKLVEDLADKIKKILDRNRKLIEELVREVK

SEQ ID NO: 4255 - protein, 182 aa, Artificial Sequence; identical to SEQ ID NO: 4254
  Synthetic

SEQ ID NO: 4256 - protein, 182 aa, Artificial Sequence
  Synthetic
SESEKTLKDLDEISKRYEKKVREMLERHKRLSEETKKRDDEALERLTRLVKELKDVARRGDISEDEIRRTLEELRELVKDVKRRNDETNRELEERSDRVNKDLERINRDLKRLVDEAAKRGISEDVKRRLDELLERHKRISEEVEKRNEDLLREHEEISRRSKKRIDDLLREAERILDEMRR

SEQ ID NO: 4257 - protein, 182 aa, Artificial Sequence; identical to SEQ ID NO: 4256
  Synthetic

SEQ ID NO: 4258 - protein, 182 aa, Artificial Sequence
  Synthetic
SESEKVLRDLEKISEDTARRLEDELRKHKEIVDRIKEEDDEMLDRLRKLVETLKRLAERGDISDKVIRDMLRELRKRVREVEERNKRLNEELKKRSDEVNKELEETNRKLERDVREAERRGTSEEVKRRLEELLKRHKEESDRARERNERLLKEVRDLSEESRERIERLLRELEERVREDER

SEQ ID NO: 4259 - protein, 182 aa, Artificial Sequence; identical to SEQ ID NO: 4258
  Synthetic

SEQ ID NO: 4260 - protein, 182 aa, Artificial Sequence
  Synthetic
SRSEKSLKELREISERTRKRLEDKLDRHEKESKKVEDKAREVLKELEDLVRTLEEVARRGDISEEMIDRELKKLRERVKEIKDDLKRLNDELRERSKRVNDRLKEENEKLKRKIDEVEREGIDEEVRRRLRELLERHKRISDEARKRNEDLLREHEKRSRDIEKRLDDLLKEAEDRLRERKR

SEQ ID NO: 4261 - protein, 182 aa, Artificial Sequence; identical to SEQ ID NO: 4260
  Synthetic

SEQ ID NO: 4262 - protein, 183 aa, Artificial Sequence
  Synthetic
SDEEELRRLIEEHEKILKEIEDRVRESSKRNKEILKRLEDEVRKLLETVKDRLEKARERVDERLVKRVEERLEEIKRRVEELLKENEETDERLKKRVKETLDRSREEVKRVEERLRDLKRKGSSSETAKRVLDELKERSERSMEDLKRLLKEHKERVDEMRRRAEELLKRLREVIRKVEEEIR

SEQ ID NO: 4263 - protein, 183 aa, Artificial Sequence; identical to SEQ ID NO: 4262
  Synthetic

SEQ ID NO: 4264 - protein, 183 aa, Artificial Sequence
  Synthetic
SRDEEVKRLKKEHEDILEEIRKRVDESSKRNEKILREIKERVKRSSDDLKRLLEELRERVREREVERVEDENRRMEERVDRTLEKNRDLDRRLKEEVDRTLEESKKTVEELEKKLRDLKRKGSSEEDVERVLREFEEVSRRSEETLRRLLEKHKELVERAARELETLLKEHRERVRKIEEEAK

SEQ ID NO: 4265 - protein, 183 aa, Artificial Sequence; identical to SEQ ID NO: 4264
  Synthetic

SEQ ID NO: 4266 - protein, 174 aa, Artificial Sequence
  Synthetic
SSKERLEKLLRELEEDLRRAHEEHKRLIKRLREILDEIRKRVEKLNRDLDRVLERAREEGKLDEDLRREVEDIKRRNKENLKRLEDEVRRTEREIEELNKKLEKEVRDIAEDLKRKPVDEELLKEVKEMIKRLRKKIKKSLDDVRRVIRELEEHARRDLRKLEKDLKDIEDKLR

SEQ ID NO: 4267 - protein, 174 aa, Artificial Sequence; identical to SEQ ID NO: 4266
  Synthetic

SEQ ID NO: 4268 - protein, 174 aa, Artificial Sequence
  Synthetic
DSEERLKELERRLRELLKRVSERSKKLNKEHEEINRKAEEEVERLNRELERDLEDAARKGLLDKDLKKKVDDIRRDNRRNLEDSKRRSEKVSRENRERNERLRDRVRKIEKRLRERPVTDELLREAEKMLKELEELVREDEKRLKDISKEVEEHYRKDLEDVKRAIKEIRDRLK

SEQ ID NO: 4269 - protein, 174 aa, Artificial Sequence; identical to SEQ ID NO: 4268
  Synthetic

SEQ ID NO: 4270 - protein, 174 aa, Artificial Sequence
  Synthetic
DSERRLEKLLRELKELLKRVEESLRRLNEEHKRINDEARERSKRLNEELEETLRKAREDGRLDEELRKKVEEIRKRNEDKNRESEKDSERVRKENEDNLKRLKEKVEEIERRLRAKPVTEELLKEIKDRLKELAEHVERDERRLKRISEEAEKRYREDVREVKEMIEEIERELR

SEQ ID NO: 4271 - protein, 174 aa, Artificial Sequence; identical to SEQ ID NO: 4270
  Synthetic

SEQ ID NO: 4272 - protein, 174 aa, Artificial Sequence
  Synthetic
ESEERLRDLIRKIRELLEEIERRLRDLNRRLREILKRIEEESEKLNRELKKILDEARERGLLDKDLEREVRKISKDNKKKNDDLRRDVERISRENRKNLEKLKKKVKDIEEELRRKPVTEELLKEVRERLRELEEHARRDLETLKRMIRKLEEEAKKDLRELEKMIKDIRDKLK

SEQ ID NO: 4273 - protein, 174 aa, Artificial Sequence; identical to SEQ ID NO: 4272
  Synthetic

SEQ ID NO: 4274 - protein, 179 aa, Artificial Sequence
  Synthetic
SLEEALRKLEEELERLNEEAKRRIDRLIEELRRLNEEARKKIERLIEETRELLKRLAEEGKVDEELEKEVRRIEKENKEALDRSREETKRIEEEIKRVEEDSRKKTEEIKEELKELIRRDGGIDREILERAKELLKKLEREYRELLKKIEKVVRDLEEKYRELLKRHRKETERLDREVR

SEQ ID NO: 4275 - protein, 179 aa, Artificial Sequence; identical to SEQ ID NO: 4274
  Synthetic

SEQ ID NO: 4276 - protein, 179 aa, Artificial Sequence
  Synthetic
ELAERVKRLIEEHRKTDKEVEDRIRKLIEDHDRENRKVEDEIRKLIKELREIVDRARKEGKVDERVEEKLRRLEEEIERVLRELREESKRLEEEIKEVLDRLKEESKKLEEDIKEVLRRDGGIREEILDKIREVHRRVRKKARDLAERIKDAHRKLRKKVEELLRRIKEMIRRLEEELR

SEQ ID NO: 4277 - protein, 179 aa, Artificial Sequence; identical to SEQ ID NO: 4276
  Synthetic

SEQ ID NO: 4278 - protein, 179 aa, Artificial Sequence
  Synthetic
SDRERLTRLIEELRKLLEKWEREVKKINDEIRRTVEKVEEDSKKSIEDLRRLLKEMEDRGSVDEEMRKRVEEVERRNEKVLRDLRETLKKVHEDNKKITREVRERVKEVEKRLEDLRRRQEEDTKDLERRIEDVIRRLKKLADDDLRDLRRFLKELKERADKLRKEDEEALKELRDRAE

SEQ ID NO: 4279 - protein, 179 aa, Artificial Sequence; identical to SEQ ID NO: 4278
  Synthetic

SEQ ID NO: 4280 - protein, 179 aa, Artificial Sequence
  Synthetic
SREDDIRRLIEEARKLVEDAERRSKKSIDDIRRLVKEWEEEVKRINDDLKRLIDEARKRGDVTEEIEEDLRRMHKKNREIADRVRRELKRVEDDNKRVLDELREVLERIEREIEDLRRRNREPDKDLKERIKKLLDELRRLVEELEKRDKEMLDRIKKLADDDRRELERILKKLEDDLR

SEQ ID NO: 4281 - protein, 179 aa, Artificial Sequence; identical to SEQ ID NO: 4280
  Synthetic

SEQ ID NO: 4282 - protein, 179 aa, Artificial Sequence
  Synthetic
SAEDTIRTLLERHDDLDREVEERSKESIRELRRLIKEWRERVRKLNEELKRLLDDLRRKGLVDERLTKKVKDVHDDNDRIKKELTKRLREVEERNKEDLKRHKRESDEVKKKLTDLRRRKRNRKEELIEEIKEMNKKAKKSVDELEKKDRDVLDEIRKMAKEDLDRLRKALEDLERDAR

SEQ ID NO: 4283 - protein, 179 aa, Artificial Sequence; identical to SEQ ID NO: 4282
  Synthetic

SEQ ID NO: 4284 - protein, 179 aa, Artificial Sequence
  Synthetic
SSEDRVRDIERRHKEEDDRVEEESRRSTREIRELLRTAKERSDDSIRKLRKLIDDLRKEGLVDERLKEKLKRVEEENEEVLRRLEKRLRDVERENKKLLDDHKKKSKEVKDRLRKIETDQKRRTEELEKELEDVNRDVDRSAKRLKERDEEALKTLEDEIRKLEEKDKKVLEDLEREAR

SEQ ID NO: 4285 - protein, 179 aa, Artificial Sequence; identical to SEQ ID NO: 4284
  Synthetic

SEQ ID NO: 4286 - protein, 181 aa, Artificial Sequence
  Synthetic
SDKEEVDKLKERNERVLEEVRRRLEKLEKDNKDTLKKIRDDSERLREKIKRVRDREQISEEVEKKIKRDEDENTRHNEELEEDNRRKTERVKEEMKRIEDENEKKDRRFDERVKRAKENNSSREFVEKALREYEELLKRSRETLEELLRRYKKLLDESRKTAKEDLDRSEEIIKKLADESK

SEQ ID NO: 4287 - protein, 181 aa, Artificial Sequence; identical to SEQ ID NO: 4286
  Synthetic

SEQ ID NO: 4288 - protein, 181 aa, Artificial Sequence
  Synthetic
SDEEEVKKLHDENKKVNDEMREESKKLHDENDRVNKEVKERAKKVSKELEDMLRREQRPEEELKRIEEELRRLAEKVKDLNKKNKEIDDRNKDHNRELNKENKELDEELKKELDRAKRENSSEETVRRLLEKVREEIRRSKKRADDDLKTTKELIEKSEREVDRLLEEIKKIIEELERRAR

SEQ ID NO: 4289 - protein, 181 aa, Artificial Sequence; identical to SEQ ID NO: 4288
  Synthetic

SEQ ID NO: 4290 - protein, 179 aa, Artificial Sequence
  Synthetic
SELEKVLREVEENLREVKRENEEKLRRNEENIKRLEEEDRRRLEEIEKMIEEIERARIREDELDRRLRELRERVKKIEKKNRDHLRRDEKELRDVLRKHKKHAEETEKRVEDAKRRVLDGKEVEEELRRLREEYEEVSRRSKEELEKSLRRLEEVHKESRKRLRDLLKKLDDVAREERK

SEQ ID NO: 4291 - protein, 179 aa, Artificial Sequence; identical to SEQ ID NO: 4290
  Synthetic

SEQ ID NO: 4292 - protein, 179 aa, Artificial Sequence
  Synthetic
DELRELLKDIKRTTEDVEREVEEILRKVEEMIRRLEEEDRKVLEDIRRKIEDIRRANIPREELEEELKRLEEEIEKILRDNKRKLDELKEEVDRARRKLEKLSRDLEEKIKELARRVLDGEEVRKEMERLRREHEDVDKKVRDELRKLEEELRRVHRESEKALRDLLRKLREVAEREKT

SEQ ID NO: 4293 - protein, 179 aa, Artificial Sequence; identical to SEQ ID NO: 4292
  Synthetic

SEQ ID NO: 4294 - protein, 179 aa, Artificial Sequence
  Synthetic
DELEDFLRKVERVIKELRDDDKRALDRIREVTKDVERKAREILKRVEEVIRRIEESNIREDELKEVLERLKEEARRLKRELEKLSEELKKEIKEILDRNRKKLRDLEEEVKEVRKRVVRGREAEEALERLKTRLEKVHRDSKRALEKLRRDHEEVDKRITEELRKLMERLKRVVDELRR

SEQ ID NO: 4295 - protein, 179 aa, Artificial Sequence; identical to SEQ ID NO: 4294
  Synthetic

SEQ ID NO: 4296 - protein, 181 aa, Artificial Sequence
  Synthetic
SADEALRELEERNRKVNEDVKREDERLHREDREVNKRIREEDKKLHKTLRDVLEELRKKVSEEELKKIEERLKRVNDTNEDLHRRNEEKVRRLNEENRKKHEENEKKSRDLKEEFERDKDGDERRVEKLLRRYKKVLDEVKRELKESLDKAERVTRKSEDDARRSLEEIKKEIEEVRERIR

SEQ ID NO: 4297 - protein, 181 aa, Artificial Sequence; identical to SEQ ID NO: 4296
  Synthetic

SEQ ID NO: 4298 - protein, 181 aa, Artificial Sequence
  Synthetic
RVDEELRKLVEDNKRKNEEVKKELKKLKEENERVNKEVRERDRKLHEKLRRVLEEVRRTIREDELREIEETLKRLNDRNEELHRRNEEESKRAEDKVRTELEKNRKISEEIKKKAEDRKDGDEEEMRRLLEEYEELVRRVLKRLKEILEEYERLVRRVEEEVKKSLEDIERKIKEAKDRVD

SEQ ID NO: 4299 - protein, 181 aa, Artificial Sequence; identical to SEQ ID NO: 4298
  Synthetic

SEQ ID NO: 4300 - protein, 181 aa, Artificial Sequence
  Synthetic
DVEEEVKKLKDKNRRINEEVKKRMRELEERNKELNKRIREEDERLHRELRKVLEEARKTIDEKDLKRIEDELKKMNEENEKETEENERRSKEVKDRVREELERNRKESRDIEERLRRIKDGSREEVEKLLREYEERLERVRKRVEEILAKYKELLDRVEERARKSLKEIKETIEDARRRIK

SEQ ID NO: 4301 - protein, 181 aa, Artificial Sequence; identical to SEQ ID NO: 4300
  Synthetic

SEQ ID NO: 4302 - protein, 181 aa, Artificial Sequence
  Synthetic
SMDEELDKLTRENEAVNERVEREARRLKEENRKVDEEVRRAVEELKERVRRVLEEVRRKISEEKLRKIEEDLKRIEEEIERLEERNRRESEKFEKEVEDKLRENDKKSKEVRRDVERIKDGDEEDVRRLLEEYARLVREAEREVREILRKYEELVRKARKDAKKLLDDIERKIEKIKRDVD

SEQ ID NO: 4303 - protein, 181 aa, Artificial Sequence; identical to SEQ ID NO: 4302
  Synthetic

SEQ ID NO: 4304 - protein, 181 aa, Artificial Sequence
  Synthetic
SMDEELKKLVKENEDLNRRVREEAERLRKENEKVDEDAEREDKRLHDKAERVLRELRRRIRKEELDRVRRELERVNEENRELLERNKEESKRFREEVERTLEENRKLSEELKKKMEDIKDGDERTVTELLKEYRELVRRVEERVKKILKEYKEEVEEVKRRLEESLKDIERKIDEIRRRAT

SEQ ID NO: 4305 - protein, 181 aa, Artificial Sequence; identical to SEQ ID NO: 4304
  Synthetic

SEQ ID NO: 4306 - protein, 181 aa, Artificial Sequence
  Synthetic
SMDEALEELTRRNEEVNKRIEEEDRKLHKRNKEVDDEVRKRDKDLHDELRRVLEDARRTIREEELKRIEDKLRRLNERNEERLKRNEDRSREVNRRNKKLLDENRERSKRMKDDADRIKDGDEDEVEKLLREYKRRVEEVKKRAEDSLKRYEEEVKELEDEVRESLERIRRDIEDVKRRID

SEQ ID NO: 4307 - protein, 181 aa, Artificial Sequence; identical to SEQ ID NO: 4306
  Synthetic

SEQ ID NO: 4308 - protein, 181 aa, Artificial Sequence
  Synthetic
SMDEAVEKLKKENKDIDEEVRRRLDELRKRNEEVNKKIKEDDDRLHKEAKEVLEDVRKTISEDELRRIKERLEEINKRNEELLRDNRRRSEEMTRRVEELLKRNEDESRRLEETLKRVKDGDEDIVRKLLREYEKLLREVRERARRILEEYKRLVKEVRERAERSLEELKREIKKVRDRAK

SEQ ID NO: 4309 - protein, 181 aa, Artificial Sequence; identical to SEQ ID NO: 4308
  Synthetic

SEQ ID NO: 4310 - protein, 176 aa, Artificial Sequence
  Synthetic
SEKEELLRKAKEVIDRIRKELEELLRRAREVNKDSRRTVEEVLRKAREVSERVRKASERGTDDKEELAKENERLVRELEEEVKKLHDDDRKKDETLRREVEELARRIRKLLKELEEEVGRDEELDDLRRRAEELLKRAEDEIRKLHEENKRSNEEAERAIRELAKRNKELDDKTRE

SEQ ID NO: 4311 - protein, 176 aa, Artificial Sequence; identical to SEQ ID NO: 4310
  Synthetic

SEQ ID NO: 4312 - protein, 176 aa, Artificial Sequence
  Synthetic
KEKEDLIEKMKKVLEDIRKRLEELLKRARKVNEDSRKLVKEVLDKIKKVNEDVRKVATESTDDKKKLAEENRKLVEELRKELKEVHDEDKKLDDELRDRLRRIEEDIRRLLRDLEREVGRDEELTRLAREIEKLLEEARRRVEKLHEENKRSNEEAKERMERLRDHNRKLDDDTRK

SEQ ID NO: 4313 - protein, 176 aa, Artificial Sequence; identical to SEQ ID NO: 4312
  Synthetic

SEQ ID NO: 4314 - protein, 176 aa, Artificial Sequence
  Synthetic
REREELIKKVRTVHKRSEEELRRHSEEVKKVNRDSRERVKEHLKRVKEVIKELEDVARESTDDKKKLLEEVRKLLEDLDRHLRELHKRDEKLDRELDKHLRDLKRDNERLLRELEKEVGRDRELKELADRNKKLLEDIEREHKKLHEDNRRSNEDARRRHEELKREVEKLLDELRK

SEQ ID NO: 4315 - protein, 176 aa, Artificial Sequence; identical to SEQ ID NO: 4314
  Synthetic

SEQ ID NO: 4316 - protein, 183 aa, Artificial Sequence
  Synthetic
SLEEEIKRLVKHHEELLREVRKRLKELEDHHRELDERHRRMLEELVREARKLIKDVKDDIDRKLVEELRKKLDDLARELEELNRESNRKLKKLVEEVEKILEESLRRVEELKRDVERKRSKPTDEETVERILRTLKTTDERTTDTVREILRKIKRTNEESKETADRTVKRAKDLIREIRERVR

SEQ ID NO: 4317 - protein, 183 aa, Artificial Sequence; identical to SEQ ID NO: 4316
  Synthetic

SEQ ID NO: 4318 - protein, 183 aa, Artificial Sequence
  Synthetic
SAREAIKEIKKHHKKLLEDVKETIDRIEEHHRKLDKDHRDELKKLLEEVRELLRDIRSRIDKKLVDDLERKLRELEKKLEEENERSNRRLEKLKREIEDELRESEERVRRKEEEVKKTESKPTDERTVEKILEELKDMNRATKRRVEEILRRLKKTNDESEKRARDTLTRIKELIEEVERRAR

SEQ ID NO: 4319 - protein, 183 aa, Artificial Sequence; identical to SEQ ID NO: 4318
  Synthetic

SEQ ID NO: 4320 - protein, 185 aa, Artificial Sequence
  Synthetic
DESEELKKEAKEILDRLEKVLRELTDRNREMLKRIEKLIRENEKRLEDILREIAKRASEDRDERVLREIVRDVRRLIKENREEDDRIRRDVERYLRKSRRDMEELTRRLEEVIKRLEDKVREARVPEEVEKELKRIKDELKRLVEKAERSLRESEERLRRLLEEAEKRNRKVEREIEKLLDDTRK

SEQ ID NO: 4321 - protein, 185 aa, Artificial Sequence; identical to SEQ ID NO: 4320
  Synthetic

SEQ ID NO: 4322 - protein, 172 aa, Artificial Sequence
  Synthetic
SKEEKITRDAEEVLRRSEEIIRRLLRRLEEVLKDLERSARENKKRLDKILEDLAKLDTDRSVLKKAVEDVHKRDRETLKRHDEESKKVKDELEELLRRHNKELRDVRDELRRRGADEKRVKRMEEELRRLHEEVRRRVEKVKRDMDRLNKKIKEDSRRVNEEIRKLLEDKTR

SEQ ID NO: 4323 - protein, 172 aa, Artificial Sequence; identical to SEQ ID NO: 4322
  Synthetic

SEQ ID NO: 4324 - protein, 172 aa, Artificial Sequence
  Synthetic
SEEEKVRKELEEVLRRSDEDIERNRRRLEKVLDDLRRSAEENKRRLKEILDRLKDTDTEERVLKKIAEEVHRKDRKTEREHEERSKRVHDEDERSLREHNKKLKKVKEDLDRRGADEKEVRKVKDRLDKLHEKVKRISEEVNERIRRLNKRIKEISKRLNEELEELLRRRRT

SEQ ID NO: 4325 - protein, 172 aa, Artificial Sequence; identical to SEQ ID NO: 4324
  Synthetic

SEQ ID NO: 4326 - protein, 172 aa, Artificial Sequence
  Synthetic
DELEKFKEDVKEVIKKLAETIKRLLDDVRRVLEKLRKLAEENKERLDRILDELRRLRTDEREVERKVEEVHRRDKKTLDELRRDVKEVKERIEEVLKRHDEDSERVDKELKDRGADEKEVARLREEIKKLNERLKREVERLKRELEKLLRDIEKTSEDANRRLKELLDRTRK

SEQ ID NO: 4327 - protein, 172 aa, Artificial Sequence; identical to SEQ ID NO: 4326
  Synthetic

SEQ ID NO: 4328 - protein, 172 aa, Artificial Sequence
  Synthetic
RREEELLERAEEVLEKLERIIEETERELKEVLDRLRKSIEDNLRRLKKVLKELKDNDTDRETLRRELDKVHKEDRDTLREHKRESERVKKELDEKLRRAEEEVRRVEEELDRAGLDEKDLTEVKKRLRDLLKKMEDVLREVKKRLDDLNREMDDRSRKANEELRDLVRRKEK

SEQ ID NO: 4329 - protein, 172 aa, Artificial Sequence; identical to SEQ ID NO: 4328
  Synthetic

SEQ ID NO: 4330 - protein, 181 aa, Artificial Sequence
  Synthetic
DVERKLREVEERHKDVLKKAKELLDKVEEDHKKSSKEVEDVLEEMRRRAEKLVRDAVRKKGGSPRDLEELKKELEETLRRIRERNKRHHDEVKKRLEEVEEELKRHHDEVKKTLETLKDIRGDELARRIEEELEKLLRTLEELVTEIIKELEKLLKTHEDLLREVEKTLRRIIEELEKRDK

SEQ ID NO: 4331 - protein, 181 aa, Artificial Sequence; identical to SEQ ID NO: 4330
  Synthetic

SEQ ID NO: 4332 - protein, 181 aa, Artificial Sequence
  Synthetic
SVEETLRTVEEEHRKSSKEAEELLEEVERRHEESSKRLEDTLREAEKEVRRLAEDVVRRRGGSPEELRKIMEDIKRKLDRIREENKKHHEEVRREAEEIRKRNKKHHEEVKRVLERLKDIRGKELVDEARRELKELLETHKETVKRVLDKLRDLLRTHEEKMKDVEETLRRLLERLKEETR

SEQ ID NO: 4333 - protein, 181 aa, Artificial Sequence; identical to SEQ ID NO: 4332
  Synthetic

SEQ ID NO: 4334 - protein, 181 aa, Artificial Sequence
  Synthetic
KVEDSLREVKKRHKDKVDEVRKRLREAEEENKRLLDEVRRELERVEERIRRIVEEIVRKKGGSPKELERIKKEIEDELRRIEKELEDSERRNRELLREIEKRLEDHHRKVEKVLRDLKDIRGDEEARDIERRLRDLERTLEELVKEADERLKRSNEEDEERIRRVRKKLEELLRELEKRDE

SEQ ID NO: 4335 - protein, 181 aa, Artificial Sequence; identical to SEQ ID NO: 4334
  Synthetic

SEQ ID NO: 4336 - protein, 181 aa, Artificial Sequence
  Synthetic
DEDRDLKRELDRLLREHEELVDRSTKRLEKLLRKHEREARESKKELEKLNDELREIARKPTEERDLERSKRRLDKLKKELEDKNREARKELEDLREELREINERVRKKVKELEDDIRRKNSSEDVKRKLEEVRRRIEESVKRHRETVEEMRRRVDESVRRHERTVDELRRTHEELIERVRR

SEQ ID NO: 4337 - protein, 181 aa, Artificial Sequence; identical to SEQ ID NO: 4336
  Synthetic

SEQ ID NO: 4338 - protein, 181 aa, Artificial Sequence
  Synthetic
KDEEKIIEDLKRLLRKHEKLVEESRERLKRLLETIRKIAKDIVERLKRLNEELREIAKRPTPDEDLKRSKEKLDELEREIRELLEELEKRLRELEKELREINETVKREIEELRKEIERRNSSEEAREKIKRVVEELKESVERHERDVDRVRREAERLLEEVTRRIETVRRTHERLIEEIKK

SEQ ID NO: 4339 - protein, 181 aa, Artificial Sequence; identical to SEQ ID NO: 4338
  Synthetic

SEQ ID NO: 4340 - protein, 181 aa, Artificial Sequence
  Synthetic
SEKDEIKRELEELLREHEKLAEESRRRAEELLRDIERRARESLTELRELNKKLREEARRPVPDEVLEKSEKELEDRLRELEERNRKLKEDLDRLREEVEKLNRDVERKVEKLRKDIEERRTSEDVEREIRKVREDLKRSVDEHRKDLERIRRELEELLEKHHEDLRDVERTHRELLKEIKR

SEQ ID NO: 4341 - protein, 181 aa, Artificial Sequence; identical to SEQ ID NO: 4340
  Synthetic

SEQ ID NO: 4342 - protein, 179 aa, Artificial Sequence
  Synthetic
DVEDELRRLHEENKDLLREAEEELERLHRENKKLLEDARRLLERLEEELERIERRLKTDERDRREIRREADELRKRFEKLEKENRDINRKLREEFKRLKERNEKEDEDAKRRVEEKRGGDREEVEREVRKIEKLIRDSRERVRELIEKIERTLRDSERRVRELVKEVEKRLREIERKVE

SEQ ID NO: 4343 - protein, 179 aa, Artificial Sequence; identical to SEQ ID NO: 4342
  Synthetic

SEQ ID NO: 4344 - protein, 179 aa, Artificial Sequence
  Synthetic
DVEKELKELHDKNEEILERARRLLERLHKENEEINKRVEEALRRLAEELRRLKEELDDDESVKDKIDKLLEEAKKEVKRLNEENRELNRRLEERMRDLERRNRETNERLKKEAEEKRGGDRREVKELIRKIDELLRRSKEEVDRLVKEVERLLRESKRRVEEVIEKLRKIIEELEREVR

SEQ ID NO: 4345 - protein, 179 aa, Artificial Sequence; identical to SEQ ID NO: 4344
  Synthetic

SEQ ID NO: 4346 - protein, 179 aa, Artificial Sequence
  Synthetic
REVEEVIKDARRLLEELRKHSEDEVRKVEEEIKRLRDDNKRAVDDIERLLRELEEANLPEDEVEKVVREIRERAKEIKKRHEDKLRELRKKLEEVKKKHKKLVDDIKTKLKRVRDELVRDRRAETKLEELRRRLDEILRTTEELLRRLKRELEKLSEESKARLDELKRKLDEILKETRR

SEQ ID NO: 4347 - protein, 179 aa, Artificial Sequence; identical to SEQ ID NO: 4346
  Synthetic

SEQ ID NO: 4348 - protein, 174 aa, Artificial Sequence
  Synthetic
DEAREIVRELEKRIKDIEDRARKLIRELEKSLEDLKRRVEEMLREWEEESKELERRNVPRERVKEVKEKSDEKVTRIREELKKVNEENERRLREIEEELKKLAREMEKRLEEARDKIDREKVKEIKKRLDELLKRIEDELRRIREEDKRIHDEVEKELRKLERRDEELLKRLED

SEQ ID NO: 4349 - protein, 174 aa, Artificial Sequence; identical to SEQ ID NO: 4348
  Synthetic

SEQ ID NO: 4350 - protein, 174 aa, Artificial Sequence
  Synthetic
SEAEDIVRKIEELLKRHHDRVEEMLRRWEELTRRHSEKAEKIVREVEKLIDELREAKVPREEVERVARELEEKHKRVDEEHKEVTERSKRRAEEIRKESRDVAEDLKRRLSEVRDTIDEEEVKRLEKEIRDNLREMEERLKELEKRDKDNLDRIRELHRRLREELEKLLEDARR

SEQ ID NO: 4351 - protein, 174 aa, Artificial Sequence; identical to SEQ ID NO: 4350
  Synthetic

SEQ ID NO: 4352 - protein, 183 aa, Artificial Sequence
  Synthetic
SMDELLKRLEEEDRKLNEESKETLERLRKHDEDLNRKNREKLKELKDRVDRVLEDAKKRVPDEDLERIKKRLEELRRTNEELDRENEKLAEDLAREVKKTNEENRRTSKRIKEEADKLKKRKISEDDVRREVEDVKRRIEDSREKLRKLTEKWKKLNRESDEKVKKHVEDVEREIEKVRKEAE

SEQ ID NO: 4353 - protein, 183 aa, Artificial Sequence; identical to SEQ ID NO: 4352
  Synthetic

SEQ ID NO: 4354 - protein, 183 aa, Artificial Sequence
  Synthetic
SSEEELKKLSDKARRLNDENRKILERLKEHDERLNKRNKEELKRLREDVERLLEDARRRVDERVLRTITEILKRLEESNEELTRKNEREMEKLARTNEDEDRKARKKLKELEDEARRLRERNTSEEDVKRKLDTIDKVIRDVRRRIEEHVRRWEELNRRSKKEIEDHVKTVEDVIKEAKDRID

SEQ ID NO: 4355 - protein, 183 aa, Artificial Sequence; identical to SEQ ID NO: 4354
  Synthetic

SEQ ID NO: 4356 - protein, 175 aa, Artificial Sequence
  Synthetic
DEDEEVDREVREMIKRLEEHVKRDEDTLEEMLKRLRDHVERDRRRLEELLKDLERLVRERGRDEELEKKVKKIIRENRENLKRLEERVEKIRRDNEKNNEDLRREVEDIRKKLRDKVDDKEELKRLDREAEELLRRVDRLNEEVEKKLRKLLEEVRRENKRLEEEAKRLLDKAEE

SEQ ID NO: 4357 - protein, 175 aa, Artificial Sequence; identical to SEQ ID NO: 4356
  Synthetic

SEQ ID NO: 4358 - protein, 175 aa, Artificial Sequence
  Synthetic
DEDEEVRKKVEEEIKRLKKEVEEDRRDVERLDEESKDKVRRDEKKVKDLLKELEDLVRRDGRTEELRKRMEEILKENDEINKKLRKENEKINDENDKKNKELRKRVKEITERLRKEVDDKEELKRLEEEAKDLLRDVERLNRELHKRNREILEEATRRNEELKRELKELLDRARK

SEQ ID NO: 4359 - protein, 175 aa, Artificial Sequence; identical to SEQ ID NO: 4358
  Synthetic

SEQ ID NO: 4360 - protein, 175 aa, Artificial Sequence
  Synthetic
SEEERVKEELDKAIKTLEKLVKDDLKKVADALRRLREHVEKDLRDLEEVLRELKELVDKTGRTEELRDKVRKIEEDNERNNKKLADEVKRIADENTEINEELRRRVEEIKRELRERVRDTEELKRAERELDRLLTEADRRNDELRREAERLLEKVNEDNRTVKERARRLLDDARR

SEQ ID NO: 4361 - protein, 175 aa, Artificial Sequence; identical to SEQ ID NO: 4360
  Synthetic

SEQ ID NO: 4362 - protein, 175 aa, Artificial Sequence
  Synthetic
REDEEIVKEMERLLERLEELSRRIMEEVKRIDKESEDHIKRDEDKLREELERLRDLVRREGTTDELRDRVRRIKEENTENNKRLEDKNREANKRLKDLSDKLREDVKRIRDELRKKVDDKEELKELEERAKRLLERHERTNEELHRRNEEILRKANELNEEVRRRLDKLLDEVRT

SEQ ID NO: 4363 - protein, 175 aa, Artificial Sequence; identical to SEQ ID NO: 4362
  Synthetic

SEQ ID NO: 4364 - protein, 175 aa, Artificial Sequence
  Synthetic
DREREVRRRVKEALDEIKRHVDRDRKKAEDMDRRSRELSDELRRRVDDLIKRLKELVDRDGRTEELEKTVRKIERDLTEESRRLKDENRKINEENKDNNRRLRERVEDIKRRLKEEVPDTEELDELRKELDKLLTEVDETNKKLHEDNKRILDDHDRINEELRRRMEALLREATR

SEQ ID NO: 4365 - protein, 175 aa, Artificial Sequence; identical to SEQ ID NO: 4364
  Synthetic

SEQ ID NO: 4366 - protein, 175 aa, Artificial Sequence
  Synthetic
SEEEDMVRRVREMIKRLRDHVRRDKDKLDKEDKRSADHVDRDRKRLEDLLKELRDLVRDTGRTEELARRVERIIEENRENNERLRRENEKINRENDRNNKKLEEEVRRITEELRRKVDDTEDLKRLEKELRDLLDEVNKENEKVHRRNREILKRADELNEEAERRLRELLREAEK

SEQ ID NO: 4367 - protein, 175 aa, Artificial Sequence; identical to SEQ ID NO: 4366
  Synthetic

SEQ ID NO: 4368 - protein, 175 aa, Artificial Sequence
  Synthetic
KEDEEVKDKVEKLIRKLEKESRDISEEVKRLDEESKKLARDLTEEVDRVIKRLRELVERDGDTEELERRVREIEKELDKRLRDIEDRNEKANRELKRLSEELERRVEEIRRRLRKEIDDKEELKKLEKKLEELLERHRRDNKRLHEENRRILEELRRRIKELKERLRRLKEEARK

SEQ ID NO: 4369 - protein, 175 aa, Artificial Sequence; identical to SEQ ID NO: 4368
  Synthetic

SEQ ID NO: 4370 - protein, 185 aa, Artificial Sequence
  Synthetic
ETDERLDELRRRLEKSLKDHKKLLDEVRKKAEELLDRNARLLEELKRELDELLKKVEEDNRMRKDELKKIREDVERLREENRKTDREIRERLKELERRAEEIDKRAKETLDEIEREIERLKREGTTREVVEELLRRAEEEIRRHRKKVKESLDRLEDEIRKVEEDSRRSEKKVRKLIEDVKRRVK

SEQ ID NO: 4371 - protein, 185 aa, Artificial Sequence; identical to SEQ ID NO: 4370
  Synthetic

SEQ ID NO: 4372 - protein, 185 aa, Artificial Sequence
  Synthetic
STEETLEKLDRDLKDSSRRNEELLKRVDDRLRESSKENRKILKELSDRLRDLLEKVKKDNRAEEEVLERIRKEVEDLMRKNEDTNRRARERVKELEERNRKTNKDVEKRLEDLKREIKRLREEGTTDKVVRELVKRAEDEIRDHKRLSKESLDRLDEEIKRHRELSKESMEEADRLIKTVKERVR

SEQ ID NO: 4373 - protein, 185 aa, Artificial Sequence; identical to SEQ ID NO: 4372
  Synthetic

SEQ ID NO: 4374 - protein, 185 aa, Artificial Sequence
  Synthetic
ELDDLLREVEKRVRDLNRRNEEELRRVEDRMRESLRKSEEDLRRVEERLKKTLTRVKTERRVPDKDLDEIRKRVEKLSREIREINKDAKRRLKELVDENRKRDDEIRREVKKRKDDVKDLARKGDDRRSAKKILDDLERTLEDVERRSRESVRRLREEIETHRKLVEELKKRLDDLEEEVKERVR

SEQ ID NO: 4375 - protein, 185 aa, Artificial Sequence; identical to SEQ ID NO: 4374
  Synthetic

SEQ ID NO: 4376 - protein, 180 aa, Artificial Sequence
  Synthetic
SSDEILKRVKEELDRLLEENKRLLEEARKRLEDLIRKNREDLKRVEEKMRRLLEETPEDKKLEEIRERLKRLKEENERLNDEARRRLEKLRKENEETNRRIEEEVRRLAEEVERLKREGTTEEVVRRLAEELRRLIEEVKRKIEESERRLKETLDRYRKLVEDSLRKLEETIRRVREESR

SEQ ID NO: 4377 - protein, 180 aa, Artificial Sequence; identical to SEQ ID NO: 4376
  Synthetic

SEQ ID NO: 4378 - protein, 180 aa, Artificial Sequence
  Synthetic
SSEELLRKVKEDAKKIIKENEELLRKVDKDMRDIIKENRDLLEELTERVKRLLDRTPESDDLDRIRKIVEKLRRENEKLDEDAEKKLEDAKRRNKRTDRELEKRLKKLAEEVKDVRDKGTTEEVVKRILEELKKLLDEAERLSRESLKELEKMLREYRESVERSLRKVDDTLRRVEEKSR

SEQ ID NO: 4379 - protein, 180 aa, Artificial Sequence; identical to SEQ ID NO: 4378
  Synthetic

SEQ ID NO: 4380 - protein, 188 aa, Artificial Sequence
  Synthetic
DDKRLLEEIRRRADELIKENEELLRRLEKLNEDLERRNKELNERLAERVKRLEEDVRRRGLPREDVRRKIEDLRRLARELHEEDKKLNEEAKRLTETSRKRNKELNDEIRKLVKEIEERIEELERRGSDRRIVEEEVDRVRKTIEELKRKSEDLVREHEEIVRDLERKSRELVKKVEKLLRDVRERAR

SEQ ID NO: 4381 - protein, 188 aa, Artificial Sequence; identical to SEQ ID NO: 4380
  Synthetic

SEQ ID NO: 4382 - protein, 181 aa, Artificial Sequence
  Synthetic
SVDEMLKEIRDRAKKVDEDNRRLVERLEERNRELDERNKRLLDDIRRKVEEVMRIADERVDKKEELDRLKDELRRSLKRLEDLSKENHDRNRELNKRSKDRSEELHEELRRLLKEITDIIRAGDSGKELVDRVRKLLEEVRRKSEKLVREHEDLVRRNEEHSRRLVEEADRILERAKRELD

SEQ ID NO: 4383 - protein, 181 aa, Artificial Sequence; identical to SEQ ID NO: 4382
  Synthetic

SEQ ID NO: 4384 - protein, 181 aa, Artificial Sequence
  Synthetic
SVEEMLRRLRERDEEINDRLRRLAEDLKRENKRLDDENKKLVDEIREDVERLKEKLDRKLRDKDRMRELKRELEELLKELEEKSKRNHDRNKRENEKSEKILRELHKENREEVKRATEILEEGDTGSELLKRWEELLRRLEKRIRDLVEDHKRLVEENERHSRKLVEEVKKALTDAEKKVE

SEQ ID NO: 4385 - protein, 181 aa, Artificial Sequence; identical to SEQ ID NO: 4384
  Synthetic

SEQ ID NO: 4386 - protein, 181 aa, Artificial Sequence
  Synthetic
SVEELLEDIRRRVEKVKEDNKRMLEDLERKNRELKKEADDLAREIKKRVRDLEKELDEKLTDEEKVERLKRRLKKKLDELDRKLKENEDRNREENEKSKEDSKRLHEKLERLRERIERIVRAGDSGSKLVEEVRKLLEEARRESEELLRRHKKLVDDNRRHIRKLFEDVKKILDDARKEVE

SEQ ID NO: 4387 - protein, 181 aa, Artificial Sequence; identical to SEQ ID NO: 4386
  Synthetic

SEQ ID NO: 4388 - protein, 175 aa, Artificial Sequence
  Synthetic
SEEEEIVKDVERVIRELEERHKDLVRRAREDIKRLREHIRRSIRALDEDIKRIEEKIRRDGDDREVEEHIKRSKDELRKDEKRIEDHIRRSREKLDRDVERMEEEHKRLEKELRDRGLSEDLVRDLERKNKRVIDESRRLLEELRRRYEELLREYRELLEDLRRKYKRIEDEAKR

SEQ ID NO: 4389 - protein, 175 aa, Artificial Sequence; identical to SEQ ID NO: 4388
  Synthetic

SEQ ID NO: 4390 - protein, 175 aa, Artificial Sequence
  Synthetic
SEKEEIVKTVKTVIDRLEEEHRKILEDLRDDIRRADEYIKRSIDEVEEDLRRIEETVRRDGNTKEVEKHIEDSKRELEKNADKLRRHIEESRKELERLIREADEKHKKLDEDLKRAGLEERLVRELEKENEKLKRRSERMLEELEKEYRRLLKKYEDLLRELERKYEEIKDKLRK

SEQ ID NO: 4391 - protein, 175 aa, Artificial Sequence; identical to SEQ ID NO: 4390
  Synthetic

SEQ ID NO: 4392 - protein, 175 aa, Artificial Sequence
  Synthetic
SEDEDIVRKAKEDIERLKREVEETIKRVEDDARKVEKEVRDIVERTRKEIKKLEDEVRERGNTKEVERKIEELKKEHEDRNKKLVDHIKRSEEELRRLAKELEELIRRLKEELEKAGLKEKLVEELRRELEKLKKEIDDLLRDLEKKYDDIRKKIRKLSEELKKLLEELKRKLDE

SEQ ID NO: 4393 - protein, 175 aa, Artificial Sequence; identical to SEQ ID NO: 4392
  Synthetic

SEQ ID NO: 4394 - protein, 175 aa, Artificial Sequence
  Synthetic
SELEKIVEEVRRDIKRVRERVEEIIRKTDEMIRRLEEHIKRSIERVRKDAEDIERTVRRDGNDKELEKHLEKSKRELDKDAREVDERLKDLERRHREANKRLEDHIRRSEEELRRRGLDKDLLDELRRRYEELEERIRRLSRELEEKLKKLRKRYEDLLEELEREYRRIAEEARR

SEQ ID NO: 4395 - protein, 175 aa, Artificial Sequence; identical to SEQ ID NO: 4394
  Synthetic

SEQ ID NO: 4396 - protein, 175 aa, Artificial Sequence
  Synthetic
SEEEKIVEEVKRDIKKVDDEVKDIIRRTDKAIKDLRREHKELIDRTRKAIEELEDEVRKRGDDEKLRRKIRELEKRHERANEELERKHRKLETDHREMNERLKRHIRESEKKLEKDGLREDLVDELRKLYDTIREKIKRLSDRLREKNEKLKKESDDLSRRLRKELEKLEREVRR

SEQ ID NO: 4397 - protein, 175 aa, Artificial Sequence; identical to SEQ ID NO: 4396
  Synthetic

SEQ ID NO: 4398 - protein, 184 aa, Artificial Sequence
  Synthetic
SKEELLKEIRDELRKLKKKHDDLLEEIKREYDRLREKVRKDLEDIERKLRKLEEDVERKDVREEEKTDLDRLAKELREELKRIKKKIDDHIRRSEEELKRHHDEIRKILKKLKEELDTAASQDLREEEVKRVVERVKELIKRLEDNIREAIRKLREDIKRLEEEVEKARKDVEDFLRELRKKVK

SEQ ID NO: 4399 - protein, 184 aa, Artificial Sequence; identical to SEQ ID NO: 4398
  Synthetic

SEQ ID NO: 4400 - protein, 184 aa, Artificial Sequence
  Synthetic
SSDELAEELKREYDRNKEEHKKLLEELKKEYKRLLDEHRDLLRRIKERLDRLLRRIEEKDVREEDLKRLRKLVDDLRKRLKKHHEEVKEHIDRSRKELEDHHRELDEDHRRAEEKLRRMRSQDLREELVERVIRDVRKHIEDNTENIRRDIERVRKDIETLEENVKDAAKKVEDILKTLEDEVK

SEQ ID NO: 4401 - protein, 184 aa, Artificial Sequence; identical to SEQ ID NO: 4400
  Synthetic

SEQ ID NO: 4402 - protein, 184 aa, Artificial Sequence
  Synthetic
DKERLAEELRRLYERNKREHEKLLKKIEDDLRKLEEDHERLLREIEEAAERLRREIERKDVDEEKVRRLETELRKLREELKKHHEEIKRILDKLRKDLKKHHEELKRDHDKAEEELRDVESRDLREELVKRVVDRVRRHIEENTKNIEEAIKRVEDVIRELRKNIEEAIKRVREVLKRLKDEIK

SEQ ID NO: 4403 - protein, 184 aa, Artificial Sequence; identical to SEQ ID NO: 4402
  Synthetic

SEQ ID NO: 4404 - protein, 184 aa, Artificial Sequence
  Synthetic
SEDELLDRLREKYERNKERHKRLLDELRKRYEDLKREHEKLLRDIEEELKKLEDKIRRKDVPEEDLKRMKKLADDLRRELEKHHEDIKDHIRRSEEELREHHERVKDDHRKAEETLKDVRDRDLREDLVRKAIEDVDRHIKENTKNIEDTIRKVKKNIEDLKRNVEEAIKKVKEVLREIEERTR

SEQ ID NO: 4405 - protein, 184 aa, Artificial Sequence; identical to SEQ ID NO: 4404
  Synthetic

SEQ ID NO: 4406 - protein, 184 aa, Artificial Sequence
  Synthetic
SKEELLKRLKERNERLNEDSERLAREIKRRLEELRKEHRRLLKEIEERLKELEEDIRRKDVPEEKLERLKREIDRLREELKEHHKRVKDELDRLKKRLEDIKKDHDRKDRKVKEELEDMARRDLDEEDVKRVIRRWEELLKELEKDNRRVVKEAKELIDRLERNIRERIKEVRDALREIRKKVK

SEQ ID NO: 4407 - protein, 184 aa, Artificial Sequence; identical to SEQ ID NO: 4406
  Synthetic

SEQ ID NO: 4408 - protein, 184 aa, Artificial Sequence
  Synthetic
STDEKLKELEKRNRDLNEESRKLAEEIRKRYEDLKKEHEDLLREIEKRLRDLMREVERKDVPEKDLEELKEDARRLREELRRHHEEIERHIRESEKELRRIEDEHRKEDEKVKKELKDVRERDLDEKSVDDVIRRWEELLEELRRRNEEAVRRMERNIDELRRNVRETIDRVRKLLEEIKRKVD

SEQ ID NO: 4409 - protein, 184 aa, Artificial Sequence; identical to SEQ ID NO: 4408
  Synthetic

SEQ ID NO: 4410 - protein, 178 aa, Artificial Sequence
  Synthetic
SEAERVVEELERLLKKNRDDNERVIRRLEELLDRLREKNERAIEELRKLLDELKKVVDRGDVSERVVDKLLKEIKEKIDRVREEHRKLLEDIERTIRKVEKEHKESIERIRRRAEELKDLIRRELLREIEERLKTLSEESKRLIDRIREELKRLTKESEDLLKDIERLLREVKERART

SEQ ID NO: 4411 - protein, 178 aa, Artificial Sequence; identical to SEQ ID NO: 4410
  Synthetic

SEQ ID NO: 4412 - protein, 180 aa, Artificial Sequence
  Synthetic
DEMEDLRRDVERIHEESRKLSEDSVRTAEKIHRESEKLIDDLRRKVEKILKEVEDVVRRGDSDEKLKTRLRDLKRKLEKEAKEIMDRHERLAEELKERNKRINDDHRRKNEELKDELRRKRVGPEEELKKLEDRSRKLLEENKRLNEDLDRRSEELKARLKDILRRIDERLRDLEREADR

SEQ ID NO: 4413 - protein, 180 aa, Artificial Sequence; identical to SEQ ID NO: 4412
  Synthetic

SEQ ID NO: 4414 - protein, 180 aa, Artificial Sequence
  Synthetic
DEVEELKRRAEEILRKYDEDSKRIVEEAERIVRTSAEKIERLRKKAEDILREASKVVDDGRSEEELARRLTELTKRLEDEAKRIADEHDKLDEEIKRKIEELNKELKKLADDLRDRLEKERAGPERDLEKIETDVERLERKSKKLLEDLREKSERLKKRLEDILKRIKEEVERLKRKVEK

SEQ ID NO: 4415 - protein, 180 aa, Artificial Sequence; identical to SEQ ID NO: 4414
  Synthetic

SEQ ID NO: 4416 - protein, 180 aa, Artificial Sequence
  Synthetic
DEMEELKKEVEEILKEYEKRSRDLFKELKEILRRSKELSEDSKREADKILRDAEKVVADGDRREKLMETLERLLRRLEERNKRINEEHDKRDKDIEERVKKLNKELRDLVRRLREELRKRRAGREDDLRRIEEKVKKLEKESRELLKRIKDESEELKRDNKRLNDEVREELEKLKERVRK

SEQ ID NO: 4417 - protein, 180 aa, Artificial Sequence; identical to SEQ ID NO: 4416
  Synthetic

SEQ ID NO: 4418 - protein, 180 aa, Artificial Sequence
  Synthetic
DEMDELRREVKEILKTTEELIKRLEDKVRDILRRYKEVSDDIVRKAEDILRKAEDILRRGDSREEVSRELKRLLDELEKEIRKLNEDLKRLLDELREELERIVKTHRKLDKDLEDRLRKRRAGEERELEEIKKESEDLERRLKKVLERIEREVRRLEEETKELLKRIAEEVERLIREAEK

SEQ ID NO: 4419 - protein, 180 aa, Artificial Sequence; identical to SEQ ID NO: 4418
  Synthetic

SEQ ID NO: 4420 - protein, 180 aa, Artificial Sequence
  Synthetic
KEAEDLVREVERILEDYDRVVKELKDDADRILEESRRLIEELKKKAEDILRRVRKVVEDGDSRDDLKRELDKLAEDLAREAKEIADRHRKLDEELERRIRRLDEELKRLARELEERLARDRVGPEELLERIKDRLRKLHEKSKKLLTDIKRESRRLEKRLEDILKRIKEEADKLKEEADR

SEQ ID NO: 4421 - protein, 180 aa, Artificial Sequence; identical to SEQ ID NO: 4420
  Synthetic

SEQ ID NO: 4422 - protein, 174 aa, Artificial Sequence
  Synthetic
REEELERRVREESEELNRRLAEVHKRLRKKSKELNDRHKELDDRIRREADRLRKDIRRQGKEDDKLDREIKEIERELRKRSEELHDTNRKILRENEENLRRLHKENRDIERDLERKRLDDEVLKELKEMHDRLREHVKRDSERAERMHEELKRLSDELERRVREALKRLKEKVR

SEQ ID NO: 4423 - protein, 174 aa, Artificial Sequence; identical to SEQ ID NO: 4422
  Synthetic

SEQ ID NO: 4424 - protein, 174 aa, Artificial Sequence
  Synthetic
KKEEVRKRIEEELRRLKKDHRRLDEEIKRKLKKLDEEIKEVHERLKKAARDLEDEARRNGKRDDKLTEEIKEIIRRNKKNVDDLRRELKRIDEELKKESEKLERKADEIEERLRRREQTKEVEKDVEDLLKELEDDSRRLEEEVERLIERVKRHVERDERRVREMLREIKEKIK

SEQ ID NO: 4425 - protein, 174 aa, Artificial Sequence; identical to SEQ ID NO: 4424
  Synthetic

SEQ ID NO: 4426 - protein, 174 aa, Artificial Sequence
  Synthetic
SKEDLDRELRRLSEELNREHKELDERIRRELEKLRTRIDKVHEDIRREMKRLEDEVRKRGREDDRLRTKVKKILDDNKENVDRLRDELRKIKEELDRESKKLHDENEKIKRDLEARELTEEVFEDAERLHRELKKKSRDLEERVKKLLEEIEDHVRRDETRVRKVLRDIEEDIR

SEQ ID NO: 4427 - protein, 174 aa, Artificial Sequence; identical to SEQ ID NO: 4426
  Synthetic

SEQ ID NO: 4428 - protein, 174 aa, Artificial Sequence
  Synthetic
SKEDMLREAEERSRRLNEDHKRLDDELRKESEKLNRRHRDLDEKIDRELRRLKKDIRRRGKQDERLEREMKEKKDELDRLSKELHDKNREIKERLDRLSETLHKENEDIKEELRRRELTRELLERLRKVHEDLKKKSEDLKRTAEKLHRELEKESRDLVRDVERALDELRRKVE

SEQ ID NO: 4429 - protein, 174 aa, Artificial Sequence; identical to SEQ ID NO: 4428
  Synthetic

SEQ ID NO: 4430 - protein, 177 aa, Artificial Sequence
  Synthetic
SSEELLRDIERRLEEMNRDTERVVEEIRRRLEELRKRHKETIDKIREELKKVEDLVRRRGLDEDTSRELKELMRRLEEKLKEHHERLRELLERLEKELREAKERLDRKTEKIKKDLRKDGADEDVLRRAKRLIEKYKEDTKRIKEKLEKVIEDLRKNIEDFEEDVRRVLEELKKRIK

SEQ ID NO: 4431 - protein, 177 aa, Artificial Sequence; identical to SEQ ID NO: 4430
  Synthetic

SEQ ID NO: 4432 - protein, 177 aa, Artificial Sequence
  Synthetic
SSRELLERIKEELKELEDRHRDLLRRIEEKLERLNRRTREVLERIKRKLDELKKRVEEAGLDEDSRRRLEKKLKEIRDKLDEIRRRLEDETRKIKEELRRHHEEVRKRLRDVERRLREKGVDEDLLREVKELIERLRENIKRAKDKVEELIKKYKRDTDEAKKEVDEEIKRLKEEVD

SEQ ID NO: 4433 - protein, 177 aa, Artificial Sequence; identical to SEQ ID NO: 4432
  Synthetic

SEQ ID NO: 4434 - protein, 177 aa, Artificial Sequence
  Synthetic
DSERLVREIRERLKKLEKEHRELLEEIKDRLRRLNEESKKLLDDIKRRLEELRDRIRRAGLDEKTLTDLERILRKIEEDLKRMKEELDRLTREIERELEEHHKDIKRRLDEVRKELEKRGADEDVLRDLEKLIEDLKRNIERARAKVEKLIKEYEDKLEKIVRDAEELIKDLDRKVK

SEQ ID NO: 4435 - protein, 177 aa, Artificial Sequence; identical to SEQ ID NO: 4434
  Synthetic

SEQ ID NO: 4436 - protein, 177 aa, Artificial Sequence
  Synthetic
SSEEILRKIEEELERLEREVRKIHRDNERKSEELNRRSKKILDDIRRELDRLKKEAEEKGSSEETKKDLERLRRELEERLKEVEKESEELRREDKERNDRVREKLKELKKDIKRLLDEKGIDKEVVKEMRRALEEIKKEIEKVRKELEKRNREYRKRSEEVREEAERKLEEIKRRTD

SEQ ID NO: 4437 - protein, 177 aa, Artificial Sequence; identical to SEQ ID NO: 4436
  Synthetic

SEQ ID NO: 4438 - protein, 177 aa, Artificial Sequence
  Synthetic
RSEEILREIRDRLRKLNEESEKVHEENERRSRELNERSREILKRIDEELKRLKKEVDDKGADEKLKDELRRLVRRVEEELRRVEEESERLKREDDRKNEDVRRKSEELARDIERATREKGIDDDVVRDLKKKLERYKRETDRVRKELRDLNKKYEDRSREIKRELERLLRDIKRRID

SEQ ID NO: 4439 - protein, 177 aa, Artificial Sequence; identical to SEQ ID NO: 4438
  Synthetic

SEQ ID NO: 4440 - protein, 184 aa, Artificial Sequence
  Synthetic
SLEEVIKTVRKLLEEVERRLREVVERAERMLEEVRRRTREVSEEAREMLKDVEKALRDKNVSEEIEEKLRKIKEELERDNEKVNRDNERSVETLRRLLDRVRKEVKDIAKELEERLKEVERKSRDDRIVEKLLRDAERIVKRLRELIEKLREEVEKIVDENRKTVEELRRRNEEIVRRLRREIE

SEQ ID NO: 4441 - protein, 184 aa, Artificial Sequence; identical to SEQ ID NO: 4440
  Synthetic

SEQ ID NO: 4442 - protein, 184 aa, Artificial Sequence
  Synthetic
DVKEVLDDAERKLREVLKLIEDSLKKLKELSDEVIERIARSLEKLEKLIRDVDEELKRKVSDKDKLKRLKEKLDKVLRENEKLVEDLRRENKKVNDRNKRLVDELRRRLKKVKEDLERRVAEEDDKEVVKEIKERVDKVVDEARKLVEESERSIRELVERSKKVVEESERSIEELRRELKETVK

SEQ ID NO: 4443 - protein, 184 aa, Artificial Sequence; identical to SEQ ID NO: 4442
  Synthetic

SEQ ID NO: 4444 - protein, 184 aa, Artificial Sequence
  Synthetic
DLEEVRERARRLLRKLEEDLERVHKEMEELLRELEERIKASLERLDELLKRLADKLRRDVKDDDKLRKLDKKLKEAKKTNKDLADELRKELEEALRESRRSIDELRKDLERVTEEIEDILRKRKTKEVVKEIEDRVRKVAEKVREVIERNRKLVRDVLDKIRRMLKESERSVEEVLKRLDDELK

SEQ ID NO: 4445 - protein, 184 aa, Artificial Sequence; identical to SEQ ID NO: 4444
  Synthetic

SEQ ID NO: 4446 - protein, 181 aa, Artificial Sequence
  Synthetic
SLDEVVKRLEDLLREVEEKSKESSKRMEDLNREVNERLRRSSERLKRLNDEVKKRLEDAGRDDKIRRTLERLSEDTKRKSDKTNEDLKRLSDETRERSKRLNEELRRLVEEVRRRLEDLRRKGSPVEEIKKLADKVVTELEKLVEDDRRLAEESFERARKIVEEDERLARESVDRARRLVD

SEQ ID NO: 4447 - protein, 181 aa, Artificial Sequence; identical to SEQ ID NO: 4446
  Synthetic

SEQ ID NO: 4448 - protein, 184 aa, Artificial Sequence
  Synthetic
KLDEVIEEIRKLLRRMEEELRRSVEEIDKLLREVRELLRESSEKVKELLRRVTEELKKRGVPEEVKERLDRLVETLRRLSEETLKELDKLVREVKELSKESLKRLRELVERLRRELEEIKKRGEDEKLVEDLKRRAEEVIRELREIVKRNTEIAREVVERAKRIVEKNEKLLKDVVEEAKKIVK

SEQ ID NO: 4449 - protein, 184 aa, Artificial Sequence; identical to SEQ ID NO: 4448
  Synthetic

SEQ ID NO: 4450 - protein, 173 aa, Artificial Sequence
  Synthetic
SELEKAKEDVDRLLEDVNRVSEEVEDRVRKLLADSDRVLEEVERRVREVLKRLKDAGVPDEELERARRTLEDIIERLREKNKEVKERLRKIIKEDREVNERVEERVERLTREAKDKDVKTVADELRKVVKELLEINRRSLEELTKLVDESRRVNEKVMEELKKLVDDLRRRIE

SEQ ID NO: 4451 - protein, 173 aa, Artificial Sequence; identical to SEQ ID NO: 4450
  Synthetic

SEQ ID NO: 4452 - protein, 178 aa, Artificial Sequence
  Synthetic
SEIEKVKEVVREVIERSRKLLKEVRDTVEKVIDESRKLSDTVRRRVEDAIRDVLERRGDEDDELRRVKEELKKVIDENEDLNRRVEETLREIIKRLAEENKRVEDSLRKVIKDIERVRSREEVKKVIEDLTREAKRSLERNREVVKELKKLADDLKDLNKKSVDRLDDLVRRLKERTE

SEQ ID NO: 4453 - protein, 178 aa, Artificial Sequence; identical to SEQ ID NO: 4452
  Synthetic

SEQ ID NO: 4454 - protein, 184 aa, Artificial Sequence
  Synthetic
KRAEDVLEKLREDAKRVLKRNRDSVKEAEDLVRKSLRTSEEVVKTLRTELKKLLDELDRVKSEEARKRVEDVRDRLKREVDKLDRVSEEVEKTLEDLNRKNTEDNKRVVDRLREELDRLRREGLPEKVLRDIEREVRKIIKELEDMDDELRRILEEVIERSRRVNERLKELLKEADDRLREKLR

SEQ ID NO: 4455 - protein, 184 aa, Artificial Sequence; identical to SEQ ID NO: 4454
  Synthetic

SEQ ID NO: 4456 - protein, 181 aa, Artificial Sequence
  Synthetic
DAAEELLRLVEDVARELKRLVDELLKENRETVERLKKVVKRSEEINREVVRTLRELVANNGDKKEIDRIIKELKDANDKVAEDLRRVIEEDRRRNDEAAKTLRKIIEDLRRALEDVVRKRGEDEKIKEVRRSIEEARRRVEEALREVNEASKEAERTVREALKRSREAVEKAVRDVTEAAR

SEQ ID NO: 4457 - protein, 181 aa, Artificial Sequence; identical to SEQ ID NO: 4456
  Synthetic

SEQ ID NO: 4458 - protein, 178 aa, Artificial Sequence
  Synthetic
KELEDVLRESEKTAEELLRRVKKSIDRTRDVVRRLLEEIRKSIEETKRVADEAKREDRDEEVLKKIIRELEERSKKVEEDLERIIRELREESRKVEKELRDLIRRNEEKIKRVIERRGETDLVRRLERISEEVRRRVEKLVREDRKILEDVARALRELVKEDEEILRRVVKDLRDKTR

SEQ ID NO: 4459 - protein, 178 aa, Artificial Sequence; identical to SEQ ID NO: 4458
  Synthetic

SEQ ID NO: 4460 - protein, 175 aa, Artificial Sequence
  Synthetic
DEDKKVVRKVERIIKRVKELHDKSVRDSEEVVREVLKRHKESVEKIKEIVRRIVEIAARGDFREEVKKRLEEVIRELREENAKIHRELKELLERSRRRNDEIHRELKERLKEILEEAKDIEELKEVIRRVEKLSEDVKRENEKSNDEVRKLSEDAIRENEEVLRRARKLVDDLRR

SEQ ID NO: 4461 - protein, 175 aa, Artificial Sequence; identical to SEQ ID NO: 4460
  Synthetic

SEQ ID NO: 4462 - protein, 175 aa, Artificial Sequence
  Synthetic
DEEKEVVKKLRDIIREVERLHTESVRKVEEIVRRVLRLHKETVRELKEIVKRIVDIARNGDRREKVEDELRRRLEEIERKNKEIRDELKRLIDEVRKENTEIHDRLKKELKKILDEAREIRELEKVAKEVEDRSKELLDRNEEVLDRVRKLSEDVLRENREVIERVREEVKKESK

SEQ ID NO: 4463 - protein, 175 aa, Artificial Sequence; identical to SEQ ID NO: 4462
  Synthetic

SEQ ID NO: 4464 - protein, 180 aa, Artificial Sequence
  Synthetic
SEADKVVAELEKIVKDVVDAHKDSVRKLREIVRRAVERLRKDVDDTRRVVKEIVDIARSGDMREEVRKRLEELLRRSEEHSEKVERDLERVLKEVEDTNRDIKRRLEKRIREIEEKIKDLDERVRRKLEEVVKKVRDLSRRATEEVEEVIKEVRELVRRLKEENKRVVDEVRKRVEDTRK

SEQ ID NO: 4465 - protein, 180 aa, Artificial Sequence; identical to SEQ ID NO: 4464
  Synthetic

SEQ ID NO: 4466 - protein, 182 aa, Artificial Sequence
  Synthetic
KSMEDVVRKLDELVKTDKEIADRVVKELKDIVKRVEELVEDIVTKSRASVERVRDVVTRGVSEEELKRIHDENRRLIEEAKKRLEEIRREIEELVRRVEEESKRLNEELKRLIDDVTDKKRDVREAKELLDRLKRRLEKSTEEVKKKLETVLRELEEVIKRVKEELERVNRELRKVIEDAKK

SEQ ID NO: 4467 - protein, 182 aa, Artificial Sequence; identical to SEQ ID NO: 4466
  Synthetic

SEQ ID NO: 4468 - protein, 177 aa, Artificial Sequence
  Synthetic
ELEKLIRDVVRENEESAKEAHRRIKEVVRTSEDLVREVRERVRRIVESSKRVVEEVRKKMDEEELRRLVEESRRNVEEVRKALKKVEEDSRRNVEKVERDLEKLDRDNEREIRELRKRVKDMEKLLRDLKKLIEDNERVVRELKKNLDDDSERVKRVADELLKNLKKDTKKVKDTAK

SEQ ID NO: 4469 - protein, 177 aa, Artificial Sequence; identical to SEQ ID NO: 4468
  Synthetic

SEQ ID NO: 4470 - protein, 186 aa, Artificial Sequence
  Synthetic
DEAEDVVKRADDIVKRNRELLERVVRDLERIVRKNKDIVRKVVDEAKKLVKTVEDLSRQDNKREELRRRLEEVKERLERLVDKLRRESEKSKRELEKLLKELRDLSRKTEEELRKLVEDLRRKLKNVKEVEDLLRRVEEKLRKSVKEVEELLDTVRRRLEDSSRDVKRLLKEVLDRLEDVLDKEEK

SEQ ID NO: 4471 - protein, 186 aa, Artificial Sequence; identical to SEQ ID NO: 4470
  Synthetic

SEQ ID NO: 4472 - protein, 186 aa, Artificial Sequence
  Synthetic
SAVEEADKEVRRILKKNTDLVRRVVEEAKKILDRNEKRVREVFKELTRLLDELRKLIEEGNREERLRELLDRVRKRLKEEMDKVRKEDEKSREDLRRLVRELEELSKRTKEELDELTRALRKDLKDVEEVERLLRELERRLEDSVRKARELLKDIERRLRESIKRSEELLRDVERRLKELEERLEE

SEQ ID NO: 4473 - protein, 186 aa, Artificial Sequence; identical to SEQ ID NO: 4472
  Synthetic

SEQ ID NO: 4474 - protein, 177 aa, Artificial Sequence
  Synthetic
DVEEELKRVVEKLRDVERKVRELNKRVTDKNEDVVRTVRELNERVTRENRRVVEDIDRKKRTKDLKKLLEDSERNVDRVNKESERLIRESKKNVKDVNEESERLIRKVAKDLERLTERVSDLDDVLRRLEELVKDLERLIEESVRYLERNVERSRELVERSLRYLKENVDRSRKLAE

SEQ ID NO: 4475 - protein, 177 aa, Artificial Sequence; identical to SEQ ID NO: 4474
  Synthetic

SEQ ID NO: 4476 - protein, 175 aa, Artificial Sequence
  Synthetic
DEVREVVERARKLVKDNLDAARKAVKRLRELVKENLDTVRDVVRKLRKLVEDLKRLIRSGGSEEAVKRLKEELERLIKEVKERSDETRKRLEDLIRELEERSKRTAEELEKLIREKAKGKELADEVRELAKRSHEELKRLLDEVRKLLKDSERALRKLLEDVRREADKVAEEVRT

SEQ ID NO: 4477 - protein, 175 aa, Artificial Sequence; identical to SEQ ID NO: 4476
  Synthetic

SEQ ID NO: 4478 - protein, 175 aa, Artificial Sequence
  Synthetic
SEVDEVVRRARELVKKNRDDVKKVVEDLRRIVKEDLDTARRVVKRLRELVEELKELIRSGGSEELLKKLKEDLKRLLDKVREESKRTNDRLEELIEKVARDSRKTLEELKDLIRKKVRGKELADEVDELMKDSDRELKRLLEEVRKLAKRSTDELERLIEEVRKELEDVLDEARQ

SEQ ID NO: 4479 - protein, 175 aa, Artificial Sequence; identical to SEQ ID NO: 4478
  Synthetic

SEQ ID NO: 4480 - protein, 179 aa, Artificial Sequence
  Synthetic
SREEELLERLRRVVERNKKLVDDLADRADKVVKENEKLVRDLLEESRKTSEILDRLVKNRGDERRLEDIDREDRKTLKDVKDTSRESKKRLEDELKKVEDESRKLTRELEERLERAVRERGREPELVEEVRRLSEKSNRDLKELVKDIERKLDKVHKDLEKVIEEVERSNERVKEEVKT

SEQ ID NO: 4481 - protein, 179 aa, Artificial Sequence; identical to SEQ ID NO: 4480
  Synthetic

SEQ ID NO: 4482 - protein, 182 aa, Artificial Sequence
  Synthetic
SDAERIVEEAKRLVEENTELVERVLEKLERLVRENRTLVERVIEELDDLVRRIEDVVRRGVDEKDIAKLEKELRERIKEVRDRSKKTRDDLEKLIREVEERSKESTRKLEELLRDVTRKNKDSKKLEKLLREVERLMEESHKRLKEVADTARRLMDDSERELDRLLREAEKKIRDVREEIRR

SEQ ID NO: 4483 - protein, 182 aa, Artificial Sequence; identical to SEQ ID NO: 4482
  Synthetic

SEQ ID NO: 4484 - protein, 182 aa, Artificial Sequence
  Synthetic
SLVDEILKDLDRLVEENEKLVKKIVEDAEELVKRNTDLVEEVLRELKEIVETIRDLVRRGVDEDTIKKLEDDLRRKEEKVRRESKRSVERLEELAEEVRRESKRLTEELKRLVEDVLRRAKDVEELKDVLRRVEEKIRKSNEKLEKLLEEVSRLAKRSDERLKKVLEDIKEEIRKVKEDLER

SEQ ID NO: 4485 - protein, 182 aa, Artificial Sequence; identical to SEQ ID NO: 4484
  Synthetic

SEQ ID NO: 4486 - protein, 181 aa, Artificial Sequence
  Synthetic
SLEEVVKKAEDLLKRVNDELKKVSKKVRDDLRRVNEKLKTVVEDVLRKLEAVVDKIRKSGVDEERLRELKELIERAKRELERILEESEKTTRDVERESEESLDRSRRTTEEAKRELDDVRRRGVDVKDVDKRIRDVVRRHEEVVETNARRVDEVVKRHDKLVKDLERRVEKVVRELEEKVR

SEQ ID NO: 4487 - protein, 181 aa, Artificial Sequence; identical to SEQ ID NO: 4486
  Synthetic

SEQ ID NO: 4488 - protein, 181 aa, Artificial Sequence
  Synthetic
SLDEIVKRAEEELKRLNEELKRVSDRVKERLDRVLDELRRISERIKELLERVKRKLEREGVDEDTLRELARELKELEDRSRESLKRVEDLIRKVEEDSKESLKESKRLTDDARRRLDEIRKAGVDAEDLRREVEEIIRRHKEVIRKNEEDVKRVLDTLREMLKKNKKLVDDMVRKLDETIK

SEQ ID NO: 4489 - protein, 181 aa, Artificial Sequence; identical to SEQ ID NO: 4488
  Synthetic

SEQ ID NO: 4490 - protein, 177 aa, Artificial Sequence
  Synthetic
SEAEKVLEKVERVAREVLERIKRIVEHTKRVVEDVIRRADESVRRSEEIMEDVRRKVDSEKVEEIERRVREVVKENRRLVEELRERVRRVVEENKRLLEEIERIVREVVRRVEELARRNGPKEDVERLVRTVKEELDRLVDESRKLSRDVRETLEELVKRSEDVTRRVEETLREIVK

SEQ ID NO: 4491 - protein, 177 aa, Artificial Sequence; identical to SEQ ID NO: 4490
  Synthetic

SEQ ID NO: 4492 - protein, 177 aa, Artificial Sequence
  Synthetic
DELERILEEVKKVVEEVVRRAEESVKKTEDVMRKVVERVARSLEESRRVAEEVERRIRSEKLRRVREIVKEVVRINEELVKRVKDIVREVLERNRDLVRRVRDIVRRVEEEVKKLADNNGPEKDVKRLVDEVRKELEELVRRSEELTKEVKKTLEELVKESKEVVKDVEKKLREIEK

SEQ ID NO: 4493 - protein, 177 aa, Artificial Sequence; identical to SEQ ID NO: 4492
  Synthetic

SEQ ID NO: 4494 - protein, 181 aa, Artificial Sequence
  Synthetic
REVDEAVKNNEEDAKESRRVVEEAVKRDEDIARDIERRAREVVERDKEIVDEVRRRVKDEKKLREVVTLSKKIVDETKEIADRVLELSKRIVKETRDIAKRVLKLNDDSVKDVRRIAREVRSKEVKDLLDENSKRSNEISREVKKDLERTVRENKKIVDEVRKKLEDTVDKNRRIVEEVTT

SEQ ID NO: 4495 - protein, 181 aa, Artificial Sequence; identical to SEQ ID NO: 4494
  Synthetic

SEQ ID NO: 4496 - protein, 181 aa, Artificial Sequence
  Synthetic
SEVDKMLKRSNDIVREIARVVEEAVKTDERIMREILEHARKVVEEDKEIVDRVRKEVEDEEKLREVVERSRRIVKETEESAEEVLRRSAEIVKDTKRIAEEVRRRSKRISDEIRRIAREVRSEEVVRRLRTLVEENRKIVEDVKRELERTVRDNRRIVEEVAKRNHDTVRENKEIVDRVKT

SEQ ID NO: 4497 - protein, 181 aa, Artificial Sequence; identical to SEQ ID NO: 4496
  Synthetic

SEQ ID NO: 4498 - protein, 180 aa, Artificial Sequence
  Synthetic
KEAEDVIELVRRILEEVDRRVRDVLRKDEESLRRVKKTVEEVLKRHKDIEDEVRRRVRSEKLRRLVKKVRDMLKNVEKLARELIEKVARSIEKTKKIAEDLIRKAEEVLREVERVRDELDSEEVKRVLEEIVKKVEEIVKDVERKLRKTVEENEEVVRRVKRYLEKSVEDLEKVVRDVTT

SEQ ID NO: 4499 - protein, 180 aa, Artificial Sequence; identical to SEQ ID NO: 4498
  Synthetic

SEQ ID NO: 4500 - protein, 177 aa, Artificial Sequence
  Synthetic
SAEDILREVEELVRRTRKHLEDSLREVTKLVEETKREADRILKEVRDRVKEVIERGRDKKDLVRELEKAIEEVERRIRENVRRNEKVVEDHERLIRENEKKNDDAIERIRKIVAETKDEEVLKTVREELRDIIRRSVEHNRDSLRRLREIIERSLRHVEEVLERVRKEIERIKRETK

SEQ ID NO: 4501 - protein, 177 aa, Artificial Sequence; identical to SEQ ID NO: 4500
  Synthetic

SEQ ID NO: 4502 - protein, 177 aa, Artificial Sequence
  Synthetic
SAEDILREIKRLVEETERLLKRILEEVRKLVEETRRRLETILRRVEEKVRRLVEKGRDKRELKKRLEDVIEEIRKIIEDNIRRNDRVVEEVERLIEEDLRDNRRLVRRIEEIIRRVKDEETLKRALDEARKIIEESKKHVKDVLRKVTDEIRESKKDVERVEDEVDKRIREVDERTK

SEQ ID NO: 4503 - protein, 177 aa, Artificial Sequence; identical to SEQ ID NO: 4502
  Synthetic

SEQ ID NO: 4504 - protein, 181 aa, Artificial Sequence
  Synthetic
SIDEVAEEVERLLEEVKETSREVLERVKRELEKIIDTSRRILEEVRRLLERVLEEVERRKKNRERVRELVRRLLERARKVLEDNKDSVRRILEKLKEVLKRNEESVARIKEELERVRRDVKDDRDVKRVLDKVRKKIEENKDTVRRVEEEIKKLIEDNKRTSEKVRKEVTDIIEEIKEEIK

SEQ ID NO: 4505 - protein, 181 aa, Artificial Sequence; identical to SEQ ID NO: 4504
  Synthetic

SEQ ID NO: 4506 - protein, 176 aa, Artificial Sequence
  Synthetic
DVEDVVREAEDLLRKLEEKSRKVVEDAKRLLDEVKRKMEESVKEAKRLLDEVLRKSDEEKIRELVKRLEEINRRSLEEIKKLVKTLEEKLREMNERNKESVERLRRELTEARKRIRDKKIVEEVRRRVEEVVRRDEKSVEDLKREVDRVITELDRLVKRNTEEVERVIRRLDEETR

SEQ ID NO: 4507 - protein, 176 aa, Artificial Sequence; identical to SEQ ID NO: 4506
  Synthetic

SEQ ID NO: 4508 - protein, 179 aa, Artificial Sequence
  Synthetic
SEEEDAERLLRDLKRRADEVVKESEKILEDIVRDAERVLRESKRISEEIVRRADEIRRKVRGEEELEKVVRELEKLTRENKERVDRIMKKLAKLVEENERRVRELEEELKRILEEIVRRIGRESRLVEELRRLVEEVRERLDRSVKKTKELLKEVIKELEKLLKKDEDDVERVIRRLED

SEQ ID NO: 4509 - protein, 179 aa, Artificial Sequence; identical to SEQ ID NO: 4508
  Synthetic

SEQ ID NO: 4510 - protein, 178 aa, Artificial Sequence
  Synthetic
SEVEDILRRVEKRARDSLKHLEDVLRKVDKRVRESLDNLRRVLEEVERIVRELERLLDEGTDIEELLRRMEEMIRRIEEKVRRNLDDNRRVVEEVRKEVAKDLRDNERVVKDVRREIRDERLLEEIVRRLEDSLRKVEEIARRIEKRLRDSLRETKRIADEIRKRLEDALRRVEERAR

SEQ ID NO: 4511 - protein, 178 aa, Artificial Sequence; identical to SEQ ID NO: 4510
  Synthetic

SEQ ID NO: 4512 - protein, 178 aa, Artificial Sequence
  Synthetic
SDVEKILDDVRKDAERSLENLKEVLEKVEEEVRRSLEDLRKVLEDVERIARKLEELLKEGVDIRELKKELERVLEEIRRIAEENLKRNKDVVREIRKIVKENLDRNRRVLEKVRREIKDEELLRRIERTLRESLEAVKRIAEEIERTLEESLREVERIVKEMEDLVRAALKRVEDKAR

SEQ ID NO: 4513 - protein, 178 aa, Artificial Sequence; identical to SEQ ID NO: 4512
  Synthetic

SEQ ID NO: 4514 - protein, 178 aa, Artificial Sequence
  Synthetic
SEVEEILRRIKEEVRESLEDLRRVLEEIEKKAKESLRELKEVLERVKEIADKLKRLLDEGRDIRELEEELKKVDEEIDRIARRNKEENRRVLDEVRKVAKRNKDRNKEALRRVEKDIRDEKLLRDIKRDLERSLEAVDKIVKEIMERIKESLKATERIVKEMKDLITRVREEVKRRAE

SEQ ID NO: 4515 - protein, 178 aa, Artificial Sequence; identical to SEQ ID NO: 4514
  Synthetic

SEQ ID NO: 4516 - protein, 177 aa, Artificial Sequence
  Synthetic
DEVEELKERAKRSNEELKRKVEELKKRAKKAIDDVRRVVDENKKLVKEAIDRLRKTDVDEKIIEDLKRKLEKSVKESEDLVRRLEELMKEVVERLKKLVETNKRLTDEVVKKLARVREKETLKKLLEELKKLVDESRRRLDELRKEVEKKVEEMLERARRLLKKTEDLVREVKRRVD

SEQ ID NO: 4517 - protein, 177 aa, Artificial Sequence; identical to SEQ ID NO: 4516
  Synthetic

SEQ ID NO: 4518 - protein, 177 aa, Artificial Sequence
  Synthetic
DELKELEDRLRRAEEEARRLLEEIKKRLKESNEELKRLVEENEKLVKEALRRLENTDVDKKIIETLKRLLEESVERSRRLVERNREESEKVVERLKRILEELRRLLRRVVEEAARVKDKDVLRKLLEEVERLVKRVLDELRALLKEVEDLVRKSVEDLRKLLEETRKLVREMEERVR

SEQ ID NO: 4519 - protein, 177 aa, Artificial Sequence; identical to SEQ ID NO: 4518
  Synthetic

SEQ ID NO: 4520 - protein, 177 aa, Artificial Sequence
  Synthetic
SLVEKLEKRLRDVIKTIEDIIRENEERLRRSNRELEKLVDENRKLVEEVLKRLADTDVDKKIIEELERRLKESLDRSRELVKENKRLSEESVRRSRRLLEELKKLAEEVIERLRRVKDERVLEKLLREVEELAKRVLTELRRLLRETERLVRESEKRLRDLLRDTERLAREVEKRVE

SEQ ID NO: 4521 - protein, 177 aa, Artificial Sequence; identical to SEQ ID NO: 4520
  Synthetic

SEQ ID NO: 4522 - protein, 177 aa, Artificial Sequence
  Synthetic
SLVEDLKRELEKAKEEIEKIVRDLERELDRVIKENERLIRENEDTVRKALERLRRQDVDERIIRELEKKLRESVEESKKSLEEVEREVDEVRKRLDELVKELEKRVREVIEELRRVREEDVLRELKDRVRRIVEEVARRLEELLKKVKDLVKKSLKTNEDLLRKTEELVRRAEERVK

SEQ ID NO: 4523 - protein, 177 aa, Artificial Sequence; identical to SEQ ID NO: 4522
  Synthetic

SEQ ID NO: 4524 - protein, 181 aa, Artificial Sequence
  Synthetic
SEVEEVLKRLKELVDTVLEELKDVIRRIEELLERVRRDNERTIREDEELVRKVLDELRKISDKKTIERIVRRITRESERLLEENHRINKRITEELERLVRELERVVEEIIERLKELLERVKSGELAEEIERVIREAERRLKKLLDELRRLVEEVRRELEELDERLKRSSEEAKKRLDELVK

SEQ ID NO: 4525 - protein, 181 aa, Artificial Sequence; identical to SEQ ID NO: 4524
  Synthetic

SEQ ID NO: 4526 - protein, 181 aa, Artificial Sequence
  Synthetic
SEVERVLEDLRRLVRDVEEKLRRIIERDRRLVEEVERENRKTIRKIEELLRKVLEELKDISDKKTIERIVREIIKEARDLVRRNHERNREIVDESRRLVEELRRIVEEIIRRLRELLERVKSGELAERIEDVVREAEKRLRELLKELEKTSRDLKKRLEELDRELKALVEKVERDLEELRK

SEQ ID NO: 4527 - protein, 181 aa, Artificial Sequence; identical to SEQ ID NO: 4526
  Synthetic

SEQ ID NO: 4528 - protein, 185 aa, Artificial Sequence
  Synthetic
SEAEELLRRLKELVDEVLKRLRDMIKRSEDLARDVLRKHEDLIRKLEELMKKVEDLADKISDKDTVRELVKEVKKRLERLLRESEKLSKRVKEELKRSLDRSKELVDRVVETVREILKRLRDAGVPEEVVREIERIVREVTERLRRLVEENAEVVKRVEKELKELNDELRRVVEEIVRKAKEKTK

SEQ ID NO: 4529 - protein, 185 aa, Artificial Sequence; identical to SEQ ID NO: 4528
  Synthetic

SEQ ID NO: 4530 - protein, 185 aa, Artificial Sequence
  Synthetic
SEAEELLKRLEDRAEEILRRLEEILRTSRKLAEDVLRELEKLLRESERRIREVLEELRRIKDKKELEDVIREVEKELDESLERSRELLKDVLKKLDDNLKESERLVEDIDRELRKILEDLKKAGVPKEVVDEIKRIVDEVRERLKRIVDENRKIVEDARRKLEKIVKENEEILRRLKKELRELRK

SEQ ID NO: 4531 - protein, 185 aa, Artificial Sequence; identical to SEQ ID NO: 4530
  Synthetic

SEQ ID NO: 4532 - protein, 183 aa, Artificial Sequence
  Synthetic
DMRKELEKRVEEIRRAVTELVKRNEDIVREVKKRVEELVKRNEDITKKAEDDIRDLVRKRDREELRRLVERLKKLLKESNEELRRLVRELEERLRESIRNSRRVVEDLERKLEEIRKEISRVDEEEKLRRLLERLEDIARRVLKYLEEDLRETEKLAKEVLDRARKILEETKELVKDVLEKAR

SEQ ID NO: 4533 - protein, 183 aa, Artificial Sequence; identical to SEQ ID NO: 4532
  Synthetic

SEQ ID NO: 4534 - protein, 183 aa, Artificial Sequence
  Synthetic
DMDEELRRVVKEIEDELRRLVEENRDVVRKVEKLNRDLLKRNEDITDEARKRVEDLVRKRDDERVRELVRKLTEELKESNERNRKVVEESKRRLEESIRNSERVVEELKRLLREIIRTIDDVREREKLEKLIRRLREIAKEMLEYAKRDIERTKELAKRSLERHKESLDRTEKLVKEVLDKAR

SEQ ID NO: 4535 - protein, 183 aa, Artificial Sequence; identical to SEQ ID NO: 4534
  Synthetic

SEQ ID NO: 4536 - protein, 183 aa, Artificial Sequence
  Synthetic
DMVRDLERIVEKIKEDIKELVKRNREVTEKVVRDVEELVKTNREVVREATRRVEKLVEEEDREEVRRIVEELRRRLTKSIENSERVVEKLKKDLEKSNRDLEDLVRRLTELLKKIIEEIRRVKDEDTLRKLLKTLRELARRVLEEARKIIERSKELAERVLRYLKRDIEESKKIVKEIEDRAR

SEQ ID NO: 4537 - protein, 183 aa, Artificial Sequence; identical to SEQ ID NO: 4536
  Synthetic

SEQ ID NO: 4538 - protein, 183 aa, Artificial Sequence
  Synthetic
DMERELDDVVRKAEEDNRRLLKENEDIVREVVDRNARLLEENRRVVEEAVRRVEDMLRRRDRERLRDIVDRLRKELKKSEDNSRRSLKESEDRLRESIENSRRSIEESRKLLEEIRETIRRVKDERKLRKLIDDLRKLVRESLEYNKDDLEKTKELARRSLKYNKEDIDRSREIVRDVRRKAQ

SEQ ID NO: 4539 - protein, 183 aa, Artificial Sequence; identical to SEQ ID NO: 4538
  Synthetic

SEQ ID NO: 4540 - protein, 183 aa, Artificial Sequence
  Synthetic
SVIEALEEIAEKIERDVRKLVEENREVVKEAEKRVEEILRTNSKRSEEVRREVEDLVRKDDREEIRKLVEDLTRRLEESNRELKKLLEELKDLLRRSIENSERVVEKLRREARTLIEELSRVKEERVLEELLRRLEEIAKRALEYLTRDIEETKRLVEEVLKRLKEILDKTDDLAREVLERAR

SEQ ID NO: 4541 - protein, 183 aa, Artificial Sequence; identical to SEQ ID NO: 4540
  Synthetic

SEQ ID NO: 4542 - protein, 185 aa, Artificial Sequence
  Synthetic
SEVEKIEEDLKRLVKRLREINEESKKRLEELIRTAEEINKKTTDELERLAEEVDRLVKRVTSKEVKDLLREIEEELKKLLRKNREINEDIVRRLEELVRRNEKINKEIVERLDKTVKDVKKDLRSVREAVDRLRRVVDEIRKEARKLNEEIRKRVEDVVRKLDKMDEDLRKRVEEIERKVREATR

SEQ ID NO: 4543 - protein, 185 aa, Artificial Sequence; identical to SEQ ID NO: 4542
  Synthetic

SEQ ID NO: 4544 - protein, 185 aa, Artificial Sequence
  Synthetic
SEVEEILERLRRLVKEVDKRNTDSLDTLKRLIDELERKNRDSLRRVDELAKELEKLARRVTSEEVKKLAEDVVRRLEELVKENKEENERIVKRLTELLEENRDENRRIKEELEELLRDLKRKLRSVKDAVTELEKDVREIKKRLDEMDKRLKDVVDEVRRRAEEVNRRIERLVREIEKRAREEVR

SEQ ID NO: 4545 - protein, 185 aa, Artificial Sequence; identical to SEQ ID NO: 4544
  Synthetic

SEQ ID NO: 4546 - protein, 185 aa, Artificial Sequence
  Synthetic
SEAEEVLERLKRLRETVKEENDDSLRKDRELVDRLEKDNRDSLRKLKELIERVREILKRVTSEDVRRLLRRIVEELKELVERNKERNKRIVETSKRLVEKNRKRNEDITRDLRRLVEDLKRRLKEKKDVVETVKRVVEEIEKELEEANRRLEKSSREVEDRIRKANKRLEEVVDEVREEVDKATR

SEQ ID NO: 4547 - protein, 185 aa, Artificial Sequence; identical to SEQ ID NO: 4546
  Synthetic

SEQ ID NO: 4548 - protein, 185 aa, Artificial Sequence
  Synthetic
DEVREVLTRLEELVRRVTKELEDSLRNTERVRRTIRKLAEEVNRDSKRLKDEVKKVLEKIKDKDTLRKVVDDVEKELEELNRTLERLVREVSRYLRENNDRSRKLVEEVIERARRIVDTLRRAGVPEEAVETLKRKVEEIERRLKRMVEEDRKTIEEIEEEVRRLVKTNREIIKEIVETLREAVR

SEQ ID NO: 4549 - protein, 185 aa, Artificial Sequence; identical to SEQ ID NO: 4548
  Synthetic

SEQ ID NO: 4550 - protein, 185 aa, Artificial Sequence
  Synthetic
KEVEEVRTRLKKLRDDVKRLLDEVNEESKRLAEEVRRRLEESNRNTERVVEEIERVIERIKDKDTLERMVREVKRYLEENNKRSEALVDKVEKDLKRLNDKLREDVKRVIERLRRLVEELKRAGVDDKVVDEVRRRVEEAEREVKDMVRTNNEIVRRIVEEARRLVDEDRDRIKKIEERLRRELQ

SEQ ID NO: 4551 - protein, 185 aa, Artificial Sequence; identical to SEQ ID NO: 4550
  Synthetic

SEQ ID NO: 4552 - protein, 185 aa, Artificial Sequence
  Synthetic
SEAEEVLREVDELAKRLERVATESLKNTKKVVDDVRREVKRVNERSEEIMRRIEDVLRKIKDKDTLRRTVEEVIKELEDLNRELEKRVREVIRYLRENNRTTKEKVDEVRRRLEKLLDDARKAGVPEELIREIERIVREIDKRARELVERDNREVERIVEELKELVKTNNDIVRRVVEKLKETVR

SEQ ID NO: 4553 - protein, 185 aa, Artificial Sequence; identical to SEQ ID NO: 4552
  Synthetic

SEQ ID NO: 4554 - protein, 183 aa, Artificial Sequence
  Synthetic
SEAEKILEDLKRIVRRIKEELRRVLDHTRELVERIRRLAKKILDDTEKIVRDIRDKAEKVRDKDDLRRLVEEIRERLRRSDEELRKLVEKIARDLDKNLEDSERLVEKITKELEELLEDIRRLPEDVVRELKREVERIKREVKKMVDDNRRTVEKIKRDAEKMVRDNEELSRRIEKDVDDKTK

SEQ ID NO: 4555 - protein, 183 aa, Artificial Sequence; identical to SEQ ID NO: 4554
  Synthetic

SEQ ID NO: 4556 - protein, 183 aa, Artificial Sequence
  Synthetic
SEAEKIEERLKRVVEKLRRDATRVRKHTDDLVKEITDLAEESKRRVEEIRERVKRLRERVTDKDTVRKLVEEIKKRLDDSDKTLEDLVERIERLLEENLKDSERLVTEIEKELRRLLEEVRRLDEKVVKRLEDEVKRIKDEAKEMVDENKRKVDEIRKELRRLVEENRRESEKIKKKLDEDLK

SEQ ID NO: 4557 - protein, 183 aa, Artificial Sequence; identical to SEQ ID NO: 4556
  Synthetic

SEQ ID NO: 4558 - protein, 183 aa, Artificial Sequence
  Synthetic
DEIREILRRIREVVADATRRAKESLDNLKRVVEEVDRRVKESLDRLKEIVDRVRELSKRVTDKETVKELVERIRKELDDSNEELRKLVRDVEKYLKDNVRRIAELVKKIEKELRDLLREISRLPKDVVKRVEDEVRDIRRVLEEMVRRDKKVVDEIRERLKEAVRRNEEVSRKIKKDLKDETK

SEQ ID NO: 4559 - protein, 183 aa, Artificial Sequence; identical to SEQ ID NO: 4558
  Synthetic

SEQ ID NO: 4560 - protein, 177 aa, Artificial Sequence
  Synthetic
SMEERLREVVTEIRKKVEKLLRDNRKSNKEIKETVDDLVRRNRELTERAKRRVDARGIREDVVRRLEKRLRESNEKVERVVEEIEKRLRESDKKVEEVIERLDRLLKELIKRISRVTREREAEELLRELADVVRRAEELAERSLRESEKVMEDITREAERILRDTKRLIEEIERRAR

SEQ ID NO: 4561 - protein, 177 aa, Artificial Sequence; identical to SEQ ID NO: 4560
  Synthetic

SEQ ID NO: 4562 - protein, 177 aa, Artificial Sequence
  Synthetic
SLREDLEKDVRDIVREIDEAVERNRRSVEEVDKRVEDMLKNNRDSNKKIEEDVRRAGIPEEVVEELRRRLEESDREVERILKELRDRLREIIERSEDLVRRLREELKRLIDTIDRITREEDAKRLKDELREVVDKIRRDLKKSNDDIRRLVEKIKRELEELNKRSRELVERARETVR

SEQ ID NO: 4563 - protein, 177 aa, Artificial Sequence; identical to SEQ ID NO: 4562
  Synthetic

SEQ ID NO: 4564 - protein, 177 aa, Artificial Sequence
  Synthetic
SLEETIEEKVRRIREEVRRMLENNRRINEEVDRRVTEMVERNRKTVEEVVREVDRDGIPESVVDELRKAVEAVIRKSEKIVEDLRREAEKSDDELRKVVEKISERLEDIRRKVRKLTREEDAKRLLEEVEDIVRRLRKELEDSNRKSRKLVEEIRKRAEESNRELRELIKRIKDRAR

SEQ ID NO: 4565 - protein, 177 aa, Artificial Sequence; identical to SEQ ID NO: 4564
  Synthetic

SEQ ID NO: 4566 - protein, 177 aa, Artificial Sequence
  Synthetic
DVLERLAEVVRRVVKEAEDLVRNNRRLNKEVEDEVDELVRNNRRLTKDVVKKVEDAGVPEEVVDEIRKLLTTSNERVERLVDELKKRVETSDERAKRIVDRLRKIVEKLIREASKVTSKEEVKRLEDELRKVVDKVRKDMKRSNDDSERLREDITRKAKRLNEETRKVMEDVTRRAT

SEQ ID NO: 4567 - protein, 177 aa, Artificial Sequence; identical to SEQ ID NO: 4566
  Synthetic

SEQ ID NO: 4568 - protein, 185 aa, Artificial Sequence
  Synthetic
KEAEELIREIERKAEEVRKENERSIRENERLAREVEKRLKRTNEELKRLVRELEEKLKRDDDGETVKREVKKIDEDLRRLVEESERIVKEIVERSRKSVEDNRRRNEEIERDLRRLVEELKRRGVDEELIRRLEEVVKRIREDLKKLDDDLKRSVEEIERRLKKVIEDNRETLERARRRLDERVK

SEQ ID NO: 4569 - protein, 185 aa, Artificial Sequence; identical to SEQ ID NO: 4568
  Synthetic

SEQ ID NO: 4570 - protein, 183 aa, Artificial Sequence
  Synthetic
DEAEEILEELRRLIEEDKKTVEEVLRRDEETIKRLEEENREALKDNRRLIEELEDIVRRIKDKDTLREILKRVLEESEELLRRVHKRNREVIEENRRSVEELKKINEDSIKRIEDLLREIRRVDEKVREKVERILDDLRRVVEETVKRAEDLLRKSREVVKRVDEELKESHDRLDERIKRDLK

SEQ ID NO: 4571 - protein, 183 aa, Artificial Sequence; identical to SEQ ID NO: 4570
  Synthetic

SEQ ID NO: 4572 - protein, 183 aa, Artificial Sequence
  Synthetic
DEAREILKTLKDLIKELEDRNREVLERDKKTIEDLERRNARVLEENKKLIDEIRRIAKDIKDKDTLSEILKRVLRESEKLLRKIHKENREVIKRNEDSLKEVHDENRKVREEIKRLLDDARRVDRSVEEALKKILRELEKKVEEVDRRLKRILEDSRRVVRRVDEEARKSHEELKRELDRIRK

SEQ ID NO: 4573 - protein, 183 aa, Artificial Sequence; identical to SEQ ID NO: 4572
  Synthetic

SEQ ID NO: 4574 - protein, 183 aa, Artificial Sequence
  Synthetic
KEAEDLLRKLRELIKKLDDTNRRVLERDRKTIEELERRAEKILTDIERLIRELEDRVRRTKDKDTLRELLRRAKDTIRKLLKDLRDELEKVIKENERSLREVHKRNKEVDEDAERLVAEVRRVDEKVVEKARRILKELRDRIREVDKRLRELLEESRKRVEEVERELERLVRELEKKVREAEK

SEQ ID NO: 4575 - protein, 183 aa, Artificial Sequence; identical to SEQ ID NO: 4574
  Synthetic

SEQ ID NO: 4576 - protein, 182 aa, Artificial Sequence
  Synthetic
SEVEDVVRKIKEILERLKKEVDDVLDRNRKLLEELKKRADEVLKRNKDLLETLKREADRDGKDEDVVRRARKILKELRDHSKKVVEDMERILEESKKHSEDAVRRLREIVKRLAEEVDEVTKRGVDKDELKRLLDELREIVKEAEERLRKSDEDLERIIREVKKRLKESNEELERTIREVER

SEQ ID NO: 4577 - protein, 182 aa, Artificial Sequence; identical to SEQ ID NO: 4576
  Synthetic

SEQ ID NO: 4578 - protein, 184 aa, Artificial Sequence
  Synthetic
REVEEVVKEAEDLLRKLRELAKEFLTRHKKLIRDVTEKVKEVLKRSADSIRELEKIIDKVTSDEVRRLLEEINKRNREEIERLLRELEKILRESRELSKELKKILDEILKRIRELVEKVKARGLPEDAVRKLEEMVERLARIVEDVERKLKKLNKELEEIVRDAKRRLERLNEELRRRIREAER

SEQ ID NO: 4579 - protein, 184 aa, Artificial Sequence; identical to SEQ ID NO: 4578
  Synthetic

SEQ ID NO: 4580 - protein, 184 aa, Artificial Sequence
  Synthetic
DEDEDIERKLKELIDRLREEVKKAEDEHKELIKRDHRRVEEVERRSEKSIKDLRDLAKKVSSEEVERLLEDINRRNRELIDRLRKELEKTNEESKRLSEELKRKLTEVLKRIRELVEEVRKRGLPEDVARRLEELVEELEDIVRKVKESLRRLNEELRKNSETVKKKLEDLNRELRKDIEEKRR

SEQ ID NO: 4581 - protein, 184 aa, Artificial Sequence; identical to SEQ ID NO: 4580
  Synthetic

SEQ ID NO: 4582 - protein, 184 aa, Artificial Sequence
  Synthetic
SEAEKVLEEAKRLIEELERRVREVLKRSKKTIEDLRREVDRVVKEHKKLIRELREIIKRVTSREVEKLLEDILRDSRRLTKELDEKLKEINKRNAELIEELKRILDKIRKDIKRLIEEVEKRGLPEEVAKRLKDVLRELKDLVEKIEEEARRLNEELKEIIDRARKTLEDLNRELEEVVRRARK

SEQ ID NO: 4583 - protein, 184 aa, Artificial Sequence; identical to SEQ ID NO: 4582
  Synthetic

SEQ ID NO: 4584 - protein, 178 aa, Artificial Sequence
  Synthetic
SEVDEVRRELERVITDDKRLVDESRRKNEKSIRDDEELIKTSRRINEESIRRLKELVERGVPEEELERIVKENKEKVARVVEESKRLVERNKREAEKVVEESRRRVKRLREELKDVVRKGVDEETLRRLVKRLDETSEELEDENRRLNETLKRSSDELRKTNEELNKRLKEVVDRAKK

SEQ ID NO: 4585 - protein, 178 aa, Artificial Sequence; identical to SEQ ID NO: 4584
  Synthetic

SEQ ID NO: 4586 - protein, 178 aa, Artificial Sequence
  Synthetic
SVEEKIKEMVDKIKDSVRRSTEENDRLVKEIDKVLKEAEKRNRDLLKEAADVLKRVLDKRRESEELRRIVEEVEKTHRDLLKKTADLVRKVREDHDRLLKESKELNDRSERRAEELERKVDDIDTVLKDMKKILDDNKKLVDDSRKKHKESIDRLRKLVKDSLDEHRESIERLERAAR

SEQ ID NO: 4587 - protein, 178 aa, Artificial Sequence; identical to SEQ ID NO: 4586
  Synthetic

SEQ ID NO: 4588 - protein, 179 aa, Artificial Sequence
  Synthetic
REVEELERELEESNKELRKLIKELDDLLRETNKRLNDLIRELKERLDRVLEELRKIIKDDRRLVEELRRLVEDVRRELKKAIDELKKIVEDSERELERMIKRLRDIVDESRKRLKEVSRTREVEKLVEEAIKRNEDLVRTVERKVDEAIKENRRSVEKVAEEVKKAEEELERIVDTVRR

SEQ ID NO: 4589 - protein, 179 aa, Artificial Sequence; identical to SEQ ID NO: 4588
  Synthetic

SEQ ID NO: 4590 - protein, 179 aa, Artificial Sequence
  Synthetic
REVEELKKEADKTNEDLNRLIKELEERARESNRELKRLIDELRRRLEEVLKRLKDIIDKERRSTEELRKLVKDVEDELEKVIRDLERIVDRSRKELERVIRELEKIVRESERRLKEVSRTEEVERLVTEMIKRNRTSVDAVRRKVKEMIDRNKALVETVRDEVRRAREKLRDILRKAEK

SEQ ID NO: 4591 - protein, 179 aa, Artificial Sequence; identical to SEQ ID NO: 4590
  Synthetic

SEQ ID NO: 4592 - protein, 180 aa, Artificial Sequence
  Synthetic
SIEEIVRKVKEDLKRSLDELRKVSEDMARRLRESLKELEEVVREMEERLKRILDDIRRKVPEDRVRELERRVRELIERLRKKVKENKERLEKIVKDSDDHVERNVEELEKIVRELEKLVRDGRDERDLKRRVDEVLTRSKESVDENKRTADRVLEESRESIKELKERAKRLLERLEEERK

SEQ ID NO: 4593 - protein, 180 aa, Artificial Sequence; identical to SEQ ID NO: 4592
  Synthetic

SEQ ID NO: 4594 - protein, 178 aa, Artificial Sequence
  Synthetic
KEVEELEREARRMLEHTKRLIDEVRDRAKKSLDNTRRVDREVEKLVEDTERRLDELRKRGEPEERLKDIHRENRELVKRIEEYLKRDLDRSRKLVREIEERLRENLETSEDLVRRLVKGEELKRTAERMIEENRRLVETLKRVLEEAIRRNEELVKTLLRKLEESDKKIRKLIEETRT

SEQ ID NO: 4595 - protein, 178 aa, Artificial Sequence; identical to SEQ ID NO: 4594
  Synthetic

SEQ ID NO: 4596 - protein, 178 aa, Artificial Sequence
  Synthetic
SELEELRDRLKEILEHTKKLIKESVERLEESLRNTRRVIRKVEEEVERTRTKLDDLRRRGEDETKLREIHRENRELVRRIVKYAEDDLRRSRKLVEDSKRRSKKNLDDSEELVRRLVRGEEMADVARRVIEENKRLVEENEDRLRKAIERNRELVEEVKKRLEDSDREIERLIREVKK

SEQ ID NO: 4597 - protein, 178 aa, Artificial Sequence; identical to SEQ ID NO: 4596
  Synthetic

SEQ ID NO: 4598 - protein, 178 aa, Artificial Sequence
  Synthetic
DEVETLRREARKLLERIKREIEEVRRRLKESLDNTKRVEDEARKLVKETKDKLKRLAERGSPKEDLERIHRENRDLVRRIEEYLKRDLDESRKLVEEIERRLEELLRTLEDLVRRLVRGEEMRKVAEDMEREIRRLITDLRRELEEAIERNEELVRRLARELERSDREIKKRIDEIET

SEQ ID NO: 4599 - protein, 178 aa, Artificial Sequence; identical to SEQ ID NO: 4598
  Synthetic

SEQ ID NO: 4600 - protein, 178 aa, Artificial Sequence
  Synthetic
SELDELRKRAKRSLETTEELIRRSRKLMRESLDNTRRVEEKVRRLVEKTLRDLEDLKRRGVPEETLREIHKENRELIRRIEKYLEEDLRRSRELVKESKKRSKDDLDRSRDLVRRLVRGREMEETAREAIERNRKLVEDNERDLKKAIEDNEKLVRDLKRELERSDEEIKKLIREVKN

SEQ ID NO: 4601 - protein, 178 aa, Artificial Sequence; identical to SEQ ID NO: 4600
  Synthetic

SEQ ID NO: 4602 - protein, 178 aa, Artificial Sequence
  Synthetic
DSREELRREAKRLLDDIKRLEEKVERLAREVLKHTEELDEKLKRLVEETLKKLEDLRRRGEPDESLRRIHEENRRLVDEIRERLKENLRTSKKLVKEIEERLKELLEELRDLVRRLVRGEELKRTAEEMERRIRELIKRLKDRLEDMIRRNKELVDRLKKKAERSDEEIERLIRETKK

SEQ ID NO: 4603 - protein, 178 aa, Artificial Sequence; identical to SEQ ID NO: 4602
  Synthetic

SEQ ID NO: 4604 - protein, 182 aa, Artificial Sequence
  Synthetic
KEIEDVVRELERKVRENKRRNDEVIKRLERLVEKNTELVRRLIRTLEKLVEDLEDIVRRIKDKDELEERLERIRRRIKELVRKLEELNKKSLDDIRRLVEKLERENERSLREIKRDVDELVRSEEAKKVAEDVERRIRRSVEEARRLLEEVKRKMEESVEESKRLLKKVEDEAKDVVDRARK

SEQ ID NO: 4605 - protein, 182 aa, Artificial Sequence; identical to SEQ ID NO: 4604
  Synthetic

SEQ ID NO: 4606 - protein, 182 aa, Artificial Sequence
  Synthetic
SEIDKVIEELKDLVRKNEKRNRDVVRRDDKSVKDNTKRVEDVIRDLDRLIRELREIVERIKDKDTLRRILKEIKDRIKELVRRLDEENKKSIRDNERSVEEVEKENRESLKTIRELVRNLVNDKRAAELAKEVIDRMEESVKEAERLLRELKRKSEDSVRKSKELLDEVEKKVEEVVREAER

SEQ ID NO: 4607 - protein, 182 aa, Artificial Sequence; identical to SEQ ID NO: 4606
  Synthetic

SEQ ID NO: 4608 - protein, 182 aa, Artificial Sequence
  Synthetic
EEIERAIEKVEREIRELEERVREIIERDRKSVEDNSRRVRTVIKELEKLVEELRKTVKDIEDKDTLRKILDEIRRRIEELVRKLKRENDESNKKNKKSVKDLEDELETILKRIEDEVRKLVNSEEARKLAEELRKEIKRVVDEVRKLLRDLERKSKESVREAEELLKRVRDELKEVVDRTEK

SEQ ID NO: 4609 - protein, 182 aa, Artificial Sequence; identical to SEQ ID NO: 4608
  Synthetic

SEQ ID NO: 4610 - protein, 177 aa, Artificial Sequence
  Synthetic
SLREAVERLRKRHEDVVRELEKLVRRVKEELERVNKDLRKVVEEVRRRLEKVLEDAKDVERIKEIKDEVERVIRELKKIVDESRKNSKDLKEELDDVLKKSEDNVRRVTEELKDVVRRGGPVTDLLKRADDNVKRNRDLIRRLKEKADEIVKRNEDLIEDARRKADEMIKDLEEKAR

SEQ ID NO: 4611 - protein, 177 aa, Artificial Sequence; identical to SEQ ID NO: 4610
  Synthetic

SEQ ID NO: 4612 - protein, 182 aa, Artificial Sequence
  Synthetic
SEVDELRERAKRIVDDLRRKIEEVVKRLEDSDEENKKLIEKAVRELEKIIRDLEEVIRRGVDREEVRRIEKELRDKLEKVKEESKRTIDENRKIVTEVIKTVEEVLKRLREELDRVIKEKKDVRELKELVDRLDKEATDVLRKVREDLRKAIERSERSHRRLEKLIEEIERELKRVVDEVTR

SEQ ID NO: 4613 - protein, 182 aa, Artificial Sequence; identical to SEQ ID NO: 4612
  Synthetic

SEQ ID NO: 4614 - protein, 180 aa, Artificial Sequence
  Synthetic
DIEELLRKVAEEITRSVKESRDRLDEVEKKAREVVERSEKRLREVEEKIERVVRRIVKSDELRDLARKVLDEIRKLVEKLRRLNEKSLRDIERLVRKLEELNKRSLDEIRKLVEELKRVDREEDADKVLKEAEELVRRNRRLVEEVLRRLEEIVKRDEDLVRKVLKEADEIVRRLEEAAR

SEQ ID NO: 4615 - protein, 180 aa, Artificial Sequence; identical to SEQ ID NO: 4614
  Synthetic

SEQ ID NO: 4616 - protein, 182 aa, Artificial Sequence
  Synthetic
SRVEDVVRRLKELNDENSEDSRRVLEKLKDEVRKNSDEIEKAAEELKEKLTRLKRLIEGGVDEETVRRVLEEIRKDLEDLLRRSKESVERIKRELEKSLKRSEESLRKSDEDLKRLLDESRDVKEVKELVKRVRETSKKSLKEDEDMVREVKKKLDDSLRRVDELVRRVEEEARRVLEEVKK

SEQ ID NO: 4617 - protein, 182 aa, Artificial Sequence; identical to SEQ ID NO: 4616
  Synthetic

SEQ ID NO: 4618 - protein, 182 aa, Artificial Sequence
  Synthetic
DEVERVVKELRDKVDRNSREIEKAVTELRKIVKRNSDESKEVIERLEELLRRLEELIKSGVDEKTVREVLEEIDRRLKESERRSEESKDEIRRLLKRLLERSKESLDEIEKELKRLIERSKTSSRVKTLVDEVRKRAEDSLDTVKKLVDRVRERLDESLRDDKRLVDRVREEAERVVREVEK

SEQ ID NO: 4619 - protein, 182 aa, Artificial Sequence; identical to SEQ ID NO: 4618
  Synthetic

SEQ ID NO: 4620 - protein, 182 aa, Artificial Sequence
  Synthetic
SDVEKIFDELRKLLEDLRRKVEEVFRRLKELVERNTRLNREVVKELKKTSDDLRDMVRRTKDKDTLDDLLKKVKKEHEDLVKRLEDLNDRSEKEIRRILKELRDTLRTITRRIEDLVRKAEKDEKVRKLVKEIRERIEKVLRDAEELLKEIEERVKESKKEAKKLLDEVRESVDDVKRKAEK

SEQ ID NO: 4621 - protein, 182 aa, Artificial Sequence; identical to SEQ ID NO: 4620
  Synthetic

SEQ ID NO: 4622 - protein, 182 aa, Artificial Sequence
  Synthetic
SDVEEIVRKLDKLVEDNTRENEEAFKRLDETSKKLEEEVERVFRELKKLVDDLEKIIRDIEDKDTLRKIVKEILKEIEEIARELEKRLEDVLREHKKLLDDIRRRNERSKREIERLVREMEKDEKVRKLVREVEKKVDESTERAERLLKRVEDSVRDVLRRAKELLDEIRKRVKDVERKAEK

SEQ ID NO: 4623 - protein, 182 aa, Artificial Sequence; identical to SEQ ID NO: 4622
  Synthetic

SEQ ID NO: 4624 - protein, 179 aa, Artificial Sequence
  Synthetic
DEAREIRRRLKEVVDEVRKRLEDSLEEIDRRAKEVLEKVKRSLDRLRKVAEEVLDKLRRKGVDEKKIRELKKKVEDLEDKNRRVLREVEEIAKKNKEDHKRVLKELEKEVKDLEDELRELKELDERVKRRVDEVVRKLREIVRKLTEENKRTVEDLERIVERLDRDNRKMVEDMEREVK

SEQ ID NO: 4625 - protein, 179 aa, Artificial Sequence; identical to SEQ ID NO: 4624
  Synthetic

SEQ ID NO: 4626 - protein, 181 aa, Artificial Sequence
  Synthetic
REVEELKKRLEKIVEELKRIVDDHKRKVERIVEELEKLVEDHKRTVEEIVERAKRIVEKDKEKREELDKLVERVKRISDEVRKELERITKRVREESKKVLKRLEEIVKEVRDELDKVKRERDDERLEEVAREIEEALKKVKRDLKESNRELEEVADRVRKELDRSDEDLERRMREVREELK

SEQ ID NO: 4627 - protein, 181 aa, Artificial Sequence; identical to SEQ ID NO: 4626
  Synthetic

SEQ ID NO: 4628 - protein, 182 aa, Artificial Sequence
  Synthetic
SVLETLAERVKEVKDNLRKLVEDLKRLVDRIKETLDKLVEELRELVERLDDRLRKNDKSEEMLERLAEEAERRAKEIEDRLEKHVDESRKRAEELLRRLEDHVRKSKRELERIREEVNSTRDLLKRLEEIMRRLEKEHKDVSKLLRDIEREIDRVHREVKRKIEEIVRKVRKSLEEVKRRAK

SEQ ID NO: 4629 - protein, 182 aa, Artificial Sequence; identical to SEQ ID NO: 4628
  Synthetic

SEQ ID NO: 4630 - protein, 172 aa, Artificial Sequence
  Synthetic
SRAETVLKEVTDKIKKLKDSSDELLRRNKENIDELKKSSEELLRRLTKAIEEIEKANVDEKTLEELIRRVEEELERHHRELEKNSREDEKRNRDHHRKLEEEMRRVEERLEREGIDDEVVKRVRDLLDTVRRRNEKVNEDVKRMNDKLRRDNEDVIRRVEKLLRELEEKRRT

SEQ ID NO: 4631 - protein, 172 aa, Artificial Sequence; identical to SEQ ID NO: 4630
  Synthetic

SEQ ID NO: 4632 - protein, 182 aa, Artificial Sequence
  Synthetic
DLEEVVKEARRLLDTVRKKLDESIKEARELLREIEERFKKSADEVREELKRVEDELRRKRVPEEVERRLDELRKRLEELTRRLKKELDDLKEELERRNERTKRELKRLIDELERRLRRVTRDKDDDVRELRKEVEDIIRRLDELVKKNTEDNRRVIKELRELVEEHTRRVKKIIEDLEREVR

SEQ ID NO: 4633 - protein, 182 aa, Artificial Sequence; identical to SEQ ID NO: 4632
  Synthetic

SEQ ID NO: 4634 - protein, 182 aa, Artificial Sequence
  Synthetic
SVEEVVEEAKELLKEVEEELKRSAEEAEKLLRDVARKMEESVERLRRLLKDVERALREKNVDEKVKKKLRDLLKELEDINRKSKRDLDELVEELRRRTEELERRLRELVRRLEEDLDRFRRDKDDDLRRLREKIEEIVRRLRELVRRHNEEVRRIIETLEELVRRNTETVEREVRRLRDEVR

SEQ ID NO: 4635 - protein, 182 aa, Artificial Sequence; identical to SEQ ID NO: 4634
  Synthetic

SEQ ID NO: 4636 - protein, 182 aa, Artificial Sequence
  Synthetic
SVEKVLEDARRLLEEVKDRLKKSIDDAEKLLRELEKRLRESADEARRLLRRVKELLERKNVDDKLRRDLDRLIKELEDRTKKLIDELRRLIEEVREENRRTKEELERLIRELEEKLRRFKRDKDDDLRELKREIEEIVKRAEDLVRENTEKNKRVVDTVEELVRRHNEEVRRVVKELEERVR

SEQ ID NO: 4637 - protein, 182 aa, Artificial Sequence; identical to SEQ ID NO: 4636
  Synthetic

SEQ ID NO: 4638 - protein, 184 aa, Artificial Sequence
  Synthetic
GLDEIIKRLREVLEKIREELRKSSEELERLLKRVDDDLERSNKELEELLERVRKKLEDSRIDRKLLEDVRREIKRVKEESKEIRDTLKTLLDRLRELSKKIEDDLKRKLEKLDEDLRTIRRKPQSEELLRELEKEIKRVDEDLKRLVEEHEELVRDVLRKLEKLVREHKEKVRERVERADDKVR

SEQ ID NO: 4639 - protein, 184 aa, Artificial Sequence; identical to SEQ ID NO: 4638
  Synthetic

SEQ ID NO: 4640 - protein, 182 aa, Artificial Sequence
  Synthetic
SLEEVLKELKKIVEDVTRRLEEMLRESKETSKEVEKELKKLDDEIREIIERAEEDLRRANKPEEELDKARRRLEKILEDNNRKNREITKRSRTENKRLEERLEEIVRRLKTELDKLRKVLEEGKVDEEILKEVAERLKKTAEEVKRELEKFIEDDRKRADEVRRENEETLKRIEDIVRELKR

SEQ ID NO: 4641 - protein, 182 aa, Artificial Sequence; identical to SEQ ID NO: 4640
  Synthetic

SEQ ID NO: 4642 - protein, 183 aa, Artificial Sequence
  Synthetic
SALEKIMKDLEKSIEDVRRKLEDILRKLRKSSEEVKRRIEDIERKVDRAAKEILRSKGTESEEVKKLDKELKDVRDTLRRIMERLEEINRRIEEELRRLLKELEEENDKVKKELKDRIDKDGDDEDVVRRLKRTVEEVHKRNEDVVREAEKLVEKLSRINEEAVRRLADIVRRLEEELRKAEK

SEQ ID NO: 4643 - protein, 183 aa, Artificial Sequence; identical to SEQ ID NO: 4642
  Synthetic

SEQ ID NO: 4644 - protein, 172 aa, Artificial Sequence
  Synthetic
REKEDVLRRIERIVREIERRLRESLKRNREIVKDLERLARRVLKESEDNLRKLKEDRKELEEVLDELRKKNKELEDDIRRLLRELEERTERWEDELRRILRELEKRLEEIERADVSREKLRKRLEEMKEELRKADERAKEIDTRTKRLVDEAVRKLEKLVEEHRRMTDEIRR

SEQ ID NO: 4645 - protein, 172 aa, Artificial Sequence; identical to SEQ ID NO: 4644
  Synthetic

SEQ ID NO: 4646 - protein, 183 aa, Artificial Sequence
  Synthetic
REDETLEKILRRIEEIVRRLVREAEDVVRRDRETIERLVRENEKAVKEIKDIVDELTRLKKDKREEELERMLKKLEEEVKRIIEESERKLEDNRRKVEEIIRRLEDVLRRLEEEIRKMIKDLPDTESVREAAERLKDILRRLEELLRKVAKDLKKSNDELERLSEESVRRLREILKRLEDALR

SEQ ID NO: 4647 - protein, 183 aa, Artificial Sequence; identical to SEQ ID NO: 4646
  Synthetic

SEQ ID NO: 4648 - protein, 181 aa, Artificial Sequence
  Synthetic
SEVEKILEDLDRSAKEAADRIKEIVDRLTELVKDLKKKNEESLEELDRLVKELADLLRRGEVDEEALKRAVETLRRILKRDKEAVDEAVRTLEKIIEDLKRELDEHTRRLEEILKRARDEVEEDKLRDIARRVREVNKRLEDLIRTVARAVRKALKDSEDLVREIAKRVEKALEDVRRAAK

SEQ ID NO: 4649 - protein, 181 aa, Artificial Sequence; identical to SEQ ID NO: 4648
  Synthetic

SEQ ID NO: 4650 - protein, 175 aa, Artificial Sequence
  Synthetic
REVEEVIRKLERILEEAERMSRESERKLREILEKLERAIREIREELERIHKELEEKAGRDEEVREILKRNRDNIRKLEEDARRILEDLKRLIKKLTDENKRILDELRRRIDELRKANVDRDRLDKAVEELRKEIEEMLRRSDELVKRLDEKVKKVLKELREHVKRDKEKVDKDAE

SEQ ID NO: 4651 - protein, 175 aa, Artificial Sequence; identical to SEQ ID NO: 4650
  Synthetic

SEQ ID NO: 4652 - protein, 175 aa, Artificial Sequence
  Synthetic
SSRERVIKKLEESLERLERLARKIKEDLERINRDLERLARKVEEELKRIHEELERRSGDDREVREILRRNRENIRDIKRKIEEIHRENEKNIRKLVEEAKDILRRSEEKIRRLREAQIREDELDKRVKDLHRENEREIRRLEDHVRRDRERLEEALRDLEAHVKRDKDKLDKDAK

SEQ ID NO: 4653 - protein, 175 aa, Artificial Sequence; identical to SEQ ID NO: 4652
  Synthetic

SEQ ID NO: 4654 - protein, 173 aa, Artificial Sequence
  Synthetic
SEIEDVARRLEEINKKSEDMARRIKEELEKVDEESERLVREVAKRLDEVLKRVRDDGVDEKKLKELEDKVKRIKDEARRLLEESKELTRRLVEEVRRLLEDSRRAVEEIERKLKDGTAEELKKRVEDLKRKNEDLIRRLEEKVRRLKKRNRDLIEELKKLVKELKDEAKKTSD

SEQ ID NO: 4655 - protein, 173 aa, Artificial Sequence; identical to SEQ ID NO: 4654
  Synthetic

SEQ ID NO: 4656 - protein, 173 aa, Artificial Sequence
  Synthetic
SEEERIEKRLREIHERHKRMLDEIKKRLDDSLKTLEDLIRDVTRELEKVLKKAEDDGIDEKLLRELKKEVEEIKRRAEKLLDESRRKVEELARRAKEINERLKKMIEDLRRELKDGTAEDLDREVKRLEREIERSIKELEELVRKLHKENEELIRELEELVERLKRKIDETSR

SEQ ID NO: 4657 - protein, 173 aa, Artificial Sequence; identical to SEQ ID NO: 4656
  Synthetic

SEQ ID NO: 4658 - protein, 182 aa, Artificial Sequence
  Synthetic
SEVEDAERVVRELEREVREEVKKLRKHVKETRDRDKDTVRRVEEKVKRLREKVKRVEDARRPKEELRRVLEELKKEIDKLTKELEEIEERNRRNIEDVERKLKKILRDIEEKIKELVRKIGSEDRAVREVLKELERVLRDAKRELDRVREEHERSHKELRDMLDRVKKELEKILEKLERALR

SEQ ID NO: 4659 - protein, 182 aa, Artificial Sequence; identical to SEQ ID NO: 4658
  Synthetic

SEQ ID NO: 4660 - protein, 171 aa, Artificial Sequence
  Synthetic
EDKERVEEKIKRSLEEARREAERVRDKLRKSEEEIDRVMKRVLAEIDRVLKEVKEAGVSEDVDRRLEELLRTLERKVRELRKDSDEVRKTLEDLVRRNEEDNRRILEELRREDRDSKELEDIVRRLEERNRRTVEEVERLVDEHNKRLREAAKELKKLVDDLERKLREDTR

SEQ ID NO: 4661 - protein, 171 aa, Artificial Sequence; identical to SEQ ID NO: 4660
  Synthetic

SEQ ID NO: 4662 - protein, 175 aa, Artificial Sequence
  Synthetic
SEIEEVKKKLEKILRDHNRVVEEVAKEHEKILRDHNRVIREVKEELDRVLKKLRDDGVDEKLVREMEERLRELAERVKKKNKELEDNIRRVRREAEEINKELEKKIRDIEEKARRRRDDAEKLERLVKRIKEEVEESVKRLKDHAKENREDVKRSVEELRDVVRRLEERIKESAD

SEQ ID NO: 4663 - protein, 175 aa, Artificial Sequence; identical to SEQ ID NO: 4662
  Synthetic

SEQ ID NO: 4664 - protein, 175 aa, Artificial Sequence
  Synthetic
SEIEEVARRLDEILERHNDVLRKVKEKHEEILRRHRKRVREVEEELKKILKELREKGLDEKDVRKTEKEVREIKKKAKEDHERLKRNIERMERELEKRNEDLRREVEKIKREARDDREDAKDLKRKVDELRRKAEESMKEVERHVRENAEHVKRSVEELEEDVRRLRKKLEEKER

SEQ ID NO: 4665 - protein, 175 aa, Artificial Sequence; identical to SEQ ID NO: 4664
  Synthetic

SEQ ID NO: 4666 - protein, 175 aa, Artificial Sequence
  Synthetic
DEKEKVKEDLDRILEEHRREVEDVERKHRKILKDHEEVVRRVREEHEKILKRLKDNGVDRRLLEELRRNIERLEKEARDDHRRLKENIERMRREIEKDHEDLKREVDKIARRAREDTDDAKKLEDLVRRLKEHVDRSRERLEKHLRENKRHVEESAKRLEKHVRDNEEDVKRKST

SEQ ID NO: 4667 - protein, 175 aa, Artificial Sequence; identical to SEQ ID NO: 4666
  Synthetic

SEQ ID NO: 4668 - protein, 177 aa, Artificial Sequence
  Synthetic
KEEEDLEREVKRLEDKVREDAKKLEEVVKTVEKLVRDDARRNEEVVKEVADRVRRLTERKLDEETLRKVKEDLKRTLERLKRENEKSLEELRDILRRLKKENDDTLKELRDELKRLTDSGASEDVIRKMEEIIKRLEEVSREVEKRLRRIIRELERVSKEVLDRLREIIEKLDRDAT

SEQ ID NO: 4669 - protein, 177 aa, Artificial Sequence; identical to SEQ ID NO: 4668
  Synthetic

SEQ ID NO: 4670 - protein, 171 aa, Artificial Sequence
  Synthetic
SVEDDVRRKLKEIEDEHRKVVKDARDELEKSHRRLRKVIEDVKRKLDRVLEELERSGVDEKIIRKAKELVERLTKKAEDVLREHKEKLDRIEKKAEDSHRRLREDLERLDRAKIDEKDLEEVIRRIRKKVEDSKRDLERLLEKSKRDVEEVMKDLKRRIEELEKLVRDETT

SEQ ID NO: 4671 - protein, 171 aa, Artificial Sequence; identical to SEQ ID NO: 4670
  Synthetic

SEQ ID NO: 4672 - protein, 185 aa, Artificial Sequence
  Synthetic
SLKDELEKLLKELKEHVDRSEKKARENLKRLEEHVRKSKEELEDRLRRIEEKVKRLTESNLRKEDVKRVLEEVRKELKRILDDVRADHRRLEEHLKRSVKELEDDNEKLERDARRIEEKLRRSNVPEEMVERAIRKLEDIHRRHREVVERVEREHRRIKEEHEKVVREAEETLKRIIEDLRRSAD

SEQ ID NO: 4673 - protein, 185 aa, Artificial Sequence; identical to SEQ ID NO: 4672
  Synthetic

SEQ ID NO: 4674 - protein, 185 aa, Artificial Sequence
  Synthetic
KLEEEARELLRRLEEHVRKSKKEAEDNLRRLEKHVEDSKRRLKELLDRLRKTVEDLKRANLDKKDVKRVLDKLRRDLEKILEELRRDNERLERHLRKSTKRLEDDNKDLRDKLEEIKDRLRRSNVEEDVVRRAADALRRVHEAHKRMVEEVKRRHDEIHKRHEKVVRDAERALREVLKRLEEAAR

SEQ ID NO: 4675 - protein, 185 aa, Artificial Sequence; identical to SEQ ID NO: 4674
  Synthetic

SEQ ID NO: 4676 - protein, 179 aa, Artificial Sequence
  Synthetic
SLRETADKRLRDVNRDLKRVIEELRERLKESNKKLEDLIRELRERAERILDDLRRSGVDESILRELEERIRRIEEELERIHREHEREVREVKKDLDRIHEEHKRRLDEARRELEEGRRPEEDLARRLEEIVKESKEIVDRARRRLEEIVERSEDRVRRVEERIKELVKRLEDIVRREKT

SEQ ID NO: 4677 - protein, 179 aa, Artificial Sequence; identical to SEQ ID NO: 4676
  Synthetic

SEQ ID NO: 4678 - protein, 182 aa, Artificial Sequence
  Synthetic
KEIEEVLRRLEELIRRVREELRKNNEDIEREADKLRKELKRVNDELEKKIKDVKDRARRDGAREEDIDRIRKDLKKSKEDLERLIKEALDRLKKNLDDLKKRVEEVEKRLEDLIRDVERKGLPKEVLDELRRVVEEVTREIREVLETSRELVRRIVETVKEVLRSHDEKIKKVEEELDRDRQ

SEQ ID NO: 4679 - protein, 182 aa, Artificial Sequence; identical to SEQ ID NO: 4678
  Synthetic

SEQ ID NO: 4680 - protein, 175 aa, Artificial Sequence
  Synthetic
DVDEKVRELLRKIEEDLRRSVKELRELAKRIEEDLRRISKKSKDLLKKIKDDVKRAGLPEDILRRLDELAKRLEKKNEDIRRDLERVAREIDKENEDMRKKLKEDVDRLEDLLRRGEVKEEDLKRVIEELKKEVEELHRRNEKIIRELEDKVRRVREDNERVIEELARDVERAER

SEQ ID NO: 4681 - protein, 175 aa, Artificial Sequence; identical to SEQ ID NO: 4680
  Synthetic

SEQ ID NO: 4682 - protein, 185 aa, Artificial Sequence
  Synthetic
SLREEAEKIIRDLEDHVRRDEERVKEMVDRSRKLVKELEKRLRDLIREITRRVDKLRKDNIDEDKLRKIIEDLVRDLKRILDELEKLIRELDKRNKKILEDNERNIRELEERAKRILDKLREDGVDEKVLRKAEELLKRIIAELKKIHEELRRLSKESKERLERILDEARKMLEEVKKRLEDIEK

SEQ ID NO: 4683 - protein, 185 aa, Artificial Sequence; identical to SEQ ID NO: 4682
  Synthetic

SEQ ID NO: 4684 - protein, 185 aa, Artificial Sequence
  Synthetic
SLEEKLEKLLKELRDHVRRDKKEVREALERLKDHVRKDREKLERAIAEIKKAVEKLKRDNIDEERLTRIVKELSDRLREIHRDNRENIKRLEDELRRILKKNKENIEDLARKARELLKRLEEDGVDEKVLRKLEKAAREVAEAVKKVHEELKRALEEIRRELEDINRKLKEAADEVRKKLRDIAE

SEQ ID NO: 4685 - protein, 185 aa, Artificial Sequence; identical to SEQ ID NO: 4684
  Synthetic

SEQ ID NO: 4686 - protein, 185 aa, Artificial Sequence
  Synthetic
SLEEELREVIKRLRDHVRRDKERAKEAIKRAEDHVRRDEEAVEEVIKELKRLVDELRKAKLDREDLERVVRDLDRKIKEIEERNKRNIDELRKELERIHRENEKNIRDLDERLKREREKLARDGVEEDVLRRATKALEDIRRELEKINEELKRAAERIEKRLKEIHDRLKKALDDVRRELEETRR

SEQ ID NO: 4687 - protein, 185 aa, Artificial Sequence; identical to SEQ ID NO: 4686
  Synthetic

SEQ ID NO: 4688 - protein, 185 aa, Artificial Sequence
  Synthetic
SLKEKLEREIERLRKHVEDDERRLREVIRRLEEHVKRDEDRLKKELDRLREEVERLRRANIDKEELKRIVERRTEDMDRIRKENEDNIRKLDEELKKIHEDNRKNIERLKTEAEKILRELAEDGVEEEVLKEAEDLLRDVTRALEEVNRRARKLLKEIKEKLDEIHKRLNKMLEEVKRRLDEIRR

SEQ ID NO: 4689 - protein, 185 aa, Artificial Sequence; identical to SEQ ID NO: 4688
  Synthetic

SEQ ID NO: 4690 - protein, 178 aa, Artificial Sequence
  Synthetic
SRAEEMIKDVRRIVEEVRRENKRVLEEIEEIIKRSKEEWEKILKELRDIIEEVERRNLDDERLREILERLEKKLKDVDDRAKEINEELKDLLRRVHERNREILRRLEEKVKEVKREGIDEELLRRIKEVVDRARDTLRRLDEELKRIVEAVHDTDDKVKKELEKIVREVEEIARRRSK

SEQ ID NO: 4691 - protein, 178 aa, Artificial Sequence; identical to SEQ ID NO: 4690
  Synthetic

SEQ ID NO: 4692 - protein, 179 aa, Artificial Sequence
  Synthetic
SEAERVVRENEENLERIKREVERDLRRNEEVLEDLRRKVKKVLDEIRETLRRLREAKLDSEELRKVLEKLKREIEEIRRRLKKTLDDLRKANEKSEREIRENLKENRKRNEDIIEKLKEVEEAVRKLDDLDRRLEEIVRRASEALKRSLEEIERILRKAEEDLRRLLKRLEEIIREVER

SEQ ID NO: 4693 - protein, 179 aa, Artificial Sequence; identical to SEQ ID NO: 4692
  Synthetic

SEQ ID NO: 4694 - protein, 179 aa, Artificial Sequence
  Synthetic
SVEDTLREMLKRLEEIVRRAEETLKRLNEEIERVVREAARRLDKLNKELRDIVRDIKRRKPDKEKLVRELEKILKEHNDELKKIKDDLRRILKKSREDTEKILRELEDILRRLEKEIRDNDKRKDDLKRRLEEILKELKRIVDEAEERHREIIKRLRDIVREATEKSREVLKRLEDKAK

SEQ ID NO: 4695 - protein, 179 aa, Artificial Sequence; identical to SEQ ID NO: 4694
  Synthetic

SEQ ID NO: 4696 - protein, 185 aa, Artificial Sequence
  Synthetic
KVREKLERALRRSTTSSRDIERRLKELLDTNREIVDRIVKRLKEMLDRLREEIRRIEERRKEAEDRIRELREKLRDLERKVRRVVREMEERTRELEKRLEDILRRNDEENKRVEERLREIEKRPQDDELVKRLEDDLRRWEKESKEIVDRVKEEIDRVNRESKETLKELEKEAKRVLDELERDER

SEQ ID NO: 4697 - protein, 185 aa, Artificial Sequence; identical to SEQ ID NO: 4696
  Synthetic

SEQ ID NO: 4698 - protein, 185 aa, Artificial Sequence
  Synthetic
DVERTLDEMLKRSEDVTDEVREELKRALESNNKLIKEIVDTADKVLKDIEDTVRKIIEKKREDKDLVDDLRRLIEEVRRIVEKIKRDLKKLNDELEDRIRKIEEDLKRKNDEVRKMVETIKKKPESEKLVKEVEDRARKWLKDLRDKIERLREELEKVNRDTERILEKVERDLRRLLEEVRKRDR

SEQ ID NO: 4699 - protein, 185 aa, Artificial Sequence; identical to SEQ ID NO: 4698
  Synthetic

SEQ ID NO: 4700 - protein, 178 aa, Artificial Sequence
  Synthetic
DEVEKVLREIEEIIKELKKEVDKDLEELKRTIERLKKKADEVVKRNEEVIRTLREGNIDEEKLKEILKRLHDENKEILDRIRELLKKLSRDNEKKLDEIREMLERLERRARKILARTKIKEAADKLRELLKRLEEVVRRWKEAIEDINRKLEKVVRDIERLLRDLDRKAREVLERLRK

SEQ ID NO: 4701 - protein, 178 aa, Artificial Sequence; identical to SEQ ID NO: 4700
  Synthetic

SEQ ID NO: 4702 - protein, 178 aa, Artificial Sequence
  Synthetic
SSVEKVLRELDDLIRRNRDLVEEDRKELKRTSDENRERVERIVRKNEKAIRDLRRNNIDEKDLRKKLEELHRENKKFVERNAESSKKLSDDNKELVDRSREKLKRLADKIRDILRKERIKKAADDLKRVLDKLRKSHREWNELIKKANKENTEILREAEERLRELDRRLRKVLEDLRR

SEQ ID NO: 4703 - protein, 178 aa, Artificial Sequence; identical to SEQ ID NO: 4702
  Synthetic

SEQ ID NO: 4704 - protein, 180 aa, Artificial Sequence
  Synthetic
SEVERVLKELKELLDRLRELVEEILRRLEKIIKETKREIEESLRTLEEIIRRLEELAERVDEKKLREILKKLEDHIRRSREKLERSNKKLRELLERAEREMKKLIDTARRIVDEVRKQDLREDADRALRKVLEDIKEIVKKAKEDLERVYKKHKKLVDEVKKAHEDVLKKAREVLEEIRR

SEQ ID NO: 4705 - protein, 180 aa, Artificial Sequence; identical to SEQ ID NO: 4704
  Synthetic

SEQ ID NO: 4706 - protein, 180 aa, Artificial Sequence
  Synthetic
DEVEDVLRKIKEIIKRTEDKVRESLKTLKEIIRRTKEEVKKILKEIKELIERVEREARRVDRRELEKILKDLKKLVDDAVRKLKRSDEELERHIEESERDLERSNRELKRLIDDVKRRDARERAETKLRELYERHRKVIKEVRERHKEVHKRHRDVLEEIRRRLEKLLKDLEDVIREIER

SEQ ID NO: 4707 - protein, 180 aa, Artificial Sequence; identical to SEQ ID NO: 4706
  Synthetic

SEQ ID NO: 4708 - protein, 172 aa, Artificial Sequence
  Synthetic
DEEKDVVRRLKRNVEENTKNVERMVRELERNIRENTENAKEVITRLKKIIDELRRRELDRKLVRKILEDVRKLSEDHLRESERNLRRMEEESKRHIKESKENLEEVEREAERDVRDQEDVKRVRKLARESLERVRRLHREVLEKLKKSHDDVKRLHEEIDERAKRVVEEREK

SEQ ID NO: 4709 - protein, 172 aa, Artificial Sequence; identical to SEQ ID NO: 4708
  Synthetic

SEQ ID NO: 4710 - protein, 176 aa, Artificial Sequence
  Synthetic
DAEELLKEIERELKRSIEEARRLLEEVEKRLRKSKRDVEKLLKEVREKLEKVVREIPKDDRLEKVKEDLERILDTLRRRTEELERRVRELIERLERRNEETERRLKKLVDDVKDVKDRDVVRRLVEEARKLVEENTRENRDMIEKLRRLVKRHSEEVEEIIRRLDKLIDDVRREAE

SEQ ID NO: 4711 - protein, 176 aa, Artificial Sequence; identical to SEQ ID NO: 4710
  Synthetic

SEQ ID NO: 4712 - protein, 179 aa, Artificial Sequence
  Synthetic
SLEELLREVERRLRELNKKLEDMIREVEERLRKVIRETEKLIEDVKRELEKILEKARERVDEDTLRRLRKELEDAIRKVAEDVKRLEEENEKSVRELRKKLREIHERNRDTVRKLAELLETIDEKELEKEVRDDLRRTDEDIRRLLDEARKDVERHKEELKKLLEDAKRLLERVERTIR

SEQ ID NO: 4713 - protein, 179 aa, Artificial Sequence; identical to SEQ ID NO: 4712
  Synthetic

SEQ ID NO: 4714 - protein, 173 aa, Artificial Sequence
  Synthetic
RELEEVVKKVREEVKEHTEKVKRLVEEAEELNRRYEEEVKKLVTTAKRLNDEARKRNSKDETVVRELKRLNEELNRRSRKLVEELKKLNEELARKAEESKEELKRRLEDLARRMIDSKELLDEVAKLVEESLRRLDRLLEEIKRTSDELIEKNERLNRELNKTSDKVVEDMRR

SEQ ID NO: 4715 - protein, 173 aa, Artificial Sequence; identical to SEQ ID NO: 4714
  Synthetic

SEQ ID NO: 4716 - protein, 184 aa, Artificial Sequence
  Synthetic
SLEDLIREVEDRNRKSVEEVERLLEEVRRKLDESRKRLEELLKRVEEKLERVIEEAKRRLKNVKDVEERLKEVRKTLKRLKERLEERTDEVRRRLERLIEELRKRSKEHSERLRDRVEKVRDVKDEKVVEELAREMKKSVEEHTREVRRMVAELEKLVKRHTEEVERAVREAEKLVETLREELR

SEQ ID NO: 4717 - protein, 184 aa, Artificial Sequence; identical to SEQ ID NO: 4716
  Synthetic

SEQ ID NO: 4718 - protein, 184 aa, Artificial Sequence
  Synthetic
SLEDLIREVEKRNKESVDTARRLLDEVRKKLKDSIDRSRKLLEEVRRKLEEVIKDAKRKLKTDKDVEKELKDVTDTLEKLIRKLEEENERSRKRLEDLIKRLRDESRKHSDDLRRKVEDARKVSDERVVEEIMRRLEKSVERHTEEVKRVVREAEELVKDNTRKVEELVRRAEKLVEDLERRTR

SEQ ID NO: 4719 - protein, 184 aa, Artificial Sequence; identical to SEQ ID NO: 4718
  Synthetic

SEQ ID NO: 4720 - protein, 184 aa, Artificial Sequence
  Synthetic
SLEELIREVEERLRKSVDDSRKLLEEVKRKLEDSKREVDRLIEEVKRELERVIEDVTRKLKDVKEVRRRLDEVRRELEERAERVRRENERTDRELDELIKRLEEINRETEERLRELAREIRRVKDEKVVKELADEMRKLVRTNTEIVKDVVKKLDELVERNTRTNRDVVRRARELVEELERRER

SEQ ID NO: 4721 - protein, 184 aa, Artificial Sequence; identical to SEQ ID NO: 4720
  Synthetic

SEQ ID NO: 4722 - protein, 172 aa, Artificial Sequence
  Synthetic
RELERVVEEARRLVEEHTEEIERSADKARKLNEEHSRRVDEIFERLERLIREAEKKNSKDDKVIEDLKRKLEDITEKVKKSIDEMRKLTKDINDENRESIKRLRDEIRKIEKDVRNRELLEEIRKLVEESVERVKRLNEDVNRTSKESVKRLEDLVDEIRKRVEEVVRRLKK

SEQ ID NO: 4723 - protein, 172 aa, Artificial Sequence; identical to SEQ ID NO: 4722
  Synthetic

SEQ ID NO: 4724 - protein, 172 aa, Artificial Sequence
  Synthetic
SELERVAEEAERIVREAEEKIKKSVTELKELVKRHSERVKRIFKELEELLRRLREKNSKDDRVIKRAEEELRRIEEELRRSLEELKRRLEEINKENEKLIKELRDRIRKIEEEVRNEDLLREVRKKVEEVVKKIKRLNEEVNRDVKRSAEELKRLIDDIRRILKKVIDDLKT

SEQ ID NO: 4725 - protein, 172 aa, Artificial Sequence; identical to SEQ ID NO: 4724
  Synthetic

SEQ ID NO: 4726 - protein, 172 aa, Artificial Sequence
  Synthetic
DEMEEVVKRAEEIVKEARERIEESFRRLREENKEALERLKRIAEEMRRLLKEVLERNSKDRRVIKELKDLLDEIRKRVEDEIRELRKRTETINDENRKLIETLKRILEDIKRKLRNEELLRRVEKEVRRVEEEIRRLNKEVNETSDRVEREAEKLVRELEEAVRKVVEDLER

SEQ ID NO: 4727 - protein, 172 aa, Artificial Sequence; identical to SEQ ID NO: 4726
  Synthetic

SEQ ID NO: 4728 - protein, 181 aa, Artificial Sequence
  Synthetic
DLEEVIKEARKRLEDSHRRLEKLIREVEKEHEDSHRKLRELVERVKKKHKEVEEKIKRNGVSEKDLKRIEDNIRKSEKELRDALKRHKENVDRSRKKLEDILRRHRKKLEEVERKLEEMRRKGSPVEELLKDLERMVRELNEEIERALEDAKRNVDRLDDEIRKLEERVDRNVKRLEEDIK

SEQ ID NO: 4729 - protein, 181 aa, Artificial Sequence; identical to SEQ ID NO: 4728
  Synthetic

SEQ ID NO: 4730 - protein, 181 aa, Artificial Sequence
  Synthetic
SLEDVAREAKKRLEDLKKKITDLIREARRKHKESHDRLRELVEKIKEDLKRVLKKLEDDGSSREKLERLKRKVDELARELEEVLKRHKENVDRSDEELKRVLKRIEEEIKRLEDELEEVKKDGSDVREVKEKLRRTVEALDERIDKLRKELDENVRRLDKEIEDMVRKAKKVVDELREEIR

SEQ ID NO: 4731 - protein, 181 aa, Artificial Sequence; identical to SEQ ID NO: 4730
  Synthetic

SEQ ID NO: 4732 - protein, 181 aa, Artificial Sequence
  Synthetic
DLDEVVKEVDRRLEESHERLRRLIKKVDEDHRRSHEDLKRVIDEARRLLEEVLERLRRNGKEEETLERLKRTVEKVEEELKRVLDRHEENVRRSRKELEDVLRRHKEKLDELKKKLEEVRRRGMPVEEVLKEVKKAVEKLNEDIDRLFEKARENVKRLDEDIKRLLEELRRKVKKAEDEIR

SEQ ID NO: 4733 - protein, 181 aa, Artificial Sequence; identical to SEQ ID NO: 4732
  Synthetic

SEQ ID NO: 4734 - protein, 181 aa, Artificial Sequence
  Synthetic
DLERVVEEVKKLLRDSHEEHKKVVKEVKERLDRSHKESKRVSDEVRKKLEEVLKELEDRGVSEDLLRRLEKTVRDIEDENREVNERHERKLREVERELKESNDRHEKMVRDLREELKRIRKDGKDVEKVLRDVRRVVTELNKHIEDLKRKVTEDVERLNTEIKELKKRNDEAVRRAREEIK

SEQ ID NO: 4735 - protein, 181 aa, Artificial Sequence; identical to SEQ ID NO: 4734
  Synthetic

SEQ ID NO: 4736 - protein, 174 aa, Artificial Sequence
  Synthetic
KEDEDLDRDVKRHIEETEKRVKEVEKRHKDEIRKVREDVKDVERRHKEKIDDVRRKLRDGRLSEEVIKDLERDLRRSKDEVRRRVEEARRKLKESDEEIKRTVRENEEKLRELRERGLPEEILRKLRKRTEEIKREAERIHDRTREEIEKIKRDLDEIHKRTREVIKELEERSR

SEQ ID NO: 4737 - protein, 174 aa, Artificial Sequence; identical to SEQ ID NO: 4736
  Synthetic

SEQ ID NO: 4738 - protein, 174 aa, Artificial Sequence
  Synthetic
KKEEDIEREIRDHIRRTREKLEKLAKELRDDIRRLREELKRIEDEIREESKRLEDILRKGRLSEEVIEELKERIKTIERDVERLIKESEDELRRLKREIEETLRENEKKIKELAEEGLPEDILRRLREETEELRKEAERLLREYKRLTEELARELRELVKKLEEEVRDLERRSR

SEQ ID NO: 4739 - protein, 174 aa, Artificial Sequence; identical to SEQ ID NO: 4738
  Synthetic

SEQ ID NO: 4740 - protein, 174 aa, Artificial Sequence
  Synthetic
SEEERIEEDIRRHIKRTRDRLDELRRRLEEDIKRLRERVEDLKRDLERNIRELRDRLRRGRLSEKVVRDSREKLERLREEMEREVKESRDRLREVKEEIEDLIRRNKEKLDRLRERGLPEEILRRMERLTRELAKDADRLLKKYRKLTEDLKRELEKILKTYRDLTEELKERSR

SEQ ID NO: 4741 - protein, 174 aa, Artificial Sequence; identical to SEQ ID NO: 4740
  Synthetic

SEQ ID NO: 4742 - protein, 182 aa, Artificial Sequence
  Synthetic
SELDELRKRIEEAAKELKKRLEDHKRRLEEAEERFERDLERIHRRSREVVRDLKERPLEEEEIKKRVKEVREEYDRVREELKRKIEELRRRNDKTRRELEEDVRRLEEELRDAKRKVNSEDRILREVEDIVRKLKEILKEVRDRLRELSKRLEDRLKEVEDKLDKDVKDVEEELRRILEERK

SEQ ID NO: 4743 - protein, 182 aa, Artificial Sequence; identical to SEQ ID NO: 4742
  Synthetic

SEQ ID NO: 4744 - protein, 182 aa, Artificial Sequence
  Synthetic
SRLEKAEEDIKRYIEEHKRRSEETLKELTDKAREITRRLDESLKTVEDTSREIKKDVEDRGNDKDTMEKVKEDYKRLVRRLEELIEEMIREADKSVKDLERETEESKRKIEEEAEKLREESDDEDLRRVIKRIRELLERLEREDRRIIEEIKKLLDRLKKKVEDIIERIERSLKRLEEELRR

SEQ ID NO: 4745 - protein, 182 aa, Artificial Sequence; identical to SEQ ID NO: 4744
  Synthetic

SEQ ID NO: 4746 - protein, 178 aa, Artificial Sequence
  Synthetic
SEEELLRKLEEISRRVTRALEKLLEDHERLSREVAERLEDLLRRHKKLLEELIKLAEERVSDKDKVRELKERLRKNLDDLREHVRRDKERNEKNIEDLERHIRRDKKENEEALDDVRKTKQPEEELDERIRRLKDKNKKNLDDLREHSKEVLERNKENLDELRKHSKKVLDEARKELK

SEQ ID NO: 4747 - protein, 178 aa, Artificial Sequence; identical to SEQ ID NO: 4746
  Synthetic

SEQ ID NO: 4748 - protein, 174 aa, Artificial Sequence
  Synthetic
DEKERAKEEVKKLRDDAEKTDRDLEKEVEDTARELKETLERLRREVERLEEELERISRRGNKDDETLKRIKEKLEKLKKKAKDDNDRLEERIRRKREELKKHLDDLRKTLDELRRRVRDKDLTEELKRVLDDHERTLRKIEEDLRRILEEHKKETKKITEELERILEKMRKDEE

SEQ ID NO: 4749 - protein, 174 aa, Artificial Sequence; identical to SEQ ID NO: 4748
  Synthetic

SEQ ID NO: 4750 - protein, 171 aa, Artificial Sequence
  Synthetic
STKEELLERAKEIIKRLEELLRRNNRTLREILKDLKKRLEESNREIKRLIDEVTRNGLDRKLVEKLREALEKHDEDVKRLLEELERIIRTHEKKAEELLKRLKDEIEKLAREERDDEDLRRELERLKEEVDRAHKESEEIVKKLEKRIRDAIRRSKKRVDELEKELREAEK

SEQ ID NO: 4751 - protein, 171 aa, Artificial Sequence; identical to SEQ ID NO: 4750
  Synthetic

SEQ ID NO: 4752 - protein, 173 aa, Artificial Sequence
  Synthetic
SEKEEVDETLRRLEEEHERVVRDAKRRLEEDHEKLRRVIRDSDRINDEINKKAEEDRLEEELLKRLRDKSKKLREDLEDLLRRHKEKLDRIDEELKEDHKRLKEEAKRLRERLDELDAEELKRILDETRERIRESMEEIKRKLEESRRESEDIRRKLKEDNDRLKKELDDRAK

SEQ ID NO: 4753 - protein, 173 aa, Artificial Sequence; identical to SEQ ID NO: 4752
  Synthetic

SEQ ID NO: 4754 - protein, 182 aa, Artificial Sequence
  Synthetic
SSEEEIRETVKRLKEIVKKHKKDVDEIAEELRRIVEELRRRNEEEIKKIRKILRELEEKRSGDRRKIKELVDRMKKRLDDHKKTLEEIKRKAKEELEKSKKRTDEIVEELRRRLRELEKKGVDEKLVRELERIVEEIKEELEKSDRELEKIIREIAKRLEEIHEETERAVREVKKRLDEVAK

SEQ ID NO: 4755 - protein, 182 aa, Artificial Sequence; identical to SEQ ID NO: 4754
  Synthetic

SEQ ID NO: 4756 - protein, 175 aa, Artificial Sequence
  Synthetic
SEEEKLLERLERTVERLEREARRLLEKSKEKLKRLEDSSRELLDKLRKEVERLRREERDREELKTELERLKREIEKYVEEMKEELKKHKKESRDFVERLKKELEELKEEIERSNVPEDFLRELEKLLEEIKRKIEEARERLERSNKELEDVIRDSERRLRKLLKEIEEVIRRKAT

SEQ ID NO: 4757 - protein, 175 aa, Artificial Sequence; identical to SEQ ID NO: 4756
  Synthetic

SEQ ID NO: 4758 - protein, 175 aa, Artificial Sequence
  Synthetic
SEIERLLERLKKALEEIKRSSERLIRKLEEVLRDLEREVRKLLEDSRRTLERIRKEDKSDEELKRELDEHKDRTRKAERRLEEKLKTLAEEIKEYTRRLEEDLKRLREEIRRANVPRDAVEELERLLKEIEKTIEESRRRLEELLERIERLIRKVIEELRRSNEELERVIREKSK

SEQ ID NO: 4759 - protein, 175 aa, Artificial Sequence; identical to SEQ ID NO: 4758
  Synthetic

SEQ ID NO: 4760 - protein, 183 aa, Artificial Sequence
  Synthetic
KVEKRLRELVERIRESHERVLREVERLVEEHRETLKRILDRIREILKRIEEDIESIRRRVDERKEKKLRERLKRLEDELRKIEKRIRDSLEEVRKKLEELVRKLRKNLEEIKRRLEELKRTKLDEEVVREELERLERNIKESRDDIRRALKELKDTNEKAKEELERKLEELDRDLKRLREEAR

SEQ ID NO: 4761 - protein, 183 aa, Artificial Sequence; identical to SEQ ID NO: 4760
  Synthetic

SEQ ID NO: 4762 - protein, 179 aa, Artificial Sequence
  Synthetic
SEVEDELRKSRKEIEDLAREAERELEEIKRHIERSERKAKEDIDRIEREIEELDKLRKENSSSEKTLDDDLERLKRKIEKIKREMEKSLRELEKRIREIVEKMRRTLDRHREKLEDLRRRGIDEKALRKSHKELEDLVREVEKKLRELLERYRKRIEEVAKKLDDLLDKLREVVDRAKK

SEQ ID NO: 4763 - protein, 179 aa, Artificial Sequence; identical to SEQ ID NO: 4762
  Synthetic

SEQ ID NO: 4764 - protein, 179 aa, Artificial Sequence
  Synthetic
SEVERELKRIKDEIRELAREAREDLERIKEHIKRSKERVEEELRRSEEEIKEIERLARERRVSEKTLDDRLRDHRRKVKKIVDDLRKSIEDLRKEIEDIVRKLKEDLDRLREEIDRLRKRGISKDDLDRLLEELERVVREVKKRLRKLLEDYKELVDRVRKKLEDSHRRLKELAERTKK

SEQ ID NO: 4765 - protein, 179 aa, Artificial Sequence; identical to SEQ ID NO: 4764
  Synthetic

SEQ ID NO: 4766 - protein, 186 aa, Artificial Sequence
  Synthetic
DVERELDRIHREHEELLRDIEKKLREILREHEELLKRIKEELDEILERLRKLVEDVKREKPDIKDLMKKLDDKLREVEERLRRIKEKLEEHHKEAEKLVEEIKRKLDDHNRRLKEKLKRVKDRGKVDEEEVRDILRRLKEEIDRSRREAEEILRRLKKEIEDTKREVDETKKDLKRTLDEIREEAK

SEQ ID NO: 4767 - protein, 186 aa, Artificial Sequence; identical to SEQ ID NO: 4766
  Synthetic

SEQ ID NO: 4768 - protein, 186 aa, Artificial Sequence
  Synthetic
SEVEEEVERIDRNIDRLRKEVEDNIRRSEEEIKRIKEEVEKNLEDLRREIDRIRELVEANKQSEDDLERVLKRLKDHLEKSKRDLERKLRRHEEHVRRSAEELEKDNRKNKRRVEEILRKLKDSEDMERMKRKLKELLDKHKKLVDDAKKKHDDSNRKLERLIREATKEHKKALEDLKKLIDDSRR

SEQ ID NO: 4769 - protein, 186 aa, Artificial Sequence; identical to SEQ ID NO: 4768
  Synthetic

SEQ ID NO: 4770 - protein, 183 aa, Artificial Sequence
  Synthetic
KDTEEAEERWKAKDKKLEDDVRENLKRLREEITRLEKEVKDNVRRIKELIDKLRRDVEREGTDDETLKEVEKRLRDNIEESRKRLEEMLKKIEDNIRKSKKKLDDYKRELEKELREMERRVKDLEEAKDSLRKLKKHSDDTVRRVKEEHERVLKEAKELLDKVEKEHRRLLEELERLLREARK

SEQ ID NO: 4771 - protein, 183 aa, Artificial Sequence; identical to SEQ ID NO: 4770
  Synthetic

SEQ ID NO: 4772 - protein, 183 aa, Artificial Sequence
  Synthetic
SEEDKERKKWERRDEELRKRVERNEREWERADKELEEEVKREVERIRREIEELRRRVEKDGTDDKELRDLLRRLEEELRKLDERLKEYLRRLEENLKRSDEELKEYLRDLEEKLRRIEEKVKDLDEARKELERLLEHSRKLLEDVRRSHEELVKHSKERADRIRETLKKLLDDLRKLLEDARK

SEQ ID NO: 4773 - protein, 183 aa, Artificial Sequence; identical to SEQ ID NO: 4772
  Synthetic

SEQ ID NO: 4774 - protein, 183 aa, Artificial Sequence
  Synthetic
SDIERRKEEWKREDEKLEKRSRKNVEDWERRDEELKRRSEENVRRIKEMIERLEDRVRRDGKDEDELRRVEEELRKNLEENDKRLKEYLDRLRKNLEKNRRDLEEYLKRLEEELREAEERVKDLEEARKELEKLLRNSKRLVDESERRLRELERHSRELLKRSRRELERLMKELEDLAREIRR

SEQ ID NO: 4775 - protein, 183 aa, Artificial Sequence; identical to SEQ ID NO: 4774
  Synthetic

SEQ ID NO: 4776 - protein, 183 aa, Artificial Sequence
  Synthetic
RESEKIKEDMDRSNEKHNKEVEETLKRLEEELKRLEDEVRDAKRELDELLERLERRARDGDRSEELLDRDLKDVLKKLEEKVRKIEEDLKKFKDDLRKIIEKLVTDSKRHHDELKKEIDRRTRTKELEDLARDVAKKNKESVDRVKKELKRVDEEVKRLLDEVKKDLDKVREDLKRVIDEIRR

SEQ ID NO: 4777 - protein, 183 aa, Artificial Sequence; identical to SEQ ID NO: 4776
  Synthetic

SEQ ID NO: 4778 - protein, 177 aa, Artificial Sequence
  Synthetic
SEVEKVITEVEELVREYRKRLEDKRREAKKRVDEYEERLKRMEDEVRKLLEEIERRIRKDGGASEKTEDEIRRLLEELKRRVEKLIEETKRLNEEIDDESRREMEELRERLEEIADKSISSKDALRRAEEKLKKLIKENKEINDEINERSKELNERSKEVLKKIEEDLRRLIEEVRR

SEQ ID NO: 4779 - protein, 177 aa, Artificial Sequence; identical to SEQ ID NO: 4778
  Synthetic

SEQ ID NO: 4780 - protein, 178 aa, Artificial Sequence
  Synthetic
SREDLVREVRERLKKLLKHSAELIKRVKEELEELLRHSEENVREVKKRLDEIKEEAKKRGKSEDALKKLDEKLRKVTRKSKEYLDDLRRRVEEVERKLKEYLDRLREEVKKVEERLEKSRRPIEDERRAVEETEERWRRKDDTVRKEVEEEKEKWRREDEKHHRDVERALRKLKRDIE

SEQ ID NO: 4781 - protein, 178 aa, Artificial Sequence; identical to SEQ ID NO: 4780
  Synthetic

SEQ ID NO: 4782 - protein, 178 aa, Artificial Sequence
  Synthetic
DEDELVREAKDRLDKLLEHSRKNVEEAEKRLRDLLEHSKKNVEEAERLLEEIEEEARRSGKSKEVLDRLRKKARDLKEESKDYLRKLEEEVRRIVRKSEEYLKRLKDRVDEVKERLDKGRRPLEEVRKEVKKEIDDWRARDEEHHRDVKRREEEWERKDEEHHRKVEEVIERLKRELK

SEQ ID NO: 4783 - protein, 178 aa, Artificial Sequence; identical to SEQ ID NO: 4782
  Synthetic

SEQ ID NO: 4784 - protein, 177 aa, Artificial Sequence
  Synthetic
SVEELIKEVEERLKRLKEHSEDLAREVRERHKKLIEELRRILEEVKKRHKDLTEKLEKDGGSEELLDRIRRNVEKSKRELERVLREAEKNLERSDEELKEYLDRLRKRLERVREELKREPADEEMKKRVEEEEKKWKRDDERLEKRVRENIERLRRLLERLRKRVEDNIKRLDDERR

SEQ ID NO: 4785 - protein, 177 aa, Artificial Sequence; identical to SEQ ID NO: 4784
  Synthetic

SEQ ID NO: 4786 - protein, 177 aa, Artificial Sequence
  Synthetic
REEDLIREVERILEELLKHSKRLIDEARDSHRRLLEHSKRLVEEVERLHKELLDRARENGGSEELLTRIKKNIDESRKELKEYEDDLRRNLRESDERLRRYLDDLRREKKEVEDELRRRKADDRMREEVRKTEERWRDKDRELEKRVRDNERRWEDRDRKLEKRVRDNIKRLRDELE

SEQ ID NO: 4787 - protein, 177 aa, Artificial Sequence; identical to SEQ ID NO: 4786
  Synthetic

SEQ ID NO: 4788 - protein, 177 aa, Artificial Sequence
  Synthetic
KAEELVEKVRRDLEALLEHSKTLAEKVRRDHRKLKEELKELLERVKRRLEELKKRLEDSGGDEKKLRELERRLKEVEKELRKVLEDIDRNLRRSDEELKKYLEDLRERLKRVEDELRREPADDELRKKVDEDRRRWEEDDRRLEKRVRENLRRLEKIIKDLEDRVRREVEKIDKDRK

SEQ ID NO: 4789 - protein, 177 aa, Artificial Sequence; identical to SEQ ID NO: 4788
  Synthetic

SEQ ID NO: 4790 - protein, 177 aa, Artificial Sequence
  Synthetic
DREKLIEEVKDRLRRLLKHSRELLKEAEDRHRELLKHSERLVRESERRLEELLRRARKSGGSEELLKRIEENVRDNKRRLDKYKEELRRNLKASKEELDRYEEELRRRLKEVEDELDKKEADDEVRKEVKKDEDDWRKADDDLRKRVEDNVRRWEERDRELKERSERNLEKLERERK

SEQ ID NO: 4791 - protein, 177 aa, Artificial Sequence; identical to SEQ ID NO: 4790
  Synthetic

SEQ ID NO: 4792 - protein, 177 aa, Artificial Sequence
  Synthetic
SREDLVRRVDKALRDLTRHSEELMRRSDETLKELLKHSRRLAKESEDRLKELLDEARERGGSEELLKRIKENVDKNKEELEKYIRDLERNLKENRERLKKYEDELREELRRVKRRLEEEEADERLEEKVRREEEEWKKKDEELKKRSEKNVDEWRKRDDKLRRDSKRNLDKLREEIR

SEQ ID NO: 4793 - protein, 177 aa, Artificial Sequence; identical to SEQ ID NO: 4792
  Synthetic

SEQ ID NO: 4794 - protein, 180 aa, Artificial Sequence
  Synthetic
SLVDEIRERVRRLDEDVRRLIEEIEKRIREIDKRAEDLIRKIEDDSRRTLEEVAKQPRDEEVLERVERIARDSLRLLEEVIEEVRRIAEKTRRDLTRVIEEVKRTVTDSIRKLEEVIERVKVEELEKVVEENERSLRELVKTLEDVLRKNDKTVKELEKRLREVLDRTRRFMEELIRRAR

SEQ ID NO: 4795 - protein, 180 aa, Artificial Sequence; identical to SEQ ID NO: 4794
  Synthetic

SEQ ID NO: 4796 - protein, 180 aa, Artificial Sequence
  Synthetic
SLKDKIREDSERTLKTVERLLREIEKEIRKLDRDIERLIEEIRRRIEKLDKDIERQPRDDEVLKRVEDIVKKTRELIERVIEEVEEILRETKELLDTVLKEVERIIRESERRLREVIERVKVEELEKVLKDTRDEAERLKEEVRRVLEDNDRTAKELRKTLEEVLKRNEESARELKKRIT

SEQ ID NO: 4797 - protein, 180 aa, Artificial Sequence; identical to SEQ ID NO: 4796
  Synthetic

SEQ ID NO: 4798 - protein, 170 aa, Artificial Sequence
  Synthetic
DEERRVEEELREVDKRLKKLLEESKRKLDEVIRRVREVVKKLKKRLDDVNRLVARDVKSEELERLLRESSEEVKEVIKKLKRLLEKVLREDEKSVDEIRREAEEVLKRVRDAGIDEKILRTVEKLVRDIERELRETNKRVREDVEKIIEDLKRILEENDKRADDWRRADK

SEQ ID NO: 4799 - protein, 170 aa, Artificial Sequence; identical to SEQ ID NO: 4798
  Synthetic

SEQ ID NO: 4800 - protein, 170 aa, Artificial Sequence
  Synthetic
DESEEVARELEKVDRDVDKLVKDSRKELEDSNREVEELLRRSTERLKEVNTLVARDVRGEELEELLERLDRENEETIRRVEELLRRSLKKNEETLERLERLAKELLERLKRAGVDEKLVREVERRVEDIKRKAEKTLDDNRKLIEEWVRRLEKSLEDNRRLAKKWKDEDK

SEQ ID NO: 4801 - protein, 170 aa, Artificial Sequence; identical to SEQ ID NO: 4800
  Synthetic

SEQ ID NO: 4802 - protein, 178 aa, Artificial Sequence
  Synthetic
SELDELKKEVDDVAREVRRHNKKLEEEVEREVRRMRRHNEENVKRVEESAKEARKDVDREELLRRLEKLVEELRKLNEESLRKVEKLAEEIADVLRRSKKAVDEVVREIARLLEEVKRRNEDLREVKKLVEEVTRRLERINKELERLIREVRKRMERVNDELHKRNRDVERKLREVVR

SEQ ID NO: 4803 - protein, 178 aa, Artificial Sequence; identical to SEQ ID NO: 4802
  Synthetic

SEQ ID NO: 4804 - protein, 171 aa, Artificial Sequence
  Synthetic
SELEALEEDVKRVVKEIKDHNEKLIRELEETIRRIDRHNDENIRRTEEEIKRVLDKKPDVKEIEEVLKLAKEVNKRSKEEVKKVAEEVKRVLDESRKRVDRIVEEAKRVLERGLPEEDLRRLLEKLKEDLRKVNEDLERLLREAKRRLERVNEKLHELSRRIREKLEEVDR

SEQ ID NO: 4805 - protein, 171 aa, Artificial Sequence; identical to SEQ ID NO: 4804
  Synthetic

SEQ ID NO: 4806 - protein, 171 aa, Artificial Sequence
  Synthetic
SELEKLVEKIKERVERARRHNERLREDVERVLTESDKENKDLIDDARRAVKEVLDRKPDVREIEKLIREIEEVLKESKRLVKEIADELRKVLDDSKRLVDEIEEKVKRVADRGLPEEELDRLIREIIKELEDVNRTLRKLLEEIKRRSKDVNRDLRRLLEEIKEKLRRKSK

SEQ ID NO: 4807 - protein, 171 aa, Artificial Sequence; identical to SEQ ID NO: 4806
  Synthetic

SEQ ID NO: 4808 - protein, 184 aa, Artificial Sequence
  Synthetic
SEIDELKKDVERRVREVEETNRRLEKEVRERLERSRKHLKELIEDARREVERVEREVKEDEVLRLLRELARELEEMLKRVEDESRRVAKELERVIKESEERIKEVVKELKDVLDEVRRLMKEDDKKKVLDELKKVIKEVEDRLRKIDEELKKVIDEVRKELEKINRDLERVIREVKKRAEEVRR

SEQ ID NO: 4809 - protein, 184 aa, Artificial Sequence; identical to SEQ ID NO: 4808
  Synthetic

SEQ ID NO: 4810 - protein, 184 aa, Artificial Sequence
  Synthetic
REIEELAKTVRKEVDDSRKHLKELREDAKRTLDEVKRETKKLEEDVRREVERVKREVKEDRVLEELEKLVEELKTVLERIKRKDEESARRLEEVLKRIKEESDRVVRELERVLRDVRRLVEEDDKEKVLRELKKVIDEVRKLLEDINRELEEAIRDVKRKNEDTLRELRKVIKEVEKRLKDVTR

SEQ ID NO: 4811 - protein, 184 aa, Artificial Sequence; identical to SEQ ID NO: 4810
  Synthetic

SEQ ID NO: 4812 - protein, 173 aa, Artificial Sequence
  Synthetic
KEVEDVVRELKKSLEENEKRVRDIERELREVVKKIAKRVEETREEVERMLEEIRRRSGEDEIVKEITEVVETVVRLDRESLEELKRVVDRIVELLKKNVEDLKRAIEEVERLLREDDIKKVVDEARKVLKEVHENTERIVDEARKLLKRMEEKNRKTEEDIRRVADEVREKAR

SEQ ID NO: 4813 - protein, 173 aa, Artificial Sequence; identical to SEQ ID NO: 4812
  Synthetic

SEQ ID NO: 4814 - protein, 173 aa, Artificial Sequence
  Synthetic
SKVDKVREEVTRSLEDNKRKVEEIEREARESLERNRKKVEDSIREARKVVEEIERKKGQDRIVEEVRRVVEENERRLRENVRELRKVLEDIRRLLKRNVDELERVVREVRDLLEKEDIDTVTRRIREVMKKVHDNTRRIAEELRRLMKRVHDNTERSHEELKRLLEEVKRKAD

SEQ ID NO: 4815 - protein, 173 aa, Artificial Sequence; identical to SEQ ID NO: 4814
  Synthetic

SEQ ID NO: 4816 - protein, 173 aa, Artificial Sequence
  Synthetic
REVEEVVKELKKSLDDNRDEVRKIIEEVTRLNKRNEEDVKRVTDEAEEVVKRIVEKKGDDEIVRKVREVVREIKERLDRVVEENKKVVDEVVKYLKENVEDLERVVRTVKELLRRDDIRKVVEEARRLLERVHRNTKRVADEIRKLDKRSSELLDKILKDLRKLLEDVEREAR

SEQ ID NO: 4817 - protein, 173 aa, Artificial Sequence; identical to SEQ ID NO: 4816
  Synthetic

SEQ ID NO: 4818 - protein, 181 aa, Artificial Sequence
  Synthetic
DEKDEVRRRVDRELEDVHRETKKSSDDDKRLLEDVHRKLKESEKEVRRIADEVRKKLEDVRRREDLERVARELLRELEEVVKENHKSVRKSLEDIERSARTNRDIVEKTLERIERVLEEIARRIKVREVLEKIKRSLDENKERVEKSKKDSDDSLRENKDRVDKTDEEAKEMIKDLKRKTD

SEQ ID NO: 4819 - protein, 181 aa, Artificial Sequence; identical to SEQ ID NO: 4818
  Synthetic

SEQ ID NO: 4820 - protein, 181 aa, Artificial Sequence
  Synthetic
DEKEKVTREVRRILEEVDKRLEESRERVERIAEEVHRRTEESHRRDEEVVERVKEELKEARRDSRLKDVVRELLRKVEKSARDNKRIVDTTLKLIERVIRENHKSVTKLLRELEDVIRRLKEEINVREVLEELKRELRRLEEDVRRTDRKLEESLKDNERKVRRSKEESDRLLRELEERTR

SEQ ID NO: 4821 - protein, 181 aa, Artificial Sequence; identical to SEQ ID NO: 4820
  Synthetic

SEQ ID NO: 4822 - protein, 181 aa, Artificial Sequence
  Synthetic
KEVEDVRRRVEKILEEVHKKTREVTERVRRILEEVHRKTEESHRRDEEVMRRVRDELEKARRREDLERVVRELTKRVEDSLRENEKIVERTLEEIEKVLDELRKIAEDTLRLIAEVLRRAKEEINVREVIEKVKESLRENERRARKVEKEIRDSLERNRERVEDSKRTSKKLIEDLREAVR

SEQ ID NO: 4823 - protein, 181 aa, Artificial Sequence; identical to SEQ ID NO: 4822
  Synthetic

SEQ ID NO: 4824 - protein, 181 aa, Artificial Sequence
  Synthetic
DEEKELVRELRDILKKVHKETKESSDTDREVLKRVHEDTERSHRDDERVVEEVKKELDKIRDREDLERVVRELLEIVKRSAEENKRIVEETLKEIERSARENERIVRETLDKIRKVIEELRRRVRVREVEDEVRRSLEDNRRRVEESKRRSDESLRRNKRKVERSKEESDRLLKELEDEVR

SEQ ID NO: 4825 - protein, 181 aa, Artificial Sequence; identical to SEQ ID NO: 4824
  Synthetic

SEQ ID NO: 4826 - protein, 175 aa, Artificial Sequence
  Synthetic
REVEEALKRNEAVVEESREAVERALRENETMVRESEKEAKRVKDENRKSIEELKRSNVSDRVERTLRETLKELEKVVEELKDIHRRTSERLKDVARKLKKIHDDTRKELEDFGDVPEEVLERVVRKLKELDDKSREDLEKVKKELRDVDTRSEELLREVEKRLREVDDRLRREEE

SEQ ID NO: 4827 - protein, 175 aa, Artificial Sequence; identical to SEQ ID NO: 4826
  Synthetic

SEQ ID NO: 4828 - protein, 175 aa, Artificial Sequence
  Synthetic
SEVEEVEKENKKMVEESERELEKLERENDKLLKESEDEARKVEEELKRVVEELDRSNVSEEIREELKKAIEKVKRVLDDVLRKHEETKKELKEVVKELREIHKRTSDELRKFGEVPEEVLREVVKDLRRVDKESKERLKRMADKLRDVDRELKEKLKRALEDLRRIVTELRERAR

SEQ ID NO: 4829 - protein, 175 aa, Artificial Sequence; identical to SEQ ID NO: 4828
  Synthetic

SEQ ID NO: 4830 - protein, 180 aa, Artificial Sequence
  Synthetic
DEVETVTRELEDTNRDIEKKVEEVERELRKTDREIREKVKRVEEELTRSDRELAEIVKKKNTEDRIVKEVVRLNEDIVRRLREVVKEVEELNKRAVERLREVVKKVKRLNREIVEELRRVRGEDVKRIVEKARKINEDVRREIEKITEEVRRINEEVDDRIRRIAEEARRINEKVKRRLT

SEQ ID NO: 4831 - protein, 180 aa, Artificial Sequence; identical to SEQ ID NO: 4830
  Synthetic

SEQ ID NO: 4832 - protein, 180 aa, Artificial Sequence
  Synthetic
KEVDDVAEELRRTNKEIKDRVKDVLRELEELLTDIEKTVRDVERELRESDERLEREVRRKNTSDDIVREVKELNKEIVERLKKVVEEVTRRLKKLVDEAEEVVKEVVDLNREILKELRDVRGEEVRRIVEKARKINTEVKKKIEEIEKTVRKILKEVRKIIKDIRDEARRINEEVRKKLE

SEQ ID NO: 4833 - protein, 180 aa, Artificial Sequence; identical to SEQ ID NO: 4832
  Synthetic

SEQ ID NO: 4834 - protein, 180 aa, Artificial Sequence
  Synthetic
KEVEDIVRELEEEVEKIRDHSRRVSEELDKSVKDNKRRVDEVKKTLEKSVRDIRRKVRDDSLREIVERLKEKVDRMVRRLEEITEELEDKVRKVVENSRRIVKEVEDKVREVVRELERIKDGEVLKDVARRAREMLEEVRRKDRENTERARRLLEEVHRRTEEVERRAREVLKKADEDVK

SEQ ID NO: 4835 - protein, 180 aa, Artificial Sequence; identical to SEQ ID NO: 4834
  Synthetic

SEQ ID NO: 4836 - protein, 185 aa, Artificial Sequence
  Synthetic
SELDELRKRVRDLDERLKESDDTLRKLVKELIERVKKSDTELERLVERVIEEIERVLRDRKDSSEEVRRLLDTLRKIIEENIKRSTDLAREVTRIIEENIKTSRRLAEDAERTLEEVIRRLKDKSVKDRLRELEEELRKRMKESDERNRDLRRRLEEMIKDSKRTNDELKKRVEKVAREAEEKLR

SEQ ID NO: 4837 - protein, 185 aa, Artificial Sequence; identical to SEQ ID NO: 4836
  Synthetic

SEQ ID NO: 4838 - protein, 185 aa, Artificial Sequence
  Synthetic
DELERLEEEVEEVRRRLEKSDDDLRKLVDEVERRLRESDKRLHDLSEEVIRRIEDVLRKNRELRERLRTLAEELERISEENMRRVERLLEELERIIEENIKKVEELAERLRRRVEDVVRRLKDKSVKDELRKLKEKIKKVADESRRRNEELRRKVDKVIKDSRETNKRNTEEVRKVAKDVDDTVK

SEQ ID NO: 4839 - protein, 185 aa, Artificial Sequence; identical to SEQ ID NO: 4838
  Synthetic

SEQ ID NO: 4840 - protein, 174 aa, Artificial Sequence
  Synthetic
SEEERIAKEAEDLVRRVKENNARTIKEAREVARKVEAETKKIHDDARKLVEDVKRKVERRGVEELLEELREMVERSKKLSEDNVRESRRVSKEVKERDTESLKRLRDLVREVIKKVDKVRELKERLERVIKEIEETIRRSARELDEVNRRNEKMVKENEDELRKVIEEIERRIR

SEQ ID NO: 4841 - protein, 174 aa, Artificial Sequence; identical to SEQ ID NO: 4840
  Synthetic

SEQ ID NO: 4842 - protein, 174 aa, Artificial Sequence
  Synthetic
DEEEEIKKELRRVAEDVKRETKRIHEEIRRVLKEVKERLKRVHDELRRVAREVKEKLKKRPVERILEELRKVVKDSEDLSRRILEEIRRVVEESRKRSEDNVRESRRVVEKVIRDVDKVRELTEEAKKLIKENEEEIERNEREARKVIEELERVVRTNKEDVKRVEKEIEDATR

SEQ ID NO: 4843 - protein, 174 aa, Artificial Sequence; identical to SEQ ID NO: 4842
  Synthetic

SEQ ID NO: 4844 - protein, 178 aa, Artificial Sequence
  Synthetic
KEVEEIAKEAEDVLRRLDETVKEIADEAREVLRRLNESSKRIEEEARKAIKELRDRAREKEEILREVVEKLKRVIEELKKTDEEVERKLREVIKRLKDTNDEVRKKLKEAIDRLREITDKDELRKILKEVRDVLEEVKRRNEDILRRLRKIAEEVKRRNDKIREELERVLKEAEDRLR

SEQ ID NO: 4845 - protein, 178 aa, Artificial Sequence; identical to SEQ ID NO: 4844
  Synthetic

SEQ ID NO: 4846 - protein, 177 aa, Artificial Sequence
  Synthetic
SRLEKIKDDVKRLDDDSRRTLEEVHRRNKETARRVERLLEEAHRLNKKTVDEARSKPNDEDVARRLREIVKESLKLSKDVLKEIKDILDKSLKDSEDVVRLNEDILRKIERTVDSVERSDEIRKIKTDVKEMVKKNREDVKRNNEDVKRVEDKLRKELKKNDDDVRRVLEELERRLR

SEQ ID NO: 4847 - protein, 177 aa, Artificial Sequence; identical to SEQ ID NO: 4846
  Synthetic

SEQ ID NO: 4848 - protein, 180 aa, Artificial Sequence
  Synthetic
SEIEEVTRRLEELVKTVREVLREAHERTRRLVEKVRKLIEDVIRTNRKIKERVRELLERVRSEELKRLVEEVAEEMKKSDKELRDRVRRVVEELRRVTEEVRRLVEEAAKELRRVVDELKPGDEIRKLRRRVEEVVRELEEELEKDRREVEKVIEELEREVDRSNEETRRVVKRLREEVE

SEQ ID NO: 4849 - protein, 180 aa, Artificial Sequence; identical to SEQ ID NO: 4848
  Synthetic

SEQ ID NO: 4850 - protein, 174 aa, Artificial Sequence
  Synthetic
REKEEVRRKLREAERRVEEIDRRLEKLIRDVKRRVEEADRESEETSDRVRKEVERVDRRGERFEDLLRIVRRVLEENKRRLDETLEDVRRVVEEVERLVEETLRTVEEVIKELERDGVDEEVKERLKKVLEDNRRSIDELRRRIEEVLKENKRTVEEDKKRLEKVLEDVERRAR

SEQ ID NO: 4851 - protein, 174 aa, Artificial Sequence; identical to SEQ ID NO: 4850
  Synthetic

SEQ ID NO: 4852 - protein, 173 aa, Artificial Sequence
  Synthetic
SDTEEVEKLTEEIVREVKRLDEEVKELIKEIRKESRRTLEEVRRLIEEVRDRVEKISDDEKVRRLLKKVIEEVEEIARRSLRLLKEVIDEVRRIVEESKELLRRVIREVEKRVDSKDLERLRRELEEVLKENADSIRKLETELRDVLRRTREEAEKLKEELKDVLRRVEEKAK

SEQ ID NO: 4853 - protein, 173 aa, Artificial Sequence; identical to SEQ ID NO: 4852
  Synthetic

SEQ ID NO: 4854 - protein, 179 aa, Artificial Sequence
  Synthetic
DEERKIREEAKRADDEIRRLLEENKRALDESNKRAEELVKRLADEVREALKRIEDLLRERPRKEMEDLLRDLKRVLEEIKEELKKVLEDNRRVSEESKRRLEKVVRELRELLKEIEDLVKKDDVKKVVERLRRLIKEVKKRLEKIHEDSRRMVEESEKLLKEIVRKLRELIKEVEDKVK

SEQ ID NO: 4855 - protein, 179 aa, Artificial Sequence; identical to SEQ ID NO: 4854
  Synthetic

SEQ ID NO: 4856 - protein, 179 aa, Artificial Sequence
  Synthetic
DEKEDLKRTAEESDREAKKLLDENRKRLEESNKKAEDLVRRNEETLRKVDTDIKDLLRKRDTERAKRLVEELERVVRESLRLLRELLERNRELSKESLKRLEEVVRRNHELLKRIEELIDRDDVKKVLDELRRLVEESKELLKRIHDESEKMVEDSERLLEEVHRRSREVVERVREKIR

SEQ ID NO: 4857 - protein, 179 aa, Artificial Sequence; identical to SEQ ID NO: 4856
  Synthetic

SEQ ID NO: 4858 - protein, 179 aa, Artificial Sequence
  Synthetic
SEKDRLSKRAAESDEELERLVRRNAEELDRSNKEIADLLKESKDTLKRAEDEIRRLLAERDTERAKKIVRELEERLKEVEKHDRRSLEENTDVTRKSKERAERVLRENHRVLREVRKLIDEDDVEKVLKELEDVVKKSKELLERIHKESKEMVERSKRNNEKSLEDVRRLIERVLEKLK

SEQ ID NO: 4859 - protein, 179 aa, Artificial Sequence; identical to SEQ ID NO: 4858
  Synthetic

SEQ ID NO: 4860 - protein, 179 aa, Artificial Sequence
  Synthetic
DEKRRLKEEAKKSDDELRKLVKDSADRLEDATRRIEELLRENAKRLEEAEKRIREELDKRKRERMEKLLEELRKVVTDSKEAARKVVDDLREMLKRVKEHDRRSLEENHRVLREVEKLIDEEDVEEVLRRLKDLVERSKENNKRSLEEVERLIKEVEERLKRIHDESEKVVRTVEERLK

SEQ ID NO: 4861 - protein, 179 aa, Artificial Sequence; identical to SEQ ID NO: 4860
  Synthetic

SEQ ID NO: 4862 - protein, 185 aa, Artificial Sequence
  Synthetic
REAEEIKKRLERVREEVEKELERIHRETDKIAKDVKRELDEIDKESKKVAEEIKKVAEEIKDKEELKRRVDEVTRELERLNEELERIVREVVRRLEALNERLEEIVRRVVETLRRLVEEVVRRTGRGSKVDELKRRVEEVKRDLERKVRENNETIKKVKEDLRREVERNHKTIEDIKRELDERVR

SEQ ID NO: 4863 - protein, 185 aa, Artificial Sequence; identical to SEQ ID NO: 4862
  Synthetic

SEQ ID NO: 4864 - protein, 185 aa, Artificial Sequence
  Synthetic
SEAEELLDRIRRVAEEVKRRLEEIHRTTRDIVRRIEELLKEIHERTREIVERIKRVLEKIKDKDTLREEVKRVVKELEKLNKELEDIVRRVTRELERLNEELERIVREVAEDLKRLLEEVRRRTGDGDKVKRLEEEIRKIKRELEKIVRDNNEDIKRAKERLRKINKRNHDEIKKVKDELDETVR

SEQ ID NO: 4865 - protein, 185 aa, Artificial Sequence; identical to SEQ ID NO: 4864
  Synthetic

SEQ ID NO: 4866 - protein, 185 aa, Artificial Sequence
  Synthetic
SEAEDLRRRIEEVARRVAEKLKKINRDTERIVRDVKKKLEEIHKRTEEVAEEVKEVLRRIKDKDTLRKVVEEVAEELRDLNRKLEEIIRRVADELRKLNEELKRIVDEVVDELRKLIKEVVDRTGPGDEVEELRKTIEDIRRRLEEEVRRNHDEIRKAEEELRELNRRNHERIKEIKEELDREVT

SEQ ID NO: 4867 - protein, 185 aa, Artificial Sequence; identical to SEQ ID NO: 4866
  Synthetic

SEQ ID NO: 4868 - protein, 183 aa, Artificial Sequence
  Synthetic
SEVEKIDKRAKEVEKELEESNRRNRERIKEADERLRDLLRRNKEEIDRARKRLDEIVRRDEKDEVREIVRELDERLKDMNARLKEIVEELRRLLKEINDEDRRIIEELKRLLKKILEDAARLTDKKRLKEVERRMEEIVKTVKKRSEDSHRESDEIVKRVLERLRKVHEETKEIVKRVEDRLR

SEQ ID NO: 4869 - protein, 183 aa, Artificial Sequence; identical to SEQ ID NO: 4868
  Synthetic

SEQ ID NO: 4870 - protein, 174 aa, Artificial Sequence
  Synthetic
EEAERIDKKLEDEVREVERELEDVHRKVKEILEDVKRKHKKVHDELKKVIDEVKRKLEERPDERIVRELKEKLRESNERLNRLTEKVKKELADSNKLLEDIVRRLKERLEEVIREVDKIKELEEKVRRIVRKLERRVEKNKDDTRRAVEEAEKLNEDNKRTSEKVEEDLRRTTT

SEQ ID NO: 4871 - protein, 174 aa, Artificial Sequence; identical to SEQ ID NO: 4870
  Synthetic

SEQ ID NO: 4872 - protein, 174 aa, Artificial Sequence
  Synthetic
SEAEEIVRELRKAVEDVAREHKRIHEEVRKAAEDVKRKLKEILDRLERVVEEVARALEERGNEEIVETLKRKLEEAIKRARDVLDELRRKLEESNKALNRLSETLEKKLEEVIRRVDKIDELREEAKEVVRDVRRLNEENRKATEDILRELKEIVERLERRAREVVKELKERAR

SEQ ID NO: 4873 - protein, 174 aa, Artificial Sequence; identical to SEQ ID NO: 4872
  Synthetic

SEQ ID NO: 4874 - protein, 174 aa, Artificial Sequence
  Synthetic
DEREEIRRRLREDVKRVKRRLEEIHDEVRRLLEEVDRRLRKVHKELKEEVTEVEKRLRERPDKRIVEELRRRLKESIERTRKILETVAKKLRDSNRKLEKVVKDLKKRLDDVIRAVSDVRELKKEIDDVRKELEETVERNKRETERALRKAKEDLDRNREEVKRVVDELEKRTR

SEQ ID NO: 4875 - protein, 174 aa, Artificial Sequence; identical to SEQ ID NO: 4874
  Synthetic

SEQ ID NO: 4876 - protein, 174 aa, Artificial Sequence
  Synthetic
SEKDEIRDELEKILRRVEELNRRIRKKLEEIRKEVERLLREIHEKLEEVVKEVEEKLRERPDSRIVKELKDKLRESIKETADVLRKLEKKLRDVIREIRKTNKEVEEKLRDVIRRVDKIEELKRRVEEVLKRARESLRELEEDVRRVLEEARKELERNRERVERVLRRLEETVR

SEQ ID NO: 4877 - protein, 174 aa, Artificial Sequence; identical to SEQ ID NO: 4876
  Synthetic

SEQ ID NO: 4878 - protein, 179 aa, Artificial Sequence
  Synthetic
DEVEDLERRLKEVVDRSRRLDEELKRRDKKSVEDVRRKLEEVRKKLEDVARKLADLLRQGRDAKRVLDEIERVVRDVERVLEEILRDVKRSIDEVREVAKASLKLTEEVIRRVRKVAKERGVPLEKLERDVARAREENDRTLKEISKHSEKVLREVADMARKLRKEVKRIEDEIRERAR

SEQ ID NO: 4879 - protein, 179 aa, Artificial Sequence; identical to SEQ ID NO: 4878
  Synthetic

SEQ ID NO: 4880 - protein, 184 aa, Artificial Sequence
  Synthetic
KLVEEVKREIEELVRRLEEVLDRVRRENERLAEELKKVVKDVEDNNERIARTVTELLKKVDSKELERLLRKVVEDSRKSVKDLEKLLREFVRRSEESVKRLEDELRKMVETVRRVVEKLERDGVPKEKVDELKRDVDRAEEKVRELIERIKRRSEEVKKRAEELLKKLEDDSRRVKKKLDDDAR

SEQ ID NO: 4881 - protein, 184 aa, Artificial Sequence; identical to SEQ ID NO: 4880
  Synthetic

SEQ ID NO: 4882 - protein, 184 aa, Artificial Sequence
  Synthetic
SEVDEVRKEIKRLADEAREVVKEVRKNNEKIADDSRKLNERSIRESKKVTDTVRELLKRVRSRELDRLVKEVVERSNEIVEESERLVREMNKRSDDSVEKLREVLERIVRELERVVEEAARAGVPEERVKELKERVDEVSKELRDLLKKLRDDSERVVEENEKLLRELKERSDRATKELDDASK

SEQ ID NO: 4883 - protein, 184 aa, Artificial Sequence; identical to SEQ ID NO: 4882
  Synthetic

SEQ ID NO: 4884 - protein, 184 aa, Artificial Sequence
  Synthetic
KKAEKVDKEIEDLAREVREVLKEVEKDSDRLVKEVEDVLRRVKENNEDIRRRVSELDRRVRSEELRRLVKEVVDRSDESVRRLEELLKRAVKRSDDVVKKLEDELREIVKELRRVVEELERAGVPEESVERLRRKVKEIEDELRELLERLRKKSEDAKRKLRELLERIKRDSERAKRELEERDK

SEQ ID NO: 4885 - protein, 184 aa, Artificial Sequence; identical to SEQ ID NO: 4884
  Synthetic

SEQ ID NO: 4886 - protein, 184 aa, Artificial Sequence
  Synthetic
DTAREVKRKVKEIADEVRELIRRVHEETKKTSETVKKLIKEVHDTTEKIVREVRKLADEVDSEELERLVREAVRRLEETNRRLRELVERVVRENEKSSDELRKRVEEVVRRLRKVVKELDDAGVDKKLVEELKREVDRISEELKRLLERNEREVRESKKTLERDLERNHEEIERAKRELDERVR

SEQ ID NO: 4887 - protein, 184 aa, Artificial Sequence; identical to SEQ ID NO: 4886
  Synthetic

SEQ ID NO: 4888 - protein, 184 aa, Artificial Sequence
  Synthetic
REVDEVRKRVEKVAEEVRRLIEKVHRETERTSREVEKRIRDVHRRSDEVAREVDDLSRRVDSKELKELVEDVARRLEEINRRLEKLVKEAVDTNRESSERLRKLVREAVEKLKKIVEELDRRGVDKKMVRTLAERVKEISEELKRRLKRNKDEVEESSRRLRELLKRNHDEIRRIKEKLKEETR

SEQ ID NO: 4889 - protein, 184 aa, Artificial Sequence; identical to SEQ ID NO: 4888
  Synthetic

SEQ ID NO: 4890 - protein, 178 aa, Artificial Sequence
  Synthetic
EEVDRVKRKLEEVEKRVTEISKRTEELVEEVRKEVERISKRTEEDDRRVAKEVRERLKSGKDLKRLVDEVRRLLEETNRDNKRVIDEVVRELEEINERNKRVIDKVEEELKKIVEEVKRAEKAKEIKEKVDEVIERLRRSNRKLHERIREVEKKLRELNERLHRHSREVIKELEERAR

SEQ ID NO: 4891 - protein, 178 aa, Artificial Sequence; identical to SEQ ID NO: 4890
  Synthetic

SEQ ID NO: 4892 - protein, 179 aa, Artificial Sequence
  Synthetic
KEVEDILRDLERLSEESLRRNEEIHRELEELLRRVDEKNREIHKTLEEMVRRALTELRKRPDERILDELRRVLEEVLRLSEESDRELEDVLKKVLELSKESLDRNKKLLDEVRERIRTADEKVVREVDRRVEESRKRLEKLLRENEKRVRDARRRARKLSEENERTVREVEKRAREEVK

SEQ ID NO: 4893 - protein, 179 aa, Artificial Sequence; identical to SEQ ID NO: 4892
  Synthetic

SEQ ID NO: 4894 - protein, 179 aa, Artificial Sequence
  Synthetic
DEVEEIKRKLDKVADESRKLDEDIRDKLRRVADEIRRLHEESRKELEDVVREIERLLRERDIKEVLKRLKEMLDRIIRRDEEILKRLREMLKKVIEEIERSIERSRKLLEDVLREAKDVPEKVIKEVRDTVEKILRENEKSLEEVRKTVKRIEEESRELLETSRDEVRRVLEKAEETEK

SEQ ID NO: 4895 - protein, 179 aa, Artificial Sequence; identical to SEQ ID NO: 4894
  Synthetic

SEQ ID NO: 4896 - protein, 185 aa, Artificial Sequence
  Synthetic
SVADEIRKDLKRVADEVEERLRRLLEHNKKVRDEVKERVDESKKELKEVEEEVTEKLERIKEKERVKKVIDDVTKRMREIVEKNRRVSEEVKRLSEENVRESRRISDKVRKDLKRILDEIRRAGVDEKVVREIEERIRRVIRRLDEVDKTNEKISRDAARELEESDEELRRRVKEVKDRLDEKTK

SEQ ID NO: 4897 - protein, 185 aa, Artificial Sequence; identical to SEQ ID NO: 4896
  Synthetic

SEQ ID NO: 4898 - protein, 185 aa, Artificial Sequence
  Synthetic
DEAEKIKKELDDVAREVERRLKELLDDNRRVAEEVEKRLRDSKRELEEVTRRVRKELERIKNKEDVKRVVDEVVKEAEDILRKNEEVIRRVKDLSRRNVETSKRISEEVKRLLEEILKKAEDDGLDKKLVDKIRDDIRRIARRLDEMNKKNKKLSDELEERLKKSNEEHRRRVEKVKEELEKKVE

SEQ ID NO: 4899 - protein, 185 aa, Artificial Sequence; identical to SEQ ID NO: 4898
  Synthetic

SEQ ID NO: 4900 - protein, 185 aa, Artificial Sequence
  Synthetic
SEAEEIEKELREVAKEVRELMREMLKNNKEVAEEVKRRLERSRERLEEVEETVRDLLEKIKDKKTVRDVIRTVKKLLKEILDRNKKVIDEVKELSRENVKRSEDVSRDVLRRLEEILRKVRAAGVDDKVVKKIEDDIREVEKEARKLNRENRELSKKLAEELDRSNDRHRREVERVERELEKAER

SEQ ID NO: 4901 - protein, 185 aa, Artificial Sequence; identical to SEQ ID NO: 4900
  Synthetic

SEQ ID NO: 4902 - protein, 184 aa, Artificial Sequence
  Synthetic
SLQERVRDKVRKVKKDLEDLNRRHREEIERVVRELDKSNEDHEREVRRVEKELEELIRRNKERDEIREVVEELRKLLEEVLKENSDVIRELRELLKELHEKNRKVVKELDDLLRDVIDKLEKINDKKFVEDVDRALKRIADEVKRRSEESKKELDDIKKEVEERLRESKEKLKRIVDEARERLR

SEQ ID NO: 4903 - protein, 184 aa, Artificial Sequence; identical to SEQ ID NO: 4902
  Synthetic

SEQ ID NO: 4904 - protein, 175 aa, Artificial Sequence
  Synthetic
SELEEVIKRAEDELRDDERENKRVLEKSDRDIKRWEEEVKRVLKKARDELDKLRKEGIDEKVLREVEKIIRDVEEEIKKILEELRRITKKVEDESREILERVRRVIERVRRRANEDKDVVEKLREELEKVLKESRDESKRLKEELDKVNDDARKRLEDLMRKLERVLEEVRRRRK

SEQ ID NO: 4905 - protein, 175 aa, Artificial Sequence; identical to SEQ ID NO: 4904
  Synthetic

SEQ ID NO: 4906 - protein, 175 aa, Artificial Sequence
  Synthetic
SELERVIEEIRRALEEDHERNRDVLREAKEELERDKRRNDKVLTDIRKLVKDLERKGAPEDVLRELEEIIDRVLKRSEKILEEVKRVIDKVKRDSERINKEVEEMIKRVEERANEDEETVRRLTEELRKVLDEVTKRSKELSDRLREVLRRSKELSKELEKELRKVIKEADDRVK

SEQ ID NO: 4907 - protein, 175 aa, Artificial Sequence; identical to SEQ ID NO: 4906
  Synthetic

SEQ ID NO: 4908 - protein, 175 aa, Artificial Sequence
  Synthetic
SEIERVLKEARDELRKDEEKNRDLLRRAKKVIEEDHKRNRDVLRRVKEELDRLREAGVPEEVLKRVRKALEDVRKESERLNEELRDVLRRVAEASRRILEEVRKIIEDVERRANEDKDALDRLRRELEEVLRRSKEESDRLAEELKRVLREIEERSRRLAKELKEVLDTAKRDKD

SEQ ID NO: 4909 - protein, 175 aa, Artificial Sequence; identical to SEQ ID NO: 4908
  Synthetic

SEQ ID NO: 4910 - protein, 174 aa, Artificial Sequence
  Synthetic
SELERVIRENERTIREDMKKNEDVLREWEKLTRDLEDTIRRVLKKNRESLKRLKDKGVPEEVIKELEKVSEEIRRRLEEIIRDDRRVLKEAEKRSRDLLRELKKISEEAVELLRRNVDRRELVKRLRDVDERSDDTSRKLKEELERVIRRTEELIRRVMEDAKRVDDEARKKTD

SEQ ID NO: 4911 - protein, 174 aa, Artificial Sequence; identical to SEQ ID NO: 4910
  Synthetic

SEQ ID NO: 4912 - protein, 174 aa, Artificial Sequence
  Synthetic
SKVEEVLRELERRVKEDEDENRKVVRENERTVKEDEDTNRDALRRNEESIDKLRRDGVPEEVIRKLERLSRKIEDDSRKLLEELRELTRRIKKASEDLLRRLRELLERIVRLLERNVDVDTLKRELDEALKRSEEESRRLKEEVTRIDERSKRESDRLVEEAKRLDKEAKDRSD

SEQ ID NO: 4913 - protein, 174 aa, Artificial Sequence; identical to SEQ ID NO: 4912
  Synthetic

SEQ ID NO: 4914 - protein, 186 aa, Artificial Sequence
  Synthetic
SELEEVLKKAAEVIKEIEKRLRKVLEDSRRLTKEDEKRNKEVLKKLKEKIDEIEKRARDKGLPEKDVERLKRELDRALEDVERISKELKETNEDVDRKTEDIIRRIKKKLKEVLDKARDIVEKLKDVDEVLRRLDRELKEVLDRVEREVERLKEENDRMNKKSKDDSEKLERDLERVAERLERELK

SEQ ID NO: 4915 - protein, 186 aa, Artificial Sequence; identical to SEQ ID NO: 4914
  Synthetic

SEQ ID NO: 4916 - protein, 186 aa, Artificial Sequence
  Synthetic
SEAEKVLKEAREAAKRIEDEARKVLRESRELAKKAEEDDRRALKRAKEAAEKIKRDADRKGLEDKEAKKIEEKLRKALEDLERLSREAKKEAEKVDRKTKKIAEDIKRELEKALRDAEDIAEKLKTADKAIKEAADRLKKVLEDAEKKAREAAEENKRANEEWKKKSKRAAEEAKKVLDEAKKELD

SEQ ID NO: 4917 - protein, 186 aa, Artificial Sequence; identical to SEQ ID NO: 4916
  Synthetic

SEQ ID NO: 4918 - protein, 175 aa, Artificial Sequence
  Synthetic
SDKERIKERVKKVHKESAKHIEDVRRRNEEINKRIKEEIDDVERRNREINEDIRRLVRERRVDEKEIRKRLKDVRDETKRIVERIKRELERVLEETEKALEDNDRKAKKVRDELRELNLPERVIEDLERLIEENKRTLTEVIKRHRELLEDWKRRLDEVLKDHERSAREIDEEAR

SEQ ID NO: 4919 - protein, 175 aa, Artificial Sequence; identical to SEQ ID NO: 4918
  Synthetic

SEQ ID NO: 4920 - protein, 175 aa, Artificial Sequence
  Synthetic
DEKEEVRRTVEERLKRVEDRVRELEKENEDINRELKERLKKVRRENEEINERLKKLLDENRVDEKRLREELKKVKEKTDRMLEKIAEDAERVLKKTRDELEDIRRRAEKVLEDLRRLNLPEEVIRRVEEEIKRIEKRLRDVIKKHEDSVRKIRTDMERVVRDHERLAKKWEDDAR

SEQ ID NO: 4921 - protein, 175 aa, Artificial Sequence; identical to SEQ ID NO: 4920
  Synthetic

SEQ ID NO: 4922 - protein, 175 aa, Artificial Sequence
  Synthetic
DEAKEIEDRVRTEIRDIERKVREARERSKRSDDELKKHSEEVARELEEILRELEEALRRNEVDRRELERRLREALRRAKEVTERNEREVKKNLDELREILKRITDRLKKVLKDLKDLNLDKSVIDEVRKAVEDIARKLKKVLEDNKREIDKDRKRNEEVLRTAREKAEKIKEDAR

SEQ ID NO: 4923 - protein, 175 aa, Artificial Sequence; identical to SEQ ID NO: 4922
  Synthetic

SEQ ID NO: 4924 - protein, 175 aa, Artificial Sequence
  Synthetic
DEKEKIKEDVRRVIRRIEEIVKRVDRESERSDRELEKHSRDVERRLREINDRLRRLLEENRVDRREVRKRVEDSLREARRVTEENKKTVDRNLREVKRVIDEIDDEARKVLEELRRANLDERVIEEVKRLIDRIREELERVLEKNARLAKEDEERNERVLTENRKLIEDWEREAK

SEQ ID NO: 4925 - protein, 175 aa, Artificial Sequence; identical to SEQ ID NO: 4924
  Synthetic

SEQ ID NO: 4926 - protein, 184 aa, Artificial Sequence
  Synthetic
SKLEEVVRRVDKDARDIRRRNEEVKRRNEKSAREIEKKVKKVLEEFRRLVEEIRKRLEEEGIPDSLIRTLERIATEVLKRIKEVLERLKRILDDSRRLLEEVSERNDRSLRDLKRELEEVSNSTDERVLKELEERVRKVLKDNRDTSKELEERVRRIDEELDKTLRKAKEELRKIIRELEERLR

SEQ ID NO: 4927 - protein, 184 aa, Artificial Sequence; identical to SEQ ID NO: 4926
  Synthetic

SEQ ID NO: 4928 - protein, 184 aa, Artificial Sequence
  Synthetic
SELEKVLERVKREAERIEKKNKKVLEENKKSAEEIHRDNERVLREVKDMADKIEDELRKRGIPKSLEKTIRDILERLKDRLKKVNDENRESAERSLKEIKDVSRENRRSIKELLDELREVKRTTDRKVLRDVERRVKKILDDNKRTSDEMKKRLDRLDETNKRTSEKLEEDVRRIIEDLERRVK

SEQ ID NO: 4929 - protein, 184 aa, Artificial Sequence; identical to SEQ ID NO: 4928
  Synthetic

SEQ ID NO: 4930 - protein, 184 aa, Artificial Sequence
  Synthetic
SKLEEVLKKLERLAREIERRLRDVIRRNKESADRIRKRNEEVLRKVEDVAREIEDKVRRGGVPKSIIERLRRIAKEIAREIERASRENEKSAKRSAERAEKALRELAKILRDIAEELRRVSNDKDEEALRTLDKRVEDIIKRLKEEVDRVVRDLEELDKENEKSSREVEERLKEIIRELEETLK

SEQ ID NO: 4931 - protein, 184 aa, Artificial Sequence; identical to SEQ ID NO: 4930
  Synthetic

SEQ ID NO: 4932 - protein, 184 aa, Artificial Sequence
  Synthetic
SKLEEVLKTLRRLIEEIKKRLKKVKDDNKKSLEDIHRKNKRVLEELEKRLRDIDKKLKDKGIPRTRIEELKKIVEEIRRTVRKVNEDNKRSVDESRRELEDALRELDRILKELEALIRRVKNTTDERVLKEVEERVERIIRELRRRVEELKRRVEELDRRNEKTSDDLEEELKRIDKELKDRTD

SEQ ID NO: 4933 - protein, 184 aa, Artificial Sequence; identical to SEQ ID NO: 4932
  Synthetic

SEQ ID NO: 4934 - protein, 184 aa, Artificial Sequence
  Synthetic
SKVEDVVRRVAEVAERIRRRNEEVAEENERSLKEIHDENKEVVERARKMAKRIEDEVRRKGVPKELIKRLEEIVRRVEKRLKEVNEENRKSAEESRELLRRVNKRNDESLKRLLEKLERVKNTTDEEVLKTVADEVREILERNEKTSEELAERVRRLDEENRRTSREVEKRVEEVIEDLKRRLK

SEQ ID NO: 4935 - protein, 184 aa, Artificial Sequence; identical to SEQ ID NO: 4934
  Synthetic

SEQ ID NO: 4936 - protein, 181 aa, Artificial Sequence
  Synthetic
SEVDKLEEDLRRIIKEIRRLVEEVKRKSEEIDRELKRLLEEAERTLEEIDRKLEDELRKKGNDEDVRRELKEIVERSETLVREVLKTLREVARRSEELNKDVHRRLKELVEEVRKRLEDLPEDDKVREVKKDVEKKLKELEEELRDITRRNRESLKRLEERLKEVAKKNRKTVDELRKELD

SEQ ID NO: 4937 - protein, 181 aa, Artificial Sequence; identical to SEQ ID NO: 4936
  Synthetic

SEQ ID NO: 4938 - protein, 181 aa, Artificial Sequence
  Synthetic
DEVDDLKRRLEKIITEDEKLVKEVKDRSEKLDREIAKLLEDARRALEKLDKELEEILRKKGDDEDVRRELKKIADDSRRLAEKVLKELDDILKKSEEENRRVHEDSERSMREVEKLLRALEEDDKVREVVKRVRDEADKSRRKLEEITRRNRDSLERIKRKLERVLEENDRTLRELEERAR

SEQ ID NO: 4939 - protein, 181 aa, Artificial Sequence; identical to SEQ ID NO: 4938
  Synthetic

SEQ ID NO: 4940 - protein, 177 aa, Artificial Sequence
  Synthetic
SELEKVVEDSRRKLDAWDDESRRVAEESRRRLEEWRKRLEEVAKRVEERLRDLKRKAGDREKLREAKKELRRVVERIKKLVDEVEKRSEEILDRNRKLNDKVRKESEKLAEEIKRVDDEELVKKMARELDELNKDLDRLNKESKRELERLNTELAELIKEVERELRELLRKLEEDLR

SEQ ID NO: 4941 - protein, 177 aa, Artificial Sequence; identical to SEQ ID NO: 4940
  Synthetic

SEQ ID NO: 4942 - protein, 177 aa, Artificial Sequence
  Synthetic
DSLEDVVRRVKKKLDDNRKDVERVAKESEELLKRWRDRVKKVVRDVERRAEELRRRRGDDKSLRDVEERLRRIVRDLERLIEEVERRSRKILKDLRKLNKDSVDEAERLVEEIKRVTDEELIKTFERTLEELHKTNKKLNEEVKKRLEELNTRLAKLIEDVRKELEKVLKELEDRAR

SEQ ID NO: 4943 - protein, 177 aa, Artificial Sequence; identical to SEQ ID NO: 4942
  Synthetic

SEQ ID NO: 4944 - protein, 177 aa, Artificial Sequence
  Synthetic
DELDEVVREVKDRLRENKEEVKRVMDESRRLLERWNEESERVAKKVEEAVRKLTKDKGDDDLLREVKKALKRVLDENRRLNEEVEERSRRIVDRLRRLNEESEKRAEELTKEARRVNREDDIRRITKRLRDLHRENEKLNRDVKKELRELNERLAKLNRDSTRELEELLRKLEEDAR

SEQ ID NO: 4945 - protein, 177 aa, Artificial Sequence; identical to SEQ ID NO: 4944
  Synthetic

SEQ ID NO: 4946 - protein, 177 aa, Artificial Sequence
  Synthetic
SELDKVVEESKRLLEEWDRRSKDVAKKVKEMLDRSRKASKEVVKEARDELERLKRETGDVEEVREMEKRIEKIVREDEELNKDSVRRAEEIVRENEELNKEVKKRSKDLVDEARKVTDEKDIREIKERLKRLNETLAELNERSKKRLKRLLDEDKKLNDDSSKELKELLKELEDRTR

SEQ ID NO: 4947 - protein, 177 aa, Artificial Sequence; identical to SEQ ID NO: 4946
  Synthetic

SEQ ID NO: 4948 - protein, 177 aa, Artificial Sequence
  Synthetic
RELEDVARRARKKLEDNKRRVEEVAEEVERRLDESRKESDKVVREVEEVLKRLKEERGDVRSLDRVTERAEEIVRDDKRLNKRSKDELRKVLKRLRELNKRSVETIEKLLEEIKRVKNEELVKRMTEELERVHRENEKLNRDVRRELEDILRKDEELNKRSKKRLKDLLDELRRRLT

SEQ ID NO: 4949 - protein, 177 aa, Artificial Sequence; identical to SEQ ID NO: 4948
  Synthetic

SEQ ID NO: 4950 - protein, 177 aa, Artificial Sequence
  Synthetic
SELEEVVKKVRTDLDRIDEKSKRVAKEVDRVLKESEDRSKKVAREVEEVLRKLKEEAGEVDELKRVMKELKEIVDRDERLNEESSKRLKEVVKDNERLNEEVRRRAEKLVEEIKRVKDEDLVRRAVETLERLIRELEKLNDESKRRLEEILREDKRLNKESTEELRRLLEELRKTLT

SEQ ID NO: 4951 - protein, 177 aa, Artificial Sequence; identical to SEQ ID NO: 4950
  Synthetic

SEQ ID NO: 4952 - protein, 181 aa, Artificial Sequence
  Synthetic
SEVERVAEELKRVLKELEDLDRESEKKLKRLNEELARLIEEVRRRLEEVLRTLEELAKRVKDKETIDRILRRIEEALKKLADEARDILREAKKASEDLARENKKLLDDARETIERLARNLERTREVEEVIRRIDEAIKRIEKHSREVIERSRERVEDWRRKVERVIEEVERRARKLREDTR

SEQ ID NO: 4953 - protein, 181 aa, Artificial Sequence; identical to SEQ ID NO: 4952
  Synthetic

SEQ ID NO: 4954 - protein, 181 aa, Artificial Sequence
  Synthetic
SEVEKVAEEAKRVLDELEKLDRDSAKELKDLNDELRKRDKESEDALRKITRDLDELDKRVKDEKTARDIEREIDKRLEEIARTNEELLKTAKKRSKDLARKNKEILERIARALKELADKLRRDKDVEKVIRDLKRELERLAKHSEEVIRTSEELLKRWEDHSRKVIEEVKERARDIKRRTK

SEQ ID NO: 4955 - protein, 181 aa, Artificial Sequence; identical to SEQ ID NO: 4954
  Synthetic

SEQ ID NO: 4956 - protein, 177 aa, Artificial Sequence
  Synthetic
SELEKVVKEVEEALERNNRENRRVIRRSRELLKRWREEVEEVVRRLRERAKKIADDVDKREVLERLKEMIRRVEEKLERILEKAERDSRRIEEEIRRLNERLKELVERIKRKMDRVTREEEVRKLEEDLRRILEEIDRESDRLVKRIEDLNRRVAELLKRVEEELEDLARKVEEEAK

SEQ ID NO: 4957 - protein, 177 aa, Artificial Sequence; identical to SEQ ID NO: 4956
  Synthetic

SEQ ID NO: 4958 - protein, 184 aa, Artificial Sequence
  Synthetic
SIEEIVEEIERELEKLKRKLDELIKRSEELSRRLAEKTRRSNEEIKREIDKVADDIRKTLSDREKVERIRKKLEEVHERHRKIVKESEDHLKEVNDRLREILRELAERLEEAIKKIRDIVRRTTDEDTIRRVLEEAREEIKKLERDVDKVRKEVEDAHRKNSELNKTVHDEVRKIIDEIRKEVK

SEQ ID NO: 4959 - protein, 184 aa, Artificial Sequence; identical to SEQ ID NO: 4958
  Synthetic

SEQ ID NO: 4960 - protein, 184 aa, Artificial Sequence
  Synthetic
SIEEILREIEELIKDLLRKAEELLKESEKRSKELKDEMKRSNEEIRKLIEDLRRRAKDRVEDKDKVKRLEDDLRRVHEEHKKRLDELAKKLEDANRRAREILDKIRRRLERLLEEAEDIVRKVKDEDVIRDLLRRVREDIDRLRKELEKVVRELRRIHEEVRRDLKRVHEEVRKRIEDLEEELK

SEQ ID NO: 4961 - protein, 184 aa, Artificial Sequence; identical to SEQ ID NO: 4960
  Synthetic

SEQ ID NO: 4962 - protein, 179 aa, Artificial Sequence
  Synthetic
KEVEDVVRRVRKLIEDNERRNKEVHEEVEKRARENVERNRELLEKIRRTVEEIRRELEELRGDERVVKKVEDDLRRLLEEAKEVLKKSEKNLDELLKKHEKVLRDSEEDLKRVLDELRERGLDKDLLDEVRRLLERVKRRTEESNRRVKKIVDDVKRTSEEILREVEELLRRLIDDARK

SEQ ID NO: 4963 - protein, 179 aa, Artificial Sequence; identical to SEQ ID NO: 4962
  Synthetic

SEQ ID NO: 4964 - protein, 179 aa, Artificial Sequence
  Synthetic
DEVEKVFREVKKRIDENREKNRRVHEKVEREARRNSEENRRVHEEVRKTVEDIRRELDEKRGDEKAVREIEKKLKELLEKHKRVVEESRKNLTELLEEHKEVMRDSERDLRRVLKEVEKAGLDEELLRRIEKLAREVRDETRRSNEKVKEIIRRVEKESEDSNREVKRLLDELTRDARR

SEQ ID NO: 4965 - protein, 179 aa, Artificial Sequence; identical to SEQ ID NO: 4964
  Synthetic

SEQ ID NO: 4966 - protein, 179 aa, Artificial Sequence
  Synthetic
SEVEDVVRKAREILKRNEDENRRVLEKVREDLKRLTDENDKVVEDVREMVRRIKEMLDRNRGDERVLEEVERKLREVEDRVREAKRRDEEKLKRLEEELRRVVEESRRDLERLLEELKRAGVREELLREVDERIKDVKRKTDEILREVRERIKRNEERTERLRREIEELARRLLEDAER

SEQ ID NO: 4967 - protein, 179 aa, Artificial Sequence; identical to SEQ ID NO: 4966
  Synthetic

SEQ ID NO: 4968 - protein, 177 aa, Artificial Sequence
  Synthetic
DEEDLLEKIERILEEVKRRLEDVIRRVRKSNEDIERELKKAVDRSRELLRKVEEDLRRNRVDERLLDRLRKIKDENRKLLETLDRELKKISKEDEDRLREVEKRVEKIMRELRERIRREGADRDVFERLERIARRLTEEIEKALRDSDKLNEELKRKVEEVLRRSEESIRTVLEELR

SEQ ID NO: 4969 - protein, 177 aa, Artificial Sequence; identical to SEQ ID NO: 4968
  Synthetic

SEQ ID NO: 4970 - protein, 175 aa, Artificial Sequence
  Synthetic
DEIEKVRKDVDEIIRRLEEELEEVAKRLEDLNREIERILREVKKESDDTIRTIERLRKEGVDRRDIKRISEEDERKLEEVEKTLKRIADKSRELTEDVKRRLKEALDRLEEELKRVNVDESIVKEVRDKLRRLEKRLDDLAKRNEESLRELKRTLEEIIKRSRKENKRIEDEVRK

SEQ ID NO: 4971 - protein, 175 aa, Artificial Sequence; identical to SEQ ID NO: 4970
  Synthetic

SEQ ID NO: 4972 - protein, 184 aa, Artificial Sequence
  Synthetic
SEVEEVEKELRELIREDKERLDRLRKELKESIDTNKEKLDRVKEDLERLIEEIREEARRRNIDKETMDRLDEKLRRLKKELEEVIKDSRKKLEELLDELRKVVEENKRRLDEVEKELKEVKKLKDRERLTKLVEKIREVLERSKEHSERVAKKIRDELDKLHKETERVDRKLKTEARRLKEELR

SEQ ID NO: 4973 - protein, 184 aa, Artificial Sequence; identical to SEQ ID NO: 4972
  Synthetic

SEQ ID NO: 4974 - protein, 184 aa, Artificial Sequence
  Synthetic
DEVERVEEELKESIDRNDEELRRVRKENRESIEKDRRDLKRVEDDLRRLIKKIDEEVRRRNIDEEDVRRLKEKLDRLLKELRDVVKENADRLEATLRELEEVIKRSREKAKRARDELREVKRDSREEALREVVRKLRKLLKELHEETKRVMEKLRKLDRESEEHTKEVDERIKKTIEDLERELK

SEQ ID NO: 4975 - protein, 184 aa, Artificial Sequence; identical to SEQ ID NO: 4974
  Synthetic

SEQ ID NO: 4976 - protein, 184 aa, Artificial Sequence
  Synthetic
SEVDEVRKELRKVIKEDEDTMRKLEEENRKSIEEIRKELEKVEEELERVIRRIEDEIRKRNIDKRIADRLRKELKRLLEELRRVIEDLKRKLDKTREKLKRVADENRREAREVEEELKKVAKEDRREVLETLVRKIREELKRSKEHSKRVADDLRRMDEEIRREVKRVVDKVRELLKRLEDELK

SEQ ID NO: 4977 - protein, 184 aa, Artificial Sequence; identical to SEQ ID NO: 4976
  Synthetic

SEQ ID NO: 4978 - protein, 184 aa, Artificial Sequence
  Synthetic
DEVEDVLRRLKELAEEDKTKLKEVEKENKESIKEDRKRLEDVRRELEKLIEEIRREVTERRIDEKEVRKLEEKLKRLAEELEEVVKENERTAEKTERRIREVIKRNEDKLRRLMDELRKMKRSKDEKVLRDVSRRIKEEVEKSKKHSEEVKKELEDADRESKRHTEEVEKKIRELIERLKRETK

SEQ ID NO: 4979 - protein, 184 aa, Artificial Sequence; identical to SEQ ID NO: 4978
  Synthetic

SEQ ID NO: 4980 - protein, 184 aa, Artificial Sequence
  Synthetic
DEIDRLREELKRLIDKDKTDLDRVRKENEESIRDDERKLREVEKELRDLIEEIRRKAKERNIEEEIMRRLDEKLKKLERDLEEVKKKNETNARENRKELERVIEKNKEDADRLRRELDEVARDEDRRVLEEVARKIRELIRRSEKHSEDVMEKVRRNDERSKRHTEDVTRKIRTEIEKIDRELE

SEQ ID NO: 4981 - protein, 184 aa, Artificial Sequence; identical to SEQ ID NO: 4980
  Synthetic

SEQ ID NO: 4982 - protein, 175 aa, Artificial Sequence
  Synthetic
KEKEDVKKRLDEEAEKNKRTSEEAKRRNRESIRRNKETSKRVKEENRRSFEELDDLLRRGDGRREDLRRLLEANLETNTRVHEENDKSAKDNERTNEKVHRENDESLKEIKKRVREENLDKRVEEELDKLMEEIRRHNRESNEELKRLVEEIRKHNRESNEELKKLLEEIERKTE

SEQ ID NO: 4983 - protein, 175 aa, Artificial Sequence; identical to SEQ ID NO: 4982
  Synthetic

SEQ ID NO: 4984 - protein, 175 aa, Artificial Sequence
  Synthetic
DEDKDVEKKLRDIIKRNKETSRDVARRLEEIIKRNKKTSDEVATEVRKLIKEIEDVLRRGDGSREELEKLLEEVRKRLEDVHRENKESLKKVEDELKEVHRRNDESLKRVRERIEKENLDEKVKEELRRLIEEIKEHNERVLRKLRKLVEEIERTNEDIRRELKELVEDIRRKAK

SEQ ID NO: 4985 - protein, 175 aa, Artificial Sequence; identical to SEQ ID NO: 4984
  Synthetic

SEQ ID NO: 4986 - protein, 175 aa, Artificial Sequence
  Synthetic
SEKEEVRKRLRDKVEDNKRTSKEVADKLRKIIKENKDTSKKVMEDLRRIIEEADELLRRGDGSEETLRKIAEDLERDLDRVHEENRKSVEDLEEELREVHRENKKSADDIRREVDRENLDDDVRRELDELVKRIAEENKRVEDELRRLVKEIEDHNEEVKRELKELVKRIEEKTR

SEQ ID NO: 4987 - protein, 175 aa, Artificial Sequence; identical to SEQ ID NO: 4986
  Synthetic

SEQ ID NO: 4988 - protein, 175 aa, Artificial Sequence
  Synthetic
SEKEEVEREVEERLRDNKRTSDKVVEENRDSVRRNKKTSEDVKRENEESVRRIDEVLKRGDGSEETLDRLAEENRRTNEEVHERNDRSLRKNDETNKRVHEENDRSLREIKKKLDEKNVDEDVKRKAKRMVEEIRERNRKSNEELKKLAEEIRKHNKDSNKKLKELVDEIRRKAK

SEQ ID NO: 4989 - protein, 175 aa, Artificial Sequence; identical to SEQ ID NO: 4988
  Synthetic

SEQ ID NO: 4990 - protein, 175 aa, Artificial Sequence
  Synthetic
DEERRVREKLKKIIKDNEDTSRKVREDVKKELDDNRRTSEKVARDNERSIEEIKKALERGDGSEDDLRRLARENEETNRDVHRRNDESLRKIERRLEEVTKRNKESADRAREEVERANLPEEVRRELDKLVKEIKERNDEVIEEARERVKRIREKNERSNRKLKKEAKKIEEEAR

SEQ ID NO: 4991 - protein, 175 aa, Artificial Sequence; identical to SEQ ID NO: 4990
  Synthetic

SEQ ID NO: 4992 - protein, 175 aa, Artificial Sequence
  Synthetic
DEDREVERDLKKIIKDNKRTSEEVEKKLRDIIRKNEKTSKEVEKELRDIIRRADELLRRGDGSREDLKRILDELRKKLEEVSKRNKDSVDELRKELKEVHDRNKKSLDEVREKLEREKLPEEVKKDLDRLAEEIKKRNEEVRKDLDDLVRKIEKRNEEVKEELDRLAREIEEKAR

SEQ ID NO: 4993 - protein, 175 aa, Artificial Sequence; identical to SEQ ID NO: 4992
  Synthetic

SEQ ID NO: 4994 - protein, 175 aa, Artificial Sequence
  Synthetic
SEEDEVRRRLRRIIEENRRTSEEVRERLRKIVEDLERTSRDVRRKLREIVERIKEVLTRGDGSREDLERILKEIEDRLEEVTRELKRIADEARRTLEKVTEDNRRSLEEVKKEVRKDKLPREVEEELRRLIEEIERRNKEVREELDRLIEKLEDDNRKVHKELRELAKEIKDRAD

SEQ ID NO: 4995 - protein, 175 aa, Artificial Sequence; identical to SEQ ID NO: 4994
  Synthetic

SEQ ID NO: 4996 - protein, 188 aa, Artificial Sequence
  Synthetic
RELEEVVKRIRDILREIHERSEKSAEENRRLIEKAEEDSKRSAKRIREIIREIREEVKRIKDKDTLRKLLEDLERELKKLIDDNRKMVEDLRRESKRSIDDNRRLNEEIHERLRRIIEELRRRLRERDVREKLERVAREVEKSNKDNRDHSKRVEEESRELLKKLRKHSEDVAREVKKLLDELREETR

SEQ ID NO: 4997 - protein, 188 aa, Artificial Sequence; identical to SEQ ID NO: 4996
  Synthetic

SEQ ID NO: 4998 - protein, 188 aa, Artificial Sequence
  Synthetic
SELEKVVEDIRRLLRKIHEDSKRSVRKNEELVEELKRLSEKSEREIEELLRRIKELLKRIKDKESLKRALEELEERLRRIIEKNRELVDRAEERSRKSVKENEDLNRRIHEELKRVIDDARKKLRDERVKRKLDDVEREVRKSNEDNRKHSDEVRRKSEDMLEKLRRESERVADRVRKVLKELEDERR

SEQ ID NO: 4999 - protein, 188 aa, Artificial Sequence; identical to SEQ ID NO: 4998
  Synthetic

SEQ ID NO: 5000 - protein, 188 aa, Artificial Sequence
  Synthetic
SELEKLAKEIEEILREAKERSKESAERIRKLVRDLRELSRESEERIRKIETDVKKKIDDIKDKDTVRRLLEELRKRLEEMIKRNEDLVRELARLLKEMTDRNRRLVEELEREIRKLIEDLRRRLREREVRRKVEDVERRVTKVLKELEDRSREVEEEVERVLRDLKRHSDEVRREVEEVLRRLTERTK

SEQ ID NO: 5001 - protein, 188 aa, Artificial Sequence; identical to SEQ ID NO: 5000
  Synthetic

SEQ ID NO: 5002 - protein, 175 aa, Artificial Sequence
  Synthetic
SEREKIAEDIRKLVDESRRNLEDVVRRARELAERVRRNLKRVMETLERLAEEIRRIIESGDRSDRVLRELKKLLDDIDKYLKENHRRLEELVKEIEKYLEDDHRRLRELIEDIRRKLSDDKDLERELKELLDKHKKDLDDVREEIRRMLETHKEELDRVKKRVEDVLREAAERTR

SEQ ID NO: 5003 - protein, 175 aa, Artificial Sequence; identical to SEQ ID NO: 5002
  Synthetic

SEQ ID NO: 5004 - protein, 175 aa, Artificial Sequence
  Synthetic
DERERIREEVRKLARESKENLKRTEEDLKRRLEEVKRNLERVDEEVERLVRTVAEIVRKGDKDDEVLRRADELLKRIEDYLKKNNDRLRELIERVERYLERDHRELERLIEEIEDRLRDDEELKKEAKKLLKEHRDKVKEIKEDLKRAHEEHRKRLEEVVEKLKRVLRDLAEKVR

SEQ ID NO: 5005 - protein, 175 aa, Artificial Sequence; identical to SEQ ID NO: 5004
  Synthetic

SEQ ID NO: 5006 - protein, 175 aa, Artificial Sequence
  Synthetic
SEREEIVKTLRELVKRVKENLKRVTEEARKLADESRRNLERVAEEIRKIAEEVKRIVERGDRSSRVLEEIERVVREIEKYLKEDHDRLRTLIKRIKDYLEENNRRLEELLKDIKDKLSDDKDLEKELEDVHREHKRRLDEVVREMEDLLRKHEDDLRKVKREAEKMLKELTETTK

SEQ ID NO: 5007 - protein, 175 aa, Artificial Sequence; identical to SEQ ID NO: 5006
  Synthetic

SEQ ID NO: 5008 - protein, 175 aa, Artificial Sequence
  Synthetic
SEREEIAERAERLSREVKKKLEDIRREIEELAKRVLDNLRRVLRDVERLIEEVKDIIRRGRRSSEVLKRLEDELRRIEKYLRENNERLKRLIDTIRDLLRRLHEEHRRLLEDIKRKLSDDKKLKDDLDRADEELERRARKVDEDLKELHERHRRLLEDVRRELERVIKELKEETE

SEQ ID NO: 5009 - protein, 175 aa, Artificial Sequence; identical to SEQ ID NO: 5008
  Synthetic

SEQ ID NO: 5010 - protein, 175 aa, Artificial Sequence
  Synthetic
SDRERIAKRARELSERVKEKLEEILKEVRKISKDMKKRLEDILREAEELSRRIKEIVESGDSSDEVLKEHRDLLREIKEKLERLHEDHRRVLEEIKKRLEELHKDHKRLLDDVDDKLRDDDELRKELEEVDDELRRKIEEIKKELETMDKELRDRAKEIEKRLEDSNREVEERRR

SEQ ID NO: 5011 - protein, 175 aa, Artificial Sequence; identical to SEQ ID NO: 5010
  Synthetic

SEQ ID NO: 5012 - protein, 175 aa, Artificial Sequence
  Synthetic
SEREEIAKTVRKLSREMKETLKKITEEARRLSEEVKRALKKIVDDLRELMKDVKRIVESGDRSDKVLRDARELVKRIVERLEELHERHRKLIEEIKKKLEDLHRTHRRLIEDVERKLKDDKDLKKELEDVDRELADTIRRVEEELKKVNEELRKRVEDVREEAERALRELEERVR

SEQ ID NO: 5013 - protein, 175 aa, Artificial Sequence; identical to SEQ ID NO: 5012
  Synthetic

SEQ ID NO: 5014 - protein, 175 aa, Artificial Sequence
  Synthetic
DERERIAEELKKLTEEIRRRVEDVMREAERLAEEIKRKLEDVLEEVRRLSDRIREIIESGDRSDEVLRRHRKLLERIREELKKILEELRRLVREIKEKLKELHERHKRLLDDVDRKLSDDDDLRREAEKVNRKVREDLKRIEDRMRELLKEVEDLLRKIEEEARKSNKELEDRTR

SEQ ID NO: 5015 - protein, 175 aa, Artificial Sequence; identical to SEQ ID NO: 5014
  Synthetic

SEQ ID NO: 5016 - protein, 178 aa, Artificial Sequence
  Synthetic
SEAEKAREDVERAAKESKDKLDEIRKEVEKAARESREEAKRNEKDIKDAAKKLRELARDKKADEKVARRAEKIVEDNERSAKEAADRSEETAKRARDKLRKAAEDSKRTAEKARRDAEKRGADRDVLEELRKIAEDDKRRVDKVARELRELAKRDKEEAKKVHDENKKSAKEAEDELR

SEQ ID NO: 5017 - protein, 178 aa, Artificial Sequence; identical to SEQ ID NO: 5016
  Synthetic

SEQ ID NO: 5018 - protein, 178 aa, Artificial Sequence
  Synthetic
SSDETLRRELEKAVEESRRLLEENRKTIEDMVRESKRLLDRNREEIKKLVEELKKLLRDNNLPKEVADDVREIVRRNEESVEKLIRDSKETVDRDRKSLEDVARESEETVRKLREDVDRRGVDRDVLREIRELLKRDKERLKEVHKRNRESAKRDKDRVKDVHRKNRDSARRVKERLR

SEQ ID NO: 5019 - protein, 178 aa, Artificial Sequence; identical to SEQ ID NO: 5018
  Synthetic

SEQ ID NO: 5020 - protein, 178 aa, Artificial Sequence
  Synthetic
SSDETARKEIEDMVRESKKLLEEIREELDRVVKRLRRELEENEKDIKRLVKRLRDLLRENNLPDEVERRIEKIVRENEKSVKDVAKEVEDIVRELRRLIEEAERRSEKTVRELREKLRREGVDRDVLREIRELAKRDKDTVKKVMEEIRDRLRKLDERIKEVHERNRRSLKDVEDKVR

SEQ ID NO: 5021 - protein, 178 aa, Artificial Sequence; identical to SEQ ID NO: 5020
  Synthetic

SEQ ID NO: 5022 - protein, 178 aa, Artificial Sequence
  Synthetic
DEDREAKRRLDEAVKESRDRLEEIRKEVEKMVRENEELNRRNEEEIRKAVEELRELLRRQKLPEDVVRKIEKIVEDNRESVKRNVDESRKIVKELRDLLKKLFEESEETVRELEDRLRKRGVDRDVLREIEEELTKDRKRVKEVLEELRRIAKRLKERDEESHERNRRSLDKLKKEVK

SEQ ID NO: 5023 - protein, 178 aa, Artificial Sequence; identical to SEQ ID NO: 5022
  Synthetic

SEQ ID NO: 5024 - protein, 178 aa, Artificial Sequence
  Synthetic
SSEDEARKEVDKMAKESEELLRRNEETIRRLVRENEEKNERNRREIERVVRELDRLLKERKLDRTVERKIREIVTRNKKSVDDNKKRSEDIVREDEESVDELVKDSKRTLDELRKKIKREGVDRDVLRELREIAERDKKKVEDVHRENRDSARRLKEEDDDSHRRNRKSMKEVKEDVE

SEQ ID NO: 5025 - protein, 178 aa, Artificial Sequence; identical to SEQ ID NO: 5024
  Synthetic

SEQ ID NO: 5026 - protein, 186 aa, Artificial Sequence
  Synthetic
REIEEVAKRLRKLVKELKERSKESKDRSRKLMTELKKLSKDSLRELRRLLDELRKILKDRRDSEETVKEVEERLKELLERNKRDSERVAREDKKLNDDNREESKKAAEELKKIVKELEDRNRGKRDVKKKLDEIRREVKKVIEEDKRLNDESEKDSRRLIREDEDENRRIKEEIDRAVEELRRRRK

SEQ ID NO: 5027 - protein, 186 aa, Artificial Sequence; identical to SEQ ID NO: 5026
  Synthetic

SEQ ID NO: 5028 - protein, 186 aa, Artificial Sequence
  Synthetic
SDIERVLEELRRLVERLKRETERFAKELRDLARRVKEMSKRSEEELRELATRLKDTLRRRKESKERVEEVKKRLREIIKRNKETSKRVAEELKRIVKESKDLSEEVARRLEEIIKRLEDRNRGKRDVEEKLRRIKRELREVIKEDEKRNREIEREVDKVIRELEKLNKRIEDEVRKLEEELERRLK

SEQ ID NO: 5029 - protein, 186 aa, Artificial Sequence; identical to SEQ ID NO: 5028
  Synthetic

SEQ ID NO: 5030 - protein, 186 aa, Artificial Sequence
  Synthetic
SDIERMRDRLRKLVEEAREKSDRSREELEKLVRELRRKTEKFLKELRDLARRLKETLKRRKDLADEVRKVIKELKEIIDESKKVSKKVADELKKLLEENREKSREVEETLRKLVKDLEDRNRGKRDVKEKLDRIRKEVEEVARDLKRKNDEIEEEIKKVIRDDERRNEEIEKEVRKMAEELRRTLK

SEQ ID NO: 5031 - protein, 186 aa, Artificial Sequence; identical to SEQ ID NO: 5030
  Synthetic

SEQ ID NO: 5032 - protein, 186 aa, Artificial Sequence
  Synthetic
SDIERVRKELRELLERVARRSEKSMRDDKKSMDDLKKEIREVEEELRRLATEVKKTLKDRRDSEDRVRKAIEDLERIIEELEKRVRRVEERNERTVEENKKESEKVAEDLKRIIDKLEERNRGKRDVKKKLEEIEREIREAIKDLRRKNREIERTNREVIKELREELKRIDTEVKKLVKELRETSK

SEQ ID NO: 5033 - protein, 186 aa, Artificial Sequence; identical to SEQ ID NO: 5032
  Synthetic

SEQ ID NO: 5034 - protein, 185 aa, Artificial Sequence
  Synthetic
SELEELERDLERELEEDKRRNEEVMERNERRLRKLKEDVDRVVKELEDLLRKLEKILREEKDKDTIRKILEEIEDEARKILEKVKRLIETIKRESEESNKRLRDENRESEERLERILRKVREDGAPESELERLDRRLKKLIKESRETVDEIEERSERAIRDLERKLKELEERLRKKIKELRDETR

SEQ ID NO: 5035 - protein, 185 aa, Artificial Sequence; identical to SEQ ID NO: 5034
  Synthetic

SEQ ID NO: 5036 - protein, 175 aa, Artificial Sequence
  Synthetic
DETKKVEDDLRRVDTESKKHLDDVHKESKRVADELRKKLEDVHRRSEEMVRRLRRLLEENRTDKRELERALDEVLRESEKVVEEIRRLLEKVLRDSERAMRENRRLLEKVKKEVEDVKIREEVKKRIDDALRENERRAEENRREIERVLKELEDRVDENRRRIEEVRKELRDRAT

SEQ ID NO: 5037 - protein, 175 aa, Artificial Sequence; identical to SEQ ID NO: 5036
  Synthetic

SEQ ID NO: 5038 - protein, 175 aa, Artificial Sequence
  Synthetic
DETREVDERLKEADRRSKKHLDDVHKTSKKVLDELRRKIEELERRVRKVVKELEELLRENRVEEEELKRRAEEVEREIDRIVKEVKDLLEEVKKRSDEVAKENEERLKKVKKDLDDNNIPEDVRRKVDKIIKENRKMLEDNKRTIEEVLRELKERADEIKERVKKVLKKLEEDRR

SEQ ID NO: 5039 - protein, 175 aa, Artificial Sequence; identical to SEQ ID NO: 5038
  Synthetic

SEQ ID NO: 5040 - protein, 175 aa, Artificial Sequence
  Synthetic
DEEEKVERDVERVDKESKEHLDRVHEETRDINRRSEEHLRRVHRDSEDVARRLRDAVRRRTVDERDVERALREVRKKSEDVVRKNEEELKRALEKSKEVVEKNERELRELLDRLEKLNIDEKVKRRVEEAIKRNRDEARRDEEEVKKAIKRNREEADRNRREIEKVVEELRRRAT

SEQ ID NO: 5041 - protein, 175 aa, Artificial Sequence; identical to SEQ ID NO: 5040
  Synthetic

SEQ ID NO: 5042 - protein, 177 aa, Artificial Sequence
  Synthetic
SEKEEVKRRVDEITKRARKKLEDVHRRSEKIDRDSREHLERVHKRTKEILDELRDELRKRRDEDVARRIEDIATKLRRESEEVAKRNEDLLDELRKESEEVSRDLERLLKELRKELDAFNVDEDLRRRLEKVFRELKETLDRNREEIDRMVKRNRKTLRDNKEEIDRAVREARERLK

SEQ ID NO: 5043 - protein, 177 aa, Artificial Sequence; identical to SEQ ID NO: 5042
  Synthetic

SEQ ID NO: 5044 - protein, 177 aa, Artificial Sequence
  Synthetic
REDEEVLKDLKRIVDELRKKLKELHDRSEEIDKRSKKHLDDARRRVEEIMRRIEKRLREERSDKVRETVERLAREVKKEIDDVKRRNERLLRELKKESEKVSREIEEILRRIEEKLERKNVDDKVRKDLKDVAKEMRDRLEENERRIREAAKRNRTELERIERELKEFKDRLDETAR

SEQ ID NO: 5045 - protein, 177 aa, Artificial Sequence; identical to SEQ ID NO: 5044
  Synthetic

SEQ ID NO: 5046 - protein, 177 aa, Artificial Sequence
  Synthetic
SEVEKVMEEAKRIVTELEEKIRELERKVKKIDEDSRRHLKEVHDRTAEIAKTLRDILRKERSEEVAKEIERLLTELEKESKDVARRNEDLLRRLEEEIRRVVEEIRKLLEELRKRLDDKNVDDKIRREIEEAVERLETEARRLRREVEEAVRRNREMLKRNEKEIKDVAKELRDRLR

SEQ ID NO: 5047 - protein, 177 aa, Artificial Sequence; identical to SEQ ID NO: 5046
  Synthetic

SEQ ID NO: 5048 - protein, 182 aa, Artificial Sequence
  Synthetic
REDDRIRDEIRKLVEDNRRLLREILERLKTLADRLREINKKSNDDNERSADELREVLKKVRSEEVKRLVERVVEENRDSNRKDREISKKVVRELEELIERLREESKRSAEELERLIEDVVRKKGRDLEEVRREVEKAIRDSKEKLDELEERVRRMIEESEKLVEDNHRRIEEVEREMEEALR

SEQ ID NO: 5049 - protein, 182 aa, Artificial Sequence; identical to SEQ ID NO: 5048
  Synthetic

SEQ ID NO: 5050 - protein, 182 aa, Artificial Sequence
  Synthetic
KDEEEIKKAIEELVKRNEDIVEEIKRRSDKLADDLRDINRRSNEDNDRSLKTLEELLRRVDSKDVKELVERVIKRNTDSNREDEERSKEVVRRDEKLNEDLRRISEDSARKLEDLIRKIVERSGRDLKEVRDRVRRAIEKSKEDLDKSEDDSRKVIEESKRLVEENHRRIRKAVRKAEEATR

SEQ ID NO: 5051 - protein, 182 aa, Artificial Sequence; identical to SEQ ID NO: 5050
  Synthetic

SEQ ID NO: 5052 - protein, 176 aa, Artificial Sequence
  Synthetic
SEEEEARKKLKEAADRNRKVNEDAKKKAEDAARKNKKANEELAKKLKDAAEELKRVSRDEREEALREAAKKAKKIAEDAKREAKKVAEETAKIAKEIEDELRKALEESKEIAKRLEDEGAAEEIKERAKEVLERHKRSAEKIKEEAKRVLDEHRKRARDWEEEARRVLKEAEEEAR

SEQ ID NO: 5053 - protein, 176 aa, Artificial Sequence; identical to SEQ ID NO: 5052
  Synthetic

SEQ ID NO: 5054 - protein, 176 aa, Artificial Sequence
  Synthetic
REEEEVRKEVKKLKKENEDVNDKVRRDLEELLERNRKVNKELEDKIRDAKRRADEMLRVEDKDVLRRVLEEIRRLIEELKKELEEVLRRSREIIEKIREDLERVLRESKKKIDELRRRGVTEEIEEELRKVLKEHKELVERWKREAEEVLEESKRLIDKWKEDLERVLEDFRRKAE

SEQ ID NO: 5055 - protein, 176 aa, Artificial Sequence; identical to SEQ ID NO: 5054
  Synthetic

SEQ ID NO: 5056 - protein, 175 aa, Artificial Sequence
  Synthetic
SEAEEIEKRLKEVLDRHDKSAREIKDRLRKVIEEHRKLVEEWEKEARDVVKELKDENSELKDVLRELERILREIVKRLEDVLRKTEKILKEIERRLEEVKRRTKEILDEIKELLRRGEDTRRLRERLRKMEEDNRKINKEIRDEVKELEKENREINKRVEEELKRVRDELKRTAD

SEQ ID NO: 5057 - protein, 175 aa, Artificial Sequence; identical to SEQ ID NO: 5056
  Synthetic

SEQ ID NO: 5058 - protein, 175 aa, Artificial Sequence
  Synthetic
DEVEDIKRELEEVVKEHEKSVEDDERKNEDVVRRHDELVKKWEEDLRRVIEKLKRDNKDAREVLEELKEILDRLKKEADEALERTRRMTERNKKTAEDVRRDTERILREIDELVRRGRDERDLRRRVKDLKRRNKEMNERSKKHSDEVKEENKRINEEVEKKLRDVKEKLDRDIK

SEQ ID NO: 5059 - protein, 175 aa, Artificial Sequence; identical to SEQ ID NO: 5058
  Synthetic

SEQ ID NO: 5060 - protein, 182 aa, Artificial Sequence
  Synthetic
SELEKLIKEVEDLAKEVADKLRKSNKELRELVRKIAKALEETNREIEKVVRRVKRLLESGDRSSKLLKELEEIIRRAAKAHKDILDELEELVKTAARAHERILEELERLAKEIEDKLRERGLDKSKLKKIKEDLKRIADEIRKIVEDSKRDLERVADEARKIVEKSKEDLKRAKEEAEKETK

SEQ ID NO: 5061 - protein, 182 aa, Artificial Sequence; identical to SEQ ID NO: 5060
  Synthetic

SEQ ID NO: 5062 - protein, 182 aa, Artificial Sequence
  Synthetic
DELDELTKRARELVERNRRHIERSNRELKRLVKEVLDRNRENHKTVEELVKTVLKLAKDGDKSDELLRRLEKLIRESEEHLERSHEELDRLIRKADKDHEKNTRDHRRLVEKIDDDLRREGVDRSDVERVRKELKDSTDDIKRLVDKSREDLKRAKEKDEKSVRDNRERLRRVLRRLEEEVR

SEQ ID NO: 5063 - protein, 182 aa, Artificial Sequence; identical to SEQ ID NO: 5062
  Synthetic

SEQ ID NO: 5064 - protein, 182 aa, Artificial Sequence
  Synthetic
SELEKLTKEVRDDVRRVMERLKRSNDDIRRLAEEVIRRNDESRKKLEKLVEEVKDLFRRGDKSDKLLREAERLIEEARKEHEKLLRELRELVKRVTRKHEEILREVEELVERIKRSLEEKGLDDSKVREIERELDEVRKRLEDLVRKSKEDLDRVREELERLVEKSKRDLDKARRDLDEARR

SEQ ID NO: 5065 - protein, 182 aa, Artificial Sequence; identical to SEQ ID NO: 5064
  Synthetic

SEQ ID NO: 5066 - protein, 182 aa, Artificial Sequence
  Synthetic
DELEELEKKVREDVRRVKEKMERSHRETEKLARDVKKRLEDTNREIKKLVKEVEDILRRGDKLDEVLRRLEELIRKVLKDHEDILRELAELVERVERRNEEILREAEKLVRDIERELERNNLDKSKVEKVRRDLDEARKRLEELDRRNRKRLEEVRKEIREIVEKSKEDLKRAKDRARETVR

SEQ ID NO: 5067 - protein, 182 aa, Artificial Sequence; identical to SEQ ID NO: 5066
  Synthetic

SEQ ID NO: 5068 - protein, 182 aa, Artificial Sequence
  Synthetic
SEAEALIEEVKTLVRRNKEHAKRSHEKTEKLVRDVADALRKTNDEARKLVEEVRRILESGDKASRVLKRLEDLARELARAHKEILRTLEELVRRAKRDNERNLDEHRKLIEEIERRLEKDGVDKSKLERLKRELTRSAEELRELDKRNEDELRRAAKRIRDIVRKSEEDLKKVRDDAREKTR

SEQ ID NO: 5069 - protein, 182 aa, Artificial Sequence; identical to SEQ ID NO: 5068
  Synthetic

SEQ ID NO: 5070 - protein, 182 aa, Artificial Sequence
  Synthetic
KDVEEVRKELDEIARRVTEEIKRVHDETARIVDRLRERLEKVTRDNRRSVRELEKELERNKEKAERVKEIVTRNRETTKRVKDEVRKIIRELERKSEELEKRVREIEEKLKELLKRLAERGVPEKKLREAKKRLDELAERLKRLIDRNREEIKRVAREADERIRENEKEVEEVEERLDRKIK

SEQ ID NO: 5071 - protein, 182 aa, Artificial Sequence; identical to SEQ ID NO: 5070
  Synthetic

SEQ ID NO: 5072 - protein, 182 aa, Artificial Sequence
  Synthetic
KDAEKVVEDLERKADAVMRKLEDVSRRHREIAKRIKDRLEKVHRDNEKSVEDLKRILKRNRESEEEVRRIVEENRRSSDELRKEVEKIVKEMEDTSREVAKDVEKIVRELREELKRLRERGVPEEIVRRAEKKVEDFERRLRKLIEDNKREVDKVEKELRDTIRRNEERIREAVEELKRTSD

SEQ ID NO: 5073 - protein, 182 aa, Artificial Sequence; identical to SEQ ID NO: 5072
  Synthetic

SEQ ID NO: 5074 - protein, 182 aa, Artificial Sequence
  Synthetic
EDVRRVVEELRKIAEDAKEKARRVHERDRERVRKVEEDAKKVHEENEESVTRLERLLDRRRESDKDVRKIVEDNERSSKEVERRLEEIVRRSRKHSTDVEEDLKRIVEELERKLRELATRGIPEDDVRRIREEVEKVRKDLKDIVKRNKEANDEVEKRLRDIVRRNRERIEEMRRRLEEKKR

SEQ ID NO: 5075 - protein, 182 aa, Artificial Sequence; identical to SEQ ID NO: 5074
  Synthetic

SEQ ID NO: 5076 - protein, 182 aa, Artificial Sequence
  Synthetic
EDVKRVVKELEDIAEEVRRRLEKVNRENRESMKRLEEELRKVHEENRESIERLKRTLKDRRESKEEVRKIITEDKKTSEELKRRVEEISERNKDTSRRLEEDVKRIIDKAREDLERLARRGIPEEIVKEAKERVDKVKDDLRRLIEENERDIRRMDRKLEDEIRRNDEELRRVVREAEETVR

SEQ ID NO: 5077 - protein, 182 aa, Artificial Sequence; identical to SEQ ID NO: 5076
  Synthetic

SEQ ID NO: 5078 - protein, 182 aa, Artificial Sequence
  Synthetic
SDVERVRRELREIAETVKERLREVNERNRKSVRDVEEIVKKVHEEDKDLARKVEEILERNREADEKVKKIVRESEETSKELERRLREIIKDNERTSKELEEEVRKITRELEKKLEDLARRGIPKERVDDIKREVDKAREDLRRLIEENKRDIKEVVERLEKLIKDNRDDNDRLRRRLEEKSR

SEQ ID NO: 5079 - protein, 182 aa, Artificial Sequence; identical to SEQ ID NO: 5078
  Synthetic

SEQ ID NO: 5080 - protein, 182 aa, Artificial Sequence
  Synthetic
SELEKVEKELKRIVDEVKKELKRVHEDDERLVRELEESLKKVTEDDRRLARELEDTLRKRRESEREVERIIDESRKTSEDLEKEVEDIVRTSEETSKKMEKRVRDIVRKLEETLRRLREAGIPEEDARRAEERVRRVVKELKELIERNKKRNKEAVERLRRLIEENKRENREVEKRARDTAR

SEQ ID NO: 5081 - protein, 182 aa, Artificial Sequence; identical to SEQ ID NO: 5080
  Synthetic

SEQ ID NO: 5082 - protein, 182 aa, Artificial Sequence
  Synthetic
KDAEEVLERLKKIAEEVAKELRDVDEENRRLLKRWAEILEEVTREDERLARELEERLERRREASEEVREIERRSRETSEELERTVRDVLRKDRKSSKELEERVREIIKRAREELKRLAERGVPEEKLRRAKEEVDRAEKELRELIKRNKDNLERAVRELEKLIEENERRNREVEKRLEDRER

SEQ ID NO: 5083 - protein, 182 aa, Artificial Sequence; identical to SEQ ID NO: 5082
  Synthetic

SEQ ID NO: 5084 - protein, 182 aa, Artificial Sequence
  Synthetic
KDVEDVVRRLEEIAKRVKERLKEVDKRNKDKAREWLKEVKEVHERNEKLAEEVRRTLKDNREKSEKVRKITEESKKSSDTVRKRLEDLSRDDKRSSEELRREVEKIVRELRDILRRLRERGIPEEIVREAEKRVREMERELRELIERNKRNVEEMDRRLEELIKENEERNKRVEEDLRRKTK

SEQ ID NO: 5085 - protein, 182 aa, Artificial Sequence; identical to SEQ ID NO: 5084
  Synthetic

SEQ ID NO: 5086 - protein, 181 aa, Artificial Sequence
  Synthetic
DEVEEAKRRLTELVDRLRKTLEKVSREDRELEERVRKITKDSHDTTEEILKRLKRELEKGVDKEEVERVREELEEITKRNEDESRRVIEESEESTKRLEEEVERVEREVRRLLEELRRRGVDEKDLRELEERVRRAVKKLRDDLRRNKKESEEVKKKLEDENKKNRDRVAEAEEELRRRTT

SEQ ID NO: 5087 - protein, 181 aa, Artificial Sequence; identical to SEQ ID NO: 5086
  Synthetic

SEQ ID NO: 5088 - protein, 181 aa, Artificial Sequence
  Synthetic
DEVREMLRTLDEIARRLKKRTKESIDTDRRLVKKLREETDKSIEDDKKLVKEVEELLDGGADEKIVREVIKRSRDLNRENKERSRKVIKESRELNKRNSEETKRVIEELRELLRKLKDDGVEERKLRELEKRIRKAEEELRRDNERSKKETEDVERDLERKNEESERRTREAEKRLKERSD

SEQ ID NO: 5089 - protein, 181 aa, Artificial Sequence; identical to SEQ ID NO: 5088
  Synthetic

SEQ ID NO: 5090 - protein, 181 aa, Artificial Sequence
  Synthetic
SEVEEVLKRLRDIARELEKLIEEVIRRDRKLVEELKRRSERSIETDRRLVKRLKEMLDGGADSKDVKRVIERSRELNDENTRESERVIEESERLNRELEERIKEVTERLRRLLKELRDRGADEEKVRRAEEEIREVERRLRKLLRDSKEETKEVVKELRRLNEESKKETEKVVREAEKRTK

SEQ ID NO: 5091 - protein, 181 aa, Artificial Sequence; identical to SEQ ID NO: 5090
  Synthetic

SEQ ID NO: 5092 - protein, 181 aa, Artificial Sequence
  Synthetic
KDAEEVVRRLTKLVEDLKRKIEEVIREDKELVDRVRDTSRKSDETLEKLVREVKKLLREGATSEILEKVIRELEEILKKNTEDSKDAIRKSRELNERLARDIERVIRELREIVKRLAERGVEEEKLKRLEDRVREAEKELRELLERSEDTTRRAERELEELNRRLEDKIRRVVEELKEESR

SEQ ID NO: 5093 - protein, 181 aa, Artificial Sequence; identical to SEQ ID NO: 5092
  Synthetic

SEQ ID NO: 5094 - protein, 181 aa, Artificial Sequence
  Synthetic
SEVEDVLRRLERLVRELEKETKRSLEENEKLARRLKKKLEDVVRDNKRLVDEVKELLKEGADERTLREIEKRSDDTLEELKRDVDRVIKESKETLEDNSRKTKEMIDRLRELVKRLRERGAEEEKLRRLEKLVRDAARRLKELNDRLRKRSKEVKEELERILRELKERSDRAKEDLRRAAK

SEQ ID NO: 5095 - protein, 181 aa, Artificial Sequence; identical to SEQ ID NO: 5094
  Synthetic

SEQ ID NO: 5096 - protein, 188 aa, Artificial Sequence
  Synthetic
SELEKVEKDLEKLIRDDEEENKRVLEELERLVREDKEKNKRVHDETRKLEDTLRRILEKSKDKDTIRKILKEIEDRLDDLNRKLHEKNRESTERLKRLIDELRRTNKRSVEELERLLKELAERLDKEEAKEKLRRLKERIREAEEKSRKSLRDIEETLKKVKRESEETDRRNRDTLRRAKKRLKDETR

SEQ ID NO: 5097 - protein, 188 aa, Artificial Sequence; identical to SEQ ID NO: 5096
  Synthetic

SEQ ID NO: 5098 - protein, 188 aa, Artificial Sequence
  Synthetic
DEVEEVKKTIRDLLRRNKEISRETLERLKKLVDENRERNKKVHDETKKLTEEIKKILEEIKDKDTLREILREIKERLKELNKRLHETNKRSREELEKILRENHEISKESVRRARKLLEDLRRRLDKEEAEKELRKLEKEVKDAKEESERSDRRLEKEIRDVERDSERSDRENRDEIRRVAEELDERSR

SEQ ID NO: 5099 - protein, 188 aa, Artificial Sequence; identical to SEQ ID NO: 5098
  Synthetic

SEQ ID NO: 5100 - protein, 188 aa, Artificial Sequence
  Synthetic
SEAEKVLRDLEELVRENEEKSERSLRELEKLVRDNEEKNKEVVKRIKDLAERIRRILEEIKDKDTLEKILRKIDDDARRLLERLERINRESDERLRRLNKRNEDLSRESVKRMEELIRDLERKLDDEDAKRKLEEIRKTLEEVKRRSEDSNRELRRRLEEVKRRSEKSLRDLEELVRRIKKELDDRSR

SEQ ID NO: 5101 - protein, 188 aa, Artificial Sequence; identical to SEQ ID NO: 5100
  Synthetic

SEQ ID NO: 5102 - protein, 185 aa, Artificial Sequence
  Synthetic
SEADKLREDLERRVREIEKRSRDSDKRLEELLEEIRRRSKRTLDELERRLREVEEELEREKDKETVDRLLKEVEERLRKILEDNKRLIEDITEKLRKILEENERLIREAVKELERLLEDLERKGVDKKKVDRVRDEVRKVKRKLEEEHKKLERKVREARKELEKSHRDLNREVKKAKERLDRKRD

SEQ ID NO: 5103 - protein, 185 aa, Artificial Sequence; identical to SEQ ID NO: 5102
  Synthetic

SEQ ID NO: 5104 - protein, 185 aa, Artificial Sequence
  Synthetic
DEVEKLRKELEDLAEKIKRESEKTLRELKKLADEIRKLSEDTLRRLKELLDRVEELLRETKDKETVRRLLEKVREELRKISEENRELIERLARRLDEIAKRNKELIERIARRADELLKRLKDKGVEERKVRELEKTVEKIKRELEKSHEDLNREVEKIKRDLERSHKELNELVKRAEERLRRETK

SEQ ID NO: 5105 - protein, 185 aa, Artificial Sequence; identical to SEQ ID NO: 5104
  Synthetic

SEQ ID NO: 5106 - protein, 185 aa, Artificial Sequence
  Synthetic
SRVEELKRRLEELIERIDRESKRTLKELKDLAREIKELSERTLRELERLAKEVKEELDRIKDKDTVRRVLEEAERMLKEISERNKRLIEDIARKADEIHKRNRELIEDIRRKLEEILRRLRTEGVDEEKVKELEERVRRVDEELERSNERLRREVKKIKEELKESHERLNKRVEEIRRELRERSR

SEQ ID NO: 5107 - protein, 185 aa, Artificial Sequence; identical to SEQ ID NO: 5106
  Synthetic

SEQ ID NO: 5108 - protein, 185 aa, Artificial Sequence
  Synthetic
DEAERLEEEIRRLAEEIKRLSKESLERVEKLLEEVRRESKRTLEDLERLVRDVEDKLRKIKDEDTVRELLKRVEDELRRILEENKKVIDDVEKELREINEENRRLIEDAARKLDTLLRDLERKGVDEEKVRRLKKRIDEIKEELKKSNEDLHRRIEEAKRELEELHERLNRDVERVKEKLRRDAK

SEQ ID NO: 5109 - protein, 185 aa, Artificial Sequence; identical to SEQ ID NO: 5108
  Synthetic

SEQ ID NO: 5110 - protein, 185 aa, Artificial Sequence
  Synthetic
RELEELLKTLEELLKKIEEESRRSLEELKRLVDDIRRKSEESLERLERLAERVKEVLDREKDKETVDRLLKEVARRADRINEENRELIDRARKELDRILRENAELIRKIVEELRRLLEKLKKDGAPKEKIDRLEKRVRDAKKRLEDLHRELNKRVEDVKRDLEESNKRLHDTVREIKKELRERTR

SEQ ID NO: 5111 - protein, 185 aa, Artificial Sequence; identical to SEQ ID NO: 5110
  Synthetic

SEQ ID NO: 5112 - protein, 185 aa, Artificial Sequence
  Synthetic
DEVRELEERIDRILKKIEDESRRTLEEIKKIAREVEKRSEDTLRELDDLVRRVEELLERIRDKETVDRLLKKAKKDLEDIHRRNREVIERAARELDRMLEENKRLIDKIIEELKRMLDELRKRGVDEKDVRRLEKKIREAEKRLRESNERLEKTIRDIKKRLEKLNKELKDRVDEVVKRLRDKTE

SEQ ID NO: 5113 - protein, 185 aa, Artificial Sequence; identical to SEQ ID NO: 5112
  Synthetic

SEQ ID NO: 5114 - protein, 185 aa, Artificial Sequence
  Synthetic
SELEELLERLKRRADEIRKESEKTLEELDRDARRIEKESRETLEELKKRLDDVRRALEETKDKETVRRLLEKVAEELKRISDRNERLIREAAKKLDKIHDRDRRLVEKAREELKKLLEELEREGVDKKKIDDLRRKVEEIEKDLKRSNDELRKRVKEIKDRLKELHDKLNEDVKRARKELEERRK

SEQ ID NO: 5115 - protein, 185 aa, Artificial Sequence; identical to SEQ ID NO: 5114
  Synthetic

SEQ ID NO: 5116 - protein, 185 aa, Artificial Sequence
  Synthetic
SEAEELLERLDRRLRRVEETSKRTLDELKRLLEDIERKSRKSLKELEDLVRKVKDMLRREKDRETVRRLLEEAREVLREINERNRKLVEDIRRLLEEIHRRDKELVERVRRELEKLLRDLERKGVDEKKIRDLERRVEEAARRLEKSNRDLAEEVERAERRLDRSNRELRRRVEKVLKELEDTER

SEQ ID NO: 5117 - protein, 185 aa, Artificial Sequence; identical to SEQ ID NO: 5116
  Synthetic

SEQ ID NO: 5118 - protein, 185 aa, Artificial Sequence
  Synthetic
SELEELEKRLEDLAREIKRRSRESLKELEELVKRIEETSKRTLDELKRLLDEVVKELRRIKDKETVRRLVEEVEKRLEEIHKEDEKLVREATERLRRINEENKRIVKEAVDELRRLLKELRKRGVPEEDIRRLEERVEKIREDLERLNRELHETVKRVKKRLEDSNRRLKEEVRKAKRRLDEELK

SEQ ID NO: 5119 - protein, 185 aa, Artificial Sequence; identical to SEQ ID NO: 5118
  Synthetic

SEQ ID NO: 5120 - protein, 185 aa, Artificial Sequence
  Synthetic
SEAEELTERIRKILKEIRELSEKSLRELRELVKTITELSKESVERLKRRVEEVKEELRRIKDKETVRKRLEDVERELERINKENRRLVEEAERRLREINKRNEKLVRDIKRELERMLRDLRRKGVDESKVRELEERIRRAEEELKKRNEDLHREVRKVLKELRDSNKELEKEVKRVKKELRDESR

SEQ ID NO: 5121 - protein, 185 aa, Artificial Sequence; identical to SEQ ID NO: 5120
  Synthetic

SEQ ID NO: 5122 - protein, 185 aa, Artificial Sequence
  Synthetic
SELEKLAEDLERLAEEIKRESDRSLEELRELAERIKRESRKTLEDVKKLLKEVKEVLDREKDKETVERLVRDVEKKLREINKRNRELVEKIARDMRRINEENRRLIEEIRRLAEELLKRLKDEGVDDKKIEDLRRRVEEIIKRLEKSNRDLRKEVEDIKRELEKLNKELHDTIREAKERLDRTTK

SEQ ID NO: 5123 - protein, 185 aa, Artificial Sequence; identical to SEQ ID NO: 5122
  Synthetic

SEQ ID NO: 5124 - protein, 186 aa, Artificial Sequence
  Synthetic
REVEELLKELEKVVRENEKKIEDLHKRNEDVVRKIEKDHRDSEKELKEVADRVRELLERKPNIDELLKRILEELKRIAEEVEKRNEEIIEELKERVRKSREDAKRSLEEHERIIRELERRLEERGVREDDVRRLKKRAEESLKKIEDDLRRDEDRLRRVIEKSKRLVDKLREELERVLREIEKRIR

SEQ ID NO: 5125 - protein, 186 aa, Artificial Sequence; identical to SEQ ID NO: 5124
  Synthetic

SEQ ID NO: 5126 - protein, 186 aa, Artificial Sequence
  Synthetic
SEAEKLKEDLDRVVEKVKEDLKRLHDENRRVAEKNERVIEELHRRNREVTKELEKRLEEKKDDKEELERIIREAEEIVKKSLKRLKESLEEHRKIIEDSKRELRKILERLKKIIEELDDRLRKRGVEEEKVKRLRDAVRKVLKEIEEELERDERAVAKTLRKIEELLKRDKKELDKVRKRLEERLR

SEQ ID NO: 5127 - protein, 186 aa, Artificial Sequence; identical to SEQ ID NO: 5126
  Synthetic

SEQ ID NO: 5128 - protein, 186 aa, Artificial Sequence
  Synthetic
SEAEKIEEELRRAAETAKKRHEDSERELEEAAKTAEERAKRIHDRNERAAEEAKKRAEDDKDADELAKRILEELERIARKSEEDLKRILEELRKIAEDAEKRNREINEELKEIAKRAEDRLRKRGAEEEKATRIKREADEARKESKKLAEKLKKRADEARRKLEEEAKRDKERADRAAKEIEDRAR

SEQ ID NO: 5129 - protein, 186 aa, Artificial Sequence; identical to SEQ ID NO: 5128
  Synthetic

SEQ ID NO: 5130 - protein, 186 aa, Artificial Sequence
  Synthetic
SEVEKLKEDLKRVVERVKRDHERSLKRLEDVAREVEKRIRDLHERSKDVMRRLKDLIDKKKDDTELLERIIRDAARIVKESKDRLREILRDLEKIIEDLKRENEEINRDLRRIVKELKERLDERGVEEDELRKLAEDIKRAEDESRKLVERLKKKAEEVRRKIKKLLEENEEELKRILDRLREAAK

SEQ ID NO: 5131 - protein, 186 aa, Artificial Sequence; identical to SEQ ID NO: 5130
  Synthetic

SEQ ID NO: 5132 - protein, 186 aa, Artificial Sequence
  Synthetic
SEVEELLERLKKVADDIRREIEKLHKRTKEVADEVRKRHEDSRRELEKVADEVRDRIEKDKDADELLERILRELREIIKRLRERNERINRELRRIAEESERELKRILDEARKIVKELRDRAERRGVDSKALKRLSDEIKKIEDEIRKLLEDNRREVEEAEKESRKLVEELERRAKEVEEEIKRARD

SEQ ID NO: 5133 - protein, 186 aa, Artificial Sequence; identical to SEQ ID NO: 5132
  Synthetic

SEQ ID NO: 5134 - protein, 186 aa, Artificial Sequence
  Synthetic
SEVEKILEDLKRVVDEVRKRHKESLDRNKKVADEVRELHERSDKELEDVVREVKDKLEKNKTDKKLLEDIRRELREIVDRVRRDNERINRELKKISDKLDKENEDINRELREIAERVRDKLRKDGIDSKDVKRIEDELRKANEESRRLVEELRKHSEDVNRESRKLVEDLERKLRKAEKDIEDDAR

SEQ ID NO: 5135 - protein, 186 aa, Artificial Sequence; identical to SEQ ID NO: 5134
  Synthetic

SEQ ID NO: 5136 - protein, 186 aa, Artificial Sequence
  Synthetic
SEVEDLLRRLKEVVEEVERLIKKLHKETKEVVDEVRRLHEKSLRELKKAADDARDALRRNKDITELLDTIIRDARRILEELARRNEEINEKLKRIADRSAKRLEEILERLRRIIEELKDELRKRGVEEEKVRRLAEEVKRALDRIKELIKRNRDELKRANEESKRLVERLREEAERILRDLRRKLD

SEQ ID NO: 5137 - protein, 186 aa, Artificial Sequence; identical to SEQ ID NO: 5136
  Synthetic

SEQ ID NO: 5138 - protein, 186 aa, Artificial Sequence
  Synthetic
SEVEKIKKDLEKVADEVRRLHKESLDRLKKVVREVEERLKRLHEESEKVAKDVRRKVEEKKDDKDRLKKILDELREIIERSIRAFKKILDELEEIIKRLREENEEINRRLKEIAEEVEDRLRKRGVDEREVKKIKDDLDRVNEESRRLVEKLERDVTRVRKKIKEELKKNADRLKEVEEDIKRRAK

SEQ ID NO: 5139 - protein, 186 aa, Artificial Sequence; identical to SEQ ID NO: 5138
  Synthetic

SEQ ID NO: 5140 - protein, 186 aa, Artificial Sequence
  Synthetic
SEVEELERELKEVVDRVRKLHRESLERNREVVRKVDEDIKKLHRESEEVAKEVEKLIEEVKDDTDKLRKILERLREIAERSRRTLTEILKRLEKISRELLEENKKINEELKRILEDLIRRLRERGVDERDLKRLEDEARKANKESRDLVREIERHSREAMKRIEEELRRNKERLERVLKKIEDKAR

SEQ ID NO: 5141 - protein, 186 aa, Artificial Sequence; identical to SEQ ID NO: 5140
  Synthetic

SEQ ID NO: 5142 - protein, 186 aa, Artificial Sequence
  Synthetic
SEVEKLLEDLKRVAREVEKLLEDLHRRTDEVMKRNEDDIRRLHEESDRVVKRVKDEIEKKKDDTDRLREILRRLEEIAKKSDEDLRRSLDEHDKIVKKSEEDMERILRELRKIIEDLERRLRERGVDERDLKRLKDEAKRIEDKIRELLERNREKARRTKEKIKKLVERNRRELEKVLDEIRRRIK

SEQ ID NO: 5143 - protein, 186 aa, Artificial Sequence; identical to SEQ ID NO: 5142
  Synthetic

SEQ ID NO: 5144 - protein, 178 aa, Artificial Sequence
  Synthetic
KEVEDVEKRNREVHRRIEKLIEENERRLKEVRDRIRKLVREIEDLNRRVREEVDRRNAPEEVRKELEEVTERSRRMARDIERLLDKATKESRDNVREVKADLKRVTEETRRLAEELKDVEEVLRDLLRRNEEVVKRVEDNLRRDTERLEKVAKDVEKKLREVLKRNKEMVDEVRKKTK

SEQ ID NO: 5145 - protein, 178 aa, Artificial Sequence; identical to SEQ ID NO: 5144
  Synthetic

SEQ ID NO: 5146 - protein, 175 aa, Artificial Sequence
  Synthetic
SEEEDVLRKLEKIVTDLRETLKRMHEDSERIVEESRKHARKVHEDSKKIVRELKKVLDEKRVDRREVERTVRDVIRRSEEVFERNRDLLRRLKEKSEEIARRIEKKLKEVKDRLEEARVPEEVRRRVEEIRREIERELKRNRERLEEVERENRKLLRENKEELDKVEKDLRDTAE

SEQ ID NO: 5147 - protein, 175 aa, Artificial Sequence; identical to SEQ ID NO: 5146
  Synthetic

SEQ ID NO: 5148 - protein, 180 aa, Artificial Sequence
  Synthetic
DDIKRLEDEVRKAAEENKDEVRKNREELKRIKDEIDKLVKDVEETIRRAEDEIRKRVKDKETLERMEKLLREVKKEVDEVVKELDELLRRLEEKSRRVVEENKKLLDTIRKRLKDVSNTEDKRVMEKVLRELKEIVDRSRDHLRRVHEDSKRIADELRRKIEELLKRIKKVVDELREAIR

SEQ ID NO: 5149 - protein, 180 aa, Artificial Sequence; identical to SEQ ID NO: 5148
  Synthetic

SEQ ID NO: 5150 - protein, 184 aa, Artificial Sequence
  Synthetic
DDLRRIEKELKRLADRARKINRESDERIKKLEEEIRRINEDSLRRDRDLARRLREMLKRVRSREVEERLKRITDRSRELNEENERRNRRVEERLEKLLKENEDENEKVIRDLERLVEELIRKEGDTREVKKLKEDLDRVKRELEKLNEEIRDRIRRVKEELKRLNDRSKKHTKEVEEEVERRKK

SEQ ID NO: 5151 - protein, 184 aa, Artificial Sequence; identical to SEQ ID NO: 5150
  Synthetic

SEQ ID NO: 5152 - protein, 184 aa, Artificial Sequence
  Synthetic
SEAEDILRRIKRLADENRRILKEILDRIKELADRVRKINEDSLRTLRKLAEELRRVAEKVRSEEVVRRLERIIRELRRLLEENKRRNEEIIRELRRLLDELRRRSEDTVRKIRKLLEDLIRKKGRSEKAERLEREVRKIEKESREMLKRIEDEIRKVEEDLRRLNEELERDVRRVEEEVKRAAD

SEQ ID NO: 5153 - protein, 184 aa, Artificial Sequence; identical to SEQ ID NO: 5152
  Synthetic

SEQ ID NO: 5154 - protein, 184 aa, Artificial Sequence
  Synthetic
DELDDIRRRLEKLEEEAERINRESEKRDRELARRIREINKRSKEEDRRLAKEVDEILRRVRSEEVKDLLRRITEESKKLNEENSRRNEEVDKESKRLNEENEKTNRDMIRKLRELLKDLIDKKGRTEAVEELRKKIEEVEKKLRRLNEKSKKHTKDVRDELRRLNEDSKRHTDEVKDRLEEATR

SEQ ID NO: 5155 - protein, 184 aa, Artificial Sequence; identical to SEQ ID NO: 5154
  Synthetic

SEQ ID NO: 5156 - protein, 184 aa, Artificial Sequence
  Synthetic
DELRKIREDLKRLATEAREINKRSDEDIKRLTDDVRRINKESLERLKKLADDLRDALRKVRSKDVKRTLEEIIRRARKLVEDDKRTNRKIIEELKELLDRNRRINERIARELERLLEDLIRKKGRTEAVKELEEEIRKVKEELKKLNKEIEDKIRDVERELRETNKRLEDEVRRVEEEVRRATK

SEQ ID NO: 5157 - protein, 184 aa, Artificial Sequence; identical to SEQ ID NO: 5156
  Synthetic

SEQ ID NO: 5158 - protein, 184 aa, Artificial Sequence
  Synthetic
DDAERILDEIRRLTEELREINKESLKKVERLAERIREINKDSLRRDKELADRLRRMLEEVRGEEVKEILRRVDKESEDLNRRNSEINKRVTDEIRKLVEDNSRRNREAEKELKKLMDDLIRKTGRTEKVERIERTIRKVARELEKLNEDIRKRVDEVEEELKKLNKESEDHTRRVREEVRRRTQ

SEQ ID NO: 5159 - protein, 184 aa, Artificial Sequence; identical to SEQ ID NO: 5158
  Synthetic

SEQ ID NO: 5160 - protein, 184 aa, Artificial Sequence
  Synthetic
SELETVEERLKRLEEEIRRLLEKVDRDLDRLADEVRKKNKRSHERNKEIEDRIDKLLKDGKDDETVRRVAEELRRTLRRNEEENRRVAEELERILRELRKVVEDIKKRLEDLLKELKDRVDKEELKKMLRKLEERVKEVTRELEDLLKKAEEKVRRVKDELRRSNKKDEDRLREVEEKLREDSR

SEQ ID NO: 5161 - protein, 184 aa, Artificial Sequence; identical to SEQ ID NO: 5160
  Synthetic

SEQ ID NO: 5162 - protein, 184 aa, Artificial Sequence
  Synthetic
SELEEVRKRAKDIADEDRELNRRVHEENKRLADDVRRKNEKSHRDNERIATELRELLRDGKDDRVVRRVEEELKRTLEKNKRDNDRVVEDLKRTLDRLKELNDRSVEKLERLLKELEDRVDKEELKKLLDELRKRVEDVKEESKRSLDRDRRELERVKKELDDSNDEDRKRIEEVIKEVRDRSK

SEQ ID NO: 5163 - protein, 184 aa, Artificial Sequence; identical to SEQ ID NO: 5162
  Synthetic

SEQ ID NO: 5164 - protein, 178 aa, Artificial Sequence
  Synthetic
DEEREVKERLKELIERLRRLHEESLRELKRIADELRRLHEESHKRNEDIARELERLLAEVKDKKVVEELVKRIIERLEKSLEDDRDLSRRAIEELKRLLDEDRKLSEDAKKRLKDLLDTVPRIDELERRVRKVEEESKKLHEEIRKRIEEIERESRKLHEDDRRRIEEVLKRIKDAVR

SEQ ID NO: 5165 - protein, 178 aa, Artificial Sequence; identical to SEQ ID NO: 5164
  Synthetic

SEQ ID NO: 5166 - protein, 178 aa, Artificial Sequence
  Synthetic
SDEDRLREEAKKVADELRKLHEESHKRNKEIADELRKLHKKSHDDNKRIADEITELLKRTKDKRTLEKLIEEARKKLEESLRRDAEISKKIAEDLERSLREDAKISEDIRRRLKKLLEEVDKIEELRDRLRRVEEESRELHKRDREEVERIRRESEKLHREDREDVKRIEKKLRDDAR

SEQ ID NO: 5167 - protein, 178 aa, Artificial Sequence; identical to SEQ ID NO: 5166
  Synthetic

SEQ ID NO: 5168 - protein, 183 aa, Artificial Sequence
  Synthetic
DEAEKVLEELRRRAEKVLREVKKVLEDHKRLADELRKELKRVSDENRDSLRRLLEEIDRNKELKESVKKILDENRESSERLEDTVRKILKESKDRTKELEDKLETILEDLRRKLEDVERRGVLDEDLLRRLRELLDEIRKELRDLIRKLRELNDRVERDLRRIIRENRELVRRAEKELEDRTR

SEQ ID NO: 5169 - protein, 183 aa, Artificial Sequence; identical to SEQ ID NO: 5168
  Synthetic

SEQ ID NO: 5170 - protein, 183 aa, Artificial Sequence
  Synthetic
DEAEEVLERIKDLARKNEEKNRRVLEEHEKLIRESEERDEKSSRDNKRSVDEIRDIIRRKRESKDELKKILDDNKRSSEENMRRVKRINDESKKRTDELEEESRRVLEKVEKEVEDLARSGLVEEEKIKRIRDELARWAEKIKKTIDELRKLNKEAHDRNRKTIKENEDLVREAKEDLERKTT

SEQ ID NO: 5171 - protein, 183 aa, Artificial Sequence; identical to SEQ ID NO: 5170
  Synthetic

SEQ ID NO: 5172 - protein, 185 aa, Artificial Sequence
  Synthetic
SEAEEVLKEIKKLADELRKKNRESVEKVRESSKRLKDEIRKVLEDIKRLAEKLREILREMKDKDTIRKTIEDITEKLKELLDRLRERIEKAKRDHERLVERNRRENDKIRKDLERLLEELRKRGVDEKLLRELEKLIRDIKRELDRSDEKLEELVRRSAKELDDLLDTLREIIERIKRDLDEKLR

SEQ ID NO: 5173 - protein, 185 aa, Artificial Sequence; identical to SEQ ID NO: 5172
  Synthetic

SEQ ID NO: 5174 - protein, 185 aa, Artificial Sequence
  Synthetic
REAEEVLKRIKELADEIRKRNRESLERIRKSSEDLKRENEDSIRRVRELIDTLRRRLEKEKDKKTIEEIVKEIDKRLKELLDRNRRRNEEAVKEHEELLKENRKENEEILRDAERLLRDLERKGVPKELVDRIRDLIRRIKDELKESDDRIKELIDKSKEDLDKSDEDLKREIDKAREELAKAIK

SEQ ID NO: 5175 - protein, 185 aa, Artificial Sequence; identical to SEQ ID NO: 5174
  Synthetic

SEQ ID NO: 5176 - protein, 182 aa, Artificial Sequence
  Synthetic
DEVEELLKEVEELAREIVERLEKNLRDTKKLIDEIEEYARRNEERTRKLIEEAERLARRGDKSDDLKREVEKLLKESEDNVERLIRELEKLLEESRRNVKRIIDELRKRLDDVRRRLEERRADEELERRLRRLLEELERRLKRLEDEHRRLVEEVRDKLRKIEETHREIVERVRRTLDEEKR

SEQ ID NO: 5177 - protein, 182 aa, Artificial Sequence; identical to SEQ ID NO: 5176
  Synthetic

SEQ ID NO: 5178 - protein, 182 aa, Artificial Sequence
  Synthetic
DDARRLLEEVKELLERSKRHLTKNLEDTRRLIKELLDYARRNLEDTRRLIEEVLDLLKRGRRSDELMRRLERLLRESEENVKRLIKALRDLLKESKENVDRNIKRSEELLRRVEELADRRRLPEEVKETLKRLLDEIRRENEKVARDHKKLVDDVERELEDIERRHKELVDRARKVAEDEKK

SEQ ID NO: 5179 - protein, 182 aa, Artificial Sequence; identical to SEQ ID NO: 5178
  Synthetic

SEQ ID NO: 5180 - protein, 182 aa, Artificial Sequence
  Synthetic
SDAERILDEVRKLVEDSKRHLDENLKRTAELSKRSKEYAEENLDRTRRLAKEAADIARRGDKADEVLTRLEELLERSERNVRRLIEENEELLRESEENVRRNIKESEELLRKVERLIDESRLPEKVKEDLKRLLDEIRKENKRAEDAHRDLARRSREELEKAERKHKELVDRIRKALEEIKK

SEQ ID NO: 5181 - protein, 182 aa, Artificial Sequence; identical to SEQ ID NO: 5180
  Synthetic

SEQ ID NO: 5182 - protein, 182 aa, Artificial Sequence
  Synthetic
DEVRKLLKDVRELAREIERRLEENLRRSEELLKRIEDYLRKNLEDTRRLIEEVKELADRGDKVDKLLEDVERLLRESEENVERLIKELEKLLRDSEESVDRIIRELEDLLRKVEKRADDNNLEEEFKDRLRRLMKRIKERLEDVKRRHKELVKKARKSLEEVKRRHRKLVEDVRRTLEEEKR

SEQ ID NO: 5183 - protein, 182 aa, Artificial Sequence; identical to SEQ ID NO: 5182
  Synthetic

SEQ ID NO: 5184 - protein, 182 aa, Artificial Sequence
  Synthetic
DEARKILEDLKRLAEESIRHLEENLRRSEKLVEDVERYAEENLERTKKLVRDVDEIIRRGDNVDKVAKELRKLLKESEDNVKRLIEELERLLRESEESVDRNITKSEEILRRVEELVDKNRLPEEVKKRLEDLAREIRKANEDVKRRHKKLVDDVRKRLKEIEKKHRDLVRKIEEKLRDARK

SEQ ID NO: 5185 - protein, 182 aa, Artificial Sequence; identical to SEQ ID NO: 5184
  Synthetic

SEQ ID NO: 5186 - protein, 182 aa, Artificial Sequence
  Synthetic
SEAEELLKTVRDLVEKSRKHLKENLKRSEELSRKSKEYADKNLERTKRLVKTVADILDRGDRTDEVIKELRRLLKESLDNVRRLIETNRRLLEESKKSVKRNIDESERLLREAEEKLRRDRVDKKLEDELRRLVEEAKRENDEVRREHKRLVEDSERKLEKIERDHRELVDRVEKEMREKKR

SEQ ID NO: 5187 - protein, 182 aa, Artificial Sequence; identical to SEQ ID NO: 5186
  Synthetic

SEQ ID NO: 5188 - protein, 182 aa, Artificial Sequence
  Synthetic
SDVERILEDLDRVVKESKRHLEENLRRSEKLTREVEEELKRNLKESEELVKRVEDIARNGDRVDEVLERLKELLKRSERTVEKLIDDLRRLLDESRESVDKNIKESEEILRRVEEDLERRNASEDAKRRLRELVEKVKEDNKKVKEEHDDLVRKVERRLEEIRKRHEELVRRIRRRLEEEKR

SEQ ID NO: 5189 - protein, 182 aa, Artificial Sequence; identical to SEQ ID NO: 5188
  Synthetic

SEQ ID NO: 5190 - protein, 182 aa, Artificial Sequence
  Synthetic
SDVEELLRRLEELLKESEKHLTENLRRSEKLVRDSKRHLDENLKRSKDLAREVVRLAEKGDRVDRLKEDVERRLRKSEETVRRNIEESERLLRESEKSVKDNIRESEKLLRDVEKKLDDRNIDRKVKERARELVERIKRRNEKVERDHEELAREVRERNKEVEKRHRDLVEELRRRLDERKR

SEQ ID NO: 5191 - protein, 182 aa, Artificial Sequence; identical to SEQ ID NO: 5190
  Synthetic

SEQ ID NO: 5192 - protein, 182 aa, Artificial Sequence
  Synthetic
SEAEELLERVKKLTDESLRYLEENLDRLRKLVKESEDHLKDNLRKSEKRVREVIDLARRGDTTDELTERVEELLKRSEETVRDNIRKSERLLRESKENVERLIRDNERLLREVDEELKRRNLDKDMEDKLRRLVEESRRALEEVLKRHEDLVEEVRKSNDKVRKEHEELVKRVRDALREIKR

SEQ ID NO: 5193 - protein, 182 aa, Artificial Sequence; identical to SEQ ID NO: 5192
  Synthetic

SEQ ID NO: 5194 - protein, 181 aa, Artificial Sequence
  Synthetic
SVEERLEKLLKEAEERLRESEDRTRKLVEEVRRELEKLKKRSKELADRVREELRKFPKSEDLDRILKELEEVVKRVEDTHEESRRRIEDVVRKVEKKHEESRRELKRVADEVRKRLEEKKTDEEELEKILDTLRRIAEKLVRKNEDILRRLKEIVKKVIRENEEILRRLEEIAKELAKRLE

SEQ ID NO: 5195 - protein, 181 aa, Artificial Sequence; identical to SEQ ID NO: 5194
  Synthetic

SEQ ID NO: 5196 - protein, 181 aa, Artificial Sequence
  Synthetic
SLDEEAKRVVEEVRKRLRESKERSREIVERARRELERLKEESKRLADRIREEVKKFRDDEELERILRELEEVLKDVERKHRESKKEIEDVVERIKEEHEKSERELEEVIKRIDEALERNKDDTELVKRLLDDLRRIIRELEEKNRALNETLRKIVEEAIKKNREILEELREEVDRVRKRLK

SEQ ID NO: 5197 - protein, 181 aa, Artificial Sequence; identical to SEQ ID NO: 5196
  Synthetic

SEQ ID NO: 5198 - protein, 175 aa, Artificial Sequence
  Synthetic
SEVEKVLREAREILKKNKRENEEVHKKSKEIAERNREKNEKVHRDSRKIIEELKELADRGKDARELDEAVKRLADENRRVNEDSERDIKRLAEENRRVNDESRKDIERLVRKLEKDGVDEDEARKLVKEVRETLEDSARRDEKLIEDLKRTLDESKKEDDKLIEELERRLREAER

SEQ ID NO: 5199 - protein, 175 aa, Artificial Sequence; identical to SEQ ID NO: 5198
  Synthetic

SEQ ID NO: 5200 - protein, 175 aa, Artificial Sequence
  Synthetic
SEVEKVLREAEEIAKKNEEDNRRVNDRSEKIIEENERRNRKVHKESEDIVRDLERLAAEGKDARDLERKARELVKRNKEVNDTSRRDLERLVKENRDVNKESREDIERLVKELEKAGVDEEEVRKLVEKLERLLEKSKRDDEESIKKARELLRRSEEADKKLIREAEEAIRTRKK

SEQ ID NO: 5201 - protein, 175 aa, Artificial Sequence; identical to SEQ ID NO: 5200
  Synthetic

SEQ ID NO: 5202 - protein, 186 aa, Artificial Sequence
  Synthetic
SRLEELLKKAKKLVEDVEDTNRKMLEKLRKLADDLRRINKRVLDELERLARELEDIARKIRDKDTLKDILRRMEDELRRLLKKLEEDNRRIIEELRRLLKEIHDTNREVLERLKELLRRVKEEVKEAEEVLRELKKLLDEAKKKLEEIDKRLEDELRKIEDDLRRSNERVRRLLEEVRRRIKEETD

SEQ ID NO: 5203 - protein, 186 aa, Artificial Sequence; identical to SEQ ID NO: 5202
  Synthetic

SEQ ID NO: 5204 - protein, 186 aa, Artificial Sequence
  Synthetic
DELEEMLKRLEKLARDLDRINKEVLRRVEEEVRKLEEENEEVLRTLRRLAEEVERILDEIEDKKTLEKIIRDIEEELRRLLRTIHERNKKALDELRELLERLRRTNEEIKKTLRKLIEDIREEVKEAKEVLDKLEKLLEDIARELEKSNRRLEELLKEVERRLREMDERLRKELEEVKRRLEEKRR

SEQ ID NO: 5205 - protein, 186 aa, Artificial Sequence; identical to SEQ ID NO: 5204
  Synthetic

SEQ ID NO: 5206 - protein, 186 aa, Artificial Sequence
  Synthetic
SRVEKVLEELKELMKELDDSNRRVLEELERLVRENTRRNEEVLRRVRELAERLKDELDKIKDKDTLDKRLKEIEKELRKLVEDLRRLNEETIKTLEKLLREVREENERVIEELKRLLRELKEEVKEAEELLRRAKELLKRIKERLEESDRRLKRLLDEARKRSEDIIRALEKLLRDVKRELEEKLR

SEQ ID NO: 5207 - protein, 186 aa, Artificial Sequence; identical to SEQ ID NO: 5206
  Synthetic

SEQ ID NO: 5208 - protein, 186 aa, Artificial Sequence
  Synthetic
KDAERLFEDLRRLVDENREKNEKVLREIEERVERLERENEKVLRDLEDLIRRVREEIDRTKDKETLRRIIEEILRRLAELVKTLRERNKRVLEELEKLLRKVRELNKETIRRLEELLERMRERVKEAEEMLRELKKLLDRAREESRRIIEELERTLEKVKERLDRTDKEIEELLKRAEEELREKER

SEQ ID NO: 5209 - protein, 186 aa, Artificial Sequence; identical to SEQ ID NO: 5208
  Synthetic

SEQ ID NO: 5210 - protein, 186 aa, Artificial Sequence
  Synthetic
DDLERLLKEVKERIDEVKRRNEEVLKRLRELVKRNKEKNDRVLREAEKLMKKLRDIVRKIKDKDTLRRILEEIKKRLKELLDTVRELNKRTIEELEKLLRDLDRENKRIREELEKLLRDIKEKVKEAEEVLRRLRELLRTAERELEESNRRAEELLKDARRKSEEIIRRLERLLEEVDRDIKRALK

SEQ ID NO: 5211 - protein, 186 aa, Artificial Sequence; identical to SEQ ID NO: 5210
  Synthetic

SEQ ID NO: 5212 - protein, 185 aa, Artificial Sequence
  Synthetic
DDVRELLRTLRKISEDTLRRVEEINRKLERLSRETLKRVEDINRKVKELMEEVLKELDRIKDKKTLKDVIREAKKRLDETLERLERVIRESEKRARDTLRELEKVIEDSRKTVEELKKELERRGVEEDALRELKRLVDDNETKLRRLRDTHRELLERNRTELEKLKRTHKKLVDEAEEELRKKDK

SEQ ID NO: 5213 - protein, 185 aa, Artificial Sequence; identical to SEQ ID NO: 5212
  Synthetic

SEQ ID NO: 5214 - protein, 185 aa, Artificial Sequence
  Synthetic
SDVERLLEKLRDLSRRTVRELERINEEVREIIKTLKKELDRTNKELRDIIEEIKKELDKIKDKRTLEKIVDRLDKELKRSLEEDRKVVEDAKRLLDDTLRKLEEVIRRSKELLERILRELERRGVDEKLLDELRRLLEENEKTLEDVRRTHEELVKRAKRELEKNIEEHERLVRDVKEKLERKIR

SEQ ID NO: 5215 - protein, 185 aa, Artificial Sequence; identical to SEQ ID NO: 5214
  Synthetic

SEQ ID NO: 5216 - protein, 185 aa, Artificial Sequence
  Synthetic
SDAEELLKEAREVSKRTKDTLDEINKDVKRISEETKKRLKKTNEEIKEIADRLRKELERIKDKKTLEDVVREVERRLEDSLRRDRKIVEESRRRLKETLDRLEKVIRDSERRLKEILEELERRGVSEDILRELKKLVDDNRKTLKEVLETHEELLRDNSRKLERNVERHAKLVRDIKEELKETTR

SEQ ID NO: 5217 - protein, 185 aa, Artificial Sequence; identical to SEQ ID NO: 5216
  Synthetic

SEQ ID NO: 5218 - protein, 185 aa, Artificial Sequence
  Synthetic
SDAERLLKEVEEIARRLEKKMRETNKEVDRIVKEIEDDARRLNKELREIAERIKDELDKIKDKDTLRELVRRIKKELDRTLKELEDVIKRLKDLLKETLDRDKELVDRAARRLEKILEDLERRGVDEKVLKELKRRLEEIKKKLDDNLRRHKKKVDDVARELEKIVKTHRDLVEEIRRRLRKKEE

SEQ ID NO: 5219 - protein, 185 aa, Artificial Sequence; identical to SEQ ID NO: 5218
  Synthetic

SEQ ID NO: 5220 - protein, 185 aa, Artificial Sequence
  Synthetic
SDAERLLEELKRISEETKRRLAETNKKVKKIMKELTETLTETNKKLKKIIDDLRDRIDKIKDKETLRRVLDEADKRLRKSLREDEELVRRAEKRLRDTLREDERIVRESEKRLRELLERLERRGVEERVLKELRRLLERNREELRRNKEKHKELVERIKRRLEENKERHKRLVDEARKELKEKEK

SEQ ID NO: 5221 - protein, 185 aa, Artificial Sequence; identical to SEQ ID NO: 5220
  Synthetic

SEQ ID NO: 5222 - protein, 185 aa, Artificial Sequence
  Synthetic
KDAEELLKTLERLSRETKRRLERTNRELKEISKETEKDLERTNRKLKEIIDRLREELDKIKDKRTLEKLMTEAKKTLKKSLEEDRDIVRKSDEKARRTLEEDKRIVEESEKRVKKLLDDLRRRGVSEEMLRELRRLVEENKKRLRENIRRHERLLEENRRKLEKNIRDHERRLEKADKDLEDKRR

SEQ ID NO: 5223 - protein, 185 aa, Artificial Sequence; identical to SEQ ID NO: 5222
  Synthetic

SEQ ID NO: 5224 - protein, 185 aa, Artificial Sequence
  Synthetic
KDAERLLEEARRIVKEADDILRELDEEVRRIVEKIKRDAERTNEEIREIAKRIRDEIERIKDEKALEKLLEDLRRKLEESLRKDERLVKEAARLLKETLEDLERVIKELADLLERILREIEKRGVSEDVLRELRKLVEDVKRRLKEVADHHRELVRRAEEELKKNRDEHERLVREIEKELRKARE

SEQ ID NO: 5225 - protein, 185 aa, Artificial Sequence; identical to SEQ ID NO: 5224
  Synthetic

SEQ ID NO: 5226 - protein, 185 aa, Artificial Sequence
  Synthetic
DEAERLLERVKELMERLTEEARRTNETLREIVERAERRLRELDERVRKIAEEIRRRLEKIRDKDTLRKLVEEIEKLLRDSLRELEKVLKELKDLLDRTLREDERLVREAEETLKELLRELEERGVDEKVLTKLRKLLEDIRRRLEKNLKDHEELVRRVEEKLKRVREHHEELVRRIKEELDKAEK

SEQ ID NO: 5227 - protein, 185 aa, Artificial Sequence; identical to SEQ ID NO: 5226
  Synthetic

SEQ ID NO: 5228 - protein, 187 aa, Artificial Sequence
  Synthetic
RDAEELLRTMEEITRRVKKELEDLLRTDEELSERVKEEARKLDEKLKELARDVTEKARDIKKGPEEKLRRIVEKLRRELEESRRELEKLIRESKKLNEDTKREIDKIIDDLRRLIERIERELDERNVDDEVKKELKRLIEEVRDRLKKVKDTLEKLIKENEDELRKVEEHHEKLLREIEETLERMRK

SEQ ID NO: 5229 - protein, 187 aa, Artificial Sequence; identical to SEQ ID NO: 5228
  Synthetic

SEQ ID NO: 5230 - protein, 187 aa, Artificial Sequence
  Synthetic
EEAERLLKKAEDLSRDTARKAKELLEEDEKLVRDAEKKARELDRELEKLAEEAARAATRAKKDDKRKLDKIAKEAKELADRSLERLRKLAEDLERLNEETLRRLEELIKENKERADRALEELEKDNAPEEARKRAEDLIRESEKRARDAKRRAKELIDRSRKSAKEAKEHHEKLIKEARDELEKAKK

SEQ ID NO: 5231 - protein, 187 aa, Artificial Sequence; identical to SEQ ID NO: 5230
  Synthetic

SEQ ID NO: 5232 - protein, 187 aa, Artificial Sequence
  Synthetic
DEAEKLLRELEKLSRETEKRVREIIKKDRDLSEEVRRRAERLDDELRKLVEDAERELRRIKSDDETKLDEIVRELERLLEESLRRLEELVKELDRLNKETLEELETLVRENRKLAKEVKDRLDEQNVDDKVRKRLEELIRESDERLKELTKELRKLIEDNRRELEKIIRHHKRRVDEVRKRMTELRR

SEQ ID NO: 5233 - protein, 187 aa, Artificial Sequence; identical to SEQ ID NO: 5232
  Synthetic

SEQ ID NO: 5234 - protein, 182 aa, Artificial Sequence
  Synthetic
SEVEDLLRRLEEIVKRNDDELRADEERTRKIIKENKETLDRLLEDLKRILRELEKIVRDKGNDRDVVRELRKIVREAEEKLEEVTRRSRESLKDLHRRNRESIRRSEESVEKIKRDVRRLELSEEAKRRAEEKLKRLEERSREIERRLKKLNEELKRISDEVEKTAREILERIKRRIEEEER

SEQ ID NO: 5235 - protein, 182 aa, Artificial Sequence; identical to SEQ ID NO: 5234
  Synthetic

SEQ ID NO: 5236 - protein, 182 aa, Artificial Sequence
  Synthetic
SRVEKLLDDVRKILEDNERRLRDDMRRTEEIIRKNKRDLERLKERHEEIVKRLDEIIKKEGTDERVVTELRELLRRVHEELKEVIRRSEKSLEELHRTNERSIRKSEKSLEDLRETLERLDLSEDARREAERLLKEVEDTSREAEKRLRELNEELERRSRKVEEELKKSDEELKRRIEEAER

SEQ ID NO: 5237 - protein, 182 aa, Artificial Sequence; identical to SEQ ID NO: 5236
  Synthetic

SEQ ID NO: 5238 - protein, 183 aa, Artificial Sequence
  Synthetic
SIEDRLRKIVRDLEKVLRDLKREHDDVVRELEKRLRDIEERHRELVEELKKRIEEIERERDTEDVRRLKEEAERLLEEARRNLKRLEEEVRRLLKRSAETVKELVERVKKMLDEVKTKLRKIDKEKDLEELLKELEDIIREVRKRAKENLDRTRKLIKDIEDYLKKNLDRVRKLIEDITRALK

SEQ ID NO: 5239 - protein, 183 aa, Artificial Sequence; identical to SEQ ID NO: 5238
  Synthetic

SEQ ID NO: 5240 - protein, 183 aa, Artificial Sequence
  Synthetic
SIEERLREVERRLREDLKRLEKAHRDIVRDIERTLRKVEEDHRRVKEKLKRTIEDVERRRDTEDVRRLVETAKKLLEDSDRTVERLRRELERILDEVRRNVEKLKRDVKKRLDEVRRRLEDIRDEKELEKLLRDLKRIIDEVRKYATRNLEELKRVLKRVKEEAEKNLERTERLIEEIRRRAE

SEQ ID NO: 5241 - protein, 183 aa, Artificial Sequence; identical to SEQ ID NO: 5240
  Synthetic

SEQ ID NO: 5242 - protein, 183 aa, Artificial Sequence
  Synthetic
SIEETLREIVKDLERVLEEIERRHREIKKELEDILRELKKRHEDVVREAEKELRDAKRRRDTEDVRRLIKTLEDLLRESEENVKKLREEVKKTLKESEDNVRRLKDEVRKLLKEVEDKLKDIDKREELKRLLDELKKLIDRVREEAKKNLDRSKKMIEDVERYARENLRRTKELIDDVKEKLR

SEQ ID NO: 5243 - protein, 183 aa, Artificial Sequence; identical to SEQ ID NO: 5242
  Synthetic

SEQ ID NO: 5244 - protein, 183 aa, Artificial Sequence
  Synthetic
KIEEEVDKVRRTLEKELKEIDERHKRIVEKLREELKEAEKRHEELVKRAKEELDDVKRREDSERVRELIKELKKLLDESRENMKKLREDVEELLRRSDKSLEDLRRKVEEDLERVRRRAEEIRDEDLLRKLLEELDRIRKEVRERLKRNLDRLKKLIDEVREYLERNLRRTKKLIDRVREDAR

SEQ ID NO: 5245 - protein, 183 aa, Artificial Sequence; identical to SEQ ID NO: 5244
  Synthetic

SEQ ID NO: 5246 - protein, 183 aa, Artificial Sequence
  Synthetic
DVEEELRELIERLKEVLDRLREESKRVIKELRDTLRELEERSRDIIRKLEETLRDVARKSTDKDKLDEVREKIDRLRRENKEVNDDLRKKIEDIEKRNRDVNRDLERKVRELEKELRDMSRNKDDEFLRRVLERAKKIVRKLEEDARRVLEETEDLIRRLREKAERVHEKTKKIIKEITEELK

SEQ ID NO: 5247 - protein, 183 aa, Artificial Sequence; identical to SEQ ID NO: 5246
  Synthetic

SEQ ID NO: 5248 - protein, 183 aa, Artificial Sequence
  Synthetic
SVEDALRKLIEELKRVLKKLEDDSRRIIEELRKVLKDLEDRSRKVIEEIKDDLRKIAEKSTDEDKLRKLEEKVRRLMRRNERVNRELKKKVEKLEKENEDVNRELKKKVDELVKELREVSRDRREEVAKRLLDKARDIVRTLKEEAERVHERSRRIIEELRREAEEVLEETRDILRRLREEAK

SEQ ID NO: 5249 - protein, 183 aa, Artificial Sequence; identical to SEQ ID NO: 5248
  Synthetic

SEQ ID NO: 5250 - protein, 183 aa, Artificial Sequence
  Synthetic
SELEKVLEKLKDLLRKVREKNERVLREVEERTRRVKRDLERVLKEAKDILRKAKKLADDGKVSERSLREILKKLKERLDRVIKKWEDISRKVSEDLEEVIKDDKRTVDEAKEELKRVLDKVDKKEEIARRIKKVLDDWKRVSEESKRRIEELLKRDKEELEKIKRAAKKVIDELKRLLEEAER

SEQ ID NO: 5251 - protein, 183 aa, Artificial Sequence; identical to SEQ ID NO: 5250
  Synthetic

SEQ ID NO: 5252 - protein, 185 aa, Artificial Sequence
  Synthetic
SRAEEILKRLEELIKRLKEENDRVLEENKRLIEELEKKNRDALRRIEELLKELKDIARRIEDKDTLRKILEDVRRTIEELVKEIEKENERVRRESKKLSEELRKKNKDVNEEAKKLVDDLRRDEGDEDLEEKLRRLLDELRKISEEVEERSERSNKELEDVSEDSKRKLRKILEDLRDLLRRTEK

SEQ ID NO: 5253 - protein, 185 aa, Artificial Sequence; identical to SEQ ID NO: 5252
  Synthetic

SEQ ID NO: 5254 - protein, 185 aa, Artificial Sequence
  Synthetic
SRAERILEEMERLIEEVRKENERVLRENRRLIKELKEENERILRELKRLIKEAKEIVERIRDKDTLRKILREVLKRLKELLDELKETNERVLRESEELSKDLRRKNEEALRRLRKLVKDLRDDEGDEEVDERLERLLKTAEDDSRRSDKRSEDSNRELRKVSEDSRKRLEELLKDAERKLREDEK

SEQ ID NO: 5255 - protein, 185 aa, Artificial Sequence; identical to SEQ ID NO: 5254
  Synthetic

SEQ ID NO: 5256 - protein, 185 aa, Artificial Sequence
  Synthetic
DDVDRILEELKRLVEENRKRNEDIERELEKLIKEVEDSNRTMLERMEDLIRELRDIVRRIKDKDTLDEILRRIREELRRLLEELKKENERALEELKRLLDELKRTNKRSLEELKKLLDDLRRREGDEDAERRLKELLEDAKRVSDEVLRRLTELLKKAKDVSDESRERLRRLLEDLERDLKRERT

SEQ ID NO: 5257 - protein, 185 aa, Artificial Sequence; identical to SEQ ID NO: 5256
  Synthetic

SEQ ID NO: 5258 - protein, 185 aa, Artificial Sequence
  Synthetic
SDAERLLRELERLVEENRRRNKKVLDDNERLVEKLEKSNRRALEELKELVDRLEDIARRIKDKDTLREILKRIEDELEKLLRRLEEENKEVRRESEELSKRLDDINRRSLEELDRIVKDLERREGGERVREELERLLEEAKRDSDEVRERSKKSNKKLEDVSRKSKKDLRDLLKKARDILKETER

SEQ ID NO: 5259 - protein, 185 aa, Artificial Sequence; identical to SEQ ID NO: 5258
  Synthetic

SEQ ID NO: 5260 - protein, 185 aa, Artificial Sequence
  Synthetic
SDAEEVLKELERLIREVEERNKDILRKAKELVRDNERKNREVMERLKKLIEDLKKIAKEIEDKDTLRKILEEILRRLKKLLEDAERTNEESLKELRRLLEELRKRNKTILDELRRLLRELKEREGGEEVEKRLKDLLREAEEVSRRSEERLRELLKELEDVSREVKRRLERILEELKRILDEVEK

SEQ ID NO: 5261 - protein, 185 aa, Artificial Sequence; identical to SEQ ID NO: 5260
  Synthetic

SEQ ID NO: 5262 - protein, 176 aa, Artificial Sequence
  Synthetic
DEVEELTERLKRVLEDNRRTAEEVKERTRRVIDKVRRDYEELEKRLKKILKEIEDLSRENRTDSRELEKTVREVEKELRREDKRLKDEIDRVREENEDMNKKSRDHVEEVARELEKRGIDEDTVRRLIKEAKDDNDRMEEENRRLIRELEEVSKRAHKRLRELIRRIEELLRREET

SEQ ID NO: 5263 - protein, 176 aa, Artificial Sequence; identical to SEQ ID NO: 5262
  Synthetic

SEQ ID NO: 5264 - protein, 181 aa, Artificial Sequence
  Synthetic
SAEEEVRKIKREIEKVLRESEREIERVEKEIRDVLRKSEREIERVKREVDKVLEEVRRAGIEEEKLRELEREAREVIKRLRRIVEESAKHLEKVVRELKEALKRSAEHLKKVIDDLKKALDDNGRLEDLLREVKKAIEKNEKDNRDVLREVEEKIRRDEKRNKEVLEDAKRKIEELKKRAD

SEQ ID NO: 5265 - protein, 181 aa, Artificial Sequence; identical to SEQ ID NO: 5264
  Synthetic

SEQ ID NO: 5266 - protein, 181 aa, Artificial Sequence
  Synthetic
SAEDAIREVERKAREVLKRSKEEIDKVVKKAEEILKRSKDEVKKVADEIRRILEEVRRAGADEKKLRDLARELEEAIRKLDEIVRRSEKHLRDVVRKLEEVLKKSAEDIKRVVRELREAAKRKRRLEDVLRRIEKIIRDNAEENKRVLEEAEEVLKKDEKDNRDVLEELKKILEELKRKAD

SEQ ID NO: 5267 - protein, 181 aa, Artificial Sequence; identical to SEQ ID NO: 5266
  Synthetic

SEQ ID NO: 5268 - protein, 181 aa, Artificial Sequence
  Synthetic
SVEEAVKRLADEIRKVLERSKEELERVAKEAEDVLRRSREELKKVADEVRKVLDDVRRAGLDEKKVRELAEELKELIERLKKIVEESAENIKKVIKDLRDIVKRSAEKLEKVIRELEKALRDKKPLEDALRRLKEIIDENKRENEEVLKRAREIIEENKKRNKEVLDEAKEIIDRVREKAR

SEQ ID NO: 5269 - protein, 181 aa, Artificial Sequence; identical to SEQ ID NO: 5268
  Synthetic

SEQ ID NO: 5270 - protein, 181 aa, Artificial Sequence
  Synthetic
SAEDAIRKIAEDAKKLLEDSRRELRRVVEKVKRLLEKSKEDLDRVAEEVKKVLEEADRAGLDKEKLKRLKEEIEEVIKRLKEIVERSEKKLRDVIKKLEDIVRESAKNLKEVIDKLKKLADDKKRLEDAVREVREVLKKNKEDNDRVLREAEEVLKRNEEENRKVLEEAKRIIDELKKRID

SEQ ID NO: 5271 - protein, 181 aa, Artificial Sequence; identical to SEQ ID NO: 5270
  Synthetic

SEQ ID NO: 5272 - protein, 186 aa, Artificial Sequence
  Synthetic
SVREELTRVKKRARDVLERSREEAERVAKRAEEVNRESEREIERVLEEVERILEDIREKVKEERAEEILRTLAKEVEDLKRELREVLRRSKEETEKLIKKLEEVLKRSEDDIRRLARELDEADRAKDEEAVRDVLRKVREIIRRNRKENEEVLRDVERLIRELEERNRRVLKKAKEILKRIRDKAE

SEQ ID NO: 5273 - protein, 186 aa, Artificial Sequence; identical to SEQ ID NO: 5272
  Synthetic

SEQ ID NO: 5274 - protein, 186 aa, Artificial Sequence
  Synthetic
SVEEELEKVKRKAEKLLEDSDREIKRVTKKAEKVLEDSRKAVEEVEKEVKEVLDEIRANVREEDLKRILEELTEKIKRLTDRLREVLKDSERNVRELKKELERMLEESKKDIEELVRELEEVSRVSDEKKAREVLKKVEDRIEENRRRNEEVLEKAEKIIEDNRRKNKTELDKVKEIIRRIREEAR

SEQ ID NO: 5275 - protein, 186 aa, Artificial Sequence; identical to SEQ ID NO: 5274
  Synthetic

SEQ ID NO: 5276 - protein, 184 aa, Artificial Sequence
  Synthetic
SAEDALRKLKEDSKRVNDESRREAERLKREIEKINEDSDREVEKVKKKIEELLEKVERDGVDKKDVDRLRERVEEIKRRLEEVRRDSKRLVEEMRKTLEEVLERSRKISEDIARRLDRVKDEVKDERELKRVLEEVERLIEKVKTDNKRVLDEIRKILEEIERKNRKVLKEVEDLLKTMEDEAR

SEQ ID NO: 5277 - protein, 184 aa, Artificial Sequence; identical to SEQ ID NO: 5276
  Synthetic

SEQ ID NO: 5278 - protein, 184 aa, Artificial Sequence
  Synthetic
SLEEAVREVERKAKKVNDDSREEVKKVKKESKDVNKKSEDDARRVVEEIKKILKRIAEKGVDEEILKRLEDTVRKIEKELRDVLKESRDKTKEIEERLDKVLKESEEMVDEIRKRLEEVTRRVKDERLAKKVLDEVEKIIEDIKRRNEEVLRRVREDIKRVEEENKKVLKRVKERVEEMRRRAD

SEQ ID NO: 5279 - protein, 184 aa, Artificial Sequence; identical to SEQ ID NO: 5278
  Synthetic

SEQ ID NO: 5280 - protein, 184 aa, Artificial Sequence
  Synthetic
EMEDEARKVIKKIKEVNRRSREESEKLSRKSERVNRESKRASEELREEIRRVLEEIRRKGVDEKILTDLERIIEEAERENKRVNEKSEEITRRIRERNERVNRRSEKEVEDIKRRLEEVKRRVKDRRKMKTVLDEVEKEIRRIEEENKKVLKESEDLIREVEKENREVLERTKRIIDEARKRAD

SEQ ID NO: 5281 - protein, 184 aa, Artificial Sequence; identical to SEQ ID NO: 5280
  Synthetic

SEQ ID NO: 5282 - protein, 184 aa, Artificial Sequence
  Synthetic
SVDEAVKEVEDRLRKVNEESTRESKKVVDKARDVNRKSEEASRELEDRIEKVLTDIRRKGVDEKKLKKLRDIVREAKKRNDEVNKESRDIVRELTDKNRRVNEESKRESDDLKRRLEEVSRKVKDERLAKRVLDEAKRILDEVKEKNRRVLEDSERIIKEVEDRNRRVLEETRRIIEELRKEAD

SEQ ID NO: 5283 - protein, 184 aa, Artificial Sequence; identical to SEQ ID NO: 5282
  Synthetic

SEQ ID NO: 5284 - protein, 184 aa, Artificial Sequence
  Synthetic
SVEEMVKELIRKLREVNKRSADELDRVRKRMKKLNDDSRKAVKEVREKIERLLDAARRRGVREEDLKRLKEEVDKAEEELRRVLRKSEEIVKELEKRARKVLEDSKEDSRRIEEELKEVERRVRDERLAEEVLRRVEKKIEDIRRRNEKVLRELEKILREVSEENERVLRDLERKLRKLAEDDR

SEQ ID NO: 5285 - protein, 184 aa, Artificial Sequence; identical to SEQ ID NO: 5284
  Synthetic

SEQ ID NO: 5286 - protein, 184 aa, Artificial Sequence
  Synthetic
SVEDEIRKVKDELRRVNEKSTRDSKRVRDRMETVNRESEKRARDVKKRIKEVLDKIRERGVDEEKLERLREIVERIEEELDRVLEESKKLVKDVEETNRRVNRDSERESERIMTELDKVKDDVKDKRLADDVLRKVRDEIRKIEEDNREVLRRSEDILRKIKERNKKVLDDVRRKIDKARRDAE

SEQ ID NO: 5287 - protein, 184 aa, Artificial Sequence; identical to SEQ ID NO: 5286
  Synthetic

SEQ ID NO: 5288 - protein, 177 aa, Artificial Sequence
  Synthetic
KAEEAAERIKKKLEDILKRAKEESEKILDKLREVLERSKRKHEELIRRAEEVLKDIARKGVSEEILERLRKIVEELKKKSEEDIKRVEDILRRNAELHEEVLRRVEDIVKELEDRIRKDGVDRDVLTELEKIIKELEKRAKEVLDTSRKSIEDLERRNEESLKRLTDDLKRAKEEAD

SEQ ID NO: 5289 - protein, 177 aa, Artificial Sequence; identical to SEQ ID NO: 5288
  Synthetic

SEQ ID NO: 5290 - protein, 181 aa, Artificial Sequence
  Synthetic
SEVEEVLKRLEELLRDSERKVEEMERRLKEIIDRLREEAKRVLDESKESSKRLDELAKKGIDRKDLRENHERNKDLVRRLEKLLEKVLKELEDLARKLREMLKRSNEELKRLVDRLRERRDREEADRALRDLERKHEKRVREVDDRLKKIEDELKRVVEEIRKRLEDLKEENRRIVDRTAT

SEQ ID NO: 5291 - protein, 181 aa, Artificial Sequence; identical to SEQ ID NO: 5290
  Synthetic

SEQ ID NO: 5292 - protein, 181 aa, Artificial Sequence
  Synthetic
SDVDEVLKRSEDSTRRLRERAERMLEELERLIRESKRTADEVLKRSRESSKRLDEEVRAGVDRESLKRNHEENRELAEELRRRLKESNDRLRELVRRVEEELRENHRRNEELVKELLRRRDEEEVRKELERLRRENEKVVREAKKRLEDIIRKHEKIVKEIKEALDKLLEDNKRIVDRTSK

SEQ ID NO: 5293 - protein, 181 aa, Artificial Sequence; identical to SEQ ID NO: 5292
  Synthetic

SEQ ID NO: 5294 - protein, 183 aa, Artificial Sequence
  Synthetic
DELEDVLRKAKELIKRDRDEVRRVLEELKRSTEDLRRKVRDVERRLKELIDELDDIARKIKDKETLRRLLREIEERLKRLAEELRRLLKKALEEHEKLVRDLDKKNKDSLRKLEELLRDIVRRAGRRLKELEKIKKELEDVIRETRERLKKVLDETREDIKDVDRRLRKLEEEIRRKVEEDER

SEQ ID NO: 5295 - protein, 183 aa, Artificial Sequence; identical to SEQ ID NO: 5294
  Synthetic

SEQ ID NO: 5296 - protein, 183 aa, Artificial Sequence
  Synthetic
SELEEIIERIKRLIEEDRETVKEVLERLRRLSDEDRKEVKRVLREIKELIKELEDLRRRIKDEETLRRLLEDIRRRLEELVRRLEEKNRRSHEEHKKLAEELRKKNDDSMRKIERLVEKAVEDAGRPLEELERLKEEAKRVIKRTRDELEKILRENRELIDRSRKELRDLEKELRDVVRESER

SEQ ID NO: 5297 - protein, 183 aa, Artificial Sequence; identical to SEQ ID NO: 5296
  Synthetic

SEQ ID NO: 5298 - protein, 187 aa, Artificial Sequence
  Synthetic
SVREELEKLVRELRRLLEKSKRDTDRLSEEMEELNRRAEELIRTIERRLRELLRKIRENVDKEELKRILEELEETVRRVIEKAKKVLEESKRHSDEVRRRLEEINRRIEKKIRDLERELEKVERELKTEKLVEELKRRAKKVIRELEELSRRATEEVKRVLKENEDLVREVEKDLEEILKRIKDRAD

SEQ ID NO: 5299 - protein, 187 aa, Artificial Sequence; identical to SEQ ID NO: 5298
  Synthetic

SEQ ID NO: 5300 - protein, 187 aa, Artificial Sequence
  Synthetic
SLEEELKKLEEEVRRLLEKSKEDTDRLKKEIEDLNKKAEDDVREIRKELEKLLRDIARNVDEERMRKKLEELRERVRELEEKVREVLKTSKENSKRLIEDLKRINDELEKIVRDVTRELDEVAKRLTTEELAKRLSDKFRRILEKLEEDSKRALDKAREILKRNEELLRELLEELRRILEEIERRAR

SEQ ID NO: 5301 - protein, 187 aa, Artificial Sequence; identical to SEQ ID NO: 5300
  Synthetic

SEQ ID NO: 5302 - protein, 187 aa, Artificial Sequence
  Synthetic
KAKEELDRLRKEARDLLEDSKTKTKRLVEEMDKVNEDSKRESKKLLDELEKLLRDIEKRVREEELRKTLKELEDTVRRLEEELRKIDKESEENSRRLDERLKKINKELEDEIRKLDERLKRVEDKLKDDKLVEKLREEVERILERVKELSKKAIDEVKEVIKRNRDLSKRVIERAKEILRRIEEKAR

SEQ ID NO: 5303 - protein, 187 aa, Artificial Sequence; identical to SEQ ID NO: 5302
  Synthetic

SEQ ID NO: 5304 - protein, 182 aa, Artificial Sequence
  Synthetic
SVEDELRRIEEEMKRLNEKVERDSRRVLKEVEDLNREIKKRSDDLEREIRRLLEEVKRRKSKDEEKLRRIKELVERLKEENRKMNEDSKRSTDRLREENKKVNEDSKRSSEEIKRRADDVRKRNGDIRELLKELRKILDDNRETARKVLEDSKRIIERNKREAEKLERRSRKILKDIEDEAR

SEQ ID NO: 5305 - protein, 182 aa, Artificial Sequence; identical to SEQ ID NO: 5304
  Synthetic

SEQ ID NO: 5306 - protein, 182 aa, Artificial Sequence
  Synthetic
SVEEELRRLEKRIEELVREIERRLRELKKEVEELNERIKRASDEILDRIRRLLEEVRRRKREAEKVLREIEELIRRLKRENEEVNRDSKRSTEKLERDLRRVLEELKRTVEELKKRLREVERRNGDVRDVLREVERIIRELEERARDLLRRIREIIRRNEEKLERLLRRSKEILKEIEERAK

SEQ ID NO: 5307 - protein, 182 aa, Artificial Sequence; identical to SEQ ID NO: 5306
  Synthetic

SEQ ID NO: 5308 - protein, 179 aa, Artificial Sequence
  Synthetic
STERKLEELEKEAEKDLKEVEDRLKELNDHHDKRVKEVEDRLRRANKHHRDRLEDIRRRNISEELDKKLKDTLRELKRTTDRLRRILEKSKRDLERTTERLKRILDKIRRELKELSDKVKDRDTDEVLKRLKDLIKELRDEVRKVLTEHREIDKRVEEEVKRVLDEHREIDKRLDEETK

SEQ ID NO: 5309 - protein, 179 aa, Artificial Sequence; identical to SEQ ID NO: 5308
  Synthetic

SEQ ID NO: 5310 - protein, 179 aa, Artificial Sequence
  Synthetic
SSKEKIERLREKLEDLVRRVRKRLRELNEHHKELVKRIEDTLRELLRHHDELLKEAERRNIDKKLLDRLRETKERLKRLAEELRKILKESLDELRRTTEELERILEEILRRLEDLIRKMDERDTEDVLRRIEELIERLKREVDRVEREHERIDEEVRKRAEDIERRARDIDREVKETTR

SEQ ID NO: 5311 - protein, 179 aa, Artificial Sequence; identical to SEQ ID NO: 5310
  Synthetic

SEQ ID NO: 5312 - protein, 179 aa, Artificial Sequence
  Synthetic
SVRETLERMLRHHAELVERVRRELRKLNKHHRDEVKRVEERLDELRKHHEELLRRAEKDNVSEDLLREAERTKRELEKLVRDLREILKRSLETLEETTRRLEKRLDESLEELKKLIKDVDERDAKKVVEDLRRINERVKDEVRRALREHERIDKEVREIVEEIERRAEKIDEELKRTID

SEQ ID NO: 5313 - protein, 179 aa, Artificial Sequence; identical to SEQ ID NO: 5312
  Synthetic

SEQ ID NO: 5314 - protein, 179 aa, Artificial Sequence
  Synthetic
SVEEALTEIKKRLDKKVEDIERELKKLLDHHKELVDDVRRKLEELNRHHDRLLDEIRKDNSSEELEEKLKKTKDDLRRTTEELERRLEKSLDRLRKLVETLRRILERIKKELKELIDRVKDRDKDEVLKRLEDLIRELDRRVKEIEKRAEEIDRELEDRVRKVLDEHRKIDERAARETD

SEQ ID NO: 5315 - protein, 179 aa, Artificial Sequence; identical to SEQ ID NO: 5314
  Synthetic

SEQ ID NO: 5316 - protein, 179 aa, Artificial Sequence
  Synthetic
ETKERLDEILKHHEEEVKKVRKRLDELLRHHEELVKEVDKRLKEMNDHHRRLLDEADKDNIDKKLKDKLDETRDELRRTTERVKKRLKESLETLRKLVEDLRRELDKSREELKRLIDEVKDRDKDDVLRRLEDINRRLEERVRKAERRLEEIDEKAERITEKVKREHEDIDRRVEDIKR

SEQ ID NO: 5317 - protein, 179 aa, Artificial Sequence; identical to SEQ ID NO: 5316
  Synthetic

SEQ ID NO: 5318 - protein, 179 aa, Artificial Sequence
  Synthetic
SVKERLDEVRRHHEDEVRRVDEKLKEILRHHEEEVRRVDKELKELLDHHKELLDDAERRNISEELRKRLEDTEERLRELAKELREILKRSLEELKKLLDELRRILEESLRELEKLIRDVKDKDAEEVKKRLDDINKRVEEIVREIEERLRRIDEKLKEIVRKAAEDIRRIDKEVEDEIR

SEQ ID NO: 5319 - protein, 179 aa, Artificial Sequence; identical to SEQ ID NO: 5318
  Synthetic

SEQ ID NO: 5320 - protein, 184 aa, Artificial Sequence
  Synthetic
SLEELLKKIEERLRDLSRKVAEELKRILDELRELSERAKDLNRRVNETLRKLVEDITRRDKDTEELKEILREVEDRARKISERDKELNEEVNKEVTEIVRRLEKLNEESKRKVEKLREELKRVDSEEDVKKVLDELEKLLKDNEELNRRVRKELKDLLETLRKLNERSKEELDKLIKELEDRAR

SEQ ID NO: 5321 - protein, 184 aa, Artificial Sequence; identical to SEQ ID NO: 5320
  Synthetic

SEQ ID NO: 5322 - protein, 185 aa, Artificial Sequence
  Synthetic
REVEEILRKLKEITDRTRDLSRRNEEELRRIIRELEEMSKRNKREVEEIIKEAKELAKRTKDKKELEDIVREIKKKVDDSKEKDKELVKRIRERIEESRKRDKRIADESRRLVEEVAEELERKGVDEKAREDLDRLRRENEELIERSERINKKIKEELERVIKRSEDLNKKLEEDLEKLIRDETR

SEQ ID NO: 5323 - protein, 185 aa, Artificial Sequence; identical to SEQ ID NO: 5322
  Synthetic

SEQ ID NO: 5324 - protein, 185 aa, Artificial Sequence
  Synthetic
EEVERILTKAERVTRETERLSRENEKELKKITDETRRLSEKNIEDIERIIEEMERLARTTKDERELEEIARRIEEEIRKSIERDKEIARESRELLKESKKKDKKIMDDSRRLVEELRRELEEKGVDEDARRELKRLEEENRRLLEESEERNRRIEERNEELIEESERRNRELEKRLRDLIKETRD

SEQ ID NO: 5325 - protein, 185 aa, Artificial Sequence; identical to SEQ ID NO: 5324
  Synthetic

SEQ ID NO: 5326 - protein, 182 aa, Artificial Sequence
  Synthetic
SAEDSIRRAEEEARRLIKRAEEEAEKSARRHKELNERARKRAKESAEEAEKLIREAARSGRVDKKELDKAAEEAKRAIEDSERDLERAAKEDRESIEESKKDLERAAKELREVIEDLKRAAKEGADARDLEEKAKKALEKAERIARKNAEDNERNLEKSKRIAERNAKKNEEALREIAKKAN

SEQ ID NO: 5327 - protein, 182 aa, Artificial Sequence; identical to SEQ ID NO: 5326
  Synthetic

SEQ ID NO: 5328 - protein, 182 aa, Artificial Sequence
  Synthetic
SAREDIERLVKELKELVERAREAIKRSAEEHKKLNKELKDRIKEVVERLKKLIDDARRDGRVDEKRLRDVVREVARVLRDAEERVKELHKRDRDSIDRSRRDLDRLVKELKDVIDDLRDLLRRGVPAEELLKKAKRVIEKAEKILRENKEENERNLATSEKIARDIEDKLRKVLKRIADEIR

SEQ ID NO: 5329 - protein, 182 aa, Artificial Sequence; identical to SEQ ID NO: 5328
  Synthetic

SEQ ID NO: 5330 - protein, 181 aa, Artificial Sequence
  Synthetic
SAEDKLREVEKHHEKLVRDIRRKLEKNLRDHAEKVDRVRKKLEEAERRLKELVDRVRKDNVSEELLETIERLLEELKRLLRELERLLKKTLDEDREILERAERELKRTLDELRKIVEDVRRRGRDDERVDRDLERLDREVEEIARRLTRLMEESNKRLEDIVRTIEERIKEILERLKRTAK

SEQ ID NO: 5331 - protein, 181 aa, Artificial Sequence; identical to SEQ ID NO: 5330
  Synthetic

SEQ ID NO: 5332 - protein, 179 aa, Artificial Sequence
  Synthetic
SDVEKIIKDLEKVIDDNRRTNEKAIRDAEDIIRRSEEHSRKVIEKLKKIIKEVKEEAERLKGDERVVKELEDELRKVKKEWEDVSKENRDTNRRVLEELKKILEDSKRHLDKALKKVRDDGVDEEEVRRVEEEIKKLLEDSRRLLRRIEEESRRLDEEDERLMKEIDDEIRELLERIRR

SEQ ID NO: 5333 - protein, 179 aa, Artificial Sequence; identical to SEQ ID NO: 5332
  Synthetic

SEQ ID NO: 5334 - protein, 179 aa, Artificial Sequence
  Synthetic
KEVEDIVDEARKRIDTVRKESKRVVEEVERRIEENKRRNEEVIKRVREDIDRVRKEADKLKGDDKVVKKLEDDLRKVLEDLKRIVDESAKHLKDLTRKWEEISKRLKDRLEEVIRELERRGVDREELERLRREVEKLEEDDRRLLEELEKRARELLERSKKLLDEIRREMEELLKRIRT

SEQ ID NO: 5335 - protein, 179 aa, Artificial Sequence; identical to SEQ ID NO: 5334
  Synthetic

SEQ ID NO: 5336 - protein, 179 aa, Artificial Sequence
  Synthetic
KEVEDIIREVEKRIRDSERHSKEVLDRAEEVIDDNRRKNEEVIKEAEEIIDRIRREADRLKGDEKVVRELEERLRRALEKLRRILKESTKHLKKLIEDWKRRSEEDERRNRDVLRELERRGVDKDLLKEVEERSRRVIEKDRELLKRLEDKVRKLVEDSRRMVKRIEEEIRKLLEDIRR

SEQ ID NO: 5337 - protein, 179 aa, Artificial Sequence; identical to SEQ ID NO: 5336
  Synthetic

SEQ ID NO: 5338 - protein, 183 aa, Artificial Sequence
  Synthetic
SELEKIIEDIKRLIDELRKLVEDVERRNRKLSEDDKRLVEEVLKRLDELIRRLREIAKKIKDKDTLRKILRDILEELKKLLETLRRLNEDSLEKSKRSVEELRRLLRRIKEELKRLLEEAATRAGRKVERLDELRERLKRLEDEVRRRLEELERENRKIIEETEEALRRIEEKARKELEEVDR

SEQ ID NO: 5339 - protein, 183 aa, Artificial Sequence; identical to SEQ ID NO: 5338
  Synthetic

SEQ ID NO: 5340 - protein, 183 aa, Artificial Sequence
  Synthetic
SELDDIIRKIEELIRDDERKVRKAVRENEDLSRRDEERVRKVIDEARKLLKRLEEIAREIKDKDTLREILEEIKKRLEELVKTLKDTNRKSKRDSERSVEEVRKTNEKSRRDLERLAKELADREGRKSEKLDELRKRLEDLIRETEKELRRLERENDEIEKRTEDLLRRLREELRRIVEEVER

SEQ ID NO: 5341 - protein, 183 aa, Artificial Sequence; identical to SEQ ID NO: 5340
  Synthetic

SEQ ID NO: 5342 - protein, 183 aa, Artificial Sequence
  Synthetic
DDLERIIEEIERLIRTLEELVRDALRKSKRLLEENKKLNEEVLRRIKDLIRRLEEIARRIEDKKTLEDILKEIEDRIKELAERARRINEKSLRDNKELVKDVRRKVEEIKRRIEELVEEIVRRAGRKLEELDKLREELKRLVDRVEEMLRKSEEDTERIIRKSEEDLERLERDLKRLVEEVRR

SEQ ID NO: 5343 - protein, 183 aa, Artificial Sequence; identical to SEQ ID NO: 5342
  Synthetic

SEQ ID NO: 5344 - protein, 183 aa, Artificial Sequence
  Synthetic
KELEDIIREAEKLIEENSRKNKEMLDRSKELIERNERKNRDVIRRLEELIEDLRRIAEEIKDKDTLRKILREILEELKELAKRLRDTNRESEKRNRDLVKRIREENEKSKRDLKRLIDDAVRRAGRKSEELDRLRKKLEDNIRESEKELRRSEEETKKLIDDSERELERIERRARELLERVRR

SEQ ID NO: 5345 - protein, 183 aa, Artificial Sequence; identical to SEQ ID NO: 5344
  Synthetic

SEQ ID NO: 5346 - protein, 186 aa, Artificial Sequence
  Synthetic
SDVEDLLRKIKKILREIAEESKRTVRENEELTDRVKKKIREIVERIRRIIKELEERLRRIKDKRDLERVLRDAERRIRELIETAERLLEEVKERSKRSVERNEELLDKIRKEIEDLVRTLRERAKNVKDVEDKLRELERELKKIEDDSRRLLKRLEEENRTLVKEVRERLKRLEDDVRKLKEDVTT

SEQ ID NO: 5347 - protein, 186 aa, Artificial Sequence; identical to SEQ ID NO: 5346
  Synthetic

SEQ ID NO: 5348 - protein, 186 aa, Artificial Sequence
  Synthetic
DEVDKLVEEIKKIIEDVRRESDKTVRDNEELTKKLAEDSKRSLDEIKKLIEELRKEIERIKDKETLDRVLREATKRLKDLVDENERLLRDAKRKSDESVKRNEEVLRRVRKEIDDLVRELRERAKTSEEVERKLKKLKEELERLVEESRRKLEELKKRNEELVRRSREELDKLRREVKETLERVKR

SEQ ID NO: 5349 - protein, 186 aa, Artificial Sequence; identical to SEQ ID NO: 5348
  Synthetic

SEQ ID NO: 5350 - protein, 186 aa, Artificial Sequence
  Synthetic
SDAEEILKEIERLIREVEKTSRRTVEEDERVTEEVRKKSEKSVRDIEELLKEIKRELEEIKDKDTLDKLLRDIRETLRKIVEDNRKLLEDVKRESEKTVRDNKEILRRVKEELRKLVEKLRRRADKSERVERKLEELKRRLEELEKESERELDRLRKENEDLVRRSEEELRRLRRELEEIVREARE

SEQ ID NO: 5351 - protein, 186 aa, Artificial Sequence; identical to SEQ ID NO: 5350
  Synthetic

SEQ ID NO: 5352 - protein, 172 aa, Artificial Sequence
  Synthetic
SEAEKVLKEVEDIIREVEEENRRLIREIEEEIRRVKEEVERLLRKSEKDIKEVEESPKSKDLERRLEEVDEELKREIERIERELDKVLRELEERSRESVERLRRVLKEVRERNGMDEKLLREIERRMRELEKTSRKLLKEIKKKAKELKEKAEEVLRRSRKRTEELVDRLRK

SEQ ID NO: 5353 - protein, 172 aa, Artificial Sequence; identical to SEQ ID NO: 5352
  Synthetic

SEQ ID NO: 5354 - protein, 183 aa, Artificial Sequence
  Synthetic
DVEDLIRELRKRLDELRKESEELLRRSKRKHEKLLTDSRKLLRDIEREARKLLEDVKRKGASESTVEKIKRDLDRLIKELEKVHRDSRRKSKEDLDRLKRVHDESKKKIDELRKELDEMSRVKDREMIETLIRKAKEIIDRLREENRRAVRRSDETLRRLKEENDKVITDVKRKIKELRDEVK

SEQ ID NO: 5355 - protein, 183 aa, Artificial Sequence; identical to SEQ ID NO: 5354
  Synthetic

SEQ ID NO: 5356 - protein, 183 aa, Artificial Sequence
  Synthetic
SIDEEITRLEEESRRDEEESKRLLEKSRDDHRRLLERSEKLLRELEKRARDLLEDVKRKGASKSTVEKLREDIERVLDKLRKVHERSRRKSEEDIRRLEEVHERSKRKHEKLRRELEDVRRVSDEEMVRRVIEKYERAVERSTEENRDAFRRSEETIRELAKENEDAIREVKEIIDKLREDVR

SEQ ID NO: 5357 - protein, 183 aa, Artificial Sequence; identical to SEQ ID NO: 5356
  Synthetic

SEQ ID NO: 5358 - protein, 183 aa, Artificial Sequence
  Synthetic
DVEELIKELERRLRKLLEDSRRLLEESRREHKKLIDDSRRLLDELRRRLERLLEKVRRRGASESKVERIERRLRDLLRRLREVHERSKENSKRDIERLERVHDESRKEIKELLDELREMSKMSRREVIEAVIRKAEDIIRRLRRKNEKAVEESRENIKEIKRENKRVIDEAREIIKRLEEELE

SEQ ID NO: 5359 - protein, 183 aa, Artificial Sequence; identical to SEQ ID NO: 5358
  Synthetic

SEQ ID NO: 5360 - protein, 183 aa, Artificial Sequence
  Synthetic
SVEDLLRRLEEESRKDLDDSRRLLDESRKRHEDLLRKSEELLRELEERLRRLLEKVKKKGLDDSDVKRLEKKARDLLKELREAHKRSRDNSERDIRDLERVHRESEKRHRDLRKKLEDVRRSRREDVIRKLIEDYERLVKESTDRNRRAVEKSRENLKRLDKENRDVIEKARRIIEELEKEVK

SEQ ID NO: 5361 - protein, 183 aa, Artificial Sequence; identical to SEQ ID NO: 5360
  Synthetic

SEQ ID NO: 5362 - protein, 183 aa, Artificial Sequence
  Synthetic
SVDELIEELRRRLEKLLREAEELLKESRKRHEELKKRSKELLDELEREVERVLEELRRKGVSDDKVKRVEDRLTELIRDLRRAHKESEKNSRDDIRRLEEVLKKLEKKIRDLERELEEMRRSKDEEVIERVIRKADEIIKRLKKELREVVERSKENIKKLEEENRRVIKKAREELRKIEEEIR

SEQ ID NO: 5363 - protein, 183 aa, Artificial Sequence; identical to SEQ ID NO: 5362
  Synthetic

SEQ ID NO: 5364 - protein, 179 aa, Artificial Sequence
  Synthetic
SEVDEVLKTLKELIERLRERVKEVLKRLEKLLKELEDLSRETVRELRETNDDLRRKAEKTRDKDTLRELVKRVLDENKKIITRNRDTVRRAMERIEDLIRELERTVEKIRRDIERIIRELIRKREAAEKVRRDVDRLRKEVEEMLERVKRKLDELRKDSDRLAREVEDSTRKIERDVEK

SEQ ID NO: 5365 - protein, 179 aa, Artificial Sequence; identical to SEQ ID NO: 5364
  Synthetic

SEQ ID NO: 5366 - protein, 180 aa, Artificial Sequence
  Synthetic
SELEEMVKKVKEIIDRARERIRELIERHKELDRESRKRIEDIIREARELNKDVKRVIKEIKKEEEEKLKKILEDLKRLSDEVKRRLERILEENRKLVRESEKRLEDVLKELKELLRDVERKARVDEALEELKRRVKRLEEKLREDIKRLRENNERIREDVERLAEELDRHTRKLMEEVKK

SEQ ID NO: 5367 - protein, 180 aa, Artificial Sequence; identical to SEQ ID NO: 5366
  Synthetic

SEQ ID NO: 5368 - protein, 180 aa, Artificial Sequence
  Synthetic
SELEDIVEKAKKIIEDVRRRIEKLIRDDKRLNDESKKTIEELIRKARKLNEEAERIIRKIKEDDEKKLREILKRLRELSEEIIKRLREVLDRDRRLNKKTVDDARRILRELKELLKEVEKRIRVRELLEKLRRDVEELEREVRELLERLKENSKRIEDEVRELMKELKRHTEELEREAER

SEQ ID NO: 5369 - protein, 180 aa, Artificial Sequence; identical to SEQ ID NO: 5368
  Synthetic

SEQ ID NO: 5370 - protein, 180 aa, Artificial Sequence
  Synthetic
RELEEIVERAKEIIRRVAEKIKKLIEEAERLDRDSKRKIDELIEKVKKLNEDVRRTIEEIKEDDRKTLREILETLKDLSRRAIEEARRILEENKKLSKEIEDRVREVLRELKKLVDDIRREMKVEEMLRRLTELLKELADEVKKLLDRLKENNEKIREDVERLLRELEEHTKKLEEDVTR

SEQ ID NO: 5371 - protein, 180 aa, Artificial Sequence; identical to SEQ ID NO: 5370
  Synthetic

SEQ ID NO: 5372 - protein, 179 aa, Artificial Sequence
  Synthetic
SEEERVLKELEDVLREHKRKADESSRKLEEVHRRHRKRMEESKRELEEVHKEAKDRITKNRDDTKLLEDIIRTLRKINKDVARRNEESIRELKEINKRVLDENKKSREELEEILRRVIERVGETEELEDVERKARELEERNKKLLKDSEEATEELRRENEEMLEESKRRTEKLEREVRT

SEQ ID NO: 5373 - protein, 179 aa, Artificial Sequence; identical to SEQ ID NO: 5372
  Synthetic

SEQ ID NO: 5374 - protein, 175 aa, Artificial Sequence
  Synthetic
DKVREVLRESEKLLEDWDRELKEVLKDFKRTLDELEERLRDVLRKNKKSLEDLKRRGLDDRVVRKVEEEHRRVAEEIKRLVREAEKLLEDVKRELERLKREAEEENKRVRDKVRKDGDADDRIMRELRELNRRLDESVKEIRDRLRRILDKLRKMIEKLKKELEDTDRELEERVR

SEQ ID NO: 5375 - protein, 175 aa, Artificial Sequence; identical to SEQ ID NO: 5374
  Synthetic

SEQ ID NO: 5376 - protein, 175 aa, Artificial Sequence
  Synthetic
SKAEEVLKTSEKLLEEWRRRVKEVEDRNEETIKRLKEELDRALKENEESLRELEKRGLDEEVKRRVEERHRKIEEEIEELRKKLREKHKKVKRDIERLVKKMKDDNEEVKKRVDKRGDLDDRISEELKKLNEELERELRKLSEELKEVDREAKEEIRRLVEELREIDKRLEEETK

SEQ ID NO: 5377 - protein, 175 aa, Artificial Sequence; identical to SEQ ID NO: 5376
  Synthetic

SEQ ID NO: 5378 - protein, 175 aa, Artificial Sequence
  Synthetic
SEAEKVLTDFRDALEKDRERNERVLRENEETIRRDKEENERVLRENDKSLKELRKRGLDERVADKVRKDHEKVKRDTERLVRELRRVHEKVRKETERLIREMRKALEDVRDDVRRRGSADDRIKKTLERLLRESKKASEKLKDDLRKLDKRSKEESRRLTERLREIDEELRRRVD

SEQ ID NO: 5379 - protein, 175 aa, Artificial Sequence; identical to SEQ ID NO: 5378
  Synthetic

SEQ ID NO: 5380 - protein, 175 aa, Artificial Sequence
  Synthetic
SEAEDVLRRFEEELRRDDEKNERVLRRNEETNRRDDETNRDVLRRNKESLDKLRKRGLDEEVVKRLREVHERVREETKKLNREHKKAHEDVKRDTEDLKRRMEDELRRVEDEVRKRGSADKRIKDELRKLLKRSEERSEELRRRLEDLDRRSKETSDKLREELERLDRDVERKVN

SEQ ID NO: 5381 - protein, 175 aa, Artificial Sequence; identical to SEQ ID NO: 5380
  Synthetic

SEQ ID NO: 5382 - protein, 175 aa, Artificial Sequence
  Synthetic
SEAEKVEDDVRRVLETDEKKNRDVLDTNRRTIEEDRKRNEEVLRKARKMLEDLKRRGLDKDVVKRVEEVLERVKRETERLTRELRKFHEEVRKETEDLKREIEKLLRDLRRDVERRGSADERLRETLEELLRRSDERSRRIMEDLKRLDTDSKRVSEELKRRLEELLKDLERKVR

SEQ ID NO: 5383 - protein, 175 aa, Artificial Sequence; identical to SEQ ID NO: 5382
  Synthetic

SEQ ID NO: 5384 - protein, 185 aa, Artificial Sequence
  Synthetic
SEVDEITKELEESLKDLDRVVRELREKIKKIDKELAETVDKLTEEAKEILKTLRDIIRRGNNTEEVSREAEELLKELKKRLEELEREVERLHEELRKEIEELEREAEKRNKDVKEKIDRGNLDKKLKEKVDRVHKRHKDRLDEIKRKLKKVLEDNRETLERIKRKLRKVLEDLKRMLDELERELR

SEQ ID NO: 5385 - protein, 185 aa, Artificial Sequence; identical to SEQ ID NO: 5384
  Synthetic

SEQ ID NO: 5386 - protein, 176 aa, Artificial Sequence
  Synthetic
KETEDLVRRLRKVLKELEERVRTLMRDNERVNKEIADKIRRLREKLREEDERVDEVVKRREVDEKDLKRRADESREELKKVLKDLEDTVKRLEEKNDKVRRELKKIVDELRRELEREVKEAREVLREMDERVKELEERLERVLRKSKTDADRWRRELKRVLEEHDKTVKEIREKTR

SEQ ID NO: 5387 - protein, 176 aa, Artificial Sequence; identical to SEQ ID NO: 5386
  Synthetic

SEQ ID NO: 5388 - protein, 178 aa, Artificial Sequence
  Synthetic
KEKDEVVKRYEDRIKEIRERLKEVVTEHEDRLRKWRKDLEEVVERNRRSIKKIDEEVKRRGVPEKVKRELREIEKRSEEIIKKVREELEDLARKSRERIKRVEEEHDKNTDKARKDITKEGVDEDVVRKLDEDLKRNEDHLEEVRKELERLNEEIEKLIRDLLEILRRIDKELRDKLE

SEQ ID NO: 5389 - protein, 178 aa, Artificial Sequence; identical to SEQ ID NO: 5388
  Synthetic

SEQ ID NO: 5390 - protein, 178 aa, Artificial Sequence
  Synthetic
DEEKDVTRRVREVIKRLEEELEEVVRRHRESLKRLKERLEEVVRRNRKSIREIEKEVKDAGLPDEVKRRLDEIKKESEKRIDDARRREEEVEKDSERRIKEVEDRLKRKAERIEKAREERGVDEDVDRELARMLEELRDLLRRLAEELKRIDEELEKELRDVARELEKIDRDMREELR

SEQ ID NO: 5391 - protein, 178 aa, Artificial Sequence; identical to SEQ ID NO: 5390
  Synthetic

SEQ ID NO: 5392 - protein, 178 aa, Artificial Sequence
  Synthetic
DERKEVEERYRREIERIKTKLKEVVKRHEDSLKKIEDDLEEVRRDNERSIKEIREEVRKKGAPEKVEEDLRRIEEKSRRDIKRMEEDLKRMTEESRREIEDVERRHRENEERVEREIEKRGIDEDVDRELKEDLERNERHLEEVTRRLRKIDKDLKEKLKRLEEELKKIDREARERLR

SEQ ID NO: 5393 - protein, 178 aa, Artificial Sequence; identical to SEQ ID NO: 5392
  Synthetic

SEQ ID NO: 5394 - protein, 181 aa, Artificial Sequence
  Synthetic
KEIEDVKRRLEELDRRIKELVDRVRRKLEEVDTRAEKELRDVRRRLEELLERLEELIRRGTSEETLRRLAKEIRKIADEARKKLKKIKDDLKKEHDRVREKLEELARRSRKVLKEVRDRTGEVKELRDVIKENEDTLRRLKEEVEKVTKENEETLRRIERELDKVERDVERRIRELEEERR

SEQ ID NO: 5395 - protein, 181 aa, Artificial Sequence; identical to SEQ ID NO: 5394
  Synthetic

SEQ ID NO: 5396 - protein, 177 aa, Artificial Sequence
  Synthetic
SEVEKVLEDNKRSIDRLEEELRKVTRTSRELLKEWAKRLEDVLRDVKRAVDELETRGVDEKTLRELRKRLTDIEREIRKKLEEAEKKLRESERDVEDTLRRLREKSRRITEEARKGGDSDEIRKLKEELKRLDEEAARILETIMRRNKDLNDRLREIIETLKKRLKDLLKEVEDRAR

SEQ ID NO: 5397 - protein, 177 aa, Artificial Sequence; identical to SEQ ID NO: 5396
  Synthetic

SEQ ID NO: 5398 - protein, 178 aa, Artificial Sequence
  Synthetic
DAEKLREDVERTLRRLRKELKDSIKRNREELERLERKLRKSIKETEDEVRKLEEKLERRLKDDEEVRRRAEELAKRLKELNEDVKRKADRLKEESERLDEELEKRLRDLEREVKKLEKDQDVDDDVRRLVEKIEREVRKLIEDHKKKSEDIVRTVEKLIEDHKRRVDRISEEVEEELR

SEQ ID NO: 5399 - protein, 178 aa, Artificial Sequence; identical to SEQ ID NO: 5398
  Synthetic

SEQ ID NO: 5400 - protein, 178 aa, Artificial Sequence
  Synthetic
SKEDLKRKVKKILEDVERELRRSIEDTERLLREVEKRLEDSVRENRRKLREVEEKLRRRLKDKREVMEKLRKIVTESEELDKDVKRKVEELERRARELNRELKEKLEELKKEAEELDRREDVDRRVDELVKEIEERARKLIKEHRDRVRELLRELEELIERHKELSERILKELEELLK

SEQ ID NO: 5401 - protein, 178 aa, Artificial Sequence; identical to SEQ ID NO: 5400
  Synthetic

SEQ ID NO: 5402 - protein, 174 aa, Artificial Sequence
  Synthetic
SEKEEIARRLEKVHREHREELKRLEDRLREVLKRNRETIEDIRRKLEEVLRRLRERLVDDEEVLRELTEEAEELERRVRRRHEELERLVEELKRKADKINKDLERLIRELKERLDDGDEEKLRRDVERIVKEAEDTLRELERVVRELEKEVRETDKRLDERVKELEEKVRRAAK

SEQ ID NO: 5403 - protein, 174 aa, Artificial Sequence; identical to SEQ ID NO: 5402
  Synthetic

SEQ ID NO: 5404 - protein, 178 aa, Artificial Sequence
  Synthetic
SEEEDARRLLEEVERALREIKKRLKELLERHRRAVEELKKRAEDLLDEHRRAIERIADERGDRDTIADKVRKEIERSHTELKKLEEEIERISRDADRRVKEIAREAEELLRELEERLERKRVSEEIKRRLKELAKDLRRAIKEVKERLKESHDELKRAIEDVKRKLEELDEKLKRDED

SEQ ID NO: 5405 - protein, 178 aa, Artificial Sequence; identical to SEQ ID NO: 5404
  Synthetic

SEQ ID NO: 5406 - protein, 172 aa, Artificial Sequence
  Synthetic
SERERVERSVEELIRRYREVLEESERRNRKLLKRYEDALKKSREDNKRLLDELRRANRGPEEFLERMERESRRIIRELEKNLERLKRESEDILRKLDKNMKDIERELKKLRDDDLPREDAERLLERIERHLRRSEKTSEELNRRLEDHARRSIEESKKLNEELERKLRELER

SEQ ID NO: 5407 - protein, 172 aa, Artificial Sequence; identical to SEQ ID NO: 5406
  Synthetic

SEQ ID NO: 5408 - protein, 182 aa, Artificial Sequence
  Synthetic
SSEETLRDINRKISKAIEEIEREAREIDRELRKAVEDLKREAEEIDERVREVIERIGTRDEDLKRLEEEIERLHRELEKKARDLARKARELHRRLEEKIRELADRLRRLSEEAEKRDGRDTEVKKVLDKNEELLKRWEDRLREVLERNRKTLREIERELEEVLRKNRESIKKLKRELEEASR

SEQ ID NO: 5409 - protein, 182 aa, Artificial Sequence; identical to SEQ ID NO: 5408
  Synthetic

SEQ ID NO: 5410 - protein, 182 aa, Artificial Sequence
  Synthetic
SSEEDLKRIDDELDKMVKDIERKIRRIDTELERVVKELKEDIERSLERLREVVERIGTREEDLTRLDKEAKDINKRLEEEARRLVDEAKKLHKRIEEEIRELEKRMEDLHKRVRDEVGDDRDVRRVLDENRKTLEDLKRKLKEVLDRNRETLKRIEKELREVHEKHNRALDELRKELEDRRR

SEQ ID NO: 5411 - protein, 182 aa, Artificial Sequence; identical to SEQ ID NO: 5410
  Synthetic

SEQ ID NO: 5412 - protein, 182 aa, Artificial Sequence
  Synthetic
SVEEEAEDILRRLDKTVRDLEREAEKIDEDLERVVRKLEEELRRSLEELRKVVEEIGSTEKDLKRLTEEAERKNKELRDRAEELADRARKLHEELRKKLEELLKRARELLKDLERRSGRDRDVTRVLRKAERVLKEIEEKLRDVLRRNRETLKRIEDELERVHRDHNRKLKRLKEELDERRR

SEQ ID NO: 5413 - protein, 182 aa, Artificial Sequence; identical to SEQ ID NO: 5412
  Synthetic

SEQ ID NO: 5414 - protein, 175 aa, Artificial Sequence
  Synthetic
DEDRDVEEKIKKIIKAAEDVNKESEERITELKKRLREIHERSERLIRRIEEEAKKKNRSRDVKRELERLERELRRLNEESERRLDELTKELRKENDEMLRRLKELTKRLRDVLRRGELDKKKLDEIIERLRKLLEDLEERNRRVIKELEDLIKENEELNRKVIRDLEKLVEDAER

SEQ ID NO: 5415 - protein, 175 aa, Artificial Sequence; identical to SEQ ID NO: 5414
  Synthetic

SEQ ID NO: 5416 - protein, 185 aa, Artificial Sequence
  Synthetic
DEEDEVRKRVEESERESRKLLTDVKREADRLKEHDKRLLDEVKKLLDKIREDLKKLPSEDEEKRKRLKELLDRIEKELRDLAKEVKERNERLDEELERLADEARKLHEEVKRRLDDLRRKSKDVDREELKRELDRIIEELKELNKRLEERLRELIRDWERVSRELAERLKRIIDKARRLLEEVAR

SEQ ID NO: 5417 - protein, 185 aa, Artificial Sequence; identical to SEQ ID NO: 5416
  Synthetic

SEQ ID NO: 5418 - protein, 176 aa, Artificial Sequence
  Synthetic
DEVEELLKELKDLSRESVRELRRLDEELKDLSRRSLKRLTDLDEELRREVEERRKENSKDDRVEEEVEEALKKSEEDLDRIIKEHRDAVRDSRRRLRRVLERHEEELDRLRREVEREGVGDERLKKLADDSRKRLRDVERHHEKLVEDSERRLKTIKDHHKKAVEDIRRDLRETKR

SEQ ID NO: 5419 - protein, 176 aa, Artificial Sequence; identical to SEQ ID NO: 5418
  Synthetic

SEQ ID NO: 5420 - protein, 175 aa, Artificial Sequence
  Synthetic
SEIDEVLKEIKRIIDELRERNRKHNEEVKDRIRRLEEELRKDLKDLKEIVERLAKSNVDREELDRILEELRKRVKEVEERLEEIRRDLERSHEELDRENRRVHKELKERLDRTNVRGEAADRARELEKELKDISDTSRKSNEELRKRLEEIKDRVRKEIEKLLRELEEIVKEKRR

SEQ ID NO: 5421 - protein, 175 aa, Artificial Sequence; identical to SEQ ID NO: 5420
  Synthetic

SEQ ID NO: 5422 - protein, 179 aa, Artificial Sequence
  Synthetic
DEEKETIKRHRESVREAERRLRDTLRRNRELVERLKRTLEDILRKHEKLVEELEEMAKRGEVDEDTLREVEKRSKDLEERLREILEKVREESERLTEELKKESEKHERDSRRLTEDLRRRSSDPEELKESHKDLKKIHEDAERRVRESHTDLRRIIEKVKEDLERSHRKLKRIADETRK

SEQ ID NO: 5423 - protein, 179 aa, Artificial Sequence; identical to SEQ ID NO: 5422
  Synthetic

SEQ ID NO: 5424 - protein, 179 aa, Artificial Sequence
  Synthetic
SEMEEVLERDERKVRELEREIEKNLRDHKDEVRRLREDLERVLREDEKLVRELRKKNSKDDRLAKEARERNKKLNDEVRKKLEDVRRKSERNKEEHKRRLDEVRRDNKRLNDDLKDRNISEELEDRMRRSSKRLEEVLRESEERLKRSDEDLRRVIDEIRRRLEESTRRLEETIKELKD

SEQ ID NO: 5425 - protein, 179 aa, Artificial Sequence; identical to SEQ ID NO: 5424
  Synthetic

SEQ ID NO: 5426 - protein, 182 aa, Artificial Sequence
  Synthetic
SEREEVLKDIRRLLDEVRRRIEDLLEKLRRLNEEVKEKVKESEKRLRDLMRKAKELMKRGLDEDTLRKVLKEVEDRLRENHKELKRVEEESRRALEDIRRKLKKVTDDLRKRLREIAEELERRGIRDEDIKRLIEELEKLLKEAKEKAEDLTREHDDTLKKIRERHKEIIKDIEDKLDTDRQ

SEQ ID NO: 5427 - protein, 182 aa, Artificial Sequence; identical to SEQ ID NO: 5426
  Synthetic

SEQ ID NO: 5428 - protein, 182 aa, Artificial Sequence
  Synthetic
DEEEELKKKLKAILEDLKREMREHEEKLRRSLERVARTAERHKETIKRIIDRLRKEAEDVPKDRRAEERLEEIRRELKKKDEDTERRSRKNEKELKDLNDETDKRLKDIEEEVKRTIKRLKDESDTSEEVKRIAEDIKRVLEEIRKRSREILEEVKRLHKKIKDDSRKLLKDLEKLVREIRK

SEQ ID NO: 5429 - protein, 182 aa, Artificial Sequence; identical to SEQ ID NO: 5428
  Synthetic

SEQ ID NO: 5430 - protein, 172 aa, Artificial Sequence
  Synthetic
SVEDEARRLEEKLRELTKRAREALEESNRRHRKSVEEVRRSLKKNHEKLEELARRVSRIDERRVREIKRRHEELLERLKDELDKSEEEHERLIEELERLLEEARREVERLRREREVDERLLKELEDLIEEVERELRRVLTESKRLNEELRKRVKEIEERSEELIERLDREVR

SEQ ID NO: 5431 - protein, 172 aa, Artificial Sequence; identical to SEQ ID NO: 5430
  Synthetic

SEQ ID NO: 5432 - protein, 172 aa, Artificial Sequence
  Synthetic
SMDESMETLTRELEDLLRKVEKKLRDSNEHHRELLEEVKRRVEENHKELDELLRRASRVPEEVLKKIRRDHDELRKELDKLLRDSERRHRELLEELKRRLEEVKRRLDKLRKDEDVTEELLTKIRKLIRDVEETVREAERESRALDERLERTVRDVEEKSKRLIEELRRRAD

SEQ ID NO: 5433 - protein, 172 aa, Artificial Sequence; identical to SEQ ID NO: 5432
  Synthetic

SEQ ID NO: 5434 - protein, 178 aa, Artificial Sequence
  Synthetic
DAEEEIRRIDKHHEENVRKAEEDIRRLIEHHKENVERVDRELRKIIREVEEVIRRVKELDERKVREVEDRLRRIKEEADRLSKESTDRLREIKKELERISEESKKELDKLRRKAREVRDERLVRELIRRLERTDEEHHKKVRRILEELKRIDEEHHRLVRRILKALKDIIKRLREEVK

SEQ ID NO: 5435 - protein, 178 aa, Artificial Sequence; identical to SEQ ID NO: 5434
  Synthetic

SEQ ID NO: 5436 - protein, 178 aa, Artificial Sequence
  Synthetic
SLEEEIEKIERHHRKLVEEARRELKRLEDKLEKLNRDSRKRLKELAERLKKLIDEIKKLDEELVKEVKRRLEELSKDLERKHRKVKKEVKELIDDAERILRESERELERLTEKLKEVRDERVARRVLDELRRLNEKLRRMVEELVKEIERLIKKVKDDSEDVMRKLKELLKRLEDRAR

SEQ ID NO: 5437 - protein, 178 aa, Artificial Sequence; identical to SEQ ID NO: 5436
  Synthetic

SEQ ID NO: 5438 - protein, 179 aa, Artificial Sequence
  Synthetic
REKEELLERLKKVLERTERVIRDLERRLREVLERSRKLAEDLVERLERSLKTLEKLAREGRVEERLLKRNHDELRKLLEDAKDKLRRINEELEKLLRDVKRELDRINEELKRLIDDATRRTGEREELREIYKRHEDLLRTAEERLRKVYDDHRDLLRKIDEDLKRLKERHEELLREIRR

SEQ ID NO: 5439 - protein, 179 aa, Artificial Sequence; identical to SEQ ID NO: 5438
  Synthetic

SEQ ID NO: 5440 - protein, 180 aa, Artificial Sequence
  Synthetic
EEKDRLKKRLEELNREHEELVRRISERVRRLLEKAEREIRTLKKRLDELNKELEEIIRRDNARDEVIKRVERIHEELEKELKELLDRLRDEMRRLEEELKRLNDEMRERHDRLRKEVKDVDEKVKKELEDVERHSRDSSRRVKEELERLKEELDRRLRKVKEDLERVKRHSKKLVDDAKR

SEQ ID NO: 5441 - protein, 180 aa, Artificial Sequence; identical to SEQ ID NO: 5440
  Synthetic

SEQ ID NO: 5442 - protein, 180 aa, Artificial Sequence
  Synthetic
SEREDLRRELEELLREHEEVVKEVKRRLEELLREHEEIVRELTERLKTINEDLKRVIKRDKASDETARELEKRHKKLEDEVRRSNERMRRTLEKLRKDLEDKNRDLERKLRRLEKDAKDISEEAEKELRDVAKRLRESSREVRETVRDVADKLRESSKKLEEELRRVKKHSKKLLDEAKK

SEQ ID NO: 5443 - protein, 180 aa, Artificial Sequence; identical to SEQ ID NO: 5442
  Synthetic

SEQ ID NO: 5444 - protein, 185 aa, Artificial Sequence
  Synthetic
SLEDLLRKVEEDAKRSIEKLEKDLKRVEDKHRELVERVKRRLDDVRRKLEEIIRDAERKGTSDEVREFLKEVERRVEKIADELRRKLERNHEELRRLADELRKKSEEVTRRLRDIMRKLREENTTDERVVREVLDELRKLLDDHNKKVKTVLDELKRSLDKLREEVKKVEDKLEEILKTLKETVR

SEQ ID NO: 5445 - protein, 185 aa, Artificial Sequence; identical to SEQ ID NO: 5444
  Synthetic

SEQ ID NO: 5446 - protein, 181 aa, Artificial Sequence
  Synthetic
SLEELIREIEKELDDLLREHEDLLRKIKEEIERLIREARELIKRLEEENEELRRNLRTDKETLERLEKRSEELKDENRKNLRKVEETLKRLEEKLRKHNEDLRREIEKLKKELRDAAREGMSEEEVKREIDRVRRVIEELRESVERLREEVRETLRRLKEHVKKDVEDHKETVKEVERRTR

SEQ ID NO: 5447 - protein, 181 aa, Artificial Sequence; identical to SEQ ID NO: 5446
  Synthetic

SEQ ID NO: 5448 - protein, 177 aa, Artificial Sequence
  Synthetic
DTEDLIREIRRRLEESVRENKELLDRLRERLEESIKRNEDLLKRHRENSKRIADRVRSDEELERVKKEAERLHKESRDKDRDLRKKVEDLARRSEELDKELRKRLKDLERELREAKKTRELVKEMIDRLRDLLRRHKEESKRLVEEVKKLLDRHREESERLVRELDKMNKDLEDRAR

SEQ ID NO: 5449 - protein, 177 aa, Artificial Sequence; identical to SEQ ID NO: 5448
  Synthetic

SEQ ID NO: 5450 - protein, 173 aa, Artificial Sequence
  Synthetic
DTKELLDELRKRLEDSARRVEELEKRVKDELERLKKRSEELLDEIRKRMKDVRDRGLVSEEVLRRLEELLRRVTEKVKRLNEELERKTREIRKKLRESVEELRRRLEDAERLKERLDKDELVRRLDETLKDHDRKLKELVDEAKELLRRYEEESKRLKRELDEILRRVREEAK

SEQ ID NO: 5451 - protein, 173 aa, Artificial Sequence; identical to SEQ ID NO: 5450
  Synthetic

SEQ ID NO: 5452 - protein, 178 aa, Artificial Sequence
  Synthetic
REIEEVRKKVEKILRDYDKVVKDIVEKVRRILEEYRRKSEKLTREIEEILRRLREVIKRDLRKEELDELKERVRELLDRLRDKLRKLNEELRKLLRDLEDEIRRLDEKLKELIRDLERKARDEDSLREIRKEARRLHEKSKKLLDEIRKRAEDLERETKKLLDDIKRELEDVVRELEK

SEQ ID NO: 5453 - protein, 178 aa, Artificial Sequence; identical to SEQ ID NO: 5452
  Synthetic

SEQ ID NO: 5454 - protein, 172 aa, Artificial Sequence
  Synthetic
RELEELLKRAEEVIKELKKSIDTMKEENDRLITELAKRVEDLKKRNDDVLERLKKDNIDEKTLEKIIRKLRRENEEAMKTLKKLVDDIRKRNDEHNKELKKLARDLREDLKRKVKSEEVLKEIDKRLKELEKEHEKVNRESEKRLEELLRRVEKVNRDSERELERLREERET

SEQ ID NO: 5455 - protein, 172 aa, Artificial Sequence; identical to SEQ ID NO: 5454
  Synthetic

SEQ ID NO: 5456 - protein, 174 aa, Artificial Sequence
  Synthetic
SEIEEVLERAERLLRRVAEALRRTTKELEDLNREVADLLRRTTEKAERLIRRVKSKIDKEEVKTRIDRLLDRSKDLTKKIKKRSDDSVKRSRELTDEIRRDLERLLRTLKKLADDGVPVEELKRVADEVVKKADDLVDEDRKLAKDSVDELRRLVEKDEKLAKDVVEEVEKLAE

SEQ ID NO: 5457 - protein, 174 aa, Artificial Sequence; identical to SEQ ID NO: 5456
  Synthetic

SEQ ID NO: 5458 - protein, 177 aa, Artificial Sequence
  Synthetic
SLEDAVRKARELIKRAEDILRRAVEEAKKLHKRSKEILEKAVEDAKRLYEEAKDAARKAGADERVIKELEENAKRVEEEAKKVKDDNDRLAREIKRRAEEVEKRARDLARKLDEEAKRNADAKTILDKAREVAERVARLARKLLEDSRKVARESAELAKRLLEYAKKSAEDAKRKAK

SEQ ID NO: 5459 - protein, 177 aa, Artificial Sequence; identical to SEQ ID NO: 5458
  Synthetic

SEQ ID NO: 5460 - protein, 185 aa, Artificial Sequence
  Synthetic
SIDEVLKELEDVARKSKEKNKRVHDDDERVVREVHKENRRVLRELEEMAERVRRELEKRGVPEEVLKRLEELIEELKRDLERSDDELRRSVEESEKRNRETNKRLDDHVKEVRRTVEKIKRDNQEEEKVVRRVKDIARHNLELADRSVEESRKSVKENKDLVDRSVKKVEDLVRELKRLVDEIKR

SEQ ID NO: 5461 - protein, 185 aa, Artificial Sequence; identical to SEQ ID NO: 5460
  Synthetic

SEQ ID NO: 5462 - protein, 185 aa, Artificial Sequence
  Synthetic
SIDEALTRLERAVEESHKRNEDVHRRDEEAVREVHKRNREVVKKLEDEVRKVIERLRRRGVDERVLRRLEEEIDKVRDELRRSDEELKKSVDDSKRRNKESDDELKKHVDELRRTIKTMKDSRVREEEVVRRIDELVEHNKDLVRRSVDESDKSVETNKDLVEKSVRRVDKLVKDLRRLVDEIER

SEQ ID NO: 5463 - protein, 185 aa, Artificial Sequence; identical to SEQ ID NO: 5462
  Synthetic

SEQ ID NO: 5464 - protein, 185 aa, Artificial Sequence
  Synthetic
KIDEALKRLREVVKRSHEENEEVHKEDEKVVRELDKENKDVLKELDEAVKRVEKKLRDRGTPEKVLKELKDLIDKVEKDARKTNEELKESVKRSAEENKKSNEELRDHARKLDKTVRDMKENRVREDEVVKRIDELVTHNKRLVEESVERSKESVDRNRRLAEKSVEDVRRLVEELKKLVDDITR

SEQ ID NO: 5465 - protein, 185 aa, Artificial Sequence; identical to SEQ ID NO: 5464
  Synthetic

SEQ ID NO: 5466 - protein, 177 aa, Artificial Sequence
  Synthetic
SLEEVLRRLEKVVRDSDKRLEEVLTRLAKVVRESNKRDEDVHKELRDVVRRVEELLERSNVPGEALKELRRLLEEVEKRNRDSKRESEKSEEEIRRRAKKVLDDSRKSLEEIRRLVENGVSEETVDKLVEDNERLVREIVKEVDELVKRNEDRARESVDESRKLVRRIEERVREETR

SEQ ID NO: 5467 - protein, 177 aa, Artificial Sequence; identical to SEQ ID NO: 5466
  Synthetic

SEQ ID NO: 5468 - protein, 173 aa, Artificial Sequence
  Synthetic
SVEDVLREAKRVLDEVRERLREVNTETNKVIKDVKKESDDVNRETNELIERVAREVPRTRELEEIEKEVRELDERNRKTSKELVDTVRKLDDENRKRIEEVEKEVEDRLRELRKRRLTEEVERLVDEVRKLVKRLVEHVKKLAKEIKELLERNVRHVEEVAERIKRLIKETKD

SEQ ID NO: 5469 - protein, 173 aa, Artificial Sequence; identical to SEQ ID NO: 5468
  Synthetic

SEQ ID NO: 5470 - protein, 177 aa, Artificial Sequence
  Synthetic
ELREDVERVVDEIRRLVEENVRRIDEVAKDIKRLADDNVRRVKELVRKIEEDIRRLKEEGVTEVVDELREEVRKLSEDNRRHSRELIERVKKLLKELEEHSRDLKRRVKELLEDLKRKGVDERVLKKLKEVIEDVERKSRDALRRLEEAIRRVRRESERVNRELDEVIKRVTEELKK

SEQ ID NO: 5471 - protein, 177 aa, Artificial Sequence; identical to SEQ ID NO: 5470
  Synthetic

SEQ ID NO: 5472 - protein, 181 aa, Artificial Sequence
  Synthetic
SAREKVEKVVKEVEELVKRDVEEVERIVEEVKKLVTEDLKISEEIVERVDRLIRELKKEPKSDEFRKKVEEVRERVRRLLEENRRHTEELERRVEELLKELEKHTRKVKDDIKKLLDRLREDGVDERVLKKLEDVVRRVEKESEDALRRLKEVIKKVKRESEEANRKLEEVIRRVVERVRR

SEQ ID NO: 5473 - protein, 181 aa, Artificial Sequence; identical to SEQ ID NO: 5472
  Synthetic

SEQ ID NO: 5474 - protein, 174 aa, Artificial Sequence
  Synthetic
SRSEKLVDEARKMVERSKEIVDKSEREVEDVVRRARRNVEKVLKDAKKVVDEVDELTKRGTDKETLKERLREILERIERYIEESKKDLDRILEELERKHRENKERLRRILEKIRRDGVGEDVLREVEELVRRVEEENDRVLKRAKELVEDVKRKHDRVLETVRKLVEDVTRRLK

SEQ ID NO: 5475 - protein, 174 aa, Artificial Sequence; identical to SEQ ID NO: 5474
  Synthetic

SEQ ID NO: 5476 - protein, 174 aa, Artificial Sequence
  Synthetic
DEVDKVKEELERVIKEVDERNKRSSERLEEVNRKIRKEIKEVVERLKELIERVLRKVEGRREVKRLTDEVRKRVEDLRRKVEDVSRKSKEDNERSNRRSKELVKRVRELLKSARRREGVDEIRRLVEEVLRRARKLVEEDKELIKKSLKDLKTIVDELRKLLEDVIREAERTAR

SEQ ID NO: 5477 - protein, 174 aa, Artificial Sequence; identical to SEQ ID NO: 5476
  Synthetic

SEQ ID NO: 5478 - protein, 170 aa, Artificial Sequence
  Synthetic
EEVERILEDVRRMIEDHRRKVEEIVKRSEDMARRLIEEVKRIVEESKKLADELKKEDGSEELRRKIDKRHKESEELLKDIERKLEEVHRDSERRLKENKERIDRTREEVEKRGVDEDVRRELKRLVDEVKKRNDEVRERDKEVVDRVKEVLDRVRETDRRLVEEVRRRAN

SEQ ID NO: 5479 - protein, 170 aa, Artificial Sequence; identical to SEQ ID NO: 5478
  Synthetic

SEQ ID NO: 5480 - protein, 170 aa, Artificial Sequence
  Synthetic
SRVEKILEDVKEEIKKHKEEVDRIVKRSREMAKRHIERVDEILERSRRMIEELKKREGSEDLERELERVHRESEKLLRENEKRIKETHEKSKRDLDENRKAIARTEEEVRKAGVKEDVERELRRLVEEVEKRNEDVEREDRRLVEEVKKRNDEVRKEDRRLVEEVKERAR

SEQ ID NO: 5481 - protein, 170 aa, Artificial Sequence; identical to SEQ ID NO: 5480
  Synthetic

SEQ ID NO: 5482 - protein, 183 aa, Artificial Sequence
  Synthetic
DELEKVEKDVRRLLEKVRKRIDEVRKEVERLSRESEEVTRRVLETVEKLLKDVERVIRETLKDDDEKLRDLERLIREIREKVRRAVETDEERNKRLNDKLKKLLEDLEDKIRKLEEELRKAKETGKPVEEVLETVKRLIERIEEEIEKVVKDVERLVRESIKHSRDVLKEVDDLIKRIRERVK

SEQ ID NO: 5483 - protein, 183 aa, Artificial Sequence; identical to SEQ ID NO: 5482
  Synthetic

SEQ ID NO: 5484 - protein, 174 aa, Artificial Sequence
  Synthetic
DDDKRIREILRRVHEKSEKVLRKVRKRLEEVRRESEEVVRRVKKDLDRVLEEVRRKGVSEELLKELEKIIEDIERHLKKNRDDVERKVREIEKKLRKLLEDDRRVVKEIEEKLRSGDGREDVAREVEEIAKRTIDRVEAIVREVERIARESIDNVRRVVEEVKRAVTELIKRVE

SEQ ID NO: 5485 - protein, 174 aa, Artificial Sequence; identical to SEQ ID NO: 5484
  Synthetic

SEQ ID NO: 5486 - protein, 174 aa, Artificial Sequence
  Synthetic
SEDETIRRIVRTVHEESRKSTEDVRREVERVLRESEEVVKKVKKKVDDVLKRVEETGISEELEERMRRIIREIREHLKDNLRRVREVIERIERKLEETERRDEKVLREIEKKIRDGDGREEVAREVTKIARDTIRENEEIAKEVREIVERSIKNLEEVAEEVERVVRELIEARR

SEQ ID NO: 5487 - protein, 174 aa, Artificial Sequence; identical to SEQ ID NO: 5486
  Synthetic

SEQ ID NO: 5488 - protein, 174 aa, Artificial Sequence
  Synthetic
SRDEKIRDILRRVLKEVRDSTKKVEEDLEDVHRRTEEELRKVKKRLDEVLKRVRDEGASEELKRRMEEVVRRIEELLKKLLKEDRDVVKEIRDKLDETRKEMEEVAERIKDKIRRGDGREKVAEEVKRIADRLIDLNRRIAEEVDKIVRDSIKKVEEIVTEVEKIVEKLIRDVR

SEQ ID NO: 5489 - protein, 174 aa, Artificial Sequence; identical to SEQ ID NO: 5488
  Synthetic

SEQ ID NO: 5490 - protein, 170 aa, Artificial Sequence
  Synthetic
DRLEKIVEEVRRLADELIRHVERNVREVEKAVRESIEHVRDVAEKVERAVRELEKREGSEDLDRELDRVRREIEELLKRNKDRITRVVDKSRRSSEENKRELKKVEDEVERRGISEEVRKELKRVIREVEKVNKESNDVTRKVKEESEKVLKEVEKRLREVIRRVKEKIR

SEQ ID NO: 5491 - protein, 170 aa, Artificial Sequence; identical to SEQ ID NO: 5490
  Synthetic

SEQ ID NO: 5492 - protein, 170 aa, Artificial Sequence
  Synthetic
SEVEDVVRKVEKLVRDLIKHVEENVRRVEEVVRKLIEEIKRIAEEITRIAEELAKEPGSEDLLRKLEKVLKEIDDKLKELEDRLRDMVRRSRESSEENERRLKRVEDEVRRNGISEEVEKVLREVVKEVEKVNRESREVTRRVLEEAKEMLERVKKIVKEVIEKVRRVVK

SEQ ID NO: 5493 - protein, 170 aa, Artificial Sequence; identical to SEQ ID NO: 5492
  Synthetic

SEQ ID NO: 5494 - protein, 184 aa, Artificial Sequence
  Synthetic
SADREVEERLREVIERVKEALKRSKDVTDEVTRRVEKLDKESNDTSREVIRRVEDMLSRVSDEDKVRRIKEELERVRRESEETSKKNKRELDEVRKDSRRTLEDIRRKLEEVERRIREELREVRDDELVKRIVEKVDKAVKDLEKLVRENVERVRRAVERSRKTVEDNVKRSRDVVRELRERVR

SEQ ID NO: 5495 - protein, 184 aa, Artificial Sequence; identical to SEQ ID NO: 5494
  Synthetic

SEQ ID NO: 5496 - protein, 184 aa, Artificial Sequence
  Synthetic
SSIDEVREEIRRVIEEVRKLLEESKKDTDRVRREAEDMDRKANETVEEVERRVREVLRSVSDERKVREIEKKLEDMLRELKKRSDDNKRRLEDLVRRSDKTLDEIREELERALREIEEVLEKVDKEEVVRRILKRIEEVLKKLRKAIKDNVDRVRDAVRRSRRTVEDIVRRVREVLERLEREIK

SEQ ID NO: 5497 - protein, 184 aa, Artificial Sequence; identical to SEQ ID NO: 5496
  Synthetic

SEQ ID NO: 5498 - protein, 175 aa, Artificial Sequence
  Synthetic
SLAEEVERRLEESHKRARKLVKEVKEALEESHKESDRLVREVEKELKRVAEEVRKEGIDEKRLKEIKELVDTIRKEIKEVLDEDRRTVKEIKEEVEKIVEDLERLHREIRKEIEKVKEAVEKVRDLVRKTTEKVEEVVRRLRELVKENLDEAKRVVEDLKRKVKEIEEKVKEDSK

SEQ ID NO: 5499 - protein, 175 aa, Artificial Sequence; identical to SEQ ID NO: 5498
  Synthetic

SEQ ID NO: 5500 - protein, 178 aa, Artificial Sequence
  Synthetic
SMAEKVDEVSKRSKEELKRVVKEVHEVSTRVEKVVKDVLREVEKVSKESTDVVDRVGVDSETLKDLKRRDKELLDRIRDKLRRMLEDLRRLNKEAEDLIRRLETEDEKLLRDIRRKVRGREVVDKVVRDLEKTVKDVKEVVDRAVTASKELVDRIRRLAEEVVRALERTVDKVRRDAK

SEQ ID NO: 5501 - protein, 178 aa, Artificial Sequence; identical to SEQ ID NO: 5500
  Synthetic

SEQ ID NO: 5502 - protein, 178 aa, Artificial Sequence
  Synthetic
DAREEVDEVSRESKEELKRVLDEVDDVSEKSRKTVRDMLRKNKEVVDEVEKTLEDVGVDSRKVDELRKRIKTLSRKSEEDVRKLLKRDEDLLRRIREEVKRLLDEDEKLLKDIRDKVRGKEVVKDVVRKLRETVKRVREVAEEVVRELEKTVDEVRKRADDSVKKHRDLVKEVKEAAD

SEQ ID NO: 5503 - protein, 178 aa, Artificial Sequence; identical to SEQ ID NO: 5502
  Synthetic

SEQ ID NO: 5504 - protein, 178 aa, Artificial Sequence
  Synthetic
SAEEDVERVVREVEREVREALRRVREVSERSREDVRRVVDENRKVAEEVEKRVRDVEVDSEDLRKLLEDIRRVSEESERLARELLKEDEDLLRRIEDTVRRLLERLKDLLEDIRNKVRGEEVVREVVKKLREIVKDIRRLAEEVVRRLEDTVRKVREIAKRSVDAHRELVRRVEERAR

SEQ ID NO: 5505 - protein, 178 aa, Artificial Sequence; identical to SEQ ID NO: 5504
  Synthetic

SEQ ID NO: 5506 - protein, 174 aa, Artificial Sequence
  Synthetic
SSAEEVERVLRRVEEEDRRLVAEVRRVLKESRRTLEELVRRVKEVLEEVRKEVERIEVSEEVLREIEELLERLDRELDEVLKESEDTLRAIEKKLEEVHRRTKKLLDELREVLERGKDAKELIKRVEEIVEESRKLIDEAIREVEENVDRSRKKIKELIDRVREILKRARDRAR

SEQ ID NO: 5507 - protein, 174 aa, Artificial Sequence; identical to SEQ ID NO: 5506
  Synthetic

SEQ ID NO: 5508 - protein, 174 aa, Artificial Sequence
  Synthetic
DSEEEVKKVLDEVRRRDEKLVEEVRKVNEDSLDTLRKLAEEVKRKLDEVRERVERLEVSEDVLRRIEELLKDLKRRLEEVLRKSEETLRRNKEEIEKTHKDTRDELKELEELIKAGKDAEELIREVERIVKKSEDMIREHIRKVEENVEESKKEIEELIRRVDDILREAKEAAD

SEQ ID NO: 5509 - protein, 174 aa, Artificial Sequence; identical to SEQ ID NO: 5508
  Synthetic

SEQ ID NO: 5510 - protein, 174 aa, Artificial Sequence
  Synthetic
SGEEDLERVLDEVRRRDKKLVEEVRKRNEDSLRRLERLAEEVERVNEDVLKKVEELRVSEEVLKEIEEELRRNKEAIKRTLKRSKETLDKNERDIERTHERTKKKLDEIRELIKAGKDASEVRKLVEEIVTDSRRRITEHIRRVEENAKDSERVIREHKERVKEILEKVRRAAE

SEQ ID NO: 5511 - protein, 174 aa, Artificial Sequence; identical to SEQ ID NO: 5510
  Synthetic

SEQ ID NO: 5512 - protein, 181 aa, Artificial Sequence
  Synthetic
SEVEKLVEDVKKAVKEVLEEAKENVRKVEDVVRRVLERAEDNVEEVKKVVATLVDLVRRGDRRERLEERAKRINDESRKHLDKLERDVERMSKESEKHLRELEKKVEEILKEVEDRLSRVDGEELMREVRRVIKEVRDRVRDVLDEVRRVNEEVNRRVRKVLEDVRRVNERTKEDLDRESK

SEQ ID NO: 5513 - protein, 181 aa, Artificial Sequence; identical to SEQ ID NO: 5512
  Synthetic

SEQ ID NO: 5514 - protein, 181 aa, Artificial Sequence
  Synthetic
SEVDKLVREVDELVKKSKDNIDKLVKRVREMVEESKRKADRNVEEVERVVREIKDLARRGDRDERLRREVRRRNEESRRHLEKNKKESDDMLKEVKDHLDRNLKESEEELKRVEDKLKDVRGDELVKKVRDRLEEVERRTRKALEDVKRVLEDVKRLTDTALREVERVNRKTEEEVDREIR

SEQ ID NO: 5515 - protein, 181 aa, Artificial Sequence; identical to SEQ ID NO: 5514
  Synthetic

SEQ ID NO: 5516 - protein, 181 aa, Artificial Sequence
  Synthetic
DKVDRVVKEIEEAVKENLDRVREIVKEVRDLVRENLEEVRKSVEDVKRLVKEILELVRAGVPEEDLKRTLDEVVKRSEESLKRLKEHTERVEERLDRLLRELKKHTDDVKRRVEELRKDSTDEDAVRKVEEVLREVEKRSTEALKELRDVLREVRRESEEALDENRRVTEEVKKKVEDERK

SEQ ID NO: 5517 - protein, 181 aa, Artificial Sequence; identical to SEQ ID NO: 5516
  Synthetic

SEQ ID NO: 5518 - protein, 181 aa, Artificial Sequence
  Synthetic
SEVEEIVREIRDLVRKNEERVKKIVEDVRRAVEEILELAERSVEKVKRLVDDLRRLAENGVPREKLREDLRKIVEESKESLRRLERKLEEVKDTLRRLLEELKEHTDRVARRLEELRRRTTDEEAVRKVDRVLEEVEKRSRDALKELEEVLKEVERLAREVLEKNERVTEAVEDLVTKAAK

SEQ ID NO: 5519 - protein, 181 aa, Artificial Sequence; identical to SEQ ID NO: 5518
  Synthetic

SEQ ID NO: 5520 - protein, 178 aa, Artificial Sequence
  Synthetic
DEEERVREELERVNEEVKELKKEVETVNKRVHETLEKVIREVKKVNDDVHRTVEDLRRRGLLTEEVIRDLERASRESEDELRKVREKLRRASEESRDKLREVEERHEKLSRDIEEELRAGGDVEEIVKKIKEVVDRTRKLAKELVKESRDLAEDVKRLIKRLVEDSRRLVEEIKERAR

SEQ ID NO: 5521 - protein, 178 aa, Artificial Sequence; identical to SEQ ID NO: 5520
  Synthetic

SEQ ID NO: 5522 - protein, 178 aa, Artificial Sequence
  Synthetic
SEEERVEKRLREVNKDVKRLVKKVRDVNRKVHEDTKRLVEEVRRVNRDVHRRVKELREAGKLDEEVIKDLEKASEDSKRELEKVVRESEDSSRRSEEKLRRVEERHKRLSEEIRRKLESGGDVDKIVEEIDKVVTETRELAERLVKESEDNVERSRDLARKLVEKSERLVKEIDDRAR

SEQ ID NO: 5523 - protein, 178 aa, Artificial Sequence; identical to SEQ ID NO: 5522
  Synthetic

SEQ ID NO: 5524 - protein, 178 aa, Artificial Sequence
  Synthetic
SAAEKVREELERVNRRVEELLKKVKKVNEEVRDIVRKVVREVERVNKEVEEEVKRLVDQGRATEEVKKTVDKLSEDSRRKLKEAIEELEKRSRESEKELEDVKREHDRLSEEIERELESGGDVEEIVKKIKDVVKRTDELAERLVETSERLARTIKKVAEDLVRDSKRIVDEVRTRIT

SEQ ID NO: 5525 - protein, 178 aa, Artificial Sequence; identical to SEQ ID NO: 5524
  Synthetic

SEQ ID NO: 5526 - protein, 178 aa, Artificial Sequence
  Synthetic
SDEDRVRRRLEEVNREVEELLRDVERVNEEVKRRVKKVIREVEEVNKRVEEEVKRLRDEGRLDDKDIKRLKEASDKSREDLKRVEEKVEKLSRDNKKKLDDVKRRHDELSKRIDEELKSGGDVEDIVRKIDDVVRETRELAKELVKHVRDVVEDVRRLVKELVDLSEKLVKEIRDKVE

SEQ ID NO: 5527 - protein, 178 aa, Artificial Sequence; identical to SEQ ID NO: 5526
  Synthetic

SEQ ID NO: 5528 - protein, 182 aa, Artificial Sequence
  Synthetic
SEVEKVVKEMEDLARENERLAREIVKDVERLVREIEDTVRRSVETTRRLVEEIRELAERGVDERELERFLKEIEERNRKSREDLDRLLEKIERKVRKVDRDSDRSLERIRRRIDDVRRKINSDERVLELLERVLRELEKVVEDSKRRIKEVLDELRKAVDKVKKEDKKVHDELRKVVEEVRT

SEQ ID NO: 5529 - protein, 182 aa, Artificial Sequence; identical to SEQ ID NO: 5528
  Synthetic

SEQ ID NO: 5530 - protein, 185 aa, Artificial Sequence
  Synthetic
RVEELLRKVITELDRVLEEVRRRNEASIEELDRVLKEVERLNKEVDEELKKVLEKVRKDVSDEKKVRELEREVREISRRNEKLLRELREEVKRIKERNKRLLEELERTARRIKKRLEDLLRKLKDVEEVVRRIVEEIKKVIDELREESRRTVREVEKLVKEILDRSRKTVEEVKRLAEEIERKAK

SEQ ID NO: 5531 - protein, 185 aa, Artificial Sequence; identical to SEQ ID NO: 5530
  Synthetic

SEQ ID NO: 5532 - protein, 178 aa, Artificial Sequence
  Synthetic
RVKELVDEVKRKVEESMRESTERNRTATEKVEKSLRDSEKLNRDATRKLKKVVDDVRREGRVPEEVERRVKEILDKNNEDMKKVLEETRRILKDNNEELKRVLKETRDLLKELDDEVRETKIDEEVVKKVEDVVERNKDLVRKSVEHIDKVVKENRELVKRSVEHIDRVVKEARERAR

SEQ ID NO: 5533 - protein, 178 aa, Artificial Sequence; identical to SEQ ID NO: 5532
  Synthetic

SEQ ID NO: 5534 - protein, 178 aa, Artificial Sequence
  Synthetic
SAEELVKRVLDDVRRSAEESERLNREATEEVKRSLEKSRKDAERVLRDLERVVRKVKTEGAVSDEVVKEIEDIVRELRKEAEKVHRETEKLLKDNNDDARRVHEETKELLERLRREVRETRIDERVVRKVEAVVERNRKLVEDSVRHIREVVKRNEDLVRRLVEEVKRVVKKAEDKAR

SEQ ID NO: 5535 - protein, 178 aa, Artificial Sequence; identical to SEQ ID NO: 5534
  Synthetic

SEQ ID NO: 5536 - protein, 178 aa, Artificial Sequence
  Synthetic
DVEELVKKVEDMVRKVIEEVKKRNTDVTRRVEESLRKSTELVREAEERLRRTLEELRRRGLAPEELVERLRRLLERVKREVERVHEETKRLLKRNNEDMKRVVEELKKLLDRLREEVRDTRISEEVVRKAEEVVKRAKELVARSVKHVDEVVRRNEELVTRLVRELDELVKEVRETAR

SEQ ID NO: 5537 - protein, 178 aa, Artificial Sequence; identical to SEQ ID NO: 5536
  Synthetic

SEQ ID NO: 5538 - protein, 178 aa, Artificial Sequence
  Synthetic
RAERLVREVARRLEEVLKEVEKLNKDATDKVKKSLEDSRKKNEDVTREVRRVIEELRTRGDISKDVVKRIEDILRENNRRIAEVHRETKELLKRNNDEARKVKKKAKEDLERLTREVRDTKIDEDVVRRAEELVERLRKIAEDSVRHLEEVVRKNERLVKESVDHVRTAVEELKETAR

SEQ ID NO: 5539 - protein, 178 aa, Artificial Sequence; identical to SEQ ID NO: 5538
  Synthetic

SEQ ID NO: 5540 - protein, 178 aa, Artificial Sequence
  Synthetic
DAEEKVKEVEREVEKVIEEVKRDNTRVTEENKRVLDTVRERNKRVTDELRKVLEDVRREGSVPEEVVRRAEEILKRNNDEVREVLRESERRLRENNERMKRVEDDIRKLTKELREEVRDTKIDEEVVKRIADVVKTVKRRVDESVKDIKRSVKETEDRVDRSVRHVEEVLKELRKASE

SEQ ID NO: 5541 - protein, 178 aa, Artificial Sequence; identical to SEQ ID NO: 5540
  Synthetic

SEQ ID NO: 5542 - protein, 178 aa, Artificial Sequence
  Synthetic
SAEDKVRKVKKEVEKVIKDVKEENRRVTRENEEVLDRVKKDNERATRKLRKVVEDVRREGRVPEEVVRKVTEELRENNKRMKEVLDKSRKKLEENNKRVDEVVEELRKLLEDLDREVRDTKIDERVVERIKRVVERVDELVRRSVKDVKDSVRETRKLVDDSVKDIDRVVKEARDRAK

SEQ ID NO: 5543 - protein, 178 aa, Artificial Sequence; identical to SEQ ID NO: 5542
  Synthetic

SEQ ID NO: 5544 - protein, 178 aa, Artificial Sequence
  Synthetic
DAKDKVRKVLEEVKKVIEEVERRNRTVTRENERVLKEVKDRNTEVTKELKKVVEDVKRRGDVPEEVEDDIRRKVEKNNRDVEKVLDDSRRLLEENNKKAEDVKRKLEDELRKLEEEVRRTKIDEEVVDRVRRVVEEVTELVRRSVEEIKESVKTTRDLVRKSVKNIRDLVEEAKRRAD

SEQ ID NO: 5545 - protein, 178 aa, Artificial Sequence; identical to SEQ ID NO: 5544
  Synthetic

SEQ ID NO: 5546 - protein, 174 aa, Artificial Sequence
  Synthetic
DEVETVVRDVKRLVRENERKVREIVKTVDKLVKENEDLVKRSVEELKKLAKEIKDLADEGVDKRELDEVLKRIRERSERSKRESDRTLEKITRDIERVKRESRKSLEDVRKRLEDFPESEDLRRVKKEAEDVVRDSERLIEEVKRRVKKVVDDSRRKDEEALRDVERVIEEVRR

SEQ ID NO: 5547 - protein, 174 aa, Artificial Sequence; identical to SEQ ID NO: 5546
  Synthetic

SEQ ID NO: 5548 - protein, 174 aa, Artificial Sequence
  Synthetic
SEVDDVVRRVKKLVKEDRDLVRDSVRKLDELVRDDKRLVDEVVERLERIVKEIEDLMREGVDERTLREVLKKAEEVVRESKERHDTTLERVKDVVRRSREEHKRTLDEAKKEIDRVPRSEKLEEVLKMLEKVSDEVKKENDRALKKVEDVSREVKELNKEVLKRARDVVERVRT

SEQ ID NO: 5549 - protein, 174 aa, Artificial Sequence; identical to SEQ ID NO: 5548
  Synthetic

SEQ ID NO: 5550 - protein, 178 aa, Artificial Sequence
  Synthetic
SSKEKVKKVLDKVKEVLDRVRELVKRVDRESEKVVEDVRRKNKRASEKVKTVIRDVEEKKQVPEKVVKEVEELLKRNNDTMKRVVDESKKTLDKLREEVKRVREDIKRLLRELEDVVDRGKDVDDVLRKVEEIVRKVKDMVRKILEKAERNVEETERVVTESKENADRIVKEVEDRAR

SEQ ID NO: 5551 - protein, 178 aa, Artificial Sequence; identical to SEQ ID NO: 5550
  Synthetic

SEQ ID NO: 5552 - protein, 178 aa, Artificial Sequence
  Synthetic
SAREAVTEVLRKVREVLKRVEDENRKVSKELRDLLEEVERRNRDLTEKVKRLIDELKERGRIDDKAVRDLEKLLEDNNRDVKRLLEEIDKLIKDNNKKVEKVLREIRRLLERLEDVVDRGVDVERILEEAERIVKELEEVLEESLRNVKEILKKLEDALRKSEEDVRRILERVEEEAR

SEQ ID NO: 5553 - protein, 178 aa, Artificial Sequence; identical to SEQ ID NO: 5552
  Synthetic

SEQ ID NO: 5554 - protein, 178 aa, Artificial Sequence
  Synthetic
REVEEVLRRIKEMVKRIEELVRRSEDRAKKLVDTNRDLVRRSEERFRELVKEIEDVAREGVDEKELDKIRKKVKKESDKSKRTLEESLERVEEDSKRVEDELERILREIKEEVDRMREEGVDVEELERVLREVEKVVRDVRRRNEKATRDVRRSVEESRRLDKRALDEVRKRIEEVRT

SEQ ID NO: 5555 - protein, 178 aa, Artificial Sequence; identical to SEQ ID NO: 5554
  Synthetic

SEQ ID NO: 5556 - protein, 174 aa, Artificial Sequence
  Synthetic
RVEEVLKRVLDKLRESNKDSERLVREALKEHEEVNKEVEDRIREVLRRVEEVLKKVEKDKGRDKELEKIRKVLKDLADEVRELLKRLNDVLDRIRKEVKKLSDESNELIKELERANLPAEDIKRLVDEIVDTDRKLVEEVKREAKESVKESEELVERVKRKADRIVEEVEKTVK

SEQ ID NO: 5557 - protein, 174 aa, Artificial Sequence; identical to SEQ ID NO: 5556
  Synthetic

SEQ ID NO: 5558 - protein, 174 aa, Artificial Sequence
  Synthetic
DEVEEVRKTIERLVDRIEDVVRRVLELSRDTVRKNEDLVRRIEEELTKLVEDIKDVSRKREPEEVIETLAREAERILEEVKRLDEESKRESEKKLEEIKRELEELAEELKRISDSVERAELLEEVERLLEEVLRKAEKVIEDARKLDEDVNRKSNKVIEDVARRLEKVLKEVKD

SEQ ID NO: 5559 - protein, 174 aa, Artificial Sequence; identical to SEQ ID NO: 5558
  Synthetic

SEQ ID NO: 5560 - protein, 177 aa, Artificial Sequence
  Synthetic
SVEDVIRRVKEKSEEVLKRLKEVIDEVKKRSEDVLKEVEDAIDEVRRRSEEALDRVRRAGLDKKDLERLRRHSEELVKRVRKLLEDLRDHSRKLVEEVRKLLEDLRDHSRKLVERARRERKSEEARDLADRDVEDVERVVTDIRRLVEKNVRDVRRVVREIEDAVRRNVKEIDRRVK

SEQ ID NO: 5561 - protein, 177 aa, Artificial Sequence; identical to SEQ ID NO: 5560
  Synthetic

SEQ ID NO: 5562 - protein, 177 aa, Artificial Sequence
  Synthetic
SVEELIERVKRRSEKVLRDAEKTIRDLKKDSKRVNDELEKVIRDVMEKSKTALDEVRRRGVPKEVLERLERSSRKIKRDVEKLSEDNRRHSEELERRVEELLRKLKKHSEELEEEARRKRVSEEARRLVERDVEDVKRLVEEIKKLVTDNVRTVEDLVRRIKREAEENVKEIKEEVR

SEQ ID NO: 5563 - protein, 177 aa, Artificial Sequence; identical to SEQ ID NO: 5562
  Synthetic

SEQ ID NO: 5564 - protein, 178 aa, Artificial Sequence
  Synthetic
SDVDRAVETNDKVVTEIVERVKEVVERNREIVERISTTVDEMVRRNRDIVRRVAERVSDKEKVDRVVKHVEDTVRTIRDLVRRIREHVRRTVERIRKLAEEITERSKRLSDEIRKVGSDKDVRDLVREVLERSDELVKRVEEEVKRLLERNKKLLDDVTEAAARLLKRNKEVVEELDK

SEQ ID NO: 5565 - protein, 178 aa, Artificial Sequence; identical to SEQ ID NO: 5564
  Synthetic

SEQ ID NO: 5566 - protein, 178 aa, Artificial Sequence
  Synthetic
SEVDRVVEENDRVVRKVEEVVREAVERNETVAERVKDTVDRMVRENEKIVDKVRKDVKDKDKVDTVKKHVEKLVREVKELVERIVETSRDLSRKIKDLVDKVKERSKRLSEEIRRVGDEKDVEKLVRDVLRESEKLVDDVRRAVKKLLEDSEELVREVKEAAEESLRRNKKIVEDLTR

SEQ ID NO: 5567 - protein, 178 aa, Artificial Sequence; identical to SEQ ID NO: 5566
  Synthetic

SEQ ID NO: 5568 - protein, 170 aa, Artificial Sequence
  Synthetic
DELETVLREVERVVTEVKKLNERTVRDDKEVVERVLREIDKLLKEIREKVKEVKKKLRTEEVAERVVKEIKDRVDDIERRVDEALKESKRTVDESEREVKEMVERIEEMARRVKGEDVERTVRKLLEEIKDSVRKSKEDVRRSVEEIERLVRKVKEDVKRLLRDIRERAK

SEQ ID NO: 5569 - protein, 170 aa, Artificial Sequence; identical to SEQ ID NO: 5568
  Synthetic

SEQ ID NO: 5570 - protein, 185 aa, Artificial Sequence
  Synthetic
SKVEKALKKIEDVLEDIKRLVEEVVERDERLLERLEEENKRADEKSKELVKRLTDLVRENKGKEETVKRVVDRVTEEVKRVVDKTREVLKKIEDSSRRVLEEVERLLREVEKEVTDILDEIRKDNLREALERIREILEEVRKAVEDLLRKIKETLKRIRERVKRLIENLEKSLEDARKEVDRLRK

SEQ ID NO: 5571 - protein, 185 aa, Artificial Sequence; identical to SEQ ID NO: 5570
  Synthetic

SEQ ID NO: 5572 - protein, 177 aa, Artificial Sequence
  Synthetic
DVDERIEELLRRIERLVEESERDVRRLKREIDDLVTKSLKTVEESLKRIKELVDRVSEEAKDEDKVRTVKTKVDEALKRSKRTAEESKRLVDEARKEIEDVVKKSREIVKRVIDEIKKIRNKDDVERVVRRVLKEIDDSTKEIRRIVKRVLEEIERTTRDDKRVIDEVRELIKETSR

SEQ ID NO: 5573 - protein, 177 aa, Artificial Sequence; identical to SEQ ID NO: 5572
  Synthetic

SEQ ID NO: 5574 - protein, 178 aa, Artificial Sequence
  Synthetic
DADELVTEVRKRVRETLEEIRTILDEVRKRVKKTVEDIRTEAERVKREVDKLVKEVRDNNLPEEMVEKIRRMVDTVAREVEEAVKRSEDTLDRIRKLVEKVLDDSRKTLEEIEKLVKENKGKDREIEKLLDDNRRLIEEVLRRIDELVREDEELVKRVLDRIRTVLDRIREEVDEVRR

SEQ ID NO: 5575 - protein, 178 aa, Artificial Sequence; identical to SEQ ID NO: 5574
  Synthetic

SEQ ID NO: 5576 - protein, 178 aa, Artificial Sequence
  Synthetic
DVRELLKKVEDEVRRTLKEIERILKEVKTESDKTLKEVAELLERLDRDVKRLVKEVRDNNVPEEVVRRIEKVARDVKEEVKRLLKELERSVEELARRVKDALRKSARTLEEIRRLVEENQGKKEEIRKLVERNKELVRDVLRRIKELLKRDKEMLEEIRERIKEIEKRLKELLERAKR

SEQ ID NO: 5577 - protein, 178 aa, Artificial Sequence; identical to SEQ ID NO: 5576
  Synthetic

SEQ ID NO: 5578 - protein, 185 aa, Artificial Sequence
  Synthetic
SEIEEVLKRVEEMIRRSKKLTDKVLREVEKMIRELDKKTDEVLERSERLARELKELVRRDVPDSEKVERIREKIDRLVKESRDSVKKNKDENREIVRRVRDLVRENKERLDKVLEDVDREVKRVRRRERIEEILRRVTEAIKRSKEDSERIRETVTRLIRESEENSKRNLERVKKVIDELREEIR

SEQ ID NO: 5579 - protein, 185 aa, Artificial Sequence; identical to SEQ ID NO: 5578
  Synthetic

SEQ ID NO: 5580 - protein, 185 aa, Artificial Sequence
  Synthetic
DKLEEVLKRVEEMLRELDKETDDVLKTVEDLLRRLDELTDEVLKESRRAAEELKRKVDRDIDRSERAERIKRKIEELVKESERSVEENKRRNREVLDRVTKLAKRNKERNREVLKRIAEDVKDIRREEKIREIEKKARKLIKDSRKNIRDILETVKRLIEESDKNIKENEKRVRKVIDELDKEIK

SEQ ID NO: 5581 - protein, 185 aa, Artificial Sequence; identical to SEQ ID NO: 5580
  Synthetic

SEQ ID NO: 5582 - protein, 182 aa, Artificial Sequence
  Synthetic
REKEEIIKKVKDVVKRVKEELKKIVEESERLVREVEEELKRSNEKSRDLVRRAEEELEKKSTDKDVRERVKEIVKDLRRLLREDKRLVEEILKRLRELLERDRRTIEEILKELEDLLRRIEESDRREEELDRLIKRVEDRARKVLEDSKRTIEEIEKVARDVLRRSEETVKEVEEKARRALK

SEQ ID NO: 5583 - protein, 182 aa, Artificial Sequence; identical to SEQ ID NO: 5582
  Synthetic

SEQ ID NO: 5584 - protein, 189 aa, Artificial Sequence
  Synthetic
SAVEEIVKEVERIVREAEKALKKSVDDNRRIVEDAVRTLKRLVEEAARLVDEARKELTKKSTTEDVERRVREIVRDLERLLEEVEKRVEDIIEELKKSLEESERHTREVVKKLRELLEEIKRVVTEKGTDEDVLRELKRLLKELERVVEEVLRRDRKWLEDTRREVKRVVEELKRLLDELREVVERARR

SEQ ID NO: 5585 - protein, 189 aa, Artificial Sequence; identical to SEQ ID NO: 5584
  Synthetic

SEQ ID NO: 5586 - protein, 185 aa, Artificial Sequence
  Synthetic
KELEDLVREIEDTVDRIEREIRKLVEDDHRSVRKAEEDNRRLVKESEDLVRRIEEEIRKKETTEEVKERAERVIRELRELLKRNREIVERSIRKLEDINRRSKEIADRVIEELRRLLKEVRKVVKDGVDEEVMRRLKEDIERLMEEIRREVEKLNETTKEVVKESLETHKRIIERIREVAEETRR

SEQ ID NO: 5587 - protein, 185 aa, Artificial Sequence; identical to SEQ ID NO: 5586
  Synthetic

SEQ ID NO: 5588 - protein, 175 aa, Artificial Sequence
  Synthetic
SSLEELLKEIRKRVERIKEELDRALKEDHDIVRKALRELDEMLKKNEETVRRAMERIKDKREVIKELEDSLRKSEEIVRRLKETLKRSNEDSERLVREIKKKLEELARTIEDLVRRGVPEDVVRKVLEELEEEARRVLRELRESLKRTEELVRRALETLKRSDEETKKLVEDIER

SEQ ID NO: 5589 - protein, 175 aa, Artificial Sequence; identical to SEQ ID NO: 5588
  Synthetic

SEQ ID NO: 5590 - protein, 175 aa, Artificial Sequence
  Synthetic
SSLEELIKEDHRVVREAEKRLEELLKEDHDRLREAKEELERVLKRDHETLKEVVERIREKREVIEELKRSNEESRRLVEDAKRRLDESNERSEEIVRRLKEELKRSNDDSRRVVEEGVPEEVLKKIIERTRDLVRRALRTMEESIKRTEELVKKLLDELEASIRKTEEDADRIRK

SEQ ID NO: 5591 - protein, 175 aa, Artificial Sequence; identical to SEQ ID NO: 5590
  Synthetic

SEQ ID NO: 5592 - protein, 175 aa, Artificial Sequence
  Synthetic
SSLERLIEEDHETVRRVKKTLDDMLKRDHEVVDEARRRLDELLKRDTDIVRDAVKRIRDKREVIERLRESNDDSRRIVEEIKKTLKRSNEKSKRIVEELKRRLEESNERSRDVVRKGVPEEVLKKIIKETKELAKEAVERLEESIKETEDLVRRVLKEMEESLRRTEELVREIER

SEQ ID NO: 5593 - protein, 175 aa, Artificial Sequence; identical to SEQ ID NO: 5592
  Synthetic

SEQ ID NO: 5594 - protein, 180 aa, Artificial Sequence
  Synthetic
SIEEVIERIREEAERLLKELEEVNRESTRLAEDLREELRRVLENSRALVKELKERIRKESLLKEVDELAKRLTEEHERLLREVEDIMRKVNKHDTELLRTVEELMKEVKRRLEELRRRNVDDKSLKELLRDVERKIREVRKRLKESLERVEREIRRVREEIKRLNDESRERIERVKRRVD

SEQ ID NO: 5595 - protein, 180 aa, Artificial Sequence; identical to SEQ ID NO: 5594
  Synthetic

SEQ ID NO: 5596 - protein, 176 aa, Artificial Sequence
  Synthetic
DAEELLRRLDKSSKETLKRNEESLRRSEETSKRSLDTNRRSLEKIEKIATDLRRKLSERKIRELLKRIEEILRKVAEDVRRNSEHNKRLLDRSRENVRRISEHNRKLLEELAELAKRGDVDERVVREAEKLDEDNTRHSRRNLEESKRLDEENIKRSEDLLRDVRRLIEEVLEEAR

SEQ ID NO: 5597 - protein, 176 aa, Artificial Sequence; identical to SEQ ID NO: 5596
  Synthetic

SEQ ID NO: 5598 - protein, 188 aa, Artificial Sequence
  Synthetic
SKLDEILERAKKLIDDLRKESDDVLRRDRELIERIRRKSEEVLERVKRLIEELEDRVRKVRDEDLKRKLEEEVKKILEDVDDVIRRITEEIRRTARESEKVIEDISRKIDEVLDRLRKLIEELRKESDEDEVRRVLRELERLVKELKDKNKESLDELKKTNDRLEEENRESLRRAREEARRILEEIRR

SEQ ID NO: 5599 - protein, 188 aa, Artificial Sequence; identical to SEQ ID NO: 5598
  Synthetic

SEQ ID NO: 5600 - protein, 188 aa, Artificial Sequence
  Synthetic
DELEEILKRVEKLIRDSIEKIRRILEEDRELIKELIKESREVLERVRELIKTLEKKVKDVDKEELKKRLEDEVRKVEEDVRRLIEEITRKIEKTLRESKKKADEDKEENKKILDEVRELIRDLREKTDRRTVEEVLKRIEELVKRSLEESDRVAKEVRKTNEEVKKTNEDSLRKIKELVKRILEKIRK

SEQ ID NO: 5601 - protein, 188 aa, Artificial Sequence; identical to SEQ ID NO: 5600
  Synthetic

SEQ ID NO: 5602 - protein, 188 aa, Artificial Sequence
  Synthetic
DELEDVLREVRKLIKELEKKSREVLKRDKELIDRIRKESEEVLKRVEDVLRKLEDEVRKVREERLKEELKKKVERVLREVERLIKEISDKIRKTLKESRDVIREISEEIKDILRRAREKARDLADKSDKRRVDEVLEEIERRVTELNKKNEESLRRAEKTNKELDEENKESLERIRKLIEDILRKIEK

SEQ ID NO: 5603 - protein, 188 aa, Artificial Sequence; identical to SEQ ID NO: 5602
  Synthetic

SEQ ID NO: 5604 - protein, 188 aa, Artificial Sequence
  Synthetic
DELERILEEVKRRIERLIERLREVLERDKKLIEDIRRESEDVLRRVEEVIKKIREELERIRDRRLREELMKKIEKLLREVDKVIKDISEKIRRTLERSREVIERLKEEVEKVLREVEDMIRKLAERSDRETVKDVLRKLRKIADEVRRDIERVLDEARKTNKRLDEENKDSLKKLRDRAKELLDEVRR

SEQ ID NO: 5605 - protein, 188 aa, Artificial Sequence; identical to SEQ ID NO: 5604
  Synthetic

SEQ ID NO: 5606 - protein, 174 aa, Artificial Sequence
  Synthetic
RELEEVLKEAEKLIREITEEVKEALRRDEKTVRDNIRDLRRVLEEVRKLIEEILDRVRRRGPRDELERDVERIADKVRRAITRSRKHVEDSVRTTKEMIDRLRRKVEKILTEVRKKIDSKFLERLEELITRLKERIDKALRDLEKTNDELRKRSEEVLRRLERLLERLREEIRR

SEQ ID NO: 5607 - protein, 174 aa, Artificial Sequence; identical to SEQ ID NO: 5606
  Synthetic

SEQ ID NO: 5608 - protein, 172 aa, Artificial Sequence
  Synthetic
SEVERVLEDSRRTNEEIIKRLRDALRESEKTNRDIEKRLREMLKKSKETNERIKRSDRDKDELKKLVEKDKKEVEDALKDLEDLVREDKERVDEALERMRKLVEDDKEALERRIKDKKVLDKARELVRRTEEIVKDVIRKSRELVKESKERVDRVITESRRVVKKTLDDIRK

SEQ ID NO: 5609 - protein, 172 aa, Artificial Sequence; identical to SEQ ID NO: 5608
  Synthetic

SEQ ID NO: 5610 - protein, 172 aa, Artificial Sequence
  Synthetic
SEIEEALKRSKETNERIIRKLEEVLRRSRKTNEEIIRRVERVLEDSERTNREIEKSDRRKEEVAKLVDDDRRKVEKALEEARRLVEEDKERVEKALRDMRELVKEDKERLDRTIKGEEFLRTVKKLVDDTRKAVEEVITRSRRLVEESERRVREVIDRMRKLVEETKRKLDK

SEQ ID NO: 5611 - protein, 172 aa, Artificial Sequence; identical to SEQ ID NO: 5610
  Synthetic

SEQ ID NO: 5612 - protein, 172 aa, Artificial Sequence
  Synthetic
SEIEKALKESEDTNRKIKDDLRKVAERVRKLIEDVIRTLERVLRDSERTNREITRSDRDKDELRKLVERDRERVEKVLRDAKRLVRTIKEDIRRALEEMKKLVEEDEEKVKKKIKDEDVLRKAKRLVDETLKEVERVIRELEKLVEDLEETVKEVIKRSRELVDETEKRIRD

SEQ ID NO: 5613 - protein, 172 aa, Artificial Sequence; identical to SEQ ID NO: 5612
  Synthetic

SEQ ID NO: 5614 - protein, 172 aa, Artificial Sequence
  Synthetic
EEIERALKKSEETNRDIIRKLREVNERDKRAVERDEEELKKALDESRKTNEDIRKSDREKEELRKLVEEDRKRVEKVLTDSKRTNEELLRHSEDVLRKLRKLVKEDEKRLKDEIKDKDVLETVRKLVEDTLREVERVITHSLKRVEDTLRKAKEIADRMRTLVRKTLEDIER

SEQ ID NO: 5615 - protein, 172 aa, Artificial Sequence; identical to SEQ ID NO: 5614
  Synthetic

SEQ ID NO: 5616 - protein, 172 aa, Artificial Sequence
  Synthetic
DEVERVLEKSKRTNEDIIRRLEEVNKTDRKLVEDDIRRLEKALRDARKTNEEIRTSDRDKDLLRKLVEDDKKRVKDVLRESRKTNDDLRRHSEKALEEARRLVDEDRERLEREIKDEDVLRKVRELVERTKERVERVIDHSRKVVETTLREVERVIREIEELSKDSERKIRK

SEQ ID NO: 5617 - protein, 172 aa, Artificial Sequence; identical to SEQ ID NO: 5616
  Synthetic

SEQ ID NO: 5618 - protein, 172 aa, Artificial Sequence
  Synthetic
SDAERALKESEDTNREIIEKLERVNKRDKDIVDKIREDLKRVLERVRDTNRRIRESDRRKEELKELVERDKERIEDALRRLEELVKRLEDHSRELLKDAERLVRTDDELVKRRIKDERVLREVKRLIDETKRIVDEVIKHSKEEIDKLREEVERVIKELRELSDKSLDDIRK

SEQ ID NO: 5619 - protein, 172 aa, Artificial Sequence; identical to SEQ ID NO: 5618
  Synthetic

SEQ ID NO: 5620 - protein, 172 aa, Artificial Sequence
  Synthetic
KEIEDVLKKSEDTNRRIIERLRKANDTDRRLIEDTIRKLREVLKEAEKTNKDIKDSDRDTSVLRELVRRDERRVEEVAREMHKLNEDIREHSERVLRELRRLVEEDRDRVRREIKDEDVLRTVEELIERTEREVERVIAHSEDLIRRSNEDVKRVIKTIRELSEDSKRAADK

SEQ ID NO: 5621 - protein, 172 aa, Artificial Sequence; identical to SEQ ID NO: 5620
  Synthetic

SEQ ID NO: 5622 - protein, 174 aa, Artificial Sequence
  Synthetic
DEERVLKELEDLLREILKDIERTVRESRKLVKTILDEIEEVARHNRKLIEEIRREVKKKEVLDEVEEALRRSVKNLEDILREVERLVREDEEKNRKLVEDITRIADTLVKVLEAGTRDLKELLETVRRVIEEVKKVLKRSLEESKKVIDDVRRHLEKNNRDIKTVIDRVREKAK

SEQ ID NO: 5623 - protein, 174 aa, Artificial Sequence; identical to SEQ ID NO: 5622
  Synthetic

SEQ ID NO: 5624 - protein, 174 aa, Artificial Sequence
  Synthetic
SVEEVVEEVKRLIEEVEKTNKKTVEDSKRLIDDIRRRIEEVMRHNRELIKKIEREVTKEEVVRKIRDVLRKSEENLKELLREITERVKKDEKDNEENLRRTRELLEEMERLARAGTIDLRELLERVRRLVEESKRNAEESLRRSEKVIKEATDHLRRNNETIKRVIDRVREEAK

SEQ ID NO: 5625 - protein, 174 aa, Artificial Sequence; identical to SEQ ID NO: 5624
  Synthetic

SEQ ID NO: 5626 - protein, 174 aa, Artificial Sequence
  Synthetic
DTERVLKTLRDLIDTILKRNEEILRHNEKLSRDSKRRIEEVARHNRDLARRVEEEVTKEEVVRKAREMMKRSLRNLEELLKEDDKVLRDSLRHVEENLRRTEKLLRELEELLEAGKRDLRKLLEDVKEIIKTSKENVDRNNDRIRRVVERSEKHLEDNNRDVKRVVDEVREEAR

SEQ ID NO: 5627 - protein, 174 aa, Artificial Sequence; identical to SEQ ID NO: 5626
  Synthetic

SEQ ID NO: 5628 - protein, 174 aa, Artificial Sequence
  Synthetic
KEEEDIKREIEKRITEIKKKNEEVLRRVEELIKRIHELNKRIEDTIDEEIRRIEDLVRRGTDKEDLKRRVKEIEDRVRRLIEDSRKKIKDIEEEVKDLARRSRKEIKEIKDEVRKKVDDDVLRKLKRLLDEIIKHSEDVLRKIKELLDEIKRDSDRVFKKLKELLDRIAREIEK

SEQ ID NO: 5629 - protein, 174 aa, Artificial Sequence; identical to SEQ ID NO: 5628
  Synthetic

SEQ ID NO: 5630 - protein, 174 aa, Artificial Sequence
  Synthetic
RELEEIDRKIKKLIEDIHRENRDILRRIRELIERIKKKNEDILREVRKLIKEIEDLVREGAPKEELKKRIEDIMRRVEKLAKESRDEIDRILEEVERLAERSRRKIDKIMEDVKREVDDKVLKKLEDLLREIKKDSDRVLEEARKLLEEIKRHSDEVLEEIKKLLDDIKKRVET

SEQ ID NO: 5631 - protein, 174 aa, Artificial Sequence; identical to SEQ ID NO: 5630
  Synthetic

SEQ ID NO: 5632 - protein, 174 aa, Artificial Sequence
  Synthetic
SELEKIDDEIRKLIEDIHRLNREIARRNEKTIREIRKKNEDVLRRNKRSADEIDRLVKEGVDKRELRKEIKKSNDESRELIDRSRKEIKKSNDETRRLAEESRKLIEDIRREVERRIDSEALRKLKRLLEEIERDSRRVLDELHKTDEDIERHSREVEDRAHKTDKTIKDRVET

SEQ ID NO: 5633 - protein, 174 aa, Artificial Sequence; identical to SEQ ID NO: 5632
  Synthetic

SEQ ID NO: 5634 - protein, 174 aa, Artificial Sequence
  Synthetic
SEDEKILEEVRREIERIHEENRKVRERIERLIREIHKLNREVLERNKESIEEIRRLVEEGAPKEELRKTVRKSNEDSKRLAKESKDRIDEIEREVEKLIRDSEREIERIEEEVRRKIDSKFLEDIERLLREIDKDSKRVLEELKRLLDEIRKDSDRVLKTAHDTDDKILKDIDK

SEQ ID NO: 5635 - protein, 174 aa, Artificial Sequence; identical to SEQ ID NO: 5634
  Synthetic

SEQ ID NO: 5636 - protein, 174 aa, Artificial Sequence
  Synthetic
KEEDEVREEIKRRIEEIARLNKEIEDEIRELIKRIHELNREILKKVRKLIEEIEDLVRKGVPKEELRKRIEDIRRDVERLLRESEDRIRRIEERVDRLLKDSRDKIDRIKEEVKKKVDSEVLRELDELLRRIKKNSEDVARKLKDLLRRIREDSERVAKEIRRLVEEIKKKVDK

SEQ ID NO: 5637 - protein, 174 aa, Artificial Sequence; identical to SEQ ID NO: 5636
  Synthetic

SEQ ID NO: 5638 - protein, 182 aa, Artificial Sequence
  Synthetic
DEVKRIVDEVRRLVEKVHRVNEEVVKESEDLVREVHRKNKRVLDESERLVEEVERVLKRDVSDRRKVEELVEELRRLNEETRRAVKRSSEELKRINDETRRELEDNSRKLKEVLDRVEKELRKGNGDERVLRTAEEVIRRLEKHSKDLLDTSRRLAEEILRKSDDLLRRSKEKIDDLKRKIK

SEQ ID NO: 5639 - protein, 182 aa, Artificial Sequence; identical to SEQ ID NO: 5638
  Synthetic

SEQ ID NO: 5640 - protein, 182 aa, Artificial Sequence
  Synthetic
SEVDRIKEEVRKLLEEHHKRNEDIVREVTRLLEEHHKKNEEVVRESEKLVKKIREILRDRVRDEDKVRDLERRVERLNRETRRELTESSEEARELVKRVTDELRKSSKELTDVVRDVERLLDEGRGDERVLEEARKVVRELNRRSEELLKRARELVERLDRKSEELLRKSERIIKKIEEDIR

SEQ ID NO: 5641 - protein, 182 aa, Artificial Sequence; identical to SEQ ID NO: 5640
  Synthetic

SEQ ID NO: 5642 - protein, 182 aa, Artificial Sequence
  Synthetic
KEVEEIVRDVRRLVEEHHRENRKIVETVEDLVRKVHRENKRVVEESERLVDELTKILRDTLSDKDRVDDLKKKVDEINEETRRHVERNSREAEKLLRDVEKEVRKSSERLRDLERRVRKLLRDGRGDEEVLKRVREAIRRLNEDSKRLLKEARDVVERIKRNSDKALEESKRKLKEIEERIK

SEQ ID NO: 5643 - protein, 182 aa, Artificial Sequence; identical to SEQ ID NO: 5642
  Synthetic

SEQ ID NO: 5644 - protein, 178 aa, Artificial Sequence
  Synthetic
SKMEEVRRRIKEEADRDEEDNRRVLEDIRRLIEENKRRNEEVLKRIEKKARDLLERIKKDGRTEEIERLLRELEREVDEAVKRSEKNNRDSNRKIEELAKRSRERNRTTNEDIKEVLRRGEIKEEIIKEVSTLNEKLKRDTDEILKEVTRLNERLKEETDRILEEVKKLIDKVRKAVE

SEQ ID NO: 5645 - protein, 178 aa, Artificial Sequence; identical to SEQ ID NO: 5644
  Synthetic

SEQ ID NO: 5646 - protein, 178 aa, Artificial Sequence
  Synthetic
KEADDVKRRLDDLIRRNEEKIRDVRRRVKELVDRNRKKIKEVLDKVKEIIDRLKDEIDKTGRDEKIEKKLEDVRREVTEAVKRSREDNRRSNEEVRRLVEDSRRNNKKSNDEVREVLRRGEIEERIIEEVTRENDRLRKESDRVLDEVSKLNDEARKETDDVLKTVDELVREVAEKAK

SEQ ID NO: 5647 - protein, 178 aa, Artificial Sequence; identical to SEQ ID NO: 5646
  Synthetic

SEQ ID NO: 5648 - protein, 185 aa, Artificial Sequence
  Synthetic
SDAERLLETVRRIAKRLKELNEEVLREAKRIIDRVREENERSRETIREIMKKLKEDIDRIGGRDEEDLRKLLEDAKRIIEEILRRNEELLKEIEKEVDTVLKKNERLLERAEEEVRRMIEEIRTRDGPGVDEILRDVERLLEEVRRSVKESTRRIKRLLDEVRKSVKESTKEIKKLLKDVEDAAR

SEQ ID NO: 5649 - protein, 185 aa, Artificial Sequence; identical to SEQ ID NO: 5648
  Synthetic

SEQ ID NO: 5650 - protein, 185 aa, Artificial Sequence
  Synthetic
KDIEDLRRRIEEIIEEAKRLDKTSLELIRRIIKRIKDENKKMLDEAEKIIRDALKTIDDVGGRDEEELRRLLRKAEEDVRDVDRRNEKLMRDVDKEVAEVLERNKRLLDEIRKRVERVIEDIERRRGPGVEDVTRRIEELLEEVRKSSEDSIRDIRRLLKEVRDSFKRSSDELKRLLDEVRKRAE

SEQ ID NO: 5651 - protein, 185 aa, Artificial Sequence; identical to SEQ ID NO: 5650
  Synthetic

SEQ ID NO: 5652 - protein, 185 aa, Artificial Sequence
  Synthetic
RELEEVVKELRRLLEEVRKRVEDSIKRLDELLDEVRRSNKKSSEDTRKLLKELEDEARKVMERVPDERVRRVLDELRKLVDDNHRENEEISRRMKELVDRSRKHVEEVLRRLEELVKRIEDELRKGERDVREVREEIERIVTKARKVVKEDDDLVKRIVAEARRLSKESEEKVREIVKRAEEKVR

SEQ ID NO: 5653 - protein, 185 aa, Artificial Sequence; identical to SEQ ID NO: 5652
  Synthetic

SEQ ID NO: 5654 - protein, 174 aa, Artificial Sequence
  Synthetic
DEVEELREELERLLKESEDRLREVKKRSDDSLKESRELIKKVRDTLERLLREVEDKVEDERIVEKVRKAVEEVERHLRENEKTIARVVEETRRLLKRNLDEARRVVEEVRELLKRNKDVETVAREVRERVERSKRHIEKVLKEDEEMVRESKKNIEDLLRRVKEDIDRLKEEVD

SEQ ID NO: 5655 - protein, 174 aa, Artificial Sequence; identical to SEQ ID NO: 5654
  Synthetic

SEQ ID NO: 5656 - protein, 174 aa, Artificial Sequence
  Synthetic
SKADRLREELDRLLKEVKELNERSKRESDRSLEEIKRLIEKVERESEKTLREVRAKVDDERIVREAEKIVRETKEELKRLEKRVEEVVRRTKKANDDNLKAVTDMVRRVRDLLARNVDIDTVVEEVKKLIKEILDHIRELVEDDKRKIKEILEEIKKLAEDDRRKVEEVKRKVD

SEQ ID NO: 5657 - protein, 174 aa, Artificial Sequence; identical to SEQ ID NO: 5656
  Synthetic

SEQ ID NO: 5658 - protein, 174 aa, Artificial Sequence
  Synthetic
SDVEDLKKKLDELLEEVERTSREVRKTSERSLEEVEKLLRRVKEESKRLLEEVERDIKDESIIDEVRRLVERSEENLREILRRITKVVEDTERRLKESLDEAREVVERVRDLLERNVDVKKVLDDVKKLVDDVKRKDKKLLDDDRRRVEEALEHIKRNLDRSRDLIRRIKEKAK

SEQ ID NO: 5659 - protein, 174 aa, Artificial Sequence; identical to SEQ ID NO: 5658
  Synthetic

SEQ ID NO: 5660 - protein, 174 aa, Artificial Sequence
  Synthetic
DEVKKLKDDLDRLLDEIRRKIEKVRKDSEDSLKRVEELIRRVEEESRRLLEDVKREISDEEIIREAKKAVEESKKNLDDIRREVKRIVEETERLLKKLDDDLKRVVERVKELLDRNKDIKKVLDDVRREIRRIDEEIKRVEEEDRRMVTELLKHIERNLERSKRLADEVKEKAR

SEQ ID NO: 5661 - protein, 174 aa, Artificial Sequence; identical to SEQ ID NO: 5660
  Synthetic

SEQ ID NO: 5662 - protein, 174 aa, Artificial Sequence
  Synthetic
KEVDELRKALKELLDEVRETSKRVLDETRRLLEEVRRELERVKRESDETLKRIKDRVKDKRLIEEVKRVVEKTRRDLRKIEDEVRRAVEESKKNLDESIKTVEKVVREVKELLDRDRDVDTVLEDVKRKIDELKEHDKRNLDESRRLITELLERIKKLAEDDRRVIEEIERRIQ

SEQ ID NO: 5663 - protein, 174 aa, Artificial Sequence; identical to SEQ ID NO: 5662
  Synthetic

SEQ ID NO: 5664 - protein, 184 aa, Artificial Sequence
  Synthetic
KTMDEIKKEVTDLVRRIRELNERVERTVEDLVRKSRRLNERVLREVERLVKEVRDALRDKDEKDAKRIKDKLDEILRRVKKVLDDNSRHTDKVLEEVRKLLEDDTRELDRILEEVDDVIKKVGKDDETLEKVVDDVRKRIKRSKEHSDEVLEDAKKKIDENLEHSRRVLEEAKKLIDDLKDEIR

SEQ ID NO: 5665 - protein, 184 aa, Artificial Sequence; identical to SEQ ID NO: 5664
  Synthetic

SEQ ID NO: 5666 - protein, 184 aa, Artificial Sequence
  Synthetic
EKAERIIEEVTDLVRRVRETTKTVKEEVRKLVERSKRRNEEIRREVKELVDEVEKKLREKDEKDARRIRKELKEVLDRVDKLLTDDSRKVEEIRREVEERLDESRKRIEKILKDVEDLLRKIGTDKDALEKVRRDVERLIRELEKTDRDVLEEVKKLIEESERNSDRILEEVRRIIEELKKKIK

SEQ ID NO: 5667 - protein, 184 aa, Artificial Sequence; identical to SEQ ID NO: 5666
  Synthetic

SEQ ID NO: 5668 - protein, 184 aa, Artificial Sequence
  Synthetic
SVVDEIRERVERLLREVEKTTEELRDTVRKLVEESEELTKRIEDEVRKLVEKVRRELRRKREDEVTRIRKELEDILKEVKRLLDENRDKVRRVLERAKRLLEDSKRRLDEIVERVRDLLEKIGTDEDKLREVLEEVKERIDRLKELDKKILEDVKRLVKESKEELKDILRRARKLIRDLEEKIK

SEQ ID NO: 5669 - protein, 184 aa, Artificial Sequence; identical to SEQ ID NO: 5668
  Synthetic

SEQ ID NO: 5670 - protein, 184 aa, Artificial Sequence
  Synthetic
SEVEKMLKELKELVERALERDKDALRKLRDLVRESLERDKRMVDKLDELVKEIEDRIRKRKESREDVKRLLKRLREELDKIRKENEELVRRLKEELERIKEENKKLLEELKKRLEDAVRKVGKDKREKVDKIRRDVKRLLDESRESLERSEKDVEKLLEDSRDSLRKSKKRVEELVKRVEEALK

SEQ ID NO: 5671 - protein, 184 aa, Artificial Sequence; identical to SEQ ID NO: 5670
  Synthetic

SEQ ID NO: 5672 - protein, 184 aa, Artificial Sequence
  Synthetic
REVEEALKESTDTIKKILDDDRKAMDELKKLVDKSLEDDKRAVDRLRELVKEIKKIIKKRKDLEEKVKELLRRLEEELRKIEEENRRLVEELKRKLEEIKKKNEKLVRDNEERLKEVVERMGKDKKEDVDRIEEESRRLNEESRDSLRKSEDTVRKLLEESKESLDRSRREVEKLLKEVEDALR

SEQ ID NO: 5673 - protein, 184 aa, Artificial Sequence; identical to SEQ ID NO: 5672
  Synthetic

SEQ ID NO: 5674 - protein, 185 aa, Artificial Sequence
  Synthetic
SELEELDREVEELVERSKRTNERVVEESKRLVDESRRDIDRLLEEVRKLVKDILERIKEEGGESEKAEKEVRDLIRRIKELLDEIRKRVERSNEENEKLLRENKKLDEKSVRDLEDVARKIAKRVRSEDVRRLLEKIERLIEESNRSLERSREESERLSKESEDRLRELEKTVKELLKRVEEALR

SEQ ID NO: 5675 - protein, 185 aa, Artificial Sequence; identical to SEQ ID NO: 5674
  Synthetic

SEQ ID NO: 5676 - protein, 185 aa, Artificial Sequence
  Synthetic
DEIRELLKKAEELVERSLRDNEKVVDELKKLVDESLRRIREMLKRAEDEVRKILEDIERKGGESDDAKRRVEKAIREIEDLLDKVRREVEKSNEELKRVLDENRRRDRESVERLRKELEDVERRIRSDEVDTLRRTVDKLVKDSNRSLEESKRTLEDLIRRSKEELDKLEKDVRRLLDEVRKALK

SEQ ID NO: 5677 - protein, 185 aa, Artificial Sequence; identical to SEQ ID NO: 5676
  Synthetic

SEQ ID NO: 5678 - protein, 174 aa, Artificial Sequence
  Synthetic
DELEDAMRRVEEMAERSERNIRRSIRKVEELVTRSKKNIEDSLREVEKVAREAEELLRRNVDTDEVVKRVEEVVERIKRHNDENNKTSDRLVKEIEKENRENNKRTEEVVRDVARRVTGEEVKRRLDELLKRVTDLDRDSEKKLRELLEEVTKLDKESKDRLDELLEKVRRDRE

SEQ ID NO: 5679 - protein, 174 aa, Artificial Sequence; identical to SEQ ID NO: 5678
  Synthetic

SEQ ID NO: 5680 - protein, 178 aa, Artificial Sequence
  Synthetic
SEVDKLLDRLTKLAKRSIDEARRLVERDREVLEKSIRDAEKLVERDEKVLEDIKRLIEREGPSEELLKRVEDVVRRSREDLEELLKRSKEVVKRSDEALRRLLERSKDVVREVEDELRKKNLDETVRRLVTELNKASKKVVDDVRRESEKSNRDSEDVVRKVKKASDKSLEDVERDIR

SEQ ID NO: 5681 - protein, 178 aa, Artificial Sequence; identical to SEQ ID NO: 5680
  Synthetic

SEQ ID NO: 5682 - protein, 181 aa, Artificial Sequence
  Synthetic
EEVERIVERLKRLAEEDSREIKEVMDRNRESVRRILKRIKDIVEELRRLVEEIKKKIEKDGPTEEVEKRVKELEERVDEEVKKLKELVKRNHDEVRRVLERSRDTVRRIREDVERVAREISDKEKVERLEKDIRRLEKESEDALRRLEDTSKRTDDEIERAIEELERTITDLVREIRERVR

SEQ ID NO: 5683 - protein, 181 aa, Artificial Sequence; identical to SEQ ID NO: 5682
  Synthetic

SEQ ID NO: 5684 - protein, 182 aa, Artificial Sequence
  Synthetic
REVDEIRKELDDRVREIKKRIEEAVEDSRRTVEEIKRRVEEVDKTDRKLVEDIKREIDRRKDAREKVERLLEELKTHSDDSERRIRELIREDEETVRRVLEEIRKLIRDLEEKVKRVEKDISDRKKAEELRDRVRKLVEEIERLLEELRRTLEKTRREIERVVEENRRSVEELIREIKERVD

SEQ ID NO: 5685 - protein, 182 aa, Artificial Sequence; identical to SEQ ID NO: 5684
  Synthetic

SEQ ID NO: 5686 - protein, 174 aa, Artificial Sequence
  Synthetic
DDERRVKEEIKRILTEAKKVIDENKRRSEEVLDRVRKLVKENKDENDEVLKTVDELVRRGSPKEEVLRRVEELLERSKRKIKEVLDRVTKLNEESKRHSDEVLEKVERDLRRLAEEARIEEVRKELKRVLDEVRRLVKETEETDRTSNRTVAELAKDLEKKTDDIEREVRKKVT

SEQ ID NO: 5687 - protein, 174 aa, Artificial Sequence; identical to SEQ ID NO: 5686
  Synthetic

SEQ ID NO: 5688 - protein, 186 aa, Artificial Sequence
  Synthetic
DRVERILKKIEDALRKVEELIRRNKKKIDDVLDEVRRLVEESKKRIDEILDEVRDRITKLKDDEKVVREIEKEVRRLIEEARKDDERTNRKVKKEVEESERDNERSNREVDKVIRDIKREIERDIGGKKEAKRLKDLLDTVRETVKRLNDELRKRSEEVLRRVDKLNKESKKRLDEVLRTVREELR

SEQ ID NO: 5689 - protein, 186 aa, Artificial Sequence; identical to SEQ ID NO: 5688
  Synthetic

SEQ ID NO: 5690 - protein, 182 aa, Artificial Sequence
  Synthetic
REIEEVKKENDKSLKEIEKIIREVKEENKRSLDKIKRIIERALEEIKRMLEKAKKLADEGVDRSVVEKAIKDIERLLEEIRKEVERVLEENEELLRRIERRVKEVIKKDKKLMEDVARKLKELDKFLTEVKRSFEKSVEDIKRLLKEVSESVKRSTDEIRRLLDEVRRAVEEVLRRIRELLR

SEQ ID NO: 5691 - protein, 182 aa, Artificial Sequence; identical to SEQ ID NO: 5690
  Synthetic

SEQ ID NO: 5692 - protein, 179 aa, Artificial Sequence
  Synthetic
SLVEELRRVVEEVRKTLEELVKRLEDSVRRSAEEIRKLIEDAERSVRESERAVKETGDGKILEEAKELVERSERKVRKLLRDLERLVEESEREVRRIADEVRRVLDDLRRKIEDLERKRVTKEIKELLEEIKEMLRRLKKKAEDIDRTNRELEKEVRELVERLLRDNRRLLKEVVERAK

SEQ ID NO: 5693 - protein, 179 aa, Artificial Sequence; identical to SEQ ID NO: 5692
  Synthetic

SEQ ID NO: 5694 - protein, 179 aa, Artificial Sequence
  Synthetic
DKIEEAKKNVDESKRRVEELIRELRESVERSKRDVERLVRELEESVERSLETVKRDGDSRILREAERLVEESEKKIRELLRRAEKLVEDSARKIEELLREAEELVKESEDLIRDLERKNVTKEVKELLKRNSDLLRRVEELVKKLDKENRDLLRKVREDAKKLLKENEDLLEKVKRDAR

SEQ ID NO: 5695 - protein, 179 aa, Artificial Sequence; identical to SEQ ID NO: 5694
  Synthetic

SEQ ID NO: 5696 - protein, 179 aa, Artificial Sequence
  Synthetic
DEIEKAEKNVRDSRREVERVVKKLKESVDKSREEVERLVRELERSVEESRRLVEERGDSKILKEAKDLVDESRKEIEELLRRAEELVRRSEEEIRRLLKRARELVKESRDRIEELAKRGVTKEVDRLLERNSRLLEEVEERAKELDERNKKLLEEVRRRAEEVDKRNKDLLRTVDRRAR

SEQ ID NO: 5697 - protein, 179 aa, Artificial Sequence; identical to SEQ ID NO: 5696
  Synthetic

SEQ ID NO: 5698 - protein, 179 aa, Artificial Sequence
  Synthetic
SLIEEARENVKDSKKKVKELVDRLRKSVEESRERVREVVRRLRESVDTSADAVRKAGDSRILEEAKRLVDTSRKKIDDLLREAEELVKRSADKIKRLLEEATKLVEKSRRDIEKLAKDGVTEAVKRLLEENSKLLADVADEARKLNEENERLLREVEKKAKKLDDENRKLLEEVIETVR

SEQ ID NO: 5699 - protein, 179 aa, Artificial Sequence; identical to SEQ ID NO: 5698
  Synthetic

SEQ ID NO: 5700 - protein, 179 aa, Artificial Sequence
  Synthetic
DEIEELKKNVEDSRREIDRLIKELKESVEKSRKDVEKVVKELRESVKDSLDKLEKTGDSEILKEVRRLVERSEREIERLLEEARRLVDTSREEIDRLLKKARKLVEESERKIEDLRRKGVTKEIKELLKENSDLLERVREEAETLDRKNKELLERVKRKADRLNEENRRLLKEVIEKAR

SEQ ID NO: 5701 - protein, 179 aa, Artificial Sequence; identical to SEQ ID NO: 5700
  Synthetic

SEQ ID NO: 5702 - protein, 181 aa, Artificial Sequence
  Synthetic
SEVEKLLRDLERLLEEIVKEAEDLDRENKERLKEIARKARELNEENKDLLRRVKELVDRNVDKDTLRDEVRKAVEDTKRRVDDLLRDVKRVADETKKKVDELLERVERVLRRVKEEVRRIDDERLVREVERVIREVRKRVEEVVRKVEESIKESEERVKELVKRVTDSLERSKKEVEDAIR

SEQ ID NO: 5703 - protein, 181 aa, Artificial Sequence; identical to SEQ ID NO: 5702
  Synthetic

SEQ ID NO: 5704 - protein, 181 aa, Artificial Sequence
  Synthetic
SEVEELLKRLEDILRENERRARELNRKNKEVLKDNRRRAEEVNRRNKRMLDEAERLAEDNVDKRELLERVKKVARETRELVKDLLRHSEKVVRDTRKVVEDILRHSEEVAERVRREVKKISDEKLVREVETKIEEVRRRSEELVKEVEKSLKESEDDSRRLVREIEESIRESEERIKRRVE

SEQ ID NO: 5705 - protein, 181 aa, Artificial Sequence; identical to SEQ ID NO: 5704
  Synthetic

SEQ ID NO: 5706 - protein, 178 aa, Artificial Sequence
  Synthetic
DEVEEILEKSRRTLEENKRRAKEAVRRSRETLRESEERVKRVVEELRDRLRRIEEEPRRREEIRKVLEELARDVERVLKELEELSKRDEDEVKRVIDENRKSLDKDRRDVEKVIREIQDEDALRKIKKVLDETETESRRTLEELRKVLEETHRRNEKLIRDLREVLKEIEEAVRRREK

SEQ ID NO: 5707 - protein, 178 aa, Artificial Sequence; identical to SEQ ID NO: 5706
  Synthetic

SEQ ID NO: 5708 - protein, 178 aa, Artificial Sequence
  Synthetic
DEVEEALRRLEDLLRRNVEEAKEVVKDSERTLREDAERVKRVVEKSKRTLEAIEKRDLRRELIKEVLDKDREDVDRVLKDSKRTLEEDKERVKRALERNKKSLEDISRRVEDVIRKVTDEEAVRRIEEVLKKIREDSKRTIDELRRVLERTEEETRRLIKELEDVLRRTEEEVKRRLK

SEQ ID NO: 5709 - protein, 178 aa, Artificial Sequence; identical to SEQ ID NO: 5708
  Synthetic

SEQ ID NO: 5710 - protein, 186 aa, Artificial Sequence
  Synthetic
SEVEKVLEEIKRLLDRIKERVDETDRRNKELLKKIKDEVRRAVEEIRRLLEEIKKSADEKGGERKEVRDEAKRVLDRIRDLLRKLREEIERVLRESRKLNEESNKEIKDLLKEVEDRVEDIKRKIGDEKLVREVEEVVTRVRKTIEDLVKKDNDSVRKSEERIKEVVKRIEEEVKRVLEDVDRLAK

SEQ ID NO: 5711 - protein, 186 aa, Artificial Sequence; identical to SEQ ID NO: 5710
  Synthetic

SEQ ID NO: 5712 - protein, 177 aa, Artificial Sequence
  Synthetic
DEVRELLERNRRLLEEIKKTVKDLIRRNEELLKRIEDDAKRLIDRNEELLDELEKRLKDDRLIREAKERLKKSLEDVKRRVEEVKRRLEKSLEEVETIIREAEKRNRDSLREMERRVKGEELEELRRVVEESDETIKRLLEEAKESVDRSLDRIRKLLEDVRRSVERSKKRIDEKRK

SEQ ID NO: 5713 - protein, 177 aa, Artificial Sequence; identical to SEQ ID NO: 5712
  Synthetic

SEQ ID NO: 5714 - protein, 177 aa, Artificial Sequence
  Synthetic
DEVRKILKDIEDILREIEERVKRVIERNKRILEKIREDVKRVDDRNKKLLEELERKLKGRELIKRAKEELDRTLEDARRLIEEAKRTLDESLEDIRRLIEEVSRRIERLLEEIRRKVKGDDLRRVEEVAKRIKDRIRELLDEIRRSVERSKRDVKRLLDELRRSVEESKRRIDEREK

SEQ ID NO: 5715 - protein, 177 aa, Artificial Sequence; identical to SEQ ID NO: 5714
  Synthetic

SEQ ID NO: 5716 - protein, 177 aa, Artificial Sequence
  Synthetic
SEVDKLLRENEKLLEDIERTVKRMLERIKKLNDDVHREIRRIDEENRRLLDEIEKKVRDERMVREVTERLKRTLDEIRDIARKAAEEHDRLLEEAEKIIRDVREESDRSLEEIERKVKGRDLDRLRRVVEKSKKRIEELEREARKVAKDVKKNLEELLEEVKESVRESEKRIKETEK

SEQ ID NO: 5717 - protein, 177 aa, Artificial Sequence; identical to SEQ ID NO: 5716
  Synthetic

SEQ ID NO: 5718 - protein, 184 aa, Artificial Sequence
  Synthetic
SLKERIEEELKKVKDTSDRLNEEVRRSVEDTRKRSEDLNEEVRRSVEESRRRVESLLKRIEDEDKARELRKKVEKVARDTRRLIKEDKDRSDKMVRDTERLIEEDARESEKAVREVEELVRRVDKEEEVKKIIERIEEILERSERRNREIIKRDEEALKRSEERNREIIERDKEMLERLEREVR

SEQ ID NO: 5719 - protein, 184 aa, Artificial Sequence; identical to SEQ ID NO: 5718
  Synthetic

SEQ ID NO: 5720 - protein, 184 aa, Artificial Sequence
  Synthetic
SLIETIKEVVKRVAETSKRLNDRVREELRKVEREVEELNREVERVLREVETAVDDLVKKIEDEEKVRRVEELVREVAREVRELIKENKEEVDRIAKEVEELVETDKRDVDRVVREVEELLKRVRRREEAEDIIRKIEEVLKKSKELNDRIIERIKKMLEDLRRHNEEIIEKIRRALKRLEDEAR

SEQ ID NO: 5721 - protein, 184 aa, Artificial Sequence; identical to SEQ ID NO: 5720
  Synthetic

SEQ ID NO: 5722 - protein, 184 aa, Artificial Sequence
  Synthetic
SLKETIRELLKRVEEESRKLNEDVARSVRETKRRSDRLNEEVERSVRRSEEEVRRLLKRIEDEEKARRLADKVRRLVERTKKLIDEDRDEVRRVVEETKELIKDSKKKVDELSEEVERLVDKIDRKEKAEEIIRRIKEMLRRDEEENRRIIERDERALDKSRRLNEKIIEEDKKAMRDLEEEVK

SEQ ID NO: 5723 - protein, 184 aa, Artificial Sequence; identical to SEQ ID NO: 5722
  Synthetic

SEQ ID NO: 5724 - protein, 181 aa, Artificial Sequence
  Synthetic
SEVEEIIKENRRTLERDRREVEKVIEENKRSLEEIERKVREIIKDNDRSAKEITELAKAGVPRKDLKRFLEEDKRRVEKVLDELRKLLEEDRRKVEEALRKSEKTLREDERRAREVIRRIDDEELVDRLRKSLRDVREESKKLIDELRRSLEESDRRVKELIDRLRKSLDDSRKLVDDLRR

SEQ ID NO: 5725 - protein, 181 aa, Artificial Sequence; identical to SEQ ID NO: 5724
  Synthetic

SEQ ID NO: 5726 - protein, 181 aa, Artificial Sequence
  Synthetic
SEVEEIIKDNERTLEEIRKRVEDVIREIRRLLERIERRVREAIKRNEESLRRIKELVERGIDRRELEKLLRKDEEDVRRMLEELKRLLDEIRKRVKEAIDELERLLREDEKRADEVIRRIEDDELVRTLRESLRRVAEEVKRLLKEVEDVAREVEDRVKKLIEDLRRSLEKSREDVERDSK

SEQ ID NO: 5727 - protein, 181 aa, Artificial Sequence; identical to SEQ ID NO: 5726
  Synthetic

SEQ ID NO: 5728 - protein, 188 aa, Artificial Sequence
  Synthetic
DRVREIIKRLRDLLREIRTVVRKIIEDNRKSLEEIEEHNRRVIRELRELLKEIKETVEREGRNDEVKERLDELLRRLKKRVEEIVRRNEKLLEEDKRRIDEALEELERLLRRLKRVVEKAVDELAKENKEEMIRTVKKVITEIAEEVKRLADEVRDSVRRSEEAVRRLTKETKEVVDDIVRRVRELIE

SEQ ID NO: 5729 - protein, 188 aa, Artificial Sequence; identical to SEQ ID NO: 5728
  Synthetic

SEQ ID NO: 5730 - protein, 188 aa, Artificial Sequence
  Synthetic
KKVEEIIEELKKLLREIEEHNKRVIEENERSLEEIKRHNEEVIEELRELLERIEEVVKRKGKNERVVEELEKLARDLKKRAEEAVERNKRLLDEDRDRMRKVLERNERLLRRLRTRVEKVLRDLKRDRKEDMIRTVEDVVRRIERRVRELSRESEESIRRSTETVKKLTKDTRDVVRRILKTVRDRIK

SEQ ID NO: 5731 - protein, 188 aa, Artificial Sequence; identical to SEQ ID NO: 5730
  Synthetic

SEQ ID NO: 5732 - protein, 187 aa, Artificial Sequence
  Synthetic
SLEERLREVLKDIERRVRELNETNKRVLDKSKTTVDELLKRLREVLEEIREEVRKLIEELARRGKREVLEKIKKDLEELRKTVEEAIKEIERLLREDEKRVREALRDSERLLEELRERVRKAIEEVKGREMIEKVLRDLEELAKRIEDKNRETIKESEKTLEEIRRRVDRLLEELRRLLKEIAKEVK

SEQ ID NO: 5733 - protein, 187 aa, Artificial Sequence; identical to SEQ ID NO: 5732
  Synthetic

SEQ ID NO: 5734 - protein, 187 aa, Artificial Sequence
  Synthetic
SLEETLEKVLRDITERSERLIRENEKNLRDVKREVEKLNERNRDVLKKIREKVRELIEELRRKGKKEVLEEIEERLKRIEEEVRRALERSREILREIEKRNDETLKTSKDTLERIREEVEKISDKVKGEEAIRKVLEELKKLLEEDERRAKRVSEESKELLDRLAEDNERTIRKLERLLEELERRTK

SEQ ID NO: 5735 - protein, 187 aa, Artificial Sequence; identical to SEQ ID NO: 5734
  Synthetic

SEQ ID NO: 5736 - protein, 182 aa, Artificial Sequence
  Synthetic
SEVDKVLEELKKLLDDDRREVERLLRELRRLLDRDRREVEKSIRTLEKLLKEIEDIVRERKEAKEELRRLLEEIEDVSRKSLEDNEKTLRDIRRTVEKILRDNEKTARDIKKRVEEIERRIKDKRALERVREVLERAEDESRKLSERIKKVLEDIERESKRLSEEDREVLKRIKEEVERLEK

SEQ ID NO: 5737 - protein, 182 aa, Artificial Sequence; identical to SEQ ID NO: 5736
  Synthetic

SEQ ID NO: 5738 - protein, 182 aa, Artificial Sequence
  Synthetic
SEVDKVLEELKELLKRLEEDVKRSSKESEDLLRKDEEDVRRSIRELERLLEEIEERVRRRKDAKEELRRLLDDIRRKSEDSLRRNTETMEENRKKSEESLKRIEDAAREIAERVKDIERKIKDERALREVRKVLEDIKKSVDELLKEDKDNLRETARESERLSREDKKVLERIEERVKELED

SEQ ID NO: 5739 - protein, 182 aa, Artificial Sequence; identical to SEQ ID NO: 5738
  Synthetic

SEQ ID NO: 5740 - protein, 182 aa, Artificial Sequence
  Synthetic
SEVEKVIEELKKLADDDRRRVEKSLRELRKLLEELEKRVRDSLEKLKKLLKEIEDRVRRRKDMKEELRKLLEDIERESRKSLEDIKKMLEKIERKSRESLKENEETARRITRRVEDIERKIKDEKLLREVRKVLREARETSRELSRADEKVLRDIRREVKRALDADKKVLDDIRERVKELEK

SEQ ID NO: 5741 - protein, 182 aa, Artificial Sequence; identical to SEQ ID NO: 5740
  Synthetic

SEQ ID NO: 5742 - protein, 184 aa, Artificial Sequence
  Synthetic
DEVEKILKEIDDAVKDLKRKSDKSLTDDRRMVEELKKKSEESLREVEEMVRRLEDEASRTTDEEKLDRLRKKVETVERKIRKTIRDLEDDVRRIVETTKKTIKELKDKARKIVEDVKRLVDRLEDEKVVRRVRDILDKLRKTVERLVEENEDSARRTEETIRKLVKDNEDILRELRRLIEERRT

SEQ ID NO: 5743 - protein, 184 aa, Artificial Sequence; identical to SEQ ID NO: 5742
  Synthetic

SEQ ID NO: 5744 - protein, 182 aa, Artificial Sequence
  Synthetic
SEVEEMLERLKELLRRIEKVVRDSLRRLKELMRRDEEEVRRSLRRLEELLKEIERVARERKEVQEELERLLREVEKVVRTSTEKNKRSLEEIREVVRRSSERLKKLLEEVKRRVKEVLDRLGDKKVLDEVKELLERIEETVRRLIEENERVLEEAEELSRKLSEDNEKVLEDARREAERLTK

SEQ ID NO: 5745 - protein, 182 aa, Artificial Sequence; identical to SEQ ID NO: 5744
  Synthetic

SEQ ID NO: 5746 - protein, 182 aa, Artificial Sequence
  Synthetic
DEVEEVLKELEKLAREDEDRVRKSEKKLRELADKDREDVERSLRRLERLLEELKRVVEERKEVKEELERLLERIEEVVRKSTEDNKRSLEEIERVVRESSKENKDTLDRIRERVEDILRRLGDKDMLERVERLLREAEKLSEKLSRDNEDLLRRARDLSRELSKENERLLEDIRRRVEEAIK

SEQ ID NO: 5747 - protein, 182 aa, Artificial Sequence; identical to SEQ ID NO: 5746
  Synthetic

SEQ ID NO: 5748 - protein, 182 aa, Artificial Sequence
  Synthetic
REVEEVLERLKRLLDTLEREVRKSLEELKRLLDELRKESKKSLDELRKLAEELERVVRRLKEVTERLDELVRRIEKKVRDSIRRLKKLLEEIEKKVRDSSKKLEELLETIKRVVEEILRRLGDEKMLREVKRVLEEAERRVRELIEENKRLLKEIKEEVKKLIEENEKVLEEARRLAEELKK

SEQ ID NO: 5749 - protein, 182 aa, Artificial Sequence; identical to SEQ ID NO: 5748
  Synthetic

SEQ ID NO: 5750 - protein, 182 aa, Artificial Sequence
  Synthetic
DEVREVLKKLEKLADELREEVRKSLEDLKRLLREDEERSKESLKDLERLAREIEEVVKKKKEVEEELEKLLREVRKKVKESLDRNKKSLDDIRKRVKESSDKLRELLKRIKEEVEDILRKLGDEKALRDVEELLRRIEERVRRLIKENEDLLREIEKTSEKLSRDNKELLKEIEERVRRLRQ

SEQ ID NO: 5751 - protein, 182 aa, Artificial Sequence; identical to SEQ ID NO: 5750
  Synthetic

SEQ ID NO: 5752 - protein, 182 aa, Artificial Sequence
  Synthetic
DEVEEALKTLEELMRRDKEEVDKSLEKLRRLLKEDEDRSRESLERLKRLAEELEEVVKKEKEVKEKLKKLLDDIRRLVEESLERNKRSLEEIERTVRESSRKNKETLEEIKKVVDDVLRRLGDRRVLERVKKLLEDARRLSERLSEENERVLEEAKRRSEELSKRNEDLLREIEKKMKEDTR

SEQ ID NO: 5753 - protein, 182 aa, Artificial Sequence; identical to SEQ ID NO: 5752
  Synthetic

SEQ ID NO: 5754 - protein, 182 aa, Artificial Sequence
  Synthetic
SEVEKVLEELKKLADDLRRTSKRSEEELEKLARELEKRVRESEKRLRDLLRELEDVVRKKKEVKDELRELLKRIEDVVRRSTEELKKLLDDIRRRVKESIDTLRRLLEEIERRVKKILEDLGDKDALKRVKELLDRIREEVEKLIRRNEKLLRDIEEKVRTLLERNERVLEEIKKKVDDDIK

SEQ ID NO: 5755 - protein, 182 aa, Artificial Sequence; identical to SEQ ID NO: 5754
  Synthetic

SEQ ID NO: 5756 - protein, 182 aa, Artificial Sequence
  Synthetic
DEVREVLEELRRLMKELRDVSEKSLRDLRKLAEEDKDRVRKSLEKLRELLRTLEDVVRKRKEVREELDKLLEDIEREVRTSTKENKESLERIREVVERSVRKLERLLEEIKRVVDDILRKLGDEKMLREVEDLLRRAEKEVRRLIEENKKLLKEAEETSRKLSKENEDVLRDIRRAVEELKR

SEQ ID NO: 5757 - protein, 182 aa, Artificial Sequence; identical to SEQ ID NO: 5756
  Synthetic

SEQ ID NO: 5758 - protein, 182 aa, Artificial Sequence
  Synthetic
SEVEKALEDLERLAKELEKVSRESLRRLEKLLEDDRRRSKRSLEELEELLDRLRDTVRRRKEVKEELRKLLDRIRERVKESLDRNEESMREIKEVVDRSIDRLRRLLERIRRVVKKVEDDLGDEKALREVRDLLRRIEERVKKLIEDNRKLLEDARRESERLSEENKRVLEKIEREVKKLED

SEQ ID NO: 5759 - protein, 182 aa, Artificial Sequence; identical to SEQ ID NO: 5758
  Synthetic

SEQ ID NO: 5760 - protein, 182 aa, Artificial Sequence
  Synthetic
SRVEEVLKKLEDLLRRLEEVSERSLRELRELVKRLEDVVRRSEKKLKELADRIEEVVRRRKEVREELRELLKRVEDTVRRSNEELKKLLDEIRKKVEESIRTLKKLLDEIREEVERILRELGDKKALDDVRRLLEEIEKRVTELIERNRRLLEEAEDRVRKLLRDNEELLKRIEKLVRDLER

SEQ ID NO: 5761 - protein, 182 aa, Artificial Sequence; identical to SEQ ID NO: 5760
  Synthetic

SEQ ID NO: 5762 - protein, 182 aa, Artificial Sequence
  Synthetic
SRVEEVARKLEDLLRELKRVSDESLKTLEKLMTDDERRVRESLDKLRELAREIDEVVRRRKEDDEKLKRLLERVEEVVEKSNRDNRESLERIRKVVEESIRKLEKLLERIRREVKKIEEELGDEDALREVRRLLERAEELVRELIKRNEDVLREAKRTSDELSERNRRLLERIKETVDRKRK

SEQ ID NO: 5763 - protein, 182 aa, Artificial Sequence; identical to SEQ ID NO: 5762
  Synthetic

SEQ ID NO: 5764 - protein, 177 aa, Artificial Sequence
  Synthetic
REVEEILKRIEELLRRIKKLSEETLREIAKLLEDIKRLSEETLKSNKDLLKRVRDELRTEEAIKKVKEENDKNLKDSEKIIREVAERIKRALEKSREIIKKVKKEIEDLLDEARKKIDSRMLREIERIIKELKELVDKLLEDNERLIERLDREVKRLLEENEKSVREASREIDERRR

SEQ ID NO: 5765 - protein, 177 aa, Artificial Sequence; identical to SEQ ID NO: 5764
  Synthetic

SEQ ID NO: 5766 - protein, 177 aa, Artificial Sequence
  Synthetic
DEVEELLRRIERLVEEARRLVEELLETNKKLLKDIEKLSRDTLKSNEELLREVKDRVRTEELVRRVAERNRKNLEESERIIREVKRRNEENLREAERIIRELERLIKELEREVREKVDSEMLRRLETIIREAERDLRRLLKEARDSVKKVSDEIKRLLEENKRSVDRVSREIKRVEK

SEQ ID NO: 5767 - protein, 177 aa, Artificial Sequence; identical to SEQ ID NO: 5766
  Synthetic

SEQ ID NO: 5768 - protein, 181 aa, Artificial Sequence
  Synthetic
DEVEELLKEIRELIEEARRRIEELLKEDRDIVRRVTELSRRTLEKIKDLIRKIKDIADRNDKRERAVEKVAKEIKELKDESKKVIDDIDKLIKESDEKAKKLIEEMKKRIKELKDKVRRDVDSEMLRRLEELIKEIEDLVRKLLEELKRSVRETEERVRKLKEDNDELIKRIDELVKEREK

SEQ ID NO: 5769 - protein, 181 aa, Artificial Sequence; identical to SEQ ID NO: 5768
  Synthetic

SEQ ID NO: 5770 - protein, 185 aa, Artificial Sequence
  Synthetic
SSLDDLRRLAEELLRTNKKLMEDLRRTNEKLIKEIEDVLRRIRESSKRIKEEVDKLTRDVRGDEELKRVIDELRKKVEDNLERVKRLIDRLRELVDRNHERVKTLVDDSRKKLEDLRERVERLPIDRKVLERVKEAVDEVRRSVEESLRDAKRMDEETRKTVEDVRREVTKSVEDVKRRIDESRK

SEQ ID NO: 5771 - protein, 185 aa, Artificial Sequence; identical to SEQ ID NO: 5770
  Synthetic

SEQ ID NO: 5772 - protein, 184 aa, Artificial Sequence
  Synthetic
DEVDEVVREVERLLEELRKENDKSVEEDKRLVDKLREEVKRILEEVRKLLEDLARKAKEDKREKVVEELRREAKKILDDIRRVIEELKKKITEILERTREAIRRSEEAARKIVEDIERVASKLKDKDVLRKLREVIKEVERIAEEVVRKNKDSADKSRKIIEDVVRALKKVVDDVRKIAEDLSR

SEQ ID NO: 5773 - protein, 184 aa, Artificial Sequence; identical to SEQ ID NO: 5772
  Synthetic

SEQ ID NO: 5774 - protein, 181 aa, Artificial Sequence
  Synthetic
DEVEKAVRESEETVKDIRRRNDETVRRLRELAKRLKERNEESVRRLRDLLRRLDEEVARRGRREEVEKVLKRIKDEVRRTLEESRKILEDIERDIERSLRDSRRLVTEDLDRLDKLLRKTTDERVLRDIRRVMEDSERIVKEVLDRNRKVAEDVRRIVEEVLRVNEDVLRKIEKRVRELKK

SEQ ID NO: 5775 - protein, 181 aa, Artificial Sequence; identical to SEQ ID NO: 5774
  Synthetic

SEQ ID NO: 5776 - protein, 181 aa, Artificial Sequence
  Synthetic
SELEEIKKRVDRALEENNKLLKEIEERVRKSNRDNERLLKEIEDRVREVTERIKKVEEEGRDRSVLEKIVRKVLDDIRRVMEESEELNRRSNKEIRRVLEESRELLKRVREEIEEVLKKVTDEDVLKKIRDLAREVEENVRESERKIKKLAEDDNRSVAESLREIKRLADEVKRRVDEARK

SEQ ID NO: 5777 - protein, 181 aa, Artificial Sequence; identical to SEQ ID NO: 5776
  Synthetic

SEQ ID NO: 5778 - protein, 182 aa, Artificial Sequence
  Synthetic
SELEEVRKRVKDVNRKNKELLDEIERTVRELLEDDRRLVDEAKKELDTLLRDIERLRREGVDREVLDRVLKRVKEIADRVKELLDRSLERLRREIERLKELVERSREEIERLIRKVETELKDVEDALREIRRLLEEVRKSIEDSKRLIEELLRRLKKVTDESRKKVEDLLREVEREVREAKK

SEQ ID NO: 5779 - protein, 182 aa, Artificial Sequence; identical to SEQ ID NO: 5778
  Synthetic

SEQ ID NO: 5780 - protein, 182 aa, Artificial Sequence
  Synthetic
RELEEIEKELKRMLDENRRLLERIEEEVRRLNEDNRRLLEEIEKTVEDLLEKIRKLSKEGVPEEVLRRVLREVEKIIKDAKKLLETTAERIRTIIEEARKRSEESLRRVTEIVKEVLRKLKDVREALKRIEELLREIEEVVKRSKTEIERLLRELEESVRRSDERIERLLKRVKDVVDEEER

SEQ ID NO: 5781 - protein, 182 aa, Artificial Sequence; identical to SEQ ID NO: 5780
  Synthetic

SEQ ID NO: 5782 - protein, 182 aa, Artificial Sequence
  Synthetic
EKEKEITKTLEDLIRKNRKLLEEIERRVKEVLKRDRELLEEIERRVADMLRRIRDVLRKGVPEEVLDRLLKEVKRIADKARRDLDRSLDEIRRIAEEAKKRNRDSLEEVKRIVEKVATEVKDLREVLERIKRLLEKVEKVSTESAKRIEELLEEVKRVTDDSKRRVTELLREVERVVDEVRR

SEQ ID NO: 5783 - protein, 182 aa, Artificial Sequence; identical to SEQ ID NO: 5782
  Synthetic

SEQ ID NO: 5784 - protein, 180 aa, Artificial Sequence
  Synthetic
DTLRELAKKAKELDDRNRKLLETVEELVRRVNEKNKDLLRRVRELARELLDRLRKLAREGSGKALRDIKKEIDRLLEELRRLVKESADEIDEILKEARRLVDESREEIKRLLDEVRDKVEDEEVRRELERLVRKLEESVRKSRKDVEDLITELKKSVKESLKEIEDLVRRLREVVKEIER

SEQ ID NO: 5785 - protein, 180 aa, Artificial Sequence; identical to SEQ ID NO: 5784
  Synthetic

SEQ ID NO: 5786 - protein, 182 aa, Artificial Sequence
  Synthetic
EEVDRILKESEDTIREIRDRVRKMLETSKKTVEEIKRRVDRALERDKKLVEDLRERVERTGRDKEVEKIVTDILRHSRELVREIEKLITEDKREVERALEEIERLVREDEERVRRVVEELRELKEAVEKMRRIVRESREVVARIREDIKRVLDESDKVVKDLKRAADRSVEEVKKVVDDIKK

SEQ ID NO: 5787 - protein, 182 aa, Artificial Sequence; identical to SEQ ID NO: 5786
  Synthetic

SEQ ID NO: 5788 - protein, 184 aa, Artificial Sequence
  Synthetic
SELERLKETSKDTIKKIKDLLRELKKTVDDVIERDKTLLDDLREKVERVIRRIEELLKRTRDDRLLEKILREIKEALKKLEEDVRKILKENKDALRELEDRVRKIKDDNRKALRRLEEEVARLKDEKVRDEIRKLIETNKRVADRVEEEVRKLIEDSERSLRKSEKDVKELIKKVEEVMEEVRR

SEQ ID NO: 5789 - protein, 184 aa, Artificial Sequence; identical to SEQ ID NO: 5788
  Synthetic

SEQ ID NO: 5790 - protein, 184 aa, Artificial Sequence
  Synthetic
SIEETVKRLIEEIERVLRDARRESKRLSEEDKKVLDEIREEVRKLEEKIKTVLDKARKDISDEDKLRRVKERVEEAIRRLRKLLREIEERSRESLRDNERTAREIERKVREIIKELRELLERLRTEKLLDEVRRRVEEVIKELEELLRRDKERVDRSIRELEKLLEEIKERVDRMIKELEDRLR

SEQ ID NO: 5791 - protein, 184 aa, Artificial Sequence; identical to SEQ ID NO: 5790
  Synthetic

SEQ ID NO: 5792 - protein, 182 aa, Artificial Sequence
  Synthetic
REVEEADKTVKELIKRNKELLDRIKKEVDELIRRDKELLDKAERDVDRLIKELRDVAREGVDRKVIDELRRDLERLIKKLAEDNKRSLDEARELIREVEERDKRSLDEARKLIRDAERRVKDGKEVVDEIRRLLRELEKVSEDTKREIRELLKRAEESVRRVTERIERLLKELRDVIREIEK

SEQ ID NO: 5793 - protein, 182 aa, Artificial Sequence; identical to SEQ ID NO: 5792
  Synthetic

SEQ ID NO: 5794 - protein, 182 aa, Artificial Sequence
  Synthetic
DELEKIKKDVKKMIRDNEDLLRRVEERVRELNRRNEELLKEIEKRVEELIKRLEDVARRGEPEEVITTLEKEVRRLIKEVAERDEESLRENRKLIKEIEERDRESLRRAEKLIREVEKEVKDKREVLEAIRRLEKEARDVSRRSTRKIEELLETSETSSEKSKRRIEELLRRLERVVEEARK

SEQ ID NO: 5795 - protein, 182 aa, Artificial Sequence; identical to SEQ ID NO: 5794
  Synthetic

SEQ ID NO: 5796 - protein, 186 aa, Artificial Sequence
  Synthetic
EELERAAERIEELLRSNRDLADKITKLSRETLEKIKDLLRKIEKEVRELLERIKDLERRLKDKDTLRREIERLLREVTEIIKRVKKEVDELLRESEEIMTRVKKENEDNLRKAEEIVRDAERRVKDKEEVLRELERLLRELKKSVDELSRLIEELLRENKRLIDEVKKRIDELLEELKKLIEKVKK

SEQ ID NO: 5797 - protein, 186 aa, Artificial Sequence; identical to SEQ ID NO: 5796
  Synthetic

SEQ ID NO: 5798 - protein, 181 aa, Artificial Sequence
  Synthetic
EIEKVVEEVIRRVRKVLEEVERSVRDTIERIKDVLRRVEEVVRRTDKTIRDVLDRIRKEISDKDKLARVKEIVDEALERSRRSLDEVRKRVEDVVRDSERSLEEAERIVREAIKRLEELLRQKVRDEDIRRVLEDIRRELKRIVDENRKLAEEIIRTLERMVEKNKELMKEVVKKLEEDSR

SEQ ID NO: 5799 - protein, 181 aa, Artificial Sequence; identical to SEQ ID NO: 5798
  Synthetic

SEQ ID NO: 5800 - protein, 181 aa, Artificial Sequence
  Synthetic
RIKETVDKVIEEVRRVLEEVRTTVKRTDERIKEVLEEVEETVRRTLEEIRRVLEELERAIKDKDKLDKVRKKVEEVLRRSERSLERAEEIVRKANKESKDSLDEAERIVREVIKELERVLKDNVRDEDIRDLVRKIKEELRRIVEKNRELMEKVERELRRIVEENERLARRIKEELDRDMK

SEQ ID NO: 5801 - protein, 181 aa, Artificial Sequence; identical to SEQ ID NO: 5800
  Synthetic

SEQ ID NO: 5802 - protein, 181 aa, Artificial Sequence
  Synthetic
RIEEIVERLIREVEKVLRDVERTVDKTDRKIREVLEEVRRISDESIKEVREVLEDLERKIKDKDKLKEVRDEVREVIKELEDTLRKAEKIAREVNKESKKSLDDIRKEVKDVIERLEDLLRNKVRDEDIRRLAEEIKKKLKRMVERNKELMERIEREIREIVERDKELVERIKRKLRELAR

SEQ ID NO: 5803 - protein, 181 aa, Artificial Sequence; identical to SEQ ID NO: 5802
  Synthetic

SEQ ID NO: 5804 - protein, 181 aa, Artificial Sequence
  Synthetic
SIEDVVREVIKRVEDVLRRVEEVSRETIERVRRVLREVEERVERTDERIRRILDKLAKSIKDEDKLRKVEEEVKRVEEESRESLERIREIVERVIRELERTAEKAREDVERVIRELEELLARNVRDEDIRRLVKKIEEDLTRIVERDKELLEDIERELRRMVEENERLLEEIERRARDEER

SEQ ID NO: 5805 - protein, 181 aa, Artificial Sequence; identical to SEQ ID NO: 5804
  Synthetic

SEQ ID NO: 5806 - protein, 175 aa, Artificial Sequence
  Synthetic
EELERLARDVDKRVEDLKDDIRKIREEVKRLLDDNRRRAEEILEESRKSLETLTDLMRRNRVDKRELEELAEESKREVKRLLEESEEHIERIKERVDRLLKELKRKVDKIKEDVKRDARSEIVKRVLEKLDEVLKDLKRTIDELKKRLEDVLRESRDIARRALEENERVLDELRK

SEQ ID NO: 5807 - protein, 175 aa, Artificial Sequence; identical to SEQ ID NO: 5806
  Synthetic

SEQ ID NO: 5808 - protein, 175 aa, Artificial Sequence
  Synthetic
SEEDRIAEESRESLEKLKDDIRKIEDRVRKLLEDNKRRAEEILREVEEDLKRIEELFKQNRVDKEDLRRKVEEIERKIRKLMEESKKHVEKIIREVKKLLDELRRKVEESLKEIKKKLRSEIVRRLLEENKRVLDELEKRIEELLRRLDKVLKESERIAREAERKIEEVLRKLEK

SEQ ID NO: 5809 - protein, 175 aa, Artificial Sequence; identical to SEQ ID NO: 5808
  Synthetic

SEQ ID NO: 5810 - protein, 181 aa, Artificial Sequence
  Synthetic
SAEEIIDRVTKEAKKSIDRTRDRITKLRRELEESIRRSRDIITKLLEELRRVVEEVKRDKRELEELVKKIKEVIDRLREKIERNVRKTEDMVRKLEEKIDRIVRRTEKRVEELKEEAKRVRTEKVVEDLERKVEEIVREDEDLVRRLAEEVKRVVEDDERTAKKLEDDVRRIIEAVKRELK

SEQ ID NO: 5811 - protein, 181 aa, Artificial Sequence; identical to SEQ ID NO: 5810
  Synthetic

SEQ ID NO: 5812 - protein, 173 aa, Artificial Sequence
  Synthetic
SLEELLEEARKTVERLIRESERVLRESEERVRRLIEELERVVRETRKRVKEVIERVEDEEALKELEKLLREDSKRVKEVLDDLRRDLERNKRRNEKVLRELEELLKRLEELVREGVREEELEKLLREIEERVKEMLKRDEDTLREIERKVKEAVRDSERTLEEIEKRVTEEKT

SEQ ID NO: 5813 - protein, 173 aa, Artificial Sequence; identical to SEQ ID NO: 5812
  Synthetic

SEQ ID NO: 5814 - protein, 181 aa, Artificial Sequence
  Synthetic
SITEEIKDIERKVEKLIRELDEENKRILETLEREAKDVLRRIEDINEKLHRRARDLKRKGVDRREVDKLIREADKLHRDLKELIDRLATEVKDRLRKSLERVKKLIKEIRELVERLAEKVTREELKRVLDRVLKKVEDLLRKLEKSVRDSERRLEELLRELREVVKRVRDNIEKVLEELER

SEQ ID NO: 5815 - protein, 181 aa, Artificial Sequence; identical to SEQ ID NO: 5814
  Synthetic

SEQ ID NO: 5816 - protein, 181 aa, Artificial Sequence
  Synthetic
SIREEAREELKRLEEEAERLDRENREILKELTREFKELLKESRDINREIHERIRKLKKDGVDRKDVRRTIEDAKRKHEESHKKVEDLIRTVTERLKKSLEDVKRLIDEVRKRVDELRKRSTDRKLDKVLKEIEERLRELLKRLEDSVRESEKRLRDLLRELAKVDEEAKRNVEKVLKELED

SEQ ID NO: 5817 - protein, 181 aa, Artificial Sequence; identical to SEQ ID NO: 5816
  Synthetic

SEQ ID NO: 5818 - protein, 179 aa, Artificial Sequence
  Synthetic
SIKDEIRKLLEKVKREVEEIDDRNRRLLEKVKREAEELLEKNRRLLEEVRKRAEELKDSSEEMVEKLLEDATRLVKTSEDEIRALLKRAEDLVRDSRRRIEEILRTARRALERLREKFTDKDLERVVRDVERRIEELIRKLERSVDRSEEEVRRLIEELRKSVEDSKREVDRVVEELRR

SEQ ID NO: 5819 - protein, 179 aa, Artificial Sequence; identical to SEQ ID NO: 5818
  Synthetic

SEQ ID NO: 5820 - protein, 179 aa, Artificial Sequence
  Synthetic
SILEDVRRLLDEVKKLVEELLRENRRLLEEVKKEVEKLDRKNRELLREVRELVKELKDSSEEMVETLLRRAKKLVDDSREEIDRLLEELRRLVEDSRRKIEELLERAERLLEEVRRRFTDRKLEEAVREVEERVRDLIRKARESVDESRKRIEDLIRELKKSVEESLRDIERLIKELRD

SEQ ID NO: 5821 - protein, 179 aa, Artificial Sequence; identical to SEQ ID NO: 5820
  Synthetic

SEQ ID NO: 5822 - protein, 179 aa, Artificial Sequence
  Synthetic
STREDARRLVERVRKEVKRLLKKNSDLLREVTERVKTLNERNRRLLEEVEREAKRLKDSDERDVERLLDRARKLVKESEDLIRKLLKDLRELVRRSEKDIDELRKELKRLLDELRARATDKDLERVVREIEKEIRDLIRELEENVKTSEKLIEDLIRELEKSVDESRKRVEELVKELRT

SEQ ID NO: 5823 - protein, 179 aa, Artificial Sequence; identical to SEQ ID NO: 5822
  Synthetic

SEQ ID NO: 5824 - protein, 179 aa, Artificial Sequence
  Synthetic
SAEDVVREIEKTVRELMRRVEESVRKVEEDVKRLIKEVKDSADESEKKVERLLEEVKREKEEDEEVIRKLERLVEEDKERIRRAVRRLEELLKRDRERVEDVLRKLAELLERLKDRATKRKESEEELRRLLEEIKKEVDKVIRENEETLKRIKEVVERVIEDNKRTLREIEEEVRRIRK

SEQ ID NO: 5825 - protein, 179 aa, Artificial Sequence; identical to SEQ ID NO: 5824
  Synthetic

SEQ ID NO: 5826 - protein, 180 aa, Artificial Sequence
  Synthetic
SVEEVVKRILETIKDLMRRIKKNSEDVLETIKRLADEIRESVKRSNERIRELIKDIRETRKGDKVERIVRRLEELLRRNTRLVEKIERDLDRLLKENEDLLREIIKTLEKMLRDVRRIAEEGVGTDELEKLLREVEEIVKDVSRKSDTSLKKAEERVRDVKRKDEKTLRDAEEVVRREKK

SEQ ID NO: 5827 - protein, 180 aa, Artificial Sequence; identical to SEQ ID NO: 5826
  Synthetic

SEQ ID NO: 5828 - protein, 182 aa, Artificial Sequence
  Synthetic
SVEDLVRDVRDKAKRTSDEIRKLIERSKEIFERSSREIRRLIEESRDTARRVVEKLKKNGVDEELIRRLEKLVRELEKKHEDILRKNEELMREVVKEHERILERNEELMRELDDKARKNKDKSEEEIARLVEEVKRLVKESLELIEELHRRSEKLVRDSLREIKTLNDESRKIVTDVLREVT

SEQ ID NO: 5829 - protein, 182 aa, Artificial Sequence; identical to SEQ ID NO: 5828
  Synthetic

SEQ ID NO: 5830 - protein, 182 aa, Artificial Sequence
  Synthetic
KVEELVREVTEIARKVREDLERLVRESERRMRESSEKIKRLIEESRRRMKEVVEELKREGIPEELIKDLERLMREVDEEHKRILKKNEDLARELIEEHKDLIRRLEKLAEDLIREAEKNKDKSEEEIKRLREKVKRLVDKVKREIERLNRKSRELVKKSEEDIEKINRESRELLRKVLEDAK

SEQ ID NO: 5831 - protein, 182 aa, Artificial Sequence; identical to SEQ ID NO: 5830
  Synthetic

SEQ ID NO: 5832 - protein, 182 aa, Artificial Sequence
  Synthetic
DVEELIKEVKDKAKRTSDEIKKLIDESKRVLDEVVRRLEELVKRIKESADRVLEEIAREGVPEEILKKVEDLVRELKKRLEDLIERVKTVVRELKKKHDKILKENEELLEEVVRRAEENRDKDRKIAKKLVDDVERRLRKSLRLIEELNKESRDIVRELLRLIEELLKEVEELVERLLREVK

SEQ ID NO: 5833 - protein, 182 aa, Artificial Sequence; identical to SEQ ID NO: 5832
  Synthetic

SEQ ID NO: 5834 - protein, 175 aa, Artificial Sequence
  Synthetic
SELEKVLDEVRKRAKESLRRSEELAKRVEEMDERNLRNSKELRERVEEVIKRLLEVARQNRSDKKDLLRRIEEVLEEVRRHIEENLRHNEKVLEEVERVSEKNLRDVKRVLEEVRRKARSRVLEEVERIVKRVLDEDKKVLDRLRRSVERSSRESEKVLDELKKRVDRVLDEVRR

SEQ ID NO: 5835 - protein, 175 aa, Artificial Sequence; identical to SEQ ID NO: 5834
  Synthetic

SEQ ID NO: 5836 - protein, 175 aa, Artificial Sequence
  Synthetic
SELEKVFEDVKRRLDESLEKSKELLKRVRDTDRENLKNSKRLLERNKRLVDDLLRVVEANTRDKRELEKKNKDVADETREHSRRNVEHNKEVLRRVEEESRKNLEEVKEVLKDVRRRVRSRLLEELEKRAKKVLDDDKRVLDEARRSSKRVTDEDRKVLKTAEDINREVSKRIRD

SEQ ID NO: 5837 - protein, 175 aa, Artificial Sequence; identical to SEQ ID NO: 5836
  Synthetic

SEQ ID NO: 5838 - protein, 175 aa, Artificial Sequence
  Synthetic
SELEKVVDDVRRRLDRLLETSEKLLEDATKRLKDSERKSDEIVKTNEELLERLKTVLERRETDKRELLKENKEILERTRELSERNLKEVEDILREVEEEVRKNLRRIEKVLEEVRRKLRSELLKRVEERIKRVLDESKKILKEIADEVRRVLERDKELLKRLEDKNREVSERIRK

SEQ ID NO: 5839 - protein, 175 aa, Artificial Sequence; identical to SEQ ID NO: 5838
  Synthetic

SEQ ID NO: 5840 - protein, 174 aa, Artificial Sequence
  Synthetic
SELEKVVKEVADLLRRNLEKSKRVLEEVRRRLEENLRESEKVHDDNRKTARRILELVREGKDKRDLTRLLEEDDKRVKEALDKSRENNERILKEVRRALRESEEDNRRILKEVREKVDSRLLEELEERVRESIERSRRFIEELEKIVEETLTESEKLARASSEITKTVLDEIRK

SEQ ID NO: 5841 - protein, 174 aa, Artificial Sequence; identical to SEQ ID NO: 5840
  Synthetic

SEQ ID NO: 5842 - protein, 174 aa, Artificial Sequence
  Synthetic
RELEEVFKEVEKELRDNLRKVEEVLREVRERLKENLDRSKEVLKDVRRRIKELLDLARGGKDKRELEKRVRKIEKDVRKLMEESKENNKRILERVEEAMKDSERDNRRILDKVRKKVDSKLLERLERKVEETLRRSREVIEDAKRIVEETLRRSEDIIREAKEIIDDVLEKIRR

SEQ ID NO: 5843 - protein, 174 aa, Artificial Sequence; identical to SEQ ID NO: 5842
  Synthetic

SEQ ID NO: 5844 - protein, 180 aa, Artificial Sequence
  Synthetic
STDDALRKIERRHKELTKEVRDMLRKVDEEVKRLIEENEDVLRKLREEVDRVIKDIRRADTPNVDELLDEVRRLLEEVERHNKKTLDDLEKRLRDIREKARKLLEDNERALERIKRVVEAGKVDLEDLRRDSERIIEEVKRRLDELRREVEKVIDDVRRLSEKNEKDARRIIEEVKRRLD

SEQ ID NO: 5845 - protein, 180 aa, Artificial Sequence; identical to SEQ ID NO: 5844
  Synthetic

SEQ ID NO: 5846 - protein, 180 aa, Artificial Sequence
  Synthetic
STEEVLDEIRKLHKTLTEDIKRVLREIEELHRRTIEENKEVLDKIREDYKRVIDDVRTKDTPNVEKLLKDLEKSAKENEEHNERTLREDDRVLKEIRRRATELLKANEEMLRRIEEVMRAGKVDAEELLRESKEAIKEVKRVLEELRKESKRVVDETRKLSEENLEHSERVLRKVEEDLR

SEQ ID NO: 5847 - protein, 180 aa, Artificial Sequence; identical to SEQ ID NO: 5846
  Synthetic

SEQ ID NO: 5848 - protein, 180 aa, Artificial Sequence
  Synthetic
DEDKVLRKVKKLVEDIRREIERILREAERLHKELTRRNEEVLERIRRLVDKVIKEIRKADTPDVDRLIKEVRDALRRLEEHNRETLRENETVADEIRKKVEELLKRVEEVLETIRKVIEEGKRDLRELLERVERVIREVRRDLKRLLDESRDVVRRVEERSRRNLEEVKRDIERVKRELD

SEQ ID NO: 5849 - protein, 180 aa, Artificial Sequence; identical to SEQ ID NO: 5848
  Synthetic

SEQ ID NO: 5850 - protein, 180 aa, Artificial Sequence
  Synthetic
SKEEVLREIERLHKETIRRIEEVLREATELHKRLTETNKRVLEDLEREAREVIEDVRRADTPNVEELLRELKDALDKVRDHNRKTLKKNEDVVREIEKEVRELLKEDEDVLRRIEKVMRDGRVDARELLEESRREVERSEKEVERLLRKSRKVVEEVRKLSEENDREVKKILEEVKRRLD

SEQ ID NO: 5851 - protein, 180 aa, Artificial Sequence; identical to SEQ ID NO: 5850
  Synthetic

SEQ ID NO: 5852 - protein, 180 aa, Artificial Sequence
  Synthetic
SKEEVLDEMRRLHETTKRDIRRVLKEIEELHERTLRENKRVLEEIKELVRRVIEDIKRKKTPDVEKLVRRVEEMLKELEKHNKKTTDDDKRVLDEIRRRADELVKEDERVLREIEEVVRAGKVDLKELLDESRRVVKESKEDLDRLLKESRDVVDDTRRKSEKNLRDAERVIREAEEAVR

SEQ ID NO: 5853 - protein, 180 aa, Artificial Sequence; identical to SEQ ID NO: 5852
  Synthetic

SEQ ID NO: 5854 - protein, 180 aa, Artificial Sequence
  Synthetic
DRERVLREMERLVRELLRENREVLDEIRKLHERTVRRNRELAKRLEEEAKEVIDRIEKTKTPNVEELLEKVRRALERVKRHNEKTTRDDERVLRELEKHNEETTRELKEILDRILERVRDGKVDVKKLLEEARDVIRRAKEKSKRNLDESRRVVKETDDLSEKNREDVRKIIKEVEEELK

SEQ ID NO: 5855 - protein, 180 aa, Artificial Sequence; identical to SEQ ID NO: 5854
  Synthetic

SEQ ID NO: 5856 - protein, 180 aa, Artificial Sequence
  Synthetic
DVEEVLREIEELHRRTIERIKKVAKKVREDVKRVLDENKKVLDELRRRVEEVIEKIKKADTPNVEELLKTVEKMLEDVKRHNEETTRRAADILRKIEDKARKLLEEDERVLREIEKVARDGRVDMRELKKRSDDVVRESEKELRRLEDEIRKVIEDLKKLSEDNEREVEKVIRKVEEDLR

SEQ ID NO: 5857 - protein, 180 aa, Artificial Sequence; identical to SEQ ID NO: 5856
  Synthetic

SEQ ID NO: 5858 - protein, 184 aa, Artificial Sequence
  Synthetic
DMERIVDTLRKLNTDSNRRSKEAIDRLRKTNKDSLDKVEEVLREAERLAEDVLRKVEEKVTSEKLERIRREIERVVEEVRKRIEEIKRKIKESLRRVDKLITENSKKNKDSLDRVEDIIRKVGSKKEVLKKLLEEVKDSNRRSEEDVRRMEEEVKRSNDELLKELKEILDKVREAIKKLEEKVK

SEQ ID NO: 5859 - protein, 184 aa, Artificial Sequence; identical to SEQ ID NO: 5858
  Synthetic

SEQ ID NO: 5860 - protein, 184 aa, Artificial Sequence
  Synthetic
SAEDIIRRLRDLNRRSNKKSRDVAEKLRRDNKRTLEKVERKARELKKLAEEVVKEVRDKVTSEKLRRIEKEIRDVVDRVRRLIEEIAREIERSLEEVKRLIKENERKNEESLRRVDDIIKKVGDLEEVLRRMLKEVEDSNRDSDRDVRRIEEEVRRLNEELDKKLEDLEREVRRMIEEIRRKVK

SEQ ID NO: 5861 - protein, 184 aa, Artificial Sequence; identical to SEQ ID NO: 5860
  Synthetic

SEQ ID NO: 5862 - protein, 178 aa, Artificial Sequence
  Synthetic
SELEEVKERVERVLKRIRDLTRELEDRVDKILEKSKRTLDELEKRVREVIARIKELVKRLKDDRRAVKEILDEIREMLKDLEKKARDNLKEVEDRRKELEKLSRDSIKEVEEVLKELRDKVRSEVLKRLEELAREVIEEDKRALERLDRKIRRVLDESRDVLRKIRKLIEDVLREVEK

SEQ ID NO: 5863 - protein, 178 aa, Artificial Sequence; identical to SEQ ID NO: 5862
  Synthetic

SEQ ID NO: 5864 - protein, 178 aa, Artificial Sequence
  Synthetic
SESETIEKEADEMLKRSKKTLEELRKTVKRILERIEKLTRDLEKTAEDIIRKIEDDLRRLKDDERVVDEIIERIKKELRKLEERSRESLRDIKRVLDELRRRMEENLKRVEEILKRLEERVRSEVAKRISEKIRRVLEDSRRVLEELEDLIRRVLERDKRALERIKEDIDRIIRRVRT

SEQ ID NO: 5865 - protein, 178 aa, Artificial Sequence; identical to SEQ ID NO: 5864
  Synthetic

SEQ ID NO: 5866 - protein, 177 aa, Artificial Sequence
  Synthetic
SELEAVLDELRKLVKELEDRLRKVNEESRRLIKELLDRLREVDERSRKLIKDLAEKARRRGVDEKLLDELRRRLEEHNKENRKLEERIRKLLEEHNRENRKITKELRDLLKELEELLDEVDTDELRKRVRDLVRRVDELIKRSKRHAEELTREVEEKVRESEEHVRRLVKEVEDRIR

SEQ ID NO: 5867 - protein, 177 aa, Artificial Sequence; identical to SEQ ID NO: 5866
  Synthetic

SEQ ID NO: 5868 - protein, 171 aa, Artificial Sequence
  Synthetic
DEVEEADKRVEDEVRRLKRLVEEHTKRVEDKVRTLKKLVKEHTDEVRRAVEELKRRRDDEESVRRKIEEIKRRSDKIRRDVERKIEEVYRDSERELRRIKKEIEDVLREMKRRDIDEDVLRKVKELLEDVARLVEESHEEARKLLKEVEDRLRESVREVEELLRDVERRTR

SEQ ID NO: 5869 - protein, 171 aa, Artificial Sequence; identical to SEQ ID NO: 5868
  Synthetic

SEQ ID NO: 5870 - protein, 174 aa, Artificial Sequence
  Synthetic
DEVEKVKEEIRRIVKELEDRVEEHKKEAKKIIDELRRLVKRHREEVEEIVKKLEELVRRNSPREEIEKELDKVRRRSDELHKDAKKKLDEVREDSKRMAEEIKRTLEKVRDELRRKISNEEVLKEAEKLLEDVERKLRKSHEDLERLLKEVEEAVRDSNEEVRERLDRVREKMR

SEQ ID NO: 5871 - protein, 174 aa, Artificial Sequence; identical to SEQ ID NO: 5870
  Synthetic

SEQ ID NO: 5872 - protein, 174 aa, Artificial Sequence
  Synthetic
DEDRKVEEDIRRIVKRLREIVEKHNREAREIIKRLRDEVRKHRDKARKIVTRLDELIKRNTPEEEAKKEVDDVRRRSKEEHDRFDKELKEVRERSKEMADKIKEDLDRVRDELRRKIKNKDVLKEAEELLEKVKRDLDRSHEELEELLKRVREELEDSNRELEKLIEEVERKVR

SEQ ID NO: 5873 - protein, 174 aa, Artificial Sequence; identical to SEQ ID NO: 5872
  Synthetic

SEQ ID NO: 5874 - protein, 174 aa, Artificial Sequence
  Synthetic
SEVEDVDDRIRKIIKKLEDLVRKHNEDARRIIDELRELVERHNRRAREIVRELEDLVRRNKPRERIEEKLREVKKESEDVLKEAEDRLREVRKRSREVHEEARRRLEDVRKKLEERIDSEEVLKKVEKLLKEVLDLMKESNEELEKLLEEVKREMEESVKELKKLLDEVREKVK

SEQ ID NO: 5875 - protein, 174 aa, Artificial Sequence; identical to SEQ ID NO: 5874
  Synthetic

SEQ ID NO: 5876 - protein, 179 aa, Artificial Sequence
  Synthetic
KEIEDVLEKVRKVVTDLKKKLEDVNRESEKLVREVVKELKRVDDESRKLVERVEKEADEKGVDETLKRKLREYLKEHHKRNKKIIDDLKKYLDEHHDKNRRIIEELDRLLKEMEEIIRRNELSEEELDRRIKELKDRADKLIKDSKDNVEELRKKAEELIRRSRKNVEDLVRKATEDVR

SEQ ID NO: 5877 - protein, 179 aa, Artificial Sequence; identical to SEQ ID NO: 5876
  Synthetic

SEQ ID NO: 5878 - protein, 179 aa, Artificial Sequence
  Synthetic
RELEEVLKKVEDLHRDVMKKIDDVVREASELHKKVKEDIDEVVKRAEDVLRRVKRELDKRGGIEEVKRRLDKVLKDLRKEVEDIKRKLDEDNKTLRKKAKEIKDELKENLKRLEDVVRRGDLDKDELDEHIERSLRKVTELVKDLKEHIERSLEEAKELVRRLEELIEELLRRLAEEVR

SEQ ID NO: 5879 - protein, 179 aa, Artificial Sequence; identical to SEQ ID NO: 5878
  Synthetic

SEQ ID NO: 5880 - protein, 177 aa, Artificial Sequence
  Synthetic
SEVEEVLREAEELLKEVRDRLRESVEKSKRLLDEVRRKIEESHRRHKELSDEIRRLAEERNLDKTLEEKIKKVNDENRRRLRELERTLEEVLERNKETVRRLEDELRKVLERLRRLAKDVDIEELRKEIKKKIDEMRRLVKEDTERLERVAEELRRRVEEDKERSKDVVRRLREDVK

SEQ ID NO: 5881 - protein, 177 aa, Artificial Sequence; identical to SEQ ID NO: 5880
  Synthetic

SEQ ID NO: 5882 - protein, 177 aa, Artificial Sequence
  Synthetic
SEVEEVLKRAEELLDDVRRLLERSHRETERLLDEVRKRVEDSHREHRKLSDEVRRKAEERNLPEELDERLKTVNEENKKLIEEIKDRLDRVREEDEKSLKELKDKLDEVRDRLERLKKDVDIEELRKDIERAVKELRERVEENTRRVEELVRRLRELVEEDRKRSKEVADEMDERVR

SEQ ID NO: 5883 - protein, 177 aa, Artificial Sequence; identical to SEQ ID NO: 5882
  Synthetic

SEQ ID NO: 5884 - protein, 177 aa, Artificial Sequence
  Synthetic
KEVEEVLDTAKKLLDEVRRELERSHEEHKRLSDEIRERLERSHEETERLLKEVKEEVDDKNVEEELKKKLDEIRKEDEETLRELEERLKRADDKNEKIVRELEKRLRDVEEELRKLMKDVDIEELKRRIDDMVRRLRELVERDRRESKKVADDLRRLVKENTERAREKIEELRKDVE

SEQ ID NO: 5885 - protein, 177 aa, Artificial Sequence; identical to SEQ ID NO: 5884
  Synthetic

SEQ ID NO: 5886 - protein, 177 aa, Artificial Sequence
  Synthetic
SEIEEVLKEAEKLLREVEKELRRSHEELKRLLKEVRDKVRRSMEESERLLEEIKKKADERNLEDELRKRLEKVLRDNRETIRRIEEAIKRVEEENRKTIRDIERTLREVLERLKELKDRVDIEELKRRIEDAARKLEKLVKDDRERIERKVRELERLVEEDKKRLRDRVRKMDEDVR

SEQ ID NO: 5887 - protein, 177 aa, Artificial Sequence; identical to SEQ ID NO: 5886
  Synthetic

SEQ ID NO: 5888 - protein, 174 aa, Artificial Sequence
  Synthetic
REVEEIVKKVRKEVTRLLREVEEDMKRNRDTIRELLKYVKKDLEENKDIIRRLLELIRRDGSTKELRKTLEDKLKESEDNLRRVAEELREKEERSKRNLDRIEREARERVKRLEEEGVSEEARKDIERLLEEVRTKLRENEEDLRRLVKEVDRELKRNRDELERLAKEVRDELK

SEQ ID NO: 5889 - protein, 174 aa, Artificial Sequence; identical to SEQ ID NO: 5888
  Synthetic

SEQ ID NO: 5890 - protein, 174 aa, Artificial Sequence
  Synthetic
SEAEEIAKEVEKRIRELLDRVRRMVEESEKYARDSLRKIKRLLDEVRRRIEELLRKIRRDGPTEELRKELERIKEEIDELLKKIRKENEDAHRRSKELIDRMKEELDKIKEEIDRKNLPSEVAKKVKELLDEVERILREWEKEDRRLLKESEDLLREVEKEVRKLLRRVEEELK

SEQ ID NO: 5891 - protein, 174 aa, Artificial Sequence; identical to SEQ ID NO: 5890
  Synthetic

SEQ ID NO: 5892 - protein, 174 aa, Artificial Sequence
  Synthetic
SESEKILEEAKRRIRKLLEDVKEMVKRSRDYARESLKRIKDLVEESKREIDKLLEEIKRSGPTEELEKRLREINRRSRELVKKIREENERLHRRSKELVKEMEDRLREIEEEIRKKGLPSEVEEDLKRLLEEVKRELKRWEEDDKRLLDDSERALKEWEDTDRRLLKRVEDELR

SEQ ID NO: 5893 - protein, 174 aa, Artificial Sequence; identical to SEQ ID NO: 5892
  Synthetic

SEQ ID NO: 5894 - protein, 174 aa, Artificial Sequence
  Synthetic
SEVEEIVKDAERYIKESLDRIRKAVEESRRRITELLKEVERLLREVRKRIKELLDEIRRDGPTDELRRKLEKIEREIKKRLDDLRRELEEIHKRSDELVRRMEEENKKAEEEIRRRGLGSDAERKLEELLEESRELLKRWRDDDKRLVDDVRRKLKEVEEEVRKLLKEVEDELR

SEQ ID NO: 5895 - protein, 174 aa, Artificial Sequence; identical to SEQ ID NO: 5894
  Synthetic

SEQ ID NO: 5896 - protein, 174 aa, Artificial Sequence
  Synthetic
SEVEEIVKEAKRRIDELLKKVDELLKESERYARKSLKDNKDMVRRSEERIRELLEKIKRDGPDDKIREELKKINKESEDLIRKNKEDNERFHKKTEDMLKRLKEELDEIEERIRRKGLGSEAEKRLKDLLDRVKEKLDEVRRRDRELLEESKDLSRRWKERDDRLLEEVEKALK

SEQ ID NO: 5897 - protein, 174 aa, Artificial Sequence; identical to SEQ ID NO: 5896
  Synthetic

SEQ ID NO: 5898 - protein, 176 aa, Artificial Sequence
  Synthetic
REIEKIREDLERLLEEVKRAAEEWRRRDEELVRKLEELIKRVLDEDRRLLRELRDKGKGERLKEIERRSEESRRRLKRLLEEIRRLSKRSKEELDEALKRVEEEVRRIEDKLRKVRGREVIKKVLEEIRDKIRKILKTIEDLVRKSEDLIRRVLEEIERILDESRRDVEEVKRREE

SEQ ID NO: 5899 - protein, 176 aa, Artificial Sequence; identical to SEQ ID NO: 5898
  Synthetic

SEQ ID NO: 5900 - protein, 174 aa, Artificial Sequence
  Synthetic
DEDRRVKTEIKKLLEELTRRSREVEEDDRRLLDELTRETERIEEDLRRLLEEVRRSGVPEDKLREIEREIRELRKRLEDLNKEIKDLSEKTRKELRDLNRRLKEIVDRLKERIDKEGATDEIEREVRKVEEDYRRSLRRVLEESRKIAERYKKKLDEMREEVRRRAKKVKDEVR

SEQ ID NO: 5901 - protein, 174 aa, Artificial Sequence; identical to SEQ ID NO: 5900
  Synthetic

SEQ ID NO: 5902 - protein, 177 aa, Artificial Sequence
  Synthetic
KSVEKIVEDIKRVADKILEDIKRSEDRVREIVDRHRREIDKVVKEIVKRVEDLKRNNIPREEAERVLRDVERKVEEINRRMEEHLRKLEEEVKRSHDEIRRKLEELEKRVRDIKKDVDKDEMEDLKRRVDELKKEIERALKEHKDKVKKLLDDLRRLNEELRREVRRVLEEVRETTR

SEQ ID NO: 5903 - protein, 177 aa, Artificial Sequence; identical to SEQ ID NO: 5902
  Synthetic

SEQ ID NO: 5904 - protein, 191 aa, Artificial Sequence
  Synthetic
DEIERVEEALKKVEKDLRRLIRELEKLNDKIERDIRRLHEETNKRLKEVREKVEDMIRRVSARAPEEDLRRLKEEIDKLVRELEKKDRDLAKENERKIRELRKHLEELLREAEREIKRIEDKVREAKKRGEDRRVVKKLLDEIEEILRRLKKLVDDHARESKRILRESERKVEALLEEIEEILKRLEEKVK

SEQ ID NO: 5905 - protein, 191 aa, Artificial Sequence; identical to SEQ ID NO: 5904
  Synthetic

SEQ ID NO: 5906 - protein, 180 aa, Artificial Sequence
  Synthetic
DEIERVLREIDELRKKVEKVIEDSRRNAKRWLDRVKRTAEELNKLSDELLEEVTRLAEAGIPEEKVKELRDRLEELDRRSKEKIKKLKRDLERNLRETERTIEELKRELERLVEKIRREIDSRAMEEVRKTAEEVIKTVDKLLKELRKTYEDILRDIDRLLKEHHARNRRVLEEVERLTQ

SEQ ID NO: 5907 - protein, 180 aa, Artificial Sequence; identical to SEQ ID NO: 5906
  Synthetic

SEQ ID NO: 5908 - protein, 171 aa, Artificial Sequence
  Synthetic
SEREEVKKRLDDVRREAKRLLDEVRKRLEESHRKHKKLLDEVRKRLKEVEEEAKRRGVSEDLERELKRLLDELDKKLKESLRENEKTIRDIEESLKTVLKKLEDLVKKLRDDNVRKEKVTKIIEDLKRELEEMFRKLKRLVEEDDRRSKESLEEVRKLVEDARRKIEEDTR

SEQ ID NO: 5909 - protein, 171 aa, Artificial Sequence; identical to SEQ ID NO: 5908
  Synthetic

SEQ ID NO: 5910 - protein, 181 aa, Artificial Sequence
  Synthetic
SSIEKLKKVVEDIKRRSEDLNRELEKVVRDVKKRSEELNEELRKVSEEIERRLRELLKRISDEKKLRDAARLIDELRKNSERVSRENEELVRRLKKKVDDVSRKNKEIVKDLERRVDEVRKRGPAEERFVEELRRALKKDEDDMRRVVEDIERLLEEDERRMKKAVEDHRRLLEELEERAK

SEQ ID NO: 5911 - protein, 181 aa, Artificial Sequence; identical to SEQ ID NO: 5910
  Synthetic

SEQ ID NO: 5912 - protein, 174 aa, Artificial Sequence
  Synthetic
DESEELKKVLKEIEDEVRRLIREIERVLEEIERRDRELLKRDEETLKRIEEEVRKLRLSEELKKEAKKRLDESRRRLRELHEESKKRLDDIRERLERLLRELEKRLTEVDKRIKREGAREEIIEELRRILKEAEDVIRRIIEEVRDVLRESEKRVRESIDENRKILEELRRRAK

SEQ ID NO: 5913 - protein, 174 aa, Artificial Sequence; identical to SEQ ID NO: 5912
  Synthetic

SEQ ID NO: 5914 - protein, 170 aa, Artificial Sequence
  Synthetic
DEEDRLRRELEKVRRDADRLLEEIRRVLEEVERRSKELLKRDEDSLREIVRTVTEETKRDEIKREVDKIAEDTRDHLRKHEEKTRRIKEEVKELLKRLKDKVDKVRKEVEAKKVTDEVLEEIRRILEELRKEAEDIIRRIRELLRELEKNVTDSIRRNEEMLKELRRKVK

SEQ ID NO: 5915 - protein, 170 aa, Artificial Sequence; identical to SEQ ID NO: 5914
  Synthetic

SEQ ID NO: 5916 - protein, 180 aa, Artificial Sequence
  Synthetic
SEAEKILEDMKRYIEEHIERVKRSLEENKKKDRELIEKSRKSLEDARKKIRELLELVRQRKTSEDVLRKSIRELEEDLKKHEEDSERDKRRLEEDHKRHEDESKKSLDDLERRLEEVERRGLVSEEILKRIRDLVKELEERDRRVIEEMKKSNKRTEDTDREVLERIRRLVERLADEARK

SEQ ID NO: 5917 - protein, 180 aa, Artificial Sequence; identical to SEQ ID NO: 5916
  Synthetic

SEQ ID NO: 5918 - protein, 185 aa, Artificial Sequence
  Synthetic
SELERVIEEIKRLLERLKRENEEVKKRVKKLLDELRKINKDVEDTVRELLKRVKELVDRANLDEKSRRDLEKKREETKRELEEIKKKSDKNLTDLKRELEKIMEDSKRDIEKIERETKKLEEDRLGKDEIEEALRRVEEHIKRHLKTVKELAEKAERHIREHLKEVKRMLEKAKRTIDELLKKIK

SEQ ID NO: 5919 - protein, 185 aa, Artificial Sequence; identical to SEQ ID NO: 5918
  Synthetic

SEQ ID NO: 5920 - protein, 175 aa, Artificial Sequence
  Synthetic
SLREAAKEVLERVRREVEKLRKSNEEVLTRVREEVKKLLETNKDVLRRVAEILKTANVDKRIADRVRDELRRYEERLKEEADRIRKMLEDYERESRELRERIERTIKALEDRVEKKGEVSEEDIREIEDILRKIAETVETLNRRLEDILREIRKSSKKTIDELREKAKELEDRTR

SEQ ID NO: 5921 - protein, 175 aa, Artificial Sequence; identical to SEQ ID NO: 5920
  Synthetic

SEQ ID NO: 5922 - protein, 182 aa, Artificial Sequence
  Synthetic
SEVDEDLKDIKRYLDEHRKRVEEVVKRLEDRSRETAREVEEDVKRIERKVEEAKKEADERGNRKERLEELRKELKKERDDLRKRNEDDRRDLDRERKRLEKELEDSRRKLDKKEDELRKKNLDEDAKRRIEEVLERVRRELERSEEKLRRVLEKHREDNDRLEEELDRVLRELEKILDEVAT

SEQ ID NO: 5923 - protein, 182 aa, Artificial Sequence; identical to SEQ ID NO: 5922
  Synthetic

SEQ ID NO: 5924 - protein, 182 aa, Artificial Sequence
  Synthetic
DEVRKILKELKELVKRIEDKLRKYLEDVRREVERIEEEVRRNLERIKRLAEEIERRVRRDGKSKELAEEVKRKLTENEKEDRKRERDVREKNKEDKRRLEEEMKKVEETLKRKEDDVRRRNLSEDVKRKIDKVLDEVRRLLEDIKRRVEKINTDTERLLKKLAEDSKRALEEVKETLERAER

SEQ ID NO: 5925 - protein, 182 aa, Artificial Sequence; identical to SEQ ID NO: 5924
  Synthetic

SEQ ID NO: 5926 - protein, 179 aa, Artificial Sequence
  Synthetic
ELRERIKRALDEHRRVSEELERRVREANKRHNEVSKEVKDDLKRSHDELRESLERIKRRGDLSEEMEKKLRERLERSKREIEKKEKENRDEHEKSRKKVEDKKRDNERRVKEMEDKIEKDGRVEEEDLKRIREETERLKEDVRRYLRELEKLSRDLRRKVEELLKDNKRKVKEIEDEAK

SEQ ID NO: 5927 - protein, 179 aa, Artificial Sequence; identical to SEQ ID NO: 5926
  Synthetic

SEQ ID NO: 5928 - protein, 182 aa, Artificial Sequence
  Synthetic
DELETLEERIRRSVERVRRELKRYKEEMDKHSEDLKRLVDKNLEDVRRELEEIRKLATDGRFDEDVERTVEKRLKDNEDRDRERSRKVEDDNRRSREELEKLKKESDEELERTKKEVEERNLDEDMEKKLRELLERHERENKKAREDVEEANRRNEEVLKDIERRSKKALDDVRRELERVRK

SEQ ID NO: 5929 - protein, 182 aa, Artificial Sequence; identical to SEQ ID NO: 5928
  Synthetic

SEQ ID NO: 5930 - protein, 178 aa, Artificial Sequence
  Synthetic
SLKEVLDKIEEDHRRMSKRNEEVLEEVKRRAEKLLKDAEEVLRRVRERIEELIRRVEETKGRTERLRELEERIRKRDEEIERKLRKELERLKERLRRYRERTKELNKKFEEDLRELRKKGVDVKELKKRADESRKTVERLSRELKKELRKVEEDVKREVEKIEEDLKRIARRVREESR

SEQ ID NO: 5931 - protein, 178 aa, Artificial Sequence; identical to SEQ ID NO: 5930
  Synthetic

SEQ ID NO: 5932 - protein, 180 aa, Artificial Sequence
  Synthetic
SELERLLEEVERLLEKLERDNKRLLDDVRRLLERLRRDNERLLEKNKRLLDRLREEVSRVSDEKFLREVEKKLRDNEREAERVAEESEKHLRDVKKRLDELLETSERNLREVRERLERVRRDEDIEKLAREVKRHIERHKEELDRLRKEVEKNARKHEEDLRRLEERSKKHVEDIERETR

SEQ ID NO: 5933 - protein, 180 aa, Artificial Sequence; identical to SEQ ID NO: 5932
  Synthetic

SEQ ID NO: 5934 - protein, 180 aa, Artificial Sequence
  Synthetic
SELEKLLEDVKRLLDELRERNEKVLEDARRLLEELRKRNEDLLRRNRELLERLEREVSKVEREEVLDRVRRELEKNERRVDELRRESEKHLREVKEELDRLKEKSETNLRDAERELTELKDDEDIDRVRRRVERHIREHERDLREVKKRIEEDAKRHRDRLKKLEEDSREHVKRMEDRTR

SEQ ID NO: 5935 - protein, 180 aa, Artificial Sequence; identical to SEQ ID NO: 5934
  Synthetic

SEQ ID NO: 5936 - protein, 182 aa, Artificial Sequence
  Synthetic
KLEELAKELRRLLEELRKRSKEVIDRLRRLNEELRKTSEEVIRRLRELNRRLTEKARRRLKDEGEKLKEAEKLSEDHRRKVEELLKKSEEDSRRHREKLEELERRSREDLRRLREEIERVLKDRDIKEEVLRKVREEVKEHERRLEDALRRSKKEIDDHKRELEELLKENAEEVRRVEERIR

SEQ ID NO: 5937 - protein, 182 aa, Artificial Sequence; identical to SEQ ID NO: 5936
  Synthetic

SEQ ID NO: 5938 - protein, 182 aa, Artificial Sequence
  Synthetic
KAEELVRELKRLLDKLREESKKVIEELKRRLDEVAKKSEDVVEEMRRLLEELKEKIERRLKDKGEDLKRAEEKLKDIEREIDKLEKESRKNLEDIKRDLERLLKESEDDLKRLEDEIDTVRKDGNIREEVLRDVRRKVEDHRRKLDEIRKRVTDEARRHERELEKALEKIRRDIRRIEEELR

SEQ ID NO: 5939 - protein, 182 aa, Artificial Sequence; identical to SEQ ID NO: 5938
  Synthetic

SEQ ID NO: 5940 - protein, 182 aa, Artificial Sequence
  Synthetic
KVEDLLREAKALLDELKRESERIIKELRKLNDDLTKKSEEVIRELEKLLRDLKKIVDERLKDRGKDLEEVRRRLEEIKKEIDDALEKSRRNSEKHRREVEEVLERSERDLERIREELERLAKKGDIKEEALKKVRKEVEDHKRRLKEAVDRNRKKIKDHEEELERTLRDIRRKIDKERRELE

SEQ ID NO: 5941 - protein, 182 aa, Artificial Sequence; identical to SEQ ID NO: 5940
  Synthetic

SEQ ID NO: 5942 - protein, 176 aa, Artificial Sequence
  Synthetic
EELERLLKRVRDESKKNRDKVREDLERSRRKSKRHEDELRRLLKEARDDIDRVRDLRRKNSQRREDLKRILDTLREKLKKMMEDSERDLRRWEEENRKLNKESKEELDRLKEEIDKSPIGEEVVKEAEKILDDNRKENERVSEEDKELLERNKKKAEDVLRELEELIRKLAEELKK

SEQ ID NO: 5943 - protein, 176 aa, Artificial Sequence; identical to SEQ ID NO: 5942
  Synthetic

SEQ ID NO: 5944 - protein, 179 aa, Artificial Sequence
  Synthetic
SELEELLKRIRDKSKENEDEVRTDLKRVRDYARRHEERLRELLERVRDELRKAEELRRAGEVSEKVVKEIVDKLRKMIEEIKREVDESKKRLDDDLRKIADTSRRKAEELKKDLDKVRTDGADERVLEEIERIMRENKRRNEEVIKEIKELIDRLRRKSERVIEEIKKRIDELRDKARR

SEQ ID NO: 5945 - protein, 179 aa, Artificial Sequence; identical to SEQ ID NO: 5944
  Synthetic

SEQ ID NO: 5946 - protein, 179 aa, Artificial Sequence
  Synthetic
EEEREIEERLRKKIEEIRREDKRHHDEVRRKVKEIKEEDREHHERVKRKAEEVKKRIETTGPRREEVEKIEREVEKNSRDHKRRLDEIRRELEKDSEDHKRRVKEIEDDIKRDLDEIRRKVKDDKDVLRELKRLLDELRESARKNNEDLKRLLEELEESVKRNNDELKKLLDELKERAR

SEQ ID NO: 5947 - protein, 179 aa, Artificial Sequence; identical to SEQ ID NO: 5946
  Synthetic

SEQ ID NO: 5948 - protein, 186 aa, Artificial Sequence
  Synthetic
RELEELAERVKRLLERDEELLRRLKDAVRRLSEKDRRLLERLAREVKRLLDELRDLVRKRLKDKREDLERVEKMLREIKRDLEDHKRRVEETNRRLEEEVRKHEEEVKKDNDDIRKELREIEERKLDKELLERVITELERKARESEKKHEDSLRELERLARESEERHKRSLEEVERKIEEIKRDLD

SEQ ID NO: 5949 - protein, 186 aa, Artificial Sequence; identical to SEQ ID NO: 5948
  Synthetic

SEQ ID NO: 5950 - protein, 178 aa, Artificial Sequence
  Synthetic
RELEKLEDEIRRELRRIEKELKDYERELEERADKDRRDIEDYRRRLEERVKEIEDRLRRDGSDEEELRRIREESRKTLEELKRHLDKSRKESEDTLRRLEKRLRDIEKRAEEIKRELDRAGVSEELRKILEDALKRVREEVKRILDRNRELLRESEELVRRVLKRNRDLLREVDERVR

SEQ ID NO: 5951 - protein, 178 aa, Artificial Sequence; identical to SEQ ID NO: 5950
  Synthetic

SEQ ID NO: 5952 - protein, 182 aa, Artificial Sequence
  Synthetic
DKVREALKRLKDKMETYERRSKKHIEDHKRKLKEYEERVRRNIKRLREELKKLEEDAKTRGPREKDVTEILKRIEDHLEEHHRRSEEVKRDLERNLEEAHKDSRRVLEELKKELEKIRRGDLSEELLKRVDELARRIMKRIKELNRENERVVRESLKRVDELNKRSEKVHKEVLDRLEELRR

SEQ ID NO: 5953 - protein, 182 aa, Artificial Sequence; identical to SEQ ID NO: 5952
  Synthetic

SEQ ID NO: 5954 - protein, 178 aa, Artificial Sequence
  Synthetic
SLKEELEKLVRDIIRDNRRLLEENEELVRRSEESNKRLLEENEETARRIKAELERAGIPEEELKELVKRLEEELRRIKEEADRLDEKHKDDLRRIREEAKKIDDELKKELDEIKRKDDSEKLVEEVKRKLKRKLEEIRREHRRTKEEIKKTNEDIKRRHDETLRRLEKTLEDIKERTR

SEQ ID NO: 5955 - protein, 178 aa, Artificial Sequence; identical to SEQ ID NO: 5954
  Synthetic

SEQ ID NO: 5956 - protein, 182 aa, Artificial Sequence
  Synthetic
SEVEKILEELKREVREHERRVEKLVRELEDYVRRHREKVKRIEERLRDKLREIEELVKEGRLDDSEVERLKREVEDEARRLEEEHEKSLRRIEEKLREIEKDHKRSKEELDKRLEDIRRRGLPEKAVREIETLADEIRERIERSLKRIRDLIREIKEDLRRSLERIREIIREIKKAIDDRRK

SEQ ID NO: 5957 - protein, 182 aa, Artificial Sequence; identical to SEQ ID NO: 5956
  Synthetic

SEQ ID NO: 5958 - protein, 182 aa, Artificial Sequence
  Synthetic
SEVEKILKEIRDENERLKKEIEEILRELERKLREHRREVEEVLKRIREKIETLKDESRREDRGSERVDKVRRELEETLKRIKERHDESRKELREKSERIKRRIEEYKERNDRKLEEIERANLPEEMLREMERISREDRETLKRLTDRIREMIRRLEEEIKRSEREAREIIKEAKKVLEDEAT

SEQ ID NO: 5959 - protein, 182 aa, Artificial Sequence; identical to SEQ ID NO: 5958
  Synthetic

SEQ ID NO: 5960 - protein, 179 aa, Artificial Sequence
  Synthetic
SRVEELIKDLRRSTKELEDRVRKLLEELKDKTRRTEKRNREKLEKLKEELRKLEEDVKREGPRETDLDERVKELEKAAEDSKRELDENLERVTREIEKIKREIDKYRKDSERRIEEIRKSGDDDEKVRKVMEDDRRKLKKILDDVEDVLRKHKKVLEDLKRTNDDVLREARKLAEKIRR

SEQ ID NO: 5961 - protein, 179 aa, Artificial Sequence; identical to SEQ ID NO: 5960
  Synthetic

SEQ ID NO: 5962 - protein, 181 aa, Artificial Sequence
  Synthetic
SAEERLKEALKRLDDVSKRSEEEIRRMIKRIERISRESLKRLKDLNRRIKELVERIERRLKVDDELRRLRKRVEKLNRDSEETAEREREDNERMIRELEKRLREEKEDNKRFLKELEERLRRGPVDERLLEEIKRYIDEHKRRLDELRKDIERYLEEHKERLRELEKRHEELLRTLDREAK

SEQ ID NO: 5963 - protein, 181 aa, Artificial Sequence; identical to SEQ ID NO: 5962
  Synthetic

SEQ ID NO: 5964 - protein, 185 aa, Artificial Sequence
  Synthetic
SAEEDLDRMRKKVEDVIREDKERVRKLLERAKEVIRESEKKHEDLRRRIRKVIKEIRERTNGSSDELRKIEDLLRRLEKHVDDSEREVKKNEEEIREEVERHLKRSEDNAEEIRKEIEEVERRKVSDTDLERELRRIDKHLRDHKDEARKSEERVEDHLRRHRERVRRNEEDVEDKLKKLKDETK

SEQ ID NO: 5965 - protein, 185 aa, Artificial Sequence; identical to SEQ ID NO: 5964
  Synthetic

SEQ ID NO: 5966 - protein, 175 aa, Artificial Sequence
  Synthetic
REEEELKRRNKDHNRRHREDTKRIAEDVDRKLREWKKKSDEAREEVKRLLERLKELADRNEVEEREVERLLKELRDRVKELKEESDRDLERLRRTVEELLKKLDKNLKESEDELRKKPESEDLRRLMKENRETIRESAEILERLRERVEDLVRRDREILEKLLRDIEELAERIKR

SEQ ID NO: 5967 - protein, 175 aa, Artificial Sequence; identical to SEQ ID NO: 5966
  Synthetic

SEQ ID NO: 5968 - protein, 184 aa, Artificial Sequence
  Synthetic
SVEDELRKLEERLKRIADELRRLVEKNIEDNKESLKEIEKLIRENIERNKEVLKRIAERGKREDELRDIERKIRESIEKLKDLLRRAEEKVRRSIRRLEKILKELKEKVDKLKEELKDLTDKRLDKDELKKALDDVDKKLEDLRREVEDRDRKNEEDNRRLRKELEERSRENKEFLDKLAREAD

SEQ ID NO: 5969 - protein, 184 aa, Artificial Sequence; identical to SEQ ID NO: 5968
  Synthetic

SEQ ID NO: 5970 - protein, 175 aa, Artificial Sequence
  Synthetic
SEKDESARDIEEKLERHLRKSDESRRRNEKRIKEHRDRSDESRKKFETDLKRIEDEVRKRGPNRDELDELLKRLKDELDDHRRRTEKSARESKKHLDEHRKRTEDSLRTFEEELKKLEPDEKLKDLERKVREVIDRDRDILRRLEEEHRKVITEDEEILKRLEEKAREAIERIRR

SEQ ID NO: 5971 - protein, 175 aa, Artificial Sequence; identical to SEQ ID NO: 5970
  Synthetic

SEQ ID NO: 5972 - protein, 175 aa, Artificial Sequence
  Synthetic
SEKDERLEEIKRRLKEHKRRSEEAVKDNDRKLEKHKRDSDRSAEEVKKKLEEIEKRVRKDGPRETELEELDRRLRKELEDHARRTDESMKRSEEHLRKLKKEIDESLKEFKKELDKLEKDKKLDDLEREIRKVIEESKRLLEELERRHRRVIEEDKRILDELRRLIEELIEDAKR

SEQ ID NO: 5973 - protein, 175 aa, Artificial Sequence; identical to SEQ ID NO: 5972
  Synthetic

SEQ ID NO: 5974 - protein, 175 aa, Artificial Sequence
  Synthetic
SEKDEELKRIKEDLERHERESEDDVRRNEEKIRRHRRKTEEAVKEVEEELKRLEEDVRREGPGRDELEKASEDMKRRLDELRRRIEESMKESDKHLRELEEKVRRSSRRFEEELKKLERDRDLERLRKEIREVIEKSKDLLRELRRRHEKVIEDSEDILRKLEKKIKDLVDKIRK

SEQ ID NO: 5975 - protein, 175 aa, Artificial Sequence; identical to SEQ ID NO: 5974
  Synthetic

SEQ ID NO: 5976 - protein, 175 aa, Artificial Sequence
  Synthetic
SRKDEEVKRVKEKLKKHEERSRDMVRKVEDKSRRHREKIKEAEREVRRRIEELEEDVRRRGPRRDELERVKRELEKRLEELEREIRKSLEDAKRDLERLKREIDKSLEELKRELEKLEEDKKLEDLREEAERVIRRSEKLLEELREHVERNIDEVREILRELAELVKRVIDEIRR

SEQ ID NO: 5977 - protein, 175 aa, Artificial Sequence; identical to SEQ ID NO: 5976
  Synthetic

SEQ ID NO: 5978 - protein, 184 aa, Artificial Sequence
  Synthetic
SVEDILRTLRRLLEELEEESERILKRLREIIETNVRRVKELLRRLKERLDELAERLKAKVREEEVLRRLAEELKRAEDELRKLEEDVKKSVKELRDKLETLRRDVRRNLEEIRKELEKIEKDRVTSKELDDLLKKVEEHLRRHKRKLEKALKDVEDESREHEKELRRALKRIERLLRELERKAD

SEQ ID NO: 5979 - protein, 184 aa, Artificial Sequence; identical to SEQ ID NO: 5978
  Synthetic

SEQ ID NO: 5980 - protein, 180 aa, Artificial Sequence
  Synthetic
DEEEVIREIEKRFRDLIRRAEDVLRRIAEKMKRLKDKTRRLLEELRESNRKLIKELRDRIRDERLRKEVEDLEKTSRDRLDAIREELRESEERAREILDRIRRLIEELRRTAKERLDELRDTRRSKEVRDRVEEELKRIEDRLRKLDTDVDRYLKEHEDRLRKLKEDNERDLKRVEERAR

SEQ ID NO: 5981 - protein, 180 aa, Artificial Sequence; identical to SEQ ID NO: 5980
  Synthetic

SEQ ID NO: 5982 - protein, 177 aa, Artificial Sequence
  Synthetic
DIEELLKEVKKEVDRVEKKVKELIDRNKERVDRVREENERVADEVRKLIKELRDRIRDDEEVVREVEEVLRRVEKKLDELSRHVDEVLKESEDRLRKVLKLVREVLEDATKLLKDIETRELVEKVAREAREKLKKVEDLLRKISRRSEELLRRNREATKKILKELRELLRRVEEKRR

SEQ ID NO: 5983 - protein, 177 aa, Artificial Sequence; identical to SEQ ID NO: 5982
  Synthetic

SEQ ID NO: 5984 - protein, 185 aa, Artificial Sequence
  Synthetic
SEAEEALKRHRKLNKEAEKRAKDATDDSKRLLDEIRKRAKEASEDSKRLLDEARRLREAGARKEEVEKIIDEAAKKSKKAAEEARKAADDAARKSRKAAEEAKKLADDSARDAERAAREAKDREDKERVRRILEEAKKTARELRERIKKLLKENEDAAKKLRDEIDEAAKKNKKAADEAREEARR

SEQ ID NO: 5985 - protein, 185 aa, Artificial Sequence; identical to SEQ ID NO: 5984
  Synthetic

SEQ ID NO: 5986 - protein, 185 aa, Artificial Sequence
  Synthetic
SELEKVLEEHRRLNDEIRKELEDVTRKSEETNKRIEEDLRRVTKEAKDLLERIKEKLEAGRRKEEIREEVKKVLEDSERVIEKVKRLLDESLDRSRKMIKKVEDLVRDSLRKAEEVIRRVRDKEDRRRVEEILRDMKETVDKLKKEIEKLLEENKESAKELRERIKENLETNRDLVRKLEEDIKR

SEQ ID NO: 5987 - protein, 185 aa, Artificial Sequence; identical to SEQ ID NO: 5986
  Synthetic

SEQ ID NO: 5988 - protein, 175 aa, Artificial Sequence
  Synthetic
DEAEKALEEVRDLIREIRERDRKVTEDVERLNREIREKLKEVTERVKRSNDDIRRLLEEGRDKREIKKLIEESNELVRKVVKEATELIRDSNRLVKEAVDTSRKLIKEVLDRVREMPVDKSILEELERLVRELRKESEKSLEDLERLNKKLEDEVRDILRKLNKLNEDLLRKVEE

SEQ ID NO: 5989 - protein, 175 aa, Artificial Sequence; identical to SEQ ID NO: 5988
  Synthetic

SEQ ID NO: 5990 - protein, 175 aa, Artificial Sequence
  Synthetic
SEMDEARKEVKKLLDEVRKRDEDVTRKVEELNKRIEERAKRVAEEVEKLIREILKRLRDGSRKEEARKLLEEVKRTVDKMIKELEELVRRSNRVVKEAVKESRELIKRILERVEKVPVDEKILEDLRRLVKKLKEESDRSLERLERLNERLERRIREILKRLEKLVRELRKEVER

SEQ ID NO: 5991 - protein, 175 aa, Artificial Sequence; identical to SEQ ID NO: 5990
  Synthetic

SEQ ID NO: 5992 - protein, 175 aa, Artificial Sequence
  Synthetic
SEAEEALRKVEELIRRVKKRDDEAVKEVRELNKRIADILREVLETVRKLLEDVEKALRDGSDKREARKLLEEILEAVKRAADRIEDLIRRSNEAVRRVVEESRDLIKRILEEVERAPVEEDILRTLRELVRDLERKSEESLKELNRLNEDLKREVKRVLDELEELVRRLKKKVDD

SEQ ID NO: 5993 - protein, 175 aa, Artificial Sequence; identical to SEQ ID NO: 5992
  Synthetic

SEQ ID NO: 5994 - protein, 185 aa, Artificial Sequence
  Synthetic
QVEDVIRESKKLTEDSEKRVRDIIRRLKKTIKDSEDRVRRMVEELRERIKRLRERLESEDERVVREVERVVRELEKLVKEAEDRARKFLETSDRIVREIEKRAREMLEESKRVLEEIKRLADEGVSDEVIETLLRKDRDLNRRVNEELRKLEEEVEELNRRVNETIKEILRRIAELIRRILEKTK

SEQ ID NO: 5995 - protein, 185 aa, Artificial Sequence; identical to SEQ ID NO: 5994
  Synthetic

SEQ ID NO: 5996 - protein, 185 aa, Artificial Sequence
  Synthetic
KVEEILKELEELIKRSKETVDEVIKRSKDLVDESRRRIEDVIRELEKLIRELDKKLETDDKDVVKEVKEAVKRLRDEVKRIDDEVRRAVEKSKEVLDEIRRRVDELVKRSKRLVDDIRRLLAEGVSEEVVRTLVKEIRDLNKRVNEEIKRLLDEDKKLNEEVNRLIKELKKEIEDLIREVLEDKR

SEQ ID NO: 5997 - protein, 185 aa, Artificial Sequence; identical to SEQ ID NO: 5996
  Synthetic

SEQ ID NO: 5998 - protein, 185 aa, Artificial Sequence
  Synthetic
EVEDIIRESKKLIEDSKERVKEVIKESKRLIEELERTVREVIKELRERVDRLRKKLRDDNEEVERRVTEAVERLKELIERIRREVEEAVRRSEETLEELKRRADKLVEDSRRVLEEIKRLADENVSKEVLDTLLKEDRDLNEDVKRRITELLEEDRRLIEEVKKRIRELRERIKRVIEEVDRATT

SEQ ID NO: 5999 - protein, 185 aa, Artificial Sequence; identical to SEQ ID NO: 5998
  Synthetic

SEQ ID NO: 6000 - protein, 175 aa, Artificial Sequence
  Synthetic
STAEEIVRRIRDVNRRINEAIERLLEEDEKVIRDVERRIEEVLERDRRVIEEVKRRVRTEEVVERVIRRSEKTIEDLKKLVEKLLRDSARTIEKIERLVREVIKETKRLLEEIKRRNVDERIIEEIKRILKESEDRLRRILETSRERLKELKKKLERVLEDSKKKLDELRRELRK

SEQ ID NO: 6001 - protein, 175 aa, Artificial Sequence; identical to SEQ ID NO: 6000
  Synthetic

SEQ ID NO: 6002 - protein, 175 aa, Artificial Sequence
  Synthetic
REAEDLVRKVREVNKKANRDIKELLDRDEKVIREVARAAEAIVDEARRIVEEVERKIREERVAKEVLERLKKILDELAELAKRVLERSEETIERIERLAREVLRATRDLLEKIRKNNVDERIIKEIKETLDESRKRAEEVLEKSRRLLEELRKRVEEIVKRIKELIDELERRVRK

SEQ ID NO: 6003 - protein, 175 aa, Artificial Sequence; identical to SEQ ID NO: 6002
  Synthetic

SEQ ID NO: 6004 - protein, 187 aa, Artificial Sequence
  Synthetic
SAEEIIKTLEELVEKLKRDAEETLRKIEELVRRLEEEARKSSEKIRKLVEDLAKEARERTRSKEVEKIVEEAKRRLDEIIKRNNEVVKRVLRELEELIERNRKVVEDALRELKKLIEKLEDLVRRNTGDEVLTEVLKEITELVKRLKELSDRTLEEVRKLVERVKRESKRTLEEAEEVVRELKERLR

SEQ ID NO: 6005 - protein, 187 aa, Artificial Sequence; identical to SEQ ID NO: 6004
  Synthetic

SEQ ID NO: 6006 - protein, 187 aa, Artificial Sequence
  Synthetic
DAERLLREVEELVRRLEEEMEKTDREIKELIKRLEERLRTTSREIKKLIEDLEREARERTRSEEVDRIVKEVIERLKRVLDKNNEIMERARERLERLLEENKKIVDEVLKELKELIDRLKDLVDKNGGREVLKKVIDEIRKLVKRVKDESKRSLDEIRKLAEEVDRRSKKVLDEIRRLVDEVRERLR

SEQ ID NO: 6007 - protein, 187 aa, Artificial Sequence; identical to SEQ ID NO: 6006
  Synthetic

SEQ ID NO: 6008 - protein, 187 aa, Artificial Sequence
  Synthetic
DAEDILREIKKLADDLKREADKSLKEIEELARRLEEEAERSLREIEELARRLKKRADEKTTDKKAEKIAREALKLAKEAAEENKKVAEEAAELAKRAADEDKKVAEEALKLAREAAEDARRLAEENGGREALKRAAERARELADRARKLSEDTLRKAKKLADDARKLSRETLEKARELAERAERRLT

SEQ ID NO: 6009 - protein, 187 aa, Artificial Sequence; identical to SEQ ID NO: 6008
  Synthetic

SEQ ID NO: 6010 - protein, 178 aa, Artificial Sequence
  Synthetic
DEAEEVRERVKKLIEESKRLIEEVRRRVRTISERSAELIEEVERRVDKMARDVERLLKDNVDKRELKRVVDDILRLVETVIARLRDTVRDLDRLVEEVIRRLHETDRRLKEEIDDAFRRLQDDEVLRRLEKLVRDSNDEIRRVLKELKEVVKKNRDEIERVLKEARKKVEDLLREIER

SEQ ID NO: 6011 - protein, 178 aa, Artificial Sequence; identical to SEQ ID NO: 6010
  Synthetic

SEQ ID NO: 6012 - protein, 178 aa, Artificial Sequence
  Synthetic
SEVERVRRENEETIRRIDEVIKKIEEDNKRTIDEIRDVIRRVKETVEKTNREIEKVRRDNRDKRDLDKLIKDSNRLVREVIERLRRLVKESLDTVKKAADELKRLVKESKELVEDVIRRVRDDEALRELRKSNEDLERRIRKVLEDLKRSNDELLEEIDRVLKRLHKSDEDVRKRVTD

SEQ ID NO: 6013 - protein, 178 aa, Artificial Sequence; identical to SEQ ID NO: 6012
  Synthetic

SEQ ID NO: 6014 - protein, 174 aa, Artificial Sequence
  Synthetic
RELEEAEKTVEELIRRIKEIIDEVLKRDRDVSERSKELIDKVKREAEKIVEEIERLLKNNVDRDELRKMVERLRELVKKVLEELRKTVRELEETSRRALERLRRLLKRLREIIEKDVRSEVLRKLDKKVKDLKREIDDVVRESKELIKRNRRRVEEVAKELERLIKEVKDRIDT

SEQ ID NO: 6015 - protein, 174 aa, Artificial Sequence; identical to SEQ ID NO: 6014
  Synthetic

SEQ ID NO: 6016 - protein, 174 aa, Artificial Sequence
  Synthetic
DELERVREEVRRLIKEIEEIIERVERRDEEVSRKSEDLIRRVLKRDEELAKEIEDLKRNNVDKKELRKMVKKLEESSRRALERIRRTVKELEETSREALKRLEDLLRELEDVIRKLVRSRVLEELKRLVEELEREIRRVFEKSKKLIDDNRKKADDVVKRSEDLLREVKKEIDR

SEQ ID NO: 6017 - protein, 174 aa, Artificial Sequence; identical to SEQ ID NO: 6016
  Synthetic

SEQ ID NO: 6018 - protein, 178 aa, Artificial Sequence
  Synthetic
SESEEVERLVEDVSRRNTKAVRDIEEHSKDVSRRNKKLVREVEEHTREVIERAKELTKRRKTEEVIKRVLDTLERLMRESVKLLEETVERLRRLVEKSKRLIEKTMKELRDLIKKVVEDITGRDVVERIRRLLRENVEENKKVLKRSDDLLKKNERENREVVKKSEKDARDLVEEIKT

SEQ ID NO: 6019 - protein, 178 aa, Artificial Sequence; identical to SEQ ID NO: 6018
  Synthetic

SEQ ID NO: 6020 - protein, 178 aa, Artificial Sequence
  Synthetic
SEEEDVRRKVEKVSRENKDMVRRILEHSRKVSEDNRRLVKEILDRARKAIEDVKELIERLKREEDIERVVRELRKLVKTVLDLIRETVKRLRDLVRKSKELIKETVKELERLIEKVIRDITGRDVVREIKELLDRNREENRKVLEDSERLVDENEKDNKRVLDELRRLLKRAEEEARR

SEQ ID NO: 6021 - protein, 178 aa, Artificial Sequence; identical to SEQ ID NO: 6020
  Synthetic

SEQ ID NO: 6022 - protein, 184 aa, Artificial Sequence
  Synthetic
SIDKALRDLKEILDRNRKHSEDLLREAEELVERSNDHSRRVLEEIRKLLRELEEEIRKRVKDEKKLRELKEIVDRIRELAEELFRRSNESDKRIKETVEDMIRKSRESVKRIEELIREVIERIRDEKLVREVEKTVEDLSRENKKLNEDVKRTVDELIKKSEKLNEDAKRTIDELLKRVKERIE

SEQ ID NO: 6023 - protein, 184 aa, Artificial Sequence; identical to SEQ ID NO: 6022
  Synthetic

SEQ ID NO: 6024 - protein, 184 aa, Artificial Sequence
  Synthetic
SVEDLLRKLKTIVDENRERVKKSLEELRRILDENRRRVERSLRELRESNERLRKEIEDTVKDEEKLRRLRDLVRRSAERVEDAVRRSRETVREVEDRVEKLADESRKTVERVRELIEEAIKRITDEEVLKKVEETVKRLSDENRELNKRIKEEVDEMSKRNKELNKRIKEENDKLIKEVKDEIR

SEQ ID NO: 6025 - protein, 184 aa, Artificial Sequence; identical to SEQ ID NO: 6024
  Synthetic

SEQ ID NO: 6026 - protein, 183 aa, Artificial Sequence
  Synthetic
SVEDVLRELKELIDRNREEAKKTEKELRELIKRNDDEAEKVAKESKKLTEDLEKEAREKVRSRKLEEIKRILDENREVLRRVLEDSKRSVRELKELVDRVIRKSEKIVDDLRKLVERLAREVRDEKVLREAKERAKEISKRNKDVNEEARKRIKEISDKDKRILDEVRRESKEIEKRLKEALK

SEQ ID NO: 6027 - protein, 183 aa, Artificial Sequence; identical to SEQ ID NO: 6026
  Synthetic

SEQ ID NO: 6028 - protein, 174 aa, Artificial Sequence
  Synthetic
DDEERVREVVKRVKEDNERVDREIREIVKRLLEHDRELLEEIKKEVDRVAEELRKLKEDGVPEEDLRKVVKDIEELVRRLIDELRKSTDDARRTVEDLIERLRETVRKALELIERVVRSEVLERLRKTLEELEKRNEELLEEARRLLEESREEVRELLERAKKILEDLEREIRR

SEQ ID NO: 6029 - protein, 174 aa, Artificial Sequence; identical to SEQ ID NO: 6028
  Synthetic

SEQ ID NO: 6030 - protein, 174 aa, Artificial Sequence
  Synthetic
SREERVREVVKRMLERDEELLRRIREEVERALRRNDEVLREIERVVEEMEERVERLKREGVDRKDLERLVEEALRVVREAIKELERTTRELEDLIRKLIEELRDSTRKVDELIKRKVTDEVLEDLRRLLEESVRRVEDLLKKLTDIVRESRKRVRDILRKAKRIVDKLREEIKK

SEQ ID NO: 6031 - protein, 174 aa, Artificial Sequence; identical to SEQ ID NO: 6030
  Synthetic

SEQ ID NO: 6032 - protein, 182 aa, Artificial Sequence
  Synthetic
DVEREAKRLLEEVAEHVRRSIKELRKLLEDVARHVEKTLRELEKLTDDVRKRVEKLKRDVKEEEKLKEVVERLKRELDKVSEDAKKLVDENRRLLKTVVDTVRRLVEENRRRLEEVVRRVEEAGVDRKVVEDIREKVKDLKRKHDTVLEEIKKEVRRLEKEHKEVLDKSNEDARKLEEDLRR

SEQ ID NO: 6033 - protein, 182 aa, Artificial Sequence; identical to SEQ ID NO: 6032
  Synthetic

SEQ ID NO: 6034 - protein, 177 aa, Artificial Sequence
  Synthetic
SEREEAKKLLRENEEDNRRVDREVEKLTEENERINRRVNEEVRKLTEDIKRKVESVKRLSDKRMLDKAIKEVEELSERSKDTIRRVIEESKRLSEESKRTIKEVIKRSTDLMRELDKRVTTRDIVEDIRRKADRLRERNEETLKRDEDKLKKLEESNRKVLKEDEDELRRLADKLRK

SEQ ID NO: 6035 - protein, 177 aa, Artificial Sequence; identical to SEQ ID NO: 6034
  Synthetic

SEQ ID NO: 6036 - protein, 177 aa, Artificial Sequence
  Synthetic
SEAEEAAKRSRDTAKRAEEIAREAAERLKKNAEDAERIAREAKKTSKKTAKEAEDAARSNAPEKAIEDAARKNEELARRAAELIERAARTNRKIAEDAARLVREAAERNKELADRAIKTRDADELRELAKRTEDKARKLADELRKLADETEKKARKLAEEVKKLADDTRRKAEEARR

SEQ ID NO: 6037 - protein, 177 aa, Artificial Sequence; identical to SEQ ID NO: 6036
  Synthetic

SEQ ID NO: 6038 - protein, 177 aa, Artificial Sequence
  Synthetic
DEVEKAKEESRRTLKKIEDRVRKVAEDLKKNLEDIERRVREVLEELRRLLEEIEEVVRRNIDKKEIDRLAEEIKEIAKRIIDEIRELLETNRKIVEEILEEIKRLVDENKKLVDRVKETSDKEELERLVEKTEDKIRKLLEEIKELLKETEKKIRKLLKRIEELMKEIEDKIDEDKK

SEQ ID NO: 6039 - protein, 177 aa, Artificial Sequence; identical to SEQ ID NO: 6038
  Synthetic

SEQ ID NO: 6040 - protein, 177 aa, Artificial Sequence
  Synthetic
DEVERVKEELKRNLKEIREDVERVKEESRDTVRKATEIVKRVLEELKKSLEEIKKLVDDNAPERMIEEVLRHNKKLVERIEREIRRLVEENRRLVERVLRRVEELLESNRDIVRDIIRRRDVEELRDTLRKSAEDIERLLREIEDLVRKTTEDAKRLADEVRRLVKESERTIKERAD

SEQ ID NO: 6041 - protein, 177 aa, Artificial Sequence; identical to SEQ ID NO: 6040
  Synthetic

SEQ ID NO: 6042 - protein, 177 aa, Artificial Sequence
  Synthetic
SEVEKVDRELKDNLRRIEEEVRKVDEELRRLLEEIRRTVEEFKERSKRTVEEIEKVARENAPEEVIKEVLRRNRDLVRKVLKTIKDLLDEIRRRAEEIIKKVEDLLESNRRIVEEATKTRDVEELRRTLEESERRIRKLLEDLKRLLEEIEKDIRRLEEEVDKLVRDTEKRIDDLRR

SEQ ID NO: 6043 - protein, 177 aa, Artificial Sequence; identical to SEQ ID NO: 6042
  Synthetic

SEQ ID NO: 6044 - protein, 183 aa, Artificial Sequence
  Synthetic
SLEDELRRRITEAEKRIRDLLRRVRELVERSKKTIKDLLRKLEETARETKDEIRKLEEEVKEEELKELIRRVLEESDKTLEKARKELKEALDRSERSVEKIERLIEEVVKRLREVIERVRDVKEEEKVRRVEREIKEILKKIEEDVTRLLEENKKILKEVEDLVRELEKEDRDVLKKVRDDVK

SEQ ID NO: 6045 - protein, 183 aa, Artificial Sequence; identical to SEQ ID NO: 6044
  Synthetic

SEQ ID NO: 6046 - protein, 183 aa, Artificial Sequence
  Synthetic
DLRERLEEEIERARRDIEDLLRKAEELAKRSKDDIKRLMDEVRRLVEKTRRDIEKLLREVKDKSVKERIKEVLRESEKTMRDIEREIKEVLDKSDESLKKVKEDLERVVRTLDKLIEDVRRVTEEEKVRKVEEEIRRVLEKIRRDARKLLEENKRITDEVRKRVKELLEENRKVLKRIKDEVD

SEQ ID NO: 6047 - protein, 183 aa, Artificial Sequence; identical to SEQ ID NO: 6046
  Synthetic

SEQ ID NO: 6048 - protein, 183 aa, Artificial Sequence
  Synthetic
KLREELEKLAEEAKKRIEDLAREAREAAKRASESNKDLARRLRELAKRTEDEIKRLLDDAKEERAKKLAEDALRRSRETAERADKLAKDADKHDKEIAEKAEELAKKALKDLEEAARRARRADKEEAARKAAEEIKKILEEAERLAREALKELERSNEESERLARRAAEEDKRVADEARERAR

SEQ ID NO: 6049 - protein, 183 aa, Artificial Sequence; identical to SEQ ID NO: 6048
  Synthetic

SEQ ID NO: 6050 - protein, 183 aa, Artificial Sequence
  Synthetic
SLREELRKKIEEAKKRIEKLMDDVRKEAEKAKRSNEELLRRLRKLAKETKRRIEELLERVKDESVKERIRRVLEESDRTLREAEELIRRVNEHDDRILRKIEEEIKRVLEKLEKVIKDVERVDDEEKVRRLLKEIEEILRRIEDKVRKLLKELRDSNRDSKRLVDELMRRDKEVLRRIEEEVK

SEQ ID NO: 6051 - protein, 183 aa, Artificial Sequence; identical to SEQ ID NO: 6050
  Synthetic

SEQ ID NO: 6052 - protein, 183 aa, Artificial Sequence
  Synthetic
DLERELEELIKKAEKKIRDLRKEVEDVVRDASRSNKELLREAEKLAEETRKRIDDLRKEVKDRSVKERIKEVLRESEETLKEVRETLKRMDEHDRTIMREIEERIRRVVEELRRLIEEVRRVDKEEKVRELEKRIRDVLRRIEEEVRRLLKRLKDSNDDSRRRLEELLRRDKKVLEDIERETK

SEQ ID NO: 6053 - protein, 183 aa, Artificial Sequence; identical to SEQ ID NO: 6052
  Synthetic

SEQ ID NO: 6054 - protein, 183 aa, Artificial Sequence
  Synthetic
SLREELERLIKEAEEKIRRLLKEVKDLVRELSRTNKKLLKEVRDLAKRTKERIKRLLDELKEERAARLIEEALEASDRTLKKIEDLIRRVNEHDEEIARRIEEEIKKAVDELRRLIDTVRRVTDEDKVRKLLEDIERLLREIERLVRELLEELKDSNRRSEELVRRLLKEDKDVLEKAERDVR

SEQ ID NO: 6055 - protein, 183 aa, Artificial Sequence; identical to SEQ ID NO: 6054
  Synthetic

SEQ ID NO: 6056 - protein, 174 aa, Artificial Sequence
  Synthetic
DEEEELRRLVRRLMEEVKRLLEENKKLADELRKTVKKLLEDNEDLARRLREEVERKVKSRIMEEVKRLIDEVLRHSKKVIEEVEKEIRDVLRKSEKIIKEAEDLIRRVLELAESGRRDVEEVKKELEELLREVEELSRRSLKELKELLERVKKRSEESLKELEDLLREAERKSR

SEQ ID NO: 6057 - protein, 174 aa, Artificial Sequence; identical to SEQ ID NO: 6056
  Synthetic

SEQ ID NO: 6058 - protein, 174 aa, Artificial Sequence
  Synthetic
SEKEELKKEVDRLAEEVERLLRENEKRARDLERKIRKLLEENRRAADEVRKEVDRTVDSEKADRVRKEIEKVLRHSEKVIREVTKRIRKLLEDSERIIRTAKRLIDEVLRAAEAGEVDVEEVKKRLEDLLEEVKELSKRSEDTLRKLAEDVKRLAEDSNKKLEDLLEEAKERAR

SEQ ID NO: 6059 - protein, 174 aa, Artificial Sequence; identical to SEQ ID NO: 6058
  Synthetic

SEQ ID NO: 6060 - protein, 174 aa, Artificial Sequence
  Synthetic
SEKEELRDLVRRAKEDVDRLRRENEELNRRIEEDIERLLKENEDRNREVKDDIDKRVSSEIVKDARRLNRENHERSKRIIERAKRLNEENHRTSRKIIEEAKKLIDDVLKKAESGSVDVEEVKKELEELLRRVRKLSEDSLKHLRELLKEVRELSERSLRHLDELLRRVREKAR

SEQ ID NO: 6061 - protein, 174 aa, Artificial Sequence; identical to SEQ ID NO: 6060
  Synthetic

SEQ ID NO: 6062 - protein, 174 aa, Artificial Sequence
  Synthetic
KDEEDAERRARESDKSIEELRERNEREAKRLKEEVEKLLEENEKKVDELRKRVEKTVTSEIVDEVRKLIEEVLENSKRIIDEVRKRIEDVLRESEEIIRRVKKLTKRVLDLVKSGSRDMEEVKEELDRLNKEAEELSRRSLRKLEELLREARRLSRESKERLKKLLEDARRKSN

SEQ ID NO: 6063 - protein, 174 aa, Artificial Sequence; identical to SEQ ID NO: 6062
  Synthetic

SEQ ID NO: 6064 - protein, 174 aa, Artificial Sequence
  Synthetic
SDEERAREEARRSKESIERLLEENRRLAKELKKEIRRLLKENEDLVRKLKEDVDREVDSEIAREARKLIKEVLDESEEIIRRVDKKIDDVLRNSERIIREAKRLTERVLRLVDSGSRDIEEVLEELDRLNKEVEELSRRSLKRLEELLEEVRKLSEDSLRKLKELLDRVREKSR

SEQ ID NO: 6065 - protein, 174 aa, Artificial Sequence; identical to SEQ ID NO: 6064
  Synthetic

SEQ ID NO: 6066 - protein, 181 aa, Artificial Sequence
  Synthetic
DERERLRKALEEVRRTVEKLVRENEELLKKVEERVRRLNDEDRRLVEEIKRRADELRKRGEATDEVIERIRKVLTDSERISREILRKLEEMLDRSRKIVEEILRELERVLREIEELVKRVTNDEVIRRVEDELRKVLEDIKRLSDKNKRDLEEALRDIERLVKENNKRLKEALDDLERAAT

SEQ ID NO: 6067 - protein, 181 aa, Artificial Sequence; identical to SEQ ID NO: 6066
  Synthetic

SEQ ID NO: 6068 - protein, 181 aa, Artificial Sequence
  Synthetic
SEREDLKRELDEVRKDVARLNEEDRRLLEDARRDLEKLVRDNEELVERVKKTLKELEDRGELTEEVVEELDRVLDESRKIVEEILREAEKVLKESEEISKAIVKRAEDVIREIEELVKRVKTDEVIRRVRDRLRRVDEELKELVKRNNERLREVLERIRKLSRDNSERLKAALEKIKEEVR

SEQ ID NO: 6069 - protein, 181 aa, Artificial Sequence; identical to SEQ ID NO: 6068
  Synthetic

SEQ ID NO: 6070 - protein, 181 aa, Artificial Sequence
  Synthetic
SLKEKIEKLLEESRKDIEELNERDKKRVKESEDTVRRLNEEDEELVKRVREELEKLRKEGRLDDRVVEDARRMLERSRRISEEILKENRRVLEESKETSKRILEDNERAVREIKELIDRVRTEEVIKEVEKRLRDVTKTSREKVRENNRRLEEMTEDTKRLVEENNKDLDKALKDIRKKAE

SEQ ID NO: 6071 - protein, 181 aa, Artificial Sequence; identical to SEQ ID NO: 6070
  Synthetic

SEQ ID NO: 6072 - protein, 181 aa, Artificial Sequence
  Synthetic
KEREELEKLLEEVERDVARLNKEDKDLVDEIRRRVDELVKRDKELLDRVRDRLRELSERGDLDERVEEKLERVLRESEKITREIRERVREVLRESEKISEEIVRRARKVIEEIERLLRKVTDSRVIEKVKRDLRRVLEELRRLAEENNRRLDKALKELEDLVRKNNKKVEDALRKIEEEVR

SEQ ID NO: 6073 - protein, 181 aa, Artificial Sequence; identical to SEQ ID NO: 6072
  Synthetic

SEQ ID NO: 6074 - protein, 184 aa, Artificial Sequence
  Synthetic
ELAEDLRRLLKEVEDRSRDLLRKNRKLLEEVRERTERLIKELEDLLEEITRRVKDLIRKIKDEELLKKLEDLLREIEKLVREALERSRKTLEDIRKRVEDMVRRSKEVLERIRRLVKEAIEKLRDEELVRRVKEEIKRLMEEDKKLNKKSVEEIRELLKRDRDLIEEVKKEAERLLKEIEDEVR

SEQ ID NO: 6075 - protein, 184 aa, Artificial Sequence; identical to SEQ ID NO: 6074
  Synthetic

SEQ ID NO: 6076 - protein, 184 aa, Artificial Sequence
  Synthetic
DLERELEKLLDEVRRRVEELNKRNEDLARKVAEDTKELLKELRELLEEVKRRVRDLIRKITDEKLARELEDLLRKIEEDVKEAIKRSEETLERIIRDIERMIRESERLLREIEELVKEVIAKLRDREVAERVKEEIRRLLKEIEELNKRSEERIKKLLEDDRRLIERVKERIEDLLRRIEERTR

SEQ ID NO: 6077 - protein, 184 aa, Artificial Sequence; identical to SEQ ID NO: 6076
  Synthetic

SEQ ID NO: 6078 - protein, 179 aa, Artificial Sequence
  Synthetic
DEVDELLKRLEDSSRKAEEDVKRMLERLEDSTRDAARRVKEMIKRNEEVSDEAEKRIRTEEVVERVLRTSREIIERIREVVKETNKRDKEIVDEVKEVVRETNERDKDIAKKLRDRVRNLDKVVKEIDDLLRESERRNRELLREIEELLKESERINRELLKEVDKVLRDSEERVERRRE

SEQ ID NO: 6079 - protein, 179 aa, Artificial Sequence; identical to SEQ ID NO: 6078
  Synthetic

SEQ ID NO: 6080 - protein, 184 aa, Artificial Sequence
  Synthetic
DLERRLDKILRDIEEAARDNIRRNEELLKRSEENVRRNLEENKKKLEEIKREVEELERRVKDKDLLKEIRDVLERIRRVVERALKEIKDLLRRSEELVRKSIEDIRRVLERIRRVVKDVKERIRSEELAKRAEERLRELLKELHEISKKMLREIKRVNDEINKVSKESLDELDELVKEIKERTR

SEQ ID NO: 6081 - protein, 184 aa, Artificial Sequence; identical to SEQ ID NO: 6080
  Synthetic

SEQ ID NO: 6082 - protein, 184 aa, Artificial Sequence
  Synthetic
SLEEELRKMLEKVERDVRRNIERNKRLLDRSRENVKENIKKNRELLKEIEKDVRKLETDVKDKKLLDEIRKILEEIAKLVEESIRRIEEALEKSERLVERSIREIKRVLDEIRRLVEEVRKRIRSEKLAEDAKRRLEELVREIHKISEDALEEIKRVNKEINDVSKEMLDRLRELLKEIKERTR

SEQ ID NO: 6083 - protein, 184 aa, Artificial Sequence; identical to SEQ ID NO: 6082
  Synthetic

SEQ ID NO: 6084 - protein, 184 aa, Artificial Sequence
  Synthetic
SLEEELEKLLDEVRKEVKKNIDENKRLLDKSREEVRKNIKTNEDLLRRIEEKVRRLLEEVKDKDLLEKIKEMLKRIKELVEESIRRIREVLKRDEELVKKSIDDIRRVLKRIEDLVEDAKRKIRSEELAERAKRELKKLEEEIHRISREALERSKKTVEELHEISKRMLDELKRVDKRLEDETR

SEQ ID NO: 6085 - protein, 184 aa, Artificial Sequence; identical to SEQ ID NO: 6084
  Synthetic

SEQ ID NO: 6086 - protein, 184 aa, Artificial Sequence
  Synthetic
DQREDLDRRLREIEERVEENLRTNEELLKEVEKNAKENIDRNRKTLEDIKRRVDDLRRRVKDKDLLKRIEEMLRRIERMVRESIKKIKKVADDIRRLVKKSIDDIRRILEEIRRVVEEVKRRLRDDELVERVKDELRKLVKEIHDVSKKALEDLERLLRELNEISERALRTLEKLLRKLEEDTR

SEQ ID NO: 6087 - protein, 184 aa, Artificial Sequence; identical to SEQ ID NO: 6086
  Synthetic

SEQ ID NO: 6088 - protein, 184 aa, Artificial Sequence
  Synthetic
SLEETLKRILDKVREEAKRNIKENEDLMRESRRNVEENIRRNEKTLEDIEEEVRRLREEVKDEDLLRKIEKVLKEIRDLVRESIRKIRELLEEDKKLMDTSIRIIEKLLKELEELVDDIIKRIRSEELAKRVKEELDKIVRRVHEISRRALEESRKTVEELNRESEKVLRELERLLRRLEEEVR

SEQ ID NO: 6089 - protein, 184 aa, Artificial Sequence; identical to SEQ ID NO: 6088
  Synthetic

SEQ ID NO: 6090 - protein, 184 aa, Artificial Sequence
  Synthetic
SDEDDLRRILEEIRRNVERNIRENERLLDEIKKRVDENIKTNKKTLEDIREEVRKLEEEVKDKDLLRTIREMLRRIEEMVRESITRIRKVLDDIRKLVEESIKEIKRVLEEIKRAVEEVARRLRDRELVKRVEDTLRDLLRKLNEISKRALEELKRAVERIHRISRDALRELDRLRKELEERTR

SEQ ID NO: 6091 - protein, 184 aa, Artificial Sequence; identical to SEQ ID NO: 6090
  Synthetic

SEQ ID NO: 6092 - protein, 184 aa, Artificial Sequence
  Synthetic
DDEERLDKILRDIEENARRNIERNRTLLERSRENVKRNIDENRRKLEEIRRDVEDLKRKVKDEDLLREIEDVLRKIEEVVKRSIDKIRKMLEDDERLVEESIRRIREVLKRIRDLVEDVKRRLRDKELVKRAEDELRRLLKELNEISERMLRRSEETVRRLNEVSERALRELDRLRKKIERRTR

SEQ ID NO: 6093 - protein, 184 aa, Artificial Sequence; identical to SEQ ID NO: 6092
  Synthetic

SEQ ID NO: 6094 - protein, 184 aa, Artificial Sequence
  Synthetic
SLEETIRRILEESERNVKRNIDENRKLLKEIRDNAKRNIDENRRLLEEIERTVRDLERRVKDKDLLKEIRDVLERIRKLVEESIKRIEDLVRDVERLVEESIREIKRVLDEIRKLVKEVEDRIRSEKLAEDVLRELDKANKDINEISKKMLEDLKKAVEDVNRVSKEMLERLKRLREEIEKRTR

SEQ ID NO: 6095 - protein, 184 aa, Artificial Sequence; identical to SEQ ID NO: 6094
  Synthetic

SEQ ID NO: 6096 - protein, 184 aa, Artificial Sequence
  Synthetic
KDEERLDEILDRSRRNAETNIKRNKDLLDESRENVKENIKKNEDLARRIRERVEDLERKVKDKDLLKEIRDILREIEKVVEDSIRRIREMLRRDEKLVKDSIDEIRRVLKRVEDLVEDVKRRLRDEELVKRVEDELRRLNEEVNKISEEMLKRSKDTVRELNKVSEDALRKLDELRERIERRTT

SEQ ID NO: 6097 - protein, 184 aa, Artificial Sequence; identical to SEQ ID NO: 6096
  Synthetic

SEQ ID NO: 6098 - protein, 184 aa, Artificial Sequence
  Synthetic
SLEEDLRRILKEIRDNVRENIRTNEELLKRSRENVKENIERNKKLLREIEEEVRRLEREVKDEKLLRDIRRVLEEIRRDVERTIREIKRVLDEIAELVERSIREIKRVLDEIDRMVKEAEDRIRSEKLAKEVKDRLRDLLRKLNKISEDALRELKRLNDEINRISEEALERLKKLLEDLERRVR

SEQ ID NO: 6099 - protein, 184 aa, Artificial Sequence; identical to SEQ ID NO: 6098
  Synthetic

SEQ ID NO: 6100 - protein, 184 aa, Artificial Sequence
  Synthetic
SLEEKLRKILEESRENVERNIRRNEDILRKSRRNVEENIKTLEKILEDIKRTVDKLKKDVKDEELLKRIEEELRKIEDRVRRVIREVEKLLRDSEELVKRSIEEIRRALERIKELVEEAERRIRSEELARKVERELREMNKELNRISEEALKRIEEVNRDINRVSKEVIEELERLVEKIREDVR

SEQ ID NO: 6101 - protein, 184 aa, Artificial Sequence; identical to SEQ ID NO: 6100
  Synthetic

SEQ ID NO: 6102 - protein, 184 aa, Artificial Sequence
  Synthetic
DLERELRKAAKESRENAEKNKEDNKEAAKRSKENAEKNIRDNEETARKIEEDARKLEKDAEDEDLARTIRKAADEARKAAKESIDEIRRAAKESEDLARDSIRKIDEAAREAKKLADEAEKRARTEDLARKALRDLREANKRANEISKKALDEIRKANEDANRASKKANDDLRRLAEKAKRDAE

SEQ ID NO: 6103 - protein, 184 aa, Artificial Sequence; identical to SEQ ID NO: 6102
  Synthetic

SEQ ID NO: 6104 - protein, 188 aa, Artificial Sequence
  Synthetic
DLERELRELLERVRKDVRDNLETNKKLLEESRKNAEDNLRENDRLLKELEKRVKDLLDELRKDKEVLDKIKKLLDKLREVVERSLKLIEDLLREAEEVVRESLRLIEELLERVEEVVKRAAELIKRGLPEEVVKRVLDDIKRIVDEINRISKEMLDKLKRINDEANKISKRMLDELRRIAEEIEREVR

SEQ ID NO: 6105 - protein, 188 aa, Artificial Sequence; identical to SEQ ID NO: 6104
  Synthetic

SEQ ID NO: 6106 - protein, 188 aa, Artificial Sequence
  Synthetic
DLEERIKKLLEESRKNVEDNEKKNKDSLRRSREEVKRLSDENEKLLKRIRERAEKLKTDLKDDKDLLERIERALREVEDLVRKSKELNDRLLKKSEEVVKRSLDLIKTLLKRIDDLAKKILELLKEGRDKRVVETVLRELERINEEINDISRKMLKENEKILRDIKKINEDMLKRLKEALERVDREVN

SEQ ID NO: 6107 - protein, 188 aa, Artificial Sequence; identical to SEQ ID NO: 6106
  Synthetic

SEQ ID NO: 6108 - protein, 188 aa, Artificial Sequence
  Synthetic
SLEEEIRDILRRAEERVKELTKENERSLRESKKRVEDLSRENEKTLEEIKRDVDRLLKELKDEEEVLRLIEKMLRDARKVVEDARKLNEDLLRESERVVEEVKDKNRRLLEELRRVVEEIKRLIDRGEPEDVVREMLKDLERIVREISEDNARTLEENERILREIEEENKKTLERLREILKRIREEVT

SEQ ID NO: 6109 - protein, 188 aa, Artificial Sequence; identical to SEQ ID NO: 6108
  Synthetic

SEQ ID NO: 6110 - protein, 188 aa, Artificial Sequence
  Synthetic
SLEEEIRKILKRIREEVKRLTEENDKTLKDSERNVRENLTEIERILREAADDVRRLEEELREDERVLELIKRADKKLKDLVRDILRRIDEMLKRSREVVREVKRTNKEMLERIERIVKRATDLIREGRPEEVVERVLRELERLLEEIRDRNKKTLDDLRRINEEVNRISKDALEELRRLLRELRELVK

SEQ ID NO: 6111 - protein, 188 aa, Artificial Sequence; identical to SEQ ID NO: 6110
  Synthetic

SEQ ID NO: 6112 - protein, 188 aa, Artificial Sequence
  Synthetic
SLEDEIRKILDELRKNVRENLEDNKRVLREAEEEAKKLSEDNRRLLKELKERVKELKDRLRSDKDVLKEIDELLKELERVAKEVEDRNRRLMERVRDVVRRSLEEIKRLLEKLEDVVRRVERLMDEGRPEEVVRRALEEIERINRDINRRSKEVLDELREIVREAKEDNERTLRKLKKILEEIEEKVR

SEQ ID NO: 6113 - protein, 188 aa, Artificial Sequence; identical to SEQ ID NO: 6112
  Synthetic

SEQ ID NO: 6114 - protein, 188 aa, Artificial Sequence
  Synthetic
RLKEELERILREAEKNVRENLRRNRESLKESKETVDRLSEENKKTLEEVRTTVEELLKELKDKREVLKRIKEMLDTAKELVERALELNRDLLRKSERIVTESERLIKELEEELRRVVETVTRLLAEGRPEEVVRDALRKLEEINRRINEISERMLKENKRLLEEIKRINKETLDRLKELLEEIKEDVR

SEQ ID NO: 6115 - protein, 188 aa, Artificial Sequence; identical to SEQ ID NO: 6114
  Synthetic

SEQ ID NO: 6116 - protein, 181 aa, Artificial Sequence
  Synthetic
SDVERVEKELKKTNDELRKIVDEARKLLEKTNKEIRDINRTMMEELRRTNEDLKRVVERGEDRSVLKEILERSEKLVRESIKKNEDLLRESKRVVDKVIREIERILEKSRELVREALRRLTDRRVIERIREIARKNEEDVKKLLKELKDLLEKNKRDVEKASEENKKLLEDNERDVRREST

SEQ ID NO: 6117 - protein, 181 aa, Artificial Sequence; identical to SEQ ID NO: 6116
  Synthetic

SEQ ID NO: 6118 - protein, 181 aa, Artificial Sequence
  Synthetic
KEAEEAAKLLEDTNRRLKEIAEEAEELLRRTNEKAKKINDESREKIKDAARRAEDAARRGRPEKDLEKAARDAEEVAKRAIEESRRAARESEELAREAAKRLKKAADDSRRLAEEAARRLTDEKAIREIKELAKKNKEDAERALERIKRLADKNREDAKRADEDNERAAEEARRKAEELKR

SEQ ID NO: 6119 - protein, 181 aa, Artificial Sequence; identical to SEQ ID NO: 6118
  Synthetic

SEQ ID NO: 6120 - protein, 181 aa, Artificial Sequence
  Synthetic
DEAEDVERKLEATNKELNEINERSRKELETSNRELNRINTESEEEIRRIEERIDRVKKRGEPREVLRKIVKEIKDVVKRAIDLSREVLERSERIVREVIKDSERILRESERLVREALRRLDKKELIERIKRLLDKNREDVKRMNEDNKRLLKENRDDVKRMDEKNKKILDEVDEKAKEKEK

SEQ ID NO: 6121 - protein, 181 aa, Artificial Sequence; identical to SEQ ID NO: 6120
  Synthetic

SEQ ID NO: 6122 - protein, 177 aa, Artificial Sequence
  Synthetic
SEEEELKKLLDRVRERVERSLDEIRRLAREVEEHVKKVNDDIRRLLDEIRREVEDIERRVKDKDVLKKLREVLDEIEKLVRKVLEESTRSLEKARELVKKALERNERLLEEIEKLARDIPAGDEVRELVRTLEERIDDSTREVKKLIEDLKRENKRILDTVRDLVRRLREKIKRIAD

SEQ ID NO: 6123 - protein, 177 aa, Artificial Sequence; identical to SEQ ID NO: 6122
  Synthetic

SEQ ID NO: 6124 - protein, 177 aa, Artificial Sequence
  Synthetic
DEEERLAELLERVKRDVDRSLKRIRDLLKELEKHAKEVNDDIRRLLEEVERRVREMEKRVKDKDVLKKLKDLLDEIRRRVEDALRRSTTSVDKVRKLVERVLENNKRLLEEAEDLVRRIPAGREVEELIRRMLKRIRDSTKKVEDELRRILEENRRILEEVRREIDELKKAIDEISR

SEQ ID NO: 6125 - protein, 177 aa, Artificial Sequence; identical to SEQ ID NO: 6124
  Synthetic

SEQ ID NO: 6126 - protein, 177 aa, Artificial Sequence
  Synthetic
SEEERLEELLRRIEKHSRELIRELEKSLEDSEREVRKSLKRIEELLRRAERKVREIRKRVKDKDVLRELERLLREAEKRVREVLRNNERLLREDEELTKEVIKKSKKILDEIRDLVRRIPAGREVKKVLDDLLKRDRDAIDEARKLNEEMLKRIEDSSREVEKLLADMEKTIEDIEK

SEQ ID NO: 6127 - protein, 177 aa, Artificial Sequence; identical to SEQ ID NO: 6126
  Synthetic

SEQ ID NO: 6128 - protein, 185 aa, Artificial Sequence
  Synthetic
SIDDKARKDLKRILDENRDIVRRVEELIRRSDELLKRILDDVKRRIDELRKKLEDIARKVKSKDMAELLERVLREIEDLIRRVLERIKKVLDESRKLVEEVLKENKKSLEKVERLAREVKTRIKDDEDVLRDIDRLLKEIKKHAEDSLRKIEKLLRESEEKVKDILRKIKKLLDEARKEVEDRRR

SEQ ID NO: 6129 - protein, 185 aa, Artificial Sequence; identical to SEQ ID NO: 6128
  Synthetic

SEQ ID NO: 6130 - protein, 185 aa, Artificial Sequence
  Synthetic
SIAEEVEELIRRLETKNRKIVKDVEDAIRASDDKNRRVLDKVRKDVERLKRELDRIAKEVKSEEALKLLTRILEEAEKLARDAERLNKETLDESRDLIRRVKELNKTSLREARRLAEEALRRIKDDKEVLDRIKELLKKLEKHVKDSLDKIDDLLRKSEKHVRESLETIKRLLEELEREVERLAR

SEQ ID NO: 6131 - protein, 185 aa, Artificial Sequence; identical to SEQ ID NO: 6130
  Synthetic

SEQ ID NO: 6132 - protein, 185 aa, Artificial Sequence
  Synthetic
DEKREVERLIRELIEENRDIVRRVEKLVRESNKKLDEILEEIRERLERLREKLKDIKRRVKSKDALKLLEDVLKEARETVTRVEELLRKLLEESRKLVEEAKKRNKDSLRKVEELVRDAETKLKDNEEVLRRIRELLERVEKHVRDSLRRIDELLKRSEERVRRIIREVRERLKRLEEEVREAKR

SEQ ID NO: 6133 - protein, 185 aa, Artificial Sequence; identical to SEQ ID NO: 6132
  Synthetic

SEQ ID NO: 6134 - protein, 185 aa, Artificial Sequence
  Synthetic
SISEDAERLVRELLRKNKEIRDRVEELVRRSNDKNRRVLEEVEKRLRDIIRKLEDIERRVKSEEMKKLLEEVLKEAEDLVREVLKLNDDTLRESEELVKKAKEDNERSLEEIRELVERVERRVKDNEEVLRRIRDLLRRVTEHVEKSKRDIEKLLRESRDHVRRSKEKIKRLLDEARERVERSKK

SEQ ID NO: 6135 - protein, 185 aa, Artificial Sequence; identical to SEQ ID NO: 6134
  Synthetic

SEQ ID NO: 6136 - protein, 176 aa, Artificial Sequence
  Synthetic
DEEDKLRKLLEEAREAVKRALERVDKLLRDSEREVRRILEEVKKLLDESRKAVEDIRRKATDEEALERIDRVLENSEKIIRDIAELIRKVLEESRKIAKEARELIKAVLKEAEDIIREVSSEEAEELIRRVIRKAEKLLREVEELLRRSNDKLRKLTEKVRTDLERSKKRLEDEAR

SEQ ID NO: 6137 - protein, 176 aa, Artificial Sequence; identical to SEQ ID NO: 6136
  Synthetic

SEQ ID NO: 6138 - protein, 187 aa, Artificial Sequence
  Synthetic
SILEKVRELLERIRDTVRKILREIEKSLEDNKRHSDEVLKEIEDLLRDLERRVKEIEERIKDKDVLKKVKEIVDDVRRRVREVLEKNRRIAEDSERLVEEVLRRLKELLDEIKKRVDDVLRKLEERETEEILEEIERLIREVRRRLKKILDDVRELSRRANEKDRKSLEEVRKLVEDVRRELERVAT

SEQ ID NO: 6139 - protein, 187 aa, Artificial Sequence; identical to SEQ ID NO: 6138
  Synthetic

SEQ ID NO: 6140 - protein, 187 aa, Artificial Sequence
  Synthetic
DVEEEVKKLLEDLERHSRKVLEEIKKLLKELEDHNRKTVEDIEELLRELEKEVRKLEEDVKDEDVLRKIRKILDKIRKDVDRVLKLLDESMKEIEKLVRDVLRKNEEVLEEAKERVTRVLRKLRDRETEEILEEIRRLAEELEKEDRKTLKEARDLAREVKKRNEEIKRRVEELIKKVDRELKEVAR

SEQ ID NO: 6141 - protein, 187 aa, Artificial Sequence; identical to SEQ ID NO: 6140
  Synthetic

SEQ ID NO: 6142 - protein, 176 aa, Artificial Sequence
  Synthetic
DEDEDVRRLLRRLREKVRRVKKKIDDSLRENRKKVRKTNEEVKKLLEDNRRRIEDVKRKRQEKEVLDLLEEVERHVEDIVKKVSELDKESLKLSDDLAKKARELIKRVEEKIEKVVKDRRSEEARKLMRELEKELKEIEDEVDKMSEEINRKNDEILRRARELIKRNNELLEEIRR

SEQ ID NO: 6143 - protein, 176 aa, Artificial Sequence; identical to SEQ ID NO: 6142
  Synthetic

SEQ ID NO: 6144 - protein, 176 aa, Artificial Sequence
  Synthetic
SEEEEVRKLLERLERTVEKTNRDVERSLRENEKRVRETNDEVRRLLEENRRRIEDVERKLQDEDVLRLLEEVKKHVEEIVRRVSELDRESLEESKELAKRASKLDEDTRRLIDRVIEERRSEEAKRLIEELEKRNREVKKEVEEMSRRINKKNEEILREARKLIEENNKLLKDIER

SEQ ID NO: 6145 - protein, 176 aa, Artificial Sequence; identical to SEQ ID NO: 6144
  Synthetic

SEQ ID NO: 6146 - protein, 181 aa, Artificial Sequence
  Synthetic
SELDEIAKAIRRLLEEVRRKNERIDEDIRRLLDELREHSEKVLREIEELLRRLEDAVRKRKDADDILRKIKKLIEDVAELLRKSLEEARRLLEEVARLLKTSVDDIKRLIDRVAEELSRVKDKDARKRAKDVLRDLEKKVEDLKRRNDKTLTDAKRELDDSRRRVKRVLDELEKVLRDLKR

SEQ ID NO: 6147 - protein, 181 aa, Artificial Sequence; identical to SEQ ID NO: 6146
  Synthetic

SEQ ID NO: 6148 - protein, 181 aa, Artificial Sequence
  Synthetic
DEAERILEEVKKLLEEVERLNKKIDDEARRLLREVERENEEIDRDIKRLLDEVRKDVERNKESDEILRKIRELIERVARRLEESVRRIRELVKEVRKLVRTSNEDLRRLIRDVAEKMRRVKDEEVRRRAEEVLRELEKVVEDSRRRNEKTLRDMERRIKELEDRNRDTLRKLREVVKELER

SEQ ID NO: 6149 - protein, 181 aa, Artificial Sequence; identical to SEQ ID NO: 6148
  Synthetic

SEQ ID NO: 6150 - protein, 174 aa, Artificial Sequence
  Synthetic
SEEERVRELIERMREMLERLEESNKKVLEEIERVLEKSERDVERVIREIERTLEEVKDNDEVRELVKRVLDDLRRFLDESRKLVKEIVDRLREMAKESKKLVKEVLDRLRELLERNGDTDRVIREAERVLEEVRRRNEKVNKEARDLLKEVEKHSRDVLEDIKRLLEEIRERAR

SEQ ID NO: 6151 - protein, 174 aa, Artificial Sequence; identical to SEQ ID NO: 6150
  Synthetic

SEQ ID NO: 6152 - protein, 174 aa, Artificial Sequence
  Synthetic
SEKERIEDVIRRIEKVLKESRDEADRVKKEIEKRLRELEKRHKEVTTEVKRVAEEVKDNEEVLKEIEDALRENERMVEDVRRLVEDILRKLDKFMRESEELVRRIVKRLEDLLRNNGDSETVLREAEELLRRVKKHSKEVLDRVRELLKRVEEKSERVLRELERVLREIREKAR

SEQ ID NO: 6153 - protein, 174 aa, Artificial Sequence; identical to SEQ ID NO: 6152
  Synthetic

SEQ ID NO: 6154 - protein, 174 aa, Artificial Sequence
  Synthetic
KDEERIEELLRRNEENLRRLEDSNRKVLRENEEILKELKRRHEKITEDLKRELEKVKDNDEVERLVREVLKKNEELAKKVEDLVRRTTERLKRLVDKSRKLVREITERLRRLLEQNGDTDTVLREATELSKEVHKENRRVNEEAKDLSRRVAEESDRILRELKKLLDEIRKRAK

SEQ ID NO: 6155 - protein, 174 aa, Artificial Sequence; identical to SEQ ID NO: 6154
  Synthetic

SEQ ID NO: 6156 - protein, 174 aa, Artificial Sequence
  Synthetic
SDEERIRRVIEDIERKLRELEKRHKEVTRENKENAKELKERHDRVTKDIKKTLDDVKDNDEVRRKVEKVLDENRKMVEKVLELLERISRRNEELMKDVRRLVKEILERLKRLLDNNGDTDRVLEEIKKLLREVEERSDRALREAKKLSKRVHERSKEVIDRLRELLREIKREAD

SEQ ID NO: 6157 - protein, 174 aa, Artificial Sequence; identical to SEQ ID NO: 6156
  Synthetic

SEQ ID NO: 6158 - protein, 178 aa, Artificial Sequence
  Synthetic
DSAREMERRIRELLKRVEDKSEKALRDSKKLTKEVEEESERALRRTEKLLREVAELARRVDKKEIEDIAREIIKDNERVLEDIRRLSEESVRDNRRVLDEIRRLIEEIIEDLERVLRKGDLDEKRVRDVLREIEEVLRRLEERHERLTRDDERVLRELEDRHRKLSERVKKLLEELKK

SEQ ID NO: 6159 - protein, 178 aa, Artificial Sequence; identical to SEQ ID NO: 6158
  Synthetic

SEQ ID NO: 6160 - protein, 178 aa, Artificial Sequence
  Synthetic
DRAEKAEREIRRLLERVKEDSERVLRESEELTRRVEEESRKILEETKKLTRTLEELSRTEDKRLVEKISRETIRRNEEMLKDLKRLSDESVKRNEDALDDLRRLAEEIIRRLEEVLRRGDLDEERVKRVLEEIERLLRELEERHKRLTERDKEVVKRLADRHREVSEEDRRVLEELKR

SEQ ID NO: 6161 - protein, 178 aa, Artificial Sequence; identical to SEQ ID NO: 6160
  Synthetic

SEQ ID NO: 6162 - protein, 178 aa, Artificial Sequence
  Synthetic
DEMEEVIRRIETLLKRVVDESDKVLEDIKRLLDRVVEESEKALETTRKLLEEVAELARTVDKREIAKIIREIIERNRTVLEEIARLIKEIIDRNKKALDELRDLARRIIRDLAEALKRGDLDEDEVRRVLERVKKVLDELAERHKELSKEIKRELRRLEKEHEDLSEEVKRLLRELER

SEQ ID NO: 6163 - protein, 178 aa, Artificial Sequence; identical to SEQ ID NO: 6162
  Synthetic

SEQ ID NO: 6164 - protein, 178 aa, Artificial Sequence
  Synthetic
DEMREAEEEIKRLLDTVKTESDRVLEEARKLTRRVEEESERVLRETKKLTDELRKLSRKRDKELVKKISEDTIRRNEEAVKRIRELSKESIKRNEDALERIKRLIKEIIDRLEDVLRRGDLDEERVRRVLKEIREVLDRLEKRHKKVSKDDKEVLERLEKEHKRLSREDEEVLRELER

SEQ ID NO: 6165 - protein, 178 aa, Artificial Sequence; identical to SEQ ID NO: 6164
  Synthetic

SEQ ID NO: 6166 - protein, 178 aa, Artificial Sequence
  Synthetic
SRMEKVEREIRTLLKEVEERSRKVLDESRKLTEDVERISRDALKKIKELLEEVRDLARTVDKKILRKLAREIIERNKEMLKEVRRLSKESLDRNERALEELADLARRIIEELEKALRRGDLDEKDVRRVLREIEELLKDLERKHKELTRRDEEVLKKLEDDHRRVSEEIEEVLRRLEK

SEQ ID NO: 6167 - protein, 178 aa, Artificial Sequence; identical to SEQ ID NO: 6166
  Synthetic

SEQ ID NO: 6168 - protein, 178 aa, Artificial Sequence
  Synthetic
SRAERVKEEIKKLLEEVRKESKRVLKEVKDLTKEVDDKSKKVMRDIRELLKEVEELARTVDKKEIRDRIRKIIERNERMLEELKRDSEESLKRNEDALREVKRLIEEIIERLERALRRGDLDAEEVKKVLREIEETLRKLEEEHRRLSDRDREKLDELAKRHKKVSRDIEEKLKELER

SEQ ID NO: 6169 - protein, 178 aa, Artificial Sequence; identical to SEQ ID NO: 6168
  Synthetic

SEQ ID NO: 6170 - protein, 177 aa, Artificial Sequence
  Synthetic
KEVEDVLDKVKKALEEIRERNKRVNDEIRRLLDEVRRRNEDADREIEEILKRVADEVRDTDLERIIEELKKRVEEVIRRSRRLAEEIKKTIEEAVRRTRKLAEDLKREIDDVLKRVETEELRERIKAVVEEVERVMDELRRSNEKVVREVEDVMRRLEERNRRTLERIEEVLERLKR

SEQ ID NO: 6171 - protein, 177 aa, Artificial Sequence; identical to SEQ ID NO: 6170
  Synthetic

SEQ ID NO: 6172 - protein, 181 aa, Artificial Sequence
  Synthetic
EEVERLLTKVRELVRRIEEENKKANDDSRKSLKEIKDRVEKALDDSRKSLEEIEKIVRRDNIKEKVRELAKRDRDLNREVLKEVRELLKRDEDLNRRVIDKTKKLMEDVERKLKEVLDRVDKEELKRRIETVIKEVRETIEELKKSNEESVRDSERTIRELEEEIKRTVRESEKEIKRLED

SEQ ID NO: 6173 - protein, 181 aa, Artificial Sequence; identical to SEQ ID NO: 6172
  Synthetic

SEQ ID NO: 6174 - protein, 181 aa, Artificial Sequence
  Synthetic
EEVERMADEVRRLNEEVRRRNEESIEEVKRLNDEIRKTNEKSIEDVKELLKRVKEVRERNQDKRRIRELIKRILERDEALVRKSERLAREVNRRDKEVVEESEKLIRDINKRIDEAVKRVDGGDAREKMKRLVEENTKSVEELKKRNEETSRRNTKSVREVTRRNEKTSDDVRRLVREEEQ

SEQ ID NO: 6175 - protein, 181 aa, Artificial Sequence; identical to SEQ ID NO: 6174
  Synthetic

SEQ ID NO: 6176 - protein, 181 aa, Artificial Sequence
  Synthetic
DEVEEAKEKVRRLNKELRRVVKEVEDEVRRLNEEVRREVEKVRDDVRKLRETIREVKARNVDDREIRKLAEEVIRRIRTVIEKIRRLIEEINKRIRRVAEEVKRIAEEINEEIKRVLDRVKSGSLEREIEKISRENTKSLRDLLDRLRRLVEENTKSVEELVRRLEELLERVEEEMRRLET

SEQ ID NO: 6177 - protein, 181 aa, Artificial Sequence; identical to SEQ ID NO: 6176
  Synthetic

SEQ ID NO: 6178 - protein, 177 aa, Artificial Sequence
  Synthetic
SRVETMVKDIRRLLEEVKERVERALRDNERVLEDIRRRVDELLKTNEKINRDIERRVRRGLDRDEIRKLLKESEDSVRRALRDVEELLRKSRETVERVKRLIERLLEEVKRIVETVARESDVEEIKEVLRRVEEEAERLKREIEESLKRSEDLVRKLKERIKRSLEESRKRIKKLED

SEQ ID NO: 6179 - protein, 177 aa, Artificial Sequence; identical to SEQ ID NO: 6178
  Synthetic

SEQ ID NO: 6180 - protein, 177 aa, Artificial Sequence
  Synthetic
SEVEEAVKRIRKIVKEIEERVRRLLEENRRVIEEVERINKEMLKRNKEINKEVEELVRRGEPRKVIEDLVDRSRRSVEESERLNEELVDESRRTVEEIETEIERLREELKRVVDKVREKREVKEIEDILRRAEETVEDLKRRIRRSLEDSRRVVEELAEENRKSLRESKKKVDELKK

SEQ ID NO: 6181 - protein, 177 aa, Artificial Sequence; identical to SEQ ID NO: 6180
  Synthetic

SEQ ID NO: 6182 - protein, 177 aa, Artificial Sequence
  Synthetic
SRVEDFVRRIRDLLRKIEEIARKALKENKDVLREIKRINDEMLRRNEEILKRAEDLVREGRDRTVIERMLEESERSVRDSERLNRELLRKSEETVRKLKKLIDDLLREIEKIVREVARERDVEEIKRILEEAKKTIDELRKEIEKSLREVEKAIRELEERNRRSLERSEDLVRELKR

SEQ ID NO: 6183 - protein, 177 aa, Artificial Sequence; identical to SEQ ID NO: 6182
  Synthetic

SEQ ID NO: 6184 - protein, 177 aa, Artificial Sequence
  Synthetic
RRVEEAVKRIKEILERVTRRVEKVLRDNKRVLDDIRRINEEMLKRNKEINRKVEELVREGRPRKVIKDLLKRSRESVEESERLNRDLLRKSEETVRRALKEIEDALKRIEELVREVERESDVEKIKEILEEVRRTIEELKERIRKSLEEVKELIKRMDEENRKSLEESDERARRAEK

SEQ ID NO: 6185 - protein, 177 aa, Artificial Sequence; identical to SEQ ID NO: 6184
  Synthetic

SEQ ID NO: 6186 - protein, 181 aa, Artificial Sequence
  Synthetic
SELEEIRERVKRVEEELRKNLKDAERRVREAKRRSEESLKDIEKKVKEVRDELKELARRGADRKDIRRIVKEIEKRIRDAAKRNEDIVRRVEEEIKRLVESNRTLADDISRRVKELLDRVTDGSAREDIKRLLKELEELLKRSEDEARRLLKEVRDLVDTTKKRIDKLLKEIEDLLREIER

SEQ ID NO: 6187 - protein, 181 aa, Artificial Sequence; identical to SEQ ID NO: 6186
  Synthetic

SEQ ID NO: 6188 - protein, 180 aa, Artificial Sequence
  Synthetic
KIEEKVEKLVRELLKELETVDREVNERVKRSNEKLEKIDRDVNKLVEDSNRKLKEISDRVKSDEARELIKRVLEESRKLVKEAKDLTKKVLDESEELIRRVLKVSRDVLDKAKKLIEKVLEERDVEKIKRLLEEVKKLVEDSERNIRELLKESRKKVEDSKRNLDRLLKESDDRVDRERR

SEQ ID NO: 6189 - protein, 180 aa, Artificial Sequence; identical to SEQ ID NO: 6188
  Synthetic

SEQ ID NO: 6190 - protein, 180 aa, Artificial Sequence
  Synthetic
ETEKEVEELVKRVLDKDKRISDESEERIRRLMEKNKKILEDVKRLVDEVREKLEDIRRRVKSKEMKDLIERVLEEAKELVTRAKKLDEDSLREVDKLVKDVDRLNERSLEEAERLVREVLRKRDVEKIKKLLEDVRRLIKRSKEKNDELLEELKRLSEETRETLDRLLKDLEDKIREAKK

SEQ ID NO: 6191 - protein, 180 aa, Artificial Sequence; identical to SEQ ID NO: 6190
  Synthetic

SEQ ID NO: 6192 - protein, 173 aa, Artificial Sequence
  Synthetic
DEKEDVDRLLRELEELVERSERSIRKLLEDNRKLAEDLKRTVEKLLEDNRRKVEEVRRTGADERKVDEVLKHSEEVIRRVKEDIDRVLKHSEEVIDRADKLTKAVLKEARDIVREVDSEELRKLIKRVLKKLRDLNRRVKELSRRSAEELKRLLDEVRKLSEDSLRELDKLRK

SEQ ID NO: 6193 - protein, 173 aa, Artificial Sequence; identical to SEQ ID NO: 6192
  Synthetic

SEQ ID NO: 6194 - protein, 173 aa, Artificial Sequence
  Synthetic
DEEKRVRDLLEEVREEVERSDKSIEELLRELEKAVKDSERTIRKLLEDNERMVREVRRKGVDDELVRRVLEHSEKLIREAKRLTDEVLREAKRIITEAKKLTKEVEKKVREIVKKVKSKEAEDLIREILEELKRLNEDVKRLIREVLETLKELNERVKKLVKESNDELRELAR

SEQ ID NO: 6195 - protein, 173 aa, Artificial Sequence; identical to SEQ ID NO: 6194
  Synthetic

SEQ ID NO: 6196 - protein, 173 aa, Artificial Sequence
  Synthetic
REEEKLDKLRKDLEKRVEESKRSIDKLLEDNRRRVEESKKTIEKLLEDNKRRVDEIKKRGVDDELVRRALEHSKKLVDEAKELTKRVLEKSKRIIDRAKELTKRVERKVREIIKKVDSDEAEKLIRDVKKELDRLNEEVKKLSEDSLKELDDLNREVKELMERSNRKLDEDAK

SEQ ID NO: 6197 - protein, 173 aa, Artificial Sequence; identical to SEQ ID NO: 6196
  Synthetic

SEQ ID NO: 6198 - protein, 175 aa, Artificial Sequence
  Synthetic
KEVEDVLREIKKLIKEIHEKSKRALDETRELLERIHRTTRRVLEEIRRLLKEVEELAKAGMDKREVRRRVKEIIDRLREMLERSRKLWKDIEERDKRLLEEVERLWDEIRRELRERAGDKDRVEDLVRELERVVKEDKDRSKESEERIKKLVEDDTREAEKLIRELEKILEDTEK

SEQ ID NO: 6199 - protein, 175 aa, Artificial Sequence; identical to SEQ ID NO: 6198
  Synthetic

SEQ ID NO: 6200 - protein, 175 aa, Artificial Sequence
  Synthetic
SEVEEVLRDIDRLAKEIHKRSRDVLRDIDRLLKEIHERSRRMLERIKRLLDEVRRLVEAGVRKEEIKELIERILRDLKRVVDEVAREWEEVIKKLRKALEESRRLWEEIIKKLEREAGDRDRLRELVERLERLLETDKREIEKLIKKLEEMLEEDERRARELLEDIRRILEEIKK

SEQ ID NO: 6201 - protein, 175 aa, Artificial Sequence; identical to SEQ ID NO: 6200
  Synthetic

SEQ ID NO: 6202 - protein, 175 aa, Artificial Sequence
  Synthetic
SEVEEVTKEIKRLVEEIHKRSREALEETRRLVETIHRDSKRVLDEIERLLEEVRKLAEDGVDKRDIKRLAKEILKRLEDMMRRVTELWKEIIERDRRLLEESKKRWDEVIEELRRKVRDEKRVRDLLEKLREDAKRDEDASRKSEEDIRKVVEEDKREAEKLLKRIEDELRKTEK

SEQ ID NO: 6203 - protein, 175 aa, Artificial Sequence; identical to SEQ ID NO: 6202
  Synthetic

SEQ ID NO: 6204 - protein, 175 aa, Artificial Sequence
  Synthetic
SEVEKVLKDIRDLVKKIHDESKRVLDEIEELVRRINKRSRDALREIRELLRTVTELAKAGLDKREVEKLAKRILERLREVLEESRELWERVIRRLKEAMERVRELWERVIRELRKKVGDKDRVRKLVEDLERMLRRDEAEAEKLIKKLRELLEKDRDDIRRLLEDIKRILDEIRK

SEQ ID NO: 6205 - protein, 175 aa, Artificial Sequence; identical to SEQ ID NO: 6204
  Synthetic

SEQ ID NO: 6206 - protein, 175 aa, Artificial Sequence
  Synthetic
EEVERALDRARRLLERIHETSRDVLRRTEELLRRINEESRRVLKEAKELLDRVEKLVRDGLDKREVRRLIEEIVRRLEKVLKESEDLWREVIRTDKEMLDEVRKLWEEIIERLRREVGDKDRVEKLERELEKVVREDEEESKKSIRRAEEMLRKDREDIRRLLEEIKKILEDIDK

SEQ ID NO: 6207 - protein, 175 aa, Artificial Sequence; identical to SEQ ID NO: 6206
  Synthetic

SEQ ID NO: 6208 - protein, 175 aa, Artificial Sequence
  Synthetic
SEVEDVLRKAEELAKRIHDRSRKALKETEELLERINRDSERVLRESEKLLEDVRRLAEAGVRKEEIKKLAEEILREDKRVLDESKRLWEEILRRDRKLLDEVRRLWEEIIRRLRRELGDEKTVRRLVDKLRRLVEEDTDESRKSEERIKKMVEDDKRESEKSLKRIKDIMKEITD

SEQ ID NO: 6209 - protein, 175 aa, Artificial Sequence; identical to SEQ ID NO: 6208
  Synthetic

SEQ ID NO: 6210 - protein, 176 aa, Artificial Sequence
  Synthetic
SEVERVLEENERTLKRIEETAKKVLEEIEKLSKEVEDRAREVLDRVRRISEEVRRDVRSKEVERIIREIDKESERVLRELEELIKEISRKIEEVLREIERLARESKDRVRKAMKDIDEEMRDRVRKLIKRNDEVLDRVRREIEKLHRRNKKILDDLRREIERLNRENKRLLDELRK

SEQ ID NO: 6211 - protein, 176 aa, Artificial Sequence; identical to SEQ ID NO: 6210
  Synthetic

SEQ ID NO: 6212 - protein, 176 aa, Artificial Sequence
  Synthetic
SEVEEVLKRNEKTLKEIEERAREVEETVRELSERIRKRNEEVNRELEERSKRIRRDVRDKDVERLIRKVDEDSKRTLAETEKLIREVSEVIKRALEEIERLIRDSLEKVKEMMRDVDKEARDRADELLKRNREVLERLRKRIEDLHRDNKRVLDELRRSNEETNRRNRKLLEELRK

SEQ ID NO: 6213 - protein, 176 aa, Artificial Sequence; identical to SEQ ID NO: 6212
  Synthetic

SEQ ID NO: 6214 - protein, 176 aa, Artificial Sequence
  Synthetic
REVEEVLKENEKTLREIERRMEEVLKRVEDLSDEVRRRVDEVLRRVEETSKEIAKRVRGEDVKRLIEDVDRRSREALREVEELIKRIDEVSERALRELEELIKRSLDRLAEVMKDVDEEARKRAKDVLDRNRDVLRRLKDAIDKLNKRNKEILDRLRRKIEDLNRRNEELLRRLEK

SEQ ID NO: 6215 - protein, 176 aa, Artificial Sequence; identical to SEQ ID NO: 6214
  Synthetic

SEQ ID NO: 6216 - protein, 176 aa, Artificial Sequence
  Synthetic
REVEEVLDKNRKTLREIRKRAKEVLDRVEELSRRVREENERVNRELRKISEEIARKVRDKEVEKLIREVDERSKRTLETTERLIREIDERSKKVLDELRKLVKESLELVERAAKDVDEEMKKEADKLLKENRDVLRELERRIEELNERNRRVLKELEESNRRTNEENKRLLDELRR

SEQ ID NO: 6217 - protein, 176 aa, Artificial Sequence; identical to SEQ ID NO: 6216
  Synthetic

SEQ ID NO: 6218 - protein, 176 aa, Artificial Sequence
  Synthetic
DEVETVLDENRRTLKRIRERVDKVLKDVEKLSREVEDEIRRVLEEVEKELKDIERDVRDKDVERLIREIEEKIKRALEKIEELIRRIDERSREALEEVKKLIEDSLKRVEDAMRDVDEDAREKAKRLLEENKRVLKELEERVKRLNDKNRRILERIKKRIEDLRRRVKELLKKLRK

SEQ ID NO: 6219 - protein, 176 aa, Artificial Sequence; identical to SEQ ID NO: 6218
  Synthetic

SEQ ID NO: 6220 - protein, 176 aa, Artificial Sequence
  Synthetic
DEVERVLEENERTLRRVREIIREVLEEVRRLSEEVKRRIDEVLKENEDTLKKIKDEVRSEDVRRLIEESLELVKRVLEEVRRLIEAVDRESERVLKEVEDLARESERLVREVAKDVDKKARDRVREVEKRNRDVLEEVKDEIRKVNKDNRDILRRIKKDVEELLKRNEKVLRETEK

SEQ ID NO: 6221 - protein, 176 aa, Artificial Sequence; identical to SEQ ID NO: 6220
  Synthetic

SEQ ID NO: 6222 - protein, 176 aa, Artificial Sequence
  Synthetic
RELEELLKRNERTLRELAKRVKRLLEENKETVRRIEERLRRVLTEVEKISRDIRDRVDSEDLRRLLEELDKRSKEVVEEIEELLRRSLKRLKEVLDEIRKLVKESLEEIRRAAKDVDEEVRERVKKVEDENRKLLERAEREIKKVAEENRRLMEKMKDDVRKANKRNKELLERRTK

SEQ ID NO: 6223 - protein, 176 aa, Artificial Sequence; identical to SEQ ID NO: 6222
  Synthetic

SEQ ID NO: 6224 - protein, 176 aa, Artificial Sequence
  Synthetic
SEVEKVLRENEKTLREIEREIDRVLRDNERTLKEVRERNEEVNRRVEEDSKRVKDEVRSKKVEEVIKRIDERSKETLRETVERIEESLRRLKKALDDVRDLIRRSLKRVEEAAKDIDEKARERIKRILDENRKVLREIERKIREVLERNKKVLEEVRKSNEETNDRNRKLLEELRR

SEQ ID NO: 6225 - protein, 176 aa, Artificial Sequence; identical to SEQ ID NO: 6224
  Synthetic

SEQ ID NO: 6226 - protein, 183 aa, Artificial Sequence
  Synthetic
SVDERVEDLRRDVERVLRELRKSNEESIRRSEEIVTRLEEELKRNSKEVEEVLKRLEDELKDDEDKLREVRELIERVKKTNEDVLRRVRELIERDEEVNRRSLTETDDLIRRVRKVVEEARRLTSKDLEKALRDVEKLIREIRERNKEMLRRSEEILKEIEKRARDMSRESKRLIEDIERRTK

SEQ ID NO: 6227 - protein, 183 aa, Artificial Sequence; identical to SEQ ID NO: 6226
  Synthetic

SEQ ID NO: 6228 - protein, 183 aa, Artificial Sequence
  Synthetic
SVEEKVDRLKRRVEEVLKELKKSNEDNTREVREALKRLKKAIEESIDRSRKILEDLRRKLKDDEKKLREVEELIKRDEETNRRVLRRVEELIRRVEEFNEESLRRTERLIEEVKKVVDEARRLTDEDLERALKEVEELIRRIREENKEMSERSKKIIRKIEKDVKKALDDSERVLREIAERTK

SEQ ID NO: 6229 - protein, 183 aa, Artificial Sequence; identical to SEQ ID NO: 6228
  Synthetic

SEQ ID NO: 6230 - protein, 183 aa, Artificial Sequence
  Synthetic
DVEKKVKELLDEVRDALRRLRKSNKDNTDEVDRALRELEETNKKSIEDSRRIVEDLKRKLKDDEDVLREVEELIRRDEETNKRSLEEVKDLIKRVRDVNEESLRRTEDLIRRVEEKVKEIERLTDREADKVLKRVKEEIERIERENRRMSEKSERLIREIRKRNKEMLDRSKKLLEDIKRRVT

SEQ ID NO: 6231 - protein, 183 aa, Artificial Sequence; identical to SEQ ID NO: 6230
  Synthetic

SEQ ID NO: 6232 - protein, 180 aa, Artificial Sequence
  Synthetic
KEVEEILTESEDMNRKIDKLVKEILDESEEMNRRIRELVKRIVEELRELLREIRRLAEERDKDDVLRRLKELLKEIKEKARKVIDELRRLSEEIKKKIDDVLDELRRASEEVERKIREDKNEEVRDRLRRSHEKNKEVLDRIRKRVKESHEKNEKSLREIEETVKKLERDVERLLREIKR

SEQ ID NO: 6233 - protein, 180 aa, Artificial Sequence; identical to SEQ ID NO: 6232
  Synthetic

SEQ ID NO: 6234 - protein, 180 aa, Artificial Sequence
  Synthetic
EEVERILKESRDANERIKKLVEDILRRSKELNERIRDEVRKILAKSEEVNRRIRRLAKERDKEEVLRRLEEMSKKVKKEIDEVIEKLERLSEEIRRRIEEVLERLKRMSEEALEKIKEDKNEEVKEKAKESHKENKKVLDRIKRELEKSHEENKKSLDEIRDRVRRSHEKNRKVLEEIRK

SEQ ID NO: 6235 - protein, 180 aa, Artificial Sequence; identical to SEQ ID NO: 6234
  Synthetic

SEQ ID NO: 6236 - protein, 180 aa, Artificial Sequence
  Synthetic
EEVERILKESEDMNRRIRDLVRRIAEESDKVNREIRKLVDEIRRKLDRVLREIEDLIRKRDKEEVLRRLRKLLEEAKEEIERVLKRLEDASREVAKKIRDVLEELRKMSEEVLEKVKEDKNEEVKKRAEKSHRENEKSLREIRKELEELHRKNKKSLEEIRKTLRKLEEKVRKLLEDLRR

SEQ ID NO: 6237 - protein, 180 aa, Artificial Sequence; identical to SEQ ID NO: 6236
  Synthetic

SEQ ID NO: 6238 - protein, 180 aa, Artificial Sequence
  Synthetic
SRVEEILRESKRMNDEIREKVKKILKTSRDMNKRIEDRVREILKKSEDLNRKIRKLIDDRDKKEVVDTLRELSKEIEKEAREVIEELERISKEVHDRAREVIKELEEISDDVRRKAERDDKEEAKRELEKSHKTNEKVLRDIERRVEDSNRENEDSLRKIERAVTESHRRNEEVLERLER

SEQ ID NO: 6239 - protein, 180 aa, Artificial Sequence; identical to SEQ ID NO: 6238
  Synthetic

SEQ ID NO: 6240 - protein, 180 aa, Artificial Sequence
  Synthetic
EEVERILEESKRLNDEIRRKVDEILRKSEEINERVRRLVEKIRTDLERVLEEIRDLADKRDKDEVLKRLEDALKEALDRARKVIRELEEMSKEIEDEIRKVLEELERLSREVERKLREDDKEEVKRRLEESHKDNDRVLKEIERRVRESLRRNRESLRRIDEKVKELERRVEKLLREIKK

SEQ ID NO: 6241 - protein, 180 aa, Artificial Sequence; identical to SEQ ID NO: 6240
  Synthetic

SEQ ID NO: 6242 - protein, 180 aa, Artificial Sequence
  Synthetic
EEVERILDESKKMNDDIRRKVKEILDESEKLNEDIRRLVKEILEKSKRVNDRIRKLAKDRDKEDVLRELKKMSEDVLDDARKVLETLKKLSEDVRRKIREVLKELEKASREVERKVREDKNDEVRRRAEKSVRENDKSLKEIEDEVRRSVEKNEESLKRIEDEVRKSHEKNKKVLDEIKK

SEQ ID NO: 6243 - protein, 180 aa, Artificial Sequence; identical to SEQ ID NO: 6242
  Synthetic

SEQ ID NO: 6244 - protein, 180 aa, Artificial Sequence
  Synthetic
SKAEEVLKEIRERIERIRKRAEDVLRHDEESLKRAEEVNRKMEKESRRINEEIRDRVRKEGGRDKEKVDRLLEELHRVDEESIRIVERLLEHNRKSTEDIKDEVRKLLERLKEVIDEVRRAGVDEKDVRKVEDDIRRVIKKLKEELDRSADKSRDVVRRLRDSNKKLNDKNRRDIEEIKK

SEQ ID NO: 6245 - protein, 180 aa, Artificial Sequence; identical to SEQ ID NO: 6244
  Synthetic

SEQ ID NO: 6246 - protein, 180 aa, Artificial Sequence
  Synthetic
DSEEEVRERIRKIIEDVKRIIEEVLRRDDKILKEIEKRNRDMLKRSKEINKEARDRVREAGNRLKEEIRKLIKELHDVDRESIKRVEDLIREVRKSSDKAEEEVRRMLKRLKDVVDTVRKAGVDDRSVRELERRIKEVIDELRELVERSKRKVDKLLKDLTRSNEKVNRENREDLERLEK

SEQ ID NO: 6247 - protein, 180 aa, Artificial Sequence; identical to SEQ ID NO: 6246
  Synthetic

SEQ ID NO: 6248 - protein, 174 aa, Artificial Sequence
  Synthetic
DDERRAKKAAEDAAKRLKEIAEKAHRISEKALEELKRINDDANKISEDALRRLEKLKKEGAPEEAAERAARDSLRLIREAAERSREAAERSLRLIEEAAKEAEDAARDALEIIKTLAKSEEAKELAKKIKEIADEARKRAEDNARTNKEAAERSKENADRNAEENKKAAEKAKR

SEQ ID NO: 6249 - protein, 174 aa, Artificial Sequence; identical to SEQ ID NO: 6248
  Synthetic

SEQ ID NO: 6250 - protein, 174 aa, Artificial Sequence
  Synthetic
KDEDEVRRRVEELLKRNKELVEEIHKLSEDALRDLERINEEVNRISDEMRRRLDKLKKDGIPEEVLEDVVRRSLELIERLLRESRKVAEDSLRTIKEMLKRSEDIVRRVLEEIDRKIKSEEAKKLKERVDRSLKESEKEVRENLERNRKLLDESRRNAEENLRENKRVLDELRR

SEQ ID NO: 6251 - protein, 174 aa, Artificial Sequence; identical to SEQ ID NO: 6250
  Synthetic

SEQ ID NO: 6252 - protein, 174 aa, Artificial Sequence
  Synthetic
SEEDEVRERVKRVLDELRKINEDLNRISREMLERNKDILRRIHEISKRALDKLKKLKEDGVPEDDLRRVVEDSLRLIKEALERSERLVRTSLKLIKDMLRRSEEVARRILDDIRKRLKSEEVRKLLEEVKDSLRKSEENARRNLDENRRSLKKSEDEVRRNLEENEDTLRKLEK

SEQ ID NO: 6253 - protein, 174 aa, Artificial Sequence; identical to SEQ ID NO: 6252
  Synthetic

SEQ ID NO: 6254 - protein, 182 aa, Artificial Sequence
  Synthetic
DEMDEVRRTIKKLDKDSRDKVRTVEEKIRRLDEESRRENEEIVRKIEELLEEIERRVRSSTDERVLRELVRRLKEVLDRVEKDSRETIKKNKRALDKARREIEEILKENEKALDDAKKVVDELNIDEKEVKKIKEESDESLKEIEKLLREIEEESKRSLREMEKTLEDIERRVRRVLEEIKR

SEQ ID NO: 6255 - protein, 182 aa, Artificial Sequence; identical to SEQ ID NO: 6254
  Synthetic

SEQ ID NO: 6256 - protein, 181 aa, Artificial Sequence
  Synthetic
SIEELAKRNEEENEKAAEDVERLAEEVKERAERVARESEKLAREAEKEAERVAREIRRDRSDDKDAARLVEEAAKEARRAAEESARLIEEAAKKAEKAAEDVKREIKKTAEDLKRAADKAETEEAAKRASEENRKAVRDAREKARRAAEEAKKLLDEARKHSEEAAKRAKELLEEAKKRAD

SEQ ID NO: 6257 - protein, 181 aa, Artificial Sequence; identical to SEQ ID NO: 6256
  Synthetic

SEQ ID NO: 6258 - protein, 181 aa, Artificial Sequence
  Synthetic
KIEELMKRNEKENREVLERVKELADRNRRENEEVVKKSKKELDDLKRKIEEVLERIKRERKEMKEVEKLVREVLKRIEDLIRESVDRIRRTVEELEEVAKDVERKIRETIRRLRELAKRLETEEVVEKVSRENKKLVADIEDEVRRASTRNKKLVKDIEKHSEDVVRELEKLLKDIKDKVD

SEQ ID NO: 6259 - protein, 181 aa, Artificial Sequence; identical to SEQ ID NO: 6258
  Synthetic

SEQ ID NO: 6260 - protein, 181 aa, Artificial Sequence
  Synthetic
SIEDEARRNEKRNREVLKRSKDLLDEIARKIEEVEKRIRDLVKRVKEEIDEVLRRIKRERPDLKDVIELVKRVAKTARDMIEKLEDELRKILEEVTKLIEESEKRIKETVDRLKEAVKNIEDDELLRRVSKENEDLVREIEDHTRRVLETIERKLRRVEEKVETVVREIKRRLEDIERRVK

SEQ ID NO: 6261 - protein, 181 aa, Artificial Sequence; identical to SEQ ID NO: 6260
  Synthetic

SEQ ID NO: 6262 - protein, 174 aa, Artificial Sequence
  Synthetic
EEVDRVIERIKRLLEEVERKIRRASEKNRRLIEKSRKELEKVSKENKDLIDRVRELRDAGVDKREIKDLLRRISEEMKKVIDELKRSNEKVSEELRRMLKEIREDLKRIVDEARERVKGEKVKTVEKEIREVIERADEIIERNERENKKSVEEIEEILERNKRRNEEALREVDK

SEQ ID NO: 6263 - protein, 174 aa, Artificial Sequence; identical to SEQ ID NO: 6262
  Synthetic

SEQ ID NO: 6264 - protein, 170 aa, Artificial Sequence
  Synthetic
DELDRAIEEVKRLLDEIRRRLEKVVREVRKLNEEIREDLRRVVEEVRRTNKEIRDRVRSEEARRLAEESLRLLEEALERIRRLIERSLRRIRRLLEEIEKLARDILEEIRRIIDSDKVRRLEREVEELLKTVEELIRRLEEHTRRVLKEVDEEIKRLKEHTEKVLRDVEK

SEQ ID NO: 6265 - protein, 170 aa, Artificial Sequence; identical to SEQ ID NO: 6264
  Synthetic

SEQ ID NO: 6266 - protein, 187 aa, Artificial Sequence
  Synthetic
SAEELVKELERRIEELLKELEEIVRRNRKHSEDVLRKIKELVRDVLRRVKEALKDLTKKVRTREVRKLVEELIERLEELIERIDRTAERLITESRRTLEEIRRRIKELIDDLRRLLREIKKEVDRGLDEDVVRKLIKEIDDRLKEVKKEVEKLSDENRRLNEDVERRIKELLDDIERLLKEIRDTVT

SEQ ID NO: 6267 - protein, 187 aa, Artificial Sequence; identical to SEQ ID NO: 6266
  Synthetic

SEQ ID NO: 6268 - protein, 187 aa, Artificial Sequence
  Synthetic
DVEDIVRRIRERVKEALERLRKTNDDNRKHSEEVLRKLAESDKRTMERIERVLEELRRRSRTREVTKLVEDAIEKLRRRVRESHERVKRLFEDSKRTVDESLERVERAIEELKRVIDEVEELARRGLPKEVVREMKRKIEELLKRIEDENKRLSDENRELNKRVEEDNRRLNKEIEDELRKVEEDVK

SEQ ID NO: 6269 - protein, 187 aa, Artificial Sequence; identical to SEQ ID NO: 6268
  Synthetic

SEQ ID NO: 6270 - protein, 187 aa, Artificial Sequence
  Synthetic
DLEELVKELEKRIEDVLRTLRKTNKDNEKAVEESLRKLEDELRKLKEKIDRLLDKLTKESRTEEVEKLVRELIRELREVVRRIEELIRDMARRSKESVETSLELVERLIKKLEELLRRVLELVAKGLPEEVVRRIIEDIRRLLEEVKKVNEDLSEENERLNRDAERRVREAIKEVEDLLDEIEKTVR

SEQ ID NO: 6271 - protein, 187 aa, Artificial Sequence; identical to SEQ ID NO: 6270
  Synthetic

SEQ ID NO: 6272 - protein, 187 aa, Artificial Sequence
  Synthetic
SVEDELRKLEEKIRRLLEELRRTNDENRRHSEKVLEELRRELEKLKRRIEELLRKLREESRTREVTKLVEDLIRKLRELVERIEREVEKLVRDSRRTVEESDKLVKDVIKRLRELVREILKLAREGRPEEVVERLIRDVERKLREVKKENDRASKENEDLNREVKRRAEKLLRDVERLLREVEKTVK

SEQ ID NO: 6273 - protein, 187 aa, Artificial Sequence; identical to SEQ ID NO: 6272
  Synthetic

SEQ ID NO: 6274 - protein, 187 aa, Artificial Sequence
  Synthetic
SAEDRLRELEERIRRALKELEDTNRRNEEHSKKLLEELARSDRETEEEIKEALKRLTERKRDEEVEREIKEMIRDLERVVRESHRTVRELVKESERTVKESLERVKRAIDELRRIVEEIRKLIEEGLPEEVVDRLIREVEERLRDVRRLNEELSKRNKELNDRVREVNEELNRRIKKRLEEIKRRVE

SEQ ID NO: 6275 - protein, 187 aa, Artificial Sequence; identical to SEQ ID NO: 6274
  Synthetic

SEQ ID NO: 6276 - protein, 187 aa, Artificial Sequence
  Synthetic
SLEDLVRTIREEIERLMKEAEDTNRRNKEESEESLRRLKKLVEDIDREVKEVLDRAEKNTRTDEVREKVRRMIESLRRDIEEIRKRIEEAVKKSEDVVRKSLEEVRRAVKRLRDLVDKILELVEKGLPEKVVEELIRRIKDELKKIRERNKELSDRDKKLNEDVEREVRKLIDEIRKKLEDVERTVK

SEQ ID NO: 6277 - protein, 187 aa, Artificial Sequence; identical to SEQ ID NO: 6276
  Synthetic

SEQ ID NO: 6278 - protein, 180 aa, Artificial Sequence
  Synthetic
REVDKVREDVKRLIKEIEDRVRKVLKEDEDLIRELRERVKKVSKENKEVVKTLRELVRDLRGKRERIREVIKRADELLERAEKEVRKVIDDLRKTTEDALRDLERIIREAKKTVDDVLRRRGIREELVKELEKRIREVLERLRRLIERSKEEIDRVLREVEEDVRRNKEENKRLLEEAER

SEQ ID NO: 6279 - protein, 180 aa, Artificial Sequence; identical to SEQ ID NO: 6278
  Synthetic

SEQ ID NO: 6280 - protein, 178 aa, Artificial Sequence
  Synthetic
DEKDKVRKTVEDILREIEKIVEDLVRRNERVDREIRERVRELLRRDDEILKRMEEVKRRRAPEEVLEEIAERLRRSSEEVLKLIRELIRRLKETVKDAERLIRELIKRLAEVVDTARKEGVEEREVTKLKEDIDRLLEKLERDLDELRKRNDELLKELEDRVRKSKEKVEKILRDVRR

SEQ ID NO: 6281 - protein, 178 aa, Artificial Sequence; identical to SEQ ID NO: 6280
  Synthetic

SEQ ID NO: 6282 - protein, 181 aa, Artificial Sequence
  Synthetic
SIEDKLRELKERHKELSKRIKEELERLTEEHRRVSEKIRKSLEEDKRRADKVLERIRRERSDSEKLVRDLEKVLRDVERLYREVIKRNEEALDRVRRLVEEIIERNERMLRKVEELARRIKTEDVLRKVEEDSREVLKDSKRLLDEVATRSEEMLRRSEELLKRIHETSKKVLDEIKTKLK

SEQ ID NO: 6283 - protein, 181 aa, Artificial Sequence; identical to SEQ ID NO: 6282
  Synthetic

SEQ ID NO: 6284 - protein, 181 aa, Artificial Sequence
  Synthetic
SIEDLARDLERRHKELSEDDKRKLDELRKRHKDVSDEARRSLERDERRVEKVEREITKRRSDDKDVVTELRKVLEEIRRLYETVVRDNERVLRDIERLSRRTIEENKKVLDELRELARRIKTEKVLDDVRRRSDKMLEDSRRLTREVEETSKEMLERSRRLLEEIHKESDRVLREARERDR

SEQ ID NO: 6285 - protein, 181 aa, Artificial Sequence; identical to SEQ ID NO: 6284
  Synthetic

SEQ ID NO: 6286 - protein, 177 aa, Artificial Sequence
  Synthetic
RIEDILRRLEEHHRRLDKENKEILERLKKHHEEVLRKIKEILERLEREARDIERKIRELEEVLRKIREILERVKELADRLLEEVERSLREVEKLIRTSSDLIRRSLETVKRAAERLETDEVVEKVVREVEDTNEKIRRRSDEVRKEVEDTNRRIDKRLKEVEEEVRRLLDEVRKESE

SEQ ID NO: 6287 - protein, 177 aa, Artificial Sequence; identical to SEQ ID NO: 6286
  Synthetic

SEQ ID NO: 6288 - protein, 175 aa, Artificial Sequence
  Synthetic
SELEDVAKKAEDLLTKSAEILKEVVDRHRRLNERSEDEARRVEEEHRRTNKKLLDLARRGDRDKEEVKRIIERSLDRVREVFKRVKRLNDESLKEVERVIEEVRRLNEEILKTVERDVDSEELRKLKKRIEDISREHERILRELREHVERVSDKHRKILKELEEDVERILREVTK

SEQ ID NO: 6289 - protein, 175 aa, Artificial Sequence; identical to SEQ ID NO: 6288
  Synthetic

SEQ ID NO: 6290 - protein, 175 aa, Artificial Sequence
  Synthetic
SEIEKVVEDIKRLLEESKDRLRKAEEEVRDLSRRSREKLRRAEEDIKRLLDEIERMLRAGERDKKEVEDIIKEIVDKVRTVATDVERLNKEILERVDRLIEELRRLNEEILDRVRKDIDSDELRKLAEEIERVSEEHKRILDELRDHLRKNTKDVRDILRELEKEAERLLRELRR

SEQ ID NO: 6291 - protein, 175 aa, Artificial Sequence; identical to SEQ ID NO: 6290
  Synthetic

SEQ ID NO: 6292 - protein, 175 aa, Artificial Sequence
  Synthetic
KDVEDVLKRVKDVNREVEKRLEKVIRDDEKINEEINRRLDEMAERVKRVNETVEDIARKENIREKLEELIKESEDTIRKVLREVEELVRELRKTVDDALEEARDLVRKSEELIERIVRKEKLVEELRRESDTSKKRVEKLIRELKEKNKRSEERARRIIEKLKKESKDSLKRVKD

SEQ ID NO: 6293 - protein, 175 aa, Artificial Sequence; identical to SEQ ID NO: 6292
  Synthetic

SEQ ID NO: 6294 - protein, 174 aa, Artificial Sequence
  Synthetic
EEKEILDELEKEVRDLNRKNKEILRRLEETARDLHRRNEEILDRIRKRVEELKRRVREVRELLDEIRRILEEIKRLIEAVSRKIKKVLDDVRRLIKEVDDKSRDVLRRVERLIRQNVDKDTVAKEAKRLIRDLERLSREIEERVRRLIEEVKEESERIRERVTRLIKEVEDRRK

SEQ ID NO: 6295 - protein, 174 aa, Artificial Sequence; identical to SEQ ID NO: 6294
  Synthetic

SEQ ID NO: 6296 - protein, 174 aa, Artificial Sequence
  Synthetic
DDEEILKELEERVKKLHEKNKRILEKLKREVERLNDENRRILKEVKEDVDRLLKEVKEDKDLLEEIKRALERIERLMREVDKRSREALERVKDLIRKVSRRIEEALEEVRKLITQNVDSETVARRVEEMIKEVEELSKEIEERAKRLIDRLRELSKRILEELKRLLEEVREKRR

SEQ ID NO: 6297 - protein, 174 aa, Artificial Sequence; identical to SEQ ID NO: 6296
  Synthetic

SEQ ID NO: 6298 - protein, 174 aa, Artificial Sequence
  Synthetic
REEDEVLEDARRLSEESRKKLREVERRAKELSDRSRKRLRDVKRRVDDALRKIEDLRRRGVDKRDVLRVVEKVRDDVEKLIREVKDLNRRILEEVRRLIKEVEDLNKEVLDKVRRELKSEKLRELEEEIRRNSKDVKEVMKELDKHIKRNSEEVDKVLKELEERLKRLLDRVRK

SEQ ID NO: 6299 - protein, 174 aa, Artificial Sequence; identical to SEQ ID NO: 6298
  Synthetic

SEQ ID NO: 6300 - protein, 174 aa, Artificial Sequence
  Synthetic
SDEDRVKDKAEELSRRSREELERVKEEAKRLSDESKKRLEEVTRRIEKVLREIRELRERGVDKREVKRVVDEVVDTVRKLIKEVEDLNREVVERIKELIKEVERLNKEVLDEVERELKSEKLRRLREEIKKNSDEVKKVLRRLEENLRDNTRRVREVLERLEDEARKLLKDVKK

SEQ ID NO: 6301 - protein, 174 aa, Artificial Sequence; identical to SEQ ID NO: 6300
  Synthetic

SEQ ID NO: 6302 - protein, 174 aa, Artificial Sequence
  Synthetic
SEVDDVLRRLKELSERSEKTLEDIRDEAEKLSKESEDLLREVLRRSEKVNEDIRRLREKGVDKRDVAKVVEDALRESEDLIRKVEKRNEEVLRRVEELIKRVEDLNREILRRVDEELKSRRLEKLRREIEDNSRRVREVLKRLKENIKRNTDRVREALKRLEREHEEVLREVET

SEQ ID NO: 6303 - protein, 174 aa, Artificial Sequence; identical to SEQ ID NO: 6302
  Synthetic

SEQ ID NO: 6304 - protein, 183 aa, Artificial Sequence
  Synthetic
SIEEAITRLRKEVEDSNKRSEDVIRELHERDKESLEEVREIIKRLKDKVRTLLEEVDKRVKSERLERVRRLLERVDRVVDKVLRELKKLVEDSNELVKKVATESHKINEDIKKVVDDAARRIETEEILKEVLKRLRKLLEDNERVLDEARRRVEKTNEEIKEVLKRVAEEVDRLIKEVREEVE

SEQ ID NO: 6305 - protein, 183 aa, Artificial Sequence; identical to SEQ ID NO: 6304
  Synthetic

SEQ ID NO: 6306 - protein, 184 aa, Artificial Sequence
  Synthetic
SIDEIIEELRRRIEELRKEAEKIIRDSKKHLEDNKRDADRVIKESKEEVDKLLKEIEEAPISEELLRRVRDVIRRIEESTKKALEDIKRTIDEIKKSTDDALRTVREVIKRIRDLVDDVRKRIRTEELLEEVRKRIEDLLRELRDILRKLLERDKRLSKESERLVREMLREDRRLLDELRKEVK

SEQ ID NO: 6307 - protein, 184 aa, Artificial Sequence; identical to SEQ ID NO: 6306
  Synthetic

SEQ ID NO: 6308 - protein, 184 aa, Artificial Sequence
  Synthetic
SIEEIIRDLRRHIKENAEEAEKVIKESEDHLRENKKRAEDVIRRLEEELRKLAERVRRAPISEELLRRLEELIEELEKLVRDALRAIEKTIKDIEDSTRRVLEKIKETVKRLKELVDEASRRIRDEELLKRAVDAVRKLSEDSKRLVEEALRRDEELSKRSRDLVEEVRRRAEELLRRIEETVK

SEQ ID NO: 6309 - protein, 184 aa, Artificial Sequence; identical to SEQ ID NO: 6308
  Synthetic

SEQ ID NO: 6310 - protein, 178 aa, Artificial Sequence
  Synthetic
SSKDDVRRRMKEINERDKRLLDEVLRRLEKLIEELKRHTEEVERDADRIIEEIERMLRNGASEETAKRLLEELREKLEDVRRRDEKILEDIRRDVERALRESEKSLDELRRALEKVKDDGSVEERIIKEIRDLIRENEERNKEIVRRIEELLRELEKRSRDVIKRIREKLDRLRKRVE

SEQ ID NO: 6311 - protein, 178 aa, Artificial Sequence; identical to SEQ ID NO: 6310
  Synthetic

SEQ ID NO: 6312 - protein, 178 aa, Artificial Sequence
  Synthetic
SKVEEIERRIREEVTRSEKEDRDNVREIRKLVEELRRESKRILDESRRLVKRLIDEAKDLEELIRRIREMLKRSEENNKRIIDDLTRALEELEREHRENNKRLRELLRELEEKAKRIKDDEILKRIEEEVRKILEDSRRSTEESHEKVRRIITKIRKLLEDDERRNRKVVREAEEAMR

SEQ ID NO: 6313 - protein, 178 aa, Artificial Sequence; identical to SEQ ID NO: 6312
  Synthetic

SEQ ID NO: 6314 - protein, 178 aa, Artificial Sequence
  Synthetic
SKLEELLRRAREVARRLKEELERILKEVEDRVRKSEKEDEDNVKRITDEMRKLKERVPDLKELLDRIDEMLERLRKLHEDNNKRLRDEIKKLEDVVEEILRRLEKVLRELEEKVARVKEDRVIKRIEEDVRRVIEEIKRLLRELEEEIRRILDESRESTERSHRTARKIVEEVERAAK

SEQ ID NO: 6315 - protein, 178 aa, Artificial Sequence; identical to SEQ ID NO: 6314
  Synthetic

SEQ ID NO: 6316 - protein, 178 aa, Artificial Sequence
  Synthetic
SKMETIERRVEEAIRESEELNERDEERVKKVIDELKKLIDDIRRRLEEALRELKKVTDDGSPREDIDRKIKTVLRELEELIKRIRERIKEILRENEKTVRDDRRRNEELRAELKKLVDEGAVTEEILKKVRELIEETKRRTDDLHKKVKERVDDIKRRLDELLEEAKRALDEIRERVK

SEQ ID NO: 6317 - protein, 178 aa, Artificial Sequence; identical to SEQ ID NO: 6316
  Synthetic

SEQ ID NO: 6318 - protein, 178 aa, Artificial Sequence
  Synthetic
SAVEEIKRRLEEIIRDLERLIDDDRKRVEEMVKRIEDLIKKDEEDVREALKKLEEVVTRGEPREDIKRKIRELLARNRDTLRRIKEELEKILEENKESVREIEKKIEDAKRELRKLVEDGVLEEEILERADRLVKEIKEKLDRLVKTSEELIRRLEEELRRLHEKVKELMKRAEEKVR

SEQ ID NO: 6319 - protein, 178 aa, Artificial Sequence; identical to SEQ ID NO: 6318
  Synthetic

SEQ ID NO: 6320 - protein, 181 aa, Artificial Sequence
  Synthetic
SREDVLREIRRLVEETKKENEKILERLRRLVRTVERRNDEVVKKVRTLVKRLEEEIDKTVKDKDKVEKLRRELDKIRRKLEELARRSKEDLKRILEEVDRLSEEDKRKNDRVLEEAKKAIDNDVDLDELLRKLKEDLDRSKEELKEIEKRVRELLERNKRKTEEVEKEVKRDLDDIRRKLK

SEQ ID NO: 6321 - protein, 181 aa, Artificial Sequence; identical to SEQ ID NO: 6320
  Synthetic

SEQ ID NO: 6322 - protein, 181 aa, Artificial Sequence
  Synthetic
SEKEALDEVRKRVEDVRRDNKRILEESERLNRESRKRNRDILERLRKEAEDLKREIDETVKDKDKVKELDDRLKKVLKEVEDLVRESERDLERIHKRSRDLVRESERDLDRIEKEIKDAADRDVDLDKLLEDLERLLKENLDRLRKILEEDRRLNKENNDKLKEIEKRVRELLKDIKDKLK

SEQ ID NO: 6323 - protein, 181 aa, Artificial Sequence; identical to SEQ ID NO: 6322
  Synthetic

SEQ ID NO: 6324 - protein, 178 aa, Artificial Sequence
  Synthetic
KEVEDVLRKIRDLVRKNLEDAERVVEEAKRLIDENRERLREVLREDEELNREILKRLRELKDEDALRDLERKLKEVHDRTKKLIEDSERHLEEVLRKVEKVIKDSEKHLREVLDEVEKAGLDEEALKEVRRLIDELRKANKRILEEIRDLVRRLREENEEILRRLKRKNERTADEIRK

SEQ ID NO: 6325 - protein, 178 aa, Artificial Sequence; identical to SEQ ID NO: 6324
  Synthetic

SEQ ID NO: 6326 - protein, 178 aa, Artificial Sequence
  Synthetic
SEVEDVLRRIRELLEEIKRRLEDVRRRIKELLDRNRRESEDVLRRDKELNDEVRDKLRKRKDEKVLEELEREIKKIHDDTKRAVDRSREDNKRILDEVERAIEELERELERVLDEARKAGVEERMLKTVEDLVREVSKEVRRILEELRDEVRKSEEENRRILDKLEKENRKTAEDVKR

SEQ ID NO: 6327 - protein, 178 aa, Artificial Sequence; identical to SEQ ID NO: 6326
  Synthetic

SEQ ID NO: 6328 - protein, 178 aa, Artificial Sequence
  Synthetic
SEVEEVLRRIKELLDRNREELKKVRERIKRLLDRNREKSEEVRERDKRLNDEIKKRLDEDKDEKVLRKLKRLLEEVHKRTKEMADRSREDNKRILDEVEDVARRSKEDNERILKEAEEAGVEKRVLEEARRLVKKSEEDNRRILKELRELVKESERENEEILRELKKLNEDTKKRIED

SEQ ID NO: 6329 - protein, 178 aa, Artificial Sequence; identical to SEQ ID NO: 6328
  Synthetic

SEQ ID NO: 6330 - protein, 178 aa, Artificial Sequence
  Synthetic
DEVEEVLRKIEELIRENIKRAREVLEEDKRLNERNKRESEKVLEEDERLNREIEKELRKLKDEEVLRRLKEKIDEVHKRTREMFERSRDDNRRIHEKTRRAIEKSREDNKRILDEVRKAGLDEEVLRRIKKLIEESMEDNERILRDAERLNRESKERNERILKRLKKRNDETRKEVEK

SEQ ID NO: 6331 - protein, 178 aa, Artificial Sequence; identical to SEQ ID NO: 6330
  Synthetic

SEQ ID NO: 6332 - protein, 179 aa, Artificial Sequence
  Synthetic
SSAEEVKERSKRINEEIEKTLEKMLRESRRTNEEIKKTLKRLAEEAEKLLRDVERLVRAGVPKEDLKRLLKEIKERVEKLLRELEELIKRDNDRVEKALKDLRDLIKDDTDKVEDVRRRGDLDEDIIREIRELNKRTRDKIEEIIERIRKLNKETRDRIRKIMREIEKKIRDLAEEIRR

SEQ ID NO: 6333 - protein, 179 aa, Artificial Sequence; identical to SEQ ID NO: 6332
  Synthetic

SEQ ID NO: 6334 - protein, 179 aa, Artificial Sequence
  Synthetic
KSMEEARKKSKEINDRILDRLKKVLEESRKINKDIKDTVERLRERSEDINRRIKELVDSGRDKKDLRRLIEDDNTKVRKALEDLRELIRRDNERVKKVLRELRELIKRDTEEVEDVLRRGDLSEEIIKEIRKLNEETRKEIERIAREAEELNKRTADKIETIIREIEKLNKKLKDDIEK

SEQ ID NO: 6335 - protein, 179 aa, Artificial Sequence; identical to SEQ ID NO: 6334
  Synthetic

SEQ ID NO: 6336 - protein, 176 aa, Artificial Sequence
  Synthetic
DEVRELVKEIEELIERIERTLRKMTKDSRDLNRKINEKLKKVLEDSRRLNEEIKRTIDSNPEKKERARELLERDEELIRRVREELKRLLEEDNERIKEAEDRLARLLEEIERRIREIDVDESILRRLEKLLEELRKRVEDIIRELEKLNKESREEIDKIIREAERLTEETERRARK

SEQ ID NO: 6337 - protein, 176 aa, Artificial Sequence; identical to SEQ ID NO: 6336
  Synthetic

SEQ ID NO: 6338 - protein, 178 aa, Artificial Sequence
  Synthetic
DEMEELLERIRRLIREIDERLKEMLKRSRELNRELNERNKDVLRRIKELIDRIRRLIERDNDKKLVERLLEELERVIREDHKRVRKLLDENRKLSKELEDEARRLLKELEEVIDRVRRAGADERILRELKKLVDDLRRRIKKILDESKELLERSEKKADESNKELRKLVEELRKEADD

SEQ ID NO: 6339 - protein, 178 aa, Artificial Sequence; identical to SEQ ID NO: 6338
  Synthetic

SEQ ID NO: 6340 - protein, 178 aa, Artificial Sequence
  Synthetic
SRVEEIERRIRELIKRIEDRNRKMLETSRRLNEDINRRLRELLERIRKLIEEIEELIKRDNDKDTARKLLKEIEDLIRRLSEEAKELLDENRRLSEKDHREARRLLKEIEDLIRRAEEDGVDEKILRDLEELLKELARRLERSNEESRRLLEDSRRKMEKIIRELEKLLDDLRRKIEK

SEQ ID NO: 6341 - protein, 178 aa, Artificial Sequence; identical to SEQ ID NO: 6340
  Synthetic

SEQ ID NO: 6342 - protein, 177 aa, Artificial Sequence
  Synthetic
DEKEIDEEIERLVRDSKRRSRKVLRDIEELAKRVKEENDRVLEKLRKLIEDLKRKIDETIEDKDTVKRLTEKLETALRELEELSKENRRRLEEITKRVRELVRRDEEKNRDVERRVKEIPVSERLKEEVDRVIADSRRLNKEILDEVKRELDKLRKHLEDVLRRAEKMIRDIDEELR

SEQ ID NO: 6343 - protein, 177 aa, Artificial Sequence; identical to SEQ ID NO: 6342
  Synthetic

SEQ ID NO: 6344 - protein, 175 aa, Artificial Sequence
  Synthetic
SEVDKVREDVERLSARSEEKVREVLERVKRLLDKSKRDNEDVKRRVRELAERLRDLRRKGVPKEELKKRLEDIRREVEDLARRDKEKNKKILDEAEDLVKKLRDDNRRVEREVERAGIDKEVLDRIRRRIEENSKKIDDMVKKVRTLVKRSEEESERVLKELRDLMRDVERRIRE

SEQ ID NO: 6345 - protein, 175 aa, Artificial Sequence; identical to SEQ ID NO: 6344
  Synthetic

SEQ ID NO: 6346 - protein, 177 aa, Artificial Sequence
  Synthetic
SEVERVEKEIRDLSRKSNEDLKRILDEARELSKKSNEDTKRVLKETRDLLKEIADRLREVRDKRLKDRLREDLRRILERHKKLSEEDKRKNDEVLRDLRRKLEELKRRNEKVRDDVEKKGLDEEVKKRVEESLRENEKLLRTIAKEIEDLVRENRKVNEDVNREVEKLVRELEERIK

SEQ ID NO: 6347 - protein, 177 aa, Artificial Sequence; identical to SEQ ID NO: 6346
  Synthetic

SEQ ID NO: 6348 - protein, 183 aa, Artificial Sequence
  Synthetic
REVEELLKRIRELVKRNNEKTKRLLDESRRLNEEANRRLDKVLKELRDLAKRIKEELDEKGGEDERAKKRVEDMLRRLEELLREATKDSERMLKENRELVDRIREEDKRVLEELDKLVKEILERNKEDEDLEREVKKLLDENRESSERVIRESEKSLRDHAERTRKVREEIRKLLEELKRAVE

SEQ ID NO: 6349 - protein, 183 aa, Artificial Sequence; identical to SEQ ID NO: 6348
  Synthetic

SEQ ID NO: 6350 - protein, 174 aa, Artificial Sequence
  Synthetic
SEKEDIKRKLDDLLRRHREVSRESNRELKRLLEEHRRTSKRLDDEIKRLLREIEEAGASEELRRELEEIVTEVKKLIEEINRRLEDAVRKVHENNRKLDRELEEVVKTLRDLLRRNVDTETVRKEIEDIARRSKEKLEKNTRDVKRMVDRSKEELKRILKELEDAIREIKKKVD

SEQ ID NO: 6351 - protein, 174 aa, Artificial Sequence; identical to SEQ ID NO: 6350
  Synthetic

SEQ ID NO: 6352 - protein, 177 aa, Artificial Sequence
  Synthetic
SEKERILERLKELVERSNEKLERILRRSEKLFTDSNKELKDILDRARKLIEEIDDRIRKVKEKELKDELRKRLEEILKEARDLSEEDKEKSERVHRESRELSERDEEESRKVLEEVRSRDLDKKIRDDAERLITENKERNERVNKRDEDLLRRNRKENEELNRELERLVKEIREKLK

SEQ ID NO: 6353 - protein, 177 aa, Artificial Sequence; identical to SEQ ID NO: 6352
  Synthetic

SEQ ID NO: 6354 - protein, 177 aa, Artificial Sequence
  Synthetic
EEKERILETAKKLAEEIKRRAEEILKRSEELVRDSNKKLREVLEEARRLIKKIEDEIREIREDELKRRVREKLERILRRLRELSKEDLKRSEEVHRRSRRLLEELLEKLEEILRRLKSKPLDKEIEDEVRRLVREIEELLRDIERRDKELLDENRKLNEEVNRDAERLVRKIRKALE

SEQ ID NO: 6355 - protein, 177 aa, Artificial Sequence; identical to SEQ ID NO: 6354
  Synthetic

SEQ ID NO: 6356 - protein, 177 aa, Artificial Sequence
  Synthetic
SEVEELLRRIRELSKRSKDEIKRMLKEIRELSEKSKRDIERMLRRNEDLARKIKELIDRDNNDELVKRLNEESEKLAREARKRVERSIREIERLLEEIRRRVEESLRTLKEVLKEVEKNGVTEEIKREVEKLLEENRKLLEDLEEDVKRLIEENKRALEEVERESKRLNDESRERTK

SEQ ID NO: 6357 - protein, 177 aa, Artificial Sequence; identical to SEQ ID NO: 6356
  Synthetic

SEQ ID NO: 6358 - protein, 178 aa, Artificial Sequence
  Synthetic
DDLERVLKEIKKAADKIREDNKRTADKIRKRVKELDDETRDMLRRIRKLVKEIKERVRGREEARKVIEELKKLVDEVRKRNEKSIEELKKLLKEDRDLMRRVIEELEDLVRRLREEVRDDEALRRVEEEVERLIRDLRRVLKETSDRVRELIDKHRRLSEEVEKDVKRLIDELKKKTD

SEQ ID NO: 6359 - protein, 178 aa, Artificial Sequence; identical to SEQ ID NO: 6358
  Synthetic

SEQ ID NO: 6360 - protein, 187 aa, Artificial Sequence
  Synthetic
SEIEEILERIKKISEDSKRRLEDILRKAKKISDESRETNKKTLEDVRRIADEIRKRLEEAGGRDERDLRRLMKEVKERLEEMLKRDDELAKESIKILKDVLKELRELVKRSETELRRVIEELRRRVRDKDKLERVEREIRRLIKENKDIVERIERAIEELVRRNEKSVEDSKKDIKRLVDELDREAR

SEQ ID NO: 6361 - protein, 187 aa, Artificial Sequence; identical to SEQ ID NO: 6360
  Synthetic

SEQ ID NO: 6362 - protein, 180 aa, Artificial Sequence
  Synthetic
SEVERIKERIDKLVEENRKLVEEIEEEDRRLLEENREIVKRIEEEIEKLLRDLERRVKSEKAKEIRKKIKKARDELREVLKRSEEISKETIDRLKRLLEESKKELERLKRTLDEMAKRNEPEDVLRDILREIERLSKESKDRLKDLLRKSEELSKESKKLLKDILKKVEDLIREAREEAR

SEQ ID NO: 6363 - protein, 180 aa, Artificial Sequence; identical to SEQ ID NO: 6362
  Synthetic

SEQ ID NO: 6364 - protein, 184 aa, Artificial Sequence
  Synthetic
EEKERLKKSLEDLAKRIRDILRKHEEDSRRLSKEIRDVLRRHREASRKLVEEIKELIKSVRDEELVKELEKLLRELEKRSEDLLRELEKRLKELEDRSRDILRRLEELLRRLEERVKKALREVDGEEMLKRVLEELERIVRDIERRIKEASERIRKIVEDIKKRIKEADDRIKDIVREIAERIR

SEQ ID NO: 6365 - protein, 184 aa, Artificial Sequence; identical to SEQ ID NO: 6364
  Synthetic

SEQ ID NO: 6366 - protein, 177 aa, Artificial Sequence
  Synthetic
DEEEEALKDVERLLRRNEKLIEEHERRSEKLLRELEDVVRRHEERSKELLERIRERIKRLTDEDRVRDIERLMRELEEESRRTAKTARELLEELRRRSKETVERIEKSLEDLRRTVEREGVDEEVLKKLRKLSKESEDDIRKMSEEVEEIVRRIKRLLEEATRKLEELVKRIEERID

SEQ ID NO: 6367 - protein, 177 aa, Artificial Sequence; identical to SEQ ID NO: 6366
  Synthetic

SEQ ID NO: 6368 - protein, 177 aa, Artificial Sequence
  Synthetic
DEDEEAKREVERLLRENEKLIEDHKRLSEELVRRLEDLIRRHEETSERLLRELREIIKRQTDEKRVREIEDLLRRLKKRSDDTVRDIKRLIKELKDKSERIVREAEKSLKKLKEVVDRKGVDEDVLRELRDLSRRSKEEIKKMSEEIEKLARDILKRIREMTEEAKRIVKEIKDRIR

SEQ ID NO: 6369 - protein, 177 aa, Artificial Sequence; identical to SEQ ID NO: 6368
  Synthetic

SEQ ID NO: 6370 - protein, 186 aa, Artificial Sequence
  Synthetic
SEIERVLKELDEVSKKSLEEIRRMSEESRRLSKESIDRIREMLERAREKADRIRETIKREGGESEEARDRIKKLIDELRELLREVDERIKKSIEDLERLARETEERIKTSIRDLEEKVKEIAKRITDKDKLRRLRERVEELKKRNEDLLKEHRDENKRLIDENRDLVDKLRKTIKRLIDDLERRVR

SEQ ID NO: 6371 - protein, 186 aa, Artificial Sequence; identical to SEQ ID NO: 6370
  Synthetic

SEQ ID NO: 6372 - protein, 179 aa, Artificial Sequence
  Synthetic
SKVDELRKTVEKLLRELRDSLRRYEEESKRLLEELDDSLRRSKKTVEDLLREIKEILKRVRDEEVRKTVERVLRELKEILDRDKERVDRVKEENKRLLEKDRKTVEDVLRELEDLLEKIRKRPDDRAKERLERLVRKIKEDNKRSLTENERLVRKIKKENEDAIRRLKDVAKKIKEELT

SEQ ID NO: 6373 - protein, 179 aa, Artificial Sequence; identical to SEQ ID NO: 6372
  Synthetic

SEQ ID NO: 6374 - protein, 176 aa, Artificial Sequence
  Synthetic
SEKEELKKEIRRNLEENKDVLRRHEEENRRLKKRIKELLERHARTNKRLKEEIDRTIRDKDTAERVKRELDKLHKEAEELIREVLRRLDELHKTAEDIVRTSEKLLKEVEEELKDLDSRLLEELLRKLEKLSRDSKEKLKEISKRSKELVKRIERELEKMTKKSRDLVKKIKEEEK

SEQ ID NO: 6375 - protein, 176 aa, Artificial Sequence; identical to SEQ ID NO: 6374
  Synthetic

SEQ ID NO: 6376 - protein, 178 aa, Artificial Sequence
  Synthetic
SEVEELRKELERIVKETKDVAEELSRESEEVLKKSEENLRRLTEKSDDVLRRVAELIRSNRDTDTVVTEARDLLRRSDEHLEENLRRTDKELRDSDEKLKRLEEEHRKLSEEIKRRLDERGGVKELKERIERVNREVREEARKHHDKNRDIRRRVTELHKRHKERNEEIRRKVEEDAK

SEQ ID NO: 6377 - protein, 178 aa, Artificial Sequence; identical to SEQ ID NO: 6376
  Synthetic

SEQ ID NO: 6378 - protein, 178 aa, Artificial Sequence
  Synthetic
DEIEDLRRKVEKVVRDAEKVLRDLSRKSRKVHEDSRENVDRLLKEVEDVVKRVADLIRSNQDRDTVVKEAREVAKRIKEHLDRNLERVKKMMRDSDKELRDLLETIKRVVEEIKKRLEDKGGVEELKRTLEELLKRVEDLVRRHHEENKKLTDDNRRLHRRLRERLKEVLREVERRRD

SEQ ID NO: 6379 - protein, 178 aa, Artificial Sequence; identical to SEQ ID NO: 6378
  Synthetic

SEQ ID NO: 6380 - protein, 182 aa, Artificial Sequence
  Synthetic
SDVERIEEELRKLTEENRKLTETLKTELRKIRREVEKILKELEDRLRELSERVKDLIRKRNVPEDLKRKVDEIRKTIKTLLEEIERRVRKVEEEIKELLKDSNRKTERVIREIKRLLKDLGDKKEVLDDIRRKLKKLHDESKKTHRDILERLKEALKRLLELAERVLEELERRAEELRREIK

SEQ ID NO: 6381 - protein, 182 aa, Artificial Sequence; identical to SEQ ID NO: 6380
  Synthetic

SEQ ID NO: 6382 - protein, 182 aa, Artificial Sequence
  Synthetic
DDVERLEERLKELDKRNKELTKDLEDKLRKLTRDNRELLKKIEKRLEEVRREVKRLITERNVPERLEDKVREIEKEIRDLLDELRKRSDKVIRDIERLLEESNEKTERVIERIRRLLEKLGSLKEVAERIREELERLHEESKRLHEKILEDLERAHDETRRIVEDILRRLEKVARELKEEIR

SEQ ID NO: 6383 - protein, 182 aa, Artificial Sequence; identical to SEQ ID NO: 6382
  Synthetic

SEQ ID NO: 6384 - protein, 177 aa, Artificial Sequence
  Synthetic
DELRELIKTLREILERLLDRSRRLNDKLKEILERIERASKKMNDDDRRRVRRLEEEVRTEDLAREAEKTNKKTLEESEELIRRVEDELERVLDRSRTLIKEAKRIIEKLLDEIRKTVDSRRLEDVERVVEEAKRALERSLRENEKSVEDIKKRIRESVEENKKSVRDTLERLKRTLE

SEQ ID NO: 6385 - protein, 177 aa, Artificial Sequence; identical to SEQ ID NO: 6384
  Synthetic

SEQ ID NO: 6386 - protein, 179 aa, Artificial Sequence
  Synthetic
STEEEVRKRVEEIERTLRESLERNRETVERSEERLEELLRRARRVVEESKKRLDKEIKDERLLREVTDLNRKSLERIEELIKEADERNKRSLERSERIIRRAEELLRDVLRKAEELSDVTDEVMRDLIRKLEDILRRLKEESDRLNEEHKEILKELVRRLEEIIKEHREIVERILKKTR

SEQ ID NO: 6387 - protein, 179 aa, Artificial Sequence; identical to SEQ ID NO: 6386
  Synthetic

SEQ ID NO: 6388 - protein, 174 aa, Artificial Sequence
  Synthetic
DEEEEVKRLLDRIREEVKRLHDENKKRLDELRRTVDKLLRESERENKRVNDEVRKDGIPKEVLDELKEMSDRDREENERIVRDARKKIDDIERRSKKLLDDVEDALRRLEELLRRNTDVETLKRRIEDVLRRVEEESRRLNKELEDVLRRAKELVDRSKKKLEEVLRRVKEKAK

SEQ ID NO: 6389 - protein, 174 aa, Artificial Sequence; identical to SEQ ID NO: 6388
  Synthetic

SEQ ID NO: 6390 - protein, 174 aa, Artificial Sequence
  Synthetic
DEEREIEELLRTLTREVKRLLDESRKLNEEILRKVKRLHDENRKRIREVLEDVKRRGLPEEVVREVKRVLEEILRKSEKLLRDVERLSEEDKKRNEEIVDRAREVLKRVEELLRRNTDVETLKEEVKRALEEVEKRVRDSKRDLKRVAEEVEETSRRLNDELRKVREDVRRRAT

SEQ ID NO: 6391 - protein, 174 aa, Artificial Sequence; identical to SEQ ID NO: 6390
  Synthetic

SEQ ID NO: 6392 - protein, 188 aa, Artificial Sequence
  Synthetic
EEAERIADEARKVEEDVRRMVEESKRKLKKVLDDSKRLIDELKRRLEDIRRKVAEMAKRLRDDRDVVREVVRRVEELLDDIRRRLEDIHRRSRELSERDKEENRRVLERVERVLRELRKKLEDVKDRIDERVLRDIERLLEEIRRELERLARESEKVNERVNREDRRLLEEIRELLERIRKELEERTR

SEQ ID NO: 6393 - protein, 188 aa, Artificial Sequence; identical to SEQ ID NO: 6392
  Synthetic

SEQ ID NO: 6394 - protein, 179 aa, Artificial Sequence
  Synthetic
SLKEEVDELLRRIEEEIRRLADKSRRTNERVKEEIDRLARESEETNKKLKKKIEDIDVDEEIVRDARRLLEESHRRNRKLLEDAKKLLRESHEKNKKILKDAERLLDEIRKRAEANKDKDAKIVKKLLEDLKRLLKEVKELMERINKETKELLERVAREVKRLNTDTERLLKEVEDRVR

SEQ ID NO: 6395 - protein, 179 aa, Artificial Sequence; identical to SEQ ID NO: 6394
  Synthetic

SEQ ID NO: 6396 - protein, 176 aa, Artificial Sequence
  Synthetic
SEREEIEELSRRSRRSLEELKKEIRKVNERNKRLLEELEREIRRVSKESRDRLRELRRRLSEELAKRVDEVNRRVKREVEELVRRNEEVDKRSKEVVEKLAREVEKMNKDAKDLVDRNVDTKDLIRRLRELTRTIERRATELIKRLEEVSREIAERVRKLIKELRDMTRKIDEDAR

SEQ ID NO: 6397 - protein, 176 aa, Artificial Sequence; identical to SEQ ID NO: 6396
  Synthetic

SEQ ID NO: 6398 - protein, 182 aa, Artificial Sequence
  Synthetic
SEVEKLLERLKKILEEIARLVDRSNTEDDKILRKAEEDVRRLLDKLKKILERAAELLARNEEKERLIEEIERRLREVLKEVRRLLKKLKEDNKKSLEDNKKLLDDVRKTLDDLLRDAERTVRDEKLRREIRKLVKELKETIKRLEKKSRDTVKRTEDELRRLEEEAERLITELKERLDELRK

SEQ ID NO: 6399 - protein, 182 aa, Artificial Sequence; identical to SEQ ID NO: 6398
  Synthetic

SEQ ID NO: 6400 - protein, 175 aa, Artificial Sequence
  Synthetic
REDEEMLKDLKRVLEDAERVSRDTLRELEDAVRRLHELSEDTLDKLRKVLEEADRLIRSNQDKDEVVKRLEDILRKILEETKRIIDEARKILKKVEDDTRKLIKDVERLIERIKKDLEGNEDVRRILERVRKELKRLLEENEKLLRRVEKELEENERRNEEEIRRVKKTVEERAK

SEQ ID NO: 6401 - protein, 175 aa, Artificial Sequence; identical to SEQ ID NO: 6400
  Synthetic

SEQ ID NO: 6402 - protein, 181 aa, Artificial Sequence
  Synthetic
SRVEEVLKENRDTNEELKDTVRKILETNRRTLERAEEEVRKILEDLRDIARKIEEMVENGASEKTLKDLLDELRRTVEEVLRKLEKLLRKDEEDVRRALEKLEKLLRDDERRVKEVEDEIKDKEMLERLRRSLEESKETVKRLLEELRKSLEKSKRDVERLLKELEDLLRELEKKVDDRRR

SEQ ID NO: 6403 - protein, 181 aa, Artificial Sequence; identical to SEQ ID NO: 6402
  Synthetic

SEQ ID NO: 6404 - protein, 178 aa, Artificial Sequence
  Synthetic
DEAREILTRIRKLLEEIRKEAEEVSERHKRLVDELDKEVKDINKRAEDLLRELAEIVKRGDVDKRRIEEEVRKINEEHKDRVRRIADRVKKINKELEDIVRELKKKVEDVLRELARLIKDVDEKEVRKVLEEIKRVLEELKRHAEDNLRRAREVLKKLADEAKRVNERSEELLRELKK

SEQ ID NO: 6405 - protein, 178 aa, Artificial Sequence; identical to SEQ ID NO: 6404
  Synthetic

SEQ ID NO: 6406 - protein, 178 aa, Artificial Sequence
  Synthetic
SMADEILRELKELTEEIERRVREASREHRERLEKLRREVREINKELKRRLDELREIVERGEVDKEEITRTVEEINKEHKELLKRIEERVKKINEDLRRLLEKLTDESRRVLERLKRLLKDVDKDRVEKILRENKERTDRLRRHIEKNLEDARDLLRKLKEEVKRVNEESEKSLRDLRK

SEQ ID NO: 6407 - protein, 178 aa, Artificial Sequence; identical to SEQ ID NO: 6406
  Synthetic

SEQ ID NO: 6408 - protein, 181 aa, Artificial Sequence
  Synthetic
SLEEDIRRILDENRRSTERIKEEIREINERDKRSLEDIERRIRKVLEDLRKLLEDLAREGLDEEIRRRVKEILDEIRRLLEELKRRVEEINKRTTDLLKTLERESEKILRRIEDLLRKLKDIEEAVRKILKEVRDVNEELKRRVEKILEDIRDANRRLRETVEEIIRRAKEAVDKLRDEVR

SEQ ID NO: 6409 - protein, 181 aa, Artificial Sequence; identical to SEQ ID NO: 6408
  Synthetic

SEQ ID NO: 6410 - protein, 179 aa, Artificial Sequence
  Synthetic
SEKERVDDLLRRVDELLKRSKREVEKLLEDNKRLLERIERENRRLTKELEDKVRRLKEKGLVDDEVLKEAEKLLEENNRKSKEILEENKRLLEELKKEVEEIHRKTKKVLDELADIVRRGERDVEEIAKEIRDVLREHKELIDEIRKKAKKISDKSRKLMEELERHLRRVIKELDEKAR

SEQ ID NO: 6411 - protein, 179 aa, Artificial Sequence; identical to SEQ ID NO: 6410
  Synthetic

SEQ ID NO: 6412 - protein, 179 aa, Artificial Sequence
  Synthetic
SEEEEVEELLRRNRKKAEEVDREIDRLLKEVEKLVKDSRKRIEDLLRRAREKVEDLRRKGDVSEEVLKRAEDLLREIEEKVERIHETTKKVLEDLKRRVEEVLRDNERLIRELEKIVRAGKRDVREISEEIERITRETEDRIRKIAEEIRRVLKRHKELIEELEKEIRDVLKKLDDDVR

SEQ ID NO: 6413 - protein, 179 aa, Artificial Sequence; identical to SEQ ID NO: 6412
  Synthetic

SEQ ID NO: 6414 - protein, 178 aa, Artificial Sequence
  Synthetic
SEIEKLLKDLRDLLKKSEETVREMLKRLEEIVRRAEEDHKRLLEKLKRLLEKLRRDVRTDEVIKRAREDIERVLREIRKLNKEVEDEIRKIIEDLEDILRRSHETIERILREIRRRSRREEVRKRLEDLADEVDKRNRDIERKIRELMKRAKEVSERLNKELEDLAREAEKLLRELKK

SEQ ID NO: 6415 - protein, 178 aa, Artificial Sequence; identical to SEQ ID NO: 6414
  Synthetic

SEQ ID NO: 6416 - protein, 178 aa, Artificial Sequence
  Synthetic
DEIEELLKRLRDIVRKIREDHERLSRESERINKDARRRHDEMLRRLEELLRKVEKEVRTEELIKRVEEEIRRIIEEARRINEEVDKRSEDVVRTMKELNDRVDKDIDRVIDELRKRIRDEKVKRDIERIRKEVKEESKRLNDHIRDNERRNKESSEELNRRIKKIADEVRELLEKLKT

SEQ ID NO: 6417 - protein, 178 aa, Artificial Sequence; identical to SEQ ID NO: 6416
  Synthetic

SEQ ID NO: 6418 - protein, 175 aa, Artificial Sequence
  Synthetic
REEERLRELMDESRKRIEAVEKRARDLKRKSDRLIEDAARKIKTILDKIRKLIEDLRTDERVLEKIRKLLEELEKEARDVLERWKKLLEDSLRELEELLKKWRELTERLKEELDAGEKDLKDVEKKIREVNKTVKEEVDRLVEKNERLNDEARRVVKELLDKVERMLEEVEREAR

SEQ ID NO: 6419 - protein, 175 aa, Artificial Sequence; identical to SEQ ID NO: 6418
  Synthetic

SEQ ID NO: 6420 - protein, 174 aa, Artificial Sequence
  Synthetic
SEKEDMARKIKELIDRDRERIERVIREIEKLIKELRDHNKRVLETDKRLLDDLKRVADDGIDRSELERLAEEIIRHTERVTERDKRIVDEIRKKIKEILEDNERTNREIRDELEKAPKDEDLRRLKEEVDRVAEETRRLLEEIKKKVDKVVREVETSNRRSEEEVRRLLDEIRR

SEQ ID NO: 6421 - protein, 174 aa, Artificial Sequence; identical to SEQ ID NO: 6420
  Synthetic

SEQ ID NO: 6422 - protein, 174 aa, Artificial Sequence
  Synthetic
DEKEEAARRVEKLITELRKHNEDVLRDIKRLIDELRRHNEEVLKRDRELLERLRKVAEEGVDKDTLDELAKRIKDHTDEVTKRDRKILKDIKKKIEEVSRRDEKIFREIERVLAELPKDKELDDLRKRAEDVLRDLRRTNRKILEDVRRVIEELERSNERSLTEVERLLREVRK

SEQ ID NO: 6423 - protein, 174 aa, Artificial Sequence; identical to SEQ ID NO: 6422
  Synthetic

SEQ ID NO: 6424 - protein, 174 aa, Artificial Sequence
  Synthetic
SEKERVLTELEKILEELRRRVEEILKEIEKLIEELRRHNERALERDKKLLEELKEVRERGVPEKEIEKLLKELEKHTRDVTRRDREIMKRIEKRIEDVKDEIRRMIKKARDRVRSLPKDRELEKVKEKLDRLMKDIKEKLDRVKEKVRRVLKELEESNRKSEKDAKELIDRIRK

SEQ ID NO: 6425 - protein, 174 aa, Artificial Sequence; identical to SEQ ID NO: 6424
  Synthetic

SEQ ID NO: 6426 - protein, 178 aa, Artificial Sequence
  Synthetic
SEVEDLLRDIERLIEESRRLVERLLERLEELIRRHTRLVEELIRELERMLKKVADEVDKRELIERAEEEIRKLVKDLRRINDEANKRVEKLVRELEKILKESHDKVDEIRKRVEKDIRRDEIRTEIKKVVDKAREVNKRIKELIDKIKREAEENSKRANELIERITREIRRLLEDLRR

SEQ ID NO: 6427 - protein, 178 aa, Artificial Sequence; identical to SEQ ID NO: 6426
  Synthetic

SEQ ID NO: 6428 - protein, 186 aa, Artificial Sequence
  Synthetic
SELEELRKRVKDLIRETKKLVEEVAEKVERLNKETKKLLEDVARIVEELIRRAEEVAERIREDEKLKRALERLEEEIRRLVEEAERLLRESHEKNERLVREAKELLDRSHELAKELIEDAKRKLKDLEEVLRDIERLAREIEKVNREAEERIRRLKKKSEETNERVKRAIDKLAEELRRVLEEIRR

SEQ ID NO: 6429 - protein, 186 aa, Artificial Sequence; identical to SEQ ID NO: 6428
  Synthetic

SEQ ID NO: 6430 - protein, 186 aa, Artificial Sequence
  Synthetic
SELEELAKAVEKLLEDLRRMTREVEEKVKEINERTKKLLKDVAERVKTLLREIEELAKKIKEDKKLDDALRRLEEKIRKLVEELKRLLDESHKRNRDLVREARKILDDIRRRAEKLIRDAEEKLKELREVLKAIKELMERIKKTLDEIRKRIKELEDESEKTNRELKKKIEDLKRELEELLREIKR

SEQ ID NO: 6431 - protein, 186 aa, Artificial Sequence; identical to SEQ ID NO: 6430
  Synthetic

SEQ ID NO: 6432 - protein, 182 aa, Artificial Sequence
  Synthetic
SEIDEVIKTLEKLLEDLRRELEELSRRNKKVLEDILRRVKRLSDENRRLLERIKRTVDKRGTTEEILEELKRAVEKTRRDAEKLLDEIRRATKKLRDDIEKLKEDIERIERDAKDKIDKLSRDEKIEKKVKEVRERVKEVLERIERLVDENRRENKEVVDRIKKLLKENEEEVREVLKRIRD

SEQ ID NO: 6433 - protein, 182 aa, Artificial Sequence; identical to SEQ ID NO: 6432
  Synthetic

SEQ ID NO: 6434 - protein, 182 aa, Artificial Sequence
  Synthetic
SEIDDLVKKNKELVKKIREDVERLSEENKEVLKDIERKVRKVSEENDRLLEEIKDTVRKRGTTEDILRKLKRALERTTEEIKKILRELEEADKRLDKAIEELKDRIRRVSEDMRDKIEKIRRDRKVEKKVRENKKENEDVLRDIERLVKENKDRNREVLKRIEDLLRKNAERVKRVADEIRR

SEQ ID NO: 6435 - protein, 182 aa, Artificial Sequence; identical to SEQ ID NO: 6434
  Synthetic

SEQ ID NO: 6436 - protein, 176 aa, Artificial Sequence
  Synthetic
KEVEDIVDDVRRVIEELKRKVEEVSKKNEKLVREIEERVERISRRNKKLIKELKEIVDRGDRDKREIREELKRISKEMRDLARKLVKELKDVNRELDEDIREIDREIEEVLRELAKKLGKEELLRKIARDLEKVREEIKELVKENRKTNEEVVRRIEKLAKENDDENRKVLKEIED

SEQ ID NO: 6437 - protein, 176 aa, Artificial Sequence; identical to SEQ ID NO: 6436
  Synthetic

SEQ ID NO: 6438 - protein, 176 aa, Artificial Sequence
  Synthetic
DEVERIVEDIRRLLDEVRREVEKVSRENKELVDRVREKVKEISKRNKKLAKDLTDLVREGSRDKRELERDLERINEEMRKLIRDLERELREIDKRMDDLVREIEEKLRRIIEKLERELGDKELLDRIKEEIERVIKEIRELVEENKRTNEEVLRRIRELARRNEEENKRVLEDIRR

SEQ ID NO: 6439 - protein, 176 aa, Artificial Sequence; identical to SEQ ID NO: 6438
  Synthetic

SEQ ID NO: 6440 - protein, 183 aa, Artificial Sequence
  Synthetic
SVEELIKEVKDRLRKVLREIEELIRENEEENRKNVEDVKRTADKLRRDLEKVVDEIDKRVDSDKLERLRKKAEEIIRTLDRMLEESKKINREIDERLKRAADRLRRRVEKVIREVDRVAREVKEKEVIDKVVKRVEDLVREIKEEVDKISEENKELVKRDTRRVEEVRERIRKLVEELRREVT

SEQ ID NO: 6441 - protein, 183 aa, Artificial Sequence; identical to SEQ ID NO: 6440
  Synthetic

SEQ ID NO: 6442 - protein, 175 aa, Artificial Sequence
  Synthetic
SEIDRVIEKSDKTNEEIKRDVDRAVRRSEETLKRIRETVEEIVKTVEKLIRDLRRRVEDKGQDKEIEEIVKKIKKDIDDAKEELRKLAEEDKERVKAVKKKVEDLVREDKEEIDRRLTDKDKAKELRDRLERSLREIAKKIKKVLDDTDRVLRDIERTIEELKKRLREVLERVRK

SEQ ID NO: 6443 - protein, 175 aa, Artificial Sequence; identical to SEQ ID NO: 6442
  Synthetic

SEQ ID NO: 6444 - protein, 175 aa, Artificial Sequence
  Synthetic
SEIDDVIKKLKDLIEELEREVKEMSDENKRLLEEIEERVKEAIKRSKDTLEEIADRVRKKGPDKEIEELIREDKKRIKDVLKELRELVARTKKRVDDVTKKLREEARKIEEEIRRRLSDKDKATKIEKDLRDVLRKIEKTMEDNRRENEELLKKVEEEVRRLEEETEKVLRDLRR

SEQ ID NO: 6445 - protein, 175 aa, Artificial Sequence; identical to SEQ ID NO: 6444
  Synthetic

SEQ ID NO: 6446 - protein, 179 aa, Artificial Sequence
  Synthetic
SEVDEILKRIEELIRRIEDEVEKMIRESEDTIRRDEKEVKDAVRELADLIRRIEKRVRERKDSREEVEKLITDIADALRRFLERNEKSVTDDLDKNRRLLEKVERLIERIERVIREARKRNIDEKKVREIDKRLKDALREIRKLIERSKEESRRALKRSRELMKRLEEELRRVLKEIRD

SEQ ID NO: 6447 - protein, 179 aa, Artificial Sequence; identical to SEQ ID NO: 6446
  Synthetic

SEQ ID NO: 6448 - protein, 179 aa, Artificial Sequence
  Synthetic
DEVDKVLKRIKELIDEDKKEVEKVIRDSKRTLREDEERVRRAAKEVEDRIRDIEDIVRRRKEAREDVEKLVDDLRKKIKRLLDENEKSFKDDERKNEEVVRRNEKSITDIKRVIKEAEDRNLDKKKLEDIDRELDRVLEESKKEIEKSKRESEEVLKKSRDLVKRLAEELKRVLDEIRR

SEQ ID NO: 6449 - protein, 179 aa, Artificial Sequence; identical to SEQ ID NO: 6448
  Synthetic

SEQ ID NO: 6450 - protein, 179 aa, Artificial Sequence
  Synthetic
SRVEEVLKEIDKLIKEIKERVKRLIEESKRLNREDEERVRKVIEESKKTLEEIREVMERNKESREELEKLIEDDKEKNRKAKKDNDDSLRDDKRKNDEVEKEVRKRAKDIERAIKEIAKRNVDKDLLREIERRLREMLKEIEERIRRSKREVEESAERSERLIRKSEEDSERVLRELRR

SEQ ID NO: 6451 - protein, 179 aa, Artificial Sequence; identical to SEQ ID NO: 6450
  Synthetic

SEQ ID NO: 6452 - protein, 179 aa, Artificial Sequence
  Synthetic
DEVERILERIEELLRKIRKDVEEAIKDSERLNKDDLKRVRDAVETLRELIRRIEEEVRRRRESREEVEKLIREIEERLRRLLEENEKSVREDKERNRKLLKEVEELVKTVKDLIEEAKKRNIDKDLARDIDEKVRRLLEDIRRLVEESEKKVDESTEESRRLVTELERELREVLKRIRD

SEQ ID NO: 6453 - protein, 179 aa, Artificial Sequence; identical to SEQ ID NO: 6452
  Synthetic

SEQ ID NO: 6454 - protein, 178 aa, Artificial Sequence
  Synthetic
SRVDELVKEAEDLLEEAKKANAESIRRIEELLKRVAEEIRRLSEEDKKLVEEVRKRVKDKDAIDEVRERSRESLDRIRRIIDEIRRRAEKLLREDEELIRRLAEELRKLLEKLKRELRDKRAEDKLRRVEEDARRVLEDLKRTLKRLEEEVRRVLEEARDILRKNAEENRKVLEDLRR

SEQ ID NO: 6455 - protein, 178 aa, Artificial Sequence; identical to SEQ ID NO: 6454
  Synthetic

SEQ ID NO: 6456 - protein, 178 aa, Artificial Sequence
  Synthetic
SRVEELVEELKRLLRTVEKENEDSIREIERLLREVKRRNEESSREDEKTIRTVRREVRGEELIEEVRDRSRKSLDDDRKLIEDIKRRLEKLLREDEELIKEIRDRARRILEKIKRELREKRAEEILERLRKEAEEVLKKLEDTLRELRKRAEKVLRDMEETLKKNKKDNEKVLRDLRK

SEQ ID NO: 6457 - protein, 178 aa, Artificial Sequence; identical to SEQ ID NO: 6456
  Synthetic

SEQ ID NO: 6458 - protein, 178 aa, Artificial Sequence
  Synthetic
SEVDKIIKEIEDLLDEARKTNEKSSRDDKRLVEEVKELNKESSERNKRLVKEAREKIRGDEMIEKVRRDSEELLKDDRRLIEEVKRRSEKTLKEDKELIEDLARKLKKLLDDLRKDLKDKRAEDKIRRIAKDAEDVLRTMEKTLRDNERENREVLKELEKTLRENEKENEKVLRDLKR

SEQ ID NO: 6459 - protein, 178 aa, Artificial Sequence; identical to SEQ ID NO: 6458
  Synthetic

SEQ ID NO: 6460 - protein, 172 aa, Artificial Sequence
  Synthetic
EEIERVEEKVRRLIKELEDELRKIEERIERLLRRSRERNKEISDRNRRLLEEMRRSDRDKDVLRKRLEDIDRELRKLLKDDEDLMREIKRELRELLERLRKVAEDIRDEIRKDLSSEEKARELEEELRRAVERVDRKIEELEERLDRVLKESRDTVDENEKRNEKVLRELET

SEQ ID NO: 6461 - protein, 172 aa, Artificial Sequence; identical to SEQ ID NO: 6460
  Synthetic

SEQ ID NO: 6462 - protein, 172 aa, Artificial Sequence
  Synthetic
KEIEDVVETVRRLLRTSEELNERISRDNEKLLRDSEKLNREISERNRKLLKDLKDSDRDKRVLEEEARRIDEILRELLRRDEELAKRVNDRLKDLLRKDEELNRRVLDRIRKDLSMEEAARDLARKLKEVHDRSRETIKRNEDKNRRVLEESKKTARENEERNKRVLDELRK

SEQ ID NO: 6463 - protein, 172 aa, Artificial Sequence; identical to SEQ ID NO: 6462
  Synthetic

SEQ ID NO: 6464 - protein, 177 aa, Artificial Sequence
  Synthetic
SEEDRVLEDVERLLRELKKETDRIAEKNKKLNEDVTRETEEIVRRVRELLERLLDLVRKVRDDRLRKELEERLKEVVDRVRELSKTTKRKLDEITKDTRRASRETEERLKKIVDEARKRIDSEKAREVEREVRRIREEDERILRELEERNRENKKRDEDILKELEDRAERVLEEIKR

SEQ ID NO: 6465 - protein, 177 aa, Artificial Sequence; identical to SEQ ID NO: 6464
  Synthetic

SEQ ID NO: 6466 - protein, 177 aa, Artificial Sequence
  Synthetic
SEEDRVLKEAKDLLEEIERELDEVAERNKELNKRLTDETRKIERRVRELLRELKDKVRKVKEDRMRERLEEELEKIVRELEEASKETEKKLEEITRETRELIKRLEDKLRKVEKELREKIDSRKLEKLEKEVREVEKRIRDILKKLEDDNRANRKRDEDIIDELRKEADRVREEIKR

SEQ ID NO: 6467 - protein, 177 aa, Artificial Sequence; identical to SEQ ID NO: 6466
  Synthetic

SEQ ID NO: 6468 - protein, 175 aa, Artificial Sequence
  Synthetic
SEVEELVRRVEKSNRDIEEMVKKIDKRNRDLLRKIEKDLREADRRNEELLREIDDLVRRGTDKRDLERLIRRVTRELEDMVEKLERLIEEVSKELEDAARELEERIRDSLRRVKEAGIDEKLLKEVEDRNRESAKEVKRLADENRKANEELKRRVEKLVRDNRRKNEELKKKVKD

SEQ ID NO: 6469 - protein, 175 aa, Artificial Sequence; identical to SEQ ID NO: 6468
  Synthetic

SEQ ID NO: 6470 - protein, 175 aa, Artificial Sequence
  Synthetic
REVEELLKEIRKRIEDVRRRVEEIDRRNRKLLKEVEERLEKVRREVEKSNTDIKELAERGTDKRELAKEIKKSRERVERLVRELRRRLKRISDELEKVARDLKRKLEEILDRAEKAGIDEDLLRRVREEIERVIREVKRLLEENKKRNDEVRKRVEDIVRRLEEHHRELKRRVEK

SEQ ID NO: 6471 - protein, 175 aa, Artificial Sequence; identical to SEQ ID NO: 6470
  Synthetic

SEQ ID NO: 6472 - protein, 172 aa, Artificial Sequence
  Synthetic
KDIEDILKESEKTNREILKRAEDASEENERINKRITDRVDRVRKEIERLLEELTRRDEDREELDRVLKKIEDDLKKAMEELRKLIKELDERLEKVLEELERLIRRDREEIERRLRVKKLVDELRRRVEETLKRLRKLIADNREKNKDNLRRIEEEVKKLEEEIKKIKDEMKR

SEQ ID NO: 6473 - protein, 172 aa, Artificial Sequence; identical to SEQ ID NO: 6472
  Synthetic

SEQ ID NO: 6474 - protein, 172 aa, Artificial Sequence
  Synthetic
KELEDIARESEKTNRDIKRRVDEVRKTIEDLLRRIDEEVKRAAEESKDTNRRIREEDRRKEEVEKLLRDDNKRIDDMLERLRKLLEEVERRLDKALKDLEKLIRDDKERIDRLLRSEDLMRKLKREVEETDKEIKDIIRRLKEEIEKIKRKIEEIIKKLKKENEDTRREADK

SEQ ID NO: 6475 - protein, 172 aa, Artificial Sequence; identical to SEQ ID NO: 6474
  Synthetic

SEQ ID NO: 6476 - protein, 172 aa, Artificial Sequence
  Synthetic
SDIDDILRESRKINKEINDTVTEMMKRSKKTNDEIREKVKEVREESEKTNEEIRREPRRKEEVRELIKRDKERIDKALRELRELIKKDEEEIKRALRDLERLIRENRERIKKLLKDEKLVKELEDELRKSEERARRIIERLKEELKKTRKEIEDIIRELRKKLEDTLRDVEK

SEQ ID NO: 6477 - protein, 172 aa, Artificial Sequence; identical to SEQ ID NO: 6476
  Synthetic

SEQ ID NO: 6478 - protein, 172 aa, Artificial Sequence
  Synthetic
SDIEKILRESKDINRRINERVDRVVERSKKTNEDILKKVKDAAEESKKTNDDIRKSPDSEEDVKRKLDDDNRKIRKAMEELKKLLEDDERDVRRALEELRKLIEDNADDIRRKLKVEELVRELRRLVEESLKRIEKIIKDLEELIKETKRRLEEIIERLEKKNEDTEREARK

SEQ ID NO: 6479 - protein, 172 aa, Artificial Sequence; identical to SEQ ID NO: 6478
  Synthetic

SEQ ID NO: 6480 - protein, 172 aa, Artificial Sequence
  Synthetic
DEIREIVKESKRINEEINRKVEEVVRRSEKTNEDIRDTVRRLVRESDETNRRIEESPQDREEVKKAIKDDERRIEEALEELRKLLKEDNDLIEKAARELEELIRRNKKRIEDLLKDEDLVRELRKEVKRSEDRIRKIIRDLDELNRRSKEDIKRKIDELRKRVEETKRRVTK

SEQ ID NO: 6481 - protein, 172 aa, Artificial Sequence; identical to SEQ ID NO: 6480
  Synthetic

SEQ ID NO: 6482 - protein, 172 aa, Artificial Sequence
  Synthetic
DDIEEILKDVKRLLDEILAKVKKASDDNKRILDEIERKVEEMVRRSEKTNEDIRRSDRRREEVRKLLDEDNRRIEEAFKELDELIKRLDKTLTDLMRDLERLIKEVKDEIDKKLKVEELVRELKKRVDEIKERARRLIEENRERNKEIKERAERIIERLRKINEDTKREAEK

SEQ ID NO: 6483 - protein, 172 aa, Artificial Sequence; identical to SEQ ID NO: 6482
  Synthetic

SEQ ID NO: 6484 - protein, 172 aa, Artificial Sequence
  Synthetic
DEIEDIVRRVKKLIRDLEERVKKLEEDSDRTNERIRREAEKASKRNKEILDKLRKSDRRKEEVREVIKTLDEELKRVAKKLRELLKKDNEEIDRAAEELKRIADEIKEAIDRLLKVEELVKELRKELEEVKEEIRKIIEELKRRNDKSRRDLERLIRDNEDKNRRLKKEAED

SEQ ID NO: 6485 - protein, 172 aa, Artificial Sequence; identical to SEQ ID NO: 6484
  Synthetic

SEQ ID NO: 6486 - protein, 172 aa, Artificial Sequence
  Synthetic
EEIERIIRESEKINKEINRTVKEVEKRSEETNRRIREELKRISKRNKEILDRLRKEPRDKEVVEREIRKLDEELKRALEELKRLLEDDNRKIEEAMRRLEKLIRENEDRIRRLLRDEKEVEKLKRKVEKSEEDIRRIIEKLREENKRSEEEVRRLITENEKRNRKLLEEAKK

SEQ ID NO: 6487 - protein, 172 aa, Artificial Sequence; identical to SEQ ID NO: 6486
  Synthetic

SEQ ID NO: 6488 - protein, 172 aa, Artificial Sequence
  Synthetic
SELEKIAEDSERINKEINERVKRISDENKRILEEIEKAVEEASRDNKRILDELRKSPRRREEVKRVIEELDKRLEDALRRLRELIKELDDRLRKALEDLRKLIEDNEREIRKLLKAEELVRELERRVDESRKRAEDLIRDNKKKNDEARRRVEELIRRNREENRRIAEEARK

SEQ ID NO: 6489 - protein, 172 aa, Artificial Sequence; identical to SEQ ID NO: 6488
  Synthetic

SEQ ID NO: 6490 - protein, 179 aa, Artificial Sequence
  Synthetic
SDAERIMRESEELNERINDVVRRVAEESKRLNDRINDVLREVSKRNKDLIKRIKEVVDRNPEKKEEIKRLIDKLDKVLEDVERRIRKLIEDDKRRIEEVKRRLERLIKEDKRKIDEARKEGVEERIIERLDRLTKKSLEELKRIIEDLKRRTKESEDRARELIKRNREENKRLLEEAEK

SEQ ID NO: 6491 - protein, 179 aa, Artificial Sequence; identical to SEQ ID NO: 6490
  Synthetic

SEQ ID NO: 6492 - protein, 179 aa, Artificial Sequence
  Synthetic
DEAERIREESEELNERINREVDKMIDEDRKLNEDIRRTVEEMVREIKELLDRIRKVLEENPEKKEEIEKLIRRVKEKIRKAKEDLERLLRELEDRNRKVKKKLEDLIREDEERIRRAEEAGVDKEIIKELRETTERSRKRLEELIRDSEEKNRRTEDELEKIIRELDERLRRLEEEARK

SEQ ID NO: 6493 - protein, 179 aa, Artificial Sequence; identical to SEQ ID NO: 6492
  Synthetic

SEQ ID NO: 6494 - protein, 179 aa, Artificial Sequence
  Synthetic
DEAEDIARKSRELNERILRRVKEMIDEDRDLNREIEKTLRRVSERNRELVEEIKREVERNREKREEVEKLIKRLDDELRRILEELTRRLRELEKKNEEVRREMEKLLKEDRDRIRRAEEAGVEERIIEELRRLTEDTKRRADKLIKDSEDENRKTLRRARELIEENRDRNRKLEEDVRR

SEQ ID NO: 6495 - protein, 179 aa, Artificial Sequence; identical to SEQ ID NO: 6494
  Synthetic

SEQ ID NO: 6496 - protein, 179 aa, Artificial Sequence
  Synthetic
DEVREIVKRSDDLNDTIREVLKRVADDSRRLNEEIRRKVTEASRENEELIKEIEDRARKNPEKKEDLRRLVRELDEKLKEVKRDLERLIEEDKRKIERVLEELRRLVEEDRKRIDEAREAGVDEEIIKRLRDRTKKTLDEVRKIIEDLKDESRKTSEELRELIKRNKEKNDELLERLER

SEQ ID NO: 6497 - protein, 179 aa, Artificial Sequence; identical to SEQ ID NO: 6496
  Synthetic

SEQ ID NO: 6498 - protein, 179 aa, Artificial Sequence
  Synthetic
SEAEKIERESRDLNRRIREVVERASEDNERLIREIRKRLEEVVRTIEKLIRDILERVRKNPEKKEEVKKLIDDIRREIDRIKKELEELVREADKRLEEVLERLERLLEEDKRRIDEARRAGVDEEIIKELKKITDKTRRELERLIDENRKRNEELLKRVEDIIRELKRRLEKLDEEVKR

SEQ ID NO: 6499 - protein, 179 aa, Artificial Sequence; identical to SEQ ID NO: 6498
  Synthetic

SEQ ID NO: 6500 - protein, 179 aa, Artificial Sequence
  Synthetic
SEVERIEKESRDLNREIKEEAKRASEDNRRLLEDIRRKLEKVSEENKDLLRKIEEEMRRNSEKKEELRRLVKELDDKLTEILKDLTRLVEELDELLKEVLKRLKDLLREDREEIDRARKEGVDEEIIKKLKRLTDETEKELEKLIRKNEKENRDLEREIRRLIKENRDRNRELKKRAED

SEQ ID NO: 6501 - protein, 179 aa, Artificial Sequence; identical to SEQ ID NO: 6500
  Synthetic

SEQ ID NO: 6502 - protein, 179 aa, Artificial Sequence
  Synthetic
SEVEKAVREIEELIKRIEDRLREMARRVEETNKTLLRDVERLSKENEELVREIKERVRENPEKKEEVEKLIRELDKKLKEAEEEVRRLATEDAEDIKRAMKEITDLIEELRERLKRIRERGLREELVRELERKIKTVLDRVEEIIRRLDKKTKDTVRRVRELIEDNKRKNKKILDEVRK

SEQ ID NO: 6503 - protein, 179 aa, Artificial Sequence; identical to SEQ ID NO: 6502
  Synthetic

SEQ ID NO: 6504 - protein, 179 aa, Artificial Sequence
  Synthetic
SEVERIVKESEELNEKITRDLEEAEKEVRKTNDEIRRVVEEMSRRNEKLIRDIDDEVRKRPEKKEDVDELIKRVDELLERALRELEKLIRDDRELIEEVSRRIEKLVRDDEEKIRRAKEAGVDDEIIKELEKKTRDNLDKVRKIIERLRRETDKTEKELRDIIRKNEDENRKLEEKVRR

SEQ ID NO: 6505 - protein, 179 aa, Artificial Sequence; identical to SEQ ID NO: 6504
  Synthetic

SEQ ID NO: 6506 - protein, 179 aa, Artificial Sequence
  Synthetic
SKVEKLAKEVEETNRRILDEVRRASEENKDLVRRIEETVKRAVEEIKRLIEKIDDVVTKNPEKKERVKELVEEIRERIKRILRELERLIEEADRRLEEVLRKLKKLIDDDRRKIDRVEEAGVDEEIIKELRKRSEDSEREARKLIRRNEEENEKLRKKLKEIIDRLREELEKVLDRVRK

SEQ ID NO: 6507 - protein, 179 aa, Artificial Sequence; identical to SEQ ID NO: 6506
  Synthetic

SEQ ID NO: 6508 - protein, 181 aa, Artificial Sequence
  Synthetic
SEVERAAEESKRLNKTIRDENREVLREIRDLIRRMKEENRRMVKRVDEVLKEIRELFRRDKIDKLVEELLRRVRDIIRRDHERVRRVLERIERLIRKDHERVRRVLKEDERLIRELEKKRTDEKVREILERLERESRKTAKELDESNREAEELLKRVADEAKKSNETLRERLERLAREAEK

SEQ ID NO: 6509 - protein, 181 aa, Artificial Sequence; identical to SEQ ID NO: 6508
  Synthetic

SEQ ID NO: 6510 - protein, 181 aa, Artificial Sequence
  Synthetic
SELEELIRKIEELIRRIEEENKEMVRRSRKLNEDLERRLDEVRRRVEKLIREIEELLKRDKIDELIKKLVRELEEVIKRIEEEIRKLLEEDKRLIDADHERVKKVVEDLDRELKRIADERRDERAKRLLDELKRLIKELEDKLRESNEELKRRSDDSARKAEKILRELKKKVDEMADRARK

SEQ ID NO: 6511 - protein, 181 aa, Artificial Sequence; identical to SEQ ID NO: 6510
  Synthetic

SEQ ID NO: 6512 - protein, 181 aa, Artificial Sequence
  Synthetic
DEAEKLAEDVRRVIKRIREDNKRLSDRNKELLEEVEKDNKKSEEDVKRVIEDIERRVRELRDDRGVDELIKRVLEELEKLSDDDRRRLKRMIEESRRSLEEDRERIERVTTELRELLERLKEKVSRELLDELRRRIEELRKRLEDSNRENEEELRKIADKVRKTNKRLNEEVEDMFRRAKT

SEQ ID NO: 6513 - protein, 181 aa, Artificial Sequence; identical to SEQ ID NO: 6512
  Synthetic

SEQ ID NO: 6514 - protein, 175 aa, Artificial Sequence
  Synthetic
DEARELLRDDERLNRELNDLDRDSSKKDEDLNRKLNEDDKESVERADTLLERIKREVRTEDVVREVRRRLREMLEENRKLTKKAKDDVKRSLDENRELTKKMEEDVRRTLRRIEKDGVDRELIRELEERNRDSVRKSRKSNEDNERTNRESIERSRRSNEELRRRAEELIKDLRR

SEQ ID NO: 6515 - protein, 175 aa, Artificial Sequence; identical to SEQ ID NO: 6514
  Synthetic

SEQ ID NO: 6516 - protein, 175 aa, Artificial Sequence
  Synthetic
SEVEELLERDKDLNRRVNELNEKTSREDEKLNDEINKRIDRLVERARELLERIRREVRTEDMVRKVLEELKRLLEELRRLIETADKEVEDSLRDDERLLKKIKEDAERTLKEARDRGLDERLIRELEERNRESVERVRRSLKENEDRNRESKKRLEDLLREVKRLMDKLEEDLRK

SEQ ID NO: 6517 - protein, 175 aa, Artificial Sequence; identical to SEQ ID NO: 6516
  Synthetic

SEQ ID NO: 6518 - protein, 175 aa, Artificial Sequence
  Synthetic
SEVEELLERDKRLNDEANRLNRELVERDKRLNEELNKELKRMADEIKRLLEEIRRKVRTEEVVEKVTRELRELLERLRRLLEEMSKEARKSLETDKKLLKELKRRAEETLREIRERGLDERLIEKLERENRESEKRARDSNKELEKRNRESEDRARRILKKLEDDVRRLKKELET

SEQ ID NO: 6519 - protein, 175 aa, Artificial Sequence; identical to SEQ ID NO: 6518
  Synthetic

SEQ ID NO: 6520 - protein, 174 aa, Artificial Sequence
  Synthetic
SELEKVRTDVERVIRELEKELKEIDEENKKVNKDVEEEVKRIEEENKEMNDRLDDLRRRGLDKKDLLREIEKAHRESRKKIEDIKKKIEDALRETEKKIKELEKKIRDVLREAEKRIKSKEMEEVREELERLLRRIKKILEELRDENRKSLERLEDVLRRLEKRNRDTLEEVKR

SEQ ID NO: 6521 - protein, 174 aa, Artificial Sequence; identical to SEQ ID NO: 6520
  Synthetic

SEQ ID NO: 6522 - protein, 174 aa, Artificial Sequence
  Synthetic
KETEDVERDVERVIREIDTKLKEIEKKNDKANKELEEKLKKIEEDNKRVNERLKRLREEGLDKRDLERELRDVLRRTRDLIRELEEELERIVRDTRRLAEEIERELKRIVEELDKKIKSEEMRRVREEAKRLLDKVKKILRDLERRNEEVLKKIKDIMRRLEKRNRDTLEEIRT

SEQ ID NO: 6523 - protein, 174 aa, Artificial Sequence; identical to SEQ ID NO: 6522
  Synthetic

SEQ ID NO: 6524 - protein, 174 aa, Artificial Sequence
  Synthetic
SEEEKVLEEVKRAIDELKKELEEVEERNKRVNDDIRRLTDEIRKENKTANDRLRKLLEEGLDKKDLLKEIKEILERTERLSEETREKLKDVLRKTEKLIKEIKDKIDEIKKRADEKIKSKKLEEVRKEVKRLKDEVEKILKDLRKRNKDLLEEDKRVLDRLRETNEKTLDDVRR

SEQ ID NO: 6525 - protein, 174 aa, Artificial Sequence; identical to SEQ ID NO: 6524
  Synthetic

SEQ ID NO: 6526 - protein, 178 aa, Artificial Sequence
  Synthetic
KEEEDITRRIDKILRDLREKLRDVNRRVEELSKRLHDKLEKVLKRIKDEAERLRKEIREKLRDERRVREIEREVREIVERVEEVVRRLKEENKEIEKENRRNSTRLKEEMDRVKEDIDRKRVTKELEDKVEKDARDVERHIRKDLTDVRRRHEDLDRKIKELLDRVRKAIRDVEEKIK

SEQ ID NO: 6527 - protein, 178 aa, Artificial Sequence; identical to SEQ ID NO: 6526
  Synthetic

SEQ ID NO: 6528 - protein, 178 aa, Artificial Sequence
  Synthetic
SKAEELLRRVEELLKRVKDKVDDIVRKIEKSNRDLERRDEEVLREVEETNRRLEEELRRRGSDEDKLRELKEESDRSKERLDDAIRKSRKLSEESERELREITKELRKELDKIREELDRDGADEEVLRRLEELIRRAERKLEKMLEDLTRLNKEWEDRTRKLLEDLRRINEEIKRKIK

SEQ ID NO: 6529 - protein, 178 aa, Artificial Sequence; identical to SEQ ID NO: 6528
  Synthetic

SEQ ID NO: 6530 - protein, 178 aa, Artificial Sequence
  Synthetic
SEKDELLRDVRRLLKEVEKELEEIRRRVTESNRELEKLVREVLEESKRSDDKLREDLERAGLEKERLDKLEEDLKRHNEKLKKAVEDLKRTSEDSRKKLEDLARDVKRLLEDVERKLRKDGADKDLLERLKELIKRLKDKLKEIADRLRRINEDIERKIREILEDSRRFNEEIKKKID

SEQ ID NO: 6531 - protein, 178 aa, Artificial Sequence; identical to SEQ ID NO: 6530
  Synthetic

SEQ ID NO: 6532 - protein, 184 aa, Artificial Sequence
  Synthetic
STLETLEDEVRKIVTDIERVIRESNKHLKKSIDDVERVIEEIERRAREIVKKVRDVISEDRSEDDVRDLKRELEELLKRLEELVRDLERKAEEDLDRLRKEYEKLKEDLERLLKELKDKADRDGTDEKLERILREIKRIVEDLKKKVEDSLKRYEEELERLKEDLRRLLKRIRDEVEELKKESD

SEQ ID NO: 6533 - protein, 184 aa, Artificial Sequence; identical to SEQ ID NO: 6532
  Synthetic

SEQ ID NO: 6534 - protein, 184 aa, Artificial Sequence
  Synthetic
DEEEKLRDEVEKIVKKIEKAIEDLRRHAEKSVTDIRKVLKELEDHIRESVKDAERFISEDRSEESVERLVRKLERNLDELRRRAEELKKRIDEDLERLKELVRRLKEELEKMLRDLREKVRRLGTSEKLEKILREIERIVEKLKEDLDRLLKRYEDELRRLKEELERILDTYRRLLEELERRLR

SEQ ID NO: 6535 - protein, 184 aa, Artificial Sequence; identical to SEQ ID NO: 6534
  Synthetic

SEQ ID NO: 6536 - protein, 184 aa, Artificial Sequence
  Synthetic
DTARELEREVKKIVDEIEDVIRRLRRHIEESVKRAEKVLREIEKHARESAKRIADVVSKDTSEETVEKLKEEIRRDFKRLEDEVRRLKKELEDNLERLREIVKELEDRLREALKKLREKVRRDGTTEELKEILERIEEIVKRLEEELRRLLEEYKKRIEELAKRIKEVLDEYRKILKRLEDETK

SEQ ID NO: 6537 - protein, 184 aa, Artificial Sequence; identical to SEQ ID NO: 6536
  Synthetic

SEQ ID NO: 6538 - protein, 176 aa, Artificial Sequence
  Synthetic
DEAEELRKDVKRVLDEIKKRHEELLRKVREDLDRIRRKLEELAKRHRELLKEVKKIVDRDGTTEKLKRELDELNKETEKRLRDLKRELEELLRELKKRLKDSNDELKREVERLRRENLVDDKIRREIDELIKKLEEESRRIEEEIKKLVEDLKREADKIMEELERETDKLKKELDK

SEQ ID NO: 6539 - protein, 176 aa, Artificial Sequence; identical to SEQ ID NO: 6538
  Synthetic

SEQ ID NO: 6540 - protein, 172 aa, Artificial Sequence
  Synthetic
SEKEKILEEIREVLKRILDRLKKELEDDKKSLDDNKRRTEEALREDKKSLEEIRRANVREDEVKKLLEDNKRRNEEVRKRSEDDLKKNKERNERLAEELKKEVDKLREDIERANLDDKILRDLEKALDKLRRDIEEILKRSRDLNKKLEDDNREALRRSEELNRELEERERK

SEQ ID NO: 6541 - protein, 172 aa, Artificial Sequence; identical to SEQ ID NO: 6540
  Synthetic

SEQ ID NO: 6542 - protein, 172 aa, Artificial Sequence
  Synthetic
SEEERIRREIKKILDDIKEEAERRLEEDKKSLDENRKKTEEVLKKIRDDLKRIEEAKIPREEIKDELDRLRREIEKIARESEKDLRRNKEENKRLAEDLKRKLDKLKEDLDRANLDDEILRRIEKLIEDLKRTIDKILEDSERLNRKLEKENREALKELRDLLRELEERLKK

SEQ ID NO: 6543 - protein, 172 aa, Artificial Sequence; identical to SEQ ID NO: 6542
  Synthetic

SEQ ID NO: 6544 - protein, 172 aa, Artificial Sequence
  Synthetic
EELERILRKITEMLREIARKLKKLLEDDKESLDRNKEKTEDDLRRDKESLDRLRKSNIPEEEVRKRLKENKDRLRKRSKESKEDLERNEDENDKAAKDLKRLLDELREEIERRNLDDKILRDLEELLKDLERKIRRILDESRKLNDELRKENKKAEDTSRRLNEELEERLRT

SEQ ID NO: 6545 - protein, 172 aa, Artificial Sequence; identical to SEQ ID NO: 6544
  Synthetic

SEQ ID NO: 6546 - protein, 172 aa, Artificial Sequence
  Synthetic
SELEEILKRVEDVLRDILRKLKEVLDRAEKVIRDNKRKTKKMLDDDKRSLDEIRKAKIPRDEIKDVLRRNKDRNRKLAEESDRDLERLREELERIAKELEDLADELRKEIEKANLDDKILRELEKRLEDLRKRIKDILDDLKRKLEELKRENEKFLRRSKKLNEDLERELET

SEQ ID NO: 6547 - protein, 172 aa, Artificial Sequence; identical to SEQ ID NO: 6546
  Synthetic

SEQ ID NO: 6548 - protein, 172 aa, Artificial Sequence
  Synthetic
DELEEIRDRIKRKLEKLKEETKRTLEEDRKSLDDNRRKTEEALRRDRESLERIERAKIPSDKIREVLERNKTELRKIFERSREDLRRNKERLKKANEDAKKKIEDLREEIKKNNLDRDILEELTRLLDKLRRDHERVSEESKRRNDELEEENRRVLKESEDRNRELEERLRQ

SEQ ID NO: 6549 - protein, 172 aa, Artificial Sequence; identical to SEQ ID NO: 6548
  Synthetic

SEQ ID NO: 6550 - protein, 175 aa, Artificial Sequence
  Synthetic
SELEKLLDDVKKDLKRIEEHLRRDEEDSKRRIEELERHLERDKKEVEKAIRELDKKPRDDDLKRELEEILDRNKKNLDELRRELEKIDRDNKKNLDELKRELEEIEKKIREIVKRDKVDEKVVRTIEKLLTDLERKIREIEKRSKELLTRLEEKIKKAERESRKLLRELTERIDR

SEQ ID NO: 6551 - protein, 175 aa, Artificial Sequence; identical to SEQ ID NO: 6550
  Synthetic

SEQ ID NO: 6552 - protein, 174 aa, Artificial Sequence
  Synthetic
DELKKLLDDVREVSKRLNDELRKIMEEIRKVSEDLNKELDDIVRKIKKVIDDISEKIKRDGPREEVKEELKRLEEELRRLLKRLRDEHRRLRERLERLLKELEEKHEELADRVRKANVDEEIEKEIRELLKENRRRADEIRRRAEKSLKDNERRVEKVEREAERLLREIEKELK

SEQ ID NO: 6553 - protein, 174 aa, Artificial Sequence; identical to SEQ ID NO: 6552
  Synthetic

SEQ ID NO: 6554 - protein, 174 aa, Artificial Sequence
  Synthetic
SELEKLAEDVKRKLTEIREKIKKLLKETRDVSRELNKELEDLLRRTTEVIDEIRKKIEKEGPREEVRELLKKLEKDHRKASEEVERKHEDLRRRHDKASKEVEKELRDLKDEVDKANVDEDIKKEIEDLLRDLERLLRDVNREVEELLKENRKRLEEINRTVERLLEEIEKRLR

SEQ ID NO: 6555 - protein, 174 aa, Artificial Sequence; identical to SEQ ID NO: 6554
  Synthetic

SEQ ID NO: 6556 - protein, 174 aa, Artificial Sequence
  Synthetic
SELEELVRRLREVSKRLNEELDRILDRTRRLAERISEDIKRLADETKEVIERIKEEIKKKGPDERVKRKLEELKRRHDEASKTVRKKIEDLLKEHRDLSKELEDKHRDLEDKLRKANVDEEIEKEARELLRDNRRRIEEINREVEELIRRLEKLLKEVNETVKRLLEEIRKDLD

SEQ ID NO: 6557 - protein, 174 aa, Artificial Sequence; identical to SEQ ID NO: 6556
  Synthetic

SEQ ID NO: 6558 - protein, 174 aa, Artificial Sequence
  Synthetic
SELEKLMKDVKEVIDEIRKKLRKILEDTTRVAKRNEEKLKRIADEAEKVIREIRDEIEKKGPRDEVERRLRRLETELRRLLDESRKENERLRREHEKLSKELRDLLDDLRRRVEEANVDEEIKKRIDDLLRRIEKEIEEINRRVEELHKRLEDLHKEIEDKVRELLTRIEERLK

SEQ ID NO: 6559 - protein, 174 aa, Artificial Sequence; identical to SEQ ID NO: 6558
  Synthetic

SEQ ID NO: 6560 - protein, 171 aa, Artificial Sequence
  Synthetic
SEVEEILERIERLIRDDNRKLKDVERRNRENIKEDNERLKRMMEELKKIADEIRKADVDKDTLEKLLRDLRRKVEKIKRDNERHNDEDRKTLKRIHEDNKRILEEIKDRIDKAPVDDSIRRTVEKLLEDNRRRNEEILKESEDLLRKNREKTKEIVERAERLLDKLRRERK

SEQ ID NO: 6561 - protein, 171 aa, Artificial Sequence; identical to SEQ ID NO: 6560
  Synthetic

SEQ ID NO: 6562 - protein, 174 aa, Artificial Sequence
  Synthetic
DEAEELKERIERLSRRIDEEYRRLLEDYERLLRELEKKIEDLKRELEKLVEELRREGTDEKLDRRLEEMLRELERELRELVERLRRDLEEIRKHIKRSRDRHERANRELERELKETGVTEELKEKVKEIVKRSEEDIRRLKKHLDESIRTAEEVIRRLREKIKRIIDTVRDAKR

SEQ ID NO: 6563 - protein, 174 aa, Artificial Sequence; identical to SEQ ID NO: 6562
  Synthetic

SEQ ID NO: 6564 - protein, 174 aa, Artificial Sequence
  Synthetic
SELEELEKRIRRLSEEIKKLLDDLRREYEELVKELRRRLEELRKEIERLSEELKAEGRREELDRELRKLEKELEDKLRELKKRLDEDKERVEKMIRDLEERHRRANKELEDELRRDGVTDEMREKVDEIVKRSRDVIKELREHIEESIRRAEKVLRDLEREVRKIIEDARERTR

SEQ ID NO: 6565 - protein, 174 aa, Artificial Sequence; identical to SEQ ID NO: 6564
  Synthetic

SEQ ID NO: 6566 - protein, 174 aa, Artificial Sequence
  Synthetic
REVDELRKEIERLSRKIEDDLKKLEDRYEELLEKLERDLEKLKEDYDRLLRKLEEDGDDEKLKRELDKDREKIERDLEDLKRKLRTDEKEVRDRVKELRDRHREMNERLKTRLRRDGVTEKAEEDVRRTVTESKKVIDELREHIKKSIREVEEAIKRLREHVERSIRRAEEATK

SEQ ID NO: 6567 - protein, 174 aa, Artificial Sequence; identical to SEQ ID NO: 6566
  Synthetic

SEQ ID NO: 6568 - protein, 177 aa, Artificial Sequence
  Synthetic
SEEEKLDEDLERLREEIRELHRELEELIKKLREEVRRIIEKVRTHLKRDRDRAKEVIEKVRGEKDLTKVDEENERNTRDLERKLEEVKKEIKKLADDLKRRNEEIKKELKRKAEELKKRIKDERMREKLEKIKKDVDKLSKELHDKLDKVLKEIEELLRDVKRAIKKVNDDIKERLR

SEQ ID NO: 6569 - protein, 177 aa, Artificial Sequence; identical to SEQ ID NO: 6568
  Synthetic

SEQ ID NO: 6570 - protein, 182 aa, Artificial Sequence
  Synthetic
DEIRELVRRFEELVRRNVEHLKKLLRDAEKLVKENEKHLEDLLREIEETVKRLLDKIRREGPTEELKREAEKKAKELEERLKKNKEDHEERDKRIRDALKRNEDEHRKRSERLKEELDRDIKDKDKARDVEKRIEDLNREIKEIIRRVEERLKELNKRIEKLLEEVRDTLRRLKEELDRAMT

SEQ ID NO: 6571 - protein, 182 aa, Artificial Sequence; identical to SEQ ID NO: 6570
  Synthetic

SEQ ID NO: 6572 - protein, 182 aa, Artificial Sequence
  Synthetic
SEIEELLKEVERRVRENKKHLKRLLEDIKRLVERNAEDLERILRDAERIVRELIKKIRRDGTDKKLRDEAKEASDRIREKLEENERRHREESERLKEKLERNKRTHDDEDRRVRRRLERDIKDKDKLRRIEKALEDLNREIEEILRRVKEEIERLNREIEELLKRVEEELKRLEKELEEELK

SEQ ID NO: 6573 - protein, 182 aa, Artificial Sequence; identical to SEQ ID NO: 6572
  Synthetic

SEQ ID NO: 6574 - protein, 182 aa, Artificial Sequence
  Synthetic
SEIEELLKEVRKRVKENAEDLKRLLDEAKKLADDNVKHIEDLIREVEDIIRRLKERIKRTGNTEELRKEIKDKADEVREKLERNKRRHDELDKRLKDELRRNKKEHEEESKEIEDRLRRDIKDKDKARRLREELRKLNEDIERLLKRVEDELRKLNKKIKDILEEVEEVLERLLRELREEER

SEQ ID NO: 6575 - protein, 182 aa, Artificial Sequence; identical to SEQ ID NO: 6574
  Synthetic

SEQ ID NO: 6576 - protein, 187 aa, Artificial Sequence
  Synthetic
REKEELKKELKKLIEELKRSHDELKEELKRLLKRIEDILRENRKTTEDLSRELKKLLEELRKKVSEEELKRLRDELERLKKEDEEMNRRIEEKLRRLSKRVKDYLDTSRKRLEDLVRRVDEAASQDRRREELKRLLEELRRMIKELKDRNRKALEELEKVIREIEEEIKDINRRLREEIRRLEEEAR

SEQ ID NO: 6577 - protein, 187 aa, Artificial Sequence; identical to SEQ ID NO: 6576
  Synthetic

SEQ ID NO: 6578 - protein, 187 aa, Artificial Sequence
  Synthetic
SKEEELRETLKRLVDEIRRMLEEDRRSDEELVRRIERVLEEDKREDDRLHKRLRDELRRLRKDVDEKTLKEIEEKIRELNKRNEDSLKKIEDDLRRLNEENRKSLEELEKKLEKLARDAEEVLKRDKREDELRRLLRELEEMAKKLEKELRDNNRDLRRVAEELKELIDDNTRKLKEVIEKLEREIK

SEQ ID NO: 6579 - protein, 187 aa, Artificial Sequence; identical to SEQ ID NO: 6578
  Synthetic

SEQ ID NO: 6580 - protein, 187 aa, Artificial Sequence
  Synthetic
SEKETVRDELRKLVETIRKLLEEDKESDKRLADRIRELNEENKEDTERLIRELEKVLEELRKKVSEDELRKLRKRIEDLRRRDEELNKRSREKLEDLNERNKDSLRRIEDELRKLVEEAREVEKRDNDEERLRKLLERLERVIRDLLRKIEENNKRLRKAIKELLDELRKINKELREVIKKLLDDAR

SEQ ID NO: 6581 - protein, 187 aa, Artificial Sequence; identical to SEQ ID NO: 6580
  Synthetic

SEQ ID NO: 6582 - protein, 187 aa, Artificial Sequence
  Synthetic
SEKERLKEELEKLSKEIEDILRDDKRSDDELRRRLRELLEKDRREDERLNEELKRMLEEARKRVSEDELRAIKKEIEDLNRRNEESLRAIEEKIKRLNDENRKSLEEIRRRLKRLVEEVDELRKRDNREELLRRLLEKLKRMAEKLKRDIEDNNRKLRKVATELAKEIEDNSEKLREDAKRLSEKIK

SEQ ID NO: 6583 - protein, 187 aa, Artificial Sequence; identical to SEQ ID NO: 6582
  Synthetic

SEQ ID NO: 6584 - protein, 187 aa, Artificial Sequence
  Synthetic
DEEEELRKRLEKLSKEVRELLRRDEEEDRRLNRELEELLKDHERTVRDLSREVEDLLRKARRKVSEEELTRLRKKLRDLEEESKEALRELRRRVEELNKENKKSLDDLERRLKELEDRAREVEKRDRREDELRELLRRLEDVIRKLAEDLKRNTEDLRRVIKELAERLEELNKRLKREIRRLKEELR

SEQ ID NO: 6585 - protein, 187 aa, Artificial Sequence; identical to SEQ ID NO: 6584
  Synthetic

SEQ ID NO: 6586 - protein, 181 aa, Artificial Sequence
  Synthetic
EKSERLRERLRDLLRKHKELLDRNEKTLEEAERRVEKLLEDNERELKKIEDEVRELLKRLEDDETLRRLLEEAKEVLERIRRKNKKLREDLKRVLERIKEENDRHHEKVKEDLKRIEDRIRKDGVTKEILREIEERFKRLAEDLKRSNDKVRELVDKAEKDIRKSNEELRKLARDVRERVR

SEQ ID NO: 6587 - protein, 181 aa, Artificial Sequence; identical to SEQ ID NO: 6586
  Synthetic

SEQ ID NO: 6588 - protein, 181 aa, Artificial Sequence
  Synthetic
SDEDRLRELLRKLREDHERIVRELRKRLEEVLREIERLLKKNEEDLERIRREVEELLKRISDDEELRRLEKRAEEALRKIREENKKLRKEVRDTLRDILRRIEEHHREVDERLRRIEDRIRKEGATEDIEREIRDTLRRLREDLERIKEDVERLRREIKKRIEDSNRKVRDLLRRVKEAVR

SEQ ID NO: 6589 - protein, 181 aa, Artificial Sequence; identical to SEQ ID NO: 6588
  Synthetic

SEQ ID NO: 6590 - protein, 181 aa, Artificial Sequence
  Synthetic
DEERKLEKSLKDVEDTHRRLLEKNDEDLKELRKRVEDMLRRLEDALRRILEDIEEKLKRIEDDETLKRLRKRVKELLDEIRRRLERLEREVDKRLEEIKERNDRHHEEAKKELKRIRDKIRRDGADEKILREVEDLLRKVAEDLKRSNDEVKELAERLEETIRDLLRRIEEILKEIEERVR

SEQ ID NO: 6591 - protein, 181 aa, Artificial Sequence; identical to SEQ ID NO: 6590
  Synthetic

SEQ ID NO: 6592 - protein, 181 aa, Artificial Sequence
  Synthetic
KDEERLKRFLEDIRRRHRELLERNERALDEIRRRHEELLRRNEEAIKDIERRVRELLKRLEDDDTLRKLEKKVRDDARRSRKRNEEHHREVKEELDRSRKRNEDHHREAEREMRRIEEKIKKDGATEEILKEIEELLRRLEENLRRNHKEVRELLEKVRRNIEENHREVRRLLEEVERRAR

SEQ ID NO: 6593 - protein, 181 aa, Artificial Sequence; identical to SEQ ID NO: 6592
  Synthetic

SEQ ID NO: 6594 - protein, 181 aa, Artificial Sequence
  Synthetic
DEEETLEDVLRELEERVEKLLRDLTRDLERVEKEHKELLKRNKEAIDEIEKRIEELLKRIEDDEKLRRLKEEVRKLVEESRERNKRHHKEVREVLERIRELLERLEKELRRALEEIRDKIRKDGATDEILRKIEELLRRAEEVIRDLERKVRKLERDIRENIKKNHREVREILRKIEEDVR

SEQ ID NO: 6595 - protein, 181 aa, Artificial Sequence; identical to SEQ ID NO: 6594
  Synthetic

SEQ ID NO: 6596 - protein, 175 aa, Artificial Sequence
  Synthetic
KDEERLRELIKRINTEVKKSLDENKERLDKVEEDIRRSLKENEDRMERVRREVEKANVDEKVKKEAEDALRELKRKHDELRKEVEKLVKELEDKHKELEERHREASKDVERVLDKEIDKIEEIKKRLEDILEETRDMSRRLNEELRRILERVKEVSKELNRELEEILKRVEDARR

SEQ ID NO: 6597 - protein, 175 aa, Artificial Sequence; identical to SEQ ID NO: 6596
  Synthetic

SEQ ID NO: 6598 - protein, 175 aa, Artificial Sequence
  Synthetic
SEKEDLERELEEVRRRVEESLRKNEEDVKRVRDELKKLLDENRKELERIRREVERANVDKRVLDEADRLLKELEDDHKKLEEDAKKALDELREEHKRLEETLRRMLKRIKEVLDRESDKMEEIKKEIEKILRDIERVSRELNKKLEEIVRRLKKVSDELNRRIEEIAERVRRRRK

SEQ ID NO: 6599 - protein, 175 aa, Artificial Sequence; identical to SEQ ID NO: 6598
  Synthetic

SEQ ID NO: 6600 - protein, 175 aa, Artificial Sequence
  Synthetic
KDEERLDEELKRVNDEVRRLLARNEETLERIEREVKRLLDENEKRAEDIRKEVEDSNVDERVKTEAKKALDELRERHRELKKELEKLAEELRRKHEELEKRHRDKSRRIKEMLDKETDKIEEIEKTIREELKETRKVSEELNRELERILRELRKVSEELNKDLEKILRRVKKERK

SEQ ID NO: 6601 - protein, 175 aa, Artificial Sequence; identical to SEQ ID NO: 6600
  Synthetic

SEQ ID NO: 6602 - protein, 175 aa, Artificial Sequence
  Synthetic
SEEERLREILKDINRRVEELLKENEERMERIREELEELLERLKEELERIRKRVEEENVDEEVKRRFDEVAEEIKRRLEELKKEAEDKLRRLREEHKKLKEEHERASERIEEVLDKESDKVEEIEKDIRRLLRETERVSEELNKKLEEIARELREMIKEIKERLKRILEEVEKRRR

SEQ ID NO: 6603 - protein, 175 aa, Artificial Sequence; identical to SEQ ID NO: 6602
  Synthetic

SEQ ID NO: 6604 - protein, 175 aa, Artificial Sequence
  Synthetic
SEEDELRRLLKEVNERVERLLDEIRKELEKIAEELRDLLKKNEDKLREIKRRVEENRVDEEIKKDAERALTELKEEHERLDREAKKDLDRIRKELERLEEEHRRVSERIEEVLDKESDKTEDIAREIRELMERTRRVIEEIKKELRDILEKLRRVSEELNKKLDEILKRIEDRTR

SEQ ID NO: 6605 - protein, 175 aa, Artificial Sequence; identical to SEQ ID NO: 6604
  Synthetic

SEQ ID NO: 6606 - protein, 182 aa, Artificial Sequence
  Synthetic
REIEKLIRDYRRILRELSEKIRRLAEEHEDIVRKLIETLKRLIDEIRKIMEDLSRLLRRDGSTEELRKRARKSLEDLRRKIREIKKRLEEEHKKTRKKVKELEDEAREKTKELEKRLKDANVPKKLMDELRRVSEEVNTRLEKLLRDLEKKLRDSEERAKELIRRIEKTLEDIDRRLKEEEK

SEQ ID NO: 6607 - protein, 182 aa, Artificial Sequence; identical to SEQ ID NO: 6606
  Synthetic

SEQ ID NO: 6608 - protein, 184 aa, Artificial Sequence
  Synthetic
RELEKLMEDAERYAKRSMEAFEDLIRKHDELLKRLEKKLRDLIKRIEKLLREIKEKIERTGTTEDLEREVREIVKRIREFLERLDRDAKRIEKENRDVDERLKRENEKVSRRLREVLEELRKDVSEELLKRAKELIETIEERSKRVVDENKRVVERSRRRLKKLLEDIERVLERIERRLTEAKK

SEQ ID NO: 6609 - protein, 184 aa, Artificial Sequence; identical to SEQ ID NO: 6608
  Synthetic

SEQ ID NO: 6610 - protein, 184 aa, Artificial Sequence
  Synthetic
SELEKLLEDIERYVKRSKEKARELIKRHKEYVRRSEERLRRLIEKLEKLAEKLKELIRRTGTTEELEKELKDIAREVREVLKKIKEDNKRAEDKNREEDERLKRENEKMKEDVRKILADLKKDVDDSLLKEVEDLLRKVEEESRRVIEENKRVVEESRKRSERLLREIEKELRRVEKEFRDEKR

SEQ ID NO: 6611 - protein, 184 aa, Artificial Sequence; identical to SEQ ID NO: 6610
  Synthetic

SEQ ID NO: 6612 - protein, 184 aa, Artificial Sequence
  Synthetic
SELEDLMRDVKRYADESARRIEEIIKRHRKLVREISKKIEELIRELRKLIERILELIRRDGDTEELKKEVEKIREEVEEMLERIKREVDKVKDENRRLDEKVRRDNERKKRDLERLLRELRDKVDEELLDRARKLIREIEERSKELSKRNKEEVDRSEERIRRLLKRAEEELRRVREELKEASR

SEQ ID NO: 6613 - protein, 184 aa, Artificial Sequence; identical to SEQ ID NO: 6612
  Synthetic

SEQ ID NO: 6614 - protein, 181 aa, Artificial Sequence
  Synthetic
SREEEIRELLKRSKESLEKLLRELDKEHKESEKSARELLKRNEKRLREIREEIRRLNITEDLLKEIEDLLKRLEDKNRKVAKEYEDLLRESKRHLDELRKEYERLLKELEDKLEDLRRRRKSEEVMKRLLKEIRDVNKEITERLEEHRKRLEEINRDVERIIRELNEEHKEVLKRIREKAK

SEQ ID NO: 6615 - protein, 181 aa, Artificial Sequence; identical to SEQ ID NO: 6614
  Synthetic

SEQ ID NO: 6616 - protein, 182 aa, Artificial Sequence
  Synthetic
SEREELRKLLRRIEEEAKRLLEELKRTTDDTRRENEELLRRLEELSKETKKRVEDLLRELDRDKTVKDRLRTELERLERRDRELLERNKKHNKDLEDTDRDLIRKLKKLLDELKERAERVEKTGEDVKDVLKKLEDVLRELKKAVEKIKRDNKRAVDENRELVERIMKENKDAMKKLEEDVR

SEQ ID NO: 6617 - protein, 182 aa, Artificial Sequence; identical to SEQ ID NO: 6616
  Synthetic

SEQ ID NO: 6618 - protein, 182 aa, Artificial Sequence
  Synthetic
SEREELRDLLRRIKEDAERLLKEHRDLLEEVRKEVEKLLRELRKLSKETEDEAERLLRELRRDETVKEKLKRRLDELRKRDEDVERRLKEELDELRRRNKKIEDDLRKKLEDLEREMREVDRRGEDIKDVLKKLKEVLKKLRDDVEKSKRDTKRVLDRLRDTVRKIMEENRRALKEIADEVK

SEQ ID NO: 6619 - protein, 182 aa, Artificial Sequence; identical to SEQ ID NO: 6618
  Synthetic

SEQ ID NO: 6620 - protein, 182 aa, Artificial Sequence
  Synthetic
DDEERLREEVERVERTVRDLLRRLRELTKKTDEDNRKLLKEHEDLLREVVKRVTDLLKDLQRDEEVKRKLKEDLDRLREKNKEILERNKRHNDELRKKDEKLLRELEELLERLKKRIKEVEETGKDVKDVLKEIKEVLREVTERAKEIADDNRRALEENEREVKRSKEDTKRALRKLEEEVK

SEQ ID NO: 6621 - protein, 182 aa, Artificial Sequence; identical to SEQ ID NO: 6620
  Synthetic

SEQ ID NO: 6622 - protein, 181 aa, Artificial Sequence
  Synthetic
SSSEELEKLLEEVRRELRRLAEEVKRLNEEIDKDIDRLAEENDRLHKEVKKDLDRLNLPDESLRRIEEELRRNLERTREILEDLKRRLDESRKEAEKILDELRRTLEKLKRDIDDSDTKGNTEEVVKRILDEIRRTLEEIKEIARRYLEKNKKEMREIRETMKRDNDHLEDLLRKIRETAR

SEQ ID NO: 6623 - protein, 181 aa, Artificial Sequence; identical to SEQ ID NO: 6622
  Synthetic

SEQ ID NO: 6624 - protein, 174 aa, Artificial Sequence
  Synthetic
SDEERIRKKLREIEERHKKLSEELKELLRRSEESVRRLLEKNRKDLDEVRKRIEDLNLTEDILKKLREELDRHRRELERLAREYEKLLRELEREVREVNKRVEETMREIKRRLRETKVDEEVERRLDRLLDESRRLAEELKERIKRVNKRARELVRESEEHLRELLEKVERDAT

SEQ ID NO: 6625 - protein, 174 aa, Artificial Sequence; identical to SEQ ID NO: 6624
  Synthetic

SEQ ID NO: 6626 - protein, 178 aa, Artificial Sequence
  Synthetic
SDKDELKTRLDRVREIIERLARESEELHKELKKRLEDLKRDSERLHRKNLEDIRRSNLPREKLERLEESNRRNLRRSEDTLRKLEEEIRRNEERTKKLLDDLRRLVEELRDKIRRVGDEKEVTDRIREDIKRVIEEVRRLAEEDKESVKEILKKIEKLADEDRRSVEKNHKEVEDTRR

SEQ ID NO: 6627 - protein, 178 aa, Artificial Sequence; identical to SEQ ID NO: 6626
  Synthetic

SEQ ID NO: 6628 - protein, 175 aa, Artificial Sequence
  Synthetic
RDEERAEELLKEIKDTVDELKKEVEKVLDESRKRDKKLNDELRKLLEDSRRTIERDVREDDDLRKEVEEKNRETEKRLKEINDDNERLNKESEDKLRELKKEAEEKLKRIRKIIKDGDRGDKLLEELRKILEELRKKVKDLIEEHRRLVKTSADRVKRLLDEHRRILKELKDRRK

SEQ ID NO: 6629 - protein, 175 aa, Artificial Sequence; identical to SEQ ID NO: 6628
  Synthetic

SEQ ID NO: 6630 - protein, 182 aa, Artificial Sequence
  Synthetic
DEAEELIKRIEDLLRELARRMEEILRRHEEYVKKSAEDVKRLLEEVEKLADDLRREVERDGTTDELRKKVKKIADELRKVLEDLKRANKKVEDENRKLDDDIRKTVEKIEKDVRDALKDLNLPEEVARKIEEVLRRVKEELTKLVEENERKLRESRERSKKLAKEVEDLLREIKRRVEELER

SEQ ID NO: 6631 - protein, 182 aa, Artificial Sequence; identical to SEQ ID NO: 6630
  Synthetic

SEQ ID NO: 6632 - protein, 174 aa, Artificial Sequence
  Synthetic
SERETLEELLERVERLLEKLKRELDEAHKKNKEDLDRLRDKNRKRLEDIKRTIDRIDVREELKKEADRLLKELEELTREIVRRDEDLNRRLAEKVERLKREVERRLEEIRRRVDKDGVTEELLKELKEVLERIRKEVEKLLRTLEEINKTTRKLVEETNEKADRILEKVKRDAK

SEQ ID NO: 6633 - protein, 174 aa, Artificial Sequence; identical to SEQ ID NO: 6632
  Synthetic

SEQ ID NO: 6634 - protein, 174 aa, Artificial Sequence
  Synthetic
SEDEKMEELIKRSEDKLRKLEEDVRRLLEEIRRRAEDNTRRNERTLREIERTLREIPNDKELADRLRELLERLRRRNEELKRELDKLLRDLERKLEELKRRHKEKLDRLRDRVRKTGVTEELVRELEKIDRETTEVVKKLLEELKDIMRRVHERSEESLREAKKILREVEERAR

SEQ ID NO: 6635 - protein, 174 aa, Artificial Sequence; identical to SEQ ID NO: 6634
  Synthetic

SEQ ID NO: 6636 - protein, 179 aa, Artificial Sequence
  Synthetic
SEEEELDKLLKEVREKDERLKREVEELLRRIKKRLEELKRENDELLKEVREVLKKLAKETDVSDEIIKRIEELLRRLEKTSEELRKDVERKRKELEEEARRLHEESEELLKELRRILERGDLPVEDVLRRIEEVARRIERLYEELLKKLRDVVREIEKRVREHNEDVKRVVREIEKRIK

SEQ ID NO: 6637 - protein, 179 aa, Artificial Sequence; identical to SEQ ID NO: 6636
  Synthetic

SEQ ID NO: 6638 - protein, 178 aa, Artificial Sequence
  Synthetic
DEVEKVKEEIKRLNEDVRRLVEEYRKRLEKLNRDHRDYVKKSEKRIRDLIREVRRRPVTDEVVKRVEEELEKIERENREKSKEDEEKNKELEDELRRRKKESEDVLRELKDRVRKAGLDEDATREIDKALEDHRESVERLVRELERLNEENRKSVKKSEEDSRRLLEEVRRELRRKRK

SEQ ID NO: 6639 - protein, 178 aa, Artificial Sequence; identical to SEQ ID NO: 6638
  Synthetic

SEQ ID NO: 6640 - protein, 175 aa, Artificial Sequence
  Synthetic
DEEERVEELLRRDRESDKELRERLRKLNEENRDETEKLIRELEDSLRRLKEELEKKGKDIEELLRDVERYLRESRKRVEDLKREDEKLNKESEDKLDELNKRNEKSLRELREKLRRDGATKELEKELRDNNRRLEEVIRRLEEELKRISEELRKVIKKLKRDNEEKLRRLDEATR

SEQ ID NO: 6641 - protein, 175 aa, Artificial Sequence; identical to SEQ ID NO: 6640
  Synthetic

SEQ ID NO: 6642 - protein, 175 aa, Artificial Sequence
  Synthetic
DEEERVKDINRRNEEDSRRLERRIRELNRENRKSSKELADRVRELLKRAEERLRTEGKDKKELLEEAEDLLRKLTDDLRKLEEDDERMNRDIERKLRELKKEDKDRNDRTKEELERDGVTEELVKKLEDINRRLREAIKRLEDTIREINKELRKKIKELLDRLKEIVKRLEDRAR

SEQ ID NO: 6643 - protein, 175 aa, Artificial Sequence; identical to SEQ ID NO: 6642
  Synthetic

SEQ ID NO: 6644 - protein, 175 aa, Artificial Sequence
  Synthetic
SAEERIKRINKKNRDDSEKLKRRIEESNRENKRSSDELVKRLEELLRKLEEDLKRKGKDDEDLLREVKKRAEEIRERIKRLEDDDRRYNKKSKEDLDDLRREDERLNEETKRELDRDGVDKELEKKLRKINEDLKRAIRKLEEDNKRANEELKKRAEDLLREIEEIIRRLEERTR

SEQ ID NO: 6645 - protein, 175 aa, Artificial Sequence; identical to SEQ ID NO: 6644
  Synthetic

SEQ ID NO: 6646 - protein, 175 aa, Artificial Sequence
  Synthetic
DEERRAEEINRRNKKDSDRLAETIEKILKEDEDRDKELHDRLEEILKELRKRLEEEGKDIRELREEAERLIREIREEIKRLNEENKKSLERIRKKLEDLRRKDEKLNRETRRKLERDGVTEELVKELEKINEELRRDIKRLIDEIRENTERLERMIRELEKKIRKILKELDDRAK

SEQ ID NO: 6647 - protein, 175 aa, Artificial Sequence; identical to SEQ ID NO: 6646
  Synthetic

SEQ ID NO: 6648 - protein, 176 aa, Artificial Sequence
  Synthetic
DLEKELTDLMKKHAEENDRLRRRLEELLKRHAEENDRLRDRVRRINEEVEEILRRAPRSEELEKLKRDHERRVKEAEDRLRELHRLVEERVREIKDELRKLHEKVKKILEDLKDIKEEDVIREALERIKRISDESKRTIDEVVKEIEKITKESRDLITKYERDVERSIEEAERRAT

SEQ ID NO: 6649 - protein, 176 aa, Artificial Sequence; identical to SEQ ID NO: 6648
  Synthetic

SEQ ID NO: 6650 - protein, 184 aa, Artificial Sequence
  Synthetic
SLEERIRELLKRHEDLTRKLKKENDESLRRHRELTKKLRKELEELLKRAEDVLRDLEREGLREEDKEEIERRLKELREKAERLARKDEELLRRAEEKSERLRTEDERLLKELEDEARDLRRKGSDAREVDDLLRKIEDISKKSADRNRELNEELEDISRRSKEEMKKLLDELRRDVEEIKKRTK

SEQ ID NO: 6651 - protein, 184 aa, Artificial Sequence; identical to SEQ ID NO: 6650
  Synthetic

SEQ ID NO: 6652 - protein, 184 aa, Artificial Sequence
  Synthetic
DLEDRIRRLLEESKKNLDELKRRNEESLKRSEDLLKDLKRKLDDLLRKAEEVLRELRKRGLDEDLATKIKKELEDLKREIEELVERYKDLNREIKERSDKLVKEYEDLLKELTERAKDLTDKGSDARDVDRLLEDVKRISDTVHKRNEELNRRLREISERAREAVEDLLRRLEEIVRRIKTRTE

SEQ ID NO: 6653 - protein, 184 aa, Artificial Sequence; identical to SEQ ID NO: 6652
  Synthetic

SEQ ID NO: 6654 - protein, 174 aa, Artificial Sequence
  Synthetic
EEIERILEKLRRDLEEVRKKVKKVLDELRELTEELKRKVEKVLRELKRLSEEIARRVEKGLSEEELKRLDEEVEERVERIKRELEEDNRRVEEKVREVKERLDDEAREIEERIKKAPETRELRTVAREIREELKKLREELDKLLREHRETSKELEKRLKEVLDRHRELSDRLRR

SEQ ID NO: 6655 - protein, 174 aa, Artificial Sequence; identical to SEQ ID NO: 6654
  Synthetic

SEQ ID NO: 6656 - protein, 181 aa, Artificial Sequence
  Synthetic
DELREMIRKVREINERSKDEIRKILEAIKKIVEDHRRVVEKLLRDLKDIVRRARETRSRPTPEELIKTIEKLLEELKRELERLERENKRLLEEIKRRVKELEDRNRELDKELRKEVEKLRTSEEARKRLEDLSRENKRSLDELRKRIDDILDENRRAVEESRERAKRVLDEVRETLKRDEK

SEQ ID NO: 6657 - protein, 181 aa, Artificial Sequence; identical to SEQ ID NO: 6656
  Synthetic

SEQ ID NO: 6658 - protein, 183 aa, Artificial Sequence
  Synthetic
SEVDEVEKRIREAIKRHRDRVKKIIDEIKKLLDDHRRRVKKLEDDLKKRADDVRKETKDGDRDKRTLVERVREELERARREIEEDLKRSREELKKIEKKAREVHKKSRDDLERLREEIERKVKGKEARDRIRELLKKYEDDLRRSEKEIEDILRRYERELRESEKRMREVLKRLEDELRRAEK

SEQ ID NO: 6659 - protein, 183 aa, Artificial Sequence; identical to SEQ ID NO: 6658
  Synthetic

SEQ ID NO: 6660 - protein, 183 aa, Artificial Sequence
  Synthetic
DEVKEVEKKIRKVLREHKKLVEELIRKIKEMIDRHKEIVERIIRTIRRELKRAEELARKGDKDKKTLLEEIRRRLRELAERAKEKHDKSREDLKELKRDAERKLRESEKRLKELEDEARRKVRGEEMEKRIEDLLREYREELERSRRELERLLEEYEKVVDESRKRIKTILDEVEKLLRDLDR

SEQ ID NO: 6661 - protein, 183 aa, Artificial Sequence; identical to SEQ ID NO: 6660
  Synthetic

SEQ ID NO: 6662 - protein, 174 aa, Artificial Sequence
  Synthetic
SSRERFKELSDRNKEVVERSRRRLEKLLEENKREVEKSKKRIEDMLRKADDLLRKLPVSEELLRRAKEMLRRIKEEVDKVEEDNERVDRELRKEVKKIEDDNRREDKRLADEVRRDGVTERLSEEIKRLIETHEKLLRELEKKIRDLIRKHREDVERIIKEIDKLLKKIDEDTR

SEQ ID NO: 6663 - protein, 174 aa, Artificial Sequence; identical to SEQ ID NO: 6662
  Synthetic

SEQ ID NO: 6664 - protein, 171 aa, Artificial Sequence
  Synthetic
SEEETLDELNRENEELLRRSKERLDRSHEKLKKILDDISERVKELLKRAEKLLRDENVDEKLKKEFDRRLKELRDKLRRLEEEVKKYLEESKREVRKLEETNRRMDEETRRRRDDKDRVSDRIRRLLEEHERVVRELLESNDRMAERLRRVAEELVKEIKKELDDLRRRTT

SEQ ID NO: 6665 - protein, 171 aa, Artificial Sequence; identical to SEQ ID NO: 6664
  Synthetic

SEQ ID NO: 6666 - protein, 171 aa, Artificial Sequence
  Synthetic
SEEETLERLLRKNEEELKKSKERLKELNRTNRKELRDSERRIKRALEEVEDLIRREKVDEDLLRELKRLLEELRRLVEKLKEENERADEETRKKVKELEDRNRKANEDLRRRRDDKDEVTKTIERIIEEHRRMIEELIKEIRKLIKEHRDKVRELLKRIKDILRRLKEERR

SEQ ID NO: 6667 - protein, 171 aa, Artificial Sequence; identical to SEQ ID NO: 6666
  Synthetic

SEQ ID NO: 6668 - protein, 188 aa, Artificial Sequence
  Synthetic
SLDERIDELRRTLEEMLDRIRRSNEEVLRDSRRVLEEIDERARRVVEEAEKLLREIDKRKGKNEDAERLLREIKKRIEDLRRRIEKLKKEYEEEDDRLEKELRDLHREIDRLKRELETEADRLKKENVSEEDIKRLLEKVREIIEELKRRNDELNKRIKDLSEEMRRRVKKLLDEIKEDLERIKRRAD

SEQ ID NO: 6669 - protein, 188 aa, Artificial Sequence; identical to SEQ ID NO: 6668
  Synthetic

SEQ ID NO: 6670 - protein, 188 aa, Artificial Sequence
  Synthetic
SLEEEIKELIKRAEEVLERLARSNKEVLDRSRKVLKELRETNKRLLEELKRALDKIRKDKGDDEDLRRELTKIREKSERLRKKSKDLEDDYRRLDEELRKRIKELHDKIKRLLEELKEKADDLRRRNVSEEDIKRLLEEVERIIRKLAEENKKLNKEIEDLSRRARERNERLLREVEKIIRDIRERAR

SEQ ID NO: 6671 - protein, 188 aa, Artificial Sequence; identical to SEQ ID NO: 6670
  Synthetic

SEQ ID NO: 6672 - protein, 181 aa, Artificial Sequence
  Synthetic
SEVEELTKKAKKIIEDHRRYVEKSARDVERLIREHERYVEESAKKVEKLLREIKELDKRDLREEDRKRVDETIKRILDKLREENERAKEENKKMLDKLRRDNEKVERENRKLLDDLRREVKDIRDKDKIRELERENEEVIKESRERSERLARKNKKVLEDSERRSRELSERVERLLDESRR

SEQ ID NO: 6673 - protein, 181 aa, Artificial Sequence; identical to SEQ ID NO: 6672
  Synthetic

SEQ ID NO: 6674 - protein, 171 aa, Artificial Sequence
  Synthetic
REEDVLRKLEKEIRDLLERIKRKSEELIERNKRTNDDIRRRSKETIDELRELTKRVDIDDSVRRRVEKVEEELERENEKLSRDDKRSIEENKKKDDELARRVEKVIEDLRRANVPDEDIRREAERLLREMEKRAKENEEDVRRNLKRLRDALKEHKEKVEKLLEEIKKDAK

SEQ ID NO: 6675 - protein, 171 aa, Artificial Sequence; identical to SEQ ID NO: 6674
  Synthetic

SEQ ID NO: 6676 - protein, 175 aa, Artificial Sequence
  Synthetic
SETDDIIRRIRRLIEELLRNSKRTSDDNRRTLEELERNSERAIKKIKDVLEKLSRDRVPEDELKKRLDELREEIKEVEERHEELLERDRRKLEEVEKEHERRLEEIKRRIEKVLRDTSSDEKAEKIRKELEDMARESRKLMRENKREVDRVEKKSRKLLKDILDEIDKVDEDEKR

SEQ ID NO: 6677 - protein, 175 aa, Artificial Sequence; identical to SEQ ID NO: 6676
  Synthetic

SEQ ID NO: 6678 - protein, 176 aa, Artificial Sequence
  Synthetic
SEAERIAREVERVLREIEEEVKRLSEENRELVERIERESRKSIEDIERRLEEVKRKVKREELLKEVEKELRDLDRRHKEKHDEVERESRELLKRIEEVLDRARKELEELEKRAREENRLDRRLLEALRREVEEVLKRIRETLEENRRRNEEVLRRDKELLERIRDKIRRVLEELKR

SEQ ID NO: 6679 - protein, 176 aa, Artificial Sequence; identical to SEQ ID NO: 6678
  Synthetic

SEQ ID NO: 6680 - protein, 177 aa, Artificial Sequence
  Synthetic
DEERELRKLERELEDVVRKDRKILEDLRRTLDTVRREDERILRELEETLKEVVKRVREKGTTEDVDRKVDENRKELEKAKRKSEEETERNKERLDDILRRSERRLEDIKRRLDELERRGEDIRRISEEAKELLKRWEDESRKVEEEHRRSLEEWRERSERIAREHKKSLEKLEKDVE

SEQ ID NO: 6681 - protein, 177 aa, Artificial Sequence; identical to SEQ ID NO: 6680
  Synthetic

SEQ ID NO: 6682 - protein, 181 aa, Artificial Sequence
  Synthetic
SIEELLKKLEEDIERVLRKSEELLKRNEEENKKVLDESKRLLDELKKRAEKVLRELKDEKRRLEDAERKIREMEKEARKVLEDSKRTSEKLKKKAEDVLKRSKEEVEELKRRVKKVREDGTTEEVLKEIVKRVRDDIERHDRESKKLSDENKRVVDEHRKRSEELARKLEELLREIRERVT

SEQ ID NO: 6683 - protein, 181 aa, Artificial Sequence; identical to SEQ ID NO: 6682
  Synthetic

SEQ ID NO: 6684 - protein, 183 aa, Artificial Sequence
  Synthetic
SDIEKLAEEVDRLNKELTDRLERLREEHKRTLDEIRKTLEKLKREVDKELEEVKKIVKDGDNRERLEEDLRRRLEELEKRMKELKDRNRRKAEESERKLRELLKDNKDKLEKIKDDARKADSRDERVKKILDDLKRKNEENDERVERIMRELRERNRKLNEEIDKIVEDIRREVEKVSREARR

SEQ ID NO: 6685 - protein, 183 aa, Artificial Sequence; identical to SEQ ID NO: 6684
  Synthetic

SEQ ID NO: 6686 - protein, 180 aa, Artificial Sequence
  Synthetic
DAVDRVREENKKDSERNKKRVEDVKRRAEERSRRNKKKVKELRDRNREEIKRIKELKDRGEVTEEERKKIRDRYKKDEDRVRKEDEETKRRLEEETKEDDRRNEREEREYEKKAEELERRNIVDRKVEEESRRSFKRNKEENKKVRDEIKKTIEENEAENRKAHEDSKRSFEELEDELRK

SEQ ID NO: 6687 - protein, 180 aa, Artificial Sequence; identical to SEQ ID NO: 6686
  Synthetic

SEQ ID NO: 6688 - protein, 182 aa, Artificial Sequence
  Synthetic
DKEREATRRLRELEKENTKLVKEIRDADREIEKRLREIHKKLEDENRKLEEEIKDMVRRKGDTSEEEKKKLDDLRRRLREAHRELDEERKKSEKKLEDDHRREETRLRRNREETKKTEDDLRREGVDDRIVEEVKKHHERNERRLREYLDESRKYLEDHIRRLEKYLEDSRRLATRIKEETK

SEQ ID NO: 6689 - protein, 182 aa, Artificial Sequence; identical to SEQ ID NO: 6688
  Synthetic

SEQ ID NO: 6690 - protein, 178 aa, Artificial Sequence
  Synthetic
SSVEEVKRKNEKSLREIERASEEHLERLKRELEKSEDEARKHNKKLDDDLERLERKGGGDEDAERELRKLREDSERERKEHKEKLDRARRRSEKMKEDLKRRLEKLDREHREDRRREPDDERVKDLERTHEESKRRVEELMKENDDLLKRIEEESKRLNEENERKVEDIEKKVEDLKR

SEQ ID NO: 6691 - protein, 178 aa, Artificial Sequence; identical to SEQ ID NO: 6690
  Synthetic

SEQ ID NO: 6692 - protein, 182 aa, Artificial Sequence
  Synthetic
SEIERVAKELKDEADRLRKEVEKHRRRSKEELDRLREESKKVNEDLKRMLERIREIAAQGNLEEDILRTMKEEIERRREEYEERLKAVEERLRREHERTKKKLDDDRRRIEKKRKDLTDKLEPNEEFKKLRDLIEDIKRRLEELVKALEETNKKIEDDVRDSVRKNRETLERIKKEIEDTAT

SEQ ID NO: 6693 - protein, 182 aa, Artificial Sequence; identical to SEQ ID NO: 6692
  Synthetic

SEQ ID NO: 6694 - protein, 183 aa, Artificial Sequence
  Synthetic
KDVERILREIRETLRRVEEEAKRSNDEIRKLNEEAERIVREILKEIEKELREVRKRLTEKGPRERLEEELKRRLEKIRERIERAREEYERKVREEEKKHREKEERDRERKERTEDRIRRRQSENDELLRRLKEELDRVERTIRELIRRNEEVLERSDESVEKLLRELEELLRRVEEEIKKAAT

SEQ ID NO: 6695 - protein, 183 aa, Artificial Sequence; identical to SEQ ID NO: 6694
  Synthetic

SEQ ID NO: 6696 - protein, 176 aa, Artificial Sequence
  Synthetic
SEREERAKRLRKILEDLKRESEEHLRRLKTRLDKLREDSKKHLEDVRRKLEDLKRIVEENKVSREELEKRREDIERRVRESEKRTDEREKRDEERHREFRKDLERKVRTMRDETRRGGETDDELRKLVRKVEEDLKRLDEENKKLLEKVKRDLDRLKKENKDLLKRVEEELRREAT

SEQ ID NO: 6697 - protein, 176 aa, Artificial Sequence; identical to SEQ ID NO: 6696
  Synthetic

SEQ ID NO: 6698 - protein, 176 aa, Artificial Sequence
  Synthetic
SEEEERKRRLEEKLERLEEKSRRHLKEVKRTLEELEERSRRHLDENRRLLKRLKEIVDRNEDSEEVIERREEEIDKRNEEEERETRKRAEETDRRVEKSEEKLKRDEDRMDKETKDGGDTSEEIKKLVKDIKEELKRLLEENKRLLEEAKKTLKKLLEDNRRLIEKIKKELDEARK

SEQ ID NO: 6699 - protein, 176 aa, Artificial Sequence; identical to SEQ ID NO: 6698
  Synthetic

SEQ ID NO: 6700 - protein, 174 aa, Artificial Sequence
  Synthetic
REEERLKRELEKDLERIKKLSDEHKKRLEEENRDLRRKSREHKEKLERDLRRVEEIRRREKIREEIEERIRRRDEELERDNERVKEEYDRRREDRRRENEEIKERLKERKEETRKKDTSDEVERLLKEIEDRVRKLEKENEEIARRSTETLEKLLKENRETLKEIRDRVREAKR

SEQ ID NO: 6701 - protein, 174 aa, Artificial Sequence; identical to SEQ ID NO: 6700
  Synthetic

SEQ ID NO: 6702 - protein, 174 aa, Artificial Sequence
  Synthetic
SEEEELKRRLKEILRELKELSERHKKRLRELNEKLKRLSEEHKRKLEEITEDLRRIATREPIREEIDKRYREKVERAKEENKEIEEDYKRAEKELREDNRRIEEEVRKKEEDTRRTPNSEEVKRLLDEIRRELERLKEENRKIVEDSTRTLKELLEENKRILEESSRDLERLKR

SEQ ID NO: 6703 - protein, 174 aa, Artificial Sequence; identical to SEQ ID NO: 6702
  Synthetic

SEQ ID NO: 6704 - protein, 174 aa, Artificial Sequence
  Synthetic
SEEEKIKEEIKRDLEDLRRLSKEHKDRLRKLLEDIKKLSEEHKDKLRRITKELRDVVRREEIREELDEEYKEKAERARRENEEIRKKLEEDVERLRKENERIKREAERRDKETEDTDTSEEVKRLLEKVKEDLKRLLDENKRIIERIEREVERLKRENEEILKESSRDLERAKK

SEQ ID NO: 6705 - protein, 174 aa, Artificial Sequence; identical to SEQ ID NO: 6704
  Synthetic

SEQ ID NO: 6706 - protein, 174 aa, Artificial Sequence
  Synthetic
SKEEKLKEDLKRTLDDARRLAEETKRRLEEILEKLKRLSEKSKEDVKRTTDELRDIVRKRKIDEEIDERYKDKKRKHERRMTEIDKEVRELDEDTRRKIEKIDKELEDRDDRTRKEDTSEEIKDLLRRIREELKRLKDELRRIIEEIRKELERLKRENEELNRRSSEELKKAKK

SEQ ID NO: 6707 - protein, 174 aa, Artificial Sequence; identical to SEQ ID NO: 6706
  Synthetic

SEQ ID NO: 6708 - protein, 179 aa, Artificial Sequence
  Synthetic
SEVEELLERHKRALDKAKKVSEDHKRDLKEKLDDVKRKVEELERRLKRALDELTKEGGGSTDVERKLREVDEKTERDRRRLDEEVKRVEDESREKTERLREEVKRLHDESRDRKEKLRLEEDLVRTLDELHKDIERRLRKLEEENRDILRRIREEIERLKRKLDEIARRIKEEVKKLKK

SEQ ID NO: 6709 - protein, 179 aa, Artificial Sequence; identical to SEQ ID NO: 6708
  Synthetic

SEQ ID NO: 6710 - protein, 179 aa, Artificial Sequence
  Synthetic
SEVEELKKEHKKVLDEVRRASKKHKEELEEMLRDLKRKADELARRLEDALRRLEEEGGGGDRVEKDLRRIEERLKEDEKRDRDKVDELRRRSEEKLKRIKRRMEEVSKKSEDDERKLRLDKKAVDELRELHKEIKRRIEKLLKENEEILRKIEEDIERLLEDLRRKAEEIKRRVDETRR

SEQ ID NO: 6711 - protein, 179 aa, Artificial Sequence; identical to SEQ ID NO: 6710
  Synthetic

SEQ ID NO: 6712 - protein, 179 aa, Artificial Sequence
  Synthetic
SEVEEIEKENKDAVRRMREKSRRHKEELKDALREAEEISRRHKEELKRKLEELTKRGGGDEKLDEDLKRIRDKSKKTTEDLKRKVEELRKRSEETLKELEDDLKRLHEKHKDTEDKMDLEEELVRKLRRLDKRTHEDVRRLLDENRRTLEKIEEDIRRLIKENEDTLREIEKRVEDKKR

SEQ ID NO: 6713 - protein, 179 aa, Artificial Sequence; identical to SEQ ID NO: 6712
  Synthetic

SEQ ID NO: 6714 - protein, 177 aa, Artificial Sequence
  Synthetic
SEDEELKKEIEKLLRELRKRSTESKKEIEDLLDELRRKSERSRKEIEDTLRELEERAKGERSEEEDKRTREDTEEKEKEHRKKLRKEDEELREREKEHERKLREVEKRLREREEETKSRETSEEIKELLERLRRDAERLKKENEDLNRRLREEVEKNKEDNKRLNEELRKKVEEDRR

SEQ ID NO: 6715 - protein, 177 aa, Artificial Sequence; identical to SEQ ID NO: 6714
  Synthetic

SEQ ID NO: 6716 - protein, 185 aa, Artificial Sequence
  Synthetic
SLEETLDKILEDIRRRIRENEERNRRLKEEIDKAIKRNEEENRKTNEDIKRKIDDLERKRGDRSKEVEDTKREVEEEEDRSRKKEDEDRERVKRAKEESERRREEDKKRVEDMERRAEEKKDKEQDKKEVEELIRELEDELRKLEERSKEHLDRLREELKELDERSKKHLDELRKLEEKLRRDAD

SEQ ID NO: 6717 - protein, 185 aa, Artificial Sequence; identical to SEQ ID NO: 6716
  Synthetic

SEQ ID NO: 6718 - protein, 175 aa, Artificial Sequence
  Synthetic
SETEKLLERIRRNVEENEKYAREHLKKLDKNLKDNKEYIDRHVKKLKERLDTLREIAREKDPSRELDKALEETRRDSRRSEENRRRHEKRTRDEAKKSEERLRKHRKDSEKETKDGGDREERIEKLLRELERTHRELKEELDKLHKRLEEEHRRLEKKLRDIHRKVEKDLRDLKR

SEQ ID NO: 6719 - protein, 175 aa, Artificial Sequence; identical to SEQ ID NO: 6718
  Synthetic

SEQ ID NO: 6720 - protein, 175 aa, Artificial Sequence
  Synthetic
EEKERLKKRIRDNVEENKKYAEEHLKRLKEKLEEVRKYIEDHKDRLRRKIEELKKDAERKPDDRELEEKEKKDREEAERSKRRRDEKRRKIEEDSRESRKRRDRHRRESEKEIRDGGDNDEEIRRILEELRRTHKKLEEELEELHKRVEDELRRLEDELREIHERLEETLRRLRK

SEQ ID NO: 6721 - protein, 175 aa, Artificial Sequence; identical to SEQ ID NO: 6720
  Synthetic

SEQ ID NO: 6722 - protein, 175 aa, Artificial Sequence
  Synthetic
SEKEKLKEEIKRNVEENRRYVEEHKRDLERNAEENEKYIREHLKRLKEEAEEVRDRVAKEPPDRKMEKTEKETDKRAKESRDRAERHKEETRKKAEESKRREDRHREESEDRAKKGGDRDKEIERLLRELERTHRELRKDLKRIHDELKKKHDDLRRTLEEVHKRVKEELDRARR

SEQ ID NO: 6723 - protein, 175 aa, Artificial Sequence; identical to SEQ ID NO: 6722
  Synthetic

SEQ ID NO: 6724 - protein, 175 aa, Artificial Sequence
  Synthetic
SEKEELIERIRRNLEENRRYIERHLEELEKKLDDVRRKAKRHLEKLREELEKLKDDARKKPPDREVEKRKEEKDRESERSKRELDRTREEIERETRESEDRERRHAEESEKRIKDGGDNDEEIRKLLEELRKTHEKLKRDLERLHKKVRDTLKKLEDELKELHKRVDDELRKLRK

SEQ ID NO: 6725 - protein, 175 aa, Artificial Sequence; identical to SEQ ID NO: 6724
  Synthetic

SEQ ID NO: 6726 - protein, 179 aa, Artificial Sequence
  Synthetic
DEERKLEELEKENDKLLEDAKRTLEKLLKDNRDLVKRVEDELRRLEEENKKLADDVRRDGKSDEKIERDIDKSRRDTRDEARRARERIKRSEDELRREMEELDKRHKEFKEDERRKRKEKRRSSKELEDRSREHLERLKARLKELEDKSRKHLEEVKKELRELEEKSKKHLKRLEDARR

SEQ ID NO: 6727 - protein, 179 aa, Artificial Sequence; identical to SEQ ID NO: 6726
  Synthetic

SEQ ID NO: 6728 - protein, 179 aa, Artificial Sequence
  Synthetic
DEEETLKRLDEENDKLLEEVKKTLEDSLRRLEELHKRTEEELRKSRRELRELVKDVERKGSLREEIKKELDDYDRRTKEELDKTRDEHEKYKRKVREELKRTDEKVRRSKEDDERVRREKRRSKEELRDKSRRHLEDVKRRLEELKKSNEEALRRDEKKLEDLRRSNEKVLRELKEKAR

SEQ ID NO: 6729 - protein, 179 aa, Artificial Sequence; identical to SEQ ID NO: 6728
  Synthetic

SEQ ID NO: 6730 - protein, 179 aa, Artificial Sequence
  Synthetic
SEEEEVRRLEEELKKLHDDIKRRLEELLRENEKILRDIDREIKKLLEELRKTIDKADKDGVLSEELKKELEKLLKDIEDTLKRLKDESKEDRERLEKELRELSKRSREEDEKRRKATKDGDRDKDELRKIVEELKRDHEKDLRKVEKLSEEHKEKLRRALEELKRLAEEVKKRLDDERR

SEQ ID NO: 6731 - protein, 179 aa, Artificial Sequence; identical to SEQ ID NO: 6730
  Synthetic

SEQ ID NO: 6732 - protein, 189 aa, Artificial Sequence
  Synthetic
SVEERLEEMERRNKDLIRRVEEDLERLLKENRDLIRRIKEELKRLKEELKELVERISREGDRPEEEKERVKERLKKEEKETDEKAERDDRRHRKTEKETRDRVREDRKRHEDEERRRREKARRLKDSGSKEEVLKELEEENRKHEKRLRDALERLRRRSKKHKDEARKILEELKERAKTIKRRLEEDRR

SEQ ID NO: 6733 - protein, 189 aa, Artificial Sequence; identical to SEQ ID NO: 6732
  Synthetic

SEQ ID NO: 6734 - protein, 189 aa, Artificial Sequence
  Synthetic
SVKEDLRKAKEENKRLIEKAEDDLRKLLRENKELLKRIDEELKRLKKELDDIVRRIEDKGDRPKEDRDRVKKEADEIREETDREVEEERRDVKRTEEETKKRAEDSKRRHKKFEDDLDEKARELERSGSKEEVLEKLKRDNEDHKRRLKEDLRRLREESKKHKKKLEDRLKKLEERARRIKEKLKEEER

SEQ ID NO: 6735 - protein, 189 aa, Artificial Sequence; identical to SEQ ID NO: 6734
  Synthetic

SEQ ID NO: 6736 - protein, 184 aa, Artificial Sequence
  Synthetic
DDEERIRKIAEDIKRKLKETLERLRDESRKNKRKLEDLLRKSEEKAKRLKDKLRKMEEEKERKRDEELKREIERLRREKEELHKEFRKRVEDTRRENERRREEVKKRLDTMRKETEDTEEKIRRDGVDNEDVKRLLRELKEITDRIDEEVKRLREENERITRRIEEEHKRLNKELERILREIER

SEQ ID NO: 6737 - protein, 184 aa, Artificial Sequence; identical to SEQ ID NO: 6736
  Synthetic

SEQ ID NO: 6738 - protein, 175 aa, Artificial Sequence
  Synthetic
SSEEKAKELRKRLRETHKRVKDEIKRLKEELEESHKRLEERSRETLRKLEELIKELNVSEEVLDELRRKLERLEEEHKKYKEKSKRELEKIDEDVERYERDSRREEEETEKKLRKDGVVDTELEKDVRRVEEKNRRALEDVRRKVEEVKESNKRALEKNERIVREVERRLREEKK

SEQ ID NO: 6739 - protein, 175 aa, Artificial Sequence; identical to SEQ ID NO: 6738
  Synthetic

SEQ ID NO: 6740 - protein, 175 aa, Artificial Sequence
  Synthetic
SSEERFEKLDRELKRTHEELERAIRELKKDYERSLKRVEEELKRLLDELEELARRVGVDEKVLKEEEDERRRLREEVEKYKKDAKEELKRTDDKVRKYKEKSDRDRERAEDEVRKTGVVDTKVTETVRRVREENKRMLEDVKRDVDRLRTSNEKVLRDIRRTVKRAKERLKELKE

SEQ ID NO: 6741 - protein, 175 aa, Artificial Sequence; identical to SEQ ID NO: 6740
  Synthetic

SEQ ID NO: 6742 - protein, 179 aa, Artificial Sequence
  Synthetic
SAEDELRRLRRELEKSHEELKRRIDELLKRLRELVKRVKDRSKELLDELRKLLEDVKRKGRVSERLEEDIRKHMKRHRERLEREERELKKKLKEMEDRVREYEDRSRREAKKDEEDIRREGVKDTRVRERVKETRRRNEEVLREVERIAKEVEDDLKRILEELEDNVRRVKKKIKDVER

SEQ ID NO: 6743 - protein, 179 aa, Artificial Sequence; identical to SEQ ID NO: 6742
  Synthetic

SEQ ID NO: 6744 - protein, 179 aa, Artificial Sequence
  Synthetic
SSEEELKKLEKELEETHRKLKEDVERLLRDLDRKVKKVEDDSKKLLDELRKLLEEAKRRGVVSEEVEKRVRDHMKRHEEELKRIREELEREKEERREELRRYEEEVKKKREEDRDDIRRRGVKERDVRKRVKEMKEDNRRALEDIRRKTEEVAKKLREILKKLRENVRRVAEEIKRVAD

SEQ ID NO: 6745 - protein, 179 aa, Artificial Sequence; identical to SEQ ID NO: 6744
  Synthetic

SEQ ID NO: 6746 - protein, 179 aa, Artificial Sequence
  Synthetic
STEEELERLRRELERTHERLREESEKLVRELRKLVEEVREALERLRRDLKRLLKEVREKGRASEDVERELKKEDERIEDKARKDKEEADKHERRHREDLKRYEKKSEEDDRRREKKIRDKGVKETEVREEVKRTKEENKRVEEKLRRNVDEMRKKLEEILRRIKEEIDKMRRKIEEIER

SEQ ID NO: 6747 - protein, 179 aa, Artificial Sequence; identical to SEQ ID NO: 6746
  Synthetic

SEQ ID NO: 6748 - protein, 178 aa, Artificial Sequence
  Synthetic
DVEEDLKRLEKKNRDLNKRMEDSNRKLEEDDERVNRKIRKDHKKAEDDLRRVIKEVEEENRSDERDKKRLKKRTDDNRREDKRRDDENKKTNKDYKRRFEKKRRENEDTDRKTKDEVRRRGVTEKTIEDIERHLDRLRKENDKLRKELEDHIRRLEEEVRKNLDRIREEIERARERVR

SEQ ID NO: 6749 - protein, 178 aa, Artificial Sequence; identical to SEQ ID NO: 6748
  Synthetic

SEQ ID NO: 6750 - protein, 179 aa, Artificial Sequence
  Synthetic
RAEDEVRKIKKEIDELIRRLEKLNEDIKREIDELVRRLEELNKRVKEEIKRLIEELKKENRVDERKVRKLEEDLERHDREVREDKERIERTAKRHREDVERNKEETTRRREKTKREIDRDGVGDRELKERLDRMRDHARKHEEKLKESLKRVREHVKRHAERVEESLRRLKRDVDELRK

SEQ ID NO: 6751 - protein, 179 aa, Artificial Sequence; identical to SEQ ID NO: 6750
  Synthetic

SEQ ID NO: 6752 - protein, 174 aa, Artificial Sequence
  Synthetic
SSDEKLEEIERHHRKVEEESRRLDEDIKRHHKEVEDESRELLERIKKKLEDVTRALGREDREMKELKRELDKRREEVKRRDDREREKSKKREDEIEKKDRERRKESEEKRRRLREEGLRDEILEKLERDNRRYKEESEEEVERAKEENRRYLEESRREVEEFDRKLKEIADRAR

SEQ ID NO: 6753 - protein, 174 aa, Artificial Sequence; identical to SEQ ID NO: 6752
  Synthetic

SEQ ID NO: 6754 - protein, 182 aa, Artificial Sequence
  Synthetic
SELEERVKKVEKVNEDLKRRVEEHERRVKRTLERLEEEVRRHAEKVKKRLEELRRLAKDVERETLEREIREDEKRSRDDAERLAREIERVRKESEEDAKRKKEDNERKNRERKDSARRQGRSEERIEDLLRRLDDRNRETEREIEERHKRLKEELDKVEERIRREHEKLKRELEEVERRTRK

SEQ ID NO: 6755 - protein, 182 aa, Artificial Sequence; identical to SEQ ID NO: 6754
  Synthetic

SEQ ID NO: 6756 - protein, 185 aa, Artificial Sequence
  Synthetic
DVVDELRRIAKEVRDRLREIVERLDRIAKEVVKENEEVVRHNDELAKRVVTTAKRIVDEVKDKETVKRRIDRIAEKVEEDTKEHEDRSKRSEEDVERVVKKIREEVKEIVDRVEKFVKEVRDSGTDSEEVKRVVETVRKLLRDAEKEIEEVVKKVRDLLRRVNKELKESVERVRRLLEEVRERAR

SEQ ID NO: 6757 - protein, 185 aa, Artificial Sequence; identical to SEQ ID NO: 6756
  Synthetic

SEQ ID NO: 6758 - protein, 186 aa, Artificial Sequence
  Synthetic
SDLDRVLRKIEELVREIEKESERTNRKSERDTEEVARRSEDSDRDIERLVREIRDRLRKAGVDSREVERVDRELEELLRRLRKENEDSLRESERLNRENKRRSEDSVKKLRDILARVEEKVRKREDLKDVVRELEEIVKELEERAKENVKRSEKSVKEDLDVLADNVRRSKEIVEEIKKRADEVVT

SEQ ID NO: 6759 - protein, 186 aa, Artificial Sequence; identical to SEQ ID NO: 6758
  Synthetic

SEQ ID NO: 6760 - protein, 171 aa, Artificial Sequence
  Synthetic
SEKEKVIKEARELLERLRKRLKDVNDDVTRLLDELRKENEKSREDVEREVKRLEEEVPVEDVIRELKRRLEEVDKKNRDILETLKRELDEVSRRTREELEKLRKELEEVEKAGLPAEELKRVADRLRRRLERLVEENERVVKKILDEIRRSVEENKRIVDKVRKDLDERRK

SEQ ID NO: 6761 - protein, 171 aa, Artificial Sequence; identical to SEQ ID NO: 6760
  Synthetic

SEQ ID NO: 6762 - protein, 171 aa, Artificial Sequence
  Synthetic
DEDEKVLRKIEELVRRLHEKNRKVLEESKRTLEKVEERLRRVLKEIEDLVRDAARRVDKREVIEELKKDLDRVRRKLEKVRKENADLNDRVRRELEEIDKRLKKKLDDVRRSDRDVSELDKIIKELKREADESVKKLKEIVKRSLDHLEEVVKELKKRLDDLKREIDTKAK

SEQ ID NO: 6763 - protein, 171 aa, Artificial Sequence; identical to SEQ ID NO: 6762
  Synthetic

SEQ ID NO: 6764 - protein, 175 aa, Artificial Sequence
  Synthetic
SLEEEVKKVVEEIKRRIEDDVRRIRELVERIKKLIEKDVTDLKRVVDENRDLAEKAKRIPKEDVDRVVREVERSNDELRRHSEEVLRRVERLIRELERHSREVIKRIEDTIRELRRRKVSEELLRELRRVLEEAREDSRRLLEEIRKVLEEAEEKSRRVLEESKRVNDELRERLR

SEQ ID NO: 6765 - protein, 175 aa, Artificial Sequence; identical to SEQ ID NO: 6764
  Synthetic

SEQ ID NO: 6766 - protein, 176 aa, Artificial Sequence
  Synthetic
SLDESAKRVLEEIKRLAKEDLDELKRVLDEIKEILREVLEANRDSVRRIEEEVEKLARVDDERTVKRLEDEAKRILDDNRRKSERVARELERLLEELKRHSEDVLKKLKDLLRELKEEGVDDRVLEEIERVIRKIEEDSRRLLKEIADVIKKVREESKRLLDDLKRVIDELRERAR

SEQ ID NO: 6767 - protein, 176 aa, Artificial Sequence; identical to SEQ ID NO: 6766
  Synthetic

SEQ ID NO: 6768 - protein, 185 aa, Artificial Sequence
  Synthetic
SLEEVLDRVRRESDKVRKTLERVKEEVERVSREVVEDLKRVEEEVRRLIERVKDILRRSNIPEEDLRRLERRLEELERKIKKVVKDNEDRNRDLNRRIDEVIKENERRNRELLKKAEEDIRRKKDKEELIRDVLREAERLVKESLDDIRRLLDEVRRLVEESRRNIERLLEEVRRLVEEIERAAE

SEQ ID NO: 6769 - protein, 185 aa, Artificial Sequence; identical to SEQ ID NO: 6768
  Synthetic

SEQ ID NO: 6770 - protein, 178 aa, Artificial Sequence
  Synthetic
DKVDEVLKRVKRVVEEIEDRVRKLNKEVRDVVKRIEELAREVLDHSRKVVEEIKKTAEDRKDERVLEEIKRKSDEDEKRLEDVLRRIKELLDRLDDKHKRILEEIEKKIRELRERIKKTGIEEEVVRTVKEELDKALEKAERVLEHSRRMLERVLKEAKRVLDEVKELNKRVIDEVRR

SEQ ID NO: 6771 - protein, 178 aa, Artificial Sequence; identical to SEQ ID NO: 6770
  Synthetic

SEQ ID NO: 6772 - protein, 175 aa, Artificial Sequence
  Synthetic
SVEDVAREVDKLLKRANEESKRVLEEVERLLRTVSRELEKVIRDVKKLIDDVEKRVPLKESLEEVKRRIEKLVEDVKRVNDESRRRIEELIKELKDMDRRSKEEIEKLRREVRTSGSETAEKVLRDVERIVRRNEELVREVLRRVKKIVDENRKIAEDALRKVEELVKELEERAR

SEQ ID NO: 6773 - protein, 175 aa, Artificial Sequence; identical to SEQ ID NO: 6772
  Synthetic

SEQ ID NO: 6774 - protein, 178 aa, Artificial Sequence
  Synthetic
SEAEEALERVKELVKRSEELAEESLRRARKSVEEVARRAEEALERVKKSVEEVKEVRKEGQPKEELDKILEKNKRDTERLRRDLERILRENKRKTEKLAEDNKRAIDEIRKRIDDLERKVDGKEVLDKVRDLVRRVDEENRRVIEEAKKLSEDVARRVDKVIKDVERLSKRVEDEVRR

SEQ ID NO: 6775 - protein, 178 aa, Artificial Sequence; identical to SEQ ID NO: 6774
  Synthetic

SEQ ID NO: 6776 - protein, 178 aa, Artificial Sequence
  Synthetic
DEDRRAVEELRRVVEEVNKLNEDTLRELERIVRENIRRVRELLKEAEDVVREVEKEVRRITDKEKVERILRKLEKILDRIRRESERLDRETEEVLRKLHEENKEILKELEKKLRDVKEKVKEAEEVLREAKDLIDHVRKTIEEVNDTVRDLVRKVHEVNKEVLDRIRKLVEEVRKTVE

SEQ ID NO: 6777 - protein, 178 aa, Artificial Sequence; identical to SEQ ID NO: 6776
  Synthetic

SEQ ID NO: 6778 - protein, 184 aa, Artificial Sequence
  Synthetic
SSLDRVRRAIEELVKKVNTDSKRVKDRVRKLLKEVNDTSDRVRRDVKRKLDKVKDDARKAGTPDDVKRKLRRVEEEIKKLIEEDKEKNRRSEREVEELIERLEEANKRSKEELEKLIEDLKRSTDDRVVERVVREVERIVRENEELVKEVVRRAEEIVERNERHSRELLRRLAELVDDLRRKIE

SEQ ID NO: 6779 - protein, 184 aa, Artificial Sequence; identical to SEQ ID NO: 6778
  Synthetic

SEQ ID NO: 6780 - protein, 184 aa, Artificial Sequence
  Synthetic
SSLDEVRKRVTELLKKVDDTSKKVEDDVKRLLDKSTRTSDEVRKAAERLLEEVEESARRKGTPEEVKRRLEDVKRKVRKLIDDNRRTNERVRKRVEDLIRENRKKLEEVKRRVKKLIDELRRSTDDEMVKRVLEELKKIVDDLERHSRKLLKDARRIVEESIEHSDRVLKEATRIVEKLERDIR

SEQ ID NO: 6781 - protein, 184 aa, Artificial Sequence; identical to SEQ ID NO: 6780
  Synthetic

SEQ ID NO: 6782 - protein, 181 aa, Artificial Sequence
  Synthetic
DEIEEVLREMRELVERNVREIEKVVRENEKLVEDNIRLVREVAKELRDLVRKLIERVARTTDKEELKRVLKTIEDEVRKITERLKESSERSERESRKSVDKLRKSTEDIKRRIEELERRVERTEELEEVVKEARRLLKKSEEDLRRVEKRVEELNEKSKEEMERVRDDVRRLLEEVKERAR

SEQ ID NO: 6783 - protein, 181 aa, Artificial Sequence; identical to SEQ ID NO: 6782
  Synthetic

SEQ ID NO: 6784 - protein, 181 aa, Artificial Sequence
  Synthetic
SEVDELLRLADEIVRELRELVRRHDEIVDKLVEENRRIVEEHLRRVEDVVRRLKELVKKIKDKKKLEDKLRDLLKKLRELSREVEKLNRESLETIRRTTEDLERKLETLARKVRELEERVRRDEEAERVVKEARRLLREIEELVKRSVERVERLHREVHERIKESTKRVEELVDEVRKAVK

SEQ ID NO: 6785 - protein, 181 aa, Artificial Sequence; identical to SEQ ID NO: 6784
  Synthetic

SEQ ID NO: 6786 - protein, 184 aa, Artificial Sequence
  Synthetic
SAVDEVRKVIKEIFDRLAELLKHNSDMVRRLLEEIRELVKNNTEIVREVLKKLEDILRELTDKDEVRKALKELVDRLRKVSEEHKRRIEEIERRIRRVSREHEKTLKKIVDDLERLIRDVRERVEEEKLEKVAEDARRAIKDIEDKLRDSNRRLDKLIKEVRRRLEESHKRIEREIKEIEERVR

SEQ ID NO: 6787 - protein, 184 aa, Artificial Sequence; identical to SEQ ID NO: 6786
  Synthetic

SEQ ID NO: 6788 - protein, 187 aa, Artificial Sequence
  Synthetic
DKLDEVKEAARRVVEEAHKKNRRVLEKLDEVSRRAHELDKRVKEKLKEVVKRADDLLKEKGISEEKVKRVRDEARKIERELDRLNEENKRKNDESKKTLRELNERDREVVRKVEKEIEDLRREGGDDVDTLVERLRRLVEELRKHSDDTVRRMEDIVRRNKKHSEESVRKMDDIVKKLEELAREVVR

SEQ ID NO: 6789 - protein, 187 aa, Artificial Sequence; identical to SEQ ID NO: 6788
  Synthetic

SEQ ID NO: 6790 - protein, 187 aa, Artificial Sequence
  Synthetic
DRLDKVKEDLKRSSEDAHRKNKEAIELLDEVSTEAHKLDEDVRRKLEKVVREVRKLLEDKGISEELVKRLDDTAREVRERLERLNERNKEVNKKSKEKLKELNRRDEEHSRRLDKRLDDLARKGGDDIDTIVRDAEKIVEDNRRHSDETVRRIERLVTENLRHSEESVRTLDRLVEELLRTAEEVVR

SEQ ID NO: 6791 - protein, 187 aa, Artificial Sequence; identical to SEQ ID NO: 6790
  Synthetic

SEQ ID NO: 6792 - protein, 187 aa, Artificial Sequence
  Synthetic
DKLERVLRELERSSKEAHEKDKKVLEDLDEVSKRAHKANEEVIARLEDVVRKAEDELRKKGISKELVKRVEDTVRKIRKELEKLNEDDRKKNKESEDRLRKLNEDNKRHSEDVKRKLEDLARKGGDDLDTLVKRIEDIVKENEDHSRRSVEEIRRIVEENERHSRESVKTIKDLVEELERRAEEVVR

SEQ ID NO: 6793 - protein, 187 aa, Artificial Sequence; identical to SEQ ID NO: 6792
  Synthetic

SEQ ID NO: 6794 - protein, 187 aa, Artificial Sequence
  Synthetic
SELEKVLKDLEESSKEAHKADEEVLRRLERVSREAEKELKRVLDDLRRVVEEVERLLREKGISEEKVKRVKDTADEIKDRLKKLLDEVRERNRESEERLRELNERNKKHSEEVLRRLRELRRKGGDDLETLVRDARRIVKENEEHSRDSVRRIDKIVKENADEVRRVVKEIKDIVKRLEELARETVR

SEQ ID NO: 6795 - protein, 187 aa, Artificial Sequence; identical to SEQ ID NO: 6794
  Synthetic

SEQ ID NO: 6796 - protein, 171 aa, Artificial Sequence
  Synthetic
SLDEDVDELVKRVEEEMRRNVKELDKLVKEDKRLAEENVRRLEEIVDRSRKLADRKEGDKEKIKREADKSLEDLEESTRRLKERSDRLLRRLEESTKRVKDRLDEIEEDLKRKGVSEEVLKRLREVIERARRDSERVLRKLEKTTDKVRRDSERVLRENEKSIEDVARKMT

SEQ ID NO: 6797 - protein, 171 aa, Artificial Sequence; identical to SEQ ID NO: 6796
  Synthetic

SEQ ID NO: 6798 - protein, 186 aa, Artificial Sequence
  Synthetic
DELERLLEELKRTTRKIEEELKEVNRRLDDTTREAEKELRRLKEKLEEVVKRAEELLRRRGVSEEKVKRLRDTLDRVRKTVDELLKELKRVSDELRKRTEKSNRESRKRSEEIEREIEELARRGEPEKDVVKRLEDLVRDDDRIAKEDVKRLEDLVREDRTLVKEIVDRLEELVRTVEKLVKEVVN

SEQ ID NO: 6799 - protein, 186 aa, Artificial Sequence; identical to SEQ ID NO: 6798
  Synthetic

SEQ ID NO: 6800 - protein, 177 aa, Artificial Sequence
  Synthetic
SAIEKVKEVVERVLETVRDSVRRSHEESKRLIDKVRKRLEEVREEVKELIERVRRKGIPERMVEKLERDLEELLKEIKDTIDRIEEELRTSNRRLKETNDEIAKRLEELLRELSRDRDKDAVEDVLRRIEELIRDLNKKNDDNVRRVKEVIDRAEKLVRDLLREIRKLIEKLIRDTE

SEQ ID NO: 6801 - protein, 177 aa, Artificial Sequence; identical to SEQ ID NO: 6800
  Synthetic

SEQ ID NO: 6802 - protein, 177 aa, Artificial Sequence
  Synthetic
SVLEEVRRRVEELLKTVKESVDRSHERSERLIEEVRESLKEVKRRVKELVERVREKGIPEDRVKRIEDKLREELERLERENRKIEEDLKRSNDELRRENERIAERLEELLRELSRDTNDKVARDVLEEIERLIREANERNKRNLEDVERVIRELNKENERVLREVEKKIEKLIRETE

SEQ ID NO: 6803 - protein, 177 aa, Artificial Sequence; identical to SEQ ID NO: 6802
  Synthetic

SEQ ID NO: 6804 - protein, 178 aa, Artificial Sequence
  Synthetic
SSIERVEKEVRRLLRESDESLKRVMEEAKELIKSVRESTKRVEEDARDLLRKVVERTGDEREDLRRVLEELRKLIEDNRREDKRSEDELRKLIRDNKEENDRARREAEKLLEDLSRGRSEEEVERVLEEVRRIIEKLKEDDKRSLERIERIVRRNNELNKESVDRIRKIIKEMEERAD

SEQ ID NO: 6805 - protein, 178 aa, Artificial Sequence; identical to SEQ ID NO: 6804
  Synthetic

SEQ ID NO: 6806 - protein, 174 aa, Artificial Sequence
  Synthetic
DESEDVEEKMRRLLEKSKDETRRVKEEVERLNEESKRVTEEVEKRVRDLLREVREKVRDKDVLEEIERRARKLVKELRELNREITERSKRSREELDKLNKKIEDDLRKIKKKLDDGKDVETVLREAKRLIEESIERIERVLKENRELAERSIKVLRDVLREVEDLIRKLEERAK

SEQ ID NO: 6807 - protein, 174 aa, Artificial Sequence; identical to SEQ ID NO: 6806
  Synthetic

SEQ ID NO: 6808 - protein, 177 aa, Artificial Sequence
  Synthetic
RKVEEVKKEAERLLRRSEEVSKKVADDADRLLKRSREVSDRVRRESERLLKEVAEAGVDEKILREIKKRSEESVKRLEDINKRLEDEIRRLKEELKRINDELRKRIERLREDLERDRTDKRVEDVLREARDLVRRSIKKIDEVLKEAKRLVEESIKLSEDNVRRNEEIIRDLERRTR

SEQ ID NO: 6809 - protein, 177 aa, Artificial Sequence; identical to SEQ ID NO: 6808
  Synthetic

SEQ ID NO: 6810 - protein, 177 aa, Artificial Sequence
  Synthetic
SAVERVKEEVDRLLERSKKESERVRKESEDLIRESDEVSRKVEEDSRRLIEEVERSGVDESILEELRRRSKKSKEDLDRINEELKRRSEESVKRLEEINKELKERVERLKEELDKIDDERVVTRLLEEAKRLVERSIEEIKRNVKENRKLVEESIKLSEENVKRNKRLVDEAIRAAE

SEQ ID NO: 6811 - protein, 177 aa, Artificial Sequence; identical to SEQ ID NO: 6810
  Synthetic

SEQ ID NO: 6812 - protein, 187 aa, Artificial Sequence
  Synthetic
SVVEEVVERVKRIAEELKRSSEENVDTVRKVVAEAKKLVEDDVREVEKLARRLKEVVTRDISDKKTLRDDIDKIEEEMRRLNKELEERIRKIERELERSSEENKRRVEKLAREIRKLVEDLERSGRVDERVLKDVKDKADKLIREVEETSKRSEEDVRKVIEEVREVLRESHERVKELIKEVREAER

SEQ ID NO: 6813 - protein, 187 aa, Artificial Sequence; identical to SEQ ID NO: 6812
  Synthetic

SEQ ID NO: 6814 - protein, 182 aa, Artificial Sequence
  Synthetic
SEAEKVAEDARKLAEEVIRLIEEVVERSKELVDRNEKEIRRVIEESDKLVEEVIRLLRRGDIRDEDIKRIEERLKELNTRSRETSKDVERELKELNKRLEEEIRKIEKEMKKLLDDLVRKRGETESVREVEKIVRDVVREIREMLKRSKDETRRVIKRVREVNDRSEKRSRDVVREARETSR

SEQ ID NO: 6815 - protein, 182 aa, Artificial Sequence; identical to SEQ ID NO: 6814
  Synthetic

SEQ ID NO: 6816 - protein, 182 aa, Artificial Sequence
  Synthetic
SEAEEVARRARKLVRELEELIRKSVEDSRELVKRNIEKIKRNVRKSEEDVDRVIKLLRRGDIREEDIKRIKEDLKRSNEESRRDSKRLEDRLRRLNEKLTRDIRRIEEEAEELLRDLVRRRGEAEAVREVDRIVKEVVRRVREALERSREETRRVIEEAKKANKESDDVSRKVAKEIDEEAT

SEQ ID NO: 6817 - protein, 182 aa, Artificial Sequence; identical to SEQ ID NO: 6816
  Synthetic

SEQ ID NO: 6818 - protein, 177 aa, Artificial Sequence
  Synthetic
RVIEEVDKEIKRVIKESEDVTKEVKDTSRKVLEDSKRESERVRRRSEEVLKKVEEEGVDKRILDELRRRVEESSKTLEEINRRLEEKIRDSERKSEEINKRLREELDKLREELKRIDDEDEVRRVAEKVKRLVDESIKRLKDNVKRNKELVDESIREVERNVEENERLATKVIEEAK

SEQ ID NO: 6819 - protein, 177 aa, Artificial Sequence; identical to SEQ ID NO: 6818
  Synthetic

SEQ ID NO: 6820 - protein, 177 aa, Artificial Sequence
  Synthetic
SVIERVEEEMEKVIRDSERVTKEVEDRAREVHERSEKRIREVEETSRRVLEELRRAGVDKRILDELRKRIKDSREDLERINEELRRALRKLLEDSKRINEELRKTLEELRKRLERVDDEEEVKKLAEEVRRLVEDSIRKLEELARRVDELVRESIERVDRNVEENKRLVREAIERRR

SEQ ID NO: 6821 - protein, 177 aa, Artificial Sequence; identical to SEQ ID NO: 6820
  Synthetic

SEQ ID NO: 6822 - protein, 177 aa, Artificial Sequence
  Synthetic
SVDREVEEIMRRVHKESEDVIRKVKDTVRRVLERSREVSERVKRDAERVLEEVKRAGVEKEILDRLREEVKKLEEELRKIDTDLERKIRELEKELEEINKKLREDLKRLKDELDKIKDKDFLKRVAEEVKRLVEESIKRVEDVAREVERLVEESIRLLEAVAKKVRDLVREVKRRRT

SEQ ID NO: 6823 - protein, 177 aa, Artificial Sequence; identical to SEQ ID NO: 6822
  Synthetic

SEQ ID NO: 6824 - protein, 184 aa, Artificial Sequence
  Synthetic
KEIEDLVKKIREIVDRIKKTVEDSVREVRRIVDESAKSVEELVKELKKLAEELRKLVEDGPEEKLRREAKRIIERADKLLKDDHRENKRLIEELRKINRDVREEVKRLTKELKESLDDLVRKRGETELIRTVERELREVEKEVKKMLDESTEVLKEVEERVRRMNDDVRRVLEKVARDVERDLR

SEQ ID NO: 6825 - protein, 184 aa, Artificial Sequence; identical to SEQ ID NO: 6824
  Synthetic

SEQ ID NO: 6826 - protein, 183 aa, Artificial Sequence
  Synthetic
KEVEEVVTKVDDLVRELEERSRRHVERVKEIADRNEKLVREVVKRSRDNVRELEELVRRGLERIDEELKRSAKTNKELVDRLRDKNRRSIEELKRLLDHNKELLDRVRRELERLLEEAERNRLPREVLEEVKKRIRDVLKRVEDASKRVKETIDEVLKRIKELTEDVERKSREVLRRVKEARK

SEQ ID NO: 6827 - protein, 183 aa, Artificial Sequence; identical to SEQ ID NO: 6826
  Synthetic

SEQ ID NO: 6828 - protein, 181 aa, Artificial Sequence
  Synthetic
KEVEDIIRKLRRHVKEIERTIREMVESVKRLADEVVKVLKDALDSARDHVRKILETLRDKGTSEVARRLERSNEEHMRRTEEEIRKLEERLDRHVKETRDVLRELRRSNDKLRDEVDRANLPEDVLRELRKVIEDTERTIKRLVDELEKVHREVKERIRKIAKDLRDKHKKSKRDIRETER

SEQ ID NO: 6829 - protein, 181 aa, Artificial Sequence; identical to SEQ ID NO: 6828
  Synthetic

SEQ ID NO: 6830 - protein, 181 aa, Artificial Sequence
  Synthetic
SAKDEVKDVNDKVRKEVRRVIEESRAVNEEIKRRVDTVLKESEDVNREVKREVEDKVRGEDLKRRVDKLLKELDRHSDELRRRLKEVLREVDEHSKELAERVKRILDKTTEEIKDLTRRGVDEKVAKEIVRKSEDVVRRIVEELKEDAKRSRDLVRELVKEIKEDVKRSRELVKRVVEEAK

SEQ ID NO: 6831 - protein, 181 aa, Artificial Sequence; identical to SEQ ID NO: 6830
  Synthetic

SEQ ID NO: 6832 - protein, 182 aa, Artificial Sequence
  Synthetic
REAEELVKRNEKIVTDIRRLVEKTVRDSRRVVEELKREAEETVERSRRVVTKLKELVERGDGRREEIERVTRELERENEELERRVKKVIDELKELNDRLEETLRRLVEESRRLLKDLIDKRGPDRMVEEVERTSREVEEEVKRVLKKSRDVTREVEEEVRRLLERSRKETDDVRKRLEEAER

SEQ ID NO: 6833 - protein, 182 aa, Artificial Sequence; identical to SEQ ID NO: 6832
  Synthetic

SEQ ID NO: 6834 - protein, 182 aa, Artificial Sequence
  Synthetic
DEAERLVEEIKRVVKEAEDLVRRTVEISRRVVETLRKEAEDLVRDSERVVKELTELARRGDGRREEIEKLIRELRKLNKDLEERVRRVERELEKENKRLEDTLRKLLEELRKLLEDLIRRRGRTELVEKVRRVIEEVEKRLRDMLRKSRDVTREVKERVARMLEKSKKVTDDVEKRVTDEDR

SEQ ID NO: 6835 - protein, 182 aa, Artificial Sequence; identical to SEQ ID NO: 6834
  Synthetic

SEQ ID NO: 6836 - protein, 182 aa, Artificial Sequence
  Synthetic
KEAEDLVRRVEEVVEELERRVEKLVRESEEVVKKLSKEVKESVDTNRDIVRRITELARRGDGREEDIRRLVTESRRLDEELRKRIEEVIRRLRKLNEDLTREARRVEEELERELRELIRKRGETEKVEEVERVIRRVKKRVEEVLRKSKTTTTDVERRVREMLERSEESTRRVKERADRERT

SEQ ID NO: 6837 - protein, 182 aa, Artificial Sequence; identical to SEQ ID NO: 6836
  Synthetic

SEQ ID NO: 6838 - protein, 184 aa, Artificial Sequence
  Synthetic
SEADDVVREIEDLVRRDKELVDEVVKRIKDLVRRDKKLVDEVVKEIKDLVTELEDLARKLDEEELRRVVKRVRDEIRRLADELREHSRRVEKEIEDLRRELEKHSEDVEREIRRLLKELRDRGIPEEMLRKLERVVEEVKRRSTEALKRLREVVKEVKETSKRANEELERVVREVKKRLDDATK

SEQ ID NO: 6839 - protein, 184 aa, Artificial Sequence; identical to SEQ ID NO: 6838
  Synthetic

SEQ ID NO: 6840 - protein, 184 aa, Artificial Sequence
  Synthetic
DEVREVVKEIRKLVEDDKRRVDKVVEDDRRLAKRDLDLVEDVVRRIEDLVRRVLEEARKLDRETLRKVVKDVIDTVDELLKRLERHSREVRKESEDLLRELRDHSRRVKERIKKLLDDLRRAGVDKSVLDELRKVVEEVKERSDRALEEVERSIRESEKESRRANEKLRKVVEEVRKKLEEAER

SEQ ID NO: 6841 - protein, 184 aa, Artificial Sequence; identical to SEQ ID NO: 6840
  Synthetic

SEQ ID NO: 6842 - protein, 184 aa, Artificial Sequence
  Synthetic
SEVDKVVKDIRDLVRRDLKRVEDVVRTDRRLAEEDLRRVKEVVEKIEKDVKELDELARKLDREELDTMLEKVKREIEERRKRLEEHSKRVEDESRRLLEDLRRHSKEVVDRIRELLKDLERRGVDESVLKKLKDVVDEVERESREALRKVEESIKESKRRSEKALEELREVVKRVDRLLEEARR

SEQ ID NO: 6843 - protein, 184 aa, Artificial Sequence; identical to SEQ ID NO: 6842
  Synthetic

SEQ ID NO: 6844 - protein, 184 aa, Artificial Sequence
  Synthetic
SEVDEVVKEVEDLVRRNEELVEEVVRRVEKVVTDDRRLVEEVVREIRKIVKDVEDLARKLDKEELKRVLDEMRERIERLLEKLRRHSKKLDDELKRLLEELREHSRRVEKRLEDLLKELRERGVDEKVLRKLEKVIREVRERSTRALRKVEEVIRRVREESERALRDLERVVKEVEKRMREAAR

SEQ ID NO: 6845 - protein, 184 aa, Artificial Sequence; identical to SEQ ID NO: 6844
  Synthetic

SEQ ID NO: 6846 - protein, 185 aa, Artificial Sequence
  Synthetic
DEVDEIVRRIEKLVTDDLKRVEDLVREVKKLVDEDKRKVDEIVKEIRRLVEEIRKEAERDRDERVLDKIRRDLERMLRKLEEDLRRSVEETKKTLRDLEKRIKESSEETRRELEKLEEELERRRMDEKVKRKLRKVVEEVERRSKKANEELEKKVREVEELSKRVLEKLKKVADEVRKEVKDAKD

SEQ ID NO: 6847 - protein, 185 aa, Artificial Sequence; identical to SEQ ID NO: 6846
  Synthetic

SEQ ID NO: 6848 - protein, 186 aa, Artificial Sequence
  Synthetic
DSVERLVETIREIARESLRRAKELVKSNKKLAEDSKRRVDKLVKELKDLVTRVKETLKRKRDDEETIERLKRELDRAVEEVKKALKESKEKSEEHVERMRRDIERTHRELEDLVRKVREDLKKDDLKGEVLELIEEVVREVKEVNTTVSKEVEDVVEETRKVNEDVAKLIEKVVREVKRVVDEVRT

SEQ ID NO: 6849 - protein, 186 aa, Artificial Sequence; identical to SEQ ID NO: 6848
  Synthetic

SEQ ID NO: 6850 - protein, 182 aa, Artificial Sequence
  Synthetic
SELERLVEEIRRLVREIEERSKKTTEDIKRLAEDIRRRSKEAVDENEDLARKIRKRAEERNDKDLVTELERRIEEIERRNKKLLDELKKRVERIVREVEKINEDLKRRLEELERRVKDVVRKRNEDSREIDKVIEEVRKRLKEVTDSDREVIKEIEEVLREVEERNRRSIEKIRKVLEDVTK

SEQ ID NO: 6851 - protein, 182 aa, Artificial Sequence; identical to SEQ ID NO: 6850
  Synthetic

SEQ ID NO: 6852 - protein, 185 aa, Artificial Sequence
  Synthetic
SEVDELVEKIRTTVKRVLEKHKRNTDETRRLVEEILERHTRTSRRIERVVREATDKLRRRKTEEVKKDLDRLLKELREEVEELKRRTTEILKRSRESSDRVRRESEEILDRLRKDVEDLRRKRKDVTEMLEKLREVLERAAEVLKRAEESDRTVDEEVERRVREVARSDDEVLKEVKREVERVKT

SEQ ID NO: 6853 - protein, 185 aa, Artificial Sequence; identical to SEQ ID NO: 6852
  Synthetic

SEQ ID NO: 6854 - protein, 182 aa, Artificial Sequence
  Synthetic
SEAEEVAKRVKEIAKENADLAREVAKDIKRLADENKKHADDVARDIERLAKELLEAARRGDAREEVAERARRRAEELARRHREENKRSEERARRLAEKAKRDNEKSREDIRRLLEDLKRKGAPERAEKLARDAAEEAKKAAEESNKLIREAAERLKEAARRADKLVEEAARRLEKAAEEARR

SEQ ID NO: 6855 - protein, 182 aa, Artificial Sequence; identical to SEQ ID NO: 6854
  Synthetic

SEQ ID NO: 6856 - protein, 182 aa, Artificial Sequence
  Synthetic
DEVDEVVRRDERLAEENLKRNTESSKRDRDLARENLKDAKRVVERIRKLMEDLKKLFDRGDIRDERARDVEREVEELLRELKRRNEESERRSRELLERLREDNERSKRRSKRLLERLRERNVDEKLTRRVEESLKRSEEVLRRVNESDKRSLEETRKVLEESNKEIEKVVRDLEELLKEVRR

SEQ ID NO: 6857 - protein, 182 aa, Artificial Sequence; identical to SEQ ID NO: 6856
  Synthetic

SEQ ID NO: 6858 - protein, 182 aa, Artificial Sequence
  Synthetic
SEADKVVKEVDDIVARNTEENDKSSKRVEDIIRENDKHAEEVVRDIRRLAEELRELRERGEIREKRLEEVRRRVEELLREHKEENDRSAEEIKKILRDLAERNKDSLRRIRKLLKDLKDKNLPEELEKRLRDVVRRAEERLRDVNRSDEEVVRRAEELLKRVDDRVKTVVEELKKTLDDERR

SEQ ID NO: 6859 - protein, 182 aa, Artificial Sequence; identical to SEQ ID NO: 6858
  Synthetic

SEQ ID NO: 6860 - protein, 182 aa, Artificial Sequence
  Synthetic
EEVDRVVKRDDDLARKNLEENERSSREDDRLVKENEDHAKKVVDDIRKLMEELRELARRGDIREKDADRVRREVDELLKKHRRFNEESRKESKRLLDELRRRNDESTKDSERLMRDLKRKNVPEELEKRLRESLRRSREVLKRVNESDRDSLERTKKRLEDVDREVRKVVEELRKVIRDEEK

SEQ ID NO: 6861 - protein, 182 aa, Artificial Sequence; identical to SEQ ID NO: 6860
  Synthetic

SEQ ID NO: 6862 - protein, 182 aa, Artificial Sequence
  Synthetic
SEAEEVARRVEKIAEDNARHAEKVAKDIEDLARENLELNERTSRRVERLARELLKAARRGDAREEVARRVEREIEKILEDANEANRRSEKEAEELAERHKEENERSKREIDELLKRLEDAGAPEEARKLARKAAEDARRAAERANELVKRAADELRRAAEEANKSDEDAAREARRAAEEAER

SEQ ID NO: 6863 - protein, 182 aa, Artificial Sequence; identical to SEQ ID NO: 6862
  Synthetic

SEQ ID NO: 6864 - protein, 182 aa, Artificial Sequence
  Synthetic
KDVEDVVREDEELAKTNKKHADDVVRRIKELIDRNRRLNEETSKRIEDLVRRLLELARRGDIREDELRRVREEVEKILKDVNEENRRSLRELERLVKEHEERNRDSKKRSEDLAEELKKRNVPERVRKEVERSLRKSDEVLRRVNDKVRRVLEELRKVLEDVNRSDEKVLRELEELLERVRT

SEQ ID NO: 6865 - protein, 182 aa, Artificial Sequence; identical to SEQ ID NO: 6864
  Synthetic

SEQ ID NO: 6866 - protein, 174 aa, Artificial Sequence
  Synthetic
SEDEKVRKVVEEAKEVNRRAEEAIKDVSERLERVNREVTKRSRDVSEEVRKMLERDASDKDEVERVKEKSKKSNEDLKRISERSRDESRKSNETLRRISEETRRRIREIEKLVKAGKDVDEVVKRIKELVDRSLELAERIVERNERLVEKSERDVRKIVEDNKRLADEVAKRAT

SEQ ID NO: 6867 - protein, 174 aa, Artificial Sequence; identical to SEQ ID NO: 6866
  Synthetic

SEQ ID NO: 6868 - protein, 174 aa, Artificial Sequence
  Synthetic
REDELVDKVLRELEELLRRVKKRLEDVSRDLERVNREVRDELRRVSKKVEDMARRDVGDKELVDEVRRESEKSNKELEDISRESKERSDDSNRKLDKLLKDVRDELRRIRKKVEDGKDAETVVRDIRRLAEELLRTVDKIVKDNERLARESRERVRRIVERNEELARDLARKAR

SEQ ID NO: 6869 - protein, 174 aa, Artificial Sequence; identical to SEQ ID NO: 6868
  Synthetic

SEQ ID NO: 6870 - protein, 174 aa, Artificial Sequence
  Synthetic
DDEKKVEDVVRKVKKVAEDVRRRLEKVSREVKKVLDEVRRRVEEVSREVEEILRRAASDKKDVEEVKRRSEDSKRRLEEIIKEIEERSRRSNETLKKLIKELEDRVRKIKEKVDRGSDADEVVKRIEDLVRDLERRVDEIVKRNKELVKRVEEEADKIVEDNKRLAEEVLRKAT

SEQ ID NO: 6871 - protein, 174 aa, Artificial Sequence; identical to SEQ ID NO: 6870
  Synthetic

SEQ ID NO: 6872 - protein, 174 aa, Artificial Sequence
  Synthetic
DSRRKVKEVIKELEEVLRRVKEEVEKVSRDLERLLKEVKEKLERVSRKVEEEIREKASDKELADEVRKRSKDSNDELKRLLDELRKRSEDSDRRLDEVVTRIRKRLKDIEKKVEDGSDADTVVKRIKELMKDVERIVEEIVRENRKLVTDLLREVDRIVEENERLAEELAERAR

SEQ ID NO: 6873 - protein, 174 aa, Artificial Sequence; identical to SEQ ID NO: 6872
  Synthetic

SEQ ID NO: 6874 - protein, 174 aa, Artificial Sequence
  Synthetic
SSKEKVERVVERLRRVNEEVIRLIEKVSRELEEVNKEVRERIERSVKETEDILRTAASDKEEVDDVRRRTEELVRRLEKLSEDSKKRSKESLEEVRRISKDTEDKVREIRKKVEAGKDVDTVVREIEKLMDDSKKKADRIVDENRELVKRSEEAVEELVRRDKKLAEDVFRKAE

SEQ ID NO: 6875 - protein, 174 aa, Artificial Sequence; identical to SEQ ID NO: 6874
  Synthetic

SEQ ID NO: 6876 - protein, 174 aa, Artificial Sequence
  Synthetic
DDERKVKKVVKEVRKVDEEVARRLDKVSKELRDVNREVKKKMEDSVKKTEDLAKKDASDKELVDRVRRETERLLEELEKLSRDSEEESKKSKEELERISRETEDRIRKIERLVEGGKDADTVVKRIKELAEESEKRVDKIVKRNKELVDKSKKDVDELVKRDEELMKDLVEKAR

SEQ ID NO: 6877 - protein, 174 aa, Artificial Sequence; identical to SEQ ID NO: 6876
  Synthetic

SEQ ID NO: 6878 - protein, 174 aa, Artificial Sequence
  Synthetic
SAEEKVRKVLKELREVNERVERELKRVSDESERVDDEVNTRAKKVVRDVERVLEERAGDKEEVEEVRKRIEELLEELKRLSEENKRRSEESEKELKEISKKTDEDLKRIERLVEAGKDVDEVVERIERLARESKKRVERIVRENEKSARESEKRADEIVKTIEELAERVARRAT

SEQ ID NO: 6879 - protein, 174 aa, Artificial Sequence; identical to SEQ ID NO: 6878
  Synthetic

SEQ ID NO: 6880 - protein, 174 aa, Artificial Sequence
  Synthetic
KDEERVKEVVKKLRKVNEDVRRLIERVSRESKRLDEEVNRELDESAKDTERALRERLGDKEAVDRVRDETRRLAEELKELSERNEKRSRDSAREVEKISRDTEERVKEIEDKVKAGADADEVVKEIEKLAKTSEELARRIVRENEESARESLERARKLVEDDRRLVKEVVERAE

SEQ ID NO: 6881 - protein, 174 aa, Artificial Sequence; identical to SEQ ID NO: 6880
  Synthetic

SEQ ID NO: 6882 - protein, 181 aa, Artificial Sequence
  Synthetic
DLEERLATVVRKVEEDLKKLRRDNEKVIREVEKLNEDLNRRNKKLIDEVRKLLEKAKREGSLRDEEVERLEEELDKSNKRLEEISRKNKKELEESHKRLAEIVKRLKDELEKIKEEVKRVDDEKRVRELLEKIKRLLEEVDRRVKESIKEIEDSLRRSKEKADRSIEEIKKLLDDLRERAR

SEQ ID NO: 6883 - protein, 181 aa, Artificial Sequence; identical to SEQ ID NO: 6882
  Synthetic

SEQ ID NO: 6884 - protein, 181 aa, Artificial Sequence
  Synthetic
SVEDLLRRVVEEVRKELERLKRKNEKVVKEVRKKNKEVNDRNEEVIRRVEKRLKKLKEDGRLSDELVEKLKEELRRSNEELRKISDENEKELEKSNRRLKKIADRVEEELKRIKEELDRVDDEEEVRRLVRRIEKIVDEVRKRVDKSVEEIKRSLKRSKELADESLERIRRLLEEIDERVR

SEQ ID NO: 6885 - protein, 181 aa, Artificial Sequence; identical to SEQ ID NO: 6884
  Synthetic

SEQ ID NO: 6886 - protein, 179 aa, Artificial Sequence
  Synthetic
SSDEELKKVLEDMKRVLEKVREDMKRVNDELKEAVERVKKESDDVDRELRRVIEEVVREDTDDEDLKRELDDIHRRNREHTERLLDEARRLLEDSKRHTEETEKTLRRLLEDLKRKIERKEVDVKDLVRTVERLVEEIKDLVRKDVERVKKIVRRIEDLAKKDVEVSEKLVKEIKDRAK

SEQ ID NO: 6887 - protein, 179 aa, Artificial Sequence; identical to SEQ ID NO: 6886
  Synthetic

SEQ ID NO: 6888 - protein, 179 aa, Artificial Sequence
  Synthetic
SAKELLDDVAKKLEEVVERVARKLDEVDERLREMIERVRKELEDVNRRLRDLVRRVVDKDRTDEDLKKRIEDLEERLRRHTEETVKRAEDIHRENREKLREMKETLKELRDRLKEILDRNELRVEEVVRDVERIVDEIEKRAEKVVRDSEKLVRDIEELVRRDVREVERIAEEIEKEAT

SEQ ID NO: 6889 - protein, 179 aa, Artificial Sequence; identical to SEQ ID NO: 6888
  Synthetic

SEQ ID NO: 6890 - protein, 179 aa, Artificial Sequence
  Synthetic
SADEELERVLRELDKVIKDVVEESRDVDRKLERVVREVERLLDDVDRRLKEVIERVVREVTDKEDLRREAEKIHKENTDRLRELKKELKKLLDDSRRHSKEVEDELEKLLRDLKRILDRKELDVKDVVTEVKKLVETVKRLVEENVKRVEKIAEEIRRLVEKVVRESDELVERIERRVR

SEQ ID NO: 6891 - protein, 179 aa, Artificial Sequence; identical to SEQ ID NO: 6890
  Synthetic

SEQ ID NO: 6892 - protein, 188 aa, Artificial Sequence
  Synthetic
SAEELIRKAAEDARRANKEAEDLIREAAKEARRANEEAERLIREAAKRAEDALRDADRKAREKEAKDRARKLAKEIRDLIKKAEEDAKKSHEETEELIRRAEEEIKKSHEEIKKLIERAEEEAEKKKDAEEEAKKLADDIREAAKRSLDRARELAKRIREAARRSLEEAKKLAEEIKKAAEKALRDAT

SEQ ID NO: 6893 - protein, 188 aa, Artificial Sequence; identical to SEQ ID NO: 6892
  Synthetic

SEQ ID NO: 6894 - protein, 184 aa, Artificial Sequence
  Synthetic
SAVERVVREVKKTVDESRKRAEKEKREVEDVVRRIREKVKRVVDDNRRVVETIKELSKERRDEELLRRAEEEVRRVHERNRDILREIAETIRRVEERLRESLEDSRRESKRVKEELEEVLKEDKSEEAREKLDRVRKELDDANRRVEEELRRVARELEKVLREVEELLRKVDEDIRRVLDEERR

SEQ ID NO: 6895 - protein, 184 aa, Artificial Sequence; identical to SEQ ID NO: 6894
  Synthetic

SEQ ID NO: 6896 - protein, 184 aa, Artificial Sequence
  Synthetic
KDVEEVARKVKRVAERSEELVAELVKKNKKVVDESREKVDDVVRRNKELVDTIRDLARRRKDEDLLREAEERVRRVHEENKKAHTDSKEAIDRLEEDNRRVNEESRRLSKRVKEELKEVLKRDRSEEIRKLAEDVKRELERVNKKVKELSDRAAEELKRVNEEVRKKLEEVDREIRKVLEEVRK

SEQ ID NO: 6897 - protein, 184 aa, Artificial Sequence; identical to SEQ ID NO: 6896
  Synthetic

SEQ ID NO: 6898 - protein, 184 aa, Artificial Sequence
  Synthetic
SLMEEVKKEVDKVVREIKELVRKVEEDVKKVVKESRDKVDKVVKENKKVVEKIRDLARRRTDEDLLREAEDEVRKVHEENKRIHKESEDTIREVEKKLKKVLDDIERLVKEVSDRAKRVLDDDRSDEIRKLIKEALDKLKEVLDEARDRLKKVKEELETVNREVEKLLRDVDREIEKVLKEVEK

SEQ ID NO: 6899 - protein, 184 aa, Artificial Sequence; identical to SEQ ID NO: 6898
  Synthetic

SEQ ID NO: 6900 - protein, 190 aa, Artificial Sequence
  Synthetic
SEAEKIVREVERVVEESRRVAKENEKEVDKVVDTIRKLIEDLARRVEDILKKIEEERRKGGDDKEKLLEKIKRLLDELRKLIEELERRVEKIVEDVKRHSEELKERSKDLNRRIKEKIEDVLRKLKDDRDVKRIEDLLREVEERLRRVSEEVKKRLKELHERVEEVLRELRKRLRDLERKARKVLEEAKK

SEQ ID NO: 6901 - protein, 190 aa, Artificial Sequence; identical to SEQ ID NO: 6900
  Synthetic

SEQ ID NO: 6902 - protein, 173 aa, Artificial Sequence
  Synthetic
DVKEVLDEARKVVEDSIRRSKELIDEVRKRVEESVEESKRLAETVAEEVREVIERARGRDSAEELKRELDRLIEEIKRSNEKLRRDIKKLEDDVRRSDERLRREIEKIEELIRRGSDIETVLREVKRLVRENVKRIAELVKTIEDLVRENSERVRRVVREIRELVKELEKKAR

SEQ ID NO: 6903 - protein, 173 aa, Artificial Sequence; identical to SEQ ID NO: 6902
  Synthetic

SEQ ID NO: 6904 - protein, 173 aa, Artificial Sequence
  Synthetic
DVDELLKRVEDEVRRSKEESEKLRKEVRKEVEDSAKTSKDLIDDARRTVEEVIKKVKGRDVIEELKERIERLEKTVRDSDKELRERIRELEREIEESNRRLEEDIKRIKKVIKDGADVDTVVERIRKLVKENSDRVREVVDTIKKLVEENVREVRRLVEEIKRLVEEVKRREE

SEQ ID NO: 6905 - protein, 173 aa, Artificial Sequence; identical to SEQ ID NO: 6904
  Synthetic

SEQ ID NO: 6906 - protein, 173 aa, Artificial Sequence
  Synthetic
DVKEVLKRAEEEVRRSIKRTREVLERVEKMVRDSSRTTTDLIRKVRREVKRVIDEVNGRDLARELKRMLDELDERLKDSDRKLKEKIDRLIKEIEESDDELRRTIEEIKKLIDDGTDIDTVLEDVKRLVKENSEKIDEVVREIRELVETNRKLVEDLVREIKELVEKALRDAK

SEQ ID NO: 6907 - protein, 173 aa, Artificial Sequence; identical to SEQ ID NO: 6906
  Synthetic

SEQ ID NO: 6908 - protein, 173 aa, Artificial Sequence
  Synthetic
DVKEVLKRAKDEVRRSSDRTRRLIEKVRDESERVVEEVKKLNEDVNREVERVIREVKGRDVVEEVRRRVEKLNRDNEKIIKEDRDALEEIRRRLEESDKRLEDVIREIEKVIDDGKDIDTVLREVEKLVRDNERLVEKLVKEVEDSVRETKKRVEESVDTVRRIVEELKRRAT

SEQ ID NO: 6909 - protein, 173 aa, Artificial Sequence; identical to SEQ ID NO: 6908
  Synthetic

SEQ ID NO: 6910 - protein, 178 aa, Artificial Sequence
  Synthetic
SEAEEVLREVKEVVDRSRELAERVLRAVRELVKRDEDLARKILEDVARVVKTIDDLARERSDEEVLRRVKRLVDELRKKLKKVLEDSARLAEDLRRKAEEVKRESKRLSDELREKAKKAGVDKEVVDRADRALREVNKRLDEVVREVEKLLRESLDRSRRVIEEVAKRLEEVLKKLED

SEQ ID NO: 6911 - protein, 178 aa, Artificial Sequence; identical to SEQ ID NO: 6910
  Synthetic

SEQ ID NO: 6912 - protein, 178 aa, Artificial Sequence
  Synthetic
DEMDEVRREVERVVREDEKLARDLKRRVEKVVEDIKRSADEVLKEVKKLVEEIRELMKKRTDREVLERVRRKVEELTRELERNHREIEELVRRVKRELEKALKESEDRVREVKERLERAGVDREVVRRVEEELERSLRKSREVVKRVEKELEDVLREHRKVLEEVTDLLRRVLEELRR

SEQ ID NO: 6913 - protein, 178 aa, Artificial Sequence; identical to SEQ ID NO: 6912
  Synthetic

SEQ ID NO: 6914 - protein, 186 aa, Artificial Sequence
  Synthetic
REAEEILKKVAEVVKEDKKLADDLRKKNKETVDDIRRKAEELLKRVKKVVEELKRRMEEGGDDRKKLTDRVEELLRRVEEELKDLKRKIDEIIERLKRDNERVLRRSEDLVRKVEEELKDVIDKSDTDELRKIAEEVRKRLEDSVRTTRDIIRRVKRENEEVIKELERVMRKVREDLKRVKEEIER

SEQ ID NO: 6915 - protein, 186 aa, Artificial Sequence; identical to SEQ ID NO: 6914
  Synthetic

SEQ ID NO: 6916 - protein, 178 aa, Artificial Sequence
  Synthetic
SREEVAKEVRELIARSEKETRDIIREVEDRMRRSKEETEEVIKEVKRLLEEVKKRLEEKGISEELRESVDRVEETVRRLLTKLREDSERLRRRLRKLLEEIRRESERLKEEVERLIRRNEGDAEEILRTVKKVVDRDRELAKRLLDEARELVRTNRELVKRVLETVTRLVKKIDDEAR

SEQ ID NO: 6917 - protein, 178 aa, Artificial Sequence; identical to SEQ ID NO: 6916
  Synthetic

SEQ ID NO: 6918 - protein, 178 aa, Artificial Sequence
  Synthetic
DEEEVEKRVKDLLRESTERTKEVNERVRRLAEESRKRTEEIIREVRRLAEEVEERLRRRGIDEELKRRVEEVKKRLEELLTDLKRRSDELRKRLEDSSRETEKKSREVVKTVDELRKRREGDVRELLETVKKLVKDDVDIVRRNLEEVKKLVETNVRLAEEVLKEVDRLVKKVEEDAR

SEQ ID NO: 6919 - protein, 178 aa, Artificial Sequence; identical to SEQ ID NO: 6918
  Synthetic

SEQ ID NO: 6920 - protein, 184 aa, Artificial Sequence
  Synthetic
DELDEIRKRVEELIKRSEEDSREVRRRLEEIIERNRKISRDVEREIEKLIKDVRDSNTTSEEAKELLKDIRRKLKELVDRLHKIDEDSLREVERLVKRLKDKNRDILRELEELARDLRRRLRGEELRRVEEVVKRVRELVERSKEETDKIAEDVRRLLKESNDDTERIKRKVEEMLKELEERIK

SEQ ID NO: 6921 - protein, 184 aa, Artificial Sequence; identical to SEQ ID NO: 6920
  Synthetic

SEQ ID NO: 6922 - protein, 178 aa, Artificial Sequence
  Synthetic
RELDEVVKTVRKLVDESKKESDDVAREARELLEKLERESEEVVRRVRELVKELKKKRDDERLDRVVKDILKKVEDLIRELREVNKETRKKVERLVKELERVNREIRERVERIMDVLRRGDVDVDEVLRKAKELIDDSRRLIEDVKRRLKELIDRDRRLIERVLEEAERLIRELDEEAR

SEQ ID NO: 6923 - protein, 178 aa, Artificial Sequence; identical to SEQ ID NO: 6922
  Synthetic

SEQ ID NO: 6924 - protein, 190 aa, Artificial Sequence
  Synthetic
KEIEELDKMVEDIVRELDELVRAHTETVDRLIRDLERSNEELRKLIKKIVDELEDLVRRGGDDKERLLREIKRLVDDLKRLVEKNTRDIKRMADELRETAKEVEERIKELIKRLEDLARDILRKRKDDEEVVRRLKDVERKVKKLAEDVKEKLRRSVERVTKLLKEVEDNSREVEKEAEERVDRVLKKVK

SEQ ID NO: 6925 - protein, 190 aa, Artificial Sequence; identical to SEQ ID NO: 6924
  Synthetic

SEQ ID NO: 6926 - protein, 175 aa, Artificial Sequence
  Synthetic
REVEELVERIERSSRRALERLEDLDRTIKKSSEDARRRLKEMDDRLEELVKRARDNGVDEEVVKEVKKLVEESRRDNEESVKRSEDLLRETERRNRDAIRRSEEEVRKILEVLKKGELREEEIKKVLEEDRKLVEKLERDNKRVLDEDKELVRRNEERNREVLERIRELIERART

SEQ ID NO: 6927 - protein, 175 aa, Artificial Sequence; identical to SEQ ID NO: 6926
  Synthetic

SEQ ID NO: 6928 - protein, 179 aa, Artificial Sequence
  Synthetic
DEVEKLIKDIRDIIRRVEEAVARLVEENNKLVKEVDDRLRELSKENRDIVRKVREGGVGDEVLEKAEDSSRRNDEDVKKLLTELRKSSEDLKRLVDDVRKKLEDKVRRLEEVVRKELSDKRTLLEEAKRVLEDIEKEARDLLRRLEEIIRRTRKLVKDILDRSRDILRRTRELVDRVRR

SEQ ID NO: 6929 - protein, 179 aa, Artificial Sequence; identical to SEQ ID NO: 6928
  Synthetic

SEQ ID NO: 6930 - protein, 179 aa, Artificial Sequence
  Synthetic
KEAEDLLRRIEDLIRKVKKEVEDLVRENNRLVEKVVRELEKLSDELRKLIKRIKDAGVSDEVLRRLEEIVKRNDEEVRKILEEAKKSSRRLEETMRKVLEDLRRLVERLKRVVDEELQDKETLLRDIERIRREIEKLIEELLRRAEEIIRDTERLVEKILRESKELLKEIRELAEREKQ

SEQ ID NO: 6931 - protein, 179 aa, Artificial Sequence; identical to SEQ ID NO: 6930
  Synthetic

SEQ ID NO: 6932 - protein, 184 aa, Artificial Sequence
  Synthetic
DLERVVEESSRLVERVVRRNKKVVEDIRRRVREVERKNEEVTKEIKKILDEVRRRLERDGADSTLLRELEEVIKEAEKRHKDSIDELREILKELEKRHRKSIRELREINKDLRRRVKDLRDKGGIREELKKLLERSREMLEKSERTVDTSREEAKRVLEESEELVERTLREVEEIIRRVIERVR

SEQ ID NO: 6933 - protein, 184 aa, Artificial Sequence; identical to SEQ ID NO: 6932
  Synthetic

SEQ ID NO: 6934 - protein, 184 aa, Artificial Sequence
  Synthetic
SLEEVLRAVRKLAEDVKRKNKEVLDRIRDSSRRSEEKLEDSLRKIEELVRKLEEELKRDGADERLAEELREILDRVRKEHKRLVEENRRVVKKVEDEHRKSEEELDRIVDELRRRVEELRKRGGVDEDLKRLLEEIKRVLEESEEKVERSLREMEEVDKETEKRSRKLNREVREVVKDVADKVR

SEQ ID NO: 6935 - protein, 184 aa, Artificial Sequence; identical to SEQ ID NO: 6934
  Synthetic

SEQ ID NO: 6936 - protein, 181 aa, Artificial Sequence
  Synthetic
SRLEDLLRKVKKVLDEIRRTIEKSLEDVRELIKRIERTIEKLLERSRDVVRRVLEDAERRRRKELVEELEKELRRIDEEVEEEVRRLIEELERIVRESEKLSDKLIRDLERIVKRLAEEVDSEKAKEVLKEVKDRVDEVAKELTDVNRDIRRIVDELRRRAEKVVRESRELSRELREELEK

SEQ ID NO: 6937 - protein, 181 aa, Artificial Sequence; identical to SEQ ID NO: 6936
  Synthetic

SEQ ID NO: 6938 - protein, 181 aa, Artificial Sequence
  Synthetic
SELERLLEEVEKELRKIERTITELLRRSRELLEEIERAIKESLRDSERLLREIEDTVRKRRREEIVDKLVKDLERLDEESKKLSEKLARDLDKANKRVEDTVRELIERLKEIVEELARRLDESKVREVLREVRERVKEVVERLKRVVEESRKRSEEVKKKLEEVNRRSEEESKRVKEELKK

SEQ ID NO: 6939 - protein, 181 aa, Artificial Sequence; identical to SEQ ID NO: 6938
  Synthetic

SEQ ID NO: 6940 - protein, 182 aa, Artificial Sequence
  Synthetic
KLEEVLRTVRKLVEDLREELERVVRTSRELTRRLEEELKEVVKRSEDLSRRLEEILKRDAREDKDLVTEIKRRLEELNRRNRELVKELLRLLDEVDKDLKRLVEELLRELEKVIKKIKDLVDNNVDLTEALKEVKRLVDEIRKTIEEALRDSKRLVDEIRETIKRSLEEVEKEVRKAEERIR

SEQ ID NO: 6941 - protein, 182 aa, Artificial Sequence; identical to SEQ ID NO: 6940
  Synthetic

SEQ ID NO: 6942 - protein, 182 aa, Artificial Sequence
  Synthetic
SIEDVLRAVEKLLRDLKRRSEEVVKHSETELRRLLEEVRRVLEHSREALERLEERIKDVREEVIKRVKELVEKLKKENEDLLTDVRRLLEELKRRNKELTERTKELLDRLKEEAEKAKRDNVSDEVIKEILERVKKLIEEIDERNKELNERTKELIKRIKDRLKELNDKTEKAIDKIRKEVE

SEQ ID NO: 6943 - protein, 182 aa, Artificial Sequence; identical to SEQ ID NO: 6942
  Synthetic

SEQ ID NO: 6944 - protein, 182 aa, Artificial Sequence
  Synthetic
SIEEVLREVEELLKELEKRARDVLRHSEELLRDVIRRSEEVVKHSEDLLRKLKEAAKDVREEVIRDVDRLVRELKERNRKLSDDSRRRVERLKEENEKLLKEVKDLVEELKRRAEKLSRDNVSDEELKKILDEVRKVIKELEDKLRKLNKKTEDVIRELIERNDRLNKDTKRVIDELKEKVR

SEQ ID NO: 6945 - protein, 182 aa, Artificial Sequence; identical to SEQ ID NO: 6944
  Synthetic

SEQ ID NO: 6946 - protein, 182 aa, Artificial Sequence
  Synthetic
SIEEVVEEVKELLERLIRRSEDVLRHSKKLLEELERKSERVVEHSEDLLRKLEEKIKDVKDDVIRKVRELAKKLRTENEDLSRRSREVVKRLKELNEKNLEEVRRLVKKLKEDAERLARNNVDDETLKRILEEVREVIKKLIKSSEDVNRETEELIRRLEDRNRKLNEKTEKVIREIEEEVK

SEQ ID NO: 6947 - protein, 182 aa, Artificial Sequence; identical to SEQ ID NO: 6946
  Synthetic

SEQ ID NO: 6948 - protein, 182 aa, Artificial Sequence
  Synthetic
TVEDVLRELRERLKESEKRDRDSVRKAEELLRRSEKRTDDVVKHSERLLEELEEAVRRIRGDELKTEVEEVRKKIRRSLEELKKHSKEVVDEIRRLLEESERHSKEVVEDIERKLESLRRIEDEDVVRRLLEEVEELLRRNVKKSEELLKEIRERLEDNIRKVEKVNRDNKREIEEILRRVK

SEQ ID NO: 6949 - protein, 182 aa, Artificial Sequence; identical to SEQ ID NO: 6948
  Synthetic

SEQ ID NO: 6950 - protein, 182 aa, Artificial Sequence
  Synthetic
TVEEVLKEAEDLLKESKERSEDSARRAEEILRRSEERTRKVVEHSREMARRLMEKVKEKRGDELKEEVERVLRRIEKSLEELRRHSERVKEEIRRLLEEDKKHSDDVVKTIRELLERLKRIDDEKVVEDVLREVEKLVRDNIEHSKRLLDEIRRRVEENIRRVDEVNKRNEELIREVEERVR

SEQ ID NO: 6951 - protein, 182 aa, Artificial Sequence; identical to SEQ ID NO: 6950
  Synthetic

SEQ ID NO: 6952 - protein, 185 aa, Artificial Sequence
  Synthetic
SKVEEILERVKRLIEENIKRSEEILEEVRRLIRENTEVSKKLLEEVKREITELEKEVREDRDKDRLRKKVEEVKDKIRKELKRNEDHSRRVAEEIRRLLRENERHSKRVADEVDRVLKELDKTTKDERVKDVLRRLKKIVDESKRRSDKVNKEIEDRVRESEKKSRKVNEDIKRLVKRVADEVER

SEQ ID NO: 6953 - protein, 185 aa, Artificial Sequence; identical to SEQ ID NO: 6952
  Synthetic

SEQ ID NO: 6954 - protein, 185 aa, Artificial Sequence
  Synthetic
SDIEDLLKKVEDLIRRNIETSRRLLEEVRKLIEENIRLAERILEEVRRLIEELARLTREDRDKDELRKKVEEVEKTVKDVIDDLRRHSDKVEEDIKKLLDDNRRHSEKVMREIEKVLKELRDRDNDEKVKDALRRLRDLIRRSKEDSERVNEEIKDIVRKSRETSEDVVRRARELLDKVRREVEK

SEQ ID NO: 6955 - protein, 185 aa, Artificial Sequence; identical to SEQ ID NO: 6954
  Synthetic

SEQ ID NO: 6956 - protein, 185 aa, Artificial Sequence
  Synthetic
SELEELLKEVAKLIKRNKDRVRKILDEVRKLIKRNEDVSRRLLEDVERLIKELEREVREDRDKDKLKRKVEEVRKRIEEVLRTNERHSREVAKEIKKVLDELREHSEKVARDIKRMLDDLRRKTRDKKVEDILRTLEELIRESERTSEEVLRELREEAEESKRKSKRVNDRIRELVEKVDREVDK

SEQ ID NO: 6957 - protein, 185 aa, Artificial Sequence; identical to SEQ ID NO: 6956
  Synthetic

SEQ ID NO: 6958 - protein, 185 aa, Artificial Sequence
  Synthetic
SKLERLLEEVEKLIRRNKRIVREILREVRELIERNIRVSEEINRRNRRLIEEIRRLVEEDKDKEKLRKKVEDLAEKVRESLERNEKHSREVEERIKELIRRLREHSEDVRRRIREVLKELAKTTDDERVKRILKEIERLVEESKRESERVLEEIKELVKDSKRRSKEVNDHSKKLVDEVREAVKK

SEQ ID NO: 6959 - protein, 185 aa, Artificial Sequence; identical to SEQ ID NO: 6958
  Synthetic

SEQ ID NO: 6960 - protein, 178 aa, Artificial Sequence
  Synthetic
SRIDELLKEIRKVTEKTRRDVERLLEEIRKVTDKSRKDSERSLDEARKVLDTIRKLLEDGKPKEKLLKELRDLLRRIEERNERILRENKRIVDEIKKEAEKLLKRNKEIVDEVAERAARDGVGEALERIKRSSEELAEEVKRVLDEVRRSSEELEKRARDSLRELRELVKRVEEEARK

SEQ ID NO: 6961 - protein, 178 aa, Artificial Sequence; identical to SEQ ID NO: 6960
  Synthetic

SEQ ID NO: 6962 - protein, 178 aa, Artificial Sequence
  Synthetic
SRIEKLLDEIRKVSKKSIDEVRKILEEVEKVTRDSIRKLRKLLREIEKVLEEIERLLKNGRDKDELVRRLEEIAKKIEEDIKKILEENRRIVREVKERLKAIVRRNEEIVDDVLKKMAKDGVGEALKRIKELSDEVREEVKKVLRKIEESSERLEEEAKKVLDTVRELVERVARRAKE

SEQ ID NO: 6963 - protein, 178 aa, Artificial Sequence; identical to SEQ ID NO: 6962
  Synthetic

SEQ ID NO: 6964 - protein, 179 aa, Artificial Sequence
  Synthetic
REAEEALRRVEEVVRRSKTELKKLLEDVRRLIEESERELRDLLRRVEEVIRRIREELRERKTEEVIKKIEKLVTDVREEVKRLLDRDRKIVTDIKRKVERLLEENERLVERVREEAERDLREVKEMLRTVDELLKDSERDSERVLREIEELLERSKRKSEEVLREIERLLEKIEREVRK

SEQ ID NO: 6965 - protein, 179 aa, Artificial Sequence; identical to SEQ ID NO: 6964
  Synthetic

SEQ ID NO: 6966 - protein, 177 aa, Artificial Sequence
  Synthetic
SEVEEVAREVDELVKESRDESRRIVEEAKRLLKESNKSVKDIERDARRLVKEVEDAVREEELKRLVDELRKRAEELVDESRKLDEDLRRRLDELVKRMEEINEELERRVRRIKELLKRGMDVKKVLDEVRELAERSKDLNRRLLERIRELVRRSKERNKELLKRLRDLVERVKREIK

SEQ ID NO: 6967 - protein, 177 aa, Artificial Sequence; identical to SEQ ID NO: 6966
  Synthetic

SEQ ID NO: 6968 - protein, 177 aa, Artificial Sequence
  Synthetic
DEVEEVKKDAERLNKELHESLRRSNEEAKRLLKESKDASREVVKDARRLTKELRETMNDDRVRDLVRRNEEVVREVEKTLERINEELERMVRRLVREDEKLNEDNKRKLDEAKERLRGGSDVEKVLRDLRRLTEETKRRNRETLEEIRRLIERSKEEIKRLLEELRELTKRTKDRIR

SEQ ID NO: 6969 - protein, 177 aa, Artificial Sequence; identical to SEQ ID NO: 6968
  Synthetic

SEQ ID NO: 6970 - protein, 177 aa, Artificial Sequence
  Synthetic
DEVKEVKDRARKLVEEVKRAVDEVRKRADELNKEVHESLRRSNREAERLVKEVEDTVREERAERELRRLEDRVREVVERDKKINEDNKRVIDELTKRLEDLVRELERVVREIEDRLRRGADVETVLREITELAKKILRDIEELLREITKITEESKRENEKSLRELEDLARRVKEKTR

SEQ ID NO: 6971 - protein, 177 aa, Artificial Sequence; identical to SEQ ID NO: 6970
  Synthetic

SEQ ID NO: 6972 - protein, 177 aa, Artificial Sequence
  Synthetic
DEVERLVEELERLLREVRDSVRRSNTEAKELNKEVHEAIRRVVEEARRLLEEVRRTADDEDVRRILKRLEEVIREIVERLKEINDRNRRVVEEVAKEDEKIVRELEKLVEEVRKVLKDGVDVETVLRRVEEVARRVKKLNEDTLRTLRRITEDSLRKIEKLLRDIEKLVREVVERLR

SEQ ID NO: 6973 - protein, 177 aa, Artificial Sequence; identical to SEQ ID NO: 6972
  Synthetic

SEQ ID NO: 6974 - protein, 180 aa, Artificial Sequence
  Synthetic
SEIEDLERRIKEVVDDLRRLVEENSKKIDDLLRRLKDLIRKVEEMNRKLIREAEELVREERSEELVREAEELVKTVHRENKRVEDEIRRLVEEVERHSEKVIRDIERLVRTIEEEIKSLPDSEELRKVEESVRRLAEEIKKELEDSRRRVEELVREIEKELEDVNRDARRLVDKVREELR

SEQ ID NO: 6975 - protein, 180 aa, Artificial Sequence; identical to SEQ ID NO: 6974
  Synthetic

SEQ ID NO: 6976 - protein, 184 aa, Artificial Sequence
  Synthetic
REVEELKKTLDRLVEESKRESDKVREDAERTVRESEDKSRRVKDEARRSLEEVEEDVKDESAEDILRRVRKVSEDHVKELKRLNDDLRRVSEDHVRTLDKLNEELREMVDRIRKRLDELEKRGGDKDEIKKILEEAEEVVRDSKKKIEDLLRHNKKRVDDSLRKIEEILKHNRDEIERVREEIR

SEQ ID NO: 6977 - protein, 184 aa, Artificial Sequence; identical to SEQ ID NO: 6976
  Synthetic

SEQ ID NO: 6978 - protein, 184 aa, Artificial Sequence
  Synthetic
DEVETVREEAKRLVEESRKESRRVEEELKKLLRRVEEEARKVKEELEKSVDEVRKAVTDKDAKDILKTLEDASRDHMRKLDEIIKRLKEIVEEVKRRLKKLNDELEKVVRDVERTLDDLKKKGGIREEIKKILERVREVVKRSKDEIREILKEVRKMIDKVRKEIKEILDHNKEVVRKIKEETK

SEQ ID NO: 6979 - protein, 184 aa, Artificial Sequence; identical to SEQ ID NO: 6978
  Synthetic

SEQ ID NO: 6980 - protein, 184 aa, Artificial Sequence
  Synthetic
SEVEEVKERAERLVRESEELSDRVRREAEKTIEAVRELVERIRKRLKESVEEVERRVTDKKAEDILRRVRELSKRHVDRLEKILRDVKKLSEDHVRTLEKLNKDLRDMVRKVEKELKELKDRGGVREEIKKLLEEVKRVVDKSKRDIDELLKHNRRKIDEVLRELEEILRHNETRIKEVLDRAR

SEQ ID NO: 6981 - protein, 184 aa, Artificial Sequence; identical to SEQ ID NO: 6980
  Synthetic

SEQ ID NO: 6982 - protein, 177 aa, Artificial Sequence
  Synthetic
SEVEKLLREAEEDVERILKRLEDSMDSNRELVERILETLKRSLDEVEKEIRKIIEELKRRRREEEARKLIEKIKRIIDTNHKLAEDLLRRLERHLRENHREAEELLRRLEELIEDLRRRNVDDKVIKRLEDLLRKVEKVVRDTNRTIKDSIRRVKEVVDTTNREAEKLLRRVEDTVR

SEQ ID NO: 6983 - protein, 177 aa, Artificial Sequence; identical to SEQ ID NO: 6982
  Synthetic

SEQ ID NO: 6984 - protein, 177 aa, Artificial Sequence
  Synthetic
SRVEKLLDEVRRLAEDILRDLERSMRSNEELVRKILEKLKESLESNRRLVKRILERLREERKEELARDLLRKLRKHLEDNHKLAEELLKRLEDHVKRNHERAKELLDELKKMLKELKDRDVDEKVIREVERLIEEVKRVVDDTNRRAEESIKEVRDLVRRTNEEIEKTIEEVDREVK

SEQ ID NO: 6985 - protein, 177 aa, Artificial Sequence; identical to SEQ ID NO: 6984
  Synthetic

SEQ ID NO: 6986 - protein, 180 aa, Artificial Sequence
  Synthetic
REAEEIKKALDKLAEELRELLERSRDTVRKLIKELRDLVRESRRRVKELIDDIRRRVDSKEMEKVLKTATDVLRRNEDLIRRIEKVLREILRKNKELADDIERVLRELEKKIEKLRRDGASREELKRLLEEVERLIERLKERIKRLTEESEKLVRELLKLIEKSTKESEEDVKRLVDEAK

SEQ ID NO: 6987 - protein, 180 aa, Artificial Sequence; identical to SEQ ID NO: 6986
  Synthetic

SEQ ID NO: 6988 - protein, 175 aa, Artificial Sequence
  Synthetic
SEIEDLLRRVRRLIEESEEVIKRVADEVKEIIDRSREKIKRVTEESREIIKRLKKDGKEDRDKLEKLVKELEDKNRESLRDTERLVRELRKLLEESLRLTEEIVTRLEKELRDIDRDRRVEDVERDIRRLVRKLREDNKRIAKTIEDLVRELRELNKRSEDETRKLVKELRDAAK

SEQ ID NO: 6989 - protein, 175 aa, Artificial Sequence; identical to SEQ ID NO: 6988
  Synthetic

SEQ ID NO: 6990 - protein, 183 aa, Artificial Sequence
  Synthetic
SEVERIKKAVEDLVRKLRKVSKETLDESRELVKELKERDKESEKDSRRLAERLRKLLEEKNQTDLRKEVEDVVRDMERSNKESKDKTDEVARELEESNRDNRRKVEEVVERLRRLLEKLKRSTDRKVVKDILDEVKKLIDDIEEHSKRVADRNRRLIEKIKKDTEDVIKRNRDLVTEIEKRIR

SEQ ID NO: 6991 - protein, 183 aa, Artificial Sequence; identical to SEQ ID NO: 6990
  Synthetic

SEQ ID NO: 6992 - protein, 183 aa, Artificial Sequence
  Synthetic
SEVEKIEERVKRLVEELKKSLKESEEETERLARELRDVDRRSKEESRRLAEELEDLLRRRNVDELKREVEKIVRDLDKSNRDSKRLTEKIVEDIKKSNEDSDKKVEDLRKRLEDLLRDLSRSTDDKVVEELLKEIEEEIRKILETNDKVVKENRRLAREILEDTKRVVDRNRELIKRIAERIK

SEQ ID NO: 6993 - protein, 183 aa, Artificial Sequence; identical to SEQ ID NO: 6992
  Synthetic

SEQ ID NO: 6994 - protein, 183 aa, Artificial Sequence
  Synthetic
DEVETIAKEVKELADKLRREVEESRKDSEDLVRKLRESLKESRKRSKDLVDELRKLLERKNTTKLREEVERVAEELKRTNDDSRRKVEDAMRKSKKLNDDLRRRVEKVVEEAKELLKDLKRSTDKKVVDDLRKRVEKLIKEIEEDIERVIRRSRKLIEDILRDNERVVKENEDLIREIEERIR

SEQ ID NO: 6995 - protein, 183 aa, Artificial Sequence; identical to SEQ ID NO: 6994
  Synthetic

SEQ ID NO: 6996 - protein, 183 aa, Artificial Sequence
  Synthetic
SDVERVEEELRKLLKEIEDSVRESERRLEKLLEDLKRSTEKTKKELKELIDRLEERVRERGDEEVKRVVEEVAKRAEDLLRESEELVREVAKRLRELLEESRRLVREAAEDLKRLLEELKRLTDSERVKEILERVRKLVEDVLRRNKRLVEEVERLIEEILRVDERIVREVRELIKRIEERIE

SEQ ID NO: 6997 - protein, 183 aa, Artificial Sequence; identical to SEQ ID NO: 6996
  Synthetic

SEQ ID NO: 6998 - protein, 183 aa, Artificial Sequence
  Synthetic
SSVEEVKKTLEDLLRESDKSVRESERRLRELLRESDESVERSRKTLEDLIRELEDLVRKRGDEEVKKEVDRVAEEAKKLLEDSKRLSDDLRRRLKELLEESEKLSRTLKDLLRRVLEELRRLTDDREVEKILREVTKLIEESLRRDREITEEVRDLIKKSKEKDKEIVDTVRRLIREIKERIR

SEQ ID NO: 6999 - protein, 183 aa, Artificial Sequence; identical to SEQ ID NO: 6998
  Synthetic

SEQ ID NO: 7000 - protein, 183 aa, Artificial Sequence
  Synthetic
RSVEEVVKTLEDLLEKLERSVRESEERLKKLLAESDDSVRKSAEELRRLIEELKDLVRREADEEVERTVREVAKEAEDVLEESKRLSDKLAERLKELLDRSRRLVEEVAETLRRLLEELKRLTDEREVKRLLDEVERLIDEIRERDKDIVREVDKLIKDSKREDKRIVDDVRRLIEEIKRRIK

SEQ ID NO: 7001 - protein, 183 aa, Artificial Sequence; identical to SEQ ID NO: 7000
  Synthetic

SEQ ID NO: 7002 - protein, 183 aa, Artificial Sequence
  Synthetic
SSVEEVKRELEKLLEDSDRSVEESKKTLRRLLEESNKELRRVAERLKDLIRELKKRVKERGTEEVARTVDTVAREAEKVLDKLREDSERLAETLKRLLEESERLSRELAKTLRELLERLRRLTDDREVEEILRRVRKLIEESKTMDKKIVDDVRKLIEESLRDIERIVEDVERLIKEIKERIT

SEQ ID NO: 7003 - protein, 183 aa, Artificial Sequence; identical to SEQ ID NO: 7002
  Synthetic

SEQ ID NO: 7004 - protein, 183 aa, Artificial Sequence
  Synthetic
SSVETVEKELRRLIKELRDSVKKSEDDLRRLLEESNRLVREVERRLRELLEKLRKLVEERADERVEDEVRKVAERLKKLLKELKELSEKLARDLKRLLERSKRLVEEVEKELRRLLEELKRLTDDREVKRILDEVKDRIRRILREDEEIVKEVRRRIKRSEEAIREIAREVDREIEDIERRIR

SEQ ID NO: 7005 - protein, 183 aa, Artificial Sequence; identical to SEQ ID NO: 7004
  Synthetic

SEQ ID NO: 7006 - protein, 174 aa, Artificial Sequence
  Synthetic
SEVEELEERARKLLEDVERLTREVEERAKELVKRVKDSSKRSEDEIRRLLRKLLETSGDNEEVRDVEERAKRVVEESRESNKKLEEDLRRLVEELRKSNEELKRRIEEVRKVLADGKDVEKVIRTLEEEVRRDEEKIREVLERVEDLIREDLRRDEELVKELEKLIREVDEKER

SEQ ID NO: 7007 - protein, 174 aa, Artificial Sequence; identical to SEQ ID NO: 7006
  Synthetic

SEQ ID NO: 7008 - protein, 174 aa, Artificial Sequence
  Synthetic
KEVEDLEEELKKLLKEVKTRTEKVVRDAEKSVRDLEKSSRDSDRTLKDLLRRLMETTGDNEIVEELTRRLKKLKEESDKSNEDHDRKSKKLVKRLEDSNKRLEEEARRLRKVLDDGKDVKKVLDEVRRLVEEDKKRIEEVLKENRESVKRDKELDDRLLERVRELIERALERAR

SEQ ID NO: 7009 - protein, 174 aa, Artificial Sequence; identical to SEQ ID NO: 7008
  Synthetic

SEQ ID NO: 7010 - protein, 174 aa, Artificial Sequence
  Synthetic
SEVERLEEEAKRLLEELKRLVERVVREAERSVEKVRDSVRRSEEEARRLLEEITKDDGRNELVETLERLAEELVRRSKKLVEEHEKRSRDLVRELEELVKRVEEKIRDVVRKLRNGKDVDKVVEDLKDDIRKVKKRIEEVLDENRKSVRKLDEDDRRLVDELRRLVKEVKDKVR

SEQ ID NO: 7011 - protein, 174 aa, Artificial Sequence; identical to SEQ ID NO: 7010
  Synthetic

SEQ ID NO: 7012 - protein, 177 aa, Artificial Sequence
  Synthetic
KEVEDLKEELKKLVEELERLVEKNVREARELVKRSEEESRRVAETARRLVDEIRRAGLDEEVVRRLKEVVDDVIRKLKELDDRLRDVVRKVEEENERLVRELRKVVKRVVEELEKTTDRRTITELLKEVEELVKRVLDAIRKSNREVEKLVRESLRRIEKLLREVEKLVKELLERRK

SEQ ID NO: 7013 - protein, 177 aa, Artificial Sequence; identical to SEQ ID NO: 7012
  Synthetic

SEQ ID NO: 7014 - protein, 177 aa, Artificial Sequence
  Synthetic
DEVERLEEELKRLVKEIEDSVRESKKEAEETLRESRKLSREVEERARRLVEELKRKGVPDELVKRLEEVVREVKKDLERLDEEHERKSEEIVRRSEKLVEDLRRLAEEVVRRLRRTTDEREIRELLEEVRKVVEEIKRRDDELVKENRRSIEESKRRIEELLKEVKELVERVTDTER

SEQ ID NO: 7015 - protein, 177 aa, Artificial Sequence; identical to SEQ ID NO: 7014
  Synthetic

SEQ ID NO: 7016 - protein, 177 aa, Artificial Sequence
  Synthetic
RDVEEVKKEAEELVKKSEESVRRSKEELERTLKRSREESERVKETAKKLVEKIERDGIPDRLVKELEDAVRRIAEELDKLDKDHEDKSKKIVDDSKKNLDELREFVRRVADELDKTTDKETIKRLLDEVRKLVEDSLRHDEELVERNKKSIKDSLDEIERLLREIEELVRKVEEDER

SEQ ID NO: 7017 - protein, 177 aa, Artificial Sequence; identical to SEQ ID NO: 7016
  Synthetic

SEQ ID NO: 7018 - protein, 177 aa, Artificial Sequence
  Synthetic
SDVDRVKEDAKRLVEESKRSVDESAKDMRRTLKRSRDESRRVKEELKRLVDRVKESGLDDKVVRELERAVRRVEEDLKKLNKDHEDKSRELIKRSEKNVRELKKVVEDVAEELDRTTDKDEIRELLERVKKLVDESRRHDKRLVEENRRSARDSLREIERLLREVRKLVEKVLRDRK

SEQ ID NO: 7019 - protein, 177 aa, Artificial Sequence; identical to SEQ ID NO: 7018
  Synthetic

SEQ ID NO: 7020 - protein, 177 aa, Artificial Sequence
  Synthetic
DEVETALEEVKELLERVLRKIEDDLRRVRDLLEKLKRTNEELLRKVREEVRRLADLIRKRRTEDVERELERLLDELRREVERVERENRKIVDELEKHTRRVVEEIKETLRELDRKVKEMNLDETVKREIEKARETLERLLKRSEEEVDRVKKEVEEISRRVKKEVKKLVDEIRERLR

SEQ ID NO: 7021 - protein, 177 aa, Artificial Sequence; identical to SEQ ID NO: 7020
  Synthetic

SEQ ID NO: 7022 - protein, 177 aa, Artificial Sequence
  Synthetic
RRVEEVAKELKRIAEKLKRDIEELLRDDKRLADELRETNKELLRKDKEILDRLAEEIKRRRTDEVREELERRIDESKKEVDEVVKENDRIVKESEERVKDLEKELEERLRRLKEKLKANRVDETVDRKIDELAERIRRLLEKVKRHVEETKRDVRRVSEEVRKHVEETKRDVRRRLK

SEQ ID NO: 7023 - protein, 177 aa, Artificial Sequence; identical to SEQ ID NO: 7022
  Synthetic

SEQ ID NO: 7024 - protein, 182 aa, Artificial Sequence
  Synthetic
SRVEDLVRRIRELVRRDLKRIKDLEEEIKRLAEEIERHSKKVVDELKELADRLRKMLEEGNLREEDIDRVRKEMERLLEENKRESDKLVRRLEELVKDSERHSARVVEELEKLVETIRSEGVEKEKVDDIRREVKRVVRESEEANKRVRKLVEDIVKRAEDSNRRVEELVRELVEDLKRAAK

SEQ ID NO: 7025 - protein, 182 aa, Artificial Sequence; identical to SEQ ID NO: 7024
  Synthetic

SEQ ID NO: 7026 - protein, 182 aa, Artificial Sequence
  Synthetic
SEVDELLKTIEKLARDDVKKIREVVEENKREVRRLEEHSKEVVKEIKDRIKEVLELLRRGELRRKDVKKVEEELEKLVRENKERSKEVVRRMRESNRRSEKHSRDLVRELRDRLREIAERGVEERVLERVERLVRRLAEESRRANEKSKEDTKRLEDRLKKSNDDLEKLVRDVVTRVREEAD

SEQ ID NO: 7027 - protein, 182 aa, Artificial Sequence; identical to SEQ ID NO: 7026
  Synthetic

SEQ ID NO: 7028 - protein, 182 aa, Artificial Sequence
  Synthetic
DEVKELEKRIRKLVREIEEHSKEVVKENRRLVEEDLETIKEVLREIKRRIKKLLELLERGELRREDVKRVEDELKKLLEDSKRHSEDVEKKLKESNDKNEKKSEEVVRELEDLVREIAERGVEKDVLKTIKDTVEELVERLKRSNERSREETKKLVKRSREANKRVEDLVRKVVKELREAEK

SEQ ID NO: 7029 - protein, 182 aa, Artificial Sequence; identical to SEQ ID NO: 7028
  Synthetic

SEQ ID NO: 7030 - protein, 182 aa, Artificial Sequence
  Synthetic
EEVERIVKEIRDLAEKDKEHSKRVEEEIRRLVEEVERHSRRVEEEIRRLAEELKRLLDRGELRDEEVRRVVKEIEDLVRRNKEETRKVVEDLKRLVEENKRHSDEVVRRLEKLVEDIKRKGLPEEKLEDLERKVRKLADESREVNDRLRELVERVVRRLEEVNERLERLVEELRRRLEEAKR

SEQ ID NO: 7031 - protein, 182 aa, Artificial Sequence; identical to SEQ ID NO: 7030
  Synthetic

SEQ ID NO: 7032 - protein, 182 aa, Artificial Sequence
  Synthetic
DEVEELVERIKRLVERDEREIKRVEDEIERLVRRVDEHSKRVEEEIRRLVTELMELLDRGELRDEKVKEVVKTAKELVDRNKRETDEVKKELDKLVEDIRKHSKDVVDELKDLLRRIKSRGVEERVVEKVRRLVDKLAERSRDLLRKLRDLVRRVVKRLEDVNRRLEELVRKLAEELKEKSR

SEQ ID NO: 7033 - protein, 182 aa, Artificial Sequence; identical to SEQ ID NO: 7032
  Synthetic

SEQ ID NO: 7034 - protein, 188 aa, Artificial Sequence
  Synthetic
SEIEKILDDIRREAEKDLRLSEKIVEDIKRLAERDIKRLREIVEEIEKLLREVSDELRKRKEKEELKKRVEEAEERLRRLVRELEEHSKKVVRDLEELVKKNHDHSRRLKEKMEELVKELRKEMDSEDAERLIREVEKLVRDLVRESEKSNEEVRKLVEDLVRESDKVLKDVKRLVDEVVRRAREEVK

SEQ ID NO: 7035 - protein, 188 aa, Artificial Sequence; identical to SEQ ID NO: 7034
  Synthetic

SEQ ID NO: 7036 - protein, 188 aa, Artificial Sequence
  Synthetic
SRIDEIVKRIEELARRDEEVSREIVKEIRDLAKRDEDTSKRIVEEIKELVKKIKEELERSKDKEKLARKVDELVRRLRELVKRNHDHSRRVVREMEKLVEENHKHSKDVVDTMRDLVRRLEEELDSEDAKRLLDKVRKTVEDLVRRSRKSNEDVRREVEKLVDRSRKSNTTVERLVRKVVRELRETVR

SEQ ID NO: 7037 - protein, 188 aa, Artificial Sequence; identical to SEQ ID NO: 7036
  Synthetic

SEQ ID NO: 7038 - protein, 188 aa, Artificial Sequence
  Synthetic
SRAEEIVERIKKLAEDDKRESDRIVEEIKKLARDIEEAIRRIVKEIRDLVKEVRDVLEREKDKEKLDRKVDDAVRKLEKLVRELKELVDRVVKTAEDLVRENHRHSKEVVETLERLVEELRKEATDERAKELVEEVERLVRELVKDSDRSNKEVRRTVKEIVERAEKLVRDVEEDVERLVRDLKRKVK

SEQ ID NO: 7039 - protein, 188 aa, Artificial Sequence; identical to SEQ ID NO: 7038
  Synthetic

SEQ ID NO: 7040 - protein, 188 aa, Artificial Sequence
  Synthetic
SEIEKILKEIEDLARRDEEVSKKIVEDIRRLAKEVEDTSRDIVRKIEELAKRVLDRLRKDRRKEELEKEVREVVKTLEELVKDNHRLIRRAVEEMKRLVEENHRHSREVVKELEDLVRKLRADSTSEDAERLVREVEDLVRRLVRRSEKSNEEVKRTVEELVRRMEESNDRVRDLVRRLVEELKRAVD

SEQ ID NO: 7041 - protein, 188 aa, Artificial Sequence; identical to SEQ ID NO: 7040
  Synthetic

SEQ ID NO: 7042 - protein, 180 aa, Artificial Sequence
  Synthetic
SEIEKLRKTVERIKEEVKRLSDEHKKRTRELERTSERLVEEHRERTEELRRRIEEIVRKKRDRSLEEIVKKLKELLDKLDKELEDSSRDTKRRLKRLDEDSDRSNKELAERLRRIAELIKAGKDIDTLVEEIKELMKEDSERIKKSVKEVDDLAKEDSDRIRDSVRTVKELADEAIRRAK

SEQ ID NO: 7043 - protein, 180 aa, Artificial Sequence; identical to SEQ ID NO: 7042
  Synthetic

SEQ ID NO: 7044 - protein, 180 aa, Artificial Sequence
  Synthetic
SEIERLEDRIRRLIRDSRELVKTLKKELKEIIERLEELSERLRREIERVVREVEDVVRKRRSDKIEDLVRRLKERLDRIIEESRDLNEKTKRELERVIREIERSSKESEDRAKKIEDLIRAGSDIDELLKKLDEIATRDREKIERLREEIRKIARKDEEDIRKLVKEIRDEVRKLKEDAR

SEQ ID NO: 7045 - protein, 180 aa, Artificial Sequence; identical to SEQ ID NO: 7044
  Synthetic

SEQ ID NO: 7046 - protein, 174 aa, Artificial Sequence
  Synthetic
SEVEELRELVKRLIERIKRVVETNERDLEELIKRVKDAVKKNKEDLERLIEEIDRKRVDERLIRELRKKLERLKEENERLVRDLKRAVDEVVKENRRLVDDLRRKLETVERVLDKGEPIKELLDELKRLIDEVEKKLRESNERVRRLAEEVLRRSKESNDRVRDEARKVKETAR

SEQ ID NO: 7047 - protein, 174 aa, Artificial Sequence; identical to SEQ ID NO: 7046
  Synthetic

SEQ ID NO: 7048 - protein, 174 aa, Artificial Sequence
  Synthetic
DEVEALKRTVEELIKRIRKAVEDNERDLERLLKESRDVVKKNEEDLKRLIEEIERIRVDEKLIRELREVVKKVKKENEDSVKESEEVVREVRKRNRELVRELETIVRRVERVVENGEPIEKLLRELERVIEEIVRRLEDSNRRVRDIARRDKERSKRSNDRVRRLAEEVKERAK

SEQ ID NO: 7049 - protein, 174 aa, Artificial Sequence; identical to SEQ ID NO: 7048
  Synthetic

SEQ ID NO: 7050 - protein, 174 aa, Artificial Sequence
  Synthetic
SEVEELKKLVEELRREIRRLVRENEEDLKKLLEESKRMVERLKELVKKLIEDIRRTRVPDELIRRLEEMAKEVERRLKKSVKESEDELRRVVEENRKLVRDLEKILEDVERVVENGEPIKELVDELKRVADEIVRRIRESNRKVRKIAEEDKTRIKRLLEELERLIADVERRAT

SEQ ID NO: 7051 - protein, 174 aa, Artificial Sequence; identical to SEQ ID NO: 7050
  Synthetic

SEQ ID NO: 7052 - protein, 178 aa, Artificial Sequence
  Synthetic
SEVERLLRELERSVTEVKERVRRLVEELERIVREVKKRVDEHKERNKRALEDVKRKVRDRKDVKEVVRELVERLRRIVEESDKNLRELLREVERLVEDVVRKVEELLKRNERLVEEIKKRGVREEVEKRARKTTEDIKRMADKVTKVAEEVLRRVEKVVEEVREVSRRVVEDIERDTR

SEQ ID NO: 7053 - protein, 178 aa, Artificial Sequence; identical to SEQ ID NO: 7052
  Synthetic

SEQ ID NO: 7054 - protein, 182 aa, Artificial Sequence
  Synthetic
KDVEKVIEDIERILTEVRRHSKEILDRIKRILETIREIVKEVKKRNEDLLREARESNVRSEEVRRIVEEIVRRARRSNEELRRIAEEIVRELDRLVKENHELIREVARRLEKLVEDLVRRRGRDKSVEDARRAVERVVREARRSNEEVKRAVEEVAKELERLVKESEDESRRIVEELKKTVD

SEQ ID NO: 7055 - protein, 182 aa, Artificial Sequence; identical to SEQ ID NO: 7054
  Synthetic

SEQ ID NO: 7056 - protein, 182 aa, Artificial Sequence
  Synthetic
DEVEEVIKRIRDILRRVEEHSEKILREIEKLLRDATRHSEEVKRRNEKILRDAENSRVRSKEAEDIVRRIVEEAKKSNEENHRLIRDLERRLRELVKENHDLIRRVEKELEELVEDLVRKKGNDEDVKRVRDEVKKVVERVRRSNKKVEDMVREVERRLRESNKESREDSKRIVEEMDRRVK

SEQ ID NO: 7057 - protein, 182 aa, Artificial Sequence; identical to SEQ ID NO: 7056
  Synthetic

SEQ ID NO: 7058 - protein, 178 aa, Artificial Sequence
  Synthetic
SEVEKIIDELRKVAEEHKRRVKELVDTNRKVLKEVKDRVRDLVRRVREILKDVSDKARRVTDRKTLEELLRRLKEMVDRVRETAERLLRELERISREHKKEAKRLLETNKRRVEEVKRRVREVDEIKEVLKESEEEVRRMLEELEKELRRSRKTVEELLRRLDKTLREVEEAVKRERD

SEQ ID NO: 7059 - protein, 178 aa, Artificial Sequence; identical to SEQ ID NO: 7058
  Synthetic

SEQ ID NO: 7060 - protein, 178 aa, Artificial Sequence
  Synthetic
DRVEELLKRVREILERVEREARRLVEEVEDVMRRHKEKLEELVRHNREVLREVSREARRTRDKETLKRLLDELRKLSKEHKDEAKRLLESNRRIVERVRERVERLLDELRKEVDKVRKAVREVEEVKKVLKEVEDTVRELVRRLEKKLKESIDTVERLLEELERVLRESNKTVEDETR

SEQ ID NO: 7061 - protein, 178 aa, Artificial Sequence; identical to SEQ ID NO: 7060
  Synthetic

SEQ ID NO: 7062 - protein, 178 aa, Artificial Sequence
  Synthetic
DEVRKILRELREALKRHVEEVKRLLEHNERVLKKVKEDVERLMEEVKRALEDVKRDVDRTRDKETLERLLRRLKTIVDRVRETAKELLDRVRKVSKEHEDALRRLKDTNREIVRRVAERLKDVKEVRKVLRESEKLIDDLLRELKRVLEETNRRVEDLLRRLEEVLRRVEKTVRDRAK

SEQ ID NO: 7063 - protein, 178 aa, Artificial Sequence; identical to SEQ ID NO: 7062
  Synthetic

SEQ ID NO: 7064 - protein, 176 aa, Artificial Sequence
  Synthetic
SLKERLEKVVEESLRRVEEVIKKLERRVEESERRVEELVKTLRDVLRKILRELEKEGGRELIEELRKALRRLDETVKKNLDENRELIEEVRRRLKKHLDDNKKVAEKLKEALKRNSSRETVERLLEEIRELLERSRKNVEDLERRIDKLLEDSERNARELLERIRKELRDISEKRK

SEQ ID NO: 7065 - protein, 176 aa, Artificial Sequence; identical to SEQ ID NO: 7064
  Synthetic

SEQ ID NO: 7066 - protein, 176 aa, Artificial Sequence
  Synthetic
SMKEEIDRVVREVAENVRDMIRRLKRVLEESLRRVDELVKEIKKVLDDVRRRIEEDGGDELIAELDKIAEEVKRNAEKHLERNKRLADEVRKELEKHRKENERLIRELKDRADKNSSEETVKRLVEKIRELNERSLDNVKKLLDRIRELLEESERNVKDIVRRIRDLLRRIKEKAT

SEQ ID NO: 7067 - protein, 176 aa, Artificial Sequence; identical to SEQ ID NO: 7066
  Synthetic

SEQ ID NO: 7068 - protein, 182 aa, Artificial Sequence
  Synthetic
DEVERVLEEIERMLREVEEHTRRVVEEVRRVLEEVKRHSERVVREIRRLLEELRKLVERGEITDEKLREVVKRLDDLVKENKRRSEEVVKRLRELVRRNKEKSRKLEEEAKKLVDDVRRSGAPKDLVRKVEEEVRRVKRELERLNKELEDEVRRIEEAAKRSNEELKKVVDEVKRELEKASK

SEQ ID NO: 7069 - protein, 182 aa, Artificial Sequence; identical to SEQ ID NO: 7068
  Synthetic

SEQ ID NO: 7070 - protein, 182 aa, Artificial Sequence
  Synthetic
DEVDEVLKEIRKVLEDVRKHSEEVLREIERVVREVKKHSRKVVEEIKEVVKRLEDLARRGEIRRKDVEDVVRKLRKKVRDNVETSRRVVEELKKLVKRNVEVVKRVVEEARRLVEEVDKGGVDKRLVDKVRKVVEEVERELKKSVDDVRRVVEEVERRLREVNKEVEDVVREVEERVRRAAT

SEQ ID NO: 7071 - protein, 182 aa, Artificial Sequence; identical to SEQ ID NO: 7070
  Synthetic

SEQ ID NO: 7072 - protein, 175 aa, Artificial Sequence
  Synthetic
DEEKEVEKVVRDVEDKLRRLLEENRDVSRKIKRELEELLKELKRSVDDSKEKLERKLREEDEVVKRVLKTSEDLVRELERLIREVEKDLEDSNRKVEDVVRDLKRRLKEIEKLVRDGADIKTVLEEIKKLAKEAEEEIKRTLERVKKLLEEVRRVVEELLRRNRTLLREIVRKAK

SEQ ID NO: 7073 - protein, 175 aa, Artificial Sequence; identical to SEQ ID NO: 7072
  Synthetic

SEQ ID NO: 7074 - protein, 175 aa, Artificial Sequence
  Synthetic
DEERELEEVVKDIERRSKKVVEDNRRVSEEIKRRLEKLLEENRKSAEDSKEMLRRELREKDEVVRRLLKESDDSNKEVKELIDDLTRRLDKSNEDLKRSVDETKEKLDRLLDLLRRGVDVKTIVTEVRDVVRRDKKKAEDTVRTVKELLDRARKKVEKTIRDNRKVLEEVVRKAR

SEQ ID NO: 7075 - protein, 175 aa, Artificial Sequence; identical to SEQ ID NO: 7074
  Synthetic

SEQ ID NO: 7076 - protein, 175 aa, Artificial Sequence
  Synthetic
SELERVEKVVREVKKALEDLLRRNKESVDRSRTEARRLLEELRESVRRSEEMVRRKLREKDEVVRDLLKKSRKLVEDLRELAERLKRKSEKSNEEVRRLVEKLTEELKDLLRLVEAGKDVEKVLKEIRDLLREAAERVERSIRRNKKVLDDLKEVVERLLKENERLLREIVEDAR

SEQ ID NO: 7077 - protein, 175 aa, Artificial Sequence; identical to SEQ ID NO: 7076
  Synthetic

SEQ ID NO: 7078 - protein, 175 aa, Artificial Sequence
  Synthetic
SAREKLRKVVEEIRRELKRLLEENKKVSDDIRRKLDELLKELEKSVKESIDTLRRDLREKTEVVERVERDSRRLIEELRKLVEDLDRRLKKSNDEVRKVVEELKRTLEELLKLLDDGVDVDTIVKELRELLKRAEEEVKKTSDRVADLVRRAEEVVKKLLRENEELLRRIVETAR

SEQ ID NO: 7079 - protein, 175 aa, Artificial Sequence; identical to SEQ ID NO: 7078
  Synthetic

SEQ ID NO: 7080 - protein, 175 aa, Artificial Sequence
  Synthetic
SEKEKVEKVVDEVRRRLEDLLRRNRESVRRSDEELKRLLKRNKEVSDEIRKRLRRELDKKDEVVRELEKRLEESNREVEKLIRDVVRKSEDSNRRVEKLVRDLLRRLEDILRLVEAGADVKTVLREIRELLKEAEERVKKSIKENEDLLDDVRRKVEESTERVERELERVSREAT

SEQ ID NO: 7081 - protein, 175 aa, Artificial Sequence; identical to SEQ ID NO: 7080
  Synthetic

SEQ ID NO: 7082 - protein, 175 aa, Artificial Sequence
  Synthetic
DEDREVEEVVKEVEERLRRLLKKNEDVSREIEKRLKELLEKNKRSVEKSEEMLRRKLREKSEEVKDLKDKSARSNEEVAEIVKDLKRRLEESNREVEELIRRVRKRLDELLKMVKAGKDVDRVLEEIRELLKRVKEEVERTSRDVKEVLRRAEEEAKRTDDENRKLLEEVVEKAR

SEQ ID NO: 7083 - protein, 175 aa, Artificial Sequence; identical to SEQ ID NO: 7082
  Synthetic

SEQ ID NO: 7084 - protein, 178 aa, Artificial Sequence
  Synthetic
DRSKEVVDRLEEELRKVKEDSKESVDRLRRLLEEVERRAEKSLRDSKEVLRRVKEEAERDRDEKTLRDLLRELKKDLERSDRELADLVRRLKEVVDRIRETNEKLIRDLKRRLEEVLDRNREVRELEKVVRDIIDRVRKMLETSEEVIREVLERVRKVLEENRRVNKDIIDKVEERVR

SEQ ID NO: 7085 - protein, 178 aa, Artificial Sequence; identical to SEQ ID NO: 7084
  Synthetic

SEQ ID NO: 7086 - protein, 184 aa, Artificial Sequence
  Synthetic
DEIERLIEEIKTVLDEIRKEAKRMIDENKRLLDEIRELSERVVEENRRLLEEIRDRAEKRRTEELAERVRRLLRRVEEENKRVARELRELLRKSEEDTRRLVTEVRDRLEKLRERVEELVRRKRVKELADELRKVLKDVRREIEKLVRDAEKSNEDSRREVERLVKRNRESLEEIRKRVEDLVK

SEQ ID NO: 7087 - protein, 184 aa, Artificial Sequence; identical to SEQ ID NO: 7086
  Synthetic

SEQ ID NO: 7088 - protein, 175 aa, Artificial Sequence
  Synthetic
SSKETLRKEVERLEKELKKLVDESRRVLEEVEREVRRAVRELEESVKKSAKRLRDRVRGEEILRRVEKKLKESEELVRRATETLKEVLKRLRESSKEVADRLKEVVERLRREVDKGGDDVEKLIRRVEELLERVRELVKKNIREIEELLERLRRLVEKVIEDDKRMLKEVEEEAN

SEQ ID NO: 7089 - protein, 175 aa, Artificial Sequence; identical to SEQ ID NO: 7088
  Synthetic

SEQ ID NO: 7090 - protein, 185 aa, Artificial Sequence
  Synthetic
REVEELIKRIERLLDEAREHSKEVIRRDEELLRRVRKIIEEIIREIERLLREAEDIARKRGGSDEEVLRRLEEIVRRLRELVERVKRELEKIVEESRRLVEKNEDLSRKLVETLKDLVRRLSRDVSEELLKRIEDVVRRVVEDLKRLNEEIRRSSEETEKELRRLLEEIRKVVEDVERRVRELVK

SEQ ID NO: 7091 - protein, 185 aa, Artificial Sequence; identical to SEQ ID NO: 7090
  Synthetic

SEQ ID NO: 7092 - protein, 185 aa, Artificial Sequence
  Synthetic
DEVREVIKAIRKMLEEAEKHSRDVIRADKELLDKIARHSEEVIKEIRRLLRELEKIAKDKGGESRELEELAKEVVERLKKLVEENVRLSRRIVETSRRLVRENKELSREIVERLEKLLRDLAKTVSEDLLRRIEEEVRRVVEALEKLNRDIEESSRRTEDTARKLNERIREVVEEVMRRVRKLVE

SEQ ID NO: 7093 - protein, 185 aa, Artificial Sequence; identical to SEQ ID NO: 7092
  Synthetic

SEQ ID NO: 7094 - protein, 185 aa, Artificial Sequence
  Synthetic
SEVERVIEEIRKLLEDAKRHSDEVIKTDEDILRKVKKHSEEVIREIEKLLEEIEELARRRGGRDKEVVERLREVVRRAEELVKDNKRRSERVVEESRELVERNRRRSEKLVRRLEELVRRLSRDVDEELLRRLEKLVEDVMRTLKKLNDEIRKSVDETEKTLEELNRRIRKTVEEVRKTAEDLVR

SEQ ID NO: 7095 - protein, 185 aa, Artificial Sequence; identical to SEQ ID NO: 7094
  Synthetic

SEQ ID NO: 7096 - protein, 185 aa, Artificial Sequence
  Synthetic
DEVREVIRRIEKLLEDVKRHSERVIREDRKLLRDAERRAKEVIDEIRRVLEEAKEIVRREGGESKKVKDELEKVVRDLRKLVEDLKREVTEIVKKSDELVKENTRESDRVVKELRELVRRLSRDVSEELLKTITDVVRKVEETLKKLNDEIRKSVEDTMRALKKLVDDLRRVVKEVEDRVREEAR

SEQ ID NO: 7097 - protein, 185 aa, Artificial Sequence; identical to SEQ ID NO: 7096
  Synthetic

SEQ ID NO: 7098 - protein, 185 aa, Artificial Sequence
  Synthetic
DVVREVIKTIKKILDEVRDHTRRSIERNEKLLRDIRKIVEDSIRRNRKLLDDAKKVAERDLSDKESLKRKVDEVIKELKDTLDELRKIAEDVIRELEKTLKENHELIREVIERLKELVARLRSQVDEEMVKTLKKVVEDVERELRRLNKEDEDTVREIAEAAERLVRDDERTVREIEEALKELVR

SEQ ID NO: 7099 - protein, 185 aa, Artificial Sequence; identical to SEQ ID NO: 7098
  Synthetic

SEQ ID NO: 7100 - protein, 185 aa, Artificial Sequence
  Synthetic
DVIRDVEKKIRDILERVREHTKKSIKENRDILDDVRRHTEKSIKENEDILDEVRRVAERDLKDKKTLTDVVRRIERELEKTLERDHRRIREVEKRLEETLRENHELIRDVIRRLKDLVDKLRSQVPEEMVKRAKDVVDDVARRLEELNREDKKTVEEIVETAKELNERDKETVERIRKKLEDLVK

SEQ ID NO: 7101 - protein, 185 aa, Artificial Sequence; identical to SEQ ID NO: 7100
  Synthetic

SEQ ID NO: 7102 - protein, 185 aa, Artificial Sequence
  Synthetic
DAVRKVIEDIKRALEEVRRHTKESIKRNEDILREVEKIARDIIREIRRILERVREVVERDLKDKDTLRKAVEDVIKRLEEILKELEDIVRDVIRRLEKTLKENHDLIREVIKRLEDLVRDLRRKVPEEAVETLKRVVDDVAKKAKELNREDEETVRKIVEELKRLLDELRREVERVADEARRAVK

SEQ ID NO: 7103 - protein, 185 aa, Artificial Sequence; identical to SEQ ID NO: 7102
  Synthetic

SEQ ID NO: 7104 - protein, 185 aa, Artificial Sequence
  Synthetic
SVAEEVIRRIEEILKRVEEHTRESIERNKKLLEEVRKHTEDVIRRIRELLERLERVVRRDLKDKETLRDTARRVVEELEKILEEDHRLVRRVEEELRKTLEDNHRLIREIEERLRRLVEDLKRKVPEEMVKRVKDVVDDVVRRLKDLNETDRRTVDEIVKEARRLNDELRKVVEEVEEKARRDVK

SEQ ID NO: 7105 - protein, 185 aa, Artificial Sequence; identical to SEQ ID NO: 7104
  Synthetic

SEQ ID NO: 7106 - protein, 183 aa, Artificial Sequence
  Synthetic
DEVREIIERIKKLLDDIRKVAEESIRRNEKLLEEVRKRVRESIEELKRIKEEVEKLAREGQPKEELKRIVDEIAKRADESNETLKRIVDKLRKDSKKSNEDVKKIIEELKKRLDDLLRDVRRVPEDVVRTIEEVVRRVEKELRRLLEENERVIREIERELKKLVDDNKRVSDEIKDRAERLVD

SEQ ID NO: 7107 - protein, 183 aa, Artificial Sequence; identical to SEQ ID NO: 7106
  Synthetic

SEQ ID NO: 7108 - protein, 183 aa, Artificial Sequence
  Synthetic
SEVEDIIRKIEESARRSEKVVRDSIRENRRLLEEVKREVDRSIERLEDIIRKVEEVARRGEPEEELRRIVEEVKRELEKSNKELREIVKELRERSRRSNEEVERIVRENAKRLDELLRDIRRVEERAVDTIRRVVEKSKTVSKKVLDENREVVREVDERVRELVRKNEDVSRKIEERARRLLK

SEQ ID NO: 7109 - protein, 183 aa, Artificial Sequence; identical to SEQ ID NO: 7108
  Synthetic

SEQ ID NO: 7110 - protein, 177 aa, Artificial Sequence
  Synthetic
DEEEEVERVVKEAEETIRELLERDKRVVKRLREEADRVLDEVREEVKRSEETAEDLRRKGLDERLVDRLRKLSEDHKRKVEELKRRLDEVLRRVEEESKRLLEELREILERVRRLVRRGDPGEKLIKELEDVLRELEERSRKTLEELKDVLRKVKETIDELIRTNRRELEKLERDTR

SEQ ID NO: 7111 - protein, 177 aa, Artificial Sequence; identical to SEQ ID NO: 7110
  Synthetic

SEQ ID NO: 7112 - protein, 177 aa, Artificial Sequence
  Synthetic
SEEEEVAKVVEDVRRRLEELKRAVEEVIRRTDEEAKRLLEADRRVVERVREEVKRLVEAGLDERLARTIEEILKEVLRRSEKLLEDLRRVNEKSDRDVDRLREEVEDILRRLRELVRKGEPGKELIKRLRDELKRLEDDARRILERNKKILEDVERESRRTLKELKDVLKELEERAR

SEQ ID NO: 7113 - protein, 177 aa, Artificial Sequence; identical to SEQ ID NO: 7112
  Synthetic

SEQ ID NO: 7114 - protein, 184 aa, Artificial Sequence
  Synthetic
SLVEELERVVKDVEREARKLNEHNRENSKRVEDRLRELNEHLRKNTEEVKRRLEELIRKKKDSEELLRLAEKLLTESEKLVRDMERENKKSIEDSRRLVKRVVEENKRVLDEARKLVEELKRLTDEDAIREVLRRIERLLEEVKKKNEETSKRSKELLEENAKRNKEVSDRSKRLLEEIKRRAD

SEQ ID NO: 7115 - protein, 184 aa, Artificial Sequence; identical to SEQ ID NO: 7114
  Synthetic

SEQ ID NO: 7116 - protein, 184 aa, Artificial Sequence
  Synthetic
SLTERLREVVRRVEEELKELIRHLRENSERVRKTLEELNRHLKENVEDVKRKLEDLIRKKKDARELERLLRRIIETSEELVRRVVERNKKSIEESERLVRDAMRKLEKLIDEIRKLVEEVSRLTDKDAVERVIEEIERLLDEVKKTVEELSKTSKKLLDENKKENEDVSRKSEELLKKIADEVK

SEQ ID NO: 7117 - protein, 184 aa, Artificial Sequence; identical to SEQ ID NO: 7116
  Synthetic

SEQ ID NO: 7118 - protein, 184 aa, Artificial Sequence
  Synthetic
SLKERLEEVVRRVRKELKKLIEHLERNVEEVRKTLEELNRHLDENVKRVKDTLTRLIEEKRDKKDLVEKLERALEDSKRKVDKLREENRESIRRSKKLVDDAKKKLDDVIRRIKELLERASRLRKKDEFERVLKRIKEVLDEVKREVEELSKESEDLLRKNEERNKRASDRSEDLLKKIAEEVK

SEQ ID NO: 7119 - protein, 184 aa, Artificial Sequence; identical to SEQ ID NO: 7118
  Synthetic

SEQ ID NO: 7120 - protein, 184 aa, Artificial Sequence
  Synthetic
SLLEELEKVVEEVKRSLDEVNKRNKKNTDDVAKTLTDLNEHLERNVRKVEEDAKDLVRKKKDSDELRERLEDIIRRSKELVDELRKLNTDSIERSERLVREAVKRNERAIERIKKLVDDASRLDKEKLAKDVLREIRRVLEEVKRDNDRTSKESKDLLDENKKRNEEVSEESERLLRDIARKVD

SEQ ID NO: 7121 - protein, 184 aa, Artificial Sequence; identical to SEQ ID NO: 7120
  Synthetic

SEQ ID NO: 7122 - protein, 184 aa, Artificial Sequence
  Synthetic
DLLEELKDVVDKVRRTLERLNEENRKNVEDVKRRLDDLNRKLEDNVRRVEERARELIKRKKDAEELREELERVIKTSKDLVDKLRRENEKSIEDSDRLVKKVERDNERVITRIEELLRRLARLTDEKAVRDVLKEIEELLRKVTKENKDTSDESRRLVKTNEDLNREASKRSEDLLARVEEKVR

SEQ ID NO: 7123 - protein, 184 aa, Artificial Sequence; identical to SEQ ID NO: 7122
  Synthetic

SEQ ID NO: 7124 - protein, 184 aa, Artificial Sequence
  Synthetic
SLTERLAEVVKRAEDLLRKLNEENKKNVEDVERTLRKLNKDLKDSVDRSRREAEKLIRRKKDSKDLARKLKKVVEDSKELVDRLMEENKRSIERSRDLVRRVKETNEEVLREIRRLLEELSRLTDKDAIEKVLEDIERVLREVEKRNRETSRDSERLLRRNEEENRKALERDEKVLKEVADEVE

SEQ ID NO: 7125 - protein, 184 aa, Artificial Sequence; identical to SEQ ID NO: 7124
  Synthetic

SEQ ID NO: 7126 - protein, 184 aa, Artificial Sequence
  Synthetic
SLEEALEKIVREVKETLERLNKENRDSVRETADTLRKLNEELRRNVKRVEEALRDLIREKKEKEELKDKVRELLRRSRELVEEVVKENKKSIEESKRLVDEAEKINRDLIRRIKELLDRASRLRKEEEAKRVLRKIEEDLKRVADINRKTIERDKKLLEDNERKNRKVSEESRELLEKIAKDVK

SEQ ID NO: 7127 - protein, 184 aa, Artificial Sequence; identical to SEQ ID NO: 7126
  Synthetic

SEQ ID NO: 7128 - protein, 185 aa, Artificial Sequence
  Synthetic
KEVEEIIEEIKDRLRRLEETVERLLRENREMLRRTREEVKEIIKRIRDLLRELKKIAEKDRRKEELERLARELEERLKRLVDELRRSLEKHDRESEESVKRLEELARRLLEDLDRLVKDLRRKGIDKKLVEDVDKVVKEVEDRVRRLIEALKKVSEDLHRENKKLIEELEEVVKEVKERARELTR

SEQ ID NO: 7129 - protein, 185 aa, Artificial Sequence; identical to SEQ ID NO: 7128
  Synthetic

SEQ ID NO: 7130 - protein, 185 aa, Artificial Sequence
  Synthetic
DEVKEIIKRIEDLLEDLKRKVERILREDERSLEESRKKVEEILKEIEDVLRKLKKDVEEDRDKDRLREEAKRLLEKLEKLVRDLKREVDENVKRSEKLVREAEELAERLVKELEELVRDLERKGVDESAIKELRDVVREVKKRAKELIERLRESVERSRETNERLIRELEDVVRRVEETVRRLIK

SEQ ID NO: 7131 - protein, 185 aa, Artificial Sequence; identical to SEQ ID NO: 7130
  Synthetic

SEQ ID NO: 7132 - protein, 178 aa, Artificial Sequence
  Synthetic
KKEEKIKRSVERSKEENERLIEELERSIRDTARRAEKLIERLEKVVREVDKRLRELREEGRLRDEEVDRLKKELDRLLRTVKELVKELKRRSTELLRRLEEIVRENEKISRDILKLLRDGKDVETVLREDEDTLRRSEEKVDKLIKDDRRLLEELEDKVRELLRTVKELLKRTEERVT

SEQ ID NO: 7133 - protein, 178 aa, Artificial Sequence; identical to SEQ ID NO: 7132
  Synthetic

SEQ ID NO: 7134 - protein, 178 aa, Artificial Sequence
  Synthetic
SSEERLKESIDRSKKRNKEAIEELEKSIRETEKTLEELIKTTRKSIEDVRKRLEDLERKGELDRKMVETLRKRLEDILRRNKTLVDRVKERSEKLLRDLRKIVKENEDRSREILKLVRDGSDIDTLIEEDKETLRRSDEEVRRLIDEDRRLLEEVEKRARESNKEIRDLLRRVEEEAR

SEQ ID NO: 7135 - protein, 178 aa, Artificial Sequence; identical to SEQ ID NO: 7134
  Synthetic

SEQ ID NO: 7136 - protein, 178 aa, Artificial Sequence
  Synthetic
SEEDELRESVKDSERRLRRLIEEDKRVVEEVEEENKRLIDKVREVIKRIEDRLDELRRRGELSEDSVRRLKELLKDILRKVEEIVERNVRRLREMLKESKRLVDRLKEESEEILKLVRAGKDVKEAIRRDRELLKRAEEESRRTLEEMRTSLEESKRRVEELIKTLKRLLDEAEKEAK

SEQ ID NO: 7137 - protein, 178 aa, Artificial Sequence; identical to SEQ ID NO: 7136
  Synthetic

SEQ ID NO: 7138 - protein, 178 aa, Artificial Sequence
  Synthetic
SSEEKVEESIRRSKKRLEELIRDVERVVRKVEEDNRRLEEKLRKSIEDTRRKLEELKRRGELDDELVRRVKEESDRLLDELRDIVRRNVERARRLLEELERLVEDLKRKSEKILELVRRGKDFETLIRDDKRLLRKVEEDAKRLIKEIRDSLRESEKRVEELIDRDRRLAKEVEDRAR

SEQ ID NO: 7139 - protein, 178 aa, Artificial Sequence; identical to SEQ ID NO: 7138
  Synthetic

SEQ ID NO: 7140 - protein, 178 aa, Artificial Sequence
  Synthetic
SSEERLRESIKRSKKRLEELIREVRKRIEEIRRKNEELIREVEEVIRRIREELKRLRDEGKLDDKTVKDLKEKLDRILEEVKRIVDENEKTARELLKRVEEIVRELEKRSKEILKMVRDGKDIDELIKEDERLLREVEKKVKEIIKRLDDSLRDSERRAKELIRELEELLREAEERAK

SEQ ID NO: 7141 - protein, 178 aa, Artificial Sequence; identical to SEQ ID NO: 7140
  Synthetic

SEQ ID NO: 7142 - protein, 178 aa, Artificial Sequence
  Synthetic
SSEDRLRKSIEDSRKRNEELTRALETVIREIRKRNARLIEEVKKVVEEVKRELERLREEGLLSDELVETVLREAERLLEELRKIVEDNVRTADKVLEDLKRIVRRNEEESKKIEELVKAGKDIDTLIKRDRETLKESEDRVRKLLEDLRRSLRESEKEARRLIEEIRTLLEKVAREAT

SEQ ID NO: 7143 - protein, 178 aa, Artificial Sequence; identical to SEQ ID NO: 7142
  Synthetic

SEQ ID NO: 7144 - protein, 175 aa, Artificial Sequence
  Synthetic
SEVEDVLRRIRELLEEVRELVERNLKEIKRLADEIERLAKENLERSRRLAEELRDGNLDEKAAKDVVDDSKRHSREVVETVKKIAEESKRHSDEVVKTLKDIVREIKREVEEKVRGEDAVERVERILRDADEKIKELARESERLNRELDELIKRLVDESRELNRELEEIVRERAR

SEQ ID NO: 7145 - protein, 175 aa, Artificial Sequence; identical to SEQ ID NO: 7144
  Synthetic

SEQ ID NO: 7146 - protein, 175 aa, Artificial Sequence
  Synthetic
REVEEVLKKIEDLARELTKKVRKNLEDIKKLAEEIRELAERVLRTSRELIKELRDGNLRDEELKRIVDRSRELSKEVVERVERIVEESEKHSKDVVDEMKEIVDRVRKEVEDRVRGRELLEEVRKILEEMRRRVDELVRRSEELNRKLRELVERLVKELEDLNDEAKKIVDDRAR

SEQ ID NO: 7147 - protein, 175 aa, Artificial Sequence; identical to SEQ ID NO: 7146
  Synthetic

SEQ ID NO: 7148 - protein, 175 aa, Artificial Sequence
  Synthetic
REVEEILKKIRTLLEEVKRRVEKNLEDIRKLLKELEDRVRRDLDEIRRLAEELRDGNLPEEDVRRVVEESKKHSRDVVETMKKIVTESEDHSRKVAEELKKIVKEIKEEADDKVRGEKLLAEVRKVLKEAEDKIRELVERSKTINTEVKKEVDRLVEESKKLNKELEDEVDRRAK

SEQ ID NO: 7149 - protein, 175 aa, Artificial Sequence; identical to SEQ ID NO: 7148
  Synthetic

SEQ ID NO: 7150 - protein, 175 aa, Artificial Sequence
  Synthetic
REVEEVLKKIRELIETLEELVRDDLRRIEELLRRIEDKVRENLRRIREVIKELRDGNLPEEELRRVVEDTKRHSREVVEEAKKILEDIRRHSERVAREMKKIVDDIRKKVEKDVRGEDLLKRVKELLDDIRRKVDELIDRSRRLLEDLRRRVKELAEESKKLNEEAEKIVEDRAR

SEQ ID NO: 7151 - protein, 175 aa, Artificial Sequence; identical to SEQ ID NO: 7150
  Synthetic

SEQ ID NO: 7152 - protein, 175 aa, Artificial Sequence
  Synthetic
KEVEEVLKEIKDIAEEIRELAERDLKRDKELVDEAEDLVRRNLEDIRRVIEELRDGNLSEEELRRVVEETKKHSDEVRKELEDIVRRSKEHSRRVAERVKRLVEEVKKRVEDRVRGEELLRRVEKLLEDLKRTVDEMVKRSEDSLRRSEETVRELEERSRRLNDEIRRIVDERAR

SEQ ID NO: 7153 - protein, 175 aa, Artificial Sequence; identical to SEQ ID NO: 7152
  Synthetic

SEQ ID NO: 7154 - protein, 179 aa, Artificial Sequence
  Synthetic
SEVDKVVKEIKEKLDEIRKEVEKVVREDERLLEEIERLARKVVRENKELLKDIRREGREDTEKAREMLERSERKVRELIKEAKKILEESRELVKRLTEKAREVLKEIRDEVKKLEDRTDDETVARKLEEVVREVEEEVRRLEEKLKRSVEETEREIRRVVKELEDSVRETEREVRRLSK

SEQ ID NO: 7155 - protein, 179 aa, Artificial Sequence; identical to SEQ ID NO: 7154
  Synthetic

SEQ ID NO: 7156 - protein, 185 aa, Artificial Sequence
  Synthetic
DDVEKLVRDIERLVEKVTRDNKKTVDDDKTLVDEARKENEETVERIKRELEELEKRVRKDRRREALKKELEELEKRIREILKTLHDRNREIIKRSEDLLKELHERNRRAIEEVRRLLDELRRNGVSEEATRKLEKVLRDLEEELKRVDRENEKSLRESRKIVEDLDRTNKRVVDELRRIVEELRK

SEQ ID NO: 7157 - protein, 185 aa, Artificial Sequence; identical to SEQ ID NO: 7156
  Synthetic

SEQ ID NO: 7158 - protein, 182 aa, Artificial Sequence
  Synthetic
DEIDDVLRKIEDLVRKLRELVKKVLEDSKRLLEEIKRLAKEALERSEELVRRVEELARRGDIDEKELREVLETSKRLSEEVRKRAEELLKESRDLSEELRKRLEDVVREIRKLVKDVADKTTIEEVIRKLEEAVKRAEELVKRIEEELRKVDEEVERLVREIEKELREVNDRLRRLIEEIAR

SEQ ID NO: 7159 - protein, 182 aa, Artificial Sequence; identical to SEQ ID NO: 7158
  Synthetic

SEQ ID NO: 7160 - protein, 185 aa, Artificial Sequence
  Synthetic
REIEEALKEIEKIIEDLRKIVEEVLKRLEEIDRELRKRNEDSNREIEKIIEDLKDMVRKKGPDEELKKLVEDIKKKVTDILRRNEKVVEESERLSKELLDDLERVVKKIEEDIKRILDRVREAGLSEEAERRAETVLRKLERVVDKVIKDIRKVLKDNERVVREVRKSAEELLDKLRKVVEEVRR

SEQ ID NO: 7161 - protein, 185 aa, Artificial Sequence; identical to SEQ ID NO: 7160
  Synthetic

SEQ ID NO: 7162 - protein, 185 aa, Artificial Sequence
  Synthetic
REIEDVLRRIEEIIRELEERNKKSNKEIAEIDKELRDRNRKSNEEIEKIIEDLKEAVERKGTNEELEKLIDEARKRLEEILRRNDTVVDESRKRSKDILDRNRELVREIEERLDRILKRVREAGLSEEAEKRIRDVLDKLREVVERVIRSIEDMLRRNEKVVREVKESIERALKRLEETVKRVRD

SEQ ID NO: 7163 - protein, 185 aa, Artificial Sequence; identical to SEQ ID NO: 7162
  Synthetic

SEQ ID NO: 7164 - protein, 185 aa, Artificial Sequence
  Synthetic
DEIEKMLRDIEEIIKRLRKIVEEVRDTLRRIDEDLRRRNEESNRRLEKIIEDLERVARRDGPDERLRKLIKEARETVERLLEENRRRVAKSRETSKKLLDELRRVVEEIEKRLEEILKKVKDDGLDKKAEDEIRKALRKLKEVVKKVLKEIAEMVERNDRELRRLEKSIRESLDKLRETVKRLED

SEQ ID NO: 7165 - protein, 185 aa, Artificial Sequence; identical to SEQ ID NO: 7164
  Synthetic

SEQ ID NO: 7166 - protein, 174 aa, Artificial Sequence
  Synthetic
DLVEEIRKTIEKIVREIRKVLDEVRKHTEDVIRDIRRVLKEVERHSREVVKRIRDERGTEKARDLVRRNKEKSERVVRRARELVKRNEERSREVVKDLRRLVKEIKDLAKKLVDDGIDKDELRKLVETLEKVVREVEEELRRLNEELEKVVREVEKRARESNDRLEKVVREVER

SEQ ID NO: 7167 - protein, 174 aa, Artificial Sequence; identical to SEQ ID NO: 7166
  Synthetic

SEQ ID NO: 7168 - protein, 186 aa, Artificial Sequence
  Synthetic
SEVDEVVKEIRKLVEDDEREVEKAIRDIRRSNEELRERVERLLEELERLIKEVEETVRRMEGKEEIDKLLRELEKRARDVLRELEELLKEDEKRVKEVLDRIKKVNEDTKKRVEELLREIVRRRGEDVEAVEKARKILEEVEKVVTDTEKKLDDIRKHVKEVVDRLRKEIEDVLKRVRDVAERERR

SEQ ID NO: 7169 - protein, 186 aa, Artificial Sequence; identical to SEQ ID NO: 7168
  Synthetic

SEQ ID NO: 7170 - protein, 182 aa, Artificial Sequence
  Synthetic
KVEELLKELLDRVKEVVDRIRRELEKALEESRRVVREVEERVKTANREVRKVVDDVRKRSDEKRLDDILKRVEEESRRSVEELRKRLRKVIEENRKLVEDLERKLERVIREVERLLEELRNVDEEDVRRVLEEIARLVRELEKMVRDVVKTSRDTVRKLREDVKKVVDENRKLAEKLKRDAD

SEQ ID NO: 7171 - protein, 182 aa, Artificial Sequence; identical to SEQ ID NO: 7170
  Synthetic

SEQ ID NO: 7172 - protein, 182 aa, Artificial Sequence
  Synthetic
RIRETLTKLLEDVKEVVRETDELLKRLNRRVREVVRETEERLEDLNREVRKVVRDIERETDDERLRKLLERVIRESERSVEDVRRHSEEVIRRSEKSVEDLKRHSERVIRTAKELVDRLQNVDEETVKDIVRKVKRLLEENRKLAEKITRDNEELLKENKEMLDEVRRRNTELLKRLREEAK

SEQ ID NO: 7173 - protein, 182 aa, Artificial Sequence; identical to SEQ ID NO: 7172
  Synthetic

SEQ ID NO: 7174 - protein, 182 aa, Artificial Sequence
  Synthetic
RIEEDATRLIKEVKDVVKETEERARKVNKEVRDVVRDVERRLKELNEEVERVIRDVKRRSDEKELDDLLKEVNKRSKKSVDDLKERLEDVIRASEKSLRELEKHSREVLKTVKELLDRLKDVDEKIADDVAKEIEDLVRRNREVVTEIEKKNRELVRRLRDMVRKVEEDNKRLLEELKKATD

SEQ ID NO: 7175 - protein, 182 aa, Artificial Sequence; identical to SEQ ID NO: 7174
  Synthetic

SEQ ID NO: 7176 - protein, 178 aa, Artificial Sequence
  Synthetic
SVRELVEEARKHSRKVAEESRKLVEDLTEESKRVIDESREKVERLREEIERVLREVKKEGRVDDKIVEKLRRTAEELRKRVKESNDRNREELEKLREKVEDSNRKNKKTLDELTKKIEDGEPIERVLEEVEESDKRDEERVRKLEREIRESNKRDKEIVDRLLDELRRIVEELRERAR

SEQ ID NO: 7177 - protein, 178 aa, Artificial Sequence; identical to SEQ ID NO: 7176
  Synthetic

SEQ ID NO: 7178 - protein, 178 aa, Artificial Sequence
  Synthetic
SVDEAVDELLKNSEEVIKDTERKARELLRHSREVNKRSERESERLKEEIERVLRKLKRDNKVDDKILEDLRKKLEDLERENRDSVRKNEETVARLLREVEKSNEDNRRTLKELKDLVRNGEPIEELVERIKDSNRRDKEIIKDLERKIRESDKRHKERVDDLARRVEEIVKELEEAAR

SEQ ID NO: 7179 - protein, 178 aa, Artificial Sequence; identical to SEQ ID NO: 7178
  Synthetic

SEQ ID NO: 7180 - protein, 175 aa, Artificial Sequence
  Synthetic
SEVKKVEKEAEDISRRSRELLEKIREEVERLSRRSEELLKDVERKVRKVIKEIEDKRSSEEAKELVDRIDETLKRLLEESRRLVKEAEDRLREVVKESEDLVREMERRLERLREEGSVDEETVRELIRDLRRNTKRVKEEADEMIRHLRENTERVEKRLRELREELKKVVERVRK

SEQ ID NO: 7181 - protein, 175 aa, Artificial Sequence; identical to SEQ ID NO: 7180
  Synthetic

SEQ ID NO: 7182 - protein, 175 aa, Artificial Sequence
  Synthetic
EMVDRATEKVRTLSDESRRLLKKVRDENRKTSERSKRLLDEIERRVKEVLKRIRTERSDEDARRLVDEVRKDLERIIEESERLVREVEDRNRRAIERSRKLVKDIERDLRRLVAEGSVDKDRVKRLIEELKENTERVEKSLRDLDRHNRRNTEEVKRSADELIEELKRVVDEVKK

SEQ ID NO: 7183 - protein, 175 aa, Artificial Sequence; identical to SEQ ID NO: 7182
  Synthetic

SEQ ID NO: 7184 - protein, 175 aa, Artificial Sequence
  Synthetic
DKADEIEETVRRVSETSERLVEEVRKDNERTSKRSDDLLKDIEDKVRKVLERMRRERLDEEARKLVEEVVRRLEELLKTSKKLVEELREKNRRLIETSKRLVEKVEKELKDARDEGSVDEEKVRRLIKELRDNTKKVAEELKKLDDHNERNVEEVKKRLEELIRRLEKVVEDVKR

SEQ ID NO: 7185 - protein, 175 aa, Artificial Sequence; identical to SEQ ID NO: 7184
  Synthetic

SEQ ID NO: 7186 - protein, 175 aa, Artificial Sequence
  Synthetic
DFVKKAKDDVKEVSKESEKLLREIEEEVRRVSKRSRELLETVRRRVEKVLRDMERERKDEKAEELVRRVEEDLKRVLKESEDLVREVEKRLREALERSRKLVEEVREELRRLVEEGSVDEDRVRELIKELEENTRRVEEKLRKLIEDLKRNVREVEERARRLIEELREVVERVKT

SEQ ID NO: 7187 - protein, 175 aa, Artificial Sequence; identical to SEQ ID NO: 7186
  Synthetic

SEQ ID NO: 7188 - protein, 186 aa, Artificial Sequence
  Synthetic
SDLERLKREAEELIERDKRLLRRVEEESRRTLEEDRRSLKESEDRARELIRRIEELAKKIKDKRELEERLRRLLRTLEEIVERNARLSRKLLEDSKKLVKELRELSERLLRTLERLVRELIRKKDKSDEMRDAARRLIEEITRSVEESERELKRLIEEDKRSVERSKKENDKLIEEVRRVVERVTK

SEQ ID NO: 7189 - protein, 186 aa, Artificial Sequence; identical to SEQ ID NO: 7188
  Synthetic

SEQ ID NO: 7190 - protein, 175 aa, Artificial Sequence
  Synthetic
DVEEVLRKLKKEVEEVIRRTEAEVAKVLKEVEKVVTETREEVRRVLEEVKRVVDDVRRRNRADDRLLKEALKRVRDLLRRVEEVSRKHRDDVRRLMEEVKEVSERTRRAIDEIEKKVRDVEEVRKTVEKLIDDNRRMLEEVVKRAKELIEHNRRVVDKVLKEAKKIVRDLEETVR

SEQ ID NO: 7191 - protein, 175 aa, Artificial Sequence; identical to SEQ ID NO: 7190
  Synthetic

SEQ ID NO: 7192 - protein, 175 aa, Artificial Sequence
  Synthetic
SVEEVLKKLLEEVRRVAEETRRRAEKLLDDDRKVAEESKKRAEELLKEVKDRVDDVRRRNTLDDRILKDILRKVAELVKELEEISKRSLDESKRLVEEVEKVSRETEERVRDIARRVKDMEKVARTIKKLIKENRKFLEEVEKRSRETLKTNKKVLRDLEKRAKKIIEDLERTLR

SEQ ID NO: 7193 - protein, 175 aa, Artificial Sequence; identical to SEQ ID NO: 7192
  Synthetic

SEQ ID NO: 7194 - protein, 176 aa, Artificial Sequence
  Synthetic
KIEELMKRLEDEAKRSLDESEKKLEELRRDSERSVREVEELLKELLDRARRVLEKLGDSEEARKVLERVRKLVTEVREHSERVSRENERLVKENRDHSRRLLERVRELVERVSRLTDEEEVKRVAREVEELIERNRRHSDRIAEEVKETLERNREKVRRVLEKLKKELEDVLEKRK

SEQ ID NO: 7195 - protein, 176 aa, Artificial Sequence; identical to SEQ ID NO: 7194
  Synthetic

SEQ ID NO: 7196 - protein, 176 aa, Artificial Sequence
  Synthetic
DIEELARRLEEAVKDSLRRVEEKLRRLEDESRRSVEDSDRKLKELIDRVRKVLKDLGESKEAKDVLREVRRLVEENRKHSEDVSRDNKRLVDEVRRHSEELLKEVKRLVDEVRRLDKDEVVRRVARRIEELLKENDDLVRRVAEEIKRTLKENNEHSDDLRRRIEELIKEITERRR

SEQ ID NO: 7197 - protein, 176 aa, Artificial Sequence; identical to SEQ ID NO: 7196
  Synthetic

SEQ ID NO: 7198 - protein, 176 aa, Artificial Sequence
  Synthetic
DIEELLERLRRRVEKSLEDSDRLLRKLEEDSKESVKRVKRLLEELIKRVKEVLKKAGNSEEAKKVLEDVERLVREVEKHSREVSERNKKLVDDNRKHSEDLLRTVRKLVEEVRRLTDKELVKRALEEIEKRLKDNRDHSRRLAETVKDTLDKNDKKVEEVRREIEELLRRLDEKRN

SEQ ID NO: 7199 - protein, 176 aa, Artificial Sequence; identical to SEQ ID NO: 7198
  Synthetic

SEQ ID NO: 7200 - protein, 176 aa, Artificial Sequence
  Synthetic
DIEDLLRELRKRVEDSLKKSEDRLRRLEEKVKRSLDEVEKELKRLLDEAKKVVDKAGNSEEAKKVLDDVKRLVDRVRRESERLLKEVRDLVRENKKHSKELLDEVDELVERVRRLDKDEEVRRVLERIDRLIKRNDDHSRKLEKEIEDLLRRNNREAEEVAKEVEKLLEDLERRRK

SEQ ID NO: 7201 - protein, 176 aa, Artificial Sequence; identical to SEQ ID NO: 7200
  Synthetic

SEQ ID NO: 7202 - protein, 182 aa, Artificial Sequence
  Synthetic
REIEEVVKELDDLLRRNDERVKRILDELEELIKKHDRRSDEVTKEIRELLRKLEREVERDKSKEDLERKLDELRRTVDELVRDVERHAREVLERVKELVERLERHSRRVLEEVEKLVREVVRTKEARELAEELKKRAKESVDRSKKALEELKKRAREAVRRSREKLKKLKREVEKVVREVRR

SEQ ID NO: 7203 - protein, 182 aa, Artificial Sequence; identical to SEQ ID NO: 7202
  Synthetic

SEQ ID NO: 7204 - protein, 187 aa, Artificial Sequence
  Synthetic
DELREILERVRRVLERSKELSEELLRRVEEVLRRLRKHSRDLEEKVRRILTEIEKRARERRDDDEKLLREVKKVLEDVERELDRSIERSEEVVEELKRRADRSIEESRRLLETVKKELEDLIERRREVKDLREKLDKLRRDLEEVLRRNEEIVREATRRIRKVLDENRKKVEELKRRAERVLEELRR

SEQ ID NO: 7205 - protein, 187 aa, Artificial Sequence; identical to SEQ ID NO: 7204
  Synthetic

SEQ ID NO: 7206 - protein, 187 aa, Artificial Sequence
  Synthetic
DDLRRIAKEVEKVLKTSEDLSEELKKEVKRVVDESREDSKRLREEVRKVLEEVKRLADRNEKDREELLDEVRRLLEEVRRLLKESIDRSKRLLEDVKKKLEDSIRESERLLRTVEERLKELIDKKREVRELKEILKELKKELERVLEDNRRKVKELEDELREVLKRNEKIARELEKELRRVLEEVRR

SEQ ID NO: 7207 - protein, 187 aa, Artificial Sequence; identical to SEQ ID NO: 7206
  Synthetic

SEQ ID NO: 7208 - protein, 187 aa, Artificial Sequence
  Synthetic
DELRELEERAKKVVDESRENSDRLAKKVKEVLKRSRELSDELRKEVERVLREIKERARRKDEPREDLLREVAKVLEEVKRRLEESIRRSKRLLDEVTRELEESIRRSEELVDRLRKKLEELIDRRREVERLRDILDKIAREVERVLEENRRIVTELKKELEKVLDENRKIVEELERRARKVLKELRD

SEQ ID NO: 7209 - protein, 187 aa, Artificial Sequence; identical to SEQ ID NO: 7208
  Synthetic

SEQ ID NO: 7210 - protein, 187 aa, Artificial Sequence
  Synthetic
DELRELLEEVRRMLRESRENSRKLAEEVERVLRESEEDSKKLKRDVEKILEDVRRKLERNEKDKKDLLKEVEDELRKVRKDLEESIRKSKRLLDDVRRRLEESIRRSEKLLRDIDKRLKELIDKRKEVDELRRILDELRRRAKKVLDDNRKIVRDLERELRRVLEENRKIVEELEKLLEKVLEELRR

SEQ ID NO: 7211 - protein, 187 aa, Artificial Sequence; identical to SEQ ID NO: 7210
  Synthetic

SEQ ID NO: 7212 - protein, 187 aa, Artificial Sequence
  Synthetic
KELEELAKTVEDLLRENDRLAEEVLRTVDDLLRKNDEISKRLLDTARKLLKELKDLKRENRGDKKDLLRTLERLLEKLKEDVDRSRKISEDLLREVKRLVDELRERSKRILDEVRKLAEKLIREKDKSEDVKRILEKLIRDVEKSLKDVDDRLRELIRRVEESLRRNEEILKEVERRAEEVVEEVRR

SEQ ID NO: 7213 - protein, 187 aa, Artificial Sequence; identical to SEQ ID NO: 7212
  Synthetic

SEQ ID NO: 7214 - protein, 187 aa, Artificial Sequence
  Synthetic
DDAERLLEDVRRLLEENDRISEEVLKTVKRIVDENDRLAEELLRTVDELVKRLKELRERNEGDKKVLDKEVKKILREVEKLVEELRRISKKLLDDVKRLVDESRKISEKILDDVRKLVTELIRKVKDFERIRKILEKVIKEVEDSLRRNSEIVERAVDRARESVKRVKEIVETVERKIRKVVDEVRK

SEQ ID NO: 7215 - protein, 187 aa, Artificial Sequence; identical to SEQ ID NO: 7214
  Synthetic

SEQ ID NO: 7216 - protein, 187 aa, Artificial Sequence
  Synthetic
SEVEEVKDRVTKLLKENDDISKELEERVRRLLEENDRHSREVEKTVRKLLEDLKRLAEENKGDKKVLTKEAKRILDEVRKLVKENDDLSRKLLEDVKRLVETSKRISEKLLRDVKRLAEDLIDKKRDSKRVKDILRRLVEEAEESLRRNEKKLRELEKRVRESLKRSHKINKELEERVKEVLDRVRD

SEQ ID NO: 7217 - protein, 187 aa, Artificial Sequence; identical to SEQ ID NO: 7216
  Synthetic

SEQ ID NO: 7218 - protein, 187 aa, Artificial Sequence
  Synthetic
DEVERVLEEAKKLLDTNDDLLRKLDDTVRKLVEDNNRISEEVRERVERLLRRLEELVRKNEGDKKKLEKDARDILRKVRELAKESDERSRKILEEVRRLAEKLKRDSERLLRTVERLVRKLIDDKRDSERVKRILDRVIKEVTDSLKRVEDRLRELIRRVEESLKRNREELRRLEERVKDVLDKARR

SEQ ID NO: 7219 - protein, 187 aa, Artificial Sequence; identical to SEQ ID NO: 7218
  Synthetic

SEQ ID NO: 7220 - protein, 187 aa, Artificial Sequence
  Synthetic
DRLEDLLRDVKRLLEENDKHSKEVEERIRKLVEDNNEISRTVARDVEEKLKRLRERTEEKRGDKKVLERDVERLLEEVDRLLKRSEEISERILREVRREAERNDEESERILKEVRDLVRDLIDKFRDSERVRRTLEELTRRVEESLKRSHEINRKVIREIEKSMDENKKELERLIDRARRVLEDVRK

SEQ ID NO: 7221 - protein, 187 aa, Artificial Sequence; identical to SEQ ID NO: 7220
  Synthetic

SEQ ID NO: 7222 - protein, 187 aa, Artificial Sequence
  Synthetic
SEAEEVLKRAEEILRENNKISRDLEEEVRRLLKENDDLLREVEETVERLLEELKELAKRNEGDKKELVKRAEDLLRRVRDLVRRLEERSKEILKEVKRLVEESKRRSEELLKRVRELAKELIDRKKDSERVKKILERVIRELEKSLKDNERKLRELEERVRDSLRRVEESLRRLERRVEEVLERVRK

SEQ ID NO: 7223 - protein, 187 aa, Artificial Sequence; identical to SEQ ID NO: 7222
  Synthetic

SEQ ID NO: 7224 - protein, 187 aa, Artificial Sequence
  Synthetic
DEMEKLRKDVKKLLEDNNKISRDVEKTVEELLRRNDEHSKEVLKRVEDLLRELKKLKDDKDGDKKELLKTLEDILREVAELLKRNDDLSRKILEDVERLARESKKISEEILREVERLAEDLIRKFDKSEDVKRILEELKKRAEDSLRENEKRLRELIREVEKSLRRSHEINRDAERKVRKVLDDVRR

SEQ ID NO: 7225 - protein, 187 aa, Artificial Sequence; identical to SEQ ID NO: 7224
  Synthetic

SEQ ID NO: 7226 - protein, 182 aa, Artificial Sequence
  Synthetic
SEIEELLERVKELLKRNRELVERVKRTVEELNKDNDRVVKEIEDEARRLLDELEKIMRRTSDKRTLDKILREVLERVRKLVEDLEEHSRRILKRTEELVRKLRKHSEDVKRTVDRLVKEVVRDDRMRRIAKKAIDDVRKSVEDSKRILDELRKSTEESVKRTRDILKRVLDEAKKVVEDLRR

SEQ ID NO: 7227 - protein, 182 aa, Artificial Sequence; identical to SEQ ID NO: 7226
  Synthetic

SEQ ID NO: 7228 - protein, 182 aa, Artificial Sequence
  Synthetic
DELEELRTRVEKLLKENNDLVREVLKTVKKLNDENRKLVERILREVERLLRELREIAKTTSDKDTLKKELRRVLEEVKKLLEELREHSRRILETTKELVRRLEEHSKRVLDTVEDLVRKVVRTEEMRKKAEELRKRVDESVKDTRKKLEELRKSTEKSVRDTDRILKDLERRAREVVDELEK

SEQ ID NO: 7229 - protein, 182 aa, Artificial Sequence; identical to SEQ ID NO: 7228
  Synthetic

SEQ ID NO: 7230 - protein, 177 aa, Artificial Sequence
  Synthetic
DVEEAVRELRETLDKSVERSERTVRELVKKLETSVEETREEVERVVEELDRVVEEAKKDVSEKIVDEIRKLVDKLRKEAKKVLEDSKRKVDELRKEAKKVVDESRERAEKLKKDLDERGAGAKEVRKEVKELVERDEDLVRKIREKVEKVVKDNKDLLRRIREAAKRVVREIRERLR

SEQ ID NO: 7231 - protein, 177 aa, Artificial Sequence; identical to SEQ ID NO: 7230
  Synthetic

SEQ ID NO: 7232 - protein, 184 aa, Artificial Sequence
  Synthetic
STMDEIRRIVEKVLKEDKDLAETADRLNRDSVRRDEELAERNKRTNERVVREIEDRLKKEKSEEVVKTIKELIERVVKRNEESIRESERLVRELVKKNEEIIRRSKKLVEEVERRAREILKSSEDKRLEDIVREVKKRLEDSLRDTERIVREVDERNKESLRRSKEIVERVNKLLRDVLERART

SEQ ID NO: 7233 - protein, 184 aa, Artificial Sequence; identical to SEQ ID NO: 7232
  Synthetic

SEQ ID NO: 7234 - protein, 179 aa, Artificial Sequence
  Synthetic
SSKEVADELRKKAEKVLDELRKIIRELERKNEDSLRRTEEIVRRLEEEAERVLRDLVRTRGEDDRLVREVERLLRELKRRLEELIRRSEELIKRSREEVDRVIRTVEKLLEELDRLLRANKGDIEDLRRTVDKLVEEIKDLARKLAKSSDDTVREDEKLVEELRKDVKRIVRKIKKDLE

SEQ ID NO: 7235 - protein, 179 aa, Artificial Sequence; identical to SEQ ID NO: 7234
  Synthetic

SEQ ID NO: 7236 - protein, 170 aa, Artificial Sequence
  Synthetic
SAEEVVRELDKELKKVLEDSRDLVRRLEEELRKVLEDNEEVVKEIERSSDDVLRKLGDSEEAREIVKRSRDELKESIDDSRRIVEKIRRDLERNIRKVEEIIEDIKRKLKDLRGSDELLRRVKELVERARRHSERLLEEVKRLVDEIRERSKELLERARRLNEEMKERTR

SEQ ID NO: 7237 - protein, 170 aa, Artificial Sequence; identical to SEQ ID NO: 7236
  Synthetic

SEQ ID NO: 7238 - protein, 183 aa, Artificial Sequence
  Synthetic
SDLEELFREVKELVDDNLRKSDKLRRDVEKRVRDNERRSEKVHEDNRRLIEKIERLVRRGELREEDVRRALEEIKDSLRRSLETSKKVLDDIREELKRSLDHSREVLEEIERLLEEILRKDKDSDRVRTLVKELRERAKKSLDDNRRMVEELRKRLEESLRRNKRVVEESEKIAKEVLDKVRT

SEQ ID NO: 7239 - protein, 183 aa, Artificial Sequence; identical to SEQ ID NO: 7238
  Synthetic

SEQ ID NO: 7240 - protein, 183 aa, Artificial Sequence
  Synthetic
KDAEDLERRVRELVEENNRVSKRLAEEVTRLVKENEDKVRELEKEVRDRAKELLDMKRRGEVREEEVKRVLREIEELLREITEHSKEVLKTIEKLLRDSLEHSRRVLEEIERLLETILRKSKDSERLKKLVDELRETLERSLRENEKVADELRKRAEKSLEDVKRVVDELRKIVDDVLKRVED

SEQ ID NO: 7241 - protein, 183 aa, Artificial Sequence; identical to SEQ ID NO: 7240
  Synthetic

SEQ ID NO: 7242 - protein, 183 aa, Artificial Sequence
  Synthetic
DDLEELFERVKRLLERNNEVSKKLEDDVRKLIEDNERRVERVHRENEKELRRIEDLKRRGEIREKDVKRALEEIKRSLDELLKHSKDVLEEIEKLLRDSEEHSKTVLKEIEDLLRDILRKDKDSERVRRLVEELRKLLEDSLEKNKRLVDELRKRAERSLREVRKLVERSKREAERVLEEVRK

SEQ ID NO: 7243 - protein, 183 aa, Artificial Sequence; identical to SEQ ID NO: 7242
  Synthetic

SEQ ID NO: 7244 - protein, 183 aa, Artificial Sequence
  Synthetic
SRVEEMFERIERLVRRNNEVSRRVHERNRELIKRNREKVKKVHDDNKKLIDDLRELKRRGEIREEEAKKVLEEIEKSLRELKKHSEDVLREIDKTLRESEKHSDDVTREIDELLKRILDEDKDSERVRRLVEEARRLLKKSKDDNRRVVKRSREEVTRSLREVEKLVDESRREAEKVLEEVKK

SEQ ID NO: 7245 - protein, 183 aa, Artificial Sequence; identical to SEQ ID NO: 7244
  Synthetic

SEQ ID NO: 7246 - protein, 183 aa, Artificial Sequence
  Synthetic
KELEEAFDRVRRLLEENKRKAEEVHRTNEELVRRNNEKSERVHRENEKEIERLDRAKKRGEIREEEAKRVLEKIERSLKRSEEHSEELEREVERTLRELEKHSEDVLKDIERLLKDVLRKDKDSERVKTLLKELRDRLKESRETVKELVDRSREEVKKSKKRNKKVVTDSRRRIKDVLDKVRK

SEQ ID NO: 7247 - protein, 183 aa, Artificial Sequence; identical to SEQ ID NO: 7246
  Synthetic

SEQ ID NO: 7248 - protein, 183 aa, Artificial Sequence
  Synthetic
KEAEDMLRKVRKLIKENEKHSREVADEVRKLVEDNDRKVDEVHERNRKLITDLRRLAEEGRVREKDVKAVLEEIEKSLRELRKHSRDVLKRIDDLLKENEKHSREVLKEIKRLLDELKKEDKDSERLKTVVTELEKRARDSLEKSKEINKRLREELKRSEERVERLVRKSEEEAKKVLDDVRR

SEQ ID NO: 7249 - protein, 183 aa, Artificial Sequence; identical to SEQ ID NO: 7248
  Synthetic

SEQ ID NO: 7250 - protein, 183 aa, Artificial Sequence
  Synthetic
SEIEKLVEDVRKLVEDNLRHSEEVHRRNRRLIEENERKIDELEKRVRKLVEELRELAERGEIREEEARKVLEEIKRLLDEIRRHSEEVLKEIERTLKENLKHSEEVLRRIEERLEDIKRKDKDSERVRTLVDRLREELKRSLDESEKLNRESRKRVTRSLEKVDDLVRELEKLARKVLEEVKT

SEQ ID NO: 7251 - protein, 183 aa, Artificial Sequence; identical to SEQ ID NO: 7250
  Synthetic

SEQ ID NO: 7252 - protein, 185 aa, Artificial Sequence
  Synthetic
SEVEEIFKRVTDLLKRNRDLVREILERSRRLVERNDREAKKILDDARRLIEELEDAVRKERDKDTLRKKVKELRDEVKRLVDRLRKHSKDVLDTDRKLVKELEDHSKELEKEVERLLEELERRSRDERVKKLLDELRERVKRSVEESRRVLDDSRRKSEDSLRRSEELLKRVEEIVERVAREVER

SEQ ID NO: 7253 - protein, 185 aa, Artificial Sequence; identical to SEQ ID NO: 7252
  Synthetic

SEQ ID NO: 7254 - protein, 185 aa, Artificial Sequence
  Synthetic
SEVEEIARRVDKLLKDNKRTVDEILKESRRLVKENNELVDKILREVEELLRRLEDEVRKERDKDELTRKVKELIDRVRKLLEDLRRHSEEVRRRDEELADRLRKHSKELEERVKRLLEDLRRKSTSERVEKLLRELEKRVKESVDTSREVLKRSREDSKRSEDRTEKVLREARKRVEDVADKVRK

SEQ ID NO: 7255 - protein, 185 aa, Artificial Sequence; identical to SEQ ID NO: 7254
  Synthetic

SEQ ID NO: 7256 - protein, 185 aa, Artificial Sequence
  Synthetic
REVEEIVKEVERLVRENDKVAKEIVDESKRLVEENRKRVEEIRREVEELIRRLEDAVRKERRKEDLARKVKELRDTVERLVRELKKHSEEVLRRDEDLVRRLRRHSEKLKKDVDDLVRDLERKSDDKRVKDLLEELRKRVKDSRKKSEELLEESERRSKKSLDDTRRVLKDARDIVEKVADEVRK

SEQ ID NO: 7257 - protein, 185 aa, Artificial Sequence; identical to SEQ ID NO: 7256
  Synthetic

SEQ ID NO: 7258 - protein, 185 aa, Artificial Sequence
  Synthetic
SDVEEIKKRVKELLEENKRLVETIEREVRRLIEENRRLAKRILDEVRRLLEELKDRVDKDRDKDELRKEVERLLERVKELLDALRKHSKDVLDTVKKLLEDLRRSSEELRRTVEELVRRLEERSDSERVKKLLTDARKEVERSLRESKKALDELRRIVEKSLRDTERLLRTAEKEVEDVLREVER

SEQ ID NO: 7259 - protein, 185 aa, Artificial Sequence; identical to SEQ ID NO: 7258
  Synthetic

SEQ ID NO: 7260 - protein, 185 aa, Artificial Sequence
  Synthetic
SEVEKIFRDVEDLLRRNEETAKEILKTSEELVRRNEELVRRILEEVRDLIRKLREVVERSRDKDELRRKVDELRREVERLVRELEKHSRRVLEEDKRLAEELRRSSKELEDEVKRLLDDLRRRSTDRRVEELLRRLAEAVKESLERSERLLRRSEEESRRSLKKTEDILREAREIVRKVAEEVKK

SEQ ID NO: 7261 - protein, 185 aa, Artificial Sequence; identical to SEQ ID NO: 7260
  Synthetic

SEQ ID NO: 7262 - protein, 185 aa, Artificial Sequence
  Synthetic
REVEEIVKEVRRRLERNDEVAERIVRESERLVEENNRLVEEILRRVRKLIEELLDLVRKSRDKSKLKKKVDELRRTVKKLLDELREHSKRVKEEDERLVDELRKHSRKLLEEVKKLADELRKRSTDERVEKLLRDLEREVDESRKKSRKLLERSREESDRSLKTTEDILREAERIVEKVEEDVRR

SEQ ID NO: 7263 - protein, 185 aa, Artificial Sequence; identical to SEQ ID NO: 7262
  Synthetic

SEQ ID NO: 7264 - protein, 185 aa, Artificial Sequence
  Synthetic
SDVEEIVRRAEKLVEDNDRVAEKIHEDNRRSNKRTLDEVRKILEEVRKLIKDLEDEVRRDRDKDRLRKKVKELKDEVERLLRELEDTVRRDKETSKDTARKLRKHSEDVEKTVRDLVTELARRSDDERVKRLLRRVEKSVRDSKRRSEKLLEDSERSSEKVEKDVRDVLKEAREIVRDVAEKVEK

SEQ ID NO: 7265 - protein, 185 aa, Artificial Sequence; identical to SEQ ID NO: 7264
  Synthetic

SEQ ID NO: 7266 - protein, 185 aa, Artificial Sequence
  Synthetic
EEVERIVEDVRRLLEENRELVKRILDEVRKLIKENNRLAREILETVRTELEKLRDLVRKLKSKEDLDRKVKELRRKVKELLDDLRRHSEDVRRRVKELLDRLRDSSRRLREEVRRLLDDLRRKSTSERVEKLLEELERRVEESVEESERVLREAEKIVRDSRKTTEELLEEAKRRVDEVAKEVKK

SEQ ID NO: 7267 - protein, 185 aa, Artificial Sequence; identical to SEQ ID NO: 7266
  Synthetic

SEQ ID NO: 7268 - protein, 185 aa, Artificial Sequence
  Synthetic
SSVDEILKDVRRSNKENLDLVEKILRESKKLVEENRRLVKEILDRVRKLIKELLRLVREDRDKDTLRKKAEDLERTVKKLLKELEDSSRDVIRRDKELVTRLKESSDRNLERVKKLAKELREESTSEKVEDVLRRLKRTSERSLEESKKLLEESEKDSDRSRKESEEVLREAEEIVKRVLKEVER

SEQ ID NO: 7269 - protein, 185 aa, Artificial Sequence; identical to SEQ ID NO: 7268
  Synthetic

SEQ ID NO: 7270 - protein, 185 aa, Artificial Sequence
  Synthetic
DDVETIVERVRELLEENNRLAREIVERVEKLLKDNDDLVKEILEEVDRRIRKLEEAVKRDRDKETLRKKVRELEERVKELAERLKKSSKELKDEVDRLLKELEDHSRDLERRVKELLDDLRRKSTDRRVEELLRKLEEDVKRSLEDTKRLLDELKKKVDESRKRSKDVLDKAREIVDRVRRSVEK

SEQ ID NO: 7271 - protein, 185 aa, Artificial Sequence; identical to SEQ ID NO: 7270
  Synthetic

SEQ ID NO: 7272 - protein, 185 aa, Artificial Sequence
  Synthetic
SEVEKIVRDVEESNKKTKKKVEDIEEEVKDLVRKNNELVKRILEEVKRLLEELKRVKKDDRDKDRLRKKVEELIRTVEELAKELEDHSRRVIETVRRLLERLRRTLEEDLKEVERLLDELRRRSDDERVKRLLDRLRRTSEEVLERVEEVLKKAEEIVRKSFEDSKRVLRKAEEDVKRVARDVEK

SEQ ID NO: 7273 - protein, 185 aa, Artificial Sequence; identical to SEQ ID NO: 7272
  Synthetic

SEQ ID NO: 7274 - protein, 173 aa, Artificial Sequence
  Synthetic
SVDEAAKEAEEIVETVERESRKLLEDSRRIVEEVKKRSEEILEEVRRRVEEVVKESKLKRLADELRKMVKKIKDDVERSNKKTEDDLRKSEEEVKRSNDTTREILKRIREVLKAGSPLERLLEALRRVIDEDRKRSKKLHEENKRVIERDKEISDKLLDDLRKLVADLRRRAK

SEQ ID NO: 7275 - protein, 173 aa, Artificial Sequence; identical to SEQ ID NO: 7274
  Synthetic

SEQ ID NO: 7276 - protein, 179 aa, Artificial Sequence
  Synthetic
REAEELEKEVKKVVDDSKKRLDELDEENRRVDETIKKISEDLTREVKDVIRRIRDGNLREDEVRKVVKEVTDKLEDSNRRVEELIRRTEKKLRDALERSKELSREVLEKARKLLEDKKDLEELRELVERLRRRLETVNRELERRVRELKRSNDESHRENREVIEELIKELKKVLDDVRK

SEQ ID NO: 7277 - protein, 179 aa, Artificial Sequence; identical to SEQ ID NO: 7276
  Synthetic

SEQ ID NO: 7278 - protein, 179 aa, Artificial Sequence
  Synthetic
DELREILRKVEKVVEDIERTSDKLRREVDKVVDDSRRKLEELEKEVKKVIEDIRDGNLREEEVREEVKRVVRKAEKLLEDSRRETEKVVRDAEESNKEVKRLIDEVKKELDRIIEEKDKVDRLKEAVKELAKRLKDVHERNKRLIDTLREKLKRINDELERSVRELKKELEEVIDRVRK

SEQ ID NO: 7279 - protein, 179 aa, Artificial Sequence; identical to SEQ ID NO: 7278
  Synthetic

SEQ ID NO: 7280 - protein, 179 aa, Artificial Sequence
  Synthetic
DEVEELKRRVDRLVEEIRKLSEELLKRNRDVDREIKKRVKDLEDKVRKVIRDIEEGNLRKEEVEKVVRDVKRELEELERRVRELVKRTIEEAERSNEEVKRIIDEVEKEADRLLEEKKEVRELDEVIKEIRRRLEKVHRDNRRVIDEVRRSNRDSERDIAEAVERLTRLLETVLEKVKT

SEQ ID NO: 7281 - protein, 179 aa, Artificial Sequence; identical to SEQ ID NO: 7280
  Synthetic

SEQ ID NO: 7282 - protein, 187 aa, Artificial Sequence
  Synthetic
DELEELRTTVTKLLEDLKKISDDLREEVRRLLEEVEEISKRLEETVRRIIKRVEDIVRRDGGRDERVVREVARILEDIERLLRESLKRSKEVLDEIEKLLRDSEKISRTILEKIERDLERLLRRKKDVKDVKEVVKKLRDELRRVLERNKEVIDRLREKAREVLEKDRKLVDDLREEAREVLERVKT

SEQ ID NO: 7283 - protein, 187 aa, Artificial Sequence; identical to SEQ ID NO: 7282
  Synthetic

SEQ ID NO: 7284 - protein, 187 aa, Artificial Sequence
  Synthetic
DELEEIKKEVEELVKTNERIVDKLREDNKRLVEEVKRISEELEREVRRIIREVREIVKRDGGRDKRVRDTVRKVLRDIEELLKRSLDISREVLERSAESLRRSLEISKEIADRIRKLLRKLLEDLKDVKDVEKLLRELEEEAKRSLKRNRDVIEKLREENKRLLDDDRRVVEELRKEAKDVLDEVEK

SEQ ID NO: 7285 - protein, 187 aa, Artificial Sequence; identical to SEQ ID NO: 7284
  Synthetic

SEQ ID NO: 7286 - protein, 187 aa, Artificial Sequence
  Synthetic
REVDELKKTAEKLIRDDERLVEEVLRTSKKLVREDEDMVRKLRKTIEDLIRRLTDVAREELKDKDELRKMVREVLERVKKLLEELRRHSKRILDEDRRLAEELRRHSDEIKDRVRKLVEDLLRRLDKVRDVKRVLDEVEKLVEDSKRETERVLRESEERSRRSLEETEKALKDLAKLAEDIKREVEK

SEQ ID NO: 7287 - protein, 187 aa, Artificial Sequence; identical to SEQ ID NO: 7286
  Synthetic

SEQ ID NO: 7288 - protein, 187 aa, Artificial Sequence
  Synthetic
REVDELRKRIEDLVRRDEEVARKVLEDVRRLVRRNREKARELLERVEKLVRDLKRVADRDLKDKETLKRMVDRVIEEVKRLVEELRRDSKRVIDEVERLVRELEDHSRRVKDEVEKLVRELLERFKDVEEVKRVLDELRKLVKDSERKTKEVVEKVREDVKDSLRRSEEVLKRVKELVDRVADEVRK

SEQ ID NO: 7289 - protein, 187 aa, Artificial Sequence; identical to SEQ ID NO: 7288
  Synthetic

SEQ ID NO: 7290 - protein, 187 aa, Artificial Sequence
  Synthetic
SDLEKLKERVDELIRRDDELVKRVLEESRRLVDRNKKKVDELRRRARKLIEDLKRVADRDLKDKRTLTEKAKEVEKTVDKLVKDLRRDSKKVKDDDEKLAEELRRHSKEILERVERLLEELLRRLDKVERVKELLDRLRKKVEDSREKTERVLKESRELSDRSLERSEEVLERVRREVREVVERLKK

SEQ ID NO: 7291 - protein, 187 aa, Artificial Sequence; identical to SEQ ID NO: 7290
  Synthetic

SEQ ID NO: 7292 - protein, 187 aa, Artificial Sequence
  Synthetic
DSLREVEKRIRELIRENEELVKEVLERSKRLVDEDRETAERLRKTVEELLKRLREVADKELQDKDTLREMVKKVIEDVRRLLEELRRHSEKILRDDKRLVDELRKHSEDVKREVDKLLKELLEELKDVDEVRKALEDLKRTVDESERRTEEVLKESEDLSRRSLKETEDLLRELEKRVKEVADRVED

SEQ ID NO: 7293 - protein, 187 aa, Artificial Sequence; identical to SEQ ID NO: 7292
  Synthetic

SEQ ID NO: 7294 - protein, 187 aa, Artificial Sequence
  Synthetic
SDLDEVRKEVKRLIDENRTLVDEIRRRIEKLIRENKKKVEELRKRAEELIRRLKEVADRDLKDKETLKRMVDRVLDEVRRLVEELREDSRDLERRVEELVRRLKDHSRELEREVRRLAKELLDRLDKVRDVKRLLDDLKRLVKESLDETERVLRELRKEVKDSLRDSERALREVEDLVRRIKKRVEK

SEQ ID NO: 7295 - protein, 187 aa, Artificial Sequence; identical to SEQ ID NO: 7294
  Synthetic

SEQ ID NO: 7296 - protein, 187 aa, Artificial Sequence
  Synthetic
DEVKKLEEDVRRLIEENEELVRRVKKTSDDLVKRNKEKVEELRKRVEDLIRRLREVERRDLKDKDELRRKAEEVLRRVKKLADDLKKDSRDVLETDRELVERLKRHSEDLKRRVEELLKDLLDKLKDVDEVRKALERLRDEVRRSVTDTDRVLKESEDRSRKSLEDSERVLRELEELVKRILDDLAR

SEQ ID NO: 7297 - protein, 187 aa, Artificial Sequence; identical to SEQ ID NO: 7296
  Synthetic

SEQ ID NO: 7298 - protein, 187 aa, Artificial Sequence
  Synthetic
SEVDRLRETIKRLLEENKELVERLRERVRKLIRENEKKVEELRDRAKKLIDRLREVRTRDLKDKDKLRKVIEEVERRVRKLVDDLRRDSDRLEEAVRRLLKELEDNSRELKKEVERLLRELKERKKDVRDVERALKELRDRIEESLRRSEEVLKELEERVKESRDESRRVLEEVRRLVEEIKRRAEK

SEQ ID NO: 7299 - protein, 187 aa, Artificial Sequence; identical to SEQ ID NO: 7298
  Synthetic

SEQ ID NO: 7300 - protein, 187 aa, Artificial Sequence
  Synthetic
KDVEDLEREIDRLLDEDRKVVEDLERKIKKLIDDNKRLVDKLREDVERLIRRLREVTEKELKDKDTLRKMVRDVKETVKRLLEELERNSREVLKTVKKLLDDLRRHSKRIKEEVEKRVRELLERLKDVKKVKEVLDELRKRVDRSLEEAEKALRRLEKLVRDSLRRSEEALERLKRLVDDVKKKVED

SEQ ID NO: 7301 - protein, 187 aa, Artificial Sequence; identical to SEQ ID NO: 7300
  Synthetic

SEQ ID NO: 7302 - protein, 187 aa, Artificial Sequence
  Synthetic
SELDEVKRRAKELVDRDKKLVKEVLDTSRELVRRNEELVRRILEEVRKLIEDLAEVTKRDLKDKDTLREMVKRVKEEVERVLRELERNSREVLKRDKKLADELREHSREVLERVERLVRDLLEKKKDSKEVKELLDEVRRLAEESRREVERVLRESEKRSRESLKKSEDALERAKKLVEDIKDEVER

SEQ ID NO: 7303 - protein, 187 aa, Artificial Sequence; identical to SEQ ID NO: 7302
  Synthetic

SEQ ID NO: 7304 - protein, 185 aa, Artificial Sequence
  Synthetic
SEEDKIREIVDRVLKESEKLIEEIERRVDKVLKRIKELTDEIKKRAEDVIREIEDIVRKERSERVEKRVKELEKELDEMAKESNERVRRLVEEVKKELREVLKDSRRLSKEVEETLKRLLEEKKEVDELRKVVEEIKRELEKIDKKLEEVVRRIEKKLEDILKENSKAVREIRELLKKVKRELEK

SEQ ID NO: 7305 - protein, 185 aa, Artificial Sequence; identical to SEQ ID NO: 7304
  Synthetic

SEQ ID NO: 7306 - protein, 186 aa, Artificial Sequence
  Synthetic
DEVEELKRRVEKLLEEIERLTKTHEDRSRRLIEDIRDSNRKLKEDAERLIKEIEELKRKVKDKETLTREVERLLRELEEKLKRDLKRVEDVLRDNERSVRESEKRSRELLERLKKLLEELKTKSKDSEELKKVVDDLRREAERILRRDEEAVKRSEKLLRDILEHVKRVVDEIREELKRILDRVRE

SEQ ID NO: 7307 - protein, 186 aa, Artificial Sequence; identical to SEQ ID NO: 7306
  Synthetic

SEQ ID NO: 7308 - protein, 186 aa, Artificial Sequence
  Synthetic
DEVREIEKRVRDLIREIEKSNRDLEREAKRLIDEIDDLSRKLKEDADKLIEEIKELKKKVKDKRELTDRVRKILEEVERLLRESIERSKEVLKELEKLLRDDLKKVEDVLRTVEKILKDLLRRDKDSEEVRRVVEKLRRLLKTITEHVKEVLDRLRREAEDALRRDKEVADRIREEARRILEDVKK

SEQ ID NO: 7309 - protein, 186 aa, Artificial Sequence; identical to SEQ ID NO: 7308
  Synthetic

SEQ ID NO: 7310 - protein, 186 aa, Artificial Sequence
  Synthetic
DDVKRIEKEVRRLLREIERLTREHEKESRELVREIEELSRRLEEEIKRLIEEIEELRKRVKDKEKLTRDVERIKRRVEKLLKESEDRSKRVLDENRKSARESIERSREVLEELKRLLEDLLRRDKDSKEVRDVVKRLEEEIREVLAKDEEVARRSVEALADILRRDKDVVDRIRKLLKEILDRVRK

SEQ ID NO: 7311 - protein, 186 aa, Artificial Sequence; identical to SEQ ID NO: 7310
  Synthetic

SEQ ID NO: 7312 - protein, 174 aa, Artificial Sequence
  Synthetic
DREEVVKEIKKRLEDLNRRVREVVKKIDRELEKLLEESKRVVDDLRRRLEELKKRIKGDDAKRKVEEIVKEVEKILKRVIDDNKRLVDELKRLLEEVIRRSETSVRRLEDVLRREIQDERELERLVKEVEKTNERLLDELRKAAEEVAKRSEDTLRELRDIIKKVEERATDIAR

SEQ ID NO: 7313 - protein, 174 aa, Artificial Sequence; identical to SEQ ID NO: 7312
  Synthetic

SEQ ID NO: 7314 - protein, 174 aa, Artificial Sequence
  Synthetic
SKEDVVREIEKTLKDLLDDSRRVVRESEERLKELNRRLREVVKESKRRLDEALRRITGDELKERVRKLVEDLRKINKESIERSEKSVEELRRHSRKVIRDNEKLVDDLRRVLRRDIQDTEELRRLVDKVREDSERTLERDRRLAKEVSDRNKRLVEENRKIVEEVLKTIEELRR

SEQ ID NO: 7315 - protein, 174 aa, Artificial Sequence; identical to SEQ ID NO: 7314
  Synthetic

SEQ ID NO: 7316 - protein, 174 aa, Artificial Sequence
  Synthetic
EREKVVKKIKEDLDRLNEEVKRVVDESRKLLKRLNERVEEVIREIRKTLEELTRRITGDRMKERAEEIVKRVDDILKKVNKDSERSVRELERHSREVIERSRESVRRLEEVLRREIQDERELERLVAEVAERNKKLLKDDKDLARKVAEDNEDLLRRLRDEVEKVRRTADEIRR

SEQ ID NO: 7317 - protein, 174 aa, Artificial Sequence; identical to SEQ ID NO: 7316
  Synthetic

SEQ ID NO: 7318 - protein, 174 aa, Artificial Sequence
  Synthetic
SREEVVDELRKRLEELNKEVREVVRESERKAERALEEVEEMVKRVREELEKLKRDIKGDEMRREVDEIVRKVEEDLERVIREVKKLIDDLRRHSEDVERRSKESVDRLKEVLERDIQNKDDLRRLLKEVAERNRKLLEDDEELAERVLREVRRLLEELRRRLKEIKERLDEIRR

SEQ ID NO: 7319 - protein, 174 aa, Artificial Sequence; identical to SEQ ID NO: 7318
  Synthetic

SEQ ID NO: 7320 - protein, 174 aa, Artificial Sequence
  Synthetic
SREEVVRRADKLLKDLNKRVKEVIERSERKLRELNERVRDVVRKIEKRLEELERRIKGDELKDRVRRIVEELERKLREVIKRSEDSVEELRRHSEEVNRRSRESVERVKEVLKRDIQDEEELKRVITKVLRDNEELLKTDEELAEDVARKNKKLLDDLEKTVKEVMDRAEELRR

SEQ ID NO: 7321 - protein, 174 aa, Artificial Sequence; identical to SEQ ID NO: 7320
  Synthetic

SEQ ID NO: 7322 - protein, 174 aa, Artificial Sequence
  Synthetic
SREEVVRDIERRLRELNKRVADVADESRRRLEELNEKLRRVVEESRRRLEELRKEIKGDEAKKEVERLVEELERINRESEERSKKSVEDLTRHSKKVNDDSRKSVRRLEEVLRREISDDDTLRREVKKVERENERLLEEDRRLVREVTRRNEKLVKDNREIVKEVLERAKELTR

SEQ ID NO: 7323 - protein, 174 aa, Artificial Sequence; identical to SEQ ID NO: 7322
  Synthetic

SEQ ID NO: 7324 - protein, 174 aa, Artificial Sequence
  Synthetic
SREEVVKEIKDRLKKLNDDVKRVIKESEDLLRKLNEEVRDVVRKIEETLEELLRRITGDRLAEEVKKIVEELTKRLRDVIRESEKSVEELKRHSEEVDRRSKKSVERVEEVLRREIQDEERLKEVVAKVAKENKDLLRRDEELARRVAERNKKLVEDLRRLVEEVRRRAEELRR

SEQ ID NO: 7325 - protein, 174 aa, Artificial Sequence; identical to SEQ ID NO: 7324
  Synthetic

SEQ ID NO: 7326 - protein, 175 aa, Artificial Sequence
  Synthetic
SESERVEELLKEVAKRVKEVSDRSKRLLEEIERRVKEVSDESEELLRRIIDEAKKVDRRREVIKEAADRARDVVRKSRELVRKVVEELRKLLEESRELVKKVMDELRKMIEDLKRTGVEERVVDRVRRELEKLIKDLEENSREVERSLRELIEHLKKNVEDVEREAKRVIDELKT

SEQ ID NO: 7327 - protein, 175 aa, Artificial Sequence; identical to SEQ ID NO: 7326
  Synthetic

SEQ ID NO: 7328 - protein, 178 aa, Artificial Sequence
  Synthetic
SLEEKLRRVLDELRKTIETLLKTNKDVLKKLEEDVKRIIRRNEEVLRDLERKVRDLKKKGGKEEEVRRLLRELRRINRESEKEIEELLRELRRLSEEHKRRVERLLEELERILSEVEPDERLKRVVDELRKRAKKLLEDVERVIRKSEEEARRLLREVEKVVRELDREAEKLVEEVRR

SEQ ID NO: 7329 - protein, 178 aa, Artificial Sequence; identical to SEQ ID NO: 7328
  Synthetic

SEQ ID NO: 7330 - protein, 178 aa, Artificial Sequence
  Synthetic
SSEETLRDILKKVEERSEETLRHNERVLEEVRKEVERILRRNEEVLRRLEKEAKELKKRGGEREKVERLLKELRRINEESRKEAERLVRELKRVSREHLEESKRLLEELDKVLKSLEPDERLKRVVDDLERRIRELLERDERVIRRTEEEARRLLDDVRRVVEELDKRAEDVVKEVKD

SEQ ID NO: 7331 - protein, 178 aa, Artificial Sequence; identical to SEQ ID NO: 7330
  Synthetic

SEQ ID NO: 7332 - protein, 178 aa, Artificial Sequence
  Synthetic
DEEETLKKILDDVRKVSRDTMEENKTFLEELSKVADKIIRDNEKVLDDHRKAAEELKKRGGREEDVKRLLDTNREINERSEREVERLAEELRKISEESLEKSARLLKKAEDVLRSLPPDERLKRVVDDIRRSLEELLKRDEEVVEESRKEVKRLEEEVREVVTRSDKLMDELLKKVKR

SEQ ID NO: 7333 - protein, 178 aa, Artificial Sequence; identical to SEQ ID NO: 7332
  Synthetic

SEQ ID NO: 7334 - protein, 175 aa, Artificial Sequence
  Synthetic
SEKEEVLREAREEAKDIERRLERLLERDKEVIDRVEKDLERLLRENKKLIDDVRRRVEEEGPDERLKKELRDSLRESAERVKDLLRRLEEHLRRTAEELRKLAEDLRESIKRLRERIGDDEVMDEIRRLAERVERRLREVLERSKKLVDDLRERLKEVLKRIEDLYRRLEEEADR

SEQ ID NO: 7335 - protein, 175 aa, Artificial Sequence; identical to SEQ ID NO: 7334
  Synthetic

SEQ ID NO: 7336 - protein, 185 aa, Artificial Sequence
  Synthetic
TAKEVLDEIRKVHEDLNRKIEEVLKHSEDVLREVEERNERSVRHSEDMLRRLEERIDRKGREEELRRELDKDLDRLRREHEEHHRRLKKTLDDLRKEHEELARKVKKVSEDAERKLDEVRRKLKDNEEVLRKLLEENKKEIRRLEEELKRLNEEVKKRIKELEDSSRKENDRVRERIRELDERVK

SEQ ID NO: 7337 - protein, 185 aa, Artificial Sequence; identical to SEQ ID NO: 7336
  Synthetic

SEQ ID NO: 7338 - protein, 185 aa, Artificial Sequence
  Synthetic
TLDEAARTIEELLREVEERARRVLRHSEKVLDKVRKENEDSLRHSDEVLRRVEREAEKKGIDESLLKRLKEVLKRLRDEHREHHEDLKRRLKELKDKHEKLLRDLKRVLDEIRERVKEVKRDLKDEEEVIEKTLRDVERRLRDLEDKLRKLNEEVEKTIRDLRRSSEALNKKVKDLIKKLLDEVK

SEQ ID NO: 7339 - protein, 185 aa, Artificial Sequence; identical to SEQ ID NO: 7338
  Synthetic

SEQ ID NO: 7340 - protein, 185 aa, Artificial Sequence
  Synthetic
TLDEVAKEIEELLRRVEEENRKSLEHSERVLDEVRERNERSARHSEEVLRRLREEVRRKGIEEDKLRELEKRLEELRDDHRKHHEDLKRTLDELRKRHEDHHRRLKEELDRIRDEIRKVRRDLKDNEKVIKETLDRVRETIKRLIKSSRDLNEEVKRRIRELIESSRKKNEDVKKTIEELLRRVK

SEQ ID NO: 7341 - protein, 185 aa, Artificial Sequence; identical to SEQ ID NO: 7340
  Synthetic

SEQ ID NO: 7342 - protein, 185 aa, Artificial Sequence
  Synthetic
TADEVLKEIEDVHRRVNTENRKSIEHSKKVLEEVRRTNEKSIEDIERLLREVEKRIRDKGTEEDLLRKLEKVLDEIRKRLEDHHRTLEEVLRRLEKEHEKHHRELEEVSKDAKKKLDRLRKDLKDDEDVLRKALEENERLIRELEESSRRLNERVKELIRELEKSSKRLLDEVKKLIDELREEVR

SEQ ID NO: 7343 - protein, 185 aa, Artificial Sequence; identical to SEQ ID NO: 7342
  Synthetic

SEQ ID NO: 7344 - protein, 185 aa, Artificial Sequence
  Synthetic
TLEEVVEEIRRRHEEVNRRNRESVENSREVLERVEEDNKDSLRRIRELLERVARKLDERGVDETLKRKLEETLERIERELRKHHEELKETIERLERKHEEHHRRLEKVSRDAEREIEKVKRDLKDDEDAIRDMLRRNEERLRRLIESSEKLNRESRDVIRKLIESSRDLLRKVKETIEKLEEEVR

SEQ ID NO: 7345 - protein, 185 aa, Artificial Sequence; identical to SEQ ID NO: 7344
  Synthetic

SEQ ID NO: 7346 - protein, 185 aa, Artificial Sequence
  Synthetic
TLEEVVRDIERVHEEVNESLKRVNETTTDMHRRLNEEAKRVLEEIEKLLKDVEKKIRDKGTEEDLLRKLKETLDRIRKKLEKLLRDLKRKSDEAKKEDEKLEEELRRRSEDVKRKLEEVRKKLKDDEDAVKRELDRNREEIKKLEKRIRDVLKKNKDLIDKVREELKRLLDEVKKRIDKLAEEVK

SEQ ID NO: 7347 - protein, 185 aa, Artificial Sequence; identical to SEQ ID NO: 7346
  Synthetic

SEQ ID NO: 7348 - protein, 184 aa, Artificial Sequence
  Synthetic
SLDEAAKEIEELLRRSHEELKRVVKEIRDLLRRSHEELRRALEEIERLLDEVRRKLEERNVSEKLKKELEEVVKKVRDDLKRIREENKDDIRRLEKKLDDLRRKNEELIKKLREDLRRLKEEPVDDETVKELLRRVRKLVRESIEEVKTLLREAEEKVRRNERKVEEILRRVRETIRRLEERIK

SEQ ID NO: 7349 - protein, 184 aa, Artificial Sequence; identical to SEQ ID NO: 7348
  Synthetic

SEQ ID NO: 7350 - protein, 184 aa, Artificial Sequence
  Synthetic
SLDEALERIRRMLKRSHDENRRVAEDIKRLLEESHRENERVVKEIRDVLDKLREDAERNNISEELRDRLRRVVEDVERKLRESTKKNKKLIDDLRKRLEESSKRNKERIDELEKRLEDIKRKPVDDEDVKRLLDDVRRTVEENIRRSETELRDVKRRVTETIRESERLLEEVKRIIDKLREEAK

SEQ ID NO: 7351 - protein, 184 aa, Artificial Sequence; identical to SEQ ID NO: 7350
  Synthetic

SEQ ID NO: 7352 - protein, 184 aa, Artificial Sequence
  Synthetic
GLDEVLKEIRELLKESHDRLRRVLEEIEKLLEDSHRRNEEVVRRIRKVLEEVREKAERDNISEELRKKLEKVVREVEKRLEESTRKNRKLIEDVRRELEELKRKNEKVLDDLEKDLKRAKDEPVDERLVKELLDRARDKIRRNIEELERKLRAVEEKVRRTIRESEELLDRVRKIIEDLEREAT

SEQ ID NO: 7353 - protein, 184 aa, Artificial Sequence; identical to SEQ ID NO: 7352
  Synthetic

SEQ ID NO: 7354 - protein, 184 aa, Artificial Sequence
  Synthetic
DLDEALKEIERLLEEVERRNKEVLERIRRLLKRSHEELKRVLEEIEKLLRDLKKRVDDGNVDDELRKRAEKVIREVEDKLRRIEEKNREMIKRLEDELRRSSEELKKEVKRLRDELKDIKDKPVDRDSVRDLLRRAKERLDELIKTSKELLDRARKKVKENEEELRELLKDVRRIIKKLTEEVR

SEQ ID NO: 7355 - protein, 184 aa, Artificial Sequence; identical to SEQ ID NO: 7354
  Synthetic

SEQ ID NO: 7356 - protein, 182 aa, Artificial Sequence
  Synthetic
SELEDLLREVKELIDRLIDDSRRLVKTAEELIREAIKRSEDLLEEVKRLIDRVTEMVERGELDEDRLRELERRIAELIKRSKELSDELRRRIEKIIEDSKRRTEEALERIRRKIEELKKKRDDERVREVLERIKRLLEELKKRDEDSVREIERLLEELKRRNDRVVDEIRKLLKELAERVKK

SEQ ID NO: 7357 - protein, 182 aa, Artificial Sequence; identical to SEQ ID NO: 7356
  Synthetic

SEQ ID NO: 7358 - protein, 184 aa, Artificial Sequence
  Synthetic
DLDEVIRELEKLLKESHEAVKRVIKKSEDLLRDSHKKVKDVIRRSEDLLRKLEEEVRKNGLTEIEKRLRERAKELRDDAKRLEEENRKIIEDLERHARDLERKNRRIIEEVRRLLKEIKDRNSDDRTLLEELRRRIEELLKENRELLKRHEDKSKKLLEDNERLLREHAKKSDEIRRELRERVR

SEQ ID NO: 7359 - protein, 184 aa, Artificial Sequence; identical to SEQ ID NO: 7358
  Synthetic

SEQ ID NO: 7360 - protein, 178 aa, Artificial Sequence
  Synthetic
DEVERAKDVLDELRRRVEEELRRWKETSERLREESERALEKSEARLREAAEKLERVKRNNVSEDELKKLIDELDRILKELRKEHKELVEKWKKTIDEVRETLKRLLDKLEEILEKLARDGVDEEVLRDIREKLRELAERLKRLLDDDKRVLDEVRKANEDLLRKIKEDIEELRKELEK

SEQ ID NO: 7361 - protein, 178 aa, Artificial Sequence; identical to SEQ ID NO: 7360
  Synthetic

SEQ ID NO: 7362 - protein, 178 aa, Artificial Sequence
  Synthetic
DEDEEVKRTIEELRKEVEKTLREIEKSLKESEDKSRKHLEEVKKSLKETEEEVDELKKRNVDKEDLDRVVKKMEDNLKRLEDTARKLVREMRENLKRIKKRLEELTERLERTLDELRRRGVDEKVLRELEERVRRLKKELKRVLDDYKRKLEEAERRNRKVLKEYEDSLRELADRLRR

SEQ ID NO: 7363 - protein, 178 aa, Artificial Sequence; identical to SEQ ID NO: 7362
  Synthetic

SEQ ID NO: 7364 - protein, 178 aa, Artificial Sequence
  Synthetic
DEDREVRKTIEKLKRDSERHLEEMKRSAEESRKEVDKLLKKIKDSLRRTEERVRRLKKNNVSEEEVERLVREARENLERLREELERLERELRANLERLRKTAEDLTRRIRETLKELEDRGVPEEVLRELRKIVEELRKRNEDVLEEYERILRELKERLDRVLKEYEDRLRELEKELRD

SEQ ID NO: 7365 - protein, 178 aa, Artificial Sequence; identical to SEQ ID NO: 7364
  Synthetic

SEQ ID NO: 7366 - protein, 178 aa, Artificial Sequence
  Synthetic
SEAEKAKETIDRLADRVRKLLEEIKRSLDDSRRKSKETVEENEKTLDRMRKEVDAAKERRVSEEELERLIRKLKKTLDELRRRHEKLVEDLRRNLERIKRRLEELTREMRETLERLAREGLDEEVLRTLEEIIRRLTKELEDVLREYERELRRLEEENKRVIDKTEEEIRRLADRLRR

SEQ ID NO: 7367 - protein, 178 aa, Artificial Sequence; identical to SEQ ID NO: 7366
  Synthetic

SEQ ID NO: 7368 - protein, 178 aa, Artificial Sequence
  Synthetic
EEDERADETLKRIKRESDETVKKNERTITELLKRVKRLVDEIRKSLEETARRVDSAKKRNVSEDELRKLVKELEDNLRRIAEELRRLEEELRRILEKLAEDHKRLIDKIRKILKDLADRGVSEEVLRKFRKILEEAAELNKEVIDRSRKIIEDASRLLREVLEDYETKLRELKDKLDT

SEQ ID NO: 7369 - protein, 178 aa, Artificial Sequence; identical to SEQ ID NO: 7368
  Synthetic

SEQ ID NO: 7370 - protein, 172 aa, Artificial Sequence
  Synthetic
SLKEVIDDLERIIRELEKRNREVIKRVRKIVREAEEKNEDVIRKLKETIERLERELDDEDLLRELREKLRRLVEHVKKVIEDLREEIRRLEKHVEDEIKKSKDRLDELTKRLKDLDSRELRDEIRKIKKKNDEHLKRLEDELRKLLEKSDRHVKELEDRIRKAAKEVKDAKD

SEQ ID NO: 7371 - protein, 172 aa, Artificial Sequence; identical to SEQ ID NO: 7370
  Synthetic

SEQ ID NO: 7372 - protein, 172 aa, Artificial Sequence
  Synthetic
SLEDVIRDLARIIEEAERRNKTVLDELRKTIKELVEENEKVLDEDDKKSRELEKRLDKEELLDRLRKENKKLKDHVRKKNEEAKKRLKELEDHVRRVIEELKRELDKLRREAKDLGSRRLREEIKRLLRESEKHVEDLRREIERIKRENEEHLKKWRRDSERLEKEVEDAKR

SEQ ID NO: 7373 - protein, 172 aa, Artificial Sequence; identical to SEQ ID NO: 7372
  Synthetic

SEQ ID NO: 7374 - protein, 181 aa, Artificial Sequence
  Synthetic
DELEKLRDDARRIEEKHRRTVEKDKDVVRRMDKEVKDHVRRLKELAKKLEDDVRKRGDEKVIKELEEKLKRIHEESEKTKRKLKEDADRLEEDNERVKKESEDKLRELRERARKVKEDGIDKRSVDEVLREITEIVERVMELNDKSVEETRRIVERLKEEIDTVNDEIAKIVRKVIEEIKR

SEQ ID NO: 7375 - protein, 181 aa, Artificial Sequence; identical to SEQ ID NO: 7374
  Synthetic

SEQ ID NO: 7376 - protein, 181 aa, Artificial Sequence
  Synthetic
DELERLKEAAKRLADEVKEHVDRSRENAKRLKEEVEEHVKRLEDVARTMDEEVKRRGDDRVVKRLREILKKLHEESERTIRRMRRNLEENHRRTEESKKRLRDKLEELKRRLEKFKEDGVDKESVDRVLKEIEDIVRRLEERLDESNKELKEIVDDVTEKLERVNRKIAEIVKRLSDEIRK

SEQ ID NO: 7377 - protein, 181 aa, Artificial Sequence; identical to SEQ ID NO: 7376
  Synthetic

SEQ ID NO: 7378 - protein, 181 aa, Artificial Sequence
  Synthetic
DELEELRRAAEEMEKEVREHVKRSEKNAKDLEKEVREHVKKLREVLRRLTEKVKRRGDERVIEDIRRTLKELKDESDETEERMRRNLEENHRRTEESKRRLEEKLERLARKVEEVKRKGIDKEKVDRVLEEITREVERLKKELDESNERLERIVRKVIEELRKVDEDAEERVRRLEEEIRR

SEQ ID NO: 7379 - protein, 181 aa, Artificial Sequence; identical to SEQ ID NO: 7378
  Synthetic

SEQ ID NO: 7380 - protein, 181 aa, Artificial Sequence
  Synthetic
DDLDRLREAAERMAREVEDHVRKLKDLIRRVRERVERHVKKLEDDLKRVKEEVDRRGDKKVVDKLRRDLERLRRETEKSKRELEEDLKRAKDESRKTLTRLRDALERLREEVKRVEDKGIDKDKVRKVLEDIKRIVDRLEERIREVDKDLERIVRELMKRLDEVNKRLEDTVRRLSEEIRR

SEQ ID NO: 7381 - protein, 181 aa, Artificial Sequence; identical to SEQ ID NO: 7380
  Synthetic

SEQ ID NO: 7382 - protein, 185 aa, Artificial Sequence
  Synthetic
DLIEEIKKLAEDHHRRVKEVLDRNREVAERLKKRVRRIVEENKRLAEDVTRKIKELKRRVKDRDELRRRVEEIERRLKKHIDDSNRRITELKEEVERHLERSERELEKSKRDLERKLREVEKRKRTEDLRRVLEELREIVTRNEKEIRDTIRELEEIVKRLKEDNDRSVRELERILEELREELER

SEQ ID NO: 7383 - protein, 185 aa, Artificial Sequence; identical to SEQ ID NO: 7382
  Synthetic

SEQ ID NO: 7384 - protein, 175 aa, Artificial Sequence
  Synthetic
DSDEEVRRVLEKVEEDVRRLAKDIRDSVRRSEERIDELVKKLEKSIDESRRRVETTADNVEELKKIIKDSKEELKKVVKTVRKVLEDSKRELEKVLEDVKRTIKDLKDEVRKMREEGRVDERLLEEIEKVVEDLRRKAEELIEKNERLLRRLEEVAKELDKRNKELLEELIRRNE

SEQ ID NO: 7385 - protein, 175 aa, Artificial Sequence; identical to SEQ ID NO: 7384
  Synthetic

SEQ ID NO: 7386 - protein, 175 aa, Artificial Sequence
  Synthetic
SEADKVREVLKRVKEEIDRLVEEIEKVNRDSRREVEKLVEKLRKSLKESKDRIARDLDRVDEVRKILKDSKERLEKVIREVRKAIKDTHEELRKRVEDVERELKRLVEEVEDMIRRGNVDEELLRKIEEVLRRLTEDAKRLIRRNREILKELRELAKRLDEENKELLDELIKKAR

SEQ ID NO: 7387 - protein, 175 aa, Artificial Sequence; identical to SEQ ID NO: 7386
  Synthetic

SEQ ID NO: 7388 - protein, 182 aa, Artificial Sequence
  Synthetic
SMIEKVREVLKEVADRVRRLLEENKKSIDDSARALEELIKRIRESLRKSEEDLKREVRGEEERRKVRRLLEESKRKIDEDEKRVEKRLRDSEKSSRDLAEDLRRVLEDIERKIEEVAKRLKDDSEFVKRILDEVDEILKRLERRVKEHSRKNREELEKIRKEAEEILRENEELLEKIVRDAR

SEQ ID NO: 7389 - protein, 182 aa, Artificial Sequence; identical to SEQ ID NO: 7388
  Synthetic

SEQ ID NO: 7390 - protein, 182 aa, Artificial Sequence
  Synthetic
EMVERLEESIDRSRKELDRLIEENKKVLEEVEERVRRLIEKLKRSIEESEERLRRKVRGEELAREVKKLLDDSRRRLEELKERAERVLRELKKSSEDLARDVKRLLKESREKLEELARKLKDNDEVVRRLNEENKKLLEDIRRRAKDHSRRVREILEDLEREVEKMNEENKDLLERIVRRAK

SEQ ID NO: 7391 - protein, 182 aa, Artificial Sequence; identical to SEQ ID NO: 7390
  Synthetic

SEQ ID NO: 7392 - protein, 182 aa, Artificial Sequence
  Synthetic
SMIEALKENIRRSEEEIRRLIEEWRKVSEDIEREVKKLIKELEESIDESAKRLREKVRGEEELTRVEKLLRDSEEELKRLAEELEEVLKRNKDKVKEEVERARKLLDDSRRKLEKAERDLKDDSDFVRKLLEENNELLKEIKKRVEKVLEESKELLKELREKIRRLNEKNKKLLEEIVRRAK

SEQ ID NO: 7393 - protein, 182 aa, Artificial Sequence; identical to SEQ ID NO: 7392
  Synthetic

SEQ ID NO: 7394 - protein, 178 aa, Artificial Sequence
  Synthetic
SEIEKVVKDLRERLKELRESVKRLDDKNRELLERLEREVEEMDRRNEKLLRDLKRQDRDEKDLRRVIEKSKEDLRRLEEKLKEVIKRSEEELEEHVKRTRDVIERLKRRVEKLARDLDKEELLRTLEKVLREIAEELERLNRKVRESIRESARRLKRLIEKLERSIRRSAEELRKRAK

SEQ ID NO: 7395 - protein, 178 aa, Artificial Sequence; identical to SEQ ID NO: 7394
  Synthetic

SEQ ID NO: 7396 - protein, 178 aa, Artificial Sequence
  Synthetic
DEIDKIVKKLRDILREIEKRAKEVNKRNKELLDELRERVKDLDRTNEELLRELKDSDRDKKDMERVIRESEDRLRKLEEELRRVIERSERELRRLEKEARDVIEEMERDVRRIAKDLDSDKLLKKLKDVLDEIAERIKELIRELRESIKKSAEELKRLIDRVRRSIEESAKRLEDRAR

SEQ ID NO: 7397 - protein, 178 aa, Artificial Sequence; identical to SEQ ID NO: 7396
  Synthetic

SEQ ID NO: 7398 - protein, 178 aa, Artificial Sequence
  Synthetic
SELEKILEKLRRIVEELAKSVRKLNEENKELLKRLADSVKKLDDDNKRLLTDLRRRDNDEKDAKRVIDKSRDDLRKHVERSREVIEDSKRKADKHVEDTKRVIETLKREVDEIARELDSEELLRTLEDVLRKIAEDLERMNRELKRSIKKSADDLKRLNEKVKRSIERSAEELRKRRT

SEQ ID NO: 7399 - protein, 178 aa, Artificial Sequence; identical to SEQ ID NO: 7398
  Synthetic

SEQ ID NO: 7400 - protein, 178 aa, Artificial Sequence
  Synthetic
DEIKKIVEEIKKTLEEIDKSVRELIRRAREILRELEESVRELIRRNSKLLEDLRRQDRDEKDARRVIEESRRELEEHRKRSEDVIRKLREEVEKHVRETEEEIKRIEDEIRRLKEKLDKDELLKELEDVLKEVAEEIKRLNERLKKVLEEIERTLRELNRRLEENIRRSARALEETRR

SEQ ID NO: 7401 - protein, 178 aa, Artificial Sequence; identical to SEQ ID NO: 7400
  Synthetic

SEQ ID NO: 7402 - protein, 178 aa, Artificial Sequence
  Synthetic
SEVEDLLRRIEKILEDLRRSVEELLKRIEDALRRLEEEIRKVTEESKRLLEDLTRRDTDEREAREMIKENEKKLRDLEKKLRELIKRLKEEVDKHVKDTRDVLTRIREEVRKMAEKLDKRELIEEVEKVVKRVEEALKRLNDRVRETLDEVRKRLEDAIRRWREESERIARELEKRTT

SEQ ID NO: 7403 - protein, 178 aa, Artificial Sequence; identical to SEQ ID NO: 7402
  Synthetic

SEQ ID NO: 7404 - protein, 178 aa, Artificial Sequence
  Synthetic
SEADEIVRRIEELLKELEREIRKVIRDSERLLKELEDSVRELLKKIRDVLDELTKSDRDEKEARDVIRKLAKEVEDHLRRSKEVIDRNRKKLEDAEEKLKELIERIKREIDEIKRRLDSEELLRKLEAVLDKVKKDLKKMIDDWRRVSERIARELEKLNRRVKEELDRVKEALDERTR

SEQ ID NO: 7405 - protein, 178 aa, Artificial Sequence; identical to SEQ ID NO: 7404
  Synthetic

SEQ ID NO: 7406 - protein, 178 aa, Artificial Sequence
  Synthetic
SEIDEVVERIKRTLEEAEKRVKKASEDHKRRLDELRKKVEKLIEDNERTLEAVARRKIDEELLKELEKESEDRLRKLKRDAEEVTREMKKTSDELAEELKRLKDEIRKELERLEREGIEERLLRKLRKVVKDVDDRLKELLEENRDVVRRIKEELEKLLEKVRRSIEESRRRMRETRR

SEQ ID NO: 7407 - protein, 178 aa, Artificial Sequence; identical to SEQ ID NO: 7406
  Synthetic

SEQ ID NO: 7408 - protein, 178 aa, Artificial Sequence
  Synthetic
SEVDEVLKDIRRILEEARKRVEELDRENKRILDEVREKVKELNERNKEILRAAEERKIDDDLLRKLVEDSRRLLKELEEELRRLTERSKKLLKELAEEMDRLVKEIEDKLRKLREDGIDEKLLRDAKRVVEEVSKALKDLLKEVEDSVRRSKREMEKLLEELRESVKRSEEELRRTSK

SEQ ID NO: 7409 - protein, 178 aa, Artificial Sequence; identical to SEQ ID NO: 7408
  Synthetic

SEQ ID NO: 7410 - protein, 182 aa, Artificial Sequence
  Synthetic
DEVEDLLRRNEELLKRLLEEIKKLTDEHREELKRLAEDVKKVVEDVRRLLKELEEMVRRGELDEKTLDEARRRLEKLLKELKEKIDRVKEEMEKSNRKLEKKIRDAKRTTEEILKRLKDKGVDEKLVRKLEESVRRSTEELEKALKRNNDVIRRIAEALDDLLRRLEKVIREIEKKLRDDTR

SEQ ID NO: 7411 - protein, 182 aa, Artificial Sequence; identical to SEQ ID NO: 7410
  Synthetic

SEQ ID NO: 7412 - protein, 182 aa, Artificial Sequence
  Synthetic
DRVEEAVKDIERLLRELKRDVERLVRENEKILKDAKREVDELTKDHRRKVEELDEMVKRGELDKDTVDRVKKEMKETNEDLSRKATEIKKRSEDILRRLEEKIREVRKRLEKLLEELRREGVSEDLLRKLEKVVRDVEKKLRKLLEDLKRSIDRSTRELEKLNEKNNEVIRDIERRLDEAET

SEQ ID NO: 7413 - protein, 182 aa, Artificial Sequence; identical to SEQ ID NO: 7412
  Synthetic

SEQ ID NO: 7414 - protein, 178 aa, Artificial Sequence
  Synthetic
SEIEKLIEEIRRVVKEIKREVERAIRENEKLLRESKRRNDELIKEIERVVEELKKRNVPEEDVRKVLADLEKKLEELHREDRKLIKESEELLKRLMEEAEKILEELKRRLDELIRRRGRDRLIEELEKVLRDVEKVARDVLRKLRRSIEESRRRSEELNKTVKKVLEDVARTATERSR

SEQ ID NO: 7415 - protein, 178 aa, Artificial Sequence; identical to SEQ ID NO: 7414
  Synthetic

SEQ ID NO: 7416 - protein, 178 aa, Artificial Sequence
  Synthetic
REIEEAIKDVERVLRESEERNRRLIERIKRMLKKSEDENRKFIEDNKRLADDLRRRNVPEEDVRRTIERSRRELEKLVKRDEDLLKRLEEELRKLHEDDRRLLEELERKVEDIIRKRGRTEDVERLRKVIEEVKRRMKELNERLKEELREVAKRSRDLNKELRESIEESADRARRRRK

SEQ ID NO: 7417 - protein, 178 aa, Artificial Sequence; identical to SEQ ID NO: 7416
  Synthetic

SEQ ID NO: 7418 - protein, 178 aa, Artificial Sequence
  Synthetic
DEIERLREDIKRVLEESTRRNKKLLDEIRKALDESRRKNEEAIRRNEEVVRDLKDRKVPDKKVKEVIDRNRRMLEELVRDDKDLLKRLEERVRELHETDRKLIKDLRELLRRIIEKRGETDKVRTLRRELEEVARALEELNRRVEEELDEVRKESERLNKELEDSIRKSAEDAKRTTK

SEQ ID NO: 7419 - protein, 178 aa, Artificial Sequence; identical to SEQ ID NO: 7418
  Synthetic

SEQ ID NO: 7420 - protein, 174 aa, Artificial Sequence
  Synthetic
DEKDKAIEDVRDLLRRNEEVARRMDKRLKDLLDTIRKKAEDLDRELKRLLEEAERLVREGTTEELVKKLKKELDDSRRRLEKLIEELRKRLRDSIRELEEHLKRSEEELRRLLEEVKDVKELEKVLEEIRRRSEELLKHHAEVIERIERDVERLRRHHEDTIRKIKEKVDRDRK

SEQ ID NO: 7421 - protein, 174 aa, Artificial Sequence; identical to SEQ ID NO: 7420
  Synthetic

SEQ ID NO: 7422 - protein, 174 aa, Artificial Sequence
  Synthetic
DEDREAIKEVEKLLRDNERVARRLDEEVKELLDEMRRRSEEMDRELERLLEEAKRLADKGTREELVKELEKRLDESHDRHRKLVEELEERLERSIEELRKHLDDSRRRLKELEDRVDKVEELKEVLREVDKRSKELLKHHKRRIEEVRKRVRELNKHHEDVIRKIKKKVREDRK

SEQ ID NO: 7423 - protein, 174 aa, Artificial Sequence; identical to SEQ ID NO: 7422
  Synthetic

SEQ ID NO: 7424 - protein, 174 aa, Artificial Sequence
  Synthetic
KEAEEAIKRVEDLLRRNKEVAERIIREIRRLLREADETSKRMDEDLRRLLREAEDLVRRGTTEEVLEELKERLKESHKEHKKKVDELIERLRKLLEDLERHIRKSDRDLDRLREEVKDVRELDKVLERVKRESDRLLKEIEKVVREVEERLRRLNEHHEKVIREIEKKLEDDRR

SEQ ID NO: 7425 - protein, 174 aa, Artificial Sequence; identical to SEQ ID NO: 7424
  Synthetic

SEQ ID NO: 7426 - protein, 174 aa, Artificial Sequence
  Synthetic
DEDREAIERVRRLLDENRKVVEELDERLKELLRDAEEKSRRVIKTLRELLKEIEDLARRGTDREVAEKLRRALEELHRRHREMVKELKERLERSIKRLEEHIRKSKEDLDDLRRKVDKVDELRKVLEDVERASKELLDHHRDVIRRIEEELKRLNKELEKVIREIERAVEELER

SEQ ID NO: 7427 - protein, 174 aa, Artificial Sequence; identical to SEQ ID NO: 7426
  Synthetic

SEQ ID NO: 7428 - protein, 174 aa, Artificial Sequence
  Synthetic
DEDRDAIRKVEDLLRRIEEIVRRLIEEVKRLLEDNRRKSKRFIERVDELLKEMEKLVREGTDAEMVRELKDRLRRLHEEHADHVRDSARRLDELLRELERKIKELEDRLRDLEEKVKDVKELEELLRRVEREVEKLLTDLRRLLREVKETSKRLNEELKRRADEVEKKADEDRK

SEQ ID NO: 7429 - protein, 174 aa, Artificial Sequence; identical to SEQ ID NO: 7428
  Synthetic

SEQ ID NO: 7430 - protein, 181 aa, Artificial Sequence
  Synthetic
SSKDRIRKVLEEVRETLDRLAKRIEKSLRDSAKRVEDLAEENRTSLKETKERIDELIKRRKDRDRAEEVKKRLDESRRHVEEDEKRVREDLRRSADEARRVLDELRKTLEKLRKEVEDVIREGKLGEELIRRIEEELKRIEDTVEKIIRKDEKLLEDIERESERHIREDKELLKELEKEER

SEQ ID NO: 7431 - protein, 181 aa, Artificial Sequence; identical to SEQ ID NO: 7430
  Synthetic

SEQ ID NO: 7432 - protein, 181 aa, Artificial Sequence
  Synthetic
SSDKEIEDVLRKVKDELDKLARALDESLKRSEKDIDRLEEELKESHDRTREEIRKLIEERNVDKLAEDMKRKLKESLKEAREVVDEVRKRLERSRREIEKMIKKLEEDLRTLERKVREVIKRGRLGDELIREIKKVLDRIREEIERLLREDEELLERLREDAKRILDKNKELLDELRRRVK

SEQ ID NO: 7433 - protein, 181 aa, Artificial Sequence; identical to SEQ ID NO: 7432
  Synthetic

SEQ ID NO: 7434 - protein, 181 aa, Artificial Sequence
  Synthetic
SADRKLEEVLKKVEDDIRDLERRLKRSLDESKREVERLERENRRVLEEVEKKVRADNVDEERLREIKRVVDEAKESLRELVRRMRKVLEDSTREIEELRRRLREVLKEIRKEVKEMRDRGESEETVKRIIEKIERILRKLKRDAERILDKDRKLLKKLEEESRKHIEDVKRLLEELERRTR

SEQ ID NO: 7435 - protein, 181 aa, Artificial Sequence; identical to SEQ ID NO: 7434
  Synthetic

SEQ ID NO: 7436 - protein, 181 aa, Artificial Sequence
  Synthetic
ELEEKLKRSLEDSRRRVEELRRTNEEVLREVEEEIRRLIKENEDSLRESKKRVDDRNVEREKLEKAKKVLEDSERSLRKLAKEARDVLREMRETLRKLEEKMERVLRESEKEIRRVATRGESKETVDKILEDDKELLRRLEEESKRHIDEVRKILEDLERRSRRHIEEDKKLITELEKETK

SEQ ID NO: 7437 - protein, 181 aa, Artificial Sequence; identical to SEQ ID NO: 7436
  Synthetic

SEQ ID NO: 7438 - protein, 181 aa, Artificial Sequence
  Synthetic
DLDERLRRSLKRSKEEVERLRKENEEVLRRSKETTKELIKTNEKVLEDVERLVRESNVDEERLRKAKEVLDRLRESLKKLAEESRRLNKRLEETLRKLVRDMEEVLRRSEEKIKEVDTRGESRETVEKIIKEDEDLLRKLKEESDRHIKDVERVARENERESKRHIEEVRKVLDELREETR

SEQ ID NO: 7439 - protein, 181 aa, Artificial Sequence; identical to SEQ ID NO: 7438
  Synthetic

SEQ ID NO: 7440 - protein, 181 aa, Artificial Sequence
  Synthetic
SAEEKLEEVLKRVAERIEELIRRNRRVLDRVREEIKRLVEENRKSLDESERRVRERNVSREKLERAKELLDRSKDSLRRLEEELRERLKDLERTLKELEERAKRKLEEIKKEVKDVADRGESEETIERIIKKIEDILRKLEEESERHIRRVEEELKEMEKRSREHIEEDKRLLEELERRTK

SEQ ID NO: 7441 - protein, 181 aa, Artificial Sequence; identical to SEQ ID NO: 7440
  Synthetic

SEQ ID NO: 7442 - protein, 181 aa, Artificial Sequence
  Synthetic
SAEDELRKVLEKVREDIDRLADENRKVLKRSKDETKRLIKENREVLERVEEIIRRDNVDRKDLEEARRVLEEARRSLEELVERSKRLNDRLEETLRELIKEAKRVLEEAEREVREVATRGESEEAIERIIRRIREILERLRKKSEEHIRRVEDVARRNEEESREHIKTVEKILEELKRKAD

SEQ ID NO: 7443 - protein, 181 aa, Artificial Sequence; identical to SEQ ID NO: 7442
  Synthetic

SEQ ID NO: 7444 - protein, 179 aa, Artificial Sequence
  Synthetic
SEVEELIKRLKKVLKELVDKVRKVIEDTKELLERLKRRSEDHIRKLREVLKEAKDQPIDDEELKEILDRLRKTLEELEEELKKALEDDREEAKRLVDDARRVLKELEEEVREIRERRKEVEELDRRIEKVLKEIEEKIREVIKEWERVHREVNELLKRLIDENRKVLDEIRKLLEEKSK

SEQ ID NO: 7445 - protein, 179 aa, Artificial Sequence; identical to SEQ ID NO: 7444
  Synthetic

SEQ ID NO: 7446 - protein, 179 aa, Artificial Sequence
  Synthetic
SEAEDLIRRLKEVLDELKKKADDLIRDTKRLLDEIRKKSEDHIKRDKELLKDLKRRDTRKDEAKRVLEESERTLRELERDLERLLEKDRRDMEEMVKELRRVLEELRREVERLKEERKEVDRALREIEKVLKEIKELIEKVIRDWKRVHDEVNEELRRLIEKNRKSLKETADELDRKRK

SEQ ID NO: 7447 - protein, 179 aa, Artificial Sequence; identical to SEQ ID NO: 7446
  Synthetic

SEQ ID NO: 7448 - protein, 179 aa, Artificial Sequence
  Synthetic
SEVEKLIKEDKELLERLKRDVERLIEELRRTLKELKKESEKHIEDDKRLLDDLRDRDTDDKVAKDALRRSKETLEELVEKLKRVLDELRKKVKELMDRARRVLEESRKRVEELKERRKEMDKLITDIRRSLDETRRRIEKLIREIEKVLREIEETLRELEKRNRESLERTRETLERKSK

SEQ ID NO: 7449 - protein, 179 aa, Artificial Sequence; identical to SEQ ID NO: 7448
  Synthetic

SEQ ID NO: 7450 - protein, 183 aa, Artificial Sequence
  Synthetic
SEVDELIERDKKLLRDVERDVRRLNKEVRDILDEIRKDVEDALKENKELLDRLREMVKRGEADERTAEELRKTSEDLLRELEKRAREIEERLRRTLEELAKRLERVIRESRKLLEDLRRRRREMREVLKRLEDSSKDTTDKLRELLRSHKKVIDEVREKLKELLDRYRKVSDEIREEIDRARK

SEQ ID NO: 7451 - protein, 183 aa, Artificial Sequence; identical to SEQ ID NO: 7450
  Synthetic

SEQ ID NO: 7452 - protein, 183 aa, Artificial Sequence
  Synthetic
SEVEKLIEDDRKLLEDAEEEVRRNNREIERILDKAREDVKRIIKEIEDLLREADEAAKRGEVDEDVVREVAKRIRDLLEELRRRAEEIKRRLDRSHEELRRALEEVDKRSKELLDDLRRRKKDAEEAKRRIKKSIDDSRRELKRLLESNRKVIEEVKKTLEELIRTLEEVVRRVEDRLKKLAD

SEQ ID NO: 7453 - protein, 183 aa, Artificial Sequence; identical to SEQ ID NO: 7452
  Synthetic

SEQ ID NO: 7454 - protein, 185 aa, Artificial Sequence
  Synthetic
DSVEELLKRLRDLLEESKRRAERLIREIERLLRESEKRVRELNRRLEELLREAEDRVRKEGPTERLEELVEELKRRLKRSSDELKKHLDESRKRLKEIIEEVERHIERSVREMRRILEELRKEGAPEDALRKLEKVIREIEREHRRLLEEIRRVLKEVDKRHDEVRKSHEDVIRRIEERLERLKK

SEQ ID NO: 7455 - protein, 185 aa, Artificial Sequence; identical to SEQ ID NO: 7454
  Synthetic

SEQ ID NO: 7456 - protein, 185 aa, Artificial Sequence
  Synthetic
DSVERLIEEIRRLLKRSEEIARKLIRDAEKLLEEHRRRVEELNREIERKLEELDEKARRRGPTEELKDTVRKLREDLDRSLEDLRRHSERLKEELDRLLKELEEHIERSKKRLDEIEEEVRKEGVPREALEKIRKVIKEVKDTHRDLLRRVRDVIRRIREASKETERSHREVIERVRKRLDELTK

SEQ ID NO: 7457 - protein, 185 aa, Artificial Sequence; identical to SEQ ID NO: 7456
  Synthetic

SEQ ID NO: 7458 - protein, 185 aa, Artificial Sequence
  Synthetic
KSVDDIIREIRKLLEDHKRRVDELLERLKKLLEDHRRTVDKLIKDLERLLEELARRVKREGPTERVRKLVKEAEDRMRELTKRLEEHSKKLKDDLRRILEDLRKHSDDLRRRLEKLLREVEEEGVPREALERIREEVRRVEEASERTLRELEKVVRRIERESEKLKRELEKVVEDAKRTLEKLIE

SEQ ID NO: 7459 - protein, 185 aa, Artificial Sequence; identical to SEQ ID NO: 7458
  Synthetic

SEQ ID NO: 7460 - protein, 185 aa, Artificial Sequence
  Synthetic
SSIEKLLEELKELAKRHEDEVKKLIRELEDLARKHKERSEKLNEEIKKLLKELADRVRERGTTEEVEEMIKEVRERLERSHDDHRRHSERLERELRRLLKELREHSDRLRRELERILKEVDEEGADERVRRRLRKVVEEIKERSDRTIREMEKVIREIKEESRRLNKSHEEVIRDVKRRADELRK

SEQ ID NO: 7461 - protein, 185 aa, Artificial Sequence; identical to SEQ ID NO: 7460
  Synthetic

SEQ ID NO: 7462 - protein, 185 aa, Artificial Sequence
  Synthetic
SEVEDLLRDLERLLEEHRERVERLIKRLRELLERHKRTVEKLNRDVKEKLRKLKKEAEDKGPTEELEELVKRVEEDLRRSLKELREHSERLKRELKELLDRLRDHSRELEERLRRILKKLEEDGAPEEALRRLKRVVEEIKRRSDRLIEKAEEVIRDIEEKSEETLKSHREVLERVKKILTDLRK

SEQ ID NO: 7463 - protein, 185 aa, Artificial Sequence; identical to SEQ ID NO: 7462
  Synthetic

SEQ ID NO: 7464 - protein, 185 aa, Artificial Sequence
  Synthetic
DEIDRLLEDLRRLLEEAERRVTEIIKRIKKLLEEHERRVRELNKDLRRLLEEAEDVVRRKGPTEELEDLARKLKETLEESLRRLEEHSRRLEKELRDLIDELRKLIKEVKDRLEEILREVEKRGVPEKARRDLERVVTEIDRELKRLEEDIRRVLEEVKRRSEDLRRSHRRVIEDIKRRLEELRR

SEQ ID NO: 7465 - protein, 185 aa, Artificial Sequence; identical to SEQ ID NO: 7464
  Synthetic

SEQ ID NO: 7466 - protein, 185 aa, Artificial Sequence
  Synthetic
KEVEDIIREIRKLLEDHERKVKELIDEIRRLLEEHERTVRDLNRRIKKLLEEAKEFADRKGPTEEADKLIKELTERLKKSLEDLKRHSDELKKTLEEILERVREDSERLEKRLREIEDKIRRDGVPKEMIDRVRKVVEEVKKRSRETLERIRKVIEEVKARSKELIESHEEVIKRVEETLKRLKD

SEQ ID NO: 7467 - protein, 185 aa, Artificial Sequence; identical to SEQ ID NO: 7466
  Synthetic

SEQ ID NO: 7468 - protein, 177 aa, Artificial Sequence
  Synthetic
SLEEEIKKLLKEVRDVNDRLKETIEDLAEKIERLAKRMIERIEEILREVDRLVKEVNLPEEMKKRVRDLLERIRRELEELLKELRKLLKRIRERHDELKKRSEENIKRIEDELRKTGEEDVIREILKEIRKHLRDSEEENKKTLDTLRKILEDLTKAAEDILEEIRRELDRLRKEAT

SEQ ID NO: 7469 - protein, 177 aa, Artificial Sequence; identical to SEQ ID NO: 7468
  Synthetic

SEQ ID NO: 7470 - protein, 179 aa, Artificial Sequence
  Synthetic
SELEDILRRLREEVKRLREESRKLLEDNRRLVEEVKRESDKVLKRLKDKADRLKELAERGDLDEEMAERVERELRRILEEHKRKSKEIEDESEKLDREHKESTREVVERIKKELDDARRRGIPTREIKTVIDELTRELERLNREHEDLTRKLREELKKLNKRIKDLIDTLKKLLEDLKK

SEQ ID NO: 7471 - protein, 179 aa, Artificial Sequence; identical to SEQ ID NO: 7470
  Synthetic

SEQ ID NO: 7472 - protein, 171 aa, Artificial Sequence
  Synthetic
SEEEKLRELVKEVEKRTRELNENLRRSIEEVERDTEELDKNLEKSIREVKKVLDDLNLSDDDVRKVEEDLRRLHEEHRRHVERSRRRLEELYRRHERHARESKKELKELEDRGEPAEDVLRRIRELLERNEEVNRRLDEASKRLLEENRRKNKKLDDDSKELLKRLTERAK

SEQ ID NO: 7473 - protein, 171 aa, Artificial Sequence; identical to SEQ ID NO: 7472
  Synthetic

SEQ ID NO: 7474 - protein, 171 aa, Artificial Sequence
  Synthetic
REKERLEKVIRELETKARELNKNLKKSIDDVRRETERLNENLKRSVDELRKRLKDLNLSRDDVERLDEELRKLEREHHEHVERSDRELKKLYDRHEETIREVEERARELKERDEPAEEVLKELRKLVEELERRNRELDKRSKDLLRENRELNKDLDRKSRELMERVERKTR

SEQ ID NO: 7475 - protein, 171 aa, Artificial Sequence; identical to SEQ ID NO: 7474
  Synthetic

SEQ ID NO: 7476 - protein, 171 aa, Artificial Sequence
  Synthetic
SEEEKLERLIEDLERKLKELNDNLKESIDRVRKRTEELNRNLRESIKRVKEELERQNLREDTVRDLEEKLRELHKRHEDHARRSDKRLKELHKEHEDLIREVEKRLRELRRRGEPAEEVLRELEKLVEDLERENRRLDKESKDLLEENKKVNKDLDDESKRLLEEVSKEAK

SEQ ID NO: 7477 - protein, 171 aa, Artificial Sequence; identical to SEQ ID NO: 7476
  Synthetic

SEQ ID NO: 7478 - protein, 178 aa, Artificial Sequence
  Synthetic
SDKEDVTRLLEEVSRASERSRKRWKDSSDEVKRTSEESIRRLRELLERLRERIERVIREKKDDDLRRKLERLLERLERIIRELEKRSKELNDKNEEDAERVTRESKELNDRLKKEIDRDITDVDELRKKIEEIVKRDEDLVRRLLEDSKRLAEEDRRLLEEVKREIDEIRKRIDEEVK

SEQ ID NO: 7479 - protein, 178 aa, Artificial Sequence; identical to SEQ ID NO: 7478
  Synthetic

SEQ ID NO: 7480 - protein, 182 aa, Artificial Sequence
  Synthetic
DEIDELVRRIEELAERHHRRVDEIVKRNEEVLKELDERARRLVRENEEVLKRLEETVRREGPRDELAERVEEHLRDSERRVRELERRLEEHIKRSEEELDESTKRLEDELRKVAEELKRRNMEERAEKRLRDVLEKLRRDVERNREEIKKSAEDVRREVKRVTDELKESIERVRKRVKELKD

SEQ ID NO: 7481 - protein, 182 aa, Artificial Sequence; identical to SEQ ID NO: 7480
  Synthetic

SEQ ID NO: 7482 - protein, 181 aa, Artificial Sequence
  Synthetic
EAERKVKTVVDELRRIVDELAKELEESLKRTDETIKRLARELERVDRELEEIIKELERKGLSEEEVRKLRETLKKLHEENRRVIEELEREVRESEETLRRVIEEIKKRLEDLRRKLDKLAKDGRVDDEVVRKVEEEAERIKKRIKDLVRRDEKLVEDMRRRIKRLVEKNRKVAEKMRTDTD

SEQ ID NO: 7483 - protein, 181 aa, Artificial Sequence; identical to SEQ ID NO: 7482
  Synthetic

SEQ ID NO: 7484 - protein, 185 aa, Artificial Sequence
  Synthetic
DLEELLRKVLEELRKIVEDARRENEKSLRESEKIVREVEELNKKVLEEVEKKIREVIEEKKEDKELVDEMRRVLKELEDRSRKLTDETRKKLKESEEKSRKLTEETKKVLEDLRRKLKEVADRGESEETIKRIVDEIRKEAERLLRRHRKSVKEDKDLAKKIREDHKKSVEDIERTLEELEKRAK

SEQ ID NO: 7485 - protein, 185 aa, Artificial Sequence; identical to SEQ ID NO: 7484
  Synthetic

SEQ ID NO: 7486 - protein, 175 aa, Artificial Sequence
  Synthetic
SEIEELVKEIKKVADEVRRRHEKSVREIERKLEELDKKVKDLVDEDKKLADELRRRNEDKETLDRVLKESEEKVRRLARDLERVLRESREESRRLVEDTRRLLEELEDKVRRINAGDRVRRELERVLRDVERIIRDVKRTNKRVDDDVERRIRELRKELEDSLRRSKRIVDEVRR

SEQ ID NO: 7487 - protein, 175 aa, Artificial Sequence; identical to SEQ ID NO: 7486
  Synthetic

SEQ ID NO: 7488 - protein, 175 aa, Artificial Sequence
  Synthetic
SEIERLVEEIEKLLRKMAEEHKRSVERDERLARKLKRENEEHIKTDEELVDRLRRRNEDEKRLKEVLDRSEKSMKELKDRNKKVLDESKKESEDIKRRTEKLLEEIEERIRRINAGDRVLRELKRVLDEVKKIIEDVAKENEDSDRRSKKIIEDVVRENKESLDRSREEIERVRK

SEQ ID NO: 7489 - protein, 175 aa, Artificial Sequence; identical to SEQ ID NO: 7488
  Synthetic

SEQ ID NO: 7490 - protein, 175 aa, Artificial Sequence
  Synthetic
KEIEELVKRIEDEARRLKEEHKKSVREIEELLKRLTEEVRKLVERDKKLAEDLKDRNEDEKRLTEVLRESEERIRELVKRAKEVLEESRKRSEDLARENRKVLEDLRREVERINVDDEMLRLLEKVLRDWEEIVRRVKEANDDVNRRVEETLRDLKRKLDRSLEDSERIIREVAT

SEQ ID NO: 7491 - protein, 175 aa, Artificial Sequence; identical to SEQ ID NO: 7490
  Synthetic

SEQ ID NO: 7492 - protein, 184 aa, Artificial Sequence
  Synthetic
SVEDELRKVIKENEDVLREVEERVETVIKRNREVIEEVAREVERVIEETRRLLKEIEKAGVDEDELRKVEERVRKHAEELRKILEDLRRSSRKLAEEARDILRDLKRTSDELRKEAEKVTKDGDSEESIKRLLEKIRKHSEEVKETIRRLLEKIEEHTERVKREIDKMLRSNEDLMRRIKEEAE

SEQ ID NO: 7493 - protein, 184 aa, Artificial Sequence; identical to SEQ ID NO: 7492
  Synthetic

SEQ ID NO: 7494 - protein, 184 aa, Artificial Sequence
  Synthetic
SIKEKLDEAIERNERVLRRVEEEVRKSNEKNKEVLRRVSEEVRKVIEELEDLLRKIAEKGVEEEKLKRLRDELDKIRRELEKRLEDLERSTRDLVRKLERILEELKRTSDELRKEVEEVDKRGTSDETAERLLRKIEKHSREVDETIRRMLEEDERHIKEVEDTIREMLERLKRLIDEAEKDAK

SEQ ID NO: 7495 - protein, 184 aa, Artificial Sequence; identical to SEQ ID NO: 7494
  Synthetic

SEQ ID NO: 7496 - protein, 182 aa, Artificial Sequence
  Synthetic
DEVREVLKKIRELIKTNREHVTRLLRTIEELSRRSEEMIRRILEEIEKLIKDVRRLTEEGELTEEKAEKLRRDVEEIVKEAEKRLRDSNEEVKRLVDEHREVNKDLERRLEDEKRRLKEENLPEEMEKLLEEAIKEAREDSRRSDREVEEVLRKHKKVNDRVREEIERVLRKLEELLKKDRT

SEQ ID NO: 7497 - protein, 182 aa, Artificial Sequence; identical to SEQ ID NO: 7496
  Synthetic

SEQ ID NO: 7498 - protein, 182 aa, Artificial Sequence
  Synthetic
SEVDEIVRRLEELIRRNTEKVERLLERHERLIRELKERVKELLRKHEELAKEITELTKRGESTDEVIEEIRKRSDELNRRLEETLKRIRDDSRRTLEDLKRHSEKSRKDLEELLRDAERKGTGKEARDRIRKVLEELKKKNKELEERIRKVSKELEKVLEDVKRESEKVSKELRERLERSKT

SEQ ID NO: 7499 - protein, 182 aa, Artificial Sequence; identical to SEQ ID NO: 7498
  Synthetic

SEQ ID NO: 7500 - protein, 185 aa, Artificial Sequence
  Synthetic
SELERLEKEARDIVENLKRVLEELAKDVKRLLKESDELLKDLREKVREILERIEELARRNISEELVKEVTKRVRDEVERLRRRLEKVHRDHERTVKRIDEEIRRHVERSEEEVKRVEDEVRRRNMDETAKRELERLVKELRDVHREVEKRLKELAKELREVNKRIKDDLDRLVEALEEVLDRVRR

SEQ ID NO: 7501 - protein, 185 aa, Artificial Sequence; identical to SEQ ID NO: 7500
  Synthetic

SEQ ID NO: 7502 - protein, 184 aa, Artificial Sequence
  Synthetic
SELEELKRRIDELLKENEEILRELEERVRRLNKENRDLLRKLEEEAKRLVEEVRRVAEEGRSEEVLDALRRELERIVEEVRRRIEESLKKVEDLLRRAEEVIRETHEKLRKVAEEVREELKRRRVTEVKERIEKVLKDLERRNRESEKEVRRLLKELKESIDDSRRRVDELVKRLRKVLEDIRR

SEQ ID NO: 7503 - protein, 184 aa, Artificial Sequence; identical to SEQ ID NO: 7502
  Synthetic

SEQ ID NO: 7504 - protein, 177 aa, Artificial Sequence
  Synthetic
SAEETLEKLIRDLEKSIRKSAEDLERLIRELEKSVRDSAKLLRDLIREVRDVVRDVVRAKGDREEVKEIRDRVEKAVEKLERVIKESEDRLKELVDRARKVIEDSKKELDEAVKELERRKADKDVAERVKELDKRNKDLLKRLEEEVRRLIKENERLLRELAKEVKELLERIKRAAG

SEQ ID NO: 7505 - protein, 177 aa, Artificial Sequence; identical to SEQ ID NO: 7504
  Synthetic

SEQ ID NO: 7506 - protein, 177 aa, Artificial Sequence
  Synthetic
SAEDKLRELEKKLRKSIKESADRLRKLNEELRRSVRESAERLKELIREVEEVLRDVVRKRGRTEEVERLEEEVEKLRRELEKVIEDSERELEEHVKRTKEVIDDSKRLLEEMVEELKRRKATEEVEDEVRRLDEENKKLLEDLKRSVDELIERNKRLLEELTKRVKELLDKIRKTAE

SEQ ID NO: 7507 - protein, 177 aa, Artificial Sequence; identical to SEQ ID NO: 7506
  Synthetic

SEQ ID NO: 7508 - protein, 177 aa, Artificial Sequence
  Synthetic
SMEDSLRELIRKLRESVKRSAEELRRLNKRVEDSIRDSARKLRELIRRVEEVVKEVVETRGRTDKVDRIKKKVDDLREKLERLIRESEELLERHVEKTRRVIERSKEELDKVEEDLRRREARERVEDDVRRIDDENRRLLEELKKSVDELDKRNEELLRRAEKEVRDLLREIREAMR

SEQ ID NO: 7509 - protein, 177 aa, Artificial Sequence; identical to SEQ ID NO: 7508
  Synthetic

SEQ ID NO: 7510 - protein, 178 aa, Artificial Sequence
  Synthetic
DAEEELERLLRESERVSRDSARRLRELLKKLRRSVERSRREIDRLLKELEDVIREVIKRKKEVRELVKKLRDDLEDLTRKLKELVKRSEDLLRKLEEDIERLIETSRKRNKELEDRIRERKADKDLAREVEKVVKEDEDILRRAEEEVERLIETNRDLLRKVEREVKELVEKVEEDER

SEQ ID NO: 7511 - protein, 178 aa, Artificial Sequence; identical to SEQ ID NO: 7510
  Synthetic

SEQ ID NO: 7512 - protein, 182 aa, Artificial Sequence
  Synthetic
SELEELKREVDELTEEHKELLKRLTERVKELSERHKELLERLRERSERLVRRIRELAKRGEPKKDLVRELEELLKENNKLLEDVDREMKKTNDELREEIDRVRRRMEKTNKELEKTIKEVNLDDEVLRKAEELLRRNNRVIEEIEKRLRELLKENNDVIKEIRERLEKSNKELRDVAREVAK

SEQ ID NO: 7513 - protein, 182 aa, Artificial Sequence; identical to SEQ ID NO: 7512
  Synthetic

SEQ ID NO: 7514 - protein, 182 aa, Artificial Sequence
  Synthetic
SELEELKKKVDDSIRENERLLRELTEDVKRLSKEHKDLLKRLEDKVEELIRRARELAKRGEPKRDLFDELRKLLEKLRKDIEKAKREMERTNTELEKKIRDALRRTTELDKELEETIRRVNLDDDMLEKAKKVHDEHRKSVEESTERLKELLRRNNEVIKDIARRLDELLRKLEKVVKEIAK

SEQ ID NO: 7515 - protein, 182 aa, Artificial Sequence; identical to SEQ ID NO: 7514
  Synthetic

SEQ ID NO: 7516 - protein, 182 aa, Artificial Sequence
  Synthetic
DELRELEEEVRKSIETNRELLERARERVERLSEEHRKLLEKVKEDSDRLVEEVKDLERRGEPKTDLARRLDDLLRKNNDILRRLKEDMKRTNKELEDLIRELVKTTRDLDRRLKKLIDDLNLDDEVLRRARTLHDEHRRSVEESERRLKELLERNNEVIKDIERKLDKSNKELKDEAEKVKK

SEQ ID NO: 7517 - protein, 182 aa, Artificial Sequence; identical to SEQ ID NO: 7516
  Synthetic

SEQ ID NO: 7518 - protein, 182 aa, Artificial Sequence
  Synthetic
SELEEIEKKVRELTKRHRELVERVRKTVKELIETNRRLLETLTERIKRVLEEVRDLERRGEPKRDLKKRLEDIIRRLAEDIERVKRETDKLLEELKRIIEEVEKEMRETNKELDKEIKDANLDDKALEEAKRVLRENNEVIKDIKRRLDELLKELEKSVRESEERLRRLLEEVKRVIEEVAT

SEQ ID NO: 7519 - protein, 182 aa, Artificial Sequence; identical to SEQ ID NO: 7518
  Synthetic

SEQ ID NO: 7520 - protein, 182 aa, Artificial Sequence
  Synthetic
SSDREVEERVKRLTDRHRELLKRVEEEVKRSIKRNKDLLDELRKESEKLVKEARDLARKGKPKRDLARELRKLLEDNNRKLEEVDRETDELDKRLKERIEELEREAKKTNDELRELIKRLNLDEDVLRLAEKLLKDNNKVIDEIRRRLDRLHEEHKKSVDDSREELKKSNKKLEEVVREIEK

SEQ ID NO: 7521 - protein, 182 aa, Artificial Sequence; identical to SEQ ID NO: 7520
  Synthetic

SEQ ID NO: 7522 - protein, 185 aa, Artificial Sequence
  Synthetic
DDLREVEKEIRRIAEESKKLLEEIERAVEKILRDSRRVLEELARRAKRLLEELDKLKKNGLDKEDLERKLRELERRLEELLEELERISERTKEELKRLEEKLKKFSEDSDRRLRKILEDLERRGVDEDVRREVKRLVDELREVDRKIEEDLRELVRELEKVNREIRKRIEELVRRIKEVADEVRR

SEQ ID NO: 7523 - protein, 185 aa, Artificial Sequence; identical to SEQ ID NO: 7522
  Synthetic

SEQ ID NO: 7524 - protein, 184 aa, Artificial Sequence
  Synthetic
DMEEKMRRITEEWRRVTEEIERRHREVIKKWRDVSREIAETHRRVIDELRRVLERIAERNPSEDLLRKLKKEIEKLERDNRKLIDDDRRLLERVERKNERLIREDRERLKEAEKRIKEVEDRGIDKDIVDKELERLREEIRTSKKESDEVVKENEELIRDSKRKSEKVVRDNKRVIKEAEEKAK

SEQ ID NO: 7525 - protein, 184 aa, Artificial Sequence; identical to SEQ ID NO: 7524
  Synthetic

SEQ ID NO: 7526 - protein, 182 aa, Artificial Sequence
  Synthetic
DEIEELLKEIKKLVDELRKRIEELAREHKRLADELRKKIKKLKDEHDRLVRELEKLAEKGRSDDKVLKKIEDDSKRTREDLERAIREAEDRSRRTSEDLERAIKEAEDRLRKLAEDLKRRGGGKEVKDKLDKLREELKRVADKLRDDLRELHKRLKEVADRLRKLLEDANRTLREVLKETKR

SEQ ID NO: 7527 - protein, 182 aa, Artificial Sequence; identical to SEQ ID NO: 7526
  Synthetic

SEQ ID NO: 7528 - protein, 177 aa, Artificial Sequence
  Synthetic
SAEESAKRLKEELKKSLDRSREELDKLRKDNEKVLRDVEERLRRLIEELKKVLEDIKKDKGRTEEVEKLRKKVEDMARELKERLKDLERSLRELEKKLRRELERSEEEIRKLERDLDREEVREELEKRVEKLLRDDKRRLDELRKESEDHIREIEDTLRRIEEEVKRLLKEMRDKLK

SEQ ID NO: 7529 - protein, 177 aa, Artificial Sequence; identical to SEQ ID NO: 7528
  Synthetic

SEQ ID NO: 7530 - protein, 185 aa, Artificial Sequence
  Synthetic
SELETIARRVEKLNEDVERLLREAKKEADRLIKENEDLLREAERKVREIIERIRRLAERGEPKRDLLKEIEELLRELKETVERLIKTSRDLLKRLAELVEKVKRELEDSLRKLKKEAEDLIRKNDDKEVKEKLTRLLKSHEDVIREVSRRLKELLDRYREVSDRIRKTLEELLKELRRVVEEVRK

SEQ ID NO: 7531 - protein, 185 aa, Artificial Sequence; identical to SEQ ID NO: 7530
  Synthetic

SEQ ID NO: 7532 - protein, 185 aa, Artificial Sequence
  Synthetic
KDLEEIERKVRKLNEDDKKLLDDLRKEVEKALRRNEESLRKSREDAKKIIKEIEDLARRGEPKRDLLRKLEEDLKRVEDEVRKNEKRSRDLLDRLRRILEDLIRESERSADELRRDMKRLIDDKDDKEMKDALRELLRSHRKSSEDTKRELERLLREYEKVSRDVKRDHEKLLREIREVIEEVKK

SEQ ID NO: 7533 - protein, 185 aa, Artificial Sequence; identical to SEQ ID NO: 7532
  Synthetic

SEQ ID NO: 7534 - protein, 185 aa, Artificial Sequence
  Synthetic
SELDEIRRRVEELIETDKDILRRIAEEVRKALEDNKKSLRESEEEVRRLLEEIKKLADRGEPKRELLERLERLLEELRKKVEENERRSKKLARELRERAKEIKKRSDDLNRELRKRMKELIDRIDDEEMKKLLEDLLRKSEDSTRETRKRLKELLDRYEEVSKKIKKRHKELIEELRKVIDDVRR

SEQ ID NO: 7535 - protein, 185 aa, Artificial Sequence; identical to SEQ ID NO: 7534
  Synthetic

SEQ ID NO: 7536 - protein, 182 aa, Artificial Sequence
  Synthetic
RVEETLTRALKEIEEVIRRVDEESKRTIRSHREVIREVDEIHTRLLERLKKVIDDIRRRNVPDDDLRRILRELEEHIKRSKEELEKSLRDLERHSDELRRRLRELLERLRKIVEELDRAKSDDDRLLKEARDEVRKIIEEIRRLLEEHERTVKKLNEDIRKRLEESERTVEELLKRLRDRAR

SEQ ID NO: 7537 - protein, 182 aa, Artificial Sequence; identical to SEQ ID NO: 7536
  Synthetic

SEQ ID NO: 7538 - protein, 182 aa, Artificial Sequence
  Synthetic
SMEEELKRLLESHEKVIREVRKTSEDTLRSHRKVIEEAKEEHKKLLEEIKRVVERVRKRNVPDEDLKRILEEVRRHVEESKKRLRDSFEELRRHSEELERRLRESKKRLERLVRELEREDSRDETVLREARKEVEKLNEDIRRLLEEHKRVVDELNKELRRLLEESRRRVKELIRRIEEEAR

SEQ ID NO: 7539 - protein, 182 aa, Artificial Sequence; identical to SEQ ID NO: 7538
  Synthetic

SEQ ID NO: 7540 - protein, 182 aa, Artificial Sequence
  Synthetic
SVEERLRELIESHRRVIEKVERDSRRTIRSHEEVIKEVKKISEDTLREIRKVIEEAKKRGVPDDELRELLKRLKEHSEELKRRLEESLKDLKRHSDELRKRLEESLRRLKKLIEELRRADSRDETLLRDAERRVEELNEEIRRLLEKHVRDVDRLNKEIRDLAREHKERAEEIIKRIEEKAR

SEQ ID NO: 7541 - protein, 182 aa, Artificial Sequence; identical to SEQ ID NO: 7540
  Synthetic

SEQ ID NO: 7542 - protein, 186 aa, Artificial Sequence
  Synthetic
SEMERLERRARELLRRNEELMDDLRRKAEELLKRNDRLVKEIEKKVREVLRRIEELKRRGEPKREVARKIEEILRRLEETLRRIKEESDRLDEELKRELERVKRESEELDRELRKLIEDVERRVTDSKRLEELLRRLNEEHKRISDELRKLLDEALERHRELSRRLEEELERLLREIERLVEEVTR

SEQ ID NO: 7543 - protein, 186 aa, Artificial Sequence; identical to SEQ ID NO: 7542
  Synthetic

SEQ ID NO: 7544 - protein, 186 aa, Artificial Sequence
  Synthetic
DDMERLEEEIKEILDRLRRLLERNRRVNKEIDERSKELVKRLEEKARRLLEELRRLKDRVTDKETLERRLRELLRELERLIREVEERLKKLHEDHKRHIERSDEEMKRLLDELRKRIEDVKRKLERVKELEKKAEDVLREVKKVIDEVRTDSKRLNENLRESIKDVKREAERVLREVEEAIREVER

SEQ ID NO: 7545 - protein, 186 aa, Artificial Sequence; identical to SEQ ID NO: 7544
  Synthetic

SEQ ID NO: 7546 - protein, 186 aa, Artificial Sequence
  Synthetic
REAEELKKEVDRILEELKKLLKENEDLNRDLDRKSKELLKENREKVERLRKELRELKDKVTDKDKLAKRLEELLKDLADHVERSRKKLEDLHREHEDHIRKSEEELKRLLKEVEDLIRELRERKKDVKELEDEAKRLKDEVEKLIEEIKRKSDELNKNLRDSIRRVEETTRDLLRKIKKLIDEIKK

SEQ ID NO: 7547 - protein, 186 aa, Artificial Sequence; identical to SEQ ID NO: 7546
  Synthetic

SEQ ID NO: 7548 - protein, 171 aa, Artificial Sequence
  Synthetic
SIEEALEDLARRIKKILDDLRREAERLLREVEELLKRVEEANRRLRRTIEEALKRLARDKKKADEIRRRHEELEKRSKENLDKIREDLERLKKRLEDELKRIEEELRKLREEGVEVETAEREIRRILEEIRRLAEEARRRIEEVLKRIKKHLEESKRRNEESLERIEREAR

SEQ ID NO: 7549 - protein, 171 aa, Artificial Sequence; identical to SEQ ID NO: 7548
  Synthetic

SEQ ID NO: 7550 - protein, 179 aa, Artificial Sequence
  Synthetic
SVEETVDELKKRIEKILREIKRVNEELAKRNEDVNEEWRREVDKMIKDIERILRDVLRKEDSEDLRRRVEEVKRHLKRNKDEVEKKSKENKDRVRTSHERLRDLLRRIRERLEELERRLKDLDIEKLKRDAERILEEIKRAVDTSREESERTLKELRDMVKESRKDAEEVLERIDRDKR

SEQ ID NO: 7551 - protein, 179 aa, Artificial Sequence; identical to SEQ ID NO: 7550
  Synthetic

SEQ ID NO: 7552 - protein, 179 aa, Artificial Sequence
  Synthetic
SVKETLEDLIKKIRDLLKRVRDENKRLAEDNERLNREVEKRNRELIKRIEDELEEVRKREDSERVRKIIEDVKRRLDRSHEEVKRISEKNRRDVKRSTEELEKLAEDAERRLDELDKLLKDLDIRDLKREIEKILREIKKALEDSRRKSKETLDRIREVLKTSEEDIKRILKEIREAAR

SEQ ID NO: 7553 - protein, 179 aa, Artificial Sequence; identical to SEQ ID NO: 7552
  Synthetic

SEQ ID NO: 7554 - protein, 178 aa, Artificial Sequence
  Synthetic
SREEVVKEIEKRVEELNRRLEETVRRVIEEMKRLNKESKEVSKKIVDEVRKLLDDVRREKGETEELKRLEERIREAEKTSKKLNDDHERESRKLARRLEELLERHKRETRRIIEEMRRAKLEEDELRRLLERIEKTVRELKREIEKILEDATRTVEDLKRKNEELLRRLKKLADDVKK

SEQ ID NO: 7555 - protein, 178 aa, Artificial Sequence; identical to SEQ ID NO: 7554
  Synthetic

SEQ ID NO: 7556 - protein, 184 aa, Artificial Sequence
  Synthetic
RVEEILRKASKENKEVIDRDRRLAEEATELNKRVVEEDRKVMKEVTKELEDVLRRAREEGLDEEKLRRLEEELRRLTEEWREEIRKDEKTVEELRKKWEDVSRELERRHRELERELKKSLDDGNTDKLLRELEERSKKVLEESKKTSEDLLRESEKHVRDWREKSRKLEEKVKRLVKKVKDTTD

SEQ ID NO: 7557 - protein, 184 aa, Artificial Sequence; identical to SEQ ID NO: 7556
  Synthetic

SEQ ID NO: 7558 - protein, 184 aa, Artificial Sequence
  Synthetic
RAEDIIRELKRRNEEVLERDRELMERAARELREVLERLKDIAREASKELKRVLDELRKRGLDEEDLRRLEKELRDLEREIDRTLKEIEKRLRKLKREWEKVSDDLRKKHEDLIKKLKDDLRRGTSDEVVERLARESERVLRESEETSKDLKRKVDEELRRIEDTIRRLLKRVKDLVKKIEDTSR

SEQ ID NO: 7559 - protein, 184 aa, Artificial Sequence; identical to SEQ ID NO: 7558
  Synthetic

SEQ ID NO: 7560 - protein, 184 aa, Artificial Sequence
  Synthetic
RLREIIEKLRRDNEKVIEEDRRVAEEVRKALEKVLREDRKMADEVTKELERALKELEDRGLDEKKLEELRRRLRKLVEDWKRVSERVEKELRELTEEWEKVSRDLEKRHRDLVRKLEDDLRKGTTDEVIKELEKRSKDVLDESRDESRKLLERVERLLKKIREDSERLLERVEELLREAEETAR

SEQ ID NO: 7561 - protein, 184 aa, Artificial Sequence; identical to SEQ ID NO: 7560
  Synthetic

SEQ ID NO: 7562 - protein, 184 aa, Artificial Sequence
  Synthetic
SVEEIIRKLEEDNRDVLRRDREVAKKVEDENRKVAEEDDRIVRRVAEELKRVLKELEDKGLEKRELDRLRKELKELVERLEDVSRRMKETVKRLRDEWEKRSRELEKTVRELVKKLRDELRKGISEKVIEELKDESRKHLEELEKDSKRLEDESKKHLDDWRRTSEKLLEDVERRVREIEEESR

SEQ ID NO: 7563 - protein, 184 aa, Artificial Sequence; identical to SEQ ID NO: 7562
  Synthetic

SEQ ID NO: 7564 - protein, 179 aa, Artificial Sequence
  Synthetic
SSEEVVRELDKEIRKSIEDLKRIVRENEEENKRSVEDVREKAKRNEERLRKVLKEADERKRDEDLERKLRTVKRELERSIEELEKHIEKSNRDVKKSAKELEDHLRDSKRRMKELAERLKDVDIRELAKRVKRIVDENKRVAEEHHRKVERIVRENEKLLKEHHDRVEELVRRIKEEVE

SEQ ID NO: 7565 - protein, 179 aa, Artificial Sequence; identical to SEQ ID NO: 7564
  Synthetic

SEQ ID NO: 7566 - protein, 179 aa, Artificial Sequence
  Synthetic
SEEEEVRRVLEELEKKVKRLTEEHRRRLDELRKKVKDHSRKNKELLERLREEIKRIKGAPSEDIDRIEEEARRRLEESERSSRELKKDLERTLEKLRRDSKRLVEEMERVLRELRKRGGSEEAKRVLEEVEKRVRELVKTNEDVLREIEEDVRRLVKENEDSIKESKDRLRELLERLKQ

SEQ ID NO: 7567 - protein, 179 aa, Artificial Sequence; identical to SEQ ID NO: 7566
  Synthetic

SEQ ID NO: 7568 - protein, 181 aa, Artificial Sequence
  Synthetic
DEVEEIRKILEELAREAEKVVRETRKLLEDIRKEVEELNDRNRRLLEELERRVRDIKRRGTSEEKLKELEDRVEKAIRESREELKRLEDKIRKRIEEDRRKIEKLERKVKKVIDEIRKRTRRDEIRRVVEDVERRLRELLDRWRKVSEEVEKRLKELIDELRESIERSADRLRKLIEELKR

SEQ ID NO: 7569 - protein, 181 aa, Artificial Sequence; identical to SEQ ID NO: 7568
  Synthetic

SEQ ID NO: 7570 - protein, 181 aa, Artificial Sequence
  Synthetic
REVEEIKKTLEDIRREAKELLDRTRELLDRLRKSVEELNRDNERLLREAKDEVEKVKRDGTSKEVVDELMRKLKRLIEESKRKLDEHVKRTKEVIERDREELKRLKRKLDDTIRKIRSRTREEEIKKVVERVEREIEDLIRRWEEVSRDVEEKLKDLNKKVEESIRRSAKDLRELLREVEE

SEQ ID NO: 7571 - protein, 181 aa, Artificial Sequence; identical to SEQ ID NO: 7570
  Synthetic

SEQ ID NO: 7572 - protein, 175 aa, Artificial Sequence
  Synthetic
SRAEKVLKRVTDLIRELLRTVTELVRRNREVIEELLRRVAKLHRDNRELNKKVLEDVRRDGPDDRLVETLKRHNEEVTKTLERLKRELEKHLEKSARDVEKLKKDLRRVAEEVRRELGDNEVVDELRRRIREVEKTLDRLLEESEERARRVLKELDRLLEESRKSSREVIEEAKR

SEQ ID NO: 7573 - protein, 175 aa, Artificial Sequence; identical to SEQ ID NO: 7572
  Synthetic

SEQ ID NO: 7574 - protein, 180 aa, Artificial Sequence
  Synthetic
SVEELLKKLEKENRDVIREMKKLLDELEEENRRVIEEWRRITKELEDRNRRVREEIPESDELRKLVEELKKHLEDDKRRAEKAARDLKDHLRRLEETIRKMEEELKRHLDKLRRDIERGTDEEIIRRLVKHNKELVDEIRKTIERLREHNRKLVEKVREDVKRSTKHNRDLVKEVRDRAK

SEQ ID NO: 7575 - protein, 180 aa, Artificial Sequence; identical to SEQ ID NO: 7574
  Synthetic

SEQ ID NO: 7576 - protein, 180 aa, Artificial Sequence
  Synthetic
SLEELLDRLRKLNETVIRDMERVLKELEERNRKVIKEDRDVLEELARRNEKVKRDIPPDDELRKLAEDLERHLRDWEDKSRKLEERLRRHLKEVKETIEKIEEELKEHLRDVERKIREGTDEEIAKELVKHNEKKVREIKKTIDDLRKHNEELVKEIRETSERLREHNERLLREALRRAK

SEQ ID NO: 7577 - protein, 180 aa, Artificial Sequence; identical to SEQ ID NO: 7576
  Synthetic

SEQ ID NO: 7578 - protein, 184 aa, Artificial Sequence
  Synthetic
DLEEVVKDLERKLRDVARKDRKLVEDSRKILKDVVDKDRELVERSRRILEEVLERIRRRGTDETTVKDIKRRLDEVLKENDDDSKRATEELRKLLEDNKRKSDEARRRIKKILDEIKDETRKGTSRDTARKLLEDVADELRRWLEDSERLHKENKDTIEKWLRRSRKLHEENRKLIEDLLRTVT

SEQ ID NO: 7579 - protein, 184 aa, Artificial Sequence; identical to SEQ ID NO: 7578
  Synthetic

SEQ ID NO: 7580 - protein, 184 aa, Artificial Sequence
  Synthetic
SLEDVLRELKERLERSHRKLRELVRRLEEDLKRVLRELEKIVDEVRKINEDVRREVERRGVDEDTLRRITKLSEDSLREAEELLEDIRRVVEKIKRELEKMLEEHRRTLEKIEKELDEVRRRGEDEDIVRKLLEDVRKLVEELDRRAKELEERVKKVVDELLEKARRLLEKNRRTVEKILRDVK

SEQ ID NO: 7581 - protein, 184 aa, Artificial Sequence; identical to SEQ ID NO: 7580
  Synthetic

SEQ ID NO: 7582 - protein, 182 aa, Artificial Sequence
  Synthetic
SEVEKLLREVEDRDRRILKKVKELLDEVRRLIEDHLRRSEDALRRVRKRIEELKELVERGDLDEETLKKVKDELRRLIEELRKHAEELKRRLEELERTLKEELDEWKKELDKLLEDLRKDEKSERLEEMLRRLKKSIEDSVREVRKVLKEAKDIARKVIEDTKRLLEELKRIMKKVLDELRK

SEQ ID NO: 7583 - protein, 182 aa, Artificial Sequence; identical to SEQ ID NO: 7582
  Synthetic

SEQ ID NO: 7584 - protein, 182 aa, Artificial Sequence
  Synthetic
SEIEELVERVKARDEKHLRDSEKLLEEVKRRDRKLEEDSKKLLKDVKDLLRELEEVAKRGEVDEETVKDLERRVREMLKESRDRTKKWADELKELVERLRRHIEEWRKELKRELERLEEESDDERLRKLLDDLRKSIEESRKRSEEILREAEDTMRKSVETNERLLEELERELRRVVEELRR

SEQ ID NO: 7585 - protein, 182 aa, Artificial Sequence; identical to SEQ ID NO: 7584
  Synthetic

SEQ ID NO: 7586 - protein, 182 aa, Artificial Sequence
  Synthetic
DEIERVLEEVERIDRELLKRSEDLLREVRERDKELEERSKRLLEKARRLIETLRDMARKGEIDEETAKRVEETLRREVEKSREDTRRWEEELKELLKRSKEETDRWKEELRKKVERLEDKDKKERVKTIIDEARKSIDDSVRENKKVLDELKETIERSKKKNEDILREIEKILEEVREELRK

SEQ ID NO: 7587 - protein, 182 aa, Artificial Sequence; identical to SEQ ID NO: 7586
  Synthetic

SEQ ID NO: 7588 - protein, 182 aa, Artificial Sequence
  Synthetic
KDVDELLERVKRRDEELERKVEKLLKRVRDLIREHDEKVKELEDEVRDRIKKLLEMAERGEVDEETVKDLKRRLKELLDKLRKETEDLKRDLEELIKTLEEEIRRWKEKLEEDAKRLRDKEKSEELERVLRELKRSIETSTRRLRKILEELRRILEESERKVEEVLKELERIAREVEERLRT

SEQ ID NO: 7589 - protein, 182 aa, Artificial Sequence; identical to SEQ ID NO: 7588
  Synthetic

SEQ ID NO: 7590 - protein, 182 aa, Artificial Sequence
  Synthetic
SDIEDVVRKVEEEVRDHNRRVEELLKRVERRDRRLEETVEELLKEIEDKLRRLKEMAERGEVDDKTVKDLKEELERLLRRLEREIREWEKELRRLVRELERETKELEDRLRRLIEELRRRERSERLEKLLRELEETLRRSKERVKEVLEDLKRTITESKRRLKKILDEIRKRLEEVERDLKR

SEQ ID NO: 7591 - protein, 182 aa, Artificial Sequence; identical to SEQ ID NO: 7590
  Synthetic

SEQ ID NO: 7592 - protein, 184 aa, Artificial Sequence
  Synthetic
SLEEVVDKLRRDSEESLKKNETVLRRVTKELTELLKRWREASERLKEELREVLERVRKKGLEEREVRKLEDRLRRLLEEDKRLLDEVKRRIEDLRKKWEDETRKVKERHEDLLRKIEEVRKRGTTEDTLRKLAEEVKRVVRDDEEKVKRLEEEVKEEVKKLEDDLRRSEERVERTIREIEKRAK

SEQ ID NO: 7593 - protein, 184 aa, Artificial Sequence; identical to SEQ ID NO: 7592
  Synthetic

SEQ ID NO: 7594 - protein, 184 aa, Artificial Sequence
  Synthetic
SVEDLVREVERRLKTVLDEDEEVLKRVEDESRESIKENEEVLREVSERLDKVLKDVRRRGLEERLVRDLERKITELRRKWDEDTKRAKEEHEKLTREWRKRSEELRKRIEDLLRELRERLKEGTSEEDLKRLEDRVEEEVRRAKRESDELLKRVRRTVEDDKRRLRELREEVKDLLERIREAEK

SEQ ID NO: 7595 - protein, 184 aa, Artificial Sequence; identical to SEQ ID NO: 7594
  Synthetic

SEQ ID NO: 7596 - protein, 178 aa, Artificial Sequence
  Synthetic
SEVDEVRKRSEKVVEENERRIEESERRIAKLVKEVRDVIEDAKRRVEEILRRLEEEMRKGIDEKTIKDLKEEIKKVLEDLERRIREIEKKLRKVTEDDRRTLKKVREDNKRLLDDIRRKLRSKDVLEEMRKTHERVIKEWERAHKEVNEKLEKIIRELEKVLEEVEDEAREVIRRLET

SEQ ID NO: 7597 - protein, 178 aa, Artificial Sequence; identical to SEQ ID NO: 7596
  Synthetic

SEQ ID NO: 7598 - protein, 179 aa, Artificial Sequence
  Synthetic
SASEDLERVLRELAKEVEKLLRESEKLLKELEDLARELLERDRKLLKELEEKVKRLKERRADEDKIRTLEKEMRDVLRESEERIRRLEETVKRVLDENKKRTDDLKKKLEDILEELERRNSAEERVLDDVRKRIEDLVRELKKVNEDIEKKVRELIERLRRSLEKSKEDIRRLVEELRR

SEQ ID NO: 7599 - protein, 179 aa, Artificial Sequence; identical to SEQ ID NO: 7598
  Synthetic

SEQ ID NO: 7600 - protein, 179 aa, Artificial Sequence
  Synthetic
DMSEELEEILRRLEEESRRHLRTDEELLRELEEKIRRLLREIEEILERLKKRIDEVKTRNTSEETIKKLIEDAKRVLEEIEEKVKRLVDEAREVLDTSRKTLRELVEKMRETLDRARKRNSAEERVLKRVKDRIDELIRRNEESLERTRDEIRKLIEELKKVLDRVKEEIEKLVEALKK

SEQ ID NO: 7601 - protein, 179 aa, Artificial Sequence; identical to SEQ ID NO: 7600
  Synthetic

SEQ ID NO: 7602 - protein, 179 aa, Artificial Sequence
  Synthetic
EMTERLERVLEELKRKSDEHIKTDEELLRRLEKKSRDHLRELEEILRRLEREAREVKRNRTSEEVIKELAKRLRESLERLRKTLDELVKDMERVLRTSERTLEELVRDLERILKELKDADSADREALKKVEDAIDKLRRDNERSLERTKREIERLIRENKDVLDKIEKRIRELIEELER

SEQ ID NO: 7603 - protein, 179 aa, Artificial Sequence; identical to SEQ ID NO: 7602
  Synthetic

SEQ ID NO: 7604 - protein, 179 aa, Artificial Sequence
  Synthetic
SADEKLDKILREMKKRSDDHIREVEKILRDLDREVKEILKKDEKLLRDLDRRVKDVKRRRSSEETIDKLIKEAEKVLRDSEDEVRRVVEKMEKVLRDLERTLKELIERLEEIVKRLKEERSADDEVLKRVEETVRRLVEENKKVLDRVREEIRKLIEELRDSLRRSEKRIRELADELRR

SEQ ID NO: 7605 - protein, 179 aa, Artificial Sequence; identical to SEQ ID NO: 7604
  Synthetic

SEQ ID NO: 7606 - protein, 182 aa, Artificial Sequence
  Synthetic
DLEDILREIARLIERLIDENRKVLEEIARRLKELIEELKKSLKRSEELLRRLEKELKDSGKKTEELTEKLKRILDESRKEIETLEEKLRRVLKKLKESLDKLVEEMKRTLEDLERKIRRDGPDKDLLRTLEKVAEDLKRRSERHIRELRRTLEDLERDVRRLLREDEEKLKRAAEEVKEAIK

SEQ ID NO: 7607 - protein, 182 aa, Artificial Sequence; identical to SEQ ID NO: 7606
  Synthetic

SEQ ID NO: 7608 - protein, 182 aa, Artificial Sequence
  Synthetic
DLEDVLRDIERLLRDLIRRNKEVLDRIRELIKKLIDENRKSLKRSKEELERLIRELAKSGKRDDRVLEKLKKVLDDSRKTLEELAKKAKETLDRIKKSLEELAKKLEDVLRELEREIRRDGPSEELLRRLREVLERLKRESEKHLEELKKILEDLERESRRHIEEDKRLLKELKEEVDERIR

SEQ ID NO: 7609 - protein, 182 aa, Artificial Sequence; identical to SEQ ID NO: 7608
  Synthetic

SEQ ID NO: 7610 - protein, 182 aa, Artificial Sequence
  Synthetic
SLEEVLKRIEDELRRLIEENKESLERSERLIRELKKRLEEVLRRIKKLLEELIRRLEESGKRDDRVRKKLKDVLDDLERRVREAVERLKKVLDDSRRSLEELVKKLKKELDRLRERVKRDGPDKKLLEDLKRTLDELRRESEEHIRRDERLAEELAREVEKLLKDMERILRELAKEVEDRIK

SEQ ID NO: 7611 - protein, 182 aa, Artificial Sequence; identical to SEQ ID NO: 7610
  Synthetic

SEQ ID NO: 7612 - protein, 172 aa, Artificial Sequence
  Synthetic
DASRRVEEKLKEVEERVRKLLEEDRKRLKDSKRKVEELIERDKTELKKVKDRADGGVPKDEARDELRKLKEKSRRDLERLADDLRRLNEKSKEDLKKIKREAEKLLEELEREKGADKKVIDTVRKRLKELLDELKKSVEDTHRENRRVLKELEESHKRTNERLDDLLRELER

SEQ ID NO: 7613 - protein, 172 aa, Artificial Sequence; identical to SEQ ID NO: 7612
  Synthetic

SEQ ID NO: 7614 - protein, 185 aa, Artificial Sequence
  Synthetic
SLEDVVRRVREELERLLRTHEEVIRRVEEELRRLLEEYRKVSKEIEEDLRRLLKEVRDRNIEDEKLRRLEKKLRELIKRSRELLEELRRRAEEIVRRLRDSLRRLKEDIRRIVEKIDKDREDGRPVEDLLREIKKELEDVKRKVDKLNEEVERILKKAKDEVKEAIKENRDRLRRLRDEVRRLKK

SEQ ID NO: 7615 - protein, 185 aa, Artificial Sequence; identical to SEQ ID NO: 7614
  Synthetic

SEQ ID NO: 7616 - protein, 185 aa, Artificial Sequence
  Synthetic
GLEDVVRRVEKRLEDLLRRYKKVSERLEREHRRVLDEYRKVSEEIDKILRDLLKEVRDSNIDEKKLRRLEEELRRAREESKKLLRELEEDIKDNLRKSEKLLEELRREAERLREEIEELRRRGEPVEELLKEIEKLLKDIERTVEKALKENKDSIRRSKEKVDRMIKRNRELAKELEDKVRELKR

SEQ ID NO: 7617 - protein, 185 aa, Artificial Sequence; identical to SEQ ID NO: 7616
  Synthetic

SEQ ID NO: 7618 - protein, 180 aa, Artificial Sequence
  Synthetic
SIEDILRELADTIRRLTEESEKILRKAEELLRRLTEEWRKSLKDLEDLIRKLIEEIRRRGLPEKDVRKIEEELKRLIEENKERLDRITRKLEEILKELRTSSDRLREELEKLLRDLKRLKDRDGEEEIKKLMDEIRKKVEKHLREVEKVLREVEEEVKRELRKSEELARRIEEKIRREKK

SEQ ID NO: 7619 - protein, 180 aa, Artificial Sequence; identical to SEQ ID NO: 7618
  Synthetic

SEQ ID NO: 7620 - protein, 180 aa, Artificial Sequence
  Synthetic
SEVEEALRRMEETIRRVREKLKKSLEDMRREIERIRRELEKSLEEFERDIERITRDIRRRGPGDKELDDIRKELEKKREEHHRRLDEIRRKLEEDLRRHHKDLDDIRRELEKRKEDLRRAKLVSDDALRKIEELVKRLDRELREVNKEIEKVVRELKEELKRVDDEIERLVRELRKEAER

SEQ ID NO: 7621 - protein, 180 aa, Artificial Sequence; identical to SEQ ID NO: 7620
  Synthetic

SEQ ID NO: 7622 - protein, 185 aa, Artificial Sequence
  Synthetic
DEIDEIRKVAERLEKEARELVKENEDDLKRHKERVDEIVKKIEEKVRRLEETARKLKEERRDSEELERVIKRLRDELRKLKEEVRREIKRLEDNHKELRDDNKRKNEELKKKVDDLEREVRRLPETEELKKVLEDLRRVLEKVHKLNREVLDKHREIVKRLSDKIKTVLRKLEEILKRAEEELRR

SEQ ID NO: 7623 - protein, 185 aa, Artificial Sequence; identical to SEQ ID NO: 7622
  Synthetic

SEQ ID NO: 7624 - protein, 179 aa, Artificial Sequence
  Synthetic
SIEELLEEVERVVREVERRLDELLERNRRVIEEVRRRDDKLTKENEDVIRDVRRAGNISDKATDELRRSHEAERRRSEEDKKRLDDSHKELEKEVEKTKRRIREELKKERDKARRSRRPEEDLIREVEKRLEDIKDLLRRMKEEVERHSREVEDRLRRSEERWRDHSKKVKERLDRATT

SEQ ID NO: 7625 - protein, 179 aa, Artificial Sequence; identical to SEQ ID NO: 7624
  Synthetic

SEQ ID NO: 7626 - protein, 173 aa, Artificial Sequence
  Synthetic
SLEEEVRRLLEEIKRLADENRDYVRRSLETNKKTNKDNRDEIRKALERIKRLAREIERIRKEDLDRTIEKLKRELKKLREDNEKRSKENEKSDRDVTEENKRRAKRIRDELRRTGVDEKLLREVEELLRRVEEEHERLHRENRKLNDKDRETLERLIREVDDLLRKLEEEARR

SEQ ID NO: 7627 - protein, 173 aa, Artificial Sequence; identical to SEQ ID NO: 7626
  Synthetic

SEQ ID NO: 7628 - protein, 174 aa, Artificial Sequence
  Synthetic
RVDELLEEVRKLVKDVHDTTEELLKEVERRLDEVKKRVDRSNEEVKELVKEAVKRSGETEEIRRLDEELRKAIEKDKRDLEKIEEDLRREADKIRRENEELKRRLEEEEDKIKKRPTDDTKIEELLRRIEKYMRESKERIDRLLERIDEVLEKNERDVRKLLEDIRRMIEKDDT

SEQ ID NO: 7629 - protein, 174 aa, Artificial Sequence; identical to SEQ ID NO: 7628
  Synthetic

SEQ ID NO: 7630 - protein, 185 aa, Artificial Sequence
  Synthetic
DTIERLLEDIKRILDKNRRDARRVLEEIKRSNEKNREDIKRIEEEIDRLLKEIKKKAEEDRSGEEAKREEEKLKREIERLERELEKIERENRKKMKEIRDDLDRLRRDNERRRREKKKEMDRRITNKDVVKEVEELLKRVEETHRKLNKEVEELLERDERDLRRLIDDVRRLLEEVRKTLEDLRR

SEQ ID NO: 7631 - protein, 185 aa, Artificial Sequence; identical to SEQ ID NO: 7630
  Synthetic

SEQ ID NO: 7632 - protein, 182 aa, Artificial Sequence
  Synthetic
RELEEARERIKELLEEIKDEVRRWREKIKRLLEDSRRKAERLKEDIKRLLEEIKKLSDDGRLDERIEERLRRELERIKRELEKYRKELEEDTRRDEERLRKIKEDLDERMRDIRRELKERVTDEDALRDIERLLREVDDAFRRLVEELRRLNEEVHRTTDELIREVEDMLRKVEEALKREKD

SEQ ID NO: 7633 - protein, 182 aa, Artificial Sequence; identical to SEQ ID NO: 7632
  Synthetic

SEQ ID NO: 7634 - protein, 178 aa, Artificial Sequence
  Synthetic
EEIERVLEEIKRTADEIRKEIERVLEKSKKLLDDHHEEVKRMLERIRDKAKKVTDRGGGSRELDKIKKDLEDELRRLEEKSRREHEEHKKELDKIKKKLRDTERDLERKLKEITDRDGEDKVVEELRKILERLKDLVRDLERKLDELNKRVRDRVEENRKELEKLLREARDRIRELER

SEQ ID NO: 7635 - protein, 178 aa, Artificial Sequence; identical to SEQ ID NO: 7634
  Synthetic

SEQ ID NO: 7636 - protein, 183 aa, Artificial Sequence
  Synthetic
SLEDRLREVLKRYEDRSRDLERELKRVLDEYDDSSRKVAEELKKVLDEIRETVERIKKDVDEKDLRRIKELLKRLEEEVKRTVDENRREAEEIKRKVKKETDENRREADERRRDLERRKGKPRREKEVADLVKKLEDDLRRTSDKVRRVVEEIKRRLEELERRYKALVKKLRDKLREIKEEVR

SEQ ID NO: 7637 - protein, 183 aa, Artificial Sequence; identical to SEQ ID NO: 7636
  Synthetic

SEQ ID NO: 7638 - protein, 181 aa, Artificial Sequence
  Synthetic
DVEEELKKVDDKVEELVRKVIEDIRRALERVRELVERVRRKLEETNKKLKKLVEDIVRKKGRRKELEETLRRNHERLTRATERLKELEERLRKSVEEIERTLKERLDRHHRELDKVREDNGPSEKVEELLRKSEELAKRIEDDVRRVLRKLEDTVRRIKEEIDRLLKDNERIIEEVKRRAD

SEQ ID NO: 7639 - protein, 181 aa, Artificial Sequence; identical to SEQ ID NO: 7638
  Synthetic

SEQ ID NO: 7640 - protein, 181 aa, Artificial Sequence
  Synthetic
SVEEIIEDMLRKVRELVRRVRELLREVDEKLKKLVEDVRRRLEKTNKELKDLVEDIVRRSGERKELKETMKRNHEELTKVDKELEEEKEKHHRELERADKELEDIIRRLEEEVKDLKDKKGGSEEAKRVLDKLRKTAEDIKRTIDELLKRSEETIKKIEDKIDKLVKKNKELVKRIEDEAR

SEQ ID NO: 7641 - protein, 181 aa, Artificial Sequence; identical to SEQ ID NO: 7640
  Synthetic

SEQ ID NO: 7642 - protein, 186 aa, Artificial Sequence
  Synthetic
SLRELLDEVRRAVEESNRELERLLEEVDRSNRESHRELKRLLEKIKKLAEEVERELERKGTSEDEKKKLDDEKEKLDRLLRKLEEESKEAKERNDERMRRLRKESEEVKRTLEEIERRLEKQGDVSEEEVKKAVEDLKRLVDTHKKRVEEVIDELRKHSEKHSEEVRRVITELARRLEELLDEIRR

SEQ ID NO: 7643 - protein, 186 aa, Artificial Sequence; identical to SEQ ID NO: 7642
  Synthetic

SEQ ID NO: 7644 - protein, 179 aa, Artificial Sequence
  Synthetic
SAEEKVEDELRKHHEEVKRLLEEIEKTMRDHHREVEETLKDSRRELKRIEEEARKVKERRVREEELKKIEEDLEREHREHEKRLRDLRRESEKKVRELKEKLDRFRDTSRKRTEDLRREGSASEDILRKLEEEVRRNDKELRDLLEELKDLVRRNDEELRKLNEEVRKRVEELIEELRR

SEQ ID NO: 7645 - protein, 179 aa, Artificial Sequence; identical to SEQ ID NO: 7644
  Synthetic

SEQ ID NO: 7646 - protein, 179 aa, Artificial Sequence
  Synthetic
SIEEMLKRVKEESKRSNDKIRDVLRKVEETSRRSKERIDKLLRDVERTVEEVIRDVKADESIVRDLKRILEKLREDVERTKRRDDERLEKLKRDVKREEDRDREDNERLERETRKSRRPEKDVLDRLRRYVEENRRRVEKLIRDLEDAVRRNEDDARRVAKEIEDVVREIKDRVDKTRT

SEQ ID NO: 7647 - protein, 179 aa, Artificial Sequence; identical to SEQ ID NO: 7646
  Synthetic

SEQ ID NO: 7648 - protein, 178 aa, Artificial Sequence
  Synthetic
SEVDKKLEDIRRRLEKLERETEESLDRVRKELEDLEKESRESLKRLREDLERVKKTKLDERTLDDKIEEMKKRNEEHRKKSEDSARELEKRNREHTKRLEDVERELREELERLDRSGVDKKKADELRRVIEEIIRRLRELDEKHRRLVEEIIRRLEELNREHSKVVEEIARELKKTAK

SEQ ID NO: 7649 - protein, 178 aa, Artificial Sequence; identical to SEQ ID NO: 7648
  Synthetic

SEQ ID NO: 7650 - protein, 177 aa, Artificial Sequence
  Synthetic
SLLEELKRSIEESIRTLKELLDRLEELIRRIAEEIRRLLEEHSRKTEEVIRRAEKAGVPREDLEELADRLRKNNKRLEELVKELIDRLRRLLEDLKRRIEKYAEDLKRELAELRRVKDEKVIEELKRKLEEENKRLKKVVEEIAKTLKDLLDEVRRRIEDSLRKLEELLERVERKTR

SEQ ID NO: 7651 - protein, 177 aa, Artificial Sequence; identical to SEQ ID NO: 7650
  Synthetic

SEQ ID NO: 7652 - protein, 177 aa, Artificial Sequence
  Synthetic
SLLEKLEKLIRDIKRTVDKLLEDNEETIRRIIRDIERLLKRHSDETREVVRTLKERGVPDRRLEEVKRRLEKNNRDLEDEIRRVAEELKRSLKKLKEDIERLAKKLEDDLRELRRVQDKDVIERIERELRELLKKLKEDADRHNEDAERKLRRLRDTIRRSLKKLEEDLRRLSKEAE

SEQ ID NO: 7653 - protein, 177 aa, Artificial Sequence; identical to SEQ ID NO: 7652
  Synthetic

SEQ ID NO: 7654 - protein, 186 aa, Artificial Sequence
  Synthetic
SRVEETLKRLEDELKRIEEEVRKLLDELRRHLEENRRRTEKLLRELREELERVRERVEKGDRSEDELREELERIAKKLDDELRRHNEHLERSKKRLEDILRELEERIREVARRMEKTLEDLRREGVDEKLLRRLERLVREIKRRLEELLKRLADLVRELKKEHERLNRELEELVRRIKERLKEAEK

SEQ ID NO: 7655 - protein, 186 aa, Artificial Sequence; identical to SEQ ID NO: 7654
  Synthetic

SEQ ID NO: 7656 - protein, 178 aa, Artificial Sequence
  Synthetic
EEEERIKERLDRSVEELKKSADKMREEIERSEKKLKESADRVRKEIEDALRRIREEDRDKKELDEEIKRLRDRLREHERETEEENKRLRKRLEEHVRETEKNNERLRRELEKVERNGLEEDVVRRVEELLRRHEEVTKTINREIEELIKTHERSTRELNKEIKELIERLEETIKERTR

SEQ ID NO: 7657 - protein, 178 aa, Artificial Sequence; identical to SEQ ID NO: 7656
  Synthetic

SEQ ID NO: 7658 - protein, 178 aa, Artificial Sequence
  Synthetic
KDAEELERRLRKSAEDLKRSAEEMKKRLDKSREDVKRKVEEAKKIVEDLEEDLKKRDTDDELLERTLKTLEKILDELEKDLRDNNKRLREDVERHKKETEENNRRLRREVEEVERKGLSEEMVKRLRELLRTHEEITERINRKIEKLLREHEEETKRLLDDLRRLLEELRKKIEEEKR

SEQ ID NO: 7659 - protein, 178 aa, Artificial Sequence; identical to SEQ ID NO: 7658
  Synthetic

SEQ ID NO: 7660 - protein, 178 aa, Artificial Sequence
  Synthetic
DEEERIEEELRKSTEKLKESLDRMRRDIEKSAEDLRKSVEDVERDMRRLLEDIEKRDTDESELRDRIRRAEEDVRRHLRETRENNERLREKLEKHVEDTERNNERLRREVEKVERNGLDKDALERVRRLLERHERETRRINEEIERLIRRHVEETKRVNKRIKRLLDELKRRIEEKSK

SEQ ID NO: 7661 - protein, 178 aa, Artificial Sequence; identical to SEQ ID NO: 7660
  Synthetic

SEQ ID NO: 7662 - protein, 178 aa, Artificial Sequence
  Synthetic
SEEEEIKKRIDDARKELEESTREVRERLRDSMRRLDESLKRVEEEIRKLADDIRRREVDEELLKDTIRRARERLKRHERETEKNNKRLKEEVERHVEETKRRIDRLREEVEKLERNGLEEEVVRRVRELLKRLKEEVDRINDEIRKLLEDHKKRTEEVNETIKRLIDRLEEELRRRRE

SEQ ID NO: 7663 - protein, 178 aa, Artificial Sequence; identical to SEQ ID NO: 7662
  Synthetic

SEQ ID NO: 7664 - protein, 186 aa, Artificial Sequence
  Synthetic
SEVEKIIEKIRREEDRNRREVEEKLKRIREHVRRNEEDTRRIIRELRELLKEALDRLRRGDRSKEVLKRLVEKIVEDVKRLLDRHREHSERSVRELRKILEELRKHIKKTVDDLRKILRDVREKGADEKLLRELEELIRRVKKRHDELLKEVADLVKEVEDRHRKLNEELERVAREIEETLKRELD

SEQ ID NO: 7665 - protein, 186 aa, Artificial Sequence; identical to SEQ ID NO: 7664
  Synthetic

SEQ ID NO: 7666 - protein, 179 aa, Artificial Sequence
  Synthetic
SEVETLLDKIRRDNEDLNRRVREELERIRKADEDVNREIEKVLRDIEEAIRKLKRDRLDKDKLKKTLDDLRRRVKEIEDKLREHIKRLEDRLRKIKEDAERHIRELEKRIRDFKERRKEADELVRRLEKILREHEENIKRIVEELERLLEEHKKNLEDLKRRLRDILRKVEEELDRTRK

SEQ ID NO: 7667 - protein, 179 aa, Artificial Sequence; identical to SEQ ID NO: 7666
  Synthetic

SEQ ID NO: 7668 - protein, 179 aa, Artificial Sequence
  Synthetic
SETEELVKKIDKRDKEVKERAKRVVDEIKERDKRVNEEIEKVLRDIERTIKKVREDRLDEDELRRVLEELERRIREIEDRLRRHIEELKRKIDKTKRDLEKHIKDIEDELREVKEKRKEAKEMVDRLRELLERHEKTIRDLVRTLEELLERHRKNIEDLVRELRELLDRAREELKRTAD

SEQ ID NO: 7669 - protein, 179 aa, Artificial Sequence; identical to SEQ ID NO: 7668
  Synthetic

SEQ ID NO: 7670 - protein, 182 aa, Artificial Sequence
  Synthetic
SDIEEALKKIKKMTRELREEIKKTEEESERRAKELEKEVRDYLRKVEEEAKRLKDTKASTEELRRTLERSREESEEILRRLEKTHRDHKRKLDEIKKKLKDVNEKIEREIRKILKDKGEDEDIRRVLEELKKVLEENNRVIEELARRLDELNKKLRELLERIKKTLDDLNKRLEKLIRDTEK

SEQ ID NO: 7671 - protein, 182 aa, Artificial Sequence; identical to SEQ ID NO: 7670
  Synthetic

SEQ ID NO: 7672 - protein, 182 aa, Artificial Sequence
  Synthetic
SKIEKMLRDIEKKTKELEDEIREALKRLREIAEKLKDEVEKYIRELRELLKRLAETKSSDEDLKRELKKSEDRSREIVKKLERVIEKVEREVREIKKKLETTNREIEKEIREILKRDGEDEKIREALERLRKILRENNEVIRELVERLRKVLEDLKRTVKTIEDRLRKVNEDLKRLIEELER

SEQ ID NO: 7673 - protein, 182 aa, Artificial Sequence; identical to SEQ ID NO: 7672
  Synthetic

SEQ ID NO: 7674 - protein, 179 aa, Artificial Sequence
  Synthetic
SEAEKLIEDIKKLIEDHKKRTKELIDEIEEDIKKHREDVERLLRDIERLIEELERENSKDDRVVEEVEDSLRKIKRTLEELVKEHRKKLKEIKEDLKRDLDRVEEVLKRVEDDLRRRDTSEEVERKVREAVKDVRRVLDESRRRLDTAIRKVEEDLRKSREDLERAVKKLRDVLEELKR

SEQ ID NO: 7675 - protein, 179 aa, Artificial Sequence; identical to SEQ ID NO: 7674
  Synthetic

SEQ ID NO: 7676 - protein, 179 aa, Artificial Sequence
  Synthetic
SEVEKLERKTEKILKDLKDEVKRAEEETRRILEELKKMLEDMEKRTREILKRIRDLARDGRSRREDLERILRRHNDEIRKIKERLEEKLERHNRKIKRIDDELKKTDDEHNRELDEAKKRGVSEKKLRELNTELTRLIDEIRKRLEELNERLRKLVEEIEERLRRLNEELKRLVEEIRR

SEQ ID NO: 7677 - protein, 179 aa, Artificial Sequence; identical to SEQ ID NO: 7676
  Synthetic

SEQ ID NO: 7678 - protein, 178 aa, Artificial Sequence
  Synthetic
KELEDTAEESKRELEKIRDEVRKEEEESEKLLRKIEKELREYAEKTRRILEKLRRDQLDKDELRRTLEEHRRETKELRDRLERTLERHEKRSEDIREKLKELLRRHEEKSEDELRKRPDEEVARLLKKLNDELRRLIREIEERLRKLNDDLRELIERVEERLRRLNEELEKVIRELET

SEQ ID NO: 7679 - protein, 178 aa, Artificial Sequence; identical to SEQ ID NO: 7678
  Synthetic

SEQ ID NO: 7680 - protein, 178 aa, Artificial Sequence
  Synthetic
DEVEDTERRSKKKLEELEEELRRTATESKRTLEELKRRLEDEERRSRDALRRLKEANLDEDKLRKVLEEHRKRSKELKERLEEDLRRHRKKSKELKDRAEEALKRHREESKRRLDERPDEEVKRRLERLNEEIEKLIRDIERTNRELNKELEDLIKEIEDRNRKLNEDLRRLIDELRK

SEQ ID NO: 7681 - protein, 178 aa, Artificial Sequence; identical to SEQ ID NO: 7680
  Synthetic

SEQ ID NO: 7682 - protein, 182 aa, Artificial Sequence
  Synthetic
SELEEIAREVKETSKRHEEHVRRSEEEVKKTLKRLKEHVDKSSEDAERTLEELERRLRRDGKDERLEEELDKTIKRLEEHVKDNIRKLRETLDRLRRHIDRNRKESKRLLEELKKRIDEVRKRNVRDDELRRLKEELKENIERAEESHKELADRLRELIKRIKERHEELLRRLRKLLEEIRK

SEQ ID NO: 7683 - protein, 182 aa, Artificial Sequence; identical to SEQ ID NO: 7682
  Synthetic

SEQ ID NO: 7684 - protein, 178 aa, Artificial Sequence
  Synthetic
SAEEDLERLIRALKKVLDDHERLLRELLRRLEEVVRRHKELLKKLNRDLEEVLKDIKEKKRDKRELEEELKRRLERHRRESEKSKERVERALREVKKKLEKSIRKLEEELRKVEEKLRKDGATDETDKEVRDTIRRIRKHSREVAEEVRKIIEELRRHSKKMADDSKRTIDELRERAK

SEQ ID NO: 7685 - protein, 178 aa, Artificial Sequence; identical to SEQ ID NO: 7684
  Synthetic

SEQ ID NO: 7686 - protein, 185 aa, Artificial Sequence
  Synthetic
KVEEELDRLLKEIEKIIEEHRKKNKKLNDDIRRLIEEHERDLRELLKELEKLIRDLKKDLRDVEKLKRELEEILKRLAELIEESKRRLDDELRRHEKRSRDSVEKLERELKKLEDELRRLKEEGIDDRAVEEVRKRIEEILKRIRDNSKRVEEETRELLERIRRNSERLRRDVERLARELEEKKR

SEQ ID NO: 7687 - protein, 185 aa, Artificial Sequence; identical to SEQ ID NO: 7686
  Synthetic

SEQ ID NO: 7688 - protein, 178 aa, Artificial Sequence
  Synthetic
SDEERLEEKLRRVEREVEKKLKRLKEELEEYARRVKEMSDRHREEVERFEEEVRRRGGGGEDLDRRIRTLKKRSEELLRESEKRSEEIIRRLEKTLRDLEREVDKIRRELKEELERKDDDTLRKLMEKIKRALEELLKRLEDLVRRIEEELRRLNEELRKNIREAEERLRKLKEDAER

SEQ ID NO: 7689 - protein, 178 aa, Artificial Sequence; identical to SEQ ID NO: 7688
  Synthetic

SEQ ID NO: 7690 - protein, 180 aa, Artificial Sequence
  Synthetic
SADEILKEIEDTIRKLIEDNKRTLEEHERRTRKLIRELRELLKRHKTESRRLAEELKKDGDKDLSEEIRRIIEKLKKDNEKLERDVRRLEKKMRDDNRKLKEDNKRVAEEMKKTLDKLKKDRVSGEEVRKRLEELKKKVERENRRHREHLKKVAKEVKRTLDEIRRHLEEVKERVKRARD

SEQ ID NO: 7691 - protein, 180 aa, Artificial Sequence; identical to SEQ ID NO: 7690
  Synthetic

SEQ ID NO: 7692 - protein, 172 aa, Artificial Sequence
  Synthetic
SEEEELKRRVDEVRKRTKEIIEELKRHVDRNERTVREIIKRLEEEVRRVAEKVKRGELDREELRELIKRIDEKLKKTLDDVRKHLEDSLRRIEDILRRHEEESKKIEDDMRREVKNSKVVEDVRRTLKRLNDELRKVVKDARELHERLLRDLKRVIDRIRERLKRLLDEAEK

SEQ ID NO: 7693 - protein, 172 aa, Artificial Sequence; identical to SEQ ID NO: 7692
  Synthetic

SEQ ID NO: 7694 - protein, 180 aa, Artificial Sequence
  Synthetic
DEVETLAREVKKSNDDDRRKTKKTADDVEKKLEDLKRRDEEVRERVEEDLKRLREKVKGDELRRIVEEIAREVKELLDRSKDLSRRVAEELRRLLRESKEIVDRVARKTEELLKEVRKDDKKEVLDRVADEIRRLNKETNDVDRDVRRRIDKLVEDVKRVTEEVSKEIKRLAEEVDRRIT

SEQ ID NO: 7695 - protein, 180 aa, Artificial Sequence; identical to SEQ ID NO: 7694
  Synthetic

SEQ ID NO: 7696 - protein, 180 aa, Artificial Sequence
  Synthetic
DEVEELKRKVRESNKRDEDETRRTEERVEREVRRLEEEVKDVKRKVERELERIAREIKGDELRRIVEEVAKRIDDLIRRIDEIIKRVRKEVKRLLDESRKIVKDVARETEKLLRDLERDDKREVVKEVEDRIRKLNRETNEVDKEVRKRVDDLIRDLERVLREVKEEVDRLVRKVEEDAK

SEQ ID NO: 7697 - protein, 180 aa, Artificial Sequence; identical to SEQ ID NO: 7696
  Synthetic

SEQ ID NO: 7698 - protein, 187 aa, Artificial Sequence
  Synthetic
DEVEELVKRAEDILERLKREVDRLIKESEDLNRRIRKHVEDTIKEVRKRLEELRKEVEDRATEEVRKVVDELRKEVERLVRESREVVKRSLEISKRLAEEAKEVLERLRELVKKLVDELRKKKDDERAKDLLKEVVERVTRVAKAVKEKLDEVVRESREVIKRVEEKNRRVLEEVERVARELKKAID

SEQ ID NO: 7699 - protein, 187 aa, Artificial Sequence; identical to SEQ ID NO: 7698
  Synthetic

SEQ ID NO: 7700 - protein, 187 aa, Artificial Sequence
  Synthetic
DEVEELVRRAEEELKRLRKHVEETVERSKKLNDEIKKHVDRTVKEAKDELRRLREEVKKRGDERVEKVVEEVDKLVEELVRTSKEVVRDSLRKSTELAKRSRDLVDEVRRLVEELVKELRDKKDREEAKKLLEDVARRVRKVAEELKKKNKELLETSDRVIEKVRKKNEDLKRTVDEVARRLEEAIK

SEQ ID NO: 7701 - protein, 187 aa, Artificial Sequence; identical to SEQ ID NO: 7700
  Synthetic

SEQ ID NO: 7702 - protein, 178 aa, Artificial Sequence
  Synthetic
SEVDEVVERLRRISEELDRRVKKLVKDARRISKELEEAVRRVVKTAKDANKELRKEVRERRTDESVVRENHKTIEDVVRELEKVLEEDRKTVEEVVRAARKVVEDDEKTVEDIVRLAKAGVDVDTLAEDAKRSARETEEILRRLVKKLEESARDTKRIIDELDKELKDSNEEVRRRLK

SEQ ID NO: 7703 - protein, 178 aa, Artificial Sequence; identical to SEQ ID NO: 7702
  Synthetic

SEQ ID NO: 7704 - protein, 174 aa, Artificial Sequence
  Synthetic
DEAEEVVKDVEREVRRLEKENRDLVERSKRLVERLEKESRDLVRKSREDVKRLREKGVPEDVVRKLEEVSRDSARRLKESNDESRRVSDESKKKLEESLEETRRVVDRVRKLLREGVDEEELRKDVERVVKKDEDITDEVRKENDEVVKKNEDIIDELRKKNEEVLRRVDEEAR

SEQ ID NO: 7705 - protein, 174 aa, Artificial Sequence; identical to SEQ ID NO: 7704
  Synthetic

SEQ ID NO: 7706 - protein, 174 aa, Artificial Sequence
  Synthetic
SEVEDVVRKVRELVKRLRDESRRLVEESRRLVEELEKRSRDLVKTAEDIVRELKEAGVPEEAVDKLRKVVETLKDELRRSNEKSERASRESKDRLKKSNDESERVVREVEKLLRAGVDKDELDKEVKEAVKKNREIIRRLEKRNRDVVEENRKIIEDIEKKVRDVVREVRREAK

SEQ ID NO: 7707 - protein, 174 aa, Artificial Sequence; identical to SEQ ID NO: 7706
  Synthetic

SEQ ID NO: 7708 - protein, 184 aa, Artificial Sequence
  Synthetic
SSLEEVAERVKKLVRELEESTKTVEELVRRLVTELRKSTEKVRRDVDKLVKELEEIIRDVKDKRELERVIREVMKRIEEILERNSRLIDEVMRRLEKILREDEKLIEDVARRAREIAKRLLDERDTREVKRLVEEVEKLIERLRRESRRLIERVRREARELKEESRRLEEEVRKKIEELARRVK

SEQ ID NO: 7709 - protein, 184 aa, Artificial Sequence; identical to SEQ ID NO: 7708
  Synthetic

SEQ ID NO: 7710 - protein, 184 aa, Artificial Sequence
  Synthetic
RDLEEVKKKVDKLVRELEESSKKVRKDVEDLVKELEDTTRDVKRLVEELVTRLKRIIEKVDRKKDLRKVIEDVAEELTRIARRDKELIDRVAEELEEILKRNTDLIKKVADELRRILDELLRKRDTREVKKIIEDVEREMERLERDSRRIVKEVREEADRLRKESKRLEEDVKRKLKELRERVN

SEQ ID NO: 7711 - protein, 184 aa, Artificial Sequence; identical to SEQ ID NO: 7710
  Synthetic

SEQ ID NO: 7712 - protein, 184 aa, Artificial Sequence
  Synthetic
DELERVKEKVDKLVAELEKSTDDVKKKVEDLVRELERSSEKVKKDVDRLVKELEDIIRRVKDKDRLLRTIREVAKTLEKILEDNKRLIREVARRLRRILEEDKKLIEEVMRRLEEILKDVIRKRDTREVKKVVEDVRREAKRLKERSKKLEDEVRDLLRELEKRSDEITKRVREEMKRLEDEVK

SEQ ID NO: 7713 - protein, 184 aa, Artificial Sequence; identical to SEQ ID NO: 7712
  Synthetic

SEQ ID NO: 7714 - protein, 184 aa, Artificial Sequence
  Synthetic
DELEDVKRRVEKLVRELEESSKEVRKRVEDLVRELERTTEEVEKLVRDLVRRLEDIIRRVKDKDDLRRVIERVMKELERILKEDKDRIRKVMEDLKRILEENDRRIKRVAEEIRKILEELLRRRDTEDIKRLEEDVERKLRRLEEESRRIVEEVKKEAERLKERSERLTKEVRELADRLAREVD

SEQ ID NO: 7715 - protein, 184 aa, Artificial Sequence; identical to SEQ ID NO: 7714
  Synthetic

SEQ ID NO: 7716 - protein, 184 aa, Artificial Sequence
  Synthetic
RELEEVKRRVERLVRELEESLRRVRKEVEDLVRDLERVSKEVEDTVRELVRRLDEVIRRVKRKEDLLRLIDKVAKELEKILKKSLDDSRRVMERLEEILERNSRLIKKVMKEAEDILKELIDRRDTREVKTLVEEVRRLLEELERRSRKLVKEVRDEAERLKREDEEIIREVRELLKELERKVR

SEQ ID NO: 7717 - protein, 184 aa, Artificial Sequence; identical to SEQ ID NO: 7716
  Synthetic

SEQ ID NO: 7718 - protein, 181 aa, Artificial Sequence
  Synthetic
DELEEVKRTVEELLERLERVNKDVKRKVKELLDRLREVDDRVKKEVKRLIEEVKNVDTDKKDVEKIVKEVEKTLKDLVRRVEEINRRVAEDLRRLLEEVERINDEVRRRLERLIEELLKDRDTEEIKKLADRVRRELKRSEDHTKRLAEEVRKDLEESRKHTKELEKEVEEELRRLKKEVR

SEQ ID NO: 7719 - protein, 181 aa, Artificial Sequence; identical to SEQ ID NO: 7718
  Synthetic

SEQ ID NO: 7720 - protein, 181 aa, Artificial Sequence
  Synthetic
SELEEAAKAVEKLAREAEKSSEDARRAVERLAREAKRANDEAEKAVRELAERARRADRREEEADRIAEEAAKEAERLAKEAKEINDRAAEEARRLAEEDREVAERAAKEAERLAKELRDTRDAKEAKKLAKEAREIADRLRRESEEIAREAEKIAKELADHTRELAERARRIADKLKKDVK

SEQ ID NO: 7721 - protein, 181 aa, Artificial Sequence; identical to SEQ ID NO: 7720
  Synthetic

SEQ ID NO: 7722 - protein, 178 aa, Artificial Sequence
  Synthetic
SAEDLIREVRRRVKELERKLEEILKRSEDLTRRLREEAERILKESRDRVRKLEEDARREAREDKDLVEKVIRELEKAIRHDEEVVRRVEELLKKVNKEVRDVIRKIRKLLKEVDKELEKRGESKEVIKKIRDILRRLSEELEKVLEDSERILRRLEDELRESLKRTEEILRELRRELK

SEQ ID NO: 7723 - protein, 178 aa, Artificial Sequence; identical to SEQ ID NO: 7722
  Synthetic

SEQ ID NO: 7724 - protein, 176 aa, Artificial Sequence
  Synthetic
SVDEVLKEIEDALRRLKEEVERVLKENEDELRRLEEEVRRVLKEDEELLEELKRKVREIDEVDRVVDEIRKLSREILEKVKKVVKEIRDSLETVKRRVDDVVRRLKELLDEIKRDNDEKKIRDVAKEIRDRLKELEEEIEEVTRRNKKLLDDVEEEIRRVHEKTRRLLETVLRRAT

SEQ ID NO: 7725 - protein, 176 aa, Artificial Sequence; identical to SEQ ID NO: 7724
  Synthetic

SEQ ID NO: 7726 - protein, 175 aa, Artificial Sequence
  Synthetic
RLEEVVEEMERLIRDLEKKVEDARERNERLVRESRKKAEELIKELRKLLRELEEEIRKGSKKVVDEIRRVVEEVVKEIKKLLERNEEVSREVEERLRRLVEEIKRVVEEAIKLLREGIDVETVLKRVREVIRRVEETIKRLDDRNKESSEDVERRLRELLREVREIIKRVREKTR

SEQ ID NO: 7727 - protein, 175 aa, Artificial Sequence; identical to SEQ ID NO: 7726
  Synthetic

SEQ ID NO: 7728 - protein, 175 aa, Artificial Sequence
  Synthetic
RLEDVVRESKKLVEESERRVREAIRRNEELVKDSEREAREVIEELKELLRRLEEELKKGSEEVVEEIRRKIKKVVEDIKRLLDRNREVSEKVVRDLERLIREIREINRRAVELLKRGVSVEDLLREVRRVDKEANEKIEELDRRNKKSSDDVKKKIRDLKREVKKVIDEVRERTR

SEQ ID NO: 7729 - protein, 175 aa, Artificial Sequence; identical to SEQ ID NO: 7728
  Synthetic

SEQ ID NO: 7730 - protein, 181 aa, Artificial Sequence
  Synthetic
SELEKVLTESRDVVRRATKRLREVHKKTKEVVDRLREKLKRVEDEVRKAVRELEEKVRDEDVVRDVARRLEELLKELERVVREIERELERVIRETEEVIKTIDELLKRVNERVRKVIEEKKDKRLEDVLKESKKLTDDLRKDAKRVLDEDRRLVEELKKELDEARKRVEDLVREVKDRARR

SEQ ID NO: 7731 - protein, 181 aa, Artificial Sequence; identical to SEQ ID NO: 7730
  Synthetic

SEQ ID NO: 7732 - protein, 185 aa, Artificial Sequence
  Synthetic
DEVEEVRKRVEEVIRRNEERIEDVRKKVEDVIRRNEKLVDDVRREVKEVLDKLRELLERRKERVKDVVTEVEKRIRKLLDELRRSSEEVKRLIDELLRRAEKSSREVKETIDRLIEDLKRKLKDDKETVDEVAERLKKLLEESERRVKRVLDEARKLVKRSEDRSKKVLDELEELLRRVRKEADK

SEQ ID NO: 7733 - protein, 185 aa, Artificial Sequence; identical to SEQ ID NO: 7732
  Synthetic

SEQ ID NO: 7734 - protein, 188 aa, Artificial Sequence
  Synthetic
RELEELLEEARRSSEEVKKILKKLKKEVDESSERLERIIEKLLRDAKRVADEVRDILEKKREDRDVVRKVIDELRKVIEEIVKRLRDAVRENEKSIRDVIRKAEKVVEENERVIEEIVKKAKRDLKDDEERVKRVIDELRELLRRSREEVKRVVEELKKELERSKREVERVIDELRRLLETVEKEIRD

SEQ ID NO: 7735 - protein, 188 aa, Artificial Sequence; identical to SEQ ID NO: 7734
  Synthetic

SEQ ID NO: 7736 - protein, 188 aa, Artificial Sequence
  Synthetic
SELEDLKRRIRKSSEDSKKSLEDSDRTIEESSRDSSRTARESERKLEKVLREVDDILKKVKDDKDVVRRVLERLRRIIKRLVDENKRSVEENKRSIDELVERNKRSVEENERVIKEIVDRAKRDASSNEEDVERIVRELEELVRKSREDHKRVIDALREKLKKSREEHRRVIDKLRRELKRVEDEIRR

SEQ ID NO: 7737 - protein, 188 aa, Artificial Sequence; identical to SEQ ID NO: 7736
  Synthetic

SEQ ID NO: 7738 - protein, 188 aa, Artificial Sequence
  Synthetic
SILEKLEREVRKSSRESRESAKKSLREIEESSRRVEEELERLLREVRRVAEEVLDILRRKKEERETVKKVLEDLKRIIDKVVEDAKRVVEENRRVIEEAVRKNEESVRENEEVIDRVVKKARRDLDKRREEVKRIIERLRKLLEDSKRDHEEVIKELRKLVEDSRRRVEEVIRRLRELLKRVADELRR

SEQ ID NO: 7739 - protein, 188 aa, Artificial Sequence; identical to SEQ ID NO: 7738
  Synthetic

SEQ ID NO: 7740 - protein, 189 aa, Artificial Sequence
  Synthetic
DELEEALRRLKKIVEDLARRNEELLKELRRDSKRLKDEIKRVVDELRDIVRRLKEELDRVKEREEVARRILERLERVIRRLVEILKALVDHNKKSIERVVEEAERSNEEVERVVREVVDEARKRTRDERLERRVREIIRRAEELLERSRKRSEEIAREAEKSNRELEDAVRRIIRELEELLEKLERDAR

SEQ ID NO: 7741 - protein, 189 aa, Artificial Sequence; identical to SEQ ID NO: 7740
  Synthetic

SEQ ID NO: 7742 - protein, 189 aa, Artificial Sequence
  Synthetic
DEVDKVTRELREIMRKLKEDDKEVLDRLREDSERVERTNREVEKRLEAIIRDLEEKLRRKREDKDLVKRLLDELRRVVEEVRREVEELNEHNERSIRDAVRKSRELVERIRDVVREVDERLKRLTRDERLKEKVDRIREEAKRLLEELEKHVRDSEREAEDSNRRSRETSEEIIRRLRKKVKELEDKVR

SEQ ID NO: 7743 - protein, 189 aa, Artificial Sequence; identical to SEQ ID NO: 7742
  Synthetic

SEQ ID NO: 7744 - protein, 189 aa, Artificial Sequence
  Synthetic
SEVDKVEEELERIVKELKDRDREVLKRLRDDSERLVRELKKVAEELRKIAKDIDERLKEKKEDKDFVEKLVEELKRVIEEVVRRLEELVKHNNRSIEEVVRISERLVEDLERVVRRVEDTLRKLTRDERLKDRVDKIREKARKLLEELKKHVDDSIEEAKRSNEELRKTVEKIIREAEKLLRDLKEAVK

SEQ ID NO: 7745 - protein, 189 aa, Artificial Sequence; identical to SEQ ID NO: 7744
  Synthetic

SEQ ID NO: 7746 - protein, 189 aa, Artificial Sequence
  Synthetic
SEAEKVERELDKIIRELKETDKKVLEDNRRVVEKIEREMERVLRELERIMKELKEELDRKREDKEVLRRLVETIRKVVEEVEETLRRLLEESKRSSEAVERISKKLLEELREVVERVVRRLEELRRDERLKEKVDEIRKRAEELVKELARHVEKSIRESRELDKRLEEKVKEIIRRARELLEDLRRKAE

SEQ ID NO: 7747 - protein, 189 aa, Artificial Sequence; identical to SEQ ID NO: 7746
  Synthetic

SEQ ID NO: 7748 - protein, 179 aa, Artificial Sequence
  Synthetic
SEAEKVRREVEDLIRTLEEVVRKSSEEIKELLRRLREVVERIRDTTRRLIEEIEKKVKSRKADEIRRLVKKAVDEDEEVIRRVEELVRRVLEKNKEVVRRVEELLRRVVEKIEDVRRRGGREDLERVLKEVREIVKRLLKRLEESLRDVRRIAEELREMLKRSLKRSEEIIRKLLEDVR

SEQ ID NO: 7749 - protein, 179 aa, Artificial Sequence; identical to SEQ ID NO: 7748
  Synthetic

SEQ ID NO: 7750 - protein, 180 aa, Artificial Sequence
  Synthetic
DEVDTVDEKVKRLAEELRKRVRESKERTKKLARDLREAVKESLKDSERLAEDLRRKVRDEELKRRVEEVVRESRRLNEEIRRIIEKVVEDMKDSNRRIEEIIEKVVREVKELLKRVRDDDTREKLERVEREIEKLVREVEKILRDIHRDNERVVREVERRLEEITRRSRELAKRVEDETR

SEQ ID NO: 7751 - protein, 180 aa, Artificial Sequence; identical to SEQ ID NO: 7750
  Synthetic

SEQ ID NO: 7752 - protein, 180 aa, Artificial Sequence
  Synthetic
DEVDEVARKVERDAERLEDLNRRSEETSRRLAEELRRLNERSERETERLAEELRREVREERLRKLVEDVVREVRDTNRRSKEISEDVVRKSERLNRESKRITKEVRREVKKLLDEVRKDDDKKKLEDILREIEKLIRRVEEISRRILEESKRLADEVRKITKKLHDDNKRLADRVKEETR

SEQ ID NO: 7753 - protein, 180 aa, Artificial Sequence; identical to SEQ ID NO: 7752
  Synthetic

SEQ ID NO: 7754 - protein, 180 aa, Artificial Sequence
  Synthetic
REIDEIKERVDRLAEKLRRDMERSTRESRKLVEELKERAKRSKEETTKLAEELRRRVRDEEVRRIVEEVVEKVRTTNEEVRRIIEEVVKRLKETNDRVREIIEDVVRRVDRLLKEVRKRDEKEELERILREIKRLMDEVKRILEELLKTNKKLIDEVRKRLEELHKRNRELVEEVARRAN

SEQ ID NO: 7755 - protein, 180 aa, Artificial Sequence; identical to SEQ ID NO: 7754
  Synthetic

SEQ ID NO: 7756 - protein, 183 aa, Artificial Sequence
  Synthetic
SEVEAVEKEARELVREDERRDDEIEEDLRRLLEENRRKDDKVEKEVRELLKRLRDKVDDRADERLRELVEDVARKVKRLLDESRRSSEEVAERLKRLLDESRKTSKEVMEILKELLERLRRVSDKRDVKRVRDTVRDISRKNNRTTEELLKRVRDISRRNKEITEELLRRIREIAEDLARKLD

SEQ ID NO: 7757 - protein, 183 aa, Artificial Sequence; identical to SEQ ID NO: 7756
  Synthetic

SEQ ID NO: 7758 - protein, 183 aa, Artificial Sequence
  Synthetic
SEVEKVEEEVKRLVEENERRVRESSREVEKLLREDAERDERASRELKKLLEKLKRAVDKRADERAEETVRDVARKLEDLVRRSKRSSDEVAKALEKLVRDSDKSSKEVAKRLEDLLRELRKVSDKRAVEKVLRTARKISEDNKRKNDEISERLRRISERNNRESEKLLRDLEKIIEDVERKLE

SEQ ID NO: 7759 - protein, 183 aa, Artificial Sequence; identical to SEQ ID NO: 7758
  Synthetic

SEQ ID NO: 7760 - protein, 183 aa, Artificial Sequence
  Synthetic
REVEEVEKKARELVERDERTDERIRKELEDLVRENKKEVKRVRETIERLLRDLKKAVDERGDEDVRRTVDKVAREVEELIKEVDRTSKEVEELLRRLLKRSEETSREVMEILRRLLEELRRVSREEDVKRVEKTVEDISRKNNEITKRLRDTVRRLSEKNRRDLEKALEDLKRIVDDVRRKIT

SEQ ID NO: 7761 - protein, 183 aa, Artificial Sequence; identical to SEQ ID NO: 7760
  Synthetic

SEQ ID NO: 7762 - protein, 183 aa, Artificial Sequence
  Synthetic
SEVEEVEKEARELVKRDEDRDKEIEDKLRELVERNRRLVRKSSEELKKEIKRLKDEVDRRADERVEDTVRKVMEELKRLVEESRKTSEDIARKLDELVKRSKKTSKEVMKTLRDLLERLRRVTEKEKVEKVLKEVRDISRENNKTTDTLEKEVRRLSEENKRRNEEVTRRVRKILEDVERKAR

SEQ ID NO: 7763 - protein, 183 aa, Artificial Sequence; identical to SEQ ID NO: 7762
  Synthetic

SEQ ID NO: 7764 - protein, 183 aa, Artificial Sequence
  Synthetic
KEVEDVEEEVKKLVEENKKAVDDSREEVRKLLEENKKAVDDSRKEVEKLAKKLKEAVDRRADEDARREVEEVVRRARELLETSRETSDRVAKELKKLVDESEESSKRVADELRRLLRELRDVEGKEKVKRVLDEAKKISDDNKRKNEEVSKELEKISRDNLKLNEDITREIREIVERVDERLE

SEQ ID NO: 7765 - protein, 183 aa, Artificial Sequence; identical to SEQ ID NO: 7764
  Synthetic

SEQ ID NO: 7766 - protein, 183 aa, Artificial Sequence
  Synthetic
SEVEKVEKDLRKLIKDNRDSVRRVKEEAEKLVEENRRSVEEVRRTIKELLERLEKLVRDRGTEEVKKTVEDVMRRVEELLRRVRETSEEVARRLEKLVEDVRRTSEDVMRRLKKLLEELRRVSDKRLVDKVRRELEKILRDDNRIIKEVLDTVRRLSEDNLKKVKDVLEELTRIAEEVRERAR

SEQ ID NO: 7767 - protein, 183 aa, Artificial Sequence; identical to SEQ ID NO: 7766
  Synthetic

SEQ ID NO: 7768 - protein, 178 aa, Artificial Sequence
  Synthetic
SKVEDLLEKLERELEKNRKRTKELLKRAEESSEDIREKVRELRERLERLIEELERRGVPGEVVEEVERVVRRIDRELREVVRKNNEVVRKIVELLKRSDEKVKEVVKRIADLLEEKRDDDKLLEDLERLVRRVLDEARKINEELDKRVKDSVREVEKRLRELEEEVKRIIEEVEKKAQ

SEQ ID NO: 7769 - protein, 178 aa, Artificial Sequence; identical to SEQ ID NO: 7768
  Synthetic

SEQ ID NO: 7770 - protein, 173 aa, Artificial Sequence
  Synthetic
EELERLARIVDEAHKRSRDLLETSKREVEDAIDEIRARLEDSRRLVEEVTDEIRRIDKREDVRRLLEELKDHNRRVVEDVERLLRELERRNEEVVRRSKELLDDLERIIDSLDDSERLKELKKRLRDLIEENDRRAKESTKKIRDLAKELRERARRTEEEIKTLMKELEDRMK

SEQ ID NO: 7771 - protein, 173 aa, Artificial Sequence; identical to SEQ ID NO: 7770
  Synthetic

SEQ ID NO: 7772 - protein, 173 aa, Artificial Sequence
  Synthetic
KELEDLRREVEEIHKTSERLLRESDKLVEEAIRRIEELLERSKDTVTKAADEVRKADKREDAERLAKELLEINEKVVRDAERLVTEVRRHNTEVVERSKELVETIERRIDSLRDDERLKKLKEDVKRLIEENRKRAEDTKRKIEEEIRRLKEEADRTSEEIKKRADDLRRRAD

SEQ ID NO: 7773 - protein, 173 aa, Artificial Sequence; identical to SEQ ID NO: 7772
  Synthetic

SEQ ID NO: 7774 - protein, 177 aa, Artificial Sequence
  Synthetic
DELEEVDKLVKKVHEDSRKLIEDVDRKVREVVERSDRIIETVEELVERVITEVEDMLRKGESDEKVRKLAEELKRILEESMKTSEDLVRKLREIVRKSVEDSKRLVDELRDLIRRLRKDDRLRKVEKRIEDLARENEKRNRDLERKIEKLADESRKKNEDLKKRIEDLAKRLKDEAD

SEQ ID NO: 7775 - protein, 177 aa, Artificial Sequence; identical to SEQ ID NO: 7774
  Synthetic

SEQ ID NO: 7776 - protein, 177 aa, Artificial Sequence
  Synthetic
SSLETVREEVRRVKEESDRIIKEVRDRVEEVHKTSKRIIEEVEERVERVIREVREMLRRGETEEKVEKLVREVEKILEDSRRESERLAEEVRRILKESMDRSDELVRRLEELLRRLEKDERLDRVVEDIRRLAEESRRKNEELRKEVEELVKRNKELNEKLKKKVKELAKELRDEAK

SEQ ID NO: 7777 - protein, 177 aa, Artificial Sequence; identical to SEQ ID NO: 7776
  Synthetic

SEQ ID NO: 7778 - protein, 177 aa, Artificial Sequence
  Synthetic
DDLETVKRLVDEVIRTSEELIDTVRRLVEEVHRESERILKEVKKEVERVIREVEKLRRKGEDETKVRRLVEELEKILEEVVRRSRELVERLERIVRKSLEDSKRLVDDLRRLIAEMRKDKDLERVRKRIEDLAKELERRNRELEEDIKRLAKENEELARELKKEIETLAKRLEDEDR

SEQ ID NO: 7779 - protein, 177 aa, Artificial Sequence; identical to SEQ ID NO: 7778
  Synthetic

SEQ ID NO: 7780 - protein, 177 aa, Artificial Sequence
  Synthetic
SSLEEVDRRVKEVHKESDKIIREVDKRNKEVNRRSEEIIEEVEKTVEEVAKTVDDMLRRGEDERKVEKLVEELERIVEDSVRKSEELARRLKEIHKRSVEESERLAKELRDLIRRLEKSRELKRVKEEIDRLVEEDKEKNERSDKRAKETVDKNKKLNDDLEEKIRRLAEELRRRKK

SEQ ID NO: 7781 - protein, 177 aa, Artificial Sequence; identical to SEQ ID NO: 7780
  Synthetic

SEQ ID NO: 7782 - protein, 184 aa, Artificial Sequence
  Synthetic
SSLKEVERLAKELHEKSERIIREVEKLSRELHKTSEKIIRDVARRVKKLIDDVREVITRSGDEEVVRDVRRLVEEVVKEARDILDESLRVSEDLAEKSRRINRRSLEESKKIAEDMREILRRVEPDEELEKLRKRVEDLVRRNEEENKRTLRESEELVKENRKRNKELRDRVEKLVEELRRELK

SEQ ID NO: 7783 - protein, 184 aa, Artificial Sequence; identical to SEQ ID NO: 7782
  Synthetic

SEQ ID NO: 7784 - protein, 184 aa, Artificial Sequence
  Synthetic
KKLEDVKELVERLHRESEEIIRDVERRSRELAETVKKILEEVRRLSKKLVDEVREVIKRSGTDEVRDDVRRLVEEVADRSRKINKRVEEVVERVVKRSKEINDTSLKRSEEIARELKELLKRVDKDKDVDRVDREVEELVKENRERNKDTKRESERLAEKLRRDVEKSLRDSERLVKELRDRLR

SEQ ID NO: 7785 - protein, 184 aa, Artificial Sequence; identical to SEQ ID NO: 7784
  Synthetic

SEQ ID NO: 7786 - protein, 184 aa, Artificial Sequence
  Synthetic
KKLEDVKRLVDKLVTESEDIIRRVTEESRRLVEESRRVIEEVKKLSEELVRRVEKVIREKGEERVAKDVREEVERVVKTSRDINRETTELSKDIVRRARKINEDSLRVSEEIARELEKLLEDVDKDERVKKVKRDVEKLVRDSRELNKRTREESERLVEESERLNEESRKESERLVRELREKLR

SEQ ID NO: 7787 - protein, 184 aa, Artificial Sequence; identical to SEQ ID NO: 7786
  Synthetic

SEQ ID NO: 7788 - protein, 184 aa, Artificial Sequence
  Synthetic
SKLEDVERKVRELVRRSKRVIKEVERLVRELHKRSEDVLRKVKKDSRDLAREVKDVIRRKGTEEVAKEVRDLVEDVVRKSRKINDDVRKISEEIVKTLEKILKESLDLSEDIADKLRRLVDSVDKDKDVDKVRRDVEDLVRESRELNKRLKREVEELAKENRRRVEESRRESEELAKELRERLK

SEQ ID NO: 7789 - protein, 184 aa, Artificial Sequence; identical to SEQ ID NO: 7788
  Synthetic

SEQ ID NO: 7790 - protein, 187 aa, Artificial Sequence
  Synthetic
SSIEKVLRELEDIVRKIEERNKKSHDEVRRVVEEIKRRVKKSHEDVRRVVEKIDEDIKRKKDDKRVLKELLDTVKRVVERSKETSERLLREAEKAVRESKERSERSLRELEEMVRRATKRLVDERGKDDDEIRRVKERLDELIRRLEELIRRNVTELKRLIDDLRRLVEENVRRLKELIDKLREDVK

SEQ ID NO: 7791 - protein, 187 aa, Artificial Sequence; identical to SEQ ID NO: 7790
  Synthetic

SEQ ID NO: 7792 - protein, 187 aa, Artificial Sequence
  Synthetic
SEIERVLEELKKIVRRIKEKLKESHERVREVVERLKRRNEKSHRDVRRVAERIRREIEKKKSDKDVLDKLLDTIRRVVEESKKDSKKSLDELRRVVKESKETSDTLLEELERAVDKVRKILVRERGKDDKDIREVKKEADRLIKELRDLIETNEREMKKLIDELEELIRDNARRLEELIKRLEEEVR

SEQ ID NO: 7793 - protein, 187 aa, Artificial Sequence; identical to SEQ ID NO: 7792
  Synthetic

SEQ ID NO: 7794 - protein, 187 aa, Artificial Sequence
  Synthetic
SELEKVLEEAKRVVDEIKKKLEESHKDNRRTVEEIKRRNKESHERLKEAVDKLKAEIEKKRSEEEVLRELLKELERVVRTSEELSRRSLDELRKSVERSKRTSKRLLDELRRVVDEVKKILVKKRGKDDDRIREIAEELDKLIRELEKLVKRNADESDKLLDELRKLVEDNEREAERLIKELEDEAR

SEQ ID NO: 7795 - protein, 187 aa, Artificial Sequence; identical to SEQ ID NO: 7794
  Synthetic

SEQ ID NO: 7796 - protein, 187 aa, Artificial Sequence
  Synthetic
SEIERVLRELEKIVEELKRENEDVHRRVREVVKKLKDENRKSHEEVKRMVDKIREEIKRIRKDKEMLRRLLETLKRVVERSERESEESLKELRRVVEESKKRSEESLERLRRVAKRVKERLVEERGKDDDDIRRAAEKVDKLIKELEDLIRRNAEELRKLIEELEELIRRNRERLKRLIEDLKRAVE

SEQ ID NO: 7797 - protein, 187 aa, Artificial Sequence; identical to SEQ ID NO: 7796
  Synthetic

SEQ ID NO: 7798 - protein, 177 aa, Artificial Sequence
  Synthetic
SEMERVEEEIRRLLKELDKKARDVHEADKELVKENRKLADEVERDLRRLLEELRRDVNVEEVLKKVEEVIDKVRKVVEEIEKLSKDSNEKTKRVIEKVKEDLERVLRRVEEIARNNVDKKAIEDVLRKIKKLVEDLKRRIEEVLRESEALNEDTKRLIEEVLRDVRRTIDRLKKEAK

SEQ ID NO: 7799 - protein, 177 aa, Artificial Sequence; identical to SEQ ID NO: 7798
  Synthetic

SEQ ID NO: 7800 - protein, 177 aa, Artificial Sequence
  Synthetic
SDMDRVEKELEELLRENEELAKDIHRRDKELLEENRELVRRAEEELRRLLEELARDVNKEEIKETVERVIRDLKRVAREIEEESRRSNEETKELVKRVLEKTRKVIEEVRKVAKDNVGKEVIKDVLRKVRKINKETKELLRTVLEKSEKLNRDTKKRIKDVLEKIKRLIDELRERAR

SEQ ID NO: 7801 - protein, 177 aa, Artificial Sequence; identical to SEQ ID NO: 7800
  Synthetic

SEQ ID NO: 7802 - protein, 172 aa, Artificial Sequence
  Synthetic
KEREDIEDRVRKLIEELEESVRRSNETVKKLLRELEKLLEDSNRSVEELARDLRRKVKSELMEKVERLVKDLLRLSDTVAKKIRDVVKRLLEKSNESVKEIKKLLEKLEKEIRDDGDEKVLRKVEKVVEDLKRHNRKVNEEIKRVAEKLKRELEEVNKDIRRMARKLEEEVR

SEQ ID NO: 7803 - protein, 172 aa, Artificial Sequence; identical to SEQ ID NO: 7802
  Synthetic

SEQ ID NO: 7804 - protein, 172 aa, Artificial Sequence
  Synthetic
SEAEKIAEDVERLARDLERLLKESNDTVRTLIEDLRRSVEETAKEVRDLIEDLRRRVKSDKARKVEEVVRDLLRIVEESAEEIRRVLERLLEISNTVAKEIRRVVKELKEIVERRGTEEVLKELKKVADELRRILEDVNRRIRKVVDDAREHNKKVVEDVRRVAKEARDRVR

SEQ ID NO: 7805 - protein, 172 aa, Artificial Sequence; identical to SEQ ID NO: 7804
  Synthetic

SEQ ID NO: 7806 - protein, 181 aa, Artificial Sequence
  Synthetic
DEVEELERRIEKLAREVKKEIKDALRRNKRLIDEVKKIIEDVNRENRRLMEEVKRLIDAGVPKEEITEIVERVVEEVRRSDEKVARIVEDVADKIRRTNEDLERIVRKVVDEVRKMLERLPRGDELRRIAKRVEDLAEELKRLLDKSRETSERLVDELRKLLRESNETSKELVKRLDDRRK

SEQ ID NO: 7807 - protein, 181 aa, Artificial Sequence; identical to SEQ ID NO: 7806
  Synthetic

SEQ ID NO: 7808 - protein, 181 aa, Artificial Sequence
  Synthetic
SEAEKLLKEAKRLADEAKKIIKRAHEENKRAADEAKKIIEEANRENEKLAREAKKLIDAGVPKKEAADIAKKAADEARRSDEEADRIAEEAARRAKETDERAEKIARRAAEEAKEAAKKASRSDEAREIEKRVRELAEELKKLARESNEASKELAKELKELAERSNKTSEDLAKELEDRAR

SEQ ID NO: 7809 - protein, 181 aa, Artificial Sequence; identical to SEQ ID NO: 7808
  Synthetic

SEQ ID NO: 7810 - protein, 181 aa, Artificial Sequence
  Synthetic
SEVERLLEEIKELAKRVKDIIKEVNKENKRLVDEVKDRIRKINEDNNRLVETVKELIRKGVPKEEIADIVRRVVKTAEDSNRKILRIAEEVVRTARESDERVREIVRRVVEEVRELLKRLPPGKELERIEREVERLADELRKLLEESNESTERLAEELERLVRESERDSRRLAEELKRRLD

SEQ ID NO: 7811 - protein, 181 aa, Artificial Sequence; identical to SEQ ID NO: 7810
  Synthetic

SEQ ID NO: 7812 - protein, 181 aa, Artificial Sequence
  Synthetic
SELEKLKEEIKKLADDVKRIIKKVLDENRKLVDDVKKIIKKVTEENRKLVREVAELIKAGVPKKDIERIVREVVKKMEKSDKEVAEIVEEVVRRMRTSDREVKRIVEEVVRRVKEILKEAKPGKELEEIDKDVDRLIEELKRLLEDSNRDTERLAKELKDLLDESNKDSRRLAEELKRRTD

SEQ ID NO: 7813 - protein, 181 aa, Artificial Sequence; identical to SEQ ID NO: 7812
  Synthetic

SEQ ID NO: 7814 - protein, 181 aa, Artificial Sequence
  Synthetic
REVDELRKEIRRLAKEVKDIIKKATERNEELVRRVKEIIKEVNRRNRKAAEEVKELIRAGVPKEDIRRIVERVVREVRRTNDDVRRTVEEVVKDAERTDEELKRIVDDVVRRVRELLKELPRGEDLERIRKEVEELARELEKLLEESNRETKRLARELEKLLEDSRRSTEELAKELEEAER

SEQ ID NO: 7815 - protein, 181 aa, Artificial Sequence; identical to SEQ ID NO: 7814
  Synthetic

SEQ ID NO: 7816 - protein, 173 aa, Artificial Sequence
  Synthetic
REAEEVDKEIKKIVRDVRERIRKLNEDNRRIAEKVKREIEELNKRNRDTAKEIEKRGDKDLVDKVVKDVKKSNEDVKEIVKEVAKRAKESNDEAEKIVRDVVRRAKELLRRLPPGDELREIERDVDRLVEELRKLVEDSRRTTKRLVEELDELVETSDRETEKLVRKLRERER

SEQ ID NO: 7817 - protein, 173 aa, Artificial Sequence; identical to SEQ ID NO: 7816
  Synthetic

SEQ ID NO: 7818 - protein, 173 aa, Artificial Sequence
  Synthetic
SDLERVLREIKKEVDDVKRLIRELNERNRTIVEEVKKLIEKLNRDNERIVREVKKRGDEKLVEEVVRTMKKSNDELRKIVEEVARRAKRSNEELEKIVREVVRRVKELLKEVREGEEVKRIEDEVRKLVRELEELLKRSDDDTERLVEELKELLKRSEKKTRELAKELRDRRR

SEQ ID NO: 7819 - protein, 173 aa, Artificial Sequence; identical to SEQ ID NO: 7818
  Synthetic

SEQ ID NO: 7820 - protein, 173 aa, Artificial Sequence
  Synthetic
SEVDEVLKRIKEEVDRVKEEIKRLNKENNDIVRKVKKEDRDIVETIRKIAEDVKRRGDRDFVREVVKEVRRLLRESREIVKEVVKRMEDSNRRARDIVRRVMERAKKLLEDLPEGDELREIDERVEKLVKELEETLRESEKDTKRLVEELEKSLKETEDDVRRLVKELKDRDD

SEQ ID NO: 7821 - protein, 173 aa, Artificial Sequence; identical to SEQ ID NO: 7820
  Synthetic

SEQ ID NO: 7822 - protein, 173 aa, Artificial Sequence
  Synthetic
SKLEEVLRDIRRIVEEVKDEDRRIVEEIRKIAKDVKEKIKELNRENNRIVREVKERGDEDMVRKVAEDAKKSNEDVKRIVDKVVEDVKRLLERSRKIVDDVVKRAKELLERLDPGDELRRIDEEVEKLVKELEKSVEDTKREVDRLAKELEDLVRDSKRDTDRLVKELKDRTD

SEQ ID NO: 7823 - protein, 173 aa, Artificial Sequence; identical to SEQ ID NO: 7822
  Synthetic

SEQ ID NO: 7824 - protein, 174 aa, Artificial Sequence
  Synthetic
REVEEAADDLRRLIEENERSVRESKRTLEELIKENEDSVRRSEKSLRDLIRELEEEGVRERVVEELKRIVEKIVRDSRKSVDELRRIVEEVVKESKKSVEELERIVREVIRLLEEGAPVEELLKRVRDVSEESKRLDRKLNEDVKEVSKDSKRRDRELNERVRKVAEDVKETER

SEQ ID NO: 7825 - protein, 174 aa, Artificial Sequence; identical to SEQ ID NO: 7824
  Synthetic

SEQ ID NO: 7826 - protein, 174 aa, Artificial Sequence
  Synthetic
SEVEEAAERAKRLIDKLKESADRSEKTARDLIRDLNRSTEEIAREARKLIEELKKAGADSKAVKEAAEIAKRAIDAARKSDEDAARIAKRAAEASREAVKRAAEIAERAIRAAEKGADVKKALEEVRRAAEEAEKADRKLNKEVKEAADRARELNKKLADEVRKAAKEAKEKAD

SEQ ID NO: 7827 - protein, 174 aa, Artificial Sequence; identical to SEQ ID NO: 7826
  Synthetic

SEQ ID NO: 7828 - protein, 174 aa, Artificial Sequence
  Synthetic
SEVEEAAKEAKRLIEELNRSTEKIARDAKKLIEELRKSAKESADSARKLIEELKKRGAEEEAVKRAADIAKEAIDRSRKLVKEAEEIAREAIKKAERTDEEAARIAKRAIEAAEEGADVKKALEDVKRAADKAKEDNKKLLKEVEDAAREAKRADRELNKRVKEAADKAKEEAN

SEQ ID NO: 7829 - protein, 174 aa, Artificial Sequence; identical to SEQ ID NO: 7828
  Synthetic

SEQ ID NO: 7830 - protein, 185 aa, Artificial Sequence
  Synthetic
DELEEVRERIERLIRRSEELNKKVEKENKELVDRSREINRRVLDEIRRLIREVERILEEEGGETERVDRMVKEVVKRIEKLLKESKDVTEKIARDMRDTDRKSKEATDRVVTEIKRLLEEISRTVREEEVRKLEEEVRELIKKLERSNRELNKETEKLVEDLKRSNKELEEDVERLARKLEEELR

SEQ ID NO: 7831 - protein, 185 aa, Artificial Sequence; identical to SEQ ID NO: 7830
  Synthetic

SEQ ID NO: 7832 - protein, 185 aa, Artificial Sequence
  Synthetic
KELEEVEKRIEELARRVEERIKKVIEDNRRLVEESEKINEEVRREVKRLIDEVKEIIRRKGGETEEVRRVVEKVVKEIRDLLKRSRDVTREIVERMRRTDERLREEVERVVEDMRRLLEEIRRTVEEREVRRLEERVEELARRLEELLKESNTRSEKLARDLEKSNEDLEREVEELAKRLEEELK

SEQ ID NO: 7833 - protein, 185 aa, Artificial Sequence; identical to SEQ ID NO: 7832
  Synthetic

SEQ ID NO: 7834 - protein, 185 aa, Artificial Sequence
  Synthetic
DSVREVAERIDRLVKESERINREVIETNRRLFKESEKINDKVRKEIEDLIRRVKEIIDRDGGETEEVRKLVEDVVKRLEELVRESKRVTDEIVRRMEKTDEESKRVTDEVVKTAKDLLEELRKTVREEDLRRLKKKVDDLARKLEESNRRSNEDSKRLARELEESNKDLKRRVDELARELEERLK

SEQ ID NO: 7835 - protein, 185 aa, Artificial Sequence; identical to SEQ ID NO: 7834
  Synthetic

SEQ ID NO: 7836 - protein, 185 aa, Artificial Sequence
  Synthetic
DELKEVEERIERLIRESKRVNEEVKETNRRLVRESKEINKRVHDTVRRLVEEVRRIIDERGGETEDVKRVVEEVVRRARELSRRSDEVTKDIARKMRDTDRESEEITRRVVEELRRLVEEIRKRVDEKEVRRLREEVEKLAKELKRSNDESNKESERLVEDLKRSNTENSKAVEDLARELKERLK

SEQ ID NO: 7837 - protein, 185 aa, Artificial Sequence; identical to SEQ ID NO: 7836
  Synthetic

SEQ ID NO: 7838 - protein, 183 aa, Artificial Sequence
  Synthetic
RSVEELKKKVEDLVRKLEELVKDSKRESKELVDDSERLVKELEDDVRRLVRELRERVRRRRGEELEKIVDEVVRRAERLLEEVKKSSKKVADELERTNREVEEIVRKVVEDARKLLEELKRVDDERIIKRIEEEIEELIRRVEEIIRKVIKENRELVERDREIIKTVLERIRELIKEVTDRIE

SEQ ID NO: 7839 - protein, 183 aa, Artificial Sequence; identical to SEQ ID NO: 7838
  Synthetic

SEQ ID NO: 7840 - protein, 183 aa, Artificial Sequence
  Synthetic
SEVEKLEEEVERLVRDSERLNKRLEDRVKKLVEDSERLVRELEKTVRDLVKKLKDDVRRRPGEDLDKIVRKVVREAEELLKEVKKSSEDVADTLRRLLEESKKSSKRVAEEARRLLEELKRVDDERIIRRIRKEIKDLFDDDKRISEEVERRIERLFKEDKKIIEDVEREIRRLIKEVEDRIR

SEQ ID NO: 7841 - protein, 183 aa, Artificial Sequence; identical to SEQ ID NO: 7840
  Synthetic

SEQ ID NO: 7842 - protein, 183 aa, Artificial Sequence
  Synthetic
DDVERLERRVRELIKESEKLVDDLRKDVERLVKKSRDLNERLREDVERLVKELEDRVRKRRGEELEKIVKDVVDRARELLERSRRSSKEVAERLKELLERLKKSSEDVAREMERLLEELKRVDRKEIIDKVRKEIEDLVRKDKEIIDEIRKEIRRLVEEDEEISRRVEETIRRLIREVAERIR

SEQ ID NO: 7843 - protein, 183 aa, Artificial Sequence; identical to SEQ ID NO: 7842
  Synthetic

SEQ ID NO: 7844 - protein, 182 aa, Artificial Sequence
  Synthetic
SEVDELRKRVEELVRRSRKLVEEHRRKVRELVEESRRLVEELRRDVERLVKKLRDELREVREVVKRVEEELEKLVREVKRSVEESKRRLEDLDRRLRETTKEAEDLLRELLKRVEDLKDDERARDLIEEVRERADRVAKKDEDVIRKSEEDTERVVREDKKIIDRVRKDVEEVIRRVEEETR

SEQ ID NO: 7845 - protein, 182 aa, Artificial Sequence; identical to SEQ ID NO: 7844
  Synthetic

SEQ ID NO: 7846 - protein, 184 aa, Artificial Sequence
  Synthetic
STLERLTEDVKRVIREVEEVIKKLKEEVDKSLEDVRRKIEESRKETKRVIDEVKRRIKDKRKDKEVLKELVDRVVRVLEEANRTLEKVVKEHEDSLERVDRTLKKVVDDARKKLERVIERLRDENVSRVEELAKRLEELIRRLEELVDRLRKELKESIEEIRKRVRDHKEESKRLIRELDEEVK

SEQ ID NO: 7847 - protein, 184 aa, Artificial Sequence; identical to SEQ ID NO: 7846
  Synthetic

SEQ ID NO: 7848 - protein, 184 aa, Artificial Sequence
  Synthetic
STLERLDEDVKRVAREDTELIKESEERTKKSADDVRKKIEDSRRTTDKVVTDVEDIIEKKREDKRVLKEVVDELRRRLEELNRRLREVVEEHKDSLRKANRDLEESSRRSEERLRRVIETLRRNNVSRVEELAEKLKELLKDSERRVDEHRRKSEESTREIEELVKRHEDRSRELIKRLDEEVR

SEQ ID NO: 7849 - protein, 184 aa, Artificial Sequence; identical to SEQ ID NO: 7848
  Synthetic

SEQ ID NO: 7850 - protein, 184 aa, Artificial Sequence
  Synthetic
SLLEKLRRRVDEVIKRDDELIEESKRRTDEALKRVEERIRKSLEETKEAVDRVRDIIRRVRDQKEVLAKVVKELERIARELNRRLKEVVEELRRILEKLNRDLKKSSEDSKRELDRVIEALERGNVSRVDELRERLRKLLEDSEEKVKRHKDESDKLIKDIEDKVKRHEDESRRLIRELREELK

SEQ ID NO: 7851 - protein, 184 aa, Artificial Sequence; identical to SEQ ID NO: 7850
  Synthetic

SEQ ID NO: 7852 - protein, 176 aa, Artificial Sequence
  Synthetic
SEADELRKKLEETNKDIKRRVEELKRRLEESNERIEELVRRNEKKSKDLLDDVRRRGVDEKVLKKIEEVVDRNRKLLKEALDVNKKVVDEIEDRLRRVLDKNRKVVEEVERELRDSSEEVLKRLDKKLEDSRRDVERVEKEVEELLRESEERVKRVVETVDKTDEEVKKDVDDKRR

SEQ ID NO: 7853 - protein, 176 aa, Artificial Sequence; identical to SEQ ID NO: 7852
  Synthetic

SEQ ID NO: 7854 - protein, 176 aa, Artificial Sequence
  Synthetic
SEAEDLEKKAEDTNREIKKIAEELKKHAEDTNREIEKKVEDLRREAERILREVARKGVDEDVLRAIEEVIKTIEDLARKVLEDNRKVVEDVERLVEEVLKRNAKVVDEVREKARDSSEEVLERLERKLRESKREVDRLAEKIKKLNDDSRKRVDEVVERVRRLLEDVKRKVDEARR

SEQ ID NO: 7855 - protein, 176 aa, Artificial Sequence; identical to SEQ ID NO: 7854
  Synthetic

SEQ ID NO: 7856 - protein, 178 aa, Artificial Sequence
  Synthetic
DEVERLEEDVERSIRDSEKVVRDSERRVRESNEEIRRLIEESDKDVKRLIDEATKKSGESADLLRELREVVERVKRLNEKLLKENREASEEVRKINEDLVREDRRVVKEVKETVRRVDKREVIRELKERLKEISDRLKKRSEKSVRDLDDISRKIVRRSEDTVRKLREIARRLDERTK

SEQ ID NO: 7857 - protein, 178 aa, Artificial Sequence; identical to SEQ ID NO: 7856
  Synthetic

SEQ ID NO: 7858 - protein, 178 aa, Artificial Sequence
  Synthetic
REKDELEEAVRRSNKRLKDILEKSRKDVEESIKRSEELLKRSDDEARKLIEEMTRKSGEEADVLRTLREVARRAKELNKKLLEDDREVIRRVEEINRELLERNTRVSDRVREIVERTTDRKVIEDVLRELKKITDEIEKESRRSLDELRRISKELEDDSRRTLEELKKIVKELKDRET

SEQ ID NO: 7859 - protein, 178 aa, Artificial Sequence; identical to SEQ ID NO: 7858
  Synthetic

SEQ ID NO: 7860 - protein, 178 aa, Artificial Sequence
  Synthetic
DEDRRLEEEVRKSIEESERVIERSEEEVRRLIEEARTLLEDSRRKVEDLLREMTRRAGDKADLLKELKRVIEEVKRLNEKLLKELEDVIERVIRINKRLLDEDRRVVERVIRIVRRTTDREVIEKVLRELREISERLKRESERSLRELEEIARDLLRRSRRTVEELRRIAEELVKRAK

SEQ ID NO: 7861 - protein, 178 aa, Artificial Sequence; identical to SEQ ID NO: 7860
  Synthetic

SEQ ID NO: 7862 - protein, 187 aa, Artificial Sequence
  Synthetic
DELEEVLERIEREIRRVSERSEELSRRNEKIIREVEEESRRILEEIKREIDEVKKRAERVDKDTLRRIVETVVRRAKELVDRSKKITTKVVEELKRSMEESRKISEEVARRAKKLVDELRDRLRSEEAKKLVREVEETVRKLVEELREMNKRHEDKNRELSDRLREIDKRLEDEVRKLVEELRKKVE

SEQ ID NO: 7863 - protein, 187 aa, Artificial Sequence; identical to SEQ ID NO: 7862
  Synthetic

SEQ ID NO: 7864 - protein, 187 aa, Artificial Sequence
  Synthetic
DELEEVEKEMERIIREVERKLREVNERIKEIIERVIRESKEILDELKRIIDEVKKRAERVRKDELKRDAERVVKRLKDLVDRSRRITEKVVREAEKLNEDLHRDLERVVRTLKKLLDDLRRRLDSEDAERLVRELRKKVEELKRRLEELNRDDKRTIDELVKTLDKIDRELRKTVEDLVRDLERDVK

SEQ ID NO: 7865 - protein, 187 aa, Artificial Sequence; identical to SEQ ID NO: 7864
  Synthetic

SEQ ID NO: 7866 - protein, 173 aa, Artificial Sequence
  Synthetic
SKVDEVLKDVRRISEESERRIRELNDRSRKISKESEDRIRELLRRLEEIVERLKRTNDRDAVRKVVEVLRRVLEEVRRSVDEVRRLLEESLKEIERSVREVEKRAKTVLEEVKDDEKAEELRKEVERLIRENEELVERHRKTVEELRRRNEELVKRLEDTVRKLEKELKEEAD

SEQ ID NO: 7867 - protein, 173 aa, Artificial Sequence; identical to SEQ ID NO: 7866
  Synthetic

SEQ ID NO: 7868 - protein, 173 aa, Artificial Sequence
  Synthetic
SELDRAADRLRKISKRSEEEIRKLNEEVKKISKESEEKIRRLNEEVKRIVEEVKRRNDERVVKEVERRLERSLEEVEKSVREVKEVLERSLRKVEDSVRKVEDVLRKVLEEVKSDEKAKELAEIVEKLIRDNRRLVEEHEESVRRLEDRNRKLVEDHERTVRKLIKELRETRR

SEQ ID NO: 7869 - protein, 173 aa, Artificial Sequence; identical to SEQ ID NO: 7868
  Synthetic

SEQ ID NO: 7870 - protein, 173 aa, Artificial Sequence
  Synthetic
SELEKLLRDLEEIARKVEEEIRTLNEDVKRISKESKERIDRLKEELKKIVDDLKKRRIKEAVDEVKKRLEEVLREVEESVERVEREAKRSLEEIERIVRRLEKDVKKVLEEVKSDERAEDLRREVERLIRELRKLVREHERSVRKLIEENRRIVRELEELVKKLRKELEDTLR

SEQ ID NO: 7871 - protein, 173 aa, Artificial Sequence; identical to SEQ ID NO: 7870
  Synthetic

SEQ ID NO: 7872 - protein, 173 aa, Artificial Sequence
  Synthetic
SELEEAERRLREIVRKVEEDSRKLNEELKREVDEVRRRSEELNKRVRDEAERVRKENKRELVRKLEDEVRRSVEESKKISEDLKRRLEESVKESERISEELRKRLREVLEEVKKDEKAEDLARIVKKLVEDLKRLNKRHKESVDELVRRLEELDREHERTIRRMIEELRETER

SEQ ID NO: 7873 - protein, 173 aa, Artificial Sequence; identical to SEQ ID NO: 7872
  Synthetic

SEQ ID NO: 7874 - protein, 179 aa, Artificial Sequence
  Synthetic
KEVEKLLEDLKEVARRVSEEIKRLLKELKEVSKRSEDRIRTSLERVKKVVEDVLREADEFRSDKERLREVVERLEEILDRANKEVRDSVKDLEKILRDVVKEVEKLVKDLEEIVRKIIEDVKDVRELKEEIEKLLRRLRKLVKELKEEIKKIVDRNRKLVREHEARSEELKEEIRREVE

SEQ ID NO: 7875 - protein, 179 aa, Artificial Sequence; identical to SEQ ID NO: 7874
  Synthetic

SEQ ID NO: 7876 - protein, 179 aa, Artificial Sequence
  Synthetic
SEKEELLKRVAEVSKKSKDRARELNERLKKVVDEVLETIRKLNEDLKRVVERVKEKIKDKKDDKRVVKELVDKLERILERSIEETERLLRELKKILEESNRELEKSVEELKRIADRIIEAVDKVKELRKEAKRNVDENREVVKENKRTTEKLLRDLDRILKENKRTVEKLVRELREEVR

SEQ ID NO: 7877 - protein, 179 aa, Artificial Sequence; identical to SEQ ID NO: 7876
  Synthetic

SEQ ID NO: 7878 - protein, 179 aa, Artificial Sequence
  Synthetic
DEKERLLEDVKRASEDSERRIRELNDRVRRVSEESERRIRKLNKELRDEVEKVLREIDRIRKDKDVLRDLVRRLEEKLRRSNEEVRKSVEELERILRESNERVRKSVKELKERAERVIEAVDKVDELREEIEKNLRRNEELVKKNKKDSEDNKRDNDRLVKENEKTTEDLLRRAKEEVD

SEQ ID NO: 7879 - protein, 179 aa, Artificial Sequence; identical to SEQ ID NO: 7878
  Synthetic

SEQ ID NO: 7880 - protein, 178 aa, Artificial Sequence
  Synthetic
DETETVEKKLRDVLERVKKDSEDSREELKRVHKRSEELSRRSNKELDDVLDEVRRIIERSTDKREVEKVVRELREVAKRIKDKNRKSLKESEDVVRRVTERNAKAVKELEDVLRRAIEEVKDVEELKKRLDEMRKTIEKLLEDTKEELRELIERNKKLLDDTARRAEEIIKEIEDRSK

SEQ ID NO: 7881 - protein, 178 aa, Artificial Sequence; identical to SEQ ID NO: 7880
  Synthetic

SEQ ID NO: 7882 - protein, 178 aa, Artificial Sequence
  Synthetic
SREEKVLEDLDRVLKRVTDLSKESLDEVERVHEESERLIRDSNRVLRDVLEKVREIITKSTDKSTVKKVVEDLKRVLDEVKKKNEESLRRSEEVVRRVIEKNRKAVEELRKVVEEAIRRVKDVKELKDRAREVIRRIEKLVEDTERALRDLIRKNEELLKRTEEELKRAEEDIRRKSK

SEQ ID NO: 7883 - protein, 178 aa, Artificial Sequence; identical to SEQ ID NO: 7882
  Synthetic

SEQ ID NO: 7884 - protein, 186 aa, Artificial Sequence
  Synthetic
SDAERVLREIERLLEELKELVERVVRKSEELLRRAKRVNEEVNREIKKLADELEEVIRRKGGESEEVERTLREVTKEIRRLVRESEKLAEDIVRTSDKLVEDLREMLERVVREARKLVEDVERRGVPKEVVDTLRRVVEEITRELEELLERLRRVSEEIRRTLEELLERTRRLVEEIERKLREALK

SEQ ID NO: 7885 - protein, 186 aa, Artificial Sequence; identical to SEQ ID NO: 7884
  Synthetic

SEQ ID NO: 7886 - protein, 186 aa, Artificial Sequence
  Synthetic
SELDDVRRKIKRLIDELKRVNEKVNKDSEDLVREVERVNRDVNRRVKELLEELKRVIDERGGETEEVRRILKKVVEEARRLVEKSEDLARKVVKRSNELVKESKDLAKEVVERIRRLVEKVERDGVPEEMVERLRREVEKLERELRELLRRTEENSRRAKERLEDLLRRTRELVKRIEERLREELR

SEQ ID NO: 7887 - protein, 186 aa, Artificial Sequence; identical to SEQ ID NO: 7886
  Synthetic

SEQ ID NO: 7888 - protein, 183 aa, Artificial Sequence
  Synthetic
SDVERLKKRVDELAERLKRLDEELKKEVDRIETELRELLKRHEDRNRDISRRLAELLKDARERELEEIVREVVERSERTLREVEEIVRRVVEDARRLVRDSERISKEVEERMKRLVEEVKDVDKKEIVERILEELDRLMEKVERVSREILKTIEKLARDIKKRIEEVTRESERLAREVEEALR

SEQ ID NO: 7889 - protein, 183 aa, Artificial Sequence; identical to SEQ ID NO: 7888
  Synthetic

SEQ ID NO: 7890 - protein, 183 aa, Artificial Sequence
  Synthetic
DEVETLEKRVRELERRLEELNKELREEVRKIVERAKELDKRHKDDNERIEKELRELLRDVRDERLKEIVRKVSDESRKTLEDSRRISDRVKKELDKLVRTSEEISKRVADRMRELVDRIRRVDKDEIAKRILDEIDRLMEEAEKVTRDILRKVEELLRRVEDASRRVTKKSRELLKKVKEDLR

SEQ ID NO: 7891 - protein, 183 aa, Artificial Sequence; identical to SEQ ID NO: 7890
  Synthetic

SEQ ID NO: 7892 - protein, 183 aa, Artificial Sequence
  Synthetic
SEVETLEKAVRDIVERLKDLNRRLEKEVRDAVKRLRDLLREHEKRNREIAKDLTDKLRKATREELKRIVERVVEASKETLEEVDEIVRRVVREAKRLVDESERISREVVKRLEDLVREAKDVDRKEAATDILRKAEELADEVRRATEEIAKEIRRLVKEVEEVIKDVTRKSDELLKRVADAAK

SEQ ID NO: 7893 - protein, 183 aa, Artificial Sequence; identical to SEQ ID NO: 7892
  Synthetic

SEQ ID NO: 7894 - protein, 187 aa, Artificial Sequence
  Synthetic
DELETLADVVRKLIERSRDLLRRHEKRNDEIKKRLDELDRELKERAEEIKKRLEELLRRRDEDEIREVIRELEERLEKLLEDSRRVSKEVAERLDRTVKDVRKTIEESEKLLRELLEEVERKKDDERAEDVVRDVLRKAEKVVEEDERLIRRVTEESDRVLDRVEKETKKIVDEAKRMLREVEERIR

SEQ ID NO: 7895 - protein, 187 aa, Artificial Sequence; identical to SEQ ID NO: 7894
  Synthetic

SEQ ID NO: 7896 - protein, 187 aa, Artificial Sequence
  Synthetic
SLIDELRERVKEIKKRSEELLKRHEDENRRIVKRSRELLKKLRDVVRDIIRELRKELEDDKKEEIERVIRELKKRLEELVKEVERSSKELEKTLKRTLEEVRKTSKEVEETLKRLLKEVDDKKKDERAEEVVRRVLKEAEDLLRKDEKILRDVTRRSEKALREDEELAKRVLDEMRKVLEDVKRKSK

SEQ ID NO: 7897 - protein, 187 aa, Artificial Sequence; identical to SEQ ID NO: 7896
  Synthetic

SEQ ID NO: 7898 - protein, 187 aa, Artificial Sequence
  Synthetic
EELERLAESVRRIKERLKKLDREHEERNKRIVETSRKLLEELEREVRKIEEDLKRLLDERKDDEIRRVVEEVVRRARELVERIDRSSREVEKKLRETVKESRRVTEEVARRADKLLEDLERKKDDERAEEVVRDILRRLEELMRRAEEVTKKLTDDSRRLLKEDEDLVREIEERLRRLLKEVKERVD

SEQ ID NO: 7899 - protein, 187 aa, Artificial Sequence; identical to SEQ ID NO: 7898
  Synthetic

SEQ ID NO: 7900 - protein, 179 aa, Artificial Sequence
  Synthetic
DEDRDVKREVKKVHEDSARTVEKLDREVEKVHEESERTVRKSEKEAKEVLDRVKDIVKKKKDDKKVLKEVVEKLKRDLEELNKELRRSVKELKERLDKVKKDIRDSVRRLDEALKRVVKDNDKVEELKEDLKRILKENEDLVRELEKKLDDIMRENEELVREHEEKSKRIVRELEEEVR

SEQ ID NO: 7901 - protein, 179 aa, Artificial Sequence; identical to SEQ ID NO: 7900
  Synthetic

SEQ ID NO: 7902 - protein, 179 aa, Artificial Sequence
  Synthetic
EEKERADRKLEEVHKESKKTVEDSDEALERVHRESKRTVEESRKTLEDVVREVKRIVEEKREDKDVLRKVLEDLKEIVERLNRELEKSVEKLERVLEKLNRELEESVRRLKELLERVIRENSDVKELRRKVEEILKRNEEEVRKHKEKSKKIVEDNRRLVKRHKEESEEVVRDAAREVK

SEQ ID NO: 7903 - protein, 179 aa, Artificial Sequence; identical to SEQ ID NO: 7902
  Synthetic

SEQ ID NO: 7904 - protein, 179 aa, Artificial Sequence
  Synthetic
DEDREALKEVEDVHRRSEEKVRESRRRAEEVHKESKKIVDELRRRSEESLKRVEDEVRKKRSDKDTLRDLVRRHRDSNRKIIETIRRSVKEVKKLLKELDEELEKSVRELEKTLKRVVDDNDKVEELKDELRKIVETNRELVRRHHETVKKIMEENERLVRELEKRLEEADRKLEEEVR

SEQ ID NO: 7905 - protein, 179 aa, Artificial Sequence; identical to SEQ ID NO: 7904
  Synthetic

SEQ ID NO: 7906 - protein, 184 aa, Artificial Sequence
  Synthetic
SLEEEVRRIVDDIRRTNKELLDRSARRAEEIERRLEELLRRSRERADRIREEMRRMLEKAGDSERVRKLVEDVEKVLKEDIRTNEELLRRVRKVLEEDIKINEDLLRESEEVLKKVIEDVARTTDKKTVDDVLKRLKEENDRSREEIKRSNEESDRVLDEVRKRSEDSNRRLDKIVDEAKKELK

SEQ ID NO: 7907 - protein, 184 aa, Artificial Sequence; identical to SEQ ID NO: 7906
  Synthetic

SEQ ID NO: 7908 - protein, 177 aa, Artificial Sequence
  Synthetic
DELEEVLERLREIAERVIKESKEINDELKRSSERSKRESDKVNKRMREIMKELKDRGDKEVVDRVIKELEELVRRTEEILDRDNKELERLVRRSEEIARRVIEELKKLVEDVERGGIDEEDVRRIRKLVEDIARRLKEIIERNRESVRKSREENKKSIEENRRSVKKIADEAREDAR

SEQ ID NO: 7909 - protein, 177 aa, Artificial Sequence; identical to SEQ ID NO: 7908
  Synthetic

SEQ ID NO: 7910 - protein, 169 aa, Artificial Sequence
  Synthetic
EETERLIEAVKRIAEEVRKTIERLMERVEKTTRESEELNRRLNRELDREVEEVERANKEEAVKRLKEILERVLEESKRIVEEDNEEAKRVVEEVERIVRELKKFAKKVVDDRRSEELEKVVREVAERLDRLLKALRDLVEESARRNKRLIEETDRRIKEIAERLKRTSD

SEQ ID NO: 7911 - protein, 169 aa, Artificial Sequence; identical to SEQ ID NO: 7910
  Synthetic

SEQ ID NO: 7912 - protein, 184 aa, Artificial Sequence
  Synthetic
SEAERLLEELERSTRESAKRIRDLADKLRRSSEESVKDIERLTKELEEAVRRVLDKIRKKKSDKDEVRRLVKELTDILRESHKRVKESIDRDREILEEVIRRVKESIKEDKRRLDDVLAKLRKAPEEVVRRLAKVVEESRRTNEKLLRDLEKLVEDSKRRNDELLEKNARRIKEVEDELKRETK

SEQ ID NO: 7913 - protein, 184 aa, Artificial Sequence; identical to SEQ ID NO: 7912
  Synthetic

SEQ ID NO: 7914 - protein, 184 aa, Artificial Sequence
  Synthetic
KDAEDLLRRLRESTKRSEDLVRKLLEELERSSRESEKLIRELTDRLDKVVKDVERRIREKREDKEAVERLVRTLREILERSHRDVERSIREDRKIVEKVIEDAERLVREDKEELRRVLEEIRRVPEEVVKRLEKAVKESEDRNKELLDRLRKRVEDSKRRNDKLLKENRKRIEEIKRRLDELLR

SEQ ID NO: 7915 - protein, 184 aa, Artificial Sequence; identical to SEQ ID NO: 7914
  Synthetic

SEQ ID NO: 7916 - protein, 184 aa, Artificial Sequence
  Synthetic
SKAEKLLRDLEKSTEDSERRIRELLERLRESSRTSEELAKRLEEEVERATREVADKIRKKREDEKTVRELVEELRKILEEVIKDAKRLVEEDKRILEEVIRAVERSIKEDRDILEKVLEDIREVPKEVVDRLREIVERSREKNRKLLEDLRRAVEESKKRNEEVLRKLKKKVEEIEEELKERLR

SEQ ID NO: 7917 - protein, 184 aa, Artificial Sequence; identical to SEQ ID NO: 7916
  Synthetic

SEQ ID NO: 7918 - protein, 184 aa, Artificial Sequence
  Synthetic
SEIEELLKTLKRSTEKSEEDARRLLEELTRSSEESVKRLRDLTERLKEVAKEVIERIRRRKEEKETVEELIKELEKRLRDSHEEVRRLIEEDRKELDRVIEAVDRSVKRDKRILEEVLKEVRRADKKVVDRLKRMVDESRKRNEELLKRLEKRVRESRKRNDELLEENKRVIDKIREELERLRK

SEQ ID NO: 7919 - protein, 184 aa, Artificial Sequence; identical to SEQ ID NO: 7918
  Synthetic

SEQ ID NO: 7920 - protein, 188 aa, Artificial Sequence
  Synthetic
SLLEEIEELVRRAIDTVRRSSEELKRLVDRVNETNKRSTEELRELAERVDRRLDKLLKEIKEGKMVDKLRKLIETIRRVAEEVIRLSEEADRRDSELAKRVLDESRKLLREIERVAEEVRRVVTENDKSRELVEKLKRELRRILEEVRRLNEELMKEIRDTNRKSEKLNRDLKEEIKKILEDVEREVR

SEQ ID NO: 7921 - protein, 188 aa, Artificial Sequence; identical to SEQ ID NO: 7920
  Synthetic

SEQ ID NO: 7922 - protein, 183 aa, Artificial Sequence
  Synthetic
DEAEKLKERLKRVLRRVREINRKLLDELRKSNEKVRRINKRLKEELKRVLDEVEKRVREDKNKSRVKEVLKELEEVLRTVDEMSKRSLKENERSLKEVIKRSEKSLKELEDVLRKVEKDVESIDEKLVREIEEMVRRLKEEAEKLSEEIRKIVRESRETLKKLSDEVRRLVERAEEKARKDTK

SEQ ID NO: 7923 - protein, 183 aa, Artificial Sequence; identical to SEQ ID NO: 7922
  Synthetic

SEQ ID NO: 7924 - protein, 178 aa, Artificial Sequence
  Synthetic
KEDDDLRREIERLLRELEKMNRKVLEDARRLLEELRRVNKEVAERIKDLERRLKDVVEKKGGKTEEVERILRTVLKEIRDLVRRVAEENKRAVKEIEDLVRRVEELNKEVVRRIEDLVRKRLDERVKEEVDEIRDRLRKSNETLREIVRRIEEDLRKSDRELEELVERIEKRLRELVR

SEQ ID NO: 7925 - protein, 178 aa, Artificial Sequence; identical to SEQ ID NO: 7924
  Synthetic

SEQ ID NO: 7926 - protein, 188 aa, Artificial Sequence
  Synthetic
KLVEEVKRLIEESARKNEELIKEVEKEIRRSRKRDKELIEEIERLIREVKKRLEELLTEKKDDDRVREVVRRLEERLKRLLEEVEEVARRNNEILERLLKEVEDVVRTNRERMKELLEEVKTKKDREEAEELVRRVKEEIKRSTTESEKLVKEVKDRARKSHEDSERLAREVLKEIRRLLEEVEKDVR

SEQ ID NO: 7927 - protein, 188 aa, Artificial Sequence; identical to SEQ ID NO: 7926
  Synthetic

SEQ ID NO: 7928 - protein, 178 aa, Artificial Sequence
  Synthetic
KEVEDVKELIKKVNEEIKKIHERSNEEIKRVNEELRKIIKKVKDDLRRVLEEIERLSREGTDEKEARKLLERVERIVRKVKDELKKLNDELDETVKDVARKSKELNDRLREIVKKLVKGEDLLREAEKLVEDSRRSSEELVRRDKKLVKESRETSERLVRDLERLLREIEKRVREEAT

SEQ ID NO: 7929 - protein, 178 aa, Artificial Sequence; identical to SEQ ID NO: 7928
  Synthetic

SEQ ID NO: 7930 - protein, 178 aa, Artificial Sequence
  Synthetic
SEVETVAELIKDVNRRIREEVEEVKRRIEELNDRNRKIAEEVKERIRRVEDEIREARKRGESEERAKRLLEELRKIVKEVMRRVTESNRRLEETVRRVVERLKRLNDTLRDIVRRLVKGDELLTRIDRLVKDSERSSRKLVRELEELVRRSEEETEKLVRELERLVTEVARKVDEEAT

SEQ ID NO: 7931 - protein, 178 aa, Artificial Sequence; identical to SEQ ID NO: 7930
  Synthetic

SEQ ID NO: 7932 - protein, 184 aa, Artificial Sequence
  Synthetic
KDVEEALETLKRILDRVAKDNEDLIRELRDINRKITKENEDLIRDLERILREVEEEVKRRRDEEVLRELVKEVRRVLREILERSKESVKRSEDALREVLKRSRDSVKEVERVLEEIKRILDKSGGDELRRRLEALVEDVRRTLKELIEKTEKVVKEVEDNLRRLLKRTEEVVREVEKKLEEDRR

SEQ ID NO: 7933 - protein, 184 aa, Artificial Sequence; identical to SEQ ID NO: 7932
  Synthetic

SEQ ID NO: 7934 - protein, 184 aa, Artificial Sequence
  Synthetic
SEVEKVLEDLKRILEEIARRNEELNERLERINEEITRRNEKSNEETKRVLDKLADDVRKRKDKEVLEELVKDAERVLREDEKRSRESVERSEEALEEVKKRSEDSVREAKKALDEIRKIVKKRGGEELERTLEKLVDEVRKRLKELLDRSRELVKRVRENLERLEEDTRRLVERVRRELEKLRK

SEQ ID NO: 7935 - protein, 184 aa, Artificial Sequence; identical to SEQ ID NO: 7934
  Synthetic

SEQ ID NO: 7936 - protein, 185 aa, Artificial Sequence
  Synthetic
DEAEKVKRDIEEILKRVAEELKRVLEEIRRSSEEVERRNKEVLETLKRILEEVKERLKRIDKRRAAEELKRVLEEVERLVEELHRINRESIKRTKELLERVKRKLEAVIEEVRRLVEEVVKRRGEEAELVRELRELVRRIEEELRKLTEEARKLLEDNRRRLEELDRELKELVDRIREELERARK

SEQ ID NO: 7937 - protein, 185 aa, Artificial Sequence; identical to SEQ ID NO: 7936
  Synthetic

SEQ ID NO: 7938 - protein, 185 aa, Artificial Sequence
  Synthetic
DEAEKVLEDIKRSSEEVTRRNEKVARDSRKLSEDVEKKNRDVAERIKEIVDKVRRDLSRIDKKEAEKKLREVLKKVEELVKRLHEENRRSLEKSRELVERLHEINRKSEEDIRELVKDVVRKRGREAELVERARELVETNKKRLEDLDRELEELVKENEERLKRLDERLKELVDDIRRRAEEARK

SEQ ID NO: 7939 - protein, 185 aa, Artificial Sequence; identical to SEQ ID NO: 7938
  Synthetic

SEQ ID NO: 7940 - protein, 184 aa, Artificial Sequence
  Synthetic
REAEELLKDLERSSEEVDRRVKESNKESEKVSRDVEKKVKDSNKELREITREVAERAKRTDKDMVREIVERLRRTVEDVLRRNREIVDRSRKRSEDLLRRNRKIARENERLLETVLKKVTDDGIDEKMIKRAAELLKTSEDRLRKLIKESEDSIRENEKKLRELIRESEETLREIRKRLEDLER

SEQ ID NO: 7941 - protein, 184 aa, Artificial Sequence; identical to SEQ ID NO: 7940
  Synthetic

SEQ ID NO: 7942 - protein, 184 aa, Artificial Sequence
  Synthetic
KEAEDLMEELKKSSEDVERRVRESNKRSKEVSDRVAEEVKKLLERLKKILEEAARKRDRVDKEVLTKIAEDVVREVERVLREVEKILRESVRLSEKLMKENEEIVRKNKELLDRVLEEIKRRGVDEKVIRTIERLVRTSEKKLRKLLDDSRKSVEENRKRVTDLKKEARDLVEDIKRRLEEERR

SEQ ID NO: 7943 - protein, 184 aa, Artificial Sequence; identical to SEQ ID NO: 7942
  Synthetic

SEQ ID NO: 7944 - protein, 178 aa, Artificial Sequence
  Synthetic
REEEKVLKDLDDVLKEVTERVREDLRTNEDVVRRAEEEVTRLHEELKRSNDRAKEEVDRKKEDKDVLKKVVEENRRSLERILRRTEEVVERIKKVSEENRRSVEEIVKRLEEVLKEAIRRNDTEEVRKLVRELKEMLKRLEEDARRLVETTKKRLEDLKRTTDKLVKELEKTLEELRR

SEQ ID NO: 7945 - protein, 178 aa, Artificial Sequence; identical to SEQ ID NO: 7944
  Synthetic

SEQ ID NO: 7946 - protein, 178 aa, Artificial Sequence
  Synthetic
SDRERVAKKLRDVLKEVDEEAKKDHDTNKTVVKKVREDIERILRRLKEVLRKVKEEAERKKKDKEVLDRVLKELEKVLRDARRDVRRIIEEAKDVSRKNLDSSRKVVEKLKKVLDEVLEENDVEELRKLVKELRDRLRELEESSRKLVEDTRRDLERLREEIDRLVEELERRLEELRR

SEQ ID NO: 7947 - protein, 178 aa, Artificial Sequence; identical to SEQ ID NO: 7946
  Synthetic

SEQ ID NO: 7948 - protein, 187 aa, Artificial Sequence
  Synthetic
SDAETVLREIRKLNKEVNDASRETLERIEELNRRVERIVREVLKDIERLAREVEEVVRREGGKSDRVVKIAKDVLREVKELVERVVRVLRKVNKDVRRLVEELKRLAKEVNERVRRLVEEVARRLKGKEELIRRLEEIVKESEDNSKENVDRNDRIVRESERSSKELEDELRRIVKKLAREVDELIR

SEQ ID NO: 7949 - protein, 187 aa, Artificial Sequence; identical to SEQ ID NO: 7948
  Synthetic

SEQ ID NO: 7950 - protein, 187 aa, Artificial Sequence
  Synthetic
DDVERVLERIKELNRRVEEIVRRVLKTSRDLNKELNDISREVLKRIKDLMREVEEVVRRDGGESKDVEDILRRVLEEVKRLVDEVERLAREINEESRRLSERVKRTAEEVNKEVKRLVERVVEKLKGKEELIRELERIVEESKRTSDKLAKELDKLNEDSERNSRKNIEDLRRLVEELARKAEELIK

SEQ ID NO: 7951 - protein, 187 aa, Artificial Sequence; identical to SEQ ID NO: 7950
  Synthetic

SEQ ID NO: 7952 - protein, 188 aa, Artificial Sequence
  Synthetic
SLVEELEKLVEENERNMRELDKENRDIVEKNRENVERNERELRKLVERLERRIREVVRTKSDSEELKRIAEEVIRRVRELVKEVKRIAEKSIRDTDRLVKEVSEVNKKSIEDVKRLVDTVRRVTSDERLEEIVREVKERIKRSNDEANKENKRTLDEIRDSNRDVNRVSKEVLDEIRRLLKELEDAAK

SEQ ID NO: 7953 - protein, 188 aa, Artificial Sequence; identical to SEQ ID NO: 7952
  Synthetic

SEQ ID NO: 7954 - protein, 188 aa, Artificial Sequence
  Synthetic
SLIETLEELVDRNRRNLEKLDEENKDMLRKNEEDVEKNERDLRKLVKELRDEIRKLIEEKDKVEDLKRIAEEVIKEVDELVKRVTDILRESIKETERLIREVSKVNEDSIRTVEDLVRRVAEVKDDERLEDIVREVIKRIEESNRRVNKRNRETLERSKKSNKDVNEASERVLRRIKELLDELRERAK

SEQ ID NO: 7955 - protein, 188 aa, Artificial Sequence; identical to SEQ ID NO: 7954
  Synthetic

SEQ ID NO: 7956 - protein, 188 aa, Artificial Sequence
  Synthetic
SLEEELRRLVEELEKRLRELDKRNKDLLRENERNVEKLARDLEELVKKVRRVVEDVVTKKPDSEELKRIAEDVERRVEKLVRDVRRILEESIRDTKRLIDEVSDVNRKVIKEVEELVREVSKVTSDERLEDIVREVLKRVKDLLERAEEENKKTLDDSRKSNEEVNREVEKVIRRIEELVKRLEEAAK

SEQ ID NO: 7957 - protein, 188 aa, Artificial Sequence; identical to SEQ ID NO: 7956
  Synthetic

SEQ ID NO: 7958 - protein, 188 aa, Artificial Sequence
  Synthetic
DLVERLEELLKKIKRELEENIKRNRELLKKLEENLRRNEEKNRKLLEEIRKRLEDLLREKSDVEEVRKVAKEVEDKVRKVLEDSKRVVDTLRELAREHLKHSEDVVRELEERLKELLDEVRRKKDREEAEELVRRVEERMKEMVKRVHEVSEKNLRDIKKWLEDVNRISKETLDRLRELLKEAERRVR

SEQ ID NO: 7959 - protein, 188 aa, Artificial Sequence; identical to SEQ ID NO: 7958
  Synthetic

SEQ ID NO: 7960 - protein, 188 aa, Artificial Sequence
  Synthetic
SLREELEELLKRIKERLKRLIEENRRLLEDLRRNLEENIRRNERTVEELKRDVKRLLDEKSDVDKVREVIKELEKRLEEILRRSREVVEELRRRVEEHLRHSERVVKELEKRVTELLREVERKKDEERAEELVRRVKEEMERAVEEVKKTSEENLKAIKTWLEEVNRISEETLRRMREVLKELREDAK

SEQ ID NO: 7961 - protein, 188 aa, Artificial Sequence; identical to SEQ ID NO: 7960
  Synthetic

SEQ ID NO: 7962 - protein, 188 aa, Artificial Sequence
  Synthetic
RLVEELEKLLKDSHDKDRKLIRENEELLKELKRNLDENIKTNEELVDRIRKRVEDLLREKSDVDEVRKVIEDVERTVRRLVEESKRVVETLRELARRHLEHSRKVARENNERLKRLLEEVRRKKDEERAEDLVRRVEKEARDSSDESRRISEENLKEIKKWLDEVNEISKRTLEDAKRLLEDLERKAT

SEQ ID NO: 7963 - protein, 188 aa, Artificial Sequence; identical to SEQ ID NO: 7962
  Synthetic

SEQ ID NO: 7964 - protein, 184 aa, Artificial Sequence
  Synthetic
DLEEELKTVLDRARKDVKRLKEELERILEEVKRMVEELDKRLEDLDEEVREKVKRLIDEKKDVEEARKKLKEVLEDSRRLSEEAHRINRKVLKDVEKLIRDVERILEEVIRRVEKLIEEVKRITDERDVKRVLREAEELLKRVRDLVEKVLREIKRILEEVEELNRRIIRTSREILKRVEEEVK

SEQ ID NO: 7965 - protein, 184 aa, Artificial Sequence; identical to SEQ ID NO: 7964
  Synthetic

SEQ ID NO: 7966 - protein, 184 aa, Artificial Sequence
  Synthetic
SLEERLDKVRRRVEEEIKRLEDRLEELDRRVAETVKRLDDEARKLDEELRERVKDIIRKKDKVDDARRMLEEVIKRSEELSKKAHDINKRVLDESKRLSDEVRKILEEVRERVRELIERVKRITEEEKVKRVIEEMEEIVKEVRKRVDEVIKTSEEILRRVRELNKEILKESEDLAEEVRKKAT

SEQ ID NO: 7967 - protein, 184 aa, Artificial Sequence; identical to SEQ ID NO: 7966
  Synthetic

SEQ ID NO: 7968 - protein, 184 aa, Artificial Sequence
  Synthetic
KLEDELRKILEENRRIVKELEERMKRLDEAVRKAVEDLARSNEESNKRVKEVVDDLIRKKPDDEDAKRMLERVLRESKRLSDDSKRILERVLEESKRLSERVKRILERSIREAERLVEEVKRIDKEEDVKKVLDDIKESSDRVRREIEEVLKESEERLRRVEKKNEDIDRRSEEILDDVRRKAK

SEQ ID NO: 7969 - protein, 184 aa, Artificial Sequence; identical to SEQ ID NO: 7968
  Synthetic

SEQ ID NO: 7970 - protein, 183 aa, Artificial Sequence
  Synthetic
SLEEKARDVLRRSKELNDENRERAERMLDTNRRIADKLREEVERILREVEETVRRLIDEKKDSKRVRDLLRKLEEDVRKVLEDIERILKKSIEVSRRILEDSDKILKENLDLAREVLERVRRVSEDVVERLLKEVEDSSRRVHKRSEELLRESREISERVRETVKKLLEDVERLLRKVTKEVK

SEQ ID NO: 7971 - protein, 183 aa, Artificial Sequence; identical to SEQ ID NO: 7970
  Synthetic

SEQ ID NO: 7972 - protein, 183 aa, Artificial Sequence
  Synthetic
SLEDELREVLERSREKNERLRREAKKLLDTDRERVREILREAEKVLEEVKRTVEDLVREKDKVDEVRELLKRLEEAVRDVLRRLAELLERSLRVSEEVLRDVERILKENLELVKRVLERVRRVEEKVVEELLKRVEDSSKKVEDDVRRLLKEVEKISTELEELAKELVEEVRRIVKEVADRVK

SEQ ID NO: 7973 - protein, 183 aa, Artificial Sequence; identical to SEQ ID NO: 7972
  Synthetic

SEQ ID NO: 7974 - protein, 183 aa, Artificial Sequence
  Synthetic
SLEERAEKILRDSKRTNEKNEEDVRRLLERNERRVRKIEEEAKKVLEDVRREVERLIREKKDDKRVRDILARVIEEVERVLDEVRKLLEESLEMSERVLRESKKILKENLDLVKKALDDLRRVEEDVVRKLLDEVRESSERVHRKSEELLRRVEEISRTVEREVKKLLDRVRRVLEEAEKEVR

SEQ ID NO: 7975 - protein, 183 aa, Artificial Sequence; identical to SEQ ID NO: 7974
  Synthetic

SEQ ID NO: 7976 - protein, 179 aa, Artificial Sequence
  Synthetic
DESRELVERVERVVRKVEKDHERLDRANKESTDRVREAVRRLDEENREVVRKVEDEVKKVQDKKEVVKELVRDLERLSREVLRRVEELLRRNDEISRRLLEESRRLVKELEKILEDVLRAVPDSKEAERLLDDVRRKLEELVRNAERSLEESRKTNEELEKRVRESLKEVERVLRELEK

SEQ ID NO: 7977 - protein, 179 aa, Artificial Sequence; identical to SEQ ID NO: 7976
  Synthetic

SEQ ID NO: 7978 - protein, 179 aa, Artificial Sequence
  Synthetic
RETEEVIKTLEEVVKEVEERVRRLDEENKESTERVKKTVDDLDEENKRVVREVERRVKEVQDKKEVVTDLVRRLEEISRRVLREVEKLLKRNDEISKEVLERVKELVRRLKKIVKEVLDRAPDSKRMEEVLKRVDERLKELERKVTDSLRRSREVNKRLRDKVEKSLREVEKVLEDLKR

SEQ ID NO: 7979 - protein, 179 aa, Artificial Sequence; identical to SEQ ID NO: 7978
  Synthetic

SEQ ID NO: 7980 - protein, 184 aa, Artificial Sequence
  Synthetic
SLEERLREILKRNKEDVEDIRRRLEEILKRNKEEIDRLREELRRILEEVKREVKELIKRKSTDERLIRIAEDVIRRVKKLVDEVDDIARKSHERVRRLVEEVKRILKESHDTLRRLVRKVREDNDEKTAEEVIERIKKLTEDVRRDVERVIREIEKSSDDLRKVVKDVIDDIKRLLKELREEIN

SEQ ID NO: 7981 - protein, 184 aa, Artificial Sequence; identical to SEQ ID NO: 7980
  Synthetic

SEQ ID NO: 7982 - protein, 184 aa, Artificial Sequence
  Synthetic
SLEERLRKILTENERVIRKLERDLEENLERNKKTVKEIEDRLRKLDEDVERLVRELLRRKSTSKDLKKEVEDVLRKSRKLTREVEEILRRSIKRSAELVKRVRDIVRESHKELRRLVEEVRKDNDKDTAEEVIKEIEELTRRLEEEVRRVNERSDKSNEDVRRRVKEVEDESRDLARRLAERVN

SEQ ID NO: 7983 - protein, 184 aa, Artificial Sequence; identical to SEQ ID NO: 7982
  Synthetic

SEQ ID NO: 7984 - protein, 188 aa, Artificial Sequence
  Synthetic
SLEERLRKILEKVKRTVDESRKRSKRLLEENRETMDRLREEAEEILERVKEKIKELVDRKKDSERVKEVVRRVLEEVERLLEEVERVLRESIKTSEDLLRENEEMLKKLEDRAKKLVDEVRTKKDREEAEKLVEEVIRDLDRVADELRELSKRLSDRSRESNERVRRTVKEVIKEIKRVLKELEEKVK

SEQ ID NO: 7985 - protein, 188 aa, Artificial Sequence; identical to SEQ ID NO: 7984
  Synthetic

SEQ ID NO: 7986 - protein, 188 aa, Artificial Sequence
  Synthetic
DLRERMEKLLKEVKDEIDKSEKKSEDNLRTNKKDVDEIRKRLKRILDEVKEELRKLIDEKRDSERVKEVLKRVIETVADLLRRVDEVLRRSIKISKELLEENKKVLEEAKEEVDRLLKEVEDKESDERAEELVDRVAKRIRRVVEDVKRKSEDLNRKSNESNKRVRDLVERVKEEIDKVRDELRKSVK

SEQ ID NO: 7987 - protein, 188 aa, Artificial Sequence; identical to SEQ ID NO: 7986
  Synthetic

SEQ ID NO: 7988 - protein, 181 aa, Artificial Sequence
  Synthetic
SEEERIRELLERVRRRLEESKKKSKDVADEVKETNDESRERSEKLLREVEERLRELLRELDEERVKKLLKELKDRVKELLERDDKVLRENEKSVRDVLRTDEDVVRKLEEKLERVLDVVRKGEKDVEELRKEVEEVVERVRRISERLTEELRRSSERVKRISERLLEDLERVVRDVARRVK

SEQ ID NO: 7989 - protein, 181 aa, Artificial Sequence; identical to SEQ ID NO: 7988
  Synthetic

SEQ ID NO: 7990 - protein, 181 aa, Artificial Sequence
  Synthetic
SEEERIRELLERVDRRLKESEKRSTDVARRVREENKELEKAARKILEDARRELEKLLREIDDEEVRRVLRELEKIVREVLRRVEELLKRNEESVERVLREDKKVADDLRRELKKVLDVVRRGEKDVEELIKRVEDMVREVEKTSRKLIEELKRSSDEVRKMVEELLRRLERVLEEVKKRVK

SEQ ID NO: 7991 - protein, 181 aa, Artificial Sequence; identical to SEQ ID NO: 7990
  Synthetic

SEQ ID NO: 7992 - protein, 181 aa, Artificial Sequence
  Synthetic
KDEETVTKLLEDVERKNRESEKDSRKIVEDVKDENRKLEDEARKSLEDSERKLERLERDVDEERVRTVVRDLERISEEILRKIKEVVERNRKSLEDVLKKDKEVADRNRKTLKDVVELLKRGEVDVRELAKRLRESTERVEEISRRLIKELEDSSDKVRKVVEDLLRENKEAVRRVAEEAT

SEQ ID NO: 7993 - protein, 181 aa, Artificial Sequence; identical to SEQ ID NO: 7992
  Synthetic

SEQ ID NO: 7994 - protein, 186 aa, Artificial Sequence
  Synthetic
SELEKVEEDIRRLVERVKKIAEDVERLTRELVKEVRKSTEDSVRDIERLMKELREIARDVSDKEELIRRLEEVVKRVEESVRRDVDLLKRVVERSEDISRELRKEAEEVVKTVRRIVEELIRRRDKDKDAKKRLEDLLDTLRKIVEDVSRRLKELNDRLRKLVEDSKRRNEELLRRLREIVKEIAK

SEQ ID NO: 7995 - protein, 186 aa, Artificial Sequence; identical to SEQ ID NO: 7994
  Synthetic

SEQ ID NO: 7996 - protein, 186 aa, Artificial Sequence
  Synthetic
DSDKEVEKRIRELMKEVKDSTKESEDKIRESNERVKESSKRSEDEIRKLMEELDEIAKRVKDKKDLEELLRRVEETVKKLVDDDKETLRKVLEENRKSVEDDDRRLREVVERVERIVRELIRERDKDEDATRRLKKLLDDLKKEVDDSRRRNDELIKETERLIRESAKRNDKLLEDLKKRVDEIRK

SEQ ID NO: 7997 - protein, 186 aa, Artificial Sequence; identical to SEQ ID NO: 7996
  Synthetic

SEQ ID NO: 7998 - protein, 186 aa, Artificial Sequence
  Synthetic
DEREEVEKRIRDLAEEVRRIVKRVEDETRRLVEEVKKSSDDSRRTIEKLARELKEITRRVKDKRTLIEILRRVVEEVEELVRDDVDKLRRVVEESERISRRLEEKLEEVVKRVEEIVRRLIKRRKDDKEAKDRLEDLLRRLREEVKRVKEKLKKLNDDLRREVEKSKEDNERLLKKLRDEVRKSAT

SEQ ID NO: 7999 - protein, 186 aa, Artificial Sequence; identical to SEQ ID NO: 7998
  Synthetic

SEQ ID NO: 8000 - protein, 171 aa, Artificial Sequence
  Synthetic
DEVEKVLREIEKLIKEIREINKRINDRIEELIRRLRERVKKVSRESEELIRDLRRDGKEELVKEVLKRSEDLARRVKEEVKRVLEEVRELVERSVRIAEEVLREVRELVRKKLKDERKAREIIKRVEKVLEEVRRSLETSEKRVRDALREIEERLKENKRRVREVLEEIRK

SEQ ID NO: 8001 - protein, 171 aa, Artificial Sequence; identical to SEQ ID NO: 8000
  Synthetic

SEQ ID NO: 8002 - protein, 179 aa, Artificial Sequence
  Synthetic
DEKEKLIKEVEDSTETVKRLVEELSRRSKKITEDVERLVKKLSDESKKILDEVRDLVRKRGGRAKDVEEILKRVTRISEELVKRVEEILRKSNKVSRDIVKEVREILKEDEDLVRDVVRKLRNSEEADKLRKRSEDMVRRIEEHLKKNLKENKDALDKIRKELRENIETTKKTVDDIRK

SEQ ID NO: 8003 - protein, 179 aa, Artificial Sequence; identical to SEQ ID NO: 8002
  Synthetic

SEQ ID NO: 8004 - protein, 179 aa, Artificial Sequence
  Synthetic
DEKDKLIEELDKILEDVRRRVEELSRRSKEITETVKELVKRLSDESERILREVDDVVRKRGGRAEDVDRILKEVLRFSKRIVEEIERILRESNKVSKEIVDEVRKILEKLERDVEDVVRKLRDSEKAREVRRKVKETVERIEEELRRNIEENREMVERVEREARKNIKDTRKRVEEIRK

SEQ ID NO: 8005 - protein, 179 aa, Artificial Sequence; identical to SEQ ID NO: 8004
  Synthetic

SEQ ID NO: 8006 - protein, 187 aa, Artificial Sequence
  Synthetic
RVEEKLEKIKRDIEKLVEDMKESNTRSKRKLEKLVEEMRRNNEELTRRVEELVKKIEDDVRGKKLEEVKRLAKELREIAERSRKLSEELARELEKSVKDSLDESRRLARELEEVVRDVLRKIRKERENEDLVRRLLEEIRRILEEVRRTDKELLDENERILREVEKLNRDLVKEIEEILKKVEDDVR

SEQ ID NO: 8007 - protein, 187 aa, Artificial Sequence; identical to SEQ ID NO: 8006
  Synthetic

SEQ ID NO: 8008 - protein, 182 aa, Artificial Sequence
  Synthetic
SEVEKAIEEIEKVIKEVRDKNRRVLEESKKLIRTVEETNKRNIEEIEKWIKTLDELTDRNSDKKVIEKVLKELEDEVRRHVEHSERVLREAIKISEELVRRSEEVLKEVTERVERIVRKVVRTEDAAKKAKEIIDKLRTLVEEVKRTNDKSLRDTREVVRRVEETLRRVEEKVKKRVDEIRK

SEQ ID NO: 8009 - protein, 182 aa, Artificial Sequence; identical to SEQ ID NO: 8008
  Synthetic

SEQ ID NO: 8010 - protein, 182 aa, Artificial Sequence
  Synthetic
SEVEEVIRRIEEVLKELRRKNEEVLRESERANDEVRRVNEKNIRDIKKWLEDVKREVDNNRDKREIEKVLRELEKRVREHVEHSKRVLDELRETSRRLVERSEELLRRVRKEVKELVDKVVRSEDARRRAEELERRVDKVVREVEKTNKESEEESKKLVDDVRRTLREITERVKDAVEKTLR

SEQ ID NO: 8011 - protein, 182 aa, Artificial Sequence; identical to SEQ ID NO: 8010
  Synthetic

SEQ ID NO: 8012 - protein, 186 aa, Artificial Sequence
  Synthetic
SRDEEVARRVERVLEESEKLSKEVAEENEKVLREAREILEDVRKKVEDVARTLRELAKKVEDKDDLVRKVKKLVDEVEEILKDVIRRVRKLVKDLHDKNRRSLEESRRLVEEVEEILKDVIREEDKNEEAKRRLEDLRRKLEELVKRNEKKLRDLDERLKELVERIERAAEKLLRDLRDLVRKITK

SEQ ID NO: 8013 - protein, 186 aa, Artificial Sequence; identical to SEQ ID NO: 8012
  Synthetic

SEQ ID NO: 8014 - protein, 186 aa, Artificial Sequence
  Synthetic
RELEKVEKEVEDVLRDIERSSDEVRRENKRVAREMEESSRKVAEDVERVLRTLEELAKKVSDKDDLLRRVKKLVDEVRRRLEESIKRSEDLVRELHEINKRSIEETEKLLRDVEEILKDVIRKKDKNEEAKKRAEELVRRLEELLERNRETLERLDKELKDLVEKNKRTAEKLVKELEELVERIRK

SEQ ID NO: 8015 - protein, 186 aa, Artificial Sequence; identical to SEQ ID NO: 8014
  Synthetic

SEQ ID NO: 8016 - protein, 189 aa, Artificial Sequence
  Synthetic
DELERVRREVKRLADESEKVSREVEERVRDTNRKSEEISRRVEKLARELLKKVEEVERRSGTEEALRDVIRELKKVLETVKKIVEDSVRTSEKLLKENERIVEESRKTSEDIVRRIREIVEELVRRRDKDEDLKRTLDELRKTIEKLVKDNRETLERLIRESEETIKRNREKLEELKRRLETLLRRVRK

SEQ ID NO: 8017 - protein, 189 aa, Artificial Sequence; identical to SEQ ID NO: 8016
  Synthetic

SEQ ID NO: 8018 - protein, 189 aa, Artificial Sequence
  Synthetic
DELEDVRRRVDELVEELERVSRRVAELVKRIIDESRDISRRVARRVEELLRRLREVTKRSGTEEAREEVERTVERVLEEVERILRESVEISRRLVERIREIVRESLERSREVVKTIREIVKRLLEKRKDDDELRKRLEDLKRKIERLLEDNRRKLEELIRRAEKVVEENERTMRKLKEDAKRLLEEIRK

SEQ ID NO: 8019 - protein, 189 aa, Artificial Sequence; identical to SEQ ID NO: 8018
  Synthetic

SEQ ID NO: 8020 - protein, 177 aa, Artificial Sequence
  Synthetic
SVEDLVREVEERVRKVEKDLRELLDRLRRENEDAVRRSRESLRRNEEENKRVVDELRKDGVPESLVRELEESVKRVKEISDELLKRSKRSLEEVEEIIRRLEEDLKRVLDEIRKVATDGDGREEVVKKVREVLERVKETVKRVVDRNREVVKRLEDENRKVSEENKRVVEKVKEDAR

SEQ ID NO: 8021 - protein, 177 aa, Artificial Sequence; identical to SEQ ID NO: 8020
  Synthetic

SEQ ID NO: 8022 - protein, 177 aa, Artificial Sequence
  Synthetic
SVEELVRRIAEKLRKVLDEIERLVDELRKENEEVVRDIERLVEDNEREVRDVLRKLEKDGAPRSLLKTLEESSREVRKRIKKLVEDSRRSVKEVEERIRKLKEELKRVLEKIKKLAEDGDGSEDLVRDAERVLKRVTDEVRRVVKENKDVVRKVREEVERVSEENKRVLEKVTRDTK

SEQ ID NO: 8023 - protein, 177 aa, Artificial Sequence; identical to SEQ ID NO: 8022
  Synthetic

SEQ ID NO: 8024 - protein, 185 aa, Artificial Sequence
  Synthetic
DEVETLKREVERLNKEVLDRVRKVIKEIKELDDRVRRENERVIREVERLIEEVRDRVRKNSDVKELVKRLADELRRVVKESKRLTEELVRLSEEVNKRLEEEVRRLVEESKRVLREAKRVLDEDRDRRAEKIVKELREHSDEVVREMRELVERSKRHSTKVVEELKKSNKELEEKVRKVVRELEK

SEQ ID NO: 8025 - protein, 185 aa, Artificial Sequence; identical to SEQ ID NO: 8024
  Synthetic

SEQ ID NO: 8026 - protein, 185 aa, Artificial Sequence
  Synthetic
SEVEELRERIKELNKRVLDTVRRVLERVKELNEEVDRRNKEVIKEVERLLEEVKREVTREKDSKKLIDDLAKRLEDIVRKSKKDTRELVKRSKRINDEAEKLVRKLVEESRKVLEDAAEVLKKDRDRRAEKIVDDIRRHSEDVVRRMRKLVEDSRRHSKRVVEEMERSNRELEERVKRVVEELKR

SEQ ID NO: 8027 - protein, 185 aa, Artificial Sequence; identical to SEQ ID NO: 8026
  Synthetic

SEQ ID NO: 8028 - protein, 185 aa, Artificial Sequence
  Synthetic
SEVEELIKEIRRLNEEVRRRNKKVIEEVKKLNEDVKRKNDKVIEDVERLLREVKKRVEDESDSKELIKKLAKELEDVVRESEKETRRLADESRKINKESRDRTKKLVEESKEVVDRAARVIEKDRDRRVEEIVRTIEKHSRDVVREMERSNDESEKHSRKVVREMEKSNKELKKKVEKIVRDLEK

SEQ ID NO: 8029 - protein, 185 aa, Artificial Sequence; identical to SEQ ID NO: 8028
  Synthetic

SEQ ID NO: 8030 - protein, 185 aa, Artificial Sequence
  Synthetic
SEVEKLKREVERLNEEVLRRVRKVIEDSKRLNEEVRKRNEDVLKELKDLIREVKRRVEEEDKVKELVKKLARRLEEVVKDSKRRTKKLVEDSKKVNDEIRKLVRELAEESKTVLEEVRKVLKKDPDDRMRKIVEDLRRHSEEVVREAEDLVRRSEEDSRRVAREMEKSNEEIEKEARDVVRELER

SEQ ID NO: 8031 - protein, 185 aa, Artificial Sequence; identical to SEQ ID NO: 8030
  Synthetic

SEQ ID NO: 8032 - protein, 185 aa, Artificial Sequence
  Synthetic
SEVERVVKEAEDLSRENNKRVKEVVRRAEDTNRRVEDENRKLLKEIKDLLREVKETVKRIPKREAVKIAEKVLREVRELVKRSREIAKKVLEDNADLVRRVKESSEKVLKDVEDLVRELLDRKRDVERVRRLLEEVLRRVAEDVRRSEEELDKVLRDSAESLKRSDKSLRDIVREVEKVLDEIRK

SEQ ID NO: 8033 - protein, 185 aa, Artificial Sequence; identical to SEQ ID NO: 8032
  Synthetic

SEQ ID NO: 8034 - protein, 176 aa, Artificial Sequence
  Synthetic
SAEDLLRKLREDVERVMRELRKSNEESRKRVEEVVEEAERILKESRERSEELVRRLNVDRLAEELRDVDRRIDKDVKKAVEDLRRSVDRSLKDTEDLVRELREVLKRVADVVRKTRVEEVLRKLAEDVKRVLDKVKEENKRLLEENDRMLEEVRRLLKKLLEESEKVLEEVERKAR

SEQ ID NO: 8035 - protein, 176 aa, Artificial Sequence; identical to SEQ ID NO: 8034
  Synthetic

SEQ ID NO: 8036 - protein, 183 aa, Artificial Sequence
  Synthetic
DLREEIRKLREDAKRVIDESRKSVKENEKRNKKLLDESEKSVRENEERNKELIKRVKDRGVPEDIVREVKELLDRSIKKLREVTEEIERTLKDSIKKLKDVTREIERLAREVIKRLEEVERANVREVLRKVKEELRRVLEKLRRLNEEASRENERILRELRKKNRDMNEDNRRILEELDEKAR

SEQ ID NO: 8037 - protein, 183 aa, Artificial Sequence; identical to SEQ ID NO: 8036
  Synthetic

SEQ ID NO: 8038 - protein, 183 aa, Artificial Sequence
  Synthetic
DMEREVEKLERELRELIKRIRKIVDENRRRNEELLERSRESVRRNEEENRKLLEEVKKSGVPEEIVERIRKLLEDSIRKLRKVTKEIEEELRRSIEKAERVVEEVERLAEEAIRRLRDVLKANVEKVLREVKEEVRKLLEEIEKTVRDVSRENKRILDELRKKNKRADEENREILKKLREDVR

SEQ ID NO: 8039 - protein, 183 aa, Artificial Sequence; identical to SEQ ID NO: 8038
  Synthetic

SEQ ID NO: 8040 - protein, 183 aa, Artificial Sequence
  Synthetic
SMEEEIRRLEEDVRRLVDKSRKSVKENEERNRKLLEESKESVRDNARRNEKLIRDVRRKGVPEDIVREVEELLRDSIRDLKRVTDEIRKKLEESIKKLREVTERIERLLRKLITEAREVLRANVREMLEEVLRRLEDALRRLEEENKRVSEDNERILEELRRKNEEADKRNRDILDDLRRRAD

SEQ ID NO: 8041 - protein, 183 aa, Artificial Sequence; identical to SEQ ID NO: 8040
  Synthetic

SEQ ID NO: 8042 - protein, 183 aa, Artificial Sequence
  Synthetic
DMEDKVRKLERDVRELIKEVEKIVRDNADENRRVVEESEKSVRELADRARRLIDEIRKGGVPDEIVRRVEKALREVIKRLRDVTDEIRKLAKDSIDRLKKVVEDIRRELERAVKLLREVLSANSEDVLREVKERVEEVLDRVRKKVEKVSRENKEIVKEVRKKNEDAVREAEELLKKIREEVR

SEQ ID NO: 8043 - protein, 183 aa, Artificial Sequence; identical to SEQ ID NO: 8042
  Synthetic

SEQ ID NO: 8044 - protein, 186 aa, Artificial Sequence
  Synthetic
DEVEEVVRRIEELIKEVEDVDRDIERRVKELDEELRRVDDEIRRRAKKLLDDLEKRVREISDKETVVRIAREVLKEVKRLVEESRKIATDVLRENERLAKESTDIVREVKRRVEDLVKKLTDTKKDSERVRRILTELRKRVEKVVRDSEKTLRESVERSARLLKESKESLEELERRAREVVERIKK

SEQ ID NO: 8045 - protein, 186 aa, Artificial Sequence; identical to SEQ ID NO: 8044
  Synthetic

SEQ ID NO: 8046 - protein, 186 aa, Artificial Sequence
  Synthetic
DELEEAEKKVRDLIRRLREMNERALRESERLIRRLREVDEEIVRRIEDLLKKLREEVEREKDKETVKRIVEKVREDVRRLVKTSEEIVRRVLEEDKRLIKESKDIADRMLEEVRRLLREVLETKKDSREVRKTLKDLEDTVKRVLEESEESARESEKRSRDVLRESERSLRELEKKVRKLLEEVKK

SEQ ID NO: 8047 - protein, 186 aa, Artificial Sequence; identical to SEQ ID NO: 8046
  Synthetic

SEQ ID NO: 8048 - protein, 181 aa, Artificial Sequence
  Synthetic
SDVDKVAKEIDDALKDVRRKVDKVRKDNERVNREVEERVRRVTERNRDVIEEVKRRVEEVKEDKDRLDELLKEVKRSTDRVEETVKRLLERSEESVKEVVEILRKLLKDLERVVKEVRDRIGEKVSELVREIERRLEELVKELRKILDELRKRNEDTRRRLEEALKRNREEAERLEREIRK

SEQ ID NO: 8049 - protein, 181 aa, Artificial Sequence; identical to SEQ ID NO: 8048
  Synthetic

SEQ ID NO: 8050 - protein, 181 aa, Artificial Sequence
  Synthetic
KDVDEIATELDEVIDRIRKKVKEVVERDEKVNRDVNDEVDKLTERNRRVLDKVLKDVTRRKEEREVVEELLERLKKSTDDVRKTVKKLLRESEESVERVRETLERLLEEVDRVLKEVEERIGRKVDRLVDELRKRVEDAKREIREILEKLKRDNDESKKRLERLLKENEDALREILERLRK

SEQ ID NO: 8051 - protein, 181 aa, Artificial Sequence; identical to SEQ ID NO: 8050
  Synthetic

SEQ ID NO: 8052 - protein, 181 aa, Artificial Sequence
  Synthetic
DDVEKAVREVEEMLKRVDKEVERVSRENKRVSDEVRKKVKEVERKIKEVLDRIKDEVDRVKDDKEVLRELVERARDVVRKVREELRKLLKEDRESSEDVDRIVTELLRRLEEVLDDVRRRIGEKVDELVKRLEDKMRRVKEKLKRLLEKNREDSERSERELREILKKITREVEELAKELEK

SEQ ID NO: 8053 - protein, 181 aa, Artificial Sequence; identical to SEQ ID NO: 8052
  Synthetic

SEQ ID NO: 8054 - protein, 172 aa, Artificial Sequence
  Synthetic
EEVKKLLEEVRDLLRRVLEEVERSSDEDRKLNERVNEAIEKSIREVEELLRRIDREVDGGEEAVRRLRKVVKESRDLSEELVRRLEESLRDSRRRSKELVERLEKIVEDAERAGVREELVEELKRRVDEVKRRAEEINRENDERNKESKRRLEELNERLEERVRRLEEKLKK

SEQ ID NO: 8055 - protein, 172 aa, Artificial Sequence; identical to SEQ ID NO: 8054
  Synthetic

SEQ ID NO: 8056 - protein, 172 aa, Artificial Sequence
  Synthetic
DEVEDLRRRVEKILEDVKRTVETASKRDRELNEEVNRLLRESVERVDRLLDRIRREADGGEEVVRDAERIVKESEKLSTDLVRRLRDSLRRLEELVERLVRELERVVKEAEEAGVRKEIVDRLRKAVEEVSREARKILDENRRRNEESEKRMREINKRLEDKVREVKKELEK

SEQ ID NO: 8057 - protein, 172 aa, Artificial Sequence; identical to SEQ ID NO: 8056
  Synthetic

SEQ ID NO: 8058 - protein, 172 aa, Artificial Sequence
  Synthetic
REVDKLREDVRRLLEELLRALRESSKEDEKLNRKVNREVDRVLKEVDDLLEDIKKRVDGGKEAVEELERVVRKVEDLVRRLVEELEKSLRDSERLSREVVKKLEKIVEDAERAGVREEIVKRLEEEVREIVKEIKEINDKNRKKNEDSARKADEKVKELEERVRRVVKELRD

SEQ ID NO: 8059 - protein, 172 aa, Artificial Sequence; identical to SEQ ID NO: 8058
  Synthetic

SEQ ID NO: 8060 - protein, 172 aa, Artificial Sequence
  Synthetic
KEVEDLVRRVEKLLRDIDRELKRSSDEDRELNERVNREVDRVLREVDRLLKEIRETVRGGKEAKETLERVVEKVERLARKLVEELRRSVEKSRKLSEKVMRDLEKVVDDARKAGVEERIVRTLEKRIRDLVRKAEEIDRENEKRNKESSDRMERLVRELRKRVKRLVEELER

SEQ ID NO: 8061 - protein, 172 aa, Artificial Sequence; identical to SEQ ID NO: 8060
  Synthetic

SEQ ID NO: 8062 - protein, 172 aa, Artificial Sequence
  Synthetic
DEMRRLLREVERILEEVERVLEKSVRDDERVNREVNRRLDEVLRRVEDLLRRIEKEVRGGREAVELLKEVVDRVRRLVEELVKLMEDTLRRSRELSERLVREARRVVEELRAGGVEERLLERVRREVEKVRERADRIDKRLEDTNRRSKDRAEELVRELEKRVEDLKEKAEK

SEQ ID NO: 8063 - protein, 172 aa, Artificial Sequence; identical to SEQ ID NO: 8062
  Synthetic

SEQ ID NO: 8064 - protein, 172 aa, Artificial Sequence
  Synthetic
DEVRKLEEEVDRILREVKEMVEDSIRRHKEVNDEIRRRVERVLEEVKTLLDLIREKDRGGKEAVDRLRKVVTDVERTARELVRRSEKTVRESEELSRRLVERLEKVVEDAERAGVRKEIVDELRKRVEDVSREAKKLDDDLRENVKRLSEEMKKLVDDLRREVDRLEKERRK

SEQ ID NO: 8065 - protein, 172 aa, Artificial Sequence; identical to SEQ ID NO: 8064
  Synthetic

SEQ ID NO: 8066 - protein, 172 aa, Artificial Sequence
  Synthetic
DEVEELRRKVEEILRRIREDVRKSIEDHRDVNRRVLEAVRRSTKRNKDVVDRLRDEDRGGEEAARTLERTLKRSEELSRELVERSRKTVEESRRRSKRLVDELKRVVKEVKDGGVEERIVKRLEDEVRKLVDEMRKLDEELTRNVDEVRREAERLDKENRDENRKLKEELKK

SEQ ID NO: 8067 - protein, 172 aa, Artificial Sequence; identical to SEQ ID NO: 8066
  Synthetic

SEQ ID NO: 8068 - protein, 179 aa, Artificial Sequence
  Synthetic
SEMEKVVTDAKELLERLDRELERVIRESDKILDELRRKIEEVIKRSDELLEELDRRIKENKESKDLVEEIVRAAEESDKDVERVVDEIRKEVEKVNDEVRRLIKEIVDRLKDMLKKVRDAGVREELIERVRRLVEELIEKAKKLLEESERKSARLIEDLERLLEESRRKSDKLIKKARK

SEQ ID NO: 8069 - protein, 179 aa, Artificial Sequence; identical to SEQ ID NO: 8068
  Synthetic

SEQ ID NO: 8070 - protein, 179 aa, Artificial Sequence
  Synthetic
DEVEEIRKEIEDILRRLRDLLRRVIEDSRRLLDELRERNERVIKESEDLLRDLEDKIRKRKESEDLVREIVKRARESDDKSRRVSKESADRARRSDEKVERVIREVVERLRRVVKKAEDAGVDKEIVDRLRDEVRKLEEEAKELLRESNELTRELIDRLEKLNRDSNRKSRELIERLRK

SEQ ID NO: 8071 - protein, 179 aa, Artificial Sequence; identical to SEQ ID NO: 8070
  Synthetic

SEQ ID NO: 8072 - protein, 185 aa, Artificial Sequence
  Synthetic
SELEEVEERIKKELDRLEKKMEESIKRDKEINRELNEMLKKSIKDSDDILRELRKEIEDDKDSKDVVERVKRRLEELIKRDREVIEEVERRLDELIRHNEEVVREVKEELDRLIEEARDVLRKEQDKRAEEIVKKLEKEVEDLVRKAKKLVDELRKENEESKKRARELLRRSEEKVKKLVREAEK

SEQ ID NO: 8073 - protein, 185 aa, Artificial Sequence; identical to SEQ ID NO: 8072
  Synthetic

SEQ ID NO: 8074 - protein, 169 aa, Artificial Sequence
  Synthetic
DSEELVRTVKKELEDIIRESRKLVEDVARALEKIEKEIEEIVRTTDKELRKLIEEAKDVEELKKLVDDLRRENERVLRELKKTLTDLKRKLEESTRRSEDVVRKLIKELEDRGTEEVVKKVKDLLRELEKHNRTVLEEVKKALDELRRRLEEVHRRSKETLDRIRRDAT

SEQ ID NO: 8075 - protein, 169 aa, Artificial Sequence; identical to SEQ ID NO: 8074
  Synthetic

SEQ ID NO: 8076 - protein, 169 aa, Artificial Sequence
  Synthetic
REDELVDTVRKRLKELIEESERLLEEVKKKLEEIKRRVEKILRETEKELRDIIRKNKDVDELRRVLTELEKRNREVLERLEKLVRELLKEAERSLEKSRRAVTRLLEELRRDGDDKVLEKVRKVLEDLKRENKEVVERVDRVLEDAKRKLEKVHKDSRDALKKLDEDAK

SEQ ID NO: 8077 - protein, 169 aa, Artificial Sequence; identical to SEQ ID NO: 8076
  Synthetic

SEQ ID NO: 8078 - protein, 169 aa, Artificial Sequence
  Synthetic
SEKELLDRVKEKLKKIIDDVEEILRRSKKELEKIIRESEKLVEEVKRDLRRLIEENREVDELERLVRDLERILKESTEKSRRAVEELERINREVLERLRDALRKLEERARREGSEKVVEEVERVLEKLLRDVERVHRRTKEVLDELRKENKKVVEDVRDVLEKARERAR

SEQ ID NO: 8079 - protein, 169 aa, Artificial Sequence; identical to SEQ ID NO: 8078
  Synthetic

SEQ ID NO: 8080 - protein, 179 aa, Artificial Sequence
  Synthetic
EEVEDVARKIEKLLEDVRRIDKEISDRNRELLKEVRKIDEKILREIEKLLEELRDTATKDSDKRAVTEIVTRVVERVEKLLKESEDIVREVEERVRRSLKESRRILEEVVRRVKELLERKLGNTEEAERIKRELDRIRKESEETVKENEERLRRIKEESRRSVERARTELKRIEDEVRK

SEQ ID NO: 8081 - protein, 179 aa, Artificial Sequence; identical to SEQ ID NO: 8080
  Synthetic

SEQ ID NO: 8082 - protein, 182 aa, Artificial Sequence
  Synthetic
KVEDELRKLREEVRRSKEEVEKKVKELDEEVKRSKRESEKKLRDLREEVKRLEDDAERSNDDEVRKIVKEVKDRVEKLLKEVEESSKEVEERVKKLLDEVRKSSDRVREEVERLLKEVADENREKFLEEVRERVRKLLDENHKILKEAERRVEELLRRNHKILKEALDRVRKLLKELRDRTR

SEQ ID NO: 8083 - protein, 182 aa, Artificial Sequence; identical to SEQ ID NO: 8082
  Synthetic

SEQ ID NO: 8084 - protein, 186 aa, Artificial Sequence
  Synthetic
SIEEILRELREHVKENMERSEEIVRDLTRKVDESTRDSERILEKLKKDVDKLEEDAKRANSERVKKVIKEAKKRVKELLEELKKSSDDVRRTVEELVKEAKESSKRVKDEVERLLEDLERKKDREEAEELLREVRERVERVSRRNEELLKRVERDVERVLRENHELLKRVAEEVERVLKEVRERTK

SEQ ID NO: 8085 - protein, 186 aa, Artificial Sequence; identical to SEQ ID NO: 8084
  Synthetic

SEQ ID NO: 8086 - protein, 186 aa, Artificial Sequence
  Synthetic
SIEEILEKLRREVEESEKDSRRSAEELRKHVRENEKRSEDIVRKLTEDVERLERKARSRNDRRVEDLVRRVKRLVTELVKKAKESSDKLREDVERHIRHSEDSSRRVKETVERLLKRLEEKKDREEAKELVREVAERVEDVLRKNHEINKTNAEAVKKWSEDNRKLLEDVRREVERVLKELEKEMT

SEQ ID NO: 8087 - protein, 186 aa, Artificial Sequence; identical to SEQ ID NO: 8086
  Synthetic

SEQ ID NO: 8088 - protein, 177 aa, Artificial Sequence
  Synthetic
DEVRKLVEELRKINEDDKRRSDKNFDDNRKLAEDVKRVLERNVEENRKMAKRLEEVLRNNSPSKDLAELIKRWEELIKKSEDDLRRLLKEWEELIRRSAEDSKRSLDDLRRLLERIRRDGLDEKLLKEAEERIRRNAEENRKLLERSKKALEEVERRARKLLEESRRALEELKKRAD

SEQ ID NO: 8089 - protein, 177 aa, Artificial Sequence; identical to SEQ ID NO: 8088
  Synthetic

SEQ ID NO: 8090 - protein, 177 aa, Artificial Sequence
  Synthetic
DEVRELVKELRELNKRDKKRSKELRDKLEEANREDEEKTRKNKEDNERMAREVERVLRDDSPSEVVRKLLEDWKKLIKDSEDDSRKSLEELKKLLRELAEDSKRSLEELRDLLRKIAEAGLEERLLKEAEELIRRNEEENRRILREVEERIKKNEDDNRRVLKRSREELERVEREAR

SEQ ID NO: 8091 - protein, 177 aa, Artificial Sequence; identical to SEQ ID NO: 8090
  Synthetic

SEQ ID NO: 8092 - protein, 177 aa, Artificial Sequence
  Synthetic
DEVDKLRKELEDANARDREKSKENKDENDKALKELEEVLEKLKRELEEIVRRVKEVLDKNSPSEVVKRLLDDARRVLKKLADDLRRLLDEWRKLLRKSAEDSRRSLEELERLVKRIAEAGLEEEILKKIEKEIRTNREENERLLKESEDELKRLEDEMREILERIKRLIEEVEERAR

SEQ ID NO: 8093 - protein, 177 aa, Artificial Sequence; identical to SEQ ID NO: 8092
  Synthetic

SEQ ID NO: 8094 - protein, 177 aa, Artificial Sequence
  Synthetic
DEVRELVKELERINKEDRDKSRENFKRNADIAKEVEDNLERNEEENRKVEEEVRKVLRDNSPSKVIRELEEDWKRLIKESEDDLRRMLKRWEELIEESRKDSEDSLRALERLLEEIARAGLEEDLLRDAKRKIDENKEENERLLKESRKLLERVRKRAEELLRKSRKALEDLKEEAK

SEQ ID NO: 8095 - protein, 177 aa, Artificial Sequence; identical to SEQ ID NO: 8094
  Synthetic

SEQ ID NO: 8096 - protein, 177 aa, Artificial Sequence
  Synthetic
SEVDKLEKEVRDANERDRRNSERNRKENEEMLRRVERVLRELKKKLEEAIRRARKVLDDDSPSEVIKELLKELKRLLEEIARTLKRLLDEWKKLLDDSAEDSKRSLDELRRLLEKIRRDGLDERILERIEELIRDNAKRNEDLLRRSKEMLDELRKKAKEILDRIRKLIKEVEDKAR

SEQ ID NO: 8097 - protein, 177 aa, Artificial Sequence; identical to SEQ ID NO: 8096
  Synthetic

SEQ ID NO: 8098 - protein, 178 aa, Artificial Sequence
  Synthetic
DEVERVVEKLKTLIEEWKRLTEEIEKKNEELIRRIEKVLEDLFRENEKLARDIKREIDELRTDKKMVDDLRRRLEESLRRSEEAIRKLDEDLERSLRETEELSRRMLERLKRILDEARERNVDEELLRRIEEDIERLERTDREVLKRSEKKIRELRERAKELLKRSEEIIKKLEDEAR

SEQ ID NO: 8099 - protein, 178 aa, Artificial Sequence; identical to SEQ ID NO: 8098
  Synthetic

SEQ ID NO: 8100 - protein, 178 aa, Artificial Sequence
  Synthetic
SKDDELKRKIDELIDRWRRLTEEIKKKNDELVKKWEKLTKEVTDHSRDLNRKIREELERLRTSREVLKKLLEDLRDDLRRAEELSEKMTRELERSLEETRKLSEEARKRADEILDEIRKNRLDERLLEEIEERIEKLERDDKKVLDDSRKKIDDLRKRDEEVIRRNRESIDRLRREAD

SEQ ID NO: 8101 - protein, 178 aa, Artificial Sequence; identical to SEQ ID NO: 8100
  Synthetic

SEQ ID NO: 8102 - protein, 179 aa, Artificial Sequence
  Synthetic
DEVETVDDRVKKVIRKLEELLRELAKLNKDIVDDIRRRLKEVEERNRKLAEDIERLLEEGGEDTKRLLREVEEIARRLHEENERVLREIEKLARELHKLNEKVLRDIDRLLRELEEELRRTGVDEDVIKKVRDEAERIRREVRRLDEESRKTVKRLLDEVRELNRRSEEELRELRRRIE

SEQ ID NO: 8103 - protein, 179 aa, Artificial Sequence; identical to SEQ ID NO: 8102
  Synthetic

SEQ ID NO: 8104 - protein, 178 aa, Artificial Sequence
  Synthetic
SELEEVRERLRKLIEDLKRLNEESLKENREIIKALRELNERSLRENKELIKRLEDSNLTSEDAKRLVKRVEDESRKSAKRNEDVVRESRERSKRSAERNKRVVREVEERVKKLAEDIDEGDEARTIIEEIKRRVDELRKHIEESIKEVKKLNDEVEKHIRESIKESEEDLKRLKDRID

SEQ ID NO: 8105 - protein, 178 aa, Artificial Sequence; identical to SEQ ID NO: 8104
  Synthetic

SEQ ID NO: 8106 - protein, 177 aa, Artificial Sequence
  Synthetic
KDDEDVDEKIRRAIKKNEELSREIEDKIRRILKKHEDLTRDLAREIREVVRKLRELSKRGGGKEMADKVLKEAKEVIEKIERTSRKSLKEVKDLIDRLAERSKKSLDELREVIERLRERGVSEELLRKVEELLRRLEEENRKILKEVDERLKDLEKKDRDLLEEAKKLLEDVERELR

SEQ ID NO: 8107 - protein, 177 aa, Artificial Sequence; identical to SEQ ID NO: 8106
  Synthetic

SEQ ID NO: 8108 - protein, 182 aa, Artificial Sequence
  Synthetic
SELEKLIKELRDLVRESEERLRELVRKVKELIKRSEDEVERLLDRSRELAKELEEEIRRKGLEERLLREIEKELRELLKRNRDSLRRLKELYRELLRRIRKLLEDIRRKYEEVLRRLEEAPDRREVLDKLKKDAKRVNDDSERIIKRADEEVKRVNEESKRMLEENEKMNRDLVRRIRERIK

SEQ ID NO: 8109 - protein, 182 aa, Artificial Sequence; identical to SEQ ID NO: 8108
  Synthetic

SEQ ID NO: 8110 - protein, 177 aa, Artificial Sequence
  Synthetic
DLEEMLTEVERLARELEEESKKIRKEVERLARELEEESKEINKRIKDKADDLKEKLKDVREVDKLLKEIEEELRRVTEESRKVLDDVRRDLDRVHEETRRKLEELKKRAEEVRRSNVDREIIKRLVDEVKKVIDELMKKNRKLLEDVERILTELSERNRDLARKVDKLIRDLEKRAR

SEQ ID NO: 8111 - protein, 177 aa, Artificial Sequence; identical to SEQ ID NO: 8110
  Synthetic

SEQ ID NO: 8112 - protein, 182 aa, Artificial Sequence
  Synthetic
SKLEEVKERVKKLSKRNLDVAKRVLDEIDKLIKEDLKKTEDALRRIKELLDRLREMKRRGEIREEEVKRVIDDVRRLLEDIERHNREVRKRVEELLKRLKEHTEEVARRVERLLEELKKDDDDERIRRIVKEVRELVRRNDEEVDKIVEEVKRLLERSSRENEKVVREVEELLKRLEEEARK

SEQ ID NO: 8113 - protein, 182 aa, Artificial Sequence; identical to SEQ ID NO: 8112
  Synthetic

SEQ ID NO: 8114 - protein, 182 aa, Artificial Sequence
  Synthetic
DDVERLLKRVKELIDDDLRKTEKALREIEKLSRDNKKRTEDVLREIEERLRRLEEATRRGEIREEEVEKVIREVRELLKDSTRHTEELVRRVRRLLEEIKRHNTELRKEVRELLDDVRRKEDSERVRKIIRDVERLLEESTRRNEEAVKRVERLLEENKKRNEDVVREVEKELRRLREEARK

SEQ ID NO: 8115 - protein, 182 aa, Artificial Sequence; identical to SEQ ID NO: 8114
  Synthetic

SEQ ID NO: 8116 - protein, 182 aa, Artificial Sequence
  Synthetic
SDIEKVLEDIRRLSKKNVDDSKRVLDEIRELSKRNLELVKEVLERIRRLLKKLEEARRRGEVRKEAVRTVEEDIRRLLEELKRHTEEVDKRVRELLERSTRHTEEVAEEVRRLLEKLKERTDTERIRKIVEDVKELLDRNREENERIVREVEKLLDENRKEVEKILREVERLLEELEKRERD

SEQ ID NO: 8117 - protein, 182 aa, Artificial Sequence; identical to SEQ ID NO: 8116
  Synthetic

SEQ ID NO: 8118 - protein, 182 aa, Artificial Sequence
  Synthetic
KEVEDLLKRIRDLLKRVEETSREVLEEIKRLIDRDRKHSKEVLDEIKELLKRLIEAAKRGEIREEDVKRVARKVEKLLERNKKHNRDVEERVKELLKDSTRVLKEVEKRIRELLEDVRRREDSERVRTIIREVEKLLKELEDKNDEIVRRVEELLRKSHEDNRRIAEEVREMLKRLEDEMRR

SEQ ID NO: 8119 - protein, 182 aa, Artificial Sequence; identical to SEQ ID NO: 8118
  Synthetic

SEQ ID NO: 8120 - protein, 185 aa, Artificial Sequence
  Synthetic
SSLEKVEKDIRKLNDDSKKEAKRVTEENRKSNEDVERELRKIVEEVRRLIKDVEDKIRKDGTDEDVKRLVDEVKKRVEDLERKAKELIDRDDKKSEDLARKLRELLKDDARKVDKLIRDMDRETRTERVKRIVDELRKSLRKLEEDVKELIKENKESNDRLRERVERILKELRELLRELEEKVKT

SEQ ID NO: 8121 - protein, 185 aa, Artificial Sequence; identical to SEQ ID NO: 8120
  Synthetic

SEQ ID NO: 8122 - protein, 185 aa, Artificial Sequence
  Synthetic
SEVERLVEEVRKSNKKWEEESRELTERNKKLNRETTKRAEDLLERVRELVRTVTEIIKREGTDEKVEELVRRVKKALRELIETLKDLVRRDDEKSRKLIEDDRKILKEDEERVEELIKDLDRKRRDERLKRIVEEIRDSVRRLKEKSEELVRRNEESNDRLRRRVEEIAKEARDLVRRLEEEVRR

SEQ ID NO: 8123 - protein, 185 aa, Artificial Sequence; identical to SEQ ID NO: 8122
  Synthetic

SEQ ID NO: 8124 - protein, 185 aa, Artificial Sequence
  Synthetic
SEAERVLEEVRRLNDKSKKTAEKLTEENKRLNKRTTDFLKEVLERIEELVRRVEDRIRKEGTSREVKELVDRLKDRVRELIKEARKMVKEDDRRSEELVERLKEIIERDRRTVEKLIEDLKRKSDDKRVKDIVREIRDSVRKLEEEVRKLIRENEKSNKDLRRRVRKIEEDIKRIIRELEERVRK

SEQ ID NO: 8125 - protein, 185 aa, Artificial Sequence; identical to SEQ ID NO: 8124
  Synthetic

SEQ ID NO: 8126 - protein, 185 aa, Artificial Sequence
  Synthetic
SELEKILKDIEDLVRKWLEESKDLLRKLKKLNEDTTERLRRLLDELRKLIKDLLDKIRKDGTDDRVRKLVEDITRKLEELIKEARELVREDKRRVDELIRRDEEIAKEVEKEVRRLIRDMKEKRDDKRVKDIVKKIEELVKKAKEESKKIVEEVRRSVKRLEEEVRKIEKDIKDLIDELRKKVTT

SEQ ID NO: 8127 - protein, 185 aa, Artificial Sequence; identical to SEQ ID NO: 8126
  Synthetic

SEQ ID NO: 8128 - protein, 175 aa, Artificial Sequence
  Synthetic
SEVEDLRRELEEINKEWNKRTKDLVKEVEEVNRDINKKIRDLLREARRLVDEIRRLIEKGEPKEELIKTLRRVVEEIEKDIRRLEERLAAIHKKVKDDDKKLADELREMHKRVEDRVKNEEVIKELRKLLEESERRAREMNKRLDRLLEESKKDVDRVREEIKRLVDEIEDRARK

SEQ ID NO: 8129 - protein, 175 aa, Artificial Sequence; identical to SEQ ID NO: 8128
  Synthetic

SEQ ID NO: 8130 - protein, 175 aa, Artificial Sequence
  Synthetic
DEIEEVLKRLEEIVKTWDERTKRLTERVRTVNREVNERHKKLTRDLRELAREVLDLVRQGKDKDRLIKRLEDMIRDIVRRAREINKRLAEIHKRVEDEDRKLAEELRDVLDKVRRKLRSREMLRELEERIRTVEDKVRRVNEELRELLKTSNRRSEEIEKELEKILREIRERARK

SEQ ID NO: 8131 - protein, 175 aa, Artificial Sequence; identical to SEQ ID NO: 8130
  Synthetic

SEQ ID NO: 8132 - protein, 175 aa, Artificial Sequence
  Synthetic
DEVRKVLEDLRKIVREWEERTERLLRDLKRINEEINRRVEKLTEELRRLVKEIKKLTDDGKDKKKLITELEEVARRIVETLKDLLRRLAEVHKKVVREDEKLLEDLKRFLEDLKRKMKNEDVLREADKIIEDVEREARRVNKELKDLLDESAERIERIIREIERLVEKIKRDADR

SEQ ID NO: 8133 - protein, 175 aa, Artificial Sequence; identical to SEQ ID NO: 8132
  Synthetic

SEQ ID NO: 8134 - protein, 175 aa, Artificial Sequence
  Synthetic
SEIEKVLDELREINRRINETAKEILRRLKEINERTKKEIDRLLDELRKLLRRVEELRKEGRDTEELIKRLRERVDEIRRDIKRLIDEDRKRVEDVERELERLAEELRRMHEDAKRKMKSEEALKDLERLLRESEKRIREIIKRIRESVEKLERDVRRVIDEIRRRLEEIERRLRK

SEQ ID NO: 8135 - protein, 175 aa, Artificial Sequence; identical to SEQ ID NO: 8134
  Synthetic

SEQ ID NO: 8136 - protein, 171 aa, Artificial Sequence
  Synthetic
KEVEEALEELRRILREWEEVTKRLEERVEEINRRSLEELRRLKEEVEEIAKRIRDTDKADTLLKELRRLLEEIRKRSEDSLRRDEELFERIHRTDERAARELKKVLEDIARKIDRKEVLEELDKLVKDIKRKVDEVNEKWKESSKRLEDEHRKVIKELEELVKRVEEELRR

SEQ ID NO: 8137 - protein, 171 aa, Artificial Sequence; identical to SEQ ID NO: 8136
  Synthetic

SEQ ID NO: 8138 - protein, 171 aa, Artificial Sequence
  Synthetic
KEVEDALKKAEDILRRWEEVTKKLKDEARKINEDSRRKLKRLKEESREIVERIKKTDPSDELLKRLRDLNRRIAEESKKSLRRDEEVFRRIHEIDKEMADRLAELLKEIADKIDREEVLRRLEKLVEDIKRKVAKVNDEWRKSSEDLEREHRKVHRESEKLIRDVEDRLRK

SEQ ID NO: 8139 - protein, 171 aa, Artificial Sequence; identical to SEQ ID NO: 8138
  Synthetic

SEQ ID NO: 8140 - protein, 171 aa, Artificial Sequence
  Synthetic
SEVEEVRREVKRVVDDWRRVTKKLLDDIRRISEESKKIIRDLKEAAKTMIREVERTRPDETLLDRLRRLLERIAREAKRSIEDIRRLLEELHKTDKKIAEELKRLLDRIAEEIDREEVLKELEKLLEDLRREVEEVNERLKRLLDENEKRIREVLRELKKLLRDLDEKLRR

SEQ ID NO: 8141 - protein, 171 aa, Artificial Sequence; identical to SEQ ID NO: 8140
  Synthetic

SEQ ID NO: 8142 - protein, 184 aa, Artificial Sequence
  Synthetic
DELERVREEVKKLSDTSREKLERALKKARDLLEENERRLRELKKEVEELIRRIEEKLKDRKDEDLIRKIERDLDRVLRKVEKLVEEVRRRHEKVLRELAKLVKESKEELDKVLRDVEKLIRDRESEELRKVLTDIERLLRENKKELDEVLKEVEKLSREADDKNRKVLKEIKELLDELKKRAKD

SEQ ID NO: 8143 - protein, 184 aa, Artificial Sequence; identical to SEQ ID NO: 8142
  Synthetic

SEQ ID NO: 8144 - protein, 178 aa, Artificial Sequence
  Synthetic
SEVERMLEEVERISEESKRKLEEVLRRVEEIIKAIERTLEKVLKDDEEIIRRIEDTLRRRNTEEVSKRIEELSERSRRKIAKVLRDIDELLKEAERELDKLKKESRKLAEDVRRALKEINVRREVVKTIDDLLRENERRVDEALEEIEKRARDLREKVKELEERLDRTNRKLKKKVED

SEQ ID NO: 8145 - protein, 178 aa, Artificial Sequence; identical to SEQ ID NO: 8144
  Synthetic

SEQ ID NO: 8146 - protein, 182 aa, Artificial Sequence
  Synthetic
KEVEDIIEESRKLDKELEDEIRRIIEESRRLNEELEEIARRIDEEIKELLERLKRRDKDARELLRELEEVVKEVRKRMEELLKRSRDVSREHEKTLRKLLEESRRMTEKHRDDLRKLEERNGVKEDVERLVRSNREVARDVREKLKRLLEHNKEVVDRVREELKRLLDEARRVIEEVRKKAD

SEQ ID NO: 8147 - protein, 182 aa, Artificial Sequence; identical to SEQ ID NO: 8146
  Synthetic

SEQ ID NO: 8148 - protein, 184 aa, Artificial Sequence
  Synthetic
DELERIDEKIKRDVEEHKRETKRILDESERLNREVKKRLEEIRERIRRLAEEIRKEIERDKGKERLEKKVRDLEKTVRDLIRELEELVREVHERDRRLIKELREHLRRLEEDLRRLIDELRREVEERKLEKVMEDVKRLIDEARKENEDVARRMERSNKELKRKLDEIRREVEELIKELRERTK

SEQ ID NO: 8149 - protein, 184 aa, Artificial Sequence; identical to SEQ ID NO: 8148
  Synthetic

SEQ ID NO: 8150 - protein, 184 aa, Artificial Sequence
  Synthetic
DDLERAREEVADLIRKHEEKTRRILEESRRLNERHRELSKRILDEIRKLAERIEELIKRERGKDELRRKVEDLERRVEDLIRRLEEHLRRVHDKDRRLIEDLRRHLKRVVEELKRLIDELRRKVPKEELDRIEEELKRLIDTLREKNREVEKRARDSNRDLKRTNDEIAKEVRELIKKLREDLK

SEQ ID NO: 8151 - protein, 184 aa, Artificial Sequence; identical to SEQ ID NO: 8150
  Synthetic

SEQ ID NO: 8152 - protein, 184 aa, Artificial Sequence
  Synthetic
RELETIADRIRKLSRENSEVLKEIARRIERLVEEHRKESERILKEIKELADDITRLIREDKGKERLKRKVEELEKRLRELIERLKEHLKEVVKELERLIKEMRDHSERVVEEAKELIDRLRSKVPKEELDKVEEEVRRLIRTNREILRTIEKRVRDLIEELKRRNDEIARRVEELIKRLRRETD

SEQ ID NO: 8153 - protein, 184 aa, Artificial Sequence; identical to SEQ ID NO: 8152
  Synthetic

SEQ ID NO: 8154 - protein, 184 aa, Artificial Sequence
  Synthetic
SELEKVADELRKLIKDDNDLLDEILDRIRKLSKENEKRLREILKEIRKLMDEISKLIKKDRGKERLKKKVDELRETVERLIKEARDHSREVAKEIKELIREAEEHTKDIARKLRKLIEELRRRVPKEELDKIREELERLIKRNKEKLDEIRREVDELIKKNEETLKRIEEEVRKLIEDLKEELR

SEQ ID NO: 8155 - protein, 184 aa, Artificial Sequence; identical to SEQ ID NO: 8154
  Synthetic

SEQ ID NO: 8156 - protein, 184 aa, Artificial Sequence
  Synthetic
SDLEKIEKEIEDLVKRDNEVDKKVMREIRELSKENKERLRKILEDLRREAKKIKDDIERETGKEELEKKVREIEKRARELIKEAKRHSEELAKTAKDLIRRTTKHTKDVEEELRRLIEELDRTVDKEKLKRVEKKVRELIKRNRDHNERTREDVEKLIRDNEDTLRRIEEEIERLIEKLKRDTK

SEQ ID NO: 8157 - protein, 184 aa, Artificial Sequence; identical to SEQ ID NO: 8156
  Synthetic

SEQ ID NO: 8158 - protein, 174 aa, Artificial Sequence
  Synthetic
KEVEDAVKELEDLLRKNEDKTRKIVEDMRRSNKDLEDHSRKSEEEVRKLLDDLRRAGVPRDSLKRLAEDVERVTRESRELLERVHRADRELIERLKESNERLRRAIEEIRKAIKAGKDIKTLLDRVRKLAEEDNERLDRLRRESEELNERVRRVDKKLLEEIRRKAKKVEDDTR

SEQ ID NO: 8159 - protein, 174 aa, Artificial Sequence; identical to SEQ ID NO: 8158
  Synthetic

SEQ ID NO: 8160 - protein, 174 aa, Artificial Sequence
  Synthetic
DEVREVDRRLKELLRRLKETIDEIRRRMEESNRRLEDHSRKSEEEARKLLEELERKGVPRDTLERLREEIERVIEESRRLLEEVHRRDRKLIRDLEKLLEDVRRTVEEVRKKIDDGSDLEELLRRLEELAERAERKLEKALRDSEDLNRKVTEVDRRLLKEIRDLVEKVERERR

SEQ ID NO: 8161 - protein, 174 aa, Artificial Sequence; identical to SEQ ID NO: 8160
  Synthetic

SEQ ID NO: 8162 - protein, 174 aa, Artificial Sequence
  Synthetic
SEDEKVRKEAEDLLRELEKHSRDTERRARKSNRDNNEHSKESVKDLRRLLERLRKAGVPRDTLKTLEDMIRRIIEESERSNERLHREDKKLVEESRKLVKDVLKRLEDIERAIKAGSDIRKLLEEVRKLVDDLRKRDEEIMKTSERLNEEDNRKDRRLVEDVKRLADEVEKKTR

SEQ ID NO: 8163 - protein, 174 aa, Artificial Sequence; identical to SEQ ID NO: 8162
  Synthetic

SEQ ID NO: 8164 - protein, 174 aa, Artificial Sequence
  Synthetic
SKVDDVKRRIRKLLEDSKKRSRESIERVERSNRRLEKHSRDSARRAKELLDKLREEGADERVIKELEEIVREIKKRSEELLEKDKKDSEEIVRRSRKLNDELREVIRKVEEMLRGGSDIDELLERLKELAKRIKELDDRLLRELEEINKTTEKLDRDLLKEIKERIDELRKREK

SEQ ID NO: 8165 - protein, 174 aa, Artificial Sequence; identical to SEQ ID NO: 8164
  Synthetic

SEQ ID NO: 8166 - protein, 174 aa, Artificial Sequence
  Synthetic
DKVERVKKEVRDLLRRLEKHSEDSVREIDTSNKRLEEHSRRSKEELKRLLRKLKEAGLRREVIEEVEKRIRDVERESEKLLEDDKRKSERIKEESKRILKEVRDRIREIEKLLDSGADIDRVLEEVRKIIRRIEEEDRRLLKEIRDINETTERLDRKLLDELRKVVKDIEDRER

SEQ ID NO: 8167 - protein, 174 aa, Artificial Sequence; identical to SEQ ID NO: 8166
  Synthetic

SEQ ID NO: 8168 - protein, 188 aa, Artificial Sequence
  Synthetic
SELEEVKKKVEKLIRDVEKVSEDTRREVERLIREVEEATKEHLDRVRRLIEELREVRKAGSRKEELRELLKRVADKVKRLIETNREVLKEIEDRVRKLIEENRRVIEEVAKTLKKIIDDLRRRLREDRLRERLERLAKEIEDLLRRLREISRTIEERARRLLEELKKRSEDLRKTAEELLKEIDEELK

SEQ ID NO: 8169 - protein, 188 aa, Artificial Sequence; identical to SEQ ID NO: 8168
  Synthetic

SEQ ID NO: 8170 - protein, 175 aa, Artificial Sequence
  Synthetic
DEVETIKKKAEDLLRDSKRKTDELTKRMEELLERSKEDSERLIRRLRELLERLRRRGLPEEVLTRIEKTIRDIERELEKVDRDLKREIERLKKELEEVNRRLEEEIRKLVELLRRGDVREEDVDREVKRLVDESKKIIERVEEDVKRLIRESEKKSRDVERRVEELERKAREDER

SEQ ID NO: 8171 - protein, 175 aa, Artificial Sequence; identical to SEQ ID NO: 8170
  Synthetic

SEQ ID NO: 8172 - protein, 181 aa, Artificial Sequence
  Synthetic
SEVEKIKREMEKLLEEHKKLVDDIRREAERLHEEHRRLSDKIREDLKRLLEELRRSGIDKKLLDEIEEVVKEVDERSKKLDKELREIIRKVVEDSRKLHEELERIIRTVERRMEELEKRGGDRKELDRLRREVEKVVRELKERNKELLKRLEEAVEELKRRNRKLLEDARRVVEEIKERAR

SEQ ID NO: 8173 - protein, 181 aa, Artificial Sequence; identical to SEQ ID NO: 8172
  Synthetic

SEQ ID NO: 8174 - protein, 181 aa, Artificial Sequence
  Synthetic
STVERIDEELKRLHTEHKKLSDDIKREAERLHEEHRRLSEEIRERLERLLEELRRRGIDERLLREIERVVEEVERTSEKLDRDLEEVIKRVEDTSRDLNRRLKEVIDEVRERLKRLEDKNGVEEDLDKILRDLERTAKELKDRNRRLLEEVERVVRELKRRNKELLKTVERVAREIERRAE

SEQ ID NO: 8175 - protein, 181 aa, Artificial Sequence; identical to SEQ ID NO: 8174
  Synthetic

SEQ ID NO: 8176 - protein, 181 aa, Artificial Sequence
  Synthetic
REVEEIDKELRRLHEEHRRLVEDIRRKLKKLHDEHRRLSEEIKRRLEELIRKLREDGASEKLLKELEDALERVKETSEKLDEDLKRIIDTIERRSRESNRELKEVLDDVRRRMEDLERKNGVREELTKLLEEVKRVVDRLKEENKRLLKEVKEVAERLKRENERLLEELRRVAEEVRERTR

SEQ ID NO: 8177 - protein, 181 aa, Artificial Sequence; identical to SEQ ID NO: 8176
  Synthetic

SEQ ID NO: 8178 - protein, 181 aa, Artificial Sequence
  Synthetic
KEVEEIREEAKRLHEEHRRLSKRIDDELKRLHDEHKRLSDEIRKELERLIEELKKGGVSEELLDRLRRELEKVDRESKKLNEDLKRILDDVRRRSERLDRELRKVIETVSRLLEDLERKGGDRDKARKLLEEVRRMVKRLKEENKRLLEEVRKVVEDLKRRNKELLEKLKREAERVKEEAK

SEQ ID NO: 8179 - protein, 181 aa, Artificial Sequence; identical to SEQ ID NO: 8178
  Synthetic

SEQ ID NO: 8180 - protein, 181 aa, Artificial Sequence
  Synthetic
SEVDEIRKRLEDLHREHRELSREIEERLKKLHDEHRRLVEEIIRRARELLEDLRREGIDKSLLDRIREVVEKVRKESEDSNRDLKRVIDEVRDTSRKLDEDLKKVIEEVERELKKLEDNGGDRDKVERLLREVKKVVDKLKKDNEKLLRDLKRVVDELKEKNKRLLEEVKRVVDDIRRRAK

SEQ ID NO: 8181 - protein, 181 aa, Artificial Sequence; identical to SEQ ID NO: 8180
  Synthetic

SEQ ID NO: 8182 - protein, 177 aa, Artificial Sequence
  Synthetic
DEVREVERKIDKLAKDLKDELRRLLKEYEELVERLEELLERILRESEKLAEELKEELKRRKTEDVVRKIEKELRESHEAIKELIKRIDELHERANRKIDELDKRIEEVLRRVKEEVDRKNLDDKVRKRIEELVKELKDILEEIKRRVEELDERSKRILKEIADRNRKLVDELRKTLE

SEQ ID NO: 8183 - protein, 177 aa, Artificial Sequence; identical to SEQ ID NO: 8182
  Synthetic

SEQ ID NO: 8184 - protein, 177 aa, Artificial Sequence
  Synthetic
SEVEKALEDVRRLVEELKKELKEILERYKRLVDKLKKENREDHERSKELAERLKDLLRKSRTEDVVREIEKELRKSHKHSRDLARRVEKLHKELNEELDELVRRIRRVLEEILRDLDRRNVDEKVRDTLRKLLEELDDLVRRIKTTLRKLVEESRRSLRKNEEDNRKLVEELREEAR

SEQ ID NO: 8185 - protein, 177 aa, Artificial Sequence; identical to SEQ ID NO: 8184
  Synthetic

SEQ ID NO: 8186 - protein, 177 aa, Artificial Sequence
  Synthetic
DEVREVLREAREVVKRLKDRLRRILEESRRVVDELRDKNRKDHETYRKVVEELKKRLEERKTEDVMRDIRRVHEELNRHSEELAKEAEEVARETHKKIEKLAREIRKVLKELLKKVDEANLPEEVRKDIERLFKELEDILKEIKEDNRRLVEDIKRSLEKNKRDLEKLVKESEDEER

SEQ ID NO: 8187 - protein, 177 aa, Artificial Sequence; identical to SEQ ID NO: 8186
  Synthetic

SEQ ID NO: 8188 - protein, 177 aa, Artificial Sequence
  Synthetic
DEVRKVLEDARRLVEKLERDLEKVLEDYKRLVDELKERNERSHRESRRLAEELKKELERERSREVVETIRETVERILRKNEELARRAEDLHRRVNEELERLVEEIKRRADDLRRRVEEAKLDDEVKERIDRLVKRLEDLARRIKEELDKLVKESRESLERNKTEVKKLIRELEETVR

SEQ ID NO: 8189 - protein, 177 aa, Artificial Sequence; identical to SEQ ID NO: 8188
  Synthetic

SEQ ID NO: 8190 - protein, 177 aa, Artificial Sequence
  Synthetic
SEVEDVLTKIEDVVRKLEEENKRSHDESRKLADELKKENKEDHDRYRKEVERLKKELEERRTKDVVTRIREVHKKLNKHSEELVRRIEDVLRRMLEKNRELVERIKETLKRLKEEVDKANLDDKVRKRVEELVKEIEKSARDNEEAVKRLAEELRDSARRNKEELEKLVKESDDELK

SEQ ID NO: 8191 - protein, 177 aa, Artificial Sequence; identical to SEQ ID NO: 8190
  Synthetic

SEQ ID NO: 8192 - protein, 177 aa, Artificial Sequence
  Synthetic
RETEEIEKEIRRLVKELRELNDEVEDRVRKLIKELKELNDRSERTLRELADELRRSGAPEEDVRRVIDRARKLHRRNKEHSKRVMTEIDKLIKTNRRHTERVERELEDLLRKLRRSTDDDVVRKVLERAERLVREDKKHTKEVLERIKELVDRDKKHTRDVNEEVKRLVEEIKKKTK

SEQ ID NO: 8193 - protein, 177 aa, Artificial Sequence; identical to SEQ ID NO: 8192
  Synthetic

SEQ ID NO: 8194 - protein, 177 aa, Artificial Sequence
  Synthetic
SEIEEIEKRIEDLARELKELNKEVEERVKKLIEDLRRLNEESRESTDRLMDELRKAGAPREELEEMIKRLKRLNDENTRHSEEVMDTARRLIERNKEHTERVIRRIEELLEKLRRSDKDEVVRRVLEEIERLVRRDKEHTERVLRTIEKLVREDEEHTKRVNEEIRKLAKEIEERAR

SEQ ID NO: 8195 - protein, 177 aa, Artificial Sequence; identical to SEQ ID NO: 8194
  Synthetic

SEQ ID NO: 8196 - protein, 177 aa, Artificial Sequence
  Synthetic
REIEELRKEIETLIRENEELNRRSKETSEELIRRLKKLNRDVEEEVRRLVKDLRDRGAPEEDVRRAEERVKKLIEDNKRHSDEVAKTDKKLNEDSERHTRRVEERLRELLDRLSRSDKDEVVRRVAEEARRLSKRNKDAIREVNETSRRLATRDAKHTRDVLREIKRLADEIRERTR

SEQ ID NO: 8197 - protein, 177 aa, Artificial Sequence; identical to SEQ ID NO: 8196
  Synthetic

SEQ ID NO: 8198 - protein, 177 aa, Artificial Sequence
  Synthetic
SEIEKAEEDVKRLIKENEELNRRSEETSRKLVEENERLNKEVEDRVRKLIKELEDNGAPEEKLRRAMERIKKLVEDSKEHSRKVAKEDRDLNEESKRHTDRVAEEIKRLIDDLRRSTDDDVVRRILKRIEDLSRKNKRDIEEVNKESERLSRENKKKIKDVLEEIRRLVERIEREVR

SEQ ID NO: 8199 - protein, 177 aa, Artificial Sequence; identical to SEQ ID NO: 8198
  Synthetic

SEQ ID NO: 8200 - protein, 181 aa, Artificial Sequence
  Synthetic
SEIEKVLEDLRRLADRHRKRVEEILREAEDSNRKTKKKHREVEKEVKELADKLKDEIRRDRNKEELTKKVKELMDRLRELNDETRRVLEEVARRNRELLERSRRHLDEVRKTVDDILRKLEKDRRLDEVEKDLRRLIRELKRLNEEVEKRVRDLIKENEELNKRIHDDLRRLIKELEDETR

SEQ ID NO: 8201 - protein, 181 aa, Artificial Sequence; identical to SEQ ID NO: 8200
  Synthetic

SEQ ID NO: 8202 - protein, 181 aa, Artificial Sequence
  Synthetic
SDIEKVLDDLRKLAEEIERAHEEVAREVRELSKRNKEVIKDILRRAKELAERIKELIDRSDRKEELRKKIEELARELEKLLKELEDHSRDVVRRLRELNDETRKMVEDLERRVRDILRKLRPDDDLRKVEETLRELIRKIRKKNEEIRRDLRRLIEENKELLERVRREVERLIEDIKRKLK

SEQ ID NO: 8203 - protein, 181 aa, Artificial Sequence; identical to SEQ ID NO: 8202
  Synthetic

SEQ ID NO: 8204 - protein, 181 aa, Artificial Sequence
  Synthetic
SEIEKMLEELRRLSERNKRTTEEIEKRLRDSNRDTKRKHEEALRTIKELIDRIKRAIREEKDKEKLRKKVEDIERKARRINEETRRTLARAERTNEKLNKDNSDHSRKVEREMEEILRKLRPDDKLRKAADDVRRLIEENRRLDERLHEEVKKLIEENRKLNEDINERVRRLIEELRRETK

SEQ ID NO: 8205 - protein, 181 aa, Artificial Sequence; identical to SEQ ID NO: 8204
  Synthetic

SEQ ID NO: 8206 - protein, 181 aa, Artificial Sequence
  Synthetic
EEIERALREMRELSRTHKELVEKILRDIAELAKTHERINEDILRKIKKLIDEIADEIRKEDKKEELKRKIDELRRRAEELLKESKEHLKRLEDTVRELIERLKETLKKVEEDLKRILEKLEKSRELDEIAKDVKRLIDENRELLKRVEDEVRRLIRKLEELNRRTEEEVKKLIKKLEDDLK

SEQ ID NO: 8207 - protein, 181 aa, Artificial Sequence; identical to SEQ ID NO: 8206
  Synthetic

SEQ ID NO: 8208 - protein, 174 aa, Artificial Sequence
  Synthetic
RELEELEKELRELLRELRRLSEESRKELKKLLDELEELSRRSAKKLKDLLDDLRRRGVPEDELRRVAKRVEDLIRTSKRLNDETRRKVEEVERESKKLNEDTEETLRRVTELLKAGKDIDEVRERLRELIERDKKLNKKLTDDLRRLAERDKRENEKLSKELEDLARKLREDAR

SEQ ID NO: 8209 - protein, 174 aa, Artificial Sequence; identical to SEQ ID NO: 8208
  Synthetic

SEQ ID NO: 8210 - protein, 174 aa, Artificial Sequence
  Synthetic
SEIEELEKRIDELLKELRDLSRRIAEEVKRLLEELKKLSKDSEDKLRELLERLKRKGVPEEELRRVEEEVERVVRESRKLNKETEDELRRLLEEIKESNDRVEKRARELKKLLRDGKDVEEVLRRLEKLVREDKERLKKVLKDARDLIKKDKDLNEKLSRELEKLVRELEERAR

SEQ ID NO: 8211 - protein, 174 aa, Artificial Sequence; identical to SEQ ID NO: 8210
  Synthetic

SEQ ID NO: 8212 - protein, 174 aa, Artificial Sequence
  Synthetic
SEIEDLERRIRKLLEENRKLVDDVAKKLRELLRELRKLSEESRKRLEDLLRKLRKDGVPEEILRRVAEEVRRLEEESKRLNDETEKELRRLLEELKRSTEDLEKKADDVRKLLRAGKDVEEVLRRLEKLSRENKDLIRRIDERIEKLIRDDKRRNREISERARELARKLEDEAR

SEQ ID NO: 8213 - protein, 174 aa, Artificial Sequence; identical to SEQ ID NO: 8212
  Synthetic

SEQ ID NO: 8214 - protein, 174 aa, Artificial Sequence
  Synthetic
KESEELEKEIRRLLRELREISRKIEEDARRLIEELRRLTEESERELEELLEKLKRDGVPEEELREVLKDLKRLIEESRRSNEEVERRVREVLKRARDSNKKVEDRAREVKKLLEDGKDVREVLERLKKLVEEDKRRLKELLDRIRELMERDKRKNKEISERVRKLIKELEDKAR

SEQ ID NO: 8215 - protein, 174 aa, Artificial Sequence; identical to SEQ ID NO: 8214
  Synthetic

SEQ ID NO: 8216 - protein, 174 aa, Artificial Sequence
  Synthetic
DEEDRLREELRRLLEELRELSERSRDEVKKLLEDLERLTRESEEKVRRLLEKLKRDGVPDEELKKVIDKLRKLIKESRDSNRRVKEELKKLIDDSKRSNDRVEEAVREIDKLLRAGKDVKRVLEELRRLVEEDKKLNEEITEDARRLIEEDRRLNKKISDEAEKLARELRERAR

SEQ ID NO: 8217 - protein, 174 aa, Artificial Sequence; identical to SEQ ID NO: 8216
  Synthetic

SEQ ID NO: 8218 - protein, 174 aa, Artificial Sequence
  Synthetic
DELRDVKRELDRLLRENEEIVERIAETVRRLLEELKKLTKELAEELRKLLEELRKRGVPEKELKEVADTLRKLLKDIERSNKEVEDRLRKLLEEIKESTDRLREELEEVEKLLRGGKDVETVLRRVRELSRDNKRRMRRVLEEAKRLAKEDKERIDKIRKEIEELIKRLKDKAT

SEQ ID NO: 8219 - protein, 174 aa, Artificial Sequence; identical to SEQ ID NO: 8218
  Synthetic

SEQ ID NO: 8220 - protein, 174 aa, Artificial Sequence
  Synthetic
DEEEDLERRIKKLLDENRELLKRIAEELRRLLEELRRLTEESADRLRRLLKELKDRGVPEKDLRDVAEKVKKVLKESEDSNRDVKRKLEKLLRDLERSTERLEREARKVRKLLRDGKDIETLLRELEKLSRDNKELLKKIEKEIRDLIKEDKERNRELSERLRKLVEELKKKAT

SEQ ID NO: 8221 - protein, 174 aa, Artificial Sequence; identical to SEQ ID NO: 8220
  Synthetic

SEQ ID NO: 8222 - protein, 174 aa, Artificial Sequence
  Synthetic
REIEEAAKDLDRLLEENKKLVKEVEEELRRLLKENRDLVKESEDRIRKLLEELRRRGVPEEELKEVEERARRVIEESRRSSKELEKRLRELLEELRRSTKELEDRLREIKKLLRNGKDVEEVLRRVRKLSRENKEKIRKILEDVKKLSEDNKRRNEELSRRVKTLVDEIKKRAT

SEQ ID NO: 8223 - protein, 174 aa, Artificial Sequence; identical to SEQ ID NO: 8222
  Synthetic

SEQ ID NO: 8224 - protein, 174 aa, Artificial Sequence
  Synthetic
SRIEELEKRIRELLKENRDLVKESEDRVEELLRRNEELVRRSKEKVERLLEELRRKGVPDEELRRVEERLRRLLEESKRSSDELRERAEKLVRDSRRSTEELEERAKRVLELLRAGKDVDEVLRRLKKLSDDNKELNERLTRTLEELSRRNADINKKLSDEAEKLIRDLEKRAT

SEQ ID NO: 8225 - protein, 174 aa, Artificial Sequence; identical to SEQ ID NO: 8224
  Synthetic

SEQ ID NO: 8226 - protein, 174 aa, Artificial Sequence
  Synthetic
KEIEDAERELRRLLEELKRLLDDVAREVKRLLDENKRLVEKSEEDVKRLLDELREEGVDEKILRDVAREVKRVVEDSRRSSKELEERAKRLLDELKKLVDKIREKLERVRKLLRAGKDVEEVLRRVRETVERVKKKIKDVLKEIEDLSRENKKLNRDLSERLKKLADDLREKAR

SEQ ID NO: 8227 - protein, 174 aa, Artificial Sequence; identical to SEQ ID NO: 8226
  Synthetic

SEQ ID NO: 8228 - protein, 174 aa, Artificial Sequence
  Synthetic
DELEELSREIKKLLEENRRLVRESEEDLRRLNEENRKLVEDSERRVRELLKDLRDRGVPEELLRKLEEDLRRLIEESRELLDRLTKRDEELTKRSRDSTKELEDRAKEVREKLKAGSDIEEVRERLRKLSKENKDLNRELTKRSRELNARTKERNEEISRRAEELARKIREDAR

SEQ ID NO: 8229 - protein, 174 aa, Artificial Sequence; identical to SEQ ID NO: 8228
  Synthetic

SEQ ID NO: 8230 - protein, 174 aa, Artificial Sequence
  Synthetic
DEKETLARKLDELLRELEKLVRDSAREVEKLNEENRRRLEESRDRLRKLLEKLKRDGVPEKDLREVKKEVEKVEEESKKLLKELHDEDRRLIEESRRLLKELADEVRRVRKLLEDGKDIERVDRELKRLAEEIKELNKRITDESRKLNEDTKRVNDKLSRDLEELARDLERRAT

SEQ ID NO: 8231 - protein, 174 aa, Artificial Sequence; identical to SEQ ID NO: 8230
  Synthetic

SEQ ID NO: 8232 - protein, 178 aa, Artificial Sequence
  Synthetic
SEIERIERENDRLNEENKKITEDIERELKRLLEENRELSRTIEEELERLLRELRKRNGGREEVLKEVEDRLRRIVEEIRRSDKRLEDIAREVKKRIRESDEELRRVSEEITRRLRKVRDEKTLRELLKRSEELSKENKDRLKKLLDDLREVSKKNKEDLKRLLREVREVARKVKERAN

SEQ ID NO: 8233 - protein, 178 aa, Artificial Sequence; identical to SEQ ID NO: 8232
  Synthetic

SEQ ID NO: 8234 - protein, 178 aa, Artificial Sequence
  Synthetic
DDIERILREMERLLEENKEISDEIRKELKRLLDENRKLSEDVVKALEDLLRDLERRKGVEEEVLKRVREVLERIKRELDRSDDELRKVAERILRDAERSNDELRKVIEEIEEELRKVRDKDTLRELARKIRKLSEENKERLKELLRELKKLSDENKERIKKLLKDAEKIIEDVRRRAK

SEQ ID NO: 8235 - protein, 178 aa, Artificial Sequence; identical to SEQ ID NO: 8234
  Synthetic

SEQ ID NO: 8236 - protein, 178 aa, Artificial Sequence
  Synthetic
SEIERIDEDNKRLNDENRKLSDRVRRENERLNKENRELSKRVEETLKRLLDELRRRGGGDDRVIKTVEDIAREIKKRLDDSDDRLRRESKRILEAAKESNEELRDFSRRIVDTMRKTRDKRTLTELLKESRELSKRNKDKIRELLRRSEKLSRENKKRIEDLLRELRRVVEKIKREAD

SEQ ID NO: 8237 - protein, 178 aa, Artificial Sequence; identical to SEQ ID NO: 8236
  Synthetic

SEQ ID NO: 8238 - protein, 178 aa, Artificial Sequence
  Synthetic
KEIEDLRRDLDRLLRENRELTREVKEELEKLNRELEELVRRIKRTLDELLKDLERRNGADKKLLDTIRRALEEATKEIKELLDDHKRLTDEVVKELEDSDRELEKRLREVKRELERTRDREEIERLREELRKLSEDNKDRIRRILERLRKTVEEIKKRLEDILRRLTEIAKEIEERAR

SEQ ID NO: 8239 - protein, 178 aa, Artificial Sequence; identical to SEQ ID NO: 8238
  Synthetic

SEQ ID NO: 8240 - protein, 182 aa, Artificial Sequence
  Synthetic
SELEKLLEDLRRLSERSERELRRLRKELEEIIREIKKKMEENLERNRKVIDEIDKVIKDDSKSKELEELLRRLEKLIEESKRDLERLLRELEELIRRIDDDLRKSLKELRDLIEDIRRKLGDESEEAKRLKEDAERLLRENERRIDELRKEADELIKELKKRIEDLVKESRRLLEELDRRAK

SEQ ID NO: 8241 - protein, 182 aa, Artificial Sequence; identical to SEQ ID NO: 8240
  Synthetic

SEQ ID NO: 8242 - protein, 182 aa, Artificial Sequence
  Synthetic
EELERLEERLDRLIEEAERRLKDNLKKNEDMARKWEEDTKRNEKRNRDLIRRIRKVIKDDSKSEELERLLEELRRLIEESKRDNERLLRELRELVERSDRDLRRLLREIEKLIKEITDRLGEEDRKVKELKRRARELLERLARLIDELRRRSEDLIRRLAEKSERLERESRKLLRDIAEKTT

SEQ ID NO: 8243 - protein, 182 aa, Artificial Sequence; identical to SEQ ID NO: 8242
  Synthetic

SEQ ID NO: 8244 - protein, 184 aa, Artificial Sequence
  Synthetic
RELEELKKEAEKVSKESKDLIEKVIRDNEDVSRRSEELIRELMREVKEVIDRLRELIERRNDEEVKKRVEDVLRELREKIKKIEKDSRELLERLKELNKRLEETSRDLARRLREKLKRLEEAGVPEDKVRRIKEELERLIEENEKLLEESKKRSEDNARRNEELLERLRRELERLARELEEELR

SEQ ID NO: 8245 - protein, 184 aa, Artificial Sequence; identical to SEQ ID NO: 8244
  Synthetic

SEQ ID NO: 8246 - protein, 176 aa, Artificial Sequence
  Synthetic
REKEELKKDIERMVEELKKLNKESRDRTRKLIKELEDLVKESDDDTERLARKLEKEVKDDEDLLRKVKKIIDELKKSNEDVERTVRTIAEDLKRSNDEDHRRIEEIIRRIEKLLREGGDRVEDLLREARKLIEELKRHTEEVIKRNKKLIDELKEIIEDVIRRNRKLVKELEDTAK

SEQ ID NO: 8247 - protein, 176 aa, Artificial Sequence; identical to SEQ ID NO: 8246
  Synthetic

SEQ ID NO: 8248 - protein, 176 aa, Artificial Sequence
  Synthetic
SEKEDLKRRLDKLAEDLRRLNKEVDDEVKELARRLRKLNKDSRKRTEDLIRELEKRVKDNKELLEKVKKIAEDMKRSNDEDHKLIEEIIRRIKKLLKEDHDLIEEIIKRAEDLIRKGGDRVDELREEIKELIDRLRKHTEEIIRRIRRLFEELRKHSKKVIDDNKRLFDELEKTAR

SEQ ID NO: 8249 - protein, 176 aa, Artificial Sequence; identical to SEQ ID NO: 8248
  Synthetic

SEQ ID NO: 8250 - protein, 176 aa, Artificial Sequence
  Synthetic
KEKEDLKRKVDELDKELKKLNEDSRRKTKELIKRLKDINKRLREELEKLADELRKKVKDDEDLVKKVEDIIREAEKLLEEDHELIERIAERMRRSNDRDHELIKRIREEIERLLREGGDRVEELDREITELIKELRRHTEEVIRRNEKLARELEKHSRDIMETIRELIRDLERTAK

SEQ ID NO: 8251 - protein, 176 aa, Artificial Sequence; identical to SEQ ID NO: 8250
  Synthetic

SEQ ID NO: 8252 - protein, 176 aa, Artificial Sequence
  Synthetic
SEKERLEKRLREVVRELEKLNEDLDRRLEELARDLERLNEESRRESRKLAEDLKREVKDDEELLEKVKRIIDEDRRLNDEDHKLIRDIIRRAKELLEEDHKRIREIIKRAKELIDRGGDRVEEVEERIERLIRDLKRHTEEIKKTIEELMKELREHSREIIKRSRDLFKELKDTTK

SEQ ID NO: 8253 - protein, 176 aa, Artificial Sequence; identical to SEQ ID NO: 8252
  Synthetic

SEQ ID NO: 8254 - protein, 182 aa, Artificial Sequence
  Synthetic
SELEKVIEEIREISERSLEKIKRLMEKIKELSDRTAERLRRVLEEIRKIIEEIKELRDRGELRREKVKKLVEELERKLDELRKESEKVIETIRRLIETLMKESEDLIRELEERLRDLLRKKDKKELAKKITEDLKRNEERNRRAIEELERTLRKLEEENRRLIREAEDTLRRLVEELEKKDE

SEQ ID NO: 8255 - protein, 182 aa, Artificial Sequence; identical to SEQ ID NO: 8254
  Synthetic

SEQ ID NO: 8256 - protein, 185 aa, Artificial Sequence
  Synthetic
SELEEVLKEAKRLIDEIRKHTRDVSERSKRLLEEDLKHTEEVIKEIRKLIKEILDRIRARETSEDLRRDIERATREIRKLLEDNTRESRRVIEESERLARDNKEKSKRVIDELRELVKDIARRDKSEDDLRRLKETIERLAKDLERLNREHDETNKKLAKDSEDLNRELKKRVEELEEELRRALK

SEQ ID NO: 8257 - protein, 185 aa, Artificial Sequence; identical to SEQ ID NO: 8256
  Synthetic

SEQ ID NO: 8258 - protein, 185 aa, Artificial Sequence
  Synthetic
KELEDVLKEIRDLARRIEEHSKKVLREIEELIRRLEEENREVLRRMREEIKKIKEDIRNREPDKELEKKIEDVIRRLKELVDTLHERNRRVIKEIEDLLRDNSRKTEEAIERVRRLVEDVARRDRDKRKLDELRRDVRRLERRLERLNETLKERIDRLAERLEEVDRRLDEELKRLAEELKEELR

SEQ ID NO: 8259 - protein, 185 aa, Artificial Sequence; identical to SEQ ID NO: 8258
  Synthetic

SEQ ID NO: 8260 - protein, 186 aa, Artificial Sequence
  Synthetic
DKLDEIKERIERLVETDLRVIKRILEEADELIKENEKLIEKILRDNRRLIEEVEEIIRRDRDKRRLERIVEEVERRLDESTKELKKSSDRLTERLEELLERSRRHSERIDRTAKRLTEELRDKVVQDEKKLRELKKRVDELREESKDLNDKLEKRIRDLKRELKKLNDRHEEELRKLKERLRRATK

SEQ ID NO: 8261 - protein, 186 aa, Artificial Sequence; identical to SEQ ID NO: 8260
  Synthetic

SEQ ID NO: 8262 - protein, 186 aa, Artificial Sequence
  Synthetic
DELDEILKTADKLAEDDLDTIRRLLEEVRDLVRKDKEVIKRILEEIDRLIKEVEDIIRRDRDKERLKEIVREVVERARELLRRSKKHSKEVAETLDELLKRLREHSREVVEELKRLLEELRRRVVQDEKKLKELEDRVRELKRRSEELLKKVEETLRRLKEESRRLNEELERTIRELEERLRRATK

SEQ ID NO: 8263 - protein, 186 aa, Artificial Sequence; identical to SEQ ID NO: 8262
  Synthetic

SEQ ID NO: 8264 - protein, 174 aa, Artificial Sequence
  Synthetic
SKEDRAREELKRLKEELEKLLEEHRKTLEDLNRELKRLVDEHEKSIRELRKELKDSNVEERVVREIARDAERSLKELRDLVREVHERDRKTHEDLRRLIKRVKEKLEEVEKLIRDGEDIDDVIRRVRETIDEVVRRIEELLEENRKLIEDLEEKIRRLNERLKRLVEEIKERDR

SEQ ID NO: 8265 - protein, 174 aa, Artificial Sequence; identical to SEQ ID NO: 8264
  Synthetic

SEQ ID NO: 8266 - protein, 174 aa, Artificial Sequence
  Synthetic
SERERVREEVRKLLERLRELLERHRRKLEKLNRELEKVLEDHRRTLERLKEELERSNVDEKVVREAKRRLDETHKKLRRLIEEVKERDKRSHDELRELIREVEEKLREILELLERGKDIDTVLEEARKLIEKAERDIRRLAKENEKTIEEVKERLKKLMEENKRLIEEIKERTR

SEQ ID NO: 8267 - protein, 174 aa, Artificial Sequence; identical to SEQ ID NO: 8266
  Synthetic

SEQ ID NO: 8268 - protein, 185 aa, Artificial Sequence
  Synthetic
SEIEDLLRRLKEVADEIKERLKKLSEESEELVRRVKRRIEELNKENREVMKEIKRRIDSGQPEESLERLVREADKRLRDSIKEVEDLLRELEEMLRRTNEKARRLVDEIRRRLERVLEEVKKRGAPEEDVRRLAEDIRRLLEEIEKLLKEHEEKNRKLKKELEDLVRRHRKSVEDLKREIRERSR

SEQ ID NO: 8269 - protein, 185 aa, Artificial Sequence; identical to SEQ ID NO: 8268
  Synthetic

SEQ ID NO: 8270 - protein, 177 aa, Artificial Sequence
  Synthetic
DDEERLEETLERLERELKKIADEHRRRNEELRDTLRRIAEELRKTHKDLLERLEEENIPEEARKRVEDHVRESDRLLRELKKELEELHERVDRVAKDLLKKLKDIVREVRKLLKETKEKRVVEEVERKLRRLMDRIREELKRLTDESEDLVTKILDTVRRIVESIKKLVDELREERK

SEQ ID NO: 8271 - protein, 177 aa, Artificial Sequence; identical to SEQ ID NO: 8270
  Synthetic

SEQ ID NO: 8272 - protein, 181 aa, Artificial Sequence
  Synthetic
DEAERLLERVDKAHERSEELLDRVLKENRKVLEEIRKLADDLRKLLDDIMRRIEDLVRKENSEEVVKEARRLLEELKEMIDRLVRRVEELLRDTNRKNKRVVEESKKLLDEVREEIKKLNVNDRDLREIERRLKEIEEENRKLVKRLEDENRKIAREVEKLVERLERRLREIARRVEESVR

SEQ ID NO: 8273 - protein, 181 aa, Artificial Sequence; identical to SEQ ID NO: 8272
  Synthetic

SEQ ID NO: 8274 - protein, 174 aa, Artificial Sequence
  Synthetic
REKEELKKSIERVKRELERLLEEHRKRSEELKRRLEELLKDHKRRTDEVLKEAKDKNVPEDLLRDIKRRLDELNKRLAEILKDWTDKSRKLNEDLERIIRKVAKELDKILKDLEAGKDVDTLEEEIKDIIRDVKRAVKESLEEDDRLAKEVEDMVRKSKEEVERLIEKVKRDTD

SEQ ID NO: 8275 - protein, 174 aa, Artificial Sequence; identical to SEQ ID NO: 8274
  Synthetic

SEQ ID NO: 8276 - protein, 174 aa, Artificial Sequence
  Synthetic
REKEELEKEIERIKREIKKMLDELKRHSEELKRRAERLLEEHRRETERIIREMRESNVQREILEEVEKKLRRLNEELARILEDWERKSRRLLEDLKRVVEEVERRLDEILKLLEAGSDVKTLLEEIRKILKEVEDRIREILREDKRLADELEKAVRDSLREVKRILDEVREAVR

SEQ ID NO: 8277 - protein, 174 aa, Artificial Sequence; identical to SEQ ID NO: 8276
  Synthetic

SEQ ID NO: 8278 - protein, 174 aa, Artificial Sequence
  Synthetic
DEDKRLADEIKRVLDELKKSVKEHRDHSEELLRRAKELLKRHEDETRKIEEEARRNRVPEDLLREIVKRLRKLNEELKEILKRWKKRSDELDEENRRIVDDIRRKLEEILKLLKAGKDVETLKREIEELIRRAKKVNKESKEDDRRLADEVRKVVERSEETVKRLRDEVTERVR

SEQ ID NO: 8279 - protein, 174 aa, Artificial Sequence; identical to SEQ ID NO: 8278
  Synthetic

SEQ ID NO: 8280 - protein, 174 aa, Artificial Sequence
  Synthetic
REKEELEKELRRIKRELEKILEEVRKRSKELLDRLRELLRRHEAETEKAIEEMERANVRKELLEEIKRRLEELNERLRKIIEDWERKSEELNEELKRIVDEITRRLEEILRRLEAGKDVDKLLRDVREIAREAKRVIRRILKTDEDLARELEEIVRRSLKKVEDLIRKVKEDAR

SEQ ID NO: 8281 - protein, 174 aa, Artificial Sequence; identical to SEQ ID NO: 8280
  Synthetic

SEQ ID NO: 8282 - protein, 180 aa, Artificial Sequence
  Synthetic
SEEEKLEEIIRRSRKRLKELIDRLRELVKKIDDDLKRLLDEHRRRLEESERRAEELLKKVRDERIKDLVRRHREELRKSHEELEELAREVRRRLERLLRELEKILERHAEELDEIRKMIRAGKDVEKVLKELEESSRRVVELIKKLMRELEKLLRDVEERAKDLLRKNTRSSEELEKRIE

SEQ ID NO: 8283 - protein, 180 aa, Artificial Sequence; identical to SEQ ID NO: 8282
  Synthetic

SEQ ID NO: 8284 - protein, 180 aa, Artificial Sequence
  Synthetic
SEEEKLKKLLDESEKRLREILKRHEEIVRDIKRRLEELLKRHKELLDRSLKRLEELLKENRDEELERLIREHKRKLDESHKTLARIVTTLKKKLDETHRRLEELVRRHKRLLDEIRKLVRAGADVEELLERVKKSSEDVAREIRKLARDNERLLEEVKRLIRKLLEENRESSKDVEDKIR

SEQ ID NO: 8285 - protein, 180 aa, Artificial Sequence; identical to SEQ ID NO: 8284
  Synthetic

SEQ ID NO: 8286 - protein, 180 aa, Artificial Sequence
  Synthetic
SKEEELRDKLRKIRKRLEELLERLAREIDRIRRALEDLLRRHKEELDRSRKRAEELLKEIRDEDLRRLIKKHEEDLRKSHKELEDLARRVKEEADRILRRVEELVRTLEERLREIEKLVRDGSDVDRVLEELDRLLKEVEETIRDLARKLRELLKRVEDTLRKLLKENKDSSRRLEEEIR

SEQ ID NO: 8287 - protein, 180 aa, Artificial Sequence; identical to SEQ ID NO: 8286
  Synthetic

SEQ ID NO: 8288 - protein, 180 aa, Artificial Sequence
  Synthetic
SKEEELARMIEESVKRLKKLLDDLRKVIKESKDRLKELIDDHRRILEEIRRELEELLKKKRDERLEKVIRELEKRLRDSHEELKRIVEEHVREAEKVLREVEKLLRDHRKELEDILKLVRDGADVDKLLKEIEDSSRKLAEEIKKLIDEIRESSKEVIERVRRLLERNKELVRKVKEEIR

SEQ ID NO: 8289 - protein, 180 aa, Artificial Sequence; identical to SEQ ID NO: 8288
  Synthetic

SEQ ID NO: 8290 - protein, 184 aa, Artificial Sequence
  Synthetic
SEVEKLEEEIKKINDEIRRLSDKNLEDLKRILEEIEDLSRRNLKKTKDILREIEEEAKRRRTEEVVRRVRELIRRSKEHSRRVAEEIKKLIKESKDHSREVSERAEKLNREMEERVRRVIERTRLDEFAERLKRSLEDSKRTSKELVDENRKLNEELERTVRKLIEDNKRLNDRVEKRVKELAD

SEQ ID NO: 8291 - protein, 184 aa, Artificial Sequence; identical to SEQ ID NO: 8290
  Synthetic

SEQ ID NO: 8292 - protein, 176 aa, Artificial Sequence
  Synthetic
SLEDEIRRLIEEIKRKLKELLERLKEEIDRIREELKKSNRKLDELSRRIEEEARKRVGDDKEVEKVLTESKRSLDENRELDKRSLERIEDLLRKLEKIAREVERRLERLLEALKDGDEEKIERVLREMEKLLRELERIAREVLKEIEKILRENKKHNEEVMERNKRLAKELKEKAD

SEQ ID NO: 8293 - protein, 176 aa, Artificial Sequence; identical to SEQ ID NO: 8292
  Synthetic

SEQ ID NO: 8294 - protein, 176 aa, Artificial Sequence
  Synthetic
DLEREIDELIKDIARRLEESNRELEKLVRRIEEELRRSNKELEDLSRRIKTELRKEVGDQKEVEEVERDSRRSLEENKKLDKESLDRIRELLERNRELDERSKDRLRKLLEALKDGDEEKAKRVADEIRKILRENEEHNEEVARRIEEILRRNKKHNKEVADKNRELLKKLKEEAR

SEQ ID NO: 8295 - protein, 176 aa, Artificial Sequence; identical to SEQ ID NO: 8294
  Synthetic

SEQ ID NO: 8296 - protein, 178 aa, Artificial Sequence
  Synthetic
KLVEEIRKSAEDNRRRLEKLVRESKKSLDDNERENRKLVDELRKIATKIKEDLERDNIDEEVKRRLDRLIEEIRRVLKESHDHTRELAKRIKEVHERLNEHSKRLVDRLEEVLERLKNVKEAVDKLEEENKRDHDEYKKVVDELKKENKEDHERSRKLAEDLKRLLEDIRRRIKETRR

SEQ ID NO: 8297 - protein, 178 aa, Artificial Sequence; identical to SEQ ID NO: 8296
  Synthetic

SEQ ID NO: 8298 - protein, 182 aa, Artificial Sequence
  Synthetic
DEVEKLIEDLKEVTKKHAKRVEETNRHNEDVLRKVAKEVKRILDDVKRVVDEVKKVVDAGGPIDELMKRLEEVLKEVEERLDRLVEEAERVSKEHEDDNKRLADHNEEVLREAKERLERKGVDDKAKKKLEDVLKRSREEIERLKDDSRKSVDETRERLKKLKEDLKRLLEEVRKEVEKLKR

SEQ ID NO: 8299 - protein, 182 aa, Artificial Sequence; identical to SEQ ID NO: 8298
  Synthetic

SEQ ID NO: 8300 - protein, 182 aa, Artificial Sequence
  Synthetic
SEVEKLIKELRDVLKKVAEDVEKTNRDLEEVSKRSAEKVKKLEDELEKVLREVEELVKNGEDIDRLLEKLKEDLKRVRETIEDLIRENERVLREVKERNKKLVKELEDVLKEVEDRLRERGVDRKAEEDLRKVLTEIRKRAEELRRESDESVKRSRKELERLLREIEKRVEEIEDRARKAKK

SEQ ID NO: 8301 - protein, 182 aa, Artificial Sequence; identical to SEQ ID NO: 8300
  Synthetic

SEQ ID NO: 8302 - protein, 172 aa, Artificial Sequence
  Synthetic
EEVERIIEEIRDEVKKAAEKVEKVLKESREISKRAEDEVRRVLDEIRKLDETLRDARRSDEELKRVLDRIREEIKKLAEEMDRLNEESKRLTKTLAEELEEILRRIKEKIERVNGDREKLRKVLDEIRREIERLKERLDRLDEESDRKSEKLKEDLERLLREIEKRIRDERR

SEQ ID NO: 8303 - protein, 172 aa, Artificial Sequence; identical to SEQ ID NO: 8302
  Synthetic

SEQ ID NO: 8304 - protein, 172 aa, Artificial Sequence
  Synthetic
DEVRKVLEEIKELLKRLAEKVKKLIKESREISKRAAEKVKRLIEKSRRLLDTLEKANLDKDELRKALEDSKRETEEVVEELKRLNEDSKRKTEELERELREALKELERKIREINGDKDTLKTVLDTIKKKIEELVKELREVDEESKKRSKELKEEMDKVDEDIKRAIERRTR

SEQ ID NO: 8305 - protein, 172 aa, Artificial Sequence; identical to SEQ ID NO: 8304
  Synthetic

SEQ ID NO: 8306 - protein, 172 aa, Artificial Sequence
  Synthetic
DEVRKVLEDIKRDLDRLAKRVKDVLREIEELTKEAARTVKKVIEESRRLLRKLKEANLEEKDLRRALEESKKKSKEAKEKLDKIDRDIERKIRKLKEELERLLRELEKRIRTINGRREDLTELLKRIEEKIKRLVEELERLLKRSREESKRLVEEMEKVNREIEEEIKKRAT

SEQ ID NO: 8307 - protein, 172 aa, Artificial Sequence; identical to SEQ ID NO: 8306
  Synthetic

SEQ ID NO: 8308 - protein, 186 aa, Artificial Sequence
  Synthetic
EEVERLLKEIKDLLDEVARENKEALKRSKELLEEVAEDNKRVLREIEKLLEDVERKVKDEKGDEEVERKLKKVIEEIDKLVKEVHEKNRRLHERSEELIRRLHERNRRVIERMEKLIRDLKERKKEAKELLKELEDLLRKARKTVEDLDRELEELNEEIRKALEELDKELERLVREIRKRLEDARR

SEQ ID NO: 8309 - protein, 186 aa, Artificial Sequence; identical to SEQ ID NO: 8308
  Synthetic

SEQ ID NO: 8310 - protein, 186 aa, Artificial Sequence
  Synthetic
REAEELLKEIERLLREVERENKKALEDSRRLLEEVAEEVKKVLREIEELLKTLEELVRKEKGDKEVAERLDKVLKDVEKLIKDVTDRLRDMHRRSAELIKELHDRNRKVIEEVEKLIREVKERKKEMEELLRELKRLLEEIERRVRELDEELRKLNEDIKRELERLIRELEELLKRAEETLRRLKD

SEQ ID NO: 8311 - protein, 186 aa, Artificial Sequence; identical to SEQ ID NO: 8310
  Synthetic

SEQ ID NO: 8312 - protein, 186 aa, Artificial Sequence
  Synthetic
SEVEDALRRLKELLRRVAEENRKVLEESKKLVEDARRKNEEVLKEIEKLLEDVAREVKDRKGDDEVLERLKEVLKRIEDLIRKVTRDNEELHKRSKKLIEEVHKRNRELIERAEKIIREIKERNKEMEELLRELKKLLEEIKKSVEDLDRELKKLNDEIRDESRKSKEELERLLEDIERALRELAR

SEQ ID NO: 8313 - protein, 186 aa, Artificial Sequence; identical to SEQ ID NO: 8312
  Synthetic

SEQ ID NO: 8314 - protein, 186 aa, Artificial Sequence
  Synthetic
SEAEEVLRRIEELVERATRTVEKLAEESKRLLEKLAEENKRVLEEIKRLLDEVADKVRKKKGDKEVLEELKKVLDEIRELLERVHRENKRAHDESKKLIDDLKKELDRVREEIKRLIDEVRERLKEMKELLDELKTLLDEITKRLKDLTDKLERLNDKIRRELERLDEELRELLERIREEMEKLTR

SEQ ID NO: 8315 - protein, 186 aa, Artificial Sequence; identical to SEQ ID NO: 8314
  Synthetic

SEQ ID NO: 8316 - protein, 183 aa, Artificial Sequence
  Synthetic
DLEEELKELLERIRKAHEELIKELEDLTEKIERDHEKLIKRLEDLLKRIEDEMRKLLEEIDRDELKKLLEEVLREAEELVKRLRKTSEDNIRESRESNKEARKTSEDNIRDIARLLEELKRRTDSRTVKEILKRIEDSLRRAAKKVKDLAEENKDSLRRVAEKVERILEELKRLLEEIARRVK

SEQ ID NO: 8317 - protein, 183 aa, Artificial Sequence; identical to SEQ ID NO: 8316
  Synthetic

SEQ ID NO: 8318 - protein, 183 aa, Artificial Sequence
  Synthetic
SLEEKLEDLIRRLKESNERLKRELERLIEELRKNNERLLKELDDLVEEIERALRDLLREKDDEELRRLAEEVKREVERVKREVKKLSDDDKKILDDLLREVERLSREDERTLDKLKKDVSRLTDSRKVEKILKDAKDSNKKVADTVREILKRARDSNKRVAERVKDLLRRLRELLKELAERVK

SEQ ID NO: 8319 - protein, 183 aa, Artificial Sequence; identical to SEQ ID NO: 8318
  Synthetic

SEQ ID NO: 8320 - protein, 183 aa, Artificial Sequence
  Synthetic
DLEEELKELIKRIRDAHRELKERLDKLVEEIKRNNEKLSDDVRRLVREIEKELRRLLEEIKDERLKRLADDVRRKVEELLRRLRKLSEEDKTRVDEIRKELEEISRRNEEELKKLEEDLRRLTDKEKVKKLLKELEESLKRVADEVKRLLEELERSNREVEKRVRELLEEARRLLKDLADKVR

SEQ ID NO: 8321 - protein, 183 aa, Artificial Sequence; identical to SEQ ID NO: 8320
  Synthetic

SEQ ID NO: 8322 - protein, 185 aa, Artificial Sequence
  Synthetic
DLERELRELIKRIEDDIRKNVKRNEESIRKTEDELRKNVRENERLIEEMRKELEKLRRRNRDKELVRRVEELVDTVMKESRRIIEEAEKRVRDSAKRSKEVIERVKRELERVVKKIEDLVRKLDKVEEVARKLLDELREIKKRINDTSRTTLEDNKRLAKEIHDSSKESLKRLKKILDDIREEAR

SEQ ID NO: 8323 - protein, 185 aa, Artificial Sequence; identical to SEQ ID NO: 8322
  Synthetic

SEQ ID NO: 8324 - protein, 185 aa, Artificial Sequence
  Synthetic
RLAEELRKLIDKVRRDLDRNRETNRELIKRAKDELRKNEEENRRIIDEIRRALEDLTRKNKDEELVKRVEREVEKVEEESRRLIEDLKRKVDEVKERSDRVIRELEERVKKAEKKVEDLIRELDKVEEAVRKVKKEIEDIVREIHKLSKRTLEELERIVEKIHEDSKRMLERVKKLLDKIRRDAE

SEQ ID NO: 8325 - protein, 185 aa, Artificial Sequence; identical to SEQ ID NO: 8324
  Synthetic

SEQ ID NO: 8326 - protein, 185 aa, Artificial Sequence
  Synthetic
SLAEELRKLIKRVEDEIRRLAEENKDLIRKARETIRKNEETNREVITRIRREIEKLEKDNRDRKKVEEVKKELEELADRSRRVIKEVKEKLERLMRKSEELIERVERLLEEVRRKVEELIRDLDKVEEVVRELLKEIRKVLEDIRRESKTSLDDIRRLLKEINDLSEETIREAEELLDRIRKKAT

SEQ ID NO: 8327 - protein, 185 aa, Artificial Sequence; identical to SEQ ID NO: 8326
  Synthetic

SEQ ID NO: 8328 - protein, 185 aa, Artificial Sequence
  Synthetic
SLREELKRLIDESRKSLRENEERNKKSIDDTRRLLRENERRNRETIKELKKTLDELRRRSKDKDLLRTIEKLIREAERESRELIKKIEEDIRRSEERSKRAIDDLRRKNDELEKEVRTLVRDLDKVKEAVDRLLERIRRINEEINRTSEKTLEENDRLVKELHERSERLLRKLEELLRKIDETIR

SEQ ID NO: 8329 - protein, 185 aa, Artificial Sequence; identical to SEQ ID NO: 8328
  Synthetic

SEQ ID NO: 8330 - protein, 185 aa, Artificial Sequence
  Synthetic
SLAEELRRLIEEVKKRLKELEDRNRKLIKEARDELKENEETNRKTIEDIERTLEKLERDNKDKELVRRIREEIDKVREESERLIKRVREKVKKVEEESEELIKEIRKEIKRLEDEVEELIKRLDKVEEAVRDLLRRIRELLRDLERLSEESLRKLKEIVEDIHRKSKTMLDKLRKMLEELRREAT

SEQ ID NO: 8331 - protein, 185 aa, Artificial Sequence; identical to SEQ ID NO: 8330
  Synthetic

SEQ ID NO: 8332 - protein, 185 aa, Artificial Sequence
  Synthetic
SLAEELKRLIEESRKSVEELERRNRKLIEDARRDLERLARENRKLIEEIRRRLKDLAKDNKDERLVRRVARLVDKAMKESEEVLDRIRRKIDKVAKESEKIIRDIKRENDDLERKVKELIDRLSDVEEVVRRLLEEIKRLNDEAKRKSKESLDRLREILKEIRKTSERTLEKLKRILDRIREEAT

SEQ ID NO: 8333 - protein, 185 aa, Artificial Sequence; identical to SEQ ID NO: 8332
  Synthetic

SEQ ID NO: 8334 - protein, 188 aa, Artificial Sequence
  Synthetic
SEIEELLERIRDLMRRINKKSEDHLRELEKILREIRRLAEKSNEEIERLLRELEDLAEKRRTDEVRKEVRRILEEIERRSKEVIDEIRRLLDDLRKTVDKVEREVREILKRIEEEVRDLTRKLKDDKDMKDLKKTLDDLLDELRKDIERNVKENRDTLKRIEDDIRRLAEENKKLLEEVRKKIEELET

SEQ ID NO: 8335 - protein, 188 aa, Artificial Sequence; identical to SEQ ID NO: 8334
  Synthetic

SEQ ID NO: 8336 - protein, 188 aa, Artificial Sequence
  Synthetic
SEIEELLRRLEDILRRIEELIRKVLKELRDLVEKSNDLSRRHLEDAKRILKEIEEEVKRRNTEEVRTRIRKLLEDIKRTLDEVTKEDRELLDRARELAERIIRRIRKLLDDARREVEKLARELKDDERVEELRRRLRKILEDIRKRIEELVEELRRLLKEWEEESKKNDETNREVLKRIEDRIRELER

SEQ ID NO: 8337 - protein, 188 aa, Artificial Sequence; identical to SEQ ID NO: 8336
  Synthetic

SEQ ID NO: 8338 - protein, 177 aa, Artificial Sequence
  Synthetic
DEAEEIKERIKKVVEDLERKVRELLRRSEKLAEDLHELSKENIERMKRLLEELEDLVRKRRTEEVIKTAEKVLRDSRRSSKEVADRADRVLEESKRLTREVTEEMRRVLEKLRDEVRRANLDEEIEDLLRKVEERIRELEEELRRLNKKIEEEVRRNKDENRRVNEEIERRIRELAR

SEQ ID NO: 8339 - protein, 177 aa, Artificial Sequence; identical to SEQ ID NO: 8338
  Synthetic

SEQ ID NO: 8340 - protein, 177 aa, Artificial Sequence
  Synthetic
DESKEILDRIRKVNEDLRRLAEELLKDSRRVVEEAHKLSEDNIRRLEELLKEIEKEVRRRRTEEVIRRLEEVLKRSRESSEEVVRRLERLLERSRRLTEEVAERVREVNERLKEEVDRANLDDKIRKLLEDSKKTSDELKEELDRLNEEIERSVRDNKRRNEEVNKRIEDEIRKLAT

SEQ ID NO: 8341 - protein, 177 aa, Artificial Sequence; identical to SEQ ID NO: 8340
  Synthetic

SEQ ID NO: 8342 - protein, 177 aa, Artificial Sequence
  Synthetic
SEAETILEKIRRANEELNRLSEENIRKSRKVVKELHELSKENIKRARDLLREVKKLVEKRQDERVIKTLEDVIRDSKRSSKKVAEELEKVLEDSKRSSERVAREMERVLRELEEEVRRANLDESIKELLKEVEDDVRKNKEENKKVNKEAEDEVRENKERNTRVNKEMEEEIKRLAK

SEQ ID NO: 8343 - protein, 177 aa, Artificial Sequence; identical to SEQ ID NO: 8342
  Synthetic

SEQ ID NO: 8344 - protein, 182 aa, Artificial Sequence
  Synthetic
SERERLERLVREAAKELKRLLEELERLHKKIDEDLKRSNDRLRELHERIKKDIERLLRRIGDDEKLERLRRIAEEVKKRSRESLEEHRKRNEDSKRRSRKSLEDVERTMREVRRRIEDLLRKGGDRVEEILKEIEDILRKVKEDVKRVLDENRRVLEENKEHAERILRENKRMLEELRREAK

SEQ ID NO: 8345 - protein, 182 aa, Artificial Sequence; identical to SEQ ID NO: 8344
  Synthetic

SEQ ID NO: 8346 - protein, 182 aa, Artificial Sequence
  Synthetic
DSEERLRKLMREAREELKELLRRLRELHEEIRKRVEELLRRLEELSDKLRRDLERLLREIGKDEKLKDLAKLVKEVLERSRESNDRLRKIIEKVLTDSKKSLDDVARIADEVIRRIEKLLRDGGSRVEELLKTIKELVDRLRRIVEKVLDENRRLLKRLEEEIKRVLDENREMLDRLRKAAE

SEQ ID NO: 8347 - protein, 182 aa, Artificial Sequence; identical to SEQ ID NO: 8346
  Synthetic

SEQ ID NO: 8348 - protein, 182 aa, Artificial Sequence
  Synthetic
SKEETLEKLVREVKDRLKKLLEEVRRLTEELERELKKLREELEELSKELEKDLRRLKKRVGDDEKVKDLDRRLREVLRRSKKSLDDLRRIAEDVIRRSRKSNRELEEEARRVIEEIEDILRRGGERVEELLKRIKELLEELERRVEEVLRRNRELLKRLEETIRKVLEENKKLLKEVREDAK

SEQ ID NO: 8349 - protein, 182 aa, Artificial Sequence; identical to SEQ ID NO: 8348
  Synthetic

SEQ ID NO: 8350 - protein, 182 aa, Artificial Sequence
  Synthetic
DKEEELRRLVEEVEKRLRELEKELEDLTDKIEKRLRESNERIKKLSDDIRRRLEDLLRKVGDDSRLDDLRRDLKRVLDESEKSMRDHAERNKKSLERSKRSLDELRDIARRVLETIKRILEKGGERVEELLKRIRDILKRVEEIVKEVLERNRKVLEDNERHAEEVLRRNKRLLEELEKRAT

SEQ ID NO: 8351 - protein, 182 aa, Artificial Sequence; identical to SEQ ID NO: 8350
  Synthetic

SEQ ID NO: 8352 - protein, 182 aa, Artificial Sequence
  Synthetic
SKEDDLRKIVKEIEEEVRKLLKELEELTKELEDRLRESNKTLKELNERIKRRLEELLRRIGKDEKAEELKRSVEDVERKSKETLDRHEKKNRDSLKTSRDLNERLREILREVLETIRDILRRGGSRVEEVKKELEDLLRRLREEVKRVLDDHRRILKENEDHAREVLKRNKELLRKLEEEAK

SEQ ID NO: 8353 - protein, 182 aa, Artificial Sequence; identical to SEQ ID NO: 8352
  Synthetic

SEQ ID NO: 8354 - protein, 182 aa, Artificial Sequence
  Synthetic
SKEERLKKLVDDVRKTAEKLKRDLERLTKEAEETLERLKRELDRLNREIAEEIKKILDRVSEDEKVKELKKLADDVLRKSKETLDELKRILERVLEESKRLNDELRKDLERVLKDIERILREGGEDVETLLEEIERKLREVEKRIREVLKRHRELLRRLRETIKRVLERNKELLDRLREAAR

SEQ ID NO: 8355 - protein, 182 aa, Artificial Sequence; identical to SEQ ID NO: 8354
  Synthetic

SEQ ID NO: 8356 - protein, 182 aa, Artificial Sequence
  Synthetic
SKEETLKKLMDRAEEELRRLKRELEELNDRIREALKKLNEDLRRLHEKIKEDIRKLLEEVDKDEKFEELKRLAEDVLRRSRENLRDHERVNKESLEESEKSLRELEKTLDKVRKDIRKILEDGGERVEELLETIERILEEVRRRIEKVLEENKRLLDENKKHAEESLKKNKELLKRLRDAVK

SEQ ID NO: 8357 - protein, 182 aa, Artificial Sequence; identical to SEQ ID NO: 8356
  Synthetic

SEQ ID NO: 8358 - protein, 185 aa, Artificial Sequence
  Synthetic
SEVDEVRERLERLLRTVERVVERILRELKRLNDELRKIAEDLLRENKDLLRELAERVRKGLEKRELERLLKELRKRSKESNEELRRVAEKAKEDHRRLLDELRKILKTIEDEIRRLLEDLRRRGVPSEALKDIEKLVRKIKEELKRLLKEVAETLERSERSLDKLIEDHRRLVEDIERALKELRK

SEQ ID NO: 8359 - protein, 185 aa, Artificial Sequence; identical to SEQ ID NO: 8358
  Synthetic

SEQ ID NO: 8360 - protein, 185 aa, Artificial Sequence
  Synthetic
SEVEKVLETIKDLLRKLEEIVKKILDEDRKLMEKVTKIVEDLLEENKRLLEELERLAREGQPKEELTKLAEELERRSTKSNEDLKRVVEDWERRSEELLRRAEDVLRKIERTVRELLKELEKRGMPSELLKRIRELVKEVKDRLRRLREELEESVRRARKTLEDLERRHRKLLKDIRETIKELIR

SEQ ID NO: 8361 - protein, 185 aa, Artificial Sequence; identical to SEQ ID NO: 8360
  Synthetic

SEQ ID NO: 8362 - protein, 181 aa, Artificial Sequence
  Synthetic
DLDREIERLVEELERRLRELLRRNEELVKRVEDELEKLKRESEKLLRELRKKLEEAKKSKELDDLKKRLEDLADKIRRVHERLNRELKELVERSRRLLKKVEEELKRLVEEIRKVLERLKNVKEAVDKLLKELKDILKKLEELSRKSMEDIKDILRRYEKLVKELLDELKKILDELDRADK

SEQ ID NO: 8363 - protein, 181 aa, Artificial Sequence; identical to SEQ ID NO: 8362
  Synthetic

SEQ ID NO: 8364 - protein, 181 aa, Artificial Sequence
  Synthetic
DLKDEIEELVKRARERLERLREESEEIVKELEKVLRDLEKENRDLARRLRDELRKIEPSDKLRELRKRLEELLKESEKLLRKIAEEVKRLVDDIRRVHEELNKRLEELVRDIRRVLEELKDSEEAVRRLKDELRRILEEYERVVEELKKRLKDLLREAERLSKESLDELKRILRKLKEDAK

SEQ ID NO: 8365 - protein, 181 aa, Artificial Sequence; identical to SEQ ID NO: 8364
  Synthetic

SEQ ID NO: 8366 - protein, 184 aa, Artificial Sequence
  Synthetic
SLEDELRRLVEEDERNIRKLNDENRKSVRKLEELLRRLNKRNRETIERIKRLLDRLREESTDEDLLRKIEERIDDVRRKLEELDRRLEEVIRRLEKKVKDLDDKWRRLSEEIKKELERLAREGADKEEIDRILRKVERLSRKAHEDVRRINEELEKLLEKLKREVKRENDRVEEEAKRLADEVK

SEQ ID NO: 8367 - protein, 184 aa, Artificial Sequence; identical to SEQ ID NO: 8366
  Synthetic

SEQ ID NO: 8368 - protein, 182 aa, Artificial Sequence
  Synthetic
REVDELVKRIEELLREMKKKNDESLKDSRDLLRELEKRVERVIEEIEKLLRDLEELVRKEKGDDEVRKKLEDVLRKIEKLVRDLARELEEALRRSKELSDRNRKDNEDLLRDVERLVDKAKKDGLDEKRLKKLLDELRDMSRKADRALRELNKDVARKIEELRRRLKKLLDEVKERADELTK

SEQ ID NO: 8369 - protein, 182 aa, Artificial Sequence; identical to SEQ ID NO: 8368
  Synthetic

SEQ ID NO: 8370 - protein, 186 aa, Artificial Sequence
  Synthetic
SEAEKLLEDLKRLVEDLRRKNKKLNDDNERLTTELEKTSRKLLEELKRLLEKVADDVRRTRDKKRLKELAKELRDRVRKVEKDNRDLLRELEERSRRLLEESKRLLKELLDRARKLVRELERDNKEEGELKERLDRLLEEVKKTIRELEKRNRESHKRTKDVARRSAEETKRVLEKIEDDLRKLDK

SEQ ID NO: 8371 - protein, 186 aa, Artificial Sequence; identical to SEQ ID NO: 8370
  Synthetic

SEQ ID NO: 8372 - protein, 186 aa, Artificial Sequence
  Synthetic
SEAEKLLKEIKDLVDELRKRSKELIDENKRLTEEVEERARRLLTELRKLLKRLEELVRREEGKEKLDELLKDVDRKVKEVLKELEDLAEELRRRSRELLKRNDDLLRELEKRVKELLDELKERNKEEGELEERIRRLLREIEKEAKRSRDRSREVHRRTDEELRRLEREIKEILKEIKRKLDELRR

SEQ ID NO: 8373 - protein, 186 aa, Artificial Sequence; identical to SEQ ID NO: 8372
  Synthetic

SEQ ID NO: 8374 - protein, 182 aa, Artificial Sequence
  Synthetic
SDVDRLLKENRDVSKKVEDDVRRLLEELKRISEEIARRVKRLLEELRRILREIEELVKKGEDIDELLTRLEEALRRVEETLKRLVDESRKVSKEVLTDLRRLIEESKEISRRLLERLERRGISDELRRRAEKSIEDNERKLRKLEEDAKRIIDDNERILRDLERRAKDVIREVRKALEDLKR

SEQ ID NO: 8375 - protein, 182 aa, Artificial Sequence; identical to SEQ ID NO: 8374
  Synthetic

SEQ ID NO: 8376 - protein, 183 aa, Artificial Sequence
  Synthetic
DEAEKLLEEVKEENRRVNEDIKRVIEEIKKLIDESRRLMEKIIRDVEALLTRIRDVVEKLKTSEEVLERLKREIEDIDRRAKELLDDSRRKTRELIERVRERIEELRRRHDDLIRRLEERLKDDEDVRREIERIMRELKKNLDRLEEEIRRIADELRRVNTRLEEEIKRVIDEARKTLEELRR

SEQ ID NO: 8377 - protein, 183 aa, Artificial Sequence; identical to SEQ ID NO: 8376
  Synthetic

SEQ ID NO: 8378 - protein, 178 aa, Artificial Sequence
  Synthetic
SKEERLEEILRRHKKSLDEIRKELRKLLEDHRKSIEDLIRKLRELLERLKELLERLERSGVSDEARKRLEEIIDEVRRLVEKITKELEDTLKELEDLVRTITRELEKTLRELEDLVRKGGEDVDRLITEIKRINEELRESVRRLLERAKRIDEELRRTAEELVKTIEKLAKELEETVR

SEQ ID NO: 8379 - protein, 178 aa, Artificial Sequence; identical to SEQ ID NO: 8378
  Synthetic

SEQ ID NO: 8380 - protein, 187 aa, Artificial Sequence
  Synthetic
DEIEEVVERIRRIDKELNKRAEEVIRRNKELDERLNREIERVKEEIRRLIKRLEEVTRRDLKDKETLDRTARRVLEEIEKLVRDLERKMRESLKRSRETVKRVKDRLDETRERVRRLLDELRKRNTDLEEAKKKLEDLLEEHERNLRKIERDLEELNERHERNLRKLKRELEEILKRAKEVLDELRK

SEQ ID NO: 8381 - protein, 187 aa, Artificial Sequence; identical to SEQ ID NO: 8380
  Synthetic

SEQ ID NO: 8382 - protein, 187 aa, Artificial Sequence
  Synthetic
SEIEKVLREIEEIDKRLNKEVEDVLRENRRVDEELNRHSERVREEIERLVKRLDDVAREELKDKETLRRTLDEARRRIEKIVRDNKRELERSIKRSRETLDTLERRAERTKEEVKRLVEDLRRKKQDKEEMKKTLEKLLREHEENIKELKRRLEELNEEHERNIRRSEETLKKLLKEAEDRLREIKK

SEQ ID NO: 8383 - protein, 187 aa, Artificial Sequence; identical to SEQ ID NO: 8382
  Synthetic

SEQ ID NO: 8384 - protein, 182 aa, Artificial Sequence
  Synthetic
EEAERVLKRIADLIEELKRHSEEVSRRSKKLLDDLSRHTEKVSKESEDLLRRLEELARRGEIRDEVLKTVLEDSKRLSKEDKERLEKVTRESKKLSDDDRKKVEEVEREIEKLARDVKRKRDEREIEERLRTLRRRLERMVEEIERLNEENLRRVEKRVRELEKENEDNLREAKKLLDEIRR

SEQ ID NO: 8385 - protein, 182 aa, Artificial Sequence; identical to SEQ ID NO: 8384
  Synthetic

SEQ ID NO: 8386 - protein, 182 aa, Artificial Sequence
  Synthetic
SEVEEVLKDIERLIKELREENKRSLDRSRRLAEDLERRNRESLRRIEKLLRELEKIARDLRDKDELRRILKELREEVERISEEDERLAEEVLREHEKINDEDRKKLRALLDTVRKLIEDVIRTEEVRKRAEDVLRRLEEVIKELEKTNEDAKRELKRLIDELRRTNEEVNKRLEERLDKIRE

SEQ ID NO: 8387 - protein, 182 aa, Artificial Sequence; identical to SEQ ID NO: 8386
  Synthetic

SEQ ID NO: 8388 - protein, 182 aa, Artificial Sequence
  Synthetic
SEVERVLKDIERLLKELEERNRRSLEESAKSTRKVEEDNKRSLDKSTELLKRLEEDAKDDRDKDRLRKRADELLETHRKINRDDDELLKKNHEDHERINRRDDELLRDVERKIRDIIRRVIRDEEVRKRAEDVRRRLEEILKRLKETNEDMKRENKRVLDELRKTNEDAEKKLRDLIRKLRE

SEQ ID NO: 8389 - protein, 182 aa, Artificial Sequence; identical to SEQ ID NO: 8388
  Synthetic

SEQ ID NO: 8390 - protein, 182 aa, Artificial Sequence
  Synthetic
SEVEKVLKEIDELIKDVERTNRESLEESERLLEKLKRENERTVERSERLAEELERLARELKDKDSLEKLLEEVERTHRKLNEDDRRKLEDILRRHKKINEDDERLLREVLKRVEDIIRRVIRTEEVKDRADKLLRRLEEMVEKIRRTNETLLRALEKLIRDLKRNNEEVEKRLREIAKKIRD

SEQ ID NO: 8391 - protein, 182 aa, Artificial Sequence; identical to SEQ ID NO: 8390
  Synthetic

SEQ ID NO: 8392 - protein, 186 aa, Artificial Sequence
  Synthetic
SEVDELLKRLKKLLEDDKRLAEELLKTIEKVNDDTRKRSEELLRRLERALEELEKLVRKVRGREELEKVLKDIEEELRTLLEDNERLLREDDKVVKDLIREVEKLNRETEEEVRRVVEEVKKKLKDVEEVKRRLEEVLREIKRLVDETRKELRRIDEESKRLAEKSRRDSRRVEERLRTLLEELRK

SEQ ID NO: 8393 - protein, 186 aa, Artificial Sequence; identical to SEQ ID NO: 8392
  Synthetic

SEQ ID NO: 8394 - protein, 186 aa, Artificial Sequence
  Synthetic
SEVEKLLEDMERLLKEDEELVRRLSKRSEEIVRDDRRRNKEILDEIRKLLEELKRLADRLEGREELEKLLKELEDRVDKLIKESEELNEESERRNKKLLDDLERLNRDTERKIEEIVKKVRDRLDKVKDVEERLRRAEERIRRAVERTRDHARRNHEKLKELVKETRESNDRLKKEIRKLLEELRK

SEQ ID NO: 8395 - protein, 186 aa, Artificial Sequence; identical to SEQ ID NO: 8394
  Synthetic

SEQ ID NO: 8396 - protein, 180 aa, Artificial Sequence
  Synthetic
EEEERIREVKKRSEDLLEELKRSNERVERESDKLAEEIRRKLEELARRADEVIRRLRARKETEELKKLADELRKLVDEVRKRAERLIREDKRMVEEVKRRSRELIERDKRVVETIERLLRAGEPTEKLLEDLKRINKETERLNRELLRDLERINEETRERIDRLLRELERMIDELRKRVD

SEQ ID NO: 8397 - protein, 180 aa, Artificial Sequence; identical to SEQ ID NO: 8396
  Synthetic

SEQ ID NO: 8398 - protein, 180 aa, Artificial Sequence
  Synthetic
SERERAEEIRKRSEDVVREMRESNKDVSRKSEELAKKLREDLKRVEKKVRELLEEIKREKRTEDIERLIEELKRVVEEVAKTLEELIKEDRKVVEDIIRRSEKIIRDNEKLVREVIELVKAGEPTEELLKRLEEISRRSRELNRRLLEDLKRINKETKERADKLLEDLERLLEDIKRRVD

SEQ ID NO: 8399 - protein, 180 aa, Artificial Sequence; identical to SEQ ID NO: 8398
  Synthetic

SEQ ID NO: 8400 - protein, 180 aa, Artificial Sequence
  Synthetic
DEDERLKEVEEESKKVADELRDRLRRLMEESRRRLKRLREEAEEIKRELDTIAEDLKREKDTEEIKKIITDLKRIIEKVRRDLERLIREDEEASKELKDRLEKIIEDNERVVREVKKLIKKGEPTEEILRRLEEISEESERRVEKLLRENKEINEETDRRVKELLERLKEVLERIERRVK

SEQ ID NO: 8401 - protein, 180 aa, Artificial Sequence; identical to SEQ ID NO: 8400
  Synthetic

SEQ ID NO: 8402 - protein, 180 aa, Artificial Sequence
  Synthetic
DERERLREVLERSRKLAEDLRRSNEELERRSRELAKELRKTNKELEKRLKDKADDLRREKNTKEIEDIIRRLEEELERVIRDSEDLIKKDEDISEEIKRRSEEIIRRNEKFVKEVEELIEAGEPTERLLEELERISEESKRRNDELLEKNERVNEETRRRNEELLDELRRLLEEVERRVK

SEQ ID NO: 8403 - protein, 180 aa, Artificial Sequence; identical to SEQ ID NO: 8402
  Synthetic

SEQ ID NO: 8404 - protein, 187 aa, Artificial Sequence
  Synthetic
DIEERIREVLRKARRVLERSEERSRELVERLRRVLEDSRRRTKRLTEEAKELLDEVRKRLDKDEAREKLRKLEELIKRLKEKLDEVDKRLADKVRRLSEMAKEVNDRLRKKIEDVERKLDEVRRRGGDKKLVEDLLREIEKIIKEIEDTTKRVVDELRRLLEEIKRTSDELEKEVRKLLEEIKRATD

SEQ ID NO: 8405 - protein, 187 aa, Artificial Sequence; identical to SEQ ID NO: 8404
  Synthetic

SEQ ID NO: 8406 - protein, 177 aa, Artificial Sequence
  Synthetic
STREALKELIDRLRDLVRRIRDKHRKLLEEIKRVLDESERRHRELIKRVEELLRDLARRVSEDILRELKRVLEELTKLSKKNIDDIRDVVRRLEELLRDNIRRIDEVLKRIRELAERGGEDVETIIRRAEEALKRLEDSSRKVEETIRKVLEDLRRSSEEVAERVRRVLERLEEKAQ

SEQ ID NO: 8407 - protein, 177 aa, Artificial Sequence; identical to SEQ ID NO: 8406
  Synthetic

SEQ ID NO: 8408 - protein, 177 aa, Artificial Sequence
  Synthetic
SSEERLRKVIEDLKRLAEESRKRHKELIDELRKAVERIERRHKKLLDEIKKVVDDIRRRVSEELLKRIEEVLDEIRKELEENIKRIRKVLDELRRTSEENIRRIEKVLRELEDLVRKGGEDVDTIIEEVKRVLEELKRSTEEVEKRVRDAIEELERSSEELARRIKEVLKRLEEETR

SEQ ID NO: 8409 - protein, 177 aa, Artificial Sequence; identical to SEQ ID NO: 8408
  Synthetic

SEQ ID NO: 8410 - protein, 181 aa, Artificial Sequence
  Synthetic
SAEEKLDRLRKEVERLSDETRKELERILKKVEDVIRETRRRAKELEEELRRLIRDIEEKLKDDERLKEALRRISEELRKLLEDLERINEKTRRDVERLIRELEKINEETKRRVDDIIRLVEAGVDIETVIREIERLLEEDRKAVEEILRRIEKLIEDDKRAVDRIVKEIKDILDKLREETR

SEQ ID NO: 8411 - protein, 181 aa, Artificial Sequence; identical to SEQ ID NO: 8410
  Synthetic

SEQ ID NO: 8412 - protein, 188 aa, Artificial Sequence
  Synthetic
DIEDELRKLEEEIRRVIEKWKRLTEENRRENERVIRKWDKLSKDLADEIRRVIEDARRKLKDERLKRKLEKLVRDLERILKKDKETVDKVRKELDDLDRRDEETMRRLEKELRDILKEVKRVIEEKKDIKELVKELVDRVKRLIREIEKEARRTSEENKDLLKKIEDDAKRSEDELRELIKEIKKRID

SEQ ID NO: 8413 - protein, 188 aa, Artificial Sequence; identical to SEQ ID NO: 8412
  Synthetic

SEQ ID NO: 8414 - protein, 188 aa, Artificial Sequence
  Synthetic
DIEDTLRKLAEDIKKVERDMEESNRRNREKNREVIEKWKKLSDDLERELEEVIEDARRKLKSRDATRKLEELVKELKDILREDRETVKKVKEELDKLDRESEELVRELVERLRKILEDVRREIEKKDKIRELVRKLIEDVRRLIEEIRRENKESSDRNKRLVEEIDERAKRSADELKRLLKEIRDRID

SEQ ID NO: 8415 - protein, 188 aa, Artificial Sequence; identical to SEQ ID NO: 8414
  Synthetic

SEQ ID NO: 8416 - protein, 188 aa, Artificial Sequence
  Synthetic
DIEEALDEVRKEIEEVIRRWKKLTRENEEENRKVIEDIRRRLDELRREIEKVIRDARRKLKSRDAKEKLDRLEEELRRILKDVERVIRELEERLKKLDEDDRREMERVVRELKRALDEMRKVIRDKTDIRELVKKLIDDIRKLIDEIRRDAERTSRDNKRLVEEIERTIEKLIREVKELLERIKEEID

SEQ ID NO: 8417 - protein, 188 aa, Artificial Sequence; identical to SEQ ID NO: 8416
  Synthetic

SEQ ID NO: 8418 - protein, 188 aa, Artificial Sequence
  Synthetic
DIEEILKKVEDDAREVIKEMRKSNEDNKRKNKKVIEEIERTLKKIEDDARRVIDEIEKKLKREELKKRVEELREELKEILDRMRREIEKLAEELKKLDEESDRLVKKLEDELKKVIDELEETIRRKDKSRELVKKLDDELKELIKKIRTDNKRSSERNDELVKEIRKRIEKLVREAKELLKRIREDID

SEQ ID NO: 8419 - protein, 188 aa, Artificial Sequence; identical to SEQ ID NO: 8418
  Synthetic

SEQ ID NO: 8420 - protein, 188 aa, Artificial Sequence
  Synthetic
SIEETLDELRKKIEEVIRRMKKSNDDNEKENREVIDRIRRTNEEIRKRAERVIEDARRKLKSEELTRVLKKLAERLEKILRESEKRVRELAEELKRLDEESKRLVEELVRELETILRELEKEIRRKRDVKERVDKLIREVEDLIRRIEEENKKSSEENKRLVRRIEKDNEDSIRELEKLIEDIRRTID

SEQ ID NO: 8421 - protein, 188 aa, Artificial Sequence; identical to SEQ ID NO: 8420
  Synthetic

SEQ ID NO: 8422 - protein, 185 aa, Artificial Sequence
  Synthetic
SLEELLEKVKREIDKVLERIERIVRKNAKENERVIREDERLLRELVKEIKEVEDRIRKRGLDKKDVDKLKEDLKRIIEEWKRLSEKLKRDSEKSLEELKELLKRIAETLKRVIDELRRVLREKKEDGDLMRKLLEEVKELIKRLEEEIEKASREDRRLVEEAKEKSKELAKRIKEELKRIEDEVR

SEQ ID NO: 8423 - protein, 185 aa, Artificial Sequence; identical to SEQ ID NO: 8422
  Synthetic

SEQ ID NO: 8424 - protein, 186 aa, Artificial Sequence
  Synthetic
DEVDDIIRKLKELIKELREKSKRISEENKRLVRRLEELSRRIIKEIKDLLEELKDRARKDRDKETLRKILREIEERVKRLAEESRRLSKTVTDESKKLMDKSRETSRRLEETVERLIRDLEEKLKDVEEVKDKLRRIKEEADKAIKDNEDLLRRNERENREAVKRNEELLKEVRREVEEVIRRTRK

SEQ ID NO: 8425 - protein, 186 aa, Artificial Sequence; identical to SEQ ID NO: 8424
  Synthetic

SEQ ID NO: 8426 - protein, 186 aa, Artificial Sequence
  Synthetic
SEVEEVIKRIKKLNKETEDAVREVIKRIEDSNEKLLRDVEELIKKIEKALRDLEDKARRVREREELERLLRELEEALEEIERRIRRLLEEDKRRLEELVRRVEKMLDDDRREVERLEKEVRERLKNVREVEELLRRVKRHTEEVVRRVERELRRIAEHVKEVEKTVRELVRRIREKIREVVERVRK

SEQ ID NO: 8427 - protein, 186 aa, Artificial Sequence; identical to SEQ ID NO: 8426
  Synthetic

SEQ ID NO: 8428 - protein, 178 aa, Artificial Sequence
  Synthetic
DEARELVKELEDLIREITKTVRRLLEESEELIKRIDDAVDDLRRRDEDLNREIKEEIEKRKRKEKLEKLIERLKESLERVKRTIEKLIRDLERLNEKLRRDVERLVAELEKILKKIKDAGLEERILRELEERVKELEKEAREILKRSEDETDKLREKAERILEDLERKNRRTMDEARR

SEQ ID NO: 8429 - protein, 178 aa, Artificial Sequence; identical to SEQ ID NO: 8428
  Synthetic

SEQ ID NO: 8430 - protein, 178 aa, Artificial Sequence
  Synthetic
SEVEELVERVKRLIDEIRKRVTDSVEESKRLIKEIKEEVDRLAEEDKRLNERIKETIRRRKEKEILERLREELDKSLERVEREIEKLIRRLEKLNKESKDRSEELVRELEKLLEKVKTDGLEERIVKKLEEEIRKIIKEIRELNKRSEDETKKIVDEARKILEDLRRENEDTKRKITE

SEQ ID NO: 8431 - protein, 178 aa, Artificial Sequence; identical to SEQ ID NO: 8430
  Synthetic

SEQ ID NO: 8432 - protein, 178 aa, Artificial Sequence
  Synthetic
SEVEDLAKRIEDLIRRILRENERSLEESKRLIDEIRKRIEDLLRRSKELIDRIREEVRERKREELLRKLKEDLDRANREVEERIKKLIKDLEDLNKRSKDESRRLIEELERILEELERRGLEKRILDELRKAVKKLEDDSRRLNRESEERTKKLKKELDELLKKSKDETKKLVEDLRT

SEQ ID NO: 8433 - protein, 178 aa, Artificial Sequence; identical to SEQ ID NO: 8432
  Synthetic

SEQ ID NO: 8434 - protein, 172 aa, Artificial Sequence
  Synthetic
SEVEKLLRELEDVIRRLREDVKRIVEEDERLNKRLNDELRRLSEKNDRLNDRIRREVTDKDKAMKALDDSNKELEKVIREILELLKRSLDKARKVLEDIEKTLRDILRELEKRLEDKEKVKRLRELVKKVIEDMERILRRLEKANRESAERAKDVLRRNHKKDEDSKRELER

SEQ ID NO: 8435 - protein, 172 aa, Artificial Sequence; identical to SEQ ID NO: 8434
  Synthetic

SEQ ID NO: 8436 - protein, 172 aa, Artificial Sequence
  Synthetic
DRVREIVERVERVIRDILRTVEKLSEENKDLNRRLTEKIRDLERRDRELNKRLRDEVTDKDEAKKRLEDSLKRAREVVERIRKTLEDSNEKIRKVIEDLVRRLEELLDRARKELSVKEIVEDLRRKVEKVKRDAEKLLEDNHRRDRRNLREIEKIVEELKRRNEKTLRDLTK

SEQ ID NO: 8437 - protein, 172 aa, Artificial Sequence; identical to SEQ ID NO: 8436
  Synthetic

SEQ ID NO: 8438 - protein, 172 aa, Artificial Sequence
  Synthetic
SEVEKLEEEVKEVIERLLRTVRDLSRRNEELNKRLTEDNERILKEDEDLNEELERRVTDADDAERLLRDSIRRWRELSKRIKDKLDRSNEELRRVIEEIKRELERILEELRKRVEDKDVLRKLKKEAEDAIKEAEDILRENHEKDKKNKEDSEKLLRDLERRNEETLRRLRK

SEQ ID NO: 8439 - protein, 172 aa, Artificial Sequence; identical to SEQ ID NO: 8438
  Synthetic

SEQ ID NO: 8440 - protein, 182 aa, Artificial Sequence
  Synthetic
RIEEILETLREELRTVLKKSKEILDELRKENKESIDRSKEILDRLRDEIRRILREIREKRVSRADEIERKLREAIKRAERLHEESKKRSEKSIRELEKLHEETRRRLKEAADELEKLAREGIDDEELKRAADKVKKLIKELDEENKKARDDDKRLNKKLNKDNDDLRREVEELLKRLRDEAE

SEQ ID NO: 8441 - protein, 182 aa, Artificial Sequence; identical to SEQ ID NO: 8440
  Synthetic

SEQ ID NO: 8442 - protein, 184 aa, Artificial Sequence
  Synthetic
RIEDLVRDNKRKNDENTKRHERIVERLEEELRELVKRHEEDVRRLRKELEDLKRDAERKGIDERVLRKIEKLIREIEERLRRSNETLRKLAEDLIRELEKSNRDLRTLSERLKERLDELRRNNADDKKVEDLDRDNERLNRELTRHLEDLVRRVKELLRRMEEHLRELAERVKKLLDELRKEAT

SEQ ID NO: 8443 - protein, 184 aa, Artificial Sequence; identical to SEQ ID NO: 8442
  Synthetic

SEQ ID NO: 8444 - protein, 185 aa, Artificial Sequence
  Synthetic
SDVEELAERVRRLSEEHAELVKRIVETSKRLNDDLRRMVKEIADRVRRLLEDIERKVREDRDKDTLKKLVDELEERIRRLIDELRRLVRKVEELDRRLAEELRRTLEELIRRVRELLEDLKRRVDTEDVRKIIEDLRRHLEENRERVERIIRELRRLTEKTKKELEDIARELEKLVDELREEVRR

SEQ ID NO: 8445 - protein, 185 aa, Artificial Sequence; identical to SEQ ID NO: 8444
  Synthetic

SEQ ID NO: 8446 - protein, 185 aa, Artificial Sequence
  Synthetic
SEVEKAEEDIRRLLKEVKDMDKKIVDDDERLNRELERTVRELAKEIEKLIRDLEERVRKERDKRTLDDVLRKLEERLREILERIKKAVEDVKRASEKLERESKELVDRLRKEVERIVKEIRDRVDDKDVKKIIKELEEELEKIAKESEESIKRLRKENRDSEERLRKILEKLKKDLEDVKRELER

SEQ ID NO: 8447 - protein, 185 aa, Artificial Sequence; identical to SEQ ID NO: 8446
  Synthetic

SEQ ID NO: 8448 - protein, 185 aa, Artificial Sequence
  Synthetic
SDVEDVVRKIRELIRENLKRSKEIADENRRLNTENRERSKTLEEEVRRLLEEVKERAERLRGREEIKRLVDELRKAVEDVVKRIEDIDRRSEEESKKLEERIRRLDEESERRLRTLIEELKKREDREEVRRILEKLRDDLRKLNETNRRIIKELRERNEKSNRDNRKILEELKDRLKKLEDELRR

SEQ ID NO: 8449 - protein, 185 aa, Artificial Sequence; identical to SEQ ID NO: 8448
  Synthetic

SEQ ID NO: 8450 - protein, 179 aa, Artificial Sequence
  Synthetic
DEVDEVDKRSKETLKKIEDDARRVLEEYERTLEKIKRDVDRVLKESEETVRKLRADGRLKEEVADTVRRVHEKAKRKIEEAKKDSERVLEEVKRTIERLKEELEREHTRVREEIKAGRSEKELEDLVRELEEINKRLEEELRKLVEELRRHLEELRDELRKLVEELRKINEELEDRLTK

SEQ ID NO: 8451 - protein, 179 aa, Artificial Sequence; identical to SEQ ID NO: 8450
  Synthetic

SEQ ID NO: 8452 - protein, 188 aa, Artificial Sequence
  Synthetic
SEMEDLKRVSDEVKKELEDLNRKSAKVSKEVEEEAKRLNRESREVVRRLKEELEKLERDRASEEELKRVIDKVKEVLDDLKRKHEDLNRRNRELLRKLEKEHRDLNEKNKELLERLDRKVKEGNLKKEVADELKKILDTHRKVDKEAKDRSEKLVRDHREVDKDVKRESDEILKRAKDTLDEIRERLR

SEQ ID NO: 8453 - protein, 188 aa, Artificial Sequence; identical to SEQ ID NO: 8452
  Synthetic

SEQ ID NO: 8454 - protein, 176 aa, Artificial Sequence
  Synthetic
SELEKILKEIEEELKRVKERLERLHREHERLLRDVTRKLRKLLRDHREVLERVREELRRRRKDVREVEERNRKTHEDLEREVRKAERELEERNERLKRELDDIARKLEEELEDLKRRNLPREDLERTLRRIKEEVRKVERKAKEVLRETREKLKRLLERAREVLDENKKRLDDVAT

SEQ ID NO: 8455 - protein, 176 aa, Artificial Sequence; identical to SEQ ID NO: 8454
  Synthetic

SEQ ID NO: 8456 - protein, 184 aa, Artificial Sequence
  Synthetic
SLEDIRRRLRELVRRLEEELRRSHEELERLVRDLERRLRESLRKLEELVDRLKKEIEKRGRDRRELEKIERDIKKILDEYRERLKELVTRLRDLLRRHRERLEELRKRIEELLRRIEEELRRGTDDDTARRLLEEAKKELDRIKEENERALRKIKDVIRKIDEESKRLNKEVADLVKKIEDRIR

SEQ ID NO: 8457 - protein, 184 aa, Artificial Sequence; identical to SEQ ID NO: 8456
  Synthetic

SEQ ID NO: 8458 - protein, 184 aa, Artificial Sequence
  Synthetic
DLEDIVREIEKLLRDLERKAREIHERDERLARDLERKHRDIIREIERLLDELRERVERLPVDDELRKEIRKRLEDIKDLLRRSTEKLKKLKRESEEKNKKLIRELKKVLDDIRREVEDIRRKPVDRKKVEEELERVRRIIKELERRLRELHKENKKLLDEILEESKRLAEEVRKTIEDIKRKIK

SEQ ID NO: 8459 - protein, 184 aa, Artificial Sequence; identical to SEQ ID NO: 8458
  Synthetic

SEQ ID NO: 8460 - protein, 183 aa, Artificial Sequence
  Synthetic
SEVEDLLRRDRELNREHKRLLEEASKKNKEELERVLEKVKELLERVKKRLDEAKEALERGEVDDEVLKALEEELRKLLKELKDTLRKLNDDTKKLIDKLKEHNKELEERSRELEKRLRDKTGDDERLERVLRESRKLNKESHETLKELIDRNRKLNKELEEAVKKIEEEIKKLLKELKEEKDR

SEQ ID NO: 8461 - protein, 183 aa, Artificial Sequence; identical to SEQ ID NO: 8460
  Synthetic

SEQ ID NO: 8462 - protein, 183 aa, Artificial Sequence
  Synthetic
SEVEKLLREDRELNKRHVEKVRELSERNKELLERHEEKLKKVAKEIEDRLRRLEEMLRRGEADEKVLKDLAKRIRDLLRDLTRHNKELNEETERLLRELEDHNRRLKETSDRLRERLRRKTGDTDRLKRVEEESEELNKRSHETLRRLVEENKKRNKELHERVERIKRRLEKLLRELEEEIRK

SEQ ID NO: 8463 - protein, 183 aa, Artificial Sequence; identical to SEQ ID NO: 8462
  Synthetic

SEQ ID NO: 8464 - protein, 183 aa, Artificial Sequence
  Synthetic
SEVEELLDEDRKLNEELTKSAKRLTDENKKLLEDMKRKAEELKKRVDELLKEVTDVLRRGELDEEKLKTLADEIKKLLDKLREDLKRLDERSEELLKRLREEVERLERRSKELAKRLEDKTGKTDRLERVLRESRKLNEDSKKRLEELIKENKDDNDRLREDLERIVRELEKRLDKLRKDTET

SEQ ID NO: 8465 - protein, 183 aa, Artificial Sequence; identical to SEQ ID NO: 8464
  Synthetic

SEQ ID NO: 8466 - protein, 184 aa, Artificial Sequence
  Synthetic
KELEDLLRRIKRLIDENRRLSKEVLEEVRKLSEKHKKEVEDILKEIKELIEEALRRIERDGPREELLRRLAERVRKLTEELRRSLKELRKRIEDLERDLDRLDKESEKELRKIEEKARRDNSVPKERLDRILKTLRELLRKLREDNERIRREIREIVKRNSDELARIEEELRKLLDDLAKKAEE

SEQ ID NO: 8467 - protein, 184 aa, Artificial Sequence; identical to SEQ ID NO: 8466
  Synthetic

SEQ ID NO: 8468 - protein, 184 aa, Artificial Sequence
  Synthetic
KELEDVLKEVEELSRRHKRRAERVSEENRKLLRRLKEEARKILEDIRRLLKKLEERVRRDGPRKEELDEARKRLKDLARRLKELLDRLDRTTEELARDLERTLRELEERIRRIAEDLRRRQSVDRERLKRILDEIRRIVEKNKRDLERLLRENEELNKRLREELRRILEEIEELLRELEERLRK

SEQ ID NO: 8469 - protein, 184 aa, Artificial Sequence; identical to SEQ ID NO: 8468
  Synthetic

SEQ ID NO: 8470 - protein, 176 aa, Artificial Sequence
  Synthetic
SEAEEALKELKETSDRHKEDLDRLHEEDRRTNEEVEKELRKLVDEAKKKLDRVREIVEEGRGREELLKKLREDLRRIEEEIKRTLDELKRKSEEIEERVKRTTRELEKKLEDLERANLVDEELLRRLEEIVRDNKRRVEEILERNRRLNEESEKKVRDIIKKLRDDLERLARELEK

SEQ ID NO: 8471 - protein, 176 aa, Artificial Sequence; identical to SEQ ID NO: 8470
  Synthetic

SEQ ID NO: 8472 - protein, 176 aa, Artificial Sequence
  Synthetic
SEAEEALKELKRTSDEHRKRLEDLHRRDKKLNDDSKRRLDELLKRDEDTNRTVLDIARQGKAREELLKELKERTRRLHEDNKRLLRELEKRSKEIEDEIRDTLEKLKRKLDELRKANVVDEELLRTLEKIVEDNAREVTEIIKKNRKLNDDSRREHERINDESRRLNEETEKRLRD

SEQ ID NO: 8473 - protein, 176 aa, Artificial Sequence; identical to SEQ ID NO: 8472
  Synthetic

SEQ ID NO: 8474 - protein, 183 aa, Artificial Sequence
  Synthetic
DELEEILRRVDELIKTIEEELKKIEKRVKELLETHRELNKRLLDDHRRLAEEVKKANLDRRDAERLMREMEKKNEEVRKRLEESLERVKDTLRKIEKKLRELAERLRRELEKLRDDLRRRGSDRDRVEDVLRKIAEKIKRLEDRIKEVLDKLRKLAKELEDESRKVLDDSNKLIERVKRELKR

SEQ ID NO: 8475 - protein, 183 aa, Artificial Sequence; identical to SEQ ID NO: 8474
  Synthetic

SEQ ID NO: 8476 - protein, 185 aa, Artificial Sequence
  Synthetic
DTERVVTEIKKTNDELKRRHEKVVEDDRRLLEELRRRHERVVREVERLLRELKERVDRRAKDKRELKKRLKELKDRIRKELEDLTRKHEDLDRRVEDEHRKLSEEHEKVHREIRERLEDIRRKKVPREVLKKLLDDNRKIIEDLTRKNEKLHEDSKRIIEKIDDENREILRRVEEIVRRIEEELN

SEQ ID NO: 8477 - protein, 185 aa, Artificial Sequence; identical to SEQ ID NO: 8476
  Synthetic

SEQ ID NO: 8478 - protein, 180 aa, Artificial Sequence
  Synthetic
SAEDVKRRIKESADRIRKRLREALERAKKLHTDNEEENKRVNDEIKKRVEEIRRRIPDGEKAKELEDRLRKLLEDSKRDDDRSRKESRELIERTREVLERLARLLDELERRLDEVRKKPTDEKLLRELERDVRRLEREITEVVKRLEDEHKRASERNKRLLEEIKDRVRKLIEEAEERRK

SEQ ID NO: 8479 - protein, 180 aa, Artificial Sequence; identical to SEQ ID NO: 8478
  Synthetic

SEQ ID NO: 8480 - protein, 178 aa, Artificial Sequence
  Synthetic
EEVERVRRTIDELSKENEKALKEVEERIKKLSDENEKAVRKAEEDNERLNRTAERLKRSNVSEDTLRRILEEVRRATEDLRRKLEDINRELRERVKRLIEEIREINKRLDDELRRIEEEGVDEKVLRDIRKKIKENHEKNERVIREIERLLKENEERNEEVIRRIKESNRKTEKDLTD

SEQ ID NO: 8481 - protein, 178 aa, Artificial Sequence; identical to SEQ ID NO: 8480
  Synthetic

SEQ ID NO: 8482 - protein, 178 aa, Artificial Sequence
  Synthetic
SEVEEVERRIDRLSKENRRVLEEAKRRIKKLSDENKRMLEEARKRNEKLNREVKKLKKSNVDEETLRRKLKEVKERTDKLRKEIKEINEKLAEDVKRIEDEIREINERLDRSLKKIEDDGVDEKVLRDIREKAKRNHDANEKVIREIRDILRRNNEENKRVIEEIDKSNKDTEDELRK

SEQ ID NO: 8483 - protein, 178 aa, Artificial Sequence; identical to SEQ ID NO: 8482
  Synthetic

SEQ ID NO: 8484 - protein, 178 aa, Artificial Sequence
  Synthetic
REVEEVKKEIKKLSDENKEVLERARKRIEDLSRENEDVLRRLKERNEDLNRRVRELKERNVSEDELEKILRELEKKTEELADEIRRINEDLDRKLREIEKEIEEINEKLKKKLEEIERRGVDEEVLRDIRRELKENHDENRKVIEDVRRIAEENHRRNKRVIDEIRRSNKETVDELRK

SEQ ID NO: 8485 - protein, 178 aa, Artificial Sequence; identical to SEQ ID NO: 8484
  Synthetic

SEQ ID NO: 8486 - protein, 184 aa, Artificial Sequence
  Synthetic
RAEELRKEIEEIIKKNKKENEDVLREDRRRLKELKEEIEKVVREDRRTLEELEERLRRSGLPEEEVERIIRELRDEHRRVEERAEELRRKLDERHKEVEEESERLRKEVRDDKRRLDERLKRNSTEEVLKEIRERVEKLSEKNKRALEKWKRDSERLSREVERELEEWKKRSKRLAEEVEEATR

SEQ ID NO: 8487 - protein, 184 aa, Artificial Sequence; identical to SEQ ID NO: 8486
  Synthetic

SEQ ID NO: 8488 - protein, 186 aa, Artificial Sequence
  Synthetic
DLEELEREVEKKLKELEDRVRKVIEESKTELKKLEEELRENSREVRDILRRLEEDVRRKVKDDEDLKRKLRKLKEDMERVNEEVEKRFRDLARELRKHARDLEREAKRLKEEVEETLRRVRKKNVEDKRLLEELRRRLDRVRKEVERLIKEHRETTDELRKRVEKLSEDHRREVEKLAKTVKDELK

SEQ ID NO: 8489 - protein, 186 aa, Artificial Sequence; identical to SEQ ID NO: 8488
  Synthetic

SEQ ID NO: 8490 - protein, 178 aa, Artificial Sequence
  Synthetic
SRAEKIREDIRRLRKENEDRIKEIEDEFRKLLEEHERKNKEIEERVRRLVKRIEDEIRRKNVPKDEVKRIRDDIRRLEKRAKEVHERSKRRLDELRERFKRLEKRLREIHEEIERELRKRGLTDELAKRVREVSEDVNRRLDKIMKDLRRVIKELDEESKRLLEEIKRRMEEILEELR

SEQ ID NO: 8491 - protein, 178 aa, Artificial Sequence; identical to SEQ ID NO: 8490
  Synthetic

SEQ ID NO: 8492 - protein, 180 aa, Artificial Sequence
  Synthetic
SEEEKLAKDNERLVREHEEESKKLLKTIRDLSEEHKRDLKRAMEENKEKVDRLRDMLKRGEVDDRVIEELKRDSERLLEELRKRSKELKDEIKKRLEDLKKHLDDLKRDSRRLLKELVDKKKRRPEEIATKSEELHKELEETNERIAREVEKLEKENDEILEEIADRSRRLHEDLDRERK

SEQ ID NO: 8493 - protein, 180 aa, Artificial Sequence; identical to SEQ ID NO: 8492
  Synthetic

SEQ ID NO: 8494 - protein, 178 aa, Artificial Sequence
  Synthetic
DELEEVLRTIEKLVEDHNRELERVLRRVKELADRHREESERVAREIKKLVDDARRLVEERGPDEEVLRDLERRVRELVDRLRRHLEELEKELDKLKKDLKRSLEELERRVKEIADRLPETDEVRRIRERVKELLDRNRERLERIEREIDRLLEDLKRKNEKIEREVRRLLAKLKEEAR

SEQ ID NO: 8495 - protein, 178 aa, Artificial Sequence; identical to SEQ ID NO: 8494
  Synthetic

SEQ ID NO: 8496 - protein, 178 aa, Artificial Sequence
  Synthetic
SELEKIVEENRRLVKEHNERLKRILDELRELAKRHEDRSRKAMKENEELVRTVLELMKRDGPDERVLRELRKRSKDIVDDLRRHLKELSDTARKLIEEIRKSLEELERRTKKLADDLPETEKVRKIREESKRLHETNRRRVEKIEEEIRRLLKRLEDTNRDIERRSKKLHEDLEREAR

SEQ ID NO: 8497 - protein, 178 aa, Artificial Sequence; identical to SEQ ID NO: 8496
  Synthetic

SEQ ID NO: 8498 - protein, 178 aa, Artificial Sequence
  Synthetic
SELDKVMRDNDRLVKEHAEVSKELLDRLKKLAEDHKKRSEEVLRENKRLVDEVRRLAKERGPRDEVLDTLRKESKKIKEELEKHLEELSREAEKLIRELEEHLKKLREETKRLRDALPETEKVRKIARRSDDLHRELKERNDRIKREIERLLEELKRTNDKIVEDSKRLHDDLEREAR

SEQ ID NO: 8499 - protein, 178 aa, Artificial Sequence; identical to SEQ ID NO: 8498
  Synthetic

SEQ ID NO: 8500 - protein, 178 aa, Artificial Sequence
  Synthetic
DELEEIRKTIEELSKENKKKLEEVMKEVEELARRHEKRSRDLLRRLKKLVDELRDRVEKTGPDKDDLKRLEDELRRLKEDLKRHLTELEKRLRRLSEEMKKHHEELEKRVRDLERALREEERVRKISEDVRKLLEDNKRIAERIDERIKELLKRLEDTNRRIEEEIDRLLEELKREAD

SEQ ID NO: 8501 - protein, 178 aa, Artificial Sequence; identical to SEQ ID NO: 8500
  Synthetic

SEQ ID NO: 8502 - protein, 179 aa, Artificial Sequence
  Synthetic
DELDDLLRRAKETSDRHKETLKKILDEMREEVKRHNRDLERILEEVKRLIDEVRKANSKDETLIRELRKRIEELRERIERSLRELRRKLEELERRIRDTLRKLEETLRRLEEELDRRGVPREDVKRIKETMKKLLDENRTEVEKIKREADRLLEENRRLVKEIEDTIRELLKRLEDERR

SEQ ID NO: 8503 - protein, 179 aa, Artificial Sequence; identical to SEQ ID NO: 8502
  Synthetic

SEQ ID NO: 8504 - protein, 178 aa, Artificial Sequence
  Synthetic
SKKETIKKDAEEALKRSKKKLDELKERLRKVMRETEERLRRLEKELRDLAREIREKIKKRRVDEDKVKKIEERLKRLEDKLREVEKRLREKYRELEKEVDKVVEKLERDYRRLKDKLEKEPADDRLRKEVEDLNRETDKVIEKLREDIDRLDKESEEVIRRLKDEIRRLFEEIDRRLR

SEQ ID NO: 8505 - protein, 178 aa, Artificial Sequence; identical to SEQ ID NO: 8504
  Synthetic

SEQ ID NO: 8506 - protein, 183 aa, Artificial Sequence
  Synthetic
SELEEVKERVDRLIREVEKMNRDSERRVKKLIDDVRRENRRTEEDVRRLVKRAEEIVRKDGKIDEKVLRELEERLRRLKEENDKLLTELEKRLRKLKRENDELLRELKKRLEDLKRELDKDGLEKEKVDRLKKEADDLLRKIKEDNERITEKVKELLERLRKNNEEIKREADRLLEELRRRVK

SEQ ID NO: 8507 - protein, 183 aa, Artificial Sequence; identical to SEQ ID NO: 8506
  Synthetic

SEQ ID NO: 8508 - protein, 176 aa, Artificial Sequence
  Synthetic
SELEELDKRITELSEEIKRRLEELLRRNEDLSRRIEEAIRRILKRNEDVIRDIKRKNKKDERLLRELKKLSDENRKRLEELHRRHAEHVKRTEDELRELHREHKEAVDDIRRRMGREDKKVRDIEEKIERLNRELEKIAKEIRERTERLNKRLEELIREVDERNRDLLRRLEEEVK

SEQ ID NO: 8509 - protein, 176 aa, Artificial Sequence; identical to SEQ ID NO: 8508
  Synthetic

SEQ ID NO: 8510 - protein, 182 aa, Artificial Sequence
  Synthetic
KDEEDARRKLEELRELARRDIERNKRELERLRREIEKDEEDNEEVIKRLRERVEELRRRQTDKDRAREVLEELKRLIDELRRRNEETKEKLKRIIDEIRKRNEEMEERLRRIIEEIEKKLGREDESLKRLKEELEKLLRDYKKKLDDSDKELRDLLAEYDDRLTRSDKRLRDLLKEAREKSK

SEQ ID NO: 8511 - protein, 182 aa, Artificial Sequence; identical to SEQ ID NO: 8510
  Synthetic

SEQ ID NO: 8512 - protein, 186 aa, Artificial Sequence
  Synthetic
DTAERAEEELERSDRELKETLRRAEEELKRSHKELERIVERARRELRRLAEELEEVIRRKKLDEKEVRKLEEILKDVERRVDELLDTLRKISKELEDRMRELDKELKKDSDDIRRRLDELKKREKEEETLRRKLERLLERHKKVVDDVERTLRDLLERHKEVVERVREKLTDLLRKLKKVIDDVRR

SEQ ID NO: 8513 - protein, 186 aa, Artificial Sequence; identical to SEQ ID NO: 8512
  Synthetic

SEQ ID NO: 8514 - protein, 179 aa, Artificial Sequence
  Synthetic
SELETIKKRAEELSKESEDILRDIERKLRKLSEESKDILRRLKEELEKLHKELVDKKGRETERIRELKKRNRENLERLRDELRKLNEELERKLREIEERLKELNRKLEKKEEELRRRPTDEELEKELEEVLTEYREVVERLADELRRLLKKYEDDVRRLEEHARRDLEKLDRDIKEEER

SEQ ID NO: 8515 - protein, 179 aa, Artificial Sequence; identical to SEQ ID NO: 8514
  Synthetic

SEQ ID NO: 8516 - protein, 179 aa, Artificial Sequence
  Synthetic
SKLDDLLRKIERLVTESLRRLRKTNEDAKRLLERSVRELEKSNKEIRDLVKEIKERNSKDERLLREAERVLDELRKRHEENHRRLEEELRKLLEDHEKNHRELKKVLDKIDEDVKADGVDKKKVDELRERLRELLKRHRDAVEKNRRDLEKLREDHRRLVEKNKRDLDKLKEELDRTKK

SEQ ID NO: 8517 - protein, 179 aa, Artificial Sequence; identical to SEQ ID NO: 8516
  Synthetic

SEQ ID NO: 8518 - protein, 179 aa, Artificial Sequence
  Synthetic
SELDELLKRLEELVREIIKRLRDSNRRAKEVVDRSVKRLEESNRTLRELIKDVKDKNEEDERLDRELEERVRELEEEHKENHKRLEETLRKLEKEHRDLLREAKEMLKKLEEELKKRGAPEEKLRRIKRRIDELEKTLRKIIKDNTDNLRKLTEDHRRLVEKNKRDLEKLEEELKRRRK

SEQ ID NO: 8519 - protein, 179 aa, Artificial Sequence; identical to SEQ ID NO: 8518
  Synthetic

SEQ ID NO: 8520 - protein, 179 aa, Artificial Sequence
  Synthetic
SKLDELLERIREEVKRSVKRLEDSNKEIKRLMEESADELRRSNKELRDAVRDLKRKNSKDETLTRRLEKLIEDLERRHKRNHEELKRVLDELAEEHKRNHKELERVLREIKERVKADGAPEEKVRRLDKVLEDLRREHEKIVRDNEENLRRLLERHKRLVDKNKEDAERLLRELRETVR

SEQ ID NO: 8521 - protein, 179 aa, Artificial Sequence; identical to SEQ ID NO: 8520
  Synthetic

SEQ ID NO: 8522 - protein, 183 aa, Artificial Sequence
  Synthetic
SELEELLKRLRDLIERIVKRLRELSKESEDLIRRIERTIEKLSEDSERAIEEILRRIDKGTSEDTARRLLERFKELNKRSEDELEKLKRELEKLDKRSDDELREIKEELRRMVREVRERVRKVTEDRLREVEEEAKKLEKRIEDMIRKHKETNKRLKEELDKLVKEHKDRNRKLLEELKKRAT

SEQ ID NO: 8523 - protein, 183 aa, Artificial Sequence; identical to SEQ ID NO: 8522
  Synthetic

SEQ ID NO: 8524 - protein, 178 aa, Artificial Sequence
  Synthetic
SEIEEVIERLDDTMRRIEERIRDTNRRLKKVIDDSKRRNERTNREVRKTIEKLTRELERDGRGGELAKRIREVLEELKRRSEELEKENRRLLDELRKESEDLADEIRKTERKLEDDLRKADAREEVKRRLEELRRRIEKMLEEHRESLRRLEEELEESHKRHKDTLRKLSKELEEKLK

SEQ ID NO: 8525 - protein, 178 aa, Artificial Sequence; identical to SEQ ID NO: 8524
  Synthetic

SEQ ID NO: 8526 - protein, 182 aa, Artificial Sequence
  Synthetic
DEVDEVLKRVDELLKRHEETNKRLEEEIRKIHEENKRTIEELLKEVRKRAEEVERLVRRDGPREEEIRKIEEALKRLLRELEKHLDRSRKRLKKLLDENRRHLRELERELDKIEEDLRRNRVPEEELKRVKERLKEIRKRAKESHDRLRETVKELIDRNRKLLRELEEELRKIEEKIREDAR

SEQ ID NO: 8527 - protein, 182 aa, Artificial Sequence; identical to SEQ ID NO: 8526
  Synthetic

SEQ ID NO: 8528 - protein, 173 aa, Artificial Sequence
  Synthetic
SEEDELRETAKRIREEVKKSIEENRELAKRITDEVRELLERNKRRIEEVKERLERSGVDERVLREAERVLRELKKRHEDLLEELKKAIKRLEDKHRKVLKELEDEIRELERLSKRKDEDDLRRRLEELLKRLRDESRKVNEDLKRLVDELRRLSKEMNEELKELEDRVREKER

SEQ ID NO: 8529 - protein, 173 aa, Artificial Sequence; identical to SEQ ID NO: 8528
  Synthetic

SEQ ID NO: 8530 - protein, 182 aa, Artificial Sequence
  Synthetic
SEEDEVREDNKRIVEEVERLLKEIEDNNREITREAEELLKRLEEEARRLMEEIRRSKSGDKRLLEELIERLKEVLTELERRLRELKEENEEVLTRLRREVEKIKRENKELLDRVRELRKKVRDEELLRRLRDMNRRSKERADRLIEEAKKENDRSSKRVRDLIREVDEILKEVKKRVEDVTT

SEQ ID NO: 8531 - protein, 182 aa, Artificial Sequence; identical to SEQ ID NO: 8530
  Synthetic

SEQ ID NO: 8532 - protein, 177 aa, Artificial Sequence
  Synthetic
SEAEKVVEELKKLLREVEKKIRDHTEDVKRILEELERRLRKHSEEVRRTAKELKDKNSDDDTVRKVKEELDRSHEKLREELRKVAKELKESNEELERDLKRLVEEAEDRLRRLKDRVSEKVLRELEKILEDIKRTLDKLLRENRETLKRIEDRLRELLEENRKLLEKIERELRERSR

SEQ ID NO: 8533 - protein, 177 aa, Artificial Sequence; identical to SEQ ID NO: 8532
  Synthetic

SEQ ID NO: 8534 - protein, 177 aa, Artificial Sequence
  Synthetic
SEVEDVIRKLRRKAEDLTRRLKEHTDDVKRLMEELSKDIKDHTREVKRIAREAKEKNRDRETLRRILEELRRSNEELKRRLDEALEELRKSNEELRERLERVLRDMRRLLEELKDRVDEEVLRDLERVLRDIERRLRELLRRNEEVLDRIRRTLEDLHRKNEEVLREIERDLRERER

SEQ ID NO: 8535 - protein, 177 aa, Artificial Sequence; identical to SEQ ID NO: 8534
  Synthetic

SEQ ID NO: 8536 - protein, 177 aa, Artificial Sequence
  Synthetic
SEVEDVIRRLKKKLRELVERIREHTKRVRDLARKLEEEIKRHTEEVKRIADEAKKRRSDEETLRRIEEELKKSNEKLERKLRKVVKELAESNKRLREELKKVVDELRKEVESLRDRVSDELLKRLEDVLRKIRKDLEELLRKNNRDLEEIKKRLEELHRRNRETLERIRKDLEEDER

SEQ ID NO: 8537 - protein, 177 aa, Artificial Sequence; identical to SEQ ID NO: 8536
  Synthetic

SEQ ID NO: 8538 - protein, 182 aa, Artificial Sequence
  Synthetic
SEIEEVLERIKKLLDELRKESRKLLEDHKKRAEELEEKARRLSERHKELLDRLKEVVDRDGPRDETLERLRRESEKTKKEMEDTIRRVEEESEETIRRHRRSVREVRERLKELRRELDKANLPEEMLKRAEDLLRRIDEELKRSHEELKELSDRIRERLERLLRTLEELSKEIDKRADDLRK

SEQ ID NO: 8539 - protein, 182 aa, Artificial Sequence; identical to SEQ ID NO: 8538
  Synthetic

SEQ ID NO: 8540 - protein, 182 aa, Artificial Sequence
  Synthetic
SEIERVLEELRKLLEELRRESKKLLDELRKLLEDARRESEKLLRELKDLLRRAEELVKRDGPDKDTLDKVRKRMEELHRTHEKILRELKRRADELREDHRRKLETIEKRLKEIEDELRKANLPEKVLDELRRELDKIREDLKKSHRELEELIKKIRTELDKSNRKLEELLKRIEERLDEMRR

SEQ ID NO: 8541 - protein, 182 aa, Artificial Sequence; identical to SEQ ID NO: 8540
  Synthetic

SEQ ID NO: 8542 - protein, 182 aa, Artificial Sequence
  Synthetic
SEAEKVLEELKKLLRDLEETSKRVLREIRELLKEAREKSKRLLDRLRKLARDLKELVRRDGPVDEAIRRVKEELERLSREHRKMVEEIKRRLEELHKRHKKKLEDIRKTLDDIKKELERTNLPKEVLDRIKRLLEEIERELERSNKELEDLLRKIEEDLERSHRELEKLIREILKELEDARK

SEQ ID NO: 8543 - protein, 182 aa, Artificial Sequence; identical to SEQ ID NO: 8542
  Synthetic

SEQ ID NO: 8544 - protein, 177 aa, Artificial Sequence
  Synthetic
DAEERLRKLLDDIRRELKRLTEETRKSLEKIKRDNDELEKKLRKLNEDSDRRLKEANVDERIKEEMERSRRELEEKNRRSRKRIEDMARRVEETHKRIEDDLRRLAERIKELEARGIDEKTIEDLLRELEKALRDLEKEVREINKELKRVLDEIAKTHEDLLKKHEELLRRVEERAR

SEQ ID NO: 8545 - protein, 177 aa, Artificial Sequence; identical to SEQ ID NO: 8544
  Synthetic

SEQ ID NO: 8546 - protein, 178 aa, Artificial Sequence
  Synthetic
DLERELEKLLKDIKEELDKLIRTNEETLKEIEREVRKLLKRNKELLDRIREEVRKTGTDEDEAEKLLRDLKRSVEKLEREHREVRREIEEKLERLRRLHEEIRKRIRDLLEDAKRRKVPKEVVDRILKEARELLERIREENRRTLEDLRRILEDLRRRNKRHLDELRRVLKELRDKRK

SEQ ID NO: 8547 - protein, 178 aa, Artificial Sequence; identical to SEQ ID NO: 8546
  Synthetic

SEQ ID NO: 8548 - protein, 178 aa, Artificial Sequence
  Synthetic
SLEERLEKLLKEIRETVKKNIEENRDLLRRVEEDLRRLTERNKRLLEKIRDALRKAGSGKDRVRKLDEDMERTLRELRRRVEEVRKKLEESLRRLEEELKRILERIERLIERIRREKVPEEVARRLMDDLRRLLEKIDRLSREHLERVRKILEDLRRLSEKHLKELEDLLREAEEEAR

SEQ ID NO: 8549 - protein, 178 aa, Artificial Sequence; identical to SEQ ID NO: 8548
  Synthetic

SEQ ID NO: 8550 - protein, 178 aa, Artificial Sequence
  Synthetic
SLEERLEELLDEIRKMLKRLEDENRRLLKEIEKRVRENTRTNRELLKRIEDRIRKAGSDEKDADEVRRRLEKTVEDLERELRRLLEEIRRSLDKLRRDLERLEEKIERLIEEIKRRKVPEEVVRTLLRELEKILAEAEDLSRRHLERLRDILREAEDLSRKHLEELKKVLEELERRAK

SEQ ID NO: 8551 - protein, 178 aa, Artificial Sequence; identical to SEQ ID NO: 8550
  Synthetic

SEQ ID NO: 8552 - protein, 179 aa, Artificial Sequence
  Synthetic
SDVERLLRELEDLLRRLEERIRELNKRHEELVRRLKEEVKRLSREHNEVVADVARKNDKDEKLDRDLRRLNEKVRRDVEKLIEDAKRVNDEVRKTVERLKEEAKRTLDEVKDRIDKRRVPKELRDRLRDVVRRLEDELRRLDDELRKNSEEVKKVLDDLRRHLEENSKRAEDTLRELRR

SEQ ID NO: 8553 - protein, 179 aa, Artificial Sequence; identical to SEQ ID NO: 8552
  Synthetic

SEQ ID NO: 8554 - protein, 179 aa, Artificial Sequence
  Synthetic
SEVEKLLRELEKALEDLRRTNEKLDREHDAVVKEVKKIAKDLSREHRDVVEDVKRKNSKDETLERDVRRRTERIREEVKRLADDVKRRNDELKKRLDELKKRLEELLREAERRIDENRVPEELRDELRRVVEDVEKKLDDLRKRNEENSRKVKEVLEKLTRELDKNREEVERTLEELRR

SEQ ID NO: 8555 - protein, 179 aa, Artificial Sequence; identical to SEQ ID NO: 8554
  Synthetic

SEQ ID NO: 8556 - protein, 179 aa, Artificial Sequence
  Synthetic
SEIEKLLEEIKESLERLKKTAEDLLEELRRLLEELERRVKELSDEHRRLVKELKDRNSKDDTVVERVRKRSTEIRKELRELLEDVRRKLEKIREELEELSKRHKETLEEIDKEMDRRNISEELKKRVEDVLREIKRAHDDLRRRLEKILRDIEKTIEDLERHMKENHDDAERVIEELKR

SEQ ID NO: 8557 - protein, 179 aa, Artificial Sequence; identical to SEQ ID NO: 8556
  Synthetic

SEQ ID NO: 8558 - protein, 176 aa, Artificial Sequence
  Synthetic
SEEEALERVLRELRRSLEELEEELRRAIRKLEDNLRRLREALETILKKLDDLLDDLRRRKPRETLEEIRRRLEELKEKIKKILTDLEKAYRDLKKKLDEILKRLEERYRELEEKVRRNGFDDKLKKEADDLDRRSRKTIKEVLDEIKELDDRSNERIEEVIREIEDEARRLAREVD

SEQ ID NO: 8559 - protein, 176 aa, Artificial Sequence; identical to SEQ ID NO: 8558
  Synthetic

SEQ ID NO: 8560 - protein, 176 aa, Artificial Sequence
  Synthetic
SEEERLREIRERLKKSLEDLKRELEEILRELERSLDKLRRDLERLLEDLRRLLDELRRRKDTESLEEIERRVRELEEELKKIDKDLEDEYRRLEEELKKVTKELKREYDELEKEVRKRGVREELEKKARELNERSKEKIKRLLEKLRKLDKESKDEIKRVLDKLRELAKRIKEEMD

SEQ ID NO: 8561 - protein, 176 aa, Artificial Sequence; identical to SEQ ID NO: 8560
  Synthetic

SEQ ID NO: 8562 - protein, 176 aa, Artificial Sequence
  Synthetic
SEEERLRRVIEEYKRVLDELSERLKRLLDELRRSLKKLEEDLKRLLDELKRTLDELIRRVEDDRLRELREEVKKAAEEIKKILKKLRELYTELEKELDRAHKENEKELRKLEEEVRRKGFSEELEKKLREALDTVRRLYEALIKKARELDKRSKDEIKRVVDKLKKLVRDIEERVR

SEQ ID NO: 8563 - protein, 176 aa, Artificial Sequence; identical to SEQ ID NO: 8562
  Synthetic

SEQ ID NO: 8564 - protein, 182 aa, Artificial Sequence
  Synthetic
DDIEDVLRRIEKLIRDLRDHSRKLVEEIEKLIEDHTRHSRKLERDIKELLKRLRELRRRGDLTEELLRKAKEELKDLLRRHEEVSERLKRRLDKLETDHDRVIKELEDRLRRIAEELERRDTSEEVKKRLDEARRKAEKVVKESRDTLRELKDKVRENLDRSRKELKKLEEELEEVLREARE

SEQ ID NO: 8565 - protein, 182 aa, Artificial Sequence; identical to SEQ ID NO: 8564
  Synthetic

SEQ ID NO: 8566 - protein, 182 aa, Artificial Sequence
  Synthetic
SDVERVAKTIEDLIREHTEHVKRSAERVERLIKEHTDHVRRSLTRIEDLLRRLEEMRRRGDSTEEVLDTVRRELRKLLKENEDRSRELEKELRELLERNEKKTKELEDELKKILRELERKPTSEDVERKARELERKVRENVRKVRDDHRKLEEKFRDNLRKVKREHEEAERKMRDLLREARR

SEQ ID NO: 8567 - protein, 182 aa, Artificial Sequence; identical to SEQ ID NO: 8566
  Synthetic

SEQ ID NO: 8568 - protein, 182 aa, Artificial Sequence
  Synthetic
KDVDKVEEDIERLLADLRRHNEKLHRDIERLLEELRRHNDKLRKTLEDLLKKLKELAERGDNEERELKRAKEEVDKLIRDHEEVLRRVEEEIEKLIRDHEKKLEDVRRTLRDILRKLEKKPTSEDVKRRLEDLERKARRVLEESRKDLEEAKKKVDELMKRARDSLRELTRRLEELVRRIRK

SEQ ID NO: 8569 - protein, 182 aa, Artificial Sequence; identical to SEQ ID NO: 8568
  Synthetic

SEQ ID NO: 8570 - protein, 182 aa, Artificial Sequence
  Synthetic
SEVEEVMKEIERLIEELRRHNEELARRLEELIKDHTRHNEELHKTIEDLIKELEDLARRGDLDEETLKRVARDLDELLERHERRSREIEERIRRLLERHEEELERIAREVKKILDELKRKPTSEEVEKRLRELKEKLDKVLDELRETLKRLEEKARENLKRSRDDLETIKRKLKKVMDEARR

SEQ ID NO: 8571 - protein, 182 aa, Artificial Sequence; identical to SEQ ID NO: 8570
  Synthetic

SEQ ID NO: 8572 - protein, 185 aa, Artificial Sequence
  Synthetic
SDVERLIEELERLLDELRKKTEEIIRRIKKLIDELRRKTEEVIKRLEKLARDLTRLTERGSDKEEVDRILDEIKKRVEKIERELEETHKKVRRRLEELETEMEKLHKELKERIEKLSKELEDKGTSEEARRRIDEIRKKAEEVNKESRDRLRRLKEEVDKVDKDSKRRLDELREELRRLMEESKR

SEQ ID NO: 8573 - protein, 185 aa, Artificial Sequence; identical to SEQ ID NO: 8572
  Synthetic

SEQ ID NO: 8574 - protein, 176 aa, Artificial Sequence
  Synthetic
DAARELRERLKKAIEDHRRLLERAARDVERLNKELEDILRRMAEDMKRSIEELKRVSEEGRVDDEIARRHEEDNKRLEEELREVAKRLEDKHRKVKEENDRSAEELKRRIDKLRKDKLLDEKDLRRLEEEIRKEIRRSNETLKKLKKKTEDSLRTIKRRLEELHEEAKKVLDDLRR

SEQ ID NO: 8575 - protein, 176 aa, Artificial Sequence; identical to SEQ ID NO: 8574
  Synthetic

SEQ ID NO: 8576 - protein, 178 aa, Artificial Sequence
  Synthetic
REDETLKRLEEENEEVNKRSEETLRKLLEDNRRLLERIEERLRELLEELRRLLEKIRKDRRLPEEMIKRLRDLLRRLEEELRKALEEAEKSLRELEREIEELRRRSRESSKKVKDELRERRDKDELTERVKRHIEENKKLTEDVARKSEKHLRDLEELLERLRKLVEDLLRRLEEEAR

SEQ ID NO: 8577 - protein, 178 aa, Artificial Sequence; identical to SEQ ID NO: 8576
  Synthetic

SEQ ID NO: 8578 - protein, 185 aa, Artificial Sequence
  Synthetic
SELEKVRKESERNLRSNEKLLRELDELSERNLDKLRRFVEEVRELVREMLERLDSVRRRNVSEDELRKLAREVEEILKRIKERLERLAKESEDLLRELKKRLEKHEEDSKELAKRLRDELRDRRVSEEVKRDVERNEKENKELLDRTRRKVEENAKRNKKLLEDIREDLKRLATELRRKLEEIRR

SEQ ID NO: 8579 - protein, 185 aa, Artificial Sequence; identical to SEQ ID NO: 8578
  Synthetic

SEQ ID NO: 8580 - protein, 177 aa, Artificial Sequence
  Synthetic
DKEETVKDLERRYRDLLREIEKRLRELVRRNDKLLEEIKKAIEDLIRENEKKIKEIKERRGRTKEVEEIEKSLEELRKEHERVVREAEKSVEELRKRHEKAIRDSRRHLEELKDELEKRRIDDELRRRAEEALERNKRLLEELKKENDDHLKRLKELLEELKKRNEDHLRRLDEEER

SEQ ID NO: 8581 - protein, 177 aa, Artificial Sequence; identical to SEQ ID NO: 8580
  Synthetic

SEQ ID NO: 8582 - protein, 182 aa, Artificial Sequence
  Synthetic
KELEEIKRAVDESLKRAKELMDRHRREVEKSLEEMKRLAEDHKRRADRLLKELKRLADEGRPREDLERKLDELKRDLERHSTELKKELEKNHRELEEHSKKLKEDLKRNHEELDRLVKSRKKSDEVRRAVKELKDRHKELLDRIERESERLREEHRRLLEKIERTSEDLIRRLEKLIRDIRR

SEQ ID NO: 8583 - protein, 182 aa, Artificial Sequence; identical to SEQ ID NO: 8582
  Synthetic

SEQ ID NO: 8584 - protein, 182 aa, Artificial Sequence
  Synthetic
DEVETVEEEVKKSLEELRDLARKHEKKVRESLKRLEESLRRSEEKVKDIIRRLEELKKRGEPKKDLERDIDELKKRLDETAEKNDEEMRRNHRELEEHSRRLKKKLEDNHKELEDRLRSEKKSEEVKKRLEDLRKEHEDTLRDIERRSRELLKRHKDKVDEIRKAHERLIRELEEIARRIKK

SEQ ID NO: 8585 - protein, 182 aa, Artificial Sequence; identical to SEQ ID NO: 8584
  Synthetic

SEQ ID NO: 8586 - protein, 182 aa, Artificial Sequence
  Synthetic
SEEEELKKKLEKSLDELRRSLKKSAEDVRRILEELKELMKRHKEVVEEIARELDELRKRGEPEEDLERRLRKLLEEARRHSRELEKRLRELEEEVRRIAKENRDRMKRNHEELEKELRSTKKSEDVERSLRDLRRKHKELVDRIDEEHKRLEKELRDIIEEIERRSRKLLKELEDIIRETRR

SEQ ID NO: 8587 - protein, 182 aa, Artificial Sequence; identical to SEQ ID NO: 8586
  Synthetic

SEQ ID NO: 8588 - protein, 184 aa, Artificial Sequence
  Synthetic
SLEEELKRVMKEVRDLAKEHSDRSRDVMREIRELSEENERRLRRVLEEAKRLADDLRRDRRKELLEDLERKLRKLVEDARRHHKKLEDDVKRITDELEKHLRELEKRLRDLTRRLEELLRREKVEERLKDILRRIREDIERLLDELRKLNEKIKRDVDRLLKENKETLDDIERRIRKLLDDERR

SEQ ID NO: 8589 - protein, 184 aa, Artificial Sequence; identical to SEQ ID NO: 8588
  Synthetic

SEQ ID NO: 8590 - protein, 181 aa, Artificial Sequence
  Synthetic
SVEELITRVERENERVARRDEELLRENEKRNRDVTREDRDLLKKLKEEVEEVLKRIREEGKEREEIAKRLKEILDRLKKESDDVEERSKELLEELERSSREAKARMDEHLRDLRRRVKGGVSEETVKELVKHNEDLLRKWEKKSEDLSRKNEEALERWRRKSKKLAEELKKTLEDIRREVT

SEQ ID NO: 8591 - protein, 181 aa, Artificial Sequence; identical to SEQ ID NO: 8590
  Synthetic

SEQ ID NO: 8592 - protein, 179 aa, Artificial Sequence
  Synthetic
DVEDKIRRLKERIKEVTERDRKLLEELKREAEEVLRRDKKSLEEVEREIEEILKDAERKGKRDERIEKTLRDLVERYRREHKRAAEDVERLKEEYERKHRDAKRKIDELERKLEDKLRDKKRGGDELIREVEKVLEDWKRKVDELNRRLKKVLKEWEDTVRKLNEELKDVLDKLREELD

SEQ ID NO: 8593 - protein, 179 aa, Artificial Sequence; identical to SEQ ID NO: 8592
  Synthetic

SEQ ID NO: 8594 - protein, 174 aa, Artificial Sequence
  Synthetic
DMEDKLRKIKEAIKKVLDEIRKLLEDIRRRLKRVREEIEEIHKRNEEENDRVKKELNVTEDLLREIEEVDKKLKEDSEDHKKKVDEVRKRLEDKLETLRKRAEDLAKKIDDDLRKDGVTDELIKKIRELLEELKDELRKLLEEAEEVLERLKRSVEELSRRNKKLVEDLDRKTR

SEQ ID NO: 8595 - protein, 174 aa, Artificial Sequence; identical to SEQ ID NO: 8594
  Synthetic

SEQ ID NO: 8596 - protein, 174 aa, Artificial Sequence
  Synthetic
SVEEKARDILEKLKRVVEKIKEIADRNRRENEDADREIKRLIEENKKRNEDLLRRLNVTEDLLRELEEADKESEKTFKRLDEDVETKNRDSDKKVRDIEEKIRDVLRKIKDELDKKGVTDELIKRIKEIIETLEKEVEDLSRENKKKVEEILDKVRKVSTRNREKLDELDKKVR

SEQ ID NO: 8597 - protein, 174 aa, Artificial Sequence; identical to SEQ ID NO: 8596
  Synthetic

SEQ ID NO: 8598 - protein, 182 aa, Artificial Sequence
  Synthetic
SDEEILRELEKRLEENVRRVEKRHEELEREVRDNLRRAEEKHRELEERVKRVIEEVIRTKGDEGEEARELSKTLRRLSEKHRRDTEKLLRDLKELSDRHRDRTRKIREELRRKLEEARRANSSEEMVRKLVEDVDRLITDHTRSLEDVDRKVKDVIRRHTDSLRKVEEDVKRIIEELRKKAE

SEQ ID NO: 8599 - protein, 182 aa, Artificial Sequence; identical to SEQ ID NO: 8598
  Synthetic

SEQ ID NO: 8600 - protein, 182 aa, Artificial Sequence
  Synthetic
DDEEILKKLREDVERVIKKIEDSLRELRKRLKDNVDRAEELHRRLEERAKKLIDEIIKKRGDRGERLDELRRRLEELSDRHRKETTKLERELEELMKRLREELKKALEELEKLLEDIRRAKLDREFVRRLAERVKKLLKELEDRLRELEERVKEVITRHTRSLEEIVRRVERVLEEMERAAK

SEQ ID NO: 8601 - protein, 182 aa, Artificial Sequence; identical to SEQ ID NO: 8600
  Synthetic

SEQ ID NO: 8602 - protein, 178 aa, Artificial Sequence
  Synthetic
SETEEAKKEIDEIIKRIEEETKRLRETYKRIIEEIERVSKRLEDEYRKLIEELERAKREGRSEKELTDLEKRLKEEDDRTREDSRRLEEEVKEKNKKSKKESDDLARKVREDLDRLRKGGVKTEELDKLRRRLEEILKRHEESNKKLSEDLERILEEHRRENERLHRELREILERLRR

SEQ ID NO: 8603 - protein, 178 aa, Artificial Sequence; identical to SEQ ID NO: 8602
  Synthetic

SEQ ID NO: 8604 - protein, 178 aa, Artificial Sequence
  Synthetic
SIEDILRELEKELRESSKRSREILERLREELRDSSRRSEEILERLKRKVKRVKEEIEPRESVERVEEELRRLEKELKDLNEKLERDHRRLEEELERLNKELKDEHEKLVRRLEEEGNVDDKRVREVAERLRRLNERYNREVKRLEKEARRLNEEYNRLVERLAREVEKLIRDLKEEAR

SEQ ID NO: 8605 - protein, 178 aa, Artificial Sequence; identical to SEQ ID NO: 8604
  Synthetic

SEQ ID NO: 8606 - protein, 184 aa, Artificial Sequence
  Synthetic
SLEDLVREIRKRLDDMEREVKKVDDESRKRLDEARKRVEKINRESEKRLKEVADELSELKDDELKKRLEDLRRELRKLHERADRELEELTRRLEEKHKEAKRELDELKRRMEEILRDIERKNSSDEKLARDLRREVRKLEKRLEELLKELKETTEKILRELERLLKKLEDDTRRVLEEIKELKR

SEQ ID NO: 8607 - protein, 184 aa, Artificial Sequence; identical to SEQ ID NO: 8606
  Synthetic

SEQ ID NO: 8608 - protein, 173 aa, Artificial Sequence
  Synthetic
DEEREVKRKYREDLDDIRRHSEEVLKRYDEAVKKLDEDLKKVVEEYERALEEIVRRAGEDEELRREVEENRKRNEDKARTKREDHKRNSKRYKDEHDRLEKEHRENEKRKDDENSSEEEMSKDLERELRRSRRENERLAKELEDALRKSEEDIRRLVEENKERLERLERELSR

SEQ ID NO: 8609 - protein, 173 aa, Artificial Sequence; identical to SEQ ID NO: 8608
  Synthetic

SEQ ID NO: 8610 - protein, 186 aa, Artificial Sequence
  Synthetic
SEAEKVEEEVKELVKRNREKHDEIRRRIEKLKEDLKRTSERSERKIKRLVEKIDDTLRKKGPDTDKLKRIRKRLEDKERKMKEDHRRLEEELERADKERKERTDKSDKKLRDDTEKTKDDLRKRGPGEDELKRMADTIRDEIRKDNERLRRTLEKAKREADEYRERDKRKLEDFEREIRRIEEETR

SEQ ID NO: 8611 - protein, 186 aa, Artificial Sequence; identical to SEQ ID NO: 8610
  Synthetic

SEQ ID NO: 8612 - protein, 178 aa, Artificial Sequence
  Synthetic
DEREEIEKTIRELMRENDDLVRKIRREIEESLRENRRTLEKIKKEIEELTRKAKRDVRPDEELDRDAKKIREEMERRERRYEEEAKKIRDRDREKKERSEEEKRETEEREEDLKRKNADEETLRKRLEEVKRKSDEHKKELEERLREVRRRSERVNEELKKTLEEVRKKIRELIERDR

SEQ ID NO: 8613 - protein, 178 aa, Artificial Sequence; identical to SEQ ID NO: 8612
  Synthetic

SEQ ID NO: 8614 - protein, 174 aa, Artificial Sequence
  Synthetic
SEEEVARRVEERVEELDRRLREIVKDLRDHNRRMKEKLEEAVERVRRRDKELDDILRETSLDERVEKEHRDRHKKEDDETRKDDEDNKEKEDRVKKEEDDLRKETEEERKRLEEDRSTSEELRKKLEDLRRKIDEKVKKVTKEHRDSAKKIRDDVRRVKEENKKANRELAEKRR

SEQ ID NO: 8615 - protein, 174 aa, Artificial Sequence; identical to SEQ ID NO: 8614
  Synthetic

SEQ ID NO: 8616 - protein, 173 aa, Artificial Sequence
  Synthetic
SREEEVEEEYERLLEEIRRRVKEVEKEYRDLLKKIEDDVREVRKEYEKLVEDLSRKAGRVEDEERKLEKNRRDNDKKEEDKRRRHERNADDFRRRADEMEKRHKRNRDEERKRNVEDEDASRRLRDIARRSREELEEEVKRLRTEIEKSERELRETTKENRKIIEDVRRRLEK

SEQ ID NO: 8617 - protein, 173 aa, Artificial Sequence; identical to SEQ ID NO: 8616
  Synthetic

SEQ ID NO: 8618 - protein, 173 aa, Artificial Sequence
  Synthetic
SEKEEVEREYRELLKEIEKRIDEVIKEYRDLLRDIRREVKRVLREYAELVKELKKTTGPVREEKKKLEDNDRKNKEEAKRLEDEHKENDERNKRRKDTLKKEHDENEKRERDEDRERDEAARELRKKAEDSKRELEKLEEENRRIIKRSRERLKKIEEDNRRIIKEVLDRARK

SEQ ID NO: 8619 - protein, 173 aa, Artificial Sequence; identical to SEQ ID NO: 8618
  Synthetic

SEQ ID NO: 8620 - protein, 174 aa, Artificial Sequence
  Synthetic
SKEELVKKARDELRRVLEELKRAVDELRKRDEDYERKSEDVVRRLRKIDKDVREVLRRGELDERTLEEIERRLREIHRRVREDSKRTEDELKERHDALRDRMKKLKEKLREERERLDLDEEVEEEIRREAKRIDDELEKVEEENKRTLDRAKKHNEEVEKENRDTLREIDKERE

SEQ ID NO: 8621 - protein, 174 aa, Artificial Sequence; identical to SEQ ID NO: 8620
  Synthetic

SEQ ID NO: 8622 - protein, 180 aa, Artificial Sequence
  Synthetic
SIEEEAKEIIDKVRKEVEDIVRRLKETNDEVRERLERILRRLEEVDEEAKRRVEELRERKRTLEKKTVKDIEDKLERDSERVKRETREETKELEDRSRDLTRRTREELERIRRELEDRDRRLRIDDRLREELEKLARDVERRTRELEKHHRELMKRAKEETERLERHHDELAKRVREKLK

SEQ ID NO: 8623 - protein, 180 aa, Artificial Sequence; identical to SEQ ID NO: 8622
  Synthetic

SEQ ID NO: 8624 - protein, 182 aa, Artificial Sequence
  Synthetic
DEIETVLDEVRRLHEDAKRRLEEMIDEVRKLNEESVRELARVVEEVERLLRTVKEEVERAGLDKGKLEELEERLERVREDVERILREIKRRNEKTLEDSERILEENKERNRTVLKKLKELRDRGSDAREALKESRKVVEESRESVRRVLEKNRRVVEESKRLAEELLRRVKKVVDEIRKRVE

SEQ ID NO: 8625 - protein, 182 aa, Artificial Sequence; identical to SEQ ID NO: 8624
  Synthetic

SEQ ID NO: 8626 - protein, 182 aa, Artificial Sequence
  Synthetic
DELEEVVRRVRELSRTVKEELREVIERVRELSERVKKKLRKVLREVAELHREVMKRVRDSGLDKSKLEKLEDESRRVLDKSREILRKNEEDNRRLNKELEEILKKNEDDNEDVRRKVDEVTRKGKDAEEVLREVEKVVEDSRRSAKDALKRVEDRVRESDKSVRELLEENRKVVEDIKRRVD

SEQ ID NO: 8627 - protein, 182 aa, Artificial Sequence; identical to SEQ ID NO: 8626
  Synthetic

SEQ ID NO: 8628 - protein, 174 aa, Artificial Sequence
  Synthetic
EELERILDKVRKVIEEVRKRLRDDLRTVEKVLKETEEVLRRAAERAKRALERVEEAARRGRDRREIKEELKKVLDDLRELLRALEEKNRRVNKENEDSLRKIEEDLRDVLRKLEEEIKGREVLRKVRELLRTIREEVERVLRKSNELSTRIKKRIDDVLETLERLLKELDDKLR

SEQ ID NO: 8629 - protein, 174 aa, Artificial Sequence; identical to SEQ ID NO: 8628
  Synthetic

SEQ ID NO: 8630 - protein, 174 aa, Artificial Sequence
  Synthetic
KDVEDVEREVDEVVKRSDDTVEENLRRAEDVVRDTDRIVKEMKERIDRVVERVEEVVRRGRDKREIEDELRRVLEELKRLADEVEKKNRDVNRRSEKLLRDDEKELRDVERELRKKIRGEEVLRKVTRLLREAKRRTEESHKKVNDLSRRVKERVDEVLERVKRLLEEVKRKVK

SEQ ID NO: 8631 - protein, 174 aa, Artificial Sequence; identical to SEQ ID NO: 8630
  Synthetic

SEQ ID NO: 8632 - protein, 176 aa, Artificial Sequence
  Synthetic
DEAEKVLKESKDTVDKIRRDVERLVDESRKTVDRIRELVDKAVKDSKDSVDRLRDVMRRNTNDKKELEKISRDDRKRLDEVRKRLKDLLREDNERLKKVLKEMRELLKRDNERLKRANVDEEVLRRIEKVNRDVARRVEEVFREAKEVNKKVDREVEDVIRKVKRVNEKVDEELKK

SEQ ID NO: 8633 - protein, 176 aa, Artificial Sequence; identical to SEQ ID NO: 8632
  Synthetic

SEQ ID NO: 8634 - protein, 176 aa, Artificial Sequence
  Synthetic
SEAEEVVRRSRETVTRNVRMLEKVVRDSEETVKKIVRDVERLLEESKKSVDDLRRLKEENRVDDRELKRISEKDEEDLRRALKDLEEKLKRDNERLEKVLEDSKRTLDEDNKRLDEANADEKVLREVKEVNERVRETSRDIADRVREVNEDVKRKVKKVIDDIRRVNEKVKRELEK

SEQ ID NO: 8635 - protein, 176 aa, Artificial Sequence; identical to SEQ ID NO: 8634
  Synthetic

SEQ ID NO: 8636 - protein, 182 aa, Artificial Sequence
  Synthetic
DEAREVVKRVKDLVRRLRRLSEKSLEDDKRLIEEVNKRSKDILDKVKKLVDDLRDMVRRTRDKDTLRKLVKEVKDRADDLLRRLEEIDKRIRDRSEENLRRNKEISEDVKRRAKELLDDARRRKLEEEVIKEIERVVRKVLEESREVHERIRETVKEVNDRNRKVLREIREVVKKVFEDARR

SEQ ID NO: 8637 - protein, 182 aa, Artificial Sequence; identical to SEQ ID NO: 8636
  Synthetic

SEQ ID NO: 8638 - protein, 179 aa, Artificial Sequence
  Synthetic
SDAEEVVRENRELVERIVREVEKILRDNEELVKRLVELVETSLRRNEKMVDELKKLVDRNKDKERLLEDAKRRSEKNERELEEILERLKRESDKSLKRIKEVLDELRKESKRLDDELRARRVDSRVIKEIRDTSKDAVRKVEEVLRRIEETVRDAERKVKEVIKRIRETSKEVLDRVRK

SEQ ID NO: 8639 - protein, 179 aa, Artificial Sequence; identical to SEQ ID NO: 8638
  Synthetic

SEQ ID NO: 8640 - protein, 179 aa, Artificial Sequence
  Synthetic
DAAERALRRSEEVVRESVEEVKTWVDENRRSVERLREELRKDEERVRRVVERIRKLVEDGEDKRELRKDLTRVLEESKESVRRIKEDLKRDTDKTEKLLDENRRKNEKSRRELEEIVRKGLVSEEVLKRVRKTNDDSDKEVKRLIDEARKLNDDVRKEVEEVLERTTRILDRVRKEVEK

SEQ ID NO: 8641 - protein, 179 aa, Artificial Sequence; identical to SEQ ID NO: 8640
  Synthetic

SEQ ID NO: 8642 - protein, 178 aa, Artificial Sequence
  Synthetic
DEAREVERRVREMVKELKRRLEEDVKESDKSVKDLERIAKEDVDRSRESVKELRDRVRRRRDEDVRRELREKLKKDNDESRKSKKELDDISREDEKRSRDSLRDLERLLRELERELREAKVEEEAVRRVKRIIEEVRKVLEDVFRESERLNREVREKLKRMFETSKELNKRVEEALRE

SEQ ID NO: 8643 - protein, 178 aa, Artificial Sequence; identical to SEQ ID NO: 8642
  Synthetic

SEQ ID NO: 8644 - protein, 179 aa, Artificial Sequence
  Synthetic
DSRRELEDDVRRIVETNRRLLEELERRVKKILEENRRLVEELRKENERIVRELTDRVRRDGKDDDLRRKLKEILDEIRKRNEDVLRESRKSLKDLARLIEEVRERSRESLEEIKKRLREANVEEDVVRTVEKLIRDLEEESRRVLEEVRRLLDEVRKESEEVHKRVNEIVKRVEDEIRR

SEQ ID NO: 8645 - protein, 179 aa, Artificial Sequence; identical to SEQ ID NO: 8644
  Synthetic

SEQ ID NO: 8646 - protein, 178 aa, Artificial Sequence
  Synthetic
SSKDEIRRRVEEVVERSDEIVKRSREHVKTVVDELDRVVKELERKVREVVKKLDKIRKDGGSEETLKRVLDELREILKELKEEVKKVKRKLEKVVKENRDTIREVEERNRKILDELRKRGVEERALREVEEISRKSEEKLRRVLKESEDIAKEAEDRLKTVLERVERIADEVLKRLTK

SEQ ID NO: 8647 - protein, 178 aa, Artificial Sequence; identical to SEQ ID NO: 8646
  Synthetic

SEQ ID NO: 8648 - protein, 178 aa, Artificial Sequence
  Synthetic
SKVKEVEDRVREVVKESERVARESLEHVRRVVRKTEDVVRRLKEKVRKAVEDLKEIKRRGGSEETLEEVERRLKKILDELRKEVDDVEKDNERALRDNRRKIEKVERENRDELEKLKKSGIGEEVLKKVEEISERSRRELRRALKESDKISEESLRRLRKVLREVEEIVRRVLEELRR

SEQ ID NO: 8649 - protein, 178 aa, Artificial Sequence; identical to SEQ ID NO: 8648
  Synthetic

SEQ ID NO: 8650 - protein, 178 aa, Artificial Sequence
  Synthetic
SKVEKLEEEIARLVERSRRLVEELKKEVTKVKEKVDEIVERSRRHVKKVVEKLRDIKRRGGSEEVLRRVTEELKKVLEDNRRVIEEVLRDLERILEELKRKAEEVTKRNRDDLKRLRDSGVDEEVLRRVEETSDRSEKELRTVLRDVTEDIKRIAEELKKALEDSTEIIRRAEDELRT

SEQ ID NO: 8651 - protein, 178 aa, Artificial Sequence; identical to SEQ ID NO: 8650
  Synthetic

SEQ ID NO: 8652 - protein, 176 aa, Artificial Sequence
  Synthetic
DSDRKIDDEVRKVVETSERSLRENIKRIEKVVRKLEEEVRKDLEEVRRVVKELREIVKRNKEKKEDLERLIREVKKKSEKSLEDLRREIKKVEDESRKNLEENKRLLEKVKERLDRANVDEEALRKVEEDLRRLDRRVEEVVTRSKEILDEARKSVEEVVRRSDEILRRVEEDLRR

SEQ ID NO: 8653 - protein, 176 aa, Artificial Sequence; identical to SEQ ID NO: 8652
  Synthetic

SEQ ID NO: 8654 - protein, 177 aa, Artificial Sequence
  Synthetic
DEVEDILRKVEEIVKKSITDARRLLKEAREIVEESIKTAEELLRRNEDIVRKLSEDVKRTTDEEKKKKLEEESRRVLEKTKRDLDRTKDDNRKALEKIRKRVKETEEENREVVDRVRKAGVDKRVLEKIKKVVDDSVRVNREVLKRVEEVLEESKRVNEKVEEDVRRVHEEVRKEIK

SEQ ID NO: 8655 - protein, 177 aa, Artificial Sequence; identical to SEQ ID NO: 8654
  Synthetic

SEQ ID NO: 8656 - protein, 177 aa, Artificial Sequence
  Synthetic
DRVEKLLEDAKKIVEDSKRTAEKLLRENEKIVEKIKREADKILEDNKKIVDELAEAVKRTTDKDKKEELKRRSEKVNKESEDLVRRLRKESEEVLERTERVVRETEKRNDEMRKRIEEGGVDRRVLEEVKRVIDESRRVNKRVEEEIRKVHRDVERRLEEVLKRVRDTSEDVRRKIK

SEQ ID NO: 8657 - protein, 177 aa, Artificial Sequence; identical to SEQ ID NO: 8656
  Synthetic

SEQ ID NO: 8658 - protein, 177 aa, Artificial Sequence
  Synthetic
SEAEKLLRDVEREVERVIEDADKLLREIEEIVKRSEDKAREILKENEKIVRELKEAVRRTTDERKKEELKRRSEKVNRKSRKLVEDTKKENEDVLREIEKRLRDLDRRLKEVEDRIRKAGVDEEVLRRIKKVVDDVRERLREVEKRIRDVIDRSRRVNERVLREAERTSREVERAID

SEQ ID NO: 8659 - protein, 177 aa, Artificial Sequence; identical to SEQ ID NO: 8658
  Synthetic

SEQ ID NO: 8660 - protein, 175 aa, Artificial Sequence
  Synthetic
DEAEDVLRKVRERVKESERHVEKVLEDVRRVVKKSIDHARDVLRKVKEVIDRVRELVERNERDKKELEEDLKRLRERVEEMIRTNEKENRDLERDVERAIEENRRRNDKVEDDVRKSNIDERVEREIRRVLKRSKERLEEVVKEIRELSEKSRRVLEEVKKRIREVLERVRKDVE

SEQ ID NO: 8661 - protein, 175 aa, Artificial Sequence; identical to SEQ ID NO: 8660
  Synthetic

SEQ ID NO: 8662 - protein, 175 aa, Artificial Sequence
  Synthetic
REAEEVLKEVRKAVEDSIRHVEEVLEEVKKVVEESIRHIRDSLRDVRRVIEEVDRLVKRNERDKKELKERLERALRKDERVVEENEDTNRRLIEKVEKAIRENEKRNDDVKRKVDELNVDKRVKEEIDRVLDESKRVLEEVVTRIRKVSDDSEKEVRRVHKESKRVVEEVERTVD

SEQ ID NO: 8663 - protein, 175 aa, Artificial Sequence; identical to SEQ ID NO: 8662
  Synthetic

SEQ ID NO: 8664 - protein, 175 aa, Artificial Sequence
  Synthetic
DEAEDVLRRVREMVERSIEHVRRVLKEVEDVVRESIKHVEDVVREVREVIREVEELVDRNEVDKKELRKRLKELEDKVEKRTRENEERNKELNKKVKDADDENRKRNEKVRRDVRRSNIDKRVEEEIDKLLRESKRELDEVRKRIEDLSRESERRLREAVEEIRRLVKKVAEKVN

SEQ ID NO: 8665 - protein, 175 aa, Artificial Sequence; identical to SEQ ID NO: 8664
  Synthetic

SEQ ID NO: 8666 - protein, 175 aa, Artificial Sequence
  Synthetic
KEAEDVLDEVRKAVEESIKHVKRVLEEVEEIVRRSIKHARDSLRKVKEVIDKVRTLVRRNEVDKKELEEELKRLEDEDRKMVKDNRDDNREANRKVDKMVKENEDRNRRVEEKVRELNIDERVRREIKRLLDESREVLKEVTKRIRKVSRDSERVVEKVHRDSKDVLDKVREDVR

SEQ ID NO: 8667 - protein, 175 aa, Artificial Sequence; identical to SEQ ID NO: 8666
  Synthetic

SEQ ID NO: 8668 - protein, 178 aa, Artificial Sequence
  Synthetic
SSLEKAEDEVRELLRDVERVLKEVRDRIEELNRKVNEVLRRVIEESERLLREVLERVRGRREVTELLKEVKKRNDKVRKDIRKESEEDKKKVEETVAEIKKELDDLRRDVRRVAEENGPSEKVRRLVDKVRETVTDIVRRVTRLLEESEESVRRLIEKVKKLNEESRRIVEKIEKDAR

SEQ ID NO: 8669 - protein, 178 aa, Artificial Sequence; identical to SEQ ID NO: 8668
  Synthetic

SEQ ID NO: 8670 - protein, 178 aa, Artificial Sequence
  Synthetic
SELERVEEDVKRVNKEVNDTLEKVIRDSKRVLDEVEERTRKVKRDSERLLERVERAVEGLKELKELLDRLREENREVVKDSERLLREWERENREVKKRIEDESEEDKRRLEEVARRNGPEEVVERVLEESRRSVETLIRDVERVNKKSREAVERNIRRSTAANERSKKIVKEIIDTAK

SEQ ID NO: 8671 - protein, 178 aa, Artificial Sequence; identical to SEQ ID NO: 8670
  Synthetic

SEQ ID NO: 8672 - protein, 174 aa, Artificial Sequence
  Synthetic
DEAEDVVRRVREEVERLIRRSREVAEESKRTVDKLRRELEELLRRSRETVERIKKLIDEGVDRREIEKLNRDNEEEVRRMEEKARRINTENRDRVRKVHEESKRELERIKEEVRRVDIDDKVREDIERVLREVEEVDKEVKERVRKVDEDSKKEIKEVKDEIRRVDEESRERAE

SEQ ID NO: 8673 - protein, 174 aa, Artificial Sequence; identical to SEQ ID NO: 8672
  Synthetic

SEQ ID NO: 8674 - protein, 177 aa, Artificial Sequence
  Synthetic
DEAEKVLEKARDLVRRNIERSRRVLEENKKSVDDLIRRNEETNRRNEKSVDEVKKLVDNGGSEEAVRTVAERDEKSLEENREENERILKRDEDTLEKAKRESDKSLAELKKLLDDAKRKGVDDDVLREVKRVLDEARRVSEEVEKESRRVLEEAKRVAEEVHKRSKKVVDDVKERAR

SEQ ID NO: 8675 - protein, 177 aa, Artificial Sequence; identical to SEQ ID NO: 8674
  Synthetic

SEQ ID NO: 8676 - protein, 180 aa, Artificial Sequence
  Synthetic
SELEDVKRRIDKVVREVEEVVREVSERSKKVLEEVRRSAERVNREIERVLREAKDEVRRRTRDDKIRKKVEEVERRVRKLIEDNRRINEEVERRVERLNEELRRLVEKVRKELEELKKDIKDKDAKRVLEEARKIVDRLRKIVEEVVRRSEELIRRLKKINEDSLRRVEELVKDLIREVS

SEQ ID NO: 8677 - protein, 180 aa, Artificial Sequence; identical to SEQ ID NO: 8676
  Synthetic

SEQ ID NO: 8678 - protein, 181 aa, Artificial Sequence
  Synthetic
KEAEEVVERVRELIERLRRRVTEMLRESKRLVEENIKRSEDALKESERLVDKLRELVKRTRDKETLKKLLEEIEREIKKINKRTEDILRESARRVEEINKRTKDILEEIARRITRIREEARRRNVDDKVLRTIEKLLDDVKKEVEKVNEDSKRLLRDVERVSKEVNDESRRVLEEVKREAK

SEQ ID NO: 8679 - protein, 181 aa, Artificial Sequence; identical to SEQ ID NO: 8678
  Synthetic

SEQ ID NO: 8680 - protein, 181 aa, Artificial Sequence
  Synthetic
SELEKIVEKIKRIIDESRRTVEESVRKSEKIVEEVKKRLEELVEEVRKIVEEIVRIIRNGDRREEVEEKARRTAEELRRRLEELRKRLEDLVRKDLRENEENLKRTEDLVREVKDELEKLPRNEELEKVKRMVDKVVDDVRKVNDTSRKRSKETLEEARRKVEEVKRRIDKVLRDVKREID

SEQ ID NO: 8681 - protein, 181 aa, Artificial Sequence; identical to SEQ ID NO: 8680
  Synthetic

SEQ ID NO: 8682 - protein, 177 aa, Artificial Sequence
  Synthetic
DEVEEVVKRVKEVVEKIVRELEKLVEESKKIVEDAVREDERLVEKIERVVRRLVEEVRRSTDEKKLEDLEKELEDVRKDIERVLEDNKRKLEEAHEKSKDKARRLREELERALREVEETGVSEEVKKLVDEVVKEVEEVIKRVEDLDRRVLEENRESTRDVERRVREVVKRVREALK

SEQ ID NO: 8683 - protein, 177 aa, Artificial Sequence; identical to SEQ ID NO: 8682
  Synthetic

SEQ ID NO: 8684 - protein, 176 aa, Artificial Sequence
  Synthetic
SDAERVVREVERLVDTTRKLVKKVVEDIRRVVETAKRDLDRVVKRSEDVVREVKKLIEEGVREEEIKKILDEIRKETKDVERKIKKILDDIRKKVEKVTEEIKDVNRKTKEIVDRAKDRIDDRVIKLVRKLNKDSERKLREVRDRVERVIEEVEKRLREVKERSKETIEDVERARK

SEQ ID NO: 8685 - protein, 176 aa, Artificial Sequence; identical to SEQ ID NO: 8684
  Synthetic

SEQ ID NO: 8686 - protein, 177 aa, Artificial Sequence
  Synthetic
DEAEKVVEEAKRRVKEVVERLREVADRNRRSIEELVKELRAVVEDSRKSVEDLVRRVRNGGSKETVEEIDRRNEDKLRELEKRVRKIIEENKRSLEKLKRDIERIERRLEELLERVDRNNVSEEVKKLVEDVIEEVRKVVKEVEDISRRVIEDLKRVLEEVEKRSRKLIKEARDETR

SEQ ID NO: 8687 - protein, 177 aa, Artificial Sequence; identical to SEQ ID NO: 8686
  Synthetic

SEQ ID NO: 8688 - protein, 181 aa, Artificial Sequence
  Synthetic
DELREVVKRVRRLIEEVRRLVKELVDRVRKVIEELKRRSEDSARESERVVREIKKLVEERKDKEELLKEAEKKVEKIHRDNKKLLRELEEKIERIREELDRVLRDLERRLRELKEELKRGPKNEELEDVDRDIERVREEVKRVVDEVRKRIRDVLEDARRESKRVLDRSRESLREVREAVR

SEQ ID NO: 8689 - protein, 181 aa, Artificial Sequence; identical to SEQ ID NO: 8688
  Synthetic

SEQ ID NO: 8690 - protein, 181 aa, Artificial Sequence
  Synthetic
DELEELVKRVEDVIREIEERVRRLVRESERVVKEILKKSRKSVEKVKEVVDRAVDLVRKRKDDKRALEELRRVAEEIKEENERLLRDAEEKVKKLDRELEKLLEDLRREIRRLLEELRRGPDDERLKDVEREIRRVLRRAEKVVDEALKRSRDTLREVRKVSKEVREDIERVVKEADEAAR

SEQ ID NO: 8691 - protein, 181 aa, Artificial Sequence; identical to SEQ ID NO: 8690
  Synthetic

SEQ ID NO: 8692 - protein, 177 aa, Artificial Sequence
  Synthetic
SVVDRVREELEKVLRHSKKVVEDVKREIDKVLKRSEDALRRVEEESKRVLEEVERDGISEELEERLRRIHRESRERLKRLKEENERIAEELRKRLEDLTRENEKIIRDLDRELKKTRDKDTLKKLVEEARKVSEDSRRRLERIVEEMRRVSEDSRRRLEEIVRENRKVVEEVRRRAT

SEQ ID NO: 8693 - protein, 177 aa, Artificial Sequence; identical to SEQ ID NO: 8692
  Synthetic

SEQ ID NO: 8694 - protein, 177 aa, Artificial Sequence
  Synthetic
SVVERVREEIKRVLENSKRAVDKVREDIKRVLDESRKAIKEVEDEIRKVLEEVERGGIDEELRKELKRIVDELRAELKKLLDENEEAVKELEERLKKLTRDNEEIVERLERRLKKTTDSDTVRRIVEEIEKVSRESVKRLEDIVREMKKISEESKETVDRIVEKIREVVKRLLEAAK

SEQ ID NO: 8695 - protein, 177 aa, Artificial Sequence; identical to SEQ ID NO: 8694
  Synthetic

SEQ ID NO: 8696 - protein, 177 aa, Artificial Sequence
  Synthetic
SAVETVRKTIEDVLRNSERVLKKVREDSKKVLENSERVLKEVEDRSKEVLKEVEDGGIDERLREELEDIHRRSKKRLDELREENKRIHDRTEEELKRLLRENEKIVEDLARRLDKTTDKKELDEIAEEIKRVSEDSVRKARELAERNKKVSDESVKRVKKIVRENEKVVEELLKAKK

SEQ ID NO: 8697 - protein, 177 aa, Artificial Sequence; identical to SEQ ID NO: 8696
  Synthetic

SEQ ID NO: 8698 - protein, 177 aa, Artificial Sequence
  Synthetic
SEVDEIVRRIKEISKRSVDDLEKLARDNKKAVEEVLEELRKLLEENEKMVREVLEEVRRSTDEDRLAKLRKRVEDVNRRTRRVLDEIRKKVEEVHDRTRRRLEELKRRNDEVLRKIASKPIDERLDRMLKEVIKHSEKVVRDVEETSKTVLKEIEDALKKVEEASKRVVDRLEEATR

SEQ ID NO: 8699 - protein, 177 aa, Artificial Sequence; identical to SEQ ID NO: 8698
  Synthetic

SEQ ID NO: 8700 - protein, 177 aa, Artificial Sequence
  Synthetic
RRVDEIAKKIKRISEESVKTLDKIMEDARKIVKDVLDELRKLAEDNKRVVREVLERVRRSTDEDTLKKLDDKLRDVHRRTKEVLDKLTDEVRDVKRRIDELLEKLKEENERVLREIESEDIDERLRRTVERVIRHSREAVKRVKDEVEKVVKELEDVVRKVKEDSERVVKEVEEAKR

SEQ ID NO: 8701 - protein, 177 aa, Artificial Sequence; identical to SEQ ID NO: 8700
  Synthetic

SEQ ID NO: 8702 - protein, 181 aa, Artificial Sequence
  Synthetic
SEAEDVVRRSKRSVERLKKELDDVVRESKESVERLVRRNDEVVKRSRESVDELTEAVKRGLRREDIERILRENRRLLEEAHKENKKILEENKKLLDDLRRRVREILERNKRLLEELKRRLKDKDLVERVERTVRTTLKELEDALREVKRMVEDTLKKAEDVNRRVAEEVKKSEKRLRDVAK

SEQ ID NO: 8703 - protein, 181 aa, Artificial Sequence; identical to SEQ ID NO: 8702
  Synthetic

SEQ ID NO: 8704 - protein, 181 aa, Artificial Sequence
  Synthetic
DEVDDVVRKSEKSVEELVRKLETVVKRSEESVRELLEKNREVVERNERSVRELLERLEKGLSEKEVEDILREDEESLKKLHEDNKRILKENRDLLRRLEEEVRRINRENERLLDDLRKKLTDKDLLKRVEDTARRVNREIEEALDRVRKAVEKTLKKLKDVNDEVRKESEKVLKELRDATK

SEQ ID NO: 8705 - protein, 181 aa, Artificial Sequence; identical to SEQ ID NO: 8704
  Synthetic

SEQ ID NO: 8706 - protein, 177 aa, Artificial Sequence
  Synthetic
SDEDRVREMVRTVIEKLDRVLEEVERDSAKTDRDNKKSAEDVRRESKRTDDELKDVVRKAGRELEKIRDVVDKNRRLVEKLDKENRKTLEENRRLLEELKKLADEVKEELERLRKEIKDKDVDEVVERAKKLVKRLEDRLREVVKESRRLVRRVVERNREVAERSKDLVRRLVEDTR

SEQ ID NO: 8707 - protein, 177 aa, Artificial Sequence; identical to SEQ ID NO: 8706
  Synthetic

SEQ ID NO: 8708 - protein, 177 aa, Artificial Sequence
  Synthetic
SKEEEVERRVEEVIKELEEVLRRVEEEIKRVIDDNRRSARDVEEKSKRTDEELKDVVRKAGRRLEEIERIEEENKKLVDELRKSNEKTEEELKKLLEELREMVREVKERLKDLLDKIKDRDVDEVARRVKEMVERLRKLAEEVVREAERVVREVVDENRKVVEESKRLVKELLERVK

SEQ ID NO: 8709 - protein, 177 aa, Artificial Sequence; identical to SEQ ID NO: 8708
  Synthetic

SEQ ID NO: 8710 - protein, 177 aa, Artificial Sequence
  Synthetic
SDEERVDEEIKTVIEELKRSLKEVEDTIRKVIKENKDSAKRVKETSEKTDREIEDVVRKAGRELEDIKKVKRDNKELVKRLDERNRETEKELRELLDRLRKENKESEDRLRKLRDEIKDKDVDTVAKEVRDLVRENVERNKEVVKRAKKVVDDVVRENRKVAEDSKKLVKEVKDRVR

SEQ ID NO: 8711 - protein, 177 aa, Artificial Sequence; identical to SEQ ID NO: 8710
  Synthetic

SEQ ID NO: 8712 - protein, 177 aa, Artificial Sequence
  Synthetic
DDEERVKELIKEVIRELEESLRRVKEDSKRTDEKNKKSMEDVERKIERVRRRLDEVVKEAGRDLEDIKRIDKELEELLRKLREENERTRETNEELVRKLDEENRKSKKELEKLLREVKDKDVDEVAKRATDIVKRNAELNKEVVDESRRLVEEVVDRNEKVAKRAEEIVDELERRTR

SEQ ID NO: 8713 - protein, 177 aa, Artificial Sequence; identical to SEQ ID NO: 8712
  Synthetic

SEQ ID NO: 8714 - protein, 185 aa, Artificial Sequence
  Synthetic
DEFKEVVDRVKRLVTENVRENRRVVEESERLVKEALKRLEDLVRRAKEIVDRLDDLVRKIRDEDTLREVVDRIEKILRELEEEAKRVARRIKEESKRLNDEVKEINDRSRRKLTELLKRLDESRVPKDLLKRVRDSIETVKKELDDSMKKVSDDDERSKKELEDVLEEVRKRIEKVMKELRDTSR

SEQ ID NO: 8715 - protein, 185 aa, Artificial Sequence; identical to SEQ ID NO: 8714
  Synthetic

SEQ ID NO: 8716 - protein, 185 aa, Artificial Sequence
  Synthetic
DEVREIVREVKRLVEENVRRNDDVARKSRKLVKENKDRNKEVVDRLRELVKRALDEVRRIKEEEELRRVVKEIRDELRRLRKKLKDINDDSERKSRELNKLVKDINKKSEEELEKLRDRVRRLRVPEKLLKEVEDMIRTVKKELKDSARRVSEEDKRSKEDLKRSAKEVEETIKDVLRKLDTETT

SEQ ID NO: 8717 - protein, 185 aa, Artificial Sequence; identical to SEQ ID NO: 8716
  Synthetic

SEQ ID NO: 8718 - protein, 185 aa, Artificial Sequence
  Synthetic
DEAEEVVRRVERLVKENVKLNKEIVKRSRDLVKELEERLREIVKRVEEIVKRAKDLVEEIKDKDTLKEVVDRIRRELERLLEEVERIARKIIEESKELNKRMREINKKSKEDLKRLLDELDKSRVPKDLLKRVREVIERVDRELDKSMKEVHDENEKSVRRLREVLERVKKRIKDVTKELEDRTR

SEQ ID NO: 8719 - protein, 185 aa, Artificial Sequence; identical to SEQ ID NO: 8718
  Synthetic

SEQ ID NO: 8720 - protein, 185 aa, Artificial Sequence
  Synthetic
SLVEEVVRRVEDLVRKNVRLNEEIVRRSEDLVRRNVELNEELVRRAEDLVRRIEELVKKIKDRRELERVLREIRRTLRELKRELEEINKRSKDESRRLNDEVRRINEKSEEELKRLLDELRKRPVDEELLRKVEKMIERVVRELKKSAKRVHDENRRSDEDAERSMERVERVIERVERDIDRRLR

SEQ ID NO: 8721 - protein, 185 aa, Artificial Sequence; identical to SEQ ID NO: 8720
  Synthetic

SEQ ID NO: 8722 - protein, 185 aa, Artificial Sequence
  Synthetic
DEAREVVTEVKRLVRENEERNKEVVKRSKKLVEDLKDLARKLVDRAKKLVDTLRDLVRKIRDKDTLKEVVERIRRELDKLRKELEEILKRVHEEDKRLRDEVDEINKRSEDELRKLEDELRKSRVEERLLEDVERKIETVIRELRKSMEEVKESSRRSNEELKKVADDVERTIRKVERELEKEST

SEQ ID NO: 8723 - protein, 185 aa, Artificial Sequence; identical to SEQ ID NO: 8722
  Synthetic

SEQ ID NO: 8724 - protein, 175 aa, Artificial Sequence
  Synthetic
SDAERVVDDLERRVRENLEDLRRAVREVREVVKKNLETITRVLEEVERVVDRLSKLVKEGTDRKDLEKELRDLEEKIKRISEESRRHLDELRRKVEEINKRSRDHLRDLARRLKEEIGRVREVDKVLKDVARKVEEANEKSRRVLEEVEELVERVNRELHETLKRVAERVKRDAT

SEQ ID NO: 8725 - protein, 175 aa, Artificial Sequence; identical to SEQ ID NO: 8724
  Synthetic

SEQ ID NO: 8726 - protein, 177 aa, Artificial Sequence
  Synthetic
SDEERVTKVLEEVKERIERANRTLEKRVREVTDRVREVNERSDKVNRDSERKIREIIKRLTDKDLVRKLEKLLEEDRRRSEEALEESDRLVKEAKRRIDKALKESEDSLRDMEREVRERPKLEKLVRDLRKIVEENERKNRDLLRKIEKIVEEIERRNRDVVRRSKESVERLREEVR

SEQ ID NO: 8727 - protein, 177 aa, Artificial Sequence; identical to SEQ ID NO: 8726
  Synthetic

SEQ ID NO: 8728 - protein, 181 aa, Artificial Sequence
  Synthetic
DADRELRRVAKEVTDRSRRVLEDSERVVRESHEKSKRVLEDLRRVVKEVAERIDEVLKRVRGEDLERLERIKERIKEEVDRVDERSKRTVEENKRRVDEVRKESKKIVDDMRELLERAKDLTEEVARDVVRKLKRIVTENLKKNTKVVRDSEDLVRRDLEEVDRVVKKVKKDVDEIERDVK

SEQ ID NO: 8729 - protein, 181 aa, Artificial Sequence; identical to SEQ ID NO: 8728
  Synthetic

SEQ ID NO: 8730 - protein, 181 aa, Artificial Sequence
  Synthetic
DEVREVVKELKRIVDELLDELRKVVEELEKIVTDDLRRIEEAVKRSKDSVEDLERRLKSGGSEEMVKKIKDENKELLKKVREESKRSNDRSKEVLDRVKKRVEDIIERLRRELKRVTKDIEDKDLLRELEEVARRVEEKIKKAVRELEKVMREVNRKSTEVLKRLEKVVRDSEKRIDDATR

SEQ ID NO: 8731 - protein, 181 aa, Artificial Sequence; identical to SEQ ID NO: 8730
  Synthetic

SEQ ID NO: 8732 - protein, 181 aa, Artificial Sequence
  Synthetic
SDVDEVVKEVKAIADDSTRLNKESAEKSRELVDRDTKKNKRSVEELRRLVTEILKVVESGGPGKVVEEAKKRLDRLLERDEETNRDSERKDRELLRTDEELNRETDKRLKDLLDRVRRRISNDELLRKLEEVVEKVRRDDERSHRESERVSRESTKRSRDSHRESREVVTEVKKEVDRAAK

SEQ ID NO: 8733 - protein, 181 aa, Artificial Sequence; identical to SEQ ID NO: 8732
  Synthetic

SEQ ID NO: 8734 - protein, 185 aa, Artificial Sequence
  Synthetic
DEAEEVVDRARKLVKESEDLNRRSVEESEKLVTTSTELNKRTVDRLREIVEEVKDLVRKTRDEDTLRELVRRIEERLEKLLRDDREINKETNKESRRLNEEDKRINDESRKKLDELKKEIDKRGLPEDVLRKVKKTLEEVKRRDDEAMRRSHKKDDDSRKRDEESMRRSDEVVREVIEEVREAER

SEQ ID NO: 8735 - protein, 185 aa, Artificial Sequence; identical to SEQ ID NO: 8734
  Synthetic

SEQ ID NO: 8736 - protein, 187 aa, Artificial Sequence
  Synthetic
DEIEDVVRKVEEMVKESKDRVDRNVEESRRIVTESREKVKDSVRRVEEVVKEIKKLAEQGRSEEELKRILDEAEKTLRENRRRNKKVHEETRRRLEESDRHLKKVHEDTKRLLDALKEELKRLKEKIDDKVVKKVDDALKRVEKKDRDAIREVERVNREVEKDDERVLRDSERVLEEVRKRVEEVTT

SEQ ID NO: 8737 - protein, 187 aa, Artificial Sequence; identical to SEQ ID NO: 8736
  Synthetic

SEQ ID NO: 8738 - protein, 187 aa, Artificial Sequence
  Synthetic
SEIDEVVERVRKAVEDSRKVVEDLIKTVEDAVREHERLVRRVVEEVDKLVEDIRKLLERGESEEMLKRILEDAERRLKELKEELKRSNEDIERILRELKKELKKVHDRTRKILEELKRRLDELRKDIDERMLRKVDEVIKRVAREDERVVKKLEDVLRDVKRRVDEASKEVDRRLKEVKKRVEKEAE

SEQ ID NO: 8739 - protein, 187 aa, Artificial Sequence; identical to SEQ ID NO: 8738
  Synthetic

SEQ ID NO: 8740 - protein, 187 aa, Artificial Sequence
  Synthetic
KEAEEAAKRAEEAAKRHEDLAREAAKEAKRAADESRKAAEEAAKRAEKAARDIADLARKGLDEEALDRAAKRAKELLDELRKELEKVHRDTERLLDELRRRLERSDEEIEEILRRLKDELDKARERIDEKAARKAEDALRRAREIAKKASEDAKRALDEARKADEDAARKAEKALKEAEDAAREARR

SEQ ID NO: 8741 - protein, 187 aa, Artificial Sequence; identical to SEQ ID NO: 8740
  Synthetic

SEQ ID NO: 8742 - protein, 184 aa, Artificial Sequence
  Synthetic
DEEEELKEVVREVAERVEEVNRKSERELDKARKDSERALEKLERVLREVAERVKRVLDEASKRVPEELIKRIKEELEKMKREIEKILTDNRRKTEEMEKKIRKINEDSRDHLRKVEREVERVKDEGKDVKDVIRELEEVVRRNTDLVRKVEEEIRKVVEESKRSIEEVIKRLRKLVDDIRKAIK

SEQ ID NO: 8743 - protein, 184 aa, Artificial Sequence; identical to SEQ ID NO: 8742
  Synthetic

SEQ ID NO: 8744 - protein, 184 aa, Artificial Sequence
  Synthetic
DEREKLAEVVKRVAEDVKRMNKESREALKRVKEEVKRVNEKSEKVTREVKKEVERVIEEAKRTIPEELLKRIRDKLKKVEEDSRRTNEESKRHLKEAEDRIREINKRSEDHLREVIKKVEEVMTRGKDVEDVIRELEKVVEDNKRLVEKVVRDARKVVEDNKELVDRNVKRLEEVVREITKEIK

SEQ ID NO: 8745 - protein, 184 aa, Artificial Sequence; identical to SEQ ID NO: 8744
  Synthetic

SEQ ID NO: 8746 - protein, 186 aa, Artificial Sequence
  Synthetic
RDVDELVRELRDVVRKVLETARDSVRELKRIVTESLRRAEDLVKEITDVVREVLDAVRRARDKDTLKKLKDDAERVLERLERRIRELHERSRRVSEESEKLVRKLEEDAERVIRKVEDALRKRLKDNREVVKKLRDVIREVKEDVERVLKEVRDVNREVNKIDKEAVERIRRVLDEVRKRVDEAAR

SEQ ID NO: 8747 - protein, 186 aa, Artificial Sequence; identical to SEQ ID NO: 8746
  Synthetic

SEQ ID NO: 8748 - protein, 174 aa, Artificial Sequence
  Synthetic
KEIDDVVRELKEIAKRDEDKVRRVVEDLERVAREDLRKVREVVKELRRVVKTLLDLVRRGVDKRELKKILEELEKRVREVHDESRRTLEELDKKIKKVKEESERTLREAEKRARDIEKDKRLDDVLREVADIIRRSIRDLERVLEEVKRIIETSNDELRKVLKEVRETITEAER

SEQ ID NO: 8749 - protein, 174 aa, Artificial Sequence; identical to SEQ ID NO: 8748
  Synthetic

SEQ ID NO: 8750 - protein, 174 aa, Artificial Sequence
  Synthetic
SEIDEMVRKLKEMARRDLETVRRVVERLRKLAEDDLRRVRKVVKKLKELAKDIVRLVEEGSREEELEEILKRIEEEVRKVEEESKKSLREIREEVEKVKRESERTLEDIERKAEEIEESERLRKVLKEVKDIIRKSNKELDEVLRDVERIIRESIEELRRVLEEVKKIIKEARD

SEQ ID NO: 8751 - protein, 174 aa, Artificial Sequence; identical to SEQ ID NO: 8750
  Synthetic

SEQ ID NO: 8752 - protein, 181 aa, Artificial Sequence
  Synthetic
DEVDEAVRRLEEIVTRIEKDVDDVARRSEESAKEVEKAVRKVVEEHKKVAEDIRKLVEDGGDERELRKILEDLRKTSREVERALEEILRENDRLLTEVRRKLERILERLDELAEDVKRRVRGREVKERLKKVLDKVRKRIKRVVERLEEAARKSRKIIRDAKEELERVSREVEKVIRDVRR

SEQ ID NO: 8753 - protein, 181 aa, Artificial Sequence; identical to SEQ ID NO: 8752
  Synthetic

SEQ ID NO: 8754 - protein, 186 aa, Artificial Sequence
  Synthetic
EEVKELVERLRDLVRESEKRVDEVVKRLEDLVRRNEELNRELVTRLRDLVRKLEEKVKDTKDEETLRRLAEEVRKRLDELRREMEKINRDSERELDRLDREVERISETTERRLRELEKKAKDDIKDDKEMVREIKRVVDEVRKRDKEALDRLKKVIEEVRRKVKRSEDEARRVVEEVKRIVDRVET

SEQ ID NO: 8755 - protein, 186 aa, Artificial Sequence; identical to SEQ ID NO: 8754
  Synthetic

SEQ ID NO: 8756 - protein, 186 aa, Artificial Sequence
  Synthetic
REVDDLVRRLEELVRRNEKKNEDVVRESKELADRSRKLVKELVKRLRELVKTVVRLVEETKDEDTLRRLIEEVEKRLRDLKREIEEISKETKKRDEELLRKAEKINKDSKDRIEDLLREAKRRIKDDKELVRKLKKVVDEVRERIDRSTEEVRRVSKESKDIDKRAKEEIEEVLRDVEKKLRETAT

SEQ ID NO: 8757 - protein, 186 aa, Artificial Sequence; identical to SEQ ID NO: 8756
  Synthetic

SEQ ID NO: 8758 - protein, 186 aa, Artificial Sequence
  Synthetic
DEFRDVVRKLEKLVEDITREAEEVVKISKALAEENKRLNDELVDRLRRLVEEVRKKVEDTKDEETLDEELRRVKETLKRLLEEVERINKESREKDRKLKEEVRKRIEEVEERLRTLLEEVKKRLKDDKEVVKRVKDVVDRVRDEVRRVAEKVDRVSKESKRIIDESTKRAREVLERVRKRVEDERK

SEQ ID NO: 8759 - protein, 186 aa, Artificial Sequence; identical to SEQ ID NO: 8758
  Synthetic

SEQ ID NO: 8760 - protein, 186 aa, Artificial Sequence
  Synthetic
SEVDDIARKLRDLVRRNKELNDEVVRRSEKLVKENKELNEELVRRLKELVDRLEDEVRRTKDKDRLREIIREVRERLKRLLDTIKRINDESRKEDKRLLDEAERINRESRKKIDKLEKDAEKDIKDDKEMVKKLRKVVEEVRREIDDSMRKVKKVSEDSKRRIERSTEEIEEVAKRVADKVTDVER

SEQ ID NO: 8761 - protein, 186 aa, Artificial Sequence; identical to SEQ ID NO: 8760
  Synthetic

SEQ ID NO: 8762 - protein, 178 aa, Artificial Sequence
  Synthetic
RELEEVVRELRKLVTEDLDRVRKSVEESERVVREDERRVDESVKRTREIADEVRRLKEEGVDESRLRELLKRVEDMNRESLKRSEDSLKRLHERNRKSLKESRDSLEEAERRVEDVRRRGVDEEELKKVLKEVRKVVTDSERRDKEANRKVEEVIRRSKKKDEDAHREVRKVVEDVRT

SEQ ID NO: 8763 - protein, 178 aa, Artificial Sequence; identical to SEQ ID NO: 8762
  Synthetic

SEQ ID NO: 8764 - protein, 176 aa, Artificial Sequence
  Synthetic
SKDEKLEKVIREVKRVIERVSKESEDVLRKVRKVIEDVSRESRRVLEDSRRVLERVAREGKRDERIKEVEDRSRRTLERLEELNDTVRRLLEEVVRRLRELNKDVERRLRDLARKLKDLDVDEVVDRARRIVDDVDRLNREVVKRLKDLVEDLRRLNEEVVRRNKELADTVRKDVR

SEQ ID NO: 8765 - protein, 176 aa, Artificial Sequence; identical to SEQ ID NO: 8764
  Synthetic

SEQ ID NO: 8766 - protein, 176 aa, Artificial Sequence
  Synthetic
SEDEKLKEVVDEARKILEDADRELKRVVKEVEDVIRDVSKKSTEVRKEVKEILKEAADKGDEDERIREVEKTVEDLLRKLEEMNRRIEETLKKLAEEVHRRNREVEKEVEDLARRVKELDVDKVVDDLRKLAEDLLRENKEVVDKLRELVERVKKLNEDVVREARRLADEVLKRVT

SEQ ID NO: 8767 - protein, 176 aa, Artificial Sequence; identical to SEQ ID NO: 8766
  Synthetic

SEQ ID NO: 8768 - protein, 179 aa, Artificial Sequence
  Synthetic
SEVERLEERLKRIVEDIKRLVKKSVEDSRKIVEEIRKLVKDSVEKNKRSVEEVEDIVRKDKDVKERLEELVRRDEEVNKKTKEDIKELLDRVREINERTNEKIERLLRELKKEIDDVRRRGVDEERVKRVLREVEERVKEVKKENEKAHEEVRKDVERVLEDDDRALRESRERAERVKK

SEQ ID NO: 8769 - protein, 179 aa, Artificial Sequence; identical to SEQ ID NO: 8768
  Synthetic

SEQ ID NO: 8770 - protein, 179 aa, Artificial Sequence
  Synthetic
TEVDELLDSLRKIVTEIEKLVEESEKRLREIVKTIEKLVKDSVRTLKKIAREIEELAKDRKEVEDAIRKLLKEVEDIVRETNKTSEELARRIRKLVKEVNERTDKLRREVEREVEEVKKNGVNEERVEKVLREVRDRVKKVNKRNEDALREVDKKVKDVNKENEDVLEEARRVVEEVRR

SEQ ID NO: 8771 - protein, 179 aa, Artificial Sequence; identical to SEQ ID NO: 8770
  Synthetic

SEQ ID NO: 8772 - protein, 174 aa, Artificial Sequence
  Synthetic
REDEKIKKVVEEVRKKLEDVDKNSRDAIEDDKRVNKEVDRNSERAFKENEDEIRKVKEAGVDEKKLKESRDNSKRVLDRSKELLKRSEENTRRLAKESKELLKEVRDRLEDLRRRVKNADEVVKELERIVAEVEKLSREVVKRLKENVKRVRDLSKRVVEYLKEDADRLKEDVR

SEQ ID NO: 8773 - protein, 174 aa, Artificial Sequence; identical to SEQ ID NO: 8772
  Synthetic

SEQ ID NO: 8774 - protein, 174 aa, Artificial Sequence
  Synthetic
DEERKIRKAVEDVRRVIKEVEENSKRVFDENKKVIDDVRKEVEKVLKENRDVIKEVRDKGVDEKLLDESRRNSERVVTKITKLLKDSEDNSRRLLEESKRLAEDVRRRLEELRKDVSNADEVLKELKKLVEELEKLSREVVKYLREDAKRLKDLVRKVVEYLKEDARRLDEEVR

SEQ ID NO: 8775 - protein, 174 aa, Artificial Sequence; identical to SEQ ID NO: 8774
  Synthetic

SEQ ID NO: 8776 - protein, 186 aa, Artificial Sequence
  Synthetic
SVVEKLLEDARRVVEKVREAVERNLKKVRDLVKKLREDVKRSKDHLEEVVRKLEEAKKTTDEKVLRDLKREVEEVLKRNEDLTRKLKEEAERINKESKDHLERLREEIERIIEDLRRKLEEAKDRVSEEVERRVEEVIRDLERVLREVRERVRRINEESRRMLEDVERESRKALRDLEEVLDRVRR

SEQ ID NO: 8777 - protein, 186 aa, Artificial Sequence; identical to SEQ ID NO: 8776
  Synthetic

SEQ ID NO: 8778 - protein, 186 aa, Artificial Sequence
  Synthetic
SVVEELRKRVEDVVDEVREVVERNRDLMRRVAEESKKIVDDSLRHIKEVVDEVRRAKNTTDEKVLDDLRKKVEEMLRRNEETTKRVSEKSEKINKESEDHLRELRKKIKKIIEDLEDRLRKAKDTVDERVKKRVRDVLRKLREVLERVAEEVKKVNKRSREVNKRVEEKSEEVLRDLERVLREVET

SEQ ID NO: 8779 - protein, 186 aa, Artificial Sequence; identical to SEQ ID NO: 8778
  Synthetic

SEQ ID NO: 8780 - protein, 178 aa, Artificial Sequence
  Synthetic
SEVEEVVERLRRKAEEDLRRVEEAVKEHRRVVKEDLDRVRDAVERHREVVETIRKLKEDGGDEKELKKIEEDLERSSRKVKEESDRTLERLEETSRKVDKESKETLDRLREEVKDVARRGGDDEKLKRVLKEVEEVVRESKERLREVHEEVRKVIEDSKRILKTVHDDVRRVIEEVKK

SEQ ID NO: 8781 - protein, 178 aa, Artificial Sequence; identical to SEQ ID NO: 8780
  Synthetic

SEQ ID NO: 8782 - protein, 178 aa, Artificial Sequence
  Synthetic
DDVERVLKELDELLKRDETEVREVEKRHREVLETIERRVREVIERHKEMLRRLAELVRSGGSEETLKEILDRLRRTSEELKKELEKILRDLERTSREVEERSERTLREIEKRIEDLRRKGGDVEELKKVRDKVRRVIEESKRRLEELHEEIRRLITELKRRLEEVTEEIKRAIDELRR

SEQ ID NO: 8783 - protein, 178 aa, Artificial Sequence; identical to SEQ ID NO: 8782
  Synthetic

SEQ ID NO: 8784 - protein, 178 aa, Artificial Sequence
  Synthetic
DEVEDVVRRLRKIVEDIRRDVERVVEEHDRVVRKLKRRVEEAVEEHRKVLEEIKKVKENGGSERELEEIAKKMEESSRRVEEEIERIARELDRTSEEVKKRLEKLLRDVREEVKKVAKDGGDREDLKRVLKEVEDVVREVDKILTDATERVKRVITEVKDILRRVHEEVREVIKRVKE

SEQ ID NO: 8785 - protein, 178 aa, Artificial Sequence; identical to SEQ ID NO: 8784
  Synthetic

SEQ ID NO: 8786 - protein, 178 aa, Artificial Sequence
  Synthetic
DEVEEVVRELREILKRDLDEVRKAVEDHERLLREITKDVKRVADRHRDLLRKIRELKENGGDEKLLKKIEDELRRTSEEVKRRLDEILKRIRDTSEEVKERSKETLKRLEDRVREVAREGGDDEKLKRVLKELEDVIRESEEILERVTRKAERVIERVRKILEEATKEVERVIREVRR

SEQ ID NO: 8787 - protein, 178 aa, Artificial Sequence; identical to SEQ ID NO: 8786
  Synthetic

SEQ ID NO: 8788 - protein, 172 aa, Artificial Sequence
  Synthetic
EEDERIEKVTEEVKKVIEDVTRLTETVMRESEKVIEDVTRDSDRVRKEVKKVLEKVRKSEELDDVARKLEKLFRDLARTNKKVKDDSKRTIERLREKNEKVKRDVDRLRKKVKSEDVDEVVKRLKELVTRLAEENKRAVDTNRKLAEDLKELNRKAVEELKELLRRVDERDR

SEQ ID NO: 8789 - protein, 172 aa, Artificial Sequence; identical to SEQ ID NO: 8788
  Synthetic

SEQ ID NO: 8790 - protein, 172 aa, Artificial Sequence
  Synthetic
SEDEEIDRVDKDVKRVSDTSNKILDDVEKEVDKVIREVTAESKKVLDEAKKVLDKVREDERLKEVATRVKELFDRLREENKRVRRRLREIVKRVRELNRRSEEEIRRIKEEAKDRDVEEVVRRLEKLVDDDRKLVEKVVKELRELLKELRDKNKEVVDELRRLAKTVDEEDR

SEQ ID NO: 8791 - protein, 172 aa, Artificial Sequence; identical to SEQ ID NO: 8790
  Synthetic

SEQ ID NO: 8792 - protein, 177 aa, Artificial Sequence
  Synthetic
SAEEIAERVLRELRKVTKEVAEEDERVLREDEKVTDEVRKEDKRVLDEARKVIDDVRKKGIPEEVLRRAEEVLERLRRKSEEILKESKKSTETSRRESEKVLRDSEDSIRELEERAKKTKVDEEVVKRVRENVKRTRELSKRSVEKNEENVRRTREMSKRTVKEIRDVVKELRDRVK

SEQ ID NO: 8793 - protein, 177 aa, Artificial Sequence; identical to SEQ ID NO: 8792
  Synthetic

SEQ ID NO: 8794 - protein, 177 aa, Artificial Sequence
  Synthetic
SKREKAEEVLKEAKKVIDDVREKDRRALEEDKRVTDEVARIAEKVLKDLRDVIEEVRERGIDKRVLDTIKELLERLEKELRDVLKRSKESTEESKRKSEEILRRAEEVLKRLEEELERTRADEEVVRRVRKVVTELEELSRRSVEENRRNAEETERLIREIVERARRVVETLKETVR

SEQ ID NO: 8795 - protein, 177 aa, Artificial Sequence; identical to SEQ ID NO: 8794
  Synthetic

SEQ ID NO: 8796 - protein, 181 aa, Artificial Sequence
  Synthetic
SVEDILRKVAKEAEDVAREVTRILEEANRRVEEVVKRVKEENERANEKVERVVREVKARGLNREELEKILRKIHEENKKMKKRHEDILKRIHEENKRVLEELKRILEEVKELLKEVAKRVRDEEVVRRVVETVKDIVKRLRDIVREVLKKNERIVEELKKTSDESKKRNDDIVRELDERAR

SEQ ID NO: 8797 - protein, 181 aa, Artificial Sequence; identical to SEQ ID NO: 8796
  Synthetic

SEQ ID NO: 8798 - protein, 181 aa, Artificial Sequence
  Synthetic
SVEEILEEVLRRAEKIVKEVKDLDRRALEENKKAIKEVADELRKVDEEVKKVVDEVRREGFNDETLDDILRRIHESNKRVKEKSDESLKRSAEKSEDSRRRLEKITKEVRDTLREVRKRVRDEDVVRKVVRDVEDIVRRMREEVRRSVEDLKRNADENRDEVRKVVKENKDIVREMRERVR

SEQ ID NO: 8799 - protein, 181 aa, Artificial Sequence; identical to SEQ ID NO: 8798
  Synthetic

SEQ ID NO: 8800 - protein, 174 aa, Artificial Sequence
  Synthetic
REKEKLEKAVRDARRVIERVERKDREALKEVERVVRESHKTLEDVLREIRKVATEVRREGLDREKLKKLLDDVEDVIRKAHELSERILREVEDVSRRSKEALKRIEEEIEDLVRKLDDVDKLMKTIEDLLRRVEELVDRSVKELKRLLDENRKLVKRVLEEIRRILKELRDEVK

SEQ ID NO: 8801 - protein, 174 aa, Artificial Sequence; identical to SEQ ID NO: 8800
  Synthetic

SEQ ID NO: 8802 - protein, 174 aa, Artificial Sequence
  Synthetic
DEEEKLRKVKKEADDVIRRSHEEDERVLREVEKVVRESHEELKRVADEIRRVVEEVKTRGMDREELERLREEVRRLLEEVHEKSKEIEEEIKRRSEESHRRSKELKERVADLERKLSDVDKVMETIRRLVTKNRELVKRSVDELRDLVDKNRKLVERVVERIEEIAKKARDDVK

SEQ ID NO: 8803 - protein, 174 aa, Artificial Sequence; identical to SEQ ID NO: 8802
  Synthetic

SEQ ID NO: 8804 - protein, 182 aa, Artificial Sequence
  Synthetic
KVVEEIEKEVRRSVEELERLVTEDLRKVKEVVKRAEEVAEEDERKVDEVVKELKRAAKEGRDKRELEEEVRRVHEDSKRTLEELRRDIKRVNEDSRRSLEEIDKLSRDVKKRLDEMVRDLVRTEEMERRVREVLKRNEDVTDEVKKKIEESNRDLEDALRKVEKKIRESNERLRRVLEEVRK

SEQ ID NO: 8805 - protein, 182 aa, Artificial Sequence; identical to SEQ ID NO: 8804
  Synthetic

SEQ ID NO: 8806 - protein, 175 aa, Artificial Sequence
  Synthetic
KEVEDVLDDVRRVVEKLEREVKKVEDTNERVVETLDEIVKEIRDRNRKVVETLKEIMKSNKESKDELKRILDEVHEDNRRILEELKDLLRKVHTENRDIKRRLDKELDEVRRRIEKVGTSDKLRKAEKDLRDVAKEVRDKIRRADERLKRVIERVADEIRKVNTDLKRVADEVRK

SEQ ID NO: 8807 - protein, 175 aa, Artificial Sequence; identical to SEQ ID NO: 8806
  Synthetic

SEQ ID NO: 8808 - protein, 174 aa, Artificial Sequence
  Synthetic
SEVEDVEREIEEVVEELRKIAEDDLRRNDTVVKEVRELVKRDREKNRKSAEELKKLKEEGRDKTKLEEIFRRDEEENERSRRELKKLLDDVERENRKTLRDLERILRRVKKRLDEFRDSEELKRVMEKITRVVEKVKEDVDRSKKKAEEVIREVEERLKRSLDESRKVLEEVKK

SEQ ID NO: 8809 - protein, 174 aa, Artificial Sequence; identical to SEQ ID NO: 8808
  Synthetic

SEQ ID NO: 8810 - protein, 174 aa, Artificial Sequence
  Synthetic
REVEEVKKRVDEVVKRLRKLAEDDDRKNKESADRLRAIVDRDKKENTRSMETLRRLRERGEDRDELRKIVKDDREKNERSEKELKDILREDHKENKKSEDTLEELLRRAAEELKAVDRSERLEDAKKKLEDVIDEVRRRLEESNKRSRDVMEEVRKEVRRSLRESEEVVKDVEK

SEQ ID NO: 8811 - protein, 174 aa, Artificial Sequence; identical to SEQ ID NO: 8810
  Synthetic

SEQ ID NO: 8812 - protein, 174 aa, Artificial Sequence
  Synthetic
DEVREIKRLVDELVKRLKELAERSRRLVDEVAKRSKELAKENLDLNEDIVRRLDEVAKRGEDRKVLEELRDRIRKINEESKRRDDRLLEEIRRISEETKRRLKKLRDEIRELIERIRDTKELKDVAREIERVLKEVEEEDDDALRKIEEVSKRSKEIIDESMEKVKKVMEDVTR

SEQ ID NO: 8813 - protein, 174 aa, Artificial Sequence; identical to SEQ ID NO: 8812
  Synthetic

SEQ ID NO: 8814 - protein, 174 aa, Artificial Sequence
  Synthetic
SEVETVKKLIEDIVRESRRLVRENEELNKDVIRRSEELVRRSKEAVKRLVDKLDELRKRGSPEDDLERLLREIERISEETKRRDKKLLDEIEEINERSKREDDKLLTTVREIVKAVRRARELERAVEEIERVSRDSKREIKRSTEEVRKASERSRKEDEELERRARRVVEEVKR

SEQ ID NO: 8815 - protein, 174 aa, Artificial Sequence; identical to SEQ ID NO: 8814
  Synthetic

SEQ ID NO: 8816 - protein, 175 aa, Artificial Sequence
  Synthetic
SELEKVVEEVEEIVRRSERHVTEVVKTSKKSVEDSNRHVAKVVEDVKKKVTELIEAARENRVDKRELTREAERVEEELRKVLRTNEKLAEEDKRRLEKVARDNERLIDEVRRELDKVRKDKVLERVKRELKKAADRSRDIIRRVARETEEALRTSREIAKRVEDELRRVLEEVRK

SEQ ID NO: 8817 - protein, 175 aa, Artificial Sequence; identical to SEQ ID NO: 8816
  Synthetic

SEQ ID NO: 8818 - protein, 175 aa, Artificial Sequence
  Synthetic
KELEDVVKRVREEVRRSLEHVAKAVKESEDSVRELKEEVDRVVKESEDIVRELEKLKRENRVDEKELEKIAKENVDRNDTVREELERRVEEDERRLEKILRENEEEVERVERELRKVRDDKRLKEVDKELKRALEESRKIIKKVKEETKDVLRRVRDILRRSVRTSEKVLKEVKD

SEQ ID NO: 8819 - protein, 175 aa, Artificial Sequence; identical to SEQ ID NO: 8818
  Synthetic

SEQ ID NO: 8820 - protein, 178 aa, Artificial Sequence
  Synthetic
SKVERVVEESRENAKRDLDRVDKVVKDSRRSVEEDLKEVRDVVKEVDDMLREAEELMRRGEDEREIERILEEIERRLREVEKKSEKSFREDEERLKRVREESERNLREDRKRLEEVRKDNVDEKVIREVAKESEDAFRESERRLREVLKRSAEALKRSRDILKTVRERVKRVIDEVRR

SEQ ID NO: 8821 - protein, 178 aa, Artificial Sequence; identical to SEQ ID NO: 8820
  Synthetic

SEQ ID NO: 8822 - protein, 178 aa, Artificial Sequence
  Synthetic
REVEEVVKRSEKSVKEMEDKSRETVKKSRKSAKEDIDKVEEVVRRVEKVLREAKKLADDGEDRRTIEKILRDIEEELRRVEEESRRSLKKDREDNKKSLKELEELFDRDRRELEEVAKRNVDKDVIEEVRKKSDEVLKRVRKINKEVTEESERAFDESRRILETVAREVKRVIDEVRR

SEQ ID NO: 8823 - protein, 178 aa, Artificial Sequence; identical to SEQ ID NO: 8822
  Synthetic

SEQ ID NO: 8824 - protein, 179 aa, Artificial Sequence
  Synthetic
DAVEREVRKAEKIVEDDLRRVAKVVDESRKSVEKNEEDVRRVVEELRKILEEIDRLKRNGGDDESLERIARELEDLIRRVKERSDENVEENERLLRRVEEESKDSLKKLREALKRIRDNNVVDERVLRRVKKKLEDAVEDSRRILTELAEEVKTVVERSKRILDTVRDELKKALERVKK

SEQ ID NO: 8825 - protein, 179 aa, Artificial Sequence; identical to SEQ ID NO: 8824
  Synthetic

SEQ ID NO: 8826 - protein, 182 aa, Artificial Sequence
  Synthetic
DEVDEVVEKLRRLLEDTIRLVREAVDYLRRNLEDLRRKIREIVERLKRLLEELRKLVKDTRDEETLKKIIEDVRRTVEELLKELEEILRRSEENVKRVLKRLEEILKKSSDDLRKELKRVREAGLDEKRVRDAADEVRRMNEEVKKIIDDARKELERVHRDVKREIDRVARELDEEIRRVEK

SEQ ID NO: 8827 - protein, 182 aa, Artificial Sequence; identical to SEQ ID NO: 8826
  Synthetic

SEQ ID NO: 8828 - protein, 182 aa, Artificial Sequence
  Synthetic
DEVREMVKTLTDLLRRNRELVKRVVEELRKLLEETRKLVEDMVKELEDLLRELEKLARDTEDKDTLRELIERAKRKVEELRKRLEEILRRSHEELRRLEERVRKIDEESKKRLRELEEEAKRAGLDEKVVEEVARKVARANEDSNRILDEARKEVEKVNEEVRRIIKEVTDRLEKKVREVEK

SEQ ID NO: 8829 - protein, 182 aa, Artificial Sequence; identical to SEQ ID NO: 8828
  Synthetic

SEQ ID NO: 8830 - protein, 178 aa, Artificial Sequence
  Synthetic
SKAERLDEEVDKIVRDLRRLVDELEKRIEKIVRDNRELVKRVRESNKRIVETLRRLKENRGDKRVLDKIARDIHEENKRALERSEKSAEDVERELKKVKDELKEIVDRVKKTLDEARRAGVDKREVDKIEKKLRDVVREVEEIVTRVDKRLKDVLKESREILKEVNDETKKVLDEVKT

SEQ ID NO: 8831 - protein, 178 aa, Artificial Sequence; identical to SEQ ID NO: 8830
  Synthetic

SEQ ID NO: 8832 - protein, 178 aa, Artificial Sequence
  Synthetic
SEAEKVVRDVREIVERLRDIVRKVVEENEEIVKRLRKLVTDLVEENKRTVEALRDLKRRRGREEELEKIAEDDKRRNEEVRKDLERIAKEVHDRNREVLKTIKRILDEVKERLDDVRRRGVDEEILRRVEEEARRAAKEVEERIRTVNRRTEKVLEEVRKIVKDATDTSEKALREVRE

SEQ ID NO: 8833 - protein, 178 aa, Artificial Sequence; identical to SEQ ID NO: 8832
  Synthetic

SEQ ID NO: 8834 - protein, 176 aa, Artificial Sequence
  Synthetic
SRVEEVLRKVEEIVKRNEDLARKVVDESRKTVDKLRTLVEKVLRESRETVKRLIDLVRRNEVDKRRIEELAERDKERLKRVLEEIEREAREDERRLTDVVRRSEESIRRLKEDLDRANAREDLLTRVTDVLRKLRDRSREIIKRVVDETRRVLEEVKELIKRVLEETERVLREVRR

SEQ ID NO: 8835 - protein, 176 aa, Artificial Sequence; identical to SEQ ID NO: 8834
  Synthetic

SEQ ID NO: 8836 - protein, 178 aa, Artificial Sequence
  Synthetic
SEVDEVVDRSRKTVKKMIDDVREVLERSRKNVKEDIERVRKVVRESEETVKTARRLKEEGADDREIKRLIDEDRERLRKVLKESEDNLRENKRENDDMRRRIEKLKRDDERRLDRVEEEGVDEEVLRRVREVTERATREVEELLKRSDEESERALKTSTDVLREVLERSDKVEEEVKT

SEQ ID NO: 8837 - protein, 178 aa, Artificial Sequence; identical to SEQ ID NO: 8836
  Synthetic

SEQ ID NO: 8838 - protein, 182 aa, Artificial Sequence
  Synthetic
KEVEEAVRRVEESVRRLEEEVDRVVKENRKLVKDLIELAEEVVRRVKELVDRLRETVRRAKDKDTLDKLIREVADRARRLVERIDEILKEIKKRSEESLERIRDSLRKHHEELKRLIKEAEDRGLDKDVVTEVKKRAEDVDRRVERVIEEAEEVSREALKRVRDIIDTVRKVAETVLKEVKD

SEQ ID NO: 8839 - protein, 182 aa, Artificial Sequence; identical to SEQ ID NO: 8838
  Synthetic

SEQ ID NO: 8840 - protein, 177 aa, Artificial Sequence
  Synthetic
KEKEVMDEVERVLEKVKEDNRRVVREVEDVLRRVEKENKEIVDEVKDVARKVLEEVRRRGIPEEVLKELEDILRELDKKVRESNKRTRDIIERLRRDVERSNKELKDIVRELRKELRDTRVDERVLEKVKDVVRRSRDIVRRILEDAKDVVRKSREIAKKILEEVTEVVKRAREKVK

SEQ ID NO: 8841 - protein, 177 aa, Artificial Sequence; identical to SEQ ID NO: 8840
  Synthetic

SEQ ID NO: 8842 - protein, 175 aa, Artificial Sequence
  Synthetic
SKLEELLKRSEKSVREAKRLVEELKRRSEETVRRNKELAERLEDESRKTVELLKRIVDSNKEVRETIEDIVRRDREKLEEMRRRSEKSLDEDRRRLEEMRKRIEELLRRDEEDLRRVEPDKLLEEVEKESRKVVEDVRRVIEDVKRRSDEALKESEDIIRDVRRKSEKALRDVEK

SEQ ID NO: 8843 - protein, 175 aa, Artificial Sequence; identical to SEQ ID NO: 8842
  Synthetic

SEQ ID NO: 8844 - protein, 175 aa, Artificial Sequence
  Synthetic
SELEDLLRRSKESVDRLRELIRRLEDESRKTVETLRDIVKKLKEENKKTVDDLRDIVRRRKDDEETIEKIFKEDKERNEEATRRIETILTRDREKLEKVLREAEKLIRDDKRRLKEIEKDELLERVREVSDKVLEELKKIIDEIRKRSEKVAEEVKDVIRKVNELSKKVLKDVKK

SEQ ID NO: 8845 - protein, 175 aa, Artificial Sequence; identical to SEQ ID NO: 8844
  Synthetic

SEQ ID NO: 8846 - protein, 175 aa, Artificial Sequence
  Synthetic
RKLEELLKRSERSVEELRRKVTRLLEENDDTVRRLRELVTKLTDDSRKTVTRLRDIVRKDKDVTEEIKRIVEEDRRRLEKVKRDIDKLLREDRKRNRDVEEELRELLERDRDELRKVEPDKLLEEVTKVSEKVAEEVRRVIKTVNDKSTEVLREVKRVIETVRRESEDVLEKVEK

SEQ ID NO: 8847 - protein, 175 aa, Artificial Sequence; identical to SEQ ID NO: 8846
  Synthetic

SEQ ID NO: 8848 - protein, 175 aa, Artificial Sequence
  Synthetic
SKLEDLLRRVTEIVKRLEEIVRKLEERSRRTVKRLEELVDTLRKENEDTVRRLEKIVRDRKDDTDKIRDIAEKDRRRNKEVKDRVKKLLDDDRELLERVRREIEEIVERVREELDRVEPDELLKEVRDVLETVVKRVREIIEKVRKESEDALRKVDKDIREVNRRSEKALEDVKT

SEQ ID NO: 8849 - protein, 175 aa, Artificial Sequence; identical to SEQ ID NO: 8848
  Synthetic

SEQ ID NO: 8850 - protein, 175 aa, Artificial Sequence
  Synthetic
SEAEKIEREVDKVVEDHRRLVRADLERVERVVEEHRRLVKEDLDRVDEVVKRLRKLKEDGTPKEEIRRLIEEVERRSRESLKEIKRTTDEVRKESKKSADRLRETTERAKKRLDEANVREDVLRRVRELLKTVHEEVKKVIKTSDDILRTVHDEVRKVIKTSEKILREVAEEVER

SEQ ID NO: 8851 - protein, 175 aa, Artificial Sequence; identical to SEQ ID NO: 8850
  Synthetic

SEQ ID NO: 8852 - protein, 175 aa, Artificial Sequence
  Synthetic
KELEDATREVETVADEHRRVLEEDKRDVKEVVERHRRLLEDLRRKLEKVVRDLRKLLKDGVPKEELKKLVDDLKRTIDRLLREAEKTTREVDKKSERSVRELERTSKEMKERLDRLNLREDVLRRIEKKLKDVTDDLRRVIKESKDRLTKLHKEVEDALRRLRDRLRELEDEIRR

SEQ ID NO: 8853 - protein, 175 aa, Artificial Sequence; identical to SEQ ID NO: 8852
  Synthetic

SEQ ID NO: 8854 - protein, 182 aa, Artificial Sequence
  Synthetic
RELEEAVKEVEKKIRELRERLKEVVERSTKKMDDLRKENEKVMRESSELVTELVKEIKDRASDKDKARRVIEELEKVNRELKKEHDKTVKELEDVNRRIERKAREVERELEEVLRDIERLIREGVDLKDLRKKVDDVARKVDKILEDLERESDTVLDRVKKVLERSRRDSEDVARRVEEKVR

SEQ ID NO: 8855 - protein, 182 aa, Artificial Sequence; identical to SEQ ID NO: 8854
  Synthetic

SEQ ID NO: 8856 - protein, 183 aa, Artificial Sequence
  Synthetic
SELDELRKMVKEVLDRVRDLLKKLEDEARKVAEDNKRLLERNKREIEAALRRVEEIIRRRRTEDVRREVEKILEELIRESERSVRESKKHLDDVKRRVEEIVRRIKKELDDLLREAKRIVDEKEDKRVREVLREVEKRIKELEDLVRKVLDKIRELIERLKRETDKVLEESKKLIKELSERLE

SEQ ID NO: 8857 - protein, 183 aa, Artificial Sequence; identical to SEQ ID NO: 8856
  Synthetic

SEQ ID NO: 8858 - protein, 183 aa, Artificial Sequence
  Synthetic
DELEDVRKEIEDVRKENEDTVRESKDEIRRLEDTNRKTLKESRDDIEKARERVKKERRDSDKRVLERVAEELRRIVKRIREKDKEVIERSRKILDENRRRNEEVIKKTEKRLEEIRDRLSRVENEKDVRKVLKEVEEEARELVKLNRDVLEELRRRVRKLVEDNKDVTREVEDILKKLEEELK

SEQ ID NO: 8859 - protein, 183 aa, Artificial Sequence; identical to SEQ ID NO: 8858
  Synthetic

SEQ ID NO: 8860 - protein, 176 aa, Artificial Sequence
  Synthetic
SMDETIRKLAEDNRRRSDETVERIERLAKKLDEDNRRVVEKSERLAKEVADKVRRVKNTTDERELKEVMEELERILKRIAEDHEKVIRDSEDILRRIEKLVERSIRESRKSLKRIRELKVDERVIKEVEDISRDLERKNKEVVERARRIVEKVKETNKRVLEEVEKIVRKLKEELK

SEQ ID NO: 8861 - protein, 176 aa, Artificial Sequence; identical to SEQ ID NO: 8860
  Synthetic

SEQ ID NO: 8862 - protein, 184 aa, Artificial Sequence
  Synthetic
SVEEVVEEVRRVAEKVEEDVTRVIKEDEDIARELEKRIDDVIKESKTVADELLERLRRAGADRRLLEEVRRLMEEVTRRHEELRREVEERVKDSKRRHDESRKELEDLLREVEERARDVRRRGGIEEELERLLREVEELIERVKERHKRLVEDSKRLLDEVDKRLKDSNREVRERIEEIKRRVD

SEQ ID NO: 8863 - protein, 184 aa, Artificial Sequence; identical to SEQ ID NO: 8862
  Synthetic

SEQ ID NO: 8864 - protein, 175 aa, Artificial Sequence
  Synthetic
DELEKIREEVREIVERSKREAKELLDRNKEIVKDLERKAREILRENRDRVRRLAEKTNEDEKTVRELLERNKKVARDVEDKVRKLIEDNERVARESEKRIRESEKKNRDVLRELEKRVDSEVLDELRRIIETSEKLNRDVLRESKEVNRDLTRKLEEVLRRSKEDNKRLSEKIKE

SEQ ID NO: 8865 - protein, 175 aa, Artificial Sequence; identical to SEQ ID NO: 8864
  Synthetic

SEQ ID NO: 8866 - protein, 175 aa, Artificial Sequence
  Synthetic
DELEAIKDEVRRIVRESEERAKKILRDVERMLDEIRKKLKEILDRNREVVDELKRQINEDKETVERLLRDNKRVLDRVEDSARRLEEELKRVLDEVEERVKRSLDRNDEVLKELEKRVDSEVLKELRRIIEESKRRNKRVLDEIRKRAEDLRRVIKEVLDRSREINKRLSDEIRK

SEQ ID NO: 8867 - protein, 175 aa, Artificial Sequence; identical to SEQ ID NO: 8866
  Synthetic

SEQ ID NO: 8868 - protein, 175 aa, Artificial Sequence
  Synthetic
DELEKIVREVREIVKESKEEARRILEENKKIVEELRRRLRKILEENEDMVRKLEKKTNEDKDTVRRLLEENKRVAKEVEDKVRKLIKENEDVMREVEKKVEKSLRDNKRVLDDVRRRVDSRVLEELERIIRESEEANKKVLEDSRRVNKKLSEELKRVLDESRRRNEELSKRIKD

SEQ ID NO: 8869 - protein, 175 aa, Artificial Sequence; identical to SEQ ID NO: 8868
  Synthetic

SEQ ID NO: 8870 - protein, 185 aa, Artificial Sequence
  Synthetic
DELRDLEREIRRIVEESERHLKEVLERNHEASKRNRDDLKRMVDDIRRKVEEVRKLREEGTDKEKLKEELERALRKVEKIARDSERHLDKVLKESREAIERNERENRRLLEEVKRTIEELRRRTDAETVDRVLEKLKRIVEDSERRVKEVLKELEENSKRIKDETKDVLRKVEEIVERLRKEIER

SEQ ID NO: 8871 - protein, 185 aa, Artificial Sequence; identical to SEQ ID NO: 8870
  Synthetic

SEQ ID NO: 8872 - protein, 185 aa, Artificial Sequence
  Synthetic
DELEELKEEVKRAVDENRETNKRALDRNHEISKDSEDHLRESSERIRRRIEELARLVEAGEDKRRLEEDVKRLLEESKKLIKENKDRNREVVRRSEKIAEDSKRHLDAVLEKVERTIRKLREETDRETVKKVLKELREEIERVKRESEKVVKAVRDNSKRSEEKVEEVLERNKRIVDDVLRKIKK

SEQ ID NO: 8873 - protein, 185 aa, Artificial Sequence; identical to SEQ ID NO: 8872
  Synthetic

SEQ ID NO: 8874 - protein, 185 aa, Artificial Sequence
  Synthetic
DELKEAEDRVREVVRENEERLRKALEENHKISRDSEKHLRDLERTIKEIVKRVRDLRRRGTDKEELKKELERVLDKVRKDITDNLRTNEEVLKRSERIAEESERHLDKVLKDLEDIARKLKDKTDKDTVEKVLRDLRRIIKEVKERSREVLKRVRENSDRSLKKVEEVLKRLEDIIRTVKEEIKK

SEQ ID NO: 8875 - protein, 185 aa, Artificial Sequence; identical to SEQ ID NO: 8874
  Synthetic

SEQ ID NO: 8876 - protein, 179 aa, Artificial Sequence
  Synthetic
EDAERALKKIEEIVRRLTEELKRVLDANRESVDRLRRELEEVLKRNRELVRKLEKILEERKDDQDTARKVIEDSERHIKELEERVERVIRENKKTVDDALKRVKDVVERLKEEVKRLEDRGVDREVVERLKKIIADLDRVVEEVIRTSRKVIKELEDTVRRVIEELKRVSDELKKKVED

SEQ ID NO: 8877 - protein, 179 aa, Artificial Sequence; identical to SEQ ID NO: 8876
  Synthetic

SEQ ID NO: 8878 - protein, 178 aa, Artificial Sequence
  Synthetic
DKLEELLKRVEELVERLKEESERVLRRNHELSEKLRRILEEILKRNHDLSRDLEDRLRKLKDKKEVDDLVREVLKRSKETVETLRRIVEEIKKRSEDSSEENRRRVKEALDELDRLVKRIEGDEVVKRVEDIIEKVREDLERSDEKLNDNVRRLEREVREVLKAVEDNARRLAEKTKT

SEQ ID NO: 8879 - protein, 178 aa, Artificial Sequence; identical to SEQ ID NO: 8878
  Synthetic

SEQ ID NO: 8880 - protein, 178 aa, Artificial Sequence
  Synthetic
SEAEKLLEEVKDLVRRLKKDLERVLRDNHRLSEELRRRLREILEENKKLIDTLREIREKLSDRDKLEKIVEEIVRRSEETVRRIKRVVEEVEKRSKESVEDLRRRVKTVLDRLKELVDRADGKEVAEKMRKIVEELRKEVEEVLKALKENLDRLRREVEKVVERIEDTLRELKKRATD

SEQ ID NO: 8881 - protein, 178 aa, Artificial Sequence; identical to SEQ ID NO: 8880
  Synthetic

SEQ ID NO: 8882 - protein, 182 aa, Artificial Sequence
  Synthetic
SEAEKVLEEVKRLVEDIERKLREMLRRDNEISRKVRDDLRKILEENNELSRRVEEEIRRIKDKDTLKKVVDEVRRELERTLERVRKLVEEVKRTSRKTLEDIKRIVETIKREMDRLLKEIEDRGLREEVVEALEKVVRDVARRLEDVIRRVAENAKRLEDDLRKVEEELKENADRLEERAKK

SEQ ID NO: 8883 - protein, 182 aa, Artificial Sequence; identical to SEQ ID NO: 8882
  Synthetic

SEQ ID NO: 8884 - protein, 175 aa, Artificial Sequence
  Synthetic
SEVEKLLEKLRELVERVEREARRILEENKELIKESLKRIRDLLEDNKRLIREVKEILRRGDKDERLLKDVRRRVKESKEELKKLLETNHRLARETVKKLEDVVRKLEELIRDIERKIDDKDVVKRIRDIAEKVRRDLKRVIDAVRDTSRESDRRLRDVIREVDESSRELVREIER

SEQ ID NO: 8885 - protein, 175 aa, Artificial Sequence; identical to SEQ ID NO: 8884
  Synthetic

SEQ ID NO: 8886 - protein, 175 aa, Artificial Sequence
  Synthetic
SDMERLLRELEELVKELRERLRRLLEENKDLIRRSLDRARKLVRRIEELVRKVKEDLDRGDNDERLLRKLEEDARRVLDELRRLLEENHELMKETIRKLEELLKEVTERAKDIRRKVEDEDVLRKIEETARRLVKEIEDVIREVERTSRESDKKLEDVIDKLRKIVRKVLEELRT

SEQ ID NO: 8887 - protein, 175 aa, Artificial Sequence; identical to SEQ ID NO: 8886
  Synthetic

SEQ ID NO: 8888 - protein, 175 aa, Artificial Sequence
  Synthetic
SEVEDLVRELERLVREAKKALDDLRRKLEELVRDSLRKAEELLKENHDLSREVKKLLEDGANDERLLREATERVKRSLERLKRLLEENHKLVRTVIKEIRELLDRVRKKARDIEEKIKDKKVADELRRIAKRLVEELERVIRELEKIAKESDERLKEVIDRLRENVERLVRELRR

SEQ ID NO: 8889 - protein, 175 aa, Artificial Sequence; identical to SEQ ID NO: 8888
  Synthetic

SEQ ID NO: 8890 - protein, 188 aa, Artificial Sequence
  Synthetic
KELEDLDRDVRRVVEELREELRRLEEEDKRSVEENEERLERLERRLRKKVKELEEKRKRIREKEKKEELKEEIKKVLREAEKIIEDSKRHIDENLKKSEEEIKRLKRKVEELEKKVEDIARELAEKRDREEVRRVLEELREKIKRVLEEIEEVLRRSREINKRLRDRTRTVAKRLKEIVDDVLRKVET

SEQ ID NO: 8891 - protein, 188 aa, Artificial Sequence; identical to SEQ ID NO: 8890
  Synthetic

SEQ ID NO: 8892 - protein, 188 aa, Artificial Sequence
  Synthetic
RELEELLKEVEKAVRENTKLLKDLLDKDKKSVKENEETLRDLERKLREVVERLKRELKDIRDDRMKKKLADKIETVRRDIKRIIDESEDHIRKNLEESKKIADDSRKHLDRVLEKAEDLIRKLKDKRDEKRVRDVLKRLREIIDTVKKVTKEVMERSEEINRRLLKRTKDVLRELEKIVKTVLDEVRK

SEQ ID NO: 8893 - protein, 188 aa, Artificial Sequence; identical to SEQ ID NO: 8892
  Synthetic

SEQ ID NO: 8894 - protein, 177 aa, Artificial Sequence
  Synthetic
SEVDKVREDVKRLIEDAERVSDDVDRRVKRLAEALKETSDKVKEDVERLVRDIKREIDKEEVKRRVDDALREIKEILERSKRHIDEVLKRVKDRLRESKRHLEEVLRRVKEILDRTTDEETLRRVLRKVEDVIRRNKEDNEKVLKDAKRVVEEDKRENEKALERIERIVRKLKEDTR

SEQ ID NO: 8895 - protein, 177 aa, Artificial Sequence; identical to SEQ ID NO: 8894
  Synthetic

SEQ ID NO: 8896 - protein, 177 aa, Artificial Sequence
  Synthetic
SEAEEVVRRVEKLAEDIKRVIDKSLEDVERLVRDAKRRSREVLREVEKLVEDITRRIRDEEVKRRVEKVLREIRRIIRESEKHLDKVLDDIEKILRKSKKHIDDVLREVKEIIDRVRDEEILRRALEKVERVITENKKENEDALRDAKRKIDKDKEDNKKVLDDVRRIIEELKEETR

SEQ ID NO: 8897 - protein, 177 aa, Artificial Sequence; identical to SEQ ID NO: 8896
  Synthetic

SEQ ID NO: 8898 - protein, 183 aa, Artificial Sequence
  Synthetic
DEVDRVAEEVKKLIDDVKRVSDEMLKRSEDLIREVKKTSDDVLETVERLIRDVERKVEERVDKEKARRLRKKLRELLEEVRKAIERSRKNLEDLLRKSKRSVERSREDLERIRREVEEVRKMKDDEVLKRLLDKIREDAKRNKDDNKRNLDESKKEVDRNKDENRRVLEKVKETVKRLKDEVK

SEQ ID NO: 8899 - protein, 183 aa, Artificial Sequence; identical to SEQ ID NO: 8898
  Synthetic

SEQ ID NO: 8900 - protein, 183 aa, Artificial Sequence
  Synthetic
KEVEEMLKEVKKLIEKVKRRSDDVLRRSEELARDLKKMSDDVLREVKKLIDDVKRTVDERVDKEKARRLREDLKRVLDEVREVVRESREDIERILRESKRSVEESRKNLEKLKTDVERASSVKDREFLKEVLDRVRERVEENERRNDENLKKSKKRIDENKEKNERVLRKIREIARRLKEELR

SEQ ID NO: 8901 - protein, 183 aa, Artificial Sequence; identical to SEQ ID NO: 8900
  Synthetic

SEQ ID NO: 8902 - protein, 183 aa, Artificial Sequence
  Synthetic
SEVDRVLKTVEELIRRVKRISDRVLTEVKKLVDDVRRVVEKSRRDVEELVKEVKRSVDERVDSTDAERLRRKLEKLVREVEEVAKRSEDDLERILRRVEEVIKRSRDNLEKLLRKVEEVSKIKDKEMLERALKEIKEEVKRNEDDNRRMLREIEELAKRNKEENKRVLDEVRDIVRRLAEEVK

SEQ ID NO: 8903 - protein, 183 aa, Artificial Sequence; identical to SEQ ID NO: 8902
  Synthetic

SEQ ID NO: 8904 - protein, 183 aa, Artificial Sequence
  Synthetic
EEVERVREEVDKLLKTLKEVSDRVLKASKDLLDRVKEIVEKSLRDVKRLIDDVKRKVDERVDKEEARRLREELEKVLREVEKVVEESKKDLERILEKSKRSVERSRKNIEELREEIERASRVERKEVLERLLKKAEEIIRKNKKENDDNLEESRKEIEKNEEDNRELVKRIEDEVRRLKKEVE

SEQ ID NO: 8905 - protein, 183 aa, Artificial Sequence; identical to SEQ ID NO: 8904
  Synthetic

SEQ ID NO: 8906 - protein, 183 aa, Artificial Sequence
  Synthetic
SEVEEVLRRVRELIERVKRIVDESEKEVRRLIEEVKKIVEESLKRVEELLRDVKRRVDERVDSTDAERLRRKLEKLLREVEEVVERSKRDLERLVRKVEEVVKRSRKNLEDVRREVERMSRVEDRKMLREVLEKIKKIVKDNEDDNRRALTEVRERVRENVEENKKVVDRVRKIAEDLRKEVE

SEQ ID NO: 8907 - protein, 183 aa, Artificial Sequence; identical to SEQ ID NO: 8906
  Synthetic

SEQ ID NO: 8908 - protein, 183 aa, Artificial Sequence
  Synthetic
SEVERVLEEVKKLIEDVKRVVKESEEEVEKLIRDVEREVERSKRTVDELVKDVKRAVDRDVDKEKAERLRRKLEELKREVEKVAERSKENLKRLLTRVREVVRESREDLERLLKKVEEMSRVKDREVLTKVLREVEEAVRRNKERNKRALEEVKKTVDRNREDNKRMVDKVRETAKRLKDEVR

SEQ ID NO: 8909 - protein, 183 aa, Artificial Sequence; identical to SEQ ID NO: 8908
  Synthetic

SEQ ID NO: 8910 - protein, 176 aa, Artificial Sequence
  Synthetic
SSIEKVREDVKELIRDVERAVKRVKEESKKLVDDLRRAVKRVEEESRKLLKDLERNKRREEVDKILKDNEKSLKELKDEVERILKENEDLLEKLEREVKRILDELKKRLDDADKIEGDDDVRRVLREIERIVKEVKDDLKRVLEESERSIRRVKEELRRVLEDNRRLLKEVKDRAR

SEQ ID NO: 8911 - protein, 176 aa, Artificial Sequence; identical to SEQ ID NO: 8910
  Synthetic

SEQ ID NO: 8912 - protein, 178 aa, Artificial Sequence
  Synthetic
SEVEAVLREVEERVDRVRKESEKTLREVERLVREAKRRSKKSLDDVKKKVEEVKKKIRDIKDEETLRRLIKRIEEELKEIVERNKKTVEEILRRLEEIIARDRRRIDKIVKDLRRIVEEVKDAEEVKREIEKLVEDVRRVSDRVVEEIKELVKDVERMSRKVVEDIKRLAEDVRREAE

SEQ ID NO: 8913 - protein, 178 aa, Artificial Sequence; identical to SEQ ID NO: 8912
  Synthetic

SEQ ID NO: 8914 - protein, 178 aa, Artificial Sequence
  Synthetic
DEVERVLEEVKERVDRVKRESEKSLKEVEKLVRTNERLSERTLKEVRDLVEDAKKKIDDIKDKETLKRLVDEIVKRLEDILRENREIVERVLKKLEEIVEKNERDITEIVERLRRIVEEVKDAEEVRREIEKLVEDVKRVSDKVVEDIRRLAEKLRRDNKRAEDEIRKLVRDVERRAK

SEQ ID NO: 8915 - protein, 178 aa, Artificial Sequence; identical to SEQ ID NO: 8914
  Synthetic

SEQ ID NO: 8916 - protein, 178 aa, Artificial Sequence
  Synthetic
DDLERVLEEVRKLVKELKERSRKSLEDVRRSNERNETESRRTLREVRELVKKVKEVIDRTKDKETLKKRVEEIVRELDKIAKRNKELVERVLEVNKKLVRDNTEEVRRILKELEDIVRSVKDAEKVKEDIRRLVEEVERVSREVVERIKKLADESRKKNKKVIDEIKELVKRVRDRAK

SEQ ID NO: 8917 - protein, 178 aa, Artificial Sequence; identical to SEQ ID NO: 8916
  Synthetic

SEQ ID NO: 8918 - protein, 178 aa, Artificial Sequence
  Synthetic
REMEEVLKEVEKRVRDIEDESRKTLERVDKLVKKNKRDSERTLKEVEDLVREVKKEIRRIKDKKTLKERIDKILEDLKRIADRNRRLMKKVLDELRKIIEEDRERIKEILKRLEDIVREVKDAEEVKREIKKLADRVREVSERVVREIEKLVRDIKRRNEEVIDEIRKLVEDVKREAK

SEQ ID NO: 8919 - protein, 178 aa, Artificial Sequence; identical to SEQ ID NO: 8918
  Synthetic

SEQ ID NO: 8920 - protein, 178 aa, Artificial Sequence
  Synthetic
KEVEDVLEEVKELVKELKRVSEETLRRVEKSNRENEEKSKTTLKEVEDRVERVKEEIKKTKDKETLKRLADDIVERLKAIVEKNKRILEEVERTNRELVEEDKRMVEEILRRLKKIVEEVKDAEEVKREIKKLVEEVRRVSEEVVREIKKLVDKSRRVNEKVIEDIKELAKEVEEAAR

SEQ ID NO: 8921 - protein, 178 aa, Artificial Sequence; identical to SEQ ID NO: 8920
  Synthetic

SEQ ID NO: 8922 - protein, 186 aa, Artificial Sequence
  Synthetic
SELEEILERVRKMAEDAERISEETLRRSEELIRRVKDLSRESLERVERLIRKVKKEIEEIKDDDTLRRLLEEVEKEIRKILKEDEEALEDVARKVKKINRDNERLLEELRKIAETLLKDILTKKGEESEEVLRVIKAIEDLLRRVERVSREASKTSEELLKDITRVSEKSKEDIKRLLDDVRRKVK

SEQ ID NO: 8923 - protein, 186 aa, Artificial Sequence; identical to SEQ ID NO: 8922
  Synthetic

SEQ ID NO: 8924 - protein, 186 aa, Artificial Sequence
  Synthetic
SELDEVLKTVEELVRRIKEKLKEILDRSRKLVEEARKLSEDSLREVKRVIDEIKREAERQKDDETLRKILEDVERIIRELLKRDDEVVRRVVEELRKLNDDIRRLVTEIKDRIRKIEEDIKTKKGESSEEVLKLVEDVRRLVEDVDRTVERMSRESKKLAEDIKRVSEKSKRDIERLLADVERTVR

SEQ ID NO: 8925 - protein, 186 aa, Artificial Sequence; identical to SEQ ID NO: 8924
  Synthetic

SEQ ID NO: 8926 - protein, 186 aa, Artificial Sequence
  Synthetic
DELDEVLKEVEELIKRVKRESERTLKENRDMVREIKRRSEESLREVRELIERVKDELRRTKDDDTLRRILERVRRRIKELLDRDKKLLKDARETSRKTIEDNERLLREVRRRIEEILKDIKRKKGESSERVARVVRRVEELLEDVERRSREVLKEMDKTAKEVKKASEKSEEDIKRLLEDVERTVR

SEQ ID NO: 8927 - protein, 186 aa, Artificial Sequence; identical to SEQ ID NO: 8926
  Synthetic

SEQ ID NO: 8928 - protein, 186 aa, Artificial Sequence
  Synthetic
KEAEDILKEVEDIIREAKKLSERTLDENRKVIRKAKEDSRRSLEEVRKIIEDVKEELDRIKDKETLDRILERVRKEIKELLDRDRDLLRKVEEISKKTIDEDREVLKKVTEEIDRLLKDLLRKKGESSERVLRVIREIEKLLEDVKRVSERSVKEMKKTLDDVRRASKRSEEEIERLLRDVERRVT

SEQ ID NO: 8929 - protein, 186 aa, Artificial Sequence; identical to SEQ ID NO: 8928
  Synthetic

SEQ ID NO: 8930 - protein, 186 aa, Artificial Sequence
  Synthetic
RSLEEVLKEVEELIRRAKEESKRTLDDVRKLIEEVKRESERSLRDVREMIERAKDRIRRIKDEETLRRILEEIKRIVEKLLEEDRKLLEDVTEEIKRILEENRKVLKEIKDRIARILERIKEEKGKDSEEVRKVVEDVERLLRDVERMSKEVEKRIRELLDDIRRVSERSRREIERLLEDVERTAR

SEQ ID NO: 8931 - protein, 186 aa, Artificial Sequence; identical to SEQ ID NO: 8930
  Synthetic

SEQ ID NO: 8932 - protein, 186 aa, Artificial Sequence
  Synthetic
DELEEILKRIEDRIREIKERSKKTLDDIRKVAERVEERSRESLKEVREVVEEIKDRIRRIKDDETLKRLAERARERIKELLDRDRKILEEVRKTVEKLLREDKRLLEEIAREVTELLKDILRKKGEESREVLKVIRDIEELLREVAEVSERSRREIEKLLEDVERVSREAIKRIKDLLRDVERTVK

SEQ ID NO: 8933 - protein, 186 aa, Artificial Sequence; identical to SEQ ID NO: 8932
  Synthetic

SEQ ID NO: 8934 - protein, 177 aa, Artificial Sequence
  Synthetic
KEIEELLDEIRRLMERSKENVRRSLKKSKDLIEEAKRRLEKSLEDSRELIRRIEDRIRRIKERDALKRVLDEIKKRVEEDIKRNEEILEEIRKLVEEDIKYNKDNLKRSEDLVRELEERVKSKEVLEEIRRLLEDLRRMNEKSIEDSKRLLEDVARAVKRSIDESRKLLEKIERDVD

SEQ ID NO: 8935 - protein, 177 aa, Artificial Sequence; identical to SEQ ID NO: 8934
  Synthetic

SEQ ID NO: 8936 - protein, 177 aa, Artificial Sequence
  Synthetic
KEMEDLLREAEELIRRSVENVKRSLEESEKLIRESKKNVERSLRRSEELAKEIKDEIRRIKERDEIKRVLDEAEELVRRDIDYNRRNLEETEKRVREDIKYNKDNLDESRDRVRKLEERVKSERVLREIRRLLRELEEINEKSIRDSKRLLEEIERVNRDSIRRSKELLEDVERTVR

SEQ ID NO: 8937 - protein, 177 aa, Artificial Sequence; identical to SEQ ID NO: 8936
  Synthetic

SEQ ID NO: 8938 - protein, 177 aa, Artificial Sequence
  Synthetic
SEVEDLLRRAEELIRRAKERLERSLRRVEKLIDDVRRKLERNNETVKRLVEEIKEKIKRIKERDMLKKVLEEAKKLAKESEEHLRKLLDDIRKKIEKDIEDNKKILEEIRRLVEDIRRKLDKEEMLKEIERLLEDIERVVRETIDTTRRLLEKIEREVREVIKSNRELVADLERTVT

SEQ ID NO: 8939 - protein, 177 aa, Artificial Sequence; identical to SEQ ID NO: 8938
  Synthetic

SEQ ID NO: 8940 - protein, 177 aa, Artificial Sequence
  Synthetic
DEVERLLEEVKRLIDRAREELKKSLDRVRRLVRENEEAVRKNNEDVADLIRKIKEKIEKIKEDEMIKKVLEEIKRRVEESLKHNKDLLREIRERAKKDIDDNKALLDEITELIKRVEDRVKMKKVLDDIRRLLKDIKDIVDKTIRDTKELLRDIEEKNRRATKSNKDLLEEIRETVR

SEQ ID NO: 8941 - protein, 177 aa, Artificial Sequence; identical to SEQ ID NO: 8940
  Synthetic

SEQ ID NO: 8942 - protein, 181 aa, Artificial Sequence
  Synthetic
DEVEKLLRRVEKEVDRIKRELEDNLRRVEKLVKEIHEENEKLMRKARKLVEDIKRIIDRGDKDSRVLDEVRKLIRTVEEEIKESVERAERLIRESEEHLKRVLEEAKETIRRLEEKVRRDVKSEEVKKAEKEIRRLLDELRRVVEEVTKKTKELLRRLKKSSDELRKTIKELLRELEEKVR

SEQ ID NO: 8943 - protein, 181 aa, Artificial Sequence; identical to SEQ ID NO: 8942
  Synthetic

SEQ ID NO: 8944 - protein, 181 aa, Artificial Sequence
  Synthetic
KEVDEILRELEELVKEIKKRLEELTREVKRLVDKIHKDNEDNLRDMARLVEEIKEIIRRGNKSSDVLKDIEKKAEESKKHLDESMKEARDLIRELEEKVKEILKEAERLIRRVKDLIRKTVKSKEVERVERDVERLLDELRRVVKEVLDRIRRLLEELERSSKRVKEETERLVKEVREAAK

SEQ ID NO: 8945 - protein, 181 aa, Artificial Sequence; identical to SEQ ID NO: 8944
  Synthetic

SEQ ID NO: 8946 - protein, 181 aa, Artificial Sequence
  Synthetic
SEVDKILEDLRELVERIHKKNKRIVEEDRELVKEIHRKNEENLKTMERLVEEIEKIIRRGDKSSKVLEDARRLAEESKKHLDRSMEEATKLVRESEERLDETVREAKKLIDEVREVIKRDVKSEEVKRVRKDVDRLLKELEDSSREVKERSRRTLEELERSSREVKERTERLLRKLEKAVE

SEQ ID NO: 8947 - protein, 181 aa, Artificial Sequence; identical to SEQ ID NO: 8946
  Synthetic

SEQ ID NO: 8948 - protein, 181 aa, Artificial Sequence
  Synthetic
DRLEEILKELRELVETIHRRNEEIVRKVAELVKRIHDHNEENTRRVEELVRRIKDIIRRGNKSSEVLKRAEELIKRSEEDLRRSVRDAERLIRELKEEVKKTVEDAKRLAKRVKEMLDRTVDSEDVERAKRDVDRLLKELEESSERVLRTIEKLLKELRESSKRVRDETKRLLDELREAVR

SEQ ID NO: 8949 - protein, 181 aa, Artificial Sequence; identical to SEQ ID NO: 8948
  Synthetic

SEQ ID NO: 8950 - protein, 181 aa, Artificial Sequence
  Synthetic
SELDEILKRLEKLVEDIKRKLEKLVRDLERLVKRIHDHNEENLKTVKKLVDEIKDIIRRGNKSSKVLEDARRLIEESKRDLDRSVEEVKEEAERVRREVERILREAEKLIRDVKKELDETVKSREVDRVREDVRRLLEDLKRVAERVKRDIERLLKELKESSDEVKKRTEELLEELERAVR

SEQ ID NO: 8951 - protein, 181 aa, Artificial Sequence; identical to SEQ ID NO: 8950
  Synthetic

SEQ ID NO: 8952 - protein, 181 aa, Artificial Sequence
  Synthetic
DEVDDILRRLRELVERIKKHLEDNLRELEELVKRIHDHNKRNVEEVKKLVEEIKKIIADGRKSDKVLRDARRLIKESKDDLDRSERKIERLVTESLKDLDDLLREAEKLIEDVKRELDKRVKSEEVRRVKEEVERLLEEVRRVVRKVKEESKRLLEELRRSSDRVKKETERLLEELERAVK

SEQ ID NO: 8953 - protein, 181 aa, Artificial Sequence; identical to SEQ ID NO: 8952
  Synthetic

SEQ ID NO: 8954 - protein, 174 aa, Artificial Sequence
  Synthetic
SEAEALVEEVKRIVEESKRRLEKVVEESRKLVEEVKKRLRDMLKTIEDLVKEVKELLDNGADEETVDRMIKRLKRLLEELRREVEEAIKTNEELLRRLKRESERTIKELEDLLRELKDNEEVKRKVERLLEEDRRVLEEVKESAKRTSKEVRDELREVSKRVEKLLKDVRDAAR

SEQ ID NO: 8955 - protein, 174 aa, Artificial Sequence; identical to SEQ ID NO: 8954
  Synthetic

SEQ ID NO: 8956 - protein, 174 aa, Artificial Sequence
  Synthetic
DEAEDLVRRVRDIVRKSREELKRVVEESDRLVEEVKRRLKKVVEDSKRLVDEVRKLREGGADERVVKRVIDENRRLLKELKETVKRVIETDRKLLEDLRDTSRRTIEELKELLDRLKDNEEVKREVERLLEDDERVLREVAKRSRETLETVRKVLEEVERRSRKTLEEVEKTAR

SEQ ID NO: 8957 - protein, 174 aa, Artificial Sequence; identical to SEQ ID NO: 8956
  Synthetic

SEQ ID NO: 8958 - protein, 174 aa, Artificial Sequence
  Synthetic
SEMDELVDRARRIVEESRRLLEEVVKRSKDLVKDVKKKLEDALRRVEEIVRRLDEELKGGADEERVKKIIRDLKELLKKLREEVAKVIRDNERLLRELDERSRKTLKELEDLLRSLKDNEEVKDEVRKLIEEDKKVLDDVRRKSERTLREVEDVLRRVEEEVEKLLRKVEESAK

SEQ ID NO: 8959 - protein, 174 aa, Artificial Sequence; identical to SEQ ID NO: 8958
  Synthetic

SEQ ID NO: 8960 - protein, 174 aa, Artificial Sequence
  Synthetic
DEAEKLVEDVRRIVEKIRKELEDVVEESRELVERIRRELERVVEESERLVEELRKELEKGGDEEIVKEIERLNKRLLDELKKRVEEAIREDKKLLEDLEERVRRVIERLKELLDRLKDNEEVKEEVKKLLEEVRDVLRKVKKASEETLRDVRRVLEEVKRRSEETLKRVREEAT

SEQ ID NO: 8961 - protein, 174 aa, Artificial Sequence; identical to SEQ ID NO: 8960
  Synthetic

SEQ ID NO: 8962 - protein, 182 aa, Artificial Sequence
  Synthetic
SEVEDIVRDVKRLVEENHRRNEEIVRRDEDLVRRNNELNKRILEEVEELVRRLEDVARKIRDKEELKRRVDEIERRLEDLLRKVEEANRKSLEDSKRLVRTVTELNRESVETLKKLVDDLRKDRSDVEEALRTAEELIKRLEDSLREVKDRSKRSLDEMKKSADDVRREIERLIKRVRDTTK

SEQ ID NO: 8963 - protein, 182 aa, Artificial Sequence; identical to SEQ ID NO: 8962
  Synthetic

SEQ ID NO: 8964 - protein, 177 aa, Artificial Sequence
  Synthetic
SEVEKIVREVEEVVERIRKKSEDSLREVRRLVEEIKRRSEKTVEDDEKLVKDAKDELRRIKDKETLARLVEEILDRSRKSLEKNKRLLDEIRRRLETILKRNEDLLRRAEEELKRLREELDKEDAKRRIEELMKEVRDVSRRALKEIKDLLREVEEVSKKALKRSKDTVDEVREEVR

SEQ ID NO: 8965 - protein, 177 aa, Artificial Sequence; identical to SEQ ID NO: 8964
  Synthetic

SEQ ID NO: 8966 - protein, 177 aa, Artificial Sequence
  Synthetic
DEVEEIVKEVARVVDEIRRLSKESLDRVRKLVEDIERELRKIVKTDRDLVEEAKRVLKDIKDKDTLREVLERIKRLSEESLREADRLVTEIVEDLKRILDENRRLLEEILKRAKDLLDRVEKREVEKEIRRLVEEVKEVSRKVRKEIEELMRRVEEVVKTVKEESKKTVREVEETAR

SEQ ID NO: 8967 - protein, 177 aa, Artificial Sequence; identical to SEQ ID NO: 8966
  Synthetic

SEQ ID NO: 8968 - protein, 177 aa, Artificial Sequence
  Synthetic
DEADEIVKRVEEVVRRAKETLERILKRVEEMLDRIRKESEKTVREDEKLVEEVKDRLRKIKDKDTLRKLLDEVKKRSEESLERNKRLLEEIKRIAEKLLREVRELLERIRRTLDKLLKEVDSERLLREIKRLLKEVEDEVRRVEKAIKELVDRVKEVSDRALERSKRTVREVEERVR

SEQ ID NO: 8969 - protein, 177 aa, Artificial Sequence; identical to SEQ ID NO: 8968
  Synthetic

SEQ ID NO: 8970 - protein, 181 aa, Artificial Sequence
  Synthetic
SEVEEVKEDSKRTLKELKDVAKKVDDDSKRLLEELERVARKSIEDSKRLLDELRERGVPEDILRRAEKLVEEDIRRNEEIVRRIADRIREMNEDNRRLLDEVAKEVEKSIREVDEAAKRGVDEKELRRLVEDDRRLVEEVKRDSERLLDEIRKLVEEIKERLRRSVEELRRRVEEIKKTTT

SEQ ID NO: 8971 - protein, 181 aa, Artificial Sequence; identical to SEQ ID NO: 8970
  Synthetic

SEQ ID NO: 8972 - protein, 181 aa, Artificial Sequence
  Synthetic
SSVEKVKRDSERTLREVEKVIEKVDRDSERLLRDVERVITEADERSKDLLRRLEESGVPKDIVDRARRLIEELNRRNKALAEEIRELVERVNERNKRLLETIEKLVRDSIRRVDELAKRNVDDTDLRRLVEEDRKLVTRVKEESKRLLEELRRLVETVRKRSEDLLREIKKRVDEILRRTK

SEQ ID NO: 8973 - protein, 181 aa, Artificial Sequence; identical to SEQ ID NO: 8972
  Synthetic

SEQ ID NO: 8974 - protein, 174 aa, Artificial Sequence
  Synthetic
DEIKEVIDRITKVLEDNERVVRKLSEENKKVLDDIRRRAEEIIRRNEEVLRRIKELAKRNTDRRKALEELRKISEESKKDLDRLLKEVEEISRRSEKENRRLNKESEDVARELKKRIDNEELKKALDDILRRLEESNRKNIEDSRRILEDVERIVRRVVEVSKDIVRKAEEDVR

SEQ ID NO: 8975 - protein, 174 aa, Artificial Sequence; identical to SEQ ID NO: 8974
  Synthetic

SEQ ID NO: 8976 - protein, 174 aa, Artificial Sequence
  Synthetic
SEVEEVIDELRKVLEENKRRVEELSRENDDVLRRIEERLKKIEDELEKILKDVRDLKDNNVDSKTLLERVAERVKEAATRLRELLRELEEISEKSIRENDRLNKESEDMARDLRRRVDNERLKEEITRILEELTRINEENKRRSEEILDRVRKDVERVLKRVEDILKEIEDELR

SEQ ID NO: 8977 - protein, 174 aa, Artificial Sequence; identical to SEQ ID NO: 8976
  Synthetic

SEQ ID NO: 8978 - protein, 185 aa, Artificial Sequence
  Synthetic
SSVEELEERLRRVLERSERHLRKLEKKVEEVLDESRKNLTRLLRDVERVLRDVEETVRREKSKSVADEIRKEVKRLLDKVKKILKENRDKTKRMLEEVKEVLDRNEEETKRLEERVDKALRDEIKDERKARELKRTVKRLAEESRKILREVEEKVRKVAEDSERILEEVERTVKRVVEEIDRTVR

SEQ ID NO: 8979 - protein, 185 aa, Artificial Sequence; identical to SEQ ID NO: 8978
  Synthetic

SEQ ID NO: 8980 - protein, 185 aa, Artificial Sequence
  Synthetic
SKVEKLLRELEEVLKDSERHVREDSDRLRRVLEDSERHVRKVLRDVEKVLREVEDMVRKRKDRDVIDKIRDKVERLREKVERALERNKRKLDKALEDSNRSDKKNEDKLRELKRRVDEVLRDDIKDEEKARRLEERVEEIVRESERTSRENNKKSRDIIKTSEDILREAADRVREVVERIRRTLT

SEQ ID NO: 8981 - protein, 185 aa, Artificial Sequence; identical to SEQ ID NO: 8980
  Synthetic

SEQ ID NO: 8982 - protein, 184 aa, Artificial Sequence
  Synthetic
KEVEEVIERSKKSNEENERRLRKILEEARRINEENEKLLRKILEEAKRVVEEVRRILKDNKEKKERIKELLERLEELLRKVKEDVERSVRELAKLLKKVAEEVRKSLEDNKRTADRVVERIGEEKKEELDKLREESKKILRHSERLLKEVEEEVKRILEHSEELLRRVEDKVRRLLKEIEDALR

SEQ ID NO: 8983 - protein, 184 aa, Artificial Sequence; identical to SEQ ID NO: 8982
  Synthetic

SEQ ID NO: 8984 - protein, 184 aa, Artificial Sequence
  Synthetic
DEVEEVEKKVDKIDKENEDLLRKVIRDAERINEENTRLLEDILRKAKKMVDDVREILKDRKDAKEDIDRLLKELKKLLEEVAEEVKKSLEKLKELLEKVKREVDESLKRLEDELRDVVRKIGKDLEEEVRRVAERVKEVVKHSRELLKRVEDMVRRIVEHSKRLLDEVRERVKDLLRKIAEARK

SEQ ID NO: 8985 - protein, 184 aa, Artificial Sequence; identical to SEQ ID NO: 8984
  Synthetic

SEQ ID NO: 8986 - protein, 181 aa, Artificial Sequence
  Synthetic
DEVREVVRRLEEIVRDVNKKNRESVREAERLVDRLREILEETSRRLKELVDRVKELIKGGTDSRDVRRVDRELEKIITDSDDTVRKIREELKRKVEDDLRRTAEIIKKLKDTVARVSERISNEKEARELEDAVRKLIERLKRSAEEVKKRVEELDEEIRRVVEEDRRTIKELKEEIDRADK

SEQ ID NO: 8987 - protein, 181 aa, Artificial Sequence; identical to SEQ ID NO: 8986
  Synthetic

SEQ ID NO: 8988 - protein, 181 aa, Artificial Sequence
  Synthetic
DEVEEAVKRIEDLVERLRELLEKTSREIEKILKESEDKLRESSDRIRRLLDELKKLIENGADDELVRKMLKDIKDILEESERTSKETLDRIREILKKSEDLVREVLERIERLLEDVARRITDEEKLRKAEDTVRRVIKDVRKMLEDDRRTVEEVIRRDREALEKDRKTVDDVIEDVKRVAK

SEQ ID NO: 8989 - protein, 181 aa, Artificial Sequence; identical to SEQ ID NO: 8988
  Synthetic

SEQ ID NO: 8990 - protein, 181 aa, Artificial Sequence
  Synthetic
SEVDEAVEEIKRILEESKKRLDETSEEIKRILEDSERRLRESSKRIRELVKELKKRIDGGTDDREVEKVEKEIEDILRESEEISKDTEDKIREILKRSREISETTIREIRRLLEDIERRITDKDKLTRIREVVDKVVKEDEDALREDERTVREVIKRDRDLLEEDRRTVEDVIRKVRETAR

SEQ ID NO: 8991 - protein, 181 aa, Artificial Sequence; identical to SEQ ID NO: 8990
  Synthetic

SEQ ID NO: 8992 - protein, 181 aa, Artificial Sequence
  Synthetic
SDAEKVVKRIKEIVEDSTRKVRDTSRDIRRILDESRKMLEDVVREIKDLVRRLEELIRGGVSEETVEKVLREIEELLKELKKTSERTLKEIEDILRRSEEESRRTIREIEELLRRLEERITDKDTLDKVREDAERVLEEDKKVADDDRKTVEDVIREDKRLLKRVEEEVKRVIKEVDDAAK

SEQ ID NO: 8993 - protein, 181 aa, Artificial Sequence; identical to SEQ ID NO: 8992
  Synthetic

SEQ ID NO: 8994 - protein, 181 aa, Artificial Sequence
  Synthetic
SEVDRAVETIRRILEESEKIIRKVVREIEEILDRSRRLLEKSSEEIEDLVRRLKELIEGGTDETSVEEVLRRIEEILKESERTSTETLKTIEDLLRELERISRKTLEEIRRLLEDVKRRITDERLLREAEKDVRRVVEEDEKVLRDVARRVEEVIKADKKLLREDEKTVREVIERVKETAR

SEQ ID NO: 8995 - protein, 181 aa, Artificial Sequence; identical to SEQ ID NO: 8994
  Synthetic

SEQ ID NO: 8996 - protein, 181 aa, Artificial Sequence
  Synthetic
DEFREAVRRIKEIIDDSRRKLEKNVKENEELLKRSDDELRKSSEDIKKLLEELRRLIEGGADERIVKRILEEIEDILRKSEKRSRETLEESKESLRRSEKTSRETEKRIKELLEELAKRIKDEKSLREVEERVERLLEDDRRLLEENARRVEDLIRKDKEALDRDRKTVEDVKREVEKDAR

SEQ ID NO: 8997 - protein, 181 aa, Artificial Sequence; identical to SEQ ID NO: 8996
  Synthetic

SEQ ID NO: 8998 - protein, 181 aa, Artificial Sequence
  Synthetic
SEVDEVVKRIAEIVKTSKDELREAVKRIEDIVRRSEKMVRDNLRENERLVRELDKLAKGGADERVVEEIKRRSEDSLRKSEELSKKTLDEIRKLLDDVRKRSKETLDRIRELLERIKKKIKDKEKLDRVTETVRRLIEEDKRALEDVERKVEDVIRRDREVLERNRREVERLIKEIEDKRR

SEQ ID NO: 8999 - protein, 181 aa, Artificial Sequence; identical to SEQ ID NO: 8998
  Synthetic

SEQ ID NO: 9000 - protein, 181 aa, Artificial Sequence
  Synthetic
KDAERAVEEIRKILEDSKEKMERNVRENEKLVRDSRRKLEENVERNEKLVRDLKRLKEGGADDEIVRRIKEESKKSLKESEKTSKKTLEESERSLRESEKVSKKTIDEIRRLLKEIRERITDKDTLKRVTDEVRRVVEEDKRVLEENRRRVEKLIEEDKRALDENRERVRKLIEDIDKDAT

SEQ ID NO: 9001 - protein, 181 aa, Artificial Sequence; identical to SEQ ID NO: 9000
  Synthetic

SEQ ID NO: 9002 - protein, 181 aa, Artificial Sequence
  Synthetic
DEVEDAVEKLKRLVDELERLLREAVRRIEKILEDSTRKVRKNLEENKELVKRLRELIKNGVPEDSVRKVLRESKESLRRSEETSKETLERIKRLLDEVRELVERVKRELDRLLRELEKRIKDKDLLRKVAEVVRRLEEEIRRLLEEAKRVVDEVIKKDRTVMERNREEVERLIREIEETAR

SEQ ID NO: 9003 - protein, 181 aa, Artificial Sequence; identical to SEQ ID NO: 9002
  Synthetic

SEQ ID NO: 9004 - protein, 181 aa, Artificial Sequence
  Synthetic
SEVDEVVERIRRIIKKSKEELDKAVRDIEEILRRLEKELRDNVRENEKLVEDVRRAIEGGMDRKDVKRVLKESEDSLRESEKRVEEVLRDIKRRLKEVRETSRRTIEEIERLLREIARRITDKDKLERVSREAKRVLKEDEEALRDVEKKVTDVIEAVKKMLEDNRDRVRRLIEEIKRRAT

SEQ ID NO: 9005 - protein, 181 aa, Artificial Sequence; identical to SEQ ID NO: 9004
  Synthetic

SEQ ID NO: 9006 - protein, 184 aa, Artificial Sequence
  Synthetic
DEIREAVKRIRRLLEESHRENKEIVDRLRKLVEESHRKNEKLKRELEELVKKLKEIIDKDKDKDTLTKIVEDIKRRLDEILKRADEENERINRKLREILEEVRRRNEEVNKEIKDLLDDIRRRVDSEDLKRAEEEIRKVSEDNKRSVDRVREVVKRLSDENRRSLEEVREVVKRLIREVEEARR

SEQ ID NO: 9007 - protein, 184 aa, Artificial Sequence; identical to SEQ ID NO: 9006
  Synthetic

SEQ ID NO: 9008 - protein, 184 aa, Artificial Sequence
  Synthetic
DEIRKVVKEITDLLKKSNDKNRKVVEEIRDLLRKSKKLADELVERLRKLVEDLRRRIDKLSDKRTAEDIVRRIIEELKRILKEIEDLARRINREIERLVEEVERDNRDVNRKIEELLKDIARRVDSEDLKRVEERAREVSRRNEESMRRVKEDADRVSEKNKEVLDRVREEVKRLIEEVRETLR

SEQ ID NO: 9009 - protein, 184 aa, Artificial Sequence; identical to SEQ ID NO: 9008
  Synthetic

SEQ ID NO: 9010 - protein, 184 aa, Artificial Sequence
  Synthetic
DRIRDVAREIRELLKRSNDENRKVVEEVRRLLKESNDTNKRVVDEVRELLERLKEIARRLKDKDTLKKEVDKIIRELERVMEDVKRKNDEINERLKKLLEDVKRKNDDVNRKIDELLKTIEREVDSEDLKRIRREVEKVSEDNKRSAKEVEDEARKVSEDNERSVRDVKEKADRVIKEVEDEDR

SEQ ID NO: 9011 - protein, 184 aa, Artificial Sequence; identical to SEQ ID NO: 9010
  Synthetic

SEQ ID NO: 9012 - protein, 178 aa, Artificial Sequence
  Synthetic
DEERKIKRVLDEVDKHSKRVIAEAKRVVDEVLREVEKVVRRNKEVLDEILREVKRILDEGKITEEVLKEAEKRLRDNKRRLEELLRDAERRLRDIKRELERLLEESRKVVEDVERKVRKDGAREELIKTIRKVNKEIEDRVRDLIKTVRDILRRIEEEVRKSIEDSKRLLRELEARAE

SEQ ID NO: 9013 - protein, 178 aa, Artificial Sequence; identical to SEQ ID NO: 9012
  Synthetic

SEQ ID NO: 9014 - protein, 176 aa, Artificial Sequence
  Synthetic
SVVEDLKRTVEEVVKKSEEILKEDRKTVEKVVEEVKKSDKEDRDDVDRVVKEVRKRIRDKRLEDELKKALDTNRKLVRESTEKLKKLLEDNERANKRNKEELDRLLDEVREVLRMDKKDLADKVKKDAEEVLKRSKEHVDRSIDRTREILKRLRETNEESIKRTRDILRKIAEEAR

SEQ ID NO: 9015 - protein, 176 aa, Artificial Sequence; identical to SEQ ID NO: 9014
  Synthetic

SEQ ID NO: 9016 - protein, 176 aa, Artificial Sequence
  Synthetic
SVSEELKKKVEKVARDVERSLERDATEVTKVVEEVKKSDRKDEETVKRVVKRVDELIRDERLKEELERALRDNERLVRESTKNLEDVKRKNEKILREIRKKLRELLEEVAKALRSDKREVAEKVIRDAEKVLDDIRRMNEESIRDTRRVLEENKRKNEESIRKTEEILRRIEEESR

SEQ ID NO: 9017 - protein, 176 aa, Artificial Sequence; identical to SEQ ID NO: 9016
  Synthetic

SEQ ID NO: 9018 - protein, 184 aa, Artificial Sequence
  Synthetic
SEVDEVLKELERINRENHREVEELLRRLERILRESKKHIKEVIEDLRRRLKELEDEVRRRKDEDVRRRLRELVERIEREVERVIRRNDKLVKEAEERVKEAVKRLERSAEELRKKVTRVVERLSDEKKVRELEEEARRVKRSTEEVIKRLRDSVEKLVKDSERVLRELKKEVERVVEEIDKMIK

SEQ ID NO: 9019 - protein, 184 aa, Artificial Sequence; identical to SEQ ID NO: 9018
  Synthetic

SEQ ID NO: 9020 - protein, 183 aa, Artificial Sequence
  Synthetic
DEVEKALEESKKSNEENHRKVKKVLESAKDINRRNHDLVRDVIRKLEEILRRIEKVVREGRDKREIKRIEEEIKKTVKKVVEDLRKSLDDLRKEVTKVLEDLKESLKRNEDRMRDVVEKIGRDFDKEVTELRESSRRSIESTREAVRTLEEAVREVIKSTDEAVKRLEATVKRIEEEIRKSMK

SEQ ID NO: 9021 - protein, 183 aa, Artificial Sequence; identical to SEQ ID NO: 9020
  Synthetic

SEQ ID NO: 9022 - protein, 183 aa, Artificial Sequence
  Synthetic
DDVERVLKKSRDSNRENHEKVKRVIEKSDRSNEDNHRLVEDAIRKAEEILEEVERLVTAGEDKRKAEEIVKELRDLVREVKRRLDESLKRNEEEIRKVVEELERSLDKNRKEIREVLERIGRDFKEEVDELRKSSEDSIRSTEDVVRKLEETSKRSIRSTEDVARKLEEAVRRIERRIRERTR

SEQ ID NO: 9023 - protein, 183 aa, Artificial Sequence; identical to SEQ ID NO: 9022
  Synthetic

SEQ ID NO: 9024 - protein, 183 aa, Artificial Sequence
  Synthetic
SEVEEVLKRSKESVERVDRDVRRVLRELEDLNRKNHKRVEEVIRDAERILREVEDMVRRGVEKEKLEKIVRDLRRTVEKVLKELRDSLREIKRKVDEVLERLERIIRENEELIRRALERIGRDLDKEVDELRKSSEKSVEDIKRVVDRLRDSARKIIKSTEDVVKELERRVREVIKRIKEEAT

SEQ ID NO: 9025 - protein, 183 aa, Artificial Sequence; identical to SEQ ID NO: 9024
  Synthetic

SEQ ID NO: 9026 - protein, 187 aa, Artificial Sequence
  Synthetic
SEIEEIIKRIEKLLRDDEKKIRDSIKRSEDLLREANRENKESIDRVRELLEKVKRLRERIDSEEVRERVERVLREIERLLEEDRKRNEDISRKNEKLLRETEDESRKSIETIKRLLEKVRTDSGDKKAEEEVRRLEKRVRDVLRELEKTLKRVTEVHKETTKENEKSARRVKREVEKVIEEVERTRT

SEQ ID NO: 9027 - protein, 187 aa, Artificial Sequence; identical to SEQ ID NO: 9026
  Synthetic

SEQ ID NO: 9028 - protein, 187 aa, Artificial Sequence
  Synthetic
SEIEEIIRRIEELEERLKRELDRSIRTSEKLLEDAREINKESIRRVEKLLEEIRRVVDKIDSEEVTRLVEKVLRDIERLVTEDEERNKRMTKRNEDLLKRIEEEVKRIIREIEETLRKVKEDSGDKKAEERVRALEKAVKDVLESLKRLLDEVRKRHKESSEDNERSLKRSKEEAEKVIKAVEDERR

SEQ ID NO: 9029 - protein, 187 aa, Artificial Sequence; identical to SEQ ID NO: 9028
  Synthetic

SEQ ID NO: 9030 - protein, 187 aa, Artificial Sequence
  Synthetic
SEIEDIIRRIRKLLEEDKEKIERSIRESRRLLEEAKRINEKSIEDVKRLLREIEDVVDKIDSREVEDLVRKIEEEVKRLVDEDRKRNEDMTRKNEELLKDVTEKSKKSIRDIEKLLEEAARRSGDEKMREKVERLREDVDRVRKELEKTLETVTRSHKRSSEENKRSLEESERTARKVIEDIRRRDR

SEQ ID NO: 9031 - protein, 187 aa, Artificial Sequence; identical to SEQ ID NO: 9030
  Synthetic

SEQ ID NO: 9032 - protein, 187 aa, Artificial Sequence
  Synthetic
KDIEEVLKRIKDLLEDIRRRLKESEERSRKLLEEAREINERSIERVRRLLEEIRRLKEEIDSKDVRELIEKVLKEIEDLLRDDKRKNEDMTRKNEELLKKLKKEIEDVLREIKELLDRARKRSGREEMERKVRELERAVREVIKEVEKLLTDVARKHKKVSRDNKESLRRSEEEARRVIRAVEETDR

SEQ ID NO: 9033 - protein, 187 aa, Artificial Sequence; identical to SEQ ID NO: 9032
  Synthetic

SEQ ID NO: 9034 - protein, 176 aa, Artificial Sequence
  Synthetic
STLETVEKKVEEVIRENEKSMRESEEKVDRSTKRIEDVLRRLEETIRKTSDDIAKDVKGERVKEVLEENRRLLEEAKKLVDEVLETNKKLLEDDKRLNEEVSKTLKKLLEEIKRVDTREDATRVIEEAKRILDEARKLNEETIRRSEELVRRIERVIEEIIKRSEKLLEDVRRESK

SEQ ID NO: 9035 - protein, 176 aa, Artificial Sequence; identical to SEQ ID NO: 9034
  Synthetic

SEQ ID NO: 9036 - protein, 176 aa, Artificial Sequence
  Synthetic
SVLDDVRKKVEEVLDRNRELADRSRRTVEEVLRENERVMEESKRTVDEVIKRVAEKLKGEKVEEVIRRLEKLAEEDRRRNKEVTEELKRLLEELRRKNEEVTERLKRLEEEIKRVDVREDAERMIERLKRILDRVEEENRRAIEELREVLERVRDDNRRTIEELERILKRVEEESR

SEQ ID NO: 9037 - protein, 176 aa, Artificial Sequence; identical to SEQ ID NO: 9036
  Synthetic

SEQ ID NO: 9038 - protein, 176 aa, Artificial Sequence
  Synthetic
STVETVREEVERVLKHSDDLIKEVEDVNRRVEEEIKRVIRELEEENERLVREVRKKVKGEILKEIEKRLRDNSEKVREVAERAKKLLEENTRRVKDILRESRKLVKDLLDEVERVTREEEAREIIKRLREVNKRTKEKLDELIKHSEEVLERVKRLIDELRKHSEEVLEDLRRRAK

SEQ ID NO: 9039 - protein, 176 aa, Artificial Sequence; identical to SEQ ID NO: 9038
  Synthetic

SEQ ID NO: 9040 - protein, 176 aa, Artificial Sequence
  Synthetic
DEVERVAKEVEDVLREVEKLIRDVRRKVEEVLKHSEEVAKRVRDTNRELVKEVERDIKSEELKEARKALEDNSRKVKEILDESEKLVRELLRRVEELLKKVRKEIEDLLRKVKDVKDEKELRDIIRRLKEVLDKLKKDLEDIIRRLEEVNRESERLAREAIRHSEEVLDKLRKDSK

SEQ ID NO: 9041 - protein, 176 aa, Artificial Sequence; identical to SEQ ID NO: 9040
  Synthetic

SEQ ID NO: 9042 - protein, 175 aa, Artificial Sequence
  Synthetic
REVEEVKKRIREALEESERVIRENKKKNEELLDRVRKEIERNKKKNEEVLKRAKEVTKAGRPKSRVLEEIRRIVEESRRHLDKVLEDVERILRDSKRHVDEVNRKSETIARELKKKVKDVEDVKRKIDRMVEESRKLVEDLKRESDRVEEEVRKLVKTIKDEITRSLDEVRKDAE

SEQ ID NO: 9043 - protein, 175 aa, Artificial Sequence; identical to SEQ ID NO: 9042
  Synthetic

SEQ ID NO: 9044 - protein, 175 aa, Artificial Sequence
  Synthetic
SEVDEVRKDIERILRKSERDIRRNKEENKRLLDEVRRRIEENRKENEDLLKRIEELRRAGRPESEVDEEVRKIIEKSKEHVDRVLEEIEEELRRSKEHLKRVNEESEEIAKELKKRVKDVEEVKKEIDKAVEDSKRLVEDAERVSDEVRERVRRLVERLKEESDRVEREVEKRTT

SEQ ID NO: 9045 - protein, 175 aa, Artificial Sequence; identical to SEQ ID NO: 9044
  Synthetic

SEQ ID NO: 9046 - protein, 185 aa, Artificial Sequence
  Synthetic
SEVEEVLRRAEKLSEDNKRENDESLERLRRIVEKVREENEESVKTLEKILKEVEEVVRRNKEVQEELRKIVEELRDLIDKDLRRTDDIIRELRKRIEEDLKRSKDIVKEIRDTIREVVERLKKDDKKEVIKRLEDEVRRLEEDNKRSIKKSEDEIRKLVERLKRSAERSDEVIRKLEKDAEDLIR

SEQ ID NO: 9047 - protein, 185 aa, Artificial Sequence; identical to SEQ ID NO: 9046
  Synthetic

SEQ ID NO: 9048 - protein, 181 aa, Artificial Sequence
  Synthetic
DEVERILEDSKRLVDELRERVERVIEESKRLLDDLRRKVEEVVRRLEKIVEDLKRMIEGGVDREVVRKVERDLKELVREVERRIEKVSKENTELLDRVEKEIRKVVRTNSELAKEALRRIGDEDKVRELKETADRSNEEIKRVLEKIKRMIEDTNRKIKKLLEEIRDVARRVLEEVREVAR

SEQ ID NO: 9049 - protein, 181 aa, Artificial Sequence; identical to SEQ ID NO: 9048
  Synthetic

SEQ ID NO: 9050 - protein, 181 aa, Artificial Sequence
  Synthetic
KEVEDVLRESKRLVEDLERRSERSIEESKRLLKELEDLVEEVIRRSEESIDRLRELIKGGTSEEAIKEVKKTNERLIKEVERLIREVSKRNTDLVEENRKLVEKVVRDNSRLLEELARRIGDEKKVRDAEREARDSNDKIRRSLEKVERVVRETNRRIKELLEKIERVIRDTDRKIAEEAK

SEQ ID NO: 9051 - protein, 181 aa, Artificial Sequence; identical to SEQ ID NO: 9050
  Synthetic

SEQ ID NO: 9052 - protein, 181 aa, Artificial Sequence
  Synthetic
SEVEKIVRDSEKLLEDLKRELEKVIKDSDDLVRELKKRVTEVLERLRRIVEELRKLIEGGASEEVLERVLRRLEELIRRVEEEIRRVVEENSKLVEELKRRIEEVSRRNTELVKDAARKIGDEEKVRRLEKEARRTNEEIRKLLEKVDEVARRSNERIKAVLEEIKREIEKLKREVEKDAK

SEQ ID NO: 9053 - protein, 181 aa, Artificial Sequence; identical to SEQ ID NO: 9052
  Synthetic

SEQ ID NO: 9054 - protein, 181 aa, Artificial Sequence
  Synthetic
SEIEEVLKKSKKLVDDLRKEVEETIRESKKTVDDLDKEIKEVVRRSEESLDRLKKLIDGGSSEETIKKVVRDNERLVKEVLKSIEEVLKRNKKLNDDSNERAKRVSDTNTRLVEEVVRRIGDERKVDEIRRAVEETNEEIKRVVDEDNKAVKRSLEEIERVAEEIKRVAEETLKAIEDARR

SEQ ID NO: 9055 - protein, 181 aa, Artificial Sequence; identical to SEQ ID NO: 9054
  Synthetic

SEQ ID NO: 9056 - protein, 182 aa, Artificial Sequence
  Synthetic
DEVEELVRRLEELVKRSRDTNRKIIKEIRELSERLKRELEKIARELEKLVEDLKEEVKRLKDKDTLRKMIRDVEEKIRRLLEKVERLVRESLRRHEKLLDDVRRTNKEISDRLKTLLDEIRRRNVDVEKIEDVVRRLLEENERVLRRTEEEARRVLETNRDLLRKIREVVDRLEKEIREAEK

SEQ ID NO: 9057 - protein, 182 aa, Artificial Sequence; identical to SEQ ID NO: 9056
  Synthetic

SEQ ID NO: 9058 - protein, 182 aa, Artificial Sequence
  Synthetic
SDADRVAEELKKLVEDSRRENERVIEESKRLVKENEDRNRELIERLKKLVDKLRDILEKEKDKKTLDDIVREILERLKRLLEKVEDENRKSHEENKRLLEDVKRKNKRISDELKRLLEEIERRNVDVDKVRETVKRLLEENKRVMEKTEEVAKKSSEDIKRVADETRRRAEELLKEVDELRK

SEQ ID NO: 9059 - protein, 182 aa, Artificial Sequence; identical to SEQ ID NO: 9058
  Synthetic

SEQ ID NO: 9060 - protein, 182 aa, Artificial Sequence
  Synthetic
SEADEMLRRLKELVDRSRDTNRKILKRSEDLVRDSKKKNDDIIRELRRLLEELRELARRLKDKDTLRKIVEEVKERIRRLLEEVERTNREVTERNRELLREVEERNRRISKELKDLLREAEERNVKTDDVRREVERLLRDNKRVLDETRKAAEESTRRNKKVLEESREVVKDVLKKIEDTDR

SEQ ID NO: 9061 - protein, 182 aa, Artificial Sequence; identical to SEQ ID NO: 9060
  Synthetic

SEQ ID NO: 9062 - protein, 182 aa, Artificial Sequence
  Synthetic
DEVREVAERLRRLVDESRKRNEEVIKESEALVDRVRKTNEEVMKRLRELIDKLEKDIRRLKDKKTVEKIIREVLKKIDELLKRVERTNREISKENKRLLDEVRKTNEEISRRLKKLLEDIRRRNVDVETIERVVRELLEENKEVLRKTEEMVKRSTETNKRLLERSKEVADRLRERIKEAAK

SEQ ID NO: 9063 - protein, 182 aa, Artificial Sequence; identical to SEQ ID NO: 9062
  Synthetic

SEQ ID NO: 9064 - protein, 182 aa, Artificial Sequence
  Synthetic
DEVDELLKRLRKLVDEVRKENDKMVKESKRLVEDLKRKIDEIIERIERLLEELEKILKDTEDKDTLRKIVEEIKRRLRRLLEELKRIIEKALRDNKKLLDEVRKRNKEISDELRRLLEEIRRRNVRVEDIEREAERLLRENEELLRRSEEVIRRSTEKIKKVLRDAEERAREILKRVEDAAK

SEQ ID NO: 9065 - protein, 182 aa, Artificial Sequence; identical to SEQ ID NO: 9064
  Synthetic

SEQ ID NO: 9066 - protein, 184 aa, Artificial Sequence
  Synthetic
DEVEEVKKKLREIVKRDRDLIERVREELKEILDRNREINRRAIEDLKRILEEVDELVKRGTDKKDLEKILRDIERLVEEVRRRSRELVERAKRLIEKVVTDSKKTVERIRRDVEKVLDDLRRKNKEELIRDVERVVREVLRRIEKSIRDLDRVIRDVLDKSRELIKRSEDVAKRVVDTLREKAR

SEQ ID NO: 9067 - protein, 184 aa, Artificial Sequence; identical to SEQ ID NO: 9066
  Synthetic

SEQ ID NO: 9068 - protein, 186 aa, Artificial Sequence
  Synthetic
DEVETVKKELKELADEVKERNERSIRDSERLLEEVKRRNEKSIRDLERLVEELEDVLRKRGSEDEDVKRKVEEVDRRIDKLAEDDKRINEKVLKENSDLVKRDEDINRKILEDVRRLVEKVRREIGDEKKVKEVTDEVKKVLDEIRELDKRSRDAVRRTNEEIKRLDKESKDVVDRVKKKVEDAVR

SEQ ID NO: 9069 - protein, 186 aa, Artificial Sequence; identical to SEQ ID NO: 9068
  Synthetic

SEQ ID NO: 9070 - protein, 186 aa, Artificial Sequence
  Synthetic
REVEEIIERLKKLLKEIAERNTESIKELEELVRRIAEDNKRIIEELRRLLEELADVVRKKGSESREVEEKVREVLRRLEKLLEDVRRINEDALRKIEELVKRDADENRTVLKRLEELVRDVARRIGDEKKVREVRKVAEEVLRAIEELDKRSRDAVRRVTKRVKDLDEETKRVVEDVLRRIEELMK

SEQ ID NO: 9071 - protein, 186 aa, Artificial Sequence; identical to SEQ ID NO: 9070
  Synthetic

SEQ ID NO: 9072 - protein, 186 aa, Artificial Sequence
  Synthetic
SRVEEIIEDLRRLLEEIRKENEDSIRRSKELLDRVKEINDTIIKELERLLKDIEKEVREKGSESEEVKKALRRVLEELEKLLRRVAEINEEVLRRNSKLVEEDERRNREVLKELKRLVEELMREIGDEDKVRKVREVAEKVLRDIDKLDRESKEAFRRTNEEIRKLDEDTRRVAERVKKAIEDLAK

SEQ ID NO: 9073 - protein, 186 aa, Artificial Sequence; identical to SEQ ID NO: 9072
  Synthetic

SEQ ID NO: 9074 - protein, 186 aa, Artificial Sequence
  Synthetic
SEVEEIIRRLEELVREVAKRNEDIIKRSRDLIRKVKEDNRRSEEELRDLSRRIADIVRKKGSESEEVKRELDKALRRLEELIKRDAEINEKVLRENSTLARRVEEINERILRELKKLVDDIARKIGDERKVREVRRVAKKVLEDVKTLDDKTREVARRTNEDIKRLDEKSRKVIEEVRREIEELKR

SEQ ID NO: 9075 - protein, 186 aa, Artificial Sequence; identical to SEQ ID NO: 9074
  Synthetic

SEQ ID NO: 9076 - protein, 186 aa, Artificial Sequence
  Synthetic
SEVDEIIKELERLLREIARENERIIRESRKLADEVRKRNEDAIRKLEELVRRLADMVRRKGSESEEVKKLIEDVLREIERLLKRIEEENREVVKRNSELVERVRRINEEILRRVKELVEKIARDIGDKDKVTKVKKVADDVLREIKKLDDETRRVIEDTNKKIKDLDKKTRDVVRKVLEEVKKLEK

SEQ ID NO: 9077 - protein, 186 aa, Artificial Sequence; identical to SEQ ID NO: 9076
  Synthetic

SEQ ID NO: 9078 - protein, 186 aa, Artificial Sequence
  Synthetic
SDVEDVIRKLETLVDDLRRKVERIKERSRELIKRIAEENRKVIEELERLLEELADVVRRKGSESEEVDRTAEEVRKKVKELLDRVARSNEEILKENSKLLDDIRREIEEVERRIKELAKDIARKIGDEKKVRDVRRVAEKVLREVRRLMEEVERVARKTNRDIERLDEETRRVVEKVRKEIEDLRR

SEQ ID NO: 9079 - protein, 186 aa, Artificial Sequence; identical to SEQ ID NO: 9078
  Synthetic

SEQ ID NO: 9080 - protein, 176 aa, Artificial Sequence
  Synthetic
SAKDKIAEVAKRVLTENKKLLEESEEVARRTSEESKRLLKESEDVVRRVLDEIRREIKGEKAKKVLDTLKEILDRDRKLNEESHERNKRLLDEVRRMNEEVSKELRRLLEEVREIRDERLIEEVIRRLEELLKEVKKKNEEVIRRSKELIDRDRDLNRRSIEELERLIREVRKESK

SEQ ID NO: 9081 - protein, 176 aa, Artificial Sequence; identical to SEQ ID NO: 9080
  Synthetic

SEQ ID NO: 9082 - protein, 176 aa, Artificial Sequence
  Synthetic
SAKEKIKEVAERVEKRNKELLEESERVIKEVSERSERLLDESRKVVKRSTEEIRDKIKGEEAEKVLRDNEDLLREDEELNKTSHERNKRLLDEVRKRNKRVSDELRKLLEEVSRIDDEELIREVIERLKELVDRVEKENRKAIETSRRLLKEDEDLNRESIKRSEELVKDVRRRST

SEQ ID NO: 9083 - protein, 176 aa, Artificial Sequence; identical to SEQ ID NO: 9082
  Synthetic

SEQ ID NO: 9084 - protein, 176 aa, Artificial Sequence
  Synthetic
DARKELEEVVRRVEEEIRRLLKDIEDVAREVNRRSEKLLRETEEVIRRSTEEIKRDVKSELVKEILERNEELLRRVKKLNEEVNEELRRILDEIRRLVEEVEERIKKLLEEAKRVNERERVKEIIERLRRLVEELKKLVDEVRKRLEDVVRELKERNKKVIDDSKDLVRRAREESR

SEQ ID NO: 9085 - protein, 176 aa, Artificial Sequence; identical to SEQ ID NO: 9084
  Synthetic

SEQ ID NO: 9086 - protein, 182 aa, Artificial Sequence
  Synthetic
DFSERLDEVLRKVRTDIKKLVEKVRRVVEDSRRRVEKLVEDVRRSSEEVLKTVKELLDRGLIEERVVEDVKRIIEETKEKLDRALEKAERDLRDSERHLDEVLKEIEKIIEEIREEVERLGGTDEVVRRLEKRLRDALKEAEDKVRRDEERNREVLERLEKIVRDLHRENEKAVEDVADRAR

SEQ ID NO: 9087 - protein, 182 aa, Artificial Sequence; identical to SEQ ID NO: 9086
  Synthetic

SEQ ID NO: 9088 - protein, 182 aa, Artificial Sequence
  Synthetic
DLSEEVKRVIEEVRKRIEELVDEVRKSTEEVIKRVRRLVEEVERVVEDSRRKVDKLLKEGRITEEVVKRAEKILRDSKKHLEEVERKVRDDLRRSEEEIRRVLKEIEDRLRELKKKIDKLGGTEEVVRRLKEELEKALRDAERIVKELHEENRKVLEDVKRMVDEDKKKNERVVDEVRRDAK

SEQ ID NO: 9089 - protein, 182 aa, Artificial Sequence; identical to SEQ ID NO: 9088
  Synthetic

SEQ ID NO: 9090 - protein, 182 aa, Artificial Sequence
  Synthetic
SLSEEVKKVIREVEEDVKRLVRELRESSERVLKEIKKLVDEVRRVLEESKERVKKLEREGKITDEVVREVEEEVKKSKENLDRVLEEIRKILERTKEKVDRVLEEIRKILKDIEDRIEELGGTDEVVRRLKKRLKEALDRLRDIARKLDKENKEALDEARRIVEENKRRNEKVVEDVERRAE

SEQ ID NO: 9091 - protein, 182 aa, Artificial Sequence; identical to SEQ ID NO: 9090
  Synthetic

SEQ ID NO: 9092 - protein, 185 aa, Artificial Sequence
  Synthetic
DEVEELKKDLKRVLEEVRKIVEDIHRTNEEVLREVEKIVEDIHRENKEVLEKVEKIMRELKDVDEALRRLKEEVERVLKRSEDKIKDLLDKVEKVLEESERRVRRLLREVERALRRVAEEVRKIDDEELVREVKRVVDELEKEVRDLLRRLKESTDKLREDVRRLAERLRDSLREMERDVREKTR

SEQ ID NO: 9093 - protein, 185 aa, Artificial Sequence; identical to SEQ ID NO: 9092
  Synthetic

SEQ ID NO: 9094 - protein, 185 aa, Artificial Sequence
  Synthetic
DEVERLKRELETVLRDVERIVEEIHRENKKNLDKVKKIVEEIHKENREVLEKVRKIMEELKDDDETLRRLLEEVDEMLDRSRRKIEELLRESKESADRSRKKVRDLLERVKEVADRVREEVKRIDDKKLVEEVEEVVKRVEEAVEELARRLEKSTRDVVEESKKLARELEKSLEEVKEEVRKLIT

SEQ ID NO: 9095 - protein, 185 aa, Artificial Sequence; identical to SEQ ID NO: 9094
  Synthetic

SEQ ID NO: 9096 - protein, 185 aa, Artificial Sequence
  Synthetic
KELEELIKRLKRVLEENRDIVRKIHEDNERNLDELRKIVERIHKENKRVLEEVKKIFEELKDDDKVLRELLEKVKRVADESRERVKRALERSKESVRESEERVKEALERSKKMLDDVREDVRRIDDERVVREVERVIKKLEDDSRKTVRDLEESTKEVEKRSKELADELEKSIEDLERRVDEDTK

SEQ ID NO: 9097 - protein, 185 aa, Artificial Sequence; identical to SEQ ID NO: 9096
  Synthetic

SEQ ID NO: 9098 - protein, 185 aa, Artificial Sequence
  Synthetic
REVEELKKELERVLKKVADLVEENERRNRKNLEDLRRIAEEIHRRNEEVVKRVRDTLERLRDVDEVLKRLLDEVEEVLKESEKRVRDALRRSEESVKKSEEDVKRILDEVKERLDRVREKLKRIDDEKLVRDVERVVEKVERDVKRLADRVREVLKESSDRSRELVERLRESLRKAREEVRKAIE

SEQ ID NO: 9099 - protein, 185 aa, Artificial Sequence; identical to SEQ ID NO: 9098
  Synthetic

SEQ ID NO: 9100 - protein, 186 aa, Artificial Sequence
  Synthetic
KDVDEVLKRLRELIDELRKTNERVKRELKKLVEDLERKNKDVERRLRELIRTLEEIARKTKDKETLRKILKEILDRIEKLLREAEETNRRAKEEIERLLKKAHDKNRKIEKEIDKLLKDITRRAKDDKDMVKKVRDVIEDLKREVERLDRETKEVVERVKRKIEKTNRDSKKVIDDLRREVERLRK

SEQ ID NO: 9101 - protein, 186 aa, Artificial Sequence; identical to SEQ ID NO: 9100
  Synthetic

SEQ ID NO: 9102 - protein, 186 aa, Artificial Sequence
  Synthetic
SEAERIVEELRKLIEDLRRKNEEVKERLKRLVREDEKRNEEVLKELEDRADELRKLVEKLSDKDTLKKILERAREEIKRLVKEIREENKRSVEKIEELLKRARDTNETILRRIEEEVRKAEKDLKDDKDVVDRLRRVIEDLKRTVEKSNEDSDRVIKEVKKRIDDSLKRVEDVIRRVKETIDRLEK

SEQ ID NO: 9103 - protein, 186 aa, Artificial Sequence; identical to SEQ ID NO: 9102
  Synthetic

SEQ ID NO: 9104 - protein, 186 aa, Artificial Sequence
  Synthetic
SDVDRVAKDLEKLIRDLEKINRDVSRENKELIEKDKKINEDVLRELDRLVEELERLVRELSDKETLKKILEDAVKEIRRLLEEIKERNDRSLERSKELLRRAEETNRDIERKIKDLLKRITDRIKDKKEMLEKIRKVAERLRREVERSNEESKKSADEAEKTIRKSLKEVEERIREVEKKIRDLKR

SEQ ID NO: 9105 - protein, 186 aa, Artificial Sequence; identical to SEQ ID NO: 9104
  Synthetic

SEQ ID NO: 9106 - protein, 186 aa, Artificial Sequence
  Synthetic
SEVDRVLKELDELIRTLEELNKKVSRENRELIKEDKKRNDEVVKRLEDLIRELKERVDKLKDKKTLKDMLRRMKEEIDKLLKEIRERNEESLKESDRLLREVHKLNRDIKKEIEDLLRDIERKIKDDKDALKKVREVIERLKEEVERLDRETKKSADEAKEAIKRSLEEVEDVVRKIREKIKKAEE

SEQ ID NO: 9107 - protein, 186 aa, Artificial Sequence; identical to SEQ ID NO: 9106
  Synthetic

SEQ ID NO: 9108 - protein, 186 aa, Artificial Sequence
  Synthetic
DEVERAKEELEKLVRKDEEDNDRVRKRLEELIRRLKEENDRVLEELRRLSEELDRLAKELKDKDTLRRRLEEARKEIEKLMREAHEENKRILEEIEKLLRDIEERNRESVERIERLLKKIEKDIKDDKEALDEVRRVIEEVKREIERSLRESREVIKELKERVKELDERTREVVRKVKEEIDELER

SEQ ID NO: 9109 - protein, 186 aa, Artificial Sequence; identical to SEQ ID NO: 9108
  Synthetic

SEQ ID NO: 9110 - protein, 186 aa, Artificial Sequence
  Synthetic
SEVDDVLRRLDKLVKDDKRTNDRIVTRDRETVKRVKEVNREIVERLERLVDRVREIVERLKDKDTLKKLVDEARKDIERLLKEAHDMNRESIERNRESVREVREINEDSVRKIRKLLREIETRVKDDEDALRKVREVIRRVEEDIKRSLRDSERVIEEVVTRNEKVDRETKKVVDEAKREIDERAK

SEQ ID NO: 9111 - protein, 186 aa, Artificial Sequence; identical to SEQ ID NO: 9110
  Synthetic

SEQ ID NO: 9112 - protein, 185 aa, Artificial Sequence
  Synthetic
SELEKLIEELERVLKRIEEVSRELDKELETVLDEIRRASKRLNDELRRALEEIARAATENKDIKELLEKLLREAKRVLDEVRKRSEELLRKLEEVLERVRKKSDDLLKELEEVLDRVKRTIERDIKSKLLERAEDVIRRVREALEELVRTNRESLERVERAARELNRRNEESLERARREVEKLRR

SEQ ID NO: 9113 - protein, 185 aa, Artificial Sequence; identical to SEQ ID NO: 9112
  Synthetic

SEQ ID NO: 9114 - protein, 185 aa, Artificial Sequence
  Synthetic
DEVRELIDRLRKALEEITRESRRLDEELRKVLEEVERRVEELSRRNKEMLDRVREKVTRRKDDTELLKEIERELKEILKRSDDEAKRILREVEEILRRVEEDSRRLLEKVRRVLKEVEERARRDVKSRLLEELKRVIDEVRREVERLNKKNKESLDRARRRVEDLLRRLEESVRRVEEELKKLST

SEQ ID NO: 9115 - protein, 185 aa, Artificial Sequence; identical to SEQ ID NO: 9114
  Synthetic

SEQ ID NO: 9116 - protein, 181 aa, Artificial Sequence
  Synthetic
SELERVIRESERTVEESHKHVREVIRKLRDIVRRSHEHVREVIERSKESVERVRDLVRRGVPREELKRILDEDKKRVDDVLRTNEELVRRIKEDVKRVLDENRKLLDEDRKRVKEVIDRITDEELVRRLKKVLDESEKAVTRNIEEIKKVLEDVVRKAEKNIREIAEVLERSTRAAKKDTD

SEQ ID NO: 9117 - protein, 181 aa, Artificial Sequence; identical to SEQ ID NO: 9116
  Synthetic

SEQ ID NO: 9118 - protein, 185 aa, Artificial Sequence
  Synthetic
ELEKRIDEVLKRVEDEIRKSIRENEEVLKDVERAVKELIKENERVLEEVREEVRKIIERVKEDKDLVRRLEEVAERIKRRVERTSRELDRMLKEVRKEVRRSSEESKRSLEEIRRKVEEAKRRIRSEDIVREVEKELEDILRDNRRLVRESIESLKDVVRRVAELVERSIRELKKMVDEIRKEAE

SEQ ID NO: 9119 - protein, 185 aa, Artificial Sequence; identical to SEQ ID NO: 9118
  Synthetic

SEQ ID NO: 9120 - protein, 185 aa, Artificial Sequence
  Synthetic
KLEERIEKVLEDAERDVRRSEEEIRRVLKEVEDRVRRLLRENEDALRRVEEEVKKIIDRVKDDERLVRDLKRTLDEIRERVKESNKRLEELLRRVEKTVREVLKRSRDSLRKVRTLVEEAKKRVRDEKIVKRVIETLRELLKENRKLVKDVIEDLKRIVKEVEELVRESIERLKDMVRRISEKAK

SEQ ID NO: 9121 - protein, 185 aa, Artificial Sequence; identical to SEQ ID NO: 9120
  Synthetic

SEQ ID NO: 9122 - protein, 180 aa, Artificial Sequence
  Synthetic
KEVEEIIETLKRLSEDLERKVREIIERLKRLSERLERENKEVIKELERLIDELRKLVEDGEDSSMVRRVEKKLEELLRRVKKLNEDVKEESKRLVEEARKVIEKVLRESKELADDARKKVDSEDLRKLDRVVKESERTIRDLLRKLDEVAKRSDDTIERVNDETAKVIERVKRKIEELEK

SEQ ID NO: 9123 - protein, 180 aa, Artificial Sequence; identical to SEQ ID NO: 9122
  Synthetic

SEQ ID NO: 9124 - protein, 180 aa, Artificial Sequence
  Synthetic
REVEEMIKELEELLKDLKEKNERASKRNRELVRRLEEENKRVIEELKKLVKELEDLVRSGEDEKVLREVLKRLEEVLERVRKLNERVLEKIEKSLEEVKRSNERVKRRLKELLEEAERRVDSEKLKELRDVIKEVKKRIDELDEYTRESIRRAKKEIERLNRETKKVIEEVVKRIEEERK

SEQ ID NO: 9125 - protein, 180 aa, Artificial Sequence; identical to SEQ ID NO: 9124
  Synthetic

SEQ ID NO: 9126 - protein, 174 aa, Artificial Sequence
  Synthetic
SEKEEVRRVIEELRRILKRVLEDLRRVVKENEDRLRELKKENEKSLRELEERARRIDIDEKVLRRIEKMIKDSEENVRESVRRNERLLEESKKHMKEVADRVEKILRELRDLVEKGVDVEDLKREIDRVAKEVEEVLEENRRRNEKSVEELRRDSKRNHERNEEVVKEAEDAAR

SEQ ID NO: 9127 - protein, 174 aa, Artificial Sequence; identical to SEQ ID NO: 9126
  Synthetic

SEQ ID NO: 9128 - protein, 174 aa, Artificial Sequence
  Synthetic
SEEERVRKALEELKRELDKVHENNKRSLRENEETLKKLLEDNERSLRELEEEMRRVDIDEKVLREAKRKLDESRKNVERSAKENKDLVDESRKHSDKVRREVEKILRDLEELVRRGVDVEELIKTLRRVAKEVRERSEENDRRNKKSVDELREDSKRNHDENDKVLKKLEKAAE

SEQ ID NO: 9129 - protein, 174 aa, Artificial Sequence; identical to SEQ ID NO: 9128
  Synthetic

SEQ ID NO: 9130 - protein, 178 aa, Artificial Sequence
  Synthetic
DEVEKLEEDSERSLEELRKTVEEVKKRSEDSLRDLERKSRENEKESRRTLRELREKDQDKRLIEELMRRDVEHIKRSLREHERILEEDLRRLKKVLEDLERRIREDLRRLEEVLKRQTDERVRKRVKDAAEKSRRVIEDLLREIKRVADDSRREAKRLLDRNKEVLERSKETADREKK

SEQ ID NO: 9131 - protein, 178 aa, Artificial Sequence; identical to SEQ ID NO: 9130
  Synthetic

SEQ ID NO: 9132 - protein, 178 aa, Artificial Sequence
  Synthetic
DEVEKLAEDSKRSLEKLRREVEKVKRESRESLKRLKEESEKNVRDLRRLLEELRRRPEDKKIIREEVEKALRHLEDSLRRHEEEMRKDVRRLEKVLEKLKKIITEDLRRLEEVLKRLTDERLLKRVKDVMDESRKVIRELLELIKEVIRESKETVKRLLDENKRVADEVRKVVDELRK

SEQ ID NO: 9133 - protein, 178 aa, Artificial Sequence; identical to SEQ ID NO: 9132
  Synthetic

SEQ ID NO: 9134 - protein, 184 aa, Artificial Sequence
  Synthetic
SEVEEVEREVKEVIEELDEIVKRVKEENDDSVRKSKRSLDEIEAEVRRVLKELTDRVTKRKTEDVRRELEKEIDRVRRKLEKILEDNRKKAEEDLTRTRKIAEELRKKIEDVVRRLEEIVKRLDKEEVLERLTRLIEKLKDVIRRLRERLKKSADDSRDVIRRTLEAIKEIIERLKEVIDRLDK

SEQ ID NO: 9135 - protein, 184 aa, Artificial Sequence; identical to SEQ ID NO: 9134
  Synthetic

SEQ ID NO: 9136 - protein, 181 aa, Artificial Sequence
  Synthetic
DEIEKLREDVKKTLEESRKSVEDLERRSEDSIRRSRESVERLKREVKEVIDRLRDARRRGTPEEKIEELLKRVRDRIEEVLRRNERLVEENKKEITRVLDTNRRLNEESNRELKRVLDKTRDKRVLDEIKKLADEDNKTVTDSLKRIRDSAKKVDEVVRESLERIRKVAEEITKVVEDVKR

SEQ ID NO: 9137 - protein, 181 aa, Artificial Sequence; identical to SEQ ID NO: 9136
  Synthetic

SEQ ID NO: 9138 - protein, 181 aa, Artificial Sequence
  Synthetic
SELETLEKSLRDVLKESRDSVEKLRKEVEDTIKESEDSVTKLLKEIEDVIRRLEDLRRRGVPEEAIKKLVREVAEAVKEVLRRNRELNKRSNERAKEVVDRNRKLAEDLLDEIRKVLAKVTDEDVLRRIRRAAEEVRKVAKESVDRIRDLAARDNEVVERSLKKIEEVLRRIKKVADDVAR

SEQ ID NO: 9139 - protein, 181 aa, Artificial Sequence; identical to SEQ ID NO: 9138
  Synthetic

SEQ ID NO: 9140 - protein, 181 aa, Artificial Sequence
  Synthetic
SEIERLEREVREVIKESEESVRRLKKRVDDTVRENEELVKRLEDRVRRMKERLEDARRRGRPEKDIEELLKTIAKEIKDVLEESRESNERSNTDIKRVLEENTKLVKDVLRRIERVLDKSTDDDVKRKIRKVMEEIKKRADDSRRKIEDVARKDNKAVERSLRRIERLLEEITRVVEEIKK

SEQ ID NO: 9141 - protein, 181 aa, Artificial Sequence; identical to SEQ ID NO: 9140
  Synthetic

SEQ ID NO: 9142 - protein, 181 aa, Artificial Sequence
  Synthetic
SELEKLDKESRDSIRKSEDSVRRLEEESEESIERSKRLVEELKRLADEVIRRLEDMARRGTDKTKIRELIKRLKELAEEVVKRNSELVERNRRRIEEVERTNEELVRRNEETIKEVLKKTRDEDVLRAIEESMKRARKAVEDSLRRIRESLEKVKEEVRRSNEKIKKIVKEVREVVERIAD

SEQ ID NO: 9143 - protein, 181 aa, Artificial Sequence; identical to SEQ ID NO: 9142
  Synthetic

SEQ ID NO: 9144 - protein, 181 aa, Artificial Sequence
  Synthetic
DELEDLEREVREVIEESKRLLEELEKRVKEVIKTSRDSVRRLKERVDRVIKELRDAKRRGEPREKIRELVERLKREVEKVERENDDLLRRVAEEIERVVEENSRLLEEVKRRIEEVLARTRDEDVLRKIRELLEEIRRVIEETNRRIKKLLEEIKRVADDSRRRIRKVAREVEEEAKEIEK

SEQ ID NO: 9145 - protein, 181 aa, Artificial Sequence; identical to SEQ ID NO: 9144
  Synthetic

SEQ ID NO: 9146 - protein, 181 aa, Artificial Sequence
  Synthetic
SVRERIDELEKKIKRVVEKVLKENKDSLKRVEERVRRLLEENKRSLDEVREAVERVLSEVRDKRELLEKLRRILRENEKRNTESLREHERILEENKRRNEESLKRHKDLLDEVKELIDRARDLEDVEKLERDVEKVIEDARRTSEEVKRENDKALKDLDRLSEEVEKENRKALEDLKRTSD

SEQ ID NO: 9147 - protein, 181 aa, Artificial Sequence; identical to SEQ ID NO: 9146
  Synthetic

SEQ ID NO: 9148 - protein, 181 aa, Artificial Sequence
  Synthetic
SVRETIDKALKKIRDVAEDLKRRNDELLKEIEEVARDSSEKIRRALEEVERRVREVLKRVKDRRELLRTIEELLKEIRKEVEDVHRRNKRLLEEIRKIVKRSKDEHERLLKEVKETVDRMRDLEDVEKLKKDIERIIRELEELSDRLKKIIEEVIKKSEDLVRRLRESLERVLREIDKTTK

SEQ ID NO: 9149 - protein, 181 aa, Artificial Sequence; identical to SEQ ID NO: 9148
  Synthetic

SEQ ID NO: 9150 - protein, 181 aa, Artificial Sequence
  Synthetic
SVREEIDRILREIEEVVKTSSERIKRLLEKIEEVVKRLIEENRRVLKRTDEEADRLLKEVKDDKDLLRELRDLLKKARELNTEITERLKRLLDRIRELIEKVHRENEKLLREIRERIKEARELEDVDTLRKEVKEVIDTSEDLVRRLEEEVRKAAKRLKDLVDDSRRLNTEILRTLRERRR

SEQ ID NO: 9151 - protein, 181 aa, Artificial Sequence; identical to SEQ ID NO: 9150
  Synthetic

SEQ ID NO: 9152 - protein, 177 aa, Artificial Sequence
  Synthetic
DDLKRLEEDVRRIIEENDRIVKDIAEKSKKSIEDNRRLLKRLRDESERTIDDIRRLKEEGQDRRRLEEVLEEDHRLVKEINERSKKILDEDHKLIEEINKRSKDLLDRIRRLAEKAAEKRDVEEIRRLLKEITDVVRESNRRIKRINETAHEVVRRSNTETTKVNKKAHDVVEEVKR

SEQ ID NO: 9153 - protein, 177 aa, Artificial Sequence; identical to SEQ ID NO: 9152
  Synthetic

SEQ ID NO: 9154 - protein, 181 aa, Artificial Sequence
  Synthetic
SLIEKIREIVKEIIKRSDDSVEEVKRRNEESIRRSEESVKDNRRRIEDIIRKLKRLKEEGRDRRDVEDLVRRIVEESKKTLRENEKLLEDDRRINEKILEDNKRLLKKAREDLKRVLEKTTDDDMLRKIEALAREVTEVSKRALEEIRKLMEESTEVSKRALERIEASVEEVRRVAEEVKR

SEQ ID NO: 9155 - protein, 181 aa, Artificial Sequence; identical to SEQ ID NO: 9154
  Synthetic

SEQ ID NO: 9156 - protein, 181 aa, Artificial Sequence
  Synthetic
SLLEEIEKEVREIIKRSRKSLEEVKRRNDDSIRKSEKLVEDNKREIEEVKERARKLKEDGTDRKRIRELMERIERSSEETLKENSRLVTRDREINEEVLRRNRKLLEEIRRRLEEVLRRTTDKRVLEEIDRLAKDVKRVSDEVLEEIKRLAKESKEMADRSNEEIKKSVEEVRRVVEEVEK

SEQ ID NO: 9157 - protein, 181 aa, Artificial Sequence; identical to SEQ ID NO: 9156
  Synthetic

SEQ ID NO: 9158 - protein, 181 aa, Artificial Sequence
  Synthetic
DEIEELEKLIRKAIKDSRDLVRKLEEENKRSIDTSRELLKELERMLDEVRRRLEDLKRKNGSSEELRDLLRRIKERAKRVHEKNEELLRRDDKRNRDVHRRNEELLREVEKLVRDVARKIDKEELLREIKKLLDTIRRVIEESSERIKKLAEDSREVVKESSTEIKRLLETITEVVDRVTK

SEQ ID NO: 9159 - protein, 181 aa, Artificial Sequence; identical to SEQ ID NO: 9158
  Synthetic

SEQ ID NO: 9160 - protein, 181 aa, Artificial Sequence
  Synthetic
DEVEEAEKLIRKVIKDSEKLLRDLADLNRKSIRRSEKLVEDDRRANEDVIRKLEELRRNNGSEEELRRLLKEVEDTNRRSHETNKRLLDEDRRLNKEVHDRNEKLLRDIKRLVEEVEKRIDKEELLRRIKKLLDEIKKAIEDSSREIKRLLEESERVAKRSSEDIKRTLDDTRRVVEEVRR

SEQ ID NO: 9161 - protein, 181 aa, Artificial Sequence; identical to SEQ ID NO: 9160
  Synthetic

SEQ ID NO: 9162 - protein, 183 aa, Artificial Sequence
  Synthetic
DVEETVRKLIEDVKRVMERVRKSNTDLIRRSKEVLKDARRLHEELTKEVKDVLRRLEEEVKDEDTLREIRKKITELLKENERVLRDVERNVREDVKRLKENLDDNKRKAEEVIKDLERVMSSDKREVVKRVEEDVRKKLEESTKDSKRVERESEENLRRAKEKSKRVLKKLKDDLRRLEEESR

SEQ ID NO: 9163 - protein, 183 aa, Artificial Sequence; identical to SEQ ID NO: 9162
  Synthetic

SEQ ID NO: 9164 - protein, 183 aa, Artificial Sequence
  Synthetic
SVKETVKDLEREVREVLKKLRDDVRKLIEESDKALKRLKKIHDDLSRDVRRVLEDLRRRVKDEDTVREIERKARELDKKNRDVARDVERNVREDIKRLEDELRKLEDEIRRLEEELREVSKIEDKKMIDDVVRRVRKKLKEIDEKVKDVERKSRENLKRLKEKSDRVAEDLKKILDELREEVR

SEQ ID NO: 9165 - protein, 183 aa, Artificial Sequence; identical to SEQ ID NO: 9164
  Synthetic

SEQ ID NO: 9166 - protein, 183 aa, Artificial Sequence
  Synthetic
SVEETITELIKEVRKVAEEVKKSNKEVIEESEEALKELERTHTELSEEVRKVLRELEEEVKDEDTLRRIRKAIRDLDEENKRVLERVRKNVKEDIERLRENLKRNEELARRVIRELEKVMRVDKKEVVTEVVKEVKKRLEESKDDSRRVMEESRRNLKKLREESKRVVEELRRELRRLKEEVR

SEQ ID NO: 9167 - protein, 183 aa, Artificial Sequence; identical to SEQ ID NO: 9166
  Synthetic

SEQ ID NO: 9168 - protein, 183 aa, Artificial Sequence
  Synthetic
DVEETVRKLIEKVKRVLERLEEEHKRLSDDSRRVVKKLKDDVEDLIRRVEEVLKELERRVKDEKTLKDIRKKIEELIRELREVAKRLEDNAREDDKENREVLKRVREEIRRLIEKLKDMMRVEDRKAVDEVRKEVDRRLEELKRDSERVVKKSEENLRRLEEEVRKVEEKVRRTLKRLKEEAK

SEQ ID NO: 9169 - protein, 183 aa, Artificial Sequence; identical to SEQ ID NO: 9168
  Synthetic

SEQ ID NO: 9170 - protein, 178 aa, Artificial Sequence
  Synthetic
DKLEKVLEEIKRRLEENERLLRKVERDLKRLSKENEDRLRKMLEDLRKLSEDLLRSVEKDKDLKEEIRDVIEKLRRLNDELRKDTERSLKRLRELNEEARKRSEDSARRLRELIKELKRDRDVEKVDELLKEVEEIIDRSRKEIDRTRKDNERSVKRSEDAIRKTLDENEKSLREATR

SEQ ID NO: 9171 - protein, 178 aa, Artificial Sequence; identical to SEQ ID NO: 9170
  Synthetic

SEQ ID NO: 9172 - protein, 178 aa, Artificial Sequence
  Synthetic
SDVEEMEKRIRDRLRENRRIVEDVAKKLRDLSRRLEEEVKKVAEELRRLSDELRKRVTRRKELRRDIEEVLKRLRELNKRLREDVDRAMRELRELNKELDKRSEESLKRLEELARDLARRKDVERVKDLLREVKRVIDESKKTIRDTLEENEDSIRRLRERIDETLKENEKSIKELKD

SEQ ID NO: 9173 - protein, 178 aa, Artificial Sequence; identical to SEQ ID NO: 9172
  Synthetic

SEQ ID NO: 9174 - protein, 178 aa, Artificial Sequence
  Synthetic
SSVEEVKKELDKILEELKEKSERSKEEVERVLKKLREKSDRVEREVRKAEERLRRKVKDIREDELKEELTKEVKEVLEKNEEIAKELTREVKEVNRKNEKILDELRREVERVEEKIRRRLEDDETVERLLKKLKDVLEELRRRHEEVSKRLEKVLKELVDRHKKVTEDLKRVLDELRK

SEQ ID NO: 9175 - protein, 178 aa, Artificial Sequence; identical to SEQ ID NO: 9174
  Synthetic

SEQ ID NO: 9176 - protein, 184 aa, Artificial Sequence
  Synthetic
SLEETLKKLIEEVEEVLRRSEEIAREAIRRSERVLEELERRHKKVTDEIKEMLRELRERIDDKDTLKKVTDKIRELLRENEDVLRRVREEVRRDVEELRRALEDNKRKVERVIEELEEVLKKLKREELVERVLDKVRRDLEDSRRHLEEVKRKSEESLKKLKKETKDALDTIREKLKRIADELR

SEQ ID NO: 9177 - protein, 184 aa, Artificial Sequence; identical to SEQ ID NO: 9176
  Synthetic

SEQ ID NO: 9178 - protein, 184 aa, Artificial Sequence
  Synthetic
SMEEKVKRIIKKVDDVLKDSERRITELIKKSRDVLRELEKRHEELTKRVKDVLDDLRRKIRDKDTAKKVEDDVRRLLEENKRVLEEVRESVKRDIERLEEVLRRSRKHIEEVKERLDRVLKKVTDDRAVDTVRKEVEKALEENRKTVRDVEEESDRSLRRLREKTDEVRRRVEEILKRLKERVD

SEQ ID NO: 9179 - protein, 184 aa, Artificial Sequence; identical to SEQ ID NO: 9178
  Synthetic

SEQ ID NO: 9180 - protein, 184 aa, Artificial Sequence
  Synthetic
ELEERIKELIKKVRDVLRKSKEEVDKVIRKSEEVVRETEKLVEDIIRRVEKVLDEVRKRIKDKDTLKEVKELAETVIRKLEKILRDNKELVDRDIERLKKVARESEKHIREVERELEEVLKKLKTKELVRTLERRVEEVLRRNEELVKRVREESDRSIDRSRRSLERAEEDVDRVLKEVKDRTT

SEQ ID NO: 9181 - protein, 184 aa, Artificial Sequence; identical to SEQ ID NO: 9180
  Synthetic

SEQ ID NO: 9182 - protein, 184 aa, Artificial Sequence
  Synthetic
DLEKKVEDVIREVEKVLRELRRRHEELTKRSEDAVKETKDRVKEIEDEVRRVVDKVRKDIKDKDTLERVERKAEEVIRRLRRILEENKKSADRDVRRNEDMLRRVEKTVRDVKRKLERVLKDLKTDELVKELKRDVERVLKRLKERSDEVRKESEKSIKKSKDSLEKAEREVREMLRDLDRETK

SEQ ID NO: 9183 - protein, 184 aa, Artificial Sequence; identical to SEQ ID NO: 9182
  Synthetic

SEQ ID NO: 9184 - protein, 184 aa, Artificial Sequence
  Synthetic
SMEERVKELIRRVRKVLEDTERRAKEIIEDVERVLEELKKRHEDLTRKVDKVLKELKKEIRDEDTLREVEKTVRDVLRKNETVLREVEETVRRVIKRLEEILRRNRKKIEDVERELDKVLKKVTDEKLVTKVEEDAERALRESEESLRKVEREVKRVLEELKRKTEKVARELDKILKELKDRTR

SEQ ID NO: 9185 - protein, 184 aa, Artificial Sequence; identical to SEQ ID NO: 9184
  Synthetic

SEQ ID NO: 9186 - protein, 184 aa, Artificial Sequence
  Synthetic
SLEDELRKLIEDVKRVAKETEDRVREILKRSKDVLDELKKEHDKLTREVERVLDELAKEIKDKDTLREVKKRVDDLLKRNEDVVREVEKIVEEDLDRLRRILEENKRLAEEVIRRLEEVMKKLKTEELVKKVKKEVEDVLRRSKESLKKAEEDSRKSLEELKKKTEDLKREVKEILDRLKERVR

SEQ ID NO: 9187 - protein, 184 aa, Artificial Sequence; identical to SEQ ID NO: 9186
  Synthetic

SEQ ID NO: 9188 - protein, 184 aa, Artificial Sequence
  Synthetic
SELEKLKREVDEVLKRNKELVDELRKRVRKALEESRRSVEEVERRVEEVLKRLEDDLRREKSKEVIDKLRKLVEDLIRELEDLLRKNKEKAERLLEELKKLLDESRRHIEELEKELKKLLDRLDKEELKEKVRRILKEVRRVLDESRRDVERVLREVEKVMRESIKKARDAIRKVEEVLRELER

SEQ ID NO: 9189 - protein, 184 aa, Artificial Sequence; identical to SEQ ID NO: 9188
  Synthetic

SEQ ID NO: 9190 - protein, 184 aa, Artificial Sequence
  Synthetic
RELDDARRKVEEVLKTNKDLVDKIRKEVEETLERLDRSSRKVREIVRRVLEELTRRATERKTEDVERELAEVVDRVIKELRRIVEENRKLSEKSIKELRELLERSERHIKRVIDELKSLLDRIRTEELKRLVEKLIKEVEDVLEESRKAVEDVIREDKRRMEESKREADELIREVKKVLDDLRK

SEQ ID NO: 9191 - protein, 184 aa, Artificial Sequence; identical to SEQ ID NO: 9190
  Synthetic

SEQ ID NO: 9192 - protein, 184 aa, Artificial Sequence
  Synthetic
KELEDLEREVREVLKRSDESLKRLEEEVRRVLDENDKEVKRVKEKVKKVLDELREIVTRRKTEDVKRKVKEDVTRLLDELEKELRRSEDHIRRLIERLEKELRKNRERIKELKERLKSLLSRLDKEELKREVERLIREVEEVLKKSEEAVRRLIEEVDRALKRSREEFTKAREEVKKVLEDART

SEQ ID NO: 9193 - protein, 184 aa, Artificial Sequence; identical to SEQ ID NO: 9192
  Synthetic

SEQ ID NO: 9194 - protein, 182 aa, Artificial Sequence
  Synthetic
DEIDKARKDIEDMLRRLRDLVRKLEDLNRKVVEELKDLVRKDRKLNEDIVRRLERLVRERPDVQEDIERLLKEVRKMNKDTLRKIRELLEKIKDLNRRIEEEIKRLLKEARELVRDVEKRIDDEEVKRRIEELLRRVDKVADEVRREVERTNRESEEVVREVEEDVRRSLEEIDKVIKDVRT

SEQ ID NO: 9195 - protein, 182 aa, Artificial Sequence; identical to SEQ ID NO: 9194
  Synthetic

SEQ ID NO: 9196 - protein, 182 aa, Artificial Sequence
  Synthetic
SEIDELRKRVEEVLRRLDELVKRLKEENDRVVKKAEDLIRRLEETNREILKKLRKLVKDDKDNQEAIDKLAKDAHKTNRDILREIRELLKRIHEKNREMVERIRKLLRDVERMLRKVEKEIDDRDVLEKIKDLLRRVKEVADEVEKKIRELNKKTEDVVRELEERVRKLDEDVKRVIEEVKR

SEQ ID NO: 9197 - protein, 182 aa, Artificial Sequence; identical to SEQ ID NO: 9196
  Synthetic

SEQ ID NO: 9198 - protein, 182 aa, Artificial Sequence
  Synthetic
SELDEIRERIERIEKDLERLVEEVKRVNDTIVERIKKLIDEVRKENEKVIKTLRDLVREVPELKEKIRELLKRAHEVNRRVEKTIEDLLREVEKVNDEIRREIEKLLETATRLLDEIRRRIDDEKVEREIRRLLERVKEVIERVKDRVRRVDKKSRDVVREARRAIEEVDRRVRKVVREAEK

SEQ ID NO: 9199 - protein, 182 aa, Artificial Sequence; identical to SEQ ID NO: 9198
  Synthetic

SEQ ID NO: 9200 - protein, 182 aa, Artificial Sequence
  Synthetic
DEIKKLEDEVKKILDDLRELIRKLEETNRDVERRLRELIAELRKRNDEVVKRLRDLVRRSKDSKEEIDRLAEEIKKENEDILRKIEKLLEEARETNERILRRIDELLKEAKRLIDDVLRKIDDEDVKRKIEEILRRVEEEIRRLKKEVERLDRESKRVIRELREDVKRTNTDVKRVVDEVRK

SEQ ID NO: 9201 - protein, 182 aa, Artificial Sequence; identical to SEQ ID NO: 9200
  Synthetic

SEQ ID NO: 9202 - protein, 181 aa, Artificial Sequence
  Synthetic
SLVERLEERVKRIIDELRRILEENRRRVKKVSDENRDLLRRLEEENKKIIEDLRDLKRKGRDRKEVKRLVDRVRKTNERVLETVDRTATRLREKSKESLERLRKTVREVVEEIRDVMRKVDDEKAKDKLRRLEEEIRKVAKEVEDELRRSTEYVKKSLEDAKRKLEELTKRTEDVAEEVER

SEQ ID NO: 9203 - protein, 181 aa, Artificial Sequence; identical to SEQ ID NO: 9202
  Synthetic

SEQ ID NO: 9204 - protein, 181 aa, Artificial Sequence
  Synthetic
DLVERVEEKVEDIKRKLRRILEEVDRRNKEVSKENKELLDRLEEENERIIRELEKAKRDGTDRRKLKELIDRLRRINEDVRRKVDRTVKELKKINKKILEELEELVRRVKEEIKRVMDEVQDDRAREKLKRLVEDIDRVAEEVKRTLEELSRYTDKSLEDAERSLERLTKETDEVLKRVTT

SEQ ID NO: 9205 - protein, 181 aa, Artificial Sequence; identical to SEQ ID NO: 9204
  Synthetic

SEQ ID NO: 9206 - protein, 178 aa, Artificial Sequence
  Synthetic
SIVERLKKLAEDVIRRLERLSKELAKRNKEVIERLKELSKRLEDKNRRVIEELRRTKDEEEIKRLLEEARRTNKKVLDDSKKLLDEVRETNRTVAETSKDILREIEEVVKRVLDEVRELEEVKRAIEELRDRIRKVIEDSERTIRKLNDDTRKVVEDSRRTIEELNRTTDKVIEEVRR

SEQ ID NO: 9207 - protein, 178 aa, Artificial Sequence; identical to SEQ ID NO: 9206
  Synthetic

SEQ ID NO: 9208 - protein, 178 aa, Artificial Sequence
  Synthetic
RKVDELRKEVKRVIDELRELSERLRKENERVIKTLEDLVRRLEKLLERVERELERTKGKEEVRKIMKRIEDVARKVLRELEELLRRAEKINKDVLDRSREIAKRARDILKKVLDDVKDLEEVKKEIDRLRRELDRVIKESEDTIRRLNDETRKVIEKVRRAIEELLRRIEEVIKKVEK

SEQ ID NO: 9209 - protein, 178 aa, Artificial Sequence; identical to SEQ ID NO: 9208
  Synthetic

SEQ ID NO: 9210 - protein, 178 aa, Artificial Sequence
  Synthetic
SIVEELRELVKEAIKRLKKLSDDLRRKNEEVIRTLKELLDRLKRKNEEVIKRLEDTKGKEEVDRLMEEAKELNKRVEDTLRELMDRARRTNEEVERRSKELLKEIEKVLRDVLRRVSTLEEVKREIEKLKRDVERVIEDSRRTIEELNRKTEEVIERVRRTIERLNEETKKVIDRVRT

SEQ ID NO: 9211 - protein, 178 aa, Artificial Sequence; identical to SEQ ID NO: 9210
  Synthetic

SEQ ID NO: 9212 - protein, 178 aa, Artificial Sequence
  Synthetic
REVDELRKRVEEVIRELEKLSEDLAERNRRVSERNKELVETLARLNKRVIDELRRTKDKEEVDKLLKEVRELNKRVEEEIDKSLEEARRVNEEVVERSKRILERAEKILEDVLRKVKDLEEVKKAIDDLRRELEEVIKRSKKTIDDLNRYTKKSIEDVREAIKKLNKETDDVAREVKK

SEQ ID NO: 9213 - protein, 178 aa, Artificial Sequence; identical to SEQ ID NO: 9212
  Synthetic

SEQ ID NO: 9214 - protein, 178 aa, Artificial Sequence
  Synthetic
SIVEELKKLVEEAIRKLEKLLEELEEKNRDAIRRLKELSDELRKKNEEVIERLKRTKDKRELERLADEARRTNEEVVRRSDKLLEEIKRTNEKVKRELDELLRRIEKIVKDVLDRVRELEEVKRMIEKLRRDVEKVIREVRDEIRRLNDTTRRVIDKSRKTIEELNRTTEEVIERVKR

SEQ ID NO: 9215 - protein, 178 aa, Artificial Sequence; identical to SEQ ID NO: 9214
  Synthetic

SEQ ID NO: 9216 - protein, 176 aa, Artificial Sequence
  Synthetic
DEEEVMRELKKEIDEALERSKEINDRLRKEIRDVLEKLERIVREVKERSERVLEDVRRKVDSKKLERVEKIIRESEKHVDEARKEIEKRIKELEDRVRENTERVKRIIEELRDRVRKLGGVKEAVDEIRRILREALEEDKKSVEDIRRDLDKIEKDVKKVLEDNERLLKRLREEVK

SEQ ID NO: 9217 - protein, 176 aa, Artificial Sequence; identical to SEQ ID NO: 9216
  Synthetic

SEQ ID NO: 9218 - protein, 176 aa, Artificial Sequence
  Synthetic
DEEEVMKELEDRIREVDKKIEDRLRELKERSDRVLDRSRRINKKLKDEIEDALRRVRRDVDSKDARDVDRIIEELKRRVEENSRRVEEIIRRSRKHVEDLLRRAKEIIKKLEDEVRKLGGIKEAVDTIERKLRKLEEDLKKVERDNKKLLDDMERDDRRSLEEIKRILDELLEKVR

SEQ ID NO: 9219 - protein, 176 aa, Artificial Sequence; identical to SEQ ID NO: 9218
  Synthetic

SEQ ID NO: 9220 - protein, 176 aa, Artificial Sequence
  Synthetic
REEEVMKELDREIEEVLERSREIVERLRREIEEVLKENKKIVETLKREIKKVLREVREKVDSKDARRAEEIIERLERRVEENEKRVKEIIDELRKLVKRALEESEKSIRELKDRVRKLGGSEEAVKRIRDILEKDERDVREVVRRIREILKASLEDSERSVEEIRRILDELRKEVE

SEQ ID NO: 9221 - protein, 176 aa, Artificial Sequence; identical to SEQ ID NO: 9220
  Synthetic

SEQ ID NO: 9222 - protein, 176 aa, Artificial Sequence
  Synthetic
REEEVMERLRREIEKALRESHEIDDRLRKRIEDVLRDSERKLEELRRRIKKVMDDVRRDVDSERLREVEKIIKELEERVDDLRKKSRDSARRLKELVDESNKRSRDIARRLKEEVDRLGGSEEAVRKIREELERMKEENDRVLKEIDKDLKDDDRKIEEVVERIERILRELRERVR

SEQ ID NO: 9223 - protein, 176 aa, Artificial Sequence; identical to SEQ ID NO: 9222
  Synthetic

SEQ ID NO: 9224 - protein, 176 aa, Artificial Sequence
  Synthetic
DEKEVADELERKIDEALKESHEIDKRSDDHDKEVLKKSEKRLRELDEEIKDVLRKLEKKVDSELLKRVRDIITKLEKEVRDLLEESRKSIEDLHKHNRESNKDSRDIIRELRDRVRKLGGSREAVETIERILKRMIERNRAVVETNKKLNKEDEDKIREVVKRIREKLRKADEEVR

SEQ ID NO: 9225 - protein, 176 aa, Artificial Sequence; identical to SEQ ID NO: 9224
  Synthetic

SEQ ID NO: 9226 - protein, 181 aa, Artificial Sequence
  Synthetic
ETEDKVRELLKRIRDVAEKAREKVEELVRRNEEVLKRARETVERLVRKNEEVLREVAERARSRKLDEIRREIEKTIRDHKRIVEEVRKEIKRSIEEHRRKVEKVIRELEEVLKTIERIMRRKERDKKELEDTVRKVLEDLERKLERLEEESREVERRVKKVLDELKRKSEESEKRLEEAAR

SEQ ID NO: 9227 - protein, 181 aa, Artificial Sequence; identical to SEQ ID NO: 9226
  Synthetic

SEQ ID NO: 9228 - protein, 181 aa, Artificial Sequence
  Synthetic
DAEEVVRKLEEELKRLIDKLRKVMEESLKRVKESMDRSRKRIEELVRRLEKILRDLKRDREEIEEVIRELREIIERLKDKIKKDLDTSRRIADENRKDIEDVVRDLERIAEELRRIAARDGREDVLRKLKETVERVRRKVEEVIKKSRESVKRVEETNTRSLRELEETVREVEKRVREESR

SEQ ID NO: 9229 - protein, 181 aa, Artificial Sequence; identical to SEQ ID NO: 9228
  Synthetic

SEQ ID NO: 9230 - protein, 182 aa, Artificial Sequence
  Synthetic
SEVEKLLKDLKELLEEVKRRAEESHRDLRRLLEEVRKRVEDSNRELERELRRAEDLVRRGNKSSDLVEELRKIIEEMEKKHKDLVDELRELIKKVIDDHEKLIRDLERLIRRVEEELERKTRDRKMERVVEEIRREVKKVLEDLRRILKESEDAARKVLRDLERLVKHSKDTAREVLKRLKK

SEQ ID NO: 9231 - protein, 182 aa, Artificial Sequence; identical to SEQ ID NO: 9230
  Synthetic

SEQ ID NO: 9232 - protein, 182 aa, Artificial Sequence
  Synthetic
SEIEKLLRDLERLLEEVKRKAEKTNRDLEKLLEEVKRKVEDSHRKLKKVLDEVKDLVRRGDKSSELVRRLEEIVRRAREEHERLVRELEELIKEVERRHEEIIRELEELIREVDDRMRRTTKDERVKRLVEDVRRRVKEVLDDLRRIIEHSRRRAEKVLRELEKLVRESETKAREVLKDLKK

SEQ ID NO: 9233 - protein, 182 aa, Artificial Sequence; identical to SEQ ID NO: 9232
  Synthetic

SEQ ID NO: 9234 - protein, 176 aa, Artificial Sequence
  Synthetic
SEAERLLEDSKRVLDEIREDLKRLLKESEDVMREIEKTLEKLVRDVERVLDEVRKSRDDKKKVLDELRKILEEVEKRAKDLNEENKRIMDKVRREVEELIKRNEDIMREVEERAKRDNVDERVLRTIKDLHRRLSEEVKRVLDEAEELHRRLSERVREVLEDIRRLVEELIEEVRK

SEQ ID NO: 9235 - protein, 176 aa, Artificial Sequence; identical to SEQ ID NO: 9234
  Synthetic

SEQ ID NO: 9236 - protein, 176 aa, Artificial Sequence
  Synthetic
SEAEDLLRRSKERLDEVRKRLDELRRRSERVVEEIRRLLKELLDDVERVRKEVKEARDDKKKVLEELRRILKRVEDEVRDILRKNEDAAREVAKEVKRIDDDNERILRRVADKARKDKIDDRVLRTIEDTHRRLSEDVKRVLKEAEELHRRVTEEVKDVLRKIRETAERLEEEVKK

SEQ ID NO: 9237 - protein, 176 aa, Artificial Sequence; identical to SEQ ID NO: 9236
  Synthetic

SEQ ID NO: 9238 - protein, 176 aa, Artificial Sequence
  Synthetic
KEAEELLDTSRRVSEEVEKRLEKLLRESERVAEEIRKRLEELLRRVEKVLDELRKARDDKRKVLEEVTRALEDVERRVEEINRENKEEADRVRRDVERIDEENKRAAEEVKERARKRGIDEKVLKTIEDEHRRLSESVERVLRTAKRLHDEVSKEVRDVLEEIRRTVEKIIREVRT

SEQ ID NO: 9239 - protein, 176 aa, Artificial Sequence; identical to SEQ ID NO: 9238
  Synthetic

SEQ ID NO: 9240 - protein, 184 aa, Artificial Sequence
  Synthetic
SVEEVLKTLEDLARESSEEVRRVAEEIERSNRRVVKEVEKVLREIEELNRKILEEVERDLDSKDVDRLRREIERSLDESRKIIEKLRRDIEEVNKKSRKTIKDLEKENRDVVRKVRDIARKEDKMEEVLRELLKEVAKVVEDTRRKLEELLKENEEMDRDLKRKLDELLERNREVLERLKRKVD

SEQ ID NO: 9241 - protein, 184 aa, Artificial Sequence; identical to SEQ ID NO: 9240
  Synthetic

SEQ ID NO: 9242 - protein, 184 aa, Artificial Sequence
  Synthetic
SVEEVLKELEKLVRDSSREIKKVLEEIDKSNTDLLREVEDALRRIEERVKEALESVDRTVRSEDARRLKEELEELLKRVREIIERIKREIERVNERSREIIERLREDNDRVRKEVKKIIDKEDRVREMLERLLDTLRRRLEETRKELERLLTENKKKDDEVKEKLKRAEEELEDVRRRLEEKLR

SEQ ID NO: 9243 - protein, 184 aa, Artificial Sequence; identical to SEQ ID NO: 9242
  Synthetic

SEQ ID NO: 9244 - protein, 185 aa, Artificial Sequence
  Synthetic
SAEEVLRRLKEAIKRLIRDSERVLEEIRRTNEELIKRTEEVLRRVREKAERLIDDVRRRLSDDKRVKEVIDELKEMLERLEKKIREDIEELERNLRRNEKRVRDDIRRLEEMLKELERKISEVRGIDEALRRIEKEVRDVEKRSKETLEDSKRDSERVRKKSEDTLREIETRVEDVRRKAEEEVR

SEQ ID NO: 9245 - protein, 185 aa, Artificial Sequence; identical to SEQ ID NO: 9244
  Synthetic

SEQ ID NO: 9246 - protein, 176 aa, Artificial Sequence
  Synthetic
SESDRIRAIVKKVVDESKESLKRLKEETERVKRELDRVLKENKDKVRRLKEKAEEMKKLEDRKALKKVVDELRDALRESEEHIRKVLEDNERVLRRVEKEVKDDIRRLEKILEDIERELRSDVLREVAERVTRLIRDSERVLEELAREHEKASRKVKKVLDESKKIVDDVIRRVDR

SEQ ID NO: 9247 - protein, 176 aa, Artificial Sequence; identical to SEQ ID NO: 9246
  Synthetic

SEQ ID NO: 9248 - protein, 176 aa, Artificial Sequence
  Synthetic
SESEEIERTVEDVKRKSDKSLEESRRNVERLKEESEESLERNKDLVRRVAEKVEEVKRDSREEALRKVVRELEEALKRSEDHVRTDIKRLKDNLDRNRKKIEDDIDRLRRILEDIERRIRSEAADRVREEVTKVIKKSEDVLRDSERLHREVIKTSRDVLDKSRRLVEEIIRRVRR

SEQ ID NO: 9249 - protein, 176 aa, Artificial Sequence; identical to SEQ ID NO: 9248
  Synthetic

SEQ ID NO: 9250 - protein, 181 aa, Artificial Sequence
  Synthetic
SDVERVLREVEEIIRKARDRSREWLERVKKIIEKVKEDSKRWLDEVRKLIRDVEDIRRRGKADDKTVEKITREARKRDEEHKREVEKVAKTIEDLNRKHEEEVKDILRRVKELLEDLRRRSDTERVREVIDRIRKLLKDIIDEARDVNKKVRDLLKRIVEEVTEVNKRVKELVEEIVRRIK

SEQ ID NO: 9251 - protein, 181 aa, Artificial Sequence; identical to SEQ ID NO: 9250
  Synthetic

SEQ ID NO: 9252 - protein, 181 aa, Artificial Sequence
  Synthetic
DELREALKRVADIVRTIEEAVRKSLEDSKRIVDDIRRASKEALEEVEKIVRTLVEIVRNGRADEKVVRKIATDAEDLSRKHKEALDRILDELKKLNEENRRALEEILRRVKRLLEELKKDVDRKEVRDVIREVEKLLREVEKIVRDVNRESERLAKEVRDDATEVNERVKELLKRAEAAVR

SEQ ID NO: 9253 - protein, 181 aa, Artificial Sequence; identical to SEQ ID NO: 9252
  Synthetic

SEQ ID NO: 9254 - protein, 179 aa, Artificial Sequence
  Synthetic
SVVEELRRTVKELLDEIKRRDDRLLKEVEEVAREVERKDDELRKKVEEILRRIKELRDRGRVDKRDIDRIVEELRRISEEHKKEVERLKDDIRRRSREHEKEVRRLLEEAKEVLKRAKEENRVDDRVLKELKELMDEAKKNSERVNKKVEDLLRRLDESSRRVNEEIEKRLTELLKAVE

SEQ ID NO: 9255 - protein, 179 aa, Artificial Sequence; identical to SEQ ID NO: 9254
  Synthetic

SEQ ID NO: 9256 - protein, 179 aa, Artificial Sequence
  Synthetic
SVVEELLKRVRERLEDVDRVLRTWLEEVERLAEEVKRLDRELEKDVKRILDTIEELKRQGRVREEDIKRILTEAEKRSREHEKRVRDLLERLKREDDRVNEELKRLLEELKDELRKAKEENNVDDKALEDIKRLLEELRKRVEDVSRRVNKLLRDLEENSKRVNDELRKRVETLVERVR

SEQ ID NO: 9257 - protein, 179 aa, Artificial Sequence; identical to SEQ ID NO: 9256
  Synthetic

SEQ ID NO: 9258 - protein, 175 aa, Artificial Sequence
  Synthetic
REIEKVLKELRDIVRELEKLLEDVVRKIRKIVEETRKLLEDVVRESDKIHRDAKELMERAGVDERLVRRLDKHAKDHKKDVEDIIRENEENLKKLDKEVRDIIRELRELLKELEKANIREDELRKRIAELAERVKRMVKKLDEHAKRDFRRVEEEVRRLRENVKRVKDEVDEAVR

SEQ ID NO: 9259 - protein, 175 aa, Artificial Sequence; identical to SEQ ID NO: 9258
  Synthetic

SEQ ID NO: 9260 - protein, 175 aa, Artificial Sequence
  Synthetic
SEIEKVLEELRRRVEELEERLKTVVDELKKIARRTEEKLDKVREEIERIYREAKDLLRRAGVDERLLKRLDEDLKRLEKKVRDVKKENRDNLKRLEDRIREIIEELRRRAKRLEEANVRSDELRKAIAELERRVDKMLKELRDHITRDEDRVRRILEELRRHVERSLKRVREEVN

SEQ ID NO: 9261 - protein, 175 aa, Artificial Sequence; identical to SEQ ID NO: 9260
  Synthetic

SEQ ID NO: 9262 - protein, 181 aa, Artificial Sequence
  Synthetic
SELEKVLEDVERRLRELKERNDRVLEEITKIHEDAKRENDEVLKEISRAHKEATEELERKIGDKKRLEELKKELEKHNKEIEDSVRELKKKLRKHNEDLRKSVEEMKEELERALKEVREVIRDSSLEELRRKLKELEERSERHLEELRRSAETVLRESREHLRRLEDSLRRVRKKVKEETD

SEQ ID NO: 9263 - protein, 181 aa, Artificial Sequence; identical to SEQ ID NO: 9262
  Synthetic

SEQ ID NO: 9264 - protein, 181 aa, Artificial Sequence
  Synthetic
SEIETVLRDVKDKLEKLKRDNDKVLDEITKIHEEAMRRNDKVLEDIRRALEELKKRLEEKIGDKEELKELKKELDDALRRLKESVDKVKKELRDHNKTLEESVRRVKEKLDRVLEEVRKVAETARLEELKKELKKLEDESRKHLEELRRSLEEVTRRSDKHLKELKDRLEELRRKVEAATD

SEQ ID NO: 9265 - protein, 181 aa, Artificial Sequence; identical to SEQ ID NO: 9264
  Synthetic

SEQ ID NO: 9266 - protein, 181 aa, Artificial Sequence
  Synthetic
SELEKVLEEIRRELEKLERANKKVLDDAKRIHDKAKEDLRRVLEEIKRRLEELEKRLEEAIGDDKRLEELRKKLRKVLEELEKRARDVERELDEHNDRLRDSVRRMKRRLEEALKRIARVIETSRVEELRKELEDLRRESEEHLERLRDSARRVLEKVRRILKELRDRLRELAEEVKRATD

SEQ ID NO: 9267 - protein, 181 aa, Artificial Sequence; identical to SEQ ID NO: 9266
  Synthetic

SEQ ID NO: 9268 - protein, 181 aa, Artificial Sequence
  Synthetic
DELETVLKRVEDLLRRLAEELRRVLEEARETLERLKAANEKVLEEITRTHEEAKRRLDRDIGDKKELEELKKKLDRHNEEIRRSVEEVKKRNEEMLDTIRRKVETVKRKLDEALKRVAELIKTSRVEELDKEAKDLVKEVDEILKRIREELKKLKEDNDKHLEELKESLKRVKDEVDEARR

SEQ ID NO: 9269 - protein, 181 aa, Artificial Sequence; identical to SEQ ID NO: 9268
  Synthetic

SEQ ID NO: 9270 - protein, 181 aa, Artificial Sequence
  Synthetic
SELEDVLRDAERIIREAKEDNERVLRRLKETVEKLIKDNDEVLKKLTESHKKLTKELKDAIGDKKRLEELKKKLDEHNRRLKESVERVKRKNKKVLDELRRSVEEAKKENDRALDRLRRAIETSRVEELKEEIKDILRRNREHLEELKRRIDELRKENEKHLRDLEESIKEVEKEVRESRR

SEQ ID NO: 9271 - protein, 181 aa, Artificial Sequence; identical to SEQ ID NO: 9270
  Synthetic

SEQ ID NO: 9272 - protein, 181 aa, Artificial Sequence
  Synthetic
SEIETVLEDAERKIRELKKRLEDVLRRLAEIYTRAKELLKRVLDELRKIYEDLKKKLEEKVRDEKRLRELKRKLDEALRRHEKNIRDISKRLDDELRRHEEHIKDIMRKLDEILEELRRLAEKVRVEELKKRLDEVARRVEKVLRENEEEIKESLKEVEKMLRRNRKEIKDSEKEVDDEVK

SEQ ID NO: 9273 - protein, 181 aa, Artificial Sequence; identical to SEQ ID NO: 9272
  Synthetic

SEQ ID NO: 9274 - protein, 181 aa, Artificial Sequence
  Synthetic
DELERVLEDAETKIRDLKRKLKEVLDKLRRIYEELEERLKRVLEEIEEIYRRAAEALRRKVKDEDKLRELVKELKRMLDEHRDNIRRIKEDLRRRLKEHEDDIERAKEELDRILERLRRLIDKVRVEELKRELEEVAKRVEEILRRNEEEIKKSEEKIRKVLRDNREKAKRSLDRVREALK

SEQ ID NO: 9275 - protein, 181 aa, Artificial Sequence; identical to SEQ ID NO: 9274
  Synthetic

SEQ ID NO: 9276 - protein, 181 aa, Artificial Sequence
  Synthetic
DELKKVLDDARETSDRLKKENETVFRELEEIYRRLEKELRRVLRELEEIYRRAEDKLTKSVRDEDKLRDLRRRLKEELDRHRDNARRIVEKLKEMLDRHREDLERIREENDRLLEELERLIDDVDVSELDKRIRELERRNRESVKENRDRLKESADDVKRALDRNREELEESERRVKKAVD

SEQ ID NO: 9277 - protein, 181 aa, Artificial Sequence; identical to SEQ ID NO: 9276
  Synthetic

SEQ ID NO: 9278 - protein, 181 aa, Artificial Sequence
  Synthetic
SELEKALRDAEEIIKKAKKLLKEALDEAEKIYREAAKLLDDALREAEKIYREAADALDKKVKDEKRAREAKEELKRALKEHRDDAKRAKDELRKALEDHRRNIDKARRELDEIAKELRKLIKDADAKELRDRAKEAADRAKRAAEENRKKARESLERAKRAAEDNRKKAEESLKRAEETAR

SEQ ID NO: 9279 - protein, 181 aa, Artificial Sequence; identical to SEQ ID NO: 9278
  Synthetic

SEQ ID NO: 9280 - protein, 181 aa, Artificial Sequence
  Synthetic
SEIEDVLRRAKEISDRLKRENDRVLDELRRSYEDLERELEEVLRKLEETYRRAKEELRKKVRDKDKLKEIMKRLDEELKRHEEDIRRIVEELRERLDRHRRNIDKLKKENDDMLRELEKLVDKVDVSELRERIERLKERNRKSLEKNKRDIARSEEEVRKALERNEDEIRRSEEEVKKALK

SEQ ID NO: 9281 - protein, 181 aa, Artificial Sequence; identical to SEQ ID NO: 9280
  Synthetic

SEQ ID NO: 9282 - protein, 181 aa, Artificial Sequence
  Synthetic
RELEKVLEDIREISERLEKRNRDVLKELEDIYREAKKRLDDVLRKLKETYDRAEEELRRKVRDEKKLRDIVRELRDLLRRHEEDIRRIKKELDDELRRHEEDIERIRRRNEEALRELTKLIDKVDVSELRKDLRKLAEDNRRSLEENKKEITESLKEVEKVLERNKDEIRKSKERVDKALE

SEQ ID NO: 9283 - protein, 181 aa, Artificial Sequence; identical to SEQ ID NO: 9282
  Synthetic

SEQ ID NO: 9284 - protein, 181 aa, Artificial Sequence
  Synthetic
SELERVLDEMRKIIERLEEELRKVLEDLRRIYEELKRKLDDSLRESERRVRELKEELDRKVRDKDKLREVKERIDDALRRSRKRIEDIKRKLDDALRRHAEDIERIIKELRDILEELRKLIDKVRVEELKDTIDKVKKRVEDALEKNRRDIDESRKEVDDELRKDEEKAERLAREVEKAKE

SEQ ID NO: 9285 - protein, 181 aa, Artificial Sequence; identical to SEQ ID NO: 9284
  Synthetic

SEQ ID NO: 9286 - protein, 178 aa, Artificial Sequence
  Synthetic
SSDETVKEKVKKVARDVDRHVEKLRKALEEMEREVREHVKRLEDELRRMDEEVKRVREEPVDEERLKRITDRLREELRKLHEDSKDTIRKLREKLEKLKKETEDTKRRLRKKLEDLRREKGADEKVLRDAERIVRELERKLDKVDTEIAETVKRLEDTIRDVNRKIKDRVDKLRKELE

SEQ ID NO: 9287 - protein, 178 aa, Artificial Sequence; identical to SEQ ID NO: 9286
  Synthetic

SEQ ID NO: 9288 - protein, 178 aa, Artificial Sequence
  Synthetic
DSDEKVKRVLEELRKEVKEHVERLRARAEDMSREVKDHVRKLKEDLERMERDVERVKRKPTDEKTLKEIADRLRKILEDLERETEETKKRLEEKLRKLHKETEESKKRLEDKVDTIRKEKGASEEVLERVRTEVERLKRELDKVNEDIRKRVEELKKELDEVDDEIRKEVDRLEEALK

SEQ ID NO: 9289 - protein, 178 aa, Artificial Sequence; identical to SEQ ID NO: 9288
  Synthetic

SEQ ID NO: 9290 - protein, 178 aa, Artificial Sequence
  Synthetic
SSDEEVKKKLEEVKEEVKRHVERLKRALEKADRDVKDHVRRLKEVLKRMADEVEKVRREPVDEDRLEKVVRDLERKAEKLKRETEETAKRLRDILKELKDRTEKTKKRLRDKVREIRKEKGADEKVLKDVEEKIRRLEKELDEVNEDIERKVRELEKELRAVDEEIKRIVDRLRKELE

SEQ ID NO: 9291 - protein, 178 aa, Artificial Sequence; identical to SEQ ID NO: 9290
  Synthetic

SEQ ID NO: 9292 - protein, 178 aa, Artificial Sequence
  Synthetic
SSSERVKTELDRMRKEVKRHVEELEKELKRLTEKVKRHVEESKKNAEEITRKVEDVRRKPTSEEDLKRIIEDLRRNLKENRDRTERTKEDLRREVERLKKETEDTKRELERKLKRLREEKGASEEVLREVTREVTRLREELDEVNKRVEKRLEELERELDRSDEEVTRIVEELVDELR

SEQ ID NO: 9293 - protein, 178 aa, Artificial Sequence; identical to SEQ ID NO: 9292
  Synthetic

SEQ ID NO: 9294 - protein, 178 aa, Artificial Sequence
  Synthetic
SSEEDVRRKLEKMRKEVDEHVRKLEEDLKRLAEEVKRHVEDLERVAKEVADRVEEVRRQPTDKDELRKIVEELRDTLKKLRDRTEESKKRLEKLLRDLKKETEETKKRLRESLRKLEEDKGADKKVLDTARDILRKLEKKLDDVDEKIERIVEKLKRELDEVNKRATETVERLIRELK

SEQ ID NO: 9295 - protein, 178 aa, Artificial Sequence; identical to SEQ ID NO: 9294
  Synthetic

SEQ ID NO: 9296 - protein, 178 aa, Artificial Sequence
  Synthetic
RSDEELEKKLKELKEEVDEHVKRLEETARRLDKEVRRHVEESKRNLEEMDREVKEVRRRPTSEDELREIVKKLEDNLRRNRERTERSKERLERELDRLRRETEETKKRLRDKVKEIRDEKGADDKLLERAERTVRELERRLDEVNDRIRRIVEELKRKLDRSNEEVTRKVRELSKELE

SEQ ID NO: 9297 - protein, 178 aa, Artificial Sequence; identical to SEQ ID NO: 9296
  Synthetic

SEQ ID NO: 9298 - protein, 178 aa, Artificial Sequence
  Synthetic
DELERVVEEVRKRIERLKEELRRVHERSREIVDRLRKELEKSLEEVRRIVEDLKRKLRERGVPEEMLTRLERKLEEDEKRVKDIIRELERKLEEIAKTDKEIIDRLDEKLRELEERLKRGLREEDLERMADKLRKDVERAVRKNETDADKLRREVEEVVRRNKKTAKELEDEVRKELT

SEQ ID NO: 9299 - protein, 178 aa, Artificial Sequence; identical to SEQ ID NO: 9298
  Synthetic

SEQ ID NO: 9300 - protein, 178 aa, Artificial Sequence
  Synthetic
SEREKVAKEATDIVEELKKTLKDVHRRSKEIVERLVKKLADVNKDSRDKAEELKKRLDDRGVDKRVKKELEDRLRKLHRDDERIIKRLRDELKRIEKEDRDIIRRLDKELKDLARLLDKGLREEDVKRIAKKLEEDVRRVVRKNEEEIKKLAEEVDRVVEDNKRLVEELKRRVDEALK

SEQ ID NO: 9301 - protein, 178 aa, Artificial Sequence; identical to SEQ ID NO: 9300
  Synthetic

SEQ ID NO: 9302 - protein, 181 aa, Artificial Sequence
  Synthetic
DADDELRKIVEEADRRSKESVREIEELLRKLEREVEDIVRRIKKLSDDTRKRIDDLRKEGKTEELKKRVEKELRDNKEELKKILEEVRDRARRAREVLKEMEDRSREVVERIRKVLEDLRRKGVVSEEVLKRVEEIIKRLEEENRKVLEELERSVRKLEEDIRKVLEDNDRVVKELARRID

SEQ ID NO: 9303 - protein, 181 aa, Artificial Sequence; identical to SEQ ID NO: 9302
  Synthetic

SEQ ID NO: 9304 - protein, 181 aa, Artificial Sequence
  Synthetic
SAVEKLEELVERVARRIDELVKKIKELLDDVERKSEKTVRDLERLSEETKRSIDDLRREGKTEELLERVRREAKKNREKVKRVEERSRDLVRRVREMLKKIKREVDELLREAEESLKELKDRGVVSEEVLKRVRETLERLERKIKKVLDELKKRVEELRKKNEDVVRRNEEVVKKLVEDIR

SEQ ID NO: 9305 - protein, 181 aa, Artificial Sequence; identical to SEQ ID NO: 9304
  Synthetic

SEQ ID NO: 9306 - protein, 184 aa, Artificial Sequence
  Synthetic
SVEDVIRDLRRVITESRELSERVLERIEETTRRSKEESKRVADKVKKSSDDLREAVERIRTPEEEKDRLEKELRKLVEENRKSLEESKRDLDDLLRRNRKTVEESRRELDELRDRVEKVLKRGVSDEKAKELLRRVKEVVDRNKEKLDRDLERNKRRIDENRRKLEEDLRRNRKVVEELRKRLE

SEQ ID NO: 9307 - protein, 184 aa, Artificial Sequence; identical to SEQ ID NO: 9306
  Synthetic

SEQ ID NO: 9308 - protein, 184 aa, Artificial Sequence
  Synthetic
SVEDVAREIREVLRRLEESVRKVAEDNRRNNEELRRLVEEVLKRIRDSSDRLRKVVEDIDVPEEKKKELDKRLKKLIEDNEDSIRRLREKIERSIRENEERLKRITDRLRKLRKEVEDVLRRGVSDEVLERLLRRVREAVKELEDELERSSREDNRRSRELEEELKKDLKRNEDEIRDVERALK

SEQ ID NO: 9309 - protein, 184 aa, Artificial Sequence; identical to SEQ ID NO: 9308
  Synthetic

SEQ ID NO: 9310 - protein, 184 aa, Artificial Sequence
  Synthetic
SVEEVLRRAEEILTRSKEESRRVFEEIRETTERSKEVSKDVARRNKEILDDLKRKIEEVDVPKKDLERLEKRLRELEEHLERFLRESKRELDELLRKNEDTLRKSKRKLDELRKEVKEMADRGVSDDVLRRLLEKIEEVVRDNERELKEDLDRNRKVIEENRKKLEDHLRRTEEEVDDIRRKLK

SEQ ID NO: 9311 - protein, 184 aa, Artificial Sequence; identical to SEQ ID NO: 9310
  Synthetic

SEQ ID NO: 9312 - protein, 184 aa, Artificial Sequence
  Synthetic
KVEEVSKKLKDVLRELEELVERVLERNRENNERLRDKVRKVLEENKEVLDRLKKEVDDIDVEERKLRKIKRELEELERHLRETARRLEKKIRDSIEKNERDAERLRRDLKRLDEELKEVEARGVDEEDLRRLLEKIKREIDRLAKELEDSSRDDNRISRELDEELKRHLEETRRAVREISEKLR

SEQ ID NO: 9313 - protein, 184 aa, Artificial Sequence; identical to SEQ ID NO: 9312
  Synthetic

SEQ ID NO: 9314 - protein, 172 aa, Artificial Sequence
  Synthetic
SRAEEVLKKVEEEVKKLEDELRRSSERNNRESRRLEDELKKVLDKNRKLVEDLRRARLDEEDVRRTLEESEEENREIDKRARDELRKMEEENKDVLRKAREKLERIRKEIEEANLPKEVVDELRRVLERLRRVIEDVIRRNKEDTDRLEREIERVRKELKDINKKLEEDVRR

SEQ ID NO: 9315 - protein, 172 aa, Artificial Sequence; identical to SEQ ID NO: 9314
  Synthetic

SEQ ID NO: 9316 - protein, 179 aa, Artificial Sequence
  Synthetic
DEAETLLRDVERKVEELKRRSEKLLRDVEELVRRLLRSNEESLKKVKEDLKRLKDLVRRGDVDEETVKEVKKRLKEILDEDKKELREVIERAKEISKRHKEEVEKAVEDLKRILEDMARKGVRDEVLREVDRVIDDVRRALKKVNEEIEEVIRRLKRESERVNKEAEEIIRTLEDALRK

SEQ ID NO: 9317 - protein, 179 aa, Artificial Sequence; identical to SEQ ID NO: 9316
  Synthetic

SEQ ID NO: 9318 - protein, 172 aa, Artificial Sequence
  Synthetic
DDLERVLEEIRREIERIRRELEESNEENKDIVRRIEEELKELLKDNKRIVETVTKANLDRDDVRRVLEESKRKNRRVLERLERLIRESERRNKELLDRAREKIDRLRKRLEEANLDREVLERLEKELDRLRKDIERVADENRKINDTLRKRIEEVMARLDEINTDLKDRVET

SEQ ID NO: 9319 - protein, 172 aa, Artificial Sequence; identical to SEQ ID NO: 9318
  Synthetic

SEQ ID NO: 9320 - protein, 177 aa, Artificial Sequence
  Synthetic
SSDEVLKEIEEIIRRLEEEVRRVNKEVNKSTEDLRREVEEVLRRTNELIEELERRVTRTEELKRVIDELRDRDRKVRRRVERVIEESKKRDDESRKRLTRAVEKLRKDLKKLADDNVPEEALRKAIKDVRDIVKKVKDELKEWRDRNKELVDRLSEELKEWLKDVERVLKELTDKDR

SEQ ID NO: 9321 - protein, 177 aa, Artificial Sequence; identical to SEQ ID NO: 9320
  Synthetic

SEQ ID NO: 9322 - protein, 177 aa, Artificial Sequence
  Synthetic
SLEEVLERIKRIIDELKREAKRVLDETNTLIREVKKRLEDVNRDVNRLIEELRERVTDTEELKRVIERLRREDEKSKREIEREVETLKKRDDEVRKKLDDVAKKLRDDLKEAAERNVPEDMVRDLERRIREVVKRLKEDLERWKKEVEDEIKRLEDRLKEWLDRVREMLEKLREEDR

SEQ ID NO: 9323 - protein, 177 aa, Artificial Sequence; identical to SEQ ID NO: 9322
  Synthetic

SEQ ID NO: 9324 - protein, 177 aa, Artificial Sequence
  Synthetic
SSEEVLKTIKDIIDELRKEAEEVLRRTNESTKELEERAEEVNKRVNDSTRELAKKVTDTEELKRIIEESKKKDEDSRREVKKVLDESRKRDEEVRRSLKKIIEDLEKELRDLARKNVPEEMLDEVKKRAEKVVEDLRRELRKWLEDNKRLVEKLEKELRDWLKENKELVKELEDRDR

SEQ ID NO: 9325 - protein, 177 aa, Artificial Sequence; identical to SEQ ID NO: 9324
  Synthetic

SEQ ID NO: 9326 - protein, 177 aa, Artificial Sequence
  Synthetic
SSEEVLDTLRKLIEDLRRRAEEVLERTNRSTDELRKRVEKVLEETNRLIKKVEDDITRTEEAKTIIDKLREDDERVKRRIERVLEESKRKDEEVRKRVKDVLDRLREELKRLREENVPEDMLREALERIKEIIDRLERELEEWIKTNEDLVRRLTEDLERWLRTVAEILKRLKDEDD

SEQ ID NO: 9327 - protein, 177 aa, Artificial Sequence; identical to SEQ ID NO: 9326
  Synthetic

SEQ ID NO: 9328 - protein, 181 aa, Artificial Sequence
  Synthetic
DELERVEEEIKKLSDDSRRVIEEVRRRLEESNKDLERRLREVEKRLKELTDDIKRTAERNNVDKTLEKKLRELNERNRKSKEDLKRRSDETRERNDETIRESRKENDELERRVEEASRRGLDRELLRKLLDDVRRVVERNKRKLRKDLEDNKREIERVKREADKDLEDHERVIRKLKEDIR

SEQ ID NO: 9329 - protein, 181 aa, Artificial Sequence; identical to SEQ ID NO: 9328
  Synthetic

SEQ ID NO: 9330 - protein, 181 aa, Artificial Sequence
  Synthetic
DELERVVEEIRELSRDSERAIEEVRRELKRTNDENRESAKRVAEELKKLTDKIKEEADRNNVREDLDRELRRLNEDNKRSIRENEERLKKTKRENERTIEESKKRNKELEDEVEKAIKDGLDRELLRELLKEVRRVVEENKRRLEEDLKKNRKKIDDSNKELRKDLEDHRRVIEKLEREIR

SEQ ID NO: 9331 - protein, 181 aa, Artificial Sequence; identical to SEQ ID NO: 9330
  Synthetic

SEQ ID NO: 9332 - protein, 175 aa, Artificial Sequence
  Synthetic
DELEKVKEDIKRLLDDVRREVEKVNRDSRRLLEDLRRVVKEVSDRSKELAEDLERKVGRDEDVERVKRELEKLNRELERILEEAAREVKRLNKEHDDKLKKAEDDVRKLLEELERDNLPVEDVLREVKRLAEEVKKETKRVLDEIKKLVEDVARELERILEDSERLIREVEKRAT

SEQ ID NO: 9333 - protein, 175 aa, Artificial Sequence; identical to SEQ ID NO: 9332
  Synthetic

SEQ ID NO: 9334 - protein, 175 aa, Artificial Sequence
  Synthetic
DEIEDVLRRAKKLLDDLRRVVKKANDDSRRLLKKLKDKVEEVSRRSRRLAEDLERTVGRDEDVERVARELERLNRKLEDELRRVATEVRDLNDKHRRLLEKAEREVKRLIDELRERKLPVEDVLREVRKIIEDVKRASEKILEESRKLIEDVERRLEEILKRSEDLIRTVKERKR

SEQ ID NO: 9335 - protein, 175 aa, Artificial Sequence; identical to SEQ ID NO: 9334
  Synthetic

SEQ ID NO: 9336 - protein, 185 aa, Artificial Sequence
  Synthetic
DELERVLEEIKRLLDDVHRESKRVNEESERLVKKLHDDSRRVLTEIKKLLDDVRRVVEELPKTDELRRKLEEAERRIRELLEELKRRDKELEERAKRLNEKTKEDDKDAARKVEDLLRRLKDENGTREKVEEILRRVRELVKKWKTELERALEENEREVERWKRDLDRILEEVRRVVERVEREIR

SEQ ID NO: 9337 - protein, 185 aa, Artificial Sequence; identical to SEQ ID NO: 9336
  Synthetic

SEQ ID NO: 9338 - protein, 180 aa, Artificial Sequence
  Synthetic
DELEKLLEDIRRELKRVREDDKRHNDKVKETLDRVRELIKRLLELIKKVADEIRSLKRRVPREEIRKRLKELEKRLEDLRRTIDKLLKDLEDTSRRWNEESKKRLEELRRRLEKAERDVPRTREVEEVKRRIEEILKEAEETNRRSHEKAKRVLEELKDIVRKVLEELRRLLRELEEEVR

SEQ ID NO: 9339 - protein, 180 aa, Artificial Sequence; identical to SEQ ID NO: 9338
  Synthetic

SEQ ID NO: 9340 - protein, 180 aa, Artificial Sequence
  Synthetic
EELERLREEIKKILDEARERDETLLREIRREHEKNKRADEEHNRRVEETLERIERLAERVPREEIKKRLEELKRRSEKWNRDSERSLDEIRRRLKKWNDESRERLERAKRRLEKARRDVPDTEEVRAVERELRKILDEIRKTNKEVHDRIRELLERSKRSNDESHKKVEDVLRELKKRVD

SEQ ID NO: 9341 - protein, 180 aa, Artificial Sequence; identical to SEQ ID NO: 9340
  Synthetic

SEQ ID NO: 9342 - protein, 181 aa, Artificial Sequence
  Synthetic
SETDEVRKELRKLLEDSRRAVEEVKKKLDDSNKEVRDRVRRIREELKKLEKEVREIKRKNSDEKELADVVRRIREKAKELKKELRKILEDLDKKYKDLKKENKDILDDLDRRAEELKDRLRKNNVEEELLKELEEVLKRLRELHKRTIDEVEKSAREVKDEIRRLEEELDRVLKKLEDALR

SEQ ID NO: 9343 - protein, 181 aa, Artificial Sequence; identical to SEQ ID NO: 9342
  Synthetic

SEQ ID NO: 9344 - protein, 181 aa, Artificial Sequence
  Synthetic
SLDEDVERLIKELKDEARKLNEEMKEYVRDSERKVRRLNEEIRRLIEELKRKAEELKRGNLRRDDLKRRLDELREEVKEIKRRIEKVSEDLKKENDEAKRRLEEVSEELKKKVEEIKEELERRNVDDRVKERLERVLDEAEKSNEETLRELDDVSRRIEESNRRTLAELEKVLRDIEKDVT

SEQ ID NO: 9345 - protein, 181 aa, Artificial Sequence; identical to SEQ ID NO: 9344
  Synthetic

SEQ ID NO: 9346 - protein, 173 aa, Artificial Sequence
  Synthetic
SELEKLVEDLRRAAKESHERNEKLLDESRKTVEDVKRKLEEILRRSEEVVREIKKKKKDIDKEKVKRDLDELHKRTRDLLEKLKRELDELHKRSKEELEDNKRRLEELLEKVERDGADEEVRRRVEKLIEENRRSSRRVEEEDKRLLKELKDAIKRVEEEDKKLVEELRRSEK

SEQ ID NO: 9347 - protein, 173 aa, Artificial Sequence; identical to SEQ ID NO: 9346
  Synthetic

SEQ ID NO: 9348 - protein, 173 aa, Artificial Sequence
  Synthetic
KEVEDLVKEVKERIEESHKENKRILDKARRVVERVETDLRRILEESKRTVEDIERRKERIDEREVEKRLEELHRETKKLADKLRDELRKLLEDIERELRENEERLRRLLEKVERDGVDEEMKKAVDELIERNKRSSDRVREEAKKLIDRLEEVIEKVERDDEKLVRDLEEELR

SEQ ID NO: 9349 - protein, 173 aa, Artificial Sequence; identical to SEQ ID NO: 9348
  Synthetic

SEQ ID NO: 9350 - protein, 185 aa, Artificial Sequence
  Synthetic
SSLETLEKIARDLLREVKETLDRVREESRRLLEEVRRVAEESRKEVERLLKELEEVIRREVRDEKKVEELKRKLEELKRRVDEEHKKSDKRLKEILEENERTLKEVEDRLRELEKRVEDDLRRGLDDELLRELAERVRRVVKKIKDELRDDLRRTREEVERLKERHKELVKRVKEAVDKIREEIR

SEQ ID NO: 9351 - protein, 185 aa, Artificial Sequence; identical to SEQ ID NO: 9350
  Synthetic

SEQ ID NO: 9352 - protein, 179 aa, Artificial Sequence
  Synthetic
KEVEEILRDVARLVEDNRRVLERILREVEKLIRDNEERLKEILERSKDLVRRIEELIRRGEVDEDTVREIIERSEELNRRLEKHARDSERRLEKLAEDLRRHAKRSLDELKRLLDELEKRRSDVEEVRRAIEELLKDVERAYEEVVRRIEKLLDDLRRKYEEVKKENERLNRRVEEAAR

SEQ ID NO: 9353 - protein, 179 aa, Artificial Sequence; identical to SEQ ID NO: 9352
  Synthetic

SEQ ID NO: 9354 - protein, 179 aa, Artificial Sequence
  Synthetic
DDVEDILRDVERLVEENRRRLEEIVRESEDKVRKNDETLKKILEDVKREVERVERAIERGEVDEETVERIKKKLEELLEELRKHMRKSREESKDLNRRLREHAERSLRTLEELVRDLKRRRSDVKDVVRAIEELLKDVEEKYRRVSERNKELNKRVEDTYREVMKEIRRLLERVDRRAR

SEQ ID NO: 9355 - protein, 179 aa, Artificial Sequence; identical to SEQ ID NO: 9354
  Synthetic

SEQ ID NO: 9356 - protein, 175 aa, Artificial Sequence
  Synthetic
TEVERLVERVKEIVEEHRKKLEELARRSEELVERHEKKLRDLLRESRELVERAKKENSKDRTVLKELRDLVRELNKRSKELSEETRRRVAKTNDDSRKTSKRTREEIERLLRELERDDARDEIKERLKELLREAEEVSRRVNKRNEDLLRRLEKVSREVNERNEDLLEELDRTVN

SEQ ID NO: 9357 - protein, 175 aa, Artificial Sequence; identical to SEQ ID NO: 9356
  Synthetic

SEQ ID NO: 9358 - protein, 175 aa, Artificial Sequence
  Synthetic
DEVERLVEEVEKLVEEWIRDLERILDESRRTVEEWKKELKRLLDRSKRLVEDAKRKNSKDERVLRELDERVRRINEESKRRNDEAKKESERSLREIEKRNKEVADRVRDILEELRRKDAKKDIERRLERLMEELHRVSKEVLDADRELLKELHDVSREVNKRNEELLDELRKTVT

SEQ ID NO: 9359 - protein, 175 aa, Artificial Sequence; identical to SEQ ID NO: 9358
  Synthetic

SEQ ID NO: 9360 - protein, 175 aa, Artificial Sequence
  Synthetic
DEVEETVKRVREEVERWKEELKRIADEVRRLVEKVKDDLRRLLDESRKLVEEVRRENSRDDTVLKRVRDEVRKINEDSKRLLEEAKRRVEKIRREIKKRNDELEERARRILRELDRRDAKSEIKRRLEELLKELHKVSKDLDKILEELLREVEEVVRRVNETNKKLLKELDETVR

SEQ ID NO: 9361 - protein, 175 aa, Artificial Sequence; identical to SEQ ID NO: 9360
  Synthetic

SEQ ID NO: 9362 - protein, 175 aa, Artificial Sequence
  Synthetic
SEVEELVKRAAELADEARKRLERIMEEVKRLVDEWEKELKKLLDESKELVEKVRRENSKDERVLREVKKKIEEINKRSREENKKVAEKVREIEERIERLLEELKELIKRIEDKARREDLKEKVREDLRRLLDTLRKVVEELKRRLRELLKKLHDVSRKVNEENERLLRELEETVR

SEQ ID NO: 9363 - protein, 175 aa, Artificial Sequence; identical to SEQ ID NO: 9362
  Synthetic

SEQ ID NO: 9364 - protein, 175 aa, Artificial Sequence
  Synthetic
DEAEKLVDEVRELVRRHKETLKEILERVKELVKRWKDTLDKLLRDSEELVRRVKEENSKDERVLRKARKEVRDINEESKERNKELEKRMRRLEREIERVDRETEERIRRILDDARRKDLRDRVKEELKRLLKELKEMSKRLTEELRRLLKELHDRSREVNERNKRLLEEVDRTVK

SEQ ID NO: 9365 - protein, 175 aa, Artificial Sequence; identical to SEQ ID NO: 9364
  Synthetic

SEQ ID NO: 9366 - protein, 181 aa, Artificial Sequence
  Synthetic
DEIREVEERNRRSNEEMKKAVREVEKDIERVAREIRKRAEEVSKRNEDINREIRKTLRDKKKLTDILRESKELNRKLEELVKRIKDELDKLLEDLRREVRKIEEESKRTNEDLKKKAKDGTSDETLRRVIRKSEELLKRLKDRLDEVRKRVEEILKRAEERLREVIKRSEELLEEVKRESD

SEQ ID NO: 9367 - protein, 181 aa, Artificial Sequence; identical to SEQ ID NO: 9366
  Synthetic

SEQ ID NO: 9368 - protein, 177 aa, Artificial Sequence
  Synthetic
SLLEEVEKTLRKIVEDSDREIKRVSKKNKETVKRLEELMREVNRRSTEIVKRIRDSDLRTEELKRLEEEARKLNDESREILERVTRESERLDRELKKHADESRERAKDLIRRLKKLGDKEMLDRIIEEAKRLHEENKRKLEEVERRSEELLKELKRRLEELIKRNDDLLREVEERKR

SEQ ID NO: 9369 - protein, 177 aa, Artificial Sequence; identical to SEQ ID NO: 9368
  Synthetic

SEQ ID NO: 9370 - protein, 181 aa, Artificial Sequence
  Synthetic
DEVEEVIRRAEELVKEVKKRLEELIRESEALLERVKRRLERLIEESRRRLEEVKKKVSSGLDEKTLKEVLDRLRRDVERINEESKRVLDEVEKEIRRTNKKIKEILDRIRKKVEDLEKELRDRGAKDEIKKRLRKLLEEIKKVVDDVRETNKRTLERLEELARRVNEENKKILDDLEEAVR

SEQ ID NO: 9371 - protein, 181 aa, Artificial Sequence; identical to SEQ ID NO: 9370
  Synthetic

SEQ ID NO: 9372 - protein, 181 aa, Artificial Sequence
  Synthetic
KEVDEVVKRAEDLLREVKKRLDEVIEDSERLLREVRKRLEEIIRESEKLLEDVRKVVERGLREDELKKLLDDIRKKIRETDEKLKKTLEDLRRAADEINRRTEDILRRIEEKVKRLRDELRTRGAKKEIEKRLEEILREIKKLVEEVNRRNEDILRRLEREVEKVRRVNEKTLERIEETVR

SEQ ID NO: 9373 - protein, 181 aa, Artificial Sequence; identical to SEQ ID NO: 9372
  Synthetic

SEQ ID NO: 9374 - protein, 185 aa, Artificial Sequence
  Synthetic
SLVEDIRRDVKRILKEIDKLVKDIEEENRRASRESERLVETIRREVKEVLDRIRKLVRDVPLDEKTLRRIEERIERLRDSIEKMERRMEELNKEHERRVEKILREIEKLLRELDKELEDVAKEPGDRKLIEEIRRRLKKALEDIRRLIEESRKRVEESLTRSRKLAEDIRRELEDVLRKVDEDAK

SEQ ID NO: 9375 - protein, 185 aa, Artificial Sequence; identical to SEQ ID NO: 9374
  Synthetic

SEQ ID NO: 9376 - protein, 177 aa, Artificial Sequence
  Synthetic
SRVKEVADRVRDIVRRIKDEIKEHVDRLRDVIRRIKEKLEEHSRRLREIVERIRASNLDKDEVKDKLDKMKKNAEEVHEDIKRKLEDAKRRTEKTKRDIERKLEKLERDVRRAADTVDEELLKRLEDIIRKLLEDIKRVVKELEEVSRTLLREIEELLEENRKSMEKLLRDIEEEAR

SEQ ID NO: 9377 - protein, 177 aa, Artificial Sequence; identical to SEQ ID NO: 9376
  Synthetic

SEQ ID NO: 9378 - protein, 177 aa, Artificial Sequence
  Synthetic
SKVDEVVKRLEDAVREIKKEIDKHSKELADEVEKIKKELKDVSDRNREVVRRIREANLSEKDVTETVKEAEKRNRDIEKRIREELKRLEDNVRDMHRKLDKKLKELKRTVEEMRRSVDEKKAEELRKRVDDLLEEIRRLLEENKRTVDKLLDEIKRVLEDHRRSVEELLREIDKDAK

SEQ ID NO: 9379 - protein, 177 aa, Artificial Sequence; identical to SEQ ID NO: 9378
  Synthetic

SEQ ID NO: 9380 - protein, 175 aa, Artificial Sequence
  Synthetic
SEVDEVLREAKRIVDEVHKDNERATEESRRLVKKVHEENEEMVKDIERIVKEVKDANIDEKLVTEILKEIEEALKEAARRNKEVKDRLRELSRRVSERNREILEELKERLDRVRERRKDVKELEREVEKLLKRIEESLRRHRKENKRLLEELDRSLRELAKIVKEVLDEIRERTR

SEQ ID NO: 9381 - protein, 175 aa, Artificial Sequence; identical to SEQ ID NO: 9380
  Synthetic

SEQ ID NO: 9382 - protein, 175 aa, Artificial Sequence
  Synthetic
SEIEDAVRRIEKRVEEVHRENKKLTDESRKLVREVDEENKKVSRESKKLVEDARRRNADEDIIRELLKELKRRSEEVSKRNEKILKELDDKSKEVAKRNKRVLDEIKRTLKEVLDRRKDARELSEKVREVLEKIKKSLEDHRKANEDLLREIRDSLKKHRDENRRLLKELEETRK

SEQ ID NO: 9383 - protein, 175 aa, Artificial Sequence; identical to SEQ ID NO: 9382
  Synthetic

SEQ ID NO: 9384 - protein, 175 aa, Artificial Sequence
  Synthetic
SDLDRVAKELTEIVERIIRELERLTEKSRDIVRKVHKENEDAVRKIRKIVEEVKRKKIDEDTVREILRRIREELKRLKERNEEILERIKEESERVERTIRKVLEEMKRKLDRVRERRPDARELEKRVRDLLRRVEEALRRHKEENRKLLEDIKRSLEEVAKEVERVLKEIKDTAR

SEQ ID NO: 9385 - protein, 175 aa, Artificial Sequence; identical to SEQ ID NO: 9384
  Synthetic

SEQ ID NO: 9386 - protein, 175 aa, Artificial Sequence
  Synthetic
SEMDDVLKKLAETVKRIIERLKKLTDDSRRLVEEVHRRNDKLSKESREAVRKAEERNIDEKDVRKLLEDLKKKSEEVAERNKRILDTLREISKRAEDEVRKVLKELEKTLKELEDRRPDVRELSEEVKKLLDEVRKALKRHKDENDKLLKEIEDSLRRHKEENDRLLEKLKESTR

SEQ ID NO: 9387 - protein, 175 aa, Artificial Sequence; identical to SEQ ID NO: 9386
  Synthetic

SEQ ID NO: 9388 - protein, 175 aa, Artificial Sequence
  Synthetic
DEAREILKEIRDIADELRKRLERLTERSERIVREVDKENRRVVEEIREIVERVKKAKIDEDTVRKILREIEEKLDRVAKRNEKILKKIEDDSRRVAKEVREILKKIEDILDDARRKRKDVRELKKEVERVLEEIRRLLEEHERANRKLLKEIRDSLRELKKRVEEVLREIKEATK

SEQ ID NO: 9389 - protein, 175 aa, Artificial Sequence; identical to SEQ ID NO: 9388
  Synthetic

SEQ ID NO: 9390 - protein, 175 aa, Artificial Sequence
  Synthetic
SEAEEMLERIKRRVEEVNKENKKMTDESKKIAEDVDRDNREVLREIKRIVDEVRKRNIDEDTVRKIEREIEKTLEDVRRRNDEILKDIRRLSEEASRRNKEILDTIRETLKRVRERRKDVKELEKEVERVLKEIKDSLRRHRKENEDILREIKESLDELDKEVKRVLKEIRDTAR

SEQ ID NO: 9391 - protein, 175 aa, Artificial Sequence; identical to SEQ ID NO: 9390
  Synthetic

SEQ ID NO: 9392 - protein, 175 aa, Artificial Sequence
  Synthetic
SELEEVAKELRKTLEDSTRENKKHTDDVRRIVDEVDKRNRKAVEDIRKIVDEVRKRKIDEDLVREILRRIAEKLRRLREENRRILEEIKKSLRDMERRNEKINRETKEKLDRVKERRKDARELEEIVKRLNERDKEVLEKDAEDVKRVLEEIKESLERVARDVERVLEDIKRATD

SEQ ID NO: 9393 - protein, 175 aa, Artificial Sequence; identical to SEQ ID NO: 9392
  Synthetic

SEQ ID NO: 9394 - protein, 181 aa, Artificial Sequence
  Synthetic
SALEDLERKVEELIRRLDELLREHRETLERLIRELDKLLTDHHRRNRELLERIKDVVRKAGRELEDIREILERLKKLNEESADIVRRVKEELKRILEKSEKEVRELKETLRRTVEEVKRVKDEDKLRKIVEELERLVDEVRRSLEKASKRLKDLVKEVKKRLEDITRESEELVRRVEERTR

SEQ ID NO: 9395 - protein, 181 aa, Artificial Sequence; identical to SEQ ID NO: 9394
  Synthetic

SEQ ID NO: 9396 - protein, 181 aa, Artificial Sequence
  Synthetic
SALEELKKEIKRVIEELKRALERHHKENEELRKRIDEVLKEHHDANRRLLEEIKELVRRAGRDLEEIRRIEEELKELDKESEERVRKIKEELKKLNEDSRKKVEDLKKELEDDLKRVDKVKDEEKLKEIVKEIRKKVEELKDDLRRMSEESRRLVEELEERLRRLTERSKRLVEDVRRRVT

SEQ ID NO: 9397 - protein, 181 aa, Artificial Sequence; identical to SEQ ID NO: 9396
  Synthetic

SEQ ID NO: 9398 - protein, 172 aa, Artificial Sequence
  Synthetic
SEKEELDRKIEDVRKKVEETSRKLKRVNDESKKEVKRTSDELRKKSKEVNEAVEREGVREEILKEITDLSREMEERSEKLNREVDRLVKESRKRSKELNDEAERLLRDLARKKELDVEEAIRRLKETLDRHREEVEDLIRKSREVLKRHEERVRELIKRHEDTLRELKKRAK

SEQ ID NO: 9399 - protein, 172 aa, Artificial Sequence; identical to SEQ ID NO: 9398
  Synthetic

SEQ ID NO: 9400 - protein, 178 aa, Artificial Sequence
  Synthetic
SEVDELMKRLKDEAEDIKEKVERLIREWEEAARKIAERVEKLVRDWERVIETLRDLKKRVDKEELKKRLKDLEEEVKREDKKSKDDLRRLEERVERENKKSEDRLEELRKRVKDNENEDKDLAERLRRVLREVERLVRTVNKKHREVLEEIRKEVERVNDEHRRVLEEIKRRVEKDVK

SEQ ID NO: 9401 - protein, 178 aa, Artificial Sequence; identical to SEQ ID NO: 9400
  Synthetic

SEQ ID NO: 9402 - protein, 184 aa, Artificial Sequence
  Synthetic
SAEEKLDTEVRRIAEEVKRIIDELRKVTEEVEKRIREINKTSEDTSREVKKTIREVLKRLTDEETVRRVEEKLRKLDKESRDTLRRSEETLRELKRRSDETIRRLERILEKLEEEVEDMKRKPLDEDTVEEVLERLRRALEKADKLVKDHIKRLKDVLRAIEEDHRRHLERLRRMLEEIKKEVT

SEQ ID NO: 9403 - protein, 184 aa, Artificial Sequence; identical to SEQ ID NO: 9402
  Synthetic

SEQ ID NO: 9404 - protein, 184 aa, Artificial Sequence
  Synthetic
SVEEKLTREAERLLKRIEEVIRRLRDANRRSADRIRRIDEKTRREVEKLKKKIRELAKRVKDEEVLRRIEKLLRDLKREVEEVSRRNEEILRESNKRLREVEEKLREILRRLKERLDRVREKGIREDLVEKVIKTMRKIVEDLERDVRKVIRDDEELVERLRRENEEVIKKLREIVKRLEDETR

SEQ ID NO: 9405 - protein, 184 aa, Artificial Sequence; identical to SEQ ID NO: 9404
  Synthetic

SEQ ID NO: 9406 - protein, 184 aa, Artificial Sequence
  Synthetic
SLIERLREVAEDLKRRIRKVLEDLRRANEESAKRIRDIDRRTREANRESNERIKEIAKRVDDKRVLDELKKIVEDSNDEVRRVSERNEEILKRSNEDLKRVEDDIKRVLDELEKTLEEVDRKDIKEEKVKKVIDDMERIVREIEEKIKRVIERDKKLVKKLEEDNRRVIKKDKDLVRRLEERTR

SEQ ID NO: 9407 - protein, 184 aa, Artificial Sequence; identical to SEQ ID NO: 9406
  Synthetic

SEQ ID NO: 9408 - protein, 177 aa, Artificial Sequence
  Synthetic
SLKERLRDDAKRLLDEDRKVLEDLERRAKEINDRNEEIVKKLRDKVREILERIDREVRDKDEVTRVKRKIEEILRTLEDRIKKVNDRTREILDRVRKKSEDSLRELKRLLDEVRRVDKEEVIRRILEELRELVERSERTVRDIERELDELIDKSRRDVEEIIKDLERELEELKRKTK

SEQ ID NO: 9409 - protein, 177 aa, Artificial Sequence; identical to SEQ ID NO: 9408
  Synthetic

SEQ ID NO: 9410 - protein, 177 aa, Artificial Sequence
  Synthetic
RVREELEKAAEEVRRRDRRVLEELEKEVRRINEDNKRVHETSREVVERILETIDRRVRDKDKVREVKRDVERILEELEEINKKVNEDTKRIRDTVEKISEESERRLKRLTDEVRRVTDEDVIRKIVRELEELVRESKETVDDIIRRLEELIRKSREDNRKIVEELKKLLDDLTREEK

SEQ ID NO: 9411 - protein, 177 aa, Artificial Sequence; identical to SEQ ID NO: 9410
  Synthetic

SEQ ID NO: 9412 - protein, 177 aa, Artificial Sequence
  Synthetic
SLKETLEEVVKRVLETDKRLLEKNDRTVREVNERNRRVHEESRRAVERILEEIDREVRDDKRVREAKTRVREILRRLEEENREVNKRTKRSLEESRKTSKKSLDDLKRLLDEVRRVTDEDTIRRIAKEADDLLEDSRRKVEDNSRRLKRLLEESKKSNEEIVRRLEDLLRRLKKESE

SEQ ID NO: 9413 - protein, 177 aa, Artificial Sequence; identical to SEQ ID NO: 9412
  Synthetic

SEQ ID NO: 9414 - protein, 177 aa, Artificial Sequence
  Synthetic
SLKEELEEDVKRINDRNEEVLKRLREVAKKLLDDDRKLLKELKKVVEDVLRDVDREVRDKDKVKEVKERIKKILKEAEEMSRRSLEELKRILAEVERRVAELNKETKRILDEARRVKDAEVIKKILEELEKLIKDSEDTAREIIKELKELVERSKRKVEEILKELEDLLEELKRRAD

SEQ ID NO: 9415 - protein, 177 aa, Artificial Sequence; identical to SEQ ID NO: 9414
  Synthetic

SEQ ID NO: 9416 - protein, 178 aa, Artificial Sequence
  Synthetic
SMEEKAEEVIKEVDEENKRLIEEAEKVIEDVEREDRRLVDELRKVIEKVERTIERDLKDLKELLEEARKRLREVEDRLRRLHERTRREVEEVRKRLKELLDESKRNLDKVREDLERTGDKDVIEEIIERLRRHVEDSEEKIRRIIRRLEEVLKRSKEDIERIIEELERLLDEMRERAR

SEQ ID NO: 9417 - protein, 178 aa, Artificial Sequence; identical to SEQ ID NO: 9416
  Synthetic

SEQ ID NO: 9418 - protein, 178 aa, Artificial Sequence
  Synthetic
DMDRKLKEEIKRAERRDKELVKDIERVIEEVLRANKELIERIEKVIDDVRREIEKRLKDLKELLKRAKDELDKVRKDLKRLLEESKKNADRVREELKKLHEKSKEDMERIKRELDETGDKDVIEEIIERIKDILRESEREIRRIIKELREHLKKSADRIEKIRRELERLLEKLEDDAR

SEQ ID NO: 9419 - protein, 178 aa, Artificial Sequence; identical to SEQ ID NO: 9418
  Synthetic

SEQ ID NO: 9420 - protein, 182 aa, Artificial Sequence
  Synthetic
SEIEKILRELEEHIKDSEREHRELVERLRDHIRRSKEEHRDLIRKLEERIREVERRVRKDGKADERLREDVERLLRDIRRELKRNEDNVKEVNDRIRKRVEDNERDVDRENKRIKDELARSDNKELKDRLKRVSEEHKRRIEDLLRRTKRVSERHREEIRKLLETTERAIKKARETIERLRK

SEQ ID NO: 9421 - protein, 182 aa, Artificial Sequence; identical to SEQ ID NO: 9420
  Synthetic

SEQ ID NO: 9422 - protein, 182 aa, Artificial Sequence
  Synthetic
SEIDRLLERLEDHIRKSAKRHRDLVEELREHAERLKRDIERLLEELEKTVRDIEKEVRERGKVDKRIEDRMREVLKRLEDRLRELREDVRRVNEEIKREVRDNEEDVKRVNRELRERLKDSDDEDMKRKLEKVSEEHERKIKELLDRTKRASEEHDERVKRLLDELRRVLKEAEERLRELKR

SEQ ID NO: 9423 - protein, 182 aa, Artificial Sequence; identical to SEQ ID NO: 9422
  Synthetic

SEQ ID NO: 9424 - protein, 182 aa, Artificial Sequence
  Synthetic
ERIDRIIKELEDLVDESRKRNDDLVRELKKHIKESKDEHDRLVEELDRFVEEVRKRVEKDGKLDDRMEKEVEELLREVEDRLRRNKKNVDEVNTKIKEDLERNREEAERALKRLEDDLKDSDDEDAIRKLEDVLRKVRETHERLLDKSRDVSRKHREDIKELLKKTKTVIDRVRKRIKELRK

SEQ ID NO: 9425 - protein, 182 aa, Artificial Sequence; identical to SEQ ID NO: 9424
  Synthetic

SEQ ID NO: 9426 - protein, 182 aa, Artificial Sequence
  Synthetic
SEVERIEEELRREIEKVDRDNKKIVDEARRSIDELRKDVEDILRDLRRLVDEVEKMARRGEVDEETVKEIERRLEKLLREIEEKSRRHLERLEERLRKVHKENREVEKRLKERLEEVRRRGLSEELLKRVEDVVDEVRKRLERIDEKTRKAVKEVTDRNDELLKRVREVVKEVRARLEEIRR

SEQ ID NO: 9427 - protein, 182 aa, Artificial Sequence; identical to SEQ ID NO: 9426
  Synthetic

SEQ ID NO: 9428 - protein, 173 aa, Artificial Sequence
  Synthetic
SEKEKVDKVVKKVAKRIKDLLDEIKRVADESNERLERLLRRLEEASKRSKKKLKDDNLPEDLLKEVTERNERLLREARKVIKRVKEENKRLADEVKEEIDRVRETLKTLRDLVDERDVDTLIKELEDRIDEVEKRIRELIERDKRLVEEVERRIAELIRRDERLVEELKKREE

SEQ ID NO: 9429 - protein, 173 aa, Artificial Sequence; identical to SEQ ID NO: 9428
  Synthetic

SEQ ID NO: 9430 - protein, 173 aa, Artificial Sequence
  Synthetic
SEKEKLKDVVRDVERLIKELMERLERVHERTNREITRLLEDARRAMERSNKKLTDLNLDEDELREARKRNKELLREVERIIEEVRRRDEELRRRNKKTIDDVRRELKRIEEEADEKDVDDLLRRLKELIERVRKLIEDSIKELRDIVKEVKDRIKTLIERDKELVKRLEDRAR

SEQ ID NO: 9431 - protein, 173 aa, Artificial Sequence; identical to SEQ ID NO: 9430
  Synthetic

SEQ ID NO: 9432 - protein, 180 aa, Artificial Sequence
  Synthetic
SEVDKLVRDLERHIEEAKRRVEELLKEIKKLVEDTKREAKKLLDTLRKKVEDVERENSKDRKDVKKVEEDLARVREEIEKLLRDDERLLREIEERAKKEVDKVRKDNERLREDVERRLKDLEEMLRKMREVSERHKKTIDELRKELKKVLDEWRRRSEKIFEELDEVLKRVEERVKEVER

SEQ ID NO: 9433 - protein, 180 aa, Artificial Sequence; identical to SEQ ID NO: 9432
  Synthetic

SEQ ID NO: 9434 - protein, 180 aa, Artificial Sequence
  Synthetic
SEVDELVRRLREHIRRAKERVEELIKRIKTLAKETTDRARKLIEDLKRHIDDARRKNSKDERVLARVREDNDRLEEEIKRLLKEDRDRLEEIKREIDKDVKKVKDDNDELEKRVRKDLKDLREVLKKIKEVSDEHRKEIERLRKRLEEVLREWEDTSREVLERLKEVSKRHRDEIREVAR

SEQ ID NO: 9435 - protein, 180 aa, Artificial Sequence; identical to SEQ ID NO: 9434
  Synthetic

SEQ ID NO: 9436 - protein, 180 aa, Artificial Sequence
  Synthetic
SEMEDLIRRLREHIEDVRRKVEELIRELEDHIRRAEESVKKREDDLRRHIEEVRKRNSKDEDDRKKVEEDNRRLDEDIKREVRKVEEDNRRLMKRVEDLVREVEKNNEELRKRVEDRLKDLKEVLDEARRVSKEHKDTLEKLLRKAEEASERHKREIERLLKELKEVSEEHRRRIDEVRR

SEQ ID NO: 9437 - protein, 180 aa, Artificial Sequence; identical to SEQ ID NO: 9436
  Synthetic

SEQ ID NO: 9438 - protein, 178 aa, Artificial Sequence
  Synthetic
SEVEELIEDLKRHLKEVADRVEELERELRKHLEEHHRRVREIIRRLEDLLRKAEETRTDEKLKEDLERMLREVEREVRDSERHAKEVNKRVREKVRRIEEHVKRRNKDVEEKVERDVRREDLKRRIEKVSRDHERTVEKLVRDLERVSREHERTVKENKERIKKVLDDARKRVDEVKK

SEQ ID NO: 9439 - protein, 178 aa, Artificial Sequence; identical to SEQ ID NO: 9438
  Synthetic

SEQ ID NO: 9440 - protein, 173 aa, Artificial Sequence
  Synthetic
SEVEKLVRELEDVLRKIERKVRELSKDNKRVLDENKKRVEDVSRDNERAMREIEELRRKVDAKDIRERLKEIRDKNRRINEESKRLLRELEKKNEKMLREIEEDLRRLADEARKKTRDEELKKVLEDVKREVEKLLEEIKRSLEEARKTVKESNDEIRESLERLEEKVRRIEK

SEQ ID NO: 9441 - protein, 173 aa, Artificial Sequence; identical to SEQ ID NO: 9440
  Synthetic

SEQ ID NO: 9442 - protein, 173 aa, Artificial Sequence
  Synthetic
DEVKDLVKRLEEVIKRIDEVVKEVDRRNREVLERNRELVERSIRELREVLDRIRRRKKDVDRKDIEKILKELEDKSRKINEESKELLDRLRKENEKILREIEERLRELEDEARKKRRDSELDKVLEDVKRKVEEILRRIKRSLDEVERDVRRSNEENKKVTKEVREAAEEIKR

SEQ ID NO: 9443 - protein, 173 aa, Artificial Sequence; identical to SEQ ID NO: 9442
  Synthetic

SEQ ID NO: 9444 - protein, 173 aa, Artificial Sequence
  Synthetic
DEVEELVRRLREVLEEIRELVERVNDRNRRVLEENRELVTRSIEELRRALERIERLSKDVRREEIRKILEELEKRSRDINRESEELLRRLAKENKEILDRIKKILDDLREEAKRKTRDEKLKKVLEEVERRAKKLLRDIEESLRRVAREVERSNEENKKVTKEVADAVREIER

SEQ ID NO: 9445 - protein, 173 aa, Artificial Sequence; identical to SEQ ID NO: 9444
  Synthetic

SEQ ID NO: 9446 - protein, 174 aa, Artificial Sequence
  Synthetic
DEEKKARDVLERWRKRSEDLLRKAEDVLREWRERSERSFKRLRDVLEEARKRVEELNVPEEILREIRRRLEEMKREIEKLLKEDRDALKELADRIRKIVEDDRRKLRRIEKIVRETKIDDELVREIEEVVKETEKRVEELIKEIREMVKKNEREVREIERRLEETLEKIDRDRK

SEQ ID NO: 9447 - protein, 174 aa, Artificial Sequence; identical to SEQ ID NO: 9446
  Synthetic

SEQ ID NO: 9448 - protein, 171 aa, Artificial Sequence
  Synthetic
SEEEEIEKALRDWREELKRLLETIERLLREWKRRVEELKKRIEEALKELKKILDDKGVPEEVRKEIEERIRRLRRRVEEDEETVDREIRKIEEHVKRDATEVDKLIRELKKRREDVEEVKKKLEKEIKKNRENVDRLRRRLEEEVKRNERSVEEIKRRLDEIARELDERKK

SEQ ID NO: 9449 - protein, 171 aa, Artificial Sequence; identical to SEQ ID NO: 9448
  Synthetic

SEQ ID NO: 9450 - protein, 171 aa, Artificial Sequence
  Synthetic
SEDEEIKEALKEWRDEVRRLEEKIRRVLEKWERDVRRLKEEIKKSNEDLRRRLEEKGVPEEVRERIKERSERDKKKVKEDEEEVRRRKREIEEHLERDKRRVEKLIDDLRKRRDDVEEVKKRLKRLIEENRKNVKRLEERIREAVKKNEKSVEDSERENRDIARELDEKRK

SEQ ID NO: 9451 - protein, 171 aa, Artificial Sequence; identical to SEQ ID NO: 9450
  Synthetic

SEQ ID NO: 9452 - protein, 182 aa, Artificial Sequence
  Synthetic
EEVERLKERLERLSERSKEIAKRVHEENKKLSEESRKLVEDVHRENEEAAKRLEDVARRNELPEEVLRKELDDVRKRNKEILDTLREISKEVEKRNRKILEEIRKRSEEVRREVEEVERRLRGRELLERLRRVLEEHREVNERILEEIKRSLDEHKDTNRKLLEEIEKSLRDLEEIVRRLEK

SEQ ID NO: 9453 - protein, 182 aa, Artificial Sequence; identical to SEQ ID NO: 9452
  Synthetic

SEQ ID NO: 9454 - protein, 182 aa, Artificial Sequence
  Synthetic
REIEEIEKEVRDVSKESEDIVRTVHDENRRASERSRELVKRVDEENRKAVEDLERVARENREPKEALDKRLEDLKRRNEEIEKRLEEISREVSRRNEEIKKTIEKLSREVAKRLKEAEDRLKGDELLRRVRKLLEDHKRVNERLLEEIEKSLKRHREENERLLEEIRKSLEDVERVVEEIKR

SEQ ID NO: 9455 - protein, 182 aa, Artificial Sequence; identical to SEQ ID NO: 9454
  Synthetic

SEQ ID NO: 9456 - protein, 182 aa, Artificial Sequence
  Synthetic
SELEELEKRLRKAVRDLEEIVDRVRKDLERASDDSRRIVEEVHRENRKVAKELKEVRDRNEEDRTVLRDKLRRVAKRNEDILRKIKEDSKDVKRRARKILKEMADLLDTVRKEIEEVAKDLKGEELLEALERLLRELEKIVRKLLRELEEMLRRHEKTNRELLERIRRSLEELAKIVEDLET

SEQ ID NO: 9457 - protein, 182 aa, Artificial Sequence; identical to SEQ ID NO: 9456
  Synthetic

SEQ ID NO: 9458 - protein, 182 aa, Artificial Sequence
  Synthetic
DEIEEIKKELDELSKRSEKIVRDLERELREASKESERLVRKVHDDNRKALEELRDVRRRNDEDDKVLEDRLRKVEEENKRIKDELKKRSEDVAKRIEDILRDIERRSKEVAERAKEMEDRLKGDELLKEVRRALEEHERVNRELLERIRRVLEEHKRVNEELMREIDRSLKELAEIVKRLKD

SEQ ID NO: 9459 - protein, 182 aa, Artificial Sequence; identical to SEQ ID NO: 9458
  Synthetic

SEQ ID NO: 9460 - protein, 182 aa, Artificial Sequence
  Synthetic
DELEELRKELKKMVDEIEEIVRRVDKENRDASRESEELVERIVEEVRKAVTELKELKKRNESDRKELEKKLKEVAKRIKDLLRRLKEISDRVAEKNKRILEEIEKRLRDVEERIKRIEDELEGDELLKEVRKALERLKEEVKRVLEDIRRSLEEHRKVNERALRRIEEVLRDLERIVEEVKT

SEQ ID NO: 9461 - protein, 182 aa, Artificial Sequence; identical to SEQ ID NO: 9460
  Synthetic

SEQ ID NO: 9462 - protein, 182 aa, Artificial Sequence
  Synthetic
SEVERLKDELRKASEELKKEVEEIEKRLREMSERSRKLVEELKRTLKEIEKELKDIVRKDKEKKEELKRIVEEADRLVKEIEDRLRRLNEKSEEDAKEVDDRLKRKLDESRKRIKEVEKDLKGDRLKEEVERVLREHEKSLERLRERLKELLERHHKTNEELLREIKEALERLEKIVKDLTD

SEQ ID NO: 9463 - protein, 182 aa, Artificial Sequence; identical to SEQ ID NO: 9462
  Synthetic

SEQ ID NO: 9464 - protein, 182 aa, Artificial Sequence
  Synthetic
DEVEDAERRLREMSERIEDLVRRVEERLRRMSEESKKLVEDVKRENDKSVEELDRIVRRDKEKKEALRKIVEDDERRVKEVKERLEELNRRSEEDVRRVKEEAKRLLEESDRIAKKLRDDLKGDRLKERLEKLLRDHRRSVEEVIKKLDRLLKEHHKVNEKLLRDIDKSAKEVKKVVEDKTR

SEQ ID NO: 9465 - protein, 182 aa, Artificial Sequence; identical to SEQ ID NO: 9464
  Synthetic

SEQ ID NO: 9466 - protein, 182 aa, Artificial Sequence
  Synthetic
SEVEEAEKELREMSKTSTRLVEELEERLRRASETLKKLVDDVKRELDKRLEDIDRRVARNKEKKEELDKELEEVDDRARKVKRTLEDILRESKRLVEKIEEDLKKLDEDSRRSVDDVRRRLKGDRLKERVDRLLEEHHKVNKRLLERIEEVLRRHETTLRELIKEIDKLLRDLKKRIDDVKK

SEQ ID NO: 9467 - protein, 182 aa, Artificial Sequence; identical to SEQ ID NO: 9466
  Synthetic

SEQ ID NO: 9468 - protein, 182 aa, Artificial Sequence
  Synthetic
DEVREVKKELKKIAEELRKLIEEVREELRKMSKRSEELVRELKKRNEKSVRDLERIVRKDKEKKEELDKIVKEDKDDVRRIKKELKDLNDESRKRAEEAKRELERIVDRVRERVEDVRRKLEGDKLKEELKEALKDLERELKELIEELKRLLDEHHKRNEDLLREIDKSVRKVEEDVRRLKK

SEQ ID NO: 9469 - protein, 182 aa, Artificial Sequence; identical to SEQ ID NO: 9468
  Synthetic

SEQ ID NO: 9470 - protein, 185 aa, Artificial Sequence
  Synthetic
SEVDEVRKELERLVREIKKLVEDSKRNLDRLSKELEERVRDLERDARRLVKELRDLLKENRDEKTVKELIETLKDRVRRTLERIKREVDENRRYLERNKRELERLIRELKKRLEKLLRDVEREIKDKEVRDDVRRLIREVDEELKKAKEDLDRAHEEHEKSTERLRERIKEVVDRVREDIERTKN

SEQ ID NO: 9471 - protein, 185 aa, Artificial Sequence; identical to SEQ ID NO: 9470
  Synthetic

SEQ ID NO: 9472 - protein, 171 aa, Artificial Sequence
  Synthetic
DEERRIEKVLKEWEKRTRDLARELERVNREHKKTSEDVLKKLEEINREVRRVVKEENLPEDALRELEKRLEEDHERIEREFRKDKKRLEEDHRRVREEVERSRKKLEELRRRVKDVEKLRRLIEEVIREDERRVERVKRNNKRLSEETEKLVEDVRRNNERLVKEVRDRSR

SEQ ID NO: 9473 - protein, 171 aa, Artificial Sequence; identical to SEQ ID NO: 9472
  Synthetic

SEQ ID NO: 9474 - protein, 171 aa, Artificial Sequence
  Synthetic
SEEEEIKKVLDEWRRRTEELRKDLDRVLEEDRRSVEEVKRRLDKVNEELRRRIDELNLPEEEVRRLRDTLKKDHDRIREEIKRSRDNTRRLREEVEREVKKSRDRLEELRKRVTDVERAKEEIKKVIKEDEDLVRRVRKYIEENSDELRRLVEEARKNNTRIAKEAEDTSR

SEQ ID NO: 9475 - protein, 171 aa, Artificial Sequence; identical to SEQ ID NO: 9474
  Synthetic

SEQ ID NO: 9476 - protein, 171 aa, Artificial Sequence
  Synthetic
SEKEEIDKVLKEWEEMTRRLVEELKKSHDEDRESVKRLLERLRDVNRELKEIIDRANLPEESVRRLEEKLRRDHKRVERAVDESRKNTERSEEEVRRAVERSKEKLEDLRRRVTDVEKAKETVRKVIKEDRDLVREFKKYNEENSDRMRKLVKDIKENNRRIVEEARERSR

SEQ ID NO: 9477 - protein, 171 aa, Artificial Sequence; identical to SEQ ID NO: 9476
  Synthetic

SEQ ID NO: 9478 - protein, 174 aa, Artificial Sequence
  Synthetic
SKEEKLREALKKVRKDVKDLERHIDRSVKRNKEEVDKAKRELERSLEELRRRLEELRRTEELDRELKRLEEKNKEMLKRIDESLKESKKRNDKVKRELREELKRLEEEIRDAERKGLPVEELLERLERTLRRMREKVRKLDKENKDHTEKVKEDVKRVHDENDKVREDVDRKDK

SEQ ID NO: 9479 - protein, 174 aa, Artificial Sequence; identical to SEQ ID NO: 9478
  Synthetic

SEQ ID NO: 9480 - protein, 185 aa, Artificial Sequence
  Synthetic
REVEELVKEIERVLEETKKRSEDTKREVEKVLEDTKRLVERLRKTLEELLRELDKRVRSGLDEETLERVLREVRKKLKELADEARRVSEEDEKRLRKLEEDSKRLSDEDRKKLEKLEDEARKKVDGEELRRTLEKVLREWRDVNRKVNDTDRKVLEDWERVNRTVNEELKEVLERAKEDIDRVAT

SEQ ID NO: 9481 - protein, 185 aa, Artificial Sequence; identical to SEQ ID NO: 9480
  Synthetic

SEQ ID NO: 9482 - protein, 185 aa, Artificial Sequence
  Synthetic
DEVERLVEEIKKRIDETRKLLEELKKRIRKVLEETKDLVRRLLKRLRELLKELEERRRRGLREDELKRVLDDARRKIRKIEEDAKKMSREDRKKLRDLAEEAKDINRKDEEDLRRTEEELRRRVDGEELRRELKRVLDEWKKANDEVRRAMEEILKEWEEVNRKVNKDLRDVLEEVKERLREVAK

SEQ ID NO: 9483 - protein, 185 aa, Artificial Sequence; identical to SEQ ID NO: 9482
  Synthetic

SEQ ID NO: 9484 - protein, 185 aa, Artificial Sequence
  Synthetic
SEVEKLKKRLRDLLEELKRLSRRTKEDVRRVIKETRDRSKKTKEELEKLLREIRELRKRGLREKELKEVLDDARRKIEELARRSEELNRRDEDKLRKLAKESEELLRRAEERLRRLKKEVEEKVKGEDLRTEIKKILEEVKREIDRVRETDEKVLRDWKKANDEVRETDREVLRKIREDLKEVAR

SEQ ID NO: 9485 - protein, 185 aa, Artificial Sequence; identical to SEQ ID NO: 9484
  Synthetic

SEQ ID NO: 9486 - protein, 174 aa, Artificial Sequence
  Synthetic
RERETIEKVLDENRKSLEEVTETVKRVLDRWDETLKRLEEEVRRVNDKTRKVLEDLLREDKDLARRVKEELEKNLREVEDDKRRAEERMRELKRDVERVRKENEEELKKLRELLEKIDVKELKKRVKELSEKLREVLEELERRVREIVKRNKETVDESRKRNEELIKRAEDAAK

SEQ ID NO: 9487 - protein, 174 aa, Artificial Sequence; identical to SEQ ID NO: 9486
  Synthetic

SEQ ID NO: 9488 - protein, 182 aa, Artificial Sequence
  Synthetic
SEIDEVRKRVEKHSRDAKRLVDELREKNDRAIKTLERLLRELEKRNKKVIRDLEDVRTKNTEPEESLRRILKTVHDENRKVEEELRDILRRVEEENRRVIEELDRSLRESRKDLAEIEKRITDEDMVRELRRVLKENDESVRRLKREIEEVHKETERVVKEVLEEIRRVDEELKDVARKVET

SEQ ID NO: 9489 - protein, 182 aa, Artificial Sequence; identical to SEQ ID NO: 9488
  Synthetic

SEQ ID NO: 9490 - protein, 182 aa, Artificial Sequence
  Synthetic
REIEEVIKELKRHSEELEKELDRLRRENKEAIRTSKKLVEDLRRENTRAKEELEDVKRENRRDRTELRKLLERVHKRNEEVRETNRRLTERVARRNEEVKERLKRSLDESRRRVREVERRITDERALERLRRVVRENEESVERVLKKIDDIHEETKRVSDRSEKEIEDVDRDLKRKVEEVEK

SEQ ID NO: 9491 - protein, 182 aa, Artificial Sequence; identical to SEQ ID NO: 9490
  Synthetic

SEQ ID NO: 9492 - protein, 184 aa, Artificial Sequence
  Synthetic
REREKIKRILDELRKRVEELNRRNEELLRRLDKVVRDVNRTNKRLLEKLRKVADDVRRKLKDEPEEVLRTLDEILKKVEKEIKDTNDKTRKILEDARRLAEEVNRTSKKILEEVEREVKEVERENDREVDKVERTVEEIEKELTRLVEESEKEVKRIIEELKELLERSRKSVEDIIREVRKLAE

SEQ ID NO: 9493 - protein, 184 aa, Artificial Sequence; identical to SEQ ID NO: 9492
  Synthetic

SEQ ID NO: 9494 - protein, 184 aa, Artificial Sequence
  Synthetic
SEEEKLDRLLEELKKVAEEVNRENEKLLEDLERVVRDLNEKNKAALKKLEDAVRRLKEAIKDKPEDVLRTLEDDLRKVRKKVEDVNRESKEILDRVRKEIKETNEESKRILDRVEREADRIRRDKDDSVDRVEERLREIIKTLRKLLEDSKESVRKIIEELKRLVDRSIEDLERIIKELEDKVR

SEQ ID NO: 9495 - protein, 184 aa, Artificial Sequence; identical to SEQ ID NO: 9494
  Synthetic

SEQ ID NO: 9496 - protein, 184 aa, Artificial Sequence
  Synthetic
DRERRIETVLRKLKKVVEEVNRRNEKLLDDLRKVVTRLLEEDRRLLEKLRRAAERLKEELKDGPEEVLRTLEKILRDVERRSRESLKRLKEILDRAEREVREVNRTSREILERVKKEAERVKRDQDDDVTRVKEKIEKIIEELKKLLKDSKKRVEEIIRELEKLVDDSRREVEEIIKELKDRSR

SEQ ID NO: 9497 - protein, 184 aa, Artificial Sequence; identical to SEQ ID NO: 9496
  Synthetic

SEQ ID NO: 9498 - protein, 185 aa, Artificial Sequence
  Synthetic
DMREELERILKTLRDVSRESRRELKRLLDENEKTIREVKKRVDEILEKLRKVIDDVRRQGNDERAEDELRKILERVKKIADELKDRLRDSLKKSKEDIDRVARENEKLLRDAEDRIRRVAEADSRSKKVVDEVDKEIRELIRKDEEIVKEVAERVKKNSEDLRRLLEKARREIEEIIKELEERRR

SEQ ID NO: 9499 - protein, 185 aa, Artificial Sequence; identical to SEQ ID NO: 9498
  Synthetic

SEQ ID NO: 9500 - protein, 181 aa, Artificial Sequence
  Synthetic
DEDEIVRDVIRRLDEVLKKLEKTNTELDEELKRVVEELRKVNRTVDEELKRVLDELAKRIEDEDKVRRLEDRATKLIKKNEDHLRELEKAVEELEERNKRHLDRLREEAEKLKEEVRKVREDGRANDKLVKDLKRVLDKLEESSRRMLKKLSDALRELEKSSDKVVKDLRKVLKELREEVK

SEQ ID NO: 9501 - protein, 181 aa, Artificial Sequence; identical to SEQ ID NO: 9500
  Synthetic

SEQ ID NO: 9502 - protein, 181 aa, Artificial Sequence
  Synthetic
DEDERVEELLRELEEVLDRLAKLNKKLDERNKEVAEESKRLNETVDRELKEVLKRLEEKLEDKDKLRELKKKAEKLVRENRKHLEESERRHRKTAEDNKRHLERLEESARKLLEDLRKVKEDGRANSELVERIRRELERLKRSSEEVVKKLTEELKKDKKSSEEVVKDLRRALRELERAVD

SEQ ID NO: 9503 - protein, 181 aa, Artificial Sequence; identical to SEQ ID NO: 9502
  Synthetic

SEQ ID NO: 9504 - protein, 174 aa, Artificial Sequence
  Synthetic
SELEKVKEDIRRLLKRLKEDIKRIKDEIDRLLEELKRHLKEVEEEVDRILEELKDLKRRGTTEDTLRRVREEIKRLIKESEEALEKVKREIEEIKKRSEEKLKRARTEIKKIKDNVPRREKLERVKEDVERVLEEYRKRSEDLARRVEKVLREYKKRSDELEKRVEDVIKEVAD

SEQ ID NO: 9505 - protein, 174 aa, Artificial Sequence; identical to SEQ ID NO: 9504
  Synthetic

SEQ ID NO: 9506 - protein, 174 aa, Artificial Sequence
  Synthetic
KELEEVARKIDEELKKLDKNIRDIADEIRRILEELEKDLREIEKRIRDILRRLEDLKRRGTDERTVKRAEREIREIAKDSRRKLEEVRERIERIMRRSKKTLDDVKRRIEEEAKNVPRTDELKTVEDKVRKALREYEEKTRKVKKDVDEVIKKYKTDSDRVLDEVEKALREVER

SEQ ID NO: 9507 - protein, 174 aa, Artificial Sequence; identical to SEQ ID NO: 9506
  Synthetic

SEQ ID NO: 9508 - protein, 181 aa, Artificial Sequence
  Synthetic
RVEEKLKRVSDELKRAVDESNKKIEELLERLKRVHDETNKEITEILRELKEVVDKAREDGLDDERLKRILDEARDVIRRVRETDDDLRRRNKEMVDRLKDLNRKLEKRAEELIREVKDKIRTDELVEDIERKIEELIRRDDDLVRRAEEEVEKSIRELRRLVDEVRKEIKKIVKKIEDDVR

SEQ ID NO: 9509 - protein, 181 aa, Artificial Sequence; identical to SEQ ID NO: 9508
  Synthetic

SEQ ID NO: 9510 - protein, 181 aa, Artificial Sequence
  Synthetic
SREDKARELLRELEKVDDDHRRRVRELLERLKKVLEDHRRAVKDIIKRLDDELKRIKEEDDKGDKIEEILRRVRKKIRELEEHVKKTNEDIRRKIEELRRHLDETNKETNRKIERLRRELKEKKIDEEVAKEVKDIVREVEDHLRRVEEEVRRIIREVEEHIRDLERRVRELLEELKRRSK

SEQ ID NO: 9511 - protein, 181 aa, Artificial Sequence; identical to SEQ ID NO: 9510
  Synthetic

SEQ ID NO: 9512 - protein, 181 aa, Artificial Sequence
  Synthetic
SEEEKVRRLKEELRRVIEKHKKDVKEIEDRLREVDDRHRREVKKLIEELKKVLEDAKRRKREGKDMEKRLDELREIIKKLMRHAEKFNRETNKKIEEEKRHLEEANKELEKEIRDLEREVKETKIDEEVAKRVKEIIEKVERHITEVKKRAEELVEEVERHIRELKKRVEDLVEEIERDTK

SEQ ID NO: 9513 - protein, 181 aa, Artificial Sequence; identical to SEQ ID NO: 9512
  Synthetic

SEQ ID NO: 9514 - protein, 180 aa, Artificial Sequence
  Synthetic
DEKETAEELLRRIEKVIKRLEDTMRKLNKKLKEAIERHHRTAKKLLDDIERVIREVEKDRGDDRDVRRVLEDIKRKLDELRKRIEDVDKEVEDHLKRNHDKVRKILEDLKKLLDELRRLLDELRREELEDDVRRIIEEIDRLLRESEEDHEDLIRRLKRSLEELKRLAEDIIRKLSEDRK

SEQ ID NO: 9515 - protein, 180 aa, Artificial Sequence; identical to SEQ ID NO: 9514
  Synthetic

SEQ ID NO: 9516 - protein, 180 aa, Artificial Sequence
  Synthetic
REKEAAKRILDRIEKVIRDHHREAKRLNDELEKVIREHHETVKELLKRIKEVIDKFKKDKGDDRDVERIRKRLEELLKKLEDDARRVDKRLRDVLRRNHKEVREVNEEMRELLKRLADLLDELSVEELEETARRIIEKLKKSLEDSKRDHERLKKEIEDSLKRLTELVKKIIEEIERDRK

SEQ ID NO: 9517 - protein, 180 aa, Artificial Sequence; identical to SEQ ID NO: 9516
  Synthetic

SEQ ID NO: 9518 - protein, 180 aa, Artificial Sequence
  Synthetic
DEDEEARRLLEEIRKVIEEAEEEAKRLNERLRRVIKEHHRKVKELLDEIERVIEKVLRARGDDRDVRRIIKEIRERLERLREEAERVDRKLKEHLERNEKKVEEMRKRITKLLDDLRKRLKELSVDELRERVREIKEKLRKDLKDSEDDHRRMEEEIKKSLERLERLVREIIKDLEEKLR

SEQ ID NO: 9519 - protein, 180 aa, Artificial Sequence; identical to SEQ ID NO: 9518
  Synthetic

SEQ ID NO: 9520 - protein, 180 aa, Artificial Sequence
  Synthetic
KDEERAKRLLDEIERVIRRHHKTARDLNRELERVLKEHHDTARKLLEDIKKAIDDLKRTRGDDRDVDRILRDLERLLRELEKKIREVDKRAKEHIKENERRVKKVNDELRELLERLARLLRELDAKELEDKVKEIIDRIEKSLEESDKNHKKLIRELEKSLDDLRREAKEIIDDAREKAK

SEQ ID NO: 9521 - protein, 180 aa, Artificial Sequence; identical to SEQ ID NO: 9520
  Synthetic

SEQ ID NO: 9522 - protein, 179 aa, Artificial Sequence
  Synthetic
SAAERAEEVLRKLRESLERHKKVNKDLLEEIERSLREVAKDVDRVLKDIKRVLDELKRRRRDLEEVEERVRRILRTIEKLLKELEDDNRRILEELKRKSEEVAKRNEDIARELKDRLRKDKGARDEVEELVRRVHRENEKFSKESEDLVREVHERNKELVKRIRKILEDATRELEKAAK

SEQ ID NO: 9523 - protein, 179 aa, Artificial Sequence; identical to SEQ ID NO: 9522
  Synthetic

SEQ ID NO: 9524 - protein, 179 aa, Artificial Sequence
  Synthetic
DMKEEAEEVLKEIEEVLKEHRDINRRLLEEIKKSLEDLSREVERVLDEIRRLLKRAVEERPDVEELEEDVRRILREIEERLKDVRRRNREILERIKEESKRVSEEVKKILEEIKKRVTETQGADEEVRKIVEDLKKRLKELSEKSERIVRKVHRDNERVVREIRDIVRRLKKRLEDATR

SEQ ID NO: 9525 - protein, 179 aa, Artificial Sequence; identical to SEQ ID NO: 9524
  Synthetic

SEQ ID NO: 9526 - protein, 179 aa, Artificial Sequence
  Synthetic
SAKEKVDEVLRRIKELLDRHKKVNEEILEEIRRSLEEHREVNERLLETIDRLLKELKRSRKDLEEVEKRVRDILRRIKELSDEVAEENKEILKELRERSERVEKRVREILKEIKDRVTKDKGAREEVEEIMRRAEEELRKLSKESRELVKRLHERNEEMSRRSKKIVDEAKKELEDAER

SEQ ID NO: 9527 - protein, 179 aa, Artificial Sequence; identical to SEQ ID NO: 9526
  Synthetic

SEQ ID NO: 9528 - protein, 182 aa, Artificial Sequence
  Synthetic
SAEEELDRLEKELDKLLKEHHEENKRLLEEIDRVLKEHEETLRRLIKELREVLKEVKEKLRDKRKVDELDKRMRELEERLKAILEDSKRKVREIKERLKELNRESEKRVKEVKDTLRDLLRRNSEKVEKLREDVERVKRELEDLTRKSEELVKRLKDTLRRVSEELKRRVDEAKKEAREVER

SEQ ID NO: 9529 - protein, 182 aa, Artificial Sequence; identical to SEQ ID NO: 9528
  Synthetic

SEQ ID NO: 9530 - protein, 182 aa, Artificial Sequence
  Synthetic
SAEEELKRLLEENERVTEEHHKRNRDLLRRIDEALRRHEKTLEDLIRELDRVLRELERRLKDKEKVDRIRREVEKVKEELKRILEESRDIVRRAKETLKKLNEDSERESEKVLKRLREIVDKVSEKVDDLRRIIEESRRRHEELTKESEKLVREVEDILRRLSEELAELVKRVKDKLDEDAK

SEQ ID NO: 9531 - protein, 182 aa, Artificial Sequence; identical to SEQ ID NO: 9530
  Synthetic

SEQ ID NO: 9532 - protein, 182 aa, Artificial Sequence
  Synthetic
SAEETLKRLAERIRKLLEEHRETVKRVIDRLDKVLRDHHRENKRLLEDIDRVLRRLEESLKDEEKVKEIRRRVEEIKDTLRRLDERSRDRVRRVKKEAEDRLRRSEEEIRRILRELEEIVRRNKEKVEDLDRRVKEVERRLREMSKTIEKLVKDIERELKEASEESRELVERMKRELTEAEK

SEQ ID NO: 9533 - protein, 182 aa, Artificial Sequence; identical to SEQ ID NO: 9532
  Synthetic

SEQ ID NO: 9534 - protein, 182 aa, Artificial Sequence
  Synthetic
REIEEILKEIEKSLRDLEEEVRRILEEIKKSLEDLRESMERIVEEVDRRLRTLKEVFDRGELDEEKIKRVEDTMKKILDDVKEEIKRHHEDLRRILKEAEERIKEHHDRLRETLERLKDKTTDDRVRRIIEKLEEDLRRVNKKIKETLEEAAKRLEDADREIEKILRDLARKIRKVLEEIKK

SEQ ID NO: 9535 - protein, 182 aa, Artificial Sequence; identical to SEQ ID NO: 9534
  Synthetic

SEQ ID NO: 9536 - protein, 182 aa, Artificial Sequence
  Synthetic
SEVEEIERRIEKSLKELRERLEEAEKRHEELLERLEREIDRIEKELRKDLKRLRDMTRRGEVDEKTIDEEEERLRRKLEELKKIVEKVRKENEDLLRKWKRDIDEHHRELRETLKRAKDKTKTERVKKEIDRLEKRLEEVNEEIKKRLKELAERSRRVLERIKDRIRRAAEELKRVLDEVRT

SEQ ID NO: 9537 - protein, 182 aa, Artificial Sequence; identical to SEQ ID NO: 9536
  Synthetic

SEQ ID NO: 9538 - protein, 182 aa, Artificial Sequence
  Synthetic
SEIEEILKRLKELLKELKERNEDILRRVEKSLKDLRKKLEEIVRDLRRLLEELREMVKRGEVDEETIKKVMRDAEKILEDLRREIEEHHKKLRKILEDSKKENEDLEKRLREELKRVKDKTTDDRVREIIKTAEKELEKALRTSEDIDRRLEERLEKVNKEIREELRRAEEEIKRVLEEVKR

SEQ ID NO: 9539 - protein, 182 aa, Artificial Sequence; identical to SEQ ID NO: 9538
  Synthetic

SEQ ID NO: 9540 - protein, 185 aa, Artificial Sequence
  Synthetic
DELDRIRKEVKRISDKNRRHVERLDEEVRKLLEELRKHLEDLTREVERLLRELKEVKKEGKDEETVRRVLRELEERIRRLKKHADEANKELKDKIDELEKHIKKANEDSKKEIDELEEDLKRKTRTEEMRTKVEELRKRLEESLEEHKRAADELRKRLKKVLEEHEKRVRELEEELRRVLKEAED

SEQ ID NO: 9541 - protein, 185 aa, Artificial Sequence; identical to SEQ ID NO: 9540
  Synthetic

SEQ ID NO: 9542 - protein, 185 aa, Artificial Sequence
  Synthetic
DELEELRKLVEEISRENREHLKKLKKLVEDLSRENEKHLRDVDKRVKELLEDLERLTRRGLDEETVRRVLERVEEEIRRTKEHLDKFNEDSERKARELKRHAEKFNEESKKKIDDLEDDARRKTRTEDVERELRRLKKELDKSLKEHRTTLERLEEELRKSNKEHRDRVKELREELEKVLRDAKR

SEQ ID NO: 9543 - protein, 185 aa, Artificial Sequence; identical to SEQ ID NO: 9542
  Synthetic

SEQ ID NO: 9544 - protein, 182 aa, Artificial Sequence
  Synthetic
SMLDEARKEVKELKDRVERASEKLEDNARRNVEKLERVSEELEREVKRLLDEIEEVKRRNGDEELLERVVRRLKRELEKLKEKSDEISKDSERNLDEIRKESERIKKELEKALRDLKKRADDDLIDEETLKELERRIREVLKKHDKTLRDLERRIREVNKRHKDVSDRLAERIKKVIRELER

SEQ ID NO: 9545 - protein, 182 aa, Artificial Sequence; identical to SEQ ID NO: 9544
  Synthetic

SEQ ID NO: 9546 - protein, 182 aa, Artificial Sequence
  Synthetic
DKEKELEREVDELLKRLEEHSKRVDKTVEDVHRRNEEALRDMERKVREVVEKLKEVKERTKTEEVMRRLERDVEKIKEDLRREVERVKEENKRVLDEIRRSLEESEKRVRDIEKKLDEEVRKAGRRLEEVDRLRRELREVLKRNRESVERAEEKLKKSVKELDERVKELEEELDRALDELRK

SEQ ID NO: 9547 - protein, 182 aa, Artificial Sequence; identical to SEQ ID NO: 9546
  Synthetic

SEQ ID NO: 9548 - protein, 182 aa, Artificial Sequence
  Synthetic
SEVEKLERDVRELHKDNKRHSDELDREVKKLLEELRRALEELKEKVERLTRRLEEVKRRTRTEEVLKRLEDEAREMIEELKKSLRELEKRVEDVEKRLEESLKRSREKNEKMKEDLDRELKKAGRRLKEVEELKRRIDRSVEENEDSIRRLKEEIKRIVDEVRRVVEKLIKEIKDAVKKLRD

SEQ ID NO: 9549 - protein, 182 aa, Artificial Sequence; identical to SEQ ID NO: 9548
  Synthetic

SEQ ID NO: 9550 - protein, 182 aa, Artificial Sequence
  Synthetic
DELEELKRRVEELEERNKDHSRKMRETVERVKERLDRHSKEMEKEVRKVVEDIKDVKRKTKTEEVLKRLKEKIEKIKEDLRRSLDESRKEVEKIKEDLRDSARKSHEENKDVKRKLEDDLRKAGRELREVDELKKEIERADKENKDSIEELERELDRVLKENEKSIRELEKELDDVLDEADK

SEQ ID NO: 9551 - protein, 182 aa, Artificial Sequence; identical to SEQ ID NO: 9550
  Synthetic

SEQ ID NO: 9552 - protein, 176 aa, Artificial Sequence
  Synthetic
SEAEKLLEENRRELEKVKRDAERLNDEIRERLKEIEDKLKTLNDEIRKLVKEMEDRNDRDKTVEEELRELIETLRRRYEELKRELEELIKELKRRYEELLDRLRRLSEESKERADRDLIDEEILRTIADDNRRVLEEIKKIIKHSRDELERVKRDIDRIVKHSVKLLEDVLRRLRK

SEQ ID NO: 9553 - protein, 176 aa, Artificial Sequence; identical to SEQ ID NO: 9552
  Synthetic

SEQ ID NO: 9554 - protein, 177 aa, Artificial Sequence
  Synthetic
DEEEIVKRIEDDARRIIEEVKEVLRRIRDLNERILREAEEVLKEIREINRKVLEDLRRDGLPSDEIRKAEEESEKNLRELEEIIKTVEKRSRESVEEIKELIKRAEDLLRELIRELRETRVDERVLKRLRDELDKLREDLERILRRNKKLLDELRELLERSRRENEKLVEELKRKAK

SEQ ID NO: 9555 - protein, 177 aa, Artificial Sequence; identical to SEQ ID NO: 9554
  Synthetic

SEQ ID NO: 9556 - protein, 178 aa, Artificial Sequence
  Synthetic
SEAERIEEEVKKLLKDVKKKLEELKESSKRVVEELDKVLKELKESSDRLAKEIKKALDDNRSEEDIKRLLRENKEHLRELDERVRELKKKNKKHLDDLKREVDELRKRLEDALRRIEERVRVKDVLEKLRELVKRLIDDLRRVVEELEETNERLDRKLEDVLKKLRETNEKTLRELRK

SEQ ID NO: 9557 - protein, 178 aa, Artificial Sequence; identical to SEQ ID NO: 9556
  Synthetic

SEQ ID NO: 9558 - protein, 181 aa, Artificial Sequence
  Synthetic
SVREDLKRVVEDIRRIVKEVHERNREASKRSEDLVREVHERNERIARELKKIVDDLRRVKEEEKLKEIEKKLEEDLERAARENRRILEELKKISEDVARENKEVLDRIKERLDRLAKDVEDRNAERRVLEEVRKEVEKVLREIEKSLRDHERENKRLLEDIERSLRELEKTVEKLKRDIRR

SEQ ID NO: 9559 - protein, 181 aa, Artificial Sequence; identical to SEQ ID NO: 9558
  Synthetic

SEQ ID NO: 9560 - protein, 181 aa, Artificial Sequence
  Synthetic
SAREALKEAVKEIERIVREVHDRNRRASERSEKIVRDVHRRNKKLTDESKDLVDKARRIKEKEKLDELLKELEERSKKVAKENEDIRREIEKLSEDVSRENEKVLEKIRRDLERLRKDVRDRNVDKRVLEEVAKRVEEVLKRIKDSLEEHRRVNDKLLKDIEKSLRDHERANEKLLEDLRK

SEQ ID NO: 9561 - protein, 181 aa, Artificial Sequence; identical to SEQ ID NO: 9560
  Synthetic

SEQ ID NO: 9562 - protein, 179 aa, Artificial Sequence
  Synthetic
DELEELLKRIEDVIRRVEELLDELLERHRKVSKESNERLEELLRRHEKVSEEVKRENAGDERFKRTVDRLNDELRKKVKKLKEDDEKRNKELADDVKRLKEELRETLDRIRKEVEKLEPTEEVEKRVREVLKEIEDRAREVEKRARDSVRRNREELERLERDVRRSLKKLRDDLERMRR

SEQ ID NO: 9563 - protein, 179 aa, Artificial Sequence; identical to SEQ ID NO: 9562
  Synthetic

SEQ ID NO: 9564 - protein, 183 aa, Artificial Sequence
  Synthetic
SKVEKLLEDIKKLVKEVSDKIEELLKRLHEVVREIAKAVRDLIRENKRVVDDIVKKVRERGVPEEDLKRLEDRVEKSIRDLEEKLRDLKRRHDESTKRLKERLERAERRVKKLLDKLERRGDNGKEAEDDARRIIEEIERLLREVKKYIEEHIKRLRTVLKKLAEDSKKHLDELRELLRRLEK

SEQ ID NO: 9565 - protein, 183 aa, Artificial Sequence; identical to SEQ ID NO: 9564
  Synthetic

SEQ ID NO: 9566 - protein, 186 aa, Artificial Sequence
  Synthetic
SELETLLTDVERLLDESRRVAERVLKEVKELLDEWEKRHKELADRIRELLRRVEEEMKRANLDEEMKKRLEDELRRVDEKIKERDEDVKREKRRIEEKLERIKERSDREEKRVRKRLEDLRRRDLKDEEVRREATDLRREIKEHTDEVEKKLEELAREIEELLERSERSAEELRKEIEKLLEEIRR

SEQ ID NO: 9567 - protein, 186 aa, Artificial Sequence; identical to SEQ ID NO: 9566
  Synthetic

SEQ ID NO: 9568 - protein, 178 aa, Artificial Sequence
  Synthetic
SEIEKLLEDFKKRIEDIKRRLERYLEEVRKRVEKVKRELERALEESKRTVDEVKKEIDRAPPTEELRERLRRLKEEHRRRIRELEERLKEENRKNEERNRELEKELEDEARKVEEAEKRANASDEVRKEIRKLLDDIRRVVEKVKRDNERLNRDLNRRVREVIRESEKLNKRLEEAVR

SEQ ID NO: 9569 - protein, 178 aa, Artificial Sequence; identical to SEQ ID NO: 9568
  Synthetic

SEQ ID NO: 9570 - protein, 174 aa, Artificial Sequence
  Synthetic
SESETLEKELKELKEEADKLIEDIRRRLEEVARRVERNVTESERTLEELLRRAREKKKRRPQDREVEKELTEYRKELEKNREKSERDIRRVKEKLDEIEDRLRERLKRVKDRLDKVDVDRRVKEEVKRVLEEIERALRTVLKEVRDLLKRLEELHREVLDKNRRVLKAISDEAK

SEQ ID NO: 9571 - protein, 174 aa, Artificial Sequence; identical to SEQ ID NO: 9570
  Synthetic

SEQ ID NO: 9572 - protein, 174 aa, Artificial Sequence
  Synthetic
SEDEKVKKDLDELRDRVRKNIERIRRKLKKLLDEARDNVRRSEETLRRLARRVEKIKKDKPRDEEVREELERYEEELKRNKEESDRKLEKVREDLKKNLEESERRVRDFERRLRELDIDRSVKEELRRVLEDLKRLHEEVSKRVEDALREMKELHDRVLKRNKDVLRELKERAQ

SEQ ID NO: 9573 - protein, 174 aa, Artificial Sequence; identical to SEQ ID NO: 9572
  Synthetic

SEQ ID NO: 9574 - protein, 178 aa, Artificial Sequence
  Synthetic
SLEEIVKDILRRIKTKADEIKEKVDRSLREIEELVKEIKKEVDDSLRDIERVAEELRREGREDEKMRRKLEKDEERNKRTLDEIERKVRKLNRDNEEKNRETKEEVDELEKEVREIERKANLDERLLRDVRRILEELRDLVRRLHEDNKRLDEDLNRKVEKLKRDNEDLNKKMRDRAE

SEQ ID NO: 9575 - protein, 178 aa, Artificial Sequence; identical to SEQ ID NO: 9574
  Synthetic

SEQ ID NO: 9576 - protein, 179 aa, Artificial Sequence
  Synthetic
SEKEEADKKLKKVMDDLREILRRLLETLKRVIERSEEVLKRLDDRNREVLEEIKRAIERLDRREDEIRTVEEELRRNDERVKEDLTRHKRELEETEKEVRRTLTKVDEELKKIEDEIRRGDRDEKEAEETVRRMKELVDRIRKKAEEDVKKLREDSKRTADRSKKNVEDLKRRLDELAK

SEQ ID NO: 9577 - protein, 179 aa, Artificial Sequence; identical to SEQ ID NO: 9576
  Synthetic

SEQ ID NO: 9578 - protein, 178 aa, Artificial Sequence
  Synthetic
SEIEELVRRLERKLEEHKKMVDKYREDLKRTLDRVNELSKDYIKKLRDILEKAERLVRRGELKEEVVKKIEDELKKLNEEYEKRVRDVERELRKLNDDVRKLHEELEKDLRREEEDVERKGTSEDLRRIAERVLREAHRTAKDLHRDSERVREEIKKSVDRVHEESERVLREIRKLKK

SEQ ID NO: 9579 - protein, 178 aa, Artificial Sequence; identical to SEQ ID NO: 9578
  Synthetic

SEQ ID NO: 9580 - protein, 183 aa, Artificial Sequence
  Synthetic
SIEEEVRKIVDDIRRSSEELEKSVKRVVEEIAESSKEEKDRVKRNIEEIRKEIDKLRRDGADERVKEKLDRNLEESRRRLEEYEKKLRDELRKAKKELDDYKRDLDRRLKEAEERLRDVKDRIDKDVLEKLKRLLDKVVRDSEDVIRKLEERLKKVVDESKEVLKELEELHERVMREVEETIR

SEQ ID NO: 9581 - protein, 183 aa, Artificial Sequence; identical to SEQ ID NO: 9580
  Synthetic

SEQ ID NO: 9582 - protein, 183 aa, Artificial Sequence
  Synthetic
KIEEDIRRELTKILDKLRKLLEKAKKNVEDIERSSRDLKRRVDETIEKIKDELRKLERDGDTDEMERRLRKKLREVEEELKKYEEELRENLKRSEEELRKVKKDLEDELRELEDRLEKIRDRIDEEVLERAERELRRVMKEVEKVLREIEELHRRVAETSKRVIDELRRLLEKVFKEFEDAVR

SEQ ID NO: 9583 - protein, 183 aa, Artificial Sequence; identical to SEQ ID NO: 9582
  Synthetic

SEQ ID NO: 9584 - protein, 182 aa, Artificial Sequence
  Synthetic
SEVDEDLKRLEDRVREYEDRVREDIRRLEEDLKRLRKRIEDSIEEMRRTLEEVKEDVRREGPDDRLREELRERNERHRDELRREAERVEKKLRDMKRKLERSHEEVKKELEEVRKKAKKDNLDRDRLTKLREVLERLEKRIREIDEEIKRVLERVEKEIRDALRKIEKVNEDVEKALRDILR

SEQ ID NO: 9585 - protein, 182 aa, Artificial Sequence; identical to SEQ ID NO: 9584
  Synthetic

SEQ ID NO: 9586 - protein, 181 aa, Artificial Sequence
  Synthetic
SLEEEIEKVIRKLKEVVERINERNKRALDKLRKVVEEVKDALRRTNEELKKVVKEVERRGAVDERVREETKREEERSEDKLREEDEKLKRVEETNRRDDKRTRDELKRVRERLEEKKRRGGDKDDVRRLKREIEELIKRIDDKIRKLIRRHEELVREIREELKKHEERVKDVLRKLEKLAE

SEQ ID NO: 9587 - protein, 181 aa, Artificial Sequence; identical to SEQ ID NO: 9586
  Synthetic

SEQ ID NO: 9588 - protein, 171 aa, Artificial Sequence
  Synthetic
SEVEKLKKEADEESERNKDEVRKLEKESKENADRIRRHLEEHLKRSDENVKRVKDAKLPKERAREELERHLRRTEDNLRRIKEHLKRHLKKSEEDLRRSDKRLRELKKELEDRIKSEEMLRRLEELLRENKKRNKEVLDRDRELLRELDEEVDDVLRRDKELLEELERRLK

SEQ ID NO: 9589 - protein, 171 aa, Artificial Sequence; identical to SEQ ID NO: 9588
  Synthetic

SEQ ID NO: 9590 - protein, 182 aa, Artificial Sequence
  Synthetic
SEVDEVLERIERLADDNRRKAETVLRKIARLLEELKKHSEDVNRKIKELVKELEDEVRRAGVPRDDVERVLREIEELSKRHREEVKRNEERIRRELEKLERETRKLLEEIRRELDKLKKRNLDRELLERVLRRVEKKSEDHKRKLEEAERRVDKNREDHERRNEELLRRVEERVEDVKRRIK

SEQ ID NO: 9591 - protein, 182 aa, Artificial Sequence; identical to SEQ ID NO: 9590
  Synthetic

SEQ ID NO: 9592 - protein, 185 aa, Artificial Sequence
  Synthetic
DEVKEVLKRIKDLLDELRRHSEKVNRDVERLLEELARNSEKVNREIRRLLDDLRRLVEEKSTDEEVEDELRRAEKEVEEKNKRHKEELERNRETVKRKNEKHRDEVRKVEEDVRRTLEKIERDQLGRDDLERILREVDKKIKDLKRENERMLEEVERNAKEHKDRDREELKRVKEDLDRLRERLR

SEQ ID NO: 9593 - protein, 185 aa, Artificial Sequence; identical to SEQ ID NO: 9592
  Synthetic

SEQ ID NO: 9594 - protein, 178 aa, Artificial Sequence
  Synthetic
KDAEELEKEVERESRKNEESIRRIREEVDKLSKDNDRKLKEIEKEVEDLRRRVDERRKRPGGEEFARKLIKELRDRLKEIAERIEKTNRELKEKLERIAKEIEDLKKRNREELKRLEEEKRGDEKLLDKIRKVVKENEERMDKLLEDIERVVRENIKKNKEVLERARRVIERLEEKIK

SEQ ID NO: 9595 - protein, 178 aa, Artificial Sequence; identical to SEQ ID NO: 9594
  Synthetic

SEQ ID NO: 9596 - protein, 178 aa, Artificial Sequence
  Synthetic
DEDKKLEKDVRDKSEDNKRRLEEIKKKVEDASRENERKIEEIKRRVEEKAEEVDRARKRPGGEKRLKDLIDDLRKTLKEIEEEIEKLKRDNEERLKDIRREIEEINKKLEDDLERIRRAKKGSEELLKTATELVTRNRTENERVLREAERVVKENLRRMDELLKDIRRVIEELERRIK

SEQ ID NO: 9597 - protein, 178 aa, Artificial Sequence; identical to SEQ ID NO: 9596
  Synthetic

SEQ ID NO: 9598 - protein, 175 aa, Artificial Sequence
  Synthetic
EEVERSLKKLEDDIRRIERELEEMVRKSKREIDKLVRDLEEMLKDSRRKLEKLRKDNITSEEARRSLEKHNRELEKVLEDLERRSRRHKEEVDKLLKDLKKKLDDLRREIEELRRRGVSEEAIRELERLLEELLRKIEEVIKDLRRLNKELDEEIKRVIDEARRLNKELEDDLRR

SEQ ID NO: 9599 - protein, 175 aa, Artificial Sequence; identical to SEQ ID NO: 9598
  Synthetic

SEQ ID NO: 9600 - protein, 178 aa, Artificial Sequence
  Synthetic
SKVEKILKDIKRLLDELRKKLKEVKDRLDEINEELRETLKRSLDRNRKINEELKDKLRRRNAPEDVDEESKKHLEDVKRKIDEIRKRSEEHRKRVEDEIRELEERLKELLKRARDVVREGRVGDEVLKRVEEEIRRLEEELDRTLERSKREVEKIKREIERTNRESERAVKEIDDRER

SEQ ID NO: 9601 - protein, 178 aa, Artificial Sequence; identical to SEQ ID NO: 9600
  Synthetic

SEQ ID NO: 9602 - protein, 178 aa, Artificial Sequence
  Synthetic
SKDEEVLKTLRRILEELRDVHRRNLEDNKRITDRLREIHERNLRDNRRITKELEEVARRDGASKEEVDRLRERSEEYLRRLEEHLKRLEEKSKRYLDDLKRHLEEVDKRVRELEREIEREGAGDEKREEVKKEVDETRERNERKNRRSREDVKRVEDRNRDANRKSRKEAEDVKRRLT

SEQ ID NO: 9603 - protein, 178 aa, Artificial Sequence; identical to SEQ ID NO: 9602
  Synthetic

SEQ ID NO: 9604 - protein, 178 aa, Artificial Sequence
  Synthetic
SKVEEVLKRLREILKELEEVHKENKDDVKRILRDLEKTHKDNLDDNRRITEKLKRVVERDGLGEEVKEDLERRSREYLEDLERHLRELKRRIEEYEKELDEHLERLREEVKRIEEEIKRRGAGDEEREKVERRAKEARDRNKRKNERVKEEVKRVKDRNKKKNDESKETVRKIEEDAT

SEQ ID NO: 9605 - protein, 178 aa, Artificial Sequence; identical to SEQ ID NO: 9604
  Synthetic

SEQ ID NO: 9606 - protein, 175 aa, Artificial Sequence
  Synthetic
SDSERILKDIEDKLREIKKRSDDNRRRLEKENREVEKRVREILRRIEEENKDVEREDKRRDEVLRRLERRYDDLRREIRETLERLEKRYRDNEEELERLLEEVERRVKKILKELDEKGVEEKVKRDLEEALKTLRKVAEDNKKSLRESLETVKKLLEDLERELRKSAESVRRKMK

SEQ ID NO: 9607 - protein, 175 aa, Artificial Sequence; identical to SEQ ID NO: 9606
  Synthetic

SEQ ID NO: 9608 - protein, 175 aa, Artificial Sequence
  Synthetic
SESEELLKRAEDEVRKVEKKSRDNERRLREKLKKAKEDLDRIDEDIKRLNKELEDRNDKDSRVLKRARDEYRRIRREIEKLLEDLERDVKRNEDDLKRDLDRLEESIRKLKEDMDKAGLEERLRRELERILEELRELVRRNEEELKKIMKRVREEVEKLLRKLEKSLESVDRKVT

SEQ ID NO: 9609 - protein, 175 aa, Artificial Sequence; identical to SEQ ID NO: 9608
  Synthetic

SEQ ID NO: 9610 - protein, 180 aa, Artificial Sequence
  Synthetic
SRDEKAERMVREVEKKIKELIDRNRRVTEKVKEDIKRLIEDLERVTRDVSRAIKELARRLRDTDLRRLEEELRRIEKSSRDVLRKLEEELRRLSRTSEEYLRRLKERLDELRKEVEDIKRKKDIKEEDDKRIEEDLRKLEEDSRRYDEDLKRELERLRKEVEEYKKRMREELRRLKEEAD

SEQ ID NO: 9611 - protein, 180 aa, Artificial Sequence; identical to SEQ ID NO: 9610
  Synthetic

SEQ ID NO: 9612 - protein, 180 aa, Artificial Sequence
  Synthetic
SELERATKVVKRVADRIAELIRENARVTKRVADESRKLLEETETVTREVMRAIEELLKRLRGERAKKLKKLLEDIRRSSEEVLRKNKKDSEELKRTSDEYLERLRRKLEKLKDEVRKIKAENSIREEDLKKLEDDLKRAADESKKYDDDLRRKLDELRRRHEEYKERLKEMLKRLEDETR

SEQ ID NO: 9613 - protein, 180 aa, Artificial Sequence; identical to SEQ ID NO: 9612
  Synthetic

SEQ ID NO: 9614 - protein, 180 aa, Artificial Sequence
  Synthetic
SELEDARRVVKRVADRIKRLIEENERVTKEVKEASEKLLKDTKDATRRLAKEVKELVKRLRGKDVEELKRRLEEIKRSSDKVEEDNRRESERLRKTSEEYVDELRKELERLEREVKEIEERNNIDEKDKKRLEEELERLRESSERYDERLKRELERLEEEHRRYIRRLKEELDKLREDTD

SEQ ID NO: 9615 - protein, 180 aa, Artificial Sequence; identical to SEQ ID NO: 9614
  Synthetic

SEQ ID NO: 9616 - protein, 184 aa, Artificial Sequence
  Synthetic
SEVEELIKDIRRHNTRLEKRMREILEDLKRHLKRSEDKMRKLVKELKELLDRLRDIARDGELKEEVLRRVREELRRVEEELKRTLERNKEKLEKVREDLERELRRDRKKNEELRKEIEKVRKDIDEKLLKELEDVIRENEKRSRDIARTLEKALEELRKASKELIDTARDILRKVLEDVDRLRQ

SEQ ID NO: 9617 - protein, 184 aa, Artificial Sequence; identical to SEQ ID NO: 9616
  Synthetic

SEQ ID NO: 9618 - protein, 179 aa, Artificial Sequence
  Synthetic
SEVETSAERLKREVEKHHKEVEEYIRRLEEELKKMTRDVERALEKIKEDVDRLRKEQKSKDELDETVRDLERKIEELKRKLEKKLEDIERSSREVLDRTRRKLEELEREVKKLEDEINTDEELLKRLRDVLEEVSRRIKDNLEELKKVSERLKRRIEELIRRLEKVMRDVRRSAEEIKR

SEQ ID NO: 9619 - protein, 179 aa, Artificial Sequence; identical to SEQ ID NO: 9618
  Synthetic

SEQ ID NO: 9620 - protein, 179 aa, Artificial Sequence
  Synthetic
KEVEEDIERLKRILEKHHKDIERAIRRLEEKLKRLEDKLRKYKRDLEEEVARLKDEQRSEELLKRSVEKIKRSSEELKKEIRRLLEEIRKEIEDLKRKTKEVLDRIRREVEDLERRINSDEKVLRRLKEVLREIEERIRRNKEELDKALERVKRTIERLIRELEKLSERLKRIADEIAR

SEQ ID NO: 9621 - protein, 179 aa, Artificial Sequence; identical to SEQ ID NO: 9620
  Synthetic

SEQ ID NO: 9622 - protein, 179 aa, Artificial Sequence
  Synthetic
DEVDEIVRRLRETVDRHHKRIKEAIEKLKEEVKKHHREIEEYIRRLEEEVKRLADEQKDKDSLTEELKRIEKSSKELEDKSRDKLRKVREEIEEMKKRTEDTLKRLKEEVEDAKRRINTDRKLLEKLDRVLKKLEEDIRRNKEALDRALREAEKSLTDNIKELRDVSREIAERIKEITR

SEQ ID NO: 9623 - protein, 179 aa, Artificial Sequence; identical to SEQ ID NO: 9622
  Synthetic

SEQ ID NO: 9624 - protein, 175 aa, Artificial Sequence
  Synthetic
DEKEKVIEDIKELLKELEKKLEDIIREIEKELKRNDEENEESRRRIEDMLRRLEELKRRSDVEERVKKEVEDTLRKLKREYDERDRENRERLKRILEEMREDVKDLREKLRKLRKDLKGTEDVDRVLREAERRVREILKELEEVLRRAEERSEENLRSAEKVLREVEKRLKELTD

SEQ ID NO: 9625 - protein, 175 aa, Artificial Sequence; identical to SEQ ID NO: 9624
  Synthetic

SEQ ID NO: 9626 - protein, 175 aa, Artificial Sequence
  Synthetic
SEEERIIKRIKETLEDLKRKLDRIREEIERDIRRNNKKNEDSIRDIERMLRELRRLFEESEVKEKVVEDVRRRLKRLKEEYRKTDEENKERLKRILEEMEELVKRLRDELEDLRRKIRGTKELKEVLEEAKKTVDKILRDLEELLRRAEEESRRNLREAEEVLKKVREDLERLAT

SEQ ID NO: 9627 - protein, 175 aa, Artificial Sequence; identical to SEQ ID NO: 9626
  Synthetic

SEQ ID NO: 9628 - protein, 175 aa, Artificial Sequence
  Synthetic
SEEEEVIKEIKDALRDLRRRAEELMKELRELIRENNERNKESEREIRRLLDRLRDLKRRSEVKEEVVKTVRKELEKLKREYEKLNEDNERKLREVAEAVRKLREDLERILDRLRKELEGTEEVKRVLDDAKRAVEEILARIKELLDEVRKASKENLERAEELLRDVERELDRLTK

SEQ ID NO: 9629 - protein, 175 aa, Artificial Sequence; identical to SEQ ID NO: 9628
  Synthetic

SEQ ID NO: 9630 - protein, 178 aa, Artificial Sequence
  Synthetic
SEVERLIEDIRRANEELNRKSERKSRESKKENDRLNRESDKKSRDSERVLEELRRRNITSKDLRKKARELREDHRRYLERLKRALEELARDHERYLRELDEALRRLLTRVRETERRITDEELVRRLDELLKESETNVRDNKRRVRDNLRRTEENARRNLEKVKKNVRKIDKVIKEIET

SEQ ID NO: 9631 - protein, 178 aa, Artificial Sequence; identical to SEQ ID NO: 9630
  Synthetic

SEQ ID NO: 9632 - protein, 178 aa, Artificial Sequence
  Synthetic
SEVDETARKLDEDLKRLEEEVRRTSKESEDENRKLNETSKRESDESKRRLDELRRKNITDKDLREDLKRLEDRHRKYKEDLDRELRRLEEKHKEIIKKLRRSAEELERRMRELARRITDERVLRKLKDLVEKVKRVIEKLVKELEDNVKKTKDNARRNKREIEENARRIREEIKKLED

SEQ ID NO: 9633 - protein, 178 aa, Artificial Sequence; identical to SEQ ID NO: 9632
  Synthetic

SEQ ID NO: 9634 - protein, 178 aa, Artificial Sequence
  Synthetic
SEVEKEADEVRRTNEELNRRSEETSRRSEEDLRRLEEKVRRASKKSEDDLRRLKRENITDKELDKSLDELRKEHEKIIKELEDTARRLKEEHRKYIEELDKALKELDDRAKESERRITDEEMVKRLRDVVKRSRENIEENKRRIEDNLRRIDEVIRRLIEELRRNMRRIEEEIERIRR

SEQ ID NO: 9635 - protein, 178 aa, Artificial Sequence; identical to SEQ ID NO: 9634
  Synthetic

SEQ ID NO: 9636 - protein, 184 aa, Artificial Sequence
  Synthetic
SEVEREIERLEEDLDRLRREVDEAHKRSKKKLEELRKEVEDYEERVKEELRRLEKLVREGRVDERDLKRVRDELHESSKRVLDRLKRALEKLEEEYKKLLEKLRRSLDKIREEVERLERELKDSPEEVRERLERALRKAEKDVKRLEDELKRSLKEVRETVRELEERLREVNERVEELLDRLRK

SEQ ID NO: 9637 - protein, 184 aa, Artificial Sequence; identical to SEQ ID NO: 9636
  Synthetic

SEQ ID NO: 9638 - protein, 186 aa, Artificial Sequence
  Synthetic
RVEDRVRDLIRKHDETSREIEKRIRDSIKRLADVLDKIRKAIDDLIRKLREAVEDLLRKIGKDDEDKARELKEEVDRAIERLRRELERLKREVERIIEKNEEILRRLREESERVKRELDEARRRKLSEKEVEDLARKIEKLNEDLRRRLEKLDKENKDVIRRLEDALRRLAEEIKRLIDELRERAR

SEQ ID NO: 9639 - protein, 186 aa, Artificial Sequence; identical to SEQ ID NO: 9638
  Synthetic

SEQ ID NO: 9640 - protein, 171 aa, Artificial Sequence
  Synthetic
KDEDRLRDDIRRAIEEIEEKLKRLKDRNKEHIERLKKRNEDLNRRNRDVVRRLRERDTDEKEIEEAMRRTRKEHKKALDDNRKSLKESEDELRKAEEDLRKTLEDLDRKLRAEPRTEELEKLREDLRRVIERVEREIRRSSEENRRVVKKSVDNIRDSLRKNEDVIRKLRK

SEQ ID NO: 9641 - protein, 171 aa, Artificial Sequence; identical to SEQ ID NO: 9640
  Synthetic

SEQ ID NO: 9642 - protein, 181 aa, Artificial Sequence
  Synthetic
DVEKKIKDLARELREVIDDARRKNRKLHEDAREVSERHEKAVRDLTEELKRVIDELRKRNIDEDTLRERRKRIEEEIRKVEKDNEDILREIKEDNEEIDRKLDEELKKLEEDIKDLERRKVPEDMLREVEKRVKEEIKRIKDDLDEVRKRHEKKVRDIRKHLKELEDRIKKTEKDLREEAR

SEQ ID NO: 9643 - protein, 181 aa, Artificial Sequence; identical to SEQ ID NO: 9642
  Synthetic

SEQ ID NO: 9644 - protein, 181 aa, Artificial Sequence
  Synthetic
RVEEEIERLSRDLKRVIEKAKRDNDRLHKEVRKASEDHKRENKRLHEDVKRVIEELRKRNIDEETLRKTMEDIERKNREVDKRNEERLREIERENREIDERLKEKEERIRRRIDDARRRKVEERMLKKLEDEIEETKKDIEREIREIDKRHKDAVKELRDHIRELAREHEEEKKRLEETAR

SEQ ID NO: 9645 - protein, 181 aa, Artificial Sequence; identical to SEQ ID NO: 9644
  Synthetic

SEQ ID NO: 9646 - protein, 181 aa, Artificial Sequence
  Synthetic
RVEEEIRRLLEESERVHKELEDINRRLHEKVDRVSKKHREENKRLHEKLKRAIDRLREKNIDEDTLRRKEREIKKRNDRVDEENRRTKKEITDKNRRIDEEIKRNLDENRKRIEDVKRRNIPEEALKKLEKEVKDNERKLREEARRVEEEHEKTVRDLKKHLDELREEHDRILEELERTRK

SEQ ID NO: 9647 - protein, 181 aa, Artificial Sequence; identical to SEQ ID NO: 9646
  Synthetic

SEQ ID NO: 9648 - protein, 173 aa, Artificial Sequence
  Synthetic
SDMEKRKRDIKRKLDESNKKSEEAVREVERKLDESNKEVKKKEERVEDELRKLEEKRRRGSGEELLRRVKELEDDLRRKLKEVRDRHDRLRRELEKILEKLKEDHKRIVDELKKGPDDEKLKDIERELRENLKRNEDIVREILKKLEDNLRRVEKLAEDIRRKLEKVADDLRK

SEQ ID NO: 9649 - protein, 173 aa, Artificial Sequence; identical to SEQ ID NO: 9648
  Synthetic

SEQ ID NO: 9650 - protein, 171 aa, Artificial Sequence
  Synthetic
SELEEDKKRIEETLRRLEETAKEYHRRSREELRRLEEEAKRYHEESKETLDRLRRENITSEELRDTIRRLEDRNKKLLEKLKKDIDEHKRRNEELMRRLRKTIEDLKRELDKGPDDKKLKDIKEEVERVMKKLEDLVRRDNEESEKVLEKLKRLVERNNEDIKRALEELRK

SEQ ID NO: 9651 - protein, 171 aa, Artificial Sequence; identical to SEQ ID NO: 9650
  Synthetic

SEQ ID NO: 9652 - protein, 171 aa, Artificial Sequence
  Synthetic
SEDEERLRRIEEELRRLEEEAREYHERSREELKKLREKAKEYHERSRRELEELRRRNITSEELRKKIEEHRKRNEDLLRELKRTIEELEKRNRELLKKLREDIKRLRDELRKGPDDKRLKEITRKVEEVMKKLEKLVRDNNEEIRKVMEELKKLVEDDNEESDRALKELET

SEQ ID NO: 9653 - protein, 171 aa, Artificial Sequence; identical to SEQ ID NO: 9652
  Synthetic

SEQ ID NO: 9654 - protein, 171 aa, Artificial Sequence
  Synthetic
DEMETRLEDVRKKLDDSRRETRKVEEDIRRTLEELRREAKKYHEDSKEELDDLRRRNITSEELKETIKRLEDRNRKLLEDLERKIREIEKTLEDYLRRLEERIDKLRRELDKGPKDEKLKEIKERIEKVLRENRDVVKKIKEDVRRALKELEELVRKNNEDIKRLLDELRR

SEQ ID NO: 9655 - protein, 171 aa, Artificial Sequence; identical to SEQ ID NO: 9654
  Synthetic

SEQ ID NO: 9656 - protein, 172 aa, Artificial Sequence
  Synthetic
SRVEEVERRVRDKSRKSKEKLRKLEEDVRRESETSRDRLRKLAEEVKTKVKELKDKRVPKEEVEERVRRIERRLEETLKDLRRRYEEVERRLKKALEDLRREHEKVKDELRRGEIDSEDLKRLAKEIEDNLEELERKIREIRKELRRSLEEVEKTVEDLKRELKKVLDELRK

SEQ ID NO: 9657 - protein, 172 aa, Artificial Sequence; identical to SEQ ID NO: 9656
  Synthetic

SEQ ID NO: 9658 - protein, 179 aa, Artificial Sequence
  Synthetic
SDIEEAKERLERKLEKLLRKVEEYLKEIADEIRRLEEELEEYNRRSKERIDRVLEVKERGEADRRVIEEEIRRMKRRNEDLERKVEKKLRELEKRNEEVKRDLEEAKKKIKKEIDELRERGVDESVLKELEELLKELEDRIRKILTESTELLRRLEKRVRDSLRRNTEELDELLDRLEK

SEQ ID NO: 9659 - protein, 179 aa, Artificial Sequence; identical to SEQ ID NO: 9658
  Synthetic

SEQ ID NO: 9660 - protein, 179 aa, Artificial Sequence
  Synthetic
SEVEKSEKKLRDEIERLVRENEKYLERIKELVEELLRELEKAVRELEKEVTEIEEVKRQGNVDKRLIEDLIRRIRKKIEDLRRKVKKAVTDLKRANDEVRRKSEEDLRRIEEEIKRLEDRGVEERVLKKLRDLVKEVVDRSKRSLDESTKVLDTLEKEVRKVLEALKDILREALERLDK

SEQ ID NO: 9661 - protein, 179 aa, Artificial Sequence; identical to SEQ ID NO: 9660
  Synthetic

SEQ ID NO: 9662 - protein, 181 aa, Artificial Sequence
  Synthetic
SREEIIKKLKEEVERLLRESAKVLEELKRRLEALLRESEEILRELRELVRTLLEKLERDGLDRRDIDKIRRDIERREREWEKETEDTRREIEELERRWRRRLEETRKRLEDIEERLKKEEISEKDLKKTEDDLKREADEHRKAVEDELRKVKKRLEEHRERVRKRLEDIEKTLRDIDREVR

SEQ ID NO: 9663 - protein, 181 aa, Artificial Sequence; identical to SEQ ID NO: 9662
  Synthetic

SEQ ID NO: 9664 - protein, 181 aa, Artificial Sequence
  Synthetic
SSVEDLLRKAEEVVRRAEEKSRDSHEKTKDVLRKVKRKSEELNKHNRESIKKVEEVRRRTDDKRVLEKVLEDIERNSRDAVRKHKRVLEELREVVRRSEETNRKILKEVRRVVEEVIRRLREEGAPEEVLKTIEDLLRKLERKVRETIETDRRLLRKVEEELKRSIEDSRRLVDELKKRVT

SEQ ID NO: 9665 - protein, 181 aa, Artificial Sequence; identical to SEQ ID NO: 9664
  Synthetic

SEQ ID NO: 9666 - protein, 181 aa, Artificial Sequence
  Synthetic
SSKDRLRDEIRRVVERVREISERVNKHNRDSVKRVEEESRRINKEIRKVVEDVDRMRRRVTDERVVKELVKTLRDVVRKVVEKHKKAVKEVRDNSKEAEEIHKKALDELREVARRVIEMLRKDGVPEEVLREIEKLVRDVEREVRESIERSKRLVKELEERVKKSIDEIKKEVDDVERKLK

SEQ ID NO: 9667 - protein, 181 aa, Artificial Sequence; identical to SEQ ID NO: 9666
  Synthetic

SEQ ID NO: 9668 - protein, 181 aa, Artificial Sequence
  Synthetic
KEVEDLKEKVKRVVEEVEKISRELNKHNRDSVRRAEKTSKELNDHNKDSIRKVREVLKRTTDKRLLEKVLRDIKENSDDMVRKHEKVLDEVRRNSDDVVTKHKKALEDLKRMAEEVERELEKAGAPDKVLKDIKKLLKDVEKKVRESIKESKELVKRLKDKLEESIRRSKKDVEDLKREVD

SEQ ID NO: 9669 - protein, 181 aa, Artificial Sequence; identical to SEQ ID NO: 9668
  Synthetic

SEQ ID NO: 9670 - protein, 181 aa, Artificial Sequence
  Synthetic
SSVDKLRKEIREVLRRVERISEESHKHNEESVRKVKERSERLNKHNRDSARDVERVLREVTDERILRTILRKVTENSKRAVEDHERALEEVRRNSEDVERKNRKALKELEDVVREIEDRLRKEGAPEEVLEEIRRRLEEVEERVRRDLEESKKLVDELRKRVEKSIRESRKLVDDLRKRVT

SEQ ID NO: 9671 - protein, 181 aa, Artificial Sequence; identical to SEQ ID NO: 9670
  Synthetic

SEQ ID NO: 9672 - protein, 181 aa, Artificial Sequence
  Synthetic
SSVDKLKDEVRKVVETVKDLSRRLNETAKRVADRVRKISRETHEEVRKVVEDVKDVRRRTNDKRKLEKVLDELREVIKEAHKKNEEVLDELRRVVKRLEDEHRKALEDLERVIRRVIKELRREGADETVLEELKRLLDKVREDVRRSIEEIRELLKTVEKEVRDDSRDLERLLKRVEEETK

SEQ ID NO: 9673 - protein, 181 aa, Artificial Sequence; identical to SEQ ID NO: 9672
  Synthetic

SEQ ID NO: 9674 - protein, 181 aa, Artificial Sequence
  Synthetic
SSVDRVREEIERVARRVRKLSEDSHREVEKVLKEVEEISKRTHEEIDKVVKEVEKVIRDTTDKRELRKVVDDLRKVAEEAHKKNEDALRKLEKVVREVMTKNRKVLEELRKVVKEVIEKLEREGAPEEVLEEIRRLLETVEREVKTDIDRLREELRRVEEAVKKDSEDIRRKLKRVEDDVK

SEQ ID NO: 9675 - protein, 181 aa, Artificial Sequence; identical to SEQ ID NO: 9674
  Synthetic

SEQ ID NO: 9676 - protein, 183 aa, Artificial Sequence
  Synthetic
REAEDIVRRSHELVERAREKLRRLNKDSERLVDEVEKELREVVERVAELIKRAKDEIGTEDDKVRKAVELLERVLREVKKVVEELLRKIRKVLRDDHESVREVKERVDDADRKVKKVVDEVGSVEEVLEKVLRDSERVLKELEEKLRKSLEDVKRVIDEVKKVLEDVKRKVEEVLKRVRDKRR

SEQ ID NO: 9677 - protein, 183 aa, Artificial Sequence; identical to SEQ ID NO: 9676
  Synthetic

SEQ ID NO: 9678 - protein, 183 aa, Artificial Sequence
  Synthetic
SRAEKVERESHELVRTLKEELDRVVEKVERLVRRVEEELKRVNKESAELVKELKDRIGTEDEKAVEIVKRVEELLKEDHDTVRDLLRELREVLERVRELIDRLRRRVETVDDEVRKLVRDVGELDEVLTKLVKSSRDVIEEIREDLKRVLKEAEEVIRRVKKRLEDSLEKVKEVLRELLRAAK

SEQ ID NO: 9679 - protein, 183 aa, Artificial Sequence; identical to SEQ ID NO: 9678
  Synthetic

SEQ ID NO: 9680 - protein, 183 aa, Artificial Sequence
  Synthetic
SSAEDVVRRSHELVRRLEEELDKVNEDSERLVREVEERLKRANEESKRRVEDAKRRIGTEDEKVKRLVELLEKVLREDTDTVRRLREDLRRVLEKDTRSVEDIKRKLRTVDKEVKKFVRDVGSLEEVLEEVLRRSREVLKKLKEDLKRSLDDAERVIRRVREDLKRSLKRVREVLEEVRRRTK

SEQ ID NO: 9681 - protein, 183 aa, Artificial Sequence; identical to SEQ ID NO: 9680
  Synthetic

SEQ ID NO: 9682 - protein, 183 aa, Artificial Sequence
  Synthetic
SSVDRIVEESHTRVRKLMKDLEDVNDESRRRVERLRERLEEVVKEVEKLVEELRRRIGEERREARRIVERVERALERVRDVVKKLLEELERVLKKDTESVERLKEELDKVDKEVKDLLRRVGSLEEVLKTILERSREVLDRIRKELERSLKEVEDVLRRIEKDLKKVLDEAREIIKRLLDEAK

SEQ ID NO: 9683 - protein, 183 aa, Artificial Sequence; identical to SEQ ID NO: 9682
  Synthetic

SEQ ID NO: 9684 - protein, 184 aa, Artificial Sequence
  Synthetic
SRLETVLERAKELIDRIRKLLEDVRRKVKELIDRIRRLNEEANRESEELIRRIEEELRKGKDAEEVVREVKERLERLLRRSEEVSKKSRKDLEDLVREAEKVIRDLARLLREVVREVEEVVRRDNTEDARRILEEVRKLVKELEEELRRALKEVRDLAKEVDEDSKRALDRNEKLIRDLDRKVE

SEQ ID NO: 9685 - protein, 184 aa, Artificial Sequence; identical to SEQ ID NO: 9684
  Synthetic

SEQ ID NO: 9686 - protein, 184 aa, Artificial Sequence
  Synthetic
RELEEAKKKVEDLLRRILEENERAHEESKKLIEEIRRLLKKMNEESEELRERIRKKLEENSTSDKVVREVRKEIDRLVERSERVAKRLKEELDRLLERSKKVSDDSRRKLKELLEEVEKVIRTLNSEDVERALDDVRRLLREVERRSEELLRTDEEAIRTLKKEIDKVLKENKDKADRLKEEVN

SEQ ID NO: 9687 - protein, 184 aa, Artificial Sequence; identical to SEQ ID NO: 9686
  Synthetic

SEQ ID NO: 9688 - protein, 184 aa, Artificial Sequence
  Synthetic
DELETVERRVEKLIEDIKRELRKVHEESKKLIREIKKELEDANRESERVIEEIKRELDRDKDSERVVERLEEKLRKLVRRSEEVIKELKKKLDELVKESERVARELRRKLEELVREVERVVREVNSEDARKMLEDVKKRAKDVEDEIEEVLRRDRELIKELKRELDEALRENRRLIEDLKRKIK

SEQ ID NO: 9689 - protein, 184 aa, Artificial Sequence; identical to SEQ ID NO: 9688
  Synthetic

SEQ ID NO: 9690 - protein, 184 aa, Artificial Sequence
  Synthetic
SEAEEALKRVKKAIDDARKLLEEANRKDKKSIEEAEKLLREAHERSKKAIKEAEDALDKAKTDEKAVERAREKADRAVKESEDAARRAKEIADKSLEDSERAAREAKKLADEAVDEARDAARKANSEDAEKALRDAKRLADDLKRTADEVLKENKRTAEDLKRKADEVLERDKKLAKELKEKAT

SEQ ID NO: 9691 - protein, 184 aa, Artificial Sequence; identical to SEQ ID NO: 9690
  Synthetic

SEQ ID NO: 9692 - protein, 184 aa, Artificial Sequence
  Synthetic
SELEDVKRKVKRLIEDIERALTEANKEDEKSIEETERLNRTVHEESKELVERLKDELRKRSTDKKVVEKVKKKLDDVLRRSKEVSERSKKILKDSVRRSAKVAEELKRRIDKLVEDAEKVIRDLNTEDVDEALKEVRDRAKKLKDKIKKVLDDNRRTVEDNERKSDELLKTDKELVREVKERTE

SEQ ID NO: 9693 - protein, 184 aa, Artificial Sequence; identical to SEQ ID NO: 9692
  Synthetic

SEQ ID NO: 9694 - protein, 183 aa, Artificial Sequence
  Synthetic
RELEKVRKEVERLIKEIKDLNKRAHDETKTRIDRIREKNEKVHEESKRLIREIEELLRRKGGESEEVVREIEKILDRIRRESERASEESRKELEDIKRRSKEASDRSRKILEEIRRTIEEVLREGAVTEEVIKEVEKRLDELRKESKKLLDDDRRLIEKLKEESRRLLEEDRRLIKELKEKVK

SEQ ID NO: 9695 - protein, 183 aa, Artificial Sequence; identical to SEQ ID NO: 9694
  Synthetic

SEQ ID NO: 9696 - protein, 183 aa, Artificial Sequence
  Synthetic
SAAERAAEEVKKLIDEARKLLERAHRETKKLIDEARKLNKRALDEVRRLIEEADRLLRRDGGEADEALKRAEEIAKRALDLAKRASEESERIAREAIKLSEDAARKAREIAKRALDLARKALKDGAAREEVAERARRLAEELKKEADDVLRKDRDLARRAREESEEALKEAEKLARDLRRRAK

SEQ ID NO: 9697 - protein, 183 aa, Artificial Sequence; identical to SEQ ID NO: 9696
  Synthetic

SEQ ID NO: 9698 - protein, 178 aa, Artificial Sequence
  Synthetic
KEAEDIKRKVEKVAREITEKSRKSHEELRKVVKEARDKSEKSLRDVERVLREIEELLRRRRKEDVLREVKERIEEILRTNKKVLEEVKERVKRIVDKNRRMLEEVEKRVREILKELKRDRPDSKDLIEEIKRRLDEVRRRSEDNLKKMEEELKKVEEDSRRVVERIRTELKRVEDEAR

SEQ ID NO: 9699 - protein, 178 aa, Artificial Sequence; identical to SEQ ID NO: 9698
  Synthetic

SEQ ID NO: 9700 - protein, 178 aa, Artificial Sequence
  Synthetic
SEAEKIRKDVEKVIREVREDSKRTLERSRKVDEEIRRKSETSHRLVEEVIRRAEELLRRERREEVVEEVKRRIKEIVDRNKEALDEVRKRNEDILRENDRVLERIKRLVEKILRDLKRDRDKDEELIEEIKKALEDVKRESEKVKEESRKSLEDVERDSDRNLKDMERLLREVTERAK

SEQ ID NO: 9701 - protein, 178 aa, Artificial Sequence; identical to SEQ ID NO: 9700
  Synthetic

SEQ ID NO: 9702 - protein, 178 aa, Artificial Sequence
  Synthetic
DEVEEIRKEVERVIREVEEKSKETLRRSEKVDREAKKKSDDSRRKVEKVADEIRRLLETRRDDRVLEEVARRVEAILRENEEVAREVEKRNREILKTNADVLDEIRKRVEEILKELKRDRPDDKDVIEEIRRLLDEVRRRSEKVIRDSERSAEEVKERSERVIEELKRLLEKVAREVK

SEQ ID NO: 9703 - protein, 178 aa, Artificial Sequence; identical to SEQ ID NO: 9702
  Synthetic

SEQ ID NO: 9704 - protein, 178 aa, Artificial Sequence
  Synthetic
SSVERVERDVARVAREIRKISRDTKEESKEVDRRIDEISKRTNEDVRRVAEEIKRLKEKRRRDEMLREISRKAEEIVRENEEVLEKVKRLNEEILKKNEDVLRKVAKDVTDILRRLKRERPDDKDVIKEIEDRLREVEEESKKAIEESKTSLKRVKEKSEKNVEDMKKLLEKVREDVR

SEQ ID NO: 9705 - protein, 178 aa, Artificial Sequence; identical to SEQ ID NO: 9704
  Synthetic

SEQ ID NO: 9706 - protein, 181 aa, Artificial Sequence
  Synthetic
SEVEKVLDEIRRLLKEVEERSKENNDRNEELARRNTRRSEENIRRIEELLRRVREEARKDRVPREVLKELEDRVREVLERNKEVLERLRRLHEEISRKNEEVLREVKREVEKVLEKLRRIDDEKFLREVRREIEEIIRRIKEASEKTHKEAKEVVDRINELSRKSHETIKEIIKRVRDRAK

SEQ ID NO: 9707 - protein, 181 aa, Artificial Sequence; identical to SEQ ID NO: 9706
  Synthetic

SEQ ID NO: 9708 - protein, 181 aa, Artificial Sequence
  Synthetic
REVDEVLDEIRRLLERVREESEKNNRDNEKLMRDNEDRSRKVIETIKRLLEDVKDRATKKNVPEKVLKEIEDLVREVLEENKRVLDTLRELHKEVSDKNKKVLEEVERLVTEVLKKLRDIDDEKFLREVRREIEEIIRRIRELSERTHREAKEIVDRINELSKRTLDKAKEMLDRAEEKAK

SEQ ID NO: 9709 - protein, 181 aa, Artificial Sequence; identical to SEQ ID NO: 9708
  Synthetic

SEQ ID NO: 9710 - protein, 181 aa, Artificial Sequence
  Synthetic
DEVEKVLRDIEKKLEDVERRSKEVIDEIRKLLKEVEEESRRNVKKIREELKKVVDDVRRKNVEREVLEEVKRLVDEILKKNEDVLREVTDLVRKVLRKNEEVLRTVKELIERVLDELRKIDDEKFLRDVKRMVDEILDTARELSRRTLEEIKRIIARIRERSEKSHEEARKALRDVEEKAR

SEQ ID NO: 9711 - protein, 181 aa, Artificial Sequence; identical to SEQ ID NO: 9710
  Synthetic

SEQ ID NO: 9712 - protein, 181 aa, Artificial Sequence
  Synthetic
DSVREVLKKIEDELERVKRDNKDVNRKNEELMRRNEERSRRVVEDIKRKLKELVDDVRRNNVPDDVLRELKELVERILRKNERVLEELKKLHKEVSDKNEDVLRRIEELVREILRKLREIDDEEVLKRVDEEAEKVLRENEKLSKKSLDEAREIVREINRLSEDTRREADEILERVKEKVR

SEQ ID NO: 9713 - protein, 181 aa, Artificial Sequence; identical to SEQ ID NO: 9712
  Synthetic

SEQ ID NO: 9714 - protein, 181 aa, Artificial Sequence
  Synthetic
DEVETVLEKIERLLRKLEKDSREVIKKIKRLLDEAKKESRKNIEEIKKLLEEVKREVDRRNVDDRVLDDVRRRVTEVLEENKRVLDELEKLVKRVLEENKRVLDEARKLVKEILDKLREIDDERFLREVEKELEDMLRRVRKLSEDTERKIREILERIKRLSDDSNRKAKEILREIRKRAE

SEQ ID NO: 9715 - protein, 181 aa, Artificial Sequence; identical to SEQ ID NO: 9714
  Synthetic

SEQ ID NO: 9716 - protein, 172 aa, Artificial Sequence
  Synthetic
DELEKVKEEIRRLLRRIEEDVKRSEERNKELLRRITEEVKRSERRNEELLKEIKDKVDSEILRKVEKAVEDSLRRLREVLRKVKEVVERVLETNRRILEEIKEVVERVEKLLDERDLKKVREDLERMLRRVEEELKRSNEESERAIEEVRRELEDIDRESRKAIEDVLREEK

SEQ ID NO: 9717 - protein, 172 aa, Artificial Sequence; identical to SEQ ID NO: 9716
  Synthetic

SEQ ID NO: 9718 - protein, 185 aa, Artificial Sequence
  Synthetic
SEIDEVLTRLRKISKDLNETSDRVNERARKIIDDIKKESKRVNDEAREIVERLKREIDKTRDRDVLRRILKEIEDVARRVKEINEELLRRVEKVVREVEEINRELVKRSREAVERVKRLLDERVSDKDKVERVVREVEKLHEEDRKRLEESTRSVRKLLEELKRELEKSTRSVKKLVDELRERVR

SEQ ID NO: 9719 - protein, 185 aa, Artificial Sequence; identical to SEQ ID NO: 9718
  Synthetic

SEQ ID NO: 9720 - protein, 185 aa, Artificial Sequence
  Synthetic
DEVDEMLKRAEDRIREISDTSRKVNEDARKIVEDLKRDSERVLRELRKRIEELRREIERDRDEDVVRRVERKVEKVVREVHERNKELLDRVRKVVEDVEDINRRLAEEVRRVAEEVRRALRRDADDEKRVREVAEEVKRLVKELEERLRRSTESVKRLLEDVERAVKESSDEVEKLLRRLREELE

SEQ ID NO: 9721 - protein, 185 aa, Artificial Sequence; identical to SEQ ID NO: 9720
  Synthetic

SEQ ID NO: 9722 - protein, 185 aa, Artificial Sequence
  Synthetic
DEIEEVLRDAKRISDELNRRSEEVNRELREIIKELTKRSRKVLEELKKIVRDLEKKIKDTRDKKDLDRIREEVTDVVRKVHEINKRLLEEVRRVVEEVKRINDKLVRDSERAVEKVRRLLERDVDDREKAERVLRTVEELHKEDRDRMKESTDSVKRLLEELKRRAEKSSRTVEELLRRLEEKIR

SEQ ID NO: 9723 - protein, 185 aa, Artificial Sequence; identical to SEQ ID NO: 9722
  Synthetic

SEQ ID NO: 9724 - protein, 185 aa, Artificial Sequence
  Synthetic
SEIDELLERAKKRSKELNDTSKEVLDRARRIIEEISKTSEEVNKDLERIIRELAEEIKRTRDRRVLDRIRREVRRVVKEVKEINERLLREAERVARDVHRINEELVRRSEEVVKEVEDVLRRKVDDEKRVREVLKEVRRLHEEDRKRMKESSEDVERLLTELRKRMKESTDSVEKLLKELEDRVR

SEQ ID NO: 9725 - protein, 185 aa, Artificial Sequence; identical to SEQ ID NO: 9724
  Synthetic

SEQ ID NO: 9726 - protein, 185 aa, Artificial Sequence
  Synthetic
SSLEKLLEDVRRRSEELNRRSRKVLEDLKDIIRRLKEESKRVLDEAKKKVDDVERKIDKDRRRETVKEVLERVEKVVTDVHRINEELLRRITEVVKEVHERNKRLVEESRRVVKEAEEVLRRDVDDSDKVRKALEDVRRLHEEDKRRVDESSKEVERLLRELREDMKRSSEEVERLVKRVRDRLK

SEQ ID NO: 9727 - protein, 185 aa, Artificial Sequence; identical to SEQ ID NO: 9726
  Synthetic

SEQ ID NO: 9728 - protein, 185 aa, Artificial Sequence
  Synthetic
SEADELLKEVKRISDELNDTSRRVLEELREISRRLNEDSKRVLKELEDILEEIRERIDRTRDREVLKRLLERVAKVVKEVHDINRDLVRRSREAVKRVHDINRRLVEESRKVVKKAEEMLRERVSDEERVRELVERVKELHEEDKRRMDDSSRDVERLHKEDADSARDSSRKVRELLEELRRRVE

SEQ ID NO: 9729 - protein, 185 aa, Artificial Sequence; identical to SEQ ID NO: 9728
  Synthetic

SEQ ID NO: 9730 - protein, 182 aa, Artificial Sequence
  Synthetic
KELEDVLRELKRILEELEKLSREADERSKEIVKRLVEETTRSLKEVKEIVERLKELDDAGKDRREVEKRLRDAHRKNEDTLRRSSEKLDRVLKESERVVRDSSTKLRKVLKDAEDVVRDKVEDEKRAREVRETVRKLVEDVKKKNEESERRNRELVKEVRKRNKEVRDRSRKLVKELEDKLR

SEQ ID NO: 9731 - protein, 182 aa, Artificial Sequence; identical to SEQ ID NO: 9730
  Synthetic

SEQ ID NO: 9732 - protein, 182 aa, Artificial Sequence
  Synthetic
SSLEKVLKDLRKILEDLRREIKTVLDDLRRILEELKRETERVDKKSKEIIETLSELRKAGTDSRDVDRRVKEVLEESRRAVERSSRKVKKVLEDAREVVRRIEEAADKVLKDARRVLREKVEDKKKVDEAIREVEKLIEELRRDLDRVRKTVEKLVRDLERRNEESKRRNEKLVRKLEEELR

SEQ ID NO: 9733 - protein, 182 aa, Artificial Sequence; identical to SEQ ID NO: 9732
  Synthetic

SEQ ID NO: 9734 - protein, 182 aa, Artificial Sequence
  Synthetic
DELETVLRKLEKLVRDLKKRSTDVLRRLEEIVKELTDETKRVDDESRDILRRLKELRDRGVDSREITKRVREALKESRRVIKKSSEDVERAIDEVRKMIEKSSRDVDEVLREVREVLRDKVENKEEADRVITTVEELVKELRRRNEEVKERVEKLARELRRRNEESIKTNEKEVRELEKRLK

SEQ ID NO: 9735 - protein, 182 aa, Artificial Sequence; identical to SEQ ID NO: 9734
  Synthetic

SEQ ID NO: 9736 - protein, 182 aa, Artificial Sequence
  Synthetic
STLKKVLDENRKSIKELLDMSRRVLEKLREILRRLEEETREVDEKSERIVTTLEELIKAGTDKRRIKEELDRALKESEDMVRDSSRKLEEVLEEARRVVEDSSRKLRRSLEELKKVVRDKVEDEDKAKKVIDEVRKSVKRLEEENERVLRDVERLVREVEKKNRESEKRNRKLVEELRRKLK

SEQ ID NO: 9737 - protein, 182 aa, Artificial Sequence; identical to SEQ ID NO: 9736
  Synthetic

SEQ ID NO: 9738 - protein, 182 aa, Artificial Sequence
  Synthetic
SVLEEVLKKLEKILRELKREIEEVLKKLRRILEELVRETEKSLEKVDRIIKELEKLIEAGRDKRDVEREVRRVHRENEETLRRSSEKVDRVLKEVEDVVRRIDRRVKEALREAREVVRDKVEDEKKAREVTKTVEKLIRELRKTLEDVKREVRKLVEEVKRRNKDVERKSRELVKKLEERLR

SEQ ID NO: 9739 - protein, 182 aa, Artificial Sequence; identical to SEQ ID NO: 9738
  Synthetic

SEQ ID NO: 9740 - protein, 182 aa, Artificial Sequence
  Synthetic
STLEEVLERNKESIERLRKESEDSHRKLKEIMERLKRETERSLEEVEEIVKRLKELTDEGRDKREVRKRLEEVHRKNEKTVRESSEKVERVLKENKESVERIVEKAEESLRRLAEVLRDKVDDKEKVKRVIEKAKKSVEDLERRLREDEEAAREWVKKLRTENEKVRKRSEELVRELEERLR

SEQ ID NO: 9741 - protein, 182 aa, Artificial Sequence; identical to SEQ ID NO: 9740
  Synthetic

SEQ ID NO: 9742 - protein, 182 aa, Artificial Sequence
  Synthetic
STLEKVLRDLRKILEELLRMSKKVLEELKRLADRLKEEIKKSLDKVKKIIDELRDLTRKGKDKREVEERVKRVHDENEKTLRKVIEDVRRVLKEVRDVIKESSDRLREVLERARRVVRDKVEDEDKARKVIEEVTREVRRVEEENKKVERTVEKLVEELEETVREARERSERLVRTLEEELR

SEQ ID NO: 9743 - protein, 182 aa, Artificial Sequence; identical to SEQ ID NO: 9742
  Synthetic

SEQ ID NO: 9744 - protein, 182 aa, Artificial Sequence
  Synthetic
SDAERVEKEIREVLKRVEDLLRRVNEETKKVAKEVRELLKEVDDRSREIMKRVAEKLRRISDKKTAKEEVDRVLKEIEKTLRDLKRTVEEVLKRIEDLSKKLHEDVRRVLEEVEELLRRLLERRKDDKDVAREVEKLLRELEKKLEEVNRHDKKLLEELEERLKESEERNRRLLEELKRRLD

SEQ ID NO: 9745 - protein, 182 aa, Artificial Sequence; identical to SEQ ID NO: 9744
  Synthetic

SEQ ID NO: 9746 - protein, 182 aa, Artificial Sequence
  Synthetic
REVEEVLKRIEELIRRSEEETREVNERTKKLAEDVRRLLEEVDRRSKKIADEVRELLERIDDKDTARELVDRVVKKIERTARELRKTVEDVLREIKRLSEELHKRNRTSVEDIRRLLKDVVDKRKDSKDLVRTVEELLKRNEEDLRRVNEHDKKLLEDLTRSLERSEERNKTILEKLKEDLR

SEQ ID NO: 9747 - protein, 182 aa, Artificial Sequence; identical to SEQ ID NO: 9746
  Synthetic

SEQ ID NO: 9748 - protein, 182 aa, Artificial Sequence
  Synthetic
SDAEKVLDEIRKRIEESEKRTKEVNDRTREVLDRVRKLLEKVNKESRKVAEDVREAAERIKDKEELRKTVEEVLEEIKRISERLHERVRRVLEEIKRLSDELHKRNRESVKEIRELLRELLERRKDDEEVRKDVERLLRENERSLREVNRHDEALLRELEKRLEEVNRHDDKLVKDLRERER

SEQ ID NO: 9749 - protein, 182 aa, Artificial Sequence; identical to SEQ ID NO: 9748
  Synthetic

SEQ ID NO: 9750 - protein, 178 aa, Artificial Sequence
  Synthetic
DEVREILEDVKRINKEVEDELRKIEEEIREIVKTVRDESRKTLEELERILRKVEDDLRKDRREEILKTVKELVKKIIDDDRRIVERVLRELERLVEEIKKVVDEVKRLNKELIDRLKTRNPEVEEAVKDNERLAKETEDKVREVVKRIRKIIEEVERTARESERRLRKLLKEVEDRAR

SEQ ID NO: 9751 - protein, 178 aa, Artificial Sequence; identical to SEQ ID NO: 9750
  Synthetic

SEQ ID NO: 9752 - protein, 178 aa, Artificial Sequence
  Synthetic
EEIERILEELRRIAKKVEEDSRRTLETVRRLNEEVKRRLREILEEIRRVAEDVRRKLDEKRSDEEAVRRVLEDVKKKVEDVKRRLEEVLREVEKKNRDVTETNKKILRDLEKKVRDVIRRVKSEDVKRELERILEEVRKKSREALEKNKRLLEDTRRVVEEVKRELEKILRDVKRKVD

SEQ ID NO: 9753 - protein, 178 aa, Artificial Sequence; identical to SEQ ID NO: 9752
  Synthetic

SEQ ID NO: 9754 - protein, 182 aa, Artificial Sequence
  Synthetic
SVVEELRDELRRAEEENRKIVEDTTRRLEDMIRRDEKINEEVERRLEEVTRRVEELRKQGRDKDEIVDELRRVVEELEKILRDALKDSTRVVDELRKVNEDATRISREVVRRLRKLLKDRVDDERKAREMEKEVTEILRRLEEENKRDLDRIKKLLDELRKKNEDTLRRIRRLLEEVRERLR

SEQ ID NO: 9755 - protein, 182 aa, Artificial Sequence; identical to SEQ ID NO: 9754
  Synthetic

SEQ ID NO: 9756 - protein, 177 aa, Artificial Sequence
  Synthetic
SSLDEVLERLRKLLKEIEDKVRRINEEVKKSSEDVERELKRVVDELKRRVERLKEEVRLERLIRELERILDEIKKKLDRLAEENRKILKRVNDESKRILDELRKILRELEERLRRITDERELEKILRDAERVVREIEKRHRDLLEELKKANEDTRRALDEIRKEAERVLERVREEAK

SEQ ID NO: 9757 - protein, 177 aa, Artificial Sequence; identical to SEQ ID NO: 9756
  Synthetic

SEQ ID NO: 9758 - protein, 177 aa, Artificial Sequence
  Synthetic
DEVEEVLKRLRESSEESKRRADDVTRRAEESSRRVHKRSREVVERLKKLVEEVERRVRLRELLETLRRILERLKERLEKLNEENKRILEKVKRDIEKLKRDNEEILREVEERAKRLRDRRELEKLEREMRDVDRRTDEALERLLRTLEEVNKRTDEENKKILEDLKRVVEEVEERDR

SEQ ID NO: 9759 - protein, 177 aa, Artificial Sequence; identical to SEQ ID NO: 9758
  Synthetic

SEQ ID NO: 9760 - protein, 177 aa, Artificial Sequence
  Synthetic
SEIEKVIEELRRSSEESHKRSRKVEEDARRSSDEVHRRSREMLRKLREEVKDVERKVRLEDLLRKLREILKRVEDDARRLNEENRRILKELEERLEKLNRDNKKILEDVERRLRRITDRRDLRRLREEMRRVDERTTRENEKILRELEEVNKETIKENERLLRDLKRVVDRVREEDR

SEQ ID NO: 9761 - protein, 177 aa, Artificial Sequence; identical to SEQ ID NO: 9760
  Synthetic

SEQ ID NO: 9762 - protein, 177 aa, Artificial Sequence
  Synthetic
RRIEEVIKEARKSSRESHEESKEVMERLKRSSDDSHRKSEEVLRRLRKLVEDVERRVRLRELLEELRKILKRLEEKARRLNEENKKILERVKRLLEELNDRNERILRRVEDDLRRITDDRELKKLRDELKRVDDETRKANEEILREMEEVDKRSKEANDRLLEELAKVVKRVDDEDR

SEQ ID NO: 9763 - protein, 177 aa, Artificial Sequence; identical to SEQ ID NO: 9762
  Synthetic

SEQ ID NO: 9764 - protein, 177 aa, Artificial Sequence
  Synthetic
KDIEEVIRRLRESSKESTKRLRDVVEDLKRSSKEVHDESEDVLRRLEELVRRLKKKVRLRELVKRLEEILEELRRRAKELNRRNKEITEELVKELEELVRRNEEILRDVERKLRRITDKRLLKELEDRMRRVDERTDEELEKIRKRMKEVDDRSRDVNRKLAEDLKRAIKRVDDEEK

SEQ ID NO: 9765 - protein, 177 aa, Artificial Sequence; identical to SEQ ID NO: 9764
  Synthetic

SEQ ID NO: 9766 - protein, 182 aa, Artificial Sequence
  Synthetic
DEVREVLRRDEELHRELKERIDRILEELERLHRDLKRKIDRVLEELKRLHEDVKRELDKRGGIEELKERSDRVLTKSARIAEELKKTSDDVLRKTREIVKEIKRKLDDNLRRVREIVEKLKNVEEALRKLHEESKKSVRDVEKELEELRRENKKVIEDLEDELRRLLEENKRAADELRKRAE

SEQ ID NO: 9767 - protein, 182 aa, Artificial Sequence; identical to SEQ ID NO: 9766
  Synthetic

SEQ ID NO: 9768 - protein, 182 aa, Artificial Sequence
  Synthetic
DEVEKVKDDVRKLVEKVKRDAKRAHEDNERKHRKLKKELDDALRELKKRHEELKRRIDDRGGDKDLKKRSDDVLRKSEEIVRRIKKELDENLRRHRERVERIKRKLDELLKKIDDIVEKLKDVDEALRRLKEELDKMIEDVRKELRKLNEDSDDSIRRVKKRLKELRDENEKVIRDIRRETE

SEQ ID NO: 9769 - protein, 182 aa, Artificial Sequence; identical to SEQ ID NO: 9768
  Synthetic

SEQ ID NO: 9770 - protein, 181 aa, Artificial Sequence
  Synthetic
SELEKVRKKVEDISRESEKHLREVKKENDRIIKEIEDELRKLLTDVEREIREVEKRIREERSEKVREEIKKRLERLLEEVRKAIEDLKRKSDEVVKETEKAVRENEEKLEDLRREVAEADDRREKAKRVFEEIERIVRRNKEELRRILKELRELHEEVKEKIKKVLEDVKRLVDELLERAK

SEQ ID NO: 9771 - protein, 181 aa, Artificial Sequence; identical to SEQ ID NO: 9770
  Synthetic

SEQ ID NO: 9772 - protein, 181 aa, Artificial Sequence
  Synthetic
SELEKVLRDVREAIKRNEDLLRRVHEESRRISEESEKNLRRVHERSRRIAEDVRRVLRERRDEDVVRKLRKKLEDLLEESTRAVKENVDELRRALERSEEVVKRSEEHLRDVLRRVEEADDRREEAEKVAREAKKLVDDLKRKNDEVLDEDRKEVERNERELERVLREDKKLLEDLEREIK

SEQ ID NO: 9773 - protein, 181 aa, Artificial Sequence; identical to SEQ ID NO: 9772
  Synthetic

SEQ ID NO: 9774 - protein, 181 aa, Artificial Sequence
  Synthetic
DFAKKLEDEARRVSEESRRHLEDLLRRSKESIDALKRKLEDMLRRVREVIKRIEDELRRERSESVAKSVRDLLREVRDEVRRVRETLKKESEEDRKRVEEVLRRNEELLKRVDERLKEVLRRGEISERVIERIKELLDRNRKELEDVARDAERLNRELNERVDRVLKEVEERLKELEDRVK

SEQ ID NO: 9775 - protein, 181 aa, Artificial Sequence; identical to SEQ ID NO: 9774
  Synthetic

SEQ ID NO: 9776 - protein, 181 aa, Artificial Sequence
  Synthetic
DKAKELEEEIRKIIREIEELLRRMEETSRKSSKESEKHLRDAHEDSRRIAERIKDLLRKEKSEKVREEVERLLRDLERRTREVIKTNRKLSEDDKRRVDEVLKRATELLEELRKKIREVLERGEVSEDVIRELERLLRELKKRIEDVVRRIKELNEDNNRKVEKIREDDERLLEKVRRDVK

SEQ ID NO: 9777 - protein, 181 aa, Artificial Sequence; identical to SEQ ID NO: 9776
  Synthetic

SEQ ID NO: 9778 - protein, 181 aa, Artificial Sequence
  Synthetic
SAAEDVLRKVEKIIKEIEELLKRALEESRKSVKELEKILRDAHEKSRKIAREIEDALRKRKDEDVARKVEDLLRRLKEDTERVIREIERLSEEDKRRVEDVLRKAEELLERLRKAVREARERGEVSDEVVEEIKRLLEELRKKIEDVADEIRRLNEEVNKKLDDLVKTDTKLLEDVDRKVK

SEQ ID NO: 9779 - protein, 181 aa, Artificial Sequence; identical to SEQ ID NO: 9778
  Synthetic

SEQ ID NO: 9780 - protein, 181 aa, Artificial Sequence
  Synthetic
SAAEEVRKKNEKISRELEKLNRKALEDSRDSIRKLKKILDDAHKDSREIIKEIEDLLRKRRDEDVRKRVEELLRRLEERTRKVIKEIRERSKEDEERVKEVHEENKKISEDVKREVKEVRDRGEVSDEVVEEIKRSNDENNERSKKVLDEIKKLNKEVNDRVEELLERDKRELERVKRDVD

SEQ ID NO: 9781 - protein, 181 aa, Artificial Sequence; identical to SEQ ID NO: 9780
  Synthetic

SEQ ID NO: 9782 - protein, 181 aa, Artificial Sequence
  Synthetic
DEFRDIEERAKELAEENETINRRVLTEHKKLIDELREILERVLREHEKRLKDLKDLVRKIDSEEVKKTITDALKRLRETSKELADEVKRVEDELRKTTEELERENKKLLDEVRELLKKVKRDGVVSEEILERIRKLLEDVEEKVKKSVEDSRRLLKTIREEVERVLDTSRKLLKRLEDDVR

SEQ ID NO: 9783 - protein, 181 aa, Artificial Sequence; identical to SEQ ID NO: 9782
  Synthetic

SEQ ID NO: 9784 - protein, 184 aa, Artificial Sequence
  Synthetic
SDLEEVEKRAEEIIRRNKEELEKVLRESKDIIDKNRKLNKESLDEVKRIIERLEDLLRKDGRSERVEELVRKVDREIREVIKRNRELNERSVRELEKLNRESEKLDRESKKELDDLIRDLERRSDTEEVRKVAKKIRDEAKKSHDESKKLNDTSRDLVRKSKEEAERIDEEMKKLLKEIKDKVR

SEQ ID NO: 9785 - protein, 184 aa, Artificial Sequence; identical to SEQ ID NO: 9784
  Synthetic

SEQ ID NO: 9786 - protein, 181 aa, Artificial Sequence
  Synthetic
SEVEEILKRIEDLARTLLKLNEDSLRRNEEIIRTIKELNEKTLKENKEIIDRLRELLRRTRDKDTLEELLKKVEEELRRSNEEDKKLLETAARLVKRSNEEDKRLLEEAAKRVEELLDEARKRNLDERVLKEIEDLLREVADRSRKFNERSERLLREVEERSREVNDRSKKLMDTIAKEVK

SEQ ID NO: 9787 - protein, 181 aa, Artificial Sequence; identical to SEQ ID NO: 9786
  Synthetic

SEQ ID NO: 9788 - protein, 181 aa, Artificial Sequence
  Synthetic
SEVEKALERVKKLAEDLERLDKESLERVEKVIRDAERLDKTSREEVKKIADEADDLRRRAKDKDTLRKLLEDLKRRAEELNRKNEELLRRVAEAIRRISEDNRRLLEEVARRVEDLLREARERNVDEEVLRRIRRLLEEVRKKVEDSNRELKRRLDELEKRVRDSNKEIRELVKEVERKVN

SEQ ID NO: 9789 - protein, 181 aa, Artificial Sequence; identical to SEQ ID NO: 9788
  Synthetic

SEQ ID NO: 9790 - protein, 181 aa, Artificial Sequence
  Synthetic
SRLEEVLRRIRKLLRDNKETAKRVLEEIERLLREADKRNREALKEIEKRMREVEDKLRKARLPEDVVRELRRRITELLRRLEEITRRSRERVKEILERLKEVVERTERKIRKIERELSEIKREKDLEELRRRVKEVSDESRKLLEDLLDEARKVLEENRKLVEEILREAKKVIDEIEEKLR

SEQ ID NO: 9791 - protein, 181 aa, Artificial Sequence; identical to SEQ ID NO: 9790
  Synthetic

SEQ ID NO: 9792 - protein, 181 aa, Artificial Sequence
  Synthetic
SELEKVLREIRRLLDEARKRNEEFLRRIEELLRRNEEEVRRVLEKIERKVERVKRDLERRRVPEEVVRDAERRIDEIRRKIEEILERTKRDVERLLKELRDITRETERRVKELEDELSRVRREEKLERILRTARKVVEDNERLVREVLKKVKRVSDESRRLLEEIDREVDEVIKRLEERAK

SEQ ID NO: 9793 - protein, 181 aa, Artificial Sequence; identical to SEQ ID NO: 9792
  Synthetic

SEQ ID NO: 9794 - protein, 175 aa, Artificial Sequence
  Synthetic
SEAEEIRRRLEEISRRSVEHLRKVLEEIKRISERSKRHLDRVLEENKRRLEELRELLERGRDKRELLEDLKRVHDESRKVIEKNKEENDRALKRAKEVIDENRERNKRVLDEVRKGGLPEEVLRELEELLKESEERIKRIEEEIKKIIDKSREDIKRVLEEIERLNKKAADDLRK

SEQ ID NO: 9795 - protein, 175 aa, Artificial Sequence; identical to SEQ ID NO: 9794
  Synthetic

SEQ ID NO: 9796 - protein, 175 aa, Artificial Sequence
  Synthetic
DEVREVLEELKRISDDSIRHLEEVLRRLREIIERLKATNDDVLRELEEIIRTLLDLDRQGVDKEELKKALDDVLRRIEDIHRETKRRLDEVLKEAEEAADRNRERNERAVEKVRRGGLPKEALDTLERTVEESKKRIKEILDRVKELIDKAREDSKRSVEEVRRRIEKARRDLDR

SEQ ID NO: 9797 - protein, 175 aa, Artificial Sequence; identical to SEQ ID NO: 9796
  Synthetic

SEQ ID NO: 9798 - protein, 175 aa, Artificial Sequence
  Synthetic
SKVDELLKRLEDIIRKLDKENEKVLRELEEISKRSVDHLKRVLEENRRILEELERLLEGGTDKEELLRRLEEVHRRSRRMVEENKKRNDDVLRRVTEVHKETKDRLEKALKDVKDGGLEERVLRDLKRLVDEARRRSERSLEEVKRIADESRKEIERILREIEEENRRAKDKLRR

SEQ ID NO: 9799 - protein, 175 aa, Artificial Sequence; identical to SEQ ID NO: 9798
  Synthetic

SEQ ID NO: 9800 - protein, 175 aa, Artificial Sequence
  Synthetic
SRAEDLLRRLEKIIRDSLRHLREVLKRLERIIDELRKTNERVKEELERIIDTLRKLKDNGVDKRRLEDELRKVDERIKRIHKKTVEDLERVLKEVEDVARENKKRNDEVLKEVEDGGLPEEILRRARELVDESRRRLEKVVKEVRDVIRTLKKDSDKSLRDLEEEVRKAEEDLRK

SEQ ID NO: 9801 - protein, 175 aa, Artificial Sequence; identical to SEQ ID NO: 9800
  Synthetic

SEQ ID NO: 9802 - protein, 175 aa, Artificial Sequence
  Synthetic
DEVRELLDTLRRIIERSVKHLEDVLRDLKRIIDKLREDNRRVLEENRRRLEELDKLRKEGTDKEELKRRLDEVHKESRDIHRDTRRRLKEVLDRVKEVAKRNREENDKATDDVRKAGLPEEFLRDVERLAEESRRRLEAVEREVERLITEAEKESKKSLDEVERLNRELKERLKK

SEQ ID NO: 9803 - protein, 175 aa, Artificial Sequence; identical to SEQ ID NO: 9802
  Synthetic

SEQ ID NO: 9804 - protein, 183 aa, Artificial Sequence
  Synthetic
DVEDILRTIRDLIRRVDEKSRKTLEENRRAIEEVLRRSDETLRRNKKLIEDVEEEVRRTVKDEKLLREVKRRLEELLKENKEMADRTREKLERLLRENERVVKETKRTLKEILDRAEEAARVERREFMETVLRKIKEDIERLEERNREVHEKSREEIRKLEEENEEVHRKSRKEIDEIRKELK

SEQ ID NO: 9805 - protein, 183 aa, Artificial Sequence; identical to SEQ ID NO: 9804
  Synthetic

SEQ ID NO: 9806 - protein, 183 aa, Artificial Sequence
  Synthetic
DVEEILKEIRKRIEDVKRESEKTLKEIRDLIKKVAEDIERSVKENRELIDKVRRELERDVRDEDLLRRLKEKLDRLLKRSEEVAERLRRKLKRLAEEVERVAEDTKRKLEKLLDDAEKMSRMDDRKVLTDVLKEIERRIDELRRRNEEVVEKIKREIKKLEDESKRVNDESREIIKRIKEEVD

SEQ ID NO: 9807 - protein, 183 aa, Artificial Sequence; identical to SEQ ID NO: 9806
  Synthetic

SEQ ID NO: 9808 - protein, 183 aa, Artificial Sequence
  Synthetic
DVEEIIREIRKLIEKVLRDVRRSAEENKKLIDEVKRRVEEMLKRNRDMIKKVLDDVRREVRDERKLDEVRKELEELLKENERVAEKVDRRLRELLERSKRAIRELERKLEELLKKVEEAKKVERREFLKKVLDEIREIIERLRRESEKVNEDSKREIKDIERELREVHKKSRRIIRRIEEKLR

SEQ ID NO: 9809 - protein, 183 aa, Artificial Sequence; identical to SEQ ID NO: 9808
  Synthetic

SEQ ID NO: 9810 - protein, 183 aa, Artificial Sequence
  Synthetic
DEAREVLERLKKISEEDKRRSDKVNEETRRIIKEAEERSRKVNEETKRIIEKLEEDLRDRPKTKELLDELRDILRRAKERSDEVLKRLREILDRIRKRSEKVFKESREINEELRRRVEDVVRKGVISEEILRELREILRENTERVERSLRDNRRLLDELRKKVERSAEENERLLREAEEKLRK

SEQ ID NO: 9811 - protein, 183 aa, Artificial Sequence; identical to SEQ ID NO: 9810
  Synthetic

SEQ ID NO: 9812 - protein, 175 aa, Artificial Sequence
  Synthetic
SEVDKVLDDSRKSAEDLRREIETVLKRNKELIDENRKRLKEVLDRNAKLADDLRRERKKGTDEKMVEDVDRTSKKTIEDLKRESEKSLRDSEESIRRLRERARENIERNRKLVEDVRIEERVVRTLEKLIEEWRKAVEDVLRTLEKLTEEAKRESERILEELKRITKELRDEERR

SEQ ID NO: 9813 - protein, 175 aa, Artificial Sequence; identical to SEQ ID NO: 9812
  Synthetic

SEQ ID NO: 9814 - protein, 183 aa, Artificial Sequence
  Synthetic
SEVEDVLRRLEELLRRLEKKSRESLEELRRRLDEVRKDSERSNEDSERLIRELEEIRRKLEDEETVRRIVERVLEELERINRENHEKAKRVVEELEKIIEENHREAKRVTETLEELIKRLKERNPELKEFLDTMRRIVEELKKRLKEVNDRIKDIVRRAEEELKRSNDENKERIERAEKKVRD

SEQ ID NO: 9815 - protein, 183 aa, Artificial Sequence; identical to SEQ ID NO: 9814
  Synthetic

SEQ ID NO: 9816 - protein, 183 aa, Artificial Sequence
  Synthetic
SELEKVLEELKKLLEELERESDTSVKELRTLLERLEEESKESNERSKRLAEELERRLKDEKDEDTVDKIVRDVLTKLDKLNKDNEKRAREVLKRMDEIIKRNHKRARDVIKRLREIIDDVRRRNPEAREFLETMERIIEELEKRLREVNEDLKRIVRTVAERLKKSNRDNRELIRTLKDRVRT

SEQ ID NO: 9817 - protein, 183 aa, Artificial Sequence; identical to SEQ ID NO: 9816
  Synthetic

SEQ ID NO: 9818 - protein, 183 aa, Artificial Sequence
  Synthetic
SEVEDVLRRLEELLRRLKEKSKKSNEESKKLIKELKEESDKSRRDLERLLEKLDRDLKRLKDKETVKKIVDEAEKRLRRIIEENHRTAEEALRELKKINERNREMAEEVVKRLRELIDELRKRNPEVREVLERMRELVEKLKEDLERSNKENKDLIDKVKRDLEEVNRRLEKIVREVKERVRT

SEQ ID NO: 9819 - protein, 183 aa, Artificial Sequence; identical to SEQ ID NO: 9818
  Synthetic

SEQ ID NO: 9820 - protein, 183 aa, Artificial Sequence
  Synthetic
SEVEDVLRRLRELIEELRERSERSNEESKRLADELEKRSEESLRRLAELLRKLEEDLRRLEDKDTVDKIVEDVKRKLDKIIKDDHDTAREMEKRLEKINEENKREAERVLREAKRLIDELRKDNPEMREVLTTIAKIVTDLERELRKSNEENKKLIDELRKRLEDSNKRVKEIVKRLEEEVRR

SEQ ID NO: 9821 - protein, 183 aa, Artificial Sequence; identical to SEQ ID NO: 9820
  Synthetic

SEQ ID NO: 9822 - protein, 182 aa, Artificial Sequence
  Synthetic
KDVEEALKELERVLEELKRLSKELLDRLRELADRIRRISKELLEELKRLLKDIKETVDRIKDKDTLEEVVRRLVKELEDILRTHKRLVDDIIERLKKILEDHRRLVERAREELERLLKELEDRGVDEDVLRRLRELIEKVKRDLDRTDETLKELIKTLEDELRKSNETIEDLIRRLEEALRK

SEQ ID NO: 9823 - protein, 182 aa, Artificial Sequence; identical to SEQ ID NO: 9822
  Synthetic

SEQ ID NO: 9824 - protein, 182 aa, Artificial Sequence
  Synthetic
SDLERLLDELRKLLDDLRRKSEELLRRLDTLAKKIEREAEKITKDNKELIDRLRDRLRRIRDEDTLREVVKEAVKRLRESLRDHERLVDEIRRRLEKILEDHRDLKRRIEETAKKILDDLRRRGVEERMLRTLERLIEKLKEELKRTDKELERLIRELKKRLDDNNRRNEELIKRVEDELRK

SEQ ID NO: 9825 - protein, 182 aa, Artificial Sequence; identical to SEQ ID NO: 9824
  Synthetic

SEQ ID NO: 9826 - protein, 179 aa, Artificial Sequence
  Synthetic
SEAETVLEEMKEVSKRTEEKNKKVEDDDKRSIDELRKKLEKVLREDRRSIEDLERRLKENKGSDKVLRELKERLRRNKDRSEKVVEDLKRELDKNLEDSKKISEETKRENERALEKARRANVEEEVLRTIERLSRENKKKDEDTLRKSKEEHERVREELERVLETSRREHEKVKKRLED

SEQ ID NO: 9827 - protein, 179 aa, Artificial Sequence; identical to SEQ ID NO: 9826
  Synthetic

SEQ ID NO: 9828 - protein, 180 aa, Artificial Sequence
  Synthetic
RVEEMLERLRRLHEEVKRRIDEVLRELEEESKRNEERIRRVLERLRDEHRKLKETLDRRNADDDLRRTLEENRRKVEEIIRRLEELNERARKELKKIVDELRKKLEENLKRVEDVIREPVDEEELERLERKSRESIERLKDTLRELKERLKRISDRSDEKLREAEKRSRESIEEVKKRAK

SEQ ID NO: 9829 - protein, 180 aa, Artificial Sequence; identical to SEQ ID NO: 9828
  Synthetic

SEQ ID NO: 9830 - protein, 180 aa, Artificial Sequence
  Synthetic
EVEDVMREARKLHKELEDKIRDAARRIRETIDRVKKEDDDSLRKLRKLHEDLKRELEKRNVDRTLEEKLRRNLDEVEKASKESRRHLEELERDVERIIEALKETLRRNLKKVEDVVKKPVDRDELRKLLEDSKRSIEKVEDDLRKLEEKIKRVIDDNRRKNKELEEKSRKSIRDLEEEVR

SEQ ID NO: 9831 - protein, 180 aa, Artificial Sequence; identical to SEQ ID NO: 9830
  Synthetic

SEQ ID NO: 9832 - protein, 180 aa, Artificial Sequence
  Synthetic
EVEDVLRELRKEHDDLRKEITDVLRRLEKLHRELDEEDERSVKRIRELIEEVMRELRKRNAEERLEEELKRALEDVERVSKESKDHLRENLRRVEEIAKRLRDLLKENLKKVEEVLREPVDRKDLKALKEDSKRSIDDIRRKLEEARRRSERSIDENRKLNKRVIEKIREIIRRLEEKTK

SEQ ID NO: 9833 - protein, 180 aa, Artificial Sequence; identical to SEQ ID NO: 9832
  Synthetic

SEQ ID NO: 9834 - protein, 180 aa, Artificial Sequence
  Synthetic
EVEDVLREAERLHRTLLKEIRDALRRLRKLIEDVKRKDDESLKRLREKLERLKESLERNKVEEDLKRTLEKVREELERASERSKRHLEKVLRELEKIIKELEDRLRENLDRVRRVVDKPVDREELKKLLEDSKRSLDELRRRLKEVEDRVREAIKKNEDENRKLERRLDKIIEDLERRVK

SEQ ID NO: 9835 - protein, 180 aa, Artificial Sequence; identical to SEQ ID NO: 9834
  Synthetic

SEQ ID NO: 9836 - protein, 181 aa, Artificial Sequence
  Synthetic
SEAEKILKEIRDISDRTREELKKVKDEHKTLIDRLREILERALREHDRLAKELEDIKRKIDSEDLRREAERVLETLKRTSEELDEIVKKVERELEDTTRRMEESLRDMNRRLRELLDKLRKDGVPEEVLREISKIIKDNHDEVTEVLKESEELIRRLRKEVEDVRRTSEKLIRELEERVRE

SEQ ID NO: 9837 - protein, 181 aa, Artificial Sequence; identical to SEQ ID NO: 9836
  Synthetic

SEQ ID NO: 9838 - protein, 181 aa, Artificial Sequence
  Synthetic
SEVDDVLRRLEELIKTLEDINRKSLEDIKKLIDDLRKILEDALRKHEKLIRELREMKKRIDSREAEEIAKRVLEELKRTSDDLRKKVERVDEDLRRLLRENHERNKKILRDLERLLRDAARRGVPKEFLDRMREEIRRLEEESRKSDETIERLIRELRRRVEEVLKTSTDLIRELEEEVKK

SEQ ID NO: 9839 - protein, 181 aa, Artificial Sequence; identical to SEQ ID NO: 9838
  Synthetic

SEQ ID NO: 9840 - protein, 182 aa, Artificial Sequence
  Synthetic
SSVERVLEAVKELAKKLAEDIRRSLEHIRRLLEEVEKKHRDSKEHVRKLLKDLRDIAREKGAGEELVRDADRLAEEIKKYHDENVDRIRRAVEELAEAHKRLLEEAEKLVRTIEDRLRKVGSDDKELKKILDELRKLIRKVLEALRELNKRAKEILDRVAENVKEVNERLERLVRRIAEEIR

SEQ ID NO: 9841 - protein, 182 aa, Artificial Sequence; identical to SEQ ID NO: 9840
  Synthetic

SEQ ID NO: 9842 - protein, 182 aa, Artificial Sequence
  Synthetic
SSVERVKEEVEKLLEKLEREIRKSLKTIRELLRELKRKHEESKEHVRRLLEKAEREARRRGVDERLVRELRKLVEDIERYHDDNLRRAEEVVRKVEEDHRRLLEDARKLVEEIKRRLEEVRSDDKKLEEILRRAKELIDRVLEELKKLNEELRRIIEEIVRNVKRVNEKLEKLLRDIKRRID

SEQ ID NO: 9843 - protein, 182 aa, Artificial Sequence; identical to SEQ ID NO: 9842
  Synthetic

SEQ ID NO: 9844 - protein, 182 aa, Artificial Sequence
  Synthetic
SSVEEVLRRVKELLKTLKKKHEDSKRTVKELLDDLRKKHEDSKRHVRKLLEELEKRARERGVDKRLVDELRELMKRIEEYHDRNLKRVEDLIKEIERYHDRNLAELEKLARRIEERLKTVRSDDKELKRILEEVKELVKRVLENVERVNREVRERLKEVSRNVERVNKEAKELVDEVEERAR

SEQ ID NO: 9845 - protein, 182 aa, Artificial Sequence; identical to SEQ ID NO: 9844
  Synthetic

SEQ ID NO: 9846 - protein, 182 aa, Artificial Sequence
  Synthetic
SSVEEVRKRVRDLIKRYREEVEKIKKDVRRLLDELREEVKRSLDHVRKLMEELRRKIKRDGVDRRLVEEADELVKTIEDRHEKVKRTAEKLVEDVEREHDELKRKVEELVKEIERRLEEVRSDDKELKRILDELKERLERAKRENEDSVRKLRKLIEEILREIRRLNKEAEDLIREIEERAR

SEQ ID NO: 9847 - protein, 182 aa, Artificial Sequence; identical to SEQ ID NO: 9846
  Synthetic

SEQ ID NO: 9848 - protein, 182 aa, Artificial Sequence
  Synthetic
KDVEEVLTRVRELLRRVEEEIRRSEEHIRRLLEELRRKHEESKDSIRKLLEDLEEKVRRRGADERLLREAKRLVEEVERYHEKNLRDAEEMVRRVEEKHRRLLEEIRRLAKRIVDDLRRVRSDRKDLEEILREVEKLVEEVERRLRKLNEELKEILRTIVENVERVNRRLEELIRDIKRRVK

SEQ ID NO: 9849 - protein, 182 aa, Artificial Sequence; identical to SEQ ID NO: 9848
  Synthetic

SEQ ID NO: 9850 - protein, 175 aa, Artificial Sequence
  Synthetic
SEVEKIVEEVKKIVEEVERLHRKLLEDLRRVVEEVEDRSRRINEEAKKIVEDLKRRGNEDEDTVRKILEDAERVLDRLRKEHERLLRELEEVLRRLHEESKKIIRRLDRVLEEVRRAGVDEEVLKEIEDRLERLRRRAEEVNDTARKIVREVEESLKRSVESLKKLVDELRETLR

SEQ ID NO: 9851 - protein, 175 aa, Artificial Sequence; identical to SEQ ID NO: 9850
  Synthetic

SEQ ID NO: 9852 - protein, 175 aa, Artificial Sequence
  Synthetic
DEVERLLEEAKKIVEEMKRLHEEILREVEEIVRELDEKHDKLLRDAEEIVKELKKEGNEDKRTVEEILRRLEKVLKELREEIEKINREIKKVVEEARKKSEDIIRRADKVLEDLDRAGVREEMRRRLEKLVRDLREKSREVNERIDKLLEELHEKSERVKKTIDDLVEEVKDTLT

SEQ ID NO: 9853 - protein, 175 aa, Artificial Sequence; identical to SEQ ID NO: 9852
  Synthetic

SEQ ID NO: 9854 - protein, 175 aa, Artificial Sequence
  Synthetic
KEVEDILREVKKIVDELLRRHRELLERARRIIKRLKEEHDRLLKELEEIVRDLTRKGNEDEDTVREISKRAKEVIERLETESRKLIRTIDEVLKELHKESRKIIKELEEVVKRVREAGVSEEILRRIEELLKRLRDDAKRVNDELKRLVEELRKRSKEVNDELRRLLKELEDRLR

SEQ ID NO: 9855 - protein, 175 aa, Artificial Sequence; identical to SEQ ID NO: 9854
  Synthetic

SEQ ID NO: 9856 - protein, 175 aa, Artificial Sequence
  Synthetic
SEVEEILKEVERRVDELTRRHEELLRKADEIVKDIRRKLEEINKRLKDIADDVRRKGNEDERTVRELLEELREAVKRARELHKRLLEEVKEVLERLREESKKIIEELRRVLEKVRRAGVDEEILRRIETLLEELERRSKRVNDELEKLVRELKEELERSKRSIDEILKKVSKDLK

SEQ ID NO: 9857 - protein, 175 aa, Artificial Sequence; identical to SEQ ID NO: 9856
  Synthetic

SEQ ID NO: 9858 - protein, 175 aa, Artificial Sequence
  Synthetic
DEVERLLEDLREKVKRLVKKHEDILREVEKEVRRILRTSEEINREAEEIIRELDKRGNEDEETVRRILRTIEEVLKELEKRHRDLLKELEEVAKRVKEKSDELIKTIDRVIEKLRRDGVDEDVLRDVDRLLRELREKSKEVNKRIKELLDKLKTDLERSKEHLERLVKTLKDKLR

SEQ ID NO: 9859 - protein, 175 aa, Artificial Sequence; identical to SEQ ID NO: 9858
  Synthetic

SEQ ID NO: 9860 - protein, 175 aa, Artificial Sequence
  Synthetic
DEVEDLVRKLKKRVDDLLAEHKRLLDEAEKIVREVLKKSRESNERNKKVSKEVRERGNEDKDTVKRLTDELEKVMRDNKETHDRLARELEEAVKRLKEESEKIKRDLDRVLEKIRRDGVSEEVLKTLDRLVEELRKASEDVNRELDKLLKDLEKKLRDSIRHLEENHKDVRRALE

SEQ ID NO: 9861 - protein, 175 aa, Artificial Sequence; identical to SEQ ID NO: 9860
  Synthetic

SEQ ID NO: 9862 - protein, 178 aa, Artificial Sequence
  Synthetic
DEVEKVLKEIRKRVEDSLRHLEKVNKEAREIVEKVREELRESNERLREIVKTIRDRLEKLKGNDEMLKRLKDELDEALRRHREILDRLRRELDKVRRRLEELHRENKEDNRRVLKKAEEDGVEEDVRRTVEELVRRSEKAIEDSRRSIEDLVRRLKEDIERSLRSVEKLVEELTEAIR

SEQ ID NO: 9863 - protein, 178 aa, Artificial Sequence; identical to SEQ ID NO: 9862
  Synthetic

SEQ ID NO: 9864 - protein, 178 aa, Artificial Sequence
  Synthetic
SEVEKVLEELRRIVTKSARHLDESNERLKEIIRRLDEKNKEALKRAEDIIRDIDDKLKKLKGDKRVLDELARRIEEVLRRLRRIVEESRKELDEALKEHDRALRENERENREALRDAEEKGVDKKVKDEVKKLIDDSREKIKRSRESVKRLVEEHRRRSEEVRKTLEKLAREITERIR

SEQ ID NO: 9865 - protein, 178 aa, Artificial Sequence; identical to SEQ ID NO: 9864
  Synthetic

SEQ ID NO: 9866 - protein, 177 aa, Artificial Sequence
  Synthetic
DELEEVADEVRKIIEDLERRLREVVKTSEKLNKENRRRTEDVEKEVEKILRELEEKLRGDEKVRKIIEDLRRELKKAKDESEKSNREIRETTRRLEEEVKKIEDELRKILEEAKDIRADEDIRKVLKELREIIKEVEDMLKEVLDRNRKLIEDNLRRLKEVLDRLRKKVREIEEEAR

SEQ ID NO: 9867 - protein, 177 aa, Artificial Sequence; identical to SEQ ID NO: 9866
  Synthetic

SEQ ID NO: 9868 - protein, 177 aa, Artificial Sequence
  Synthetic
SEIEEAEERVRRLIERNKRETDRVAEEVKRINDENRRATEKVKRDVKRILDDLRRKLEGLDEVREILDRIRRRLEKLERDSKKSNEELERRLKKAIDRSRKTDEDLKEILKKAKDLEKDKLLRDVLRDLERLVRKNLEELKRVLDELKRLMEDNLRRLEKVLEELERLVREIVERAR

SEQ ID NO: 9869 - protein, 177 aa, Artificial Sequence; identical to SEQ ID NO: 9868
  Synthetic

SEQ ID NO: 9870 - protein, 177 aa, Artificial Sequence
  Synthetic
EELERVAKKVRDINRRNKEETKRVEDEVRRLIKENEDTSREVVRRNEEILKDLERKLGGLDEVRKILKELEEETRRLLKRSEDSNRRLEELLRRAKKESEDTNKRLEEILKEAERLEKRDVVREVLERLKELVKRNLDKLKRVLDEIRRLIEENLDELRRAHEEHRRIAEDIRRKAK

SEQ ID NO: 9871 - protein, 177 aa, Artificial Sequence; identical to SEQ ID NO: 9870
  Synthetic

SEQ ID NO: 9872 - protein, 177 aa, Artificial Sequence
  Synthetic
ESLERVKEEVKKILEKNRRTSEEVARRVKELIDRNREKSKDVARKNEKILEDLERKLRGDKDVKKILDELEKRTRDLLRDSERSNEELRDLLRKLLEESKRTNDEIKKILDEMDKLRSEEEVERVLRRLRELVRENEKRLKEVLDEIRRLIRENEEKLEKAHREHKKLAEEVERRKR

SEQ ID NO: 9873 - protein, 177 aa, Artificial Sequence; identical to SEQ ID NO: 9872
  Synthetic

SEQ ID NO: 9874 - protein, 181 aa, Artificial Sequence
  Synthetic
DDVERVLKEVRELVERANEEIRKVLERDRKSNEDANRKIREVLRRVEELVDRIDKIRRELSDKKTVRETVEDILRRIEELLKELKRISDETLKRNEDSARELRERSERTLRRIEDLLRELKKRKASDEVVKKIKELLDRHRKTTEEVLERIRRSLEKHRRDSEEVMKELRRLVKELEDRTR

SEQ ID NO: 9875 - protein, 181 aa, Artificial Sequence; identical to SEQ ID NO: 9874
  Synthetic

SEQ ID NO: 9876 - protein, 181 aa, Artificial Sequence
  Synthetic
DEVRELLRTIEELVRDANRKIKEVLDRDRESNDRANKTLEEILKRDKRSNEDVEEKLKKLTDKSKVKEIVDRVRKENEDSLRKLEETSRKTLEDNKESLKELKKLSEKTRREIERLIDEARKRNVDKKVEKKIRDLLKKHEEDSRKALEDIKRSLERHRERSEEVLKRIRDSLRELDKKTK

SEQ ID NO: 9877 - protein, 181 aa, Artificial Sequence; identical to SEQ ID NO: 9876
  Synthetic

SEQ ID NO: 9878 - protein, 181 aa, Artificial Sequence
  Synthetic
DSVEEILKRVKELVDKANEKIKEVEERVRRSDEELKKILEEILREIEKLVREVEEIARRLSDKETVRERVERIEKRLRELADTIRRIVERVLRENERLLRELKKLSDKTLEDIKRLLDKADKDKVSDEVKKKIKDLLEKHERDSRKVLRKLEESSKETEDRAKEVLERIEKLLEDLRRETK

SEQ ID NO: 9879 - protein, 181 aa, Artificial Sequence; identical to SEQ ID NO: 9878
  Synthetic

SEQ ID NO: 9880 - protein, 178 aa, Artificial Sequence
  Synthetic
KDAEELLKRVRDLLKRSLESLEKILRDSKELADRWRKKLEDLLRESEELVDRAEKILRRGDNDKRVLDKIAEEVRRTNDDSRRLDEELHRLSRDTLRKLEENLRRTEKEVREMDKRAAERGVDERVREELKKLLTRVEEEHRKVLETDKKLLKELHKESKEVNDRDRELLERLEESVR

SEQ ID NO: 9881 - protein, 178 aa, Artificial Sequence; identical to SEQ ID NO: 9880
  Synthetic

SEQ ID NO: 9882 - protein, 178 aa, Artificial Sequence
  Synthetic
KDAERLLRELKKLLEESLKSLKELTDRIRDEVRRVKKRLRDLLRESEELVKRAEDILRRGDNDKRVLDELRKEVERTNRKSEDILREAKELIEKVERELERNLEETEKLIKRIREEMKRRGVREEVEETAKKLLDEVRRAHEEVLKEIRELLRDLERTVREVNEEDKKLLRKLEEDVR

SEQ ID NO: 9883 - protein, 178 aa, Artificial Sequence; identical to SEQ ID NO: 9882
  Synthetic

SEQ ID NO: 9884 - protein, 174 aa, Artificial Sequence
  Synthetic
SEAEKVRKDLKDIADDLHRVSERVLREDERLLKRLHDVSRDVRERDREIVEDLRRGGISKTLLKEVERLSEESKRKLDKLNEEVRRLSEESRKRLKDLNDELREIVRRVKETVDSGDDREEVLDRARKEVDEIKKKHKKVLDESRKLVAEAERKHEEILKESEDLAREIKERER

SEQ ID NO: 9885 - protein, 174 aa, Artificial Sequence; identical to SEQ ID NO: 9884
  Synthetic

SEQ ID NO: 9886 - protein, 174 aa, Artificial Sequence
  Synthetic
SRAEKVREDLDRIEEDLRRVHREVLKEVERILKELHDTSKRVRDEVEKIVRDLRRAGIPKDLLKRAEDLIKEIKDKLDRLNERAEEIFRDIRRYIEENEERSKRLVDEVRKRVDDGDDREKVLEDARKLVRESKENIRRVLEDLKRIVKKLKEDHKRILDELKKLVDKIKEDAR

SEQ ID NO: 9887 - protein, 174 aa, Artificial Sequence; identical to SEQ ID NO: 9886
  Synthetic

SEQ ID NO: 9888 - protein, 174 aa, Artificial Sequence
  Synthetic
SRAERVREEIDKILEDLHRVSERIKRELTKLMEDLERTHERIKKAIREILADLRRRGVPKSLLKKAEDLVKRVEDYVRKNLEDSRDDIRKVREEVEELNKRAEDLVREVKKIVDSGDDREEVLKEAKKLVDDLKEKHKEVLTRVERLVEESKKNLKRVLDELRDLVRRVKEEAK

SEQ ID NO: 9889 - protein, 174 aa, Artificial Sequence; identical to SEQ ID NO: 9888
  Synthetic

SEQ ID NO: 9890 - protein, 174 aa, Artificial Sequence
  Synthetic
SEAERVREELDKIVEDLHRTSEDVKRRDEELLKDLERRHKEVKEEDEKILKDLRDSGIPKDLLREITKLSRDSKKYLEENLRRSRKLSRDSKEKLEELNRRARDVIRRVRETVDSGDDRERVLEELRKTVTEMKKRHRDILRESEELARESKENVDRVLEESRRRAEEIKRRAK

SEQ ID NO: 9891 - protein, 174 aa, Artificial Sequence; identical to SEQ ID NO: 9890
  Synthetic

SEQ ID NO: 9892 - protein, 174 aa, Artificial Sequence
  Synthetic
DERERVKEELDKLLRDLERVHDKVREDDKRLLDDLRRVHEKARRDDKRILDELKRAGIPEDLLREVEKLSRESKRYLDENLRRSEELSERSRKYLDDNLERSRRLMEDVKRKVESGDDREEVLERAKELVKRSKENVERVLRDSERLAKESKENVRRVLEESKRRVEEIEERAR

SEQ ID NO: 9893 - protein, 174 aa, Artificial Sequence; identical to SEQ ID NO: 9892
  Synthetic

SEQ ID NO: 9894 - protein, 174 aa, Artificial Sequence
  Synthetic
SEAERVREELKRILEDLERVHREVEEAIERIVEELEDVHRRARERVERILRELERRGIPKDLLERARKLIEDIKRYLDENLKESRRLAEDVKRKIRENLKRSREIVERVIRIVDSGDDREEVLKEIEKMVKESRDTVRRILEELRELVERSKRNVEKVLRDLERAVEKIERDAK

SEQ ID NO: 9895 - protein, 174 aa, Artificial Sequence; identical to SEQ ID NO: 9894
  Synthetic

SEQ ID NO: 9896 - protein, 174 aa, Artificial Sequence
  Synthetic
KEAEDARRRVDEILEELRKLHDEVRKTDKELLDDLEREHERVKREDDKILDTLRRQGIPKSLLEEIKRLSEDSKRYLEENRKESRRLSEESKRKLDENLERSERLAKEIRERIDSGDDREKVLEDLERLVETSRKTVRDILEESKELVKRSKENVRRVLERSKELVKRVSERAK

SEQ ID NO: 9897 - protein, 174 aa, Artificial Sequence; identical to SEQ ID NO: 9896
  Synthetic

SEQ ID NO: 9898 - protein, 184 aa, Artificial Sequence
  Synthetic
SDVDEARKTVKKILDESEETLERVRRELERILRDSERTLKRVEERVRRILRDLERELRKLPEDDKLKELERRVREATKDVERMLDEDRKRNDKARRELKKVLDENRRKNKKVMDDAEKILRETTDREEIDKVLKEIRERVERSKKHLEDVLDRLRKIIEESKRHVEKVLEKLEKIVKELKDELK

SEQ ID NO: 9899 - protein, 184 aa, Artificial Sequence; identical to SEQ ID NO: 9898
  Synthetic

SEQ ID NO: 9900 - protein, 184 aa, Artificial Sequence
  Synthetic
KDIEEVEKRVREILEDSRRMSKKDEESTRRILEESRRVSEEDKKSTEEILKELKDELRKLPERDKLERLRREIEKVVEENRDVNRRDNRRNEEAIRENKELNKEDNDDNEKVLEDAKRILDETTDRDTIKKMLEEIKRRVDESKRHLRESNKRIRDIAEESKKHLEDSNKKVRDRADELKKRLK

SEQ ID NO: 9901 - protein, 184 aa, Artificial Sequence; identical to SEQ ID NO: 9900
  Synthetic

SEQ ID NO: 9902 - protein, 184 aa, Artificial Sequence
  Synthetic
SDLERVKKAVEDILRDSERTLRRARERLKRLLEELRRTSEEDKKSTDEILERLKRELEKLPPDRKLERLDDLIRRLVKRNKEINDRVNEVVERMMREAEDRLRRDKERNDRVVREAEEIIRRVTDRDELRKLLEEIRRRAEESKRHIEEVLKRLEEIVKRLKEELKRSNDEIREIVRRLEEELK

SEQ ID NO: 9903 - protein, 184 aa, Artificial Sequence; identical to SEQ ID NO: 9902
  Synthetic

SEQ ID NO: 9904 - protein, 180 aa, Artificial Sequence
  Synthetic
STLEEMEKEVEKLNRDSRRTLREVAERVEELNRDNERTSKRVEDAVRELNKRLRDEVRRREVEKVIKESRDSLERLKERSKRSNEESKRTLDELKKKVEDVNKRSKESLDRLREAVKNKAPEEELRKVLKENEELARELKKELERALEENRRLHEENKEDLRRVLEENERLHRKLRKDAK

SEQ ID NO: 9905 - protein, 180 aa, Artificial Sequence; identical to SEQ ID NO: 9904
  Synthetic

SEQ ID NO: 9906 - protein, 180 aa, Artificial Sequence
  Synthetic
DTLERVAEAIRRLNEDLKRTLEKVERAVREILKRLAETLKRAEEEVRRLNRDLERKVRRDEVEEVIRRSRESLRRLKEEVKRALDRIKRLLDELKKRVREVNERSKRSLEDLKRLVENNASEEEIKKVLDDNKKLAEDLKRELKRVLEEIRKLVKELEDIVREVLKTNKELHERLKRRAD

SEQ ID NO: 9907 - protein, 180 aa, Artificial Sequence; identical to SEQ ID NO: 9906
  Synthetic

SEQ ID NO: 9908 - protein, 180 aa, Artificial Sequence
  Synthetic
DTLERAAEEVKKLNEDNKRTSKRVEDEVRRLNRENEEMSKRVKDTVKKILDDLRRKVDRDEVDEVLRRIEELLERLERESEKSNERSRETLRRLKRRSEESNKRLEELLRELDKLVKDNADEKEIERVLRELERIARENKKELEKVLRENRELHERNKKLLEKVLRDIKRLAKTLRDRTR

SEQ ID NO: 9909 - protein, 180 aa, Artificial Sequence; identical to SEQ ID NO: 9908
  Synthetic

SEQ ID NO: 9910 - protein, 180 aa, Artificial Sequence
  Synthetic
RELEEARERVKRLNEENKEFSRRVAEEVKKLNEENERTSKKVEDEVRKLNEDLRKKVDRRDVKRAIERSKELLKRLKEKSEESNKTSEKTLRDLERKSRESNKELKRLLEELEELVKNNADEETIKRVLEELTRIMDRNRKDLRRVLEENKKLHDENRKELKRVLDENRRLHEEVKKRAK

SEQ ID NO: 9911 - protein, 180 aa, Artificial Sequence; identical to SEQ ID NO: 9910
  Synthetic

SEQ ID NO: 9912 - protein, 180 aa, Artificial Sequence
  Synthetic
SELERVKTEVEKLNRRNREATERVKEEVKKLDEENKKSSKRVEDEVRKILDELRKKVDRDRVEKALREIEKLLEDLKRTSDKSNRESEELLKELEERSKRSNDTTKKLLEELEELVKNNADREELERMLKRLKEIIERNEERLKEVLDRIRELIERNKELLRRVLKRIRDLVKELKERAD

SEQ ID NO: 9913 - protein, 180 aa, Artificial Sequence; identical to SEQ ID NO: 9912
  Synthetic

SEQ ID NO: 9914 - protein, 180 aa, Artificial Sequence
  Synthetic
RELEEVERRVRELNEDNRRKTEEVKREVKRIDDDNRRASERAAREVKKLNKDLKDKVDDDEVDRVIEESRRLLRELEDKSKRSNDTSKRLLEELEKRSKDSNRRTKELLERLKELVDRNADEKTLEDMLRRLKEIIKRNKDELEKVLRDIKKLVDDNKRDLERVLRRNEELHRELLERAR

SEQ ID NO: 9915 - protein, 180 aa, Artificial Sequence; identical to SEQ ID NO: 9914
  Synthetic

SEQ ID NO: 9916 - protein, 180 aa, Artificial Sequence
  Synthetic
DELERAKEEIERLNDELKKSLEEVEKEVEKLDDDNRRTSRRVSEEVKRLNKELEDEVRRDDVERAIRESEELLRRLEESSERSNEESRRLLKELAKTVREVSKTSKKSLEELEKLVRDNADRDTIRKVLKENEDLIRKLEEILKKVLDEIRRLIEDNKRELEDMLRKNKELHDRLRERAR

SEQ ID NO: 9917 - protein, 180 aa, Artificial Sequence; identical to SEQ ID NO: 9916
  Synthetic

SEQ ID NO: 9918 - protein, 180 aa, Artificial Sequence
  Synthetic
SELEEVKKEVEKLDERNKRLSKRVEEEVRKLNEENKRATERIKREVEKILEDLRRKVRRDDVDRVLDTIRRLLKRIEEESRKSNKETRKLLEELKEDSKRSNEETKKLLEDLEKLVKDKADREELKRMLDRLRRIIEENERKLKEVLDRLRDIIRKNKEDLKRALERIKKLVEDLKRRAT

SEQ ID NO: 9919 - protein, 180 aa, Artificial Sequence; identical to SEQ ID NO: 9918
  Synthetic

SEQ ID NO: 9920 - protein, 185 aa, Artificial Sequence
  Synthetic
SDLERVLDEIRRLAKEVKDTLRRMLEKNEELSKRDEDKTREMLKEIERLVKELEEIADKLSDEKTVREIVRRIEEDIKRLLEEVKEKNERSIRKSKKTLDDAKRIVDKILEEIRRLLEELRKRVKDDDRLRKAEEEIKEIERDLKRTLDEVAKEVKRTIDRNRETSKRAAREVEKLLEKLREKTR

SEQ ID NO: 9921 - protein, 185 aa, Artificial Sequence; identical to SEQ ID NO: 9920
  Synthetic

SEQ ID NO: 9922 - protein, 185 aa, Artificial Sequence
  Synthetic
SDLERMLREIRKLVEDDKRRTREMLRDNERLSREDKKKTDDVLRRLEELVRRLEEILKKLKDKDTVRKIVKEIIEELEKILKELEDTNRKSIEDSRRTLREVREINKDSIKKLEDLLKEVAERVDDDKRLDDIRRAIEEIIRDLRRASKKASEDVERTIERNERTSEEAKRRIEELIERLRRTDK

SEQ ID NO: 9923 - protein, 185 aa, Artificial Sequence; identical to SEQ ID NO: 9922
  Synthetic

SEQ ID NO: 9924 - protein, 185 aa, Artificial Sequence
  Synthetic
SDLEEALKRVEKLVRDDKEKTKRMLERNRELVKRNKEKNKRMLDEIRRLVEELEDILRRDKDRDTVRRIVEDIKRRIKKLLDDIRETNERSIRESEETLKRVEDLNRESLRTIEELLREIKERVEDDKRLKEVEDAVREILKDLKRTSERAKEEIERTIRDNERVVRRLEEEARKILEDLERRDK

SEQ ID NO: 9925 - protein, 185 aa, Artificial Sequence; identical to SEQ ID NO: 9924
  Synthetic

SEQ ID NO: 9926 - protein, 182 aa, Artificial Sequence
  Synthetic
SRIEELLKTVEKLVDEVKKALRKLLEENKDLARKSKESLERLLDEVRDLVRRLEEILDRGDNDERVLREIEKRVKDAKDRVRDNLREVHRLDEESKRRLEDLLRRVKELAEDVKKKLKDDVDDKDKLERVMRTLDEILKDLERTVERVKRALDESNRDLRREHERIKKELDKILDRLREKAR

SEQ ID NO: 9927 - protein, 182 aa, Artificial Sequence; identical to SEQ ID NO: 9926
  Synthetic

SEQ ID NO: 9928 - protein, 178 aa, Artificial Sequence
  Synthetic
SEVERLKEELDKLHKENREVLEDSKRSLDKILDDVRKLAEDVKKRLDDILKELRDRGVPEEALKEAEKVITDLKRRIDELLDRVRKIVEELKRRHDRLLEEHKRIIDDIKDKLEKNKTDRDLLRRLLREAERVSEETKKESKKLNDEIRKVLERLRDELRKIEDEIRKVVRRIRERAN

SEQ ID NO: 9929 - protein, 178 aa, Artificial Sequence; identical to SEQ ID NO: 9928
  Synthetic

SEQ ID NO: 9930 - protein, 178 aa, Artificial Sequence
  Synthetic
DEVETLKKRLDKLHEDNKRDLERSKRSLEELLKELEEVVRRSEKTLDELLKKVEDQGAPRELLEELKRIMDELKRKHRELLKRAKEMLEEVKRRHDRLLEEHKEIVERIKREVERNKDDRKLLKELEDTIRKVSDDTRRKSEELNEELKTVAEEIKKRSRELNEEAKDVLEKVERRTT

SEQ ID NO: 9931 - protein, 178 aa, Artificial Sequence; identical to SEQ ID NO: 9930
  Synthetic

SEQ ID NO: 9932 - protein, 178 aa, Artificial Sequence
  Synthetic
DEVERAKEKLDKILEDLRDVVRRSKENLDRLHEENRETLERSKKNLDRLLEKVKKDGVPEELLKELERIIRDLKRKHRKLLEDHRKIIEELKREHDRLLKEAEEIVRRIKDELEKRKDDRRDIERILRELEKVLKKLTDESERLNREVERVSRDTKKKSKELNEELKRVLDEVKRKAD

SEQ ID NO: 9933 - protein, 178 aa, Artificial Sequence; identical to SEQ ID NO: 9932
  Synthetic

SEQ ID NO: 9934 - protein, 182 aa, Artificial Sequence
  Synthetic
DEVREVLRELKKVVDDSKRDLDRVLREAERVVKESKDDIKRLLEETERVARDVERKIRENKGNKEVVDRIRKEVKEVHERSERILKRNEEKNRTVLKKAEDMIERNLRENKKVADKIKRVVEELKIDETLDKEVKRLLKESKRAADELRERIKRLIEESKRLLDTVRREDKKILEKIERDLK

SEQ ID NO: 9935 - protein, 182 aa, Artificial Sequence; identical to SEQ ID NO: 9934
  Synthetic

SEQ ID NO: 9936 - protein, 183 aa, Artificial Sequence
  Synthetic
DEIEKILEDLRRISEDTKRKHEEILRELEEILRELEERHRRILREVEEVARRLEERLNEDKRVVEELKKEAEEAIDEVRKRSRRINEELKRVLEEVRRKSEELNKRTEKVVRDVKRKIEETVTDEEKVKEVEREIRRLLKENEDASREVERLIEELKRRLDKISEDVERVLKKILERIDRATK

SEQ ID NO: 9937 - protein, 183 aa, Artificial Sequence; identical to SEQ ID NO: 9936
  Synthetic

SEQ ID NO: 9938 - protein, 177 aa, Artificial Sequence
  Synthetic
RSVEEAEKVLEELKRRNERLNEEHRREVEKVREKNERLNKRHREDVERIKRELDKEPVPEEVKRKLEEAIKKLERIDEESEEETKRVIDRLREMDEDTRRKTEKAIRELRKFLEDTTDDETIKDVLRKIKKISDETRKTLEDTLRELREISEKTRRRLDESLKELEEILRRLKEETR

SEQ ID NO: 9939 - protein, 177 aa, Artificial Sequence; identical to SEQ ID NO: 9938
  Synthetic

SEQ ID NO: 9940 - protein, 177 aa, Artificial Sequence
  Synthetic
REAEEIRKEVEKLLRDLKRALDEHRETSRRLVEELKDILRKNREEVERLVREIREVIKRVKDREVVEEVKKRLEDLVRDIEKVLRDTERIIEKLKEDSEDVLRRLDKIAKDIERDVERREPTRELIEEITRIVEKAKKELREVSKRLREIVKKIKEDNDRSNKRLREIAKEIKDRLT

SEQ ID NO: 9941 - protein, 177 aa, Artificial Sequence; identical to SEQ ID NO: 9940
  Synthetic

SEQ ID NO: 9942 - protein, 177 aa, Artificial Sequence
  Synthetic
SEREEARERVKDLSRKLKEINERSEKHLRDLAKENRDANRRTREEVERLLDKIRKVIKDVKDREVVEKVRELVERLREEVERVNEKSERILREVEKRVRDVLDETRKIVRKMEEEVERREPTEELIRELEKIVRDAEKKNRDVNREVRKILEDSKRELEKVLRDLERKVREIEKELK

SEQ ID NO: 9943 - protein, 177 aa, Artificial Sequence; identical to SEQ ID NO: 9942
  Synthetic

SEQ ID NO: 9944 - protein, 178 aa, Artificial Sequence
  Synthetic
RELEEVLKKLKEDAERLKRILEEATRELEKILERLHRLNEKSTEELRRIVKDLKEELKRRGRDEEVDKKVKDIIRELEKKSTKNLEDSRRIAEELRKTSRETVERVRKDLEELRKRVEELTRSEEVEKTVRKLEEDLKRAIEKHEEDSRRLVKRLKESNDEHEKESRRLVRELEKEIE

SEQ ID NO: 9945 - protein, 178 aa, Artificial Sequence; identical to SEQ ID NO: 9944
  Synthetic

SEQ ID NO: 9946 - protein, 185 aa, Artificial Sequence
  Synthetic
DEVREVIKTVRKLLEDLHRTNREVIERVKRTSEETHRKNEDMLRRLRKLVEDLKETLDRLEDKDTLRRIAEEIEKRIRKLLEEAEKINREALEEHKDLLRKLEEENKRILEELKRLLDKLRKDVEDEKSLRDAEREVKKLLEELKRSLDKLREDVERLLRENKESLDRLREEVKKIERELREKTR

SEQ ID NO: 9947 - protein, 185 aa, Artificial Sequence; identical to SEQ ID NO: 9946
  Synthetic

SEQ ID NO: 9948 - protein, 185 aa, Artificial Sequence
  Synthetic
SDVDRVLEELRKLVEELHRRNRKIIEDLRRASEKTHRKNRDLLEKAKKLADELREIAERLEDREKLREIAREILERLKKLLEDVAKTNTDALREHEEALRRLKEENDDIKEKIKRLVDRVRERIKDKDELRRLEEAAKKILDDLEDSLRKLEEAVKDLKRKNKKSLDDLAEAAKDILRRLAETAR

SEQ ID NO: 9949 - protein, 185 aa, Artificial Sequence; identical to SEQ ID NO: 9948
  Synthetic

SEQ ID NO: 9950 - protein, 185 aa, Artificial Sequence
  Synthetic
DEAEEVIKTVKRLLDELHRRNEEAIKEDRRLVEELHRTNEKVLREVEELVKRLAEILRRLKDKDTVRKIVEDIKRELDRLLDELRKTNEEIRKRSDDLNRKINRENEEILRRLDDLLRDLEAKIRDKETLDRLRERAEELKRRLEKSLRDLNRDNERTKRELRESLRKLEETARRLKEEIDRRTK

SEQ ID NO: 9951 - protein, 185 aa, Artificial Sequence; identical to SEQ ID NO: 9950
  Synthetic

SEQ ID NO: 9952 - protein, 184 aa, Artificial Sequence
  Synthetic
DEADDLIRRVRELVKRVKEALEDLLRRNKDVLRKVKEELEKITRRNRDKVRRVEEELKRIKDRETLRRLVEKVKRELDESHKEVERLIEKVNEISKKTLRDVEKLVTEVKKRLDDIKDELDKRVKSRKLEELRKEVEKLKEELDRVLEEARKEVEKSNRELKEVLERHAEDNERIKRRLDEARR

SEQ ID NO: 9953 - protein, 184 aa, Artificial Sequence; identical to SEQ ID NO: 9952
  Synthetic

SEQ ID NO: 9954 - protein, 185 aa, Artificial Sequence
  Synthetic
SELERLLDEVDRIVREIEERLRDILRKNRELSEDSERKLRELLREVRDLVRRIMDELRRTKERDVIEEVVRRIRELLKRIEDRLRKIADDSHKLDEESVRRLEDIARRIKKRVDEILEEVKRSGVPREKLEEARRRIDEIRRRLEELLKRAREDSDRSNKRNKDLLREIEEELKKLKRELDEETR

SEQ ID NO: 9955 - protein, 185 aa, Artificial Sequence; identical to SEQ ID NO: 9954
  Synthetic

SEQ ID NO: 9956 - protein, 181 aa, Artificial Sequence
  Synthetic
SLKEKVKKVIEDLKRAIDDLLRKVREESKKSNDHIRKLLEDSERTLRDLARRIKKLKDDGDLDERLLKEAKELLEELKRRSEEIIKEVEKLNEESDRVIDKLLEDLARLLKRIDDRIEKITDARLIKEVIEEAERLLREIAKRIRKVIEEDRDLNRRIAKKLDELNRRAEELLKRIADRAK

SEQ ID NO: 9957 - protein, 181 aa, Artificial Sequence; identical to SEQ ID NO: 9956
  Synthetic

SEQ ID NO: 9958 - protein, 181 aa, Artificial Sequence
  Synthetic
SSKETVKDVLRKITKRIRDLVRESKKTSDESNKHIKELLERSKKTIDELERRIEDLRRRGDLDDDLLREAKELLERIERESRRVFKEAEELNKRSDDETRRIVKEAEDLIRTVEERLKRIEDEELLRRLIKELEDLMREIERKLRELNERDKRLNEEIAKKLEKLNRDARKLVEEIERRAR

SEQ ID NO: 9959 - protein, 181 aa, Artificial Sequence; identical to SEQ ID NO: 9958
  Synthetic

SEQ ID NO: 9960 - protein, 181 aa, Artificial Sequence
  Synthetic
KLREDLEEMLRRSEKHIRDLVKRSEETSRDSNRHIEKLLKDSRKTIEDLKRKIEDLARKGKLDEKLLEEVRRLLEEIRKRSEKVIEDARRLNKRSDEETKRIVREADELNKEVKDRADRIRKRELLERLIRELKRLNEEIAKKLEDLNREDRRLNEEIAKRLRDLNEELKKLVEDIERRAR

SEQ ID NO: 9961 - protein, 181 aa, Artificial Sequence; identical to SEQ ID NO: 9960
  Synthetic

SEQ ID NO: 9962 - protein, 181 aa, Artificial Sequence
  Synthetic
RSKEEVDKMLERLRERIEKLVEESRKTSKESNEHLEKLFRESEETIKELKKRIEDLRRKGLLSDELLEEVKRLLDRIREESKKVLDEARRLNEESNRKTEEIVKEVRKLLEEVKRRADEIRDEDLLEKLIRELEELIRRIEKKLRDLNREDRELNKRIADEIERLNREARRLIEEIRKRAE

SEQ ID NO: 9963 - protein, 181 aa, Artificial Sequence; identical to SEQ ID NO: 9962
  Synthetic

SEQ ID NO: 9964 - protein, 181 aa, Artificial Sequence
  Synthetic
SLEEEVRREIERSRRHIEKLVRDSERTSKESNKHIKKLLDESKRTLDEIRKRIEDLARKGKLDEDLLKEARDLIREIEKKSRDVIREAKKLNEESNKRTEDIVREARELNERVKRRVDEIREREVLKELIRELRRLNEEIRKKLEKLNDEDRRLNEEIRRKLEEINEELRRLVREIEERAR

SEQ ID NO: 9965 - protein, 181 aa, Artificial Sequence; identical to SEQ ID NO: 9964
  Synthetic

SEQ ID NO: 9966 - protein, 181 aa, Artificial Sequence
  Synthetic
SLEETVEEVLRRLRRKIEKLVTESEETIRRSKKHIEEVLEKSKRTLDKIKEDIDRLRKEGTLSDEILTELDKLIKDVEKKSKELIDEARKLLEDTKRETDRIRREVEELLRRLEKEVKRIREREVLKELIDRARELIERIARKLTELNKENRKLNEEIARRVEELNKELKRLLKEIEDRAR

SEQ ID NO: 9967 - protein, 181 aa, Artificial Sequence; identical to SEQ ID NO: 9966
  Synthetic

SEQ ID NO: 9968 - protein, 181 aa, Artificial Sequence
  Synthetic
STKETVARELERSRKHLEDSFREAERAIKESEEHIRELLERSRRTLKEIEDRIRDLRRRGDLDDRLLEEVKELIDRVRKRSEDIFRRAEELLRRTRERVKRSLDRARKLNDDVERRMREITDERLLRELIEELRRLNRKIHEDNRRLIEDNKRLNEEIKRELDKLNRELERETEEIKKRAD

SEQ ID NO: 9969 - protein, 181 aa, Artificial Sequence; identical to SEQ ID NO: 9968
  Synthetic

SEQ ID NO: 9970 - protein, 178 aa, Artificial Sequence
  Synthetic
SVRETLREVLKESKKHLDDLVRRVKEEIERSKKHIDDLIRRNKESLDDIRRTVEEKIKGREILRKIEEALKRNEDELRRIATEAEKVHRDVEKTIREIVKELRDVHREIEDAIRKKQDDSDLVRELIKRLKEINDRVAERIKDIIRKVREANKDLERKLRELNKRSRDVLEEVVRAEE

SEQ ID NO: 9971 - protein, 178 aa, Artificial Sequence; identical to SEQ ID NO: 9970
  Synthetic

SEQ ID NO: 9972 - protein, 178 aa, Artificial Sequence
  Synthetic
SAAEEAEKASKDSEKHIKDLIRRLREVSEESRRHLRRLIEENKRSLEEIEKEVRKKVKGEEIRREIEEALRRNEDKLKKIEDEMEEVNKKSEEDVRRLEKEVKDVNDRSSDTIRDNKDDTELIKRIIDRNREINRRVAEAIKKIIKDNRDINEDLERKLRKLNEESKRVLDDVVRREK

SEQ ID NO: 9973 - protein, 178 aa, Artificial Sequence; identical to SEQ ID NO: 9972
  Synthetic

SEQ ID NO: 9974 - protein, 178 aa, Artificial Sequence
  Synthetic
SVEERLKDELRKSEEHLRRLIRELEKALEDSKRHADRLIKENRDSLRRIEDKARKKIRGDEILDTIRKALKDNRDELEKILREVEEVDKESKRRLEEILRTMREVNEESKDRLRKKDKDDETVKRIIEENRRINEDLARKIKEIIRDNKRFNEEVEEKLKRLNDTSEEILRRLVRRDE

SEQ ID NO: 9975 - protein, 178 aa, Artificial Sequence; identical to SEQ ID NO: 9974
  Synthetic

SEQ ID NO: 9976 - protein, 178 aa, Artificial Sequence
  Synthetic
SVDKELEEVIRRSKDHLEKLIKEAEDALKRSEEHLRKLIEEVKRRLEEVEKRVREKVRGEEILREIEKVLKEVEESLERILKELEDVNRRSREELKRILREMERVDEETKRELDRRTDDSELIKRLIKENKEINEKLAREIEEIIKENKRINDELKKRLEELIERLERILEEVERRER

SEQ ID NO: 9977 - protein, 178 aa, Artificial Sequence; identical to SEQ ID NO: 9976
  Synthetic

SEQ ID NO: 9978 - protein, 178 aa, Artificial Sequence
  Synthetic
SVDRTLEEVIKDSRRHVKELIDRLEKVIKESEENVKRTVDDNERSLKEIADTVRREIKGREILEEIKRVLDDNRRAVEELEKEAREVHRDVREKLKRILEELKRADDETERRLRERTDDSEDIKRLIDTNRKINRDVAETIKEIIKEVRKINKEIDDKARELNKESRRVLEEVVRAER

SEQ ID NO: 9979 - protein, 178 aa, Artificial Sequence; identical to SEQ ID NO: 9978
  Synthetic

SEQ ID NO: 9980 - protein, 178 aa, Artificial Sequence
  Synthetic
SVAETLRKVLKESEENVKRTVDRAEEELKKSEEHLRRLVERLKEVLEDVRRRVEEEVKGRELLREMDEVLKRIEEEIRKILRRLEEADKRSREALDKLEKDAKRVHDEVRDRLEKRTDDDERVERIIRELREVNERLDREVERLIRENREINRRLAEEIKDLIRRLREILREVVERAK

SEQ ID NO: 9981 - protein, 178 aa, Artificial Sequence; identical to SEQ ID NO: 9980
  Synthetic

SEQ ID NO: 9982 - protein, 178 aa, Artificial Sequence
  Synthetic
SIAEKVEKVLKESKENLDETIRRAEEDLKRSRDHLRKLIEENKRSLDRIKEEVDRRIKGREILKEIEEMLKRNDDRLKEILREVEEADRRSREELKRILDEAREVHKEIRRKIDERRDDSDAIEKLITDLRKINEEADRKVKEIIKRNRDINKKVEDDLRELNKESTTVLREVVERER

SEQ ID NO: 9983 - protein, 178 aa, Artificial Sequence; identical to SEQ ID NO: 9982
  Synthetic

SEQ ID NO: 9984 - protein, 178 aa, Artificial Sequence
  Synthetic
SELEKIIEDARRVLEEDERRNREVNRKLRKILEDNERLNREVNKRLREILKRLKEELKRLKGDKKAVEEVRKKVEEALRDVERVLEESRRDIERVLREVEEMLERSRKHIEDVLRELERRDLDEEAKRALDKIREDVRKILEDTKRELEDVRRRVEEILRETREELKRVEDDVKRAED

SEQ ID NO: 9985 - protein, 178 aa, Artificial Sequence; identical to SEQ ID NO: 9984
  Synthetic

SEQ ID NO: 9986 - protein, 178 aa, Artificial Sequence
  Synthetic
SELEDIIRKLDEILKRNEEENRRVIRRLRELLEEDERRNRKAIEDLERIITKLKDDVRKLKGDEKVLRELEETVEKVIRELRKILEDSRRHIEKVLREIEKILRESERNARKVVEDLRSKPLDRDAERRIREVEEEVKRILEETEEVLRDVKRRVDEILKTTEDRIREIEEEIKRTVK

SEQ ID NO: 9987 - protein, 178 aa, Artificial Sequence; identical to SEQ ID NO: 9986
  Synthetic

SEQ ID NO: 9988 - protein, 178 aa, Artificial Sequence
  Synthetic
DELRDIIRELRDILRENKKRNEDAIRKLRKILKENEKKNRDAIRELEDILEKLRKEIEDLKGDERVLREITKRVRDALERIKRILEESEDDIRRVLEEIEEILRRSKKNIDDAVRKLRSKDLDRKVEEDIKRVEEEVKKILDKTDEELKEVERRVRKILRETEEELKRVEDEVRRAKT

SEQ ID NO: 9989 - protein, 178 aa, Artificial Sequence; identical to SEQ ID NO: 9988
  Synthetic

SEQ ID NO: 9990 - protein, 177 aa, Artificial Sequence
  Synthetic
REEEKARRVMEKLKRDVDRINTRHRDILKKIEDEVRRIDEEHKTEVKKIKDRAEEIIRRIDDEKTVREARDIVRKIEEEVRRSNKTTEEVLRRAEDRVRKSNETTRRLLEKLERELREREPDKDLIREVEKILKDIEDLVRESERELREILKDIKRMVDESLKRLEDILRELEERTR

SEQ ID NO: 9991 - protein, 177 aa, Artificial Sequence; identical to SEQ ID NO: 9990
  Synthetic

SEQ ID NO: 9992 - protein, 177 aa, Artificial Sequence
  Synthetic
REEEEMRKVVKDLEDAARELDRDHETKLRRIEEEVKKLNEEHKRELERIARRIKEIIDRIEDEKVVREIRKILEEVRKRAEDSNKETEDILRDVRRRAKESNDRSREVVREARKEVREKRPDKDLIRRLEEILRRIARELEDSLRKLEKILEEIKEIVKKSLDELRRIVDELEKRVR

SEQ ID NO: 9993 - protein, 177 aa, Artificial Sequence; identical to SEQ ID NO: 9992
  Synthetic

SEQ ID NO: 9994 - protein, 177 aa, Artificial Sequence
  Synthetic
SEEEEVRRVLKRIAEEVKRLDEDHRRILEEIRKKVEKSSRDHKRELDKIKRDADEIIRRISDEKVVREIKRIVEKIEKDAEKVNRETKRILDELARRVEESNKRSEDVLRELEKEVRDKEPSKDLIKKLEEILEEIRRLLEESLRELEDILKKVHDRNARTLERLREILKEIEDRAR

SEQ ID NO: 9995 - protein, 177 aa, Artificial Sequence; identical to SEQ ID NO: 9994
  Synthetic

SEQ ID NO: 9996 - protein, 177 aa, Artificial Sequence
  Synthetic
DEKRKVDKRLKEIEETIRRLLEEHRRELDEIRKRIEEISRRHRKELEDIEREVRKIISRIDDERTVERIREELKRVKEDADEVNRKLKEILERIEKRARESDEKVKRILDEIRKKVRDREPSEDLIRDVERVMREVKRDLERSLEELRDVVRRAEEEVRATLRKLREILKKVEDETR

SEQ ID NO: 9997 - protein, 177 aa, Artificial Sequence; identical to SEQ ID NO: 9996
  Synthetic

SEQ ID NO: 9998 - protein, 177 aa, Artificial Sequence
  Synthetic
SEEETMRKVVKEIREKVRRISERHKEELERITDALRRSSKRHEDELREIEKAVREIIRRIDDDKTVKEIKKILDDARDRVKKVNDKTDDDLKKIKKDAERVNRELERELRKAEEDARRREPSDKLIRELEEILERLEREVRKSLDRLRKILEDIHRTNKDTLDRLREILKKVEDRTR

SEQ ID NO: 9999 - protein, 177 aa, Artificial Sequence; identical to SEQ ID NO: 9998
  Synthetic

SEQ ID NO: 10000 - protein, 185 aa, Artificial Sequence
  Synthetic
SEVEEVIRRLEELVDRLHKINKRAIEENERLNRELHEKNRDIIRKLKELVERLRDIKEKLSDKETLRRILEEIKTRIEDLTRRARETNEEIKRRSDKTLKDIRKINRDIKEEIKKLVREIEERITDKETADRARDEVRRIEKELDDSLRELEKRVRDSKRHLDRSLEELEKVVDEIRKELEDLAK

SEQ ID NO: 10001 - protein, 185 aa, Artificial Sequence; identical to SEQ ID NO: 10000
  Synthetic

SEQ ID NO: 10002 - protein, 185 aa, Artificial Sequence
  Synthetic
KEVEEVIKRLRELVDRLEKENRDVNEDNKRLNEELHDRNRKMIEELRRLVTELEDIRRKLKDKDTLEEIIREILKRIEDLLKRIREINKKILEESRRTLEEAKKRNEEIRREIKRLLDELRKRITDKDLLKRVEDEARKIEEKLKRIHEETKKVADDSERHLRKSLRELEKVAREIKKRLEEERK

SEQ ID NO: 10003 - protein, 185 aa, Artificial Sequence; identical to SEQ ID NO: 10002
  Synthetic

SEQ ID NO: 10004 - protein, 185 aa, Artificial Sequence
  Synthetic
DEVREIIKDLRRLLKELEERNREINDRNKKLNDTLRKELEDIKRRLEKLLRELEKIVRELSDEDTLREIVERIKKRIRDLLEEVRKRIEEIKRRSRETLKRIKEINEEIKKRIRELLEEIARRITDEEVLRRVEEEVRDIERRLDKIHEDTRDTAEKSERHLDALLRDLERVAREIEEALDRLKD

SEQ ID NO: 10005 - protein, 185 aa, Artificial Sequence; identical to SEQ ID NO: 10004
  Synthetic

SEQ ID NO: 10006 - protein, 185 aa, Artificial Sequence
  Synthetic
SEVEEVIRRLRELLRTLEEENRKMIRENERLLEELKKRNEDIERELRKLVTELAKIADKTRDKDTLEKILREIEREIDRLLDEIHKINREIIKRSRDSLREAHKRNKEIKERIEKLLRDLEARITDEKLARELREVAERIKKRLDEIDETTRRMVTESIKRLEEIDKRTTERAREIKKELRDRAT

SEQ ID NO: 10007 - protein, 185 aa, Artificial Sequence; identical to SEQ ID NO: 10006
  Synthetic

SEQ ID NO: 10008 - protein, 185 aa, Artificial Sequence
  Synthetic
SEVEDLIRRLEELLDRIRRDNERIIKELEELLRELEETNKRLIERIRKLLEDLRDTVRKLSDKDTLRKILEEIRRTIDKLLKEIHDTNKRIKDEIERLLREIHRDNERIKDEIRRLLEDIARRITDEKLMREAKEAVDRIKKRLDEINKRTEDVARRIRKRLDEIDERTKEEAKRIKEELDKEEK

SEQ ID NO: 10009 - protein, 185 aa, Artificial Sequence; identical to SEQ ID NO: 10008
  Synthetic

SEQ ID NO: 10010 - protein, 185 aa, Artificial Sequence
  Synthetic
SEVEELIERLKELLERLEELNRRVNEENRRLNEELERRIRKAIEDLKDLLRRLDDIRRRLKDKDTLRKILEKIKRDLEDLIRKLRETLRRIKEESERTLKEIAEMNKKIKDELERLVREIEERITDEKKLRELKEVVDRLKKEIKRIDEETRKEAERSKRNLEKILRDLEREAKRLKEEIDKKAR

SEQ ID NO: 10011 - protein, 185 aa, Artificial Sequence; identical to SEQ ID NO: 10010
  Synthetic

SEQ ID NO: 10012 - protein, 182 aa, Artificial Sequence
  Synthetic
DEIRDLLRRLRELNKRIADRIRKLNEENKKLNKEVADKIRKLNREAREIIKTIAEIIKSGNRDRRVIETIEKLLRDVLKRSEDLLREAEKLDKDSLDRSKKIIKEAEDLNREILERIKKAGVPKEVLDRAKEEVDRSRKHLKELLDRSRETSDRSRRHLKDLMRRSRETIRKLDEELKRLEK

SEQ ID NO: 10013 - protein, 182 aa, Artificial Sequence; identical to SEQ ID NO: 10012
  Synthetic

SEQ ID NO: 10014 - protein, 182 aa, Artificial Sequence
  Synthetic
SEIEKLIREAERIIEEIAKEIKDLNEENERLNREVDKRLTDLNRRAKELLEEVKRIIDRGDRDKRVVDEVRKRLEDLLEESKRLIKEARDLDRETLEKSERIIDRIRELLRDVLRRVEEAGVDEEKLRDARREIERLRRELEKLLEDSRRTSEESRRNLERSLDESRKTIEELIKRLDDAER

SEQ ID NO: 10015 - protein, 182 aa, Artificial Sequence; identical to SEQ ID NO: 10014
  Synthetic

SEQ ID NO: 10016 - protein, 182 aa, Artificial Sequence
  Synthetic
SEIEKLIEDAKRILEEVARRLKKINEDNDRLVRKIADELRRLIEEAKKILDEIKKIIEDGDRDDRVIREAEELLKRILERVKKVIEDARRLDEETLRRSKKLVEEVEELLKKALDDVEKAGAPEDVLREVRKVIKKLRDELEELARRSRKTSEDSRKRLDDLLKRAREVIEELKKRLEDLRR

SEQ ID NO: 10017 - protein, 182 aa, Artificial Sequence; identical to SEQ ID NO: 10016
  Synthetic

SEQ ID NO: 10018 - protein, 182 aa, Artificial Sequence
  Synthetic
KDIEKLIKDLEKLNRDIAKRIRDLNETNKKLVRDVAEEIKRLNEELKKLLEDIRRIIERGDRDRRVTETARELLERVRKESRRLFEEIRKLDEDTLRESERIIKEAKDLNEEVRERLERRGAPEEVLKRAREMVKRSKEHLDELLKRSEDTSRESKRRLEKLLKESEDTIRRLEEELKKAEK

SEQ ID NO: 10019 - protein, 182 aa, Artificial Sequence; identical to SEQ ID NO: 10018
  Synthetic

SEQ ID NO: 10020 - protein, 182 aa, Artificial Sequence
  Synthetic
KEIEELLEEIERILREIKKDLERINKENEKLNREVKKKIEDLIREVRKIIEEIRRIIERGDRDKRVFDEIRKLLEEILKRAEDLLRRARELDKKTLDESEEVIDRVRKLLERILKTVEDAGVEERKLKEVRDTIEELKKRLEKLAKESRDTSRRSRENLERLAREFREEIKRLKKELEEART

SEQ ID NO: 10021 - protein, 182 aa, Artificial Sequence; identical to SEQ ID NO: 10020
  Synthetic

SEQ ID NO: 10022 - protein, 182 aa, Artificial Sequence
  Synthetic
SEIEKLIRDAEKILEEIAELIKRLNEENKELNERVAKRIKDLNEELRRLLKEIADIIRRGDRDERVIRTAEKLIEDVLRRSERLFEEAKKLDEDTLKKSKDIIRRAEELLRKILKELEDAGVPREELEKVRKVIDKLREELKRLERESERTSEESRRNLERLLRESRKTVEEIKKRLDELRK

SEQ ID NO: 10023 - protein, 182 aa, Artificial Sequence; identical to SEQ ID NO: 10022
  Synthetic

SEQ ID NO: 10024 - protein, 182 aa, Artificial Sequence
  Synthetic
SDIERLIAELEKLNKEIEDKIRELNRENRRLNKEIDEEIERLIEEARKIIEDIREIIRRGDRDDRVIKKIRDLLEDILDKVEKLLRELEELDKRTLDESERIIDEAKKLNKEVEDELERRGVDRKKVEEARKKIEDSKRHLEELLRDSRRTVKESNDNLRRSAEKARREIKRLEEALKELRR

SEQ ID NO: 10025 - protein, 182 aa, Artificial Sequence; identical to SEQ ID NO: 10024
  Synthetic

SEQ ID NO: 10026 - protein, 181 aa, Artificial Sequence
  Synthetic
DEVEKVVRELEEVLRRNKELLEKTKKETKEALDRNRELLEDTKRKTREILERLKKVIKEGRDRREVRETVKKAEKENEEANRRSRKHVREVKERNKRMNEESRKHVDRVVRKIAEVEKRLTDEEVVKRLRDILRRVKEAAEELHRDDERELRRVEKELEELHKDDRRVVEEVKDDVRKAEK

SEQ ID NO: 10027 - protein, 181 aa, Artificial Sequence; identical to SEQ ID NO: 10026
  Synthetic

SEQ ID NO: 10028 - protein, 181 aa, Artificial Sequence
  Synthetic
SDAERVVRELRKILKEIEDTIRKSKKETKEMLDRNRELARKVKEELKEILRRLEKMKRDGKPDEEVEKLVREAKKRVEDVIEESRKHVEEVEKRNRDINDDTRRKLETVERKLREVEKRLDDERLLRELRRIVEEVKRAVEELNRDDRRTLERVKREAKKIHEDLRRVVEKLERDVEEARR

SEQ ID NO: 10029 - protein, 181 aa, Artificial Sequence; identical to SEQ ID NO: 10028
  Synthetic

SEQ ID NO: 10030 - protein, 185 aa, Artificial Sequence
  Synthetic
DEVEKLKRELDKILEDLERLHRRLEEELRRIHEENRDLSRRTKEELDRILKRIEELLRERRDKSVVDEVRELLKRAEERVRKANEDSKRLSKEVADTVREASRRSKEILDELKKRVEKAEKDLTDDEKVLEELRRILRRVEEAVRRLNERSEEVLRDVERRDEELNEDNKRRLEEVKKRVEDLLR

SEQ ID NO: 10031 - protein, 185 aa, Artificial Sequence; identical to SEQ ID NO: 10030
  Synthetic

SEQ ID NO: 10032 - protein, 185 aa, Artificial Sequence
  Synthetic
SELDELKKSLEEIHRRDREKNRKLKEDLKRILDEIRKRLEESKKRLEEILREIERLLRERKDDSVRREIKKLLEEIKERVKKVDKETEDLLREAKKEVRRLEEDDKRSLKELTDEVRDAERRLTDDEKALKELRKILEDVARANEELNRDTRRTLERVEEEVEKLNRDHKRVLEKVERDVRRLTK

SEQ ID NO: 10033 - protein, 185 aa, Artificial Sequence; identical to SEQ ID NO: 10032
  Synthetic

SEQ ID NO: 10034 - protein, 185 aa, Artificial Sequence
  Synthetic
SEVERLKEELKRILEEIKKLVDDSKKDLERIHREDKKKNEDLKKRAEEILREIRDLLTKRRDKDVRKRIRELLEKLAREVEDMSRKDKESLDELEKRARDVNRRLKELLKRAAERIRKAEEDLTDDEKLLRDLRRVLEEVKRAVDEISKDHKRMLDAVKKANEELNDDSRRVLERVDREVKKAEK

SEQ ID NO: 10035 - protein, 185 aa, Artificial Sequence; identical to SEQ ID NO: 10034
  Synthetic

SEQ ID NO: 10036 - protein, 185 aa, Artificial Sequence
  Synthetic
SELDRVREEAKRIDDENRKRSEDSVRDSERLLREIEELHRETKERSEELLKRVEEIVRDRGNDEEVTKDLKRILDELRETHKRVLEESKRLLEEARRRHEEVIRRLEESLERLKRKVDEVKKRLKGDRLLEELEKVLRESARRNERIITENRRTMKRVSEEVEKLNRDDKRRMEELEKRAREIIT

SEQ ID NO: 10037 - protein, 185 aa, Artificial Sequence; identical to SEQ ID NO: 10036
  Synthetic

SEQ ID NO: 10038 - protein, 185 aa, Artificial Sequence
  Synthetic
SELERAVEELEKLLKELEDLHRKSKEDSKDMLRRVEELHRRTKEKSKRILEEIERRITEEGRDEDVERKIREVVERARKLHEEVLKRSKDILEEIKKLHEDVERRSKKLLDDLRKRVEDVKRRLTGDELMRKLEEILKRVAEAIKRLIDDDRRVLKRVAEEVKKLNEDDKRVADEVSERIKERLT

SEQ ID NO: 10039 - protein, 185 aa, Artificial Sequence; identical to SEQ ID NO: 10038
  Synthetic

SEQ ID NO: 10040 - protein, 185 aa, Artificial Sequence
  Synthetic
DELEEAEERLREIDKRNEDLHEESRKESKRLLDELRKLVEDVKRELEKILEEAKDIVRKRGKDKDVEKTLEDILREVETRVKEVIKDIERILKEIRETHRRVIERSKRSLEAVKDLVRRVEKDLTGKEKLEKLRDVLRESERRNRELIEEDKEVMRRVSEEVKKLIDDLRRALEKAARDVEKIRR

SEQ ID NO: 10041 - protein, 185 aa, Artificial Sequence; identical to SEQ ID NO: 10040
  Synthetic

SEQ ID NO: 10042 - protein, 185 aa, Artificial Sequence
  Synthetic
SELEDAERRAEEIDRRNKRTVERVEEELEKILREVEELHRRTEEKSKRILDEIRRKIRDRGKDEDVKREIREMVERAKKLHKDVIDESRKILEDIRRKVEKVIRDLERSLEELKKEVKEVEDRLKGKELADKLRDVLRRSAEENKKIIDRLRKILEDVARAVEELIKRDKRVMEEVKKEIDKLLT

SEQ ID NO: 10043 - protein, 185 aa, Artificial Sequence; identical to SEQ ID NO: 10042
  Synthetic

SEQ ID NO: 10044 - protein, 184 aa, Artificial Sequence
  Synthetic
SEVEEIKKRARKLLEEVREIVDRVKKLHERLLREIEKTNREAKREHKRVLDTIRDIFRRIDSEDVKRILRELEERLDKTTKDLEEINRRALEKVDETSKRVKRELERILEELDRLAKDIKAKLDEAETVADLDREIRRLKDELRRILEDLRRVSEEVKKELEKLTRDTRRVSKEVKDELKKVEK

SEQ ID NO: 10045 - protein, 184 aa, Artificial Sequence; identical to SEQ ID NO: 10044
  Synthetic

SEQ ID NO: 10046 - protein, 184 aa, Artificial Sequence
  Synthetic
REVDEIKKRLTEMLETVRKIVEEIRRELEKLLEDVREINERVKEEHERILKDIRDVARKIDSEDARKILTDALRDLDRTTRDLERKNREILKRLDDLVKEIRRRLTEILDRARKLVEDIERKLDDGETMEDLKRRVREVEKRLEEILRRLDDVVRKIKEELKKLTDDTRRVSKRVKDDLERTRT

SEQ ID NO: 10047 - protein, 184 aa, Artificial Sequence; identical to SEQ ID NO: 10046
  Synthetic

SEQ ID NO: 10048 - protein, 184 aa, Artificial Sequence
  Synthetic
SRVEEIKKELRRLLEEVRKKNEESKERDRRLNDTIRRELEEIIRRLRKLLEEIRRLRERIDSEEVRKILRDLLKRLDDLVRTITERLKRINEESNRLAEEDVRTLEKILRDLEELAERVERELDEARTVEDLRRVVEKVLRDIKRSIDDVRRENKKSNEDARRWLEELKREVKRLKDELREIEK

SEQ ID NO: 10049 - protein, 184 aa, Artificial Sequence; identical to SEQ ID NO: 10048
  Synthetic

SEQ ID NO: 10050 - protein, 181 aa, Artificial Sequence
  Synthetic
SEVERIKRELERLLKEVKDANKRVKDTLRKLLRDVEEMNRRVKRENHELLRRLDELVKAGRDEETIKKVKRESRELLRELAKVNRDVKERIEELLREVKKLNEDVKRKLRELLKELEERIRDEELLKDVRKVAKEVEEELKKLHDDTKRVADKVKEDLDRLHRDSERNARRSEEEMDKRRK

SEQ ID NO: 10051 - protein, 181 aa, Artificial Sequence; identical to SEQ ID NO: 10050
  Synthetic

SEQ ID NO: 10052 - protein, 181 aa, Artificial Sequence
  Synthetic
DRVREVKERLKKLLEEVERTNREVMERNHRLLEDVERKNRRVKEENHRLLEELKRLREDGKGDEAVKRVLEESKKLLDDLSEENKRVKEESDKLLDEIRKKNEDVKRKIRELLDRIRKEIEDERLLEDVERTAERVERELDRLHEETKRNADRSREELEKLHRDSEKNARDSAKELEKIRR

SEQ ID NO: 10053 - protein, 181 aa, Artificial Sequence; identical to SEQ ID NO: 10052
  Synthetic

SEQ ID NO: 10054 - protein, 181 aa, Artificial Sequence
  Synthetic
DEVERAEEELERLLRELKKLHEDAKERARELLKRIEDVNRKVKEELKRLLDTIRKLREAGRDESTVKEVKDRIEELLKELERLNREVKERIRRLLEEIHKLDEEVNREIERLLREVTRRIKDKDLLEKVKRVVEEVHKRSRELNEDTRRVIDKVEKDLDELHRDSRRVVETVKEELEKLRK

SEQ ID NO: 10055 - protein, 181 aa, Artificial Sequence; identical to SEQ ID NO: 10054
  Synthetic

SEQ ID NO: 10056 - protein, 181 aa, Artificial Sequence
  Synthetic
KEVEEVKRRLREVLKRLKEMHERVKRELEKLLKKVEDFNRDVKRKNHDLLRRLEELKKAGEDEKALKEVIDTSRKLLKDLAEVNEEVRKEIEELLKEAHRVDREVNEELRKLLEDITRRIRDKDLLEDVEREARRLHDESRKLNEDTKRVVDTVTEELKKLHRDSERNAKRSEEEMDKRRK

SEQ ID NO: 10057 - protein, 181 aa, Artificial Sequence; identical to SEQ ID NO: 10056
  Synthetic

SEQ ID NO: 10058 - protein, 181 aa, Artificial Sequence
  Synthetic
DEVERVKETLDKLLDDVRKLNEEVKKRLEELLEKVERDNRKVKEDNHRLLEEVKDLKRRGKDESALEEVKRRSDKLLEDVHRVNRTVEEEIKRLLDEVRKLNEDVKRKIRKLLEDIRRKIKDKDLLEDVERRAKRVEEELDKLHEDTRREADRVRRDLRRLDEDTKRNVDESRKELEKTRK

SEQ ID NO: 10059 - protein, 181 aa, Artificial Sequence; identical to SEQ ID NO: 10058
  Synthetic

SEQ ID NO: 10060 - protein, 185 aa, Artificial Sequence
  Synthetic
SEVEEVIRRIRALVEEIARKNEDILRKNRKLLEDLRELVERVIKEIKELIDRLADEVRRVKDKETVKKLIDDIRKRVEKLAEDLTRLIKEIKDRSRKTLEEAHKLNRDIIRDIRRLLEELRKRVKDDRVRKEVEEVLRDVEERIRRLDEEVRRRAEESERELERLREKVEDMIEKVKRALEELRR

SEQ ID NO: 10061 - protein, 185 aa, Artificial Sequence; identical to SEQ ID NO: 10060
  Synthetic

SEQ ID NO: 10062 - protein, 185 aa, Artificial Sequence
  Synthetic
SELEEIIKKLRKLVEDVARRNEELIKKLEETNKRLEDEVRELIEEIKKLIDELAETVKRIEDRRTLEDLIRKIKEEVEELLRRIRERVKEVDKEDKDLIKRIHDDNREILKRLEELLRRAEDKVKDEEMKKRLRDVAEKLKEDVRDLDRKVKKVAKESHERNRRILKELEEVAARVTERLEELRR

SEQ ID NO: 10063 - protein, 185 aa, Artificial Sequence; identical to SEQ ID NO: 10062
  Synthetic

SEQ ID NO: 10064 - protein, 173 aa, Artificial Sequence
  Synthetic
DEDERVDEVIKKVREDLRKLLEDSERVVKRSKEELDRWRKKVEDVMRDSDRRLEELRRDKRLEEIKRRSEKTLKEAEDLIRTIKRISEKTLEEDRELIKRAEEEVTRIEEEAKRGDNREEVIKELKKLIDKLREDSKKTIEENKKMNKDAADEIEKIIEDNRRLIKRIEEEDR

SEQ ID NO: 10065 - protein, 173 aa, Artificial Sequence; identical to SEQ ID NO: 10064
  Synthetic

SEQ ID NO: 10066 - protein, 173 aa, Artificial Sequence
  Synthetic
SEDERVEEVVKRIEDKLRRLLEESKRVVDDSKRRLDEWRKEVEKVVKKSTDDLEKLRRDKVLEEVKKISKETLDEARKLIDDARKRSDETLKRDERVIREADKKVKEITKRARDGDNREEVIKELEELIERLARISKKTIEEDRRVNKELAERIKEIIERNRRVIEEARERLR

SEQ ID NO: 10067 - protein, 173 aa, Artificial Sequence; identical to SEQ ID NO: 10066
  Synthetic

SEQ ID NO: 10068 - protein, 182 aa, Artificial Sequence
  Synthetic
KELEELIEELERLNREINERAKELIKKLRKLNEEVARRHERLIEELRRILEELKELLERGNRSDELLKRIRTMVEKVRKDNEDSLRELKELTDRVMRELTELLKEAKKLTDEIADRLRRIPLDEELRRRAKRVLEESKRNIEKVAEDVTRVLRESEESLERLRERSERVLREVEKTIRDMAR

SEQ ID NO: 10069 - protein, 182 aa, Artificial Sequence; identical to SEQ ID NO: 10068
  Synthetic

SEQ ID NO: 10070 - protein, 182 aa, Artificial Sequence
  Synthetic
SEVERLIEELDELNRRINEKHKKLRRELEELNKRVAERHEELIRRLRKLLEDLERLARRGNRSSKLLEDIKRLVDEVRERNRESLDELRRLTRTVAERNKRSLEEARELTERVRKKAEDVPLSEELRKRVEDALRRSKENIKRLEEESREVLRRSEKSIDELRRESERVLKEVKEEIERVRK

SEQ ID NO: 10071 - protein, 182 aa, Artificial Sequence; identical to SEQ ID NO: 10070
  Synthetic

SEQ ID NO: 10072 - protein, 182 aa, Artificial Sequence
  Synthetic
SELEELIKELRDLNRRINKRVDDLADELRRLNERINRRHEELIKELRRLLEDLKRKFDRGDRSSDLIREARELLKRIEERNRDSLRELEELSRRVEEDARRLLDELRRLTEEVKKRAEDVPLSEELKKRADDVLRESKENIERVERKIRRVLEESEENIEDLRRRSKEVLDEVRKRIEDIRR

SEQ ID NO: 10073 - protein, 182 aa, Artificial Sequence; identical to SEQ ID NO: 10072
  Synthetic

SEQ ID NO: 10074 - protein, 182 aa, Artificial Sequence
  Synthetic
SELEELIRRLKELNKDVNEKHKRLIEELEKLNRDINERHKELIEELERLLRRLEKLLRDGNRSSELMERIRRLIERVRDENRKSLETLKRLSDDIERKNRESLKRLKELTDEARKRLEDIPLSEDLRREAERVLRESEENIKELEDRSRDALRRSEENIRRLKKESEDVLREARREVERLER

SEQ ID NO: 10075 - protein, 182 aa, Artificial Sequence; identical to SEQ ID NO: 10074
  Synthetic

SEQ ID NO: 10076 - protein, 183 aa, Artificial Sequence
  Synthetic
SLEEELDKVLKESRDNVRRVEEELEEVMEKSERAAEKLRRDLDRVLEELEKMIRDLKRRGVPKDEVDRVLEELRRLADKLREDLDRVLKESKESIDRLRERVKEVKEESEELARRLKEKSRDIDREDIKRVIDTLRKLNERLNREVKEVIKRNEELVRRLAERVKKVVEDLRRLVKRLDDEVR

SEQ ID NO: 10077 - protein, 183 aa, Artificial Sequence; identical to SEQ ID NO: 10076
  Synthetic

SEQ ID NO: 10078 - protein, 183 aa, Artificial Sequence
  Synthetic
SLEETLKEVLRKSEENAERLKRELEKVLRKLEEDLRRLDERLDEVLKRSRDEARKLREADVPKDDVDRVVEESERSIRELKKEIKKVEDDLRKLATDLERRLEEVKERSRELVDRLRKKAKDIDREVIKRVIEDLDRLNDELNKEVEEVIRRLEDIVRELEKKIREVIKRNKELVDRLEEKVR

SEQ ID NO: 10079 - protein, 183 aa, Artificial Sequence; identical to SEQ ID NO: 10078
  Synthetic

SEQ ID NO: 10080 - protein, 183 aa, Artificial Sequence
  Synthetic
DLEKRLRDVLKESDENIEELRRELREVLKESEDNVKKLAEENKEVTDRLREEIKRLKEEDVRKDLVEEVRRRLERISEENKKTLDDVKKESKKLVDEVEKTLRDVKRESERLARDLERKKDKISKEEIERVIRELKDLNRRLNEELKRAIKRIKELNKRLNELSKRSIDELRRLVEELERRVK

SEQ ID NO: 10081 - protein, 183 aa, Artificial Sequence; identical to SEQ ID NO: 10080
  Synthetic

SEQ ID NO: 10082 - protein, 183 aa, Artificial Sequence
  Synthetic
SLKEKLEEVLRRSEENVERLRKENEDVAKKNREAIEEIKKRLDDVLRELRERIERLKKEGVPGKDVERVREELEKLVTELRERVKKVAKELEELHRRLDRELEKVKETSKRLVEDLDRKSKDIPEEVIDRAVEELKKLNDDLNRTVKKVIRESEELTETLRKDVKRVVDDLRRLVEELARRVK

SEQ ID NO: 10083 - protein, 183 aa, Artificial Sequence; identical to SEQ ID NO: 10082
  Synthetic

SEQ ID NO: 10084 - protein, 183 aa, Artificial Sequence
  Synthetic
DLEEELKEVLKESEENIERLKRENDRVVEKNKKAVDDLRERNKRVTERLREEIERLKRRGVPGKEVDDVRRRLEEISKRNKETLDDVLRKLEKLHRDLDEDLKEVKKTSRKLVEELRRKRKDIDKKDIKRVIDELRKLNEDLNRRVKEAIKTSEKITDDLRRMSEESEKELRELVRRLEERVR

SEQ ID NO: 10085 - protein, 183 aa, Artificial Sequence; identical to SEQ ID NO: 10084
  Synthetic

SEQ ID NO: 10086 - protein, 186 aa, Artificial Sequence
  Synthetic
SEVEEIIRRIDELIKRLAETVKEIVDRLRKLNKKLNDENREIIKEIRDLIRELAKEVKRIKDRDTLEKVLEDIEREVEKLMKRSRDLNEEVLRTSEKLADDARRTLKEIEDRVRELVKEAEDRIRSIEEVRERLERVLRRVEEVIKRLKEELKKVLDESRKNVEDVTRENEKVLDEVRKTIDELRR

SEQ ID NO: 10087 - protein, 186 aa, Artificial Sequence; identical to SEQ ID NO: 10086
  Synthetic

SEQ ID NO: 10088 - protein, 186 aa, Artificial Sequence
  Synthetic
SEVEELIKTIERLIKELEKLNEEIIKRLRDLNKRLNERNEEIERTLRKLITDLARMVREVKDRETVERVLDEIRKEIERLVKESKDENDRALDRSDELVRRSERKNEKIEDEVRKLAKDITDKVKDIEEVLRRLEEVLDRVKKKIKTLTDKNREVLERSRENVKKVTEDNERVLRKLKEDIERLRK

SEQ ID NO: 10089 - protein, 186 aa, Artificial Sequence; identical to SEQ ID NO: 10088
  Synthetic

SEQ ID NO: 10090 - protein, 186 aa, Artificial Sequence
  Synthetic
SELEEALKDIKRLIDKLRKDNEDIIRRLRETNDELRKLNKKIIDEIRDLIRRLEEVAKRIKDEKTLEEVLKRILDEVRKLAEESKRLNDKVREENERLVEKSRRTNKEILERVERLAREITRRIKDDKDLKKRLEDVVKRVREEIEKLTRDNERVLEESRRTLEKLTRENEKVLREVKKKIDDLRK

SEQ ID NO: 10091 - protein, 186 aa, Artificial Sequence; identical to SEQ ID NO: 10090
  Synthetic

SEQ ID NO: 10092 - protein, 186 aa, Artificial Sequence
  Synthetic
SELEDVEEKIKRLIDRLRELNKKIEDDLRKLAKELADLNKKIIREIEELIRRLAEVVKRISDKDTVRRVLREILKRVERLVRESKKKNDDVRRELEELVKRSEDANKEVLKRVRELAEEVRRRIKDVEELKRRLRKVLERVKREVEKSSERNREVVERLRKELERLTRENEEVLKRVKKEIERLEK

SEQ ID NO: 10093 - protein, 186 aa, Artificial Sequence; identical to SEQ ID NO: 10092
  Synthetic

SEQ ID NO: 10094 - protein, 186 aa, Artificial Sequence
  Synthetic
SEVDEVIKRLDELIEELRKRNDDIIREIEKLIKRLEEENKEIVDRIRELIKRLEDMVRRLKDKKTVDDVLKEIEDRVRELAKRSRERNEEVLRRVERLVRESRKTNERILRRIEELFDRIRRRMKDDKDVLDRLREVLDRLRKEIERLTRKNEEVLKDVRRRVKRSSEENEKVLKEVRERIERLKK

SEQ ID NO: 10095 - protein, 186 aa, Artificial Sequence; identical to SEQ ID NO: 10094
  Synthetic

SEQ ID NO: 10096 - protein, 186 aa, Artificial Sequence
  Synthetic
SDVDEVIKRLRELIRENHKRNKKIVDEIRELIRELKERNKKIVDEIRELIKRLKDIVRRLKDRDTVRRVLKEILDRVEKLVRKSKKDNERMLERVEKLADDSRKINRDSLRKIEKLIKELEDRIRKDEEVLRRVEEVLRELREAIKRDDEENKKVLEEARKTVEDSSRENKRVLEEVRRRLDEERR

SEQ ID NO: 10097 - protein, 186 aa, Artificial Sequence; identical to SEQ ID NO: 10096
  Synthetic

SEQ ID NO: 10098 - protein, 175 aa, Artificial Sequence
  Synthetic
SEKERAEEVFRESKKNIDDVKRKLERVLEDSKRTLDELRKEVEKVLKESEDELRKLARSEGEEVKRIVDDLRRLSEKSFEEVRELLERIERVSRKIARDLEEILKDAKRKTDELRKEGMTEELIREIRELNKRLNDTIEDVIRRMKDLNRRLAEVIKEIIERNKKLIEDAARRIK

SEQ ID NO: 10099 - protein, 175 aa, Artificial Sequence; identical to SEQ ID NO: 10098
  Synthetic

SEQ ID NO: 10100 - protein, 175 aa, Artificial Sequence
  Synthetic
REKERLKEVVEKSRRNLEKLREDSERVLEKSRRTLERLKKEVEEVLKESEERLRELARSEKEEVEKIVRELKRLSEESMDEIRRLLDTARKLSEKIFEENARILKRLDELTKELEKEGVTEELIKTIEDINRRANEESKRTEKELEDINRKLEEDIKRIIDRNRKMIEDAARKIK

SEQ ID NO: 10101 - protein, 175 aa, Artificial Sequence; identical to SEQ ID NO: 10100
  Synthetic

SEQ ID NO: 10102 - protein, 175 aa, Artificial Sequence
  Synthetic
REEERLEEVLRRAEEILKRLEDEVRKVVEDSKKNIEDVRREVEEVLKKSEDRLRKLARDSGEEVKKIVTELTERSKKSVEDVKKLLDDLRELTKELERRARELLKELRERIKRLEDEGVTEELEKRLKEILDRAAEEIRRIIRELEELNKEANDRIRKIIKENEDLIREAEERTR

SEQ ID NO: 10103 - protein, 175 aa, Artificial Sequence; identical to SEQ ID NO: 10102
  Synthetic

SEQ ID NO: 10104 - protein, 180 aa, Artificial Sequence
  Synthetic
ELEERIKKANEDSKRTLRELMERVRKANEDSKRKLEEIREKVERANRESKKILDELRKAGIDKRLEEELRKVNEETRRTLERLAEKVEAVNDKTRKILAELEKEVREVNKKIRDDLSKPVDEKVIRELIKELKDVNRALEKKAKELIDELEEVDKDLEDKVRELIRKLKEVNEDLKRKAD

SEQ ID NO: 10105 - protein, 180 aa, Artificial Sequence; identical to SEQ ID NO: 10104
  Synthetic

SEQ ID NO: 10106 - protein, 180 aa, Artificial Sequence
  Synthetic
SLKERVKKVLEESERNLEENKKDAKRVNDETRKKLKELEDRADRVNRETERALRELEDNGVSDEIKERMKEVNKKHREILERISREVKRVNEEHKEEVDRLEKEMRDVNKKVKEELSEDRDEKVVREVIEELKRVNDKLNDASRRLNERLKRVVEDVERRVRDLNKELEDVVEELKERTR

SEQ ID NO: 10107 - protein, 180 aa, Artificial Sequence; identical to SEQ ID NO: 10106
  Synthetic

SEQ ID NO: 10108 - protein, 180 aa, Artificial Sequence
  Synthetic
ELEERIKRVIDELRRRLEELRRELKRVNDKTEEDLRRLEDNARRVNDTSRKMLERLEDGGVDEKIAKEVRDVNEKHKEDVKRISDEVREVNKRHKEIADRIEEKVRRAEEEIRKKLSKPTDETVVREIIRELEKVIEELEREVRELNRELREVVERVAKKVRDLNRELEEVIRDVKRKVD

SEQ ID NO: 10109 - protein, 180 aa, Artificial Sequence; identical to SEQ ID NO: 10108
  Synthetic

SEQ ID NO: 10110 - protein, 181 aa, Artificial Sequence
  Synthetic
SLEDEARELRRKSEKTNDELRRAIEELEKKVRDMIRRSEEHVRDLVRKVKRVIEKLEEDGAPRELLEELRKLLRDVEERAKELHKTLKDLLETVKRRAEDILRKNKELLERISREVERVNSDRKDLEELIKELKKLNDESREEIERLIRELEELLKEIEDRNRKLAETLKRLLEEVEKRAR

SEQ ID NO: 10111 - protein, 181 aa, Artificial Sequence; identical to SEQ ID NO: 10110
  Synthetic

SEQ ID NO: 10112 - protein, 181 aa, Artificial Sequence
  Synthetic
SIEEEIKELKDRSKKTNEELKKEIDELKEDSERTNRESRKHVKEVLDRLREILERLRREGAPEELLRELEKLIRDIKDRAEELHKRNEELIRRVEKKAREILKENEDLVREIERRMKEVNSDRKEIKRLIDELTELNKRSKELIKRLIEELKKLNDDSRKENKRLVREVERLAEEVDRRVK

SEQ ID NO: 10113 - protein, 181 aa, Artificial Sequence; identical to SEQ ID NO: 10112
  Synthetic

SEQ ID NO: 10114 - protein, 181 aa, Artificial Sequence
  Synthetic
SLEEKAKRLKEESDKTNKKLRELIERLERESRRTNEELRKKIRELLEDARRELDRLRKEGAPEELLRELDELIKTIVRRLEKILKENADLLKEVKDRLEEILKENEDLVRRVERELRKVNSDEKKVEELRRDLERLDRESEKKIRDLIKTLDELNKESDRKIRKLEEELKRLLEEVEKRVR

SEQ ID NO: 10115 - protein, 181 aa, Artificial Sequence; identical to SEQ ID NO: 10114
  Synthetic

SEQ ID NO: 10116 - protein, 181 aa, Artificial Sequence
  Synthetic
DIEKKIEDLRRKAKKVIDDLRKRSDELKKRSKDTNDRLREELKKLEEDVRRVIEDLRRRGAPEELLDELRRLLDEVKKRAEELLRRNKKLMEEIDRRNKKSLEDLKRLLDEVEEEAKRVNSDDKDIEKLIRDLEKLLRDVEERHEDLRRKAEELDRDTKEKVDRLIKELKDLLKEVRDRVR

SEQ ID NO: 10117 - protein, 181 aa, Artificial Sequence; identical to SEQ ID NO: 10116
  Synthetic

SEQ ID NO: 10118 - protein, 181 aa, Artificial Sequence
  Synthetic
SLKEKLDDLVRKSDDTNKDLEEKARRLVEDAKRVLKELEDKSRRLVEEARKVLKRLEEEGIDKRLLEELERLIDEVRKKNKESLDRLRKLIDDVRKRLEEILERNRRLVKEVEDRARTVNSDDKKIKELIEELEDLDRRSKKAVEDLIKELKKLIDEVREIHDRLEEELRRLIKTVRDKAR

SEQ ID NO: 10119 - protein, 181 aa, Artificial Sequence; identical to SEQ ID NO: 10118
  Synthetic

SEQ ID NO: 10120 - protein, 182 aa, Artificial Sequence
  Synthetic
SLEDKVRKLEEEIKKVLKEIREEVERLLEEDRRTLEDLKRRHRESDRESKEVLDEIAKKVDSEKLKRLEEEVEKLNRENKEAVKRLEEKHRRTLEKLRKVLRELEEEARRLLEELRDMSRMRDDKVIKEVIDTLRKRLEELKRRLEDVIREVRKANEDSERESRDVIRKLKELLERLKEKVK

SEQ ID NO: 10121 - protein, 182 aa, Artificial Sequence; identical to SEQ ID NO: 10120
  Synthetic

SEQ ID NO: 10122 - protein, 178 aa, Artificial Sequence
  Synthetic
SEEEKLKEVKDRIREVLRKLEEHTDKVKKEVEKVLRDIRRTTDELKKEVRAMLERLRRKKKDAEDLLRELEKIIEEIERELDRVLEENDKMAEEWKKLLDKVLDDNRKSIRDIEKELDDREPTDELVTEVEKLLRDDEETNRDVVKKVREAVKKDADTNRKVIEEVKKVLEDAARRLD

SEQ ID NO: 10123 - protein, 178 aa, Artificial Sequence; identical to SEQ ID NO: 10122
  Synthetic

SEQ ID NO: 10124 - protein, 178 aa, Artificial Sequence
  Synthetic
SEEEKLERVERRLEKVLDEIRRHTEDVKRKDEENLDRLRKKIEKLKRELEKVLRDLEEKRKDAEDELRKLRRRAEEAKRRLDEVKKRLEEISRRTKELLDDVLRRNKESVDRIRREIREKRPTDELVKKLEELLEEDKDTNRKVVKEIEDANRRVNEELDRVIEELKRILEELERRLR

SEQ ID NO: 10125 - protein, 178 aa, Artificial Sequence; identical to SEQ ID NO: 10124
  Synthetic

SEQ ID NO: 10126 - protein, 186 aa, Artificial Sequence
  Synthetic
SEVDEVRKTLEDLLRRLDEENKDIIRRNKELLDDLDRKVREAIERLKRLLDELRKILEKLKDRETLTRIIEEIEKRARELIKRLRDEIRKIEEESKKSIEDSRKRNDEIRKRLEELIKDLRDKIKDSEELARRITELEKRVREVIERLKEKNKRLEDDSRRVITELRKKLKDLEDRVREEIEELRK

SEQ ID NO: 10127 - protein, 186 aa, Artificial Sequence; identical to SEQ ID NO: 10126
  Synthetic

SEQ ID NO: 10128 - protein, 186 aa, Artificial Sequence
  Synthetic
SEVERVKEELKRLLEDLDRKNKRMIDEDERLNKELNEENERLIRELEELLKRLKEIRDKLTDRDTLKKIIDEIDKRLKELIERSRRRNREILEESKKLIEESKRTNREIERRAKKLIDDLRRRVREKEEVKREIDKLREEIREVIERLDKKNEDVLRKSEKNVRDLNRENEEVLRRATEAVRELER

SEQ ID NO: 10129 - protein, 186 aa, Artificial Sequence; identical to SEQ ID NO: 10128
  Synthetic

SEQ ID NO: 10130 - protein, 186 aa, Artificial Sequence
  Synthetic
DEVDKVTRTLEELLKRLEEENRKMIEDDKRLNEELNKENRRVEETLRKLLKELEDIRKDLKDKKTLDEIIKRIKERVDKLIRDSERLNDEIKKRSKKLIDDSRERNEDILRKAEELIKRLREKVREKKEVKEKIDRLEKRIRDAIRELNERNKKALDDSERNVRELNKRNERLREEVERKIRELER

SEQ ID NO: 10131 - protein, 186 aa, Artificial Sequence; identical to SEQ ID NO: 10130
  Synthetic

SEQ ID NO: 10132 - protein, 186 aa, Artificial Sequence
  Synthetic
SEVDEVAKRLRDLLRELEEKLKRAEDRDRKLNDDLNKTNKKLIKELEDLLRKLEEIARRLKDKDTLKKIIDEIERELKRLIDESRRTNKEILDESRKLVEEIEETLRRAKKEAEDLIRRLRERFKDDDEVRRKIDELEREIKEVVDRLRRRLEELLRRSKENVDRLNRENDRVLEEAKRKIRELEK

SEQ ID NO: 10133 - protein, 186 aa, Artificial Sequence; identical to SEQ ID NO: 10132
  Synthetic

SEQ ID NO: 10134 - protein, 186 aa, Artificial Sequence
  Synthetic
SEVDEVADRLEKRLKENRDKNKRVEDEDKRLNKELNDTNRRMEEELKRLLTEIDDIRRKLKDKDTLDRIIERIRREAERLIDESRKSNKRIVEESEKLIRRSRRINEETLERLKKLIKDLRARFKDDEEVRKKIDELERRLKEVIDDSKRRNDELERESRENVRELNRRNKELEDEARKEVERAKK

SEQ ID NO: 10135 - protein, 186 aa, Artificial Sequence; identical to SEQ ID NO: 10134
  Synthetic

SEQ ID NO: 10136 - protein, 186 aa, Artificial Sequence
  Synthetic
SRVDEVIERLERLLRELDKINRDMIEDDKRLNTELNKENKEVEDRLRRLLEELEEIRKKLSDEKTLEEIIERVERRLEELIERSKRRNREILERSKELIERSKKTNEEILRRAEELIKRLREEVKDIKEALDKIRRLEERARRVIEELDEKNRRALERSKENVKRLDERNERLRKELEEKVRRLRK

SEQ ID NO: 10137 - protein, 186 aa, Artificial Sequence; identical to SEQ ID NO: 10136
  Synthetic

SEQ ID NO: 10138 - protein, 185 aa, Artificial Sequence
  Synthetic
DVEEKVKKVIRELREVLKEIEERVRRVLERNKRSLEDLKRKHKESIDRAKEVLDEIRKDRVDEEKLRRIAEKVKRVIDENERIAKEIKEEIKRVNEKSREILERIADELRKVEEEIKDILAKLRDVEEALKRLEDKLREKLRDLRRKLDELRKENEKVNRDLEDKTRRVIEKLKRVITKLKEEVK

SEQ ID NO: 10139 - protein, 185 aa, Artificial Sequence; identical to SEQ ID NO: 10138
  Synthetic

SEQ ID NO: 10140 - protein, 181 aa, Artificial Sequence
  Synthetic
SEIEEVEKRLEDVLRKVNKKTEDLMRSVKEIIKRSREHLEKVIRDLEEILKELRELRKRGKDKKELEDRARKALEDLDRALKRNKEMHDKSDDESREVNERLNRTHKEVLDRLREILKRVKDEDVKRRIEEVEERLKRDNERNNKKIEDVNRDNRRVAEELRRRVEDVKRKIEKVLRELKK

SEQ ID NO: 10141 - protein, 181 aa, Artificial Sequence; identical to SEQ ID NO: 10140
  Synthetic

SEQ ID NO: 10142 - protein, 183 aa, Artificial Sequence
  Synthetic
DVEELLDRVTKRVEKALRELRKKVRELKEENRKSVEELEETSKRLKKEVDDVERRLEAGNVDEEVLKRLRDILRDIRRKLKEVTDRNRDSARRSREELERVLEDVERIIREAKRRLEEVRRIKDREKLKKVLEEIEKILKEIEDKVRRVIEKSRRINEENKETNRRVIEDVRRLLKKAEEDLR

SEQ ID NO: 10143 - protein, 183 aa, Artificial Sequence; identical to SEQ ID NO: 10142
  Synthetic

SEQ ID NO: 10144 - protein, 183 aa, Artificial Sequence
  Synthetic
RVEERLDEVRKKIDEVLKRLRDTTKELEDENEESLRKLKKEVDEVRKKIEEVLKRLEDANAPKEVLDELRRIVEDIKRRLEEVLEELKRIIDRSKEELKKVLRENEDSARRLKERLKEVERIKDEEKLEKVDREIEEILRRNKRTNEKVAEESRKINREAEERLRRVIEELEKILKEIEDRLK

SEQ ID NO: 10145 - protein, 183 aa, Artificial Sequence; identical to SEQ ID NO: 10144
  Synthetic

SEQ ID NO: 10146 - protein, 183 aa, Artificial Sequence
  Synthetic
SVEKKLKDVEDEIRKVLRELEETSKKLDKEVDDMLKKLKDSTEEVKKEIDEMLKRLEERRLPERVLTELKKIADEARRRLEEVNRRNEESAKEIKKELEKVTKENRDSIEDIKRKLEEVARIKDDEKLDKVVKDLRKLLEDDKRTNKEVIDRVRRKLEENKETNEKVIKELRDILREIEERAR

SEQ ID NO: 10147 - protein, 183 aa, Artificial Sequence; identical to SEQ ID NO: 10146
  Synthetic

SEQ ID NO: 10148 - protein, 185 aa, Artificial Sequence
  Synthetic
SEIEDVARRIRKLLEELRRRIRKIAEDSRRLNRRLEERNTEMEKEIKDRLRKLEEELKRKEDGETVTREIKEAADRLRELLKESKDENEDVARRSEKLLRDAEETLREITERLKDLLKKLRDRTRTEEVKEKIDRLEKEIRDMLKELRERIKRLKDENEKSLEDLRRRNTELEEEVRRVIRELEK

SEQ ID NO: 10149 - protein, 185 aa, Artificial Sequence; identical to SEQ ID NO: 10148
  Synthetic

SEQ ID NO: 10150 - protein, 185 aa, Artificial Sequence
  Synthetic
SELEKVAEDIRRLLKRNEEINREMIKRSRELNEELRERNREVTERIRRLLERLKEERKRTTDGETVERRIREVARRARELLKRSEEMNKEVARRSKKLLDDSKKINDDSRRRLKRLLDELRKRRRTDELEKKLRDLEREIRKVLREAKRLNDELRKENKESLERLKRENDKLRKEVETVIREAEK

SEQ ID NO: 10151 - protein, 185 aa, Artificial Sequence; identical to SEQ ID NO: 10150
  Synthetic

SEQ ID NO: 10152 - protein, 185 aa, Artificial Sequence
  Synthetic
DEIEEVIRRIKRLLDENRKKNEEMSDRSRKLNERLRKIIKKIIDEITELLKRLEDRARTVTDGETLRREIKEIADRAKRLLDEIRKILEDIRKELEELNRRSEEMNKESKEEADRLLEELRKRSRDRKVDKKIEDLRKEIEDVLKELAERNKENKDRNKKSADELRKEIEDLERKVREVIRELTR

SEQ ID NO: 10153 - protein, 185 aa, Artificial Sequence; identical to SEQ ID NO: 10152
  Synthetic

SEQ ID NO: 10154 - protein, 180 aa, Artificial Sequence
  Synthetic
RVEDEIRRLEEEARRVLRELEDLLRRLKKKNDESNKEIRERIERVRRKAEKVLRELERRGVPDEVIRELEERLRRMEKRAEELNKRSKELSDDIVRRLRELIERLKRLIEDVLRKLDRVRDERVIERLIRELRRLLEDVKRKAEDLIRKSEDLNEKWRKELKKLEREIERLLKEVADRVK

SEQ ID NO: 10155 - protein, 180 aa, Artificial Sequence; identical to SEQ ID NO: 10154
  Synthetic

SEQ ID NO: 10156 - protein, 179 aa, Artificial Sequence
  Synthetic
EAEKELKRVEDRDKESNDRTKDILRRIEKEVRESNKRSKEILDEIRKRVRDVIEELRRKRSDLEEVIRELEKILREVEEAVDRINRDNERILEELAERAKRLNDENKKISDDVRRRMNEDEETVRRLKDELEEVNERTERAVRDLLRKARKVDDESRRRVEALLRKVEEVLREIKRRVD

SEQ ID NO: 10157 - protein, 179 aa, Artificial Sequence; identical to SEQ ID NO: 10156
  Synthetic

SEQ ID NO: 10158 - protein, 181 aa, Artificial Sequence
  Synthetic
SFKETLDEIRKRVKEVLDKLEKILRDIARRVEKVNKENEDRLREINRRNEEVLRRLKKKGVDETLLERNRRANERTNREVKKSNDETREVLKEAKKAIEKLLEELRRVLKEVEDRADKKRDDEDKLRELLERLERLLRELERRVEKIEEDLKRILDEVRKRTKELLERNERILEKLERDAD

SEQ ID NO: 10159 - protein, 181 aa, Artificial Sequence; identical to SEQ ID NO: 10158
  Synthetic

SEQ ID NO: 10160 - protein, 183 aa, Artificial Sequence
  Synthetic
SIEDIVREIRERNKDAKRKVEDIVRRNREEIDKVLKRVEKILRDNEKRIREVKEELKERVKSRDLERVEEKLERLLRESKEVFKEVEDRLRDLMRKSDEVARRAEENIKENIRRVEDVARKRLDEKDLDKVRKESEDNLREILRTLKEVHERSKETLKRIEDTLRRVHKKSEDELRRLREEVR

SEQ ID NO: 10161 - protein, 183 aa, Artificial Sequence; identical to SEQ ID NO: 10160
  Synthetic

SEQ ID NO: 10162 - protein, 183 aa, Artificial Sequence
  Synthetic
SIEEIAKTIKEEIKEVMDRVREIVERDEREIKKVKEEVDRIAKRNEDEIRKVKDELDKKVKSDRLERLRDKLRKVEEDSRESLKDVRRKLEEVRRESDEVVRDVERRLEEVLREVEDVLRKRLPEEAMKEVADRVRKKLEEIERTLEEVHRKSRKVLTEIIKKLKENHDRSKELLDRIREEVK

SEQ ID NO: 10163 - protein, 183 aa, Artificial Sequence; identical to SEQ ID NO: 10162
  Synthetic

SEQ ID NO: 10164 - protein, 182 aa, Artificial Sequence
  Synthetic
SEVEEVLKEIKDLLRRLEEIVRRVLKENRRLLEEDVRRTEEILEELERLLDELRKDIKRLDDRDKVEEIVRRAIKELEDLLRESEERNKRSREESEKLLRDLRETIERIRRRLEELLKRLKDRGAPEELLKRIEDEVRRVEDKLRKLIKRSKEESDKVAEELERLNREARKRIRDVMEELKR

SEQ ID NO: 10165 - protein, 182 aa, Artificial Sequence; identical to SEQ ID NO: 10164
  Synthetic

SEQ ID NO: 10166 - protein, 182 aa, Artificial Sequence
  Synthetic
DEAEEILRRLKKLLEDAKRISDRTVEKNREMLKKIEEDSKRSLERNRELLKRIKELAKDIRDDKTLEEMLRELKERLDRSHDENRRLVDRIRDISRRTNEENRRVIKEVEDRLRELLEEAERRGLPREIIERLKEEVDRLLKELRDSNRELKRESDEVVEKLRELNKRSKEEADKVEKDLRR

SEQ ID NO: 10167 - protein, 182 aa, Artificial Sequence; identical to SEQ ID NO: 10166
  Synthetic

SEQ ID NO: 10168 - protein, 182 aa, Artificial Sequence
  Synthetic
SEVDEVLKRLRKDLDKVRKDSKKSLEELRRVLEEVERLSDESVKRLEEVLKRLEDLIKDIKDDESLRRLVDEARKELEAINKRNEELIRRVEEELKEILKRNEEIIRRVEEKLRRILREAERRGVPREIIKKLADEVREVLERLKELNRRLEKEARDAKRRLEESNDRLRRKVEEVIKELRR

SEQ ID NO: 10169 - protein, 182 aa, Artificial Sequence; identical to SEQ ID NO: 10168
  Synthetic

SEQ ID NO: 10170 - protein, 179 aa, Artificial Sequence
  Synthetic
SEVEKLLDESRRVVEENRRANKKLAEESRKAVRRNREESKRLNEELREVVERARRKVTERDKDKDLLRRIIKELRDILERVAEDHRRLIEEHRKIADEVREKVKDLNRRHKEIMERVAREVKKEESLRRIKRTHEETEKESEKTLRDLEDEHRKTIEELERSLKELRDRIKKVLDELRK

SEQ ID NO: 10171 - protein, 179 aa, Artificial Sequence; identical to SEQ ID NO: 10170
  Synthetic

SEQ ID NO: 10172 - protein, 171 aa, Artificial Sequence
  Synthetic
DEVEEVLKKARKDIERWREETRKVKEENKRNIDRIRKKLEEVLRDLKRAIDEIRKSNLDREEVDRVLERLEEKLREMKRRLDENDKRDKERLKKKNKEMEEERRKIEKELEDAGARREVLEEIRKLLRDIKETDRKVHEELERSNEKLRREIEKILRDLEDELRKLRRERE

SEQ ID NO: 10173 - protein, 171 aa, Artificial Sequence; identical to SEQ ID NO: 10172
  Synthetic

SEQ ID NO: 10174 - protein, 171 aa, Artificial Sequence
  Synthetic
SEVEEVLRRAEKAIREWEEETRRAKEENEKNIKKVADDLRRLLEDARRTIEEIEKRRADEKTVEKVLTDLEKKVRDVAKRLKENNDEDRRRLEDINRKVEERLEKLRDELRKAGASEEVLKEIKKLIDTARRKDEKVHKELEDTNRDLDRAIEEVIREIKKLLDDLREKAR

SEQ ID NO: 10175 - protein, 171 aa, Artificial Sequence; identical to SEQ ID NO: 10174
  Synthetic

SEQ ID NO: 10176 - protein, 181 aa, Artificial Sequence
  Synthetic
SEKEDVLRRIKELLERLHEENREVLTRIEKLLKDNKERNDDVLRRITELLKEVTKRAKDRGKPRDDLERLIRELERTLKELAERVKKLDEDLKKTVDDLRREVERLNEELERMLRELTKLADRVGTEEVRKRVEDVVRKNKEVARELLDRVRKLSERNKRAIDKLLEEVKRVLEEVERALK

SEQ ID NO: 10177 - protein, 181 aa, Artificial Sequence; identical to SEQ ID NO: 10176
  Synthetic

SEQ ID NO: 10178 - protein, 171 aa, Artificial Sequence
  Synthetic
DEERDVRREIRKLLRDAEEHSKKLNEESKKTNKRNEEENRKALEDNKRLLKEVEDRIPKTKDLERIKRRNKELNERHKRTLERLKEESRRLNEKHKEDLKKLAEDVERLERAGLPVTELRERIKRLIEEIERLNREFKKKNEELSKKNKELVERSRTESKKLVDEARERAR

SEQ ID NO: 10179 - protein, 171 aa, Artificial Sequence; identical to SEQ ID NO: 10178
  Synthetic

SEQ ID NO: 10180 - protein, 178 aa, Artificial Sequence
  Synthetic
DSEEEVRKRVKDLSEENKRLVKTAEKRVRELSKENKELVERLKREVDRIKKEIEELKRRGTTEDADRELRERLEKLKRELEDLNRTLNRRATELEKEVKRLSDELRKRAEELEKKVRRENKVDEKVLREIREIVKKNKRENEEVLRRIRELVKENNDENKRVLDEIEKLLKEIEDESR

SEQ ID NO: 10181 - protein, 178 aa, Artificial Sequence; identical to SEQ ID NO: 10180
  Synthetic

SEQ ID NO: 10182 - protein, 185 aa, Artificial Sequence
  Synthetic
SEMDEVRKKLRELVERLKKEAERSRKSHREILKKVRDDLKRSEESHKELLDRLEEVLKRTVRDERKVREIRKELDEHHKRYREELKRLEEELRKHHEKYKEVLEDLKRRLDKLLRELEEVLKKKVSEDKLRRLLEEAAEVIKRLLDEVKRLNEHAKRMAEKILEDVKRLNKHAEDKVRDVEEKVK

SEQ ID NO: 10183 - protein, 185 aa, Artificial Sequence; identical to SEQ ID NO: 10182
  Synthetic

SEQ ID NO: 10184 - protein, 185 aa, Artificial Sequence
  Synthetic
RELEEVARRLERLLDELRKKLRESERSVRRLLEELKKELEKLRKRHEDLLRTVKKKLDDTVTDERKLEELTRRLEKHHREVKKRLEDLDRELEKLDEEYKRVLEKLERELEELRRRLEEVRKRNISEEELKRLLEEVEKAIRELLERVERLNRRLEEEIRRVLEDLERIIRHAEEDLRRIEEEVK

SEQ ID NO: 10185 - protein, 185 aa, Artificial Sequence; identical to SEQ ID NO: 10184
  Synthetic

SEQ ID NO: 10186 - protein, 185 aa, Artificial Sequence
  Synthetic
RELEEVKKKLEKLAKDLRDTLERSARSVEELIKRLEDELRRSEESHKELLERLEDTLRKRATDEEKVRRLKRRLEKHHEEYRRTLDRIRKELKRLRDEYERELRRIEKELEDLERRLEEVLKRNISEEELRKLLKDATEEVRRIAEEVKKLNDELRRAVEEVLKEVRETNKHVREMIETVREEVE

SEQ ID NO: 10187 - protein, 185 aa, Artificial Sequence; identical to SEQ ID NO: 10186
  Synthetic

SEQ ID NO: 10188 - protein, 185 aa, Artificial Sequence
  Synthetic
SELEEVAKRLKELVDDVRRALKESDDSHKELLKRLKEKLDEVRKRLKKLVDDLEETLKRTLRDEDKMRDIKRRLDEETERLKRKLEKIEKELRDHHKRYKETLDRLEEELERLLRELEKVLRKNISEEELERLVREVERVIRKLKEDVKRLNDHAREKVKRVEEELRREEKRVRDEVERVKEEVR

SEQ ID NO: 10189 - protein, 185 aa, Artificial Sequence; identical to SEQ ID NO: 10188
  Synthetic

SEQ ID NO: 10190 - protein, 185 aa, Artificial Sequence
  Synthetic
SELERVEDEARKLADDLRRMLEESRRSHEKILREVEEELKKSEESVRRILERVKEVLDRKLTDEETLRRLERRLAELLRRYEEELTRLREELRRHHEEYEKRLRELEERLRKLEEDLKRVLDKNISEDELRELLDRLRKAIKKLLDDVKRLNDHVKELIERIRDEVRRLNRRLEEEARDVERRVE

SEQ ID NO: 10191 - protein, 185 aa, Artificial Sequence; identical to SEQ ID NO: 10190
  Synthetic

SEQ ID NO: 10192 - protein, 185 aa, Artificial Sequence
  Synthetic
DELETVREEIERLARELEKELKKSEDSVEKLLRELKERLKEVRKRHKELLDRLRDRLRKTVKDKDKLEKLERELKKHHEDVDKLLRELEDKLRELRERYKRTLDKIREDLEKLKRDAEEVLKRNISEEELRRLVEDVKRVVDEVLERVKELNKRLEEAIRRILEELKKIEKNVKDFIEDIDRRVK

SEQ ID NO: 10193 - protein, 185 aa, Artificial Sequence; identical to SEQ ID NO: 10192
  Synthetic

SEQ ID NO: 10194 - protein, 185 aa, Artificial Sequence
  Synthetic
RELEEVKRRLEELLERLRKELERSDKSHKELAKKLRDELERVEREHERLLRELEDTLRKTLTDKKKADELRRELEKHHEEVKELLKKIEEDLRRHHKRYRERLKEIKERLEKLRRELDEVAKKNISEKELTDLLREAKRRVEEVLKEVRDLNRNVKETVDRVLKELEDILRNVEEMIKEIKDKVR

SEQ ID NO: 10195 - protein, 185 aa, Artificial Sequence; identical to SEQ ID NO: 10194
  Synthetic

SEQ ID NO: 10196 - protein, 172 aa, Artificial Sequence
  Synthetic
SDAEDILRKVEDLIRRLAEKHRDLLRRSKENAERIKREHDDHHRDIRRVIKEIEDNNLSEEEVKRLLDELKRKSEETHRRSRKNLEEDKRRVEKIHEDSRRDLERIERDVRKKIKDDRELLKTVRDLLETLREINDRVREELRKIHEDVERRNKEVLDRNKKLLEELERKRR

SEQ ID NO: 10197 - protein, 172 aa, Artificial Sequence; identical to SEQ ID NO: 10196
  Synthetic

SEQ ID NO: 10198 - protein, 181 aa, Artificial Sequence
  Synthetic
SELEDIERKLKELEDEDRELNRKLNDDTRRLDERNRRLNEELTKKLREVEEEAKELRKRDNDERTVEKIKDRLRRIADELRKELEKITKELEDMSERVKRELEKIRKRTEDVERELRREMEENRVDERVREKIERIAKKLEDDNKESEDRHRRINEENRRRNDKNREDIERILRRLDEELR

SEQ ID NO: 10199 - protein, 181 aa, Artificial Sequence; identical to SEQ ID NO: 10198
  Synthetic

SEQ ID NO: 10200 - protein, 181 aa, Artificial Sequence
  Synthetic
KELEEVDDEVRKEAEEVKRYIKESKEKLDRLRREDERLNDRVREKVEDVRRRVEERRSEDNDEETVRELLERLRREAEKLERELEEIKKKTEDMLRRLRKENREMERRLRERSRKLKEKAKKDRVDERVKRKVDKIERELEDAIRRANEEHTKIEEDLRRRNKESKDEIRRILEELEERTR

SEQ ID NO: 10201 - protein, 181 aa, Artificial Sequence; identical to SEQ ID NO: 10200
  Synthetic

SEQ ID NO: 10202 - protein, 181 aa, Artificial Sequence
  Synthetic
REIETVRREIEKILDDLRRTVKRIEDEVRKIHEDLRRSLEDSKRNIEEILKDLERAARRDNLDKKVEDDMRKLVEDLKRKHDKLRRDNERVTKELKDRLKKLEDDLRRAIEELRRRLDKGLDKKDIDKLLKELRDLVEKIKKDLKELLERYEEIVRRIKELLKDLNREAEEVVRRLKEELR

SEQ ID NO: 10203 - protein, 181 aa, Artificial Sequence; identical to SEQ ID NO: 10202
  Synthetic

SEQ ID NO: 10204 - protein, 182 aa, Artificial Sequence
  Synthetic
DEEERAEREIKKLLDDLRRTLEEVKEAIRRILEDNRRTTKRINDEDRKINDDLRRTLERRNISEDLERDVRRIHKENKELNEKLNEDNKRIMDEIEEKAKRLEDRIREIIKRIKKLLEEMRRDGLDVDKVLKEVEETIDRVKKDIRRALREVEETSKEDKKRLREVLERSKDLARRLKEKLK

SEQ ID NO: 10205 - protein, 182 aa, Artificial Sequence; identical to SEQ ID NO: 10204
  Synthetic

SEQ ID NO: 10206 - protein, 182 aa, Artificial Sequence
  Synthetic
SREEEAERRIEKLLRELEKTNRDIHEEIRKILERLRRTLKKVNDEDEKLNRDLEDTLRRRNVSEELADEARKLHEENRRVNERLNREVEEIIERIKRLVDELHKRTEEIKETIKRIVDEMRREGRPVEDVLRRVKEIIDRVKEEHKRMLEEVRKIAKDLEEKIRAVLEESKKLAEDIKRRLT

SEQ ID NO: 10207 - protein, 182 aa, Artificial Sequence; identical to SEQ ID NO: 10206
  Synthetic

SEQ ID NO: 10208 - protein, 182 aa, Artificial Sequence
  Synthetic
REEEKAEEDIRRILRDLKETNRRIHEEIKKLLDDNERTLRRINEEDKKLNEDLRRTLEESRADEELRRKVREVHERNRKKNEDLNRRNERIKEELKRKVDELHERTKEIMERIKRLIEEMKREGRPVEEVLKTVEDIVRKVKREHEELLKEIEDLSRENKKDNERMLEESRRLARKLKEELR

SEQ ID NO: 10209 - protein, 182 aa, Artificial Sequence; identical to SEQ ID NO: 10208
  Synthetic

SEQ ID NO: 10210 - protein, 182 aa, Artificial Sequence
  Synthetic
SEEEKMEEDIERLLDRLRRINKRLHDEHKKLNEDNERTVRRIDEEDKRINEDLERTLRESNVDEELKKELEEAHRRNRKLNEDLRRRNKRIHDENRKRVRELHERTKEIIERIRKLLEEARREGRDVRKVLEDVERIIRRLEEEHRRALEESRKRSEENKRENEEMLERSKELAERIKRRLK

SEQ ID NO: 10211 - protein, 182 aa, Artificial Sequence; identical to SEQ ID NO: 10210
  Synthetic

SEQ ID NO: 10212 - protein, 182 aa, Artificial Sequence
  Synthetic
SEEEKAREDIKRLLEDLRRTNKKIHEDIEDILRELKETLKRVNDDDKRINDDLDRTLKERNIDEELKKRVDEAHRRNRRKNEELDRRAKRLLEEIRRLVEELHRRTERIEREIKRLLDEMSREGRDVEEVLRTVEKIIEDVKKEHEDLLKRVKDIVKKIKEEIEKVLRESEKLAREIKEELR

SEQ ID NO: 10213 - protein, 182 aa, Artificial Sequence; identical to SEQ ID NO: 10212
  Synthetic

SEQ ID NO: 10214 - protein, 182 aa, Artificial Sequence
  Synthetic
SEEDELRKRVADILKRLREVNKRLHDEVKRLLKENRDALKEVKDKIRESNRELDEVLKRRRIDEDLERRAREINERDKKMLEELEKESRDLLKELEDILRELHKRVREIEKELEDTLRKVERDREPVEEVLERLKEIVRKAEEEHKDVLRRLKEISDRHKRRLEEAERRNEKLLRDLKEELR

SEQ ID NO: 10215 - protein, 182 aa, Artificial Sequence; identical to SEQ ID NO: 10214
  Synthetic

SEQ ID NO: 10216 - protein, 182 aa, Artificial Sequence
  Synthetic
SRLEEMLKRAEDLSRESEELLRRVLEEVKDLSRKHEEALREILKRVKDLVDTVRDLLRRGKADEKVLRRIKEELRKLKEEAKRISDELEDRLRKLKERIDEILERLERRYRKLKKEIEDELPETEEVRKLEEELKRLLEENRRLAKELRDELRRLTKRNKDVVREVERRLEEIMKEIDKEVR

SEQ ID NO: 10217 - protein, 182 aa, Artificial Sequence; identical to SEQ ID NO: 10216
  Synthetic

SEQ ID NO: 10218 - protein, 177 aa, Artificial Sequence
  Synthetic
SEDERIKKELRKVEREVDKLLKEHEKILEDLKREVDKLIETHRKILEELKRRVDELKRRGSDKRDFKRLKDENKEALDKTREDADKLRRDNERKLEETKRRARELEEKVKREKEELDREGSKERIRRELEEVLKDIRRKLKELKERNDKVNRDIEELLRELEERNTEVDKEIKKKAD

SEQ ID NO: 10219 - protein, 177 aa, Artificial Sequence; identical to SEQ ID NO: 10218
  Synthetic

SEQ ID NO: 10220 - protein, 171 aa, Artificial Sequence
  Synthetic
DEEKEAEDLIEEHRRRSEEIARRADKLSEDHKRKVDEIAKTVEKLIRTLKEIVDRKPPDDELRKILEDVRRRAEDLDREVRKTNEEMRRRLRKIEADVEREMRETERRVREKIKDNKELKDRVERVLEESRELLERLRKKLEDNSKEVEDILRKLRKEVEDVVRKIRKRAE

SEQ ID NO: 10221 - protein, 171 aa, Artificial Sequence; identical to SEQ ID NO: 10220
  Synthetic

SEQ ID NO: 10222 - protein, 171 aa, Artificial Sequence
  Synthetic
RDEDEVRKLITRHEKLSRDIAERLKRESKKHRDDVERIAKENEELNRRLREIVKKKPPDKELEDILREARERTERLKERVRKINRELKKRVKEIEDTVERLMDETREEVERKIERNKELKDDVRRVLKKSRDELKRLREELKRNSEEVERILKKLDEDNRRVLKEIRERLT

SEQ ID NO: 10223 - protein, 171 aa, Artificial Sequence; identical to SEQ ID NO: 10222
  Synthetic

SEQ ID NO: 10224 - protein, 180 aa, Artificial Sequence
  Synthetic
DKEREVRRRVEELKKDSEDVLRRNREEVEKLHDENRKVNEESDRTAKELVEEAERMLREARKKIPEELLRRVREILKKLEDEVRRVKKTNEDEDEKLKREVEKVEEEHERKLRELDEEVKRRKKTEELLKELKKELDRLREENERSNRRLRKMLEELKRKNEEVNRELRKKLREIKERLR

SEQ ID NO: 10225 - protein, 180 aa, Artificial Sequence; identical to SEQ ID NO: 10224
  Synthetic

SEQ ID NO: 10226 - protein, 178 aa, Artificial Sequence
  Synthetic
SEEERLERTVEEVEKALKKLADDLRRDMDRSRKSHEDLLDKLRKELDRVLEEIRKKTTPEEDAKRLLERVEREIRRIKEELRRHHEEYKKRLEDIEKELKDLEDEMRRRLKELRDRIRREGVTEEVEKRLRELLDEARREVERILKDLRELNEHVRRRVDEVRRRLEELLERLDRETR

SEQ ID NO: 10227 - protein, 178 aa, Artificial Sequence; identical to SEQ ID NO: 10226
  Synthetic

SEQ ID NO: 10228 - protein, 174 aa, Artificial Sequence
  Synthetic
DEKREVEKELKRVDDEIKRLLRELEEALRRDKEEVDRLDKEVKDALDEVRERIERAGLDKELLERAEKALRENEDRHREAAKKYEKALRELKKRVDDEAERLERALRKIREDLDKTDVGEKVKEDLKRLLEEVEKAVRKVVEDSKRLHDEAKEAVDRNKEHLRRLLEDAKRRAK

SEQ ID NO: 10229 - protein, 174 aa, Artificial Sequence; identical to SEQ ID NO: 10228
  Synthetic

SEQ ID NO: 10230 - protein, 175 aa, Artificial Sequence
  Synthetic
SEKERAEEEIERSKRNLERLLEEAKREIDRSRENLKRTLTKVEEVLRKIKEDLKRLNVREDLVKKIDELLKDLERKLRELKKKAEDLHEEVDRALKELVRRARELHKRVEERIEEEKKAVEKLIRELRELNKRLAEEIKRLIDELRKLNKELDDEVEKIIRRAEDLLRDLERETR

SEQ ID NO: 10231 - protein, 175 aa, Artificial Sequence; identical to SEQ ID NO: 10230
  Synthetic

SEQ ID NO: 10232 - protein, 179 aa, Artificial Sequence
  Synthetic
SEVEKVIRDLEEINKRLLEEIKRSIEENKRTNEEAERKVKEVIDRLRKLLEDLKRTNSKDDRVVEEVKRRLKRIDEELKKLLRDVERKDEENKRKLEELDRRVKEEHRKIEEDLRRANVDEDRLKRVEDVLRESVKNLKRLVDEVRKANRESNEHLKDLARKVEKVIREIEEEVDRTRT

SEQ ID NO: 10233 - protein, 179 aa, Artificial Sequence; identical to SEQ ID NO: 10232
  Synthetic

SEQ ID NO: 10234 - protein, 186 aa, Artificial Sequence
  Synthetic
SELERLVEELRRALEKHKRRLEELKKELKKALDDHRREVKRLIDELKKTLDDVRKASRIDDEEALKKIEEDLKKLLRDIKERLKESTRRMEELLRRVKKDIRESHERLRELLKKIEKELKDLKKDQDERLLEDVKRILDEVRREVEKLDTDADRRLREVKEEVERINREVEKTLRDVEEDLDRLKK

SEQ ID NO: 10235 - protein, 186 aa, Artificial Sequence; identical to SEQ ID NO: 10234
  Synthetic

SEQ ID NO: 10236 - protein, 186 aa, Artificial Sequence
  Synthetic
SEVEKLKEDLKRALDEHRKRLEELKKELEDVLRRHEEKVRRLKEKLKRILDEIRRLSRIRDEEALRKIVEDARRLLEEIERRMRESHKEVERLLKRVEDDIERSTRELRKLLEEIRDRLDKLRKDLDERLLEDLDRALDEVRKEVEKLNRDAKRTLDKVREDVKRLDDDLRRTLKRVKEEIDKLTK

SEQ ID NO: 10237 - protein, 186 aa, Artificial Sequence; identical to SEQ ID NO: 10236
  Synthetic

SEQ ID NO: 10238 - protein, 186 aa, Artificial Sequence
  Synthetic
DEIEELKKRLRKILEEHRKRVEDLKKENEDLNRRAEETLERLKRELEEMLREIAERSRIRDDKKLEELVDRARELLKRVRDELERLFKELEDRHRRIEEDLKRSTEELERLIREVEDELDKLRKDQDERILEDLKRVIERVEREVRRLNKDLKRALDESRKRIEDWLKELDDVIKRVKREVEKIRT

SEQ ID NO: 10239 - protein, 186 aa, Artificial Sequence; identical to SEQ ID NO: 10238
  Synthetic

SEQ ID NO: 10240 - protein, 186 aa, Artificial Sequence
  Synthetic
SEAEKLKKELEEVLERARRRLTELKEENKDANRRHRRRLEELKKRLEDVLKKVKDDADIRDEEMLERLREELERLLREVEEDIRESTKRLRDLHRRIREEIEKLREELEKRLKEVEEELDRLRKDLDERILRRLEEVIRRVDRDIKELIKDAREVLERSKRDVERWNREMKKVLDEVRKRVEEIRT

SEQ ID NO: 10241 - protein, 186 aa, Artificial Sequence; identical to SEQ ID NO: 10240
  Synthetic

SEQ ID NO: 10242 - protein, 174 aa, Artificial Sequence
  Synthetic
SEDEDAKRELRRVKEEVDKTLEDSKRVHDESRKRAREWLEDSKRVHREVKERLKELDVTEDLLRDIERLIKESEEKNKRIEEEYRKLLRESEKRNKENKERVEKILRELDDRLRKEGATEELKRELERVLEEHRRSLEKNKRDVERINEELKRRLDRNKEELRKILEDVERRRR

SEQ ID NO: 10243 - protein, 174 aa, Artificial Sequence; identical to SEQ ID NO: 10242
  Synthetic

SEQ ID NO: 10244 - protein, 174 aa, Artificial Sequence
  Synthetic
SEEERLRREVKRVEDENRKLLERLREIAERVHRENKRLLDESRRIADKVRRDLDRLPKTEELKKLIDDLRRSLEELERRNRKVDKEIKDRLKRVEEENRKVDKELKDRVKEFEDRKEPLEEVLEELERVLKRLEEEHRRVVKELRDLLRRIKEDHDRLVEEAEEILREIDERAK

SEQ ID NO: 10245 - protein, 174 aa, Artificial Sequence; identical to SEQ ID NO: 10244
  Synthetic

SEQ ID NO: 10246 - protein, 174 aa, Artificial Sequence
  Synthetic
SEEEEADKAIRTIAKAIEDLVRDLERALKESKRNIEELAKDLKRANDRIEEELEKANVPEETLRELRKRSEDSNREIEKALRELTKAHEDIEREIRRTLEELRRRLKELREEARKTRVDKELADRLRDLLRDAKRVVDRIKRALEELNKEAKKLVERAKKKHDDLLEDVKRDTK

SEQ ID NO: 10247 - protein, 174 aa, Artificial Sequence; identical to SEQ ID NO: 10246
  Synthetic

SEQ ID NO: 10248 - protein, 174 aa, Artificial Sequence
  Synthetic
SEEEDAKRVLDEIREELKKLNDDVRRALKESKENIDRIIEDLDRTNKRIEEELDRLNLDEEELRRLKEKSRTSNEELRRLLKELEDRHRENKRTHEEVEKELEKELRRLAREARETRVDEELKERLKRLLERVREEVKRNKEHLERLNKKVKEDVDRLKKRHKDTLDEVDERRK

SEQ ID NO: 10249 - protein, 174 aa, Artificial Sequence; identical to SEQ ID NO: 10248
  Synthetic

SEQ ID NO: 10250 - protein, 183 aa, Artificial Sequence
  Synthetic
KLDEDLEKVIKEVKERLKESLDRHKEVAKRLEEEVKRSEEEHRKVLEEAKRKLEEIKTKTRKDEEMKRVEEELDEIARRSEDILRRIREELKRIHEESERELRDVEREIDKRTEDLRRLRKDIDDRTVRKVERELRDLIRRLEKRNEELIRRVKEIVERMEKTNRDLIRRIRELIKKVEDDVR

SEQ ID NO: 10251 - protein, 183 aa, Artificial Sequence; identical to SEQ ID NO: 10250
  Synthetic

SEQ ID NO: 10252 - protein, 180 aa, Artificial Sequence
  Synthetic
SEEEKLKRVLDEFRRAVKELLEDLERANERAKDEVRRLLEDLDRAHERIRRAVEKLKERVKDKGPEKVLEELDRELKKLAEENEKSKEEVERTVRRVHEKNEKIKEDLRRTVERVEEEVRKTRPDKDLEKRIRDTLREIKKRVEDVKRDNKRVLDELRKKIEENKKRNEDVLKEMEDKTE

SEQ ID NO: 10253 - protein, 180 aa, Artificial Sequence; identical to SEQ ID NO: 10252
  Synthetic

SEQ ID NO: 10254 - protein, 185 aa, Artificial Sequence
  Synthetic
SDAERVKKESKDLLDTTKRLADRLKELLERLNKETRDRVREVIKEIERLVDEVEKEARKGLDEETKKRVIDKIRKTLEDIKRKLDKLLEEHKTENDRIKKEADELLKEHRDRLEELRRKLDERNLREDIRTDLEDVLRRNKEALEEIRKDIERVNRKDREELREIARTLEKVLRDARRRLEELRR

SEQ ID NO: 10255 - protein, 185 aa, Artificial Sequence; identical to SEQ ID NO: 10254
  Synthetic

SEQ ID NO: 10256 - protein, 181 aa, Artificial Sequence
  Synthetic
SIEDDLRRVLERSKRSLEELKRKADRVLEESKKNVRDLERELKRVLEKIKETIDKLRKDGRLDEKLKKEIEDLLREAKERVDRLKKELRDLHEEVKKALEDLERRARDTHRRLKERVDKGLDKEEVERLIRELDRVNEELAREVERLIRELEEVNRRVNEDLKRLIRELERALKELDERVR

SEQ ID NO: 10257 - protein, 181 aa, Artificial Sequence; identical to SEQ ID NO: 10256
  Synthetic

SEQ ID NO: 10258 - protein, 178 aa, Artificial Sequence
  Synthetic
DEVDELIKRLEERNEELNRKAKRIIEKLKKENDDLNRKLDEIVRKAREDIEDAERRVNDDKVIEEIKKLIEELRKRIEEELKKAKEAHERIEEEIKEALKRARELNKKLEEELRRRVRGKDLEDKLEEVLRRSKKNIEDVEKELRDVLRAAKKNLDDLRRKLEDVLRRLRDEIRRKKK

SEQ ID NO: 10259 - protein, 178 aa, Artificial Sequence; identical to SEQ ID NO: 10258
  Synthetic

SEQ ID NO: 10260 - protein, 178 aa, Artificial Sequence
  Synthetic
SDVDRIITELRDINREVNRRVKRLIEELEELNRRLNEKAKRDMDEIRRLIEEAAKKLRDDRKLEELEKRLEEIRKRLEEELEKAKRLNEELKKRLDDEARDVERKHKELEDELRRRVRGEDLKRKLEKVLKEARDNLEEVKKRLKEVLERSEENLRRLEEELRRVLEEVREMLKRKKD

SEQ ID NO: 10261 - protein, 178 aa, Artificial Sequence; identical to SEQ ID NO: 10260
  Synthetic

SEQ ID NO: 10262 - protein, 173 aa, Artificial Sequence
  Synthetic
KDEEKIKRVLDDVERVLKENEDRNRELLKRVRERLEESRDHLRRVLEDVKRVLEELKLDEKTAKELEDTIRRIADELRKILKRTEDELRKIEKKSREKLKRAREELRKLEKKSKDVDVDELVKRIKDLLKRLNEISRRIAEEIKELLRTHDELNERVVRKLRDLLRKAREKRR

SEQ ID NO: 10263 - protein, 173 aa, Artificial Sequence; identical to SEQ ID NO: 10262
  Synthetic

SEQ ID NO: 10264 - protein, 173 aa, Artificial Sequence
  Synthetic
SEEEKLKRVLEDVERDLRRNKRENEKSLEESKKVNDDNRRRNKEALDEVKKVLEDLNLPEDTLTDLEDKLRKIKRDSERENERHKEELDRSEEESRRTLKRAREKLEELRKTSKDKSDEELVDEIRKLLERLNEISERIHRRNKELDDELNEISKRIRERIEDLKRRAEERAR

SEQ ID NO: 10265 - protein, 173 aa, Artificial Sequence; identical to SEQ ID NO: 10264
  Synthetic

SEQ ID NO: 10266 - protein, 177 aa, Artificial Sequence
  Synthetic
SEEDEIRRLLKENEDSTRRVEEDNKRLNDENEKSTKRVEDDIRRILERVRRELDDLRRRGAVDEELDKEVERVEREIEETLKRLRERNEESKKRNEEKVKKMKEENKKTKDDIRDLKDRVRREEIEREVREDNKRLEELLERSEREVREDNKRLDEALKKIEKEARELVKRMREKAK

SEQ ID NO: 10267 - protein, 177 aa, Artificial Sequence; identical to SEQ ID NO: 10266
  Synthetic

SEQ ID NO: 10268 - protein, 177 aa, Artificial Sequence
  Synthetic
REEEEIRRLLKENEESTRKVEEDNKRLNDENRRSTEKVSRDLEDLNRDTRRVMEEAERRGAVDEDLKREVEEVERRNKELLKELRERNRESLERNRKKVEDLKRRNTETRERIKDLARRVRLEEIKREVEEDNERLKELLKRSEKEVREDNKRLRDVLEKSREEHERLKKRLEEAAK

SEQ ID NO: 10269 - protein, 177 aa, Artificial Sequence; identical to SEQ ID NO: 10268
  Synthetic

SEQ ID NO: 10270 - protein, 177 aa, Artificial Sequence
  Synthetic
SEEDEIRKLLEKNEKSTEDVERENERLNDENRKSTEDVKREIDRLLKELREVLDEARKKGAVDEDLDRRVKKIEEDIKRRKDELRKRNEESLERNKRKLDDLRRRNEESKRRIEDLKDRVRLDEIRKTVEEDDKRLKDALERSKREVDDDNRRLKKVLDEIRKTVRTMIEEIKKAEK

SEQ ID NO: 10271 - protein, 177 aa, Artificial Sequence; identical to SEQ ID NO: 10270
  Synthetic

SEQ ID NO: 10272 - protein, 181 aa, Artificial Sequence
  Synthetic
SEKEKADDLRRKSKESNDTLRKRLDELKKRSEKNNEELERRLRALLKRLEDVLREITKRTGRDTELDKLKDEARELLERLEKRARDLLKEHEDLKREVEEKARRLLKEHEDLERELERRVRKDGVTDELVKEVEDLNRELEEKVKRLIEEMEELNKRLNDKVKELIEEVERLIKELEDRVR

SEQ ID NO: 10273 - protein, 181 aa, Artificial Sequence; identical to SEQ ID NO: 10272
  Synthetic

SEQ ID NO: 10274 - protein, 185 aa, Artificial Sequence
  Synthetic
KDIDELIKRSEDLTRDLERKNKEVVDKIEELLREHEKTNREVVKELRRLLDEVRERVERRGRTREAKEELRRLRELLEEIVRRLEELLRRTRETLTRIKERLDELHEEYKRKLEEIKREVDRRPTSEDLERKVRKAEEDNKRAVERSKTHVDEVRKEVERVLRESKRHAEKLAEDVERMIRELER

SEQ ID NO: 10275 - protein, 185 aa, Artificial Sequence; identical to SEQ ID NO: 10274
  Synthetic

SEQ ID NO: 10276 - protein, 175 aa, Artificial Sequence
  Synthetic
STLEKLKKDLDDIDRDLERILDELRRRVERIDEELRKIVERLHRRNKEIIERLRKAKLPREELRKVAEKSRKELEEVKRELEDMHRRSREELERVRKRLEEVHKESKERIDEAIRRDGETREIREAEKKHKKVLDDLRRKLEEVEKRHREVEKELRDRLEESRREHEKVIREETE

SEQ ID NO: 10277 - protein, 175 aa, Artificial Sequence; identical to SEQ ID NO: 10276
  Synthetic

SEQ ID NO: 10278 - protein, 178 aa, Artificial Sequence
  Synthetic
RELEELEKEVRKRLKEAEERVRDLAKKSRDLNRELKDRLRRIVEENRDVNRKVKEKKDVDKEKLARELEDINRRTEDRFRRLDEELRRVNKDLKRRIRELVEELKEILKRLRDKVRRDKAGRDEDLRRVEEEIRRVIERLKRLLERVEEENRKSRKELRETLERLHRENEKSLREKET

SEQ ID NO: 10279 - protein, 178 aa, Artificial Sequence; identical to SEQ ID NO: 10278
  Synthetic

SEQ ID NO: 10280 - protein, 184 aa, Artificial Sequence
  Synthetic
SLKERLDRVEEKIRKVLEELDRSTSRVEKKVEEVLRELKRSNDEVRKEIKKVLDELRKRGLDEEMKRRLEEIAKELEKILRENEERIKRIADELKELLKRARDRHRRIAEELKKELRKIEKRNIDEKVVDEVAKRMTEELKKLDKENKEIEKEVDDILKRLKDEDKKTVDTLRKILKELDDDAR

SEQ ID NO: 10281 - protein, 184 aa, Artificial Sequence; identical to SEQ ID NO: 10280
  Synthetic

SEQ ID NO: 10282 - protein, 183 aa, Artificial Sequence
  Synthetic
SEIEEVEKEMDKLAEESNKLNEEALRRVRKLLRDSNELVRELERRVRELIKRAKDLKREGDKDEEKILEDLERSIKRLMDEARKLLEEYKRRLDELKKELDKLHEEYEREVERIIRKLEREPNSEEVRRKIKEIKDRSEENIKRSRDSVREIKKESDENIKRLKRELERIKKRLEEVLRDLKR

SEQ ID NO: 10283 - protein, 183 aa, Artificial Sequence; identical to SEQ ID NO: 10282
  Synthetic

SEQ ID NO: 10284 - protein, 179 aa, Artificial Sequence
  Synthetic
KDEEDLAREVKRVIDELEKLNEELNRAAEELIKRAEEINERVNRKVEKVERDLDKLKKRGELDDELLKEIKKRLEEEEKKAEDAHRKLREELKRALDTAREKNKEIEKRLEEVLKDAKDKTGESETLRKLRDDLRKALKKSEDNIEDVRRRLEEVLERARRNLERVRRRLEEVLRKLKE

SEQ ID NO: 10285 - protein, 179 aa, Artificial Sequence; identical to SEQ ID NO: 10284
  Synthetic

SEQ ID NO: 10286 - protein, 179 aa, Artificial Sequence
  Synthetic
SAAERLEKAVRDLIEELKRLNEELNKAVKEIIRRLRELNKKLNEDAERLIRKADELKRRGSSEEVLERLRREAERLAREADKLDRKVKRELEKLEEDIRKLNEEVRKKLRKLEEDARRENKVDKEILDKLREELKRALEESEENLRRLRRELTEVLRESRENLERLKEEVERVLKRLAD

SEQ ID NO: 10287 - protein, 179 aa, Artificial Sequence; identical to SEQ ID NO: 10286
  Synthetic

SEQ ID NO: 10288 - protein, 180 aa, Artificial Sequence
  Synthetic
SVVEDLEEKVKRLIERIERENRRLNKDADRLVRELDELNERLNRAIRRLIRKAEEARKRDLDEKDKRKTLKEIRDEIEELKRRAEEDHKRLEEAIKRLVEEARRANEDLRRKLKELEERAQGVEERELERLKRELEKVLRESEKNLEDLERKLKEVLDRSRENAKRLEDELREVLERLRK

SEQ ID NO: 10289 - protein, 180 aa, Artificial Sequence; identical to SEQ ID NO: 10288
  Synthetic

SEQ ID NO: 10290 - protein, 180 aa, Artificial Sequence
  Synthetic
SVVEDLAKKVEELIRRLEELNKELNKRVRDLIEKLRDINRKLKREVERLIEEAEEVRRRDLDEKDKRRVLRRLEEVLKDLVRRAKKVNRDVAEEMKKLVEDVKRSNEEVKKTLEKLKEDAKGVDKDELKKLEERAREVLRKSEENLKRVEDELREVLRESEETLKRLEEELRRVLDELRK

SEQ ID NO: 10291 - protein, 180 aa, Artificial Sequence; identical to SEQ ID NO: 10290
  Synthetic

SEQ ID NO: 10292 - protein, 178 aa, Artificial Sequence
  Synthetic
DEEKKAEDDIRRIHRRNEDLLRRHREITEEIEKRIRELLREHREITKRLERRLRELKKEGSDERVLDKIRKEMEKRLEDSERKLEKIEREARKTLEDTKRELKKSEEEAKKTIDDVRRKTGDTEELKRIKKRLDESLREVEEDLKRSEKRLRELLKRVKEDLDRSRKRLKEILDELRR

SEQ ID NO: 10293 - protein, 178 aa, Artificial Sequence; identical to SEQ ID NO: 10292
  Synthetic

SEQ ID NO: 10294 - protein, 178 aa, Artificial Sequence
  Synthetic
DEVRKLEEDVERLRREVEEENRRLEEEVERLRKEVKERNRELNERVKTLIETAKRLKEAGSSEDVLKKLEETVRKLNEDHKKLTKELEDRARALLEDHRRKLEELKERMDRLREDVRAKRLPEEMLRELEKRLKRLADETRRSNKELKERLERLKDESRDNNRELKERADRLLEKLKE

SEQ ID NO: 10295 - protein, 178 aa, Artificial Sequence; identical to SEQ ID NO: 10294
  Synthetic

SEQ ID NO: 10296 - protein, 175 aa, Artificial Sequence
  Synthetic
SEEEELRKLERRLEELMKEYKEALDKLREEHEKTLREYEKRVEDLEREHKKVLKKLVDDRGREDDKVRRYKEEVDRLKDHSRKAKETYEKKVRDLVRHSKEFLDELRRKVKELKDRLTDLDDLRRKVDKLRKEVEDHVRELEKKSRKLVEELKDHLRKLEEESRRLNRELEERSR

SEQ ID NO: 10297 - protein, 175 aa, Artificial Sequence; identical to SEQ ID NO: 10296
  Synthetic

SEQ ID NO: 10298 - protein, 175 aa, Artificial Sequence
  Synthetic
SKEDLRRELDRVNEESKKHLDKLRKEAEEVLERLDRANKKIIEDAEEILRRIEKKVRTREDERRKTEEDARRAKEDNDDANRRRKEDAKRRRDKEREDEKRDEDDKRRSDKESKDDTQTRERIKREIEENRKRNEEIARKIKEDIERARRDLERLRKKHEEELEKLKKRVEDADR

SEQ ID NO: 10299 - protein, 175 aa, Artificial Sequence; identical to SEQ ID NO: 10298
  Synthetic

SEQ ID NO: 10300 - protein, 178 aa, Artificial Sequence
  Synthetic
DEDRIRKELEKAHKETREESEKLNRDVERVLREVRKASKDLNDKFEEELRKLREKVERDLPPDDEERRDEEEAKKTRDEARREHEKTEEEARRLREEAERRHRRYTEKEKRIRDKIRKDGVDRDKVEEDLRRSRKELEDYARDLEDAIRRIEDRLRRYARKLEEDIKRLARKLEERER

SEQ ID NO: 10301 - protein, 178 aa, Artificial Sequence; identical to SEQ ID NO: 10300
  Synthetic

SEQ ID NO: 10302 - protein, 183 aa, Artificial Sequence
  Synthetic
SRTERVKEELKRLVEEYKKRSDDSRRRNEKLTRDYREDSRRVEEELKRIKEDVERELRRRDVERKEELKETEKRMKELEERLREEKKKSKEREDRLRKRNEEEDRRSEKETREIEKETRDRGLRDEEAKKDLKRVRDALDRLTKRNEEKDKENEDRLRKMLRENRERLKEVRERAKRIKEELK

SEQ ID NO: 10303 - protein, 183 aa, Artificial Sequence; identical to SEQ ID NO: 10302
  Synthetic

SEQ ID NO: 10304 - protein, 181 aa, Artificial Sequence
  Synthetic
KEKEEIRKALKELLDDLERTLERLKREYDKLRKDLEDTDERIAREHKKIADDLDRTLKEARKKLDERELDKLRKEVEEHNKRVKRRRDEIRKETEKNTKRNEDEERKKREELERKKRDLERKDSESERVLEEVKREVDRIKEELRRTLEENRRRIEEIKKRLEDILRESRERARELKEKLR

SEQ ID NO: 10305 - protein, 181 aa, Artificial Sequence; identical to SEQ ID NO: 10304
  Synthetic

SEQ ID NO: 10306 - protein, 172 aa, Artificial Sequence
  Synthetic
SEAETILRRVRRRVEEILDRIRRKLEESKREVEKHRRDVKKVLDDVRRTVKRIKERGRTEERVEKEVEKMMREIKKELDDRHRETKKRSEEFERDLKRTEERVREEEDDTRKKVPNREEVDTRLKEISKELEETLRRVTEEHKRLNRELEEVDRRAEKEVRKILKELRDTTK

SEQ ID NO: 10307 - protein, 172 aa, Artificial Sequence; identical to SEQ ID NO: 10306
  Synthetic

SEQ ID NO: 10308 - protein, 187 aa, Artificial Sequence
  Synthetic
SKEEELREVLRRIERELERVNEELREENKRIDKELEEVNRELEERNKRINDTVEDLVRERGDNSKEVEDEARDERRRNDEKNKKYKEEDDRNRKRNDDENKRYEEEVKENKRRLDEEEKEVEARGDVKREELRKIAEKLKKNLEEHKKRVREYLKRLEENLKRHRERVEKYARDLKRDLDRLRERLR

SEQ ID NO: 10309 - protein, 187 aa, Artificial Sequence; identical to SEQ ID NO: 10308
  Synthetic

SEQ ID NO: 10310 - protein, 187 aa, Artificial Sequence
  Synthetic
SEEEKLEKKAREIEEALRRVNEELKRRNKEIDERLEEVNRRLEKDLKKIEEDARKLVKDKGDTSEEDKRRLEEIRRELRKREKDYRDDAKRNRDENEEANRRYEKEAEDNDRELKKEEEETRRKGEVDEDELREIIERLERNLERHKRRVDKYLRDLEKNMRDHKRKVDEVVKTLEETLRRLEEEVR

SEQ ID NO: 10311 - protein, 187 aa, Artificial Sequence; identical to SEQ ID NO: 10310
  Synthetic

SEQ ID NO: 10312 - protein, 179 aa, Artificial Sequence
  Synthetic
SEEERLREKVKRVEDDLRRLNEEYKEKHKRSEERNKKLLKDLKEVHDRVKKAVEDILRDTPLEEEKLRTIREDLKRVHEENKEAEERIRKRHEELNEESRRDHKRHKEKLDRLKEEEEKSDRPEEEVEERIRRALKESREEIDRLERRNEEEDKKSEETVRRMMERNDRVLKEVEERAR

SEQ ID NO: 10313 - protein, 179 aa, Artificial Sequence; identical to SEQ ID NO: 10312
  Synthetic

SEQ ID NO: 10314 - protein, 179 aa, Artificial Sequence
  Synthetic
REEEELRRLVKTVEDEVEKLLRRYRDESEKVKRTLEELNKDLERKHKEVLDRIRDILRKVPLDEEKLRRLDKKLKDLHERNRDEHRKHEKETRDLDEDSKRAERETRKKLKEVRDKRRDSDRPREDVERELEETLRDVARKIERLLEKNKRDLDRSKKRVEEMVRRNEKALKDVEDEIR

SEQ ID NO: 10315 - protein, 179 aa, Artificial Sequence; identical to SEQ ID NO: 10314
  Synthetic

SEQ ID NO: 10316 - protein, 179 aa, Artificial Sequence
  Synthetic
SEREDLKRTVDEVKKRLEELIDDYRKTSEEVERRLEELLRRLREDHKRVAETIDDILRRVPLDEKKLTRLREELEELHERNKRKEEKIKKEIDDLREKSERDEKRIRDEIKKLEEEEKRSDRPTEEVKERIRRDLERVKRKIEELKKKNEEDLRRADKKVKDMLEENRRTLEKAKRKAD

SEQ ID NO: 10317 - protein, 179 aa, Artificial Sequence; identical to SEQ ID NO: 10316
  Synthetic

SEQ ID NO: 10318 - protein, 178 aa, Artificial Sequence
  Synthetic
SKEDEARKEIKRIEDEIERLRKELEDAHRKLREDLKRLRDENKKVLEDIKRRLKELEKDTDVREEDLRRLRKEVRELDEKSKEEEKRTEKRARDLHETNKRDDKRAEDETRKLKKEADDEPVDDRVRKKLEDELRRLKRTVDELKKRNEKALRDVKRDSERHKEELRRALRKAEEDAR

SEQ ID NO: 10319 - protein, 178 aa, Artificial Sequence; identical to SEQ ID NO: 10318
  Synthetic

SEQ ID NO: 10320 - protein, 186 aa, Artificial Sequence
  Synthetic
SLKEELDKAIRELKERHKRINEDLERVVRESRKNHEDINRRLKKLLEELEKRVEEIVRREQTDRDRTEEIKREEDKTRKSDKDKEKKSRDEKREYDRREEEDRRKSERDEERVDEEARDFERKNREEDRVIREIKKRLEDLLRRTEERAKEVKDENRKRNEDTREEVRRVEEELKELLRRIEERER

SEQ ID NO: 10321 - protein, 186 aa, Artificial Sequence; identical to SEQ ID NO: 10320
  Synthetic

SEQ ID NO: 10322 - protein, 181 aa, Artificial Sequence
  Synthetic
DEVREIIRELKERIDKIAKEIDDENREHRERLKEIAREVKELIKENRKELKRIADERKDRDRSELKKRVDELRDKNRRDNERTKERAKKIKDDNRERNERTDERVKRIRDETKKRKDDIDLEEEIRKRLDEATKRAEDELRKLKEKNKEVLKELDDRLRKLEDEHRRVREEVDKRLDELRK

SEQ ID NO: 10323 - protein, 181 aa, Artificial Sequence; identical to SEQ ID NO: 10322
  Synthetic

SEQ ID NO: 10324 - protein, 182 aa, Artificial Sequence
  Synthetic
DEREKIEKRIRELLKEDKEHTRRNEEKIRRLLDTNRRLLEEIAKKIEEIARELKERKKENRTRETKDRKRRETRKKIEDLREEIERLSRKAEKDTERLERENKDASRRNEERLRELEKRIRDKGLNLEEIRKLVEDYRREHEKLKRRNDELLERYRRAHEEIKKRIDELVERLEEILRKLAE

SEQ ID NO: 10325 - protein, 182 aa, Artificial Sequence; identical to SEQ ID NO: 10324
  Synthetic

SEQ ID NO: 10326 - protein, 182 aa, Artificial Sequence
  Synthetic
SEKETIEKRIRDKLKDDEDHTKRNEERIRRALKEDEDRLRKIEEEIRRTLEELEREKRSNRTREEKEERRRRREDRDRRRRERIKRESDKNKRREDERKKKNEEKSRRNDKERREERKDIKRRGLDAEDIERLEERYRREHERLKRRNEDLSREYEERHERLKREIDKLEEDLKRETERAAR

SEQ ID NO: 10327 - protein, 182 aa, Artificial Sequence; identical to SEQ ID NO: 10326
  Synthetic

SEQ ID NO: 10328 - protein, 182 aa, Artificial Sequence
  Synthetic
SEKEKIKKEIEDARREDEKHTEKNKRDIERDERRDEETLKEIEERIRRTLRELEKDRESNRTREEKKKKREETERRRRKLREDIERKKEENKKKEREREERNKEFNRENKRRAEERKRDIERRGLNAEDIERLEREYEKDHKRLKDENDDLTEKYRRRHREIDERIKDLERELDRRIKEIDR

SEQ ID NO: 10329 - protein, 182 aa, Artificial Sequence; identical to SEQ ID NO: 10328
  Synthetic

SEQ ID NO: 10330 - protein, 187 aa, Artificial Sequence
  Synthetic
DVRDRVRELRRRLEEETKKVDDENRKIHEELKRVADESRKNNERLNRELRKEIRRVEKDLGEVREEKRRRVKKTTDDTEKEDEDRNREYDREEKEVEERDRKKNKERKDRKEEVDRRTEEEERRRKPDEEALRRLEETLKEVKDELKTELDDSRREVEEVKRSNKEKNERSERRLKEVRDRLREERK

SEQ ID NO: 10331 - protein, 187 aa, Artificial Sequence; identical to SEQ ID NO: 10330
  Synthetic

SEQ ID NO: 10332 - protein, 183 aa, Artificial Sequence
  Synthetic
SLEDSAREIEKRLRDLHRRYREDHERIREDLERLKTEYEKAHRDIKRELDRLREELERANRVREKEKEDTKREEEERHREVEEDKKRKDEELRRAHEEVKKKEDENKERDDRFKEETKRSDRPEKEMLDRLEEHVDRNEKDIKKALDENRKRLDDIRRKIKKALDENREELKRIERRIRELKK

SEQ ID NO: 10333 - protein, 183 aa, Artificial Sequence; identical to SEQ ID NO: 10332
  Synthetic

SEQ ID NO: 10334 - protein, 180 aa, Artificial Sequence
  Synthetic
SAEETTEDLKRRLKELDEKVKEVLKRNEDRVRELEEDVRRNLKKNEDDAREVEERLKTSGGGDEEELRKRSEEYKKRMEEVKKRLEDESKKYKDEVRDVKRRLEEERKEVEDRTRTTDVKGEELLKEVEDRVREIIKRIEEKLKRLNDRTREFIERIRRELRKVNEETKKMIKELKEEED

SEQ ID NO: 10335 - protein, 180 aa, Artificial Sequence; identical to SEQ ID NO: 10334
  Synthetic

SEQ ID NO: 10336 - protein, 175 aa, Artificial Sequence
  Synthetic
SKAEKVLEKAREVVETIKRLVEEVLRHSEDVVRRITDLVRRLLEENERVVREIKRLADEGSRGESEVKKLSDDMRKRNRDVEREVRELSERDREELRKVKEEIKERLDRIREELERSEVDERVIKKIEDLLKKVDDEAKKMLEEVERLNKEVNDRLKRVLEEAERLHEEVNRRVK

SEQ ID NO: 10337 - protein, 175 aa, Artificial Sequence; identical to SEQ ID NO: 10336
  Synthetic

SEQ ID NO: 10338 - protein, 174 aa, Artificial Sequence
  Synthetic
KELEDVIEEVKKLLKTVNEESRRVAEEVRKLIREVSEELTEVIRRVERLVEEVATRVDRKEDLDRVRKRIEELVRRVEEVNRRSKRRIEELEDELRKVDEESRETIERLIDLLRRGLDLDTVLRRAEDIVRKNRKLAEEVLRRVKKIVEENRKIAKEVLDDVRKLVEDVLRRAT

SEQ ID NO: 10339 - protein, 174 aa, Artificial Sequence; identical to SEQ ID NO: 10338
  Synthetic

SEQ ID NO: 10340 - protein, 174 aa, Artificial Sequence
  Synthetic
EELERVIEEVRKLVEEAEKKSREVIKTVKELMDDVNRKSKKVLDDVRRLIEKVRREVTNEEELRKLTETIRKLIEDLKRMDEKSEDEIRRLVEELRRLNEKSKRDIERLIELLKRGLDADDALRRVKEIVERNEEVVKELLKRAEDIVRTNEKLVKDVLDTVRKLVKKVKDDED

SEQ ID NO: 10341 - protein, 174 aa, Artificial Sequence; identical to SEQ ID NO: 10340
  Synthetic

SEQ ID NO: 10342 - protein, 177 aa, Artificial Sequence
  Synthetic
SEAEDALRKAKRLADEDRKAAKRALEEAKKSAEEVKKAAKRALEEAKRIAEDVKRAADEGRDEEDARRILEEARRAIEELAKRLKKILDDNERETKRLAEELRKINEDTKREIERLEKDARGEEAAREAKKLAKDAADVSRKAAKDAKDLSKEAADVARKAAEDARRLAEEAARKAK

SEQ ID NO: 10343 - protein, 177 aa, Artificial Sequence; identical to SEQ ID NO: 10342
  Synthetic

SEQ ID NO: 10344 - protein, 182 aa, Artificial Sequence
  Synthetic
SDAEDVVRKVKRLVDELRRHSKELLKEVEDLVRDLVRHSEEVVKRVEDLVRRLEELVRRGDAREEVLRKVEEDVKRLNKEDKDRVEELRRRVKKLSEDNEKLLEEARERVTRLIEDLRRRSDTEEVRRVLREIREVLKKVAEDSRKVNEDIRRVLEEAKKTSDKVNTDSEEVLRTVARRFED

SEQ ID NO: 10345 - protein, 182 aa, Artificial Sequence; identical to SEQ ID NO: 10344
  Synthetic

SEQ ID NO: 10346 - protein, 182 aa, Artificial Sequence
  Synthetic
SRAERLLEDVRRLLEESLRNSERVLEEVRKLIEENLRHSRKVVDEVRRLLEEVLRVVERGDIRREDVKRAEKEVEDLNDENRRHSDDVRKTVEKLDEDNKKLLKEVKERVEKLIKDLKDEVDREDVRRVLEAIKEDLKRVEDANREINRRSEELLREAEKRSRDIDKESRDLVRKVKKDLEK

SEQ ID NO: 10347 - protein, 182 aa, Artificial Sequence; identical to SEQ ID NO: 10346
  Synthetic

SEQ ID NO: 10348 - protein, 182 aa, Artificial Sequence
  Synthetic
SRAEEVLKDVKRLVDENRRHSERVVEEVRKLVTENKRHSERVVEEVRRLVEELERARRRGDIREEDLERVKREVEKLNRDNKDHSRKLKRRVDELNKRDKEHSDDLKRRVERLLDELRKESDDKDVRKVLKDIREVLERVEEDSERVNRESKKVLDDVKKESDEADDESRRVLEEVDRKARK

SEQ ID NO: 10349 - protein, 182 aa, Artificial Sequence; identical to SEQ ID NO: 10348
  Synthetic

SEQ ID NO: 10350 - protein, 182 aa, Artificial Sequence
  Synthetic
DRVEELLKTVEKLVRDNEKHSRDVVKEVRRLAEENERHSERVVREVRRLVKELEDMKRRGDIREEELKDAERKVKELNKRNKEHSDDLRRRVEELNRDNRRHSEELEETVRRLLEELRKESDRREVREVLKRIEEILKDVKRKSEEVNRESERVLREVEKRSEDADRESKKVLDDVKEKARR

SEQ ID NO: 10351 - protein, 182 aa, Artificial Sequence; identical to SEQ ID NO: 10350
  Synthetic

SEQ ID NO: 10352 - protein, 177 aa, Artificial Sequence
  Synthetic
SEEEVLKEIDEVSRDLERKNKTINEEIKKVSDRVAEEVRRVLEDIKRTSKDAVDDVRTRGLDETDIERHRRTSKRLLDELRRLLEEHKRKSERISREDKKILDEHRKFSEEVRKLIKDGADLEKVVREVEESVKESEERSRRLLEEVRRSVKKLEEDVTRLLEENKKSVDDIKERAR

SEQ ID NO: 10353 - protein, 177 aa, Artificial Sequence; identical to SEQ ID NO: 10352
  Synthetic

SEQ ID NO: 10354 - protein, 177 aa, Artificial Sequence
  Synthetic
REEEVLEEIRRVVEEVRRENERINKEIRERSEDLRRKVKRILEKAKKVLDDVDERAKREGLDEKVIRDLRRRVEELLDRLRKRVEEHEKFSREISKRDRDIIEELKKTVERIEKLLKDGMDVDEVLKEVEDLVRESVRLSEDLLREVRESVERLVDEARKLVREIERLVKEAVDTVR

SEQ ID NO: 10355 - protein, 177 aa, Artificial Sequence; identical to SEQ ID NO: 10354
  Synthetic

SEQ ID NO: 10356 - protein, 177 aa, Artificial Sequence
  Synthetic
KEEEVLKEAEEVSRRAEEKNRRINDEVRRVVRRVEETVTRVLEDVERTSKEAKERVERAGLDRKDIRRHEELSKKLMEDLKELLRDARRKVTRLSEEDKEIIDRHRDKSRKIRKMIKDGSDLDTVVEEIKDSVRKSVERSRELLERVERIVTELEKRVDELVRENEDSVRRIDERVR

SEQ ID NO: 10357 - protein, 177 aa, Artificial Sequence; identical to SEQ ID NO: 10356
  Synthetic

SEQ ID NO: 10358 - protein, 178 aa, Artificial Sequence
  Synthetic
SEAEKIVEEAKRLADKARELAERSVRHSEKLARDSEKAAREAVKEAKDLADKARDLAAKRRDEDLLRKIKEDLERAARKIKRLLEELKKRHERDNRESKKLLDKIREDLERALEKAERRAKAKEALDTARKILRDAEEAAKEAHKEANRLNKEAEEAAKRAADEARKILKKAEEDARR

SEQ ID NO: 10359 - protein, 178 aa, Artificial Sequence; identical to SEQ ID NO: 10358
  Synthetic

SEQ ID NO: 10360 - protein, 184 aa, Artificial Sequence
  Synthetic
DDLEEIVKRVRRIVEEIRRLVEELVRRDKRIVDEIKRLLEEDKRKVDEIVKEIEEVVRRGGDDKDKLKRRVEELLKDVERHTEELRKEVERLLDESRKLNKEVRDTVEKLLEDVRREIETISREEEEVRRVLKEVKDILKTVRDEVEEANEDAKRLNEEVREEAERVLRDTKRILDEVRKEADK

SEQ ID NO: 10361 - protein, 184 aa, Artificial Sequence; identical to SEQ ID NO: 10360
  Synthetic

SEQ ID NO: 10362 - protein, 178 aa, Artificial Sequence
  Synthetic
REKEVLEEVRDIVRRASERSKEALDESREILKTVDDEVRRVLEDSRRLLEEVRKRVEDNNVDEDIRRRVKEVEDRIRESLERTKRTVDKVKEEIRKSLEDTKRANEEIVRRIEELIKRREGDAREIVERVRRLVDTSRRLVEEDVRRVREVVKELRKLLREDVKRVRDVVEELAKEAT

SEQ ID NO: 10363 - protein, 178 aa, Artificial Sequence; identical to SEQ ID NO: 10362
  Synthetic

SEQ ID NO: 10364 - protein, 176 aa, Artificial Sequence
  Synthetic
SEMEDAKRKIEDLVRRVKDSLRDAERRIREVVERVERSLKEVEDRSRELLEDVKREGDTEEVKKLVRESERLIDELRRRNEDIKRRIKELIDELRKRNDDIVRRIEKLIEDLKRSTDDESVRDAVREVEDLIRRLTEDNKRLVEEVKRLVDRASEENKKLNDTSKKVVDEIREREK

SEQ ID NO: 10365 - protein, 176 aa, Artificial Sequence; identical to SEQ ID NO: 10364
  Synthetic

SEQ ID NO: 10366 - protein, 176 aa, Artificial Sequence
  Synthetic
EELERVKEEIDKLVKEVRRSLKDVERRSAELLKEVEKSLEEVERESKKVLDEVRKAGQTEEVKKLVDRSKKLIDDLRDKNRKIVDTSRKLIEDLKRRNEEIEKEIRDRIRKLSRTTDDKAVKTLLEDVRRLVREATEDNKRVNDESRELVERASRDNRRVNKESRDIVRRLEERTK

SEQ ID NO: 10367 - protein, 176 aa, Artificial Sequence; identical to SEQ ID NO: 10366
  Synthetic

SEQ ID NO: 10368 - protein, 176 aa, Artificial Sequence
  Synthetic
SELEEVERRVEKVVKEVRDSLKKVKEDIEKVLRESHKRLRDVEREVRRVLEKVRRRGDTEEVRKLEKEIRELLDELRKKNEEIRKEIEELIKTVKRINEEIEKEIRKLLEDLKDSTDDKTVRDVLRRVRKLVEDATRANEKALDDVRKLVEKSRKLVEDVLERVRRLVKELEERTT

SEQ ID NO: 10369 - protein, 176 aa, Artificial Sequence; identical to SEQ ID NO: 10368
  Synthetic

SEQ ID NO: 10370 - protein, 186 aa, Artificial Sequence
  Synthetic
DEVEDVVRKVRDLVRRVREAVRRLLEENRDLVRKLIEDSERLVREVEKLIKEVEDTVKDRKDDEELTRILEELKRRVDKLVEDDKKINKEIDDESKRLVEELEELLREVRREVEELVEDLRRKGGEEREELERVIKEIKDVVREVTKVVEKVIREAEKLNEDVNRRSEEVNKRIKKLVEDVARRVE

SEQ ID NO: 10371 - protein, 186 aa, Artificial Sequence; identical to SEQ ID NO: 10370
  Synthetic

SEQ ID NO: 10372 - protein, 174 aa, Artificial Sequence
  Synthetic
DEAEEVKKLIDKVLREVEEVVRRVNKRDKDLLREVEKVVRDVNREDKRVLEEVERSGVSEEVVKELRKLSKETHDESRRLLKELKELSEKTHKESRDLLRTAEEIVRRLKKVLDDGGPVEEIVREIEKVAEDIMRRNEELVKESEDVVRKIVRDNERLAEDSKRVVEEAVRREK

SEQ ID NO: 10373 - protein, 174 aa, Artificial Sequence; identical to SEQ ID NO: 10372
  Synthetic

SEQ ID NO: 10374 - protein, 182 aa, Artificial Sequence
  Synthetic
SAIDRVRKTLEKLVERLERVLEESSKAVEDVKEKVERLLRELRERTKRIVDEVEDMVRKANKPDDEVRDRIRRVEKENEDLVREVEDIIRKLEEKNRRLNEEIRRLIEEIRRELKELADRGVDEEELDRLVKKVEDLVRRLEELARKSLKDIKKLLKDIEDRLRKSVEKSRRLAEEIKERLR

SEQ ID NO: 10375 - protein, 182 aa, Artificial Sequence; identical to SEQ ID NO: 10374
  Synthetic

SEQ ID NO: 10376 - protein, 179 aa, Artificial Sequence
  Synthetic
DKADEAVKRVKDLIDDLKRRIDEVVKRSREVVRDIEKHAEDVVKESRRVVDEIKKLVTRGDIREEDVRRLVKRLEELNRRHEERSRRLVEELKRLNDKLNEEVRRIKRRIEDLVRRLREEGVIREEVEERVREVLRRVEKRVKEVNEESERTIRELERVSRRVNEESRRSIEEAKRAAD

SEQ ID NO: 10377 - protein, 179 aa, Artificial Sequence; identical to SEQ ID NO: 10376
  Synthetic

SEQ ID NO: 10378 - protein, 181 aa, Artificial Sequence
  Synthetic
DAVERAKEESKRVLEDAERVVRRVEEEVRKMERKAEESLKDVRRKSEEVIRKVEEVVRRKGAPREDIKEVEDRNRKLIEDNERHLREVVRELRELLKRLRDELERMKRRNKKLLDELDRVESDKEVREVVEDSRRSVRRVEELVEKVVRDVKKLIEDHERRNRESVRESERSIKELEEKVR

SEQ ID NO: 10379 - protein, 181 aa, Artificial Sequence; identical to SEQ ID NO: 10378
  Synthetic

SEQ ID NO: 10380 - protein, 185 aa, Artificial Sequence
  Synthetic
DDLERVLREVKRLVEENEKKVRRIVEESRELVERNKELLRRVVEEVRRLVKEVRDILRNVRGDDELERVLRRVEEEIRRLLTDLRRSNKRVAEELKRLNEELERSNREVERRIRELEERLREKVRDEDKLREVRERIKRLLDRSHEAVRRASEKSKRSLEESHRAVREVEKRLKELLEDVREDVR

SEQ ID NO: 10381 - protein, 185 aa, Artificial Sequence; identical to SEQ ID NO: 10380
  Synthetic

SEQ ID NO: 10382 - protein, 185 aa, Artificial Sequence
  Synthetic
DRLEEVVERVERLVRENVKRLEKVAEENRELVERNKRRLEEIVRRVRELIERAKRIVRDNTGDEELREVLRRVADEIRRLLEELDRSNKEVAKRSKESIEDLRRSNKKVEEDIRRLLEKLRRDVRDEDKLRDVERRAKELLEESHRVIRTVEERSKTVLADSHRVIEDVRRRLEELLREVAEEVR

SEQ ID NO: 10383 - protein, 185 aa, Artificial Sequence; identical to SEQ ID NO: 10382
  Synthetic

SEQ ID NO: 10384 - protein, 181 aa, Artificial Sequence
  Synthetic
DEADEVVKEVEDRVRKLVRRLEESAKKSKELVERILKRVEDSVRRSEELVERIKREVERRRDEELKKRVKELLKKSTEDNDRLRKDVERLLRESNKENRDLVRDIERELEEIKRTLEDLRRRGKVTEKVEEMLRRVLEEVRRAVRKSSEDNKRSVEEVKRVLEKAEEDNRRVVEEVDRELK

SEQ ID NO: 10385 - protein, 181 aa, Artificial Sequence; identical to SEQ ID NO: 10384
  Synthetic

SEQ ID NO: 10386 - protein, 183 aa, Artificial Sequence
  Synthetic
SKLEEVEKMVRKVIEDSRRVNEEVNRRSEEVVRELEKVHREVNDASRRVVEKARRVLKEGEDERLRREVERIIEEIRELNERDRKRVEEIRKEIEDLNRDLNRRSKESEDRLRKLLEDATRNNVTKEADEVVERAERISEENKRRVEDVARKSKELVEDVRRHSEEVVRRVEELVKEVEERVR

SEQ ID NO: 10387 - protein, 183 aa, Artificial Sequence; identical to SEQ ID NO: 10386
  Synthetic

SEQ ID NO: 10388 - protein, 183 aa, Artificial Sequence
  Synthetic
SLLEDVKRTVREVVRESRRVHKEVNDDSRRVLKRSDEAHERVNRDSRRVIERIREVLSRGEEERLKKKVEDVEREIKKLNDEDRKTVEDSKRRIEELNKRDKEKVEDSERKLRRLLEEIERRNVTEEVRELAEDARRISEDNRRNSKRVVDRVREISKENEDNSRRVVDRVRKLAEEVEREVR

SEQ ID NO: 10389 - protein, 183 aa, Artificial Sequence; identical to SEQ ID NO: 10388
  Synthetic

SEQ ID NO: 10390 - protein, 183 aa, Artificial Sequence
  Synthetic
DDLERVKETVKKVIKRSRDSTKKVADTLREVVRESERVHREVNETSRRVEEEAKRVASRGDDERLKEDLKRVVDRIRKLNKEDKDRVDKSRRDIEKLLKDLEDKNRELEREMRKLLEEIERRNVTEEVDKLADRARRLVAKSEEDNKRVMKEVTDISKENEDNSRRVVDEVRKLVEEVRRRLE

SEQ ID NO: 10391 - protein, 183 aa, Artificial Sequence; identical to SEQ ID NO: 10390
  Synthetic

SEQ ID NO: 10392 - protein, 177 aa, Artificial Sequence
  Synthetic
DKVERVVEEIRDLMRRVEELIKKAADDNRKLVKEVEDLIRDAVRDSERLVAEVEKLLTKERSEDLVRTIRELLKRNHDRLRKLEEEIKEMLKRLNEETRTLVEKIERDLKRVEEKVERTGVSDEVRKEVKRVIKAVEKVIEDVERTSEEARRRVEKVIKEVEEKNREVIKRVEDRIR

SEQ ID NO: 10393 - protein, 177 aa, Artificial Sequence; identical to SEQ ID NO: 10392
  Synthetic

SEQ ID NO: 10394 - protein, 178 aa, Artificial Sequence
  Synthetic
SEADKLVEEVKDVVREDKRRVKEIVETVRELVRRSRETVRRIVETVEEVVRRLLELLRKGEPKEELEREARELLEELRERLERLHKRSKEVLKRLRDRLRKSLRETEELLRRIKEELEKRNLEEKVEEVLRRVKRESEKVIEDVERELKRVEDDDRRVIEEVKKRLKRVLERVRTESK

SEQ ID NO: 10395 - protein, 178 aa, Artificial Sequence; identical to SEQ ID NO: 10394
  Synthetic

SEQ ID NO: 10396 - protein, 178 aa, Artificial Sequence
  Synthetic
READELVDRVKKVVEEDKRLSKELVDEIERVVDELEKVSRELVERVRDLVRRLLEVAAKGEPREELLDRAKKVLDKNREDDKRLNDEARKVLDDNRKKDKKSNDDTKRTLDKIRKDLEDRNAEDKVEKVLKRVEEESREASERNERVIERVERRVDEASKRNEDEIDKVRKEVERVAT

SEQ ID NO: 10397 - protein, 178 aa, Artificial Sequence; identical to SEQ ID NO: 10396
  Synthetic

SEQ ID NO: 10398 - protein, 178 aa, Artificial Sequence
  Synthetic
EEVKELVERVRRVVDDLRKKLEKIVEEVRDVVRKDEERSRKLVEDVKDLVRKILEVLRKGEPREELKERVDRELKKNREDDKRSNEDTERLLREIKERLDRLLEDARRLLKEIEDEARKDNLDDDLRRVLKEVDEEVRKVIEDVARVLEEVKRRSDRASRENEEVIKRVTEEVKRVVK

SEQ ID NO: 10399 - protein, 178 aa, Artificial Sequence; identical to SEQ ID NO: 10398
  Synthetic

SEQ ID NO: 10400 - protein, 184 aa, Artificial Sequence
  Synthetic
DRVEKLVEEVKRHVTEVLKTVEDLARRIRDHVRKVEDTSRELVKEIKRLVEEILDRVRKKKDKRELLKELLDRLKKAVKKIRDTNRELNKSNEKLVRDIRDTLRKLTDSNRRLLEDIDKKLEEAPEDVVRELRRVLRESNEKLKEVVDRLRKVLEESTKRVEDASRRVERVLEKVEEDVKREAT

SEQ ID NO: 10401 - protein, 184 aa, Artificial Sequence; identical to SEQ ID NO: 10400
  Synthetic

SEQ ID NO: 10402 - protein, 184 aa, Artificial Sequence
  Synthetic
SEVEELKERIREIVERIEETVRRLAKRVEDHVREVEKDSKRLADEIRDFVRRITDEVRKKKDDKDRLDKLKKDLDRLLEEIRRRNEELNKSNEDLLREIKERLDKLREELKETVKEIEKKLKDVEKRLVDKLRKVLEEVREEVERVVRELEEVLRRSTKRVEDASRELERVLKEVKETLEREVR

SEQ ID NO: 10403 - protein, 184 aa, Artificial Sequence; identical to SEQ ID NO: 10402
  Synthetic

SEQ ID NO: 10404 - protein, 184 aa, Artificial Sequence
  Synthetic
DRVEALVDEVKRHVTELLKTAERLADEVREHVDDVRKKSKELVDEIRRVVEKILDEVRKKKDDKDRLKKLKEDLKRLVEEIRRTNKELNESNKKLLDRIRETAKKMEESNRRLLEEIEKKLKDAPEEVVRELRRVLRESNEELKKVVTELEERLKDSNEEVKKASAEVRKVLEEVRADVDREVK

SEQ ID NO: 10405 - protein, 184 aa, Artificial Sequence; identical to SEQ ID NO: 10404
  Synthetic

SEQ ID NO: 10406 - protein, 178 aa, Artificial Sequence
  Synthetic
SLVEKLRRVLEEVRRTSEKVIRDVKEVNKRSEDKTREIVRRLEEVNKESKERLDRAGVPEKLKKDLTDLIRKSEKLLRENEKRNRDLIRESERLIEKNKRDNDRLIKEVEDVIERKKDKKELAEKLAREVKRLVDESKKNMDKSVEDSRRLVRESEENVRKSVEDSRRLVKRAVEETK

SEQ ID NO: 10407 - protein, 178 aa, Artificial Sequence; identical to SEQ ID NO: 10406
  Synthetic

SEQ ID NO: 10408 - protein, 183 aa, Artificial Sequence
  Synthetic
RVDEDLRRVLKEVKERNEEVVRRSKEETDRVEEDIERVIRDSERVSEEVKRRVDKAKKDVDEEEARKLEKEMKDIIDEDKELLDRLREALERLKKEDEDLIEESERKTKELEREVKKLEDEGISEELAKEVVKRVRELVDRSRRLMTESVRKVRELVEDIRRRVRESVEKLRRLVEEIERRIR

SEQ ID NO: 10409 - protein, 183 aa, Artificial Sequence; identical to SEQ ID NO: 10408
  Synthetic

SEQ ID NO: 10410 - protein, 184 aa, Artificial Sequence
  Synthetic
KEVEKLVKDVERMVEESLKENERLVKKSDELVKESEKRNKELAERSRRLVKEITDRLAEERTEEVEKRIRELLKRSHEEVRRLVETDEKLLRDSHKEARDLVRTDERLAKRVREEVDKLAKKISDEDVLRDLRRVVEEVTEKIKEVNRRSEEANKRSKDRIEEVNRRSEKVNEDVEREIERALR

SEQ ID NO: 10411 - protein, 184 aa, Artificial Sequence; identical to SEQ ID NO: 10410
  Synthetic

SEQ ID NO: 10412 - protein, 184 aa, Artificial Sequence
  Synthetic
DELEKAVERVKDIVRKSLELLKRLADRVRDIVREILDEVRRNVEEVRRIVKEIVEEVRRRKDEEVRRKVEEVLKRVRESNEELERRVREKLRKVEEEVKRIKERSDKLLRDVERELEDVRRRLDDEEALKRLERVVREVAEESDRANKELDRVVEEVKERVERVLRESNKVVKEVEDRVREETR

SEQ ID NO: 10413 - protein, 184 aa, Artificial Sequence; identical to SEQ ID NO: 10412
  Synthetic

SEQ ID NO: 10414 - protein, 177 aa, Artificial Sequence
  Synthetic
SVKETVEEEVRRVSDEDRRINRDVERVSEESNRRLDKVHKELEEVVKEVLKELDDTGLQRDLVERVKEILKRLLDEDREKVKKVKREDEELLKRLREFSKRVNDTLKELLDRLRRSTDEETARRVVEEARRIVAESKELVKEVVRRSDELVRDVEKHSRDVAKTVRKIVTDVARRTR

SEQ ID NO: 10415 - protein, 177 aa, Artificial Sequence; identical to SEQ ID NO: 10414
  Synthetic

SEQ ID NO: 10416 - protein, 181 aa, Artificial Sequence
  Synthetic
SAEETLEKVIRDVEEEDKKAHEDSRRVIETVKEEIDRVHKDSKRKIDEVKERIRREVRDEETMKKVEEELEKLLKEDRDIIKEIKERLDELLKDDKRISDESRKRLKELLDRLREVSRRENLEERVRRIVKEVREIVKRSKERSDEIVKEVKRIVKEALDLSREIVERVERIVREVVERAR

SEQ ID NO: 10417 - protein, 181 aa, Artificial Sequence; identical to SEQ ID NO: 10416
  Synthetic

SEQ ID NO: 10418 - protein, 181 aa, Artificial Sequence
  Synthetic
EADERLRKRLKEVNERDKKAHEDSKRAIDRVREEDKRVLDTVREEIKRVKDEIRRALRDEEMVKKVEEELDRLLRELERLSEKSDKDLRELLETDRRISEESHRRSRELIRRVEEVSREPELERLVREVVRENEELVTRSEELSRRIVEEVKRIVDESRKRAKEIVDEVRKRVKELVDTDK

SEQ ID NO: 10419 - protein, 181 aa, Artificial Sequence; identical to SEQ ID NO: 10418
  Synthetic

SEQ ID NO: 10420 - protein, 181 aa, Artificial Sequence
  Synthetic
DVREKLEKVLREVERRVEKASRESKETLDRVRKRLKDVSDESKRELERVKKRVDDADKRREELRRIVEEAEKKLRELLKRDKDSNDELEKRLRDLLEKDKESLKELEKRLRDLKRRADEIDDKKVIEELVEEVRRLVTEHERLSRELVDRVEKLVARHEELSKKLVTDAERIVKEVEERAK

SEQ ID NO: 10421 - protein, 181 aa, Artificial Sequence; identical to SEQ ID NO: 10420
  Synthetic

SEQ ID NO: 10422 - protein, 181 aa, Artificial Sequence
  Synthetic
SALERLREVLERVLRRVKKVTDDARRVNERVNRKVDRVSEDSERELRRVLKRVREASKDREELRKIVKKVEEDLKRLLEEDRRSNKELRERSKKTLDDLRRSDKKLEDDLKRLKEEAERVDDEEVLRELVERAKKLVDDHLELVERLVRESEKLVEDHLRRSKKIVEDVKRIVEDVERRVK

SEQ ID NO: 10423 - protein, 181 aa, Artificial Sequence; identical to SEQ ID NO: 10422
  Synthetic

SEQ ID NO: 10424 - protein, 181 aa, Artificial Sequence
  Synthetic
DEVDKARKEVDRVVKESRKLVEKNVREVEEVVKTVEKLVEDVIRRVEDVVREVKELVTRGDGREERLTRIKEELRDLLRRLKETIDKLKEELERSNEELKRRLDDLNRKLKELLEDLSKRVDEELLDRVRKVVEDVSRKSKKALDESHEVVKRVKDRADEVLDKVRRAVEEVERRIETEAR

SEQ ID NO: 10425 - protein, 181 aa, Artificial Sequence; identical to SEQ ID NO: 10424
  Synthetic

SEQ ID NO: 10426 - protein, 181 aa, Artificial Sequence
  Synthetic
DEVEKAVKEVERVVREVKELVDRNIDEVRKVVEDSKRLIDELVEDAKRVVKRVKELRDRGDGREEELRDIIRRLRKKLKELAERLEKLNRDLEKSNRELKKRIDELKRRLDELLKDLAKRVEEELLDRVRRVVEEVKKEADRLLEESHRVVREVSERSKRALEEVKRVVDEVTERIKKDKD

SEQ ID NO: 10427 - protein, 181 aa, Artificial Sequence; identical to SEQ ID NO: 10426
  Synthetic

SEQ ID NO: 10428 - protein, 175 aa, Artificial Sequence
  Synthetic
STKEKLDDVLRRVEEKAREVVEDNRRADRDVHRKARKVVEELRRVDEEVHETVKRVDAKEELRRELKKLLEDSNRLTKEVEDRIEKLLRDSNRSTKENEKRIRELEKEMRDLAREGGRRVDEVVDRLRRLVEEVLRHSKKNSRESDEMVRRVTEEVREVVKESKERVDDVLKRVE

SEQ ID NO: 10429 - protein, 175 aa, Artificial Sequence; identical to SEQ ID NO: 10428
  Synthetic

SEQ ID NO: 10430 - protein, 181 aa, Artificial Sequence
  Synthetic
KKVEEIMERLRRVAKEIKERVDRLVEKNRKSAKDLLDTIEDIVRKNRDLAEKIKDLARRRRDEKLKREVEEILKELHDRNRKLLEDVRKKLRENEEETEELKKRIEDILRRVADEIRKIEEDGVDKEKLRRVLREVEEVVRRVKKKLDDSVRELREIIRRAERELREVDEEVRKVVEDVKR

SEQ ID NO: 10431 - protein, 181 aa, Artificial Sequence; identical to SEQ ID NO: 10430
  Synthetic

SEQ ID NO: 10432 - protein, 180 aa, Artificial Sequence
  Synthetic
RVREELKKVEEEVREVVRRAKEKTRRVLEEMRKVVKDVDDESKRVVDEVKKVLEEVRARGLDTEELKEIEERIKRKLEEINERNRDLLRRVERLVREDERRIDEILTEIKRTVDEIRDLTEEEVVKKVVDDIRKLAKDMDDHSKEVVDRIREVARRIEELNRELVRDLKDEVRRVKEKAK

SEQ ID NO: 10433 - protein, 180 aa, Artificial Sequence; identical to SEQ ID NO: 10432
  Synthetic

SEQ ID NO: 10434 - protein, 180 aa, Artificial Sequence
  Synthetic
SVRETLKTVEEEVKRVIDRARKRDERVVREVERVLRDAMRKDEDVNRDVERVLRDVVRRGLDTEKLKRIKEEIDKLSTENRKRIEDLLREIRKLSEESDRRLKEVEKEIRERVEEIRRRTDKDVFKRVVEELRRLVKRVEELVTRTVEEIDRIAKEVTRHSEETVRRLKKLVKTVTDEAN

SEQ ID NO: 10435 - protein, 180 aa, Artificial Sequence; identical to SEQ ID NO: 10434
  Synthetic

SEQ ID NO: 10436 - protein, 185 aa, Artificial Sequence
  Synthetic
SSVREVVKEARDIAKENLERVKKTVKENRDLARKVAEDVKKSVEELRKLAEDVEEIARKATGDEDLERVLREVEERIEDLHRRSEEIAREVRKRSRESHERTKEITTDSRRRIEELLKKVKDEGVEEELEKELRTVVREVEEVLRRSEEDDRRVHKEAEDVIKKVEEDDKEVVDRVKKVIRDVRT

SEQ ID NO: 10437 - protein, 185 aa, Artificial Sequence; identical to SEQ ID NO: 10436
  Synthetic

SEQ ID NO: 10438 - protein, 185 aa, Artificial Sequence
  Synthetic
SEVEKIVKEAEDLVREVKRRVEDTVRKNRELADRVRKEVDKSVRELRELVKRVLDIAKDLTGDEELERVLRTVRERIKELHERSKKIIEDVRRKSEDSHRKTKKIADDVRRKLDKLRRDIERRGVSEELRRELERVIKKVEEVIRKAEEDDRTVHRELNKIIKDVEDKDRTVVEEVERVIEEAER

SEQ ID NO: 10439 - protein, 185 aa, Artificial Sequence; identical to SEQ ID NO: 10438
  Synthetic

SEQ ID NO: 10440 - protein, 185 aa, Artificial Sequence
  Synthetic
SEVDEVVERARRIAKENLDRVKKIVRENRELVEKVRKDVEDSVRTLKKLVDDVTEIARKLTGDEELKRVLDEARERIKRLHDESKKIAEEVRKRSRDSHETLRKITDDSRREIERLLRKVEEDGVSDDMRRKLETVVKEVEDILRRSREEIRTVNEEVEKVIEEAEREDERVVREVEEVIKRVEK

SEQ ID NO: 10441 - protein, 185 aa, Artificial Sequence; identical to SEQ ID NO: 10440
  Synthetic

SEQ ID NO: 10442 - protein, 185 aa, Artificial Sequence
  Synthetic
SSVEDVVRKMRKIVEDNKREVEKIVRENRKMAKDNEDLVKESVKDLKRLAKELEDLAKDDTGDETLERIAREVRKRVEELHRRSKEITDRTEERSRRSKRRLDEITKESRREIERLREEVEREGVSEDLERTLRTVVKEVKEVLDRSRDLVRRVNEEVKRVLDRSREEDERVVREVEEVIRRVET

SEQ ID NO: 10443 - protein, 185 aa, Artificial Sequence; identical to SEQ ID NO: 10442
  Synthetic

SEQ ID NO: 10444 - protein, 185 aa, Artificial Sequence
  Synthetic
REVDEIVDRLRRIAKENKDRVRELVERNRKLAEEVRRRVEESVKRLRDLVRTIEELARRETGDKRLEDIVRDLREKLRRLHETSKRILEELEERSRRSNDELREITERSKKRVDDLLEDLKRKGVEEDLERKIREVVREAEEVLRESKREMDTVNKEVREVIEDVRKRDEDVIREVEKVIREVEQ

SEQ ID NO: 10445 - protein, 185 aa, Artificial Sequence; identical to SEQ ID NO: 10444
  Synthetic

SEQ ID NO: 10446 - protein, 185 aa, Artificial Sequence
  Synthetic
SEVDEIVKEIREIARKNKEDVRRTVEDLRRLVKEVEKRVEDSVRTMRDLVRRLEETARRVTGDEELTKVIEDVRRKIEELHRRSKKILDEVREKIEELHRRTKKITEESRERLKKLEKDIRDRGVSEELERKLKTVIDEAEKVLRESEEDDRRVVEEVERVIKKVEEEDRKAVREVEKVLEDVRK

SEQ ID NO: 10447 - protein, 185 aa, Artificial Sequence; identical to SEQ ID NO: 10446
  Synthetic

SEQ ID NO: 10448 - protein, 181 aa, Artificial Sequence
  Synthetic
REVDELLKRIKEVADDIKRLSDENVKEIEKLAREVEKLVRDVVRENEEVAKEIEDLARRRKDEDVERRAEELLERVHRANEEIKKRIEELLRRVNERSKEIVRRIEDLLRRVAEEIKRAEEAGVDKKKLRDVLRELEKVVRDVAKEDEDANRRLKEVAERVKREIDEVDKKLKKVLDDVRK

SEQ ID NO: 10449 - protein, 181 aa, Artificial Sequence; identical to SEQ ID NO: 10448
  Synthetic

SEQ ID NO: 10450 - protein, 179 aa, Artificial Sequence
  Synthetic
REEEKLRKVLEDAKKVSKEVNEEDDRVNKEVEDVLREVKKEIDEVLKRATETVERVKRENKDSEELKKTIDDIRRKIKKEIDDVKREIDELLKDARRHSKEVKDEDKRINDEIREILRRRELPVDEIVKRIKELVDRSRKLSEENVRRLKKIVKRVKERVKELLDRIKEMAKEIEDRVR

SEQ ID NO: 10451 - protein, 179 aa, Artificial Sequence; identical to SEQ ID NO: 10450
  Synthetic

SEQ ID NO: 10452 - protein, 179 aa, Artificial Sequence
  Synthetic
DEEKKLKEVLDRATKVVKDVAEELDRVLEDVERVSRDVNRRDEKVNRDADRVLREVKDENKDSEKLKREIDEIKKDVERHSREVSEEDRRINKEIREKLRTVKEILEDLRRKIEETLRRKELPVEEIVRRIEEVAKTLREIVRRVLEELKEVVKESERLSRENVRRIEKLAEEIRRRVK

SEQ ID NO: 10453 - protein, 179 aa, Artificial Sequence; identical to SEQ ID NO: 10452
  Synthetic

SEQ ID NO: 10454 - protein, 179 aa, Artificial Sequence
  Synthetic
DEDEKLRKVLEELRRVVEEVKRRSDKALEDAERVLRRVKKEDRDANKKAEDELRRVIDENKESEELIREIERLLKEVREHSKEVEDRIDELLKRIEEHSRKVKKDIERLLEEIDREVKRKERPVDEILKRIEELMKEIRKLVKEDVDRIRDLVRRIDEESKENVKEIERVADEIRERIR

SEQ ID NO: 10455 - protein, 179 aa, Artificial Sequence; identical to SEQ ID NO: 10454
  Synthetic

SEQ ID NO: 10456 - protein, 180 aa, Artificial Sequence
  Synthetic
KEVEDVLREVEKVVEKIKRDVEKIVKDSKELAKRVEELVKESEDRSKEIVDRVEKLRREGTKDVERIIDRLLEDDKRLSDKTKEDLDRIAREDEKLLDELRRRIDEILKRLEELVKELRRAGAEEEKVEKVLRKVRDVVRRVKEKVEEVHRRSREMLKRVEDRDREAHERSRKVAEDVKR

SEQ ID NO: 10457 - protein, 180 aa, Artificial Sequence; identical to SEQ ID NO: 10456
  Synthetic

SEQ ID NO: 10458 - protein, 180 aa, Artificial Sequence
  Synthetic
SEVDEVLETIERIVREVKKLVKRSVEESERLVDEVEKLVEKSVREIKEIVDRIRDMKTKGGKDLEKLLDTMLEKVERLSRKTETEIEKIERDDRELSERTKRELEKLRETVKRLVDELRRAGAEREKVERVLEEARRVIEEVEREDDDAHRKSKEVLKRVLEKDRKALEDAKKVVEEVKR

SEQ ID NO: 10459 - protein, 180 aa, Artificial Sequence; identical to SEQ ID NO: 10458
  Synthetic

SEQ ID NO: 10460 - protein, 183 aa, Artificial Sequence
  Synthetic
KEVEDLERRNKELVERVDKLSRENVERNKKLAKELKEISEENVRRNRKLAEELKEVADRGDSRLEELIRRIEEESKDSDRKSEELLRRIKKESEESDRESKDTLEKILRTSEELLRDMERKGLDEDLRRRVKKSHDEVERELRRVDREDETSHEELRRVLEKVKREDRKSHEEVKRRLDEVRR

SEQ ID NO: 10461 - protein, 183 aa, Artificial Sequence; identical to SEQ ID NO: 10460
  Synthetic

SEQ ID NO: 10462 - protein, 183 aa, Artificial Sequence
  Synthetic
SEVDEIVKRNDDLAKEVKRLSTENVKRNKELADRVKRLSTENVKTNEKLAKDLERVVRRGVSRLKDLIRKIETDSRKSDEESERRLREIEKESRRSDEESRKRLKEILDRSKKLLEELERRNLDERLRRKVEKSHRDLREVLERVRREDERSHEEANKVLEDVKREDEKSHRDVKKRLDDVRR

SEQ ID NO: 10463 - protein, 183 aa, Artificial Sequence; identical to SEQ ID NO: 10462
  Synthetic

SEQ ID NO: 10464 - protein, 183 aa, Artificial Sequence
  Synthetic
SEVDRLLEKLEELVRKVRRDVEENVKKNDELAKEVERLSKRNVERNEELAKEIEDLARRGDSRLEDLIKEIEKESRDSDRRSKEELRRIKEESKRSDDESEKKLKEIEDEVRKLLKDADDRGLSEELKEKVKRVMEKVKRVLDRVREEDEKSHRKADRVLREVEKRDRDSHERLRKVLDDVRR

SEQ ID NO: 10465 - protein, 183 aa, Artificial Sequence; identical to SEQ ID NO: 10464
  Synthetic

SEQ ID NO: 10466 - protein, 183 aa, Artificial Sequence
  Synthetic
DEVREIVERNERLAREDKKIAEENVRRNEDLVRRLRELSRKNVEDNRRLAKELEEVAARGDSRLDELIEEIERRSEESDRESRKRLDEIREESERSDRRSKEESDKINEDSKKLLEEADRRGLSEELKKRVKDSHDKLREVSKRSEELDRKSHEDLKEVLKEVRERDDRSHEELRRVLEEVKR

SEQ ID NO: 10467 - protein, 183 aa, Artificial Sequence; identical to SEQ ID NO: 10466
  Synthetic

SEQ ID NO: 10468 - protein, 183 aa, Artificial Sequence
  Synthetic
DEVERILERIDELVKRVKELSRRNVERNKELVERVDRLVKDNVDRNRRLAEEVDRLKKEGDSRLKDLIREIERESRESDKRSEELLKRIEDESRESDRDSERKLKEIDDEVEELLKRARERGLEEELTKKVEKVVKDAKKTLEEVKREDEDSHKKANDVLRRVRELDKRSHDELKRVLDEVER

SEQ ID NO: 10469 - protein, 183 aa, Artificial Sequence; identical to SEQ ID NO: 10468
  Synthetic

SEQ ID NO: 10470 - protein, 183 aa, Artificial Sequence
  Synthetic
SEVEDVLKKLDDIAKEVTERVKRVLDRNEEIVDEVEKLVEEVVRRNKEIVKEVKRLKDEGLSRLDEALDRVKKESKKSHDTAKDVLDKVRRKDEESRREVEKRLRELEKKLKDLLDEVRKRGINGDLEREVRRVIREVEKVIDDVRREVERSIRKSEKDIREVEKRVEDVNREVEEAIRRVRT

SEQ ID NO: 10471 - protein, 183 aa, Artificial Sequence; identical to SEQ ID NO: 10470
  Synthetic

SEQ ID NO: 10472 - protein, 184 aa, Artificial Sequence
  Synthetic
REVEELVKKLKELAERSLTAVERIVEENERLLKRLEDESKRNVDDIERLARELLRRVEEEKTKEVKDTARELVERLKRHSERLIKEIRRLLEELNRKNRKLVEDSNRKTDEVRKEVEDLRQKIDDERVERILTKVIEDLERVDKAAHDILREVNERLREVMERVEKTNRTVNRRLEEVLKEIER

SEQ ID NO: 10473 - protein, 184 aa, Artificial Sequence; identical to SEQ ID NO: 10472
  Synthetic

SEQ ID NO: 10474 - protein, 185 aa, Artificial Sequence
  Synthetic
DEVEEIAREMREIVDRVLKLSEKTVRENRESVERLLRLSEETVRRIRDLVRRLEELARDDTGDKDLKKVLDEIRKRVEELLERSKRVSDENRERSERSLRESERIIKELKERVDELVERLERRGTSEEMKEKVERAVEEVKRVLDRVRETDKRVNEEVRKVNEEAERIDEKVVREAREVLKRVRD

SEQ ID NO: 10475 - protein, 185 aa, Artificial Sequence; identical to SEQ ID NO: 10474
  Synthetic

SEQ ID NO: 10476 - protein, 185 aa, Artificial Sequence
  Synthetic
RVAERLEDVLRELDRTLKDVARKLEEANRDNKRVLEEVAEILKRVLDDLRRVLDEVAKRLKDEEKLRELKKRAEELERDIERLLREAEKSSREDSKRSKKLLDELERRVRELKKKIKKLLDDKKNVEKVVDDIVKEVRELAERIKEVVTESVKHSKKNVDEMRKLVDDVVKKVKKLVEDVRREIK

SEQ ID NO: 10477 - protein, 185 aa, Artificial Sequence; identical to SEQ ID NO: 10476
  Synthetic

SEQ ID NO: 10478 - protein, 185 aa, Artificial Sequence
  Synthetic
SVAEKLRKVLEELRDVLRRVKEISRRSLERLKKVLKELADRLKELNDKLRKTLEELRKDVDDKDLLADITRKAKELSDRSRKLLEDAEKEVRDAAEKNRRLDTELEKAARDLEKKVRELLKDKKDVEELVEEIVKEIKKLAKEVAETVDKVAKENEKLAKEAKEKVEESERDVERLLEELKREAD

SEQ ID NO: 10479 - protein, 185 aa, Artificial Sequence; identical to SEQ ID NO: 10478
  Synthetic

SEQ ID NO: 10480 - protein, 175 aa, Artificial Sequence
  Synthetic
DEEKILEDVLRELKKVLDEVRKTNEDANKRLKDVDDKSHEILKRVEERLREVVKRVNVDSEKFKRIKKLVEDAKRELKEIVDDSNRKTKKVNEESRRDIRRLEELVRTVEEELRRRDVRVEDVVRRVRKVAEDVRRSSEETVKRIEDVVRRSEETVRELVKRVEDLVREMEEEAK

SEQ ID NO: 10481 - protein, 175 aa, Artificial Sequence; identical to SEQ ID NO: 10480
  Synthetic

SEQ ID NO: 10482 - protein, 175 aa, Artificial Sequence
  Synthetic
SDEEKLRKVERELEEADKESHEINRTVNEDLRRVDRESKEILDRVRKELEEVKDKINVDSDKMRKVEELVRRLEKELERIREESNRLTKKVNEESRRDLEESNKLTDEVREELKRREVRVEDLVRRVRKVAEDSRRSSEDTVRRVERVVRESKRLVDDLVRRARRVVEEIKRTAK

SEQ ID NO: 10483 - protein, 175 aa, Artificial Sequence; identical to SEQ ID NO: 10482
  Synthetic

SEQ ID NO: 10484 - protein, 175 aa, Artificial Sequence
  Synthetic
KEDEILKTVVDELRDALREVEERNRTVNEELRRADKESEDRLRKVVRELTEVMKRVNVDSRKMEEIKKLVKEVRERLKKILEESNKLTEDVNRESREDIERLRKLARDVEDELRRRTVPVEELVRRVREVVKRVRDSSRETVERVKRVVERSRRLVERLVRKVEEVVREVEERAR

SEQ ID NO: 10485 - protein, 175 aa, Artificial Sequence; identical to SEQ ID NO: 10484
  Synthetic

SEQ ID NO: 10486 - protein, 183 aa, Artificial Sequence
  Synthetic
SDVDRFLREVERLVERARKLSERDERETRKVVKEVRDSSRKSVEDSKRVVEKLEEEARRGGDDKETLKRRVETLLKEVEDMHRRDKEEIDRLLEEVKRNHERSKKEIEDLLDDVRRKLEEIRKKGVEKEKLDKVLEDLRRVVEEVKRRNDEVLKRLKEVVDEVTKRNRKALEDAKERLKKVTE

SEQ ID NO: 10487 - protein, 183 aa, Artificial Sequence; identical to SEQ ID NO: 10486
  Synthetic

SEQ ID NO: 10488 - protein, 183 aa, Artificial Sequence
  Synthetic
SEVDEVAKRVREIVERLRDLVRKVVEDNERIAREVKRSSDETLKEIRDIVRKAKEVADRGGDDEDRLREELERLLREVHKKSEDDRRRLEKLLRDVHEKNKEVKKELKRLLDEVRKEVERIKERGVDERKIDKVLKELEEVITDVRRTLDDVDRKLREVVKKVEEINRRANEELERVIREVRR

SEQ ID NO: 10489 - protein, 183 aa, Artificial Sequence; identical to SEQ ID NO: 10488
  Synthetic

SEQ ID NO: 10490 - protein, 183 aa, Artificial Sequence
  Synthetic
DDVERLLKKVEDIVRELRESSRKSVEEIKRIVKEVKRLVDEVVKENERIVEEAEDVMRRGGDDKDKLRRRLERLLEEVHRRNKDVKDRIRELLKEVHDRSKRDKEEIRKLLEELERDIREIKKKGVEREKLDEVLKRARDVLREVEKENDKANKELEEVAERVKKTLDDVDKKLEDVMRKVTK

SEQ ID NO: 10491 - protein, 183 aa, Artificial Sequence; identical to SEQ ID NO: 10490
  Synthetic

SEQ ID NO: 10492 - protein, 181 aa, Artificial Sequence
  Synthetic
KEEEIVERVREKIKRVLDEVREIDKRAHDELRRVLKEVEDIVRKVHEDLKRVLEEVRREVKGDKRIDDELREIEERSRRSVEDAKRLLKEIEKRSRDSEKRSEDVLREIEERITRLEDLLRRGLDVKTVVETVDKIAKEVRDLSRRSVEENRKLAREVREVVRKVVEDNRRLAREVRERVR

SEQ ID NO: 10493 - protein, 181 aa, Artificial Sequence; identical to SEQ ID NO: 10492
  Synthetic

SEQ ID NO: 10494 - protein, 181 aa, Artificial Sequence
  Synthetic
DEDEKVEKVTREVEKALDEVRKIDEEAHRRLKRVLDEVRRIDETVHRDLKRVLDEVRERVRGVRELEERLKRIEEESRESLRRSEELLKEIEDRSRESLERSKKLLRDVERTIDRLRELLKRGLDVETVVERLRRLVEDIRRKSRESVERNRELVKEAKDVSRKSVEENKKLVRDITREAT

SEQ ID NO: 10495 - protein, 181 aa, Artificial Sequence; identical to SEQ ID NO: 10494
  Synthetic

SEQ ID NO: 10496 - protein, 184 aa, Artificial Sequence
  Synthetic
SVDEIVERVERELKRVLDEVREIHDRARDELRRMHERSERIIRKVEEELERALKEVRDRGVPREVLKRIEEIVKRVKDKLRELLKRSKELVERIERENREVLRKIEETARKVEEELERLRREGVDDKVVREAVREVERVVTELLEESRRSVEKTERLVRRSEELIRKIVKEVKKVAREIREEVR

SEQ ID NO: 10497 - protein, 184 aa, Artificial Sequence; identical to SEQ ID NO: 10496
  Synthetic

SEQ ID NO: 10498 - protein, 184 aa, Artificial Sequence
  Synthetic
SVDEILRKVKEELDRVLEEVTEIHRKAKEELDRAHDTSERIHREVKRELDRVREEVERQGVPEEVLRRIEEIVRKLKEENDKVLDDSRKKVEKLKRENDRVLEEIKEIVDEVKKRLDELRERGIDEKVVKEVVDEVRKVVEEIRKKSKDSVDKTKRVVEESIRTSDEVVKKTEKLVREIEKEVR

SEQ ID NO: 10499 - protein, 184 aa, Artificial Sequence; identical to SEQ ID NO: 10498
  Synthetic

SEQ ID NO: 10500 - protein, 184 aa, Artificial Sequence
  Synthetic
SVEEIVRKVTKELRDAHRRTEKILRDVDKELKEVLDRVRKIHRDVKERLEKVLDDVRKRGVPKEVLDEIRKLVEDVKRENDKLLKEIKKIVEDLHRKNRDLKRKSEELVRRVEEELRELRRRGVDEEVVTRAVERVKRAVKKSEDDVRRIVDENRKLVKEIEDRSRESVKKTEELIERIRKRVE

SEQ ID NO: 10501 - protein, 184 aa, Artificial Sequence; identical to SEQ ID NO: 10500
  Synthetic

SEQ ID NO: 10502 - protein, 183 aa, Artificial Sequence
  Synthetic
NVEDILRKAEEEVRRMLAENERIVEEAKERAKRMLDESRKRLEEVLRRAREVLEEVDKRKKDERLKETIKEVEDRVEKLLREVEKHSKDVKREVEELLRRNKKKLDELRDEVRKLLEEVKRSTSEDVVRAVVEELRRLLEESIRHVRKVVREIEKLLREDIELVKEVVRRIERLLRELDKEVR

SEQ ID NO: 10503 - protein, 183 aa, Artificial Sequence; identical to SEQ ID NO: 10502
  Synthetic

SEQ ID NO: 10504 - protein, 181 aa, Artificial Sequence
  Synthetic
RKVDELRKEVRRVVKESRDKAKRVVEEVKRLVEKSRRDVKRVVDENRRVVEEMRRKVKDRRTEDVKREIRETLEDLERKNRKLLEDSEREARDLKRRIDELLERSREEVKRLKDEIKELRDRGLGDKEVKDAEDELDKAHEDTKKILDEVKKELDDAHDETRRILEEVNKESETVLEEVER

SEQ ID NO: 10505 - protein, 181 aa, Artificial Sequence; identical to SEQ ID NO: 10504
  Synthetic

SEQ ID NO: 10506 - protein, 181 aa, Artificial Sequence
  Synthetic
SLARRVEEEVKRVVDESEEKVRRVVKVNKEMVDDVRRLVKEVVDENEEVVKEVRDTVTKRKTEEVKERIERLIREVRKKNEEILRRIERLVEDVERKNREILRDSERTVRELEKRIKELEDNGLGREDVRRVEEELKKAHDDTKKILDDVDERSREALDEVRKELDRVNKRSDKALKDVRK

SEQ ID NO: 10507 - protein, 181 aa, Artificial Sequence; identical to SEQ ID NO: 10506
  Synthetic

SEQ ID NO: 10508 - protein, 181 aa, Artificial Sequence
  Synthetic
SKAEELVKRVKEVVDKVRKLVEEIEEKVKRVVEKSRRDVTEVVKKNREVVKRVKDTVRRRKTEEVKTRIKKEVDDVRKENEDLLRESKKRLDEVKDEIRRVEEEVEELVRRLEKRIDELRKNGLGEEIVRRAREELERVLDEAKRILEKVTRELDEAHKETEKILRDVNRESDKALEEVER

SEQ ID NO: 10509 - protein, 181 aa, Artificial Sequence; identical to SEQ ID NO: 10508
  Synthetic

SEQ ID NO: 10510 - protein, 178 aa, Artificial Sequence
  Synthetic
SEDEKLDKVRKRLERAHEESKKISDKSEKDTRDAHRKTEEILDRVRKEMEEVLKRVRDRGISEELLDRADKVVEDVRRTLKKVLDDSRELLKKLEKLNRDVEDRSRRLLERVKEKLDRKEEPAEEIVKDVERVVKESEDLVRRIVEINERIVRESERLVKEVKDRVRDMVRRLAEEAR

SEQ ID NO: 10511 - protein, 178 aa, Artificial Sequence; identical to SEQ ID NO: 10510
  Synthetic

SEQ ID NO: 10512 - protein, 182 aa, Artificial Sequence
  Synthetic
SVEDIIRKVEKEVEEVVEKVERILDTVRRRSEKVLRENKEILEEVKRRADKVLRDVERNSKDKDLERVLEEVKRRVEELLDRNRKVLEEIEKRNRDLLREVEESIRRLKKEVDDLSEEVRNKPEEVAKRLEDRVREIVRTLEDLVREIVRRSEESVRRSRESAKRVVDTVKRIVDELEKRVR

SEQ ID NO: 10513 - protein, 182 aa, Artificial Sequence; identical to SEQ ID NO: 10512
  Synthetic

SEQ ID NO: 10514 - protein, 182 aa, Artificial Sequence
  Synthetic
DVEEIIRRVSDKARKVLDRNRKILEDVKRRSEEVLEENKRIVDEVDEIIDEVLKRVKKRSKDERLEKLLEDIRREVRRLKEENRKVLEEIKRTNEKLLEENDRKLKRIEEEVRELEERVRDKPREVVDRAVKRVEELVKRSERSADEVRKRSTESVKESKRSAKKVVEDVRRLVEELERRVR

SEQ ID NO: 10515 - protein, 182 aa, Artificial Sequence; identical to SEQ ID NO: 10514
  Synthetic

SEQ ID NO: 10516 - protein, 180 aa, Artificial Sequence
  Synthetic
SEEDIIREAERIAREALKRARKIAEDARRISEKALEDARRIAKEAHDISKKALEDAARKRRREDVERALEDVERKDRKLLRELEEALKRVARESEESLKELKRLLEKVEEDIRRLADAARRGLDAKRAAEEAKRLAEEAEEAAKRVADRNRKLAKEAADLAREVAKRSEELAREAAKKAQ

SEQ ID NO: 10517 - protein, 180 aa, Artificial Sequence; identical to SEQ ID NO: 10516
  Synthetic

SEQ ID NO: 10518 - protein, 180 aa, Artificial Sequence
  Synthetic
REDEKIEEVKRRAEEVLKESKKIIEDVLKKSEEVIKEVREILEKAHRISAKVLDEVRKTRDDKSVEDILREVEKRDKDLERELERVIEEVKRRSDTSVERVKRENDRSKREIEKLDDLVKRGLDVDEVVERVERIVTKNLRLAERVVEENEKLVEDLRRLVADVVRTSKKLVDDVRERVR

SEQ ID NO: 10519 - protein, 180 aa, Artificial Sequence; identical to SEQ ID NO: 10518
  Synthetic

SEQ ID NO: 10520 - protein, 180 aa, Artificial Sequence
  Synthetic
SEDEKVDEATKEAERVLREVRKIIKRAHDRSRDAEREVKRTLDEVRRETKRVLEDVDRTRRDETIRKLLEEVERRSRKSAEDLKRVLERLRREDEKLVKDLEDALRELKERIDRLRDLLKRGLDVDEVVRRVKEIVRRLEELAKEIERRSDEIVEEIRRLVKKVVDENRKIVKKAEEDAR

SEQ ID NO: 10521 - protein, 180 aa, Artificial Sequence; identical to SEQ ID NO: 10520
  Synthetic

SEQ ID NO: 10522 - protein, 180 aa, Artificial Sequence
  Synthetic
DEDEIIDEAKKRADEVLKRSEDILRRAREEVEKVLEEVRKIIEDVHRRSRKVLEDVRRKAKREDVEKAIEDVEREDKRLVEELKKVLEEIRRTIERLAEELKRVNDESRDRIRKLEELVKRGLDVETVVRRVDEIVKRNEELARRLVEEAKKIVDDLRRLAEEIVKRSEDLVEKLKEDAR

SEQ ID NO: 10523 - protein, 180 aa, Artificial Sequence; identical to SEQ ID NO: 10522
  Synthetic

SEQ ID NO: 10524 - protein, 177 aa, Artificial Sequence
  Synthetic
SIEDVLRDVARKLRTVVDEARKILDEVDKATEKVLREAERVIREVAKRDKKVVDEVRKGGLPEDVVRRIEKLSEDNAERLTRLLKRVEELVREINKRNRDIAREIEELVRKVEEELERKKVAEDLLKLVEDVVRRIRKLAEDVKRENDKLVERIREVAEDVLRHSEETVEEARKAAE

SEQ ID NO: 10525 - protein, 177 aa, Artificial Sequence; identical to SEQ ID NO: 10524
  Synthetic

SEQ ID NO: 10526 - protein, 177 aa, Artificial Sequence
  Synthetic
SSEEALKEVERRLEDVRREVKRVAEEIKKKDDKVNDDAREKLERVNRETKRVLEELAREGLPEEVVKELKELVDKINTDNRRIEKRIKELSDENKRDIDRLEKRAEELLARIKEELEKRDVVEELKDKVRRLLEELKRLLEELDKHSARTIKEIRDLIETLRRINEKVIEDMKRRRD

SEQ ID NO: 10527 - protein, 177 aa, Artificial Sequence; identical to SEQ ID NO: 10526
  Synthetic

SEQ ID NO: 10528 - protein, 184 aa, Artificial Sequence
  Synthetic
SELDEAKRLVDEVVRRLEELLREDKKLVAEVEREVRELLERNARLLKEVADRIRRLKEEGGDNREELTRRLEKLVRDVEEHSKEVKKRIERLIREVEKHTDEVLERVKKLVEDVKRELEKLRNEDEKVVREIERLLRELEKALEDVERELRRSKDRLRKLAEEVKKVLDDSRRELERLREELRT

SEQ ID NO: 10529 - protein, 184 aa, Artificial Sequence; identical to SEQ ID NO: 10528
  Synthetic

SEQ ID NO: 10530 - protein, 179 aa, Artificial Sequence
  Synthetic
KDIEDAVRDVRRKVKELIENSERVVRTVEKLVRELIDHSRKVVREVEKLAKELIELKRRGDIREEDLKRVKKRVRDLNERNKEEVEKLKRTVKKLNDDDKRKVETLKEDVDREKKRLRERGVDEEVLKEVDRVLREAEKRSKEINEESKRVLDKAERDSRRIDRKSEEVVKRAEEEVRT

SEQ ID NO: 10531 - protein, 179 aa, Artificial Sequence; identical to SEQ ID NO: 10530
  Synthetic

SEQ ID NO: 10532 - protein, 179 aa, Artificial Sequence
  Synthetic
EEIERVLRRVTERLKELERHSEEVLREVERLVKEDEDLAREVVKRVEELIRTLRELKKRGDAREKVLKEVKETVKKLLDELEEHTRRVKEKVERLNRDNERVVRELRKEVEELLDELRKRGVDRRVLEEVREVVDRAEKKIKELDDRSREVLKEVEKRSRDIIREIEEKLKDVEERVKD

SEQ ID NO: 10533 - protein, 179 aa, Artificial Sequence; identical to SEQ ID NO: 10532
  Synthetic

SEQ ID NO: 10534 - protein, 179 aa, Artificial Sequence
  Synthetic
SKAEEVAKRVEDLAREDIKLAERAAREVERLARENIKLAREVAKRVEELARRLIEAARRGDAREEVAKRAADTVRKLLEELRRENKKSAERAKELAERARKHTEEALREVKKLLEDARREGADEKALKDAEDAARKAAEDSERAIERAERAAKDALKKSEDAAEEAKRAADKALEDAAR

SEQ ID NO: 10535 - protein, 179 aa, Artificial Sequence; identical to SEQ ID NO: 10534
  Synthetic

SEQ ID NO: 10536 - protein, 182 aa, Artificial Sequence
  Synthetic
DEVRDLVRRVRELSEELIRRVRTLLREVEELSRRLIEESERLLREVRKIVEELIRRVERREPEEVLRELIDRARRKLEKLAEDVKELNKRHEDRLRELEKRIKDLNKKHKDALDEIKKRVREAGVEERVVKEAEEVVERANRESEKLLEDVKRVVEEANKTSEDILRAVEEIVRRVLEELKK

SEQ ID NO: 10537 - protein, 182 aa, Artificial Sequence; identical to SEQ ID NO: 10536
  Synthetic

SEQ ID NO: 10538 - protein, 182 aa, Artificial Sequence
  Synthetic
SSKEVLERVAEKLKEVNERLKDVLRRVAEKLKRANEENKKVLERVRDILREVLRRLREKVTDKDKIRELETRIKKLLDDLERSSKDDSRRSKDLLRKLEELVRDLSKRSKELLKELEDLVRRGDGSVEEAERVVEKSVEEARRLAERVKEEVDRSVKHSEDNVREMRRLVEEIVKRVEEAAK

SEQ ID NO: 10539 - protein, 182 aa, Artificial Sequence; identical to SEQ ID NO: 10538
  Synthetic

SEQ ID NO: 10540 - protein, 182 aa, Artificial Sequence
  Synthetic
REKEVLDRVEEILRDANRRNEKVLREVAEIIRTVIEDNKRVLKEVADELRRVLEELRDKVKDKDRIKKLEEEIRKLLDELRRSSDKVTKESEELLRRLEESSRRDSEKSKRLLDRLEELVRRGDGRVEEMEDVVRRSLDHSRRNVEEAKKAVTKVVEDNKDNVRRIKEVVARVVEKAREEAR

SEQ ID NO: 10541 - protein, 182 aa, Artificial Sequence; identical to SEQ ID NO: 10540
  Synthetic

SEQ ID NO: 10542 - protein, 181 aa, Artificial Sequence
  Synthetic
SEVEEVLRRSRESAKKSKEHSRELLEKVKRIIDDVKRLVREVLKRSRDSIKRVEDLTRRGDIDEDTVRDVVRRNKRLLDELRRAVEDAVRKIDEELKRNERDVERVVRENEELLKDLLRRRDTEKVKEAVKESRDLLRKVEETNRRVNDEVRKLLEDIRRDVERAVEESERLLEDIVRKVK

SEQ ID NO: 10543 - protein, 181 aa, Artificial Sequence; identical to SEQ ID NO: 10542
  Synthetic

SEQ ID NO: 10544 - protein, 175 aa, Artificial Sequence
  Synthetic
SDVERVLTEIRKLVEDIKRDVERVVDESRKLVEEAERDVERVITEVEKLVERIKREVRDDDLRRLAEEVAERVKRIVDKNRENVRKSAEDNKELIKENRRHAKEVEDRVREALERGGERARELLKRVRELIKEHNRLNRESLKTSRKNIEDHHEDNKRSLEEARRIIEEVREAAR

SEQ ID NO: 10545 - protein, 175 aa, Artificial Sequence; identical to SEQ ID NO: 10544
  Synthetic

SEQ ID NO: 10546 - protein, 180 aa, Artificial Sequence
  Synthetic
KELEDVEKEVEEVAKRVEDSIRRNREVVEKVKDEVRRLLDRNDELVDRVAKEITEAIKKGKDDREVEKRVTEVKKHSEDLLRDVERLVEEVKRHSREVTKRNRDLVTDVRRKLEEVVRRRDEEKVKKVLEDVRRRLEELIKRSEDSAREVEKRLEDLRREVEESLERVERTLEDLVRRVK

SEQ ID NO: 10547 - protein, 180 aa, Artificial Sequence; identical to SEQ ID NO: 10546
  Synthetic

SEQ ID NO: 10548 - protein, 186 aa, Artificial Sequence
  Synthetic
SELERLEERVRRIEEEVKRLLEEHREVSDRVAKENRRSNEESKREVRRIEEEVKDLSRKGGDDRRRILEEVKRLVRELEKLLEEDITKSRKSVEDVRKHAEELLRTVRKLVRDLEKLLKEVLDRMGNSEEVKKVVEDVKRRLDDLIRKAEKVVRDSERELKKLVDHSKEVVDRVRERLKELIEEAR

SEQ ID NO: 10549 - protein, 186 aa, Artificial Sequence; identical to SEQ ID NO: 10548
  Synthetic

SEQ ID NO: 10550 - protein, 186 aa, Artificial Sequence
  Synthetic
SEVEDLERRVKRILEESDELVKRHEEKSRKIVKDLEDLLRRNEDTVEKILRELEKRIRDGGDDKETLLRTVRERVKDLERHSKEVRDRVRELLERLDRDAKRVEEEDDRLVDELEKDLRRVLEEMGNSERVTRVVEKVRRLLEESKRRSKEVVKRSKDLLKEAEDRADESVRELRRKLKELEEKAE

SEQ ID NO: 10551 - protein, 186 aa, Artificial Sequence; identical to SEQ ID NO: 10550
  Synthetic

SEQ ID NO: 10552 - protein, 180 aa, Artificial Sequence
  Synthetic
SELEDIRRLLEKLDREVKELLKRSRDLAKEMEERVRKLVKESEDELRKLAEKVDRIKKNGGSEEMVEKLIREAEKLVEDSRKKSKDLIDELRELVRKSRRDSERLIKRARDLVREIAKRVTEDEAREVLKDVRRKVEELRKELTKVDKEIEEIVRELEKRLREVNERVRTIVDELAKRLK

SEQ ID NO: 10553 - protein, 180 aa, Artificial Sequence; identical to SEQ ID NO: 10552
  Synthetic

SEQ ID NO: 10554 - protein, 176 aa, Artificial Sequence
  Synthetic
SMLEELDKEARELLKEVRRLVEDNDRLLEELLRRARELLERNDRISEKVADEVRKIDDEKRVRELADESRKISREILEEVRRLVKELKDDSKRILDEVRKRVTDLDERVRRLLAERPTERMREVAKKVKDILKRAEEEVRESLERVRRELERVIRELEDSLRRNDKTLRDLIEERR

SEQ ID NO: 10555 - protein, 176 aa, Artificial Sequence; identical to SEQ ID NO: 10554
  Synthetic

SEQ ID NO: 10556 - protein, 176 aa, Artificial Sequence
  Synthetic
SDLERLDELLKRVLEKARKLVKENDEHSEEVRKTVEKVVRDNDKLAEDLADKVEKIRDEDTVRKLAEDLKRISEKLLREVEELVRRNDELSKKILDDVRKLVERLIREAEDLLRKKDEERVKEVLDRVDEILKRVIKAAEESLKRSHEINRRLIKAAEDSLRRVKKILDELEERVR

SEQ ID NO: 10557 - protein, 176 aa, Artificial Sequence; identical to SEQ ID NO: 10556
  Synthetic

SEQ ID NO: 10558 - protein, 176 aa, Artificial Sequence
  Synthetic
STLDKLRELLRRVEETVREVLERNDEHSKEVKRRVDKLLRENDEHSKELADLVRKIKDEDTVKKLVEENKRRSEELLKTVEELVRRNDELSKKLEEDVRRLVRELEERAKRALDRRPTREMEKVLTDARRSLRRLEERVRESLERSHRINRKLRKDVRESLERSKRILDKLREEVR

SEQ ID NO: 10559 - protein, 176 aa, Artificial Sequence; identical to SEQ ID NO: 10558
  Synthetic

SEQ ID NO: 10560 - protein, 176 aa, Artificial Sequence
  Synthetic
SVLEELRKLVEKVLREVDKLLKDNNRHSEEVEKTVKRLLDENDRLLEELADRVEKIKDEDTVRKLVKELDDRSKDILREVKKLLKENDDLSKRLLDEVKKLVDRLEERVRDALRKDDKEEAKKVLTEVRRTLEELERRVRKSLKDSHDINRKLEKEVRDSLKRVKDRLDELIKRVR

SEQ ID NO: 10561 - protein, 176 aa, Artificial Sequence; identical to SEQ ID NO: 10560
  Synthetic

SEQ ID NO: 10562 - protein, 177 aa, Artificial Sequence
  Synthetic
RKAEEVLKRAKKIVDEVDKKNRESLERTRKIVEDVNEENREVLDRLRRRAEELKKEVDDERVKRMLDEILKEVKKRIEEVVRRNEAVIEESRRLVEELSERNRELVKRLEEVVRREDSDDVVRRIEEVIEKARRENDESVRRDEKLMKEVKDENKKTVDDIRRLLKDIEDKVREAKR

SEQ ID NO: 10563 - protein, 177 aa, Artificial Sequence; identical to SEQ ID NO: 10562
  Synthetic

SEQ ID NO: 10564 - protein, 177 aa, Artificial Sequence
  Synthetic
SKLEEVVKRLEEIVRRVKRADEESLKRTRKIVEEVNRDNRRSLKESRDRVDELKKRVDDDDVVRRLDRLIEESEKLVRDVERDNKRIIEESEELVRRSAEMNRKTLEEVKDLVRKSDTDEVVKRIEEVAKRNEELNRETVKRDEDLVREAKRRNEETVERDKRLVEKITKEVDETKK

SEQ ID NO: 10565 - protein, 177 aa, Artificial Sequence; identical to SEQ ID NO: 10564
  Synthetic

SEQ ID NO: 10566 - protein, 176 aa, Artificial Sequence
  Synthetic
SLIETIRDLAKKLKEESDKSVETDKRLVEELRRRSKKTVDDIDELVKRLERMVEDDKRKEALKKKLEDLIRTIETILEKSRRDLKELIDRSRRLLEESRRLVEEVERRVRELLKDKDTEDAKRVLEELKRIIEDLLRKNKKSLDDTEREVRRLIKENETVVRKLEEIVKRLEEKIR

SEQ ID NO: 10567 - protein, 176 aa, Artificial Sequence; identical to SEQ ID NO: 10566
  Synthetic

SEQ ID NO: 10568 - protein, 176 aa, Artificial Sequence
  Synthetic
SLLEEIAELVERLRRESKESVKRDEELVDELKKRSEETVKEDKRLAEELDRLAKKIPDKDTLKEKADRVREESKRLVKESRDLLEEVRRRSEDLIRRSRKLVTDVIREVERLLAERPVEEMKKVLDDLRREIKKLEEENERSLERTRDIVRKLDRTNEESARESEKIIREVVKEVK

SEQ ID NO: 10569 - protein, 176 aa, Artificial Sequence; identical to SEQ ID NO: 10568
  Synthetic

SEQ ID NO: 10570 - protein, 176 aa, Artificial Sequence
  Synthetic
SLLERIKEEVEKLRKESEESVETDERLVEELKKEVKDLVEKDRKLAEDLKDEVDKDKRTEALDKRLKEVIRESEEILKRLREKLKELIRRSEKLLEDSRRLLDKLRREVEELLKERDEERAKEVLRDLRRTVKELTDENEKSLERTRREVEKLIRELEESLRESRRRVKRLLEKVK

SEQ ID NO: 10571 - protein, 176 aa, Artificial Sequence; identical to SEQ ID NO: 10570
  Synthetic

SEQ ID NO: 10572 - protein, 176 aa, Artificial Sequence
  Synthetic
SLLEEIERRVEELEDRSRKSVERDKELAKEVDDRNEESVRTDEELAKRLADLVRKRDRDEELRKKLEEVIRESERLLEELHRENERVIRESKRLIEESKRLLEKLDRDVARLLEERPTERMEEVLKRLKEIVKELEERNRESLERTRRILEEVDRKNEESLKRSREIVRELDERVR

SEQ ID NO: 10573 - protein, 176 aa, Artificial Sequence; identical to SEQ ID NO: 10572
  Synthetic

SEQ ID NO: 10574 - protein, 176 aa, Artificial Sequence
  Synthetic
SLVEEIERRVEKLAEEVKRLVERDRKEVEKLEKESRDTVREIEELADRLRDAVEKERDEDSLRKKLEELIRTIEEILKESRRLLEELIRTSTEILKRLKEKLEELIRRVEELLKRNPDDEMRKVLTRLREEVRRLLDELRRSLEDTKRTVEDLERKNKTVVDELRKTVAELERRAR

SEQ ID NO: 10575 - protein, 176 aa, Artificial Sequence; identical to SEQ ID NO: 10574
  Synthetic

SEQ ID NO: 10576 - protein, 188 aa, Artificial Sequence
  Synthetic
SIDEVLKRIREISDDAKRKIKEVVEEIKKNADRLRREIERVLDEIRKVIRELLERIKRVEAPEEKVREILRRVERILEEVEKEIDRIRKRVEELTKRHVDEAEKLVKHNEEVLRDVERRIKELKDRGGVDEDLERLLREVERRTRRHEEELERLLRHNNKVSKEVREELKRLLDRVREMLEDVDRKLK

SEQ ID NO: 10577 - protein, 188 aa, Artificial Sequence; identical to SEQ ID NO: 10576
  Synthetic

SEQ ID NO: 10578 - protein, 188 aa, Artificial Sequence
  Synthetic
SVEEVRKEVKRISDEAREEIERVLERIKENAKRLIEDIRRVLEEIEEIIRRLEDEIRRVELPEERVRELLERVRDILRRVAEEIEKIEEEVKELTKRHEDEIRRLLKENKDVLDEIEERADDLRKKGGVDEDLEELLRRLERISRESRKRLEELLKHNNKESEEVRKRLKELLDDVRRVVEEVRRKLK

SEQ ID NO: 10579 - protein, 188 aa, Artificial Sequence; identical to SEQ ID NO: 10578
  Synthetic

SEQ ID NO: 10580 - protein, 188 aa, Artificial Sequence
  Synthetic
SIDEVLEELKRISTEAVERIRRVAERNRKSVEEVRKRIEEVAKRIREIATRLLERIRRVELPEKDVERLLREVEEEVRRVEDTIERLLEENEEIMRDSVRKIEKLVEDNRRVLEELTRRIERLKDNGGIDEELKKLLDELEKISRDSDERLKESTKKVRDVNRESDKKLKELLKRVEDVLEKVDRELK

SEQ ID NO: 10581 - protein, 188 aa, Artificial Sequence; identical to SEQ ID NO: 10580
  Synthetic

SEQ ID NO: 10582 - protein, 188 aa, Artificial Sequence
  Synthetic
SVDEVLERIRESAETILEEIRRVLERNKRSAETILEEIRDVARKIEKRIRDVLKKIEDVELPEEKVRELLEELREILERVKKAIEDLLRRNEEVMRDSKRKIEKLLKDNKDIMERVTREIKRLKDEGGVDEELRKLLEEVKKINDDSRRKLEKSTRDVKKVNDDSRRELERLLRKVEEVIRRVDEELR

SEQ ID NO: 10583 - protein, 188 aa, Artificial Sequence; identical to SEQ ID NO: 10582
  Synthetic

SEQ ID NO: 10584 - protein, 184 aa, Artificial Sequence
  Synthetic
KLEELVEEVEKVVREVKKELEDVVRTVREVVKRSKDDLREVVKEVERINRELEERLRRLATDERVEKTIRELIKRSRDSLRRAKDEVKKNLDENERLLREVEKRVEKLMRELEELLRRVREVVERNRDLTELLERVKTLIKEIRDRLRRLLEEVKRLVEESKKDLKRLLDENKRLVDEATKTAK

SEQ ID NO: 10585 - protein, 184 aa, Artificial Sequence; identical to SEQ ID NO: 10584
  Synthetic

SEQ ID NO: 10586 - protein, 184 aa, Artificial Sequence
  Synthetic
SLEELLKEVEKVIRDVKRELEKVVRDIEENVRRSAKRLREAEEEVERINRRLEEELKKKTTREEIKELVRKLIEDSRRSLEKARRDIAENEKRNKESLDRAKRTVEKLLEDLERLLREVEKVARNNRDLTELLKRVRDLIRRIRETLEKLLKENHDLSKRSKEDVERLLKENADLVKELTDRAE

SEQ ID NO: 10587 - protein, 184 aa, Artificial Sequence; identical to SEQ ID NO: 10586
  Synthetic

SEQ ID NO: 10588 - protein, 184 aa, Artificial Sequence
  Synthetic
SLEDLLREVKRVIEEVKRELEEVVRRVKEIVERSVRDLRRVVDEVRRINTELEERLRRLTTEDRVRDKAEKLIRESEESLRRAEKRVRENIRENERLLEKVKRTVEKLLRDLEELLKRVKEVADRNRDLTELLRRVEELIKEIRKELKRLLDEVKDLVDKSKENAKKLLEDNKRLVEKIARDAT

SEQ ID NO: 10589 - protein, 184 aa, Artificial Sequence; identical to SEQ ID NO: 10588
  Synthetic

SEQ ID NO: 10590 - protein, 184 aa, Artificial Sequence
  Synthetic
KLEELVREVEKVVDDIRKELEEVVRRVEEVVRRSKRTLEDVVRRVKKINDDLEKELRERSKDEEVRRKVEELIRESKKSLDEVRRNAERNAEENRRLLREVEETVKRLLEELEKLLDKVRKVVANNRDLTELLEDVKRVLDEIRETLERLLRKVEELVERSKRNAEELLKRNEDLAKKVRDDAK

SEQ ID NO: 10591 - protein, 184 aa, Artificial Sequence; identical to SEQ ID NO: 10590
  Synthetic

SEQ ID NO: 10592 - protein, 178 aa, Artificial Sequence
  Synthetic
DVEDVLRKIEEIIRRVLEEIKTVLDEIRKNNEKLKEDVDRVLAEIEKDSEDLKRKIKDIEDLIRELDESTDRVRKLAKRIKEKSEKSLRDAERLVKRLEEELKRILEEVEDLVRKKKESGELAETILRRVEELVEEIRRRLKEILDRDHELSKRLKEELKKILDDNHKLSRDAAERAR

SEQ ID NO: 10593 - protein, 178 aa, Artificial Sequence; identical to SEQ ID NO: 10592
  Synthetic

SEQ ID NO: 10594 - protein, 178 aa, Artificial Sequence
  Synthetic
SVEDVLREIKETSDDAARKADEVLKEIEKNNRRLKKEIDRVHEHTKEDSRRLKEEIKDIEELIRELDKSTDKDRKLVEKAKRDSEESLRDVERLAREVKEKLKRSTDDVRRLVEEKKESGDLMREMLERNRKLIEDLKRELEDILRRDHRLSKELLARLKESNEENHRLSKEIRERRK

SEQ ID NO: 10595 - protein, 178 aa, Artificial Sequence; identical to SEQ ID NO: 10594
  Synthetic

SEQ ID NO: 10596 - protein, 178 aa, Artificial Sequence
  Synthetic
RVEDVLRKVEEIIRRLKEEIDRVLEKIRETSERAVKDIRDVLRRIREDSKRLKEDIKDAKDAIRTLDRSTEEVEKLVKEAEKELKRSSDEVEKLARDLKRKLKEILDRARRLVREKRESGEDAERIVEEVRKLVEEIRKELEDILRKNEKLIEDLKRELKKILEENHRLSREIRERRR

SEQ ID NO: 10597 - protein, 178 aa, Artificial Sequence; identical to SEQ ID NO: 10596
  Synthetic

SEQ ID NO: 10598 - protein, 178 aa, Artificial Sequence
  Synthetic
SAEDVLREITKTSERAREDIKRVLDEIKRTSDEAVKTVTDIHEHTRKTSEDLKRKIKDIRELIRRLEESTDKDRRLVEEVKRRLEDSSRRAEELARRAEKRLKESTEKVKDLVDKKKEAGEVLRKILEENRELIERLKKELKELLDRNRKLIEDLLREAEKSNEDNKELIKKAEEDAR

SEQ ID NO: 10599 - protein, 178 aa, Artificial Sequence; identical to SEQ ID NO: 10598
  Synthetic

SEQ ID NO: 10600 - protein, 177 aa, Artificial Sequence
  Synthetic
SVEKVLEDITRELRRADEESKRALDHSAEVLKDLERRVKEVLDESREIIKELERRLRELKEVKDVLRRLEEENKELVRDIRRLLEEAIKENTELSKRSRETLDKIEKDVKKIVDDGVSDEEAKRVLDEVEKLVRELKKRNDELNEKTERLVRDLRRRLKDSLDKSRDLVRRLEEKAK

SEQ ID NO: 10601 - protein, 177 aa, Artificial Sequence; identical to SEQ ID NO: 10600
  Synthetic

SEQ ID NO: 10602 - protein, 177 aa, Artificial Sequence
  Synthetic
SVEEVLDEVRRIIEELLRLSEEMLRHSEEVIRDLERVSREVLERSKRIIDELLRELKDLDEVRKTLEDLIRKNTELSKTSKKVLDDARRENKKLSDDSRRVLRKLEEDIRRLVEEGVSDEVAKRAVEDVRRVVEDLERRNRTLNEKTKRLVEKLTRDNERSLKESKKVVDELREEAR

SEQ ID NO: 10603 - protein, 177 aa, Artificial Sequence; identical to SEQ ID NO: 10602
  Synthetic

SEQ ID NO: 10604 - protein, 177 aa, Artificial Sequence
  Synthetic
SVEEVLDEIRKRIEDLKREVDEVLDRSRRIIETLKERVDRVLKHSRELIKRLKDKLRELEEVKKTLDEIIRKNEELVRDIRKELKRALDKNKELVKEIRRELKEIIEEVKKLVDKGARDEEMKRALEEVKKLLDRLREELKRSLDESRKLVEELERRLRESNEESERLIRKLEREAD

SEQ ID NO: 10605 - protein, 177 aa, Artificial Sequence; identical to SEQ ID NO: 10604
  Synthetic

SEQ ID NO: 10606 - protein, 177 aa, Artificial Sequence
  Synthetic
SVEDVLREVEKIIRELDRKSEKVLEDSKRVIEDLKRKVEEVLRHSETLIRDLERRLKELEEVKRVLDKLRRDNERLVEDVKRELDEIIRKNKELSERSKRELERLRKAIEDLVRAGASDELAKEMVDRVRELVKKLEEENRRSLEESKKLVEELARRLERSNTESKRLIDKLREEAR

SEQ ID NO: 10607 - protein, 177 aa, Artificial Sequence; identical to SEQ ID NO: 10606
  Synthetic

SEQ ID NO: 10608 - protein, 177 aa, Artificial Sequence
  Synthetic
SVEEVLKDIEKKIRDLDRKVKEALRHSEEVIRRLEEEVKRVLDDSERILRDLKEKLRDLEDVKRELDRLLEENKRLVDDIRRVLEELERRNRELVDRIREVLKRIIEEVEKLVRDGASEELMRRIVEKVEELVKELDKRLRESNEDSKRLVEDLSRRAKKSLEESRELVRELKKRAK

SEQ ID NO: 10609 - protein, 177 aa, Artificial Sequence; identical to SEQ ID NO: 10608
  Synthetic

SEQ ID NO: 10610 - protein, 177 aa, Artificial Sequence
  Synthetic
SVEEVLDRIRKIIKELLDRSEEALRHSEEVIKDLERKVEEVLERSREVIRELLERLKELREVKKVLEELLRRNKELVDRIRKDLKKAIDENKKLSDESRRVLEEVRKKAKKLVDDGVDDEELKTMLEEVKKVVEELLRRNRKSNEDSKELVKELTRRLRKSLEDSKELVRKLEEEAR

SEQ ID NO: 10611 - protein, 177 aa, Artificial Sequence; identical to SEQ ID NO: 10610
  Synthetic

SEQ ID NO: 10612 - protein, 177 aa, Artificial Sequence
  Synthetic
SVEDVLREIEEILRRLEKESDDALEHSRRVIKRLEEESDRVLEESRRVIEELERKLRDLEEVKRELEKLIRKNEKLSKDSKDVLKKLIEENRRLSETSKEVLRELRKRVEDLVRAGADDEEMKKLLEDVKRLVDDLRRKNEESNRRSKELVDKLDKENKDSLKESRELVEKLEREAR

SEQ ID NO: 10613 - protein, 177 aa, Artificial Sequence; identical to SEQ ID NO: 10612
  Synthetic

SEQ ID NO: 10614 - protein, 180 aa, Artificial Sequence
  Synthetic
SVEEVVREVEEKLRKLIDDVRRVVEENRRNTERLRKRVTEVVKRNEDILRRLEEDIRRVERAEEAKEVLKRLKEETDRLLERVEEVVRRTKKKTEDLLRDVERLLREIKKELEDLLRNNVSEEVAKTALRKVEDLLKKLKERAEDSSRDNHRISKELTEELEESSKRVKTLVDELRKTVK

SEQ ID NO: 10615 - protein, 180 aa, Artificial Sequence; identical to SEQ ID NO: 10614
  Synthetic

SEQ ID NO: 10616 - protein, 178 aa, Artificial Sequence
  Synthetic
SVEEVLKESREISTRLAEEVKRVLDEIRRILERVKRINEKVNKDIEEILRRVKKTVGEKKRELVKKLEDEVRKILETNKRLSEELEERVRRLLEELERLLRKVVKENEDTVRDLARIEDERVAEKILKEDRDTVERLRKRVEDLLRDVRRLVEDSERKSRDLLRRVEELVRELKKRVD

SEQ ID NO: 10617 - protein, 178 aa, Artificial Sequence; identical to SEQ ID NO: 10616
  Synthetic

SEQ ID NO: 10618 - protein, 178 aa, Artificial Sequence
  Synthetic
SVEEVLKESKRVSEELNELNKKVNDDIRKILEKVNRENKKVNEDIERELRKLEEEVGRKKEELLREVVKEVRRLLKENERLSEKLRKEVEELLKRNEELSKRVVDDNKRTVDEARRIDDEEVAREILRDDKRTVEESKRESKRLLERVKKLVDRSAEESKKLLEDVKRLLEELRERAR

SEQ ID NO: 10619 - protein, 178 aa, Artificial Sequence; identical to SEQ ID NO: 10618
  Synthetic

SEQ ID NO: 10620 - protein, 178 aa, Artificial Sequence
  Synthetic
RVDEVLDESKKVSDRLHESIRRVLEKIEEILRRVNEENRRVNEEMKRILDELARTVGEKIREELEKVKKRAEDLVKTNEELSEDLKRRVRKLLKELEDLLRKVNEENKESLDRLKRIEDERVAREILKADRETVRRLEKRAKDLLDEVRDLVRESEKRSRELLKEVEDLVRKLTEEAR

SEQ ID NO: 10621 - protein, 178 aa, Artificial Sequence; identical to SEQ ID NO: 10620
  Synthetic

SEQ ID NO: 10622 - protein, 178 aa, Artificial Sequence
  Synthetic
RVEEVLKRMRDILRRVNEINRRVNRELERSSREILERIREILDRIRRILERLEERVGDKKKEEVDRVKDEARKLLRDLEETLKRDHDRDRKMLKENEDLSREVEKRVEELVRDLARIEDEKVARDLLREVEELVKESEELSEELLRRSRRSNEESLRKAEKLLETVRRLVEELEKKTT

SEQ ID NO: 10623 - protein, 178 aa, Artificial Sequence; identical to SEQ ID NO: 10622
  Synthetic

SEQ ID NO: 10624 - protein, 182 aa, Artificial Sequence
  Synthetic
SEAEAVEEEVRRLVEESEKRSKELLEDVERLVEESERRSKKLLDDVRKLVDDLKKELRRVRDRETMKKLLKELEDRVRRIIERLAELSKEVEDRVREIIKTNEEISDRLRKKVDELLEELKRRGVDDRVIERLKRILKEAHDKNKEVSDRIRKILEELHRKNRKVLEDIKRILDDVRREVER

SEQ ID NO: 10625 - protein, 182 aa, Artificial Sequence; identical to SEQ ID NO: 10624
  Synthetic

SEQ ID NO: 10626 - protein, 182 aa, Artificial Sequence
  Synthetic
KEAEDLLREVEKLVRESKKLSEDLLREVRKSNERSKRESERLLREVERLVRELKDLRDKVRDRRTLEKLLEDLERTAREIIKEIEKISRDDKKDVERIIRENERISEELEKRVREILEKIKRDGLDDRIIERIKRILEKVHKINREASKRIKESLDRAHETNKRVLDRIRKIVDDVRREVER

SEQ ID NO: 10627 - protein, 182 aa, Artificial Sequence; identical to SEQ ID NO: 10626
  Synthetic

SEQ ID NO: 10628 - protein, 173 aa, Artificial Sequence
  Synthetic
RLEEVKEELKRIATKLKEEIKENIRRLEESVEKIAKELAENIKRLEDILRDVKRKLRDERIVKTVEDIARRVVEDNERIMEEDKDVVRRLVERNEEIVRRVDETVKKIVELIDRGEPGEELVERLRRVVEEVRERLKDSSRELRKINEDSRKKVEDSSREVKKVVEELERRDT

SEQ ID NO: 10629 - protein, 173 aa, Artificial Sequence; identical to SEQ ID NO: 10628
  Synthetic

SEQ ID NO: 10630 - protein, 174 aa, Artificial Sequence
  Synthetic
KELEDVARKVEDLLRRIEKTNRDAIRESERLVRELKREVEKVEEESRRLLEEVERRIRDEDVIRRLREISERSKRELKKLLETITRISDKSVKDNEKLLRDTREVVRRVDEVLKNNGDAKKLLDEVRKVIEDNRKRSEELLEENRKVVEDVSRTLERILRENERVADEVDKEER

SEQ ID NO: 10631 - protein, 174 aa, Artificial Sequence; identical to SEQ ID NO: 10630
  Synthetic

SEQ ID NO: 10632 - protein, 174 aa, Artificial Sequence
  Synthetic
DELERVTEEIDKLSKDLERRVREVLEESRRLVEDVERVVREVLEEARRTAKDIADKVKNERILDEVREMTKRHEEELRRLLEELKRISEESKEELKRLLKENREAVEKVRRELENKGDVDKLLEEVRKISEDSKERLKEILKRNEEVARRVKRELKRLLETNREIIRRVEERER

SEQ ID NO: 10633 - protein, 174 aa, Artificial Sequence; identical to SEQ ID NO: 10632
  Synthetic

SEQ ID NO: 10634 - protein, 178 aa, Artificial Sequence
  Synthetic
RELEELLDKVRKIVEESKKRNEDLLREVREIVERSKEKIKKVLDEVRKIIETVRKSRLSDEKVRRLLEELRRKVEKLLDDDRKLAKELRDRLRELKKTNEDLARRLREELERILRDKPDVKEVEKVLRDVEELIRDSERASDRVLKDVEELIKDSERMSKKAEEDVDRLLRELDKDVR

SEQ ID NO: 10635 - protein, 178 aa, Artificial Sequence; identical to SEQ ID NO: 10634
  Synthetic

SEQ ID NO: 10636 - protein, 183 aa, Artificial Sequence
  Synthetic
DSVERVAEEVRKLLEDIKRVSDEVTKRLRDLLEDLKRVSDKVRKDIERLLEDLEREVRRKGGEELKKKVDKVTRELEELLRRNEEKVKEVERRVRDLLRRNNEKVKRAVKELRDLLESLRRIEEDRVLEEALRRVEELARRIKEHSKRVLETVRRLVEEIKKHSRKVLEEVRERIKRIKDELR

SEQ ID NO: 10637 - protein, 183 aa, Artificial Sequence; identical to SEQ ID NO: 10636
  Synthetic

SEQ ID NO: 10638 - protein, 183 aa, Artificial Sequence
  Synthetic
SEVEKAEKDVRDLLKDLRRVSEKVKRAVEDLLRDLKRTSDKASEDAKRLLDDLRRKVEERGGDRLRDEVREAEKEVEKLLRENNTEVDKVRKELEDELRRNEEMVRTVERRLRELLERIKRIEEDRVVKEILDEVEKLIREIKKHSEDLLRKVRKDIKRVKDHTKRVLDRIRKLIEDIKRRLE

SEQ ID NO: 10639 - protein, 183 aa, Artificial Sequence; identical to SEQ ID NO: 10638
  Synthetic

SEQ ID NO: 10640 - protein, 181 aa, Artificial Sequence
  Synthetic
DEVKELLDRVREEIRRDKERVKKLLEDSKRLNERDKREVKRLLEEVRELIKRLEDIIRKSDKDDELEKIVREIERRLRRVIEESEEHVKRTVDTDRKLLEDSKRHAEESARRLKEVLEDAKRKGLEEEVVKDLERLLRDLERVNDEVEKRLRDLTEDSKRFNDEVAREIEKLLEDVARTVK

SEQ ID NO: 10641 - protein, 181 aa, Artificial Sequence; identical to SEQ ID NO: 10640
  Synthetic

SEQ ID NO: 10642 - protein, 181 aa, Artificial Sequence
  Synthetic
REAEELLKRVEDLIRRLKDMIRKLLEDSKRLNERDVETVKRLLEDVERTIREIKDEVRRDKDKDRLRDLVRRVEERLRELLERSKDHVRRTAETDRELLDRLRRLVEKVERELRDMLRELEERGADERIVREVEKLLEKIKRDVDRVRRELERLTEESKRINDKAVRDIEELLEDLKRAVK

SEQ ID NO: 10643 - protein, 181 aa, Artificial Sequence; identical to SEQ ID NO: 10642
  Synthetic

SEQ ID NO: 10644 - protein, 185 aa, Artificial Sequence
  Synthetic
DELERLLEDVERVSRETKKLLKKLLDDAKRVIDKNREDSRRSLEEVERVIREAKELLKDGQEKEKLLRDVERIVKEVIEKNREVVDRVRDIVREIVERIERLVRKNKEDVDRVRREAEKRSRTKDTERRVRDVVKKIRELSEDVEREAKKVIDRLKELLEDIERENRRVEEEIKKLLEDVERTAR

SEQ ID NO: 10645 - protein, 185 aa, Artificial Sequence; identical to SEQ ID NO: 10644
  Synthetic

SEQ ID NO: 10646 - protein, 182 aa, Artificial Sequence
  Synthetic
KLVERLVKEAEDLTEEHKERLDRLLKENEKISRESKKRLKEILEENERVVEEVKKLLRDGQPKEELVKTVRKISEDSKRRLEELVRRNRKVSKESKERLDEILKTNEDMVREVEERLKREVDDRKKVDEVRRRLEELHKELEKVVRDVKRTSEKLVRDSEDMARKVVKTSEDLLRELEEEAR

SEQ ID NO: 10647 - protein, 182 aa, Artificial Sequence; identical to SEQ ID NO: 10646
  Synthetic

SEQ ID NO: 10648 - protein, 182 aa, Artificial Sequence
  Synthetic
SRAEDLVRRVEEMTRKHKKDLDDLLRENEEVSRRSKERIRKLLKDIKDVVDDVERVLRAGDDKKRLVEEAEKVARDVERDLRRLVKENRDISRTSKERLDDILRTNREVIERVDDALRREVSDRDKVEEVRERLKKLHTELEKRVREVKRDSERLVEDSERTVEELLRRVRKLLKEVRDSVK

SEQ ID NO: 10649 - protein, 182 aa, Artificial Sequence; identical to SEQ ID NO: 10648
  Synthetic

SEQ ID NO: 10650 - protein, 182 aa, Artificial Sequence
  Synthetic
SEAERLVEEAERVTREHKKRLDDLLKEVRRVSEDSKRKLEKILKENEDVVEEVKELLKAGDDKDKLLEKVRKISEDSRRRLEKLVEENKEMADRVRKALDDILDTNRRVVEEVKRRLEREVSDKEKVDRVRRELDRLHKELAEVVERVKRAVDKLLRDSEEEVKRVEERSERLLKEVADALR

SEQ ID NO: 10651 - protein, 182 aa, Artificial Sequence; identical to SEQ ID NO: 10650
  Synthetic

SEQ ID NO: 10652 - protein, 182 aa, Artificial Sequence
  Synthetic
SDVDKLVDDVRRETEKHKKTARDLLDELRKVSEESRRRLKRLLEEITEVVERIKRVLEAGRDKDELLERIEKVVREVREKLKELVKRNEDVVREVKRRLEELLRTNKKIVDEVKRMLDERVSDEEEVRRAKEELDRLHKEVEDVVRDVTRELDRLLKRSREVVERVREEADRLLEEVERTLK

SEQ ID NO: 10653 - protein, 182 aa, Artificial Sequence; identical to SEQ ID NO: 10652
  Synthetic

SEQ ID NO: 10654 - protein, 182 aa, Artificial Sequence
  Synthetic
SEVDELVERAERISRESKKTIKKILEDNERVSKRHKDELKKLLDELKRVVDEVRKVLERGTPKEELVKEVEEVVRRVKETLKRLLDTNHKISKESKERLRKLVEDNKRVVETVKKLLEDRVSDKEKVERALRELDRLLEESKRVVDEAEKTSDKLNKEVEEMARRVEEEVDRLLKEVRDDAK

SEQ ID NO: 10655 - protein, 182 aa, Artificial Sequence; identical to SEQ ID NO: 10654
  Synthetic

SEQ ID NO: 10656 - protein, 182 aa, Artificial Sequence
  Synthetic
SEADELVKEIEDVSRRSKEELTRLLEEAEKVSREHKKTLEELLRRIEKVVRDIKEVLRGGTPREELLKTIRKLVEDVRRELERLLRTNHEVVRRVEDRLRKLVEDNERVARKVKDELRRRVSDEKKVREVEKLLDKLLEESRKRAKEVLRALRELNREVAEVVRRVEERLRRLLKEVEEAVR

SEQ ID NO: 10657 - protein, 182 aa, Artificial Sequence; identical to SEQ ID NO: 10656
  Synthetic

SEQ ID NO: 10658 - protein, 182 aa, Artificial Sequence
  Synthetic
SDVDKIVEEIERISRDSERRIREIVERNKKVSEDHKRELERLLKEMEKVVEDVKKVLKDGDDKKKLKDEARRVVERVKDDLRKLLETNHEISKRSREELRKLVEDNERVVRKAEKDLKDRVSDKKKVDEARKKLRDLLERSKEVVKEAERRLEKSNRDVRREAERVRKALDDLLKEVDEAVR

SEQ ID NO: 10659 - protein, 182 aa, Artificial Sequence; identical to SEQ ID NO: 10658
  Synthetic

SEQ ID NO: 10660 - protein, 182 aa, Artificial Sequence
  Synthetic
SRADELVERAKRMTDEHKKTAEDILRENKRVSDEHKKTLEKILRENEKIVDEVAKLLEEGRDKEELVRRVEKVSRDSKRRLKELLETNHRISEESERRLRELLRTNREVVEEVRKRLKDEVSDKDKVREVEEELKRLHKEVEDVVDTVRRTSEKLNDEVRKVVETVTRRSEELLEELRRRAK

SEQ ID NO: 10661 - protein, 182 aa, Artificial Sequence; identical to SEQ ID NO: 10660
  Synthetic

SEQ ID NO: 10662 - protein, 182 aa, Artificial Sequence
  Synthetic
KEVEKLVTEIREMTERHKRTLEELLKEAEEVSRRHKEDLKRLLDENRKIVEEVARVLEKGEPKEELEKRVREVSKRSEETLRTLLETNHRVVKRVEDELKRLLETNRRMVETVKDLLRKTVSDKDKVERVLREADRLHEEVRKVVEKVREELRRLNEEVRKVVEEVRRDSERLVREVEERAR

SEQ ID NO: 10663 - protein, 182 aa, Artificial Sequence; identical to SEQ ID NO: 10662
  Synthetic

SEQ ID NO: 10664 - protein, 182 aa, Artificial Sequence
  Synthetic
SRVDELVDRARKMTEKHKEELKRIVEENRRVSKEHKERLEDILRRNAEIVERVKEVLKRGTPREKLVKDVREVSRDSKRRLDDLLRTNHKISEESKRRLRELLRTNEEFVRTVEDLLRREVSDEDKVRRALEELKKLHDELAKEAKRVEELLDKSNEEVEKVVRDVREASERLLEELERTAK

SEQ ID NO: 10665 - protein, 182 aa, Artificial Sequence; identical to SEQ ID NO: 10664
  Synthetic

SEQ ID NO: 10666 - protein, 182 aa, Artificial Sequence
  Synthetic
DEVKKLVDDARRLTEKHKTDLERLLDEARKVSEEHKKRLEELLREIAEVAKEILKVLRKGEDRERLVKEIEKVVRDVKRKLDELLKTNHDVVRRVEDELRRLLKTNKEVVDTVRDELERRVDDREKVKRVEETLERLHKEVEEVVRRVKKALRDLNDEVRRVVDEVRRRLEELLKRVEEEAR

SEQ ID NO: 10667 - protein, 182 aa, Artificial Sequence; identical to SEQ ID NO: 10666
  Synthetic

SEQ ID NO: 10668 - protein, 187 aa, Artificial Sequence
  Synthetic
REVDEVEERVTRLLKKVRDVAEESRRRSEELLKKSRDVVEEVKKEVDKLLEEVRDMVRRVKDKGVEEKLRKLIRDAEKILKELRKRLEENIRENEELLRRNEERLERLIRELEDLLTKLRKMLKDNAEGRVLKKLVEEVKKLADEIERELERTSKEIEELSRRSEEDLRRLVRKLREVVRKIEEDLR

SEQ ID NO: 10669 - protein, 187 aa, Artificial Sequence; identical to SEQ ID NO: 10668
  Synthetic

SEQ ID NO: 10670 - protein, 187 aa, Artificial Sequence
  Synthetic
REVERVERELERLLEEVREVAERSERESKKLLEDTRRVVRKVKEDVRRLLEEVRDVVRKVKDKGVEEELRKLIKELEDLLRRLDETLEKNIRDNERVLEDNRRILEELIRELEEMLRRLKKSLEDNAEGDVIRRMVEEVEKLARRIKETLERTVRRLEELVRRSEKNLRTLVEEVRKAVERIKETLR

SEQ ID NO: 10671 - protein, 187 aa, Artificial Sequence; identical to SEQ ID NO: 10670
  Synthetic

SEQ ID NO: 10672 - protein, 187 aa, Artificial Sequence
  Synthetic
SEAERVEEDVRRLLKRVEEVIKRSEERSRELLKKTEDVVREVRKRVKKLLDEVKDTLDKVRDKGVEEEARRLIEELKEILERLERNLRKHIKDNRTLLRKNKEDVTRLKEELEKIVEDLKRLLDDNVGGEVLDRLVEELRKLVEEIERDLERTVREIEKLVKDSDRNLEDMVRELRRVAERIKEELR

SEQ ID NO: 10673 - protein, 187 aa, Artificial Sequence; identical to SEQ ID NO: 10672
  Synthetic

SEQ ID NO: 10674 - protein, 187 aa, Artificial Sequence
  Synthetic
REVDEVRRRAEELLKEVRDVVTESEKESRRLLEDTRRVVEDVKRRVDRLLEEVRDLLREVSEKKVEEEARKLIRELERIVEDLERKLDRDIRENERLLEENKRRLEKLIRELEEILRDLDRKLRDNAEGDVLRELVKRLEDVAREIKKRLEDTLRKLEEVSRRSKENLRELVERLRRIADEIRERLR

SEQ ID NO: 10675 - protein, 187 aa, Artificial Sequence; identical to SEQ ID NO: 10674
  Synthetic

SEQ ID NO: 10676 - protein, 186 aa, Artificial Sequence
  Synthetic
DEVDRVREEIERLLREVEEVLERSERESRRLLREVEEMLERSDEEVRRLLKEVEEVLRDELTDEDLMRKIRETLKKILEDNEELVRRIKRRAEEALERDREVVEEIRKRAEKVLEEVERLLRDKKESGEVLEEILRRAKEEVEKLKRELERTVERLAELVEELKRELERSTREVRKTVEELKRRIK

SEQ ID NO: 10677 - protein, 186 aa, Artificial Sequence; identical to SEQ ID NO: 10676
  Synthetic

SEQ ID NO: 10678 - protein, 186 aa, Artificial Sequence
  Synthetic
DEAEDLERRARELLEEVERVLEESIRRSEETVKEVEDMLRRSTEEVERLLKRVEDVLREELSDEKRLEEIKRKMEEILKRNRELVEEIRKELEESLRRNRELVERAKRTLERIVRKVEKVIREKKDDGELLKRLIDEVRRLAEKIKEELKESSKRDEEKVEKLKKELKDSTDAVRELVERLEREIK

SEQ ID NO: 10679 - protein, 186 aa, Artificial Sequence; identical to SEQ ID NO: 10678
  Synthetic

SEQ ID NO: 10680 - protein, 174 aa, Artificial Sequence
  Synthetic
DEVEELVKEVEERIKKVHKENEDVLRESEELMKRLHEENERLLREVEELVRRIRELRKRGDLREEDVKRVLKRIEELVERARRENKKASDRNRDLIRRVKKTNDDVLREIEELVKEIDVREARERIRRLLTESRKSVEEVEKRLRELSKRSEESVERVERTARRLLKELEDMTR

SEQ ID NO: 10681 - protein, 174 aa, Artificial Sequence; identical to SEQ ID NO: 10680
  Synthetic

SEQ ID NO: 10682 - protein, 174 aa, Artificial Sequence
  Synthetic
EEVKRLVEKVRKLIEDSKRRNRDVLRRVEELVRRVHRRNEEVLRRVEKLVEDIKELLRRGDLREEEVEKIKRRLRELAREVEEENRRVAEDIRRLLDEVRRENERVLREIRELLKEIPVEEAEREIERLLEESKRSVEEVEERIRRLIRESEESVREVKERIDELLKDADRATK

SEQ ID NO: 10683 - protein, 174 aa, Artificial Sequence; identical to SEQ ID NO: 10682
  Synthetic

SEQ ID NO: 10684 - protein, 174 aa, Artificial Sequence
  Synthetic
REVEELVKDVERLMREVHRRNEKVVEEVEALIRKSKEDNERVAREVERLVREVEKMLRRGDIREEDIKRVLKEIEDLLEEVERRNRRVLEEIERLLREVTEDNREVVRKLERLAEEIPDREAKERIKDLVRKSRDSVREVRERIRRLLEDSKRSVDDLARRIRELLRKAAEKAR

SEQ ID NO: 10685 - protein, 174 aa, Artificial Sequence; identical to SEQ ID NO: 10684
  Synthetic

SEQ ID NO: 10686 - protein, 174 aa, Artificial Sequence
  Synthetic
DEAEELVDRVRKLAEDVHKKNEDVLRESDALVKDSDRRNREALRRVEKLVEDVEELLRRGEIREEEIDKVLKEIARLLDELRKENKDLSRRNEELIERVERENRRVLTEIDKLVKEIPVEEVKRRIKELLKRVEESVRTVEEELRRLSKESEESVKRVEDRIRELLKRLRDAAR

SEQ ID NO: 10687 - protein, 174 aa, Artificial Sequence; identical to SEQ ID NO: 10686
  Synthetic

SEQ ID NO: 10688 - protein, 174 aa, Artificial Sequence
  Synthetic
DEAEDLVRKVRKLIEESKKENEDLLREVRELVARVHEENERVLREVEKLVEDIRRLLRRGDLRREDVRRVEEEIKELLKEVRRINKEVLEEVKRLVDEVKRRNEDVLRKIEDLVRRIPVREVKKAIEDLLKESEDSVREVEEEIRKLLKDLEKSVRDVERAIEKLLDELRKDTK

SEQ ID NO: 10689 - protein, 174 aa, Artificial Sequence; identical to SEQ ID NO: 10688
  Synthetic

SEQ ID NO: 10690 - protein, 174 aa, Artificial Sequence
  Synthetic
REVEELVREAEELVRRVHKRNEDALRRSKKLVEDVHRKNEEVLKRVERLVERIEELLRRGDLREEDVERVLREIKKLIEEVEEDNERVSRENKELVDRIREENERVAKRLEDLVREIPDKEAAERIKRLIDEVRKSVEEVERRAEELSRELRRSVKEVRDALKRLLDDLRRATT

SEQ ID NO: 10691 - protein, 174 aa, Artificial Sequence; identical to SEQ ID NO: 10690
  Synthetic

SEQ ID NO: 10692 - protein, 174 aa, Artificial Sequence
  Synthetic
REVEELVKEVRRRVREVHERNRRVLEDSERLVREVHKRNEEALRRSEELIKRVEDMRRRGDLREKDIERISETNEKLVKEIKDENEEVSRRNEKLVDEVRRRNEEVLKELEKLLRDIPDERAEREIRRLLEEVKKSVEDLTRKARKLSRDLERSVREVEERARDLSRRLREKTR

SEQ ID NO: 10693 - protein, 174 aa, Artificial Sequence; identical to SEQ ID NO: 10692
  Synthetic

SEQ ID NO: 10694 - protein, 174 aa, Artificial Sequence
  Synthetic
SEVEKLVKDVEDLAREVHKRNKELVDEVRDRVRRVEERNKRVVDEVREEVKKLIDLLRRGDLREKDIRRMLERAKELIDRVKEDNDRVARTLEDLVRKVKEENEKVLTDIERLVEEIPDEEAKDRIRELLKRVEESVEKVKRDIERLIERSKESVRRLEERIKELLRELEEAAR

SEQ ID NO: 10695 - protein, 174 aa, Artificial Sequence; identical to SEQ ID NO: 10694
  Synthetic

SEQ ID NO: 10696 - protein, 174 aa, Artificial Sequence
  Synthetic
SEVEDLVRKVKKLMEDSDRENKRLVDEVRERVEEVKKRNKEVVDEVRERVKRLEEMLRRGDLREEDIKRVEKEIEDLVKEVKDTNKRVADELRKLVEEVKKRNRDVAERIKELVKEIPDKDAAEAIKDLIRKSEKSVDEVRREIERLIKESEDSVKRVTDEIRKLLKRLRDTTT

SEQ ID NO: 10697 - protein, 174 aa, Artificial Sequence; identical to SEQ ID NO: 10696
  Synthetic

SEQ ID NO: 10698 - protein, 181 aa, Artificial Sequence
  Synthetic
SELEEILKTVKKLVDDHKRLSEEILRRVRKLVEEHKRKSEEILKRVTDLAEDVKDKIRKDRSKEDLERIVREARERVRRMLEEDRENLERIVRTIEKVLRDDKEHLKDVERRIRKLLEDARRRGLPREVEKELDRLLKELERVSRESEKELRRLLKELEEASRESEERLRRLLRDVEEALK

SEQ ID NO: 10699 - protein, 181 aa, Artificial Sequence; identical to SEQ ID NO: 10698
  Synthetic

SEQ ID NO: 10700 - protein, 175 aa, Artificial Sequence
  Synthetic
DEIETVKEELKKLLERLEESSRKVERDLEDLLRRSEESTREVEKRLKELLEDVRRKLREKKELVREVEEEVRKLLEESRRSLEENRRLIEKLAKESRDSLREVEKRVRELLKKLDDGADVKEVLDRVRELARTHHELNRELLREAEESSREHHRLNEELVDRVRKLVKEVEDRAR

SEQ ID NO: 10701 - protein, 175 aa, Artificial Sequence; identical to SEQ ID NO: 10700
  Synthetic

SEQ ID NO: 10702 - protein, 175 aa, Artificial Sequence
  Synthetic
SEIERVKKALRKLLEDSRKSSEDLARELKRLLEESRKSTEKVERDLTDLLREIEEKLRDAKETVEEAKREVDRLLEESRKSLRDNERLVERLIRESERSLRENEDEVRRLEELLDRGKDLDTILERVERSSREHHKLNERLLETLRRSSEEHHKRNEELVRRVERLLEEVERRRK

SEQ ID NO: 10703 - protein, 175 aa, Artificial Sequence; identical to SEQ ID NO: 10702
  Synthetic

SEQ ID NO: 10704 - protein, 175 aa, Artificial Sequence
  Synthetic
SKIERVKEEIRRLLDTLKKSSETVIREIEKILKESRESSKKVEDDLRRLVREVEKKVREKKELVEKLKRVVDKLAEESRRSLEDNERRLTELIRDSERSLEEVKRRAEEVEKLLEDGKDVDKVLRDLEDLVRRHHERNKELLDRVRKSSEEHNRTNEELLKEVERLARKVIKDTT

SEQ ID NO: 10705 - protein, 175 aa, Artificial Sequence; identical to SEQ ID NO: 10704
  Synthetic

SEQ ID NO: 10706 - protein, 175 aa, Artificial Sequence
  Synthetic
DEIEEVKRRARELLREATESSKEVAKALDELLERDRDSSRRVKEDLKRLLEEVRRKLRKDKKTVEEVERRVKKLADESDKISEENERRVDKLKKESEESLRRLRDKVRKLEKKLEDGKDLEKVLRDVEKLMREHHELNRELLKRVEDSSRTSHELNKRLVDTVRKLVTDAAEKAK

SEQ ID NO: 10707 - protein, 175 aa, Artificial Sequence; identical to SEQ ID NO: 10706
  Synthetic

SEQ ID NO: 10708 - protein, 175 aa, Artificial Sequence
  Synthetic
SEIEEVDERIKALLKRSTESSKRVEDEARRLMKEDKDSSKEVEDRLRDLLRKVREKLRDSKETVEEVERRVTELAERSRRISRENAERLKDLLRKSKESLERNRRDAERVRKLLRDGMDLKKVLDDLKRSSEEHHRLNEELLKRAEDSSRTSHRLNRKLVEEVRRLVEKVLEEVR

SEQ ID NO: 10709 - protein, 175 aa, Artificial Sequence; identical to SEQ ID NO: 10708
  Synthetic

SEQ ID NO: 10710 - protein, 175 aa, Artificial Sequence
  Synthetic
DEIEEVKKTLKKLVEELEESTRRVEEELKKLLKESEDSTRRVEDELRRLLEEVERKLRDDKKTVRDVEEKVRRLAEESRESLRRNREEVKRLLEESRKSLEDVKRTIERILKLLDDGKDLDEVLKDVERLVKEHEDLNKELLKKVEKSSRDHHELNKELVRRVEELVREAIKKTT

SEQ ID NO: 10711 - protein, 175 aa, Artificial Sequence; identical to SEQ ID NO: 10710
  Synthetic

SEQ ID NO: 10712 - protein, 175 aa, Artificial Sequence
  Synthetic
DEVEKVKEEIRRLLKRLEDSTRDVERRLEELLRESTESSKEVEERLKRLLDEVRKKLKDKKDDVRRVEEEVRKLAERSRESLERNRRRVEKLMKESRDSLREVEKRAKEVEKLLDDGKDVKKVLEELRELVRKHEELNRKLLEEVRESSERHKKLNKELVDEVKRLAEKITEEAR

SEQ ID NO: 10713 - protein, 175 aa, Artificial Sequence; identical to SEQ ID NO: 10712
  Synthetic

SEQ ID NO: 10714 - protein, 175 aa, Artificial Sequence
  Synthetic
KEIEDVKRALEKLLEDDKRSTEELKDRLARLLEDSKRSSDKVIEDLDRLLKEVRDKLREREESVKEVEDRVRKLAEESRDSLRKNEDLVRKLLEESKKISDDNRKKVKRALELLERGADLDEILKRVEDSSRESHKKNEELLRRVRRSSEEHKRLNEELLREVEELVKEIVKEAK

SEQ ID NO: 10715 - protein, 175 aa, Artificial Sequence; identical to SEQ ID NO: 10714
  Synthetic

SEQ ID NO: 10716 - protein, 175 aa, Artificial Sequence
  Synthetic
SKIEEVKKALRRLLEDLKRSTDRVKEEAKKLLDESRKSSEEVKRELERLLEEVTRKLRDKKEVVKEVRERVKRLMEESERSLRENEETVKRLLEESEKSLRRVEEEVRRLEKKLEDGADADKMLRDIERLVEEHKRLNEKLLREVRESSKRHNEKNEELVKTVKKLVEDAEERAK

SEQ ID NO: 10717 - protein, 175 aa, Artificial Sequence; identical to SEQ ID NO: 10716
  Synthetic

SEQ ID NO: 10718 - protein, 175 aa, Artificial Sequence
  Synthetic
SEIETVKKELERLLDESRRSTETVEREVEDILRKSTESSEEVKDRLDKLLKEVRDKLRELKETVKKVEDEVRKLAEESKDSLRKNRETAKELLRRSRESLDKNRRDVEKAKKLLEDGKDLREVLERVRKSSEDHKELNKELLERLRRSSKEHNDKNKRLVDEVRRLVEEVIRRAT

SEQ ID NO: 10719 - protein, 175 aa, Artificial Sequence; identical to SEQ ID NO: 10718
  Synthetic

SEQ ID NO: 10720 - protein, 175 aa, Artificial Sequence
  Synthetic
REIEEVKERLKKLLKDVTDSTDKVRKDLEKLLEDDRRSSRKVEEDLRRLLKDVRDKLREEKELVKRVEEDVRRLLEESKDISRENEKTVKRLAEESRRSLEDLRRRIEEIIKKLDDGMDLEKVLREAEKLAREHERTNEKLLKDVEKSSRDSHKRNKEIVDRVKKLAEDIIRKTK

SEQ ID NO: 10721 - protein, 175 aa, Artificial Sequence; identical to SEQ ID NO: 10720
  Synthetic

SEQ ID NO: 10722 - protein, 175 aa, Artificial Sequence
  Synthetic
SEIERVKKRLEELLREVEESTRRLEERLKRLLEEAKRSSEEVEKELRRLLEEVRRRLRRDKKLVRELERRVKELLEDSRRSLEELKKRVRKLAEDSKRLLEEVKREVEKLKKKLDDGMDLDDVLRRVEELAKRAHDENERLIREVEELVRRHNKRNKELVDEVKRLVEKVIEEER

SEQ ID NO: 10723 - protein, 175 aa, Artificial Sequence; identical to SEQ ID NO: 10722
  Synthetic

SEQ ID NO: 10724 - protein, 175 aa, Artificial Sequence
  Synthetic
DEIERVKEELERLAKEDKDSTDTVKRELERLLEESKRSSDKLREDVERLLREVRERLRDKKEKVRDVEEKVKRLLEESEESLRENEKTVRKLAEDSERISRENERRIRDALRLLDAGADLKRILEEVKRSSEESHKLNEELLDEVRKSSEEHNKLNEKLLRDVERLVRKVLTETK

SEQ ID NO: 10725 - protein, 175 aa, Artificial Sequence; identical to SEQ ID NO: 10724
  Synthetic

SEQ ID NO: 10726 - protein, 188 aa, Artificial Sequence
  Synthetic
DELDKLLRDAEEVVRRVKEENKRLVKRDEEVVRRIHELNRKLLEDIRKVVEDVKEEIKEGRPDKELKRLLDDLKRKAEEVVRRSRELLKELEKLSRDVIRTSRELLERVKKIVEDLIKKLEDDMTSEDAKRKVKRVKDELKRLVEEVEEVSRRSEERSRKTLEDVRDSSRRLEEELRKLVKEVEEAVR

SEQ ID NO: 10727 - protein, 188 aa, Artificial Sequence; identical to SEQ ID NO: 10726
  Synthetic

SEQ ID NO: 10728 - protein, 188 aa, Artificial Sequence
  Synthetic
DELEKLLEDIRDVVRRIKETLEKLVKEDRDVVEKVKEDNKRLLKEMEDVVRKVKEEIRSGLPREVLERVLERVRRIAEEIIRRSRKIVKDVEKKSTDLKRRLDEILKEAKERVEEIAKEVKKKVTEERLERRAEEMEERLRRLVEEVREVVERVKEESDRTVEEVRRSSDRVEKEVERLVREVEDKVR

SEQ ID NO: 10729 - protein, 188 aa, Artificial Sequence; identical to SEQ ID NO: 10728
  Synthetic

SEQ ID NO: 10730 - protein, 178 aa, Artificial Sequence
  Synthetic
EELERLMRRSEESLKRSEDTVRELIREAREILKRIKEELKRLLEEAERILEEVKKTVRDLRDKKEVLRKLLEDLRRLVEEIERRLKKLLDELREVVREIKERLKKLNDDHRELIKEVAAEVDSKDLIKTARDTLRESERVSKELEERLKKIVEEVERLVEEVKKELERIVKDAERDVK

SEQ ID NO: 10731 - protein, 178 aa, Artificial Sequence; identical to SEQ ID NO: 10730
  Synthetic

SEQ ID NO: 10732 - protein, 178 aa, Artificial Sequence
  Synthetic
DELRKLARDAEEILKRSEEEVRKLKKRSDDSLRRSREEVKKLEDEIREIVDRIKKRVEERPEAKEELRKLLKELEDLVREIEERLETLNREHKKLIEEIERRLEKLNEDLDRVVKDLARKVDVEELKRTLEEIVERSKRVSDRLRERLKRTLDDSRRISDDLRRRLKKLVDDIRREVK

SEQ ID NO: 10733 - protein, 178 aa, Artificial Sequence; identical to SEQ ID NO: 10732
  Synthetic

SEQ ID NO: 10734 - protein, 177 aa, Artificial Sequence
  Synthetic
KEIEDVKEELKKVLEEDRDSLRKVEKEHRRLAEEVKRKVRELEESLKRIVEEVERIAREAKKGEVLKELRKRIRDLLEELKRVLKEVEDRARESIERNRRVSEKSERDIEKIMKELEDGKDLETVIREVRRILEESKRLNDKSREEVRKLVEELKDIVRRIEETVRRLLEEAKERLR

SEQ ID NO: 10735 - protein, 177 aa, Artificial Sequence; identical to SEQ ID NO: 10734
  Synthetic

SEQ ID NO: 10736 - protein, 183 aa, Artificial Sequence
  Synthetic
DSVDRLRRRVDEVLKTVEDALRRNKKDAEDLLRRIEEVLERLERRSEKLLKEIDEVLKRVPEKLVRDARRRLEELREHSKRLVDDLRRDLRRILEKNRELNDKIRKDLKRLKDKVEKLAKDGVSDEILTRAVEEIDELLRKLKRELDESTKESRKRVEELEKRLRDNTKRVKKDVDDLKRRVS

SEQ ID NO: 10737 - protein, 183 aa, Artificial Sequence; identical to SEQ ID NO: 10736
  Synthetic

SEQ ID NO: 10738 - protein, 178 aa, Artificial Sequence
  Synthetic
SSIERLEEESRKNIKELEDSVKELKEEVDRLVEELERSVRELAKIVEDVVRELKKRARKREKEVKEVVERARKLIDEVRRENERVIEEMRRLLKEVEDDNRRVVEESKKLIEEVKNGDDDEEVKRVLEESHRLVREVHERNKRVAERVRDLVRRVHEENERVAEEIRDLVRRVEEEVR

SEQ ID NO: 10739 - protein, 178 aa, Artificial Sequence; identical to SEQ ID NO: 10738
  Synthetic

SEQ ID NO: 10740 - protein, 186 aa, Artificial Sequence
  Synthetic
SEIEDVVKKLRDLSERNVRDIDRLVKEIDELLKRDKEEIKRVVDDIKRRVREIKKIIEEDRDKEKLRELVRKVEEDLEEIVKEVKRHSDELAKRLREIVERVKRHSEEVIKTLRELVDRVRKRVREEKEMLDRLRKVVDELVKENKKAVEDLKKRVEDVIRESKRVVEEARRVVDELKKELRDELK

SEQ ID NO: 10741 - protein, 186 aa, Artificial Sequence; identical to SEQ ID NO: 10740
  Synthetic

SEQ ID NO: 10742 - protein, 188 aa, Artificial Sequence
  Synthetic
SEIEKLVEEAKRLVKEAEDRLRKLSKESEESVRRVVKTLKDLVRELERLVEEVRKIIERNEGKEELEELVDRAKRKLEEVLKRVTELVKRHHEKNEKSLRDVEDLARRVKRKLEDILREVRERVTSDEMRKRVKELEEAVKELTKEIKEVVDRHRETVERSSRKVKTVLDDLRRVVEEILRRVEDAAR

SEQ ID NO: 10743 - protein, 188 aa, Artificial Sequence; identical to SEQ ID NO: 10742
  Synthetic

SEQ ID NO: 10744 - protein, 188 aa, Artificial Sequence
  Synthetic
KKIEDLVEEIKRLSDENRRRVERLSEDSKRSLEENKKKLKELVERIKKLLEEVSDKIRKDEDKDRLRELVKRLKEKLRELLEEARESSERHHRENEKSLKEVEDSSREVRKTLEKLVEDVRRDSTSEEAEERLRRAEDTVRRLVERNREVLEEHERTLRRSSEESKRALKEVERVVREVLKRVDEELQ

SEQ ID NO: 10745 - protein, 188 aa, Artificial Sequence; identical to SEQ ID NO: 10744
  Synthetic

SEQ ID NO: 10746 - protein, 188 aa, Artificial Sequence
  Synthetic
DELEKLVRDLEKRVKEVKDELKRSSEESERSLDEVRKTLKKLVEEMRELLKEVKRIIERNEDRDELKKLVEEAERRLREVLERVRKLVEEHHRRNEELVRRSRELVDDLRRELEELEKDVRDKSTSEEARERLERLRKRVEELLREVEKALEDDEKTVRESSKRIKKVLKELEDTARELVKEVRETAR

SEQ ID NO: 10747 - protein, 188 aa, Artificial Sequence; identical to SEQ ID NO: 10746
  Synthetic

SEQ ID NO: 10748 - protein, 188 aa, Artificial Sequence
  Synthetic
SELEKLVRDLERLSEDNKRRLKESSKESKESLDRVRETIKRLVEEAEELLKRVVDTIRRTEDKEKLDKLVEELKRRLEKLVRELKELVDRHHKRNEELLERSRRSSEDVKKKLKEVLEDVARKSTSEEARERLERLREKVEELARDNERALREDERTVRESSERLRKVLEEAKDRIDKLVKAVEDAAR

SEQ ID NO: 10749 - protein, 188 aa, Artificial Sequence; identical to SEQ ID NO: 10748
  Synthetic

SEQ ID NO: 10750 - protein, 188 aa, Artificial Sequence
  Synthetic
SELEKLVEEAKRLSDKNEEDLRRSSRESRESLKENKERIERAVKRLADLVRDVKEKIKRTESKEDLKRLVDELRERLKRLLEKVRKSSEEHHRENERLLRESTKSSEDVVRRLDEIAEEVARRSTTEEMKERLERLRDTLKKLKERNKEVLREDRETVTDSSRRSEEVVREAEERVERLLREVEEAAR

SEQ ID NO: 10751 - protein, 188 aa, Artificial Sequence; identical to SEQ ID NO: 10750
  Synthetic

SEQ ID NO: 10752 - protein, 188 aa, Artificial Sequence
  Synthetic
DELEKLVRELEELVKRVKEELERSSKESEDSLRDVKKKIEDLERKLDKLLKEVTDEIRRNESREDLKRLVEEARRTLEKVLDDIRKLVEEHEKKNKKLLDDSRELVERLKERLEEVEKDVRDKSTDDEMRKRLEDLERKVRDLARRVEKALEEDERTVRESSKRIRELLKRLEDKVRKIEKDVDDARR

SEQ ID NO: 10753 - protein, 188 aa, Artificial Sequence; identical to SEQ ID NO: 10752
  Synthetic

SEQ ID NO: 10754 - protein, 188 aa, Artificial Sequence
  Synthetic
SELERLVREVRELSDDNRRKLERSSRESERSAKEVERTLEKLVKELRELVERVKRDIERVRDESRLKELVDRARKTLEDVLRDVKRLVDEHRERNRELLERSEKSSRDVEERLKDVVRDVREKSTTEEMKERLKELEKEADDLRRENEELLDRDRRTVEESSKRVEKALRDLEREVRRILREVEETMR

SEQ ID NO: 10755 - protein, 188 aa, Artificial Sequence; identical to SEQ ID NO: 10754
  Synthetic

SEQ ID NO: 10756 - protein, 188 aa, Artificial Sequence
  Synthetic
SKLERLVEELKRLSDENVKDLERSSRESEESLKRNKEEIERVVERLRELLEKVVRDIKDDEGRERLDKLVRDLEEALKELVKRVRKSSEDHKRRNEELLRRSEESSRRVEEVLRRVLEEVTRDVTSEEAKERLDRLREAVEKLREDNKRALDRDRETVERSSKKSEDAVRRAEEDVRRLTETVRRAKK

SEQ ID NO: 10757 - protein, 188 aa, Artificial Sequence; identical to SEQ ID NO: 10756
  Synthetic

SEQ ID NO: 10758 - protein, 188 aa, Artificial Sequence
  Synthetic
SEIEDLVRKLRELLRDVKKKLKESSKRSEDSLRRVKEEIDKLVEELKKLLDEVKKEIERTEDKDELRKLVEEAARTLKRELDRIEEEVRRHDELNKKLLDESRKLVEDAARELEKLVEEVRRRSTTEEAEKKMRELEEEVKKLLEEVDRALKDDERTLRKSSKDIKKVLDDLRRTVKKLKEDVEETMR

SEQ ID NO: 10759 - protein, 188 aa, Artificial Sequence; identical to SEQ ID NO: 10758
  Synthetic

SEQ ID NO: 10760 - protein, 188 aa, Artificial Sequence
  Synthetic
DEIERLVEELRKLSERNKRELDRSSEESRESLKRVKEELKKIVEELRRLLEEVKDRIRKDESREDLERLVKELEERLRKLLDEVRELVERHDERNKKLLDESRKSSKEVKDELRKLLEDVERKTTSEEARERAKRLEKEVRDLAKENEKALEEDERTVRRSSEEIADLLRKVEKVVRELLEEVRRAAK

SEQ ID NO: 10761 - protein, 188 aa, Artificial Sequence; identical to SEQ ID NO: 10760
  Synthetic

SEQ ID NO: 10762 - protein, 188 aa, Artificial Sequence
  Synthetic
SSLEDLVRRARELSDRNREKLKRSSDESRESLKRNEEEIRRLVEELRELLERVRDLIRKLEDKDTLTELVERLKRELERVLEEVKKSSEEHDRRNRKLLEESRRSSKRVKEELKKLVEDADKEVTSEDAKRDLDRLRREVERLIRDNERLAEEDARTVEKSSRDSKKLVEDLEREVEKLRREVERDRK

SEQ ID NO: 10763 - protein, 188 aa, Artificial Sequence; identical to SEQ ID NO: 10762
  Synthetic

SEQ ID NO: 10764 - protein, 188 aa, Artificial Sequence
  Synthetic
SSIEDLVRRLRELSKRNTEELKRSSEESEDSVREVEDRVRELVKRLRELLKRVEDLIRKIEGKEELEKLVRDAKKTLDDVLKEITDLVKEHNDRNRRLLEESEESSRRVKEKLKKVLEDVRRESTSEEMEKRAKELEEEVRDLTRRNEDALRRDRDTVKRSTERVDKVLKDLEREVRDIKRRVDEATK

SEQ ID NO: 10765 - protein, 188 aa, Artificial Sequence; identical to SEQ ID NO: 10764
  Synthetic

SEQ ID NO: 10766 - protein, 188 aa, Artificial Sequence
  Synthetic
RELDELVKELRKLVEEVKDELRKSSKTSKELVEEIKERLERLVRELKRLVDEVRKTIRRLEGEKELRDLVRKAKKRLEDLTREVEKLVREAHERNKKLLEESERLVDRLRERLEELARDVATKSTSEDARRKLEELKETVRELLREVEKALDEDRETVKRSSEEVEEMLKDLRRRVTELDERVEREAT

SEQ ID NO: 10767 - protein, 188 aa, Artificial Sequence; identical to SEQ ID NO: 10766
  Synthetic

SEQ ID NO: 10768 - protein, 188 aa, Artificial Sequence
  Synthetic
DEIEKLVEDAERLSRENEKRVRKSSEESKKLVKEALDELKKLVEELEKTVRDVDREIERNEDRDELRRLVEDVRRRLEELLRDVRRLLEEVHRTNEKLLEDSERSSREVKKDLKRLVEDVRRKSTTEEAKKRMEDMERRVRELEKRNKKVLDEDRETVRKSSKDLEDAVRELEERVRRLAKKVKESAD

SEQ ID NO: 10769 - protein, 188 aa, Artificial Sequence; identical to SEQ ID NO: 10768
  Synthetic

SEQ ID NO: 10770 - protein, 188 aa, Artificial Sequence
  Synthetic
RELEELVKRLRELSRENEERLRRSSDESRKLLERNKERVKKVVDDLRRLVEEVKKEIERDRDRKRLEELVRRAKEVLERLLRDVRKSSEEVHDRNRKLLEDSRRSSKRVKEDLERVRRDVAEKSTSDDARRRLKELEEEVKRLAKRNEDLLREDERTVRESSRRSEDVVRRAEEMVRRLLEEVERARK

SEQ ID NO: 10771 - protein, 188 aa, Artificial Sequence; identical to SEQ ID NO: 10770
  Synthetic

SEQ ID NO: 10772 - protein, 188 aa, Artificial Sequence
  Synthetic
SELEKLVDELRKLSDENRRRLEKSSRDIEKLLKEIRDRIEELKKEIEDLLKEVKERIERLEGRDELRRLVDELRDRLRRLLEEIKRLVEEARKRLKEVLDRSEKSSRDVKRTLRKVLEDARRRSTTEEAEELLRRLEKRVEELARENEEMLKRDEDTVEEVRKRVTDVLRELKRVVEEVRRKVEEEAK

SEQ ID NO: 10773 - protein, 188 aa, Artificial Sequence; identical to SEQ ID NO: 10772
  Synthetic

SEQ ID NO: 10774 - protein, 188 aa, Artificial Sequence
  Synthetic
SKLEKLVKDAEELSRRNEEELRRSSDESRKLLEKNKRRVERLVEELRKLVKKVRDDIRRERDEEKLRKLVEDVKRRLRELLEEVRRSSEEVKKRNRELLERSTKSSKEVEDVLRKVLEDAARDSTTREAEELLRRLEEMLRRLTKKNRELLRRDEETVRRSSKRSEEVVRRAEEEVERLVKDVEDTRT

SEQ ID NO: 10775 - protein, 188 aa, Artificial Sequence; identical to SEQ ID NO: 10774
  Synthetic

SEQ ID NO: 10776 - protein, 174 aa, Artificial Sequence
  Synthetic
KDEERAKKVVEEIKKRVTEIVRRHHKTNEDLVRRVRESSEKHHRRNEELKERVTRKIRKEELLRKLKKLLDESSERSKRLVDELEKEVRKSSEDLRELLKRLTDRLEEVKKLIEDGADIETLVRELEELLKRLEDEVRRLTKRSKEVIDRIHKLNEDLTRESERVLKEVEDRDR

SEQ ID NO: 10777 - protein, 174 aa, Artificial Sequence; identical to SEQ ID NO: 10776
  Synthetic

SEQ ID NO: 10778 - protein, 174 aa, Artificial Sequence
  Synthetic
RETEEVKKELDKLVEEAERAVREHHKENDRLVKRLEEVIRRHEKSVRELVEKVRREVRDESVVRELEEVAKESLERLRKLLEELVKRAEDSSREVEKLLRDLRRDVEELKKMVENGVDLEKIVRRARELVERLKERLKELTRRSEELVKDLERKIERLSRELARIVKEVLDRDK

SEQ ID NO: 10779 - protein, 174 aa, Artificial Sequence; identical to SEQ ID NO: 10778
  Synthetic

SEQ ID NO: 10780 - protein, 174 aa, Artificial Sequence
  Synthetic
SREEEAKKRLEELLREVEKVVRDHHRENEKIREEVERVVEKHKKRNRELVEAVRKRIRDKDVVKEAEDLLRKSSKDLEELLRTLEELIRRASERLREILERVERVVRELKKLVESGMDVREAVERLKEIVERVRRKVEKLTEDSRRVLEELKRRIEKLTRDSERVLKEIEDRTR

SEQ ID NO: 10781 - protein, 174 aa, Artificial Sequence; identical to SEQ ID NO: 10780
  Synthetic

SEQ ID NO: 10782 - protein, 174 aa, Artificial Sequence
  Synthetic
SDKEEVKKEIKKLKEDIKRAVDEHRKVNKRILEEAEKSSREHEKENRDIVRRVREEVEKREVVRTLEERIRRSSDTSRELLRELKERLEDSTRKVEELLRRAEKVLDEALKLIEAGEDIKEVVKELKKILEKLKRELEDLSRKSEDVLRRLHELNKRLTDDSRRVLDEVREDTK

SEQ ID NO: 10783 - protein, 174 aa, Artificial Sequence; identical to SEQ ID NO: 10782
  Synthetic

SEQ ID NO: 10784 - protein, 185 aa, Artificial Sequence
  Synthetic
SEVDRLLKELEDVLKKVEDDIRRHIKRNEDILRESKKLADKLITEIEDMLRKVEEMIRNNSSEDTLRELLERLRDLVKKIRDRVEESDDRLRKLVEESRRNLEELLERLKRLVEKIKEDLERTVDDEEAVKRLEDTARRVEEEVRRLIRELEDTSRRVLEESRKISKELDERLRRVIEEVEKAAK

SEQ ID NO: 10785 - protein, 185 aa, Artificial Sequence; identical to SEQ ID NO: 10784
  Synthetic

SEQ ID NO: 10786 - protein, 185 aa, Artificial Sequence
  Synthetic
SELEKLIKEIRDILKESEDAIKENLDRNEEALKRVAEEIKRLIDELRKMLEDVKRMIRDDSSEETLKKLLDDLRKLVEEIRRRLKRLLDELRRLVEESREDLERLDEELKRIVDRIDKDAEEKVDDRRAVERVREELEKVIRDSRKLSRDLEEASRRVEEDVRRLIEELERRLKEVIKAVEDAAR

SEQ ID NO: 10787 - protein, 185 aa, Artificial Sequence; identical to SEQ ID NO: 10786
  Synthetic

SEQ ID NO: 10788 - protein, 185 aa, Artificial Sequence
  Synthetic
DEVEKLAEELREILKRSEEMIRENLKRNRDLLRRSKEEVDKLKDELEEMLRRVRRVIEDNSSEETLKRLLEELKDLVRRIREELKRSDDELRKLVKESKDNLRDLDRRLREVVEEIRKRLEDEVDDRELVKDLERKAREVIRTSEELSRRLAKTSEEVLEESERVVEELERRAERVEEEITKAAK

SEQ ID NO: 10789 - protein, 185 aa, Artificial Sequence; identical to SEQ ID NO: 10788
  Synthetic

SEQ ID NO: 10790 - protein, 185 aa, Artificial Sequence
  Synthetic
SEVEDLLRKLEEILRRSKENVERNVRENREMLKKVEKTIRDLIRRAEKLLREVEEAIRNNSSEETAKKLLEDLEREVKKIRDTLKKLLDDLKKLVEDSKRDLEEVDKRLEDVVRKIKDELRRRVDDEDAVRRLEKELERVIKTSRDISERLERESRRVEEEVRKLIEELSRRLEEVRERVKEATR

SEQ ID NO: 10791 - protein, 185 aa, Artificial Sequence; identical to SEQ ID NO: 10790
  Synthetic

SEQ ID NO: 10792 - protein, 185 aa, Artificial Sequence
  Synthetic
REVEEALKDLERILKESEDNVRRNIKKNEDLLRRVEERIRELLDEARRLLERVKEVKKDNSSEDELRELLERLKKAVEDIERELKKLLEDLDKAVRESIEDLKKSDRDLEEVVKKIKEDLRDRVDDKDLVERLKEELERVTRDSRRVVDELRKRSEKVREDVRRLIEDLRRRLEKVIRDVEEDAR

SEQ ID NO: 10793 - protein, 185 aa, Artificial Sequence; identical to SEQ ID NO: 10792
  Synthetic

SEQ ID NO: 10794 - protein, 178 aa, Artificial Sequence
  Synthetic
DETERIIRDLERVLEEIARLAKKNIDDSRRVLKELAEKLKRDSERAKKLLEDVEEIIRRNEKDKRDVVREVEKVLKESKKSSEDVARELKDVLRKSRKSAKDLERTVKKVLEDMKEKVDRRLDEDVDRVVRKVLEDLRRLLEEVKKVNDDSEKEVRRLLEENERKNRRVEEEVKKLLK

SEQ ID NO: 10795 - protein, 178 aa, Artificial Sequence; identical to SEQ ID NO: 10794
  Synthetic

SEQ ID NO: 10796 - protein, 178 aa, Artificial Sequence
  Synthetic
SELEDIIRRIEEVLKRNEELNRKNIKESRDLLEEIRRKAKEDSDRVKEVLRRLEDEVRRNELPKEELERKLKEVLDRSKRSSEELKRDVERVLEDSERSVREVVKRDEDSLREIEKLVKERADEEVKRKVDKVVEDIKRVSEESTRANDESRRALEKVVKENEDTNREVVKRVRDAEK

SEQ ID NO: 10797 - protein, 178 aa, Artificial Sequence; identical to SEQ ID NO: 10796
  Synthetic

SEQ ID NO: 10798 - protein, 178 aa, Artificial Sequence
  Synthetic
SELEEIIDRIRTVLERNRELNERNIRESKRLLDEIKKRVEDDNERSKDIVRRVETEVRERRLPEEELRRKLAEALERSKDSSRKLAETLRRLLEDSKRSAREVVERDRKSLEDIKKLVEDRADERVDEVVEKVLDEMRKVSRTSEESNRKSEEEVRKVLKENNDMNRESVERLRRTEE

SEQ ID NO: 10799 - protein, 178 aa, Artificial Sequence; identical to SEQ ID NO: 10798
  Synthetic

SEQ ID NO: 10800 - protein, 186 aa, Artificial Sequence
  Synthetic
DEVRRVIEELERLLEENRRHSKEDNERSKKINKENHDHSKESTDRAEKLLREVEKLIRETEDKDTIKKIIEEIIRTAEDLVRRNERKAERSIEELERSLRRNATLSEKIIRDARRLIEELVKRKGKDTDRVRDVDRTVKRVVKESRRSTRENEKTNTDVVRSTDESLKEDKKEVDRVIEELDRAVR

SEQ ID NO: 10801 - protein, 186 aa, Artificial Sequence; identical to SEQ ID NO: 10800
  Synthetic

SEQ ID NO: 10802 - protein, 186 aa, Artificial Sequence
  Synthetic
SEAEKVIEDAKRLLKENEDHSKEDNDRVRELLEEVKRHSEESTRRAEKILEEIRELVEKVSEKDKISEEVERVIEELRKLVDENRRRIEKIIRDSEKSVERNRRLSEEIIRRLEELIRDLIRKKGKDTEEVKRVEDEVRKLVKASRESTERNERTNREVAERLKKSLEEDRERVRKVVEDLRRAEK

SEQ ID NO: 10803 - protein, 186 aa, Artificial Sequence; identical to SEQ ID NO: 10802
  Synthetic

SEQ ID NO: 10804 - protein, 183 aa, Artificial Sequence
  Synthetic
DELRKVLKESEDSLERLRRTLEESIKRSRDSLRENTELVKDSLRRSEESLERVEKSNTDSEEAKKIADDVVRENRELVKRVRKHSKDVVDTNRKLVDDVRKIVDRVVRENEKVLREVRRDMRENKEMLKRLEDEIRRSIEELRKALRRVEEEHRKVIEASKDLVRRLEEAHKEVIDRLKEKLR

SEQ ID NO: 10805 - protein, 183 aa, Artificial Sequence; identical to SEQ ID NO: 10804
  Synthetic

SEQ ID NO: 10806 - protein, 183 aa, Artificial Sequence
  Synthetic
DEIERVIEESRKSLDDLRRKAEESIRRSEESLREVEERLKRSIREAEESLKKVENSNKDSKELKDLVEKVVRDNRKLVEEVKRIVEKVVRDNERVVDEVRRRVEEVVKENRKRLEEVRRELKDNDEVVRELKKMIDKSERDLEELLDRVRRKHERVIEELKKLLKRVKDAHERVIRELEKTRK

SEQ ID NO: 10807 - protein, 183 aa, Artificial Sequence; identical to SEQ ID NO: 10806
  Synthetic

SEQ ID NO: 10808 - protein, 185 aa, Artificial Sequence
  Synthetic
SEVEDLIRRVRKSNKESEDVLRESIERSEESNERSERTARRIIEEAERILEEMEESLKKGLPEKDLKKIADELRERLKRLLERVKRVVDEDRRTNEELVRRVEKIVKEDEDRLKELLDEVRRLDLPEEVVRRLEEEVKRVAEHTRKLLKDVRKKHEESIRHSEEVLDRLEKKLREIMKRVTERTK

SEQ ID NO: 10809 - protein, 185 aa, Artificial Sequence; identical to SEQ ID NO: 10808
  Synthetic

SEQ ID NO: 10810 - protein, 185 aa, Artificial Sequence
  Synthetic
KEVEDIIEDVKRSLEESKRMADKSITDSRRSNEESKRIVEEIKRKIDEILERIERKARKGEPKEDLDRIVKELKEELKRLLEEVTRVLEEDADRNRKLLKEVEKIVKEDRERLEKLLDEVRKLDLDEKVVRELEKRVKEVVKTTEDVLREVERTHRESIKHSEDLVRRLEERLRRVAKEVERTRK

SEQ ID NO: 10811 - protein, 185 aa, Artificial Sequence; identical to SEQ ID NO: 10810
  Synthetic

SEQ ID NO: 10812 - protein, 185 aa, Artificial Sequence
  Synthetic
SEVEKAIKEARDSLRESKRLLEESIKRSEDSLEESRRVVEEIKKRLEELLREVKESVDQGQPEDDLRKIVEEAKRRLKELLDRVREIVERDERRNRELVKEVRKIVEEDLKRLEDLLRRIRNLDLDEKKVRDLERMVKRVMEETEKALEDVERRHEKSIRDTRRVLKELEDTVRKVLKEVDRERQ

SEQ ID NO: 10813 - protein, 185 aa, Artificial Sequence; identical to SEQ ID NO: 10812
  Synthetic

SEQ ID NO: 10814 - protein, 185 aa, Artificial Sequence
  Synthetic
SKLEKVITEVRDSLRRSRKMAEDSIRRSEELLKELEDLLKKVRDTLRKILKDIEDLARKGLPKEELTRIVDELEKRLKRLLDEVDKALKRLVKENERLVEEVREIVERDKKTLDKLLEDIERLDLPKELVDDVRREVEKVVEDTRRVLEEVERTHKESIDRLRKLVERVRREIEEIARRVKETRD

SEQ ID NO: 10815 - protein, 185 aa, Artificial Sequence; identical to SEQ ID NO: 10814
  Synthetic

SEQ ID NO: 10816 - protein, 183 aa, Artificial Sequence
  Synthetic
SVVEKLKDEADKLVKRNEDLARRLEEVSKDTIDRLEDVLRKLREVLKRLRRRLEEVLKRVDREELKRDVEEVEKELEELVRKIEKEVKDVVRTSRELVERVKRTLEDDIRRMEDLARKLSRLTDREKFEEVIKRLRDSSKRSEDKIRKVLKDSRDLLEDVRRKIEDVIRRMEKLIKEVEDRVR

SEQ ID NO: 10817 - protein, 183 aa, Artificial Sequence; identical to SEQ ID NO: 10816
  Synthetic

SEQ ID NO: 10818 - protein, 181 aa, Artificial Sequence
  Synthetic
SVVEELERVMRELKKRNEELSRENHESVKEAEKRNKRLSEELEKVSRDVIKDLERVVEEVEEVKDEVKRVIDESKRSLEEVKRHSERVVKRLRDLNKDSEDHSREIVRTMEKLLEDARRLTDEREIRRIIEELKRLSDENEERIRRISEEIKDLSRRNEETVRRVIEENRKLLEDATRRTK

SEQ ID NO: 10819 - protein, 181 aa, Artificial Sequence; identical to SEQ ID NO: 10818
  Synthetic

SEQ ID NO: 10820 - protein, 181 aa, Artificial Sequence
  Synthetic
SLREKLKEVIRRLEEENRRVSEENHRSVREVEEENRKVSDELRKVAEELKRRLEEVVRRVREVEELVRELVERMERILRRVEDHSRRVVEELRKLNEESERHSRDVIRKLRELLERAKRLTDSREIEDIIRRVKKLSKENKETIERISREIRELSKRNEEEVRRVIRRLEELLEELERTAK

SEQ ID NO: 10821 - protein, 181 aa, Artificial Sequence; identical to SEQ ID NO: 10820
  Synthetic

SEQ ID NO: 10822 - protein, 181 aa, Artificial Sequence
  Synthetic
RVIEKAEEVVDRLKKRNKEVLKENHDSVREVEKENRELLEKAEKVVRELEERLKEVVEEVSEVTEDIRRVREELKKILEDVARHSKETIDLLRKLNKESEKHSEKTMRDLEKLLEELRRLTDEREIERIIKEAEELSKRNEEVIDEISKRIKELSERNRERVEKVIEEAKELVKRVTDKVK

SEQ ID NO: 10823 - protein, 181 aa, Artificial Sequence; identical to SEQ ID NO: 10822
  Synthetic

SEQ ID NO: 10824 - protein, 178 aa, Artificial Sequence
  Synthetic
KDEEKAEDVVRRLTEEVRRVHEKTRDVVRRVTERSNDVSRRSKEEVRELLERADDLARKGKISEELVRRVKEELERVVREDEELNEDLKRKLDDLLRRDEKLVREIERRLEEVVKLVRDGMSVEDLIRELKRLVDELRERSEDLIRKAERVLERLEEESRRLLKELRDLLEDVTRKAE

SEQ ID NO: 10825 - protein, 178 aa, Artificial Sequence; identical to SEQ ID NO: 10824
  Synthetic

SEQ ID NO: 10826 - protein, 178 aa, Artificial Sequence
  Synthetic
SETEKAREVVRELEKRNDEVHKETRDVVRRLEETSDEVSKDSERKVDRLREEVKKVRDDGKVDDKLVKDVEDKLKKVTDEDRRLNEEAKKELRRVVEEDRRSVEESRKRLEEVVRLVEDGKDVEELIRRMEKLTEDNERRSRKLIEELKRLLEDLREKSERLIRELERLVKELRDRAE

SEQ ID NO: 10827 - protein, 178 aa, Artificial Sequence; identical to SEQ ID NO: 10826
  Synthetic

SEQ ID NO: 10828 - protein, 178 aa, Artificial Sequence
  Synthetic
SEKEKAREVVKKLKKRVDEAHKKTKDVVEELRKRNRDVHRTTREVVRDLLKKVKDVERRGEVSEEVVRRVEERLREVVEEDEKSVRESERVLDEVEKDDRRLVEEIRRRLEDVVRMVEAGKDVETLIERLRELIDELRRRSEKLIKELREVTKRNKERSDRLIKELEDLVKKLKDDAT

SEQ ID NO: 10829 - protein, 178 aa, Artificial Sequence; identical to SEQ ID NO: 10828
  Synthetic

SEQ ID NO: 10830 - protein, 186 aa, Artificial Sequence
  Synthetic
DEVEKLIEDLKRIVERDEREIRELIKELDDHVRKDEKIARDLERRLKEILDEVRKMVTDNSSEETVTRLLREVEELVRKIEKDARDSLESNRELAERIKERAERSLRELEKRVTEIEERLKERLREKKELLEKVKRVLEEVRRRSRETLERLREVLERSIRDSERTLEKVREMLERVRKEIEKLRK

SEQ ID NO: 10831 - protein, 186 aa, Artificial Sequence; identical to SEQ ID NO: 10830
  Synthetic

SEQ ID NO: 10832 - protein, 186 aa, Artificial Sequence
  Synthetic
SEVEELDKRLRDHVRRDEEIVERLIRELKRHVERDREEARRLIEELRRLLEEVKRMMEDDSREDDVRRLLEEVRELVARIIERAEDSLRSNEDLVRKIEERLRRSLKSNRDLVKEIKKILDRDLREDRKLVRDVEKSLEESIRRSEETLKTVKDVLDKSKEDSKRTVEDVERVLREAEKEAKRATD

SEQ ID NO: 10833 - protein, 186 aa, Artificial Sequence; identical to SEQ ID NO: 10832
  Synthetic

SEQ ID NO: 10834 - protein, 186 aa, Artificial Sequence
  Synthetic
SEAEKLIKELEDHVKRVEDRARELIDELRKHVEEDERRARKLIEELRRLLKEVKRMVDDNSSEEVVKRLLEEVRRLVEEIERRARKSLESNKELVKEIRERVTRLLESNRELVRRIEEVLDRDLREDEDLVRRVRKVLRRSEEDVRRLIEEVERVLKRSEEESRRTIREVEEVLKEVERAVEELAR

SEQ ID NO: 10835 - protein, 186 aa, Artificial Sequence; identical to SEQ ID NO: 10834
  Synthetic

SEQ ID NO: 10836 - protein, 180 aa, Artificial Sequence
  Synthetic
SLEDRVREVVERSERDLRRSTDEIRRVVEEAEKALRRLVREVEEVVREVKERLERVVREGRVDRETVRRVIEDIERALDEVRETVRKIIEDLRKILEDVRRHSERVIRENRKLLEAARNGDEDTVRKVIEDSDRSLEENKRLVKKVIDEIKERLKEMKKRAEEIIERLKKLLEEVEERAR

SEQ ID NO: 10837 - protein, 180 aa, Artificial Sequence; identical to SEQ ID NO: 10836
  Synthetic

SEQ ID NO: 10838 - protein, 180 aa, Artificial Sequence
  Synthetic
DLTKRVEEVVRRSRERLERSTRDIKRKAEEVKERLKKSSKEVEKVIREVETELERLRREGKVDEDTVREVLERIRRLLEEVKEHSKRVLDDIERLLRDLEEHSKEVVRRNERLLREIKDGDEKKVEEVLRRSEKSVRDNKKRVEEVAETLKKILTDNRRLVKRVKEELDKLIRDVEERAR

SEQ ID NO: 10839 - protein, 180 aa, Artificial Sequence; identical to SEQ ID NO: 10838
  Synthetic

SEQ ID NO: 10840 - protein, 179 aa, Artificial Sequence
  Synthetic
SEKEDVERVVERVKREADELLKENHKSVKDVDERVKETVERNHRSVRKAEEDVKRVEREDKRLKELVEELRRRLKELNDRSKKLSRESAERLKKLNKESEEVIREVKRRAEEIVEMVKRGDVEVREVAKELEDIVRRIKELVERSNRELKKIVEDNERVVEESDRRIKEILERITEASR

SEQ ID NO: 10841 - protein, 179 aa, Artificial Sequence; identical to SEQ ID NO: 10840
  Synthetic

SEQ ID NO: 10842 - protein, 179 aa, Artificial Sequence
  Synthetic
SEKETVEEVVDKVRRDLDKSLEDNHKSVEEVRRRVEKTLRENHESVERARKRARDLEREDRELKEMVERAEEELEKLNRESADISRRSEERLEELNRRSKRLTDESKRKLEEIKDVVRRGDIEVREVVERAKRILEDNKKKIDESNERLERIVRENKEMVERSDRRIEEIVERIERETR

SEQ ID NO: 10843 - protein, 179 aa, Artificial Sequence; identical to SEQ ID NO: 10842
  Synthetic

SEQ ID NO: 10844 - protein, 179 aa, Artificial Sequence
  Synthetic
DEKEEVEKRAEEVRKKVDKLLKENHESVEDARRRVDKTLRENHESVEEVKRRVDEVRREDERLERVVREIKKRLKKLNDESKKLSDDSKERLKRLNEESEKVARDIKRELKRIVELVRRGDVRAEDVMEELDRLVEDLRRKVEDSNRKIKRIVDENKREVEKSNRKLRELLKELEDRAR

SEQ ID NO: 10845 - protein, 179 aa, Artificial Sequence; identical to SEQ ID NO: 10844
  Synthetic

SEQ ID NO: 10846 - protein, 179 aa, Artificial Sequence
  Synthetic
SKKEDAERVVREVTREVRRLLKENHDSVREVLKRVDETVERNSRSVKEVLRKVREVEREDRRLREVVKEIEKRLRDLNERSKKLSKESKEELKKLNDESRKVVEEIERRLKELVDLVRRGEVDLKEVVDRARDLIRDLTRKVKESNERLEEIVERNEREVRKSDEDLKRLADDLERKAT

SEQ ID NO: 10847 - protein, 179 aa, Artificial Sequence; identical to SEQ ID NO: 10846
  Synthetic

SEQ ID NO: 10848 - protein, 179 aa, Artificial Sequence
  Synthetic
REKEEVERVVEDVRRRLDESLERNHKSVRDALREVDRTVEENSRSVEKVRKRLKEVEREDKELEDLVRKIKEDLDRLNEESRRLSEDSKRRLKDLNRKSAKITRDSKEELRRIVEAVRRGDVEVREVKKELEKIVRDNERVVEDSNDKIRRIVTKNTEDVKRSDETLERIVEEIERRAR

SEQ ID NO: 10849 - protein, 179 aa, Artificial Sequence; identical to SEQ ID NO: 10848
  Synthetic

SEQ ID NO: 10850 - protein, 179 aa, Artificial Sequence
  Synthetic
KEKEDVERKVEDVKRDVDRVLEENHRSLKEAEERSNKLSDTSRRVAKRVVDDVRRLKREDERLVRLVEELKKELKRLVEEDKKINDEIREELRRLNEDSKRVVDDLKRRLKEIVDAVRRGDIDVKEVVDRLEKIVRDIRKEIERSNRDVERLVRTLEEVSKRIIDTLERIIDKIREDTK

SEQ ID NO: 10851 - protein, 179 aa, Artificial Sequence; identical to SEQ ID NO: 10850
  Synthetic

SEQ ID NO: 10852 - protein, 178 aa, Artificial Sequence
  Synthetic
SEAEELIEELERIAEEDRKLVEDSIRKLRKILDEDRKIMKRLAEELDRILEDVKRKVDKGLSEKELKDVVKEVEDKLREVLRRAEESVRESEERLRENEERNKESVERSRERLDRVIEDVDKVKELEEVVRKVKRESDRTLEKSKKVVDEVRRRSEETLEKLRRVVERVRKRVDEASK

SEQ ID NO: 10853 - protein, 178 aa, Artificial Sequence; identical to SEQ ID NO: 10852
  Synthetic

SEQ ID NO: 10854 - protein, 178 aa, Artificial Sequence
  Synthetic
DRADELRERLKEIMERDRRIMKELEDELRELVERDERIIRELERRLEEIVKDVERKAKSGQDEESLKRVVEEAERVVEEVEKRVRESVKKTKDALDELIRRAEDSVRRSREELEDLIRKVSDVDELRRVVEEVEKDSERTLKELRRVVKEVEERVEKTLRDLEEVLERVKERVKRLKD

SEQ ID NO: 10855 - protein, 178 aa, Artificial Sequence; identical to SEQ ID NO: 10854
  Synthetic

SEQ ID NO: 10856 - protein, 178 aa, Artificial Sequence
  Synthetic
KEAEDLMREVEELVRRDEEIIKRLADELEEIVDDNRRKVEDLVRRLEEILRRVEESMRKGLSEEELRRVVEDVERRLRELIREAKRSVEESRRRLEEVRKRVEESVERTKRELDRLIEEVKDVKELREVIERARKRVEETLRELERKLEEVRKTSEDLLRRLEEVVKRVKEEVEKLEK

SEQ ID NO: 10857 - protein, 178 aa, Artificial Sequence; identical to SEQ ID NO: 10856
  Synthetic

SEQ ID NO: 10858 - protein, 178 aa, Artificial Sequence
  Synthetic
SEMDELRKELEDLARDDKRRVEESIRRLEKIAEDNERLARESIKRLRRLVTELEKLARKGLSEEELERVVRRIDEELKRNEEENRRSVEKSERDLRRNEEENKRSVDETEEVLRRLIEEVKDVKELKEVVDRVREIVKKTLEESREVVKKVREDSKRLLEESKRVVEEVKKRVEELKK

SEQ ID NO: 10859 - protein, 178 aa, Artificial Sequence; identical to SEQ ID NO: 10858
  Synthetic

SEQ ID NO: 10860 - protein, 175 aa, Artificial Sequence
  Synthetic
DEVEEVKEELKRTSRDDERKVEEIRKRLEESTRRLRELAEELKDELRKSSRDLERLRRENKDLTDVLRKNEELVKRIDDKLKKVLEDNKRLVDEIRKTAEKSVRDNEEVVRRIKEELKDVREVERALERSLKRSDETVKEVEELLRRSLEDSKKLLEEVREALERSKKRSDELRR

SEQ ID NO: 10861 - protein, 175 aa, Artificial Sequence; identical to SEQ ID NO: 10860
  Synthetic

SEQ ID NO: 10862 - protein, 175 aa, Artificial Sequence
  Synthetic
KEVEDVKEELRRSSKKLRELAERLKKLLEDILDEDRKLAEEIKKRLEDSSRKIEELKRRNRDLTDILRENRELVERARRRAEESLKKVKELLDKIREAIREVLERNKELVDEIRKRLKDVDEVERMLKESDKESKRLLEEVDRMLKEVIKASKKSLDDVDRVLRRSERESEKRRK

SEQ ID NO: 10863 - protein, 175 aa, Artificial Sequence; identical to SEQ ID NO: 10862
  Synthetic

SEQ ID NO: 10864 - protein, 175 aa, Artificial Sequence
  Synthetic
SEVEKVKEELRESSRALRKLVEKIRRILRETSERDRDTVREIADRLRKSSRRVEELKRNNKDLTDVLRDNDRLVKEIEKRLKDSLDENKRVVDKLREEAKRALEENKKLVTRIEKDLKDVDEVRRVLEESERRSKKLLDEVEELLRRSERTSRESLKEVKERLRKSLEESERRAR

SEQ ID NO: 10865 - protein, 175 aa, Artificial Sequence; identical to SEQ ID NO: 10864
  Synthetic

SEQ ID NO: 10866 - protein, 183 aa, Artificial Sequence
  Synthetic
SLVERLKKVVEDAERELRRLTKETEDVLREAEETIKRLSERLKKANEDTERKIRRLAKENRDEKVIKKLEDVVRRSTKLVEDVHRDNERVLDEVRKLVDEVRKTNEDVLREVRRLMEELARLTDEKKIDDAIKRIRDLIERVEEINKEVVDRIKELIERVEEINETVIRDSERLIKEVEDEVR

SEQ ID NO: 10867 - protein, 183 aa, Artificial Sequence; identical to SEQ ID NO: 10866
  Synthetic

SEQ ID NO: 10868 - protein, 183 aa, Artificial Sequence
  Synthetic
SLEEDLRRVLEEVKRELKELSKRSKEVNRKTEETARRLSEKSEKVNRETKKRVEDLMRENRDEKVIRELRDAVRESTRLLEELKEDNRRVVERSTDLVRKVDRINREILKEVEELVRRLSRLTDEKAIRDAIRRLKELVERVKRTNEEVVKESEELIERVRERNDDAVRKSRRLIERLTEKVK

SEQ ID NO: 10869 - protein, 183 aa, Artificial Sequence; identical to SEQ ID NO: 10868
  Synthetic

SEQ ID NO: 10870 - protein, 183 aa, Artificial Sequence
  Synthetic
SLKETLEEVLKEVKRRIEDLSRRLEEVLRRAREELKRLSDDSRRVVEEAEERVRRLMEENRDEDVIRKLREALKEVRRLLEEVERRNRALMKEVEDLVRKVNKDNRRVLEEIKRIVEKLSRLDKKEEIKRVIDELRRLIEEVEKRNREVVEEIKRLIKEVADDNRRALERIRRLIRKLEEEVK

SEQ ID NO: 10871 - protein, 183 aa, Artificial Sequence; identical to SEQ ID NO: 10870
  Synthetic

SEQ ID NO: 10872 - protein, 183 aa, Artificial Sequence
  Synthetic
SLTERLREVLKKVEDTLRKLSERLRDVLRKAEKTIEEISRRSEEANRETKERAERLMEENRDERVIRKLEEVVRRSTKLVRDVDRRNKKVLRDVRELVKKVNEENKKVLKEAREKVDELSRLTDKDRIEDVIRELDRLLEEVRRINEEVLRRIEELIKRVKEENDRVMETSRRLIETVKEEVK

SEQ ID NO: 10873 - protein, 183 aa, Artificial Sequence; identical to SEQ ID NO: 10872
  Synthetic

SEQ ID NO: 10874 - protein, 183 aa, Artificial Sequence
  Synthetic
DKVRKILKEMRDLVRRNKEEIDRSIRKIEELIERNKREIDKSIEELKRLLDEVRKIVKDERDKEKLRRIVEEVDKRIEKIHKENEDHSRRSSEEVEKIHRENKEHSDRSSEDIRRLLEELRKDGLEMVRDVARVVKEVHDDNRRLTEKSERVVREAHRRNEEIVKASEEAVREAKRRLEELRR

SEQ ID NO: 10875 - protein, 183 aa, Artificial Sequence; identical to SEQ ID NO: 10874
  Synthetic

SEQ ID NO: 10876 - protein, 183 aa, Artificial Sequence
  Synthetic
DKVREILKRLEDLVRTNKERIDESIEELERLADENRRRIKKSIDDLRRLIEEVERIVKDRRDDRTLDKIVTEAKETVKRIHEENERNSKRSSETVKKIHDENREHSKRSSEEAKRLIDELRKDGLEVVRDVERVLEEVDRANRDLVRRSKEVVDKVHETNKKLVEESKEAVDRVTELLERARK

SEQ ID NO: 10877 - protein, 183 aa, Artificial Sequence; identical to SEQ ID NO: 10876
  Synthetic

SEQ ID NO: 10878 - protein, 183 aa, Artificial Sequence
  Synthetic
DEVEELVKKLEKVLREIEEMSERLSDENRKVLEKIKEDSKRLNEELERVLRRIREASRDKREEVLRKLVEELKKVLEEVRERSEDLLKEAKDIARESRKRSEELVRRLEEVLREVKRAAERDVKSELLERLREVLEDVKRKLDEIHRRNEESLERLEREVKRLNEDNRRSLKTVDDRLRETKR

SEQ ID NO: 10879 - protein, 183 aa, Artificial Sequence; identical to SEQ ID NO: 10878
  Synthetic

SEQ ID NO: 10880 - protein, 179 aa, Artificial Sequence
  Synthetic
SEKEKLDAVLREVEEAAKKNIDKNRRSLEEVAEVVRELVKENRKSLEEVKEMIERIIREIRNKEDLVRKAREVLKEIERLVRESIKELERLLKEIEKLVEESVRRSRKLVKEIEELVKKGGDDVEKIVEDLKRVLEESHKLSEDVDRLIKRVVEEAKKLSRDVNEDVKRVVKEVKDEAD

SEQ ID NO: 10881 - protein, 179 aa, Artificial Sequence; identical to SEQ ID NO: 10880
  Synthetic

SEQ ID NO: 10882 - protein, 179 aa, Artificial Sequence
  Synthetic
SEKEKLDDVLRKVKDTLAENIKNNKESLDRVREEIERNIRRNEESLDRARRTVEKIIEEIREDEDLVRRAEEMVRRVADLVRKSVERSRELLKRLEDLVRKSVEDSKDLLRRVEKLVREGGDDVEKLVEELRRLLKESHELSREVNDRLRRALEESHELSKEVNETLRKLLEDIRREAK

SEQ ID NO: 10883 - protein, 179 aa, Artificial Sequence; identical to SEQ ID NO: 10882
  Synthetic

SEQ ID NO: 10884 - protein, 179 aa, Artificial Sequence
  Synthetic
KDEERLKKVIDEVRKRVEENIRTNEDSLRKAEETLKRNIRKNEKSLEDARREIEELIREISDDEDLVRELEDVVRKIAELVKRSVEESERLAKELRDLVKESVDRSRKILEDLERDVERGGKDVEKLIKKLRDLLEESHRLSEEVNRTLKRALDESHERSKEVDKRIEEMVERVRRKVK

SEQ ID NO: 10885 - protein, 179 aa, Artificial Sequence; identical to SEQ ID NO: 10884
  Synthetic

SEQ ID NO: 10886 - protein, 179 aa, Artificial Sequence
  Synthetic
SEREKLEKVLEEARREIERLAEENRRSLDRARKEVKRLIDNNRKSLDDVRKRVDKLVKDISDDERLIRELERVVKDIEELVRDSERKAREMVKRVERLVRESIRRLEDVVRRLEDLVRKGGDDVEKLVEELKKVLDDVRKESERVNRTLKKLLEDIERLSREVNKRIKEMVRKATEDVR

SEQ ID NO: 10887 - protein, 179 aa, Artificial Sequence; identical to SEQ ID NO: 10886
  Synthetic

SEQ ID NO: 10888 - protein, 179 aa, Artificial Sequence
  Synthetic
SEKEELDKVLKEAEDKIEENIRDNERSLRDVERAVRRIIENNRESLEELDKAVKEIVRRISDRKELITRLDKAVKDVKRLVDRSVEEAKRIVDEARELVRRSVEESRRLVERLKKLVDDGGDDVKTLVEELRRALEESHKLSEDVNRALKKVLEEIADLSRKVNDKLRELLKRLEEEAR

SEQ ID NO: 10889 - protein, 179 aa, Artificial Sequence; identical to SEQ ID NO: 10888
  Synthetic

SEQ ID NO: 10890 - protein, 179 aa, Artificial Sequence
  Synthetic
SKEEKLDKKLKEAERTIRENIKENRESLERARKTLEENIRNNEDSLRRVEEEVRRIIEEIRDDEELVRRAEDVVRKLRKLVEDSVRDSERIMEEIERLVRDSVRKSEELVERIKRLVEEGGEDVDDILRRIEEILRRSHRLSKEVNKRIKELLDRSHELSKRVNDELDKVLKEIRREAK

SEQ ID NO: 10891 - protein, 179 aa, Artificial Sequence; identical to SEQ ID NO: 10890
  Synthetic

SEQ ID NO: 10892 - protein, 179 aa, Artificial Sequence
  Synthetic
DEDEELKKVLDRAKKRVDELVRNNEESLERVKRAVDRLIEKNERSLERAEDELRKLVKEISDDEDLIKKIRDAVEEVRRLVEESRRRAEEVVKRAKELVERSIRELERVVKRLADLVREGGDDVEKLKKELDDMLRKLEELSRRVNRTLEELLRRIEELSREVDERIKKVLKEIKDRVK

SEQ ID NO: 10893 - protein, 179 aa, Artificial Sequence; identical to SEQ ID NO: 10892
  Synthetic

SEQ ID NO: 10894 - protein, 179 aa, Artificial Sequence
  Synthetic
SEKEELDDVLRRVEEKVRRNVRKNEDSLKKVEDEVRRNIRNNEKSLEDAERDVRKLAKDVSDDEDLIRRLKEVVDEIRKLVEESVRRSKRLLEEIRKLVEESIRRSEDLVRTVEDLVRKGGDDVKKLLKELEDLARESHKLSRDVDRKLEDALRRSHRLSREVNRKIEEMVRKLREDTR

SEQ ID NO: 10895 - protein, 179 aa, Artificial Sequence; identical to SEQ ID NO: 10894
  Synthetic

SEQ ID NO: 10896 - protein, 179 aa, Artificial Sequence
  Synthetic
KEEERVTDALRRVRETAKKNIEYNRRSVERVERTLKELVKNNTRSLERVRKAVKELVERIRDKEELIRELERVVKELEKEVRDSIKRIEEAVKRSKDSSETHVKTSEDVVRRLEDEVRKGGDDVDKLIERLERVLEKSHRDLRRNSKDNKRILDEIKKESEEVNRRLEEVLRKIKEDVE

SEQ ID NO: 10897 - protein, 179 aa, Artificial Sequence; identical to SEQ ID NO: 10896
  Synthetic

SEQ ID NO: 10898 - protein, 186 aa, Artificial Sequence
  Synthetic
DKVRELEKTLRDLLRENHRISEDLNKKLKDMARRNKKHSEDVIEKIKRLLDRLREIVKRDGGEDKRVVEELRRIVEEVRRLLREDEKENERSLEEVEKLVRESEKRSKKILEDAKKLVEDLERDNIDDELVRRVREVLREVEERLRDNIKDNRRSLDDHRRVIEETRRESKRAVERAEDEVKKLED

SEQ ID NO: 10899 - protein, 186 aa, Artificial Sequence; identical to SEQ ID NO: 10898
  Synthetic

SEQ ID NO: 10900 - protein, 186 aa, Artificial Sequence
  Synthetic
SKVEDLIRRLKTLLDDLRRISREVDEKIKEILKEVERHSKEVIDRIKDILRRVEEIVRRKGGEDEEVVEELRRVVEEVERLLREDVKEIDRVVKEVRDLLRRSVEIIEEIVKRVRDLVEEIKRDNIDKRLVERVEKVAREVEEAVRKLIEKNKESVERAEETARRLIERSKRAVDEARRKIEELRR

SEQ ID NO: 10901 - protein, 186 aa, Artificial Sequence; identical to SEQ ID NO: 10900
  Synthetic

SEQ ID NO: 10902 - protein, 186 aa, Artificial Sequence
  Synthetic
SKVEELIERIERLLEEVRRISDKVDEDLERLIRENEKHSKKIIKELEKLLKELEDIVRREGGEARRVVEILKKIVEDVRDLVRRDEKLNRDSAKTAEDLVRTSEEDLKRVLEEVKRLLEEIERDNIDKRLVERLRKVVEDAEREIRRLIEKNKRSLERHKRELERTIKESRDVLKKVEDRVRELAR

SEQ ID NO: 10903 - protein, 186 aa, Artificial Sequence; identical to SEQ ID NO: 10902
  Synthetic

SEQ ID NO: 10904 - protein, 186 aa, Artificial Sequence
  Synthetic
SKVEDLERRIRKILREVEEISERVNRALKRLLDENRKHSEKIIRELEELLRRLEEEVRTKGGEAREVVEAIKEIVERAKRLVDEDRRLNEESRKRAKELVDESRKTLEEVVKEVRKLAEELEKDNIDKSLVDRVRKAVEEAEERIRRLIENNERSLRRHEEAIKKTIEESDKVLEDVRRRAEELLK

SEQ ID NO: 10905 - protein, 186 aa, Artificial Sequence; identical to SEQ ID NO: 10904
  Synthetic

SEQ ID NO: 10906 - protein, 186 aa, Artificial Sequence
  Synthetic
SKVERLIERLKELLDENHKISERVNKELERLARENDKHSKDLIRDIERILREVEEIVRRDGGEAEEVVRRLREVVKEVRDLLKEDADRNRESAKEAEKLVKDSEDTSRDILREATELVERIERDNIDRRLVEEVRRVLREVREAAKENIRNNRESLKRHKDALRKTIEDSARVVKRAEERIRELER

SEQ ID NO: 10907 - protein, 186 aa, Artificial Sequence; identical to SEQ ID NO: 10906
  Synthetic

SEQ ID NO: 10908 - protein, 186 aa, Artificial Sequence
  Synthetic
SKVDELVERIERLLRELTKHSKEIIDRLKKLLEDNERINRDVIRRIEEILKEVKRIVERDGGEDERVVRTIEEMVKRLAELVKRVEEINDESAKTVTKLVEDDMRELRRIVEEVEKLAEDLERDNIEEELVRKVREVVDRARERVEELIRRTEDVLKKHREELKKLIEESRRVLEEAKKTADELKK

SEQ ID NO: 10909 - protein, 186 aa, Artificial Sequence; identical to SEQ ID NO: 10908
  Synthetic

SEQ ID NO: 10910 - protein, 185 aa, Artificial Sequence
  Synthetic
DEVRKLKEDLRRLLKENKEKVEKVIRENEKLLRENKKMVEDAERDLRRLLKELEDLVRKRGTDEDLAETAKRVKEEVDRILEELRRHSKRSSEESRRSVEEVERHSRESSERVDKIIRDAEARGLPKELVDEVRRVARRVKEENKRLLDEVRKVSEEVERTNRELVRRVEEVVREVRERIDELLR

SEQ ID NO: 10911 - protein, 185 aa, Artificial Sequence; identical to SEQ ID NO: 10910
  Synthetic

SEQ ID NO: 10912 - protein, 185 aa, Artificial Sequence
  Synthetic
SEAEDLERRIEKLLEDNTRLVERVIEENEKLLRDNAEHSKEVEDRLRDLLRRLEEVVRKRGTDEELKKLADEVVKRVRDILRENKKHSDDSSRRSEKSVDDVRKHSKESSDEVKRILDDIRRRGLPEELIKRVEEVVRKAKKTNEDLLREVEKVSREVKKANEDLLRRSKEVVDEVEKDIERLKR

SEQ ID NO: 10913 - protein, 185 aa, Artificial Sequence; identical to SEQ ID NO: 10912
  Synthetic

SEQ ID NO: 10914 - protein, 185 aa, Artificial Sequence
  Synthetic
DDIERIIEKLKELLERNKRHTEEVIKELERLLRENERHSREVKKRLEELLKRLEDVVRREGTDERLKKLAEDVLREVRDILRRNEEHSRDSSEKVREIIERNEEHSRRSSDTVDKILEEVRRKGLPEEVIRRIEEAVREVKEANKDLVRESRRVARRVEEENKRLVEESRRVVEKVEKRIRDLLR

SEQ ID NO: 10915 - protein, 185 aa, Artificial Sequence; identical to SEQ ID NO: 10914
  Synthetic

SEQ ID NO: 10916 - protein, 185 aa, Artificial Sequence
  Synthetic
DEIDEARKELEEILRENREKVDEVRKRLEKLLRENEEVVKEIIRRLKELLKELERVMREEGTDERLKELVREVMDRVRKILEEAEKHSRDSSREVDKILKEVEKHSRDLVRRVREIIRRLEAKGLPEKLVREVRKDAERAERELRRSVEDIRRVVERVKRENERLLREVEKVVEEVKEELRKIET

SEQ ID NO: 10917 - protein, 185 aa, Artificial Sequence; identical to SEQ ID NO: 10916
  Synthetic

SEQ ID NO: 10918 - protein, 185 aa, Artificial Sequence
  Synthetic
DEIERVIEELKKRLDENRRVLEEIIRRLEELAKRNKRHSEELEKRLREELDKVRKRLEETGTDEEVEKILRTVKREVDKILRENEEHSRKSSEDVKKILDEARKHSEDVVRTVEDILRDVARRGLPRELIERMREVVEEVERALRKSLKDVEDVVREVEKKNKELLEKSKKVVEDVRRTLEKLRE

SEQ ID NO: 10919 - protein, 185 aa, Artificial Sequence; identical to SEQ ID NO: 10918
  Synthetic

SEQ ID NO: 10920 - protein, 185 aa, Artificial Sequence
  Synthetic
SEVEEAIKTLKKLLDDNKRHTEEVIRRIEELLKRNEEHSRKVIEDLERLLRKLEKMVRDRGNDERLKKLVRDVLERVKELLKRNEEHSRRSSKRVEEILRENEEHSRRSSRTVKEILKDVRRKGLPEEVVRRMEEAVRRAEETNKDLVRRSREVVRRANETNKKLLEDSKRVVERVEKRLEELLR

SEQ ID NO: 10921 - protein, 185 aa, Artificial Sequence; identical to SEQ ID NO: 10920
  Synthetic

SEQ ID NO: 10922 - protein, 185 aa, Artificial Sequence
  Synthetic
SELEEIERELEELLRENKKLVDRVREELKKLLDELRKHSERVIREIERLLEELERVVRKRGTDERLKELVEKVKEDVKKILRENEALAEEVDRRVDKILRDVEEHSRDSSRRVEELLKDARDRGLPEELIKRLTDVVRKVKEDNKRLVEEARRVVEEVKREIKRLLEESREVVRRAERRLEELRR

SEQ ID NO: 10923 - protein, 185 aa, Artificial Sequence; identical to SEQ ID NO: 10922
  Synthetic

SEQ ID NO: 10924 - protein, 185 aa, Artificial Sequence
  Synthetic
SEIEDAERKLKKLLEDNTDMARRLIERLRKILEENKRHSERVKRELEEILKELEDLLRRKGTDEDVARKVEDIERRVRDLLRRNREHSRRVLEEVRKILEEAERHSRESSREVKRILDDLRAKGLPEELVKRVEDVVRKVDEDNKRLVEEVRRVVEEVRKTLEDSLRESERVVREVKKRLEDLKR

SEQ ID NO: 10925 - protein, 185 aa, Artificial Sequence; identical to SEQ ID NO: 10924
  Synthetic

SEQ ID NO: 10926 - protein, 178 aa, Artificial Sequence
  Synthetic
SEREKMEKVVREAKKDLDRSLKRVKEVAEEVKKELDRSLEEVKRVSEENKKEVDRIRKKGDVDDEILRRNKERSDRSLEEAKEITDRTKRKVEELLKTIEEVSRRSKRKVDRISEEVDRGKDVDTLVRRLEKILEENRRIVKEIEDRLRKLLEDNKRVVDEIIKRNEDSVRDVERRAK

SEQ ID NO: 10927 - protein, 178 aa, Artificial Sequence; identical to SEQ ID NO: 10926
  Synthetic

SEQ ID NO: 10928 - protein, 178 aa, Artificial Sequence
  Synthetic
SEREKVEEVVREAKERLDESVKRVEEVSRENKKEIDRLLEEVKKVIEEAKRRLEELRRRGLVDEKVVREVEEELKRLLEEIRKVVEENKEESDRSLKEVEDISRESKERVDRILKRVDDGSDVDEVLKELRRILRDNERMVKEVIERNRKSVEDLERIARRIIEEIERLLKELTDRAR

SEQ ID NO: 10929 - protein, 178 aa, Artificial Sequence; identical to SEQ ID NO: 10928
  Synthetic

SEQ ID NO: 10930 - protein, 176 aa, Artificial Sequence
  Synthetic
SEDEEVEEAADRHRRSVEDSSRDLKKVLDEDRRTVAESSRKLKEILREVEREVKRVEDDGSVSDEEVRRMLDELRKLVERHHRENERLLRESEKLVKKHHDDNERSLDEVRKLVEDREGDVEELKKRLKELSDESRKSLERVKRKLEETSRRSEESLRRVKKDAERLVREIEKRAK

SEQ ID NO: 10931 - protein, 176 aa, Artificial Sequence; identical to SEQ ID NO: 10930
  Synthetic

SEQ ID NO: 10932 - protein, 176 aa, Artificial Sequence
  Synthetic
SEDEKVKKVLDDVRRKAEDSSRRITEVLRRHEETVRRSSEKLKKLLDELREDADRVRRAGKVDEETVRKLVEDVDELVERHHRRNEESLKRVKELVEEHHKLNEDLLRRVEELVRAKKGDVKDLERKARDIVRKSEESLERVVRELERLSRDSERSLKKVKEDLERVVEEIRRRAD

SEQ ID NO: 10933 - protein, 176 aa, Artificial Sequence; identical to SEQ ID NO: 10932
  Synthetic

SEQ ID NO: 10934 - protein, 176 aa, Artificial Sequence
  Synthetic
SEDEEVEKVLREDEESVKRSSDEIRKLLEDHERTVRESSDELKKALDEVRKRLDELKRRGQVSEETVRELVRRVEELVKDHHRKNEESLKRAEDLVREHHKENERLLEESRELVRRREGDVEDLKREAERTSEESRRSLEEVRRRLEELSERSRESLKRVKDELKRVVEEIEERAR

SEQ ID NO: 10935 - protein, 176 aa, Artificial Sequence; identical to SEQ ID NO: 10934
  Synthetic

SEQ ID NO: 10936 - protein, 176 aa, Artificial Sequence
  Synthetic
SEDEEVKRVLDELRKRLKESSDRLREVLKRDKRTLEKSSEDIDRALKKVERALTEVLKEGKVDEEAVDRVLRDVRRLVREHHELNRKLLEESKKLVEDHHRLNEKLLRDVEELVRRREGDVKELLDTLRKLVEESEESLREVVERLDKTSEDSKESLRRVIETLDRLVKDIDEKAK

SEQ ID NO: 10937 - protein, 176 aa, Artificial Sequence; identical to SEQ ID NO: 10936
  Synthetic

SEQ ID NO: 10938 - protein, 185 aa, Artificial Sequence
  Synthetic
SELEKLKKEIDDLSRDLDRILKELKKRVEELTRRSEKVLEDLRKTLEDIVKTLEDLARGGLDKEELRRRIKEVKDRVEEELKRLTEEIRRVSEELERLLREVEKVVEKSKRDLDELLKRLEERGLPSELVKRAADVVEKHRRSLERLLRTVTKIVKDHHERNEEIVDEVRKVVERAKERLEEIRK

SEQ ID NO: 10939 - protein, 185 aa, Artificial Sequence; identical to SEQ ID NO: 10938
  Synthetic

SEQ ID NO: 10940 - protein, 185 aa, Artificial Sequence
  Synthetic
SEVDELRRRVKKLSDDSKRVLDELSRRLKELSERLAEIVKEVHRRNEELVDRLRRLKDKGEPKEDLDRMVRELLKTSKKILDEVTKRLRDSLEEVKKLLEDLRRLIEESSRTLEKLLEDLERRGLPSELVEEVKRVVEKHHEDNKRIVEALAEMVKDHKRTIDELRRRLEESVKDAEKKLRDVSR

SEQ ID NO: 10941 - protein, 185 aa, Artificial Sequence; identical to SEQ ID NO: 10940
  Synthetic

SEQ ID NO: 10942 - protein, 185 aa, Artificial Sequence
  Synthetic
SELEELERRLKELSDESRRVLRELLERLKELSKDLERILEDLKEKVKKIEKDLRELKKRGLPKEELKREIDKLVKDVRDLLRRAKKRLEDSLREVEDLLRELEKRITEVSDEVRKLLEDLRARGLPSDLVREVARVVKEHHDENEDIVRRVKEAVDEHRETIERLRRAVERVVKEVERRLKEEAR

SEQ ID NO: 10943 - protein, 185 aa, Artificial Sequence; identical to SEQ ID NO: 10942
  Synthetic

SEQ ID NO: 10944 - protein, 177 aa, Artificial Sequence
  Synthetic
SKDEELERVVKEVREVLDDVNREVTKVSDDVKKRLDELLEEVRRVSDEVRKRLDEVLRERDEEEIRKILEEVRETSKRLNEEIDRAIRTVDKRSKELNETNKRAVDEVKKTVDRLRKEVKDVEEAKRRLEKLVRDIRRLTEEHKKRHEDLVREVEEIVKKLKDDHRRLVEDIERAIR

SEQ ID NO: 10945 - protein, 177 aa, Artificial Sequence; identical to SEQ ID NO: 10944
  Synthetic

SEQ ID NO: 10946 - protein, 184 aa, Artificial Sequence
  Synthetic
SVLDELREKAKKNIKESEELLRRNEDHSRRDTERSKKLLEDLERRVKEVVREAERIKKKGMPEEEVRERLERLLRELREDIKRIIEELRRSLDENRKLSEEIIRRLKKSAEDLTRDVRELLKRLDKDVVRDLERVVKEVEDSNRKVADDSRRSTEDNKRKNEKVERDARELLKEIEEIVRRLEK

SEQ ID NO: 10947 - protein, 184 aa, Artificial Sequence; identical to SEQ ID NO: 10946
  Synthetic

SEQ ID NO: 10948 - protein, 184 aa, Artificial Sequence
  Synthetic
DSLERLREIVERIVREARRLLRENEEHSERDTREVERLLEEVERRLRRVVEEAEKIKKRGSPKEEAMKRLDDLLRRVKEEIDRIVRESKESVDRNRRLSEEIIKTLEKLIEDMEREVDKLVKRLEEDVVREARRIVDELRKEVKEIVERSRKSTEDNERRNRKVIEDLKRLVKELEDRIREIKK

SEQ ID NO: 10949 - protein, 184 aa, Artificial Sequence; identical to SEQ ID NO: 10948
  Synthetic

SEQ ID NO: 10950 - protein, 184 aa, Artificial Sequence
  Synthetic
DFEERLKEVLKDAERVVDENKKENKKVLDKAKKVVDENRDRNRRVLEEVEREIRRLIDEIRKDKDLVDRLRRVLEEIEEKHRDAVRRTEELLRKVKEDHERVVRESERLLEEIRRKLDDLRRKGLTKEVEEVLKEIKDILRESSKTSKDLVRRTEEILEESSRDSDRVAKESKKLLEEVKEEVR

SEQ ID NO: 10951 - protein, 184 aa, Artificial Sequence; identical to SEQ ID NO: 10950
  Synthetic

SEQ ID NO: 10952 - protein, 184 aa, Artificial Sequence
  Synthetic
SFEEKLDKVVREVEDKIRRLVKRNRDAVKRVADEIRKLKDRNEEVVDRAREKIKRLIDEIRRDEDLVRRLKKVLEEVERRHKELVRRAEKALEEIRRSHERNIRELERVLEEIKKEIEDVKRKRVTKEVEEVLTRLKEKLKRVEESSEKVVRDSERLLEKIKKLSKDVEDESRKLLERVEREVR

SEQ ID NO: 10953 - protein, 184 aa, Artificial Sequence; identical to SEQ ID NO: 10952
  Synthetic

SEQ ID NO: 10954 - protein, 183 aa, Artificial Sequence
  Synthetic
SEVERLLKELKELLEELKKKVDDVLKDLEELLKRLEDHTREVVKRSEDLLRELEEMKRRGDLREELLKRAVEESSKLVRDDRERLRKALEEVEKRIRDVKRELEKAVKEIEEKVRDLERKLKDKEEVVRELRRVLEEVRRTAERLLEKLDTVLKKVEDKIRELLKESTRVNKDAKREIDRLRK

SEQ ID NO: 10955 - protein, 183 aa, Artificial Sequence; identical to SEQ ID NO: 10954
  Synthetic

SEQ ID NO: 10956 - protein, 183 aa, Artificial Sequence
  Synthetic
SEVETILEDLRRLLEELKKHSDEVVKEIKDLLREIEKHTREVVKTSKKLLKELEELRKRGDLREEELERAVEESSKLVEDDEREIRKMLKRIEDLVRENKDKLRRAVEEVERKVRELKRRLKDKEELVRKIEKVLKEVRETIKKIAEDSDRVLEEAKEVAKRLKDESDRVNEEVRKRIEELKK

SEQ ID NO: 10957 - protein, 183 aa, Artificial Sequence; identical to SEQ ID NO: 10956
  Synthetic

SEQ ID NO: 10958 - protein, 183 aa, Artificial Sequence
  Synthetic
SDVDRVLEEIRKLLEDLKRHSEKVSEENEDLLRKNTELNKRVSEDNERLLEELKRLRERGDIREEDLKRALDRVRKTVETVKEENKRSLEDVRRTVETNKRKLERVVEEIKKLIEDAKRRLKDKEELKKKLDEVLERAKRTIDRLLETSDRSLEKVERDLRRLNEELDRSLERAERTIRELAK

SEQ ID NO: 10959 - protein, 183 aa, Artificial Sequence; identical to SEQ ID NO: 10958
  Synthetic

SEQ ID NO: 10960 - protein, 183 aa, Artificial Sequence
  Synthetic
SEVDEVLERIKRLLERLAEHSDKVVRDIEKLLDDNRKENERLLDKLRRELKRLEEMRRRGDLREELLERVVREVEKEIRDIKRKNKRSVETVEKLVRDDRKELKRALEDVERLIRELETRLKDKEELRRKLEKVLREAEKVIDELLKKTDEVLKRARETIEDLNRKLDKVLKEVRDKLDRLRD

SEQ ID NO: 10961 - protein, 183 aa, Artificial Sequence; identical to SEQ ID NO: 10960
  Synthetic

SEQ ID NO: 10962 - protein, 185 aa, Artificial Sequence
  Synthetic
SSIEKVKREVDEVIKTSKKSSEDSEKLVRDVEERLRKLVKDVRDRVKRVIEEMERLVRERKDKDVRKELRELVRDVEREVKRVEDEMEKLLRDIEEEVRRDIKRSRELVDEVRRRVADVIRKDGEESELVERLKEVLKRLEEVSEESERRNREVVRRLEDTARKLTEELRRVLTELRDVLRRLEK

SEQ ID NO: 10963 - protein, 185 aa, Artificial Sequence; identical to SEQ ID NO: 10962
  Synthetic

SEQ ID NO: 10964 - protein, 179 aa, Artificial Sequence
  Synthetic
KDEETLKRLLEKAKEVVDRLKDENEKVTRDNHESVKKAKDANKRSNEKSERVARDAIRRVREAKEVVDTAEKLLRDNHEHSRDTVKKARELNETSRRHSERIVEKIEEILEEVERTLRENRGDVRELAKKVEKAIRELEELSRENREAVKRISDEIKRLSDENAKDSERIIKEIDDRVR

SEQ ID NO: 10965 - protein, 179 aa, Artificial Sequence; identical to SEQ ID NO: 10964
  Synthetic

SEQ ID NO: 10966 - protein, 179 aa, Artificial Sequence
  Synthetic
SDDETVTKLLKEAEKVVRELTKRNKELLRKNHESVREAKKRNEDLSRKLEEVVRRLIEEIREREDVVRELEKLLEDAKRHSERIVREMEDLNRKSKKHSKETVDRLKDLLRKVEETARARKGDVKDLAKKIEDVIREMEELTRRNEKRIEEISDEIRRLSDTNRREIERIREELRRRAK

SEQ ID NO: 10967 - protein, 179 aa, Artificial Sequence; identical to SEQ ID NO: 10966
  Synthetic

SEQ ID NO: 10968 - protein, 179 aa, Artificial Sequence
  Synthetic
REDERLEEIARKIKKVVDELVERNKKLTEDNHESVRRAEKRNRELSRELEEVAKRAIERIRSDKKVVDEVKKLLEDAKKHSKEVIDELRRLNEESKRSSEDTIRRMRKLLRELEETVKAKKGDVEDIERKVEDIIRRLEDLSRRNEEKVRRISEEIKKLSKDNERTIKEIIKEIEERVK

SEQ ID NO: 10969 - protein, 179 aa, Artificial Sequence; identical to SEQ ID NO: 10968
  Synthetic

SEQ ID NO: 10970 - protein, 185 aa, Artificial Sequence
  Synthetic
DELDRLREEIKALIKESRESLKRLEEESRRLAEELRKLIRELKERIERIIEEARRLAKEIKDKDELRKRLEDLLRRVERLVEEVRRRLKEVVDRDRKLVEDNRRLLEELVRRVEELVRDLDAKITDDDVRKKVEDVLEEARRRITDDEDKTKKVHDESRRVVEEVRERVKRLLDKARTVVKEIEK

SEQ ID NO: 10971 - protein, 185 aa, Artificial Sequence; identical to SEQ ID NO: 10970
  Synthetic

SEQ ID NO: 10972 - protein, 185 aa, Artificial Sequence
  Synthetic
SEVEDLERKIEELIERAKRLVEELEERSRRLIRELEELSKKNEEDIERLIKEAKKLAEDIKDKETLRKLLDEVLKRVRDSVERSKEELERVVREDRELNKRVKDTLRKVLEDVERLVRDIEKKLTDEEMRRRVRELLKKAEEVVRRLEKDSDRVSKESEDMVRELLRRNEEALRKAEEVVREIKR

SEQ ID NO: 10973 - protein, 185 aa, Artificial Sequence; identical to SEQ ID NO: 10972
  Synthetic

SEQ ID NO: 10974 - protein, 185 aa, Artificial Sequence
  Synthetic
KDIDELRKRIETLIREAKKLVDDVRKRSEDLIERLKKLSEDNARDIERLLREAEDLARKIKDKEELERRLRKVLKEVEDSVRRSRKELEDVVREDEELNRRVKRALEEVLKTVEKLVRELEKKIDKREVKERVRRLLEKAADVVRRLIEESNRVSDDSRRVVKELLDRNKELLDRARKRVEEIRK

SEQ ID NO: 10975 - protein, 185 aa, Artificial Sequence; identical to SEQ ID NO: 10974
  Synthetic

SEQ ID NO: 10976 - protein, 185 aa, Artificial Sequence
  Synthetic
DDIERLKREIERLLKEAEKISRDNEERSKELLDRLRKLSEDNKRKIDKLVEELKRLADKIKDKEELTRRLKEVVDRVEKSVRDSERMLREVVREDEESVRRSKTKLEDLLRKVEELVRRLEKKVTDEKVKRDAREALRKAKKKVDELKRKNDEVHRRSREEVKRLLEENRKLLEDLRRMVREITQ

SEQ ID NO: 10977 - protein, 185 aa, Artificial Sequence; identical to SEQ ID NO: 10976
  Synthetic

SEQ ID NO: 10978 - protein, 176 aa, Artificial Sequence
  Synthetic
RKVEEVEKHSRESIKEIERLVEEVRKHSKDSIRRIEKLVEDVERHSRKVIEELERDKIDEKAKRLLEEDEKLVREIKERIKKLSRENEERVKDIARRIRELSKRNEETVRAIARKIDKDMVRRLEKILKEDKEVVKKAEEELRELLKEDREVVKRAEEELERLLKETEDVVRKVET

SEQ ID NO: 10979 - protein, 176 aa, Artificial Sequence; identical to SEQ ID NO: 10978
  Synthetic

SEQ ID NO: 10980 - protein, 176 aa, Artificial Sequence
  Synthetic
SALEEVKRHSEESIKAIEELVRRVEKHSRESSKRNEELIREVEDHSRRVIEELKRKKADREARELVKEDERRVKEVAEESRRLSKRNEELVRRIAREIERLSEENERLVKAVLRTLSEDVVRAAEKLLEEDRDAVRRAKEKLDELLKRDRDSSREAIRELERLLKETRDVLREVER

SEQ ID NO: 10981 - protein, 176 aa, Artificial Sequence; identical to SEQ ID NO: 10980
  Synthetic

SEQ ID NO: 10982 - protein, 184 aa, Artificial Sequence
  Synthetic
SEIEKILKDVDKKLKDSSRESEESVKESRDLLRESSERSERSVRETRKRVDDLLRLVDERKDEKLIREIEERARRIADKNRRIVEESKRLVEEAVRKNEDIVRKSAELVERIIRELEDLLRKRNEEDMKREIDKLVEKLKKVLRDNKRLHEKVIRELEEVVTRNEELHRRVIKEAKEVVDRVRK

SEQ ID NO: 10983 - protein, 184 aa, Artificial Sequence; identical to SEQ ID NO: 10982
  Synthetic

SEQ ID NO: 10984 - protein, 183 aa, Artificial Sequence
  Synthetic
SEVEEVLRRIEELLREDKRHVEEVVREIRELLKRNKDMVDEVLKRIEDLLREIDEARKRGDLREKAVEDLLRTVEELVRRAEEHTERLLERVERLLERNKEHSERVLEEVKRLIDDVKRKVKDVEEVIRKLDDILRKVKRVSEDNKRETDKVREEVAEVVKRSKDKLDKVRKDVKRVIERVRT

SEQ ID NO: 10985 - protein, 183 aa, Artificial Sequence; identical to SEQ ID NO: 10984
  Synthetic

SEQ ID NO: 10986 - protein, 183 aa, Artificial Sequence
  Synthetic
DEVEKAAEDVERRLREDEDHARKVVKRIRELLEEDTRTVDKVLREIEKLLKDITDLRRRGDIREEDIDRILRKVERDIERIEEHSKRVLEEVKRLVDRNRKHSKDLLDEVRERAKDVKRKVKDKKELTEKLDRLLERVEEVSKRNEDATRTVEKEVEEVVRRTKKKLDDILERVERVARELKR

SEQ ID NO: 10987 - protein, 183 aa, Artificial Sequence; identical to SEQ ID NO: 10986
  Synthetic

SEQ ID NO: 10988 - protein, 184 aa, Artificial Sequence
  Synthetic
ELIKKARKDVEEVRERSERLVDELRKRNKKLADESRRLIDKLRKDVEKVLREIEDLLRKRRTKDVLKEIEDLVRELERELRRVVKESSDKVRKLIRENEKVVEESSRLFRDLVEKLRRVVEERNDKKLMEEVERLIKRLEDVNEKSERDVREINKESERVNEETEREVEDAIRKLREVLRRAKK

SEQ ID NO: 10989 - protein, 184 aa, Artificial Sequence; identical to SEQ ID NO: 10988
  Synthetic

SEQ ID NO: 10990 - protein, 186 aa, Artificial Sequence
  Synthetic
KEVEDLERRVKEILDRMKRLIDENRKKIEKSIRELERLIDENRKEVERVKKELKDLKREGGDDARTLRERVRKIIEDVEEHSRRSTEEVRRIHKENKEHSERSSDEIRELLRRVEELIEEVKRRLRDKEMEKKLEDIVRRVREVVRRAHETNERLVDRSRKAVEKAERTNRRLVEEIRKVAEEVRK

SEQ ID NO: 10991 - protein, 186 aa, Artificial Sequence; identical to SEQ ID NO: 10990
  Synthetic

SEQ ID NO: 10992 - protein, 186 aa, Artificial Sequence
  Synthetic
DEIRELEERVRRILDELRRLVERNREVIERSIRELEKLLDRNRRKVEEILRRIDDLTRRGGDDKKTMLDDVRRLLREAEDHSRRSSETAKRIHRENEEHSKDSSRKVRKLIEELRELAKKVEKEITDERVKEAIKELVKDVDRVMREVDRANRELTKTSKKVLEDVDRTNRRLVKEVRDVVERARK

SEQ ID NO: 10993 - protein, 186 aa, Artificial Sequence; identical to SEQ ID NO: 10992
  Synthetic

SEQ ID NO: 10994 - protein, 186 aa, Artificial Sequence
  Synthetic
KEVEDLERTVRTILKRMRELITRNEEEIRRSIEELKKLLKENKDTVRRILEEMKELKKEGGDDKKRLVEEIKRLLDELRENSKRSSDRAKEIHERNKRHSEESSRTIEKLLKELRDLVRDVERKLRDEDAKRKLDELTKRVEKVVREADERNKRLTKRSKEVLDEVHRANEEALKEVEEVVRRVTK

SEQ ID NO: 10995 - protein, 186 aa, Artificial Sequence; identical to SEQ ID NO: 10994
  Synthetic

SEQ ID NO: 10996 - protein, 186 aa, Artificial Sequence
  Synthetic
DEIEELRKKAEEIIRRMEDLVRRNTETIKRSIETLKKLIDENRRRVRKIIETMKELKRRGGEDKETLLRRIDELLRRVEKHSKDSSDTVKRIHEENEKHSRDSSRKIEELLKTLRDLAEDVKRKIDKEEVKEAIERLVRRVEEVVRKVREENKRLNEESEEVVRRADRTNREILKRVRDAVREVRR

SEQ ID NO: 10997 - protein, 186 aa, Artificial Sequence; identical to SEQ ID NO: 10996
  Synthetic

SEQ ID NO: 10998 - protein, 181 aa, Artificial Sequence
  Synthetic
DAEDTLRDITRKVRKVLEEHRETIERTIRKNRESLERVKRAIEELIERSRRALEEVTRSGIEERVVKKAEDLVRRDEKTLRKVVDELKKLVDESEEINKDSLRKVEKLVRDAEDTLRKVPPRDEMLKRVEDIVKKLIEDLREMAKRNRDISKEVDDRLKKILDEVRKHSEEVIKRLKDEER

SEQ ID NO: 10999 - protein, 181 aa, Artificial Sequence; identical to SEQ ID NO: 10998
  Synthetic

SEQ ID NO: 11000 - protein, 181 aa, Artificial Sequence
  Synthetic
SAEETLERLAREVRKVLEEHARKIKKTIDDSRRVLEEHRKTIKRTIDESRKVIKDVRDDGIEEEAVKRADELLRRDEKLNKESLDTVRELVKRDVEENEKSLRDVERLVEEIKERLERVPPDEEVLRRVTEEVKELIERIERLLKENRKHSKKIIDRLRELLEENRRHSEELRKRLEDERR

SEQ ID NO: 11001 - protein, 181 aa, Artificial Sequence; identical to SEQ ID NO: 11000
  Synthetic

SEQ ID NO: 11002 - protein, 182 aa, Artificial Sequence
  Synthetic
SSLDEIRRKVREAIERLERLLEENRRKVEEVKRRNERLLDRNREVVDEVIKRLEEMRKDDEAVKRVRKILEEVRKHSRESTEESKKTVDEVRKHSEESSKRVKEILDELRKSAEDIERKNREKREVDEELKRLVEEVKKVVDDVRRENKRLLEEVERVSEEVKKTNEKLLERVKRVVEEAER

SEQ ID NO: 11003 - protein, 182 aa, Artificial Sequence; identical to SEQ ID NO: 11002
  Synthetic

SEQ ID NO: 11004 - protein, 182 aa, Artificial Sequence
  Synthetic
SSLDTAREHTRDVIKKIDDILRRNEKLVDDVIRELERLLRENAEVVERVIDRLRRLKKDKEALEEVEKILREVEKHSRDSTREVRRILREVEEHSRKLLEEVKKILDDNRKLIEDIKRKNREKREVVEELKELRKRSEEVVDRAEKALRRSVRKAEKVVEEVERANKRLLERVKKVVDDMRR

SEQ ID NO: 11005 - protein, 182 aa, Artificial Sequence; identical to SEQ ID NO: 11004
  Synthetic

SEQ ID NO: 11006 - protein, 185 aa, Artificial Sequence
  Synthetic
EVRERVKEVIERSEKSVRELERIVEELARRLRESVEDLERKIRELSKELRRVVEELVRTRGESSEEIKKVEETVREVDKELKELVERVREENERAIKRMRELLERVERENRRVVKEAKDLVDKRGDEEVVRRIEELLKEVHKENKRVADELKKLVEDLHDRNRRVKEEVKRRVDEVRRKAEEVAR

SEQ ID NO: 11007 - protein, 185 aa, Artificial Sequence; identical to SEQ ID NO: 11006
  Synthetic

SEQ ID NO: 11008 - protein, 185 aa, Artificial Sequence
  Synthetic
EVDERIRRLVEESRKSVEDLARIVDELVERLRRSVRDLEEKSKRNKEELEKVLRDLARTRGDKSEKVKRIADIIRRVEEESEKLIDRVRKENKKVIEDMRRLIRKVEEENKRVIDDLRRLVKERGTEEVVERVERLIEKVHRDNRRVAEKLREDVRRVHEDNKDVARKSHKLVKEVRDTVREVRR

SEQ ID NO: 11009 - protein, 185 aa, Artificial Sequence; identical to SEQ ID NO: 11008
  Synthetic

SEQ ID NO: 11010 - protein, 178 aa, Artificial Sequence
  Synthetic
DVLKEVEEDSRRNHERNRRVAEKVTDDSRRNVKRLEEVAEEIKDDSRKNKERLDKLRGDDEVVRRLAENVKRSARKLEEELKRLTRNVERTVKEVEEIIRRSRKNVDDTRKKLETEITDKEIEKILRDVLKENEDSLRELKEILERLLEENRKAVEKLKRILEELLRRNDEMLKRVRT

SEQ ID NO: 11011 - protein, 178 aa, Artificial Sequence; identical to SEQ ID NO: 11010
  Synthetic

SEQ ID NO: 11012 - protein, 178 aa, Artificial Sequence
  Synthetic
SVDEEVRRDSKKNKEDLDRVAEKVKRDSEENMRRLEEVARKVTEDVKRNKKTLEDLRGDEDVLRRLKENVERSREELEEIIERLERNVRRTVEEVERIVKKLRENVERTKKEVEERITDEEIRRILKELLERNERALEELKKRLRKVLEENKTVLEELRRRLEELLRRNKRMVDEARR

SEQ ID NO: 11013 - protein, 178 aa, Artificial Sequence; identical to SEQ ID NO: 11012
  Synthetic

SEQ ID NO: 11014 - protein, 179 aa, Artificial Sequence
  Synthetic
DEVEKLVEDVARVNKKSLDEVRRLLEELEKVSRDHRREVERSLREAEKVLEDLKREAEKTRDKDTLKKLLDELKRILEEIKDRHRRLTEHNKKVLDEVRETIRRIIERNKEVLDELLKRIGEEDDEIRKVKKHNEDVLRKVRKILKDAERISKRALDENERILKEVEKRVRDVIRELER

SEQ ID NO: 11015 - protein, 179 aa, Artificial Sequence; identical to SEQ ID NO: 11014
  Synthetic

SEQ ID NO: 11016 - protein, 179 aa, Artificial Sequence
  Synthetic
DEVDDVVRRLEEENRKSEERAKDTLRKAKKVLDELKKRVKESEDRVKEVLDDVEERVRRTTDKETLRKLLEELRKILKKVEEDHKRLTKTLRDLLKRVKEEHDKLTDENRKLLEEVLRRLGKDDKRVRDALRHNEDVLRRNDEIVDELRKRVEDVLKKNEDDVRRVAEEVRRVIEELRK

SEQ ID NO: 11017 - protein, 179 aa, Artificial Sequence; identical to SEQ ID NO: 11016
  Synthetic

SEQ ID NO: 11018 - protein, 179 aa, Artificial Sequence
  Synthetic
DRVEEVVKRAKDENRKSEEEVKKSLKDLEDLSREHEKRIRDLLKEVKEILDRIREEVEKKRDRKTLEEIVKKLADVLKRVDDEVKELLKHNKEMLEELRKRHKKLTKDNRDVLEELRREIGEEDDEIRKLERHNEEVLKKNETIARDLEKRSREVVKRLEDILRKVEREVEKALEEVRT

SEQ ID NO: 11019 - protein, 179 aa, Artificial Sequence; identical to SEQ ID NO: 11018
  Synthetic

SEQ ID NO: 11020 - protein, 182 aa, Artificial Sequence
  Synthetic
SVEEELRKLKEEIDRVLEENKKIIDDIRKELDDVNRENKKIIDDIRKEIDDVLERVRGEDKDRMREIEEVARRAKEKLDRLLEKSTRLIEKLKEELDDLVRRSAELAKEMKDRLKELKDNNVDEKDLKKLLEEVRELLERSRRASEELLREVKRLLDESRKESKRLADDVRRLLEELERRTK

SEQ ID NO: 11021 - protein, 182 aa, Artificial Sequence; identical to SEQ ID NO: 11020
  Synthetic

SEQ ID NO: 11022 - protein, 182 aa, Artificial Sequence
  Synthetic
SVEDIIRKIEKELDDVNRENEEIIRRIKKELDDVNRRNEKIARDSKKRVDDVLRKVTGEDKDKVDEIRRIAEEAKRSTDELLKESTELIERLKKRLEELLRESSRLIEELKKRLEDLLRNNVPEEVVKKIREEVRKLLEESKRRSDELAKEVRELLKRSEDKSRRNLEEVEKLLKEVEDRTR

SEQ ID NO: 11023 - protein, 182 aa, Artificial Sequence; identical to SEQ ID NO: 11022
  Synthetic

SEQ ID NO: 11024 - protein, 179 aa, Artificial Sequence
  Synthetic
KDLEDVLDKVRKDLERSKKHSDDVVKTIRELLKESEKHSEELVKRVEKLLEELRRMTTRGDAREEKVDRVLEEVDKLLKENRDESRRVKDEVRKLAKRNRDVSKELLDRVKEEIERLRRRGVDESILRELERRVKKVVEENDEITRRVEREVEKVDKKNKDITDTLRTRVKKAVDEARK

SEQ ID NO: 11025 - protein, 179 aa, Artificial Sequence; identical to SEQ ID NO: 11024
  Synthetic

SEQ ID NO: 11026 - protein, 190 aa, Artificial Sequence
  Synthetic
SDIERLLREVEKVIRDSEEETRKLLEEVEKALKDSRDSSEDVKRKVDDILRKLRELRRRNELPKEELTRRAEEEVRKIDRLLEENYKRSKEVVDEIKKKLDEVIKRSDELVRRLEEELRRVLERVKEREDMERIERLLREVRKRVEEAAKRNKDVIKEIEERVRTVHDENRRLLEEIAKRVRDVLEEVRT

SEQ ID NO: 11027 - protein, 190 aa, Artificial Sequence; identical to SEQ ID NO: 11026
  Synthetic

SEQ ID NO: 11028 - protein, 171 aa, Artificial Sequence
  Synthetic
KVEEELEKEVRRALEESKRLLDRLTEHSKRVLDELRELLERVERDVRRVLEELKRERDDEKATRIIEEVRKRLKDVVDRIRELVERNKRELDKAVKDSTRLVEEIKELLREKLEDKDVVDRLEKELKKVNDEARKRIEELLRESDRVLEEVKKKMRELERELKKVLKEVRD

SEQ ID NO: 11029 - protein, 171 aa, Artificial Sequence; identical to SEQ ID NO: 11028
  Synthetic

SEQ ID NO: 11030 - protein, 171 aa, Artificial Sequence
  Synthetic
DEVEDADRKVRTVLEDLRRRLEELKKHSDDVSRRNEKLLRELKEHSDRLVEEIKRDKKVERVEELVRRNEKKLEDAVREVEKTVRDNKEKLKRVVEKIEEDIRRVEEELKRDVRDKRVVDELLKKLRDVLEEVRRTVDELVKRSEESLRRAREVIRRLLEKTREVLEEVRT

SEQ ID NO: 11031 - protein, 171 aa, Artificial Sequence; identical to SEQ ID NO: 11030
  Synthetic

SEQ ID NO: 11032 - protein, 173 aa, Artificial Sequence
  Synthetic
STEDVLRKIKEDVKRVIDDNRRILDEVRRTSKRVLDDLRRNLKHIAEEVERVLREVDKEEVVRELKKILDEIREEHRRLIRTNEKVLEDIERDHRRISEELKRILDEVDELLRAGKPSKELLEKAKRVVDEIKRLAEESLKRLEDLSRDHKRRAKELNDEIRKVVDELRKRAT

SEQ ID NO: 11033 - protein, 173 aa, Artificial Sequence; identical to SEQ ID NO: 11032
  Synthetic

SEQ ID NO: 11034 - protein, 173 aa, Artificial Sequence
  Synthetic
SLEEVLDEIRKLVERALRDLERNLRHVTRTSEEVLRRNEEILRRIEEKVDRVVRNVKTEEVVREMRKILKELRERHKRLTETNREALKRIAERHKRLIEEVKRILDEVAEVIKKGEPSKELLDEIRRVLEEVKRRVEELNKELKDLSDKHKEKAKRTDETITDVLRKAEERER

SEQ ID NO: 11035 - protein, 173 aa, Artificial Sequence; identical to SEQ ID NO: 11034
  Synthetic

SEQ ID NO: 11036 - protein, 180 aa, Artificial Sequence
  Synthetic
SVEELLREVAELVKRVDEDLRRLLEEVRRSNEEVIRRLEEILKRIEEENRKVVEELRRRGVSEDLVRESKRLVDESRRVIEKLVKESRDSVERTRETVDRLREELKRLVEEIKKMVEDNSSEETVKRLLDELRELLERLKRTIEELLKRNRDLLRDAEEKARRLLEENRKLLKKARDTAT

SEQ ID NO: 11037 - protein, 180 aa, Artificial Sequence; identical to SEQ ID NO: 11036
  Synthetic

SEQ ID NO: 11038 - protein, 180 aa, Artificial Sequence
  Synthetic
SLEELVRDVERLVKESIEELERVVEDVRRLNTELKEKLERVAREIKKRNDDLVRELRTAGTEDRLIKESRELVRRSEDTVRRLIERSEEIARRTEKNVKRHVKENKDVVEKIREVVTKNSSEEVIDRLRKELEDIIRESRKNLEDLLRENKRLVEEVERTLRELLRTNKELLERIREEVR

SEQ ID NO: 11039 - protein, 180 aa, Artificial Sequence; identical to SEQ ID NO: 11038
  Synthetic

SEQ ID NO: 11040 - protein, 180 aa, Artificial Sequence
  Synthetic
SVEEMLEKIRRRATESVKRLRKILKEIKERNEKAIRDDRRLLEEIERRIREVVKRLRDAGVSEDLVRRLEEILKRVKEAVEKSVRESKKLVDDTKRNVEKHIEDNKRVVDRVEEAVRRNSSEETVKRLEEEVEKIVRDSERNAREMLERNRRLIEESKKRTKDLLKEVEDEVRKLEEEVR

SEQ ID NO: 11041 - protein, 180 aa, Artificial Sequence; identical to SEQ ID NO: 11040
  Synthetic

SEQ ID NO: 11042 - protein, 184 aa, Artificial Sequence
  Synthetic
SVEEIVRRIREELKKVEEDSERIVRTVEDVLRKVLETVERIVRESEKRSRDAVRRIREKLSDKEKLKEIEDEARKSVEELRKLLEDVERRVRELVKKARDLHRRSKEVVDEIRKKVEKLLKDGGSDEVATRLLKEVKEELDRLREENERLLRELKETVEKLKRDAEKVVEDDERLVRELEKRVD

SEQ ID NO: 11043 - protein, 184 aa, Artificial Sequence; identical to SEQ ID NO: 11042
  Synthetic

SEQ ID NO: 11044 - protein, 183 aa, Artificial Sequence
  Synthetic
DIEELLEEIRRRAEEAHRRNEDLLRKIKELVKKARKDNEKVVRDIERRLREVLERVRKKITDDRLREEIERLVDEVRKLLEDVKRESEKLVREAEKLLKDLERRSKEVLDRIEKLLRDVSRSTDREEVKEVLKRVEDLLRTSEEETKELLKRVEDELRRSKEDSEDVLRKVEELLERIDRRVT

SEQ ID NO: 11045 - protein, 183 aa, Artificial Sequence; identical to SEQ ID NO: 11044
  Synthetic

SEQ ID NO: 11046 - protein, 182 aa, Artificial Sequence
  Synthetic
KEIEEILEEVKRLLDKLKEDSDRILERVRELLERSKEKSREILKRVEDLLRELEKLVRDDRDEDTLRDLLRELEERVKELLKELDKTSKDVLDEVRKLLEENNRLLDELTKRVDELLRRISEDEELRRVLEEIRRLLEEVRRKIEEASRRLKEDADRVHRKNEEILKRIEELIEEVKRRVEK

SEQ ID NO: 11047 - protein, 182 aa, Artificial Sequence; identical to SEQ ID NO: 11046
  Synthetic

SEQ ID NO: 11048 - protein, 182 aa, Artificial Sequence
  Synthetic
KEVEDILREVDKLLKESKRKSEEALKRVKRLLDELKKTSKRILREVEKLLERLRRLKKDDRDKDRLREELKKLLKTVEDLLRDNDRLLREVEERAKKILKDVRETSERLLRTVKKLLEEIPKDKDLKKIVDDIRRKIDKVDKDNERLIKELEDRVRKAREDIRDISRRIRELVKRVVDEVEK

SEQ ID NO: 11049 - protein, 182 aa, Artificial Sequence; identical to SEQ ID NO: 11048
  Synthetic

SEQ ID NO: 11050 - protein, 182 aa, Artificial Sequence
  Synthetic
DEVETILRDVKRLLEESRRESERVLEEVRRLIEELKKRSRDIMEEVKKLLEELREIVRRDRDKETLRKLLEELEREVRKLLKRNNELLEELLRRARKLIEEVERTSRELFKTVEELVRRIEPDEEARRLLEEADRLVREVDKENEDILRRIEESVREVEERIRRISRAIEESIRRVKEEVER

SEQ ID NO: 11051 - protein, 182 aa, Artificial Sequence; identical to SEQ ID NO: 11050
  Synthetic

SEQ ID NO: 11052 - protein, 182 aa, Artificial Sequence
  Synthetic
KEVEDLLREIERLLKESRERTKKVEEDVKRLLDESRKTSEDVLREVERLIRELEKIVREDRDKDRLEELLRRLKETAKELLRKVEELSRRLKETVDKLLRDLEEDSKKLLEDVKELLDRIPPDDKARKLVEEAKRRLDTVNEENKDVVRKIKEDLERVDEENRDVLRRIKRIVERVEEEVRR

SEQ ID NO: 11053 - protein, 182 aa, Artificial Sequence; identical to SEQ ID NO: 11052
  Synthetic

SEQ ID NO: 11054 - protein, 180 aa, Artificial Sequence
  Synthetic
DEAERLLRRIEEILKRSKDVSDKLLEDNEKLVRDVKRRLDEHLRKNREALKKLREELKRNRDERDLERLIRESKKLLDDSEKNIRKLVKESDRLLEETERENRRLIKELRDIVKEIAERIGKDDDEVVRRIEELVKKLEEDNKRVVEEIKKLNDDLRREVKRVLDEARKLNKEIVDELRK

SEQ ID NO: 11055 - protein, 180 aa, Artificial Sequence; identical to SEQ ID NO: 11054
  Synthetic

SEQ ID NO: 11056 - protein, 180 aa, Artificial Sequence
  Synthetic
SEVDELRRRVEEVERRSEENSRKHLEDNEKMVDDLRKNLERHLKENKELVERVRRVVEDNTSEELLKRLIDESEDLVRRSEENIRDMIRRSRELAKRSKDNNEEVIRRLKKLIEDIVRTIGKDVDRVVEDLKRRADELVRRNERAAEEVRRLNEEVVEDLKRVVKEVKDLNDELVKEVRR

SEQ ID NO: 11057 - protein, 180 aa, Artificial Sequence; identical to SEQ ID NO: 11056
  Synthetic

SEQ ID NO: 11058 - protein, 183 aa, Artificial Sequence
  Synthetic
SVEEVLKEIEKEHRRSEEEVKDVLRKARKINEEVERRVKEVVDRIRETIARVRKEVKDRNGERLEELERRLERILREVERLAKELIDRLRRTVEDSERLVKRLVEENRRVLEDVRRLVRELDKVKDVLKKLLDRSRRLVEKVRDDLRKAEEKNRRVAEEIKETLKRMEDRVREELKEIKKKAK

SEQ ID NO: 11059 - protein, 183 aa, Artificial Sequence; identical to SEQ ID NO: 11058
  Synthetic

SEQ ID NO: 11060 - protein, 183 aa, Artificial Sequence
  Synthetic
SVEEVLKEIEDLHKKSIDEVREVLKEAEDLNRRAVKEVEDALRESEELNRRVTKEVRDENGKDLEELEKELRENVRRVRETVRDLKRKLEETVRESREDVERLVRENERVVKEVRDLVRKLDKVKEVLDRLLEKSEKLARDVRKRLKEVLDKNRKVVEEIRKVLEELLRHSERKLERIRERLK

SEQ ID NO: 11061 - protein, 183 aa, Artificial Sequence; identical to SEQ ID NO: 11060
  Synthetic

SEQ ID NO: 11062 - protein, 184 aa, Artificial Sequence
  Synthetic
DVEDVVRELKKLLDEITRRSEEVVKRLHDRNEEAKEEVRRVVKEVRERLKKVVDDVRRELKDSEKLERVEEKIEEAVRRLDEELRRLEEELDRSSDRLRKLHETTRRLIEEAKRRIKELLDRNGDREVLRKLKKEIKDLLDRIEELNKKVLDESEKLIKEIREDLRRVKEEIKEELKRIREEVR

SEQ ID NO: 11063 - protein, 184 aa, Artificial Sequence; identical to SEQ ID NO: 11062
  Synthetic

SEQ ID NO: 11064 - protein, 184 aa, Artificial Sequence
  Synthetic
SVEEVVRRIKEKLETVVDESRRVVKDLHDKNKEIVEESRKVLRESEKVDEDVVEEVRRRLGNSEKLREAEKKIEKSTEENRRLHKKTADEIKESSERLRELHERTRREIEKAMERVERVLRKGGSDEELEKLLREIEDLLRKIRKLNKEVLDRSRKLLEDIRRLNKRALERNRKIAKEIRDEVK

SEQ ID NO: 11065 - protein, 184 aa, Artificial Sequence; identical to SEQ ID NO: 11064
  Synthetic

SEQ ID NO: 11066 - protein, 172 aa, Artificial Sequence
  Synthetic
DSAEKLERDVRRALERIRKRLEENDRRVEEILERIRRRLREDLETSREVLERLRKENVREDEVRDLARRVKENTDRTLEEVKRLIEEAKKHSKDVLDDVKRDAERLKEEIRRVPVDESVIEKLERLLDELLEEVKRVVETSEKKLDELLEEVKRVVEESKKALDDLLREVEK

SEQ ID NO: 11067 - protein, 172 aa, Artificial Sequence; identical to SEQ ID NO: 11066
  Synthetic

SEQ ID NO: 11068 - protein, 183 aa, Artificial Sequence
  Synthetic
DKVDEVLRRVRELLERLRKLLEDNKKTTDELLEELRRILKEDEDRTRKLLKRLRDVKREEIKDKDTLTKTAEEIAKRLEDSNRTSKEIVERIVKELRESNERLERIADEIRERVERLLKKAKEEGVDDRMMKRLKEELERIRKKVREVLERSSRAVERIEREVDEVVKRSSDTVKRILDEVRK

SEQ ID NO: 11069 - protein, 183 aa, Artificial Sequence; identical to SEQ ID NO: 11068
  Synthetic

SEQ ID NO: 11070 - protein, 183 aa, Artificial Sequence
  Synthetic
SEAERVRRRVEELLRELREHSRRVLEEVKRLLEKLREDNERSLRRIKKLLDELRRVRERDLQDKDELRKLLRELKEDVKRIIEENDKIVKKLLEDAERLARENEEMLKRLKEEAERLIRDLRRKGVEEEVLRDIERRVREIEKEVREVTRAIEESVKKIEKESRDVLRAIAETIRKIEEEVKK

SEQ ID NO: 11071 - protein, 183 aa, Artificial Sequence; identical to SEQ ID NO: 11070
  Synthetic

SEQ ID NO: 11072 - protein, 183 aa, Artificial Sequence
  Synthetic
DEAEEVLKTVKKLLDDLRRRNEDSLRRIEELLKRLRDHSKRVLEEVRRLLEELRRVKERDLKDKEELERLLERVLREAERLLKENEDLLEELERRVRDILRRNREMVEELRRRAKRLLERLRERGVREEVLRKIKKDVEKIVRDSERVIKTIEEKIDRIKKEVKRVTDEIRKRVEEIAEEVRR

SEQ ID NO: 11073 - protein, 183 aa, Artificial Sequence; identical to SEQ ID NO: 11072
  Synthetic

SEQ ID NO: 11074 - protein, 181 aa, Artificial Sequence
  Synthetic
SELEDVLRRSRDLLRRLKELLERLLETVRKLIEEAKELLKKILEDSRKLIREVEEMVRRGDIDDDTLRRIKEENRRLNKELRDRVKKLEEDIRRLIKKLEDEVRKAKEDNERLLKKLRDDEDSEEIRRVIKESKDLSRALEETVRRVERKIEDLLRRIKEEAERVIKESEKLIEDAERATK

SEQ ID NO: 11075 - protein, 181 aa, Artificial Sequence; identical to SEQ ID NO: 11074
  Synthetic

SEQ ID NO: 11076 - protein, 177 aa, Artificial Sequence
  Synthetic
DEDEEVERELKKIKDKSKKVLDKSRKTIDELRKEVERTLRRWTKRSKDLLDKVEAAKRRNVREEELKRLVDEWRKEVDKVREEVERLKKKLKDELRRLEREHRELVREIEEELKRLAERGVPEEVLRKVDTILKEIKRRNEKVLKELRDIIDDLAKKLDEVLRRDEELAKKVTEELK

SEQ ID NO: 11077 - protein, 177 aa, Artificial Sequence; identical to SEQ ID NO: 11076
  Synthetic

SEQ ID NO: 11078 - protein, 177 aa, Artificial Sequence
  Synthetic
SEDEDARRTLREMLEESRKHLKEWEDTSRELEKKSREVLKETRKTIAKLADRVRKAKENNVDEKSLEDLTREAEETLRKLAEDHKRLVKEWREVIERLRKTVEDLVRKIREILKRLAEKGVSEEVLEDIRRKVEKLEEDNRRVMKKDEDAVRRVEEENRKVLKELKERIDRLAEELK

SEQ ID NO: 11079 - protein, 177 aa, Artificial Sequence; identical to SEQ ID NO: 11078
  Synthetic

SEQ ID NO: 11080 - protein, 177 aa, Artificial Sequence
  Synthetic
DEDREAEETIKRLLDRSRKTLEESRKTSEDLRRKSEKVLRETRKSLEDSLRKVREMKKRNVSEELLEKLRKELEDNLRRLERKHRELVKEWRKVTEDLERKHRELIKEIERILKELREKGLDEKVLRDLEEIVRRAAKANKDVLDEDRRVMEEAREENKRVIDEYRKILKEATDELR

SEQ ID NO: 11081 - protein, 177 aa, Artificial Sequence; identical to SEQ ID NO: 11080
  Synthetic

SEQ ID NO: 11082 - protein, 177 aa, Artificial Sequence
  Synthetic
SEDEEAKKTLDELLKKAEELVKKIKETSERLLRKSDKLLEETKKTIKELDDEVKEVKKRNVSEEDLKRLAEKLREILKRLEDRHRKLVEEWEKVTRELAKELEDLRREVKRILDELRKRGVSEEVLRRIEEIIRRVTELLKKVLKEDREVVEEARKKNEEVLDRLKKIIEEAEERLR

SEQ ID NO: 11083 - protein, 177 aa, Artificial Sequence; identical to SEQ ID NO: 11082
  Synthetic

SEQ ID NO: 11084 - protein, 177 aa, Artificial Sequence
  Synthetic
DEDEKAKRMLEEAEKKSKKHVDEVRETSKRLLEESKKLLEETDRSLRKSLERVDRVKKNNVDEKDLKRLLEELEKNLRDLARRHEKLKRDWEEVTRRLEETAKKLVEEIRRILEELRKEGVDKRVLDDIKTKVERLEERNKKVLDDDREMVTRAEEENRRVIKKYRDILEEARKRLK

SEQ ID NO: 11085 - protein, 177 aa, Artificial Sequence; identical to SEQ ID NO: 11084
  Synthetic

SEQ ID NO: 11086 - protein, 177 aa, Artificial Sequence
  Synthetic
SEDEDLDRVAEKLKREHKKSVEEIKRVLKRADEESKKLVRDTERVIEEIKREVEEARRRNIDEELVERLKKKIEDILRTLEERHKKLIKELREILKRLSDESRRLAEETEKVLEDLERKGVDEEVLKKLREIVRRVKEENRKVNEEVEKRLRELEEENKKVIEDLKKTVEELVERLR

SEQ ID NO: 11087 - protein, 177 aa, Artificial Sequence; identical to SEQ ID NO: 11086
  Synthetic

SEQ ID NO: 11088 - protein, 188 aa, Artificial Sequence
  Synthetic
DDLEDIKRRLDEMREEVKRHVKRLKEVAKEIEDEHKETVRRNKEVAKKLAREIDDARRRNRNEEELERIIRRLRETLKRLTDRNKEVIDRSREKLKRLKERSEETIRRLRRKLEEIRKDIERVKKAGADKDKVDKVLREVTEEVKRLEEEIKKVDKEIEEIVRRVERENEEVVRDIARIVEELERKLR

SEQ ID NO: 11089 - protein, 188 aa, Artificial Sequence; identical to SEQ ID NO: 11088
  Synthetic

SEQ ID NO: 11090 - protein, 188 aa, Artificial Sequence
  Synthetic
RELEEVIKRIEKTVTDNERANKESVDRIREIVDRLKKEIEESVRRMRDSVKKLEEEIRRRGASEEVKETVERLMRELEKHIRESEREIEKLAREAEEHIKRSNERVKKSVKELRDLLETVKRLKERGNEEELIRRLEKVLKEHHKRVEEIVKENEDVARDLDRRIKEIVERNRKVLEDLRRRIKELKK

SEQ ID NO: 11091 - protein, 188 aa, Artificial Sequence; identical to SEQ ID NO: 11090
  Synthetic

SEQ ID NO: 11092 - protein, 179 aa, Artificial Sequence
  Synthetic
SEIEDALRRAERVSRESAKKLEDALRKYEKVSRDLKRRLDEVLKRYEDTSRKIAKDLRDNGVDEETVRRLVETSKEDLKRLERELRELARRSDEDLKRLDRELKELVERSKELLKEVERRNIDEETIERLIEKNKREVDKLLKKIEEVIKRNKDEVDKLLKKIEEVIDRNRRAMEEIAR

SEQ ID NO: 11093 - protein, 179 aa, Artificial Sequence; identical to SEQ ID NO: 11092
  Synthetic

SEQ ID NO: 11094 - protein, 184 aa, Artificial Sequence
  Synthetic
SIEDELRKIVEDIEREIKKLEDDLRRVSKDHRDEVRRILEKLKEHIERLEEDADRLKKAKEPKEKLDERVERLKEHSKKVVKEARDRLRELEERNRKIDRELEEELKKLEKRVREEVKKVRTRKDTETVREMIKRLEELVRRVKRRIEDVIRRNREVVDESRRRIEKAIEDNERVLKKIEEEVK

SEQ ID NO: 11095 - protein, 184 aa, Artificial Sequence; identical to SEQ ID NO: 11094
  Synthetic

SEQ ID NO: 11096 - protein, 184 aa, Artificial Sequence
  Synthetic
SIEEEIKKVVKELEDEARKLLKKIEEHSEDLKRKLEDLLRKVEDHIRRLREEIERIKRENLDEERVKRALDKLEESSRRVVEELKKKVKELRDSSEELKKEVRKKVEELRDRVEKEIEEVKKRKKTETVKKAIKELRDLVDKIEEDLKRVLDENERVLREIARKIDEIIEKNERELRRVLEEIR

SEQ ID NO: 11097 - protein, 184 aa, Artificial Sequence; identical to SEQ ID NO: 11096
  Synthetic

SEQ ID NO: 11098 - protein, 172 aa, Artificial Sequence
  Synthetic
DEAEELERRLREEVKRVETDLRRTTRELEREVEEVRRRLEKTSRENNDRSEKAEREDSRDKRLEEELKRESDRLEKEHRDLIKKLRDSLEKMRRDHKRLIDELRKRLEDLERKIKDKEVVDRLREIITDLVRKLEENVKRLEEIIKRLEEELKRNVDRLRENSKRLAERLRT

SEQ ID NO: 11099 - protein, 172 aa, Artificial Sequence; identical to SEQ ID NO: 11098
  Synthetic

SEQ ID NO: 11100 - protein, 172 aa, Artificial Sequence
  Synthetic
SEAEKVLEEVRRLIEEIRRRLKETTDDVRRLVRELKEEAKRLLEEDKRLVDDLRRRNAKDETLTRRLRRHAEETKKTIEELIRALEEALDRLRKRHEELLRELDETLRRLEERIEVKEVVDKIRKVAEELKKELKDNADRVRRIAERLKEELKRVAEKSDRIIRTLEEELKR

SEQ ID NO: 11101 - protein, 172 aa, Artificial Sequence; identical to SEQ ID NO: 11100
  Synthetic

SEQ ID NO: 11102 - protein, 172 aa, Artificial Sequence
  Synthetic
SEVERLVREVEKDLERERRRLEKTVRDSERLVRELKETLDRLLKRDKDVVDDARRKNSKDERLRKRLEEHLRRTKEELRRLKEENRDVARKLREEHKRTEERLDERLEDLERKISDKSVVDRLREIVKELKDRNRKVVKELEDIHRDSDRELDDVVRRSDEIIRELVERLKT

SEQ ID NO: 11103 - protein, 172 aa, Artificial Sequence; identical to SEQ ID NO: 11102
  Synthetic

SEQ ID NO: 11104 - protein, 181 aa, Artificial Sequence
  Synthetic
DLEEIIKTIREINERLNRRVREVEERLRRTSRELEERIRDVVRKLREINDRLRKEVEARGLDKGKLEEAERESERTERENEKLLKRIEDSLRKSEEEIRRVIKKLEDESRELEKRLEDLLREGRVDERLVRENEEAVKRLTKELDDLLRKNEELIRRLEEEAKRVLERNEKIARDVREELK

SEQ ID NO: 11105 - protein, 181 aa, Artificial Sequence; identical to SEQ ID NO: 11104
  Synthetic

SEQ ID NO: 11106 - protein, 181 aa, Artificial Sequence
  Synthetic
DLEEIIRKIREINRELNETVKKVVRELEEDTRRVKRRIEEIVKELERTTRELDKRVKDSGLDKSELDRIRKELRDSEEELKELLKEIEERLRRSNDKLRRVEEKIRKRSEELKKRLEEALREGRVDEKLVEDNRKEVRDLEEEARKLLRENHELTKRLIEEAERILKKNEELIRKIEEEER

SEQ ID NO: 11107 - protein, 181 aa, Artificial Sequence; identical to SEQ ID NO: 11106
  Synthetic

SEQ ID NO: 11108 - protein, 181 aa, Artificial Sequence
  Synthetic
SLEELLEELERILREVEERIKEVVRRLEEDTRRVEEEIRRIVEELKRINRELEELVRRTGLDKSELDRLRRESEETEKRNRRLEEEIKKRLEESNRRIKELLDRAKERLKKIADDIKKVFDDGRVDERLVKEVRDTVKELEDELKELLDRNHELTRRLEEEAKRLLEENKKRADDVKEELR

SEQ ID NO: 11109 - protein, 181 aa, Artificial Sequence; identical to SEQ ID NO: 11108
  Synthetic

SEQ ID NO: 11110 - protein, 184 aa, Artificial Sequence
  Synthetic
RLDEVIRRVEEVIRDVERRVAEVVKRLRDSSKTVKEKIETVIRRNKEINKRLEDLIRESGVPEEVKRKAEEVLERSDRENEKLLREADRRLRESEKKLDDLRKEIEDTVRRLRERLKDVARRGVPEDDLRRTLEEVKRTIDKLKEDAERLLEENKDLIRRLEEELKESSKRNDTLVKKLKKELK

SEQ ID NO: 11111 - protein, 184 aa, Artificial Sequence; identical to SEQ ID NO: 11110
  Synthetic

SEQ ID NO: 11112 - protein, 182 aa, Artificial Sequence
  Synthetic
REMEEALKRNNELSERLRRELKRVLEENHRLSRDLEKKLRDLLERVRELVERLDRMKEEGKADEDTLDKLRREVEDLLRRLEELLREIKRKSEELLERLKRLLDELRKESRKLLEDLRRKSDTEEVRRVLEEIRRDTEELEKDARRVLTELRRNLERLRRKVEKVLEEIRRILEELERRVRK

SEQ ID NO: 11113 - protein, 182 aa, Artificial Sequence; identical to SEQ ID NO: 11112
  Synthetic

SEQ ID NO: 11114 - protein, 175 aa, Artificial Sequence
  Synthetic
DKLEKLEEKLEKDVRRWDDELRRDLEDSKRLVDTIRKRLEKLLRDHRELVRRIRELLRDGRVPEKLMKELEDFNRRVAEEVKKLRDDLRRKLRESAERHKKIAEELRRELKRIEDEVGRNEVVRRLEEEVRRLEEKVKEVLRRNEEEVRRLEKDIERVLRESTKIVEDLKDEVRK

SEQ ID NO: 11115 - protein, 175 aa, Artificial Sequence; identical to SEQ ID NO: 11114
  Synthetic

SEQ ID NO: 11116 - protein, 184 aa, Artificial Sequence
  Synthetic
SVEEVVEELERIHREVKREIDEVVDRLREINEEVRREIKEVLDKIREDLERLKEEIDRDLKDKKTADRLKEEIDRLLREVEETVERLERRHEDAKRRTRERVEELKRRHDKVLDEIRELIRRGVSDDILREMLRKSEELVRESREDLKRLLEEHRKLVEESRRELERLKKEVKDAVEEVRRRLK

SEQ ID NO: 11117 - protein, 184 aa, Artificial Sequence; identical to SEQ ID NO: 11116
  Synthetic

SEQ ID NO: 11118 - protein, 184 aa, Artificial Sequence
  Synthetic
SVEEVVEELKKIHEDVKRKIDEVLKRLKRINDELRKRIREVLERLRREAEKLMEAIRRDARDRDTVKKLEEELRRLLKRLEDTARELVKRSDKLLEDTERTARKLKEDHDRVRKKIEDLVREGVSDDILREMLKESKELVKRSEKTLRELEKRHRDLVREVEETLKELEREVERKVREVERRVR

SEQ ID NO: 11119 - protein, 184 aa, Artificial Sequence; identical to SEQ ID NO: 11118
  Synthetic

SEQ ID NO: 11120 - protein, 184 aa, Artificial Sequence
  Synthetic
SVKEVLDEIRKINDDARRRLEEVLKDLKRINDELKERVDRVHDRNRRLLEELKKEIRTKLKDKRKADELERRLKELLEESKKLADEMKKRSDDVLRETERTARELTERHRKLLEEVKRLVEAGVSDDILREMLERNKELVKESKKVLEELEREHRELVREVKKRLDDSTEKIKTEVDKVKKELD

SEQ ID NO: 11121 - protein, 184 aa, Artificial Sequence; identical to SEQ ID NO: 11120
  Synthetic

SEQ ID NO: 11122 - protein, 184 aa, Artificial Sequence
  Synthetic
SVEEVIKEIEKIIRDLKEELKKVLTELEKRNEELKRRVEEVHEESRRLLDTIRKEIERKLKDKKEADRLEEELRRALKKDEELVREVIKRSEDLLRETRKRAKELSDRLEELRKRVEDVARAGISDEVLEELLRRVKKTVKEVREDLDRLRKEHEELVDRVREELERSLREIKERLERIKRRLD

SEQ ID NO: 11123 - protein, 184 aa, Artificial Sequence; identical to SEQ ID NO: 11122
  Synthetic

SEQ ID NO: 11124 - protein, 180 aa, Artificial Sequence
  Synthetic
KEAEELLEKVRKLVKEIEDRLRKSSEENRELVKRVEDELRETTKKNKKLVDEIKERREKSDKDKKKVDDDIRKELEDVSRENKEILKRIEDESRKSEEKNKKLADDVKRELDEMRREVREKVKDEDVLRRIEEILERVERAVREVLRRNKEINDRLRERVEDVVRKNEDILRRVLDEVRK

SEQ ID NO: 11125 - protein, 180 aa, Artificial Sequence; identical to SEQ ID NO: 11124
  Synthetic

SEQ ID NO: 11126 - protein, 180 aa, Artificial Sequence
  Synthetic
DEVERLIEEVDKLVKTIEEELRRSSEKNKDAVRRVKRRLEKSNEDNREVVRRVDKERRDSDKDRKKVRDEIEERSRRTEEENKRLLKELKEESERLEEENRRLLEEVERRLERMEEEVRKKVKDEDVLRTIKEILRELRERVEEVAKRNKEINDRLNEDVERVVRENKELNDRLRERVDR

SEQ ID NO: 11127 - protein, 180 aa, Artificial Sequence; identical to SEQ ID NO: 11126
  Synthetic

SEQ ID NO: 11128 - protein, 180 aa, Artificial Sequence
  Synthetic
DEAEKLIEEVKRLVEDLERKLDESSRRNEETVKRIDKELKDSNKKNRDTVKKVTDTAKDSDKDREEVLRRLKKRSEETKEENKELLKRVRERLEKVKEDNDRLLEEITRALRELEDKARKTIKDEDVLRTIKKILDDLERRVEEVVRRNREILKDLERKVRRVFEENEKLNRELEERVKT

SEQ ID NO: 11129 - protein, 180 aa, Artificial Sequence; identical to SEQ ID NO: 11128
  Synthetic

SEQ ID NO: 11130 - protein, 178 aa, Artificial Sequence
  Synthetic
SKADEVEKDVDRKLKEVKKRLDETRESVRRKLEEVRRELEESEKSVETVLREVKKTKDRGTSEEALKDIKRRLREHNKRLTEKHEKIKRELDKHNKELTDDHERIKEELKEKVRKLEEDGLEEEVLKKLKDIATELRERLDRNNKELTDIHRELKERLDRNNTKLSEIHKRLEEELDK

SEQ ID NO: 11131 - protein, 178 aa, Artificial Sequence; identical to SEQ ID NO: 11130
  Synthetic

SEQ ID NO: 11132 - protein, 178 aa, Artificial Sequence
  Synthetic
SEVDEARKRVRDVLEEVRKALEETEKSVRRTLEEVEKRLKESEDSVRKVLEDVRRELERGTSEEVLKKIEEDLRRHNKRLTETHKEIEDRLRDHNRKLTDLHRRLKKELDRLLKELKDKGLDEEALRELEEIARRLERELEKNNKDLTDIHETLRRRLEDNNRKLSKIHEDLARELRK

SEQ ID NO: 11133 - protein, 178 aa, Artificial Sequence; identical to SEQ ID NO: 11132
  Synthetic

SEQ ID NO: 11134 - protein, 182 aa, Artificial Sequence
  Synthetic
KEAEDMLREVKRLIDRIKKVLEDVLKAIEELIRRLEDIHRKVNEDSERLTEDLKRTIGTERDEAREVLKRLEDLNREIRKRSEEVKRELRKVLEDARKRLEEIERELEEMLRRLEREVEKGTSKEKIEELLRRVEELIRRIEEEVRKLLEDVERKIRESVKEAEELLRRSKKEIERVKREDT

SEQ ID NO: 11135 - protein, 182 aa, Artificial Sequence; identical to SEQ ID NO: 11134
  Synthetic

SEQ ID NO: 11136 - protein, 182 aa, Artificial Sequence
  Synthetic
SEAERVIRESERLTDELRKELEKALRRSKKLSDELRKIHEDANREVRKLIEDLKRTIGTESEEARDVLRKLEKELDRLRRESERVEKESEDLNREIKRRLDELLRRSEELNERIRDLLRKGTREEILKKLLDESRDTVRRVEDTVRKLVRRSEEFVRKSKERVKRLLDDVRRKIEDVKRKTK

SEQ ID NO: 11137 - protein, 182 aa, Artificial Sequence; identical to SEQ ID NO: 11136
  Synthetic

SEQ ID NO: 11138 - protein, 178 aa, Artificial Sequence
  Synthetic
DEEERLLREAEEMHERNKRLIDKLRREVEESLKEVEREIRRLLTDIARLVRRVEELKKNNIDRKEVEDLLRRIEEELEKIERELRKILRDDERKLKEAEDRLRRMLEENKRVLRRIKEENKEAEEVLREIRKLVEESRKILEKVIRDWRRITEELKDRLRRVLEELKKLVDELRKTLT

SEQ ID NO: 11139 - protein, 178 aa, Artificial Sequence; identical to SEQ ID NO: 11138
  Synthetic

SEQ ID NO: 11140 - protein, 178 aa, Artificial Sequence
  Synthetic
SDRERLLEEIKDLNRRNKEILERILRRSEELLKKAEDLLDKIKRDSDRAARKVEELKRRNISEELVKELLKELEDINRELKKEIERLLKEWEKDSRELEDEIRRVLEENRKKLRDVKEENKELEEVLRRLEKIVRDSERELRRVREEDKKVADEIREKLKRVHDESERIVRELKETLR

SEQ ID NO: 11141 - protein, 178 aa, Artificial Sequence; identical to SEQ ID NO: 11140
  Synthetic

SEQ ID NO: 11142 - protein, 181 aa, Artificial Sequence
  Synthetic
KELEDVKKRVDDLLRENERVVRELLESSKRLNEENEEAVRRLDESSKELAKRVKEIKDRGTSEDAVRKVDEELKEHLKEVKKRLEDLVRKNEEHLRRVKETSDRMKKKNDEELDRLRTKDGDDRDVRRVLEFVKEVIKEIERIHKKVNDDNRKLIEESIRRLKKVLDDNKRVIDELRKTLK

SEQ ID NO: 11143 - protein, 181 aa, Artificial Sequence; identical to SEQ ID NO: 11142
  Synthetic

SEQ ID NO: 11144 - protein, 179 aa, Artificial Sequence
  Synthetic
DEEEEVKKRVEELLDELRKSIKKSVDDSKRVLDEARKSVERSREELEKLLRALEDILRKGNKTGELLERLKRLLDKLREDADRWRKELEKLVEDLKRHADEWTKELDRLIRELRKRLEAREDDLRRLEEEAKRLVEEVRRRDEEHLKRSEELLKEVEERDRELLKRARDLFEDVRRKIE

SEQ ID NO: 11145 - protein, 179 aa, Artificial Sequence; identical to SEQ ID NO: 11144
  Synthetic

SEQ ID NO: 11146 - protein, 179 aa, Artificial Sequence
  Synthetic
SEKEEVAKRLEEALKRLEDTIRKVSEENERVLRTLEDRARKSAEKVERLLEELRKRLEDSNNQGELLETLERLIERLRRETEDLKRKLKELVTDSRRRTKELEDKLKERAKELRKEIKADKLDLEELKKRVEELTREVEEEIRRLKETSKRLEEEVKRLIEDHDRRVRELKDEVERRIR

SEQ ID NO: 11147 - protein, 179 aa, Artificial Sequence; identical to SEQ ID NO: 11146
  Synthetic

SEQ ID NO: 11148 - protein, 177 aa, Artificial Sequence
  Synthetic
DEAREVIKTLRKLLRDSAEILTRVTEEDREVLRELAEIIKKVTDEDRRVLEEARRELDDERVLDELEKLSRDIEKELEKLLRDLTKRSEDIRRDVERLLTDTERDIRRLIRELERRQGDRILEELLERIKRLHEENKKAVDRWREESKKLKEEVKKKVKEWKDTSEELLRRVKERAR

SEQ ID NO: 11149 - protein, 177 aa, Artificial Sequence; identical to SEQ ID NO: 11148
  Synthetic

SEQ ID NO: 11150 - protein, 177 aa, Artificial Sequence
  Synthetic
KEVEEVIKTLRRLSEKLAREHKKVIDELRDLLRRSEEELKRVAKADEDLLDEIRRKVQDRSVLEELRKKSETMKRELKKLLDDTRKKIEDIERTNERVLREHRKKTEDLIRELDKRRGEEILEEVKERIDRLVKENKEIVDRSRELAKELHDRNREMLTKWLEDSKRLVEEAEKKAR

SEQ ID NO: 11151 - protein, 177 aa, Artificial Sequence; identical to SEQ ID NO: 11150
  Synthetic

SEQ ID NO: 11152 - protein, 177 aa, Artificial Sequence
  Synthetic
DKEKEVTDELRKAKRDNDEVVKEIEKESRRLLEEVKETVKRDKKVLRELEEEVKEAKKKNVSEDLVEKLLRKWEKVSKELKDRHRRLIEEWDKVTKELEKKSRKIIDENRKILKRIADRGVDKKVLDEIRKVLTEAKKMHDDVLRRDREVLETARKLSEDSKKENEDVLRKVAEELR

SEQ ID NO: 11153 - protein, 177 aa, Artificial Sequence; identical to SEQ ID NO: 11152
  Synthetic

SEQ ID NO: 11154 - protein, 176 aa, Artificial Sequence
  Synthetic
DEERDLERKLEEVIRRAKETSERLNRELERVIEEVRRRHEEAKRRAEEVIRRILKRLGTEREEAKDVVRRLEEILRELDDHVRRSEETAKEILDRSRKKSEELERKLREVLRTLREARLDKDEVDELVERLKRDIDRWAEDVKKLIEDLRRMVERNLREIDKLLKDLKRVVDETKK

SEQ ID NO: 11155 - protein, 176 aa, Artificial Sequence; identical to SEQ ID NO: 11154
  Synthetic

SEQ ID NO: 11156 - protein, 179 aa, Artificial Sequence
  Synthetic
SEADKLLDEVRKRVEDMERRLEELVREDRKLVEDHHRDNKRLLDRVKKLAEDMERLIDRGEVDEEVIKRLEEELKKLLEDNKRHLDELKRRSTELLRELRKLLEELEKTLKDLLREKSGRSEKAEDVRRRLKELAERVRRVVRRVEEESKRTLKELEKSSKELAKKLRDLVETVERRLR

SEQ ID NO: 11157 - protein, 179 aa, Artificial Sequence; identical to SEQ ID NO: 11156
  Synthetic

SEQ ID NO: 11158 - protein, 179 aa, Artificial Sequence
  Synthetic
SRVDDLLREAERLAEEHHRLNKKLVDEDRELVRRHHETNRRVLEEVKRLVEEAEKLIRRGDVDERVIRELKERLRDLLRKNREHLRRLEETSKDLLRRNEEHLKRLEETLEDLLKRFSGRSEEAKRVAERVRRLLERLRESSKRVKETSKETLERLRRSSEKVEEDLRKLIEDVERAAR

SEQ ID NO: 11159 - protein, 179 aa, Artificial Sequence; identical to SEQ ID NO: 11158
  Synthetic

SEQ ID NO: 11160 - protein, 179 aa, Artificial Sequence
  Synthetic
RELEELVKRDREEVRKHHELNKELLDRARKLVRDHHERNKRLVREDEELVREAKELIERGEVTEEKIEELMRRSKDLLRDNRRHLRELEDTLRRLLEENKRHLDDVRRRSEELLRDKSGRSDEARKAKRESERTLKELEESSREVEKELRRLLKELRESSKKVEDDSRKSLERVERALR

SEQ ID NO: 11161 - protein, 179 aa, Artificial Sequence; identical to SEQ ID NO: 11160
  Synthetic

SEQ ID NO: 11162 - protein, 179 aa, Artificial Sequence
  Synthetic
SKADELVKKDREKVEEMERRLRKILREVEELVKEHHERNKRVLDEVKKRVDDAKELIKRGEVTEEVIRKLEEELKDLLRRNEKHLRELEETLKKLLEEATRLVKKLEDDSRRLLKDDSGRSRKAEEVEKDSRRTLERVKDVLRKVEETLRELLDRLRESSERVTEALKRLMEEVREALR

SEQ ID NO: 11163 - protein, 179 aa, Artificial Sequence; identical to SEQ ID NO: 11162
  Synthetic

SEQ ID NO: 11164 - protein, 185 aa, Artificial Sequence
  Synthetic
SKLEALVKEVEELVKKAKKDLDRLVEEDKKLAEEHHDRNRKLVDTVRELVERAKEDIDRRGKTEELEELLRRLAEEIERLKRENEKHLRELERTSRELVRRLEELLKRLAERIKKIIDDAERDVSDKKELEEVVKELRRLLKELEEVVRRVARESEKSLEEVRRSSEEVKKALDKLLKELEDAVR

SEQ ID NO: 11165 - protein, 185 aa, Artificial Sequence; identical to SEQ ID NO: 11164
  Synthetic

SEQ ID NO: 11166 - protein, 183 aa, Artificial Sequence
  Synthetic
SELERIVEEVKKLVEDHKKKLKDIVEEVEELVRRHEKKLEDILRRNEKRVRELKEEVRRRGKLEEELVKDAERESRKNKEEIRRSNEEIHRRLKELKERIKESNDKLHEDLKRLTDDIDRRVRDRKKAEEVKRRLEELLKEANKASEEVKRTLDKLLEDVNRESERVERASDELLKRLRDDAR

SEQ ID NO: 11167 - protein, 183 aa, Artificial Sequence; identical to SEQ ID NO: 11166
  Synthetic

SEQ ID NO: 11168 - protein, 183 aa, Artificial Sequence
  Synthetic
SELEELVKTVKKLVEDHKRRLKELLERARRSTEDLKRKLEKLVRDVRKLVEDAKDAIRKSGKADERLLETIKRALEELKRRARDLLRRHKEEIDRLIKDIRRSNEELHRAAERLRDELRKRVRDKDELKKVEDALRRLLEELNEVSEEVERALRELHREVEEAIRRVEKELDRLLKEVEDAAR

SEQ ID NO: 11169 - protein, 183 aa, Artificial Sequence; identical to SEQ ID NO: 11168
  Synthetic

SEQ ID NO: 11170 - protein, 182 aa, Artificial Sequence
  Synthetic
RELEEILKESEKSVEDIKRELEKIKKKSKTDLEKWKDDLRKIRKEIADLVRKVTREVEDGRSDSRLRDLERRLREVVRRIEEELERMIKTHEDRVRELEERLRKIIDDHRRKVEDLLRKIGSEDEKVKRVLDELKRSLEEVRRALEEVREVLRESLKRLRDLAEDLKRELRELLKELEERAR

SEQ ID NO: 11171 - protein, 182 aa, Artificial Sequence; identical to SEQ ID NO: 11170
  Synthetic

SEQ ID NO: 11172 - protein, 177 aa, Artificial Sequence
  Synthetic
SEKEDVERRIRRLIERLRRMIEELRRRNTDILRKVRELVEEVKKADERSIREVEKLLRDVDEELKKRIKTLIDRSREETEEMDRDVEKLIRESEKRTDELEEELRRLARELEKVVTRDVTDLDELIERAERLVREIERKLRKAIEDSKDLLRRIEERLRRLIEKSEKLLRDIKREVD

SEQ ID NO: 11173 - protein, 177 aa, Artificial Sequence; identical to SEQ ID NO: 11172
  Synthetic

SEQ ID NO: 11174 - protein, 182 aa, Artificial Sequence
  Synthetic
SEIEKLVKEIEDHLRRLKEEIEKSSRELKKHLDELERRADKIVRDLRRLVEEIKDTIRREGPRDELLRRLEEALRRIEETLERLRRDHKRLLDRSEDKLRELEEDHDRLLEEVRERLRKSELPREAVERLRKALKESKERLKKALEDNRRTLKKSEEDLKKVMEEVKETLDRVKKEVERALD

SEQ ID NO: 11175 - protein, 182 aa, Artificial Sequence; identical to SEQ ID NO: 11174
  Synthetic

SEQ ID NO: 11176 - protein, 182 aa, Artificial Sequence
  Synthetic
SEIEKLARDAEEHLRRLLEELRKSSDDLRRHLEELKKKLKEIVDRLKELVDRIKDTIRREGDAREIEKALEKVLREVEETLRRLLEDHKRLLEESKKRLKELLKNHEDLLRKLEDDLRKAELDKKVIDDLRRILEESARRLKRAAERNDETLKESADRLRRAIDRLREVAEKLSRDVRRAAK

SEQ ID NO: 11177 - protein, 182 aa, Artificial Sequence; identical to SEQ ID NO: 11176
  Synthetic

SEQ ID NO: 11178 - protein, 182 aa, Artificial Sequence
  Synthetic
SEIEDIARRLREHLEDLKKKIKDSSDELRKHLEEVKRRIERTSEKLTDDVRKIEEKIRKDGPREKIEEDLKEALTRSRTELKKLLDDHRRLLKRSDELLKKLLENHKRTLDRIKEELDRSELPEERIRDLEKILEDSERELRDMARKNRETAERSERELRKVLRENDRTAKKLTDDVRRTAK

SEQ ID NO: 11179 - protein, 182 aa, Artificial Sequence; identical to SEQ ID NO: 11178
  Synthetic

SEQ ID NO: 11180 - protein, 182 aa, Artificial Sequence
  Synthetic
DEIDKLVEDVERHLEKLLREIERSSEELKKHVEDLREKLRDLVRRLKEVVDEIRKTVRDKGPREEILEDLKRILEEIDDTLRKLLANHDELLKRSDDLLRELIADHERLLKRVEEELKRSELPKEDVDRLREMLERSRRRLKRAADENRRTAEKSRKELKEVAERVRRALERMRREVEEELR

SEQ ID NO: 11181 - protein, 182 aa, Artificial Sequence; identical to SEQ ID NO: 11180
  Synthetic

SEQ ID NO: 11182 - protein, 182 aa, Artificial Sequence
  Synthetic
SEIEEIAKKLEEHVKRVVEEIRKSSEEAKRHVEDVKRKIEELVRELARLVKEIKEAIRRDGPRDELEERLKKVLDEVRKRLEELLRNHEELLKRSDDRLKELLKNHEEELRRVEDELRRIELPKERIDELREIAKRSRDKLKKVADENRRTLEKSLRDLARAVEELRRRAKRLEEEVRRERT

SEQ ID NO: 11183 - protein, 182 aa, Artificial Sequence; identical to SEQ ID NO: 11182
  Synthetic

SEQ ID NO: 11184 - protein, 182 aa, Artificial Sequence
  Synthetic
SDIERLVEEVEKHLKELEDEIRKSSEELKRLAEEISRDIRRTSEELKKLIEDIKDTIRRDGTRDEIERRLEEAIRRSRERLERLKERLDRSVKESRKKLKRLEENHRELLKRLEDRLREIELPKEKIDRLRKILEESEKRLEELARENERTVKEVKKEIDDMVRENEETAKRLLDEVRETLR

SEQ ID NO: 11185 - protein, 182 aa, Artificial Sequence; identical to SEQ ID NO: 11184
  Synthetic

SEQ ID NO: 11186 - protein, 172 aa, Artificial Sequence
  Synthetic
DELEKLLEDLRRKIRKIKEDLRKTSKENRDELRKSKKRLEDLVREVRRLVEEIRKLKEQDRREVEKTLRDLRKKIEDAIRESEERSKKLLDDNKKTADDIRRDLKRTEERLRKEGISEEVEKTLRELIKEIEKVLEDDERTVRELIERNKELLDRLAKEVDRLIEEIKREAD

SEQ ID NO: 11187 - protein, 172 aa, Artificial Sequence; identical to SEQ ID NO: 11186
  Synthetic

SEQ ID NO: 11188 - protein, 175 aa, Artificial Sequence
  Synthetic
SEADKVRKELDDVRRRVKKALDDIRRELEKLVKEVEDALRDHERSNEELVREVREKLKDDKDVERTVEKSHRDSRRLVEEIKREVEKLRERLERVLRKIEEDVKRLKEKLERLIEEGNVDDRVVEEIRDMMRKLKRELERIVEEAKKVVEDLKRRLEEVSRRSADLVRRLKERAR

SEQ ID NO: 11189 - protein, 175 aa, Artificial Sequence; identical to SEQ ID NO: 11188
  Synthetic

SEQ ID NO: 11190 - protein, 175 aa, Artificial Sequence
  Synthetic
SDLERVKKDLEDVVRRVEEVLREHKRTNDEIIREIERLIEELRKENERLAREVRDKLKDVDDVRRAVKKSHEDVREVLRRLKEEADESHEKSKEVIKEIEKRVKKLLEDLDRLIKEGRVDERVVDEIRKVVKELEERLRRLSEESRKLVKDIKEKLDKLAEDSRRLVEKLERDAK

SEQ ID NO: 11191 - protein, 175 aa, Artificial Sequence; identical to SEQ ID NO: 11190
  Synthetic

SEQ ID NO: 11192 - protein, 182 aa, Artificial Sequence
  Synthetic
REFEELVERVKRVVEELTRRLRETSEETKTVLEKLRKELEEASRRIEDVLRRLTEKIRKDGRGGELKEEVERELKRLRDESEELVRRVEEVVDRLRRRHEELKKRAEDVLRKLREELKEMRDRGKGTEELEETLERLVEAIRDALRKDEETMRRVAEAIRRLLEDHRRSLEEVLEKIRDALR

SEQ ID NO: 11193 - protein, 182 aa, Artificial Sequence; identical to SEQ ID NO: 11192
  Synthetic

SEQ ID NO: 11194 - protein, 182 aa, Artificial Sequence
  Synthetic
SEAEKIVEDIRRVIRELKEKLKKTSEDTEDTVRKLSRRLRELAKRSAELVERVTREIRKDGPGGELVRKVRELLKKSSKEIEDLVREVEEKVEELKRRHDKVVKEAEEVLRELEKRVDEVRKKGLGTEELEETLRRVAEEIRRLLEEDRETLRRVERKIREMLKELEEINRRLIKEVDEEVK

SEQ ID NO: 11195 - protein, 182 aa, Artificial Sequence; identical to SEQ ID NO: 11194
  Synthetic

SEQ ID NO: 11196 - protein, 182 aa, Artificial Sequence
  Synthetic
DEVEEIVRRIEEVLKDLRRRLETLARESRDLVRKIKEELRRHSDESRRLLERIKERIRRDGSGGELVRDVERLLKESSDTLEELKRRVRELLERSSKKVEDLVREAEKVLKKLEEDVKRMRDKGKGTDELKKEADRVKKEIRDMLRKLKKINDDLIREIEEALKDNERTNREIIRRIEEELR

SEQ ID NO: 11197 - protein, 182 aa, Artificial Sequence; identical to SEQ ID NO: 11196
  Synthetic

SEQ ID NO: 11198 - protein, 182 aa, Artificial Sequence
  Synthetic
DEAEKIVRDIEETVRRLARELEKHSEDSRRLVERIKEELTRHSKKVADVVRELKKRIKRDGSGGELVEDAKRVLRTLEETIEKLKRDVERLVKESSDSIRELEERVRKVLEDLRREVEEARRRGKGTEELEKRMRRLVKEIERMLEENKRTNEELVREIEEALKKNEETLRRLKREIEEALR

SEQ ID NO: 11199 - protein, 182 aa, Artificial Sequence; identical to SEQ ID NO: 11198
  Synthetic

SEQ ID NO: 11200 - protein, 175 aa, Artificial Sequence
  Synthetic
SEAEELVKDAERVVEELERRLRKVSEDIDREVKKIKRELDEHSKRVKETVDDVRRRNLPEEDVRRIVEELKDSLEKLREKLERKREEIRRRSEKLKREADKVLEELKKKLDEIRKKGLGTEELKKRVEDLIRTIKELIKRHDDSVKEVEKRIREMLERNRKSVEEVIEELKRTSK

SEQ ID NO: 11201 - protein, 175 aa, Artificial Sequence; identical to SEQ ID NO: 11200
  Synthetic

SEQ ID NO: 11202 - protein, 182 aa, Artificial Sequence
  Synthetic
SELEELVKEVKELVDRSKEELKKLSEELKKLLDDLIKRIEDLSRRSKRLVEELRRRVEERGRRKDLLRRAREELRKSDEELDEIEKRAEKRVRDSKRRVREIHKESERRLREIRREIEERVRGEEEMKRVEEELKRLREEDREAVERHDESIRKLREDLRRAVETHKKSNRDLLREVEETVR

SEQ ID NO: 11203 - protein, 182 aa, Artificial Sequence; identical to SEQ ID NO: 11202
  Synthetic

SEQ ID NO: 11204 - protein, 179 aa, Artificial Sequence
  Synthetic
DEVEELIRKIEDLLRRIEEKVTKAIRKSERLLEEIKKKIKEMIDKSERLVEEVERRTRNSDKDKEEVVRRLKKEAEDSHRELEDLIRRVEEELRRSHDELRRLVEAVRKEIKDLEREVEESRASEDVKRVLKKVADDVERLLRDLERRNRKVREDVKRVLEELRKSNERSIRRIDETLR

SEQ ID NO: 11205 - protein, 179 aa, Artificial Sequence; identical to SEQ ID NO: 11204
  Synthetic

SEQ ID NO: 11206 - protein, 179 aa, Artificial Sequence
  Synthetic
REIEEIIKRARELLEEVEEEWRRLIEKSRRLLEELKKRWDKLIEKSKDLLRKIEKTTKDSDKDKEEVVRRLEEEAKKSHEEVKKAVDDSRKETKESHEEVKRVIEESKKRTEELKERLERNNIDDELRKILKRVEDENRRLVEEVERSNRRSMEENERLAEEVRRSNKDVIDKIRERLR

SEQ ID NO: 11207 - protein, 179 aa, Artificial Sequence; identical to SEQ ID NO: 11206
  Synthetic

SEQ ID NO: 11208 - protein, 184 aa, Artificial Sequence
  Synthetic
DELERLSESVKKAERRIERLNEELNERVKEVTKAIDDLNKRLNDESKRVKEELRKVLARSDREEVERKLRKLEEELDRENKRLNDESEKLKRELEERNKKVNERSKRLVERLRRVLEEIRRRKVPEEVIKRVLDDVERAVDEVRKLIEDVLKEHEDILREVKKELDKAIERHKEILKRVREDIK

SEQ ID NO: 11209 - protein, 184 aa, Artificial Sequence; identical to SEQ ID NO: 11208
  Synthetic

SEQ ID NO: 11210 - protein, 184 aa, Artificial Sequence
  Synthetic
SVLEDLARKVERVIREAKKVNEELNRRSEEVRRRADEVVADLNRESKKVDDELKKVLARSTREEVARDLERLRRELEELNKRLNDRIEEIKERLERLNERVNRETDELVRELKKRLKEVEDRQVPEEVARRVVEELKKVLKEIEDEIRRVIERHKEALDEVRRLVKELKDRHDKILREVREKIR

SEQ ID NO: 11211 - protein, 184 aa, Artificial Sequence; identical to SEQ ID NO: 11210
  Synthetic

SEQ ID NO: 11212 - protein, 184 aa, Artificial Sequence
  Synthetic
SSEDRLRETVEDVIRRARDANRELNKASRDVEEESKKLNKELNDRSRKVERDLEEVLRRSTDEELARRLEELRKELRKLNEDANRRSKKLIEELREKNKEINKRTDKVVKELKRKLEEVEKRKVPEEVIERLIRDLRRVLEEIKREIEEALRDHERVLKENEDMVREILRRHEEILKRMTDEIR

SEQ ID NO: 11213 - protein, 184 aa, Artificial Sequence; identical to SEQ ID NO: 11212
  Synthetic

SEQ ID NO: 11214 - protein, 184 aa, Artificial Sequence
  Synthetic
SVLERVADELRKVEEAIDRLNKELNDAVERVERESRRVNKELNDASERVERELDEVLKRTRRKEVADRLEKLKEDLRRTNEDVNRRSKELIDRLREENKRVNEESERIKDKIRRDLEDIKRRKVPEEVAKELIDRIRKLLDDIRRKLEEVLKRHEEVLKRNEDTIRKVLKRHEEILEKVKRDIK

SEQ ID NO: 11215 - protein, 184 aa, Artificial Sequence; identical to SEQ ID NO: 11214
  Synthetic

SEQ ID NO: 11216 - protein, 184 aa, Artificial Sequence
  Synthetic
SSKERLREAVERVERESDKVNKELNDKSRRVTEELRKLAEELNRRSKEVEEELDKLLARSTRKEVADRLEDLKRRLRELNKDLNRRLRELEEELRRLNEKLKRESEELKERLRRLLEEVEKRDVPEEVIRRLIEELDRLLEENDRRIKKAIEDHKRILEKAEREVREILRRHEKILEDVREEIR

SEQ ID NO: 11217 - protein, 184 aa, Artificial Sequence; identical to SEQ ID NO: 11216
  Synthetic

SEQ ID NO: 11218 - protein, 171 aa, Artificial Sequence
  Synthetic
DEEEDLRRAIERVIETVRRLVERVEEESKRVADELRKLTKRLEEVVRKVDEDARKEVKKKDLLDKVRKELEEILRDLRRHTEELERESKKSIDELRELLKTLRRELEEIRKRGERVEDVKRRLEELLKRAKEVLDELIKRHRDLLRRHEEKVRRLIKRIEDLLRELSKKAK

SEQ ID NO: 11219 - protein, 171 aa, Artificial Sequence; identical to SEQ ID NO: 11218
  Synthetic

SEQ ID NO: 11220 - protein, 171 aa, Artificial Sequence
  Synthetic
SKEEELEKIVRKIREDLRRAVKEVEDESKRVLESTKKALDTIRRVSEKVIEDLRRELRDEEVLKDLERRSKETIKKLEEHVKRSEEESRDSIRELRRLLEELERRLEDLKRRGEPVDELVRRLEELLKELRKRLEDLIRRHEDINRRNHELIRRAIEEHRRLLREAREREK

SEQ ID NO: 11221 - protein, 171 aa, Artificial Sequence; identical to SEQ ID NO: 11220
  Synthetic

SEQ ID NO: 11222 - protein, 179 aa, Artificial Sequence
  Synthetic
DEIEELIKKLREDLDRSRREVEKNSEDLKELIKRSEERIEKLIEDLERMVDDARRKNSKDSTLKETIKKLAEELRRELKKLHEDTKRKLDESRERTERIHKRTEEILRDLRDKLKRIDVDEKLLKKLEDVIDDVRRRDEDVVRKNEESLKRIEKRDEELIRKIEEVIRRAERKVDEVMR

SEQ ID NO: 11223 - protein, 179 aa, Artificial Sequence; identical to SEQ ID NO: 11222
  Synthetic

SEQ ID NO: 11224 - protein, 179 aa, Artificial Sequence
  Synthetic
SKIEELIKELEKLSRTNEELVKRVLEELTRLVEESAKRIEDIIRRLKEVVDKARRENSRDERLLREVEKELRRVEEELEELHRRTKKKLDDVRKEAEDSLRKSKDDMRKVEEELRRTDVDKKLLDKIKKAIEDLERENERALKELEKRLRELLRTDRELIRKIEEEIKKLRREVEEVLR

SEQ ID NO: 11225 - protein, 179 aa, Artificial Sequence; identical to SEQ ID NO: 11224
  Synthetic

SEQ ID NO: 11226 - protein, 184 aa, Artificial Sequence
  Synthetic
SIKERLTEVLKRLAEEIRKVIEENKRTVDRAREEVERVIRKNREVLKRIKERADEVIKRISDERLVREIEDRLEKLKKTSEDLVRDVERIVEEMERSSRELEKDIRRILDELAKKVEKVKKDGSDERVVEELIREAKKIVEDIVRRVKRHSREVERIVEEIRRRAEEHIERLKRSLEEVEKKVD

SEQ ID NO: 11227 - protein, 184 aa, Artificial Sequence; identical to SEQ ID NO: 11226
  Synthetic

SEQ ID NO: 11228 - protein, 184 aa, Artificial Sequence
  Synthetic
RIMEKLEEVLKELRKKIKKLNKDNEETVRRIKKEVDKVIKKNRDVNERIRKRLEEVISRISDERLVRDIERLARENSRTSEELEREVRKIVREAEESSKRLIEKNEDLLRRLTEEVKRVKDRGESEEVVEKLIEDMERVVAESAKENKKHSDDVKRILDEIRRKAEDHIRKTEELLRRIEERTR

SEQ ID NO: 11229 - protein, 184 aa, Artificial Sequence; identical to SEQ ID NO: 11228
  Synthetic

SEQ ID NO: 11230 - protein, 184 aa, Artificial Sequence
  Synthetic
SIKEKLTEELERLAKRIREANEDNKRTVEEVEKRIREVIKKNRDSNKEIKDDVERVLSRIDDEEVVRKIKELVERNSETSERLRRKVEEELKRLRESSRKLIEDNKKLLEDLRREVEEAKRRGEDEEVVERLLKKMREAVKKSEDENREHSERVKRIIEKIAREAEEHSKRTKELLDRIREEVR

SEQ ID NO: 11231 - protein, 184 aa, Artificial Sequence; identical to SEQ ID NO: 11230
  Synthetic

SEQ ID NO: 11232 - protein, 184 aa, Artificial Sequence
  Synthetic
RVDEDLKRVLDELKKRVEDLNEENKKTVEDISRRVREVIKRNEDMLREVKKRAREAISRISDERLVRRIEELLKRLEETSRKLARDVEEIVKDIERSSEELIRDNERLVRELAREVEEVSRRGESEEVVRELIKKMRDVVRKSEKDNKDHSERVKRILKRIEERAREHTRRLEEVLRKVEEDVR

SEQ ID NO: 11233 - protein, 184 aa, Artificial Sequence; identical to SEQ ID NO: 11232
  Synthetic

SEQ ID NO: 11234 - protein, 183 aa, Artificial Sequence
  Synthetic
RVKEKLREVLERLEREIRKILKDNKETVKRIEEEARRAVEKNKEALKRLEDRVRELLEDKDQEDRKKVKDVVDELRKSSKKLTDKIRKILEDIKKTSEDLERRVKEVLDKLREDVKRIEEKPVDEEKVERLAEELRKIVRKIIEDVRKHSEDVRKILEDVKKEVDDHVREMEEIVKRLEDEIR

SEQ ID NO: 11235 - protein, 183 aa, Artificial Sequence; identical to SEQ ID NO: 11234
  Synthetic

SEQ ID NO: 11236 - protein, 180 aa, Artificial Sequence
  Synthetic
SELEEIVKEIKRILDEHEKKVRRNSEEMKRIVDRHAERVEKLIREIEELLRRLDELVKRGEVDEETAERIKDRIRKLLEEAKKHSKRIKDELDRSNKELDDHSEKVKREIDKLVKDVRRKGVEGEEDLERMAREIKDRLDKIDEENKKSSEELKRELDRLDEKLRDVARRIMEAIDERTR

SEQ ID NO: 11237 - protein, 180 aa, Artificial Sequence; identical to SEQ ID NO: 11236
  Synthetic

SEQ ID NO: 11238 - protein, 180 aa, Artificial Sequence
  Synthetic
DELREIVRRIEKILEDHARTIEEVIERIRDILRKHEKLVEEVLRRIEKLLKELEEMVRRGELDEETVRRVEREIEDLLRRAKEHSEEVKKRIEELLERLRRHSRDVERAIDELVKKVRERGVEGTEDLERMAERVKRELERLNKKAEDALREVKRALDDLDRDLKRVLEEIKERIRRATT

SEQ ID NO: 11239 - protein, 180 aa, Artificial Sequence; identical to SEQ ID NO: 11238
  Synthetic

SEQ ID NO: 11240 - protein, 180 aa, Artificial Sequence
  Synthetic
SELERILTEIEKRIEEHERRIKENSKRMKEIVDDHERKVEEVLRRIRKLLRDLEEMVKRGELDEDTAEKVKRDIDKLLEEARRHSERVKRELDKSNEDLRRHSKKVIDDIRRLVEEVRRRGVERREDLEKVARDVEKRLEDANRENEKSSRELKRRLDELDKKLEEEARRIKKAIDDKTR

SEQ ID NO: 11241 - protein, 180 aa, Artificial Sequence; identical to SEQ ID NO: 11240
  Synthetic

SEQ ID NO: 11242 - protein, 180 aa, Artificial Sequence
  Synthetic
SEVDEVAKEIRRILEEHEEEIRRNSEEAKRILDEHREKLKRNSDDMRRIVKEIEDMRRRGELDEETAKKIKEELERSNRKLEKHSEDVIRRLRKSNTDLKRHSEEVKKEIEKLVKRLEDKGVEREEDLREVAERVKKDLDRLNRENDESSKEIEKDLKRLDDRNRDVSEKLKKEIDELTK

SEQ ID NO: 11243 - protein, 180 aa, Artificial Sequence; identical to SEQ ID NO: 11242
  Synthetic

SEQ ID NO: 11244 - protein, 180 aa, Artificial Sequence
  Synthetic
DRLREIVKRIRDILKEHEDRIRENSKRARDILREHKRKIEEVLRRIEKLVEDLERLKRRGELDEETAKKVKEDIRRLVRTVEEHSRRVIEELDRSNDELRKHSEDVKREIEKLVEDVEREGVEGEEDLRRAAEEVKKKLDELNEENERSSEDVKRTLKKLNDELREKVRRVMERIDEAVR

SEQ ID NO: 11245 - protein, 180 aa, Artificial Sequence; identical to SEQ ID NO: 11244
  Synthetic

SEQ ID NO: 11246 - protein, 180 aa, Artificial Sequence
  Synthetic
DEVEDVLRKIEKILDDHRKRIEKNSRDMARIIDEHRRKVEENSREMKKLVDDLKKAVDRGEADEETAEDVKRKLEKSNRELEKHSEEVKRRLDESNEDLRRHSEEVKERIERLVKKLREDGVEREEELKEVADRVKEKLDRLNRENEKSSEELKRELDKINDENRETSERLKREIDETTR

SEQ ID NO: 11247 - protein, 180 aa, Artificial Sequence; identical to SEQ ID NO: 11246
  Synthetic

SEQ ID NO: 11248 - protein, 180 aa, Artificial Sequence
  Synthetic
DELREVVKTIEEILRDHERKVRDNSRRMKEIIKRVKEELERVIKEAKELVERLKEAVRRGEVDEDTARKIKKELRDLLRELKKRLEEIKKRLDESNDRLRRHSEEVKERIDRLVDKVRRDGVEREEDLRKMAEDVKRALDKINRDNEESSRRLKKELDDVLRKVEEVIRRLEEEIDRLTT

SEQ ID NO: 11249 - protein, 180 aa, Artificial Sequence; identical to SEQ ID NO: 11248
  Synthetic

SEQ ID NO: 11250 - protein, 180 aa, Artificial Sequence
  Synthetic
SELEKIEEDIRRILKEHKDTVRKNSEDIDRSVKEVKERIDKILKEIDDLLKELRELVERGELDERTVEEVKRRIEELLREVEKLSEKHKRDLDRSNDELRKHSEEVKKEIDDLLEEVERRGVEKREDLERVVREVKKELDDINRENRKSSEEAKKKNDDVLAELEKRIREIKRRIDEDAT

SEQ ID NO: 11251 - protein, 180 aa, Artificial Sequence; identical to SEQ ID NO: 11250
  Synthetic

SEQ ID NO: 11252 - protein, 180 aa, Artificial Sequence
  Synthetic
SDLEKLVEEIKRLLKELKERVTKNSEDMKREVERHKELVKKLKKRIEDLLRELEDAVRKGELDEKKVKELKDEIRKLVKELRDHSREVKKRLDDSNRKVEEEVRKLKEDIDKLVKEVRDKGVEKREDLERVVEEVKKEIDKIVEENRDSSRKLKERLDEANEELERRVEEIERRIDEKAR

SEQ ID NO: 11253 - protein, 180 aa, Artificial Sequence; identical to SEQ ID NO: 11252
  Synthetic

SEQ ID NO: 11254 - protein, 180 aa, Artificial Sequence
  Synthetic
DELREIVTRADETLKRVADKIEENSRRMEEIVREHERKVRELLKRIEKLVRDLSAMVRRGELDEESLKRLKDEIEKLLEEAERHSRDVKRKLDESNKRLEDDSRRHEEDLDRLVTEVEKRGVEGEEDLRRVVKRVKETNRRLLEKNKDSSRKLKKRLDEANKTLADALEEVKRRIDERRK

SEQ ID NO: 11255 - protein, 180 aa, Artificial Sequence; identical to SEQ ID NO: 11254
  Synthetic

SEQ ID NO: 11256 - protein, 180 aa, Artificial Sequence
  Synthetic
DELDEIVKRAKETVEKVKREVDANSKDIERILREHRKKVDKNSKDMEDLVRKLEELVRRGELDEETAKDVKRRLDESNDRVRRHSDEVKKKLDKSNEELRRKSDEHKKDLDRLLDEVRRRGVEREDELREAVERLERENRKVLEENRRSSEKVKRDLDRVNRENEEVSERLKKRIDEAAT

SEQ ID NO: 11257 - protein, 180 aa, Artificial Sequence; identical to SEQ ID NO: 11256
  Synthetic

SEQ ID NO: 11258 - protein, 174 aa, Artificial Sequence
  Synthetic
SEIEKIIKELDDLVKEDEDTIRRLEEELRELLKEIDREAKKSDEELEKTLEELAKIARDGKLDEELLERVERTLEKSERRMRRLKEELKRELDRIREDLERSKRDLDRKIKKLLDEIDDEELRRVLERVAEDSKRTLDRLERVLKEVERRVDEALKRNKTVLDKVREDVKRLKD

SEQ ID NO: 11259 - protein, 174 aa, Artificial Sequence; identical to SEQ ID NO: 11258
  Synthetic

SEQ ID NO: 11260 - protein, 180 aa, Artificial Sequence
  Synthetic
REIEEMIKRNEKLLEDDKRKVKRIIEKLDKVLEDDRKRAEDLIRKLEKVAEEIARLRDKVEERDVARKIKELKDEVEKLVRESKKLNEELREEVRRMKEESKELIKESHKEVRDVERKLKVEELLDTLRKVNERVARESEKTIRELEKVLERVNRESKKTIEEVEKALKEVADRVTEVRR

SEQ ID NO: 11261 - protein, 180 aa, Artificial Sequence; identical to SEQ ID NO: 11260
  Synthetic

SEQ ID NO: 11262 - protein, 180 aa, Artificial Sequence
  Synthetic
SEIEKLIKENKDLLEEDKRRVEEVIEKLERVIEEDKRRVDEAIKRLDDVAREIERLRKDSDDKDVERDIRRLEKEVREVVEKSKDLIRRLKEEVERVERTSRELIKESHKKVREAKERLKDEDLLRRLERVNEEVARRSEDTIRRLREVLKKIEDDSRRTIDELREVLKRVKTRVTEVRR

SEQ ID NO: 11263 - protein, 180 aa, Artificial Sequence; identical to SEQ ID NO: 11262
  Synthetic

SEQ ID NO: 11264 - protein, 180 aa, Artificial Sequence
  Synthetic
DDIERLIKRNKDLLDRIREEARKLIERLKKVLEDDRRKVERAIERLEEVVDEVRKLKKDTDDKDVERLLERLKEEVKKIEEESKKLIDDLRKEVEDLVKRIEESIKTSHDEVREVERRLRNEEVLRKLKKANEDVEREVRKMIEEVRRVLRKVEEDSKRTIKKLKDVLKKVAEEMEKVRR

SEQ ID NO: 11265 - protein, 180 aa, Artificial Sequence; identical to SEQ ID NO: 11264
  Synthetic

SEQ ID NO: 11266 - protein, 180 aa, Artificial Sequence
  Synthetic
DEVEEAIKELEDALRKDREAVERMIRDLERLADEDRREVEDHVKKIEELIAAVERMSRDVDEKDLRRTLKELEDSSRELVERSKDINRRLTEKVKELLERSKELNERLKRKIEDIERKLDKREVLEKLKEVLKRVEKASRKTNEDVKRVLDEVRRISEETNRRNERVVEEAKERVERVAK

SEQ ID NO: 11267 - protein, 180 aa, Artificial Sequence; identical to SEQ ID NO: 11266
  Synthetic

SEQ ID NO: 11268 - protein, 179 aa, Artificial Sequence
  Synthetic
SEVDEVIKRLEELVERHRRKVEEVIRRLEKLAEDHERKVRELEKRLRELIKRIEELARRDGPREEKVRDVRRKLRTLLKELRDTTEELKKTIRELEKELNETTKKIVDEIRRLRERVNVTSRDFDRLEDVARRVKEDLERTDEEVRRVAEEVRKRVEKTTRDVERVVREVERAIEERRR

SEQ ID NO: 11269 - protein, 179 aa, Artificial Sequence; identical to SEQ ID NO: 11268
  Synthetic

SEQ ID NO: 11270 - protein, 179 aa, Artificial Sequence
  Synthetic
DEAREVIKTLEKLLEEHERRVREVIKRLEELIKRHEDRVREVIETLKRLLEEAEKIVRRDGPSDKTVKKLRDDLEEIRKELNKTTKTIKEDLDRTIKELDEITEDIKRKLDDLRRRINVTSEDMRRLEEVIRKVKEALKRTNDRLREVVDEVKKRLDKTDEDATRVVEEVKKRIDEAAK

SEQ ID NO: 11271 - protein, 179 aa, Artificial Sequence; identical to SEQ ID NO: 11270
  Synthetic

SEQ ID NO: 11272 - protein, 179 aa, Artificial Sequence
  Synthetic
DEVETVIRRLEELIREHKEKVDRIIKELEKLLRKHEEKVKKVIEELRRLAKEAADIVRRDGPSEEVVDRLRRRLEEILKDLERHSEDVKRRLREVLKELNDETKRLKDDLRRTRKDANVRSRDMERLERVIRKVEEDLDRTNREVEEVIRRVEEEVERLDREAEEVVRDVKEKIDRLKK

SEQ ID NO: 11273 - protein, 179 aa, Artificial Sequence; identical to SEQ ID NO: 11272
  Synthetic

SEQ ID NO: 11274 - protein, 179 aa, Artificial Sequence
  Synthetic
SEAEKVIKELRDIVKRNDEVVKEIIRRLEELVKEHKRLVEEIIKRLRELLKRIEEVVRRDGPSEDKVEKVERDIERLLEELERHSRRVEEELKRLLEELEKHARESKREIKEREDKINVTSEDLKRLKDVLDEVIKKTDELLREVERKAREVTKRLRDLDRRVKEVADEVRRRIREATK

SEQ ID NO: 11275 - protein, 179 aa, Artificial Sequence; identical to SEQ ID NO: 11274
  Synthetic

SEQ ID NO: 11276 - protein, 180 aa, Artificial Sequence
  Synthetic
EEEERVKEFLDRVDTEDKKLVEELRKVVERVKRENEKLIKESEDMSKKVEDDARRLIAELRREVDETVMREIEEEVRRLKEKNERLIEKSRRDSRRLEEEVRKVIDKSRKDITKIKREVEEEPADKEVVRKLEEYLRRSRKLVDELKKKLRELLERSREKVERSKEELKRILEEVRKKAK

SEQ ID NO: 11277 - protein, 180 aa, Artificial Sequence; identical to SEQ ID NO: 11276
  Synthetic

SEQ ID NO: 11278 - protein, 185 aa, Artificial Sequence
  Synthetic
SVSERLRRVLERVAREVKRLIDEDRKVNEEAEREVRKLIKKDEDALKRVAEEVERLIREASDDDKLIREIEEILKKLAEDSRKVVEESKKVLDDINKESEDVVKESEDTLRRAAEELKEVERRGESEEIIEELIRRLEEIVKRLEEKHRTTVKKIEDIIRELKKTHDKTIEDLRRIIEEIEERVR

SEQ ID NO: 11279 - protein, 185 aa, Artificial Sequence; identical to SEQ ID NO: 11278
  Synthetic

SEQ ID NO: 11280 - protein, 181 aa, Artificial Sequence
  Synthetic
RVREELRKVLKRAAEAVERVLRKNEEVLRRAEERIRRLLEENEKSLEKVERDVTRILEGGIDSREVTELLRRLRKSSDDLKRRLRKVLEDIERSSRDLVRRVRKLLEELERRVREIEKKPVDEEKVKKLIREIEEVIDRLRRESEKHIEEIKEIITRLDKEVKDHDERLKREVDKLEERAR

SEQ ID NO: 11281 - protein, 181 aa, Artificial Sequence; identical to SEQ ID NO: 11280
  Synthetic

SEQ ID NO: 11282 - protein, 181 aa, Artificial Sequence
  Synthetic
SVEERLRKVLEEVRRLLEKIIKDNREVLKRAEEKVRELIKRDKDVLDRIAEEVERLKEKGIDKKKVDDLLEDLRRESKEVIEETEDVLRRIKDSSEKLVRELEKLLEDIERKVRDLERKPVDEEKVDRLIEELKKLIDDAREKNERHIEEIERIIDDLRRKHEETARRLKEAIDRLREEAQ

SEQ ID NO: 11283 - protein, 181 aa, Artificial Sequence; identical to SEQ ID NO: 11282
  Synthetic

SEQ ID NO: 11284 - protein, 181 aa, Artificial Sequence
  Synthetic
DKEERIERVLKRVEEELKKLKERIEEVLKKVEDMVRKNLEEIRKVSEDHERTVREIRKRGDITDELVDKLREENERVEEAVRRSVEEAKRELEKVETDVKRLEEEVKRTLDEVRKRVKDTGDEKVVEEIIKELERLLEDLKRRADELIKRLEKLVEEHHRKVEELVRRLEESLDKVRRDAK

SEQ ID NO: 11285 - protein, 181 aa, Artificial Sequence; identical to SEQ ID NO: 11284
  Synthetic

SEQ ID NO: 11286 - protein, 177 aa, Artificial Sequence
  Synthetic
SEDEKVKRVVEKVKEESDRLNEELKRVVDEVRKELERLIEKIKRSVERMDRTVRELLKRISDRKTLEEIREEVERAKRRNEEVIERMRRTLEKLERDVRDVLRRDRETLERLRKEVERDGADDRVVEKLKKALDESRKTHKKLIDDLRRALEELEKRVEDLNRENERLLDEIKKRVD

SEQ ID NO: 11287 - protein, 177 aa, Artificial Sequence; identical to SEQ ID NO: 11286
  Synthetic

SEQ ID NO: 11288 - protein, 181 aa, Artificial Sequence
  Synthetic
DVERKIEEVVRDVKRELDRLLEENRRSVERVERALDKLLEDSRRVVEEVKKALDDLRRRGLDERTIRELKKEIEELHKRNEKLVRELKKEIRDLLRENEERIRKLKREIDKILEELKRDKVPETDVKKIIEDLRRLVREVEEHSRRTNRRLEELVKDLARHAKRSIDRLKELVDRARERAR

SEQ ID NO: 11289 - protein, 181 aa, Artificial Sequence; identical to SEQ ID NO: 11288
  Synthetic

SEQ ID NO: 11290 - protein, 181 aa, Artificial Sequence
  Synthetic
DVEKDIERVVEDVKRELRRLLKEDRDVSKKVKDDLDKLLKESEEVVRRVKKELDRLREEGLDEKKIRELKKEIDELHKENEDLVRDLKRKIDRLNEENEEVVKRLEDEIKKLLDEARRDRIPKSAVDEIIRRLKELVKEMKRHVDKSIKDLEELVRRLEEHIRRSIERLKKLVEEAREDAR

SEQ ID NO: 11291 - protein, 181 aa, Artificial Sequence; identical to SEQ ID NO: 11290
  Synthetic

SEQ ID NO: 11292 - protein, 181 aa, Artificial Sequence
  Synthetic
SVEEEVDKVVKKLEEDLDRLLEESKEVVERVEKALDDLLKRDEDVSEEVRRELERLKEEGLDDKKVRDLEKEIEDLNRENKELLERLKRRIRKLHEDNERMLRELKKEVRKRLEDVRRRRIPESMVKKLLDELRKLVEDAREHVERSIRELEKLVKEADDHVRKSIEDLKRLVEEVRETAR

SEQ ID NO: 11293 - protein, 181 aa, Artificial Sequence; identical to SEQ ID NO: 11292
  Synthetic

SEQ ID NO: 11294 - protein, 181 aa, Artificial Sequence
  Synthetic
DVEKEIKDVVDKAKRELDRLLREDREVSREVKEALDKLLEDNRRSVERVERELDDLRRRGLDEDEIRKLKDRIKKLLDENKKRVEDLKREIDRLNKENEDELRRLKRELDKILREVERDKIPESVVKEILKRLEKLVEDAKRHVEDSIRKLKKLVDDMRKHSERSNRDLERLVREAREKAR

SEQ ID NO: 11295 - protein, 181 aa, Artificial Sequence; identical to SEQ ID NO: 11294
  Synthetic

SEQ ID NO: 11296 - protein, 181 aa, Artificial Sequence
  Synthetic
SVEEEIRKVVEEVKRELDRLLEKNDRSVKEAKKELDRLLEENRRAVEEVKKALDELEKNGLDKDRVRKLKEDIDARLEENERLVRKLKRDLDERLRENEKRLRELKKEVDDLLRRLATEKVPESEAKRLIDRLRELVKRVAEHSERSDRELKKLVDDLREHSKRSNDDLRRLVEEAEREVR

SEQ ID NO: 11297 - protein, 181 aa, Artificial Sequence; identical to SEQ ID NO: 11296
  Synthetic

SEQ ID NO: 11298 - protein, 181 aa, Artificial Sequence
  Synthetic
SVEDKVREAVRRAKEALKKLVEDDRRVVKEVEEMLDTLLDKNRDSVRRAKEKLEDLKRKGLDDDTVRKLLEDLKRLLDRNEEEVRRLKEEIRRENKKNEEVVERLEREVKKLLDELERDKVPESDAERLIETLERLVKELEDHVRRSIRKLRELVEEMRDHSRRSDEELKKRLKEVEDRVR

SEQ ID NO: 11299 - protein, 181 aa, Artificial Sequence; identical to SEQ ID NO: 11298
  Synthetic

SEQ ID NO: 11300 - protein, 181 aa, Artificial Sequence
  Synthetic
DVEEEIKRVVKKVEEELDKLLEDDERVVREVEEMLDRLLKKNEKVVRDAKRKLDDLRRKGLDEKRIRDLKRELDELLKENERRIRELKKRIRKLHEETRRRLEELKKEARDRLKEVEDRKIPKDVVDKIIETLRRLVKEVAKEVKRSIDELKKTVEEVRKHSEETDRRIEKLAKEAEEEVR

SEQ ID NO: 11301 - protein, 181 aa, Artificial Sequence; identical to SEQ ID NO: 11300
  Synthetic

SEQ ID NO: 11302 - protein, 181 aa, Artificial Sequence
  Synthetic
SVEEKIREVVERVRRMLEKLLEDNDRSVKEASKALDDLLRESRRVVEEVKKALDDLRRKGLDDRTVEKLKTEIRKILKDNEDLVRELKKELKRLLEENEKEVRRLEDEIRRIMEEAERRKIPESEVRRIIRELEELVKRATDHVRRSDKRLRELVDELRKHIRKSIEDLKRLVDEARRRKD

SEQ ID NO: 11303 - protein, 181 aa, Artificial Sequence; identical to SEQ ID NO: 11302
  Synthetic

SEQ ID NO: 11304 - protein, 182 aa, Artificial Sequence
  Synthetic
DEVEEIRKELEKLLEEVRRKLEKIIKDIRDLLREDKRKSERIDRELEKLLRRLEEIVRDRGPDERVLRDLEEKIKELLDDSRRHADESEKRLRKLLEDARRTLERAKKDIDKLEEEVRRRGLPEEMLREVKRVLEEVRRDIERLLEEIRKVVEEWRKRLEDLKKKNEDSAREVKRRIDELRK

SEQ ID NO: 11305 - protein, 182 aa, Artificial Sequence; identical to SEQ ID NO: 11304
  Synthetic

SEQ ID NO: 11306 - protein, 182 aa, Artificial Sequence
  Synthetic
SEVEDIIRRLRELLERHREVSKRINDELRKLLREVEEDSRRLDKEIEDLLRRIREKVTRDGPDDDTLRRVKETLEKLLRESERTIREVKRRIEELLKRSREHSKRVKEEIDKLREEVDRRGLPEDARRRVERVLREVEDTLRKLDKENEDSARRVKEALDRLLKKNEESIRRAEREIDELRR

SEQ ID NO: 11307 - protein, 182 aa, Artificial Sequence; identical to SEQ ID NO: 11306
  Synthetic

SEQ ID NO: 11308 - protein, 182 aa, Artificial Sequence
  Synthetic
DDVEELKKEIKKLLDDHKKLSKELNEDIERLLREHRKLSEEIDRRLEKLLKELEELVRREGPVEESLRKAKEDIDRLLEESKRHSEDLRRRLKELLDRSKKHSEEVKERLERLLREVERKGLPKELLDEVERVVREAKKTLDRVDEENKKSIEDAERELERMDRKNEKSVEDVRRTAKELLR

SEQ ID NO: 11309 - protein, 182 aa, Artificial Sequence; identical to SEQ ID NO: 11308
  Synthetic

SEQ ID NO: 11310 - protein, 182 aa, Artificial Sequence
  Synthetic
SEAEEIIRRLEELLKKLKKDSDRLDEEIKRLLDENRRNSKDINRRLKKLLDDLRRLVRERGPRRELIKELREKLKKLEDDSRKDIKRVEDELRRLEEESEELIRELKRRLETLKEDVERRGLPEDVLRRVEEALRRAEEDLKRLKEKNDRSLKEWRDTIRELKRENEESLRRVKEEADRLSK

SEQ ID NO: 11311 - protein, 182 aa, Artificial Sequence; identical to SEQ ID NO: 11310
  Synthetic

SEQ ID NO: 11312 - protein, 182 aa, Artificial Sequence
  Synthetic
SDVERIIEELERLLEDLERRSKRIDEELKRAADRNRRNVEEIIRRLEDLLRRLEELVRRDGPAREVIRELEEALKRLEKRVDEDVRDVERKATDLARRSDDLARKADKRIKEIEKEVDEAGLDKDVLREVRRVAEKVRRSIKELKERNEKSLRDWKREVDKLLKDIKKVLDEVRKAADDLRK

SEQ ID NO: 11313 - protein, 182 aa, Artificial Sequence; identical to SEQ ID NO: 11312
  Synthetic

SEQ ID NO: 11314 - protein, 182 aa, Artificial Sequence
  Synthetic
REVDEIRRRLEKEVERNRRNSKRIDDELKEMADRNRENVKRSIEEIKELLKRLKELVDRDGPDERVIRELEERLRRLDRRLEEDAKRAEEVIDRLRRRSEKDVRDVKEKIKDDEDRVRKRGLPEDVRREVERVLKEWEDDVRRLLRKNEDSLREWREKLKKLVREHREVTKKAEEVLRELLR

SEQ ID NO: 11315 - protein, 182 aa, Artificial Sequence; identical to SEQ ID NO: 11314
  Synthetic

SEQ ID NO: 11316 - protein, 182 aa, Artificial Sequence
  Synthetic
KDAEDIIRKLDELLDELAKAAREIIERLRDAARENEENSREINRRLEELLKRLEDAVRRDGPRDEVIKRLEEELKKIKEESERDVRRVEDAAEKLARTVEKLIEDLRRRLKKLDEDVERRGLPEDVKRKVEEVARRVRKAIDDLLRDIKRVLDDWKRKVDKLLEDNRKSLEDVKREAERLRK

SEQ ID NO: 11317 - protein, 182 aa, Artificial Sequence; identical to SEQ ID NO: 11316
  Synthetic

SEQ ID NO: 11318 - protein, 183 aa, Artificial Sequence
  Synthetic
SEVERLIKELEDVSRDIKREVTELKRDLKRLAEESKRLVEELEETIRKIVKDIEDTKRRGDDEKTLTELRRKVEEVVRRIEDRVKKSHEKVREVIERIRRRVEELEKRSREKLEEIRKEVKNGDKELVDRVEEALRDHERTLRKVVKEVDKALKDLERDNTELVKRVKKVLDELRRDVEEKAK

SEQ ID NO: 11319 - protein, 183 aa, Artificial Sequence; identical to SEQ ID NO: 11318
  Synthetic

SEQ ID NO: 11320 - protein, 186 aa, Artificial Sequence
  Synthetic
DMERKLDTVLEEVRRVVTRAKEANDRVLKDAKRVVEELSDRNRRVLEDAKRVVDELKEKRKDVDELLRRIEETVKELERTARELNKRIEDSLREIAKKHEDLKRRLEEIVKRLAEEIERLKRDLREEDEVVDKLLKKLKETLRRMEKESEELLRETEKILRELEKEVEDHLRTVEKTLEDLRREVE

SEQ ID NO: 11321 - protein, 186 aa, Artificial Sequence; identical to SEQ ID NO: 11320
  Synthetic

SEQ ID NO: 11322 - protein, 178 aa, Artificial Sequence
  Synthetic
SEVDKILEDSKRKLEEVEEMVRRLLKKSRDLLEKLERDVERLIRDSERRLEEVARAKRPDELLDKVLKEDKEKVDDLRRKLEEVYRDNEREIRRAEKELEKLLRDDERDLREAERRVKDKDLRRKLKEVHDRSRRVIEKLREELEKVHDEARKVVEKITEKIERAHDKSRRLLEEIKR

SEQ ID NO: 11323 - protein, 178 aa, Artificial Sequence; identical to SEQ ID NO: 11322
  Synthetic

SEQ ID NO: 11324 - protein, 178 aa, Artificial Sequence
  Synthetic
SEVDEFVKRSEDLLKKLEEDVRRIVRESERLLEEVERRVRKILRDLEKKLEDAERERREDRDLDRMLREVEEEIRKIEKELDDLLREDKRKLDDAVRKLEEVYRRNEEELRKIEKKVKDKELRDKLEEAHRKVKEKVERLMEDLKRAHDESEKKIRDLKRKLREVLERLRKRVEEIKK

SEQ ID NO: 11325 - protein, 178 aa, Artificial Sequence; identical to SEQ ID NO: 11324
  Synthetic

SEQ ID NO: 11326 - protein, 181 aa, Artificial Sequence
  Synthetic
DLEKRLEEAIRENRDTIRRLAKELERVIEDNKRRLEELKKEIKKVIEELERELRRVRKDGRVKERIEEKVEKMVRDVERTLAELEKRSRELVREIEEIIKRLKDSSEKLVREVEKVVEDGTTREIVDELVRRLKKHSDEARKTVEDLRRKSKKSLREAEETVKRLVEEIERLLEEIKETMR

SEQ ID NO: 11327 - protein, 181 aa, Artificial Sequence; identical to SEQ ID NO: 11326
  Synthetic

SEQ ID NO: 11328 - protein, 183 aa, Artificial Sequence
  Synthetic
SEVDELVKKIEDSERRIEEKVKRIEDELKESEERIRTKVRELHKENEKLLEEIRRKKKDSDKDKKKVIEEVRRRVEEVRKKNERVLKEMDKHSKEVVKKLREMLDRLRDHSRRLKEEIERLDNKDELRKTLKDALKRHEEVLKRVEERIRRVLKRHEEVLREAEERIRRSLEKLKRDADRVAK

SEQ ID NO: 11329 - protein, 183 aa, Artificial Sequence; identical to SEQ ID NO: 11328
  Synthetic

SEQ ID NO: 11330 - protein, 183 aa, Artificial Sequence
  Synthetic
DEVEELVKELRDSLKRIREVAKELHDRNKELLDRIKRLVDELLKEIEKVLKEIEETKKDSDKDKDKVSKEVRERVKEIVKRVRDALRELEKRVRDVIEENKDMLKKLEDHSRRLKEKVDRTDDKEEVRRKLEEAVREHERELERMAREIRKSLEDLKRVLEEVAERIKEVLRRLEKRVKEVED

SEQ ID NO: 11331 - protein, 183 aa, Artificial Sequence; identical to SEQ ID NO: 11330
  Synthetic

SEQ ID NO: 11332 - protein, 183 aa, Artificial Sequence
  Synthetic
DEVEELVERLRRSLEKIRDRVRRLLERIKRLAEKIKRDIERLHKKNEDLAREMRKSERKSDKDRKEVLDRLRRRVEEVKKENKEVLEKAERDVKRIADEIKKVLDDLRKHSRDLEEEVRRLDGKEELRKKLRKVVEDHKRVLEEVKDRLTKVLRELEEVLEKVKRDIKKSLEDLEKVLRELEK

SEQ ID NO: 11333 - protein, 183 aa, Artificial Sequence; identical to SEQ ID NO: 11332
  Synthetic

SEQ ID NO: 11334 - protein, 183 aa, Artificial Sequence
  Synthetic
SDVERLLTKLKEVAKDLARIVKRLDEENEKLSEKAEREIRKLDRDNERLLEELEERKRRSDKDKEEVTRRAREEVKRVEEENKEMTDRLRRESDELRKKNEEALKRMEERVRRLEEEVERRNGEDRLRKKLKEVLDDLRRVLEELKDHIRRSLDKNRRSLEELEEHIRRSLTELRRRLEELAK

SEQ ID NO: 11335 - protein, 183 aa, Artificial Sequence; identical to SEQ ID NO: 11334
  Synthetic

SEQ ID NO: 11336 - protein, 183 aa, Artificial Sequence
  Synthetic
DEVRELLERIEDEIRRIREEIKKLDEDNKKLAEDIRRKIEELDKENKELLKRIEDKKRESDKDKEEVTRRVRKEVEEVEKKNKDVLRDLKRKVEDAERRNEEVLRRLEERVRELEERIARLDGDDEVRDRLRTILKKLREMLKEVKDRIDDSLRRLREVLDEVAKHIERSLKELKDRVREVEK

SEQ ID NO: 11337 - protein, 183 aa, Artificial Sequence; identical to SEQ ID NO: 11336
  Synthetic

SEQ ID NO: 11338 - protein, 178 aa, Artificial Sequence
  Synthetic
SDKEEIKKVVDDVRRDIRRLEKELRDLNERFRKRVEELKKRLEEVNDRARREVERLKSRITDERLRRRLDEVLKRDEDKSDKLRKELDELLEEVNRRTRTLEKRLRDLLDEIEKVSRRDLEDVDTLKRRLEDVLRKAREEVEKWKEDLERLLREAERRVREYEEDTRRLLKELEDETR

SEQ ID NO: 11339 - protein, 178 aa, Artificial Sequence; identical to SEQ ID NO: 11338
  Synthetic

SEQ ID NO: 11340 - protein, 182 aa, Artificial Sequence
  Synthetic
NVEDEVRRVVTELEKTLREVLKRSKEALDRLRETLERLLKELEDVHREANEDLTRLEREDERLLRRLKELKEESKKILDDLEEILRRILERVKEIHRRNREFLERIREEVRELLRELRRNNVPESVVKRLVRELERLLREVEKHLEDSKRELEDLLRRLRERLEELKKRHEDLLREAREETR

SEQ ID NO: 11341 - protein, 182 aa, Artificial Sequence; identical to SEQ ID NO: 11340
  Synthetic

SEQ ID NO: 11342 - protein, 182 aa, Artificial Sequence
  Synthetic
SLEETIEEVVRRNKETLDRARKKSEDVLRELERVLRELKRRTDEVARKLKEELDKLDREDEDLKRKIKRIEERLRELLETNRRMLERILEEAEKIHRRNERRLRELKKRTEKLLRDLKRDQVPEDVVRRLLEELERLSRDLERHVKRSEEEARDLLRKAREHVERSVKEIEDLLEDLKREAT

SEQ ID NO: 11343 - protein, 182 aa, Artificial Sequence; identical to SEQ ID NO: 11342
  Synthetic

SEQ ID NO: 11344 - protein, 182 aa, Artificial Sequence
  Synthetic
SLEETVRKAVRRNRETLRRLKRESEEAVKEAKEVLDRLREETERVLRKLEKRLRELRREDEELERLIEEIRRRLEELLKENEDLLKKIDDEVKKLLRENEDALRKLLEETERLVREAETKKLPKSMVDELLRTLEKLSDEIRRHVEKSKEDLERLLRELKKHVKRSVEEIEKLLEKLDKEAN

SEQ ID NO: 11345 - protein, 182 aa, Artificial Sequence; identical to SEQ ID NO: 11344
  Synthetic

SEQ ID NO: 11346 - protein, 180 aa, Artificial Sequence
  Synthetic
SEVDEILKRIKEVLKRNKENVERIKKRIKEELDRNRKNVERILRTIEKLLKELEDIARREGPRREVAERLRRELEKLLRDVEEDLRRVDERAEELKREVDEDLRRSEEEIRKLEEDVRGNDEELRKKVKEVMDRWRETLDRLREEVERVLEDWRRKLEELRRRVEKVLRDAERVIKKVEE

SEQ ID NO: 11347 - protein, 180 aa, Artificial Sequence; identical to SEQ ID NO: 11346
  Synthetic

SEQ ID NO: 11348 - protein, 174 aa, Artificial Sequence
  Synthetic
SEREEIERVLDENRRSLEELEREVEDALRTWEEELKKVEEAVRKVLEDVRRELEKDLKDAKELVKRVEKILRELEEEVREDKRRSKEAADKLRREVEKASEDNKRELDRLREALDRAEVEKIKTEVDDLSRKLRETVERLKTELKKVIDRNRKTLEDLERRARKLIKEARDAAK

SEQ ID NO: 11349 - protein, 174 aa, Artificial Sequence; identical to SEQ ID NO: 11348
  Synthetic

SEQ ID NO: 11350 - protein, 174 aa, Artificial Sequence
  Synthetic
REREKIEDLLRRNEKSLRDVARAVERILEEWRKVVEDLTERNKELLKEVEKVVRELLKDDKDLLRRIKEMLDRSREKTKRDKERSKEVADKLRDELRRLVKENRDRLRDLRRLLERLDVDEIAKELKRLSDKLREMLKRLTDKAKRLIERNEKTSRDNERELRKLIKEAEDAAT

SEQ ID NO: 11351 - protein, 174 aa, Artificial Sequence; identical to SEQ ID NO: 11350
  Synthetic

SEQ ID NO: 11352 - protein, 176 aa, Artificial Sequence
  Synthetic
SKEERLERLIEENKKSLDELSKRVEEVIKENKDVLKRLKEKIERLIEKNRRELERLKKDVDEDKARRLEESSERLETRARKIVEDMKKTSDELSEELKRVVEEMERSSRDLEREAKEREAREELERELRDHSRRLKEIVERIERKVREHIRELEKIVKEVEREVEEHIEKLERTVR

SEQ ID NO: 11353 - protein, 176 aa, Artificial Sequence; identical to SEQ ID NO: 11352
  Synthetic

SEQ ID NO: 11354 - protein, 176 aa, Artificial Sequence
  Synthetic
SDEDRLRELLKKNRESLKRLSDEIRRLIEENRDALRRVKETIKELLRKLKEVVERVRKDVDDDKVREIKKEVDKIEDKVRKILEEMERTSRELEKRLRKLLKEMDESSRRLADELRKRKADEEVRKTLEEHSRDLRRKVEELAREVKRHIRELEKILKEVKDEIEEVIRRIEETAR

SEQ ID NO: 11355 - protein, 176 aa, Artificial Sequence; identical to SEQ ID NO: 11354
  Synthetic

SEQ ID NO: 11356 - protein, 185 aa, Artificial Sequence
  Synthetic
SEIEDAAEKVRRNSEEAKRILDEHRERVKRVLEEIERLVKRAEERIEELIRTIERLRKDGRPTEDLAREIKRIVDEVRKALEEIKKRIEDLLREAEEHSKKVKKDLDRSNEELARTAEELKKRITDEEVRKKLEDILRKNEETSREIKKRLDRIDDDLRRVLEKAAKRLRDLLEKLREAVRRVET

SEQ ID NO: 11357 - protein, 185 aa, Artificial Sequence; identical to SEQ ID NO: 11356
  Synthetic

SEQ ID NO: 11358 - protein, 185 aa, Artificial Sequence
  Synthetic
SEIEKVKKEVEENSREAKRIVDEHKRLVEENSKEMEKLLKEAEDTIRKLLKEIKELKDRGLPKEELAREIRDILRRVEEKLRDIERRLDESNERLRRHSEKVKRDLDRSNEELEKRVRELEKRITDERMREKLRRALEENRRTSERLKRKLDDIDRDNERTSREVKEKLKRILEELKRTLEEVER

SEQ ID NO: 11359 - protein, 185 aa, Artificial Sequence; identical to SEQ ID NO: 11358
  Synthetic

SEQ ID NO: 11360 - protein, 185 aa, Artificial Sequence
  Synthetic
SEIDKARDEVRKNSDEMRKIIERHREKVEDNSRRMKETVRRVEEEIERIIREIEELKKRGLPKEELRRRIEELVKEVEDRSEEHKRDLDRSNEELRRHSEEVKRRLDESNKRLDDKLRELERRITDRRLREELRRIAEENKKTSDDLKKRLDRIDKENERTSEELKEENDRLLEKLRRAADRVKR

SEQ ID NO: 11361 - protein, 185 aa, Artificial Sequence; identical to SEQ ID NO: 11360
  Synthetic

SEQ ID NO: 11362 - protein, 185 aa, Artificial Sequence
  Synthetic
REIEEFEKDVRRNSEDMERIAREHEKLVRDLLRELKRLVDDLKRRLEELAEEIKSLREQGLPREELTKRIKEIVDKVRRELEELKKRIDDLLREARKHSEDVKRRLDKSNEDLERKLRELEKRITDERLRERLKRILDKNKETSDRIKKRLEDLNRELERVARELKKTIDELLRELEEVVERVRK

SEQ ID NO: 11363 - protein, 185 aa, Artificial Sequence; identical to SEQ ID NO: 11362
  Synthetic

SEQ ID NO: 11364 - protein, 185 aa, Artificial Sequence
  Synthetic
SLEEEVKKLLEELKKVADKLTKEVREADKKLEEVLRRVKRRLDEVDRRLEEEIKKVKSRITDERLRRRLDELLERVREHSKRLKERLDKILEDVNRRTKEMEERLRRIVKEVEELVEEVKRRKSDREELLERLKRRIDRLIEEARRLVEKWRDELKKLIDEVRKLVEDHERKVRDIEKKVRDESR

SEQ ID NO: 11365 - protein, 185 aa, Artificial Sequence; identical to SEQ ID NO: 11364
  Synthetic

SEQ ID NO: 11366 - protein, 181 aa, Artificial Sequence
  Synthetic
DAEEKARRVLEELDEALKRLAKKIKESIDKLKDVLRKLAEIIKRSLDELDEVLKRLASKLDKKDLDRIREELEKLKEDNKRDLDKIARELEELVRRNEDKLREIARDLERLKEELKRVLDRDGGVGEEILEELRRALEELKREVDELDRRNEEALERLKERVKRLNEDNRRTLERLEREVD

SEQ ID NO: 11367 - protein, 181 aa, Artificial Sequence; identical to SEQ ID NO: 11366
  Synthetic

SEQ ID NO: 11368 - protein, 184 aa, Artificial Sequence
  Synthetic
DVEELLRRLLEELRRVVKEVEDINRRSLEEARRVLKRLEDDHRRVLKELEDVLERLRRQGLPEDVVRTLTREIREMAEKHKKLLERIREAVKRSEEEHKRHTDDVRRTLETIERELEKVERRGVSRETIEELLRKVDRDLKRIRTTSEDLVRKNEELLEKLERESRRVVEESRKRLKEAEERTR

SEQ ID NO: 11369 - protein, 184 aa, Artificial Sequence; identical to SEQ ID NO: 11368
  Synthetic

SEQ ID NO: 11370 - protein, 184 aa, Artificial Sequence
  Synthetic
SVEEKLKDLEKENKDSLDEIRKLNEDSLEEAKRVLKKLEDTHRTVLRKLEKVLDELRKRGVPREDVERLKKIMEDAARKHKELLDDLRRKVKESEDRHRDHTRRVEEKSKELRRELEDVRRRGEDDDAIRKLRKKVEDTSRDLKRTSDDLVRRNRKLLKELEEESRKVVKESDEILRKMKEEVR

SEQ ID NO: 11371 - protein, 184 aa, Artificial Sequence; identical to SEQ ID NO: 11370
  Synthetic

SEQ ID NO: 11372 - protein, 184 aa, Artificial Sequence
  Synthetic
SVEEKLDELEKRIKEVLERIERINEESLRRAEEVLRDLEETNRRALERVRDVLRRLEERGVPEKDVDKLRRIVEKLERDHRDLIRRLRELVKRSKERHEEHTERVRRTIKRIREELEDIKRKGVDDDAIRKLLETVDRRLKELTETSKRLVEENRDLLRRAKEESKRLVDESEKVLEEMDRETR

SEQ ID NO: 11373 - protein, 184 aa, Artificial Sequence; identical to SEQ ID NO: 11372
  Synthetic

SEQ ID NO: 11374 - protein, 184 aa, Artificial Sequence
  Synthetic
SADETLEELEKELRRVVDEVRRTNEEANKRLREVLRKLEKKNDDVLRDLERVLKELEDRGVPEEVVRRLRKIVEDLKREHEKLIKKLREEIKRIIDDSRRHIRDVERILEKIRKELKDIRDKGVSEETIKKLREDVKRELDRIKTSSKKLVDDIERRLRRMEEESRKLAEDSRRILEEMRKEVT

SEQ ID NO: 11375 - protein, 184 aa, Artificial Sequence; identical to SEQ ID NO: 11374
  Synthetic

SEQ ID NO: 11376 - protein, 175 aa, Artificial Sequence
  Synthetic
SEVEKLVDEIKKELKRLRETSKKLLDEIRELLERLKRSSKKLVDDIKRILEELKRRNLPREDVERLLREIRKRVEEHKKRLREALERVERRVRDHNRELRRVLEEVERKVREIEKRGVDKDKLEKALRDARKVVEDIERTNREILKRVRDMVERIREDNDTVLEEVERMAEEVRK

SEQ ID NO: 11377 - protein, 175 aa, Artificial Sequence; identical to SEQ ID NO: 11376
  Synthetic

SEQ ID NO: 11378 - protein, 185 aa, Artificial Sequence
  Synthetic
REIEELKKKVEKVLRELRKSSEEMKRRVEDLIRRLKKSSKDLERKVKDLLKKAEEKVRRDGTTDELKRRLEKEARDLERELRKHDEDVERKVRKLKEELKRHNEEVEDIIRRVEEELKRVADKIDDEEARRRLEEVVRRLRKVLDDVRKINKEVVDRLKKALDEVKRTNEDVVRDLRKVLEELKT

SEQ ID NO: 11379 - protein, 185 aa, Artificial Sequence; identical to SEQ ID NO: 11378
  Synthetic

SEQ ID NO: 11380 - protein, 177 aa, Artificial Sequence
  Synthetic
SEIEKLKEEIRRLLEEIKRHAEENKRRVETALRDIERHVEENTRRVAKVEEEIKKLKDRVRREELDEILKRVKDHLEEAKRRIKEILRRVEEHVKRSKRRIDELLRRLKEKVARIKEAGVDKDELDKVEEEAKRVAEEVKEIHDRVLEEVRRVVDRVLKAHDEVLRRLERVVREVKR

SEQ ID NO: 11381 - protein, 177 aa, Artificial Sequence; identical to SEQ ID NO: 11380
  Synthetic

SEQ ID NO: 11382 - protein, 177 aa, Artificial Sequence
  Synthetic
EEEKRLRELEKRNEDVIRKAAEDVREILRKNEEVLKEAEDRIKRLIDEDRRVLEEVKRDDSRDDKLRKVTEESKKLVRETERVLEELKDSSRKLKEELKKLLDELRDSSEKLKDDLRKRRVDEELEREVRKHDKEVKEVIDRLREKSERHIREIERIVDELRKKHEATVRKLKKDVK

SEQ ID NO: 11383 - protein, 177 aa, Artificial Sequence; identical to SEQ ID NO: 11382
  Synthetic

SEQ ID NO: 11384 - protein, 177 aa, Artificial Sequence
  Synthetic
DEDETLRELEKKNDKALDDARRTIEEVIRRNEEVLKRAAEEIEKLERKNKRVLEEVKRRDSRDDVLRKIEDSSRKLKEDLRRVLEDLKRTSEELKRKLREVLKRLEDSSRRLKDELRKRRVTEELAEEVKRHDDRVRKEIEKLKREVEKHDREVKETIDRLAKKVDDHLKELRDTTR

SEQ ID NO: 11385 - protein, 177 aa, Artificial Sequence; identical to SEQ ID NO: 11384
  Synthetic

SEQ ID NO: 11386 - protein, 189 aa, Artificial Sequence
  Synthetic
DEIKEIEETVERLVEELKRIVEEWREESKRNVDELEKRIRDIKRRIDEAIKTLEELKRRGLPKEELSERIKRILEKLKREIDKVKEEVRRSHKDLDRKSKEIETRIRKLLEDLERKIREAKKRMKDDSRVEELRRALDELLEKARKVVEEVEKMIKEVNDRNKKVVDELKRTLDKILKDLEEVAREVDR

SEQ ID NO: 11387 - protein, 189 aa, Artificial Sequence; identical to SEQ ID NO: 11386
  Synthetic

SEQ ID NO: 11388 - protein, 189 aa, Artificial Sequence
  Synthetic
SEIEKMKRDSDENIKRMEEIARKWEKESRDNIREIEKRVEDLKRRIEKVIREIEKLRRDGRPDEDLKRKLDDDLRKLKEEVEKLKEDLRRSHEDLDRRSKEIKREIRESHRKVEEDIRRIEEELRDDKDLEEAKRKLEEVLDKNRRVVEKVERRIDRINDRNREVLERAEKELDDILRKLEEVVRRAEK

SEQ ID NO: 11389 - protein, 189 aa, Artificial Sequence; identical to SEQ ID NO: 11388
  Synthetic

SEQ ID NO: 11390 - protein, 182 aa, Artificial Sequence
  Synthetic
DEIREAKKRLDDIVTELRDHIRRSKERHERLVKELERHIRELEKKVRELIKRLDDAVRRDGKVDEELLRRLRETAKRDAENVEDVNRRLEEELKKNKEDVDRMNDTLRKRLEEIAKEVSRMDKEEVKREITRLLEDLKRVSREHREEIRKLLETTREVSKRHREKVEDLLRKLEEVLERVRT

SEQ ID NO: 11391 - protein, 182 aa, Artificial Sequence; identical to SEQ ID NO: 11390
  Synthetic

SEQ ID NO: 11392 - protein, 182 aa, Artificial Sequence
  Synthetic
SELEEIARLAEEIERKLRESLRESDKMHKKLNKENEDLLEKIRKEVEDIIKKLRDLKGTSEKILKDLAKEVEDVIRKIEELVKDAERRNREALERDRRKNEELRREVRKVIEDIKERVRRVRDERVEEAVRRVVEKIKDVVEKHSDASRRLNEELKESVDRLRREVEKLVEKIRKVVEDLRK

SEQ ID NO: 11393 - protein, 182 aa, Artificial Sequence; identical to SEQ ID NO: 11392
  Synthetic

SEQ ID NO: 11394 - protein, 185 aa, Artificial Sequence
  Synthetic
SDLERVEKESRDHIDTLRRIVERVEEHVRRSIKTLDELVDRARRSVERLIEELEEMKRKDKDKEKMTRKIEKLLKDAEDEIRKLKKEIRELHKRNEDEVRRVKEEIRKSLKEVEDRIKEIRDKTTDRRVEEELRRLLEENRRVVEEVEKELDRLLKESEDAVRRVEEALDRLLKELERVAKEVKD

SEQ ID NO: 11395 - protein, 185 aa, Artificial Sequence; identical to SEQ ID NO: 11394
  Synthetic

SEQ ID NO: 11396 - protein, 185 aa, Artificial Sequence
  Synthetic
SDLEKVKKDSDDHIRELERLVRRAEEHVRDSVRRLREIVEELDRDVRRLIEELKDLKRKIRDKEKLIRTIRRLLEELERKVREIKKRIREENEKNEREIRKLKEEIRRSLEEVERRLREIKKKTTDEDVKKKLDDLLRENREAVKRVERALDKLLTDDRRVVEEVERALDELLKRIEKVAREVEK

SEQ ID NO: 11397 - protein, 185 aa, Artificial Sequence; identical to SEQ ID NO: 11396
  Synthetic

SEQ ID NO: 11398 - protein, 185 aa, Artificial Sequence
  Synthetic
RDVDELRKESEDHIRELRKLVEDVRRHVKRTNDDLERLVKEVDDTLKELIKEVKELKRRVTDKEELVRRLEKLLRDLEKKARELKEEVKRLLERNRETLEKLERELKKSLDELEKRADDIRRKTTDEDVKKKIKDLLDTNREVVERVLRTLRDLLRRNKEVIDRILETLDELLERVKREIEKDAK

SEQ ID NO: 11399 - protein, 185 aa, Artificial Sequence; identical to SEQ ID NO: 11398
  Synthetic

SEQ ID NO: 11400 - protein, 185 aa, Artificial Sequence
  Synthetic
DDAERAKEESERHIKRLKDLVEELRKHSERTDEEIKELLRRLEKTVRDLIRELERLKEEIKDKDTVTRRIDKLLRDLEEKVRDLKRRLKKLLEDNKARVDELREDIKRSLEELERRVREIKEKTTDEDVKRKLDKLLKENEDVVREVDRALKELLRKNAEMLERAKERLDRLLEEVKKVADEVRR

SEQ ID NO: 11401 - protein, 185 aa, Artificial Sequence; identical to SEQ ID NO: 11400
  Synthetic

SEQ ID NO: 11402 - protein, 182 aa, Artificial Sequence
  Synthetic
SIEEELERLLRKNEDSLRRVRDEIRRLEEEIRRVLKKWRDEARKLLREIERVLKEVAERKGKREELDEILERVERDIEKSERDLRRLEEEVKKLVTDIEKAIKDIEDESRKAIEEVRRKRSTDETLLRDLERKSKEVDERLEELLRRAKERVEELIREIEALLDRNRRNVERLIRELERRTD

SEQ ID NO: 11403 - protein, 182 aa, Artificial Sequence; identical to SEQ ID NO: 11402
  Synthetic

SEQ ID NO: 11404 - protein, 179 aa, Artificial Sequence
  Synthetic
EELERLLEDVKRTLKELRDRAKEVLDRVRKTLEELKRELKRVLDEVTELLERLRRIVKREGKVEETLKRVEEELRRLAEEVKRLNEEHRRKLERLAREVRKLNEEHRRRLEELTKRAEDKGLDKRIIKEARERVETVNRETKKILEEIARTVEKVDEESRRILEKVKRDAERVLREIKK

SEQ ID NO: 11405 - protein, 179 aa, Artificial Sequence; identical to SEQ ID NO: 11404
  Synthetic

SEQ ID NO: 11406 - protein, 180 aa, Artificial Sequence
  Synthetic
DELEEVEKEVKRILEESRRLLEELEREVRELLERSKRILEELEEEVRRLLEKLKRVRTRGEKDLEELIKTEVRRLEKKIKDLLDKDREMLKRATERLEKVYRENRELIERVKRKLDDLARRKRKDEELERLKRELDKVHEEVREKVERAKRELERVHKRSEEEARRLKEEVDKVLDELRK

SEQ ID NO: 11407 - protein, 180 aa, Artificial Sequence; identical to SEQ ID NO: 11406
  Synthetic

SEQ ID NO: 11408 - protein, 186 aa, Artificial Sequence
  Synthetic
SELDELRKRVEEIVEENDRVLRELEKRVRELSERNKKTLKELTKRVREILERLKELKDRGEDKDTLDKAIRRVEEEVKELVERVTRHDEESKKEVRKLVDEARKHLEESKKRVDDLKRKVEKRLGQLEEVKEVVRRLEEKVKESLDRAEKVLRRLEREARESNRRHEEEVRRLKEEIDRVVTELRR

SEQ ID NO: 11409 - protein, 186 aa, Artificial Sequence; identical to SEQ ID NO: 11408
  Synthetic

SEQ ID NO: 11410 - protein, 186 aa, Artificial Sequence
  Synthetic
SLEDVLREVEERIRKSLEEHRKVTDEAEKELRRIVEDHKRVLEEVKKEIEDVIKELKKESVDEEEVRKLVRELREALKRLEKHSKDLEEEVKRVVEEMRKRSKELKERNDKVLDELRKKVKDSDDEKEKVAREIRETVKKLHEDNRRMSEEIKKTVERLLDKLRRSLERIRREAKDLVRKIEDLRR

SEQ ID NO: 11411 - protein, 186 aa, Artificial Sequence; identical to SEQ ID NO: 11410
  Synthetic

SEQ ID NO: 11412 - protein, 186 aa, Artificial Sequence
  Synthetic
KLEEVLRKVAEDIKRSLEDLKRVLKEVADHIRRSLEELRRVLERVKKEIEDVLRELENSELDKRAVDKIVKEVKEALDELEEAVRRVAKENEDALRKLAKDVEDVARRNKEAVDRARERVDKSDDDADKVAEDIRRDVRRLDEENRELAERIKRAIEELDRKNKDLARRIEDAVRRLLEKIKEAVR

SEQ ID NO: 11413 - protein, 186 aa, Artificial Sequence; identical to SEQ ID NO: 11412
  Synthetic

SEQ ID NO: 11414 - protein, 186 aa, Artificial Sequence
  Synthetic
DLEEVLKEVEKRIRDSLKDLKRVLDEVLDHIRRSLKENRDSLRKLEEDLRRVLEELRRTDLDERVVKKIEDEIDKVVKRMEKVSRDLEEDNRRVLEELEEEVRRVMKENKDVLDRLRDEVTRSDDDEKKVAEKIRKEVKELDEKNKELARRIRDVAKKLDERNKDVSRRLAEEVERLLRKIKEKVR

SEQ ID NO: 11415 - protein, 186 aa, Artificial Sequence; identical to SEQ ID NO: 11414
  Synthetic

SEQ ID NO: 11416 - protein, 186 aa, Artificial Sequence
  Synthetic
DLERVLEKVARDIEESLRRNKESLKRLKEHVEESLKENRKSLEDLRKKLKDVLDELKKTELDESEVKEIEERVKKVEEDLERKSKKLEDENRKAVDELRKLSEDLERKNRKVLKELKDEVKDSDDEKKKVADKIREEAKRLDKENREASDRARDVVRRLDEKNKKLSEEMKRTVERLLETLDRKMR

SEQ ID NO: 11417 - protein, 186 aa, Artificial Sequence; identical to SEQ ID NO: 11416
  Synthetic

SEQ ID NO: 11418 - protein, 186 aa, Artificial Sequence
  Synthetic
DLERFLEEVARKIEKSLEELRRVLEEVRDRIRRSLEENTKSLERLTEEVRRVLERLKDTDLDKKEVEDIEREVRRVERTMRELSKKARRDNTEMLRDLARKVDEVEKENKRVLERLREKVKDSDDDEDKVAKEIEDEVRRLDEKNRKLAKEIRDEIRKLDKENKDLSKELRDRVEELLRKIEETVR

SEQ ID NO: 11419 - protein, 186 aa, Artificial Sequence; identical to SEQ ID NO: 11418
  Synthetic

SEQ ID NO: 11420 - protein, 178 aa, Artificial Sequence
  Synthetic
KAAEEIRKKVEDYKRESEKILEEVEDHSRRSKETLKRLLDDLRRAVEELKRRLEELKRRPRTEEIAKRAEEAVRRAAERIKKVIDDVERHIRENAKELKRLLEEDREASRRLEDEIDKEVKAREVADELKKRLKRANEESERVLRELAERNKTALEEAERVLRRLKEEIEKVLRKLKK

SEQ ID NO: 11421 - protein, 178 aa, Artificial Sequence; identical to SEQ ID NO: 11420
  Synthetic

SEQ ID NO: 11422 - protein, 182 aa, Artificial Sequence
  Synthetic
SEVEDLRRRVEEIKRRVEEILRENKEVSEKSIRELERLLEELKRLVDELLKRLEELKREGRDKKEELKKLLEDAERLLRKVEEEIERLKRESEDHLRRSNEEVDELVKRMEELLKEIEKRSRDDDLRRALKDVVDEVKKVVDELREENDRLRKENKRAVDEVRKELERLLRDVERVIRRAEK

SEQ ID NO: 11423 - protein, 182 aa, Artificial Sequence; identical to SEQ ID NO: 11422
  Synthetic

SEQ ID NO: 11424 - protein, 182 aa, Artificial Sequence
  Synthetic
EELDRLRRHADESRKRAEEILKRNEEEIRRLVEELKRILKTNEDVLRDLEKKLEDLKRRGERREEDLRKLLEDAKKHLTDSNKRLEELKERIERHLRRSNKELEDILETNRETLKELEKRSRDDKLRTTIDEVRRRSKKVLDDLRDRNRRLLEEVDRAIKEVRETNEELLRRLKRVIDEVRR

SEQ ID NO: 11425 - protein, 182 aa, Artificial Sequence; identical to SEQ ID NO: 11424
  Synthetic

SEQ ID NO: 11426 - protein, 185 aa, Artificial Sequence
  Synthetic
SAEELLRTIEKRIEDNHRRLEEILEEIARLIEDMLRTDERIVREIKELLKEVLDRVRRAGVPEEVLERVRRELERLKKELEELRRRSEEKVKELKRRLEEIRRKLEEEHRDLRRKLEELRRDLGDKEEVVKKLVEDVERELERSLREAEDLLRRVEEVIRTSKKESKDVLEKIERLLRDLERRTR

SEQ ID NO: 11427 - protein, 185 aa, Artificial Sequence; identical to SEQ ID NO: 11426
  Synthetic

SEQ ID NO: 11428 - protein, 180 aa, Artificial Sequence
  Synthetic
SVAEELKKEVDDLLRDLKKKLDDVRRDHERLLRELEEHLERSRERVERLLRTLEDVARKGRVEEELLKELKKRIDEIAKENRDLLKELEERSRDTLRKLRETLKKLKKRVDDLIRKVEEEKKIDRKVIEKIERDIRKILKEVEEVLRTLKKKSDEILERAKRVTEKIERDVTEILERIKK

SEQ ID NO: 11429 - protein, 180 aa, Artificial Sequence; identical to SEQ ID NO: 11428
  Synthetic

SEQ ID NO: 11430 - protein, 180 aa, Artificial Sequence
  Synthetic
SVADELRKTAEELLKRLREHLDTSRRRVEDLLRRNEKKLRDVLREVKKLLDELRELKERGRVDDEVLKELKKRVDDLIRELEETNRKTREDIRRILEENRKLLEDLRDEIRKLEEKVRRDNKAPEDVIREIKDRVRRILDEARRVSEKLRRDVEKINRESREVLERIKELIKRILKEAKD

SEQ ID NO: 11431 - protein, 180 aa, Artificial Sequence; identical to SEQ ID NO: 11430
  Synthetic

SEQ ID NO: 11432 - protein, 178 aa, Artificial Sequence
  Synthetic
SELEELLREVDDSLKKLETEAKKLLDEVRDSLRKLEETLRRVLREVEEELKELEKENSKDDRTLERVKEMLDRVAKRIKDMNREHRKKVKELEDRVRELNKRHRDKLEELAREVSKNSDKRVEDVLREIRRRAREINERLKKILKEAKEVAEKVNEETRRVLKEIKELIERVLRELRK

SEQ ID NO: 11433 - protein, 178 aa, Artificial Sequence; identical to SEQ ID NO: 11432
  Synthetic

SEQ ID NO: 11434 - protein, 176 aa, Artificial Sequence
  Synthetic
REAEEAKEEVEELNRRNKKELDDARRRVDELDKRNKDRLKESSDRVKRLVEELERVKEEGRSDDRLREKIERMLKTSADELERLKEENKRALRDLAERLRELIERNRRKLEEITRRTVPDKDVLKRLAELIKESIRELERVLEELAEKIDRSLKELDDVLRKNETDLKRVIEDLKR

SEQ ID NO: 11435 - protein, 176 aa, Artificial Sequence; identical to SEQ ID NO: 11434
  Synthetic

SEQ ID NO: 11436 - protein, 179 aa, Artificial Sequence
  Synthetic
DEAEKAKRDSEKVVEDNRKMLEDSTRRAERLNEENKKELKKSTEEAEKILREIDETKRRGTDDEVVKDLIRRVEELLERSRKKLEDLTRDNERVLDESRRRLEKLIRDNERIVKDLTDRVVRVDEVLKRLKEEHRRLIEELEEVLRRNEEIIRRSIEDLERVLDRNRRELEDVIRRLKE

SEQ ID NO: 11437 - protein, 179 aa, Artificial Sequence; identical to SEQ ID NO: 11436
  Synthetic

SEQ ID NO: 11438 - protein, 179 aa, Artificial Sequence
  Synthetic
REAEEVERKVEELNRRNRKVLDDARKESEEVVRRNREFLRRLEERVRTILRELDKRKRDGTSEEVIKRLIDRVRKILEDIRRLVDELIKRNERIVEKLTRIVEELIRRNKKLLEDIRRELVKVDEVLRRLAEDIERSIRELEKVLRELERIHRELIKELKEVLKRLEKDAKEVIERLRT

SEQ ID NO: 11439 - protein, 179 aa, Artificial Sequence; identical to SEQ ID NO: 11438
  Synthetic

SEQ ID NO: 11440 - protein, 186 aa, Artificial Sequence
  Synthetic
SLAEEIDKTIRELAKRHEKTVEDIKKIITELEKKHRDTAEELERIVREIEKKIRELKKRLKDDKDKLRELKDELRRILEDAARKSKRVVEETEEVNREINKRSEEVVRDTERVLRKIADDLRRRIRREELERVLREAEETLRRLIEKDEKVNREADEKSERLIREDEKVLEDVAREVERLLRELDK

SEQ ID NO: 11441 - protein, 186 aa, Artificial Sequence; identical to SEQ ID NO: 11440
  Synthetic

SEQ ID NO: 11442 - protein, 186 aa, Artificial Sequence
  Synthetic
DEDREARELVERLREEHRRTAEEIKKIIEDLERKHRETMERLKRIIEKIERDIRRLKRDLKDDKEMVERLKKKIKDILKKLAEESKKVVEETEKVNEDINRKSKEVIDRSRKLLEDLRRKLEERSRDKELERVLEKVARDLKKLVDDDRRVNETANRRSRKLIEDDKRVLEEAAKEVKRLLDELDK

SEQ ID NO: 11443 - protein, 186 aa, Artificial Sequence; identical to SEQ ID NO: 11442
  Synthetic

SEQ ID NO: 11444 - protein, 171 aa, Artificial Sequence
  Synthetic
DTERTVKEKIRKWKEDVERVERRLEELVDRARKLSKENVDRMRELVRRLEDRVRKDPDKDKLRKEVERLERRIEESHREVKELVERIKKEIKELVDELHRRSEDIKRDLEEKVRVREVLEDARRKIDELNERVERVAETVRRKLDKILEDNKRVVERVKEEIRRVLEELER

SEQ ID NO: 11445 - protein, 171 aa, Artificial Sequence; identical to SEQ ID NO: 11444
  Synthetic

SEQ ID NO: 11446 - protein, 174 aa, Artificial Sequence
  Synthetic
SEEEVLREAAKTVEKLLDEIRRSLEKVSKRVEDSNRELKESLDRVRERVRELLEELRKNNVDRTLLEDVRRKLERIEERNEEMNDRSRRKLEELRERNRKILEDIRRTLEDLKRRQLPKDDVERTLREIAKLVDEVDKENKRALRENEERVKTLNRENEEMLKRIEEEVRRATK

SEQ ID NO: 11447 - protein, 174 aa, Artificial Sequence; identical to SEQ ID NO: 11446
  Synthetic

SEQ ID NO: 11448 - protein, 185 aa, Artificial Sequence
  Synthetic
DLEEVAKEVKKALDELLKRNEDSARRVKEAIRELLKRINDVTREVEETLDRLLKEVEDGGVPEEDLKRAEDEVRRLKEDLKRRDERLERAARTLEREIDKLLDENRRKVERLKEEIDDLARKGQPAERVVKRLEELLREAAEHSKRSNDELERLLDRLRREVERYERELEKRKKEAKELADKLRK

SEQ ID NO: 11449 - protein, 185 aa, Artificial Sequence; identical to SEQ ID NO: 11448
  Synthetic

SEQ ID NO: 11450 - protein, 182 aa, Artificial Sequence
  Synthetic
DLERRLDELLKRIEDRVRELVRTLEESLRELERRVREIIRRLEEHLRRIEKMVRDLKRANKPDKAVKDDVRRLRENADRLNKRVREELKKLREDVKRVNEDVKRELDKLAEEAKDMLRKLREAGIDERVIKKAEEDVRRLLREIEEVSERHKREVDRLEREIEEVSREHKERVEKLLREIER

SEQ ID NO: 11451 - protein, 182 aa, Artificial Sequence; identical to SEQ ID NO: 11450
  Synthetic

SEQ ID NO: 11452 - protein, 182 aa, Artificial Sequence
  Synthetic
KLEEDLKRILDELRRMAKEIIDRLEDHLRKIKKDVDKLSKENKDHLKEIEDTVRELKRNNLRREDVKRKAKELEKNVKRANEETERKLRELEKNVKEMNTDVKRRIDELVKRAKDILDRLREEGIDERVIKRVDEEVKKLAEEIRKVSEEHEKRVKKLLKEIEKSSEDHRRRVEELLREIDR

SEQ ID NO: 11453 - protein, 182 aa, Artificial Sequence; identical to SEQ ID NO: 11452
  Synthetic

SEQ ID NO: 11454 - protein, 177 aa, Artificial Sequence
  Synthetic
SEEEEVEEELERHHRDVEEYVKRLKELLDKLRRKNETTVRDIARLAKKHHDDVDELKKRNIDEETKDRLREKTEELKRRLEEVKRRLEEEHKRAEDKAREDNERKKRESDRKEEELRRRNVSREVLKRFKDKVKENRDESERVHREIKERLEELKRKNEDVLRKVKKILDDNEERLR

SEQ ID NO: 11455 - protein, 177 aa, Artificial Sequence; identical to SEQ ID NO: 11454
  Synthetic

SEQ ID NO: 11456 - protein, 180 aa, Artificial Sequence
  Synthetic
KDLEKLVEDIRRLLEELKKTVEDNKREIKELLDRLREKVKENLKRHKELNKRLRDTGAVSEDELRETEKKSRELEKRSRDLLKKLEERVEEIERRSDEELKRLEDRVRKIEDDLRREGDRGKEVKDRIEEVLRELREAVRRHHEKVKEVLRELKEALDKHHKDVTDSLRDVERLVEEARR

SEQ ID NO: 11457 - protein, 180 aa, Artificial Sequence; identical to SEQ ID NO: 11456
  Synthetic

SEQ ID NO: 11458 - protein, 174 aa, Artificial Sequence
  Synthetic
SEKEILDEIRDRIRKLLEEIKDYLEKSKKKIRDLLEKIKKVLEDNKERVDRLLDVIRKNRIRDEDLKKAIEEDERRLEKIRRELEKAKRDIEKANEELEEKLRRAATKIKEDLDRKNIDDDVRREAKRLLEEVAEAVRRIHETSKRLLERVDEEMKRVEETIRKTNKEVEDAKR

SEQ ID NO: 11459 - protein, 174 aa, Artificial Sequence; identical to SEQ ID NO: 11458
  Synthetic

SEQ ID NO: 11460 - protein, 176 aa, Artificial Sequence
  Synthetic
SDVEKLIRDAEKKMDDFRKDSERLVRELEEKLKRHEERVRDLLRELKELLEEVRRKDSRDEELRRLEEEIDKKLEEVDRRTEELKRRIDKELEDHRRKLEKLREELDRTLEDLVRKKGRSSEKIKEAVDRIKKALRDSHKELAEVVERIKRKLDETNRELKDEARKIKEELRRVEK

SEQ ID NO: 11461 - protein, 176 aa, Artificial Sequence; identical to SEQ ID NO: 11460
  Synthetic

SEQ ID NO: 11462 - protein, 182 aa, Artificial Sequence
  Synthetic
SEVETVKKRLEDSTKESEDTVRKVKRELERLIERSEDTLRRIKKRLDDLIRTIEDLKRRGNSDDRMEKRLEDELKKIEDELRKYHEEVKRKLDELRKELRREDERVTREHDTLREELTRREGGKELLDTLRRLLEENKRRHKETVDEIERLIKEVERANREILTRIKKALDDVRRAVEEIKR

SEQ ID NO: 11463 - protein, 182 aa, Artificial Sequence; identical to SEQ ID NO: 11462
  Synthetic

SEQ ID NO: 11464 - protein, 174 aa, Artificial Sequence
  Synthetic
REVEEVLRKVREDSKRNKDELKRLLDEARKESEDNKRDLEKLLKEVREEVRRVEEILRKTRIDDEELERLKKRVREAEKRVEDRTRELEKRVREVEKEVKKRNRDMEETVKDIRRKLKDEDVLREIETLLDKNHKDNKKVLDDIRELLKENADRNRRVLEEIKKLVEDVERKVK

SEQ ID NO: 11465 - protein, 174 aa, Artificial Sequence; identical to SEQ ID NO: 11464
  Synthetic

SEQ ID NO: 11466 - protein, 179 aa, Artificial Sequence
  Synthetic
DEDEKALREIKKLIEDNERLNREVNERIERLIDRARRLMERVNREIERLIKEVRERLGEEDKRAREILRRLKEELKKHKKESDDLLEKLKRRLDEHRKDSKRSKDDLKRELDRVAAKRLRGEELEKTLRDIRKRSKEDADKVKKSLEEVEEEIRRIEKRLRESLKKVEDDIERIRREAT

SEQ ID NO: 11467 - protein, 179 aa, Artificial Sequence; identical to SEQ ID NO: 11466
  Synthetic

SEQ ID NO: 11468 - protein, 176 aa, Artificial Sequence
  Synthetic
SEIEKLTKEIRDLIRTSREEIKKLMEELERNVREAEESIKRLLEKAEELIRRIAEENKDVRELLKKLEDDLRELAKELKKVVEDSRKKLKELIDELKKYIEDLDEELRRLEDVLRRNQTRKEDVKRELERIKKSSDDVRKKVEDESRKHREEVERLERELDRKLEDIRRKVEETKT

SEQ ID NO: 11469 - protein, 176 aa, Artificial Sequence; identical to SEQ ID NO: 11468
  Synthetic

SEQ ID NO: 11470 - protein, 186 aa, Artificial Sequence
  Synthetic
SEIEKLAEDVERIAKKIEDVVRELRKANEDIIKEVRDINKELRDKVEEILRRIEKIVRDRLKDDKDEIDKVERDIERIRDEIRKSSKRVEDTIRRSERETDKLAREVEDTIERIREELEEVKRRQVDKEILDRIRKKLRETLERVRDRLRKYLEDLERRLEELRREHRKTLEELKEKLKRLADRVK

SEQ ID NO: 11471 - protein, 186 aa, Artificial Sequence; identical to SEQ ID NO: 11470
  Synthetic

SEQ ID NO: 11472 - protein, 178 aa, Artificial Sequence
  Synthetic
SEVEDLERRAREVNKRIKDLIDRLRERVRKIEEDIRRLNKELKEEVDKIIEEIRKDGGENREEVRRLEEEIKKKIEESNRDVERVIKEIREKIRELKKRADDLSEESKRKIEEVRRVRDGKLIEELLREHEKMLKEIEDRIRKIERELDELLKTLEDKHREILDELEKELRKAKERRR

SEQ ID NO: 11473 - protein, 178 aa, Artificial Sequence; identical to SEQ ID NO: 11472
  Synthetic

SEQ ID NO: 11474 - protein, 182 aa, Artificial Sequence
  Synthetic
SDIERILEENEKTNRENRKRIEDIRRELEERLDRNRRRIEEILRRAEKMLEEIEDIFRRSDISEDIVREAEKTLRDIKRELDENLRRNEETARRIEEELRENLRRNEEKHRRIEKRLDEKVRDEDKLRDLKKKLRDSLRTLEELHRKLKKDLDEILRRLEELHRKLKEDLDRILKAVRDTAK

SEQ ID NO: 11475 - protein, 182 aa, Artificial Sequence; identical to SEQ ID NO: 11474
  Synthetic

SEQ ID NO: 11476 - protein, 182 aa, Artificial Sequence
  Synthetic
SEIEDIKRRNEENNRRNKKRIDDILEELKRRVEENRRRLEDIERKLREDKERLKDIFRRSRIDDKAVEEAKRRLERIKEELEKNLTRNKDDAERIKRELDENLKRNEELHRRIREDLRRRVTDEDKLRKLEEDLRRSLETLREIHRKLKEELDRILEELKRLHERLKRRLDEIADEVARTAR

SEQ ID NO: 11477 - protein, 182 aa, Artificial Sequence; identical to SEQ ID NO: 11476
  Synthetic

SEQ ID NO: 11478 - protein, 182 aa, Artificial Sequence
  Synthetic
SDIEEIERRNRENNERNKRRIEEIEKRNREENKENEKDIERILRRAEELLKRAKEILRESDISEEVLKEMEERIKRIKERLERNLRRNAERHKEIKKELRENLERNRELHKRIADELRRRVRDEKKLRELKKKLDDSLRTLEELHRELMKRLDESLKTLKELHDELKERLDRILKEIRDDAK

SEQ ID NO: 11479 - protein, 182 aa, Artificial Sequence; identical to SEQ ID NO: 11478
  Synthetic

SEQ ID NO: 11480 - protein, 182 aa, Artificial Sequence
  Synthetic
SELEKTLEDLKRHSEENKKKLEEDLRDMERNLKENKDRLKKILEEAEKTLKDLERRFREGDIDERELERVRRKMEEIKKRLDENVERNRRKAEDIKRKLDENVKRSEDRVKEIKEDIRRRVRDKDKAEELERRLDELVKENREIHERVKKALDDIVKELEELHERLKRRLEEILRRIAETVR

SEQ ID NO: 11481 - protein, 182 aa, Artificial Sequence; identical to SEQ ID NO: 11480
  Synthetic

SEQ ID NO: 11482 - protein, 175 aa, Artificial Sequence
  Synthetic
SSVERFEKAVKESIENIRRLLEELEREIRESMKHLRELVKELKEALDRIVERLRRTVRDEDELRELIKELEDIVRRAEEKLERYRKRLEDLIDEARRTVEDVERRHREKIEEVRRRNRVEEEDLKRLDKENKDIEKKIRDLVKEARDENRKLKRDIERTLRELEERLKEVEDRET

SEQ ID NO: 11483 - protein, 175 aa, Artificial Sequence; identical to SEQ ID NO: 11482
  Synthetic

SEQ ID NO: 11484 - protein, 179 aa, Artificial Sequence
  Synthetic
SDIEKRLEENERHNERSEERIRELLKELEDHLRRTKREIEKKLEDLKRLLDRLREEDVKREEALRDLAEKVKKIKRELREHHERNRRKVEEIKEELRKHHEDNKETHERIKRDLDRKIRGNEELKRVKDELDKSLKHSRELIERAKERLEEIKKRSKELVDRAEKRLDEILKEVKDDFD

SEQ ID NO: 11485 - protein, 179 aa, Artificial Sequence; identical to SEQ ID NO: 11484
  Synthetic

SEQ ID NO: 11486 - protein, 179 aa, Artificial Sequence
  Synthetic
DEIKEREDDVKRHLDRTREEIEKLLKEMEEHTERSRRKIKKVAEDAEERLRKVEEENSKDRRVLTKLKEDVERLKEELKEHLRRNKKTVEDIKRELREHLKRNKKRVEDIKRELDRDIRGNKELEEVKRKLDRILEESEKLVREAEKRLDELLKDNKRLVEELEKELDRILEELRKRVD

SEQ ID NO: 11487 - protein, 179 aa, Artificial Sequence; identical to SEQ ID NO: 11486
  Synthetic

SEQ ID NO: 11488 - protein, 176 aa, Artificial Sequence
  Synthetic
DSIEDLERRAKESDDHLEKLIRELRDELRRSLETVRRNIEDLRRTLEEVLRRLEEDGADKDLLKDLADKVDTIRKELERSLEEHRKRIEEIEERLKDLHRRHRERIEKIKKDLKDVGEEMLREIKKELEETNKRAEDDVRKIREELREHNERHKERSKRIKEELKRTLDELKKKRK

SEQ ID NO: 11489 - protein, 176 aa, Artificial Sequence; identical to SEQ ID NO: 11488
  Synthetic

SEQ ID NO: 11490 - protein, 186 aa, Artificial Sequence
  Synthetic
SRIETLVRRMKELLKEVEDKSEKSKRRWEDRLKKVAEDSKRRVEEMDRELDEVRRKRERGDRDRKEFSDELRKIKEELDKKLREHHERIKEIEKELEDENRKHHEEIKKIKKELDDIVKEAAEEGADERLLRELKRIVDEVKKELDRLDTEHNKAIEDVKRELRKLDEEVRRIVERVKRELDRLEK

SEQ ID NO: 11491 - protein, 186 aa, Artificial Sequence; identical to SEQ ID NO: 11490
  Synthetic

SEQ ID NO: 11492 - protein, 186 aa, Artificial Sequence
  Synthetic
SEIEDLIRRIRETLKRVEEDSRRSKEEAKRKLDKVKEDSERLVEKMRRDLEKVKRETDKGDRPDEDLRRKLERIKKELERELKEHHDRIERVKRDLRRLNREHHEKIRKIKEDLKRILDDAARKGADEELLKRLKEVVEDVIRKLDRLDKEHTEIVEEVERRLDKLDKDVERIVEEVKKALDETEK

SEQ ID NO: 11493 - protein, 186 aa, Artificial Sequence; identical to SEQ ID NO: 11492
  Synthetic

SEQ ID NO: 11494 - protein, 186 aa, Artificial Sequence
  Synthetic
SEIEKLIEDIRRRLKKLEDESRKSVKDARDMLRRVEERSRDSVRKMREELERVEDESRRGDRPKEALEEIIRRIKKKLDENHKRHHDEIEKIKEELERLNREHHDRVRRAKEDLDRILEKAAREGLDDELLKRLEDVVRDVKRKLDELDERHTRIVEDVKRRLDDLDREHRKIVEEVKKELDKLLK

SEQ ID NO: 11495 - protein, 186 aa, Artificial Sequence; identical to SEQ ID NO: 11494
  Synthetic

SEQ ID NO: 11496 - protein, 186 aa, Artificial Sequence
  Synthetic
SEIEKLIEELRRELEKVKDELERSIEEMDRELDDVRRDSKRLVDEIKRELREVTERTKRGDRPEEVLRKELEDIKRKLRRILEEHHEKIRRIKEKLRRENKRVRDELKRIKDEIDEKVKDVRRKGADEELLKRLEEVAEDVKRALEELLKKHTRVVERVEKALDELDKELERIVREAEKELDRREK

SEQ ID NO: 11497 - protein, 186 aa, Artificial Sequence; identical to SEQ ID NO: 11496
  Synthetic

SEQ ID NO: 11498 - protein, 186 aa, Artificial Sequence
  Synthetic
SEVEEEEKTAEKILEEVAEEIKESIKRIREEVKKNEDDSERSVREMERRLREVEERIRRGDKPKEAVEKEVREIKDELRRNHEEHHRHLRRNERRLDRENEELRRRLEKIKKELEDRLRRLAEEGQDEELLRRLKRVVERVKERLDRLLEEHTRVVEEAKERHRELDERHEKIVRDVVRELDRRVK

SEQ ID NO: 11499 - protein, 186 aa, Artificial Sequence; identical to SEQ ID NO: 11498
  Synthetic

SEQ ID NO: 11500 - protein, 186 aa, Artificial Sequence
  Synthetic
SEVEKVVKELEDELRRVAEDSERSIREMEKRLDDFRKRVRETAEKMKEDLRRVEERARRGDQPEEALTRELERIKRELEKKLREAREDVKRIKDELEKLNREHHKKIKEIKDELRRTLDKLRKDGLEERILKRVEDIVRRVEEELDKLDEKHTRVVKKVSDALDRIVEELEKIVREVAKRLEDLRK

SEQ ID NO: 11501 - protein, 186 aa, Artificial Sequence; identical to SEQ ID NO: 11500
  Synthetic

SEQ ID NO: 11502 - protein, 186 aa, Artificial Sequence
  Synthetic
SEVEKKIEEMRRTLDEARRRSEESKREIKKELDEARKRVEESLKRLRETLKKVEDERRRGDTDKEELKRRIERIKRELDENHKRLKKELEEIKERLRRKNEEHHKEIERIKRELEKKLKDLERKGLEERLLRRVAKVVEDVKRELDRLDEDHTRAVEEVERALDDLLKKHEDVVREVKTELEKLLK

SEQ ID NO: 11503 - protein, 186 aa, Artificial Sequence; identical to SEQ ID NO: 11502
  Synthetic

SEQ ID NO: 11504 - protein, 176 aa, Artificial Sequence
  Synthetic
SELEELIRDIERKLEKVKRDSERSMREIEEDLKRVRKKTEESERRIRDLLDKVRKRKVDKDKLKRIKEELRKLNKDHRDDIERIKRRLDKLNKEHREEIERIKKELRELVKRVEDAGLDRTEDLRRVAKRVEEELDRSNEEHSKIVDKAKRDLDKSNKEHSKVVEDAERTLDRVED

SEQ ID NO: 11505 - protein, 176 aa, Artificial Sequence; identical to SEQ ID NO: 11504
  Synthetic

SEQ ID NO: 11506 - protein, 176 aa, Artificial Sequence
  Synthetic
SELEELEERIERLLEKVRRESEKLLRELEKKLKDVERKIEDSIRKIRDDLRKVRERKVDREKLEEIKRKLEKLNDEVRDDLRRIKREIAELVKTHEKRIREIKEELDRTLERVERTGLDRTEDLRRVLDRVKKDLDRSNEEVRREADRIMKELDKLLKKHSDVVKEVLEALDDTDR

SEQ ID NO: 11507 - protein, 176 aa, Artificial Sequence; identical to SEQ ID NO: 11506
  Synthetic

SEQ ID NO: 11508 - protein, 182 aa, Artificial Sequence
  Synthetic
SEIEEIKRRLEETNKRVREKNKRSVDRIKEHLERSRRRVEEIIRRIEKLLEELEEKARRTDISDDVIRELKKRLEDILKELEEHHKRNKEDSDRNRKELEETLRRLKKKHEDIKRELEKMDVDEKLLRDLEKALRDSIRTLKRSVEENDRINKEANEDSERLLRELKKVLEKAKKDVDELRR

SEQ ID NO: 11509 - protein, 182 aa, Artificial Sequence; identical to SEQ ID NO: 11508
  Synthetic

SEQ ID NO: 11510 - protein, 184 aa, Artificial Sequence
  Synthetic
SLEEELRELARRLKEEVRKLEETLEKVLEDSARNIKRLIDDLKRVNDELRKRVDDLIREVGDKETVDRMKKEIDDSSKEVEKLVRELEKEVDDLRKEHEKLVRDIRRKIKELEDEIRDLERKRIEKEALDRVRKKLEDALKKLRDEVREMKKKNDKTNKEVKDKADELRKKHEDTLEELKKRVK

SEQ ID NO: 11511 - protein, 184 aa, Artificial Sequence; identical to SEQ ID NO: 11510
  Synthetic

SEQ ID NO: 11512 - protein, 178 aa, Artificial Sequence
  Synthetic
SEVDEIIKRIEDLLKEVRDESKRNEDRIREKLKRLKKKSEDNAEKIKDELKKIRDRKVDDEEIKKIKEELRENLKRVEEDVRRIKEDLDRNLDEVRRRLEDIKRKLEEMLKDAERRGEPKEVLDTLRDAIRRVKEELDRNLEKNTELIKRVKETLDDLLRRNKELIRKAEETLDEERR

SEQ ID NO: 11513 - protein, 178 aa, Artificial Sequence; identical to SEQ ID NO: 11512
  Synthetic

SEQ ID NO: 11514 - protein, 182 aa, Artificial Sequence
  Synthetic
DELEKIRKELEDLSRENKEKLERIARELKRLSEENTETLEKLKEEIRRLLEKLKRIVEKDGTRDELIKEIEDELRRLLDEVRKNVEDNKRKLDEIRKEAEKDLRDNERKLEEIERRARKRGLPKEMLDRIKELLDTHRRILEDIKREIDKLLEDHRRRLEELLRDLKRALDRVREEVDRLRR

SEQ ID NO: 11515 - protein, 182 aa, Artificial Sequence; identical to SEQ ID NO: 11514
  Synthetic

SEQ ID NO: 11516 - protein, 176 aa, Artificial Sequence
  Synthetic
DDVRRIEEEIRRTLRELRETLKRVERRNREENEDLKDKMRRMKKENEDTNERVKKEGGGGEELKRRVEELARRHEKLVREIRKRLRDLAEEHKKLVEEIKRKLDEIRRRIEEAKRRGTEDKERLDKLLEDLAKEARKVIEDLKEILRRTKESIDEVEKTLREILKKSKETADRVET

SEQ ID NO: 11517 - protein, 176 aa, Artificial Sequence; identical to SEQ ID NO: 11516
  Synthetic

SEQ ID NO: 11518 - protein, 176 aa, Artificial Sequence
  Synthetic
SDLERLKKRNDDANRKLKETLDRVEKENRDVNRKLEKELKEVEEKNRRENKKVRDRGGGGKELEDRVRELKEEHERLVEEIKKELEELEKRHRKLVRDIEEIVRTLAKEHEDMKRKGTDDKEELDKILTRSEEVARRIIEELKKILEETRKSAERVIRRLEEILKESEREVREVET

SEQ ID NO: 11519 - protein, 176 aa, Artificial Sequence; identical to SEQ ID NO: 11518
  Synthetic

SEQ ID NO: 11520 - protein, 178 aa, Artificial Sequence
  Synthetic
SEVEETIKRVRDTLKKHNEESEKAIRELEEELKRLDDKNREAVEDVKRTLDELRRTKSSEDTLRKVLDKLRRDVERLVREHEAVLKKLEDRIRELKEKTKKVLEEVARIVTEVERKVKDKDLRKRLEELLREVEEDLKRNIEKLDKALKEAKEVIERSIEHLRRVLEEVERVLRELAR

SEQ ID NO: 11521 - protein, 178 aa, Artificial Sequence; identical to SEQ ID NO: 11520
  Synthetic

SEQ ID NO: 11522 - protein, 182 aa, Artificial Sequence
  Synthetic
RKEDEMRKLLDEIEKDLKRNDERVRRVLKRSKENLRRLEERAEKLLETVEREIKRLEEEGKIREDEARELRKRLEDRRREVKRELEEWERKLKEILDEVRESLKRVRERLEEIRERMEKEDRDEREVKRTIDELKDELRKHNDKTEKLIRRARETDKELNDRVAKREEEARRELEEVDRRVR

SEQ ID NO: 11523 - protein, 182 aa, Artificial Sequence; identical to SEQ ID NO: 11522
  Synthetic

SEQ ID NO: 11524 - protein, 182 aa, Artificial Sequence
  Synthetic
SLEEAVEKLLRDSEENLKKNEEDVRRLLKKSKENADRLRDEVRKLLETAEREIKRLEDEGKISEEEAKKLREELKRILDDVDKKLREWERALEEIERKVKRSLEEWRRELREIKDRVKKEDLDERLIRETEKDVKRRDEEHNTRTEREIREAKKEDEKLNKEVRDTEKRLRDELRRVEERVR

SEQ ID NO: 11525 - protein, 182 aa, Artificial Sequence; identical to SEQ ID NO: 11524
  Synthetic

SEQ ID NO: 11526 - protein, 182 aa, Artificial Sequence
  Synthetic
SKEDKVRELLRRSKENLDRVREEVRKLLKKSRDTLEELRERAKRLLEEVEEVIKRLEEEGVISEDTARRLRKALEDIKRDVERSLKEWEDRLREILEDVRKELEDWARALDEIRKRVEEEDRDEKEIEETIRRVEDMDRRLNERLRKKIEDAERMDEALRERVERLIRRVRKELEDVERRVR

SEQ ID NO: 11527 - protein, 182 aa, Artificial Sequence; identical to SEQ ID NO: 11526
  Synthetic

SEQ ID NO: 11528 - protein, 174 aa, Artificial Sequence
  Synthetic
SELEEVARRIEKMIRDLEKDLRELERKVRESDERLKRDLERNEKEHRDTIEAMRRREPDSRVDEEVKRLEDKNRKKNKEVKDESRDLKRELETTLRRIEKEIKKIEDDVRRREGDKDVRDALKKLLDELKKAVEDVRREIERLIREHKRVTEEVERADKELNDRTRKAADELRR

SEQ ID NO: 11529 - protein, 174 aa, Artificial Sequence; identical to SEQ ID NO: 11528
  Synthetic

SEQ ID NO: 11530 - protein, 175 aa, Artificial Sequence
  Synthetic
EEVERLEEEVRRRKKEWEDRLEEVKRRNEKAKRESERENEKIAREVREVVKELRERGGGGEELRKRLEDLARKLEKYKEELRRRSRKMAEEVERVKKELRERNEELARRVEELERAGADKRRLEELLRDHSRMIRRVEAELDKSLEDHKRALDENEKRIDEWLERLRKIVEEVEK

SEQ ID NO: 11531 - protein, 175 aa, Artificial Sequence; identical to SEQ ID NO: 11530
  Synthetic

SEQ ID NO: 11532 - protein, 175 aa, Artificial Sequence
  Synthetic
SKIEEIERRVRELEETWRRKLEEVEKDSRRSVKKMEEDLERAARETEEIKRRLREEDIREEELKETVDRHHKKIEEIKRELEKENKDHHKKIRDVERELDKANKELADDMERVKKDNGDERKLEELLRKHNEVIKRVKEELKRLDKEHTDIVEEVKKELDKLDEDLKRVADEKRK

SEQ ID NO: 11533 - protein, 175 aa, Artificial Sequence; identical to SEQ ID NO: 11532
  Synthetic

SEQ ID NO: 11534 - protein, 175 aa, Artificial Sequence
  Synthetic
DEDEDLERLLRKLKRVLDEIRKRIRENIEENREVVERAAREVKKSIDENRKVVDDVQLPDEELRKLREDSERKVREIERRIEEIKKDSDRLARELEKTLEDLARKVEKTERELRREGGKGEEVRKKIEDLERELRRTLEEIHKENEKSKRKIEKALRDIREENKKHIREIEETKR

SEQ ID NO: 11535 - protein, 175 aa, Artificial Sequence; identical to SEQ ID NO: 11534
  Synthetic

SEQ ID NO: 11536 - protein, 182 aa, Artificial Sequence
  Synthetic
SDIETLTRDVERSIKELEDHLKKHHEEVKERIRRLEEHADELRRRAEKLKEELKRMKDRGDSDEEVLKDILRRVKEEVDRVKKTNEDLEREVRDSEEKVKEKNRRHKEEIKKRVKEMKDRDTKTKVEEDVKRLVKKLDEVNERHRREIERNRKELEDVSRRHKEKVDRILEDIKEALDRVRK

SEQ ID NO: 11537 - protein, 182 aa, Artificial Sequence; identical to SEQ ID NO: 11536
  Synthetic

SEQ ID NO: 11538 - protein, 178 aa, Artificial Sequence
  Synthetic
SESETVKKENEDHIRKLEDDLRKLEEDNKRHVDDIERRLRDLKRENERFAEEVKKRGGGGEELKERLKELERRHEEELKDLRRSHEEYAKRVEEVLRRARRSSEEVERKLDRIRKEIDDEEVKKTLETLVRTNRRAIREVERRLKESLDHNREVLKRAEEDLRRSIRHLREVVREADR

SEQ ID NO: 11539 - protein, 178 aa, Artificial Sequence; identical to SEQ ID NO: 11538
  Synthetic

SEQ ID NO: 11540 - protein, 185 aa, Artificial Sequence
  Synthetic
SIEDELRELKERLERVVEELRRLHEKTIEDLKRVVEKSEKTLRDIRRELERVVEEVRRRRKDLEELLRRLDKKLTELEKELKKLLEDHRRVLRRLTEENRKALEKWEELLRRLTKELKEVKDRRVDKEVLDRLRKKVEDTIRKMKDEAKKLDDEHKKAVRRLEERNEETARRVRKAVEDIERETK

SEQ ID NO: 11541 - protein, 185 aa, Artificial Sequence; identical to SEQ ID NO: 11540
  Synthetic

SEQ ID NO: 11542 - protein, 185 aa, Artificial Sequence
  Synthetic
SIEDILRKLTKDLEDVIRRSRKTSEDLKEELKRVLDKHKEKLDRILEDVERVVREVEERRKDLEELKKRIRDELRKIKKRLEESLKRTEETLRELERRNRELNERHERTAREVRKRLEEVREKRVDKEILDRLEEEVRRLIEELDKENDEARKEHREVAKRNEEEIKKLEEEAKDSIRRLREESR

SEQ ID NO: 11543 - protein, 185 aa, Artificial Sequence; identical to SEQ ID NO: 11542
  Synthetic

SEQ ID NO: 11544 - protein, 178 aa, Artificial Sequence
  Synthetic
RESEELDKRLKEIAKDIRDKLDEIRRENEKTAKEIEDTIREIERDNERIDREMERRGGGGEEVERRMREAKRRHDKILKDIEDRIRTLERKHDEILKEIRREIKRVEEELREREKERDDKRFKDVIRRLEEELKKLLKRAEEEIRDSKRHLRELLKKVEKVIRESKANLDRTLKKLRD

SEQ ID NO: 11545 - protein, 178 aa, Artificial Sequence; identical to SEQ ID NO: 11544
  Synthetic

SEQ ID NO: 11546 - protein, 185 aa, Artificial Sequence
  Synthetic
SEEEDLRRKVEELEERVERYKEELKKEIERIETENKRHVEELERRLRKIAREVDDAKRRQLSREEVEEMLRRLEDALRRIEKNVRDVNRRSKKELEELERTSKEVLDRIEESLRRLAEEVKRSPRTEDLDRLLDEMRREAERLLDELRKVTERIAREVKRSNEENKKVLDEIRKAIKDLLDKLRK

SEQ ID NO: 11547 - protein, 185 aa, Artificial Sequence; identical to SEQ ID NO: 11546
  Synthetic

SEQ ID NO: 11548 - protein, 179 aa, Artificial Sequence
  Synthetic
STEEKVEEDLRRLEEKNRRHVREIEERLERMKEENRDHVRKLEEKLRRLDEEVRKVKEGGETKDEELRRLEEELRRTLEELRRSVDKSRKDHRREEETITRSHEKLEEEHRRVLDDLRKKIRNRETLKRAERKLRESLRHNREVLERARRELKKSLDHNDKALEDAERRIREIREELEK

SEQ ID NO: 11549 - protein, 179 aa, Artificial Sequence; identical to SEQ ID NO: 11548
  Synthetic

SEQ ID NO: 11550 - protein, 180 aa, Artificial Sequence
  Synthetic
DLKEVLDKLRELVREVTERIKRTIEEIERLLRKVEREMRETIRTDEELLKTVVDELRRKNADERLLRTVTEASKTSIKLNEDLMREVERAVREVIRINEELLRRVREVAKRVLEIIKNSTDRRKIKKVLDDLRKIIEDIERESRESLERLREIIERLKRRSDKTLKDSKKVIDDIRRRTK

SEQ ID NO: 11551 - protein, 180 aa, Artificial Sequence; identical to SEQ ID NO: 11550
  Synthetic

SEQ ID NO: 11552 - protein, 180 aa, Artificial Sequence
  Synthetic
DLEEVLEDLRRLMEEVKRRIERTIEEDKRLLDEVERRIRETIRRDRELLKEAERDLREKRVDERLMDTVRRVSEESVRRNEKLLREVKRVSEESIKINEDLLKEVTRVAKEVLKIIRRSDKRDKIRKVRKELREIIDRIRRESERSLEESRRVIEKIDEKSKRTLEESRRVIEEIKEKAR

SEQ ID NO: 11553 - protein, 180 aa, Artificial Sequence; identical to SEQ ID NO: 11552
  Synthetic

SEQ ID NO: 11554 - protein, 169 aa, Artificial Sequence
  Synthetic
SSEEMLRTVEELIKEARKRLDESLEEVRKRIEDAKRRHEESNDENRRLVEDAKRRVNTEEAKKRIDEVLKKSEEVNRKAKKDLDEVLKEHERVIRRIKKELDEVLEKVRRLGEDKDVLEELREIIDRLRRESEDSLRRLEKIIKDSEDRSRESSEELKEIIKRLLEEDK

SEQ ID NO: 11555 - protein, 169 aa, Artificial Sequence; identical to SEQ ID NO: 11554
  Synthetic

SEQ ID NO: 11556 - protein, 169 aa, Artificial Sequence
  Synthetic
SKDEVLEEVERRIRTAERDLERMVRRNEELIRDAKREHERSNRENERLVTEAKREIDIEEVKRELDEVLKKSKRVNDKAKEELDRVLEKSKRVADEIRRLLREVLDKVRKLGNDKDVLDELRDIIRRLREELKKSSDDLERIIRRSVKESRDSSEELRKIIEDLKREAT

SEQ ID NO: 11557 - protein, 169 aa, Artificial Sequence; identical to SEQ ID NO: 11556
  Synthetic

SEQ ID NO: 11558 - protein, 169 aa, Artificial Sequence
  Synthetic
SEKEVLDEVKELIERAKERLRRMLERNERLVRDAERKLKRLLDEDRESIERVKKRLDIEEVKRLLDKVHEKSKRVAERLLDELRKVLKKSEKVIRDITRTLDEVLKKVEELGRDERVLEELKKEIRRLEEEVKKSSEELERIIEKLLEELKRSLEESEDIIRRLEEETR

SEQ ID NO: 11559 - protein, 169 aa, Artificial Sequence; identical to SEQ ID NO: 11558
  Synthetic

SEQ ID NO: 11560 - protein, 169 aa, Artificial Sequence
  Synthetic
RKDELLRRVEEEIKKVKKRLKEMLDTDRKLIEDAERKLEEAERRDSDLIRRAKERVRDERVKEDLDRVNDKSREVVDRIKKKLREVHEKSREVVERIEEELDKVLKEVRDLGEDDRVLEELERIIEELKREIEKSLRETEKIIKELEDELRKSLEETERIIRKLEEESK

SEQ ID NO: 11561 - protein, 169 aa, Artificial Sequence; identical to SEQ ID NO: 11560
  Synthetic

SEQ ID NO: 11562 - protein, 169 aa, Artificial Sequence
  Synthetic
RSEEVLREVEKAIRRAKEELKRAVETDRRRNTEAARALEEILDTDRRLIEEAKRRLRIDDVKRLLDEAHDKSRKVVEDAKRLSNEASKRSEDVAREIEKLLDDVLREVEKLGDDEKVLRDLKKIIDDLRRRIEESLRDSERIIEKLRRDLEASLEESRRIIERLKEKAD

SEQ ID NO: 11563 - protein, 169 aa, Artificial Sequence; identical to SEQ ID NO: 11562
  Synthetic

SEQ ID NO: 11564 - protein, 169 aa, Artificial Sequence
  Synthetic
REKELLDKVKELVERAKRELERLVREDDKLNEDLKRRLTKILKEDSDRIKEVKERLKDEEVKKKLEEVNKKSEDVIRRIVEESDEASRKSKEVAKKLLDDLDRVLDEVRKLGGDDKVLEDLRKIIEDLLREIEESLRESREIIKKLEKRAKDSLKETEEIIEELERRDT

SEQ ID NO: 11565 - protein, 169 aa, Artificial Sequence; identical to SEQ ID NO: 11564
  Synthetic

SEQ ID NO: 11566 - protein, 182 aa, Artificial Sequence
  Synthetic
SEVEELLDRVKKVADESRREAKRLLDESKRVIDKSLDEVRRLLKESREVIEEVKKRVDEKRDLREMVKRLLEELKKISRESIERNKRLLEDLRRISRESLEANKELLRTLKEIVDKVIRDIRRRNADEVLKRLEDLLRKVAEEHRRITREDEELLKRAEEEHERFSKEDEDLLRKAEKEVED

SEQ ID NO: 11567 - protein, 182 aa, Artificial Sequence; identical to SEQ ID NO: 11566
  Synthetic

SEQ ID NO: 11568 - protein, 182 aa, Artificial Sequence
  Synthetic
SRVDELVKRVRDVAREVKRINDELLKRVEEVIKESRDRVRELLKKVEDVIRRAAEEIDRIRRDREVVKDLLRRLKEDVDEVIKDNERLLEEVKRIVEDVVRKAEKTLEDLRKIVEDVIRDLDRDRAKEVVREIEKLLEDVRRTSEDTVRKIRELVAEVDDDHRRASETIRRLLKEAEDRARK

SEQ ID NO: 11569 - protein, 182 aa, Artificial Sequence; identical to SEQ ID NO: 11568
  Synthetic

SEQ ID NO: 11570 - protein, 182 aa, Artificial Sequence
  Synthetic
SEVEELLKDVERVIKRSEDEVRRLEREVEKSSEDVERINRKLLRDSREVIKKVIEDVRRVKDDKDVVRKLLEDLRRISEKSVEDMKRTLDRDREIVDKVLKENERLLEELEEIVREVERRLDERRAKEVLDRIRELLETARRRHKEATKKIKRILEESEKKSRRSIEEDKRLLDEAKEEVRR

SEQ ID NO: 11571 - protein, 182 aa, Artificial Sequence; identical to SEQ ID NO: 11570
  Synthetic

SEQ ID NO: 11572 - protein, 181 aa, Artificial Sequence
  Synthetic
SVEEVVRDNERRLEEDAERTRRVARRIEKLLDELRKKVEDVIREAKERLERLLEEIGEESDVIREVEERVKKLLKRVTDLLDKVRREVEKLLRELEESLRKSEEDVRRSIEDVKRKMSDERAEDLLREVNKRNEEVIRRNKELLDEVEKRIREVIKRLEELLEKVKRELERVADELRKAKK

SEQ ID NO: 11573 - protein, 181 aa, Artificial Sequence; identical to SEQ ID NO: 11572
  Synthetic

SEQ ID NO: 11574 - protein, 181 aa, Artificial Sequence
  Synthetic
DVERVLKENKETLDEDRKRTKEVIDRNKKKLEDLAREVRKVIEEIKKRLKELLDKTGEESEEIRDVERRVRKLLREVEEALRRVEELARRTSEEAKESLRRSEETVKRSIDEVRRKMSREEAEELLRRVNKDNEKVVRENEKLLKEVLDDSERVIKELRDLLEEVRRRIEKVIRDLEERRR

SEQ ID NO: 11575 - protein, 181 aa, Artificial Sequence; identical to SEQ ID NO: 11574
  Synthetic

SEQ ID NO: 11576 - protein, 177 aa, Artificial Sequence
  Synthetic
STDEFIERLKKILRENEEKVKEVLKRNEDLLKEDEDRTRKAIKELEDKLRRVKERVERQRADERVLRELKRVVERILEELKKSLEKSKRISEEDIRAIDEWLKRSETMVRRLLKLLRDGVDVKEIEKELRRVSEESERELRKHDENTKRVSEENKERIDRLRKTLDEVIERAEERAK

SEQ ID NO: 11577 - protein, 177 aa, Artificial Sequence; identical to SEQ ID NO: 11576
  Synthetic

SEQ ID NO: 11578 - protein, 177 aa, Artificial Sequence
  Synthetic
SLDEVIRRLEETLRKDEEDTRDVIRKVRRILEENRKEVKRVIDELRRRLEEVKKRVEDSKMDERVLRELEKVVRDILRRIDEVAKESERVVRRVEEEARRSLKESKEMVERLLKLLRDGVDADTIREELRKVLEDNKRILRRLLEELKRVSEESRDRLRRLKEELERVIEEVERRAK

SEQ ID NO: 11579 - protein, 177 aa, Artificial Sequence; identical to SEQ ID NO: 11578
  Synthetic

SEQ ID NO: 11580 - protein, 186 aa, Artificial Sequence
  Synthetic
SIARKVLTDLRKIVEDLERDVERSDRDSERVVREVLERNEEVLKRLRDIVEEIKKVIREVRKDREVLKELVDRAKEVVERVKKITEELLEEVADVVRKSKKRLEDLLEELRKAVEEVKKILDRDVEDRDDVERIKRDLERILKEVARKATESVKRNERILEEVKRHAEKSTEDVERLLRELEDTVR

SEQ ID NO: 11581 - protein, 186 aa, Artificial Sequence; identical to SEQ ID NO: 11580
  Synthetic

SEQ ID NO: 11582 - protein, 186 aa, Artificial Sequence
  Synthetic
DEIEDALREARRVTEEVRREIEKSDKESEDVVREVLRRNEEVLRRLREIVKEILDELRKRREEREVLKKLVDDLARVVKEAKRITDELVEEVERVVRESKRRLEELVKEDRRVVTEVKEILKRDVEDEKRVREVLRDLERLHEESKRTVERSVERNKTILKEVRKHAETSKRELERILEDVKRATK

SEQ ID NO: 11583 - protein, 186 aa, Artificial Sequence; identical to SEQ ID NO: 11582
  Synthetic

SEQ ID NO: 11584 - protein, 186 aa, Artificial Sequence
  Synthetic
SEIDKVKKDLEKITRDVERAIKKSDDDSRKNSKEVLETNERVLEELRRIVKEVLDEIRRVRKDKEVLKRLVEEVERVAREVEEITRRLVRHNEESVRTSERILRELVKRDRDVVKEVSEIIERDVEDRDRARDVDKKIKDLHKKSEDEVRKSVKRNRDLLEESKRHAEESREDIRRLLDEVREEAK

SEQ ID NO: 11585 - protein, 186 aa, Artificial Sequence; identical to SEQ ID NO: 11584
  Synthetic

SEQ ID NO: 11586 - protein, 186 aa, Artificial Sequence
  Synthetic
SSAETVLTELRKIVRDILEKSKKSNDDLRKIVEEILKDNEDVLRELREILRRIKEKIDERREDKEELDRLVKEAEDVVREVRKRTRELVEELRRVIREVEEINRDLVRKIDKVVKEVEEILKREVEDKEKVDRIRDDIRRLLKKLRDDVERSVRDVRRILKEVKEHAERSEEEVKRLLKELRDRAK

SEQ ID NO: 11587 - protein, 186 aa, Artificial Sequence; identical to SEQ ID NO: 11586
  Synthetic

SEQ ID NO: 11588 - protein, 186 aa, Artificial Sequence
  Synthetic
DEMDKVLKDAEDVTRRVKEELRKVDEESRRVVKRILDENRRVLKELEDRVRDLRRLIREIREDKDALAELVKEVEKVVRRVDEITKKLLDDVAEVVKRSKERLEKLVEDDRRVVETVKRILDRDVSSEEDVRKIKEDLERLHRESKRDVERSARDNERILEEVKRHADESRREVKRLLDEAKEEVD

SEQ ID NO: 11589 - protein, 186 aa, Artificial Sequence; identical to SEQ ID NO: 11588
  Synthetic

SEQ ID NO: 11590 - protein, 182 aa, Artificial Sequence
  Synthetic
DDLERVLRELERLVDEIRKEIEKVDRESEELDRRVKETIKELDERSKRLVEEVEDMIRRNRDSKELLERLIRLIRKSVEDVKRTLEKLIEDSERSVKEVKDRLEKLIEDLRKVVEDLKKLADERKAPEEVVRRVEKIVRELRKTVEDSIRRNEKSVEETRREAEKSEKRNRELVKRLEEKAK

SEQ ID NO: 11591 - protein, 182 aa, Artificial Sequence; identical to SEQ ID NO: 11590
  Synthetic

SEQ ID NO: 11592 - protein, 182 aa, Artificial Sequence
  Synthetic
SEAEKVLKELEDLVRRIEEDIRRTNEEVRKLDEDVLEDIKRVDEESKKLVREIEERIRSRRDKKDELKKLLERLRRSVEEVRRRLRELIELSREVVKRNEDRLKKLIDDLRRRVKELEKVIDERKFPEEFVRRLEELVKRLADKVKESVDTSRTSVKRTEDEARKSVRRNEDLVRRLEEDAK

SEQ ID NO: 11593 - protein, 182 aa, Artificial Sequence; identical to SEQ ID NO: 11592
  Synthetic

SEQ ID NO: 11594 - protein, 182 aa, Artificial Sequence
  Synthetic
SELEKVLEELERLVKRIEEEIKRTNKEVRDLDEEIRKAIERSNRETERLAREVLERIREERDSKELAKKLIEDVRRVVEESKKELKRLIEESRRVVEKNERDLRRLIEELRRVVKELEELADRKKAPEEVVRRLEDLVRRLEESVERSVRTSRKSVKETEDRIREVERHDERLVEELERAAK

SEQ ID NO: 11595 - protein, 182 aa, Artificial Sequence; identical to SEQ ID NO: 11594
  Synthetic

SEQ ID NO: 11596 - protein, 182 aa, Artificial Sequence
  Synthetic
SDLEDVLRKVEDLDRKIAEDIRRTNEDVKRLDEEIEEKIRRSNEKLRELVRRVLKAIRDRRDDKDLIKKLIEELEEALRRNEELLRKLIEESRDVVRKNEKVLKDLEDESRTVVDELRELADRKKAPEEVVRRLEESVRRTKERIDRSLKTSRDSVRETERKIKESKDTSEKLVKDLRDAAK

SEQ ID NO: 11597 - protein, 182 aa, Artificial Sequence; identical to SEQ ID NO: 11596
  Synthetic

SEQ ID NO: 11598 - protein, 178 aa, Artificial Sequence
  Synthetic
SEVDDILRRLREIDEKLLRENEESLKRLKDEVDRLKRKNEKSLDDLRKLVEKLIDDLRKRKEVEELARRVDDEARRVLKRNKEVVERIREELERVLRRNKEVVETIRKLSEDVVDELRSGGVDEKVLEEVKRSVDRTRDHLRKSEEDVRRLLDELRRHLEDSERRVRELLRKLREKVR

SEQ ID NO: 11599 - protein, 178 aa, Artificial Sequence; identical to SEQ ID NO: 11598
  Synthetic

SEQ ID NO: 11600 - protein, 178 aa, Artificial Sequence
  Synthetic
SKVDEILRELKRLVDELLRRIEKTLKELEDLVRELLKENTRSLEELRELVERLLEELRRRKESEELVRRAIKAVRDVLEKNRDVVRRIKEELRRVLEENREVSREVIELARKVLDELRRGGVDREFVERVRELLKRLEDELRKSNRTIEKLLRDLARHLEDSIRRVEELLRELEEKAT

SEQ ID NO: 11601 - protein, 178 aa, Artificial Sequence; identical to SEQ ID NO: 11600
  Synthetic

SEQ ID NO: 11602 - protein, 178 aa, Artificial Sequence
  Synthetic
KEVEDILRELEKIAKDLRDEIRESDDESRRLVEELLKRSEDTLKELRDLVKKLLDRLRERKESEDLVREIRKRVKEVLDKNREVNDEIIKRVAEALKKTRKVLEKVKELVKRALEKLRRSGVSEEVVKRVEELIRRVEEEVRRSTRRNEKLLEDLRRELERSDRELEKLMDDLRRKLK

SEQ ID NO: 11603 - protein, 178 aa, Artificial Sequence; identical to SEQ ID NO: 11602
  Synthetic

SEQ ID NO: 11604 - protein, 178 aa, Artificial Sequence
  Synthetic
DDVEKILEDLKRIDTELTKRTRDSNKELEDEVRRLMERSRRTLKELEDEVRKLLDRLRKRKESEELAREVERRAEEVLEKNRRVNKEIIKRARDVVEKNTRVNKKIKDDSREVVKRLEDRGVDRKVLEDVRRSLERTERELRESDKSVKKLLDELKEELDRSDREVERLLEELRDAVR

SEQ ID NO: 11605 - protein, 178 aa, Artificial Sequence; identical to SEQ ID NO: 11604
  Synthetic

SEQ ID NO: 11606 - protein, 178 aa, Artificial Sequence
  Synthetic
SEVDEILRKLRELVKELIRRTEESNEKLRKLVEDLRDESRKSLEELRELVERLADELRKRSESEELARRVIRRVEEVVRKNSDVNRRIIEAVKRVVDENTEVNKEIIEEAKRVVEELRRSGVEERVVREVEELLKELKRRLEESDKSVAELLRRLEKDLRESDRRVEELLKRLEDEVK

SEQ ID NO: 11607 - protein, 178 aa, Artificial Sequence; identical to SEQ ID NO: 11606
  Synthetic

SEQ ID NO: 11608 - protein, 178 aa, Artificial Sequence
  Synthetic
SEAEKILTELEEIDRRLVKRTEDSNRKLRDTVRKLEEESKKSLEELRELVDRLLKRLDERKESKELAEEVIRRVEEVVRRNSEVNKRIEDEVKRVVEENTRVNEEIRETSREVVKRLEDSGVDREILERVRESLERTDKRLRESDESVKKLLEDLKRKLEESDRRAERLLEELRKRAT

SEQ ID NO: 11609 - protein, 178 aa, Artificial Sequence; identical to SEQ ID NO: 11608
  Synthetic

SEQ ID NO: 11610 - protein, 181 aa, Artificial Sequence
  Synthetic
SELEEVLKRVEETVRRLTKRLEESLEETRRIVDKLREDLRRSLERTERIVRELTEKLGGTDEARELLKRANEHDKRVVDEIRKRLEEALEKDRRLVDEIRERLKELLEEVKDVVDKIRSKGREEELREVEKKAEKLVRELEERLKRVIEDSERLVTDLKEKLERVLETSKKLLADLEERAR

SEQ ID NO: 11611 - protein, 181 aa, Artificial Sequence; identical to SEQ ID NO: 11610
  Synthetic

SEQ ID NO: 11612 - protein, 181 aa, Artificial Sequence
  Synthetic
KELDEVLEKVKRIVDELERKLERSLRETKRIVDELREELKKSLKETEDIVRELERDLGGTKEADKLLEELLRRDKEVVRRIKEELERMNEHDRRVVEEIKELLERALEEVKDVVRRISKEGRDERLTEVEERAKRLVDTLAEKLKEVERRSEELVKTLEEELRRVLDTSRRLVEELREKAR

SEQ ID NO: 11613 - protein, 181 aa, Artificial Sequence; identical to SEQ ID NO: 11612
  Synthetic

SEQ ID NO: 11614 - protein, 181 aa, Artificial Sequence
  Synthetic
SELEEVLKEVEEIVRRLEEELRKSLKETREIVTKLLKKLKESLEDSERIVRELSRKLGGTDEARKLLEEANDHDRRVIEEIKRELKRLLDKDREVVKKIEDELRKLLKKVREVVERLKDKGRDEEARKVLETAKKLVDDLKRKLERVKEESAKLVDELRKELRRVNERSKELVEKLEREAK

SEQ ID NO: 11615 - protein, 181 aa, Artificial Sequence; identical to SEQ ID NO: 11614
  Synthetic

SEQ ID NO: 11616 - protein, 181 aa, Artificial Sequence
  Synthetic
SELEKVLREVEEEVRRLKKKLKESLDRTKEIVDRLKKDLKRSLDETKKIVDELREKLGGRKEADELLKRANEHDKRVIDKIRELLERALREDERVVREIRKRLKELLERVREVVERLKDEGRDKDLKDVERKAEKLVEDLDRELKEVEKTSRKLVKELEAELREVDKTSKKLVDDLRKDAK

SEQ ID NO: 11617 - protein, 181 aa, Artificial Sequence; identical to SEQ ID NO: 11616
  Synthetic

SEQ ID NO: 11618 - protein, 189 aa, Artificial Sequence
  Synthetic
REVEELLKEVEESTRTSKKIIEDLLRRVKESSDKSKKDIRRLLEEVRRIVDTVRKILERRGKKDKDAEKIIEDVERRVREVLERARRLSEENEKLVREVLRRLEESTRRDEKLVREVLKRARDSVREEELEKRVREVEETLKRLVDENRETLERVARKAKRLVEDDKRDLEEVVRELEELLKRLKEELD

SEQ ID NO: 11619 - protein, 189 aa, Artificial Sequence; identical to SEQ ID NO: 11618
  Synthetic

SEQ ID NO: 11620 - protein, 189 aa, Artificial Sequence
  Synthetic
SSVDRLLERVKRTTDESKERVERLLERVKESSERSEREIKRLLEEVERIVREVKKEVERRGKDAEDVRRIIKEVEDRVKRVLEDVRRSTDEDRKLLDRVREEVRKISEDNAREVEEVLDEVRKQSREEEVEKRVREVERTVEELVKEDREAVKRVEETIRRLLKKNEDTVKKVEDDLRKLLEDLKRDVK

SEQ ID NO: 11621 - protein, 189 aa, Artificial Sequence; identical to SEQ ID NO: 11620
  Synthetic

SEQ ID NO: 11622 - protein, 188 aa, Artificial Sequence
  Synthetic
SEIEELLRRVKKVNDESRERIKELDKRSREVNERSRRKNEELLKRVEEVVREVEERIDRTRDKETVRRLIEELEEIMREAVRRSRKSSEELRKRVEESVKELKRSSDELRRIVKEVIEEAKRNSREKELEDRVRDAVRRLERSLKENEDRVRESIERNKDSVRRNEEHVDESIKRLEKEVDRVRKRAE

SEQ ID NO: 11623 - protein, 188 aa, Artificial Sequence; identical to SEQ ID NO: 11622
  Synthetic

SEQ ID NO: 11624 - protein, 188 aa, Artificial Sequence
  Synthetic
SEIEKLLEDVRKVAEEVKRAIDRLNEENKRVNEKSKERIDRLLEEVRKVVEEVLRRVKTSKDKKTLDELLKELRKDVKRVVDEARKSSEELEKISREVNETLKELLERLRRIVEEVIKEAERRTREEEVEKRVRRVVEKLREIVKEVEEKVRRALDENRRSLEENRRRVKRVIEELEKILKEVEDEVR

SEQ ID NO: 11625 - protein, 188 aa, Artificial Sequence; identical to SEQ ID NO: 11624
  Synthetic

SEQ ID NO: 11626 - protein, 181 aa, Artificial Sequence
  Synthetic
DEVEEMEKELKKLLDDSKRRSDELIEEMRKLNEESKKRSRELEKRLRDINKEIRDRLDRDKAREVLRKSERVTEESRRLAEESDKKSEDVTRRSADRLRRVNKKVADVVERIKELLDEKRDDSKLLDDLRKTIEKVIRESRELLEELRKENERVIEESEKLLRDLLRENEKVAEEVRRTAT

SEQ ID NO: 11627 - protein, 181 aa, Artificial Sequence; identical to SEQ ID NO: 11626
  Synthetic

SEQ ID NO: 11628 - protein, 181 aa, Artificial Sequence
  Synthetic
SEVEELIRRLEKLLREVEKRARRLIEEAKRLNDESNKESRRLIEELERLVEDVAREARRDKVKELLRKLREVVKRIVEALERSDRKSKEVTERSVRLVEKAVRDLERVIREIVKRADEARDDEKLLRDLERAIRDVVRKLEELLRRLREENERVIKESEELLERVRKEIEDVLREAREAAR

SEQ ID NO: 11629 - protein, 181 aa, Artificial Sequence; identical to SEQ ID NO: 11628
  Synthetic

SEQ ID NO: 11630 - protein, 181 aa, Artificial Sequence
  Synthetic
SKVEKLITELEKLLKDSNKKTEDVERELERLNKKSNDDSRRIIEEHKKIVEEIARRVTKDKARDALREARRNVEENRELVERSDKKSKDVTEKSRKAAKESDDRLEEVIREIKRRLDEFRDDEELLKRLKDRIKKVVEESEKLLRDLVKENREVIKESEEILRRLAENLKRVKEEVDRRTT

SEQ ID NO: 11631 - protein, 181 aa, Artificial Sequence; identical to SEQ ID NO: 11630
  Synthetic

SEQ ID NO: 11632 - protein, 181 aa, Artificial Sequence
  Synthetic
EEVERLIKELDDLLRRSNARTRDLIRKADEELRRSNEESRRIVERMEEINKRIADEVQRDKAKDVLEKSKEVTKKSKRLVEESDRKVEEVIREIRKRAKESDEKVKRVIEEIRERLDRKRDDKKLLDDLKRKIETVIKESEDILRKLEEDLKRVIEESKELLDRLLEENKRVMEEARRRTK

SEQ ID NO: 11633 - protein, 181 aa, Artificial Sequence; identical to SEQ ID NO: 11632
  Synthetic

SEQ ID NO: 11634 - protein, 177 aa, Artificial Sequence
  Synthetic
DEVEEIKKEAKRIVEDLKRRNEELKRRLERLVEEVKKRNEESKKRLEDIVRKIKEDIKDGRSEVVKEVEEIIDRLVKESEKSLRDLEKTVEDLVRDSRRSLEDARRIVDELLKILDRGDKDLKEVRKTLEKARKENEDVIRKIEEDAKEVLRRDEESNRDINRKVDEVRKRVEERRK

SEQ ID NO: 11635 - protein, 177 aa, Artificial Sequence; identical to SEQ ID NO: 11634
  Synthetic

SEQ ID NO: 11636 - protein, 177 aa, Artificial Sequence
  Synthetic
REVEEVKKDLERIVEEVKKRNEELKRRLEELLKENKRRNEKSDEDLKRIVDRIDERVREGRKEVVDEATRIVEKLRKDSEKSLRDAKRRIDELMRRSDESLKRLEDIIRRLLEILDRGDKDLKDVKRVVEKVRRENEKVLREILTDAEKVSRDDETSNRDLNRKLEEARERVERKAK

SEQ ID NO: 11637 - protein, 177 aa, Artificial Sequence; identical to SEQ ID NO: 11636
  Synthetic

SEQ ID NO: 11638 - protein, 177 aa, Artificial Sequence
  Synthetic
SEVEEIKERLKRLVEEVERRNRKVIRESEETVKENEKENRKSKKRLKEILDEIVERIKDGRSEVVEELERIIRELARRSEKSLRDVERISRKLVKESRDSLRELKRRIEELLEILDRGDKDLKDVKRDVERVLKENKEVLDRLRKEDEEVSRRDKKSNEDINRVVEDVKRKLEEKAK

SEQ ID NO: 11639 - protein, 177 aa, Artificial Sequence; identical to SEQ ID NO: 11638
  Synthetic

SEQ ID NO: 11640 - protein, 177 aa, Artificial Sequence
  Synthetic
SEVEKVKEDLKKLVKEVEDRNRESKRRSEETVKENTKKNEDSKRRLKEIVDRIREEVKEGRDEVVKKAERIVEDLARRSEESLRRMEKISKDLVRESKRSLDELKRIIEELMEILDRGDKDLKDVRREVKRVLDEDKDTNDKLNDRDRKASEEDERSNRELNKTIARAEEEVKEARR

SEQ ID NO: 11641 - protein, 177 aa, Artificial Sequence; identical to SEQ ID NO: 11640
  Synthetic

SEQ ID NO: 11642 - protein, 177 aa, Artificial Sequence
  Synthetic
KEVEDVKEKLKELVERNRDENRKTKEELRRLVEKNRKENEESKKRLKEIVEEIRERVKEGRSEAVERVRKTIEDIMEDLDRSLRRVEDIVTKLAKESDDSLRRVEEIIRELLKILDRGDKDLREVEKTAEKVSKEDKETNDRIRKDLKKVSDEDKRSNEEVNKRVDKVRKEIEEERK

SEQ ID NO: 11643 - protein, 177 aa, Artificial Sequence; identical to SEQ ID NO: 11642
  Synthetic

SEQ ID NO: 11644 - protein, 170 aa, Artificial Sequence
  Synthetic
EESERLDELIKEVVERVKKLNEEARELIKDVLRRNEEVNTRLEELNRKVEKEVREEKDKDRLVRRAEAVSKTTEDLVRETIEEAKEVVKEVRDLVRRSNEDLRRVVEEVRERGVDRKVLEKIRRALEKVHEDNRRSIRDVERMLEKVEDDNRKTIERSRRLVKRVEEELR

SEQ ID NO: 11645 - protein, 170 aa, Artificial Sequence; identical to SEQ ID NO: 11644
  Synthetic

SEQ ID NO: 11646 - protein, 185 aa, Artificial Sequence
  Synthetic
RSLEELKKEVERVARAVRKVSEDNKRLLDRVREEVKRVSKENRDLVREVERRVEEVKRRVEDRKELKERVTKLLKELEDSSREVIKRVEELIDRMRRSSKEVEDRVRELLRELERVVRDVKRKVKDLERVDRLKEEIEEILRDLERKVRENKERSKKIAEDLRKHAEDNAREVKKALRDLEEKVR

SEQ ID NO: 11647 - protein, 185 aa, Artificial Sequence; identical to SEQ ID NO: 11646
  Synthetic

SEQ ID NO: 11648 - protein, 182 aa, Artificial Sequence
  Synthetic
SELERVLREIREVSRETRERSERSLEEIRRVVEDVRRKNKESLDRNREVLEEIRKALEKGPEELMRELLKEIKESSRESNRTSDESVEEVRDVARKVERRNEELLERSRRVAKRVEEEARRAPEDRVERVKRELERLVEENERIVRESRKTLEKLVRDVDRTSKRVKDENRKLLRRVEEEAR

SEQ ID NO: 11649 - protein, 182 aa, Artificial Sequence; identical to SEQ ID NO: 11648
  Synthetic

SEQ ID NO: 11650 - protein, 182 aa, Artificial Sequence
  Synthetic
SEVEDLLRRIRKVVEEVERRSRDSLRRNEEVVKEVEERSEKSLRDDKKVIDDVKRRLREGPEEEVRRLLDEVRKSSEDVVEENRRLLKRVEESSREVVKINDRLLEEVRRVVREVLEELRRAPKDEVRKAEEELRKLVRKAEEVVKKSKEDLERTTRKVEKVVRKSEEDSRRLLREVAEEAR

SEQ ID NO: 11651 - protein, 182 aa, Artificial Sequence; identical to SEQ ID NO: 11650
  Synthetic

SEQ ID NO: 11652 - protein, 182 aa, Artificial Sequence
  Synthetic
SKLDKILEELRRIVEEVKRRSEESLEEIERVVEEVKRRSRRSNEELKRIVDKIKKDLRDGPKELIRELLKEIERVAREVKKINRDLLEDVKRVVDKVRRENEKLLEDVRRVVEDVKRRISEVQEDDVDRVRREADKIVEDVRRVVERSKRRLDELRRDAEKVVRDSERRIDRIVDDVRRTAK

SEQ ID NO: 11653 - protein, 182 aa, Artificial Sequence; identical to SEQ ID NO: 11652
  Synthetic

SEQ ID NO: 11654 - protein, 182 aa, Artificial Sequence
  Synthetic
SDLEEVLKKLEDILRKIKETNDKALREIEEVLRRVKERSRRSNKEAEKVLREVEKMLEKGPKELARKLLEEVERVVRKVTEDNDRLLKEVEDVVRRVEELSRESLKTIEKVVRDVARDVERVEEDEVRRIKERLERLLRTAERVSREIKKRLEELVDDVRREVKRSKDRLKRLVDEVAERVR

SEQ ID NO: 11655 - protein, 182 aa, Artificial Sequence; identical to SEQ ID NO: 11654
  Synthetic

SEQ ID NO: 11656 - protein, 182 aa, Artificial Sequence
  Synthetic
SKVDEILKDIERVVREVEKKSRKSNEELKRISEESKRRNEDALRRLKEIADRVRERLDKGDKEEVRELLKTVRDVVKKVKEESDRSVKRSEEVAEEVKRRNEALLKEVEDVARDVEEKLREAPEDKVRDARRRLKELVDRVKRVVEESEKRIRKLVKENRDVSRRIEEELKRIVREIEEEAK

SEQ ID NO: 11657 - protein, 182 aa, Artificial Sequence; identical to SEQ ID NO: 11656
  Synthetic

SEQ ID NO: 11658 - protein, 182 aa, Artificial Sequence
  Synthetic
SKLEEILKKVEKVSEDTKRKSEDSNRRIKKVSDESKELNKKALRDITEMAKEVDRVLKEGREDEVKKLLDEVREVVERVRKISEDSVRRSEEVVRRVEEINRELLKDSKRVVDEAAERIREAPEDRVDEARRRLERLVEDNARVVKRSEDELRKLVEDNRRVSEEIERKLKELLKRVAESVT

SEQ ID NO: 11659 - protein, 182 aa, Artificial Sequence; identical to SEQ ID NO: 11658
  Synthetic

SEQ ID NO: 11660 - protein, 182 aa, Artificial Sequence
  Synthetic
SKAEEALKELERVADEARRASEKSNREAKKAADDAKRASEKSLREAERAAREAEKALREGPEEDARRLLKEVEEVARRAAKINKELADRVRKVAEDAARINDKLLEEVRDAARRAKEAAREAPKDDAKRIKDEADKIVKRAEDAARESKKRLKRLVEDAERAAKESKEELDRLVREAEEKAR

SEQ ID NO: 11661 - protein, 182 aa, Artificial Sequence; identical to SEQ ID NO: 11660
  Synthetic

SEQ ID NO: 11662 - protein, 178 aa, Artificial Sequence
  Synthetic
SEVERVLKELEDLIRKLEEEIERSLRELEKLIEELKKEIKESLDELEKLIRDLIRRLDERKESEELAREVRELVRRVLEKDREVLERVIREVRKALEKNKRVLDRVRKLVEEVLEKLRRGDVSEEADKRAKELLDKLRKVIEKSKEDSRKILKDLERTVKRSEEESRKVLEKLERRVQ

SEQ ID NO: 11663 - protein, 178 aa, Artificial Sequence; identical to SEQ ID NO: 11662
  Synthetic

SEQ ID NO: 11664 - protein, 178 aa, Artificial Sequence
  Synthetic
DEVERVLRELRELIKRLEEEIRKSLKELEDLIRRLIEEIEETLKKVEKIIRELKARLEERKESEELARKVEEDVRRALKENKRVLEEVIRRVRKVLEDDRRVLEEVIRRVEKMLEDLKKAGVSDELREEAKKLLRRLEKTVEKSKRDSEKVLRDLEEVVRESERASKELLKDLKRKVD

SEQ ID NO: 11665 - protein, 178 aa, Artificial Sequence; identical to SEQ ID NO: 11664
  Synthetic

SEQ ID NO: 11666 - protein, 189 aa, Artificial Sequence
  Synthetic
SELERLLREVEKSSRESVETSRKLNEEVEKTTRESKRRIEELLRRVEKIVDEVKKVIDRDGKDSEEVRRIVEEVKKFIETILEEIKRSSEEDERRIRDVLRKSEKSSEDDRRLLDEVLKEVARRTRTDEARERLRRVAEEIKRLAKENKRVAEESKRRAKELLDDNKDTVRRVSERLKELLEDLDRKLK

SEQ ID NO: 11667 - protein, 189 aa, Artificial Sequence; identical to SEQ ID NO: 11666
  Synthetic

SEQ ID NO: 11668 - protein, 189 aa, Artificial Sequence
  Synthetic
DEIEDLLRRVRKTTEESKKRSEDLNKEVKDSTREVKKRIKELLEEVERRVKEVKERMERDGLKSEEVKRIVDEVERELERVVDTVRKIVEDDKRLIEDVVRRSKDLSRRDVELIKTILKEIEDRSRTEEAEKRVRRAKEEAERLIRDNERKLKESEEELRRLIKETEDVLRKAEEDIRRILADLRRRLK

SEQ ID NO: 11669 - protein, 189 aa, Artificial Sequence; identical to SEQ ID NO: 11668
  Synthetic

SEQ ID NO: 11670 - protein, 189 aa, Artificial Sequence
  Synthetic
SEVEKLLEDVRESTKRVKELSKRLNEEVERTTKESEDRTRRLLEEVKRIVEDVKDKLRKRGKDSEDARRIVEEVKKRIREIVETSTRLSEDDKRLIEEVLKESERIVREDEELLRRVLEEVERRSRTEEAKKRVKEISDEIRKLAEETREVLERSEKRLRELIRRNEKVNKEVAERLEEILRDLDRKLR

SEQ ID NO: 11671 - protein, 189 aa, Artificial Sequence; identical to SEQ ID NO: 11670
  Synthetic

SEQ ID NO: 11672 - protein, 174 aa, Artificial Sequence
  Synthetic
REKEDAKRRLEEILREVKKDLDRVHRENEKLVEDTARTVERIKRELKKLLDRAREVPVEEELIKEIEKIVEDIVRRVEELLRRDKKVSDDVSREVRRLVEDLRRIVETVVELVKAGMDIEELRKRVEDVVRRVKEELERLLKENEDSTREVKKEAERLLDEIRKVLEKVERDAK

SEQ ID NO: 11673 - protein, 174 aa, Artificial Sequence; identical to SEQ ID NO: 11672
  Synthetic

SEQ ID NO: 11674 - protein, 174 aa, Artificial Sequence
  Synthetic
REKEEAEDRMRRILEEVRRTLEEVHKENRRLLEDTRRTVERIERENRKIVEEVRRVPVDEKLVKKAEDISRRVTEEVRRLLDEDRRVSEEVSRRAEELVRRLEEIVRRLLELVREGMDIETLERRVREVVERVKKELERLLRENKKSTEEVKRTAEDLLRKNREVVEEVKKAAK

SEQ ID NO: 11675 - protein, 174 aa, Artificial Sequence; identical to SEQ ID NO: 11674
  Synthetic

SEQ ID NO: 11676 - protein, 184 aa, Artificial Sequence
  Synthetic
DEVEELERRLEELLKKSRDEVTKLADELDRVLERSREVVKKDRESLKEILKEVERLVREKNDERLKEAVDELRKVVEEIERRNEKAVRENEEVVRDVKRRVKEVVEENERVVRKIKDVLRDKDKSKELLDRLEKELRESVKRSEERLKELADRIRKSLEDSERLSRRTNERIKRVLEEVTERVK

SEQ ID NO: 11677 - protein, 184 aa, Artificial Sequence; identical to SEQ ID NO: 11676
  Synthetic

SEQ ID NO: 11678 - protein, 184 aa, Artificial Sequence
  Synthetic
DEVEDVSRKLDEALERSRRITEDLEKKLREVIETSKREVDKLAERLDEVIREIEERIRKKNRKELEELLREAREVVKEVKKRLEDLLRRNEKVVREIRETVERLNEELREVAKRVRDVARKEDKNKELIEKLEEDIRRVLEKIKREHERLLRKIEESLKDSKRRLDKLRRDIERILERIREALR

SEQ ID NO: 11679 - protein, 184 aa, Artificial Sequence; identical to SEQ ID NO: 11678
  Synthetic

SEQ ID NO: 11680 - protein, 178 aa, Artificial Sequence
  Synthetic
REIEEALRELEEVLRKVKEDNKRLEEEIRRVLEEVKRINEKLLRDAKKELDRVKEILKDTRDEKAVREVLKEVEDVVRRVKRMSEESVKEVERVVRELVERSRRSLEEVRRVVRRLLERVKDVEEAKKELRRLVKEVEDVVRTSTRRLEELVKEVRRVSEETKRALDELVKEVREEVR

SEQ ID NO: 11681 - protein, 178 aa, Artificial Sequence; identical to SEQ ID NO: 11680
  Synthetic

SEQ ID NO: 11682 - protein, 178 aa, Artificial Sequence
  Synthetic
DEIEDVERKIKEVVDRVRDINRRLRDTIRRVLEKVTRINEELRDTVRKVLKEVERILREIKEESKVEEVLKRVREVIEKLARDSRDSLREVERVARELKERSKKSVEDVKKVADDLVREIRESEEIKEKLERLVREVKRISEESAKDLERLVREVEKVVEDSERELRRLVEEVERRRK

SEQ ID NO: 11683 - protein, 178 aa, Artificial Sequence; identical to SEQ ID NO: 11682
  Synthetic

SEQ ID NO: 11684 - protein, 178 aa, Artificial Sequence
  Synthetic
SEIEKVRKEIDEVLKRVRKINEDLLRELEEVSKRSKDINDDDLRTNTEVLKEARRILKDSTDERLVEEALKRVEEVTERNVRSSRKSLEESERVVRRLLEASRKSLEEVRKVAKEIKEKIKDSKDVTKELDELVREVEEEVRRSKDTLRRIVEENREVVERSERKLKKSSDDVREERR

SEQ ID NO: 11685 - protein, 178 aa, Artificial Sequence; identical to SEQ ID NO: 11684
  Synthetic

SEQ ID NO: 11686 - protein, 189 aa, Artificial Sequence
  Synthetic
SELEKVLRELEENSRRNEEELRRSNDKVRRVLDEIRRKLEEVLRKVEEVLRRIEEELSDKKDDRVAKEVIKRVEDVLRDLDRILKEVIKKVETVLREDERIVEELLDNIRKVLDRLRDILEEVKRRREDVKDKVKKAEDDVRRLLERNRRLVEESKKSSEEFLRRVEKLVDDARKKVEDALRKVRETAR

SEQ ID NO: 11687 - protein, 189 aa, Artificial Sequence; identical to SEQ ID NO: 11686
  Synthetic

SEQ ID NO: 11688 - protein, 189 aa, Artificial Sequence
  Synthetic
SELEKVLRDLEKNSRENEELLRRSNKKLKDVVDKIKKKLERALEELREVLEKIRRELSRSTDRKVAKEVIERVERVLRKLEEILRRVIREIEEVLREDREILERVIRNIEKVLEELKEIVREVRRRREDMDDKVRKAEEDVKRILDENRDLVRRSEENSKRLLERVRELVERVKDAADKLLREVREEAR

SEQ ID NO: 11689 - protein, 189 aa, Artificial Sequence; identical to SEQ ID NO: 11688
  Synthetic

SEQ ID NO: 11690 - protein, 189 aa, Artificial Sequence
  Synthetic
SELETVLRELEENSRRNEELLRRSLDRVRRVLEDVTKKLREVLEEVRTVLEDVKRKLSRVTDKKEADKLIERIERVLKKLEDILRELIRKAERALEEDKRILDDVIRNIEEVLKKLDKILEEVKRRSDDVRDKVKEAKDRVRKILEDNRRLVEKSEEDSKRILETLRKLVEEMKRELERIETELREAAR

SEQ ID NO: 11691 - protein, 189 aa, Artificial Sequence; identical to SEQ ID NO: 11690
  Synthetic

SEQ ID NO: 11692 - protein, 189 aa, Artificial Sequence
  Synthetic
SELETVLRKLEENSRRNKKLLRDVLEEDKTVLRDVERKLREVLDELRKVLEDIRDKLSRKTDDRVAKEVERRVREVLKKLKKILEDLIRKMEDSLRKLKEILKRLIENAERVLRELEKILKDVKDRREDVKDKAETMKKAVEEILDRNRKLVTEAEKRSEDSLRKLRKSVKEVEEKVKRVLEEVKKEAD

SEQ ID NO: 11693 - protein, 189 aa, Artificial Sequence; identical to SEQ ID NO: 11692
  Synthetic

SEQ ID NO: 11694 - protein, 189 aa, Artificial Sequence
  Synthetic
DELERLLEELERNSRENKKRLDESRKRVKEVLDRIEKKLRDVLREVEDVLRKIREKLERKRDDRVAKEVKRLIEDVARKLEKILKEVTDAVKKVLDENKKILEDLIRNIEEVLKKIERILEEVKRRAEDVKDKVKELRDRVKELLDRNREEVRKSEEDSKRVLDEVKRLVDELRERLREIRKRVEEEAK

SEQ ID NO: 11695 - protein, 189 aa, Artificial Sequence; identical to SEQ ID NO: 11694
  Synthetic

SEQ ID NO: 11696 - protein, 189 aa, Artificial Sequence
  Synthetic
SELEDVRRELEENSRRNEETLRRSLAELEENSERNRRELERVLAEVEKVLKKATETLSRVDDKEVARRLEDEARKVLEDLERILRRLIENIRRVLEKNKKIAEDLIRNLERVLEKLKEILRDVDRRRKDVRKEVKKVEDDVRRILEENRRLVEESERRSRRILEENEELVEDIKRKLREIEKELRERVR

SEQ ID NO: 11697 - protein, 189 aa, Artificial Sequence; identical to SEQ ID NO: 11696
  Synthetic

SEQ ID NO: 11698 - protein, 183 aa, Artificial Sequence
  Synthetic
SEVEELEREIRELVERNRELVRRLEEEARRLSRRNEELVRELKERAERLVKELKERLDRVDREELKKIADRVRREAERLVEDVRRSSRKVSEENKELVKEVRKSSTEVIKRLEDLVEKVRRDNDKDTLDEVRKEVRKLSKENEERLREVLEESRRLSKRNEEILKEIAERVKRLVDKLTDDIR

SEQ ID NO: 11699 - protein, 183 aa, Artificial Sequence; identical to SEQ ID NO: 11698
  Synthetic

SEQ ID NO: 11700 - protein, 175 aa, Artificial Sequence
  Synthetic
SEVEDVERRVRKLLEENDRLLEENEKSARELMKRDKKVSDENEKSVRDLLDRLRKEIRDEDVVRKVEEILKDLLRKDREVSKENIKILKELLDRSRDSSRRVRETLKRLLDKARKDKDVLEELLKKLRKLSEDNERLLRESNERAKRSTDESERLSRETNERVKDVVTRLKEASK

SEQ ID NO: 11701 - protein, 175 aa, Artificial Sequence; identical to SEQ ID NO: 11700
  Synthetic

SEQ ID NO: 11702 - protein, 175 aa, Artificial Sequence
  Synthetic
DEVDEARKEVDKLAKENTELVKRNKDSVKELVREDEDELRKNRESVDELLRRLEEEIRDERVVEDVIRKLEKLLEDSTRASEENKKRLEDLLRESEKSSRDVKKLLDDLLKKLKDVEGVLEEVLKTLREVSDRNKKLLEESNERVRKSTKESKDKLRKSNEEVKRVLKELRDTDT

SEQ ID NO: 11703 - protein, 175 aa, Artificial Sequence; identical to SEQ ID NO: 11702
  Synthetic

SEQ ID NO: 11704 - protein, 180 aa, Artificial Sequence
  Synthetic
DELDRLLEEVKRSLEDVEEKLKKLEEEVKRVNDELRKRLTRLLREVERSLKRVEDLIRNGEPKEDILREHERSVKEVLKEVRKVVTEVEEAHKRVMREVERVLREHEETVKRVLEDVTRRNGEKLEEVRERLKESLDRLRKRVEDLKRRLRESLESVRKLVEDLERALRKSLEELRERVR

SEQ ID NO: 11705 - protein, 180 aa, Artificial Sequence; identical to SEQ ID NO: 11704
  Synthetic

SEQ ID NO: 11706 - protein, 180 aa, Artificial Sequence
  Synthetic
EELDRLLKRVEESLRRVERILKELLDRVRKVNEDVKRTLDDLLRRSKESLDRVRKLREEGKDKDTVLKEHEKSLRKSTEDAKKVIREVEKVHKEVLDRVRKVLREHEKTVREVLEAVRRRNGEKLEEVEERLKRSLRELERLVRELEEELKKSVKSVRDLLEELKRRNEDSLRRLAEEIK

SEQ ID NO: 11707 - protein, 180 aa, Artificial Sequence; identical to SEQ ID NO: 11706
  Synthetic

SEQ ID NO: 11708 - protein, 180 aa, Artificial Sequence
  Synthetic
KELDDLLREVERSLDRVRKRLEDLLREVERVNEEVKKRLRDLLEELKRVADELRKLREDGKPKEKVLEELERAVKRLIDEVRRVIKEIEKFHKDVLDDVRRVLREHEETVKEVEERVRRRNGEKLEDLERELKRSLKELRDEVRELEERLRRSVESVRRVLKELEERARRLLKEVRDEIK

SEQ ID NO: 11709 - protein, 180 aa, Artificial Sequence; identical to SEQ ID NO: 11708
  Synthetic

SEQ ID NO: 11710 - protein, 180 aa, Artificial Sequence
  Synthetic
SELDKLLEDVKRSLDEVKRLLKELLDRVKKVNKELEEVLKRLEEDSRRVVEEVEKATRDGKDKDTVLKKLEDALRRSTEEVRRVLREVEEVHERVRKEVRRVIEEHRKTVKDVLDKARKRNGEKLEDLERKLEDSLRRLEELLRRLEDELRKSLTSVRKRVKELEEKNRELLKRVEEKIR

SEQ ID NO: 11711 - protein, 180 aa, Artificial Sequence; identical to SEQ ID NO: 11710
  Synthetic

SEQ ID NO: 11712 - protein, 180 aa, Artificial Sequence
  Synthetic
KELDELLKRIEDVVRRLEEELKRLLDEARKVNEDLERRLRKLREDVERSLREVDKMIRNGKPKEEVARRHEESVKEVDKDVKKVLKEVADRHREIVKRVEEVLRRAERVVEEIKREVRRRNGEKLKDLEKALEELLDRVRRLVKELRDRLRDSLRSVEEEVKKLKDELDRSRKAVRDKVK

SEQ ID NO: 11713 - protein, 180 aa, Artificial Sequence; identical to SEQ ID NO: 11712
  Synthetic

SEQ ID NO: 11714 - protein, 180 aa, Artificial Sequence
  Synthetic
SELDRLLERVRKSSTDSEKTLKELRDEIRRVNDEVRKVLEELLKESRRVAEEVKKVIDNGEPKEELLKTLEEVIKKSTKDVRDVIRELRRIHEEVLDRVRKSSRKNEESVRKIEEDARRRNGEKLEDLERELRRLLRRDRELVKKLEEDLRRSLKSVEEEARRLERANRELLREVEEKAK

SEQ ID NO: 11715 - protein, 180 aa, Artificial Sequence; identical to SEQ ID NO: 11714
  Synthetic

SEQ ID NO: 11716 - protein, 180 aa, Artificial Sequence
  Synthetic
SELDKLLRDVEESSRRSEETLRKLEKEVRDSSTESERILRELRDRIKKVADDVEKVIRDGKPKEKLVEDAKEFVREVEERVRKSSEDNRKTVEDIERRVRESSERNKDSVRRVLEEARKRNGEKLEELEKRLEDLLRRDKKLVDDLRKKLRDLEKRDRDLVEELRRELEELLKRVEDAAR

SEQ ID NO: 11717 - protein, 180 aa, Artificial Sequence; identical to SEQ ID NO: 11716
  Synthetic

SEQ ID NO: 11718 - protein, 180 aa, Artificial Sequence
  Synthetic
SELDRLLREVEKSSKRSEETLRDLRREVEDSSRRSEEILRRLLEESEKVAREVRKLIEDGQPKEEILKELARVIEESTRRAERSSRENEDTVRRIVKRVEDSSKRNAESVRDVMRKARERNGEKLEELEKRLRELLKRDKELVDELRKRLEELLKRDRELLKRLEEENRRLLEEVERRAR

SEQ ID NO: 11719 - protein, 180 aa, Artificial Sequence; identical to SEQ ID NO: 11718
  Synthetic

SEQ ID NO: 11720 - protein, 180 aa, Artificial Sequence
  Synthetic
KELDELLDEVRRSSETSERILRKLLREAEESTDRSKRTLKELLRELEEVVERVKKMIRDGKPKEKVLKELEDAVRRVLEDVRRSSEENKKSLEEIVRRVRRSSEENERTVRRVVEDARRRNGEKLKDLEKALRDLLDRDRKLVEELEDRLRKLAEEDEKVLRELEEELKRLLEEVAEETR

SEQ ID NO: 11721 - protein, 180 aa, Artificial Sequence; identical to SEQ ID NO: 11720
  Synthetic

SEQ ID NO: 11722 - protein, 188 aa, Artificial Sequence
  Synthetic
SLLEKLERDLERVHKESEDLARELRKELKRVHEESRELMKEIDKELRRVLEEVKSLLRRGDGEVLEELIRRAEEVLRTVERLLRRLIRISEEVLKKVEKDLERLERISREVVREVRRVLEEVKREREDVKDKVRRVEEKVEELLDRNRKLVEEVRREVEKVLRDDRRLVREVERKLKEALDEVRERVR

SEQ ID NO: 11723 - protein, 188 aa, Artificial Sequence; identical to SEQ ID NO: 11722
  Synthetic

SEQ ID NO: 11724 - protein, 180 aa, Artificial Sequence
  Synthetic
SEVEEVERRVDEVLKELKRKVDRSREESERIARELERLVEESEKKVRDVVRELEDLLRKVDREEVKKLVKEIIDELKRSSDRVRELVRRLIKEAEDSSDEVRRRIEDLLERLKELVEKAAREGRGEDLKEKIKEVEDRVDKVIKENKDLLDDVERRVRKVIKENEDLIKELRKRVEEVAR

SEQ ID NO: 11725 - protein, 180 aa, Artificial Sequence; identical to SEQ ID NO: 11724
  Synthetic

SEQ ID NO: 11726 - protein, 180 aa, Artificial Sequence
  Synthetic
SKVEELEKRVRKVMEKLKKLLKDSEKESDDVARRLEELLEESEREVREVLRELEDLLRKVDREEVKDAVRKLLERAKRSSDEVRKRIRDLIEESKRSSEEVKRLIDKLIKELEDVIRKAAKDGRGDDVDETIKRVEEEVKKVVDDNRRLNEEILRKVKKVIDDNRRLIEKVREDVDRMAK

SEQ ID NO: 11727 - protein, 180 aa, Artificial Sequence; identical to SEQ ID NO: 11726
  Synthetic

SEQ ID NO: 11728 - protein, 183 aa, Artificial Sequence
  Synthetic
SVVETVDKRLKRLLEKVEKSTEDSRRTAEESKKRVDRSTERVKEVLDRLRREVERLKDDDRADDIVREVVKRADELVKENEKVIKKVIEDNKKSVKENEEVIREVVKRIREVVEEAKRALKGGKKEKVRTVEKRAEDVIREARKLLEESKRRHDKVVEELERLLKKSKEDVDRVIKELEERRK

SEQ ID NO: 11729 - protein, 183 aa, Artificial Sequence; identical to SEQ ID NO: 11728
  Synthetic

SEQ ID NO: 11730 - protein, 183 aa, Artificial Sequence
  Synthetic
DEVEEVKKRLDELRKEVERSTREVREVLKKLLKEVKDSTDDVRRTIEKLLRDVERLKDEEEAKRIVDDVKRRIRELLDRNREVIKRVVEEARKVVDKNRRSVERVVDEARKLVEELIRRLKGGKKEELKKVEDRVREVIKDLEELLRDSKRTVEKVERELEDLVRKSEEEAERVERELEERAR

SEQ ID NO: 11731 - protein, 183 aa, Artificial Sequence; identical to SEQ ID NO: 11730
  Synthetic

SEQ ID NO: 11732 - protein, 183 aa, Artificial Sequence
  Synthetic
SVVEEVDRLLEELLRKVKKSTDESKETAKESRKEVKRSTEDNDRTVEKLRDEVRRLKDDERVEEVVEELIRRIERSAEENERVIREVIEKNERSMRENKRSVDDVVEKLRTVVDELRKALSKGVDDRVREVETRVKKVIDDVRRLVTESKKDHERVVKELRELVEESKRRNDRVVEEAKETAR

SEQ ID NO: 11733 - protein, 183 aa, Artificial Sequence; identical to SEQ ID NO: 11732
  Synthetic

SEQ ID NO: 11734 - protein, 183 aa, Artificial Sequence
  Synthetic
SMVEEVKKVLEKLKRDVDKSTDEVRDMLRRLLEEVRESSREVERRLRELKEEVDRFKDDERAKEIVKRVVEEAKKLVEENERSVRRVVEEIKKLLTRNKEVIDEVVKRARDLVRKLEEKLRGGKKEEVKKVKKEVDEVIRRLKELVRRSEEEARRVIKTLEKLLRDSKKRVEDVIKDLDRTVR

SEQ ID NO: 11735 - protein, 183 aa, Artificial Sequence; identical to SEQ ID NO: 11734
  Synthetic

SEQ ID NO: 11736 - protein, 183 aa, Artificial Sequence
  Synthetic
SMVEKVEEDLKKLTRDVEKSTEESRKTAEDSARDVRRSSREVEDVLRRLRKEVEELKDDDRAEEIVRRVVKEARDVVEENERSVRKVVERNRRSVEENKRVIDEVVERAKRLVERLREKLDKGKKEEVKKVEDKVKEVIERLKKLLDESKKRHEDVIRELEKLLEESERKVRKIIRELEETLR

SEQ ID NO: 11737 - protein, 183 aa, Artificial Sequence; identical to SEQ ID NO: 11736
  Synthetic

SEQ ID NO: 11738 - protein, 183 aa, Artificial Sequence
  Synthetic
SVVEEVKRRLEELEKRVEDSTRDSKRTLDESERELEESSRDNRRTVEELLDELRRLKDREEARDVARRVVEAIKKSLDDNRRSIDELVKKNEDSVKKNEKVIKEVVDEARKLVEKLVRRLKGGKKEEVEKVEREVREVIKKLRDLVRRSREEHEKVIEKLKRLLEESEDTNRKVIKKVEDDLR

SEQ ID NO: 11739 - protein, 183 aa, Artificial Sequence; identical to SEQ ID NO: 11738
  Synthetic

SEQ ID NO: 11740 - protein, 186 aa, Artificial Sequence
  Synthetic
SVTDEVREKLRRLLEELREVVKRVEDISRKTHEETKRVVEKVKRILEKLKREIEEVIRELGKDDRLRKVVERVEREARRVLKELEEAVKRSMKKNEKALRDLRRVAKKVVDALRKILKEVAERLKDRKEDLERLRRDVERVIREIEKLLRDVEEKVKETIKTDEDLLRRVKEDVERVLEEIDRRLK

SEQ ID NO: 11741 - protein, 186 aa, Artificial Sequence; identical to SEQ ID NO: 11740
  Synthetic

SEQ ID NO: 11742 - protein, 186 aa, Artificial Sequence
  Synthetic
SVAETVKERLKDLHRRTKESNERAKRISDELNKHNEKSVRDVDREVKRLLEEITEVIKRLGKDERLKKVAREIERILEKVLEDVKRNSEKAAREHKKVVEENHRSVRRSAEELKRILEEVARDLKDDKEALRKLDEEVKKVADDDRRLNEESRKRAKDSIEESRKLVRDVAERVKEVARKIREDLR

SEQ ID NO: 11743 - protein, 186 aa, Artificial Sequence; identical to SEQ ID NO: 11742
  Synthetic

SEQ ID NO: 11744 - protein, 179 aa, Artificial Sequence
  Synthetic
DEARELIERVKRVLDRVREENTRVNKELHDILRRVEKRNRDLLRELREILKDVKKKADEVREDKEVLRKLLKEVEKALRRVKEESDRSLKEVRDAVEEVKRISDTSLDKVRKVLEDAKRAVKDSRELEKELRRLIAEVARIVEESRRNLERIEEAIKRISETSEKEIREIEDRIKKDVD

SEQ ID NO: 11745 - protein, 179 aa, Artificial Sequence; identical to SEQ ID NO: 11744
  Synthetic

SEQ ID NO: 11746 - protein, 176 aa, Artificial Sequence
  Synthetic
SEAERAREEAKKLKEEIKKSNDELRKAAEKLKRDIERSNDELRKAIEELKRRVESLLRRVEKKLVDEVRRLAEDAARKLKRSLDETRKLVEKVLREIEESLKTVEELVKRLLEEIEKALESDEVLKEVKRIAEELHRHNREVLERIEKIARELEKHNRDVLDDIRRIVEKLERDLN

SEQ ID NO: 11747 - protein, 176 aa, Artificial Sequence; identical to SEQ ID NO: 11746
  Synthetic

SEQ ID NO: 11748 - protein, 176 aa, Artificial Sequence
  Synthetic
SEEERAREDLERLREEIRRSNEKLEEDSDKLRRDIEESNRRVEEEIRRLKEDVERKLKDVPEDLARKVRELVERLMDKIRKSLETTRELIRRVLEHDKRSLDEVEKIVREALKLIETRLESEEVLEEVRRLVKKLHEHNEESLRRSEEILKDLERHNRDVLREVEEIVREALERLD

SEQ ID NO: 11749 - protein, 176 aa, Artificial Sequence; identical to SEQ ID NO: 11748
  Synthetic

SEQ ID NO: 11750 - protein, 176 aa, Artificial Sequence
  Synthetic
REAEEAKKEADRLEEEVRDSNRKLEEDSKRLEREIRESNRKLKETAERLLRDVERLLKDVEERLVRDVKRKVEEAMEKLKKSLDKTRKLVRELLEHDRKSLEESERLVREVLRLIEEKLESKEVLEDIRRIVKELHDHNKKSMEDSRRIIEELKRHNKRVIDEVKKIVDELREKLR

SEQ ID NO: 11751 - protein, 176 aa, Artificial Sequence; identical to SEQ ID NO: 11750
  Synthetic

SEQ ID NO: 11752 - protein, 176 aa, Artificial Sequence
  Synthetic
REAEEAEKELKRLEDDIKKLVEDLDREAKRLKKEVDDSNRELEKESRRVKKEVRELLKDVDEKLVREVEKLVDEALEHDKKSLDDTRKLVEDVLRKLEEVLKEVKKLVDDALEEIRKKLESDRMLEKVKRIVDELRKLLKTVLDDVRRIVEELHRHNKESMERTRKILEDLARRLT

SEQ ID NO: 11753 - protein, 176 aa, Artificial Sequence; identical to SEQ ID NO: 11752
  Synthetic

SEQ ID NO: 11754 - protein, 176 aa, Artificial Sequence
  Synthetic
SEAERAREVLERLREEVERSNKRVREELKRLTEDVRRSNKKLREDSEEVRKRVEDLLKDVDKELVDEVRKLVKEALDLDEKSLKETEDLVREVLEEIEDSLRKTDELVKRALKIIEDKLESDEMLRRVRRIIEELHRLNKEALDRVRKIIEDLHRKNEDSLKKTEDILRRLEEELR

SEQ ID NO: 11755 - protein, 176 aa, Artificial Sequence; identical to SEQ ID NO: 11754
  Synthetic

SEQ ID NO: 11756 - protein, 179 aa, Artificial Sequence
  Synthetic
SSIEEVLERLRRLSDEVRKRTDDVLERAREISRETEERSRRINEEIERIVEELKKRADKDMVEKVKRDAEELLKKSEDLHRRVIETLRRLVERVREIHEETIRRLEELLKKVEDELKGGDKEAVDRARREVERLVKENEDILKRLEEEVRKLVKRNEDLVEENRREVEKWRKELEDRKR

SEQ ID NO: 11757 - protein, 179 aa, Artificial Sequence; identical to SEQ ID NO: 11756
  Synthetic

SEQ ID NO: 11758 - protein, 179 aa, Artificial Sequence
  Synthetic
SEIDEVLKKLRDDSKKVEEDTRRVLEELERISEKTRKDSEEVLREIEDIVEKLKRRSDEDMVRRVMEEADKLLKELEDRHRDAIRRLEELVKRVEEIHREVIERLERLLKEVEKRLSKGVREEVERAEEEVRKLVEENKRIVKEAKERVDELVERNKEIVEEIRREVERLKKELEDRRR

SEQ ID NO: 11759 - protein, 179 aa, Artificial Sequence; identical to SEQ ID NO: 11758
  Synthetic

SEQ ID NO: 11760 - protein, 179 aa, Artificial Sequence
  Synthetic
REVEEVTKELRKISKEVEDLTREVLREAREISRRTEEESRRLNKEIAEIVERLRREGDEKAVEEVLREVDKLLEESERLHREAIERLRRLLEEVEEIHRRVIEEMKRLLDDLTRKVDKGSKEDVRRVAEEVKRLVDKNRRIVEEAKKEVDRLVKRNEDLMRRNREEVERWKRELEEDRR

SEQ ID NO: 11761 - protein, 179 aa, Artificial Sequence; identical to SEQ ID NO: 11760
  Synthetic

SEQ ID NO: 11762 - protein, 179 aa, Artificial Sequence
  Synthetic
SEVDEVLKTLKKLSDDARKKTKEVLDRLRDISRRVEEESRKVLEEIRRKVEEVKKRRDDDAVKEVMKDADRLLKRLEEIHRKVMDELDKLLKRVEEIHRETIEELKRLLKDVTDKVSKGSKDKVRKVKEDVRRLVEDNKRIVKEAREEVERLKERNKDIVRRIKETVDRLKDELRKRAE

SEQ ID NO: 11763 - protein, 179 aa, Artificial Sequence; identical to SEQ ID NO: 11762
  Synthetic

SEQ ID NO: 11764 - protein, 179 aa, Artificial Sequence
  Synthetic
SDVDRVLKELEDISKDVEDKTREVLKRLKEISDEVKKRSEDINREIARIVEDLERRRDERFVERVKREADRLLKESRDIHRRVMRELEKLLEDVERIHREAIKTLEDLLRKVEKKVSKGDKEKVKDARRVVRELVERNKEIVRRAAEVVKKLKKENAKLVEDNTREVKKWKERLERRRR

SEQ ID NO: 11765 - protein, 179 aa, Artificial Sequence; identical to SEQ ID NO: 11764
  Synthetic

SEQ ID NO: 11766 - protein, 177 aa, Artificial Sequence
  Synthetic
SEVEDLLRKLKEISDESRERIKRLLEELEEISRKSKEDSERSNEELHRIVKRLKEENRDEAVERVKDALRRVLERDRELVERSIRVLKKVVDDVRRIVEESVKRLRDVVRKVRRDVEREEDLRRAEDDVRRLIEDNKRLLEEAKRRVDDLRRKNEEILRESEKNVRRIEKELEDRRR

SEQ ID NO: 11767 - protein, 177 aa, Artificial Sequence; identical to SEQ ID NO: 11766
  Synthetic

SEQ ID NO: 11768 - protein, 177 aa, Artificial Sequence
  Synthetic
SEVEDLLRKAEEISDRSRREIEKLLRELERIVREVRERSKRSNDELHRIVKELKEERRDEAVERVKRVLEEVVKRDEEIVRDVARLLERVVKEVERIVRESVEMLKRIVETIRRDLEDEKKLRDVEKRARELIRDNERLLEDAKRRVDELRRELKKILDDSRRNVERIMKELDDEKR

SEQ ID NO: 11769 - protein, 177 aa, Artificial Sequence; identical to SEQ ID NO: 11768
  Synthetic

SEQ ID NO: 11770 - protein, 177 aa, Artificial Sequence
  Synthetic
SEVDELLKRLEEISEESRRRSEDSNREVHEIVKEVKKRSEDSNRRLHKIVEDLKRENKDKAVEEVKEVLREVVERDEEIIRRVRERIRDLVRRDERIVRESVKRLRKVVEDVRRDVEDKDELKRAEDRVRELIKENKRILDESKENAERIDRELKKILEDSKRNVEEIAKRLEEDRK

SEQ ID NO: 11771 - protein, 177 aa, Artificial Sequence; identical to SEQ ID NO: 11770
  Synthetic

SEQ ID NO: 11772 - protein, 177 aa, Artificial Sequence
  Synthetic
KDVEKLLRELEKISEDSKRESDKSNKEVHDSSREVERRSRESNRRLHKVVEDLKRTNRDEAVERVKELLKKVVEEDKRIAEEDEERIERVLRRDKEIVRKSVEDLRRVVDKVRTRVERDEDLRRAKREVERLIRENEKILEDSRENLRRIAERSRRVLEESERNVRRLIEELEETRR

SEQ ID NO: 11773 - protein, 177 aa, Artificial Sequence; identical to SEQ ID NO: 11772
  Synthetic

SEQ ID NO: 11774 - protein, 177 aa, Artificial Sequence
  Synthetic
REVEELLKDLRRILEEVKRRIEKLLDELRKISEESRRRSEKSNEELHDIVKKLKDENKDEAVERVEEVLKKVLERDKRLVDRSVEELRRVVEEIKRIIDRVVERLEKVVEDVRRDVKDEKTLRDAEREVKKLIDTLRKILEDARREVKKLIDKNEKILRDSEKNVRDIAEELRRTRK

SEQ ID NO: 11775 - protein, 177 aa, Artificial Sequence; identical to SEQ ID NO: 11774
  Synthetic

SEQ ID NO: 11776 - protein, 177 aa, Artificial Sequence
  Synthetic
DEVRELLREVKEAVDEVRRRSEESNREAHRVSEESEKRSRESNKRLHEIVEDLKRRNKDEAVEEVKKALRRVVEEDKRLVDESVERLEELVRRDEEIARRLEEKAKKVVEKVRRDLEDEEKLKRAEEEIRKVIEDLRRILRESRENAKRIIRRNREILRESKKNVEDLERELEETRR

SEQ ID NO: 11777 - protein, 177 aa, Artificial Sequence; identical to SEQ ID NO: 11776
  Synthetic

SEQ ID NO: 11778 - protein, 177 aa, Artificial Sequence
  Synthetic
SEVEELLKRLRESSRRVRELSKRSNEEVHRSSDKVRRDSEESNRELHKIVEDLKRENRDDAVRRVKKRLDDVVEKDRKIVEDDVKLARDVVERDRRIAEEDVRELERVVKEVERDLEDERKLREARKEVKKLIEESREVLERSERNIRELIKESRRLLEESRRNVERLKKELEDTRK

SEQ ID NO: 11779 - protein, 177 aa, Artificial Sequence; identical to SEQ ID NO: 11778
  Synthetic

SEQ ID NO: 11780 - protein, 180 aa, Artificial Sequence
  Synthetic
SEEDEARKDVKELEDRLRKINEDSERAVRRIEEELKRILEENDREVKRLLRKIEELLRRKSSEEIKKLVDDLKKIAEDVLREAKKSVDDLRRILRKVLRDSSELVKELKEILERALRVVEAGVDIETVIRELRKALEEAARRSKRLIDELKKVLEEVKRANEETNKRLTEVVEEVAERIR

SEQ ID NO: 11781 - protein, 180 aa, Artificial Sequence; identical to SEQ ID NO: 11780
  Synthetic

SEQ ID NO: 11782 - protein, 180 aa, Artificial Sequence
  Synthetic
KEKEDAEREVERLERESRRVNRESEEEIKRLLRESEKVNEDSEREVRRIREELERLLRKKEDDEARRMVEELEKILKEVLERSSELVERDREILERILRESSRLVDEDRRILEEALRVVREGVDIDKVLTELRRSSEEVTRLSEELIERVARSSRKVKELSRKLIEELRKVLKDVARRLE

SEQ ID NO: 11783 - protein, 180 aa, Artificial Sequence; identical to SEQ ID NO: 11782
  Synthetic

SEQ ID NO: 11784 - protein, 184 aa, Artificial Sequence
  Synthetic
EELERLEKDLREVIKDSERSSDDVRRRLEEVIRDNERLLEELDERLKEVIRDVEDLLRKKDREDVKRLLKELRERVDKVRKDAEDLLRRSRKIVTEWIRRSERAVEENRRVVDEVRKEAAKEDKNKKLIDDLRRKIEESLKDSRRLDEEARKEIERISRKTREDIKELLDRIKEVLDEIRERIR

SEQ ID NO: 11785 - protein, 184 aa, Artificial Sequence; identical to SEQ ID NO: 11784
  Synthetic

SEQ ID NO: 11786 - protein, 184 aa, Artificial Sequence
  Synthetic
DELEDLERKLKEIIDDSKRLLDELEKRLRESNREVERLLDELRKELEKVIRDVEELLKKKPREEVAKLLEDLRRKVKEVEEELRRMLKKNRDVTREVKKEADKALKENERLADEVRKEATREDKNKELIDKLVRELEKSLEESRRLIEELRKEIERTSREIEKRIRDLLKEIKDVLDDIRRRIE

SEQ ID NO: 11787 - protein, 184 aa, Artificial Sequence; identical to SEQ ID NO: 11786
  Synthetic

SEQ ID NO: 11788 - protein, 183 aa, Artificial Sequence
  Synthetic
SELEEVEKRAEELARTLEELNRDVNRRLEELLRRLEKINRTVNDELRKLLEELKDVRRRGKKDVEETLKRVEDRAEELVREVKERTKEVVRRAAELVRKVVEDSRRVAEEIRELAREVAERVESKEDLDRLDKRVRDIVRDLERINEETRKTLEEIRERLERILKRTEENLKEIKEEVRKDEK

SEQ ID NO: 11789 - protein, 183 aa, Artificial Sequence; identical to SEQ ID NO: 11788
  Synthetic

SEQ ID NO: 11790 - protein, 183 aa, Artificial Sequence
  Synthetic
SELEKVTEDVRRLLERLRDINRRVNEALRRLAEELKRLNDEVNKLLRELVTELKKASKDGVPNVEEAVDRVLEELERLVKTVKDISREVAKRLEDLVRRVVEETDKVLRKIRDDVDKVLKRVEDKDKLEELKREVERIEKDVREILKRTEDNLRRIVEELKEINERTEDSLRKIVRELSEDRK

SEQ ID NO: 11791 - protein, 183 aa, Artificial Sequence; identical to SEQ ID NO: 11790
  Synthetic

SEQ ID NO: 11792 - protein, 183 aa, Artificial Sequence
  Synthetic
REKDELRKKVEELLKRLEEISKRTKDSVERVLRELDKITKESKKRAKKLVDRLKELLKRVTDERVKEIVRDVLRKIDKLVRDVARLNEEVKKRIKDLVREVEKRNRDVLDEIRKLVEEVERRGDERAIEEVLKTIEELIKEVEDVNRRVNETIRELLERLRRANEDVIRKVEKLIKEVEDATR

SEQ ID NO: 11793 - protein, 183 aa, Artificial Sequence; identical to SEQ ID NO: 11792
  Synthetic

SEQ ID NO: 11794 - protein, 183 aa, Artificial Sequence
  Synthetic
SEKERLRDMLRKIRETLDRISEDTKRSLDEVRRRLEEISKRTKDNARKLVRELEELLRRVSRKEVKKIVDDVRRRIEELVKEVEETNKRVLEEAKKLVEEVVKLNKTVLKEATRLIEEVERRMDEEFVKRVEDTLRELLDRVRRENERVNRDIDRLLKEVEERNKRVNDELRKLIEDVKEAAR

SEQ ID NO: 11795 - protein, 183 aa, Artificial Sequence; identical to SEQ ID NO: 11794
  Synthetic

SEQ ID NO: 11796 - protein, 186 aa, Artificial Sequence
  Synthetic
DDVRELIERLERILKRVEDINRDVNRKLRRVLERVRKDNEDSNRKTEKVLRDVKERADEIRSDEDALKKLVEEVERVLEEDIRRSEESVDEVRRVLEEVIRRSEETVKEVEEVIKEVEDAVRRASISEKLLRDVERELKRVREDLERILRESRDVVRRVKEELDKILEESRRKVEKVRKDLEDTRK

SEQ ID NO: 11797 - protein, 186 aa, Artificial Sequence; identical to SEQ ID NO: 11796
  Synthetic

SEQ ID NO: 11798 - protein, 186 aa, Artificial Sequence
  Synthetic
SEVEKLITDLRRILKEVEERNRELNKRNDETLKRVEETNRRVNKELKEILDRVIDEARRKREDRDLLRKLVREVEEVLKKVLRDSEETAKEVERSTREVETISRKTVDEVRKVIERVKEAVERLEISEDLLRRVEEELRKVEKDLKRILDKSRDDLRKSRERLERILRRSEEIVREVEERLRRAAT

SEQ ID NO: 11799 - protein, 186 aa, Artificial Sequence; identical to SEQ ID NO: 11798
  Synthetic

SEQ ID NO: 11800 - protein, 186 aa, Artificial Sequence
  Synthetic
DEVRKIIKELEEILEEVRKRNEKLIRENEETLERVRKINEKAIRELEDILRRVKEAVERKREDERLLRELVKTVKKVLEDVEKKSEDTLDEVRRSTERVIRESERSVEEVRRVVKKVLEMVRRLEVSEDVLRDAERRVREVREKLERINKTSRDRLKRSKEEADRINKESREVVKRVKEELEKTAT

SEQ ID NO: 11801 - protein, 186 aa, Artificial Sequence; identical to SEQ ID NO: 11800
  Synthetic

SEQ ID NO: 11802 - protein, 186 aa, Artificial Sequence
  Synthetic
DEVERVIRELERILREVEKRNRDVLRKNEETLREVRERNERAIEELRRILKKVKEEAERKREDEDALRRLVKRVEEAIKRVRELSERSVRKVEESTKEVEDDSRRSVETVRRMLEKLRREVEKLEVSEDVLRTVRKKVEEVREALDRINETVKKALDDSRRRLEKINRDVRRDVEKVREDLERTAT

SEQ ID NO: 11803 - protein, 186 aa, Artificial Sequence; identical to SEQ ID NO: 11802
  Synthetic

SEQ ID NO: 11804 - protein, 186 aa, Artificial Sequence
  Synthetic
DEVKKLIDDLRKILDRVRKENRRVIEELRKILEDVERRNREAIERLERILRRVVDLMRKKREDRKMLEDLVREVERAIERVEKLSEESLDEVRRVIEEVKRRSDKTVKDVRDALKEVLEAVERLQVSEEVLKRVREEVDRVRRELDRINEDSERVLRDVARELERINREVRKRLKEVEKRLREAAK

SEQ ID NO: 11805 - protein, 186 aa, Artificial Sequence; identical to SEQ ID NO: 11804
  Synthetic

SEQ ID NO: 11806 - protein, 186 aa, Artificial Sequence
  Synthetic
SEVEKIIKELREILERVREDNRKIIDDLRKILKEAEDTNRKVIKELKEILKDVSKLMKEKRSDEDALRRLLEEVDRVIKDVIRLSNESLKEVERVIEEVERRSRKSVEEVRRVIKRVLEMVKRLEVSEELLKEAEKDVRRVKEKLDKINRDVREELKKVAEDVKRINDRSREELRRVKEELKKDSD

SEQ ID NO: 11807 - protein, 186 aa, Artificial Sequence; identical to SEQ ID NO: 11806
  Synthetic

SEQ ID NO: 11808 - protein, 186 aa, Artificial Sequence
  Synthetic
KEVEKVIEELRKILDDARRENERLLRELEEILKRVEERNRKLLEDLRRILEEVRKKAKDIRRDKDALDKLVREVDKVIKRVKEESDRSVEEVRRVIEEVITRSEKSLRDVERAIERVKETVDRLQVSEEVVKRVEEELKKVKEDVERINKEVRDRLREVEERLEKINEDTERTLKKVKDELEETKR

SEQ ID NO: 11809 - protein, 186 aa, Artificial Sequence; identical to SEQ ID NO: 11808
  Synthetic

SEQ ID NO: 11810 - protein, 179 aa, Artificial Sequence
  Synthetic
DELRDVLRRLREVLTELEKENRKSIEELKKLNEDVARDIKRVIDELRKLLKRVKEEIEKNKDSKELIERLLEEVEKAVKRIDELVKKLLDDNKRVVDESRELARRTLETVEEVVRKILETADKDEEVRKELEDVRRKAEKILRDNDERLKESNRHMEKLLREVKEELKRVRDAVEEARK

SEQ ID NO: 11811 - protein, 179 aa, Artificial Sequence; identical to SEQ ID NO: 11810
  Synthetic

SEQ ID NO: 11812 - protein, 179 aa, Artificial Sequence
  Synthetic
DEVRDVIKKLKDLNDRLDDENKKSIEDLKRELERLERRNRDSIRRLEELLKDVADKIRRRRDDEELVERLLREVKKVVEDSRRLAEETLKEVKDIVKRSEELARTTLERNRDVVKKIIEAADKDKDVRKRLRESNEHMKELLKENKELLKRLEDEVKRILERNKKELDRVLRRAEELRK

SEQ ID NO: 11813 - protein, 179 aa, Artificial Sequence; identical to SEQ ID NO: 11812
  Synthetic

SEQ ID NO: 11814 - protein, 182 aa, Artificial Sequence
  Synthetic
RSVEEVRKVLEELKREHEKISKKTEEVLEDLKRRHEEIIKRVRDVLREIEEDLRRIRSRVDDELKRVLSEVLERVRRLVKELEDILKDSLRKIEKLVRELHEINKRSLDTLRELADRLAKDDTDEKVEKVIRELRRSVEDSKRRNDEAIRRLEESVRKSSDEVRRAIKELRDLLKKVRDTTK

SEQ ID NO: 11815 - protein, 182 aa, Artificial Sequence; identical to SEQ ID NO: 11814
  Synthetic

SEQ ID NO: 11816 - protein, 182 aa, Artificial Sequence
  Synthetic
STVERVREEADRLRKEHERISDETRKVLRKLEEDHERISRRTEELIERIEREVRKIESRVDEDLVRELREVLKEVRRLAKEVHEENKRSLDRLRELVERLHRENDKSLREIDKLADELAKDDDDEKVKRVEEEVRRSVEESKKENKKVIDDARRSVKRSEDRNREVIKEVKRLLDTVRERAK

SEQ ID NO: 11817 - protein, 182 aa, Artificial Sequence; identical to SEQ ID NO: 11816
  Synthetic

SEQ ID NO: 11818 - protein, 182 aa, Artificial Sequence
  Synthetic
STVEDVRRRADELRRRHKKISEETERVLRRIEEAVRRILEDLRRILKEIEDRVRELLSRVDEKLKRVLEEVRRRLKKLVEELERRLTEVLKRVRELIRKLHEDNKRSLERIDKLADELAKDDDDEKVKEAKRRVTESVRKSKDRNRRVIEEVDRLLKRVEEEVRRVKEEAKELLREVAERTK

SEQ ID NO: 11819 - protein, 182 aa, Artificial Sequence; identical to SEQ ID NO: 11818
  Synthetic

SEQ ID NO: 11820 - protein, 177 aa, Artificial Sequence
  Synthetic
SSVEKVIEDLRRISEKVKKRTEDVLREAEKILRRVEKDNKKVNDDARRIVEELERRGDEKAAREVVKKVEDLLKELKEIDEEVARRVRKLVKELKEIHRKVIEDVRRLVKELEDEGIEKRLVDRVREAAKDIEDENREVLRRVEEILRRIEEELKRSSDETEKAVREIKRRLDERAR

SEQ ID NO: 11821 - protein, 177 aa, Artificial Sequence; identical to SEQ ID NO: 11820
  Synthetic

SEQ ID NO: 11822 - protein, 177 aa, Artificial Sequence
  Synthetic
EEVERVLEEIKRISTDVARRSKEVLKRARESSERVKRRTEEVLEEIRKTNEDVARRADEELFKKVVEDNKRLLDRLREEHRKDDEVVRKLLKELEDIHRKSIEEVRRLLEDLERRGIDKKVVDRLRKEVKRNEDENREMVREVEEEVRRLEKENEEAVRRAADIVRRSEEHLRERTR

SEQ ID NO: 11823 - protein, 177 aa, Artificial Sequence; identical to SEQ ID NO: 11822
  Synthetic

SEQ ID NO: 11824 - protein, 184 aa, Artificial Sequence
  Synthetic
KEVEDLLREVEKSSEKVRELIERSIRELERILEKVAEEIRRSIEELEKILERVAEVAKRRDRELVKRIIEEVLERVDRVNKENEEIIRKVAKEVDDVNDRNRKIVTENKKELERVLREIRNLPVDEKIVKRVEDEIRRLMKKSDELLERSTKVVEDIKRELEKLLETSSRMAEDIKRKLEELRR

SEQ ID NO: 11825 - protein, 184 aa, Artificial Sequence; identical to SEQ ID NO: 11824
  Synthetic

SEQ ID NO: 11826 - protein, 184 aa, Artificial Sequence
  Synthetic
SEVEKLIEELERILEEVARRLKKSNEDLRKILKEVAKRIKDSIRDLRRILEEVADELRRRSEELVERIIRDVLRRVDKVNKENDEIIKRVEETVRRVLDRNRKIIKEVEDTVDKVLKEIRDLPVDERIVEEVERAAEEIKRRLEELVRRSEKSVEEIERELRKLLKDSSDVVREIKKRLEDERR

SEQ ID NO: 11827 - protein, 184 aa, Artificial Sequence; identical to SEQ ID NO: 11826
  Synthetic

SEQ ID NO: 11828 - protein, 184 aa, Artificial Sequence
  Synthetic
SEVEKLLKEVEDSSRKVEEDLRDSNRELKKILDEVADRIRKSIKRLEDILKKVAEDAKRRDKELVEKIIKEVLDDVERVNRENKRILEEVRKRVDEVLRRNREIVKENEKLLDDVLKEIRDLPVDEKIVRDVERRVRELKERSRRIVEESERSAREIKRELKRLEDDSSRVVEDIRKKLEELAK

SEQ ID NO: 11829 - protein, 184 aa, Artificial Sequence; identical to SEQ ID NO: 11828
  Synthetic

SEQ ID NO: 11830 - protein, 184 aa, Artificial Sequence
  Synthetic
REVEELIKRVEESSRDVERRLRESNEEVERSTRRVAEEIKKSIDRVREIVERVERKKERVSEDILRDIARRVSEFVRRANKRNEKIARDNRRRVREVLRRNREIVKRNKELLDKVLEEIERLPVDEKIVERVRRVIEELKRRSDEIVKESERSVRRVEKETTELLEESSRAVERVERRLRELVR

SEQ ID NO: 11831 - protein, 184 aa, Artificial Sequence; identical to SEQ ID NO: 11830
  Synthetic

SEQ ID NO: 11832 - protein, 184 aa, Artificial Sequence
  Synthetic
SEVEKLIEEVRRSSKKVEEDLDRSNRELEDILRRVAEELEKSNRELEKILKEVAERVKRREERLVKKIVEEVERKVDEVLKRNRDIIRKVEETVERVLRRNRKIVDDNRKLLDKVLEDIRRLPVEEEIVKRVEEEARRLKERSREIVKRSEDSAREITKALRKLVRDSEDSVRKIKEKLKEETR

SEQ ID NO: 11833 - protein, 184 aa, Artificial Sequence; identical to SEQ ID NO: 11832
  Synthetic

SEQ ID NO: 11834 - protein, 184 aa, Artificial Sequence
  Synthetic
REVEELDKRLKESSTEVEERLRRSNREVEDSTRRVEEEARKSNEELREILERVAEDVKRRRKEEVDKIVRDVDERVKEVLKRNEDIARENERLLDRVLKRNKEIVEENEKLLRKVLEDIRRLPVEERIVERVERSARELMRRSRDIVRRSKESIERLKKRTRDLVKESRESVEKIKRDLEELRR

SEQ ID NO: 11835 - protein, 184 aa, Artificial Sequence; identical to SEQ ID NO: 11834
  Synthetic

SEQ ID NO: 11836 - protein, 184 aa, Artificial Sequence
  Synthetic
SEVEKLLKELEDSSKKVEDDLRKSNEELRKIVEEVADLIRRLNKELEEILREVRERMRRVSEEEAERILREVAERVKRVHDESREIIERVLRDVERVLEENERIIKENKERLDKVLKEIRDLPVDEEIVRRVEKIVRDLKRRSDELVRRSRKSVEEIRKELEELVERDRRSVERIKEELDKERK

SEQ ID NO: 11837 - protein, 184 aa, Artificial Sequence; identical to SEQ ID NO: 11836
  Synthetic

SEQ ID NO: 11838 - protein, 184 aa, Artificial Sequence
  Synthetic
SEVEKLTKEVRDSSKRVEDELRKSNERLKESTDRVADEIRRLNKELKEILDKVAREVERRDKKLAEDIIRDVKKKVDEVHKESRDIAEENKKLIDEVLRRNREIIRENMERVERVLKEIRDLPVDEEIVERVERDARKVKEDSKRLVEESEESVRRLKTDTERLVEEDKKSVDTIKEELKKLTK

SEQ ID NO: 11839 - protein, 184 aa, Artificial Sequence; identical to SEQ ID NO: 11838
  Synthetic

SEQ ID NO: 11840 - protein, 184 aa, Artificial Sequence
  Synthetic
DEVEELRKELEDSSREVEELIRRLNKEVEKSTREVAKRVKDSNKRLDEILKKVAEEVKKRSKETAKRIIEEVMRRVREALRRNEEIAERNRRLLERVHDTSRKIVETNKDRLDRVLERIRNLPVDREIVERVREEVEKLKKRSEDLLERDKESIDKLDKETKELVEESRKSVRDIERELKKLSD

SEQ ID NO: 11841 - protein, 184 aa, Artificial Sequence; identical to SEQ ID NO: 11840
  Synthetic

SEQ ID NO: 11842 - protein, 184 aa, Artificial Sequence
  Synthetic
DEVEKLIKDVEDSSREVEERIRDLNRKAKKIVREVAERIRELNERLKEILDKVAEEVKRRDKELAKEIIKKVLEDVRRVHKESRDIIREVKEVLDRLHKTSEDILRKNKELLDKVLEDIRRLPVDEEIVKRAEKRIRELKKKSDELLKRDRDSMDRIKKELEKLTREDEESVRRIERELKRLAD

SEQ ID NO: 11843 - protein, 184 aa, Artificial Sequence; identical to SEQ ID NO: 11842
  Synthetic

SEQ ID NO: 11844 - protein, 184 aa, Artificial Sequence
  Synthetic
SEVEKLIEEVRRSSEEVERRIKKLNDDVRRSTEKVEEDIRRLNEELKKILDEVAKEMERRDKEEVKRIIEEVEKRVKEVHDRSREIAERNKKRIDDVHRESARIAEENKEELDKVLKRVRELPVDERIVRRVEKIIRDLKKRSDELLKEDRRSAEEAKRETDRLVEEDKRSVDEIRERLKELSR

SEQ ID NO: 11845 - protein, 184 aa, Artificial Sequence; identical to SEQ ID NO: 11844
  Synthetic

SEQ ID NO: 11846 - protein, 184 aa, Artificial Sequence
  Synthetic
DEVEELLRRVEEIVERVAKRIEELNRRLEEILEEVARRSTKSIKELEDILRKVAKEMERRRKEEAKKILDKVVKDVEEVNKRDEEIARRVEKIVKDVHRDSRRIAEEVLRFLDRVLERIRELPVEEEIVERVERRIRELKKRLEKLVRDDEESVKEIRKKLEELVKRSSDVVERIKRELDKLRK

SEQ ID NO: 11847 - protein, 184 aa, Artificial Sequence; identical to SEQ ID NO: 11846
  Synthetic

SEQ ID NO: 11848 - protein, 184 aa, Artificial Sequence
  Synthetic
SEVEKLLRELRESSREVEERIRKLNRELEKIVRDVDRESARSIEELKRIAEEVAERAKRRDKEDVKRILERAVEEVRRVNKRDRDIIREVLKLVDDVHEESRKIVEDNKRTLEKVLEEIRRLPVEERIVKEVEEEVRRLKKRSTKLLEDDRKSVEDIKERLKELVRRSSEVVKEIEERLKRLEK

SEQ ID NO: 11849 - protein, 184 aa, Artificial Sequence; identical to SEQ ID NO: 11848
  Synthetic

SEQ ID NO: 11850 - protein, 184 aa, Artificial Sequence
  Synthetic
SEVEDLLRRVRESSKEVEERIRKLNDELRKSTKEVEDRSRRSIERLDRIVEKVAREVERRDKELVSRIIKRVLEDVDRVNKEDKEIAEENKKEIDRVHEESRRIVEENKKLVDEALERIRRLPVDEKIVRDVEREVRRVKERSDRLLEEDRKSVEELKTRTDRLLEESSKRAEDIKRKLKELEK

SEQ ID NO: 11851 - protein, 184 aa, Artificial Sequence; identical to SEQ ID NO: 11850
  Synthetic

SEQ ID NO: 11852 - protein, 184 aa, Artificial Sequence
  Synthetic
SEVEKLLREAKESSREVKDRSKKSIDELRESTKTVERLIRDLNRKLKEILDRVADDMRRRDKELAERIIREVLKRVDDVHRESKKIADENKELLKRVNDRDREIVKRNDELLDEVLKRIRELPVDEKIVRRVEEIVRRLKKESKDLVEESTRVADELRRRTDRLVEEDERSVRKIKEDLDRLRK

SEQ ID NO: 11853 - protein, 184 aa, Artificial Sequence; identical to SEQ ID NO: 11852
  Synthetic

SEQ ID NO: 11854 - protein, 181 aa, Artificial Sequence
  Synthetic
SEKEEAKRRARELEKRTDELLEESTRVNEESKRHLKELLDESRRTAKRVKEEIDKLLKEKREGDRVEELVKELKKIIDEVLKRNEELIREAERIDDESNKRNEELARRDKEIIRELLRLVEEGVDVDTLLERVDRSSKEVADRMRKSNEEVKDVNRRVAKALKDSNRDVERVLEDVARKIK

SEQ ID NO: 11855 - protein, 181 aa, Artificial Sequence; identical to SEQ ID NO: 11854
  Synthetic

SEQ ID NO: 11856 - protein, 181 aa, Artificial Sequence
  Synthetic
SEKETARKVIEELRKETERLLRESTKTNEDSSRHAKELLKRSEDVAREIEERIDRLLEEKKDGDEVKRLVEELKKRVEELLRRNEELVRRLEEIDKRSNDENRKLAEEDKRRLEDAERRVEEGVPIEEVIKRLEDSSRDVERRLRKSNEDVKRVNKEVADRLKESNDRLREELKKVEDDIR

SEQ ID NO: 11857 - protein, 181 aa, Artificial Sequence; identical to SEQ ID NO: 11856
  Synthetic

SEQ ID NO: 11858 - protein, 181 aa, Artificial Sequence
  Synthetic
DEKEDAERKIRRLEERTKKLLDDSTKTNKESRDHLRKLLADSEKTARDIKRAIKKLLDDKKDGDEVRRLVEELKKIIDKVLEDNKRLIEEVEKIDKDSNDENRKLVDDDRRKLEEVRKLVEEGVDVDTLLTEVTDSSRRVEEELKRSNDEVRRVNREVAERLKKSNRELEEVLRKVAEDIK

SEQ ID NO: 11859 - protein, 181 aa, Artificial Sequence; identical to SEQ ID NO: 11858
  Synthetic

SEQ ID NO: 11860 - protein, 181 aa, Artificial Sequence
  Synthetic
SERERAEEEAKKAKKEAKRLLDESTKANEDSKRHADKLLEDSKRAAEDIKRKAEDLLRKKKDGDRARRLAEEARKIADKAVEDSERLAREAAKIDKDSNDESRRLAREAEEIADRALEAVDRGADARRAIEEVRRALKEAADASRDLNRRAKEANERAAKASEELNKRAEDALRRASEEIR

SEQ ID NO: 11861 - protein, 181 aa, Artificial Sequence; identical to SEQ ID NO: 11860
  Synthetic

SEQ ID NO: 11862 - protein, 181 aa, Artificial Sequence
  Synthetic
SEKEEVKKRVDEIKERLKRLLDDSTRTNEESRKHIEDLLEESKKEIDKVRKDLERLLRKKEEGDRVRELIKEIERILEKAVRDSKELVDRLRKIDEDSNRESKRLIEEVEEILDRALELVKAGVDVDTMTRKVEEVLRDVAEKIKELNRRVEEANKDMARESERLNREVRDVLRKVAKDIE

SEQ ID NO: 11863 - protein, 181 aa, Artificial Sequence; identical to SEQ ID NO: 11862
  Synthetic

SEQ ID NO: 11864 - protein, 181 aa, Artificial Sequence
  Synthetic
SDEDRAREDLKRIKEELKRLLRESTEVNKESEKHIRKLLRESEETIRRLKKAIDDLLRKKREGDEVERLVREAKTRLDEVLKRSKELVDTLREIDKKSNKDSRKLVRDAEEILDRALRLVEAGFDIETILRRLERVLKEVEKKSRELNRRVKEVNEKVRRDIERLNKEVKDVLKTVAERIT

SEQ ID NO: 11865 - protein, 181 aa, Artificial Sequence; identical to SEQ ID NO: 11864
  Synthetic

SEQ ID NO: 11866 - protein, 181 aa, Artificial Sequence
  Synthetic
DEKERAEERIRELKKRTEELLRESTRVNRESKEHAKELLKRSEDTIRELDERIRRLLERKKDGDRVRELVKEAKKRLKEVLEESEDLVRKLEEIDDESNRRSERLVREDERILREARKLVEDGVDVDTVLARLEESSKEVEDRSKRLNEEVKKVNEEVAKRIKELNEEVERVLRRVAEEIE

SEQ ID NO: 11867 - protein, 181 aa, Artificial Sequence; identical to SEQ ID NO: 11866
  Synthetic

SEQ ID NO: 11868 - protein, 182 aa, Artificial Sequence
  Synthetic
SLKEELREKVRKVKEDSERLLRDLERTVKKVREDSKRILDRNRETAKEIERRIRELERNGKISDEAVRRIEEVLKRVIELSERLLRRNEEVLKEVIKKVERMLRENERLLREVEREVDREKDNEELVRKLRKELDDSLKRTKELVDRLKEDLERSLRDSEELARRLDRELEDVLRRIEDEAR

SEQ ID NO: 11869 - protein, 182 aa, Artificial Sequence; identical to SEQ ID NO: 11868
  Synthetic

SEQ ID NO: 11870 - protein, 182 aa, Artificial Sequence
  Synthetic
SLLETLKEIVRRVERESARILEDNRRTVTRAKEESKKILDRNAKTVDDLRKEVERLKTEGKISEELAKEIERVLRDVLRLSKEALERNEKVLREVIETSERALRENRKLLKRVIEEVAREQDNEELVRRLVEELEKSLRTTERLARELDRKIKESLDTSEELARRLDKRLEEVLKDVKRRAE

SEQ ID NO: 11871 - protein, 182 aa, Artificial Sequence; identical to SEQ ID NO: 11870
  Synthetic

SEQ ID NO: 11872 - protein, 182 aa, Artificial Sequence
  Synthetic
RLEEELKKTVDRAREEVKRLLDRDRESVDDLRRAVEEILKTNRRTVEKLRKDLTDLRRNGKIDDELVKRIEEVLKRVERASREALRRIKEVLEEVERKSKKALDDIEKVLREVEDVVRKERDNEKLVRELIEKIKKVLDEVRRLSEKLNEDLREILERVKRLADKLDEELKRMLEKVEETAR

SEQ ID NO: 11873 - protein, 182 aa, Artificial Sequence; identical to SEQ ID NO: 11872
  Synthetic

SEQ ID NO: 11874 - protein, 187 aa, Artificial Sequence
  Synthetic
DDVERVKRDIDRLLEKVTRENEKVKEKMKELLDRAREVNRKVKEDIKRLLKEVEDVARREGGESERVVRRARKVVKDVEDLVREVHKLNEDIVRRAEELVRRLHRLNEEIVREIARLVEEVVRRRGEDTEDVRDLERRLREVEEEARKLSEDVRRVLEEVRKELERLSRDTERVLKRVREEIRKIEK

SEQ ID NO: 11875 - protein, 187 aa, Artificial Sequence; identical to SEQ ID NO: 11874
  Synthetic

SEQ ID NO: 11876 - protein, 187 aa, Artificial Sequence
  Synthetic
SEVEEVIRRVRKLLKDAKDLNEEVKRRLKELLDRVKRVSEKTKEDIKRLLEEVERVVRTKGGETEEVRRRIEDVVRKIRRLSEEIRRILEEVVRRAEELVRRLDELNRDIVRKVKKLAEDVLRSTGEDTDLAERVRDVLRRVAEAAKELSKDTKRVLDEVKKAIDELLKDNKRTVEEVEKEAKKTLK

SEQ ID NO: 11877 - protein, 187 aa, Artificial Sequence; identical to SEQ ID NO: 11876
  Synthetic

SEQ ID NO: 11878 - protein, 187 aa, Artificial Sequence
  Synthetic
DEVEKVKKTLKKLLEDARRRNEEVRKEIEDLDRELERLNRESKKRIEDLLEEVKRVVDRDGGEAEEVRRRIERVVEEIERLSREAAEMNRKVLEEIEELVDRLDRTNKKIVEEAKKLVEDVVRKEGEDTELVRELERVLDTVRREAERLSRKTREVVDESRRRNKKLLEEDERVVRKVVEDAERKLK

SEQ ID NO: 11879 - protein, 187 aa, Artificial Sequence; identical to SEQ ID NO: 11878
  Synthetic

SEQ ID NO: 11880 - protein, 187 aa, Artificial Sequence
  Synthetic
DEVKKVIDDIKDLLRRVEEVSRRVNKELERLLREVREVNKDVKRKLEELLRRVKEVVRRDGGESEEVKRIIDRIVEEAEELVRRVNRLNEEVVREAKELVDRSMKIIEKVVEDIERLVRELLRKEGEDTDLAERVRKVLEDVTRAAKELIKRDKKSLEDVKREIEKLSRDVKRVLEKVAEDAKDTLR

SEQ ID NO: 11881 - protein, 187 aa, Artificial Sequence; identical to SEQ ID NO: 11880
  Synthetic

SEQ ID NO: 11882 - protein, 176 aa, Artificial Sequence
  Synthetic
SEEEDLARVVERVERDLKRLDDDNKRVLDESRRRNEELVKRTAEIVERVRRELERLRREGRVSDEIVERVMREIEKLLRELERINRETIKRNKRLSEEASKINKEVTDRVRELLRDKSERVEEVKRTMEKLLDDVRKANEDSKREIEKSDDEVRKRNEEVVRDIERLLKEVEERAR

SEQ ID NO: 11883 - protein, 176 aa, Artificial Sequence; identical to SEQ ID NO: 11882
  Synthetic

SEQ ID NO: 11884 - protein, 176 aa, Artificial Sequence
  Synthetic
SEEEDLRRRAEEVHRRNEELLRDNERTVKKVHDRNRELLEDLRRVVERIERELRRLEEEGRVSEEEVRKVVETVRKLLKDVEKIVEDSSREVKRLSDEVREVVERSSREVKRLVEEKSSRVEEVKERIDRLHEELEKLSRTTKEKLKELHKRLEDVVREVKRRAEELLREIKERAD

SEQ ID NO: 11885 - protein, 176 aa, Artificial Sequence; identical to SEQ ID NO: 11884
  Synthetic

SEQ ID NO: 11886 - protein, 185 aa, Artificial Sequence
  Synthetic
SEVEEVRKVVEEVKRELRRLSEDSRRVVEEIVEADKRLSEKNETSVREVKKALKKLKDDGVVQEDVVTRVTEEIDRLLRESRESSRESVERIRKLLEDLERVSKEVLERLDRLLEDIERKLSDKDAEELVRDVIRRAREVLKRVEDVHRKVKKDLKKVHDDNKKISEDIDRRLEEVLRKVEEDDR

SEQ ID NO: 11887 - protein, 185 aa, Artificial Sequence; identical to SEQ ID NO: 11886
  Synthetic

SEQ ID NO: 11888 - protein, 185 aa, Artificial Sequence
  Synthetic
SEVEDVKRKVREIEKADEELSKRNEDSARESKKRLKEWSDDTKEVVERVRKRLKDLEDEGKVREEVVKRVKELLDELLDRLRKVSEEVLRRNDKLLKESRDSSRESVRRIRELLEDIRRKLEDEEAERLVREVTKEMKDVHDKNKKLSEDIDKRVEDTNRRLKEVHERVKEEAKKVVRDLEETAK

SEQ ID NO: 11889 - protein, 185 aa, Artificial Sequence; identical to SEQ ID NO: 11888
  Synthetic

SEQ ID NO: 11890 - protein, 185 aa, Artificial Sequence
  Synthetic
SLVETVEDVLREVEERLRKLLRDNEESVERIKKRDEDLSKENEESVKRVEDTLDELRERGVVDESVVKEVKRLVRELLKESRDSSKRSVEVVKELLDESRRVLKELKEEADKLVDRLRDLVDDERVEELVRKVIEDARRLLDDVRRKSERLDREAERVHRENKKLSEDLDRRVKTVVDDVRERAR

SEQ ID NO: 11891 - protein, 185 aa, Artificial Sequence; identical to SEQ ID NO: 11890
  Synthetic

SEQ ID NO: 11892 - protein, 185 aa, Artificial Sequence
  Synthetic
SLVEEVEKEARDIERRDDELSKRNEKVARDIEERDRRLSDEVREVVKRVKRELERLVESGEVDEDVVRRVLELLKEILEEVERSSKKSVDVVKKLLEESEKSSRDSVREVRRLLKEIRDKIDDKDAEKLVRRVIKDLRKLHKENEDLSREIDKRLEDAHKRNRDLVEEVKKRMERVREEVERAAR

SEQ ID NO: 11893 - protein, 185 aa, Artificial Sequence; identical to SEQ ID NO: 11892
  Synthetic

SEQ ID NO: 11894 - protein, 185 aa, Artificial Sequence
  Synthetic
KEKEDVKKVVEDIERADKKLSEDNRRVVKRIEEADRKLSKENKESVERAKKRLDDLERRGEVDRRVVTEVEKTLKEILERSERSSKRSREEVKRLLEESEDSSRRSVEEIRRLLKEIEDKLSREEAEELVRRVIKEMEEVHKRNRDLSKRLDDELKRIHKENEDRLRRLDEEIEKVVKKVEDDAR

SEQ ID NO: 11895 - protein, 185 aa, Artificial Sequence; identical to SEQ ID NO: 11894
  Synthetic

SEQ ID NO: 11896 - protein, 185 aa, Artificial Sequence
  Synthetic
SLVEELRKDVEEIKKRLKRLVEENEKVVREVTEADKKLSKELEDEARDVKRALEELRRRGEVDERVLRRVLEIVDELLERARESSRDSERVVRELLEESRRVVEEVLRRIEKLLEELERLISREEVEELVRRVREDMERVVREVEKVSRDLDREIRRVHRENRELIEDVKRKARKVLRDAEEEAR

SEQ ID NO: 11897 - protein, 185 aa, Artificial Sequence; identical to SEQ ID NO: 11896
  Synthetic

SEQ ID NO: 11898 - protein, 185 aa, Artificial Sequence
  Synthetic
KIVEDVEKVVKEVDDRLKKLVDDNERKVREIIRRDEELSEKNEKSVRDVKEELKRLAEEGTVREEVVRRVEEELRRLLEESRRSSDRSRKRVKKLLDDSRRVADRVREELERLLREVRKKADREEVEKLVREVIDRMRRVVREVEEMSKRLDEELEEVHRRNRETLTRIDEEAKKVVDDVDRRAR

SEQ ID NO: 11899 - protein, 185 aa, Artificial Sequence; identical to SEQ ID NO: 11898
  Synthetic

SEQ ID NO: 11900 - protein, 183 aa, Artificial Sequence
  Synthetic
SVRETLEEVLRRIAEAIDELIKTLEKVLEESRREIERWKKENEDSLREIKKKLEDLEKKIEDERVVRDIRRVLEEVRRLVEESKKILDEVVEDNERLVRELVKELEDVKRKVEELVRDVKRDNTEEKAKRALEEIKRLLERVKKRVEEALEEIKKSNKEAADIVRDIDRRLEELLRTVADKTR

SEQ ID NO: 11901 - protein, 183 aa, Artificial Sequence; identical to SEQ ID NO: 11900
  Synthetic

SEQ ID NO: 11902 - protein, 177 aa, Artificial Sequence
  Synthetic
DEVEEVIKTSREINDRVRRELERVLRRSEEIIEEVAKSIEEVIKESEDIIRKVEKDGDEEALRRAVEESTRLVEEVKRELEEVVERSTRLLEELVRILEEALRRSEELVRDLEARVDKEELKRKIRDVLRDDERAARKWVRDLEEVNKRTEDKIRELLRKLEEVNEKTERDIRRREK

SEQ ID NO: 11903 - protein, 177 aa, Artificial Sequence; identical to SEQ ID NO: 11902
  Synthetic

SEQ ID NO: 11904 - protein, 177 aa, Artificial Sequence
  Synthetic
EEVERVIEEIKKLLKDVAELVERVIKEIRKILDDVAKENKRLLDESRKIIKEVAERGDERMLEDAVRRSNELLKEADRINKEVLKRVRELVKEVERILRDVLRRVDELVKELEKRVDKEEVKRKIRKVLKEIKEEIEKLLKKLRDALRDVEEKIRDLTRRAREVNEKSREDLERRKD

SEQ ID NO: 11905 - protein, 177 aa, Artificial Sequence; identical to SEQ ID NO: 11904
  Synthetic

SEQ ID NO: 11906 - protein, 177 aa, Artificial Sequence
  Synthetic
DEVEDVIRRLEEIIREVEDRLRKILETSKKIIKEVEDENRRVVTEIERILREVEKRADERMLEKVLDDIRKLVEELDRINRKAVEISNRLLEKAKRILDEVLRRVTKLVEDLKDKVDKEELKRRIEEVLERLRRKIERLAKELKDVNDESEREARRLTEEVKRVLEEVARRIKEAAE

SEQ ID NO: 11907 - protein, 177 aa, Artificial Sequence; identical to SEQ ID NO: 11906
  Synthetic

SEQ ID NO: 11908 - protein, 177 aa, Artificial Sequence
  Synthetic
REVEEVRKKIEEDIDRVDKELKEVLETSRDILRRVAKENEDVLRDLERLVDEVRRDSDKDLLEEVLKRVEDLVRELDRKNKEVAERSTRLIEELAKILDDVLKRVEELLEELKRRVDKEELKKKLEKVVRDLSKRLEELLKELEKVNEEVKRRLERLTEEVRKVLEEITKKLKERAR

SEQ ID NO: 11909 - protein, 177 aa, Artificial Sequence; identical to SEQ ID NO: 11908
  Synthetic

SEQ ID NO: 11910 - protein, 177 aa, Artificial Sequence
  Synthetic
SKVEEVMRRLKEILKRVAEELEKVLTESEKILRDVADENRRVMEESRKILKDVAERGDEKALEDALRDSSRLVKDLDEKNRRVLETSTELIERLKKRLEEVLREVKELVDRLKKDVDKEEVKKKIDKVLEDVRKELDDLRRKLEEVNKRIEEEIRRLTEDVRRVNDEIRKRAEDRKR

SEQ ID NO: 11911 - protein, 177 aa, Artificial Sequence; identical to SEQ ID NO: 11910
  Synthetic

SEQ ID NO: 11912 - protein, 182 aa, Artificial Sequence
  Synthetic
SLREKADEVVKRIKERLDRLEDKSREVVKDSRRKLREWYEKSKRAVEDIETKLDELRKDLTDKKAEEILRKVKEDVKRVHEENERILRELKKITDKLHEENKKIIDDVKRKVEDVLRRVRDVDKDMVEELIRELEKIVTDVAKKVEDTIEESRKINEEVAKRVEDTIKRLEDILRDVARRVK

SEQ ID NO: 11913 - protein, 182 aa, Artificial Sequence; identical to SEQ ID NO: 11912
  Synthetic

SEQ ID NO: 11914 - protein, 182 aa, Artificial Sequence
  Synthetic
SLREKVDKVVEEIKRKLDKLLEDSERVVEKSERDLRRWLKEAEEVVREIEKTLKELEKRARDDRLRKIIDEVRKRVERVLEEVEKIIDELRKRSETVHRRNETIIRKVEEDVKRVRDRIERVDKDVVEDLIRELEEIVRRVAEEVRTTIEDLRKINDEVREKVKRLIEELKKILDDVAEEVR

SEQ ID NO: 11915 - protein, 182 aa, Artificial Sequence; identical to SEQ ID NO: 11914
  Synthetic

SEQ ID NO: 11916 - protein, 182 aa, Artificial Sequence
  Synthetic
SLEEKAREVVKEIRRRLDELLRKSHDVVREIEERLDKLEKESEDAVREIEKRLDELAKRITDERAKKILDEVKKEVRRLHEENRKILEEVKKEVRRVNDENRRIIERVKETVDDVLRKVSRVDAKVVEKLIKELRDILREVAERVERTIRRLREIVKRVERKVERSIEEMERIVREAEEETR

SEQ ID NO: 11917 - protein, 182 aa, Artificial Sequence; identical to SEQ ID NO: 11916
  Synthetic

SEQ ID NO: 11918 - protein, 182 aa, Artificial Sequence
  Synthetic
SLREKVDEVVKRIEKRLEELIRKSRKANEDIRKKLEELIKKSEDVVRKIKRELEELKRRVTEDEVKEIIERVLERVERVNEENRKIIEDVLRKSDEVDRRNKDILRRVRERVDEVLEEAKDVEREVVEDLIRELEEILRKVAEEVEDTIRRLEKILKEVAERVERTIKDLEDIVRDVAEKVK

SEQ ID NO: 11919 - protein, 182 aa, Artificial Sequence; identical to SEQ ID NO: 11918
  Synthetic

SEQ ID NO: 11920 - protein, 182 aa, Artificial Sequence
  Synthetic
SLREKVKRMVEEVKRELDELEKESNRAVERVERELEKLIRKSERVNERIRERLKELAARSTDKKVEKILRELKKLSDELDRTNKEIIDRLRKEVREVNDRNRKIIEDVEDFVRRAEDRLRDVEDKVVEKLIKEVRDIVKKVAEEVKKTIEDVERKVKEVAERVEDTIRRLDEAVKEVEERVR

SEQ ID NO: 11921 - protein, 182 aa, Artificial Sequence; identical to SEQ ID NO: 11920
  Synthetic

SEQ ID NO: 11922 - protein, 182 aa, Artificial Sequence
  Synthetic
SLREEAERVIREVREDLDRLRRESKKVNDRIRRTLDELRKRSDDAVRDIKEKLKELAKRTTDEKVKKILKDVEDEVEKVNRENREIIKELEKVSNDLDRRNKEILRTLKKLADEVLERVKDVDKDVVRELAERLKRLLEEVEKRVKDTIRELEKIVEEVRKRVEDTIRRLEEVLDKVAKEVT

SEQ ID NO: 11923 - protein, 182 aa, Artificial Sequence; identical to SEQ ID NO: 11922
  Synthetic

SEQ ID NO: 11924 - protein, 184 aa, Artificial Sequence
  Synthetic
SIEEELKKVLKEIEDRVRKSDKENKEASERIKRTVEELERRLREVLRRIEEAVRKLVREKGEETELVEEVRRLVEELRDRLRKVIEDIRDLVRRLVEHNKRVSDEVKRRVEELKRILEEVLRDSDEKKVKEVVDELRKLLRELEKLSEESNRKLKKLTDDIEKLVRDVEKELRKLLKELAEKIK

SEQ ID NO: 11925 - protein, 184 aa, Artificial Sequence; identical to SEQ ID NO: 11924
  Synthetic

SEQ ID NO: 11926 - protein, 183 aa, Artificial Sequence
  Synthetic
SVEERLKRVLERAREEIKRLLDELERVLEESRKEIKKLSEDLTRANEDTRREIEKLAREITDERLREILERVVRESTRLVEEVHRINEKVLRDNTRLVDEVRKILEEALKRVEELIEELRRVDDERIVKKVEEEIEELVRRVEKRVREVKKRMEDSNREVRKANEEVKKRSEDLLRKVRRDAE

SEQ ID NO: 11927 - protein, 183 aa, Artificial Sequence; identical to SEQ ID NO: 11926
  Synthetic

SEQ ID NO: 11928 - protein, 183 aa, Artificial Sequence
  Synthetic
RVRDELREVLRKAREDIKRLSDKMREVLRESEEKIKRLSDDLRRVNEETKKEIDRLRKEIDKEELKEILKRVVEESTRLVEEANRINREVLRRNEELIREVDRINKEALEEVERLVEELKRVDKKEIFRKVEKEIEDLLEEVRDVNRKIEEEARRSNEDVERVNREIKKRSEELLRDVEKKTE

SEQ ID NO: 11929 - protein, 183 aa, Artificial Sequence; identical to SEQ ID NO: 11928
  Synthetic

SEQ ID NO: 11930 - protein, 183 aa, Artificial Sequence
  Synthetic
SVREELKKALDRVRESIRRLSEELREVLERSEDTIRRLVEDLERVNEETRREIEDLARKIRDDRLRRILEEVLKESTRLVEEVKRILKRVLDENRRLVEEVDRINKDVLREVRRLVEELRRVDDERIMKEIEKRIEDLEREVKEVNREVIERAEESNRRVEELVREAKKRSRELLKRVREEAK

SEQ ID NO: 11931 - protein, 183 aa, Artificial Sequence; identical to SEQ ID NO: 11930
  Synthetic

SEQ ID NO: 11932 - protein, 183 aa, Artificial Sequence
  Synthetic
SVREDLERALRRAAEEIEKLSRDLKRVLEESRKNIERLRRDIERMNEETEKEIRRLAREIDKEELKRILEEVLKRSTELVKRLTEILKRVLDTNTKLVEEVDEINKRVLDEVRKLVERARRVDREEDAEEIKTRIKELIDRVRRVNEEVKERMKKSNEEVEEVVRRVKEESKRLLERVEEDVR

SEQ ID NO: 11933 - protein, 183 aa, Artificial Sequence; identical to SEQ ID NO: 11932
  Synthetic

SEQ ID NO: 11934 - protein, 183 aa, Artificial Sequence
  Synthetic
SLREDLRRVLERARDELRKLSKELKEVLKRSRDNIRKLSEDVKRANERTEEEIRRLTKEIDKDELREILERVLRTSTELVKELNKRNRDVLRENERLVREVDKINKDAAREVTKLVEELDRVDKDEIFKRVKKEIKELVDRVREVNKDVIRRMKKSNDEVKRENEKVIRESEKLLKDVEDARR

SEQ ID NO: 11935 - protein, 183 aa, Artificial Sequence; identical to SEQ ID NO: 11934
  Synthetic

SEQ ID NO: 11936 - protein, 183 aa, Artificial Sequence
  Synthetic
SVRERLEKVLKEVEDSIKELSDDLRRVNKRTEEEIRRLAEDLERVLERIEREIRKLAKEIDKDELREILKRVLEEVERLVREVKEILRDVVRRSSELVERVDKINKDVLEEVRRLVEELRRVDKEEIAERVERTIRKLEDDVRKVNEDVKRRSRELLERVARLVERVKEEAEKLLEDVKRKAD

SEQ ID NO: 11937 - protein, 183 aa, Artificial Sequence; identical to SEQ ID NO: 11936
  Synthetic

SEQ ID NO: 11938 - protein, 183 aa, Artificial Sequence
  Synthetic
SLREDLERVLEEIERELKELSDDLRRMNEETEREIRKLSDDLRRALEKIRDEIRKLAEEIDDKRLEDILRKVLREVEELVKEVNRINREVLRRSSELVKRVDEINKKVLDDVRKLVEELKRADKEEIFRKVKEEARRLVREVEEVNKEVKKRSRDLLREVRKVNEDVKREIERLLRKVAKDAE

SEQ ID NO: 11939 - protein, 183 aa, Artificial Sequence; identical to SEQ ID NO: 11938
  Synthetic

SEQ ID NO: 11940 - protein, 183 aa, Artificial Sequence
  Synthetic
SMREDLRRVLEEAEKKIRKLSKEAKDANRETEKEIRKLSEDVKRVNKESKDEIDRLAEEITDDRLRKILEKVVRESNRLVERLNRINRKVLKESSELIKEVDEINKKVLRDVEKLVEDLKRVDKKEIAEKVKREIEKLVRDVERVNREIIERSEKLLREVREENERVKRESRRLLKEVEKAAE

SEQ ID NO: 11941 - protein, 183 aa, Artificial Sequence; identical to SEQ ID NO: 11940
  Synthetic

SEQ ID NO: 11942 - protein, 183 aa, Artificial Sequence
  Synthetic
SVRETLKKVLEDVRRELKKLSDKLRKVLEDSRRNVKRASDKLREVLKRVKEEIERLRREIDKKELEEILERVLREVKKLVEDVNRINRKVLKENTDLVREVDDINKRVAEEVDELVERLKRVDKEEIAKRIIEEIKKLLDRVREVNEDVIRRMKKSNEDLDRRNEEVRKRIEDLLEKVARDAK

SEQ ID NO: 11943 - protein, 183 aa, Artificial Sequence; identical to SEQ ID NO: 11942
  Synthetic

SEQ ID NO: 11944 - protein, 185 aa, Artificial Sequence
  Synthetic
SLEETAKEVIERSEDHLRRLEETNRKVVEDSERHLDDLTRRIKKVVEDIKKRLDEIEKRGEVDERVLRTLAKKVEDLLRRVEEVVRRVKERTRDHLRDSERVLRELLELSKRILERVRRKSSDERAEELLRTVVKEIEDANRRVEEVSRKNTEDIKEWNKRLEEELRRVVERARRELKKVEDAAR

SEQ ID NO: 11945 - protein, 185 aa, Artificial Sequence; identical to SEQ ID NO: 11944
  Synthetic

SEQ ID NO: 11946 - protein, 185 aa, Artificial Sequence
  Synthetic
SLEETAKRVIEESRKHLDRLRRENERVVKEIRDALRELEKKVEDVVRRIAEELERIRKEGKVPEDVVREVRKTVEKLLRELEDVIRRLKELVDRHLEDSERVVREVKRISDRLLEEVKRKSSREEAEDLLRKVIEDIKELNRELERVSRKNIEDLRRWLEEVREMVKRVEEKAKRVLEELREAAK

SEQ ID NO: 11947 - protein, 185 aa, Artificial Sequence; identical to SEQ ID NO: 11946
  Synthetic

SEQ ID NO: 11948 - protein, 185 aa, Artificial Sequence
  Synthetic
SLEETIEKVVERSKRNLEKLRREIRKVVKESDENLKDVERRAREVVEEIKKALEDIRRKGDVDERVVEEVKRDVDRLEREVKRVLDDLRRVTEELLKRVEDMVRRVLEVSEKLLKEVKDKSSREEAEELLRKVIKESEDLNRRLREEVKKVVREIEEANKRVNDTVRKMEEALKKLLDDLREKAR

SEQ ID NO: 11949 - protein, 185 aa, Artificial Sequence; identical to SEQ ID NO: 11948
  Synthetic

SEQ ID NO: 11950 - protein, 185 aa, Artificial Sequence
  Synthetic
SLEEDMKRVVDESRRNLERVEKENRDVVKESRDNLKKVEDDIRKVVKDIRDELEKIRKRGEVDETVVKRVMDTVRELLKEVKRVIDEVRRRTDEHLKHSKEVVERVLKISEDLLREVEKKSSREEAEELVRRVKETSKRVNEELDKTAKKNVDDIKDWNRRVNEKVKKVKEDAERVLRELEETAR

SEQ ID NO: 11951 - protein, 185 aa, Artificial Sequence; identical to SEQ ID NO: 11950
  Synthetic

SEQ ID NO: 11952 - protein, 185 aa, Artificial Sequence
  Synthetic
SLEETITKVVEESKKNIDRLLEEVRKVVEDSRRDLDRVIDEARKVVEKIDRELKRIEKRGDVDKRVVEEVRKEVKELLDRVREMLERVKRVSDKLLEDLRRLAEEVKKLSTDLLEEVRRKSSREEAEELVRRVKKRSEDVNKKLDEDVEEMKRRSEKLNKDINKDVDRVRKRLEEVLKRLREAAK

SEQ ID NO: 11953 - protein, 185 aa, Artificial Sequence; identical to SEQ ID NO: 11952
  Synthetic

SEQ ID NO: 11954 - protein, 185 aa, Artificial Sequence
  Synthetic
SLKDEIKKVVDDSRRNLEEVKKEITRVVKESRERLEELERDIERLVEKVTRELDRIEEEGRVDSKVVRKVKELIKRLLEEVREVIERLRRRTEKLLEDVKRVVEEVLKVSEKLLRDVERKVSREEAKELVEEVIRRSREVNRDLNRRVREVEKESRDANERVKRRVEEVKRRAREVLERLKKAAE

SEQ ID NO: 11955 - protein, 185 aa, Artificial Sequence; identical to SEQ ID NO: 11954
  Synthetic

SEQ ID NO: 11956 - protein, 185 aa, Artificial Sequence
  Synthetic
SLEEDAKRMVDTNEDRVREWERKIDKVVKDSEKRLRELREDAERMVREIKKELEKIRTEGRVPKEEVKKVLDRVDELLERVEEVVRRVLRVTEELLKEVKRVLKENKEILDRLLKEVTDKSSDERAEELVRRLKKASEDSNEKVARLIEEVIKRSKDVNDDLERDLREVKKRLKDVLKRLKEKAK

SEQ ID NO: 11957 - protein, 185 aa, Artificial Sequence; identical to SEQ ID NO: 11956
  Synthetic

SEQ ID NO: 11958 - protein, 185 aa, Artificial Sequence
  Synthetic
SLEEDAKRAVEESKRTLRELEEENKKVVEDIRRALRRLEEDIKRVVEEIRRELDRIRREGRVDERVLRDVKRLVDELLERVREVIKELEELVKRHLDHSKTVIDRVDEITEELLKDVERKSSDERAEELVRRVKKTIEDVNRKVAKVVKENIKRLREWLKRVEERLKEVKDRLRKVLEDVERAAK

SEQ ID NO: 11959 - protein, 185 aa, Artificial Sequence; identical to SEQ ID NO: 11958
  Synthetic

SEQ ID NO: 11960 - protein, 180 aa, Artificial Sequence
  Synthetic
DVEEDVKRVADDNRRELERWRRDVKKVADEVKDRSRKLERDVERRIREIEKTLEDLRREGLDERVIETLARILKRLLDEVKKLLKDNERVVDRVLTEVDELIRRNEESVRRILEDVKKDRTKEVVKRLKEESKKSNEDVARRVEKLKEELERSTREVERAVRELKKELDEVVREVKERAK

SEQ ID NO: 11961 - protein, 180 aa, Artificial Sequence; identical to SEQ ID NO: 11960
  Synthetic

SEQ ID NO: 11962 - protein, 180 aa, Artificial Sequence
  Synthetic
SIEERLDKLLRDVKRALEELEERIRRSNKRLREAVEKLKKEVEDSNRELDKAVKEVLRRKDEEKAKKLAEAVKRSLDKTRKLVEDVARAIEESLKRVEEIVKRVLKAIEEILEEVRRKVRTEEAVRTAADLLRRVLERVKRLAEELHRHNKEVLDEARKIARDLHRLNEEVLRRVEEATK

SEQ ID NO: 11963 - protein, 180 aa, Artificial Sequence; identical to SEQ ID NO: 11962
  Synthetic

SEQ ID NO: 11964 - protein, 180 aa, Artificial Sequence
  Synthetic
SIEEDLKRLLDEVRKRSKDLKEEVKRSNDRVREDLKRLKEEIDRLLEEARRRLEEIIRRKDREEVKKLLDKIEKVLREVEETVKRLEEDIERSLKKSEELVERALKHDEDVLEDVERRVRDKELVDRARDKIRESLRRSEKIIEELHEHNKDALRRVREEIKRLKDKLKKVVEEVERATR

SEQ ID NO: 11965 - protein, 180 aa, Artificial Sequence; identical to SEQ ID NO: 11964
  Synthetic

SEQ ID NO: 11966 - protein, 178 aa, Artificial Sequence
  Synthetic
DSVERVKEESERTNREIAKLSKKVEDETRKVLKDLEDISRDTERRSREVLERARRDKDKDLLEKLLRDLTETHKEVIKTLEKLLEEVKRIHDRTVEEARRLLEESERIVRKVIKETGEEAELVRELEEVVRENEERVRRLIERNKKLVDDARKRVEELVRRNDKIVKEIEKVVRDIKT

SEQ ID NO: 11967 - protein, 178 aa, Artificial Sequence; identical to SEQ ID NO: 11966
  Synthetic

SEQ ID NO: 11968 - protein, 178 aa, Artificial Sequence
  Synthetic
KSDEEVEKLIREVLKRIEELSREAEKLTDEVRKLLKEISDRVEERSRDVLDKIRRTNDEEVIRRLITELEKEHEEVMRELDRLLKELEDIHRRTIELAKRLLKKVEEIVEKVIREEGEEAELVRKLEKLLEDAERRVRELVKRNKEVVERVKRTVDELKARNKKIVEEIKKVMEEITR

SEQ ID NO: 11969 - protein, 178 aa, Artificial Sequence; identical to SEQ ID NO: 11968
  Synthetic

SEQ ID NO: 11970 - protein, 178 aa, Artificial Sequence
  Synthetic
RELEEVEKKVRTVLEEVRRISEKAEELSRRVLEEARKISEDNEREVRRVVEDVRRENDRELLKKLLEEVRRSSEEVIKRLEDLLRKLEEEHKRVIDKLKDLLRRVREIVEEVIRRTGEEADLVERLKELVKKVEDEVRRLVKRNKDIVDDIRRRVEELVRRNKRITDEVRKEADKLRR

SEQ ID NO: 11971 - protein, 178 aa, Artificial Sequence; identical to SEQ ID NO: 11970
  Synthetic

SEQ ID NO: 11972 - protein, 188 aa, Artificial Sequence
  Synthetic
SELEKVKKEIRELLEEVRKISKESEDRSRKSNDELHKSSEEVEKRIRDLLRELEKIVRELKDGDRETVVRVLDRVVEEVRRIVEEDKRRIEEVLKRDKKLVEESVRLIEKVVRDIEEIVKELERRLREKKDVVKELREVLERAEREARKLIKRNDEILKESEKNARDLIRRTEELLRRAKKRVDELKK

SEQ ID NO: 11973 - protein, 188 aa, Artificial Sequence; identical to SEQ ID NO: 11972
  Synthetic

SEQ ID NO: 11974 - protein, 188 aa, Artificial Sequence
  Synthetic
SDVEEVKKEIARLLEELKRTTDKVKEDSDRSNEEVHRSSEKVKKDIEKLLDELRKVVEELKDGSREEVERLLEEVVRRVKKIVDEDKKKLDDVAKRDEDIVRKDVEELKRVVEEVRRIIAEVKRRLKDLREVVKELEDVLKRAEEVVERLEEKTRRILEESRKNIERLKRETEEMLKRAEDEVKKLKD

SEQ ID NO: 11975 - protein, 188 aa, Artificial Sequence; identical to SEQ ID NO: 11974
  Synthetic

SEQ ID NO: 11976 - protein, 188 aa, Artificial Sequence
  Synthetic
SLVDRVRELIERLLRRLEEIVREVEERLRRSNERLHESSADVERLIRELLERLRDIVRKLEKGDREKVKKVLKEVVEEVRDIVRRDRELLDKVVEENADIIRRVVEELRRVVEEVEKIVRDVKTKLRKDEDVVRELEELLRRAKERVDELKKRLEELLKESREDVERLKKKTDEALKRAEEEVEKLRK

SEQ ID NO: 11977 - protein, 188 aa, Artificial Sequence; identical to SEQ ID NO: 11976
  Synthetic

SEQ ID NO: 11978 - protein, 188 aa, Artificial Sequence
  Synthetic
RDLEEVKKRIDELLKRVRETTKRVEDELRRSNKELHESSRRVEEEIKKLLEELEDVFRKVKDGDRERVKELADRIVEEVKKIVDEDVERLERVVDENRKIVDTDRRDLDRVVEEVTRIVEELKRRLKDKEELVRTLEDMLRRAREEIEKLKEKTRKLLEDSERDVKRLIERTTEVLKRARERVEELKK

SEQ ID NO: 11979 - protein, 188 aa, Artificial Sequence; identical to SEQ ID NO: 11978
  Synthetic

SEQ ID NO: 11980 - protein, 188 aa, Artificial Sequence
  Synthetic
SELEEVKKRIDDLLKRLRDIVDTVRKELRKSDKELHDSSKRVEEEIKKLLEELRRIVETLKKGDREKVTRMLREVVRRVREIVKRDVEELKRVVERNAKIIEDVERELKEAVDRVREIVKELERRLKDLREVVETLRRVLKRAEDDVRRLLEELRELLERSKRNVERLIERTKELLKRAEDEVKKLED

SEQ ID NO: 11981 - protein, 188 aa, Artificial Sequence; identical to SEQ ID NO: 11980
  Synthetic

SEQ ID NO: 11982 - protein, 188 aa, Artificial Sequence
  Synthetic
SLLEKVEEEVRRLLKRLRDIVEEVRRLLEESNERAHRSSKKVKEDIDELLKELEDVVRRVKKGDEEAVRRLLDEVVKTVEEIVRRDVELLREIVEENERIIRKVEEELKRVVEEVRRIVDDVRRKLKDNKDLVKTLEDILERAEREVKKLEDRLRKLLEDSKRNAEELIKRTEDVLEEALRRVEELKK

SEQ ID NO: 11983 - protein, 188 aa, Artificial Sequence; identical to SEQ ID NO: 11982
  Synthetic

SEQ ID NO: 11984 - protein, 178 aa, Artificial Sequence
  Synthetic
SEAERVREILKDAEKKIRDILRRLREINRESARRIEDIKRKLDEILKRNEDDVRRLEKDGADKEILKRALERAEKSVRELRDILKKVLDESSRLVKELEKILRDLLDEVRRLVEEVEKRGDGVEDAERTVRELIKRVEEALERAERASRELIKTVEKVLEEVERRNRKSNEELKEATR

SEQ ID NO: 11985 - protein, 178 aa, Artificial Sequence; identical to SEQ ID NO: 11984
  Synthetic

SEQ ID NO: 11986 - protein, 187 aa, Artificial Sequence
  Synthetic
SLEEEAKELVKRVRDELRKIERTIEKIVEDSRRRLEENRKRNKELIERVEKELRELKKRVTDERIKKVVRDVLEKARKLLEESEEMVRRVERISERTLRTVREVVKEVEKIVEKLLEDVKRKSSDERARDILREAKKMLEKVLRDLRRVLEELRKENEKVLRELEEISKETEDRLREVLRELRERTR

SEQ ID NO: 11987 - protein, 187 aa, Artificial Sequence; identical to SEQ ID NO: 11986
  Synthetic

SEQ ID NO: 11988 - protein, 175 aa, Artificial Sequence
  Synthetic
SVEDEVREVAKKIRRILEKLKRELDRHSKKIEDILEEIRDKNEKAKEEIEEVLRRRLDEEIKREVKRLEERLDEVSDKTRRAVEELIRNNERVVREVERVVRELIEILKEVLRKGGKEDVERVKRELEKVLRELAEEVRESLERVSEVAERLKRENDEVNDRLKKMLEDLLRKAT

SEQ ID NO: 11989 - protein, 175 aa, Artificial Sequence; identical to SEQ ID NO: 11988
  Synthetic

SEQ ID NO: 11990 - protein, 175 aa, Artificial Sequence
  Synthetic
DEVEEVIRRVEESNKRVNEENDRVVRESKEIVRKVEEDNRRAIKESEEMLDRVAKDRDRDKLRDVLRRLKELHRRTIETTKEMADRIRKLHEETIRRTREVLERNRRLAEDVLRRVPNVEEDLRRVVDKSRKNVEEVERKNRDVLRRIDKRAKELEDRNREVLKKIEKTIRDLEK

SEQ ID NO: 11991 - protein, 175 aa, Artificial Sequence; identical to SEQ ID NO: 11990
  Synthetic

SEQ ID NO: 11992 - protein, 175 aa, Artificial Sequence
  Synthetic
SEVDEVIRRVEKSNKDVNDENKRVIDRSKELNREVNERNKEAIKRSRDLADEVRRDRDRKKAEEMVRRIEELHRETIKRTKEVNEEIERLHRETIKRTREVLDENRRLAERVVREVPNVEERLREVVKRSEDNVRKVEEDNRRVLEESTRNVKEVKERNEKVLEEIRKTLEDLER

SEQ ID NO: 11993 - protein, 175 aa, Artificial Sequence; identical to SEQ ID NO: 11992
  Synthetic

SEQ ID NO: 11994 - protein, 175 aa, Artificial Sequence
  Synthetic
SEVDKVRKELEDMAREIEKRAEDVIREIKRSNEEVNRTNEKVIRDSERMLEKAERDRDREKLRRIVRTLEKLHEDTIEFTKKVLERNKELIKKIAEELRRVLKELTERIKDVLRRVPNVEERLDRVREKLERIVREIEDRLRKVLEDSRRNVEEVRRRNEEAVKKIRRILEELER

SEQ ID NO: 11995 - protein, 175 aa, Artificial Sequence; identical to SEQ ID NO: 11994
  Synthetic

SEQ ID NO: 11996 - protein, 175 aa, Artificial Sequence
  Synthetic
DEVDDVIRDVDRTNEEVERENRRVIEEVRKSNEEVNKKNADAEKRSREMAERAAEDRDRRKIEEILERLKDLHKRTIETTREVLKRNEDLMRRTIEDTRRVLRENEEKLRDVLRRVPNVKEKLDRVLERSKKTVEELEKRNREALDRSRRNVEEVEKRNREVVKEIAERVRRLKK

SEQ ID NO: 11997 - protein, 175 aa, Artificial Sequence; identical to SEQ ID NO: 11996
  Synthetic

SEQ ID NO: 11998 - protein, 175 aa, Artificial Sequence
  Synthetic
SEVDKVVEDVKRMLKEVEDRNEKVIRDVEKMLREVEEKNKRVIEDSERVAKEAADDRDREKVRRLLERIRELHERTIKETRDVARELAKLLEDTIRFTRKVLRELEELLRDVLRRVPNVKEKLDKVLEEIREIVKRLEDRNREALRRIKEIVDRLEKRNRKVVEDVERIVREIER

SEQ ID NO: 11999 - protein, 175 aa, Artificial Sequence; identical to SEQ ID NO: 11998
  Synthetic

SEQ ID NO: 12000 - protein, 175 aa, Artificial Sequence
  Synthetic
SEVDEVIKRIEETNRRVEEMNKDAIRRVKESNKRVEERNKEVIERSKKLIDDVRRDRDRKKLREVLERIKDLHRRTIEDTRRVLKDNDELVRRTIEKTRRALERNKELIDRVLKRVPNVEERLRKVLKDSERTVKELEKRNRRVLEESDKEVKRLEKENRDVVDEIRERAKEIER

SEQ ID NO: 12001 - protein, 175 aa, Artificial Sequence; identical to SEQ ID NO: 12000
  Synthetic

SEQ ID NO: 12002 - protein, 175 aa, Artificial Sequence
  Synthetic
SEVDKVITELEKMLRRVKEENKRVIDESRRALEEVEKRNREVIERSDEMARRAAEDNDRRKIREILKTLKRLHEEAVEDTRRVLERLRRLHEKTVRDTKTVLDRLRELIEDVLRRVPNVEERLREVLERIARRVRELEERNKKVVKEIEERVRELERRNREVVKKIEEKVKRLET

SEQ ID NO: 12003 - protein, 175 aa, Artificial Sequence; identical to SEQ ID NO: 12002
  Synthetic

SEQ ID NO: 12004 - protein, 175 aa, Artificial Sequence
  Synthetic
DEVRKVIKELRDELRRVEELNKEVIDRSRKLVEDIARESKEVIERSRKLLDDVRKDRDREKLERVLDEIRRLHEDVLRKIREVVRTIEELHRDAVRKSKEVLKRLEELIRDVLRRVPNVREDLERALKEIEETIRRLEKRNRDVLKEIEDEARRLEEENRKVLKEARKIVEDIKT

SEQ ID NO: 12005 - protein, 175 aa, Artificial Sequence; identical to SEQ ID NO: 12004
  Synthetic

SEQ ID NO: 12006 - protein, 175 aa, Artificial Sequence
  Synthetic
SEVDDVTRKLERILEELTETSERVVRTSRRVAEELEKRSKEAVERSRKLAEEVARDRDREKLRRVLKEIEKLHRDTVKDLRDALKKIEDDHRRVVEKLKKALEELERLIRRVLREVPNVREKLERVLEEIRRRIEELSEKNRKVVKDIREIVRKLTERDEKVVREIKKIVDDIET

SEQ ID NO: 12007 - protein, 175 aa, Artificial Sequence; identical to SEQ ID NO: 12006
  Synthetic

SEQ ID NO: 12008 - protein, 175 aa, Artificial Sequence
  Synthetic
SEVDEVTREVEELIREVEKLSEDVIRTSKELAKRAEKLSREVIKRSEELIDEVRRDRDRRKLDEVVKRIEDLHRRVLEELERIVREIEKLHRETVKRLREVLERVRRLLEEVLERVPNVKKKLEDVLREIAKKVREIEERDRKVVEEIREILKRLEDENREVLKKIRRIAEEIRR

SEQ ID NO: 12009 - protein, 175 aa, Artificial Sequence; identical to SEQ ID NO: 12008
  Synthetic

SEQ ID NO: 12010 - protein, 175 aa, Artificial Sequence
  Synthetic
DEVRKVIKELEDRLREVEKKSKDAIDTSREMLKRVDDENKDVKRRAEEILKRVDEDRDRKKLRDVLRELERLVRETIKSSKEVLDRLRKLHEDTVRDLRRILKELKELIDDVLRRVPNVEEELRKLLEDIREKVERIVKRDEDVVREIEEEARRLADENRKVLEEIERIIRELER

SEQ ID NO: 12011 - protein, 175 aa, Artificial Sequence; identical to SEQ ID NO: 12010
  Synthetic

SEQ ID NO: 12012 - protein, 178 aa, Artificial Sequence
  Synthetic
REVDEVTRRIKELNDELERRVRRAKERIEELNKRVNREDEEIVDRVRKLNDELAKDNKRELVDEVLKETEKLIRRSEESVRRVLEETEKLIETLRREVEKVLRETERLIKEVVERRKDDEDVKRKLKEVVDESRRTVDEIRRELERVVEKSRKNIEEVKKHTREVLKRSEETARELKK

SEQ ID NO: 12013 - protein, 178 aa, Artificial Sequence; identical to SEQ ID NO: 12012
  Synthetic

SEQ ID NO: 12014 - protein, 178 aa, Artificial Sequence
  Synthetic
SEVDRVLEEIRKLNEDLNRRVDDATRKIRDLNRKLNEDVKKVTEDIKKLNEDLRKDNKKELVREVLKRTRDLIRELEKIVTDVLRTTEEVIKRLEREVEKVLRDTRELARDLLRKRKDDEEVKRKLEKLVRESERNVREVKKKLDEVRKESKTNADKVREELKRVVEESERTVRELEK

SEQ ID NO: 12015 - protein, 178 aa, Artificial Sequence; identical to SEQ ID NO: 12014
  Synthetic

SEQ ID NO: 12016 - protein, 178 aa, Artificial Sequence
  Synthetic
SEVDEVEKDIERLLEELRERVKRVTDEIRKLNKELNETDTDIVRKIRELLERLERDNKRELVREVLKRVKELADDSKRRVDKVLKDTERLIRELEKIVDEVEERVRRLVAEVLKRRKDDEEVKRRLEEVLRKVKRELDRIRDELRRVVEESETNVRDVRRHTEEVVKEVEDEVRRLEK

SEQ ID NO: 12017 - protein, 178 aa, Artificial Sequence; identical to SEQ ID NO: 12016
  Synthetic

SEQ ID NO: 12018 - protein, 178 aa, Artificial Sequence
  Synthetic
SEVEELERRIRELLRRVKRIDEEIVRRIRELNKELNRRDERIVETVRELVERVARDNKRELLDEVLKDVRRLAEESKRIVDEVLKDTERLARESKEILERVLKEVKELIEELLRRRKDLEEVKKRLEDVLRRVREEIERLKKHTDDVLRESEKNAEDVKKHTDDVVREIEERIRELKK

SEQ ID NO: 12019 - protein, 178 aa, Artificial Sequence; identical to SEQ ID NO: 12018
  Synthetic

SEQ ID NO: 12020 - protein, 178 aa, Artificial Sequence
  Synthetic
SEVEEVIKEIEKLNEDVNRIDKEIVKRIRDLNREVNERDKEIVKEIKRLVEEVRKDNKRELVDEALERVKKLAEDSKRIADDVLRRTEKLLRESKKILEDVNRTVRRLLEDLMRKRKDLEEVKDRLRKVLESSSDNVRRVTEHTDKVLEESRKNIEDVKKHTDEVVKEIEKEVRELKK

SEQ ID NO: 12021 - protein, 178 aa, Artificial Sequence; identical to SEQ ID NO: 12020
  Synthetic

SEQ ID NO: 12022 - protein, 178 aa, Artificial Sequence
  Synthetic
DEVKEVIRRAEKLNEKINDILRRVEEEIRRTLDEVRRRDEKIVKEIRDLMRELSEDNKRELVKKVLEEVERLARKSVEIIREVNKRNEDLIREVKRIADEVLKRTRDLVKDVRDKRKDDEEVKRELEEVVKESEKNIREVTDRLRKVLEESTKIVEELEEHTKRVVDEIRKRADELRR

SEQ ID NO: 12023 - protein, 178 aa, Artificial Sequence; identical to SEQ ID NO: 12022
  Synthetic

SEQ ID NO: 12024 - protein, 184 aa, Artificial Sequence
  Synthetic
SLEEEIDRVLDEIRRIIEEIKKHTTEVLEESKRNIEEVKKHTDEVNEKSRRDIEKIKREVRDKERVVELLDRVVKTSEDLARESKRILDEVLDTSRRLVEDSRRILDDVLRRVRELAEELKRVKDKEKVRKVIEEIKKIAEDVARRDKEMVDRSREINKKVNEEDKKIVEDSKRIIEDVKRKTD

SEQ ID NO: 12025 - protein, 184 aa, Artificial Sequence; identical to SEQ ID NO: 12024
  Synthetic

SEQ ID NO: 12026 - protein, 184 aa, Artificial Sequence
  Synthetic
SLEKEIKDALDRIKKDIEDSARRTKEVNDKSKEIIDRLKKHTDDVNDESRRRIKEIKDEVRDKKRVTELLEEVKERSKRLAEESKKILDEVVKKSRELAKRSKEILDEVLKRVAELAEELKRVSDKRLVKEVIDRLDEIVEDVKRRDEEIIRTSEKLLRDVARLDEEIAKRSRDLLRDVERKVK

SEQ ID NO: 12027 - protein, 184 aa, Artificial Sequence; identical to SEQ ID NO: 12026
  Synthetic

SEQ ID NO: 12028 - protein, 184 aa, Artificial Sequence
  Synthetic
SLEERLKKVLKEVDERIREIKKHTDKVNEESRDKIRKLKEELDRVNRESEEEARKIKSEVRDKERVVRTLKKAVEDSKKLIDDVKRILDEVVKRSEELVERSKRILDEVKRDVRRLIEELRRIEKDKDVRDVEEEIRKLLDEVRKLDEEMVERSKKLARTVERLVKEVIRESKEIIRKVKEETD

SEQ ID NO: 12029 - protein, 184 aa, Artificial Sequence; identical to SEQ ID NO: 12028
  Synthetic

SEQ ID NO: 12030 - protein, 184 aa, Artificial Sequence
  Synthetic
SLEEEIERVLRKVEKEIRKIKERLDEMLKEIRERIERSKRRTDKVNEDSRRRIEEIKRRVKDKKEVLERLDEVVRKSEELARRSKEILDRVLETVERLIRRVKEILDRVLDEVRKLAEELKRVDSKEDVKKVKKDIDKLLKEVREEVKEAEDRIRRIAEEVDKEDKRMIETSRRIIRKVDEDVR

SEQ ID NO: 12031 - protein, 184 aa, Artificial Sequence; identical to SEQ ID NO: 12030
  Synthetic

SEQ ID NO: 12032 - protein, 184 aa, Artificial Sequence
  Synthetic
RIEDKLRKVLEEVERIIREIRKRLEDANDDSRREIEESKEDTDRVLEEIRRRIEEIKREVRELEEVVRELDEVEKTVTKLAEDSKKRLDKVVEDSKDLVRRVEEILKEVLERVKKLIEEVKRISMDEDVERVLRKIKELLRRVEEEVERVIRESKKLLDEVRKEDEEIKKTLRDIVREVARKVK

SEQ ID NO: 12033 - protein, 184 aa, Artificial Sequence; identical to SEQ ID NO: 12032
  Synthetic

SEQ ID NO: 12034 - protein, 179 aa, Artificial Sequence
  Synthetic
SLEETVEKALKDSKDNIKRLKERVDRVLEESRRTIEELRDRARRVREEVKKRLDELRRRGLDEDELKKVEDRVDKVVRDVEKILEELIRRSEEVVREIRKLLKDVEEFSKEVVSRLRRVDKDAVKKLIDDVRKINKELNDTVEKLARDVEEINKEVARRVEKLVRELEKIDEDVTRREK

SEQ ID NO: 12035 - protein, 179 aa, Artificial Sequence; identical to SEQ ID NO: 12034
  Synthetic

SEQ ID NO: 12036 - protein, 179 aa, Artificial Sequence
  Synthetic
SLEEKVREVLKRSEDNIRKLEDESRKVLEDSERNLRKLKKEVDDAADRVRRKIKELRERGLDERELRKVERRVEDVVRRARELLDRVRKVSKEVHDRNKKLLDDLRRTSKEVADRLRRVDARIVDKLIREVEKINRDVNEKVRTSIEDLKRINEELNERVERLIREVERILKEVEDRAR

SEQ ID NO: 12037 - protein, 179 aa, Artificial Sequence; identical to SEQ ID NO: 12036
  Synthetic

SEQ ID NO: 12038 - protein, 179 aa, Artificial Sequence
  Synthetic
SLDERVERALEKSEENLRRLKKRSEEVLEEVKEAIKELKRRSREALEDVRRVLDELRKDGLDERVLEKLREDVERVHKRNEEILEEVERRVRRVHEDNKRLLDEVRDDSDKVVKRLRRVDAKVVEELIKRVEEINTRLNEKVKKSIDDVRRIIEEVRRRVEKTIRDVERIKEEVERRRR

SEQ ID NO: 12039 - protein, 179 aa, Artificial Sequence; identical to SEQ ID NO: 12038
  Synthetic

SEQ ID NO: 12040 - protein, 179 aa, Artificial Sequence
  Synthetic
RLEDEVRKMEKEVREEVKRLEDESRKVLEESRRNLDKLREESKRVLDTVRERIKDLRRRGLDERVLRELLKRVREVHERNRKLLDEVRRASEKVHEDNRRILEEVRKTVKDVVDKLRRVDAKVVKELIDRVRKILEDVEREVKKSIEEVKEINRRLNEEVKKTIEEVKEIVKEVTERAK

SEQ ID NO: 12041 - protein, 179 aa, Artificial Sequence; identical to SEQ ID NO: 12040
  Synthetic

SEQ ID NO: 12042 - protein, 179 aa, Artificial Sequence
  Synthetic
SLEDEVRDMDRKVDEALKRLRDESKKVHDDNKREIDKLRKESEDVHRENKETLDRLRERGLDERLLEEVRRRSEDLHRRNEKILREVIKVSKEIHDRNKELLDRLKERVRDVKSKLRRVDKDAVRELKRDVERIIKEVDELVKRSIEESRRITEEVARRVKETIDRSRKITKELRDRAD

SEQ ID NO: 12043 - protein, 179 aa, Artificial Sequence; identical to SEQ ID NO: 12042
  Synthetic

SEQ ID NO: 12044 - protein, 185 aa, Artificial Sequence
  Synthetic
SEIEELEERLERSTRDVEKKVRDTIRESERSTEEVARRVDESIKRLERVVEEVEERVRRIKDREEIKRLLDELRREAEEVHKTNKRLVEENNRVSEEVHRDNERLVDENDRVLEKALDDVRKRITDEEIRKRVEDVAKKVKEDTDKLRDDSRKVHERNEEESRRLEEKSERVLRRVEEILKEIER

SEQ ID NO: 12045 - protein, 185 aa, Artificial Sequence; identical to SEQ ID NO: 12044
  Synthetic

SEQ ID NO: 12046 - protein, 185 aa, Artificial Sequence
  Synthetic
SEVDRLITELRRSTKRVEEEVRRLIEDSKRSTREVAERVKESIRRVEKVVEEVKRRVDRIKDEEKIRELLRRLEEILKRAHDENEKLLEENDRVSDEVLERIEKLLKENEEVVRRVLKEVEDRITDEDIRRKIEEVVKEVKEETDRLREEAEKVVRENRKASEKLRRESEEVVERVKKKVDDTET

SEQ ID NO: 12047 - protein, 185 aa, Artificial Sequence; identical to SEQ ID NO: 12046
  Synthetic

SEQ ID NO: 12048 - protein, 185 aa, Artificial Sequence
  Synthetic
REVEEIIKELRKSTTDVAETVERLIKRSRESTKEVADRVKRLIDEVRRVVEDVERKVRRIKDREKIEKLLRELRKILREVLEEVEKLLRENEKVSRTVLKEIRRLLRENEKVVKEALDEVRKRVEDERIEKEIEDVVREMEERTKRLEKRAEEVNEENKRRSDELRKRIKKAVDEVEKRLDEIRN

SEQ ID NO: 12049 - protein, 185 aa, Artificial Sequence; identical to SEQ ID NO: 12048
  Synthetic

SEQ ID NO: 12050 - protein, 185 aa, Artificial Sequence
  Synthetic
SEVEDLIKKLEESTEEVDRRVKKLIEDSRRSTEDVDRKVKELIKDVRRVIREVEERVARIKDREKIEKLIRDLEEILRRALTEVERLLRENNRISEKVLEDVERLLRENERVVEEVLRRVEKLIKDDRIRETVERVFRKVERKTRELREEIREVDERNRRDSKRLRDEVERVARELEKKLKEIDE

SEQ ID NO: 12051 - protein, 185 aa, Artificial Sequence; identical to SEQ ID NO: 12050
  Synthetic

SEQ ID NO: 12052 - protein, 185 aa, Artificial Sequence
  Synthetic
EEVERLIRELEESTDRVAREVERLIRESRKSTEDVRRKVDKLLREVREAIKEVEERVRRTDDEREIEKLLKDLRKILEDVRREVKRLVEENNKVSEDVLREVERLLRENRRVVEEVLKRVAERVEDEEIKRKIDKVVEEVRRRTEELRERIERVNEENKEASERLERKLREMAKELDKKLKDIRR

SEQ ID NO: 12053 - protein, 185 aa, Artificial Sequence; identical to SEQ ID NO: 12052
  Synthetic

SEQ ID NO: 12054 - protein, 185 aa, Artificial Sequence
  Synthetic
KDVDELITRLEESTKRVAEEVKRLIEESRRSTERVAREVRRSIEEVKRVIREVEEKVRRIRERERIEELIRRLRKELKKVHDRNKKLLDENNKVSEDVLREIRKLLRENDEVVKEVLDRVRKRITDKDIERKIREVVEKVERDTRRLEEEAKKVNEENEKASRDLEKESKDAADTLEKKLRDIER

SEQ ID NO: 12055 - protein, 185 aa, Artificial Sequence; identical to SEQ ID NO: 12054
  Synthetic

SEQ ID NO: 12056 - protein, 185 aa, Artificial Sequence
  Synthetic
DEVEDLIRRLEESTKDVAKKVDDTIDESRKSTKDVAEAVKRSIDEVRRVVREVEERVRRIEDRKTIEELLDRLRKILEDAHRTNKRLVEENNKVSREVHETNKRLVTENEKVVRTVLREVEKKITDDRIRDEIRKVVERAKERTKELEDKSKEVNDRNRETSERLKKESEDVVREVKKELDRIRK

SEQ ID NO: 12057 - protein, 185 aa, Artificial Sequence; identical to SEQ ID NO: 12056
  Synthetic

SEQ ID NO: 12058 - protein, 185 aa, Artificial Sequence
  Synthetic
SEIDKVETEVKKLDKELEELVKRSSEKTEKLDRELEKLLRDVVREVEKLLKEIEDLVRRRKESEEVVRTAKELAERLIERLEDVLRRMKKLSEDLEDHNRRVAERIRRLSKELIDILREVLKRLDKKELAERIKKVARESEETVRRLEERLERDSERSRETLRRLAEAVRRVIEKVKEILERLRT

SEQ ID NO: 12059 - protein, 185 aa, Artificial Sequence; identical to SEQ ID NO: 12058
  Synthetic

SEQ ID NO: 12060 - protein, 179 aa, Artificial Sequence
  Synthetic
DKMEEVRRTVEKLLEDLNRLSEEVIRTSEKLLEELRRLSEEVERDTERLLKELEKMKRDGESEEKVERVLEEIERLHRETVERIRKVLKDIERLHRRVVTEAKKVVDELRKLAEEVRREGKASDEDIKRVLDEVKKILDDNREKNKRALDRVREEVKRLEDRNREVVRKVRKIVEDLRR

SEQ ID NO: 12061 - protein, 179 aa, Artificial Sequence; identical to SEQ ID NO: 12060
  Synthetic

SEQ ID NO: 12062 - protein, 183 aa, Artificial Sequence
  Synthetic
RVDERLDTVLKRVEETVRENKKKNDELLERSKENIDRLKKRLDDLLDKVRREAEKLKREVTKEEVKKIIDEVLKEIEDLLRTVKEELDRALERNREVVEETKRRIDRVLKEIEKLIRDVKRDRKEEVVKEVEERIKKLLKEVNDTSKDAERRLRETNERLNEIVKEVEKRIRELSEEVRKRVK

SEQ ID NO: 12063 - protein, 183 aa, Artificial Sequence; identical to SEQ ID NO: 12062
  Synthetic

SEQ ID NO: 12064 - protein, 183 aa, Artificial Sequence
  Synthetic
SVDERLDEVLERVKEDMDRNRRKNDESLREDEENVRRNKKETDESVKRVEERVRELKKRVKDERVKEFLDRVLEEIRKSAEEVKTIIDEVHKESEETVRRTKKIIEEVLRRIEELIRRVKKDRKEEVVKTVEEDIKRLLKEVNKVSDEAHKRNKELNERVNRVNKEAHKRNEDLLREAERKVR

SEQ ID NO: 12065 - protein, 183 aa, Artificial Sequence; identical to SEQ ID NO: 12064
  Synthetic

SEQ ID NO: 12066 - protein, 183 aa, Artificial Sequence
  Synthetic
DVKERLDKVLEEVKRDIERNKRRNDKLLKESKRIVEENKKKNEKSLEEVKRKADDLRTKVKDEEVKKIIKKVLDEIRESVERTKELADRILEENERLVRETKKILDEVLKEIRKLIEDVKKDRKKEVVEKVEREIERLREEVNRVSKKAEEDVERTNRELNRVSDEAHKTNERLLEKVERDVK

SEQ ID NO: 12067 - protein, 183 aa, Artificial Sequence; identical to SEQ ID NO: 12066
  Synthetic

SEQ ID NO: 12068 - protein, 169 aa, Artificial Sequence
  Synthetic
SSEDKARELVRTLEEALRELEREMRKVVEDSKKTLKELEERNRRLEEELEKVLERVRDEDAKRLVRKVLKESKEVLERSRELSKRADDELKRVLEEIKKRVEEVLKKVRDKPGDDRVIEELKELLERLRERVERVIKKVKDLNEELRRRNDKVAKDLKRLLKELEDRTR

SEQ ID NO: 12069 - protein, 169 aa, Artificial Sequence; identical to SEQ ID NO: 12068
  Synthetic

SEQ ID NO: 12070 - protein, 183 aa, Artificial Sequence
  Synthetic
SIEDEIRKVLTRLRRVLEEIKRSSKEVADELKRVLEEIKRSSEENNKEVEEVLKEIEKLPTDEELVRRVRKVAKEVKDHNERSTREVKKLVERLERILERSSREVEKTVRELEKELEKVLRDGGDREVREVIERLERMLEELERHNRDVERDLRRVLEEAKRHNEESLRRSKELLKKVRDEIE

SEQ ID NO: 12071 - protein, 183 aa, Artificial Sequence; identical to SEQ ID NO: 12070
  Synthetic

SEQ ID NO: 12072 - protein, 183 aa, Artificial Sequence
  Synthetic
SIEDEIRKLKEDIKRVLDKVRRDNERLKERLDKVLEDIRRSSEDNNRKLEEVLKRIRDKPVDERLVRKVEEAVKRLKEHNEDSTRRVEEVIRRLKEESEESVRKTEKVARDLERELDEVLTRGGEERVREVIEKLKETLERLKREDKEVADRAEKLLREAEEHNKRSLDESRRVLEELDEEIR

SEQ ID NO: 12073 - protein, 183 aa, Artificial Sequence; identical to SEQ ID NO: 12072
  Synthetic

SEQ ID NO: 12074 - protein, 183 aa, Artificial Sequence
  Synthetic
SIEDRVRRVLEELEEVLERIKDSSRRVVEEAEDVLRKLEEENRKLERDLERVLKEIEEEPVDETLVKEVRDLVERLKEISDESVKRSARLVEELKRRLEESSERVDRMAKELKRRLEEVLRRGGERELEEVEKRLREVLRRLEKHNEDVIRDLRRLLEEAADEDRRVIKTLRDVLRELKKRIK

SEQ ID NO: 12075 - protein, 183 aa, Artificial Sequence; identical to SEQ ID NO: 12074
  Synthetic

SEQ ID NO: 12076 - protein, 183 aa, Artificial Sequence
  Synthetic
KIEEKIRRLEEDLDRVLDEIRRNSERVTKEAEEVLERLKRENEKLKKRLEEVLEEIRRRPVDERLVEEVERAVRELKKKSDESVDRSARLVEELKKRLEESSRTVETLVRKLKEDLERVLREGGERRVDKVIEDLKRVLDEARRHNEDVVRKLKEALDKLREDDDRVRRDLEKKLRDLERRIE

SEQ ID NO: 12077 - protein, 183 aa, Artificial Sequence; identical to SEQ ID NO: 12076
  Synthetic

SEQ ID NO: 12078 - protein, 183 aa, Artificial Sequence
  Synthetic
SIREKIRELEERLEEVLRRIEENSERVLREAERVLKEIKDNSKRNNEKLERALEEIRKLPVEDELVRRVKELVERLKRHNKKSSEDVERVVRELKEELKRSSEEVKKAVDRLKEELEKVLRDGGEREVDRVIRKLEDVLRKLEEHNRRVVERLKRLLEELKKHNEDSLRKSEEVLRKLEEDAR

SEQ ID NO: 12079 - protein, 183 aa, Artificial Sequence; identical to SEQ ID NO: 12078
  Synthetic

SEQ ID NO: 12080 - protein, 183 aa, Artificial Sequence
  Synthetic
SIEERVRELMRDLERVLKEIREHSKRVIEEAKRVLEEIERNSERNNKELEEVLDEIRKRPVDETLVREVEEAVKKLKEHNKRSSDTVRDAVRKLVERLKESSDRATELVKDLKRKLEEVLRRGGEKELEEVERRLRKVLEDLRRNNKEVVDRLKEVLERLKEHNRRSLDESRKVLRELKERIR

SEQ ID NO: 12081 - protein, 183 aa, Artificial Sequence; identical to SEQ ID NO: 12080
  Synthetic

SEQ ID NO: 12082 - protein, 183 aa, Artificial Sequence
  Synthetic
SIEDRIRELEKRLEKVLREIEEHSKKVVREAEKVLREIEENSRRNNKRLEEVLDEIRKRPVDETLVREVEEAVRRLKKHNKDSSDTARKLVEELKKELKESSDRVRKVVEELKDRLRKVLEKGGEEDVRKVIRDLEDALRRLKEDNEDVVRRLKEVLKELRKHNKRSLDESEKVLRELRERIR

SEQ ID NO: 12083 - protein, 183 aa, Artificial Sequence; identical to SEQ ID NO: 12082
  Synthetic

SEQ ID NO: 12084 - protein, 183 aa, Artificial Sequence
  Synthetic
SIEDEVRKLAKDLDDVLREIEENSKRVLEKLDEMLERIREHSERVVERAKRVLDEIRKQPIDESLVRRVETVVRELKKRLRESTERVRTEVEKLKRLLEESSKEVKRVVEELKEELKDVLRRGGERELRTVIRKLKEVLDRLREHNKRVVEELEEALKELEKDNRKVVEDLERMLEELKREVN

SEQ ID NO: 12085 - protein, 183 aa, Artificial Sequence; identical to SEQ ID NO: 12084
  Synthetic

SEQ ID NO: 12086 - protein, 183 aa, Artificial Sequence
  Synthetic
SIEEEIEKVKKRLEDVLREIKKHSEEVKKKAEDVLRKIEKHSRDNNRKAEEVLKDIARLPVDERDLKRVAEVVDRLKKHNKKSTDDARKLVKELLERLDRSSETAERVVRRLKEKLDKVLKDGGEEEVRKVIEELEELLERLRRNNEEVVRDLERVLEELKRDNEKSVEDSERLLTELKREIE

SEQ ID NO: 12087 - protein, 183 aa, Artificial Sequence; identical to SEQ ID NO: 12086
  Synthetic

SEQ ID NO: 12088 - protein, 184 aa, Artificial Sequence
  Synthetic
SVKEELDDLERKVDEDVRRIRRELDEVLKESRENVKRSKDHLDEVLRRVEEAVKRLIRERGETSELAELVREVLKRVKELLRRVVEITKDVLRRSEELIRELKKELDDVRRRIKELVDRVAEDPDKEKVDRAKKEIEDLLREVRKRVEDVAREIKRLNEDVNRINDKVTREIEKLLEDVDRKVK

SEQ ID NO: 12089 - protein, 184 aa, Artificial Sequence; identical to SEQ ID NO: 12088
  Synthetic

SEQ ID NO: 12090 - protein, 184 aa, Artificial Sequence
  Synthetic
SVEDKLRELEKRVRDVHRKNEEDLDRLLRKSHEMHKRNEDELRKVLEEVRDAVRKLLKEKGETSELAEELRRVLEEVERVIREALKISEEVNRRNEELLKRLKEESRRVLEEVKRMLEKVRDKPDDEEVERVIKRIDDLLKEVHKILREVIRRIEKSLEEVHKRVRDLVREIKELLKEVDRKAK

SEQ ID NO: 12091 - protein, 184 aa, Artificial Sequence; identical to SEQ ID NO: 12090
  Synthetic

SEQ ID NO: 12092 - protein, 182 aa, Artificial Sequence
  Synthetic
SLEDKVRELERKSRENIKRNEEELRRAKRESEENIKRNEEELKRNKERSDRMIEKIRRETDDERVKKILKDLARRSEELLRRSKEILEELRELSERIVKESTDILRELLELVKEVAKRLRRVDKDVVERLREALEDANRRVNERNRELIKRLKEANKKVNEENEDLLRESEEILRRVEEEVR

SEQ ID NO: 12093 - protein, 182 aa, Artificial Sequence; identical to SEQ ID NO: 12092
  Synthetic

SEQ ID NO: 12094 - protein, 182 aa, Artificial Sequence
  Synthetic
SIEELVKDAKRRSKENADRNREKLRKVEDDSRRNIEENERRLEENEKRSREVIKELADRTDEERVRELLRRLLELSKRIADESRKILEDLLRRVKEVIRESERIIREVEEVVKEVLTRLSRVSEDVVEKLIRELEEINREVNKRNDDLIRELREINKKVNEENKRLMKESDDILKEVRERVR

SEQ ID NO: 12095 - protein, 182 aa, Artificial Sequence; identical to SEQ ID NO: 12094
  Synthetic

SEQ ID NO: 12096 - protein, 182 aa, Artificial Sequence
  Synthetic
SIEDLVRELKKKVDEVAEDLRRKVREALERSRENIDRLKKHSEENLRRSEEVVDKLRKETREEEVKDILRRVLELSKRIVEESKEILDRVLELSKKVVDDIEEIIRRVEETVKEVLTRLSRVDDKVVKKLIKEVDDILREVTKLVEKLIRELEDINRKVNERNRRLAEESRKILDEVEKRVR

SEQ ID NO: 12097 - protein, 182 aa, Artificial Sequence; identical to SEQ ID NO: 12096
  Synthetic

SEQ ID NO: 12098 - protein, 182 aa, Artificial Sequence
  Synthetic
SLDEKVEELRREVDEAIKDIKEKVKRANEESERNIRELEERVKRNLEKSKKAIEELARRVDDERVEKILREVLKRSKEIVDTIRKILEDVKRFSDKVVEEIDEILRELKRRVEEVLRRLRRVDEKVVEKLRKEVKEVLKEVEDRVRKLIREVERINEEVNRRVKELLEESEKILDDVDKRVK

SEQ ID NO: 12099 - protein, 182 aa, Artificial Sequence; identical to SEQ ID NO: 12098
  Synthetic

SEQ ID NO: 12100 - protein, 188 aa, Artificial Sequence
  Synthetic
EVEERVKELEKEVEEVLKESEDHVRKSEEDLRRALEESRKHIEDLERKLKKVLEELERKVKEEDMKREVRRALEEIDRVIKKVKRDSERLVKRVEKSIEDTRKVVEDANREVKRIVDEVKEVVRRNDKSKDLLKKLEEEIRKIITENRKLNRDLHRENERIIRDVRRENKRLADELEEIIKEVRERLK

SEQ ID NO: 12101 - protein, 188 aa, Artificial Sequence; identical to SEQ ID NO: 12100
  Synthetic

SEQ ID NO: 12102 - protein, 188 aa, Artificial Sequence
  Synthetic
SVEEKVEELEKEVRKALEDSKRHVDESEKRARDLARRSRELVRRWEEEVEKIVRELETRVKEDEMREKVKRIIKRIRDVVKKLRDLSEEVIKELERSVEESRKAVKDLNDRLREVIKEVKKVVRDKRDMEDLLRKLADEIRRILEDNRDLNRRLNEKNKEVLDRLEELNKTLADELRDIIRKLEKELE

SEQ ID NO: 12103 - protein, 188 aa, Artificial Sequence; identical to SEQ ID NO: 12102
  Synthetic

SEQ ID NO: 12104 - protein, 182 aa, Artificial Sequence
  Synthetic
KELEDVVRKIEEDLRRLEESNEKVHRENEEIIRRVDETNKKVMKEIKEMEKKVRDLVRERKEKEEVVREIEKLAREVLEKLDKVNKENEELARESVKELRRVLKENEDRVRELAKELRRVAREKNRGGEVERVIERLEKVVRDSAANVERSIRELERVVEESSKHVEDVKRELKKVVDEIRT

SEQ ID NO: 12105 - protein, 182 aa, Artificial Sequence; identical to SEQ ID NO: 12104
  Synthetic

SEQ ID NO: 12106 - protein, 182 aa, Artificial Sequence
  Synthetic
SDLDRVREEAERVVETVRRSNKEVKKKLDRELKRLRDSNKDVVDKIKRVLEKLRELIKRRKEKEEVVDTVRKLVEEVRRKLDEVLKRNRELIRRLLEELDKVNKRNKELAEEVVRKLEKVARERNVGGEIEEVRDKLRKVVEESSKHAEEVKRDLERVVEESTRNVDRVREDLKRVLDEIET

SEQ ID NO: 12107 - protein, 182 aa, Artificial Sequence; identical to SEQ ID NO: 12106
  Synthetic

SEQ ID NO: 12108 - protein, 182 aa, Artificial Sequence
  Synthetic
SLRERIEELKEELRRVLEELERRHRETEKKLEEVLKELKRRHEELVRRLRKALKEIKDKLKDKDVVRKVEKLAKELEEENKRVVETVAELIERLKDLNRRVVEEVRKLIKEIEDKLEEVKELDEEAIKDVERKVKKLLKELRDLSEKVRKESDDLLRRLRRESERVERETRKLEKELRDEVR

SEQ ID NO: 12109 - protein, 182 aa, Artificial Sequence; identical to SEQ ID NO: 12108
  Synthetic

SEQ ID NO: 12110 - protein, 179 aa, Artificial Sequence
  Synthetic
SKADEVRKKVDDINKRLRETTDRVAEETKKLIEELKKSAEEVKREVDKINKDLRKLAEDGRSEEEVKRLSERTEKLLEENNKRSEEVVRRIRELHERDLTTVRRLSEETKRLLKEVADEGKISEKDVERLTRKSEKVVREIEKKNEELKRELTEVLKDDERRNKELVEDSRRVLEEIRT

SEQ ID NO: 12111 - protein, 179 aa, Artificial Sequence; identical to SEQ ID NO: 12110
  Synthetic

SEQ ID NO: 12112 - protein, 179 aa, Artificial Sequence
  Synthetic
DKARDVARKVEELLERLRELSERVSRTSEDLNRKLKKISEDVSRTSKKLLDELRRAKEKGEDRKRVEEVVRRIDELNKRAVEIVRKLSRDTEKLNEDAVRDVRRVVEEIKKLLEDVARDGKIREEDVRRLKERVKKVMEELERRHERDKEKSRRVVEKLERDHREDLKRVKKVLEEITK

SEQ ID NO: 12113 - protein, 179 aa, Artificial Sequence; identical to SEQ ID NO: 12112
  Synthetic

SEQ ID NO: 12114 - protein, 179 aa, Artificial Sequence
  Synthetic
SKADKVEEEVKELLKRAKALSDRVSEESRRLLKELRDSARRVEEEVKRLEEELRKLKEDGKSEEEVRKVVEEIRELLTRNNKTSEEVVRRIRKLNDDAVKEVTEVVKEIEKLLREVAREGKISEEKVRRVLREVREMLKDLEKKHRDDIKRVTEVLKEDEEKNRDLMRKVDKFLEDIRK

SEQ ID NO: 12115 - protein, 179 aa, Artificial Sequence; identical to SEQ ID NO: 12114
  Synthetic

SEQ ID NO: 12116 - protein, 179 aa, Artificial Sequence
  Synthetic
SKAEEVEELVKKLLAEVKKSLDDVRRTVEKLLREVRKSLREVEETVKRLLKRLKDLKDDGQDERAVRRVVEEIKELLDRNNEDSKRVVKEIRKLLDENDKTSKRVVEEIKRLLDEVRKEGKISEEKVEKLERDVRRALERDTRENKKLEDRVETALREDKKRNDDLREDVKRVLEEIRT

SEQ ID NO: 12117 - protein, 179 aa, Artificial Sequence; identical to SEQ ID NO: 12116
  Synthetic

SEQ ID NO: 12118 - protein, 183 aa, Artificial Sequence
  Synthetic
DELEELIRRIEKLIRDSRKITDDVRKEIEKTIRESREINKEVHERNRKLLEEITEVVKRDGGEAEEVVKIVRDVLRRIKESNEEVLRLTEEVHKTNERLLREVLRVTREVLKEIKKRVERVKDRGAREEDLRRVDDRVRRVVEESEERLRRVYEESRKVVEESRKHLKEDLDRVKRTVEEIER

SEQ ID NO: 12119 - protein, 183 aa, Artificial Sequence; identical to SEQ ID NO: 12118
  Synthetic

SEQ ID NO: 12120 - protein, 183 aa, Artificial Sequence
  Synthetic
SELERVEEEIKKLIRTSREINKEVAKRIEETIKESRDINKEVVDRIRELIERLREVVKRDGGETRRVVEIADEVLKTIRDLLRRVKEITDKLHEDNERLLRRVEEVSKKVLDDIKRLIEDLRRRGVDEKELKRVEDEVRKVVEESKDHLRKVYEKSKKVVEESKEHLDRVLREVEKEIEEIRR

SEQ ID NO: 12121 - protein, 183 aa, Artificial Sequence; identical to SEQ ID NO: 12120
  Synthetic

SEQ ID NO: 12122 - protein, 183 aa, Artificial Sequence
  Synthetic
SELERVEEEIKRLIDESERINRKVVKEIEDTIRTSEEINREAHRRNRELIKRVEDVVRTKGGEDEEVVRIVRKVLEEVKKSNTDVKRVTKTVHDDNRRLLEEVKRVSEEVLKTIKRLVEDLRRKGVDEKELRRVEEEVRKVVRDSERHLDEVYKRSKEAVDRSKKHLDKDVEEIDRVVKEIER

SEQ ID NO: 12123 - protein, 183 aa, Artificial Sequence; identical to SEQ ID NO: 12122
  Synthetic

SEQ ID NO: 12124 - protein, 183 aa, Artificial Sequence
  Synthetic
RELEEVKKEIDRLIREVEEVNKDVVRKIKETIRRSREINKRVVDEIRRLIKELDDVVKTKGGESEEVVRIADEILERIKKLIEEVKEVTRRIHETNKRLLEEVKELTDEVLKTIRELVEDARRRGVDERELRKVLEKVERVVKKSRDHLDRVYEDSERVVRESEKHLDEVLERVREEIERIRK

SEQ ID NO: 12125 - protein, 183 aa, Artificial Sequence; identical to SEQ ID NO: 12124
  Synthetic

SEQ ID NO: 12126 - protein, 183 aa, Artificial Sequence
  Synthetic
RELEEAEKTIEKLIKESRDINEKVARDIDKTIREIREEMKRVEEEIRDLIRRIREVVKRDGGESERVVREVRRILEEIKKLLEELEKRVEEIHERNKRLLDTVLRVSEKVVEDIRRLVEEVRRRGADERKLREVTKRVDKVLEESRRHLEEVYRKSKEVVDEIRKRLREVLKRVREDVERIER

SEQ ID NO: 12127 - protein, 183 aa, Artificial Sequence; identical to SEQ ID NO: 12126
  Synthetic

SEQ ID NO: 12128 - protein, 183 aa, Artificial Sequence
  Synthetic
SELDEVAKRIKELIKESRRINEEVERRIKKTIDEVRKINKEAAKTVDDLIKTIRDVVRRKGGETKEVREIVDEILERIRELVKEVKRFTDEVHERNRELLRRVVEVSEEILRRIEKLLREARERGVDEKKLRDLEEEVRRVVEESKDHLRKVYERSRKVVEESRKHLDEVLTRVDKVVKDIRT

SEQ ID NO: 12129 - protein, 183 aa, Artificial Sequence; identical to SEQ ID NO: 12128
  Synthetic

SEQ ID NO: 12130 - protein, 185 aa, Artificial Sequence
  Synthetic
SELEEAEKKIERLIEEVRKMNKTVHEENERLIEDLRRVVKEAHERNKRLIEELEDVVRKISDKETVTRIVEEVVRRVRKTVEDVRRIVDEVLKKVKDTVDRVKRITDEMLRKVKELVDDVRRKVDDKDVEKKLKDVLDKVRKVVEESRRHLEESLDKVRRVAEEIRKRLKESKDRVDEAAKEIRR

SEQ ID NO: 12131 - protein, 185 aa, Artificial Sequence; identical to SEQ ID NO: 12130
  Synthetic

SEQ ID NO: 12132 - protein, 185 aa, Artificial Sequence
  Synthetic
DELEEAEKRIKELIDRLEEFNEEVHRRNEKLIRELREVLKRVEEEIRRLIKELRDEVRKISDKDTVEDIVRKVLETVKELIKEVKKIVDDVLREVRKTVRKVKEITDDMLRRVRKLIEEVRKRTRDKRVEERLERVLREVEEVVKRSRKHLEDSLREVEKAVKEIRDRLDEVLRRVEKAVEEIRT

SEQ ID NO: 12133 - protein, 185 aa, Artificial Sequence; identical to SEQ ID NO: 12132
  Synthetic

SEQ ID NO: 12134 - protein, 185 aa, Artificial Sequence
  Synthetic
SELEDAERKVKELIDRLREVNRKVHEDNKRLIDELRDVNRKVAEEVRRLIEELKEVARRVDDKETVVRIVDEVLKRVEELIEKVKRISDRVLEEVKRTVDEVKRITDKVLEDVKRLIDDVKRKTRDKRVRDRLKEVEDRVRKVVEDSRRHLEKSLREVEEVIRESREHLEEVLRRVKEEADKIRK

SEQ ID NO: 12135 - protein, 185 aa, Artificial Sequence; identical to SEQ ID NO: 12134
  Synthetic

SEQ ID NO: 12136 - protein, 185 aa, Artificial Sequence
  Synthetic
SELEKVREDIKRLIEDLRRANDRVRRESERLNRELREVNKRVHDDNRRLIEELRRLVKDIKDKETVRRIVDEVLKEVRKTVETVKRISKEVLERSRKLIEEVKEITKRALEEVEELVRDVERKTRDERVRDELRKLLRTVEKVVEESKKHLKEVLDRSREVVEESKTHLEKSLTDVEKVVREIRT

SEQ ID NO: 12137 - protein, 185 aa, Artificial Sequence; identical to SEQ ID NO: 12136
  Synthetic

SEQ ID NO: 12138 - protein, 185 aa, Artificial Sequence
  Synthetic
STLDEAVKRIDELIKRLREVNEEVARRSKRLNDELKKVNEDVARKIEELIRRLRDVVRKISDKETVDRIVDKALEDVKKLIEDVKRISDKVLEDSKRLIEEVKRITDRVLEEVERLIREVKKETRDKRVEEELERVLRKVEKVVKESRDHLEEVLRRSEDMARRSREHLEELLKRVEKVVREIRT

SEQ ID NO: 12139 - protein, 185 aa, Artificial Sequence; identical to SEQ ID NO: 12138
  Synthetic

SEQ ID NO: 12140 - protein, 185 aa, Artificial Sequence
  Synthetic
SELEEAIRRIEKLIRELREVNKRVAEEVKKSNEESKEVNKRVKDDVKELIERLRDIVKKVKDKDTVEEIVKEVLKRVKELIDEVRRISDEDLKTSKRLIDEVKRITDEMLERVRRLVEDVRRKTRDKDVEDKLREVLRRVEKVAEESRRHLEKVARESEEVVKRSRKHLEEVEREVKKVIDEIRK

SEQ ID NO: 12141 - protein, 185 aa, Artificial Sequence; identical to SEQ ID NO: 12140
  Synthetic

SEQ ID NO: 12142 - protein, 185 aa, Artificial Sequence
  Synthetic
RTLEEVEKEVEKLIEDLRRVNREVAERIKKSNEDSKRVVERVEDEIRRLIEELKDMVRKVSDKETVVRIVDEALERVEELIRRVKKIVDDDLRRSKELIDRVKEITDRMLETVKRLIDEVRAETRDERVDKRLRDVLRKVKKVAEESRKHLEELAERSKEVVERIRRRLEEVLKRVREEAEKIRK

SEQ ID NO: 12143 - protein, 185 aa, Artificial Sequence; identical to SEQ ID NO: 12142
  Synthetic

SEQ ID NO: 12144 - protein, 185 aa, Artificial Sequence
  Synthetic
SELEDAERRIERLIRELRKANEEVARRIEKSNEDSRRVNKKVAEEIERLIKELRDVTKDVDDKETVKRIVDEMLERVKKLITEVKEISDRDLEESRKLIREVEKISEDVLDTVRKLVEDVRRKTRDKRVEEELKRVLDEVKRVIEESKERLKKWLRDSERVVEESRRHLEELRKRVEKAVREIRT

SEQ ID NO: 12145 - protein, 185 aa, Artificial Sequence; identical to SEQ ID NO: 12144
  Synthetic

SEQ ID NO: 12146 - protein, 184 aa, Artificial Sequence
  Synthetic
RVEDEVRKMREKSEKVDREIREAVRRSLTRIKEVVDEIRDEVRRSEDKVKKEIDRLRKEGADEKALKELLDRVKRSVEEVERVVEEVLRRVEESARDVERVVTENHRISKELVEDVRRKVSREEVDKLLDEVRREADESNTRLRERVKEVNKRNEEVIEELRKRVEEVHRTNEDLIRELRKKTT

SEQ ID NO: 12147 - protein, 184 aa, Artificial Sequence; identical to SEQ ID NO: 12146
  Synthetic

SEQ ID NO: 12148 - protein, 178 aa, Artificial Sequence
  Synthetic
REEEELERVKRRSEKVDEEIKKRLREVAEEVKRSNEEVKKRLEEVLRDSKRKLDELREEGADEKAVEENERTVRTVARRVEKVVRENEKTLREAERAVEEVLDRNRKTVEDVERLLKRREKDVRELIRELEESNKRVKDVLRKLIEEVKKSDDELREIVKRLVEEVERSNKELEDRVR

SEQ ID NO: 12149 - protein, 178 aa, Artificial Sequence; identical to SEQ ID NO: 12148
  Synthetic

SEQ ID NO: 12150 - protein, 178 aa, Artificial Sequence
  Synthetic
REEERLKKLKEDSDRVDREIERKAEKVLEESEEVDRDIERKLREVERKSREVLEELKKRGADKDAVKRNEETVRRVVEEVRKVLDENTRSVEKVLEEAKRVVEENKKTVDRVDKVVRRRDKDLEELRKEVEKSNTDLEKIIEDLIRRLKKSNEDVRRTVTELVKEVDRSNKKLEDEVR

SEQ ID NO: 12151 - protein, 178 aa, Artificial Sequence; identical to SEQ ID NO: 12150
  Synthetic

SEQ ID NO: 12152 - protein, 178 aa, Artificial Sequence
  Synthetic
REEEELEKLRERSERVDDEIRKRLREALERSREVDEELRRRAEESKKESDEVIKDLARRGADRKALEENRETVRESLERMRRVVDENTKSVEDVFKAVEDVLRRNKRTVDEVRKVVERREKDLDELRREVEKSNEDVRRFLEKLVRDLEESNRRVRERIKRLHEENKKSNDELRKRTK

SEQ ID NO: 12153 - protein, 178 aa, Artificial Sequence; identical to SEQ ID NO: 12152
  Synthetic

SEQ ID NO: 12154 - protein, 181 aa, Artificial Sequence
  Synthetic
SELEELKKKSKKLNDDIERVVEEVLKRSEDINERVKKEVKDVIDRNTDVLRRVKRDVEREDKSRELIRRLIEEIKKTTKELEDRVRELVKESEESVRRIEKLIRELIKESEKVVEEVKRTVSKGKEEAVRKVEKENRESVEKLKKAVKEVRDRNRKVIEELKDLVRRSRDKSKKVVDELRK

SEQ ID NO: 12155 - protein, 181 aa, Artificial Sequence; identical to SEQ ID NO: 12154
  Synthetic

SEQ ID NO: 12156 - protein, 181 aa, Artificial Sequence
  Synthetic
REVDKARKDVDDILKRVTEAVDRMDRDNERVLREVEETIRKLEEDSRRINKDIEDAVRKEDKSRELIKKLIEESKRSVDELRKVITRLERRIERTTKELKKLVEKLIRELKKVVEDAIRKVSKGSRKDVEDVRRKVEEVVRRMEKRLRESEKKSRDVVRKLRKVIEDVERDNDRVVKELEK

SEQ ID NO: 12157 - protein, 181 aa, Artificial Sequence; identical to SEQ ID NO: 12156
  Synthetic

SEQ ID NO: 12158 - protein, 181 aa, Artificial Sequence
  Synthetic
SELEEMRRRIERLAEEVRTTVEEVVRRSEELNKEVEKAVRKVVDENRRVLEEVKEEVRKEKDSRELIERLIRRIEETTKKLEDLVRKLVKELRDSVEEIRKLIEDLIRRLKKVVREAKETVSKGKKEEVKRVEERVERVVEELRRLVEEVRKRNEDSIEKLKDLVRRSKEESERVVKELED

SEQ ID NO: 12159 - protein, 181 aa, Artificial Sequence; identical to SEQ ID NO: 12158
  Synthetic

SEQ ID NO: 12160 - protein, 181 aa, Artificial Sequence
  Synthetic
SDLERVRKESEDLNRRIKTEVRRVLEELKELLKRIKEEVEELVRRNEEVLKRVREEVTKRREARELIRDLIKKIRDTTEELRRVVERLVEEIKKVLRDLKKLIEDLIRESKKVVREILERVSKGKEEAVRKVKEDNDRSVEELKELVKDVERKLREAIKELEDLIRRSEEKSREVVERLRR

SEQ ID NO: 12161 - protein, 181 aa, Artificial Sequence; identical to SEQ ID NO: 12160
  Synthetic

SEQ ID NO: 12162 - protein, 183 aa, Artificial Sequence
  Synthetic
SLEEEVRRVKKELRRVLEKSTKLIEEVTRELETVLRESRDRVRRAKEELKEAVREVRRDVGEGEKLRDAERVVEDLLRELDDSLRKTEEMVKELKKKLDKSNKTTADLVRELLKRLDKVLKDGGEEEVRKVVEDVERVLRELEKHDRDVAEEVRRVLDELRKHDEDVRRKLRKVLEELKEKIK

SEQ ID NO: 12163 - protein, 183 aa, Artificial Sequence; identical to SEQ ID NO: 12162
  Synthetic

SEQ ID NO: 12164 - protein, 183 aa, Artificial Sequence
  Synthetic
SIEDRVRRVEKELREVERKSTETVKRVEEELEEVVRRSRELVERVKERLKKMVEEVKRDTGEGEKLKRAEEMVRRLLRELEESNKKTKTLVDRLLEELRDSNKKTRDLVRELLKKARDVLRRGGEKELEDVERDVRRVLKEAEDNDRRVVERVRRVLKEAEKHDRDVVRRVDEVLKRLKEEIR

SEQ ID NO: 12165 - protein, 183 aa, Artificial Sequence; identical to SEQ ID NO: 12164
  Synthetic

SEQ ID NO: 12166 - protein, 183 aa, Artificial Sequence
  Synthetic
SIEEAVERVAKRLEEALRRSTEEVKRVKEETRESVERSRREVEKVEKELREVVERVRRERGEGEDLKRAEDVVRELLKLLRESLKRSEELARDSVRKLDKSNTDTERLVRELLKRARDVLREGGDDRLRKVVEELETVLDELRKNDRRVIEEVRRINDELRRRDEEVIKRVRDMLKKLTEEIK

SEQ ID NO: 12167 - protein, 183 aa, Artificial Sequence; identical to SEQ ID NO: 12166
  Synthetic

SEQ ID NO: 12168 - protein, 179 aa, Artificial Sequence
  Synthetic
SLEDKLRENKRRSEAVVEEAERRLRKNEEDSRKVVRELEDKLRRLREESKEMADRLRRKGADERVVRKVNKDSEDIIRELERLVREVERVSEELIRRIEEIVTRVLRVSEEILRRLKRVDDKVVEKLLKESKEILDRARETVKRILDDSERILRELRRRVEKLIKESRDILRKVDEDER

SEQ ID NO: 12169 - protein, 179 aa, Artificial Sequence; identical to SEQ ID NO: 12168
  Synthetic

SEQ ID NO: 12170 - protein, 181 aa, Artificial Sequence
  Synthetic
KAEEILEDIKRAVEEALRKLEESVRRNKERIREAVERLRETVKEAKERVDEVKRELEEKGVDRSLIRRVEEVVKRVLDINRRLIEEVEDVVKKSEEINADLIREVRTVVTDVERIIRENGELEEVLRKVREDLERIIRRVEEESKKSHKDSEDVLRRVEERSKKSLEELEDIIKKVKEEAD

SEQ ID NO: 12171 - protein, 181 aa, Artificial Sequence; identical to SEQ ID NO: 12170
  Synthetic

SEQ ID NO: 12172 - protein, 181 aa, Artificial Sequence
  Synthetic
DMEKIVRDVEDRVREVEDRLRRIAERNKREIERVVEELKKTVKEIEDKVREVVKRLEEKGIDESLRERVEKVVRDVVRENEELIKEVEDAVRESLKIVKDLIDEVRRVVAEVERIIRENGELEEVLRKVVTDLERILRRVLEDAKRVHEESKRRLDDVRRRSEDSVRRLEEELKRVEEEVD

SEQ ID NO: 12173 - protein, 181 aa, Artificial Sequence; identical to SEQ ID NO: 12172
  Synthetic

SEQ ID NO: 12174 - protein, 181 aa, Artificial Sequence
  Synthetic
DAEKILEDIKREVDEVLKRLRDIIRRNEEEIRRAVEDLKRIADEDREAIKRVIDELRKKGVPEELLKEVKDVVDESLRRIEKLIEDVKRAVAESVRRAEKLIRDVERVVKRVEDIIRKNGEAEEALRKVVEELRKILRDVTEVAKKVHRDSEEVLKKVREDVRKVHEDSKRVLDKVDKDAN

SEQ ID NO: 12175 - protein, 181 aa, Artificial Sequence; identical to SEQ ID NO: 12174
  Synthetic

SEQ ID NO: 12176 - protein, 176 aa, Artificial Sequence
  Synthetic
SRLEEVLRRHEELNERVERTVKKVHDDSKELIDRIRKDVEKVVRELEKVIDEVEKNSRDKDLVREMIKRIEDVLRRLEDRVRKLAEKIDRVLEESRRLVEELAKRSRESLKRLVDTIGKESEKVEEIERHARKVERRLEEIVDRNRKSVDKAKKELEKIVRDVRRRVEEVVDRLRK

SEQ ID NO: 12177 - protein, 176 aa, Artificial Sequence; identical to SEQ ID NO: 12176
  Synthetic

SEQ ID NO: 12178 - protein, 176 aa, Artificial Sequence
  Synthetic
DEVRRVLEELRRLLDEVRERVRRVVEEHKRLNDRIRREVERAHEENKRVDDDLRRKVRTRELVKEVIERSKEVLERTEKLVRDLARDSDRSVEEARKRVEELMREIDDVLEKLVRTIGKDSKDVKEVKKEVERVKEELRRLVEELRKHAEKVKEELKRIVDRDRETNERTVEELKK

SEQ ID NO: 12179 - protein, 176 aa, Artificial Sequence; identical to SEQ ID NO: 12178
  Synthetic

SEQ ID NO: 12180 - protein, 176 aa, Artificial Sequence
  Synthetic
SEAEDVLRKLERLLEEVRERVADAHRRSKELLDRVDKEVKRVNEENRKLDDDIRKKVRDKDLVRKAIEDSKTVLEKTKRLVEDLMRKIDRVLEESAKVVEKLREEIEKVLRELLETVGEDNDEARKVREKVKKVEEELRRIVEEDRKEVEKVKRKLEKDVREDEKENRKTVRELEQ

SEQ ID NO: 12181 - protein, 176 aa, Artificial Sequence; identical to SEQ ID NO: 12180
  Synthetic

SEQ ID NO: 12182 - protein, 185 aa, Artificial Sequence
  Synthetic
TLEELLEEIRRKVEEVLKKLEDLLRRDHEEVKKVEEELEEINKRSEDRVRKAVRRLERDAKDDKETVKRVKKKLEEVVRKDHDVVRDIKRRLKESNDKSERVMREIKKRLKEVLDEVKKVVDDGVGEEAIRKVLRKLEEEAKRLEKRIEEVLKESKDRIDELRKRIEESHKDLERIIEELERRIK

SEQ ID NO: 12183 - protein, 185 aa, Artificial Sequence; identical to SEQ ID NO: 12182
  Synthetic

SEQ ID NO: 12184 - protein, 185 aa, Artificial Sequence
  Synthetic
RLEELLERIRKRVEEVKRESERLLKEDHDRVEEAKKRSEDINRRSKEEVDRMLRELETKAKDDEKVVREVKELLKRVVEKDHDLSRRSVELLDTSNKKSKDLSEESKKELDEAVKEVETIVRNNVGEEAIRRVLKKLEEIAKRLLDENRRVLEESKKIIDKLEEDNRRSHRELKRILDELRKRIK

SEQ ID NO: 12185 - protein, 185 aa, Artificial Sequence; identical to SEQ ID NO: 12184
  Synthetic

SEQ ID NO: 12186 - protein, 181 aa, Artificial Sequence
  Synthetic
KEAEDLEKKVEDILRRVRELLEELHRRSEKILKDVKDRSRDLLRRVREILKRVEEKKERVREDELDKILKEVTERVKRVLEESEELLRRVEKVVKDINKRAEEILERVRKVVEDVLDDMRKKGVDERLVREVEKKLRTVEEEVRRIVKENKERLDEAREDVKRSNKTIRDELERARERIET

SEQ ID NO: 12187 - protein, 181 aa, Artificial Sequence; identical to SEQ ID NO: 12186
  Synthetic

SEQ ID NO: 12188 - protein, 181 aa, Artificial Sequence
  Synthetic
SEAEDLTRRVREILKRVEDLSKKLNDDTKKILDELRELSKRLMEEVKKILRRVEEKKERVSEDELRRILEDVRRRVEEVVKTSERLLRRVEKASKDSVETSRRLLERLREFVRRVLEEARRRGVDKRLVDTVREELERVRKKVEDSDRRNEEELRKVKEEARRSNERIRELLKTVEDRIRT

SEQ ID NO: 12189 - protein, 181 aa, Artificial Sequence; identical to SEQ ID NO: 12188
  Synthetic

SEQ ID NO: 12190 - protein, 181 aa, Artificial Sequence
  Synthetic
DEVRKLVREVEDILRRVREKSERLVRLVEEILRRVLEESRRLLEETREILERVEEKKERVSEKELKEILEEVARVSEKTVRDSERLLDDVRRKVEEVLERSRRLLDEVRKTVEKVLEDARRRGVDERLVREVKELLDRVADEVRKSDEDIRRLLEDAARKVEESNKRNRDLLETVRRRIEK

SEQ ID NO: 12191 - protein, 181 aa, Artificial Sequence; identical to SEQ ID NO: 12190
  Synthetic

SEQ ID NO: 12192 - protein, 178 aa, Artificial Sequence
  Synthetic
SEVEKLKKEVKESSKEVIKEVEKLHRESEKSSEDVKREVEKLHRRSKEVADEVRERVRRRKDKEVIDKLADDLRRIAEETIDRVKKLVDEDREVVKDTIRRLRELADEDRRRVEDVIRKIRDERVVEEIERDVRESLRRIEEIIRRNEKRVRESLEDLKRILRENKETVRKVVDELRK

SEQ ID NO: 12193 - protein, 178 aa, Artificial Sequence; identical to SEQ ID NO: 12192
  Synthetic

SEQ ID NO: 12194 - protein, 178 aa, Artificial Sequence
  Synthetic
SEVDDLTRRVRDVLRRVEEKVRDLHRRSEKVARDVEREVEELHERSKDVARKVEEKVRRIERREDIKKLAEDLKRIVDESIKRIEELAKRLEKIVRETIKKVRELVEEVKRIVDDVIRKIRDKDVVDRIRREVEEMLRRLEDILRRNEDTVRRVKEKLKRIVKRDEEEVRKVLDRLRK

SEQ ID NO: 12195 - protein, 178 aa, Artificial Sequence; identical to SEQ ID NO: 12194
  Synthetic

SEQ ID NO: 12196 - protein, 178 aa, Artificial Sequence
  Synthetic
SEVEELKKRVEDVAEEVKDRVRKLHEKSERSSREVEKEVRKLHEESRRVAREVTERVRRIDDRDTIRELVERLKDIFRKSIEDIKRLVEEDKRRVDETIKEIKRLVDELRERVTRVIEKIRDEEVVKEIRDTVEKVLEEARKIIEDNRKRVAESVETLKDIIRRDEKTMRDVVDELRT

SEQ ID NO: 12197 - protein, 178 aa, Artificial Sequence; identical to SEQ ID NO: 12196
  Synthetic

SEQ ID NO: 12198 - protein, 178 aa, Artificial Sequence
  Synthetic
DEVEELRREVEESSRRVEKEARRLHKRSEESSREVEERLKRLHDDSRRVAREVEEIVARSEDRRVIEDVVRRLEEEVKRSIETMEELVKRDRDVVRKTIEDMERLAREDRKIIERVIKEIQDEDKVRDIKRRIDESKRKIEEIIKRDKEEAEKSEEKIKEIIERDRETVERVVRKLRE

SEQ ID NO: 12199 - protein, 178 aa, Artificial Sequence; identical to SEQ ID NO: 12198
  Synthetic

SEQ ID NO: 12200 - protein, 182 aa, Artificial Sequence
  Synthetic
EIEEIEEELKDRVRRSEEKLRRIEKELRELVEKSRKELEDLLDKDRRDMKRVADELRRDDGPDVEEALRRITEVTRKSEEEVTRLVEENKRVVEDIRRLLRELAKENKDVVREIRDLLKKVDDRRVVEELTRKLEESIKKSEDEVKKVKERLEESIRRSKERLEDARRESERVLTEIRERLR

SEQ ID NO: 12201 - protein, 182 aa, Artificial Sequence; identical to SEQ ID NO: 12200
  Synthetic

SEQ ID NO: 12202 - protein, 182 aa, Artificial Sequence
  Synthetic
EVERILDELRRRVEEVVKENEKALDTLRKESERTEEENKRLLDEAREKVDRVVKELKRDDGPDVEELLREIRTVLEDVKRRVEKSTREDKEVVKDVERLVRESSKDIRRVLKEVEEELRKTRDEKVLRDLAKKLEDVIRKSEELTKELAKRLRESSKRSIDLTRELLKRLEEVLKKVRDALR

SEQ ID NO: 12203 - protein, 182 aa, Artificial Sequence; identical to SEQ ID NO: 12202
  Synthetic

SEQ ID NO: 12204 - protein, 182 aa, Artificial Sequence
  Synthetic
SVEEIVEEIRRRSKETEDRNRRVVEELEERVRRVLEELKKIVEDARRKVEKVARELKRDDGPDVDELLKEIRDVLERVVTEVEKLLERIKKVLREIAERIKRSSERDREVVERVEKRLREVRDEKVVEELLRRLKETSDDSLRRTDELRKELERVLKEVRERLKELDRELKRVLDDVREKIR

SEQ ID NO: 12205 - protein, 182 aa, Artificial Sequence; identical to SEQ ID NO: 12204
  Synthetic

SEQ ID NO: 12206 - protein, 183 aa, Artificial Sequence
  Synthetic
KLEDILRKIEKELKEVKEKSERIVREIEKRHEDDKRRVEDIVRRIKEEVERVVKEIKEAPVPEEVIRDLIRLLEEVLREVDEVLKRVRDLNRRVVEEVRKVSEENEKLLRELLRRVREVLRANRDEVMKKVEKEVRDVIKELEDTAREVEKKSEKVLKETNDLAKEVMDKVRKVAEDLRKKLE

SEQ ID NO: 12207 - protein, 183 aa, Artificial Sequence; identical to SEQ ID NO: 12206
  Synthetic

SEQ ID NO: 12208 - protein, 183 aa, Artificial Sequence
  Synthetic
ELEEIVRRIEEEVRRADKEVKEILTEIEKEHRRDVERSDRSLEKIKRDVDRALEEVERVPVDEKVIRRIEKLLRDVLEKVKRVSERVKELNTRAVDLVRRVVEEISELLKRVLDRVRDILKANRREVMKKVTEEVREVLDRLRELLKEVAKRSEEVIKRTNELNETVMRDVERVLRELREELR

SEQ ID NO: 12209 - protein, 183 aa, Artificial Sequence; identical to SEQ ID NO: 12208
  Synthetic

SEQ ID NO: 12210 - protein, 174 aa, Artificial Sequence
  Synthetic
SEVEKLEEDFREMIERSERTLEKLKKENEDASKKSKEKLEKLLREMKEIIDRIRDLIRKGRDITELLRRLEELLERIEEELKESIRESRKLLEDIERISRDSIRRLRELLEKAERDGADEEVIKKLRELLERLEREHRKVIEELKKSNKKNEEDIRRVLEELRRLVKKLADDAR

SEQ ID NO: 12211 - protein, 174 aa, Artificial Sequence; identical to SEQ ID NO: 12210
  Synthetic

SEQ ID NO: 12212 - protein, 174 aa, Artificial Sequence
  Synthetic
REAEELLKEMKRASEKSEKIIEDLRRENEKLSKESEDIIRKLKEDNERMIRTIEELIRAGRDIDKLKKESEKLLKEIADELERSIRESRRLLEEIEKILRKSIKELRDLLEEIERRGLEEEVIKELRELLERNEREIKKVLDELRRSNEKNERDIERALEELKRTNDELAKRAK

SEQ ID NO: 12213 - protein, 174 aa, Artificial Sequence; identical to SEQ ID NO: 12212
  Synthetic

SEQ ID NO: 12214 - protein, 174 aa, Artificial Sequence
  Synthetic
DEVEKLRREIEEIIKEWEKRTRDLKREMKKISDDSRRRIEELLRDFKRIIDELRKAIEDGRDVTDLLRELRRLLEEIERRLEESIRRLKELLDRIHEEDKRLRKELEDLLKRVEDDGLSKEVIERLRELVKRVTDKVRKVNEELRKLLEDNADEIRRAIERLRELLRRLEEEAR

SEQ ID NO: 12215 - protein, 174 aa, Artificial Sequence; identical to SEQ ID NO: 12214
  Synthetic

SEQ ID NO: 12216 - protein, 174 aa, Artificial Sequence
  Synthetic
SEVEKLVREAEKIIEDIRRVIEELLRRARKINKEWDDVSRKLKEDAKRIIDTVLKLIREGRDITELAKRLDELLREIKKINDEMLKRDRDLVDEIRRRLERLLEELRRLLEKIRADGLDKDVIERLRDLVRRVKEDIERVLDEWRKSSEEAEERSRRVIEELRRLLEELKERVR

SEQ ID NO: 12217 - protein, 174 aa, Artificial Sequence; identical to SEQ ID NO: 12216
  Synthetic

SEQ ID NO: 12218 - protein, 182 aa, Artificial Sequence
  Synthetic
SELEELKKTMDEVNKETKKENDRLLDEARKVNEESRRRLEKLRKELDDVVREVEDARRRNTDKDELLRKLREILDRVRRDVERIVKRNKEILKRVEEDLRRLNEENRRILKELEDRARKNNVRSDKVERVLRELRKSSRKVHEDSKKVVEDLERSSRTVEKELRDALKELEDKVREVEKKLK

SEQ ID NO: 12219 - protein, 182 aa, Artificial Sequence; identical to SEQ ID NO: 12218
  Synthetic

SEQ ID NO: 12220 - protein, 182 aa, Artificial Sequence
  Synthetic
DELEKLLEEARKVNEETKEANERLLREMEKVNKESEDANRKLLEELKEVVDRVDDLARRNSDRDDLLRRLEEILEDLRRKAEELNRRNKRILEEVEKRLEDLNRENERILREVEERLKKANLSSEDVKRVVDELRESSREVHRRSREVVERLRRSSEEVHKKSRDVLRELTRLVREVKERLR

SEQ ID NO: 12221 - protein, 182 aa, Artificial Sequence; identical to SEQ ID NO: 12220
  Synthetic

SEQ ID NO: 12222 - protein, 182 aa, Artificial Sequence
  Synthetic
DELETLLRELERVNKETERELERLKREAEEVNKATRKDLDELRKEIDKVVKEVEEARRRNKDKDDLLRRLRDILRRVTEKLRKLIEDNERITEKIVRELKRLVRENEEILREVKKRLDEANLESERVKKVVDELRDSSRRVKEKLEDVVRRLRDLSRRTKEEVEKVEEDLRRKVREVEERLR

SEQ ID NO: 12223 - protein, 182 aa, Artificial Sequence; identical to SEQ ID NO: 12222
  Synthetic

SEQ ID NO: 12224 - protein, 182 aa, Artificial Sequence
  Synthetic
DELETLLDEAKKVNEETRRANRELRERVREVNKRTEEELKKLRDRLEKVVDDVDKLRKRNTDTEELLRRLREILKRIEEELEELKERNRRITTRVEEELERLNRENEEITRRLTERLRRANLESRRVREVEERLKKLSEDTHRDSRRLVEEMRRLSKETEKKVEDVVRDLRRLVKEVEERVK

SEQ ID NO: 12225 - protein, 182 aa, Artificial Sequence; identical to SEQ ID NO: 12224
  Synthetic

SEQ ID NO: 12226 - protein, 182 aa, Artificial Sequence
  Synthetic
DELEKLRRELEEANRRTKKANEEILREAERVDERSEEELRKILETLKKVVKDVDDMARRNSDKDELLKRLREILKELEDRLRDIVRRNREITKDLVERLKELNRRNEEITRRLTEDLRRANLEDRRVRTVVEELKKLSRETHEDSKRVVEELERLSRESERKLREVVKEMRKLVKDVEDKVK

SEQ ID NO: 12227 - protein, 182 aa, Artificial Sequence; identical to SEQ ID NO: 12226
  Synthetic

SEQ ID NO: 12228 - protein, 182 aa, Artificial Sequence
  Synthetic
DELEELLRRVEEVDKESKRRLDEIKRRMKEVNDRTREALRDLLRRLAEVVKRVLDLIRRGSDKDRLLEDLRRILREVKEAAKELLKRNREITEKMVRDLKRIVKDNKKILDDVEKTLREANLESERVKKVVDDARDSSRKTVERLETVVRDLKRSSDDVEREVRELLKELERLVKKVEDDAK

SEQ ID NO: 12229 - protein, 182 aa, Artificial Sequence; identical to SEQ ID NO: 12228
  Synthetic

SEQ ID NO: 12230 - protein, 183 aa, Artificial Sequence
  Synthetic
RELEELLRKVRKLVEEIERELKKLLEEDRRLSEESREELRKLLEDARRMIREIEELLKRRRTEEVSTTIDKILKEVEKKVKDLERRSKKISEDSRRKAERVLREIKRILEEIEKDVERVLRERDSEDAKRVLKEIRRLAEELKKSVKRVIEEVEDSNRRNEEEVRRVLEEIRRLLEDLDRKVK

SEQ ID NO: 12231 - protein, 183 aa, Artificial Sequence; identical to SEQ ID NO: 12230
  Synthetic

SEQ ID NO: 12232 - protein, 183 aa, Artificial Sequence
  Synthetic
SELEELLKDAKRVIDTSRRLITELEKRDEEIIRRIKDLLRRVTEEAKRMLDEIREELKRRRDEEVKKRIKELMDKIREDLKRVLEEIDKLSRDSEEDVRRVLDENRKLVEEVERKVREVLRRRDSEKAKRVLEEIRKLLEDSKKESEDVARKLKKSNDELRRDVERVLREIEKRLEDLKREVE

SEQ ID NO: 12233 - protein, 183 aa, Artificial Sequence; identical to SEQ ID NO: 12232
  Synthetic

SEQ ID NO: 12234 - protein, 183 aa, Artificial Sequence
  Synthetic
SELEKLLREVEKIIRDSDDLLRRLEKRNRDLIRTSEKLLKEVKDDVDRVIRELERLLEEERSEEVARRIEELMREVEEKAKRLLKENEDISRRSREDVRRVLETNKRLLDEIRRRVKDVLDRRKSEKAEDVLRRIEKLLDDSRRRSEKVAKELEESNERSKRKTEKVLKEIKEALDRVREKVK

SEQ ID NO: 12235 - protein, 183 aa, Artificial Sequence; identical to SEQ ID NO: 12234
  Synthetic

SEQ ID NO: 12236 - protein, 179 aa, Artificial Sequence
  Synthetic
SEIEKVARDVEELLKKVEKKNRDMVERVRRLLEKVKRENEELVRRVEESNERLKERVDRSNRDERIRRDVERIVKESEDLLKESHDIVKKIIEEVDELLKESHKRVREIIERIKEMVKDGGERVEELEKTVRKLARDAEKISEDVERRVRELARRLRKISEEVLRRNKELVRRVDEEIR

SEQ ID NO: 12237 - protein, 179 aa, Artificial Sequence; identical to SEQ ID NO: 12236
  Synthetic

SEQ ID NO: 12238 - protein, 179 aa, Artificial Sequence
  Synthetic
SEVEEAVERVKKLLEKVRKDNEEFRERVRKSNEEAEERNRRVVEEVRRSNEELKEKVERSNRDERIKEKVKRIVETSEKLLRESHKTAKDIIRETEELLERSHEIVREIIERVKKLLDEGGEDVEDLKRRVKELADEARRISEKVLRDNKRLLTELDKISERVLRENEKLVREVEETIR

SEQ ID NO: 12239 - protein, 179 aa, Artificial Sequence; identical to SEQ ID NO: 12238
  Synthetic

SEQ ID NO: 12240 - protein, 179 aa, Artificial Sequence
  Synthetic
SEIEKVAREIEELLRKVAEDNRRMVERVRRLLEEVKTRNKKMVDEVKESNERLKDKVRRRNASEEIKKRVDEIVETSKELLKRSSEEVERIREEVEELLRRSHETVREVERRLKDLVRKGGERVEELKRRAERLIEELRKISEEVERRVKRLVEELEEITRRIKEENDKLVREVEKELK

SEQ ID NO: 12241 - protein, 179 aa, Artificial Sequence; identical to SEQ ID NO: 12240
  Synthetic

SEQ ID NO: 12242 - protein, 179 aa, Artificial Sequence
  Synthetic
SEVEKVVEELKDLVRKSSEKNRKVAEEVKKSNDDLRRKVEEAVREVRESNERLKREVDESNRDERIREKVERIVRESEKLLKEIEDRAREIVKTTEDLLRESHKRNKEIEEEIRDLARKGGERVEELKDRVRKLIEESERISREILKTNRKLLKELEELLKRLLKRNRELVREVKEEIK

SEQ ID NO: 12243 - protein, 179 aa, Artificial Sequence; identical to SEQ ID NO: 12242
  Synthetic

SEQ ID NO: 12244 - protein, 179 aa, Artificial Sequence
  Synthetic
SDIERVVKEVKDLLEEVRKDNERVMDEVRKLLEELKRKLRKVVEEVRRSNEELKKEVDRRNVSEEIRRKVEEIVRRSEELLKRLEDTVKDIERKVRKLLEDSHREVKKAEDRIRELLKRGGEDVETLRKEVEELADDLRRISEEVRDRVRKLVTKAEEILRRVLETNKKLLKEVKETLK

SEQ ID NO: 12245 - protein, 179 aa, Artificial Sequence; identical to SEQ ID NO: 12244
  Synthetic

SEQ ID NO: 12246 - protein, 179 aa, Artificial Sequence
  Synthetic
SEIEKVAEEIKKLLRKVEEDNKTVVEEVRRSNEKLKRDNDKVVRDVERSNRELKEELDRSNVDEEIRKKLKEIVDTSRELLRESSERLEKIVRETEKLLEDSTREVKRVVTEIKDLVRKGGERVEELKKRVEELARRAKEISDKVRDDNEKLLRELREITKRVKEENDRLLKEAKDAIK

SEQ ID NO: 12247 - protein, 179 aa, Artificial Sequence; identical to SEQ ID NO: 12246
  Synthetic

SEQ ID NO: 12248 - protein, 179 aa, Artificial Sequence
  Synthetic
KEIEDVAKRVEELLRESSREVEEVLREVEELVRRSTRRNEEAVRRVRKSNKELEDEVRRSNRSEDIKRRVKEIVEESKRLLEESSKRNRDIAEEIRKLLETIKRLNDEMVRRLKELVKKGGEDVKTLLDEAKRLVDRSRELLERLLRDVRRLIKESDKITRELERKNEKLLKEVKEEID

SEQ ID NO: 12249 - protein, 179 aa, Artificial Sequence; identical to SEQ ID NO: 12248
  Synthetic

SEQ ID NO: 12250 - protein, 179 aa, Artificial Sequence
  Synthetic
SEIEDAEREVRRLLRESSERVKTVIEEVRELLRRVKRENDEAVKEVEKSNRDLEDKVRRGNLSEEIKKKVEDIVRESEDLLRRSSERVRELVEEIKRLLEELKKRNDELVRRIEELVKKGGERVEELKERVKRLVADSERLLKELRDRVKELADEARRTTEEVLRRNRELVRRIEEDIR

SEQ ID NO: 12251 - protein, 179 aa, Artificial Sequence; identical to SEQ ID NO: 12250
  Synthetic

SEQ ID NO: 12252 - protein, 184 aa, Artificial Sequence
  Synthetic
SELDEVLKTVRKIIEENEKIVKEVLDTSRRSVEEVRKHTKEVLDRVRELAKELEDATRKTSRKEDLERLLREVADRIRKLIEENRELVDRVNKENRRLIRELEERNKRSAEDLKRLIDELRKSSQTEEVDKVAEEIEKLVRESNRKVREVVKEIEKLNRDMRKESEDAVKEIEELLRTLEEKVR

SEQ ID NO: 12253 - protein, 184 aa, Artificial Sequence; identical to SEQ ID NO: 12252
  Synthetic

SEQ ID NO: 12254 - protein, 184 aa, Artificial Sequence
  Synthetic
SELDEVLKTVEKIIRDNEEIVKEVLRRSERSIKELKKHTDDILRKARKLAEELKRVVERTEDKRELERLVRRVEKEVRDLIRENRELVKEVNDRNKKLIDELKKINDDSRKTLEELIRDLERREDDKRVKDVAERIRELVEESNRKVREVVERIKDLNRKVNKTSEDAAREIEKLLEELREEVR

SEQ ID NO: 12255 - protein, 184 aa, Artificial Sequence; identical to SEQ ID NO: 12254
  Synthetic

SEQ ID NO: 12256 - protein, 184 aa, Artificial Sequence
  Synthetic
DELEEVLKRVREIIKRNEDHSDRVREKSRESVKELEEHTERVLRDVERLARELEEMIDKTDDKRDLKRLVEEVRRRIKKLIEENRRLIEEVNRRNEELIKENEKLNRESEERIRELIEDLRRRRQDKKVDDVAREIEKLLKESNDKSRELVKEIKDLNKRLNEKSEEAVKRIEDLLRRIEERVR

SEQ ID NO: 12257 - protein, 184 aa, Artificial Sequence; identical to SEQ ID NO: 12256
  Synthetic

SEQ ID NO: 12258 - protein, 184 aa, Artificial Sequence
  Synthetic
KELEDVLERVKEIIKRNEEILDKVRREVEESVRRAEEILKEVLERVRDLVRKLDDIKDKMDDKKDLKKIVDDVKKEIEDLIKELEEIITELNKENRDLIRRLREINKRSREELEELIRDLDRRRRDEEVKRVADEIKRLADESNEKVRRVVRRIDELNKEVDRKLKEVMKEIKKELEDAERRVR

SEQ ID NO: 12259 - protein, 184 aa, Artificial Sequence; identical to SEQ ID NO: 12258
  Synthetic

SEQ ID NO: 12260 - protein, 184 aa, Artificial Sequence
  Synthetic
DELEEVLRRVRKIIEENKEIVRRVLEDVKRSVEELERHTERVLREAKRLADELEDARRKIERKEDLARLVEEVKREVTRLIKENKDKIRKVNEDNRKLIEELKKINDDSKRTIDELIRDLDRRRRDEEVKRVAKELRELLERSNREVRRVVEEIKKLNDEVRKKSEEMRRRIEKLLEELERKVK

SEQ ID NO: 12261 - protein, 184 aa, Artificial Sequence; identical to SEQ ID NO: 12260
  Synthetic

SEQ ID NO: 12262 - protein, 184 aa, Artificial Sequence
  Synthetic
SDLEEVLRRAEKLIEDLERIVRKVLEDSDRSIDEVRRHTEKVLRDVRKLAEELKDIARKTSRKEDLRRIVEEVKREVKELIKDNRRLLERVNRENEKILRELRKIVEKVKRDVERLLDALDKRSRTEEVKRVIDEIRDRLRKAEERVRKVIEDIKRKNKKLREDSEKAEREIDELLRKVEEDVK

SEQ ID NO: 12263 - protein, 184 aa, Artificial Sequence; identical to SEQ ID NO: 12262
  Synthetic

SEQ ID NO: 12264 - protein, 184 aa, Artificial Sequence
  Synthetic
SELEEVLERVKDLLKKLKEHSDRVLEESKESIDRVRKHTEEVLRTARELIERLDEMRKRTSDKKDLKDLVEKVRKTVEDLLRENEELLRRVNDRNRKLIERNRDLLRKVATTVDRLIKELDKRSRTEEVKDVAREIRRRLDELRKDSERVAEEIRRLNKKLRDESRKAIKEIEELLRRVTKKVE

SEQ ID NO: 12265 - protein, 184 aa, Artificial Sequence; identical to SEQ ID NO: 12264
  Synthetic

SEQ ID NO: 12266 - protein, 184 aa, Artificial Sequence
  Synthetic
DELEEVLERVRKLIDELRKHSKEVLDTVRDLLRRHKKKNEDSLRTVRKLLTDLEDAVRKIERKEDLRRLIEDVKRKVEKIIRDNERHLREIEEEIRKLIEENRKLIEEVIRRIEELIKELDKRERDERVKRVAEEIKKLLEDLRKESEDVVKELEDLLDELRRRTEKVVREIEELLKRLEERVK

SEQ ID NO: 12267 - protein, 184 aa, Artificial Sequence; identical to SEQ ID NO: 12266
  Synthetic

SEQ ID NO: 12268 - protein, 177 aa, Artificial Sequence
  Synthetic
SEVERVERRLEKVIEEDKERTKRVEREVEDSNKKDDDLTREVLDRVRKSARDVERKLEEGKDEELLRRVLARHEEKNKKLEDDLRESTRRNAEEIKRLKKEIKESTDRTRRELEDLERKLDSREALRRLRELVKKLEDDNRRVLRRLDKLLDDVRKKNEEAMRESRDLSRKVAEKIR

SEQ ID NO: 12269 - protein, 177 aa, Artificial Sequence; identical to SEQ ID NO: 12268
  Synthetic

SEQ ID NO: 12270 - protein, 177 aa, Artificial Sequence
  Synthetic
DEVREVEKRVRESNERDKKLLREVLEEVRRSDKDDDDRTRKVLKRVEKAAEEVKRLLEKGEDRELLERVLDKLRRFIEKLKKELKESDKENEDRIRDLKRRLEESNKRNDDTIKDLERKLRSEDVIRKLRKSLKEVKDDSRRVLKELDDSLRETHKRNRDAMRRLDELLEEVARRIK

SEQ ID NO: 12271 - protein, 177 aa, Artificial Sequence; identical to SEQ ID NO: 12270
  Synthetic

SEQ ID NO: 12272 - protein, 178 aa, Artificial Sequence
  Synthetic
DEIEEIKRRIEKSSEDDKRVLRELEARAREIRKELDERVKRLEKRIKELLERLRKLKEDNRDLTEALRDLERVLEEIKRRLEEVARELKERLDEIADESRRTVEEDRRRLEELKRRVGDDRDVRRVLEEWKRLSRKNEEENKAVIEKLRALLEDLKRRLKEVLKRIAELVKKIADELK

SEQ ID NO: 12273 - protein, 178 aa, Artificial Sequence; identical to SEQ ID NO: 12272
  Synthetic

SEQ ID NO: 12274 - protein, 179 aa, Artificial Sequence
  Synthetic
RESEELRREIEKISRENKELVRRLEEAIKRLSDEDKELVERLRRETKKIADKVEDLLEKLKDVKEVVEKLLRDLKRLNDRVERESRESIKKLRDLVKKIKEASERSEREFEKLLEEIRRRRKEAEEVLREIKKIIDDNRRENREALERIKDIVRRNEEENEKALRESRKRTRELEERLR

SEQ ID NO: 12275 - protein, 179 aa, Artificial Sequence; identical to SEQ ID NO: 12274
  Synthetic

SEQ ID NO: 12276 - protein, 177 aa, Artificial Sequence
  Synthetic
SRVETIRKRVEDLIRRSEDLIRRLEEDVKRVVDEIRKLLEKLKEDDERVIRRIEDLLRKERSEEVEREIEELSKKSLDDARRVLEEIEKLARTITKEVERVLEENDRLIRKIEDEVRKINVDERVVEEIKERLDRSRRRTEEALERIRKRLEEVKKEVEDVLREVEKTNREIKKEVR

SEQ ID NO: 12277 - protein, 177 aa, Artificial Sequence; identical to SEQ ID NO: 12276
  Synthetic

SEQ ID NO: 12278 - protein, 177 aa, Artificial Sequence
  Synthetic
SRVDELRRRVEELLKRSKELLEEIKRRDEEVLRRIKELLDRLRERVDDALRKISELLTRERSEEVARRIRELLKEIEDDVRRVKKEIEDLSEDSKRKAEELLRRNEELVKRIDEEVKRINVDEEVVREIKKKLTESREDTKRLLEELKKTNDDIRKDVERLRREVEKKVRDIERRVK

SEQ ID NO: 12279 - protein, 177 aa, Artificial Sequence; identical to SEQ ID NO: 12278
  Synthetic

SEQ ID NO: 12280 - protein, 178 aa, Artificial Sequence
  Synthetic
SEVEKLLEEVRELTKRHKEELRRLNKEMEKATRDHLRKSKKLNDEAREMVRRVEELVKNNGDKDTILKTIEDVLRELEKRHKELLDTNRELLDRLRKEHDRLLKHNREVIEDVKRRLDETERAARVKEELDKLHKDLEREVRESKRTLKELHDRLRKAVEESKEHLKRLLDELRKKVK

SEQ ID NO: 12281 - protein, 178 aa, Artificial Sequence; identical to SEQ ID NO: 12280
  Synthetic

SEQ ID NO: 12282 - protein, 178 aa, Artificial Sequence
  Synthetic
DEVERLLEEVRRVVKEIEDRSRKLNEDARRVTEDHLRKSEELNRRVEDAVRRIRELTKNNGDKDKILEDLERLVREVLKAHDELLRTNRELLEEIKRRHDELLRTAEEIIRRVEERLDETEEARKIRETLKRLLDELRKKLEESKKHLDELHDRLRRELEKSKRHLEELLKRLEDELR

SEQ ID NO: 12283 - protein, 178 aa, Artificial Sequence; identical to SEQ ID NO: 12282
  Synthetic

SEQ ID NO: 12284 - protein, 178 aa, Artificial Sequence
  Synthetic
SELERLLEKARRDTERHLRESERLNRELKKATDDHLRKSRELNKRLEEVVRRVEEESRNNGDKDELLKRLEELVRRLKEEHERLLRTNRELLRRLTEEHERLLKHNRDLLKDIRDKLEKTREAKKVEDDLRDLHRRLKEAVDRSKKHLEDLHKELEDELKRSIDHLRKLLEEVKRKLD

SEQ ID NO: 12285 - protein, 178 aa, Artificial Sequence; identical to SEQ ID NO: 12284
  Synthetic

SEQ ID NO: 12286 - protein, 178 aa, Artificial Sequence
  Synthetic
SRVEDLLRRVREVVKRVKKDLTKLLEEVKRMTDEHLKRSKELNDRAEEIVRRLKELLDRRGDKDEILRRIEEVAKRLTEEHKRLLKTNKEVLDEVRKELERLLDELREIIERVKRELDDTERAREVVERLDELLKEVADRVEEVKDRLRKLHRKLEESVKKSLEHIKRLIDDLRRKAK

SEQ ID NO: 12287 - protein, 178 aa, Artificial Sequence; identical to SEQ ID NO: 12286
  Synthetic

SEQ ID NO: 12288 - protein, 178 aa, Artificial Sequence
  Synthetic
RELEKLLEDARRVVTTLTRASEKLNEDVKKVTEEHKDRIRRLLDTVRRIVEEVDKRTKGKGDKEKLLRELEKAIRDVERKLEELLKTNEELLREVKKKHDELLRTITEVMKEIAERLKKTEEARKVKEELDRLLEDLRKKLEDSKRHLDELHRELEETVREVSERLKELLDAVRRRAK

SEQ ID NO: 12289 - protein, 178 aa, Artificial Sequence; identical to SEQ ID NO: 12288
  Synthetic

SEQ ID NO: 12290 - protein, 178 aa, Artificial Sequence
  Synthetic
SELEKLLKDVADMVREITERSKKLNDELKKLTEDHDRKIKRLNERLEEIIREVEKLVDDNGDKDRILARVEKLVEEAKRAHDDLLRTNKEMVDDLKRRHDELLRRIDEIIKDARRKLSETDEARKVAERLKELLDRLRRKLEESKRHADELHERLRKSVEDSKKHIKDLVDELKRRVD

SEQ ID NO: 12291 - protein, 178 aa, Artificial Sequence; identical to SEQ ID NO: 12290
  Synthetic

SEQ ID NO: 12292 - protein, 178 aa, Artificial Sequence
  Synthetic
SRVEELLKRLEDATRRHLEVSKRLNDDLRRATKDHLDKLRELNERVKKVVDDVVEKIKSNGDKDKLLRDAEELVRRVKKRHDELLKTNEDLLRRLEELHKRLLDHNRELLREIKERLDDTEEAREVRERLDRLHEELEKEVRRSEKTLKELHDRLRKEVERSKRHLDELLKDLEDKVR

SEQ ID NO: 12293 - protein, 178 aa, Artificial Sequence; identical to SEQ ID NO: 12292
  Synthetic

SEQ ID NO: 12294 - protein, 178 aa, Artificial Sequence
  Synthetic
SRVEKLVREVEKVVEEVERTIRKLLEDVKEMTDRHLKMIEDLNRELEEIVRRVTELIKNNGDKDRILEEVEKAVEEVDRRHKRLLETNKEIIDEVKKRLDDLLRRLRKIADEVRKRLDDTDEARKVKKRITELVERVEREVDRVKKELEKLHERLKREVEKSSEHIKRLLDELRKRAE

SEQ ID NO: 12295 - protein, 178 aa, Artificial Sequence; identical to SEQ ID NO: 12294
  Synthetic

SEQ ID NO: 12296 - protein, 178 aa, Artificial Sequence
  Synthetic
RELEEILRRVKEVTKDHLDKIDELNKRLDKATKEHLERLRDLNRRLKEVVERIEEEIRNNGDKKKILERLERVIRELRKRHKDLLDTNRKLLEELRKRHKELLDHNREVVERVEEELKETREADKVRKDIRRLHEELAREVKKSEDHLRKLHEELRDEVRRSEEHLDALLEDLKRKVD

SEQ ID NO: 12297 - protein, 178 aa, Artificial Sequence; identical to SEQ ID NO: 12296
  Synthetic

SEQ ID NO: 12298 - protein, 178 aa, Artificial Sequence
  Synthetic
SELEKLLRDMEEATKRHDEMLKKLNDEIRKVVERILKELEDLNRRLEEIVRRLKEESKNNGDKDRILEEIRRVVRELEERHDRIEEEIRRVLERLEREHERLLEHNRELLEDIKRRLSKTEEADDVRRRLERLHRELRKSVETSKKHLKELLDRLAKSIEDSKKHARELLKRLEEDIK

SEQ ID NO: 12299 - protein, 178 aa, Artificial Sequence; identical to SEQ ID NO: 12298
  Synthetic

SEQ ID NO: 12300 - protein, 178 aa, Artificial Sequence
  Synthetic
SEVEELLDRVRKVVEDLMRESKRLNDELKKIVDDILRRLRELNKEIKDVVDEIKKLLDNNGDKDEILKTIKKVLEDLKRKHDELLKRITEVVEDLKRKHDRLLEEAEKVIEDVERKLDKTEEADKARKDLKRLLDRLRREVERSKEEMDKLLEDLERAVRESEKHLEKLLRDLERRAR

SEQ ID NO: 12301 - protein, 178 aa, Artificial Sequence; identical to SEQ ID NO: 12300
  Synthetic

SEQ ID NO: 12302 - protein, 178 aa, Artificial Sequence
  Synthetic
SRLEELLKRLDDIVKRVLTKIRELNERLKKIVEELLRRSEELNREVRRVAEEIRRLEEGNGDKDKILDEIRRILKRLKEEHERLLKEAKEVVDKLRRDHEELLRELKEAADDAERKADDTDKARDVRRTIRKLVRDVAEAVRRSTEHIDKLLEDLEREVRRSERDIERILRELEEEAR

SEQ ID NO: 12303 - protein, 178 aa, Artificial Sequence; identical to SEQ ID NO: 12302
  Synthetic

SEQ ID NO: 12304 - protein, 178 aa, Artificial Sequence
  Synthetic
SDVEKLLEDVRRMTEEHKELIKELNERVERIVRKVVEDSKKLNDELREIVKRVEDESRNNGDKDKLLKELRDVVRELKKRHDDLLRDAERVIEEAKRRHDELLKHNKELIDDVKRRLQETEEAARVREDLDRLHEELERFVRESKKHLDEMLKELRRRLERSKEEIDRLVKEAEEKLR

SEQ ID NO: 12305 - protein, 178 aa, Artificial Sequence; identical to SEQ ID NO: 12304
  Synthetic

SEQ ID NO: 12306 - protein, 175 aa, Artificial Sequence
  Synthetic
REVEEVLKEVKKIVDRNREELKRVLDEIRELVKRIEDDLRRVNEESEKLVRTLLELMRRGELREEEIRKIIEDIERKYRELERKVEEIIKEIEERITRLEEKNRRNLEDIRRLLDEINAPEEVRERIERLIEKSERDVREVKKKVEELARRLREEVEKLKKHVKRLLEELKKAAD

SEQ ID NO: 12307 - protein, 175 aa, Artificial Sequence; identical to SEQ ID NO: 12306
  Synthetic

SEQ ID NO: 12308 - protein, 179 aa, Artificial Sequence
  Synthetic
SEAEDALRKIKKLVDEVVERIKKVDDDSRKLVEEVERTIEKLDKESEDLVKKVKDMKRRGDVREKDIKRVIDTSRELVKKLKEDVDRVVEEIKDLNRKLNEDVKRVMDEIRELLKELEKRGVLREEVKKEVKRLLEELKRRLDESNKRNKRLIDELRKKLEDSRRRNEELLRDLKETAT

SEQ ID NO: 12309 - protein, 179 aa, Artificial Sequence; identical to SEQ ID NO: 12308
  Synthetic

SEQ ID NO: 12310 - protein, 179 aa, Artificial Sequence
  Synthetic
DEAEEVERRSRELVERAKTEIEKLDRESKRLVDTVARKIEEVDKRSEELVRTVEELRRRGDAREEKIKKVIEDSKELVRKLKEIVKKVIREIEKLNDELNKEVERLSKESEDLLKKLREDGILREEVEKENRELNRRLKEALDESNKRNRTLLEDLRRKLRESEERNRRLLRKLEEDAR

SEQ ID NO: 12311 - protein, 179 aa, Artificial Sequence; identical to SEQ ID NO: 12310
  Synthetic

SEQ ID NO: 12312 - protein, 179 aa, Artificial Sequence
  Synthetic
SEAEEALKKVEELVRRVEEEIKRVDERSKDLVRRVERKLEELVERSKELVKRLLDMRRRGDIREEEIERVSRESKRLLDEAEKDVRRVVREIEKLNEDLNRRVDKVAKEIRDLVRDLKRRGVLREDVERRVRELIERLKRKLEESNRRNKKLIDELRKRLEEVKRENEKLNEDLERETK

SEQ ID NO: 12313 - protein, 179 aa, Artificial Sequence; identical to SEQ ID NO: 12312
  Synthetic

SEQ ID NO: 12314 - protein, 179 aa, Artificial Sequence
  Synthetic
DELERVLKRVKELIDKSRREDEELDERSKELVKKVLDELKDALRKIEKLVRDLKEMTDRGDIREEEIKRVAKEIEELLEELERRVRKVTEEIDRLNKESHERNRRVAEEIKRLLDELKRRGVIREEVRKDAERLIRENEEDNRRSNERNKKILKELKDALDRVKEEVRKLIRRLEEEAR

SEQ ID NO: 12315 - protein, 179 aa, Artificial Sequence; identical to SEQ ID NO: 12314
  Synthetic

SEQ ID NO: 12316 - protein, 179 aa, Artificial Sequence
  Synthetic
SEAETVLEEVKKLVERSREEDKEVDDESRELVERVEEKLRRVLKKSKEDVDRVMRLIEEGKVREKVIEEVSRTSEKLLRDLEETVRRVVKRIEELNRESHERNRRLEEDIRRLADELRKRGVLTEEVEDTIRRLIEENKKRNEESNRRNRELIKKLERKLEEVKRRNEDLNRKLEETAR

SEQ ID NO: 12317 - protein, 179 aa, Artificial Sequence; identical to SEQ ID NO: 12316
  Synthetic

SEQ ID NO: 12318 - protein, 176 aa, Artificial Sequence
  Synthetic
STLEEAEEEVRRLIKRTEDETRRVADEVKKLLDKHRRATEDVEKKVRELLDRLKKDEKDEDVRRVEERVRELLEELKRTSERIAEEVTRLLEELERSSRRVVEENERLLEELKRLTDDREIEKIVRRAKETNEENREIIERILKEIKELIDDANRKLKEILDRIRELVETVKRKAK

SEQ ID NO: 12319 - protein, 176 aa, Artificial Sequence; identical to SEQ ID NO: 12318
  Synthetic

SEQ ID NO: 12320 - protein, 176 aa, Artificial Sequence
  Synthetic
STLEEVERRIRELLDRHRRATEEVEKEVDRLNKETRDELDRVRKEIEKLLKDLDRKERDEEVKDVERRVRELLKEAEKIVRDLERENKRLLDELRKTSKEIAKRVTDLLEDLRRLTDDEELRRILKRVEKLVKDLNDKLRKILDDARRSNEEIKRRLEEILKEVKRLVDTVTERAR

SEQ ID NO: 12321 - protein, 176 aa, Artificial Sequence; identical to SEQ ID NO: 12320
  Synthetic

SEQ ID NO: 12322 - protein, 175 aa, Artificial Sequence
  Synthetic
SRIERAEEELKRSLKELREDLERVVRTIRKILREHEEKSKDVKRRIEELLREVKKRMVKDREILRELEERVRKIEEDLERISDELRKVAERVIEEAKRLVDEDADRIRKIIELLRAGKDVDKVLRDVEDLNRTTLKLLEDLLRTVEEVVRRADKLLEDLLREIKRLVDEVMERDR

SEQ ID NO: 12323 - protein, 175 aa, Artificial Sequence; identical to SEQ ID NO: 12322
  Synthetic

SEQ ID NO: 12324 - protein, 175 aa, Artificial Sequence
  Synthetic
SEIEEIEKEIRKSVEEVKKTLDKVVTEIRKSTREHEKKSEEVRKRSKELNKDLRDRLVRDEKILKEVEDRSREMNDRLRKLSERNRKLNEDLIRRLEELVKRDKERVEDVERKLRAGKDVKTVLDDVRRVNEETKKRIRDLLEESKRSDEEADRRAEELLERNERLVRKVAEEAR

SEQ ID NO: 12325 - protein, 175 aa, Artificial Sequence; identical to SEQ ID NO: 12324
  Synthetic

SEQ ID NO: 12326 - protein, 175 aa, Artificial Sequence
  Synthetic
SRIEEVIRRAREILEDHRRKSTEVRERLKKLLKEHEDKSRRVKEESEKINRDVKRELVRDRKILEELKRRSDRLNEELDRLSKDVADKIRELIKELKRISDDLKRRIEEIIEMLRRGKDVDKVLKEIEDLVRKADELLRELLKRVEDLVRRADEVLEELLRRNRKLAEDVMRKDK

SEQ ID NO: 12327 - protein, 175 aa, Artificial Sequence; identical to SEQ ID NO: 12326
  Synthetic

SEQ ID NO: 12328 - protein, 175 aa, Artificial Sequence
  Synthetic
REIEEVEKEIKKLLDEHRKKSDDVVRKLEKILRDHERRTEDVKRESEKINREVEKRKVRDREILTDLKRRSKELNDRLDKLSRELAERIKELIKRLRDLSRRVAEVVREVRKLLRAGKDVDEVLERVRELLERADRKLEELLERVRKLVEDANRVIEEVLERNKRLADEAMKKDK

SEQ ID NO: 12329 - protein, 175 aa, Artificial Sequence; identical to SEQ ID NO: 12328
  Synthetic

SEQ ID NO: 12330 - protein, 175 aa, Artificial Sequence
  Synthetic
SRIEEIVKRIRDILKEHEDKSRRVVEDIKRSTEELKRALREVVERIKTILDDVRRRLVRDEKILRELEKRVREVIRKLEKLVEEDEDRDRELIERLKEISRTLRDVVRTVEKLLRDGKDVDKVLEDVRRVAKEADDRLEELLERSKKLNKETLDELERLLREVEELVKEVAERDR

SEQ ID NO: 12331 - protein, 175 aa, Artificial Sequence; identical to SEQ ID NO: 12330
  Synthetic

SEQ ID NO: 12332 - protein, 175 aa, Artificial Sequence
  Synthetic
SRIEEVSERVREILRRHEEKSREVVERIKKSTKELRDEVRKVRATSKEINDDVRRRLVRDDKILKELEKRSKELNDRLDELVRRDEELDRRLIEELKRLSDELRKELEDVDRKLKAGKDVDRVLERVEKMVRDADKRIDEVRKESERLNEETRRRIERLLRENKKLADEVAERAR

SEQ ID NO: 12333 - protein, 175 aa, Artificial Sequence; identical to SEQ ID NO: 12332
  Synthetic

SEQ ID NO: 12334 - protein, 175 aa, Artificial Sequence
  Synthetic
SRIERVEERMRELLDRHRETSKRVVEEIRKSTEEHKEKSERVVRESERLNREVERELVKDKDILRELKKRSKELNDELRKLSKDNEERNRELIRRLEELSKRVEDTIREVIKLLRAGKDVDRVLEEVERLVTEVNREIKELLERSKRSDKEADRRLEEVVKTNRELAERVARRAT

SEQ ID NO: 12335 - protein, 175 aa, Artificial Sequence; identical to SEQ ID NO: 12334
  Synthetic

SEQ ID NO: 12336 - protein, 175 aa, Artificial Sequence
  Synthetic
SEIEEVVRRLEELVKRVAEELKRVVDRIEDLLREHKDKSRRVEERSKEINEDVARRLVSDKDILRELEKESRRLNKELRELSERVEREIKKVIKEMEEMLKELEDRVREIIKLLRAGKDVKEVLERVKKLVDDLIRRLKKLLEDLKKLVDDADEEIKRVLEENEELARRAAERDT

SEQ ID NO: 12337 - protein, 175 aa, Artificial Sequence; identical to SEQ ID NO: 12336
  Synthetic

SEQ ID NO: 12338 - protein, 175 aa, Artificial Sequence
  Synthetic
SEIEDVVRRARELLERLRKRVREVVEDIRRSTEEHKEKSERVVKTSEELNKRLEDELVRDKDLLKKVKDESKKLNDELRRLSEENSKRNEELIKRIEKLVDDVAERIKEIEKMLRDGVDVDKVLEDVRRLVKEAVDRIDKILRDSRESDRRADEEIKKVLDRNRELVKKVADEDT

SEQ ID NO: 12339 - protein, 175 aa, Artificial Sequence; identical to SEQ ID NO: 12338
  Synthetic

SEQ ID NO: 12340 - protein, 175 aa, Artificial Sequence
  Synthetic
DEIERVEEEIRRLLEEHKKRSDEVVRRLEKLLKDHKEVTRKVVEESERINRDVERRLVRDERILKDLKDKSKELNDELRKLSEDVERMIKRLIEELRKLSKDVEDTIRELEKALKAGKDVKEVLERIRKLVKDVNKRLEEILEEVERLVRRANRRIEELLERNRRLVEEVARRDE

SEQ ID NO: 12341 - protein, 175 aa, Artificial Sequence; identical to SEQ ID NO: 12340
  Synthetic

SEQ ID NO: 12342 - protein, 175 aa, Artificial Sequence
  Synthetic
SEIEKVEEEIRRILEEHKRISDEVKRRVRKSTEEHEKRTEDVERRSREINEEVEARLVRDKDILRDLKRRSKELNDEARKLSKRNRETNTRLLEELDDISRELKERIERIEKMLKDGKDVEEVLRRIRKLAEEVNKELKRLLDESKESDDRLNKRLTEILRENEELARDVARRVK

SEQ ID NO: 12343 - protein, 175 aa, Artificial Sequence; identical to SEQ ID NO: 12342
  Synthetic

SEQ ID NO: 12344 - protein, 175 aa, Artificial Sequence
  Synthetic
SKEERIEEALRDLVRRHKEVSRRVVETIKDLAKKLEEKLRRVETDSKRINDEVRDKLVRDKDILRDLERRSRKLNEDLRRLLREIKERLRKIIEELKRLSKDVEDKVRELIKLLRDGVDVERVLEEIKKLVEEVNRELRELLKRIEELLKRAEEMLERLLRENRRLVEEVARRDK

SEQ ID NO: 12345 - protein, 175 aa, Artificial Sequence; identical to SEQ ID NO: 12344
  Synthetic

SEQ ID NO: 12346 - protein, 179 aa, Artificial Sequence
  Synthetic
SESEELDKEIDDIVREDEELNKELRKRNDDAVRRVEKVIEDLLRRNEDAAEKVKKLLEELKDVKEVLEKLIRDLERLHRETRELLERLIRELEELHERSKRESEKSIRKVKELLERIKERSKEVRELLRKLREILEDLRRKNERTEEESEEILRRLTKLAEEVLRRSRKILEDLREALR

SEQ ID NO: 12347 - protein, 179 aa, Artificial Sequence; identical to SEQ ID NO: 12346
  Synthetic

SEQ ID NO: 12348 - protein, 179 aa, Artificial Sequence
  Synthetic
SEKDELRKRMRDISKENKELLEKLEREIRELSKENEKLNEKLRRELEELRKTIKDLLDRLKDVKEVVEELLRRAERLLERIKELLDRSNKKLEELLRKVEEDLRRSNEKLETLLREIKERSKEARELLKEAKELLEENRKRNEEILRRAEKVLRDNAEKDKRTLEKVEEILDRLRRELT

SEQ ID NO: 12349 - protein, 179 aa, Artificial Sequence; identical to SEQ ID NO: 12348
  Synthetic

SEQ ID NO: 12350 - protein, 179 aa, Artificial Sequence
  Synthetic
KEAEDLEREMREISDRNRKLNKKLRRDIKEISDDNRRLLEELRRRLKKMEEDVRRLLEELKDDKDVVEELRKELEELVRRIEKDLRKSNEKLEKLLRDVEEALRDSNEKLERLLRKIKERSKEVRELLTEARKLLERNREEDKKSLDDARKALKENKEENDKIKEEIDKILRELEEELR

SEQ ID NO: 12351 - protein, 179 aa, Artificial Sequence; identical to SEQ ID NO: 12350
  Synthetic

SEQ ID NO: 12352 - protein, 179 aa, Artificial Sequence
  Synthetic
EESERLAKRVDDLSRENEELNKRLRDEMEKISRENKELLKDLRRKADKIVKDVERLLEELKDVDEVVRELKKRLEDLMDEIRKALKRSNEKLKKLLEDIKEALERSNRKLKELADDIRRRSKEARELTRRIEKLLKDNTDRDKKSEDDLRELLKENKKRNDEILEEIRRILEELRKKLT

SEQ ID NO: 12353 - protein, 179 aa, Artificial Sequence; identical to SEQ ID NO: 12352
  Synthetic

SEQ ID NO: 12354 - protein, 180 aa, Artificial Sequence
  Synthetic
SLDKEIERKVEEIERRLKESNDRLREKVDEIRRRSERLNTELNERVDRIAERIRRMKRDGTKDVEELVRKLAKELRELLKEVVERDEKLLRDLEKTAEEVIRENKRLLDELRKLVEDLKRAGSLEERLEEKIDRIIRELERRNDKSREELEKIIRELRERTKESEKRLEDIIRELEERTR

SEQ ID NO: 12355 - protein, 180 aa, Artificial Sequence; identical to SEQ ID NO: 12354
  Synthetic

SEQ ID NO: 12356 - protein, 180 aa, Artificial Sequence
  Synthetic
DADKRLRTDVRRIVEDLKRSNEELRRRSEEIAKRSDKLNKELNKKSKEIEERVKRMRDEGRKDVEELVKRLIEESRRLTEEVLKKDEELVRESRRLTEEVKKRNDKLLRELEKRLDELKKEGVITKDLEKELRDIIRELRERNRESEEEDERIIRELEKRTKDSEKRDDEILRELEREIR

SEQ ID NO: 12357 - protein, 180 aa, Artificial Sequence; identical to SEQ ID NO: 12356
  Synthetic

SEQ ID NO: 12358 - protein, 180 aa, Artificial Sequence
  Synthetic
SLVEKIAREVRKIKEDSKRLNDELNEKVRKAVEDLERSNRELEKRVREIEERVRRAETEGRKDVEELVKRLVDELRDVLEKVKRTNERLLRELERTAKEVSDRDRELVRRLRELVKDLKRKGSATKELEDDIERIIKELEELTRRSEEKLRETIERLEERNKETAERLERIIKELEERSK

SEQ ID NO: 12359 - protein, 180 aa, Artificial Sequence; identical to SEQ ID NO: 12358
  Synthetic

SEQ ID NO: 12360 - protein, 180 aa, Artificial Sequence
  Synthetic
KEAEELEERVKRIEEESRRLNRELNEKVKDIAKKLEDSNDKLRKDSEEIAERVKRARTEGRKDVEKLVDKLIKESEKLTEEVKRENKRLMDELRELLKKVKDDDRELLERLRKLVKDLRREGSIKDEVVKKLEDIIREIEKTTRESEKRLEDIIRKLKKKNDDTEREDREIVKRLREETK

SEQ ID NO: 12361 - protein, 180 aa, Artificial Sequence; identical to SEQ ID NO: 12360
  Synthetic

SEQ ID NO: 12362 - protein, 182 aa, Artificial Sequence
  Synthetic
SLLEKLERDVERLSEEDEKLNEDVRRVDREIVERDKKLNREVNERVKRLAEEVKDIRRRVKDDETAKRLLDKVAEEIKELAKRLEEESRKLVRESEELVKRLERMSEELVKEIERLVKKLKDEGKLRERAEERLRRIIKRNKEENERTAKESRDSIEELKERNERSKRRLEKILEDLERETR

SEQ ID NO: 12363 - protein, 182 aa, Artificial Sequence; identical to SEQ ID NO: 12362
  Synthetic

SEQ ID NO: 12364 - protein, 182 aa, Artificial Sequence
  Synthetic
REAEELEKRVRKIEREDDKLNEELNRRAKDVSREDKELNDRVREVVRRLVEEVDRIRRDVKDKRDAREKVREIMDRIRRLLEELKRRSDELAKELRELLEELERRSKKLVDEIKEVVRKLKEDGKLREELEKKLEDIIRELKKRNDESAERIRRLIKTNEDENRRTAEEIKKILDDIRRKVK

SEQ ID NO: 12365 - protein, 182 aa, Artificial Sequence; identical to SEQ ID NO: 12364
  Synthetic

SEQ ID NO: 12366 - protein, 186 aa, Artificial Sequence
  Synthetic
SELEEIRKKIDDLRRRVEEINERITREDKRLVDELKEINKRITDRVRKIARDVEELLRKGEPKSRVKKMLDDAERELRRLLKELREMHERIVETSKELNERLREVHKRIAEEAKKLVDELRREGGRDEERLRTVDEEVKKILDELREKLDRNRRRSEETNRRLDELLKENARRVEEIIRRLREEVK

SEQ ID NO: 12367 - protein, 186 aa, Artificial Sequence; identical to SEQ ID NO: 12366
  Synthetic

SEQ ID NO: 12368 - protein, 186 aa, Artificial Sequence
  Synthetic
SELEEIKKRVEEIARTLEKLNRDITKLDEDLAREVEDINRRITETVEEIAKRVERLREKGEPKEDVRRVLDEVEKELKKLLDELEKFHRDIMETSKDLLRRLREAHDRVIKELKDLVRELEREGGRDKERLDKLRTEVKKIMDDLRRILEKNAKDSKRSLDRLRKILEDNKEKVKRIADRLREAVR

SEQ ID NO: 12369 - protein, 186 aa, Artificial Sequence; identical to SEQ ID NO: 12368
  Synthetic

SEQ ID NO: 12370 - protein, 178 aa, Artificial Sequence
  Synthetic
KDEKRIKDVLKKLEDDNKKLNDEIKKLNEEIARKNEELNKRIEDMIRKAEREVDELKRNGADKEVLERILRRVKELIDRLTRALEDSLRESKRLSEELARALEESLRRIKEVIDRLREENKEAKEVDDEARRILEKLRRENERTKEESKEINEELEKRNRESVERIKEILRRLEEKLR

SEQ ID NO: 12371 - protein, 178 aa, Artificial Sequence; identical to SEQ ID NO: 12370
  Synthetic

SEQ ID NO: 12372 - protein, 181 aa, Artificial Sequence
  Synthetic
SEVERLLREVEKVLRRVVKRSRDLNEELKKRSKEHKETSERLNREMKRVLREVEKKIDETRDKETLDRLLREVEEVLKELKKRHDELLRHNKKVVDELKEEHKKLLKEAEDALREVKKELDKRGGVREVKKRLDELLKRLEREVRESEKRMDRSHEDVRREAERSKKELEELLKKLEDKVR

SEQ ID NO: 12373 - protein, 181 aa, Artificial Sequence; identical to SEQ ID NO: 12372
  Synthetic

SEQ ID NO: 12374 - protein, 181 aa, Artificial Sequence
  Synthetic
SEVEKILRDVEDATRRHKRTSEELNRRLEEVVRRVKEESKELNERLREVVKRVKEEIRKTTDKETLDRLAEELKRVVEDLKRRHEELLRRAEEVVKDLKRRHDELLRHNRRLLKEVKERLDDRGGVREVKKRIDELHDDLRRVMEASKERIDRILEDLRRVVERSKEELRKLLEDLKRTVD

SEQ ID NO: 12375 - protein, 181 aa, Artificial Sequence; identical to SEQ ID NO: 12374
  Synthetic

SEQ ID NO: 12376 - protein, 181 aa, Artificial Sequence
  Synthetic
SEVEELLKRVEEATERHKREIERLEDEIRKVLEDVDKRSKELNDHNRDVIEKIRERIERTRDKDTLKKLVDDLRELSERHKREHDRLLEEVKRVAEDIKRRIDELLRHNEELLRDVKRRLEERGGVREVKTELDKLHEDLKRTAEEVKKRLDDLLKELEKKVEESKTEIDRSLEELEKTAR

SEQ ID NO: 12377 - protein, 181 aa, Artificial Sequence; identical to SEQ ID NO: 12376
  Synthetic

SEQ ID NO: 12378 - protein, 177 aa, Artificial Sequence
  Synthetic
DEERRVKEELEKLLEDLRRTIKKVEEDSDRINKDLERVIRRSEREADKILEDLERAGVSEELLKRLEDLVKRIKETHEELLRRLKKSSDELREELERLLREIEKMVRDAEDVLRRNVSEEKLRELLERAKKLVEDIKRRLKELLDRHRDLVRRIKERSKELNKRLKDLIDEIKERAR

SEQ ID NO: 12379 - protein, 177 aa, Artificial Sequence; identical to SEQ ID NO: 12378
  Synthetic

SEQ ID NO: 12380 - protein, 177 aa, Artificial Sequence
  Synthetic
SSKDDLRRKIEKLLRDLERVIRESEKRSEEINRDLERTLKRIKEEADKILDKVRRGGVSEDLLRELEELVKKIERRLEELRKELEDSSRRLRETHERLRRDLERIVDELEKALRNNIDDRLLEKLLRELEKLIRRIEEESRKLNEEHEKLLKRIKDELKKLLDDLRRLAREIEERRR

SEQ ID NO: 12381 - protein, 177 aa, Artificial Sequence; identical to SEQ ID NO: 12380
  Synthetic

SEQ ID NO: 12382 - protein, 177 aa, Artificial Sequence
  Synthetic
KSTEDAKREIDKLLEELEETIRRAEDRSRRLNEDLARTLKRIEEELKRINEEVEKRGVSEKLLEDLRRSTEELKRSLRELLRRLEESSRRLKERAKRLLAELERIVEELKRALDDNISDELLKKLLDELRELIDRIRRDLERLLREHEELIERIKRTLEELLRRHRELVKRIEETAR

SEQ ID NO: 12383 - protein, 177 aa, Artificial Sequence; identical to SEQ ID NO: 12382
  Synthetic

SEQ ID NO: 12384 - protein, 177 aa, Artificial Sequence
  Synthetic
SEEDRLEEEIKRILDDVARVVKRIKEELKRINDELKKVIDESRDHARRVNDDVRRRGVSEELLRELKESTERNDELLKKLLKEAKESTETITRELDRLLEELKKIVDELRELLKKNISEELLKELLKRLEELARRIKKKLEELLREHEKLLEEIEKALRRSNEEHRKLVEKIKRDAT

SEQ ID NO: 12385 - protein, 177 aa, Artificial Sequence; identical to SEQ ID NO: 12384
  Synthetic

SEQ ID NO: 12386 - protein, 177 aa, Artificial Sequence
  Synthetic
DEEERVKEAVERLLRDLERAIKESEDHLRRLNEDLDRVIRESKEHLKKVNDDVRRAGVDKRLLDELKKSTEDNKKTADDLKRKLKRSTDENKKRLKRLEEELRRLVERLKEALRDNISEELLKKLLEELKRLIERIKRDLKRTNDEHEKLIREIKKRLEDSNRDHERLVKDIKETAR

SEQ ID NO: 12387 - protein, 177 aa, Artificial Sequence; identical to SEQ ID NO: 12386
  Synthetic

SEQ ID NO: 12388 - protein, 177 aa, Artificial Sequence
  Synthetic
SKEDRLREELKKLLKRLREEIERLKRALEESNKDLKRTIDRSEKHLRDVNEDVKRAGVSEELLRELERSTRENKERAKELLKRHEDLVRKVEKELRDLLRRLEEIVRRVDEMLKRNIREEELDKLLKEARDLIREIEKRLEELLKRVEKLTEDAKRDLERSNREHKELADRIKETAR

SEQ ID NO: 12389 - protein, 177 aa, Artificial Sequence; identical to SEQ ID NO: 12388
  Synthetic

SEQ ID NO: 12390 - protein, 177 aa, Artificial Sequence
  Synthetic
SEAERIEEEARRLLEELRRAIERVKEEADRLLEELRDAIRKSKEHLKRLNEDVERAGVEERLLDALRKSTEDNERLLRDLLRKLEEAVRRLEEEARRLLKEAEEIVREIKKVLDNNVSEEALKRLLEKLKRLIEEIKRELKRLLDDLKRLIDEIAEALKRSNDRHEELVRRIKEKAR

SEQ ID NO: 12391 - protein, 177 aa, Artificial Sequence; identical to SEQ ID NO: 12390
  Synthetic

SEQ ID NO: 12392 - protein, 177 aa, Artificial Sequence
  Synthetic
DSKEEIRRKIDELLKRLEETIRRSEEHFRRSLDDARKELKRSRDHVRKVNKELRDRGVSEELLKEAERSTRENEKLLKELEERLKRHLEENKKIADKLLEELERLVRRLREVLKKNVDDEELERLLRDLERLIREIEKTLEDTNRSNEELVRRLKRRLEESNKRHEDLADEIRRRTD

SEQ ID NO: 12393 - protein, 177 aa, Artificial Sequence; identical to SEQ ID NO: 12392
  Synthetic

SEQ ID NO: 12394 - protein, 177 aa, Artificial Sequence
  Synthetic
SEEDRIREEMEEILRRVERTVEEIKKELKKINDDVDRTARESEKHVREVLERVEREGVDKDLLDELRKIVEENKRLAKRLKDELRKSTKKIEDDLKRLLDELKRLVEEVDEALKRNISEELLEKLLEDLKRVVEKIRRDAEDLLERHKDLVRRIKEELRRSNRKLEDLVKKISERAT

SEQ ID NO: 12395 - protein, 177 aa, Artificial Sequence; identical to SEQ ID NO: 12394
  Synthetic

SEQ ID NO: 12396 - protein, 177 aa, Artificial Sequence
  Synthetic
DEDREVRRTLEELLDDLRRVIEESERHLEKLNEDVREAIRRSEEHVRRVLDRVRRGGVNEKLLEELDKIVKENRKLLEELLRRLEESTKRNRDEAKRLLEELADIVRRIEELLRDNISEDLLRKLLEEAKRVLDEIRKTLKKTNEDHERLVERIKRELEKSNKDLERLAKEIIDRDK

SEQ ID NO: 12397 - protein, 177 aa, Artificial Sequence; identical to SEQ ID NO: 12396
  Synthetic

SEQ ID NO: 12398 - protein, 177 aa, Artificial Sequence
  Synthetic
SSKEDITKKIEELLRELEEELKKSEKHLRELNEEAKRTAEESRRHLEESLRKVEKDGVDEDLLRKLEEHVRDNERRARKLLKDLKDSTDTNRRTAKRLLERLKELVERIKEMLKRNIDDEELKKLLKELEDLVKEIKERLRKTNEEHRKLVEEIKERLKRSNESNERLVRRIEEEAR

SEQ ID NO: 12399 - protein, 177 aa, Artificial Sequence; identical to SEQ ID NO: 12398
  Synthetic

SEQ ID NO: 12400 - protein, 179 aa, Artificial Sequence
  Synthetic
SELERAEEEIEKLNRDLKRTLDEIRDRIRKINDDLRKTLRKSDEDSKRLLKELRDEVPDLREVDDRIRKIIKENKDLARELKREAEDSSRDLERILREIEETVRDSSRKLKELLERDKESGEKLKDMLDKHRKLIDDLKRRLERRLREHKRLLDEIEKRLRDSLKRIEEIVREILERAR

SEQ ID NO: 12401 - protein, 179 aa, Artificial Sequence; identical to SEQ ID NO: 12400
  Synthetic

SEQ ID NO: 12402 - protein, 179 aa, Artificial Sequence
  Synthetic
DELERIRRELERINTTLDELLKRSKEETDRILKKVEDSIREVEKKVKELLEELKRRVPDLRKVEEDVKRVLDELRRRLRKLLEKLKRLADDNRRKLKELKDEAERSSREVERLLREKKESGELLKKILDEHRDLLRRIEEELRRSLEDIKRVAKEVEERIKKVLDELRRLIEELLRRAK

SEQ ID NO: 12403 - protein, 179 aa, Artificial Sequence; identical to SEQ ID NO: 12402
  Synthetic

SEQ ID NO: 12404 - protein, 185 aa, Artificial Sequence
  Synthetic
SVLEEAEKELRKIVEDNRRTLREVKERNKKLNKENRDTIKKIEDDVRRIIRELKEDLKRSEKDELRKELKEVEEEIRKLIKDAREHSDRVIRESKKLVEELERRTRELEERIKKLIKDIADRFGGGEEDLRRLEEEIRRRSEENKKRIRDLLRRSEELSRRDKKKLKEILERIKRLADEVREKIR

SEQ ID NO: 12405 - protein, 185 aa, Artificial Sequence; identical to SEQ ID NO: 12404
  Synthetic

SEQ ID NO: 12406 - protein, 186 aa, Artificial Sequence
  Synthetic
SDLEDILRKIEDLSRKNEEELKRVLEENKKLSDDDKRRLEKILREVEKKIRKIKKDIKDEKDKEKLRKKVEDLEREAKELVDDLRRHSEELSKRSEKSLRDVKKHSDDVAKRARELVKELVDRRGKETEEVRKLEEDVRRIIERNKKLTEDLARELKKLNDDNERTLRKVEEDIRRIIADLRRTLK

SEQ ID NO: 12407 - protein, 186 aa, Artificial Sequence; identical to SEQ ID NO: 12406
  Synthetic

SEQ ID NO: 12408 - protein, 186 aa, Artificial Sequence
  Synthetic
SELDEILERLRRLSEENKRRIEEALRRNKKLSEDDERLSREIRRRVRELVEEAKEVLRREKDKDKLRDKLERIVDELRKLLEDNTRHSRKVSEDSKESLKDLRRHSKEVIETLEKLLEELIRKDGEETEEVKRVAEELDKLVKENRRVTEKVARELKKLNDKNREVNERLERELDKIIKDLRRTDK

SEQ ID NO: 12409 - protein, 186 aa, Artificial Sequence; identical to SEQ ID NO: 12408
  Synthetic

SEQ ID NO: 12410 - protein, 186 aa, Artificial Sequence
  Synthetic
SEIEKILEDVKKLADDLRRTLKRALEENKELSDRDKEELRRILEEIKKLAEEIDKLIKEEKDKDTLRKKVKDLEERVRELIKRLERHSREVSKESERSIRELERLIDEIVKRMEELLEKAIRDKGKDTERVREVARRIEKIIEDLRRDLERVRRELKKLNDDNRRVLEEVKRTVEEIIKRLRESAK

SEQ ID NO: 12411 - protein, 186 aa, Artificial Sequence; identical to SEQ ID NO: 12410
  Synthetic

SEQ ID NO: 12412 - protein, 185 aa, Artificial Sequence
  Synthetic
DEVDELLKEAEEVIREVTREHKRLLDEARKISEENKKRSEESNREVRELVRRIKEEIKKGLPEEDLKRLLDELRDMIRKVRETNERSDKEVEKVVRDILRRLRELNKRVEEIIRRILKEIRRDVRDSEKAKRVEEELKKLLDKLSRITEEVERRLEELLKDNERVSRESDEELKRILEDVERDTR

SEQ ID NO: 12413 - protein, 185 aa, Artificial Sequence; identical to SEQ ID NO: 12412
  Synthetic

SEQ ID NO: 12414 - protein, 185 aa, Artificial Sequence
  Synthetic
SEVEELLDRLRKLIEDVVREHKRLLDEVRRISRENEELIRRLLEKVEEVIRRIKERIKSGQPEEVIKRILDEARRRLRKVLEEIKRSDEEVEKMLRDVLKTLKELNDRVREIIKDILKKIRDKVKDEKTAREAEEELRRLLERLSEVTRKVEKAIEDILRRNRETSERVAREIRRLLKELEDTAR

SEQ ID NO: 12415 - protein, 185 aa, Artificial Sequence; identical to SEQ ID NO: 12414
  Synthetic

SEQ ID NO: 12416 - protein, 185 aa, Artificial Sequence
  Synthetic
SSVEELLERLRRISEENKRRIEKLLREVEKVLRELKDRHRKLLKRVEEIIRKVKEEIKSGLPEEVVKRVLERVRERVKEVLEEADRLNDEMRRIVTEVEKELDKSDKEVEDMVRDILKKIEEEVRDRETAERARETLKRLLDENRDRSKKVKEEIRRILEDLTRTTERVKREIKKLLKELEDTAR

SEQ ID NO: 12417 - protein, 185 aa, Artificial Sequence; identical to SEQ ID NO: 12416
  Synthetic

SEQ ID NO: 12418 - protein, 178 aa, Artificial Sequence
  Synthetic
DLLRKLLEEAKKILKEIKDAHEKLLRELEESNKELEKAHRKLLEDAKRMLDDLKRTDPREDLLRKLEELVRRIKEESKRLNREHAELVRRIEEISRRLNEELRRLVKKIEEELRRKVDDEDRVRDLRRALEELIKESDEVSRRLKEEIDRSLESSKKVSRDLEEELKKLIKDLEDTRR

SEQ ID NO: 12419 - protein, 178 aa, Artificial Sequence; identical to SEQ ID NO: 12418
  Synthetic

SEQ ID NO: 12420 - protein, 178 aa, Artificial Sequence
  Synthetic
SELEKLLRDDRELLKELKKAHKKLLDELKESNDRVRKRHEELLRRIREIAKRLRDTDPREDLLRRLEELVRRIEEDSKRLNEEHKKLIEEIERRSRKLNEDHERLSREIRERLERRVDDKDKVRRVERESKKTHDESREVSEKLRRDAEDSLRSSEKLSEDLERELRKLIKEVRDEAK

SEQ ID NO: 12421 - protein, 178 aa, Artificial Sequence; identical to SEQ ID NO: 12420
  Synthetic

SEQ ID NO: 12422 - protein, 178 aa, Artificial Sequence
  Synthetic
KDIERLLEELKRILEDLKRKHKRLLERLEDSNRRIRRTLEELLKRLEKLVKDLSDTDPREDLLKELKRLIDEIRRRLEELIRRHEELLREIKERSDELNKRLEKLVREAIDRMRKRVDDKDKVDDAKRRLEELLKESREVSKKLRDDIERSIRSLREEVKKLDEDAKRLLDKVREEIR

SEQ ID NO: 12423 - protein, 178 aa, Artificial Sequence; identical to SEQ ID NO: 12422
  Synthetic

SEQ ID NO: 12424 - protein, 178 aa, Artificial Sequence
  Synthetic
SVLEDLIRRDREMLKRAKEEHDRLRKEIERSNREIDEEVKRLLAEIKKIVEEVSKTDPREDLLREAKRLLDKIKEDLKRLLDEHRKLLRRILEESRKLNEEHRRLSREVDELLRRRVSDKKAVDEVRKESDDTHKESEAVSRDLKRELERSIKSLEKRIREAEEELKRILKELEDEKR

SEQ ID NO: 12425 - protein, 178 aa, Artificial Sequence; identical to SEQ ID NO: 12424
  Synthetic

SEQ ID NO: 12426 - protein, 178 aa, Artificial Sequence
  Synthetic
EELERLLEEDKELVRRVERELERLLRELKRSNDEIKKTLEDLLRRIEEILKEIRRTDPREDLLRTLEDLIKKIKDELDRLIKEHRDLVEEIEREARRLLDEHRRLSKEIKDRLEKRVDDKEKVKRAEDRSRETHRRLEEVVKKLKEDAERSIKSLEELVDKLRKELRRLLEEVREEVR

SEQ ID NO: 12427 - protein, 178 aa, Artificial Sequence; identical to SEQ ID NO: 12426
  Synthetic

SEQ ID NO: 12428 - protein, 178 aa, Artificial Sequence
  Synthetic
RELEELIKEDEDLLRRLAETLKKLLEDVRRSNEELRKFHEDLLRDLERLLEELRNTEPREELLRKLEKMIRDIERIARELNDRHERLVEKIRETLRKLLEEHKELSDRIREKMEREVDDKEKVRRVEERSRRTHKELEDLAREVDKELKKSIKSSRDVTRKVKEDADRLLKKVADDTK

SEQ ID NO: 12429 - protein, 178 aa, Artificial Sequence; identical to SEQ ID NO: 12428
  Synthetic

SEQ ID NO: 12430 - protein, 178 aa, Artificial Sequence
  Synthetic
SILETLADRDRDMVRRVKEALKKLLERDKRALERLKRVHKELLDRLRKILEDLKRTEPREELLKRLEDLIREIEETARRLNKEHEDLSREVRKILKELLDRHRELSKEIKEIMDREVDDEEKVKRVEEESRRTHKELKDVADRVETESDKSHEESKKVTDEVRKELERLLRELEETVR

SEQ ID NO: 12431 - protein, 178 aa, Artificial Sequence; identical to SEQ ID NO: 12430
  Synthetic

SEQ ID NO: 12432 - protein, 178 aa, Artificial Sequence
  Synthetic
SEAEKLLRELEDILKKLKDALKRLIEEDERLLKRLKREHEKLLKRLEEVLRELKKTEPSEELLRELKKLIEDIEREAERLNAEHERLSREVEKTLRKLLTDLERLIREIKKKLDDRVDDREKVKRVKDEADRLLKELEDVVREVKKRSDESHKRSRDVTREMKKELKRLLEELEKTVR

SEQ ID NO: 12433 - protein, 178 aa, Artificial Sequence; identical to SEQ ID NO: 12432
  Synthetic

SEQ ID NO: 12434 - protein, 178 aa, Artificial Sequence
  Synthetic
SELERLLREDEEMVERVERVLKELEEEVRKALKRAKEMHRRLLERLKTILDELERKEPREDLLRELETLAEEIKRILEELNKELRKLLREIEEELKRLLKEHKELSDRIKKILEEKVDDKEKVKELERRSRKTHKELADKADTLRKRLEEVIKESEDVTEELERRLKKLIDDLRRSVT

SEQ ID NO: 12435 - protein, 178 aa, Artificial Sequence; identical to SEQ ID NO: 12434
  Synthetic

SEQ ID NO: 12436 - protein, 178 aa, Artificial Sequence
  Synthetic
SELEKLLRELEELLKELKRVLEELIERDKRLLDRLKEVHERLLRRLEKLLKELKDKEPREDLLRRLKELIDKIREDAERLNEEHRRLVEEVKKELDRLLRELEDLLRRIEDILRKRVDDEDKVREAKRELERLIEELRRAVRRVEDESRRSHEESKKVTDDLDKRARELLEELRETIR

SEQ ID NO: 12437 - protein, 178 aa, Artificial Sequence; identical to SEQ ID NO: 12436
  Synthetic

SEQ ID NO: 12438 - protein, 179 aa, Artificial Sequence
  Synthetic
REVEELEKDVRRTLDELRKRHRDNNERIKKILRELEDLHRRNNERTKTLLARIRELRERGGEDKERMVKTVEDILRESTRHSERVIRESERLLEEAKRHSEEVARRSKEVLKELEDKVRESRVPRELERKLKELVKDVEKVIEDDDRSADKLLTKVKRDADEDRKSNEKLVREVREELR

SEQ ID NO: 12439 - protein, 179 aa, Artificial Sequence; identical to SEQ ID NO: 12438
  Synthetic

SEQ ID NO: 12440 - protein, 179 aa, Artificial Sequence
  Synthetic
SEAEEVLKRVEEVVERLKKLHDDNNKKLRDAVRRLKRLHTEHNKETKEIKKEIEDLIRKGGEEKEKLVERVERLVKRSTDTLREVVRRTEKLLKEVEDHSRRVIEESKELVKEMEKRLRETDVSREVEKRLKEVVKRIDEVAEEDERSIREILRELRKVIEDDERSNRKVAKEIRESAK

SEQ ID NO: 12441 - protein, 179 aa, Artificial Sequence; identical to SEQ ID NO: 12440
  Synthetic

SEQ ID NO: 12442 - protein, 179 aa, Artificial Sequence
  Synthetic
DKVREVLERLKKLVEDLKRLHKRNNEEVRRVIEEIKDRSRRNNKRTEDILRDIEREIRRGGERKEELVKRVKELLEDSTRHSEEVVREVEEILREVKRHSEEVVKESERILREAKKRLDESDVDERIKEELKKLVEDVRRTAEDDRRTIEDLVRKVEEVLERDRKSNEEAARDVDRKLK

SEQ ID NO: 12443 - protein, 179 aa, Artificial Sequence; identical to SEQ ID NO: 12442
  Synthetic

SEQ ID NO: 12444 - protein, 181 aa, Artificial Sequence
  Synthetic
RSVEEVKKELDDSDRRDREVVKEARRRLEESKDRLRKIIERAKEELDKSDERIKKNGVSEELLRRLKEVSEEHRRELERLLRRLKEVTDEHTKAIKKIHEETKKVSDDHRRAVEELRKRGGVDEELKKLLKHNREVLEDSRRKIEELLRTNEKALEDVKRAIEELLKHNEEVLKEVDDRTR

SEQ ID NO: 12445 - protein, 181 aa, Artificial Sequence; identical to SEQ ID NO: 12444
  Synthetic

SEQ ID NO: 12446 - protein, 181 aa, Artificial Sequence
  Synthetic
KEVEDAEKRLRDLLKEDRELIERLRRALEESLKEDRKVIKELREELDKSDRKVEEDGVDERLLTELRKASEEHRRKLDEIHERTREETERHKERLDKIHEDTERVARELKKRIDELKKRGGRREDIKRLLEELEEVLRRSEKKLRELLDTNRKILEESKERLRRLLEHNKRVLRRVVEETR

SEQ ID NO: 12447 - protein, 181 aa, Artificial Sequence; identical to SEQ ID NO: 12446
  Synthetic

SEQ ID NO: 12448 - protein, 181 aa, Artificial Sequence
  Synthetic
SDEERVEKELKKSDDEDKKLIDELTRRLRESLKRLEEEVRRAREELDKSDEEVRKAGVSEELLTRLEKMSREHKKRIDDLLRRAKEVTERHERKLEEIHKRTKDMSDDHRRKIEDLRAKGGVREDIERLLDHNRKVLEKSADDLRKLLKTNEEILRRVAKAIRDLLEHNRRVVEEVKERAR

SEQ ID NO: 12449 - protein, 181 aa, Artificial Sequence; identical to SEQ ID NO: 12448
  Synthetic

SEQ ID NO: 12450 - protein, 181 aa, Artificial Sequence
  Synthetic
SEVEEAKRRLDESDKDDRRVIDKLRKELEKSREEAKRLIDRLREELKDSNREAEEAGIDEDLLRKLRKATDEHRRKIEDLLRELDRVTKEHKERIDKIHEETKEMSKRHKDELEKLRARGGSREDLRRLLEHNKEVLERSKKRLEELSETNKKFLEEVKDALRELLKTNREVLREVKERTK

SEQ ID NO: 12451 - protein, 181 aa, Artificial Sequence; identical to SEQ ID NO: 12450
  Synthetic

SEQ ID NO: 12452 - protein, 181 aa, Artificial Sequence
  Synthetic
SSVERAKRELDKSLKEDRDTIRDLKRRLEESRKRDREVIEELKKILKKLLDEVKDSGISKDLLKRIEDAVRTIEEELKRIHDDTERMTREHKERIERIHDRTKKVSDEHKKTIEDLKRKGGDDDKIKKLLDHNRKVLEDSKEELRRLLETNKRILEESKKRLDRLAEEIEKVARTVKEEAR

SEQ ID NO: 12453 - protein, 181 aa, Artificial Sequence; identical to SEQ ID NO: 12452
  Synthetic

SEQ ID NO: 12454 - protein, 181 aa, Artificial Sequence
  Synthetic
DEVERAEEELRKSDEEDRRVVKRATETLKKSKDELEREIKRLEDELERSNREVEERGVDKSLLEELEKVTRDHKKRLRDLLETVRRLTEDHLEKIKKIHEDTKRASEEHLKAIRELERRGGVREEIKKLLDHNRRVLEESERRIRELLRTNREVLERVKKELDELLEHNRRVLEEVEKRVR

SEQ ID NO: 12455 - protein, 181 aa, Artificial Sequence; identical to SEQ ID NO: 12454
  Synthetic

SEQ ID NO: 12456 - protein, 181 aa, Artificial Sequence
  Synthetic
SSVEKAKKRLDESDKTDRDVIKRLREELKKSEDTDRELVKKVKEEIEKVEEELRRRGIDESLLTELKRVAEEVKETIDDIHRKTKRVTEEHTKAADKIHEETKRASKEHKERIEELRKRGGDDDKIRRLLEHNEEVMKRSKERLDDLVRTNRKILEESKRKIEKLLKELREVVEEVDRRAR

SEQ ID NO: 12457 - protein, 181 aa, Artificial Sequence; identical to SEQ ID NO: 12456
  Synthetic

SEQ ID NO: 12458 - protein, 178 aa, Artificial Sequence
  Synthetic
DKAERVREEIEKLERELRRVLKESREHTKKLEEDLERVLRRSREATKKLKEDLERNNLPDEARKRADEILKRNEDLLRRIKKTMRDVLEENERLLDKIERDLREAIKRLEEVLRDKKDDGELIKRMLEELKRLLEELEKRIRDSNAELEKLLRDLIRKLERSLREIKRVLEELKEEAR

SEQ ID NO: 12459 - protein, 178 aa, Artificial Sequence; identical to SEQ ID NO: 12458
  Synthetic

SEQ ID NO: 12460 - protein, 184 aa, Artificial Sequence
  Synthetic
SEVETLMREIKKLIDDIKRKNEDSNREIREVSRKTEEDLRDLLRKAREVAEKLKDELRRRKDKDVVERVRRLVDELRRRMEDLVRKVKEINDRLRRLVEELVKDSERLARDLERRVRSLARKIDDEEKVKRLEDSLERLKRDLRKIIKENEDELRKINRRNEELIKKAEEDLRRLSEDLKRAEK

SEQ ID NO: 12461 - protein, 184 aa, Artificial Sequence; identical to SEQ ID NO: 12460
  Synthetic

SEQ ID NO: 12462 - protein, 180 aa, Artificial Sequence
  Synthetic
SELEEVLRRIEKLVRKAHKENEDVLREIERLVRTAHRLNKKVDDDSAKIAEDLKREKREDKDKVEEMLRRLRELYRRLEEENRRILREIEELVKELEKRNREILKELEDLVKDAERKDKDGTERVRRLKEILERLKEEVRRSLEELRKEVERLKKEVEDSLRELKKSLEEWVKDLEEATR

SEQ ID NO: 12463 - protein, 180 aa, Artificial Sequence; identical to SEQ ID NO: 12462
  Synthetic

SEQ ID NO: 12464 - protein, 180 aa, Artificial Sequence
  Synthetic
SDLEAVLDEIKKLAEEAHKRNEEVDKESAKLVKEAHKVNEDVDKESAEIVKRIDEEKKEDRDKVRTMIRELKKKYEDVARRNKKILDELEEKYDRLRKDNDRILDEIRRKVEDVERKDKDGTERVKRLKDELRRLLKEVKDSLEELDRMLEEWKERVRRSLEELRKRAKEWEDKLRESLR

SEQ ID NO: 12465 - protein, 180 aa, Artificial Sequence; identical to SEQ ID NO: 12464
  Synthetic

SEQ ID NO: 12466 - protein, 180 aa, Artificial Sequence
  Synthetic
SELEDVLKKIRKLVRDAHEENKRVLEEIRKTVDEIRKELEDVDTKSAEIAERAKERKKDDKDKVRRLLEELEKLYRRLIEKVEDILRRIEEKVRDVERRNREILERLRELVERLAKEDKDGKERVERLRRELEKLVREVEESLKRLKEELDKIKEELRRILEELEEKLRRWSRELKETAR

SEQ ID NO: 12467 - protein, 180 aa, Artificial Sequence; identical to SEQ ID NO: 12466
  Synthetic

SEQ ID NO: 12468 - protein, 180 aa, Artificial Sequence
  Synthetic
SELEKVVEDLRRIVEEIERRLREVIKEIRELVRRAHERNKDVDRKSAEIVKDIEEKKKEDKDKVREMVRRLEELYRKLVEENEDILRRIEKKVRDAVETVERLIKEMRKIVEKVARDDKDGTERVERLKRALDELERRLKELVRELEDSLKKLADEVKRSLEELDKSLKDWKKKLDDELK

SEQ ID NO: 12469 - protein, 180 aa, Artificial Sequence; identical to SEQ ID NO: 12468
  Synthetic

SEQ ID NO: 12470 - protein, 180 aa, Artificial Sequence
  Synthetic
SEIERVLEEIKERVERADRKNEKVDRESAEKVKELHRRNEEVDRESAETVKRAERDKKDDRDKLRDVLRRLEERYKRLEDENKRLLKELRERYERLKKENKDILKKIRDDLRELARRDKDGTDKVREIRERVERLVKAVDESLERLERSLEEWARRLDKSLEDLKRSLKRWKEELDRKAQ

SEQ ID NO: 12471 - protein, 180 aa, Artificial Sequence; identical to SEQ ID NO: 12470
  Synthetic

SEQ ID NO: 12472 - protein, 180 aa, Artificial Sequence
  Synthetic
SELETLIKEATDLAEEVKEDLRRVDEESAKLVEDADDENKRVDEESAKIVEDLKREKKDDDEKVRRVLKELEDKYRRLAERNKRILDELDKLYKELAKRVKEVLDRIREKVKDVEREDKDGTERIRDLKEKVRRLMEDVKRLLEELERSLERWKEKVRDSLEKLKKSLEEWAKELKDTSK

SEQ ID NO: 12473 - protein, 180 aa, Artificial Sequence; identical to SEQ ID NO: 12472
  Synthetic

SEQ ID NO: 12474 - protein, 180 aa, Artificial Sequence
  Synthetic
KDLETVLEEIKRIVDDLDRRNKEVDKESAKLVKEADEKNKRVDEESAKIVKRLEREKKDDKDKVTEARRRLERTYREVDKDNKRILDELRRRYEELERRNEELLREIREKVERAAKKDKDGTDRVRRLREEVTKLLDEVRRSLDRLRESLKEWKERVDDSLRRLRDSLRKWKRKLEEATR

(The sequence listing continues in the following parts.)

We claim:

1. A method of increasing selectivity of a cell in vitro, ex vivo, or in vivo comprising
(a) contacting cells with a first cage polypeptide fused to a first binding domain, wherein the first cage polypeptide comprises (i) a structural region and (ii) a latch region further comprising one or more bioactive peptides, wherein the structural region interacts with the latch region to prevent activity of the one or more bioactive peptides in the absence of colocalization with a key polypeptide and wherein the first binding domain is capable of binding to a first cell moiety present on or within a cell; and
(b) contacting the cell with a first key polypeptide fused to a second binding domain, wherein upon colocalization with the first cage polypeptide, the first key polypeptide is capable of binding to the cage structural region to activate the one or more bioactive peptides, wherein the second binding domain is capable of binding to a second cell moiety present on or within the cell,
wherein the first cell moiety and the second cell moiety are different or the same.

2. The method of claim 1, wherein the first cell moiety and the second cell moiety are different.

3. The method of claim 1, wherein the first cell moiety and the second cell moiety are the same.

4. The method of claim 3, wherein the colocalization of the first cage polypeptide and the first key polypeptide increases selectivity of an effector toward a cell comprising the first cell moiety and the second cell moiety.

5. The method of any one of claims 1 to 4, wherein the contacting (a) and contacting (b) are performed concurrently or sequentially.

6. The method of any one of claims 1 to 5, wherein the first cell moiety and the second cell moiety are in close proximity to each other; optionally wherein:
(a) the first cell moiety and the second cell moiety are colocalized as a result of directly or indirectly forming a complex; and/or
(b) the first cell moiety and the second cell moiety are colocalized as a result of being expressed in sufficient numbers in the same subcellular compartment.

7. The method of any one of claims 1 to 6, wherein the first cell moiety and/or the second cell moiety are present at least about 100 copies per cell, at least about 200 copies per cell, at least about 500 copies per cell, at least about 1000 copies per cell, at least about 1500 copies per cell, at least about 2000 copies per cell, at least about 2500 copies per cell, at least about 3000 copies per cell, at least about 3500 copies per cell, at least about 4000 copies per cell, at least about 4500 copies per cell, at least about 5000 copies per cell, at least about 5500 copies per cell, at least about 6000 copies per cell, at least about 6500 copies per cell, or at least about 7000 copies per cell.

8. The method of any one of claims 1 to 7, further comprising allowing the first cage polypeptide and the first key polypeptide to colocalize, thereby forming a complex and activating the one or more bioactive peptides.

9. The method of any one of claims 1 to 8, wherein the first cell moiety and the second cell moiety are present on the surface of the cell.

10. The method of any one of claims 1 to 8, wherein the first cell moiety and the second cell moiety are present within the cytoplasm of the cell.

11. The method of any one of claims 1 to 8, wherein the first cell moiety and the second cell moiety are present within the nucleus of the cell.

12. The method of any one of claims 1 to 11, further comprising contacting the cells with a second key polypeptide fused to a third binding domain, wherein upon colocalization with the first cage polypeptide, the second key polypeptide is capable of binding to the cage structural region to activate the one or more bioactive peptides, wherein the third binding domain is capable of binding to a third cell moiety present on or within the cell that also comprises the first cell moiety, wherein the third cell moiety is different from the first cell moiety or the second cell moiety; and optionally, further comprising a third key polypeptide, a fourth key polypeptide, a fifth key polypeptide, a sixth key polypeptide, or a seventh key polypeptide, wherein one or more of the third, fourth, fifth, sixth, or seventh key polypeptides are fused to a binding domain, wherein the binding domain is capable of binding to a cell moiety present on or within the cell that comprises the first cell moiety.

13. The method of any one of claims 1-11, wherein
(i) the first key polypeptide comprises a third binding domain, wherein the second binding domain and/or the third binding domain bind to (i) different moieties than the first binding domain on the surface of the same cell, or (ii) different moieties than the first binding domain at the synapse between two cells that are in contact, wherein upon colocalization with the first cage polypeptide, the first key polypeptide is capable of binding to the cage structural region to activate the one or more bioactive peptides, wherein the third binding domain is capable of binding to a third cell moiety present on or within the cell that also comprises the first cell moiety, wherein the third cell moiety is different from the first cell moiety or the second cell moiety; and/or
(ii) further comprising contacting the cells with at least a second cage polypeptide comprising (A) a second structural region, (B) a second latch region further comprising one or more bioactive peptides, and (C) a sixth binding domain, wherein the second structural region interacts with the second latch region to prevent activity of the one or more bioactive peptides, wherein the first key and/or the second key polypeptide ae capable of binding to the second structural region to activate the one or more bioactive peptides, and wherein the sixth binding domain and/or the first binding domain bind to (I) different moieties than the second binding domain, third binding domain and/or fourth binding domain on the surface of the same cell, or (II) different moieties than the second binding domain, third binding domain and/or fourth binding domain at the synapse between two cells that are in contact; wherein upon colocalization with the first cage or the second cage polypeptide, the first key polypeptide is capable of binding to the first cage or the second cage structural region to activate the one or more bioactive peptides.

14. The method of any one of claims 1 to 11, further comprising contacting a second key polypeptide fused to a third binding domain with the cells comprising a second cell that also comprises a first cell moiety, wherein upon colocalization with the first cage polypeptide, the second key polypeptide is capable of binding to the cage structural region to activate the one or more bioactive peptides, wherein the third binding domain is capable of binding to a third cell moiety present on or within the second cell.

15. The method of any one of claims 1 to 11 or 14, further comprising contacting the cells with a third key polypeptide fused to a fourth binding domain, wherein upon colocalization with the first cage polypeptide, the third key polypeptide is capable of binding to the cage structural region to activate the one or more bioactive peptides, wherein the third binding domain is capable of binding to a third cell moiety present on or within the cell that also comprises the first cell moiety, wherein the third cell moiety is different from the first cell moiety or the second cell moiety.

16. The method of claim 15, further comprising contacting the cells with a fourth key polypeptide, a fifth key polypeptide, a sixth key polypeptide, or a seventh key polypeptide, wherein one or more of the fourth, fifth, sixth, or seventh key polypeptides are fused to a binding domain, wherein the binding domain is capable of binding to a cell moiety present on or within the cell.

17. The method of any one of claims 1 to 16, further comprising contacting the cells with one or more decoy cage polypeptide fused to one or more binding domains (“decoy binding domain”), wherein each decoy cage polypeptide comprises a decoy structural region, which upon colocalization with the first key polypeptide and the first cage polypeptide, is capable of preferentially binding to the first key polypeptide and wherein the each decoy binding domain is capable of binding to a cell moiety (“decoy cell moiety”) in the cell that comprises the first cell moiety and/or the second cell moiety.

18. The method of claim 17, wherein each decoy cell moiety is present only on a healthy cell.

19. The method of claim 17 or 18, wherein upon colocalization with the first key polypeptide, the decoy cage polypeptide binds to the first key polypeptide and wherein the one or more bioactive peptides in the first cage polypeptide are not activated.

20. A method of increasing selectivity of cells that are interacting with each other in vitro, ex vivo, or in vivo comprising:
(a) contacting two or more cells with a first cage polypeptide fused to a first binding domain, wherein the first cage polypeptide comprises (i) a structural region and (ii) a latch region further comprising one or more bioactive peptides, wherein the structural region interacts with the latch region to prevent activity of the one or more bioactive peptides in the absence of colocalization with a key polypeptide and wherein the first binding domain is capable of binding to a first cell moiety present in a synapse between the two or more cells; and
(b) contacting the two or more cells with a first key polypeptide fused to a second binding domain, wherein upon colocalization with the first cage polypeptide, the first key polypeptide is capable of binding to the cage structural region to activate the one or more bioactive peptides, wherein the second binding domain is capable of binding to a second cell moiety present in the synapse between the two or more cells,
wherein the first cell surface moiety and the second cell surface moiety are the same or different.

21. The method of claim 20, wherein the first cell moiety and the second cell moiety are in close proximity to each other.

22. The method of claim 20 or 21, further comprising allowing the first cage polypeptide and the first key polypeptide to colocalize, thereby forming a complex and activating the one or more bioactive peptides.

23. The method of any one of claims 20 to 22, wherein the first cell moiety and the second cell moiety are different or the same.

24. The method of any one of claims 20 to 23, wherein the contacting (a) and contacting (b) are performed concurrently or sequentially.

25. The method of any one of claims 20 to 24, further comprising contacting a second key polypeptide fused to a third binding domain with a synapse of two or more cells that also comprise a first cell moiety, wherein upon colocalization with the first cage polypeptide, the second key polypeptide is capable of binding to the cage structural region to activate the one or more bioactive peptides, wherein the third binding domain is capable of binding to a third cell moiety present in the synapse of the two or more cells.

26. The method of any one of claims 20 to 25, further comprising contacting the two or more cells with one or more decoy cage polypeptide fused to one or more decoy binding domain with the two or more cells, wherein each decoy cage polypeptide comprises a decoy structural region, which upon colocalization with the first key polypeptide and the first cage polypeptide, is capable of preferentially binding to the first key polypeptide and wherein each decoy binding domain is capable of binding to a decoy cell moiety present in the synapse of the two or more cells.

27. A method of targeting heterogeneous cells (more than two different cell types) in vitro, ex vivo, or in vivo, wherein a first cell moiety and a second cell moeity are present on the first cell and a first cell moiety and a third cell moiety am present on the second cell, comprising:
(a) contacting two or more cells with a first cage polypeptide fused w a first binding domain, wherein the first cage polypeptide comprises (i) a structural region and (ii) a latch region further comprising one or more bioactive peptides, and wherein the structural region interacts with the latch region to prevent activity of the one or more bioactive peptides in the absence of colocalization with a key polypeptide and wherein the first binding domain is capable of binding to a first cell moiety present on or within the two or more cells;
(b) contacting the two or more cells with a first key polypeptide fused to a second binding domain, wherein upon colocalization, the first key polypeptide is capable of binding to the cage structural region to activate the one or mom bioactive peptides and wherein the second binding domain is capable of binding to a second cell moiety present on a cell that also comprises the first cell moiety, and
(c) contacting the two or more cells with a second key polypeptide fused to a third binding domain, wherein upon colocalization, the second key polypeptide is capable of binding to the cage structural region to activate the one or more bioactive peptides and wherein the third binding domain is capable of binding to a third cell moiety present on a cell that comprises the first cell moiety,
wherein the first cell moiety, the second cell moiety, and the third cell moiety are different and the cell that comprises the second cell moiety and the cell that comprises the third cell moiety are different.

28. The method of claim 27, wherein the first key polypeptide and the second key polypeptide are identical.

29. The method of claim 27, wherein the first key polypeptide and the second key polypeptide are not identical.

30. The method of any one of claims 27 to 29, further comprising contacting the two or more cells with one or more decoy cage polypeptide fused to one or more decoy binding domain, wherein each decoy cage polypeptide comprises a decoy structural region, which upon colocalization with the first key polypeptide, the second key polypeptide, and/or the first cage polypeptide, is capable of preferentially binding to the first key polypeptide or the second key polypeptide and wherein each decoy binding domain is capable of binding to a decoy cell moiety in a cell that comprises the first cell moiety and the second cell moiety.

31. A method of reducing off-target activity in vitro, ex vivo, or in vivo comprising
(a) contacting two or more cells with a first cage polypeptide fused to a first binding domain, wherein the first cage polypeptide comprises (i) a structural region and (ii) a latch region further comprising one or more bioactive peptides, and wherein the structural region interacts with the latch region to prevent activity of the one or more bioactive peptides in the absence of colocalization with a key polypeptide and wherein the first binding domain is capable of binding to a first cell moiety present on a cell;
(b) contacting the two or mom cells with a first key polypeptide fused to a second binding domain, wherein upon colocalization, the first key polypeptide is capable of binding to the cage structural region to activate the one or more bioactive peptides and wherein the second binding domain is capable of binding to a second cell moiety present on a cell that also comprises the first cell moiety, and
(c) contacting the two or more cells with a decoy cage polypeptide fused to a third binding domain, wherein the decoy cage polypeptide comprises a decoy structural region, which upon colocalization with the key polypeptide and the first cage polypeptide, is capable of preferentially binding to the first key polypeptide and wherein the third binding domain is capable of binding to a third cell moiety present on a cell that comprises first cell moiety and the second cell moiety.

32. The method of claim 31, wherein the third cell moiety is only present on a healthy cell.

33. The method of any one of claims 1 to 32, wherein the first cage polypeptide comprises no more than 7 alpha helices, no more than 6 alpha helics, no more than 5 alpha helices, no more than 4 alpha helices, no more than 3 alpha helices, or no more than 2 alpha helices, wherein the structural region comprises at least one alpha helices and the latch region comprises at least one alpha helices.

34. The method of any one of claims 1 to 33, wherein the structural region of the first cage polypeptide comprises one alpha helix, two alpha helices, three alpha helices, four alpha helices, five alpha helices, or six alpha helices, and the latch region of the first key polypeptide comprises no more than one alpha helix.

35. The method of claim 17 to 19, and 26 to 34, wherein each decoy cage polypeptide comprises at least one alpha helix, at least two alpha helices, at least three alpha helices, at least four alpha helices, at least five alpha helices, at least six alpha helices, or at least seven alpha helices.

36. The method of any one of claims 17 to 19 and 26 to 35, wherein the binding affinity of the decoy cage polypeptide to a key polypeptide (e.g., K_{D}) is stronger (e.g., lower) than the binding affinity of the first cage polypeptide to a key polypeptide (e.g., K_{D}) by at least about 1.1 fold, at least about 1.5 fold, at least about 2 fold, at least about 3 fold, at least about 4 fold, at least about 5 fold, at least about 6 fold, at least about 7 fold, at least about 8 fold, at least about 9 fold, at least about 10 fold, at least about 20 fold, at least about 30 fold, at least about 40 fold, at least about 50 fold, at least about 60 fold, at least about 70 fold, at least about 80 fold, at least about 90 fold, at least about 100 fold, at least about 150 fold, at least about 200 fold, at least about 300 fold, at least about 400 fold, at least about 500 fold, at least about 600 fold, at least about 700 fold, at least about 800 fold, at least about 900 fold, or at least about 1000 fold.

37. The method of any one of claims 1 to 36, wherein the binding of the first cage polypeptide and the first key polypeptide in a solution is less efficient than the binding of the first cage polypeptide and the first key polypeptide when colocalized on or within the cell.

38. The method of any one of claims 1 to 37, wherein the colocalization of the first cage polypeptide and the first key polypeptide increases the local concentration of the first cage polypeptide and the first key polypeptide and shifts the binding equilibrium in favor of complex formation between the first cage polypeptide and the first key polypeptide.

39. The method of any one of claims 1 to 38, wherein the contacting includes introducing a polynucleotide encoding a polypeptide (e.g., the first cage polypeptide, the first key polypeptide, the second key polypeptide, and the decoy cage polypeptide).

40. The method of any one of claims 1 to 39, wherein the first cage polypeptide, the first key polypeptide, the second key polypeptide, and/or the decoy polypeptide are further modified to change (i) hydrophobicity, (ii) a hydrogen bond network, (iii) a binding affinity to each, and/or (iv) any combination thereof.

41. The method of any one of claims 1 to 40, wherein an interface between the latch region and the structural region of the first cage polypeptide includes a hydrophobic amino acid to polar amino acid residue ratio of between 1:1 and 10:1, e.g., 1:1, 2:1, 3:1, 4:1, 5:1, 6:1, 7:1, 8:1, 9:1, or 10:1.

42. The method of any one of claims 1 to 41, wherein the latch region is mutated to reduce the hydrophobicity.

43. The method of claim 42, wherein 1, 2, 3, or more large hydrophobic residues in the latch region, e.g., isoleucine, valine, or leucine, are mutated to serine, threonine, or a small hydrophobic amino acid residue, e.g., valine or alanine.

44. The method of any one of claims 1 to 43, wherein the first cage polypeptide comprises buried amino acid residues at the interface between the latch region and the structural region of the first cage polypeptide, wherein buried amino acid residues at the interface have side chains comprising nitrogen or oxygen atoms involved in hydrogen bonding.

45. The method of any one of claims 1 to 44, wherein the cells that the first cell moiety and/or the second cell moiety are present on or within comprise tumor cells, cancer cells, immune cells, leukocytes, lymphocytes, T cells, regulatory T cells, effector T cells, CD4+ effector T cells, CD8+ effector T cells, memory T cells, autoreactive T cells, exhausted T cells, natural killer T cells (NKT cells), B cells, dendritic cells, macrophages, NK cells, cardiac cells, lung cells, muscle cells, epithelial cells, pancreatic cells, skin cells, CNS cells, neurons, myocytes, skeletal muscle cells, smooth muscle cells, liver cells, kidney cells, bacterial cells, yeast cells, or any combination thereof.

46. The method of any one of claims 1 to 45, wherein one or more of the first, second, third, fourth, fifth, sixth, seventh, and/or decoy binding domains comprise an antibody or antigen binding portion thereof, Fab′, F(ab′)₂, Fab, Fv, rIgG, recombinant single chain Fv fragments (scFv), V_{H} single domains, bivalent or bispecific molecules, diabodies, triabodies, and tetrabodies, DARPins, nanobody, affibody, monobody, adnectin, alphabody, Albumin-binding domain, Adhiron, Affilin, Affimer, Affitin/Nanofitin, Anticalin, Armadillo repeat proteins, Atrimer/Tetranectin, Avimer/Maxibody, Centyrin, Fynomer, Kunitz domain, Obody/OB-fold, Pronectin, Repebody, computationally designed proteins, or any combination thereof.

47. The method of any one of claims 1 to 46, wherein one or more of the first, second, third, fourth, fifth, sixth, seventh, and/or decoy binding domains bind to a cell surface protein comprising Her2, EGFR, EpCAM, B7-H3, ROR1, GD2, GPC2, αvβ6, Her3, LICAM, BCMA, GPCR5d, EGFRvIII, CD20, CD22, CD3, CD4, CD5, CD8, CD19, CD27, CD28, CD30, CD33, CD48, IL3RA, platelet tissue factor, CLEC12A, CD82, TNFRSF1B, ADGRE2, ITGB5, CD96, CCR1, PTPRJ, CD70, LILRB2, LTB4R, TLR2, LILRA2, ITGAX, CR1, EMC10, EMB, DAGLB, P2RY13, LILRB3, LILRB4, SLC30A1, LILRA6, SLC6A6, SEMA4A, TAG72, FRα, PMSA, Mesothelin, LIV-1, CEA, MUC1, PD1, BLIMP1, CTLA4, LAG3, TIM3, TIGIT, CD39, Nectin-4, a cancer marker, a healthy tissue marker, a cardiac marker, or any combination thereof.

48. The method of any one of claims 1 to 47, wherein one or more of the cage polypeptides and the key polypeptides further comprises a linker connecting the cage or key polypeptide and the one or more binding domains.

49. The method of any one of claims 1 to 49, further comprising administering an effector to the cells.

50. The method of any one of claims 1 to 49, wherein the cells are present in vivo.

51. The method of any one of claims 1 to 49, wherein the cells are present in vitro or ex vivo.

52. The method of any one of claims 49 to 51, wherein the effector binds to the one or more bioactive peptides.

53. The method of claim 52, wherein the effector comprises an antibody or antigen binding fragment thereof, T cell receptor, DARPin, bispecific or bivalent molecule, nanobody, affibody, monobody, adnectin, alphabody, albumin binding domain, adhiron, affilin, affimer, affitin/nanofitin; anticalin; armadillo repeat protein; atrimer/tetranectin; avimer/maxibody; centyrin; fynomer; Kunitz domain; obody/OB-fold; pronectin; repebody; computationally designed protein, a protease, a ubiquitin ligase, a kinase, a phosphatase, and/or wherein the effector induces proteolysis.

54. The method of claim 53, wherein the antigen binding portion thereof comprises a Fab′, F(ab′)₂, Fab, Fv, rIgG, recombinant single chain Fv fragment (scFv), and/or V_{H} single domain.

55. The method of any one of claims 49 to 54, wherein the effector is a therapeutic cell.

56. The method of claim 55, wherein the therapeutic cell comprises an immune cell.

57. The method of claim 56, wherein the therapeutic cell comprises a T cell, a stem cell, an NK cell, a B cell, or any combination thereof.

58. The method of any one of claims 49 to 57, wherein
(a) the administering kills the cell that comprises the first binding moiety and the second binding moiety;
(b) the administering results in receptor signaling (e.g., cytokine) in the cell that comprises the first binding moiety and the second binding moiety;
(c) the administering results in production of signaling molecules (e.g., cytokine, chemokine) nearby the cell that comprises the first binding moiety and the second binding moiety; or
(d) the administering results in differentiation of the cell that comprises the first binding moiety and the second binding moiety.

59. A protein complex formed by any one of the methods 1 to 58.

60. A polynucleotide encoding the protein complex of claim 59.

61. A protein complex comprising (i) a first cage polypeptide fused to a first binding domain and (ii) a first key polypeptide fused to a second binding domain, wherein the first cage polypeptide comprises (i) a structural region and (ii) a latch region further comprising one or more bioactive peptides, wherein the first key polypeptide binds to the case structural region, wherein the one or more bioactive peptides are activated, and wherein the first binding domain binds to a first cell moiety present on or within a cell or on a synapse of two interacting cells and the second binding domain binds to a second cell moiety present on or within the cell or on a synapse of the two interacting cells, wherein the first cell moiety and the second cell moiety are different or the same.

62. A protein complex comprising (i) a first key polypeptide fused to a first binding domain and (ii) a decoy cage polypeptide fused to a second binding domain, wherein the first key polypeptide binds to the decoy cage polypeptide, and wherein the first binding domain binds to a first cell moiety present on or within a cell or on a synapse of two interacting cells and the second binding domain binds to a second cell moiety present on or within the cell or on a synapse of the two interacting cells, wherein the first cell moiety and the second cell moiety are different or the same.

63. A composition comprising
(a) a first cage polypeptide fused to a first binding domain or a polynucleotide encoding the same, wherein the first cage polypeptide comprises (i) a structural region and (ii) a latch region further comprising one or more bioactive peptides, wherein the structural region interacts with the latch region to prevent activity of the one or more bioactive peptides in the absence of colocalization with a key polypeptide and wherein the first binding domain is capable of binding to a first cell moiety present on or within a cell; and
(b) a first key polypeptide fused to a second binding domain or a polynucleotide encoding the same, wherein upon colocalization with the first cage polypeptide, the first key polypeptide is capable of binding to the cage structural region to activate the one or more bioactive peptides, wherein the second binding domain is capable of binding to a second cell moiety present on or within the cell,
wherein the first cell moiety and the second cell moiety are different or the same.

64. The composition of claim 63, wherein the first cell moiety and the second cell moiety are different.

65. The composition of claim 63, wherein the first cell moiety and the second cell moiety are the same.

66. The composition of claim 65, wherein the colocalization of the first cage polypeptide and the first key polypeptide increases selectivity of an effector toward a cell comprising the first cell moiety and the second cell moiety.

67. The composition of any one of claims 63 to 66, wherein the first cage polynucleotide and the first key polynucleotide are encoded on the same or different nucleic acid sequence.

68. The composition of any one of claims 63 to 67, wherein the first cell moiety and the second cell moiety are in close proximity to each other; optionally wherein:
(a) the first cell moiety and the second cell moiety are colocalized as a result of directly or indirectly forming a complex; or
(b) the first cell moiety and the second cell moiety are colocalized as a result of being present in sufficient numbers in the same subcellular compartment.

69. The composition of any one of claims 63 to 68, wherein the first cell moiety and/or the second cell moiety are present at least about 100 copies per cell, at least about 200 copies per cell, at least about 500 copies per cell, at least about 1000 copies per cell, at least about copies per cell, at least about 2000 copies per cell, at least about 2500 copies per cell, at least about 3000 copies per cell, at least about 3300 copies per cell, at least about 4000 copies per cell, at least about 4500 copies per cell, at least about 5000 copies per cell, at least about copies per cell, at least about 6000 copies per cell, at least about 600 copies per cell, or at least about 7000 copies per cell.

70. The composition of any one of claims 63 to 69, wherein the first cage polypeptide and the first key polypeptide are colocalized, thereby forming a complex and activating the one or more bioactive peptides.

71. The composition of any one of claims 63 to 70, wherein the first cell moiety and the second cell moiety are present on the surface of the cell.

72. The composition of any one of claims 63 to 70, wherein the first cell moiety and the second cell moiety are present within the cytoplasm of the cell.

73. The composition of any one of claims 63 to 70, wherein the first cell moiety and the second cell moiety are present within the nucleus of the cell.

74. The composition of any one of claims 63 to 73, further comprising a second key polypeptide fused to a third binding domain or a polynucleotide encoding the same, wherein upon colocalization with the first cage polypeptide, the second key polypeptide is capable of binding to the cage structural region to activate the one or more bioactive peptides, wherein the third binding domain is capable of binding to a third cell moiety present on or within the cell that also comprises the first cell moiety, wherein the third cell moiety is different from the first cell moiety or the second cell moiety.

75. The composition of claim 74, further comprising a third key polypeptide, a fourth key polypeptide, a fifth key polypeptide, a sixth key polypeptide, or a seventh key polypeptide, or a polynucleotide encoding the same, wherein one or more of the third, fourth, fifth, sixth, or seventh key polypeptides are fused to a binding domain, and wherein the binding domain is capable of binding to a cell moiety present on or within the cell that comprises the first cell moiety.

76. The composition of any one of claims 63 to 73, further comprising a second key polypeptide fused to a third binding domain or a polynucleotide encoding the same, wherein upon colocalization with the first cage polypeptide, the second key polypeptide is capable of binding to the cage structural region to activate the one or more bioactive peptides, and wherein the third binding domain is capable of binding to a third cell moiety present on or within a second cell that also comprises a first cell moiety.

77. The composition of any one of claims 63 to 73 or 76, further comprising a third key polypeptide fused to a fourth binding domain or a polynucleotide encoding the same, wherein upon colocalization with the first cage polypeptide, the third key polypeptide is capable of binding to the cage structural region to activate the one or more bioactive peptides, wherein the third binding domain is capable of binding to a third cell moiety present on or within the cell that also comprises the first cell moiety, and wherein the third cell moiety is different from the first cell moiety or the second cell moiety.

78. The composition of claim 77, further comprising a fourth key polypeptide, a fifth key polypeptide, a sixth key polypeptide, or a seventh key polypeptide, or a polynucleotide encoding the same, wherein one or more of the fourth, fifth, sixth, or seventh key polypeptides are fused to a binding domain, wherein the binding domain is capable of binding to a cell moiety present on or within the cell.

79. The composition of any one of claims 63 to 78, further comprising one or more decoy cage polypeptide fused to one or more binding domain (“decoy binding domain”) or a polynucleotide encoding the same, wherein each decoy cage polypeptide comprises a decoy structural region, which upon colocalization with the first key polypeptide and the first cage polypeptide, is capable of preferentially binding to the first key polypeptide and wherein each decoy binding domain is capable of binding to a cell moiety (“decoy cell moiety”) in the cell that comprises the first cell moiety and/or the second cell moiety.

80. The composition of claim 79, wherein each decoy cell moiety is present only on a healthy cell.

81. The composition of claim 79 or 80, wherein upon colocalization with the first key polypeptide, the decoy cage polypeptide binds to the first key polypeptide and wherein the one or more bioactive peptides in the first cage polypeptide are not activated.

82. The composition of any one of claims 63 to 81, wherein the first cage polypeptide comprises no more than 7 alpha helices, no more than 6 alpha helics, no more than 5 alpha helices, no more than 4 alpha helices, no more than 3 alpha helices, or no more than 2 alpha helices, wherein the structural region comprises at least one alpha helices and the latch region comprises at least one alpha helices.

83. The composition of any one of claims 63 to 82, wherein the structural region of the first cage polypeptide comprises one alpha helix, two alpha helices, three alpha helices, four alpha helices, five alpha helices, or six alpha helices, and the latch region of the first key polypeptide comprises no more than one alpha helix.

84. The composition of claim 79 to 83, wherein the decoy cage polypeptide comprises at least one alpha helix, at least two alpha helices, at least three alpha helices, at least four alpha helices, or at least five alpha helices.

85. The composition of any one of claims 79 to 84, wherein the binding affinity of the decoy cage polypeptide to a key polypeptide (e.g., K_{D}) is stronger (e.g., lower) than the binding affinity of the first cage polypeptide to a key polypeptide (e.g., K_{D}) by at least about 1.1 fold, at least about 1.5 fold, at least about 2 fold, at least about 3 fold, at least about 4 fold, at least about 5 fold, at least about 6 fold, at least about 7 fold, at least about 8 fold, at least about 9 fold, at least about 10 fold, at least about 20 fold, at least about 30 fold, at least about 40 fold, at least about 50 fold, at least about 60 fold, at least about 70 fold, at least about 80 fold, at least about 90 fold, at least about 100 fold, at least about 150 fold, at least about 200 fold, at least about 300 fold, at least about 400 fold, at least about 500 fold, at least about 600 fold, at least about 700 fold, at least about 800 fold, at least about 900 fold, or at least about 1000 fold.

86. The composition of any one of claims 63 to 85, wherein the binding of the first cage polypeptide and the first key polypeptide in a solution is less efficient than the binding of the first cage polypeptide and the first key polypeptide when colocalized on or within the cell.

87. The composition of any one of claims 63 to 86, wherein the colocalization of the first cage polypeptide and the first key polypeptide increases the local concentration of the first cage polypeptide and the first key polypeptide and shifts the binding equilibrium in favor of complex formation between the first cage polypeptide and the first key polypeptide.

88. The composition of any one of claims 63 to 87, wherein the first cage polypeptide, the first key polypeptide, the second key polypeptide, and/or the decoy polypeptide are further modified to change (i) hydrophobicity, (ii) a hydrogen bond network, (iii) a binding affinity to each, and/or (iv) any combination thereof.

89. The composition of any one of claims 63 to 88, wherein an interface between the latch region and the structural region of the first cage polypeptide includes a hydrophobic amino acid to polar amino acid residue ratio of between 1:1 and 10:1, e.g., 1:1, 2:1, 3:1, 4:1, 5:1, 6:1, 7:1, 8:1, 9:1, or 10-1.

90. The composition of any one of claims 63 to 89, wherein the latch region is mutated to reduce the hydrophobicity.

91. The composition of claim 90, wherein 1, 2, 3, or more large hydrophobic residues in the latch region, e.g., isoleucine, valine, or leucine, are mutated to serine, threonine, or a smaller hydrophobic amino acid residue or serine.

92. The composition of any one of claims 63 to 91, wherein the first cage polypeptide comprises buried amino acid residues at the interface between the latch region and the structural region of the first cage polypeptide, wherein buried amino acid residues at the interface have side chains comprising nitrogen or oxygen atoms involved in hydrogen bonding.

93. The composition of any one of claims 63 to 92, wherein the cells that the first cell moiety and/or the second cell moiety are present on or within comprise tumor cells, cancer cells, immune cells, leukocytes, lymphocytes, T cells, regulatory T cells, effector T cells, CD4+ effector T cells, CD8+ effector T cells, memory T cells, autoreactive T cells, exhausted T cells, natural killer T cells (NKT cells), B cells, dendritic cells, macrophages, NK cells, cardiac cells, lung cells, muscle cells, epithelial cells, pancreatic cells, skin cells, CNS cells, neurons, myocytes, skeletal muscle cells, smooth muscle cells, liver cells, kidney cells, bacterial cells, yeast cells, or any combination thereof.

94. The composition of any one of claims 63 to 93, wherein one or more of the first, second, third, fourth, fifth, sixth, seventh, and/or decoy binding domains comprise an antibody or antigen binding portion thereof, Fab′, F(ab′)₂, Fab, Fv, rIgG, recombinant single chain Fv fragments (scFv), V_{H} single domains, bivalent or bispecific molecules, diabodies, triabodies, and tetrabodies, DARPins, nanobody, affibody, monobody, adnectin, alphabody, Albumin-binding domain, Adhiron, Affilin, Affimer, Affitin/Nanofitin, Anticalin, Armadillo repeat proteins, Atrimer/Tetranectin, Avimer/Maxibody, Centyrin, Fynomer, Kunitz domain, Obody/OB-fold, Pronectin, Repebody, computationally designed proteins, or any combination thereof.

95. The composition of any one of claims 63 to 94, wherein one or more of the first, second, third, fourth, fifth, sixth, seventh, and/or decoy binding domains bind to a cell surface protein comprising Her2, EGFR, EpCAM, B7-H3, ROR1, GD2, GPC2, αvβ6, Her3, LICAM, BCMA, GPCR5d, EGFRvIII, CD20, CD22, CD3, CD4, CD5, CD8, CD19, CD27, CD28, CD30, CD33, CD48, IL3RA, platelet tissue factor, CLEC12A, CD82, TNFRSF1B, ADGRE2, ITGB5, CD96, CCR1, PTPRJ, CD70, LILRB2, LTB4R, TLR2, LILRA2, ITGAX, CR1, EMC10, EMB, DAGLB, P2RY13, LILRB3, LILRB4, SLC30A1, LILRA6, SLC6A6, SEMA4A, TAG72, FRα, PMSA, Mesothelin, LIV-1, CEA, MUC1, PD1, BLIMP1, CTLA4, LAG3, TIM3, TIGIT, CD39, Nectin-4, a cancer marker, a healthy tissue marker, a cardiac marker, or any combination thereof.

96. The composition of any one of claims 63 to 95, wherein one or more of the cage polypeptides and the key polypeptides further comprises a linker connecting the cage or key polypeptide and the one or more binding domains.

97. The composition of any one of claims 63 to 96, further comprising an effector.

98. A cell comprising the composition of any one of claims 63 to 96.

99. The cell of claim 98, further comprising an effector.

100. A method of preparing a subject in need thereof comprising administering the composition of any one of claims 63 to 96 to the subject.

101. The method of claim 100, wherein one or more cells of the subject exhibit activated one or more bioactive peptide.

102. A method of treating a disease or condition in a subject in need thereof comprising administering an effector to the subject, wherein the subject is also administered with the composition of any one of claims 63 and 96.

103. The method of any one of claims 99 or 102, wherein the effector binds to the one or more bioactive peptides.

104. The method of claim 103, wherein the effector comprises an antibody or antigen binding fragment thereof, T cell receptor, DARPin, bispecific or bivalent molecule, nanobody, affibody, monobody, adnectin, alphabody, albumin binding dmain, adhiron, affilin, affimer, affitin/nanofitin; anticalin; armadillo repeat protein; atrimer/tetranectin; avimer/maxibody; centyrin; fynomer; Kunitz domain; obody/OB-fold; pronectin; repebody; computationally designed protein, a protease, a ubiquitin ligase, a kinase, a phosphatase, an effector that induces proteolysis, or any combination thereof.

105. The method of claim 104, wherein the antigen binding portion thereof comprises a Fab′, F(ab′)₂, Fab, Fv, rIgG, recombinant single chain Fv fragment (scFv), and/or V_{H} single domain.

106. The method of any one of claims 99, 102, and 103, wherein the effector is a therapeutic cell.

107. The method of claim 106, wherein the therapeutic cell comprises an immune cell.

108. The method of claim 107, wherein the therapeutic cell comprises a T cell, a stem cell, an NK cell, a B cell, or any combination thereof.

109. The method of any one of claims 102 to 108, wherein
(a) the administering kills the cell that comprises the first binding moiety and the second binding moiety;
(b) the administering results in receptor signaling (e.g., cytokine) in the cell that comprises the first binding moiety and the second binding moiety;
(c) the administering results in production of signaling molecules (e.g., cytokine, chemokine) nearby the cell that comprises the first binding moiety and the second binding moiety; or
(d) the administering results in differentiation of the cell that comprises the first binding moiety and the second binding moiety.

110. A composition comprising
(a) a first cage polypeptide comprising (i) a structural region, (ii) a latch region further comprising one or more bioactive peptides, and (iii) a first binding domain wherein the structural region interacts with the latch region to prevent activity of the one or more bioactive peptides;
(b) a first key polypeptide capable of binding to the cage structural region to activate the one or more bioactive peptides, wherein the key polypeptide comprises a second binding domain,
wherein the first binding domain and the second binding domain bind to (i) different moieties on the surface of the same cell, (ii) the same moiety on the surface of the same cell, (iii) different moieties at the synapse between two cells that are in contact, or (iv) the same moiety at the synapse between two cells that are in contact; and
(c) optionally, one or more effector(s) that bind to the one or more bioactive peptides when the one or mom bioactive peptides are activated.

111. The composition of claim 110, wherein the first key polypeptide comprises a third binding domain, wherein the second binding domain and/or the third binding domain bind to (i) different moieties than the first binding domain on the surface of the same cell, or (ii) different moieties than the first binding domain at the synapse between two cells that are in contact.

112. The composition of claim 111, wherein the second binding domain and the third binding domain bind to different moieties on the surface of different cells.

113. The composition of any one of claims 110-112, further comprising:
(d) at least a second key polypeptide capable of binding to the first cage structural region, wherein the key polypeptide comprises a fourth binding domain,
wherein the second binding domain and/or the fourth binding domain bind to (i) different moieties than the first binding domain on the surface of the same cell, or (ii) different moieties than the first binding domain at the synapse between two cells that are in contact.

114. The composition of claim 113, wherein the second binding domain and the fourth binding domain bind to (i) different moieties on the surface of the same cell, or (ii) different moieties at the synapse between two cells that are in contact; or wherein the second binding domain and the fourth binding domain bind to different moieties on the surface of different cells.

115. The composition of any one of claims 110-114, wherein the first cage polypeptide further comprises a fifth binding domain, wherein the fifth binding domain and/or the first binding domain bind to (i) different moieties than the second binding domain, third binding domain and/or fourth binding domain on the surface of the same cell, or (ii) different moieties than the second binding domain, third binding domain and/or fourth binding domain at the synapse between two cells that are in contact.

116. The composition of claim 115, wherein the fifth binding domain and the first binding domain bind to (i) different moieties on the surface of the same cell, or (ii) different moieties at the synapse between two cells that are in contact.

117. The composition of any one of claims 110-116, further comprising:
(e) at least a second cage polypeptide comprising (i) a second structural region, (ii) a second latch region further comprising one or more bioactive peptides, and (iii) a sixth binding domain, wherein the second structural region interacts with the second latch region to prevent activity of the one or more bioactive peptides,
wherein the first key and/or the second key polypeptide are capable of binding to the second structural region to activate the one or more bioactive peptides, and
wherein the sixth binding domain and/or the first binding domain bind to (i) different moieties than the second binding domain, third binding domain and/or fourth binding domain on the surface of the same cell, or (ii) different moieties than the second binding domain, third binding domain and/or fourth binding domain at the synapse between two cells that are in contact.

118. The composition of claim 117, wherein the sixth binding domain and the first binding domain bind to (i) different moieties on the surface of different cells, or (ii) different moieties at the synapse between two cells that are in contact.

119. The composition of any one of claims 110-118, further comprising:
(f) one or more decoy cage polypeptide, each comprising (i) a decoy structural region, (ii) a decoy latch region optionally further comprising one or more bioactive peptides, and (iii) a seventh binding domain, wherein the decoy structural region interacts with the first key polypeptide and/or the second key polypeptide to prevent them from binding to the first and/or the second cage polypeptides, and wherein the seventh binding domain binds to a moiety on the surface of the same cell as the second binding domain, third binding domain, and/or fourth binding domain.

120. The composition of claim 119, wherein the seventh binding domain and the first binding domain and/or second binding domain bind to (i) different moieties on the surface of the same cell, or (ii) different moieties at the synapse between two cells that are in contact.

121. The composition of claim 119 or 120, wherein the seventh binding domain binds to a moicty that is present on the cell at an equal or higher level than the moieties to which the second binding domain, the third binding domain, and/or the fourth binding domain bind to.

122. The composition of any one of claims 110-121, wherein the first binding domain, the second binding domain, the third binding domain (when present), the fourth binding domain (when present), the fifth binding domain (when present), the sixth binding domain (when present), and/or the seventh binding domain (when present) comprise polypeptides capable of binding moieties present on the cell surface, including proteins, saccharides, and lipids; or comprise cell surface protein binding polypeptides.

123. A composition comprising
(a) one or more expression vectors encoding and/or cells expressing:
(i) a first cage polypeptide comprising (i) a structural region, (ii) a latch region further comprising one or more bioactive peptides, and (iii) a first binding domain wherein the structural region interacts with the latch region to prevent activity of the one or more bioactive peptides; and
(ii) a first key polypeptide capable of binding to the cage structural region to activate the one or more bioactive peptides, wherein the key polypeptide comprises a second binding domain,
wherein the first binding domain and the second binding domain bind to (i) different moieties on the surface of the same cell, (ii) the same moiety on the surface of the same cell, (iii) different moieties at the synapse between two cells that are in contact, or (iv) the same moiety at the synapse between two cells that are in contact; and
(b) optionally, one or more effector(s) that bind to the one or more bioactive peptides when the one or more bioactive peptides are activated, and/or one or more nucleic acids encoding the one or more effectors.

124. The composition of claim 123, wherein the first key polypeptide comprises a third binding domain, wherein the second binding domain and/or the third binding domain bind to (i) different moieties than the first binding domain on the surface of the same cell, or (ii) different moieties than the first binding domain at the synapse between two cells that are in contact.

125. The composition of claim 124, wherein the second binding domain and the third binding domain bind to different moieties on the surface of different target cells.

126. The composition of any one of claims 123-125, further comprising:
(c) an expression vector encoding and/or a cell expressing at least a second key polypeptide capable of binding to the first cage structural region, wherein the key polypeptide comprises a fourth binding domain,
wherein the second binding domain and/or the fourth binding domain bind to (i) different moieties than the first binding domain on the surface of the same cell, or (ii) different moieties than the first binding domain at the synapse between two cells that are in contact.

127. The composition of claim 126, wherein the second binding domain and the fourth binding domain bind to (i) different moieties on the surface of the same cell, or (ii) different moieties at the synapse between two cells that are in contact; or wherein the second binding domain and the fourth binding domain bind to different moieties on the surface of different cells.

128. The composition of any one of claims 123-127, wherein the first cage polypeptide further comprises a fifth binding domain, wherein the fifth binding domain and/or the first binding domain bind to (i) different moieties than the second binding domain, third binding domain, and/or fourth binding domain on the surface of the same cell, or (ii) different moieties than the second binding domain, third binding domain, and/or fourth binding domain at the synapse between two cells that are in contact.

129. The composition of claim 128, wherein the fifth binding domain and the first binding domain bind to (i) different moieties on the surface of the same cell, or (ii) different moieties at the synapse between two cells that are in contact.

130. The composition of any one of claims 123-129, further comprising:
(d) an expression vector encoding and/or a cell expressing at least a second cage polypeptide comprising (i) a second structural region, (ii) a second latch region further comprising one or more bioactive peptides, and (iii) a sixth binding domain, wherein the second structural region interacts with the second latch region to prevent activity of the one or more bioactive peptides,
wherein the first key and/or the second key polypeptide are capable of binding to the second structural region to activate the one or more bioactive peptides, and
wherein the sixth binding domain and/or the first binding domain bind to (i) different moieties than the second binding domain, third binding domain, and/or fourth binding domain on the surface of the same cell, or (ii) different moieties than the second binding domain, third binding domain, and/or fourth binding domain at the synapse between two cells that are in contact.

131. The composition of claim 130, wherein the sixth binding domain and the first binding domain bind to (i) different moieties on the surface of different cells, or (ii) different moieties at the synapse between two cells that are in contact.

132. The composition of any one of claims 123-131, further comprising:
(e) an expression vector encoding and/or a cell expressing a decoy cage polypeptide comprising (i) a decoy structural region, (ii) a decoy latch region optionally further comprising one or more bioactive peptides, and (iii) a seventh binding domain, wherein the decoy structural region interacts with the first key polypeptide and/or the second key polypeptide to prevent them from binding to the first and/or the second cage polypeptides, and wherein the seventh binding domain binds to a moiety on the surface of the same cell as the second binding domain, third binding domain, and/or fourth binding domain.

133. The composition of claim 132, wherein the seventh binding domain and the first binding domain and/or second binding domain bind to (i) different moieties on the surface of the same cell, or (ii) different moieties at the synapse between two cells that are in contact.

134. The composition of claim 132 or 133, wherein the seventh binding domain binds to a moiety that is present on the cell at an equal or higher level than the moieties to which the second binding domain, the third binding domain, and/or the fourth binding domain bind to.

135. The composition of any one of claims 123-134, wherein the first binding domain, the second binding domain, the third binding domain (when present), the fourth binding domain (when present) the fifth binding domain (when present), the sixth binding domain (when present), and/or the seventh binding domain (when present) comprise polypeptides capable of binding moieties present on the cell surface, including proteins, saccharides, and lipids; or comprise cell surface protein binding polypeptides.

136. The composition of any one of claims 110-134, wherein the effector(s) is/are present.

137. The composition of claim 136, wherein the effector(s) am selected from the non-limiting group comprising Bcl2, GFP1-10, small molecules, antibodies, antibody drug conjugates, immunogenic peptides, proteases, T cell receptors, cytotoxic agents, fluorophores, fluorescent proteins, cell adhesion molecules, endocytic receptors, phagocytic receptors, magnetic beads, and gel filtration resin, and polypeptides comprising an amino acid sequence at least 40%, 45%, 50%, 55%, 60%, 65%, 70%, 75%, 80%, 85%, 90%, 91%, 92%, 93%, 94%, 95%, 96%, 97%, 98%, 99%, or 100% identical to the amino acid sequence selected from the group consisting of SEQ ID NOS: 27460-27469.

138. The composition of any one of claims 110-137, wherein the first cage polypeptide, the second cage polypeptide, and/or the decoy cage polypeptide comprise:
(a) an amino acid sequence at least 40%, 45%, 50%, 55%, 60%, 65%, 70%, 75%, 80%, 85%, 90% 91%, 92%, 93%, 94%, 95%, 96%, 97%, 98%, 99%, or 100% identical to the amino acid sequence of a cage polypeptide disclosed herein, or selected from the group consisting SEQ IDS NOS: 27359-27392, 1-49, 51-52, 54-59, 61, 65, 67-14317, 27094-27117, 27120-27125, and 27278-27321 not including optional amino acid residues, or cage polypeptides listed in Table 7, Table 8, or Table 9, wherein the N-terminal and/or C-terminal amino acids of the polypeptides are optional; and
(b) one or more first, fifth, sixth, or seventh binding domains.

139. The composition of any one of claims 110-138, wherein the first cage polypeptide, the second cage polypeptide, and/or the decoy cage polypeptide comprise:
(a) an amino acid sequence at least 40%, 45%, 50%, 55%, 60%, 65%, 70%, 75%, 80%, 85%, 90%, 91%, 92%, 93%, 94%, 95%, 96%, 97%, 98%, 99%, or 100% identical to the amino acid sequence of selected from the group consisting SEQ IDS NOS: 27359-27392, not including optional amino acid residues; and
(b) one or more first, fifth, sixth, or seventh binding domains.

140. The composition of any one of claims 110-138, wherein the first cage polypeptide, the second cage polypeptide, and/or the decoy cage polypeptide comprise:
(a) an amino acid sequence at least 40%, 45%, 50%, 55%, 60%, 65%, 70%, 75%, 80%, 85%, 90% 91%, 92%, 93%, 94%, 93%, 96%, 97%, 98%, 99%, or 100% identical to the amino acid sequence selected from the group consisting SEQ IDS NOS: 27359-27392, including optional amino acid residues; and
(b) one or more first, fifth, sixth, or seventh binding domains.

141. The composition of any one of claims 110-140, wherein the first key polypeptide and/or the second key polypeptide comprise:
(a) a polypeptide comprising an amino acid sequence at least 40%, 45%, 50%, 55%, 60%, 65%, 70%, 75%, 80%, 85%, 90%, 91%, 92%, 93%, 94%, 95%, 96%, 97%, 98%, 99%, or 100% identical to the amino acid sequence selected from SEQ ID NOS: 14318-26601, 26602-27015, 27016-27050, 27322-27358, and key polypeptides listed in Table 7, Table 8, and/or Table 9, and SEQ ID NOS: 27393-27398; and
(b) one or more second, third, or fourth binding domains.

142. The composition of any one of claims 110-140, wherein the first key polypeptide and/or the second key polypeptide comprise:
(a) a polypeptide comprising an amino acid sequence at least 40%, 45%, 50%, 55%, 60%, 65%, 70%, 75%, 80%, 85%, 90%, 91%, 92%, 93%, 94%, 95%, 96%, 97%, 98%, 99%, or 100% identical to the amino acid sequence selected from the group consisting of SEQ ID NOS: 27393-27398, not including optional residues; and
(b) one or more second, third, or fourth binding domains.

143. The composition of any one of claims 110-140, wherein the first key polypeptide and/or the second key polypeptide comprise:
(a) a polypeptide comprising an amino acid sequence at least 40%, 45%, 50%, 55%, 60%, 65%, 70%, 75%, 80%, 85%, 90%, 91%, 92%, 93%, 94%, 95%, 96%, 97%, 98%, 99%, or 100% identical to the amino acid sequence selected from the group consisting of SEQ ID NOS: 27393-27398, including optional residues, and
(b) one or more second, third, or fourth binding domains.

144. The composition of any one of claims 110-140, wherein the first key polypeptide and/or the second key polypeptide comprise:
(a) a polypeptide comprising an amino acid sequence at least 40%, 45%, 50%, 55%, 60%, 65%, 70%, 75%, 80%, 85%, 90%, 91%, 92%, 93%, 94%, 95%, 9%, 97%, 98%, 99%, or 100% identical to the amino acid sequence selected from the group consisting of SEQ ID NOS: 27394-27395; and
(b) one or more second, third, or fourth binding domains.

145. The composition of any one of claims 110-144, wherein the one or more bioactive peptides comprise one or more bioactive peptide selected from the group consisting of SEQ ID NOS: 60, 62-64, 66, 27052, 27053, and 27059-27093.

146. The composition of any one of claims 110-145, wherein the first, second, third, fourth, fifth, sixth, and/or seventh binding domains are selected from the non-limiting group comprising an antigen-binding polypeptide directed against a cell surface moiety to be bound, including but not limited to Fab′, F(ab′)₂, Fab, Fv, rIgG, recombinant single chain Fv fragments (sFv), V_{H} single domains, bivalent or bispecific molecules, diabodies, triabodies, and tetrabodies; DARPins; nanobody; affibody; monobody; adnectin; alphabody; Albumin-binding domain; Adhiron; Affilin; Affimer; Affitin/Nanofitin; Anticalin; Armadillo repeat proteins; Atrimer/Tetranectin; Avimer/Maxibody; Centyrin; Fynomer; Kunitz domain; Obody/OB-fold; Pronectin; Repebody; and computationally designed proteins.

147. The composition of any one of claims 110-146, wherein the first, second, third, fourth, fifth, sixth, and/or seventh binding domains bind to a cell surface protein on a cell selected from the non-limiting group comprising tumor cells, cancer cells, immune cells, leukocytes, lymphocytes, T cells, regulatory T cells, effector T cells, CD4+ effector T cells, CD8+ effector T cells, memory T cells, autoreactive T cells, exhausted T cells, natural killer T cells (NKT cells), B cells, dendritic cells, macrophages, NK cells, cardiac cells, lung cells, muscle cells, epithelial cells, pancreatic cells, skin cells, CNS cells, neurons, myocytes, skeletal muscle cells, smooth muscle cells, liver cells, kidney cells, bacterial cells, and yeast cells.

148. The composition of any one of claims 110-147, wherein the first, second, third, fourth, fifth, sixth, and/or seventh binding domains bind to a cell surface protein selected from the non-limiting group comprising Her2, EGFR, EpCAM, B7-H3, ROR1, GD2, GPC2, αvβ6, Her3, LICAM, BCMA, GPCR5d, EGFRvIII, CD20, CD22, CD3, CD4, CD5, CD8, CD19, CD27, CD28, CD30, CD33, CD48, IL3RA, platelet tissue factor, CLEC12A, CD82, TNFRSF1B, ADGRE2, ITGB5, CD96, CCR1, PTPRJ, CD70, LILRB2, LTB4R, TLR2, LILRA2, ITGAX, CR1, EMC10, EMB, DAGLB, P2RY13, LILRB3, LILRB4, SLC30A1, LILRA6, SLC6A6, SEMA4A, TAG72, FRα, PMSA, Mesothelin, LIV-1, CEA, MUC1, PD1, BLIMP1, CTLA4, LAG3, TIM3, TIGIT, CD39, Nectin-4, a cancer marker, a healthy tissue marker, and a cardiac marker.

149. The composition of any one of claims 110-148, wherein the first, second, third, fourth, fifth, sixth, and/or seventh binding domains comprise an amino acid sequence at least 40%, 45%, 50%, 55%, 60%, 63%, 70%, 75%, 80%, 85%, 90%, 91%, 92%, 93%, 94%, 95%, 96%, 97%, 98%, 99%, or 100% identical to the amino acid sequence selected from the group consisting of SEQ ID NOS: 27399-27403.

150. The composition of any one of claims 110-149, wherein (i) the first cage polypeptide, the second cage polypeptide, and/or the decoy cage polypeptide; and (ii) the first and/or second key polypeptide, comprise at least one cage polypeptide and at least one key polypeptide comprising an amino acid sequence having at least 40%, 45%, 50%, 55%, 60%, 65%, 70%, 75%, 80%, 85%, 90%, 91%, 92%, 93%, 94%, 95%, 96%, 97%, 98%, 99%, or 100% identical to the amino acid sequence of a cage polypeptide and a key polypeptide, respectively, in the same row of Table 7, 8, or 9 (i.e.: each cage polypeptide in row 2 column of the table can be used with each key polypeptide in row 2 column 1 of the table, and so on), with the proviso that each cage polypeptide and each key polypeptide comprise a binding domain.

151. The composition of any one of claims 110-149, wherein the first cage polypeptide, the second cage polypeptide, and/or the decoy cage polypeptide comprise:
(a) an amino acid sequence at least 40%, 45%, 50%, 55%, 60%, 65%, 70%, 75%, 80%, 85%, 90%, 91%, 92%, 93%, 94%, 95%, 6%, 97%, 98%, 99%, or 100% identical to the amino acid sequence selected from the non-limiting group consisting of SEQ ID NOS: 27359-27392, and
(b) a binding domain comprising an amino acid sequence at least 40%, 45%, 50%, 55%, 60%, 65%, 70%, 75%, 80%, 85%, 90%, 91%, 92%, 93%, 94%, 95%, 96%, 97% 98%, 99%, or 100% identical to the amino acid sequence selected from the group consisting of SEQ ID NOS: 27399-27403.

152. The composition of claim 151, wherein the first cage polypeptide, the second cage polypeptide, and/or the decoy cage polypeptide comprise:
(a) an amino acid sequence at least 40%, 45%, 50%, 55%, 60%, 65%, 70%, 75%, 80%, 85%, 90%, 91%, 92%, 93%, 94%, 95%, 96%, 97%, 98%, 99%, or 100% identical to the amino acid sequence selected from the non-limiting group consisting of SEQ ID NOS: 27359-27392, including optional amino acid residues; and
(b) a binding domain comprising an amino acid sequence at least 40%, 45%, 50%, 55%, 60%, 65%, 70%, 75%, 80%, 85%, 90%, 91%, 92%, 93%, 94%, 95%, 96%, 97%, 98%, 99%, or 100% identical to the amino acid sequence selected from the group consisting of SEQ ID NOS: 27399-27403.

153. The composition of any one of claims 110-132, wherein the first key polypeptide and/or the second key polypeptide comprise:
(a) an amino acid sequence at least 40%, 45%, 50%, 55%, 60%, 65%, 70%, 75%, 80%, 85%, 90% 91%, 92%, 93%, 94%, 95%, 96%, 97%, 98%, 99%, or 100% identical to the amino acid sequence selected from the group consisting of SEQ ID NOS: 27393-27398; and
(b) a binding domain comprising an amino acid sequence at least 40%, 45% 50%, 55%, 60%, 65%, 70%, 75%, 80%, 85%, 90%, 91%, 92%, 93%, 94%, 95%, 96%, 97%, 98%, 99%, or 100% identical the amino acid sequence selected from the group consisting of SEQ ID NOS: 27399-27403.

154. The composition of claim 153, wherein the first key polypeptide and/or the second key polypeptide comprise:
(a) an amino acid sequence at least 40%, 45%, 50%, 55%, 60%, 65%, 70%, 75%, 80%, 85%, 90%, 91%, 92%, 93%, 94%, 95%, 96%, 97%, 98% 99%, or 100% identical to the amino acid sequence selected from the group consisting of SEQ ID NOS: 27393-27398, including optional amino acid residues; and
(b) a binding domain comprising an amino acid sequence at least 40%, 45%, 50%, 55%, 60%, 65%, 70%, 73%, 80%, 85%, 90%, 91%, 92%, 93%, 94%, 95%, 96%, 97% 98%, 99%, or 100% identical the amino acid sequence selected from the group consisting of SEQ ID NOS: 27399-27403.

155. The composition of claim 153, wherein the first key polypeptide and/or the second key polypeptide comprise:
(a) an amino acid sequence at least 40%, 45%, 50%, 55%, 60%, 65%, 70%, 75%, 80%, 85%, 90%, 91%, 92%, 93%, 94%, 95%,%, 97%, 98%, 99%, or 100% identical to the amino acid sequence selected from the group consisting of SEQ ID NOS: 0.27394-27395; and
(b) a binding domain comprising an amino acid sequence at least 40%, 45%, 50%, 55%, 60%, 65%, 70%, 75%, 80%, 85%, 90%, 91%, 92%, 93%, 94%, 95%, 96%, 97%, 98%, 99%, or 100% identical the amino acid sequence selected from the group consisting of SEQ ID NOS: 27399-27403.

156. The composition of any one of claims 110-155, wherein the first cage polypeptide, the second cage polypeptide, and/or the decoy cage polypeptide comprise an amino acid sequence at least 40%, 45%, 50%, 55%, 60%, 65%, 70%, 75%, 80%, 85%, 90% 91%, 92%, 93%, 94%, 95%, %, 97%, 98%, 99%, or 100% identical to the amino acid sequence selected from the group consisting of SEQ ID NOS; 27404-27446.

157. The composition of any one of claims 110-156, wherein the first key polypeptide and/or the second key polypeptide comprise an amino acid sequence at least 40%, 45%, 50%, 55%, 60%, 65%, 70%, 75%, 80%, 85%, 90%, 91%, 92%, 93%, 94%, 95%, 96%, 97%, 98%, 99%, or 100% identical to the amino acid sequence selected from the group consisting of SEQ ID NOS: 27448-27459.

158. A method of targeting an effector to a cell comprising contacting a biological sample containing cells with the compositions of claims 110-157.

159. The method of claim 158, further comprising contacting the cell with the effector.

160. A method for cell targeting, comprising
(a) contacting a biological sample containing cells with
(i) a cage polypeptide comprising (i) a structural region, (ii) a latch region further comprising one or more bioactive peptides, and (iii) a first binding domain that targets a cell of interest, wherein the structural region interacts with the latch region to prevent activity of the one or more bioactive peptides; and
(ii) a key polypeptide comprising a second binding domain that targets the cell of interest, wherein the first binding domain and the second binding domain bind to (i) different moieties on the surface of the same cell, (ii) the same moiety on the surface of the same ccl, (iii) different moieties at the synapse between two cells that are in contact, or (iv) the same moiety at the synapse between two cells that are in contact;
wherein the contacting occurs for a time and under conditions to promote binding of the cage polypeptide and the key polypeptide to the cell of interest, and to promote binding of the key polypeptide to the cage structural region to displace the latch region and activate the one or more bioactive peptides only when the cage polypeptide and the key polypeptide are co-localized to the cell of interest;
(b) contacting the biological sample with one or more effector(s) under conditions to promote binding of the one or more effectors to the one or more activated bioactive peptides to produce an effector-bioactive peptide complex; and
(c) optionally detecting the effector-bioactive peptide complex, wherein the effector-bioactive peptide complex provides a measure of the cell of interest in the biological sample.

161. The method of claim 160, wherein the detecting step is carried out.

162. The method of claim 160 or 161, wherein the method comprises the use of the compositions of any one of claims 110-157.

163. The method of any one of claims 158-162, wherein the method comprises the use of AND, OR, and/or NOT logic, using any embodiment or combination of embodiments disclosed herein.

164. The method of any one of claims 158-163, wherein the method comprises use of AND logic.

165. The method of claim 164, wherein the method comprises use of the composition of any one of claims 110-112 or 123-125, or claims depending therefrom.

166. The method of any one of claims 158-165, wherein the method comprises use of OR logic.

167. The method of claim 166, wherein the method comprises use of the composition of any one of claims 113-118 or 126-131, or claims depending therefrom.

168. The method of any one of claims 158-167, wherein the method comprises use of NOT logic.

169. The method of claim 168, wherein the method comprises use of the composition of any one of claims 119-121 and 132-144, or claims depending therefrom.

170. A non-naturally occurring polypeptide comprising:
(a) a helical bundle, comprising between 2 and 7 alpha-helices; and
(b) one or more binding domain;
wherein the helical bundle and the one or more binding domain are not both present in a naturally occurring polypeptide.

171. The polypeptide of claim 170, further comprising:
(c) an amino acid inker connecting adjacent alpha helices.

172. The polypeptide of claim 170 or 171, wherein one or more of the binding domains comprise cell surface protein binding polypeptides.

173. The polypeptide of any one of claims 170-172, wherein each helix is independently 18-60, 18-55, 18-50, 18-45, 22-60, 22-55, 22-50, 22-45, 25-60, 25-55, 25-50, 25-45, 28-60, 28-55, 28-50, 28-45, 32-60, 32-55, 32-50, 32-45, 35-60, 35-55, 35-50, 35-45, 38-60, 38-55, 38-50, 38-45, 40-60, 40-58, 40-55, 40-50, or 40-45 amino acids in length.

174. The polypeptide of any one of claims 170-173, wherein each amino acid linker is independently between 3-10, 4-10, 5-10, 6-10, 7-10, 8-10, 9-10, 2-9, 3-9, 4-9, 5-9, 6-9, 7-9, 8-9, 2-8, 3-8, 4-8, 5-8, 6-8, 7-8, 2-7, 3-7, 4-7, 5-7, 6-7, 2-6, 3-6, 4-6, 5-6, 2-5, 3-5, 4-5, 2-4, 3-4, 2-3, or 2, 3, 4, 5, 6, 7, 9, 9, or 10 amino acids in length, not including any further functional sequences that may be fused to the linker.

175. The polypeptide of any one of claims 170 to 174, wherein the helical bundle is linked to the one or more binding domains by a linker.

176. The polypeptide of claim 175, wherein the linker comprises a polypeptide linker or a non-polypeptide linker.

177. A non-naturally occurring polypeptide comprising
(a) a polypeptide comprising an amino acid sequence at last 40%, 45%, 50%, 55%, 60%, 65%, 70%, 75%, 80%, 85%, 90%, 91%, 92%, 93%, 94%, 95%, 96%, 97%, 98%, 99%, or 100% identical to the amino acid sequence of a cage polypeptide disclosed herein, or selected from the group consisting of SEQ ID NOS: 27359-27392, 1-49, 51-52, 54-59, 61, 65, 67-14317, 27094-27117, 27120-27125, 27278-27321 not including optional amino acid residues; or cage polypeptides listed in Table 7, Table 8, or Table 9, wherein the N-terminal and/or C-terminal 60 amino acids of the polypeptides are optional; and
(b) one or more binding domains.

178. A non-naturally occurring polypeptide comprising
(a) a polypeptide comprising an amino acid sequence at least 40%, 45%, 50%, 55%, 60%, 65%, 70%, 75%, 80%, 85%, 90%, 91%, 92%, 93%, 94%, 95%, 6%, 97%, 98%, 99%, or 100% identical to the amino acid sequence of a cage polypeptide disclosed herein, or selected from the group consisting of SEQ ID NOS: 27359-27392, SEQ ID NOS: 1-49, 51-52, 54-59.61, 65, 67-14317, 27094-27117, 27120-27125, 27278-27321, not including amino acid residues in the latch region; and
(b) one or more binding domains.

179. The polypeptide of claim 177 or 178, wherein the polypeptide has an amino acid sequence at least 40%, 45%, 50%, 55%, 60%, 65%, 70%, 75%, 80%, 85%, 90%, 91%, 92%, 93%, 94%, 95%, 96%, 97%, 98%, 99%, or 100% identical to the amino acid sequence of a cage polypeptide disclosed herein, or selected from the group consisting of SEQ ID NOS: 27359-27392, 1-49, 51-52, 54-59, 61, 65, 67-14317, 27094-27117, 27120-27125, 27278-27321, or cage polypeptides listed in Table 7, Table 8, or Table 9, including any optional amino acid residues.

180. The non-naturally occurring polypeptide of any one of claims 110-119, comprising:
(a) a polypeptide having at least 40%, 45%, 50%, 55%, 60%, 65%, 70%, 75%, 80%, 85%, 90%, 91%, 92%, 93%, 94%, 95%, 96%, 97%, 98%, 99%, or 100% sequence identity along its length to the amino acid sequence of a cage polypeptide disclosed selected from the group consisting of SEQ ID NOS: 27359-27392, not including optional amino acid residues, and
(b) one or more binding domains.

181. The polypeptide of claim 180, wherein the polypeptide has at least 40%, 45%, 50%, 55%, 60%, 65%, 70%, 75%, 80%, 85%, 90%, 91%, 92%, 93%, 94%, 95%, %, 97%, 98%, 99%, or 100% sequence identity along its length to the amino acid sequence of a cage polypeptide disclosed selected from the group consisting of SEQ ID NOS: 27359-27392, including optional residues.

182. The polypeptide of any one of claims 170-181, wherein an interface between a latch region and a structural region of the polypeptide includes a hydrophobic amino acid to polar amino acid residue ratio of between 1:1 and 10:1.

183. The polypeptide of any one of claims 170-182, wherein 1, 2, 3, or more large hydrophobic residues in the latch region, including but not limited to isoleucine, valine, or leucine, are mutated to serine, threonine, or a smaller hydrophobic amino acid residue.

184. The polypeptide of any one of claims 170-183, wherein 1, 2, 3, or more large hydrophobic residues in the structural region, including but not limited to isoleucine, valine or leucine, are mutated to serine, threonine, or a smaller hydrophobic amino acid residue.

185. The polypeptide of any one of claims 170-184, comprising buried amino acid residues at the interface having side chains comprising nitrogen or oxygen atoms involved in hydrogen bonding.

186. A non-naturally occurring polypeptide, comprising an amino acid sequence at least 70%, 75%, 80%, 85%, 90%, 91%, 92%, 93%, 94%, 95%, 96%, 97%, 98%, 99%, or 100% identical to de amino acid sequence selected from the group consisting of SEQ ID NOS: 27359-27392, including optional amino acid residues.

187. The non-naturally occurring polypeptide of claim 186, further comprising one or more binding domains.

188. The polypeptide of claim 187, further comprising an amino acid linker connecting the polypeptide and the one or more binding domains.

189. The polypeptide of any one of claims 186-188, wherein an interface between a latch region and a structural region of the polypeptide includes a hydrophobic amino acid to polar amino acid residue ratio of between 1:1 and 10:1.

190. The polypeptide of any one of claims 186-189, wherein 1, 2, 3, or more large hydrophobic residues in the latch region, including but not limited to isoleucine, valine, or leucine, are mutated to serine, threonine, or a smaller hydrophobic amino acid residue.

191. The polypeptide of any one of claims 146-190, wherein 1, 2, 3, or more large hydrophobic residues in the structural region, including but not limited to isoleucine, valine, or leucine, are mutated to serine, threonine, or a smaller hydrophobic amino acid residue.

192. The polypeptide of any one of claims 186-191, comprising buried amino acid residues at the interface having side chains comprising nitrogen or oxygen atoms involved in hydrogen bonding.

193. The polypeptide of any one of claims 170-192, wherein one or more of the binding domains comprise cell surface protein binding polypeptides.

194. The polypeptide of claim 193, wherein the cell surface protein binding polypeptides are on a tumor cell.

195. The polypeptide of claim 194, wherein the cell surface protein binding polypeptides are oncoproteins.

196. The polypeptide of any one of claims 170-195, wherein the polypeptide comprises one or more bioactive peptides in at least one of the alpha helices, wherein the one or more bioactive peptides are capable of selectively binding to a defined target.

197. The polypeptide of claim 196, wherein the one or more bioactive peptides may comprise one or more bioactive peptide selected from the group consisting of SEQ ID NO:60, 62-64, 66, 27052, 27053, and 27059-27093.

198. A non-naturally occurring key polypeptide comprising a key domain and one or more binding domains, wherein the key polypeptide is capable of specifically binding to the polypeptide of any one of claims 179-197.

199. The polypeptide of claim 198, wherein the key specifically binds to the cage polypeptide and activates one or more bioactive peptides.

200. The polypeptide of claim 198 or 199, wherein
(a) the key polypeptide comprised an amino acid sequence at least 40%, 45%, 50%, 55%, 60%, 65%, 70%, 75%, 80%, 85%, 90%, 91%, 92%, 93%, 94%, 95%, 96%, 97%, 98%, 99%, or 100% identical to the amino acid sequence of a key polypeptide disclosed herein, (not including optional amino acid residues), or to the amino acid sequence of SEQ ID NOS: 27393-27398, 14318-26601, 26602-27015.27016-27050, 27322-27358, and key polypeptides listed in Table 7, Table 8, and/or Table 9, and; and
(b) one or more binding domains.

201. The polypeptide of any one of claims 198-200, wherein
(a) the key polypeptide comprises and amino acid sequence at least 40%, 45%, 50%, 55%, 60%, 65%, 70%, 75%, 80%, 85%, 90%, 91%, 92%, 93%, 94%, 95%, 96%, 97%, 98%, 99%, or 100% identical to the amino acid sequence selected from the group consisting of SEQ ID NOS: 27393-27398; and
(b) one or more binding domains.

202. The polypeptide of any one of claims 198-200, wherein
(a) the key polypeptide comprises an amino acid sequence at least 40% 45%, 50%, 55%, 60%, 65%, 70%, 75%, 80%, 85%, 90%, 91%, 92%, 93%, 94%, 95%, 96%, 97%, 98%, 99%, or 100% identical to the amino acid sequence selected from the group consisting of SEQ ID NOS: 27394.27395; and
(b) one or more binding domains.

203. The polypeptide of any one of claims 198-202, wherein 1, 2, 3, 4, 5, 6, 7, 8, 9, 10, 11, 12, 13, 14, 15, 16, 17, or 18 amino acid residues at the N-terminus and/or the C-terminus of the polypeptide are deleted.

204. A non-naturally occurring polypeptide, comprising an amino acid sequence at least 70%, 75%, 80%, 85%, 90%, 91%, 92%, 93%, 94%, 95%, 96%, 97%, 98%, 99%, or 100% identical to the amino acid sequence selected from the group consisting of SEQ ID NOS: 27393-27398, including optional amino acid residues.

205. The non-naturally occurring polypeptide of claim 204, comprising an amino acid sequence at least 70%, 75%, 80%, 85%, 90%, 91%, 92%, 93%, 94%, 95%, 96%, 97%, 98%, 99%, or 100% identical to the amino acid sequence selected from the group consisting of SEQ ID NOS: 27394-27395.

206. The non-naturally occurring polypeptide of claim 204 or 205, further comprising one or more binding domains.

207. The polypeptide of claim 206, further comprising an amino acid linker connecting the polypeptide and the one or more binding domains.

208. The polypeptide of any one of claims 205-207, wherein 1, 2, 3, or more residues at the N-terminus and/or the C-terminus of the polypeptide are deleted.

209. The polypeptide of claim 170-208, wherein one or more of the binding domains comprise cell surface protein binding polypeptides.

210. The polypeptide of any one of claims 170-209, wherein the one or more binding domains are selected from the non-limiting group comprising an antigen-binding polypeptide directed against a cell surface moiety to be bound, including but not limited to Fab, F(ab′)₂, Fab, Fv, rIgG, recombinant single chain Fv fragments (scFv), V_{H} single domains, bivalent or bispecific molecules, diabodies, triabodies, and tetrabodies; DARPins; nanobody; affibody; monobody; adnectin; alphabody; Albumin-binding domain; Adhiron; Affilin; Affimer; Affitin/Nanofitin; Anticalin; Armadillo repeat proteins; Atrimer/Tetranectin; Avimer/Maxibody; Centyrin; Fynomer; Kunitz domain; Obody/OB-fold; Pronectin; Repebody; and computationally designed proteins.

211. The polypeptide of any one of claims 170-210, wherein the cell surface protein binding domain binds to a cell surface protein on a cell selected from the non-limiting group comprising tumor cells, cancer cells, immune cells, leukocytes, lymphocytes, T cells, regulatory T cells, effector T cells, CD4+ effector T cells, CD8+ effector T cells, memory T cells, autoreactive T cells, exhausted T cells, natural killer T cells (NKT cells), B cells, dendritic cells, macrophages, NK cells, cardiac cells, lung cells, muscle cells, epithelial cells, pancreatic cells, skin cells, CNS cells, neurons, myocytes, skeletal muscle cells, smooth muscle cells, liver cells, kidney cells, bacterial cells, and yeast cells.

212. The polypeptide of any one of claims 170-211, wherein the cell surface protein binding domain binds to a cell surface protein selected from the non-limiting group comprising Her2, EGFR, EpCAM, B7-H3, ROR1, GD2, GPC2, αvβ6, Her3, L1CAM, BCMA, GPCR54d, EGFRvIII, CD20, CD22, CD3, CD4, CD5, CD8, CD19, CD27, CD28, CD30, CD33, CD48, IL3RA, platelet tissue factor, CLEC12A, CD52, TNFRSF1B, ADGRE2, ITGB5, CD96, CCR1, PTPRJ, CD70, LILRB2, LTB4R, TLR2, LILRA2, ITGAX, CR1, EMC10, EMB, DAGLB, P2RY13, LILRB3, LILRB4, SLC30A1, LILRA6, SLC6A6, SEMA4A, TAG72, FRα, PMSA, Mesothelin, LIV-1, CEA, MUC1, PD1, BLIMP1, CTLA4, LAG3, TIM3, TIGIT, CD39, Nectin-4, a cancer marker, a healthy tissue marker, and a cardiac marker.

213. The polypeptide of any one of claims 170-212, wherein the one or more binding domains comprise an amino acid sequence at least 40%, 45%, 50%, 55%, 60%, 65%, 70%, 75%, 80%, 85%, 90%, 91%, 92%, 93%, 94%, 95%, 96%, 97%, 98%, 99%, or 100% identical to the amino acid sequence selected from the group consisting of SEQ ID NOS: 27399-27403.

214. The polypeptide of any one of claims 170-197 and 209-213, wherein the polypeptide comprises an amino acid sequence at least 40%, 45%, 50%, 55%, 60%, 65%, 70%, 75%, 80%, 85%, 90%, 91%, 92%, 93%, 94%, 95%, 96%, 97%, 98%, 99%, or 100% identical to the amino acid sequence selected from the non-limiting group of SEQ ID NOS: 27404-27446.

215. The polypeptide of any one of claims 170-197 and 209-212, wherein the polypeptide comprises an amino acid sequence at least 40%, 45%, 50%, 55%, 60%, 65%, 70%, 73%, 80%, 85%, 90%, 91%, 92%, 93%, 94%, 95%, 96%, 97%, 98%, 99%, or 100% identical to the amino acid sequence selected from the non-limiting group of SEQ ID NOS: 27404-27446, including optional residues.

216. The polypeptide of any one of claims 198-208, wherein the polypeptide comprises an amino acid sequence at least 40%, 45%, 50%, 55%, 60%, 65%, 70%, 75%, 80%, 85%, 90%, 91%, 92%, 93%, 94%, 95%, 96%, 97%, 98%, 99%, or 100% identical to the amino acid sequence selected from the non-limiting group of SEQ ID NOS: 27448-27459.

217. The polypeptide of any one of claims 198-208, wherein the polypeptide comprises and amino acid sequence at least 40%, 45%, 50%, 55%, 60%, 65%, 70%, 75%, 80%, 85%, 90%, 91%, 92%, 93%, 94%, 95%, 96%, 97%, 98%, 99%, or 100% identical to the amino acid sequence selected from the non-limiting group of SEQ ID NOS: 27448-27459, including optional residues.

218. A nucleic acid encoding the polypeptide of any one of claims 170-217.

219. A vector, including but not limited to an expression vector, comprising the nucleic acid of claim 218 operatively linked to a promoter.

220. The vector of claim 219, wherein the vector a viral vector.

221. The vector of claim 220, wherein the viral vector comprises an adenoviral vector, a vaccinia viral vector, an AAV vector, a retroviral vector, a lentiviral vector, an alphaviral vector, or any combination thereof.

222. A cell comprising the polypeptide of any one of claims 170-217, the nucleic acid of claim 218 and/or the vector of claim 219-221, optionally wherein the nucleic acid and/or the expression vector are integrated into a cell chromosome, or optionally wherein the nucleic acid and/or the expression vector are episomal.

223. Use of the polypeptides, nucleic acids, expression vectors cells, and/or compositions of any one of claims 110-222 for any suitable purpose, including but not limited to those disclosed herein.
